United States Patent Application Publication US 2005/0244851 A1 - sequence listing, part 131

SEQ ID NO: 5112923 - DNA, 25 bp, Homo sapien
cccaggtaagtgaagcggtccctct

SEQ ID NO: 5112924 - DNA, 25 bp, Homo sapien
tcatccattgggacgtgacagtcca

SEQ ID NO: 5112925 - DNA, 25 bp, Homo sapien
tggaacctgggtcgactcaaccatg

SEQ ID NO: 5112926 - DNA, 25 bp, Homo sapien
ccatgtagccatagcagtgccagat

SEQ ID NO: 5112927 - DNA, 25 bp, Homo sapien
tctaacttggtttgttgtgaatatt

SEQ ID NO: 5112928 - DNA, 25 bp, Homo sapien
taattattacattcactgggttagt

SEQ ID NO: 5112929 - DNA, 25 bp, Homo sapien
tatgtgtactcggttgtaatccact

SEQ ID NO: 5112930 - DNA, 25 bp, Homo sapien
tgggttagtgcaactatcacatttg

SEQ ID NO: 5112931 - DNA, 25 bp, Homo sapien
gatttcagagccgaaagttccgcgg

SEQ ID NO: 5112932 - DNA, 25 bp, Homo sapien
catggtcagcccaaacgcctttcaa

SEQ ID NO: 5112933 - DNA, 25 bp, Homo sapien
taaagtaggcccgttgtagcaggaa

SEQ ID NO: 5112934 - DNA, 25 bp, Homo sapien
tgcgcccagcgcaacttggatttca

SEQ ID NO: 5112935 - DNA, 25 bp, Homo sapien
gcactcgggccgacccgtggctttg

SEQ ID NO: 5112936 - DNA, 25 bp, Homo sapien
gctccagggtccgtcgacgccagac

SEQ ID NO: 5112937 - DNA, 25 bp, Homo sapien
agggtccgtcgacgccagacctgcg

SEQ ID NO: 5112938 - DNA, 25 bp, Homo sapien
cgtggctttgccgacttccgtcaga

SEQ ID NO: 5112939 - DNA, 25 bp, Homo sapien
gaactttgatgccaatccctcttga

SEQ ID NO: 5112940 - DNA, 25 bp, Homo sapien
agtgaactttgatgccaatccctct

SEQ ID NO: 5112941 - DNA, 25 bp, Homo sapien
ctttgatgccaatccctcttgaatc

SEQ ID NO: 5112942 - DNA, 25 bp, Homo sapien
agaagtgaactttgatgccaatccc

SEQ ID NO: 5112943 - DNA, 25 bp, Homo sapien
ttcaggatcatcattacccatgtcg

SEQ ID NO: 5112944 - DNA, 25 bp, Homo sapien
tcattacccatgtcggacacttcct

SEQ ID NO: 5112945 - DNA, 25 bp, Homo sapien
tcagatttgcttgagttttcagctc

SEQ ID NO: 5112946 - DNA, 25 bp, Homo sapien
ggtcctccttgtcatcagcctctat

SEQ ID NO: 5112947 - DNA, 25 bp, Homo sapien
ttctttgtttgaatccagctcatca

SEQ ID NO: 5112948 - DNA, 25 bp, Homo sapien
atcttctttgtttgaatccagctca

SEQ ID NO: 5112949 - DNA, 25 bp, Homo sapien
tcttctttgtttgaatccagctcat

SEQ ID NO: 5112950 - DNA, 25 bp, Homo sapien
cttctttgtttgaatccagctcatc

SEQ ID NO: 5112951 - DNA, 25 bp, Homo sapien
tcagtttccgcatcatctggtaaag

SEQ ID NO: 5112952 - DNA, 25 bp, Homo sapien
tctggtaaagcaaaggtcactcttt

SEQ ID NO: 5112953 - DNA, 25 bp, Homo sapien
cctgtatcttcagtttccgcatcat

SEQ ID NO: 5112954 - DNA, 25 bp, Homo sapien
tcattttcttgaaggtcatcatctt

SEQ ID NO: 5112955 - DNA, 25 bp, Homo sapien
ttttgtagttacactggcctatgcg

SEQ ID NO: 5112956 - DNA, 25 bp, Homo sapien
tggtaattgtaatactggacatctt

SEQ ID NO: 5112957 - DNA, 25 bp, Homo sapien
ggcctatgcgtctaaaagaatgtta

SEQ ID NO: 5112958 - DNA, 25 bp, Homo sapien
aaagaatgttaatcaacagtggtaa

SEQ ID NO: 5112959 - DNA, 25 bp, Homo sapien
caagtgatctatctattcgcaagtc

SEQ ID NO: 5112960 - DNA, 25 bp, Homo sapien
tcgatgacttcctatttctgctgcc

SEQ ID NO: 5112961 - DNA, 25 bp, Homo sapien
tgggaaagcaagaaacgtactgttc

SEQ ID NO: 5112962 - DNA, 25 bp, Homo sapien
taatatactaaacgcccccagaagc

SEQ ID NO: 5112963 - DNA, 25 bp, Homo sapien
agctgccacggctttttttctaaca

SEQ ID NO: 5112964 - DNA, 25 bp, Homo sapien
tgtcacttccccctgaagctgccac

SEQ ID NO: 5112965 - DNA, 25 bp, Homo sapien
ttccccctgaagctgccacggcttt

SEQ ID NO: 5112966 - DNA, 25 bp, Homo sapien
ttctaaagatgcaattttttcattc

SEQ ID NO: 5112967 - DNA, 25 bp, Homo sapien
ccaattgaatagcatataggtgttc

SEQ ID NO: 5112968 - DNA, 25 bp, Homo sapien
cctagttcttagacgatatctgcaa

SEQ ID NO: 5112969 - DNA, 25 bp, Homo sapien
ccatgagattggcaacttacttaaa

SEQ ID NO: 5112970 - DNA, 25 bp, Homo sapien
tggaccatgacaggatgcaagcctt

SEQ ID NO: 5112971 - DNA, 25 bp, Homo sapien
ttatcctctgtttaatgatatcttc

SEQ ID NO: 5112972 - DNA, 25 bp, Homo sapien
atgatatcttccagttgaagggtgg

SEQ ID NO: 5112973 - DNA, 25 bp, Homo sapien
ctcttatcctctgtttaatgatatc

SEQ ID NO: 5112974 - DNA, 25 bp, Homo sapien
tatcttccagttgaagggtggtttc

SEQ ID NO: 5112975 - DNA, 25 bp, Homo sapien
tctcatggtctaaggttaaacgctt

SEQ ID NO: 5112976 - DNA, 25 bp, Homo sapien
gagtttgatgtactcctgttcataa

SEQ ID NO: 5112977 - DNA, 25 bp, Homo sapien
aatttactcttctcatggtctaagg

SEQ ID NO: 5112978 - DNA, 25 bp, Homo sapien
ttcagcaaggctcaatttactcttc

SEQ ID NO: 5112979 - DNA, 25 bp, Homo sapien
tcaacaatgtcaaactaagcgactt

SEQ ID NO: 5112980 - DNA, 25 bp, Homo sapien
gcattttaggagctacagtaaccat

SEQ ID NO: 5112981 - DNA, 25 bp, Homo sapien
ttaaaagcagcagtaccatgagggt

SEQ ID NO: 5112982 - DNA, 25 bp, Homo sapien
gagggttccagcacctaccagagat

SEQ ID NO: 5112983 - DNA, 25 bp, Homo sapien
tagggataaagtggaagtttgagag

SEQ ID NO: 5112984 - DNA, 25 bp, Homo sapien
taagaagagggaatccatcatcttc

SEQ ID NO: 5112985 - DNA, 25 bp, Homo sapien
tgagagggcatccaattttaagaag

SEQ ID NO: 5112986 - DNA, 25 bp, Homo sapien
catcttctgaatttctacatgttct

SEQ ID NO: 5112987 - DNA, 25 bp, Homo sapien
acacaactttaatctctggtacagg

SEQ ID NO: 5112988 - DNA, 25 bp, Homo sapien
ggctggcagatttgacacaacttta

SEQ ID NO: 5112989 - DNA, 25 bp, Homo sapien
gggctacttcctccatggttatggc

SEQ ID NO: 5112990 - DNA, 25 bp, Homo sapien
agctgcatcactaacactcactggg

SEQ ID NO: 5112991 - DNA, 25 bp, Homo sapien
aacaactaggaaactggaatggaag

SEQ ID NO: 5112992 - DNA, 25 bp, Homo sapien
ttcattcatcaagtttaacaactag

SEQ ID NO: 5112993 - DNA, 25 bp, Homo sapien
tagccagcaagcaggctgtgcatct

SEQ ID NO: 5112994 - DNA, 25 bp, Homo sapien
gtagccagcaagcaggctgtgcatc

SEQ ID NO: 5112995 - DNA, 25 bp, Homo sapien
gccagttttggtcagctgttttaac

SEQ ID NO: 5112996 - DNA, 25 bp, Homo sapien
tttccctgcttgatctacactgctc

SEQ ID NO: 5112997 - DNA, 25 bp, Homo sapien
cttttcaagcagttttctccgcttc

SEQ ID NO: 5112998 - DNA, 25 bp, Homo sapien
tctccgaagctactgttttgctgta

SEQ ID NO: 5112999 - DNA, 25 bp, Homo sapien
catgcatctctatcccgcaggtggg

SEQ ID NO: 5113000 - DNA, 25 bp, Homo sapien
caaaggtccccttgagcagttttct

SEQ ID NO: 5113001 - DNA, 25 bp, Homo sapien
gacccaggttattgtgaggacccta

SEQ ID NO: 5113002 - DNA, 25 bp, Homo sapien
ttaaaggttgcgattccagccagtc

SEQ ID NO: 5113003 - DNA, 25 bp, Homo sapien
ttctttgcatcattgatttgcattt

SEQ ID NO: 5113004 - DNA, 25 bp, Homo sapien
gaaaagaatgcttgagaggacttta

SEQ ID NO: 5113005 - DNA, 25 bp, Homo sapien
tgaacagaaatatcctgtcttttct

SEQ ID NO: 5113006 - DNA, 25 bp, Homo sapien
tgagaggactttaaggccttgtctt

SEQ ID NO: 5113007 - DNA, 25 bp, Homo sapien
cacaatataagcttacacattaata

SEQ ID NO: 5113008 - DNA, 25 bp, Homo sapien
aacaatgacacaatataagcttaca

SEQ ID NO: 5113009 - DNA, 25 bp, Homo sapien
aacagaacaatgacacaatataagc

SEQ ID NO: 5113010 - DNA, 25 bp, Homo sapien
caatgacacaatataagcttacaca

SEQ ID NO: 5113011 - DNA, 25 bp, Homo sapien
aagagcacagcaggatcagctcagg

SEQ ID NO: 5113012 - DNA, 25 bp, Homo sapien
cctgggccacggcaagagcacagca

SEQ ID NO: 5113013 - DNA, 25 bp, Homo sapien
tggcctggccttcacacaggcctgg

SEQ ID NO: 5113014 - DNA, 25 bp, Homo sapien
gcccatgtggacaagctggcctggc

SEQ ID NO: 5113015 - DNA, 25 bp, Homo sapien
cttcttgcttaacgggtgagcccag

SEQ ID NO: 5113016 - DNA, 25 bp, Homo sapien
ggtgagggtctggacagtgcgcgtg

SEQ ID NO: 5113017 - DNA, 25 bp, Homo sapien
ccaggggccattgtcaggctctcca

SEQ ID NO: 5113018 - DNA, 25 bp, Homo sapien
tccatatgtggacgcgtgcagaggt

SEQ ID NO: 5113019 - DNA, 25 bp, Homo sapien
gacagtgcgcgtggctgctgcaggc

SEQ ID NO: 5113020 - DNA, 25 bp, Homo sapien
tcatgaactgcttcagccagccctt

SEQ ID NO: 5113021 - DNA, 25 bp, Homo sapien
atgaactgcttcagccagcccttgg

SEQ ID NO: 5113022 - DNA, 25 bp, Homo sapien
cttcatgaactgcttcagccagccc

SEQ ID NO: 5113023 - DNA, 25 bp, Homo sapien
ccttggggcacctgtggtccctggc

SEQ ID NO: 5113024 - DNA, 25 bp, Homo sapien
gtaactggtggtcaagatgagggag

SEQ ID NO: 5113025 - DNA, 25 bp, Homo sapien
tagagcccgtaactggtggtcaaga

SEQ ID NO: 5113026 - DNA, 25 bp, Homo sapien
gagtccctcggggtcagctgaatgc

SEQ ID NO: 5113027 - DNA, 25 bp, Homo sapien
tggtcaagatgagggagagtccctc

SEQ ID NO: 5113028 - DNA, 25 bp, Homo sapien
gaaggcaatggcattggcgctatag

SEQ ID NO: 5113029 - DNA, 25 bp, Homo sapien
gagcggaggagtgcctcagcttcat

SEQ ID NO: 5113030 - DNA, 25 bp, Homo sapien
tggcattggcgctatagtccatggg

SEQ ID NO: 5113031 - DNA, 25 bp, Homo sapien
agacccagtgtccactgagcttgga

SEQ ID NO: 5113032 - DNA, 25 bp, Homo sapien
tcccctaatcattacttggtagtta

SEQ ID NO: 5113033 - DNA, 25 bp, Homo sapien
cccctaatcattacttggtagttat

SEQ ID NO: 5113034 - DNA, 25 bp, Homo sapien
ccctaatcattacttggtagttatt

SEQ ID NO: 5113035 - DNA, 25 bp, Homo sapien
tccctcagtggtgtagctgtaacta

SEQ ID NO: 5113036 - DNA, 25 bp, Homo sapien
tatccctcccaataagatccttcat

SEQ ID NO: 5113037 - DNA, 25 bp, Homo sapien
ctttctggacagttcaaatcaatgg

SEQ ID NO: 5113038 - DNA, 25 bp, Homo sapien
tccaacttcctgttgtctaaacgga

SEQ ID NO: 5113039 - DNA, 25 bp, Homo sapien
tgaaccatcaggaacccaggaatct

SEQ ID NO: 5113040 - DNA, 25 bp, Homo sapien
caaaccccaggtagacaaatgacag

SEQ ID NO: 5113041 - DNA, 25 bp, Homo sapien
caggaatctacccaactgtgaggag

SEQ ID NO: 5113042 - DNA, 25 bp, Homo sapien
gaatcttcttgtactagggctgctg

SEQ ID NO: 5113043 - DNA, 25 bp, Homo sapien
ccagaaacgatcctaaggaaaggct

SEQ ID NO: 5113044 - DNA, 25 bp, Homo sapien
agtttctgacaataatagttgagtt

SEQ ID NO: 5113045 - DNA, 25 bp, Homo sapien
cacataagggtgaaaccagaaacga

SEQ ID NO: 5113046 - DNA, 25 bp, Homo sapien
ttcaaggatacagcctaggcctggg

SEQ ID NO: 5113047 - DNA, 25 bp, Homo sapien
gggtctcctgcaatgaactcggata

SEQ ID NO: 5113048 - DNA, 25 bp, Homo sapien
ccttcatcagaagtgttccgcggtg

SEQ ID NO: 5113049 - DNA, 25 bp, Homo sapien
aactggaatttgaggctcagctgcc

SEQ ID NO: 5113050 - DNA, 25 bp, Homo sapien
aactcggataaccaatgtgctgtca

SEQ ID NO: 5113051 - DNA, 25 bp, Homo sapien
ctacgcgcctcacacgccttgcacg

SEQ ID NO: 5113052 - DNA, 25 bp, Homo sapien
acacgccttgcacgccgccgcttga

SEQ ID NO: 5113053 - DNA, 25 bp, Homo sapien
gcgcggctctctacgcgcctcacac

SEQ ID NO: 5113054 - DNA, 25 bp, Homo sapien
cagacggcgcgcgcggctctctacg

SEQ ID NO: 5113055 - DNA, 25 bp, Homo sapien
aaaacctgcggtgccccggcagtcg

SEQ ID NO: 5113056 - DNA, 25 bp, Homo sapien
ccggcagtcgcggaatccgggctct

SEQ ID NO: 5113057 - DNA, 25 bp, Homo sapien
tggtattcccggcaggaacgccgtc

SEQ ID NO: 5113058 - DNA, 25 bp, Homo sapien
cgcttcagcgagtccaaaacctgcg

SEQ ID NO: 5113059 - DNA, 25 bp, Homo sapien
caacttagcgctaaagaccggtagc

SEQ ID NO: 5113060 - DNA, 25 bp, Homo sapien
ccatgcaacttagcgctaaagaccg

SEQ ID NO: 5113061 - DNA, 25 bp, Homo sapien
ccagcccatgcaacttagcgctaaa

SEQ ID NO: 5113062 - DNA, 25 bp, Homo sapien
tattcgctgaccgactggcacacca

SEQ ID NO: 5113063 - DNA, 25 bp, Homo sapien
tagagagtctttaaggtctacagtt

SEQ ID NO: 5113064 - DNA, 25 bp, Homo sapien
tgatatccaatatggctagccttcc

SEQ ID NO: 5113065 - DNA, 25 bp, Homo sapien
catgaccggccatattaagtcttga

SEQ ID NO: 5113066 - DNA, 25 bp, Homo sapien
ccactgttcaagattgtctgggcta

SEQ ID NO: 5113067 - DNA, 25 bp, Homo sapien
gggactgcattgactcggtgaatca

SEQ ID NO: 5113068 - DNA, 25 bp, Homo sapien
catcagggaatgtgtgattgcttcc

SEQ ID NO: 5113069 - DNA, 25 bp, Homo sapien
gggaatgtgtgattgcttccaaatc

SEQ ID NO: 5113070 - DNA, 25 bp, Homo sapien
cagggaatgtgtgattgcttccaaa

SEQ ID NO: 5113071 - DNA, 25 bp, Homo sapien
ccatcagggaatgtgtgattgcttc

SEQ ID NO: 5113072 - DNA, 25 bp, Homo sapien
gcaatatatttgagcagccatttca

SEQ ID NO: 5113073 - DNA, 25 bp, Homo sapien
gaaaagcagtggcagtaagtggtcc

SEQ ID NO: 5113074 - DNA, 25 bp, Homo sapien
caaggaactgctatcaatcaataag

SEQ ID NO: 5113075 - DNA, 25 bp, Homo sapien
gctgctctaaattctagaaacacaa

SEQ ID NO: 5113076 - DNA, 25 bp, Homo sapien
cagacaacaagcattgagcagctct

SEQ ID NO: 5113077 - DNA, 25 bp, Homo sapien
ggccagacaacaagcattgagcagc

SEQ ID NO: 5113078 - DNA, 25 bp, Homo sapien
ccactctgttgtctgattggccaga

SEQ ID NO: 5113079 - DNA, 25 bp, Homo sapien
ctgcctgctcggcacagtcacagct

SEQ ID NO: 5113080 - DNA, 25 bp, Homo sapien
ttatcggattttcatttcaaaccaa

SEQ ID NO: 5113081 - DNA, 25 bp, Homo sapien
tatcggattttcatttcaaaccaaa

SEQ ID NO: 5113082 - DNA, 25 bp, Homo sapien
tcagcctccagtctcgacgccgaaa

SEQ ID NO: 5113083 - DNA, 25 bp, Homo sapien
gactaacagctggatcccatccgcg

SEQ ID NO: 5113084 - DNA, 25 bp, Homo sapien
cacacagtttagcactcagcctcca

SEQ ID NO: 5113085 - DNA, 25 bp, Homo sapien
aaacgctaccgcctccaaagagctg

SEQ ID NO: 5113086 - DNA, 25 bp, Homo sapien
gagctcgttggaaaaagtacttgaa

SEQ ID NO: 5113087 - DNA, 25 bp, Homo sapien
agcaagcacaacatccctgaaaaaa

SEQ ID NO: 5113088 - DNA, 25 bp, Homo sapien
taaatcgctggatcctggtgacaag

SEQ ID NO: 5113089 - DNA, 25 bp, Homo sapien
taattgtaaatctgaaccagcaagc

SEQ ID NO: 5113090 - DNA, 25 bp, Homo sapien
ctatatacttattttccttccattt

SEQ ID NO: 5113091 - DNA, 25 bp, Homo sapien
tccattttaattttccatcacaaat

SEQ ID NO: 5113092 - DNA, 25 bp, Homo sapien
tattctcttctcatcttctatatac

SEQ ID NO: 5113093 - DNA, 25 bp, Homo sapien
ctcatcttctatatacttattttcc

SEQ ID NO: 5113094 - DNA, 25 bp, Homo sapien
taaccgactgtggaaataagatagg

SEQ ID NO: 5113095 - DNA, 25 bp, Homo sapien
cagggaaccatggtggccttagaga

SEQ ID NO: 5113096 - DNA, 25 bp, Homo sapien
aaagttggcaactttaactcagcag

SEQ ID NO: 5113097 - DNA, 25 bp, Homo sapien
tatatgttccttagggtaaccatga

SEQ ID NO: 5113098 - DNA, 25 bp, Homo sapien
tgaacattagttggatcctgactcc

SEQ ID NO: 5113099 - DNA, 25 bp, Homo sapien
tactgttgttttacgtgtaatatgc

SEQ ID NO: 5113100 - DNA, 25 bp, Homo sapien
aacaacctttaccacatatgcatgg

SEQ ID NO: 5113101 - DNA, 25 bp, Homo sapien
gacttgagagttatcaatcgtaacc

SEQ ID NO: 5113102 - DNA, 25 bp, Homo sapien
tggttggagtgcaagggcgcaaatc

SEQ ID NO: 5113103 - DNA, 25 bp, Homo sapien
agtgcaagggcgcaaatctcggctc

SEQ ID NO: 5113104 - DNA, 25 bp, Homo sapien
cctggttggagtgcaagggcgcaaa

SEQ ID NO: 5113105 - DNA, 25 bp, Homo sapien
ttggagtgcaagggcgcaaatctcg

SEQ ID NO: 5113106 - DNA, 25 bp, Homo sapien
tcattgaagttggtaactatgactg

SEQ ID NO: 5113107 - DNA, 25 bp, Homo sapien
gataaaggaccacaatatatgcaac

SEQ ID NO: 5113108 - DNA, 25 bp, Homo sapien
cattcaaatatagttaatggcacaa

SEQ ID NO: 5113109 - DNA, 25 bp, Homo sapien
aaaaccatatatgcaggagacaggg

SEQ ID NO: 5113110 - DNA, 25 bp, Homo sapien
ccaagaggaaacaccttatccaagc

SEQ ID NO: 5113111 - DNA, 25 bp, Homo sapien
cagtcccaattgtttctgaagccta

SEQ ID NO: 5113112 - DNA, 25 bp, Homo sapien
aaagccactggaacagaggtaagca

SEQ ID NO: 5113113 - DNA, 25 bp, Homo sapien
gaaggtattcaatatccagtcccaa

SEQ ID NO: 5113114 - DNA, 25 bp, Homo sapien
tgccacaagtgttgacagagagtac

SEQ ID NO: 5113115 - DNA, 25 bp, Homo sapien
caagtaacaattctgagggtgccac

SEQ ID NO: 5113116 - DNA, 25 bp, Homo sapien
cgttaaaatgccaaaatgtggtgcc

SEQ ID NO: 5113117 - DNA, 25 bp, Homo sapien
cagagagtaccatgtttcacgttaa

SEQ ID NO: 5113118 - DNA, 25 bp, Homo sapien
aaacgaagagttgagatcagggttc

SEQ ID NO: 5113119 - DNA, 25 bp, Homo sapien
tcctagttatgtaagtaatgtgtgc

SEQ ID NO: 5113120 - DNA, 25 bp, Homo sapien
tagtgacaaaacatgctgaaccttt

SEQ ID NO: 5113121 - DNA, 25 bp, Homo sapien
actttagtgtacgttcatgcacgca

SEQ ID NO: 5113122 - DNA, 25 bp, Homo sapien
ccaccaaacaaattaagacagccat

SEQ ID NO: 5113123 - DNA, 25 bp, Homo sapien
tcctttaaccccaggagctctggtc

SEQ ID NO: 5113124 - DNA, 25 bp, Homo sapien
cataaagaggttcgttcatcggaag

SEQ ID NO: 5113125 - DNA, 25 bp, Homo sapien
tcatcggaagatttatggatagtca

SEQ ID NO: 5113126 - DNA, 25 bp, Homo sapien
tgctgtctttgtttcgttccacctt

SEQ ID NO: 5113127 - DNA, 25 bp, Homo sapien
taggttatatcacaacgaagaaaat

SEQ ID NO: 5113128 - DNA, 25 bp, Homo sapien
tactaaacagtttgatattttgctg

SEQ ID NO: 5113129 - DNA, 25 bp, Homo sapien
atgatgtaacctgaaaacagtgtga

SEQ ID NO: 5113130 - DNA, 25 bp, Homo sapien
gctgagcagtaattacaactccttt

SEQ ID NO: 5113131 - DNA, 25 bp, Homo sapien
ccagagttcatgtacattgtgttgc

SEQ ID NO: 5113132 - DNA, 25 bp, Homo sapien
gaagtgggttctacagccagtgtaa

SEQ ID NO: 5113133 - DNA, 25 bp, Homo sapien
tgcactgggtgctgtcctaggtgct

SEQ ID NO: 5113134 - DNA, 25 bp, Homo sapien
atgggcccaacagaagtgggtttgc

SEQ ID NO: 5113135 - DNA, 25 bp, Homo sapien
attcacaagtggtgcgaaattttcc

SEQ ID NO: 5113136 - DNA, 25 bp, Homo sapien
caacagaagtgggtttgcaatgccc

SEQ ID NO: 5113137 - DNA, 25 bp, Homo sapien
ggttcaaggaattcacaagtggtgc

SEQ ID NO: 5113138 - DNA, 25 bp, Homo sapien
gttgaaccatgtgaggcaacggcat

SEQ ID NO: 5113139 - DNA, 25 bp, Homo sapien
ttcaagaaagcctgatttaataaag

SEQ ID NO: 5113140 - DNA, 25 bp, Homo sapien
taaagtataaggtggtgttgaacca

SEQ ID NO: 5113141 - DNA, 25 bp, Homo sapien
tcagctgctgaagcgccaactgagt

SEQ ID NO: 5113142 - DNA, 25 bp, Homo sapien
cttgggagacccatagatccaggcc

SEQ ID NO: 5113143 - DNA, 25 bp, Homo sapien
tctgtgtggaattccacgtgctctc

SEQ ID NO: 5113144 - DNA, 25 bp, Homo sapien
gaggattaaacctgggtctcgacat

SEQ ID NO: 5113145 - DNA, 25 bp, Homo sapien
catcccagaagggttaggtgctcgt

SEQ ID NO: 5113146 - DNA, 25 bp, Homo sapien
tttcacaataccaaagggagaccga

SEQ ID NO: 5113147 - DNA, 25 bp, Homo sapien
tatatgaggctcatcatcccaccgg

SEQ ID NO: 5113148 - DNA, 25 bp, Homo sapien
ggaccgattattggaggactcaccg

SEQ ID NO: 5113149 - DNA, 25 bp, Homo sapien
tatagcggctctgtactttgggact

SEQ ID NO: 5113150 - DNA, 25 bp, Homo sapien
tgtgacattgtcttgtaagtacgca

SEQ ID NO: 5113151 - DNA, 25 bp, Homo sapien
tcccaagacaggtgtatatgtgcaa

SEQ ID NO: 5113152 - DNA, 25 bp, Homo sapien
tagagaaaggtgattccatgtgaca

SEQ ID NO: 5113153 - DNA, 25 bp, Homo sapien
tcactagtctacataaagtcaggaa

SEQ ID NO: 5113154 - DNA, 25 bp, Homo sapien
taactactcgtatcagggctcactc

SEQ ID NO: 5113155 - DNA, 25 bp, Homo sapien
gataattacctactagcaggagatg

SEQ ID NO: 5113156 - DNA, 25 bp, Homo sapien
tcaaagtacatcttcacagctatag

SEQ ID NO: 5113157 - DNA, 25 bp, Homo sapien
gacacagctcctaaaccaagggaag

SEQ ID NO: 5113158 - DNA, 25 bp, Homo sapien
taatacaggatatcattcttacagc

SEQ ID NO: 5113159 - DNA, 25 bp, Homo sapien
cagagatttttacccgcaagtccag

SEQ ID NO: 5113160 - DNA, 25 bp, Homo sapien
ttacagcaactatcacctgaagatg

SEQ ID NO: 5113161 - DNA, 25 bp, Homo sapien
cacacattcttaggcttgcttcaca

SEQ ID NO: 5113162 - DNA, 25 bp, Homo sapien
cacagttaaaaccacggttgacaat

SEQ ID NO: 5113163 - DNA, 25 bp, Homo sapien
tccacagttaaaaccacggttgaca

SEQ ID NO: 5113164 - DNA, 25 bp, Homo sapien
gttgacaataattttggattctgcc

SEQ ID NO: 5113165 - DNA, 25 bp, Homo sapien
cctaaaattacaatgtgtacccata

SEQ ID NO: 5113166 - DNA, 25 bp, Homo sapien
ctaaaattacaatgtgtacccataa

SEQ ID NO: 5113167 - DNA, 25 bp, Homo sapien
taaaattacaatgtgtacccataaa

SEQ ID NO: 5113168 - DNA, 25 bp, Homo sapien
aaattacaatgtgtacccataaata

SEQ ID NO: 5113169 - DNA, 25 bp, Homo sapien
cgtaactgtcgacagctctcaatat

SEQ ID NO: 5113170 - DNA, 25 bp, Homo sapien
cagctctcaatatgagtagatgtat

SEQ ID NO: 5113171 - DNA, 25 bp, Homo sapien
gacgtaactgtcgacagctctcaat

SEQ ID NO: 5113172 - DNA, 25 bp, Homo sapien
tgttgacgtaactgtcgacagctct

SEQ ID NO: 5113173 - DNA, 25 bp, Homo sapien
gatgttactccaagagatacaggaa

SEQ ID NO: 5113174 - DNA, 25 bp, Homo sapien
tttaatggtactagggaagacagag

SEQ ID NO: 5113175 - DNA, 25 bp, Homo sapien
taacacgttactctcagtctagtgg

SEQ ID NO: 5113176 - DNA, 25 bp, Homo sapien
catgagccagcaactaatctgcaac

SEQ ID NO: 5113177 - DNA, 25 bp, Homo sapien
atccagaaccgtggggtccattttg

SEQ ID NO: 5113178 - DNA, 25 bp, Homo sapien
ctcgatgggaggatctcaggattcc

SEQ ID NO: 5113179 - DNA, 25 bp, Homo sapien
cttctcgatgggaggatctcaggat

SEQ ID NO: 5113180 - DNA, 25 bp, Homo sapien
cgatgggaggatctcaggattccaa

SEQ ID NO: 5113181 - DNA, 25 bp, Homo sapien
tctcgatgggaggatctcaggattc

SEQ ID NO: 5113182 - DNA, 25 bp, Homo sapien
taatgcattgggcttcgagaccgac

SEQ ID NO: 5113183 - DNA, 25 bp, Homo sapien
gacttgagcttgatcttctagaacg

SEQ ID NO: 5113184 - DNA, 25 bp, Homo sapien
aattcttggacttcgacttctcggc

SEQ ID NO: 5113185 - DNA, 25 bp, Homo sapien
gaccgacggaatctgtgacttgagc

SEQ ID NO: 5113186 - DNA, 25 bp, Homo sapien
cagggctaactgatcgaaagcattt

SEQ ID NO: 5113187 - DNA, 25 bp, Homo sapien
cctctcagggctaactgatcgaaag

SEQ ID NO: 5113188 - DNA, 25 bp, Homo sapien
tctcagggctaactgatcgaaagca

SEQ ID NO: 5113189 - DNA, 25 bp, Homo sapien
acatcctctcagggctaactgatcg

SEQ ID NO: 5113190 - DNA, 25 bp, Homo sapien
gtgaaatgtgtagcactatagtacc

SEQ ID NO: 5113191 - DNA, 25 bp, Homo sapien
tgctttacacttattgaagactaca

SEQ ID NO: 5113192 - DNA, 25 bp, Homo sapien
tgagattgctttacacttattgaag

SEQ ID NO: 5113193 - DNA, 25 bp, Homo sapien
tcaattcatatgttaggttggtgca

SEQ ID NO: 5113194 - DNA, 25 bp, Homo sapien
tacaacgaatagaatgtcctcctag

SEQ ID NO: 5113195 - DNA, 25 bp, Homo sapien
catgcccagatcgttgtactacatc

SEQ ID NO: 5113196 - DNA, 25 bp, Homo sapien
tattaaattctgtcccatgcccaga

SEQ ID NO: 5113197 - DNA, 25 bp, Homo sapien
tggtgaatgtcccttatcagcagct

SEQ ID NO: 5113198 - DNA, 25 bp, Homo sapien
gaaccgaaccataatgcaatgactg

SEQ ID NO: 5113199 - DNA, 25 bp, Homo sapien
tcagttataagaagaaccgaaccat

SEQ ID NO: 5113200 - DNA, 25 bp, Homo sapien
cttcagtacaaccatcctctggtaa

SEQ ID NO: 5113201 - DNA, 25 bp, Homo sapien
tatggaacaattaggacatcattca

SEQ ID NO: 5113202 - DNA, 25 bp, Homo sapien
tgcagtaattgcctctttaaattcc

SEQ ID NO: 5113203 - DNA, 25 bp, Homo sapien
cagtaattgcctctttaaattccat

SEQ ID NO: 5113204 - DNA, 25 bp, Homo sapien
attgcagtaattgcctctttaaatt

SEQ ID NO: 5113205 - DNA, 25 bp, Homo sapien
aattgcagtaattgcctctttaaat

SEQ ID NO: 5113206 - DNA, 25 bp, Homo sapien
tatcgtaagaggtgttgtttcaatg

SEQ ID NO: 5113207 - DNA, 25 bp, Homo sapien
tttatcgtaagaggtgttgtttcaa

SEQ ID NO: 5113208 - DNA, 25 bp, Homo sapien
ttatcgtaagaggtgttgtttcaat

SEQ ID NO: 5113209 - DNA, 25 bp, Homo sapien
ttttatcgtaagaggtgttgtttca

SEQ ID NO: 5113210 - DNA, 25 bp, Homo sapien
attaaaacttagctatgcgcggtgg

SEQ ID NO: 5113211 - DNA, 25 bp, Homo sapien
aattaaaacttagctatgcgcggtg

SEQ ID NO: 5113212 - DNA, 25 bp, Homo sapien
ttaaaacttagctatgcgcggtggc

SEQ ID NO: 5113213 - DNA, 25 bp, Homo sapien
cccaggagtgtgagatcaccttggg

SEQ ID NO: 5113214 - DNA, 25 bp, Homo sapien
caacagaggtgtcatgagttagcct

SEQ ID NO: 5113215 - DNA, 25 bp, Homo sapien
tgctggaagacaaggcgaggttcct

SEQ ID NO: 5113216 - DNA, 25 bp, Homo sapien
gagcactggaccacctacatgcaga

SEQ ID NO: 5113217 - DNA, 25 bp, Homo sapien
cagtgctacctctccatcgtgtggg

SEQ ID NO: 5113218 - DNA, 25 bp, Homo sapien
cacatacttccaatatgaagaaggc

SEQ ID NO: 5113219 - DNA, 25 bp, Homo sapien
caaaaacaattgtccacatacttcc

SEQ ID NO: 5113220 - DNA, 25 bp, Homo sapien
ggcacaactcaaattctgttcagag

SEQ ID NO: 5113221 - DNA, 25 bp, Homo sapien
aggccaaaaagattgccccttcctg

SEQ ID NO: 5113222 - DNA, 25 bp, Homo sapien
gctttcatcggattactggtaacgg

SEQ ID NO: 5113223 - DNA, 25 bp, Homo sapien
tttcgaagtatgagaatatggccct

SEQ ID NO: 5113224 - DNA, 25 bp, Homo sapien
tcactgctaagaatggatgtcgagg

SEQ ID NO: 5113225 - DNA, 25 bp, Homo sapien
cactgggctcctgatactttaaaga

SEQ ID NO: 5113226 - DNA, 25 bp, Homo sapien
gccaagcctcagataaacgggaact

SEQ ID NO: 5113227 - DNA, 25 bp, Homo sapien
tagacaaagcaatgactcacagccc

SEQ ID NO: 5113228 - DNA, 25 bp, Homo sapien
taaacccagactgaacctgctgttc

SEQ ID NO: 5113229 - DNA, 25 bp, Homo sapien
tacaatcgcctcgtaatggtctctg

SEQ ID NO: 5113230 - DNA, 25 bp, Homo sapien
cgtgctcgtgctgaaccctatatat

SEQ ID NO: 5113231 - DNA, 25 bp, Homo sapien
ggatgacacgcatattcgttaggca

SEQ ID NO: 5113232 - DNA, 25 bp, Homo sapien
tggatgccttgaaaccgtgctcgtg

SEQ ID NO: 5113233 - DNA, 25 bp, Homo sapien
tctccttatccaagacccctggtgg

SEQ ID NO: 5113234 - DNA, 25 bp, Homo sapien
taaggtagatgcagatactttcttt

SEQ ID NO: 5113235 - DNA, 25 bp, Homo sapien
ttaaggtagatgcagatactttctt

SEQ ID NO: 5113236 - DNA, 25 bp, Homo sapien
tttaaggtagatgcagatactttct

SEQ ID NO: 5113237 - DNA, 25 bp, Homo sapien
caatttcaacagcttttgaagcatc

SEQ ID NO: 5113238 - DNA, 25 bp, Homo sapien
tcatctaagtttctactaaactgac

SEQ ID NO: 5113239 - DNA, 25 bp, Homo sapien
tctccttcattaaagcacaatagtg

SEQ ID NO: 5113240 - DNA, 25 bp, Homo sapien
ttaaagcacaatagtgtcttcatag

SEQ ID NO: 5113241 - DNA, 25 bp, Homo sapien
gacaagatacactcatttgaaagaa

SEQ ID NO: 5113242 - DNA, 25 bp, Homo sapien
tactctatacaactaaacattacgg

SEQ ID NO: 5113243 - DNA, 25 bp, Homo sapien
ttctcagcatgacccttcaaggcct

SEQ ID NO: 5113244 - DNA, 25 bp, Homo sapien
gccattcatagtatctctgctaacc

SEQ ID NO: 5113245 - DNA, 25 bp, Homo sapien
gagatattccacaatccaattttca

SEQ ID NO: 5113246 - DNA, 25 bp, Homo sapien
caaaggcaccactgtgagttttcca

SEQ ID NO: 5113247 - DNA, 25 bp, Homo sapien
tgccaagcttaggaaacagtggact

SEQ ID NO: 5113248 - DNA, 25 bp, Homo sapien
gatactcgtgacagctgaaacttgg

SEQ ID NO: 5113249 - DNA, 25 bp, Homo sapien
taaacaattagtgagtggctccata

SEQ ID NO: 5113250 - DNA, 25 bp, Homo sapien
tactgggtaagagctcgaatgtttc

SEQ ID NO: 5113251 - DNA, 25 bp, Homo sapien
tacatcctaagcctctacaaagtgc

SEQ ID NO: 5113252 - DNA, 25 bp, Homo sapien
tcatgggcatataatagctactcag

SEQ ID NO: 5113253 - DNA, 25 bp, Homo sapien
tatttggtccactgatacatcctaa

SEQ ID NO: 5113254 - DNA, 25 bp, Homo sapien
tatcttcagtaccttgcctgcgacc

SEQ ID NO: 5113255 - DNA, 25 bp, Homo sapien
cctgaatgccatggtatagctgaaa

SEQ ID NO: 5113256 - DNA, 25 bp, Homo sapien
caagaggtgatctctgaatggtgta

SEQ ID NO: 5113257 - DNA, 25 bp, Homo sapien
tcatcagagatgagccttacaggat

SEQ ID NO: 5113258 - DNA, 25 bp, Homo sapien
aggagagaccccatatacccttcac

SEQ ID NO: 5113259 - DNA, 25 bp, Homo sapien
tatgatgcccatgctaagatttctt

SEQ ID NO: 5113260 - DNA, 25 bp, Homo sapien
tattcaaagtgctcgcagacactat

SEQ ID NO: 5113261 - DNA, 25 bp, Homo sapien
aatacgaccctctcttgtgcatagt

SEQ ID NO: 5113262 - DNA, 25 bp, Homo sapien
taggttttccttcgtactatcatat

SEQ ID NO: 5113263 - DNA, 25 bp, Homo sapien
cagtgaagctttctatccaagaatg

SEQ ID NO: 5113264 - DNA, 25 bp, Homo sapien
ttgcaaataacggtgtatcctactt

SEQ ID NO: 5113265 - DNA, 25 bp, Homo sapien
aaaaggcatcttataacagtgaagc

SEQ ID NO: 5113266 - DNA, 25 bp, Homo sapien
ggatgaggtgtctctggcctgtaat

SEQ ID NO: 5113267 - DNA, 25 bp, Homo sapien
atgaactgagattccacaactgaac

SEQ ID NO: 5113268 - DNA, 25 bp, Homo sapien
gtgtagttgtatccgtcttcatatg

SEQ ID NO: 5113269 - DNA, 25 bp, Homo sapien
aatctcctacaaaaacctaacatgg

SEQ ID NO: 5113270 - DNA, 25 bp, Homo sapien
actgaaatgatcaaccttcccaatg

SEQ ID NO: 5113271 - DNA, 25 bp, Homo sapien
tcctgattgggaaggacttctcaac

SEQ ID NO: 5113272 - DNA, 25 bp, Homo sapien
cacaatctgtgggtagttgttgccc

SEQ ID NO: 5113273 - DNA, 25 bp, Homo sapien
tgttgcccccgcctgtagggagcag

SEQ ID NO: 5113274 - DNA, 25 bp, Homo sapien
tgggtagttgttgcccccgcctgta

SEQ ID NO: 5113275 - DNA, 25 bp, Homo sapien
ttgcccccgcctgtagggagcagtc

SEQ ID NO: 5113276 - DNA, 25 bp, Homo sapien
gccttagagacgccgaagagagaac

SEQ ID NO: 5113277 - DNA, 25 bp, Homo sapien
agacgccgaagagagaacgcagccc

SEQ ID NO: 5113278 - DNA, 25 bp, Homo sapien
agaacgcagccccaataagctggag

SEQ ID NO: 5113279 - DNA, 25 bp, Homo sapien
aacgcagccccaataagctggagct

SEQ ID NO: 5113280 - DNA, 25 bp, Homo sapien
cagtctcttcgccttcattttcggg

SEQ ID NO: 5113281 - DNA, 25 bp, Homo sapien
agctgctgagtctgatccaccgact

SEQ ID NO: 5113282 - DNA, 25 bp, Homo sapien
cagtgttcctcacgaggggcaccag

SEQ ID NO: 5113283 - DNA, 25 bp, Homo sapien
ggttccgtcgtgatcccttgcagtg

SEQ ID NO: 5113284 - DNA, 25 bp, Homo sapien
tgacgtgctcgtgtaagttccctgg

SEQ ID NO: 5113285 - DNA, 25 bp, Homo sapien
caggagactttattgccatggccaa

SEQ ID NO: 5113286 - DNA, 25 bp, Homo sapien
cacattctaggaagcgcagccctgt

SEQ ID NO: 5113287 - DNA, 25 bp, Homo sapien
tagcccgtaagtcatgcaagtcccc

SEQ ID NO: 5113288 - DNA, 25 bp, Homo sapien
tccctgagcggtagtaaatccagat

SEQ ID NO: 5113289 - DNA, 25 bp, Homo sapien
taatgatgtatcgtgtggactctcc

SEQ ID NO: 5113290 - DNA, 25 bp, Homo sapien
tactatggcctgtcagttatacggg

SEQ ID NO: 5113291 - DNA, 25 bp, Homo sapien
aaaggtgtacacagggtaggctcga

SEQ ID NO: 5113292 - DNA, 25 bp, Homo sapien
tcgtctgaggaagctgtgttgtctg

SEQ ID NO: 5113293 - DNA, 25 bp, Homo sapien
ttgctcagccttgtaagttgtcttc

SEQ ID NO: 5113294 - DNA, 25 bp, Homo sapien
gatttgctcagccttgtaagttgtc

SEQ ID NO: 5113295 - DNA, 25 bp, Homo sapien
cttgtgtcgtctgaggaagctgtgt

SEQ ID NO: 5113296 - DNA, 25 bp, Homo sapien
accagagagcagagcaaggaacaaa

SEQ ID NO: 5113297 - DNA, 25 bp, Homo sapien
ccagagagcagagcaaggaacaaat

SEQ ID NO: 5113298 - DNA, 25 bp, Homo sapien
actataaaggctgtaagattaacta

SEQ ID NO: 5113299 - DNA, 25 bp, Homo sapien
caagaaccttttgatttgtaccctg

SEQ ID NO: 5113300 - DNA, 25 bp, Homo sapien
cgtgtatcaaactgactggtaggaa

SEQ ID NO: 5113301 - DNA, 25 bp, Homo sapien
taattaatgatacatgaggtgaagc

SEQ ID NO: 5113302 - DNA, 25 bp, Homo sapien
gaatgcagccctgataagctggagc

SEQ ID NO: 5113303 - DNA, 25 bp, Homo sapien
tctgtaggtaattgtcacccccacc

SEQ ID NO: 5113304 - DNA, 25 bp, Homo sapien
caataggatgatcaaaggtctgcaa

SEQ ID NO: 5113305 - DNA, 25 bp, Homo sapien
accgccttgggagcagtcctgcgcg

SEQ ID NO: 5113306 - DNA, 25 bp, Homo sapien
ttagttaaaagtcaacctagcaata

SEQ ID NO: 5113307 - DNA, 25 bp, Homo sapien
gaaagaaccctgcaagaaacagccc

SEQ ID NO: 5113308 - DNA, 25 bp, Homo sapien
aagtcaacctagcaataatttcgaa

SEQ ID NO: 5113309 - DNA, 25 bp, Homo sapien
aataatttcgaaagaaccctgcaag

SEQ ID NO: 5113310 - DNA, 25 bp, Homo sapien
tttggctacagatgccttggcttgt

SEQ ID NO: 5113311 - DNA, 25 bp, Homo sapien
gatgccttggcttgtccagttttgg

SEQ ID NO: 5113312 - DNA, 25 bp, Homo sapien
tgtttactttggctacagatgcctt

SEQ ID NO: 5113313 - DNA, 25 bp, Homo sapien
tacagatgccttggcttgtccagtt

SEQ ID NO: 5113314 - DNA, 25 bp, Homo sapien
tctcccaaagtgatgggattatagg

SEQ ID NO: 5113315 - DNA, 25 bp, Homo sapien
aggtgatccaccctcttcggtctcc

SEQ ID NO: 5113316 - DNA, 25 bp, Homo sapien
tataggcgtgagccaccatgcctgg

SEQ ID NO: 5113317 - DNA, 25 bp, Homo sapien
gattataggcgtgagccaccatgcc

SEQ ID NO: 5113318 - DNA, 25 bp, Homo sapien
aatccaccctttatagtcaagacag

SEQ ID NO: 5113319 - DNA, 25 bp, Homo sapien
tctatctgggtactgggacttaagg

SEQ ID NO: 5113320 - DNA, 25 bp, Homo sapien
gagcctcagtgagcccttaagatat

SEQ ID NO: 5113321 - DNA, 25 bp, Homo sapien
caggaacgttatgagaatacaatca

SEQ ID NO: 5113322 - DNA, 25 bp, Homo sapien
acagctaccgttaccacagatttta

SEQ ID NO: 5113323 - DNA, 25 bp, Homo sapien
taacagctaccgttaccacagattt

SEQ ID NO: 5113324 - DNA, 25 bp, Homo sapien
cctttaacagctaccgttaccacag

SEQ ID NO: 5113325 - DNA, 25 bp, Homo sapien
ttaacagctaccgttaccacagatt

SEQ ID NO: 5113326 - DNA, 25 bp, Homo sapien
cacaggtttgttagagtctttgttt

SEQ ID NO: 5113327 - DNA, 25 bp, Homo sapien
ctggtatagtcacaggtttgttaga

SEQ ID NO: 5113328 - DNA, 25 bp, Homo sapien
agagacttctttccaccagattttg

SEQ ID NO: 5113329 - DNA, 25 bp, Homo sapien
tatagtcacaggtttgttagagtct

SEQ ID NO: 5113330 - DNA, 25 bp, Homo sapien
catgaaatagtctgctttaatagtc

SEQ ID NO: 5113331 - DNA, 25 bp, Homo sapien
taaactaatgaatctaaacaggaac

SEQ ID NO: 5113332 - DNA, 25 bp, Homo sapien
aatagtctagtaaaacactaatata

SEQ ID NO: 5113333 - DNA, 25 bp, Homo sapien
aaggtggaggatgggacgaaggaga

SEQ ID NO: 5113334 - DNA, 25 bp, Homo sapien
ttttcagtggctttgacttcaatac

SEQ ID NO: 5113335 - DNA, 25 bp, Homo sapien
aaatagcttctttagcacagttttc

SEQ ID NO: 5113336 - DNA, 25 bp, Homo sapien
agttttcagtggctttgacttcaat

SEQ ID NO: 5113337 - DNA, 25 bp, Homo sapien
cttctttagcacagttttcagtggc

SEQ ID NO: 5113338 - DNA, 25 bp, Homo sapien
tagctacatgaaaacgtgtaataca

SEQ ID NO: 5113339 - DNA, 25 bp, Homo sapien
tcacttaggtatggcattggtaatt

SEQ ID NO: 5113340 - DNA, 25 bp, Homo sapien
ccacaataggttaaacagtagctac

SEQ ID NO: 5113341 - DNA, 25 bp, Homo sapien
caacaagtctagagaattagtacaa

SEQ ID NO: 5113342 - DNA, 25 bp, Homo sapien
aagtggttcattctctgtggcctcc

SEQ ID NO: 5113343 - DNA, 25 bp, Homo sapien
tggttcattctctgtggcctccaaa

SEQ ID NO: 5113344 - DNA, 25 bp, Homo sapien
ttaagtggttcattctctgtggcct

SEQ ID NO: 5113345 - DNA, 25 bp, Homo sapien
cttgttaagtggttcattctctgtg

SEQ ID NO: 5113346 - DNA, 25 bp, Homo sapien
agaaataaataaaacatgaaaactg

SEQ ID NO: 5113347 - DNA, 25 bp, Homo sapien
gaaataaataaaacatgaaaactga

SEQ ID NO: 5113348 - DNA, 25 bp, Homo sapien
atttctaaagatgatgtgctatagt

SEQ ID NO: 5113349 - DNA, 25 bp, Homo sapien
tgatgtgctatagtcaacttggcaa

SEQ ID NO: 5113350 - DNA, 25 bp, Homo sapien
aaggtaactctctcatcaatgccaa

SEQ ID NO: 5113351 - DNA, 25 bp, Homo sapien
tttattcttcaaggtaactctctca

SEQ ID NO: 5113352 - DNA, 25 bp, Homo sapien
tcaatgccaattactcctttcatgc

SEQ ID NO: 5113353 - DNA, 25 bp, Homo sapien
ctcagatccattttattcttcaagg

SEQ ID NO: 5113354 - DNA, 25 bp, Homo sapien
aattagagacaagcatcacacacat

SEQ ID NO: 5113355 - DNA, 25 bp, Homo sapien
taggcaaattagagacaagcatcac

SEQ ID NO: 5113356 - DNA, 25 bp, Homo sapien
ttattaggcaaattagagacaagca

SEQ ID NO: 5113357 - DNA, 25 bp, Homo sapien
ggcaaattagagacaagcatcacac

SEQ ID NO: 5113358 - DNA, 25 bp, Homo sapien
tggttttgctaagtcataaacttct

SEQ ID NO: 5113359 - DNA, 25 bp, Homo sapien
atggttttgctaagtcataaacttc

SEQ ID NO: 5113360 - DNA, 25 bp, Homo sapien
taaaatcaagatatcctttaaacca

SEQ ID NO: 5113361 - DNA, 25 bp, Homo sapien
tttaccatagactcagcagcttttc

SEQ ID NO: 5113362 - DNA, 25 bp, Homo sapien
aagcaggtataaaattttaccatag

SEQ ID NO: 5113363 - DNA, 25 bp, Homo sapien
tcatgttttcaggagccatacttat

SEQ ID NO: 5113364 - DNA, 25 bp, Homo sapien
catacttattgagagttgatttcca

SEQ ID NO: 5113365 - DNA, 25 bp, Homo sapien
ttaccaaggttataaatatagcttc

SEQ ID NO: 5113366 - DNA, 25 bp, Homo sapien
tacttatgaatacatggtgatccac

SEQ ID NO: 5113367 - DNA, 25 bp, Homo sapien
ttctattacttatgaatacatggtg

SEQ ID NO: 5113368 - DNA, 25 bp, Homo sapien
aagtccaacacaaagtacacactga

SEQ ID NO: 5113369 - DNA, 25 bp, Homo sapien
gtccatcttccggtaaattatcaag

SEQ ID NO: 5113370 - DNA, 25 bp, Homo sapien
cttcagtttgaggagacaaaagttc

SEQ ID NO: 5113371 - DNA, 25 bp, Homo sapien
tgttgtaaagccaaggcaaaactga

SEQ ID NO: 5113372 - DNA, 25 bp, Homo sapien
gaaataatggttgataagggctgaa

SEQ ID NO: 5113373 - DNA, 25 bp, Homo sapien
agaattcctatgtgccatctgtgcc

SEQ ID NO: 5113374 - DNA, 25 bp, Homo sapien
ctctggtaagtctatctttggagat

SEQ ID NO: 5113375 - DNA, 25 bp, Homo sapien
tacattgactgagcagattcaggac

SEQ ID NO: 5113376 - DNA, 25 bp, Homo sapien
tgagcaggtcaacatatggtcacca

SEQ ID NO: 5113377 - DNA, 25 bp, Homo sapien
caggactatctaactgaagaattgc

SEQ ID NO: 5113378 - DNA, 25 bp, Homo sapien
tgctttcaaaggtggactatccata

SEQ ID NO: 5113379 - DNA, 25 bp, Homo sapien
gaaacagtttgactactacctgaga

SEQ ID NO: 5113380 - DNA, 25 bp, Homo sapien
tactgtgtaggccaagaacctgtga

SEQ ID NO: 5113381 - DNA, 25 bp, Homo sapien
tctacccagaggaagccaaaatgga

SEQ ID NO: 5113382 - DNA, 25 bp, Homo sapien
caaaggtgtatataattggtcgaca

SEQ ID NO: 5113383 - DNA, 25 bp, Homo sapien
gagtcacaagaatagctctgaaagg

SEQ ID NO: 5113384 - DNA, 25 bp, Homo sapien
tggtcgacaaagcaaatgaccctaa

SEQ ID NO: 5113385 - DNA, 25 bp, Homo sapien
gaaaaaccacctgtgacgtgacaga

SEQ ID NO: 5113386 - DNA, 25 bp, Homo sapien
tccttgagaactaggacattgaaac

SEQ ID NO: 5113387 - DNA, 25 bp, Homo sapien
taactcttctgctgagggactatca

SEQ ID NO: 5113388 - DNA, 25 bp, Homo sapien
tacctaaaatagtgttagcatagag

SEQ ID NO: 5113389 - DNA, 25 bp, Homo sapien
gggactatcactgaccactttaaga

SEQ ID NO: 5113390 - DNA, 25 bp, Homo sapien
atagtttaccaaacaaagagtccag

SEQ ID NO: 5113391 - DNA, 25 bp, Homo sapien
tcaatatactcaaatcaataaatgt

SEQ ID NO: 5113392 - DNA, 25 bp, Homo sapien
ggttcaatatactcaaatcaataaa

SEQ ID NO: 5113393 - DNA, 25 bp, Homo sapien
gctggttcaatatactcaaatcaat

SEQ ID NO: 5113394 - DNA, 25 bp, Homo sapien
agtcctcagtgacctacaaagagac

SEQ ID NO: 5113395 - DNA, 25 bp, Homo sapien
aagcaagtcctcagtgacctacaaa

SEQ ID NO: 5113396 - DNA, 25 bp, Homo sapien
cataaagcaagtcctcagtgaccta

SEQ ID NO: 5113397 - DNA, 25 bp, Homo sapien
aagtcctcagtgacctacaaagaga

SEQ ID NO: 5113398 - DNA, 25 bp, Homo sapien
cagaccagcttaagaaacggcacac

SEQ ID NO: 5113399 - DNA, 25 bp, Homo sapien
ttttcagaccagcttaagaaacggc

SEQ ID NO: 5113400 - DNA, 25 bp, Homo sapien
ttcagaccagcttaagaaacggcac

SEQ ID NO: 5113401 - DNA, 25 bp, Homo sapien
attgcgcttttcagaccagcttaag

SEQ ID NO: 5113402 - DNA, 25 bp, Homo sapien
gacttctaagagagatcagctgact

SEQ ID NO: 5113403 - DNA, 25 bp, Homo sapien
caatactctgtagccccaaaaaagg

SEQ ID NO: 5113404 - DNA, 25 bp, Homo sapien
tgtgggtcccaagaaagcaatactc

SEQ ID NO: 5113405 - DNA, 25 bp, Homo sapien
aatgtgtctagagaggattcctggc

SEQ ID NO: 5113406 - DNA, 25 bp, Homo sapien
aattctgggtcatgctcaatttgca

SEQ ID NO: 5113407 - DNA, 25 bp, Homo sapien
ctaattctgggtcatgctcaatttg

SEQ ID NO: 5113408 - DNA, 25 bp, Homo sapien
ttctaattctgggtcatgctcaatt

SEQ ID NO: 5113409 - DNA, 25 bp, Homo sapien
attctgggtcatgctcaatttgcac

SEQ ID NO: 5113410 - DNA, 25 bp, Homo sapien
gaacaacttttcatgcagacctcaa

SEQ ID NO: 5113411 - DNA, 25 bp, Homo sapien
aacgaaactcctaggtcaggctgag

SEQ ID NO: 5113412 - DNA, 25 bp, Homo sapien
ctttacgtggtcaaaacaaggctgt

SEQ ID NO: 5113413 - DNA, 25 bp, Homo sapien
aagtcatcaactggtggaacaaggg

SEQ ID NO: 5113414 - DNA, 25 bp, Homo sapien
cctggctcaaggatatagcaagact

SEQ ID NO: 5113415 - DNA, 25 bp, Homo sapien
gctgggcattagaacaaacgttaac

SEQ ID NO: 5113416 - DNA, 25 bp, Homo sapien
acattctgagaaaccttaaactggg

SEQ ID NO: 5113417 - DNA, 25 bp, Homo sapien
gagaacacaggtctactcagaagaa

SEQ ID NO: 5113418 - DNA, 25 bp, Homo sapien
gacaccagagagtgatcctatcata

SEQ ID NO: 5113419 - DNA, 25 bp, Homo sapien
aattccagtactttcaccgaggtag

SEQ ID NO: 5113420 - DNA, 25 bp, Homo sapien
tatctgtgtgctgagatgttaacca

SEQ ID NO: 5113421 - DNA, 25 bp, Homo sapien
gcttcttagagggtggccatgtacc

SEQ ID NO: 5113422 - DNA, 25 bp, Homo sapien
gcctcctctggtaagactgctctga

SEQ ID NO: 5113423 - DNA, 25 bp, Homo sapien
tttagaaagcttgccttgcagggct

SEQ ID NO: 5113424 - DNA, 25 bp, Homo sapien
gggaattcctggtactaacgtcaca

SEQ ID NO: 5113425 - DNA, 25 bp, Homo sapien
caatactgactgaagcggatgctac

SEQ ID NO: 5113426 - DNA, 25 bp, Homo sapien
tgaggagatgaaagtatgaaacaaa

SEQ ID NO: 5113427 - DNA, 25 bp, Homo sapien
catagctacagcagcggagctaatc

SEQ ID NO: 5113428 - DNA, 25 bp, Homo sapien
tcacttcaaagacacactgtgccat

SEQ ID NO: 5113429 - DNA, 25 bp, Homo sapien
tttaatactctgaatgtctactggc

SEQ ID NO: 5113430 - DNA, 25 bp, Homo sapien
ttactgatcttttcgtcccacaatg

SEQ ID NO: 5113431 - DNA, 25 bp, Homo sapien
tcaacagtcactaaacagtataggc

SEQ ID NO: 5113432 - DNA, 25 bp, Homo sapien
cagtataggcacagtctgtacaagt

SEQ ID NO: 5113433 - DNA, 25 bp, Homo sapien
aacatgtatacaaaactaagtcaac

SEQ ID NO: 5113434 - DNA, 25 bp, Homo sapien
aacttctaccagtagtgcttttagg

SEQ ID NO: 5113435 - DNA, 25 bp, Homo sapien
ctctttagatttggaacttctacca

SEQ ID NO: 5113436 - DNA, 25 bp, Homo sapien
ctaccagtagtgcttttaggattct

SEQ ID NO: 5113437 - DNA, 25 bp, Homo sapien
tcttagtgttttgctcagccaaagt

SEQ ID NO: 5113438 - DNA, 25 bp, Homo sapien
tgctctaaactcttagtcactaaca

SEQ ID NO: 5113439 - DNA, 25 bp, Homo sapien
taaggcaggcacaagttataagata

SEQ ID NO: 5113440 - DNA, 25 bp, Homo sapien
tctcattcctatcccttgctctaaa

SEQ ID NO: 5113441 - DNA, 25 bp, Homo sapien
aacacaaggtgtttagactagctca

SEQ ID NO: 5113442 - DNA, 25 bp, Homo sapien
tcatccacagtaacaaattcatcca

SEQ ID NO: 5113443 - DNA, 25 bp, Homo sapien
ctataacctcatccacagtaacaaa

SEQ ID NO: 5113444 - DNA, 25 bp, Homo sapien
taacctcatccacagtaacaaattc

SEQ ID NO: 5113445 - DNA, 25 bp, Homo sapien
ctcatccacagtaacaaattcatcc

SEQ ID NO: 5113446 - DNA, 25 bp, Homo sapien
tcaacaccacgaggagtggaagttt

SEQ ID NO: 5113447 - DNA, 25 bp, Homo sapien
ccaatgtcacaaaagatagttctcc

SEQ ID NO: 5113448 - DNA, 25 bp, Homo sapien
tgactagagcttgtgctagatgtgc

SEQ ID NO: 5113449 - DNA, 25 bp, Homo sapien
aattacttcatccacagtgactaga

SEQ ID NO: 5113450 - DNA, 25 bp, Homo sapien
gactcattcaaaggtagctcttcca

SEQ ID NO: 5113451 - DNA, 25 bp, Homo sapien
ggttgttaaaatccgccagagagtc

SEQ ID NO: 5113452 - DNA, 25 bp, Homo sapien
gttaccaagcgttcctgtttgagga

SEQ ID NO: 5113453 - DNA, 25 bp, Homo sapien
tcttcgggcacctgagaagaaatga

SEQ ID NO: 5113454 - DNA, 25 bp, Homo sapien
taagtgtctttcaatcatggttttt

SEQ ID NO: 5113455 - DNA, 25 bp, Homo sapien
tgttaagtgtctttcaatcatggtt

SEQ ID NO: 5113456 - DNA, 25 bp, Homo sapien
aatcatggtttttagatcttcttcc

SEQ ID NO: 5113457 - DNA, 25 bp, Homo sapien
ggtttttagatcttcttccataaca

SEQ ID NO: 5113458 - DNA, 25 bp, Homo sapien
tggcctctaatatcaatactgggtg

SEQ ID NO: 5113459 - DNA, 25 bp, Homo sapien
aagtgagctgccgtactattctgta

SEQ ID NO: 5113460 - DNA, 25 bp, Homo sapien
tgttgactttaactgtctgttggcc

SEQ ID NO: 5113461 - DNA, 25 bp, Homo sapien
ctccctcaagttcggaaagtgagct

SEQ ID NO: 5113462 - DNA, 25 bp, Homo sapien
ttttgctggttctgtcacaacagct

SEQ ID NO: 5113463 - DNA, 25 bp, Homo sapien
tgctggttctgtcacaacagctttt

SEQ ID NO: 5113464 - DNA, 25 bp, Homo sapien
tttgctggttctgtcacaacagctt

SEQ ID NO: 5113465 - DNA, 25 bp, Homo sapien
tggttctgtcacaacagctttttct

SEQ ID NO: 5113466 - DNA, 25 bp, Homo sapien
cattctctctacattacaaagatca

SEQ ID NO: 5113467 - DNA, 25 bp, Homo sapien
aacatggtcagaaaacctttcgagg

SEQ ID NO: 5113468 - DNA, 25 bp, Homo sapien
tttaaacttcaactactctcctgtg

SEQ ID NO: 5113469 - DNA, 25 bp, Homo sapien
tttctatctgatgctgcaacatggt

SEQ ID NO: 5113470 - DNA, 25 bp, Homo sapien
gggagatcctagatttactctggca

SEQ ID NO: 5113471 - DNA, 25 bp, Homo sapien
gaaggaatacccacttgaccatgac

SEQ ID NO: 5113472 - DNA, 25 bp, Homo sapien
gccaaggttgccctaccatacagaa

SEQ ID NO: 5113473 - DNA, 25 bp, Homo sapien
tactgaaccaccacctatagcttgg

SEQ ID NO: 5113474 - DNA, 25 bp, Homo sapien
taaactgatagcctaagacccctgt

SEQ ID NO: 5113475 - DNA, 25 bp, Homo sapien
gctgaaatgccttactgttgcctaa

SEQ ID NO: 5113476 - DNA, 25 bp, Homo sapien
gattaagggaaaaggataccagcag

SEQ ID NO: 5113477 - DNA, 25 bp, Homo sapien
tgcaaagtgctaagctgagccgaga

SEQ ID NO: 5113478 - DNA, 25 bp, Homo sapien
gacatcagacgccactgatttgcct

SEQ ID NO: 5113479 - DNA, 25 bp, Homo sapien
ctgatttgcctgaagaagagtcttc

SEQ ID NO: 5113480 - DNA, 25 bp, Homo sapien
tcttcagtcttcttgcgttttcgct

SEQ ID NO: 5113481 - DNA, 25 bp, Homo sapien
cagtcttcttgcgttttcgctctgg

SEQ ID NO: 5113482 - DNA, 25 bp, Homo sapien
catatgggtaagaaaaaaatgtcat

SEQ ID NO: 5113483 - DNA, 25 bp, Homo sapien
ttcatatgggtaagaaaaaaatgtc

SEQ ID NO: 5113484 - DNA, 25 bp, Homo sapien
atatgggtaagaaaaaaatgtcatt

SEQ ID NO: 5113485 - DNA, 25 bp, Homo sapien
atttcatatgggtaagaaaaaaatg

SEQ ID NO: 5113486 - DNA, 25 bp, Homo sapien
ctagaggataagaagagacaagaag

SEQ ID NO: 5113487 - DNA, 25 bp, Homo sapien
cagccttaggtacaagaaagtctaa

SEQ ID NO: 5113488 - DNA, 25 bp, Homo sapien
gaagaatccagccttaggtacaaga

SEQ ID NO: 5113489 - DNA, 25 bp, Homo sapien
ctgagtagaagagggaacaaattgg

SEQ ID NO: 5113490 - DNA, 25 bp, Homo sapien
agtagaagagggaacaaattggaca

SEQ ID NO: 5113491 - DNA, 25 bp, Homo sapien
ttttgcttatgacgtgtactcttgc

SEQ ID NO: 5113492 - DNA, 25 bp, Homo sapien
tcagtattttgcttatgacgtgtac

SEQ ID NO: 5113493 - DNA, 25 bp, Homo sapien
tatgacgtgtactcttgcagtgatt

SEQ ID NO: 5113494 - DNA, 25 bp, Homo sapien
cgtgtactcttgcagtgatttgtca

SEQ ID NO: 5113495 - DNA, 25 bp, Homo sapien
gactagaaattacaggcaaggtaca

SEQ ID NO: 5113496 - DNA, 25 bp, Homo sapien
caggacttaagaggaataaactggc

SEQ ID NO: 5113497 - DNA, 25 bp, Homo sapien
taagacaataacaacacctcaagat

SEQ ID NO: 5113498 - DNA, 25 bp, Homo sapien
gcaaggtacactgaaggagaaaaca

SEQ ID NO: 5113499 - DNA, 25 bp, Homo sapien
taataatggagtgtcatatgagact

SEQ ID NO: 5113500 - DNA, 25 bp, Homo sapien
gactagtgatctgcagaatctactc

SEQ ID NO: 5113501 - DNA, 25 bp, Homo sapien
tcatatgagactagtgatctgcaga

SEQ ID NO: 5113502 - DNA, 25 bp, Homo sapien
gcagaatctactctggcaaatgttg

SEQ ID NO: 5113503 - DNA, 25 bp, Homo sapien
gattcattctggctagacaattcag

SEQ ID NO: 5113504 - DNA, 25 bp, Homo sapien
gattctccagagtaacacttcttaa

SEQ ID NO: 5113505 - DNA, 25 bp, Homo sapien
gtttgcatgaagttaaccaggattc

SEQ ID NO: 5113506 - DNA, 25 bp, Homo sapien
gctaatgtctacatgacaagagggc

SEQ ID NO: 5113507 - DNA, 25 bp, Homo sapien
cttttatacaataaagcttacattc

SEQ ID NO: 5113508 - DNA, 25 bp, Homo sapien
taatttaaaagaaactgatcctaca

SEQ ID NO: 5113509 - DNA, 25 bp, Homo sapien
cctgaggattcggtgggcaacaaga

SEQ ID NO: 5113510 - DNA, 25 bp, Homo sapien
gctatgtgtgcaaacttatctactg

SEQ ID NO: 5113511 - DNA, 25 bp, Homo sapien
tcacctagagcttctttcttcagcc

SEQ ID NO: 5113512 - DNA, 25 bp, Homo sapien
cctttctttgcttggccatgaattt

SEQ ID NO: 5113513 - DNA, 25 bp, Homo sapien
ttcttcagcctcattctgctccttt

SEQ ID NO: 5113514 - DNA, 25 bp, Homo sapien
ttcctttctttgcttggccatgaat

SEQ ID NO: 5113515 - DNA, 25 bp, Homo sapien
acaaatttctagtgaattctttcct

SEQ ID NO: 5113516 - DNA, 25 bp, Homo sapien
acacaaatcaactggaccctaaaca

SEQ ID NO: 5113517 - DNA, 25 bp, Homo sapien
cacaaatcaactggaccctaaacaa

SEQ ID NO: 5113518 - DNA, 25 bp, Homo sapien
caaatcaactggaccctaaacaaat

SEQ ID NO: 5113519 - DNA, 25 bp, Homo sapien
tctctacatttagggcaatcagaaa

SEQ ID NO: 5113520 - DNA, 25 bp, Homo sapien
aatttgtacaacacgaatatttgct

SEQ ID NO: 5113521 - DNA, 25 bp, Homo sapien
tcagtctctctacatttagggcaat

SEQ ID NO: 5113522 - DNA, 25 bp, Homo sapien
caatcagaaatttgtacaacacgaa

SEQ ID NO: 5113523 - DNA, 25 bp, Homo sapien
gaaactaattaatgtatgagggtaa

SEQ ID NO: 5113524 - DNA, 25 bp, Homo sapien
tcctaatgccagaaagggtaataaa

SEQ ID NO: 5113525 - DNA, 25 bp, Homo sapien
gagttgggagtagagatacacacag

SEQ ID NO: 5113526 - DNA, 25 bp, Homo sapien
ggagaggcaagtttccacagcatcc

SEQ ID NO: 5113527 - DNA, 25 bp, Homo sapien
tcaagagggctataagaaacaggtg

SEQ ID NO: 5113528 - DNA, 25 bp, Homo sapien
ttgttgtcatactgacttaagtgcc

SEQ ID NO: 5113529 - DNA, 25 bp, Homo sapien
gcctgtcttaattgtatgctcttaa

SEQ ID NO: 5113530 - DNA, 25 bp, Homo sapien
tgctcaagagggctataagaaacag

SEQ ID NO: 5113531 - DNA, 25 bp, Homo sapien
gagataagggactccttcaaagcta

SEQ ID NO: 5113532 - DNA, 25 bp, Homo sapien
tcaaagctaccatggaggccttctg

SEQ ID NO: 5113533 - DNA, 25 bp, Homo sapien
aaagctaccatggaggccttctggt

SEQ ID NO: 5113534 - DNA, 25 bp, Homo sapien
ctgctctgtgattccaagagataag

SEQ ID NO: 5113535 - DNA, 25 bp, Homo sapien
tcccgtgaggacaaagcattgtacc

SEQ ID NO: 5113536 - DNA, 25 bp, Homo sapien
gaatgtgtctaccagaggctcctca

SEQ ID NO: 5113537 - DNA, 25 bp, Homo sapien
tgaatatagtcaacctgttaccagg

SEQ ID NO: 5113538 - DNA, 25 bp, Homo sapien
cataaaatctacagtgtgccatcag

SEQ ID NO: 5113539 - DNA, 25 bp, Homo sapien
aaggcaaagatcacaagacaagggc

SEQ ID NO: 5113540 - DNA, 25 bp, Homo sapien
tcctacttgcacacgcatttacagg

SEQ ID NO: 5113541 - DNA, 25 bp, Homo sapien
ctatgttgggctgtgcatgtattgt

SEQ ID NO: 5113542 - DNA, 25 bp, Homo sapien
gaagaatttagcgatctctctccta

SEQ ID NO: 5113543 - DNA, 25 bp, Homo sapien
tgggggcagtagacacacccagggc

SEQ ID NO: 5113544 - DNA, 25 bp, Homo sapien
acaggagaaaggctcggctcctccc

SEQ ID NO: 5113545 - DNA, 25 bp, Homo sapien
cagatctcgctcttggacaggagaa

SEQ ID NO: 5113546 - DNA, 25 bp, Homo sapien
gaatttcattgacaagcaaggcagc

SEQ ID NO: 5113547 - DNA, 25 bp, Homo sapien
tgagtgctgcgccaaatcggttgcc

SEQ ID NO: 5113548 - DNA, 25 bp, Homo sapien
ggagtctcccaatgacacggcattt

SEQ ID NO: 5113549 - DNA, 25 bp, Homo sapien
tgtaatctaatgctccggctgcgga

SEQ ID NO: 5113550 - DNA, 25 bp, Homo sapien
tctctggctcctggcttagagcagt

SEQ ID NO: 5113551 - DNA, 25 bp, Homo sapien
gcgaggccggctcgaatctctggct

SEQ ID NO: 5113552 - DNA, 25 bp, Homo sapien
ttggcgcgtgtagggccccgtgcgc

SEQ ID NO: 5113553 - DNA, 25 bp, Homo sapien
tggcgcgtgtagggccccgtgcgcc

SEQ ID NO: 5113554 - DNA, 25 bp, Homo sapien
gcttggcgcgtgtagggccccgtgc

SEQ ID NO: 5113555 - DNA, 25 bp, Homo sapien
cgcgtgtagggccccgtgcgcccag

SEQ ID NO: 5113556 - DNA, 25 bp, Homo sapien
cagtaggcatcgctgatgtcggtgt

SEQ ID NO: 5113557 - DNA, 25 bp, Homo sapien
gcaaacaccgcggagcagtaggcat

SEQ ID NO: 5113558 - DNA, 25 bp, Homo sapien
tgtcgggtgtgtggacgttctcggc

SEQ ID NO: 5113559 - DNA, 25 bp, Homo sapien
ggacgttctcggcatagaggatgaa

SEQ ID NO: 5113560 - DNA, 25 bp, Homo sapien
acacctggataaagctcatttccgg

SEQ ID NO: 5113561 - DNA, 25 bp, Homo sapien
aggaagcatgaaagactcccatgtc

SEQ ID NO: 5113562 - DNA, 25 bp, Homo sapien
taaagctcatttccggaggccacgt

SEQ ID NO: 5113563 - DNA, 25 bp, Homo sapien
gaagcatgaaagactcccatgtcct

SEQ ID NO: 5113564 - DNA, 25 bp, Homo sapien
gtgccgacttggcagccgccctgtg

SEQ ID NO: 5113565 - DNA, 25 bp, Homo sapien
ccgccctgtgcgctcgacgaaaggg

SEQ ID NO: 5113566 - DNA, 25 bp, Homo sapien
ccctgtgcgctcgacgaaagggtga

SEQ ID NO: 5113567 - DNA, 25 bp, Homo sapien
gagtgggcaatcagcggcggggacg

SEQ ID NO: 5113568 - DNA, 25 bp, Homo sapien
ccagggatcccgggcccggtgcgca

SEQ ID NO: 5113569 - DNA, 25 bp, Homo sapien
cagggatcccgggcccggtgcgcac

SEQ ID NO: 5113570 - DNA, 25 bp, Homo sapien
gccagggatcccgggcccggtgcgc

SEQ ID NO: 5113571 - DNA, 25 bp, Homo sapien
agccagggatcccgggcccggtgcg

SEQ ID NO: 5113572 - DNA, 25 bp, Homo sapien
aggcgcgcagtcagggcgggagcgg

SEQ ID NO: 5113573 - DNA, 25 bp, Homo sapien
ggagcgggagcaccgggcccgagca

SEQ ID NO: 5113574 - DNA, 25 bp, Homo sapien
aggcagccgcgccaagagagctgtc

SEQ ID NO: 5113575 - DNA, 25 bp, Homo sapien
cggcggcacacaggcgcgcagtcag

SEQ ID NO: 5113576 - DNA, 25 bp, Homo sapien
tgcgccggtccttcttcgcactggg

SEQ ID NO: 5113577 - DNA, 25 bp, Homo sapien
cttcttcgcactggggaggttgctg

SEQ ID NO: 5113578 - DNA, 25 bp, Homo sapien
ggaaagtcaggcttgcgacagggtc

SEQ ID NO: 5113579 - DNA, 25 bp, Homo sapien
gacagggtcgctgcgccggtccttc

SEQ ID NO: 5113580 - DNA, 25 bp, Homo sapien
tctcttaattttgacagatccttcc

SEQ ID NO: 5113581 - DNA, 25 bp, Homo sapien
cttaattttgacagatccttcctct

SEQ ID NO: 5113582 - DNA, 25 bp, Homo sapien
tcttaattttgacagatccttcctc

SEQ ID NO: 5113583 - DNA, 25 bp, Homo sapien
ctcttaattttgacagatccttcct

SEQ ID NO: 5113584 - DNA, 25 bp, Homo sapien
ccagacgatgcacggcagaagccct

SEQ ID NO: 5113585 - DNA, 25 bp, Homo sapien
gtgccccagacgatgcacggcagaa

SEQ ID NO: 5113586 - DNA, 25 bp, Homo sapien
cccagacgatgcacggcagaagccc

SEQ ID NO: 5113587 - DNA, 25 bp, Homo sapien
gacgatgcacggcagaagcccttcc

SEQ ID NO: 5113588 - DNA, 25 bp, Homo sapien
cattccatacagggttcacgctgtt

SEQ ID NO: 5113589 - DNA, 25 bp, Homo sapien
ctcattccatacagggttcacgctg

SEQ ID NO: 5113590 - DNA, 25 bp, Homo sapien
tcattccatacagggttcacgctgt

SEQ ID NO: 5113591 - DNA, 25 bp, Homo sapien
attccatacagggttcacgctgttc

SEQ ID NO: 5113592 - DNA, 25 bp, Homo sapien
tgaccaccacatgaagctcagagcc

SEQ ID NO: 5113593 - DNA, 25 bp, Homo sapien
ccatcgtctcatggtctttgaccac

SEQ ID NO: 5113594 - DNA, 25 bp, Homo sapien
tgcccttgaggtcccattcaaatcc

SEQ ID NO: 5113595 - DNA, 25 bp, Homo sapien
gggatgcccttgaggtcccattcaa

SEQ ID NO: 5113596 - DNA, 25 bp, Homo sapien
gatatggtcaatgctttcgggcccg

SEQ ID NO: 5113597 - DNA, 25 bp, Homo sapien
aaggatatggtcaatgctttcgggc

SEQ ID NO: 5113598 - DNA, 25 bp, Homo sapien
gtcctggatagaatccagggcaaaa

SEQ ID NO: 5113599 - DNA, 25 bp, Homo sapien
tgtcctggatagaatccagggcaaa

SEQ ID NO: 5113600 - DNA, 25 bp, Homo sapien
tgacaggaaagtgagagagccctgt

SEQ ID NO: 5113601 - DNA, 25 bp, Homo sapien
tccccctggttagcgtcaatgagcc

SEQ ID NO: 5113602 - DNA, 25 bp, Homo sapien
tgtatctccccctggttagcgtcaa

SEQ ID NO: 5113603 - DNA, 25 bp, Homo sapien
ctggttagcgtcaatgagccaggtg

SEQ ID NO: 5113604 - DNA, 25 bp, Homo sapien
cccaaaccttagccttaggcagcat

SEQ ID NO: 5113605 - DNA, 25 bp, Homo sapien
tactactgccgtatggcagaaggga

SEQ ID NO: 5113606 - DNA, 25 bp, Homo sapien
catccaggggtgctactactgccgt

SEQ ID NO: 5113607 - DNA, 25 bp, Homo sapien
tccaggggtgctactactgccgtat

SEQ ID NO: 5113608 - DNA, 25 bp, Homo sapien
ctactgccgtatggcagaagggaag

SEQ ID NO: 5113609 - DNA, 25 bp, Homo sapien
ggcattgaagctggcggacagacta

SEQ ID NO: 5113610 - DNA, 25 bp, Homo sapien
gggtggcgaggacctctcggagtgg

SEQ ID NO: 5113611 - DNA, 25 bp, Homo sapien
gacagactaggggtggcgaggacct

SEQ ID NO: 5113612 - DNA, 25 bp, Homo sapien
acctctcggagtgggaccttggctt

SEQ ID NO: 5113613 - DNA, 25 bp, Homo sapien
gggcggaagtagttccaatccatgg

SEQ ID NO: 5113614 - DNA, 25 bp, Homo sapien
agggcggaagtagttccaatccatg

SEQ ID NO: 5113615 - DNA, 25 bp, Homo sapien
cggtgtgtaggacacctgcaggacc

SEQ ID NO: 5113616 - DNA, 25 bp, Homo sapien
ctccaggcagcggtgtgtaggacac

SEQ ID NO: 5113617 - DNA, 25 bp, Homo sapien
ccaggcagcggtgtgtaggacacct

SEQ ID NO: 5113618 - DNA, 25 bp, Homo sapien
gtgtgtaggacacctgcaggaccag

SEQ ID NO: 5113619 - DNA, 25 bp, Homo sapien
tccagagtatctcgtgtccatggtg

SEQ ID NO: 5113620 - DNA, 25 bp, Homo sapien
ttctttccagagtatctcgtgtcca

SEQ ID NO: 5113621 - DNA, 25 bp, Homo sapien
ccagagtatctcgtgtccatggtgc

SEQ ID NO: 5113622 - DNA, 25 bp, Homo sapien
tttccagagtatctcgtgtccatgg

SEQ ID NO: 5113623 - DNA, 25 bp, Homo sapien
ggaaatcctgcggtttgtctgacag

SEQ ID NO: 5113624 - DNA, 25 bp, Homo sapien
gctttctagatgtaggcgcacttcg

SEQ ID NO: 5113625 - DNA, 25 bp, Homo sapien
tctccagtgagtccctggtcctctg

SEQ ID NO: 5113626 - DNA, 25 bp, Homo sapien
ctttgatccaggaatggctccgcct

SEQ ID NO: 5113627 - DNA, 25 bp, Homo sapien
tgccctgcagcggtaaccttgacca

SEQ ID NO: 5113628 - DNA, 25 bp, Homo sapien
ggcttgatgttcacccccggcagct

SEQ ID NO: 5113629 - DNA, 25 bp, Homo sapien
tgtggatccgcgtccgcttggtctg

SEQ ID NO: 5113630 - DNA, 25 bp, Homo sapien
tttcccttgtggatccgcgtccgct

SEQ ID NO: 5113631 - DNA, 25 bp, Homo sapien
caaggtcagcgccatacgtaaacac

SEQ ID NO: 5113632 - DNA, 25 bp, Homo sapien
tccagattggaaggcccaccaaggt

SEQ ID NO: 5113633 - DNA, 25 bp, Homo sapien
gaatgaattgccaggtgtctgcact

SEQ ID NO: 5113634 - DNA, 25 bp, Homo sapien
cactgggcttccagattggaaggcc

SEQ ID NO: 5113635 - DNA, 25 bp, Homo sapien
gagagacatatcagtgcctgctgat

SEQ ID NO: 5113636 - DNA, 25 bp, Homo sapien
aagagagacatatcagtgcctgctg

SEQ ID NO: 5113637 - DNA, 25 bp, Homo sapien
aaagagagacatatcagtgcctgct

SEQ ID NO: 5113638 - DNA, 25 bp, Homo sapien
caaagagagacatatcagtgcctgc

SEQ ID NO: 5113639 - DNA, 25 bp, Homo sapien
cccaggagagtcaaacaagttgaag

SEQ ID NO: 5113640 - DNA, 25 bp, Homo sapien
taaagatgggctcatcaaacagctc

SEQ ID NO: 5113641 - DNA, 25 bp, Homo sapien
cgtgataaagatgggctcatcaaac

SEQ ID NO: 5113642 - DNA, 25 bp, Homo sapien
tcatcaaacagctccccaggagagt

SEQ ID NO: 5113643 - DNA, 25 bp, Homo sapien
gccagctgagctgttgcaggcattt

SEQ ID NO: 5113644 - DNA, 25 bp, Homo sapien
ctgagcagtgggctctcccgcagct

SEQ ID NO: 5113645 - DNA, 25 bp, Homo sapien
ctgcctgccagctgagctgttgcag

SEQ ID NO: 5113646 - DNA, 25 bp, Homo sapien
gatgctgagcagtgggctctcccgc

SEQ ID NO: 5113647 - DNA, 25 bp, Homo sapien
acttactcaattccagagactgttc

SEQ ID NO: 5113648 - DNA, 25 bp, Homo sapien
tacacggcatagacagagctggaat

SEQ ID NO: 5113649 - DNA, 25 bp, Homo sapien
gagaaagatcatggaaactcacatt

SEQ ID NO: 5113650 - DNA, 25 bp, Homo sapien
acagggaacatgtggcccacacggc

SEQ ID NO: 5113651 - DNA, 25 bp, Homo sapien
catctgtcctgagagaacgagagtc

SEQ ID NO: 5113652 - DNA, 25 bp, Homo sapien
ccggaactccccgaggagagcatct

SEQ ID NO: 5113653 - DNA, 25 bp, Homo sapien
tgtcctgagagaacgagagtctacc

SEQ ID NO: 5113654 - DNA, 25 bp, Homo sapien
tcctgagagaacgagagtctaccac

SEQ ID NO: 5113655 - DNA, 25 bp, Homo sapien
caccaacacggagaagtgagaactg

SEQ ID NO: 5113656 - DNA, 25 bp, Homo sapien
tccaccaacacggagaagtgagaac

SEQ ID NO: 5113657 - DNA, 25 bp, Homo sapien
ccaacacggagaagtgagaactgac

SEQ ID NO: 5113658 - DNA, 25 bp, Homo sapien
aacacggagaagtgagaactgactg

SEQ ID NO: 5113659 - DNA, 25 bp, Homo sapien
ctctgtaaatggtgcccacgtccat

SEQ ID NO: 5113660 - DNA, 25 bp, Homo sapien
tctctgtaaatggtgcccacgtcca

SEQ ID NO: 5113661 - DNA, 25 bp, Homo sapien
gctctctgtaaatggtgcccacgtc

SEQ ID NO: 5113662 - DNA, 25 bp, Homo sapien
ggggctctctgtaaatggtgcccac

SEQ ID NO: 5113663 - DNA, 25 bp, Homo sapien
cagccacttcctgagataggcgtgc

SEQ ID NO: 5113664 - DNA, 25 bp, Homo sapien
agccacttcctgagataggcgtgcc

SEQ ID NO: 5113665 - DNA, 25 bp, Homo sapien
tcctcgcagggctacgcctgtgggc

SEQ ID NO: 5113666 - DNA, 25 bp, Homo sapien
tgcggcaagtcctcggcccggaaga

SEQ ID NO: 5113667 - DNA, 25 bp, Homo sapien
ctgtgggccggagcaggttgctttc

SEQ ID NO: 5113668 - DNA, 25 bp, Homo sapien
tccttgtcttcagaggggtcttttc

SEQ ID NO: 5113669 - DNA, 25 bp, Homo sapien
tcgaagccaaagatctgtttcacgt

SEQ ID NO: 5113670 - DNA, 25 bp, Homo sapien
ccgcaaagctgacctccacaaaggg

SEQ ID NO: 5113671 - DNA, 25 bp, Homo sapien
acgttgtccatcacggcatcgtcca

SEQ ID NO: 5113672 - DNA, 25 bp, Homo sapien
caagttcttcttgttactctcgaag

SEQ ID NO: 5113673 - DNA, 25 bp, Homo sapien
aggcagtgtgatgttctggttccac

SEQ ID NO: 5113674 - DNA, 25 bp, Homo sapien
gcaggcagtgtgatgttctggttcc

SEQ ID NO: 5113675 - DNA, 25 bp, Homo sapien
ttccactgagggttggccgtcttct

SEQ ID NO: 5113676 - DNA, 25 bp, Homo sapien
gggttggccgtcttctccaagatct

SEQ ID NO: 5113677 - DNA, 25 bp, Homo sapien
cagtctatgatacgaatcctcattt

SEQ ID NO: 5113678 - DNA, 25 bp, Homo sapien
gaatcctcattttttcgcacatgga

SEQ ID NO: 5113679 - DNA, 25 bp, Homo sapien
gatacgaatcctcattttttcgcac

SEQ ID NO: 5113680 - DNA, 25 bp, Homo sapien
tcattttttcgcacatggagggaaa

SEQ ID NO: 5113681 - DNA, 25 bp, Homo sapien
ctgggatgtaaagcacatctttcct

SEQ ID NO: 5113682 - DNA, 25 bp, Homo sapien
gatgtaaagcacatctttcctccaa

SEQ ID NO: 5113683 - DNA, 25 bp, Homo sapien
atgtaaagcacatctttcctccaaa

SEQ ID NO: 5113684 - DNA, 25 bp, Homo sapien
gggatgtaaagcacatctttcctcc

SEQ ID NO: 5113685 - DNA, 25 bp, Homo sapien
gattgtacagtacgccgatgccttt

SEQ ID NO: 5113686 - DNA, 25 bp, Homo sapien
cacacatggagagcggagatgaaga

SEQ ID NO: 5113687 - DNA, 25 bp, Homo sapien
atgcctttgacacagctcacccgga

SEQ ID NO: 5113688 - DNA, 25 bp, Homo sapien
ccagagatgcaaccaccagattctg

SEQ ID NO: 5113689 - DNA, 25 bp, Homo sapien
gggcagagattttcgacatactcag

SEQ ID NO: 5113690 - DNA, 25 bp, Homo sapien
catactcaggtaggtggtagccacg

SEQ ID NO: 5113691 - DNA, 25 bp, Homo sapien
ggtagccacgatgtcattgtgagtc

SEQ ID NO: 5113692 - DNA, 25 bp, Homo sapien
cacgatgtcattgtgagtcaggcgg

SEQ ID NO: 5113693 - DNA, 25 bp, Homo sapien
ctgaagcgtaaagaaatggaaaagg

SEQ ID NO: 5113694 - DNA, 25 bp, Homo sapien
tttcgaaggcttgacagcacctgca

SEQ ID NO: 5113695 - DNA, 25 bp, Homo sapien
tgaggctttcgaaggcttgacagca

SEQ ID NO: 5113696 - DNA, 25 bp, Homo sapien
agtctgaggctttcgaaggcttgac

SEQ ID NO: 5113697 - DNA, 25 bp, Homo sapien
gctttcgaaggcttgacagcacctg

SEQ ID NO: 5113698 - DNA, 25 bp, Homo sapien
atgtagcagggcccaaaagtgggga

SEQ ID NO: 5113699 - DNA, 25 bp, Homo sapien
aggttgatgtagcagggcccaaaag

SEQ ID NO: 5113700 - DNA, 25 bp, Homo sapien
tgatgtagcagggcccaaaagtggg

SEQ ID NO: 5113701 - DNA, 25 bp, Homo sapien
gttgatgtagcagggcccaaaagtg

SEQ ID NO: 5113702 - DNA, 25 bp, Homo sapien
gcagaagccggccacgataagccac

SEQ ID NO: 5113703 - DNA, 25 bp, Homo sapien
agaagccggccacgataagccacac

SEQ ID NO: 5113704 - DNA, 25 bp, Homo sapien
gatgtcatccgcaggaaggtcctcc

SEQ ID NO: 5113705 - DNA, 25 bp, Homo sapien
tccacccggaggatgtcatccgcag

SEQ ID NO: 5113706 - DNA, 25 bp, Homo sapien
ctgagagcagagagtagaccagagg

SEQ ID NO: 5113707 - DNA, 25 bp, Homo sapien
cgggaggagcaaagaaaggcaccca

SEQ ID NO: 5113708 - DNA, 25 bp, Homo sapien
agcagagagtagaccagagggtcac

SEQ ID NO: 5113709 - DNA, 25 bp, Homo sapien
gagggtcacgggaggagcaaagaaa

SEQ ID NO: 5113710 - DNA, 25 bp, Homo sapien
tagaaggccgcaaacagggagtact

SEQ ID NO: 5113711 - DNA, 25 bp, Homo sapien
tgttcccgtagttcccgatgctgac

SEQ ID NO: 5113712 - DNA, 25 bp, Homo sapien
caggcaggtcatgtcgaacttgttc

SEQ ID NO: 5113713 - DNA, 25 bp, Homo sapien
gatgctgacctcaaactggatggca

SEQ ID NO: 5113714 - DNA, 25 bp, Homo sapien
cagggtaggtagtagtagtggcacc

SEQ ID NO: 5113715 - DNA, 25 bp, Homo sapien
tctcgattctatggctgatgtcctc

SEQ ID NO: 5113716 - DNA, 25 bp, Homo sapien
cagcaccaccacaggtttcacgtta

SEQ ID NO: 5113717 - DNA, 25 bp, Homo sapien
tcctcccagtaggatgacagcacca

SEQ ID NO: 5113718 - DNA, 25 bp, Homo sapien
tgagctcatccgtcagctgagccac

SEQ ID NO: 5113719 - DNA, 25 bp, Homo sapien
cgatgagctcatccgtcagctgagc

SEQ ID NO: 5113720 - DNA, 25 bp, Homo sapien
gcgatgagctcatccgtcagctgag

SEQ ID NO: 5113721 - DNA, 25 bp, Homo sapien
caccagcgagtccacgtcctccgtg

SEQ ID NO: 5113722 - DNA, 25 bp, Homo sapien
gagtgggcctgagagcgggggcaag

SEQ ID NO: 5113723 - DNA, 25 bp, Homo sapien
ctgagtgggcctgagagcgggggca

SEQ ID NO: 5113724 - DNA, 25 bp, Homo sapien
tgggcctgagagcgggggcaagcgg

SEQ ID NO: 5113725 - DNA, 25 bp, Homo sapien
ggcctgagagcgggggcaagcgggt

SEQ ID NO: 5113726 - DNA, 25 bp, Homo sapien
tataatatttactgccccgagggtg

SEQ ID NO: 5113727 - DNA, 25 bp, Homo sapien
catgctcggtgggtagcggggcggg

SEQ ID NO: 5113728 - DNA, 25 bp, Homo sapien
tggaggggcatgctcggtgggtagc

SEQ ID NO: 5113729 - DNA, 25 bp, Homo sapien
tgcacaccctgtagtaatataatat

SEQ ID NO: 5113730 - DNA, 25 bp, Homo sapien
ttctgccaatttccccgagctatgc

SEQ ID NO: 5113731 - DNA, 25 bp, Homo sapien
gcagtacgcaaactccatctcggga

SEQ ID NO: 5113732 - DNA, 25 bp, Homo sapien
tatgcagaaccaattaccgccggag

SEQ ID NO: 5113733 - DNA, 25 bp, Homo sapien
aggccctcggcgcactacatttttc

SEQ ID NO: 5113734 - DNA, 25 bp, Homo sapien
ccagggcacgcagacgcaggagcca

SEQ ID NO: 5113735 - DNA, 25 bp, Homo sapien
cagtgatttggctcaggtgatgggt

SEQ ID NO: 5113736 - DNA, 25 bp, Homo sapien
actgtggccgagcttcagggccagg

SEQ ID NO: 5113737 - DNA, 25 bp, Homo sapien
gtgtctcatggatgtcacccagagg

SEQ ID NO: 5113738 - DNA, 25 bp, Homo sapien
tggtatgccacacgcttgtctccct

SEQ ID NO: 5113739 - DNA, 25 bp, Homo sapien
caccccgccgggagaagaggacttg

SEQ ID NO: 5113740 - DNA, 25 bp, Homo sapien
tccagatgacgatgtccggcaggct

SEQ ID NO: 5113741 - DNA, 25 bp, Homo sapien
gaaagattgtctgtagcttcccaca

SEQ ID NO: 5113742 - DNA, 25 bp, Homo sapien
ctccctgtcacccgtccccaaagct

SEQ ID NO: 5113743 - DNA, 25 bp, Homo sapien
cctgtcacccgtccccaaagctggt

SEQ ID NO: 5113744 - DNA, 25 bp, Homo sapien
tgtcacccgtccccaaagctggtga

SEQ ID NO: 5113745 - DNA, 25 bp, Homo sapien
tccctgtcacccgtccccaaagctg

SEQ ID NO: 5113746 - DNA, 25 bp, Homo sapien
aatctaatgggaaacatgccccagg

SEQ ID NO: 5113747 - DNA, 25 bp, Homo sapien
tccctgaggctacatggccaagagg

SEQ ID NO: 5113748 - DNA, 25 bp, Homo sapien
ggtcagccccactcagatatggcca

SEQ ID NO: 5113749 - DNA, 25 bp, Homo sapien
ccaggaactggcttaggaggtagac

SEQ ID NO: 5113750 - DNA, 25 bp, Homo sapien
caggatccggatgtcccagtgagag

SEQ ID NO: 5113751 - DNA, 25 bp, Homo sapien
agaaacccacagtccccttcaggat

SEQ ID NO: 5113752 - DNA, 25 bp, Homo sapien
ccacagtccccttcaggatccggat

SEQ ID NO: 5113753 - DNA, 25 bp, Homo sapien
aacccacagtccccttcaggatccg

SEQ ID NO: 5113754 - DNA, 25 bp, Homo sapien
gcatccgggcgccaggcaccttctc

SEQ ID NO: 5113755 - DNA, 25 bp, Homo sapien
aaaccacagcttgacccgtatctgc

SEQ ID NO: 5113756 - DNA, 25 bp, Homo sapien
tcccctcagcaaactggttgaactc

SEQ ID NO: 5113757 - DNA, 25 bp, Homo sapien
ggttgaactccttctcatccactga

SEQ ID NO: 5113758 - DNA, 25 bp, Homo sapien
cttgggtagcttgatcttgcccgtg

SEQ ID NO: 5113759 - DNA, 25 bp, Homo sapien
ggtgaggcccgttgtgccccagttc

SEQ ID NO: 5113760 - DNA, 25 bp, Homo sapien
ttgcccgtgacgtcagaaaacttgg

SEQ ID NO: 5113761 - DNA, 25 bp, Homo sapien
cccaacaagggccaacttagtctcg

SEQ ID NO: 5113762 - DNA, 25 bp, Homo sapien
ttccacgaagctcaggtgaccggcg

SEQ ID NO: 5113763 - DNA, 25 bp, Homo sapien
gaagccgggtctggttctcaaacac

SEQ ID NO: 5113764 - DNA, 25 bp, Homo sapien
tgtcactcatgtagatccactggcc

SEQ ID NO: 5113765 - DNA, 25 bp, Homo sapien
cacatcggtgtagttgtcactcatg

SEQ ID NO: 5113766 - DNA, 25 bp, Homo sapien
accaaatgtctagaccccacctgcc

SEQ ID NO: 5113767 - DNA, 25 bp, Homo sapien
gaccaaatgtctagaccccacctgc

SEQ ID NO: 5113768 - DNA, 25 bp, Homo sapien
agaccaaatgtctagaccccacctg

SEQ ID NO: 5113769 - DNA, 25 bp, Homo sapien
acaaaaccgaacaggcaagcaatga

SEQ ID NO: 5113770 - DNA, 25 bp, Homo sapien
ctaaggacaaaaccgaacaggcaag

SEQ ID NO: 5113771 - DNA, 25 bp, Homo sapien
aaggacaaaaccgaacaggcaagca

SEQ ID NO: 5113772 - DNA, 25 bp, Homo sapien
ggacaaaaccgaacaggcaagcaat

SEQ ID NO: 5113773 - DNA, 25 bp, Homo sapien
cagcccggttgaggtctgtggacca

SEQ ID NO: 5113774 - DNA, 25 bp, Homo sapien
ccggttgaggtctgtggaccattcc

SEQ ID NO: 5113775 - DNA, 25 bp, Homo sapien
cttgctcatcgacagcccggttgag

SEQ ID NO: 5113776 - DNA, 25 bp, Homo sapien
atcgacagcccggttgaggtctgtg

SEQ ID NO: 5113777 - DNA, 25 bp, Homo sapien
tagtacatcttctcagcagggaccc

SEQ ID NO: 5113778 - DNA, 25 bp, Homo sapien
gggatggtgatgctatactcccagc

SEQ ID NO: 5113779 - DNA, 25 bp, Homo sapien
cgccgtcggtgtgtgtagtacatct

SEQ ID NO: 5113780 - DNA, 25 bp, Homo sapien
gcttccatttggctgagatccctcc

SEQ ID NO: 5113781 - DNA, 25 bp, Homo sapien
tctgtgagcacctccagtgagtccc

SEQ ID NO: 5113782 - DNA, 25 bp, Homo sapien
ggtctgcatctgtgcctactggcca

SEQ ID NO: 5113783 - DNA, 25 bp, Homo sapien
cacatgcatgtgtctgtgggcatgc

SEQ ID NO: 5113784 - DNA, 25 bp, Homo sapien
tcccaggtgtctgtgcatgctgtgt

SEQ ID NO: 5113785 - DNA, 25 bp, Homo sapien
gtggaacttccagccaaaaagagag

SEQ ID NO: 5113786 - DNA, 25 bp, Homo sapien
gaaggcatctgtcttgcggtactcg

SEQ ID NO: 5113787 - DNA, 25 bp, Homo sapien
aaaagagaggcgtactcccagccct

SEQ ID NO: 5113788 - DNA, 25 bp, Homo sapien
cagtggctccatgcgacggcgccag

SEQ ID NO: 5113789 - DNA, 25 bp, Homo sapien
gacattactgagaaggcagcactca

SEQ ID NO: 5113790 - DNA, 25 bp, Homo sapien
gtcagtcatgccgaagacttcactg

SEQ ID NO: 5113791 - DNA, 25 bp, Homo sapien
tgagctggtcagtcatgccgaagac

SEQ ID NO: 5113792 - DNA, 25 bp, Homo sapien
aggctgagctggtcagtcatgccga

SEQ ID NO: 5113793 - DNA, 25 bp, Homo sapien
tcttgatcagacaggagttccccat

SEQ ID NO: 5113794 - DNA, 25 bp, Homo sapien
aaaggctgcccgtgctaatgagcag

SEQ ID NO: 5113795 - DNA, 25 bp, Homo sapien
gcttgttagacacagagattctcgg

SEQ ID NO: 5113796 - DNA, 25 bp, Homo sapien
gaactgtcagattaccagcaaggct

SEQ ID NO: 5113797 - DNA, 25 bp, Homo sapien
cagcagacgattagcagacggagcc

SEQ ID NO: 5113798 - DNA, 25 bp, Homo sapien
gaggctggatggaacgcgctataat

SEQ ID NO: 5113799 - DNA, 25 bp, Homo sapien
gaacgccaggaagattatgaaaccc

SEQ ID NO: 5113800 - DNA, 25 bp, Homo sapien
ataaaataatgctcgggatggagac

SEQ ID NO: 5113801 - DNA, 25 bp, Homo sapien
ttgggctagctgtgtaagggatctt

SEQ ID NO: 5113802 - DNA, 25 bp, Homo sapien
gggctagctgtgtaagggatcttgc

SEQ ID NO: 5113803 - DNA, 25 bp, Homo sapien
tgggctagctgtgtaagggatcttg

SEQ ID NO: 5113804 - DNA, 25 bp, Homo sapien
tggaatggggtaggcctttggaagc

SEQ ID NO: 5113805 - DNA, 25 bp, Homo sapien
accccaggatgaggccatctgtggg

SEQ ID NO: 5113806 - DNA, 25 bp, Homo sapien
gatggaatggggtaggcctttggaa

SEQ ID NO: 5113807 - DNA, 25 bp, Homo sapien
tgggatggaatggggtaggcctttg

SEQ ID NO: 5113808 - DNA, 25 bp, Homo sapien
aagctcagagtcgggtctgatgtta

SEQ ID NO: 5113809 - DNA, 25 bp, Homo sapien
gaagctcagagtcgggtctgatgtt

SEQ ID NO: 5113810 - DNA, 25 bp, Homo sapien
ctcctctccctcctgcccactaccc

SEQ ID NO: 5113811 - DNA, 25 bp, Homo sapien
aaatttctccatgtgcctctctcct

SEQ ID NO: 5113812 - DNA, 25 bp, Homo sapien
tcaaatttctccatgtgcctctctc

SEQ ID NO: 5113813 - DNA, 25 bp, Homo sapien
cctctccctcctgcccactacccaa

SEQ ID NO: 5113814 - DNA, 25 bp, Homo sapien
cacaccgaagctcaaggtggagacg

SEQ ID NO: 5113815 - DNA, 25 bp, Homo sapien
tcaaggtggagacggacatggaatc

SEQ ID NO: 5113816 - DNA, 25 bp, Homo sapien
tgggtctgttcacaccgaagctcaa

SEQ ID NO: 5113817 - DNA, 25 bp, Homo sapien
gcaggaaatcgtgggtctgttcaca

SEQ ID NO: 5113818 - DNA, 25 bp, Homo sapien
ctgactaattaacatgtccttgggc

SEQ ID NO: 5113819 - DNA, 25 bp, Homo sapien
tgactaattaacatgtccttgggcc

SEQ ID NO: 5113820 - DNA, 25 bp, Homo sapien
gactaattaacatgtccttgggcca

SEQ ID NO: 5113821 - DNA, 25 bp, Homo sapien
ctggagtggttaagagctggggctc

SEQ ID NO: 5113822 - DNA, 25 bp, Homo sapien
ggagtggttaagagctggggctcgg

SEQ ID NO: 5113823 - DNA, 25 bp, Homo sapien
tggagtggttaagagctggggctcg

SEQ ID NO: 5113824 - DNA, 25 bp, Homo sapien
gagtggttaagagctggggctcggg

SEQ ID NO: 5113825 - DNA, 25 bp, Homo sapien
aaaaaacagaggtgccagagtgagt

SEQ ID NO: 5113826 - DNA, 25 bp, Homo sapien
gaaaaaacagaggtgccagagtgag

SEQ ID NO: 5113827 - DNA, 25 bp, Homo sapien
aaaaacagaggtgccagagtgagtg

SEQ ID NO: 5113828 - DNA, 25 bp, Homo sapien
cagcgtagatggtagcggttcccat

SEQ ID NO: 5113829 - DNA, 25 bp, Homo sapien
ggcctggtacatgtagcagcgtaga

SEQ ID NO: 5113830 - DNA, 25 bp, Homo sapien
ttgtccatcgcagccaggtcccggg

SEQ ID NO: 5113831 - DNA, 25 bp, Homo sapien
aagagtccttgtccatcgcagccag

SEQ ID NO: 5113832 - DNA, 25 bp, Homo sapien
gctggaggatgggccactgagggcc

SEQ ID NO: 5113833 - DNA, 25 bp, Homo sapien
acagagctggaggatgggccactga

SEQ ID NO: 5113834 - DNA, 25 bp, Homo sapien
gagctggaggatgggccactgaggg

SEQ ID NO: 5113835 - DNA, 25 bp, Homo sapien
tgcacagagctggaggatgggccac

SEQ ID NO: 5113836 - DNA, 25 bp, Homo sapien
caggaccttctactttcttgagagg

SEQ ID NO: 5113837 - DNA, 25 bp, Homo sapien
ctactttcttgagaggtactcaccc

SEQ ID NO: 5113838 - DNA, 25 bp, Homo sapien
ccttctactttcttgagaggtactc

SEQ ID NO: 5113839 - DNA, 25 bp, Homo sapien
agagggcacaggaccttctactttc

SEQ ID NO: 5113840 - DNA, 25 bp, Homo sapien
agcagccccatcagcccaggcaatg

SEQ ID NO: 5113841 - DNA, 25 bp, Homo sapien
tcacaattgcacattgtagcggctg

SEQ ID NO: 5113842 - DNA, 25 bp, Homo sapien
acattgtagcggctgtgcacgctgt

SEQ ID NO: 5113843 - DNA, 25 bp, Homo sapien
atcagcccaggcaatgagctcagcg

SEQ ID NO: 5113844 - DNA, 25 bp, Homo sapien
agttggtgtcactagagcagactct

SEQ ID NO: 5113845 - DNA, 25 bp, Homo sapien
tgtgagcatgctgcaggatcatctg

SEQ ID NO: 5113846 - DNA, 25 bp, Homo sapien
gagcatgctgcaggatcatctggaa

SEQ ID NO: 5113847 - DNA, 25 bp, Homo sapien
ctagagcagactctagggcagtggt

SEQ ID NO: 5113848 - DNA, 25 bp, Homo sapien
ctgcatgggccggagagggggaggg

SEQ ID NO: 5113849 - DNA, 25 bp, Homo sapien
tgagagatgtcttctccagagccat

SEQ ID NO: 5113850 - DNA, 25 bp, Homo sapien
agcagggaccctgagagatgtcttc

SEQ ID NO: 5113851 - DNA, 25 bp, Homo sapien
gaccctgagagatgtcttctccaga

SEQ ID NO: 5113852 - DNA, 25 bp, Homo sapien
caatgctgggcggttgctcagcaac

SEQ ID NO: 5113853 - DNA, 25 bp, Homo sapien
tggccggctcgccaaagatctcgat

SEQ ID NO: 5113854 - DNA, 25 bp, Homo sapien
cgtagaagatgagcgtctggtccca

SEQ ID NO: 5113855 - DNA, 25 bp, Homo sapien
taagtgtcatggtcgtacagctcca

SEQ ID NO: 5113856 - DNA, 25 bp, Homo sapien
actcggttgacagatgcagcgaccc

SEQ ID NO: 5113857 - DNA, 25 bp, Homo sapien
gatgagctcaaaagaggccagcagc

SEQ ID NO: 5113858 - DNA, 25 bp, Homo sapien
ctgcccctcgtcagtgggaaccagg

SEQ ID NO: 5113859 - DNA, 25 bp, Homo sapien
ggccagccgtggcatccgttccaga

SEQ ID NO: 5113860 - DNA, 25 bp, Homo sapien
aaccaggaatatggtggatggccgg

SEQ ID NO: 5113861 - DNA, 25 bp, Homo sapien
ctcaaaaccaggaatatggtggatg

SEQ ID NO: 5113862 - DNA, 25 bp, Homo sapien
caaaaccaggaatatggtggatggc

SEQ ID NO: 5113863 - DNA, 25 bp, Homo sapien
aaaccaggaatatggtggatggccg

SEQ ID NO: 5113864 - DNA, 25 bp, Homo sapien
ccatgggatgtggcacatccaggag

SEQ ID NO: 5113865 - DNA, 25 bp, Homo sapien
catgggatgtggcacatccaggaga

SEQ ID NO: 5113866 - DNA, 25 bp, Homo sapien
gccatgggatgtggcacatccagga

SEQ ID NO: 5113867 - DNA, 25 bp, Homo sapien
atgggatgtggcacatccaggagat

SEQ ID NO: 5113868 - DNA, 25 bp, Homo sapien
ctcatccaggatccttgatgtctcc

SEQ ID NO: 5113869 - DNA, 25 bp, Homo sapien
catccaggatccttgatgtctcctg

SEQ ID NO: 5113870 - DNA, 25 bp, Homo sapien
ccaggatccttgatgtctcctgcac

SEQ ID NO: 5113871 - DNA, 25 bp, Homo sapien
tccaggatccttgatgtctcctgca

SEQ ID NO: 5113872 - DNA, 25 bp, Homo sapien
tcttcacagggatcgggccaggagc

SEQ ID NO: 5113873 - DNA, 25 bp, Homo sapien
aggaggctcccagccctccagaaag

SEQ ID NO: 5113874 - DNA, 25 bp, Homo sapien
aaaggcttgagcactcttcacaggg

SEQ ID NO: 5113875 - DNA, 25 bp, Homo sapien
gactctcatgggctcccatggccag

SEQ ID NO: 5113876 - DNA, 25 bp, Homo sapien
gacttctgttgggttccttctgcga

SEQ ID NO: 5113877 - DNA, 25 bp, Homo sapien
gatagacactttacagagcttgcct

SEQ ID NO: 5113878 - DNA, 25 bp, Homo sapien
tgtctgtgctagaaatgcagcccct

SEQ ID NO: 5113879 - DNA, 25 bp, Homo sapien
catccatacatggagggcctgacac

SEQ ID NO: 5113880 - DNA, 25 bp, Homo sapien
agaggaccatgtgcctgcccgccag

SEQ ID NO: 5113881 - DNA, 25 bp, Homo sapien
tatgcgtgcacacactgcctattcc

SEQ ID NO: 5113882 - DNA, 25 bp, Homo sapien
cagagaggaccatgtgcctgcccgc

SEQ ID NO: 5113883 - DNA, 25 bp, Homo sapien
actgcctattccatcctggcagatc

SEQ ID NO: 5113884 - DNA, 25 bp, Homo sapien
ctcgatggcggtacgctggagcgct

SEQ ID NO: 5113885 - DNA, 25 bp, Homo sapien
ccatgtagatgttggcctccctctg

SEQ ID NO: 5113886 - DNA, 25 bp, Homo sapien
tacgctggagcgctggcttgatgtt

SEQ ID NO: 5113887 - DNA, 25 bp, Homo sapien
gcttgatgttctgaggaaccatgta

SEQ ID NO: 5113888 - DNA, 25 bp, Homo sapien
cacactctaccacgaggctggggga

SEQ ID NO: 5113889 - DNA, 25 bp, Homo sapien
ggtaactcttcatgttccgcaggcc

SEQ ID NO: 5113890 - DNA, 25 bp, Homo sapien
gttcttccggaggttcctgatgaca

SEQ ID NO: 5113891 - DNA, 25 bp, Homo sapien
tgatgacacaggactgcaccgtctg

SEQ ID NO: 5113892 - DNA, 25 bp, Homo sapien
ctaggtctaggcatcccagggaggt

SEQ ID NO: 5113893 - DNA, 25 bp, Homo sapien
gccactaggtctaggcatcccaggg

SEQ ID NO: 5113894 - DNA, 25 bp, Homo sapien
ggtgagctcctttgagggggcccag

SEQ ID NO: 5113895 - DNA, 25 bp, Homo sapien
tctggccactaggtctaggcatccc

SEQ ID NO: 5113896 - DNA, 25 bp, Homo sapien
gagcggatggtacactggcccacca

SEQ ID NO: 5113897 - DNA, 25 bp, Homo sapien
gggatggactctccgccgagtaggg

SEQ ID NO: 5113898 - DNA, 25 bp, Homo sapien
gccggcggccaaactggcggttatc

SEQ ID NO: 5113899 - DNA, 25 bp, Homo sapien
tatcgatgaccttgacggtgatggg

SEQ ID NO: 5113900 - DNA, 25 bp, Homo sapien
ccaggactgagtaggctcacatcgt

SEQ ID NO: 5113901 - DNA, 25 bp, Homo sapien
atgtcgatgagcacgtcttccccag

SEQ ID NO: 5113902 - DNA, 25 bp, Homo sapien
cttccccaggactgagtaggctcac

SEQ ID NO: 5113903 - DNA, 25 bp, Homo sapien
ccttgtcatcaatgtcgatgagcac

SEQ ID NO: 5113904 - DNA, 25 bp, Homo sapien
tggagaccttagaataaggcccctc

SEQ ID NO: 5113905 - DNA, 25 bp, Homo sapien
agcacaaggtgccacagacctcctg

SEQ ID NO: 5113906 - DNA, 25 bp, Homo sapien
tgccatgctctgtggcattggcatc

SEQ ID NO: 5113907 - DNA, 25 bp, Homo sapien
tgtctccaaggagccaccaagcaca

SEQ ID NO: 5113908 - DNA, 25 bp, Homo sapien
agccagggctgcatcaactgtgagg

SEQ ID NO: 5113909 - DNA, 25 bp, Homo sapien
gcatcaactgtgaggatggaacagg

SEQ ID NO: 5113910 - DNA, 25 bp, Homo sapien
ggctgcatcaactgtgaggatggaa

SEQ ID NO: 5113911 - DNA, 25 bp, Homo sapien
aggacacagtgaacacatccagcac

SEQ ID NO: 5113912 - DNA, 25 bp, Homo sapien
gagaagccgtgttagtgggggccaa

SEQ ID NO: 5113913 - DNA, 25 bp, Homo sapien
ttagtgggggccaagctcgacagac

SEQ ID NO: 5113914 - DNA, 25 bp, Homo sapien
ccaagctcgacagaccgtctgcaag

SEQ ID NO: 5113915 - DNA, 25 bp, Homo sapien
gggccaagctcgacagaccgtctgc

SEQ ID NO: 5113916 - DNA, 25 bp, Homo sapien
tggcacatgtcaaatgattggcaaa

SEQ ID NO: 5113917 - DNA, 25 bp, Homo sapien
tttggatatgatttataccaaaagg

SEQ ID NO: 5113918 - DNA, 25 bp, Homo sapien
gtttgtggtacatttgcaggacttt

SEQ ID NO: 5113919 - DNA, 25 bp, Homo sapien
caagtcagcacatccaaattcaaaa

SEQ ID NO: 5113920 - DNA, 25 bp, Homo sapien
ctcagaggtgcaaccatgaagttca

SEQ ID NO: 5113921 - DNA, 25 bp, Homo sapien
aatagctaacagatttcggccctga

SEQ ID NO: 5113922 - DNA, 25 bp, Homo sapien
tcacttgggagccacaccctgtaat

SEQ ID NO: 5113923 - DNA, 25 bp, Homo sapien
gaaggtccagattacaccagtgacg

SEQ ID NO: 5113924 - DNA, 25 bp, Homo sapien
gatctccagtactgctaccccatag

SEQ ID NO: 5113925 - DNA, 25 bp, Homo sapien
tgctaccccatagctctacatctgt

SEQ ID NO: 5113926 - DNA, 25 bp, Homo sapien
tagtactggaatcacggtacaaagg

SEQ ID NO: 5113927 - DNA, 25 bp, Homo sapien
tcttgttgatattgccagtgtcatc

SEQ ID NO: 5113928 - DNA, 25 bp, Homo sapien
agtaacataacaacccaacactggg

SEQ ID NO: 5113929 - DNA, 25 bp, Homo sapien
caaagatatgctgtaacctgtaaag

SEQ ID NO: 5113930 - DNA, 25 bp, Homo sapien
taaggctcagagtagatatctacaa

SEQ ID NO: 5113931 - DNA, 25 bp, Homo sapien
aatcatcatcatcaagatagtaaca

SEQ ID NO: 5113932 - DNA, 25 bp, Homo sapien
tcatgaatacgggtggaaaaactgg

SEQ ID NO: 5113933 - DNA, 25 bp, Homo sapien
catgaatacgggtggaaaaactggc

SEQ ID NO: 5113934 - DNA, 25 bp, Homo sapien
agctgctgagacgaatggcctatga

SEQ ID NO: 5113935 - DNA, 25 bp, Homo sapien
tgctgagacgaatggcctatgacct

SEQ ID NO: 5113936 - DNA, 25 bp, Homo sapien
gacgaatggcctatgaccttcctcc

SEQ ID NO: 5113937 - DNA, 25 bp, Homo sapien
gagacgaatggcctatgaccttcct

SEQ ID NO: 5113938 - DNA, 25 bp, Homo sapien
tcaaagttccaggtgatgtctggca

SEQ ID NO: 5113939 - DNA, 25 bp, Homo sapien
ccaagttcccctcttggctgcaatt

SEQ ID NO: 5113940 - DNA, 25 bp, Homo sapien
ccaggtgatgtctggcagctgctgt

SEQ ID NO: 5113941 - DNA, 25 bp, Homo sapien
tcttggctgcaattccctcttcctt

SEQ ID NO: 5113942 - DNA, 25 bp, Homo sapien
ggtcaggtggggtagcgtacagcat

SEQ ID NO: 5113943 - DNA, 25 bp, Homo sapien
ggccgctctggaccacaaggctttc

SEQ ID NO: 5113944 - DNA, 25 bp, Homo sapien
ggactcgccaagcagcattcttcag

SEQ ID NO: 5113945 - DNA, 25 bp, Homo sapien
gctgctaggccgctctggaccacaa

SEQ ID NO: 5113946 - DNA, 25 bp, Homo sapien
aacaggactcgccaagcagcattct

SEQ ID NO: 5113947 - DNA, 25 bp, Homo sapien
tgctccaccaatcgatgaactcttc

SEQ ID NO: 5113948 - DNA, 25 bp, Homo sapien
aggtaggagccgcacttttccctct

SEQ ID NO: 5113949 - DNA, 25 bp, Homo sapien
tggaggcaaagaatttgctccacca

SEQ ID NO: 5113950 - DNA, 25 bp, Homo sapien
ggtgtcaaaatccttctccaggtag

SEQ ID NO: 5113951 - DNA, 25 bp, Homo sapien
ggtgaaacctcactttcaggaactg

SEQ ID NO: 5113952 - DNA, 25 bp, Homo sapien
tatccacggttgtaaacaaaggatg

SEQ ID NO: 5113953 - DNA, 25 bp, Homo sapien
tgtgtaattcttgtgtagctccacc

SEQ ID NO: 5113954 - DNA, 25 bp, Homo sapien
tgtctccaaagtttccgtatccacg

SEQ ID NO: 5113955 - DNA, 25 bp, Homo sapien
gaatcacattactccagttcctgaa

SEQ ID NO: 5113956 - DNA, 25 bp, Homo sapien
gctgaagttaatcccctaggagttc

SEQ ID NO: 5113957 - DNA, 25 bp, Homo sapien
ctcgaactacaaccagtccttctgt

SEQ ID NO: 5113958 - DNA, 25 bp, Homo sapien
tcaagacaggctcattggaatcaca

SEQ ID NO: 5113959 - DNA, 25 bp, Homo sapien
taacctatattgagtcacagagtgc

SEQ ID NO: 5113960 - DNA, 25 bp, Homo sapien
caggtggtaagcaagtcagtcagac

SEQ ID NO: 5113961 - DNA, 25 bp, Homo sapien
aataagccatggactctctccccag

SEQ ID NO: 5113962 - DNA, 25 bp, Homo sapien
cacagagtgcttcagtaatctacag

SEQ ID NO: 5113963 - DNA, 25 bp, Homo sapien
ttgaaggtgttacaaaagtcagaca

SEQ ID NO: 5113964 - DNA, 25 bp, Homo sapien
tcttgccccggtacagcttgaaggt

SEQ ID NO: 5113965 - DNA, 25 bp, Homo sapien
tacaaaagtcagacaggccctcaaa

SEQ ID NO: 5113966 - DNA, 25 bp, Homo sapien
cgtcttgccccggtacagcttgaag

SEQ ID NO: 5113967 - DNA, 25 bp, Homo sapien
gtagatacggaccaagcactcctgg

SEQ ID NO: 5113968 - DNA, 25 bp, Homo sapien
tgggctgcaggccaaatgctcggac

SEQ ID NO: 5113969 - DNA, 25 bp, Homo sapien
gctgcaggccaaatgctcggacaat

SEQ ID NO: 5113970 - DNA, 25 bp, Homo sapien
aatgctcggacaatgtagatacgga

SEQ ID NO: 5113971 - DNA, 25 bp, Homo sapien
ttgaggcttcatgagtgccttgcct

SEQ ID NO: 5113972 - DNA, 25 bp, Homo sapien
caggggatgtagttatcctggtcac

SEQ ID NO: 5113973 - DNA, 25 bp, Homo sapien
ttccctatggagatcttgatgtaag

SEQ ID NO: 5113974 - DNA, 25 bp, Homo sapien
tccaaatacgggctccagcgtgcag

SEQ ID NO: 5113975 - DNA, 25 bp, Homo sapien
tggagatcttgatgtaaggatcaca

SEQ ID NO: 5113976 - DNA, 25 bp, Homo sapien
gccccaaacttggacagcagcctgt

SEQ ID NO: 5113977 - DNA, 25 bp, Homo sapien
gaggtcatagtcatagagagtgatc

SEQ ID NO: 5113978 - DNA, 25 bp, Homo sapien
tgttctccaggtcgacgaccgtctc

SEQ ID NO: 5113979 - DNA, 25 bp, Homo sapien
caccgatcttttcgtccttggagag

SEQ ID NO: 5113980 - DNA, 25 bp, Homo sapien
tcctgaaacattacacggtctgtcc

SEQ ID NO: 5113981 - DNA, 25 bp, Homo sapien
tatctcttcaatggaatattcttta

SEQ ID NO: 5113982 - DNA, 25 bp, Homo sapien
tgtccggtacacaggtgccttgact

SEQ ID NO: 5113983 - DNA, 25 bp, Homo sapien
tacacggtctgtccggtacacaggt

SEQ ID NO: 5113984 - DNA, 25 bp, Homo sapien
caggtgtgggtttgggatcctgcca

SEQ ID NO: 5113985 - DNA, 25 bp, Homo sapien
ggccgtgactccacgtgctccggga

SEQ ID NO: 5113986 - DNA, 25 bp, Homo sapien
gaagcacatgcagagccagacgctc

SEQ ID NO: 5113987 - DNA, 25 bp, Homo sapien
tgctgctgaagcacatgcagagcca

SEQ ID NO: 5113988 - DNA, 25 bp, Homo sapien
gaaataggtcgacccacatctgcag

SEQ ID NO: 5113989 - DNA, 25 bp, Homo sapien
gccttcggaaataggtcgacccaca

SEQ ID NO: 5113990 - DNA, 25 bp, Homo sapien
ttctggctctccgtggggtgatgtt

SEQ ID NO: 5113991 - DNA, 25 bp, Homo sapien
tcggaaataggtcgacccacatctg

SEQ ID NO: 5113992 - DNA, 25 bp, Homo sapien
acctagatttcctaccaaaggatgg

SEQ ID NO: 5113993 - DNA, 25 bp, Homo sapien
atccacctagatttcctaccaaagg

SEQ ID NO: 5113994 - DNA, 25 bp, Homo sapien
ggtatcactctaatccacctagatt

SEQ ID NO: 5113995 - DNA, 25 bp, Homo sapien
gggaaaggtatcactctaatccacc

SEQ ID NO: 5113996 - DNA, 25 bp, Homo sapien
tattccagataatacaacgcaggaa

SEQ ID NO: 5113997 - DNA, 25 bp, Homo sapien
ggatcacatctctggtattccagat

SEQ ID NO: 5113998 - DNA, 25 bp, Homo sapien
atcttctcccccgtgaggctcaggt

SEQ ID NO: 5113999 - DNA, 25 bp, Homo sapien
tcacataaatgtcgctcatcttctc

SEQ ID NO: 5114000 - DNA, 25 bp, Homo sapien
aatgcacgtctgtcttttgcttgtg

SEQ ID NO: 5114001 - DNA, 25 bp, Homo sapien
tttgcttgtgttcttcaaagccaat

SEQ ID NO: 5114002 - DNA, 25 bp, Homo sapien
gcttgtgttcttcaaagccaatcat

SEQ ID NO: 5114003 - DNA, 25 bp, Homo sapien
acctcccagggaacgataatgcacg

SEQ ID NO: 5114004 - DNA, 25 bp, Homo sapien
caccacagggaatcggaaggacact

SEQ ID NO: 5114005 - DNA, 25 bp, Homo sapien
ccacagggaatcggaaggacactga

SEQ ID NO: 5114006 - DNA, 25 bp, Homo sapien
tggcaccacagggaatcggaaggac

SEQ ID NO: 5114007 - DNA, 25 bp, Homo sapien
gcaccacagggaatcggaaggacac

SEQ ID NO: 5114008 - DNA, 25 bp, Homo sapien
cagatctggaacaccactcgtgctg

SEQ ID NO: 5114009 - DNA, 25 bp, Homo sapien
tctggaacaccactcgtgctgggat

SEQ ID NO: 5114010 - DNA, 25 bp, Homo sapien
gaacaccactcgtgctgggattttg

SEQ ID NO: 5114011 - DNA, 25 bp, Homo sapien
gtcccagatctggaacaccactcgt

SEQ ID NO: 5114012 - DNA, 25 bp, Homo sapien
tgcattttctaattccttacctgca

SEQ ID NO: 5114013 - DNA, 25 bp, Homo sapien
tctaattccttacctgcattttcta

SEQ ID NO: 5114014 - DNA, 25 bp, Homo sapien
attttctaattccttacctgcattt

SEQ ID NO: 5114015 - DNA, 25 bp, Homo sapien
aattccttacctgcattttctaatt

SEQ ID NO: 5114016 - DNA, 25 bp, Homo sapien
gagatgacctgaatacccaccagga

SEQ ID NO: 5114017 - DNA, 25 bp, Homo sapien
aggattaatcaaaacagggcccacg

SEQ ID NO: 5114018 - DNA, 25 bp, Homo sapien
gatgacctgaatacccaccaggaga

SEQ ID NO: 5114019 - DNA, 25 bp, Homo sapien
ggagaggattaatcaaaacagggcc

SEQ ID NO: 5114020 - DNA, 25 bp, Homo sapien
tatgtacaaatccattcatacaccg

SEQ ID NO: 5114021 - DNA, 25 bp, Homo sapien
catacaccgtctataaacagccata

SEQ ID NO: 5114022 - DNA, 25 bp, Homo sapien
tcttcaattactcatctatgtacaa

SEQ ID NO: 5114023 - DNA, 25 bp, Homo sapien
tcagtggctttaattacagccacaa

SEQ ID NO: 5114024 - DNA, 25 bp, Homo sapien
gccaagggtttctcgatcactgcca

SEQ ID NO: 5114025 - DNA, 25 bp, Homo sapien
caagggtttctcgatcactgccagc

SEQ ID NO: 5114026 - DNA, 25 bp, Homo sapien
gggtttctcgatcactgccagcctg

SEQ ID NO: 5114027 - DNA, 25 bp, Homo sapien
tttggccaagggtttctcgatcact

SEQ ID NO: 5114028 - DNA, 25 bp, Homo sapien
tgcggttgagatcgagctgcaggga

SEQ ID NO: 5114029 - DNA, 25 bp, Homo sapien
cggttgagatcgagctgcagggagc

SEQ ID NO: 5114030 - DNA, 25 bp, Homo sapien
gcggttgagatcgagctgcagggag

SEQ ID NO: 5114031 - DNA, 25 bp, Homo sapien
atgcggttgagatcgagctgcaggg

SEQ ID NO: 5114032 - DNA, 25 bp, Homo sapien
tcatccagctggtccaaggagcact

SEQ ID NO: 5114033 - DNA, 25 bp, Homo sapien
gggacacaaaccattctgggtggaa

SEQ ID NO: 5114034 - DNA, 25 bp, Homo sapien
aaagggacacaaaccattctgggtg

SEQ ID NO: 5114035 - DNA, 25 bp, Homo sapien
ctggtccaaggagcacttcttggct

SEQ ID NO: 5114036 - DNA, 25 bp, Homo sapien
tcatgctcactctctgctacaatct

SEQ ID NO: 5114037 - DNA, 25 bp, Homo sapien
gccagcaggccgctcctcatgctca

SEQ ID NO: 5114038 - DNA, 25 bp, Homo sapien
ttcatgttgggctcatcccggccct

SEQ ID NO: 5114039 - DNA, 25 bp, Homo sapien
gggtcctcaagcttagggttcatgt

SEQ ID NO: 5114040 - DNA, 25 bp, Homo sapien
tcttgtatggggaggtaaaccacag

SEQ ID NO: 5114041 - DNA, 25 bp, Homo sapien
catggtcttgtatggggaggtaaac

SEQ ID NO: 5114042 - DNA, 25 bp, Homo sapien
acgccgccacaggatgaacttcatg

SEQ ID NO: 5114043 - DNA, 25 bp, Homo sapien
cggaaacgccgccacaggatgaact

SEQ ID NO: 5114044 - DNA, 25 bp, Homo sapien
cgtagatgaagatggccaggaacag

SEQ ID NO: 5114045 - DNA, 25 bp, Homo sapien
gtagatgaagatggccaggaacagc

SEQ ID NO: 5114046 - DNA, 25 bp, Homo sapien
gaaggcgtagatgaagatggccagg

SEQ ID NO: 5114047 - DNA, 25 bp, Homo sapien
cgggaaggcgtagatgaagatggcc

SEQ ID NO: 5114048 - DNA, 25 bp, Homo sapien
gagaatgctgcaaccccttcaaggt

SEQ ID NO: 5114049 - DNA, 25 bp, Homo sapien
tgccaccaacataaggtcctcaagg

SEQ ID NO: 5114050 - DNA, 25 bp, Homo sapien
ggcacgacagccacctctggtatgg

SEQ ID NO: 5114051 - DNA, 25 bp, Homo sapien
ctgaagtgggaatcacagtgagccc

SEQ ID NO: 5114052 - DNA, 25 bp, Homo sapien
cagcctgtctgccatgggatcaatg

SEQ ID NO: 5114053 - DNA, 25 bp, Homo sapien
ctgccatgggatcaatgctctgggc

SEQ ID NO: 5114054 - DNA, 25 bp, Homo sapien
tgtctgccatgggatcaatgctctg

SEQ ID NO: 5114055 - DNA, 25 bp, Homo sapien
agcagcctgtctgccatgggatcaa

SEQ ID NO: 5114056 - DNA, 25 bp, Homo sapien
gaagtgagcactccccagtggcatg

SEQ ID NO: 5114057 - DNA, 25 bp, Homo sapien
gaaggccagagctaacctagtgcag

SEQ ID NO: 5114058 - DNA, 25 bp, Homo sapien
aactcaaaggagagtggcccgctgc

SEQ ID NO: 5114059 - DNA, 25 bp, Homo sapien
tccttagtcactatggcccagatgg

SEQ ID NO: 5114060 - DNA, 25 bp, Homo sapien
ctaggatctgacatccccacaccag

SEQ ID NO: 5114061 - DNA, 25 bp, Homo sapien
taggatctgacatccccacaccagc

SEQ ID NO: 5114062 - DNA, 25 bp, Homo sapien
aggatctgacatccccacaccagcc

SEQ ID NO: 5114063 - DNA, 25 bp, Homo sapien
gattaggccaactggaggaagctgc

SEQ ID NO: 5114064 - DNA, 25 bp, Homo sapien
tactggccaaatgaatgagtgactt

SEQ ID NO: 5114065 - DNA, 25 bp, Homo sapien
cagcttgtagcaaagacctgtgagc

SEQ ID NO: 5114066 - DNA, 25 bp, Homo sapien
tgtcccatggcctgaaagccaggtg

SEQ ID NO: 5114067 - DNA, 25 bp, Homo sapien
tgggacagtatgttccccagcgccg

SEQ ID NO: 5114068 - DNA, 25 bp, Homo sapien
tcctaattgggacagtatgttcccc

SEQ ID NO: 5114069 - DNA, 25 bp, Homo sapien
gctcctaattgggacagtatgttcc

SEQ ID NO: 5114070 - DNA, 25 bp, Homo sapien
taattgggacagtatgttccccagc

SEQ ID NO: 5114071 - DNA, 25 bp, Homo sapien
ggcacagcccagcactagagacagg

SEQ ID NO: 5114072 - DNA, 25 bp, Homo sapien
ggcacccttgattgagccctgcctg

SEQ ID NO: 5114073 - DNA, 25 bp, Homo sapien
tgtcgtggatgacccacggcacagc

SEQ ID NO: 5114074 - DNA, 25 bp, Homo sapien
tagagacagggcacccttgattgag

SEQ ID NO: 5114075 - DNA, 25 bp, Homo sapien
gcccagggcttacgggtcatcacac

SEQ ID NO: 5114076 - DNA, 25 bp, Homo sapien
gacctggcctcttccatcagacagg

SEQ ID NO: 5114077 - DNA, 25 bp, Homo sapien
ctcttccatcagacaggtgctgaag

SEQ ID NO: 5114078 - DNA, 25 bp, Homo sapien
gcagcccagggcttacgggtcatca

SEQ ID NO: 5114079 - DNA, 25 bp, Homo sapien
catccataccatgtggggctcaaca

SEQ ID NO: 5114080 - DNA, 25 bp, Homo sapien
ggagaggacgctcgtggctcttcaa

SEQ ID NO: 5114081 - DNA, 25 bp, Homo sapien
gagacagggacccatggtgatccca

SEQ ID NO: 5114082 - DNA, 25 bp, Homo sapien
atcaggcaaacccataccctccgaa

SEQ ID NO: 5114083 - DNA, 25 bp, Homo sapien
cacggccccttctacagggcaggag

SEQ ID NO: 5114084 - DNA, 25 bp, Homo sapien
agtcccatgctggaggggaccccac

SEQ ID NO: 5114085 - DNA, 25 bp, Homo sapien
ggccccttctacagggcaggagagt

SEQ ID NO: 5114086 - DNA, 25 bp, Homo sapien
gccccttctacagggcaggagagtc

SEQ ID NO: 5114087 - DNA, 25 bp, Homo sapien
agtgtgggccggtccatctgtctgt

SEQ ID NO: 5114088 - DNA, 25 bp, Homo sapien
ctgatccaaaaaagcgttgggttgg

SEQ ID NO: 5114089 - DNA, 25 bp, Homo sapien
ggggtgatctcagagctccatgtta

SEQ ID NO: 5114090 - DNA, 25 bp, Homo sapien
tactgaaatatgtctgagctgatcc

SEQ ID NO: 5114091 - DNA, 25 bp, Homo sapien
cacggcagccgtggttattgcagat

SEQ ID NO: 5114092 - DNA, 25 bp, Homo sapien
cagaatgaaattcgccggcaaggag

SEQ ID NO: 5114093 - DNA, 25 bp, Homo sapien
caaagatggcttacgctacaaggaa

SEQ ID NO: 5114094 - DNA, 25 bp, Homo sapien
cagatggcagtgaaaaccggtttca

SEQ ID NO: 5114095 - DNA, 25 bp, Homo sapien
caccttgctgcaagaattggtctca

SEQ ID NO: 5114096 - DNA, 25 bp, Homo sapien
gagtgttaacaagccctgtaaccga

SEQ ID NO: 5114097 - DNA, 25 bp, Homo sapien
ttagtaaagtcccttcagtgaagga

SEQ ID NO: 5114098 - DNA, 25 bp, Homo sapien
ctgtaaccgaagagggaccgcgttg

SEQ ID NO: 5114099 - DNA, 25 bp, Homo sapien
ttgctgctgccccatgatctgactg

SEQ ID NO: 5114100 - DNA, 25 bp, Homo sapien
gctgccccatgatctgactggtgta

SEQ ID NO: 5114101 - DNA, 25 bp, Homo sapien
ctgactggtgtagggaatccaggaa

SEQ ID NO: 5114102 - DNA, 25 bp, Homo sapien
aatccaggaatccctgcaactctct

SEQ ID NO: 5114103 - DNA, 25 bp, Homo sapien
ccacctgaagaaggctcaccccagc

SEQ ID NO: 5114104 - DNA, 25 bp, Homo sapien
aagaaggctcaccccagcccttgct

SEQ ID NO: 5114105 - DNA, 25 bp, Homo sapien
gaaggctcaccccagcccttgctgc

SEQ ID NO: 5114106 - DNA, 25 bp, Homo sapien
ggctcaccccagcccttgctgccat

SEQ ID NO: 5114107 - DNA, 25 bp, Homo sapien
tcagggccagagcttggttctgagt

SEQ ID NO: 5114108 - DNA, 25 bp, Homo sapien
tgagttgtgagacttggagaatccg

SEQ ID NO: 5114109 - DNA, 25 bp, Homo sapien
cttggagaatccgtcgtgtgcccac

SEQ ID NO: 5114110 - DNA, 25 bp, Homo sapien
tgagacttggagaatccgtcgtgtg

SEQ ID NO: 5114111 - DNA, 25 bp, Homo sapien
tccttgttccggagacggccactta

SEQ ID NO: 5114112 - DNA, 25 bp, Homo sapien
ctatttataatccttgttccggaga

SEQ ID NO: 5114113 - DNA, 25 bp, Homo sapien
gcaaaaaatagcctgtggcccagac

SEQ ID NO: 5114114 - DNA, 25 bp, Homo sapien
tataatccttgttccggagacggcc

SEQ ID NO: 5114115 - DNA, 25 bp, Homo sapien
cgctaccacttgcaacaacaattct

SEQ ID NO: 5114116 - DNA, 25 bp, Homo sapien
ctaccacttgcaacaacaattctgc

SEQ ID NO: 5114117 - DNA, 25 bp, Homo sapien
aacaacaattctgctatcactccca

SEQ ID NO: 5114118 - DNA, 25 bp, Homo sapien
tgcaacaacaattctgctatcactc

SEQ ID NO: 5114119 - DNA, 25 bp, Homo sapien
tactatgagattcaatcatctttgc

SEQ ID NO: 5114120 - DNA, 25 bp, Homo sapien
aattccaccatccccactactatga

SEQ ID NO: 5114121 - DNA, 25 bp, Homo sapien
accatccccactactatgagattca

SEQ ID NO: 5114122 - DNA, 25 bp, Homo sapien
actatgagattcaatcatctttgcc

SEQ ID NO: 5114123 - DNA, 25 bp, Homo sapien
gctgcacttgcagggatctaacccc

SEQ ID NO: 5114124 - DNA, 25 bp, Homo sapien
cagaacagtaaggtctagagatcac

SEQ ID NO: 5114125 - DNA, 25 bp, Homo sapien
tccgtgtgaattaggccatcagaac

SEQ ID NO: 5114126 - DNA, 25 bp, Homo sapien
taaaggctgccgtgcaattccgtgt

SEQ ID NO: 5114127 - DNA, 25 bp, Homo sapien
ctgggcagtacagcagcagggccgg

SEQ ID NO: 5114128 - DNA, 25 bp, Homo sapien
tgggctgggcagtacagcagcaggg

SEQ ID NO: 5114129 - DNA, 25 bp, Homo sapien
gctgggctgggcagtacagcagcag

SEQ ID NO: 5114130 - DNA, 25 bp, Homo sapien
gggcagtacagcagcagggccgggt

SEQ ID NO: 5114131 - DNA, 25 bp, Homo sapien
gatgtttggtgtcctacaacctggc

SEQ ID NO: 5114132 - DNA, 25 bp, Homo sapien
tcactggcggtgaaagtctcctgta

SEQ ID NO: 5114133 - DNA, 25 bp, Homo sapien
cgttaatggactgtgcaggcatgga

SEQ ID NO: 5114134 - DNA, 25 bp, Homo sapien
cacacggcggcagcgttaatggact

SEQ ID NO: 5114135 - DNA, 25 bp, Homo sapien
cacttctcaggcactaaacgtttcc

SEQ ID NO: 5114136 - DNA, 25 bp, Homo sapien
acagtccacacgatttattgttcca

SEQ ID NO: 5114137 - DNA, 25 bp, Homo sapien
catgggcttgcacggtcctgagtct

SEQ ID NO: 5114138 - DNA, 25 bp, Homo sapien
gagtcgtaactcgtcagaggtcaca

SEQ ID NO: 5114139 - DNA, 25 bp, Homo sapien
catgtgtctggaaacgtactgctta

SEQ ID NO: 5114140 - DNA, 25 bp, Homo sapien
cacctacccatgtgtctggaaacgt

SEQ ID NO: 5114141 - DNA, 25 bp, Homo sapien
ccacctacccatgtgtctggaaacg

SEQ ID NO: 5114142 - DNA, 25 bp, Homo sapien
gtctggaaacgtactgcttatccat

SEQ ID NO: 5114143 - DNA, 25 bp, Homo sapien
tgagactcccaggtgcagattccct

SEQ ID NO: 5114144 - DNA, 25 bp, Homo sapien
tgtgtacaatgtacgggatcctcag

SEQ ID NO: 5114145 - DNA, 25 bp, Homo sapien
agatgggcatcttggcagacaggcc

SEQ ID NO: 5114146 - DNA, 25 bp, Homo sapien
cctccaggcagacattgtgtacaat

SEQ ID NO: 5114147 - DNA, 25 bp, Homo sapien
caagcctcacacgaaaggagtcaga

SEQ ID NO: 5114148 - DNA, 25 bp, Homo sapien
gctgcccaagcctcacacgaaagga

SEQ ID NO: 5114149 - DNA, 25 bp, Homo sapien
cctcacacgaaaggagtcagagcct

SEQ ID NO: 5114150 - DNA, 25 bp, Homo sapien
cacgaaaggagtcagagcctggcct

SEQ ID NO: 5114151 - DNA, 25 bp, Homo sapien
cactactccggcggagcagccgggg

SEQ ID NO: 5114152 - DNA, 25 bp, Homo sapien
ctactccggcggagcagccggggca

SEQ ID NO: 5114153 - DNA, 25 bp, Homo sapien
actactccggcggagcagccggggc

SEQ ID NO: 5114154 - DNA, 25 bp, Homo sapien
gcaggccgtcgggagagcggcagaa

SEQ ID NO: 5114155 - DNA, 25 bp, Homo sapien
gcagcaggccgtcgggagagcggca

SEQ ID NO: 5114156 - DNA, 25 bp, Homo sapien
agcagcaggccgtcgggagagcggc

SEQ ID NO: 5114157 - DNA, 25 bp, Homo sapien
agcaggccgtcgggagagcggcaga

SEQ ID NO: 5114158 - DNA, 25 bp, Homo sapien
ggacttctgcttggaagacggaatg

SEQ ID NO: 5114159 - DNA, 25 bp, Homo sapien
ccataggacttctgcttggaagacg

SEQ ID NO: 5114160 - DNA, 25 bp, Homo sapien
gcttagggcccagaaagacctgagc

SEQ ID NO: 5114161 - DNA, 25 bp, Homo sapien
aggcaaaagcttcccgggtgtgcca

SEQ ID NO: 5114162 - DNA, 25 bp, Homo sapien
catagtagttattcagggagtgcac

SEQ ID NO: 5114163 - DNA, 25 bp, Homo sapien
ttggcatcccctctatccgcttcat

SEQ ID NO: 5114164 - DNA, 25 bp, Homo sapien
tgtggtgtcactgttgctaccctct

SEQ ID NO: 5114165 - DNA, 25 bp, Homo sapien
gtagtcatcatagtagttattcagg

SEQ ID NO: 5114166 - DNA, 25 bp, Homo sapien
agtgtttgccatggaatttcccagc

SEQ ID NO: 5114167 - DNA, 25 bp, Homo sapien
tgagtgtttgccatggaatttccca

SEQ ID NO: 5114168 - DNA, 25 bp, Homo sapien
tgtctgagtgtttgccatggaattt

SEQ ID NO: 5114169 - DNA, 25 bp, Homo sapien
ctgagtgtttgccatggaatttccc

SEQ ID NO: 5114170 - DNA, 25 bp, Homo sapien
aatgcaactaatgctgcgcagctgg

SEQ ID NO: 5114171 - DNA, 25 bp, Homo sapien
gggccgctaatcagaaacacaggcc

SEQ ID NO: 5114172 - DNA, 25 bp, Homo sapien
ggtgataatgggcagccagctctca

SEQ ID NO: 5114173 - DNA, 25 bp, Homo sapien
gcagggccggcaccgaggtgataat

SEQ ID NO: 5114174 - DNA, 25 bp, Homo sapien
ctccctgaccacatggagtccccaa

SEQ ID NO: 5114175 - DNA, 25 bp, Homo sapien
ccctgaccacatggagtccccaaag

SEQ ID NO: 5114176 - DNA, 25 bp, Homo sapien
ctgaccacatggagtccccaaagcc

SEQ ID NO: 5114177 - DNA, 25 bp, Homo sapien
tccctgaccacatggagtccccaaa

SEQ ID NO: 5114178 - DNA, 25 bp, Homo sapien
ggcaggaaagatggaggaccctcct

SEQ ID NO: 5114179 - DNA, 25 bp, Homo sapien
acagccctcatcaccactggggcca

SEQ ID NO: 5114180 - DNA, 25 bp, Homo sapien
aggaaagatggaggaccctccttca

SEQ ID NO: 5114181 - DNA, 25 bp, Homo sapien
ggtggtgcggctggtggcaggaaag

SEQ ID NO: 5114182 - DNA, 25 bp, Homo sapien
ctggaaaggcggtgaaggtagccat

SEQ ID NO: 5114183 - DNA, 25 bp, Homo sapien
ggctggaaaggcggtgaaggtagcc

SEQ ID NO: 5114184 - DNA, 25 bp, Homo sapien
tttggctggaaaggcggtgaaggta

SEQ ID NO: 5114185 - DNA, 25 bp, Homo sapien
ggctttggctggaaaggcggtgaag

SEQ ID NO: 5114186 - DNA, 25 bp, Homo sapien
gggatgatcggagatgcaagggctg

SEQ ID NO: 5114187 - DNA, 25 bp, Homo sapien
cttggggatgatcggagatgcaagg

SEQ ID NO: 5114188 - DNA, 25 bp, Homo sapien
gagaaacacgggttgtacttccaga

SEQ ID NO: 5114189 - DNA, 25 bp, Homo sapien
aaacacgggttgtacttccagagca

SEQ ID NO: 5114190 - DNA, 25 bp, Homo sapien
gatatcgctcatccttggactccag

SEQ ID NO: 5114191 - DNA, 25 bp, Homo sapien
aacatgaggaggcagatatcgctca

SEQ ID NO: 5114192 - DNA, 25 bp, Homo sapien
cagcattccaagatggtctgggctc

SEQ ID NO: 5114193 - DNA, 25 bp, Homo sapien
ttccaagatggtctgggctcccagg

SEQ ID NO: 5114194 - DNA, 25 bp, Homo sapien
tagctccctagtgcctggttgaact

SEQ ID NO: 5114195 - DNA, 25 bp, Homo sapien
agctccctagtgcctggttgaactt

SEQ ID NO: 5114196 - DNA, 25 bp, Homo sapien
atagctccctagtgcctggttgaac

SEQ ID NO: 5114197 - DNA, 25 bp, Homo sapien
gctggaagtcatcagggtgttgttt

SEQ ID NO: 5114198 - DNA, 25 bp, Homo sapien
tggaagtcatcagggtgttgttttt

SEQ ID NO: 5114199 - DNA, 25 bp, Homo sapien
gggtgttgtttttgccagtggagcc

SEQ ID NO: 5114200 - DNA, 25 bp, Homo sapien
agctggaagtcatcagggtgttgtt

SEQ ID NO: 5114201 - DNA, 25 bp, Homo sapien
tatggacttcaggtgcagagttaca

SEQ ID NO: 5114202 - DNA, 25 bp, Homo sapien
cttcaggtgcagagttacagtgtct

SEQ ID NO: 5114203 - DNA, 25 bp, Homo sapien
gcagagttacagtgtctgctccatg

SEQ ID NO: 5114204 - DNA, 25 bp, Homo sapien
tttcttcttatggacttcaggtgca

SEQ ID NO: 5114205 - DNA, 25 bp, Homo sapien
ttggattttatccttatgctgtgat

SEQ ID NO: 5114206 - DNA, 25 bp, Homo sapien
actcatcagagattgagctactact

SEQ ID NO: 5114207 - DNA, 25 bp, Homo sapien
ttttatccttatgctgtgattccct

SEQ ID NO: 5114208 - DNA, 25 bp, Homo sapien
tgagctactactgtgtttccctttt

SEQ ID NO: 5114209 - DNA, 25 bp, Homo sapien
ggaggctgagatcccatgactctag

SEQ ID NO: 5114210 - DNA, 25 bp, Homo sapien
gatgcaggccatggaagtctcacct

SEQ ID NO: 5114211 - DNA, 25 bp, Homo sapien
tccagcagtccgttgattctatcct

SEQ ID NO: 5114212 - DNA, 25 bp, Homo sapien
gcatttgccagagccccttaagggt

SEQ ID NO: 5114213 - DNA, 25 bp, Homo sapien
ggctgcagacactcttggcctccat

SEQ ID NO: 5114214 - DNA, 25 bp, Homo sapien
ggcagggctgcagacactcttggcc

SEQ ID NO: 5114215 - DNA, 25 bp, Homo sapien
gctgaacgggcagtgaggaagtctt

SEQ ID NO: 5114216 - DNA, 25 bp, Homo sapien
ggggtacacggcagtaggggctgaa

SEQ ID NO: 5114217 - DNA, 25 bp, Homo sapien
tctctgatcttggagcatgtaatga

SEQ ID NO: 5114218 - DNA, 25 bp, Homo sapien
tctgatcttggagcatgtaatgaag

SEQ ID NO: 5114219 - DNA, 25 bp, Homo sapien
gatcttggagcatgtaatgaagggt

SEQ ID NO: 5114220 - DNA, 25 bp, Homo sapien
gctctctgatcttggagcatgtaat

SEQ ID NO: 5114221 - DNA, 25 bp, Homo sapien
gcatgggaagttagcatccagcttc

SEQ ID NO: 5114222 - DNA, 25 bp, Homo sapien
ccccatcccagtcgcatgggaagtt

SEQ ID NO: 5114223 - DNA, 25 bp, Homo sapien
tcccagtcgcatgggaagttagcat

SEQ ID NO: 5114224 - DNA, 25 bp, Homo sapien
cagtcgcatgggaagttagcatcca

SEQ ID NO: 5114225 - DNA, 25 bp, Homo sapien
cacaggtgtaactccaaactccctg

SEQ ID NO: 5114226 - DNA, 25 bp, Homo sapien
caaactccctgatctccacttgagt

SEQ ID NO: 5114227 - DNA, 25 bp, Homo sapien
acagcacatgctgtaggcagcagcc

SEQ ID NO: 5114228 - DNA, 25 bp, Homo sapien
tgctccattcattaccaacaccagg

SEQ ID NO: 5114229 - DNA, 25 bp, Homo sapien
cagaaattgctccagtggaggacat

SEQ ID NO: 5114230 - DNA, 25 bp, Homo sapien
ctctctgagtctccacagcaatggc

SEQ ID NO: 5114231 - DNA, 25 bp, Homo sapien
ctgagtctccacagcaatggcagaa

SEQ ID NO: 5114232 - DNA, 25 bp, Homo sapien
tggcagaaattgctccagtggagga

SEQ ID NO: 5114233 - DNA, 25 bp, Homo sapien
cctgccatccagtccacctcgtcag

SEQ ID NO: 5114234 - DNA, 25 bp, Homo sapien
catccagtccacctcgtcagtcatt

SEQ ID NO: 5114235 - DNA, 25 bp, Homo sapien
ccatccagtccacctcgtcagtcat

SEQ ID NO: 5114236 - DNA, 25 bp, Homo sapien
tgccatccagtccacctcgtcagtc

SEQ ID NO: 5114237 - DNA, 25 bp, Homo sapien
agcctccacggacagatccagggag

SEQ ID NO: 5114238 - DNA, 25 bp, Homo sapien
taaacctacaaactgaaacacatcc

SEQ ID NO: 5114239 - DNA, 25 bp, Homo sapien
aaacctacaaactgaaacacatcca

SEQ ID NO: 5114240 - DNA, 25 bp, Homo sapien
tcctaaacctacaaactgaaacaca

SEQ ID NO: 5114241 - DNA, 25 bp, Homo sapien
gggaagatacgctttgcaacctgga

SEQ ID NO: 5114242 - DNA, 25 bp, Homo sapien
tctagctgggaagatacgctttgca

SEQ ID NO: 5114243 - DNA, 25 bp, Homo sapien
tcaattcgcctctattctagctggg

SEQ ID NO: 5114244 - DNA, 25 bp, Homo sapien
cgcctctattctagctgggaagata

SEQ ID NO: 5114245 - DNA, 25 bp, Homo sapien
tcagaagccctggaatggcgagtgc

SEQ ID NO: 5114246 - DNA, 25 bp, Homo sapien
ccatgtgaaaaggatgccgcgtccc

SEQ ID NO: 5114247 - DNA, 25 bp, Homo sapien
tggagctgtgactcgtgaatggaac

SEQ ID NO: 5114248 - DNA, 25 bp, Homo sapien
tcaagaacatggcagagacgtggct

SEQ ID NO: 5114249 - DNA, 25 bp, Homo sapien
tcagcagccgcctttctggccccac

SEQ ID NO: 5114250 - DNA, 25 bp, Homo sapien
atcagcagccgcctttctggcccca

SEQ ID NO: 5114251 - DNA, 25 bp, Homo sapien
caatcagcagccgcctttctggccc

SEQ ID NO: 5114252 - DNA, 25 bp, Homo sapien
tcaatcagcagccgcctttctggcc

SEQ ID NO: 5114253 - DNA, 25 bp, Homo sapien
aatctttgctcagaggctgctgttg

SEQ ID NO: 5114254 - DNA, 25 bp, Homo sapien
gctcagaggctgctgttgttcccat

SEQ ID NO: 5114255 - DNA, 25 bp, Homo sapien
taggaaatctttgctcagaggctgc

SEQ ID NO: 5114256 - DNA, 25 bp, Homo sapien
tgataggaaatctttgctcagaggc

SEQ ID NO: 5114257 - DNA, 25 bp, Homo sapien
cattcatagtgataggacttcccag

SEQ ID NO: 5114258 - DNA, 25 bp, Homo sapien
cagcacaagctactggacccagtgt

SEQ ID NO: 5114259 - DNA, 25 bp, Homo sapien
aagtcatttagggtccagcacaagc

SEQ ID NO: 5114260 - DNA, 25 bp, Homo sapien
ggccgtggcagatactccacatgcc

SEQ ID NO: 5114261 - DNA, 25 bp, Homo sapien
gaaccatggagagtgagtcatttca

SEQ ID NO: 5114262 - DNA, 25 bp, Homo sapien
ttctacagagcggaaccatggagag

SEQ ID NO: 5114263 - DNA, 25 bp, Homo sapien
tctacagagcggaaccatggagagt

SEQ ID NO: 5114264 - DNA, 25 bp, Homo sapien
ctccctggcggaacacagccgagga

SEQ ID NO: 5114265 - DNA, 25 bp, Homo sapien
cacagccgaggaagtcacattggca

SEQ ID NO: 5114266 - DNA, 25 bp, Homo sapien
gtgattaatggggtctcttctgcac

SEQ ID NO: 5114267 - DNA, 25 bp, Homo sapien
ccgaggaagtcacattggcaaatga

SEQ ID NO: 5114268 - DNA, 25 bp, Homo sapien
tgcagtggactgttgttcgtaagaa

SEQ ID NO: 5114269 - DNA, 25 bp, Homo sapien
aattcactgactccatgccctacgg

SEQ ID NO: 5114270 - DNA, 25 bp, Homo sapien
gccaaaccgcaggttgcatatggat

SEQ ID NO: 5114271 - DNA, 25 bp, Homo sapien
cagtaccctacagccggagtgaggt

SEQ ID NO: 5114272 - DNA, 25 bp, Homo sapien
ttgatagaacctttattccttggtg

SEQ ID NO: 5114273 - DNA, 25 bp, Homo sapien
gccagatggtttgatagaaccttta

SEQ ID NO: 5114274 - DNA, 25 bp, Homo sapien
cgcatgcatcttgagccagatggtt

SEQ ID NO: 5114275 - DNA, 25 bp, Homo sapien
gcatcttgagccagatggtttgata

SEQ ID NO: 5114276 - DNA, 25 bp, Homo sapien
tgctcacagacgttctgggcagagc

SEQ ID NO: 5114277 - DNA, 25 bp, Homo sapien
gacagtgctctgagcaactgcagag

SEQ ID NO: 5114278 - DNA, 25 bp, Homo sapien
acttctgacaagaaccaggttgctc

SEQ ID NO: 5114279 - DNA, 25 bp, Homo sapien
tttgcagagcttgtcaggaacttct

SEQ ID NO: 5114280 - DNA, 25 bp, Homo sapien
agccagatgcaccctcgtgtcaacc

SEQ ID NO: 5114281 - DNA, 25 bp, Homo sapien
tgtgcagatagcaccagagccagat

SEQ ID NO: 5114282 - DNA, 25 bp, Homo sapien
tgcagatagcaccagagccagatgc

SEQ ID NO: 5114283 - DNA, 25 bp, Homo sapien
ccagatgcaccctcgtgtcaacccc

SEQ ID NO: 5114284 - DNA, 25 bp, Homo sapien
atgagcctctgcactctgtaaggct

SEQ ID NO: 5114285 - DNA, 25 bp, Homo sapien
tgagcctctgcactctgtaaggctt

SEQ ID NO: 5114286 - DNA, 25 bp, Homo sapien
aggtctgatgagaaattgtctccaa

SEQ ID NO: 5114287 - DNA, 25 bp, Homo sapien
caggtgtttctaataagggctcctc

SEQ ID NO: 5114288 - DNA, 25 bp, Homo sapien
caggcctgcatcgggcacaggtgtt

SEQ ID NO: 5114289 - DNA, 25 bp, Homo sapien
aggcctgcatcgggcacaggtgttt

SEQ ID NO: 5114290 - DNA, 25 bp, Homo sapien
ggcctgcatcgggcacaggtgtttc

SEQ ID NO: 5114291 - DNA, 25 bp, Homo sapien
tattaattcgacacagaactctgtt

SEQ ID NO: 5114292 - DNA, 25 bp, Homo sapien
ttctcggtgaacttgagactttgcc

SEQ ID NO: 5114293 - DNA, 25 bp, Homo sapien
tcaaagcacataaattgcatccagt

SEQ ID NO: 5114294 - DNA, 25 bp, Homo sapien
ccttcttaggaataaattgtccctg

SEQ ID NO: 5114295 - DNA, 25 bp, Homo sapien
tgtctttacaaccacctggccacac

SEQ ID NO: 5114296 - DNA, 25 bp, Homo sapien
tacagtcaacctgagggcctcctgg

SEQ ID NO: 5114297 - DNA, 25 bp, Homo sapien
acctacagtcaacctgagggcctcc

SEQ ID NO: 5114298 - DNA, 25 bp, Homo sapien
cctgcccaggtcacctacagtcaac

SEQ ID NO: 5114299 - DNA, 25 bp, Homo sapien
ccaagcaagggtagcagagtaacag

SEQ ID NO: 5114300 - DNA, 25 bp, Homo sapien
tgagattccaggcacggacaaatgc

SEQ ID NO: 5114301 - DNA, 25 bp, Homo sapien
tgggtgctcaaccagataggcaatc

SEQ ID NO: 5114302 - DNA, 25 bp, Homo sapien
taggcaatcatcagtgaagcacagc

SEQ ID NO: 5114303 - DNA, 25 bp, Homo sapien
ccacgtgaaggccactaggagctca

SEQ ID NO: 5114304 - DNA, 25 bp, Homo sapien
taagtcagcttagtatttttcgtgg

SEQ ID NO: 5114305 - DNA, 25 bp, Homo sapien
tagtatttttcgtggagttcctgct

SEQ ID NO: 5114306 - DNA, 25 bp, Homo sapien
aaggaacacatgtggtccagcctct

SEQ ID NO: 5114307 - DNA, 25 bp, Homo sapien
tttccgactacccatgtaggcagcc

SEQ ID NO: 5114308 - DNA, 25 bp, Homo sapien
tccgactacccatgtaggcagccat

SEQ ID NO: 5114309 - DNA, 25 bp, Homo sapien
cctttccgactacccatgtaggcag

SEQ ID NO: 5114310 - DNA, 25 bp, Homo sapien
cagcctttccgactacccatgtagg

SEQ ID NO: 5114311 - DNA, 25 bp, Homo sapien
tttgtttctcaaaagcacactggtt

SEQ ID NO: 5114312 - DNA, 25 bp, Homo sapien
tctatttgtttctcaaaagcacact

SEQ ID NO: 5114313 - DNA, 25 bp, Homo sapien
tatggtttatctatttgtttctcaa

SEQ ID NO: 5114314 - DNA, 25 bp, Homo sapien
ttatggtttatctatttgtttctca

SEQ ID NO: 5114315 - DNA, 25 bp, Homo sapien
taagaaagtagatatgtattagtcc

SEQ ID NO: 5114316 - DNA, 25 bp, Homo sapien
tcttcagtaagaaagtagatatgta

SEQ ID NO: 5114317 - DNA, 25 bp, Homo sapien
agtttaataaactcacagtccacgt

SEQ ID NO: 5114318 - DNA, 25 bp, Homo sapien
cagtccacgtgggatcatggtggaa

SEQ ID NO: 5114319 - DNA, 25 bp, Homo sapien
caaggccgttattgactccaggagg

SEQ ID NO: 5114320 - DNA, 25 bp, Homo sapien
gacagccagaacagatgggagcagc

SEQ ID NO: 5114321 - DNA, 25 bp, Homo sapien
caggaggaactaaacattgtacagg

SEQ ID NO: 5114322 - DNA, 25 bp, Homo sapien
cggtgctttggcatgtgagacagcc

SEQ ID NO: 5114323 - DNA, 25 bp, Homo sapien
tcttttattgatgtagctccctagc

SEQ ID NO: 5114324 - DNA, 25 bp, Homo sapien
tgaaattgctgactcttatagcgga

SEQ ID NO: 5114325 - DNA, 25 bp, Homo sapien
agcggatttttccattcctccctgg

SEQ ID NO: 5114326 - DNA, 25 bp, Homo sapien
cacatgctaacattggcgttttccc

SEQ ID NO: 5114327 - DNA, 25 bp, Homo sapien
gaagaggaatgttgaaatctccaat

SEQ ID NO: 5114328 - DNA, 25 bp, Homo sapien
tatcactgataatattgggtctact

SEQ ID NO: 5114329 - DNA, 25 bp, Homo sapien
gatgtcctcttgatgaatttacccc

SEQ ID NO: 5114330 - DNA, 25 bp, Homo sapien
ctcaggctagtgtacagtagtgtga

SEQ ID NO: 5114331 - DNA, 25 bp, Homo sapien
cgcacacggtgcgcgcacccactga

SEQ ID NO: 5114332 - DNA, 25 bp, Homo sapien
cttcccaagtgaggcaatgctcgcc

SEQ ID NO: 5114333 - DNA, 25 bp, Homo sapien
gctcgcacacggtgcgcgcacccac

SEQ ID NO: 5114334 - DNA, 25 bp, Homo sapien
tcggctcgcacacggtgcgcgcacc

SEQ ID NO: 5114335 - DNA, 25 bp, Homo sapien
tctctgcccctgcaaaattttctca

SEQ ID NO: 5114336 - DNA, 25 bp, Homo sapien
tctcaatatctctgcccctgcaaaa

SEQ ID NO: 5114337 - DNA, 25 bp, Homo sapien
gtgtttctcaatatctctgcccctg

SEQ ID NO: 5114338 - DNA, 25 bp, Homo sapien
gctgtgtttctcaatatctctgccc

SEQ ID NO: 5114339 - DNA, 25 bp, Homo sapien
tgactttcccagctaggctgtgcag

SEQ ID NO: 5114340 - DNA, 25 bp, Homo sapien
tgcttaacgaagacagtaaaagagg

SEQ ID NO: 5114341 - DNA, 25 bp, Homo sapien
tgcagaagatgcttaacgaagacag

SEQ ID NO: 5114342 - DNA, 25 bp, Homo sapien
ggctgtgcagtctcccagggaggga

SEQ ID NO: 5114343 - DNA, 25 bp, Homo sapien
agtcggctctgcaaccagctgcttg

SEQ ID NO: 5114344 - DNA, 25 bp, Homo sapien
ccgcgcttctgagagtggtcttcca

SEQ ID NO: 5114345 - DNA, 25 bp, Homo sapien
agctcttccggtcccataggctcag

SEQ ID NO: 5114346 - DNA, 25 bp, Homo sapien
gaatctgactgtgtgcaagcctcag

SEQ ID NO: 5114347 - DNA, 25 bp, Homo sapien
cctggcccggggagtacaagaacat

SEQ ID NO: 5114348 - DNA, 25 bp, Homo sapien
gtcctgatcgctccaacttctcaag

SEQ ID NO: 5114349 - DNA, 25 bp, Homo sapien
tccccggaagtcctgatcgctccaa

SEQ ID NO: 5114350 - DNA, 25 bp, Homo sapien
ggaagtcctgatcgctccaacttct

SEQ ID NO: 5114351 - DNA, 25 bp, Homo sapien
tcttaagacatgctctctctcctgc

SEQ ID NO: 5114352 - DNA, 25 bp, Homo sapien
tgttcatgaaggtggctttctctct

SEQ ID NO: 5114353 - DNA, 25 bp, Homo sapien
gcattaatggagcaggtgagcgtct

SEQ ID NO: 5114354 - DNA, 25 bp, Homo sapien
cttaggctcactctgagcagaggtg

SEQ ID NO: 5114355 - DNA, 25 bp, Homo sapien
ctgggcagtatcagctgccaatttg

SEQ ID NO: 5114356 - DNA, 25 bp, Homo sapien
tttttccactggcccaactgcactt

SEQ ID NO: 5114357 - DNA, 25 bp, Homo sapien
actggcccaactgcacttcttgccc

SEQ ID NO: 5114358 - DNA, 25 bp, Homo sapien
gcagtatcagctgccaatttgctct

SEQ ID NO: 5114359 - DNA, 25 bp, Homo sapien
cccatttgtcatggaccagggagag

SEQ ID NO: 5114360 - DNA, 25 bp, Homo sapien
agagacatctgcttcctccgagggc

SEQ ID NO: 5114361 - DNA, 25 bp, Homo sapien
tagagccgttgaaaatcctgcccag

SEQ ID NO: 5114362 - DNA, 25 bp, Homo sapien
gagaggcgtgcggaatgacaactca

SEQ ID NO: 5114363 - DNA, 25 bp, Homo sapien
agtgtccaccgagaaggccttggga

SEQ ID NO: 5114364 - DNA, 25 bp, Homo sapien
agggacacgagagcttgagggacac

SEQ ID NO: 5114365 - DNA, 25 bp, Homo sapien
ggccttgggagatcttgagggacac

SEQ ID NO: 5114366 - DNA, 25 bp, Homo sapien
tcagcgtccttcttgcccagtgtcc

SEQ ID NO: 5114367 - DNA, 25 bp, Homo sapien
gggacccttgcactccgtgaatgca

SEQ ID NO: 5114368 - DNA, 25 bp, Homo sapien
tgaatgcataacaacagggaccgtg

SEQ ID NO: 5114369 - DNA, 25 bp, Homo sapien
agcacctgtggtccgtgtctctgcg

SEQ ID NO: 5114370 - DNA, 25 bp, Homo sapien
tgtctctgcgcgagggattttggcc

SEQ ID NO: 5114371 - DNA, 25 bp, Homo sapien
cagcttggttccagtctcacccttg

SEQ ID NO: 5114372 - DNA, 25 bp, Homo sapien
gttccagtctcacccttggttccag

SEQ ID NO: 5114373 - DNA, 25 bp, Homo sapien
ttccagctgcgccttccaggcccat

SEQ ID NO: 5114374 - DNA, 25 bp, Homo sapien
agtctcacccttggttccagctgcg

SEQ ID NO: 5114375 - DNA, 25 bp, Homo sapien
cactggtgggccatggctgccctgt

SEQ ID NO: 5114376 - DNA, 25 bp, Homo sapien
ctcagagccgccgagtccatcaggg

SEQ ID NO: 5114377 - DNA, 25 bp, Homo sapien
tgcaaccccacagaagaacgattgg

SEQ ID NO: 5114378 - DNA, 25 bp, Homo sapien
caggtgctcgatctggctttatctc

SEQ ID NO: 5114379 - DNA, 25 bp, Homo sapien
ctgcgtggaggactgaggagggtga

SEQ ID NO: 5114380 - DNA, 25 bp, Homo sapien
gcgtggaggactgaggagggtgagg

SEQ ID NO: 5114381 - DNA, 25 bp, Homo sapien
tgcgtggaggactgaggagggtgag

SEQ ID NO: 5114382 - DNA, 25 bp, Homo sapien
caggtcctcatggtgttggcccagg

SEQ ID NO: 5114383 - DNA, 25 bp, Homo sapien
agctgtccaacagccagtccaggac

SEQ ID NO: 5114384 - DNA, 25 bp, Homo sapien
ccaggtcctcatggtgttggcccag

SEQ ID NO: 5114385 - DNA, 25 bp, Homo sapien
tgcctcggagctgtccaacagccag

SEQ ID NO: 5114386 - DNA, 25 bp, Homo sapien
tcctccgcactgtgacgctgcccca

SEQ ID NO: 5114387 - DNA, 25 bp, Homo sapien
gcactgtgacgctgccccagtcctc

SEQ ID NO: 5114388 - DNA, 25 bp, Homo sapien
ctcacctctcctccgcactgtgacg

SEQ ID NO: 5114389 - DNA, 25 bp, Homo sapien
cctcacctctcctccgcactgtgac

SEQ ID NO: 5114390 - DNA, 25 bp, Homo sapien
gtgaggccagttcgccattccttgc

SEQ ID NO: 5114391 - DNA, 25 bp, Homo sapien
gcacagaggtctgtgacagagtcct

SEQ ID NO: 5114392 - DNA, 25 bp, Homo sapien
taagaccgtcccgtgaggccagttc

SEQ ID NO: 5114393 - DNA, 25 bp, Homo sapien
cattccttgcatgcgggcacagagg

SEQ ID NO: 5114394 - DNA, 25 bp, Homo sapien
ctcggagctgattgcagggccctgt

SEQ ID NO: 5114395 - DNA, 25 bp, Homo sapien
tgagcgcagcggcagttctgcctcg

SEQ ID NO: 5114396 - DNA, 25 bp, Homo sapien
cctgtgtggtctccggacagctgcg

SEQ ID NO: 5114397 - DNA, 25 bp, Homo sapien
ggccctgtgtggtctccggacagct

SEQ ID NO: 5114398 - DNA, 25 bp, Homo sapien
tataaataatctttggcctgcggcc

SEQ ID NO: 5114399 - DNA, 25 bp, Homo sapien
cccgtggcccggagcctggaaatat

SEQ ID NO: 5114400 - DNA, 25 bp, Homo sapien
cagctgtccgggatacctctttcct

SEQ ID NO: 5114401 - DNA, 25 bp, Homo sapien
tatttattccgagaggctcccgagc

SEQ ID NO: 5114402 - DNA, 25 bp, Homo sapien
tctgaggtctccacggtttccggta

SEQ ID NO: 5114403 - DNA, 25 bp, Homo sapien
tgcaggagcgggtagatctggagcc

SEQ ID NO: 5114404 - DNA, 25 bp, Homo sapien
ctagtgccgacgtcaaaggtgagcg

SEQ ID NO: 5114405 - DNA, 25 bp, Homo sapien
ctggagcccgagtcggtacgctcgt

SEQ ID NO: 5114406 - DNA, 25 bp, Homo sapien
catgtggaaaagtgattagggctcc

SEQ ID NO: 5114407 - DNA, 25 bp, Homo sapien
tagacgccgtctagaagggctgcac

SEQ ID NO: 5114408 - DNA, 25 bp, Homo sapien
gcggcgacctcggaaaattcacaac

SEQ ID NO: 5114409 - DNA, 25 bp, Homo sapien
ttatagttaggcagatcagaggcgg

SEQ ID NO: 5114410 - DNA, 25 bp, Homo sapien
tctgtcgccggctgcgtcccgtccc

SEQ ID NO: 5114411 - DNA, 25 bp, Homo sapien
gggctctgtcgccggctgcgtcccg

SEQ ID NO: 5114412 - DNA, 25 bp, Homo sapien
gccggctccgcacccgcgctcgggc

SEQ ID NO: 5114413 - DNA, 25 bp, Homo sapien
cgccggctccgcacccgcgctcggg

SEQ ID NO: 5114414 - DNA, 25 bp, Homo sapien
caggccctttctgccaaagactgca

SEQ ID NO: 5114415 - DNA, 25 bp, Homo sapien
gactgcaaatgtcaccaggcagagc

SEQ ID NO: 5114416 - DNA, 25 bp, Homo sapien
agagctccacttgaaccagcatctc

SEQ ID NO: 5114417 - DNA, 25 bp, Homo sapien
gcagagctccacttgaaccagcatc

SEQ ID NO: 5114418 - DNA, 25 bp, Homo sapien
ggctgccgatcttgtggcgccggct

SEQ ID NO: 5114419 - DNA, 25 bp, Homo sapien
atgggggctgccgatcttgtggcgc

SEQ ID NO: 5114420 - DNA, 25 bp, Homo sapien
cacaggcagggagcgccctctaagc

SEQ ID NO: 5114421 - DNA, 25 bp, Homo sapien
agggcacaggcagggagcgccctct

SEQ ID NO: 5114422 - DNA, 25 bp, Homo sapien
ctataaagggctcttggctccccgg

SEQ ID NO: 5114423 - DNA, 25 bp, Homo sapien
gctactcttttccaggccgtgctga

SEQ ID NO: 5114424 - DNA, 25 bp, Homo sapien
acagctgtcagctgcgttcttcgca

SEQ ID NO: 5114425 - DNA, 25 bp, Homo sapien
cattgccaccgagcaggctactctt

SEQ ID NO: 5114426 - DNA, 25 bp, Homo sapien
gtgtcaggtagaagcacagaaaaag

SEQ ID NO: 5114427 - DNA, 25 bp, Homo sapien
aagatccttgttcttaaagagcgta

SEQ ID NO: 5114428 - DNA, 25 bp, Homo sapien
tcagacatgtgtcaggtagaagcac

SEQ ID NO: 5114429 - DNA, 25 bp, Homo sapien
aaaagatccttgttcttaaagagcg

SEQ ID NO: 5114430 - DNA, 25 bp, Homo sapien
cataatctcaatatcttgatggtcc

SEQ ID NO: 5114431 - DNA, 25 bp, Homo sapien
ataatctcaatatcttgatggtcca

SEQ ID NO: 5114432 - DNA, 25 bp, Homo sapien
aatctcaatatcttgatggtccaga

SEQ ID NO: 5114433 - DNA, 25 bp, Homo sapien
taatctcaatatcttgatggtccag

SEQ ID NO: 5114434 - DNA, 25 bp, Homo sapien
aatagatgccaagttcaccaactag

SEQ ID NO: 5114435 - DNA, 25 bp, Homo sapien
taatagatgccaagttcaccaacta

SEQ ID NO: 5114436 - DNA, 25 bp, Homo sapien
ttaatagatgccaagttcaccaact

SEQ ID NO: 5114437 - DNA, 25 bp, Homo sapien
atcgtgtttgatccccaggcctagg

SEQ ID NO: 5114438 - DNA, 25 bp, Homo sapien
tgcttttaagccatatatgagtatg

SEQ ID NO: 5114439 - DNA, 25 bp, Homo sapien
tatatataacatcgtgtttgatccc

SEQ ID NO: 5114440 - DNA, 25 bp, Homo sapien
cccactgtccagacttgaaaattaa

SEQ ID NO: 5114441 - DNA, 25 bp, Homo sapien
ggaatgtgacatctagcattgtccc

SEQ ID NO: 5114442 - DNA, 25 bp, Homo sapien
tcagcctttgtttgggacgcttgcc

SEQ ID NO: 5114443 - DNA, 25 bp, Homo sapien
gaaatctcattgctgtgacctctgg

SEQ ID NO: 5114444 - DNA, 25 bp, Homo sapien
gacctctggaacctatgcttttgga

SEQ ID NO: 5114445 - DNA, 25 bp, Homo sapien
aactggcgggattattattctgcca

SEQ ID NO: 5114446 - DNA, 25 bp, Homo sapien
tgaaactaaactggcgggattatta

SEQ ID NO: 5114447 - DNA, 25 bp, Homo sapien
ctaaactggcgggattattattctg

SEQ ID NO: 5114448 - DNA, 25 bp, Homo sapien
ctggcgggattattattctgccatt

SEQ ID NO: 5114449 - DNA, 25 bp, Homo sapien
tccttaccactgtgattcgattcat

SEQ ID NO: 5114450 - DNA, 25 bp, Homo sapien
ctgcaggaccccttgtatcggtagt

SEQ ID NO: 5114451 - DNA, 25 bp, Homo sapien
tatcggtagttccttaccactgtga

SEQ ID NO: 5114452 - DNA, 25 bp, Homo sapien
cattctgaaaacttttagatgccca

SEQ ID NO: 5114453 - DNA, 25 bp, Homo sapien
catcgacttgagacaagtaagtctt

SEQ ID NO: 5114454 - DNA, 25 bp, Homo sapien
gatccggcccggtgcctgggttcca

SEQ ID NO: 5114455 - DNA, 25 bp, Homo sapien
tccaggaggacacgctgcagttggc

SEQ ID NO: 5114456 - DNA, 25 bp, Homo sapien
acagagtttgccagatccggcccgg

SEQ ID NO: 5114457 - DNA, 25 bp, Homo sapien
caagaatgttcgtgatgagggagta

SEQ ID NO: 5114458 - DNA, 25 bp, Homo sapien
tacaaaggatctactacatgaaaga

SEQ ID NO: 5114459 - DNA, 25 bp, Homo sapien
gaatgttcgtgatgagggagtacaa

SEQ ID NO: 5114460 - DNA, 25 bp, Homo sapien
gggagtacaaaggatctactacatg

SEQ ID NO: 5114461 - DNA, 25 bp, Homo sapien
gcctcatccttctgaattataattt

SEQ ID NO: 5114462 - DNA, 25 bp, Homo sapien
tccttagcctcatccttctgaatta

SEQ ID NO: 5114463 - DNA, 25 bp, Homo sapien
gctatccttagcctcatccttctga

SEQ ID NO: 5114464 - DNA, 25 bp, Homo sapien
tagcctcatccttctgaattataat

SEQ ID NO: 5114465 - DNA, 25 bp, Homo sapien
acttcagtctgtagatctgtttggt

SEQ ID NO: 5114466 - DNA, 25 bp, Homo sapien
ttcagtctgtagatctgtttggtta

SEQ ID NO: 5114467 - DNA, 25 bp, Homo sapien
cagtctgtagatctgtttggttagc

SEQ ID NO: 5114468 - DNA, 25 bp, Homo sapien
ttacttcagtctgtagatctgtttg

SEQ ID NO: 5114469 - DNA, 25 bp, Homo sapien
tctgacagaggatcgctttgtactc

SEQ ID NO: 5114470 - DNA, 25 bp, Homo sapien
tcttatcccagttctagctttgcag

SEQ ID NO: 5114471 - DNA, 25 bp, Homo sapien
tagcaaattgggactgataggagag

SEQ ID NO: 5114472 - DNA, 25 bp, Homo sapien
ttaactgggaaataagcgcactggg

SEQ ID NO: 5114473 - DNA, 25 bp, Homo sapien
tctggctgtgatctgagagtcgtta

SEQ ID NO: 5114474 - DNA, 25 bp, Homo sapien
aaatggtacttgaggttagtgaggc

SEQ ID NO: 5114475 - DNA, 25 bp, Homo sapien
tactgctgtgttctagtgagttaga

SEQ ID NO: 5114476 - DNA, 25 bp, Homo sapien
gagttagatactttgaacttatccc

SEQ ID NO: 5114477 - DNA, 25 bp, Homo sapien
tatttgtcccaatagttttgaatgt

SEQ ID NO: 5114478 - DNA, 25 bp, Homo sapien
ctggtttaatatttgtcccaatagt

SEQ ID NO: 5114479 - DNA, 25 bp, Homo sapien
ttgtcccaatagttttgaatgtcat

SEQ ID NO: 5114480 - DNA, 25 bp, Homo sapien
taatatttgtcccaatagttttgaa

SEQ ID NO: 5114481 - DNA, 25 bp, Homo sapien
attcttgctcaatacagaacagctg

SEQ ID NO: 5114482 - DNA, 25 bp, Homo sapien
gactggatattaacctgttctctga

SEQ ID NO: 5114483 - DNA, 25 bp, Homo sapien
gaacttaaagagctggactggatat

SEQ ID NO: 5114484 - DNA, 25 bp, Homo sapien
tacttagaagtgaccactgatatag

SEQ ID NO: 5114485 - DNA, 25 bp, Homo sapien
cctagagattgctactgggctatgg

SEQ ID NO: 5114486 - DNA, 25 bp, Homo sapien
gggctctctttagtggccagtgcca

SEQ ID NO: 5114487 - DNA, 25 bp, Homo sapien
aattacgttatctgtgagtacggac

SEQ ID NO: 5114488 - DNA, 25 bp, Homo sapien
tggatgcaccctcttggccctatag

SEQ ID NO: 5114489 - DNA, 25 bp, Homo sapien
ttttgctcttgttgcctaagctaga

SEQ ID NO: 5114490 - DNA, 25 bp, Homo sapien
tgcaatggcaccatattggctcact

SEQ ID NO: 5114491 - DNA, 25 bp, Homo sapien
tttgctcttgttgcctaagctagag

SEQ ID NO: 5114492 - DNA, 25 bp, Homo sapien
gcaccatattggctcactgcaacct

SEQ ID NO: 5114493 - DNA, 25 bp, Homo sapien
caatgtatgagggtaccccgtcctc

SEQ ID NO: 5114494 - DNA, 25 bp, Homo sapien
cccagtagtcgaattgctggctcat

SEQ ID NO: 5114495 - DNA, 25 bp, Homo sapien
gtaattctgattggggtgagatatc

SEQ ID NO: 5114496 - DNA, 25 bp, Homo sapien
atatccttgccagcaccctgctatt

SEQ ID NO: 5114497 - DNA, 25 bp, Homo sapien
acatgactgatagtgtttacaacat

SEQ ID NO: 5114498 - DNA, 25 bp, Homo sapien
tgcgtaatatgtagggctaaaagtt

SEQ ID NO: 5114499 - DNA, 25 bp, Homo sapien
catgactgatagtgtttacaacatt

SEQ ID NO: 5114500 - DNA, 25 bp, Homo sapien
taatatgtagggctaaaagttttga

SEQ ID NO: 5114501 - DNA, 25 bp, Homo sapien
gattaacagatgtccgagctgaacc

SEQ ID NO: 5114502 - DNA, 25 bp, Homo sapien
tctcctggttcagccaaaggtgaaa

SEQ ID NO: 5114503 - DNA, 25 bp, Homo sapien
tactgattaaaatggagggctccag

SEQ ID NO: 5114504 - DNA, 25 bp, Homo sapien
tgtttttgtagcaagcatccccacc

SEQ ID NO: 5114505 - DNA, 25 bp, Homo sapien
tcatctcaggatccttgagtaaaga

SEQ ID NO: 5114506 - DNA, 25 bp, Homo sapien
gaatccaggacttttaattaactga

SEQ ID NO: 5114507 - DNA, 25 bp, Homo sapien
taccttgtaaaggtcagatcctgca

SEQ ID NO: 5114508 - DNA, 25 bp, Homo sapien
tcttttgtagtaccgagagtgtaag

SEQ ID NO: 5114509 - DNA, 25 bp, Homo sapien
tgccaggttgatgcatgaagtggac

SEQ ID NO: 5114510 - DNA, 25 bp, Homo sapien
tgaagtggactaaataagttcccat

SEQ ID NO: 5114511 - DNA, 25 bp, Homo sapien
aatattgtcctctgataagaggatg

SEQ ID NO: 5114512 - DNA, 25 bp, Homo sapien
tattgtcctctgataagaggatgta

SEQ ID NO: 5114513 - DNA, 25 bp, Homo sapien
acctccttggcagggtagtactgaa

SEQ ID NO: 5114514 - DNA, 25 bp, Homo sapien
tgtctctggttatcgaagtagtcgt

SEQ ID NO: 5114515 - DNA, 25 bp, Homo sapien
gccctggtccatgatagtcagcaca

SEQ ID NO: 5114516 - DNA, 25 bp, Homo sapien
aagtagtcgtgtggtagaatacctc

SEQ ID NO: 5114517 - DNA, 25 bp, Homo sapien
aattttgtgcgctgatcagccttag

SEQ ID NO: 5114518 - DNA, 25 bp, Homo sapien
gatcagccttagctggacaaaagta

SEQ ID NO: 5114519 - DNA, 25 bp, Homo sapien
ccttaaattttgtgcgctgatcagc

SEQ ID NO: 5114520 - DNA, 25 bp, Homo sapien
tgtgcgctgatcagccttagctgga

SEQ ID NO: 5114521 - DNA, 25 bp, Homo sapien
taaacccattgtattctccattctc

SEQ ID NO: 5114522 - DNA, 25 bp, Homo sapien
ctgcctcttatttcttactggagct

SEQ ID NO: 5114523 - DNA, 25 bp, Homo sapien
tcttactggagctcccattaaaccc

SEQ ID NO: 5114524 - DNA, 25 bp, Homo sapien
ccattaaacccattgtattctccat

SEQ ID NO: 5114525 - DNA, 25 bp, Homo sapien
gatgcctcatatcagcaagtaggag

SEQ ID NO: 5114526 - DNA, 25 bp, Homo sapien
ttgacagtaccctgggcaatgtagc

SEQ ID NO: 5114527 - DNA, 25 bp, Homo sapien
gtcccttaagcccagaagctagagg

SEQ ID NO: 5114528 - DNA, 25 bp, Homo sapien
catagaactagactaatacatgctg

SEQ ID NO: 5114529 - DNA, 25 bp, Homo sapien
taccgggattctctaaaactgtcaa

SEQ ID NO: 5114530 - DNA, 25 bp, Homo sapien
cgggattctctaaaactgtcaaaag

SEQ ID NO: 5114531 - DNA, 25 bp, Homo sapien
gtaccgggattctctaaaactgtca

SEQ ID NO: 5114532 - DNA, 25 bp, Homo sapien
ctttcccgggaacttcagcctcttg

SEQ ID NO: 5114533 - DNA, 25 bp, Homo sapien
gggctggctgctgaattatatttca

SEQ ID NO: 5114534 - DNA, 25 bp, Homo sapien
agggctggctgctgaattatatttc

SEQ ID NO: 5114535 - DNA, 25 bp, Homo sapien
tctaaacaagagctgtgggacggaa

SEQ ID NO: 5114536 - DNA, 25 bp, Homo sapien
tagagttcctgttcttgaagagcac

SEQ ID NO: 5114537 - DNA, 25 bp, Homo sapien
gcctaatatgtgttcaggatagaaa

SEQ ID NO: 5114538 - DNA, 25 bp, Homo sapien
catgaaagtggaggcgaagagattc

SEQ ID NO: 5114539 - DNA, 25 bp, Homo sapien
tataatgatgtcactttagtggctt

SEQ ID NO: 5114540 - DNA, 25 bp, Homo sapien
tacattataatgatgtcactttagt

SEQ ID NO: 5114541 - DNA, 25 bp, Homo sapien
cattataatgatgtcactttagtgg

SEQ ID NO: 5114542 - DNA, 25 bp, Homo sapien
tatatacaggtttatacattataat

SEQ ID NO: 5114543 - DNA, 25 bp, Homo sapien
aaaagcccttcaggtgattgtgata

SEQ ID NO: 5114544 - DNA, 25 bp, Homo sapien
gattgtgatatactccgtccttgac

SEQ ID NO: 5114545 - DNA, 25 bp, Homo sapien
ccttcaggtgattgtgatatactcc

SEQ ID NO: 5114546 - DNA, 25 bp, Homo sapien
tactccgtccttgacaatcactgag

SEQ ID NO: 5114547 - DNA, 25 bp, Homo sapien
ggcagcagcatgcacagacttgatg

SEQ ID NO: 5114548 - DNA, 25 bp, Homo sapien
tccttatcccgttcagaggcagcag

SEQ ID NO: 5114549 - DNA, 25 bp, Homo sapien
acagacttgatgtttcagatcccat

SEQ ID NO: 5114550 - DNA, 25 bp, Homo sapien
tttccttatcccgttcagaggcagc

SEQ ID NO: 5114551 - DNA, 25 bp, Homo sapien
caaatcccagcggacattacgcaga

SEQ ID NO: 5114552 - DNA, 25 bp, Homo sapien
aacgccgacggacgcggtgacgcaa

SEQ ID NO: 5114553 - DNA, 25 bp, Homo sapien
acattacgcagaacgccgacggacg

SEQ ID NO: 5114554 - DNA, 25 bp, Homo sapien
gtcggcctgcgggtagccagaggct

SEQ ID NO: 5114555 - DNA, 25 bp, Homo sapien
cccttttccctgtggactcggtgct

SEQ ID NO: 5114556 - DNA, 25 bp, Homo sapien
cagcagacgaccacatctccgttgt

SEQ ID NO: 5114557 - DNA, 25 bp, Homo sapien
ctttctctgtcagtccttggaggga

SEQ ID NO: 5114558 - DNA, 25 bp, Homo sapien
ggtgctttgctagttgcacaagtgc

SEQ ID NO: 5114559 - DNA, 25 bp, Homo sapien
tttgcagcatgagtacgtgagccca

SEQ ID NO: 5114560 - DNA, 25 bp, Homo sapien
tcaccagggaactcaaatgtcagca

SEQ ID NO: 5114561 - DNA, 25 bp, Homo sapien
tgggctcagagtgcaatcagtaact

SEQ ID NO: 5114562 - DNA, 25 bp, Homo sapien
gagcattagacttgggaacacaggg

SEQ ID NO: 5114563 - DNA, 25 bp, Homo sapien
cacttcaccccactacgataaaatg

SEQ ID NO: 5114564 - DNA, 25 bp, Homo sapien
agttcttcaagtgttaaacgtagag

SEQ ID NO: 5114565 - DNA, 25 bp, Homo sapien
cgtagagttactaattgacctggca

SEQ ID NO: 5114566 - DNA, 25 bp, Homo sapien
acactggaatcctcatgcattgctg

SEQ ID NO: 5114567 - DNA, 25 bp, Homo sapien
tggtagcatgtgttggtagtcccag

SEQ ID NO: 5114568 - DNA, 25 bp, Homo sapien
ggcatggtagcatgtgttggtagtc

SEQ ID NO: 5114569 - DNA, 25 bp, Homo sapien
tagcatgtgttggtagtcccagcca

SEQ ID NO: 5114570 - DNA, 25 bp, Homo sapien
gcatggtagcatgtgttggtagtcc

SEQ ID NO: 5114571 - DNA, 25 bp, Homo sapien
ctcctgttctccgccggcggcgctg

SEQ ID NO: 5114572 - DNA, 25 bp, Homo sapien
gctcctgttctccgccggcggcgct

SEQ ID NO: 5114573 - DNA, 25 bp, Homo sapien
gaggccccggtcagcaagcacacag

SEQ ID NO: 5114574 - DNA, 25 bp, Homo sapien
ttgataagcagcagtcgctgcagcc

SEQ ID NO: 5114575 - DNA, 25 bp, Homo sapien
tcgttgcgggcgctaaggacaagca

SEQ ID NO: 5114576 - DNA, 25 bp, Homo sapien
cagctgctgcaagccggcctcggcg

SEQ ID NO: 5114577 - DNA, 25 bp, Homo sapien
tatctgacccctaggagtagccctt

SEQ ID NO: 5114578 - DNA, 25 bp, Homo sapien
ccttaggagtaactcagtgcaggcg

SEQ ID NO: 5114579 - DNA, 25 bp, Homo sapien
aaagctctagcggtcctttggagaa

SEQ ID NO: 5114580 - DNA, 25 bp, Homo sapien
agctctgcggaaagacacagctggg

SEQ ID NO: 5114581 - DNA, 25 bp, Homo sapien
ggaggtcaagttcagtgcccagtag

SEQ ID NO: 5114582 - DNA, 25 bp, Homo sapien
gacctggaacagcatatcacgagca

SEQ ID NO: 5114583 - DNA, 25 bp, Homo sapien
atcacgagcagcctttcctgcacag

SEQ ID NO: 5114584 - DNA, 25 bp, Homo sapien
cagagggacgagatgttaaccacgg

SEQ ID NO: 5114585 - DNA, 25 bp, Homo sapien
ccagcctttgaaaggttgcagggca

SEQ ID NO: 5114586 - DNA, 25 bp, Homo sapien
ctggggcatagttcagcaccctcac

SEQ ID NO: 5114587 - DNA, 25 bp, Homo sapien
ccttgggctgaattcagagtggatg

SEQ ID NO: 5114588 - DNA, 25 bp, Homo sapien
cactgttgtttgtgcgaatccttgg

SEQ ID NO: 5114589 - DNA, 25 bp, Homo sapien
atgatgagttgaatgttggttgtga

SEQ ID NO: 5114590 - DNA, 25 bp, Homo sapien
ggttgtgagaataattgtgcatgtg

SEQ ID NO: 5114591 - DNA, 25 bp, Homo sapien
cttgaactcgtccttttccagtaag

SEQ ID NO: 5114592 - DNA, 25 bp, Homo sapien
agacttgaactcgtccttttccagt

SEQ ID NO: 5114593 - DNA, 25 bp, Homo sapien
ccgggccaactgctgcatgtctgtg

SEQ ID NO: 5114594 - DNA, 25 bp, Homo sapien
ttatttgtcatagaagtccacgtgg

SEQ ID NO: 5114595 - DNA, 25 bp, Homo sapien
aactggtaaggccaatgacctggga

SEQ ID NO: 5114596 - DNA, 25 bp, Homo sapien
tatgtgggctgggacatgtaccgtc

SEQ ID NO: 5114597 - DNA, 25 bp, Homo sapien
tctgcgaatctacatgggtcctcct

SEQ ID NO: 5114598 - DNA, 25 bp, Homo sapien
aaggtcctgctaccctcagcaaggg

SEQ ID NO: 5114599 - DNA, 25 bp, Homo sapien
cctgtgacaatactgccaccagcca

SEQ ID NO: 5114600 - DNA, 25 bp, Homo sapien
gagcattcatccagggactctgtgc

SEQ ID NO: 5114601 - DNA, 25 bp, Homo sapien
ccagagcattcatccagggactctg

SEQ ID NO: 5114602 - DNA, 25 bp, Homo sapien
ttgggtagcctgccctgtgacaata

SEQ ID NO: 5114603 - DNA, 25 bp, Homo sapien
ttgccggcgcactgcggagagggag

SEQ ID NO: 5114604 - DNA, 25 bp, Homo sapien
agggagccgcagagagttccgcttc

SEQ ID NO: 5114605 - DNA, 25 bp, Homo sapien
attctagcggcctgagcgctgcctg

SEQ ID NO: 5114606 - DNA, 25 bp, Homo sapien
agagagttccgcttcctcgccgctg

SEQ ID NO: 5114607 - DNA, 25 bp, Homo sapien
ccgcagaaaggcgccgctccgaggc

SEQ ID NO: 5114608 - DNA, 25 bp, Homo sapien
aggccgcagaaaggcgccgctccga

SEQ ID NO: 5114609 - DNA, 25 bp, Homo sapien
ggccgcagaaaggcgccgctccgag

SEQ ID NO: 5114610 - DNA, 25 bp, Homo sapien
gccgcagaaaggcgccgctccgagg

SEQ ID NO: 5114611 - DNA, 25 bp, Homo sapien
gggcagttctcacgacaggctgtga

SEQ ID NO: 5114612 - DNA, 25 bp, Homo sapien
tgaagctgcgaccttgttcctgagg

SEQ ID NO: 5114613 - DNA, 25 bp, Homo sapien
taaattgaagctggccaagtagccc

SEQ ID NO: 5114614 - DNA, 25 bp, Homo sapien
ggcctcggagacactgtggcttaaa

SEQ ID NO: 5114615 - DNA, 25 bp, Homo sapien
gtgctaggctgcgagctgccagtaa

SEQ ID NO: 5114616 - DNA, 25 bp, Homo sapien
gttgagctcgtctccctcctttcgg

SEQ ID NO: 5114617 - DNA, 25 bp, Homo sapien
ctgcgaggcgcgagttagcgggcac

SEQ ID NO: 5114618 - DNA, 25 bp, Homo sapien
ccagtaaggcccgagggttgagctc

SEQ ID NO: 5114619 - DNA, 25 bp, Homo sapien
tgggccggagcggttcctcggaggc

SEQ ID NO: 5114620 - DNA, 25 bp, Homo sapien
tgagggtagttgagcgccgtgggcc

SEQ ID NO: 5114621 - DNA, 25 bp, Homo sapien
ctctatggtaaagccgcgcttggcc

SEQ ID NO: 5114622 - DNA, 25 bp, Homo sapien
caccaaggactctatggtaaagccg

SEQ ID NO: 5114623 - DNA, 25 bp, Homo sapien
tcgggcccaccgtagagcgagcggc

SEQ ID NO: 5114624 - DNA, 25 bp, Homo sapien
gcccaccgtagagcgagcggcccgc

SEQ ID NO: 5114625 - DNA, 25 bp, Homo sapien
accgtagagcgagcggcccgcgccc

SEQ ID NO: 5114626 - DNA, 25 bp, Homo sapien
ctcgggcccaccgtagagcgagcgg

SEQ ID NO: 5114627 - DNA, 25 bp, Homo sapien
tggtgcgccggatgcacggtcagcg

SEQ ID NO: 5114628 - DNA, 25 bp, Homo sapien
cggtggccgaagaagcggttccgca

SEQ ID NO: 5114629 - DNA, 25 bp, Homo sapien
tagaaatggagagggtcccggtgct

SEQ ID NO: 5114630 - DNA, 25 bp, Homo sapien
tgctgggcgccgaagaaggagtgcg

SEQ ID NO: 5114631 - DNA, 25 bp, Homo sapien
atgccgactccggacaagctgaacg

SEQ ID NO: 5114632 - DNA, 25 bp, Homo sapien
cgtccagactcggttcttgagggaa

SEQ ID NO: 5114633 - DNA, 25 bp, Homo sapien
gatttatccgcctcgcctgactgga

SEQ ID NO: 5114634 - DNA, 25 bp, Homo sapien
taacgtacccgctgggactgatggc

SEQ ID NO: 5114635 - DNA, 25 bp, Homo sapien
tttccgggtccgaaaatgcagccac

SEQ ID NO: 5114636 - DNA, 25 bp, Homo sapien
cagcgctacagggttcgaaaagtcc

SEQ ID NO: 5114637 - DNA, 25 bp, Homo sapien
ccttcagtgcccaacggatttccgg

SEQ ID NO: 5114638 - DNA, 25 bp, Homo sapien
atggaccgcgaagcaacagcgctac

SEQ ID NO: 5114639 - DNA, 25 bp, Homo sapien
gcgccggagggcccgagacggctcg

SEQ ID NO: 5114640 - DNA, 25 bp, Homo sapien
gccggagggcccgagacggctcggc

SEQ ID NO: 5114641 - DNA, 25 bp, Homo sapien
cggagggcccgagacggctcggctc

SEQ ID NO: 5114642 - DNA, 25 bp, Homo sapien
ccggagggcccgagacggctcggct

SEQ ID NO: 5114643 - DNA, 25 bp, Homo sapien
ccgcagtcttcgctggagaggccgc

SEQ ID NO: 5114644 - DNA, 25 bp, Homo sapien
ctcagggccggacggctgggcggag

SEQ ID NO: 5114645 - DNA, 25 bp, Homo sapien
tgcagtcttcgagccgcagtcttcg

SEQ ID NO: 5114646 - DNA, 25 bp, Homo sapien
gggtccgagctgcagtcttcgagcc

SEQ ID NO: 5114647 - DNA, 25 bp, Homo sapien
gcttgcactagtcttgcggctgaat

SEQ ID NO: 5114648 - DNA, 25 bp, Homo sapien
cttgcactagtcttgcggctgaatg

SEQ ID NO: 5114649 - DNA, 25 bp, Homo sapien
tgcttgcactagtcttgcggctgaa

SEQ ID NO: 5114650 - DNA, 25 bp, Homo sapien
ctgcttgcactagtcttgcggctga

SEQ ID NO: 5114651 - DNA, 25 bp, Homo sapien
cagagcctggcctcgcgccctgctc

SEQ ID NO: 5114652 - DNA, 25 bp, Homo sapien
tcgcgccctgctcccaagcgccctg

SEQ ID NO: 5114653 - DNA, 25 bp, Homo sapien
cgccgccgacggcaacacacgcagg

SEQ ID NO: 5114654 - DNA, 25 bp, Homo sapien
acacacgcaggtacagacagagaga

SEQ ID NO: 5114655 - DNA, 25 bp, Homo sapien
tagtggttcttctcgaaggcgcgct

SEQ ID NO: 5114656 - DNA, 25 bp, Homo sapien
gggccgtgcagaagcagcccgtcct

SEQ ID NO: 5114657 - DNA, 25 bp, Homo sapien
gatccgcttgggcttgcgtgcgaag

SEQ ID NO: 5114658 - DNA, 25 bp, Homo sapien
ctgcgagggcgagaaggccgtgcgg

SEQ ID NO: 5114659 - DNA, 25 bp, Homo sapien
cagggcagcagctaggctgagggtc

SEQ ID NO: 5114660 - DNA, 25 bp, Homo sapien
cggccggcacgcagagactgaaatc

SEQ ID NO: 5114661 - DNA, 25 bp, Homo sapien
tgagggtcgctgagccccactccaa

SEQ ID NO: 5114662 - DNA, 25 bp, Homo sapien
ggccggcacgcagagactgaaatcc

SEQ ID NO: 5114663 - DNA, 25 bp, Homo sapien
ggctgctaaagggaggctccggctg

SEQ ID NO: 5114664 - DNA, 25 bp, Homo sapien
atgccgggcatcttctcactgcccg

SEQ ID NO: 5114665 - DNA, 25 bp, Homo sapien
ccggctgccccccatgccgggcatc

SEQ ID NO: 5114666 - DNA, 25 bp, Homo sapien
ccatgccgggcatcttctcactgcc

SEQ ID NO: 5114667 - DNA, 25 bp, Homo sapien
gcctccgacccgtgagcgatttgta

SEQ ID NO: 5114668 - DNA, 25 bp, Homo sapien
gatgaagtttgggtctgggctccct

SEQ ID NO: 5114669 - DNA, 25 bp, Homo sapien
taaggtccgccgaagaaagctgcgg

SEQ ID NO: 5114670 - DNA, 25 bp, Homo sapien
tagtacatctgaaaacgcacgggtc

SEQ ID NO: 5114671 - DNA, 25 bp, Homo sapien
tgtcagttgcgaaatagctctatgg

SEQ ID NO: 5114672 - DNA, 25 bp, Homo sapien
gaacgctggactaagaggacacaca

SEQ ID NO: 5114673 - DNA, 25 bp, Homo sapien
ccaagaggcggatagagaagtagct

SEQ ID NO: 5114674 - DNA, 25 bp, Homo sapien
tatagcctggctccgtatgataagt

SEQ ID NO: 5114675 - DNA, 25 bp, Homo sapien
tgtttgagagcactgattttagagc

SEQ ID NO: 5114676 - DNA, 25 bp, Homo sapien
tgccagaacttccactgcgccatct

SEQ ID NO: 5114677 - DNA, 25 bp, Homo sapien
actgattttagagcactggcatggg

SEQ ID NO: 5114678 - DNA, 25 bp, Homo sapien
gagagcactgattttagagcactgg

SEQ ID NO: 5114679 - DNA, 25 bp, Homo sapien
tttcttagcaacctcatgtagctct

SEQ ID NO: 5114680 - DNA, 25 bp, Homo sapien
ttagcaacctcatgtagctctctcc

SEQ ID NO: 5114681 - DNA, 25 bp, Homo sapien
tagtccgaaatccaccagtgagacc

SEQ ID NO: 5114682 - DNA, 25 bp, Homo sapien
gccagctcctcagggtagtccgaaa

SEQ ID NO: 5114683 - DNA, 25 bp, Homo sapien
tcattggaggtgacatcgatgtcct

SEQ ID NO: 5114684 - DNA, 25 bp, Homo sapien
tccccattggcctgcttcgtggcaa

SEQ ID NO: 5114685 - DNA, 25 bp, Homo sapien
ggcaatgcgccaccggttgatgtga

SEQ ID NO: 5114686 - DNA, 25 bp, Homo sapien
ttgtactttgtcctccggttctgga

SEQ ID NO: 5114687 - DNA, 25 bp, Homo sapien
gccagcccattgcttgtccctctgt

SEQ ID NO: 5114688 - DNA, 25 bp, Homo sapien
agagtccagcttgggcccacgcagg

SEQ ID NO: 5114689 - DNA, 25 bp, Homo sapien
gtccctctgtcaatggcggccccgg

SEQ ID NO: 5114690 - DNA, 25 bp, Homo sapien
ctggggatcactaaactacagtggt

SEQ ID NO: 5114691 - DNA, 25 bp, Homo sapien
gactggaaccgtcagcctttgtgaa

SEQ ID NO: 5114692 - DNA, 25 bp, Homo sapien
caccagagtctctaggcagagggaa

SEQ ID NO: 5114693 - DNA, 25 bp, Homo sapien
gtgggcccacgacttcggactggaa

SEQ ID NO: 5114694 - DNA, 25 bp, Homo sapien
tgtcctccctcaagatacaggatgg

SEQ ID NO: 5114695 - DNA, 25 bp, Homo sapien
gtgaggcaggatcttgagaggaaca

SEQ ID NO: 5114696 - DNA, 25 bp, Homo sapien
gagactggcaggtttccttgggtcc

SEQ ID NO: 5114697 - DNA, 25 bp, Homo sapien
tccagccctttattcggatgacagg

SEQ ID NO: 5114698 - DNA, 25 bp, Homo sapien
ccaatatttaccgtctgcagggaga

SEQ ID NO: 5114699 - DNA, 25 bp, Homo sapien
ggctggctgccttctgcggagcttc

SEQ ID NO: 5114700 - DNA, 25 bp, Homo sapien
tctcatgcctgagaatgcctaggcc

SEQ ID NO: 5114701 - DNA, 25 bp, Homo sapien
taaatggcagtgagatgtcagacaa

SEQ ID NO: 5114702 - DNA, 25 bp, Homo sapien
gaagcagcatcaacctaggagcagt

SEQ ID NO: 5114703 - DNA, 25 bp, Homo sapien
cagctctagagggttctggggatta

SEQ ID NO: 5114704 - DNA, 25 bp, Homo sapien
ttctggggattagaagccatgttct

SEQ ID NO: 5114705 - DNA, 25 bp, Homo sapien
ctggggattagaagccatgttctga

SEQ ID NO: 5114706 - DNA, 25 bp, Homo sapien
ccatgttctgaggaagtctaaagcc

SEQ ID NO: 5114707 - DNA, 25 bp, Homo sapien
caaagttgttgacgatggagcaggc

SEQ ID NO: 5114708 - DNA, 25 bp, Homo sapien
tggagcaggctttgtacccaggcag

SEQ ID NO: 5114709 - DNA, 25 bp, Homo sapien
tcactatagaaagaggaggcccact

SEQ ID NO: 5114710 - DNA, 25 bp, Homo sapien
taatttatcagcaggaacatcccag

SEQ ID NO: 5114711 - DNA, 25 bp, Homo sapien
acctgcctagtgtctgggtgccaca

SEQ ID NO: 5114712 - DNA, 25 bp, Homo sapien
tgattattctgggactgaacccgtc

SEQ ID NO: 5114713 - DNA, 25 bp, Homo sapien
ggtgccccatggctcgagaaagctg

SEQ ID NO: 5114714 - DNA, 25 bp, Homo sapien
ggtaggaacatgagcccaggctgtc

SEQ ID NO: 5114715 - DNA, 25 bp, Homo sapien
tggctggtagcctctgcatacggca

SEQ ID NO: 5114716 - DNA, 25 bp, Homo sapien
tctgtgtaggctgtaagaattgccg

SEQ ID NO: 5114717 - DNA, 25 bp, Homo sapien
gattgcaggtcatgtgccatctgtg

SEQ ID NO: 5114718 - DNA, 25 bp, Homo sapien
gccccagggttgtgcatgttcttgt

SEQ ID NO: 5114719 - DNA, 25 bp, Homo sapien
aagaggaagtggaatatggaagtac

SEQ ID NO: 5114720 - DNA, 25 bp, Homo sapien
agtggaatatggaagtacttagtcc

SEQ ID NO: 5114721 - DNA, 25 bp, Homo sapien
gaagtacttagtccaacatcagtct

SEQ ID NO: 5114722 - DNA, 25 bp, Homo sapien
tatggaagtacttagtccaacatca

SEQ ID NO: 5114723 - DNA, 25 bp, Homo sapien
cagtggccaggggaatagacatctc

SEQ ID NO: 5114724 - DNA, 25 bp, Homo sapien
gggtaccaggagcagttaccagcag

SEQ ID NO: 5114725 - DNA, 25 bp, Homo sapien
gggaatagacatctcgttgacagca

SEQ ID NO: 5114726 - DNA, 25 bp, Homo sapien
acatctcgttgacagcaatgggtgg

SEQ ID NO: 5114727 - DNA, 25 bp, Homo sapien
aaaagcaagcatatccagggctggg

SEQ ID NO: 5114728 - DNA, 25 bp, Homo sapien
caggattatgtttactccttatttt

SEQ ID NO: 5114729 - DNA, 25 bp, Homo sapien
acatacagaaaggtgcattcatcat

SEQ ID NO: 5114730 - DNA, 25 bp, Homo sapien
aaggtgcattcatcataaatgtaca

SEQ ID NO: 5114731 - DNA, 25 bp, Homo sapien
cactggctgccacggttagaggttg

SEQ ID NO: 5114732 - DNA, 25 bp, Homo sapien
tatgagaaccatggctcacgtgtgt

SEQ ID NO: 5114733 - DNA, 25 bp, Homo sapien
gatgcaagtcagataagcccgatcc

SEQ ID NO: 5114734 - DNA, 25 bp, Homo sapien
gagtcatgcattcctctgaggccct

SEQ ID NO: 5114735 - DNA, 25 bp, Homo sapien
gggtctgcaggcacattccaccacg

SEQ ID NO: 5114736 - DNA, 25 bp, Homo sapien
ggtggactgatcctgggctcagcaa

SEQ ID NO: 5114737 - DNA, 25 bp, Homo sapien
cccagggtggactgatcctgggctc

SEQ ID NO: 5114738 - DNA, 25 bp, Homo sapien
tcagcccactgaatagctgggtctg

SEQ ID NO: 5114739 - DNA, 25 bp, Homo sapien
catatacatgaagcataacaaccat

SEQ ID NO: 5114740 - DNA, 25 bp, Homo sapien
tatcttccttctagccgcatagcct

SEQ ID NO: 5114741 - DNA, 25 bp, Homo sapien
tcttaacttctgcagcttaatttat

SEQ ID NO: 5114742 - DNA, 25 bp, Homo sapien
taagagttaattaggctgtgaagta

SEQ ID NO: 5114743 - DNA, 25 bp, Homo sapien
tcttcagacgtccttctatggccgc

SEQ ID NO: 5114744 - DNA, 25 bp, Homo sapien
tgtgcagcagctgatccattcactc

SEQ ID NO: 5114745 - DNA, 25 bp, Homo sapien
tggatatcatcgaccctcgcacact

SEQ ID NO: 5114746 - DNA, 25 bp, Homo sapien
catttatcacccacacgaggagtcc

SEQ ID NO: 5114747 - DNA, 25 bp, Homo sapien
ggttgataatccagggttcattccc

SEQ ID NO: 5114748 - DNA, 25 bp, Homo sapien
caaggtggttgataatccagggttc

SEQ ID NO: 5114749 - DNA, 25 bp, Homo sapien
ctgcttcaaggtggttgataatcca

SEQ ID NO: 5114750 - DNA, 25 bp, Homo sapien
taatccagggttcattcccagcacc

SEQ ID NO: 5114751 - DNA, 25 bp, Homo sapien
gttgtatgcacttttgaagctcccc

SEQ ID NO: 5114752 - DNA, 25 bp, Homo sapien
gaaggcagtaaaagtgtttgttgta

SEQ ID NO: 5114753 - DNA, 25 bp, Homo sapien
ttgaaggcagtaaaagtgtttgttg

SEQ ID NO: 5114754 - DNA, 25 bp, Homo sapien
tgtttgttgtatgcacttttgaagc

SEQ ID NO: 5114755 - DNA, 25 bp, Homo sapien
cagccatagcggtacttctttttgg

SEQ ID NO: 5114756 - DNA, 25 bp, Homo sapien
ttcctgcagccatagcggtacttct

SEQ ID NO: 5114757 - DNA, 25 bp, Homo sapien
tgttcctgcagccatagcggtactt

SEQ ID NO: 5114758 - DNA, 25 bp, Homo sapien
cctgcagccatagcggtacttcttt

SEQ ID NO: 5114759 - DNA, 25 bp, Homo sapien
tccatacagtctgccctgtggtctt

SEQ ID NO: 5114760 - DNA, 25 bp, Homo sapien
gctgtgtgacgacttggtttcctca

SEQ ID NO: 5114761 - DNA, 25 bp, Homo sapien
tcttctaaatgtttgctgtgtgacg

SEQ ID NO: 5114762 - DNA, 25 bp, Homo sapien
cccctgtaggccttttgcaagaagg

SEQ ID NO: 5114763 - DNA, 25 bp, Homo sapien
gctgacgcagcaagccggccgatgc

SEQ ID NO: 5114764 - DNA, 25 bp, Homo sapien
ctccatctcgggctgaggattcgct

SEQ ID NO: 5114765 - DNA, 25 bp, Homo sapien
ggcgagtgccgaggcgagcggcggt

SEQ ID NO: 5114766 - DNA, 25 bp, Homo sapien
tcctttcgagctgctggcggtgccg

SEQ ID NO: 5114767 - DNA, 25 bp, Homo sapien
tcccattggtcaacggggcgggcgc

SEQ ID NO: 5114768 - DNA, 25 bp, Homo sapien
ttcctattggcccttggcgccgtca

SEQ ID NO: 5114769 - DNA, 25 bp, Homo sapien
cctctagcctttcccgcccgcggcg

SEQ ID NO: 5114770 - DNA, 25 bp, Homo sapien
cgggcgcggactcccatcttggctt

SEQ ID NO: 5114771 - DNA, 25 bp, Homo sapien
cagtctacggttgtaagcgccgcga

SEQ ID NO: 5114772 - DNA, 25 bp, Homo sapien
gcgccgcgacgcgaaaaactacact

SEQ ID NO: 5114773 - DNA, 25 bp, Homo sapien
cgctcgctgcggttgattagggcca

SEQ ID NO: 5114774 - DNA, 25 bp, Homo sapien
cgtggtcgtcgtacaggaacacctt

SEQ ID NO: 5114775 - DNA, 25 bp, Homo sapien
ccctgcagggttgtaacagctccag

SEQ ID NO: 5114776 - DNA, 25 bp, Homo sapien
gccctgctgtcaggcgcatccagat

SEQ ID NO: 5114777 - DNA, 25 bp, Homo sapien
taacagctccagactgtgcatgcat

SEQ ID NO: 5114778 - DNA, 25 bp, Homo sapien
ggcgcatccagatgagagctgagag

SEQ ID NO: 5114779 - DNA, 25 bp, Homo sapien
ttctcctgggtaccgattgagtgtc

SEQ ID NO: 5114780 - DNA, 25 bp, Homo sapien
ggcaagccttactgggcaggagaaa

SEQ ID NO: 5114781 - DNA, 25 bp, Homo sapien
agtatttctagggtcagtcctctca

SEQ ID NO: 5114782 - DNA, 25 bp, Homo sapien
cagaagcagcgtgtcctcgggactt

SEQ ID NO: 5114783 - DNA, 25 bp, Homo sapien
atgaagtcaaggtgggtgctttgca

SEQ ID NO: 5114784 - DNA, 25 bp, Homo sapien
ctttgcaggtggagcagcttagttc

SEQ ID NO: 5114785 - DNA, 25 bp, Homo sapien
agagagatgaagtcaaggtgggtgc

SEQ ID NO: 5114786 - DNA, 25 bp, Homo sapien
agagatgaagtcaaggtgggtgctt

SEQ ID NO: 5114787 - DNA, 25 bp, Homo sapien
cttcatcaaaacccttgtgtcctga

SEQ ID NO: 5114788 - DNA, 25 bp, Homo sapien
gtcccagataatcaccatcttcatc

SEQ ID NO: 5114789 - DNA, 25 bp, Homo sapien
tggagagttcaagtgccccagatgg

SEQ ID NO: 5114790 - DNA, 25 bp, Homo sapien
gcagaggcacctgggacaagtccca

SEQ ID NO: 5114791 - DNA, 25 bp, Homo sapien
gaatctgagggccttcggccagctt

SEQ ID NO: 5114792 - DNA, 25 bp, Homo sapien
atcagcatgcaaggatttgagggtc

SEQ ID NO: 5114793 - DNA, 25 bp, Homo sapien
agcctgagcactgtggcgtgacgct

SEQ ID NO: 5114794 - DNA, 25 bp, Homo sapien
catgcaaggatttgagggtcagcct

SEQ ID NO: 5114795 - DNA, 25 bp, Homo sapien
gcttgattcctacaacagtcagctt

SEQ ID NO: 5114796 - DNA, 25 bp, Homo sapien
ccagggtggtagtagctgttcacca

SEQ ID NO: 5114797 - DNA, 25 bp, Homo sapien
gggcttgattcctacaacagtcagc

SEQ ID NO: 5114798 - DNA, 25 bp, Homo sapien
ttgtccccagggtggtagtagctgt

SEQ ID NO: 5114799 - DNA, 25 bp, Homo sapien
gtgaggccttgaataacaggtgaga

SEQ ID NO: 5114800 - DNA, 25 bp, Homo sapien
tgaggccttgaataacaggtgagac

SEQ ID NO: 5114801 - DNA, 25 bp, Homo sapien
ggtgaggccttgaataacaggtgag

SEQ ID NO: 5114802 - DNA, 25 bp, Homo sapien
accctctgcagaggccgcgcaccgc

SEQ ID NO: 5114803 - DNA, 25 bp, Homo sapien
tccccacaagcgaggccgggttgct

SEQ ID NO: 5114804 - DNA, 25 bp, Homo sapien
aagcgaggccgggttgcttcgggcg

SEQ ID NO: 5114805 - DNA, 25 bp, Homo sapien
ctggccgcgggtgtagggctcccca

SEQ ID NO: 5114806 - DNA, 25 bp, Homo sapien
atcaccccaagtccgcgccaagagg

SEQ ID NO: 5114807 - DNA, 25 bp, Homo sapien
tttacggagagggctttccggagca

SEQ ID NO: 5114808 - DNA, 25 bp, Homo sapien
cgccaagaggctggccatcccagga

SEQ ID NO: 5114809 - DNA, 25 bp, Homo sapien
ttagaaggaagacgtgggattggcc

SEQ ID NO: 5114810 - DNA, 25 bp, Homo sapien
ttccaggtcgccgatgcgggaccgt

SEQ ID NO: 5114811 - DNA, 25 bp, Homo sapien
catttattcatcactcggctctccg

SEQ ID NO: 5114812 - DNA, 25 bp, Homo sapien
gggcggcaatcgctccagtttcact

SEQ ID NO: 5114813 - DNA, 25 bp, Homo sapien
gctctccgccgcagagtctgaggag

SEQ ID NO: 5114814 - DNA, 25 bp, Homo sapien
tcaataataaaccaagtatacgtta

SEQ ID NO: 5114815 - DNA, 25 bp, Homo sapien
tactaaacatcgttattatcaataa

SEQ ID NO: 5114816 - DNA, 25 bp, Homo sapien
taggcacttaataatgggtggaagt

SEQ ID NO: 5114817 - DNA, 25 bp, Homo sapien
cgttaatacttaggccctggcacac

SEQ ID NO: 5114818 - DNA, 25 bp, Homo sapien
gaccaccacactctcttgaaagatg

SEQ ID NO: 5114819 - DNA, 25 bp, Homo sapien
cacactctcttgaaagatgagagca

SEQ ID NO: 5114820 - DNA, 25 bp, Homo sapien
agctccaggaccaccacactctctt

SEQ ID NO: 5114821 - DNA, 25 bp, Homo sapien
cctggagctccaggaccaccacact

SEQ ID NO: 5114822 - DNA, 25 bp, Homo sapien
tggggtgctccactcaagatccgag

SEQ ID NO: 5114823 - DNA, 25 bp, Homo sapien
gtgctccactcaagatccgagtcct

SEQ ID NO: 5114824 - DNA, 25 bp, Homo sapien
gggtgctccactcaagatccgagtc

SEQ ID NO: 5114825 - DNA, 25 bp, Homo sapien
gcctggggtgctccactcaagatcc

SEQ ID NO: 5114826 - DNA, 25 bp, Homo sapien
ccctcacggcagaactgcagaggct

SEQ ID NO: 5114827 - DNA, 25 bp, Homo sapien
cactcgctggtcaggatgtccatgg

SEQ ID NO: 5114828 - DNA, 25 bp, Homo sapien
tcacttgccctcacggcagaactgc

SEQ ID NO: 5114829 - DNA, 25 bp, Homo sapien
actgcagaggctcagaccactcgct

SEQ ID NO: 5114830 - DNA, 25 bp, Homo sapien
gacagcagcagagggcgccctcggt

SEQ ID NO: 5114831 - DNA, 25 bp, Homo sapien
gcagcagagggcgccctcggttcat

SEQ ID NO: 5114832 - DNA, 25 bp, Homo sapien
agcagcagagggcgccctcggttca

SEQ ID NO: 5114833 - DNA, 25 bp, Homo sapien
acagcagcagagggcgccctcggtt

SEQ ID NO: 5114834 - DNA, 25 bp, Homo sapien
ttctgctttcgggaggtacccctca

SEQ ID NO: 5114835 - DNA, 25 bp, Homo sapien
gaagagcgccttttgagttgcacgt

SEQ ID NO: 5114836 - DNA, 25 bp, Homo sapien
tctttctaagcacccgaaggacagg

SEQ ID NO: 5114837 - DNA, 25 bp, Homo sapien
gctgcatccgaaggagcaactcttt

SEQ ID NO: 5114838 - DNA, 25 bp, Homo sapien
ccagagccagacctctctccaccat

SEQ ID NO: 5114839 - DNA, 25 bp, Homo sapien
cccaaggccagcaccttcaatttcc

SEQ ID NO: 5114840 - DNA, 25 bp, Homo sapien
aggccagcaccttcaatttcctcat

SEQ ID NO: 5114841 - DNA, 25 bp, Homo sapien
tccaccatcattgaccccaaggcca

SEQ ID NO: 5114842 - DNA, 25 bp, Homo sapien
taactcgagtcccttcttcatgcac

SEQ ID NO: 5114843 - DNA, 25 bp, Homo sapien
tcccctaactcgagtcccttcttca

SEQ ID NO: 5114844 - DNA, 25 bp, Homo sapien
aactcgagtcccttcttcatgcaca

SEQ ID NO: 5114845 - DNA, 25 bp, Homo sapien
cctaactcgagtcccttcttcatgc

SEQ ID NO: 5114846 - DNA, 25 bp, Homo sapien
tcctggtcacgcagtgtagcctgca

SEQ ID NO: 5114847 - DNA, 25 bp, Homo sapien
gaatgctacagccagttggaacagc

SEQ ID NO: 5114848 - DNA, 25 bp, Homo sapien
gcctctgggaagcttcagaatgcta

SEQ ID NO: 5114849 - DNA, 25 bp, Homo sapien
ctcctagaacttccgtagcctttgg

SEQ ID NO: 5114850 - DNA, 25 bp, Homo sapien
taagcccttcattaatggtttgtaa

SEQ ID NO: 5114851 - DNA, 25 bp, Homo sapien
tcctgggtgccagaaccccattttc

SEQ ID NO: 5114852 - DNA, 25 bp, Homo sapien
gatgcaggaacgtcactgaggtccc

SEQ ID NO: 5114853 - DNA, 25 bp, Homo sapien
cagtctccacagagctgtacgaggg

SEQ ID NO: 5114854 - DNA, 25 bp, Homo sapien
cccacttcactggattgagtggagt

SEQ ID NO: 5114855 - DNA, 25 bp, Homo sapien
tacagcccacttcactggattgagt

SEQ ID NO: 5114856 - DNA, 25 bp, Homo sapien
agcccacttcactggattgagtgga

SEQ ID NO: 5114857 - DNA, 25 bp, Homo sapien
ctgatacagcccacttcactggatt

SEQ ID NO: 5114858 - DNA, 25 bp, Homo sapien
agagcgcggaggtcggacccgagag

SEQ ID NO: 5114859 - DNA, 25 bp, Homo sapien
tgggcgccggagagcggccagagcg

SEQ ID NO: 5114860 - DNA, 25 bp, Homo sapien
ccgagagcccgagggagcgggtggc

SEQ ID NO: 5114861 - DNA, 25 bp, Homo sapien
gcgggtggcgggctgcctcgcggcc

SEQ ID NO: 5114862 - DNA, 25 bp, Homo sapien
ccaggatggcctcgaccgagaaagg

SEQ ID NO: 5114863 - DNA, 25 bp, Homo sapien
ctggcacagggtaaaaacctacgct

SEQ ID NO: 5114864 - DNA, 25 bp, Homo sapien
agggaagcagcggtccagaaggccg

SEQ ID NO: 5114865 - DNA, 25 bp, Homo sapien
ggcagccacgatgtcgggcaagccc

SEQ ID NO: 5114866 - DNA, 25 bp, Homo sapien
tttttcagcaagactgtcgcggtcc

SEQ ID NO: 5114867 - DNA, 25 bp, Homo sapien
ttttcagcaagactgtcgcggtcct

SEQ ID NO: 5114868 - DNA, 25 bp, Homo sapien
tctttttcagcaagactgtcgcggt

SEQ ID NO: 5114869 - DNA, 25 bp, Homo sapien
ttcagcaagactgtcgcggtcctcg

SEQ ID NO: 5114870 - DNA, 25 bp, Homo sapien
tgggaaggcccagagtcctgagcag

SEQ ID NO: 5114871 - DNA, 25 bp, Homo sapien
ccagagtcctgagcagtgagccagc

SEQ ID NO: 5114872 - DNA, 25 bp, Homo sapien
tcctgagcagtgagccagctccaac

SEQ ID NO: 5114873 - DNA, 25 bp, Homo sapien
ctgggaaggcccagagtcctgagca

SEQ ID NO: 5114874 - DNA, 25 bp, Homo sapien
ctgtaggtcctccgttggggcccag

SEQ ID NO: 5114875 - DNA, 25 bp, Homo sapien
tgtcctgtaggtcctccgttggggc

SEQ ID NO: 5114876 - DNA, 25 bp, Homo sapien
agtgtcctgtaggtcctccgttggg

SEQ ID NO: 5114877 - DNA, 25 bp, Homo sapien
tcagtgtcctgtaggtcctccgttg

SEQ ID NO: 5114878 - DNA, 25 bp, Homo sapien
taagtttgagccgagctgccagctg

SEQ ID NO: 5114879 - DNA, 25 bp, Homo sapien
ctgtaagtttgagccgagctgccag

SEQ ID NO: 5114880 - DNA, 25 bp, Homo sapien
ctgctccaagttaaacatagttcgg

SEQ ID NO: 5114881 - DNA, 25 bp, Homo sapien
ccaagttaaacatagttcggactct

SEQ ID NO: 5114882 - DNA, 25 bp, Homo sapien
tgcggttctggaaccagactctcac

SEQ ID NO: 5114883 - DNA, 25 bp, Homo sapien
tgaccctgcggttctggaaccagac

SEQ ID NO: 5114884 - DNA, 25 bp, Homo sapien
ttgaccctgcggttctggaaccaga

SEQ ID NO: 5114885 - DNA, 25 bp, Homo sapien
ccctgcggttctggaaccagactct

SEQ ID NO: 5114886 - DNA, 25 bp, Homo sapien
aggcagcctcggcagatgtaactgc

SEQ ID NO: 5114887 - DNA, 25 bp, Homo sapien
tcactctggatactggcgatggagc

SEQ ID NO: 5114888 - DNA, 25 bp, Homo sapien
tcatcactctggatactggcgatgg

SEQ ID NO: 5114889 - DNA, 25 bp, Homo sapien
gcatcatcactctggatactggcga

SEQ ID NO: 5114890 - DNA, 25 bp, Homo sapien
cttctttcagagaaatcgagcacat

SEQ ID NO: 5114891 - DNA, 25 bp, Homo sapien
tctttcagagaaatcgagcacattc

SEQ ID NO: 5114892 - DNA, 25 bp, Homo sapien
gaatctgaatggtctgtgctacaga

SEQ ID NO: 5114893 - DNA, 25 bp, Homo sapien
gctacagaaatcagctctgcaaatc

SEQ ID NO: 5114894 - DNA, 25 bp, Homo sapien
ttggcgctgctcacgaaacggactt

SEQ ID NO: 5114895 - DNA, 25 bp, Homo sapien
tcacgaaacggacttccacggagac

SEQ ID NO: 5114896 - DNA, 25 bp, Homo sapien
aacacgtcgcacatggaggccgcca

SEQ ID NO: 5114897 - DNA, 25 bp, Homo sapien
gccacgcccacgcagaaggagaaca

SEQ ID NO: 5114898 - DNA, 25 bp, Homo sapien
cacatgaagttcgtgaggactccct

SEQ ID NO: 5114899 - DNA, 25 bp, Homo sapien
aattccgctgggaggaaatgcgcac

SEQ ID NO: 5114900 - DNA, 25 bp, Homo sapien
aaatgcgcacggagactccggaggc

SEQ ID NO: 5114901 - DNA, 25 bp, Homo sapien
gaccctcgtgaaggatcttggcctc

SEQ ID NO: 5114902 - DNA, 25 bp, Homo sapien
actagaggtcttacgtcttgggcaa

SEQ ID NO: 5114903 - DNA, 25 bp, Homo sapien
tgagctggaaaactagatcaatatg

SEQ ID NO: 5114904 - DNA, 25 bp, Homo sapien
atatgatgacgctgagagcagacaa

SEQ ID NO: 5114905 - DNA, 25 bp, Homo sapien
gagcagacaacagacaactagaggt

SEQ ID NO: 5114906 - DNA, 25 bp, Homo sapien
agggaaggagcaaactgctccagat

SEQ ID NO: 5114907 - DNA, 25 bp, Homo sapien
gggaaggagcaaactgctccagata

SEQ ID NO: 5114908 - DNA, 25 bp, Homo sapien
ggaaggagcaaactgctccagatac

SEQ ID NO: 5114909 - DNA, 25 bp, Homo sapien
ggagataggaacaggtaaggagacc

SEQ ID NO: 5114910 - DNA, 25 bp, Homo sapien
cagggatgtagggaagctgatttac

SEQ ID NO: 5114911 - DNA, 25 bp, Homo sapien
ccagggatgtagggaagctgattta

SEQ ID NO: 5114912 - DNA, 25 bp, Homo sapien
gcagttactggccttattgggcaca

SEQ ID NO: 5114913 - DNA, 25 bp, Homo sapien
tcaaagaagacgtgtggagccctgt

SEQ ID NO: 5114914 - DNA, 25 bp, Homo sapien
ccttagaaggccagatacggttgcc

SEQ ID NO: 5114915 - DNA, 25 bp, Homo sapien
gatggcttcagaacccaggcagtta

SEQ ID NO: 5114916 - DNA, 25 bp, Homo sapien
ctcggtagcgataaagtgcattcca

SEQ ID NO: 5114917 - DNA, 25 bp, Homo sapien
gggccgttctacgaagatggtctcc

SEQ ID NO: 5114918 - DNA, 25 bp, Homo sapien
cgaagatggtctcccccttccggat

SEQ ID NO: 5114919 - DNA, 25 bp, Homo sapien
tcggtagcgataaagtgcattccag

SEQ ID NO: 5114920 - DNA, 25 bp, Homo sapien
catgcacaaagacgactgggccatg

SEQ ID NO: 5114921 - DNA, 25 bp, Homo sapien
tgcacaaagacgactgggccatgag

SEQ ID NO: 5114922 - DNA, 25 bp, Homo sapien
ttccatgcacaaagacgactgggcc

SEQ ID NO: 5114923 - DNA, 25 bp, Homo sapien
cacaaagacgactgggccatgagga

SEQ ID NO: 5114924 - DNA, 25 bp, Homo sapien
ctgacggtgagagccagacacaaca

SEQ ID NO: 5114925 - DNA, 25 bp, Homo sapien
ctttcacagccctacagagcagctg

SEQ ID NO: 5114926 - DNA, 25 bp, Homo sapien
cagacacaacaatatcttgagagca

SEQ ID NO: 5114927 - DNA, 25 bp, Homo sapien
cttgagagcagaggccacatctatc

SEQ ID NO: 5114928 - DNA, 25 bp, Homo sapien
cctggtttcccggtcagcctctggg

SEQ ID NO: 5114929 - DNA, 25 bp, Homo sapien
ctggcctggtttcccggtcagcctc

SEQ ID NO: 5114930 - DNA, 25 bp, Homo sapien
tggtttcccggtcagcctctgggca

SEQ ID NO: 5114931 - DNA, 25 bp, Homo sapien
ttcccggtcagcctctgggcattct

SEQ ID NO: 5114932 - DNA, 25 bp, Homo sapien
gaggtctttgcgcacagtgcacagc

SEQ ID NO: 5114933 - DNA, 25 bp, Homo sapien
tctggtggaggtctttgcgcacagt

SEQ ID NO: 5114934 - DNA, 25 bp, Homo sapien
acagttctggtggaggtctttgcgc

SEQ ID NO: 5114935 - DNA, 25 bp, Homo sapien
gtggaggtctttgcgcacagtgcac

SEQ ID NO: 5114936 - DNA, 25 bp, Homo sapien
agtggctgccaaccgacattctgca

SEQ ID NO: 5114937 - DNA, 25 bp, Homo sapien
ttgagaggatgcaaggggtcatcct

SEQ ID NO: 5114938 - DNA, 25 bp, Homo sapien
gacattctgcactgcagtacatcac

SEQ ID NO: 5114939 - DNA, 25 bp, Homo sapien
gccaaccgacattctgcactgcagt

SEQ ID NO: 5114940 - DNA, 25 bp, Homo sapien
agccatcaacatgatgcttgcagtc

SEQ ID NO: 5114941 - DNA, 25 bp, Homo sapien
caacatgatgcttgcagtctcaggt

SEQ ID NO: 5114942 - DNA, 25 bp, Homo sapien
gtggccaccatcctagccatcaaca

SEQ ID NO: 5114943 - DNA, 25 bp, Homo sapien
agtctcaggtgggtagtgaatactc

SEQ ID NO: 5114944 - DNA, 25 bp, Homo sapien
caaaactgggaaaagagtctgatcc

SEQ ID NO: 5114945 - DNA, 25 bp, Homo sapien
gaagtttatggacaatttcctcctc

SEQ ID NO: 5114946 - DNA, 25 bp, Homo sapien
agagtctgatccaacggtccttgtc

SEQ ID NO: 5114947 - DNA, 25 bp, Homo sapien
tgtctcccagaagtttatggacaat

SEQ ID NO: 5114948 - DNA, 25 bp, Homo sapien
ggctgactgcttcctcatagagggc

SEQ ID NO: 5114949 - DNA, 25 bp, Homo sapien
tggctgactgcttcctcatagaggg

SEQ ID NO: 5114950 - DNA, 25 bp, Homo sapien
ctggctgactgcttcctcatagagg

SEQ ID NO: 5114951 - DNA, 25 bp, Homo sapien
aagagcaaagagagaccggaatcca

SEQ ID NO: 5114952 - DNA, 25 bp, Homo sapien
ctggtcccgattccttggccattgg

SEQ ID NO: 5114953 - DNA, 25 bp, Homo sapien
agagaccggaatccatctggagtga

SEQ ID NO: 5114954 - DNA, 25 bp, Homo sapien
cattggtcccaacaagagcaaagag

SEQ ID NO: 5114955 - DNA, 25 bp, Homo sapien
cccatcccagtcttgaaaggaactg

SEQ ID NO: 5114956 - DNA, 25 bp, Homo sapien
gagagtaacttcaatagctctggaa

SEQ ID NO: 5114957 - DNA, 25 bp, Homo sapien
cccctgagagtaacttcaatagctc

SEQ ID NO: 5114958 - DNA, 25 bp, Homo sapien
gagtaacttcaatagctctggaaca

SEQ ID NO: 5114959 - DNA, 25 bp, Homo sapien
tcgatgtccttgtatagctggtcaa

SEQ ID NO: 5114960 - DNA, 25 bp, Homo sapien
gtcaagctgctcacggtcctgaggc

SEQ ID NO: 5114961 - DNA, 25 bp, Homo sapien
caggcatggacccactggcttaggg

SEQ ID NO: 5114962 - DNA, 25 bp, Homo sapien
ctggtcaatgaaggcgtcaagctgc

SEQ ID NO: 5114963 - DNA, 25 bp, Homo sapien
gatccttcacagttaagaaactctc

SEQ ID NO: 5114964 - DNA, 25 bp, Homo sapien
gcacaaagaggccagatccttcaca

SEQ ID NO: 5114965 - DNA, 25 bp, Homo sapien
cacaaagaggccagatccttcacag

SEQ ID NO: 5114966 - DNA, 25 bp, Homo sapien
ctggaaaggaggtctctgcattggg

SEQ ID NO: 5114967 - DNA, 25 bp, Homo sapien
ctctgcattgggcacacaactgtgg

SEQ ID NO: 5114968 - DNA, 25 bp, Homo sapien
ggtctctgcattgggcacacaactg

SEQ ID NO: 5114969 - DNA, 25 bp, Homo sapien
gaggtctctgcattgggcacacaac

SEQ ID NO: 5114970 - DNA, 25 bp, Homo sapien
tgaggatcttgtggcggctgtggcg

SEQ ID NO: 5114971 - DNA, 25 bp, Homo sapien
gctgacagcagtccaagtagctgat

SEQ ID NO: 5114972 - DNA, 25 bp, Homo sapien
gcagtccaagtagctgatacaaatt

SEQ ID NO: 5114973 - DNA, 25 bp, Homo sapien
gctcccgctgacagcagtccaagta

SEQ ID NO: 5114974 - DNA, 25 bp, Homo sapien
ctatgggtagaggaccccagagccc

SEQ ID NO: 5114975 - DNA, 25 bp, Homo sapien
ttcctcttctgaggtcacattgggt

SEQ ID NO: 5114976 - DNA, 25 bp, Homo sapien
gtcacattgggttcatcagcctctg

SEQ ID NO: 5114977 - DNA, 25 bp, Homo sapien
cctctgccaggcatttgggacagga

SEQ ID NO: 5114978 - DNA, 25 bp, Homo sapien
tgaggtcacattgggttcatcagcc

SEQ ID NO: 5114979 - DNA, 25 bp, Homo sapien
gagtgggaagttccctccaagccac

SEQ ID NO: 5114980 - DNA, 25 bp, Homo sapien
cccttttctggcagggtctagggca

SEQ ID NO: 5114981 - DNA, 25 bp, Homo sapien
agggccctttctgggcagggcaaca

SEQ ID NO: 5114982 - DNA, 25 bp, Homo sapien
ggaaagcaggcaatgggagtgggaa

SEQ ID NO: 5114983 - DNA, 25 bp, Homo sapien
gccagttgtgaaaggctcagtgcca

SEQ ID NO: 5114984 - DNA, 25 bp, Homo sapien
agagtctgagccaactcagcagcag

SEQ ID NO: 5114985 - DNA, 25 bp, Homo sapien
gggaggccagttgtgaaaggctcag

SEQ ID NO: 5114986 - DNA, 25 bp, Homo sapien
ggctcagtgccagtgcagagtctga

SEQ ID NO: 5114987 - DNA, 25 bp, Homo sapien
ccatctctgcttcaatgaactcggt

SEQ ID NO: 5114988 - DNA, 25 bp, Homo sapien
gggaggtgaggacgcctcaccacct

SEQ ID NO: 5114989 - DNA, 25 bp, Homo sapien
tgcttcaatgaactcggtctttctt

SEQ ID NO: 5114990 - DNA, 25 bp, Homo sapien
gaagaaacactgttaggccctggcc

SEQ ID NO: 5114991 - DNA, 25 bp, Homo sapien
gcatcctaatctaaggagcgcaggc

SEQ ID NO: 5114992 - DNA, 25 bp, Homo sapien
gggtgatgacccactatgtgtccct

SEQ ID NO: 5114993 - DNA, 25 bp, Homo sapien
tcctgagaggcaaggcacgagtctg

SEQ ID NO: 5114994 - DNA, 25 bp, Homo sapien
ttttccatactccataaggccagcc

SEQ ID NO: 5114995 - DNA, 25 bp, Homo sapien
tagcatccaacccaagagtgagagg

SEQ ID NO: 5114996 - DNA, 25 bp, Homo sapien
tgtgaaggagtaagaacccaatggg

SEQ ID NO: 5114997 - DNA, 25 bp, Homo sapien
tctcgaagtatctagcccagctcct

SEQ ID NO: 5114998 - DNA, 25 bp, Homo sapien
gacaagacagggctactctcgaagt

SEQ ID NO: 5114999 - DNA, 25 bp, Homo sapien
tgaaagggaagccacaccactggcc

SEQ ID NO: 5115000 - DNA, 25 bp, Homo sapien
cccaagggtgtctcatgctacaaga

SEQ ID NO: 5115001 - DNA, 25 bp, Homo sapien
ggcttctggctagaacccgaaacaa

SEQ ID NO: 5115002 - DNA, 25 bp, Homo sapien
agtgaccttcacagcagttgttgga

SEQ ID NO: 5115003 - DNA, 25 bp, Homo sapien
cattccagccataagtgactctgag

SEQ ID NO: 5115004 - DNA, 25 bp, Homo sapien
cacattccagccataagtgactctg

SEQ ID NO: 5115005 - DNA, 25 bp, Homo sapien
aagagtttgtcccacattccagcca

SEQ ID NO: 5115006 - DNA, 25 bp, Homo sapien
ccttctggtagaagagtttgtccca

SEQ ID NO: 5115007 - DNA, 25 bp, Homo sapien
cgctgaacctccagaggcctgcggg

SEQ ID NO: 5115008 - DNA, 25 bp, Homo sapien
tcagcaacggtttcttcatccagga

SEQ ID NO: 5115009 - DNA, 25 bp, Homo sapien
cttgtccccgctgaacctccagagg

SEQ ID NO: 5115010 - DNA, 25 bp, Homo sapien
agaggcctgcggggaactcagcaac

SEQ ID NO: 5115011 - DNA, 25 bp, Homo sapien
tatcgacagctgaagcaagtccggc

SEQ ID NO: 5115012 - DNA, 25 bp, Homo sapien
gggttaacggcctcgactatcgaca

SEQ ID NO: 5115013 - DNA, 25 bp, Homo sapien
caagacgagtgccttcccgtgaagg

SEQ ID NO: 5115014 - DNA, 25 bp, Homo sapien
taatcgtcgtcaatcgaggcggcct

SEQ ID NO: 5115015 - DNA, 25 bp, Homo sapien
tggaagcttattcagcggcccgcca

SEQ ID NO: 5115016 - DNA, 25 bp, Homo sapien
cagcaacccacaatgcctcgcgcaa

SEQ ID NO: 5115017 - DNA, 25 bp, Homo sapien
tcttctccgagaccgggccgcccag

SEQ ID NO: 5115018 - DNA, 25 bp, Homo sapien
ggccgcccagcaacccacaatgcct

SEQ ID NO: 5115019 - DNA, 25 bp, Homo sapien
tccagaggccttactctcaactgct

SEQ ID NO: 5115020 - DNA, 25 bp, Homo sapien
cctctgcacagaagatgaagacgac

SEQ ID NO: 5115021 - DNA, 25 bp, Homo sapien
ccagaggccttactctcaactgctg

SEQ ID NO: 5115022 - DNA, 25 bp, Homo sapien
gctgcctctgcacagaagatgaaga

SEQ ID NO: 5115023 - DNA, 25 bp, Homo sapien
ccagcattctttctggctcttcagc

SEQ ID NO: 5115024 - DNA, 25 bp, Homo sapien
tcccagcattctttctggctcttca

SEQ ID NO: 5115025 - DNA, 25 bp, Homo sapien
cccagcattctttctggctcttcag

SEQ ID NO: 5115026 - DNA, 25 bp, Homo sapien
cagcattctttctggctcttcagct

SEQ ID NO: 5115027 - DNA, 25 bp, Homo sapien
tccttttgctggagtgtcccaggtc

SEQ ID NO: 5115028 - DNA, 25 bp, Homo sapien
ggatcaggcgtcaactgaagggaaa

SEQ ID NO: 5115029 - DNA, 25 bp, Homo sapien
tcccaggtctggtggcaagaaatgg

SEQ ID NO: 5115030 - DNA, 25 bp, Homo sapien
atttgggatcaggcgtcaactgaag

SEQ ID NO: 5115031 - DNA, 25 bp, Homo sapien
gtagttcttacagcctcagcaatca

SEQ ID NO: 5115032 - DNA, 25 bp, Homo sapien
gcactgatgttactcacaagctggg

SEQ ID NO: 5115033 - DNA, 25 bp, Homo sapien
tggcaggcactgatgttactcacaa

SEQ ID NO: 5115034 - DNA, 25 bp, Homo sapien
ggtagttcttacagcctcagcaatc

SEQ ID NO: 5115035 - DNA, 25 bp, Homo sapien
gccccatcattagaaattgttgctt

SEQ ID NO: 5115036 - DNA, 25 bp, Homo sapien
tggccccatcattagaaattgttgc

SEQ ID NO: 5115037 - DNA, 25 bp, Homo sapien
ggccccatcattagaaattgttgct

SEQ ID NO: 5115038 - DNA, 25 bp, Homo sapien
ctggaagatgatgacaggaaataca

SEQ ID NO: 5115039 - DNA, 25 bp, Homo sapien
ggaagatgatgacaggaaatacacg

SEQ ID NO: 5115040 - DNA, 25 bp, Homo sapien
gatgatgacaggaaatacacgtttt

SEQ ID NO: 5115041 - DNA, 25 bp, Homo sapien
gaagatgatgacaggaaatacacgt

SEQ ID NO: 5115042 - DNA, 25 bp, Homo sapien
gatgatctgggggtgtaaaccttcc

SEQ ID NO: 5115043 - DNA, 25 bp, Homo sapien
cggaaagctcgaatgatgatctggg

SEQ ID NO: 5115044 - DNA, 25 bp, Homo sapien
tgatctgggggtgtaaaccttcctc

SEQ ID NO: 5115045 - DNA, 25 bp, Homo sapien
tgcggaaagctcgaatgatgatctg

SEQ ID NO: 5115046 - DNA, 25 bp, Homo sapien
caatctctcaatagtcctgagtctg

SEQ ID NO: 5115047 - DNA, 25 bp, Homo sapien
gttcactcccaaatcctaagcattt

SEQ ID NO: 5115048 - DNA, 25 bp, Homo sapien
tgctgaagtggacctcaatctctca

SEQ ID NO: 5115049 - DNA, 25 bp, Homo sapien
gaatgagtctctcatgctaaagaca

SEQ ID NO: 5115050 - DNA, 25 bp, Homo sapien
cacagcaatctctttgatcttgtta

SEQ ID NO: 5115051 - DNA, 25 bp, Homo sapien
caatctctttgatcttgttaactgc

SEQ ID NO: 5115052 - DNA, 25 bp, Homo sapien
atctgccttcttcacggtcacagca

SEQ ID NO: 5115053 - DNA, 25 bp, Homo sapien
ttcttcacggtcacagcaatctctt

SEQ ID NO: 5115054 - DNA, 25 bp, Homo sapien
tcagagcggtcatggcacacttttc

SEQ ID NO: 5115055 - DNA, 25 bp, Homo sapien
ctcagagcggtcatggcacactttt

SEQ ID NO: 5115056 - DNA, 25 bp, Homo sapien
taaagtaggaaacttcaccctgcaa

SEQ ID NO: 5115057 - DNA, 25 bp, Homo sapien
gaacaatggtaattgacaggctgga

SEQ ID NO: 5115058 - DNA, 25 bp, Homo sapien
tttagagggtaagaaccagccagtg

SEQ ID NO: 5115059 - DNA, 25 bp, Homo sapien
tcagaaggctttacgcagaagaata

SEQ ID NO: 5115060 - DNA, 25 bp, Homo sapien
gcatggatactatagccttgacgct

SEQ ID NO: 5115061 - DNA, 25 bp, Homo sapien
cactggccgatggataatgctgtac

SEQ ID NO: 5115062 - DNA, 25 bp, Homo sapien
tactgggctgtcctctaagactggc

SEQ ID NO: 5115063 - DNA, 25 bp, Homo sapien
aaagcatggtaaaggcctactgggc

SEQ ID NO: 5115064 - DNA, 25 bp, Homo sapien
tgcaacaccagctaccagctgagaa

SEQ ID NO: 5115065 - DNA, 25 bp, Homo sapien
tgtgtggactcttatctcagcattg

SEQ ID NO: 5115066 - DNA, 25 bp, Homo sapien
gtggtactttttgggttgcatttca

SEQ ID NO: 5115067 - DNA, 25 bp, Homo sapien
gggcaatcttgggattgtggtactt

SEQ ID NO: 5115068 - DNA, 25 bp, Homo sapien
actttggctccagaatgatggatct

SEQ ID NO: 5115069 - DNA, 25 bp, Homo sapien
gtactgggtggccacatccccaatg

SEQ ID NO: 5115070 - DNA, 25 bp, Homo sapien
cagaacatgtccctgtcagcaaagt

SEQ ID NO: 5115071 - DNA, 25 bp, Homo sapien
agatcctcctcaggtactcggccag

SEQ ID NO: 5115072 - DNA, 25 bp, Homo sapien
tcgcctccaatctgggtctcttcaa

SEQ ID NO: 5115073 - DNA, 25 bp, Homo sapien
cctccaatctgggtctcttcaaaca

SEQ ID NO: 5115074 - DNA, 25 bp, Homo sapien
agagcattcacactggtctggattg

SEQ ID NO: 5115075 - DNA, 25 bp, Homo sapien
tctgctgacagagcattcacactgg

SEQ ID NO: 5115076 - DNA, 25 bp, Homo sapien
ataaactgctcggcgccgccacgga

SEQ ID NO: 5115077 - DNA, 25 bp, Homo sapien
tcctccataaactgctcggcgccgc

SEQ ID NO: 5115078 - DNA, 25 bp, Homo sapien
ctcggcgccgccacggagaatgaag

SEQ ID NO: 5115079 - DNA, 25 bp, Homo sapien
cttgatggccctcctgacgatcatg

SEQ ID NO: 5115080 - DNA, 25 bp, Homo sapien
cagctggcgtgggataatctccaag

SEQ ID NO: 5115081 - DNA, 25 bp, Homo sapien
aggtacttggagagttccatctcaa

SEQ ID NO: 5115082 - DNA, 25 bp, Homo sapien
gaatagtccttgagtaatcccgcag

SEQ ID NO: 5115083 - DNA, 25 bp, Homo sapien
tgggcatgccgagcccgcagcttgt

SEQ ID NO: 5115084 - DNA, 25 bp, Homo sapien
cactccatgtggtcagtatgtgctt

SEQ ID NO: 5115085 - DNA, 25 bp, Homo sapien
aagcaaaagtcctaatacaagccag

SEQ ID NO: 5115086 - DNA, 25 bp, Homo sapien
tagggctctggagagcttcaccaca

SEQ ID NO: 5115087 - DNA, 25 bp, Homo sapien
tcatctcattgcttcaaatagcccg

SEQ ID NO: 5115088 - DNA, 25 bp, Homo sapien
tatggaactactttcaactttcctc

SEQ ID NO: 5115089 - DNA, 25 bp, Homo sapien
ttgtaaactggtactccaaaagaca

SEQ ID NO: 5115090 - DNA, 25 bp, Homo sapien
taatatggaactactttcaactttc

SEQ ID NO: 5115091 - DNA, 25 bp, Homo sapien
ggaggtaatatggaactactttcaa

SEQ ID NO: 5115092 - DNA, 25 bp, Homo sapien
gcattgatccgcaccatagctggct

SEQ ID NO: 5115093 - DNA, 25 bp, Homo sapien
gctgtcagcgcattgatccgcacca

SEQ ID NO: 5115094 - DNA, 25 bp, Homo sapien
tcatctacagacacgatcaggcacg

SEQ ID NO: 5115095 - DNA, 25 bp, Homo sapien
ctgtgggagcatccacagtcgagcg

SEQ ID NO: 5115096 - DNA, 25 bp, Homo sapien
tatttaaatagcctccagtaagaag

SEQ ID NO: 5115097 - DNA, 25 bp, Homo sapien
taagaagagagtgggccaattacta

SEQ ID NO: 5115098 - DNA, 25 bp, Homo sapien
aggagggtaagtgcacccagcagcc

SEQ ID NO: 5115099 - DNA, 25 bp, Homo sapien
ccaagccaaggagggtaagtgcacc

SEQ ID NO: 5115100 - DNA, 25 bp, Homo sapien
ggccttcccagagtgactattggtg

SEQ ID NO: 5115101 - DNA, 25 bp, Homo sapien
gcccctcaggaattgcctcaaaaga

SEQ ID NO: 5115102 - DNA, 25 bp, Homo sapien
gagtgggtgtaaggcccaaatgccc

SEQ ID NO: 5115103 - DNA, 25 bp, Homo sapien
tctaaggcgctaagttgaaggaggc

SEQ ID NO: 5115104 - DNA, 25 bp, Homo sapien
ccccaggtatgtgtagaggcccagt

SEQ ID NO: 5115105 - DNA, 25 bp, Homo sapien
gggcctggctatccctagaagcact

SEQ ID NO: 5115106 - DNA, 25 bp, Homo sapien
ggtgcacttatatgcatccctgcag

SEQ ID NO: 5115107 - DNA, 25 bp, Homo sapien
ggaatatctgagagcaagcagccct

SEQ ID NO: 5115108 - DNA, 25 bp, Homo sapien
caagggtgtcatgctggcaactccc

SEQ ID NO: 5115109 - DNA, 25 bp, Homo sapien
ccagtcctgcacaaagccttggctg

SEQ ID NO: 5115110 - DNA, 25 bp, Homo sapien
ctgggatcccatgggcgcagcagca

SEQ ID NO: 5115111 - DNA, 25 bp, Homo sapien
tggcttgagcctgcccaactgaagg

SEQ ID NO: 5115112 - DNA, 25 bp, Homo sapien
tatgcgctgcgcgagatcgagatcc

SEQ ID NO: 5115113 - DNA, 25 bp, Homo sapien
cacccgctgatgtggcctacgaaga

SEQ ID NO: 5115114 - DNA, 25 bp, Homo sapien
ccggcgagaggtcttcgagagcact

SEQ ID NO: 5115115 - DNA, 25 bp, Homo sapien
tagcctgccctgtgaggagttggcc

SEQ ID NO: 5115116 - DNA, 25 bp, Homo sapien
acgtggggtcccggcgcagccgctg

SEQ ID NO: 5115117 - DNA, 25 bp, Homo sapien
gtggggtcccggcgcagccgctgct

SEQ ID NO: 5115118 - DNA, 25 bp, Homo sapien
cgtggggtcccggcgcagccgctgc

SEQ ID NO: 5115119 - DNA, 25 bp, Homo sapien
aacgtggggtcccggcgcagccgct

SEQ ID NO: 5115120 - DNA, 25 bp, Homo sapien
cctcctctaggtccgggatgggatt

SEQ ID NO: 5115121 - DNA, 25 bp, Homo sapien
cacgtgttcctaggcggctctttaa

SEQ ID NO: 5115122 - DNA, 25 bp, Homo sapien
gtctccgcggagaccaagcatctga

SEQ ID NO: 5115123 - DNA, 25 bp, Homo sapien
gatttgtgatgggtacacgtgttcc

SEQ ID NO: 5115124 - DNA, 25 bp, Homo sapien
ttggagcataaaaaggccgctgtgc

SEQ ID NO: 5115125 - DNA, 25 bp, Homo sapien
gactatgccatgtgttgagctctga

SEQ ID NO: 5115126 - DNA, 25 bp, Homo sapien
gaagttcctgctatgtcccaaggga

SEQ ID NO: 5115127 - DNA, 25 bp, Homo sapien
ggtctacacctctggctagtctggg

SEQ ID NO: 5115128 - DNA, 25 bp, Homo sapien
tacagcagtgtcttatccagcagcc

SEQ ID NO: 5115129 - DNA, 25 bp, Homo sapien
gaagtcttctgagaccacccagtga

SEQ ID NO: 5115130 - DNA, 25 bp, Homo sapien
gataaaggagatccccacgctcatg

SEQ ID NO: 5115131 - DNA, 25 bp, Homo sapien
taacccaggctaggaacagacaggt

SEQ ID NO: 5115132 - DNA, 25 bp, Homo sapien
agaagccttttgcttgcgacgtgtg

SEQ ID NO: 5115133 - DNA, 25 bp, Homo sapien
ttttgcttgcgacgtgtgcggccgc

SEQ ID NO: 5115134 - DNA, 25 bp, Homo sapien
cgcttcgcgcgcagcgatgagaaga

SEQ ID NO: 5115135 - DNA, 25 bp, Homo sapien
ccgcttcgcgcgcagcgatgagaag

SEQ ID NO: 5115136 - DNA, 25 bp, Homo sapien
aaggaccatactaatcttccctgta

SEQ ID NO: 5115137 - DNA, 25 bp, Homo sapien
ttagtatatgtgctgctgaagtgag

SEQ ID NO: 5115138 - DNA, 25 bp, Homo sapien
tcattccaattttagtatatgtgct

SEQ ID NO: 5115139 - DNA, 25 bp, Homo sapien
gtatatgtgctgctgaagtgagcat

SEQ ID NO: 5115140 - DNA, 25 bp, Homo sapien
ctatgcagagcactgacaatccgga

SEQ ID NO: 5115141 - DNA, 25 bp, Homo sapien
atgaaatctgggtttaggaattcct

SEQ ID NO: 5115142 - DNA, 25 bp, Homo sapien
tcctttgaaaccattccaagcttgt

SEQ ID NO: 5115143 - DNA, 25 bp, Homo sapien
gatgtaatgacgataatgaaatctg

SEQ ID NO: 5115144 - DNA, 25 bp, Homo sapien
gaagtaatcgtccaccactgtgtac

SEQ ID NO: 5115145 - DNA, 25 bp, Homo sapien
gcaacgaaggcagataaccaatcca

SEQ ID NO: 5115146 - DNA, 25 bp, Homo sapien
cactccaggtatccacagatgatag

SEQ ID NO: 5115147 - DNA, 25 bp, Homo sapien
tcacagctttcaattgcaacgaagg

SEQ ID NO: 5115148 - DNA, 25 bp, Homo sapien
tctttcatttgcagaacattaagga

SEQ ID NO: 5115149 - DNA, 25 bp, Homo sapien
tttcatttgcagaacattaaggact

SEQ ID NO: 5115150 - DNA, 25 bp, Homo sapien
ctttcatttgcagaacattaaggac

SEQ ID NO: 5115151 - DNA, 25 bp, Homo sapien
ttcatttgcagaacattaaggactc

SEQ ID NO: 5115152 - DNA, 25 bp, Homo sapien
ttcaggatggcctgctggccaggat

SEQ ID NO: 5115153 - DNA, 25 bp, Homo sapien
gggttttcaatggcatgagctgcca

SEQ ID NO: 5115154 - DNA, 25 bp, Homo sapien
gttttcaatggcatgagctgccagc

SEQ ID NO: 5115155 - DNA, 25 bp, Homo sapien
caggatggcctgctggccaggattc

SEQ ID NO: 5115156 - DNA, 25 bp, Homo sapien
gtttcagaaatgaagtggccggcaa

SEQ ID NO: 5115157 - DNA, 25 bp, Homo sapien
tgcaaggaatgccattgtctacata

SEQ ID NO: 5115158 - DNA, 25 bp, Homo sapien
tgccattgtctacatagtgcaaaga

SEQ ID NO: 5115159 - DNA, 25 bp, Homo sapien
aggaatgccattgtctacatagtgc

SEQ ID NO: 5115160 - DNA, 25 bp, Homo sapien
cattgtctacatagtgcaaagaaga

SEQ ID NO: 5115161 - DNA, 25 bp, Homo sapien
gtcacgcatgctcagaacttcctgg

SEQ ID NO: 5115162 - DNA, 25 bp, Homo sapien
gatggtgtcacgcatgctcagaact

SEQ ID NO: 5115163 - DNA, 25 bp, Homo sapien
ggagatggtgtcacgcatgctcaga

SEQ ID NO: 5115164 - DNA, 25 bp, Homo sapien
catgggagatggtgtcacgcatgct

SEQ ID NO: 5115165 - DNA, 25 bp, Homo sapien
agggcagctgcatgccttcagacca

SEQ ID NO: 5115166 - DNA, 25 bp, Homo sapien
tagtcttcagtaggcaacttctgaa

SEQ ID NO: 5115167 - DNA, 25 bp, Homo sapien
ctcattggtcacagctttttcagca

SEQ ID NO: 5115168 - DNA, 25 bp, Homo sapien
agcctgctcttccttctcaaactct

SEQ ID NO: 5115169 - DNA, 25 bp, Homo sapien
ggttgttcctatgtattcagtggcc

SEQ ID NO: 5115170 - DNA, 25 bp, Homo sapien
tgttcctatgtattcagtggcctga

SEQ ID NO: 5115171 - DNA, 25 bp, Homo sapien
cagtggttgttcctatgtattcagt

SEQ ID NO: 5115172 - DNA, 25 bp, Homo sapien
gtggttgttcctatgtattcagtgg

SEQ ID NO: 5115173 - DNA, 25 bp, Homo sapien
agaggatcctatacctgggactcat

SEQ ID NO: 5115174 - DNA, 25 bp, Homo sapien
atactttgaacagaggatcctatac

SEQ ID NO: 5115175 - DNA, 25 bp, Homo sapien
tgaacagaggatcctatacctggga

SEQ ID NO: 5115176 - DNA, 25 bp, Homo sapien
ccatatactttgaacagaggatcct

SEQ ID NO: 5115177 - DNA, 25 bp, Homo sapien
cacagagaagagatcaaactctagg

SEQ ID NO: 5115178 - DNA, 25 bp, Homo sapien
ctctaggacgtacccgttataatca

SEQ ID NO: 5115179 - DNA, 25 bp, Homo sapien
ggacgtacccgttataatcacacat

SEQ ID NO: 5115180 - DNA, 25 bp, Homo sapien
gagatcaaactctaggacgtacccg

SEQ ID NO: 5115181 - DNA, 25 bp, Homo sapien
cgcaaggacagtgtagttctcggct

SEQ ID NO: 5115182 - DNA, 25 bp, Homo sapien
ggccccgcgcaaggacagtgtagtt

SEQ ID NO: 5115183 - DNA, 25 bp, Homo sapien
caaggacagtgtagttctcggctgg

SEQ ID NO: 5115184 - DNA, 25 bp, Homo sapien
ccgcgcaaggacagtgtagttctcg

SEQ ID NO: 5115185 - DNA, 25 bp, Homo sapien
cttgcgaactgtactgtaagctcac

SEQ ID NO: 5115186 - DNA, 25 bp, Homo sapien
ggagagccctgactggcggttgtgg

SEQ ID NO: 5115187 - DNA, 25 bp, Homo sapien
tgactggcggttgtggcccagctta

SEQ ID NO: 5115188 - DNA, 25 bp, Homo sapien
ttggtgtctcgctctgggcggcaga

SEQ ID NO: 5115189 - DNA, 25 bp, Homo sapien
tggcccagcttaggcgcagtgccgc

SEQ ID NO: 5115190 - DNA, 25 bp, Homo sapien
tccagctcgcccggccatggcagat

SEQ ID NO: 5115191 - DNA, 25 bp, Homo sapien
tcctccagctcgcccggccatggca

SEQ ID NO: 5115192 - DNA, 25 bp, Homo sapien
ctccagctcgcccggccatggcaga

SEQ ID NO: 5115193 - DNA, 25 bp, Homo sapien
cagctcgcccggccatggcagatcc

SEQ ID NO: 5115194 - DNA, 25 bp, Homo sapien
gacagcggaggcaaaatcctgccgg

SEQ ID NO: 5115195 - DNA, 25 bp, Homo sapien
tcgtctatactttccagatgctggg

SEQ ID NO: 5115196 - DNA, 25 bp, Homo sapien
gctcgccctccgagtagcggtgctg

SEQ ID NO: 5115197 - DNA, 25 bp, Homo sapien
gcccgtagtgagagtcggagtccaa

SEQ ID NO: 5115198 - DNA, 25 bp, Homo sapien
gcgcgttttctccgtcaggcggcgt

SEQ ID NO: 5115199 - DNA, 25 bp, Homo sapien
cgcgcgttttctccgtcaggcggcg

SEQ ID NO: 5115200 - DNA, 25 bp, Homo sapien
gcagactgtttggagccgcatcaca

SEQ ID NO: 5115201 - DNA, 25 bp, Homo sapien
gagtcctgcaattcagtcaagctca

SEQ ID NO: 5115202 - DNA, 25 bp, Homo sapien
gatcgcgcggtgtacattatccaca

SEQ ID NO: 5115203 - DNA, 25 bp, Homo sapien
ggtcctctctcagcgtttctcacgg

SEQ ID NO: 5115204 - DNA, 25 bp, Homo sapien
taaccctgaagaataagaacccaga

SEQ ID NO: 5115205 - DNA, 25 bp, Homo sapien
tggttcagggactggttcttgagat

SEQ ID NO: 5115206 - DNA, 25 bp, Homo sapien
ctgaagaataagaacccagagcttc

SEQ ID NO: 5115207 - DNA, 25 bp, Homo sapien
ttcccaataaccctgaagaataaga

SEQ ID NO: 5115208 - DNA, 25 bp, Homo sapien
cccagaaccccgctgagctgttgtt

SEQ ID NO: 5115209 - DNA, 25 bp, Homo sapien
cagaaatttgtgttctactattgcc

SEQ ID NO: 5115210 - DNA, 25 bp, Homo sapien
tactattgccttgatatactatctg

SEQ ID NO: 5115211 - DNA, 25 bp, Homo sapien
tgttgccatacatgacaggtcaatg

SEQ ID NO: 5115212 - DNA, 25 bp, Homo sapien
tagaagtttgtatattatggcacat

SEQ ID NO: 5115213 - DNA, 25 bp, Homo sapien
gtagaagtttgtatattatggcaca

SEQ ID NO: 5115214 - DNA, 25 bp, Homo sapien
gaagtttgtatattatggcacatgt

SEQ ID NO: 5115215 - DNA, 25 bp, Homo sapien
agaagtttgtatattatggcacatg

SEQ ID NO: 5115216 - DNA, 25 bp, Homo sapien
gagatctctgttgggttcctttact

SEQ ID NO: 5115217 - DNA, 25 bp, Homo sapien
gattgcgtcaatatgccctcctcca

SEQ ID NO: 5115218 - DNA, 25 bp, Homo sapien
gcagtggagaacagaagagatctct

SEQ ID NO: 5115219 - DNA, 25 bp, Homo sapien
cgttctcacattaaacctagtctgg

SEQ ID NO: 5115220 - DNA, 25 bp, Homo sapien
gtggatatctgttactggcttgcat

SEQ ID NO: 5115221 - DNA, 25 bp, Homo sapien
gtgtggatatctgttactggcttgc

SEQ ID NO: 5115222 - DNA, 25 bp, Homo sapien
caagtgtggatatctgttactggct

SEQ ID NO: 5115223 - DNA, 25 bp, Homo sapien
cctcaagtgtggatatctgttactg

SEQ ID NO: 5115224 - DNA, 25 bp, Homo sapien
tgaaataaagaatcaggcgcaaatt

SEQ ID NO: 5115225 - DNA, 25 bp, Homo sapien
caggcgcaaattcttggtcttgtgt

SEQ ID NO: 5115226 - DNA, 25 bp, Homo sapien
gcaaaacttagttcactttgatgaa

SEQ ID NO: 5115227 - DNA, 25 bp, Homo sapien
tcagaggtgcaaaacttagttcact

SEQ ID NO: 5115228 - DNA, 25 bp, Homo sapien
cctataagcgggtgctgagatacac

SEQ ID NO: 5115229 - DNA, 25 bp, Homo sapien
tgagatacactaaagcgactgcttg

SEQ ID NO: 5115230 - DNA, 25 bp, Homo sapien
gcttcactaacttccgatggtcgag

SEQ ID NO: 5115231 - DNA, 25 bp, Homo sapien
aaagggcactgagacccaacagctg

SEQ ID NO: 5115232 - DNA, 25 bp, Homo sapien
gaacgagcagcatcaaaatggtcac

SEQ ID NO: 5115233 - DNA, 25 bp, Homo sapien
catcataacgatcacagtctttggg

SEQ ID NO: 5115234 - DNA, 25 bp, Homo sapien
caatactgcccatatgaacgagcag

SEQ ID NO: 5115235 - DNA, 25 bp, Homo sapien
tcagctaaattgttttcaggccact

SEQ ID NO: 5115236 - DNA, 25 bp, Homo sapien
tatttttatcaattgtgtcagatga

SEQ ID NO: 5115237 - DNA, 25 bp, Homo sapien
tttatttttatcaattgtgtcagat

SEQ ID NO: 5115238 - DNA, 25 bp, Homo sapien
atttttatcaattgtgtcagatgaa

SEQ ID NO: 5115239 - DNA, 25 bp, Homo sapien
tttttatcaattgtgtcagatgaat

SEQ ID NO: 5115240 - DNA, 25 bp, Homo sapien
tcaggagctataacattcctaatat

SEQ ID NO: 5115241 - DNA, 25 bp, Homo sapien
gattacacacgtttctgggtggtgc

SEQ ID NO: 5115242 - DNA, 25 bp, Homo sapien
tctagtctccgttagttcaaaacat

SEQ ID NO: 5115243 - DNA, 25 bp, Homo sapien
gaaaaacagtccttactgattacac

SEQ ID NO: 5115244 - DNA, 25 bp, Homo sapien
ggcaataactgcctcaaaggctata

SEQ ID NO: 5115245 - DNA, 25 bp, Homo sapien
tatgtcccctggagagtacatgtgc

SEQ ID NO: 5115246 - DNA, 25 bp, Homo sapien
tagaaggctcaatagaggcaataac

SEQ ID NO: 5115247 - DNA, 25 bp, Homo sapien
cagttgttctgatatctcatccaag

SEQ ID NO: 5115248 - DNA, 25 bp, Homo sapien
aacaccccaggagtagactgatagc

SEQ ID NO: 5115249 - DNA, 25 bp, Homo sapien
gaagctgctggttcaaacaccccag

SEQ ID NO: 5115250 - DNA, 25 bp, Homo sapien
gattttttggctctctctcggctgt

SEQ ID NO: 5115251 - DNA, 25 bp, Homo sapien
tatgcaacaatggttttgaagctgc

SEQ ID NO: 5115252 - DNA, 25 bp, Homo sapien
ctggaataacacaaagtggcttaat

SEQ ID NO: 5115253 - DNA, 25 bp, Homo sapien
ataacacaaagtggcttaatgaaca

SEQ ID NO: 5115254 - DNA, 25 bp, Homo sapien
gatgccagtataggaagctatcatt

SEQ ID NO: 5115255 - DNA, 25 bp, Homo sapien
gtaattttaaatttggatgccagta

SEQ ID NO: 5115256 - DNA, 25 bp, Homo sapien
gaaatggttcattgcctatatcaca

SEQ ID NO: 5115257 - DNA, 25 bp, Homo sapien
gccaagaccaacagcctggttgtaa

SEQ ID NO: 5115258 - DNA, 25 bp, Homo sapien
tgactgtgttttgccaagaccaaca

SEQ ID NO: 5115259 - DNA, 25 bp, Homo sapien
caacagcctggttgtaagatttttc

SEQ ID NO: 5115260 - DNA, 25 bp, Homo sapien
accaaagattctgaagttaatactt

SEQ ID NO: 5115261 - DNA, 25 bp, Homo sapien
tactttcacatgataaataacatct

SEQ ID NO: 5115262 - DNA, 25 bp, Homo sapien
taaagtttgagtaatctgcaacttc

SEQ ID NO: 5115263 - DNA, 25 bp, Homo sapien
gtttgagtaatctgcaacttcttca

SEQ ID NO: 5115264 - DNA, 25 bp, Homo sapien
tgcaggtggacctttaatggcattt

SEQ ID NO: 5115265 - DNA, 25 bp, Homo sapien
ctgcaggtggacctttaatggcatt

SEQ ID NO: 5115266 - DNA, 25 bp, Homo sapien
gctgcaggtggacctttaatggcat

SEQ ID NO: 5115267 - DNA, 25 bp, Homo sapien
gccaccaagtttgctgaaaagctgc

SEQ ID NO: 5115268 - DNA, 25 bp, Homo sapien
tttgcatcacatgccaccaagtttg

SEQ ID NO: 5115269 - DNA, 25 bp, Homo sapien
ttgtgactttgcatcacatgccacc

SEQ ID NO: 5115270 - DNA, 25 bp, Homo sapien
caccaagtttgctgaaaagctgctt

SEQ ID NO: 5115271 - DNA, 25 bp, Homo sapien
taatgacgtcagactcaaccttccc

SEQ ID NO: 5115272 - DNA, 25 bp, Homo sapien
tttcactgcatacaacagcattttc

SEQ ID NO: 5115273 - DNA, 25 bp, Homo sapien
tttcatttaggccatccagagtaat

SEQ ID NO: 5115274 - DNA, 25 bp, Homo sapien
gcaactctttcactgcatacaacag

SEQ ID NO: 5115275 - DNA, 25 bp, Homo sapien
taatgcccagattagaatgacccac

SEQ ID NO: 5115276 - DNA, 25 bp, Homo sapien
gaaaaagactcattaatgcccagat

SEQ ID NO: 5115277 - DNA, 25 bp, Homo sapien
cttatgtggaacaaatgaaggcaat

SEQ ID NO: 5115278 - DNA, 25 bp, Homo sapien
aatgaaaaagactcattaatgccca

SEQ ID NO: 5115279 - DNA, 25 bp, Homo sapien
agtgtcaggagacatcctcaacatt

SEQ ID NO: 5115280 - DNA, 25 bp, Homo sapien
agtgatattccgactctcttgttgg

SEQ ID NO: 5115281 - DNA, 25 bp, Homo sapien
catcctcaacattctgagatctgaa

SEQ ID NO: 5115282 - DNA, 25 bp, Homo sapien
taaatgtttaggagcctttggcaca

SEQ ID NO: 5115283 - DNA, 25 bp, Homo sapien
gatgactgtctgataacacctgtgg

SEQ ID NO: 5115284 - DNA, 25 bp, Homo sapien
gacagtcttctggtcagtcagtcca

SEQ ID NO: 5115285 - DNA, 25 bp, Homo sapien
ttacagccaactgagacaggtcctc

SEQ ID NO: 5115286 - DNA, 25 bp, Homo sapien
cctcttcgggtagatggctgtccag

SEQ ID NO: 5115287 - DNA, 25 bp, Homo sapien
tatttagaggactgtctagcagagc

SEQ ID NO: 5115288 - DNA, 25 bp, Homo sapien
cagagcctgccggtagaaagtaatg

SEQ ID NO: 5115289 - DNA, 25 bp, Homo sapien
caatcgtctggtcaactggtccagg

SEQ ID NO: 5115290 - DNA, 25 bp, Homo sapien
taaaggtcctgctggtatgtcagtc

SEQ ID NO: 5115291 - DNA, 25 bp, Homo sapien
tctgctctgctggtatagaaacagg

SEQ ID NO: 5115292 - DNA, 25 bp, Homo sapien
caaacctgcttcagtaaaatgcggc

SEQ ID NO: 5115293 - DNA, 25 bp, Homo sapien
tctcgctggtaggaaacaatgggct

SEQ ID NO: 5115294 - DNA, 25 bp, Homo sapien
tattcacatcagttagttcagggac

SEQ ID NO: 5115295 - DNA, 25 bp, Homo sapien
caaattcgtctgtgtgccaatatcc

SEQ ID NO: 5115296 - DNA, 25 bp, Homo sapien
tcaccattagatacacccgtggaag

SEQ ID NO: 5115297 - DNA, 25 bp, Homo sapien
tctgcctccatcaaaagtgtccgaa

SEQ ID NO: 5115298 - DNA, 25 bp, Homo sapien
ctaatatctctgaaacgggcaaggg

SEQ ID NO: 5115299 - DNA, 25 bp, Homo sapien
cagtgaggattcacattgcagaagg

SEQ ID NO: 5115300 - DNA, 25 bp, Homo sapien
aatggttccactacacccttcaggt

SEQ ID NO: 5115301 - DNA, 25 bp, Homo sapien
ggttcagacctcattacagatttgg

SEQ ID NO: 5115302 - DNA, 25 bp, Homo sapien
ggtaaattactgtcccacgagcagg

SEQ ID NO: 5115303 - DNA, 25 bp, Homo sapien
tccacaatcatgtgctaaattgaac

SEQ ID NO: 5115304 - DNA, 25 bp, Homo sapien
caatcatgtgctaaattgaacttca

SEQ ID NO: 5115305 - DNA, 25 bp, Homo sapien
ggagtatccacaatcatgtgctaaa

SEQ ID NO: 5115306 - DNA, 25 bp, Homo sapien
aatggagtatccacaatcatgtgct

SEQ ID NO: 5115307 - DNA, 25 bp, Homo sapien
catgaccaaataactctgccttgat

SEQ ID NO: 5115308 - DNA, 25 bp, Homo sapien
ttccatgaccaaataactctgcctt

SEQ ID NO: 5115309 - DNA, 25 bp, Homo sapien
tccatgaccaaataactctgccttg

SEQ ID NO: 5115310 - DNA, 25 bp, Homo sapien
atgaccaaataactctgccttgatc

SEQ ID NO: 5115311 - DNA, 25 bp, Homo sapien
aaatgagaataggaatcttggcagc

SEQ ID NO: 5115312 - DNA, 25 bp, Homo sapien
tcttggcagcagttcatggtttttg

SEQ ID NO: 5115313 - DNA, 25 bp, Homo sapien
taggaatcttggcagcagttcatgg

SEQ ID NO: 5115314 - DNA, 25 bp, Homo sapien
gagaataggaatcttggcagcagtt

SEQ ID NO: 5115315 - DNA, 25 bp, Homo sapien
gaggatggcgcatatcaggcattca

SEQ ID NO: 5115316 - DNA, 25 bp, Homo sapien
gaaacaatccccaattacagtgatg

SEQ ID NO: 5115317 - DNA, 25 bp, Homo sapien
tgtatgtgacaagggacaactcttc

SEQ ID NO: 5115318 - DNA, 25 bp, Homo sapien
ggaggcatttactacccgtcaagaa

SEQ ID NO: 5115319 - DNA, 25 bp, Homo sapien
gaaacctttgcctaacccaacatca

SEQ ID NO: 5115320 - DNA, 25 bp, Homo sapien
tccactgtgtagcttgacttttcac

SEQ ID NO: 5115321 - DNA, 25 bp, Homo sapien
atttatgagacacctagtgaagtct

SEQ ID NO: 5115322 - DNA, 25 bp, Homo sapien
ggttaacttgcattaccaaacaggc

SEQ ID NO: 5115323 - DNA, 25 bp, Homo sapien
cattacttgatagcttgagtcaccc

SEQ ID NO: 5115324 - DNA, 25 bp, Homo sapien
gacactgatttgacacttcgaccct

SEQ ID NO: 5115325 - DNA, 25 bp, Homo sapien
gctaggtcaggtacttttcttggaa

SEQ ID NO: 5115326 - DNA, 25 bp, Homo sapien
tgagtcacccatataaacatctaag

SEQ ID NO: 5115327 - DNA, 25 bp, Homo sapien
tctgttaagactttggtaaccacaa

SEQ ID NO: 5115328 - DNA, 25 bp, Homo sapien
tacctatagaagatacacgaaagaa

SEQ ID NO: 5115329 - DNA, 25 bp, Homo sapien
aaattgctttcgctgtagctataag

SEQ ID NO: 5115330 - DNA, 25 bp, Homo sapien
gacacacaggctaaaagtgaaggaa

SEQ ID NO: 5115331 - DNA, 25 bp, Homo sapien
acaaacatcgttggaggactcactc

SEQ ID NO: 5115332 - DNA, 25 bp, Homo sapien
caagcagatcataaacccagaacag

SEQ ID NO: 5115333 - DNA, 25 bp, Homo sapien
ggactcactctttccgatgtcaaaa

SEQ ID NO: 5115334 - DNA, 25 bp, Homo sapien
gcaaagaggtcatgaaaattcaaca

SEQ ID NO: 5115335 - DNA, 25 bp, Homo sapien
ggagttgttctggtctaaggatgca

SEQ ID NO: 5115336 - DNA, 25 bp, Homo sapien
cagaagttagagtccggaaacatcc

SEQ ID NO: 5115337 - DNA, 25 bp, Homo sapien
gaaaggttgacatgcttggctctgc

SEQ ID NO: 5115338 - DNA, 25 bp, Homo sapien
catgatgatgggttctgccgtcctc

SEQ ID NO: 5115339 - DNA, 25 bp, Homo sapien
gccaagggtccatcttttcatcgaa

SEQ ID NO: 5115340 - DNA, 25 bp, Homo sapien
gaatggcattcgaagacctttgctg

SEQ ID NO: 5115341 - DNA, 25 bp, Homo sapien
ggttctactaattctgacagccaag

SEQ ID NO: 5115342 - DNA, 25 bp, Homo sapien
tttaggtggcacaaaagcaggttct

SEQ ID NO: 5115343 - DNA, 25 bp, Homo sapien
aatttgccctggtactgggctcaga

SEQ ID NO: 5115344 - DNA, 25 bp, Homo sapien
gatctgtttactcctagggtggaac

SEQ ID NO: 5115345 - DNA, 25 bp, Homo sapien
ggtggaacttggtctgcccatgcta

SEQ ID NO: 5115346 - DNA, 25 bp, Homo sapien
aaaagaacgctcaaaatcaacaggt

SEQ ID NO: 5115347 - DNA, 25 bp, Homo sapien
caagagaaatgggagacggaaggtc

SEQ ID NO: 5115348 - DNA, 25 bp, Homo sapien
gaaggtctgaagctatagaatcctg

SEQ ID NO: 5115349 - DNA, 25 bp, Homo sapien
tctcatttgatgatctacatatggg

SEQ ID NO: 5115350 - DNA, 25 bp, Homo sapien
tacacctggcgctttgctttggcat

SEQ ID NO: 5115351 - DNA, 25 bp, Homo sapien
cttgggacaaagagttatatgaaca

SEQ ID NO: 5115352 - DNA, 25 bp, Homo sapien
agtgcttttctatttgaaggaggag

SEQ ID NO: 5115353 - DNA, 25 bp, Homo sapien
tattcttttccactacacaatcctg

SEQ ID NO: 5115354 - DNA, 25 bp, Homo sapien
atatgaacacaagaaagtgcttttc

SEQ ID NO: 5115355 - DNA, 25 bp, Homo sapien
tattcatcctcgctttagaagcagc

SEQ ID NO: 5115356 - DNA, 25 bp, Homo sapien
aagattcttgatcctgtgctacagg

SEQ ID NO: 5115357 - DNA, 25 bp, Homo sapien
gaaggctgtacgacttggaaatcca

SEQ ID NO: 5115358 - DNA, 25 bp, Homo sapien
ggttccagtgatctcgaagatacag

SEQ ID NO: 5115359 - DNA, 25 bp, Homo sapien
ggaatgtccttcgaaatctgaaatg

SEQ ID NO: 5115360 - DNA, 25 bp, Homo sapien
gatctgcaaatactggggtcccctc

SEQ ID NO: 5115361 - DNA, 25 bp, Homo sapien
tactatctggctattctgagaaggt

SEQ ID NO: 5115362 - DNA, 25 bp, Homo sapien
aatgttcacttgtatttgcctggag

SEQ ID NO: 5115363 - DNA, 25 bp, Homo sapien
cagcttgcttgttatcacaatgaga

SEQ ID NO: 5115364 - DNA, 25 bp, Homo sapien
atccagcttgcttgttatcacaatg

SEQ ID NO: 5115365 - DNA, 25 bp, Homo sapien
gcttgcttgttatcacaatgagact

SEQ ID NO: 5115366 - DNA, 25 bp, Homo sapien
tgcttgttatcacaatgagactcac

SEQ ID NO: 5115367 - DNA, 25 bp, Homo sapien
tagggttcaaattctaggacagagt

SEQ ID NO: 5115368 - DNA, 25 bp, Homo sapien
gacagagtactgtgtagaggaacaa

SEQ ID NO: 5115369 - DNA, 25 bp, Homo sapien
cctgcttcataggatcatgatgaga

SEQ ID NO: 5115370 - DNA, 25 bp, Homo sapien
taagggacttttcagcattccaacc

SEQ ID NO: 5115371 - DNA, 25 bp, Homo sapien
tccaaataatggaatgctgaccaat

SEQ ID NO: 5115372 - DNA, 25 bp, Homo sapien
caagttgaatggatctccaggtgag

SEQ ID NO: 5115373 - DNA, 25 bp, Homo sapien
taataagcattggaaacaatgtcct

SEQ ID NO: 5115374 - DNA, 25 bp, Homo sapien
caaagtttacatgttatgttccatc

SEQ ID NO: 5115375 - DNA, 25 bp, Homo sapien
gaacgaccacgcaaaaactccatct

SEQ ID NO: 5115376 - DNA, 25 bp, Homo sapien
agaacgaccacgcaaaaactccatc

SEQ ID NO: 5115377 - DNA, 25 bp, Homo sapien
tcaacaaaaagaacgaccacgcaaa

SEQ ID NO: 5115378 - DNA, 25 bp, Homo sapien
acatcaacaaaaagaacgaccacgc

SEQ ID NO: 5115379 - DNA, 25 bp, Homo sapien
tttgcgtagcttctggttaccaggc

SEQ ID NO: 5115380 - DNA, 25 bp, Homo sapien
aaacttgacaggagctttgcgtagc

SEQ ID NO: 5115381 - DNA, 25 bp, Homo sapien
aatttcatgtccacgatcttcagca

SEQ ID NO: 5115382 - DNA, 25 bp, Homo sapien
tgtgccgcgagaaaaagtaacctgt

SEQ ID NO: 5115383 - DNA, 25 bp, Homo sapien
acactctaggatagctattgaccca

SEQ ID NO: 5115384 - DNA, 25 bp, Homo sapien
tattgacccattagcctgagtctca

SEQ ID NO: 5115385 - DNA, 25 bp, Homo sapien
tatctggaacagacccaaaccattt

SEQ ID NO: 5115386 - DNA, 25 bp, Homo sapien
gacccataagcctgtgagtaagaaa

SEQ ID NO: 5115387 - DNA, 25 bp, Homo sapien
tacacagttcaaaagaacagttcca

SEQ ID NO: 5115388 - DNA, 25 bp, Homo sapien
gaactttgtgcagaattactttaga

SEQ ID NO: 5115389 - DNA, 25 bp, Homo sapien
gattgttaacacaaagaatggataa

SEQ ID NO: 5115390 - DNA, 25 bp, Homo sapien
gtctactatatacccagacaaatta

SEQ ID NO: 5115391 - DNA, 25 bp, Homo sapien
tttggaatccggagatggaggaatt

SEQ ID NO: 5115392 - DNA, 25 bp, Homo sapien
tacatcttggtactaccagaaggct

SEQ ID NO: 5115393 - DNA, 25 bp, Homo sapien
tgaatgggagctttcaacggtggta

SEQ ID NO: 5115394 - DNA, 25 bp, Homo sapien
aattgtggaacataatacatcttgg

SEQ ID NO: 5115395 - DNA, 25 bp, Homo sapien
ggcttgtacattcgccacgtagttc

SEQ ID NO: 5115396 - DNA, 25 bp, Homo sapien
ttgtacattcgccacgtagttctct

SEQ ID NO: 5115397 - DNA, 25 bp, Homo sapien
gtacattcgccacgtagttctcttg

SEQ ID NO: 5115398 - DNA, 25 bp, Homo sapien
ctgaggcttgtacattcgccacgta

SEQ ID NO: 5115399 - DNA, 25 bp, Homo sapien
ttaatgttaacagtggctgagaggt

SEQ ID NO: 5115400 - DNA, 25 bp, Homo sapien
cctcttactgtagattccttcttta

SEQ ID NO: 5115401 - DNA, 25 bp, Homo sapien
gcaaggatgccttagtcactaccct

SEQ ID NO: 5115402 - DNA, 25 bp, Homo sapien
tctcttgtgcctagcacctgagctg

SEQ ID NO: 5115403 - DNA, 25 bp, Homo sapien
ttaggcttatctgtttcaaccaaac

SEQ ID NO: 5115404 - DNA, 25 bp, Homo sapien
caaactgccactagcatatggatag

SEQ ID NO: 5115405 - DNA, 25 bp, Homo sapien
tctgacactgggatcttaggcttat

SEQ ID NO: 5115406 - DNA, 25 bp, Homo sapien
gcatatggatagtggaaaacacgta

SEQ ID NO: 5115407 - DNA, 25 bp, Homo sapien
ctttagccatttattctaggatcaa

SEQ ID NO: 5115408 - DNA, 25 bp, Homo sapien
caaatagtttcacgaggcttacaag

SEQ ID NO: 5115409 - DNA, 25 bp, Homo sapien
tctaaaggctaccattttcaacttc

SEQ ID NO: 5115410 - DNA, 25 bp, Homo sapien
gcttttctttagtcagtatttgcca

SEQ ID NO: 5115411 - DNA, 25 bp, Homo sapien
aggttctcatccccagtgattagca

SEQ ID NO: 5115412 - DNA, 25 bp, Homo sapien
ttgtactgtgaatctcttgctgttt

SEQ ID NO: 5115413 - DNA, 25 bp, Homo sapien
tgtactgtgaatctcttgctgtttt

SEQ ID NO: 5115414 - DNA, 25 bp, Homo sapien
ttctcatccccagtgattagcactt

SEQ ID NO: 5115415 - DNA, 25 bp, Homo sapien
tcctacttgagctgagtgctctgca

SEQ ID NO: 5115416 - DNA, 25 bp, Homo sapien
atttctgggtctcctacttgagctg

SEQ ID NO: 5115417 - DNA, 25 bp, Homo sapien
cgggaactgtcttcttcctatggat

SEQ ID NO: 5115418 - DNA, 25 bp, Homo sapien
aactgtcttcttcctatggatctcc

SEQ ID NO: 5115419 - DNA, 25 bp, Homo sapien
tcattacttgtattattcccaggtg

SEQ ID NO: 5115420 - DNA, 25 bp, Homo sapien
catataggcttatgcatgcatgcac

SEQ ID NO: 5115421 - DNA, 25 bp, Homo sapien
tctccacgatctgtcataagctaat

SEQ ID NO: 5115422 - DNA, 25 bp, Homo sapien
taattatgtgtgttcaagctcccca

SEQ ID NO: 5115423 - DNA, 25 bp, Homo sapien
tatcttgatcacttggtaggtgtac

SEQ ID NO: 5115424 - DNA, 25 bp, Homo sapien
ggatgatgctgaaagaaatctttcc

SEQ ID NO: 5115425 - DNA, 25 bp, Homo sapien
taaaactttgctgacctgaagacag

SEQ ID NO: 5115426 - DNA, 25 bp, Homo sapien
catgtgttctctatgtttgtctgga

SEQ ID NO: 5115427 - DNA, 25 bp, Homo sapien
caaacgatcaagtcggtccaccaag

SEQ ID NO: 5115428 - DNA, 25 bp, Homo sapien
tgagggccgacaatccgaagaagtg

SEQ ID NO: 5115429 - DNA, 25 bp, Homo sapien
caaaagcttgaatcagccgggcagt

SEQ ID NO: 5115430 - DNA, 25 bp, Homo sapien
gattagacctcccagctcgatgatg

SEQ ID NO: 5115431 - DNA, 25 bp, Homo sapien
tgtctccttctggtgtgctcagaag

SEQ ID NO: 5115432 - DNA, 25 bp, Homo sapien
ctccttctggtgtgctcagaagtca

SEQ ID NO: 5115433 - DNA, 25 bp, Homo sapien
tctccttctggtgtgctcagaagtc

SEQ ID NO: 5115434 - DNA, 25 bp, Homo sapien
tgtgtctccttctggtgtgctcaga

SEQ ID NO: 5115435 - DNA, 25 bp, Homo sapien
gccagatggaatctgtagccatgta

SEQ ID NO: 5115436 - DNA, 25 bp, Homo sapien
tgccagatggaatctgtagccatgt

SEQ ID NO: 5115437 - DNA, 25 bp, Homo sapien
attgccagatggaatctgtagccat

SEQ ID NO: 5115438 - DNA, 25 bp, Homo sapien
ccagatggaatctgtagccatgtac

SEQ ID NO: 5115439 - DNA, 25 bp, Homo sapien
cctgtgtgcaaagcttaactaaaaa

SEQ ID NO: 5115440 - DNA, 25 bp, Homo sapien
cacctgtgtgcaaagcttaactaaa

SEQ ID NO: 5115441 - DNA, 25 bp, Homo sapien
tgcaaagcttaactaaaaagtccat

SEQ ID NO: 5115442 - DNA, 25 bp, Homo sapien
ttttcacctgtgtgcaaagcttaac

SEQ ID NO: 5115443 - DNA, 25 bp, Homo sapien
gatactctttgttgcactgtggtgc

SEQ ID NO: 5115444 - DNA, 25 bp, Homo sapien
taatggccttataggaggatactct

SEQ ID NO: 5115445 - DNA, 25 bp, Homo sapien
aatttgtagctcttttctagcgacc

SEQ ID NO: 5115446 - DNA, 25 bp, Homo sapien
taaactaaggaatgtgataatggcc

SEQ ID NO: 5115447 - DNA, 25 bp, Homo sapien
ccagaaaccatggaagacaataggc

SEQ ID NO: 5115448 - DNA, 25 bp, Homo sapien
tgctaatttctcaccagaaaccatg

SEQ ID NO: 5115449 - DNA, 25 bp, Homo sapien
agtgtaagacaagaaatctacctcc

SEQ ID NO: 5115450 - DNA, 25 bp, Homo sapien
tggaagacaataggcagtgaaatga

SEQ ID NO: 5115451 - DNA, 25 bp, Homo sapien
cccattcatgggttagaggagagaa

SEQ ID NO: 5115452 - DNA, 25 bp, Homo sapien
cacagtagacttactaggcaaaagc

SEQ ID NO: 5115453 - DNA, 25 bp, Homo sapien
tgtcccttaggaagaacacacagta

SEQ ID NO: 5115454 - DNA, 25 bp, Homo sapien
cagtaactacaaaccctagagaagg

SEQ ID NO: 5115455 - DNA, 25 bp, Homo sapien
tgaaatttagttgaacacaccttta

SEQ ID NO: 5115456 - DNA, 25 bp, Homo sapien
actaacacttgagtaaagtgactca

SEQ ID NO: 5115457 - DNA, 25 bp, Homo sapien
aactgtactggatgaagtaaaatca

SEQ ID NO: 5115458 - DNA, 25 bp, Homo sapien
caaaaggctaaaaggatgggcaaag

SEQ ID NO: 5115459 - DNA, 25 bp, Homo sapien
caagcaggtaaataggaagtcaaac

SEQ ID NO: 5115460 - DNA, 25 bp, Homo sapien
cagccgaagcatgactaagcaaaaa

SEQ ID NO: 5115461 - DNA, 25 bp, Homo sapien
aaaaagttcctagatctgacacatg

SEQ ID NO: 5115462 - DNA, 25 bp, Homo sapien
aaaaataaagagcacccaagcaggt

SEQ ID NO: 5115463 - DNA, 25 bp, Homo sapien
ggtttcacataatgatttaaggagg

SEQ ID NO: 5115464 - DNA, 25 bp, Homo sapien
cagaagacaaccagacaccaagaaa

SEQ ID NO: 5115465 - DNA, 25 bp, Homo sapien
cacagaaagagcgagtcaacagttt

SEQ ID NO: 5115466 - DNA, 25 bp, Homo sapien
taatcagaagaagaatagagacaca

SEQ ID NO: 5115467 - DNA, 25 bp, Homo sapien
tggatgctgtgttttgacaatgaag

SEQ ID NO: 5115468 - DNA, 25 bp, Homo sapien
tgcattacagttacagaatatgggc

SEQ ID NO: 5115469 - DNA, 25 bp, Homo sapien
cagtggtctccaaatatgtttacaa

SEQ ID NO: 5115470 - DNA, 25 bp, Homo sapien
cacaaaggtaattctcaaagtaaga

SEQ ID NO: 5115471 - DNA, 25 bp, Homo sapien
gagagtcccacgcatctctaatgat

SEQ ID NO: 5115472 - DNA, 25 bp, Homo sapien
cactgagtcctctgcaatggagctg

SEQ ID NO: 5115473 - DNA, 25 bp, Homo sapien
taaatggcattatcagccaccatgg

SEQ ID NO: 5115474 - DNA, 25 bp, Homo sapien
ttccttagtccgtgggagagtccca

SEQ ID NO: 5115475 - DNA, 25 bp, Homo sapien
agataccaacaaacttatacccagg

SEQ ID NO: 5115476 - DNA, 25 bp, Homo sapien
gataccaacaaacttatacccagga

SEQ ID NO: 5115477 - DNA, 25 bp, Homo sapien
acagcccatgtggaacggttcatgg

SEQ ID NO: 5115478 - DNA, 25 bp, Homo sapien
aaggagagtagataccacagcccat

SEQ ID NO: 5115479 - DNA, 25 bp, Homo sapien
caacaagcttagctgagagggacat

SEQ ID NO: 5115480 - DNA, 25 bp, Homo sapien
cacaacaagcttagctgagagggac

SEQ ID NO: 5115481 - DNA, 25 bp, Homo sapien
gaagcacaacaagcttagctgagag

SEQ ID NO: 5115482 - DNA, 25 bp, Homo sapien
ctgaagcacaacaagcttagctgag

SEQ ID NO: 5115483 - DNA, 25 bp, Homo sapien
agtagagtttgagctcaggaaacta

SEQ ID NO: 5115484 - DNA, 25 bp, Homo sapien
cagaagaggaaatagagtcagaaga

SEQ ID NO: 5115485 - DNA, 25 bp, Homo sapien
gcagaagaggaaatagagtcagaag

SEQ ID NO: 5115486 - DNA, 25 bp, Homo sapien
tagagtttgagctcaggaaactact

SEQ ID NO: 5115487 - DNA, 25 bp, Homo sapien
ctgcttgtatgcccttgtttaacat

SEQ ID NO: 5115488 - DNA, 25 bp, Homo sapien
tatcccaacatctcgagtgtgtttt

SEQ ID NO: 5115489 - DNA, 25 bp, Homo sapien
aagttatcccaacatctcgagtgtg

SEQ ID NO: 5115490 - DNA, 25 bp, Homo sapien
gttatcccaacatctcgagtgtgtt

SEQ ID NO: 5115491 - DNA, 25 bp, Homo sapien
tcccaacatctcgagtgtgtttttt

SEQ ID NO: 5115492 - DNA, 25 bp, Homo sapien
ttctgtcctcaggataaccggtaaa

SEQ ID NO: 5115493 - DNA, 25 bp, Homo sapien
tctgtcctcaggataaccggtaaag

SEQ ID NO: 5115494 - DNA, 25 bp, Homo sapien
agtttctctactacaagatctggaa

SEQ ID NO: 5115495 - DNA, 25 bp, Homo sapien
gaaattcactagtttctctactaca

SEQ ID NO: 5115496 - DNA, 25 bp, Homo sapien
tctctactacaagatctggaatgag

SEQ ID NO: 5115497 - DNA, 25 bp, Homo sapien
tcactagtttctctactacaagatc

SEQ ID NO: 5115498 - DNA, 25 bp, Homo sapien
agggttgctctcacaaatggcctca

SEQ ID NO: 5115499 - DNA, 25 bp, Homo sapien
ccacaagtgttaggcacgttttcct

SEQ ID NO: 5115500 - DNA, 25 bp, Homo sapien
tggttattggttcaaaccaggagat

SEQ ID NO: 5115501 - DNA, 25 bp, Homo sapien
tccagggtctggtcttggttattgg

SEQ ID NO: 5115502 - DNA, 25 bp, Homo sapien
tgttgaatagtgcatcccgctcggt

SEQ ID NO: 5115503 - DNA, 25 bp, Homo sapien
cctgccgttccctgtcaatgttgaa

SEQ ID NO: 5115504 - DNA, 25 bp, Homo sapien
gctttatccgctccccagagcggga

SEQ ID NO: 5115505 - DNA, 25 bp, Homo sapien
tggactattaacttcaggcgcttta

SEQ ID NO: 5115506 - DNA, 25 bp, Homo sapien
tcatttccttcttgctgataggctt

SEQ ID NO: 5115507 - DNA, 25 bp, Homo sapien
aggcttgttcttctggatagccagg

SEQ ID NO: 5115508 - DNA, 25 bp, Homo sapien
tgataggcttgttcttctggatagc

SEQ ID NO: 5115509 - DNA, 25 bp, Homo sapien
cgtttggacctctgaatcatttcct

SEQ ID NO: 5115510 - DNA, 25 bp, Homo sapien
taaagaggagcctaagacatgcaaa

SEQ ID NO: 5115511 - DNA, 25 bp, Homo sapien
tgagtcattcataccatgatgtgct

SEQ ID NO: 5115512 - DNA, 25 bp, Homo sapien
ttctgggtgcaagccagagctcccg

SEQ ID NO: 5115513 - DNA, 25 bp, Homo sapien
ccacttggtggcctggtttacactt

SEQ ID NO: 5115514 - DNA, 25 bp, Homo sapien
ttctcaccctatgggatcaattcct

SEQ ID NO: 5115515 - DNA, 25 bp, Homo sapien
tcaccctatgggatcaattcctaga

SEQ ID NO: 5115516 - DNA, 25 bp, Homo sapien
tgttctttctcaccctatgggatca

SEQ ID NO: 5115517 - DNA, 25 bp, Homo sapien
acactgttctttctcaccctatggg

SEQ ID NO: 5115518 - DNA, 25 bp, Homo sapien
gaagcattatgccaactaagaaact

SEQ ID NO: 5115519 - DNA, 25 bp, Homo sapien
cgttcatcatggcacaaaattcaaa

SEQ ID NO: 5115520 - DNA, 25 bp, Homo sapien
ccaaaggcaatcagtattaccagtt

SEQ ID NO: 5115521 - DNA, 25 bp, Homo sapien
ggaaacagtgttcacatgcttcgaa

SEQ ID NO: 5115522 - DNA, 25 bp, Homo sapien
cagtctatctttcattatttgaatg

SEQ ID NO: 5115523 - DNA, 25 bp, Homo sapien
catgtcataaacttttcctattctg

SEQ ID NO: 5115524 - DNA, 25 bp, Homo sapien
ccatcagtctatctttcattatttg

SEQ ID NO: 5115525 - DNA, 25 bp, Homo sapien
aaattagttgcaaggtggaatctga

SEQ ID NO: 5115526 - DNA, 25 bp, Homo sapien
ggtgaaggtgtctcctgaaggccac

SEQ ID NO: 5115527 - DNA, 25 bp, Homo sapien
tcactagattcatggagggctctgc

SEQ ID NO: 5115528 - DNA, 25 bp, Homo sapien
ggctccagagacacaaatccttaat

SEQ ID NO: 5115529 - DNA, 25 bp, Homo sapien
agggctctgcgggaaacacattaga

SEQ ID NO: 5115530 - DNA, 25 bp, Homo sapien
gctgggctcgcagccggtatgactt

SEQ ID NO: 5115531 - DNA, 25 bp, Homo sapien
gcagccggtatgacttatattctga

SEQ ID NO: 5115532 - DNA, 25 bp, Homo sapien
ctttttatatagctgggctcgcagc

SEQ ID NO: 5115533 - DNA, 25 bp, Homo sapien
tatatagctgggctcgcagccggta

SEQ ID NO: 5115534 - DNA, 25 bp, Homo sapien
tatggcccttcaggcataggagccg

SEQ ID NO: 5115535 - DNA, 25 bp, Homo sapien
gctgactctactgggacaatgggca

SEQ ID NO: 5115536 - DNA, 25 bp, Homo sapien
cctgggactctggaatggaaacctg

SEQ ID NO: 5115537 - DNA, 25 bp, Homo sapien
gcaaacgaatgcatggaaagggcct

SEQ ID NO: 5115538 - DNA, 25 bp, Homo sapien
tccccagaagttgattggtcactct

SEQ ID NO: 5115539 - DNA, 25 bp, Homo sapien
gcttctctaggttcataaaatagaa

SEQ ID NO: 5115540 - DNA, 25 bp, Homo sapien
cttctctaggttcataaaatagaat

SEQ ID NO: 5115541 - DNA, 25 bp, Homo sapien
tgcttctctaggttcataaaataga

SEQ ID NO: 5115542 - DNA, 25 bp, Homo sapien
ataagctttattcaaccagactcac

SEQ ID NO: 5115543 - DNA, 25 bp, Homo sapien
gacaaagaataagctttattcaacc

SEQ ID NO: 5115544 - DNA, 25 bp, Homo sapien
gaataagctttattcaaccagactc

SEQ ID NO: 5115545 - DNA, 25 bp, Homo sapien
aagaataagctttattcaaccagac

SEQ ID NO: 5115546 - DNA, 25 bp, Homo sapien
gatcatatcattgtaacacacaggc

SEQ ID NO: 5115547 - DNA, 25 bp, Homo sapien
catacaaaaagggacttattcttga

SEQ ID NO: 5115548 - DNA, 25 bp, Homo sapien
cacacaggccattggacaaggccac

SEQ ID NO: 5115549 - DNA, 25 bp, Homo sapien
tatgcagaaagtattgctcccaaac

SEQ ID NO: 5115550 - DNA, 25 bp, Homo sapien
caaaagtgcttcattaccttgccca

SEQ ID NO: 5115551 - DNA, 25 bp, Homo sapien
gaaagctctgaaccgtgcttgaggg

SEQ ID NO: 5115552 - DNA, 25 bp, Homo sapien
tacaggtaaattggccaaaagtgct

SEQ ID NO: 5115553 - DNA, 25 bp, Homo sapien
ttctcggtggatgactggcccttgc

SEQ ID NO: 5115554 - DNA, 25 bp, Homo sapien
caactctgctcgtggtggaaaagaa

SEQ ID NO: 5115555 - DNA, 25 bp, Homo sapien
tggaaaagaaatctaccatcacggg

SEQ ID NO: 5115556 - DNA, 25 bp, Homo sapien
tggtcagacatgcagaccttaatgg

SEQ ID NO: 5115557 - DNA, 25 bp, Homo sapien
aagaaatctaccatcacgggcaaag

SEQ ID NO: 5115558 - DNA, 25 bp, Homo sapien
gactgagccctgactcgatctctct

SEQ ID NO: 5115559 - DNA, 25 bp, Homo sapien
tcttataggcttgctcacaggcgaa

SEQ ID NO: 5115560 - DNA, 25 bp, Homo sapien
cacaggcgaagcagcagtctgagga

SEQ ID NO: 5115561 - DNA, 25 bp, Homo sapien
ccagatgggactatggactgagccc

SEQ ID NO: 5115562 - DNA, 25 bp, Homo sapien
catcagggatcaaaggaatatgtga

SEQ ID NO: 5115563 - DNA, 25 bp, Homo sapien
gatggcatcagggatcaaaggaata

SEQ ID NO: 5115564 - DNA, 25 bp, Homo sapien
gtgatgagatggcatcagggatcaa

SEQ ID NO: 5115565 - DNA, 25 bp, Homo sapien
gagatggcatcagggatcaaaggaa

SEQ ID NO: 5115566 - DNA, 25 bp, Homo sapien
tccttgaggttcctggacttagtgt

SEQ ID NO: 5115567 - DNA, 25 bp, Homo sapien
gaggttcctggacttagtgtagcaa

SEQ ID NO: 5115568 - DNA, 25 bp, Homo sapien
aggttcctggacttagtgtagcaat

SEQ ID NO: 5115569 - DNA, 25 bp, Homo sapien
ggttcctggacttagtgtagcaatg

SEQ ID NO: 5115570 - DNA, 25 bp, Homo sapien
tagatgctggctttcaccacttgac

SEQ ID NO: 5115571 - DNA, 25 bp, Homo sapien
gaacttgcctattctgacaatttca

SEQ ID NO: 5115572 - DNA, 25 bp, Homo sapien
tacattctgtctctacgaacttgcc

SEQ ID NO: 5115573 - DNA, 25 bp, Homo sapien
tgcgtacatgcagggaaagtcagcc

SEQ ID NO: 5115574 - DNA, 25 bp, Homo sapien
cccggaaagccctgttctacattct

SEQ ID NO: 5115575 - DNA, 25 bp, Homo sapien
gaggctcagttattgctacagaagc

SEQ ID NO: 5115576 - DNA, 25 bp, Homo sapien
tcagtcgtcctacctacaaagttag

SEQ ID NO: 5115577 - DNA, 25 bp, Homo sapien
gccctaggacatagatacaatgcag

SEQ ID NO: 5115578 - DNA, 25 bp, Homo sapien
aataggctgcctgtgagtactgaag

SEQ ID NO: 5115579 - DNA, 25 bp, Homo sapien
ttagttcagtgagagtacagttctc

SEQ ID NO: 5115580 - DNA, 25 bp, Homo sapien
tgtccttagcctgttgcttaaactg

SEQ ID NO: 5115581 - DNA, 25 bp, Homo sapien
tacgtaggtagagatggataaagag

SEQ ID NO: 5115582 - DNA, 25 bp, Homo sapien
gttagtagactcagagtacgtaggt

SEQ ID NO: 5115583 - DNA, 25 bp, Homo sapien
gtgaggcgtacatctaattcctcct

SEQ ID NO: 5115584 - DNA, 25 bp, Homo sapien
tgtgaggcgtacatctaattcctcc

SEQ ID NO: 5115585 - DNA, 25 bp, Homo sapien
tctaaactccttagtcaagttttga

SEQ ID NO: 5115586 - DNA, 25 bp, Homo sapien
gaggagtctaaactccttagtcaag

SEQ ID NO: 5115587 - DNA, 25 bp, Homo sapien
ataaattgtcatatgaacctttgtc

SEQ ID NO: 5115588 - DNA, 25 bp, Homo sapien
tcatagtctcctatgaggagtctaa

SEQ ID NO: 5115589 - DNA, 25 bp, Homo sapien
tgtcctccagtttgcccgggaccag

SEQ ID NO: 5115590 - DNA, 25 bp, Homo sapien
agggctacagtgaagttatcctgga

SEQ ID NO: 5115591 - DNA, 25 bp, Homo sapien
tctaaggtagggagtctgtgatctc

SEQ ID NO: 5115592 - DNA, 25 bp, Homo sapien
tatggccctctaccagagcatgggc

SEQ ID NO: 5115593 - DNA, 25 bp, Homo sapien
aggcacagcacataacaagccttcg

SEQ ID NO: 5115594 - DNA, 25 bp, Homo sapien
agcagcctcgcttctgacatctggt

SEQ ID NO: 5115595 - DNA, 25 bp, Homo sapien
tgggcagcagcctcgcttctgacat

SEQ ID NO: 5115596 - DNA, 25 bp, Homo sapien
ataacaagccttcggccactgtttg

SEQ ID NO: 5115597 - DNA, 25 bp, Homo sapien
aaagttattccggatgtgatgtctc

SEQ ID NO: 5115598 - DNA, 25 bp, Homo sapien
tattccggatgtgatgtctccacca

SEQ ID NO: 5115599 - DNA, 25 bp, Homo sapien
gtctccaccatcgtcctggtcccag

SEQ ID NO: 5115600 - DNA, 25 bp, Homo sapien
tcctaacaaagttattccggatgtg

SEQ ID NO: 5115601 - DNA, 25 bp, Homo sapien
caaggagaactaagtcctaactgtc

SEQ ID NO: 5115602 - DNA, 25 bp, Homo sapien
ggagaactaagtcctaactgtcaag

SEQ ID NO: 5115603 - DNA, 25 bp, Homo sapien
actaagtcctaactgtcaagttcac

SEQ ID NO: 5115604 - DNA, 25 bp, Homo sapien
ttcaaggagaactaagtcctaactg

SEQ ID NO: 5115605 - DNA, 25 bp, Homo sapien
tcctgtgcatgtccgagtgtaaggg

SEQ ID NO: 5115606 - DNA, 25 bp, Homo sapien
ctccaattagcagcttccttcctgt

SEQ ID NO: 5115607 - DNA, 25 bp, Homo sapien
tgagtcttccctccaattagcagct

SEQ ID NO: 5115608 - DNA, 25 bp, Homo sapien
gacagcaccacttggaggtaatgga

SEQ ID NO: 5115609 - DNA, 25 bp, Homo sapien
gggggctctatgtggaggtcagact

SEQ ID NO: 5115610 - DNA, 25 bp, Homo sapien
gttttagagggtccgtggagccagc

SEQ ID NO: 5115611 - DNA, 25 bp, Homo sapien
tgtggaggtcagactgctcttctgg

SEQ ID NO: 5115612 - DNA, 25 bp, Homo sapien
tctatgtggaggtcagactgctctt

SEQ ID NO: 5115613 - DNA, 25 bp, Homo sapien
gttgcaaaaagtagagttcgagctc

SEQ ID NO: 5115614 - DNA, 25 bp, Homo sapien
aaaagtagagttcgagctcaggaaa

SEQ ID NO: 5115615 - DNA, 25 bp, Homo sapien
tgcttgtgtgcccttgtttaacatg

SEQ ID NO: 5115616 - DNA, 25 bp, Homo sapien
gcttgttgcaaaaagtagagttcga

SEQ ID NO: 5115617 - DNA, 25 bp, Homo sapien
tggagttggctcgagtgtgtttttc

SEQ ID NO: 5115618 - DNA, 25 bp, Homo sapien
agttggctcgagtgtgtttttcggc

SEQ ID NO: 5115619 - DNA, 25 bp, Homo sapien
ggctcgagtgtgtttttcggcaccg

SEQ ID NO: 5115620 - DNA, 25 bp, Homo sapien
acttggagttggctcgagtgtgttt

SEQ ID NO: 5115621 - DNA, 25 bp, Homo sapien
taactttctgtcctcaggataactg

SEQ ID NO: 5115622 - DNA, 25 bp, Homo sapien
ttaactttctgtcctcaggataact

SEQ ID NO: 5115623 - DNA, 25 bp, Homo sapien
ctttctgtcctcaggataactggta

SEQ ID NO: 5115624 - DNA, 25 bp, Homo sapien
tctgtcctcaggataactggtaaag

SEQ ID NO: 5115625 - DNA, 25 bp, Homo sapien
tctctactacaagatctggaatgag

SEQ ID NO: 5115626 - DNA, 25 bp, Homo sapien
tcactagtttctctactacaagatc

SEQ ID NO: 5115627 - DNA, 25 bp, Homo sapien
agtttctctactacaagatctggaa

SEQ ID NO: 5115628 - DNA, 25 bp, Homo sapien
gaaattcactagtttctctactaca

SEQ ID NO: 5115629 - DNA, 25 bp, Homo sapien
cagggtgcccttgagtttggtttca

SEQ ID NO: 5115630 - DNA, 25 bp, Homo sapien
tttggtttcactgcagggatgactg

SEQ ID NO: 5115631 - DNA, 25 bp, Homo sapien
tgtaactgccatgctggacttcgaa

SEQ ID NO: 5115632 - DNA, 25 bp, Homo sapien
tctcagctgtcagcggccacagggt

SEQ ID NO: 5115633 - DNA, 25 bp, Homo sapien
cacggcttggtcttggttactggtt

SEQ ID NO: 5115634 - DNA, 25 bp, Homo sapien
gggcctgccaggtagccccgactgt

SEQ ID NO: 5115635 - DNA, 25 bp, Homo sapien
tactggttccaaccgggagatgcca

SEQ ID NO: 5115636 - DNA, 25 bp, Homo sapien
gagatgccagggtcatgagtcttga

SEQ ID NO: 5115637 - DNA, 25 bp, Homo sapien
gccgttccctgtcaatgtcgaatag

SEQ ID NO: 5115638 - DNA, 25 bp, Homo sapien
tcctggactattaacttcagacgct

SEQ ID NO: 5115639 - DNA, 25 bp, Homo sapien
tgtcgaatagcgcatcccgctcgct

SEQ ID NO: 5115640 - DNA, 25 bp, Homo sapien
gctttatccgctccccaatgtggga

SEQ ID NO: 5115641 - DNA, 25 bp, Homo sapien
tctgttagctaagaaggtttgagtc

SEQ ID NO: 5115642 - DNA, 25 bp, Homo sapien
cattattaccatcctaagaggtagg

SEQ ID NO: 5115643 - DNA, 25 bp, Homo sapien
taactgggcttacttggatcatgaa

SEQ ID NO: 5115644 - DNA, 25 bp, Homo sapien
taacttgctcacagacagagctggt

SEQ ID NO: 5115645 - DNA, 25 bp, Homo sapien
ggccctaaggacctaacactctgta

SEQ ID NO: 5115646 - DNA, 25 bp, Homo sapien
ggacagtgacttaacccagagggtg

SEQ ID NO: 5115647 - DNA, 25 bp, Homo sapien
agctgctaggacttggtgcccctac

SEQ ID NO: 5115648 - DNA, 25 bp, Homo sapien
ttagactagggtaacaggacagcag

SEQ ID NO: 5115649 - DNA, 25 bp, Homo sapien
cgtttggacctctgaatcatttcct

SEQ ID NO: 5115650 - DNA, 25 bp, Homo sapien
tttccttcttgctgataggcttgtt

SEQ ID NO: 5115651 - DNA, 25 bp, Homo sapien
gataggcttgttcttctggacagcc

SEQ ID NO: 5115652 - DNA, 25 bp, Homo sapien
tcatttccttcttgctgataggctt

SEQ ID NO: 5115653 - DNA, 25 bp, Homo sapien
taaatttgagcataatgcctttatt

SEQ ID NO: 5115654 - DNA, 25 bp, Homo sapien
ttctgggtgcaagccagagctcctg

SEQ ID NO: 5115655 - DNA, 25 bp, Homo sapien
tggcctggttaacacttgtacacaa

SEQ ID NO: 5115656 - DNA, 25 bp, Homo sapien
ccacttggtggcctggttaacactt

SEQ ID NO: 5115657 - DNA, 25 bp, Homo sapien
ggttcctggacttagtggagcaatg

SEQ ID NO: 5115658 - DNA, 25 bp, Homo sapien
ttgaggttcctggacttagtggagc

SEQ ID NO: 5115659 - DNA, 25 bp, Homo sapien
gaggttcctggacttagtggagcaa

SEQ ID NO: 5115660 - DNA, 25 bp, Homo sapien
tccttgaggttcctggacttagtgg

SEQ ID NO: 5115661 - DNA, 25 bp, Homo sapien
tttcacccacaaggcaccgggaagc

SEQ ID NO: 5115662 - DNA, 25 bp, Homo sapien
cgggaagcctttgtgctactgttcc

SEQ ID NO: 5115663 - DNA, 25 bp, Homo sapien
accgggaagcctttgtgctactgtt

SEQ ID NO: 5115664 - DNA, 25 bp, Homo sapien
tgctgcttcccgacgtcaccgggat

SEQ ID NO: 5115665 - DNA, 25 bp, Homo sapien
cccgactcaaggcacagattagaaa

SEQ ID NO: 5115666 - DNA, 25 bp, Homo sapien
cacccgactcaaggcacagattaga

SEQ ID NO: 5115667 - DNA, 25 bp, Homo sapien
aggcacagattagaaaaccttccca

SEQ ID NO: 5115668 - DNA, 25 bp, Homo sapien
cccacccgactcaaggcacagatta

SEQ ID NO: 5115669 - DNA, 25 bp, Homo sapien
tcctccggtttgttccattctgctg

SEQ ID NO: 5115670 - DNA, 25 bp, Homo sapien
tgtgaggcgtacatctaattcctct

SEQ ID NO: 5115671 - DNA, 25 bp, Homo sapien
tcaccaggcctccatatcatatgaa

SEQ ID NO: 5115672 - DNA, 25 bp, Homo sapien
tacactcctcagtcaatttttgagg

SEQ ID NO: 5115673 - DNA, 25 bp, Homo sapien
gctaaagccatccactgattatcgt

SEQ ID NO: 5115674 - DNA, 25 bp, Homo sapien
taaagccatccactgattatcgtcc

SEQ ID NO: 5115675 - DNA, 25 bp, Homo sapien
aagccatccactgattatcgtccca

SEQ ID NO: 5115676 - DNA, 25 bp, Homo sapien
agccatccactgattatcgtcccat

SEQ ID NO: 5115677 - DNA, 25 bp, Homo sapien
caagcttgccatccaccatttagga

SEQ ID NO: 5115678 - DNA, 25 bp, Homo sapien
aagtggcctgatttaaagacgtagc

SEQ ID NO: 5115679 - DNA, 25 bp, Homo sapien
tgtgatagcaattaaggaccatagt

SEQ ID NO: 5115680 - DNA, 25 bp, Homo sapien
ggccatactaacctggacacctact

SEQ ID NO: 5115681 - DNA, 25 bp, Homo sapien
gctgacctagttgaagtgagaccat

SEQ ID NO: 5115682 - DNA, 25 bp, Homo sapien
caagtcacaacttcacactaggtaa

SEQ ID NO: 5115683 - DNA, 25 bp, Homo sapien
aggtgcaccccttaacaagagttct

SEQ ID NO: 5115684 - DNA, 25 bp, Homo sapien
catttatgacttgagaggatgcagc

SEQ ID NO: 5115685 - DNA, 25 bp, Homo sapien
gcacagtaggagctctgcccgttga

SEQ ID NO: 5115686 - DNA, 25 bp, Homo sapien
catgggcctctaccagagcttgggc

SEQ ID NO: 5115687 - DNA, 25 bp, Homo sapien
tctgctcaggcagggcgtctatgat

SEQ ID NO: 5115688 - DNA, 25 bp, Homo sapien
ggccagtccttcttccacgtgtggg

SEQ ID NO: 5115689 - DNA, 25 bp, Homo sapien
gaggcccgattttagctcctaccag

SEQ ID NO: 5115690 - DNA, 25 bp, Homo sapien
tgaacacagagctaggcacagcctc

SEQ ID NO: 5115691 - DNA, 25 bp, Homo sapien
caagtgcacctccatgtggctcatg

SEQ ID NO: 5115692 - DNA, 25 bp, Homo sapien
gtctcagtttcgtgccatggctcat

SEQ ID NO: 5115693 - DNA, 25 bp, Homo sapien
ggtagctccatgtggaggtcagcct

SEQ ID NO: 5115694 - DNA, 25 bp, Homo sapien
gagcaccattcggaggtaatggagg

SEQ ID NO: 5115695 - DNA, 25 bp, Homo sapien
aggtagctccatgtggaggtcagcc

SEQ ID NO: 5115696 - DNA, 25 bp, Homo sapien
tgagagcaccattcggaggtaatgg

SEQ ID NO: 5115697 - DNA, 25 bp, Homo sapien
cttctagtttagcctcactggaact

SEQ ID NO: 5115698 - DNA, 25 bp, Homo sapien
cttcacgggaattctccttgttcct

SEQ ID NO: 5115699 - DNA, 25 bp, Homo sapien
caaagagcactttcacttcaagttt

SEQ ID NO: 5115700 - DNA, 25 bp, Homo sapien
ctagtttagcctcactggaacttgg

SEQ ID NO: 5115701 - DNA, 25 bp, Homo sapien
tggaacacacagacccttcattggg

SEQ ID NO: 5115702 - DNA, 25 bp, Homo sapien
tcttctgctgctatacctgtggaac

SEQ ID NO: 5115703 - DNA, 25 bp, Homo sapien
ggctcaaagaagtgtctcatcatca

SEQ ID NO: 5115704 - DNA, 25 bp, Homo sapien
atgaatacttgagcaacctggcttc

SEQ ID NO: 5115705 - DNA, 25 bp, Homo sapien
gctggacctggatttgcatgttggc

SEQ ID NO: 5115706 - DNA, 25 bp, Homo sapien
ccccatagtggttgttattgacagt

SEQ ID NO: 5115707 - DNA, 25 bp, Homo sapien
gtttttgataagcactccattgtag

SEQ ID NO: 5115708 - DNA, 25 bp, Homo sapien
tcgcccagccagtttagcaacagtt

SEQ ID NO: 5115709 - DNA, 25 bp, Homo sapien
gcttcatcgtttgtggtctctgcct

SEQ ID NO: 5115710 - DNA, 25 bp, Homo sapien
tcagccaagaagaagggcggaaacc

SEQ ID NO: 5115711 - DNA, 25 bp, Homo sapien
gcgccacccgctgtagctgaaaggg

SEQ ID NO: 5115712 - DNA, 25 bp, Homo sapien
catccccgaaaggtagtatgtcttg

SEQ ID NO: 5115713 - DNA, 25 bp, Homo sapien
cccaagatgctaccaggtggtggtc

SEQ ID NO: 5115714 - DNA, 25 bp, Homo sapien
ccaggaaaccccaagatgctaccag

SEQ ID NO: 5115715 - DNA, 25 bp, Homo sapien
cactggccccttgtgatgatacaaa

SEQ ID NO: 5115716 - DNA, 25 bp, Homo sapien
tacaaatttacaggccacgcccagg

SEQ ID NO: 5115717 - DNA, 25 bp, Homo sapien
gggaataaccagtctattatcctag

SEQ ID NO: 5115718 - DNA, 25 bp, Homo sapien
tctgttgaaatgaacactctcagaa

SEQ ID NO: 5115719 - DNA, 25 bp, Homo sapien
tatacgtataccctttaagactcag

SEQ ID NO: 5115720 - DNA, 25 bp, Homo sapien
gaaatgaggtctctggatttctact

SEQ ID NO: 5115721 - DNA, 25 bp, Homo sapien
atggtcagagaagaagaaacatcaa

SEQ ID NO: 5115722 - DNA, 25 bp, Homo sapien
catggtcagagaagaagaaacatca

SEQ ID NO: 5115723 - DNA, 25 bp, Homo sapien
gacatggtcagagaagaagaaacat

SEQ ID NO: 5115724 - DNA, 25 bp, Homo sapien
ctgacatggtcagagaagaagaaac

SEQ ID NO: 5115725 - DNA, 25 bp, Homo sapien
atggtcagagaagaagaaacatcaa

SEQ ID NO: 5115726 - DNA, 25 bp, Homo sapien
gacatggtcagagaagaagaaacat

SEQ ID NO: 5115727 - DNA, 25 bp, Homo sapien
ctgacatggtcagagaagaagaaac

SEQ ID NO: 5115728 - DNA, 25 bp, Homo sapien
catggtcagagaagaagaaacatca

SEQ ID NO: 5115729 - DNA, 25 bp, Homo sapien
catggtcagagaagaagaaacatca

SEQ ID NO: 5115730 - DNA, 25 bp, Homo sapien
gacatggtcagagaagaagaaacat

SEQ ID NO: 5115731 - DNA, 25 bp, Homo sapien
ctgacatggtcagagaagaagaaac

SEQ ID NO: 5115732 - DNA, 25 bp, Homo sapien
atggtcagagaagaagaaacatcaa

SEQ ID NO: 5115733 - DNA, 25 bp, Homo sapien
agagacgatactagcggatgtctgg

SEQ ID NO: 5115734 - DNA, 25 bp, Homo sapien
cgatactagcggatgtctgggtggc

SEQ ID NO: 5115735 - DNA, 25 bp, Homo sapien
gggaagaagagacgatactagcgga

SEQ ID NO: 5115736 - DNA, 25 bp, Homo sapien
tactagcggatgtctgggtggctga

SEQ ID NO: 5115737 - DNA, 25 bp, Homo sapien
tactagcggatgtctgggtggctga

SEQ ID NO: 5115738 - DNA, 25 bp, Homo sapien
tgtgtccagtatgaaggccactggt

SEQ ID NO: 5115739 - DNA, 25 bp, Homo sapien
ggaagaagagacgatactagcggat

SEQ ID NO: 5115740 - DNA, 25 bp, Homo sapien
gccactggtcactggttactggtca

SEQ ID NO: 5115741 - DNA, 25 bp, Homo sapien
gaagagagaactgccgagaatttgc

SEQ ID NO: 5115742 - DNA, 25 bp, Homo sapien
gctgcattgctcaccacaggaagag

SEQ ID NO: 5115743 - DNA, 25 bp, Homo sapien
cttcctgttaagaaagctgcattgc

SEQ ID NO: 5115744 - DNA, 25 bp, Homo sapien
ctggagaagttggagatgcttcctg

SEQ ID NO: 5115745 - DNA, 25 bp, Homo sapien
cagtaaccccagacaacatagttgt

SEQ ID NO: 5115746 - DNA, 25 bp, Homo sapien
catagttgtgctagaatgttggtaa

SEQ ID NO: 5115747 - DNA, 25 bp, Homo sapien
gccatgctgagctgatggctggagc

SEQ ID NO: 5115748 - DNA, 25 bp, Homo sapien
tcaaaaacgcctggataagaggcag

SEQ ID NO: 5115749 - DNA, 25 bp, Homo sapien
taggacatttgtgggctgaacctcc

SEQ ID NO: 5115750 - DNA, 25 bp, Homo sapien
tgacacagagccataagattgcagg

SEQ ID NO: 5115751 - DNA, 25 bp, Homo sapien
caggatagttgaggccccagtgtgc

SEQ ID NO: 5115752 - DNA, 25 bp, Homo sapien
gttagtgtcccctgaacaaggctgg

SEQ ID NO: 5115753 - DNA, 25 bp, Homo sapien
tcaacgctgacattattcctctcct

SEQ ID NO: 5115754 - DNA, 25 bp, Homo sapien
tttcaacgctgacattattcctctc

SEQ ID NO: 5115755 - DNA, 25 bp, Homo sapien
tccttttcaacgctgacattattcc

SEQ ID NO: 5115756 - DNA, 25 bp, Homo sapien
cttttcaacgctgacattattcctc

SEQ ID NO: 5115757 - DNA, 25 bp, Homo sapien
tactgaaggacttggagaattctgg

SEQ ID NO: 5115758 - DNA, 25 bp, Homo sapien
ttattgaaatgtccccaagctcagg

SEQ ID NO: 5115759 - DNA, 25 bp, Homo sapien
gatgggttactctcaagtgtctggg

SEQ ID NO: 5115760 - DNA, 25 bp, Homo sapien
gtctggcttggagattgcaatccca

SEQ ID NO: 5115761 - DNA, 25 bp, Homo sapien
gagcaccctggataggctcggaagc

SEQ ID NO: 5115762 - DNA, 25 bp, Homo sapien
gacacatgacttttcctgcacctga

SEQ ID NO: 5115763 - DNA, 25 bp, Homo sapien
ttggccttgttcacagaagcgctgt

SEQ ID NO: 5115764 - DNA, 25 bp, Homo sapien
tctctaataggcactctgggttctt

SEQ ID NO: 5115765 - DNA, 25 bp, Homo sapien
agggtcttttggctaagctcaggtt

SEQ ID NO: 5115766 - DNA, 25 bp, Homo sapien
catgtgcatgcctagggagcttcgg

SEQ ID NO: 5115767 - DNA, 25 bp, Homo sapien
tcttccgtttcatattgggaatggt

SEQ ID NO: 5115768 - DNA, 25 bp, Homo sapien
acttttttccctgactgcttactct

SEQ ID NO: 5115769 - DNA, 25 bp, Homo sapien
ctcagagtgggatggagatgtacac

SEQ ID NO: 5115770 - DNA, 25 bp, Homo sapien
gatatccagccatggtttgagagct

SEQ ID NO: 5115771 - DNA, 25 bp, Homo sapien
ttcccaggtggtggcaactcagagt

SEQ ID NO: 5115772 - DNA, 25 bp, Homo sapien
ttcccgagtgcatggaaaacttgca

SEQ ID NO: 5115773 - DNA, 25 bp, Homo sapien
gaaacatgtcgagcttgaggttggt

SEQ ID NO: 5115774 - DNA, 25 bp, Homo sapien
ttggtccagggtcagaaagggcaaa

SEQ ID NO: 5115775 - DNA, 25 bp, Homo sapien
tgaggctagagggtttggccgccga

SEQ ID NO: 5115776 - DNA, 25 bp, Homo sapien
gaaagggcaaaggtatcaacttgac

SEQ ID NO: 5115777 - DNA, 25 bp, Homo sapien
aaagatgtgttggtaggagctggtc

SEQ ID NO: 5115778 - DNA, 25 bp, Homo sapien
gattgactgcattcgattgagctga

SEQ ID NO: 5115779 - DNA, 25 bp, Homo sapien
gctgagttagtagaatcaggtcgag

SEQ ID NO: 5115780 - DNA, 25 bp, Homo sapien
gcagggtaagccacagcaggcctac

SEQ ID NO: 5115781 - DNA, 25 bp, Homo sapien
agcagattgagggacagtaggctgg

SEQ ID NO: 5115782 - DNA, 25 bp, Homo sapien
ctgaactgggttgggttgctttggc

SEQ ID NO: 5115783 - DNA, 25 bp, Homo sapien
ctgggtagggttggctgaactgggt

SEQ ID NO: 5115784 - DNA, 25 bp, Homo sapien
gcagattgagggacagtaggctggg

SEQ ID NO: 5115785 - DNA, 25 bp, Homo sapien
gaagaacaagatgatgttttgtagg

SEQ ID NO: 5115786 - DNA, 25 bp, Homo sapien
agaagaacaagatgatgttttgtag

SEQ ID NO: 5115787 - DNA, 25 bp, Homo sapien
gagactggtcacagcagtggaaaca

SEQ ID NO: 5115788 - DNA, 25 bp, Homo sapien
gactggtcacagcagtggaaacagg

SEQ ID NO: 5115789 - DNA, 25 bp, Homo sapien
cggagactggtcacagcagtggaaa

SEQ ID NO: 5115790 - DNA, 25 bp, Homo sapien
tcacagcagtggaaacaggctcccg

SEQ ID NO: 5115791 - DNA, 25 bp, Homo sapien
tggaggctgaagtcttggattagaa

SEQ ID NO: 5115792 - DNA, 25 bp, Homo sapien
aacagtgggtttcctccatggacgg

SEQ ID NO: 5115793 - DNA, 25 bp, Homo sapien
tgtgatgggcgttgacattactggc

SEQ ID NO: 5115794 - DNA, 25 bp, Homo sapien
acattactggctcaggaacagtggg

SEQ ID NO: 5115795 - DNA, 25 bp, Homo sapien
gcattctcacgctcttgttgagcct

SEQ ID NO: 5115796 - DNA, 25 bp, Homo sapien
ctttctcttcatggcctcacgctct

SEQ ID NO: 5115797 - DNA, 25 bp, Homo sapien
ttagattgtgtagccatagtattca

SEQ ID NO: 5115798 - DNA, 25 bp, Homo sapien
tggcagcattctcacgctcttgttg

SEQ ID NO: 5115799 - DNA, 25 bp, Homo sapien
tctatctatatatgtggaaaaccag

SEQ ID NO: 5115800 - DNA, 25 bp, Homo sapien
tgtggaaaaccagcggtatccaaag

SEQ ID NO: 5115801 - DNA, 25 bp, Homo sapien
tctatatatgtggaaaaccagcggt

SEQ ID NO: 5115802 - DNA, 25 bp, Homo sapien
tatatgtggaaaaccagcggtatcc

SEQ ID NO: 5115803 - DNA, 25 bp, Homo sapien
gattttgtgtagtcatcaacttttc

SEQ ID NO: 5115804 - DNA, 25 bp, Homo sapien
gtgtagtcatcaacttttcagactt

SEQ ID NO: 5115805 - DNA, 25 bp, Homo sapien
gtgattttgtgtagtcatcaacttt

SEQ ID NO: 5115806 - DNA, 25 bp, Homo sapien
tttgtgtagtcatcaacttttcaga

SEQ ID NO: 5115807 - DNA, 25 bp, Homo sapien
gaggagcgaacgacacagcggccat

SEQ ID NO: 5115808 - DNA, 25 bp, Homo sapien
caatgaggagcgaacgacacagcgg

SEQ ID NO: 5115809 - DNA, 25 bp, Homo sapien
aaatccgaccaatgaggagcgaacg

SEQ ID NO: 5115810 - DNA, 25 bp, Homo sapien
tgcggaaaatccgaccaatgaggag

SEQ ID NO: 5115811 - DNA, 25 bp, Homo sapien
gcggatgacacccggaggttccgga

SEQ ID NO: 5115812 - DNA, 25 bp, Homo sapien
ttcaaagtccaaccacgctcggagg

SEQ ID NO: 5115813 - DNA, 25 bp, Homo sapien
tcaaagtccaaccacgctcggaggc

SEQ ID NO: 5115814 - DNA, 25 bp, Homo sapien
ccccttcaaagtccaaccacgctcg

SEQ ID NO: 5115815 - DNA, 25 bp, Homo sapien
ccttcaaagtccaaccacgctcgga

SEQ ID NO: 5115816 - DNA, 25 bp, Homo sapien
agacagaagccgtcgggtgcctcga

SEQ ID NO: 5115817 - DNA, 25 bp, Homo sapien
ggttttcgggatctttcaaatgcag

SEQ ID NO: 5115818 - DNA, 25 bp, Homo sapien
tagggagggctctatcgacaactgc

SEQ ID NO: 5115819 - DNA, 25 bp, Homo sapien
gaaggcactcaagacgaacttgcca

SEQ ID NO: 5115820 - DNA, 25 bp, Homo sapien
cacctggttgagcaattccaaaaag

SEQ ID NO: 5115821 - DNA, 25 bp, Homo sapien
gagcaattccaaaaaggggatgcag

SEQ ID NO: 5115822 - DNA, 25 bp, Homo sapien
ttgagcaattccaaaaaggggatgc

SEQ ID NO: 5115823 - DNA, 25 bp, Homo sapien
cctggttgagcaattccaaaaaggg

SEQ ID NO: 5115824 - DNA, 25 bp, Homo sapien
ctcttgggagaggttcttgtgggtt

SEQ ID NO: 5115825 - DNA, 25 bp, Homo sapien
caaggccaggaagcggcgccggtta

SEQ ID NO: 5115826 - DNA, 25 bp, Homo sapien
gaaccacctcccaaggccaggaagc

SEQ ID NO: 5115827 - DNA, 25 bp, Homo sapien
tgggagaggttcttgtgggttaaga

SEQ ID NO: 5115828 - DNA, 25 bp, Homo sapien
ggactttcctacaagaaggctgaga

SEQ ID NO: 5115829 - DNA, 25 bp, Homo sapien
cttgcattgcaaaaacccctggtgt

SEQ ID NO: 5115830 - DNA, 25 bp, Homo sapien
cacaacgatgagagtactggcagac

SEQ ID NO: 5115831 - DNA, 25 bp, Homo sapien
tccacggcccatgaaagttaactga

SEQ ID NO: 5115832 - DNA, 25 bp, Homo sapien
aatggatgccattcggataatctca

SEQ ID NO: 5115833 - DNA, 25 bp, Homo sapien
taccgcactacccagctgggagaga

SEQ ID NO: 5115834 - DNA, 25 bp, Homo sapien
ggtggaatgtcttcattcacctcta

SEQ ID NO: 5115835 - DNA, 25 bp, Homo sapien
aactccagagcggaagtaccgacgg

SEQ ID NO: 5115836 - DNA, 25 bp, Homo sapien
tgttcaggacctagtgcagtgccat

SEQ ID NO: 5115837 - DNA, 25 bp, Homo sapien
cagccaatatgtaggagttgccagc

SEQ ID NO: 5115838 - DNA, 25 bp, Homo sapien
ttcagtccaaaaggtcaatagggcc

SEQ ID NO: 5115839 - DNA, 25 bp, Homo sapien
tctgagccaaataggcgaggcacca

SEQ ID NO: 5115840 - DNA, 25 bp, Homo sapien
tgctgttaccctcaagataaaaaac

SEQ ID NO: 5115841 - DNA, 25 bp, Homo sapien
ttaccatggcccataaagtcctgca

SEQ ID NO: 5115842 - DNA, 25 bp, Homo sapien
gtgcccggccgagacctcatctctt

SEQ ID NO: 5115843 - DNA, 25 bp, Homo sapien
acttttcaatggcttgctgttaccc

SEQ ID NO: 5115844 - DNA, 25 bp, Homo sapien
tgctgctcctgcctcggcaatcgcc

SEQ ID NO: 5115845 - DNA, 25 bp, Homo sapien
tcggaggttccgacgacgggccagc

SEQ ID NO: 5115846 - DNA, 25 bp, Homo sapien
gggcagcgcgggcaccacggggtgg

SEQ ID NO: 5115847 - DNA, 25 bp, Homo sapien
ctgctcacaactgattcagtctccc

SEQ ID NO: 5115848 - DNA, 25 bp, Homo sapien
aagatacttgatcttttatgttcca

SEQ ID NO: 5115849 - DNA, 25 bp, Homo sapien
cttttatgttccatggatccttctg

SEQ ID NO: 5115850 - DNA, 25 bp, Homo sapien
ctccattaactaacctcagggctca

SEQ ID NO: 5115851 - DNA, 25 bp, Homo sapien
tgactctccctccattaactaacct

SEQ ID NO: 5115852 - DNA, 25 bp, Homo sapien
gaagacaatgtaatcattcacccat

SEQ ID NO: 5115853 - DNA, 25 bp, Homo sapien
tatggcagtgaacaacacagtcaaa

SEQ ID NO: 5115854 - DNA, 25 bp, Homo sapien
tactacagggtccagaattattcta

SEQ ID NO: 5115855 - DNA, 25 bp, Homo sapien
taaactcacaattctatctctagga

SEQ ID NO: 5115856 - DNA, 25 bp, Homo sapien
gcagtcttcagagaaccgtttggca

SEQ ID NO: 5115857 - DNA, 25 bp, Homo sapien
ggagagctaatacacccagctgggc

SEQ ID NO: 5115858 - DNA, 25 bp, Homo sapien
gcaagcaccagactcctacaatgaa

SEQ ID NO: 5115859 - DNA, 25 bp, Homo sapien
tactcccaaactaggcagcaagcac

SEQ ID NO: 5115860 - DNA, 25 bp, Homo sapien
taatctcgatgttttggtagtttct

SEQ ID NO: 5115861 - DNA, 25 bp, Homo sapien
aatctcgatgttttggtagtttctc

SEQ ID NO: 5115862 - DNA, 25 bp, Homo sapien
cagaactgttgtggtgaaatggcct

SEQ ID NO: 5115863 - DNA, 25 bp, Homo sapien
ctggtactcagatgcagagactact

SEQ ID NO: 5115864 - DNA, 25 bp, Homo sapien
gaagcttttagatgggcaacaatga

SEQ ID NO: 5115865 - DNA, 25 bp, Homo sapien
aatggccttatctcctattgcagga

SEQ ID NO: 5115866 - DNA, 25 bp, Homo sapien
tatatcgttttaacagctctgcctt

SEQ ID NO: 5115867 - DNA, 25 bp, Homo sapien
ttggtatatcgttttaacagctctg

SEQ ID NO: 5115868 - DNA, 25 bp, Homo sapien
tattctgtatattctttggtatatc

SEQ ID NO: 5115869 - DNA, 25 bp, Homo sapien
tattctttggtatatcgttttaaca

SEQ ID NO: 5115870 - DNA, 25 bp, Homo sapien
ttccagctcttgctggatggccatg

SEQ ID NO: 5115871 - DNA, 25 bp, Homo sapien
tctcctcgaaggcatggaactgttc

SEQ ID NO: 5115872 - DNA, 25 bp, Homo sapien
gctgcttctgttgtgctaccctctg

SEQ ID NO: 5115873 - DNA, 25 bp, Homo sapien
gctggatggccatgttccgggccaa

SEQ ID NO: 5115874 - DNA, 25 bp, Homo sapien
agtcaggcactagcgggccacctag

SEQ ID NO: 5115875 - DNA, 25 bp, Homo sapien
gactgttaaggtggggaacacatct

SEQ ID NO: 5115876 - DNA, 25 bp, Homo sapien
gggcttctccaagtcaggcactagc

SEQ ID NO: 5115877 - DNA, 25 bp, Homo sapien
ctgtatggatgagactgttaaggtg

SEQ ID NO: 5115878 - DNA, 25 bp, Homo sapien
ggtttcaaggacctgtccaccacag

SEQ ID NO: 5115879 - DNA, 25 bp, Homo sapien
tgctccaggtttcaaggacctgtcc

SEQ ID NO: 5115880 - DNA, 25 bp, Homo sapien
gctcagtgctccaggtttcaaggac

SEQ ID NO: 5115881 - DNA, 25 bp, Homo sapien
gctggccttacagttgtgtgacagt

SEQ ID NO: 5115882 - DNA, 25 bp, Homo sapien
aaggagaatagtctgcgaccactga

SEQ ID NO: 5115883 - DNA, 25 bp, Homo sapien
ctcaagcagacctcacagccagcag

SEQ ID NO: 5115884 - DNA, 25 bp, Homo sapien
gagccctgcctcctcaagcagacct

SEQ ID NO: 5115885 - DNA, 25 bp, Homo sapien
aatagtctgcgaccactgagccctg

SEQ ID NO: 5115886 - DNA, 25 bp, Homo sapien
acatgtctccactccccgggcagtg

SEQ ID NO: 5115887 - DNA, 25 bp, Homo sapien
tggcgcaatccatcgattgtgggaa

SEQ ID NO: 5115888 - DNA, 25 bp, Homo sapien
ggctaactggagaaactgtgggcac

SEQ ID NO: 5115889 - DNA, 25 bp, Homo sapien
cagtgttggcactggctaactggag

SEQ ID NO: 5115890 - DNA, 25 bp, Homo sapien
tctctgtgttgcagtaatcagaccc

SEQ ID NO: 5115891 - DNA, 25 bp, Homo sapien
ctgtgttgcagtaatcagacccagc

SEQ ID NO: 5115892 - DNA, 25 bp, Homo sapien
gaaaagttcttcttcgttctctgtg

SEQ ID NO: 5115893 - DNA, 25 bp, Homo sapien
tgaggccctgctgatcctgtatgag

SEQ ID NO: 5115894 - DNA, 25 bp, Homo sapien
tctcggacagctcagaattgcttac

SEQ ID NO: 5115895 - DNA, 25 bp, Homo sapien
aactctcggacagctcagaattgct

SEQ ID NO: 5115896 - DNA, 25 bp, Homo sapien
ctctcggacagctcagaattgctta

SEQ ID NO: 5115897 - DNA, 25 bp, Homo sapien
ctaactctcggacagctcagaattg

SEQ ID NO: 5115898 - DNA, 25 bp, Homo sapien
taccagaaggctgcacaagatatgc

SEQ ID NO: 5115899 - DNA, 25 bp, Homo sapien
cagtaggcatagtctctaaggtcaa

SEQ ID NO: 5115900 - DNA, 25 bp, Homo sapien
cacttatattctaggccagcatccc

SEQ ID NO: 5115901 - DNA, 25 bp, Homo sapien
gcatctgaattaacctccttggctc

SEQ ID NO: 5115902 - DNA, 25 bp, Homo sapien
gaccacaaagtttctacctgatgag

SEQ ID NO: 5115903 - DNA, 25 bp, Homo sapien
caaacgtgggtagccagaaagataa

SEQ ID NO: 5115904 - DNA, 25 bp, Homo sapien
gattctaactgggagcaaacgtggg

SEQ ID NO: 5115905 - DNA, 25 bp, Homo sapien
ggaacgtgttagctcagtgcaggca

SEQ ID NO: 5115906 - DNA, 25 bp, Homo sapien
ccattaaacaggtagggtatggaga

SEQ ID NO: 5115907 - DNA, 25 bp, Homo sapien
gaattcctggttggatgaaggactg

SEQ ID NO: 5115908 - DNA, 25 bp, Homo sapien
cgcagagccttgatgcgagaaggca

SEQ ID NO: 5115909 - DNA, 25 bp, Homo sapien
gcatcaagacatcgggccattaaac

SEQ ID NO: 5115910 - DNA, 25 bp, Homo sapien
taggtggatgtatgccctcacttac

SEQ ID NO: 5115911 - DNA, 25 bp, Homo sapien
cagaatgacaactaaacagatgagg

SEQ ID NO: 5115912 - DNA, 25 bp, Homo sapien
aagagctgtctgtggtgaaggatac

SEQ ID NO: 5115913 - DNA, 25 bp, Homo sapien
taacttagattgcattgtccccagc

SEQ ID NO: 5115914 - DNA, 25 bp, Homo sapien
gaggatatatggtaatccctcctta

SEQ ID NO: 5115915 - DNA, 25 bp, Homo sapien
ctcttagcgaggatatatggtaatc

SEQ ID NO: 5115916 - DNA, 25 bp, Homo sapien
tcagaggactcttagcgaggatata

SEQ ID NO: 5115917 - DNA, 25 bp, Homo sapien
gaaaaagagtcagaggactcttagc

SEQ ID NO: 5115918 - DNA, 25 bp, Homo sapien
acatcatctggtaagagcagtgagt

SEQ ID NO: 5115919 - DNA, 25 bp, Homo sapien
aaacaatggctactgactctggcaa

SEQ ID NO: 5115920 - DNA, 25 bp, Homo sapien
cactggagagaaacgcggtctgtgt

SEQ ID NO: 5115921 - DNA, 25 bp, Homo sapien
agcagtgagtgtgtaggtcgacact

SEQ ID NO: 5115922 - DNA, 25 bp, Homo sapien
caagaatagagaccttttcccctga

SEQ ID NO: 5115923 - DNA, 25 bp, Homo sapien
caaaggacaagtccacaagaataga

SEQ ID NO: 5115924 - DNA, 25 bp, Homo sapien
tctaatccaacataaaactcttgac

SEQ ID NO: 5115925 - DNA, 25 bp, Homo sapien
cattcctatcgcttcaagtcaaaca

SEQ ID NO: 5115926 - DNA, 25 bp, Homo sapien
tgaaatcctttctggcgacaggaag

SEQ ID NO: 5115927 - DNA, 25 bp, Homo sapien
agtccatggtcagttagtttaaaga

SEQ ID NO: 5115928 - DNA, 25 bp, Homo sapien
agaggtggatccttgctgtgtggat

SEQ ID NO: 5115929 - DNA, 25 bp, Homo sapien
atgaaatcctttctggcgacaggaa

SEQ ID NO: 5115930 - DNA, 25 bp, Homo sapien
ttcctttgccttcaaatctcttatt

SEQ ID NO: 5115931 - DNA, 25 bp, Homo sapien
cctttgccttcaaatctcttattga

SEQ ID NO: 5115932 - DNA, 25 bp, Homo sapien
tcctttgccttcaaatctcttattg

SEQ ID NO: 5115933 - DNA, 25 bp, Homo sapien
tcatcgaaggtctgtgatggtcact

SEQ ID NO: 5115934 - DNA, 25 bp, Homo sapien
gtcactgctctgtccacaacagtca

SEQ ID NO: 5115935 - DNA, 25 bp, Homo sapien
ccacaacagtcacgtggctgcagct

SEQ ID NO: 5115936 - DNA, 25 bp, Homo sapien
gctctgtccacaacagtcacgtggc

SEQ ID NO: 5115937 - DNA, 25 bp, Homo sapien
atggttttgttgttcttggaaggtg

SEQ ID NO: 5115938 - DNA, 25 bp, Homo sapien
ttcttggaaggtgttggactcaaac

SEQ ID NO: 5115939 - DNA, 25 bp, Homo sapien
cttggaaggtgttggactcaaacgc

SEQ ID NO: 5115940 - DNA, 25 bp, Homo sapien
tgttgttcttggaaggtgttggact

SEQ ID NO: 5115941 - DNA, 25 bp, Homo sapien
cacagatgcccttattgagcccaga

SEQ ID NO: 5115942 - DNA, 25 bp, Homo sapien
caaatggagtaagctgtccctcacc

SEQ ID NO: 5115943 - DNA, 25 bp, Homo sapien
tcatattgccataaaccacaggaaa

SEQ ID NO: 5115944 - DNA, 25 bp, Homo sapien
gatgtgttagccaaacaatctggtc

SEQ ID NO: 5115945 - DNA, 25 bp, Homo sapien
tcattatcctcagccaaaagcatgg

SEQ ID NO: 5115946 - DNA, 25 bp, Homo sapien
ggttgacccatttgagacagcacca

SEQ ID NO: 5115947 - DNA, 25 bp, Homo sapien
tcacaacacctctggaagatggcaa

SEQ ID NO: 5115948 - DNA, 25 bp, Homo sapien
ctggtactccaaacaaaggcttcat

SEQ ID NO: 5115949 - DNA, 25 bp, Homo sapien
gatcatctgaaaaaacccagctctg

SEQ ID NO: 5115950 - DNA, 25 bp, Homo sapien
tggtctttgagcctcgggaacccag

SEQ ID NO: 5115951 - DNA, 25 bp, Homo sapien
gagtcagtccctttagccaaatagt

SEQ ID NO: 5115952 - DNA, 25 bp, Homo sapien
gaccatcctatgcagagtgcctctg

SEQ ID NO: 5115953 - DNA, 25 bp, Homo sapien
cattaaattcgctgttggccaggac

SEQ ID NO: 5115954 - DNA, 25 bp, Homo sapien
tcagagtgaacctaccagtgaggga

SEQ ID NO: 5115955 - DNA, 25 bp, Homo sapien
tcctggcggctggaaagaaagctca

SEQ ID NO: 5115956 - DNA, 25 bp, Homo sapien
tcagatggcttcctacaaggtgaca

SEQ ID NO: 5115957 - DNA, 25 bp, Homo sapien
tgtttcctttgacctactcctgtga

SEQ ID NO: 5115958 - DNA, 25 bp, Homo sapien
cctttgacctactcctgtgatatat

SEQ ID NO: 5115959 - DNA, 25 bp, Homo sapien
tttcctttgacctactcctgtgata

SEQ ID NO: 5115960 - DNA, 25 bp, Homo sapien
gtgatatattatatcagtggatttc

SEQ ID NO: 5115961 - DNA, 25 bp, Homo sapien
tagcttgtagcccaaacctgtctgc

SEQ ID NO: 5115962 - DNA, 25 bp, Homo sapien
gaatggatctatcttgtccctgaca

SEQ ID NO: 5115963 - DNA, 25 bp, Homo sapien
cttattaagtatgacgctgggtgtt

SEQ ID NO: 5115964 - DNA, 25 bp, Homo sapien
ggctattacctgtactgaaaagcta

SEQ ID NO: 5115965 - DNA, 25 bp, Homo sapien
cagtggtgaggtcaccctcatggaa

SEQ ID NO: 5115966 - DNA, 25 bp, Homo sapien
tcactgatgctgtccaagaataggg

SEQ ID NO: 5115967 - DNA, 25 bp, Homo sapien
gctctgctagttcttgcagcaaggt

SEQ ID NO: 5115968 - DNA, 25 bp, Homo sapien
tatgttgaacgggttccagtggtga

SEQ ID NO: 5115969 - DNA, 25 bp, Homo sapien
gctgctattatctaaagctaacagc

SEQ ID NO: 5115970 - DNA, 25 bp, Homo sapien
cctgcccagcatctacttccccttc

SEQ ID NO: 5115971 - DNA, 25 bp, Homo sapien
taccccatcgtccagctgctattat

SEQ ID NO: 5115972 - DNA, 25 bp, Homo sapien
gggagtgagaaggtcactaccccat

SEQ ID NO: 5115973 - DNA, 25 bp, Homo sapien
cacagttccagtagaattacattta

SEQ ID NO: 5115974 - DNA, 25 bp, Homo sapien
acagttccagtagaattacatttac

SEQ ID NO: 5115975 - DNA, 25 bp, Homo sapien
catcaataaagaatggcagctgcac

SEQ ID NO: 5115976 - DNA, 25 bp, Homo sapien
tgcaccccaggcacttgccaaagat

SEQ ID NO: 5115977 - DNA, 25 bp, Homo sapien
agttaaaagttaagcgcctcatatc

SEQ ID NO: 5115978 - DNA, 25 bp, Homo sapien
gcctcatatcttactcagccatcaa

SEQ ID NO: 5115979 - DNA, 25 bp, Homo sapien
ccactgtaaagtgggaatccatgta

SEQ ID NO: 5115980 - DNA, 25 bp, Homo sapien
gaagctattagctaattatggacag

SEQ ID NO: 5115981 - DNA, 25 bp, Homo sapien
gttcataagtaaggagacaaccaca

SEQ ID NO: 5115982 - DNA, 25 bp, Homo sapien
tccatgtagtaagtgggccatgggc

SEQ ID NO: 5115983 - DNA, 25 bp, Homo sapien
ggtgtgtctttggcatgaataccag

SEQ ID NO: 5115984 - DNA, 25 bp, Homo sapien
ctggtgtgtctttggcatgaatacc

SEQ ID NO: 5115985 - DNA, 25 bp, Homo sapien
tggtgtgtctttggcatgaatacca

SEQ ID NO: 5115986 - DNA, 25 bp, Homo sapien
cgagggtatgagaggttcttctccc

SEQ ID NO: 5115987 - DNA, 25 bp, Homo sapien
caggcatgtggctggcatggccact

SEQ ID NO: 5115988 - DNA, 25 bp, Homo sapien
gcttttgttacaatggtagaattga

SEQ ID NO: 5115989 - DNA, 25 bp, Homo sapien
cctaggcattgagtccagtggcacc

SEQ ID NO: 5115990 - DNA, 25 bp, Homo sapien
gcctccagttgtcctactgccttgg

SEQ ID NO: 5115991 - DNA, 25 bp, Homo sapien
cacaaccgcttcatgcttggcaggg

SEQ ID NO: 5115992 - DNA, 25 bp, Homo sapien
tctttcagcacgaatgacatctggg

SEQ ID NO: 5115993 - DNA, 25 bp, Homo sapien
tgaaccagagtcaaagtcactgtgg

SEQ ID NO: 5115994 - DNA, 25 bp, Homo sapien
gactcgagcatgtcagctgaaccag

SEQ ID NO: 5115995 - DNA, 25 bp, Homo sapien
cacaagggcctgacttagaatcaca

SEQ ID NO: 5115996 - DNA, 25 bp, Homo sapien
gacaatgttgccgtctgagtggccc

SEQ ID NO: 5115997 - DNA, 25 bp, Homo sapien
cagcctcatggtggttcagtcacaa

SEQ ID NO: 5115998 - DNA, 25 bp, Homo sapien
tgctctgcctctgggatacccgagt

SEQ ID NO: 5115999 - DNA, 25 bp, Homo sapien
tcagagattgcctcctaccctggga

SEQ ID NO: 5116000 - DNA, 25 bp, Homo sapien
catgatgggactcactgttgcctcg

SEQ ID NO: 5116001 - DNA, 25 bp, Homo sapien
agaaggccggctgaagttttatcca

SEQ ID NO: 5116002 - DNA, 25 bp, Homo sapien
aacagagcctcggaagacagtcaga

SEQ ID NO: 5116003 - DNA, 25 bp, Homo sapien
tgtggctgagtgagctggggactgg

SEQ ID NO: 5116004 - DNA, 25 bp, Homo sapien
gtgtgtggctgagtgagctggggac

SEQ ID NO: 5116005 - DNA, 25 bp, Homo sapien
ggctgagtgagctggggactggagc

SEQ ID NO: 5116006 - DNA, 25 bp, Homo sapien
ggtgtgtgtggctgagtgagctggg

SEQ ID NO: 5116007 - DNA, 25 bp, Homo sapien
tcacacacgagcgcggtggtctcct

SEQ ID NO: 5116008 - DNA, 25 bp, Homo sapien
gcgagggcggcccacaatggagggg

SEQ ID NO: 5116009 - DNA, 25 bp, Homo sapien
tggcgagggcggcccacaatggagg

SEQ ID NO: 5116010 - DNA, 25 bp, Homo sapien
gggcatcatctcctgcgaagcctgc

SEQ ID NO: 5116011 - DNA, 25 bp, Homo sapien
gggtatttgagagttaggatccctc

SEQ ID NO: 5116012 - DNA, 25 bp, Homo sapien
tgagagttaggatccctcgcttgct

SEQ ID NO: 5116013 - DNA, 25 bp, Homo sapien
gccgtgttcaatggggtatttgaga

SEQ ID NO: 5116014 - DNA, 25 bp, Homo sapien
taggatccctcgcttgctctgagcc

SEQ ID NO: 5116015 - DNA, 25 bp, Homo sapien
gcaagagaccaagaaatcagccagg

SEQ ID NO: 5116016 - DNA, 25 bp, Homo sapien
tcaggcagggaaaggtcctccaatg

SEQ ID NO: 5116017 - DNA, 25 bp, Homo sapien
caaagacaggcgttgcagaaacaag

SEQ ID NO: 5116018 - DNA, 25 bp, Homo sapien
cccctgttggttaatgaagagctac

SEQ ID NO: 5116019 - DNA, 25 bp, Homo sapien
ggtgctcttcaggtgctacacgcag

SEQ ID NO: 5116020 - DNA, 25 bp, Homo sapien
ccttgggatttaggggagcctctgt

SEQ ID NO: 5116021 - DNA, 25 bp, Homo sapien
ctgggtcatcttttccctgttggcc

SEQ ID NO: 5116022 - DNA, 25 bp, Homo sapien
gggtgctcttcaggtgctacacgca

SEQ ID NO: 5116023 - DNA, 25 bp, Homo sapien
atttggcaaaaatcacagcacttct

SEQ ID NO: 5116024 - DNA, 25 bp, Homo sapien
aaaagattatttggcaaaaatcaca

SEQ ID NO: 5116025 - DNA, 25 bp, Homo sapien
aaggacaatgaagaataaaagatta

SEQ ID NO: 5116026 - DNA, 25 bp, Homo sapien
taaaggacaatgaagaataaaagat

SEQ ID NO: 5116027 - DNA, 25 bp, Homo sapien
cttgaatggcgacgtacatggcagg

SEQ ID NO: 5116028 - DNA, 25 bp, Homo sapien
tgtcgtgcggccagaggcatagagg

SEQ ID NO: 5116029 - DNA, 25 bp, Homo sapien
gcatagagggagagcacagcttgaa

SEQ ID NO: 5116030 - DNA, 25 bp, Homo sapien
gagagcacagcttgaatggcgacgt

SEQ ID NO: 5116031 - DNA, 25 bp, Homo sapien
taaactgttagctccataatgacaa

SEQ ID NO: 5116032 - DNA, 25 bp, Homo sapien
tacgacactgtatatgccatgcatt

SEQ ID NO: 5116033 - DNA, 25 bp, Homo sapien
gcaaagcacaggatacgacactgta

SEQ ID NO: 5116034 - DNA, 25 bp, Homo sapien
ccttatcacatgcagtgaaattatc

SEQ ID NO: 5116035 - DNA, 25 bp, Homo sapien
catacttgtcaatttgcattaagtc

SEQ ID NO: 5116036 - DNA, 25 bp, Homo sapien
ccagtgagactgtaggcctctggag

SEQ ID NO: 5116037 - DNA, 25 bp, Homo sapien
acacattactggtaatgcatacttg

SEQ ID NO: 5116038 - DNA, 25 bp, Homo sapien
tgcattaagtctacattgcatattc

SEQ ID NO: 5116039 - DNA, 25 bp, Homo sapien
gaggtagtccgtgaggtcacggcca

SEQ ID NO: 5116040 - DNA, 25 bp, Homo sapien
gacattgtgggtgacgccatcacct

SEQ ID NO: 5116041 - DNA, 25 bp, Homo sapien
gtgggtgacgccatcacctgaatcc

SEQ ID NO: 5116042 - DNA, 25 bp, Homo sapien
gtcacaaaggaatagcctctctctg

SEQ ID NO: 5116043 - DNA, 25 bp, Homo sapien
ttgatgtctcgcacaatttctctct

SEQ ID NO: 5116044 - DNA, 25 bp, Homo sapien
cttgatgtctcgcacaatttctctc

SEQ ID NO: 5116045 - DNA, 25 bp, Homo sapien
gggtctcagggcagcggaagcgctc

SEQ ID NO: 5116046 - DNA, 25 bp, Homo sapien
cagggcagcggaagcgctcattgcc

SEQ ID NO: 5116047 - DNA, 25 bp, Homo sapien
aaggctggaagagggtctcagggca

SEQ ID NO: 5116048 - DNA, 25 bp, Homo sapien
tctcagggcagcggaagcgctcatt

SEQ ID NO: 5116049 - DNA, 25 bp, Homo sapien
aagcctccggtcttttatccatgca

SEQ ID NO: 5116050 - DNA, 25 bp, Homo sapien
ccggtcttttatccatgcaatatga

SEQ ID NO: 5116051 - DNA, 25 bp, Homo sapien
gccaagcctccggtcttttatccat

SEQ ID NO: 5116052 - DNA, 25 bp, Homo sapien
gcctggccaagcctccggtctttta

SEQ ID NO: 5116053 - DNA, 25 bp, Homo sapien
tgcctgaagcatatttctaaaggaa

SEQ ID NO: 5116054 - DNA, 25 bp, Homo sapien
gatcttttatactgttgcctgaagc

SEQ ID NO: 5116055 - DNA, 25 bp, Homo sapien
attacaggcgcgaggtattacaccc

SEQ ID NO: 5116056 - DNA, 25 bp, Homo sapien
gcgaggtattacacccggcctgatc

SEQ ID NO: 5116057 - DNA, 25 bp, Homo sapien
gatggaattgtaggttgtctcatga

SEQ ID NO: 5116058 - DNA, 25 bp, Homo sapien
taagtccttacggatgtcaatgtca

SEQ ID NO: 5116059 - DNA, 25 bp, Homo sapien
gttggcatataagtccttacggatg

SEQ ID NO: 5116060 - DNA, 25 bp, Homo sapien
tcatgaattccagcggactccatgc

SEQ ID NO: 5116061 - DNA, 25 bp, Homo sapien
gcatcctgtcagcaatgccagggta

SEQ ID NO: 5116062 - DNA, 25 bp, Homo sapien
cttctgcatcctgtcagcaatgcca

SEQ ID NO: 5116063 - DNA, 25 bp, Homo sapien
tgggggccagggctgtgatctcctt

SEQ ID NO: 5116064 - DNA, 25 bp, Homo sapien
catggtgctgggggccagggctgtg

SEQ ID NO: 5116065 - DNA, 25 bp, Homo sapien
gctcatataagcacacacctgcctg

SEQ ID NO: 5116066 - DNA, 25 bp, Homo sapien
tggtggtcctaaatataagccctac

SEQ ID NO: 5116067 - DNA, 25 bp, Homo sapien
aggactgggaatgcacagccactag

SEQ ID NO: 5116068 - DNA, 25 bp, Homo sapien
aaactccatgaaggctggcacgtac

SEQ ID NO: 5116069 - DNA, 25 bp, Homo sapien
atcagtccccaagggaataagcaag

SEQ ID NO: 5116070 - DNA, 25 bp, Homo sapien
ggtccaaaaatctacttatcccaga

SEQ ID NO: 5116071 - DNA, 25 bp, Homo sapien
caggagaaacattgtgatagattag

SEQ ID NO: 5116072 - DNA, 25 bp, Homo sapien
aacaaatgtggtgaatcatgatcag

SEQ ID NO: 5116073 - DNA, 25 bp, Homo sapien
ccagactgagtacttccgctctggg

SEQ ID NO: 5116074 - DNA, 25 bp, Homo sapien
gcacttcctgtggacaatggagggc

SEQ ID NO: 5116075 - DNA, 25 bp, Homo sapien
agcacttcctgtggacaatggaggg

SEQ ID NO: 5116076 - DNA, 25 bp, Homo sapien
ccccgatccagactgagtacttccg

SEQ ID NO: 5116077 - DNA, 25 bp, Homo sapien
tgtttcatgactggtaacagagtag

SEQ ID NO: 5116078 - DNA, 25 bp, Homo sapien
tttcatgactggtaacagagtagtc

SEQ ID NO: 5116079 - DNA, 25 bp, Homo sapien
ttaatgtttcatgactggtaacaga

SEQ ID NO: 5116080 - DNA, 25 bp, Homo sapien
cagagtagtctcgaggggatccttg

SEQ ID NO: 5116081 - DNA, 25 bp, Homo sapien
tctggaatctgtgtgatcttcgcaa

SEQ ID NO: 5116082 - DNA, 25 bp, Homo sapien
tgagacatagcccaggaaaaaagag

SEQ ID NO: 5116083 - DNA, 25 bp, Homo sapien
tgatagcacctaccttacagcacta

SEQ ID NO: 5116084 - DNA, 25 bp, Homo sapien
aaagtccttagcactgtgtatgaga

SEQ ID NO: 5116085 - DNA, 25 bp, Homo sapien
acagcgatcacttccgccgagagca

SEQ ID NO: 5116086 - DNA, 25 bp, Homo sapien
aggtatcgctgctcactcgctccag

SEQ ID NO: 5116087 - DNA, 25 bp, Homo sapien
gccgagagcacttccgccctaggta

SEQ ID NO: 5116088 - DNA, 25 bp, Homo sapien
acgattcacacagcgatcacttccg

SEQ ID NO: 5116089 - DNA, 25 bp, Homo sapien
aactgaagggtgctcgaagccgact

SEQ ID NO: 5116090 - DNA, 25 bp, Homo sapien
gaggaaacgccctcgagtgggctct

SEQ ID NO: 5116091 - DNA, 25 bp, Homo sapien
acgccctcgagtgggctcttggcca

SEQ ID NO: 5116092 - DNA, 25 bp, Homo sapien
gaagccgacttagaaagaggcggcc

SEQ ID NO: 5116093 - DNA, 25 bp, Homo sapien
ttctcttgcttattcactagagtat

SEQ ID NO: 5116094 - DNA, 25 bp, Homo sapien
tttctcttgcttattcactagagta

SEQ ID NO: 5116095 - DNA, 25 bp, Homo sapien
tccacatggatatcatagcacagga

SEQ ID NO: 5116096 - DNA, 25 bp, Homo sapien
aaaagcagtttaatacattccctgt

SEQ ID NO: 5116097 - DNA, 25 bp, Homo sapien
gggtaccaatgcctaacttccacat

SEQ ID NO: 5116098 - DNA, 25 bp, Homo sapien
caatgcctaacttccacatggatat

SEQ ID NO: 5116099 - DNA, 25 bp, Homo sapien
attctgatttgcttgaggatgttac

SEQ ID NO: 5116100 - DNA, 25 bp, Homo sapien
tcctgaatgggtgctctcattctga

SEQ ID NO: 5116101 - DNA, 25 bp, Homo sapien
cctgaatgggtgctctcattctgat

SEQ ID NO: 5116102 - DNA, 25 bp, Homo sapien
cattctgatttgcttgaggatgtta

SEQ ID NO: 5116103 - DNA, 25 bp, Homo sapien
ttggtcaggacaggggttcaccttc

SEQ ID NO: 5116104 - DNA, 25 bp, Homo sapien
caattttggtcaggacaggggttca

SEQ ID NO: 5116105 - DNA, 25 bp, Homo sapien
tggtcaggacaggggttcaccttcc

SEQ ID NO: 5116106 - DNA, 25 bp, Homo sapien
tatggcttcgtaagtcatgctagat

SEQ ID NO: 5116107 - DNA, 25 bp, Homo sapien
catgctagatgccattagttgctac

SEQ ID NO: 5116108 - DNA, 25 bp, Homo sapien
aattttccttacatgccgctgtctg

SEQ ID NO: 5116109 - DNA, 25 bp, Homo sapien
gaataataggacttagagcagaagg

SEQ ID NO: 5116110 - DNA, 25 bp, Homo sapien
gccaccagtgttctctgttgttata

SEQ ID NO: 5116111 - DNA, 25 bp, Homo sapien
ggccaccagtgttctctgttgttat

SEQ ID NO: 5116112 - DNA, 25 bp, Homo sapien
gcagcatcaaaccttcccttaggac

SEQ ID NO: 5116113 - DNA, 25 bp, Homo sapien
aagcagcatcaaaccttcccttagg

SEQ ID NO: 5116114 - DNA, 25 bp, Homo sapien
agcatgtattgggatgcttcccaaa

SEQ ID NO: 5116115 - DNA, 25 bp, Homo sapien
caaatagcatgtattgggatgcttc

SEQ ID NO: 5116116 - DNA, 25 bp, Homo sapien
ctgcaatgcaaatagcatgtattgg

SEQ ID NO: 5116117 - DNA, 25 bp, Homo sapien
tgtattgggatgcttcccaaatcag

SEQ ID NO: 5116118 - DNA, 25 bp, Homo sapien
tgagtaacttcacaaacgtggactt

SEQ ID NO: 5116119 - DNA, 25 bp, Homo sapien
tctgtagctacgtgccattctgggt

SEQ ID NO: 5116120 - DNA, 25 bp, Homo sapien
cattctgggtaagttttcgtgagta

SEQ ID NO: 5116121 - DNA, 25 bp, Homo sapien
tgccatgttgctacaggttctgtag

SEQ ID NO: 5116122 - DNA, 25 bp, Homo sapien
agactgaggtgggaagatacctgag

SEQ ID NO: 5116123 - DNA, 25 bp, Homo sapien
ctgaggtgggaagatacctgagtcc

SEQ ID NO: 5116124 - DNA, 25 bp, Homo sapien
gtgggaagatacctgagtccaggac

SEQ ID NO: 5116125 - DNA, 25 bp, Homo sapien
ggtgggaagatacctgagtccagga

SEQ ID NO: 5116126 - DNA, 25 bp, Homo sapien
cccaccccagccgagttcaagtgat

SEQ ID NO: 5116127 - DNA, 25 bp, Homo sapien
tcctccccaccccagccgagttcaa

SEQ ID NO: 5116128 - DNA, 25 bp, Homo sapien
ctccccaccccagccgagttcaagt

SEQ ID NO: 5116129 - DNA, 25 bp, Homo sapien
ccccaccccagccgagttcaagtga

SEQ ID NO: 5116130 - DNA, 25 bp, Homo sapien
atccagcaagtttccaagactttgg

SEQ ID NO: 5116131 - DNA, 25 bp, Homo sapien
aagtttccaagactttgggcagtgc

SEQ ID NO: 5116132 - DNA, 25 bp, Homo sapien
ttccaagactttgggcagtgcaggc

SEQ ID NO: 5116133 - DNA, 25 bp, Homo sapien
gtttccaagactttgggcagtgcag

SEQ ID NO: 5116134 - DNA, 25 bp, Homo sapien
aatgtgtaggaccatcgtgctggct

SEQ ID NO: 5116135 - DNA, 25 bp, Homo sapien
atcgtgctggctcccggtacatcat

SEQ ID NO: 5116136 - DNA, 25 bp, Homo sapien
gctgtactttcaggcggctcaaaaa

SEQ ID NO: 5116137 - DNA, 25 bp, Homo sapien
ctccagctgtactttcaggcggctc

SEQ ID NO: 5116138 - DNA, 25 bp, Homo sapien
tggcttcctggcctgtaagagtttc

SEQ ID NO: 5116139 - DNA, 25 bp, Homo sapien
aaagatctgtactggcttcctggcc

SEQ ID NO: 5116140 - DNA, 25 bp, Homo sapien
ctctcaaagatctgtactggcttcc

SEQ ID NO: 5116141 - DNA, 25 bp, Homo sapien
tcaaagatctgtactggcttcctgg

SEQ ID NO: 5116142 - DNA, 25 bp, Homo sapien
gaagtacaactctggacaaatctgt

SEQ ID NO: 5116143 - DNA, 25 bp, Homo sapien
gaccatagcagtgcaggatctgtgc

SEQ ID NO: 5116144 - DNA, 25 bp, Homo sapien
tgcaagatcaaacaggcagcactga

SEQ ID NO: 5116145 - DNA, 25 bp, Homo sapien
gatgacaatctggtagaagtacaac

SEQ ID NO: 5116146 - DNA, 25 bp, Homo sapien
taccctcgggattagaacttgtgat

SEQ ID NO: 5116147 - DNA, 25 bp, Homo sapien
gaagtaaaacctatagcccagccat

SEQ ID NO: 5116148 - DNA, 25 bp, Homo sapien
tacgtacacaaggaacggatagcct

SEQ ID NO: 5116149 - DNA, 25 bp, Homo sapien
gcacctggaatgttgtatgcccaca

SEQ ID NO: 5116150 - DNA, 25 bp, Homo sapien
gagggcaggagaatgggaaatggaa

SEQ ID NO: 5116151 - DNA, 25 bp, Homo sapien
ctggttggaagtgggatgggaatgg

SEQ ID NO: 5116152 - DNA, 25 bp, Homo sapien
gggagggcaggagaatgggaaatgg

SEQ ID NO: 5116153 - DNA, 25 bp, Homo sapien
ggatgggaatggggagggcaggaga

SEQ ID NO: 5116154 - DNA, 25 bp, Homo sapien
tcccacaggagaaaagaatgccagt

SEQ ID NO: 5116155 - DNA, 25 bp, Homo sapien
tagatatgccactcgatgtcactga

SEQ ID NO: 5116156 - DNA, 25 bp, Homo sapien
catgtaatgtgatccggctggcaaa

SEQ ID NO: 5116157 - DNA, 25 bp, Homo sapien
gaatgccagtcctgatagatatgcc

SEQ ID NO: 5116158 - DNA, 25 bp, Homo sapien
agtcctctcctcgttggctggtgtg

SEQ ID NO: 5116159 - DNA, 25 bp, Homo sapien
tttctgcccacaagtctcagttcca

SEQ ID NO: 5116160 - DNA, 25 bp, Homo sapien
tatctggccccagtcacattcaagg

SEQ ID NO: 5116161 - DNA, 25 bp, Homo sapien
atctctaaaaagcatagcctctagc

SEQ ID NO: 5116162 - DNA, 25 bp, Homo sapien
tcctcaatggaagttaaggctgccc

SEQ ID NO: 5116163 - DNA, 25 bp, Homo sapien
gatgttataaagcaaggctgctcct

SEQ ID NO: 5116164 - DNA, 25 bp, Homo sapien
tctcgtgggattggaccagttgcca

SEQ ID NO: 5116165 - DNA, 25 bp, Homo sapien
tcttgggactgggttaattctcgcc

SEQ ID NO: 5116166 - DNA, 25 bp, Homo sapien
tggatttccctgagaagtctaagtc

SEQ ID NO: 5116167 - DNA, 25 bp, Homo sapien
agctgcactctcttgattccatggg

SEQ ID NO: 5116168 - DNA, 25 bp, Homo sapien
ctacaagtggcgagggagagaccct

SEQ ID NO: 5116169 - DNA, 25 bp, Homo sapien
gtcctcatgaggaagacacacctga

SEQ ID NO: 5116170 - DNA, 25 bp, Homo sapien
tgcagctgctctagataggccagct

SEQ ID NO: 5116171 - DNA, 25 bp, Homo sapien
ctggccctctggtacagtctcttca

SEQ ID NO: 5116172 - DNA, 25 bp, Homo sapien
ctctggtacagtctcttcaaacaaa

SEQ ID NO: 5116173 - DNA, 25 bp, Homo sapien
tctagataggccagctcaattcctt

SEQ ID NO: 5116174 - DNA, 25 bp, Homo sapien
gtcttgtgaataagccaggcttcgt

SEQ ID NO: 5116175 - DNA, 25 bp, Homo sapien
ttgtcttgtgaataagccaggcttc

SEQ ID NO: 5116176 - DNA, 25 bp, Homo sapien
ttcgttgtcttgtgaataagccagg

SEQ ID NO: 5116177 - DNA, 25 bp, Homo sapien
cgttgtcttgtgaataagccaggct

SEQ ID NO: 5116178 - DNA, 25 bp, Homo sapien
ttcaataaagttggccggaaacaga

SEQ ID NO: 5116179 - DNA, 25 bp, Homo sapien
caatcacaatgttcagtctagggaa

SEQ ID NO: 5116180 - DNA, 25 bp, Homo sapien
tcaagtttcacatactcgccaagtc

SEQ ID NO: 5116181 - DNA, 25 bp, Homo sapien
caaaccaagcctaaagggaggacag

SEQ ID NO: 5116182 - DNA, 25 bp, Homo sapien
aatcatcattgacatccaacaccag

SEQ ID NO: 5116183 - DNA, 25 bp, Homo sapien
cagcactggaatgttcatcagagcc

SEQ ID NO: 5116184 - DNA, 25 bp, Homo sapien
cagaaaaatcatcattgacatccaa

SEQ ID NO: 5116185 - DNA, 25 bp, Homo sapien
catgaggtcttcttgtttggttact

SEQ ID NO: 5116186 - DNA, 25 bp, Homo sapien
gaatccagtagtctcatttccctag

SEQ ID NO: 5116187 - DNA, 25 bp, Homo sapien
cataggccttggagtgtgaaatgca

SEQ ID NO: 5116188 - DNA, 25 bp, Homo sapien
gatgcaaagcacaagacccatgata

SEQ ID NO: 5116189 - DNA, 25 bp, Homo sapien
ttccctagttttaggatgccttaga

SEQ ID NO: 5116190 - DNA, 25 bp, Homo sapien
aattttcaatggtccacccccaatg

SEQ ID NO: 5116191 - DNA, 25 bp, Homo sapien
cagaattttcaatggtccaccccca

SEQ ID NO: 5116192 - DNA, 25 bp, Homo sapien
ttttcaatggtccacccccaatgca

SEQ ID NO: 5116193 - DNA, 25 bp, Homo sapien
ttaacagaattttcaatggtccacc

SEQ ID NO: 5116194 - DNA, 25 bp, Homo sapien
tacagattctttacaaaggtgttta

SEQ ID NO: 5116195 - DNA, 25 bp, Homo sapien
gaaagtcagggagcccagatcacag

SEQ ID NO: 5116196 - DNA, 25 bp, Homo sapien
caatggcaaagtctaacaataatta

SEQ ID NO: 5116197 - DNA, 25 bp, Homo sapien
gctcttgagcggcagagtgctccag

SEQ ID NO: 5116198 - DNA, 25 bp, Homo sapien
caaaccagctcttgagcggcagagt

SEQ ID NO: 5116199 - DNA, 25 bp, Homo sapien
cctttgggaggactgaagagtttct

SEQ ID NO: 5116200 - DNA, 25 bp, Homo sapien
tggcctttgggaggactgaagagtt

SEQ ID NO: 5116201 - DNA, 25 bp, Homo sapien
aagagtttctgttcagggtagtaag

SEQ ID NO: 5116202 - DNA, 25 bp, Homo sapien
agagtttctgttcagggtagtaaga

SEQ ID NO: 5116203 - DNA, 25 bp, Homo sapien
cctgaccagtttgggcggtgctcac

SEQ ID NO: 5116204 - DNA, 25 bp, Homo sapien
tgctcacggagccaggtacctggca

SEQ ID NO: 5116205 - DNA, 25 bp, Homo sapien
acactcgggcgagtcctggcagaaa

SEQ ID NO: 5116206 - DNA, 25 bp, Homo sapien
acggactggcctgaccagtttgggc

SEQ ID NO: 5116207 - DNA, 25 bp, Homo sapien
catcgcgcgtttgcgtaccgagtca

SEQ ID NO: 5116208 - DNA, 25 bp, Homo sapien
tggctcattccgaggcaggacaatg

SEQ ID NO: 5116209 - DNA, 25 bp, Homo sapien
gaagagtcaccctgggctacgttcc

SEQ ID NO: 5116210 - DNA, 25 bp, Homo sapien
taaaacccggcgcagacactttgaa

SEQ ID NO: 5116211 - DNA, 25 bp, Homo sapien
tcctccagggtctggacgctggaga

SEQ ID NO: 5116212 - DNA, 25 bp, Homo sapien
cctggacccaggcatgagttgagca

SEQ ID NO: 5116213 - DNA, 25 bp, Homo sapien
gagctgagtgagcagtttctcctgg

SEQ ID NO: 5116214 - DNA, 25 bp, Homo sapien
gagtgagcagtttctcctggtattt

SEQ ID NO: 5116215 - DNA, 25 bp, Homo sapien
gacaccagcagcagccctcagaaaa

SEQ ID NO: 5116216 - DNA, 25 bp, Homo sapien
cagcagccctcagaaaagggatcat

SEQ ID NO: 5116217 - DNA, 25 bp, Homo sapien
ccagcagcagccctcagaaaaggga

SEQ ID NO: 5116218 - DNA, 25 bp, Homo sapien
cagcagcagccctcagaaaagggat

SEQ ID NO: 5116219 - DNA, 25 bp, Homo sapien
cagcagtctgatcggactccgtagg

SEQ ID NO: 5116220 - DNA, 25 bp, Homo sapien
ctctgcagcagtctgatcggactcc

SEQ ID NO: 5116221 - DNA, 25 bp, Homo sapien
atcggactccgtagggggccactct

SEQ ID NO: 5116222 - DNA, 25 bp, Homo sapien
tgcagcagtctgatcggactccgta

SEQ ID NO: 5116223 - DNA, 25 bp, Homo sapien
gggcagaaccacagtcgtttcctgc

SEQ ID NO: 5116224 - DNA, 25 bp, Homo sapien
gcagaaccacagtcgtttcctgcca

SEQ ID NO: 5116225 - DNA, 25 bp, Homo sapien
agaaccacagtcgtttcctgccacc

SEQ ID NO: 5116226 - DNA, 25 bp, Homo sapien
gaaccacagtcgtttcctgccacct

SEQ ID NO: 5116227 - DNA, 25 bp, Homo sapien
tgctgccagaggtggggtcataggt

SEQ ID NO: 5116228 - DNA, 25 bp, Homo sapien
atgctgccagaggtggggtcatagg

SEQ ID NO: 5116229 - DNA, 25 bp, Homo sapien
gatgctgccagaggtggggtcatag

SEQ ID NO: 5116230 - DNA, 25 bp, Homo sapien
gctgccagaggtggggtcataggtg

SEQ ID NO: 5116231 - DNA, 25 bp, Homo sapien
catcacctggcgctgagggaagtca

SEQ ID NO: 5116232 - DNA, 25 bp, Homo sapien
tggtacagctagtgcaagcgccaca

SEQ ID NO: 5116233 - DNA, 25 bp, Homo sapien
gggctcacaagtaccacaccgtttc

SEQ ID NO: 5116234 - DNA, 25 bp, Homo sapien
tcataaaggcctggcaggtccggct

SEQ ID NO: 5116235 - DNA, 25 bp, Homo sapien
cagcaggacgataactacccccaac

SEQ ID NO: 5116236 - DNA, 25 bp, Homo sapien
gggccagcaggacgataactacccc

SEQ ID NO: 5116237 - DNA, 25 bp, Homo sapien
agcaggacgataactacccccaaca

SEQ ID NO: 5116238 - DNA, 25 bp, Homo sapien
actgggccagcaggacgataactac

SEQ ID NO: 5116239 - DNA, 25 bp, Homo sapien
ggaagtaccacacagcaggaatgca

SEQ ID NO: 5116240 - DNA, 25 bp, Homo sapien
cacacggctgctaagatctaatggt

SEQ ID NO: 5116241 - DNA, 25 bp, Homo sapien
tctaatggttatggtcccagcagtc

SEQ ID NO: 5116242 - DNA, 25 bp, Homo sapien
aatggtctgatgtccgagaggatcc

SEQ ID NO: 5116243 - DNA, 25 bp, Homo sapien
gagatgttgtagacagctcctcaaa

SEQ ID NO: 5116244 - DNA, 25 bp, Homo sapien
ccatagaatagtccaggtaggtgcc

SEQ ID NO: 5116245 - DNA, 25 bp, Homo sapien
ttgtctccccggcttagagggtcag

SEQ ID NO: 5116246 - DNA, 25 bp, Homo sapien
tcaggactcaggtgagcaatttgcc

SEQ ID NO: 5116247 - DNA, 25 bp, Homo sapien
gagggagacaggcttctcatcctcc

SEQ ID NO: 5116248 - DNA, 25 bp, Homo sapien
ggtagagggagacaggcttctcatc

SEQ ID NO: 5116249 - DNA, 25 bp, Homo sapien
tcttctagagctggtagagggtaga

SEQ ID NO: 5116250 - DNA, 25 bp, Homo sapien
ctcttctagagctggtagagggtag

SEQ ID NO: 5116251 - DNA, 25 bp, Homo sapien
tcagcctttgaaagctgcatcagaa

SEQ ID NO: 5116252 - DNA, 25 bp, Homo sapien
cagcctttgaaagctgcatcagaag

SEQ ID NO: 5116253 - DNA, 25 bp, Homo sapien
agcctttgaaagctgcatcagaaga

SEQ ID NO: 5116254 - DNA, 25 bp, Homo sapien
ttgacagccgctccttgtccccacg

SEQ ID NO: 5116255 - DNA, 25 bp, Homo sapien
cttgacagccgctccttgtccccac

SEQ ID NO: 5116256 - DNA, 25 bp, Homo sapien
ggattatgggcacccaccaccgcac

SEQ ID NO: 5116257 - DNA, 25 bp, Homo sapien
ttatgggcacccaccaccgcaccca

SEQ ID NO: 5116258 - DNA, 25 bp, Homo sapien
tgggcacccaccaccgcacccagat

SEQ ID NO: 5116259 - DNA, 25 bp, Homo sapien
cacccagataatttttagtagagac

SEQ ID NO: 5116260 - DNA, 25 bp, Homo sapien
tgggacacctaaggcccaggtagaa

SEQ ID NO: 5116261 - DNA, 25 bp, Homo sapien
gatttttggattcaccgaagatagg

SEQ ID NO: 5116262 - DNA, 25 bp, Homo sapien
ggagcacccacataggtgtgaaaag

SEQ ID NO: 5116263 - DNA, 25 bp, Homo sapien
gggaacccactcagtttcaggagca

SEQ ID NO: 5116264 - DNA, 25 bp, Homo sapien
tgtgggtctcaggataataatgaga

SEQ ID NO: 5116265 - DNA, 25 bp, Homo sapien
agcactaatgagggctaacaacaag

SEQ ID NO: 5116266 - DNA, 25 bp, Homo sapien
cactaatgagggctaacaacaaggg

SEQ ID NO: 5116267 - DNA, 25 bp, Homo sapien
gataataatgagatagaggctcaga

SEQ ID NO: 5116268 - DNA, 25 bp, Homo sapien
gtgatctggggggtttctcttacaa

SEQ ID NO: 5116269 - DNA, 25 bp, Homo sapien
atttaagtaagcctaggttagctgg

SEQ ID NO: 5116270 - DNA, 25 bp, Homo sapien
ataataatgctgtatccacattaac

SEQ ID NO: 5116271 - DNA, 25 bp, Homo sapien
taagcctaggttagctggtataata

SEQ ID NO: 5116272 - DNA, 25 bp, Homo sapien
cctcctccgtcccctcaacagagct

SEQ ID NO: 5116273 - DNA, 25 bp, Homo sapien
cctgccggttactggtcctcctcca

SEQ ID NO: 5116274 - DNA, 25 bp, Homo sapien
tgaccctgccggttactggtcctcc

SEQ ID NO: 5116275 - DNA, 25 bp, Homo sapien
tccgtgaccctgccggttactggtc

SEQ ID NO: 5116276 - DNA, 25 bp, Homo sapien
acctcgtgatctgcttgcctcagcc

SEQ ID NO: 5116277 - DNA, 25 bp, Homo sapien
tgcctcagcctcctaaagtgctggg

SEQ ID NO: 5116278 - DNA, 25 bp, Homo sapien
taaccaggatggtcttggtctactg

SEQ ID NO: 5116279 - DNA, 25 bp, Homo sapien
attacaggcatagccactgcgcccg

SEQ ID NO: 5116280 - DNA, 25 bp, Homo sapien
gactccaagatagtggtggcaacac

SEQ ID NO: 5116281 - DNA, 25 bp, Homo sapien
cagtagcccattctctgcaaaggaa

SEQ ID NO: 5116282 - DNA, 25 bp, Homo sapien
cctgaagcgaattctcatgggactc

SEQ ID NO: 5116283 - DNA, 25 bp, Homo sapien
tgtagtcaaccttcagagcccagta

SEQ ID NO: 5116284 - DNA, 25 bp, Homo sapien
caaattcagcctggaccatgggtca

SEQ ID NO: 5116285 - DNA, 25 bp, Homo sapien
tcagcctggaccatgggtcagccat

SEQ ID NO: 5116286 - DNA, 25 bp, Homo sapien
tgaacaaattcagcctggaccatgg

SEQ ID NO: 5116287 - DNA, 25 bp, Homo sapien
tgatgaacaaattcagcctggacca

SEQ ID NO: 5116288 - DNA, 25 bp, Homo sapien
tcttccaggcgagcagtatgagctg

SEQ ID NO: 5116289 - DNA, 25 bp, Homo sapien
tgtgtcaaggtcttcgctgccagca

SEQ ID NO: 5116290 - DNA, 25 bp, Homo sapien
ccactcgaggtagtcagggcattct

SEQ ID NO: 5116291 - DNA, 25 bp, Homo sapien
cattctgggccatcgcagttgcagt

SEQ ID NO: 5116292 - DNA, 25 bp, Homo sapien
caaaagatgagtgctcttcaggagg

SEQ ID NO: 5116293 - DNA, 25 bp, Homo sapien
caatggcggtctgcaagctgatgtt

SEQ ID NO: 5116294 - DNA, 25 bp, Homo sapien
tgagggagcccggaggtaagactgg

SEQ ID NO: 5116295 - DNA, 25 bp, Homo sapien
ggcagagctatcaggagcaaaagat

SEQ ID NO: 5116296 - DNA, 25 bp, Homo sapien
ccccaggcttcagggaactcagttc

SEQ ID NO: 5116297 - DNA, 25 bp, Homo sapien
ccggggcgttgctggaggggtgtca

SEQ ID NO: 5116298 - DNA, 25 bp, Homo sapien
gggccaggagctccggggcgttgct

SEQ ID NO: 5116299 - DNA, 25 bp, Homo sapien
ggcttcagggaactcagttctagga

SEQ ID NO: 5116300 - DNA, 25 bp, Homo sapien
tctccttgggtggtctgtctggaag

SEQ ID NO: 5116301 - DNA, 25 bp, Homo sapien
tcgtgcacctgttctaggaagaggc

SEQ ID NO: 5116302 - DNA, 25 bp, Homo sapien
ctcaggccgcttgaatactgactgg

SEQ ID NO: 5116303 - DNA, 25 bp, Homo sapien
gatgtaatcactggcgctgcccaac

SEQ ID NO: 5116304 - DNA, 25 bp, Homo sapien
gcccttccaggacaatctgtcggac

SEQ ID NO: 5116305 - DNA, 25 bp, Homo sapien
ggccggtggatgagcctgcacttcc

SEQ ID NO: 5116306 - DNA, 25 bp, Homo sapien
gaggctggggacctaagcccttcca

SEQ ID NO: 5116307 - DNA, 25 bp, Homo sapien
cggtggatgagcctgcacttcctgg

SEQ ID NO: 5116308 - DNA, 25 bp, Homo sapien
agcagactcttggtgggtgtgtcca

SEQ ID NO: 5116309 - DNA, 25 bp, Homo sapien
tacttaagaggtgactccaagaagc

SEQ ID NO: 5116310 - DNA, 25 bp, Homo sapien
gagggactaggtgcaaatagcgcaa

SEQ ID NO: 5116311 - DNA, 25 bp, Homo sapien
gctgggagacatgtttgctggttct

SEQ ID NO: 5116312 - DNA, 25 bp, Homo sapien
cactagtttgtatgaccttggtaaa

SEQ ID NO: 5116313 - DNA, 25 bp, Homo sapien
gagggaaaggtcatccatactccga

SEQ ID NO: 5116314 - DNA, 25 bp, Homo sapien
tacttggcagggtgcctagaccaga

SEQ ID NO: 5116315 - DNA, 25 bp, Homo sapien
tctcaaaagcttcctaacgggtctc

SEQ ID NO: 5116316 - DNA, 25 bp, Homo sapien
agtgctcgttatacagctttaagtg

SEQ ID NO: 5116317 - DNA, 25 bp, Homo sapien
tttgagaaagtgctcgttatacagc

SEQ ID NO: 5116318 - DNA, 25 bp, Homo sapien
cctgtgcacttaattctatactcat

SEQ ID NO: 5116319 - DNA, 25 bp, Homo sapien
ccaatttttgagaaagtgctcgtta

SEQ ID NO: 5116320 - DNA, 25 bp, Homo sapien
tcctctcctatgtgaagatatagcg

SEQ ID NO: 5116321 - DNA, 25 bp, Homo sapien
taattaggtcaagagggtggcaccc

SEQ ID NO: 5116322 - DNA, 25 bp, Homo sapien
cgaggaggtggctgtctacaagcta

SEQ ID NO: 5116323 - DNA, 25 bp, Homo sapien
gcattctcagcctctacagctgtga

SEQ ID NO: 5116324 - DNA, 25 bp, Homo sapien
tacaaaacaggtcacacattgtatg

SEQ ID NO: 5116325 - DNA, 25 bp, Homo sapien
caggcataagctgttgtgccccacc

SEQ ID NO: 5116326 - DNA, 25 bp, Homo sapien
cataagctgttgtgccccaccaaaa

SEQ ID NO: 5116327 - DNA, 25 bp, Homo sapien
caaaacaggtcacacattgtatgat

SEQ ID NO: 5116328 - DNA, 25 bp, Homo sapien
caagtgagtataatatggaccttca

SEQ ID NO: 5116329 - DNA, 25 bp, Homo sapien
agtataatatggaccttcatctttc

SEQ ID NO: 5116330 - DNA, 25 bp, Homo sapien
gagttcccggatagaggcgaccgtg

SEQ ID NO: 5116331 - DNA, 25 bp, Homo sapien
agttcccggatagaggcgaccgtgg

SEQ ID NO: 5116332 - DNA, 25 bp, Homo sapien
gggacatgaattgggcagacctaca

SEQ ID NO: 5116333 - DNA, 25 bp, Homo sapien
ctgtatattgtctgttacaaggcaa

SEQ ID NO: 5116334 - DNA, 25 bp, Homo sapien
aaatgagaggcgcttaatatccgta

SEQ ID NO: 5116335 - DNA, 25 bp, Homo sapien
tatccgtattccattaacagcacat

SEQ ID NO: 5116336 - DNA, 25 bp, Homo sapien
tagatgaccttctcgatccggatgg

SEQ ID NO: 5116337 - DNA, 25 bp, Homo sapien
ggcaaccgcgggagctctttccctc

SEQ ID NO: 5116338 - DNA, 25 bp, Homo sapien
tccttccccgtgtagatgaccttct

SEQ ID NO: 5116339 - DNA, 25 bp, Homo sapien
tctcgatccggatggctttcccctt

SEQ ID NO: 5116340 - DNA, 25 bp, Homo sapien
tggctcttgagtgggctcaacactc

SEQ ID NO: 5116341 - DNA, 25 bp, Homo sapien
cctgctcagctacatgcagcaaggg

SEQ ID NO: 5116342 - DNA, 25 bp, Homo sapien
tgctcagctacatgcagcaagggga

SEQ ID NO: 5116343 - DNA, 25 bp, Homo sapien
tcgcctgctcagctacatgcagcaa

SEQ ID NO: 5116344 - DNA, 25 bp, Homo sapien
acatagggtatttggcagctgtgta

SEQ ID NO: 5116345 - DNA, 25 bp, Homo sapien
aaaaacatagggtatttggcagctg

SEQ ID NO: 5116346 - DNA, 25 bp, Homo sapien
aaacatagggtatttggcagctgtg

SEQ ID NO: 5116347 - DNA, 25 bp, Homo sapien
aaaacatagggtatttggcagctgt

SEQ ID NO: 5116348 - DNA, 25 bp, Homo sapien
gaataatccgtccttctaagcatct

SEQ ID NO: 5116349 - DNA, 25 bp, Homo sapien
gtggccacagaaccggctccgggct

SEQ ID NO: 5116350 - DNA, 25 bp, Homo sapien
gctccgggctcctgacgctacactg

SEQ ID NO: 5116351 - DNA, 25 bp, Homo sapien
tacactgccaccaagaataatccgt

SEQ ID NO: 5116352 - DNA, 25 bp, Homo sapien
cgcctggaatcttccgtattttgta

SEQ ID NO: 5116353 - DNA, 25 bp, Homo sapien
gaatcttccgtattttgtacaggcc

SEQ ID NO: 5116354 - DNA, 25 bp, Homo sapien
tgcaaccagggcacgcctggaatct

SEQ ID NO: 5116355 - DNA, 25 bp, Homo sapien
tgttctgagccttcagagtgcaacc

SEQ ID NO: 5116356 - DNA, 25 bp, Homo sapien
cagaaaatcgggagaagggcaagac

SEQ ID NO: 5116357 - DNA, 25 bp, Homo sapien
gacagacctggtcacgagtggatcg

SEQ ID NO: 5116358 - DNA, 25 bp, Homo sapien
ggaccactgccttagagcacctgag

SEQ ID NO: 5116359 - DNA, 25 bp, Homo sapien
gccaggcaggcaatacaaatgagga

SEQ ID NO: 5116360 - DNA, 25 bp, Homo sapien
ccatacttccggagggtgtcggtga

SEQ ID NO: 5116361 - DNA, 25 bp, Homo sapien
tcgttgaggccgcatctccggctgg

SEQ ID NO: 5116362 - DNA, 25 bp, Homo sapien
gatgaggatgacgatcacagcgttc

SEQ ID NO: 5116363 - DNA, 25 bp, Homo sapien
tcctggtagagggtgtctccgaggc

SEQ ID NO: 5116364 - DNA, 25 bp, Homo sapien
ggcacatgtacttcacactcgctaa

SEQ ID NO: 5116365 - DNA, 25 bp, Homo sapien
ggtggtaggtacgtgactgtaaaca

SEQ ID NO: 5116366 - DNA, 25 bp, Homo sapien
cattagtgccagtgttatcgacctg

SEQ ID NO: 5116367 - DNA, 25 bp, Homo sapien
ccagccctgttgcatatcttaattg

SEQ ID NO: 5116368 - DNA, 25 bp, Homo sapien
tttgccttggcaagcgcaggtccgg

SEQ ID NO: 5116369 - DNA, 25 bp, Homo sapien
tgcgaggtgtcttgctccgagcata

SEQ ID NO: 5116370 - DNA, 25 bp, Homo sapien
attgtcccctgcgaggcggaacttg

SEQ ID NO: 5116371 - DNA, 25 bp, Homo sapien
cagccgttgaagtacatgctccagg

SEQ ID NO: 5116372 - DNA, 25 bp, Homo sapien
tacaggggagcgacttcggtggcca

SEQ ID NO: 5116373 - DNA, 25 bp, Homo sapien
gcctgaggggccagtcgcttgtaca

SEQ ID NO: 5116374 - DNA, 25 bp, Homo sapien
ccagtcgcttgtacaggggagcgac

SEQ ID NO: 5116375 - DNA, 25 bp, Homo sapien
ctggttctgataggcctgaggggcc

SEQ ID NO: 5116376 - DNA, 25 bp, Homo sapien
ttcagccccagacggcagtcaatcg

SEQ ID NO: 5116377 - DNA, 25 bp, Homo sapien
caatcgctatttcctcgttggtcac

SEQ ID NO: 5116378 - DNA, 25 bp, Homo sapien
acagaagtccatgcaggccgtgacc

SEQ ID NO: 5116379 - DNA, 25 bp, Homo sapien
gaggttatgctggtccttgtgggcg

SEQ ID NO: 5116380 - DNA, 25 bp, Homo sapien
tgcttgatcttctccggagtgctca

SEQ ID NO: 5116381 - DNA, 25 bp, Homo sapien
tccgtgttggccatcttgtacaggg

SEQ ID NO: 5116382 - DNA, 25 bp, Homo sapien
ggaatcttgcccacgcagcgattgt

SEQ ID NO: 5116383 - DNA, 25 bp, Homo sapien
agctgctcatcctcgggaatcttgc

SEQ ID NO: 5116384 - DNA, 25 bp, Homo sapien
cgcgttgccgctgtacttgaaggag

SEQ ID NO: 5116385 - DNA, 25 bp, Homo sapien
cgtcctccagagtgggaagctgcct

SEQ ID NO: 5116386 - DNA, 25 bp, Homo sapien
tgtcagggacgatggcaggactctc

SEQ ID NO: 5116387 - DNA, 25 bp, Homo sapien
gactacctttcagggccgagttgaa

SEQ ID NO: 5116388 - DNA, 25 bp, Homo sapien
ccgccgggcacactcgatgaggatg

SEQ ID NO: 5116389 - DNA, 25 bp, Homo sapien
ttcaccgctcccttgctggggggct

SEQ ID NO: 5116390 - DNA, 25 bp, Homo sapien
cacgccgccgatgttctcgtccagg

SEQ ID NO: 5116391 - DNA, 25 bp, Homo sapien
gggtggcagcggttgggcttcttaa

SEQ ID NO: 5116392 - DNA, 25 bp, Homo sapien
gggccagtgaccttcgtgtaggcat

SEQ ID NO: 5116393 - DNA, 25 bp, Homo sapien
gcgcttcttcccgtagagcttggcc

SEQ ID NO: 5116394 - DNA, 25 bp, Homo sapien
aggacacggtgaccgccgagtctgt

SEQ ID NO: 5116395 - DNA, 25 bp, Homo sapien
ccttcgtgtaggcataggaggacac

SEQ ID NO: 5116396 - DNA, 25 bp, Homo sapien
tgcctagtgaaccatgacatcgtgt

SEQ ID NO: 5116397 - DNA, 25 bp, Homo sapien
caatgacagcatggaggaagcaggc

SEQ ID NO: 5116398 - DNA, 25 bp, Homo sapien
tgtggagactagcaagcttgaagcc

SEQ ID NO: 5116399 - DNA, 25 bp, Homo sapien
tatgagggcaaaagcaccacagaga

SEQ ID NO: 5116400 - DNA, 25 bp, Homo sapien
ttttgtgagaacctgctgcgaagcg

SEQ ID NO: 5116401 - DNA, 25 bp, Homo sapien
ggcttccacgggtcatacagacggt

SEQ ID NO: 5116402 - DNA, 25 bp, Homo sapien
taatggctttcctaccaaagggtga

SEQ ID NO: 5116403 - DNA, 25 bp, Homo sapien
catctactgctgtgtggtacaaagc

SEQ ID NO: 5116404 - DNA, 25 bp, Homo sapien
ggaagtaggccaaatcgctcgctga

SEQ ID NO: 5116405 - DNA, 25 bp, Homo sapien
cgtgtgaagagtgatgagttacccc

SEQ ID NO: 5116406 - DNA, 25 bp, Homo sapien
tgaagttggccatgtactacagcag

SEQ ID NO: 5116407 - DNA, 25 bp, Homo sapien
taatatgccattatacgacctgccc

SEQ ID NO: 5116408 - DNA, 25 bp, Homo sapien
cccacaatattttaaagataccagg

SEQ ID NO: 5116409 - DNA, 25 bp, Homo sapien
cacccacaatattttaaagatacca

SEQ ID NO: 5116410 - DNA, 25 bp, Homo sapien
acccacaatattttaaagataccag

SEQ ID NO: 5116411 - DNA, 25 bp, Homo sapien
ccacaatattttaaagataccagga

SEQ ID NO: 5116412 - DNA, 25 bp, Homo sapien
gagaggtacggacgtcgcccgccat

SEQ ID NO: 5116413 - DNA, 25 bp, Homo sapien
tacttgaacgtgtgaataaccggcc

SEQ ID NO: 5116414 - DNA, 25 bp, Homo sapien
gggccgcctgccttgggtacttgaa

SEQ ID NO: 5116415 - DNA, 25 bp, Homo sapien
ggaagaacccgcgacgacgcctgca

SEQ ID NO: 5116416 - DNA, 25 bp, Homo sapien
tctcctattgattgctatcacctgt

SEQ ID NO: 5116417 - DNA, 25 bp, Homo sapien
tgcccaatcgctacatatgtcttca

SEQ ID NO: 5116418 - DNA, 25 bp, Homo sapien
tctccaagcatctcctattgattgc

SEQ ID NO: 5116419 - DNA, 25 bp, Homo sapien
tcacctgttgcccaatcgctacata

SEQ ID NO: 5116420 - DNA, 25 bp, Homo sapien
ccttattggcagagtgtagtcctca

SEQ ID NO: 5116421 - DNA, 25 bp, Homo sapien
tttcctttcaatttgccaccacagc

SEQ ID NO: 5116422 - DNA, 25 bp, Homo sapien
tatcaagcaccttattggcagagtg

SEQ ID NO: 5116423 - DNA, 25 bp, Homo sapien
gcagagtgtagtcctcagatgtctc

SEQ ID NO: 5116424 - DNA, 25 bp, Homo sapien
gatcaacaagcatgagtccgtccct

SEQ ID NO: 5116425 - DNA, 25 bp, Homo sapien
gaaacagaggtcatccggatcaaca

SEQ ID NO: 5116426 - DNA, 25 bp, Homo sapien
ggtagctgtctatgcatgtgaccaa

SEQ ID NO: 5116427 - DNA, 25 bp, Homo sapien
ggctcattagaaccaatccccatgg

SEQ ID NO: 5116428 - DNA, 25 bp, Homo sapien
catctgtttgttgtcgctgctgaag

SEQ ID NO: 5116429 - DNA, 25 bp, Homo sapien
taatactttaggcattgactagaag

SEQ ID NO: 5116430 - DNA, 25 bp, Homo sapien
tatttttccgaatcaaatttgcaca

SEQ ID NO: 5116431 - DNA, 25 bp, Homo sapien
gcctgtttagtcagtatcacgtatc

SEQ ID NO: 5116432 - DNA, 25 bp, Homo sapien
taggtagcccctccatgaaaccaga

SEQ ID NO: 5116433 - DNA, 25 bp, Homo sapien
cactattattaaggagagcccatac

SEQ ID NO: 5116434 - DNA, 25 bp, Homo sapien
tcctggcggtggcagtttctccgat

SEQ ID NO: 5116435 - DNA, 25 bp, Homo sapien
gatagtggagttcccatatgtccca

SEQ ID NO: 5116436 - DNA, 25 bp, Homo sapien
tgtatccacagggtgcacccaagca

SEQ ID NO: 5116437 - DNA, 25 bp, Homo sapien
gcagccggcaattgtttgttaatcc

SEQ ID NO: 5116438 - DNA, 25 bp, Homo sapien
tgtcctgcaaaatggtcgcagccgg

SEQ ID NO: 5116439 - DNA, 25 bp, Homo sapien
cgatccccgggtccagacgttgttg

SEQ ID NO: 5116440 - DNA, 25 bp, Homo sapien
gaagaacgtgtttaatcccagtggc

SEQ ID NO: 5116441 - DNA, 25 bp, Homo sapien
cacagactggttaggagccaatggt

SEQ ID NO: 5116442 - DNA, 25 bp, Homo sapien
aagttccctgaggtgccggctgact

SEQ ID NO: 5116443 - DNA, 25 bp, Homo sapien
aacagtgtgcggttttccagtggaa

SEQ ID NO: 5116444 - DNA, 25 bp, Homo sapien
tgggaggttgaccatccactcctct

SEQ ID NO: 5116445 - DNA, 25 bp, Homo sapien
tcagccagcacccatgttaccatgg

SEQ ID NO: 5116446 - DNA, 25 bp, Homo sapien
tggaaccgaccaccagagaagttag

SEQ ID NO: 5116447 - DNA, 25 bp, Homo sapien
tggttctgaaggtacctccctaaga

SEQ ID NO: 5116448 - DNA, 25 bp, Homo sapien
agctggctcgccagttttctcagac

SEQ ID NO: 5116449 - DNA, 25 bp, Homo sapien
ctggctcgccagttttctcagacat

SEQ ID NO: 5116450 - DNA, 25 bp, Homo sapien
cagcagctggctcgccagttttctc

SEQ ID NO: 5116451 - DNA, 25 bp, Homo sapien
ttcagcagctggctcgccagttttc

SEQ ID NO: 5116452 - DNA, 25 bp, Homo sapien
acttgggagcaagtcacaccgagga

SEQ ID NO: 5116453 - DNA, 25 bp, Homo sapien
gaggcacaggcagatattccagact

SEQ ID NO: 5116454 - DNA, 25 bp, Homo sapien
tgtttgaagatcctccaccctttga

SEQ ID NO: 5116455 - DNA, 25 bp, Homo sapien
tcagatggacctgccctgaacttgg

SEQ ID NO: 5116456 - DNA, 25 bp, Homo sapien
gccaaaggggtcttgtctttagaca

SEQ ID NO: 5116457 - DNA, 25 bp, Homo sapien
cttcccctccacgaaactgctcagg

SEQ ID NO: 5116458 - DNA, 25 bp, Homo sapien
gacagttctgtcctgctacagagag

SEQ ID NO: 5116459 - DNA, 25 bp, Homo sapien
aaactgctcaggcctcttcatctta

SEQ ID NO: 5116460 - DNA, 25 bp, Homo sapien
ccctatccatgaaacaggccctggg

SEQ ID NO: 5116461 - DNA, 25 bp, Homo sapien
gaggaatgagactttcacgcgggca

SEQ ID NO: 5116462 - DNA, 25 bp, Homo sapien
aatgagactttcacgcgggcaaggg

SEQ ID NO: 5116463 - DNA, 25 bp, Homo sapien
agagcggcgcgagcgaaggcagagg

SEQ ID NO: 5116464 - DNA, 25 bp, Homo sapien
gaggggtattcggatgagggaaggc

SEQ ID NO: 5116465 - DNA, 25 bp, Homo sapien
caggagcacgaggggtattcggatg

SEQ ID NO: 5116466 - DNA, 25 bp, Homo sapien
cacgaggggtattcggatgagggaa

SEQ ID NO: 5116467 - DNA, 25 bp, Homo sapien
gagcacgaggggtattcggatgagg

SEQ ID NO: 5116468 - DNA, 25 bp, Homo sapien
gcttagaagctagactgccagagta

SEQ ID NO: 5116469 - DNA, 25 bp, Homo sapien
tcagcttagaagctagactgccaga

SEQ ID NO: 5116470 - DNA, 25 bp, Homo sapien
tggagcgaaggccaaactcctcagc

SEQ ID NO: 5116471 - DNA, 25 bp, Homo sapien
agaagctagactgccagagtaggga

SEQ ID NO: 5116472 - DNA, 25 bp, Homo sapien
tagcctcggagcttctgactgtgtc

SEQ ID NO: 5116473 - DNA, 25 bp, Homo sapien
tcttccttacaggagcggagcgatc

SEQ ID NO: 5116474 - DNA, 25 bp, Homo sapien
tggaccatcgcggtagcctcggagc

SEQ ID NO: 5116475 - DNA, 25 bp, Homo sapien
tctcaagcgcgaatcaaatccttcc

SEQ ID NO: 5116476 - DNA, 25 bp, Homo sapien
tccacatgcagtcgctcgattccat

SEQ ID NO: 5116477 - DNA, 25 bp, Homo sapien
ttaaactcaggcaaattaagaactg

SEQ ID NO: 5116478 - DNA, 25 bp, Homo sapien
aactggagtcatctcagataccttc

SEQ ID NO: 5116479 - DNA, 25 bp, Homo sapien
gaactgttcgtggactctgctcagc

SEQ ID NO: 5116480 - DNA, 25 bp, Homo sapien
gagaggcttggttgaatttcggcct

SEQ ID NO: 5116481 - DNA, 25 bp, Homo sapien
cacatggcgtcagcttcccttccat

SEQ ID NO: 5116482 - DNA, 25 bp, Homo sapien
agttctaccccatcccacatggcgt

SEQ ID NO: 5116483 - DNA, 25 bp, Homo sapien
gaagactccagaggcgggacgaatt

SEQ ID NO: 5116484 - DNA, 25 bp, Homo sapien
gtaaatcctgcagggtgccaccaga

SEQ ID NO: 5116485 - DNA, 25 bp, Homo sapien
caaaaagctggtagaaaggccaccg

SEQ ID NO: 5116486 - DNA, 25 bp, Homo sapien
taggtgcgcctcatctaaaccatgc

SEQ ID NO: 5116487 - DNA, 25 bp, Homo sapien
tccatccaagtgcaacgctgaaggg

SEQ ID NO: 5116488 - DNA, 25 bp, Homo sapien
cagagtaacagatagtatgggcaac

SEQ ID NO: 5116489 - DNA, 25 bp, Homo sapien
tttcatttcagatggctctgacagc

SEQ ID NO: 5116490 - DNA, 25 bp, Homo sapien
tctgacagcctaggaggaactgaag

SEQ ID NO: 5116491 - DNA, 25 bp, Homo sapien
tagctcagagtaacagatagtatgg

SEQ ID NO: 5116492 - DNA, 25 bp, Homo sapien
tctatttttctaagtcagttaactg

SEQ ID NO: 5116493 - DNA, 25 bp, Homo sapien
taagtcagttaactgtacttctaaa

SEQ ID NO: 5116494 - DNA, 25 bp, Homo sapien
gctacagacttcttattatagaaca

SEQ ID NO: 5116495 - DNA, 25 bp, Homo sapien
gaacagcattctattctacatcaaa

SEQ ID NO: 5116496 - DNA, 25 bp, Homo sapien
tgttttaaagcagccctagtcatgg

SEQ ID NO: 5116497 - DNA, 25 bp, Homo sapien
tatttcagactgtaaaaggccttgg

SEQ ID NO: 5116498 - DNA, 25 bp, Homo sapien
aatcaggcccaaagagcgtaagtcc

SEQ ID NO: 5116499 - DNA, 25 bp, Homo sapien
tgtcaggacagtagtaaaggcagct

SEQ ID NO: 5116500 - DNA, 25 bp, Homo sapien
gctggcacctcttcaagaattaata

SEQ ID NO: 5116501 - DNA, 25 bp, Homo sapien
gataaaaagatacccattgcctgtg

SEQ ID NO: 5116502 - DNA, 25 bp, Homo sapien
tccgagtaagaccttaaggacacag

SEQ ID NO: 5116503 - DNA, 25 bp, Homo sapien
agccaaatcttaagtactgtgtgac

SEQ ID NO: 5116504 - DNA, 25 bp, Homo sapien
tgtctgaaaagtcacgttaatgagg

SEQ ID NO: 5116505 - DNA, 25 bp, Homo sapien
gaaaacatgcctgtaagctccagga

SEQ ID NO: 5116506 - DNA, 25 bp, Homo sapien
taagctccaggataatgtctgaaaa

SEQ ID NO: 5116507 - DNA, 25 bp, Homo sapien
tgaatacaagatcctgcccaggaaa

SEQ ID NO: 5116508 - DNA, 25 bp, Homo sapien
gtggcacagtctcggctctactgca

SEQ ID NO: 5116509 - DNA, 25 bp, Homo sapien
cagtggcacagtctcggctctactg

SEQ ID NO: 5116510 - DNA, 25 bp, Homo sapien
acctccacttcctgggttgaagcga

SEQ ID NO: 5116511 - DNA, 25 bp, Homo sapien
agtggcacagtctcggctctactgc

SEQ ID NO: 5116512 - DNA, 25 bp, Homo sapien
ttttacaggctactttatataccta

SEQ ID NO: 5116513 - DNA, 25 bp, Homo sapien
gcctggcccagagagtattttttat

SEQ ID NO: 5116514 - DNA, 25 bp, Homo sapien
tatttttacaggctactttatatac

SEQ ID NO: 5116515 - DNA, 25 bp, Homo sapien
tacaggctactttatatacctaaaa

SEQ ID NO: 5116516 - DNA, 25 bp, Homo sapien
tattgtcggtgttaaatgccgcccc

SEQ ID NO: 5116517 - DNA, 25 bp, Homo sapien
tagagataatgcctgagcccaacca

SEQ ID NO: 5116518 - DNA, 25 bp, Homo sapien
cccaggagaatgtgcgttgccgcag

SEQ ID NO: 5116519 - DNA, 25 bp, Homo sapien
taagatgctggccttggagtcggat

SEQ ID NO: 5116520 - DNA, 25 bp, Homo sapien
ttttagtccaaattctgtgaggtgg

SEQ ID NO: 5116521 - DNA, 25 bp, Homo sapien
caattttagtccaaattctgtgagg

SEQ ID NO: 5116522 - DNA, 25 bp, Homo sapien
attttagtccaaattctgtgaggtg

SEQ ID NO: 5116523 - DNA, 25 bp, Homo sapien
ccccaattttagtccaaattctgtg

SEQ ID NO: 5116524 - DNA, 25 bp, Homo sapien
tctgatctacgtagggcacaaaaag

SEQ ID NO: 5116525 - DNA, 25 bp, Homo sapien
tgatcccgggatgcaccttgtgcta

SEQ ID NO: 5116526 - DNA, 25 bp, Homo sapien
tcgacccacggtgaaatgcagaagg

SEQ ID NO: 5116527 - DNA, 25 bp, Homo sapien
cacaaagagtgaggttaacagcagg

SEQ ID NO: 5116528 - DNA, 25 bp, Homo sapien
accgcgccggtgactgcgccgggag

SEQ ID NO: 5116529 - DNA, 25 bp, Homo sapien
gggccacgcggttatactgcggcct

SEQ ID NO: 5116530 - DNA, 25 bp, Homo sapien
agaccgcgccggtgactgcgccggg

SEQ ID NO: 5116531 - DNA, 25 bp, Homo sapien
gcgcgggccacgcggttatactgcg

SEQ ID NO: 5116532 - DNA, 25 bp, Homo sapien
gcgaagggagcagctgtgcgcgggc

SEQ ID NO: 5116533 - DNA, 25 bp, Homo sapien
cgacgccccgagtcgcaggagagcg

SEQ ID NO: 5116534 - DNA, 25 bp, Homo sapien
cgccccgagtcgcaggagagcggct

SEQ ID NO: 5116535 - DNA, 25 bp, Homo sapien
gccgactggccacgggccccggcga

SEQ ID NO: 5116536 - DNA, 25 bp, Homo sapien
agagcggctccctccgaaaggcggg

SEQ ID NO: 5116537 - DNA, 25 bp, Homo sapien
ggctccgcgatttcatcagctgcag

SEQ ID NO: 5116538 - DNA, 25 bp, Homo sapien
tgctcttttggaaccctcgcctgtt

SEQ ID NO: 5116539 - DNA, 25 bp, Homo sapien
gcgctgtcggaaggctccgcgtaaa

SEQ ID NO: 5116540 - DNA, 25 bp, Homo sapien
tagggtccccgcaaggacaactcgc

SEQ ID NO: 5116541 - DNA, 25 bp, Homo sapien
tccaacctgacctagggagagattc

SEQ ID NO: 5116542 - DNA, 25 bp, Homo sapien
cactccaacctgacctagggagaga

SEQ ID NO: 5116543 - DNA, 25 bp, Homo sapien
caacctgacctagggagagattccc

SEQ ID NO: 5116544 - DNA, 25 bp, Homo sapien
ctccaacctgacctagggagagatt

SEQ ID NO: 5116545 - DNA, 25 bp, Homo sapien
tcaggtgtggccgtttgttgcctga

SEQ ID NO: 5116546 - DNA, 25 bp, Homo sapien
gccaaccaggatcacactcaggtgt

SEQ ID NO: 5116547 - DNA, 25 bp, Homo sapien
ttttgttgaggacataggagtgact

SEQ ID NO: 5116548 - DNA, 25 bp, Homo sapien
acataggagtgacttgcaggattct

SEQ ID NO: 5116549 - DNA, 25 bp, Homo sapien
gacacagtaatctgtggtaccgtga

SEQ ID NO: 5116550 - DNA, 25 bp, Homo sapien
caggcagaggcatatctgagcctgc

SEQ ID NO: 5116551 - DNA, 25 bp, Homo sapien
agcccttcgaaggaaaggccacctg

SEQ ID NO: 5116552 - DNA, 25 bp, Homo sapien
acccagccacgcgagtggtttcaca

SEQ ID NO: 5116553 - DNA, 25 bp, Homo sapien
gcaactgaacaaggaggccatctac

SEQ ID NO: 5116554 - DNA, 25 bp, Homo sapien
ggcaactgaacaaggaggccatcta

SEQ ID NO: 5116555 - DNA, 25 bp, Homo sapien
tggaagaggcaactgaacaaggagg

SEQ ID NO: 5116556 - DNA, 25 bp, Homo sapien
aagaggcaactgaacaaggaggcca

SEQ ID NO: 5116557 - DNA, 25 bp, Homo sapien
ctgatccaaacacattcgtcctaca

SEQ ID NO: 5116558 - DNA, 25 bp, Homo sapien
acacaccccatggagtagccggtaa

SEQ ID NO: 5116559 - DNA, 25 bp, Homo sapien
tactgatccaaacacattcgtccta

SEQ ID NO: 5116560 - DNA, 25 bp, Homo sapien
tagccggtaacatggaatactgatc

SEQ ID NO: 5116561 - DNA, 25 bp, Homo sapien
ggaaaacaaagtcagatggcctaga

SEQ ID NO: 5116562 - DNA, 25 bp, Homo sapien
caactggagctgtaacttgctacac

SEQ ID NO: 5116563 - DNA, 25 bp, Homo sapien
atggcctagaacatgaacccaattt

SEQ ID NO: 5116564 - DNA, 25 bp, Homo sapien
tgacattaaaagtagtgccagtcca

SEQ ID NO: 5116565 - DNA, 25 bp, Homo sapien
gcagtaacattgcaatgggcattcc

SEQ ID NO: 5116566 - DNA, 25 bp, Homo sapien
cagtaacattgcaatgggcattcca

SEQ ID NO: 5116567 - DNA, 25 bp, Homo sapien
caatgggcattccaacgttttttga

SEQ ID NO: 5116568 - DNA, 25 bp, Homo sapien
attgcaatgggcattccaacgtttt

SEQ ID NO: 5116569 - DNA, 25 bp, Homo sapien
tgagatattgtaacagtggcatcac

SEQ ID NO: 5116570 - DNA, 25 bp, Homo sapien
actgctctttgggagtatatcgatg

SEQ ID NO: 5116571 - DNA, 25 bp, Homo sapien
tatcgatgagatattgtaacagtgg

SEQ ID NO: 5116572 - DNA, 25 bp, Homo sapien
tcaactgctctttgggagtatatcg

SEQ ID NO: 5116573 - DNA, 25 bp, Homo sapien
cttgggtttggcagttacaggatcg

SEQ ID NO: 5116574 - DNA, 25 bp, Homo sapien
attcccacatcaatgactgctgctc

SEQ ID NO: 5116575 - DNA, 25 bp, Homo sapien
aggatcgtgaactctatttattccc

SEQ ID NO: 5116576 - DNA, 25 bp, Homo sapien
gctccttccttgatcatatctgctg

SEQ ID NO: 5116577 - DNA, 25 bp, Homo sapien
ggagggaaaagcatactgactgggc

SEQ ID NO: 5116578 - DNA, 25 bp, Homo sapien
agagggagggaaaagcatactgact

SEQ ID NO: 5116579 - DNA, 25 bp, Homo sapien
gggagggaaaagcatactgactggg

SEQ ID NO: 5116580 - DNA, 25 bp, Homo sapien
gagggagggaaaagcatactgactg

SEQ ID NO: 5116581 - DNA, 25 bp, Homo sapien
ttagccaagtgaggtgacatgtgcc

SEQ ID NO: 5116582 - DNA, 25 bp, Homo sapien
aaattagccaagtgaggtgacatgt

SEQ ID NO: 5116583 - DNA, 25 bp, Homo sapien
gccaagtgaggtgacatgtgcctat

SEQ ID NO: 5116584 - DNA, 25 bp, Homo sapien
aagtgaggtgacatgtgcctatagt

SEQ ID NO: 5116585 - DNA, 25 bp, Homo sapien
agcacttctcgctcttcaagcctca

SEQ ID NO: 5116586 - DNA, 25 bp, Homo sapien
ttctcgctcttcaagcctcagcacc

SEQ ID NO: 5116587 - DNA, 25 bp, Homo sapien
gacttcagcacttctcgctcttcaa

SEQ ID NO: 5116588 - DNA, 25 bp, Homo sapien
acttcagcacttctcgctcttcaag

SEQ ID NO: 5116589 - DNA, 25 bp, Homo sapien
taatcactaggttaatggctgctcc

SEQ ID NO: 5116590 - DNA, 25 bp, Homo sapien
gttgcgtacttacccaagctgccca

SEQ ID NO: 5116591 - DNA, 25 bp, Homo sapien
cgaatgtgtaactgaggtgcttgac

SEQ ID NO: 5116592 - DNA, 25 bp, Homo sapien
tgcatgatactggaatgctccctgg

SEQ ID NO: 5116593 - DNA, 25 bp, Homo sapien
cttccaagggatactgccaagaggt

SEQ ID NO: 5116594 - DNA, 25 bp, Homo sapien
taatgcctactatgaccctgacagc

SEQ ID NO: 5116595 - DNA, 25 bp, Homo sapien
taattcccagcgtctagtgtagtgc

SEQ ID NO: 5116596 - DNA, 25 bp, Homo sapien
gtgcctggtccatagaaagctctca

SEQ ID NO: 5116597 - DNA, 25 bp, Homo sapien
cctggaatcacatttcatgatacat

SEQ ID NO: 5116598 - DNA, 25 bp, Homo sapien
ccacatgttaaatcaaaatgatcct

SEQ ID NO: 5116599 - DNA, 25 bp, Homo sapien
cactggtttttcatacctggaatca

SEQ ID NO: 5116600 - DNA, 25 bp, Homo sapien
aaatgatcctttaaattagtatcac

SEQ ID NO: 5116601 - DNA, 25 bp, Homo sapien
taggttggaccatatgaagttgccc

SEQ ID NO: 5116602 - DNA, 25 bp, Homo sapien
acatccaatttggagagcaactgac

SEQ ID NO: 5116603 - DNA, 25 bp, Homo sapien
acaagccatgtgtttacggaacaag

SEQ ID NO: 5116604 - DNA, 25 bp, Homo sapien
gtataaacccagcacactacttggt

SEQ ID NO: 5116605 - DNA, 25 bp, Homo sapien
agctgaggttctctgccctccagag

SEQ ID NO: 5116606 - DNA, 25 bp, Homo sapien
tcctttcccatccagctgaggttct

SEQ ID NO: 5116607 - DNA, 25 bp, Homo sapien
cttcctttcccatccagctgaggtt

SEQ ID NO: 5116608 - DNA, 25 bp, Homo sapien
ctgaggttctctgccctccagaggc

SEQ ID NO: 5116609 - DNA, 25 bp, Homo sapien
tctgatcttctaactggcgttggaa

SEQ ID NO: 5116610 - DNA, 25 bp, Homo sapien
ggcgttggaagttcataatttcatt

SEQ ID NO: 5116611 - DNA, 25 bp, Homo sapien
ttgtacttgatctgatcttctaact

SEQ ID NO: 5116612 - DNA, 25 bp, Homo sapien
tctaactggcgttggaagttcataa

SEQ ID NO: 5116613 - DNA, 25 bp, Homo sapien
cattcccaagatgtacactgtgaca

SEQ ID NO: 5116614 - DNA, 25 bp, Homo sapien
tgccagtgtgacaaaaccaagcaga

SEQ ID NO: 5116615 - DNA, 25 bp, Homo sapien
cctggcgaggtgctctgtgtaccaa

SEQ ID NO: 5116616 - DNA, 25 bp, Homo sapien
ggttaacgttacctgccccagcatg

SEQ ID NO: 5116617 - DNA, 25 bp, Homo sapien
ttaagctcttcctgccccgttcagc

SEQ ID NO: 5116618 - DNA, 25 bp, Homo sapien
tcttcctgccccgttcagcttcact

SEQ ID NO: 5116619 - DNA, 25 bp, Homo sapien
gtccccttgattgaggacttcaccc

SEQ ID NO: 5116620 - DNA, 25 bp, Homo sapien
agtgaggtccccttgattgaggact

SEQ ID NO: 5116621 - DNA, 25 bp, Homo sapien
gcttcacagtcgcctcatctcctaa

SEQ ID NO: 5116622 - DNA, 25 bp, Homo sapien
caccagcttcacagtcgcctcatct

SEQ ID NO: 5116623 - DNA, 25 bp, Homo sapien
cagcttcacagtcgcctcatctcct

SEQ ID NO: 5116624 - DNA, 25 bp, Homo sapien
accagcttcacagtcgcctcatctc

SEQ ID NO: 5116625 - DNA, 25 bp, Homo sapien
tggctggggccagtagctccctggg

SEQ ID NO: 5116626 - DNA, 25 bp, Homo sapien
gactccgctggcagcacccatcatc

SEQ ID NO: 5116627 - DNA, 25 bp, Homo sapien
gcccacgcgcccagccagtactggg

SEQ ID NO: 5116628 - DNA, 25 bp, Homo sapien
acccatcatccccacgccggtcctc

SEQ ID NO: 5116629 - DNA, 25 bp, Homo sapien
ctctgtgtcagagcggcggccgttt

SEQ ID NO: 5116630 - DNA, 25 bp, Homo sapien
ggagcctggcgatccagctgcacgt

SEQ ID NO: 5116631 - DNA, 25 bp, Homo sapien
tctgcaatgatgagacaggcaccga

SEQ ID NO: 5116632 - DNA, 25 bp, Homo sapien
ggatttgatgcactaatctcctgtc

SEQ ID NO: 5116633 - DNA, 25 bp, Homo sapien
gtgtcaaatgttgcagcagcctcct

SEQ ID NO: 5116634 - DNA, 25 bp, Homo sapien
cctgtgtcaaatgttgcagcagcct

SEQ ID NO: 5116635 - DNA, 25 bp, Homo sapien
tgtgtcaaatgttgcagcagcctcc

SEQ ID NO: 5116636 - DNA, 25 bp, Homo sapien
ctgtgtcaaatgttgcagcagcctc

SEQ ID NO: 5116637 - DNA, 25 bp, Homo sapien
gacttaggtccacgtttatctcttc

SEQ ID NO: 5116638 - DNA, 25 bp, Homo sapien
actcctgaaggacttaggtccacgt

SEQ ID NO: 5116639 - DNA, 25 bp, Homo sapien
tccacgtttatctcttccttactag

SEQ ID NO: 5116640 - DNA, 25 bp, Homo sapien
tgaaggacttaggtccacgtttatc

SEQ ID NO: 5116641 - DNA, 25 bp, Homo sapien
tgaagttgtgaaatggtgcatctct

SEQ ID NO: 5116642 - DNA, 25 bp, Homo sapien
gaagttgtgaaatggtgcatctctc

SEQ ID NO: 5116643 - DNA, 25 bp, Homo sapien
ctgaagttgtgaaatggtgcatctc

SEQ ID NO: 5116644 - DNA, 25 bp, Homo sapien
aaggcagagcccagtacagccgata

SEQ ID NO: 5116645 - DNA, 25 bp, Homo sapien
aggcagagcccagtacagccgatag

SEQ ID NO: 5116646 - DNA, 25 bp, Homo sapien
ggcagagcccagtacagccgatagg

SEQ ID NO: 5116647 - DNA, 25 bp, Homo sapien
tctgcttttggggagtggccggcga

SEQ ID NO: 5116648 - DNA, 25 bp, Homo sapien
tgatgacgtgggtttaaaaagagaa

SEQ ID NO: 5116649 - DNA, 25 bp, Homo sapien
ggttgccatggatacgcctttgcat

SEQ ID NO: 5116650 - DNA, 25 bp, Homo sapien
catggtggtttgaggagattgattt

SEQ ID NO: 5116651 - DNA, 25 bp, Homo sapien
gcatcctgactagaaagacaagtga

SEQ ID NO: 5116652 - DNA, 25 bp, Homo sapien
tagtgatttgtcaggtattgtgggc

SEQ ID NO: 5116653 - DNA, 25 bp, Homo sapien
tgagaggtgaataagaagagagacc

SEQ ID NO: 5116654 - DNA, 25 bp, Homo sapien
ctacatagggaaactcggatattct

SEQ ID NO: 5116655 - DNA, 25 bp, Homo sapien
actgtgatgtataaggtggttggaa

SEQ ID NO: 5116656 - DNA, 25 bp, Homo sapien
tactgtgatgtataaggtggttgga

SEQ ID NO: 5116657 - DNA, 25 bp, Homo sapien
ttactgtgatgtataaggtggttgg

SEQ ID NO: 5116658 - DNA, 25 bp, Homo sapien
ccactggctactcaggtatacttaa

SEQ ID NO: 5116659 - DNA, 25 bp, Homo sapien
caggtatacttaaggtaccgagagg

SEQ ID NO: 5116660 - DNA, 25 bp, Homo sapien
acttaaggtaccgagaggcgaagag

SEQ ID NO: 5116661 - DNA, 25 bp, Homo sapien
agcagcaaacccatgttgaccactg

SEQ ID NO: 5116662 - DNA, 25 bp, Homo sapien
gccttagagttcctccagaactgca

SEQ ID NO: 5116663 - DNA, 25 bp, Homo sapien
ctgaggcgcccctgaatccatactg

SEQ ID NO: 5116664 - DNA, 25 bp, Homo sapien
gatcagagtgactgcgccttagagt

SEQ ID NO: 5116665 - DNA, 25 bp, Homo sapien
tccgttcctgcgagcgtctgaggcg

SEQ ID NO: 5116666 - DNA, 25 bp, Homo sapien
cctacgtgttcgtgaggttgccggc

SEQ ID NO: 5116667 - DNA, 25 bp, Homo sapien
acggaggcgcgactctgccaaccgt

SEQ ID NO: 5116668 - DNA, 25 bp, Homo sapien
gactgcgggaaaagagggttcactc

SEQ ID NO: 5116669 - DNA, 25 bp, Homo sapien
gcgcggagcccctcacagtgcaggt

SEQ ID NO: 5116670 - DNA, 25 bp, Homo sapien
taagtaactctagatttcacacggc

SEQ ID NO: 5116671 - DNA, 25 bp, Homo sapien
gagccatgattgtgcgtgctaccgc

SEQ ID NO: 5116672 - DNA, 25 bp, Homo sapien
gattgatgtaatcccggctgcggtc

SEQ ID NO: 5116673 - DNA, 25 bp, Homo sapien
ttatggtcctaatcggcttcccagg

SEQ ID NO: 5116674 - DNA, 25 bp, Homo sapien
gaacttacatatagagtgctgcagc

SEQ ID NO: 5116675 - DNA, 25 bp, Homo sapien
taatatttagtccacggtagcacca

SEQ ID NO: 5116676 - DNA, 25 bp, Homo sapien
gcctggaaatgttcaaggccccagt

SEQ ID NO: 5116677 - DNA, 25 bp, Homo sapien
caagcttgctgggaaaaacctgtag

SEQ ID NO: 5116678 - DNA, 25 bp, Homo sapien
tcaactggacgcggctggggatcgg

SEQ ID NO: 5116679 - DNA, 25 bp, Homo sapien
tgctgcagatcaccgagtggcgctt

SEQ ID NO: 5116680 - DNA, 25 bp, Homo sapien
tccaaggcggaaaaagtgcggccgc

SEQ ID NO: 5116681 - DNA, 25 bp, Homo sapien
caaggcgaagtacactcctcaggag

SEQ ID NO: 5116682 - DNA, 25 bp, Homo sapien
agtggatggcgcttacagccctcga

SEQ ID NO: 5116683 - DNA, 25 bp, Homo sapien
aagttaaaccttcacattgtctggg

SEQ ID NO: 5116684 - DNA, 25 bp, Homo sapien
tctgggcttgctcactgtgtgctcc

SEQ ID NO: 5116685 - DNA, 25 bp, Homo sapien
actttgctctggtataagggccatg

SEQ ID NO: 5116686 - DNA, 25 bp, Homo sapien
caaggctggttaacttctgtcagac

SEQ ID NO: 5116687 - DNA, 25 bp, Homo sapien
gaaggcatccgcatttgcgaccagg

SEQ ID NO: 5116688 - DNA, 25 bp, Homo sapien
gctgctcccggcaaaccggagcatg

SEQ ID NO: 5116689 - DNA, 25 bp, Homo sapien
tagggagtcagaaggagctcagcga

SEQ ID NO: 5116690 - DNA, 25 bp, Homo sapien
cacttttccaactagtccttagaga

SEQ ID NO: 5116691 - DNA, 25 bp, Homo sapien
aaatccgccgccaccatagagacga

SEQ ID NO: 5116692 - DNA, 25 bp, Homo sapien
gacgcacgtacgcacggcccttggg

SEQ ID NO: 5116693 - DNA, 25 bp, Homo sapien
tgactcctggttcgtagggtccctc

SEQ ID NO: 5116694 - DNA, 25 bp, Homo sapien
atagagacgacgcacgtacgcacgg

SEQ ID NO: 5116695 - DNA, 25 bp, Homo sapien
tacaaacagacgcagcggagatgcc

SEQ ID NO: 5116696 - DNA, 25 bp, Homo sapien
ccgagggcggctatcatcgagcatt

SEQ ID NO: 5116697 - DNA, 25 bp, Homo sapien
cccgcgagccaaataagtgtgatga

SEQ ID NO: 5116698 - DNA, 25 bp, Homo sapien
ccccggcctagatcagaggtaacac

SEQ ID NO: 5116699 - DNA, 25 bp, Homo sapien
tgtgggggtgcagccgaatcaccag

SEQ ID NO: 5116700 - DNA, 25 bp, Homo sapien
gctgcagcacactgaggttgttgca

SEQ ID NO: 5116701 - DNA, 25 bp, Homo sapien
ccctccttagcgtggagctggcgct

SEQ ID NO: 5116702 - DNA, 25 bp, Homo sapien
aaaatacgtgaggttgcgagccggc

SEQ ID NO: 5116703 - DNA, 25 bp, Homo sapien
gaagctgggcgcttggtccatgaac

SEQ ID NO: 5116704 - DNA, 25 bp, Homo sapien
ggagattctgaggttaggacatgcc

SEQ ID NO: 5116705 - DNA, 25 bp, Homo sapien
agattctgaggttaggacatgcctg

SEQ ID NO: 5116706 - DNA, 25 bp, Homo sapien
ggggagattctgaggttaggacatg

SEQ ID NO: 5116707 - DNA, 25 bp, Homo sapien
gagattctgaggttaggacatgcct

SEQ ID NO: 5116708 - DNA, 25 bp, Homo sapien
ctggagggaggtgcatcagtgtagg

SEQ ID NO: 5116709 - DNA, 25 bp, Homo sapien
tcaaagcagggaagatgagtttgtt

SEQ ID NO: 5116710 - DNA, 25 bp, Homo sapien
gtgcatcagtgtagggagaaaatca

SEQ ID NO: 5116711 - DNA, 25 bp, Homo sapien
agaaaatcaaagcagggaagatgag

SEQ ID NO: 5116712 - DNA, 25 bp, Homo sapien
tgaggtgagtaccagcagcactcgg

SEQ ID NO: 5116713 - DNA, 25 bp, Homo sapien
ctgtattcctcgatgtgaggtgagt

SEQ ID NO: 5116714 - DNA, 25 bp, Homo sapien
cgatgtgaggtgagtaccagcagca

SEQ ID NO: 5116715 - DNA, 25 bp, Homo sapien
cctcgatgtgaggtgagtaccagca

SEQ ID NO: 5116716 - DNA, 25 bp, Homo sapien
tgctgagtacttcacatatccgtgt

SEQ ID NO: 5116717 - DNA, 25 bp, Homo sapien
tccgtgttagccttagcccatttaa

SEQ ID NO: 5116718 - DNA, 25 bp, Homo sapien
gggcataacccaactgacctctgct

SEQ ID NO: 5116719 - DNA, 25 bp, Homo sapien
caaaacaaatctgggatgtaggtac

SEQ ID NO: 5116720 - DNA, 25 bp, Homo sapien
cagtgcatgccagtagaccatggtg

SEQ ID NO: 5116721 - DNA, 25 bp, Homo sapien
catgccagtagaccatggtgtagcc

SEQ ID NO: 5116722 - DNA, 25 bp, Homo sapien
gtgcatgccagtagaccatggtgta

SEQ ID NO: 5116723 - DNA, 25 bp, Homo sapien
ccagtgcatgccagtagaccatggt

SEQ ID NO: 5116724 - DNA, 25 bp, Homo sapien
gatcagaaatatcccctcctgcagc

SEQ ID NO: 5116725 - DNA, 25 bp, Homo sapien
ctgaatatgaaaggggagaatgatc

SEQ ID NO: 5116726 - DNA, 25 bp, Homo sapien
ggagaatgatcagaaatatcccctc

SEQ ID NO: 5116727 - DNA, 25 bp, Homo sapien
tgaaaggggagaatgatcagaaata

SEQ ID NO: 5116728 - DNA, 25 bp, Homo sapien
ctggcagcaattccccgggcaaaca

SEQ ID NO: 5116729 - DNA, 25 bp, Homo sapien
ccacacagatgaagtggccactggc

SEQ ID NO: 5116730 - DNA, 25 bp, Homo sapien
tggccactggcagcaattccccggg

SEQ ID NO: 5116731 - DNA, 25 bp, Homo sapien
agtggccactggcagcaattccccg

SEQ ID NO: 5116732 - DNA, 25 bp, Homo sapien
cagtactccagtgatgacttcctga

SEQ ID NO: 5116733 - DNA, 25 bp, Homo sapien
tccatcccagaaaccttagtaacaa

SEQ ID NO: 5116734 - DNA, 25 bp, Homo sapien
cattcactagccttgtcttatccca

SEQ ID NO: 5116735 - DNA, 25 bp, Homo sapien
ggtttactggagtctctgattccac

SEQ ID NO: 5116736 - DNA, 25 bp, Homo sapien
tacaatgttgggaccctttgctggg

SEQ ID NO: 5116737 - DNA, 25 bp, Homo sapien
gccagctcctcgctcagtacaatgt

SEQ ID NO: 5116738 - DNA, 25 bp, Homo sapien
tcgctcagtacaatgttgggaccct

SEQ ID NO: 5116739 - DNA, 25 bp, Homo sapien
accctttgctgggatgtcaaacacc

SEQ ID NO: 5116740 - DNA, 25 bp, Homo sapien
ccaaatcctggaatgcgggtcaata

SEQ ID NO: 5116741 - DNA, 25 bp, Homo sapien
taatgtgaattctggccctgaccgc

SEQ ID NO: 5116742 - DNA, 25 bp, Homo sapien
cctggaatgcgggtcaataatgtga

SEQ ID NO: 5116743 - DNA, 25 bp, Homo sapien
gagtcatctgccgtcaccatgtcag

SEQ ID NO: 5116744 - DNA, 25 bp, Homo sapien
tagatgcacttgtccgttcccatag

SEQ ID NO: 5116745 - DNA, 25 bp, Homo sapien
catgtagatttcctgtagtggcctc

SEQ ID NO: 5116746 - DNA, 25 bp, Homo sapien
atagcctgctgctatgatcccctgc

SEQ ID NO: 5116747 - DNA, 25 bp, Homo sapien
ccgggcatgggcattgatctggaca

SEQ ID NO: 5116748 - DNA, 25 bp, Homo sapien
ccagatatgcacaaaggtgtcctca

SEQ ID NO: 5116749 - DNA, 25 bp, Homo sapien
cagatatgcacaaaggtgtcctcac

SEQ ID NO: 5116750 - DNA, 25 bp, Homo sapien
gccccatgcttgggcccccccattc

SEQ ID NO: 5116751 - DNA, 25 bp, Homo sapien
tgccccatgcttgggcccccccatt

SEQ ID NO: 5116752 - DNA, 25 bp, Homo sapien
ctgccccatgcttgggcccccccat

SEQ ID NO: 5116753 - DNA, 25 bp, Homo sapien
gctgccccatgcttgggccccccca

SEQ ID NO: 5116754 - DNA, 25 bp, Homo sapien
caccacacagctgggtgtcggcgac

SEQ ID NO: 5116755 - DNA, 25 bp, Homo sapien
ctgaggaatcacaaaatcgagcacc

SEQ ID NO: 5116756 - DNA, 25 bp, Homo sapien
tgtcggcgacacactcaccatgaca

SEQ ID NO: 5116757 - DNA, 25 bp, Homo sapien
gaatcacaaaatcgagcaccacaca

SEQ ID NO: 5116758 - DNA, 25 bp, Homo sapien
ctccgcaaggtcatagccagtcaca

SEQ ID NO: 5116759 - DNA, 25 bp, Homo sapien
gaatctccggatctccgcaaggtca

SEQ ID NO: 5116760 - DNA, 25 bp, Homo sapien
tccggatctccgcaaggtcatagcc

SEQ ID NO: 5116761 - DNA, 25 bp, Homo sapien
gctgaatctccggatctccgcaagg

SEQ ID NO: 5116762 - DNA, 25 bp, Homo sapien
ctttatgaataccacagggacaaag

SEQ ID NO: 5116763 - DNA, 25 bp, Homo sapien
gtggagcgggtactttatgaatacc

SEQ ID NO: 5116764 - DNA, 25 bp, Homo sapien
actttatgaataccacagggacaaa

SEQ ID NO: 5116765 - DNA, 25 bp, Homo sapien
gggtggagcgggtactttatgaata

SEQ ID NO: 5116766 - DNA, 25 bp, Homo sapien
gttgccatggtaccgagggactcat

SEQ ID NO: 5116767 - DNA, 25 bp, Homo sapien
tctatagcaagttggccagtctggc

SEQ ID NO: 5116768 - DNA, 25 bp, Homo sapien
gctattgagccgctggatgacatcg

SEQ ID NO: 5116769 - DNA, 25 bp, Homo sapien
gagaaaatgacccatgcgcagttgg

SEQ ID NO: 5116770 - DNA, 25 bp, Homo sapien
gggtccttgtaccatgagatgggta

SEQ ID NO: 5116771 - DNA, 25 bp, Homo sapien
tgaactccaggaagctaatgggaag

SEQ ID NO: 5116772 - DNA, 25 bp, Homo sapien
tttaatcagcgctcttcttccaggc

SEQ ID NO: 5116773 - DNA, 25 bp, Homo sapien
gcagtgctgtgatgaaatcatgaaa

SEQ ID NO: 5116774 - DNA, 25 bp, Homo sapien
gctgtcaacaaggtgatgggtccct

SEQ ID NO: 5116775 - DNA, 25 bp, Homo sapien
ttagagttcctgctggccaacatgc

SEQ ID NO: 5116776 - DNA, 25 bp, Homo sapien
tgttaccggcaacctgaggatgcag

SEQ ID NO: 5116777 - DNA, 25 bp, Homo sapien
tcttctaaggcaggcgtgatcaagg

SEQ ID NO: 5116778 - DNA, 25 bp, Homo sapien
ggccccagctcgactcctaaaatgt

SEQ ID NO: 5116779 - DNA, 25 bp, Homo sapien
aaaagtaaggtgtggacggtctgca

SEQ ID NO: 5116780 - DNA, 25 bp, Homo sapien
gagacgcacggtctgggtacaaacc

SEQ ID NO: 5116781 - DNA, 25 bp, Homo sapien
cattttcatcggatccatgctgccc

SEQ ID NO: 5116782 - DNA, 25 bp, Homo sapien
gatagcctcgcagaggagcctaggt

SEQ ID NO: 5116783 - DNA, 25 bp, Homo sapien
tggccactaggcttaggcggatagc

SEQ ID NO: 5116784 - DNA, 25 bp, Homo sapien
tgaaactgggcaaggtcccagggcc

SEQ ID NO: 5116785 - DNA, 25 bp, Homo sapien
tttcacgacgtgtttaagcaccgcc

SEQ ID NO: 5116786 - DNA, 25 bp, Homo sapien
gaaggataaatgttctccaactgcc

SEQ ID NO: 5116787 - DNA, 25 bp, Homo sapien
agaaggataaatgttctccaactgc

SEQ ID NO: 5116788 - DNA, 25 bp, Homo sapien
aactgccataaaggggctagagctc

SEQ ID NO: 5116789 - DNA, 25 bp, Homo sapien
ctccaactgccataaaggggctaga

SEQ ID NO: 5116790 - DNA, 25 bp, Homo sapien
ttcatggcaaccatccttgtgcggg

SEQ ID NO: 5116791 - DNA, 25 bp, Homo sapien
cgccccgcggaaaaactggagccag

SEQ ID NO: 5116792 - DNA, 25 bp, Homo sapien
ggcacgcttcgcgtccaaaatcgtc

SEQ ID NO: 5116793 - DNA, 25 bp, Homo sapien
aacaaccagttacttccggttcatg

SEQ ID NO: 5116794 - DNA, 25 bp, Homo sapien
ctgcgaggaaaggggactagaaatg

SEQ ID NO: 5116795 - DNA, 25 bp, Homo sapien
tgcgaggaaaggggactagaaatgg

SEQ ID NO: 5116796 - DNA, 25 bp, Homo sapien
gggactagaaatggttgggacacac

SEQ ID NO: 5116797 - DNA, 25 bp, Homo sapien
ggggactagaaatggttgggacaca

SEQ ID NO: 5116798 - DNA, 25 bp, Homo sapien
agaggtgctcccacgccgccacagc

SEQ ID NO: 5116799 - DNA, 25 bp, Homo sapien
cacgccgccacagcttactcatgag

SEQ ID NO: 5116800 - DNA, 25 bp, Homo sapien
gccgccacagcttactcatgaggtc

SEQ ID NO: 5116801 - DNA, 25 bp, Homo sapien
cagaggtgctcccacgccgccacag

SEQ ID NO: 5116802 - DNA, 25 bp, Homo sapien
tctaacacgacctaaattgcttgat

SEQ ID NO: 5116803 - DNA, 25 bp, Homo sapien
agtaccctggactctccgaggagca

SEQ ID NO: 5116804 - DNA, 25 bp, Homo sapien
gagcaagaacgggacttcttttcta

SEQ ID NO: 5116805 - DNA, 25 bp, Homo sapien
ctgtggccgaagtaccctggactct

SEQ ID NO: 5116806 - DNA, 25 bp, Homo sapien
cataacaacagcaccgcctttctcc

SEQ ID NO: 5116807 - DNA, 25 bp, Homo sapien
gaaagcctgtcgacagtgtttggcc

SEQ ID NO: 5116808 - DNA, 25 bp, Homo sapien
agcctgtcgacagtgtttggccgga

SEQ ID NO: 5116809 - DNA, 25 bp, Homo sapien
tgaataacctaagcccctactggat

SEQ ID NO: 5116810 - DNA, 25 bp, Homo sapien
acccttcccgcagtactcgctgtta

SEQ ID NO: 5116811 - DNA, 25 bp, Homo sapien
tttttcttgtgcactccatggccat

SEQ ID NO: 5116812 - DNA, 25 bp, Homo sapien
tttcttgtgcactccatggccatgg

SEQ ID NO: 5116813 - DNA, 25 bp, Homo sapien
tccatggccatgggcacccgccagg

SEQ ID NO: 5116814 - DNA, 25 bp, Homo sapien
ttttcttgtgcactccatggccatg

SEQ ID NO: 5116815 - DNA, 25 bp, Homo sapien
caggggacggctgcgtgggcccggc

SEQ ID NO: 5116816 - DNA, 25 bp, Homo sapien
aggacttgtcccccaagcttgattt

SEQ ID NO: 5116817 - DNA, 25 bp, Homo sapien
cttggcaggggacggctgcgtgggc

SEQ ID NO: 5116818 - DNA, 25 bp, Homo sapien
ccaggacttgtcccccaagcttgat

SEQ ID NO: 5116819 - DNA, 25 bp, Homo sapien
ctgggatcacagtgaaggtaggaac

SEQ ID NO: 5116820 - DNA, 25 bp, Homo sapien
tgggatcacagtgaaggtaggaaca

SEQ ID NO: 5116821 - DNA, 25 bp, Homo sapien
ctcaagggggactccttccataggt

SEQ ID NO: 5116822 - DNA, 25 bp, Homo sapien
gcacggtactgctcaagggggactc

SEQ ID NO: 5116823 - DNA, 25 bp, Homo sapien
attatccacaaccataaggggagag

SEQ ID NO: 5116824 - DNA, 25 bp, Homo sapien
tatccacaaccataaggggagaggg

SEQ ID NO: 5116825 - DNA, 25 bp, Homo sapien
cagggcatccagccacctctgttcc

SEQ ID NO: 5116826 - DNA, 25 bp, Homo sapien
tccattgtcatccagctcccccttc

SEQ ID NO: 5116827 - DNA, 25 bp, Homo sapien
ctaaccctcctgataggtcccgaag

SEQ ID NO: 5116828 - DNA, 25 bp, Homo sapien
accctcctgataggtcccgaagtgg

SEQ ID NO: 5116829 - DNA, 25 bp, Homo sapien
ggaaggttgactccgcgccttctgg

SEQ ID NO: 5116830 - DNA, 25 bp, Homo sapien
tgactccgcgccttctggagcagag

SEQ ID NO: 5116831 - DNA, 25 bp, Homo sapien
ccgcagtcttggtgaggcgctcgat

SEQ ID NO: 5116832 - DNA, 25 bp, Homo sapien
gctcgatagtctggttcttgtgctc

SEQ ID NO: 5116833 - DNA, 25 bp, Homo sapien
ctgcagtagcgcaccatgggggccg

SEQ ID NO: 5116834 - DNA, 25 bp, Homo sapien
atggccgctgagacactgccgtggg

SEQ ID NO: 5116835 - DNA, 25 bp, Homo sapien
ggagcaagcgtagcggcgcggatgg

SEQ ID NO: 5116836 - DNA, 25 bp, Homo sapien
ctgcaggttgatgcggtagcactga

SEQ ID NO: 5116837 - DNA, 25 bp, Homo sapien
tggcctgtgcgggagcaagcgtagc

SEQ ID NO: 5116838 - DNA, 25 bp, Homo sapien
cccccagccgcatctgcaggttgat

SEQ ID NO: 5116839 - DNA, 25 bp, Homo sapien
tttaatagggtggggaagatactca

SEQ ID NO: 5116840 - DNA, 25 bp, Homo sapien
agatactcaagagcgggcatgggac

SEQ ID NO: 5116841 - DNA, 25 bp, Homo sapien
aatagggtggggaagatactcaaga

SEQ ID NO: 5116842 - DNA, 25 bp, Homo sapien
aagatactcaagagcgggcatggga

SEQ ID NO: 5116843 - DNA, 25 bp, Homo sapien
cggagactggtctgcccacaacatc

SEQ ID NO: 5116844 - DNA, 25 bp, Homo sapien
atcccactcccccagttctgtacaa

SEQ ID NO: 5116845 - DNA, 25 bp, Homo sapien
actggtctgcccacaacatcccact

SEQ ID NO: 5116846 - DNA, 25 bp, Homo sapien
tggtctgcccacaacatcccactcc

SEQ ID NO: 5116847 - DNA, 25 bp, Homo sapien
ccgacaggggcaaaatacgtgtata

SEQ ID NO: 5116848 - DNA, 25 bp, Homo sapien
cggagtcccaaaagtcggtccgctg

SEQ ID NO: 5116849 - DNA, 25 bp, Homo sapien
aggcatcgacgcaagctccgacagg

SEQ ID NO: 5116850 - DNA, 25 bp, Homo sapien
tgcagcctggttttttgcggtggtt

SEQ ID NO: 5116851 - DNA, 25 bp, Homo sapien
caaaggccgaagcacgccaggtaat

SEQ ID NO: 5116852 - DNA, 25 bp, Homo sapien
gattggcttgcggtatgttttcgga

SEQ ID NO: 5116853 - DNA, 25 bp, Homo sapien
cggaatgacgccaaaggccgaagca

SEQ ID NO: 5116854 - DNA, 25 bp, Homo sapien
aagagcaaggttgccgctgattggc

SEQ ID NO: 5116855 - DNA, 25 bp, Homo sapien
gcggcaatagccaatacagacaaca

SEQ ID NO: 5116856 - DNA, 25 bp, Homo sapien
agcggcaatagccaatacagacaac

SEQ ID NO: 5116857 - DNA, 25 bp, Homo sapien
ggcaatagccaatacagacaacaga

SEQ ID NO: 5116858 - DNA, 25 bp, Homo sapien
cggcaatagccaatacagacaacag

SEQ ID NO: 5116859 - DNA, 25 bp, Homo sapien
gacaaagagtaggtgaaggttcgac

SEQ ID NO: 5116860 - DNA, 25 bp, Homo sapien
caacaagagcttgtacagacaaaga

SEQ ID NO: 5116861 - DNA, 25 bp, Homo sapien
ccagacaacaagagcttgtacagac

SEQ ID NO: 5116862 - DNA, 25 bp, Homo sapien
gcttgtacagacaaagagtaggtga

SEQ ID NO: 5116863 - DNA, 25 bp, Homo sapien
tcccttgacggacgggccaatagga

SEQ ID NO: 5116864 - DNA, 25 bp, Homo sapien
caatcatcatcgtcccttgacggac

SEQ ID NO: 5116865 - DNA, 25 bp, Homo sapien
catcgtcccttgacggacgggccaa

SEQ ID NO: 5116866 - DNA, 25 bp, Homo sapien
tcatcatcgtcccttgacggacggg

SEQ ID NO: 5116867 - DNA, 25 bp, Homo sapien
actccaccaactaggactcagattg

SEQ ID NO: 5116868 - DNA, 25 bp, Homo sapien
aactaggactcagattgctctgccc

SEQ ID NO: 5116869 - DNA, 25 bp, Homo sapien
ctccgcggccggagcttccatccgg

SEQ ID NO: 5116870 - DNA, 25 bp, Homo sapien
tgaggccaccatcactccgcggccg

SEQ ID NO: 5116871 - DNA, 25 bp, Homo sapien
ctgctgccaccgccatggtccctgc

SEQ ID NO: 5116872 - DNA, 25 bp, Homo sapien
ctctgctgccaccgccatggtccct

SEQ ID NO: 5116873 - DNA, 25 bp, Homo sapien
caccgccatggtccctgcccggccc

SEQ ID NO: 5116874 - DNA, 25 bp, Homo sapien
ccgccatggtccctgcccggcccat

SEQ ID NO: 5116875 - DNA, 25 bp, Homo sapien
cgttcccgctgctggcccgagccat

SEQ ID NO: 5116876 - DNA, 25 bp, Homo sapien
tgctgttgcggcgcccgaagtgccc

SEQ ID NO: 5116877 - DNA, 25 bp, Homo sapien
gagacaaatggctgtcgtgataggt

SEQ ID NO: 5116878 - DNA, 25 bp, Homo sapien
gtggaagagacatgtttaggaactt

SEQ ID NO: 5116879 - DNA, 25 bp, Homo sapien
ttaggaacttcacagtacctttggc

SEQ ID NO: 5116880 - DNA, 25 bp, Homo sapien
aatggctgtcgtgataggttttgga

SEQ ID NO: 5116881 - DNA, 25 bp, Homo sapien
gcagccatgggatgggttctatgag

SEQ ID NO: 5116882 - DNA, 25 bp, Homo sapien
tcactggagagccaccgcaagcttc

SEQ ID NO: 5116883 - DNA, 25 bp, Homo sapien
tctggtcactggagagccaccgcaa

SEQ ID NO: 5116884 - DNA, 25 bp, Homo sapien
ccatgggatgggttctatgaggcta

SEQ ID NO: 5116885 - DNA, 25 bp, Homo sapien
ttgcaagacagagggagcctccctg

SEQ ID NO: 5116886 - DNA, 25 bp, Homo sapien
cagagggagcctccctgggacctca

SEQ ID NO: 5116887 - DNA, 25 bp, Homo sapien
gacagagggagcctccctgggacct

SEQ ID NO: 5116888 - DNA, 25 bp, Homo sapien
tgttgcaagacagagggagcctccc

SEQ ID NO: 5116889 - DNA, 25 bp, Homo sapien
tgacaataggcacatagaaaaagat

SEQ ID NO: 5116890 - DNA, 25 bp, Homo sapien
gttgtgacaataggcacatagaaaa

SEQ ID NO: 5116891 - DNA, 25 bp, Homo sapien
tgtgacaataggcacatagaaaaag

SEQ ID NO: 5116892 - DNA, 25 bp, Homo sapien
ctgttgtgacaataggcacatagaa

SEQ ID NO: 5116893 - DNA, 25 bp, Homo sapien
tccctcaagagaagacgctgccgga

SEQ ID NO: 5116894 - DNA, 25 bp, Homo sapien
ctgtggatgataaaggatggcatcc

SEQ ID NO: 5116895 - DNA, 25 bp, Homo sapien
tgggattgctgtggatgataaagga

SEQ ID NO: 5116896 - DNA, 25 bp, Homo sapien
cctcaagagaagacgctgccggact

SEQ ID NO: 5116897 - DNA, 25 bp, Homo sapien
tcaggctccctaggatagaggaggg

SEQ ID NO: 5116898 - DNA, 25 bp, Homo sapien
aggctccctaggatagaggaggggc

SEQ ID NO: 5116899 - DNA, 25 bp, Homo sapien
ctcaggctccctaggatagaggagg

SEQ ID NO: 5116900 - DNA, 25 bp, Homo sapien
cctcaggctccctaggatagaggag

SEQ ID NO: 5116901 - DNA, 25 bp, Homo sapien
ggtagcggtaggtcatttccaaagc

SEQ ID NO: 5116902 - DNA, 25 bp, Homo sapien
catcccctcggtgctttctgttaag

SEQ ID NO: 5116903 - DNA, 25 bp, Homo sapien
tcagtctcagacaacgggtagcggt

SEQ ID NO: 5116904 - DNA, 25 bp, Homo sapien
aagttgctttcattatcctgcgcgg

SEQ ID NO: 5116905 - DNA, 25 bp, Homo sapien
ctgtgaaccaagttcagcttggaga

SEQ ID NO: 5116906 - DNA, 25 bp, Homo sapien
cctgtgaaccaagttcagcttggag

SEQ ID NO: 5116907 - DNA, 25 bp, Homo sapien
ctgcgggcaaggaggcacttagaac

SEQ ID NO: 5116908 - DNA, 25 bp, Homo sapien
gcaaggaggcacttagaactaaggg

SEQ ID NO: 5116909 - DNA, 25 bp, Homo sapien
cacttagaactaagggggattccag

SEQ ID NO: 5116910 - DNA, 25 bp, Homo sapien
cgggcaaggaggcacttagaactaa

SEQ ID NO: 5116911 - DNA, 25 bp, Homo sapien
gggctggttgttcactcctgggcac

SEQ ID NO: 5116912 - DNA, 25 bp, Homo sapien
ctctcacagaggtagggctggttgt

SEQ ID NO: 5116913 - DNA, 25 bp, Homo sapien
gagctcatagtagtaggtgcagcag

SEQ ID NO: 5116914 - DNA, 25 bp, Homo sapien
tagtagtaggtgcagcagccagtct

SEQ ID NO: 5116915 - DNA, 25 bp, Homo sapien
tgttgttgcagcctgagtttagctc

SEQ ID NO: 5116916 - DNA, 25 bp, Homo sapien
agcctgagtttagctcgtcggtggc

SEQ ID NO: 5116917 - DNA, 25 bp, Homo sapien
gttgatttcacgctgccgctgctgt

SEQ ID NO: 5116918 - DNA, 25 bp, Homo sapien
tcaagcagtgaaccggtagggaaag

SEQ ID NO: 5116919 - DNA, 25 bp, Homo sapien
gccactggtagctgacccagggcat

SEQ ID NO: 5116920 - DNA, 25 bp, Homo sapien
ttgaagacaaccaggtatagggtgc

SEQ ID NO: 5116921 - DNA, 25 bp, Homo sapien
aaattggcatgattggttgaagaca

SEQ ID NO: 5116922 - DNA, 25 bp, Homo sapien
gaaaagggaatgtgagacgatttgg

SEQ ID NO: 5116923 - DNA, 25 bp, Homo sapien
gcggtgaaccacatcctcgtaggct

SEQ ID NO: 5116924 - DNA, 25 bp, Homo sapien
gtgaaccacatcctcgtaggctggg

SEQ ID NO: 5116925 - DNA, 25 bp, Homo sapien
ctgggcggtgaaccacatcctcgta

SEQ ID NO: 5116926 - DNA, 25 bp, Homo sapien
gtgcctgggcggtgaaccacatcct

SEQ ID NO: 5116927 - DNA, 25 bp, Homo sapien
tggcagggtggcactaaccctcacc

SEQ ID NO: 5116928 - DNA, 25 bp, Homo sapien
cagttaaacggcgatagcggcagga

SEQ ID NO: 5116929 - DNA, 25 bp, Homo sapien
tgggaggaaacaccttccacatttg

SEQ ID NO: 5116930 - DNA, 25 bp, Homo sapien
gcacacggggagtagtcctccagat

SEQ ID NO: 5116931 - DNA, 25 bp, Homo sapien
aagctagcacagtcccccaatactg

SEQ ID NO: 5116932 - DNA, 25 bp, Homo sapien
gggcaagtaacccatccaccctctc

SEQ ID NO: 5116933 - DNA, 25 bp, Homo sapien
caagtaacccatccaccctctcaaa

SEQ ID NO: 5116934 - DNA, 25 bp, Homo sapien
tgcgggggtaaagctagcacagtcc

SEQ ID NO: 5116935 - DNA, 25 bp, Homo sapien
ttggataccagtaattcaaaccttc

SEQ ID NO: 5116936 - DNA, 25 bp, Homo sapien
gccccttggataccagtaattcaaa

SEQ ID NO: 5116937 - DNA, 25 bp, Homo sapien
caagacactcatgccactctggctc

SEQ ID NO: 5116938 - DNA, 25 bp, Homo sapien
gacactcatgccactctggctctga

SEQ ID NO: 5116939 - DNA, 25 bp, Homo sapien
cactatgggcatctggagggtcctc

SEQ ID NO: 5116940 - DNA, 25 bp, Homo sapien
tatggccagcgcaattcagagcatg

SEQ ID NO: 5116941 - DNA, 25 bp, Homo sapien
caacgtggtaggcaatgtatggcgc

SEQ ID NO: 5116942 - DNA, 25 bp, Homo sapien
tctttgggagcagtacagtgaccgc

SEQ ID NO: 5116943 - DNA, 25 bp, Homo sapien
gaattggctacttctacggacaagg

SEQ ID NO: 5116944 - DNA, 25 bp, Homo sapien
gaattcctagtacaacgagcagtcc

SEQ ID NO: 5116945 - DNA, 25 bp, Homo sapien
caggttttgggtcaggctgccctca

SEQ ID NO: 5116946 - DNA, 25 bp, Homo sapien
ggtcattcttcccacgaggcttcct

SEQ ID NO: 5116947 - DNA, 25 bp, Homo sapien
catgcctcagcccaacgttagattg

SEQ ID NO: 5116948 - DNA, 25 bp, Homo sapien
caacgcccaggacagacgctacgta

SEQ ID NO: 5116949 - DNA, 25 bp, Homo sapien
gataaacgcaatcccggtggaccaa

SEQ ID NO: 5116950 - DNA, 25 bp, Homo sapien
cgttagattggtttttccgagcctg

SEQ ID NO: 5116951 - DNA, 25 bp, Homo sapien
cattgctgggagtgtagtaactgct

SEQ ID NO: 5116952 - DNA, 25 bp, Homo sapien
tctgtaaagtacctaaaacattgct

SEQ ID NO: 5116953 - DNA, 25 bp, Homo sapien
tctcataggactgttaaggagatta

SEQ ID NO: 5116954 - DNA, 25 bp, Homo sapien
tatttaatctatcagtgcttatttc

SEQ ID NO: 5116955 - DNA, 25 bp, Homo sapien
aaggctgcagaaaacgggcgtattt

SEQ ID NO: 5116956 - DNA, 25 bp, Homo sapien
caccgtcgtatgagaggactattca

SEQ ID NO: 5116957 - DNA, 25 bp, Homo sapien
tcgagttagcctagatgtggcccag

SEQ ID NO: 5116958 - DNA, 25 bp, Homo sapien
catcccggcttgtgttagtgctctc

SEQ ID NO: 5116959 - DNA, 25 bp, Homo sapien
gatcagccccaaggacagtattacc

SEQ ID NO: 5116960 - DNA, 25 bp, Homo sapien
taataggcatttctatacctggatc

SEQ ID NO: 5116961 - DNA, 25 bp, Homo sapien
tcatttactaatattgggctgtagt

SEQ ID NO: 5116962 - DNA, 25 bp, Homo sapien
gggagctacgctaattcatggagaa

SEQ ID NO: 5116963 - DNA, 25 bp, Homo sapien
agggataaagagttgagtgctcggc

SEQ ID NO: 5116964 - DNA, 25 bp, Homo sapien
ctcagggataaagagttgagtgctc

SEQ ID NO: 5116965 - DNA, 25 bp, Homo sapien
ggataaagagttgagtgctcggcca

SEQ ID NO: 5116966 - DNA, 25 bp, Homo sapien
gataaagagttgagtgctcggccag

SEQ ID NO: 5116967 - DNA, 25 bp, Homo sapien
acctggaatccagagtaaagagcaa

SEQ ID NO: 5116968 - DNA, 25 bp, Homo sapien
gtaaagagcaagaccatagcctgga

SEQ ID NO: 5116969 - DNA, 25 bp, Homo sapien
agtaaagagcaagaccatagcctgg

SEQ ID NO: 5116970 - DNA, 25 bp, Homo sapien
cctggaatccagagtaaagagcaag

SEQ ID NO: 5116971 - DNA, 25 bp, Homo sapien
gaggtccagaccacgaaattgccca

SEQ ID NO: 5116972 - DNA, 25 bp, Homo sapien
tgaatcctaaggagcctgggaccag

SEQ ID NO: 5116973 - DNA, 25 bp, Homo sapien
gaattgcatattaaggaagcccaga

SEQ ID NO: 5116974 - DNA, 25 bp, Homo sapien
taagagctccccatctctagctgga

SEQ ID NO: 5116975 - DNA, 25 bp, Homo sapien
caatttctgcccattgcagatcata

SEQ ID NO: 5116976 - DNA, 25 bp, Homo sapien
cattgcagatcatacaatccctctt

SEQ ID NO: 5116977 - DNA, 25 bp, Homo sapien
tgcccattgcagatcatacaatccc

SEQ ID NO: 5116978 - DNA, 25 bp, Homo sapien
tcatacaatccctctttctggcata

SEQ ID NO: 5116979 - DNA, 25 bp, Homo sapien
cagatgtgccaggagccatatgggc

SEQ ID NO: 5116980 - DNA, 25 bp, Homo sapien
ctccctcaagatgggctgtagagca

SEQ ID NO: 5116981 - DNA, 25 bp, Homo sapien
gaggctcctaacaaaagtccgttga

SEQ ID NO: 5116982 - DNA, 25 bp, Homo sapien
cctcagtgttgagtacagaggctcc

SEQ ID NO: 5116983 - DNA, 25 bp, Homo sapien
ctagcttgatccgccccacagtctt

SEQ ID NO: 5116984 - DNA, 25 bp, Homo sapien
cccacagtctttggaatcggcgcca

SEQ ID NO: 5116985 - DNA, 25 bp, Homo sapien
ccacagtctttggaatcggcgccat

SEQ ID NO: 5116986 - DNA, 25 bp, Homo sapien
gcttgatccgccccacagtctttgg

SEQ ID NO: 5116987 - DNA, 25 bp, Homo sapien
tcttcgccgtaatcctctggaccga

SEQ ID NO: 5116988 - DNA, 25 bp, Homo sapien
gtgcagcagcgacctccagtgggca

SEQ ID NO: 5116989 - DNA, 25 bp, Homo sapien
tggaccgaattccttgcaaagtttg

SEQ ID NO: 5116990 - DNA, 25 bp, Homo sapien
taatcctctggaccgaattccttgc

SEQ ID NO: 5116991 - DNA, 25 bp, Homo sapien
caaagaggcgtgaccaaaatgagca

SEQ ID NO: 5116992 - DNA, 25 bp, Homo sapien
agggcatggccggagactacaactc

SEQ ID NO: 5116993 - DNA, 25 bp, Homo sapien
ggcgcccatccgtcgcgggtttctg

SEQ ID NO: 5116994 - DNA, 25 bp, Homo sapien
cctcaagggcatggccggagactac

SEQ ID NO: 5116995 - DNA, 25 bp, Homo sapien
catctgttacatcaggatcatcctc

SEQ ID NO: 5116996 - DNA, 25 bp, Homo sapien
taatcctcaactcagagacccttgt

SEQ ID NO: 5116997 - DNA, 25 bp, Homo sapien
caattctacccacttcgagcatctg

SEQ ID NO: 5116998 - DNA, 25 bp, Homo sapien
tcagagacccttgtctgctcaattc

SEQ ID NO: 5116999 - DNA, 25 bp, Homo sapien
caaatgaaatagtgctgagacggcc

SEQ ID NO: 5117000 - DNA, 25 bp, Homo sapien
gtgtagactttatcttgtcagtgat

SEQ ID NO: 5117001 - DNA, 25 bp, Homo sapien
cagtgatagcagtggacttgatctg

SEQ ID NO: 5117002 - DNA, 25 bp, Homo sapien
tgcgcctggccgtgagtgtagactt

SEQ ID NO: 5117003 - DNA, 25 bp, Homo sapien
taaacagagattggtgaggaggcta

SEQ ID NO: 5117004 - DNA, 25 bp, Homo sapien
caacagtatctagtacataggtggt

SEQ ID NO: 5117005 - DNA, 25 bp, Homo sapien
tttatttggtcactggttgccctca

SEQ ID NO: 5117006 - DNA, 25 bp, Homo sapien
gatgctcctaatttgttgaacagaa

SEQ ID NO: 5117007 - DNA, 25 bp, Homo sapien
ccatccacatggatccggtgcaggc

SEQ ID NO: 5117008 - DNA, 25 bp, Homo sapien
gggatcactctccacaagccgtcga

SEQ ID NO: 5117009 - DNA, 25 bp, Homo sapien
cacatggatccggtgcaggccctgg

SEQ ID NO: 5117010 - DNA, 25 bp, Homo sapien
tccacaagccgtcgaagaaaatcca

SEQ ID NO: 5117011 - DNA, 25 bp, Homo sapien
tgggcccggtccctgcactccccac

SEQ ID NO: 5117012 - DNA, 25 bp, Homo sapien
gaaaggacatgagagcggggtgcat

SEQ ID NO: 5117013 - DNA, 25 bp, Homo sapien
gagagcggggtgcatctgagggtca

SEQ ID NO: 5117014 - DNA, 25 bp, Homo sapien
agggtaccagcctcgatccctgggc

SEQ ID NO: 5117015 - DNA, 25 bp, Homo sapien
ctgaagcaggctgtctgagacactg

SEQ ID NO: 5117016 - DNA, 25 bp, Homo sapien
cctgtcactctgtccagttgatttc

SEQ ID NO: 5117017 - DNA, 25 bp, Homo sapien
ggctcagactcttggggaggataca

SEQ ID NO: 5117018 - DNA, 25 bp, Homo sapien
ggaggatacaggaaggacttgcgga

SEQ ID NO: 5117019 - DNA, 25 bp, Homo sapien
ggcaggcagtatagaaggatcttga

SEQ ID NO: 5117020 - DNA, 25 bp, Homo sapien
ggaaatggagagcaaacatgaaagg

SEQ ID NO: 5117021 - DNA, 25 bp, Homo sapien
taccaattaggggagaatataggga

SEQ ID NO: 5117022 - DNA, 25 bp, Homo sapien
tgggggacggcaaagccctctcctg

SEQ ID NO: 5117023 - DNA, 25 bp, Homo sapien
tgctttctgtttcatgcgctcctcc

SEQ ID NO: 5117024 - DNA, 25 bp, Homo sapien
gctttctgtttcatgcgctcctcct

SEQ ID NO: 5117025 - DNA, 25 bp, Homo sapien
gcaagagagtccactgcaggccatc

SEQ ID NO: 5117026 - DNA, 25 bp, Homo sapien
tcctggcaagagagtccactgcagg

SEQ ID NO: 5117027 - DNA, 25 bp, Homo sapien
ccttgtgtcctcctggcaagagagt

SEQ ID NO: 5117028 - DNA, 25 bp, Homo sapien
tgtcctcctggcaagagagtccact

SEQ ID NO: 5117029 - DNA, 25 bp, Homo sapien
ctgcaccagatggcctgtgagagac

SEQ ID NO: 5117030 - DNA, 25 bp, Homo sapien
cactgcaccagatggcctgtgagag

SEQ ID NO: 5117031 - DNA, 25 bp, Homo sapien
actgcaccagatggcctgtgagaga

SEQ ID NO: 5117032 - DNA, 25 bp, Homo sapien
agatttcgcattccatctttgcagc

SEQ ID NO: 5117033 - DNA, 25 bp, Homo sapien
tactgtatgtcgtgtgctgggctaa

SEQ ID NO: 5117034 - DNA, 25 bp, Homo sapien
ccagcaagaggcctcatgtaaggag

SEQ ID NO: 5117035 - DNA, 25 bp, Homo sapien
gaggcagattcctacctaggcagca

SEQ ID NO: 5117036 - DNA, 25 bp, Homo sapien
cgctcctgtcgcttccgttcctttt

SEQ ID NO: 5117037 - DNA, 25 bp, Homo sapien
aaacgctcctgtcgcttccgttcct

SEQ ID NO: 5117038 - DNA, 25 bp, Homo sapien
tccaaacgctcctgtcgcttccgtt

SEQ ID NO: 5117039 - DNA, 25 bp, Homo sapien
ctgctccaaacgctcctgtcgcttc

SEQ ID NO: 5117040 - DNA, 25 bp, Homo sapien
tcttcaccacactgtccctgaactg

SEQ ID NO: 5117041 - DNA, 25 bp, Homo sapien
ccacactgtccctgaactgggtttc

SEQ ID NO: 5117042 - DNA, 25 bp, Homo sapien
catctccatctgaggtagtgctggc

SEQ ID NO: 5117043 - DNA, 25 bp, Homo sapien
ctggatggggggctctcatctccat

SEQ ID NO: 5117044 - DNA, 25 bp, Homo sapien
gagacacaaaagtgctagatagatc

SEQ ID NO: 5117045 - DNA, 25 bp, Homo sapien
ccaaccttgcgcaaagccagagaca

SEQ ID NO: 5117046 - DNA, 25 bp, Homo sapien
tcccttctctctgcgggcactgagg

SEQ ID NO: 5117047 - DNA, 25 bp, Homo sapien
agtcccttctctctgcgggcactga

SEQ ID NO: 5117048 - DNA, 25 bp, Homo sapien
ctttggactctgctggggcctctcc

SEQ ID NO: 5117049 - DNA, 25 bp, Homo sapien
ttggactctgctggggcctctcctc

SEQ ID NO: 5117050 - DNA, 25 bp, Homo sapien
gactctgctggggcctctcctctct

SEQ ID NO: 5117051 - DNA, 25 bp, Homo sapien
tggactctgctggggcctctcctct

SEQ ID NO: 5117052 - DNA, 25 bp, Homo sapien
tcttgaccctagagccagagaactc

SEQ ID NO: 5117053 - DNA, 25 bp, Homo sapien
ggtatcagccctatcttcctagaca

SEQ ID NO: 5117054 - DNA, 25 bp, Homo sapien
agagaactcccactggaccctgtgt

SEQ ID NO: 5117055 - DNA, 25 bp, Homo sapien
gacagccctacaagatggtatcagc

SEQ ID NO: 5117056 - DNA, 25 bp, Homo sapien
ggtgcaaagtcaagcaggtcttgag

SEQ ID NO: 5117057 - DNA, 25 bp, Homo sapien
tgcaaagtcaagcaggtcttgaggt

SEQ ID NO: 5117058 - DNA, 25 bp, Homo sapien
ctggggatagggtgcaaagtcaagc

SEQ ID NO: 5117059 - DNA, 25 bp, Homo sapien
gatagggtgcaaagtcaagcaggtc

SEQ ID NO: 5117060 - DNA, 25 bp, Homo sapien
cagctgccagcagtcccggagatgc

SEQ ID NO: 5117061 - DNA, 25 bp, Homo sapien
gctctgttgtaaggcagctgccagc

SEQ ID NO: 5117062 - DNA, 25 bp, Homo sapien
ctggctctgttgtaaggcagctgcc

SEQ ID NO: 5117063 - DNA, 25 bp, Homo sapien
gcagctgccagcagtcccggagatg

SEQ ID NO: 5117064 - DNA, 25 bp, Homo sapien
gtgagaaggttcagatggggctacc

SEQ ID NO: 5117065 - DNA, 25 bp, Homo sapien
agaaggttcagatggggctacccca

SEQ ID NO: 5117066 - DNA, 25 bp, Homo sapien
gaaggttcagatggggctaccccag

SEQ ID NO: 5117067 - DNA, 25 bp, Homo sapien
aagagggtgagaaggttcagatggg

SEQ ID NO: 5117068 - DNA, 25 bp, Homo sapien
ggaccacggcctcatggtagaaacc

SEQ ID NO: 5117069 - DNA, 25 bp, Homo sapien
tcctgggggttgagcttcaaggcct

SEQ ID NO: 5117070 - DNA, 25 bp, Homo sapien
ttgagcttcaaggcctgggtgaaga

SEQ ID NO: 5117071 - DNA, 25 bp, Homo sapien
cacggcctcatggtagaaaccattt

SEQ ID NO: 5117072 - DNA, 25 bp, Homo sapien
tgagtcctcaacactctgccctgcc

SEQ ID NO: 5117073 - DNA, 25 bp, Homo sapien
gaaggtggccaaaggtctgagtcct

SEQ ID NO: 5117074 - DNA, 25 bp, Homo sapien
aaggtggccaaaggtctgagtcctc

SEQ ID NO: 5117075 - DNA, 25 bp, Homo sapien
gagtcctcaacactctgccctgccc

SEQ ID NO: 5117076 - DNA, 25 bp, Homo sapien
caggccgtagggtaagggccacctg

SEQ ID NO: 5117077 - DNA, 25 bp, Homo sapien
tgacccaaccgctcatggcagaagg

SEQ ID NO: 5117078 - DNA, 25 bp, Homo sapien
catcaaggccttgcccaggcggaag

SEQ ID NO: 5117079 - DNA, 25 bp, Homo sapien
gccagccaggccgtagggtaagggc

SEQ ID NO: 5117080 - DNA, 25 bp, Homo sapien
ccattgtgacactttggtactagaa

SEQ ID NO: 5117081 - DNA, 25 bp, Homo sapien
ctagtaccacaaccattgtgacact

SEQ ID NO: 5117082 - DNA, 25 bp, Homo sapien
gaaagtcaacatagaccctctcccc

SEQ ID NO: 5117083 - DNA, 25 bp, Homo sapien
cactttggtactagaagcttatcta

SEQ ID NO: 5117084 - DNA, 25 bp, Homo sapien
taggtgtcaaggtgcttaaaagtac

SEQ ID NO: 5117085 - DNA, 25 bp, Homo sapien
agaaaagattaggtgtcaaggtgct

SEQ ID NO: 5117086 - DNA, 25 bp, Homo sapien
gattaggtgtcaaggtgcttaaaag

SEQ ID NO: 5117087 - DNA, 25 bp, Homo sapien
aaagattaggtgtcaaggtgcttaa

SEQ ID NO: 5117088 - DNA, 25 bp, Homo sapien
gcaagagcggagctctcgggctgcg

SEQ ID NO: 5117089 - DNA, 25 bp, Homo sapien
aggcaagagcggagctctcgggctg

SEQ ID NO: 5117090 - DNA, 25 bp, Homo sapien
tcgggctgcgtcaggctgggaccca

SEQ ID NO: 5117091 - DNA, 25 bp, Homo sapien
ctctcgggctgcgtcaggctgggac

SEQ ID NO: 5117092 - DNA, 25 bp, Homo sapien
gtattgcagtcccagccaattctcc

SEQ ID NO: 5117093 - DNA, 25 bp, Homo sapien
tgaggcttggtattgcagtcccagc

SEQ ID NO: 5117094 - DNA, 25 bp, Homo sapien
gcttggtattgcagtcccagccaat

SEQ ID NO: 5117095 - DNA, 25 bp, Homo sapien
gccacctgaggcttggtattgcagt

SEQ ID NO: 5117096 - DNA, 25 bp, Homo sapien
gaggtggtgcacagattcctcctcg

SEQ ID NO: 5117097 - DNA, 25 bp, Homo sapien
tggtgcacagattcctcctcgctga

SEQ ID NO: 5117098 - DNA, 25 bp, Homo sapien
ggtggtgcacagattcctcctcgct

SEQ ID NO: 5117099 - DNA, 25 bp, Homo sapien
ggtgcacagattcctcctcgctgac

SEQ ID NO: 5117100 - DNA, 25 bp, Homo sapien
tcagcatggggaagtggctggaggg

SEQ ID NO: 5117101 - DNA, 25 bp, Homo sapien
cagcatggggaagtggctggagggc

SEQ ID NO: 5117102 - DNA, 25 bp, Homo sapien
tgagggaaggtaggcctgagggtgc

SEQ ID NO: 5117103 - DNA, 25 bp, Homo sapien
ctgagggaaggtaggcctgagggtg

SEQ ID NO: 5117104 - DNA, 25 bp, Homo sapien
ggaaggtaggcctgagggtgccagc

SEQ ID NO: 5117105 - DNA, 25 bp, Homo sapien
agggaaggtaggcctgagggtgcca

SEQ ID NO: 5117106 - DNA, 25 bp, Homo sapien
gaaggataatgcaagagtggagaca

SEQ ID NO: 5117107 - DNA, 25 bp, Homo sapien
gccttctactctgagtctgggagag

SEQ ID NO: 5117108 - DNA, 25 bp, Homo sapien
ggagcccaagtcccaggatgtccca

SEQ ID NO: 5117109 - DNA, 25 bp, Homo sapien
cctcaaagcagtgcttcgagggcac

SEQ ID NO: 5117110 - DNA, 25 bp, Homo sapien
gggatatatacatggccctgcccta

SEQ ID NO: 5117111 - DNA, 25 bp, Homo sapien
gaataaggtctcaaaatatgcagtg

SEQ ID NO: 5117112 - DNA, 25 bp, Homo sapien
gtgaactgtcaccacactatgtccc

SEQ ID NO: 5117113 - DNA, 25 bp, Homo sapien
actatgtcccccaccaagggatata

SEQ ID NO: 5117114 - DNA, 25 bp, Homo sapien
gactgccagggcatcattaactatg

SEQ ID NO: 5117115 - DNA, 25 bp, Homo sapien
actgccagggcatcattaactatgg

SEQ ID NO: 5117116 - DNA, 25 bp, Homo sapien
ctttctctcatcagaagcttcccca

SEQ ID NO: 5117117 - DNA, 25 bp, Homo sapien
aaggcccagatgctttctcactgtc

SEQ ID NO: 5117118 - DNA, 25 bp, Homo sapien
tgctatagcctaaaaacctgaactt

SEQ ID NO: 5117119 - DNA, 25 bp, Homo sapien
agagaaaggcccagatgctttctca

SEQ ID NO: 5117120 - DNA, 25 bp, Homo sapien
tctcactgtctctgctatagcctaa

SEQ ID NO: 5117121 - DNA, 25 bp, Homo sapien
ccaagctctagttggtgaatgaggt

SEQ ID NO: 5117122 - DNA, 25 bp, Homo sapien
tgtgaccccgttcctgtacaccaag

SEQ ID NO: 5117123 - DNA, 25 bp, Homo sapien
gttcctgtacaccaagctctagttg

SEQ ID NO: 5117124 - DNA, 25 bp, Homo sapien
tcagcactgtgaccccgttcctgta

SEQ ID NO: 5117125 - DNA, 25 bp, Homo sapien
catagcaatctggacaggaaatggc

SEQ ID NO: 5117126 - DNA, 25 bp, Homo sapien
ggctatggctagaaaaacagggcac

SEQ ID NO: 5117127 - DNA, 25 bp, Homo sapien
tctgggggctatggctagaaaaaca

SEQ ID NO: 5117128 - DNA, 25 bp, Homo sapien
caagagaggtcagagtcatacatag

SEQ ID NO: 5117129 - DNA, 25 bp, Homo sapien
aagcaggagctggtaagggacttcc

SEQ ID NO: 5117130 - DNA, 25 bp, Homo sapien
tgtggacatgtatggccctaccagc

SEQ ID NO: 5117131 - DNA, 25 bp, Homo sapien
gctaattaccatgcccagtgctggg

SEQ ID NO: 5117132 - DNA, 25 bp, Homo sapien
cagtattgagcaagacccacagggc

SEQ ID NO: 5117133 - DNA, 25 bp, Homo sapien
gaatctgcgattgccccagggatca

SEQ ID NO: 5117134 - DNA, 25 bp, Homo sapien
cagaaccctgaggaaacttggccag

SEQ ID NO: 5117135 - DNA, 25 bp, Homo sapien
gatgagactgaattacagaaccctg

SEQ ID NO: 5117136 - DNA, 25 bp, Homo sapien
gagaccattgtttagggtaggccaa

SEQ ID NO: 5117137 - DNA, 25 bp, Homo sapien
tctatggggagtgacccctctctgg

SEQ ID NO: 5117138 - DNA, 25 bp, Homo sapien
tcaggaatgtcccaagatccagctg

SEQ ID NO: 5117139 - DNA, 25 bp, Homo sapien
ggttgtcaggaatgtcccaagatcc

SEQ ID NO: 5117140 - DNA, 25 bp, Homo sapien
cagctgggtccgtgaagtctgccct

SEQ ID NO: 5117141 - DNA, 25 bp, Homo sapien
caaactcatgtttaggagctgtcca

SEQ ID NO: 5117142 - DNA, 25 bp, Homo sapien
cagctcgagttccagtactgagaaa

SEQ ID NO: 5117143 - DNA, 25 bp, Homo sapien
tctgtggatccgatttcgccccagc

SEQ ID NO: 5117144 - DNA, 25 bp, Homo sapien
tggccgctttgacgaccttagaggg

SEQ ID NO: 5117145 - DNA, 25 bp, Homo sapien
gggtgccttcccaagacagcgaatt

SEQ ID NO: 5117146 - DNA, 25 bp, Homo sapien
tctcttgagaaggatcgtgaacagg

SEQ ID NO: 5117147 - DNA, 25 bp, Homo sapien
taacctataggacagccgagtgagt

SEQ ID NO: 5117148 - DNA, 25 bp, Homo sapien
cagggccccgaaatgtctgaatgga

SEQ ID NO: 5117149 - DNA, 25 bp, Homo sapien
tccgggccggcaatccgagactaaa

SEQ ID NO: 5117150 - DNA, 25 bp, Homo sapien
gagggtcctccaaccctgctacaca

SEQ ID NO: 5117151 - DNA, 25 bp, Homo sapien
ctaaaggtcgtttattgagcaggcc

SEQ ID NO: 5117152 - DNA, 25 bp, Homo sapien
agaattcagtggaatgtccgggccg

SEQ ID NO: 5117153 - DNA, 25 bp, Homo sapien
tggactttgctccctgaactcccac

SEQ ID NO: 5117154 - DNA, 25 bp, Homo sapien
cctctcactccggttcacggacgtt

SEQ ID NO: 5117155 - DNA, 25 bp, Homo sapien
ctgccctctcactccggttcacgga

SEQ ID NO: 5117156 - DNA, 25 bp, Homo sapien
tctcactccggttcacggacgtttc

SEQ ID NO: 5117157 - DNA, 25 bp, Homo sapien
gcggtgggcgcgcagagatctttgc

SEQ ID NO: 5117158 - DNA, 25 bp, Homo sapien
cggagtttcccaccgctggctgctt

SEQ ID NO: 5117159 - DNA, 25 bp, Homo sapien
ggagaaaagtgtcgaggagggcgtc

SEQ ID NO: 5117160 - DNA, 25 bp, Homo sapien
agcgtccagggcggaaaacaactca

SEQ ID NO: 5117161 - DNA, 25 bp, Homo sapien
gaggacgggtccctctctcagcctg

SEQ ID NO: 5117162 - DNA, 25 bp, Homo sapien
tttccaggactcacatccaaaggcg

SEQ ID NO: 5117163 - DNA, 25 bp, Homo sapien
tccaaaggcgacagcaccaggattt

SEQ ID NO: 5117164 - DNA, 25 bp, Homo sapien
atttgctcccgcctttggcacagag

SEQ ID NO: 5117165 - DNA, 25 bp, Homo sapien
tgcgcttccgggacaaggcgtcggt

SEQ ID NO: 5117166 - DNA, 25 bp, Homo sapien
cgcggcgctcctgagtcaaaggaga

SEQ ID NO: 5117167 - DNA, 25 bp, Homo sapien
ctggcttcgcgcgactgagaacgcg

SEQ ID NO: 5117168 - DNA, 25 bp, Homo sapien
gttctcgcctgagggccaaaccttg

SEQ ID NO: 5117169 - DNA, 25 bp, Homo sapien
cgccgctcgtcccgggtctatgggt

SEQ ID NO: 5117170 - DNA, 25 bp, Homo sapien
tggggcccagccgagccttggtctt

SEQ ID NO: 5117171 - DNA, 25 bp, Homo sapien
tcgtcccgggtctatgggtccattc

SEQ ID NO: 5117172 - DNA, 25 bp, Homo sapien
gggtctatgggtccattccccacgc

SEQ ID NO: 5117173 - DNA, 25 bp, Homo sapien
ggagcagtctgactgggactccctg

SEQ ID NO: 5117174 - DNA, 25 bp, Homo sapien
cagctcggcgtcgaaaaagccgggt

SEQ ID NO: 5117175 - DNA, 25 bp, Homo sapien
attaatgtgccgaggccggagaccc

SEQ ID NO: 5117176 - DNA, 25 bp, Homo sapien
aaagccgggtctgaagattaatgtg

SEQ ID NO: 5117177 - DNA, 25 bp, Homo sapien
tgtgggctttgcggtccgggcgggc

SEQ ID NO: 5117178 - DNA, 25 bp, Homo sapien
cttcctgcgaattgaagctctgtgg

SEQ ID NO: 5117179 - DNA, 25 bp, Homo sapien
tccccttcctgcgaattgaagctct

SEQ ID NO: 5117180 - DNA, 25 bp, Homo sapien
gcaaagcttccaaacgtttccaggc

SEQ ID NO: 5117181 - DNA, 25 bp, Homo sapien
gaaggcggcctcaactggataagaa

SEQ ID NO: 5117182 - DNA, 25 bp, Homo sapien
aactccagacttgcgggaaaggcct

SEQ ID NO: 5117183 - DNA, 25 bp, Homo sapien
aaaggcctgagctcgcattggacgc

SEQ ID NO: 5117184 - DNA, 25 bp, Homo sapien
gcctgggtacgcttctttcctgaca

SEQ ID NO: 5117185 - DNA, 25 bp, Homo sapien
tgtatgccatgccagggtccttgtt

SEQ ID NO: 5117186 - DNA, 25 bp, Homo sapien
gaattcctgaaggtagccggcctgc

SEQ ID NO: 5117187 - DNA, 25 bp, Homo sapien
cggtctgactccacggcttctaggg

SEQ ID NO: 5117188 - DNA, 25 bp, Homo sapien
tgccaaacctgggacaaactgtatg

SEQ ID NO: 5117189 - DNA, 25 bp, Homo sapien
gagtgagtgcctatccccttgaaga

SEQ ID NO: 5117190 - DNA, 25 bp, Homo sapien
gagtatggaatgtgtgccaccagcc

SEQ ID NO: 5117191 - DNA, 25 bp, Homo sapien
ggtgacagtgccaatgacccagagc

SEQ ID NO: 5117192 - DNA, 25 bp, Homo sapien
taaaagcgtcctgcaggtgagaagg

SEQ ID NO: 5117193 - DNA, 25 bp, Homo sapien
tgccagcttctgtgcggcctgcctc

SEQ ID NO: 5117194 - DNA, 25 bp, Homo sapien
ttccagtccctagtcttcaccaagc

SEQ ID NO: 5117195 - DNA, 25 bp, Homo sapien
ccacccagcccatgaatccagtttc

SEQ ID NO: 5117196 - DNA, 25 bp, Homo sapien
tgccttggagactgcctagttcttc

SEQ ID NO: 5117197 - DNA, 25 bp, Homo sapien
cgggagggcgaaatctcgccacggg

SEQ ID NO: 5117198 - DNA, 25 bp, Homo sapien
ggacacgtgggacctcactgaggcc

SEQ ID NO: 5117199 - DNA, 25 bp, Homo sapien
actcttcctcctcaacggcgggagg

SEQ ID NO: 5117200 - DNA, 25 bp, Homo sapien
gaaatctcgccacgggggacacgtg

SEQ ID NO: 5117201 - DNA, 25 bp, Homo sapien
gcagggagtcctcaatgcaggactc

SEQ ID NO: 5117202 - DNA, 25 bp, Homo sapien
ccaagtgcagggagtcctcaatgca

SEQ ID NO: 5117203 - DNA, 25 bp, Homo sapien
gagtcctcaatgcaggactctgccc

SEQ ID NO: 5117204 - DNA, 25 bp, Homo sapien
ccggaccccaagtgcagggagtcct

SEQ ID NO: 5117205 - DNA, 25 bp, Homo sapien
gtcctgtgtttcctagaatttcgat

SEQ ID NO: 5117206 - DNA, 25 bp, Homo sapien
cctgttcatgcgcaccggtaattgg

SEQ ID NO: 5117207 - DNA, 25 bp, Homo sapien
atcgtggtgcgccttctggcctctc

SEQ ID NO: 5117208 - DNA, 25 bp, Homo sapien
aacggccgctttgggctggcgatcg

SEQ ID NO: 5117209 - DNA, 25 bp, Homo sapien
tgctctcgaagaccaaatctcgttg

SEQ ID NO: 5117210 - DNA, 25 bp, Homo sapien
ttcgcctctcgatggatccttctgg

SEQ ID NO: 5117211 - DNA, 25 bp, Homo sapien
gtggtccccgcctaaatgctctcga

SEQ ID NO: 5117212 - DNA, 25 bp, Homo sapien
tttcccggctgcgtaagaagcggct

SEQ ID NO: 5117213 - DNA, 25 bp, Homo sapien
ccgctgcccaagtcccgggtggaga

SEQ ID NO: 5117214 - DNA, 25 bp, Homo sapien
taagcgcaaatagacgctgggctgc

SEQ ID NO: 5117215 - DNA, 25 bp, Homo sapien
agtgactgacggatcggcccgggtg

SEQ ID NO: 5117216 - DNA, 25 bp, Homo sapien
agggacgcctgtttgcgccaagcgc

SEQ ID NO: 5117217 - DNA, 25 bp, Homo sapien
cagccgcgcccgtgccagccgctgc

SEQ ID NO: 5117218 - DNA, 25 bp, Homo sapien
cgctgccgggcgtcagcgcagggac

SEQ ID NO: 5117219 - DNA, 25 bp, Homo sapien
ccgctgccgggcgtcagcgcaggga

SEQ ID NO: 5117220 - DNA, 25 bp, Homo sapien
agccgctgccgggcgtcagcgcagg

SEQ ID NO: 5117221 - DNA, 25 bp, Homo sapien
gcgccggggtccccgaaacagcagc

SEQ ID NO: 5117222 - DNA, 25 bp, Homo sapien
cggcggcgcgctccggagagtggcc

SEQ ID NO: 5117223 - DNA, 25 bp, Homo sapien
ctgggccgaggagaaccgccggagg

SEQ ID NO: 5117224 - DNA, 25 bp, Homo sapien
tggggaggatgcctcaggcagcgcc

SEQ ID NO: 5117225 - DNA, 25 bp, Homo sapien
cgctcaggatctgatcgatgccgaa

SEQ ID NO: 5117226 - DNA, 25 bp, Homo sapien
ccgaagctgattggctcgtggtgtg

SEQ ID NO: 5117227 - DNA, 25 bp, Homo sapien
gtttcggggccgctcaggatctgat

SEQ ID NO: 5117228 - DNA, 25 bp, Homo sapien
gaggttgtgtggacccagcatcccc

SEQ ID NO: 5117229 - DNA, 25 bp, Homo sapien
gagaacgccccattctccccatgac

SEQ ID NO: 5117230 - DNA, 25 bp, Homo sapien
cgagaacgccccattctccccatga

SEQ ID NO: 5117231 - DNA, 25 bp, Homo sapien
ccgagaacgccccattctccccatg

SEQ ID NO: 5117232 - DNA, 25 bp, Homo sapien
gtgagccggcgggaccgtagcccga

SEQ ID NO: 5117233 - DNA, 25 bp, Homo sapien
cgtagcccgaggctccgtggtatcc

SEQ ID NO: 5117234 - DNA, 25 bp, Homo sapien
tagcccgaggctccgtggtatccac

SEQ ID NO: 5117235 - DNA, 25 bp, Homo sapien
gaccgtagcccgaggctccgtggta

SEQ ID NO: 5117236 - DNA, 25 bp, Homo sapien
cgcagggacgcggatcacgccgcct

SEQ ID NO: 5117237 - DNA, 25 bp, Homo sapien
ccgtgagccggtccttggcaaagcg

SEQ ID NO: 5117238 - DNA, 25 bp, Homo sapien
gaaggtgagtcccgctaggcctccg

SEQ ID NO: 5117239 - DNA, 25 bp, Homo sapien
atcacgccgcctgggcccactccgg

SEQ ID NO: 5117240 - DNA, 25 bp, Homo sapien
gatcccctgggaggatctagtggga

SEQ ID NO: 5117241 - DNA, 25 bp, Homo sapien
gacgctggaggggtcagacaacctc

SEQ ID NO: 5117242 - DNA, 25 bp, Homo sapien
gctaagaaatgaggagacggggtca

SEQ ID NO: 5117243 - DNA, 25 bp, Homo sapien
cagagtcgggcgtgacgctggaggg

SEQ ID NO: 5117244 - DNA, 25 bp, Homo sapien
gtcccagagaagggcgagagcgcag

SEQ ID NO: 5117245 - DNA, 25 bp, Homo sapien
tgtgagcgggagaaggacgtgcgcg

SEQ ID NO: 5117246 - DNA, 25 bp, Homo sapien
acctgtgagcgggagaaggacgtgc

SEQ ID NO: 5117247 - DNA, 25 bp, Homo sapien
ggtaggggtggcctatgcggcgcgt

SEQ ID NO: 5117248 - DNA, 25 bp, Homo sapien
cacttggtgcgtcggttctggaacc

SEQ ID NO: 5117249 - DNA, 25 bp, Homo sapien
cttggtgcgtcggttctggaaccac

SEQ ID NO: 5117250 - DNA, 25 bp, Homo sapien
tggtgcgtcggttctggaaccacgt

SEQ ID NO: 5117251 - DNA, 25 bp, Homo sapien
ccacttggtgcgtcggttctggaac

SEQ ID NO: 5117252 - DNA, 25 bp, Homo sapien
ggcgcccgccgcgtcgcttctcacc

SEQ ID NO: 5117253 - DNA, 25 bp, Homo sapien
caccaggccctgctcgggaacccca

SEQ ID NO: 5117254 - DNA, 25 bp, Homo sapien
ccaggccctgctcgggaaccccagt

SEQ ID NO: 5117255 - DNA, 25 bp, Homo sapien
ccgccgcgtcgcttctcaccaggcc

SEQ ID NO: 5117256 - DNA, 25 bp, Homo sapien
gaggcgagcccggacactgaagcca

SEQ ID NO: 5117257 - DNA, 25 bp, Homo sapien
gaagccactttgttgtcctcggccc

SEQ ID NO: 5117258 - DNA, 25 bp, Homo sapien
agcggccgtggcaacgcgtcctgct

SEQ ID NO: 5117259 - DNA, 25 bp, Homo sapien
ggcaacgcgtcctgctgcagatgca

SEQ ID NO: 5117260 - DNA, 25 bp, Homo sapien
tatgtgacaccggagccagattttc

SEQ ID NO: 5117261 - DNA, 25 bp, Homo sapien
tgcatctgcgcaacgctggcttggg

SEQ ID NO: 5117262 - DNA, 25 bp, Homo sapien
ggtttcggtcacaatcagccagcct

SEQ ID NO: 5117263 - DNA, 25 bp, Homo sapien
tgaacacacatgacaacgtgaggct

SEQ ID NO: 5117264 - DNA, 25 bp, Homo sapien
tatactgcctattcctctccctggg

SEQ ID NO: 5117265 - DNA, 25 bp, Homo sapien
tgagtaacttgcctcccagtgagag

SEQ ID NO: 5117266 - DNA, 25 bp, Homo sapien
taaaccacagtctacatagggaagg

SEQ ID NO: 5117267 - DNA, 25 bp, Homo sapien
tctaaggctaaggattacgggagtc

SEQ ID NO: 5117268 - DNA, 25 bp, Homo sapien
tagagaccagacaacacctagaggt

SEQ ID NO: 5117269 - DNA, 25 bp, Homo sapien
gggaaattttatgcagccagctgac

SEQ ID NO: 5117270 - DNA, 25 bp, Homo sapien
gagcagaatcgcagagaccttcaga

SEQ ID NO: 5117271 - DNA, 25 bp, Homo sapien
ttgtgccaagcccataaacttcggg

SEQ ID NO: 5117272 - DNA, 25 bp, Homo sapien
ccagtgaatacggtaggtaggatct

SEQ ID NO: 5117273 - DNA, 25 bp, Homo sapien
gctaccatcactctagaccagtctt

SEQ ID NO: 5117274 - DNA, 25 bp, Homo sapien
ggtaggatctgccaatggtaggtcc

SEQ ID NO: 5117275 - DNA, 25 bp, Homo sapien
gctcagaactgaactcaaatgctct

SEQ ID NO: 5117276 - DNA, 25 bp, Homo sapien
gcttgtagagtttgacagttgcctg

SEQ ID NO: 5117277 - DNA, 25 bp, Homo sapien
caagagattctgtgcttccacgagg

SEQ ID NO: 5117278 - DNA, 25 bp, Homo sapien
tgactaggctggctggattcccatc

SEQ ID NO: 5117279 - DNA, 25 bp, Homo sapien
taggtggtcaagcttgtgggccctt

SEQ ID NO: 5117280 - DNA, 25 bp, Homo sapien
cccagattcgtagtgcggaccatgt

SEQ ID NO: 5117281 - DNA, 25 bp, Homo sapien
agtccttcagaagtgcacgccggga

SEQ ID NO: 5117282 - DNA, 25 bp, Homo sapien
tgactcgcaccggtaagagacccgg

SEQ ID NO: 5117283 - DNA, 25 bp, Homo sapien
gaatgccgggaattgtggtctccgc

SEQ ID NO: 5117284 - DNA, 25 bp, Homo sapien
ctcgcccgccctactcagaggcggc

SEQ ID NO: 5117285 - DNA, 25 bp, Homo sapien
gagcaggcggacagtaggacgcggg

SEQ ID NO: 5117286 - DNA, 25 bp, Homo sapien
agaggcggcacccaggacgcgagca

SEQ ID NO: 5117287 - DNA, 25 bp, Homo sapien
ccaggacgcgagcaggcggacagta

SEQ ID NO: 5117288 - DNA, 25 bp, Homo sapien
atgcccgaaggctccagcctgcacc

SEQ ID NO: 5117289 - DNA, 25 bp, Homo sapien
gcatgctcggggttcagtgacccca

SEQ ID NO: 5117290 - DNA, 25 bp, Homo sapien
tgggggtcccataagtcactcgggc

SEQ ID NO: 5117291 - DNA, 25 bp, Homo sapien
acagacaaccgggcccagagactgg

SEQ ID NO: 5117292 - DNA, 25 bp, Homo sapien
cgcagtcagttgtgcccggggaccc

SEQ ID NO: 5117293 - DNA, 25 bp, Homo sapien
tggggtcaccgcagtcagttgtgcc

SEQ ID NO: 5117294 - DNA, 25 bp, Homo sapien
gggtcaccgcagtcagttgtgcccg

SEQ ID NO: 5117295 - DNA, 25 bp, Homo sapien
gtcaccgcagtcagttgtgcccggg

SEQ ID NO: 5117296 - DNA, 25 bp, Homo sapien
aacgggttccagagttctctgaggc

SEQ ID NO: 5117297 - DNA, 25 bp, Homo sapien
caccgccagccacgcgcgcgaacgg

SEQ ID NO: 5117298 - DNA, 25 bp, Homo sapien
agagttctctgaggcctcccgggtc

SEQ ID NO: 5117299 - DNA, 25 bp, Homo sapien
cacgcgcgcgaacgggttccagagt

SEQ ID NO: 5117300 - DNA, 25 bp, Homo sapien
gacggcggcgaggacggccggagga

SEQ ID NO: 5117301 - DNA, 25 bp, Homo sapien
ctagggacggcggcgaggacggccg

SEQ ID NO: 5117302 - DNA, 25 bp, Homo sapien
tctcgatatagaccacggcaggtgc

SEQ ID NO: 5117303 - DNA, 25 bp, Homo sapien
gtccaggatctcgatatagaccacg

SEQ ID NO: 5117304 - DNA, 25 bp, Homo sapien
tcgatatagaccacggcaggtgctg

SEQ ID NO: 5117305 - DNA, 25 bp, Homo sapien
ggatctcgatatagaccacggcagg

SEQ ID NO: 5117306 - DNA, 25 bp, Homo sapien
gcttcagtgcctcccggtctacccc

SEQ ID NO: 5117307 - DNA, 25 bp, Homo sapien
agcacagataagaggaggctctgac

SEQ ID NO: 5117308 - DNA, 25 bp, Homo sapien
cagataagaggaggctctgacccct

SEQ ID NO: 5117309 - DNA, 25 bp, Homo sapien
cacagataagaggaggctctgaccc

SEQ ID NO: 5117310 - DNA, 25 bp, Homo sapien
gttggtgacaatgagcccatcggca

SEQ ID NO: 5117311 - DNA, 25 bp, Homo sapien
ttagcagtctcacacggactctgcg

SEQ ID NO: 5117312 - DNA, 25 bp, Homo sapien
gaatcctcagcgttgcgatgtctgc

SEQ ID NO: 5117313 - DNA, 25 bp, Homo sapien
gaatcctgagccgttcgagataggg

SEQ ID NO: 5117314 - DNA, 25 bp, Homo sapien
ccttgccggacatcagctgagcgtc

SEQ ID NO: 5117315 - DNA, 25 bp, Homo sapien
tgtgatcgtgttctgcagtgcaaag

SEQ ID NO: 5117316 - DNA, 25 bp, Homo sapien
gcagagctaacaatgccggatgtga

SEQ ID NO: 5117317 - DNA, 25 bp, Homo sapien
caatagctgcatcagtttgaatgta

SEQ ID NO: 5117318 - DNA, 25 bp, Homo sapien
atttgtcatttctctcctatcagga

SEQ ID NO: 5117319 - DNA, 25 bp, Homo sapien
cctaagctctatataggctcatcca

SEQ ID NO: 5117320 - DNA, 25 bp, Homo sapien
taccaggatgtaggtactttctcca

SEQ ID NO: 5117321 - DNA, 25 bp, Homo sapien
tcagcccatgaataagtggccacat

SEQ ID NO: 5117322 - DNA, 25 bp, Homo sapien
ggctcatccaccatatatcagttgg

SEQ ID NO: 5117323 - DNA, 25 bp, Homo sapien
caggttaaccaggggacctccagag

SEQ ID NO: 5117324 - DNA, 25 bp, Homo sapien
ctggggcagggattcttggaaggaa

SEQ ID NO: 5117325 - DNA, 25 bp, Homo sapien
gggcagggattcttggaaggaagga

SEQ ID NO: 5117326 - DNA, 25 bp, Homo sapien
gcagggattcttggaaggaaggatg

SEQ ID NO: 5117327 - DNA, 25 bp, Homo sapien
ttggaaggaaggatgtctcactcac

SEQ ID NO: 5117328 - DNA, 25 bp, Homo sapien
tctggttggatattgagagatagcc

SEQ ID NO: 5117329 - DNA, 25 bp, Homo sapien
agaaacttgaccaaacatccttgaa

SEQ ID NO: 5117330 - DNA, 25 bp, Homo sapien
aacaaaagtaccagcaagtgttggg

SEQ ID NO: 5117331 - DNA, 25 bp, Homo sapien
agatagccaacaaagaactgctcag

SEQ ID NO: 5117332 - DNA, 25 bp, Homo sapien
ctgcagggatacagcccccagttcc

SEQ ID NO: 5117333 - DNA, 25 bp, Homo sapien
agggatacagcccccagttccctag

SEQ ID NO: 5117334 - DNA, 25 bp, Homo sapien
gcagggatacagcccccagttccct

SEQ ID NO: 5117335 - DNA, 25 bp, Homo sapien
gggatacagcccccagttccctagc

SEQ ID NO: 5117336 - DNA, 25 bp, Homo sapien
tcatggtgttcactccaatcacctc

SEQ ID NO: 5117337 - DNA, 25 bp, Homo sapien
cgaagacgatcagaagggatggcaa

SEQ ID NO: 5117338 - DNA, 25 bp, Homo sapien
ttcttttccccacgatgcagaaact

SEQ ID NO: 5117339 - DNA, 25 bp, Homo sapien
gtgaccttcatggtgttcactccaa

SEQ ID NO: 5117340 - DNA, 25 bp, Homo sapien
tgtgacagagggacaaatgagcccc

SEQ ID NO: 5117341 - DNA, 25 bp, Homo sapien
atgcccttcccctatttccaccaca

SEQ ID NO: 5117342 - DNA, 25 bp, Homo sapien
ccctcttctcccagtagaccaccct

SEQ ID NO: 5117343 - DNA, 25 bp, Homo sapien
gccccacccagctacatccttcctt

SEQ ID NO: 5117344 - DNA, 25 bp, Homo sapien
gacccactgattccggaggaggaat

SEQ ID NO: 5117345 - DNA, 25 bp, Homo sapien
gctgggacccactgattccggagga

SEQ ID NO: 5117346 - DNA, 25 bp, Homo sapien
tagcgccgctgggacccactgattc

SEQ ID NO: 5117347 - DNA, 25 bp, Homo sapien
caccccaatgtagcgccgctgggac

SEQ ID NO: 5117348 - DNA, 25 bp, Homo sapien
ttacagacagatggaaaatggccct

SEQ ID NO: 5117349 - DNA, 25 bp, Homo sapien
tataggaaggtattacagccaggtc

SEQ ID NO: 5117350 - DNA, 25 bp, Homo sapien
acaggacatgggctaggtactacaa

SEQ ID NO: 5117351 - DNA, 25 bp, Homo sapien
gaacaaagctcaatagaggtgcccc

SEQ ID NO: 5117352 - DNA, 25 bp, Homo sapien
tatggatgagtacaccatgctgaac

SEQ ID NO: 5117353 - DNA, 25 bp, Homo sapien
ggttctcgaagctgtagttcagcaa

SEQ ID NO: 5117354 - DNA, 25 bp, Homo sapien
gggagcccaggatgactttatggat

SEQ ID NO: 5117355 - DNA, 25 bp, Homo sapien
catcgggaaagcttggttctcgaag

SEQ ID NO: 5117356 - DNA, 25 bp, Homo sapien
taaacatcttcagcattttgtacca

SEQ ID NO: 5117357 - DNA, 25 bp, Homo sapien
ccggatctgcactgccaactgggat

SEQ ID NO: 5117358 - DNA, 25 bp, Homo sapien
gggttcgaacagcttcataaacatc

SEQ ID NO: 5117359 - DNA, 25 bp, Homo sapien
taaggtcagtgtttctcgtccccgc

SEQ ID NO: 5117360 - DNA, 25 bp, Homo sapien
tttaaccctctgtctcggtgccctc

SEQ ID NO: 5117361 - DNA, 25 bp, Homo sapien
ctcagaacctcagccagaaaggcaa

SEQ ID NO: 5117362 - DNA, 25 bp, Homo sapien
ccccactggttcatttaaccctctg

SEQ ID NO: 5117363 - DNA, 25 bp, Homo sapien
tgccctcagaacctcagccagaaag

SEQ ID NO: 5117364 - DNA, 25 bp, Homo sapien
ttctgtgattcttcagagcccagga

SEQ ID NO: 5117365 - DNA, 25 bp, Homo sapien
taaaaagtgtttctgtgattcttca

SEQ ID NO: 5117366 - DNA, 25 bp, Homo sapien
aaagtgtttctgtgattcttcagag

SEQ ID NO: 5117367 - DNA, 25 bp, Homo sapien
tgattcttcagagcccaggagtcag

SEQ ID NO: 5117368 - DNA, 25 bp, Homo sapien
tctttaataggaggtcaggatggtc

SEQ ID NO: 5117369 - DNA, 25 bp, Homo sapien
tgggggaaaagatccagccctccca

SEQ ID NO: 5117370 - DNA, 25 bp, Homo sapien
gggatacagctttacctctagcctt

SEQ ID NO: 5117371 - DNA, 25 bp, Homo sapien
gctccagtatctcccctaagtttag

SEQ ID NO: 5117372 - DNA, 25 bp, Homo sapien
catgcactatggatgtggaactgtc

SEQ ID NO: 5117373 - DNA, 25 bp, Homo sapien
tacctcaggagcttaccaagaaacc

SEQ ID NO: 5117374 - DNA, 25 bp, Homo sapien
gaggccagctgtcagtatctgtagc

SEQ ID NO: 5117375 - DNA, 25 bp, Homo sapien
tatctgtagccaagcatgggaatct

SEQ ID NO: 5117376 - DNA, 25 bp, Homo sapien
cagtggttccctagatcagtattgc

SEQ ID NO: 5117377 - DNA, 25 bp, Homo sapien
tgtagaaatcctcaaccccgactga

SEQ ID NO: 5117378 - DNA, 25 bp, Homo sapien
gaaaggcctcttgatgtccggatag

SEQ ID NO: 5117379 - DNA, 25 bp, Homo sapien
ttccgcgggcacactacttcagatg

SEQ ID NO: 5117380 - DNA, 25 bp, Homo sapien
ccgctctctcgtggccgacgcctgg

SEQ ID NO: 5117381 - DNA, 25 bp, Homo sapien
ctcgcgaggccactcccaggcgcgg

SEQ ID NO: 5117382 - DNA, 25 bp, Homo sapien
ctgaaatggggaccagcgaggctcc

SEQ ID NO: 5117383 - DNA, 25 bp, Homo sapien
ggcgggcaggcggattcctcggccc

SEQ ID NO: 5117384 - DNA, 25 bp, Homo sapien
gagggcctccttcctagtgccctga

SEQ ID NO: 5117385 - DNA, 25 bp, Homo sapien
tcctttttgaagtgctccctcctgc

SEQ ID NO: 5117386 - DNA, 25 bp, Homo sapien
tgggtttacagcaggcacaccaagc

SEQ ID NO: 5117387 - DNA, 25 bp, Homo sapien
cacatgaaaggtgccactgggattc

SEQ ID NO: 5117388 - DNA, 25 bp, Homo sapien
tctggctggacaacttgagctgcag

SEQ ID NO: 5117389 - DNA, 25 bp, Homo sapien
cagagtgtgactgaatgtgcctccc

SEQ ID NO: 5117390 - DNA, 25 bp, Homo sapien
ggaacagtgactgtacgcacgatga

SEQ ID NO: 5117391 - DNA, 25 bp, Homo sapien
actgtacgcacgatgaggatgctgg

SEQ ID NO: 5117392 - DNA, 25 bp, Homo sapien
tttattcaccgtatcaggttcttga

SEQ ID NO: 5117393 - DNA, 25 bp, Homo sapien
gagtatccccagatcacaccaattt

SEQ ID NO: 5117394 - DNA, 25 bp, Homo sapien
gtctccaccccttatcataccagaa

SEQ ID NO: 5117395 - DNA, 25 bp, Homo sapien
accaattttccctcaatcttatgcc

SEQ ID NO: 5117396 - DNA, 25 bp, Homo sapien
gagccgggctgtttagactccgctg

SEQ ID NO: 5117397 - DNA, 25 bp, Homo sapien
aaagccatgacatcaccccgaaagc

SEQ ID NO: 5117398 - DNA, 25 bp, Homo sapien
cgaaagtcctcggttttggcgcgag

SEQ ID NO: 5117399 - DNA, 25 bp, Homo sapien
tatgcccaaggtgacgtcagagtga

SEQ ID NO: 5117400 - DNA, 25 bp, Homo sapien
cccaaagcgctgactctgcaaaaaa

SEQ ID NO: 5117401 - DNA, 25 bp, Homo sapien
aaaaagcggcccttccatcactgct

SEQ ID NO: 5117402 - DNA, 25 bp, Homo sapien
gctgactctgcaaaaaaagcggccc

SEQ ID NO: 5117403 - DNA, 25 bp, Homo sapien
tctgcaaaaaaagcggcccttccat

SEQ ID NO: 5117404 - DNA, 25 bp, Homo sapien
tcacacactcagccagacggatcac

SEQ ID NO: 5117405 - DNA, 25 bp, Homo sapien
cggaaaggcgtttcggcacagcgtc

SEQ ID NO: 5117406 - DNA, 25 bp, Homo sapien
gtcaaagaactcgagccgcgctacg

SEQ ID NO: 5117407 - DNA, 25 bp, Homo sapien
gcaggtgcgagcgctgagcagtgtc

SEQ ID NO: 5117408 - DNA, 25 bp, Homo sapien
taggtgggttatcggtaggcgccag

SEQ ID NO: 5117409 - DNA, 25 bp, Homo sapien
atcggtaggcgccagagtccagctg

SEQ ID NO: 5117410 - DNA, 25 bp, Homo sapien
agcttaggtgggttatcggtaggcg

SEQ ID NO: 5117411 - DNA, 25 bp, Homo sapien
tgggttatcggtaggcgccagagtc

SEQ ID NO: 5117412 - DNA, 25 bp, Homo sapien
atgggcccctgggtatccacccact

SEQ ID NO: 5117413 - DNA, 25 bp, Homo sapien
catgggcccctgggtatccacccac

SEQ ID NO: 5117414 - DNA, 25 bp, Homo sapien
ccatgggcccctgggtatccaccca

SEQ ID NO: 5117415 - DNA, 25 bp, Homo sapien
gaagccagatctcagggccttccta

SEQ ID NO: 5117416 - DNA, 25 bp, Homo sapien
tcggaagccagatctcagggccttc

SEQ ID NO: 5117417 - DNA, 25 bp, Homo sapien
gatctcagggccttcctacttctta

SEQ ID NO: 5117418 - DNA, 25 bp, Homo sapien
cagatctcagggccttcctacttct

SEQ ID NO: 5117419 - DNA, 25 bp, Homo sapien
atgagcatagtgtccaagcactcac

SEQ ID NO: 5117420 - DNA, 25 bp, Homo sapien
gactcatgagcatagtgtccaagca

SEQ ID NO: 5117421 - DNA, 25 bp, Homo sapien
cccagaggactcatgagcatagtgt

SEQ ID NO: 5117422 - DNA, 25 bp, Homo sapien
gggacccagaggactcatgagcata

SEQ ID NO: 5117423 - DNA, 25 bp, Homo sapien
ctggaaggcatacacgattagacag

SEQ ID NO: 5117424 - DNA, 25 bp, Homo sapien
atgcaggccacagcgctcggcggcc

SEQ ID NO: 5117425 - DNA, 25 bp, Homo sapien
agtggctccagtatctgactctggg

SEQ ID NO: 5117426 - DNA, 25 bp, Homo sapien
tggctccagtatctgactctgggcc

SEQ ID NO: 5117427 - DNA, 25 bp, Homo sapien
ccatgcaggccacagcgctcggcgg

SEQ ID NO: 5117428 - DNA, 25 bp, Homo sapien
gcctgcactagttagggtatctaca

SEQ ID NO: 5117429 - DNA, 25 bp, Homo sapien
gaaacacattaccaggagccatcag

SEQ ID NO: 5117430 - DNA, 25 bp, Homo sapien
aagagaccacctgcgaacagacgcg

SEQ ID NO: 5117431 - DNA, 25 bp, Homo sapien
ggaagtgagtcacacgcctgcacta

SEQ ID NO: 5117432 - DNA, 25 bp, Homo sapien
ggccggcctcgaaagagaacatgac

SEQ ID NO: 5117433 - DNA, 25 bp, Homo sapien
ggcggccggcctcgaaagagaacat

SEQ ID NO: 5117434 - DNA, 25 bp, Homo sapien
gcggcggccggcctcgaaagagaac

SEQ ID NO: 5117435 - DNA, 25 bp, Homo sapien
cggccggcctcgaaagagaacatga

SEQ ID NO: 5117436 - DNA, 25 bp, Homo sapien
cacagcgtagtcatcagtggcaggg

SEQ ID NO: 5117437 - DNA, 25 bp, Homo sapien
ttgtcagtccctactctagagagcc

SEQ ID NO: 5117438 - DNA, 25 bp, Homo sapien
tgccagttgcagtaccaggttcagg

SEQ ID NO: 5117439 - DNA, 25 bp, Homo sapien
ttgggctcccgaggcagatcataaa

SEQ ID NO: 5117440 - DNA, 25 bp, Homo sapien
ggtcccctggtctcacacagcatgg

SEQ ID NO: 5117441 - DNA, 25 bp, Homo sapien
tttaaataggtctctggcaaagaac

SEQ ID NO: 5117442 - DNA, 25 bp, Homo sapien
agaacaatgcaggagtaaggatcca

SEQ ID NO: 5117443 - DNA, 25 bp, Homo sapien
ggcttctgctggttctaaccatctt

SEQ ID NO: 5117444 - DNA, 25 bp, Homo sapien
tagtgaggatgcatcatgcctcccg

SEQ ID NO: 5117445 - DNA, 25 bp, Homo sapien
caaagaggtcagcaaccgcaggaat

SEQ ID NO: 5117446 - DNA, 25 bp, Homo sapien
gtacctggtgcctgataagcattcc

SEQ ID NO: 5117447 - DNA, 25 bp, Homo sapien
tgaaggcacgcataaagctcttggc

SEQ ID NO: 5117448 - DNA, 25 bp, Homo sapien
gctggactgggatgagctggagaca

SEQ ID NO: 5117449 - DNA, 25 bp, Homo sapien
tgggatgagctggagacaaatcagc

SEQ ID NO: 5117450 - DNA, 25 bp, Homo sapien
agcaacatttccatgctttgtgtca

SEQ ID NO: 5117451 - DNA, 25 bp, Homo sapien
atttccatgctttgtgtcacagcct

SEQ ID NO: 5117452 - DNA, 25 bp, Homo sapien
gaatccagatgtttaggcacagctg

SEQ ID NO: 5117453 - DNA, 25 bp, Homo sapien
ggggaggtcttcactggaatccaga

SEQ ID NO: 5117454 - DNA, 25 bp, Homo sapien
gaaatctgtaggtcttcgggatgca

SEQ ID NO: 5117455 - DNA, 25 bp, Homo sapien
tcttcgggatgcacagtggaactta

SEQ ID NO: 5117456 - DNA, 25 bp, Homo sapien
cataagttttgacacgactcactgg

SEQ ID NO: 5117457 - DNA, 25 bp, Homo sapien
tgaacatgacgtttaccaaagccct

SEQ ID NO: 5117458 - DNA, 25 bp, Homo sapien
tgggcccatctatcagtctaatcag

SEQ ID NO: 5117459 - DNA, 25 bp, Homo sapien
cattccaggtcccactagatgacag

SEQ ID NO: 5117460 - DNA, 25 bp, Homo sapien
gggagaaccataaccataatcacaa

SEQ ID NO: 5117461 - DNA, 25 bp, Homo sapien
ccagaatgttttagagggagaacca

SEQ ID NO: 5117462 - DNA, 25 bp, Homo sapien
gctcaagactaaaggataagccaga

SEQ ID NO: 5117463 - DNA, 25 bp, Homo sapien
gcactgccagcacgcatcgctgttc

SEQ ID NO: 5117464 - DNA, 25 bp, Homo sapien
tctgccctcttagaaacacacaagc

SEQ ID NO: 5117465 - DNA, 25 bp, Homo sapien
cgtacctgcaataacttctctctgg

SEQ ID NO: 5117466 - DNA, 25 bp, Homo sapien
tggtgccagaggcaggtataccctg

SEQ ID NO: 5117467 - DNA, 25 bp, Homo sapien
gcaagtcactcagttcaaagtggga

SEQ ID NO: 5117468 - DNA, 25 bp, Homo sapien
tgcggcgcaagctacggcctctgct

SEQ ID NO: 5117469 - DNA, 25 bp, Homo sapien
ctttggctccgcctggccgcgggtg

SEQ ID NO: 5117470 - DNA, 25 bp, Homo sapien
ctggccgcgggtgcggcgcaagcta

SEQ ID NO: 5117471 - DNA, 25 bp, Homo sapien
gcgggtgcggcgcaagctacggcct

SEQ ID NO: 5117472 - DNA, 25 bp, Homo sapien
agtagcgggaagggcgaggctgtag

SEQ ID NO: 5117473 - DNA, 25 bp, Homo sapien
aagcgaggttctgggcaccgagcgg

SEQ ID NO: 5117474 - DNA, 25 bp, Homo sapien
gattggaagcgaggttctgggcacc

SEQ ID NO: 5117475 - DNA, 25 bp, Homo sapien
cagagattggaagcgaggttctggg

SEQ ID NO: 5117476 - DNA, 25 bp, Homo sapien
ttggaagcgaggttctgggcaccga

SEQ ID NO: 5117477 - DNA, 25 bp, Homo sapien
tctgaaagcagagtgggcgtcaagc

SEQ ID NO: 5117478 - DNA, 25 bp, Homo sapien
taagggagacggaacttcgaaatga

SEQ ID NO: 5117479 - DNA, 25 bp, Homo sapien
ttcgaaatgaacgacctcgggcagc

SEQ ID NO: 5117480 - DNA, 25 bp, Homo sapien
gcgtcaagctggaatgatggaccca

SEQ ID NO: 5117481 - DNA, 25 bp, Homo sapien
atccaataatgggagaatgggagct

SEQ ID NO: 5117482 - DNA, 25 bp, Homo sapien
caagaggctcggatgatgtatagaa

SEQ ID NO: 5117483 - DNA, 25 bp, Homo sapien
ggaacactgaggaagttaagagagt

SEQ ID NO: 5117484 - DNA, 25 bp, Homo sapien
ttaagagagttaacgtggatccaat

SEQ ID NO: 5117485 - DNA, 25 bp, Homo sapien
gaatcgccccaatgatcacttttaa

SEQ ID NO: 5117486 - DNA, 25 bp, Homo sapien
ccttgtgacgtctcctagcttcttc

SEQ ID NO: 5117487 - DNA, 25 bp, Homo sapien
agtctaaaatgtgaatcgccccaat

SEQ ID NO: 5117488 - DNA, 25 bp, Homo sapien
aatgatcacttttaaccttgtgacg

SEQ ID NO: 5117489 - DNA, 25 bp, Homo sapien
ggttgtactcttggcttcactggtt

SEQ ID NO: 5117490 - DNA, 25 bp, Homo sapien
tggaatcacagcatccctatatggc

SEQ ID NO: 5117491 - DNA, 25 bp, Homo sapien
tctggccacaacttcgccttctgga

SEQ ID NO: 5117492 - DNA, 25 bp, Homo sapien
tggctattgcttgggtgcaaactga

SEQ ID NO: 5117493 - DNA, 25 bp, Homo sapien
tgtcccgggcgccaacataaagtgt

SEQ ID NO: 5117494 - DNA, 25 bp, Homo sapien
ttgtatgtgtgagggactgcgaacc

SEQ ID NO: 5117495 - DNA, 25 bp, Homo sapien
cagggataaagcgaagatggtgtcc

SEQ ID NO: 5117496 - DNA, 25 bp, Homo sapien
ggaggcaggatccacaaggagaaca

SEQ ID NO: 5117497 - DNA, 25 bp, Homo sapien
cctccccatcatcatgaacctcctt

SEQ ID NO: 5117498 - DNA, 25 bp, Homo sapien
gaaacctggtcactgtggtctcctc

SEQ ID NO: 5117499 - DNA, 25 bp, Homo sapien
tggtcactgtggtctcctccccatc

SEQ ID NO: 5117500 - DNA, 25 bp, Homo sapien
ccccatcatcatgaacctccttcat

SEQ ID NO: 5117501 - DNA, 25 bp, Homo sapien
tctgtgagcctcaggaaccatccag

SEQ ID NO: 5117502 - DNA, 25 bp, Homo sapien
gagcctcaggaaccatccagtcaat

SEQ ID NO: 5117503 - DNA, 25 bp, Homo sapien
tttcttcctacagttctgtctgtga

SEQ ID NO: 5117504 - DNA, 25 bp, Homo sapien
cctacagttctgtctgtgagcctca

SEQ ID NO: 5117505 - DNA, 25 bp, Homo sapien
acttcggatcaaaagcgaaggtgcc

SEQ ID NO: 5117506 - DNA, 25 bp, Homo sapien
ataaccccgcacttcggatcaaaag

SEQ ID NO: 5117507 - DNA, 25 bp, Homo sapien
gcgaaggtgccacaagtgaggaggt

SEQ ID NO: 5117508 - DNA, 25 bp, Homo sapien
ccccgcacttcggatcaaaagcgaa

SEQ ID NO: 5117509 - DNA, 25 bp, Homo sapien
cctctcctcccacaccgtcactcac

SEQ ID NO: 5117510 - DNA, 25 bp, Homo sapien
actggtgcaggcaccctctccctct

SEQ ID NO: 5117511 - DNA, 25 bp, Homo sapien
tccctctcctcccacaccgtcactc

SEQ ID NO: 5117512 - DNA, 25 bp, Homo sapien
ctctccctctcctcccacaccgtca

SEQ ID NO: 5117513 - DNA, 25 bp, Homo sapien
gacctcttgcggctagtctctatat

SEQ ID NO: 5117514 - DNA, 25 bp, Homo sapien
aaggatgggccctcatttcataagc

SEQ ID NO: 5117515 - DNA, 25 bp, Homo sapien
cttcaaacaagccttgaccaaagga

SEQ ID NO: 5117516 - DNA, 25 bp, Homo sapien
ctcttgcggctagtctctatattct

SEQ ID NO: 5117517 - DNA, 25 bp, Homo sapien
gctgaccgctgagctggctcaaaag

SEQ ID NO: 5117518 - DNA, 25 bp, Homo sapien
tgctgaccgctgagctggctcaaaa

SEQ ID NO: 5117519 - DNA, 25 bp, Homo sapien
ccggccactctcaagtctttcaacc

SEQ ID NO: 5117520 - DNA, 25 bp, Homo sapien
gaaggcaaggtatctgtccgaatcc

SEQ ID NO: 5117521 - DNA, 25 bp, Homo sapien
ttcacagtggcagcatagaggaccc

SEQ ID NO: 5117522 - DNA, 25 bp, Homo sapien
ctggtgataattggctccgtcccca

SEQ ID NO: 5117523 - DNA, 25 bp, Homo sapien
tgtccgaatccagtcctcggcacga

SEQ ID NO: 5117524 - DNA, 25 bp, Homo sapien
tcaaatgctcgggaagtctccgtaa

SEQ ID NO: 5117525 - DNA, 25 bp, Homo sapien
gaagtagatttcgtcgtctccatct

SEQ ID NO: 5117526 - DNA, 25 bp, Homo sapien
taatgcgctcgtatgagtcaaatgc

SEQ ID NO: 5117527 - DNA, 25 bp, Homo sapien
gccacccgtgggactttaatgcgct

SEQ ID NO: 5117528 - DNA, 25 bp, Homo sapien
gctcaggtcgaagcacagcaacatc

SEQ ID NO: 5117529 - DNA, 25 bp, Homo sapien
taaaagatgggagtccctgccccaa

SEQ ID NO: 5117530 - DNA, 25 bp, Homo sapien
caaaaacgtcgtccatctctgctgg

SEQ ID NO: 5117531 - DNA, 25 bp, Homo sapien
gcaggtcagctttcaaaaacgtcgt

SEQ ID NO: 5117532 - DNA, 25 bp, Homo sapien
ttgtggtcggaaggcacagacagca

SEQ ID NO: 5117533 - DNA, 25 bp, Homo sapien
gtccacgacaggcagtcctctgttg

SEQ ID NO: 5117534 - DNA, 25 bp, Homo sapien
gggcacatcattgtccacgacaggc

SEQ ID NO: 5117535 - DNA, 25 bp, Homo sapien
ctgttgcagtcatgttttagttctc

SEQ ID NO: 5117536 - DNA, 25 bp, Homo sapien
gaaacactggcctgtccatgagtgg

SEQ ID NO: 5117537 - DNA, 25 bp, Homo sapien
ccctgtgggccacgactctgagata

SEQ ID NO: 5117538 - DNA, 25 bp, Homo sapien
agagagatgagccaaagtgccggag

SEQ ID NO: 5117539 - DNA, 25 bp, Homo sapien
tgaaggtgagtacgcggtcaggcag

SEQ ID NO: 5117540 - DNA, 25 bp, Homo sapien
atccgcactgctcggtggaggtgtc

SEQ ID NO: 5117541 - DNA, 25 bp, Homo sapien
acgctgagctgagctccgatccgca

SEQ ID NO: 5117542 - DNA, 25 bp, Homo sapien
cagatcttcaagaacgctgagctga

SEQ ID NO: 5117543 - DNA, 25 bp, Homo sapien
gagctgagctccgatccgcactgct

SEQ ID NO: 5117544 - DNA, 25 bp, Homo sapien
tggagacggccacagttggttgtat

SEQ ID NO: 5117545 - DNA, 25 bp, Homo sapien
tcacttgtgtcacctcagtacggga

SEQ ID NO: 5117546 - DNA, 25 bp, Homo sapien
ggccacacactcatccagccggaag

SEQ ID NO: 5117547 - DNA, 25 bp, Homo sapien
cctcagtacgggagccaaccaggag

SEQ ID NO: 5117548 - DNA, 25 bp, Homo sapien
ctttaggacacaaagaggagacatc

SEQ ID NO: 5117549 - DNA, 25 bp, Homo sapien
tctgctgactctatgtcttggacca

SEQ ID NO: 5117550 - DNA, 25 bp, Homo sapien
tctttaggacacaaagaggagacat

SEQ ID NO: 5117551 - DNA, 25 bp, Homo sapien
tgctgactctatgtcttggaccaac

SEQ ID NO: 5117552 - DNA, 25 bp, Homo sapien
tttccctaatccatacagaccatac

SEQ ID NO: 5117553 - DNA, 25 bp, Homo sapien
atttccctaatccatacagaccata

SEQ ID NO: 5117554 - DNA, 25 bp, Homo sapien
gctgtagccacgggaacttcaaaca

SEQ ID NO: 5117555 - DNA, 25 bp, Homo sapien
accacatgcgcagctgtagccacgg

SEQ ID NO: 5117556 - DNA, 25 bp, Homo sapien
cgggaacttcaaacactactggacg

SEQ ID NO: 5117557 - DNA, 25 bp, Homo sapien
atggcaagaccacatgcgcagctgt

SEQ ID NO: 5117558 - DNA, 25 bp, Homo sapien
tgccccataccaagctgtaagctgc

SEQ ID NO: 5117559 - DNA, 25 bp, Homo sapien
gctgacgccgaccaatcagaatgag

SEQ ID NO: 5117560 - DNA, 25 bp, Homo sapien
cattcacaggcataagcgcccatgg

SEQ ID NO: 5117561 - DNA, 25 bp, Homo sapien
tgctgcgagaatccccaagaagaag

SEQ ID NO: 5117562 - DNA, 25 bp, Homo sapien
gcagcggcaaccgctcatcttcagg

SEQ ID NO: 5117563 - DNA, 25 bp, Homo sapien
ggagggtcttggctgtagcttgtgg

SEQ ID NO: 5117564 - DNA, 25 bp, Homo sapien
agcggcaaccgctcatcttcaggag

SEQ ID NO: 5117565 - DNA, 25 bp, Homo sapien
agggtcttggctgtagcttgtggtc

SEQ ID NO: 5117566 - DNA, 25 bp, Homo sapien
atggatgtttcatcacatgtggcta

SEQ ID NO: 5117567 - DNA, 25 bp, Homo sapien
catgtggctagaggagccccagtta

SEQ ID NO: 5117568 - DNA, 25 bp, Homo sapien
tgggcaaggatcaagcaggaagggt

SEQ ID NO: 5117569 - DNA, 25 bp, Homo sapien
aggaagggtggtgagaatccaccaa

SEQ ID NO: 5117570 - DNA, 25 bp, Homo sapien
caccagggatgaacgaggcacattc

SEQ ID NO: 5117571 - DNA, 25 bp, Homo sapien
cctgctttagggcaagggtgtcacc

SEQ ID NO: 5117572 - DNA, 25 bp, Homo sapien
tgcagtaacctcagggcagtggtcc

SEQ ID NO: 5117573 - DNA, 25 bp, Homo sapien
taaatattcctaagcatcggcccag

SEQ ID NO: 5117574 - DNA, 25 bp, Homo sapien
tagtggcccttacttgacagacatg

SEQ ID NO: 5117575 - DNA, 25 bp, Homo sapien
cccatgtgaggtgattagtggccct

SEQ ID NO: 5117576 - DNA, 25 bp, Homo sapien
cacgtcctcgtgttttgggctggca

SEQ ID NO: 5117577 - DNA, 25 bp, Homo sapien
gacatgcaacgtgcctaatgaaggc

SEQ ID NO: 5117578 - DNA, 25 bp, Homo sapien
aattcctacagattggaactgccag

SEQ ID NO: 5117579 - DNA, 25 bp, Homo sapien
tcaagctgctagttaagaagagagg

SEQ ID NO: 5117580 - DNA, 25 bp, Homo sapien
tgccagggcaaagtacatacaagat

SEQ ID NO: 5117581 - DNA, 25 bp, Homo sapien
gcccagaacctgacctaaatagacc

SEQ ID NO: 5117582 - DNA, 25 bp, Homo sapien
cagaatgccctccatagagtgtgta

SEQ ID NO: 5117583 - DNA, 25 bp, Homo sapien
ggagcacacaaggtcaccaaccttt

SEQ ID NO: 5117584 - DNA, 25 bp, Homo sapien
ccaacaatagtatagaatgcccact

SEQ ID NO: 5117585 - DNA, 25 bp, Homo sapien
tatgtctttgcacacttatactgct

SEQ ID NO: 5117586 - DNA, 25 bp, Homo sapien
cttgtccaaagttgagagggctccc

SEQ ID NO: 5117587 - DNA, 25 bp, Homo sapien
cataatcacagtacgtgagcagcat

SEQ ID NO: 5117588 - DNA, 25 bp, Homo sapien
ttgcataatcacagtacgtgagcag

SEQ ID NO: 5117589 - DNA, 25 bp, Homo sapien
gagggctcccccatgtaatgcatct

SEQ ID NO: 5117590 - DNA, 25 bp, Homo sapien
tatacgtccagcatgactcagtaga

SEQ ID NO: 5117591 - DNA, 25 bp, Homo sapien
gacaggagcattccaatggctgcag

SEQ ID NO: 5117592 - DNA, 25 bp, Homo sapien
gcagcaatggagtgaccgagccata

SEQ ID NO: 5117593 - DNA, 25 bp, Homo sapien
gactcagtagactgagatcaaagct

SEQ ID NO: 5117594 - DNA, 25 bp, Homo sapien
ggtgaatttggagatccctgtggca

SEQ ID NO: 5117595 - DNA, 25 bp, Homo sapien
gaatttggagatccctgtggcagtc

SEQ ID NO: 5117596 - DNA, 25 bp, Homo sapien
cttgcctgagtgaagagggctcctc

SEQ ID NO: 5117597 - DNA, 25 bp, Homo sapien
catccaacagaagcctttgcctccc

SEQ ID NO: 5117598 - DNA, 25 bp, Homo sapien
gggaattaccctctatatgacaaag

SEQ ID NO: 5117599 - DNA, 25 bp, Homo sapien
taacagaaatccatgggtagaggat

SEQ ID NO: 5117600 - DNA, 25 bp, Homo sapien
ttaatacagcgtcctgtttcttggg

SEQ ID NO: 5117601 - DNA, 25 bp, Homo sapien
gatttggatttacttctgttgaggg

SEQ ID NO: 5117602 - DNA, 25 bp, Homo sapien
caccattagaactgtctcttcacct

SEQ ID NO: 5117603 - DNA, 25 bp, Homo sapien
aacaccattagaactgtctcttcac

SEQ ID NO: 5117604 - DNA, 25 bp, Homo sapien
tgaagaattaagcctcaagaaagca

SEQ ID NO: 5117605 - DNA, 25 bp, Homo sapien
aagaattaagcctcaagaaagcagg

SEQ ID NO: 5117606 - DNA, 25 bp, Homo sapien
ccctaatcctgatgattgtgttaaa

SEQ ID NO: 5117607 - DNA, 25 bp, Homo sapien
aatgtttttgagaggctcggaagag

SEQ ID NO: 5117608 - DNA, 25 bp, Homo sapien
ttggctgtcaggtccctaatcctga

SEQ ID NO: 5117609 - DNA, 25 bp, Homo sapien
tttttgagaggctcggaagagccat

SEQ ID NO: 5117610 - DNA, 25 bp, Homo sapien
gtccagtactgcctgtgtcagaaac

SEQ ID NO: 5117611 - DNA, 25 bp, Homo sapien
gccttcgggaaaagctctagcctca

SEQ ID NO: 5117612 - DNA, 25 bp, Homo sapien
agaaacttccccacgtctactccag

SEQ ID NO: 5117613 - DNA, 25 bp, Homo sapien
tagcctcaattgctgattcctgaaa

SEQ ID NO: 5117614 - DNA, 25 bp, Homo sapien
tatttagatccaagaattgtgcttg

SEQ ID NO: 5117615 - DNA, 25 bp, Homo sapien
gaattgtgcttggttccacctcaaa

SEQ ID NO: 5117616 - DNA, 25 bp, Homo sapien
gcttggttccacctcaaaaagcttc

SEQ ID NO: 5117617 - DNA, 25 bp, Homo sapien
gatccaagaattgtgcttggttcca

SEQ ID NO: 5117618 - DNA, 25 bp, Homo sapien
tcagaggccatagagcaagaacttc

SEQ ID NO: 5117619 - DNA, 25 bp, Homo sapien
cgaacgcctttatgccagtgtggca

SEQ ID NO: 5117620 - DNA, 25 bp, Homo sapien
gaaagatagtggaacatcgaacgcc

SEQ ID NO: 5117621 - DNA, 25 bp, Homo sapien
agaacttctcgactcccagatgcag

SEQ ID NO: 5117622 - DNA, 25 bp, Homo sapien
agaccctagaaaccaccgatcatgt

SEQ ID NO: 5117623 - DNA, 25 bp, Homo sapien
taattagtaagacccatggcagacc

SEQ ID NO: 5117624 - DNA, 25 bp, Homo sapien
actcaacagccccagtaatttcagc

SEQ ID NO: 5117625 - DNA, 25 bp, Homo sapien
gaaaccaccgatcatgtgctgaaca

SEQ ID NO: 5117626 - DNA, 25 bp, Homo sapien
caaatctttctactcagttcatgca

SEQ ID NO: 5117627 - DNA, 25 bp, Homo sapien
gccaaatctttctactcagttcatg

SEQ ID NO: 5117628 - DNA, 25 bp, Homo sapien
aggccaaatctttctactcagttca

SEQ ID NO: 5117629 - DNA, 25 bp, Homo sapien
aaaggccaaatctttctactcagtt

SEQ ID NO: 5117630 - DNA, 25 bp, Homo sapien
cagctaggccaagatcacgtctctc

SEQ ID NO: 5117631 - DNA, 25 bp, Homo sapien
gacagatcggtgctcatcttcccag

SEQ ID NO: 5117632 - DNA, 25 bp, Homo sapien
tccatgtgaccaccagacagatcgg

SEQ ID NO: 5117633 - DNA, 25 bp, Homo sapien
cacgcctccgatgagtggtttcgat

SEQ ID NO: 5117634 - DNA, 25 bp, Homo sapien
cagtcatcttctttcgctgtgcctg

SEQ ID NO: 5117635 - DNA, 25 bp, Homo sapien
aacaatggatgggatgagtgtgtgc

SEQ ID NO: 5117636 - DNA, 25 bp, Homo sapien
gtgtgcatgcttcctacatgaacca

SEQ ID NO: 5117637 - DNA, 25 bp, Homo sapien
gctgggtttgtaccacagtcatctt

SEQ ID NO: 5117638 - DNA, 25 bp, Homo sapien
tgatcaggccctatgctaagcatgt

SEQ ID NO: 5117639 - DNA, 25 bp, Homo sapien
tatcaaatgccaaccatgatcaggc

SEQ ID NO: 5117640 - DNA, 25 bp, Homo sapien
taggagagagcttgggctcatcagc

SEQ ID NO: 5117641 - DNA, 25 bp, Homo sapien
cattttactgatcaagaagcaggct

SEQ ID NO: 5117642 - DNA, 25 bp, Homo sapien
tctatccctaaattactctcttcgg

SEQ ID NO: 5117643 - DNA, 25 bp, Homo sapien
gacagcgatcggcactcgtgctgcc

SEQ ID NO: 5117644 - DNA, 25 bp, Homo sapien
cctgagcgccctcgcctgacagcga

SEQ ID NO: 5117645 - DNA, 25 bp, Homo sapien
taaattactctcttcggctcccacc

SEQ ID NO: 5117646 - DNA, 25 bp, Homo sapien
cttggaggtgcagcgcggagctcgc

SEQ ID NO: 5117647 - DNA, 25 bp, Homo sapien
agacctgggtcggattcctctgctc

SEQ ID NO: 5117648 - DNA, 25 bp, Homo sapien
gcagcttggtggagtccgcaggcgt

SEQ ID NO: 5117649 - DNA, 25 bp, Homo sapien
ggtgcagccatgtaaggccttacga

SEQ ID NO: 5117650 - DNA, 25 bp, Homo sapien
tacagtcaaacacatcaggaaccta

SEQ ID NO: 5117651 - DNA, 25 bp, Homo sapien
tcttcttgaggcctgctacacagct

SEQ ID NO: 5117652 - DNA, 25 bp, Homo sapien
tattatttgccgctgagtcatatgg

SEQ ID NO: 5117653 - DNA, 25 bp, Homo sapien
tcatgactagatgcttcagtgcagt

SEQ ID NO: 5117654 - DNA, 25 bp, Homo sapien
tggaatccctgcgttttaaagctga

SEQ ID NO: 5117655 - DNA, 25 bp, Homo sapien
tggtagccctgacaacccattgaga

SEQ ID NO: 5117656 - DNA, 25 bp, Homo sapien
ccgaggcccagtatctagtgagaga

SEQ ID NO: 5117657 - DNA, 25 bp, Homo sapien
ctttaacagacgaggctaccgaggc

SEQ ID NO: 5117658 - DNA, 25 bp, Homo sapien
tgagctctccaattggtccccttga

SEQ ID NO: 5117659 - DNA, 25 bp, Homo sapien
tggtccccttgatcgatacatgtgg

SEQ ID NO: 5117660 - DNA, 25 bp, Homo sapien
gctaaatgctgagctctccaattgg

SEQ ID NO: 5117661 - DNA, 25 bp, Homo sapien
ccaattggtccccttgatcgataca

SEQ ID NO: 5117662 - DNA, 25 bp, Homo sapien
gaaggtgagttacagctcccagtca

SEQ ID NO: 5117663 - DNA, 25 bp, Homo sapien
ctgagaaggtgagttacagctccca

SEQ ID NO: 5117664 - DNA, 25 bp, Homo sapien
gagaaggtgagttacagctcccagt

SEQ ID NO: 5117665 - DNA, 25 bp, Homo sapien
aaggtgagttacagctcccagtcat

SEQ ID NO: 5117666 - DNA, 25 bp, Homo sapien
ccagccttcaagcccacctcctaat

SEQ ID NO: 5117667 - DNA, 25 bp, Homo sapien
agccttcaagcccacctcctaatgg

SEQ ID NO: 5117668 - DNA, 25 bp, Homo sapien
agcccacctcctaatggaaagaaag

SEQ ID NO: 5117669 - DNA, 25 bp, Homo sapien
caagcccacctcctaatggaaagaa

SEQ ID NO: 5117670 - DNA, 25 bp, Homo sapien
taccagtgacagtaactaaatcagc

SEQ ID NO: 5117671 - DNA, 25 bp, Homo sapien
gctgaggtacccgatgaggttttca

SEQ ID NO: 5117672 - DNA, 25 bp, Homo sapien
taacccaaagactcaggctggctga

SEQ ID NO: 5117673 - DNA, 25 bp, Homo sapien
ggctccctctggcatttatgcagaa

SEQ ID NO: 5117674 - DNA, 25 bp, Homo sapien
tacctttggtttctataggtcactg

SEQ ID NO: 5117675 - DNA, 25 bp, Homo sapien
cactgctgcacgttttaataggctc

SEQ ID NO: 5117676 - DNA, 25 bp, Homo sapien
agcatctctggagcggtaatatgat

SEQ ID NO: 5117677 - DNA, 25 bp, Homo sapien
tgcagtgagcacttggacaggcaac

SEQ ID NO: 5117678 - DNA, 25 bp, Homo sapien
tcaccaactgtgagagtctccctgc

SEQ ID NO: 5117679 - DNA, 25 bp, Homo sapien
gatgctgactgacctacagtgtgaa

SEQ ID NO: 5117680 - DNA, 25 bp, Homo sapien
taccagggttttcatcacttcccag

SEQ ID NO: 5117681 - DNA, 25 bp, Homo sapien
cccagctgcttgaaccttcttgatg

SEQ ID NO: 5117682 - DNA, 25 bp, Homo sapien
aggcctctgagctttccgcactctc

SEQ ID NO: 5117683 - DNA, 25 bp, Homo sapien
agattctcctacagatccccttcta

SEQ ID NO: 5117684 - DNA, 25 bp, Homo sapien
ttgcctctgatggtcttttcttgtc

SEQ ID NO: 5117685 - DNA, 25 bp, Homo sapien
caggtctccttattcttaacagatt

SEQ ID NO: 5117686 - DNA, 25 bp, Homo sapien
gagagctggtggatgagggatagga

SEQ ID NO: 5117687 - DNA, 25 bp, Homo sapien
agattgggagagctggtggatgagg

SEQ ID NO: 5117688 - DNA, 25 bp, Homo sapien
ctgagattgggagagctggtggatg

SEQ ID NO: 5117689 - DNA, 25 bp, Homo sapien
gggagagctggtggatgagggatag

SEQ ID NO: 5117690 - DNA, 25 bp, Homo sapien
aacaactgcaactgccagtctccca

SEQ ID NO: 5117691 - DNA, 25 bp, Homo sapien
cctgtaaatgccacttggcaacaac

SEQ ID NO: 5117692 - DNA, 25 bp, Homo sapien
atgccacttggcaacaactgcaact

SEQ ID NO: 5117693 - DNA, 25 bp, Homo sapien
taaatgccacttggcaacaactgca

SEQ ID NO: 5117694 - DNA, 25 bp, Homo sapien
accagcatggtgcatgtatacgtat

SEQ ID NO: 5117695 - DNA, 25 bp, Homo sapien
caccagcatggtgcatgtatacgta

SEQ ID NO: 5117696 - DNA, 25 bp, Homo sapien
gaccctgtacaagaggatgggctaa

SEQ ID NO: 5117697 - DNA, 25 bp, Homo sapien
gaagtatatggatttgggcaagcac

SEQ ID NO: 5117698 - DNA, 25 bp, Homo sapien
ggcaatttcaaacagccacggcctc

SEQ ID NO: 5117699 - DNA, 25 bp, Homo sapien
cacacaggcagtaatcccaggtaga

SEQ ID NO: 5117700 - DNA, 25 bp, Homo sapien
cagagtgtgactcttcagtgtggtg

SEQ ID NO: 5117701 - DNA, 25 bp, Homo sapien
tagagatctggctcaaaggaactac

SEQ ID NO: 5117702 - DNA, 25 bp, Homo sapien
aactcatcatatctgtaggttccag

SEQ ID NO: 5117703 - DNA, 25 bp, Homo sapien
tagaagaacccgcaagatatggaag

SEQ ID NO: 5117704 - DNA, 25 bp, Homo sapien
tagagcaggcaatacaagagtcggc

SEQ ID NO: 5117705 - DNA, 25 bp, Homo sapien
tagcactggtggagaatggcaagcc

SEQ ID NO: 5117706 - DNA, 25 bp, Homo sapien
gctaacttcggccacaggatcactg

SEQ ID NO: 5117707 - DNA, 25 bp, Homo sapien
tcacaactgctagaaggcgcctcag

SEQ ID NO: 5117708 - DNA, 25 bp, Homo sapien
gcggagacgcgagaggggaggcggg

SEQ ID NO: 5117709 - DNA, 25 bp, Homo sapien
gggaaaccgaggcggagacgcgaga

SEQ ID NO: 5117710 - DNA, 25 bp, Homo sapien
cggagacgcgagaggggaggcgggc

SEQ ID NO: 5117711 - DNA, 25 bp, Homo sapien
taggcaagcagatgcgaggcaatca

SEQ ID NO: 5117712 - DNA, 25 bp, Homo sapien
tgcacttggtcatggttgagctccg

SEQ ID NO: 5117713 - DNA, 25 bp, Homo sapien
cgtgaagaagtaggcaagcagatgc

SEQ ID NO: 5117714 - DNA, 25 bp, Homo sapien
gtcatggttgagctccgtgaagaag

SEQ ID NO: 5117715 - DNA, 25 bp, Homo sapien
gcagccacgattctctccacgtgct

SEQ ID NO: 5117716 - DNA, 25 bp, Homo sapien
cgccggaactcgcgctgcagaaggg

SEQ ID NO: 5117717 - DNA, 25 bp, Homo sapien
acgtgggcgcagcaatccctgacta

SEQ ID NO: 5117718 - DNA, 25 bp, Homo sapien
cggcagcggagcagcctcccgcagc

SEQ ID NO: 5117719 - DNA, 25 bp, Homo sapien
tctttcagttcatcagatctcctta

SEQ ID NO: 5117720 - DNA, 25 bp, Homo sapien
tcaaagctcaacgatgataatgagg

SEQ ID NO: 5117721 - DNA, 25 bp, Homo sapien
gaggaacgtcttatcaagatgtggt

SEQ ID NO: 5117722 - DNA, 25 bp, Homo sapien
tccttactcccattgccaactgtgg

SEQ ID NO: 5117723 - DNA, 25 bp, Homo sapien
ctctggttgagaatacagaaacagc

SEQ ID NO: 5117724 - DNA, 25 bp, Homo sapien
caagggcaactgactaaactcctct

SEQ ID NO: 5117725 - DNA, 25 bp, Homo sapien
gctgtgaactgtagacctcatctta

SEQ ID NO: 5117726 - DNA, 25 bp, Homo sapien
ctggagcacttgtattgcccacatt

SEQ ID NO: 5117727 - DNA, 25 bp, Homo sapien
tgtgagaatggccattcccttctgt

SEQ ID NO: 5117728 - DNA, 25 bp, Homo sapien
aaatgatttcccctgtggaaagcca

SEQ ID NO: 5117729 - DNA, 25 bp, Homo sapien
tcatggcgggtcctgtgactcttca

SEQ ID NO: 5117730 - DNA, 25 bp, Homo sapien
ccaatctgccgaaagaatgtgagaa

SEQ ID NO: 5117731 - DNA, 25 bp, Homo sapien
cctccaggatcctgttgcagcggtt

SEQ ID NO: 5117732 - DNA, 25 bp, Homo sapien
cctgttgcagcggttgtgagtcaca

SEQ ID NO: 5117733 - DNA, 25 bp, Homo sapien
cagcgggtaagcgcagagctgacca

SEQ ID NO: 5117734 - DNA, 25 bp, Homo sapien
tgcagactcacaaacccgaggcagc

SEQ ID NO: 5117735 - DNA, 25 bp, Homo sapien
tataggtatgcaccctcgtacccag

SEQ ID NO: 5117736 - DNA, 25 bp, Homo sapien
gccagtttgatgactctcgttctag

SEQ ID NO: 5117737 - DNA, 25 bp, Homo sapien
catcacttgtgtctgcagggcacac

SEQ ID NO: 5117738 - DNA, 25 bp, Homo sapien
ttactgaaagctgaaccaaatcact

SEQ ID NO: 5117739 - DNA, 25 bp, Homo sapien
ttccattggaacaaagctcaaaatc

SEQ ID NO: 5117740 - DNA, 25 bp, Homo sapien
gctgatccccggctttcagggcttt

SEQ ID NO: 5117741 - DNA, 25 bp, Homo sapien
tcagggctttccattggaacaaagc

SEQ ID NO: 5117742 - DNA, 25 bp, Homo sapien
tcaaaatcctttcagggccccacat

SEQ ID NO: 5117743 - DNA, 25 bp, Homo sapien
ttagagatctccaagagggtctcat

SEQ ID NO: 5117744 - DNA, 25 bp, Homo sapien
ttgcggaaccgcttagagatctcca

SEQ ID NO: 5117745 - DNA, 25 bp, Homo sapien
tctccaagagggtctcatcagagag

SEQ ID NO: 5117746 - DNA, 25 bp, Homo sapien
atctccttgcggaaccgcttagaga

SEQ ID NO: 5117747 - DNA, 25 bp, Homo sapien
tagagccatcccccagatgcagtac

SEQ ID NO: 5117748 - DNA, 25 bp, Homo sapien
ctagagccatcccccagatgcagta

SEQ ID NO: 5117749 - DNA, 25 bp, Homo sapien
caacagtgatgccacagtagggctg

SEQ ID NO: 5117750 - DNA, 25 bp, Homo sapien
tagggctgacaaaggtgccctccct

SEQ ID NO: 5117751 - DNA, 25 bp, Homo sapien
gagccaagcagcctttctcagcaca

SEQ ID NO: 5117752 - DNA, 25 bp, Homo sapien
catcactgcgtgcaatctcagtggg

SEQ ID NO: 5117753 - DNA, 25 bp, Homo sapien
aaaattggctccctctagatctggg

SEQ ID NO: 5117754 - DNA, 25 bp, Homo sapien
gaaaagaatactagccatgaacggg

SEQ ID NO: 5117755 - DNA, 25 bp, Homo sapien
taaatcgctctgaagcacacagctt

SEQ ID NO: 5117756 - DNA, 25 bp, Homo sapien
aactacatatttcgtgccagcaaga

SEQ ID NO: 5117757 - DNA, 25 bp, Homo sapien
aatgcagagcaaccaagataagggc

SEQ ID NO: 5117758 - DNA, 25 bp, Homo sapien
tggcacaacgcctgacaatgtaagt

SEQ ID NO: 5117759 - DNA, 25 bp, Homo sapien
tctttaaagggcacgaggcagctta

SEQ ID NO: 5117760 - DNA, 25 bp, Homo sapien
tatcgcctggactacgtaagtaccc

SEQ ID NO: 5117761 - DNA, 25 bp, Homo sapien
acagcaaataccattgccaaggact

SEQ ID NO: 5117762 - DNA, 25 bp, Homo sapien
gtgacatggctataaacgcacagca

SEQ ID NO: 5117763 - DNA, 25 bp, Homo sapien
ctagtggctctagtggcactgtgga

SEQ ID NO: 5117764 - DNA, 25 bp, Homo sapien
tttccaaaagggctctagtggctct

SEQ ID NO: 5117765 - DNA, 25 bp, Homo sapien
gctccaccaagaacgggtggtgtgc

SEQ ID NO: 5117766 - DNA, 25 bp, Homo sapien
gatccgctgaatcagtgaccacagg

SEQ ID NO: 5117767 - DNA, 25 bp, Homo sapien
gctgcccctggtgggtcatcatccg

SEQ ID NO: 5117768 - DNA, 25 bp, Homo sapien
tctcaagtccaggatacacgcgatc

SEQ ID NO: 5117769 - DNA, 25 bp, Homo sapien
caaagatgaaatgcctcatcagcac

SEQ ID NO: 5117770 - DNA, 25 bp, Homo sapien
tcaaagatgaaatgcctcatcagca

SEQ ID NO: 5117771 - DNA, 25 bp, Homo sapien
cctgccacaaccttctcaaaggata

SEQ ID NO: 5117772 - DNA, 25 bp, Homo sapien
aggcaaggcgcatccgcaggtgact

SEQ ID NO: 5117773 - DNA, 25 bp, Homo sapien
acaaggatacaaggcaatttcctgg

SEQ ID NO: 5117774 - DNA, 25 bp, Homo sapien
gagcagcaccgccagtcttctgctg

SEQ ID NO: 5117775 - DNA, 25 bp, Homo sapien
acatccagatcctgggtgataatac

SEQ ID NO: 5117776 - DNA, 25 bp, Homo sapien
acagcagtgtagacaggaaacatcc

SEQ ID NO: 5117777 - DNA, 25 bp, Homo sapien
gggtgataataccaccgactatggg

SEQ ID NO: 5117778 - DNA, 25 bp, Homo sapien
aacagcagtgtagacaggaaacatc

SEQ ID NO: 5117779 - DNA, 25 bp, Homo sapien
ggtcatgtgatggagtggaatgagg

SEQ ID NO: 5117780 - DNA, 25 bp, Homo sapien
gggtcatgtgatggagtggaatgag

SEQ ID NO: 5117781 - DNA, 25 bp, Homo sapien
cagaggggtcatgtgatggagtgga

SEQ ID NO: 5117782 - DNA, 25 bp, Homo sapien
agaccagaggggtcatgtgatggag

SEQ ID NO: 5117783 - DNA, 25 bp, Homo sapien
gaacaccaaattgcaagcacggtat

SEQ ID NO: 5117784 - DNA, 25 bp, Homo sapien
tgcaattgcagtactaaatttactt

SEQ ID NO: 5117785 - DNA, 25 bp, Homo sapien
tgcaagcacggtattaaatttactt

SEQ ID NO: 5117786 - DNA, 25 bp, Homo sapien
gtttgcatattatgagggccatgtc

SEQ ID NO: 5117787 - DNA, 25 bp, Homo sapien
ctcctgagagccgactacctcctca

SEQ ID NO: 5117788 - DNA, 25 bp, Homo sapien
agccccatgccaggggtgcatgcct

SEQ ID NO: 5117789 - DNA, 25 bp, Homo sapien
ctgagagccgactacctcctcagtg

SEQ ID NO: 5117790 - DNA, 25 bp, Homo sapien
atgccaggggtgcatgcctccatcc

SEQ ID NO: 5117791 - DNA, 25 bp, Homo sapien
gaagggccactattaattttgggca

SEQ ID NO: 5117792 - DNA, 25 bp, Homo sapien
ttgggcaaaattcttccaggaacca

SEQ ID NO: 5117793 - DNA, 25 bp, Homo sapien
tcttccaggaaccaaccgagactta

SEQ ID NO: 5117794 - DNA, 25 bp, Homo sapien
aaactccaagtccctccaggaatat

SEQ ID NO: 5117795 - DNA, 25 bp, Homo sapien
tgggtgccactgcctcgcatgatgt

SEQ ID NO: 5117796 - DNA, 25 bp, Homo sapien
gggtgccactgcctcgcatgatgtc

SEQ ID NO: 5117797 - DNA, 25 bp, Homo sapien
aaagtacagaaagaacatgccaagg

SEQ ID NO: 5117798 - DNA, 25 bp, Homo sapien
cagaaagaacatgccaaggaagttt

SEQ ID NO: 5117799 - DNA, 25 bp, Homo sapien
cctatccacacgctgggagcggctg

SEQ ID NO: 5117800 - DNA, 25 bp, Homo sapien
ctatccacacgctgggagcggctgg

SEQ ID NO: 5117801 - DNA, 25 bp, Homo sapien
ggcattcggcaatgtggtcaaacag

SEQ ID NO: 5117802 - DNA, 25 bp, Homo sapien
aagttagccaggcattcggcaatgt

SEQ ID NO: 5117803 - DNA, 25 bp, Homo sapien
ccaggcattcggcaatgtggtcaaa

SEQ ID NO: 5117804 - DNA, 25 bp, Homo sapien
tagccaggcattcggcaatgtggtc

SEQ ID NO: 5117805 - DNA, 25 bp, Homo sapien
ttgtctttgatttgtagcttatcca

SEQ ID NO: 5117806 - DNA, 25 bp, Homo sapien
aaaacccagtgggagcttcttgtct

SEQ ID NO: 5117807 - DNA, 25 bp, Homo sapien
tcgtctagtttagtctggtggcagg

SEQ ID NO: 5117808 - DNA, 25 bp, Homo sapien
ctcgtctagtttagtctggtggcag

SEQ ID NO: 5117809 - DNA, 25 bp, Homo sapien
accaagaagtgaatattgatttccc

SEQ ID NO: 5117810 - DNA, 25 bp, Homo sapien
gaccaagaagtgaatattgatttcc

SEQ ID NO: 5117811 - DNA, 25 bp, Homo sapien
ccaagaagtgaatattgatttccca

SEQ ID NO: 5117812 - DNA, 25 bp, Homo sapien
ggaccaagaagtgaatattgatttc

SEQ ID NO: 5117813 - DNA, 25 bp, Homo sapien
ctgccttccactccactggacttga

SEQ ID NO: 5117814 - DNA, 25 bp, Homo sapien
gacttgaatcccttggtccatgaga

SEQ ID NO: 5117815 - DNA, 25 bp, Homo sapien
cttccggatcagagccacaacgtct

SEQ ID NO: 5117816 - DNA, 25 bp, Homo sapien
tctcctctggatggccttccggatc

SEQ ID NO: 5117817 - DNA, 25 bp, Homo sapien
cagccacaatgtcgatatcaaagtc

SEQ ID NO: 5117818 - DNA, 25 bp, Homo sapien
ccacagccacaatgtcgatatcaaa

SEQ ID NO: 5117819 - DNA, 25 bp, Homo sapien
cacagccacaatgtcgatatcaaag

SEQ ID NO: 5117820 - DNA, 25 bp, Homo sapien
accacagccacaatgtcgatatcaa

SEQ ID NO: 5117821 - DNA, 25 bp, Homo sapien
tgagcgagccatcgtccccgaaggc

SEQ ID NO: 5117822 - DNA, 25 bp, Homo sapien
ctcctggtcaaactcagtgcgaatg

SEQ ID NO: 5117823 - DNA, 25 bp, Homo sapien
ttgagcgagccatcgtccccgaagg

SEQ ID NO: 5117824 - DNA, 25 bp, Homo sapien
gtcaatctcctggtcaaactcagtg

SEQ ID NO: 5117825 - DNA, 25 bp, Homo sapien
agtccccactgcccatgtactcata

SEQ ID NO: 5117826 - DNA, 25 bp, Homo sapien
cactgcccatgtactcatagcttcc

SEQ ID NO: 5117827 - DNA, 25 bp, Homo sapien
aaaacataaagtccccactgcccat

SEQ ID NO: 5117828 - DNA, 25 bp, Homo sapien
ataaagtccccactgcccatgtact

SEQ ID NO: 5117829 - DNA, 25 bp, Homo sapien
tcttcaccaggataagcctcaccag

SEQ ID NO: 5117830 - DNA, 25 bp, Homo sapien
tttggtctcaaagcgaccggtgttg

SEQ ID NO: 5117831 - DNA, 25 bp, Homo sapien
tgtctttggtctcaaagcgaccggt

SEQ ID NO: 5117832 - DNA, 25 bp, Homo sapien
aagcgaccggtgttgagaagctctg

SEQ ID NO: 5117833 - DNA, 25 bp, Homo sapien
aaccgtcgaccccaatagtagagcg

SEQ ID NO: 5117834 - DNA, 25 bp, Homo sapien
gcccaaccgcatcaggacctcacgg

SEQ ID NO: 5117835 - DNA, 25 bp, Homo sapien
cagatccggtgagtggccacgcagt

SEQ ID NO: 5117836 - DNA, 25 bp, Homo sapien
atcaggacctcacgggccttccgga

SEQ ID NO: 5117837 - DNA, 25 bp, Homo sapien
gacaggaacaataacgcatacaaga

SEQ ID NO: 5117838 - DNA, 25 bp, Homo sapien
caataacgcatacaagagggtggca

SEQ ID NO: 5117839 - DNA, 25 bp, Homo sapien
gaacaataacgcatacaagagggtg

SEQ ID NO: 5117840 - DNA, 25 bp, Homo sapien
taacgcatacaagagggtggcaaag

SEQ ID NO: 5117841 - DNA, 25 bp, Homo sapien
gccagagaagctggtaaccctcact

SEQ ID NO: 5117842 - DNA, 25 bp, Homo sapien
ccctggcagaggacatagcacctgc

SEQ ID NO: 5117843 - DNA, 25 bp, Homo sapien
agctggtaaccctcactgggctggg

SEQ ID NO: 5117844 - DNA, 25 bp, Homo sapien
cagaggacatagcacctgcaggaat

SEQ ID NO: 5117845 - DNA, 25 bp, Homo sapien
ctgcagttccccagggcgggtaaga

SEQ ID NO: 5117846 - DNA, 25 bp, Homo sapien
gggcgggtaagagacaggtgtccat

SEQ ID NO: 5117847 - DNA, 25 bp, Homo sapien
ccagggcgggtaagagacaggtgtc

SEQ ID NO: 5117848 - DNA, 25 bp, Homo sapien
ccccagggcgggtaagagacaggtg

SEQ ID NO: 5117849 - DNA, 25 bp, Homo sapien
cactgccatcctcggagcggaggaa

SEQ ID NO: 5117850 - DNA, 25 bp, Homo sapien
cacggtcttatgtagacgcttggca

SEQ ID NO: 5117851 - DNA, 25 bp, Homo sapien
tgttgatcggccagccggtaagcca

SEQ ID NO: 5117852 - DNA, 25 bp, Homo sapien
tcttctggcgggcacggtgttgatc

SEQ ID NO: 5117853 - DNA, 25 bp, Homo sapien
gggcactggcatgagtctccttgct

SEQ ID NO: 5117854 - DNA, 25 bp, Homo sapien
gtgccgtccggggtagcacacacgt

SEQ ID NO: 5117855 - DNA, 25 bp, Homo sapien
cgtccggggtagcacacacgtaggt

SEQ ID NO: 5117856 - DNA, 25 bp, Homo sapien
gggcagcatcttgacgggggcactg

SEQ ID NO: 5117857 - DNA, 25 bp, Homo sapien
tgtgagccaggtggcaaccctgccg

SEQ ID NO: 5117858 - DNA, 25 bp, Homo sapien
gccaggtggcaaccctgccgtgtac

SEQ ID NO: 5117859 - DNA, 25 bp, Homo sapien
tgagccaggtggcaaccctgccgtg

SEQ ID NO: 5117860 - DNA, 25 bp, Homo sapien
catgtgagccaggtggcaaccctgc

SEQ ID NO: 5117861 - DNA, 25 bp, Homo sapien
taagcccagggaagtgataagttgg

SEQ ID NO: 5117862 - DNA, 25 bp, Homo sapien
gaagtgataagttggggcagaacat

SEQ ID NO: 5117863 - DNA, 25 bp, Homo sapien
taagttggggcagaacatggggaat

SEQ ID NO: 5117864 - DNA, 25 bp, Homo sapien
ataagcccagggaagtgataagttg

SEQ ID NO: 5117865 - DNA, 25 bp, Homo sapien
cagcaggacccggaaatttgttcct

SEQ ID NO: 5117866 - DNA, 25 bp, Homo sapien
atcttgttgtgcatctccactccac

SEQ ID NO: 5117867 - DNA, 25 bp, Homo sapien
gatcttgttgtgcatctccactcca

SEQ ID NO: 5117868 - DNA, 25 bp, Homo sapien
ccagaggcagggacacgcccttcat

SEQ ID NO: 5117869 - DNA, 25 bp, Homo sapien
gggacacgcccttcatgcccatgta

SEQ ID NO: 5117870 - DNA, 25 bp, Homo sapien
agaggcagggacacgcccttcatgc

SEQ ID NO: 5117871 - DNA, 25 bp, Homo sapien
cagggacacgcccttcatgcccatg

SEQ ID NO: 5117872 - DNA, 25 bp, Homo sapien
tagagtcaataaagcccacaggaga

SEQ ID NO: 5117873 - DNA, 25 bp, Homo sapien
ttagagtcaataaagcccacaggag

SEQ ID NO: 5117874 - DNA, 25 bp, Homo sapien
accggcagcgtgcacgtgcactcct

SEQ ID NO: 5117875 - DNA, 25 bp, Homo sapien
ggcagcgtgcacgtgcactcctaca

SEQ ID NO: 5117876 - DNA, 25 bp, Homo sapien
cacaccggcagcgtgcacgtgcact

SEQ ID NO: 5117877 - DNA, 25 bp, Homo sapien
agcgtgcacgtgcactcctacatga

SEQ ID NO: 5117878 - DNA, 25 bp, Homo sapien
gccctcgcagccagatgccttgaag

SEQ ID NO: 5117879 - DNA, 25 bp, Homo sapien
cggtggatcgcttccttcagcaggg

SEQ ID NO: 5117880 - DNA, 25 bp, Homo sapien
ccagatgccttgaagccttttgtcc

SEQ ID NO: 5117881 - DNA, 25 bp, Homo sapien
ccttttgtccacttgaggaggatgc

SEQ ID NO: 5117882 - DNA, 25 bp, Homo sapien
gctgagagcattgcttgacacacag

SEQ ID NO: 5117883 - DNA, 25 bp, Homo sapien
cacagaccaggccaatcattgagga

SEQ ID NO: 5117884 - DNA, 25 bp, Homo sapien
tcctgaaccgccagtgctgagagca

SEQ ID NO: 5117885 - DNA, 25 bp, Homo sapien
cactaaactgctgaacgacgcttga

SEQ ID NO: 5117886 - DNA, 25 bp, Homo sapien
tatatatcatacaccatggctgacc

SEQ ID NO: 5117887 - DNA, 25 bp, Homo sapien
ggctgaccctctcattccattcagg

SEQ ID NO: 5117888 - DNA, 25 bp, Homo sapien
agcagatgcccagttcacaggtgaa

SEQ ID NO: 5117889 - DNA, 25 bp, Homo sapien
cctttcagacaattgcatgggagat

SEQ ID NO: 5117890 - DNA, 25 bp, Homo sapien
atgaggccaacttcacagtgagggt

SEQ ID NO: 5117891 - DNA, 25 bp, Homo sapien
caccagttccacgttgcgcatctcc

SEQ ID NO: 5117892 - DNA, 25 bp, Homo sapien
aattctgtgcggaagtcatctaggc

SEQ ID NO: 5117893 - DNA, 25 bp, Homo sapien
tgagtgaaagctcatccacagccac

SEQ ID NO: 5117894 - DNA, 25 bp, Homo sapien
taggcatccattgtccccgaaggcc

SEQ ID NO: 5117895 - DNA, 25 bp, Homo sapien
gccgctctgagatgcggcctcggaa

SEQ ID NO: 5117896 - DNA, 25 bp, Homo sapien
gagtagtccacgcttggtgaaatcg

SEQ ID NO: 5117897 - DNA, 25 bp, Homo sapien
tgtcttgagccgctctgagatgcgg

SEQ ID NO: 5117898 - DNA, 25 bp, Homo sapien
gatgcggcctcggaagagtagtcca

SEQ ID NO: 5117899 - DNA, 25 bp, Homo sapien
gggtgggagggagacagcaagtgtt

SEQ ID NO: 5117900 - DNA, 25 bp, Homo sapien
tgggagggagacagcaagtgttcag

SEQ ID NO: 5117901 - DNA, 25 bp, Homo sapien
agggagacagcaagtgttcagtcat

SEQ ID NO: 5117902 - DNA, 25 bp, Homo sapien
ggagggagacagcaagtgttcagtc

SEQ ID NO: 5117903 - DNA, 25 bp, Homo sapien
cactgtcactttgagagcgtccagc

SEQ ID NO: 5117904 - DNA, 25 bp, Homo sapien
gtgcacacctccttaacaatgatgc

SEQ ID NO: 5117905 - DNA, 25 bp, Homo sapien
tgtagcttgtagagggtcccatcca

SEQ ID NO: 5117906 - DNA, 25 bp, Homo sapien
tgctgtcgtcacaggtgctctcaag

SEQ ID NO: 5117907 - DNA, 25 bp, Homo sapien
tggaaaaggtgggaggaagacacag

SEQ ID NO: 5117908 - DNA, 25 bp, Homo sapien
gaaaaggtgggaggaagacacagga

SEQ ID NO: 5117909 - DNA, 25 bp, Homo sapien
ctggaaaaggtgggaggaagacaca

SEQ ID NO: 5117910 - DNA, 25 bp, Homo sapien
tgggaggaagacacaggaaaaacca

SEQ ID NO: 5117911 - DNA, 25 bp, Homo sapien
gacacatcacatttcggagccaggt

SEQ ID NO: 5117912 - DNA, 25 bp, Homo sapien
acatttcggagccaggtccttcact

SEQ ID NO: 5117913 - DNA, 25 bp, Homo sapien
cactgtctcatgcatgactttggca

SEQ ID NO: 5117914 - DNA, 25 bp, Homo sapien
ctctgactgcaggaaagacacatca

SEQ ID NO: 5117915 - DNA, 25 bp, Homo sapien
gaatcagtaacaacatcagtgctgg

SEQ ID NO: 5117916 - DNA, 25 bp, Homo sapien
gatgcagagacaaaacccagtccag

SEQ ID NO: 5117917 - DNA, 25 bp, Homo sapien
ctctctgccaagcaaaagccaaggg

SEQ ID NO: 5117918 - DNA, 25 bp, Homo sapien
gaaatgtcatgttcaggctccaagg

SEQ ID NO: 5117919 - DNA, 25 bp, Homo sapien
ctgctgcgtggatatccatggattt

SEQ ID NO: 5117920 - DNA, 25 bp, Homo sapien
ggctgctgcgtggatatccatggat

SEQ ID NO: 5117921 - DNA, 25 bp, Homo sapien
ggggctgctgcgtggatatccatgg

SEQ ID NO: 5117922 - DNA, 25 bp, Homo sapien
gctgctgcgtggatatccatggatt

SEQ ID NO: 5117923 - DNA, 25 bp, Homo sapien
tcagcctagggaagcacatggacaa

SEQ ID NO: 5117924 - DNA, 25 bp, Homo sapien
ttgtggataacatgtgcgccccgct

SEQ ID NO: 5117925 - DNA, 25 bp, Homo sapien
caagactagagcaaacgagaaggac

SEQ ID NO: 5117926 - DNA, 25 bp, Homo sapien
tattttaggacagaggcgggctttc

SEQ ID NO: 5117927 - DNA, 25 bp, Homo sapien
gaccgcaggactagccatagctctt

SEQ ID NO: 5117928 - DNA, 25 bp, Homo sapien
cataaattactcatcgggctggcca

SEQ ID NO: 5117929 - DNA, 25 bp, Homo sapien
gctatttaaacagtagaccgcagga

SEQ ID NO: 5117930 - DNA, 25 bp, Homo sapien
ggtggtgctaatttcagccaagcta

SEQ ID NO: 5117931 - DNA, 25 bp, Homo sapien
ctccattatcctcttagccatggtc

SEQ ID NO: 5117932 - DNA, 25 bp, Homo sapien
tccattatcctcttagccatggtca

SEQ ID NO: 5117933 - DNA, 25 bp, Homo sapien
tctccattatcctcttagccatggt

SEQ ID NO: 5117934 - DNA, 25 bp, Homo sapien
tgatgttgctaatccctgggttgct

SEQ ID NO: 5117935 - DNA, 25 bp, Homo sapien
tcttgatgttgctaatccctgggtt

SEQ ID NO: 5117936 - DNA, 25 bp, Homo sapien
ttttcttgatgttgctaatccctgg

SEQ ID NO: 5117937 - DNA, 25 bp, Homo sapien
tacttttcttgatgttgctaatccc

SEQ ID NO: 5117938 - DNA, 25 bp, Homo sapien
gaatccacaaacattatcttgtgaa

SEQ ID NO: 5117939 - DNA, 25 bp, Homo sapien
attgaacctggactagagcactgaa

SEQ ID NO: 5117940 - DNA, 25 bp, Homo sapien
ggaattgaacctggactagagcact

SEQ ID NO: 5117941 - DNA, 25 bp, Homo sapien
aattgaacctggactagagcactga

SEQ ID NO: 5117942 - DNA, 25 bp, Homo sapien
gaattgaacctggactagagcactg

SEQ ID NO: 5117943 - DNA, 25 bp, Homo sapien
gaagggagagatgccgtctatgaac

SEQ ID NO: 5117944 - DNA, 25 bp, Homo sapien
catccaacatgtaagaatgaaggga

SEQ ID NO: 5117945 - DNA, 25 bp, Homo sapien
taagttatgaggtgaaacccttata

SEQ ID NO: 5117946 - DNA, 25 bp, Homo sapien
caaaccaagttctatagattgaatg

SEQ ID NO: 5117947 - DNA, 25 bp, Homo sapien
ctgccaaggatactgattcccattt

SEQ ID NO: 5117948 - DNA, 25 bp, Homo sapien
tacttcaacgctccgattggtgctt

SEQ ID NO: 5117949 - DNA, 25 bp, Homo sapien
ctccgattggtgcttcttgtctgct

SEQ ID NO: 5117950 - DNA, 25 bp, Homo sapien
tcccatttacttcaacgctccgatt

SEQ ID NO: 5117951 - DNA, 25 bp, Homo sapien
tcctgctggcatggacgagtgctgc

SEQ ID NO: 5117952 - DNA, 25 bp, Homo sapien
cgagtgctgcgtgttcctaagtgcc

SEQ ID NO: 5117953 - DNA, 25 bp, Homo sapien
gaacatcgcttcatcaattggtcct

SEQ ID NO: 5117954 - DNA, 25 bp, Homo sapien
aattacaccaatcctctccaaaaga

SEQ ID NO: 5117955 - DNA, 25 bp, Homo sapien
tgttgtcgagtaaacaagtgcctcc

SEQ ID NO: 5117956 - DNA, 25 bp, Homo sapien
tctgttgtcgagtaaacaagtgcct

SEQ ID NO: 5117957 - DNA, 25 bp, Homo sapien
tgtcgagtaaacaagtgcctcctct

SEQ ID NO: 5117958 - DNA, 25 bp, Homo sapien
cttgtctgttgtcgagtaaacaagt

SEQ ID NO: 5117959 - DNA, 25 bp, Homo sapien
catatctggaggagtcttaacggtc

SEQ ID NO: 5117960 - DNA, 25 bp, Homo sapien
tgattgatcctaaagtccagcctgg

SEQ ID NO: 5117961 - DNA, 25 bp, Homo sapien
tacagggtaaaggaggcttgctgcc

SEQ ID NO: 5117962 - DNA, 25 bp, Homo sapien
taacagttgaccatcagtagcccag

SEQ ID NO: 5117963 - DNA, 25 bp, Homo sapien
cagctattcctgttcagatccggga

SEQ ID NO: 5117964 - DNA, 25 bp, Homo sapien
gaaatatctgcccatgctcttttgg

SEQ ID NO: 5117965 - DNA, 25 bp, Homo sapien
ccgggaaatatctgcccatgctctt

SEQ ID NO: 5117966 - DNA, 25 bp, Homo sapien
catagagtccagacaccagctattc

SEQ ID NO: 5117967 - DNA, 25 bp, Homo sapien
ggactcactggcaattcaccttctg

SEQ ID NO: 5117968 - DNA, 25 bp, Homo sapien
gctgagatccagaccttgatgggaa

SEQ ID NO: 5117969 - DNA, 25 bp, Homo sapien
gacttactgggtggtgcagtcaccg

SEQ ID NO: 5117970 - DNA, 25 bp, Homo sapien
tgacatgtacagaaagcggccacta

SEQ ID NO: 5117971 - DNA, 25 bp, Homo sapien
tacaaggtcctaggttgttcctcaa

SEQ ID NO: 5117972 - DNA, 25 bp, Homo sapien
catgtccatggaaagtgtaagctca

SEQ ID NO: 5117973 - DNA, 25 bp, Homo sapien
taacattttggttatggctcctgcc

SEQ ID NO: 5117974 - DNA, 25 bp, Homo sapien
gacggcttcaaaggagttgctcaat

SEQ ID NO: 5117975 - DNA, 25 bp, Homo sapien
aatatgcctaccaagatcaaagccc

SEQ ID NO: 5117976 - DNA, 25 bp, Homo sapien
tgactcctggacgtacaccgtgtgt

SEQ ID NO: 5117977 - DNA, 25 bp, Homo sapien
gttaacatttgctattacctcaggg

SEQ ID NO: 5117978 - DNA, 25 bp, Homo sapien
tcccatcagaataagactgcaacag

SEQ ID NO: 5117979 - DNA, 25 bp, Homo sapien
tagtgtgcaaaggttaacatcctcc

SEQ ID NO: 5117980 - DNA, 25 bp, Homo sapien
gagaataagaagcatgaacaccaag

SEQ ID NO: 5117981 - DNA, 25 bp, Homo sapien
gccgtgtgtgctgcaaacttcccac

SEQ ID NO: 5117982 - DNA, 25 bp, Homo sapien
tccaacagggcaaactgggtgagtc

SEQ ID NO: 5117983 - DNA, 25 bp, Homo sapien
ccttaggagatattcagcggtgaga

SEQ ID NO: 5117984 - DNA, 25 bp, Homo sapien
tgagagaactctatccgtccatcgt

SEQ ID NO: 5117985 - DNA, 25 bp, Homo sapien
catacggtctctgtgctggcttcct

SEQ ID NO: 5117986 - DNA, 25 bp, Homo sapien
taatcgacagatacaatggttccag

SEQ ID NO: 5117987 - DNA, 25 bp, Homo sapien
tggattctctagctgcttctgttgc

SEQ ID NO: 5117988 - DNA, 25 bp, Homo sapien
taaaattactaatgcgttaccagct

SEQ ID NO: 5117989 - DNA, 25 bp, Homo sapien
taacgttagcacttctcaggtagct

SEQ ID NO: 5117990 - DNA, 25 bp, Homo sapien
taaagattgttaaagagcccaggga

SEQ ID NO: 5117991 - DNA, 25 bp, Homo sapien
gggagaaatctagaccaggctcgca

SEQ ID NO: 5117992 - DNA, 25 bp, Homo sapien
tattccaaggctaacgagggcacgt

SEQ ID NO: 5117993 - DNA, 25 bp, Homo sapien
gagtctccgtcaaaacagagtgtgc

SEQ ID NO: 5117994 - DNA, 25 bp, Homo sapien
tgcacttggttgacgctaccggcga

SEQ ID NO: 5117995 - DNA, 25 bp, Homo sapien
cccggccttgagcgtgctgcgcgcg

SEQ ID NO: 5117996 - DNA, 25 bp, Homo sapien
gccttgagcgtgctgcgcgcggccg

SEQ ID NO: 5117997 - DNA, 25 bp, Homo sapien
cggccttgagcgtgctgcgcgcggc

SEQ ID NO: 5117998 - DNA, 25 bp, Homo sapien
cttgagcgtgctgcgcgcggccgcc

SEQ ID NO: 5117999 - DNA, 25 bp, Homo sapien
gggctgcgaggccgctgcctcccca

SEQ ID NO: 5118000 - DNA, 25 bp, Homo sapien
acgagccccaggcacactcgttggg

SEQ ID NO: 5118001 - DNA, 25 bp, Homo sapien
tcctctcggggcgtcccgcttcctg

SEQ ID NO: 5118002 - DNA, 25 bp, Homo sapien
agagacgagccccaggcacactcgt

SEQ ID NO: 5118003 - DNA, 25 bp, Homo sapien
cgcggctcgtgccagaatgaagatg

SEQ ID NO: 5118004 - DNA, 25 bp, Homo sapien
atggcttcctgtcccgctagcgtca

SEQ ID NO: 5118005 - DNA, 25 bp, Homo sapien
gctagcgtcacgtcgggatctgcct

SEQ ID NO: 5118006 - DNA, 25 bp, Homo sapien
aaggccttcactcgcgccagaggca

SEQ ID NO: 5118007 - DNA, 25 bp, Homo sapien
gggaggagtgttaacaaaactcgca

SEQ ID NO: 5118008 - DNA, 25 bp, Homo sapien
tgttaacaaaactcgcacaggtccc

SEQ ID NO: 5118009 - DNA, 25 bp, Homo sapien
tatccaggtcctcaacaagagggag

SEQ ID NO: 5118010 - DNA, 25 bp, Homo sapien
caacaagagggaggagtgttaacaa

SEQ ID NO: 5118011 - DNA, 25 bp, Homo sapien
ttttgcaatggtctccacaaacagt

SEQ ID NO: 5118012 - DNA, 25 bp, Homo sapien
atcttttgcaatggtctccacaaac

SEQ ID NO: 5118013 - DNA, 25 bp, Homo sapien
ccctgctgagcgcaacagtaggcat

SEQ ID NO: 5118014 - DNA, 25 bp, Homo sapien
tgctgagcgcaacagtaggcatctt

SEQ ID NO: 5118015 - DNA, 25 bp, Homo sapien
ccaggtgagggttcccagccagaca

SEQ ID NO: 5118016 - DNA, 25 bp, Homo sapien
agggttcccagccagacaagagtca

SEQ ID NO: 5118017 - DNA, 25 bp, Homo sapien
cccagccagacaagagtcagaaatc

SEQ ID NO: 5118018 - DNA, 25 bp, Homo sapien
gccagacaagagtcagaaatcaaat

SEQ ID NO: 5118019 - DNA, 25 bp, Homo sapien
tcatccacagcttctattgcattat

SEQ ID NO: 5118020 - DNA, 25 bp, Homo sapien
aattcatccacagcttctattgcat

SEQ ID NO: 5118021 - DNA, 25 bp, Homo sapien
aagcaaattcatccacagcttctat

SEQ ID NO: 5118022 - DNA, 25 bp, Homo sapien
agaaaagcaaattcatccacagctt

SEQ ID NO: 5118023 - DNA, 25 bp, Homo sapien
taatagcaagtgcggagaattatcc

SEQ ID NO: 5118024 - DNA, 25 bp, Homo sapien
ctaatagcaagtgcggagaattatc

SEQ ID NO: 5118025 - DNA, 25 bp, Homo sapien
ggtaatgagaacaccctgggagaat

SEQ ID NO: 5118026 - DNA, 25 bp, Homo sapien
tctgtcacaaggagtgcctgcctta

SEQ ID NO: 5118027 - DNA, 25 bp, Homo sapien
tacatgtgtcgctcaacaacaagga

SEQ ID NO: 5118028 - DNA, 25 bp, Homo sapien
gcctgccttaggtaggactaacaaa

SEQ ID NO: 5118029 - DNA, 25 bp, Homo sapien
catatgcctaaaagaaccatgagga

SEQ ID NO: 5118030 - DNA, 25 bp, Homo sapien
tgcttataaatagagcagaggaaaa

SEQ ID NO: 5118031 - DNA, 25 bp, Homo sapien
gaaacctgatcaaagtatgcttata

SEQ ID NO: 5118032 - DNA, 25 bp, Homo sapien
aaaaaggagcctagaatgaacagag

SEQ ID NO: 5118033 - DNA, 25 bp, Homo sapien
ggactgggcccacaagtacgtatgc

SEQ ID NO: 5118034 - DNA, 25 bp, Homo sapien
aattaagcatactagtcggaagagc

SEQ ID NO: 5118035 - DNA, 25 bp, Homo sapien
ctggattagtgtaacaagctgggca

SEQ ID NO: 5118036 - DNA, 25 bp, Homo sapien
tccggtattggcagcagttctctaa

SEQ ID NO: 5118037 - DNA, 25 bp, Homo sapien
tgatgagatctctgcttatcccggc

SEQ ID NO: 5118038 - DNA, 25 bp, Homo sapien
tgtgtaagtgcaaagactccgttct

SEQ ID NO: 5118039 - DNA, 25 bp, Homo sapien
ttatcccggcataggtgaaggcaga

SEQ ID NO: 5118040 - DNA, 25 bp, Homo sapien
gacagacagaaatagtggaagacct

SEQ ID NO: 5118041 - DNA, 25 bp, Homo sapien
tcaggaagccacttatgcagaacac

SEQ ID NO: 5118042 - DNA, 25 bp, Homo sapien
atcaggaaggtctgtgaccaggtat

SEQ ID NO: 5118043 - DNA, 25 bp, Homo sapien
cagggtaggaacaaaggcgagatta

SEQ ID NO: 5118044 - DNA, 25 bp, Homo sapien
ggactgtatgttagaatggctggca

SEQ ID NO: 5118045 - DNA, 25 bp, Homo sapien
tccagtcacagggtaggaacaaagg

SEQ ID NO: 5118046 - DNA, 25 bp, Homo sapien
agggcaagtggtgttccataaattc

SEQ ID NO: 5118047 - DNA, 25 bp, Homo sapien
ctgagggcaagtggtgttccataaa

SEQ ID NO: 5118048 - DNA, 25 bp, Homo sapien
tgagggcaagtggtgttccataaat

SEQ ID NO: 5118049 - DNA, 25 bp, Homo sapien
gagggcaagtggtgttccataaatt

SEQ ID NO: 5118050 - DNA, 25 bp, Homo sapien
tatagagtatgtggatatgtcaata

SEQ ID NO: 5118051 - DNA, 25 bp, Homo sapien
attggtgaaatatagagtatgtgga

SEQ ID NO: 5118052 - DNA, 25 bp, Homo sapien
gatgactggtgtacatatttgtgaa

SEQ ID NO: 5118053 - DNA, 25 bp, Homo sapien
ctaaaatcgactgtgatgactggtg

SEQ ID NO: 5118054 - DNA, 25 bp, Homo sapien
tatagtaacatggatctgggaatag

SEQ ID NO: 5118055 - DNA, 25 bp, Homo sapien
tgaaaaaacccagacacaatagacc

SEQ ID NO: 5118056 - DNA, 25 bp, Homo sapien
ggtccatgacccagtaatacttgag

SEQ ID NO: 5118057 - DNA, 25 bp, Homo sapien
taactgctactttctaggtactctg

SEQ ID NO: 5118058 - DNA, 25 bp, Homo sapien
agtcgggtacccccgacgagctcag

SEQ ID NO: 5118059 - DNA, 25 bp, Homo sapien
gctgcagggtcctcatgggacctgc

SEQ ID NO: 5118060 - DNA, 25 bp, Homo sapien
gtgctgccggctgtccagcttcctg

SEQ ID NO: 5118061 - DNA, 25 bp, Homo sapien
agctgtgctgccggctgtccagctt

SEQ ID NO: 5118062 - DNA, 25 bp, Homo sapien
ttgctggtcagcagtaagctgccct

SEQ ID NO: 5118063 - DNA, 25 bp, Homo sapien
gggtggactggacttcatcataaca

SEQ ID NO: 5118064 - DNA, 25 bp, Homo sapien
ttaacagtgcaaagatcactggggg

SEQ ID NO: 5118065 - DNA, 25 bp, Homo sapien
cagtcctctgactggtccttcaagt

SEQ ID NO: 5118066 - DNA, 25 bp, Homo sapien
ccttcaagtcaaaaattaacagtgc

SEQ ID NO: 5118067 - DNA, 25 bp, Homo sapien
tcagtctcagcagcttctagaggcc

SEQ ID NO: 5118068 - DNA, 25 bp, Homo sapien
tgtgccgccctatgagatagccctg

SEQ ID NO: 5118069 - DNA, 25 bp, Homo sapien
ttaaaccagccaagaccagctaggg

SEQ ID NO: 5118070 - DNA, 25 bp, Homo sapien
cccgtgtcagtaggatggaggtccc

SEQ ID NO: 5118071 - DNA, 25 bp, Homo sapien
ctaaaccaacatctagtgaatacat

SEQ ID NO: 5118072 - DNA, 25 bp, Homo sapien
gataggatggtaagtgaaacaccaa

SEQ ID NO: 5118073 - DNA, 25 bp, Homo sapien
ttatatatcaaaaggagatttacag

SEQ ID NO: 5118074 - DNA, 25 bp, Homo sapien
tactgagggacataaaagataattg

SEQ ID NO: 5118075 - DNA, 25 bp, Homo sapien
aagtctcctatgaatgtggttttta

SEQ ID NO: 5118076 - DNA, 25 bp, Homo sapien
tggaatatccatatgcataagtctc

SEQ ID NO: 5118077 - DNA, 25 bp, Homo sapien
ctgcagggtatggaatatccatatg

SEQ ID NO: 5118078 - DNA, 25 bp, Homo sapien
tgcataagtctcctatgaatgtggt

SEQ ID NO: 5118079 - DNA, 25 bp, Homo sapien
aaaaaaggtgttgcagccaagacta

SEQ ID NO: 5118080 - DNA, 25 bp, Homo sapien
cagagcttccacgttacttgttgta

SEQ ID NO: 5118081 - DNA, 25 bp, Homo sapien
tgaaattccatttatgccccaaggg

SEQ ID NO: 5118082 - DNA, 25 bp, Homo sapien
aatcctcacagacagaattgattct

SEQ ID NO: 5118083 - DNA, 25 bp, Homo sapien
tgtcacatgactaggccttggtgct

SEQ ID NO: 5118084 - DNA, 25 bp, Homo sapien
gatagcctagacttttcgtggagag

SEQ ID NO: 5118085 - DNA, 25 bp, Homo sapien
ccagttgctcgttctccaggatacc

SEQ ID NO: 5118086 - DNA, 25 bp, Homo sapien
caggatacctattaccatgtggctc

SEQ ID NO: 5118087 - DNA, 25 bp, Homo sapien
ttgtgtctgaccgtggacgctgtcc

SEQ ID NO: 5118088 - DNA, 25 bp, Homo sapien
catcagagatgtgcaacaaagaagg

SEQ ID NO: 5118089 - DNA, 25 bp, Homo sapien
tagtcaagctacgtgcgtgggagca

SEQ ID NO: 5118090 - DNA, 25 bp, Homo sapien
gacgctgtccagagatagtcaagct

SEQ ID NO: 5118091 - DNA, 25 bp, Homo sapien
ggattgaagttagggtaattctgca

SEQ ID NO: 5118092 - DNA, 25 bp, Homo sapien
gccaccactgcttggaaaacctgtg

SEQ ID NO: 5118093 - DNA, 25 bp, Homo sapien
gaaaacctgtgctactggattgaag

SEQ ID NO: 5118094 - DNA, 25 bp, Homo sapien
tgctactggattgaagttagggtaa

SEQ ID NO: 5118095 - DNA, 25 bp, Homo sapien
aaaatatgtctagaggtgtctacta

SEQ ID NO: 5118096 - DNA, 25 bp, Homo sapien
taatgaggtgataagctctttgcat

SEQ ID NO: 5118097 - DNA, 25 bp, Homo sapien
tgattaactatcacccgatttaggc

SEQ ID NO: 5118098 - DNA, 25 bp, Homo sapien
gaggtgtctactataatttgattaa

SEQ ID NO: 5118099 - DNA, 25 bp, Homo sapien
ttaggggatgaagcagtgaacactc

SEQ ID NO: 5118100 - DNA, 25 bp, Homo sapien
catgggaagtcaacaagtgattccc

SEQ ID NO: 5118101 - DNA, 25 bp, Homo sapien
catagagcctccctaatgtaacaca

SEQ ID NO: 5118102 - DNA, 25 bp, Homo sapien
gtgaacactcagcaagatccctgct

SEQ ID NO: 5118103 - DNA, 25 bp, Homo sapien
tgtttttctttgcaagttcctgtgg

SEQ ID NO: 5118104 - DNA, 25 bp, Homo sapien
gtttttctttgcaagttcctgtggc

SEQ ID NO: 5118105 - DNA, 25 bp, Homo sapien
ttttctttgcaagttcctgtggctt

SEQ ID NO: 5118106 - DNA, 25 bp, Homo sapien
tctttgcaagttcctgtggcttgca

SEQ ID NO: 5118107 - DNA, 25 bp, Homo sapien
ggcctttatcggagaagctagagaa

SEQ ID NO: 5118108 - DNA, 25 bp, Homo sapien
taagagacaaggactgagtggaatc

SEQ ID NO: 5118109 - DNA, 25 bp, Homo sapien
agttcctagaccacagtaattgagg

SEQ ID NO: 5118110 - DNA, 25 bp, Homo sapien
agctagagaacaagagtccttctcc

SEQ ID NO: 5118111 - DNA, 25 bp, Homo sapien
ttggagagcctctggaatgagagtt

SEQ ID NO: 5118112 - DNA, 25 bp, Homo sapien
tggagagcctctggaatgagagttc

SEQ ID NO: 5118113 - DNA, 25 bp, Homo sapien
ggagctggcagtcagtccaggggac

SEQ ID NO: 5118114 - DNA, 25 bp, Homo sapien
cgaggattaactgagtgcctcctct

SEQ ID NO: 5118115 - DNA, 25 bp, Homo sapien
gttgagctcaacgaggattaactga

SEQ ID NO: 5118116 - DNA, 25 bp, Homo sapien
aagagaaggttagagttgagctcaa

SEQ ID NO: 5118117 - DNA, 25 bp, Homo sapien
ggttagagttgagctcaacgaggat

SEQ ID NO: 5118118 - DNA, 25 bp, Homo sapien
aaagagctaacatgattatgagaag

SEQ ID NO: 5118119 - DNA, 25 bp, Homo sapien
tgagaagatggtgtcaagaagttgg

SEQ ID NO: 5118120 - DNA, 25 bp, Homo sapien
ggaagaatgtaaagagctaacatga

SEQ ID NO: 5118121 - DNA, 25 bp, Homo sapien
tgtcaagaagttggggacaccccat

SEQ ID NO: 5118122 - DNA, 25 bp, Homo sapien
tgtgccgcatccataacattaaggg

SEQ ID NO: 5118123 - DNA, 25 bp, Homo sapien
catgaatgtcctcctggtagtttgc

SEQ ID NO: 5118124 - DNA, 25 bp, Homo sapien
tcctggtagtttgcataatggatgc

SEQ ID NO: 5118125 - DNA, 25 bp, Homo sapien
tctaattctaccagggcatccacag

SEQ ID NO: 5118126 - DNA, 25 bp, Homo sapien
taggttaagtctagcagcacgcctt

SEQ ID NO: 5118127 - DNA, 25 bp, Homo sapien
gatttgaccttgttgactgaccctt

SEQ ID NO: 5118128 - DNA, 25 bp, Homo sapien
tgggcttcaagcatgccttccggtg

SEQ ID NO: 5118129 - DNA, 25 bp, Homo sapien
ttaacaagctgatgcagtggtgggc

SEQ ID NO: 5118130 - DNA, 25 bp, Homo sapien
cagtagtccccaaatgtgagtatgc

SEQ ID NO: 5118131 - DNA, 25 bp, Homo sapien
gcttcatcccatactgtgcacagtg

SEQ ID NO: 5118132 - DNA, 25 bp, Homo sapien
ggtgtgcaccttcgccatctgctgg

SEQ ID NO: 5118133 - DNA, 25 bp, Homo sapien
tcatctgaagggtttgtcacactca

SEQ ID NO: 5118134 - DNA, 25 bp, Homo sapien
tttaaacatctggcactctctgact

SEQ ID NO: 5118135 - DNA, 25 bp, Homo sapien
gacatctaactgctggccctcaaag

SEQ ID NO: 5118136 - DNA, 25 bp, Homo sapien
tgggtccccacactagtgacagtca

SEQ ID NO: 5118137 - DNA, 25 bp, Homo sapien
aactttgcccgacaagcctgttcct

SEQ ID NO: 5118138 - DNA, 25 bp, Homo sapien
gaaattcaggtaaattctgccatcc

SEQ ID NO: 5118139 - DNA, 25 bp, Homo sapien
taaaattgaatctgccctgggtctc

SEQ ID NO: 5118140 - DNA, 25 bp, Homo sapien
tcatggccatcttgcatccgcttgt

SEQ ID NO: 5118141 - DNA, 25 bp, Homo sapien
tggtttttggacacatgaggactcc

SEQ ID NO: 5118142 - DNA, 25 bp, Homo sapien
caccttctctgacgatgccactaaa

SEQ ID NO: 5118143 - DNA, 25 bp, Homo sapien
caatgatcagagcagggttttagaa

SEQ ID NO: 5118144 - DNA, 25 bp, Homo sapien
taatgtgcacgaaatgaagaactgc

SEQ ID NO: 5118145 - DNA, 25 bp, Homo sapien
tcccgacactgaaattgctcatgag

SEQ ID NO: 5118146 - DNA, 25 bp, Homo sapien
tcataggcaattggaagcctggaca

SEQ ID NO: 5118147 - DNA, 25 bp, Homo sapien
agcttctctatcctaaaggctactg

SEQ ID NO: 5118148 - DNA, 25 bp, Homo sapien
gtagcttctctatcctaaaggctac

SEQ ID NO: 5118149 - DNA, 25 bp, Homo sapien
tagcttctctatcctaaaggctact

SEQ ID NO: 5118150 - DNA, 25 bp, Homo sapien
gcttctctatcctaaaggctactgc

SEQ ID NO: 5118151 - DNA, 25 bp, Homo sapien
cttgttaacccaaccactccaagat

SEQ ID NO: 5118152 - DNA, 25 bp, Homo sapien
gcagctattctcagaggtctctctt

SEQ ID NO: 5118153 - DNA, 25 bp, Homo sapien
tcaaggattggccaatattgaggca

SEQ ID NO: 5118154 - DNA, 25 bp, Homo sapien
aaggattggccaatattgaggcagc

SEQ ID NO: 5118155 - DNA, 25 bp, Homo sapien
cagctattctcagaggtctctcttc

SEQ ID NO: 5118156 - DNA, 25 bp, Homo sapien
tatctattaatccattgaggaacac

SEQ ID NO: 5118157 - DNA, 25 bp, Homo sapien
tcagatactccacactcagtttttc

SEQ ID NO: 5118158 - DNA, 25 bp, Homo sapien
tatttatgtctgatagtatagtaca

SEQ ID NO: 5118159 - DNA, 25 bp, Homo sapien
catccgggacgccacattacattca

SEQ ID NO: 5118160 - DNA, 25 bp, Homo sapien
actttcgatgagtttatcattgcca

SEQ ID NO: 5118161 - DNA, 25 bp, Homo sapien
gcattatattgacaactattgacat

SEQ ID NO: 5118162 - DNA, 25 bp, Homo sapien
aaaaatattccctacttccatagct

SEQ ID NO: 5118163 - DNA, 25 bp, Homo sapien
cctacttccatagctattaacattt

SEQ ID NO: 5118164 - DNA, 25 bp, Homo sapien
caatatttataatgtcacttggcat

SEQ ID NO: 5118165 - DNA, 25 bp, Homo sapien
taccttttgggacttattagaatgc

SEQ ID NO: 5118166 - DNA, 25 bp, Homo sapien
tttcttatgcaaaacagactatggc

SEQ ID NO: 5118167 - DNA, 25 bp, Homo sapien
ccaatcatagagtgagagtgatacc

SEQ ID NO: 5118168 - DNA, 25 bp, Homo sapien
taaaagctttgccttacatgtgctg

SEQ ID NO: 5118169 - DNA, 25 bp, Homo sapien
tgtcttatacatgtcagcacagcct

SEQ ID NO: 5118170 - DNA, 25 bp, Homo sapien
tgagtctcccgtgtgtcagcacaca

SEQ ID NO: 5118171 - DNA, 25 bp, Homo sapien
gctctaaatcgcaaacaggtcaatg

SEQ ID NO: 5118172 - DNA, 25 bp, Homo sapien
aaggatctagtttgtcccagtagca

SEQ ID NO: 5118173 - DNA, 25 bp, Homo sapien
tggtaacctgcactcccctctggtt

SEQ ID NO: 5118174 - DNA, 25 bp, Homo sapien
gccatgggtagagcccaggaatcca

SEQ ID NO: 5118175 - DNA, 25 bp, Homo sapien
tagataatggctctggaagattcca

SEQ ID NO: 5118176 - DNA, 25 bp, Homo sapien
gagaccttactccacaactatcatg

SEQ ID NO: 5118177 - DNA, 25 bp, Homo sapien
ttaaaatcttattccgctcaggctg

SEQ ID NO: 5118178 - DNA, 25 bp, Homo sapien
ctgttattcattgctaccacttcca

SEQ ID NO: 5118179 - DNA, 25 bp, Homo sapien
cagtgaatcatctttatggtaatgc

SEQ ID NO: 5118180 - DNA, 25 bp, Homo sapien
gctttttctagaaaggatccattta

SEQ ID NO: 5118181 - DNA, 25 bp, Homo sapien
caggtacttccatacgtcttcctaa

SEQ ID NO: 5118182 - DNA, 25 bp, Homo sapien
agccttttccaggtacatggtgcaa

SEQ ID NO: 5118183 - DNA, 25 bp, Homo sapien
ttttgactgggcatccaggtacttc

SEQ ID NO: 5118184 - DNA, 25 bp, Homo sapien
gtgttgagtgtctacagccttttcc

SEQ ID NO: 5118185 - DNA, 25 bp, Homo sapien
atgaaagggaatgatagctgggaaa

SEQ ID NO: 5118186 - DNA, 25 bp, Homo sapien
gatagctgggaaaccctcttcagag

SEQ ID NO: 5118187 - DNA, 25 bp, Homo sapien
tgaaagggaatgatagctgggaaac

SEQ ID NO: 5118188 - DNA, 25 bp, Homo sapien
ggaaaccctcttcagagggaatcac

SEQ ID NO: 5118189 - DNA, 25 bp, Homo sapien
gccaaatgcgaacttggaagccagt

SEQ ID NO: 5118190 - DNA, 25 bp, Homo sapien
gaggatgggccgaaaggagggataa

SEQ ID NO: 5118191 - DNA, 25 bp, Homo sapien
taccaggagctaagcagtgctgtgg

SEQ ID NO: 5118192 - DNA, 25 bp, Homo sapien
gactgaggtagggagcaggccaaat

SEQ ID NO: 5118193 - DNA, 25 bp, Homo sapien
tgttcatgctcagtgtgaatttgga

SEQ ID NO: 5118194 - DNA, 25 bp, Homo sapien
gcagagcacagactcatctggagga

SEQ ID NO: 5118195 - DNA, 25 bp, Homo sapien
tcagagatgttcatgctcagtgtga

SEQ ID NO: 5118196 - DNA, 25 bp, Homo sapien
tgaatttggagacgcaaaggagaga

SEQ ID NO: 5118197 - DNA, 25 bp, Homo sapien
ttgttttgctgctgtaaattctctt

SEQ ID NO: 5118198 - DNA, 25 bp, Homo sapien
cttcctgataatggccagtaggcag

SEQ ID NO: 5118199 - DNA, 25 bp, Homo sapien
gtctctaggtagaaacactgcaaat

SEQ ID NO: 5118200 - DNA, 25 bp, Homo sapien
gactcagattctcttacttccctgt

SEQ ID NO: 5118201 - DNA, 25 bp, Homo sapien
tttaactctttcagaattgtttctc

SEQ ID NO: 5118202 - DNA, 25 bp, Homo sapien
taactctttcagaattgtttctcat

SEQ ID NO: 5118203 - DNA, 25 bp, Homo sapien
ttaactctttcagaattgtttctca

SEQ ID NO: 5118204 - DNA, 25 bp, Homo sapien
gctgaatccgattttgtaactgcat

SEQ ID NO: 5118205 - DNA, 25 bp, Homo sapien
ctgatgctgaatccgattttgtaac

SEQ ID NO: 5118206 - DNA, 25 bp, Homo sapien
ctgttctgatgctgaatccgatttt

SEQ ID NO: 5118207 - DNA, 25 bp, Homo sapien
tgttctgatgctgaatccgattttg

SEQ ID NO: 5118208 - DNA, 25 bp, Homo sapien
tagtggttttcgttataggaatcta

SEQ ID NO: 5118209 - DNA, 25 bp, Homo sapien
tcgttataggaatctaatccaaacc

SEQ ID NO: 5118210 - DNA, 25 bp, Homo sapien
ccaaaccctcgtctagcttctgata

SEQ ID NO: 5118211 - DNA, 25 bp, Homo sapien
tccaaaccctcgtctagcttctgat

SEQ ID NO: 5118212 - DNA, 25 bp, Homo sapien
tagcctgggcgcaccatattttatg

SEQ ID NO: 5118213 - DNA, 25 bp, Homo sapien
tttgctatacaacggagggacagag

SEQ ID NO: 5118214 - DNA, 25 bp, Homo sapien
aaaagtcattccaaaaggcttggca

SEQ ID NO: 5118215 - DNA, 25 bp, Homo sapien
taataagtaccagcgttagcctggg

SEQ ID NO: 5118216 - DNA, 25 bp, Homo sapien
gaggtgaccagaagaatatattcgt

SEQ ID NO: 5118217 - DNA, 25 bp, Homo sapien
tatattcgttccattctctttccca

SEQ ID NO: 5118218 - DNA, 25 bp, Homo sapien
tgtcctggggagctacaacttctag

SEQ ID NO: 5118219 - DNA, 25 bp, Homo sapien
taataagaggaagcaggtattgcag

SEQ ID NO: 5118220 - DNA, 25 bp, Homo sapien
tgaccccttacctggagttgcacct

SEQ ID NO: 5118221 - DNA, 25 bp, Homo sapien
ggttgaattgtgtccgttcctgacc

SEQ ID NO: 5118222 - DNA, 25 bp, Homo sapien
ggcaccagttcagtatgaccagtat

SEQ ID NO: 5118223 - DNA, 25 bp, Homo sapien
gatggaggagtcatttgccagcact

SEQ ID NO: 5118224 - DNA, 25 bp, Homo sapien
aaagtcagcgggagggtcaaagtca

SEQ ID NO: 5118225 - DNA, 25 bp, Homo sapien
gagccatgctacagtcagtaatgtg

SEQ ID NO: 5118226 - DNA, 25 bp, Homo sapien
tacacggcacagaggactttacaga

SEQ ID NO: 5118227 - DNA, 25 bp, Homo sapien
caagcagcctcgcagtgaaagtggg

SEQ ID NO: 5118228 - DNA, 25 bp, Homo sapien
ctctggaaaatgtgggcaagcctat

SEQ ID NO: 5118229 - DNA, 25 bp, Homo sapien
ccacaattattagtcagggcaggct

SEQ ID NO: 5118230 - DNA, 25 bp, Homo sapien
taacctgtcccagtccagaagcaat

SEQ ID NO: 5118231 - DNA, 25 bp, Homo sapien
tagaataaaagaccccaaagcagga

SEQ ID NO: 5118232 - DNA, 25 bp, Homo sapien
tatagcaatgcagactttttcactt

SEQ ID NO: 5118233 - DNA, 25 bp, Homo sapien
taacagataagcacagtatagcaat

SEQ ID NO: 5118234 - DNA, 25 bp, Homo sapien
cccagggaaacgtaacagataagca

SEQ ID NO: 5118235 - DNA, 25 bp, Homo sapien
cacttggctgtgcattttgtaagac

SEQ ID NO: 5118236 - DNA, 25 bp, Homo sapien
tcagtgagcagaacttcggtactcc

SEQ ID NO: 5118237 - DNA, 25 bp, Homo sapien
ggagggactactgcagcggttctca

SEQ ID NO: 5118238 - DNA, 25 bp, Homo sapien
catctttttcctgccgtagtacacg

SEQ ID NO: 5118239 - DNA, 25 bp, Homo sapien
gcaaaagccagcttcggacagagca

SEQ ID NO: 5118240 - DNA, 25 bp, Homo sapien
taaatcctcctaggtgttacactta

SEQ ID NO: 5118241 - DNA, 25 bp, Homo sapien
tgagcatccaaacattgactacaaa

SEQ ID NO: 5118242 - DNA, 25 bp, Homo sapien
aaatcttcaaatccctaacaggaag

SEQ ID NO: 5118243 - DNA, 25 bp, Homo sapien
caaatttgatacatctggctttgtt

SEQ ID NO: 5118244 - DNA, 25 bp, Homo sapien
gtcttggactgggatacgaggcctc

SEQ ID NO: 5118245 - DNA, 25 bp, Homo sapien
cacttcccgagagatgctttgagcg

SEQ ID NO: 5118246 - DNA, 25 bp, Homo sapien
tcaaagtcagaagacggcagggcag

SEQ ID NO: 5118247 - DNA, 25 bp, Homo sapien
gttttccgcggaactctgcctgcag

SEQ ID NO: 5118248 - DNA, 25 bp, Homo sapien
tcaataggtttgatctaacaaagaa

SEQ ID NO: 5118249 - DNA, 25 bp, Homo sapien
cacagaagtcaataggtttgatcta

SEQ ID NO: 5118250 - DNA, 25 bp, Homo sapien
gaagtcaataggtttgatctaacaa

SEQ ID NO: 5118251 - DNA, 25 bp, Homo sapien
cagaagtcaataggtttgatctaac

SEQ ID NO: 5118252 - DNA, 25 bp, Homo sapien
taaacgttgttgaagtgacaatgaa

SEQ ID NO: 5118253 - DNA, 25 bp, Homo sapien
tcctggtaagatgctttaaacgttg

SEQ ID NO: 5118254 - DNA, 25 bp, Homo sapien
taactttcagtgactaccaccctga

SEQ ID NO: 5118255 - DNA, 25 bp, Homo sapien
cagcattgcatactacagaaaatct

SEQ ID NO: 5118256 - DNA, 25 bp, Homo sapien
tgaactaggccttgtgcagccgaaa

SEQ ID NO: 5118257 - DNA, 25 bp, Homo sapien
taaggtggtactggacaggcaaccc

SEQ ID NO: 5118258 - DNA, 25 bp, Homo sapien
ggatattgatccctgccttgttggc

SEQ ID NO: 5118259 - DNA, 25 bp, Homo sapien
cctcagtttgagcaggagcccctat

SEQ ID NO: 5118260 - DNA, 25 bp, Homo sapien
gcagctgacgccaaatggcgagtct

SEQ ID NO: 5118261 - DNA, 25 bp, Homo sapien
agtcttgcggatattctctgatccc

SEQ ID NO: 5118262 - DNA, 25 bp, Homo sapien
tttaattagtgtaacggagacacac

SEQ ID NO: 5118263 - DNA, 25 bp, Homo sapien
caggcatcttctatatcacatggtg

SEQ ID NO: 5118264 - DNA, 25 bp, Homo sapien
gtgttccccttcattgtgtctagat

SEQ ID NO: 5118265 - DNA, 25 bp, Homo sapien
cccattagtaagccccagccaaggg

SEQ ID NO: 5118266 - DNA, 25 bp, Homo sapien
tagacaccaacagctctagggactc

SEQ ID NO: 5118267 - DNA, 25 bp, Homo sapien
tattggtttcaaaggccaaatagga

SEQ ID NO: 5118268 - DNA, 25 bp, Homo sapien
agttctcggggatgtcctactggaa

SEQ ID NO: 5118269 - DNA, 25 bp, Homo sapien
cagttctcggggatgtcctactgga

SEQ ID NO: 5118270 - DNA, 25 bp, Homo sapien
ctgcatggggattacaaatgggaaa

SEQ ID NO: 5118271 - DNA, 25 bp, Homo sapien
caacctataaaggctgtgggtctgc

SEQ ID NO: 5118272 - DNA, 25 bp, Homo sapien
ggagttagcgtcaacctataaaggc

SEQ ID NO: 5118273 - DNA, 25 bp, Homo sapien
ttgtggaggagttagcgtcaaccta

SEQ ID NO: 5118274 - DNA, 25 bp, Homo sapien
aatattgttggccattggaggtagc

SEQ ID NO: 5118275 - DNA, 25 bp, Homo sapien
ttggaggtagcaaaaactgctgcac

SEQ ID NO: 5118276 - DNA, 25 bp, Homo sapien
tatggaatattgttggccattggag

SEQ ID NO: 5118277 - DNA, 25 bp, Homo sapien
tgttggccattggaggtagcaaaaa

SEQ ID NO: 5118278 - DNA, 25 bp, Homo sapien
tgaccagcaatccaggacgtgtggg

SEQ ID NO: 5118279 - DNA, 25 bp, Homo sapien
agcaatccaggacgtgtgggggtgg

SEQ ID NO: 5118280 - DNA, 25 bp, Homo sapien
tctgtttgtgagtaaaagcaaggca

SEQ ID NO: 5118281 - DNA, 25 bp, Homo sapien
gtttgtgagtaaaagcaaggcaatg

SEQ ID NO: 5118282 - DNA, 25 bp, Homo sapien
ggcttaaggctgtagctcttttcat

SEQ ID NO: 5118283 - DNA, 25 bp, Homo sapien
ctaattgtgatgtcctcaggaggtc

SEQ ID NO: 5118284 - DNA, 25 bp, Homo sapien
ggcgtactggttaaatatcacttct

SEQ ID NO: 5118285 - DNA, 25 bp, Homo sapien
tataaacagttttgggcctacaggc

SEQ ID NO: 5118286 - DNA, 25 bp, Homo sapien
aggctgctgcagcgacgtgaagatc

SEQ ID NO: 5118287 - DNA, 25 bp, Homo sapien
gctgctgcagcgacgtgaagatctg

SEQ ID NO: 5118288 - DNA, 25 bp, Homo sapien
ggaggctgctgcagcgacgtgaaga

SEQ ID NO: 5118289 - DNA, 25 bp, Homo sapien
ctgcagcgacgtgaagatctggcaa

SEQ ID NO: 5118290 - DNA, 25 bp, Homo sapien
cacacagcagcatctctatttccat

SEQ ID NO: 5118291 - DNA, 25 bp, Homo sapien
cagcatctctatttccattcaggcc

SEQ ID NO: 5118292 - DNA, 25 bp, Homo sapien
cacagcagcatctctatttccattc

SEQ ID NO: 5118293 - DNA, 25 bp, Homo sapien
catctctatttccattcaggcccaa

SEQ ID NO: 5118294 - DNA, 25 bp, Homo sapien
gatgagtgtgattggatgctcccaa

SEQ ID NO: 5118295 - DNA, 25 bp, Homo sapien
tgacgtcctatactcctcagcatgg

SEQ ID NO: 5118296 - DNA, 25 bp, Homo sapien
tgcagtggttgctccgtaggattcc

SEQ ID NO: 5118297 - DNA, 25 bp, Homo sapien
cagcatggctttatgggttcttgca

SEQ ID NO: 5118298 - DNA, 25 bp, Homo sapien
agatagcaaggttaagttccactgt

SEQ ID NO: 5118299 - DNA, 25 bp, Homo sapien
tagcaaggttaagttccactgtgga

SEQ ID NO: 5118300 - DNA, 25 bp, Homo sapien
gatagcaaggttaagttccactgtg

SEQ ID NO: 5118301 - DNA, 25 bp, Homo sapien
gcaaggttaagttccactgtggaaa

SEQ ID NO: 5118302 - DNA, 25 bp, Homo sapien
ctgcttgtgattggattcccaaatt

SEQ ID NO: 5118303 - DNA, 25 bp, Homo sapien
ggattcccaaattacacctctggac

SEQ ID NO: 5118304 - DNA, 25 bp, Homo sapien
caaattacacctctggacctttctg

SEQ ID NO: 5118305 - DNA, 25 bp, Homo sapien
tgtgattggattcccaaattacacc

SEQ ID NO: 5118306 - DNA, 25 bp, Homo sapien
cagtgtccacatgcacagatggtac

SEQ ID NO: 5118307 - DNA, 25 bp, Homo sapien
tcagtgtccacatgcacagatggta

SEQ ID NO: 5118308 - DNA, 25 bp, Homo sapien
ttcaacggtatctttatagtcacaa

SEQ ID NO: 5118309 - DNA, 25 bp, Homo sapien
tttcaacggtatctttatagtcaca

SEQ ID NO: 5118310 - DNA, 25 bp, Homo sapien
tttattgagccttggaactacttta

SEQ ID NO: 5118311 - DNA, 25 bp, Homo sapien
tgctctcgtctaatctcctcaatga

SEQ ID NO: 5118312 - DNA, 25 bp, Homo sapien
tatgggatatgacagccccaattcc

SEQ ID NO: 5118313 - DNA, 25 bp, Homo sapien
tcgtctaatctcctcaatgacagat

SEQ ID NO: 5118314 - DNA, 25 bp, Homo sapien
ttaccatagctttgttgaaccatcc

SEQ ID NO: 5118315 - DNA, 25 bp, Homo sapien
caaacttacgcatactgtaggttgt

SEQ ID NO: 5118316 - DNA, 25 bp, Homo sapien
taagatgtgaacctcatttatcatg

SEQ ID NO: 5118317 - DNA, 25 bp, Homo sapien
gagacctgtcacctacttcctaaga

SEQ ID NO: 5118318 - DNA, 25 bp, Homo sapien
gtcaggctacattctcaggcattgg

SEQ ID NO: 5118319 - DNA, 25 bp, Homo sapien
catagctaaggaaagaggtcaatac

SEQ ID NO: 5118320 - DNA, 25 bp, Homo sapien
gctacaagttatttccaagggagat

SEQ ID NO: 5118321 - DNA, 25 bp, Homo sapien
caatccacgtgggaacatctgagga

SEQ ID NO: 5118322 - DNA, 25 bp, Homo sapien
gaggagtcaataagaggttaaatag

SEQ ID NO: 5118323 - DNA, 25 bp, Homo sapien
gagtcaataagaggttaaatagaaa

SEQ ID NO: 5118324 - DNA, 25 bp, Homo sapien
acaggaggagtcaataagaggttaa

SEQ ID NO: 5118325 - DNA, 25 bp, Homo sapien
ggttaaatagaaagaccagagcaac

SEQ ID NO: 5118326 - DNA, 25 bp, Homo sapien
caacagcgcttgataagggacggta

SEQ ID NO: 5118327 - DNA, 25 bp, Homo sapien
ggaggaaattggtgcctttgagcag

SEQ ID NO: 5118328 - DNA, 25 bp, Homo sapien
cacacaacagcgcttgataagggac

SEQ ID NO: 5118329 - DNA, 25 bp, Homo sapien
tgataagggacggtaagaagcacag

SEQ ID NO: 5118330 - DNA, 25 bp, Homo sapien
tttgcttgcagcactggtggtccca

SEQ ID NO: 5118331 - DNA, 25 bp, Homo sapien
accacatgcctatggagacgtgctg

SEQ ID NO: 5118332 - DNA, 25 bp, Homo sapien
tttgcaccgactcaaccaaggcagt

SEQ ID NO: 5118333 - DNA, 25 bp, Homo sapien
gccacgtctgctgaaccactttgtt

SEQ ID NO: 5118334 - DNA, 25 bp, Homo sapien
tccactcgtcgtaattctctggtga

SEQ ID NO: 5118335 - DNA, 25 bp, Homo sapien
tccctagtggtaacatcttgaaaac

SEQ ID NO: 5118336 - DNA, 25 bp, Homo sapien
attccgtagtgttgatgtaccacag

SEQ ID NO: 5118337 - DNA, 25 bp, Homo sapien
taccacaaggaaccttcaggttgcc

SEQ ID NO: 5118338 - DNA, 25 bp, Homo sapien
ttcagcaggtgaagtagcagagttc

SEQ ID NO: 5118339 - DNA, 25 bp, Homo sapien
ctttgggactgttacccctctctgg

SEQ ID NO: 5118340 - DNA, 25 bp, Homo sapien
tgaagtagcagagttcccagggttt

SEQ ID NO: 5118341 - DNA, 25 bp, Homo sapien
ccagggttttgtgctcagatctgta

SEQ ID NO: 5118342 - DNA, 25 bp, Homo sapien
tcatttggcagccaaagatctccct

SEQ ID NO: 5118343 - DNA, 25 bp, Homo sapien
cttcatttggcagccaaagatctcc

SEQ ID NO: 5118344 - DNA, 25 bp, Homo sapien
atttggcagccaaagatctcccttc

SEQ ID NO: 5118345 - DNA, 25 bp, Homo sapien
catttggcagccaaagatctccctt

SEQ ID NO: 5118346 - DNA, 25 bp, Homo sapien
tagcagcactgcctatcattgccaa

SEQ ID NO: 5118347 - DNA, 25 bp, Homo sapien
aggttgagatgcattccctgcccca

SEQ ID NO: 5118348 - DNA, 25 bp, Homo sapien
ggagggcagttccaactgatggcca

SEQ ID NO: 5118349 - DNA, 25 bp, Homo sapien
tgaagggccaggtcatactgggcac

SEQ ID NO: 5118350 - DNA, 25 bp, Homo sapien
ttaagttagaacaagcgatacagac

SEQ ID NO: 5118351 - DNA, 25 bp, Homo sapien
tagaacaagcgatacagacttttcc

SEQ ID NO: 5118352 - DNA, 25 bp, Homo sapien
ctttcattttctcgctctctattat

SEQ ID NO: 5118353 - DNA, 25 bp, Homo sapien
cattttctcgctctctattatccaa

SEQ ID NO: 5118354 - DNA, 25 bp, Homo sapien
tctaatgataaacttggctatagca

SEQ ID NO: 5118355 - DNA, 25 bp, Homo sapien
ctggtcagacgtattttctggtcta

SEQ ID NO: 5118356 - DNA, 25 bp, Homo sapien
ctatagcatatgtgaggtgaacttc

SEQ ID NO: 5118357 - DNA, 25 bp, Homo sapien
tttctggtctaatgataaacttggc

SEQ ID NO: 5118358 - DNA, 25 bp, Homo sapien
atgcagggtctttcattgtccttac

SEQ ID NO: 5118359 - DNA, 25 bp, Homo sapien
ttgatgcagggtctttcattgtcct

SEQ ID NO: 5118360 - DNA, 25 bp, Homo sapien
tgatgcagggtctttcattgtcctt

SEQ ID NO: 5118361 - DNA, 25 bp, Homo sapien
gatgcagggtctttcattgtcctta

SEQ ID NO: 5118362 - DNA, 25 bp, Homo sapien
gagtcataagatatatgaccactcc

SEQ ID NO: 5118363 - DNA, 25 bp, Homo sapien
cccaaggtatcatcatgtctaccac

SEQ ID NO: 5118364 - DNA, 25 bp, Homo sapien
aaggtatcatcatgtctaccacttc

SEQ ID NO: 5118365 - DNA, 25 bp, Homo sapien
tttgtggtggcagtgagtcataaga

SEQ ID NO: 5118366 - DNA, 25 bp, Homo sapien
ctgcatctctaagacatggtggtga

SEQ ID NO: 5118367 - DNA, 25 bp, Homo sapien
tctctaagacatggtggtgaaggtt

SEQ ID NO: 5118368 - DNA, 25 bp, Homo sapien
ctgtgctttcggtgcagtgccagct

SEQ ID NO: 5118369 - DNA, 25 bp, Homo sapien
ttcccactcaacagtcagctgtgct

SEQ ID NO: 5118370 - DNA, 25 bp, Homo sapien
tcaatggctccaatagacaagtaaa

SEQ ID NO: 5118371 - DNA, 25 bp, Homo sapien
gctccaatagacaagtaaaacaccc

SEQ ID NO: 5118372 - DNA, 25 bp, Homo sapien
cctctcaatggctccaatagacaag

SEQ ID NO: 5118373 - DNA, 25 bp, Homo sapien
ggttagaacctctcaatggctccaa

SEQ ID NO: 5118374 - DNA, 25 bp, Homo sapien
tggcctaaaggcaccattttcccca

SEQ ID NO: 5118375 - DNA, 25 bp, Homo sapien
aacttgaggcacgtgatgggtggcc

SEQ ID NO: 5118376 - DNA, 25 bp, Homo sapien
agctttctactgtcacatgtatgac

SEQ ID NO: 5118377 - DNA, 25 bp, Homo sapien
ctactgtcacatgtatgacagtggg

SEQ ID NO: 5118378 - DNA, 25 bp, Homo sapien
tccaccaggctagctgctgtctgca

SEQ ID NO: 5118379 - DNA, 25 bp, Homo sapien
aaaggattcaagaatgctggtgttt

SEQ ID NO: 5118380 - DNA, 25 bp, Homo sapien
ttcaagaatgctggtgtttcctggg

SEQ ID NO: 5118381 - DNA, 25 bp, Homo sapien
gattcaagaatgctggtgtttcctg

SEQ ID NO: 5118382 - DNA, 25 bp, Homo sapien
catctgctcctttgcctaatgctga

SEQ ID NO: 5118383 - DNA, 25 bp, Homo sapien
taaaggcagctaaactcatcattct

SEQ ID NO: 5118384 - DNA, 25 bp, Homo sapien
ttgagcagagcaaaattagccttgt

SEQ ID NO: 5118385 - DNA, 25 bp, Homo sapien
gagtcaggcaataccttccacctat

SEQ ID NO: 5118386 - DNA, 25 bp, Homo sapien
ccttatcttctcgaccaatgttgag

SEQ ID NO: 5118387 - DNA, 25 bp, Homo sapien
caacactgtggatggagatcggaga

SEQ ID NO: 5118388 - DNA, 25 bp, Homo sapien
tgggcacaaggaactgaacccagct

SEQ ID NO: 5118389 - DNA, 25 bp, Homo sapien
gaacccagctctgctaatattgtga

SEQ ID NO: 5118390 - DNA, 25 bp, Homo sapien
tctcggaatggtgctgaaaaatcct

SEQ ID NO: 5118391 - DNA, 25 bp, Homo sapien
tccagaaaatcctgagcgagcagct

SEQ ID NO: 5118392 - DNA, 25 bp, Homo sapien
ggcgtcccgggaagaagttcctgca

SEQ ID NO: 5118393 - DNA, 25 bp, Homo sapien
tactttgtttctggcgtgtgcatcg

SEQ ID NO: 5118394 - DNA, 25 bp, Homo sapien
ttgccacacagactgcaggcggcgt

SEQ ID NO: 5118395 - DNA, 25 bp, Homo sapien
tactgaagtcaattatctgtttgag

SEQ ID NO: 5118396 - DNA, 25 bp, Homo sapien
tatctgtttgaggagccttttggca

SEQ ID NO: 5118397 - DNA, 25 bp, Homo sapien
gacattgttggtgcatagaaatcct

SEQ ID NO: 5118398 - DNA, 25 bp, Homo sapien
gaaattaccttttgatttggctctc

SEQ ID NO: 5118399 - DNA, 25 bp, Homo sapien
taattctctaggcagggttgacaca

SEQ ID NO: 5118400 - DNA, 25 bp, Homo sapien
tgtaagaggatcttggatgacgcgc

SEQ ID NO: 5118401 - DNA, 25 bp, Homo sapien
tagatcagtgaaggcctaggtcacc

SEQ ID NO: 5118402 - DNA, 25 bp, Homo sapien
gatgacgcgcaacctgatttcagaa

SEQ ID NO: 5118403 - DNA, 25 bp, Homo sapien
tggggaggccttaggatcatggtgg

SEQ ID NO: 5118404 - DNA, 25 bp, Homo sapien
aggccttaggatcatggtggaaggg

SEQ ID NO: 5118405 - DNA, 25 bp, Homo sapien
caaacatgtccttcttcacgtggca

SEQ ID NO: 5118406 - DNA, 25 bp, Homo sapien
aacatgtccttcttcacgtggcagc

SEQ ID NO: 5118407 - DNA, 25 bp, Homo sapien
agaaataaaccaaagttggagagag

SEQ ID NO: 5118408 - DNA, 25 bp, Homo sapien
ccaaagttggagagagtcttggagc

SEQ ID NO: 5118409 - DNA, 25 bp, Homo sapien
ttggagagagtcttggagcatctac

SEQ ID NO: 5118410 - DNA, 25 bp, Homo sapien
gagtcttggagcatctacagcctcc

SEQ ID NO: 5118411 - DNA, 25 bp, Homo sapien
catcatccgattccatgggagcttc

SEQ ID NO: 5118412 - DNA, 25 bp, Homo sapien
gctagctgcatcttgattcgtacag

SEQ ID NO: 5118413 - DNA, 25 bp, Homo sapien
gccatcatccgattccatgggagct

SEQ ID NO: 5118414 - DNA, 25 bp, Homo sapien
catcttgattcgtacagtgccatca

SEQ ID NO: 5118415 - DNA, 25 bp, Homo sapien
agcatcttgcatgctgcgtcccagg

SEQ ID NO: 5118416 - DNA, 25 bp, Homo sapien
cttgcatgctgcgtcccaggttttt

SEQ ID NO: 5118417 - DNA, 25 bp, Homo sapien
tgcatgctgcgtcccaggtttttga

SEQ ID NO: 5118418 - DNA, 25 bp, Homo sapien
catcttgcatgctgcgtcccaggtt

SEQ ID NO: 5118419 - DNA, 25 bp, Homo sapien
tccggacaacggagaggaaggatcc

SEQ ID NO: 5118420 - DNA, 25 bp, Homo sapien
taagactcggaaatgcagtgatgca

SEQ ID NO: 5118421 - DNA, 25 bp, Homo sapien
tactcagtgcgaaagagtggcacac

SEQ ID NO: 5118422 - DNA, 25 bp, Homo sapien
ttatgcacgcaggagaggatcagag

SEQ ID NO: 5118423 - DNA, 25 bp, Homo sapien
tcctgaattaaggatccacaagtct

SEQ ID NO: 5118424 - DNA, 25 bp, Homo sapien
acaagtctgtcagcatggtcttccc

SEQ ID NO: 5118425 - DNA, 25 bp, Homo sapien
ctgattaggaatagaatgtgggcaa

SEQ ID NO: 5118426 - DNA, 25 bp, Homo sapien
taaaatgtcctgaattaaggatcca

SEQ ID NO: 5118427 - DNA, 25 bp, Homo sapien
tagatgtctccggtgtactgggttt

SEQ ID NO: 5118428 - DNA, 25 bp, Homo sapien
agatgtctccggtgtactgggtttg

SEQ ID NO: 5118429 - DNA, 25 bp, Homo sapien
tgtagatgtctccggtgtactgggt

SEQ ID NO: 5118430 - DNA, 25 bp, Homo sapien
tttgtagatgtctccggtgtactgg

SEQ ID NO: 5118431 - DNA, 25 bp, Homo sapien
cgtgtgttccttggtcaggcgttac

SEQ ID NO: 5118432 - DNA, 25 bp, Homo sapien
tccttgttcccattcgtgtgttcct

SEQ ID NO: 5118433 - DNA, 25 bp, Homo sapien
tgaccaggaatactccttgttccca

SEQ ID NO: 5118434 - DNA, 25 bp, Homo sapien
cagatgaccaggaatactccttgtt

SEQ ID NO: 5118435 - DNA, 25 bp, Homo sapien
aataattgtaatgaccttaggagtc

SEQ ID NO: 5118436 - DNA, 25 bp, Homo sapien
ttaataattgtaatgaccttaggag

SEQ ID NO: 5118437 - DNA, 25 bp, Homo sapien
aattgtaatgaccttaggagtcact

SEQ ID NO: 5118438 - DNA, 25 bp, Homo sapien
tgtgcttgttctctggttttaataa

SEQ ID NO: 5118439 - DNA, 25 bp, Homo sapien
tcaggtaaacatctgcccaggtcag

SEQ ID NO: 5118440 - DNA, 25 bp, Homo sapien
tcaattgaattgacacggggcaggt

SEQ ID NO: 5118441 - DNA, 25 bp, Homo sapien
gggatctttagcagggctggcttgg

SEQ ID NO: 5118442 - DNA, 25 bp, Homo sapien
gcagtttgtctgtgctgaattcaat

SEQ ID NO: 5118443 - DNA, 25 bp, Homo sapien
ttgtttcggaggcagccaactcgcc

SEQ ID NO: 5118444 - DNA, 25 bp, Homo sapien
ccaggaccccgaaagccgagtgcat

SEQ ID NO: 5118445 - DNA, 25 bp, Homo sapien
tggtttgtttcggaggcagccaact

SEQ ID NO: 5118446 - DNA, 25 bp, Homo sapien
actcgccgcgcgcatttggcgaccc

SEQ ID NO: 5118447 - DNA, 25 bp, Homo sapien
tcctttccgaggtactggtgccggc

SEQ ID NO: 5118448 - DNA, 25 bp, Homo sapien
ttgggagcgtgaactaacttggcgc

SEQ ID NO: 5118449 - DNA, 25 bp, Homo sapien
gaaagcaggtcgttcccaaatctag

SEQ ID NO: 5118450 - DNA, 25 bp, Homo sapien
aaatctagcgcttctctcctgtgcc

SEQ ID NO: 5118451 - DNA, 25 bp, Homo sapien
aagcctggaggaccgggataggttg

SEQ ID NO: 5118452 - DNA, 25 bp, Homo sapien
ggataggttggggactgccgatggg

SEQ ID NO: 5118453 - DNA, 25 bp, Homo sapien
tggggactgccgatggggaacctcc

SEQ ID NO: 5118454 - DNA, 25 bp, Homo sapien
taggttggggactgccgatggggaa

SEQ ID NO: 5118455 - DNA, 25 bp, Homo sapien
aaatcttgatgtggtgctggctgtg

SEQ ID NO: 5118456 - DNA, 25 bp, Homo sapien
ggctgtggtacagcaggttggccat

SEQ ID NO: 5118457 - DNA, 25 bp, Homo sapien
ctggaaccaaatcttgatgtggtgc

SEQ ID NO: 5118458 - DNA, 25 bp, Homo sapien
gaaccaaatcttgatgtggtgctgg

SEQ ID NO: 5118459 - DNA, 25 bp, Homo sapien
tccaggtgccagctcgtcccaggag

SEQ ID NO: 5118460 - DNA, 25 bp, Homo sapien
gctcagctgagttctgccgccagtt

SEQ ID NO: 5118461 - DNA, 25 bp, Homo sapien
gcagctcagctgagttctgccgcca

SEQ ID NO: 5118462 - DNA, 25 bp, Homo sapien
cagctgagttctgccgccagttttc

SEQ ID NO: 5118463 - DNA, 25 bp, Homo sapien
cagtcttccacaaagcggcttttgt

SEQ ID NO: 5118464 - DNA, 25 bp, Homo sapien
tgagaaccgggatgcgctgtctgcc

SEQ ID NO: 5118465 - DNA, 25 bp, Homo sapien
ggcttttgtccgtatccccgcacag

SEQ ID NO: 5118466 - DNA, 25 bp, Homo sapien
tcttagaaggtccaggtgtgtgtga

SEQ ID NO: 5118467 - DNA, 25 bp, Homo sapien
tgaagataatggcagggtcccaact

SEQ ID NO: 5118468 - DNA, 25 bp, Homo sapien
atgaagataatggcagggtcccaac

SEQ ID NO: 5118469 - DNA, 25 bp, Homo sapien
tgggtagaagatccggtctccctca

SEQ ID NO: 5118470 - DNA, 25 bp, Homo sapien
gacaccactaatcggcattcataag

SEQ ID NO: 5118471 - DNA, 25 bp, Homo sapien
tgtagttctgacaccactaatcggc

SEQ ID NO: 5118472 - DNA, 25 bp, Homo sapien
attcataagtcattgcccaccctgg

SEQ ID NO: 5118473 - DNA, 25 bp, Homo sapien
gaaacatttctctagtaacctacta

SEQ ID NO: 5118474 - DNA, 25 bp, Homo sapien
catcgacagcaagcagtggctacca

SEQ ID NO: 5118475 - DNA, 25 bp, Homo sapien
tcttatccttgtccaaggagcaaag

SEQ ID NO: 5118476 - DNA, 25 bp, Homo sapien
gctcaggagagctactgcagctttt

SEQ ID NO: 5118477 - DNA, 25 bp, Homo sapien
gatgtcaatgttgtaataaggttag

SEQ ID NO: 5118478 - DNA, 25 bp, Homo sapien
gagtaagatgtcaatgttgtaataa

SEQ ID NO: 5118479 - DNA, 25 bp, Homo sapien
tcaatgttgtaataaggttagaggg

SEQ ID NO: 5118480 - DNA, 25 bp, Homo sapien
tcaaatgagtaagatgtcaatgttg

SEQ ID NO: 5118481 - DNA, 25 bp, Homo sapien
ccagagcttatgagttttaggactc

SEQ ID NO: 5118482 - DNA, 25 bp, Homo sapien
tccagagcttatgagttttaggact

SEQ ID NO: 5118483 - DNA, 25 bp, Homo sapien
caagtccagagcttatgagttttag

SEQ ID NO: 5118484 - DNA, 25 bp, Homo sapien
agtccagagcttatgagttttagga

SEQ ID NO: 5118485 - DNA, 25 bp, Homo sapien
agtgccccgctgcaatgcaggccgc

SEQ ID NO: 5118486 - DNA, 25 bp, Homo sapien
cccagtgccccgctgcaatgcaggc

SEQ ID NO: 5118487 - DNA, 25 bp, Homo sapien
gccccgctgcaatgcaggccgccat

SEQ ID NO: 5118488 - DNA, 25 bp, Homo sapien
tgcagcccagtgccccgctgcaatg

SEQ ID NO: 5118489 - DNA, 25 bp, Homo sapien
gcggcttggaaactccggcctaggc

SEQ ID NO: 5118490 - DNA, 25 bp, Homo sapien
ctggcggcttggaaactccggccta

SEQ ID NO: 5118491 - DNA, 25 bp, Homo sapien
tgcaggcgatagaggccggcggggg

SEQ ID NO: 5118492 - DNA, 25 bp, Homo sapien
cttggaaactccggcctaggcccat

SEQ ID NO: 5118493 - DNA, 25 bp, Homo sapien
tgccggacaggccccgcgtggaccc

SEQ ID NO: 5118494 - DNA, 25 bp, Homo sapien
tgctgccggacaggccccgcgtgga

SEQ ID NO: 5118495 - DNA, 25 bp, Homo sapien
ctgccggacaggccccgcgtggacc

SEQ ID NO: 5118496 - DNA, 25 bp, Homo sapien
ctgctgccggacaggccccgcgtgg

SEQ ID NO: 5118497 - DNA, 25 bp, Homo sapien
gcggcggttggaacgcaccgggctc

SEQ ID NO: 5118498 - DNA, 25 bp, Homo sapien
caccgggctcggaaggcccagtgct

SEQ ID NO: 5118499 - DNA, 25 bp, Homo sapien
tccacgatgaccggtttcggcggcg

SEQ ID NO: 5118500 - DNA, 25 bp, Homo sapien
gttccacggggcggtgcttgtccac

SEQ ID NO: 5118501 - DNA, 25 bp, Homo sapien
ggtgcgctggctcttgaatcctaca

SEQ ID NO: 5118502 - DNA, 25 bp, Homo sapien
ggccaatcgattcctatccagggtt

SEQ ID NO: 5118503 - DNA, 25 bp, Homo sapien
gaagagctcttggacgtaaacaggt

SEQ ID NO: 5118504 - DNA, 25 bp, Homo sapien
gtttcagacacaatttagtggccag

SEQ ID NO: 5118505 - DNA, 25 bp, Homo sapien
aatgtaggtatgttggtcagtctcc

SEQ ID NO: 5118506 - DNA, 25 bp, Homo sapien
tgtaacacctatctacagacgaaga

SEQ ID NO: 5118507 - DNA, 25 bp, Homo sapien
taatccttctagcaaccatgtgggt

SEQ ID NO: 5118508 - DNA, 25 bp, Homo sapien
taactgagatggtatatgactgcac

SEQ ID NO: 5118509 - DNA, 25 bp, Homo sapien
tctgttcttccccttcgaggaatga

SEQ ID NO: 5118510 - DNA, 25 bp, Homo sapien
tgttcttccccttcgaggaatgaat

SEQ ID NO: 5118511 - DNA, 25 bp, Homo sapien
ttcttccccttcgaggaatgaattc

SEQ ID NO: 5118512 - DNA, 25 bp, Homo sapien
ttccccttcgaggaatgaattcagg

SEQ ID NO: 5118513 - DNA, 25 bp, Homo sapien
tcttcctgatctctgaatgcaaatc

SEQ ID NO: 5118514 - DNA, 25 bp, Homo sapien
tctgaatgcaaatccccagaaactg

SEQ ID NO: 5118515 - DNA, 25 bp, Homo sapien
tccactggcatatgggtcagctgta

SEQ ID NO: 5118516 - DNA, 25 bp, Homo sapien
gggtcagctgtagtaacacgaagaa

SEQ ID NO: 5118517 - DNA, 25 bp, Homo sapien
attcaggaagggcatctcgtaagta

SEQ ID NO: 5118518 - DNA, 25 bp, Homo sapien
tcgtaagtatagcaagctatcatcc

SEQ ID NO: 5118519 - DNA, 25 bp, Homo sapien
catctcgtaagtatagcaagctatc

SEQ ID NO: 5118520 - DNA, 25 bp, Homo sapien
gaagggcatctcgtaagtatagcaa

SEQ ID NO: 5118521 - DNA, 25 bp, Homo sapien
catttgctgttcagttaaacaaaga

SEQ ID NO: 5118522 - DNA, 25 bp, Homo sapien
ttttcgacgcttcaatttccttcca

SEQ ID NO: 5118523 - DNA, 25 bp, Homo sapien
tggacgttcccagcgtttagaccag

SEQ ID NO: 5118524 - DNA, 25 bp, Homo sapien
catatcaaattcaagccatggctga

SEQ ID NO: 5118525 - DNA, 25 bp, Homo sapien
tatcctcttagagccaatgtatctt

SEQ ID NO: 5118526 - DNA, 25 bp, Homo sapien
aatgaaattaaattggtctcaaaat

SEQ ID NO: 5118527 - DNA, 25 bp, Homo sapien
caaaatatatcctcttagagccaat

SEQ ID NO: 5118528 - DNA, 25 bp, Homo sapien
aatatatcctcttagagccaatgta

SEQ ID NO: 5118529 - DNA, 25 bp, Homo sapien
gatgctctgacttctattgtagctt

SEQ ID NO: 5118530 - DNA, 25 bp, Homo sapien
tattgtagctttgcctccaataagc

SEQ ID NO: 5118531 - DNA, 25 bp, Homo sapien
gacattggtccatttggcatgtgta

SEQ ID NO: 5118532 - DNA, 25 bp, Homo sapien
aaattcatcccacctattccctttg

SEQ ID NO: 5118533 - DNA, 25 bp, Homo sapien
cttaacattcctacatattaataaa

SEQ ID NO: 5118534 - DNA, 25 bp, Homo sapien
tttcttaacattcctacatattaat

SEQ ID NO: 5118535 - DNA, 25 bp, Homo sapien
tttatttcttaacattcctacatat

SEQ ID NO: 5118536 - DNA, 25 bp, Homo sapien
tatttcttaacattcctacatatta

SEQ ID NO: 5118537 - DNA, 25 bp, Homo sapien
ccatgaatttgctcaaaattggcct

SEQ ID NO: 5118538 - DNA, 25 bp, Homo sapien
gctgaagccagactatgacccaaag

SEQ ID NO: 5118539 - DNA, 25 bp, Homo sapien
gctacccagtataatcctgccagat

SEQ ID NO: 5118540 - DNA, 25 bp, Homo sapien
cttgtggtgagccttctgtttagca

SEQ ID NO: 5118541 - DNA, 25 bp, Homo sapien
ccaagacagctaggaaccagagggc

SEQ ID NO: 5118542 - DNA, 25 bp, Homo sapien
gaagctaccaaaggatgtgctgcag

SEQ ID NO: 5118543 - DNA, 25 bp, Homo sapien
ggaaagaagttagtcccaagacagc

SEQ ID NO: 5118544 - DNA, 25 bp, Homo sapien
gagttactatctggaagggttcacc

SEQ ID NO: 5118545 - DNA, 25 bp, Homo sapien
tcagccaggcgcagttaatgtgtgc

SEQ ID NO: 5118546 - DNA, 25 bp, Homo sapien
gccaaaaggtagacatatcccagtg

SEQ ID NO: 5118547 - DNA, 25 bp, Homo sapien
gaggttattgctcaacagttacaga

SEQ ID NO: 5118548 - DNA, 25 bp, Homo sapien
gatgaatcttaaggactgcttgagg

SEQ ID NO: 5118549 - DNA, 25 bp, Homo sapien
caagagactatagctccaaagacac

SEQ ID NO: 5118550 - DNA, 25 bp, Homo sapien
ggcagagctttacaggagtagagat

SEQ ID NO: 5118551 - DNA, 25 bp, Homo sapien
tctccaggacagaccatctatcagg

SEQ ID NO: 5118552 - DNA, 25 bp, Homo sapien
gcagaaattggcagaatggacagaa

SEQ ID NO: 5118553 - DNA, 25 bp, Homo sapien
ctttgggccgaaatggaagggcact

SEQ ID NO: 5118554 - DNA, 25 bp, Homo sapien
gaagggcactagacagtaactcaaa

SEQ ID NO: 5118555 - DNA, 25 bp, Homo sapien
tttattacaattagacttgccctgc

SEQ ID NO: 5118556 - DNA, 25 bp, Homo sapien
cttgccctgcaagaaatgcataagg

SEQ ID NO: 5118557 - DNA, 25 bp, Homo sapien
cagggccaccacgttatgatgttca

SEQ ID NO: 5118558 - DNA, 25 bp, Homo sapien
tgatccccatttctagaggaagctg

SEQ ID NO: 5118559 - DNA, 25 bp, Homo sapien
tacttaaaggattgacagagcactc

SEQ ID NO: 5118560 - DNA, 25 bp, Homo sapien
cttgtacagcatcggcacataggag

SEQ ID NO: 5118561 - DNA, 25 bp, Homo sapien
agacatcatgagaaaataccagcag

SEQ ID NO: 5118562 - DNA, 25 bp, Homo sapien
taactaaatatgttggacgtgttcc

SEQ ID NO: 5118563 - DNA, 25 bp, Homo sapien
cattgggttggcaattgatatcaca

SEQ ID NO: 5118564 - DNA, 25 bp, Homo sapien
cattatacctggagtttgaacgtta

SEQ ID NO: 5118565 - DNA, 25 bp, Homo sapien
ccaacataagcataagtgagtgcca

SEQ ID NO: 5118566 - DNA, 25 bp, Homo sapien
gcatgtgccgattgtcaaattatcc

SEQ ID NO: 5118567 - DNA, 25 bp, Homo sapien
tgagtgccaatgaatccctaccagc

SEQ ID NO: 5118568 - DNA, 25 bp, Homo sapien
gattttttgcccatgcttgtggcag

SEQ ID NO: 5118569 - DNA, 25 bp, Homo sapien
caagcagaatccttcataggagagc

SEQ ID NO: 5118570 - DNA, 25 bp, Homo sapien
taatagcaacgcagcactactgaaa

SEQ ID NO: 5118571 - DNA, 25 bp, Homo sapien
ggagagcatcacctagaccatctta

SEQ ID NO: 5118572 - DNA, 25 bp, Homo sapien
caggttctgaattgaccgctgttcc

SEQ ID NO: 5118573 - DNA, 25 bp, Homo sapien
tagcagcatgtctaccagaaaaatg

SEQ ID NO: 5118574 - DNA, 25 bp, Homo sapien
cagttgttaagtacaggtctccagc

SEQ ID NO: 5118575 - DNA, 25 bp, Homo sapien
ttttaagcccagatttggccgggca

SEQ ID NO: 5118576 - DNA, 25 bp, Homo sapien
gaatgtttcgttcacagcaccagct

SEQ ID NO: 5118577 - DNA, 25 bp, Homo sapien
gaaaaattgaatgcacctacattga

SEQ ID NO: 5118578 - DNA, 25 bp, Homo sapien
tatgtagccttggacacaaagggaa

SEQ ID NO: 5118579 - DNA, 25 bp, Homo sapien
gaattactagtactaccagggagtg

SEQ ID NO: 5118580 - DNA, 25 bp, Homo sapien
tccatatagatcatatgctaggcca

SEQ ID NO: 5118581 - DNA, 25 bp, Homo sapien
tgacattcaatagtaaagggtggtt

SEQ ID NO: 5118582 - DNA, 25 bp, Homo sapien
tagaaagagcgcattccagaacgtt

SEQ ID NO: 5118583 - DNA, 25 bp, Homo sapien
aacaaaacttgtaggatcttctgcc

SEQ ID NO: 5118584 - DNA, 25 bp, Homo sapien
gccttaggcagtcagtgtgtcagta

SEQ ID NO: 5118585 - DNA, 25 bp, Homo sapien
tagttggaaacacctacatatccct

SEQ ID NO: 5118586 - DNA, 25 bp, Homo sapien
tagggtccatctgcttgttcttgca

SEQ ID NO: 5118587 - DNA, 25 bp, Homo sapien
catatccctaaaaacatgatggtct

SEQ ID NO: 5118588 - DNA, 25 bp, Homo sapien
gaaaaggttgtagcaactcaccaga

SEQ ID NO: 5118589 - DNA, 25 bp, Homo sapien
gatgacaccttgcaagaactaggac

SEQ ID NO: 5118590 - DNA, 25 bp, Homo sapien
tctaaaattgacagttccaacaggg

SEQ ID NO: 5118591 - DNA, 25 bp, Homo sapien
gggaagctgctaaatcgttacctta

SEQ ID NO: 5118592 - DNA, 25 bp, Homo sapien
cctgggccagatgtggttaaaaagt

SEQ ID NO: 5118593 - DNA, 25 bp, Homo sapien
tcacatgttggtaatggcggcccta

SEQ ID NO: 5118594 - DNA, 25 bp, Homo sapien
atgaagctctcagcgttgattgcct

SEQ ID NO: 5118595 - DNA, 25 bp, Homo sapien
tagttctttatgaatcacgtggtcc

SEQ ID NO: 5118596 - DNA, 25 bp, Homo sapien
ctgtggtcttatacttgatggcccc

SEQ ID NO: 5118597 - DNA, 25 bp, Homo sapien
taggccaaggacagaacctcgggaa

SEQ ID NO: 5118598 - DNA, 25 bp, Homo sapien
tatatagttggctaacccctggcct

SEQ ID NO: 5118599 - DNA, 25 bp, Homo sapien
tacctgtaggtaatatttggagcca

SEQ ID NO: 5118600 - DNA, 25 bp, Homo sapien
gatttgggagtccactacctgtagg

SEQ ID NO: 5118601 - DNA, 25 bp, Homo sapien
tcagtgacttacataaagccgtgct

SEQ ID NO: 5118602 - DNA, 25 bp, Homo sapien
gccgtgctttatcttggcgcttaga

SEQ ID NO: 5118603 - DNA, 25 bp, Homo sapien
catagcaggtgatatagagtggtaa

SEQ ID NO: 5118604 - DNA, 25 bp, Homo sapien
taaagagcacacgtccactgttagt

SEQ ID NO: 5118605 - DNA, 25 bp, Homo sapien
gattttccaacaaaggacccacagc

SEQ ID NO: 5118606 - DNA, 25 bp, Homo sapien
tttgcaaaacggcttgccaagtggc

SEQ ID NO: 5118607 - DNA, 25 bp, Homo sapien
tatggacatgaactgtactccagcc

SEQ ID NO: 5118608 - DNA, 25 bp, Homo sapien
tagattcactggagcgatgtaacat

SEQ ID NO: 5118609 - DNA, 25 bp, Homo sapien
cagggtgcatatttgttaagacaag

SEQ ID NO: 5118610 - DNA, 25 bp, Homo sapien
cggcaaccggccagtgaatttatgt

SEQ ID NO: 5118611 - DNA, 25 bp, Homo sapien
taaccagagtagttagcaatttcag

SEQ ID NO: 5118612 - DNA, 25 bp, Homo sapien
tatgggaacatttgtcaaggccagc

SEQ ID NO: 5118613 - DNA, 25 bp, Homo sapien
tttcaggattatgaatatacactgg

SEQ ID NO: 5118614 - DNA, 25 bp, Homo sapien
ttcaggattatgaatatacactggc

SEQ ID NO: 5118615 - DNA, 25 bp, Homo sapien
tcaggattatgaatatacactggcc

SEQ ID NO: 5118616 - DNA, 25 bp, Homo sapien
gacaagttagagcatatcggcacag

SEQ ID NO: 5118617 - DNA, 25 bp, Homo sapien
gaaatcaccggccttctacgtccat

SEQ ID NO: 5118618 - DNA, 25 bp, Homo sapien
gccaaaaggcttgggatctcatcca

SEQ ID NO: 5118619 - DNA, 25 bp, Homo sapien
tctgggaacaggatcttagactaag

SEQ ID NO: 5118620 - DNA, 25 bp, Homo sapien
tgtgaggcataaaccggctactgaa

SEQ ID NO: 5118621 - DNA, 25 bp, Homo sapien
taccaagctgaagcatctcaggttg

SEQ ID NO: 5118622 - DNA, 25 bp, Homo sapien
tgtcttcagaactgtcaggcaagga

SEQ ID NO: 5118623 - DNA, 25 bp, Homo sapien
ccagggtggtgaatggttctgtttc

SEQ ID NO: 5118624 - DNA, 25 bp, Homo sapien
tgtaaaagataggagggaaatggaa

SEQ ID NO: 5118625 - DNA, 25 bp, Homo sapien
gtgccatagtgtttgctgcactcat

SEQ ID NO: 5118626 - DNA, 25 bp, Homo sapien
gggaaatggaacaatactagaggag

SEQ ID NO: 5118627 - DNA, 25 bp, Homo sapien
agaagtttagatagtactttgagga

SEQ ID NO: 5118628 - DNA, 25 bp, Homo sapien
cactagcagctatgagcacttaaca

SEQ ID NO: 5118629 - DNA, 25 bp, Homo sapien
gcttgtgcttcagaccttagcatga

SEQ ID NO: 5118630 - DNA, 25 bp, Homo sapien
aaggatccgtttcactatgtcactg

SEQ ID NO: 5118631 - DNA, 25 bp, Homo sapien
tttcactcacatttgccactagcag

SEQ ID NO: 5118632 - DNA, 25 bp, Homo sapien
tagaagagattgaatctcgaaggta

SEQ ID NO: 5118633 - DNA, 25 bp, Homo sapien
agaagagattgaatctcgaaggtac

SEQ ID NO: 5118634 - DNA, 25 bp, Homo sapien
ttagaagagattgaatctcgaaggt

SEQ ID NO: 5118635 - DNA, 25 bp, Homo sapien
tagtgaaagaccataaccaagtagc

SEQ ID NO: 5118636 - DNA, 25 bp, Homo sapien
gacaagttcacataattctggaggc

SEQ ID NO: 5118637 - DNA, 25 bp, Homo sapien
caagtagctagtaaatgcaaaggca

SEQ ID NO: 5118638 - DNA, 25 bp, Homo sapien
gtttcagagcccttttacagattgg

SEQ ID NO: 5118639 - DNA, 25 bp, Homo sapien
acttaatgtgaacttaccagttttg

SEQ ID NO: 5118640 - DNA, 25 bp, Homo sapien
taatgttttatcctacttaatgtga

SEQ ID NO: 5118641 - DNA, 25 bp, Homo sapien
gttttgttagagtatgaacaattct

SEQ ID NO: 5118642 - DNA, 25 bp, Homo sapien
tgaacaattctttatagcttaaaat

SEQ ID NO: 5118643 - DNA, 25 bp, Homo sapien
taattgtattcagaccccatcggga

SEQ ID NO: 5118644 - DNA, 25 bp, Homo sapien
gggtcaccattagcctgctacggcc

SEQ ID NO: 5118645 - DNA, 25 bp, Homo sapien
ttattcgctctgaggtctggaggcc

SEQ ID NO: 5118646 - DNA, 25 bp, Homo sapien
tgctacggccagttacaatgatgta

SEQ ID NO: 5118647 - DNA, 25 bp, Homo sapien
taagtgggcagaagttatatgtacc

SEQ ID NO: 5118648 - DNA, 25 bp, Homo sapien
aaacaatcgtgtacagttgggaggc

SEQ ID NO: 5118649 - DNA, 25 bp, Homo sapien
gggaggctcttcgttttcaccatca

SEQ ID NO: 5118650 - DNA, 25 bp, Homo sapien
gaagaacctaaactgtcacaacaaa

SEQ ID NO: 5118651 - DNA, 25 bp, Homo sapien
gcggctgattccagcgacagcgatg

SEQ ID NO: 5118652 - DNA, 25 bp, Homo sapien
gaaaaggacttttcggcagcgcgcg

SEQ ID NO: 5118653 - DNA, 25 bp, Homo sapien
ccatggctcacaggccgaaaaggac

SEQ ID NO: 5118654 - DNA, 25 bp, Homo sapien
ctgaagctgcggcttgcggttcagc

SEQ ID NO: 5118655 - DNA, 25 bp, Homo sapien
gactcagaccggataggccgtgaaa

SEQ ID NO: 5118656 - DNA, 25 bp, Homo sapien
gtccaggacggaaagcataacgctt

SEQ ID NO: 5118657 - DNA, 25 bp, Homo sapien
taaaagacaacggatctggctccag

SEQ ID NO: 5118658 - DNA, 25 bp, Homo sapien
gaaaatctctaaggtgtcagtccac

SEQ ID NO: 5118659 - DNA, 25 bp, Homo sapien
tgtcacctctcaatatgacgccact

SEQ ID NO: 5118660 - DNA, 25 bp, Homo sapien
tgcagtagctcaacattatatagta

SEQ ID NO: 5118661 - DNA, 25 bp, Homo sapien
caatatgacgccactaaacatggag

SEQ ID NO: 5118662 - DNA, 25 bp, Homo sapien
gagttgataacaggtgtgcagtagc

SEQ ID NO: 5118663 - DNA, 25 bp, Homo sapien
aggccccaccagagcagctagatac

SEQ ID NO: 5118664 - DNA, 25 bp, Homo sapien
ggccccaccagagcagctagataca

SEQ ID NO: 5118665 - DNA, 25 bp, Homo sapien
tagaatgtctattggtgcactcaca

SEQ ID NO: 5118666 - DNA, 25 bp, Homo sapien
ctagatagaatgtctattggtgcac

SEQ ID NO: 5118667 - DNA, 25 bp, Homo sapien
atagaatgtctattggtgcactcac

SEQ ID NO: 5118668 - DNA, 25 bp, Homo sapien
agatagaatgtctattggtgcactc

SEQ ID NO: 5118669 - DNA, 25 bp, Homo sapien
ttcaaggtgccaatattgtgtccgg

SEQ ID NO: 5118670 - DNA, 25 bp, Homo sapien
aatttcccaaatttacatcaaggag

SEQ ID NO: 5118671 - DNA, 25 bp, Homo sapien
gaaactttgcctcttctcgattcct

SEQ ID NO: 5118672 - DNA, 25 bp, Homo sapien
gggctaggtcaatcagagaaacttt

SEQ ID NO: 5118673 - DNA, 25 bp, Homo sapien
aataaccaaatgtcagctgagcgtg

SEQ ID NO: 5118674 - DNA, 25 bp, Homo sapien
gaagaactccagatagcctaatatg

SEQ ID NO: 5118675 - DNA, 25 bp, Homo sapien
tacatacaggagagctatgcaccat

SEQ ID NO: 5118676 - DNA, 25 bp, Homo sapien
caagtgttagcaagtatgaggagcc

SEQ ID NO: 5118677 - DNA, 25 bp, Homo sapien
catgcttcagccagcctaggtgtca

SEQ ID NO: 5118678 - DNA, 25 bp, Homo sapien
gctgctccagggttagatagcctgc

SEQ ID NO: 5118679 - DNA, 25 bp, Homo sapien
caggtcctctcaaggcatgcttcag

SEQ ID NO: 5118680 - DNA, 25 bp, Homo sapien
tttgttgtggcatgccaggtcctct

SEQ ID NO: 5118681 - DNA, 25 bp, Homo sapien
tcatcataactctgctgggattcag

SEQ ID NO: 5118682 - DNA, 25 bp, Homo sapien
gatgaacacttaagctcatcataac

SEQ ID NO: 5118683 - DNA, 25 bp, Homo sapien
gcagaaattagaaagatgaatttca

SEQ ID NO: 5118684 - DNA, 25 bp, Homo sapien
tgaaaccatcgaaaagaaatgtaac

SEQ ID NO: 5118685 - DNA, 25 bp, Homo sapien
tcagaagctgcaggcattggagcac

SEQ ID NO: 5118686 - DNA, 25 bp, Homo sapien
actgagccagaagaatcataccata

SEQ ID NO: 5118687 - DNA, 25 bp, Homo sapien
cactgccaataacaggagatacgag

SEQ ID NO: 5118688 - DNA, 25 bp, Homo sapien
aaatcctgatgccattttgagaaca

SEQ ID NO: 5118689 - DNA, 25 bp, Homo sapien
atctgatgggaggaacgtagcacat

SEQ ID NO: 5118690 - DNA, 25 bp, Homo sapien
tctgatgggaggaacgtagcacatg

SEQ ID NO: 5118691 - DNA, 25 bp, Homo sapien
ggaacgtagcacatggatagctgcc

SEQ ID NO: 5118692 - DNA, 25 bp, Homo sapien
tagcacatggatagctgccagactt

SEQ ID NO: 5118693 - DNA, 25 bp, Homo sapien
aatgtccttatactggatttttctc

SEQ ID NO: 5118694 - DNA, 25 bp, Homo sapien
cacaatgtccttatactggattttt

SEQ ID NO: 5118695 - DNA, 25 bp, Homo sapien
caatgtccttatactggatttttct

SEQ ID NO: 5118696 - DNA, 25 bp, Homo sapien
tgtccttatactggatttttctccc

SEQ ID NO: 5118697 - DNA, 25 bp, Homo sapien
gttcctgaaatcagttcttacattc

SEQ ID NO: 5118698 - DNA, 25 bp, Homo sapien
tgaaatcagttcttacattctgctg

SEQ ID NO: 5118699 - DNA, 25 bp, Homo sapien
gaaatcagttcttacattctgctgc

SEQ ID NO: 5118700 - DNA, 25 bp, Homo sapien
cctgaaatcagttcttacattctgc

SEQ ID NO: 5118701 - DNA, 25 bp, Homo sapien
atccatatccgattgccacatccag

SEQ ID NO: 5118702 - DNA, 25 bp, Homo sapien
acttcatccatatccgattgccaca

SEQ ID NO: 5118703 - DNA, 25 bp, Homo sapien
ccatatccgattgccacatccagtg

SEQ ID NO: 5118704 - DNA, 25 bp, Homo sapien
tgccacttcatccatatccgattgc

SEQ ID NO: 5118705 - DNA, 25 bp, Homo sapien
ctgatggcgttgcataatgccttgg

SEQ ID NO: 5118706 - DNA, 25 bp, Homo sapien
ccaaggtcactctggtgattggcta

SEQ ID NO: 5118707 - DNA, 25 bp, Homo sapien
cactctggtgattggctatagagcc

SEQ ID NO: 5118708 - DNA, 25 bp, Homo sapien
tgtgttctgactgcacacgctgcct

SEQ ID NO: 5118709 - DNA, 25 bp, Homo sapien
ctggtgcctagtactgcaggtctgg

SEQ ID NO: 5118710 - DNA, 25 bp, Homo sapien
gagacgttgtgcctgcaacgcttcc

SEQ ID NO: 5118711 - DNA, 25 bp, Homo sapien
ctgatgtgagacgttgtgcctgcaa

SEQ ID NO: 5118712 - DNA, 25 bp, Homo sapien
gcctgcaacgcttcctctatttctg

SEQ ID NO: 5118713 - DNA, 25 bp, Homo sapien
aggatctgctgatgtgagacgttgt

SEQ ID NO: 5118714 - DNA, 25 bp, Homo sapien
agatgcagtacagtgctgccaagga

SEQ ID NO: 5118715 - DNA, 25 bp, Homo sapien
cagggagatcccttgaagagtttta

SEQ ID NO: 5118716 - DNA, 25 bp, Homo sapien
gagaagttgccgtaaaggcatgaaa

SEQ ID NO: 5118717 - DNA, 25 bp, Homo sapien
gaagaaattgcaagcaggcagggag

SEQ ID NO: 5118718 - DNA, 25 bp, Homo sapien
ctgtttcccttccttcggacacaca

SEQ ID NO: 5118719 - DNA, 25 bp, Homo sapien
tttcccttccttcggacacacactg

SEQ ID NO: 5118720 - DNA, 25 bp, Homo sapien
tcccttccttcggacacacactgga

SEQ ID NO: 5118721 - DNA, 25 bp, Homo sapien
ccttccttcggacacacactggact

SEQ ID NO: 5118722 - DNA, 25 bp, Homo sapien
atgatgacaacactggtggaggtgc

SEQ ID NO: 5118723 - DNA, 25 bp, Homo sapien
ctacagtacacaatgatgacaacac

SEQ ID NO: 5118724 - DNA, 25 bp, Homo sapien
tgacaacactggtggaggtgccagc

SEQ ID NO: 5118725 - DNA, 25 bp, Homo sapien
tacagtacacaatgatgacaacact

SEQ ID NO: 5118726 - DNA, 25 bp, Homo sapien
caattagattctgccacttggagac

SEQ ID NO: 5118727 - DNA, 25 bp, Homo sapien
ttagattctgccacttggagacaac

SEQ ID NO: 5118728 - DNA, 25 bp, Homo sapien
gaagaagtgactcttttcatcttca

SEQ ID NO: 5118729 - DNA, 25 bp, Homo sapien
aattccaattagattctgccacttg

SEQ ID NO: 5118730 - DNA, 25 bp, Homo sapien
tgaactgataaccaatgtttgaggc

SEQ ID NO: 5118731 - DNA, 25 bp, Homo sapien
tgataaccaatgtttgaggctgttt

SEQ ID NO: 5118732 - DNA, 25 bp, Homo sapien
taggctttgaactgataaccaatgt

SEQ ID NO: 5118733 - DNA, 25 bp, Homo sapien
tggcataggctttgaactgataacc

SEQ ID NO: 5118734 - DNA, 25 bp, Homo sapien
gaaaaggcttttatatgattcacag

SEQ ID NO: 5118735 - DNA, 25 bp, Homo sapien
ttcttcaggtgttgacaaatggtca

SEQ ID NO: 5118736 - DNA, 25 bp, Homo sapien
aaaggcttttatatgattcacagtc

SEQ ID NO: 5118737 - DNA, 25 bp, Homo sapien
tgacaaatggtcacatttggctttc

SEQ ID NO: 5118738 - DNA, 25 bp, Homo sapien
cacggtttctgctgacatggttgat

SEQ ID NO: 5118739 - DNA, 25 bp, Homo sapien
gaatggactatgaactaccacagca

SEQ ID NO: 5118740 - DNA, 25 bp, Homo sapien
aacatggctaagacacctcctcagg

SEQ ID NO: 5118741 - DNA, 25 bp, Homo sapien
cagcaactctgatgaatctcaaaga

SEQ ID NO: 5118742 - DNA, 25 bp, Homo sapien
atgtggtctacataaatcatctgag

SEQ ID NO: 5118743 - DNA, 25 bp, Homo sapien
gcattcagtttgttgccaaattcca

SEQ ID NO: 5118744 - DNA, 25 bp, Homo sapien
caaattccatggcatagatagagga

SEQ ID NO: 5118745 - DNA, 25 bp, Homo sapien
gagataatgctgtggtacccataga

SEQ ID NO: 5118746 - DNA, 25 bp, Homo sapien
aaagtcatcaaaacctctcacaatt

SEQ ID NO: 5118747 - DNA, 25 bp, Homo sapien
ctgtgacttttcacctgccatcctt

SEQ ID NO: 5118748 - DNA, 25 bp, Homo sapien
aagtcatcaaaacctctcacaattc

SEQ ID NO: 5118749 - DNA, 25 bp, Homo sapien
caatgcacttagcgtcctgtttcct

SEQ ID NO: 5118750 - DNA, 25 bp, Homo sapien
gcacttagcgtcctgtttcctacct

SEQ ID NO: 5118751 - DNA, 25 bp, Homo sapien
aatgcacttagcgtcctgtttccta

SEQ ID NO: 5118752 - DNA, 25 bp, Homo sapien
tgcacttagcgtcctgtttcctacc

SEQ ID NO: 5118753 - DNA, 25 bp, Homo sapien
gaaagttcttgaagtgtagagaaaa

SEQ ID NO: 5118754 - DNA, 25 bp, Homo sapien
agaaagttcttgaagtgtagagaaa

SEQ ID NO: 5118755 - DNA, 25 bp, Homo sapien
aaatgttcaaactctcatcacagat

SEQ ID NO: 5118756 - DNA, 25 bp, Homo sapien
gagaaaatgttcaaactctcatcac

SEQ ID NO: 5118757 - DNA, 25 bp, Homo sapien
agagcaggattttggcaattcctca

SEQ ID NO: 5118758 - DNA, 25 bp, Homo sapien
gtttttaggactgcttgtgttactg

SEQ ID NO: 5118759 - DNA, 25 bp, Homo sapien
gactgcttgtgttactgtgtttgct

SEQ ID NO: 5118760 - DNA, 25 bp, Homo sapien
gaagaatgagagcaggattttggca

SEQ ID NO: 5118761 - DNA, 25 bp, Homo sapien
gaatcccacagagtctgataacttc

SEQ ID NO: 5118762 - DNA, 25 bp, Homo sapien
gtattgctgcctcatcaggttggta

SEQ ID NO: 5118763 - DNA, 25 bp, Homo sapien
gctgcctcatcaggttggtattata

SEQ ID NO: 5118764 - DNA, 25 bp, Homo sapien
gtctgataacttcaatgtcctcttg

SEQ ID NO: 5118765 - DNA, 25 bp, Homo sapien
gccagaagtaacaggtctgaggcca

SEQ ID NO: 5118766 - DNA, 25 bp, Homo sapien
agcgacgataataaaagtggccaga

SEQ ID NO: 5118767 - DNA, 25 bp, Homo sapien
cagcgacgataataaaagtggccag

SEQ ID NO: 5118768 - DNA, 25 bp, Homo sapien
ggccagaagtaacaggtctgaggcc

SEQ ID NO: 5118769 - DNA, 25 bp, Homo sapien
gaaatggcaagattttttctgtctt

SEQ ID NO: 5118770 - DNA, 25 bp, Homo sapien
aaggagattttcacactaccgtctt

SEQ ID NO: 5118771 - DNA, 25 bp, Homo sapien
cactaccgtctttcatatgttttga

SEQ ID NO: 5118772 - DNA, 25 bp, Homo sapien
tctagaaatggcaagattttttctg

SEQ ID NO: 5118773 - DNA, 25 bp, Homo sapien
tgcaaggtactctggcaagttacca

SEQ ID NO: 5118774 - DNA, 25 bp, Homo sapien
tggcaagttaccacctcagagcttt

SEQ ID NO: 5118775 - DNA, 25 bp, Homo sapien
gctttgttccttaacagatttcaat

SEQ ID NO: 5118776 - DNA, 25 bp, Homo sapien
ttgttccttaacagatttcaatggc

SEQ ID NO: 5118777 - DNA, 25 bp, Homo sapien
tttgggaccttctatattaggtgca

SEQ ID NO: 5118778 - DNA, 25 bp, Homo sapien
tacctgttaagtccctatgttctag

SEQ ID NO: 5118779 - DNA, 25 bp, Homo sapien
taagagggtacttgacataattttg

SEQ ID NO: 5118780 - DNA, 25 bp, Homo sapien
gagacttgtgttctagcctatcata

SEQ ID NO: 5118781 - DNA, 25 bp, Homo sapien
aagctttttacagcttccaaggcat

SEQ ID NO: 5118782 - DNA, 25 bp, Homo sapien
ctagacttattgtgcaggcatctca

SEQ ID NO: 5118783 - DNA, 25 bp, Homo sapien
cctatatatctagacttattgtgca

SEQ ID NO: 5118784 - DNA, 25 bp, Homo sapien
tcctgatcctatatatctagactta

SEQ ID NO: 5118785 - DNA, 25 bp, Homo sapien
cttgtgacattccctagtcttctct

SEQ ID NO: 5118786 - DNA, 25 bp, Homo sapien
attccctagtcttctctgcatggta

SEQ ID NO: 5118787 - DNA, 25 bp, Homo sapien
gtgacattccctagtcttctctgca

SEQ ID NO: 5118788 - DNA, 25 bp, Homo sapien
ttccctagtcttctctgcatggtac

SEQ ID NO: 5118789 - DNA, 25 bp, Homo sapien
gatgattcgctgctctagcagtatt

SEQ ID NO: 5118790 - DNA, 25 bp, Homo sapien
taataaatctgatctaatctgatga

SEQ ID NO: 5118791 - DNA, 25 bp, Homo sapien
taatctgatgattcgctgctctagc

SEQ ID NO: 5118792 - DNA, 25 bp, Homo sapien
aatctgatctaatctgatgattcgc

SEQ ID NO: 5118793 - DNA, 25 bp, Homo sapien
agtaaatcatttaggtccggtagag

SEQ ID NO: 5118794 - DNA, 25 bp, Homo sapien
tgagacaggttccatcagagtttgt

SEQ ID NO: 5118795 - DNA, 25 bp, Homo sapien
ggtttctaaaccttggccagtgcag

SEQ ID NO: 5118796 - DNA, 25 bp, Homo sapien
ggtcccatggtgaattgagacaggt

SEQ ID NO: 5118797 - DNA, 25 bp, Homo sapien
ggatcccctagacagtttggagaga

SEQ ID NO: 5118798 - DNA, 25 bp, Homo sapien
cctagacagtttggagagagaacaa

SEQ ID NO: 5118799 - DNA, 25 bp, Homo sapien
caacaacttctattatgttgcttcc

SEQ ID NO: 5118800 - DNA, 25 bp, Homo sapien
ctattatgttgcttccattagtcat

SEQ ID NO: 5118801 - DNA, 25 bp, Homo sapien
atttcctaatctgtagtttacttgc

SEQ ID NO: 5118802 - DNA, 25 bp, Homo sapien
tttcctaatctgtagtttacttgca

SEQ ID NO: 5118803 - DNA, 25 bp, Homo sapien
gccaggaacgcaggtaggacatgtc

SEQ ID NO: 5118804 - DNA, 25 bp, Homo sapien
aacgcaggtaggacatgtcttttgc

SEQ ID NO: 5118805 - DNA, 25 bp, Homo sapien
caggtaggacatgtcttttgcaggc

SEQ ID NO: 5118806 - DNA, 25 bp, Homo sapien
caggaacgcaggtaggacatgtctt

SEQ ID NO: 5118807 - DNA, 25 bp, Homo sapien
gcagatagttaacgaaatcagattt

SEQ ID NO: 5118808 - DNA, 25 bp, Homo sapien
tttatgcaacagttttagttaagca

SEQ ID NO: 5118809 - DNA, 25 bp, Homo sapien
gcaacagttttagttaagcagatag

SEQ ID NO: 5118810 - DNA, 25 bp, Homo sapien
taagcagatagttaacgaaatcaga

SEQ ID NO: 5118811 - DNA, 25 bp, Homo sapien
tcagtttcatcatttgtaggtagat

SEQ ID NO: 5118812 - DNA, 25 bp, Homo sapien
ttatgtcagtttcatcatttgtagg

SEQ ID NO: 5118813 - DNA, 25 bp, Homo sapien
tgtcagtttcatcatttgtaggtag

SEQ ID NO: 5118814 - DNA, 25 bp, Homo sapien
caacaattatgtcagtttcatcatt

SEQ ID NO: 5118815 - DNA, 25 bp, Homo sapien
catagcttgcttagtccgtgagact

SEQ ID NO: 5118816 - DNA, 25 bp, Homo sapien
gccattgcccccttcaggcaagtga

SEQ ID NO: 5118817 - DNA, 25 bp, Homo sapien
ccttgtaactaacatcatagcttgc

SEQ ID NO: 5118818 - DNA, 25 bp, Homo sapien
ttaataggtaagtggctggccctgg

SEQ ID NO: 5118819 - DNA, 25 bp, Homo sapien
catctgtgatcataatataggaaga

SEQ ID NO: 5118820 - DNA, 25 bp, Homo sapien
cactgaattggtggcaccatcggta

SEQ ID NO: 5118821 - DNA, 25 bp, Homo sapien
gatcataatataggaagaacactga

SEQ ID NO: 5118822 - DNA, 25 bp, Homo sapien
gaattggtggcaccatcggtaattg

SEQ ID NO: 5118823 - DNA, 25 bp, Homo sapien
aaaacaagacttacagcatctgaac

SEQ ID NO: 5118824 - DNA, 25 bp, Homo sapien
ctatggactgtaccgagaagtatca

SEQ ID NO: 5118825 - DNA, 25 bp, Homo sapien
gaagtatcaaaacaagacttacagc

SEQ ID NO: 5118826 - DNA, 25 bp, Homo sapien
cagcatctgaacaaagcagcgtcat

SEQ ID NO: 5118827 - DNA, 25 bp, Homo sapien
tgaaactaaacaacagcagtttcca

SEQ ID NO: 5118828 - DNA, 25 bp, Homo sapien
tattcacaaagcatgagctgaaact

SEQ ID NO: 5118829 - DNA, 25 bp, Homo sapien
aagcatgagctgaaactaaacaaca

SEQ ID NO: 5118830 - DNA, 25 bp, Homo sapien
gagctgaaactaaacaacagcagtt

SEQ ID NO: 5118831 - DNA, 25 bp, Homo sapien
tattttgtcttccataatgcaactt

SEQ ID NO: 5118832 - DNA, 25 bp, Homo sapien
ctttttctattttgtcttccataat

SEQ ID NO: 5118833 - DNA, 25 bp, Homo sapien
ttctattttgtcttccataatgcaa

SEQ ID NO: 5118834 - DNA, 25 bp, Homo sapien
tattcatcagttttttgcctttttc

SEQ ID NO: 5118835 - DNA, 25 bp, Homo sapien
tgcatgtctgaacagggtcacacag

SEQ ID NO: 5118836 - DNA, 25 bp, Homo sapien
catgcatgtctgaacagggtcacac

SEQ ID NO: 5118837 - DNA, 25 bp, Homo sapien
aggcatgcatgtctgaacagggtca

SEQ ID NO: 5118838 - DNA, 25 bp, Homo sapien
catgtctgaacagggtcacacagat

SEQ ID NO: 5118839 - DNA, 25 bp, Homo sapien
taacatcatgatcagtgcagacttc

SEQ ID NO: 5118840 - DNA, 25 bp, Homo sapien
gaatgatgccagaaggctaaattct

SEQ ID NO: 5118841 - DNA, 25 bp, Homo sapien
ggatcttgcctgctttatgcctcat

SEQ ID NO: 5118842 - DNA, 25 bp, Homo sapien
ggaactctgtttggctacctttgag

SEQ ID NO: 5118843 - DNA, 25 bp, Homo sapien
ccttatccacatatcaccaataaat

SEQ ID NO: 5118844 - DNA, 25 bp, Homo sapien
cactctctcattcatacacatgtta

SEQ ID NO: 5118845 - DNA, 25 bp, Homo sapien
cacatgttaaaattagctatgaact

SEQ ID NO: 5118846 - DNA, 25 bp, Homo sapien
gtctacttaagtccaccttatccac

SEQ ID NO: 5118847 - DNA, 25 bp, Homo sapien
gccagagtcaccacattctgaggac

SEQ ID NO: 5118848 - DNA, 25 bp, Homo sapien
catataacttctcgtggccagcttg

SEQ ID NO: 5118849 - DNA, 25 bp, Homo sapien
atccttccttgtcccatataacttc

SEQ ID NO: 5118850 - DNA, 25 bp, Homo sapien
ggccagcttgctggggcttatactg

SEQ ID NO: 5118851 - DNA, 25 bp, Homo sapien
tggggcttatactgataccagtgtc

SEQ ID NO: 5118852 - DNA, 25 bp, Homo sapien
gtgaattacattatcgactgtgtcg

SEQ ID NO: 5118853 - DNA, 25 bp, Homo sapien
ttctctgccattgcatctgaacagg

SEQ ID NO: 5118854 - DNA, 25 bp, Homo sapien
gaaacatctaattgtagaaccatta

SEQ ID NO: 5118855 - DNA, 25 bp, Homo sapien
gactgtgtcgatttgtgactgttga

SEQ ID NO: 5118856 - DNA, 25 bp, Homo sapien
ctgtgctgggagcgcatacagatca

SEQ ID NO: 5118857 - DNA, 25 bp, Homo sapien
tgggagcgcatacagatcagcatcc

SEQ ID NO: 5118858 - DNA, 25 bp, Homo sapien
gctgggagcgcatacagatcagcat

SEQ ID NO: 5118859 - DNA, 25 bp, Homo sapien
ggagcgcatacagatcagcatccac

SEQ ID NO: 5118860 - DNA, 25 bp, Homo sapien
tatttacacactgctgtagaccttt

SEQ ID NO: 5118861 - DNA, 25 bp, Homo sapien
ctgcctgttttgcaaactctcacac

SEQ ID NO: 5118862 - DNA, 25 bp, Homo sapien
tagacctttgtacatctgattgcca

SEQ ID NO: 5118863 - DNA, 25 bp, Homo sapien
tctcctttatgtcttaaaataagcc

SEQ ID NO: 5118864 - DNA, 25 bp, Homo sapien
gcttcaccttctgtggtggggtcat

SEQ ID NO: 5118865 - DNA, 25 bp, Homo sapien
ggcttcaccttctgtggtggggtca

SEQ ID NO: 5118866 - DNA, 25 bp, Homo sapien
cctcagccaccttttggcttcacct

SEQ ID NO: 5118867 - DNA, 25 bp, Homo sapien
ttcaccttctgtggtggggtcatgg

SEQ ID NO: 5118868 - DNA, 25 bp, Homo sapien
tatgtcccttcacaggagtgtccat

SEQ ID NO: 5118869 - DNA, 25 bp, Homo sapien
gtttttatgtcccttcacaggagtg

SEQ ID NO: 5118870 - DNA, 25 bp, Homo sapien
ctgtttttatgtcccttcacaggag

SEQ ID NO: 5118871 - DNA, 25 bp, Homo sapien
ttttatgtcccttcacaggagtgtc

SEQ ID NO: 5118872 - DNA, 25 bp, Homo sapien
actcatcccacaggtatcatgtgtg

SEQ ID NO: 5118873 - DNA, 25 bp, Homo sapien
ttgctataactcatcccacaggtat

SEQ ID NO: 5118874 - DNA, 25 bp, Homo sapien
cacaggtatcatgtgtgtcagaatc

SEQ ID NO: 5118875 - DNA, 25 bp, Homo sapien
cttctattcctcatctgaagatagc

SEQ ID NO: 5118876 - DNA, 25 bp, Homo sapien
tatgaagccatattgacggcgataa

SEQ ID NO: 5118877 - DNA, 25 bp, Homo sapien
ttatgaagccatattgacggcgata

SEQ ID NO: 5118878 - DNA, 25 bp, Homo sapien
tgaagccatattgacggcgataatc

SEQ ID NO: 5118879 - DNA, 25 bp, Homo sapien
gaagccatattgacggcgataatca

SEQ ID NO: 5118880 - DNA, 25 bp, Homo sapien
gcctttttcaaagcctctgtttata

SEQ ID NO: 5118881 - DNA, 25 bp, Homo sapien
tactctgatcctctctttgcctttt

SEQ ID NO: 5118882 - DNA, 25 bp, Homo sapien
ttagaattttccctctactctgatc

SEQ ID NO: 5118883 - DNA, 25 bp, Homo sapien
ttgcctttttcaaagcctctgttta

SEQ ID NO: 5118884 - DNA, 25 bp, Homo sapien
gcctcagttgtgctctcaagcatgg

SEQ ID NO: 5118885 - DNA, 25 bp, Homo sapien
ggcaataggacagcctcagttgtgc

SEQ ID NO: 5118886 - DNA, 25 bp, Homo sapien
acagcctcagttgtgctctcaagca

SEQ ID NO: 5118887 - DNA, 25 bp, Homo sapien
taggacagcctcagttgtgctctca

SEQ ID NO: 5118888 - DNA, 25 bp, Homo sapien
attttttccccctcagcaggctcat

SEQ ID NO: 5118889 - DNA, 25 bp, Homo sapien
ctttgattttttccccctcagcagg

SEQ ID NO: 5118890 - DNA, 25 bp, Homo sapien
gattttttccccctcagcaggctca

SEQ ID NO: 5118891 - DNA, 25 bp, Homo sapien
ttgattttttccccctcagcaggct

SEQ ID NO: 5118892 - DNA, 25 bp, Homo sapien
ctcgtaggagtatcagcccattgcc

SEQ ID NO: 5118893 - DNA, 25 bp, Homo sapien
ggtagataaacccaagccgctgaaa

SEQ ID NO: 5118894 - DNA, 25 bp, Homo sapien
ttaacaaggtggaagaaagtctgct

SEQ ID NO: 5118895 - DNA, 25 bp, Homo sapien
tcaacagcagatgtcacacggaaga

SEQ ID NO: 5118896 - DNA, 25 bp, Homo sapien
cctgggtgacagagtgagactccac

SEQ ID NO: 5118897 - DNA, 25 bp, Homo sapien
tgagccgagactgtgtcactgcatt

SEQ ID NO: 5118898 - DNA, 25 bp, Homo sapien
agcctgggtgacagagtgagactcc

SEQ ID NO: 5118899 - DNA, 25 bp, Homo sapien
gccgagactgtgtcactgcattcca

SEQ ID NO: 5118900 - DNA, 25 bp, Homo sapien
cagttggagctggttaagcaatctc

SEQ ID NO: 5118901 - DNA, 25 bp, Homo sapien
ttatgctggagcttgatatccacag

SEQ ID NO: 5118902 - DNA, 25 bp, Homo sapien
ggttaagcaatctctgtgaagctgt

SEQ ID NO: 5118903 - DNA, 25 bp, Homo sapien
tgtaaagtgggatagagcaaaaaga

SEQ ID NO: 5118904 - DNA, 25 bp, Homo sapien
ccctgattgagacatgaaggcctct

SEQ ID NO: 5118905 - DNA, 25 bp, Homo sapien
gtccactgggctacaatcatcagca

SEQ ID NO: 5118906 - DNA, 25 bp, Homo sapien
gatactccagaggtagcatgcccag

SEQ ID NO: 5118907 - DNA, 25 bp, Homo sapien
tgggcatccaagatagctcccttgc

SEQ ID NO: 5118908 - DNA, 25 bp, Homo sapien
cataaacttatgcttgtcatctcca

SEQ ID NO: 5118909 - DNA, 25 bp, Homo sapien
tccctttgaaggacccaaactctca

SEQ ID NO: 5118910 - DNA, 25 bp, Homo sapien
tctccacagggaatgaccaacgaag

SEQ ID NO: 5118911 - DNA, 25 bp, Homo sapien
tccatagtcttgagagtcatttcta

SEQ ID NO: 5118912 - DNA, 25 bp, Homo sapien
aagctcccacattcaacgtttccat

SEQ ID NO: 5118913 - DNA, 25 bp, Homo sapien
tgcaaagctcccacattcaacgttt

SEQ ID NO: 5118914 - DNA, 25 bp, Homo sapien
catggccttccactgcaaagctccc

SEQ ID NO: 5118915 - DNA, 25 bp, Homo sapien
tggccttccactgcaaagctcccac

SEQ ID NO: 5118916 - DNA, 25 bp, Homo sapien
gaaaagtagatgtccttatttctgt

SEQ ID NO: 5118917 - DNA, 25 bp, Homo sapien
catgggtacacatgtggaagcaacg

SEQ ID NO: 5118918 - DNA, 25 bp, Homo sapien
gaagcaacgtgtacagattccaagt

SEQ ID NO: 5118919 - DNA, 25 bp, Homo sapien
gaattttagttggtcactggctgca

SEQ ID NO: 5118920 - DNA, 25 bp, Homo sapien
taagacatcttcaatgagggcagag

SEQ ID NO: 5118921 - DNA, 25 bp, Homo sapien
ctacactcggagactgtgttattgt

SEQ ID NO: 5118922 - DNA, 25 bp, Homo sapien
tacactcggagactgtgttattgta

SEQ ID NO: 5118923 - DNA, 25 bp, Homo sapien
acactcggagactgtgttattgtag

SEQ ID NO: 5118924 - DNA, 25 bp, Homo sapien
tgactagagacagcggacatctggc

SEQ ID NO: 5118925 - DNA, 25 bp, Homo sapien
gatgaagggctcaagaagagtgact

SEQ ID NO: 5118926 - DNA, 25 bp, Homo sapien
cacattcagatatggcagaggagtt

SEQ ID NO: 5118927 - DNA, 25 bp, Homo sapien
tggaaagataccttacctacagaag

SEQ ID NO: 5118928 - DNA, 25 bp, Homo sapien
tattctggggacttgctgtttgctg

SEQ ID NO: 5118929 - DNA, 25 bp, Homo sapien
gcttctgttctgcatgattaattct

SEQ ID NO: 5118930 - DNA, 25 bp, Homo sapien
tatttaaggcatggtccaactggac

SEQ ID NO: 5118931 - DNA, 25 bp, Homo sapien
ctggaccaggctgtcctctagtaaa

SEQ ID NO: 5118932 - DNA, 25 bp, Homo sapien
cagaaataaggcttggaagtaaggg

SEQ ID NO: 5118933 - DNA, 25 bp, Homo sapien
tcgtcttggatcacttgacttgcca

SEQ ID NO: 5118934 - DNA, 25 bp, Homo sapien
cacctggtctctttctcgtcttgga

SEQ ID NO: 5118935 - DNA, 25 bp, Homo sapien
cctttctacatgtctcttttgaggg

SEQ ID NO: 5118936 - DNA, 25 bp, Homo sapien
tgatgggttctctggcaacagccgt

SEQ ID NO: 5118937 - DNA, 25 bp, Homo sapien
cagtaaggtggatgcatgccaggct

SEQ ID NO: 5118938 - DNA, 25 bp, Homo sapien
caggcaagttcagttgtggaagtga

SEQ ID NO: 5118939 - DNA, 25 bp, Homo sapien
gggcccaagatctcatgaagagaat

SEQ ID NO: 5118940 - DNA, 25 bp, Homo sapien
aacatccttgcagcctgtctcaaag

SEQ ID NO: 5118941 - DNA, 25 bp, Homo sapien
tcctccaacatccttgcagcctgtc

SEQ ID NO: 5118942 - DNA, 25 bp, Homo sapien
atcctccaacatccttgcagcctgt

SEQ ID NO: 5118943 - DNA, 25 bp, Homo sapien
tccaacatccttgcagcctgtctca

SEQ ID NO: 5118944 - DNA, 25 bp, Homo sapien
tagctgggtgatcagtctgcaggac

SEQ ID NO: 5118945 - DNA, 25 bp, Homo sapien
ttgtaaatagctgggtgatcagtct

SEQ ID NO: 5118946 - DNA, 25 bp, Homo sapien
aatagctgggtgatcagtctgcagg

SEQ ID NO: 5118947 - DNA, 25 bp, Homo sapien
taaatagctgggtgatcagtctgca

SEQ ID NO: 5118948 - DNA, 25 bp, Homo sapien
tgtgaaaacacacttcgataagtcc

SEQ ID NO: 5118949 - DNA, 25 bp, Homo sapien
gactgtcctgtgaaaacacacttcg

SEQ ID NO: 5118950 - DNA, 25 bp, Homo sapien
aacacacttcgataagtccaccgga

SEQ ID NO: 5118951 - DNA, 25 bp, Homo sapien
aggaactgactgtcctgtgaaaaca

SEQ ID NO: 5118952 - DNA, 25 bp, Homo sapien
taatgggcacaactgtaaaatgcgt

SEQ ID NO: 5118953 - DNA, 25 bp, Homo sapien
gcctgcggcctggttgtttttctct

SEQ ID NO: 5118954 - DNA, 25 bp, Homo sapien
cattaggtggcgtgtctgtgttctc

SEQ ID NO: 5118955 - DNA, 25 bp, Homo sapien
tgtaaaatgcgtctgggcctgcggc

SEQ ID NO: 5118956 - DNA, 25 bp, Homo sapien
gctgagtgttccagaaccaagttaa

SEQ ID NO: 5118957 - DNA, 25 bp, Homo sapien
gagtgttccagaaccaagttaatag

SEQ ID NO: 5118958 - DNA, 25 bp, Homo sapien
tgttccagaaccaagttaatagctg

SEQ ID NO: 5118959 - DNA, 25 bp, Homo sapien
ccagaaccaagttaatagctgccat

SEQ ID NO: 5118960 - DNA, 25 bp, Homo sapien
tccgaatgagaagaccagcagaatc

SEQ ID NO: 5118961 - DNA, 25 bp, Homo sapien
gaagatctccgaatgagaagaccag

SEQ ID NO: 5118962 - DNA, 25 bp, Homo sapien
cagaatcattctcatgtggactaag

SEQ ID NO: 5118963 - DNA, 25 bp, Homo sapien
gagagccatgaagatctccgaatga

SEQ ID NO: 5118964 - DNA, 25 bp, Homo sapien
cacggaccacggagaaagttgacca

SEQ ID NO: 5118965 - DNA, 25 bp, Homo sapien
cccaataagtctgggtgaatgaccc

SEQ ID NO: 5118966 - DNA, 25 bp, Homo sapien
catatatggtacatgatagaaggaa

SEQ ID NO: 5118967 - DNA, 25 bp, Homo sapien
gaaagttgaccacaaagtttgacaa

SEQ ID NO: 5118968 - DNA, 25 bp, Homo sapien
agcaggacgaaagccccggcctgga

SEQ ID NO: 5118969 - DNA, 25 bp, Homo sapien
gccactccatgtcaccaagggctat

SEQ ID NO: 5118970 - DNA, 25 bp, Homo sapien
ctccagagcaggacgaaagccccgg

SEQ ID NO: 5118971 - DNA, 25 bp, Homo sapien
ccaagggctatgagacagtgtctcc

SEQ ID NO: 5118972 - DNA, 25 bp, Homo sapien
gcctgtgatcgggtactgccaggcc

SEQ ID NO: 5118973 - DNA, 25 bp, Homo sapien
agcctgtgatcgggtactgccaggc

SEQ ID NO: 5118974 - DNA, 25 bp, Homo sapien
cagcctgtgatcgggtactgccagg

SEQ ID NO: 5118975 - DNA, 25 bp, Homo sapien
tgaagcccttgccatattacagcta

SEQ ID NO: 5118976 - DNA, 25 bp, Homo sapien
gcccttgccatattacagctatgac

SEQ ID NO: 5118977 - DNA, 25 bp, Homo sapien
gaagcccttgccatattacagctat

SEQ ID NO: 5118978 - DNA, 25 bp, Homo sapien
catgaagcccttgccatattacagc

SEQ ID NO: 5118979 - DNA, 25 bp, Homo sapien
caatggagcctttgcacttttctca

SEQ ID NO: 5118980 - DNA, 25 bp, Homo sapien
gagtgtcaaattgtaactcgcaagt

SEQ ID NO: 5118981 - DNA, 25 bp, Homo sapien
tgtaactcgcaagtatgagaaatat

SEQ ID NO: 5118982 - DNA, 25 bp, Homo sapien
tctcatctgtggattgttcatcaag

SEQ ID NO: 5118983 - DNA, 25 bp, Homo sapien
aataggtcccgctggcaaacatttt

SEQ ID NO: 5118984 - DNA, 25 bp, Homo sapien
aatcccacatatctccaggaatctg

SEQ ID NO: 5118985 - DNA, 25 bp, Homo sapien
ggcaaacattttacgtctgaacctg

SEQ ID NO: 5118986 - DNA, 25 bp, Homo sapien
tataagtgacccatggcaccaatcc

SEQ ID NO: 5118987 - DNA, 25 bp, Homo sapien
tcactgaatactgcgagtgctgcta

SEQ ID NO: 5118988 - DNA, 25 bp, Homo sapien
cccagttaatggagtcaaagctaac

SEQ ID NO: 5118989 - DNA, 25 bp, Homo sapien
ctgggcacctcatagacaacaaatc

SEQ ID NO: 5118990 - DNA, 25 bp, Homo sapien
taacttaatcaactctctgggcacc

SEQ ID NO: 5118991 - DNA, 25 bp, Homo sapien
caattgactttcagactgattgact

SEQ ID NO: 5118992 - DNA, 25 bp, Homo sapien
gattgactacatctggtgagtcttc

SEQ ID NO: 5118993 - DNA, 25 bp, Homo sapien
tttatttggtaactagtcaattgac

SEQ ID NO: 5118994 - DNA, 25 bp, Homo sapien
tcagactgattgactacatctggtg

SEQ ID NO: 5118995 - DNA, 25 bp, Homo sapien
gctgatacagcgattccaactcctg

SEQ ID NO: 5118996 - DNA, 25 bp, Homo sapien
ccctctaaggtcatgggacatgaat

SEQ ID NO: 5118997 - DNA, 25 bp, Homo sapien
tgtttccgaagagctgatacagcga

SEQ ID NO: 5118998 - DNA, 25 bp, Homo sapien
cttgatactgtttccgaagagctga

SEQ ID NO: 5118999 - DNA, 25 bp, Homo sapien
tcattttcatgggattttgcttcaa

SEQ ID NO: 5119000 - DNA, 25 bp, Homo sapien
caaggtcattttcatgggattttgc

SEQ ID NO: 5119001 - DNA, 25 bp, Homo sapien
ttacaaacaaggtcattttcatggg

SEQ ID NO: 5119002 - DNA, 25 bp, Homo sapien
ctcattcttacaaacaaggtcattt

SEQ ID NO: 5119003 - DNA, 25 bp, Homo sapien
atacagggtgatatggtagtagacc

SEQ ID NO: 5119004 - DNA, 25 bp, Homo sapien
caggcgcatacagggtgatatggta

SEQ ID NO: 5119005 - DNA, 25 bp, Homo sapien
gcgcatacagggtgatatggtagta

SEQ ID NO: 5119006 - DNA, 25 bp, Homo sapien
catacagggtgatatggtagtagac

SEQ ID NO: 5119007 - DNA, 25 bp, Homo sapien
caggcaactcatccaaacaagcaac

SEQ ID NO: 5119008 - DNA, 25 bp, Homo sapien
aactcatccaaacaagcaacccgtt

SEQ ID NO: 5119009 - DNA, 25 bp, Homo sapien
tcatccaaacaagcaacccgttgtc

SEQ ID NO: 5119010 - DNA, 25 bp, Homo sapien
ccaaacaagcaacccgttgtcctgg

SEQ ID NO: 5119011 - DNA, 25 bp, Homo sapien
agatcatgtcgtctgacaataggga

SEQ ID NO: 5119012 - DNA, 25 bp, Homo sapien
taattgctcgggctaggactttcaa

SEQ ID NO: 5119013 - DNA, 25 bp, Homo sapien
ccacttttcaccgttgaatatgatg

SEQ ID NO: 5119014 - DNA, 25 bp, Homo sapien
ggttgccatatactgcctttattct

SEQ ID NO: 5119015 - DNA, 25 bp, Homo sapien
gagctgacataactgataagggaac

SEQ ID NO: 5119016 - DNA, 25 bp, Homo sapien
tggaagagtccatggttttagtcct

SEQ ID NO: 5119017 - DNA, 25 bp, Homo sapien
cactaagcagaagagtgcatggtct

SEQ ID NO: 5119018 - DNA, 25 bp, Homo sapien
caagacaagaattagtgattgcctg

SEQ ID NO: 5119019 - DNA, 25 bp, Homo sapien
gcctctgcaagctgctttgtagcaa

SEQ ID NO: 5119020 - DNA, 25 bp, Homo sapien
cttcaagcctctgcaagctgctttg

SEQ ID NO: 5119021 - DNA, 25 bp, Homo sapien
catcttggaccttcaagcctctgca

SEQ ID NO: 5119022 - DNA, 25 bp, Homo sapien
ggaccttcaagcctctgcaagctgc

SEQ ID NO: 5119023 - DNA, 25 bp, Homo sapien
ccttagctaagcttgcaatgtagag

SEQ ID NO: 5119024 - DNA, 25 bp, Homo sapien
tacatggcagaaacaaggtagacct

SEQ ID NO: 5119025 - DNA, 25 bp, Homo sapien
caatgtagagtagaggcgatggtct

SEQ ID NO: 5119026 - DNA, 25 bp, Homo sapien
ggtagacctcctgactgaaatgaga

SEQ ID NO: 5119027 - DNA, 25 bp, Homo sapien
agaatcataaaagtactgcttttcc

SEQ ID NO: 5119028 - DNA, 25 bp, Homo sapien
gaatcataaaagtactgcttttcct

SEQ ID NO: 5119029 - DNA, 25 bp, Homo sapien
tcataaaagtactgcttttccttct

SEQ ID NO: 5119030 - DNA, 25 bp, Homo sapien
aatcataaaagtactgcttttcctt

SEQ ID NO: 5119031 - DNA, 25 bp, Homo sapien
cgctcgcagatatccaattagtgaa

SEQ ID NO: 5119032 - DNA, 25 bp, Homo sapien
cactgactcaatgcgtcctatctgg

SEQ ID NO: 5119033 - DNA, 25 bp, Homo sapien
tattactacaatttgcctcttctgg

SEQ ID NO: 5119034 - DNA, 25 bp, Homo sapien
atgtctccgcaagcaggctcctgag

SEQ ID NO: 5119035 - DNA, 25 bp, Homo sapien
aggtcatcaaagtccacatggctca

SEQ ID NO: 5119036 - DNA, 25 bp, Homo sapien
tggctcacgttcttttcctcaggaa

SEQ ID NO: 5119037 - DNA, 25 bp, Homo sapien
tatgttgtctttagggtccacccca

SEQ ID NO: 5119038 - DNA, 25 bp, Homo sapien
tataaggctcccatttctggctacc

SEQ ID NO: 5119039 - DNA, 25 bp, Homo sapien
aaagctcctccgtggatagtggtca

SEQ ID NO: 5119040 - DNA, 25 bp, Homo sapien
accactgattgttctatatcatcaa

SEQ ID NO: 5119041 - DNA, 25 bp, Homo sapien
cactgattgttctatatcatcaaaa

SEQ ID NO: 5119042 - DNA, 25 bp, Homo sapien
ctccgtggatagtggtcaggcccat

SEQ ID NO: 5119043 - DNA, 25 bp, Homo sapien
cttcttctttattgtgtctcacctt

SEQ ID NO: 5119044 - DNA, 25 bp, Homo sapien
ttcttctttattgtgtctcaccttc

SEQ ID NO: 5119045 - DNA, 25 bp, Homo sapien
tcttctttattgtgtctcaccttca

SEQ ID NO: 5119046 - DNA, 25 bp, Homo sapien
cttctttattgtgtctcaccttcat

SEQ ID NO: 5119047 - DNA, 25 bp, Homo sapien
cctatgtaacaaacctgcatgttct

SEQ ID NO: 5119048 - DNA, 25 bp, Homo sapien
agcaaaccaccatggcacatgtata

SEQ ID NO: 5119049 - DNA, 25 bp, Homo sapien
ctaatgtagatgacgggctgatggg

SEQ ID NO: 5119050 - DNA, 25 bp, Homo sapien
tgttctgcacatgtatcccagaact

SEQ ID NO: 5119051 - DNA, 25 bp, Homo sapien
ttatacctgagctgtagaacactgg

SEQ ID NO: 5119052 - DNA, 25 bp, Homo sapien
gcagccctggactcgtaaaaacttc

SEQ ID NO: 5119053 - DNA, 25 bp, Homo sapien
gtgtagtttcttatagcagccctgg

SEQ ID NO: 5119054 - DNA, 25 bp, Homo sapien
gagctgtagaacactggtaaatatt

SEQ ID NO: 5119055 - DNA, 25 bp, Homo sapien
aatttacccttatcagtgagcttca

SEQ ID NO: 5119056 - DNA, 25 bp, Homo sapien
tctggcccacaaggtttctgctgat

SEQ ID NO: 5119057 - DNA, 25 bp, Homo sapien
gcaggtctaatggtgatgtactcct

SEQ ID NO: 5119058 - DNA, 25 bp, Homo sapien
taacatgaagagttccctttaggat

SEQ ID NO: 5119059 - DNA, 25 bp, Homo sapien
ggatttactagacatcatgtgctca

SEQ ID NO: 5119060 - DNA, 25 bp, Homo sapien
agacatcatgtgctcatcaattatc

SEQ ID NO: 5119061 - DNA, 25 bp, Homo sapien
cggagagtgtggatttactagacat

SEQ ID NO: 5119062 - DNA, 25 bp, Homo sapien
tcttccttccaccatacatttccct

SEQ ID NO: 5119063 - DNA, 25 bp, Homo sapien
cttgaatttttccgtctccatgtcc

SEQ ID NO: 5119064 - DNA, 25 bp, Homo sapien
atttttccgtctccatgtccgtcac

SEQ ID NO: 5119065 - DNA, 25 bp, Homo sapien
tgaatttttccgtctccatgtccgt

SEQ ID NO: 5119066 - DNA, 25 bp, Homo sapien
gaatttttccgtctccatgtccgtc

SEQ ID NO: 5119067 - DNA, 25 bp, Homo sapien
agactttgcttgtacagctccggaa

SEQ ID NO: 5119068 - DNA, 25 bp, Homo sapien
gcttgtacagctccggaatggatac

SEQ ID NO: 5119069 - DNA, 25 bp, Homo sapien
tttgcttgtacagctccggaatgga

SEQ ID NO: 5119070 - DNA, 25 bp, Homo sapien
tccggaatggatacctgtctctcca

SEQ ID NO: 5119071 - DNA, 25 bp, Homo sapien
tttgctagaagcagccaagtgagag

SEQ ID NO: 5119072 - DNA, 25 bp, Homo sapien
ctttgctagaagcagccaagtgaga

SEQ ID NO: 5119073 - DNA, 25 bp, Homo sapien
cctttgctagaagcagccaagtgag

SEQ ID NO: 5119074 - DNA, 25 bp, Homo sapien
tctgagcattcccttggatcctttt

SEQ ID NO: 5119075 - DNA, 25 bp, Homo sapien
agcttctatcatttctcccattgaa

SEQ ID NO: 5119076 - DNA, 25 bp, Homo sapien
tagcttctatcatttctcccattga

SEQ ID NO: 5119077 - DNA, 25 bp, Homo sapien
ttgatatgtgctgtttatcatttcc

SEQ ID NO: 5119078 - DNA, 25 bp, Homo sapien
aaacattgacaagttccagccaagc

SEQ ID NO: 5119079 - DNA, 25 bp, Homo sapien
ctttctcagcataggtatttgccag

SEQ ID NO: 5119080 - DNA, 25 bp, Homo sapien
ctgtcctttagctctggctccttct

SEQ ID NO: 5119081 - DNA, 25 bp, Homo sapien
tccatgatccccagaagtctagaat

SEQ ID NO: 5119082 - DNA, 25 bp, Homo sapien
caaaatgtccagtcgcaatccctct

SEQ ID NO: 5119083 - DNA, 25 bp, Homo sapien
gaatctctccgcttgtttttgtgca

SEQ ID NO: 5119084 - DNA, 25 bp, Homo sapien
cagtcgcaatccctctattgtgatt

SEQ ID NO: 5119085 - DNA, 25 bp, Homo sapien
ctgtttcttgtgagcagcttgttcc

SEQ ID NO: 5119086 - DNA, 25 bp, Homo sapien
tgtttcttgtgagcagcttgttccc

SEQ ID NO: 5119087 - DNA, 25 bp, Homo sapien
cctgtttcttgtgagcagcttgttc

SEQ ID NO: 5119088 - DNA, 25 bp, Homo sapien
caaatgattgtaaaactccaggggt

SEQ ID NO: 5119089 - DNA, 25 bp, Homo sapien
tttcaaatgattgtaaaactccagg

SEQ ID NO: 5119090 - DNA, 25 bp, Homo sapien
tgaatttcaaatgattgtaaaactc

SEQ ID NO: 5119091 - DNA, 25 bp, Homo sapien
gaatttcaaatgattgtaaaactcc

SEQ ID NO: 5119092 - DNA, 25 bp, Homo sapien
taaaaatgcgagacttaccacagtc

SEQ ID NO: 5119093 - DNA, 25 bp, Homo sapien
tcagcaagtgtgaaggaaccatacc

SEQ ID NO: 5119094 - DNA, 25 bp, Homo sapien
tagtgccagagtgattttgacaaac

SEQ ID NO: 5119095 - DNA, 25 bp, Homo sapien
gaaattcaaaatcactagcaggctt

SEQ ID NO: 5119096 - DNA, 25 bp, Homo sapien
taaatttacacaatctcttggacag

SEQ ID NO: 5119097 - DNA, 25 bp, Homo sapien
gcagttctgaggtctcaaccacgtg

SEQ ID NO: 5119098 - DNA, 25 bp, Homo sapien
caaccacgtgaatggttaagagcga

SEQ ID NO: 5119099 - DNA, 25 bp, Homo sapien
ttaagagcgataaaaatctccccag

SEQ ID NO: 5119100 - DNA, 25 bp, Homo sapien
taatatccattctctattgcctgcg

SEQ ID NO: 5119101 - DNA, 25 bp, Homo sapien
gtaaagttgctccacagtaatatcc

SEQ ID NO: 5119102 - DNA, 25 bp, Homo sapien
tttccctcacagtggtaatctcagg

SEQ ID NO: 5119103 - DNA, 25 bp, Homo sapien
gactaccagttttccatccaatgct

SEQ ID NO: 5119104 - DNA, 25 bp, Homo sapien
acaatgagcaaagtgcctgcaacca

SEQ ID NO: 5119105 - DNA, 25 bp, Homo sapien
gggttatcaaacaatgagcaaagtg

SEQ ID NO: 5119106 - DNA, 25 bp, Homo sapien
tgcctgcaaccaggtgttgcttctt

SEQ ID NO: 5119107 - DNA, 25 bp, Homo sapien
cttaagggttatcaaacaatgagca

SEQ ID NO: 5119108 - DNA, 25 bp, Homo sapien
tcctcatctatgttgatgtttatcc

SEQ ID NO: 5119109 - DNA, 25 bp, Homo sapien
actttatctctgtggccgtgatgtc

SEQ ID NO: 5119110 - DNA, 25 bp, Homo sapien
aaatgtctttgccaccttggatatc

SEQ ID NO: 5119111 - DNA, 25 bp, Homo sapien
ctttgccaccttggatatcacactt

SEQ ID NO: 5119112 - DNA, 25 bp, Homo sapien
gaccttaggaggtacagctaatgga

SEQ ID NO: 5119113 - DNA, 25 bp, Homo sapien
ccttaggaggtacagctaatggagg

SEQ ID NO: 5119114 - DNA, 25 bp, Homo sapien
cagaccttaggaggtacagctaatg

SEQ ID NO: 5119115 - DNA, 25 bp, Homo sapien
gaggtacagctaatggaggggatat

SEQ ID NO: 5119116 - DNA, 25 bp, Homo sapien
ctgtttatgggctgcaaaaatgacc

SEQ ID NO: 5119117 - DNA, 25 bp, Homo sapien
gtttatgggctgcaaaaatgaccat

SEQ ID NO: 5119118 - DNA, 25 bp, Homo sapien
tgtttatgggctgcaaaaatgacca

SEQ ID NO: 5119119 - DNA, 25 bp, Homo sapien
ccttaaggattctgctgaggaacac

SEQ ID NO: 5119120 - DNA, 25 bp, Homo sapien
tccttaaggattctgctgaggaaca

SEQ ID NO: 5119121 - DNA, 25 bp, Homo sapien
ttccttaaggattctgctgaggaac

SEQ ID NO: 5119122 - DNA, 25 bp, Homo sapien
gaagaaccgttgctctaaggcttag

SEQ ID NO: 5119123 - DNA, 25 bp, Homo sapien
gggtttctgaaacttgcactaccaa

SEQ ID NO: 5119124 - DNA, 25 bp, Homo sapien
gcagacattaccaaatatcccatgg

SEQ ID NO: 5119125 - DNA, 25 bp, Homo sapien
atgacaatagcagcccctccatatc

SEQ ID NO: 5119126 - DNA, 25 bp, Homo sapien
cagtcttaggcattaagatgatgga

SEQ ID NO: 5119127 - DNA, 25 bp, Homo sapien
tcttaggcattaagatgatggattt

SEQ ID NO: 5119128 - DNA, 25 bp, Homo sapien
tcagtcttaggcattaagatgatgg

SEQ ID NO: 5119129 - DNA, 25 bp, Homo sapien
gtcttaggcattaagatgatggatt

SEQ ID NO: 5119130 - DNA, 25 bp, Homo sapien
atattctggaacattagctattttc

SEQ ID NO: 5119131 - DNA, 25 bp, Homo sapien
cacatttgtcacaagcatattctgg

SEQ ID NO: 5119132 - DNA, 25 bp, Homo sapien
tattctggaacattagctattttca

SEQ ID NO: 5119133 - DNA, 25 bp, Homo sapien
tactattcccaaaggatgtgtgatc

SEQ ID NO: 5119134 - DNA, 25 bp, Homo sapien
tgtttttggcattgaaggtgtgtat

SEQ ID NO: 5119135 - DNA, 25 bp, Homo sapien
ttatcctcttgtgtttacctacgtg

SEQ ID NO: 5119136 - DNA, 25 bp, Homo sapien
tatcatttttacgtcctttgcgaag

SEQ ID NO: 5119137 - DNA, 25 bp, Homo sapien
ctcaaaaaatggactgatactgcgt

SEQ ID NO: 5119138 - DNA, 25 bp, Homo sapien
tactgcgtttcagtccattgtggag

SEQ ID NO: 5119139 - DNA, 25 bp, Homo sapien
aaaaatggactgatactgcgtttca

SEQ ID NO: 5119140 - DNA, 25 bp, Homo sapien
ccattgtggagtgacaatagcataa

SEQ ID NO: 5119141 - DNA, 25 bp, Homo sapien
agttttctgactcggggcatgttga

SEQ ID NO: 5119142 - DNA, 25 bp, Homo sapien
caacagtaattgtgggacttaacaa

SEQ ID NO: 5119143 - DNA, 25 bp, Homo sapien
tgtaggaaaggcctgtacctatcca

SEQ ID NO: 5119144 - DNA, 25 bp, Homo sapien
atcagttggacacgattggcaggga

SEQ ID NO: 5119145 - DNA, 25 bp, Homo sapien
tatcagggagtgttatactctctgc

SEQ ID NO: 5119146 - DNA, 25 bp, Homo sapien
ccataaatgtgggatagcattccat

SEQ ID NO: 5119147 - DNA, 25 bp, Homo sapien
taaagagactaaccttgacccaatg

SEQ ID NO: 5119148 - DNA, 25 bp, Homo sapien
tagttgattgtacagctctttcagc

SEQ ID NO: 5119149 - DNA, 25 bp, Homo sapien
taatgatcctccctattgtgccttg

SEQ ID NO: 5119150 - DNA, 25 bp, Homo sapien
tctatgtcattaattaccactccta

SEQ ID NO: 5119151 - DNA, 25 bp, Homo sapien
ctccagagcttgtagattttaataa

SEQ ID NO: 5119152 - DNA, 25 bp, Homo sapien
tggataattgattttcacacatgtt

SEQ ID NO: 5119153 - DNA, 25 bp, Homo sapien
gaagttgtcctagataccactgcca

SEQ ID NO: 5119154 - DNA, 25 bp, Homo sapien
gcttccagttagtaatcattatcaa

SEQ ID NO: 5119155 - DNA, 25 bp, Homo sapien
gacattcacacatgttggtctgatt

SEQ ID NO: 5119156 - DNA, 25 bp, Homo sapien
tccacaaaaacgataaataacattc

SEQ ID NO: 5119157 - DNA, 25 bp, Homo sapien
ttctgttttgacattgtcctgtgtg

SEQ ID NO: 5119158 - DNA, 25 bp, Homo sapien
ccccagttgctccagatataggact

SEQ ID NO: 5119159 - DNA, 25 bp, Homo sapien
ttcatcgtcgtcctaatgtttttgg

SEQ ID NO: 5119160 - DNA, 25 bp, Homo sapien
acttggttcctgttcttgttgctct

SEQ ID NO: 5119161 - DNA, 25 bp, Homo sapien
tgctttccaagggaaaccaagcatt

SEQ ID NO: 5119162 - DNA, 25 bp, Homo sapien
catgctaaatctcgttgctttccaa

SEQ ID NO: 5119163 - DNA, 25 bp, Homo sapien
taagctggtaccgtcaaaagatagc

SEQ ID NO: 5119164 - DNA, 25 bp, Homo sapien
taaaccaggccagtcgccgtgactc

SEQ ID NO: 5119165 - DNA, 25 bp, Homo sapien
gatgtttgagtacttgatagaaact

SEQ ID NO: 5119166 - DNA, 25 bp, Homo sapien
cccacttcagctttacaagttgaga

SEQ ID NO: 5119167 - DNA, 25 bp, Homo sapien
ggatctccattctttcacatgtcga

SEQ ID NO: 5119168 - DNA, 25 bp, Homo sapien
catcttccatgtgaatctgaggaaa

SEQ ID NO: 5119169 - DNA, 25 bp, Homo sapien
cccttcgaaatcttcttccataatc

SEQ ID NO: 5119170 - DNA, 25 bp, Homo sapien
cttcgaaatcttcttccataatcat

SEQ ID NO: 5119171 - DNA, 25 bp, Homo sapien
cattcccttcgaaatcttcttccat

SEQ ID NO: 5119172 - DNA, 25 bp, Homo sapien
ctcattcccttcgaaatcttcttcc

SEQ ID NO: 5119173 - DNA, 25 bp, Homo sapien
ccagagcaaagaagttcggattaaa

SEQ ID NO: 5119174 - DNA, 25 bp, Homo sapien
gtaaacctttgtgtctaaacattca

SEQ ID NO: 5119175 - DNA, 25 bp, Homo sapien
gtctaaacattcagacttaggtgcc

SEQ ID NO: 5119176 - DNA, 25 bp, Homo sapien
ataaccagagcaaagaagttcggat

SEQ ID NO: 5119177 - DNA, 25 bp, Homo sapien
atatattggcgaaatgtcaccagaa

SEQ ID NO: 5119178 - DNA, 25 bp, Homo sapien
tctggtgccaactattgtcttgagt

SEQ ID NO: 5119179 - DNA, 25 bp, Homo sapien
tcttgagtttggtgaatgacggatt

SEQ ID NO: 5119180 - DNA, 25 bp, Homo sapien
catcagaaccaatgatatctttatc

SEQ ID NO: 5119181 - DNA, 25 bp, Homo sapien
caaagtttcttgcatactgttatct

SEQ ID NO: 5119182 - DNA, 25 bp, Homo sapien
tttccaagatcctgttgttttacca

SEQ ID NO: 5119183 - DNA, 25 bp, Homo sapien
ttgcttggtgaatggctcattataa

SEQ ID NO: 5119184 - DNA, 25 bp, Homo sapien
gaatggctcattataatttccaaga

SEQ ID NO: 5119185 - DNA, 25 bp, Homo sapien
tggtgaatggctcattataatttcc

SEQ ID NO: 5119186 - DNA, 25 bp, Homo sapien
aacctcttttgggagggagcacgtg

SEQ ID NO: 5119187 - DNA, 25 bp, Homo sapien
gaccctttaggaagctatgatatgg

SEQ ID NO: 5119188 - DNA, 25 bp, Homo sapien
actttaatctgagtagcagcctgga

SEQ ID NO: 5119189 - DNA, 25 bp, Homo sapien
aatgatgcagcacttttcttggccc

SEQ ID NO: 5119190 - DNA, 25 bp, Homo sapien
atagagaaacagcatcagataccat

SEQ ID NO: 5119191 - DNA, 25 bp, Homo sapien
gcagaatagagaaacagcatcagat

SEQ ID NO: 5119192 - DNA, 25 bp, Homo sapien
ctgcagaatagagaaacagcatcag

SEQ ID NO: 5119193 - DNA, 25 bp, Homo sapien
gaatagagaaacagcatcagatacc

SEQ ID NO: 5119194 - DNA, 25 bp, Homo sapien
gcaagcaagcaccatattgaggtga

SEQ ID NO: 5119195 - DNA, 25 bp, Homo sapien
tttgcctcttcctcactacagtaaa

SEQ ID NO: 5119196 - DNA, 25 bp, Homo sapien
caaggactgttgttgagattatcaa

SEQ ID NO: 5119197 - DNA, 25 bp, Homo sapien
ctacagtaaaatcttgcaagcaagc

SEQ ID NO: 5119198 - DNA, 25 bp, Homo sapien
tgtgccgaaatgctctcaaataggt

SEQ ID NO: 5119199 - DNA, 25 bp, Homo sapien
ttaaagagaatttgtgccgaaatgc

SEQ ID NO: 5119200 - DNA, 25 bp, Homo sapien
tgtgagttgaaaatatccccattgc

SEQ ID NO: 5119201 - DNA, 25 bp, Homo sapien
gctctcaaataggtatagggttgct

SEQ ID NO: 5119202 - DNA, 25 bp, Homo sapien
ttttcttcccgattatacattttca

SEQ ID NO: 5119203 - DNA, 25 bp, Homo sapien
cacttttttcttcccgattatacat

SEQ ID NO: 5119204 - DNA, 25 bp, Homo sapien
gtgtcatttcgagttccctgttgcc

SEQ ID NO: 5119205 - DNA, 25 bp, Homo sapien
cttttccagtgtcatttcgagttcc

SEQ ID NO: 5119206 - DNA, 25 bp, Homo sapien
tttagctctttgtagtgaaatacaa

SEQ ID NO: 5119207 - DNA, 25 bp, Homo sapien
tccagtgtcatttcgagttccctgt

SEQ ID NO: 5119208 - DNA, 25 bp, Homo sapien
tgatcttgtgtcagtcctaaagcag

SEQ ID NO: 5119209 - DNA, 25 bp, Homo sapien
tgtaacaaaggtggatgttttggag

SEQ ID NO: 5119210 - DNA, 25 bp, Homo sapien
tttggagaagctcaaattgatgaat

SEQ ID NO: 5119211 - DNA, 25 bp, Homo sapien
ctttgtaggtgaataagtctttgac

SEQ ID NO: 5119212 - DNA, 25 bp, Homo sapien
ccatcatgcttaattcgaaaaggtg

SEQ ID NO: 5119213 - DNA, 25 bp, Homo sapien
ctcttttagtttcttacacatcaca

SEQ ID NO: 5119214 - DNA, 25 bp, Homo sapien
gatcttggataagtgagaggcagaa

SEQ ID NO: 5119215 - DNA, 25 bp, Homo sapien
taatccattcgtctcttgatcttgg

SEQ ID NO: 5119216 - DNA, 25 bp, Homo sapien
cattatttgaactgtgcttcagggt

SEQ ID NO: 5119217 - DNA, 25 bp, Homo sapien
ggttttttagtccatgtttctatgc

SEQ ID NO: 5119218 - DNA, 25 bp, Homo sapien
agtccatgtttctatgctaatgtta

SEQ ID NO: 5119219 - DNA, 25 bp, Homo sapien
gaaagtgcattatttgaactgtgct

SEQ ID NO: 5119220 - DNA, 25 bp, Homo sapien
atagtccgtgaggctggcaagctct

SEQ ID NO: 5119221 - DNA, 25 bp, Homo sapien
gtccgtgaggctggcaagctctagt

SEQ ID NO: 5119222 - DNA, 25 bp, Homo sapien
tagtccgtgaggctggcaagctcta

SEQ ID NO: 5119223 - DNA, 25 bp, Homo sapien
agtccgtgaggctggcaagctctag

SEQ ID NO: 5119224 - DNA, 25 bp, Homo sapien
atgagcagttgtcccccttccagac

SEQ ID NO: 5119225 - DNA, 25 bp, Homo sapien
cagttgaaaatgagcagttgtcccc

SEQ ID NO: 5119226 - DNA, 25 bp, Homo sapien
tgtgagaccacagttgaaaatgagc

SEQ ID NO: 5119227 - DNA, 25 bp, Homo sapien
agaccacagttgaaaatgagcagtt

SEQ ID NO: 5119228 - DNA, 25 bp, Homo sapien
tctgtacaggtattgacacattgct

SEQ ID NO: 5119229 - DNA, 25 bp, Homo sapien
gctgccacatcagacaatagttttg

SEQ ID NO: 5119230 - DNA, 25 bp, Homo sapien
ttcatgttcgattgaaggagcacag

SEQ ID NO: 5119231 - DNA, 25 bp, Homo sapien
cagtgctgcagtgctcagtattatt

SEQ ID NO: 5119232 - DNA, 25 bp, Homo sapien
tcacagaatattgctgtgattatta

SEQ ID NO: 5119233 - DNA, 25 bp, Homo sapien
cacagaatattgctgtgattattat

SEQ ID NO: 5119234 - DNA, 25 bp, Homo sapien
agaatattgctgtgattattattac

SEQ ID NO: 5119235 - DNA, 25 bp, Homo sapien
cagaatattgctgtgattattatta

SEQ ID NO: 5119236 - DNA, 25 bp, Homo sapien
cctgtgtgtttcaacatgagtcaga

SEQ ID NO: 5119237 - DNA, 25 bp, Homo sapien
ttttcagccagaagataacgtgacc

SEQ ID NO: 5119238 - DNA, 25 bp, Homo sapien
tgggctttgtgccttgaaaagggta

SEQ ID NO: 5119239 - DNA, 25 bp, Homo sapien
gcagcagttctatgaaagttttggg

SEQ ID NO: 5119240 - DNA, 25 bp, Homo sapien
ctaggctccgcagtgagaaccaaat

SEQ ID NO: 5119241 - DNA, 25 bp, Homo sapien
gcattcaaaaactccctggttcctg

SEQ ID NO: 5119242 - DNA, 25 bp, Homo sapien
cataaggataagctgaaggcattca

SEQ ID NO: 5119243 - DNA, 25 bp, Homo sapien
tacaagatgtaggagaaggggacat

SEQ ID NO: 5119244 - DNA, 25 bp, Homo sapien
tactgatattggatctgtgaagctt

SEQ ID NO: 5119245 - DNA, 25 bp, Homo sapien
agaagcagttttcccccgaagccat

SEQ ID NO: 5119246 - DNA, 25 bp, Homo sapien
tttggcatctgtttgatgaggatcg

SEQ ID NO: 5119247 - DNA, 25 bp, Homo sapien
tcctggcagaagcagttttcccccg

SEQ ID NO: 5119248 - DNA, 25 bp, Homo sapien
catgtaacagttatcagatgctgac

SEQ ID NO: 5119249 - DNA, 25 bp, Homo sapien
tactaatataaatatccatgtaaca

SEQ ID NO: 5119250 - DNA, 25 bp, Homo sapien
tatccatgtaacagttatcagatgc

SEQ ID NO: 5119251 - DNA, 25 bp, Homo sapien
taaatatccatgtaacagttatcag

SEQ ID NO: 5119252 - DNA, 25 bp, Homo sapien
tatcacttctaagaaatttcttgtg

SEQ ID NO: 5119253 - DNA, 25 bp, Homo sapien
tcattattgtctgggagtataggta

SEQ ID NO: 5119254 - DNA, 25 bp, Homo sapien
gggggcagtcctttggcgatttcat

SEQ ID NO: 5119255 - DNA, 25 bp, Homo sapien
gaatgtagagtggtatatcacttct

SEQ ID NO: 5119256 - DNA, 25 bp, Homo sapien
cacacatcttttttccgatacatag

SEQ ID NO: 5119257 - DNA, 25 bp, Homo sapien
gcctttagagtcaaccatagataaa

SEQ ID NO: 5119258 - DNA, 25 bp, Homo sapien
aaaaatgatccataatggttttgcc

SEQ ID NO: 5119259 - DNA, 25 bp, Homo sapien
gaagcaaactatgaatggtttaaaa

SEQ ID NO: 5119260 - DNA, 25 bp, Homo sapien
taatattggaaagctgtaggagctg

SEQ ID NO: 5119261 - DNA, 25 bp, Homo sapien
gtaccatgccaaaggaacagttttg

SEQ ID NO: 5119262 - DNA, 25 bp, Homo sapien
tatggataggctacaaatcaccctg

SEQ ID NO: 5119263 - DNA, 25 bp, Homo sapien
gaactctatgcccacgtaagtggta

SEQ ID NO: 5119264 - DNA, 25 bp, Homo sapien
ctgagcaccttcagtccaggggcca

SEQ ID NO: 5119265 - DNA, 25 bp, Homo sapien
tgagcaccttcagtccaggggccat

SEQ ID NO: 5119266 - DNA, 25 bp, Homo sapien
attccagtcacagataagtatcctg

SEQ ID NO: 5119267 - DNA, 25 bp, Homo sapien
agaagtccccgtgcatcctgctggt

SEQ ID NO: 5119268 - DNA, 25 bp, Homo sapien
catttgtggtccatgtgcgacatgt

SEQ ID NO: 5119269 - DNA, 25 bp, Homo sapien
catgtgcgacatgtgttgacctgca

SEQ ID NO: 5119270 - DNA, 25 bp, Homo sapien
aatccaatccagaaatttggacagt

SEQ ID NO: 5119271 - DNA, 25 bp, Homo sapien
aatgtactaattatgtagctcctga

SEQ ID NO: 5119272 - DNA, 25 bp, Homo sapien
caaccaattgccttttgtgaaatac

SEQ ID NO: 5119273 - DNA, 25 bp, Homo sapien
aatacccaaccaattgccttttgtg

SEQ ID NO: 5119274 - DNA, 25 bp, Homo sapien
tgtaaaaattcccattgtccaagtc

SEQ ID NO: 5119275 - DNA, 25 bp, Homo sapien
catctctaattgaaggcactaatat

SEQ ID NO: 5119276 - DNA, 25 bp, Homo sapien
tcatctctaattgaaggcactaata

SEQ ID NO: 5119277 - DNA, 25 bp, Homo sapien
atctctaattgaaggcactaatata

SEQ ID NO: 5119278 - DNA, 25 bp, Homo sapien
cttcatctctaattgaaggcactaa

SEQ ID NO: 5119279 - DNA, 25 bp, Homo sapien
cagtgtaatacagtcgggggattta

SEQ ID NO: 5119280 - DNA, 25 bp, Homo sapien
ctggcctatgaaaaaggatatgtag

SEQ ID NO: 5119281 - DNA, 25 bp, Homo sapien
tgcatattacattcaagagagggaa

SEQ ID NO: 5119282 - DNA, 25 bp, Homo sapien
tgaaaaaggatatgtagctctgtct

SEQ ID NO: 5119283 - DNA, 25 bp, Homo sapien
tagacattaaggactctgtcccagt

SEQ ID NO: 5119284 - DNA, 25 bp, Homo sapien
ccactgtgtccatggaggatttcat

SEQ ID NO: 5119285 - DNA, 25 bp, Homo sapien
taggagacatccactatagccactg

SEQ ID NO: 5119286 - DNA, 25 bp, Homo sapien
gtctttatggccctctctgggtagc

SEQ ID NO: 5119287 - DNA, 25 bp, Homo sapien
attgaaattctgtgatactgtatta

SEQ ID NO: 5119288 - DNA, 25 bp, Homo sapien
tgtgatactgtattacttcatccat

SEQ ID NO: 5119289 - DNA, 25 bp, Homo sapien
tgaaattctgtgatactgtattact

SEQ ID NO: 5119290 - DNA, 25 bp, Homo sapien
aattctgtgatactgtattacttca

SEQ ID NO: 5119291 - DNA, 25 bp, Homo sapien
tacagagtagccgcttttgcagtag

SEQ ID NO: 5119292 - DNA, 25 bp, Homo sapien
ttacagagtagccgcttttgcagta

SEQ ID NO: 5119293 - DNA, 25 bp, Homo sapien
agtagacaactctgcttttatatta

SEQ ID NO: 5119294 - DNA, 25 bp, Homo sapien
tagacaactctgcttttatattaga

SEQ ID NO: 5119295 - DNA, 25 bp, Homo sapien
tattgtaccaatgtaaaattcctgc

SEQ ID NO: 5119296 - DNA, 25 bp, Homo sapien
tataattgggagatatggcagttcc

SEQ ID NO: 5119297 - DNA, 25 bp, Homo sapien
cacatgtgtacacaagtacttgcac

SEQ ID NO: 5119298 - DNA, 25 bp, Homo sapien
tcctgctgacagttatatgaatata

SEQ ID NO: 5119299 - DNA, 25 bp, Homo sapien
tcctcctctttacacacattaacta

SEQ ID NO: 5119300 - DNA, 25 bp, Homo sapien
tctttacacacattaactaccaagt

SEQ ID NO: 5119301 - DNA, 25 bp, Homo sapien
cacattaactaccaagtagtctgaa

SEQ ID NO: 5119302 - DNA, 25 bp, Homo sapien
taactaccaagtagtctgaattcat

SEQ ID NO: 5119303 - DNA, 25 bp, Homo sapien
tatggaatccatgcatgagaggatc

SEQ ID NO: 5119304 - DNA, 25 bp, Homo sapien
acatcagtggcaagttattagaaac

SEQ ID NO: 5119305 - DNA, 25 bp, Homo sapien
gaggattttacagagtgatgagcga

SEQ ID NO: 5119306 - DNA, 25 bp, Homo sapien
ccagtgtaagccaattgaggaaaca

SEQ ID NO: 5119307 - DNA, 25 bp, Homo sapien
aaaacaaatggaatccatgttttca

SEQ ID NO: 5119308 - DNA, 25 bp, Homo sapien
tctccagtgatagcattattgtagc

SEQ ID NO: 5119309 - DNA, 25 bp, Homo sapien
cattgtccttttcctgagtgttgta

SEQ ID NO: 5119310 - DNA, 25 bp, Homo sapien
tctccttggttgaacattttgatac

SEQ ID NO: 5119311 - DNA, 25 bp, Homo sapien
gcaggtgtcacttgatggactattt

SEQ ID NO: 5119312 - DNA, 25 bp, Homo sapien
aggtgtcacttgatggactatttat

SEQ ID NO: 5119313 - DNA, 25 bp, Homo sapien
caggtgtcacttgatggactattta

SEQ ID NO: 5119314 - DNA, 25 bp, Homo sapien
agcaggtgtcacttgatggactatt

SEQ ID NO: 5119315 - DNA, 25 bp, Homo sapien
tgatttttgatacttctgttccctt

SEQ ID NO: 5119316 - DNA, 25 bp, Homo sapien
caccaaaattgaagataccttcttc

SEQ ID NO: 5119317 - DNA, 25 bp, Homo sapien
ccaaaattgaagataccttcttcct

SEQ ID NO: 5119318 - DNA, 25 bp, Homo sapien
tctgctggtaacacatcctttcttg

SEQ ID NO: 5119319 - DNA, 25 bp, Homo sapien
tgtccctttaaaatatgtccggcaa

SEQ ID NO: 5119320 - DNA, 25 bp, Homo sapien
tgaatcaacgttgtagctttctcca

SEQ ID NO: 5119321 - DNA, 25 bp, Homo sapien
aataggttttgcctgtaagtgagca

SEQ ID NO: 5119322 - DNA, 25 bp, Homo sapien
tgcttgattactgaatgactcttta

SEQ ID NO: 5119323 - DNA, 25 bp, Homo sapien
cgttgcttgattactgaatgactct

SEQ ID NO: 5119324 - DNA, 25 bp, Homo sapien
cttttcacgttgcttgattactgaa

SEQ ID NO: 5119325 - DNA, 25 bp, Homo sapien
ttcacgttgcttgattactgaatga

SEQ ID NO: 5119326 - DNA, 25 bp, Homo sapien
cagaaggagttcattaatgaaggag

SEQ ID NO: 5119327 - DNA, 25 bp, Homo sapien
gagattgacaaatagccagtatgca

SEQ ID NO: 5119328 - DNA, 25 bp, Homo sapien
taattaggtgacgaaggcaaggaag

SEQ ID NO: 5119329 - DNA, 25 bp, Homo sapien
gccgagaaatcaatacattcaggct

SEQ ID NO: 5119330 - DNA, 25 bp, Homo sapien
ttcctctgttctttagatacctgga

SEQ ID NO: 5119331 - DNA, 25 bp, Homo sapien
ctttagatacctggaaacagaaata

SEQ ID NO: 5119332 - DNA, 25 bp, Homo sapien
gaatgctcagaaagagtagagctag

SEQ ID NO: 5119333 - DNA, 25 bp, Homo sapien
tatccttggaatgctcagaaagagt

SEQ ID NO: 5119334 - DNA, 25 bp, Homo sapien
gccaccaccaagagcatacagatta

SEQ ID NO: 5119335 - DNA, 25 bp, Homo sapien
ccaagagcatacagattagaaggca

SEQ ID NO: 5119336 - DNA, 25 bp, Homo sapien
gataaaaggtgggttcttctagcta

SEQ ID NO: 5119337 - DNA, 25 bp, Homo sapien
gttcttctagctagggcacctgccc

SEQ ID NO: 5119338 - DNA, 25 bp, Homo sapien
tgcctctccaaaccacaatgtagaa

SEQ ID NO: 5119339 - DNA, 25 bp, Homo sapien
ctgcctctccaaaccacaatgtaga

SEQ ID NO: 5119340 - DNA, 25 bp, Homo sapien
accacaatgtagaaatcatagttga

SEQ ID NO: 5119341 - DNA, 25 bp, Homo sapien
atcccttgaatccagttcctctgcc

SEQ ID NO: 5119342 - DNA, 25 bp, Homo sapien
tcctttcgtttggaccacaatggag

SEQ ID NO: 5119343 - DNA, 25 bp, Homo sapien
ttattcactacagccgatacgtgga

SEQ ID NO: 5119344 - DNA, 25 bp, Homo sapien
taagactgtaactaaccaagagcca

SEQ ID NO: 5119345 - DNA, 25 bp, Homo sapien
tgaatccatgctctacgactaatct

SEQ ID NO: 5119346 - DNA, 25 bp, Homo sapien
aactccagtcttctcaacttcaaca

SEQ ID NO: 5119347 - DNA, 25 bp, Homo sapien
tggaaatgccaggttgtaagtaact

SEQ ID NO: 5119348 - DNA, 25 bp, Homo sapien
gggcctaatatctgacccactgtct

SEQ ID NO: 5119349 - DNA, 25 bp, Homo sapien
gagtttctcaactccagtcttctca

SEQ ID NO: 5119350 - DNA, 25 bp, Homo sapien
atagagggactcacctttgatttgc

SEQ ID NO: 5119351 - DNA, 25 bp, Homo sapien
taacattcccttatagagggactca

SEQ ID NO: 5119352 - DNA, 25 bp, Homo sapien
tgtaagttgaccattgaaataatgg

SEQ ID NO: 5119353 - DNA, 25 bp, Homo sapien
tgatttgcaagagttgagttcgaca

SEQ ID NO: 5119354 - DNA, 25 bp, Homo sapien
ccgagagtatcagtctgtagagttt

SEQ ID NO: 5119355 - DNA, 25 bp, Homo sapien
atacaaatggttctatgatggtctt

SEQ ID NO: 5119356 - DNA, 25 bp, Homo sapien
aaagacagataacagaattggcagg

SEQ ID NO: 5119357 - DNA, 25 bp, Homo sapien
ggtgctgaaggcctagctgaattcc

SEQ ID NO: 5119358 - DNA, 25 bp, Homo sapien
taccgtggagcacattttgactgtg

SEQ ID NO: 5119359 - DNA, 25 bp, Homo sapien
ttaccgtggagcacattttgactgt

SEQ ID NO: 5119360 - DNA, 25 bp, Homo sapien
gtggagcacattttgactgtgtgag

SEQ ID NO: 5119361 - DNA, 25 bp, Homo sapien
gagcacattttgactgtgtgagtag

SEQ ID NO: 5119362 - DNA, 25 bp, Homo sapien
tgtaatgaaatgactacaggtgatt

SEQ ID NO: 5119363 - DNA, 25 bp, Homo sapien
tcttgaaatgtgctatgaggttcac

SEQ ID NO: 5119364 - DNA, 25 bp, Homo sapien
ttccagcagtctgtaatgaaatgac

SEQ ID NO: 5119365 - DNA, 25 bp, Homo sapien
acaatgcctagtacccttccagcag

SEQ ID NO: 5119366 - DNA, 25 bp, Homo sapien
cttggcaaaatgtgttttctcatcc

SEQ ID NO: 5119367 - DNA, 25 bp, Homo sapien
aatgctaaacttggcaaaatgtgtt

SEQ ID NO: 5119368 - DNA, 25 bp, Homo sapien
taaacttggcaaaatgtgttttctc

SEQ ID NO: 5119369 - DNA, 25 bp, Homo sapien
aaacttggcaaaatgtgttttctca

SEQ ID NO: 5119370 - DNA, 25 bp, Homo sapien
agctgccccattctatgttttgtac

SEQ ID NO: 5119371 - DNA, 25 bp, Homo sapien
ctatgttttgtactagctttggatt

SEQ ID NO: 5119372 - DNA, 25 bp, Homo sapien
gccccattctatgttttgtactagc

SEQ ID NO: 5119373 - DNA, 25 bp, Homo sapien
ttctatgttttgtactagctttgga

SEQ ID NO: 5119374 - DNA, 25 bp, Homo sapien
cattaggtgttaacctgagctgttt

SEQ ID NO: 5119375 - DNA, 25 bp, Homo sapien
ttttcattaggtgttaacctgagct

SEQ ID NO: 5119376 - DNA, 25 bp, Homo sapien
ttaggtgttaacctgagctgtttcc

SEQ ID NO: 5119377 - DNA, 25 bp, Homo sapien
aggtgttaacctgagctgtttccac

SEQ ID NO: 5119378 - DNA, 25 bp, Homo sapien
ccactatatgattttctggcactgt

SEQ ID NO: 5119379 - DNA, 25 bp, Homo sapien
actatatgattttctggcactgtca

SEQ ID NO: 5119380 - DNA, 25 bp, Homo sapien
cactatatgattttctggcactgtc

SEQ ID NO: 5119381 - DNA, 25 bp, Homo sapien
ctatatgattttctggcactgtcaa

SEQ ID NO: 5119382 - DNA, 25 bp, Homo sapien
tcatttccagcaaggctttgtcttg

SEQ ID NO: 5119383 - DNA, 25 bp, Homo sapien
tttccagcaaggctttgtcttgttt

SEQ ID NO: 5119384 - DNA, 25 bp, Homo sapien
catttccagcaaggctttgtcttgt

SEQ ID NO: 5119385 - DNA, 25 bp, Homo sapien
ccagcaaggctttgtcttgtttgac

SEQ ID NO: 5119386 - DNA, 25 bp, Homo sapien
tatgcagcagtagaaatggtagaca

SEQ ID NO: 5119387 - DNA, 25 bp, Homo sapien
tatttcctcccatatcacatcttcg

SEQ ID NO: 5119388 - DNA, 25 bp, Homo sapien
actcttgactgtgccaagcttcctg

SEQ ID NO: 5119389 - DNA, 25 bp, Homo sapien
gcaggttgcagatataagcttgccc

SEQ ID NO: 5119390 - DNA, 25 bp, Homo sapien
tctcactgtaaagtctagaattacc

SEQ ID NO: 5119391 - DNA, 25 bp, Homo sapien
tttgaaggcaattaaggctggcatt

SEQ ID NO: 5119392 - DNA, 25 bp, Homo sapien
ggttgacactcatacaaaaataaag

SEQ ID NO: 5119393 - DNA, 25 bp, Homo sapien
aatcgctctgctggaaccattctgg

SEQ ID NO: 5119394 - DNA, 25 bp, Homo sapien
gttagttgacttaatgttggctgag

SEQ ID NO: 5119395 - DNA, 25 bp, Homo sapien
ctcttgcctattgttaatgtagttg

SEQ ID NO: 5119396 - DNA, 25 bp, Homo sapien
tagttgacttaatgttggctgagcc

SEQ ID NO: 5119397 - DNA, 25 bp, Homo sapien
gttaatgtagttgttagttgactta

SEQ ID NO: 5119398 - DNA, 25 bp, Homo sapien
tgattgcctttagggaagctagtcc

SEQ ID NO: 5119399 - DNA, 25 bp, Homo sapien
ttgtgtgttcacgtgggctcccctt

SEQ ID NO: 5119400 - DNA, 25 bp, Homo sapien
aaagtaggccaacttaatggtgtgc

SEQ ID NO: 5119401 - DNA, 25 bp, Homo sapien
aagggcccgcggtgttagcctgcat

SEQ ID NO: 5119402 - DNA, 25 bp, Homo sapien
agcatacaatgcatcctctttacac

SEQ ID NO: 5119403 - DNA, 25 bp, Homo sapien
tgtcttgctgcattggaagccacag

SEQ ID NO: 5119404 - DNA, 25 bp, Homo sapien
tgagtcaagccatctgttaatcgtg

SEQ ID NO: 5119405 - DNA, 25 bp, Homo sapien
gaaaaagtgaatcaatgagtcaagc

SEQ ID NO: 5119406 - DNA, 25 bp, Homo sapien
cagtacattcagtccagcacgtggg

SEQ ID NO: 5119407 - DNA, 25 bp, Homo sapien
tactgataagaggacagtacattca

SEQ ID NO: 5119408 - DNA, 25 bp, Homo sapien
ggtaaactgtaatgccagcctggta

SEQ ID NO: 5119409 - DNA, 25 bp, Homo sapien
caatggaatcgtatacacttggtgc

SEQ ID NO: 5119410 - DNA, 25 bp, Homo sapien
ggaacaactttgatagccaagagaa

SEQ ID NO: 5119411 - DNA, 25 bp, Homo sapien
gaacaaagactagattatgatccag

SEQ ID NO: 5119412 - DNA, 25 bp, Homo sapien
caagcagggtcatgtaaggtgagat

SEQ ID NO: 5119413 - DNA, 25 bp, Homo sapien
aaggtgagataaagtcattgcccag

SEQ ID NO: 5119414 - DNA, 25 bp, Homo sapien
gttcttgaaagatttaagtgtgtca

SEQ ID NO: 5119415 - DNA, 25 bp, Homo sapien
tagtgacaacagaagagtgtgcttt

SEQ ID NO: 5119416 - DNA, 25 bp, Homo sapien
gccactttaagtttgcataaaggca

SEQ ID NO: 5119417 - DNA, 25 bp, Homo sapien
cattttgtagtagccagctgaagaa

SEQ ID NO: 5119418 - DNA, 25 bp, Homo sapien
gataatccaaggtattcaacactaa

SEQ ID NO: 5119419 - DNA, 25 bp, Homo sapien
gacacagccacctttctcagtacag

SEQ ID NO: 5119420 - DNA, 25 bp, Homo sapien
acagccacctttctcagtacagaga

SEQ ID NO: 5119421 - DNA, 25 bp, Homo sapien
gagataatccaaggtattcaacact

SEQ ID NO: 5119422 - DNA, 25 bp, Homo sapien
tttcattccactaactttaatatta

SEQ ID NO: 5119423 - DNA, 25 bp, Homo sapien
tagtaacacctatattactgttata

SEQ ID NO: 5119424 - DNA, 25 bp, Homo sapien
tatcaatgataatagtaacacctat

SEQ ID NO: 5119425 - DNA, 25 bp, Homo sapien
gataatagtaacacctatattactg

SEQ ID NO: 5119426 - DNA, 25 bp, Homo sapien
aaaacattggctttattgaccaact

SEQ ID NO: 5119427 - DNA, 25 bp, Homo sapien
gggcactgggcagtatatttcccca

SEQ ID NO: 5119428 - DNA, 25 bp, Homo sapien
tattgaccaactttacagtagttaa

SEQ ID NO: 5119429 - DNA, 25 bp, Homo sapien
ttgtagcatatgcatcagcagcctc

SEQ ID NO: 5119430 - DNA, 25 bp, Homo sapien
gatgtttgaaggaccacagctatcc

SEQ ID NO: 5119431 - DNA, 25 bp, Homo sapien
gaactctgcttacaggaaagtctca

SEQ ID NO: 5119432 - DNA, 25 bp, Homo sapien
gaatcggatttgtagtgaactctgc

SEQ ID NO: 5119433 - DNA, 25 bp, Homo sapien
acagctatccacacaatccagaaga

SEQ ID NO: 5119434 - DNA, 25 bp, Homo sapien
gttgggtaagaacaatcctccatca

SEQ ID NO: 5119435 - DNA, 25 bp, Homo sapien
ctccccagtaagcattgtttccaaa

SEQ ID NO: 5119436 - DNA, 25 bp, Homo sapien
ccccagtaagcattgtttccaaaga

SEQ ID NO: 5119437 - DNA, 25 bp, Homo sapien
gtggttgggtaagaacaatcctcca

SEQ ID NO: 5119438 - DNA, 25 bp, Homo sapien
cttgcatgagcagtacactacagcc

SEQ ID NO: 5119439 - DNA, 25 bp, Homo sapien
actgaaagtggattattggtgctat

SEQ ID NO: 5119440 - DNA, 25 bp, Homo sapien
tgcgagggaagatggtatagagcgg

SEQ ID NO: 5119441 - DNA, 25 bp, Homo sapien
tgctcattgatcacataaactaaaa

SEQ ID NO: 5119442 - DNA, 25 bp, Homo sapien
acacagcgagactctatctcaaaaa

SEQ ID NO: 5119443 - DNA, 25 bp, Homo sapien
agcgagactctatctcaaaaaaaaa

SEQ ID NO: 5119444 - DNA, 25 bp, Homo sapien
acagcgagactctatctcaaaaaaa

SEQ ID NO: 5119445 - DNA, 25 bp, Homo sapien
gcttgcagtgaacagagatcgctcc

SEQ ID NO: 5119446 - DNA, 25 bp, Homo sapien
tatgtacccctctttaggctggaag

SEQ ID NO: 5119447 - DNA, 25 bp, Homo sapien
tagaattaggtgtggccgtcacagc

SEQ ID NO: 5119448 - DNA, 25 bp, Homo sapien
caagaatatacacggcagccagtgg

SEQ ID NO: 5119449 - DNA, 25 bp, Homo sapien
gataagatcaggctacacaccatgg

SEQ ID NO: 5119450 - DNA, 25 bp, Homo sapien
cctccgatcgtaagaaaaattgatt

SEQ ID NO: 5119451 - DNA, 25 bp, Homo sapien
aatcaatttttcttacgatcggagg

SEQ ID NO: 5119452 - DNA, 25 bp, Homo sapien
aggttctgcataagcctgcatccag

SEQ ID NO: 5119453 - DNA, 25 bp, Homo sapien
cttcccttcctaggttctgcataag

SEQ ID NO: 5119454 - DNA, 25 bp, Homo sapien
aactggcatgtgctctcttcccttc

SEQ ID NO: 5119455 - DNA, 25 bp, Homo sapien
tcttgtgataactataactggcatg

SEQ ID NO: 5119456 - DNA, 25 bp, Homo sapien
ataagaatccagagcagcaactgca

SEQ ID NO: 5119457 - DNA, 25 bp, Homo sapien
gatggtcactggtgaataagaatcc

SEQ ID NO: 5119458 - DNA, 25 bp, Homo sapien
gtcatccctgatggtcactggtgaa

SEQ ID NO: 5119459 - DNA, 25 bp, Homo sapien
agcaactgcatggcttttgtccttt

SEQ ID NO: 5119460 - DNA, 25 bp, Homo sapien
tagctgaagttggatattaaaggac

SEQ ID NO: 5119461 - DNA, 25 bp, Homo sapien
ccaatgggacatcgttcagccacac

SEQ ID NO: 5119462 - DNA, 25 bp, Homo sapien
agtttccgtactccttgactgaggc

SEQ ID NO: 5119463 - DNA, 25 bp, Homo sapien
gctccatctgcaccaatgggacatc

SEQ ID NO: 5119464 - DNA, 25 bp, Homo sapien
ttagggcctttattctggaatcaga

SEQ ID NO: 5119465 - DNA, 25 bp, Homo sapien
gtgttaacctggcactaattcccat

SEQ ID NO: 5119466 - DNA, 25 bp, Homo sapien
aattagggcctttattctggaatca

SEQ ID NO: 5119467 - DNA, 25 bp, Homo sapien
catttgcataattgcaaaattctga

SEQ ID NO: 5119468 - DNA, 25 bp, Homo sapien
gctgcaactgggtcaatggtccttt

SEQ ID NO: 5119469 - DNA, 25 bp, Homo sapien
tcaagctgcaactgggtcaatggtc

SEQ ID NO: 5119470 - DNA, 25 bp, Homo sapien
ttgattttacttgtgcaccagcccc

SEQ ID NO: 5119471 - DNA, 25 bp, Homo sapien
attttacttgtgcaccagccccgct

SEQ ID NO: 5119472 - DNA, 25 bp, Homo sapien
acttctctttgtgcttgggtaaact

SEQ ID NO: 5119473 - DNA, 25 bp, Homo sapien
cagtaattaaattcagtgattgcag

SEQ ID NO: 5119474 - DNA, 25 bp, Homo sapien
tattcataaacatgcttaaacctgc

SEQ ID NO: 5119475 - DNA, 25 bp, Homo sapien
gcttaaacctgctattaacttctct

SEQ ID NO: 5119476 - DNA, 25 bp, Homo sapien
catagacactaattttggagtagca

SEQ ID NO: 5119477 - DNA, 25 bp, Homo sapien
gcagacaaactaagataaacatgga

SEQ ID NO: 5119478 - DNA, 25 bp, Homo sapien
ggtcagacgtagagtaactataatg

SEQ ID NO: 5119479 - DNA, 25 bp, Homo sapien
gttgcttaagagaattcactatatt

SEQ ID NO: 5119480 - DNA, 25 bp, Homo sapien
tgcgggacctaagcacatccagggt

SEQ ID NO: 5119481 - DNA, 25 bp, Homo sapien
tctggagggtcacaaggcttatcat

SEQ ID NO: 5119482 - DNA, 25 bp, Homo sapien
catccaaggaattgagccgggcaca

SEQ ID NO: 5119483 - DNA, 25 bp, Homo sapien
tatatcggttaatggatctgggccc

SEQ ID NO: 5119484 - DNA, 25 bp, Homo sapien
actcacacactctttccgttgtggg

SEQ ID NO: 5119485 - DNA, 25 bp, Homo sapien
cacactctttccgttgtgggatggg

SEQ ID NO: 5119486 - DNA, 25 bp, Homo sapien
cttgatttggcaatgcactcacaca

SEQ ID NO: 5119487 - DNA, 25 bp, Homo sapien
ttatttgcttgatttggcaatgcac

SEQ ID NO: 5119488 - DNA, 25 bp, Homo sapien
taccatccttccctttatatggaga

SEQ ID NO: 5119489 - DNA, 25 bp, Homo sapien
gtttttatatgaatgataccatcct

SEQ ID NO: 5119490 - DNA, 25 bp, Homo sapien
gaatgataccatccttccctttata

SEQ ID NO: 5119491 - DNA, 25 bp, Homo sapien
tctgtcttctatcattaggtttagt

SEQ ID NO: 5119492 - DNA, 25 bp, Homo sapien
taattagttttatatcctctcttct

SEQ ID NO: 5119493 - DNA, 25 bp, Homo sapien
agtagttgacacaatttctgagatg

SEQ ID NO: 5119494 - DNA, 25 bp, Homo sapien
catagatacatgtgcaataattagt

SEQ ID NO: 5119495 - DNA, 25 bp, Homo sapien
ctgagatgtcatagatacatgtgca

SEQ ID NO: 5119496 - DNA, 25 bp, Homo sapien
agcagagtttgaatggagttaggcc

SEQ ID NO: 5119497 - DNA, 25 bp, Homo sapien
taggatactgaaaaggctgccgcag

SEQ ID NO: 5119498 - DNA, 25 bp, Homo sapien
ctaaagcagacttttatgtgtagga

SEQ ID NO: 5119499 - DNA, 25 bp, Homo sapien
cagagtttgaatggagttaggcctt

SEQ ID NO: 5119500 - DNA, 25 bp, Homo sapien
ttgaacattacctctgccactgaca

SEQ ID NO: 5119501 - DNA, 25 bp, Homo sapien
cttgaacattacctctgccactgac

SEQ ID NO: 5119502 - DNA, 25 bp, Homo sapien
agcttgtccttccctagttcctgtc

SEQ ID NO: 5119503 - DNA, 25 bp, Homo sapien
tcaatcctagattttgtttcctggg

SEQ ID NO: 5119504 - DNA, 25 bp, Homo sapien
taattttggcaccatgatctgcagc

SEQ ID NO: 5119505 - DNA, 25 bp, Homo sapien
ttcctgggttaattttggcaccatg

SEQ ID NO: 5119506 - DNA, 25 bp, Homo sapien
gatgagatgcctacgtccacaaaca

SEQ ID NO: 5119507 - DNA, 25 bp, Homo sapien
atgtgccaaggcctctattaaactg

SEQ ID NO: 5119508 - DNA, 25 bp, Homo sapien
agagagatgagatgcctacgtccac

SEQ ID NO: 5119509 - DNA, 25 bp, Homo sapien
gccaaggcctctattaaactgtaat

SEQ ID NO: 5119510 - DNA, 25 bp, Homo sapien
ttgatttgtgttcagaggtctgatg

SEQ ID NO: 5119511 - DNA, 25 bp, Homo sapien
atttttatttaacgagtcatttgat

SEQ ID NO: 5119512 - DNA, 25 bp, Homo sapien
tagtagatgtgagacatgcgaggga

SEQ ID NO: 5119513 - DNA, 25 bp, Homo sapien
cagaggtctgatggcaaggaaaggt

SEQ ID NO: 5119514 - DNA, 25 bp, Homo sapien
tttgaaccaggacctcttgcaccct

SEQ ID NO: 5119515 - DNA, 25 bp, Homo sapien
ttgaaccaggacctcttgcacccta

SEQ ID NO: 5119516 - DNA, 25 bp, Homo sapien
tgaaccaggacctcttgcaccctaa

SEQ ID NO: 5119517 - DNA, 25 bp, Homo sapien
tctggttctgcagtgttcgttccca

SEQ ID NO: 5119518 - DNA, 25 bp, Homo sapien
gaagattattttccaagacatattc

SEQ ID NO: 5119519 - DNA, 25 bp, Homo sapien
ctggttctgcagtgttcgttcccat

SEQ ID NO: 5119520 - DNA, 25 bp, Homo sapien
tagaagattattttccaagacatat

SEQ ID NO: 5119521 - DNA, 25 bp, Homo sapien
tctgttgtgccaaatgtgagctcat

SEQ ID NO: 5119522 - DNA, 25 bp, Homo sapien
ccattgtcatctccactctcatgtt

SEQ ID NO: 5119523 - DNA, 25 bp, Homo sapien
catgttctttcctgatctgttgtgc

SEQ ID NO: 5119524 - DNA, 25 bp, Homo sapien
catgtcaatatctttccattcacca

SEQ ID NO: 5119525 - DNA, 25 bp, Homo sapien
gactttcattctggtgaggtatatc

SEQ ID NO: 5119526 - DNA, 25 bp, Homo sapien
gaggttgactttcattctggtgagg

SEQ ID NO: 5119527 - DNA, 25 bp, Homo sapien
tggcatcagaggttgactttcattc

SEQ ID NO: 5119528 - DNA, 25 bp, Homo sapien
tttcattctggtgaggtatatcccc

SEQ ID NO: 5119529 - DNA, 25 bp, Homo sapien
gctgccatccttgcttagcttggac

SEQ ID NO: 5119530 - DNA, 25 bp, Homo sapien
tcccacccagttgactcatgatttc

SEQ ID NO: 5119531 - DNA, 25 bp, Homo sapien
gccatccttgcttagcttggactgg

SEQ ID NO: 5119532 - DNA, 25 bp, Homo sapien
tggaagcaggttggtcttctgtaga

SEQ ID NO: 5119533 - DNA, 25 bp, Homo sapien
gtgagaatgacttagtcttcacaga

SEQ ID NO: 5119534 - DNA, 25 bp, Homo sapien
aatgatggatgcattaattttagat

SEQ ID NO: 5119535 - DNA, 25 bp, Homo sapien
tagatttccttaattcccagaaatg

SEQ ID NO: 5119536 - DNA, 25 bp, Homo sapien
tccttaattcccagaaatgtgagaa

SEQ ID NO: 5119537 - DNA, 25 bp, Homo sapien
agtgtttaggtggtgatcgtctggg

SEQ ID NO: 5119538 - DNA, 25 bp, Homo sapien
ttagtgtttaggtggtgatcgtctg

SEQ ID NO: 5119539 - DNA, 25 bp, Homo sapien
tgtttaggtggtgatcgtctgggac

SEQ ID NO: 5119540 - DNA, 25 bp, Homo sapien
ttttagtgtttaggtggtgatcgtc

SEQ ID NO: 5119541 - DNA, 25 bp, Homo sapien
tgtacttccatgtctagaagtagag

SEQ ID NO: 5119542 - DNA, 25 bp, Homo sapien
tctagaagtagaggcaataagtaaa

SEQ ID NO: 5119543 - DNA, 25 bp, Homo sapien
caaggattagcagctttccaaacat

SEQ ID NO: 5119544 - DNA, 25 bp, Homo sapien
tctattcaagtcgtaaaaatcagca

SEQ ID NO: 5119545 - DNA, 25 bp, Homo sapien
ctgcagttttgtcctgctgacaatg

SEQ ID NO: 5119546 - DNA, 25 bp, Homo sapien
tgcagttttgtcctgctgacaatgg

SEQ ID NO: 5119547 - DNA, 25 bp, Homo sapien
atgaaatcctttataggtgtcatga

SEQ ID NO: 5119548 - DNA, 25 bp, Homo sapien
aatcctttataggtgtcatgaatgt

SEQ ID NO: 5119549 - DNA, 25 bp, Homo sapien
cctttataggtgtcatgaatgtaga

SEQ ID NO: 5119550 - DNA, 25 bp, Homo sapien
gaaatcctttataggtgtcatgaat

SEQ ID NO: 5119551 - DNA, 25 bp, Homo sapien
ggtgaactcaatatcagtaactatg

SEQ ID NO: 5119552 - DNA, 25 bp, Homo sapien
gatgcaatggctaaagtttctggtg

SEQ ID NO: 5119553 - DNA, 25 bp, Homo sapien
gttttgacaacgatgaataattcca

SEQ ID NO: 5119554 - DNA, 25 bp, Homo sapien
tatgttgtataaccccaatttagac

SEQ ID NO: 5119555 - DNA, 25 bp, Homo sapien
catcggactgtgagcagaaaatcct

SEQ ID NO: 5119556 - DNA, 25 bp, Homo sapien
agggactacagtttatctgccttct

SEQ ID NO: 5119557 - DNA, 25 bp, Homo sapien
ccagggggcagggactacagtttat

SEQ ID NO: 5119558 - DNA, 25 bp, Homo sapien
atcctttcatcggactgtgagcaga

SEQ ID NO: 5119559 - DNA, 25 bp, Homo sapien
gaaagacaatgtgttgtctaaagta

SEQ ID NO: 5119560 - DNA, 25 bp, Homo sapien
ctttgtcatagacgtgcttatgtcc

SEQ ID NO: 5119561 - DNA, 25 bp, Homo sapien
gtgcttatgtcctgcatcaacttgc

SEQ ID NO: 5119562 - DNA, 25 bp, Homo sapien
tatgaacagtttaggagtagaagtg

SEQ ID NO: 5119563 - DNA, 25 bp, Homo sapien
aaaagcccctgagttcatcttccat

SEQ ID NO: 5119564 - DNA, 25 bp, Homo sapien
tacaggaaaagcccctgagttcatc

SEQ ID NO: 5119565 - DNA, 25 bp, Homo sapien
gaaaagcccctgagttcatcttcca

SEQ ID NO: 5119566 - DNA, 25 bp, Homo sapien
aggaaaagcccctgagttcatcttc

SEQ ID NO: 5119567 - DNA, 25 bp, Homo sapien
tagttgatctggattccaattttca

SEQ ID NO: 5119568 - DNA, 25 bp, Homo sapien
tgctgcttttaaccgggctgcaaat

SEQ ID NO: 5119569 - DNA, 25 bp, Homo sapien
tgcaaaacctctagattgctgcttt

SEQ ID NO: 5119570 - DNA, 25 bp, Homo sapien
ttcatcttcccagacctttgatact

SEQ ID NO: 5119571 - DNA, 25 bp, Homo sapien
cataaaaactgtgttattatgttgg

SEQ ID NO: 5119572 - DNA, 25 bp, Homo sapien
attatgttggcttaggataatatgc

SEQ ID NO: 5119573 - DNA, 25 bp, Homo sapien
taaaaactgtgttattatgttggct

SEQ ID NO: 5119574 - DNA, 25 bp, Homo sapien
ttattatgttggcttaggataatat

SEQ ID NO: 5119575 - DNA, 25 bp, Homo sapien
ctgttctctagtgttgctgtttctg

SEQ ID NO: 5119576 - DNA, 25 bp, Homo sapien
cttcagaagactttaggagttatgg

SEQ ID NO: 5119577 - DNA, 25 bp, Homo sapien
gacagtaagtggataccaccacata

SEQ ID NO: 5119578 - DNA, 25 bp, Homo sapien
ccaccacatactgtgaaggtgtata

SEQ ID NO: 5119579 - DNA, 25 bp, Homo sapien
ttcttaggtaggcatagtaatggca

SEQ ID NO: 5119580 - DNA, 25 bp, Homo sapien
taagatttatattcctgattgcgat

SEQ ID NO: 5119581 - DNA, 25 bp, Homo sapien
taaatgaggtaagattgcctttctc

SEQ ID NO: 5119582 - DNA, 25 bp, Homo sapien
tattgtattcaccacacacgtaggc

SEQ ID NO: 5119583 - DNA, 25 bp, Homo sapien
tctaaaagagggatgacctactcct

SEQ ID NO: 5119584 - DNA, 25 bp, Homo sapien
aaagagggatgacctactcctctca

SEQ ID NO: 5119585 - DNA, 25 bp, Homo sapien
tcctttaactctaaaagagggatga

SEQ ID NO: 5119586 - DNA, 25 bp, Homo sapien
ttaactctaaaagagggatgaccta

SEQ ID NO: 5119587 - DNA, 25 bp, Homo sapien
ctcgcctcgcctgacgccctttccc

SEQ ID NO: 5119588 - DNA, 25 bp, Homo sapien
catccccttagaacctcgagcctct

SEQ ID NO: 5119589 - DNA, 25 bp, Homo sapien
gcctcgcctcgcctgacgccctttc

SEQ ID NO: 5119590 - DNA, 25 bp, Homo sapien
ccttagaacctcgagcctctcgcct

SEQ ID NO: 5119591 - DNA, 25 bp, Homo sapien
cacctgtgaccgtggagtctttttc

SEQ ID NO: 5119592 - DNA, 25 bp, Homo sapien
ttttctgtcacttccgtctctgtca

SEQ ID NO: 5119593 - DNA, 25 bp, Homo sapien
ggccgctccacctgtgaccgtggag

SEQ ID NO: 5119594 - DNA, 25 bp, Homo sapien
ttctccgaatcgtcctctgctcctc

SEQ ID NO: 5119595 - DNA, 25 bp, Homo sapien
gcagtctcatagtcaggttttttga

SEQ ID NO: 5119596 - DNA, 25 bp, Homo sapien
ttctcttagcagtctcatagtcagg

SEQ ID NO: 5119597 - DNA, 25 bp, Homo sapien
ttttgacaggaaccctgaggacaaa

SEQ ID NO: 5119598 - DNA, 25 bp, Homo sapien
tgtggtacctgtctcttccatcttt

SEQ ID NO: 5119599 - DNA, 25 bp, Homo sapien
gaatttatatccattcccttttgtc

SEQ ID NO: 5119600 - DNA, 25 bp, Homo sapien
tatatccattcccttttgtcttatt

SEQ ID NO: 5119601 - DNA, 25 bp, Homo sapien
aaatagaatttatatccattccctt

SEQ ID NO: 5119602 - DNA, 25 bp, Homo sapien
tctaaaatagaatttatatccattc

SEQ ID NO: 5119603 - DNA, 25 bp, Homo sapien
gtttcaggacaactctgcactctga

SEQ ID NO: 5119604 - DNA, 25 bp, Homo sapien
tttcaggacaactctgcactctgaa

SEQ ID NO: 5119605 - DNA, 25 bp, Homo sapien
agtttcaggacaactctgcactctg

SEQ ID NO: 5119606 - DNA, 25 bp, Homo sapien
gaagtttcaggacaactctgcactc

SEQ ID NO: 5119607 - DNA, 25 bp, Homo sapien
cctttcttgatggatgcagaagatg

SEQ ID NO: 5119608 - DNA, 25 bp, Homo sapien
tcctttcttgatggatgcagaagat

SEQ ID NO: 5119609 - DNA, 25 bp, Homo sapien
gtcctttcttgatggatgcagaaga

SEQ ID NO: 5119610 - DNA, 25 bp, Homo sapien
agaaggaccaactccactttgaact

SEQ ID NO: 5119611 - DNA, 25 bp, Homo sapien
ttgaactaggtcctgttgaaaaggc

SEQ ID NO: 5119612 - DNA, 25 bp, Homo sapien
tgaaaaggctgttcataaaccttac

SEQ ID NO: 5119613 - DNA, 25 bp, Homo sapien
aactccactttgaactaggtcctgt

SEQ ID NO: 5119614 - DNA, 25 bp, Homo sapien
gccactaagggctggtaagtctaaa

SEQ ID NO: 5119615 - DNA, 25 bp, Homo sapien
tcaagtgtgaagggcaagatccctc

SEQ ID NO: 5119616 - DNA, 25 bp, Homo sapien
gtgggtagtgatcccacatcacagc

SEQ ID NO: 5119617 - DNA, 25 bp, Homo sapien
tctaaatgctgcctagggttctctg

SEQ ID NO: 5119618 - DNA, 25 bp, Homo sapien
tcaggttgggtagagtgaccccatc

SEQ ID NO: 5119619 - DNA, 25 bp, Homo sapien
atccccaccagtggagcaacctctg

SEQ ID NO: 5119620 - DNA, 25 bp, Homo sapien
tgtgctcaggctcacataaagatca

SEQ ID NO: 5119621 - DNA, 25 bp, Homo sapien
tcatagagcacaagacacctttccc

SEQ ID NO: 5119622 - DNA, 25 bp, Homo sapien
agggaaggcatggtcctctcccctt

SEQ ID NO: 5119623 - DNA, 25 bp, Homo sapien
gggaaggcatggtcctctccccttc

SEQ ID NO: 5119624 - DNA, 25 bp, Homo sapien
gacagctatcctgcactgcactgga

SEQ ID NO: 5119625 - DNA, 25 bp, Homo sapien
gaaagcccctcctgcactataggta

SEQ ID NO: 5119626 - DNA, 25 bp, Homo sapien
gaaactgcattgagatagtgggaca

SEQ ID NO: 5119627 - DNA, 25 bp, Homo sapien
tttagaggtgaagtccaatcatccc

SEQ ID NO: 5119628 - DNA, 25 bp, Homo sapien
gaggcccatgggagcttctgaattc

SEQ ID NO: 5119629 - DNA, 25 bp, Homo sapien
ggtgtcctatttatagcagaagcaa

SEQ ID NO: 5119630 - DNA, 25 bp, Homo sapien
gaattagaagctccagctttcctga

SEQ ID NO: 5119631 - DNA, 25 bp, Homo sapien
tcagacatatgctgagttccatcac

SEQ ID NO: 5119632 - DNA, 25 bp, Homo sapien
taaaaccgaacattgttcaacttca

SEQ ID NO: 5119633 - DNA, 25 bp, Homo sapien
cgaacattgttcaacttcatgtatg

SEQ ID NO: 5119634 - DNA, 25 bp, Homo sapien
catgtatgtgatccctgtactctta

SEQ ID NO: 5119635 - DNA, 25 bp, Homo sapien
caatcttacaaatgataattgtgaa

SEQ ID NO: 5119636 - DNA, 25 bp, Homo sapien
tgaatttcgattgaattgtctcctc

SEQ ID NO: 5119637 - DNA, 25 bp, Homo sapien
gtaatcaagccaataggccaccccg

SEQ ID NO: 5119638 - DNA, 25 bp, Homo sapien
gaaagtcgtttgcacctcttcagat

SEQ ID NO: 5119639 - DNA, 25 bp, Homo sapien
cagagataaggagtaaagtgacctc

SEQ ID NO: 5119640 - DNA, 25 bp, Homo sapien
gaaatgtagctttactgccttttct

SEQ ID NO: 5119641 - DNA, 25 bp, Homo sapien
tctttgtacattcaacactaaactg

SEQ ID NO: 5119642 - DNA, 25 bp, Homo sapien
agaaatgtagctttactgccttttc

SEQ ID NO: 5119643 - DNA, 25 bp, Homo sapien
tcaacactaaactgatcatggcatt

SEQ ID NO: 5119644 - DNA, 25 bp, Homo sapien
tcacacgaagaggtgttctgtgtat

SEQ ID NO: 5119645 - DNA, 25 bp, Homo sapien
cacacgaagaggtgttctgtgtata

SEQ ID NO: 5119646 - DNA, 25 bp, Homo sapien
cacgaagaggtgttctgtgtataga

SEQ ID NO: 5119647 - DNA, 25 bp, Homo sapien
acacgaagaggtgttctgtgtatag

SEQ ID NO: 5119648 - DNA, 25 bp, Homo sapien
catacattcagtgcctgcagagaac

SEQ ID NO: 5119649 - DNA, 25 bp, Homo sapien
tgcattgtggattggccccacacct

SEQ ID NO: 5119650 - DNA, 25 bp, Homo sapien
tgcagatggcttgccttagcacata

SEQ ID NO: 5119651 - DNA, 25 bp, Homo sapien
tgtacctcccttcaagcagcagctg

SEQ ID NO: 5119652 - DNA, 25 bp, Homo sapien
gctgcaacatgggttgtggtaccca

SEQ ID NO: 5119653 - DNA, 25 bp, Homo sapien
tggcattacgaagaggatcccgagg

SEQ ID NO: 5119654 - DNA, 25 bp, Homo sapien
gttagaaccgacaactggcattacg

SEQ ID NO: 5119655 - DNA, 25 bp, Homo sapien
gatgggctccgctggaaacctgagt

SEQ ID NO: 5119656 - DNA, 25 bp, Homo sapien
tgatagcgtccatgctgaaagagca

SEQ ID NO: 5119657 - DNA, 25 bp, Homo sapien
gctgggattaactagggaaggccat

SEQ ID NO: 5119658 - DNA, 25 bp, Homo sapien
tagacttgggactggaacattgcca

SEQ ID NO: 5119659 - DNA, 25 bp, Homo sapien
tttggcaaaatgcaagcctcccgag

SEQ ID NO: 5119660 - DNA, 25 bp, Homo sapien
ttctcagcttccatatcaatatctt

SEQ ID NO: 5119661 - DNA, 25 bp, Homo sapien
ctcagcttccatatcaatatcttca

SEQ ID NO: 5119662 - DNA, 25 bp, Homo sapien
tgcagggaaaacctttttctcagct

SEQ ID NO: 5119663 - DNA, 25 bp, Homo sapien
atgcagggaaaacctttttctcagc

SEQ ID NO: 5119664 - DNA, 25 bp, Homo sapien
accaagcccattagggagaacttca

SEQ ID NO: 5119665 - DNA, 25 bp, Homo sapien
aagcccattagggagaacttcaggg

SEQ ID NO: 5119666 - DNA, 25 bp, Homo sapien
attagggagaacttcaggggaatgc

SEQ ID NO: 5119667 - DNA, 25 bp, Homo sapien
tagggagaacttcaggggaatgcat

SEQ ID NO: 5119668 - DNA, 25 bp, Homo sapien
tatgactacgttaatgttcttggca

SEQ ID NO: 5119669 - DNA, 25 bp, Homo sapien
gactacgttaatgttcttggcattg

SEQ ID NO: 5119670 - DNA, 25 bp, Homo sapien
cgttaatgttcttggcattgtaaaa

SEQ ID NO: 5119671 - DNA, 25 bp, Homo sapien
ctattatgactacgttaatgttctt

SEQ ID NO: 5119672 - DNA, 25 bp, Homo sapien
tcctatcttccttctgtcctcttcc

SEQ ID NO: 5119673 - DNA, 25 bp, Homo sapien
tcttccttctgtcctcttcccacat

SEQ ID NO: 5119674 - DNA, 25 bp, Homo sapien
ctcctatcttccttctgtcctcttc

SEQ ID NO: 5119675 - DNA, 25 bp, Homo sapien
tatcttccttctgtcctcttcccac

SEQ ID NO: 5119676 - DNA, 25 bp, Homo sapien
tgttattccaatcactcagatttgg

SEQ ID NO: 5119677 - DNA, 25 bp, Homo sapien
ctcagatttgggctatctattgcac

SEQ ID NO: 5119678 - DNA, 25 bp, Homo sapien
ccattgcaagtattatgttattcca

SEQ ID NO: 5119679 - DNA, 25 bp, Homo sapien
tgctgccattgcaagtattatgtta

SEQ ID NO: 5119680 - DNA, 25 bp, Homo sapien
ggcatctaatgagctggacaactgt

SEQ ID NO: 5119681 - DNA, 25 bp, Homo sapien
aatgagctggacaactgtcaccctc

SEQ ID NO: 5119682 - DNA, 25 bp, Homo sapien
tgtcaccctctgctgagataccaag

SEQ ID NO: 5119683 - DNA, 25 bp, Homo sapien
tctaatgagctggacaactgtcacc

SEQ ID NO: 5119684 - DNA, 25 bp, Homo sapien
ttcagtgtggtgtagatcttagttg

SEQ ID NO: 5119685 - DNA, 25 bp, Homo sapien
tgtagatcttagttgggaagtgaga

SEQ ID NO: 5119686 - DNA, 25 bp, Homo sapien
gaaactctacccagatccttcttcc

SEQ ID NO: 5119687 - DNA, 25 bp, Homo sapien
tattggtaactgtacgcaaaaagca

SEQ ID NO: 5119688 - DNA, 25 bp, Homo sapien
gacatgggaattacctcagatggcc

SEQ ID NO: 5119689 - DNA, 25 bp, Homo sapien
tcagatggcctgtactcgaccgtaa

SEQ ID NO: 5119690 - DNA, 25 bp, Homo sapien
tttgaaagtccatgataaacgtaca

SEQ ID NO: 5119691 - DNA, 25 bp, Homo sapien
tgcttcgtcacaatccatgggaaat

SEQ ID NO: 5119692 - DNA, 25 bp, Homo sapien
agaactcctgtgcaaaagtaacctg

SEQ ID NO: 5119693 - DNA, 25 bp, Homo sapien
cttttcaaagaactcctgtgcaaaa

SEQ ID NO: 5119694 - DNA, 25 bp, Homo sapien
acctgtgtgaatttgtcccgtttct

SEQ ID NO: 5119695 - DNA, 25 bp, Homo sapien
cccgtttcttataggatatttcata

SEQ ID NO: 5119696 - DNA, 25 bp, Homo sapien
ccgctgttacagcaagccataggaa

SEQ ID NO: 5119697 - DNA, 25 bp, Homo sapien
actgaggatttggagatcaccgctg

SEQ ID NO: 5119698 - DNA, 25 bp, Homo sapien
tgtccctgatggtgtaatcaattac

SEQ ID NO: 5119699 - DNA, 25 bp, Homo sapien
taggaaacagagagggataaatgca

SEQ ID NO: 5119700 - DNA, 25 bp, Homo sapien
ttgaagcagcattaggtacaatcat

SEQ ID NO: 5119701 - DNA, 25 bp, Homo sapien
gttgaagcagcattaggtacaatca

SEQ ID NO: 5119702 - DNA, 25 bp, Homo sapien
tgttgaagcagcattaggtacaatc

SEQ ID NO: 5119703 - DNA, 25 bp, Homo sapien
acattttgttcaggcctacttcaat

SEQ ID NO: 5119704 - DNA, 25 bp, Homo sapien
aacattttgttcaggcctacttcaa

SEQ ID NO: 5119705 - DNA, 25 bp, Homo sapien
ttttgttcaggcctacttcaatcat

SEQ ID NO: 5119706 - DNA, 25 bp, Homo sapien
attttgttcaggcctacttcaatca

SEQ ID NO: 5119707 - DNA, 25 bp, Homo sapien
tccatttaaagcattggctcggcaa

SEQ ID NO: 5119708 - DNA, 25 bp, Homo sapien
aattctcatagacaccaatttcccc

SEQ ID NO: 5119709 - DNA, 25 bp, Homo sapien
taaagcattggctcggcaattctca

SEQ ID NO: 5119710 - DNA, 25 bp, Homo sapien
gctcggcaattctcatagacaccaa

SEQ ID NO: 5119711 - DNA, 25 bp, Homo sapien
tagttgccttttcctgtgtgtgcca

SEQ ID NO: 5119712 - DNA, 25 bp, Homo sapien
cttggtagttgccttttcctgtgtg

SEQ ID NO: 5119713 - DNA, 25 bp, Homo sapien
agttgccttttcctgtgtgtgccat

SEQ ID NO: 5119714 - DNA, 25 bp, Homo sapien
ggtagttgccttttcctgtgtgtgc

SEQ ID NO: 5119715 - DNA, 25 bp, Homo sapien
ttgtagatcacaatttgccaggaat

SEQ ID NO: 5119716 - DNA, 25 bp, Homo sapien
ttttgtagatcacaatttgccagga

SEQ ID NO: 5119717 - DNA, 25 bp, Homo sapien
tgtagatcacaatttgccaggaatt

SEQ ID NO: 5119718 - DNA, 25 bp, Homo sapien
tttgtagatcacaatttgccaggaa

SEQ ID NO: 5119719 - DNA, 25 bp, Homo sapien
caacaggagagtcatgaggattttc

SEQ ID NO: 5119720 - DNA, 25 bp, Homo sapien
gattttcccgtagacaagcagcatt

SEQ ID NO: 5119721 - DNA, 25 bp, Homo sapien
agtcatgaggattttcccgtagaca

SEQ ID NO: 5119722 - DNA, 25 bp, Homo sapien
catgaggattttcccgtagacaagc

SEQ ID NO: 5119723 - DNA, 25 bp, Homo sapien
gacaacatggagtctgataaaaaca

SEQ ID NO: 5119724 - DNA, 25 bp, Homo sapien
tgacaacatggagtctgataaaaac

SEQ ID NO: 5119725 - DNA, 25 bp, Homo sapien
tgtgacaacatggagtctgataaaa

SEQ ID NO: 5119726 - DNA, 25 bp, Homo sapien
acaacatggagtctgataaaaacaa

SEQ ID NO: 5119727 - DNA, 25 bp, Homo sapien
tggtctctttgggctgaagactggt

SEQ ID NO: 5119728 - DNA, 25 bp, Homo sapien
catggtctctttgggctgaagactg

SEQ ID NO: 5119729 - DNA, 25 bp, Homo sapien
tctttgggctgaagactggtcaggc

SEQ ID NO: 5119730 - DNA, 25 bp, Homo sapien
atggtctctttgggctgaagactgg

SEQ ID NO: 5119731 - DNA, 25 bp, Homo sapien
agtgtgcccagtgcctaaaagggag

SEQ ID NO: 5119732 - DNA, 25 bp, Homo sapien
aatgaaatgtgggtgacgttgagaa

SEQ ID NO: 5119733 - DNA, 25 bp, Homo sapien
tccggcttcagagcaggaactttca

SEQ ID NO: 5119734 - DNA, 25 bp, Homo sapien
cattgcaccagtgatgaaaaagaga

SEQ ID NO: 5119735 - DNA, 25 bp, Homo sapien
caatatcttcgttatggaattccaa

SEQ ID NO: 5119736 - DNA, 25 bp, Homo sapien
gaattccaacattggttttagtgac

SEQ ID NO: 5119737 - DNA, 25 bp, Homo sapien
tagtgacacatcttttatagtggac

SEQ ID NO: 5119738 - DNA, 25 bp, Homo sapien
ttttatagtggaccaaagatgtctt

SEQ ID NO: 5119739 - DNA, 25 bp, Homo sapien
catccacttggagtcaataaaatgg

SEQ ID NO: 5119740 - DNA, 25 bp, Homo sapien
ggtaatctcttggtctaccaatgat

SEQ ID NO: 5119741 - DNA, 25 bp, Homo sapien
gatttcatgggtcaacttcccatac

SEQ ID NO: 5119742 - DNA, 25 bp, Homo sapien
tatattttggtaatctcttggtcta

SEQ ID NO: 5119743 - DNA, 25 bp, Homo sapien
tactccttcaaaatagtgagaaatc

SEQ ID NO: 5119744 - DNA, 25 bp, Homo sapien
tcctaccacggagagcattgtcccg

SEQ ID NO: 5119745 - DNA, 25 bp, Homo sapien
agcattgtcccgcttcccttaatag

SEQ ID NO: 5119746 - DNA, 25 bp, Homo sapien
aaaatagtgagaaatcctaccacgg

SEQ ID NO: 5119747 - DNA, 25 bp, Homo sapien
tcgactcagtttcaaatatccgctg

SEQ ID NO: 5119748 - DNA, 25 bp, Homo sapien
atcattgcttggcaagtgatgacga

SEQ ID NO: 5119749 - DNA, 25 bp, Homo sapien
tcatcaaccctaatatactcaaaaa

SEQ ID NO: 5119750 - DNA, 25 bp, Homo sapien
caagtgatgacgaagagataaatat

SEQ ID NO: 5119751 - DNA, 25 bp, Homo sapien
ctatgatagtaagaacatgaccatc

SEQ ID NO: 5119752 - DNA, 25 bp, Homo sapien
tgcaaacattccagtcaaaatcgag

SEQ ID NO: 5119753 - DNA, 25 bp, Homo sapien
caaaatcgagctcaataattctcag

SEQ ID NO: 5119754 - DNA, 25 bp, Homo sapien
tctcagaccaaattgttatcatgtg

SEQ ID NO: 5119755 - DNA, 25 bp, Homo sapien
cagccgaaattgttggaagagaccc

SEQ ID NO: 5119756 - DNA, 25 bp, Homo sapien
ggaagagacccatcacatccctcat

SEQ ID NO: 5119757 - DNA, 25 bp, Homo sapien
tcttcatatggtctattgagacaat

SEQ ID NO: 5119758 - DNA, 25 bp, Homo sapien
tatgctggatcgaccagagtgttgc

SEQ ID NO: 5119759 - DNA, 25 bp, Homo sapien
cagattttttttctgctcctagggt

SEQ ID NO: 5119760 - DNA, 25 bp, Homo sapien
tttttttctgctcctagggttctgc

SEQ ID NO: 5119761 - DNA, 25 bp, Homo sapien
ttttttctgctcctagggttctgcc

SEQ ID NO: 5119762 - DNA, 25 bp, Homo sapien
tttcagattttttttctgctcctag

SEQ ID NO: 5119763 - DNA, 25 bp, Homo sapien
tctttggatgtcatcctgtcctgtg

SEQ ID NO: 5119764 - DNA, 25 bp, Homo sapien
tctgaatgtgcaaaccacaatctga

SEQ ID NO: 5119765 - DNA, 25 bp, Homo sapien
tagtgtcaccactaagatctcttta

SEQ ID NO: 5119766 - DNA, 25 bp, Homo sapien
tctgctttccccaatgacaatcata

SEQ ID NO: 5119767 - DNA, 25 bp, Homo sapien
tcactaagacttccagtcgtttcct

SEQ ID NO: 5119768 - DNA, 25 bp, Homo sapien
ctcactaagacttccagtcgtttcc

SEQ ID NO: 5119769 - DNA, 25 bp, Homo sapien
cactaagacttccagtcgtttcctt

SEQ ID NO: 5119770 - DNA, 25 bp, Homo sapien
aactctgtagtcacagggcatcaca

SEQ ID NO: 5119771 - DNA, 25 bp, Homo sapien
agattatagttctactggaactctg

SEQ ID NO: 5119772 - DNA, 25 bp, Homo sapien
tggaactctgtagtcacagggcatc

SEQ ID NO: 5119773 - DNA, 25 bp, Homo sapien
gattatagttctactggaactctgt

SEQ ID NO: 5119774 - DNA, 25 bp, Homo sapien
tattcagactgttataactatatta

SEQ ID NO: 5119775 - DNA, 25 bp, Homo sapien
attcagactgttataactatattaa

SEQ ID NO: 5119776 - DNA, 25 bp, Homo sapien
gccagaagcgctaggatttcagtta

SEQ ID NO: 5119777 - DNA, 25 bp, Homo sapien
gatttcagttaggaacactgccacc

SEQ ID NO: 5119778 - DNA, 25 bp, Homo sapien
tgactagctgatgggtaagccagaa

SEQ ID NO: 5119779 - DNA, 25 bp, Homo sapien
taaaggcaaatgactagctgatggg

SEQ ID NO: 5119780 - DNA, 25 bp, Homo sapien
atctctcactcatgtaagcaatgga

SEQ ID NO: 5119781 - DNA, 25 bp, Homo sapien
ctttgactttctgatttttgcaata

SEQ ID NO: 5119782 - DNA, 25 bp, Homo sapien
tcactcatgtaagcaatggagatag

SEQ ID NO: 5119783 - DNA, 25 bp, Homo sapien
caataatatctgtgattacttctca

SEQ ID NO: 5119784 - DNA, 25 bp, Homo sapien
atatgatactgtgctgtgcatttct

SEQ ID NO: 5119785 - DNA, 25 bp, Homo sapien
tttaaatatgatactgtgctgtgca

SEQ ID NO: 5119786 - DNA, 25 bp, Homo sapien
actgtgctgtgcatttctctctcac

SEQ ID NO: 5119787 - DNA, 25 bp, Homo sapien
tactgtgctgtgcatttctctctca

SEQ ID NO: 5119788 - DNA, 25 bp, Homo sapien
tcaccatgtgtatcttcaccatggc

SEQ ID NO: 5119789 - DNA, 25 bp, Homo sapien
caccatggctcggaagtactggttt

SEQ ID NO: 5119790 - DNA, 25 bp, Homo sapien
tcagtcatgtgcaacttcaccatgt

SEQ ID NO: 5119791 - DNA, 25 bp, Homo sapien
tgtgtatcttcaccatggctcggaa

SEQ ID NO: 5119792 - DNA, 25 bp, Homo sapien
tagtaagtagcaattttgtagtggc

SEQ ID NO: 5119793 - DNA, 25 bp, Homo sapien
ttcctccaatttgtcgttgtcactg

SEQ ID NO: 5119794 - DNA, 25 bp, Homo sapien
tagcaattttgtagtggctgtgttc

SEQ ID NO: 5119795 - DNA, 25 bp, Homo sapien
tgtgttcctccaatttgtcgttgtc

SEQ ID NO: 5119796 - DNA, 25 bp, Homo sapien
caggctgtcacaactcattcttgga

SEQ ID NO: 5119797 - DNA, 25 bp, Homo sapien
aagggattgagcattcaccagcatc

SEQ ID NO: 5119798 - DNA, 25 bp, Homo sapien
taccacctgggtagagagacaggct

SEQ ID NO: 5119799 - DNA, 25 bp, Homo sapien
caaaacatgtgggaactacaggatc

SEQ ID NO: 5119800 - DNA, 25 bp, Homo sapien
gacctgaaggcaatgcaggtcttca

SEQ ID NO: 5119801 - DNA, 25 bp, Homo sapien
tgaaggaccaggaggcatggagacc

SEQ ID NO: 5119802 - DNA, 25 bp, Homo sapien
gagccctgggacaaccacgtccatt

SEQ ID NO: 5119803 - DNA, 25 bp, Homo sapien
tagagccctgggacaaccacgtcca

SEQ ID NO: 5119804 - DNA, 25 bp, Homo sapien
tgtagaattgattgaagtcatatca

SEQ ID NO: 5119805 - DNA, 25 bp, Homo sapien
caagcagtcacacgttgttgtacat

SEQ ID NO: 5119806 - DNA, 25 bp, Homo sapien
tatcaatattaggattattcctgga

SEQ ID NO: 5119807 - DNA, 25 bp, Homo sapien
agctggtaattgatacaagcagtca

SEQ ID NO: 5119808 - DNA, 25 bp, Homo sapien
gttcaaagtctacttgtgacaagtg

SEQ ID NO: 5119809 - DNA, 25 bp, Homo sapien
ttaattatagtccagagcaactggg

SEQ ID NO: 5119810 - DNA, 25 bp, Homo sapien
taattatagtccagagcaactggga

SEQ ID NO: 5119811 - DNA, 25 bp, Homo sapien
aagggctgttcaaagtctacttgtg

SEQ ID NO: 5119812 - DNA, 25 bp, Homo sapien
ttgagagtagctgctacctgcagca

SEQ ID NO: 5119813 - DNA, 25 bp, Homo sapien
tgagagtagctgctacctgcagcat

SEQ ID NO: 5119814 - DNA, 25 bp, Homo sapien
gacacagaagatgtcctctaaattc

SEQ ID NO: 5119815 - DNA, 25 bp, Homo sapien
ttggctacatccctcatttcagtgt

SEQ ID NO: 5119816 - DNA, 25 bp, Homo sapien
ttcagtgtaaagaagtcctctgctc

SEQ ID NO: 5119817 - DNA, 25 bp, Homo sapien
tcctcaggaagccatgaatgacaca

SEQ ID NO: 5119818 - DNA, 25 bp, Homo sapien
catggttaaatcaactcctgtttta

SEQ ID NO: 5119819 - DNA, 25 bp, Homo sapien
ctgacactcctcaattaagttgcta

SEQ ID NO: 5119820 - DNA, 25 bp, Homo sapien
attaagttgctatccattctgactg

SEQ ID NO: 5119821 - DNA, 25 bp, Homo sapien
gatgatcaatccaagataagcctga

SEQ ID NO: 5119822 - DNA, 25 bp, Homo sapien
catatagtcatactcctctgtttcc

SEQ ID NO: 5119823 - DNA, 25 bp, Homo sapien
ggtcatatagtcatactcctctgtt

SEQ ID NO: 5119824 - DNA, 25 bp, Homo sapien
catggtcatatagtcatactcctct

SEQ ID NO: 5119825 - DNA, 25 bp, Homo sapien
tccacatggtcatatagtcatactc

SEQ ID NO: 5119826 - DNA, 25 bp, Homo sapien
tgaggatggacatttccttgatggc

SEQ ID NO: 5119827 - DNA, 25 bp, Homo sapien
ttgctgatgctgctgtgactgcact

SEQ ID NO: 5119828 - DNA, 25 bp, Homo sapien
ttgaggatggacatttccttgatgg

SEQ ID NO: 5119829 - DNA, 25 bp, Homo sapien
cttgaggatggacatttccttgatg

SEQ ID NO: 5119830 - DNA, 25 bp, Homo sapien
ggttgagtactacagctctcttgtg

SEQ ID NO: 5119831 - DNA, 25 bp, Homo sapien
gttgagtactacagctctcttgtga

SEQ ID NO: 5119832 - DNA, 25 bp, Homo sapien
caaacaccatgggttgagtactaca

SEQ ID NO: 5119833 - DNA, 25 bp, Homo sapien
gatcagtcataagggctgccatttt

SEQ ID NO: 5119834 - DNA, 25 bp, Homo sapien
gatggctgatcagtcataagggctg

SEQ ID NO: 5119835 - DNA, 25 bp, Homo sapien
ttaagatggctgatcagtcataagg

SEQ ID NO: 5119836 - DNA, 25 bp, Homo sapien
gctgatcagtcataagggctgccat

SEQ ID NO: 5119837 - DNA, 25 bp, Homo sapien
gagacagagattacatgcctgcaaa

SEQ ID NO: 5119838 - DNA, 25 bp, Homo sapien
cacacataaatgagtacacatgcat

SEQ ID NO: 5119839 - DNA, 25 bp, Homo sapien
ggcaaacctgatcttataagaccct

SEQ ID NO: 5119840 - DNA, 25 bp, Homo sapien
tgtgaatacatatgtgcaaacacac

SEQ ID NO: 5119841 - DNA, 25 bp, Homo sapien
tgtttgagtaattggatgtctgaat

SEQ ID NO: 5119842 - DNA, 25 bp, Homo sapien
ccaaaagttgtttgagtaattggat

SEQ ID NO: 5119843 - DNA, 25 bp, Homo sapien
gttgtttgagtaattggatgtctga

SEQ ID NO: 5119844 - DNA, 25 bp, Homo sapien
aaagttgtttgagtaattggatgtc

SEQ ID NO: 5119845 - DNA, 25 bp, Homo sapien
aatttacatgccatcttgtgcaggg

SEQ ID NO: 5119846 - DNA, 25 bp, Homo sapien
aagaatttacatgccatcttgtgca

SEQ ID NO: 5119847 - DNA, 25 bp, Homo sapien
tcaagaatttacatgccatcttgtg

SEQ ID NO: 5119848 - DNA, 25 bp, Homo sapien
gaatttacatgccatcttgtgcagg

SEQ ID NO: 5119849 - DNA, 25 bp, Homo sapien
tatatatgctgccaaagcgagcaca

SEQ ID NO: 5119850 - DNA, 25 bp, Homo sapien
gctaatcttctctatattcttccaa

SEQ ID NO: 5119851 - DNA, 25 bp, Homo sapien
ttttagtatatatgctgccaaagcg

SEQ ID NO: 5119852 - DNA, 25 bp, Homo sapien
tagtatatatgctgccaaagcgagc

SEQ ID NO: 5119853 - DNA, 25 bp, Homo sapien
tggttttggtgtttgaatagtattg

SEQ ID NO: 5119854 - DNA, 25 bp, Homo sapien
tttggtgtttgaatagtattgagtc

SEQ ID NO: 5119855 - DNA, 25 bp, Homo sapien
ggttttggtgtttgaatagtattga

SEQ ID NO: 5119856 - DNA, 25 bp, Homo sapien
gttttggtgtttgaatagtattgag

SEQ ID NO: 5119857 - DNA, 25 bp, Homo sapien
tcaagacagtagtgccttactagtc

SEQ ID NO: 5119858 - DNA, 25 bp, Homo sapien
aactgatgcaaatgttccaagcata

SEQ ID NO: 5119859 - DNA, 25 bp, Homo sapien
tcttatgaccgaaacctgaactgat

SEQ ID NO: 5119860 - DNA, 25 bp, Homo sapien
tcctcgcctgctcttatgaccgaaa

SEQ ID NO: 5119861 - DNA, 25 bp, Homo sapien
cacaaatctgagtgacacactccat

SEQ ID NO: 5119862 - DNA, 25 bp, Homo sapien
gagcacaaatctgagtgacacactc

SEQ ID NO: 5119863 - DNA, 25 bp, Homo sapien
agagcacaaatctgagtgacacact

SEQ ID NO: 5119864 - DNA, 25 bp, Homo sapien
atggggatgggctagagcacaaatc

SEQ ID NO: 5119865 - DNA, 25 bp, Homo sapien
tagaaccttcccaacatgcatgact

SEQ ID NO: 5119866 - DNA, 25 bp, Homo sapien
aaaagacctggttgcattgccacgc

SEQ ID NO: 5119867 - DNA, 25 bp, Homo sapien
ccacgccgcgtgctgtgatgcagtg

SEQ ID NO: 5119868 - DNA, 25 bp, Homo sapien
catagttcctcttggttgagtggcc

SEQ ID NO: 5119869 - DNA, 25 bp, Homo sapien
tacacttattttgcattctgacact

SEQ ID NO: 5119870 - DNA, 25 bp, Homo sapien
cctggaccgcctgtgtacacttatt

SEQ ID NO: 5119871 - DNA, 25 bp, Homo sapien
ctcacagcttgagtgtagggcttgg

SEQ ID NO: 5119872 - DNA, 25 bp, Homo sapien
tgctgctcacagcttgagtgtaggg

SEQ ID NO: 5119873 - DNA, 25 bp, Homo sapien
ctgactatcagcagaaggattaaac

SEQ ID NO: 5119874 - DNA, 25 bp, Homo sapien
tcagcagaaggattaaacttcacgg

SEQ ID NO: 5119875 - DNA, 25 bp, Homo sapien
aaggattaaacttcacggtgacaga

SEQ ID NO: 5119876 - DNA, 25 bp, Homo sapien
gactatcagcagaaggattaaactt

SEQ ID NO: 5119877 - DNA, 25 bp, Homo sapien
cttcctaatctcaacgtatatacct

SEQ ID NO: 5119878 - DNA, 25 bp, Homo sapien
tgtttctcacaagctgtagtaatca

SEQ ID NO: 5119879 - DNA, 25 bp, Homo sapien
ctcctgtttctcacaagctgtagta

SEQ ID NO: 5119880 - DNA, 25 bp, Homo sapien
cgtatataccttccacagcttcgtg

SEQ ID NO: 5119881 - DNA, 25 bp, Homo sapien
tgatgactgcctttagcttgtgcct

SEQ ID NO: 5119882 - DNA, 25 bp, Homo sapien
ctgatgactgcctttagcttgtgcc

SEQ ID NO: 5119883 - DNA, 25 bp, Homo sapien
gggaggggcagttcaagttcccaca

SEQ ID NO: 5119884 - DNA, 25 bp, Homo sapien
cattgtcccgtacatattgctctaa

SEQ ID NO: 5119885 - DNA, 25 bp, Homo sapien
aagttcccacattgtcccgtacata

SEQ ID NO: 5119886 - DNA, 25 bp, Homo sapien
taaattgcgtgtctgcatatggttc

SEQ ID NO: 5119887 - DNA, 25 bp, Homo sapien
tgtgtatccccttgagaatttgtca

SEQ ID NO: 5119888 - DNA, 25 bp, Homo sapien
tatctgcttgcttgttataaggggt

SEQ ID NO: 5119889 - DNA, 25 bp, Homo sapien
gggtatctgtgtatccccttgagaa

SEQ ID NO: 5119890 - DNA, 25 bp, Homo sapien
gttataaggggtatctgtgtatccc

SEQ ID NO: 5119891 - DNA, 25 bp, Homo sapien
ttcccagggcggatattgcaaagtc

SEQ ID NO: 5119892 - DNA, 25 bp, Homo sapien
aagtacctcctctcagagtccttgt

SEQ ID NO: 5119893 - DNA, 25 bp, Homo sapien
agctcacaggtcctcgggtgccctt

SEQ ID NO: 5119894 - DNA, 25 bp, Homo sapien
ttcacacagctgtagagtgttggtg

SEQ ID NO: 5119895 - DNA, 25 bp, Homo sapien
gccaagagatgggtgagaacgttca

SEQ ID NO: 5119896 - DNA, 25 bp, Homo sapien
agccacccgattttctacttctgag

SEQ ID NO: 5119897 - DNA, 25 bp, Homo sapien
aaagagtcaacagcattttgcagag

SEQ ID NO: 5119898 - DNA, 25 bp, Homo sapien
tacttctgagccgtaaagagtcaac

SEQ ID NO: 5119899 - DNA, 25 bp, Homo sapien
ccacagttctccggatgccttcggc

SEQ ID NO: 5119900 - DNA, 25 bp, Homo sapien
cccacagttctccggatgccttcgg

SEQ ID NO: 5119901 - DNA, 25 bp, Homo sapien
tcccacagttctccggatgccttcg

SEQ ID NO: 5119902 - DNA, 25 bp, Homo sapien
ctcccacagttctccggatgccttc

SEQ ID NO: 5119903 - DNA, 25 bp, Homo sapien
ctgagctaggtgttttgagccccag

SEQ ID NO: 5119904 - DNA, 25 bp, Homo sapien
cctttttgctgcatcacactctggg

SEQ ID NO: 5119905 - DNA, 25 bp, Homo sapien
gagctaggtgttttgagccccagcc

SEQ ID NO: 5119906 - DNA, 25 bp, Homo sapien
ttgctgcatcacactctgggatcac

SEQ ID NO: 5119907 - DNA, 25 bp, Homo sapien
tctggtcagcaaagactgggttttt

SEQ ID NO: 5119908 - DNA, 25 bp, Homo sapien
tggtgagatctggtatgctttgtct

SEQ ID NO: 5119909 - DNA, 25 bp, Homo sapien
gctttgtctggtcagcaaagactgg

SEQ ID NO: 5119910 - DNA, 25 bp, Homo sapien
tatgctttgtctggtcagcaaagac

SEQ ID NO: 5119911 - DNA, 25 bp, Homo sapien
ggaggcaatcgggtcactaaaggaa

SEQ ID NO: 5119912 - DNA, 25 bp, Homo sapien
tcgggtcactaaaggaagtgtggtc

SEQ ID NO: 5119913 - DNA, 25 bp, Homo sapien
gacacacagatatcctactgcctct

SEQ ID NO: 5119914 - DNA, 25 bp, Homo sapien
gaagtgtggtcagcgggaggacaca

SEQ ID NO: 5119915 - DNA, 25 bp, Homo sapien
ttgaacctgacacaggagaatgagg

SEQ ID NO: 5119916 - DNA, 25 bp, Homo sapien
cttgaacctgacacaggagaatgag

SEQ ID NO: 5119917 - DNA, 25 bp, Homo sapien
ggacacactgggcagggccatggga

SEQ ID NO: 5119918 - DNA, 25 bp, Homo sapien
agcagcatccaggacacactgggca

SEQ ID NO: 5119919 - DNA, 25 bp, Homo sapien
ttacctcacgtgacacacaggagcc

SEQ ID NO: 5119920 - DNA, 25 bp, Homo sapien
cactgtgggctatctctatattggg

SEQ ID NO: 5119921 - DNA, 25 bp, Homo sapien
gctctgaggattcatagggaaccca

SEQ ID NO: 5119922 - DNA, 25 bp, Homo sapien
tgcaggcagtttcattagacaccac

SEQ ID NO: 5119923 - DNA, 25 bp, Homo sapien
tctgcccttggggaggaagaccaca

SEQ ID NO: 5119924 - DNA, 25 bp, Homo sapien
ccttggggaatatctaggtctgccc

SEQ ID NO: 5119925 - DNA, 25 bp, Homo sapien
tgggtgggagatgaccttggggaat

SEQ ID NO: 5119926 - DNA, 25 bp, Homo sapien
aaagggagagagtaaaatgaagagt

SEQ ID NO: 5119927 - DNA, 25 bp, Homo sapien
gagccataggccttggagcctttgg

SEQ ID NO: 5119928 - DNA, 25 bp, Homo sapien
tggtgacaaaaacaaggcatagcag

SEQ ID NO: 5119929 - DNA, 25 bp, Homo sapien
tttggtgacaaaaacaaggcatagc

SEQ ID NO: 5119930 - DNA, 25 bp, Homo sapien
ttttggtgacaaaaacaaggcatag

SEQ ID NO: 5119931 - DNA, 25 bp, Homo sapien
cccaaggaactctcctgaaggagac

SEQ ID NO: 5119932 - DNA, 25 bp, Homo sapien
gacctgcatggactttcccctatca

SEQ ID NO: 5119933 - DNA, 25 bp, Homo sapien
gataagcgtgttcatcctcattccc

SEQ ID NO: 5119934 - DNA, 25 bp, Homo sapien
gtgtgaaagataagcgtgttcatcc

SEQ ID NO: 5119935 - DNA, 25 bp, Homo sapien
agaatgagatggagcctgagaccca

SEQ ID NO: 5119936 - DNA, 25 bp, Homo sapien
tgagggggacaaagagaatgagatg

SEQ ID NO: 5119937 - DNA, 25 bp, Homo sapien
ggacaaagagaatgagatggagcct

SEQ ID NO: 5119938 - DNA, 25 bp, Homo sapien
agagaatgagatggagcctgagacc

SEQ ID NO: 5119939 - DNA, 25 bp, Homo sapien
gaggacacgaaggatccctcagccc

SEQ ID NO: 5119940 - DNA, 25 bp, Homo sapien
tccagatgtatgaatagctgttact

SEQ ID NO: 5119941 - DNA, 25 bp, Homo sapien
ccagatgtatgaatagctgttacta

SEQ ID NO: 5119942 - DNA, 25 bp, Homo sapien
tctttaaagactagggatctccgta

SEQ ID NO: 5119943 - DNA, 25 bp, Homo sapien
gattagcctgcgaacctcaaagata

SEQ ID NO: 5119944 - DNA, 25 bp, Homo sapien
tagatacagactccctgaagctcag

SEQ ID NO: 5119945 - DNA, 25 bp, Homo sapien
gatctccgtagaattcagctcttca

SEQ ID NO: 5119946 - DNA, 25 bp, Homo sapien
ctcccatgcaaagtaattcatcaca

SEQ ID NO: 5119947 - DNA, 25 bp, Homo sapien
tctcccatgcaaagtaattcatcac

SEQ ID NO: 5119948 - DNA, 25 bp, Homo sapien
ccatgcaaagtaattcatcacatca

SEQ ID NO: 5119949 - DNA, 25 bp, Homo sapien
tcccatgcaaagtaattcatcacat

SEQ ID NO: 5119950 - DNA, 25 bp, Homo sapien
gtaactttgcatcacagttataatc

SEQ ID NO: 5119951 - DNA, 25 bp, Homo sapien
acaaggtagtcaggtagggcagttt

SEQ ID NO: 5119952 - DNA, 25 bp, Homo sapien
gtccatgatgagctgcacgccaagc

SEQ ID NO: 5119953 - DNA, 25 bp, Homo sapien
cagagaaaagcctgaaatgaaggtg

SEQ ID NO: 5119954 - DNA, 25 bp, Homo sapien
cagtttggggagaatattctcttcc

SEQ ID NO: 5119955 - DNA, 25 bp, Homo sapien
ctctttttgtctgcaggtttcccat

SEQ ID NO: 5119956 - DNA, 25 bp, Homo sapien
aaaagcttcccatcgacaacctcat

SEQ ID NO: 5119957 - DNA, 25 bp, Homo sapien
tgtaaaagcttcccatcgacaacct

SEQ ID NO: 5119958 - DNA, 25 bp, Homo sapien
taaaagcttcccatcgacaacctca

SEQ ID NO: 5119959 - DNA, 25 bp, Homo sapien
gtaaaagcttcccatcgacaacctc

SEQ ID NO: 5119960 - DNA, 25 bp, Homo sapien
gaagttcgtggaatgttaacgtcat

SEQ ID NO: 5119961 - DNA, 25 bp, Homo sapien
caagatgtgaaccatcctgcttggg

SEQ ID NO: 5119962 - DNA, 25 bp, Homo sapien
gagagacagaagttcgtggaatgtt

SEQ ID NO: 5119963 - DNA, 25 bp, Homo sapien
cgtggaatgttaacgtcatttacca

SEQ ID NO: 5119964 - DNA, 25 bp, Homo sapien
gaatagtgatgatgggtgtgaaggg

SEQ ID NO: 5119965 - DNA, 25 bp, Homo sapien
gggcagtgagtggtgtaagccttga

SEQ ID NO: 5119966 - DNA, 25 bp, Homo sapien
tggtgtaagccttgagcaggaccat

SEQ ID NO: 5119967 - DNA, 25 bp, Homo sapien
ccaggaatagtgatgatgggtgtga

SEQ ID NO: 5119968 - DNA, 25 bp, Homo sapien
gttggcttctcaggccaggtagctg

SEQ ID NO: 5119969 - DNA, 25 bp, Homo sapien
ttggcttctcaggccaggtagctgt

SEQ ID NO: 5119970 - DNA, 25 bp, Homo sapien
tggcttctcaggccaggtagctgta

SEQ ID NO: 5119971 - DNA, 25 bp, Homo sapien
tggagagcaaagcacctattacctt

SEQ ID NO: 5119972 - DNA, 25 bp, Homo sapien
tacagtgcatgttagagacgccctt

SEQ ID NO: 5119973 - DNA, 25 bp, Homo sapien
aggaaggtcctctgagacacccaca

SEQ ID NO: 5119974 - DNA, 25 bp, Homo sapien
aaacaactttggatcccactgaggc

SEQ ID NO: 5119975 - DNA, 25 bp, Homo sapien
tcttgcttaagaggcaaatcaacaa

SEQ ID NO: 5119976 - DNA, 25 bp, Homo sapien
gctgagctgcaatgaatctcttgct

SEQ ID NO: 5119977 - DNA, 25 bp, Homo sapien
tgcttaagaggcaaatcaacaatct

SEQ ID NO: 5119978 - DNA, 25 bp, Homo sapien
atctcttgcttaagaggcaaatcaa

SEQ ID NO: 5119979 - DNA, 25 bp, Homo sapien
aacatcaggcaggagatcagcatga

SEQ ID NO: 5119980 - DNA, 25 bp, Homo sapien
acatcaggcaggagatcagcatgaa

SEQ ID NO: 5119981 - DNA, 25 bp, Homo sapien
catcaggcaggagatcagcatgaag

SEQ ID NO: 5119982 - DNA, 25 bp, Homo sapien
gggctagaaagagttggttggtgga

SEQ ID NO: 5119983 - DNA, 25 bp, Homo sapien
agttctccaccccattagtgactgt

SEQ ID NO: 5119984 - DNA, 25 bp, Homo sapien
aaacagaatgaataggccaaagaaa

SEQ ID NO: 5119985 - DNA, 25 bp, Homo sapien
tccaccccattagtgactgtctaca

SEQ ID NO: 5119986 - DNA, 25 bp, Homo sapien
cctgacttggtttccctgaacacaa

SEQ ID NO: 5119987 - DNA, 25 bp, Homo sapien
aagtagtagcagtaggagcgatagg

SEQ ID NO: 5119988 - DNA, 25 bp, Homo sapien
cagtaggagcgataggcattggtgc

SEQ ID NO: 5119989 - DNA, 25 bp, Homo sapien
agtagcagtaggagcgataggcatt

SEQ ID NO: 5119990 - DNA, 25 bp, Homo sapien
agtaggagcgataggcattggtgcc

SEQ ID NO: 5119991 - DNA, 25 bp, Homo sapien
gagtaatgtccgtgatgatgctgtc

SEQ ID NO: 5119992 - DNA, 25 bp, Homo sapien
tgtgacggatatactgagtcctcca

SEQ ID NO: 5119993 - DNA, 25 bp, Homo sapien
catctcattgcagccactgaacaca

SEQ ID NO: 5119994 - DNA, 25 bp, Homo sapien
tcctccaagaggacgggtcagaaaa

SEQ ID NO: 5119995 - DNA, 25 bp, Homo sapien
agacaccaggttgcccgaattcatg

SEQ ID NO: 5119996 - DNA, 25 bp, Homo sapien
cacagacaccaggttgcccgaattc

SEQ ID NO: 5119997 - DNA, 25 bp, Homo sapien
agcacagacaccaggttgcccgaat

SEQ ID NO: 5119998 - DNA, 25 bp, Homo sapien
cagacaccaggttgcccgaattcat

SEQ ID NO: 5119999 - DNA, 25 bp, Homo sapien
tccagacattgaagtcatcagtgcc

SEQ ID NO: 5120000 - DNA, 25 bp, Homo sapien
tctccttaatcagtgaggccacaaa

SEQ ID NO: 5120001 - DNA, 25 bp, Homo sapien
gaagtcatcagtgccactctcctta

SEQ ID NO: 5120002 - DNA, 25 bp, Homo sapien
ggaggccaatccagacattgaagtc

SEQ ID NO: 5120003 - DNA, 25 bp, Homo sapien
caggattaacactgcttggggctcc

SEQ ID NO: 5120004 - DNA, 25 bp, Homo sapien
gtagccaggattaacactgcttggg

SEQ ID NO: 5120005 - DNA, 25 bp, Homo sapien
cagtagccaggattaacactgcttg

SEQ ID NO: 5120006 - DNA, 25 bp, Homo sapien
ctgtgcttgaggtcaggctcacaca

SEQ ID NO: 5120007 - DNA, 25 bp, Homo sapien
aaacaggtggatggattctctgcct

SEQ ID NO: 5120008 - DNA, 25 bp, Homo sapien
gagaacagaaacaggtggatggatt

SEQ ID NO: 5120009 - DNA, 25 bp, Homo sapien
aggagagaacagaaacaggtggatg

SEQ ID NO: 5120010 - DNA, 25 bp, Homo sapien
agaaacaggtggatggattctctgc

SEQ ID NO: 5120011 - DNA, 25 bp, Homo sapien
cccagtcccagttccatccctggag

SEQ ID NO: 5120012 - DNA, 25 bp, Homo sapien
tcccagtcccagttccatccctgga

SEQ ID NO: 5120013 - DNA, 25 bp, Homo sapien
tatcccagtcccagttccatccctg

SEQ ID NO: 5120014 - DNA, 25 bp, Homo sapien
ctatcccagtcccagttccatccct

SEQ ID NO: 5120015 - DNA, 25 bp, Homo sapien
tatgaccctcctggctttaggactc

SEQ ID NO: 5120016 - DNA, 25 bp, Homo sapien
ctgggagacccgaaagagtatgacc

SEQ ID NO: 5120017 - DNA, 25 bp, Homo sapien
gtcaatgagaagagttacaactggg

SEQ ID NO: 5120018 - DNA, 25 bp, Homo sapien
tccttaatgaggagttcacctttcc

SEQ ID NO: 5120019 - DNA, 25 bp, Homo sapien
gtcttcacaaggcacatccttccat

SEQ ID NO: 5120020 - DNA, 25 bp, Homo sapien
tcttcacaaggcacatccttccatt

SEQ ID NO: 5120021 - DNA, 25 bp, Homo sapien
cttcacaaggcacatccttccattt

SEQ ID NO: 5120022 - DNA, 25 bp, Homo sapien
ttttgactccgttgtaattgctgga

SEQ ID NO: 5120023 - DNA, 25 bp, Homo sapien
agttggagagatggtccggtttaat

SEQ ID NO: 5120024 - DNA, 25 bp, Homo sapien
atttttgactccgttgtaattgctg

SEQ ID NO: 5120025 - DNA, 25 bp, Homo sapien
ttgactccgttgtaattgctggatc

SEQ ID NO: 5120026 - DNA, 25 bp, Homo sapien
aaactattgaagattaacaaggcaa

SEQ ID NO: 5120027 - DNA, 25 bp, Homo sapien
aaagaatactacttgctgaagacgc

SEQ ID NO: 5120028 - DNA, 25 bp, Homo sapien
ccaatatgcatggtatgcggatgga

SEQ ID NO: 5120029 - DNA, 25 bp, Homo sapien
cattacccttattacagtgatctgg

SEQ ID NO: 5120030 - DNA, 25 bp, Homo sapien
ccagcatgtgagtttttggtcaatc

SEQ ID NO: 5120031 - DNA, 25 bp, Homo sapien
tccgggtcaaactctggtaaggtga

SEQ ID NO: 5120032 - DNA, 25 bp, Homo sapien
tctcattgtcttataggattcaaga

SEQ ID NO: 5120033 - DNA, 25 bp, Homo sapien
gcagccaggagggtaatacactctg

SEQ ID NO: 5120034 - DNA, 25 bp, Homo sapien
tgattcttgtaaggagaagttctcc

SEQ ID NO: 5120035 - DNA, 25 bp, Homo sapien
cctcagtctgaatcttctcattgtc

SEQ ID NO: 5120036 - DNA, 25 bp, Homo sapien
gagcaagggcaaggtctgccttgaa

SEQ ID NO: 5120037 - DNA, 25 bp, Homo sapien
tgcataacagctgccaagattcctg

SEQ ID NO: 5120038 - DNA, 25 bp, Homo sapien
agctgcttgctggatcttcagggct

SEQ ID NO: 5120039 - DNA, 25 bp, Homo sapien
ttcagggctgcaggataggacatct

SEQ ID NO: 5120040 - DNA, 25 bp, Homo sapien
gaaggcatctatctggcccatcgat

SEQ ID NO: 5120041 - DNA, 25 bp, Homo sapien
tcccaggtacaataaagaagtctcc

SEQ ID NO: 5120042 - DNA, 25 bp, Homo sapien
aacctagggtgagtgtgctgctgct

SEQ ID NO: 5120043 - DNA, 25 bp, Homo sapien
cctctgaagcaaagggtaggcttgc

SEQ ID NO: 5120044 - DNA, 25 bp, Homo sapien
tcattttgtcatacggcctaaggct

SEQ ID NO: 5120045 - DNA, 25 bp, Homo sapien
catgagaccagtgtgaggactcacc

SEQ ID NO: 5120046 - DNA, 25 bp, Homo sapien
gaggttaccctatgtctgcaagttc

SEQ ID NO: 5120047 - DNA, 25 bp, Homo sapien
tttggtgtgcaactcatcatgggca

SEQ ID NO: 5120048 - DNA, 25 bp, Homo sapien
tggcctgccagaagcggccctctgg

SEQ ID NO: 5120049 - DNA, 25 bp, Homo sapien
aggctccctctcattctctttgttg

SEQ ID NO: 5120050 - DNA, 25 bp, Homo sapien
tctggaaacctggtgtctgtgctca

SEQ ID NO: 5120051 - DNA, 25 bp, Homo sapien
attctctttgttgccctcaaagctg

SEQ ID NO: 5120052 - DNA, 25 bp, Homo sapien
atctcagcaggatgagcgaacactt

SEQ ID NO: 5120053 - DNA, 25 bp, Homo sapien
ttgaatctcagcaggatgagcgaac

SEQ ID NO: 5120054 - DNA, 25 bp, Homo sapien
tgaatctcagcaggatgagcgaaca

SEQ ID NO: 5120055 - DNA, 25 bp, Homo sapien
gaatctcagcaggatgagcgaacac

SEQ ID NO: 5120056 - DNA, 25 bp, Homo sapien
tcggtagacattacttcccacttgg

SEQ ID NO: 5120057 - DNA, 25 bp, Homo sapien
cacttaaatcagaacatcggtagac

SEQ ID NO: 5120058 - DNA, 25 bp, Homo sapien
tagcacaaagtacatctcacaagcc

SEQ ID NO: 5120059 - DNA, 25 bp, Homo sapien
ggtacagccggtgaagatttgagat

SEQ ID NO: 5120060 - DNA, 25 bp, Homo sapien
aaaaacataatcagaggtgaaatta

SEQ ID NO: 5120061 - DNA, 25 bp, Homo sapien
tgaaattaattgagtaaatttagct

SEQ ID NO: 5120062 - DNA, 25 bp, Homo sapien
taaatttagctttataaagtactca

SEQ ID NO: 5120063 - DNA, 25 bp, Homo sapien
attctaatgtcccaagatacatgaa

SEQ ID NO: 5120064 - DNA, 25 bp, Homo sapien
acaatggtattgacagaaaatgggc

SEQ ID NO: 5120065 - DNA, 25 bp, Homo sapien
tattgggtcatagcttttctgtcaa

SEQ ID NO: 5120066 - DNA, 25 bp, Homo sapien
ttgattattaacaggcagccttctg

SEQ ID NO: 5120067 - DNA, 25 bp, Homo sapien
aaaataagcgtccttgtggtcccag

SEQ ID NO: 5120068 - DNA, 25 bp, Homo sapien
gactgactgacctggcagtttgggc

SEQ ID NO: 5120069 - DNA, 25 bp, Homo sapien
ctgactgacctggcagtttgggcat

SEQ ID NO: 5120070 - DNA, 25 bp, Homo sapien
actgactgacctggcagtttgggca

SEQ ID NO: 5120071 - DNA, 25 bp, Homo sapien
tctggtgtctctgaaatgattgtgc

SEQ ID NO: 5120072 - DNA, 25 bp, Homo sapien
cagattccactgccaaacataatcc

SEQ ID NO: 5120073 - DNA, 25 bp, Homo sapien
tggaaagtagaggcagcccagggat

SEQ ID NO: 5120074 - DNA, 25 bp, Homo sapien
gattccactgccaaacataatcctc

SEQ ID NO: 5120075 - DNA, 25 bp, Homo sapien
atcctggcaaacatgctgagatccc

SEQ ID NO: 5120076 - DNA, 25 bp, Homo sapien
ccatcctggcaaacatgctgagatc

SEQ ID NO: 5120077 - DNA, 25 bp, Homo sapien
gaccatcctggcaaacatgctgaga

SEQ ID NO: 5120078 - DNA, 25 bp, Homo sapien
agaccatcctggcaaacatgctgag

SEQ ID NO: 5120079 - DNA, 25 bp, Homo sapien
acgtagttcactgccttttgtgtca

SEQ ID NO: 5120080 - DNA, 25 bp, Homo sapien
gccccgaaccaccacttgttcttca

SEQ ID NO: 5120081 - DNA, 25 bp, Homo sapien
tcatggcccatgacagaaactttct

SEQ ID NO: 5120082 - DNA, 25 bp, Homo sapien
ttcacaaatgttggtacgtagttca

SEQ ID NO: 5120083 - DNA, 25 bp, Homo sapien
ggtagagcgcctgtctgaaccagat

SEQ ID NO: 5120084 - DNA, 25 bp, Homo sapien
ggcaccactgctgatattgacactg

SEQ ID NO: 5120085 - DNA, 25 bp, Homo sapien
tatctgtagaaagctggatgggtca

SEQ ID NO: 5120086 - DNA, 25 bp, Homo sapien
agcagccctgtgtaccctgggtaga

SEQ ID NO: 5120087 - DNA, 25 bp, Homo sapien
tatctgatacttttaatacctgtga

SEQ ID NO: 5120088 - DNA, 25 bp, Homo sapien
cctatatctgctcgaatatctgata

SEQ ID NO: 5120089 - DNA, 25 bp, Homo sapien
acgtccgctatgctccctatatctg

SEQ ID NO: 5120090 - DNA, 25 bp, Homo sapien
ttctggcacctgaacacaacgtccg

SEQ ID NO: 5120091 - DNA, 25 bp, Homo sapien
agttccaggtggctggggaaggtca

SEQ ID NO: 5120092 - DNA, 25 bp, Homo sapien
ggtggctggggaaggtcacacaatc

SEQ ID NO: 5120093 - DNA, 25 bp, Homo sapien
caggtggctggggaaggtcacacaa

SEQ ID NO: 5120094 - DNA, 25 bp, Homo sapien
tccaggtggctggggaaggtcacac

SEQ ID NO: 5120095 - DNA, 25 bp, Homo sapien
cacagtgcttggtgtggaataggga

SEQ ID NO: 5120096 - DNA, 25 bp, Homo sapien
atgaaacctgggttatccttaagtg

SEQ ID NO: 5120097 - DNA, 25 bp, Homo sapien
ttacaacaatcacagtcagagttct

SEQ ID NO: 5120098 - DNA, 25 bp, Homo sapien
tgcttgtcatttagggcattatcac

SEQ ID NO: 5120099 - DNA, 25 bp, Homo sapien
ccaccaccgagatcttgctgccaac

SEQ ID NO: 5120100 - DNA, 25 bp, Homo sapien
caccaccaccgagatcttgctgcca

SEQ ID NO: 5120101 - DNA, 25 bp, Homo sapien
ccaccgagatcttgctgccaaccat

SEQ ID NO: 5120102 - DNA, 25 bp, Homo sapien
accaccgagatcttgctgccaacca

SEQ ID NO: 5120103 - DNA, 25 bp, Homo sapien
catgccagtggttatctttatcttc

SEQ ID NO: 5120104 - DNA, 25 bp, Homo sapien
tgccagtggttatctttatcttcac

SEQ ID NO: 5120105 - DNA, 25 bp, Homo sapien
cagcatgccagtggttatctttatc

SEQ ID NO: 5120106 - DNA, 25 bp, Homo sapien
gtggcagcatgccagtggttatctt

SEQ ID NO: 5120107 - DNA, 25 bp, Homo sapien
ctgcatagagaggaacaggtaatgg

SEQ ID NO: 5120108 - DNA, 25 bp, Homo sapien
ggtagtaggggctgtgggaataggc

SEQ ID NO: 5120109 - DNA, 25 bp, Homo sapien
ctgtgggaataggcacccagcctgt

SEQ ID NO: 5120110 - DNA, 25 bp, Homo sapien
catagagaggaacaggtaatgggta

SEQ ID NO: 5120111 - DNA, 25 bp, Homo sapien
ctgagggttatctgagaagatttct

SEQ ID NO: 5120112 - DNA, 25 bp, Homo sapien
tgagggttatctgagaagatttctg

SEQ ID NO: 5120113 - DNA, 25 bp, Homo sapien
gcaggaactcaggaaaagttatgct

SEQ ID NO: 5120114 - DNA, 25 bp, Homo sapien
ctttagctggtgaagccccataagg

SEQ ID NO: 5120115 - DNA, 25 bp, Homo sapien
caggaaaagttatgctgaatatagc

SEQ ID NO: 5120116 - DNA, 25 bp, Homo sapien
ctaatgatgctttagctggtgaagc

SEQ ID NO: 5120117 - DNA, 25 bp, Homo sapien
tttatttgatttccacgtcagttgg

SEQ ID NO: 5120118 - DNA, 25 bp, Homo sapien
atttgatttccacgtcagttggggt

SEQ ID NO: 5120119 - DNA, 25 bp, Homo sapien
ttatttgatttccacgtcagttggg

SEQ ID NO: 5120120 - DNA, 25 bp, Homo sapien
ttgatttccacgtcagttggggtta

SEQ ID NO: 5120121 - DNA, 25 bp, Homo sapien
tctttgcaatacaatatcttggctg

SEQ ID NO: 5120122 - DNA, 25 bp, Homo sapien
tcccgttactaataactctgtctct

SEQ ID NO: 5120123 - DNA, 25 bp, Homo sapien
ccctgggtatctgaagtattgctcc

SEQ ID NO: 5120124 - DNA, 25 bp, Homo sapien
ttctctaagatgagctgaacaacag

SEQ ID NO: 5120125 - DNA, 25 bp, Homo sapien
ccaaaatgtggctcaatactgcaaa

SEQ ID NO: 5120126 - DNA, 25 bp, Homo sapien
attgatgtcatcgatggccacctgc

SEQ ID NO: 5120127 - DNA, 25 bp, Homo sapien
aaagacccaccagattttgactagt

SEQ ID NO: 5120128 - DNA, 25 bp, Homo sapien
tctgcacatcttctaggtaaaatcc

SEQ ID NO: 5120129 - DNA, 25 bp, Homo sapien
ctcatctttgcagggacattagaat

SEQ ID NO: 5120130 - DNA, 25 bp, Homo sapien
tagaattgtgacaaacatccagctg

SEQ ID NO: 5120131 - DNA, 25 bp, Homo sapien
cagggacattagaattgtgacaaac

SEQ ID NO: 5120132 - DNA, 25 bp, Homo sapien
gctgtgtgattcatgcatctcatct

SEQ ID NO: 5120133 - DNA, 25 bp, Homo sapien
ttgttgtcatcaggacctctcagtc

SEQ ID NO: 5120134 - DNA, 25 bp, Homo sapien
tgttgtcatcaggacctctcagtcc

SEQ ID NO: 5120135 - DNA, 25 bp, Homo sapien
ttggttctcacaccgggtcttgccc

SEQ ID NO: 5120136 - DNA, 25 bp, Homo sapien
ggctctgaacaagcgctgcatttgg

SEQ ID NO: 5120137 - DNA, 25 bp, Homo sapien
tctgcattttctacgggatttctgg

SEQ ID NO: 5120138 - DNA, 25 bp, Homo sapien
tgctgcagtactaaagagaatgaca

SEQ ID NO: 5120139 - DNA, 25 bp, Homo sapien
gagaatgacaagtctgagatccctt

SEQ ID NO: 5120140 - DNA, 25 bp, Homo sapien
catctgacaatagtgagggagacag

SEQ ID NO: 5120141 - DNA, 25 bp, Homo sapien
tggggccccagcttgccccagtggg

SEQ ID NO: 5120142 - DNA, 25 bp, Homo sapien
tttccaggattctcttctcctatgc

SEQ ID NO: 5120143 - DNA, 25 bp, Homo sapien
ccagtgggtggggctctcttcttct

SEQ ID NO: 5120144 - DNA, 25 bp, Homo sapien
tctttgcctcttatcttcctgcttc

SEQ ID NO: 5120145 - DNA, 25 bp, Homo sapien
tgaagatactgagaggtagtgctag

SEQ ID NO: 5120146 - DNA, 25 bp, Homo sapien
gaagatactgagaggtagtgctagg

SEQ ID NO: 5120147 - DNA, 25 bp, Homo sapien
aagatactgagaggtagtgctaggg

SEQ ID NO: 5120148 - DNA, 25 bp, Homo sapien
ctccccaaaatgccactggtttaga

SEQ ID NO: 5120149 - DNA, 25 bp, Homo sapien
aggagaggtccctatgcacagggac

SEQ ID NO: 5120150 - DNA, 25 bp, Homo sapien
tgcacagggaccaaggatcctggga

SEQ ID NO: 5120151 - DNA, 25 bp, Homo sapien
taagagaatccactgggattagaag

SEQ ID NO: 5120152 - DNA, 25 bp, Homo sapien
aaagccgctctccattctccagtgg

SEQ ID NO: 5120153 - DNA, 25 bp, Homo sapien
tcttgctagggcacctaatgggact

SEQ ID NO: 5120154 - DNA, 25 bp, Homo sapien
ggtagtgtcgcttgccttcccttaa

SEQ ID NO: 5120155 - DNA, 25 bp, Homo sapien
gaacttgcgggcttattgaatcagg

SEQ ID NO: 5120156 - DNA, 25 bp, Homo sapien
aataccctgtaattgactgaccctg

SEQ ID NO: 5120157 - DNA, 25 bp, Homo sapien
caaacccaggaaatcctcagataag

SEQ ID NO: 5120158 - DNA, 25 bp, Homo sapien
tgtatgagtttgagctctgtcttca

SEQ ID NO: 5120159 - DNA, 25 bp, Homo sapien
acttcacgttgtaaatcaggcagcg

SEQ ID NO: 5120160 - DNA, 25 bp, Homo sapien
gatatctggatttaagccatgtccc

SEQ ID NO: 5120161 - DNA, 25 bp, Homo sapien
aaataacaatatggacctctcagtc

SEQ ID NO: 5120162 - DNA, 25 bp, Homo sapien
taatgtccagaattgcgcactaatc

SEQ ID NO: 5120163 - DNA, 25 bp, Homo sapien
taaatggcaccctccctattcctgt

SEQ ID NO: 5120164 - DNA, 25 bp, Homo sapien
ttagaagagatctgacggagcagca

SEQ ID NO: 5120165 - DNA, 25 bp, Homo sapien
gaaacatttcatacgatccaggaga

SEQ ID NO: 5120166 - DNA, 25 bp, Homo sapien
tcttccgcctcataagtctggtgga

SEQ ID NO: 5120167 - DNA, 25 bp, Homo sapien
gggtaaccttgagaagccctcatga

SEQ ID NO: 5120168 - DNA, 25 bp, Homo sapien
tgaactgaacattaaccctcaccgg

SEQ ID NO: 5120169 - DNA, 25 bp, Homo sapien
ttctgtaggttgctgagcaggtgcc

SEQ ID NO: 5120170 - DNA, 25 bp, Homo sapien
cttctgtaggttgctgagcaggtgc

SEQ ID NO: 5120171 - DNA, 25 bp, Homo sapien
tgggggagcttctgtaggttgctga

SEQ ID NO: 5120172 - DNA, 25 bp, Homo sapien
ggagcttctgtaggttgctgagcag

SEQ ID NO: 5120173 - DNA, 25 bp, Homo sapien
gggcagagcctgctttttatccctg

SEQ ID NO: 5120174 - DNA, 25 bp, Homo sapien
tgcaagctgataatgatggcatcaa

SEQ ID NO: 5120175 - DNA, 25 bp, Homo sapien
tctcctgttacagaaaagggcatat

SEQ ID NO: 5120176 - DNA, 25 bp, Homo sapien
agttctttgccctgcactgactgag

SEQ ID NO: 5120177 - DNA, 25 bp, Homo sapien
tgtggctgggttgcttctgacgttc

SEQ ID NO: 5120178 - DNA, 25 bp, Homo sapien
cattggcactcatcctgagtgctgg

SEQ ID NO: 5120179 - DNA, 25 bp, Homo sapien
tgacgttcattctggactccaagga

SEQ ID NO: 5120180 - DNA, 25 bp, Homo sapien
ggcactcatcctgagtgctggctct

SEQ ID NO: 5120181 - DNA, 25 bp, Homo sapien
tctttcacgctggttccatatggga

SEQ ID NO: 5120182 - DNA, 25 bp, Homo sapien
ctttcttctttcacgctggttccat

SEQ ID NO: 5120183 - DNA, 25 bp, Homo sapien
ctggttccatatgggaaaatgtgac

SEQ ID NO: 5120184 - DNA, 25 bp, Homo sapien
tcaactctgcacttgattctggctc

SEQ ID NO: 5120185 - DNA, 25 bp, Homo sapien
ggcagctcttgttatagtatttctc

SEQ ID NO: 5120186 - DNA, 25 bp, Homo sapien
ctggcagctcttgttatagtatttc

SEQ ID NO: 5120187 - DNA, 25 bp, Homo sapien
cagctcttgttatagtatttctcag

SEQ ID NO: 5120188 - DNA, 25 bp, Homo sapien
gctcttgttatagtatttctcagtt

SEQ ID NO: 5120189 - DNA, 25 bp, Homo sapien
gatggaacatgatatcgatatagaa

SEQ ID NO: 5120190 - DNA, 25 bp, Homo sapien
ttgaggagacatcagagagatggaa

SEQ ID NO: 5120191 - DNA, 25 bp, Homo sapien
gctgaaatcatagagttgaggagac

SEQ ID NO: 5120192 - DNA, 25 bp, Homo sapien
cgatatagaataaacaacattggaa

SEQ ID NO: 5120193 - DNA, 25 bp, Homo sapien
tcagtctgcggtatacctggaaaat

SEQ ID NO: 5120194 - DNA, 25 bp, Homo sapien
gaatcctcctatctgacaatggcat

SEQ ID NO: 5120195 - DNA, 25 bp, Homo sapien
tgtatccttagatccagaatcctcc

SEQ ID NO: 5120196 - DNA, 25 bp, Homo sapien
ttgaggaaggtctattctgccctcc

SEQ ID NO: 5120197 - DNA, 25 bp, Homo sapien
gggctctatacttcctatacccaat

SEQ ID NO: 5120198 - DNA, 25 bp, Homo sapien
aatcttatgggctctatacttccta

SEQ ID NO: 5120199 - DNA, 25 bp, Homo sapien
atacttcctatacccaatctgattg

SEQ ID NO: 5120200 - DNA, 25 bp, Homo sapien
agaccaaaatcttatgggctctata

SEQ ID NO: 5120201 - DNA, 25 bp, Homo sapien
ctaccagaacgaggtgcaggaattc

SEQ ID NO: 5120202 - DNA, 25 bp, Homo sapien
ctgagaaccaacttctgataggatg

SEQ ID NO: 5120203 - DNA, 25 bp, Homo sapien
cttctgataggatgatactaccaga

SEQ ID NO: 5120204 - DNA, 25 bp, Homo sapien
gatgatactaccagaacgaggtgca

SEQ ID NO: 5120205 - DNA, 25 bp, Homo sapien
cagcccaggctgtctttatccaact

SEQ ID NO: 5120206 - DNA, 25 bp, Homo sapien
gactccagccattggaacaatctcc

SEQ ID NO: 5120207 - DNA, 25 bp, Homo sapien
aacaacctcgctgacaaacagggac

SEQ ID NO: 5120208 - DNA, 25 bp, Homo sapien
acatgctggcatcggcttctgtgta

SEQ ID NO: 5120209 - DNA, 25 bp, Homo sapien
gagcaaggtagcatttggggcccat

SEQ ID NO: 5120210 - DNA, 25 bp, Homo sapien
cttgagtggagcaaggtagcatttg

SEQ ID NO: 5120211 - DNA, 25 bp, Homo sapien
caacttgagtggagcaaggtagcat

SEQ ID NO: 5120212 - DNA, 25 bp, Homo sapien
cacagcaacttgagtggagcaaggt

SEQ ID NO: 5120213 - DNA, 25 bp, Homo sapien
gaaaacatgaatcccactgggttgg

SEQ ID NO: 5120214 - DNA, 25 bp, Homo sapien
ttctaagaagaacattgctcggcac

SEQ ID NO: 5120215 - DNA, 25 bp, Homo sapien
gccacaacttgtacaaactgtctga

SEQ ID NO: 5120216 - DNA, 25 bp, Homo sapien
ctgtctgaatgaattaagtggtgga

SEQ ID NO: 5120217 - DNA, 25 bp, Homo sapien
gaagtgaactgctccattctggggg

SEQ ID NO: 5120218 - DNA, 25 bp, Homo sapien
gtgaactgctccattctgggggtgt

SEQ ID NO: 5120219 - DNA, 25 bp, Homo sapien
aagtgaactgctccattctgggggt

SEQ ID NO: 5120220 - DNA, 25 bp, Homo sapien
agtgaactgctccattctgggggtg

SEQ ID NO: 5120221 - DNA, 25 bp, Homo sapien
tgtgccagtttttgatgatcagaag

SEQ ID NO: 5120222 - DNA, 25 bp, Homo sapien
tttgatgatcagaagtgtaagcatg

SEQ ID NO: 5120223 - DNA, 25 bp, Homo sapien
gaaggatcagtgaagagttgtgcca

SEQ ID NO: 5120224 - DNA, 25 bp, Homo sapien
gatcagtgaagagttgtgccagttt

SEQ ID NO: 5120225 - DNA, 25 bp, Homo sapien
cttttgcccttgtccactctccaca

SEQ ID NO: 5120226 - DNA, 25 bp, Homo sapien
ttttgcccttgtccactctccacat

SEQ ID NO: 5120227 - DNA, 25 bp, Homo sapien
ttccttttcctcttcctgacagcat

SEQ ID NO: 5120228 - DNA, 25 bp, Homo sapien
tcttccttttcctcttcctgacagc

SEQ ID NO: 5120229 - DNA, 25 bp, Homo sapien
agtcttccttttcctcttcctgaca

SEQ ID NO: 5120230 - DNA, 25 bp, Homo sapien
tatttatcagtcttccttttcctct

SEQ ID NO: 5120231 - DNA, 25 bp, Homo sapien
aatcaggatgtcagattgtgttgga

SEQ ID NO: 5120232 - DNA, 25 bp, Homo sapien
ttgtgttggattagtcttccagcct

SEQ ID NO: 5120233 - DNA, 25 bp, Homo sapien
gccttcactgaggtctacagtatag

SEQ ID NO: 5120234 - DNA, 25 bp, Homo sapien
gagggtggaacataaaggtgattgg

SEQ ID NO: 5120235 - DNA, 25 bp, Homo sapien
ttgggtggaaaggatgtagtcactc

SEQ ID NO: 5120236 - DNA, 25 bp, Homo sapien
gggtggaaaggatgtagtcactcaa

SEQ ID NO: 5120237 - DNA, 25 bp, Homo sapien
ggtggaaaggatgtagtcactcaaa

SEQ ID NO: 5120238 - DNA, 25 bp, Homo sapien
ctgttgggtggaaaggatgtagtca

SEQ ID NO: 5120239 - DNA, 25 bp, Homo sapien
tgcagcttgtcctagaaccatgcaa

SEQ ID NO: 5120240 - DNA, 25 bp, Homo sapien
caagagggaccattgaagctgaagg

SEQ ID NO: 5120241 - DNA, 25 bp, Homo sapien
aaaccatgacgaagaaggcctgcag

SEQ ID NO: 5120242 - DNA, 25 bp, Homo sapien
tgctgaaaccatgacgaagaaggcc

SEQ ID NO: 5120243 - DNA, 25 bp, Homo sapien
gcagaacccatggtccttgaaggag

SEQ ID NO: 5120244 - DNA, 25 bp, Homo sapien
agagggggtactgttgcagaaccca

SEQ ID NO: 5120245 - DNA, 25 bp, Homo sapien
aggagtgcatctaaatccagaggtg

SEQ ID NO: 5120246 - DNA, 25 bp, Homo sapien
ctgggagtgccatcaaggagggccc

SEQ ID NO: 5120247 - DNA, 25 bp, Homo sapien
ccactagcatcagtgcgtgtgttca

SEQ ID NO: 5120248 - DNA, 25 bp, Homo sapien
tagtccactagcatcagtgcgtgtg

SEQ ID NO: 5120249 - DNA, 25 bp, Homo sapien
ctgtttggtatcctagtccactagc

SEQ ID NO: 5120250 - DNA, 25 bp, Homo sapien
ggtatcctagtccactagcatcagt

SEQ ID NO: 5120251 - DNA, 25 bp, Homo sapien
ccagagtgctgcaaaggtagtgact

SEQ ID NO: 5120252 - DNA, 25 bp, Homo sapien
gacccggagctgaatcgccggagtc

SEQ ID NO: 5120253 - DNA, 25 bp, Homo sapien
catgacaaccgcgttaccctgcggg

SEQ ID NO: 5120254 - DNA, 25 bp, Homo sapien
aggtgccgtgtccatgacaaccgcg

SEQ ID NO: 5120255 - DNA, 25 bp, Homo sapien
cctgggtctccgcctcactcggggc

SEQ ID NO: 5120256 - DNA, 25 bp, Homo sapien
tgggtctccgcctcactcggggctg

SEQ ID NO: 5120257 - DNA, 25 bp, Homo sapien
tctccgcctcactcggggctggaag

SEQ ID NO: 5120258 - DNA, 25 bp, Homo sapien
ggtctccgcctcactcggggctgga

SEQ ID NO: 5120259 - DNA, 25 bp, Homo sapien
tggagaggcggcggcagggacaagg

SEQ ID NO: 5120260 - DNA, 25 bp, Homo sapien
ctggagaggcggcggcagggacaag

SEQ ID NO: 5120261 - DNA, 25 bp, Homo sapien
gagaggcggcggcagggacaagggc

SEQ ID NO: 5120262 - DNA, 25 bp, Homo sapien
gaggcggcggcagggacaagggcag

SEQ ID NO: 5120263 - DNA, 25 bp, Homo sapien
cagcagctggagtggtaatcacaga

SEQ ID NO: 5120264 - DNA, 25 bp, Homo sapien
tgggtcggtgggagtttctcgcctc

SEQ ID NO: 5120265 - DNA, 25 bp, Homo sapien
tcctcctctttctcgcccgttccca

SEQ ID NO: 5120266 - DNA, 25 bp, Homo sapien
ctctgtgggtcggtgggagtttctc

SEQ ID NO: 5120267 - DNA, 25 bp, Homo sapien
gaaagggatgcagagctgtgctcta

SEQ ID NO: 5120268 - DNA, 25 bp, Homo sapien
cagagctgtgctctagggcgagtgg

SEQ ID NO: 5120269 - DNA, 25 bp, Homo sapien
aagaagagatggagacaagaggaaa

SEQ ID NO: 5120270 - DNA, 25 bp, Homo sapien
agacaagaggaaagggatgcagagc

SEQ ID NO: 5120271 - DNA, 25 bp, Homo sapien
gaacccctgaatccggacagttgta

SEQ ID NO: 5120272 - DNA, 25 bp, Homo sapien
ccctgaatccggacagttgtagcag

SEQ ID NO: 5120273 - DNA, 25 bp, Homo sapien
cccctgaatccggacagttgtagca

SEQ ID NO: 5120274 - DNA, 25 bp, Homo sapien
aacccctgaatccggacagttgtag

SEQ ID NO: 5120275 - DNA, 25 bp, Homo sapien
gaaatttgagtcttgtatacacttc

SEQ ID NO: 5120276 - DNA, 25 bp, Homo sapien
tatcaacgcctgaagaaacagaatg

SEQ ID NO: 5120277 - DNA, 25 bp, Homo sapien
tagttaagggacattgctacttcct

SEQ ID NO: 5120278 - DNA, 25 bp, Homo sapien
aaacagaatgaagtggtaaactcta

SEQ ID NO: 5120279 - DNA, 25 bp, Homo sapien
tggattccagactactgccagcact

SEQ ID NO: 5120280 - DNA, 25 bp, Homo sapien
cctccagttcatgctgtgggctaga

SEQ ID NO: 5120281 - DNA, 25 bp, Homo sapien
gaaggaattactgtgggcccagcaa

SEQ ID NO: 5120282 - DNA, 25 bp, Homo sapien
tagaaaaatggaaggtgcggctcct

SEQ ID NO: 5120283 - DNA, 25 bp, Homo sapien
ttgacgtcataacccagagacctca

SEQ ID NO: 5120284 - DNA, 25 bp, Homo sapien
ttctcttgttgacgtcataacccag

SEQ ID NO: 5120285 - DNA, 25 bp, Homo sapien
tcttgttgacgtcataacccagaga

SEQ ID NO: 5120286 - DNA, 25 bp, Homo sapien
tcctttctcttgttgacgtcataac

SEQ ID NO: 5120287 - DNA, 25 bp, Homo sapien
caaggagactgtttccgttgctatg

SEQ ID NO: 5120288 - DNA, 25 bp, Homo sapien
gctaaagtccttggacaccctgctg

SEQ ID NO: 5120289 - DNA, 25 bp, Homo sapien
tattgcaggcataaaacaagtgtgc

SEQ ID NO: 5120290 - DNA, 25 bp, Homo sapien
gcttacacaccttgcctcttttgga

SEQ ID NO: 5120291 - DNA, 25 bp, Homo sapien
acagaacgtccttcaatggggggtg

SEQ ID NO: 5120292 - DNA, 25 bp, Homo sapien
caacagaacgtccttcaatgggggg

SEQ ID NO: 5120293 - DNA, 25 bp, Homo sapien
aaatctgctcgatagcaaggccata

SEQ ID NO: 5120294 - DNA, 25 bp, Homo sapien
tctcaaaatctgctcgatagcaagg

SEQ ID NO: 5120295 - DNA, 25 bp, Homo sapien
tctgctcgatagcaaggccatatct

SEQ ID NO: 5120296 - DNA, 25 bp, Homo sapien
cgatagcaaggccatatctctggat

SEQ ID NO: 5120297 - DNA, 25 bp, Homo sapien
ctaaaaggttcggcacatttcagtt

SEQ ID NO: 5120298 - DNA, 25 bp, Homo sapien
tcagttgcagaagtataaagcctag

SEQ ID NO: 5120299 - DNA, 25 bp, Homo sapien
taaaaggttcggcacatttcagttg

SEQ ID NO: 5120300 - DNA, 25 bp, Homo sapien
agttgcagaagtataaagcctagtt

SEQ ID NO: 5120301 - DNA, 25 bp, Homo sapien
caattttcaatgaccgggttttcag

SEQ ID NO: 5120302 - DNA, 25 bp, Homo sapien
tcaatgaccgggttttcagcaatgt

SEQ ID NO: 5120303 - DNA, 25 bp, Homo sapien
ccataattcccttcctgaacaagac

SEQ ID NO: 5120304 - DNA, 25 bp, Homo sapien
aattcccttcctgaacaagacaatc

SEQ ID NO: 5120305 - DNA, 25 bp, Homo sapien
ggcaggattttgacctgtgcacaca

SEQ ID NO: 5120306 - DNA, 25 bp, Homo sapien
cactgtggataatccactggcagga

SEQ ID NO: 5120307 - DNA, 25 bp, Homo sapien
tgtgcacacatgacgaatttcaccc

SEQ ID NO: 5120308 - DNA, 25 bp, Homo sapien
cctgtgaagatcctgctatgggcat

SEQ ID NO: 5120309 - DNA, 25 bp, Homo sapien
tcagagacaagtgcagaaccgggtg

SEQ ID NO: 5120310 - DNA, 25 bp, Homo sapien
taaagagaagagtatcacatggcgg

SEQ ID NO: 5120311 - DNA, 25 bp, Homo sapien
aattatagccagaaggtagtgcacc

SEQ ID NO: 5120312 - DNA, 25 bp, Homo sapien
gaattcaaatagctccaggccgatg

SEQ ID NO: 5120313 - DNA, 25 bp, Homo sapien
tcaggaacaggaataatggtcaaca

SEQ ID NO: 5120314 - DNA, 25 bp, Homo sapien
tctgcataggatactagctgtaggt

SEQ ID NO: 5120315 - DNA, 25 bp, Homo sapien
gcagttgcaaagaaagctctcgcct

SEQ ID NO: 5120316 - DNA, 25 bp, Homo sapien
tagcagaaatgtgcaaagcagttgc

SEQ ID NO: 5120317 - DNA, 25 bp, Homo sapien
tcatgactgtcctggacttatcttc

SEQ ID NO: 5120318 - DNA, 25 bp, Homo sapien
tgtcctggacttatcttccccagta

SEQ ID NO: 5120319 - DNA, 25 bp, Homo sapien
gtcctggacttatcttccccagtac

SEQ ID NO: 5120320 - DNA, 25 bp, Homo sapien
gactgtcctggacttatcttcccca

SEQ ID NO: 5120321 - DNA, 25 bp, Homo sapien
tcacacacaaaaggcatgtgcatgc

SEQ ID NO: 5120322 - DNA, 25 bp, Homo sapien
cagagaatgtttcagttgttcacac

SEQ ID NO: 5120323 - DNA, 25 bp, Homo sapien
tatgcaaggtggatgtgtccacccc

SEQ ID NO: 5120324 - DNA, 25 bp, Homo sapien
caaacagtggaagttctgtgcagct

SEQ ID NO: 5120325 - DNA, 25 bp, Homo sapien
accaatgccagttgcagagtatgag

SEQ ID NO: 5120326 - DNA, 25 bp, Homo sapien
caaccttgcagggtatgtacatact

SEQ ID NO: 5120327 - DNA, 25 bp, Homo sapien
tcactccttaaccaatgccagttgc

SEQ ID NO: 5120328 - DNA, 25 bp, Homo sapien
tggctcgaatcaggacaaccttgca

SEQ ID NO: 5120329 - DNA, 25 bp, Homo sapien
ggttcaacatcaaaatcacacatcc

SEQ ID NO: 5120330 - DNA, 25 bp, Homo sapien
ttatcctgaaaagccttgcctgaag

SEQ ID NO: 5120331 - DNA, 25 bp, Homo sapien
gcctctgttctgggaccactgctcc

SEQ ID NO: 5120332 - DNA, 25 bp, Homo sapien
cccttatcctgaaaagccttgcctg

SEQ ID NO: 5120333 - DNA, 25 bp, Homo sapien
tactgacatccttaacctgcacctt

SEQ ID NO: 5120334 - DNA, 25 bp, Homo sapien
ctgacatccttaacctgcaccttca

SEQ ID NO: 5120335 - DNA, 25 bp, Homo sapien
aaatactgacatccttaacctgcac

SEQ ID NO: 5120336 - DNA, 25 bp, Homo sapien
aatactgacatccttaacctgcacc

SEQ ID NO: 5120337 - DNA, 25 bp, Homo sapien
cctacctctgcacgtatgatgttga

SEQ ID NO: 5120338 - DNA, 25 bp, Homo sapien
gttctatagcagcacaatagcccag

SEQ ID NO: 5120339 - DNA, 25 bp, Homo sapien
tgtggagataattcacctacctctg

SEQ ID NO: 5120340 - DNA, 25 bp, Homo sapien
gcctgtcattatcatagagctgtgg

SEQ ID NO: 5120341 - DNA, 25 bp, Homo sapien
agcctttccactgttagcgtccgga

SEQ ID NO: 5120342 - DNA, 25 bp, Homo sapien
tttccactgttagcgtccggatttc

SEQ ID NO: 5120343 - DNA, 25 bp, Homo sapien
tgataggtgaagttgccgaagtcat

SEQ ID NO: 5120344 - DNA, 25 bp, Homo sapien
cactgttagcgtccggatttccaaa

SEQ ID NO: 5120345 - DNA, 25 bp, Homo sapien
tcctggaatatatgagtgagcccat

SEQ ID NO: 5120346 - DNA, 25 bp, Homo sapien
taggttaaggatgtcaagatggaga

SEQ ID NO: 5120347 - DNA, 25 bp, Homo sapien
cagtttaagctgaaatcggagggat

SEQ ID NO: 5120348 - DNA, 25 bp, Homo sapien
gaaggagtagagttaagattcatcg

SEQ ID NO: 5120349 - DNA, 25 bp, Homo sapien
gatgtgctatgatttagataagcta

SEQ ID NO: 5120350 - DNA, 25 bp, Homo sapien
tttaacacataaggctctataagtg

SEQ ID NO: 5120351 - DNA, 25 bp, Homo sapien
tagataagctaaattcaagggtaaa

SEQ ID NO: 5120352 - DNA, 25 bp, Homo sapien
aggctctataagtgtaatattgtgc

SEQ ID NO: 5120353 - DNA, 25 bp, Homo sapien
atagctgtgatttgcagtaggtggt

SEQ ID NO: 5120354 - DNA, 25 bp, Homo sapien
ctttaattatgtgatctatcttttt

SEQ ID NO: 5120355 - DNA, 25 bp, Homo sapien
catgagacttcctgcttattggagg

SEQ ID NO: 5120356 - DNA, 25 bp, Homo sapien
ggaggagtcagagaaaattcacaca

SEQ ID NO: 5120357 - DNA, 25 bp, Homo sapien
gaaaacgaggcagactaaaagagaa

SEQ ID NO: 5120358 - DNA, 25 bp, Homo sapien
cacttcctgtgtcaaaggtactgga

SEQ ID NO: 5120359 - DNA, 25 bp, Homo sapien
atttcagttggtataggacttcaga

SEQ ID NO: 5120360 - DNA, 25 bp, Homo sapien
gcctcaagtttttactagtatgaat

SEQ ID NO: 5120361 - DNA, 25 bp, Homo sapien
taggacttcagaataatgtatgatt

SEQ ID NO: 5120362 - DNA, 25 bp, Homo sapien
cagttggtataggacttcagaataa

SEQ ID NO: 5120363 - DNA, 25 bp, Homo sapien
aggcctgcttctctcgaagtgccaa

SEQ ID NO: 5120364 - DNA, 25 bp, Homo sapien
gatatagtgtaagaagaggtcatca

SEQ ID NO: 5120365 - DNA, 25 bp, Homo sapien
tcgaagtgccaatctcattcacgtg

SEQ ID NO: 5120366 - DNA, 25 bp, Homo sapien
cgtgctcatgacagcgccgtgcatt

SEQ ID NO: 5120367 - DNA, 25 bp, Homo sapien
cattcatggtaaaagtggccaccga

SEQ ID NO: 5120368 - DNA, 25 bp, Homo sapien
gacagtaatgcgacaaacgttcacc

SEQ ID NO: 5120369 - DNA, 25 bp, Homo sapien
gaggttttgcaagcctacagtgacg

SEQ ID NO: 5120370 - DNA, 25 bp, Homo sapien
ccgagaggcaataagggtcagtcca

SEQ ID NO: 5120371 - DNA, 25 bp, Homo sapien
tgtcgatggagaatgacagaaatcc

SEQ ID NO: 5120372 - DNA, 25 bp, Homo sapien
ctgcagagcatacagaaagttatgg

SEQ ID NO: 5120373 - DNA, 25 bp, Homo sapien
taaaagcccagagtcttgtgacaga

SEQ ID NO: 5120374 - DNA, 25 bp, Homo sapien
tctattttccaacgataatctgcct

SEQ ID NO: 5120375 - DNA, 25 bp, Homo sapien
tattggttgttcctggggcagactg

SEQ ID NO: 5120376 - DNA, 25 bp, Homo sapien
cttcttattggttgttcctggggca

SEQ ID NO: 5120377 - DNA, 25 bp, Homo sapien
cttattggttgttcctggggcagac

SEQ ID NO: 5120378 - DNA, 25 bp, Homo sapien
cctggggcagactgtttcaaccaca

SEQ ID NO: 5120379 - DNA, 25 bp, Homo sapien
atacctcctgaattcctggcagcat

SEQ ID NO: 5120380 - DNA, 25 bp, Homo sapien
caaatacctcctgaattcctggcag

SEQ ID NO: 5120381 - DNA, 25 bp, Homo sapien
aaaccaaatacctcctgaattcctg

SEQ ID NO: 5120382 - DNA, 25 bp, Homo sapien
caagaaaaccaaatacctcctgaat

SEQ ID NO: 5120383 - DNA, 25 bp, Homo sapien
caagttgggtgttgattacatttga

SEQ ID NO: 5120384 - DNA, 25 bp, Homo sapien
tgaataatgtaatgtgtccctgtct

SEQ ID NO: 5120385 - DNA, 25 bp, Homo sapien
tgtccctgtcttcagcaaaaccatt

SEQ ID NO: 5120386 - DNA, 25 bp, Homo sapien
tgcaaatggatacaagttgggtgtt

SEQ ID NO: 5120387 - DNA, 25 bp, Homo sapien
tctctaagggtaacaacaaatattc

SEQ ID NO: 5120388 - DNA, 25 bp, Homo sapien
acaaatattcttgaccagtaatacc

SEQ ID NO: 5120389 - DNA, 25 bp, Homo sapien
cagtaatacccactggcctctcctg

SEQ ID NO: 5120390 - DNA, 25 bp, Homo sapien
gcttcctctgcatggagtgttttct

SEQ ID NO: 5120391 - DNA, 25 bp, Homo sapien
tgttgttcaattcgagaaaggaaaa

SEQ ID NO: 5120392 - DNA, 25 bp, Homo sapien
tcctcaaattgttgttcaattcgag

SEQ ID NO: 5120393 - DNA, 25 bp, Homo sapien
gttctgccacctctcatagaaaagg

SEQ ID NO: 5120394 - DNA, 25 bp, Homo sapien
agtagtacgttattatctctggcca

SEQ ID NO: 5120395 - DNA, 25 bp, Homo sapien
tcaacatcagtaacatccaacgagg

SEQ ID NO: 5120396 - DNA, 25 bp, Homo sapien
gcagtccagaactgagatggtggtt

SEQ ID NO: 5120397 - DNA, 25 bp, Homo sapien
taacatccaacgaggcagtccagaa

SEQ ID NO: 5120398 - DNA, 25 bp, Homo sapien
tcaagtgtcaacatcagtaacatcc

SEQ ID NO: 5120399 - DNA, 25 bp, Homo sapien
caagacaactgatgtggctgcataa

SEQ ID NO: 5120400 - DNA, 25 bp, Homo sapien
ttgcctgccagaagtcataaagcct

SEQ ID NO: 5120401 - DNA, 25 bp, Homo sapien
gaatgcactgccatattgtcaagct

SEQ ID NO: 5120402 - DNA, 25 bp, Homo sapien
tcttcatggatagaatagccagcct

SEQ ID NO: 5120403 - DNA, 25 bp, Homo sapien
agagaaactgtaaaacttctttgca

SEQ ID NO: 5120404 - DNA, 25 bp, Homo sapien
aaacttctttgcaaaactgtctaga

SEQ ID NO: 5120405 - DNA, 25 bp, Homo sapien
tctttgcaaaactgtctagaaatgt

SEQ ID NO: 5120406 - DNA, 25 bp, Homo sapien
tttgcaaaactgtctagaaatgtca

SEQ ID NO: 5120407 - DNA, 25 bp, Homo sapien
cttgtttgcgcacatcctctacagc

SEQ ID NO: 5120408 - DNA, 25 bp, Homo sapien
ccttagcgatctgttcacccttttc

SEQ ID NO: 5120409 - DNA, 25 bp, Homo sapien
tacagaggcagctagtacatgggct

SEQ ID NO: 5120410 - DNA, 25 bp, Homo sapien
tgagatcttgactctccttagcgat

SEQ ID NO: 5120411 - DNA, 25 bp, Homo sapien
tctataaacgttaggtcttcccatc

SEQ ID NO: 5120412 - DNA, 25 bp, Homo sapien
tacattgactctataaacgttaggt

SEQ ID NO: 5120413 - DNA, 25 bp, Homo sapien
cattgactctataaacgttaggtct

SEQ ID NO: 5120414 - DNA, 25 bp, Homo sapien
tgactctataaacgttaggtcttcc

SEQ ID NO: 5120415 - DNA, 25 bp, Homo sapien
agacatgtttaaccgcagctggagc

SEQ ID NO: 5120416 - DNA, 25 bp, Homo sapien
agcaggtctcacatacacgagtcgg

SEQ ID NO: 5120417 - DNA, 25 bp, Homo sapien
caaagctctgattggaaagtcaggc

SEQ ID NO: 5120418 - DNA, 25 bp, Homo sapien
gaaagtcaggctactggtcccacag

SEQ ID NO: 5120419 - DNA, 25 bp, Homo sapien
ttgacctattatccaggtgtctttc

SEQ ID NO: 5120420 - DNA, 25 bp, Homo sapien
ccactggatgcttgacctattatcc

SEQ ID NO: 5120421 - DNA, 25 bp, Homo sapien
cccactggatgcttgacctattatc

SEQ ID NO: 5120422 - DNA, 25 bp, Homo sapien
ctacatctgtgtctaagatgttgct

SEQ ID NO: 5120423 - DNA, 25 bp, Homo sapien
tacatctgtgtctaagatgttgcta

SEQ ID NO: 5120424 - DNA, 25 bp, Homo sapien
acatctgtgtctaagatgttgctat

SEQ ID NO: 5120425 - DNA, 25 bp, Homo sapien
caatattatctgagctgactttttt

SEQ ID NO: 5120426 - DNA, 25 bp, Homo sapien
aggagctgctgtcaatattatctga

SEQ ID NO: 5120427 - DNA, 25 bp, Homo sapien
tcaatattatctgagctgacttttt

SEQ ID NO: 5120428 - DNA, 25 bp, Homo sapien
gacgtgatctgttgctggtgggctc

SEQ ID NO: 5120429 - DNA, 25 bp, Homo sapien
tggtgggctcctctaaactccccaa

SEQ ID NO: 5120430 - DNA, 25 bp, Homo sapien
ggtggacgtgatctgttgctggtgg

SEQ ID NO: 5120431 - DNA, 25 bp, Homo sapien
ctaaactccccaagacaccggtcat

SEQ ID NO: 5120432 - DNA, 25 bp, Homo sapien
tccaaaagctcgtggcaaaagcata

SEQ ID NO: 5120433 - DNA, 25 bp, Homo sapien
agagttccaaaagctcgtggcaaaa

SEQ ID NO: 5120434 - DNA, 25 bp, Homo sapien
tctagatggtttcccccaagagttc

SEQ ID NO: 5120435 - DNA, 25 bp, Homo sapien
atgtctagatggtttcccccaagag

SEQ ID NO: 5120436 - DNA, 25 bp, Homo sapien
caaagccagaggcaaacgtgggaga

SEQ ID NO: 5120437 - DNA, 25 bp, Homo sapien
caactcagctcggaggaagaggcaa

SEQ ID NO: 5120438 - DNA, 25 bp, Homo sapien
tagtgtgcacatggtaccctctgtt

SEQ ID NO: 5120439 - DNA, 25 bp, Homo sapien
gcagtcgcagggttctgagatccag

SEQ ID NO: 5120440 - DNA, 25 bp, Homo sapien
tcaaaagttgaagcacggtagactg

SEQ ID NO: 5120441 - DNA, 25 bp, Homo sapien
tgggctctcagatgttcaaaagttg

SEQ ID NO: 5120442 - DNA, 25 bp, Homo sapien
tgttcaaaagttgaagcacggtaga

SEQ ID NO: 5120443 - DNA, 25 bp, Homo sapien
tttgggctctcagatgttcaaaagt

SEQ ID NO: 5120444 - DNA, 25 bp, Homo sapien
caggcaattcatcccatgtgactac

SEQ ID NO: 5120445 - DNA, 25 bp, Homo sapien
gccatctcgcccggctttgtgtctg

SEQ ID NO: 5120446 - DNA, 25 bp, Homo sapien
cgcccgccatctcgcccggctttgt

SEQ ID NO: 5120447 - DNA, 25 bp, Homo sapien
catctcgcccggctttgtgtctgtg

SEQ ID NO: 5120448 - DNA, 25 bp, Homo sapien
cccgccatctcgcccggctttgtgt

SEQ ID NO: 5120449 - DNA, 25 bp, Homo sapien
gatcattaaccgtatggattttaat

SEQ ID NO: 5120450 - DNA, 25 bp, Homo sapien
cattaaccgtatggattttaattat

SEQ ID NO: 5120451 - DNA, 25 bp, Homo sapien
gcacagatcattaaccgtatggatt

SEQ ID NO: 5120452 - DNA, 25 bp, Homo sapien
aaggcacagatcattaaccgtatgg

SEQ ID NO: 5120453 - DNA, 25 bp, Homo sapien
ctttaccgacgagcaagggtcatct

SEQ ID NO: 5120454 - DNA, 25 bp, Homo sapien
gcccgtaccatggtgccgcgcttta

SEQ ID NO: 5120455 - DNA, 25 bp, Homo sapien
gtcatctgcaaactcggaggaggcg

SEQ ID NO: 5120456 - DNA, 25 bp, Homo sapien
ggaggaggcgatccgcatcgtctca

SEQ ID NO: 5120457 - DNA, 25 bp, Homo sapien
tccgccaggatgagtaagcgtgtca

SEQ ID NO: 5120458 - DNA, 25 bp, Homo sapien
ccgccaggatgagtaagcgtgtcac

SEQ ID NO: 5120459 - DNA, 25 bp, Homo sapien
gataaaagtctcatgacatctgcca

SEQ ID NO: 5120460 - DNA, 25 bp, Homo sapien
gggataaaagtctcatgacatctgc

SEQ ID NO: 5120461 - DNA, 25 bp, Homo sapien
aatgtgccatgcttccaaatcgctg

SEQ ID NO: 5120462 - DNA, 25 bp, Homo sapien
tgtgccatgcttccaaatcgctgca

SEQ ID NO: 5120463 - DNA, 25 bp, Homo sapien
atcgctgcaaactgtctcagtgaac

SEQ ID NO: 5120464 - DNA, 25 bp, Homo sapien
gcttccaaatcgctgcaaactgtct

SEQ ID NO: 5120465 - DNA, 25 bp, Homo sapien
aaggtcttgctcatttgtagcattt

SEQ ID NO: 5120466 - DNA, 25 bp, Homo sapien
catagttaagtttcaccatctcttt

SEQ ID NO: 5120467 - DNA, 25 bp, Homo sapien
gctacatagttaagtttcaccatct

SEQ ID NO: 5120468 - DNA, 25 bp, Homo sapien
aggtcttgctcatttgtagcatttt

SEQ ID NO: 5120469 - DNA, 25 bp, Homo sapien
catcccgacagtgaggatccttcag

SEQ ID NO: 5120470 - DNA, 25 bp, Homo sapien
tcccgacagtgaggatccttcagct

SEQ ID NO: 5120471 - DNA, 25 bp, Homo sapien
tctcatcccgacagtgaggatcctt

SEQ ID NO: 5120472 - DNA, 25 bp, Homo sapien
catctcatcccgacagtgaggatcc

SEQ ID NO: 5120473 - DNA, 25 bp, Homo sapien
gagaaatgcttgagaggccgtgtac

SEQ ID NO: 5120474 - DNA, 25 bp, Homo sapien
cttgagcagcattggagatgccggc

SEQ ID NO: 5120475 - DNA, 25 bp, Homo sapien
caaactcattaagagccgcagccag

SEQ ID NO: 5120476 - DNA, 25 bp, Homo sapien
tctcggttggctctcgtagcggcga

SEQ ID NO: 5120477 - DNA, 25 bp, Homo sapien
tggctcagcacagtgaacaatcctc

SEQ ID NO: 5120478 - DNA, 25 bp, Homo sapien
tatggctcagcacagtgaacaatcc

SEQ ID NO: 5120479 - DNA, 25 bp, Homo sapien
actgatgcttcacatatggctcagc

SEQ ID NO: 5120480 - DNA, 25 bp, Homo sapien
tgatgcttcacatatggctcagcac

SEQ ID NO: 5120481 - DNA, 25 bp, Homo sapien
ccagatgtcagtgtaggataaagaa

SEQ ID NO: 5120482 - DNA, 25 bp, Homo sapien
caccagatgtcagtgtaggataaag

SEQ ID NO: 5120483 - DNA, 25 bp, Homo sapien
agatgtcagtgtaggataaagaatg

SEQ ID NO: 5120484 - DNA, 25 bp, Homo sapien
ccaccagatgtcagtgtaggataaa

SEQ ID NO: 5120485 - DNA, 25 bp, Homo sapien
gtctgatgaaagaataattgtacca

SEQ ID NO: 5120486 - DNA, 25 bp, Homo sapien
atgtctgatgaaagaataattgtac

SEQ ID NO: 5120487 - DNA, 25 bp, Homo sapien
aaccacaaactggttatacactcaa

SEQ ID NO: 5120488 - DNA, 25 bp, Homo sapien
cacaaactggttatacactcaaatt

SEQ ID NO: 5120489 - DNA, 25 bp, Homo sapien
cgccggtcgtctcgcgtgcaggagg

SEQ ID NO: 5120490 - DNA, 25 bp, Homo sapien
agcgcctgccgcacggcgttgcact

SEQ ID NO: 5120491 - DNA, 25 bp, Homo sapien
agcgctgcgccgctgatgatgctgc

SEQ ID NO: 5120492 - DNA, 25 bp, Homo sapien
attattcatgtactcgctgagcagg

SEQ ID NO: 5120493 - DNA, 25 bp, Homo sapien
accaagacatgagaatggagatccc

SEQ ID NO: 5120494 - DNA, 25 bp, Homo sapien
tgagaatggagatcccaagacttac

SEQ ID NO: 5120495 - DNA, 25 bp, Homo sapien
tccaaaagagcaacacgattgcaga

SEQ ID NO: 5120496 - DNA, 25 bp, Homo sapien
agcaacacgattgcagaacagaatc

SEQ ID NO: 5120497 - DNA, 25 bp, Homo sapien
tcaacactcattccttgcttgcatg

SEQ ID NO: 5120498 - DNA, 25 bp, Homo sapien
ctactgtcaacactcattccttgct

SEQ ID NO: 5120499 - DNA, 25 bp, Homo sapien
actgtcaacactcattccttgcttg

SEQ ID NO: 5120500 - DNA, 25 bp, Homo sapien
tgtcaacactcattccttgcttgca

SEQ ID NO: 5120501 - DNA, 25 bp, Homo sapien
gaatctacaaaagcggatcccatag

SEQ ID NO: 5120502 - DNA, 25 bp, Homo sapien
ttttatgtggaatctacaaaagcgg

SEQ ID NO: 5120503 - DNA, 25 bp, Homo sapien
ccaaaatagctgcactaatttactt

SEQ ID NO: 5120504 - DNA, 25 bp, Homo sapien
acaaaagcggatcccatagaaacag

SEQ ID NO: 5120505 - DNA, 25 bp, Homo sapien
gaaggttatccttacatggcttgta

SEQ ID NO: 5120506 - DNA, 25 bp, Homo sapien
cacatgtagggctgtggtatttaca

SEQ ID NO: 5120507 - DNA, 25 bp, Homo sapien
tcaggaatggttggactatatcacc

SEQ ID NO: 5120508 - DNA, 25 bp, Homo sapien
actaagaggcgttgaccctatctga

SEQ ID NO: 5120509 - DNA, 25 bp, Homo sapien
aacttgcttgcctgtattgcctttg

SEQ ID NO: 5120510 - DNA, 25 bp, Homo sapien
gattcccatgtttggattaggagcc

SEQ ID NO: 5120511 - DNA, 25 bp, Homo sapien
tagggtactaccaactgaaaggtga

SEQ ID NO: 5120512 - DNA, 25 bp, Homo sapien
gaaaggtgaaacgaggcttcccaga

SEQ ID NO: 5120513 - DNA, 25 bp, Homo sapien
aagctagtgctggggatttggggca

SEQ ID NO: 5120514 - DNA, 25 bp, Homo sapien
tgctggggatttggggcagtaagac

SEQ ID NO: 5120515 - DNA, 25 bp, Homo sapien
agctagtgctggggatttggggcag

SEQ ID NO: 5120516 - DNA, 25 bp, Homo sapien
agtgctggggatttggggcagtaag

SEQ ID NO: 5120517 - DNA, 25 bp, Homo sapien
cacgggaaacggttgcagcatgcaa

SEQ ID NO: 5120518 - DNA, 25 bp, Homo sapien
ttacacgggaaacggttgcagcatg

SEQ ID NO: 5120519 - DNA, 25 bp, Homo sapien
ggaaacggttgcagcatgcaagtct

SEQ ID NO: 5120520 - DNA, 25 bp, Homo sapien
cgggaaacggttgcagcatgcaagt

SEQ ID NO: 5120521 - DNA, 25 bp, Homo sapien
tgcctcttgggtaagttgtccttta

SEQ ID NO: 5120522 - DNA, 25 bp, Homo sapien
ggcaagtatgcctcttgggttggta

SEQ ID NO: 5120523 - DNA, 25 bp, Homo sapien
tgtataagaacaataaatggtagac

SEQ ID NO: 5120524 - DNA, 25 bp, Homo sapien
gggatatggcaagtatgcctcttgg

SEQ ID NO: 5120525 - DNA, 25 bp, Homo sapien
aagctgtaggactgtaggaagccga

SEQ ID NO: 5120526 - DNA, 25 bp, Homo sapien
tgtaggaagccgagtttagagttga

SEQ ID NO: 5120527 - DNA, 25 bp, Homo sapien
ttggcatcaggatcatcagaggttc

SEQ ID NO: 5120528 - DNA, 25 bp, Homo sapien
gagtttagagttgacagcattggca

SEQ ID NO: 5120529 - DNA, 25 bp, Homo sapien
aggaagacatttatatgacagcaac

SEQ ID NO: 5120530 - DNA, 25 bp, Homo sapien
gaagacatttatatgacagcaacat

SEQ ID NO: 5120531 - DNA, 25 bp, Homo sapien
ggtcaatggctttacaaataggaag

SEQ ID NO: 5120532 - DNA, 25 bp, Homo sapien
gaggtcaatggctttacaaatagga

SEQ ID NO: 5120533 - DNA, 25 bp, Homo sapien
gccaagtccttgcttatcgctccag

SEQ ID NO: 5120534 - DNA, 25 bp, Homo sapien
gctaatggctttgctacctgaacaa

SEQ ID NO: 5120535 - DNA, 25 bp, Homo sapien
ggctgtaattcaccctcacgggcca

SEQ ID NO: 5120536 - DNA, 25 bp, Homo sapien
cacgggccagagaaacgacttatac

SEQ ID NO: 5120537 - DNA, 25 bp, Homo sapien
gaaaagctcactatcttaaatataa

SEQ ID NO: 5120538 - DNA, 25 bp, Homo sapien
aaaagctcactatcttaaatataat

SEQ ID NO: 5120539 - DNA, 25 bp, Homo sapien
caggccgggccagctttaaggtaga

SEQ ID NO: 5120540 - DNA, 25 bp, Homo sapien
tagacctcgcctactttttcgctaa

SEQ ID NO: 5120541 - DNA, 25 bp, Homo sapien
caagccttcaccgttgcaatcagaa

SEQ ID NO: 5120542 - DNA, 25 bp, Homo sapien
tgctgggtaggtttcagagctcttt

SEQ ID NO: 5120543 - DNA, 25 bp, Homo sapien
gactcctcggagtgacttgaacaga

SEQ ID NO: 5120544 - DNA, 25 bp, Homo sapien
tgagctctcttttagcgggtgccct

SEQ ID NO: 5120545 - DNA, 25 bp, Homo sapien
ggtgccctcccacgatgtgttacag

SEQ ID NO: 5120546 - DNA, 25 bp, Homo sapien
taatcacgagagaattctgacccac

SEQ ID NO: 5120547 - DNA, 25 bp, Homo sapien
tgcctgtttgaatatggccacaaac

SEQ ID NO: 5120548 - DNA, 25 bp, Homo sapien
tatataagacggaagcaaggagaac

SEQ ID NO: 5120549 - DNA, 25 bp, Homo sapien
tacccagaattttgtgggcaagcaa

SEQ ID NO: 5120550 - DNA, 25 bp, Homo sapien
aaaatgaatgggttacgagcatctc

SEQ ID NO: 5120551 - DNA, 25 bp, Homo sapien
gccagcaatcaccacaaggtcgctt

SEQ ID NO: 5120552 - DNA, 25 bp, Homo sapien
ctctctgaaggtgatagggtgtaca

SEQ ID NO: 5120553 - DNA, 25 bp, Homo sapien
agaagaaaacctagcagtgcctgcc

SEQ ID NO: 5120554 - DNA, 25 bp, Homo sapien
tgactgtctggaaggtgagctagcc

SEQ ID NO: 5120555 - DNA, 25 bp, Homo sapien
tgagcaagccaactgatcacgactc

SEQ ID NO: 5120556 - DNA, 25 bp, Homo sapien
tgaggaagattattaggcaccatac

SEQ ID NO: 5120557 - DNA, 25 bp, Homo sapien
gacctggttcttactctggccccta

SEQ ID NO: 5120558 - DNA, 25 bp, Homo sapien
tgttagcagagatgcacccaaaagg

SEQ ID NO: 5120559 - DNA, 25 bp, Homo sapien
gaaggccataggcataaatatcgaa

SEQ ID NO: 5120560 - DNA, 25 bp, Homo sapien
ggcagaaatgacgtggaccaggact

SEQ ID NO: 5120561 - DNA, 25 bp, Homo sapien
gaaggctcgtaattgctgtctgcac

SEQ ID NO: 5120562 - DNA, 25 bp, Homo sapien
taatgtcctagtgagtatgtaccct

SEQ ID NO: 5120563 - DNA, 25 bp, Homo sapien
ggataccacattgactccacctaga

SEQ ID NO: 5120564 - DNA, 25 bp, Homo sapien
cccaggccttccgagacaaggatac

SEQ ID NO: 5120565 - DNA, 25 bp, Homo sapien
cttgggccaaatccgagatcaatta

SEQ ID NO: 5120566 - DNA, 25 bp, Homo sapien
tagacctgcacattagaaccctggg

SEQ ID NO: 5120567 - DNA, 25 bp, Homo sapien
gaagctaacagagctaggacatctt

SEQ ID NO: 5120568 - DNA, 25 bp, Homo sapien
gtttccagcaaacgatgagtgggat

SEQ ID NO: 5120569 - DNA, 25 bp, Homo sapien
gatctaaagggagccgtttccagca

SEQ ID NO: 5120570 - DNA, 25 bp, Homo sapien
tttgtgtaaatactcccgccatggc

SEQ ID NO: 5120571 - DNA, 25 bp, Homo sapien
gctgtttctcgagcaccttgagcag

SEQ ID NO: 5120572 - DNA, 25 bp, Homo sapien
tacttgcatgtaagctccaggaaaa

SEQ ID NO: 5120573 - DNA, 25 bp, Homo sapien
gaatggaggacaagtacgtgctgct

SEQ ID NO: 5120574 - DNA, 25 bp, Homo sapien
catagcacagcatataggaggagat

SEQ ID NO: 5120575 - DNA, 25 bp, Homo sapien
gaatccttggatcgatgaatgcttg

SEQ ID NO: 5120576 - DNA, 25 bp, Homo sapien
tcaaacgctcctccctcgaggtgaa

SEQ ID NO: 5120577 - DNA, 25 bp, Homo sapien
tgtccagtcataccggcctctctgt

SEQ ID NO: 5120578 - DNA, 25 bp, Homo sapien
cagccagcaggaaaactgtccagca

SEQ ID NO: 5120579 - DNA, 25 bp, Homo sapien
tcttcacttccagtgctaaccaagc

SEQ ID NO: 5120580 - DNA, 25 bp, Homo sapien
taaccaagcataagcctcaacctct

SEQ ID NO: 5120581 - DNA, 25 bp, Homo sapien
ggctaatggtactccaaatctgata

SEQ ID NO: 5120582 - DNA, 25 bp, Homo sapien
cgccccacaatgatttatacggcta

SEQ ID NO: 5120583 - DNA, 25 bp, Homo sapien
tggtaaaaagtctctacatcctgct

SEQ ID NO: 5120584 - DNA, 25 bp, Homo sapien
cctttgctgatgaaagactgcatac

SEQ ID NO: 5120585 - DNA, 25 bp, Homo sapien
gctagtgctgggacagtctaagaga

SEQ ID NO: 5120586 - DNA, 25 bp, Homo sapien
tctgaagactcaggacaacgaaaca

SEQ ID NO: 5120587 - DNA, 25 bp, Homo sapien
tggactaatacacactctcctctct

SEQ ID NO: 5120588 - DNA, 25 bp, Homo sapien
tgattcttttacaagggtgagtttc

SEQ ID NO: 5120589 - DNA, 25 bp, Homo sapien
aagatttgattcttttacaagggtg

SEQ ID NO: 5120590 - DNA, 25 bp, Homo sapien
ctctagggtcaacaatgttaacgtg

SEQ ID NO: 5120591 - DNA, 25 bp, Homo sapien
gctcctcatgtcctccgctcttcct

SEQ ID NO: 5120592 - DNA, 25 bp, Homo sapien
gatcctttcaaaacgctcctcatgt

SEQ ID NO: 5120593 - DNA, 25 bp, Homo sapien
aacgctcctcatgtcctccgctctt

SEQ ID NO: 5120594 - DNA, 25 bp, Homo sapien
gccactggatcctttcaaaacgctc

SEQ ID NO: 5120595 - DNA, 25 bp, Homo sapien
ttatggccaacaggttggcacatca

SEQ ID NO: 5120596 - DNA, 25 bp, Homo sapien
caacaggttggcacatcagggaaag

SEQ ID NO: 5120597 - DNA, 25 bp, Homo sapien
gttggcacatcagggaaagacttcc

SEQ ID NO: 5120598 - DNA, 25 bp, Homo sapien
ccctgaagaacgtgtatttttgctg

SEQ ID NO: 5120599 - DNA, 25 bp, Homo sapien
tgcgcccggtcgttatcttgtccaa

SEQ ID NO: 5120600 - DNA, 25 bp, Homo sapien
actgcgcccggtcgttatcttgtcc

SEQ ID NO: 5120601 - DNA, 25 bp, Homo sapien
cggtcgttatcttgtccaagcacat

SEQ ID NO: 5120602 - DNA, 25 bp, Homo sapien
gcccggtcgttatcttgtccaagca

SEQ ID NO: 5120603 - DNA, 25 bp, Homo sapien
tattagtaggtgctaggctgtcaga

SEQ ID NO: 5120604 - DNA, 25 bp, Homo sapien
cattagagctgtgatgctgtcccct

SEQ ID NO: 5120605 - DNA, 25 bp, Homo sapien
aggtgataccattgaagcccagaca

SEQ ID NO: 5120606 - DNA, 25 bp, Homo sapien
tacccagatgtaagcggtggagaca

SEQ ID NO: 5120607 - DNA, 25 bp, Homo sapien
tgagaagacggactgataaaaagaa

SEQ ID NO: 5120608 - DNA, 25 bp, Homo sapien
aaaccacatgagaagacggactgat

SEQ ID NO: 5120609 - DNA, 25 bp, Homo sapien
cacatgagaagacggactgataaaa

SEQ ID NO: 5120610 - DNA, 25 bp, Homo sapien
atggtagtaactgcccgtgggctcc

SEQ ID NO: 5120611 - DNA, 25 bp, Homo sapien
ttacccccatgtcttgctcagtgta

SEQ ID NO: 5120612 - DNA, 25 bp, Homo sapien
tcagacggaagatgggcggtaggtc

SEQ ID NO: 5120613 - DNA, 25 bp, Homo sapien
gtaggtcagccatccctcctgggtc

SEQ ID NO: 5120614 - DNA, 25 bp, Homo sapien
gagagggcattactggaatttcact

SEQ ID NO: 5120615 - DNA, 25 bp, Homo sapien
gcttcggcagccacaatagtgactg

SEQ ID NO: 5120616 - DNA, 25 bp, Homo sapien
tactctcacttttcgggatgcaggc

SEQ ID NO: 5120617 - DNA, 25 bp, Homo sapien
ttaacaactggcaatcaaacccgct

SEQ ID NO: 5120618 - DNA, 25 bp, Homo sapien
tggcctttgcggaactggtttaatc

SEQ ID NO: 5120619 - DNA, 25 bp, Homo sapien
atgccaaaggcatgagtgtacaaca

SEQ ID NO: 5120620 - DNA, 25 bp, Homo sapien
tcttctgaacccaaactgatgctta

SEQ ID NO: 5120621 - DNA, 25 bp, Homo sapien
cacatccaaggcatggaaaacatga

SEQ ID NO: 5120622 - DNA, 25 bp, Homo sapien
gcaatgtcagctttttcccaggttc

SEQ ID NO: 5120623 - DNA, 25 bp, Homo sapien
tgaaagcctcaaagctacagtggca

SEQ ID NO: 5120624 - DNA, 25 bp, Homo sapien
caagatgcagtatgaacaggaccca

SEQ ID NO: 5120625 - DNA, 25 bp, Homo sapien
tcaatctcctggtgggtctctaact

SEQ ID NO: 5120626 - DNA, 25 bp, Homo sapien
gggacaactccacaaagagcatgat

SEQ ID NO: 5120627 - DNA, 25 bp, Homo sapien
caaagtgatatgcaagggacaactc

SEQ ID NO: 5120628 - DNA, 25 bp, Homo sapien
tgaaatgcttaatcacatgacccat

SEQ ID NO: 5120629 - DNA, 25 bp, Homo sapien
atcctcttgaaatgcttaatcacat

SEQ ID NO: 5120630 - DNA, 25 bp, Homo sapien
tcttgaaatgcttaatcacatgacc

SEQ ID NO: 5120631 - DNA, 25 bp, Homo sapien
tcctcttgaaatgcttaatcacatg

SEQ ID NO: 5120632 - DNA, 25 bp, Homo sapien
aaggaaaccatgtcatccccctagc

SEQ ID NO: 5120633 - DNA, 25 bp, Homo sapien
ctgtgttcaggacaagataaaaggg

SEQ ID NO: 5120634 - DNA, 25 bp, Homo sapien
cctggagaataagatatgcttcaca

SEQ ID NO: 5120635 - DNA, 25 bp, Homo sapien
aaagggagggagaataagacatgcc

SEQ ID NO: 5120636 - DNA, 25 bp, Homo sapien
tctttgcatcaatgaggaaatcacc

SEQ ID NO: 5120637 - DNA, 25 bp, Homo sapien
caatgaggaaatcacccatggcagc

SEQ ID NO: 5120638 - DNA, 25 bp, Homo sapien
taagtagactttctattgtaaatgc

SEQ ID NO: 5120639 - DNA, 25 bp, Homo sapien
tcacccatggcagcagttctttcaa

SEQ ID NO: 5120640 - DNA, 25 bp, Homo sapien
ttatcaggcagccatattgtcttcc

SEQ ID NO: 5120641 - DNA, 25 bp, Homo sapien
tgcacaggagaacaataatcatctg

SEQ ID NO: 5120642 - DNA, 25 bp, Homo sapien
gcatctcacagcgtcccagacacag

SEQ ID NO: 5120643 - DNA, 25 bp, Homo sapien
tcacgccagctagcaaattcaccag

SEQ ID NO: 5120644 - DNA, 25 bp, Homo sapien
ttgataagactaatctgtgtcctgg

SEQ ID NO: 5120645 - DNA, 25 bp, Homo sapien
taacagaaattacagtgcttagtag

SEQ ID NO: 5120646 - DNA, 25 bp, Homo sapien
gcttagtaggagctcccatggtatt

SEQ ID NO: 5120647 - DNA, 25 bp, Homo sapien
gcgcccagccggactcatttgataa

SEQ ID NO: 5120648 - DNA, 25 bp, Homo sapien
gccaccgagctagcatttactattt

SEQ ID NO: 5120649 - DNA, 25 bp, Homo sapien
tgttagcatccctacatacctcaca

SEQ ID NO: 5120650 - DNA, 25 bp, Homo sapien
tacatacctcacaaagtaatttctt

SEQ ID NO: 5120651 - DNA, 25 bp, Homo sapien
ctgtgggaaagccaccgagctagca

SEQ ID NO: 5120652 - DNA, 25 bp, Homo sapien
aatttcacatccagcaaactaagct

SEQ ID NO: 5120653 - DNA, 25 bp, Homo sapien
actctacaagcgagaaaagaatggg

SEQ ID NO: 5120654 - DNA, 25 bp, Homo sapien
gcgagaaaagaatgggggccaacat

SEQ ID NO: 5120655 - DNA, 25 bp, Homo sapien
agaaactctacaagcgagaaaagaa

SEQ ID NO: 5120656 - DNA, 25 bp, Homo sapien
tggatggagactaactttgacaggt

SEQ ID NO: 5120657 - DNA, 25 bp, Homo sapien
ggtttcagaagatcgaactactccg

SEQ ID NO: 5120658 - DNA, 25 bp, Homo sapien
taagcctcagtaggcaatgcgatca

SEQ ID NO: 5120659 - DNA, 25 bp, Homo sapien
aaattaggtgcatggctaactagaa

SEQ ID NO: 5120660 - DNA, 25 bp, Homo sapien
tatcaatgtattccaacatgcaggg

SEQ ID NO: 5120661 - DNA, 25 bp, Homo sapien
tgcagggttgtaactaagcagatac

SEQ ID NO: 5120662 - DNA, 25 bp, Homo sapien
cgcaagagaggatttctgaccacta

SEQ ID NO: 5120663 - DNA, 25 bp, Homo sapien
gcttcaattgtttctcgcaagagag

SEQ ID NO: 5120664 - DNA, 25 bp, Homo sapien
gatatgctgccatgctgccttgcca

SEQ ID NO: 5120665 - DNA, 25 bp, Homo sapien
tgccttgccatgatccgcctctgct

SEQ ID NO: 5120666 - DNA, 25 bp, Homo sapien
catttctgtacatgaaggatggcac

SEQ ID NO: 5120667 - DNA, 25 bp, Homo sapien
tgtaaagcaagcatcccgctgataa

SEQ ID NO: 5120668 - DNA, 25 bp, Homo sapien
gaagcattggccagattgtcctgga

SEQ ID NO: 5120669 - DNA, 25 bp, Homo sapien
tgtcaacatgagtcaagacacactc

SEQ ID NO: 5120670 - DNA, 25 bp, Homo sapien
ccttctggaggctactgtcaacatg

SEQ ID NO: 5120671 - DNA, 25 bp, Homo sapien
gagcaatatgatcaaaacagtttgg

SEQ ID NO: 5120672 - DNA, 25 bp, Homo sapien
caaagaacgagggaagcaccaggga

SEQ ID NO: 5120673 - DNA, 25 bp, Homo sapien
tcaaagaacgagggaagcaccaggg

SEQ ID NO: 5120674 - DNA, 25 bp, Homo sapien
caactcctgaacttctatgtgagtg

SEQ ID NO: 5120675 - DNA, 25 bp, Homo sapien
gctcctctaactggacactgcatgt

SEQ ID NO: 5120676 - DNA, 25 bp, Homo sapien
gagcccagtgcaatgtagcttctat

SEQ ID NO: 5120677 - DNA, 25 bp, Homo sapien
ccatcctttgagaaggtaggttaga

SEQ ID NO: 5120678 - DNA, 25 bp, Homo sapien
ttctctcaaccaattatcataagtg

SEQ ID NO: 5120679 - DNA, 25 bp, Homo sapien
ttcttcacgtgtcaggtagataacg

SEQ ID NO: 5120680 - DNA, 25 bp, Homo sapien
gagggttaggttccattctctcaac

SEQ ID NO: 5120681 - DNA, 25 bp, Homo sapien
caggtagataacgtcttcttcgagg

SEQ ID NO: 5120682 - DNA, 25 bp, Homo sapien
caaccctgtaacacacatgaacctg

SEQ ID NO: 5120683 - DNA, 25 bp, Homo sapien
tatagcccacaggtcaaatccatcc

SEQ ID NO: 5120684 - DNA, 25 bp, Homo sapien
catgaacctgtaacagccagaacac

SEQ ID NO: 5120685 - DNA, 25 bp, Homo sapien
aaactatgaatgagtcccctacacc

SEQ ID NO: 5120686 - DNA, 25 bp, Homo sapien
aatatgatctactttaattaaagcc

SEQ ID NO: 5120687 - DNA, 25 bp, Homo sapien
aaagaggatcatgaattggcttcat

SEQ ID NO: 5120688 - DNA, 25 bp, Homo sapien
tcagtcaacgtttgtgtgctgatac

SEQ ID NO: 5120689 - DNA, 25 bp, Homo sapien
ccagtttcagtcaacgtttgtgtgc

SEQ ID NO: 5120690 - DNA, 25 bp, Homo sapien
tatacgcccttaagagcacctcaga

SEQ ID NO: 5120691 - DNA, 25 bp, Homo sapien
agaaaaatatgatccggagccctga

SEQ ID NO: 5120692 - DNA, 25 bp, Homo sapien
aatagatgagtctaggtatacgccc

SEQ ID NO: 5120693 - DNA, 25 bp, Homo sapien
tgatttgtggccaatatgatcccca

SEQ ID NO: 5120694 - DNA, 25 bp, Homo sapien
tttggattttcacatgccccagaga

SEQ ID NO: 5120695 - DNA, 25 bp, Homo sapien
ttttggattttcacatgccccagag

SEQ ID NO: 5120696 - DNA, 25 bp, Homo sapien
acatgccccagagagtagatgcctt

SEQ ID NO: 5120697 - DNA, 25 bp, Homo sapien
gagagtagatgccttcattagccat

SEQ ID NO: 5120698 - DNA, 25 bp, Homo sapien
taaaagcagtctagccttaagacaa

SEQ ID NO: 5120699 - DNA, 25 bp, Homo sapien
gagcctgctattttcacttaaggga

SEQ ID NO: 5120700 - DNA, 25 bp, Homo sapien
actctgtggtattcaatggtctgcc

SEQ ID NO: 5120701 - DNA, 25 bp, Homo sapien
taatctaatctgttgactctgtggt

SEQ ID NO: 5120702 - DNA, 25 bp, Homo sapien
ctttggtttttgtaggcgtagtgca

SEQ ID NO: 5120703 - DNA, 25 bp, Homo sapien
ttttgtaggcgtagtgcagggcttt

SEQ ID NO: 5120704 - DNA, 25 bp, Homo sapien
cagcagaagtgagacggttccattt

SEQ ID NO: 5120705 - DNA, 25 bp, Homo sapien
tatcaccctcagagacagcagaagt

SEQ ID NO: 5120706 - DNA, 25 bp, Homo sapien
taagcttgtttagctgcttcatcca

SEQ ID NO: 5120707 - DNA, 25 bp, Homo sapien
ttgtttagctgcttcatccagtcca

SEQ ID NO: 5120708 - DNA, 25 bp, Homo sapien
ttagctgcttcatccagtccattct

SEQ ID NO: 5120709 - DNA, 25 bp, Homo sapien
gtttagctgcttcatccagtccatt

SEQ ID NO: 5120710 - DNA, 25 bp, Homo sapien
tgtccccatgtacctgtgactcaac

SEQ ID NO: 5120711 - DNA, 25 bp, Homo sapien
tgacaatacattggaatacaaaatc

SEQ ID NO: 5120712 - DNA, 25 bp, Homo sapien
tatccatatgagtcatgattttacc

SEQ ID NO: 5120713 - DNA, 25 bp, Homo sapien
cattctcaggtactgggagttcagg

SEQ ID NO: 5120714 - DNA, 25 bp, Homo sapien
cctgtgcatctgaataatacccact

SEQ ID NO: 5120715 - DNA, 25 bp, Homo sapien
cctggaaggtttacaagctgggtca

SEQ ID NO: 5120716 - DNA, 25 bp, Homo sapien
ggtcattagcgggttgcatatccat

SEQ ID NO: 5120717 - DNA, 25 bp, Homo sapien
cctcagaagtggggtctcagggtca

SEQ ID NO: 5120718 - DNA, 25 bp, Homo sapien
taattttggcgatggcagcagaaat

SEQ ID NO: 5120719 - DNA, 25 bp, Homo sapien
tgtaattttggcgatggcagcagaa

SEQ ID NO: 5120720 - DNA, 25 bp, Homo sapien
atctgtaattttggcgatggcagca

SEQ ID NO: 5120721 - DNA, 25 bp, Homo sapien
tttggcgatggcagcagaaatgttg

SEQ ID NO: 5120722 - DNA, 25 bp, Homo sapien
agtgccatttggcctaggcccctga

SEQ ID NO: 5120723 - DNA, 25 bp, Homo sapien
gtgccatttggcctaggcccctgaa

SEQ ID NO: 5120724 - DNA, 25 bp, Homo sapien
tgccatttggcctaggcccctgaac

SEQ ID NO: 5120725 - DNA, 25 bp, Homo sapien
gttcttctccgggatctgccacaag

SEQ ID NO: 5120726 - DNA, 25 bp, Homo sapien
aacccctgctctgaaaaacttgtag

SEQ ID NO: 5120727 - DNA, 25 bp, Homo sapien
catcagagtgcatgcttggaggtta

SEQ ID NO: 5120728 - DNA, 25 bp, Homo sapien
tgattataatgagaaccaacccctg

SEQ ID NO: 5120729 - DNA, 25 bp, Homo sapien
ctttccgtggcaccagtgacctgga

SEQ ID NO: 5120730 - DNA, 25 bp, Homo sapien
cagtgacctggatgctaaatttggc

SEQ ID NO: 5120731 - DNA, 25 bp, Homo sapien
aatttggcaccggatggtgctgcaa

SEQ ID NO: 5120732 - DNA, 25 bp, Homo sapien
aagcatcagtggcaacgctttccgt

SEQ ID NO: 5120733 - DNA, 25 bp, Homo sapien
ctaatgaggagcgaagctcagccat

SEQ ID NO: 5120734 - DNA, 25 bp, Homo sapien
gctaatgaggagcgaagctcagcca

SEQ ID NO: 5120735 - DNA, 25 bp, Homo sapien
ggctaatgaggagcgaagctcagcc

SEQ ID NO: 5120736 - DNA, 25 bp, Homo sapien
tggccaaagggatcaccacaactag

SEQ ID NO: 5120737 - DNA, 25 bp, Homo sapien
gaaagtaagtatggttctgccaact

SEQ ID NO: 5120738 - DNA, 25 bp, Homo sapien
tgctgagtctgcagatagtgaggct

SEQ ID NO: 5120739 - DNA, 25 bp, Homo sapien
tgttcacagatgtgcccctcatcag

SEQ ID NO: 5120740 - DNA, 25 bp, Homo sapien
catggagaggggtagagcaagaagt

SEQ ID NO: 5120741 - DNA, 25 bp, Homo sapien
tcatggagaggggtagagcaagaag

SEQ ID NO: 5120742 - DNA, 25 bp, Homo sapien
tggagaggggtagagcaagaagtac

SEQ ID NO: 5120743 - DNA, 25 bp, Homo sapien
tgtcctataccaccagagtgagaaa

SEQ ID NO: 5120744 - DNA, 25 bp, Homo sapien
tctgtcctataccaccagagtgaga

SEQ ID NO: 5120745 - DNA, 25 bp, Homo sapien
gatctgtcctataccaccagagtga

SEQ ID NO: 5120746 - DNA, 25 bp, Homo sapien
tcctataccaccagagtgagaaaac

SEQ ID NO: 5120747 - DNA, 25 bp, Homo sapien
tgtggaacaccagtaaactgcagga

SEQ ID NO: 5120748 - DNA, 25 bp, Homo sapien
agtgtggaacaccagtaaactgcag

SEQ ID NO: 5120749 - DNA, 25 bp, Homo sapien
gtggaacaccagtaaactgcaggaa

SEQ ID NO: 5120750 - DNA, 25 bp, Homo sapien
gaagtgtggaacaccagtaaactgc

SEQ ID NO: 5120751 - DNA, 25 bp, Homo sapien
tagcagtactaaggtatctgtgccc

SEQ ID NO: 5120752 - DNA, 25 bp, Homo sapien
tgagattggcgggacttagcagtac

SEQ ID NO: 5120753 - DNA, 25 bp, Homo sapien
tgtgcccatgcacaaaccagaagat

SEQ ID NO: 5120754 - DNA, 25 bp, Homo sapien
gaaatcactgtctaagaaactgtcc

SEQ ID NO: 5120755 - DNA, 25 bp, Homo sapien
cactgattcggcaaatgccattcct

SEQ ID NO: 5120756 - DNA, 25 bp, Homo sapien
tctcttggtaactggtatgcagcca

SEQ ID NO: 5120757 - DNA, 25 bp, Homo sapien
ccttcagctgtcaagaccagcaata

SEQ ID NO: 5120758 - DNA, 25 bp, Homo sapien
tacctcaggggtacatcaactctct

SEQ ID NO: 5120759 - DNA, 25 bp, Homo sapien
ctggtaagatgacggctagtatgga

SEQ ID NO: 5120760 - DNA, 25 bp, Homo sapien
cacattggctacctgactggtaaga

SEQ ID NO: 5120761 - DNA, 25 bp, Homo sapien
cattatagttctccaattaaagtgg

SEQ ID NO: 5120762 - DNA, 25 bp, Homo sapien
gggactactggaccctggctttgag

SEQ ID NO: 5120763 - DNA, 25 bp, Homo sapien
ttgccagcagctgatgtaagagatg

SEQ ID NO: 5120764 - DNA, 25 bp, Homo sapien
gatgacccagtggaaatcatgatca

SEQ ID NO: 5120765 - DNA, 25 bp, Homo sapien
tacttatatggcttatgttgccagc

SEQ ID NO: 5120766 - DNA, 25 bp, Homo sapien
atgacccagtggaaatcatgatcat

SEQ ID NO: 5120767 - DNA, 25 bp, Homo sapien
gacatgcatgctacagttcgtgata

SEQ ID NO: 5120768 - DNA, 25 bp, Homo sapien
catgctacagttcgtgatatcaagg

SEQ ID NO: 5120769 - DNA, 25 bp, Homo sapien
tgcagacatgcatgctacagttcgt

SEQ ID NO: 5120770 - DNA, 25 bp, Homo sapien
cagttcgtgatatcaaggccatgat

SEQ ID NO: 5120771 - DNA, 25 bp, Homo sapien
caaacacccagagcctatttagaaa

SEQ ID NO: 5120772 - DNA, 25 bp, Homo sapien
tctactcaatccaccaaacacccag

SEQ ID NO: 5120773 - DNA, 25 bp, Homo sapien
tgccgtgacaatctactcaatccac

SEQ ID NO: 5120774 - DNA, 25 bp, Homo sapien
gtccagggcactgaactctgctgta

SEQ ID NO: 5120775 - DNA, 25 bp, Homo sapien
gcatcattctcactatcattcccaa

SEQ ID NO: 5120776 - DNA, 25 bp, Homo sapien
tataagcatcattctcactatcatt

SEQ ID NO: 5120777 - DNA, 25 bp, Homo sapien
taagcatcattctcactatcattcc

SEQ ID NO: 5120778 - DNA, 25 bp, Homo sapien
agcatcattctcactatcattccca

SEQ ID NO: 5120779 - DNA, 25 bp, Homo sapien
taaaggtccgctagttgctgcaagg

SEQ ID NO: 5120780 - DNA, 25 bp, Homo sapien
gactaagattgtaaacttggactcg

SEQ ID NO: 5120781 - DNA, 25 bp, Homo sapien
aagaggcaggcatacggaattcaat

SEQ ID NO: 5120782 - DNA, 25 bp, Homo sapien
tctagaagtcattaagggtcaatca

SEQ ID NO: 5120783 - DNA, 25 bp, Homo sapien
ctgactggaccgagaaaggctgaca

SEQ ID NO: 5120784 - DNA, 25 bp, Homo sapien
agactgaaggtgagcctgactggac

SEQ ID NO: 5120785 - DNA, 25 bp, Homo sapien
ggcacttggtgatggctctacagta

SEQ ID NO: 5120786 - DNA, 25 bp, Homo sapien
gataattccacatcagtgtgagaga

SEQ ID NO: 5120787 - DNA, 25 bp, Homo sapien
actctcttcaatttcagggatcatg

SEQ ID NO: 5120788 - DNA, 25 bp, Homo sapien
ctctcttcaatttcagggatcatgt

SEQ ID NO: 5120789 - DNA, 25 bp, Homo sapien
tctcttcaatttcagggatcatgtc

SEQ ID NO: 5120790 - DNA, 25 bp, Homo sapien
ctcttcaatttcagggatcatgtct

SEQ ID NO: 5120791 - DNA, 25 bp, Homo sapien
tgtctccaagtatctaagtgtgtta

SEQ ID NO: 5120792 - DNA, 25 bp, Homo sapien
tggctgtcgagttgtttcaaatgtc

SEQ ID NO: 5120793 - DNA, 25 bp, Homo sapien
ccaaggatagtgaactggctgtcga

SEQ ID NO: 5120794 - DNA, 25 bp, Homo sapien
tcagaaacataggtgcctaggagag

SEQ ID NO: 5120795 - DNA, 25 bp, Homo sapien
gctccatagtttatggctggtttga

SEQ ID NO: 5120796 - DNA, 25 bp, Homo sapien
cactgattatcaaggtttgctatta

SEQ ID NO: 5120797 - DNA, 25 bp, Homo sapien
gattattagttgagctttgtgctat

SEQ ID NO: 5120798 - DNA, 25 bp, Homo sapien
tggacattccaaagtgccttataat

SEQ ID NO: 5120799 - DNA, 25 bp, Homo sapien
tgatgggccgctagcaagacaaata

SEQ ID NO: 5120800 - DNA, 25 bp, Homo sapien
gatgggccgctagcaagacaaataa

SEQ ID NO: 5120801 - DNA, 25 bp, Homo sapien
tgggccgctagcaagacaaataaag

SEQ ID NO: 5120802 - DNA, 25 bp, Homo sapien
aggaagagcttgtaccttctgaaac

SEQ ID NO: 5120803 - DNA, 25 bp, Homo sapien
tgtcatcttcactatgtttcttcat

SEQ ID NO: 5120804 - DNA, 25 bp, Homo sapien
atgtcatcttcactatgtttcttca

SEQ ID NO: 5120805 - DNA, 25 bp, Homo sapien
tcttcttcgtccagccaaaaccttg

SEQ ID NO: 5120806 - DNA, 25 bp, Homo sapien
accttgactctttgatgtgtggcca

SEQ ID NO: 5120807 - DNA, 25 bp, Homo sapien
cagagatgaggccacgtttgatgca

SEQ ID NO: 5120808 - DNA, 25 bp, Homo sapien
tcattaatatcccttggtctgtgtt

SEQ ID NO: 5120809 - DNA, 25 bp, Homo sapien
tgtctgaacaataaaaacgcccgct

SEQ ID NO: 5120810 - DNA, 25 bp, Homo sapien
ggaactcgactgtgaacactttgca

SEQ ID NO: 5120811 - DNA, 25 bp, Homo sapien
ggctctcgcttgtaggtctgctaga

SEQ ID NO: 5120812 - DNA, 25 bp, Homo sapien
cactttgcaaggttcagcagcgtgg

SEQ ID NO: 5120813 - DNA, 25 bp, Homo sapien
tagagtgtttacaaagacacaggcc

SEQ ID NO: 5120814 - DNA, 25 bp, Homo sapien
taagggctttaagtgacatctcaga

SEQ ID NO: 5120815 - DNA, 25 bp, Homo sapien
taagcaagagccacaacacatctcg

SEQ ID NO: 5120816 - DNA, 25 bp, Homo sapien
tctgaacggaactttgaaggaacca

SEQ ID NO: 5120817 - DNA, 25 bp, Homo sapien
catggtctggttttgccagtttcca

SEQ ID NO: 5120818 - DNA, 25 bp, Homo sapien
taaaggctaaaatcatcatggtctg

SEQ ID NO: 5120819 - DNA, 25 bp, Homo sapien
ggctaaaatcatcatggtctggttt

SEQ ID NO: 5120820 - DNA, 25 bp, Homo sapien
tcatggtctggttttgccagtttcc

SEQ ID NO: 5120821 - DNA, 25 bp, Homo sapien
tacagtgactattatcatacaagtc

SEQ ID NO: 5120822 - DNA, 25 bp, Homo sapien
aattttatatccgttacagtgacta

SEQ ID NO: 5120823 - DNA, 25 bp, Homo sapien
tgtatagggaattttatatccgtta

SEQ ID NO: 5120824 - DNA, 25 bp, Homo sapien
gggaattttatatccgttacagtga

SEQ ID NO: 5120825 - DNA, 25 bp, Homo sapien
tccagactagtgtttcctaaggccc

SEQ ID NO: 5120826 - DNA, 25 bp, Homo sapien
cactcttatatccttcccctacact

SEQ ID NO: 5120827 - DNA, 25 bp, Homo sapien
cccctacactcatcatacaaagaac

SEQ ID NO: 5120828 - DNA, 25 bp, Homo sapien
ccagactagtgtttcctaaggccct

SEQ ID NO: 5120829 - DNA, 25 bp, Homo sapien
tactgtggtcccatatctgtcggcc

SEQ ID NO: 5120830 - DNA, 25 bp, Homo sapien
gctgagctccactggtttatccggg

SEQ ID NO: 5120831 - DNA, 25 bp, Homo sapien
cagcactgaactgcagcaaaatcca

SEQ ID NO: 5120832 - DNA, 25 bp, Homo sapien
aacacattcagcagcgagcagcctg

SEQ ID NO: 5120833 - DNA, 25 bp, Homo sapien
gctacaagggccttctggtgatgtg

SEQ ID NO: 5120834 - DNA, 25 bp, Homo sapien
tttcataggagctgaaggctagcag

SEQ ID NO: 5120835 - DNA, 25 bp, Homo sapien
gctgtttgctatctatagtcaattc

SEQ ID NO: 5120836 - DNA, 25 bp, Homo sapien
gagctgtttgctatctatagtcaat

SEQ ID NO: 5120837 - DNA, 25 bp, Homo sapien
gttctttagtggcttgcctttacca

SEQ ID NO: 5120838 - DNA, 25 bp, Homo sapien
tgcctttaccactgtggtctggcag

SEQ ID NO: 5120839 - DNA, 25 bp, Homo sapien
aacctgatcctggaatacacgtggc

SEQ ID NO: 5120840 - DNA, 25 bp, Homo sapien
ctgatcctggaatacacgtggccat

SEQ ID NO: 5120841 - DNA, 25 bp, Homo sapien
taaatcctagtaggacactgatcgg

SEQ ID NO: 5120842 - DNA, 25 bp, Homo sapien
ggagtggtgataattctactccggg

SEQ ID NO: 5120843 - DNA, 25 bp, Homo sapien
cactgatcggtggagtggtgataat

SEQ ID NO: 5120844 - DNA, 25 bp, Homo sapien
tgcatccgcagatttgccaccagct

SEQ ID NO: 5120845 - DNA, 25 bp, Homo sapien
tagtctagagatacaagaactgcaa

SEQ ID NO: 5120846 - DNA, 25 bp, Homo sapien
caggatagtctagagatacaagaac

SEQ ID NO: 5120847 - DNA, 25 bp, Homo sapien
gatagtctagagatacaagaactgc

SEQ ID NO: 5120848 - DNA, 25 bp, Homo sapien
gaaacaggatagtctagagatacaa

SEQ ID NO: 5120849 - DNA, 25 bp, Homo sapien
tgactgcagaattccagtacccgca

SEQ ID NO: 5120850 - DNA, 25 bp, Homo sapien
caccgggacttggatggcttcccaa

SEQ ID NO: 5120851 - DNA, 25 bp, Homo sapien
actggatctcacaccaccgggactt

SEQ ID NO: 5120852 - DNA, 25 bp, Homo sapien
gcagaattccagtacccgcaagagg

SEQ ID NO: 5120853 - DNA, 25 bp, Homo sapien
cactctccgccaattcttctaaagg

SEQ ID NO: 5120854 - DNA, 25 bp, Homo sapien
cagctgtatggtatgtgcccacaga

SEQ ID NO: 5120855 - DNA, 25 bp, Homo sapien
tgaaattgtgactcccactctccgc

SEQ ID NO: 5120856 - DNA, 25 bp, Homo sapien
gtaaaatgccagctgtatggtatgt

SEQ ID NO: 5120857 - DNA, 25 bp, Homo sapien
acagctcttgtttacatctctgcca

SEQ ID NO: 5120858 - DNA, 25 bp, Homo sapien
tacctggtcttgctcaattagctag

SEQ ID NO: 5120859 - DNA, 25 bp, Homo sapien
tctgccatagcatgaataatattgg

SEQ ID NO: 5120860 - DNA, 25 bp, Homo sapien
cagggtaggcaccacattttatcta

SEQ ID NO: 5120861 - DNA, 25 bp, Homo sapien
cctactgactggagtggccttctcc

SEQ ID NO: 5120862 - DNA, 25 bp, Homo sapien
gtgctccagacatggtatgcatctc

SEQ ID NO: 5120863 - DNA, 25 bp, Homo sapien
tttttcacagactttgcctactgac

SEQ ID NO: 5120864 - DNA, 25 bp, Homo sapien
ccagacatggtatgcatctcagaag

SEQ ID NO: 5120865 - DNA, 25 bp, Homo sapien
tggcaaaccctcttcagaaatgata

SEQ ID NO: 5120866 - DNA, 25 bp, Homo sapien
cagacagcatcatccttacacgttt

SEQ ID NO: 5120867 - DNA, 25 bp, Homo sapien
gacattgacatagaaccatgaggca

SEQ ID NO: 5120868 - DNA, 25 bp, Homo sapien
gatgtgatatgccaatggcaaaccc

SEQ ID NO: 5120869 - DNA, 25 bp, Homo sapien
cagcctctaaagtaggaacagatat

SEQ ID NO: 5120870 - DNA, 25 bp, Homo sapien
tgcagcctctaaagtaggaacagat

SEQ ID NO: 5120871 - DNA, 25 bp, Homo sapien
tatgcagcctctaaagtaggaacag

SEQ ID NO: 5120872 - DNA, 25 bp, Homo sapien
ttatgcagcctctaaagtaggaaca

SEQ ID NO: 5120873 - DNA, 25 bp, Homo sapien
tcttcactacaccaggaatacaacc

SEQ ID NO: 5120874 - DNA, 25 bp, Homo sapien
aacctggactttgctcttgagaaat

SEQ ID NO: 5120875 - DNA, 25 bp, Homo sapien
tggactttgctcttgagaaatttca

SEQ ID NO: 5120876 - DNA, 25 bp, Homo sapien
tatcccaactctatcttcactacac

SEQ ID NO: 5120877 - DNA, 25 bp, Homo sapien
taattaacttttcttatatcatttc

SEQ ID NO: 5120878 - DNA, 25 bp, Homo sapien
gagggtttatcaagttcttccatgt

SEQ ID NO: 5120879 - DNA, 25 bp, Homo sapien
tatcaagttcttccatgttatatcc

SEQ ID NO: 5120880 - DNA, 25 bp, Homo sapien
cttccatgttatatccataattaac

SEQ ID NO: 5120881 - DNA, 25 bp, Homo sapien
aaacgtcttggatgccgaggcagcc

SEQ ID NO: 5120882 - DNA, 25 bp, Homo sapien
tggcacaggttagggaaacagcctc

SEQ ID NO: 5120883 - DNA, 25 bp, Homo sapien
aactgcatgggaaggcggcgttctc

SEQ ID NO: 5120884 - DNA, 25 bp, Homo sapien
gataatggacaaggcgacactggca

SEQ ID NO: 5120885 - DNA, 25 bp, Homo sapien
aataaagacactggtggagccgttg

SEQ ID NO: 5120886 - DNA, 25 bp, Homo sapien
taataaagacactggtggagccgtt

SEQ ID NO: 5120887 - DNA, 25 bp, Homo sapien
cttgccttttcacaatcatggacag

SEQ ID NO: 5120888 - DNA, 25 bp, Homo sapien
acaatcatggacagccgcagacctt

SEQ ID NO: 5120889 - DNA, 25 bp, Homo sapien
tttgtttatcacttgccttttcaca

SEQ ID NO: 5120890 - DNA, 25 bp, Homo sapien
ttttcacaatcatggacagccgcag

SEQ ID NO: 5120891 - DNA, 25 bp, Homo sapien
gaggcagctctccagagtcggccat

SEQ ID NO: 5120892 - DNA, 25 bp, Homo sapien
tggaggcagctctccagagtcggcc

SEQ ID NO: 5120893 - DNA, 25 bp, Homo sapien
ggaggcagctctccagagtcggcca

SEQ ID NO: 5120894 - DNA, 25 bp, Homo sapien
taggttggatcgttcatgtgactgc

SEQ ID NO: 5120895 - DNA, 25 bp, Homo sapien
ctggtgatgacattcgtgggcacat

SEQ ID NO: 5120896 - DNA, 25 bp, Homo sapien
catatataatacacaggcactctgc

SEQ ID NO: 5120897 - DNA, 25 bp, Homo sapien
tgagagtctaaggagcgctgtgcat

SEQ ID NO: 5120898 - DNA, 25 bp, Homo sapien
ctgcctgaaattctccaatgccaac

SEQ ID NO: 5120899 - DNA, 25 bp, Homo sapien
aaattctccaatgccaacctatcat

SEQ ID NO: 5120900 - DNA, 25 bp, Homo sapien
ctgaaattctccaatgccaacctat

SEQ ID NO: 5120901 - DNA, 25 bp, Homo sapien
tgcctgaaattctccaatgccaacc

SEQ ID NO: 5120902 - DNA, 25 bp, Homo sapien
gcaacctttgctacatgagggctaa

SEQ ID NO: 5120903 - DNA, 25 bp, Homo sapien
ctggtttaaggcaatgagtaaaggt

SEQ ID NO: 5120904 - DNA, 25 bp, Homo sapien
ggatcaaatccaggttctacactca

SEQ ID NO: 5120905 - DNA, 25 bp, Homo sapien
tccaattaattctttaggaaggaca

SEQ ID NO: 5120906 - DNA, 25 bp, Homo sapien
taggctacaaggagttctagagagc

SEQ ID NO: 5120907 - DNA, 25 bp, Homo sapien
tatttcacagcacaagactcacgtc

SEQ ID NO: 5120908 - DNA, 25 bp, Homo sapien
cttgtgtgaattctcggaaagctct

SEQ ID NO: 5120909 - DNA, 25 bp, Homo sapien
gatgacattactgattaggctacaa

SEQ ID NO: 5120910 - DNA, 25 bp, Homo sapien
tcttgtgatagtaagcttcctaagg

SEQ ID NO: 5120911 - DNA, 25 bp, Homo sapien
ttttcctcttgtgatagtaagcttc

SEQ ID NO: 5120912 - DNA, 25 bp, Homo sapien
tttcctcttgtgatagtaagcttcc

SEQ ID NO: 5120913 - DNA, 25 bp, Homo sapien
tcctcttgtgatagtaagcttccta

SEQ ID NO: 5120914 - DNA, 25 bp, Homo sapien
ctcaggcttaggtgaatcagggacc

SEQ ID NO: 5120915 - DNA, 25 bp, Homo sapien
ctgaacacgaaggtgcaagccactg

SEQ ID NO: 5120916 - DNA, 25 bp, Homo sapien
cactggcactcctcaggcttaggtg

SEQ ID NO: 5120917 - DNA, 25 bp, Homo sapien
ggtgaagcttatcaagctctgtgct

SEQ ID NO: 5120918 - DNA, 25 bp, Homo sapien
tagcagccctcgtaactcccaacca

SEQ ID NO: 5120919 - DNA, 25 bp, Homo sapien
cagccctcgtaactcccaaccaaga

SEQ ID NO: 5120920 - DNA, 25 bp, Homo sapien
agtagcagccctcgtaactcccaac

SEQ ID NO: 5120921 - DNA, 25 bp, Homo sapien
tcagtagcagccctcgtaactccca

SEQ ID NO: 5120922 - DNA, 25 bp, Homo sapien
gggaatataaatcgaccatcttggt

SEQ ID NO: 5120923 - DNA, 25 bp, Homo sapien
ctggggggtctctcatggaagccct

SEQ ID NO: 5120924 - DNA, 25 bp, Homo sapien
taaatcgaccatcttggtgcttcca

SEQ ID NO: 5120925 - DNA, 25 bp, Homo sapien
catcttggtgcttccattggatcca

SEQ ID NO: 5120926 - DNA, 25 bp, Homo sapien
acttatatgccttttttgagcctgc

SEQ ID NO: 5120927 - DNA, 25 bp, Homo sapien
cagaacttatatgccttttttgagc

SEQ ID NO: 5120928 - DNA, 25 bp, Homo sapien
tttgtccgcagaacttatatgcctt

SEQ ID NO: 5120929 - DNA, 25 bp, Homo sapien
ctctgctgctttttgtccgcagaac

SEQ ID NO: 5120930 - DNA, 25 bp, Homo sapien
caatgttgagaggatctcctttttc

SEQ ID NO: 5120931 - DNA, 25 bp, Homo sapien
tagtcatcttatcaatcgcaatgtt

SEQ ID NO: 5120932 - DNA, 25 bp, Homo sapien
ctccttagatctcttgttttcttag

SEQ ID NO: 5120933 - DNA, 25 bp, Homo sapien
cttatcaatcgcaatgttgagagga

SEQ ID NO: 5120934 - DNA, 25 bp, Homo sapien
caggaaagagtcagatatgtgatcc

SEQ ID NO: 5120935 - DNA, 25 bp, Homo sapien
ggaaagagtcagatatgtgatccat

SEQ ID NO: 5120936 - DNA, 25 bp, Homo sapien
ttttcatttccgctctttgcagcct

SEQ ID NO: 5120937 - DNA, 25 bp, Homo sapien
gaactagcaaaggaacattggtttc

SEQ ID NO: 5120938 - DNA, 25 bp, Homo sapien
gaaattctaagagccatatgcagag

SEQ ID NO: 5120939 - DNA, 25 bp, Homo sapien
tcgtagcttgattccttcgaaaggg

SEQ ID NO: 5120940 - DNA, 25 bp, Homo sapien
gggagaagtgtcctaggcctccatt

SEQ ID NO: 5120941 - DNA, 25 bp, Homo sapien
tatgcagagattgaacccatcggta

SEQ ID NO: 5120942 - DNA, 25 bp, Homo sapien
taacactcagctcggtggttcaagt

SEQ ID NO: 5120943 - DNA, 25 bp, Homo sapien
tgtgtccagcgcctgtcacaggaga

SEQ ID NO: 5120944 - DNA, 25 bp, Homo sapien
gaatacctgatggaggcaaagtgca

SEQ ID NO: 5120945 - DNA, 25 bp, Homo sapien
gaaactaagaaaggtgcccatatcc

SEQ ID NO: 5120946 - DNA, 25 bp, Homo sapien
taaactacatcaaaaagagaggctc

SEQ ID NO: 5120947 - DNA, 25 bp, Homo sapien
cctcgccgggatttgctaattctta

SEQ ID NO: 5120948 - DNA, 25 bp, Homo sapien
gaatttgcgcttcttgacatgacgg

SEQ ID NO: 5120949 - DNA, 25 bp, Homo sapien
aatgagccctctcaggaatttgcgc

SEQ ID NO: 5120950 - DNA, 25 bp, Homo sapien
cttcaaatcgttgcacaaattggtc

SEQ ID NO: 5120951 - DNA, 25 bp, Homo sapien
cttcaacttcaaatcgttgcacaaa

SEQ ID NO: 5120952 - DNA, 25 bp, Homo sapien
acaaattggtcctgccctactcctt

SEQ ID NO: 5120953 - DNA, 25 bp, Homo sapien
cttaaactgcatctcttcaacttca

SEQ ID NO: 5120954 - DNA, 25 bp, Homo sapien
tgctgaaaattaccatccaaccctg

SEQ ID NO: 5120955 - DNA, 25 bp, Homo sapien
ttaagactgtctagcttggaaactg

SEQ ID NO: 5120956 - DNA, 25 bp, Homo sapien
gacaccttaatggtcaggaggttat

SEQ ID NO: 5120957 - DNA, 25 bp, Homo sapien
gaagcatctgaatgtccctcctttg

SEQ ID NO: 5120958 - DNA, 25 bp, Homo sapien
atcagggacagccactgttactctt

SEQ ID NO: 5120959 - DNA, 25 bp, Homo sapien
catgaatgtatttggaatctgtttc

SEQ ID NO: 5120960 - DNA, 25 bp, Homo sapien
gggacagccactgttactcttttca

SEQ ID NO: 5120961 - DNA, 25 bp, Homo sapien
ctgtcatcagggacagccactgtta

SEQ ID NO: 5120962 - DNA, 25 bp, Homo sapien
acctaaaatagcccacataatctta

SEQ ID NO: 5120963 - DNA, 25 bp, Homo sapien
ctaaaatagcccacataatcttatc

SEQ ID NO: 5120964 - DNA, 25 bp, Homo sapien
cctaaaatagcccacataatcttat

SEQ ID NO: 5120965 - DNA, 25 bp, Homo sapien
taaaatagcccacataatcttatct

SEQ ID NO: 5120966 - DNA, 25 bp, Homo sapien
cacactgctgatataaaccatagcc

SEQ ID NO: 5120967 - DNA, 25 bp, Homo sapien
ccttcaatgtaagaaagacataggc

SEQ ID NO: 5120968 - DNA, 25 bp, Homo sapien
tggacgttgggaacaacttgaaatg

SEQ ID NO: 5120969 - DNA, 25 bp, Homo sapien
tacatatgcccactgttgtggaact

SEQ ID NO: 5120970 - DNA, 25 bp, Homo sapien
gtttccatcttcataacccttagcc

SEQ ID NO: 5120971 - DNA, 25 bp, Homo sapien
tgtttccatcttcataacccttagc

SEQ ID NO: 5120972 - DNA, 25 bp, Homo sapien
gacagccatctatttgactcaaatt

SEQ ID NO: 5120973 - DNA, 25 bp, Homo sapien
catggtgtatcagcattgtcctggc

SEQ ID NO: 5120974 - DNA, 25 bp, Homo sapien
gtccgtagagtattacttcatggtg

SEQ ID NO: 5120975 - DNA, 25 bp, Homo sapien
gagtattacttcatggtgtatcagc

SEQ ID NO: 5120976 - DNA, 25 bp, Homo sapien
ggacaatttcttgtccgtagagtat

SEQ ID NO: 5120977 - DNA, 25 bp, Homo sapien
tacaactcttccttttatgggccac

SEQ ID NO: 5120978 - DNA, 25 bp, Homo sapien
tgataaccagtgctctcacaagtct

SEQ ID NO: 5120979 - DNA, 25 bp, Homo sapien
gctactgagggctgcaattgcaaca

SEQ ID NO: 5120980 - DNA, 25 bp, Homo sapien
tcacaagtctctcccgagctggaag

SEQ ID NO: 5120981 - DNA, 25 bp, Homo sapien
gggtacagctctttcttatcgctgt

SEQ ID NO: 5120982 - DNA, 25 bp, Homo sapien
tacagctctttcttatcgctgttgg

SEQ ID NO: 5120983 - DNA, 25 bp, Homo sapien
cagctctttcttatcgctgttggtt

SEQ ID NO: 5120984 - DNA, 25 bp, Homo sapien
tctggggtacagctctttcttatcg

SEQ ID NO: 5120985 - DNA, 25 bp, Homo sapien
tcacattcatgaacaaattgatgtg

SEQ ID NO: 5120986 - DNA, 25 bp, Homo sapien
cagctcacattcatgaacaaattga

SEQ ID NO: 5120987 - DNA, 25 bp, Homo sapien
gctcacattcatgaacaaattgatg

SEQ ID NO: 5120988 - DNA, 25 bp, Homo sapien
cacattcatgaacaaattgatgtgc

SEQ ID NO: 5120989 - DNA, 25 bp, Homo sapien
aagtgaattgccaattttccagtgc

SEQ ID NO: 5120990 - DNA, 25 bp, Homo sapien
gccaattttccagtgctaccagcat

SEQ ID NO: 5120991 - DNA, 25 bp, Homo sapien
aataagtgaattgccaattttccag

SEQ ID NO: 5120992 - DNA, 25 bp, Homo sapien
gaattgccaattttccagtgctacc

SEQ ID NO: 5120993 - DNA, 25 bp, Homo sapien
tcagcctgattaacagtcactgcag

SEQ ID NO: 5120994 - DNA, 25 bp, Homo sapien
cagcagggataatttgatcagggaa

SEQ ID NO: 5120995 - DNA, 25 bp, Homo sapien
tagaggaaacttaaacagcagggat

SEQ ID NO: 5120996 - DNA, 25 bp, Homo sapien
aatttgatcagggaaggatgctcag

SEQ ID NO: 5120997 - DNA, 25 bp, Homo sapien
acaccacatgcctataaccatctga

SEQ ID NO: 5120998 - DNA, 25 bp, Homo sapien
aacaccacatgcctataaccatctg

SEQ ID NO: 5120999 - DNA, 25 bp, Homo sapien
aaaacagtccatgctcgtggacagg

SEQ ID NO: 5121000 - DNA, 25 bp, Homo sapien
tgccatccgaactaatttcacccct

SEQ ID NO: 5121001 - DNA, 25 bp, Homo sapien
ggctgccatccgaactaatttcacc

SEQ ID NO: 5121002 - DNA, 25 bp, Homo sapien
gggtggctgccatccgaactaattt

SEQ ID NO: 5121003 - DNA, 25 bp, Homo sapien
ggtggctgccatccgaactaatttc

SEQ ID NO: 5121004 - DNA, 25 bp, Homo sapien
cagccagtgtcagagcggcattgat

SEQ ID NO: 5121005 - DNA, 25 bp, Homo sapien
cagagaggaagtcatccactgaggt

SEQ ID NO: 5121006 - DNA, 25 bp, Homo sapien
gacgtccatgttatcctgagcaact

SEQ ID NO: 5121007 - DNA, 25 bp, Homo sapien
tctgtcaacactcggacctgcttct

SEQ ID NO: 5121008 - DNA, 25 bp, Homo sapien
tgatgtgtatgactcgagctgcccg

SEQ ID NO: 5121009 - DNA, 25 bp, Homo sapien
ctcttggagggctatcacacacttg

SEQ ID NO: 5121010 - DNA, 25 bp, Homo sapien
gagtgtccacatcgccctcttggag

SEQ ID NO: 5121011 - DNA, 25 bp, Homo sapien
aacaccttctcagtataaaccccag

SEQ ID NO: 5121012 - DNA, 25 bp, Homo sapien
tgtgagcagccacatgcccctgaag

SEQ ID NO: 5121013 - DNA, 25 bp, Homo sapien
catagcagtgagtcctgtgagcagc

SEQ ID NO: 5121014 - DNA, 25 bp, Homo sapien
ctgaccatagcagtgagtcctgtga

SEQ ID NO: 5121015 - DNA, 25 bp, Homo sapien
cagccacatgcccctgaagaagggc

SEQ ID NO: 5121016 - DNA, 25 bp, Homo sapien
ccagagttgtagattgttctaattc

SEQ ID NO: 5121017 - DNA, 25 bp, Homo sapien
atctgcaagctctgacaagctccca

SEQ ID NO: 5121018 - DNA, 25 bp, Homo sapien
gacaagctcccataagtaaccatac

SEQ ID NO: 5121019 - DNA, 25 bp, Homo sapien
ttttttaccccaatgcatctgcaag

SEQ ID NO: 5121020 - DNA, 25 bp, Homo sapien
tcaaggctgtttgattattctgccc

SEQ ID NO: 5121021 - DNA, 25 bp, Homo sapien
tccacagtacatgggctccaatctg

SEQ ID NO: 5121022 - DNA, 25 bp, Homo sapien
cccttttcactatgtccacagtaca

SEQ ID NO: 5121023 - DNA, 25 bp, Homo sapien
ggtttgcctgtgtgtaaacaccttc

SEQ ID NO: 5121024 - DNA, 25 bp, Homo sapien
gagagataggcaggtcactcagacc

SEQ ID NO: 5121025 - DNA, 25 bp, Homo sapien
gtcccccatattccagccagagaga

SEQ ID NO: 5121026 - DNA, 25 bp, Homo sapien
taaaactctattccactagcaacag

SEQ ID NO: 5121027 - DNA, 25 bp, Homo sapien
gacctgtccaatcataaaactctat

SEQ ID NO: 5121028 - DNA, 25 bp, Homo sapien
gttgctttgtttgtggcaaggtcac

SEQ ID NO: 5121029 - DNA, 25 bp, Homo sapien
tgaaaaaggttatggtgttgctttg

SEQ ID NO: 5121030 - DNA, 25 bp, Homo sapien
ttgctttgtttgtggcaaggtcacc

SEQ ID NO: 5121031 - DNA, 25 bp, Homo sapien
aaggttatggtgttgctttgtttgt

SEQ ID NO: 5121032 - DNA, 25 bp, Homo sapien
catcctctgtggatactttaatatc

SEQ ID NO: 5121033 - DNA, 25 bp, Homo sapien
ttcatcctctgtggatactttaata

SEQ ID NO: 5121034 - DNA, 25 bp, Homo sapien
tcatcctctgtggatactttaatat

SEQ ID NO: 5121035 - DNA, 25 bp, Homo sapien
caaacggttgaggaacgttggcact

SEQ ID NO: 5121036 - DNA, 25 bp, Homo sapien
tacaccaggcgagaggcatcgatga

SEQ ID NO: 5121037 - DNA, 25 bp, Homo sapien
cgttggcactcagggcttcaatggc

SEQ ID NO: 5121038 - DNA, 25 bp, Homo sapien
tctacttgttcagcgaagcgtggca

SEQ ID NO: 5121039 - DNA, 25 bp, Homo sapien
agctggtcatcctcagtctgaacac

SEQ ID NO: 5121040 - DNA, 25 bp, Homo sapien
ctgctacgcacatcataatcttcct

SEQ ID NO: 5121041 - DNA, 25 bp, Homo sapien
aatcatcctctagttcttctggggt

SEQ ID NO: 5121042 - DNA, 25 bp, Homo sapien
cagtctgaacacttgtcctgctacg

SEQ ID NO: 5121043 - DNA, 25 bp, Homo sapien
agccaaagtcttaggtgtccactca

SEQ ID NO: 5121044 - DNA, 25 bp, Homo sapien
ggtaccacgtgtctggagtttagaa

SEQ ID NO: 5121045 - DNA, 25 bp, Homo sapien
gatttctgacccatgaatctctggg

SEQ ID NO: 5121046 - DNA, 25 bp, Homo sapien
cattttagtaaacacggtccctgtg

SEQ ID NO: 5121047 - DNA, 25 bp, Homo sapien
gatatcactagcactgctcgccaca

SEQ ID NO: 5121048 - DNA, 25 bp, Homo sapien
tcactgatatcactagcactgctcg

SEQ ID NO: 5121049 - DNA, 25 bp, Homo sapien
gggcaagggtcactgatatcactag

SEQ ID NO: 5121050 - DNA, 25 bp, Homo sapien
tcctcaaccaagtggggcaagggtc

SEQ ID NO: 5121051 - DNA, 25 bp, Homo sapien
tgacggtgacaaaggaagtacagac

SEQ ID NO: 5121052 - DNA, 25 bp, Homo sapien
gccagaccctgcaaaggcttatgag

SEQ ID NO: 5121053 - DNA, 25 bp, Homo sapien
ttatgagctaccctgccattccgga

SEQ ID NO: 5121054 - DNA, 25 bp, Homo sapien
ggaggccacgagcacaggctgataa

SEQ ID NO: 5121055 - DNA, 25 bp, Homo sapien
ctcttgatggaatatctccacctgc

SEQ ID NO: 5121056 - DNA, 25 bp, Homo sapien
tacaatgatatcattgccgctgtcg

SEQ ID NO: 5121057 - DNA, 25 bp, Homo sapien
gccttctcctcctgcggtagttgcg

SEQ ID NO: 5121058 - DNA, 25 bp, Homo sapien
tccacctgctcagctatttttgcct

SEQ ID NO: 5121059 - DNA, 25 bp, Homo sapien
gctaatttgtccattcgagaacctg

SEQ ID NO: 5121060 - DNA, 25 bp, Homo sapien
aacctgcttcggcaattttcttggc

SEQ ID NO: 5121061 - DNA, 25 bp, Homo sapien
ccacagcacgagctaatttgtccat

SEQ ID NO: 5121062 - DNA, 25 bp, Homo sapien
cttggcagcattaatgacatcagat

SEQ ID NO: 5121063 - DNA, 25 bp, Homo sapien
gatggcaatacaaggcaattcgttg

SEQ ID NO: 5121064 - DNA, 25 bp, Homo sapien
tgaaggtaggctaataaatcctgct

SEQ ID NO: 5121065 - DNA, 25 bp, Homo sapien
tcaccttgctgcagatattaagctg

SEQ ID NO: 5121066 - DNA, 25 bp, Homo sapien
aaatcctgcttacatgctgaatcag

SEQ ID NO: 5121067 - DNA, 25 bp, Homo sapien
cattgtgaagcccaagtccagctta

SEQ ID NO: 5121068 - DNA, 25 bp, Homo sapien
agtactgttgccaagaatgtttgcc

SEQ ID NO: 5121069 - DNA, 25 bp, Homo sapien
cggtgggaactttacattgtgaagc

SEQ ID NO: 5121070 - DNA, 25 bp, Homo sapien
ccttggaagtgcaacggtgggaact

SEQ ID NO: 5121071 - DNA, 25 bp, Homo sapien
caaggtgaagaacctcaacacatat

SEQ ID NO: 5121072 - DNA, 25 bp, Homo sapien
aaatcttgccaagaaattgtgattc

SEQ ID NO: 5121073 - DNA, 25 bp, Homo sapien
aggtgaagaacctcaacacatattt

SEQ ID NO: 5121074 - DNA, 25 bp, Homo sapien
gtgaagaacctcaacacatatttgg

SEQ ID NO: 5121075 - DNA, 25 bp, Homo sapien
tgcaaataatttgcaacaaatggca

SEQ ID NO: 5121076 - DNA, 25 bp, Homo sapien
gccacatttctggacttgcaaataa

SEQ ID NO: 5121077 - DNA, 25 bp, Homo sapien
caaataatttgcaacaaatggcacc

SEQ ID NO: 5121078 - DNA, 25 bp, Homo sapien
tcagagccacatttctggacttgca

SEQ ID NO: 5121079 - DNA, 25 bp, Homo sapien
cttgaaatggtagcatcatcatgtc

SEQ ID NO: 5121080 - DNA, 25 bp, Homo sapien
aatggtagcatcatcatgtctgact

SEQ ID NO: 5121081 - DNA, 25 bp, Homo sapien
tcacttgaaatggtagcatcatcat

SEQ ID NO: 5121082 - DNA, 25 bp, Homo sapien
gaaatggtagcatcatcatgtctga

SEQ ID NO: 5121083 - DNA, 25 bp, Homo sapien
cagaaaggacacattgcaagacaga

SEQ ID NO: 5121084 - DNA, 25 bp, Homo sapien
ttggaaatgcaaagaggtgactgtg

SEQ ID NO: 5121085 - DNA, 25 bp, Homo sapien
ttgctgaagaatgttgaagcaggat

SEQ ID NO: 5121086 - DNA, 25 bp, Homo sapien
gcaagacagattgctcttggttgct

SEQ ID NO: 5121087 - DNA, 25 bp, Homo sapien
ccatgtatacatctccatttttaac

SEQ ID NO: 5121088 - DNA, 25 bp, Homo sapien
ctttaaaggtgctgattaaaccctg

SEQ ID NO: 5121089 - DNA, 25 bp, Homo sapien
taaaaggccttcatctgactagtgg

SEQ ID NO: 5121090 - DNA, 25 bp, Homo sapien
ctgaaaccatccacataaaaggcct

SEQ ID NO: 5121091 - DNA, 25 bp, Homo sapien
tacatgacccagtgatgccaactga

SEQ ID NO: 5121092 - DNA, 25 bp, Homo sapien
tgtcatggacgatttctgctctagt

SEQ ID NO: 5121093 - DNA, 25 bp, Homo sapien
ccgatcggagctccctcagcacagg

SEQ ID NO: 5121094 - DNA, 25 bp, Homo sapien
gtgggtagaaagttgactagccctg

SEQ ID NO: 5121095 - DNA, 25 bp, Homo sapien
catggaggaatcactgcttccactc

SEQ ID NO: 5121096 - DNA, 25 bp, Homo sapien
gtagaaagttgactagccctgcccc

SEQ ID NO: 5121097 - DNA, 25 bp, Homo sapien
gaaaagtgcccgctccagttgatct

SEQ ID NO: 5121098 - DNA, 25 bp, Homo sapien
ccacagttttagaagggcccactga

SEQ ID NO: 5121099 - DNA, 25 bp, Homo sapien
tggctgtgacaccttgaaatggctg

SEQ ID NO: 5121100 - DNA, 25 bp, Homo sapien
catcagggttaggacgtgcaacaac

SEQ ID NO: 5121101 - DNA, 25 bp, Homo sapien
gcacttggcacatgtacagactcct

SEQ ID NO: 5121102 - DNA, 25 bp, Homo sapien
tgtattcacttccaagtcggcactt

SEQ ID NO: 5121103 - DNA, 25 bp, Homo sapien
aagtcggcacttggcacatgtacag

SEQ ID NO: 5121104 - DNA, 25 bp, Homo sapien
cagactcctcaaagaggttgcacat

SEQ ID NO: 5121105 - DNA, 25 bp, Homo sapien
ggaaacgaggttggcagctaaatct

SEQ ID NO: 5121106 - DNA, 25 bp, Homo sapien
ctggaaacgaggttggcagctaaat

SEQ ID NO: 5121107 - DNA, 25 bp, Homo sapien
ctggctggaaacgaggttggcagct

SEQ ID NO: 5121108 - DNA, 25 bp, Homo sapien
ggctggaaacgaggttggcagctaa

SEQ ID NO: 5121109 - DNA, 25 bp, Homo sapien
taaattggcaaagaccttggcagga

SEQ ID NO: 5121110 - DNA, 25 bp, Homo sapien
tttgctcaacccgaaacaaggcatt

SEQ ID NO: 5121111 - DNA, 25 bp, Homo sapien
cacagccttgctgaggaatttacca

SEQ ID NO: 5121112 - DNA, 25 bp, Homo sapien
tagtgcttcatagtcggccagtcca

SEQ ID NO: 5121113 - DNA, 25 bp, Homo sapien
gataggagaagggaaacagcttcat

SEQ ID NO: 5121114 - DNA, 25 bp, Homo sapien
cttgagtcaagtagggataggagaa

SEQ ID NO: 5121115 - DNA, 25 bp, Homo sapien
gggataggagaagggaaacagcttc

SEQ ID NO: 5121116 - DNA, 25 bp, Homo sapien
tagggataggagaagggaaacagct

SEQ ID NO: 5121117 - DNA, 25 bp, Homo sapien
gatcacttctattatgccatacaaa

SEQ ID NO: 5121118 - DNA, 25 bp, Homo sapien
catactctttcgtttatacagccca

SEQ ID NO: 5121119 - DNA, 25 bp, Homo sapien
caaaatcactgctgaaccccatact

SEQ ID NO: 5121120 - DNA, 25 bp, Homo sapien
gccatacaaaatgcacgtataccaa

SEQ ID NO: 5121121 - DNA, 25 bp, Homo sapien
catcttccaagacacaacaggtgag

SEQ ID NO: 5121122 - DNA, 25 bp, Homo sapien
cctggataagcgatgtggcactgtc

SEQ ID NO: 5121123 - DNA, 25 bp, Homo sapien
tttcaccgtgaggacaacagcattc

SEQ ID NO: 5121124 - DNA, 25 bp, Homo sapien
gaacctcgtcgaactcgtgtctgga

SEQ ID NO: 5121125 - DNA, 25 bp, Homo sapien
tacgagctggcaggtatgcatacaa

SEQ ID NO: 5121126 - DNA, 25 bp, Homo sapien
tcccataaatattgcgccaatgcga

SEQ ID NO: 5121127 - DNA, 25 bp, Homo sapien
gccaatgcgaactctgtgcccaatt

SEQ ID NO: 5121128 - DNA, 25 bp, Homo sapien
gccaccttagtacaggaatgtcctg

SEQ ID NO: 5121129 - DNA, 25 bp, Homo sapien
tagtaatggcacaactagaagagga

SEQ ID NO: 5121130 - DNA, 25 bp, Homo sapien
tatcacggatatagacttcaaggtt

SEQ ID NO: 5121131 - DNA, 25 bp, Homo sapien
ttcatgggccacacacttaagcgta

SEQ ID NO: 5121132 - DNA, 25 bp, Homo sapien
gctggactagttaatttcccctcag

SEQ ID NO: 5121133 - DNA, 25 bp, Homo sapien
tccaagctacacctatgtatttgcc

SEQ ID NO: 5121134 - DNA, 25 bp, Homo sapien
tgaaagcaagattggtcaccgtatt

SEQ ID NO: 5121135 - DNA, 25 bp, Homo sapien
taactttcacacgttgtcagtttcc

SEQ ID NO: 5121136 - DNA, 25 bp, Homo sapien
tcaccgtattgtgcttccagtgccc

SEQ ID NO: 5121137 - DNA, 25 bp, Homo sapien
ctctaatctttattaagtacatact

SEQ ID NO: 5121138 - DNA, 25 bp, Homo sapien
ctaatctttattaagtacatactta

SEQ ID NO: 5121139 - DNA, 25 bp, Homo sapien
tctaatctttattaagtacatactt

SEQ ID NO: 5121140 - DNA, 25 bp, Homo sapien
taatctttattaagtacatacttaa

SEQ ID NO: 5121141 - DNA, 25 bp, Homo sapien
tacataaggcatttggagaccaagt

SEQ ID NO: 5121142 - DNA, 25 bp, Homo sapien
ggtaaatgggattctgataatccat

SEQ ID NO: 5121143 - DNA, 25 bp, Homo sapien
tagacttgtaagctgaagtgagctc

SEQ ID NO: 5121144 - DNA, 25 bp, Homo sapien
tcagtggtggcttggagtaaagtac

SEQ ID NO: 5121145 - DNA, 25 bp, Homo sapien
aacagacaagttcagggacctgcat

SEQ ID NO: 5121146 - DNA, 25 bp, Homo sapien
tacacgtcagcagaaacgatgtaag

SEQ ID NO: 5121147 - DNA, 25 bp, Homo sapien
gatggtcacataagccagcttccca

SEQ ID NO: 5121148 - DNA, 25 bp, Homo sapien
tatcagagcctgatccaatgatggt

SEQ ID NO: 5121149 - DNA, 25 bp, Homo sapien
gccttctcattgcattatcagagcc

SEQ ID NO: 5121150 - DNA, 25 bp, Homo sapien
tggaccggtaccagcagcctgcttt

SEQ ID NO: 5121151 - DNA, 25 bp, Homo sapien
cccttatacaggtccactaactggt

SEQ ID NO: 5121152 - DNA, 25 bp, Homo sapien
ttatacaggtccactaactggtcat

SEQ ID NO: 5121153 - DNA, 25 bp, Homo sapien
cacctttctattggaccggtaccag

SEQ ID NO: 5121154 - DNA, 25 bp, Homo sapien
ttccctcttgtagggctcctgaata

SEQ ID NO: 5121155 - DNA, 25 bp, Homo sapien
gaatattcaaagtgtccttcacata

SEQ ID NO: 5121156 - DNA, 25 bp, Homo sapien
gctcctgaatattcaaagtgtcctt

SEQ ID NO: 5121157 - DNA, 25 bp, Homo sapien
tagggctcctgaatattcaaagtgt

SEQ ID NO: 5121158 - DNA, 25 bp, Homo sapien
aacatgaactgtggtcagatggagc

SEQ ID NO: 5121159 - DNA, 25 bp, Homo sapien
atggagcccaggaatagccatggga

SEQ ID NO: 5121160 - DNA, 25 bp, Homo sapien
agcccaggaatagccatgggatcca

SEQ ID NO: 5121161 - DNA, 25 bp, Homo sapien
catgaactgtggtcagatggagccc

SEQ ID NO: 5121162 - DNA, 25 bp, Homo sapien
tatattagtatccaactcttctata

SEQ ID NO: 5121163 - DNA, 25 bp, Homo sapien
tagtatccaactcttctatatgtat

SEQ ID NO: 5121164 - DNA, 25 bp, Homo sapien
ctcccattaatgcaaactcttcaag

SEQ ID NO: 5121165 - DNA, 25 bp, Homo sapien
tattagtatccaactcttctatatg

SEQ ID NO: 5121166 - DNA, 25 bp, Homo sapien
gcaagaatcactcttgaccactcca

SEQ ID NO: 5121167 - DNA, 25 bp, Homo sapien
caagaatcactcttgaccactccat

SEQ ID NO: 5121168 - DNA, 25 bp, Homo sapien
ctactgaattagcaagaatcactct

SEQ ID NO: 5121169 - DNA, 25 bp, Homo sapien
ttagcaagaatcactcttgaccact

SEQ ID NO: 5121170 - DNA, 25 bp, Homo sapien
gcatagattttgagctacacttcct

SEQ ID NO: 5121171 - DNA, 25 bp, Homo sapien
tctggtacagatagcatatatatgt

SEQ ID NO: 5121172 - DNA, 25 bp, Homo sapien
cattgacttggtccaacctaaggga

SEQ ID NO: 5121173 - DNA, 25 bp, Homo sapien
tgggctctgagatatttacatgatg

SEQ ID NO: 5121174 - DNA, 25 bp, Homo sapien
catgccctgtcccaaaaaatagatt

SEQ ID NO: 5121175 - DNA, 25 bp, Homo sapien
gaatatgtctatatagcttatacca

SEQ ID NO: 5121176 - DNA, 25 bp, Homo sapien
gattattacctcacatctaaaacca

SEQ ID NO: 5121177 - DNA, 25 bp, Homo sapien
ggcacacccatcattcctgactaat

SEQ ID NO: 5121178 - DNA, 25 bp, Homo sapien
agaaagtatttggatgaccacaatg

SEQ ID NO: 5121179 - DNA, 25 bp, Homo sapien
tgaccacaatggtcaaaggcacatt

SEQ ID NO: 5121180 - DNA, 25 bp, Homo sapien
gcacattgatagaacagggctcagg

SEQ ID NO: 5121181 - DNA, 25 bp, Homo sapien
aatggtcaaaggcacattgatagaa

SEQ ID NO: 5121182 - DNA, 25 bp, Homo sapien
aatatatcaacggtagagtaaacac

SEQ ID NO: 5121183 - DNA, 25 bp, Homo sapien
tcaatatatcaacggtagagtaaac

SEQ ID NO: 5121184 - DNA, 25 bp, Homo sapien
tatatcaacggtagagtaaacacat

SEQ ID NO: 5121185 - DNA, 25 bp, Homo sapien
catcaatatatcaacggtagagtaa

SEQ ID NO: 5121186 - DNA, 25 bp, Homo sapien
cacatacgtgttgtcgttgttcttg

SEQ ID NO: 5121187 - DNA, 25 bp, Homo sapien
attccaccaactttactctttgtgc

SEQ ID NO: 5121188 - DNA, 25 bp, Homo sapien
agatctggtcctcacatacgtgttg

SEQ ID NO: 5121189 - DNA, 25 bp, Homo sapien
actttactctttgtgctgtgctcag

SEQ ID NO: 5121190 - DNA, 25 bp, Homo sapien
tgtagtagtatgaacagagtcgcca

SEQ ID NO: 5121191 - DNA, 25 bp, Homo sapien
tgagagtacatcgtgcatttcctga

SEQ ID NO: 5121192 - DNA, 25 bp, Homo sapien
tagctttgcctatgcttactggaga

SEQ ID NO: 5121193 - DNA, 25 bp, Homo sapien
gagagccttccttacgtttctgtag

SEQ ID NO: 5121194 - DNA, 25 bp, Homo sapien
acccattttcacgtgcctccagtta

SEQ ID NO: 5121195 - DNA, 25 bp, Homo sapien
taggataggtatagagagaggcaca

SEQ ID NO: 5121196 - DNA, 25 bp, Homo sapien
tttcacgtgcctccagttaggatag

SEQ ID NO: 5121197 - DNA, 25 bp, Homo sapien
gcctccagttaggataggtatagag

SEQ ID NO: 5121198 - DNA, 25 bp, Homo sapien
tcaatcaatgcgatctccagaaata

SEQ ID NO: 5121199 - DNA, 25 bp, Homo sapien
caatcaatgcgatctccagaaatac

SEQ ID NO: 5121200 - DNA, 25 bp, Homo sapien
aagcactatagttctgatgctgtaa

SEQ ID NO: 5121201 - DNA, 25 bp, Homo sapien
agcaaaagcactatagttctgatgc

SEQ ID NO: 5121202 - DNA, 25 bp, Homo sapien
tcaccagcaaaagcactatagttct

SEQ ID NO: 5121203 - DNA, 25 bp, Homo sapien
gcactatagttctgatgctgtaagt

SEQ ID NO: 5121204 - DNA, 25 bp, Homo sapien
gcttcctacacataccctcattcca

SEQ ID NO: 5121205 - DNA, 25 bp, Homo sapien
cataccctcattccactcagttctc

SEQ ID NO: 5121206 - DNA, 25 bp, Homo sapien
tacacataccctcattccactcagt

SEQ ID NO: 5121207 - DNA, 25 bp, Homo sapien
tgcagcttcctacacataccctcat

SEQ ID NO: 5121208 - DNA, 25 bp, Homo sapien
ttactgttcactcggagataagaat

SEQ ID NO: 5121209 - DNA, 25 bp, Homo sapien
tactgttcactcggagataagaatt

SEQ ID NO: 5121210 - DNA, 25 bp, Homo sapien
gacccagaggacttttgaaatgctt

SEQ ID NO: 5121211 - DNA, 25 bp, Homo sapien
tgaaagagtcgtgaccctcctttca

SEQ ID NO: 5121212 - DNA, 25 bp, Homo sapien
tgccttgtttgaaagagtcgtgacc

SEQ ID NO: 5121213 - DNA, 25 bp, Homo sapien
cccagaggacttttgaaatgctttt

SEQ ID NO: 5121214 - DNA, 25 bp, Homo sapien
actttgacatcatgtcgttatgttg

SEQ ID NO: 5121215 - DNA, 25 bp, Homo sapien
catatagttttactcactacgataa

SEQ ID NO: 5121216 - DNA, 25 bp, Homo sapien
catattttgacggtctgtttcctta

SEQ ID NO: 5121217 - DNA, 25 bp, Homo sapien
cattgcttcaatgagcatatttata

SEQ ID NO: 5121218 - DNA, 25 bp, Homo sapien
tactgctattcttaacactttgtca

SEQ ID NO: 5121219 - DNA, 25 bp, Homo sapien
ctttgtcagggacatattgtttccc

SEQ ID NO: 5121220 - DNA, 25 bp, Homo sapien
cctttgaccctctactactgctatt

SEQ ID NO: 5121221 - DNA, 25 bp, Homo sapien
tcttcaatagagtaaactttattga

SEQ ID NO: 5121222 - DNA, 25 bp, Homo sapien
ttctcagttctattggctttaagtc

SEQ ID NO: 5121223 - DNA, 25 bp, Homo sapien
tcagcttgacgagtggagttgtcac

SEQ ID NO: 5121224 - DNA, 25 bp, Homo sapien
tgacgagtggagttgtcacaagaag

SEQ ID NO: 5121225 - DNA, 25 bp, Homo sapien
tattggctttaagtcagcttgacga

SEQ ID NO: 5121226 - DNA, 25 bp, Homo sapien
tcctgctgcttttgattatgctgcc

SEQ ID NO: 5121227 - DNA, 25 bp, Homo sapien
ttctcatctctatactcctgctgct

SEQ ID NO: 5121228 - DNA, 25 bp, Homo sapien
tttgattatgctgcctccatcccat

SEQ ID NO: 5121229 - DNA, 25 bp, Homo sapien
tctatactcctgctgcttttgatta

SEQ ID NO: 5121230 - DNA, 25 bp, Homo sapien
ttgtggccagtattagatgaaaatc

SEQ ID NO: 5121231 - DNA, 25 bp, Homo sapien
aggaacaagggtttgtggccagtat

SEQ ID NO: 5121232 - DNA, 25 bp, Homo sapien
acaagggtttgtggccagtattaga

SEQ ID NO: 5121233 - DNA, 25 bp, Homo sapien
gggtttgtggccagtattagatgaa

SEQ ID NO: 5121234 - DNA, 25 bp, Homo sapien
tgagaataaaggtgttttcgtgaaa

SEQ ID NO: 5121235 - DNA, 25 bp, Homo sapien
gaaccccatggagttttcttgattc

SEQ ID NO: 5121236 - DNA, 25 bp, Homo sapien
cttgattcacatgcaacttctaggc

SEQ ID NO: 5121237 - DNA, 25 bp, Homo sapien
ggtcaaagtttgtctgaaccccatg

SEQ ID NO: 5121238 - DNA, 25 bp, Homo sapien
ctgtactgcttggtccctgctgagc

SEQ ID NO: 5121239 - DNA, 25 bp, Homo sapien
tctgtactgcttggtccctgctgag

SEQ ID NO: 5121240 - DNA, 25 bp, Homo sapien
ttctgtactgcttggtccctgctga

SEQ ID NO: 5121241 - DNA, 25 bp, Homo sapien
tgtactgcttggtccctgctgagct

SEQ ID NO: 5121242 - DNA, 25 bp, Homo sapien
tagtatcctgattgtgaatcatggc

SEQ ID NO: 5121243 - DNA, 25 bp, Homo sapien
tcaactagtatcctgattgtgaatc

SEQ ID NO: 5121244 - DNA, 25 bp, Homo sapien
catggctttggtgactgatgttgtt

SEQ ID NO: 5121245 - DNA, 25 bp, Homo sapien
tgaatcatggctttggtgactgatg

SEQ ID NO: 5121246 - DNA, 25 bp, Homo sapien
gaagataatagcctgacacccatag

SEQ ID NO: 5121247 - DNA, 25 bp, Homo sapien
gacacccatagtcactgagatcttg

SEQ ID NO: 5121248 - DNA, 25 bp, Homo sapien
gagatcttggctgaagtgaaaggct

SEQ ID NO: 5121249 - DNA, 25 bp, Homo sapien
ttgaagataatagcctgacacccat

SEQ ID NO: 5121250 - DNA, 25 bp, Homo sapien
gagaattgtagttatcggcaatctc

SEQ ID NO: 5121251 - DNA, 25 bp, Homo sapien
caagcagcccacaggatccaaatct

SEQ ID NO: 5121252 - DNA, 25 bp, Homo sapien
tatcggcaatctcaggtgtgctcat

SEQ ID NO: 5121253 - DNA, 25 bp, Homo sapien
tagtttgaaagtcgaagacaaagag

SEQ ID NO: 5121254 - DNA, 25 bp, Homo sapien
gattgatcttcagtgtctttatacc

SEQ ID NO: 5121255 - DNA, 25 bp, Homo sapien
tgtcagtcgcgcatatctgagaagg

SEQ ID NO: 5121256 - DNA, 25 bp, Homo sapien
catatctgagaaggattgatcttca

SEQ ID NO: 5121257 - DNA, 25 bp, Homo sapien
ggaagaatttgtcagtcgcgcatat

SEQ ID NO: 5121258 - DNA, 25 bp, Homo sapien
tagcttaataggcacacaaaactga

SEQ ID NO: 5121259 - DNA, 25 bp, Homo sapien
tcaacctttcgtatactactgagtg

SEQ ID NO: 5121260 - DNA, 25 bp, Homo sapien
caacttagtagtatgcccctgtaac

SEQ ID NO: 5121261 - DNA, 25 bp, Homo sapien
gctaactcttgaccaatcccagcag

SEQ ID NO: 5121262 - DNA, 25 bp, Homo sapien
tctgagaattgttgtctgtggccat

SEQ ID NO: 5121263 - DNA, 25 bp, Homo sapien
ctctgagaattgttgtctgtggcca

SEQ ID NO: 5121264 - DNA, 25 bp, Homo sapien
actctgagaattgttgtctgtggcc

SEQ ID NO: 5121265 - DNA, 25 bp, Homo sapien
tactctgagaattgttgtctgtggc

SEQ ID NO: 5121266 - DNA, 25 bp, Homo sapien
tgcatccgctatgccacttttcctg

SEQ ID NO: 5121267 - DNA, 25 bp, Homo sapien
gtccaactcaatatctgcatccgct

SEQ ID NO: 5121268 - DNA, 25 bp, Homo sapien
cctttatgtccaactcaatatctgc

SEQ ID NO: 5121269 - DNA, 25 bp, Homo sapien
caatatctgcatccgctatgccact

SEQ ID NO: 5121270 - DNA, 25 bp, Homo sapien
tggctgtcttaactctaacctccat

SEQ ID NO: 5121271 - DNA, 25 bp, Homo sapien
cttggctgtcttaactctaacctcc

SEQ ID NO: 5121272 - DNA, 25 bp, Homo sapien
tcttggctgtcttaactctaacctc

SEQ ID NO: 5121273 - DNA, 25 bp, Homo sapien
atcttggctgtcttaactctaacct

SEQ ID NO: 5121274 - DNA, 25 bp, Homo sapien
tcagagatccacagctacccgggta

SEQ ID NO: 5121275 - DNA, 25 bp, Homo sapien
cagagatccacagctacccgggtat

SEQ ID NO: 5121276 - DNA, 25 bp, Homo sapien
agcctgagccctcagaggagccaaa

SEQ ID NO: 5121277 - DNA, 25 bp, Homo sapien
agaggagccaaagctggacgtggct

SEQ ID NO: 5121278 - DNA, 25 bp, Homo sapien
agagctcgagcctgagccctcagag

SEQ ID NO: 5121279 - DNA, 25 bp, Homo sapien
ccacagagctcgagcctgagccctc

SEQ ID NO: 5121280 - DNA, 25 bp, Homo sapien
gaaaaccctgtcagctggcctgtgg

SEQ ID NO: 5121281 - DNA, 25 bp, Homo sapien
agaatacttctgctccgcggactcc

SEQ ID NO: 5121282 - DNA, 25 bp, Homo sapien
gcctgatcgggagcgcctctgaaaa

SEQ ID NO: 5121283 - DNA, 25 bp, Homo sapien
aggagcctgtcgagtgggcccaccc

SEQ ID NO: 5121284 - DNA, 25 bp, Homo sapien
cttgcaatattgaggctcctctagt

SEQ ID NO: 5121285 - DNA, 25 bp, Homo sapien
gcaatattgaggctcctctagtctt

SEQ ID NO: 5121286 - DNA, 25 bp, Homo sapien
caatattgaggctcctctagtcttc

SEQ ID NO: 5121287 - DNA, 25 bp, Homo sapien
atattgaggctcctctagtcttcat

SEQ ID NO: 5121288 - DNA, 25 bp, Homo sapien
gagtgaggctgattgttgctgattt

SEQ ID NO: 5121289 - DNA, 25 bp, Homo sapien
gactcattagaaagcggtagttgaa

SEQ ID NO: 5121290 - DNA, 25 bp, Homo sapien
ttcttctgactcattagaaagcggt

SEQ ID NO: 5121291 - DNA, 25 bp, Homo sapien
agaaggtaagattttcagtgtcaag

SEQ ID NO: 5121292 - DNA, 25 bp, Homo sapien
ccctcctactttcactttcagcaga

SEQ ID NO: 5121293 - DNA, 25 bp, Homo sapien
cccctcctactttcactttcagcag

SEQ ID NO: 5121294 - DNA, 25 bp, Homo sapien
aacagccacaacaattctttaggtg

SEQ ID NO: 5121295 - DNA, 25 bp, Homo sapien
ttcagcagagatgaaagataatgaa

SEQ ID NO: 5121296 - DNA, 25 bp, Homo sapien
tgatcaaggctcttttgaagtggag

SEQ ID NO: 5121297 - DNA, 25 bp, Homo sapien
ctcctttcatgatcaaggctctttt

SEQ ID NO: 5121298 - DNA, 25 bp, Homo sapien
tttcatgatcaaggctcttttgaag

SEQ ID NO: 5121299 - DNA, 25 bp, Homo sapien
catgatcaaggctcttttgaagtgg

SEQ ID NO: 5121300 - DNA, 25 bp, Homo sapien
tagtctcagtgtaactatctgtttt

SEQ ID NO: 5121301 - DNA, 25 bp, Homo sapien
ttagtctcagtgtaactatctgttt

SEQ ID NO: 5121302 - DNA, 25 bp, Homo sapien
tcaaaatggataagaggcttaaaag

SEQ ID NO: 5121303 - DNA, 25 bp, Homo sapien
agtctcagtgtaactatctgttttc

SEQ ID NO: 5121304 - DNA, 25 bp, Homo sapien
tgtaatatagagtgataaatcaggg

SEQ ID NO: 5121305 - DNA, 25 bp, Homo sapien
tatagagtgataaatcagggacact

SEQ ID NO: 5121306 - DNA, 25 bp, Homo sapien
gagtgataaatcagggacacttctc

SEQ ID NO: 5121307 - DNA, 25 bp, Homo sapien
ggcagaatcacttgtaatatagagt

SEQ ID NO: 5121308 - DNA, 25 bp, Homo sapien
ctagggaactattatgcctcctttt

SEQ ID NO: 5121309 - DNA, 25 bp, Homo sapien
tagggaactattatgcctcctttta

SEQ ID NO: 5121310 - DNA, 25 bp, Homo sapien
ctttaaggttatgtgtgattcccca

SEQ ID NO: 5121311 - DNA, 25 bp, Homo sapien
ttcctgactctgtagtgtgcatgtt

SEQ ID NO: 5121312 - DNA, 25 bp, Homo sapien
tcttttgccccagtacagccttggg

SEQ ID NO: 5121313 - DNA, 25 bp, Homo sapien
tctggttgaattgggaataaattca

SEQ ID NO: 5121314 - DNA, 25 bp, Homo sapien
gttatttttcctttgctgcttgtcc

SEQ ID NO: 5121315 - DNA, 25 bp, Homo sapien
aaagttatttttcctttgctgcttg

SEQ ID NO: 5121316 - DNA, 25 bp, Homo sapien
tatttttcctttgctgcttgtcccc

SEQ ID NO: 5121317 - DNA, 25 bp, Homo sapien
ttttcctttgctgcttgtcccccat

SEQ ID NO: 5121318 - DNA, 25 bp, Homo sapien
gaggctcttttctacattccgtcta

SEQ ID NO: 5121319 - DNA, 25 bp, Homo sapien
tagtcactcgataatcgtgatgtgg

SEQ ID NO: 5121320 - DNA, 25 bp, Homo sapien
cgtgatgtggagtaatatagttctg

SEQ ID NO: 5121321 - DNA, 25 bp, Homo sapien
cattccgtctagatactttagtcac

SEQ ID NO: 5121322 - DNA, 25 bp, Homo sapien
ccaggtctttgcctatctttgtcga

SEQ ID NO: 5121323 - DNA, 25 bp, Homo sapien
tatctttgtcgagtccagcgttgtc

SEQ ID NO: 5121324 - DNA, 25 bp, Homo sapien
gcgttgtctaccaaatgcttagcac

SEQ ID NO: 5121325 - DNA, 25 bp, Homo sapien
aaatgcttagcacaacactgattcc

SEQ ID NO: 5121326 - DNA, 25 bp, Homo sapien
ttacagtgaggtcccttctttctag

SEQ ID NO: 5121327 - DNA, 25 bp, Homo sapien
acagtgaggtcccttctttctagat

SEQ ID NO: 5121328 - DNA, 25 bp, Homo sapien
cagtgaggtcccttctttctagatc

SEQ ID NO: 5121329 - DNA, 25 bp, Homo sapien
tttacagtgaggtcccttctttcta

SEQ ID NO: 5121330 - DNA, 25 bp, Homo sapien
aggtggcccagcagatctcagatgc

SEQ ID NO: 5121331 - DNA, 25 bp, Homo sapien
caaggtagatgaactgatggatgac

SEQ ID NO: 5121332 - DNA, 25 bp, Homo sapien
tggcccagcagatctcagatgccat

SEQ ID NO: 5121333 - DNA, 25 bp, Homo sapien
tagatgaactgatggatgacatcac

SEQ ID NO: 5121334 - DNA, 25 bp, Homo sapien
ctgcaagcaatgaaaactccatcac

SEQ ID NO: 5121335 - DNA, 25 bp, Homo sapien
agaatgtgtaacactgttagcgtct

SEQ ID NO: 5121336 - DNA, 25 bp, Homo sapien
caagcaatgaaaactccatcactgg

SEQ ID NO: 5121337 - DNA, 25 bp, Homo sapien
tgtgtaacactgttagcgtcttgca

SEQ ID NO: 5121338 - DNA, 25 bp, Homo sapien
caggtgatgccaaaaatcactgagg

SEQ ID NO: 5121339 - DNA, 25 bp, Homo sapien
tgaggaagcctacttgaaagcgcaa

SEQ ID NO: 5121340 - DNA, 25 bp, Homo sapien
caaatttggagctagattaaccacc

SEQ ID NO: 5121341 - DNA, 25 bp, Homo sapien
acttgaaagcgcaaatttggagcta

SEQ ID NO: 5121342 - DNA, 25 bp, Homo sapien
atcgtccagggtcactgttgtgctt

SEQ ID NO: 5121343 - DNA, 25 bp, Homo sapien
gatcgtccagggtcactgttgtgct

SEQ ID NO: 5121344 - DNA, 25 bp, Homo sapien
cttgatcgtccagggtcactgttgt

SEQ ID NO: 5121345 - DNA, 25 bp, Homo sapien
tgatcgtccagggtcactgttgtgc

SEQ ID NO: 5121346 - DNA, 25 bp, Homo sapien
gccaagatcttttccaggtccacaa

SEQ ID NO: 5121347 - DNA, 25 bp, Homo sapien
caatatgtgccttcaacttgcttag

SEQ ID NO: 5121348 - DNA, 25 bp, Homo sapien
ggtgtagaggaaacctttgaatcca

SEQ ID NO: 5121349 - DNA, 25 bp, Homo sapien
catagttggtgtagaggaaaccttt

SEQ ID NO: 5121350 - DNA, 25 bp, Homo sapien
atttaccatgatagttagatttgga

SEQ ID NO: 5121351 - DNA, 25 bp, Homo sapien
tgatagttagatttggataattgtc

SEQ ID NO: 5121352 - DNA, 25 bp, Homo sapien
ggataattgtcacatttcacaagat

SEQ ID NO: 5121353 - DNA, 25 bp, Homo sapien
taccatgatagttagatttggataa

SEQ ID NO: 5121354 - DNA, 25 bp, Homo sapien
tgtattgtagtagacacaaactgtg

SEQ ID NO: 5121355 - DNA, 25 bp, Homo sapien
tcagcttccttcgatcttcatgctt

SEQ ID NO: 5121356 - DNA, 25 bp, Homo sapien
ttcctgcgcaaggtgcttagcttca

SEQ ID NO: 5121357 - DNA, 25 bp, Homo sapien
tgtagggacagaatgtactgcagaa

SEQ ID NO: 5121358 - DNA, 25 bp, Homo sapien
gctcgttggagaatattaaccacaa

SEQ ID NO: 5121359 - DNA, 25 bp, Homo sapien
taaaggggtacatcaatagcagctc

SEQ ID NO: 5121360 - DNA, 25 bp, Homo sapien
ccatgtaaatgctagcatccgaaga

SEQ ID NO: 5121361 - DNA, 25 bp, Homo sapien
tcacctccatgtaaatgctagcatc

SEQ ID NO: 5121362 - DNA, 25 bp, Homo sapien
tgacgacaagggacaacggccttaa

SEQ ID NO: 5121363 - DNA, 25 bp, Homo sapien
cttgctctatgttctatcgaccttg

SEQ ID NO: 5121364 - DNA, 25 bp, Homo sapien
aacggttagcggcacttgctctatg

SEQ ID NO: 5121365 - DNA, 25 bp, Homo sapien
agcagagtccctacaacgagtggaa

SEQ ID NO: 5121366 - DNA, 25 bp, Homo sapien
gggcgctttggacgctgcctgggcc

SEQ ID NO: 5121367 - DNA, 25 bp, Homo sapien
tatgtcttaacggtcttgagttccg

SEQ ID NO: 5121368 - DNA, 25 bp, Homo sapien
tcaggtatatgtcttaacggtcttg

SEQ ID NO: 5121369 - DNA, 25 bp, Homo sapien
cttgagttccgttctggcagagagc

SEQ ID NO: 5121370 - DNA, 25 bp, Homo sapien
ccatcaggaaaacatcgatgctgct

SEQ ID NO: 5121371 - DNA, 25 bp, Homo sapien
cctgaagaagagtagtcgaggatat

SEQ ID NO: 5121372 - DNA, 25 bp, Homo sapien
gaagaaggaacacacagtctccagc

SEQ ID NO: 5121373 - DNA, 25 bp, Homo sapien
gaaaacatcgatgctgcttgaagaa

SEQ ID NO: 5121374 - DNA, 25 bp, Homo sapien
ggcctgatagctttggaaaccaaaa

SEQ ID NO: 5121375 - DNA, 25 bp, Homo sapien
tgccttctgcttgatcgtggcctga

SEQ ID NO: 5121376 - DNA, 25 bp, Homo sapien
tctacaaaaccctgtgtatagtgaa

SEQ ID NO: 5121377 - DNA, 25 bp, Homo sapien
aaaaccctgtgtatagtgaagcctg

SEQ ID NO: 5121378 - DNA, 25 bp, Homo sapien
caagttactcgatattaagccaaag

SEQ ID NO: 5121379 - DNA, 25 bp, Homo sapien
tggatctctactcaggatatgaggg

SEQ ID NO: 5121380 - DNA, 25 bp, Homo sapien
ggtgctaaaaccttacagaatgcct

SEQ ID NO: 5121381 - DNA, 25 bp, Homo sapien
gattgaactatttctacggtggcct

SEQ ID NO: 5121382 - DNA, 25 bp, Homo sapien
cattcagtgatgtactggtaaggcc

SEQ ID NO: 5121383 - DNA, 25 bp, Homo sapien
ggctaaagctgactagagctgagta

SEQ ID NO: 5121384 - DNA, 25 bp, Homo sapien
ggtgggactcagtcactagagtgtt

SEQ ID NO: 5121385 - DNA, 25 bp, Homo sapien
tgatggctagataagatgtactggg

SEQ ID NO: 5121386 - DNA, 25 bp, Homo sapien
aatgttacagaccaagcagctccta

SEQ ID NO: 5121387 - DNA, 25 bp, Homo sapien
tcttatgttctattccgtttatact

SEQ ID NO: 5121388 - DNA, 25 bp, Homo sapien
tgcccaagggtatgcagcatacaaa

SEQ ID NO: 5121389 - DNA, 25 bp, Homo sapien
gcagctcctattcagaaattcccag

SEQ ID NO: 5121390 - DNA, 25 bp, Homo sapien
taaattaaagagtgtaagcctggca

SEQ ID NO: 5121391 - DNA, 25 bp, Homo sapien
tcaaaacagcggaaactaaacagag

SEQ ID NO: 5121392 - DNA, 25 bp, Homo sapien
taacctgtaacctcacacgttttca

SEQ ID NO: 5121393 - DNA, 25 bp, Homo sapien
aaactcttgtcaccctatcttcata

SEQ ID NO: 5121394 - DNA, 25 bp, Homo sapien
ccatgagaagattttaatactcctt

SEQ ID NO: 5121395 - DNA, 25 bp, Homo sapien
cgggtaccatgactctgttgaataa

SEQ ID NO: 5121396 - DNA, 25 bp, Homo sapien
agaagttccaggcaatacccacaca

SEQ ID NO: 5121397 - DNA, 25 bp, Homo sapien
acagccacaaatccaaacgcctcat

SEQ ID NO: 5121398 - DNA, 25 bp, Homo sapien
ccacatcactgcttcgggtaccatg

SEQ ID NO: 5121399 - DNA, 25 bp, Homo sapien
cagactagtgaggtaaggagattac

SEQ ID NO: 5121400 - DNA, 25 bp, Homo sapien
ggtaaggagattacacaggcaattc

SEQ ID NO: 5121401 - DNA, 25 bp, Homo sapien
tctacgtctatgaagatctaggaag

SEQ ID NO: 5121402 - DNA, 25 bp, Homo sapien
ttctcatctagcaagaaggaagaca

SEQ ID NO: 5121403 - DNA, 25 bp, Homo sapien
gagttcttgcttgcgtccgggtaga

SEQ ID NO: 5121404 - DNA, 25 bp, Homo sapien
gaaggttggtagctcctcctggcag

SEQ ID NO: 5121405 - DNA, 25 bp, Homo sapien
gaggcgtacttctctcggcagctgc

SEQ ID NO: 5121406 - DNA, 25 bp, Homo sapien
tcagatatgagagcatgcaccggga

SEQ ID NO: 5121407 - DNA, 25 bp, Homo sapien
ctatctcaactcttggttcacccat

SEQ ID NO: 5121408 - DNA, 25 bp, Homo sapien
cacctcgagacatgacaatgtccca

SEQ ID NO: 5121409 - DNA, 25 bp, Homo sapien
ccaggttcctgcttggaaaacatat

SEQ ID NO: 5121410 - DNA, 25 bp, Homo sapien
tctatctcaactcttggttcaccca

SEQ ID NO: 5121411 - DNA, 25 bp, Homo sapien
gactttcgaggaactctcatgtgtt

SEQ ID NO: 5121412 - DNA, 25 bp, Homo sapien
tttataggactttcgaggaactctc

SEQ ID NO: 5121413 - DNA, 25 bp, Homo sapien
taggactttcgaggaactctcatgt

SEQ ID NO: 5121414 - DNA, 25 bp, Homo sapien
actgtcacccccgtttttgtgctct

SEQ ID NO: 5121415 - DNA, 25 bp, Homo sapien
cattagtcaccaagtttttcccaag

SEQ ID NO: 5121416 - DNA, 25 bp, Homo sapien
tgcacccaagaccattagtcaccaa

SEQ ID NO: 5121417 - DNA, 25 bp, Homo sapien
cccctgtagctggttgcacccaaga

SEQ ID NO: 5121418 - DNA, 25 bp, Homo sapien
caagtaaaccatcacgtttccccat

SEQ ID NO: 5121419 - DNA, 25 bp, Homo sapien
ggtgacctatgactccttgacgttg

SEQ ID NO: 5121420 - DNA, 25 bp, Homo sapien
ccagttgaagctcccgttcgtataa

SEQ ID NO: 5121421 - DNA, 25 bp, Homo sapien
tgacgttgacaatcgggtggtcctc

SEQ ID NO: 5121422 - DNA, 25 bp, Homo sapien
cctccattatatctagagccaggtg

SEQ ID NO: 5121423 - DNA, 25 bp, Homo sapien
tcaggacccatataagtctctgcta

SEQ ID NO: 5121424 - DNA, 25 bp, Homo sapien
aactttataatccagtcactctggg

SEQ ID NO: 5121425 - DNA, 25 bp, Homo sapien
tgatctgaattgtggccatttcccc

SEQ ID NO: 5121426 - DNA, 25 bp, Homo sapien
aattaggaattacacattggatcag

SEQ ID NO: 5121427 - DNA, 25 bp, Homo sapien
aaaaacattgagagtactacaacag

SEQ ID NO: 5121428 - DNA, 25 bp, Homo sapien
tgaaaaacattgagagtactacaac

SEQ ID NO: 5121429 - DNA, 25 bp, Homo sapien
ctgaaaaacattgagagtactacaa

SEQ ID NO: 5121430 - DNA, 25 bp, Homo sapien
gaaaaacattgagagtactacaaca

SEQ ID NO: 5121431 - DNA, 25 bp, Homo sapien
tcattgaacaggcacaggaagtaag

SEQ ID NO: 5121432 - DNA, 25 bp, Homo sapien
tgctgccgatcagaaaatgcatagg

SEQ ID NO: 5121433 - DNA, 25 bp, Homo sapien
tgccacgggaaaattagcagctctg

SEQ ID NO: 5121434 - DNA, 25 bp, Homo sapien
tcagcaaacagtatactgccacggg

SEQ ID NO: 5121435 - DNA, 25 bp, Homo sapien
ggcataagatgatatctttttgtgg

SEQ ID NO: 5121436 - DNA, 25 bp, Homo sapien
cagcacgatttataaactttgggta

SEQ ID NO: 5121437 - DNA, 25 bp, Homo sapien
atagcagcacgatttataaactttg

SEQ ID NO: 5121438 - DNA, 25 bp, Homo sapien
tgccattctaattggcataagatga

SEQ ID NO: 5121439 - DNA, 25 bp, Homo sapien
tgacacgttttagatgctgtctctg

SEQ ID NO: 5121440 - DNA, 25 bp, Homo sapien
gacacgttttagatgctgtctctgt

SEQ ID NO: 5121441 - DNA, 25 bp, Homo sapien
ctgacacgttttagatgctgtctct

SEQ ID NO: 5121442 - DNA, 25 bp, Homo sapien
gggcagattctttacacactccaca

SEQ ID NO: 5121443 - DNA, 25 bp, Homo sapien
cctatgtgtcagtctccttctgctt

SEQ ID NO: 5121444 - DNA, 25 bp, Homo sapien
ccatcagatctctgatctagcaggg

SEQ ID NO: 5121445 - DNA, 25 bp, Homo sapien
aaaaaggaggatatgtctgctccta

SEQ ID NO: 5121446 - DNA, 25 bp, Homo sapien
agtttctcttaaggcttgggtgcct

SEQ ID NO: 5121447 - DNA, 25 bp, Homo sapien
ctacggcactgaacctaggcttctc

SEQ ID NO: 5121448 - DNA, 25 bp, Homo sapien
tgtggtgcccagcattccacatgta

SEQ ID NO: 5121449 - DNA, 25 bp, Homo sapien
gtggtgcccagcattccacatgtag

SEQ ID NO: 5121450 - DNA, 25 bp, Homo sapien
catctagatgtttcttatagtattc

SEQ ID NO: 5121451 - DNA, 25 bp, Homo sapien
cgctttgaagggcagtgcatcatct

SEQ ID NO: 5121452 - DNA, 25 bp, Homo sapien
tatttcaagtgccaaatcaacggtg

SEQ ID NO: 5121453 - DNA, 25 bp, Homo sapien
taattcatggcagcgtatttcaagt

SEQ ID NO: 5121454 - DNA, 25 bp, Homo sapien
tcatagctgctctcctacacttgtg

SEQ ID NO: 5121455 - DNA, 25 bp, Homo sapien
tattctttccctgtcacaccatgga

SEQ ID NO: 5121456 - DNA, 25 bp, Homo sapien
caccatggattgatgactagtccta

SEQ ID NO: 5121457 - DNA, 25 bp, Homo sapien
taactgattgggaacattggcatga

SEQ ID NO: 5121458 - DNA, 25 bp, Homo sapien
cagtgatgctggtaccaataacata

SEQ ID NO: 5121459 - DNA, 25 bp, Homo sapien
gttttcagtaagatgcagtaaccca

SEQ ID NO: 5121460 - DNA, 25 bp, Homo sapien
aagatgcagtaacccaccacagtga

SEQ ID NO: 5121461 - DNA, 25 bp, Homo sapien
gatgctggtaccaataacatagtac

SEQ ID NO: 5121462 - DNA, 25 bp, Homo sapien
gatgggaatagtcttccctccttgg

SEQ ID NO: 5121463 - DNA, 25 bp, Homo sapien
tgggatgggaatagtcttccctcct

SEQ ID NO: 5121464 - DNA, 25 bp, Homo sapien
cctggcagcaaccaatctgtgccca

SEQ ID NO: 5121465 - DNA, 25 bp, Homo sapien
gcctggcagcaaccaatctgtgccc

SEQ ID NO: 5121466 - DNA, 25 bp, Homo sapien
tgcaccatctcctacatatgagtaa

SEQ ID NO: 5121467 - DNA, 25 bp, Homo sapien
cctacatatgagtaattggtaaaac

SEQ ID NO: 5121468 - DNA, 25 bp, Homo sapien
tgagtaattggtaaaacaaggatac

SEQ ID NO: 5121469 - DNA, 25 bp, Homo sapien
tttaatgcaccatctcctacatatg

SEQ ID NO: 5121470 - DNA, 25 bp, Homo sapien
ctgcaaaggttcaggcgacatgcct

SEQ ID NO: 5121471 - DNA, 25 bp, Homo sapien
tgaatactgcaaaggttcaggcgac

SEQ ID NO: 5121472 - DNA, 25 bp, Homo sapien
aaggttcaggcgacatgccttcctc

SEQ ID NO: 5121473 - DNA, 25 bp, Homo sapien
acatgccttcctcttggtgtgaggg

SEQ ID NO: 5121474 - DNA, 25 bp, Homo sapien
caatcaagcttctgatggaaatatc

SEQ ID NO: 5121475 - DNA, 25 bp, Homo sapien
aatcaccttataaagcgtgtcgtca

SEQ ID NO: 5121476 - DNA, 25 bp, Homo sapien
tataaagcgtgtcgtcaatcaagct

SEQ ID NO: 5121477 - DNA, 25 bp, Homo sapien
tcttctgatgtttgtatccgagaca

SEQ ID NO: 5121478 - DNA, 25 bp, Homo sapien
tgcagtatggaatagtgccagatga

SEQ ID NO: 5121479 - DNA, 25 bp, Homo sapien
tcagaaactgcagtatggaatagtg

SEQ ID NO: 5121480 - DNA, 25 bp, Homo sapien
aactgcagtatggaatagtgccaga

SEQ ID NO: 5121481 - DNA, 25 bp, Homo sapien
gaaactgcagtatggaatagtgcca

SEQ ID NO: 5121482 - DNA, 25 bp, Homo sapien
ttcaataatgacttgaattaactga

SEQ ID NO: 5121483 - DNA, 25 bp, Homo sapien
taaactctactggaacttgtatgtc

SEQ ID NO: 5121484 - DNA, 25 bp, Homo sapien
cttgtatgtctggtaagtcttcaat

SEQ ID NO: 5121485 - DNA, 25 bp, Homo sapien
tgcttttccacgttgcattctgtag

SEQ ID NO: 5121486 - DNA, 25 bp, Homo sapien
gatattttcctgttctactctttta

SEQ ID NO: 5121487 - DNA, 25 bp, Homo sapien
ttttcctgttctactcttttactca

SEQ ID NO: 5121488 - DNA, 25 bp, Homo sapien
tttcctgttctactcttttactcat

SEQ ID NO: 5121489 - DNA, 25 bp, Homo sapien
cttgatattttcctgttctactctt

SEQ ID NO: 5121490 - DNA, 25 bp, Homo sapien
gagtacagtggtttttcacagaaac

SEQ ID NO: 5121491 - DNA, 25 bp, Homo sapien
ctgctctgtttatttcctgagctat

SEQ ID NO: 5121492 - DNA, 25 bp, Homo sapien
gagctatttaatccctccttagtca

SEQ ID NO: 5121493 - DNA, 25 bp, Homo sapien
ctactcccagaatgtcaccatagtg

SEQ ID NO: 5121494 - DNA, 25 bp, Homo sapien
tattttattcacaagttcatcgtag

SEQ ID NO: 5121495 - DNA, 25 bp, Homo sapien
tgtgatgatcagtgaggtacagcca

SEQ ID NO: 5121496 - DNA, 25 bp, Homo sapien
aactacttcaattggtgttttgtgt

SEQ ID NO: 5121497 - DNA, 25 bp, Homo sapien
cacaagttcatcgtaggcatcaaaa

SEQ ID NO: 5121498 - DNA, 25 bp, Homo sapien
tgcttccaactctaactcagccaaa

SEQ ID NO: 5121499 - DNA, 25 bp, Homo sapien
ttccaactctaactcagccaaaaaa

SEQ ID NO: 5121500 - DNA, 25 bp, Homo sapien
tttttctgcttccaactctaactca

SEQ ID NO: 5121501 - DNA, 25 bp, Homo sapien
tttctgcttccaactctaactcagc

SEQ ID NO: 5121502 - DNA, 25 bp, Homo sapien
agacaaatgccacgaaccttcacca

SEQ ID NO: 5121503 - DNA, 25 bp, Homo sapien
aatgccacgaaccttcaccactgcc

SEQ ID NO: 5121504 - DNA, 25 bp, Homo sapien
tctcagacaaatgccacgaaccttc

SEQ ID NO: 5121505 - DNA, 25 bp, Homo sapien
caaatgccacgaaccttcaccactg

SEQ ID NO: 5121506 - DNA, 25 bp, Homo sapien
ctgatatacactgtcttagctgttc

SEQ ID NO: 5121507 - DNA, 25 bp, Homo sapien
gttcttacattcctttcatggctca

SEQ ID NO: 5121508 - DNA, 25 bp, Homo sapien
ctgtcttagctgttcttacattcct

SEQ ID NO: 5121509 - DNA, 25 bp, Homo sapien
acactgtcttagctgttcttacatt

SEQ ID NO: 5121510 - DNA, 25 bp, Homo sapien
gaaatgggataacaaatgaaagcga

SEQ ID NO: 5121511 - DNA, 25 bp, Homo sapien
tgaaagcgaagagcttcacccagct

SEQ ID NO: 5121512 - DNA, 25 bp, Homo sapien
tactgcatgtggagtgttgtgagaa

SEQ ID NO: 5121513 - DNA, 25 bp, Homo sapien
tgctactgcatgtggagtgttgtga

SEQ ID NO: 5121514 - DNA, 25 bp, Homo sapien
ccaaatccaacattttcagggacat

SEQ ID NO: 5121515 - DNA, 25 bp, Homo sapien
gattccaaatccaacattttcaggg

SEQ ID NO: 5121516 - DNA, 25 bp, Homo sapien
ctgatttgtttgattccaaatccaa

SEQ ID NO: 5121517 - DNA, 25 bp, Homo sapien
ttccaaatccaacattttcagggac

SEQ ID NO: 5121518 - DNA, 25 bp, Homo sapien
gcattgttatttgggaacttcagca

SEQ ID NO: 5121519 - DNA, 25 bp, Homo sapien
tcagcaaccatgtcccttttgccgt

SEQ ID NO: 5121520 - DNA, 25 bp, Homo sapien
gccgtattcagcatattgacatttc

SEQ ID NO: 5121521 - DNA, 25 bp, Homo sapien
gcaaaagctccattactggaagctg

SEQ ID NO: 5121522 - DNA, 25 bp, Homo sapien
tataatcgacaaagtgcaatacaga

SEQ ID NO: 5121523 - DNA, 25 bp, Homo sapien
gataaagtaataaggatccagtgtg

SEQ ID NO: 5121524 - DNA, 25 bp, Homo sapien
gcaagcaagaatcgaagtcaaaata

SEQ ID NO: 5121525 - DNA, 25 bp, Homo sapien
tgagcagaaggtttacactggactg

SEQ ID NO: 5121526 - DNA, 25 bp, Homo sapien
gggaatgatgcaagtcggtatagct

SEQ ID NO: 5121527 - DNA, 25 bp, Homo sapien
cttgatggcatttccttaagcagac

SEQ ID NO: 5121528 - DNA, 25 bp, Homo sapien
atgcaagtcggtatagcttttcccc

SEQ ID NO: 5121529 - DNA, 25 bp, Homo sapien
ctatctggggaatgatgcaagtcgg

SEQ ID NO: 5121530 - DNA, 25 bp, Homo sapien
tcagggcccatgttctgtgtcattc

SEQ ID NO: 5121531 - DNA, 25 bp, Homo sapien
agggcccatgttctgtgtcattcca

SEQ ID NO: 5121532 - DNA, 25 bp, Homo sapien
gttcagggcccatgttctgtgtcat

SEQ ID NO: 5121533 - DNA, 25 bp, Homo sapien
tgttcagggcccatgttctgtgtca

SEQ ID NO: 5121534 - DNA, 25 bp, Homo sapien
tctatcacagatatgagagtctcaa

SEQ ID NO: 5121535 - DNA, 25 bp, Homo sapien
tcaactgacttatctatcacagata

SEQ ID NO: 5121536 - DNA, 25 bp, Homo sapien
caaaaacaaagatgctggtttttat

SEQ ID NO: 5121537 - DNA, 25 bp, Homo sapien
gagtctcaatactcaccttcccaaa

SEQ ID NO: 5121538 - DNA, 25 bp, Homo sapien
attaacacgcttaatctcttctctg

SEQ ID NO: 5121539 - DNA, 25 bp, Homo sapien
taatctcttctctgatcgtcaaatc

SEQ ID NO: 5121540 - DNA, 25 bp, Homo sapien
ctctgatcgtcaaatctgctttcgc

SEQ ID NO: 5121541 - DNA, 25 bp, Homo sapien
tacattaacacgcttaatctcttct

SEQ ID NO: 5121542 - DNA, 25 bp, Homo sapien
tacaatccttgcttagccactgctg

SEQ ID NO: 5121543 - DNA, 25 bp, Homo sapien
aatccttgcttagccactgctgcca

SEQ ID NO: 5121544 - DNA, 25 bp, Homo sapien
gctacaatccttgcttagccactgc

SEQ ID NO: 5121545 - DNA, 25 bp, Homo sapien
gctgccaccacttcaactgtgccat

SEQ ID NO: 5121546 - DNA, 25 bp, Homo sapien
ccacactcattgtctctgaaacaca

SEQ ID NO: 5121547 - DNA, 25 bp, Homo sapien
ttgacttgccctcttatgctccctg

SEQ ID NO: 5121548 - DNA, 25 bp, Homo sapien
caatcttggaaaatggttgtgcaga

SEQ ID NO: 5121549 - DNA, 25 bp, Homo sapien
cattgctttgcctagttgacttgcc

SEQ ID NO: 5121550 - DNA, 25 bp, Homo sapien
tatggatgacatgaggctccaatac

SEQ ID NO: 5121551 - DNA, 25 bp, Homo sapien
aatatggatgacatgaggctccaat

SEQ ID NO: 5121552 - DNA, 25 bp, Homo sapien
caaatatggatgacatgaggctcca

SEQ ID NO: 5121553 - DNA, 25 bp, Homo sapien
tcaaatatggatgacatgaggctcc

SEQ ID NO: 5121554 - DNA, 25 bp, Homo sapien
tctaatctataaacccaaagcagca

SEQ ID NO: 5121555 - DNA, 25 bp, Homo sapien
atctaatctataaacccaaagcagc

SEQ ID NO: 5121556 - DNA, 25 bp, Homo sapien
ttgttgaagcctttgtggaactgcc

SEQ ID NO: 5121557 - DNA, 25 bp, Homo sapien
gactgagttgttatctatacgttgt

SEQ ID NO: 5121558 - DNA, 25 bp, Homo sapien
tctcttgcaacctccaattttggca

SEQ ID NO: 5121559 - DNA, 25 bp, Homo sapien
catgtgtagtgtatatctggaaacc

SEQ ID NO: 5121560 - DNA, 25 bp, Homo sapien
gttactgagttaaaagcccaggcaa

SEQ ID NO: 5121561 - DNA, 25 bp, Homo sapien
tctgatatacatggccacgagatca

SEQ ID NO: 5121562 - DNA, 25 bp, Homo sapien
cagaaataagcccttgggttactga

SEQ ID NO: 5121563 - DNA, 25 bp, Homo sapien
cccaggcaatttcatccgcatgttt

SEQ ID NO: 5121564 - DNA, 25 bp, Homo sapien
tgagatccctgaatctatggtttgc

SEQ ID NO: 5121565 - DNA, 25 bp, Homo sapien
tatattgaacttactgtgcagctca

SEQ ID NO: 5121566 - DNA, 25 bp, Homo sapien
cccaattctctgcttaggttaaatg

SEQ ID NO: 5121567 - DNA, 25 bp, Homo sapien
tcttgaccttaatgtgctgtataca

SEQ ID NO: 5121568 - DNA, 25 bp, Homo sapien
tgaagttatcgaatggttttggaag

SEQ ID NO: 5121569 - DNA, 25 bp, Homo sapien
cctgaagttatcgaatggttttgga

SEQ ID NO: 5121570 - DNA, 25 bp, Homo sapien
tcctgaagttatcgaatggttttgg

SEQ ID NO: 5121571 - DNA, 25 bp, Homo sapien
ctgaagttatcgaatggttttggaa

SEQ ID NO: 5121572 - DNA, 25 bp, Homo sapien
gataactttggagtgaagcattggt

SEQ ID NO: 5121573 - DNA, 25 bp, Homo sapien
tgataactttggagtgaagcattgg

SEQ ID NO: 5121574 - DNA, 25 bp, Homo sapien
taactttggagtgaagcattggtgt

SEQ ID NO: 5121575 - DNA, 25 bp, Homo sapien
ttgataactttggagtgaagcattg

SEQ ID NO: 5121576 - DNA, 25 bp, Homo sapien
tgcttgcaacagttagcctgggctc

SEQ ID NO: 5121577 - DNA, 25 bp, Homo sapien
caacaatgcttgcaacagttagcct

SEQ ID NO: 5121578 - DNA, 25 bp, Homo sapien
aatgcttgcaacagttagcctgggc

SEQ ID NO: 5121579 - DNA, 25 bp, Homo sapien
cttgcaacagttagcctgggctctg

SEQ ID NO: 5121580 - DNA, 25 bp, Homo sapien
ccttctcctctttttcaaaatattg

SEQ ID NO: 5121581 - DNA, 25 bp, Homo sapien
ttctcctctttttcaaaatattgcc

SEQ ID NO: 5121582 - DNA, 25 bp, Homo sapien
ttatgcttttccatcttccttctcc

SEQ ID NO: 5121583 - DNA, 25 bp, Homo sapien
ccatcttccttctcctctttttcaa

SEQ ID NO: 5121584 - DNA, 25 bp, Homo sapien
tgctgctcagcgtaccctcttgcat

SEQ ID NO: 5121585 - DNA, 25 bp, Homo sapien
taaagcccttcttgcccacactgtc

SEQ ID NO: 5121586 - DNA, 25 bp, Homo sapien
tgcccacactgtcataggtgctgct

SEQ ID NO: 5121587 - DNA, 25 bp, Homo sapien
taggtgctgctcagcgtaccctctt

SEQ ID NO: 5121588 - DNA, 25 bp, Homo sapien
acagcccagagggttactgcattcc

SEQ ID NO: 5121589 - DNA, 25 bp, Homo sapien
cacagcccagagggttactgcattc

SEQ ID NO: 5121590 - DNA, 25 bp, Homo sapien
tcacagcccagagggttactgcatt

SEQ ID NO: 5121591 - DNA, 25 bp, Homo sapien
catgccccataagatggtatactct

SEQ ID NO: 5121592 - DNA, 25 bp, Homo sapien
ggaagtgaaaagtatggttacacat

SEQ ID NO: 5121593 - DNA, 25 bp, Homo sapien
gaaaagtatggttacacatgcccca

SEQ ID NO: 5121594 - DNA, 25 bp, Homo sapien
agaagtagcagacacttggttagct

SEQ ID NO: 5121595 - DNA, 25 bp, Homo sapien
actctttgttgtccaatggacatac

SEQ ID NO: 5121596 - DNA, 25 bp, Homo sapien
cactctttgttgtccaatggacata

SEQ ID NO: 5121597 - DNA, 25 bp, Homo sapien
tcactctttgttgtccaatggacat

SEQ ID NO: 5121598 - DNA, 25 bp, Homo sapien
caaattatcttgtgtggctagcaca

SEQ ID NO: 5121599 - DNA, 25 bp, Homo sapien
ggtgagagatttgcctggtacagct

SEQ ID NO: 5121600 - DNA, 25 bp, Homo sapien
tgggccaagcgtccaactgacagag

SEQ ID NO: 5121601 - DNA, 25 bp, Homo sapien
tacagcgctaacatccaggaaacag

SEQ ID NO: 5121602 - DNA, 25 bp, Homo sapien
ttacatggtgctggtgaaaacacct

SEQ ID NO: 5121603 - DNA, 25 bp, Homo sapien
tacatggtgctggtgaaaacaccta

SEQ ID NO: 5121604 - DNA, 25 bp, Homo sapien
gcatggctgccgatttgctataaga

SEQ ID NO: 5121605 - DNA, 25 bp, Homo sapien
ttcttggcatggctgccgatttgct

SEQ ID NO: 5121606 - DNA, 25 bp, Homo sapien
ggctgccgatttgctataagaaatg

SEQ ID NO: 5121607 - DNA, 25 bp, Homo sapien
ggcatggctgccgatttgctataag

SEQ ID NO: 5121608 - DNA, 25 bp, Homo sapien
ttgtaatggctgaggacagttttct

SEQ ID NO: 5121609 - DNA, 25 bp, Homo sapien
cagtgtgtttttgtaatggctgagg

SEQ ID NO: 5121610 - DNA, 25 bp, Homo sapien
gtgtgtttttgtaatggctgaggac

SEQ ID NO: 5121611 - DNA, 25 bp, Homo sapien
tgtttttgtaatggctgaggacagt

SEQ ID NO: 5121612 - DNA, 25 bp, Homo sapien
tcaagagcaggttgtcaatttccat

SEQ ID NO: 5121613 - DNA, 25 bp, Homo sapien
gatgtgggaatttagtgacataaat

SEQ ID NO: 5121614 - DNA, 25 bp, Homo sapien
tgattttagatgtttctagcttttt

SEQ ID NO: 5121615 - DNA, 25 bp, Homo sapien
tgttagactgttgattttagatgtt

SEQ ID NO: 5121616 - DNA, 25 bp, Homo sapien
gagaatagccaatagtactagtgcc

SEQ ID NO: 5121617 - DNA, 25 bp, Homo sapien
ggataaccagaatgagacctcctgc

SEQ ID NO: 5121618 - DNA, 25 bp, Homo sapien
gactagatttgaccccaaagctggg

SEQ ID NO: 5121619 - DNA, 25 bp, Homo sapien
tctgacccaaaatgtgtgcatgaac

SEQ ID NO: 5121620 - DNA, 25 bp, Homo sapien
gcttccatctgatcatagaaagacc

SEQ ID NO: 5121621 - DNA, 25 bp, Homo sapien
aaaagctgatcaggtgacacctcat

SEQ ID NO: 5121622 - DNA, 25 bp, Homo sapien
acctcattgctataagcagttcaac

SEQ ID NO: 5121623 - DNA, 25 bp, Homo sapien
cagttatctgaagagtttttctgcc

SEQ ID NO: 5121624 - DNA, 25 bp, Homo sapien
agcaattgcaattgccttctgagca

SEQ ID NO: 5121625 - DNA, 25 bp, Homo sapien
gcaattgcaattgccttctgagcat

SEQ ID NO: 5121626 - DNA, 25 bp, Homo sapien
cagcaattgcaattgccttctgagc

SEQ ID NO: 5121627 - DNA, 25 bp, Homo sapien
acagcaattgcaattgccttctgag

SEQ ID NO: 5121628 - DNA, 25 bp, Homo sapien
tccttaggacgtttatcagattcat

SEQ ID NO: 5121629 - DNA, 25 bp, Homo sapien
tgaacaagggacatttccttaggac

SEQ ID NO: 5121630 - DNA, 25 bp, Homo sapien
ggacatttccttaggacgtttatca

SEQ ID NO: 5121631 - DNA, 25 bp, Homo sapien
gtgaacaagggacatttccttagga

SEQ ID NO: 5121632 - DNA, 25 bp, Homo sapien
aacttttgataattgcagctttgta

SEQ ID NO: 5121633 - DNA, 25 bp, Homo sapien
ggcagaacatccataggtccttgta

SEQ ID NO: 5121634 - DNA, 25 bp, Homo sapien
attggcagaacatccataggtcctt

SEQ ID NO: 5121635 - DNA, 25 bp, Homo sapien
gaacatccataggtccttgtacagg

SEQ ID NO: 5121636 - DNA, 25 bp, Homo sapien
ctaacgttttggttaaatgatagct

SEQ ID NO: 5121637 - DNA, 25 bp, Homo sapien
tctaacgttttggttaaatgatagc

SEQ ID NO: 5121638 - DNA, 25 bp, Homo sapien
taacgttttggttaaatgatagcta

SEQ ID NO: 5121639 - DNA, 25 bp, Homo sapien
atctaacgttttggttaaatgatag

SEQ ID NO: 5121640 - DNA, 25 bp, Homo sapien
agccatgttgttaggcatggaggaa

SEQ ID NO: 5121641 - DNA, 25 bp, Homo sapien
ttagcagttctcacatactttctcc

SEQ ID NO: 5121642 - DNA, 25 bp, Homo sapien
tgagttagcagttctcacatacttt

SEQ ID NO: 5121643 - DNA, 25 bp, Homo sapien
gttgttaggcatggaggaatgagtt

SEQ ID NO: 5121644 - DNA, 25 bp, Homo sapien
caccaatgcttttggttcgttccta

SEQ ID NO: 5121645 - DNA, 25 bp, Homo sapien
ccaatgcttttggttcgttcctaag

SEQ ID NO: 5121646 - DNA, 25 bp, Homo sapien
gaagcaggaatgatactgttgatga

SEQ ID NO: 5121647 - DNA, 25 bp, Homo sapien
tgaggaatctggcaaagatgctgcc

SEQ ID NO: 5121648 - DNA, 25 bp, Homo sapien
caaaaagggcacaggtattggtgta

SEQ ID NO: 5121649 - DNA, 25 bp, Homo sapien
aggttgtcctgttagagtgaagaaa

SEQ ID NO: 5121650 - DNA, 25 bp, Homo sapien
gcatagttatctcggtcgcccagga

SEQ ID NO: 5121651 - DNA, 25 bp, Homo sapien
tagacacgtaaagtacaggaataac

SEQ ID NO: 5121652 - DNA, 25 bp, Homo sapien
gagcatatgattgtgtaggcaaaca

SEQ ID NO: 5121653 - DNA, 25 bp, Homo sapien
gattggctaaagcatagttatctcg

SEQ ID NO: 5121654 - DNA, 25 bp, Homo sapien
ctggggaggagatcctccatttctg

SEQ ID NO: 5121655 - DNA, 25 bp, Homo sapien
ggaggagatcctccatttctggttt

SEQ ID NO: 5121656 - DNA, 25 bp, Homo sapien
acaagaccagagtattgaattatac

SEQ ID NO: 5121657 - DNA, 25 bp, Homo sapien
tgtcctggggaggagatcctccatt

SEQ ID NO: 5121658 - DNA, 25 bp, Homo sapien
ggtggtaggcatcagtccctcgaga

SEQ ID NO: 5121659 - DNA, 25 bp, Homo sapien
ccgtaatgaggagggatgtcttaac

SEQ ID NO: 5121660 - DNA, 25 bp, Homo sapien
agtgctcccatgactggttaacggg

SEQ ID NO: 5121661 - DNA, 25 bp, Homo sapien
gaaatgtgctataccagatgaatga

SEQ ID NO: 5121662 - DNA, 25 bp, Homo sapien
gtttatggggttgtgtggacccatc

SEQ ID NO: 5121663 - DNA, 25 bp, Homo sapien
gtgtcttgctttgaatggttaagct

SEQ ID NO: 5121664 - DNA, 25 bp, Homo sapien
gctttgaatggttaagctaaattaa

SEQ ID NO: 5121665 - DNA, 25 bp, Homo sapien
cttgctttgaatggttaagctaaat

SEQ ID NO: 5121666 - DNA, 25 bp, Homo sapien
tctgagttcaatcagctggctgccc

SEQ ID NO: 5121667 - DNA, 25 bp, Homo sapien
tcaccgcatagggagagaacatgtc

SEQ ID NO: 5121668 - DNA, 25 bp, Homo sapien
gaaaatagagttccatatctctctg

SEQ ID NO: 5121669 - DNA, 25 bp, Homo sapien
tctctggtatggtgcttcatgcaca

SEQ ID NO: 5121670 - DNA, 25 bp, Homo sapien
cagtgacgacgcagtttagcaaact

SEQ ID NO: 5121671 - DNA, 25 bp, Homo sapien
tgacgacgcagtttagcaaactaac

SEQ ID NO: 5121672 - DNA, 25 bp, Homo sapien
gggacacagtgacgacgcagtttag

SEQ ID NO: 5121673 - DNA, 25 bp, Homo sapien
acagtgacgacgcagtttagcaaac

SEQ ID NO: 5121674 - DNA, 25 bp, Homo sapien
aattcattcctgagcggtggccagg

SEQ ID NO: 5121675 - DNA, 25 bp, Homo sapien
ctgaattcattcctgagcggtggcc

SEQ ID NO: 5121676 - DNA, 25 bp, Homo sapien
ggcaggtcctcgttcttgccgatgc

SEQ ID NO: 5121677 - DNA, 25 bp, Homo sapien
gccagggcaggtcctcgttcttgcc

SEQ ID NO: 5121678 - DNA, 25 bp, Homo sapien
ctgaggaggttgtggtcactctctg

SEQ ID NO: 5121679 - DNA, 25 bp, Homo sapien
tctactgaggaggttgtggtcactc

SEQ ID NO: 5121680 - DNA, 25 bp, Homo sapien
ggaggttgtggtcactctctggaaa

SEQ ID NO: 5121681 - DNA, 25 bp, Homo sapien
cttctactgaggaggttgtggtcac

SEQ ID NO: 5121682 - DNA, 25 bp, Homo sapien
cttgtggaggttcttgtggtccctc

SEQ ID NO: 5121683 - DNA, 25 bp, Homo sapien
ttgtggaggttcttgtggtccctcc

SEQ ID NO: 5121684 - DNA, 25 bp, Homo sapien
gactgcttgagtgattcatggattc

SEQ ID NO: 5121685 - DNA, 25 bp, Homo sapien
tagtttaagactgcttgagtgattc

SEQ ID NO: 5121686 - DNA, 25 bp, Homo sapien
caaatagtttaagactgcttgagtg

SEQ ID NO: 5121687 - DNA, 25 bp, Homo sapien
tgtgacaaatagtttaagactgctt

SEQ ID NO: 5121688 - DNA, 25 bp, Homo sapien
acatcaaagaaaacacctgggtatt

SEQ ID NO: 5121689 - DNA, 25 bp, Homo sapien
aaacacctgggtattctggcagaaa

SEQ ID NO: 5121690 - DNA, 25 bp, Homo sapien
caaagaaaacacctgggtattctgg

SEQ ID NO: 5121691 - DNA, 25 bp, Homo sapien
tcctcctggacatcaaagaaaacac

SEQ ID NO: 5121692 - DNA, 25 bp, Homo sapien
cactaccgacatttgaaaagcccga

SEQ ID NO: 5121693 - DNA, 25 bp, Homo sapien
gggaggcacttagttacagcaagaa

SEQ ID NO: 5121694 - DNA, 25 bp, Homo sapien
ctttaataaacactaccgacatttg

SEQ ID NO: 5121695 - DNA, 25 bp, Homo sapien
tatcagatatagtgtaggttactgg

SEQ ID NO: 5121696 - DNA, 25 bp, Homo sapien
ctccatacctcaattgatgatttct

SEQ ID NO: 5121697 - DNA, 25 bp, Homo sapien
ttctcagttccatttctccatacct

SEQ ID NO: 5121698 - DNA, 25 bp, Homo sapien
tccatttctccatacctcaattgat

SEQ ID NO: 5121699 - DNA, 25 bp, Homo sapien
ttctccatacctcaattgatgattt

SEQ ID NO: 5121700 - DNA, 25 bp, Homo sapien
aggtggaatacagttggttagagaa

SEQ ID NO: 5121701 - DNA, 25 bp, Homo sapien
ttaaggtggaatacagttggttaga

SEQ ID NO: 5121702 - DNA, 25 bp, Homo sapien
gtggaatacagttggttagagaagt

SEQ ID NO: 5121703 - DNA, 25 bp, Homo sapien
ggaatacagttggttagagaagtgc

SEQ ID NO: 5121704 - DNA, 25 bp, Homo sapien
catcatataggcaagacagtctgtt

SEQ ID NO: 5121705 - DNA, 25 bp, Homo sapien
cagttggatttaacaacaacaccaa

SEQ ID NO: 5121706 - DNA, 25 bp, Homo sapien
gtcttagatacatcatataggcaag

SEQ ID NO: 5121707 - DNA, 25 bp, Homo sapien
cccatataatcctggaaacgactcc

SEQ ID NO: 5121708 - DNA, 25 bp, Homo sapien
ggtccttgaatataactgtttgttc

SEQ ID NO: 5121709 - DNA, 25 bp, Homo sapien
cgtatggtccttgaatataactgtt

SEQ ID NO: 5121710 - DNA, 25 bp, Homo sapien
tatggtccttgaatataactgtttg

SEQ ID NO: 5121711 - DNA, 25 bp, Homo sapien
ttgaatataactgtttgttccaaac

SEQ ID NO: 5121712 - DNA, 25 bp, Homo sapien
gattctttatcgctgtacactgaga

SEQ ID NO: 5121713 - DNA, 25 bp, Homo sapien
gcccaggtgcctgattctttatcgc

SEQ ID NO: 5121714 - DNA, 25 bp, Homo sapien
tgcttccagtattcttgcccaggtg

SEQ ID NO: 5121715 - DNA, 25 bp, Homo sapien
gaactgaggcttctttcaaagacag

SEQ ID NO: 5121716 - DNA, 25 bp, Homo sapien
tgcgaagtccattgtattgatcata

SEQ ID NO: 5121717 - DNA, 25 bp, Homo sapien
gaggcgttccattccttcaacatgc

SEQ ID NO: 5121718 - DNA, 25 bp, Homo sapien
ttccttcaacatgcgaagtccattg

SEQ ID NO: 5121719 - DNA, 25 bp, Homo sapien
ttatgaggcgttccattccttcaac

SEQ ID NO: 5121720 - DNA, 25 bp, Homo sapien
cttgttcaattggactcataccact

SEQ ID NO: 5121721 - DNA, 25 bp, Homo sapien
tcttgttcaattggactcataccac

SEQ ID NO: 5121722 - DNA, 25 bp, Homo sapien
tttctgtaccatgggaaggtccagc

SEQ ID NO: 5121723 - DNA, 25 bp, Homo sapien
ccttgcctgatggatacgtagggct

SEQ ID NO: 5121724 - DNA, 25 bp, Homo sapien
aaggcacgaataggcatcaatatga

SEQ ID NO: 5121725 - DNA, 25 bp, Homo sapien
agtggagctaccgtagataggtttc

SEQ ID NO: 5121726 - DNA, 25 bp, Homo sapien
gcaaaggtctttgtctcatcattcc

SEQ ID NO: 5121727 - DNA, 25 bp, Homo sapien
taaaaacatctcattgccatcgtag

SEQ ID NO: 5121728 - DNA, 25 bp, Homo sapien
aacagcacatggtaaagagtgaagc

SEQ ID NO: 5121729 - DNA, 25 bp, Homo sapien
aagcatgtcacatagcaagaaagga

SEQ ID NO: 5121730 - DNA, 25 bp, Homo sapien
gcacccaaagtcagccgaagcgttt

SEQ ID NO: 5121731 - DNA, 25 bp, Homo sapien
gcttttcgcacccaaagtcagccga

SEQ ID NO: 5121732 - DNA, 25 bp, Homo sapien
cagccgaagcgtttcctgtgtgtgc

SEQ ID NO: 5121733 - DNA, 25 bp, Homo sapien
ctttccagcttttcgcacccaaagt

SEQ ID NO: 5121734 - DNA, 25 bp, Homo sapien
ccatttccgcagagtgtgattttct

SEQ ID NO: 5121735 - DNA, 25 bp, Homo sapien
tggcttaatccatttccgcagagtg

SEQ ID NO: 5121736 - DNA, 25 bp, Homo sapien
gattctgttgttggtagttgcaagc

SEQ ID NO: 5121737 - DNA, 25 bp, Homo sapien
ttttctgcacacacgatgcagattc

SEQ ID NO: 5121738 - DNA, 25 bp, Homo sapien
ctggctctggtcctcggttaatacc

SEQ ID NO: 5121739 - DNA, 25 bp, Homo sapien
ggctctggtcctcggttaataccca

SEQ ID NO: 5121740 - DNA, 25 bp, Homo sapien
gctctcctgagatttgcgtgcttca

SEQ ID NO: 5121741 - DNA, 25 bp, Homo sapien
catccagggtgctgtatatgatgct

SEQ ID NO: 5121742 - DNA, 25 bp, Homo sapien
tgcaggtacgagtgccatcacacct

SEQ ID NO: 5121743 - DNA, 25 bp, Homo sapien
ctcacctggccctttcattgtagac

SEQ ID NO: 5121744 - DNA, 25 bp, Homo sapien
ggattgcaggtacgagtgccatcac

SEQ ID NO: 5121745 - DNA, 25 bp, Homo sapien
ggccctttcattgtagacctctctt

SEQ ID NO: 5121746 - DNA, 25 bp, Homo sapien
tatgcaaattctagaggtccaagga

SEQ ID NO: 5121747 - DNA, 25 bp, Homo sapien
catacatggtgtcgaatatgacaga

SEQ ID NO: 5121748 - DNA, 25 bp, Homo sapien
tgccgtagttatgcatgaagcagag

SEQ ID NO: 5121749 - DNA, 25 bp, Homo sapien
tccataaatcactacgggctttcct

SEQ ID NO: 5121750 - DNA, 25 bp, Homo sapien
cagattaatggttcagtagtctcca

SEQ ID NO: 5121751 - DNA, 25 bp, Homo sapien
gaacagaatcgtttgggagcagatt

SEQ ID NO: 5121752 - DNA, 25 bp, Homo sapien
gttggtcatgactttgagctttgag

SEQ ID NO: 5121753 - DNA, 25 bp, Homo sapien
gtggtgctaaatgaattgacaagtc

SEQ ID NO: 5121754 - DNA, 25 bp, Homo sapien
tatttgcataagtatctgtcccttt

SEQ ID NO: 5121755 - DNA, 25 bp, Homo sapien
tgtcgtccgtaaatagaggtgcttt

SEQ ID NO: 5121756 - DNA, 25 bp, Homo sapien
gctgtctaaatgaatgtcgtccgta

SEQ ID NO: 5121757 - DNA, 25 bp, Homo sapien
tcaaggtggaactgtggagctgtct

SEQ ID NO: 5121758 - DNA, 25 bp, Homo sapien
tgctgaagggatcatcaggactcat

SEQ ID NO: 5121759 - DNA, 25 bp, Homo sapien
gtgctgaagggatcatcaggactca

SEQ ID NO: 5121760 - DNA, 25 bp, Homo sapien
gctgaagggatcatcaggactcatt

SEQ ID NO: 5121761 - DNA, 25 bp, Homo sapien
ggtgaccattaccatgtgtgtaaag

SEQ ID NO: 5121762 - DNA, 25 bp, Homo sapien
cataaagctcctggtgaccattacc

SEQ ID NO: 5121763 - DNA, 25 bp, Homo sapien
atgaacttgccataaaagccccatg

SEQ ID NO: 5121764 - DNA, 25 bp, Homo sapien
caatgaacttgccataaaagcccca

SEQ ID NO: 5121765 - DNA, 25 bp, Homo sapien
tcattctgtggctttaaaagcgacg

SEQ ID NO: 5121766 - DNA, 25 bp, Homo sapien
tgggcaaggatatccacagagcact

SEQ ID NO: 5121767 - DNA, 25 bp, Homo sapien
tctgggcaaggatatccacagagca

SEQ ID NO: 5121768 - DNA, 25 bp, Homo sapien
acctctgggcaaggatatccacaga

SEQ ID NO: 5121769 - DNA, 25 bp, Homo sapien
gggcaaggatatccacagagcactg

SEQ ID NO: 5121770 - DNA, 25 bp, Homo sapien
cagggaagtgtacagctaacaggtc

SEQ ID NO: 5121771 - DNA, 25 bp, Homo sapien
caggtcctgttttctatggagagaa

SEQ ID NO: 5121772 - DNA, 25 bp, Homo sapien
tggttagatcattcactaggtgggc

SEQ ID NO: 5121773 - DNA, 25 bp, Homo sapien
gcctggaatgtaacaaatgcctgtt

SEQ ID NO: 5121774 - DNA, 25 bp, Homo sapien
taccagggagaactacatgtaagct

SEQ ID NO: 5121775 - DNA, 25 bp, Homo sapien
taaagcgtaaagttgctaccaggga

SEQ ID NO: 5121776 - DNA, 25 bp, Homo sapien
ttggtaaggccagtcattcttgtgg

SEQ ID NO: 5121777 - DNA, 25 bp, Homo sapien
tatgaccaataagagctctccccaa

SEQ ID NO: 5121778 - DNA, 25 bp, Homo sapien
gtgacaacaatggatgcctagctat

SEQ ID NO: 5121779 - DNA, 25 bp, Homo sapien
gcctagctatagcacagcctgtgag

SEQ ID NO: 5121780 - DNA, 25 bp, Homo sapien
tgtgagaagtagattcaggctcaga

SEQ ID NO: 5121781 - DNA, 25 bp, Homo sapien
cagcctgtgagaagtagattcaggc

SEQ ID NO: 5121782 - DNA, 25 bp, Homo sapien
tcatacacactattcgcaaactgaa

SEQ ID NO: 5121783 - DNA, 25 bp, Homo sapien
gcattaagtgggtcctggaactgcc

SEQ ID NO: 5121784 - DNA, 25 bp, Homo sapien
tggaactgcctaaaatgatcttggc

SEQ ID NO: 5121785 - DNA, 25 bp, Homo sapien
tgatcttggccagatcccttcacca

SEQ ID NO: 5121786 - DNA, 25 bp, Homo sapien
tttgcgtcatctccgatttatttga

SEQ ID NO: 5121787 - DNA, 25 bp, Homo sapien
tggaagttgttggtgtatggaaatt

SEQ ID NO: 5121788 - DNA, 25 bp, Homo sapien
gccatactcaaaggtattttattct

SEQ ID NO: 5121789 - DNA, 25 bp, Homo sapien
ggaataccattgaacctgtaagttg

SEQ ID NO: 5121790 - DNA, 25 bp, Homo sapien
tgttcttccgctgagagccctttgt

SEQ ID NO: 5121791 - DNA, 25 bp, Homo sapien
cacaggtatgtgctttctcaatggc

SEQ ID NO: 5121792 - DNA, 25 bp, Homo sapien
tggacttctcttacgaatcgttagg

SEQ ID NO: 5121793 - DNA, 25 bp, Homo sapien
tgtccagaaccgctgtgcagatgtg

SEQ ID NO: 5121794 - DNA, 25 bp, Homo sapien
aaatgcctttcccagtaatgtattc

SEQ ID NO: 5121795 - DNA, 25 bp, Homo sapien
gtgttgtttggcttataaaatgcct

SEQ ID NO: 5121796 - DNA, 25 bp, Homo sapien
attccagtgttgtttggcttataaa

SEQ ID NO: 5121797 - DNA, 25 bp, Homo sapien
atgcctttcccagtaatgtattcat

SEQ ID NO: 5121798 - DNA, 25 bp, Homo sapien
tatgtttaacctctgaataataact

SEQ ID NO: 5121799 - DNA, 25 bp, Homo sapien
tgtttaacctctgaataataactat

SEQ ID NO: 5121800 - DNA, 25 bp, Homo sapien
aaataataactcgtatcggaagcat

SEQ ID NO: 5121801 - DNA, 25 bp, Homo sapien
atttgaaaataataactcgtatcgg

SEQ ID NO: 5121802 - DNA, 25 bp, Homo sapien
ccctcaaattgaggctattcttctt

SEQ ID NO: 5121803 - DNA, 25 bp, Homo sapien
gagtcgaagaatgcttgttttgccc

SEQ ID NO: 5121804 - DNA, 25 bp, Homo sapien
tgtgtcctaaatatagtccctcaaa

SEQ ID NO: 5121805 - DNA, 25 bp, Homo sapien
tataaggttaaatacttgatgtata

SEQ ID NO: 5121806 - DNA, 25 bp, Homo sapien
ccgcgttagggtagataatgcacat

SEQ ID NO: 5121807 - DNA, 25 bp, Homo sapien
gcacatcttggagttctgagattca

SEQ ID NO: 5121808 - DNA, 25 bp, Homo sapien
gattcaagccctgtttcagtggcag

SEQ ID NO: 5121809 - DNA, 25 bp, Homo sapien
gtggcagcaactgccaaaatgccaa

SEQ ID NO: 5121810 - DNA, 25 bp, Homo sapien
tatgggaatatgctgatactttgtc

SEQ ID NO: 5121811 - DNA, 25 bp, Homo sapien
ctctttctgagctagtatgggaata

SEQ ID NO: 5121812 - DNA, 25 bp, Homo sapien
tttctgagctagtatgggaatatgc

SEQ ID NO: 5121813 - DNA, 25 bp, Homo sapien
gaatatgctgatactttgtcttgat

SEQ ID NO: 5121814 - DNA, 25 bp, Homo sapien
cgggattcagcataaccctggcagt

SEQ ID NO: 5121815 - DNA, 25 bp, Homo sapien
tagttccaagttggattcactgggc

SEQ ID NO: 5121816 - DNA, 25 bp, Homo sapien
caaactgattgcatttggaggattt

SEQ ID NO: 5121817 - DNA, 25 bp, Homo sapien
ttagcagttccgcaaaatgcgggat

SEQ ID NO: 5121818 - DNA, 25 bp, Homo sapien
taaaacttatagatagtaatactaa

SEQ ID NO: 5121819 - DNA, 25 bp, Homo sapien
gggaaaccattacacataagatata

SEQ ID NO: 5121820 - DNA, 25 bp, Homo sapien
tgggaaaccattacacataagatat

SEQ ID NO: 5121821 - DNA, 25 bp, Homo sapien
aataaaacttatagatagtaatact

SEQ ID NO: 5121822 - DNA, 25 bp, Homo sapien
ttctttgagaatttgccctgaatct

SEQ ID NO: 5121823 - DNA, 25 bp, Homo sapien
tgagaatttgccctgaatctttttc

SEQ ID NO: 5121824 - DNA, 25 bp, Homo sapien
cattcaggcttctgaatatacctga

SEQ ID NO: 5121825 - DNA, 25 bp, Homo sapien
atcacattcaggcttctgaatatac

SEQ ID NO: 5121826 - DNA, 25 bp, Homo sapien
tattgagtactactatcacaagaac

SEQ ID NO: 5121827 - DNA, 25 bp, Homo sapien
gaggatgacagtcttacattagatt

SEQ ID NO: 5121828 - DNA, 25 bp, Homo sapien
tccaagatataatgacgttacaggc

SEQ ID NO: 5121829 - DNA, 25 bp, Homo sapien
ttttgaacaaacagatcttattgag

SEQ ID NO: 5121830 - DNA, 25 bp, Homo sapien
tcctggtgatcgtgtatgtgtgtgg

SEQ ID NO: 5121831 - DNA, 25 bp, Homo sapien
tataccagcatttggcaattctgtg

SEQ ID NO: 5121832 - DNA, 25 bp, Homo sapien
tgggagctgaagaaacactacttat

SEQ ID NO: 5121833 - DNA, 25 bp, Homo sapien
gaatgcctgttaacttctacactca

SEQ ID NO: 5121834 - DNA, 25 bp, Homo sapien
catgcaattgtctctggacaacttt

SEQ ID NO: 5121835 - DNA, 25 bp, Homo sapien
gagtgattagaatactgcccctgac

SEQ ID NO: 5121836 - DNA, 25 bp, Homo sapien
atattgagtgattagaatactgccc

SEQ ID NO: 5121837 - DNA, 25 bp, Homo sapien
ttttctttcatgcaattgtctctgg

SEQ ID NO: 5121838 - DNA, 25 bp, Homo sapien
aaaaagacatcaggccctgactgtg

SEQ ID NO: 5121839 - DNA, 25 bp, Homo sapien
actgtgttcgtcctttacattttgc

SEQ ID NO: 5121840 - DNA, 25 bp, Homo sapien
aggccacacagaattcggaagatcc

SEQ ID NO: 5121841 - DNA, 25 bp, Homo sapien
agatccatatacctcttctacacca

SEQ ID NO: 5121842 - DNA, 25 bp, Homo sapien
ttagaggcagcttggacaatcccag

SEQ ID NO: 5121843 - DNA, 25 bp, Homo sapien
cccagacttagctgaaggcagaaat

SEQ ID NO: 5121844 - DNA, 25 bp, Homo sapien
tccaagctcctatagcagctaactt

SEQ ID NO: 5121845 - DNA, 25 bp, Homo sapien
ggagccttggctgacaccacattag

SEQ ID NO: 5121846 - DNA, 25 bp, Homo sapien
ggtgagttcagttgttactgtggca

SEQ ID NO: 5121847 - DNA, 25 bp, Homo sapien
ttgttactgtggcacgattgtccat

SEQ ID NO: 5121848 - DNA, 25 bp, Homo sapien
cagttgttactgtggcacgattgtc

SEQ ID NO: 5121849 - DNA, 25 bp, Homo sapien
gagttcagttgttactgtggcacga

SEQ ID NO: 5121850 - DNA, 25 bp, Homo sapien
gaagatgacgttttccttgaccctg

SEQ ID NO: 5121851 - DNA, 25 bp, Homo sapien
tcaactctgcgctatttttcaacat

SEQ ID NO: 5121852 - DNA, 25 bp, Homo sapien
ccttgaccctgggtagaatccatca

SEQ ID NO: 5121853 - DNA, 25 bp, Homo sapien
tactgtactccatttaagaactcgc

SEQ ID NO: 5121854 - DNA, 25 bp, Homo sapien
aatgtcatctctgaccctgatcatt

SEQ ID NO: 5121855 - DNA, 25 bp, Homo sapien
taaacttgtcatcctaaatgtcatc

SEQ ID NO: 5121856 - DNA, 25 bp, Homo sapien
aaacttgtcatcctaaatgtcatct

SEQ ID NO: 5121857 - DNA, 25 bp, Homo sapien
ccttaaacttgtcatcctaaatgtc

SEQ ID NO: 5121858 - DNA, 25 bp, Homo sapien
gttacatagacagactcatgtcact

SEQ ID NO: 5121859 - DNA, 25 bp, Homo sapien
tactgttaccggcactgtgacatcc

SEQ ID NO: 5121860 - DNA, 25 bp, Homo sapien
ccctgtttaggcataggagctctgt

SEQ ID NO: 5121861 - DNA, 25 bp, Homo sapien
agactcatgtcacttggctttactg

SEQ ID NO: 5121862 - DNA, 25 bp, Homo sapien
gaaaatcatgacatatccctcagtc

SEQ ID NO: 5121863 - DNA, 25 bp, Homo sapien
tggatctatctgagagtaaaagtaa

SEQ ID NO: 5121864 - DNA, 25 bp, Homo sapien
catgcttacttctgattgctcccct

SEQ ID NO: 5121865 - DNA, 25 bp, Homo sapien
gtaaaagtaactcgtgcattttgcc

SEQ ID NO: 5121866 - DNA, 25 bp, Homo sapien
gattaccaaggagcaatggacgtct

SEQ ID NO: 5121867 - DNA, 25 bp, Homo sapien
cacttctctttagtaaatgtcgctc

SEQ ID NO: 5121868 - DNA, 25 bp, Homo sapien
tggacgtctacaccctctggctttg

SEQ ID NO: 5121869 - DNA, 25 bp, Homo sapien
tttgctctgcctaaaaggtactggt

SEQ ID NO: 5121870 - DNA, 25 bp, Homo sapien
tagttggccatgaagtgaacactgt

SEQ ID NO: 5121871 - DNA, 25 bp, Homo sapien
ctagttggccatgaagtgaacactg

SEQ ID NO: 5121872 - DNA, 25 bp, Homo sapien
taagatgcctgtggacttaggaaat

SEQ ID NO: 5121873 - DNA, 25 bp, Homo sapien
ctaagatgcctgtggacttaggaaa

SEQ ID NO: 5121874 - DNA, 25 bp, Homo sapien
tatctctggaatgtccacacaacac

SEQ ID NO: 5121875 - DNA, 25 bp, Homo sapien
acactgacaggtatttcagttgcat

SEQ ID NO: 5121876 - DNA, 25 bp, Homo sapien
tgtcccttttatctctggaatgtcc

SEQ ID NO: 5121877 - DNA, 25 bp, Homo sapien
acacaacactgacaggtatttcagt

SEQ ID NO: 5121878 - DNA, 25 bp, Homo sapien
aaatgccaggagtaagaacagaatt

SEQ ID NO: 5121879 - DNA, 25 bp, Homo sapien
gcaaatgccaggagtaagaacagaa

SEQ ID NO: 5121880 - DNA, 25 bp, Homo sapien
caaatgccaggagtaagaacagaat

SEQ ID NO: 5121881 - DNA, 25 bp, Homo sapien
tgcaaatgccaggagtaagaacaga

SEQ ID NO: 5121882 - DNA, 25 bp, Homo sapien
tcccttgaaatgacgatagctctct

SEQ ID NO: 5121883 - DNA, 25 bp, Homo sapien
aatacttagtgttgggccctccttg

SEQ ID NO: 5121884 - DNA, 25 bp, Homo sapien
ccaagataaatcctagagcttctga

SEQ ID NO: 5121885 - DNA, 25 bp, Homo sapien
tgcttgctgaaagctacctcctgaa

SEQ ID NO: 5121886 - DNA, 25 bp, Homo sapien
tagtgatagaggttgctttgcagca

SEQ ID NO: 5121887 - DNA, 25 bp, Homo sapien
cagcaagtgactgatgtagacagca

SEQ ID NO: 5121888 - DNA, 25 bp, Homo sapien
aacagagaggccatttgtactcccc

SEQ ID NO: 5121889 - DNA, 25 bp, Homo sapien
gatttgtgcttagtaaacagagagg

SEQ ID NO: 5121890 - DNA, 25 bp, Homo sapien
tcttattgtgatgacttttagacgc

SEQ ID NO: 5121891 - DNA, 25 bp, Homo sapien
acagtggtgatacaatgtgtgcttc

SEQ ID NO: 5121892 - DNA, 25 bp, Homo sapien
caggaagtcttgtgaaggtggtaac

SEQ ID NO: 5121893 - DNA, 25 bp, Homo sapien
ggtggtaacacttagagccacagtg

SEQ ID NO: 5121894 - DNA, 25 bp, Homo sapien
gagtctgagcaattactaaccctgc

SEQ ID NO: 5121895 - DNA, 25 bp, Homo sapien
ttactaaccctgcatactttttcaa

SEQ ID NO: 5121896 - DNA, 25 bp, Homo sapien
gtaagagtctgagcaattactaacc

SEQ ID NO: 5121897 - DNA, 25 bp, Homo sapien
tgagcaattactaaccctgcatact

SEQ ID NO: 5121898 - DNA, 25 bp, Homo sapien
catataaatatttatgtcatccttg

SEQ ID NO: 5121899 - DNA, 25 bp, Homo sapien
ataaatatttatgtcatccttgcac

SEQ ID NO: 5121900 - DNA, 25 bp, Homo sapien
tataaatatttatgtcatccttgca

SEQ ID NO: 5121901 - DNA, 25 bp, Homo sapien
aacatataaatatttatgtcatcct

SEQ ID NO: 5121902 - DNA, 25 bp, Homo sapien
ctaagaaacaagggtttgggcattg

SEQ ID NO: 5121903 - DNA, 25 bp, Homo sapien
gcttttgaagattctctgtggaaga

SEQ ID NO: 5121904 - DNA, 25 bp, Homo sapien
tcattgaccataactgggcccagta

SEQ ID NO: 5121905 - DNA, 25 bp, Homo sapien
gggtgcatggcttttgaagattctc

SEQ ID NO: 5121906 - DNA, 25 bp, Homo sapien
cccagtagacctctcttgttgctga

SEQ ID NO: 5121907 - DNA, 25 bp, Homo sapien
ttttgcaccaaccttcacttcctcc

SEQ ID NO: 5121908 - DNA, 25 bp, Homo sapien
ttgcaccaaccttcacttcctccat

SEQ ID NO: 5121909 - DNA, 25 bp, Homo sapien
cttttgcaccaaccttcacttcctc

SEQ ID NO: 5121910 - DNA, 25 bp, Homo sapien
tttgcaccaaccttcacttcctcca

SEQ ID NO: 5121911 - DNA, 25 bp, Homo sapien
ttctgcagcagattagtgagagtat

SEQ ID NO: 5121912 - DNA, 25 bp, Homo sapien
tagtgagagtatttggacatctgtt

SEQ ID NO: 5121913 - DNA, 25 bp, Homo sapien
ttttctgcagcagattagtgagagt

SEQ ID NO: 5121914 - DNA, 25 bp, Homo sapien
ttagtgagagtatttggacatctgt

SEQ ID NO: 5121915 - DNA, 25 bp, Homo sapien
aactgtctgcaagaagtgtatattc

SEQ ID NO: 5121916 - DNA, 25 bp, Homo sapien
ttttgcaagtgaactgtctgcaaga

SEQ ID NO: 5121917 - DNA, 25 bp, Homo sapien
ctgtctgcaagaagtgtatattctg

SEQ ID NO: 5121918 - DNA, 25 bp, Homo sapien
gcaagtgaactgtctgcaagaagtg

SEQ ID NO: 5121919 - DNA, 25 bp, Homo sapien
ccaaattcttcatatttttgagaat

SEQ ID NO: 5121920 - DNA, 25 bp, Homo sapien
tttttgagaattcaatgcaagatcc

SEQ ID NO: 5121921 - DNA, 25 bp, Homo sapien
tttgagaattcaatgcaagatccat

SEQ ID NO: 5121922 - DNA, 25 bp, Homo sapien
atatttttgagaattcaatgcaaga

SEQ ID NO: 5121923 - DNA, 25 bp, Homo sapien
aactcccacattataagtccggaag

SEQ ID NO: 5121924 - DNA, 25 bp, Homo sapien
tcttggaacataactcccacattat

SEQ ID NO: 5121925 - DNA, 25 bp, Homo sapien
gagtcttggaacataactcccacat

SEQ ID NO: 5121926 - DNA, 25 bp, Homo sapien
tctcccttaacaggcccagaacttc

SEQ ID NO: 5121927 - DNA, 25 bp, Homo sapien
gtgagattgaatatgaaaggtccct

SEQ ID NO: 5121928 - DNA, 25 bp, Homo sapien
tgtagcttgcctgtgagattgaata

SEQ ID NO: 5121929 - DNA, 25 bp, Homo sapien
ttgaatatgaaaggtccctcgtcca

SEQ ID NO: 5121930 - DNA, 25 bp, Homo sapien
cagaaagagctgtagcttgcctgtg

SEQ ID NO: 5121931 - DNA, 25 bp, Homo sapien
tttaggcatgattcatggtacccca

SEQ ID NO: 5121932 - DNA, 25 bp, Homo sapien
gaagatctcatattacacgtcacca

SEQ ID NO: 5121933 - DNA, 25 bp, Homo sapien
tattacacgtcaccataatgtgtcc

SEQ ID NO: 5121934 - DNA, 25 bp, Homo sapien
taacatcgaagatctcatattacac

SEQ ID NO: 5121935 - DNA, 25 bp, Homo sapien
ctggagagccaagacattgtgccca

SEQ ID NO: 5121936 - DNA, 25 bp, Homo sapien
tggtcctggagagccaagacattgt

SEQ ID NO: 5121937 - DNA, 25 bp, Homo sapien
tcctggagagccaagacattgtgcc

SEQ ID NO: 5121938 - DNA, 25 bp, Homo sapien
cttggtcctggagagccaagacatt

SEQ ID NO: 5121939 - DNA, 25 bp, Homo sapien
tctaaatgtgtatattcccaatagc

SEQ ID NO: 5121940 - DNA, 25 bp, Homo sapien
acttctgtgtaggaagtatactcca

SEQ ID NO: 5121941 - DNA, 25 bp, Homo sapien
ttagctattataacgtcaaaaaata

SEQ ID NO: 5121942 - DNA, 25 bp, Homo sapien
tatactccatactgataaaaaggcc

SEQ ID NO: 5121943 - DNA, 25 bp, Homo sapien
cttgctacatacagccccactccct

SEQ ID NO: 5121944 - DNA, 25 bp, Homo sapien
ctgtctctagcaatacattatctcc

SEQ ID NO: 5121945 - DNA, 25 bp, Homo sapien
tccctccttgctacatacagcccca

SEQ ID NO: 5121946 - DNA, 25 bp, Homo sapien
tagcaatacattatctccctccttg

SEQ ID NO: 5121947 - DNA, 25 bp, Homo sapien
gatctagcgtggtcccaccaaagcc

SEQ ID NO: 5121948 - DNA, 25 bp, Homo sapien
gagagaaaagcacccattctcgttc

SEQ ID NO: 5121949 - DNA, 25 bp, Homo sapien
tcacagctcaagatctagcgtggtc

SEQ ID NO: 5121950 - DNA, 25 bp, Homo sapien
tgtgagagaaaagcacccattctcg

SEQ ID NO: 5121951 - DNA, 25 bp, Homo sapien
cactgtgcttcattcaccctggact

SEQ ID NO: 5121952 - DNA, 25 bp, Homo sapien
caccatcattttccgaataagccat

SEQ ID NO: 5121953 - DNA, 25 bp, Homo sapien
tgtgcttcattcaccctggactcac

SEQ ID NO: 5121954 - DNA, 25 bp, Homo sapien
gcttcattcaccctggactcaccat

SEQ ID NO: 5121955 - DNA, 25 bp, Homo sapien
cattaaggctgaagcccagtgattg

SEQ ID NO: 5121956 - DNA, 25 bp, Homo sapien
tcacatccctttttcacattaaggc

SEQ ID NO: 5121957 - DNA, 25 bp, Homo sapien
ttttcacattaaggctgaagcccag

SEQ ID NO: 5121958 - DNA, 25 bp, Homo sapien
ccctttttcacattaaggctgaagc

SEQ ID NO: 5121959 - DNA, 25 bp, Homo sapien
cacttatagattcatggccctggtc

SEQ ID NO: 5121960 - DNA, 25 bp, Homo sapien
gatattcgcctgtcatttctactag

SEQ ID NO: 5121961 - DNA, 25 bp, Homo sapien
tataaacaaggccagaaccaagaaa

SEQ ID NO: 5121962 - DNA, 25 bp, Homo sapien
gattcaatgcagtaccactcttgct

SEQ ID NO: 5121963 - DNA, 25 bp, Homo sapien
tcccttgttttgagcagggctctct

SEQ ID NO: 5121964 - DNA, 25 bp, Homo sapien
aacctctgatgttgcaccttaggca

SEQ ID NO: 5121965 - DNA, 25 bp, Homo sapien
tcacacctggctgttaaacttcaga

SEQ ID NO: 5121966 - DNA, 25 bp, Homo sapien
ccttaggcatactcaggtttgtgta

SEQ ID NO: 5121967 - DNA, 25 bp, Homo sapien
tccactcagcattacactgttaaga

SEQ ID NO: 5121968 - DNA, 25 bp, Homo sapien
ttatagcaaaatacctaaggctgag

SEQ ID NO: 5121969 - DNA, 25 bp, Homo sapien
tcagcaaatggtgcttgaagcctct

SEQ ID NO: 5121970 - DNA, 25 bp, Homo sapien
tgttttagacagcttaggcactgca

SEQ ID NO: 5121971 - DNA, 25 bp, Homo sapien
tggccgagagtcgtgcgcacgtcca

SEQ ID NO: 5121972 - DNA, 25 bp, Homo sapien
aactcggagacgtccgtgtctgaag

SEQ ID NO: 5121973 - DNA, 25 bp, Homo sapien
ggcactgacaactcggagacgtccg

SEQ ID NO: 5121974 - DNA, 25 bp, Homo sapien
actccagtccaattcagtgaacgct

SEQ ID NO: 5121975 - DNA, 25 bp, Homo sapien
cctggccaagatcatgtttttattt

SEQ ID NO: 5121976 - DNA, 25 bp, Homo sapien
tttcagatgaaaatatacagtgact

SEQ ID NO: 5121977 - DNA, 25 bp, Homo sapien
gagaagtgaagcaacttgtccacag

SEQ ID NO: 5121978 - DNA, 25 bp, Homo sapien
aaatatacagtgactcagagaagtg

SEQ ID NO: 5121979 - DNA, 25 bp, Homo sapien
ttgtgcgtttgtcatgtagttcttg

SEQ ID NO: 5121980 - DNA, 25 bp, Homo sapien
tgatcgcttcggttactgaggcttg

SEQ ID NO: 5121981 - DNA, 25 bp, Homo sapien
cttgtgcgtttgtcatgtagttctt

SEQ ID NO: 5121982 - DNA, 25 bp, Homo sapien
tcgcttcggttactgaggcttgtgc

SEQ ID NO: 5121983 - DNA, 25 bp, Homo sapien
catttaagatcttctaacggatttt

SEQ ID NO: 5121984 - DNA, 25 bp, Homo sapien
cccacaaagtgtggtatattgtagt

SEQ ID NO: 5121985 - DNA, 25 bp, Homo sapien
tgctctttattgtatcttccttctg

SEQ ID NO: 5121986 - DNA, 25 bp, Homo sapien
aggtcttctttgacccacgaatcac

SEQ ID NO: 5121987 - DNA, 25 bp, Homo sapien
gaattagttagctatggtgagtcca

SEQ ID NO: 5121988 - DNA, 25 bp, Homo sapien
gagttggtgccaaagcatgccaatg

SEQ ID NO: 5121989 - DNA, 25 bp, Homo sapien
taaatggacatctgacttaagctag

SEQ ID NO: 5121990 - DNA, 25 bp, Homo sapien
ttacagttaactggactaaatggac

SEQ ID NO: 5121991 - DNA, 25 bp, Homo sapien
tcttagttcacgtgtattgtcttcc

SEQ ID NO: 5121992 - DNA, 25 bp, Homo sapien
tatgaataggcattgagaactggtg

SEQ ID NO: 5121993 - DNA, 25 bp, Homo sapien
agtggtctctccttttggttgtgga

SEQ ID NO: 5121994 - DNA, 25 bp, Homo sapien
tatgcaaagttaaccccagtggtct

SEQ ID NO: 5121995 - DNA, 25 bp, Homo sapien
catcttctagggttgtcatgttgcc

SEQ ID NO: 5121996 - DNA, 25 bp, Homo sapien
ggttgtcatgttgcctccgctggac

SEQ ID NO: 5121997 - DNA, 25 bp, Homo sapien
tggacgatgaacattgagcttttaa

SEQ ID NO: 5121998 - DNA, 25 bp, Homo sapien
gcctccgctggacgatgaacattga

SEQ ID NO: 5121999 - DNA, 25 bp, Homo sapien
ctgactctaagatgcatcaaactgc

SEQ ID NO: 5122000 - DNA, 25 bp, Homo sapien
tggtatctcagggatttaaacgtgg

SEQ ID NO: 5122001 - DNA, 25 bp, Homo sapien
caattatcaagaagtggttgtgtgc

SEQ ID NO: 5122002 - DNA, 25 bp, Homo sapien
cattgcctgcaatcacacagtgggt

SEQ ID NO: 5122003 - DNA, 25 bp, Homo sapien
cgcagcagcagcttagggtccagct

SEQ ID NO: 5122004 - DNA, 25 bp, Homo sapien
cagcagcagcttagggtccagctcc

SEQ ID NO: 5122005 - DNA, 25 bp, Homo sapien
agcagcagcttagggtccagctcca

SEQ ID NO: 5122006 - DNA, 25 bp, Homo sapien
tcccgcagcagcagcttagggtcca

SEQ ID NO: 5122007 - DNA, 25 bp, Homo sapien
tgccctccggcatagactctgaact

SEQ ID NO: 5122008 - DNA, 25 bp, Homo sapien
ctgaactgataatcaacattgggat

SEQ ID NO: 5122009 - DNA, 25 bp, Homo sapien
ggaataacatatctggaggatgctc

SEQ ID NO: 5122010 - DNA, 25 bp, Homo sapien
caaggtctccactcctgttagctgg

SEQ ID NO: 5122011 - DNA, 25 bp, Homo sapien
ataagagtagtaaacaaggctccag

SEQ ID NO: 5122012 - DNA, 25 bp, Homo sapien
taaacaaggctccagtcatctctac

SEQ ID NO: 5122013 - DNA, 25 bp, Homo sapien
caaggctccagtcatctctacaatg

SEQ ID NO: 5122014 - DNA, 25 bp, Homo sapien
ccagtcatctctacaatgtctgtat

SEQ ID NO: 5122015 - DNA, 25 bp, Homo sapien
cagactgaaacagctcggagctccc

SEQ ID NO: 5122016 - DNA, 25 bp, Homo sapien
aggtactgccagagcgtcttctcac

SEQ ID NO: 5122017 - DNA, 25 bp, Homo sapien
tgggacagactgaaacagctcggag

SEQ ID NO: 5122018 - DNA, 25 bp, Homo sapien
gccagagcgtcttctcacccaggag

SEQ ID NO: 5122019 - DNA, 25 bp, Homo sapien
gttcttcgcagtggggtagccagcc

SEQ ID NO: 5122020 - DNA, 25 bp, Homo sapien
accctgcgaccggtcaatctctcac

SEQ ID NO: 5122021 - DNA, 25 bp, Homo sapien
ggcacacaccctgcgaccggtcaat

SEQ ID NO: 5122022 - DNA, 25 bp, Homo sapien
tatccccataggactggctctgcag

SEQ ID NO: 5122023 - DNA, 25 bp, Homo sapien
ctggctggcgtcagatgtaccgatg

SEQ ID NO: 5122024 - DNA, 25 bp, Homo sapien
cctgcaaaattaggtgaagaacgaa

SEQ ID NO: 5122025 - DNA, 25 bp, Homo sapien
tcagatgtaccgatgtctgcatatt

SEQ ID NO: 5122026 - DNA, 25 bp, Homo sapien
tctgggcagcaaggtttgctgaaga

SEQ ID NO: 5122027 - DNA, 25 bp, Homo sapien
taaggtagcagtgaattcgcaaacc

SEQ ID NO: 5122028 - DNA, 25 bp, Homo sapien
tggataaggtagcagtgaattcgca

SEQ ID NO: 5122029 - DNA, 25 bp, Homo sapien
ggcctggataaggtagcagtgaatt

SEQ ID NO: 5122030 - DNA, 25 bp, Homo sapien
ggtagcagtgaattcgcaaacccac

SEQ ID NO: 5122031 - DNA, 25 bp, Homo sapien
ctacaaatagatgggaaacagatct

SEQ ID NO: 5122032 - DNA, 25 bp, Homo sapien
acaaatagatgggaaacagatctca

SEQ ID NO: 5122033 - DNA, 25 bp, Homo sapien
tacaaatagatgggaaacagatctc

SEQ ID NO: 5122034 - DNA, 25 bp, Homo sapien
caaatagatgggaaacagatctcac

SEQ ID NO: 5122035 - DNA, 25 bp, Homo sapien
gactggaccttttaatattatcttg

SEQ ID NO: 5122036 - DNA, 25 bp, Homo sapien
gaagccaatatgcatgtgtcctaga

SEQ ID NO: 5122037 - DNA, 25 bp, Homo sapien
agaggttggccccagagctcacctg

SEQ ID NO: 5122038 - DNA, 25 bp, Homo sapien
ctgaaattgtcttcacagggatgtc

SEQ ID NO: 5122039 - DNA, 25 bp, Homo sapien
ttcacagggatgtcatctaagatgc

SEQ ID NO: 5122040 - DNA, 25 bp, Homo sapien
actggagacgtgtgccccatcttaa

SEQ ID NO: 5122041 - DNA, 25 bp, Homo sapien
tttggacttgtcatgttaagccggg

SEQ ID NO: 5122042 - DNA, 25 bp, Homo sapien
taaaatgcctatgggccacttgggt

SEQ ID NO: 5122043 - DNA, 25 bp, Homo sapien
gctgcctcagcatagtcagacctaa

SEQ ID NO: 5122044 - DNA, 25 bp, Homo sapien
tcttcaattgtagcactatgagaaa

SEQ ID NO: 5122045 - DNA, 25 bp, Homo sapien
gaaatcttttgaacaatgttatccc

SEQ ID NO: 5122046 - DNA, 25 bp, Homo sapien
tgaacaatgttatcccttctgtact

SEQ ID NO: 5122047 - DNA, 25 bp, Homo sapien
cttctgtactcagggaaattgatcc

SEQ ID NO: 5122048 - DNA, 25 bp, Homo sapien
gcaacaaaatgtcgggtcacttaag

SEQ ID NO: 5122049 - DNA, 25 bp, Homo sapien
aatgcaacaaaatgtcgggtcactt

SEQ ID NO: 5122050 - DNA, 25 bp, Homo sapien
tgcaacaaaatgtcgggtcacttaa

SEQ ID NO: 5122051 - DNA, 25 bp, Homo sapien
caacaaaatgtcgggtcacttaagc

SEQ ID NO: 5122052 - DNA, 25 bp, Homo sapien
tctctctatgagagcttttgtggac

SEQ ID NO: 5122053 - DNA, 25 bp, Homo sapien
acgcctgccccagtggtctgagtca

SEQ ID NO: 5122054 - DNA, 25 bp, Homo sapien
gggtaattcaatccatacctgcttt

SEQ ID NO: 5122055 - DNA, 25 bp, Homo sapien
ccaccattgtggtttgaagagaagg

SEQ ID NO: 5122056 - DNA, 25 bp, Homo sapien
tgtctgagcccgcatagttcctgaa

SEQ ID NO: 5122057 - DNA, 25 bp, Homo sapien
tcccagagctattcccattgtaatg

SEQ ID NO: 5122058 - DNA, 25 bp, Homo sapien
atggtttgagagtctttcaatgtcc

SEQ ID NO: 5122059 - DNA, 25 bp, Homo sapien
tcctggctcggaacttctcagtgtt

SEQ ID NO: 5122060 - DNA, 25 bp, Homo sapien
tagtaggatcaataatgacagaaaa

SEQ ID NO: 5122061 - DNA, 25 bp, Homo sapien
caatcatgattgctgtgttgcagcc

SEQ ID NO: 5122062 - DNA, 25 bp, Homo sapien
catgtgttagaattagtaggatcaa

SEQ ID NO: 5122063 - DNA, 25 bp, Homo sapien
catctaaaatcccataagcatgtgt

SEQ ID NO: 5122064 - DNA, 25 bp, Homo sapien
gtggtcagggactccaggtgaacac

SEQ ID NO: 5122065 - DNA, 25 bp, Homo sapien
tggtcagggactccaggtgaacaca

SEQ ID NO: 5122066 - DNA, 25 bp, Homo sapien
aggtggtcagggactccaggtgaac

SEQ ID NO: 5122067 - DNA, 25 bp, Homo sapien
ggtcagggactccaggtgaacacag

SEQ ID NO: 5122068 - DNA, 25 bp, Homo sapien
aacccagtggttattataaagaatg

SEQ ID NO: 5122069 - DNA, 25 bp, Homo sapien
cagtggttattataaagaatgtctc

SEQ ID NO: 5122070 - DNA, 25 bp, Homo sapien
agtggttattataaagaatgtctct

SEQ ID NO: 5122071 - DNA, 25 bp, Homo sapien
cccagtggttattataaagaatgtc

SEQ ID NO: 5122072 - DNA, 25 bp, Homo sapien
aggactgcattggaggaacagagat

SEQ ID NO: 5122073 - DNA, 25 bp, Homo sapien
tgggctaaacgaacaccatgaaaag

SEQ ID NO: 5122074 - DNA, 25 bp, Homo sapien
cttttctgggctaaacgaacaccat

SEQ ID NO: 5122075 - DNA, 25 bp, Homo sapien
tttctgggctaaacgaacaccatga

SEQ ID NO: 5122076 - DNA, 25 bp, Homo sapien
ctgctgtccagtgctcatttttgag

SEQ ID NO: 5122077 - DNA, 25 bp, Homo sapien
ctaagtgcggctgtcaggccacagc

SEQ ID NO: 5122078 - DNA, 25 bp, Homo sapien
gctgtccagtgctcatttttgagtg

SEQ ID NO: 5122079 - DNA, 25 bp, Homo sapien
tgagtgacttctcagagaccaaggg

SEQ ID NO: 5122080 - DNA, 25 bp, Homo sapien
ttcttcagatatgcagatatcagac

SEQ ID NO: 5122081 - DNA, 25 bp, Homo sapien
tcagtcaagcgtggagcaacaagta

SEQ ID NO: 5122082 - DNA, 25 bp, Homo sapien
ttatttgttcttcatcagtcaagcg

SEQ ID NO: 5122083 - DNA, 25 bp, Homo sapien
tgaagttcccaatacaattatgttt

SEQ ID NO: 5122084 - DNA, 25 bp, Homo sapien
cgtggagcaacaagtattgaagttc

SEQ ID NO: 5122085 - DNA, 25 bp, Homo sapien
ggtgatgttgtccttgtctgagctc

SEQ ID NO: 5122086 - DNA, 25 bp, Homo sapien
gagctctgggatgtgccagttttcc

SEQ ID NO: 5122087 - DNA, 25 bp, Homo sapien
cctttaccccgctctggtgatgttg

SEQ ID NO: 5122088 - DNA, 25 bp, Homo sapien
ttgatgagatccctttaccccgctc

SEQ ID NO: 5122089 - DNA, 25 bp, Homo sapien
taagctggttagtctgaaagtctgc

SEQ ID NO: 5122090 - DNA, 25 bp, Homo sapien
gctggttagtctgaaagtctgcatc

SEQ ID NO: 5122091 - DNA, 25 bp, Homo sapien
ggttagtctgaaagtctgcatccat

SEQ ID NO: 5122092 - DNA, 25 bp, Homo sapien
ctggttagtctgaaagtctgcatcc

SEQ ID NO: 5122093 - DNA, 25 bp, Homo sapien
gacatgcaacactgagatccaccct

SEQ ID NO: 5122094 - DNA, 25 bp, Homo sapien
agtcccactgacatgcaacactgag

SEQ ID NO: 5122095 - DNA, 25 bp, Homo sapien
aagctgctgctcaacacctggagtc

SEQ ID NO: 5122096 - DNA, 25 bp, Homo sapien
caagctgctgctcaacacctggagt

SEQ ID NO: 5122097 - DNA, 25 bp, Homo sapien
tctcttcctgtctccgatccaacac

SEQ ID NO: 5122098 - DNA, 25 bp, Homo sapien
ctcttcctgtctccgatccaacacc

SEQ ID NO: 5122099 - DNA, 25 bp, Homo sapien
tctttctggttcaaccatgggtatc

SEQ ID NO: 5122100 - DNA, 25 bp, Homo sapien
aaccatgggtatctcaatgtgtgag

SEQ ID NO: 5122101 - DNA, 25 bp, Homo sapien
gtgagaattgcactcctctgcctgc

SEQ ID NO: 5122102 - DNA, 25 bp, Homo sapien
gggcctggttaactgcatcagcatc

SEQ ID NO: 5122103 - DNA, 25 bp, Homo sapien
cctgtcttcggtgttgcaaatgtaa

SEQ ID NO: 5122104 - DNA, 25 bp, Homo sapien
tgcctgtcttcggtgttgcaaatgt

SEQ ID NO: 5122105 - DNA, 25 bp, Homo sapien
gtgatgcctgtcttcggtgttgcaa

SEQ ID NO: 5122106 - DNA, 25 bp, Homo sapien
gatgcctgtcttcggtgttgcaaat

SEQ ID NO: 5122107 - DNA, 25 bp, Homo sapien
gggcaccagtgggaccaacaatagg

SEQ ID NO: 5122108 - DNA, 25 bp, Homo sapien
gcaccagtgggaccaacaataggag

SEQ ID NO: 5122109 - DNA, 25 bp, Homo sapien
actggcttgtaaacaaggccagggc

SEQ ID NO: 5122110 - DNA, 25 bp, Homo sapien
tgctgctaagcacactgtgacagaa

SEQ ID NO: 5122111 - DNA, 25 bp, Homo sapien
caatattgagcagggtgaacatttc

SEQ ID NO: 5122112 - DNA, 25 bp, Homo sapien
cttacaatattgagcagggtgaaca

SEQ ID NO: 5122113 - DNA, 25 bp, Homo sapien
tacaatattgagcagggtgaacatt

SEQ ID NO: 5122114 - DNA, 25 bp, Homo sapien
aatattgagcagggtgaacatttca

SEQ ID NO: 5122115 - DNA, 25 bp, Homo sapien
gataggctttgctccataaggtgag

SEQ ID NO: 5122116 - DNA, 25 bp, Homo sapien
gctttgcaaaaatctcagcctctgt

SEQ ID NO: 5122117 - DNA, 25 bp, Homo sapien
taagtgcccattagtagtcttggct

SEQ ID NO: 5122118 - DNA, 25 bp, Homo sapien
cagcctctgtttttagtaccctttg

SEQ ID NO: 5122119 - DNA, 25 bp, Homo sapien
ctgaggcagagactaagaaccactc

SEQ ID NO: 5122120 - DNA, 25 bp, Homo sapien
tttgaaaggtcacttggattttcca

SEQ ID NO: 5122121 - DNA, 25 bp, Homo sapien
tgcgagtattgcctccggttttcat

SEQ ID NO: 5122122 - DNA, 25 bp, Homo sapien
agtttgtttcactgcgagtattgcc

SEQ ID NO: 5122123 - DNA, 25 bp, Homo sapien
tctgaatgtctgcttcttctaagag

SEQ ID NO: 5122124 - DNA, 25 bp, Homo sapien
cattcatctgaatgtctgcttcttc

SEQ ID NO: 5122125 - DNA, 25 bp, Homo sapien
tgaatgtctgcttcttctaagagat

SEQ ID NO: 5122126 - DNA, 25 bp, Homo sapien
ctgaaacattcatctgaatgtctgc

SEQ ID NO: 5122127 - DNA, 25 bp, Homo sapien
cagacctctgagtcacagttttctt

SEQ ID NO: 5122128 - DNA, 25 bp, Homo sapien
gcagcctgaccagggacagacctct

SEQ ID NO: 5122129 - DNA, 25 bp, Homo sapien
gcaacatgaggacaaccagattcta

SEQ ID NO: 5122130 - DNA, 25 bp, Homo sapien
ccacggccaattttataggactgtt

SEQ ID NO: 5122131 - DNA, 25 bp, Homo sapien
gtctgagctccaaatagcaacactg

SEQ ID NO: 5122132 - DNA, 25 bp, Homo sapien
tgagctccaaatagcaacactgatc

SEQ ID NO: 5122133 - DNA, 25 bp, Homo sapien
agctccaaatagcaacactgatcat

SEQ ID NO: 5122134 - DNA, 25 bp, Homo sapien
tctgagctccaaatagcaacactga

SEQ ID NO: 5122135 - DNA, 25 bp, Homo sapien
ggacagcttcttctagtgcaactgg

SEQ ID NO: 5122136 - DNA, 25 bp, Homo sapien
gccttctgcatgagacaagcattcc

SEQ ID NO: 5122137 - DNA, 25 bp, Homo sapien
tttgccagtcttagccagaggccca

SEQ ID NO: 5122138 - DNA, 25 bp, Homo sapien
gcagtccttgtttggcccaagaaca

SEQ ID NO: 5122139 - DNA, 25 bp, Homo sapien
aggggccaccactgattatggcatt

SEQ ID NO: 5122140 - DNA, 25 bp, Homo sapien
caggggccaccactgattatggcat

SEQ ID NO: 5122141 - DNA, 25 bp, Homo sapien
aaaatctttccgctgttgagtgctg

SEQ ID NO: 5122142 - DNA, 25 bp, Homo sapien
tgagtactccggtgcttgatttgtt

SEQ ID NO: 5122143 - DNA, 25 bp, Homo sapien
tttccgctgttgagtgctgagtact

SEQ ID NO: 5122144 - DNA, 25 bp, Homo sapien
gagtgctgagtactccggtgcttga

SEQ ID NO: 5122145 - DNA, 25 bp, Homo sapien
tagaggatcccactggagtcgttgg

SEQ ID NO: 5122146 - DNA, 25 bp, Homo sapien
ttagaggatcccactggagtcgttg

SEQ ID NO: 5122147 - DNA, 25 bp, Homo sapien
agaggatcccactggagtcgttggc

SEQ ID NO: 5122148 - DNA, 25 bp, Homo sapien
tgactttgattctccctggcaaatc

SEQ ID NO: 5122149 - DNA, 25 bp, Homo sapien
tctccggtagctcagcatgggactg

SEQ ID NO: 5122150 - DNA, 25 bp, Homo sapien
acagatgcacagaaaagtttctact

SEQ ID NO: 5122151 - DNA, 25 bp, Homo sapien
tactttggtaggatgtaagtcattg

SEQ ID NO: 5122152 - DNA, 25 bp, Homo sapien
gatgaggttgcaagaatgaaagtgt

SEQ ID NO: 5122153 - DNA, 25 bp, Homo sapien
ccctggtgttccacttagttgaggt

SEQ ID NO: 5122154 - DNA, 25 bp, Homo sapien
tgcaagaatgaaagtgtatggcagg

SEQ ID NO: 5122155 - DNA, 25 bp, Homo sapien
aaagctaaatttgtgagacactttt

SEQ ID NO: 5122156 - DNA, 25 bp, Homo sapien
gggatctgcgaggttacgctgcgga

SEQ ID NO: 5122157 - DNA, 25 bp, Homo sapien
acgctgcggagtggcgcgctgtcgt

SEQ ID NO: 5122158 - DNA, 25 bp, Homo sapien
cacacgcaggggatctgcgaggtta

SEQ ID NO: 5122159 - DNA, 25 bp, Homo sapien
cgaggttacgctgcggagtggcgcg

SEQ ID NO: 5122160 - DNA, 25 bp, Homo sapien
aaattctgcaaggtccactgactca

SEQ ID NO: 5122161 - DNA, 25 bp, Homo sapien
ttctggcccaaacagcttacgccac

SEQ ID NO: 5122162 - DNA, 25 bp, Homo sapien
cacgctatacttttcggctgagagt

SEQ ID NO: 5122163 - DNA, 25 bp, Homo sapien
ctggttaggtatctgagtgctctta

SEQ ID NO: 5122164 - DNA, 25 bp, Homo sapien
ttaggatgccatgccaagcagaaag

SEQ ID NO: 5122165 - DNA, 25 bp, Homo sapien
caagcagaaagcctccgaaaaatcc

SEQ ID NO: 5122166 - DNA, 25 bp, Homo sapien
gaaaaatcccccagtcactagaaca

SEQ ID NO: 5122167 - DNA, 25 bp, Homo sapien
ttttcttcacaaatgacaccacctc

SEQ ID NO: 5122168 - DNA, 25 bp, Homo sapien
gcgtactggaagaagagctaaggac

SEQ ID NO: 5122169 - DNA, 25 bp, Homo sapien
gagggaccttcttgatgacctacag

SEQ ID NO: 5122170 - DNA, 25 bp, Homo sapien
ggtgccacgttaacttgtgccaaca

SEQ ID NO: 5122171 - DNA, 25 bp, Homo sapien
aagccagtcaggctcatggtgccac

SEQ ID NO: 5122172 - DNA, 25 bp, Homo sapien
tttttaatgcttaaaggcaattgta

SEQ ID NO: 5122173 - DNA, 25 bp, Homo sapien
cttaaaggcaattgtattcagttcc

SEQ ID NO: 5122174 - DNA, 25 bp, Homo sapien
aatgcttaaaggcaattgtattcag

SEQ ID NO: 5122175 - DNA, 25 bp, Homo sapien
cagttcctttccatgcagcacacaa

SEQ ID NO: 5122176 - DNA, 25 bp, Homo sapien
cattttgcaaatgtgacaccccaat

SEQ ID NO: 5122177 - DNA, 25 bp, Homo sapien
catccattttgcaaatgtgacaccc

SEQ ID NO: 5122178 - DNA, 25 bp, Homo sapien
gaccacatttgtccatccattttgc

SEQ ID NO: 5122179 - DNA, 25 bp, Homo sapien
cttgatctgccctgaccacatttgt

SEQ ID NO: 5122180 - DNA, 25 bp, Homo sapien
ttaatgccttagcacacatgcagag

SEQ ID NO: 5122181 - DNA, 25 bp, Homo sapien
catttaatgccttagcacacatgca

SEQ ID NO: 5122182 - DNA, 25 bp, Homo sapien
tttaatgccttagcacacatgcaga

SEQ ID NO: 5122183 - DNA, 25 bp, Homo sapien
atttaatgccttagcacacatgcag

SEQ ID NO: 5122184 - DNA, 25 bp, Homo sapien
ggtgcgccaattgagggagtcccta

SEQ ID NO: 5122185 - DNA, 25 bp, Homo sapien
gcagatttagtatccgaaccaggta

SEQ ID NO: 5122186 - DNA, 25 bp, Homo sapien
tgttgaagccatcgcaatgacacac

SEQ ID NO: 5122187 - DNA, 25 bp, Homo sapien
tcaaccaaggactctgcaagactgg

SEQ ID NO: 5122188 - DNA, 25 bp, Homo sapien
actcacacgtgtctgccaatgtatg

SEQ ID NO: 5122189 - DNA, 25 bp, Homo sapien
cagctcagatctagcttgctctagg

SEQ ID NO: 5122190 - DNA, 25 bp, Homo sapien
cacgtgtctgccaatgtatgcacag

SEQ ID NO: 5122191 - DNA, 25 bp, Homo sapien
tttgacctgcatccgggacatgtgc

SEQ ID NO: 5122192 - DNA, 25 bp, Homo sapien
cctcggtggagatagtccggtgcct

SEQ ID NO: 5122193 - DNA, 25 bp, Homo sapien
ctagactttggacttgtcagatagg

SEQ ID NO: 5122194 - DNA, 25 bp, Homo sapien
aggtatttagcactccactgattgc

SEQ ID NO: 5122195 - DNA, 25 bp, Homo sapien
gagatagtccggtgcctgtttttcc

SEQ ID NO: 5122196 - DNA, 25 bp, Homo sapien
tcttacaattgatgacatgcagaag

SEQ ID NO: 5122197 - DNA, 25 bp, Homo sapien
gggactgagggccaccattactgca

SEQ ID NO: 5122198 - DNA, 25 bp, Homo sapien
tggtttgaagacatcttgcataact

SEQ ID NO: 5122199 - DNA, 25 bp, Homo sapien
acatgtgggcaatgacaattttgct

SEQ ID NO: 5122200 - DNA, 25 bp, Homo sapien
cagatagtttcccaattggtccaat

SEQ ID NO: 5122201 - DNA, 25 bp, Homo sapien
gactgaacttttagaggagtcaatg

SEQ ID NO: 5122202 - DNA, 25 bp, Homo sapien
tagaggagtcaatgttcttggagca

SEQ ID NO: 5122203 - DNA, 25 bp, Homo sapien
tgttcttggagcagatagtttccca

SEQ ID NO: 5122204 - DNA, 25 bp, Homo sapien
tcttctaaatgcctgggacagggcg

SEQ ID NO: 5122205 - DNA, 25 bp, Homo sapien
gttcttctaaatgcctgggacaggg

SEQ ID NO: 5122206 - DNA, 25 bp, Homo sapien
cctgttcttctaaatgcctgggaca

SEQ ID NO: 5122207 - DNA, 25 bp, Homo sapien
cttctaaatgcctgggacagggcgt

SEQ ID NO: 5122208 - DNA, 25 bp, Homo sapien
gcaagcagcatatgacataagttca

SEQ ID NO: 5122209 - DNA, 25 bp, Homo sapien
cagcatatgacataagttcagccaa

SEQ ID NO: 5122210 - DNA, 25 bp, Homo sapien
tcagccaattagatcttctcttcca

SEQ ID NO: 5122211 - DNA, 25 bp, Homo sapien
taagttcagccaattagatcttctc

SEQ ID NO: 5122212 - DNA, 25 bp, Homo sapien
ggtgggggagaacagtctttgtgga

SEQ ID NO: 5122213 - DNA, 25 bp, Homo sapien
cagtctttgtggaactcagaactgg

SEQ ID NO: 5122214 - DNA, 25 bp, Homo sapien
ggaactcagaactggaaattttctc

SEQ ID NO: 5122215 - DNA, 25 bp, Homo sapien
ctgtaggtgggggagaacagtcttt

SEQ ID NO: 5122216 - DNA, 25 bp, Homo sapien
ctgggattcgcatcacctggtgact

SEQ ID NO: 5122217 - DNA, 25 bp, Homo sapien
ctgacagactgtaaagcccgggttt

SEQ ID NO: 5122218 - DNA, 25 bp, Homo sapien
agtttccttaccacagagcgggttg

SEQ ID NO: 5122219 - DNA, 25 bp, Homo sapien
aacaggtgcagaaagattccaggag

SEQ ID NO: 5122220 - DNA, 25 bp, Homo sapien
cgtgaggcgaaggaaggccacaagg

SEQ ID NO: 5122221 - DNA, 25 bp, Homo sapien
gtggcagcagaggattacccacttg

SEQ ID NO: 5122222 - DNA, 25 bp, Homo sapien
tgcaatgcgtgaggcgaaggaaggc

SEQ ID NO: 5122223 - DNA, 25 bp, Homo sapien
ttacccacttgctagtggagtcggg

SEQ ID NO: 5122224 - DNA, 25 bp, Homo sapien
catcgactgagcagactgagcgggc

SEQ ID NO: 5122225 - DNA, 25 bp, Homo sapien
tttctgttattctgtagccctcagg

SEQ ID NO: 5122226 - DNA, 25 bp, Homo sapien
actggattgcagtcccagaaacgcc

SEQ ID NO: 5122227 - DNA, 25 bp, Homo sapien
gatttgggtgtccttcggactgtcc

SEQ ID NO: 5122228 - DNA, 25 bp, Homo sapien
tagcctgcgggtcttttcatctgtc

SEQ ID NO: 5122229 - DNA, 25 bp, Homo sapien
tgtagcctgcgggtcttttcatctg

SEQ ID NO: 5122230 - DNA, 25 bp, Homo sapien
tctttgtagcctgcgggtcttttca

SEQ ID NO: 5122231 - DNA, 25 bp, Homo sapien
gccctctttgtagcctgcgggtctt

SEQ ID NO: 5122232 - DNA, 25 bp, Homo sapien
tctggtcagttttccataatcccca

SEQ ID NO: 5122233 - DNA, 25 bp, Homo sapien
catccctttggacaagacctcttgg

SEQ ID NO: 5122234 - DNA, 25 bp, Homo sapien
ttttcattgcatcttgcctcatccc

SEQ ID NO: 5122235 - DNA, 25 bp, Homo sapien
tctcaggtcaccctcaactttgctg

SEQ ID NO: 5122236 - DNA, 25 bp, Homo sapien
gctttgatataccaacatctttggg

SEQ ID NO: 5122237 - DNA, 25 bp, Homo sapien
tctttggggaccgttatctctccca

SEQ ID NO: 5122238 - DNA, 25 bp, Homo sapien
cgttatctctcccaagcccaatata

SEQ ID NO: 5122239 - DNA, 25 bp, Homo sapien
gggcctggctttgatataccaacat

SEQ ID NO: 5122240 - DNA, 25 bp, Homo sapien
gtcatggatatggtactggccacag

SEQ ID NO: 5122241 - DNA, 25 bp, Homo sapien
cacagccttgttaccctccaggtaa

SEQ ID NO: 5122242 - DNA, 25 bp, Homo sapien
catgttacagtcatggatatggtac

SEQ ID NO: 5122243 - DNA, 25 bp, Homo sapien
taacagacagagatgccaaacccac

SEQ ID NO: 5122244 - DNA, 25 bp, Homo sapien
ctagtggcactgttgaagttgggcc

SEQ ID NO: 5122245 - DNA, 25 bp, Homo sapien
agtggcactgttgaagttgggcctc

SEQ ID NO: 5122246 - DNA, 25 bp, Homo sapien
ggcactgttgaagttgggcctcact

SEQ ID NO: 5122247 - DNA, 25 bp, Homo sapien
actgttgaagttgggcctcacttgc

SEQ ID NO: 5122248 - DNA, 25 bp, Homo sapien
catttttcttcgcaaactgaaacca

SEQ ID NO: 5122249 - DNA, 25 bp, Homo sapien
ttttcttcgcaaactgaaaccacag

SEQ ID NO: 5122250 - DNA, 25 bp, Homo sapien
tgtacatttttcttcgcaaactgaa

SEQ ID NO: 5122251 - DNA, 25 bp, Homo sapien
ttcttcgcaaactgaaaccacagcc

SEQ ID NO: 5122252 - DNA, 25 bp, Homo sapien
tctcttatcctcttgcctctaaaca

SEQ ID NO: 5122253 - DNA, 25 bp, Homo sapien
tgaggtcataattgcagtctgcccc

SEQ ID NO: 5122254 - DNA, 25 bp, Homo sapien
ctgcaccgtggaccccgttgattcc

SEQ ID NO: 5122255 - DNA, 25 bp, Homo sapien
taagagccctggactttatctccca

SEQ ID NO: 5122256 - DNA, 25 bp, Homo sapien
caggcatatagagcagtccatctgg

SEQ ID NO: 5122257 - DNA, 25 bp, Homo sapien
tagagcagtccatctggacatggga

SEQ ID NO: 5122258 - DNA, 25 bp, Homo sapien
catgggaagatgctatcttttgtga

SEQ ID NO: 5122259 - DNA, 25 bp, Homo sapien
ggacatgggaagatgctatcttttg

SEQ ID NO: 5122260 - DNA, 25 bp, Homo sapien
ggctataaataggttagagaagctg

SEQ ID NO: 5122261 - DNA, 25 bp, Homo sapien
gaatctacccatagggcagaggtga

SEQ ID NO: 5122262 - DNA, 25 bp, Homo sapien
ggattgaaaagcaacgtactggaga

SEQ ID NO: 5122263 - DNA, 25 bp, Homo sapien
cttttgagagcagcccatcacctgt

SEQ ID NO: 5122264 - DNA, 25 bp, Homo sapien
actgaaggttgtgggagaaccctgt

SEQ ID NO: 5122265 - DNA, 25 bp, Homo sapien
tgaaggttgtgggagaaccctgtgc

SEQ ID NO: 5122266 - DNA, 25 bp, Homo sapien
aggttgtgggagaaccctgtgctat

SEQ ID NO: 5122267 - DNA, 25 bp, Homo sapien
agactgaaggttgtgggagaaccct

SEQ ID NO: 5122268 - DNA, 25 bp, Homo sapien
gacattgcaccctgacagatcctgc

SEQ ID NO: 5122269 - DNA, 25 bp, Homo sapien
cgtataaggtattttgggtgctcta

SEQ ID NO: 5122270 - DNA, 25 bp, Homo sapien
actgctgtgtcagctaggtctaaag

SEQ ID NO: 5122271 - DNA, 25 bp, Homo sapien
gactgtgcttccgtataaggtattt

SEQ ID NO: 5122272 - DNA, 25 bp, Homo sapien
gctgggatttaagccatcaggtcca

SEQ ID NO: 5122273 - DNA, 25 bp, Homo sapien
ttccctgaataataattgcgcagag

SEQ ID NO: 5122274 - DNA, 25 bp, Homo sapien
taaagttgagcactttcaagtgtgc

SEQ ID NO: 5122275 - DNA, 25 bp, Homo sapien
gaatacaagacctttctcagatcta

SEQ ID NO: 5122276 - DNA, 25 bp, Homo sapien
cataggacttgacacacggttggca

SEQ ID NO: 5122277 - DNA, 25 bp, Homo sapien
gatccagaacacgagcagtcagggt

SEQ ID NO: 5122278 - DNA, 25 bp, Homo sapien
gaaatgacagatctaacgtgtgcca

SEQ ID NO: 5122279 - DNA, 25 bp, Homo sapien
tgaaacaggcttaccgattccttct

SEQ ID NO: 5122280 - DNA, 25 bp, Homo sapien
ctgtaggttgctgtaggccattcag

SEQ ID NO: 5122281 - DNA, 25 bp, Homo sapien
tcagtatttgccatcagtacctgcc

SEQ ID NO: 5122282 - DNA, 25 bp, Homo sapien
tgttaagctgttgatcggaggcact

SEQ ID NO: 5122283 - DNA, 25 bp, Homo sapien
tttactgtgtcagcagtaggaggcc

SEQ ID NO: 5122284 - DNA, 25 bp, Homo sapien
tgtgttcgttccatcccaaggcagt

SEQ ID NO: 5122285 - DNA, 25 bp, Homo sapien
ttccttatggaccttttacagatgg

SEQ ID NO: 5122286 - DNA, 25 bp, Homo sapien
catatctgctaattgagtgttatcg

SEQ ID NO: 5122287 - DNA, 25 bp, Homo sapien
acagctaatataattgcatatctgc

SEQ ID NO: 5122288 - DNA, 25 bp, Homo sapien
gacagtttgttactctcaaccacat

SEQ ID NO: 5122289 - DNA, 25 bp, Homo sapien
caaattgatgatatttaactgcacc

SEQ ID NO: 5122290 - DNA, 25 bp, Homo sapien
gattttcggcagagacgcagattac

SEQ ID NO: 5122291 - DNA, 25 bp, Homo sapien
gaatctcaggagcacgattttcggc

SEQ ID NO: 5122292 - DNA, 25 bp, Homo sapien
tgtccaatcagggagcaaagtcaca

SEQ ID NO: 5122293 - DNA, 25 bp, Homo sapien
gatcctcagggaataaacactcatg

SEQ ID NO: 5122294 - DNA, 25 bp, Homo sapien
tacgggagttaatgtctcttcagcc

SEQ ID NO: 5122295 - DNA, 25 bp, Homo sapien
ggtctgtgaactgcttacaattgta

SEQ ID NO: 5122296 - DNA, 25 bp, Homo sapien
tggctgtccagtgtaatttcagggt

SEQ ID NO: 5122297 - DNA, 25 bp, Homo sapien
ttatacgggagttaatgtctcttca

SEQ ID NO: 5122298 - DNA, 25 bp, Homo sapien
ctggttcctttctgcttattttcat

SEQ ID NO: 5122299 - DNA, 25 bp, Homo sapien
agcaatgcctggtcgggagtagaaa

SEQ ID NO: 5122300 - DNA, 25 bp, Homo sapien
gtttcctgttgctgcgtagcaacca

SEQ ID NO: 5122301 - DNA, 25 bp, Homo sapien
tcggtagcgcggaatgtttcctgtt

SEQ ID NO: 5122302 - DNA, 25 bp, Homo sapien
aaatacagcaaccaccgccgagggt

SEQ ID NO: 5122303 - DNA, 25 bp, Homo sapien
tatctgtggcccgaaaagtcatcct

SEQ ID NO: 5122304 - DNA, 25 bp, Homo sapien
tggatgtcacataactcactctttg

SEQ ID NO: 5122305 - DNA, 25 bp, Homo sapien
tcaggtcaaattcactatctgtggc

SEQ ID NO: 5122306 - DNA, 25 bp, Homo sapien
cagtcttgaaagtgcagaattttcg

SEQ ID NO: 5122307 - DNA, 25 bp, Homo sapien
ttataggctgctgtcgttttcttgt

SEQ ID NO: 5122308 - DNA, 25 bp, Homo sapien
tttataggctgctgtcgttttcttg

SEQ ID NO: 5122309 - DNA, 25 bp, Homo sapien
ggacgtttaatgattcctgcagtca

SEQ ID NO: 5122310 - DNA, 25 bp, Homo sapien
tcctgcagtcattaactgaaatcgg

SEQ ID NO: 5122311 - DNA, 25 bp, Homo sapien
tggctgcttatgatcttggtagact

SEQ ID NO: 5122312 - DNA, 25 bp, Homo sapien
gaaatcggttctgttcatgtatgta

SEQ ID NO: 5122313 - DNA, 25 bp, Homo sapien
tcttgatgctcaagaaactgagtag

SEQ ID NO: 5122314 - DNA, 25 bp, Homo sapien
ctgagtagatgatgtggcaaaactt

SEQ ID NO: 5122315 - DNA, 25 bp, Homo sapien
cacagcatcttgatgctcaagaaac

SEQ ID NO: 5122316 - DNA, 25 bp, Homo sapien
tgctcaagaaactgagtagatgatg

SEQ ID NO: 5122317 - DNA, 25 bp, Homo sapien
acttgggtggcatcacccatatctg

SEQ ID NO: 5122318 - DNA, 25 bp, Homo sapien
tcctcccatggaggaggttaatcac

SEQ ID NO: 5122319 - DNA, 25 bp, Homo sapien
cccatggaggaggttaatcactgtg

SEQ ID NO: 5122320 - DNA, 25 bp, Homo sapien
ggtggcatcacccatatctgttcct

SEQ ID NO: 5122321 - DNA, 25 bp, Homo sapien
attttgattcagtacagctagggtg

SEQ ID NO: 5122322 - DNA, 25 bp, Homo sapien
tgctttcaggggtttggatcctgct

SEQ ID NO: 5122323 - DNA, 25 bp, Homo sapien
ctgaccatggactacacttggagca

SEQ ID NO: 5122324 - DNA, 25 bp, Homo sapien
aattttgattcagtacagctagggt

SEQ ID NO: 5122325 - DNA, 25 bp, Homo sapien
tagggtaagctgaagatctagtccc

SEQ ID NO: 5122326 - DNA, 25 bp, Homo sapien
tttgcaagggatcacgaatgttggc

SEQ ID NO: 5122327 - DNA, 25 bp, Homo sapien
gaacacctcaacatagggccgatga

SEQ ID NO: 5122328 - DNA, 25 bp, Homo sapien
taacaacttcttctcggtcgtgaaa

SEQ ID NO: 5122329 - DNA, 25 bp, Homo sapien
catcttctcagttgaaactatggtg

SEQ ID NO: 5122330 - DNA, 25 bp, Homo sapien
tcatcttctcagttgaaactatggt

SEQ ID NO: 5122331 - DNA, 25 bp, Homo sapien
ccacagcagcgtctaaaaaatcatg

SEQ ID NO: 5122332 - DNA, 25 bp, Homo sapien
tgtctagctcataagcaaccacagc

SEQ ID NO: 5122333 - DNA, 25 bp, Homo sapien
gtaaaagtagcaggcagcaaatggc

SEQ ID NO: 5122334 - DNA, 25 bp, Homo sapien
gaatgatctgtccaagttcttgaag

SEQ ID NO: 5122335 - DNA, 25 bp, Homo sapien
tttataatggtgtgtgtcaatggcc

SEQ ID NO: 5122336 - DNA, 25 bp, Homo sapien
tataatggtgtgtgtcaatggccac

SEQ ID NO: 5122337 - DNA, 25 bp, Homo sapien
aatggtgtgtgtcaatggccacatc

SEQ ID NO: 5122338 - DNA, 25 bp, Homo sapien
tcctttataatggtgtgtgtcaatg

SEQ ID NO: 5122339 - DNA, 25 bp, Homo sapien
tgtgatacagatattcctgttccca

SEQ ID NO: 5122340 - DNA, 25 bp, Homo sapien
cttccatttccggaacagtgaaaat

SEQ ID NO: 5122341 - DNA, 25 bp, Homo sapien
cctgttcccatcgatcaatttcgat

SEQ ID NO: 5122342 - DNA, 25 bp, Homo sapien
tgccctttggctaatagtatagtag

SEQ ID NO: 5122343 - DNA, 25 bp, Homo sapien
gtagagatttttgacatccagtgat

SEQ ID NO: 5122344 - DNA, 25 bp, Homo sapien
ttgtagagatttttgacatccagtg

SEQ ID NO: 5122345 - DNA, 25 bp, Homo sapien
tgtagagatttttgacatccagtga

SEQ ID NO: 5122346 - DNA, 25 bp, Homo sapien
tagagatttttgacatccagtgatt

SEQ ID NO: 5122347 - DNA, 25 bp, Homo sapien
gaactgagggcaagtaatagaaaac

SEQ ID NO: 5122348 - DNA, 25 bp, Homo sapien
cacctctgtgtgttaacttttgcta

SEQ ID NO: 5122349 - DNA, 25 bp, Homo sapien
ctattaatttaagaggctgggacac

SEQ ID NO: 5122350 - DNA, 25 bp, Homo sapien
ttaagtactttacaatgtccggtca

SEQ ID NO: 5122351 - DNA, 25 bp, Homo sapien
ttttaagaagagctggtcgcaaatg

SEQ ID NO: 5122352 - DNA, 25 bp, Homo sapien
gccgtatgacttgtgcggccttaaa

SEQ ID NO: 5122353 - DNA, 25 bp, Homo sapien
gacttgtgcggccttaaattcctgc

SEQ ID NO: 5122354 - DNA, 25 bp, Homo sapien
ctctgctagccgtatgacttgtgcg

SEQ ID NO: 5122355 - DNA, 25 bp, Homo sapien
tgcctcatttcgaaattctcctagg

SEQ ID NO: 5122356 - DNA, 25 bp, Homo sapien
aagccctcctgactacatattttgc

SEQ ID NO: 5122357 - DNA, 25 bp, Homo sapien
gaaattctcctaggcgttctgtcac

SEQ ID NO: 5122358 - DNA, 25 bp, Homo sapien
cacgcaaagcaaatcgacaagccct

SEQ ID NO: 5122359 - DNA, 25 bp, Homo sapien
caaacctattgtctgtgctagtagg

SEQ ID NO: 5122360 - DNA, 25 bp, Homo sapien
tggtacacgaagcaattcaaacctg

SEQ ID NO: 5122361 - DNA, 25 bp, Homo sapien
tagtacatgctaactgagtcaatcc

SEQ ID NO: 5122362 - DNA, 25 bp, Homo sapien
gagtcaatcctaaggtcaatccagt

SEQ ID NO: 5122363 - DNA, 25 bp, Homo sapien
ccactgctctgcactttatgataat

SEQ ID NO: 5122364 - DNA, 25 bp, Homo sapien
caactcatgtggtgtattaatgaaa

SEQ ID NO: 5122365 - DNA, 25 bp, Homo sapien
cataagtgggcaactcatgtggtgt

SEQ ID NO: 5122366 - DNA, 25 bp, Homo sapien
gtgggcaactcatgtggtgtattaa

SEQ ID NO: 5122367 - DNA, 25 bp, Homo sapien
cagagtctccataagtgggcaactc

SEQ ID NO: 5122368 - DNA, 25 bp, Homo sapien
atgcaataatgccttttgctggcct

SEQ ID NO: 5122369 - DNA, 25 bp, Homo sapien
cacgtcagcctcatgcaataatgcc

SEQ ID NO: 5122370 - DNA, 25 bp, Homo sapien
caataatgccttttgctggcctgtt

SEQ ID NO: 5122371 - DNA, 25 bp, Homo sapien
tgctggcctgttctgtatatgtcat

SEQ ID NO: 5122372 - DNA, 25 bp, Homo sapien
gaggaggtccataaatctgtgtgcc

SEQ ID NO: 5122373 - DNA, 25 bp, Homo sapien
gctgtactgcgagtctccatgccca

SEQ ID NO: 5122374 - DNA, 25 bp, Homo sapien
tgccacagtctgctgtactgcgagt

SEQ ID NO: 5122375 - DNA, 25 bp, Homo sapien
ctttgtgatgttatgcagctgccta

SEQ ID NO: 5122376 - DNA, 25 bp, Homo sapien
tgttcgttttagcttgtcagtgaga

SEQ ID NO: 5122377 - DNA, 25 bp, Homo sapien
tctgaatgacatctgctgaaggtgt

SEQ ID NO: 5122378 - DNA, 25 bp, Homo sapien
ttttatcagggacttcaggcttctc

SEQ ID NO: 5122379 - DNA, 25 bp, Homo sapien
cagtgagatggttcaaaagcgaatt

SEQ ID NO: 5122380 - DNA, 25 bp, Homo sapien
gtgactggactgtcaacattagttc

SEQ ID NO: 5122381 - DNA, 25 bp, Homo sapien
ggatgagagattcatcttcttcttg

SEQ ID NO: 5122382 - DNA, 25 bp, Homo sapien
ttccagagaaggctcaaagagcagt

SEQ ID NO: 5122383 - DNA, 25 bp, Homo sapien
gactgtcaacattagttctgtgaga

SEQ ID NO: 5122384 - DNA, 25 bp, Homo sapien
gaataactgattcaaccaggctagg

SEQ ID NO: 5122385 - DNA, 25 bp, Homo sapien
caacacatggtgatgagttctatat

SEQ ID NO: 5122386 - DNA, 25 bp, Homo sapien
aaagacatggccctaacttcaggac

SEQ ID NO: 5122387 - DNA, 25 bp, Homo sapien
caaaacactagcaagtcataatgga

SEQ ID NO: 5122388 - DNA, 25 bp, Homo sapien
tcaaatactgctgctaaacttggcc

SEQ ID NO: 5122389 - DNA, 25 bp, Homo sapien
taagggctggtgaaagcatcaaaat

SEQ ID NO: 5122390 - DNA, 25 bp, Homo sapien
gacagtgattaactgcacccaaaat

SEQ ID NO: 5122391 - DNA, 25 bp, Homo sapien
gcatcaaaatacgaatcaggcacga

SEQ ID NO: 5122392 - DNA, 25 bp, Homo sapien
caaaggtagctgcatagatgcgggc

SEQ ID NO: 5122393 - DNA, 25 bp, Homo sapien
gtttaagagcttgtaaatcaagact

SEQ ID NO: 5122394 - DNA, 25 bp, Homo sapien
gctgattcaaatgcggcctgaatgg

SEQ ID NO: 5122395 - DNA, 25 bp, Homo sapien
gaagaatatctggaacttttcaaag

SEQ ID NO: 5122396 - DNA, 25 bp, Homo sapien
ttagtaagtacaaatggacaagtta

SEQ ID NO: 5122397 - DNA, 25 bp, Homo sapien
tagtaagtacaaatggacaagttac

SEQ ID NO: 5122398 - DNA, 25 bp, Homo sapien
ggatcacagttatccaacgtgagga

SEQ ID NO: 5122399 - DNA, 25 bp, Homo sapien
taaccctctggcaaacaactggatt

SEQ ID NO: 5122400 - DNA, 25 bp, Homo sapien
gagtccaggccaaggtactccaaag

SEQ ID NO: 5122401 - DNA, 25 bp, Homo sapien
ggcaagacaagataggactagctga

SEQ ID NO: 5122402 - DNA, 25 bp, Homo sapien
gaagcctagtatcaatgagcagcaa

SEQ ID NO: 5122403 - DNA, 25 bp, Homo sapien
tgagcagcaatcctacatttctggt

SEQ ID NO: 5122404 - DNA, 25 bp, Homo sapien
ttctggtgggtctgagcgctactgc

SEQ ID NO: 5122405 - DNA, 25 bp, Homo sapien
gctactgcgtccttgtgctgtttgt

SEQ ID NO: 5122406 - DNA, 25 bp, Homo sapien
taaacttgatctcggtggtctagaa

SEQ ID NO: 5122407 - DNA, 25 bp, Homo sapien
aacttgatctcggtggtctagaatc

SEQ ID NO: 5122408 - DNA, 25 bp, Homo sapien
tttcctaaacttgatctcggtggtc

SEQ ID NO: 5122409 - DNA, 25 bp, Homo sapien
gatctcggtggtctagaatcaacca

SEQ ID NO: 5122410 - DNA, 25 bp, Homo sapien
tagttggaacaaactcaagtttata

SEQ ID NO: 5122411 - DNA, 25 bp, Homo sapien
ttttcttgctttgacgaggaagcat

SEQ ID NO: 5122412 - DNA, 25 bp, Homo sapien
ctcaaagataatggcatccactttt

SEQ ID NO: 5122413 - DNA, 25 bp, Homo sapien
caaactcaagtttatactctgcatc

SEQ ID NO: 5122414 - DNA, 25 bp, Homo sapien
tccataagcttgtacatttgagtca

SEQ ID NO: 5122415 - DNA, 25 bp, Homo sapien
ggtgtgggcacctgatattgttcca

SEQ ID NO: 5122416 - DNA, 25 bp, Homo sapien
tcaagatcactacccaaatgcacac

SEQ ID NO: 5122417 - DNA, 25 bp, Homo sapien
ttatcaatggcattccgaacagcaa

SEQ ID NO: 5122418 - DNA, 25 bp, Homo sapien
gctgtaaaatgtgctagcaagtcat

SEQ ID NO: 5122419 - DNA, 25 bp, Homo sapien
gagtagtcttaattattctcaccac

SEQ ID NO: 5122420 - DNA, 25 bp, Homo sapien
gacgtgatggacacattaattagct

SEQ ID NO: 5122421 - DNA, 25 bp, Homo sapien
caaagacattgttgattggttagaa

SEQ ID NO: 5122422 - DNA, 25 bp, Homo sapien
ttattcaatatgagccttattttgt

SEQ ID NO: 5122423 - DNA, 25 bp, Homo sapien
aaatgcacgtttctgaagatcagcc

SEQ ID NO: 5122424 - DNA, 25 bp, Homo sapien
aattcttctgataggacttatactg

SEQ ID NO: 5122425 - DNA, 25 bp, Homo sapien
ggacttatactgaaatgcacgtttc

SEQ ID NO: 5122426 - DNA, 25 bp, Homo sapien
aagcttcaaacttggacacttctac

SEQ ID NO: 5122427 - DNA, 25 bp, Homo sapien
gcaattgtttgagcttcagttcagc

SEQ ID NO: 5122428 - DNA, 25 bp, Homo sapien
tcttgttggagtttatcccattcag

SEQ ID NO: 5122429 - DNA, 25 bp, Homo sapien
ttcagcactgacttcttccaaagct

SEQ ID NO: 5122430 - DNA, 25 bp, Homo sapien
tttgagctggggcactacactgttg

SEQ ID NO: 5122431 - DNA, 25 bp, Homo sapien
cacaaatttagcatatttagaaact

SEQ ID NO: 5122432 - DNA, 25 bp, Homo sapien
tacactgttgggtggcaagcctttt

SEQ ID NO: 5122433 - DNA, 25 bp, Homo sapien
acttgaccgtttaggacttctggat

SEQ ID NO: 5122434 - DNA, 25 bp, Homo sapien
catccactagagtggcatcaactgt

SEQ ID NO: 5122435 - DNA, 25 bp, Homo sapien
cttgccttcaaagtcgggttcctca

SEQ ID NO: 5122436 - DNA, 25 bp, Homo sapien
atttcagcatccactagagtggcat

SEQ ID NO: 5122437 - DNA, 25 bp, Homo sapien
tcctcaagtcaatgataactggaag

SEQ ID NO: 5122438 - DNA, 25 bp, Homo sapien
cccagtataaacacatctttggagt

SEQ ID NO: 5122439 - DNA, 25 bp, Homo sapien
gagtcacggtgaggcagaatgacaa

SEQ ID NO: 5122440 - DNA, 25 bp, Homo sapien
ctgtatgtcatctgtgccgcccagt

SEQ ID NO: 5122441 - DNA, 25 bp, Homo sapien
tatgtcatctgtgccgcccagtata

SEQ ID NO: 5122442 - DNA, 25 bp, Homo sapien
gtaacgtgatgaggcaagagttgca

SEQ ID NO: 5122443 - DNA, 25 bp, Homo sapien
ctcgagttttcagtggaccaaggta

SEQ ID NO: 5122444 - DNA, 25 bp, Homo sapien
tttgccattcatccactcgagtttt

SEQ ID NO: 5122445 - DNA, 25 bp, Homo sapien
tgatggtgctatcatcaagaaggac

SEQ ID NO: 5122446 - DNA, 25 bp, Homo sapien
gctgagtagcggctcgaagagcatt

SEQ ID NO: 5122447 - DNA, 25 bp, Homo sapien
gagcattaggcagccgattcacctt

SEQ ID NO: 5122448 - DNA, 25 bp, Homo sapien
gaaaatactttctaggtagagccag

SEQ ID NO: 5122449 - DNA, 25 bp, Homo sapien
catgacttatccacctgaaggaaca

SEQ ID NO: 5122450 - DNA, 25 bp, Homo sapien
tgattctaagtatgcctctaggcac

SEQ ID NO: 5122451 - DNA, 25 bp, Homo sapien
tctgaatttggtcaagtaatgcatt

SEQ ID NO: 5122452 - DNA, 25 bp, Homo sapien
aactctttttgattctaagtatgcc

SEQ ID NO: 5122453 - DNA, 25 bp, Homo sapien
tgcctctaggcacttctgaatttgg

SEQ ID NO: 5122454 - DNA, 25 bp, Homo sapien
gaggcatgagagcaaattcgagctt

SEQ ID NO: 5122455 - DNA, 25 bp, Homo sapien
tggctgcacggcctgtggatttcgt

SEQ ID NO: 5122456 - DNA, 25 bp, Homo sapien
aatggagtcgaagcatttccttaag

SEQ ID NO: 5122457 - DNA, 25 bp, Homo sapien
ccaggaatctttccttcggcaggag

SEQ ID NO: 5122458 - DNA, 25 bp, Homo sapien
aagccattcctctacattgcctcgg

SEQ ID NO: 5122459 - DNA, 25 bp, Homo sapien
ccctgatagtcagcgatggcagctt

SEQ ID NO: 5122460 - DNA, 25 bp, Homo sapien
tttgcacaggcgacgcagagatgtg

SEQ ID NO: 5122461 - DNA, 25 bp, Homo sapien
gagatgtgaacatggcttcttccac

SEQ ID NO: 5122462 - DNA, 25 bp, Homo sapien
taatttgagaaacagtcaggataac

SEQ ID NO: 5122463 - DNA, 25 bp, Homo sapien
gtgttctgtttccagacattcagtc

SEQ ID NO: 5122464 - DNA, 25 bp, Homo sapien
gacattcagtcaaatcacggcacca

SEQ ID NO: 5122465 - DNA, 25 bp, Homo sapien
cttcagggcctgtatatgattactg

SEQ ID NO: 5122466 - DNA, 25 bp, Homo sapien
gaagactgccttgaactattgcagc

SEQ ID NO: 5122467 - DNA, 25 bp, Homo sapien
caatgcagttaggatgtttctgtgt

SEQ ID NO: 5122468 - DNA, 25 bp, Homo sapien
tcttgcatgcacatcaatagtaatc

SEQ ID NO: 5122469 - DNA, 25 bp, Homo sapien
ctattgcagctagggcatttaatct

SEQ ID NO: 5122470 - DNA, 25 bp, Homo sapien
cagtcaaaagattcaactgtctcca

SEQ ID NO: 5122471 - DNA, 25 bp, Homo sapien
tgccagtcaaaagattcaactgtct

SEQ ID NO: 5122472 - DNA, 25 bp, Homo sapien
gccagtcaaaagattcaactgtctc

SEQ ID NO: 5122473 - DNA, 25 bp, Homo sapien
agtcaaaagattcaactgtctccac

SEQ ID NO: 5122474 - DNA, 25 bp, Homo sapien
taataaccaatcttgggcatgcacc

SEQ ID NO: 5122475 - DNA, 25 bp, Homo sapien
tatcccagtaatagcgcagttgtct

SEQ ID NO: 5122476 - DNA, 25 bp, Homo sapien
tgtactgagagagcgccattctagc

SEQ ID NO: 5122477 - DNA, 25 bp, Homo sapien
cattctagccacacaattatccagg

SEQ ID NO: 5122478 - DNA, 25 bp, Homo sapien
cttttgccagatctttggtagtctc

SEQ ID NO: 5122479 - DNA, 25 bp, Homo sapien
tgcaaagctcccatgaggcaaagat

SEQ ID NO: 5122480 - DNA, 25 bp, Homo sapien
cactggatggcaagagcttttgcca

SEQ ID NO: 5122481 - DNA, 25 bp, Homo sapien
catctgaacagttaaagaccacaca

SEQ ID NO: 5122482 - DNA, 25 bp, Homo sapien
aatcaaaggacgtgttcaaattctt

SEQ ID NO: 5122483 - DNA, 25 bp, Homo sapien
tagtggtgactgctggcgagttact

SEQ ID NO: 5122484 - DNA, 25 bp, Homo sapien
ctgggaggtggctaagtagatattc

SEQ ID NO: 5122485 - DNA, 25 bp, Homo sapien
gactgctggcgagttacttcactgc

SEQ ID NO: 5122486 - DNA, 25 bp, Homo sapien
gaacttctatgtcaattcgattaaa

SEQ ID NO: 5122487 - DNA, 25 bp, Homo sapien
gcgcgatgacggacagaacttctat

SEQ ID NO: 5122488 - DNA, 25 bp, Homo sapien
tgactgtgccaagccactgaagaag

SEQ ID NO: 5122489 - DNA, 25 bp, Homo sapien
tcctaatggtaatgagttgctgcgc

SEQ ID NO: 5122490 - DNA, 25 bp, Homo sapien
gggtagtagacaacctgcttgggac

SEQ ID NO: 5122491 - DNA, 25 bp, Homo sapien
ggggtagtagacaacctgcttggga

SEQ ID NO: 5122492 - DNA, 25 bp, Homo sapien
tgcaaagcccatgggggtagtagac

SEQ ID NO: 5122493 - DNA, 25 bp, Homo sapien
gtgtgcaaagcccatgggggtagta

SEQ ID NO: 5122494 - DNA, 25 bp, Homo sapien
atctccagaaactcccaggcttgct

SEQ ID NO: 5122495 - DNA, 25 bp, Homo sapien
catgaccacacagtgcaacacatac

SEQ ID NO: 5122496 - DNA, 25 bp, Homo sapien
tctccagaaactcccaggcttgctg

SEQ ID NO: 5122497 - DNA, 25 bp, Homo sapien
gaggcaataggtgaggcatggaggc

SEQ ID NO: 5122498 - DNA, 25 bp, Homo sapien
ggcaataggtgaggcatggaggcac

SEQ ID NO: 5122499 - DNA, 25 bp, Homo sapien
aggcaataggtgaggcatggaggca

SEQ ID NO: 5122500 - DNA, 25 bp, Homo sapien
tcacttttacttaacagcaaacact

SEQ ID NO: 5122501 - DNA, 25 bp, Homo sapien
tctgagttgttgaggccccactgtc

SEQ ID NO: 5122502 - DNA, 25 bp, Homo sapien
ccaacttaatcttagtctgagttgt

SEQ ID NO: 5122503 - DNA, 25 bp, Homo sapien
attccaacttaatcttagtctgagt

SEQ ID NO: 5122504 - DNA, 25 bp, Homo sapien
gatgaaggctgcacaagtcatcacc

SEQ ID NO: 5122505 - DNA, 25 bp, Homo sapien
atgaaggctgcacaagtcatcacca

SEQ ID NO: 5122506 - DNA, 25 bp, Homo sapien
ctttatttcccgcccctcaaacatg

SEQ ID NO: 5122507 - DNA, 25 bp, Homo sapien
tgaaggctgcacaagtcatcaccaa

SEQ ID NO: 5122508 - DNA, 25 bp, Homo sapien
tcatcgcaaatggtctaaacagggc

SEQ ID NO: 5122509 - DNA, 25 bp, Homo sapien
tcgcaaatggtctaaacagggcttt

SEQ ID NO: 5122510 - DNA, 25 bp, Homo sapien
catcatcgcaaatggtctaaacagg

SEQ ID NO: 5122511 - DNA, 25 bp, Homo sapien
gcaaatggtctaaacagggctttca

SEQ ID NO: 5122512 - DNA, 25 bp, Homo sapien
ctctgcaatcaaggcataatttgga

SEQ ID NO: 5122513 - DNA, 25 bp, Homo sapien
ctcatgccaaagtcgtagtgatcct

SEQ ID NO: 5122514 - DNA, 25 bp, Homo sapien
cagctctcatgccaaagtcgtagtg

SEQ ID NO: 5122515 - DNA, 25 bp, Homo sapien
gctcactgcaaagcttatacatctg

SEQ ID NO: 5122516 - DNA, 25 bp, Homo sapien
gcaaagcttatacatctgagtcatt

SEQ ID NO: 5122517 - DNA, 25 bp, Homo sapien
aaagctcttatcaacaccacatctt

SEQ ID NO: 5122518 - DNA, 25 bp, Homo sapien
taaagctcttatcaacaccacatct

SEQ ID NO: 5122519 - DNA, 25 bp, Homo sapien
aagctcttatcaacaccacatcttc

SEQ ID NO: 5122520 - DNA, 25 bp, Homo sapien
gtaaagctcttatcaacaccacatc

SEQ ID NO: 5122521 - DNA, 25 bp, Homo sapien
caaagagcatctactggcccatcac

SEQ ID NO: 5122522 - DNA, 25 bp, Homo sapien
ggtaaactgtggtcttgccgcctcc

SEQ ID NO: 5122523 - DNA, 25 bp, Homo sapien
gaagtatcattcacagctgctcgga

SEQ ID NO: 5122524 - DNA, 25 bp, Homo sapien
tgttggcccgactaacataacacca

SEQ ID NO: 5122525 - DNA, 25 bp, Homo sapien
actgttgcaggggaggcaacccgca

SEQ ID NO: 5122526 - DNA, 25 bp, Homo sapien
cattccacatcgactgactgttgca

SEQ ID NO: 5122527 - DNA, 25 bp, Homo sapien
gggaggcaacccgcagatcttgcac

SEQ ID NO: 5122528 - DNA, 25 bp, Homo sapien
tccacatcgactgactgttgcaggg

SEQ ID NO: 5122529 - DNA, 25 bp, Homo sapien
cccttcatccaagttttaacataag

SEQ ID NO: 5122530 - DNA, 25 bp, Homo sapien
gttttaacataaggcatccatttca

SEQ ID NO: 5122531 - DNA, 25 bp, Homo sapien
acataaggcatccatttcagttctt

SEQ ID NO: 5122532 - DNA, 25 bp, Homo sapien
atacccttcatccaagttttaacat

SEQ ID NO: 5122533 - DNA, 25 bp, Homo sapien
ccaagttaactccatctttcccaag

SEQ ID NO: 5122534 - DNA, 25 bp, Homo sapien
cacttgtggaattgcttggctgcac

SEQ ID NO: 5122535 - DNA, 25 bp, Homo sapien
gactccaataagcaacagagtgtag

SEQ ID NO: 5122536 - DNA, 25 bp, Homo sapien
tgtagtaactttgctgatgtccact

SEQ ID NO: 5122537 - DNA, 25 bp, Homo sapien
aatcatagtagttttcagttaggtt

SEQ ID NO: 5122538 - DNA, 25 bp, Homo sapien
cctggcatcaggattatcatcaaat

SEQ ID NO: 5122539 - DNA, 25 bp, Homo sapien
caaaagtctgacatagtatagtgtt

SEQ ID NO: 5122540 - DNA, 25 bp, Homo sapien
tcaggattatcatcaaattgtgttc

SEQ ID NO: 5122541 - DNA, 25 bp, Homo sapien
gtgcaatattgagcttggatactaa

SEQ ID NO: 5122542 - DNA, 25 bp, Homo sapien
tcaaggtgtctttgtgtctagttct

SEQ ID NO: 5122543 - DNA, 25 bp, Homo sapien
tgctcattgctgctatcaaggtgtc

SEQ ID NO: 5122544 - DNA, 25 bp, Homo sapien
aaaataagtatactagatatgctca

SEQ ID NO: 5122545 - DNA, 25 bp, Homo sapien
acaacacggaatgcttgactgccag

SEQ ID NO: 5122546 - DNA, 25 bp, Homo sapien
cattagatacccatagcgcactgtg

SEQ ID NO: 5122547 - DNA, 25 bp, Homo sapien
taggtatgattcgttcccagggatc

SEQ ID NO: 5122548 - DNA, 25 bp, Homo sapien
tccagccgtttggtgtcaaagtcca

SEQ ID NO: 5122549 - DNA, 25 bp, Homo sapien
gggacatagccagctgattcttgaa

SEQ ID NO: 5122550 - DNA, 25 bp, Homo sapien
ttgactcaatgatctcttgtgtcct

SEQ ID NO: 5122551 - DNA, 25 bp, Homo sapien
aaatttagataaacagggacatagc

SEQ ID NO: 5122552 - DNA, 25 bp, Homo sapien
tctccagttttgactcaatgatctc

SEQ ID NO: 5122553 - DNA, 25 bp, Homo sapien
agacagcatagacaccactcagtgc

SEQ ID NO: 5122554 - DNA, 25 bp, Homo sapien
gacagcatagacaccactcagtgcc

SEQ ID NO: 5122555 - DNA, 25 bp, Homo sapien
cagcatagacaccactcagtgccag

SEQ ID NO: 5122556 - DNA, 25 bp, Homo sapien
acagcatagacaccactcagtgcca

SEQ ID NO: 5122557 - DNA, 25 bp, Homo sapien
ccagtctgggcatgtttaaatcatc

SEQ ID NO: 5122558 - DNA, 25 bp, Homo sapien
gaagtaattcaatcggaggctgaga

SEQ ID NO: 5122559 - DNA, 25 bp, Homo sapien
ccaaaatcttgatactgccgaagta

SEQ ID NO: 5122560 - DNA, 25 bp, Homo sapien
gagagccatagcgatccagtctggg

SEQ ID NO: 5122561 - DNA, 25 bp, Homo sapien
gcacagcatgctgaagtgtctgatg

SEQ ID NO: 5122562 - DNA, 25 bp, Homo sapien
tctgagggcattgggaggcacagca

SEQ ID NO: 5122563 - DNA, 25 bp, Homo sapien
ctggaggtgcacatgccgatatgat

SEQ ID NO: 5122564 - DNA, 25 bp, Homo sapien
agtcacagggttgcggccaccgcct

SEQ ID NO: 5122565 - DNA, 25 bp, Homo sapien
tccatgggcctagagcaagttcttt

SEQ ID NO: 5122566 - DNA, 25 bp, Homo sapien
catgggcctagagcaagttcttttt

SEQ ID NO: 5122567 - DNA, 25 bp, Homo sapien
agatccatgggcctagagcaagttc

SEQ ID NO: 5122568 - DNA, 25 bp, Homo sapien
tgggcctagagcaagttcttttttc

SEQ ID NO: 5122569 - DNA, 25 bp, Homo sapien
tttcctccaaacagtaatgaaggac

SEQ ID NO: 5122570 - DNA, 25 bp, Homo sapien
ccaaacagtaatgaaggacaggaca

SEQ ID NO: 5122571 - DNA, 25 bp, Homo sapien
acagacgggtgatgaattcttgggt

SEQ ID NO: 5122572 - DNA, 25 bp, Homo sapien
caggacagacgggtgatgaattctt

SEQ ID NO: 5122573 - DNA, 25 bp, Homo sapien
tattagctagtccttgacccgcaag

SEQ ID NO: 5122574 - DNA, 25 bp, Homo sapien
tgctttaacttgtgaggatgacctc

SEQ ID NO: 5122575 - DNA, 25 bp, Homo sapien
cctggagtaactaatgggagaagcc

SEQ ID NO: 5122576 - DNA, 25 bp, Homo sapien
ggttacatgccgtctctccagagag

SEQ ID NO: 5122577 - DNA, 25 bp, Homo sapien
cttagatcaggagcttggaagtctc

SEQ ID NO: 5122578 - DNA, 25 bp, Homo sapien
cacttttatggatgaatgaccacca

SEQ ID NO: 5122579 - DNA, 25 bp, Homo sapien
cttacttgcaatggtgaactccctc

SEQ ID NO: 5122580 - DNA, 25 bp, Homo sapien
tggccattccctcctaagcttagat

SEQ ID NO: 5122581 - DNA, 25 bp, Homo sapien
tggataagtccctcaagttaaagac

SEQ ID NO: 5122582 - DNA, 25 bp, Homo sapien
tttacagctggtggaaagtcactca

SEQ ID NO: 5122583 - DNA, 25 bp, Homo sapien
gttggcaggaggtcaacactcattt

SEQ ID NO: 5122584 - DNA, 25 bp, Homo sapien
tgaggcttctacaatgcttgatgca

SEQ ID NO: 5122585 - DNA, 25 bp, Homo sapien
cacctgcatacatacaatgttactg

SEQ ID NO: 5122586 - DNA, 25 bp, Homo sapien
gcactcagcctgaataggaacaggt

SEQ ID NO: 5122587 - DNA, 25 bp, Homo sapien
tgttactgagatatttgggggccaa

SEQ ID NO: 5122588 - DNA, 25 bp, Homo sapien
tgggtgagtcaccaacacctgcata

SEQ ID NO: 5122589 - DNA, 25 bp, Homo sapien
taacatggaaatagtgcttatcttc

SEQ ID NO: 5122590 - DNA, 25 bp, Homo sapien
tggcactcatggcaaaagagtctaa

SEQ ID NO: 5122591 - DNA, 25 bp, Homo sapien
taatcaagcgatcatggaagaccct

SEQ ID NO: 5122592 - DNA, 25 bp, Homo sapien
tgttcctggatcacattggaggata

SEQ ID NO: 5122593 - DNA, 25 bp, Homo sapien
tatgatgggcttattcaaaaaatat

SEQ ID NO: 5122594 - DNA, 25 bp, Homo sapien
aatattccaggtcaattgcaattcc

SEQ ID NO: 5122595 - DNA, 25 bp, Homo sapien
aaatctccaaatatgatgggcttat

SEQ ID NO: 5122596 - DNA, 25 bp, Homo sapien
atattccaggtcaattgcaattcca

SEQ ID NO: 5122597 - DNA, 25 bp, Homo sapien
gcagttttctctatatcaggcatgt

SEQ ID NO: 5122598 - DNA, 25 bp, Homo sapien
tgtcatcataaatccgatcagcttt

SEQ ID NO: 5122599 - DNA, 25 bp, Homo sapien
tgaaacatgttctatagcatcctgg

SEQ ID NO: 5122600 - DNA, 25 bp, Homo sapien
gatagtcctgtagaacatttgcagt

SEQ ID NO: 5122601 - DNA, 25 bp, Homo sapien
gcatatatgagctgcaagtctcgtg

SEQ ID NO: 5122602 - DNA, 25 bp, Homo sapien
tatcataattatatccccggctgag

SEQ ID NO: 5122603 - DNA, 25 bp, Homo sapien
agggcattgcctctttcttgacgta

SEQ ID NO: 5122604 - DNA, 25 bp, Homo sapien
cccggctgagttcaatctgcaaaca

SEQ ID NO: 5122605 - DNA, 25 bp, Homo sapien
gaatgttacgagtacagcttatgct

SEQ ID NO: 5122606 - DNA, 25 bp, Homo sapien
tctcccttaattaaagcatgggcaa

SEQ ID NO: 5122607 - DNA, 25 bp, Homo sapien
ccattttcttatgtgtcttgtgaca

SEQ ID NO: 5122608 - DNA, 25 bp, Homo sapien
ctaagagattttgactttcttgatc

SEQ ID NO: 5122609 - DNA, 25 bp, Homo sapien
tcttggtctggtggccgctaaaacc

SEQ ID NO: 5122610 - DNA, 25 bp, Homo sapien
tttatatcttctaggaactcctcca

SEQ ID NO: 5122611 - DNA, 25 bp, Homo sapien
gccgctaaaacctgctccagttcat

SEQ ID NO: 5122612 - DNA, 25 bp, Homo sapien
aattaggcacttcacctgagttcag

SEQ ID NO: 5122613 - DNA, 25 bp, Homo sapien
gaaacgtttttgtgataaagccaca

SEQ ID NO: 5122614 - DNA, 25 bp, Homo sapien
aacgtttttgtgataaagccacata

SEQ ID NO: 5122615 - DNA, 25 bp, Homo sapien
ttttgtgataaagccacataactac

SEQ ID NO: 5122616 - DNA, 25 bp, Homo sapien
cgtttttgtgataaagccacataac

SEQ ID NO: 5122617 - DNA, 25 bp, Homo sapien
tttattcatggaccccttcaggcaa

SEQ ID NO: 5122618 - DNA, 25 bp, Homo sapien
accccttcaggcaatcaatgaatgg

SEQ ID NO: 5122619 - DNA, 25 bp, Homo sapien
atggaccccttcaggcaatcaatga

SEQ ID NO: 5122620 - DNA, 25 bp, Homo sapien
tggaccccttcaggcaatcaatgaa

SEQ ID NO: 5122621 - DNA, 25 bp, Homo sapien
tcaatggtgcagcaattcacaaggg

SEQ ID NO: 5122622 - DNA, 25 bp, Homo sapien
tctgacgcactttgctgataaagta

SEQ ID NO: 5122623 - DNA, 25 bp, Homo sapien
tggaaacatcctgcatcgggaccga

SEQ ID NO: 5122624 - DNA, 25 bp, Homo sapien
tgtgcagcttctgacgcactttgct

SEQ ID NO: 5122625 - DNA, 25 bp, Homo sapien
cctttaaagtcaagcaagtccaact

SEQ ID NO: 5122626 - DNA, 25 bp, Homo sapien
agagatatcctgggatgtcaccaac

SEQ ID NO: 5122627 - DNA, 25 bp, Homo sapien
ttaaagtcaagcaagtccaacttct

SEQ ID NO: 5122628 - DNA, 25 bp, Homo sapien
tttaaagtcaagcaagtccaacttc

SEQ ID NO: 5122629 - DNA, 25 bp, Homo sapien
ctttgacacagaaagaagtgcttct

SEQ ID NO: 5122630 - DNA, 25 bp, Homo sapien
acagaaagaagtgcttctctgggcc

SEQ ID NO: 5122631 - DNA, 25 bp, Homo sapien
ttgacacagaaagaagtgcttctct

SEQ ID NO: 5122632 - DNA, 25 bp, Homo sapien
gacacagaaagaagtgcttctctgg

SEQ ID NO: 5122633 - DNA, 25 bp, Homo sapien
tgctggagacactcaagtgaacgtt

SEQ ID NO: 5122634 - DNA, 25 bp, Homo sapien
tgaacgttcacgcacatcaagggaa

SEQ ID NO: 5122635 - DNA, 25 bp, Homo sapien
gtagtaccgcctgcgcagctcattg

SEQ ID NO: 5122636 - DNA, 25 bp, Homo sapien
caggtaaagattgataagctccagg

SEQ ID NO: 5122637 - DNA, 25 bp, Homo sapien
cactgccaatttttccatcagggct

SEQ ID NO: 5122638 - DNA, 25 bp, Homo sapien
tgtttctagtagcttggtgagacca

SEQ ID NO: 5122639 - DNA, 25 bp, Homo sapien
agaccattcttcacccgatctcgtg

SEQ ID NO: 5122640 - DNA, 25 bp, Homo sapien
ctgatcggcactttcttgatccact

SEQ ID NO: 5122641 - DNA, 25 bp, Homo sapien
tgcaggtagtgcctcgtcaagatct

SEQ ID NO: 5122642 - DNA, 25 bp, Homo sapien
tattggcagcatctagtgcaggtag

SEQ ID NO: 5122643 - DNA, 25 bp, Homo sapien
gagattgcttccattactgtcatga

SEQ ID NO: 5122644 - DNA, 25 bp, Homo sapien
aggaatccagtgctttattggcagc

SEQ ID NO: 5122645 - DNA, 25 bp, Homo sapien
cactcgagagtacaaatccatagct

SEQ ID NO: 5122646 - DNA, 25 bp, Homo sapien
tagagtcaccaagaagttgctttgc

SEQ ID NO: 5122647 - DNA, 25 bp, Homo sapien
ggttcgacgaccttgaccactcgag

SEQ ID NO: 5122648 - DNA, 25 bp, Homo sapien
tgaagctttgccaatatctgaggct

SEQ ID NO: 5122649 - DNA, 25 bp, Homo sapien
tctttttcatttacacctttgtcat

SEQ ID NO: 5122650 - DNA, 25 bp, Homo sapien
ggcctgtatttgatcttctacttgt

SEQ ID NO: 5122651 - DNA, 25 bp, Homo sapien
tctacttgtcttagtaatgcttgct

SEQ ID NO: 5122652 - DNA, 25 bp, Homo sapien
ttgtaaggcctgtatttgatcttct

SEQ ID NO: 5122653 - DNA, 25 bp, Homo sapien
tcagctttccagcacgtactagacg

SEQ ID NO: 5122654 - DNA, 25 bp, Homo sapien
tgtactgggctgtgaaagccccata

SEQ ID NO: 5122655 - DNA, 25 bp, Homo sapien
tagacgtgcttttgtcagggccatg

SEQ ID NO: 5122656 - DNA, 25 bp, Homo sapien
gctgctatgaacacgttcccagtga

SEQ ID NO: 5122657 - DNA, 25 bp, Homo sapien
tgagctgtgtaaatgatgaatagct

SEQ ID NO: 5122658 - DNA, 25 bp, Homo sapien
ccccaggtttttgagctgtgtaaat

SEQ ID NO: 5122659 - DNA, 25 bp, Homo sapien
ccttcccccaggtttttgagctgtg

SEQ ID NO: 5122660 - DNA, 25 bp, Homo sapien
gagctgtgtaaatgatgaatagctt

SEQ ID NO: 5122661 - DNA, 25 bp, Homo sapien
tgttccactgccgtatctcgtaggg

SEQ ID NO: 5122662 - DNA, 25 bp, Homo sapien
gaaggatcgattgggatctccagag

SEQ ID NO: 5122663 - DNA, 25 bp, Homo sapien
ttctgccttgagtaaccaaaatgcc

SEQ ID NO: 5122664 - DNA, 25 bp, Homo sapien
tctcgtagggatctccaagaatgtt

SEQ ID NO: 5122665 - DNA, 25 bp, Homo sapien
cggattgaattctcgagtattcgta

SEQ ID NO: 5122666 - DNA, 25 bp, Homo sapien
gacaggtaaaccaagtcggattgaa

SEQ ID NO: 5122667 - DNA, 25 bp, Homo sapien
taagcttaatgatctttaaaccact

SEQ ID NO: 5122668 - DNA, 25 bp, Homo sapien
tcttccagtaagacaggtaaaccaa

SEQ ID NO: 5122669 - DNA, 25 bp, Homo sapien
aatggagttgactggtgtctttagc

SEQ ID NO: 5122670 - DNA, 25 bp, Homo sapien
caatgtctgaaagtcaacaggtcct

SEQ ID NO: 5122671 - DNA, 25 bp, Homo sapien
tgaaagttgggaactgacatgagaa

SEQ ID NO: 5122672 - DNA, 25 bp, Homo sapien
gggatgtggcctatataggattcca

SEQ ID NO: 5122673 - DNA, 25 bp, Homo sapien
aatccaattctgacttatgcccaag

SEQ ID NO: 5122674 - DNA, 25 bp, Homo sapien
tgttgtgaattttcagcgcagctca

SEQ ID NO: 5122675 - DNA, 25 bp, Homo sapien
taatcctgactgcactactgttgtg

SEQ ID NO: 5122676 - DNA, 25 bp, Homo sapien
agaatattttactggcttcgcatca

SEQ ID NO: 5122677 - DNA, 25 bp, Homo sapien
tagtcggccaccactgataaaaatt

SEQ ID NO: 5122678 - DNA, 25 bp, Homo sapien
tgtctgagtctccaagacggatgag

SEQ ID NO: 5122679 - DNA, 25 bp, Homo sapien
caagacggatgagtagtcggccacc

SEQ ID NO: 5122680 - DNA, 25 bp, Homo sapien
ttgtcataatcaatgtctgagtctc

SEQ ID NO: 5122681 - DNA, 25 bp, Homo sapien
gatttggcattttggttgtcatata

SEQ ID NO: 5122682 - DNA, 25 bp, Homo sapien
atttggcattttggttgtcatatag

SEQ ID NO: 5122683 - DNA, 25 bp, Homo sapien
gggatttggcattttggttgtcata

SEQ ID NO: 5122684 - DNA, 25 bp, Homo sapien
tggggatttggcattttggttgtca

SEQ ID NO: 5122685 - DNA, 25 bp, Homo sapien
tccaggcctgattttgttacagtga

SEQ ID NO: 5122686 - DNA, 25 bp, Homo sapien
ccaggcctgattttgttacagtgaa

SEQ ID NO: 5122687 - DNA, 25 bp, Homo sapien
cctccaggcctgattttgttacagt

SEQ ID NO: 5122688 - DNA, 25 bp, Homo sapien
ctccaggcctgattttgttacagtg

SEQ ID NO: 5122689 - DNA, 25 bp, Homo sapien
caaagttcagatatctaaattatgt

SEQ ID NO: 5122690 - DNA, 25 bp, Homo sapien
ccaaagttcagatatctaaattatg

SEQ ID NO: 5122691 - DNA, 25 bp, Homo sapien
aaaccaaagttcagatatctaaatt

SEQ ID NO: 5122692 - DNA, 25 bp, Homo sapien
ctaaaaccaaagttcagatatctaa

SEQ ID NO: 5122693 - DNA, 25 bp, Homo sapien
tatcagtgttgatcctcacgatgag

SEQ ID NO: 5122694 - DNA, 25 bp, Homo sapien
tttccttcagaggtaaagagcattc

SEQ ID NO: 5122695 - DNA, 25 bp, Homo sapien
caggattttctcttcgatagttttc

SEQ ID NO: 5122696 - DNA, 25 bp, Homo sapien
cctggagtgtgtcaataagttcttc

SEQ ID NO: 5122697 - DNA, 25 bp, Homo sapien
cagagttaggaataggcagagggca

SEQ ID NO: 5122698 - DNA, 25 bp, Homo sapien
ctctgagactcaatctgaattactc

SEQ ID NO: 5122699 - DNA, 25 bp, Homo sapien
gagggcagcaggcaatacaagtagc

SEQ ID NO: 5122700 - DNA, 25 bp, Homo sapien
tgaaaacatagaagcagcatgtctc

SEQ ID NO: 5122701 - DNA, 25 bp, Homo sapien
ggacttctggaatgtatccagttag

SEQ ID NO: 5122702 - DNA, 25 bp, Homo sapien
gggacttctggaatgtatccagtta

SEQ ID NO: 5122703 - DNA, 25 bp, Homo sapien
gacttctggaatgtatccagttagg

SEQ ID NO: 5122704 - DNA, 25 bp, Homo sapien
agtacattacagagccttgagtggc

SEQ ID NO: 5122705 - DNA, 25 bp, Homo sapien
gatcatctgctcagtggactctgct

SEQ ID NO: 5122706 - DNA, 25 bp, Homo sapien
ggatctatttctgagaggcttgcaa

SEQ ID NO: 5122707 - DNA, 25 bp, Homo sapien
tgagtggccactggacgatacttct

SEQ ID NO: 5122708 - DNA, 25 bp, Homo sapien
ttctagtagtacgtccaggcgctgt

SEQ ID NO: 5122709 - DNA, 25 bp, Homo sapien
tcctgcagaacctcggagaaagaaa

SEQ ID NO: 5122710 - DNA, 25 bp, Homo sapien
tagggttccttgctgacgcatcatc

SEQ ID NO: 5122711 - DNA, 25 bp, Homo sapien
tccattcagcatcagatagggttcc

SEQ ID NO: 5122712 - DNA, 25 bp, Homo sapien
tcgggcatgtatctccttcctctct

SEQ ID NO: 5122713 - DNA, 25 bp, Homo sapien
tcaactccagattccatcgggcatg

SEQ ID NO: 5122714 - DNA, 25 bp, Homo sapien
tccagattccatcgggcatgtatct

SEQ ID NO: 5122715 - DNA, 25 bp, Homo sapien
ctagtgcatccagtcaactccagat

SEQ ID NO: 5122716 - DNA, 25 bp, Homo sapien
tggaaataggatgtgacaatatatt

SEQ ID NO: 5122717 - DNA, 25 bp, Homo sapien
acaatatattttgggtaagtccgtg

SEQ ID NO: 5122718 - DNA, 25 bp, Homo sapien
gcgaaccatgtagcagtaggtagcc

SEQ ID NO: 5122719 - DNA, 25 bp, Homo sapien
tccaagtcacagcatgcgaaccatg

SEQ ID NO: 5122720 - DNA, 25 bp, Homo sapien
cagcaggttctttttgtcacattac

SEQ ID NO: 5122721 - DNA, 25 bp, Homo sapien
tcagcaggttctttttgtcacatta

SEQ ID NO: 5122722 - DNA, 25 bp, Homo sapien
atggatcttggtgtgctgcctcctt

SEQ ID NO: 5122723 - DNA, 25 bp, Homo sapien
tgtttatcttcgtgtttcattttag

SEQ ID NO: 5122724 - DNA, 25 bp, Homo sapien
taataagaattagcttatggaaaga

SEQ ID NO: 5122725 - DNA, 25 bp, Homo sapien
tagaatagccttcccatttctgtgg

SEQ ID NO: 5122726 - DNA, 25 bp, Homo sapien
gaaataattgtaacacagtccttta

SEQ ID NO: 5122727 - DNA, 25 bp, Homo sapien
taattgtaacacagtcctttaatta

SEQ ID NO: 5122728 - DNA, 25 bp, Homo sapien
aataattgtaacacagtcctttaat

SEQ ID NO: 5122729 - DNA, 25 bp, Homo sapien
tagaaataattgtaacacagtcctt

SEQ ID NO: 5122730 - DNA, 25 bp, Homo sapien
ataattctctacataaaacattatg

SEQ ID NO: 5122731 - DNA, 25 bp, Homo sapien
ttcccaacagactccatccctccag

SEQ ID NO: 5122732 - DNA, 25 bp, Homo sapien
gcagagagcacggtactctaatggc

SEQ ID NO: 5122733 - DNA, 25 bp, Homo sapien
gcacggtactctaatggcacacacc

SEQ ID NO: 5122734 - DNA, 25 bp, Homo sapien
cattgttgtcaagatctgaaaggcc

SEQ ID NO: 5122735 - DNA, 25 bp, Homo sapien
agcatcatactcaagttcctgagac

SEQ ID NO: 5122736 - DNA, 25 bp, Homo sapien
tagcatcatactcaagttcctgaga

SEQ ID NO: 5122737 - DNA, 25 bp, Homo sapien
tgcattatgatagaacccttgtcct

SEQ ID NO: 5122738 - DNA, 25 bp, Homo sapien
attgtgcattatgatagaacccttg

SEQ ID NO: 5122739 - DNA, 25 bp, Homo sapien
gtgcattatgatagaacccttgtcc

SEQ ID NO: 5122740 - DNA, 25 bp, Homo sapien
tgtgcattatgatagaacccttgtc

SEQ ID NO: 5122741 - DNA, 25 bp, Homo sapien
ttgatggcagtaatggcaagaattt

SEQ ID NO: 5122742 - DNA, 25 bp, Homo sapien
tgatggcagtaatggcaagaatttg

SEQ ID NO: 5122743 - DNA, 25 bp, Homo sapien
cttgatggcagtaatggcaagaatt

SEQ ID NO: 5122744 - DNA, 25 bp, Homo sapien
tttttctgtcctattctcatggaga

SEQ ID NO: 5122745 - DNA, 25 bp, Homo sapien
gaactgatcaacttctccctgtgcc

SEQ ID NO: 5122746 - DNA, 25 bp, Homo sapien
gctggaactgatcaacttctccctg

SEQ ID NO: 5122747 - DNA, 25 bp, Homo sapien
tcttcatatcacatggctggaactg

SEQ ID NO: 5122748 - DNA, 25 bp, Homo sapien
gcctgtgcttaggatgaataccagg

SEQ ID NO: 5122749 - DNA, 25 bp, Homo sapien
aaacctctgaaatgcacccatggga

SEQ ID NO: 5122750 - DNA, 25 bp, Homo sapien
atacagggtaggcaggtccacaggt

SEQ ID NO: 5122751 - DNA, 25 bp, Homo sapien
gggagtgttgcatgacatgtcttga

SEQ ID NO: 5122752 - DNA, 25 bp, Homo sapien
tagatcttgtcactgtatctctgcc

SEQ ID NO: 5122753 - DNA, 25 bp, Homo sapien
atatacgcttataaatatgtgtatc

SEQ ID NO: 5122754 - DNA, 25 bp, Homo sapien
cacaattcactgtaatgggtctagg

SEQ ID NO: 5122755 - DNA, 25 bp, Homo sapien
tatataatctgtggattgatgtctt

SEQ ID NO: 5122756 - DNA, 25 bp, Homo sapien
aattccaagctggtcattatcactg

SEQ ID NO: 5122757 - DNA, 25 bp, Homo sapien
actgcaaattccaagctggtcatta

SEQ ID NO: 5122758 - DNA, 25 bp, Homo sapien
ccaagctggtcattatcactgcttg

SEQ ID NO: 5122759 - DNA, 25 bp, Homo sapien
gcagtttaactggaagataaactga

SEQ ID NO: 5122760 - DNA, 25 bp, Homo sapien
tttttcagcaataggtccttgtcct

SEQ ID NO: 5122761 - DNA, 25 bp, Homo sapien
agcaagatggcaattttgcaaaaat

SEQ ID NO: 5122762 - DNA, 25 bp, Homo sapien
ttgtccttgccccagtgaaattgac

SEQ ID NO: 5122763 - DNA, 25 bp, Homo sapien
gagctcttccattgccaacatccaa

SEQ ID NO: 5122764 - DNA, 25 bp, Homo sapien
tgacagaattttgaagaactgtaac

SEQ ID NO: 5122765 - DNA, 25 bp, Homo sapien
aaagtcgaaaagtgtccttgatagc

SEQ ID NO: 5122766 - DNA, 25 bp, Homo sapien
tattactaggcatggagcttaaaaa

SEQ ID NO: 5122767 - DNA, 25 bp, Homo sapien
gtaacaggaaatgtattactaggca

SEQ ID NO: 5122768 - DNA, 25 bp, Homo sapien
taattgcatggaagaaacaaatgcc

SEQ ID NO: 5122769 - DNA, 25 bp, Homo sapien
cagtaaatgctcgtctgatatttgc

SEQ ID NO: 5122770 - DNA, 25 bp, Homo sapien
tcaaaaaacgaaggtgtcatttcag

SEQ ID NO: 5122771 - DNA, 25 bp, Homo sapien
atttgcacgtaagccttttggaggc

SEQ ID NO: 5122772 - DNA, 25 bp, Homo sapien
tctgtaggcagatcagacgagaggt

SEQ ID NO: 5122773 - DNA, 25 bp, Homo sapien
ttgaactgaattgaacctactgcat

SEQ ID NO: 5122774 - DNA, 25 bp, Homo sapien
tgcattcatccaattgatggtattc

SEQ ID NO: 5122775 - DNA, 25 bp, Homo sapien
gaaaactgggaagctaatatagtaa

SEQ ID NO: 5122776 - DNA, 25 bp, Homo sapien
ttctttacaatagagtttgagattc

SEQ ID NO: 5122777 - DNA, 25 bp, Homo sapien
tctttacaatagagtttgagattca

SEQ ID NO: 5122778 - DNA, 25 bp, Homo sapien
attcatagcagatattccaaccaag

SEQ ID NO: 5122779 - DNA, 25 bp, Homo sapien
tcatagcagatattccaaccaaggg

SEQ ID NO: 5122780 - DNA, 25 bp, Homo sapien
tacatagaattgtacttgtgggctt

SEQ ID NO: 5122781 - DNA, 25 bp, Homo sapien
ctataggcttgactcgtctggaaat

SEQ ID NO: 5122782 - DNA, 25 bp, Homo sapien
gttgtccaaccatcattgcaatcta

SEQ ID NO: 5122783 - DNA, 25 bp, Homo sapien
gaaatcttgtgtccatttgcagtca

SEQ ID NO: 5122784 - DNA, 25 bp, Homo sapien
tgttgttgaagacacaactgccctc

SEQ ID NO: 5122785 - DNA, 25 bp, Homo sapien
ttgttgaagacacaactgccctcca

SEQ ID NO: 5122786 - DNA, 25 bp, Homo sapien
gctactaactgtttctctagtagtg

SEQ ID NO: 5122787 - DNA, 25 bp, Homo sapien
actaactgtttctctagtagtgcca

SEQ ID NO: 5122788 - DNA, 25 bp, Homo sapien
tcctccaactgttgatccattctta

SEQ ID NO: 5122789 - DNA, 25 bp, Homo sapien
caactgttgatccattcttatctct

SEQ ID NO: 5122790 - DNA, 25 bp, Homo sapien
tccaactgttgatccattcttatct

SEQ ID NO: 5122791 - DNA, 25 bp, Homo sapien
tacctacattgtcaacctctgaatc

SEQ ID NO: 5122792 - DNA, 25 bp, Homo sapien
gactctaccaccataagtaatttca

SEQ ID NO: 5122793 - DNA, 25 bp, Homo sapien
tgtgactctaccaccataagtaatt

SEQ ID NO: 5122794 - DNA, 25 bp, Homo sapien
aaaatcttttcaagatagtacgaag

SEQ ID NO: 5122795 - DNA, 25 bp, Homo sapien
caagatagtacgaaggcatctttgg

SEQ ID NO: 5122796 - DNA, 25 bp, Homo sapien
aaaaatttctgggtcatcgatcaaa

SEQ ID NO: 5122797 - DNA, 25 bp, Homo sapien
aaatttctgggtcatcgatcaaagg

SEQ ID NO: 5122798 - DNA, 25 bp, Homo sapien
tccttaaactcttgtaggctgtcag

SEQ ID NO: 5122799 - DNA, 25 bp, Homo sapien
aaaatttctgggtcatcgatcaaag

SEQ ID NO: 5122800 - DNA, 25 bp, Homo sapien
atgttttgagtttacatacacaaca

SEQ ID NO: 5122801 - DNA, 25 bp, Homo sapien
cttggctgaacctcaagtatggtgt

SEQ ID NO: 5122802 - DNA, 25 bp, Homo sapien
tggtgttgattaaagtgctggtctc

SEQ ID NO: 5122803 - DNA, 25 bp, Homo sapien
tccaccagtagatgaccttggctga

SEQ ID NO: 5122804 - DNA, 25 bp, Homo sapien
ttcttgaacaatttcgtcattgctt

SEQ ID NO: 5122805 - DNA, 25 bp, Homo sapien
cggtccacttcctgtccaagaacgg

SEQ ID NO: 5122806 - DNA, 25 bp, Homo sapien
cggtggtcaaggagttcagacgtcc

SEQ ID NO: 5122807 - DNA, 25 bp, Homo sapien
tcagcaggttgttaaaccggtccac

SEQ ID NO: 5122808 - DNA, 25 bp, Homo sapien
cagacgtccttgaagatccttgaca

SEQ ID NO: 5122809 - DNA, 25 bp, Homo sapien
ggagtacagggcgatgtttgccacc

SEQ ID NO: 5122810 - DNA, 25 bp, Homo sapien
gtacagggcgatgtttgccacctgg

SEQ ID NO: 5122811 - DNA, 25 bp, Homo sapien
gagtggagtacagggcgatgtttgc

SEQ ID NO: 5122812 - DNA, 25 bp, Homo sapien
tggagtggagtacagggcgatgttt

SEQ ID NO: 5122813 - DNA, 25 bp, Homo sapien
ccagcgatggctttgttgagtgttt

SEQ ID NO: 5122814 - DNA, 25 bp, Homo sapien
ccacagagcgggaacctggttgttg

SEQ ID NO: 5122815 - DNA, 25 bp, Homo sapien
tcaggataaggtctttgacccatga

SEQ ID NO: 5122816 - DNA, 25 bp, Homo sapien
gacatcaccacaaatccagcgatgg

SEQ ID NO: 5122817 - DNA, 25 bp, Homo sapien
cagagatccagtaggacttaggctg

SEQ ID NO: 5122818 - DNA, 25 bp, Homo sapien
gtaggacttaggctgtcctcttttg

SEQ ID NO: 5122819 - DNA, 25 bp, Homo sapien
gagatccagtaggacttaggctgtc

SEQ ID NO: 5122820 - DNA, 25 bp, Homo sapien
tccagtaggacttaggctgtcctct

SEQ ID NO: 5122821 - DNA, 25 bp, Homo sapien
atgcccttgagcgtgggtcatatgg

SEQ ID NO: 5122822 - DNA, 25 bp, Homo sapien
gcaggtggacagcagttgatgccct

SEQ ID NO: 5122823 - DNA, 25 bp, Homo sapien
cagttgatgcccttgagcgtgggtc

SEQ ID NO: 5122824 - DNA, 25 bp, Homo sapien
gtggacagcagttgatgcccttgag

SEQ ID NO: 5122825 - DNA, 25 bp, Homo sapien
ttgtattttcgagcatgattttgaa

SEQ ID NO: 5122826 - DNA, 25 bp, Homo sapien
ataggcaaattgtattttcgagcat

SEQ ID NO: 5122827 - DNA, 25 bp, Homo sapien
gcaaattgtattttcgagcatgatt

SEQ ID NO: 5122828 - DNA, 25 bp, Homo sapien
attgtattttcgagcatgattttga

SEQ ID NO: 5122829 - DNA, 25 bp, Homo sapien
tgtccaaattgcactgtcttggcag

SEQ ID NO: 5122830 - DNA, 25 bp, Homo sapien
catgtccatgggcagttcttgtcca

SEQ ID NO: 5122831 - DNA, 25 bp, Homo sapien
ggaattacgctgtatttgaaactca

SEQ ID NO: 5122832 - DNA, 25 bp, Homo sapien
cagcttgatcccgataggtgggaat

SEQ ID NO: 5122833 - DNA, 25 bp, Homo sapien
tatcatcccatcgagaagcatccat

SEQ ID NO: 5122834 - DNA, 25 bp, Homo sapien
ctgtggttgagagtgttcctgcccg

SEQ ID NO: 5122835 - DNA, 25 bp, Homo sapien
ccacaggcagcactggattcatctg

SEQ ID NO: 5122836 - DNA, 25 bp, Homo sapien
tctgtccgggcaatgcatcttctat

SEQ ID NO: 5122837 - DNA, 25 bp, Homo sapien
cggttaccacaaaattggttgaatg

SEQ ID NO: 5122838 - DNA, 25 bp, Homo sapien
gttaccacaaaattggttgaatgtc

SEQ ID NO: 5122839 - DNA, 25 bp, Homo sapien
tggcaatccagtagtctttggaccg

SEQ ID NO: 5122840 - DNA, 25 bp, Homo sapien
tgatcccttggcaatccagtagtct

SEQ ID NO: 5122841 - DNA, 25 bp, Homo sapien
caaagctgatcccttggcaatccag

SEQ ID NO: 5122842 - DNA, 25 bp, Homo sapien
cagagcaaagctgatcccttggcaa

SEQ ID NO: 5122843 - DNA, 25 bp, Homo sapien
agtcaaatcagaattaacaccgttt

SEQ ID NO: 5122844 - DNA, 25 bp, Homo sapien
gaattaacaccgttttgctcacata

SEQ ID NO: 5122845 - DNA, 25 bp, Homo sapien
tttgctcccattaggaaagatctct

SEQ ID NO: 5122846 - DNA, 25 bp, Homo sapien
aagtcacaatacgtttaagtcaaat

SEQ ID NO: 5122847 - DNA, 25 bp, Homo sapien
tttgctaatcaggataatgttgctc

SEQ ID NO: 5122848 - DNA, 25 bp, Homo sapien
ttctcttttgctaatcaggataatg

SEQ ID NO: 5122849 - DNA, 25 bp, Homo sapien
gctaatcaggataatgttgctctca

SEQ ID NO: 5122850 - DNA, 25 bp, Homo sapien
aggataatgttgctctcaaacactc

SEQ ID NO: 5122851 - DNA, 25 bp, Homo sapien
tcctgatgccaacctgatcctgacc

SEQ ID NO: 5122852 - DNA, 25 bp, Homo sapien
accacgtggagcctcctgatgccaa

SEQ ID NO: 5122853 - DNA, 25 bp, Homo sapien
aacataaccagaggagatgactcag

SEQ ID NO: 5122854 - DNA, 25 bp, Homo sapien
ctcagacatctcagggaccacgtgg

SEQ ID NO: 5122855 - DNA, 25 bp, Homo sapien
ggtcatgctggcattcctcccgtaa

SEQ ID NO: 5122856 - DNA, 25 bp, Homo sapien
tggttgctgctacactaagagagcc

SEQ ID NO: 5122857 - DNA, 25 bp, Homo sapien
ggtggctactcctgtccttgctgca

SEQ ID NO: 5122858 - DNA, 25 bp, Homo sapien
cgtaaccccatggtcattctggcaa

SEQ ID NO: 5122859 - DNA, 25 bp, Homo sapien
ggagctgtcactctgcacaatggag

SEQ ID NO: 5122860 - DNA, 25 bp, Homo sapien
cctacattgggcatatgggtcatct

SEQ ID NO: 5122861 - DNA, 25 bp, Homo sapien
taaaggtctcatcactgggcctttg

SEQ ID NO: 5122862 - DNA, 25 bp, Homo sapien
gcacctccaggtacaagctgcaaca

SEQ ID NO: 5122863 - DNA, 25 bp, Homo sapien
tggtcttgccattggcccaggaggc

SEQ ID NO: 5122864 - DNA, 25 bp, Homo sapien
ttccttctggtcttgccattggccc

SEQ ID NO: 5122865 - DNA, 25 bp, Homo sapien
cccattgggagatctattcttcttt

SEQ ID NO: 5122866 - DNA, 25 bp, Homo sapien
tcccattgggagatctattcttctt

SEQ ID NO: 5122867 - DNA, 25 bp, Homo sapien
aaagcagacatgataactgttacac

SEQ ID NO: 5122868 - DNA, 25 bp, Homo sapien
gacatgataactgttacactatgga

SEQ ID NO: 5122869 - DNA, 25 bp, Homo sapien
tcagtgtgtaaagcagacatgataa

SEQ ID NO: 5122870 - DNA, 25 bp, Homo sapien
tgataactgttacactatggaacca

SEQ ID NO: 5122871 - DNA, 25 bp, Homo sapien
gaggagagtgtccagctgtgccaag

SEQ ID NO: 5122872 - DNA, 25 bp, Homo sapien
ggagagtgtccagctgtgccaagtt

SEQ ID NO: 5122873 - DNA, 25 bp, Homo sapien
gggaggagagtgtccagctgtgcca

SEQ ID NO: 5122874 - DNA, 25 bp, Homo sapien
gagagtgtccagctgtgccaagttc

SEQ ID NO: 5122875 - DNA, 25 bp, Homo sapien
aacccccaaccctgactctgctgtt

SEQ ID NO: 5122876 - DNA, 25 bp, Homo sapien
gttgctgtgacatttcagaaagcag

SEQ ID NO: 5122877 - DNA, 25 bp, Homo sapien
cccaaccctgactctgctgttgctg

SEQ ID NO: 5122878 - DNA, 25 bp, Homo sapien
catttcagaaagcaggcgccattgc

SEQ ID NO: 5122879 - DNA, 25 bp, Homo sapien
gttgttgacacaacccaggcccaga

SEQ ID NO: 5122880 - DNA, 25 bp, Homo sapien
gcttctgctcttgcgggtgctttgg

SEQ ID NO: 5122881 - DNA, 25 bp, Homo sapien
tatcgctgagcagaatacaggcagg

SEQ ID NO: 5122882 - DNA, 25 bp, Homo sapien
aagaggctgccgatggttgttgaca

SEQ ID NO: 5122883 - DNA, 25 bp, Homo sapien
catcaagattcagcccacagactgg

SEQ ID NO: 5122884 - DNA, 25 bp, Homo sapien
tgagcaacgttgacgacctcatcaa

SEQ ID NO: 5122885 - DNA, 25 bp, Homo sapien
tccttgaaggcttcgagggcagaag

SEQ ID NO: 5122886 - DNA, 25 bp, Homo sapien
tgaggcattgacttcactcccggtg

SEQ ID NO: 5122887 - DNA, 25 bp, Homo sapien
tatgtctgacccacatgctgtaagg

SEQ ID NO: 5122888 - DNA, 25 bp, Homo sapien
aattgggaaggccaatcagcggcac

SEQ ID NO: 5122889 - DNA, 25 bp, Homo sapien
cagcccctataggattctgcaggac

SEQ ID NO: 5122890 - DNA, 25 bp, Homo sapien
taagggcattgtggttgggttcctc

SEQ ID NO: 5122891 - DNA, 25 bp, Homo sapien
aatagagccgatcctggagctccgg

SEQ ID NO: 5122892 - DNA, 25 bp, Homo sapien
cctggccattcgcaattttattcct

SEQ ID NO: 5122893 - DNA, 25 bp, Homo sapien
agacgcacggtgttcgcctctgtaa

SEQ ID NO: 5122894 - DNA, 25 bp, Homo sapien
gcaaagcagaggacggccaaataga

SEQ ID NO: 5122895 - DNA, 25 bp, Homo sapien
ctctcttctgagtgcggcataggtt

SEQ ID NO: 5122896 - DNA, 25 bp, Homo sapien
tgaatttcgcgcatttgttccggtg

SEQ ID NO: 5122897 - DNA, 25 bp, Homo sapien
ttttctgtggttctcgagtccctct

SEQ ID NO: 5122898 - DNA, 25 bp, Homo sapien
tgtggttctcgagtccctctcttct

SEQ ID NO: 5122899 - DNA, 25 bp, Homo sapien
cgcggcgctccttgctcgctctcct

SEQ ID NO: 5122900 - DNA, 25 bp, Homo sapien
agcccaagggcgtccgagagagcct

SEQ ID NO: 5122901 - DNA, 25 bp, Homo sapien
aggctccaagcgactcagtgccctg

SEQ ID NO: 5122902 - DNA, 25 bp, Homo sapien
tttgccctccgccagcccaagggcg

SEQ ID NO: 5122903 - DNA, 25 bp, Homo sapien
tcgggactccgctgccgcctaggcg

SEQ ID NO: 5122904 - DNA, 25 bp, Homo sapien
agaaacgcggttcgggactccgctg

SEQ ID NO: 5122905 - DNA, 25 bp, Homo sapien
aacgcggttcgggactccgctgccg

SEQ ID NO: 5122906 - DNA, 25 bp, Homo sapien
cggtcacacgaggtgggcggcggcc

SEQ ID NO: 5122907 - DNA, 25 bp, Homo sapien
gacgtaaacgcaggaaccaatgcga

SEQ ID NO: 5122908 - DNA, 25 bp, Homo sapien
gttgaatttaggacagcgctggaac

SEQ ID NO: 5122909 - DNA, 25 bp, Homo sapien
ggaaccaatgcgattttaggttgaa

SEQ ID NO: 5122910 - DNA, 25 bp, Homo sapien
aatcggcagcataagcacagacgta

SEQ ID NO: 5122911 - DNA, 25 bp, Homo sapien
tccgaagttaatggcgcagacgtct

SEQ ID NO: 5122912 - DNA, 25 bp, Homo sapien
ttaaagaccactgcgacaaatgctc

SEQ ID NO: 5122913 - DNA, 25 bp, Homo sapien
tcaaaatggacagcgacttaaagca

SEQ ID NO: 5122914 - DNA, 25 bp, Homo sapien
taaaaggtggtggtaaagtgcgctc

SEQ ID NO: 5122915 - DNA, 25 bp, Homo sapien
ggttggcccggagactaacgattgc

SEQ ID NO: 5122916 - DNA, 25 bp, Homo sapien
agcgctggtgcctgaaaacgccaaa

SEQ ID NO: 5122917 - DNA, 25 bp, Homo sapien
ccgaaagagaaagtttttgccagca

SEQ ID NO: 5122918 - DNA, 25 bp, Homo sapien
aaaagcatcgtcctgggttggcccg

SEQ ID NO: 5122919 - DNA, 25 bp, Homo sapien
tcagggcaacttacgttcttgatgc

SEQ ID NO: 5122920 - DNA, 25 bp, Homo sapien
tagctcagggcaacttacgttcttg

SEQ ID NO: 5122921 - DNA, 25 bp, Homo sapien
cgatcttagctcagggcaacttacg

SEQ ID NO: 5122922 - DNA, 25 bp, Homo sapien
gggcaacttacgttcttgatgcttt

SEQ ID NO: 5122923 - DNA, 25 bp, Homo sapien
cttgaggacggacacagcctgctgg

SEQ ID NO: 5122924 - DNA, 25 bp, Homo sapien
acacagcctgctggccgagcaccat

SEQ ID NO: 5122925 - DNA, 25 bp, Homo sapien
gacacagcctgctggccgagcacca

SEQ ID NO: 5122926 - DNA, 25 bp, Homo sapien
aggacggacacagcctgctggccga

SEQ ID NO: 5122927 - DNA, 25 bp, Homo sapien
agatgccaggacagtattccgatag

SEQ ID NO: 5122928 - DNA, 25 bp, Homo sapien
tggaggtcacggcagtcagccagcc

SEQ ID NO: 5122929 - DNA, 25 bp, Homo sapien
ggacagtattccgatagctgatggg

SEQ ID NO: 5122930 - DNA, 25 bp, Homo sapien
cttcctttacccaggtcataaaatg

SEQ ID NO: 5122931 - DNA, 25 bp, Homo sapien
acagccatgaagcaaggaagcccct

SEQ ID NO: 5122932 - DNA, 25 bp, Homo sapien
agcaaggatggagaggataagcgcc

SEQ ID NO: 5122933 - DNA, 25 bp, Homo sapien
tgaagcaaggaagcccctgagcctt

SEQ ID NO: 5122934 - DNA, 25 bp, Homo sapien
tgtcagcagcagaggatttggcggc

SEQ ID NO: 5122935 - DNA, 25 bp, Homo sapien
agggaaagtagcagttagatcttgg

SEQ ID NO: 5122936 - DNA, 25 bp, Homo sapien
ggaagtctgactcatcaagagcccc

SEQ ID NO: 5122937 - DNA, 25 bp, Homo sapien
gccgtccaagccaggaatttaggga

SEQ ID NO: 5122938 - DNA, 25 bp, Homo sapien
ccagggaaggccgtccaagccagga

SEQ ID NO: 5122939 - DNA, 25 bp, Homo sapien
tctccccagtagaatagtgtacttg

SEQ ID NO: 5122940 - DNA, 25 bp, Homo sapien
tgaggctaagtttgcaaggctggct

SEQ ID NO: 5122941 - DNA, 25 bp, Homo sapien
tcctttcctactaccagcagctgat

SEQ ID NO: 5122942 - DNA, 25 bp, Homo sapien
gctaagataatactgccccacggga

SEQ ID NO: 5122943 - DNA, 25 bp, Homo sapien
ctgattctctccttctcttaattct

SEQ ID NO: 5122944 - DNA, 25 bp, Homo sapien
ttctcttaattctttcccttgagaa

SEQ ID NO: 5122945 - DNA, 25 bp, Homo sapien
ttctctccttctcttaattctttcc

SEQ ID NO: 5122946 - DNA, 25 bp, Homo sapien
tcttaattctttcccttgagaaata

SEQ ID NO: 5122947 - DNA, 25 bp, Homo sapien
caattgtaccaatttggacccatgg

SEQ ID NO: 5122948 - DNA, 25 bp, Homo sapien
ctttgacctgggtgtaggaatattc

SEQ ID NO: 5122949 - DNA, 25 bp, Homo sapien
ggtgtaggaatattcaattgtacca

SEQ ID NO: 5122950 - DNA, 25 bp, Homo sapien
taccaatttggacccatggtgaact

SEQ ID NO: 5122951 - DNA, 25 bp, Homo sapien
gttccgagcccgagatcctggtgct

SEQ ID NO: 5122952 - DNA, 25 bp, Homo sapien
tccgagcccgagatcctggtgctcc

SEQ ID NO: 5122953 - DNA, 25 bp, Homo sapien
ttccgagcccgagatcctggtgctc

SEQ ID NO: 5122954 - DNA, 25 bp, Homo sapien
cgagcccgagatcctggtgctccca

SEQ ID NO: 5122955 - DNA, 25 bp, Homo sapien
ttgcggcgcgcccgcccggtgcacc

SEQ ID NO: 5122956 - DNA, 25 bp, Homo sapien
gcgcccgcccggtgcaccggatccg

SEQ ID NO: 5122957 - DNA, 25 bp, Homo sapien
ccggtgcaccggatccgaccacacc

SEQ ID NO: 5122958 - DNA, 25 bp, Homo sapien
ctgtcgcggttgcggcgcgcccgcc

SEQ ID NO: 5122959 - DNA, 25 bp, Homo sapien
aaggcgtgccgagcagccccaaggc

SEQ ID NO: 5122960 - DNA, 25 bp, Homo sapien
gacgcctctcgacgtggcactcgcg

SEQ ID NO: 5122961 - DNA, 25 bp, Homo sapien
ccctgcgtccggtccgagaagggcg

SEQ ID NO: 5122962 - DNA, 25 bp, Homo sapien
aggccgaggatctgggcgcgtcccg

SEQ ID NO: 5122963 - DNA, 25 bp, Homo sapien
ctagtgggcaaaccaaggcgcttga

SEQ ID NO: 5122964 - DNA, 25 bp, Homo sapien
tagtgggcaaaccaaggcgcttgac

SEQ ID NO: 5122965 - DNA, 25 bp, Homo sapien
cagggtgttcttctcctgcgtctcc

SEQ ID NO: 5122966 - DNA, 25 bp, Homo sapien
tcttctcctgcgtctccgttttctt

SEQ ID NO: 5122967 - DNA, 25 bp, Homo sapien
gtgttcttctcctgcgtctccgttt

SEQ ID NO: 5122968 - DNA, 25 bp, Homo sapien
ttggtcggcagggtgttcttctcct

SEQ ID NO: 5122969 - DNA, 25 bp, Homo sapien
gggagaaacaaggcgctttgtgaaa

SEQ ID NO: 5122970 - DNA, 25 bp, Homo sapien
ggagaaacaaggcgctttgtgaaac

SEQ ID NO: 5122971 - DNA, 25 bp, Homo sapien
ttcccggtgtgggcgaggcacccac

SEQ ID NO: 5122972 - DNA, 25 bp, Homo sapien
gtgtgggcgaggcacccacgaggtg

SEQ ID NO: 5122973 - DNA, 25 bp, Homo sapien
aggtgcttcccggtgtgggcgaggc

SEQ ID NO: 5122974 - DNA, 25 bp, Homo sapien
tgtgggcgaggcacccacgaggtgt

SEQ ID NO: 5122975 - DNA, 25 bp, Homo sapien
tcactccgcttctcctgctcaatgg

SEQ ID NO: 5122976 - DNA, 25 bp, Homo sapien
ttcactccgcttctcctgctcaatg

SEQ ID NO: 5122977 - DNA, 25 bp, Homo sapien
ttaggaaatttcactccgcttctcc

SEQ ID NO: 5122978 - DNA, 25 bp, Homo sapien
aatttcactccgcttctcctgctca

SEQ ID NO: 5122979 - DNA, 25 bp, Homo sapien
tgtggctcgtgtccatcttgcaggt

SEQ ID NO: 5122980 - DNA, 25 bp, Homo sapien
cgtgtccatcttgcaggtggctctt

SEQ ID NO: 5122981 - DNA, 25 bp, Homo sapien
agcttgtggctcgtgtccatcttgc

SEQ ID NO: 5122982 - DNA, 25 bp, Homo sapien
gctcgtgtccatcttgcaggtggct

SEQ ID NO: 5122983 - DNA, 25 bp, Homo sapien
cggggcaaaccggagaatttggcag

SEQ ID NO: 5122984 - DNA, 25 bp, Homo sapien
ggcaaaccggagaatttggcagtcc

SEQ ID NO: 5122985 - DNA, 25 bp, Homo sapien
agaatttggcagtccgattgggggg

SEQ ID NO: 5122986 - DNA, 25 bp, Homo sapien
accggagaatttggcagtccgattg

SEQ ID NO: 5122987 - DNA, 25 bp, Homo sapien
agtggcactgcccacgcatactcaa

SEQ ID NO: 5122988 - DNA, 25 bp, Homo sapien
actgcccacgcatactcaactaaaa

SEQ ID NO: 5122989 - DNA, 25 bp, Homo sapien
gctgcagtggcactgcccacgcata

SEQ ID NO: 5122990 - DNA, 25 bp, Homo sapien
ccacgcatactcaactaaaagactc

SEQ ID NO: 5122991 - DNA, 25 bp, Homo sapien
ggtggtagcagatcagtctagcact

SEQ ID NO: 5122992 - DNA, 25 bp, Homo sapien
tagttctgacgttcccgttgctgta

SEQ ID NO: 5122993 - DNA, 25 bp, Homo sapien
tccggagactttgtgacctcaccca

SEQ ID NO: 5122994 - DNA, 25 bp, Homo sapien
gctgtatccctagatcccgcctttg

SEQ ID NO: 5122995 - DNA, 25 bp, Homo sapien
caccagggctctgggcccccccgct

SEQ ID NO: 5122996 - DNA, 25 bp, Homo sapien
ctatcccatggccaccagggctctg

SEQ ID NO: 5122997 - DNA, 25 bp, Homo sapien
ccagggctctgggcccccccgctgc

SEQ ID NO: 5122998 - DNA, 25 bp, Homo sapien
ccatggccaccagggctctgggccc

SEQ ID NO: 5122999 - DNA, 25 bp, Homo sapien
cgaaacctccgtggaagccaccgcg

SEQ ID NO: 5123000 - DNA, 25 bp, Homo sapien
tgccgaaacctccgtggaagccacc

SEQ ID NO: 5123001 - DNA, 25 bp, Homo sapien
ctgccgaaacctccgtggaagccac

SEQ ID NO: 5123002 - DNA, 25 bp, Homo sapien
gcacggccccgtccactcccgcgac

SEQ ID NO: 5123003 - DNA, 25 bp, Homo sapien
ggcacggccccgtccactcccgcga

SEQ ID NO: 5123004 - DNA, 25 bp, Homo sapien
tccttatcctcggccttgcctccgc

SEQ ID NO: 5123005 - DNA, 25 bp, Homo sapien
gccttgcctccgcgagctccgcggc

SEQ ID NO: 5123006 - DNA, 25 bp, Homo sapien
ctcggccttgcctccgcgagctccg

SEQ ID NO: 5123007 - DNA, 25 bp, Homo sapien
tcggccttgcctccgcgagctccgc

SEQ ID NO: 5123008 - DNA, 25 bp, Homo sapien
gtccttgaccaagcggcccagcttg

SEQ ID NO: 5123009 - DNA, 25 bp, Homo sapien
gaccaagcggcccagcttggtgaca

SEQ ID NO: 5123010 - DNA, 25 bp, Homo sapien
ttgaccaagcggcccagcttggtga

SEQ ID NO: 5123011 - DNA, 25 bp, Homo sapien
ccttgaccaagcggcccagcttggt

SEQ ID NO: 5123012 - DNA, 25 bp, Homo sapien
gagtcccccaggaagaaatcaatga

SEQ ID NO: 5123013 - DNA, 25 bp, Homo sapien
gagagtcccccaggaagaaatcaat

SEQ ID NO: 5123014 - DNA, 25 bp, Homo sapien
cttgagagagtcccccaggaagaaa

SEQ ID NO: 5123015 - DNA, 25 bp, Homo sapien
gagagagtcccccaggaagaaatca

SEQ ID NO: 5123016 - DNA, 25 bp, Homo sapien
atctgaagcctgggtccgctgcacc

SEQ ID NO: 5123017 - DNA, 25 bp, Homo sapien
ttgggcacaggtgcggagacgatgc

SEQ ID NO: 5123018 - DNA, 25 bp, Homo sapien
tgaagcctgggtccgctgcaccgag

SEQ ID NO: 5123019 - DNA, 25 bp, Homo sapien
gatggccccacggatggctgtggcc

SEQ ID NO: 5123020 - DNA, 25 bp, Homo sapien
tctgtgtagctaaaggaacagtccc

SEQ ID NO: 5123021 - DNA, 25 bp, Homo sapien
gaacatggtcatgtatctgtgtagc

SEQ ID NO: 5123022 - DNA, 25 bp, Homo sapien
gggtaataactaaataactgcagag

SEQ ID NO: 5123023 - DNA, 25 bp, Homo sapien
tccatttgtctagcagagacttcac

SEQ ID NO: 5123024 - DNA, 25 bp, Homo sapien
ctgttgtatctcagtggaggcagaa

SEQ ID NO: 5123025 - DNA, 25 bp, Homo sapien
tgccttttattgaccttgtttcacc

SEQ ID NO: 5123026 - DNA, 25 bp, Homo sapien
cttttattgaccttgtttcacccat

SEQ ID NO: 5123027 - DNA, 25 bp, Homo sapien
gttgtatctcagtggaggcagaatg

SEQ ID NO: 5123028 - DNA, 25 bp, Homo sapien
cttgctcgcctcgcctctgagccat

SEQ ID NO: 5123029 - DNA, 25 bp, Homo sapien
cctcatttgccaaaggcccactgca

SEQ ID NO: 5123030 - DNA, 25 bp, Homo sapien
tcctcatttgccaaaggcccactgc

SEQ ID NO: 5123031 - DNA, 25 bp, Homo sapien
ctcatttgccaaaggcccactgcag

SEQ ID NO: 5123032 - DNA, 25 bp, Homo sapien
ctgctttgatgctctttggtgagtg

SEQ ID NO: 5123033 - DNA, 25 bp, Homo sapien
ggctcgtatctatgtttcactgttc

SEQ ID NO: 5123034 - DNA, 25 bp, Homo sapien
tcactgacagtaggccatccacggc

SEQ ID NO: 5123035 - DNA, 25 bp, Homo sapien
cctatttccaaagttgcccctggag

SEQ ID NO: 5123036 - DNA, 25 bp, Homo sapien
tttgtcctgggctgatccctgagtt

SEQ ID NO: 5123037 - DNA, 25 bp, Homo sapien
gtcctgggctgatccctgagttcat

SEQ ID NO: 5123038 - DNA, 25 bp, Homo sapien
tgtcctgggctgatccctgagttca

SEQ ID NO: 5123039 - DNA, 25 bp, Homo sapien
tgtttgtcctgggctgatccctgag

SEQ ID NO: 5123040 - DNA, 25 bp, Homo sapien
aacatggcgggaacagacttcaggc

SEQ ID NO: 5123041 - DNA, 25 bp, Homo sapien
ccagggaccctgaagtgtaagcttc

SEQ ID NO: 5123042 - DNA, 25 bp, Homo sapien
tggtacaggcaactcttaagaaaga

SEQ ID NO: 5123043 - DNA, 25 bp, Homo sapien
aaattagatatagggcttggaagcc

SEQ ID NO: 5123044 - DNA, 25 bp, Homo sapien
tgctgaaggccccactgttcgctgc

SEQ ID NO: 5123045 - DNA, 25 bp, Homo sapien
atgatgctgaaggccccactgttcg

SEQ ID NO: 5123046 - DNA, 25 bp, Homo sapien
atgctgaaggccccactgttcgctg

SEQ ID NO: 5123047 - DNA, 25 bp, Homo sapien
tgaaggccccactgttcgctgccag

SEQ ID NO: 5123048 - DNA, 25 bp, Homo sapien
ttttggtgctgttggttaccctctc

SEQ ID NO: 5123049 - DNA, 25 bp, Homo sapien
ttggtgctgttggttaccctctcat

SEQ ID NO: 5123050 - DNA, 25 bp, Homo sapien
ctcattttctgggataccactatca

SEQ ID NO: 5123051 - DNA, 25 bp, Homo sapien
ttttctgggataccactatcatcat

SEQ ID NO: 5123052 - DNA, 25 bp, Homo sapien
taaacccctcatcctcaaactctac

SEQ ID NO: 5123053 - DNA, 25 bp, Homo sapien
tcaaactctaccagctttgcaagct

SEQ ID NO: 5123054 - DNA, 25 bp, Homo sapien
tcatgccctcagctccttaaacccc

SEQ ID NO: 5123055 - DNA, 25 bp, Homo sapien
tgtgtatctgcttggggtgtagaat

SEQ ID NO: 5123056 - DNA, 25 bp, Homo sapien
aggtgggtgcttctcggcggcgagc

SEQ ID NO: 5123057 - DNA, 25 bp, Homo sapien
tgtgtgtattttaagccaacagccc

SEQ ID NO: 5123058 - DNA, 25 bp, Homo sapien
aggtgcatggcttccgggcgggcct

SEQ ID NO: 5123059 - DNA, 25 bp, Homo sapien
cgagctgcgactcggagagactcct

SEQ ID NO: 5123060 - DNA, 25 bp, Homo sapien
ggaggcgggtccgacgccgcagctc

SEQ ID NO: 5123061 - DNA, 25 bp, Homo sapien
gcggcgctccgcaaatcccgctcct

SEQ ID NO: 5123062 - DNA, 25 bp, Homo sapien
gccgtgactccggtcactctcgggc

SEQ ID NO: 5123063 - DNA, 25 bp, Homo sapien
ggccggccgactcccactcgactcc

SEQ ID NO: 5123064 - DNA, 25 bp, Homo sapien
gcaggacaaacttttcgccaagact

SEQ ID NO: 5123065 - DNA, 25 bp, Homo sapien
tatttcttaccagctcaaagcctat

SEQ ID NO: 5123066 - DNA, 25 bp, Homo sapien
aatcttgtattaaccttagcaggac

SEQ ID NO: 5123067 - DNA, 25 bp, Homo sapien
tttatccaaaaacctgtagtagtga

SEQ ID NO: 5123068 - DNA, 25 bp, Homo sapien
caggaaaaatgtagggtactgccat

SEQ ID NO: 5123069 - DNA, 25 bp, Homo sapien
tggaaaagtattaacgggcaagcag

SEQ ID NO: 5123070 - DNA, 25 bp, Homo sapien
catctccactaagggtctgtagggt

SEQ ID NO: 5123071 - DNA, 25 bp, Homo sapien
cctgaggaacaattatttccattcc

SEQ ID NO: 5123072 - DNA, 25 bp, Homo sapien
ggcgacacatgtacctagatccagg

SEQ ID NO: 5123073 - DNA, 25 bp, Homo sapien
gcacatcactgcaaccggcttgaaa

SEQ ID NO: 5123074 - DNA, 25 bp, Homo sapien
tgcactgtggaagctacgtaaaaaa

SEQ ID NO: 5123075 - DNA, 25 bp, Homo sapien
cattccttggaacctagcagactgc

SEQ ID NO: 5123076 - DNA, 25 bp, Homo sapien
tgtaatttacgatttattcaaactg

SEQ ID NO: 5123077 - DNA, 25 bp, Homo sapien
agaacatgtagttatgttttactac

SEQ ID NO: 5123078 - DNA, 25 bp, Homo sapien
tctctattgaaagtcaaggtaaatg

SEQ ID NO: 5123079 - DNA, 25 bp, Homo sapien
tatatattctctattgaaagtcaag

SEQ ID NO: 5123080 - DNA, 25 bp, Homo sapien
ccatagaagagatgaggctaggctg

SEQ ID NO: 5123081 - DNA, 25 bp, Homo sapien
cccccgtggccactggcaaagtttg

SEQ ID NO: 5123082 - DNA, 25 bp, Homo sapien
catctatacttctttgccagtaccc

SEQ ID NO: 5123083 - DNA, 25 bp, Homo sapien
taagttacagggatccatctatact

SEQ ID NO: 5123084 - DNA, 25 bp, Homo sapien
aaagacctttctatagaagcagggc

SEQ ID NO: 5123085 - DNA, 25 bp, Homo sapien
tacattcaaactaggaagattcacc

SEQ ID NO: 5123086 - DNA, 25 bp, Homo sapien
tcaacacagcctacaatgcgagggt

SEQ ID NO: 5123087 - DNA, 25 bp, Homo sapien
cagggcttccgaaatgtgtttctca

SEQ ID NO: 5123088 - DNA, 25 bp, Homo sapien
gatgacctagtttctaggcccaagg

SEQ ID NO: 5123089 - DNA, 25 bp, Homo sapien
taattgccccagtcatacaagggtt

SEQ ID NO: 5123090 - DNA, 25 bp, Homo sapien
ccagtgtttttcaataggaggtgac

SEQ ID NO: 5123091 - DNA, 25 bp, Homo sapien
cctgctaacatacgggagtcttctg

SEQ ID NO: 5123092 - DNA, 25 bp, Homo sapien
aaaggtctacaggtctccctgctac

SEQ ID NO: 5123093 - DNA, 25 bp, Homo sapien
caatctctcacatactaccataaca

SEQ ID NO: 5123094 - DNA, 25 bp, Homo sapien
tatttcaagctcaagctcattccag

SEQ ID NO: 5123095 - DNA, 25 bp, Homo sapien
taacaatctgcttcagtgataccaa

SEQ ID NO: 5123096 - DNA, 25 bp, Homo sapien
gagcaatcactctacaacaatggac

SEQ ID NO: 5123097 - DNA, 25 bp, Homo sapien
tggctcaagccaatgaacacggcat

SEQ ID NO: 5123098 - DNA, 25 bp, Homo sapien
gacctttctgtagtgctattgacca

SEQ ID NO: 5123099 - DNA, 25 bp, Homo sapien
tgctagagatacctccagctgttgt

SEQ ID NO: 5123100 - DNA, 25 bp, Homo sapien
aagacacatcgggctttctaccact

SEQ ID NO: 5123101 - DNA, 25 bp, Homo sapien
gaagacacatcgggctttctaccac

SEQ ID NO: 5123102 - DNA, 25 bp, Homo sapien
cagaagacacatcgggctttctacc

SEQ ID NO: 5123103 - DNA, 25 bp, Homo sapien
cacagaagacacatcgggctttcta

SEQ ID NO: 5123104 - DNA, 25 bp, Homo sapien
aaaattatgtaaggctgggggccag

SEQ ID NO: 5123105 - DNA, 25 bp, Homo sapien
taaaattatgtaaggctgggggcca

SEQ ID NO: 5123106 - DNA, 25 bp, Homo sapien
aattatataaggctgggagtagtgg

SEQ ID NO: 5123107 - DNA, 25 bp, Homo sapien
ataaaattatataaggctgggagta

SEQ ID NO: 5123108 - DNA, 25 bp, Homo sapien
tggtcctgcccaagtgatgtcgaag

SEQ ID NO: 5123109 - DNA, 25 bp, Homo sapien
tcatttcaccccatgagagtgtccc

SEQ ID NO: 5123110 - DNA, 25 bp, Homo sapien
gaagttcctgatctcgccttaagga

SEQ ID NO: 5123111 - DNA, 25 bp, Homo sapien
taaacgctccatatatgttgggtcc

SEQ ID NO: 5123112 - DNA, 25 bp, Homo sapien
cccaggaactcaaggcatcgttgaa

SEQ ID NO: 5123113 - DNA, 25 bp, Homo sapien
cactgaaagggcatctgtacagcaa

SEQ ID NO: 5123114 - DNA, 25 bp, Homo sapien
taggaattgccaggctgaaagagcc

SEQ ID NO: 5123115 - DNA, 25 bp, Homo sapien
tgtacagcacgacctcactgaaagg

SEQ ID NO: 5123116 - DNA, 25 bp, Homo sapien
ttctttatgtctgctccagtttctt

SEQ ID NO: 5123117 - DNA, 25 bp, Homo sapien
tgtctgctccagtttcttcacggat

SEQ ID NO: 5123118 - DNA, 25 bp, Homo sapien
gctccagtttcttcacggattttaa

SEQ ID NO: 5123119 - DNA, 25 bp, Homo sapien
tatgtctgctccagtttcttcacgg

SEQ ID NO: 5123120 - DNA, 25 bp, Homo sapien
aagactgtgtaccactgagcactga

SEQ ID NO: 5123121 - DNA, 25 bp, Homo sapien
tacaggcacaacttacaggcaatgc

SEQ ID NO: 5123122 - DNA, 25 bp, Homo sapien
tatatgcacagcaacagggacctct

SEQ ID NO: 5123123 - DNA, 25 bp, Homo sapien
ctgaaaacagggtctaagagctgtt

SEQ ID NO: 5123124 - DNA, 25 bp, Homo sapien
ctgaaacagaacagatacatggcat

SEQ ID NO: 5123125 - DNA, 25 bp, Homo sapien
aatatgcactgcattgggtggtcag

SEQ ID NO: 5123126 - DNA, 25 bp, Homo sapien
gttgcaccactttcataacaagatg

SEQ ID NO: 5123127 - DNA, 25 bp, Homo sapien
cttttaaacatgcatcacagctgac

SEQ ID NO: 5123128 - DNA, 25 bp, Homo sapien
gatgcacaaagatcgtaatcgtagc

SEQ ID NO: 5123129 - DNA, 25 bp, Homo sapien
cctcgtaagtgtatctgaaggaata

SEQ ID NO: 5123130 - DNA, 25 bp, Homo sapien
ccaccaaagctcatgctgtggcttc

SEQ ID NO: 5123131 - DNA, 25 bp, Homo sapien
ttttcccagtaggtaattgctatgg

SEQ ID NO: 5123132 - DNA, 25 bp, Homo sapien
tattttgcccaactgggttactgga

SEQ ID NO: 5123133 - DNA, 25 bp, Homo sapien
aaagcttccccaccatagtataaat

SEQ ID NO: 5123134 - DNA, 25 bp, Homo sapien
gggacaagtaaaagactgtggctgc

SEQ ID NO: 5123135 - DNA, 25 bp, Homo sapien
tgtctccgtatagcccatttttcca

SEQ ID NO: 5123136 - DNA, 25 bp, Homo sapien
catgttcttgaagagatgtctccgt

SEQ ID NO: 5123137 - DNA, 25 bp, Homo sapien
gaaaaccaggtaagatcagcgatat

SEQ ID NO: 5123138 - DNA, 25 bp, Homo sapien
ggaagcaagagatgtgatctgatga

SEQ ID NO: 5123139 - DNA, 25 bp, Homo sapien
taggaagcaagagatgtgatctgat

SEQ ID NO: 5123140 - DNA, 25 bp, Homo sapien
aaaaccaggtaagatcagcgatatg

SEQ ID NO: 5123141 - DNA, 25 bp, Homo sapien
gaacttctagggaccccagagcttg

SEQ ID NO: 5123142 - DNA, 25 bp, Homo sapien
aacttctagggaccccagagcttga

SEQ ID NO: 5123143 - DNA, 25 bp, Homo sapien
acttctagggaccccagagcttgac

SEQ ID NO: 5123144 - DNA, 25 bp, Homo sapien
ttattctgggtccatggcctttagc

SEQ ID NO: 5123145 - DNA, 25 bp, Homo sapien
attctgggtccatggcctttagcca

SEQ ID NO: 5123146 - DNA, 25 bp, Homo sapien
tattctgggtccatggcctttagcc

SEQ ID NO: 5123147 - DNA, 25 bp, Homo sapien
ttcttgaaggtggatgcatgctgac

SEQ ID NO: 5123148 - DNA, 25 bp, Homo sapien
aaatccaacaagctttcaaggtaag

SEQ ID NO: 5123149 - DNA, 25 bp, Homo sapien
tccaacaagctttcaaggtaagact

SEQ ID NO: 5123150 - DNA, 25 bp, Homo sapien
tttcttgaaggtggatgcatgctga

SEQ ID NO: 5123151 - DNA, 25 bp, Homo sapien
caccgaatcactgctgaatatacag

SEQ ID NO: 5123152 - DNA, 25 bp, Homo sapien
tccacatataaacaccgaatcactg

SEQ ID NO: 5123153 - DNA, 25 bp, Homo sapien
catataaacaccgaatcactgctga

SEQ ID NO: 5123154 - DNA, 25 bp, Homo sapien
taaacaccgaatcactgctgaatat

SEQ ID NO: 5123155 - DNA, 25 bp, Homo sapien
gaaaagtctccacaaggatatagat

SEQ ID NO: 5123156 - DNA, 25 bp, Homo sapien
tagattggccttcgggtaaaatcta

SEQ ID NO: 5123157 - DNA, 25 bp, Homo sapien
aacaacttgagctgtccaatgatag

SEQ ID NO: 5123158 - DNA, 25 bp, Homo sapien
caaaggcttcagtacttgaggggac

SEQ ID NO: 5123159 - DNA, 25 bp, Homo sapien
tgtgcagaagaactagacaggtcac

SEQ ID NO: 5123160 - DNA, 25 bp, Homo sapien
gaagtagatagacctgcctatgcct

SEQ ID NO: 5123161 - DNA, 25 bp, Homo sapien
gattcattgccagtacatgtgccga

SEQ ID NO: 5123162 - DNA, 25 bp, Homo sapien
aaggagccccaggaagtgcacagtt

SEQ ID NO: 5123163 - DNA, 25 bp, Homo sapien
ctctgtgttcaagtgtaagatgagc

SEQ ID NO: 5123164 - DNA, 25 bp, Homo sapien
ggtaacgctgcacatattggacaaa

SEQ ID NO: 5123165 - DNA, 25 bp, Homo sapien
ttaggatcgcctccaggtaacgctg

SEQ ID NO: 5123166 - DNA, 25 bp, Homo sapien
ctgcaaagtcatccgtgacatgatt

SEQ ID NO: 5123167 - DNA, 25 bp, Homo sapien
ttttgtatgaaaacgccatcctgga

SEQ ID NO: 5123168 - DNA, 25 bp, Homo sapien
gaaataaattgcatctcagcactga

SEQ ID NO: 5123169 - DNA, 25 bp, Homo sapien
gatgaaggacaagtcaactttcact

SEQ ID NO: 5123170 - DNA, 25 bp, Homo sapien
cagcactgagtcacttttaggaaaa

SEQ ID NO: 5123171 - DNA, 25 bp, Homo sapien
caagaggccttcaggtgtcacggta

SEQ ID NO: 5123172 - DNA, 25 bp, Homo sapien
cactgccagaaactgttgagagaca

SEQ ID NO: 5123173 - DNA, 25 bp, Homo sapien
aaaattaatcgctctggtaggccag

SEQ ID NO: 5123174 - DNA, 25 bp, Homo sapien
taaggaccggatgggtagctccaag

SEQ ID NO: 5123175 - DNA, 25 bp, Homo sapien
gtttgatctacgagcacgaggacct

SEQ ID NO: 5123176 - DNA, 25 bp, Homo sapien
ttgatctacgagcacgaggacctcc

SEQ ID NO: 5123177 - DNA, 25 bp, Homo sapien
tacgagcacgaggacctcctaatcc

SEQ ID NO: 5123178 - DNA, 25 bp, Homo sapien
gatctacgagcacgaggacctccta

SEQ ID NO: 5123179 - DNA, 25 bp, Homo sapien
ccagtagaactgctagtaaagtgca

SEQ ID NO: 5123180 - DNA, 25 bp, Homo sapien
gaaagtccaccagtagaactgctag

SEQ ID NO: 5123181 - DNA, 25 bp, Homo sapien
tccaccagtagaactgctagtaaag

SEQ ID NO: 5123182 - DNA, 25 bp, Homo sapien
gaagaagaaagtccaccagtagaac

SEQ ID NO: 5123183 - DNA, 25 bp, Homo sapien
tataggatccatggcttccctattg

SEQ ID NO: 5123184 - DNA, 25 bp, Homo sapien
ccatggcttccctattgcttggaga

SEQ ID NO: 5123185 - DNA, 25 bp, Homo sapien
cagctataggatccatggcttccct

SEQ ID NO: 5123186 - DNA, 25 bp, Homo sapien
ggcttccctattgcttggagaatat

SEQ ID NO: 5123187 - DNA, 25 bp, Homo sapien
tgcaggagatacgttccaaaacccc

SEQ ID NO: 5123188 - DNA, 25 bp, Homo sapien
tggaagccatgaggcgccttgcaca

SEQ ID NO: 5123189 - DNA, 25 bp, Homo sapien
ccttgggcttcaatagaggccacaa

SEQ ID NO: 5123190 - DNA, 25 bp, Homo sapien
tgcacaacatctgagataggcataa

SEQ ID NO: 5123191 - DNA, 25 bp, Homo sapien
tcttgcagattatcaggctacagtg

SEQ ID NO: 5123192 - DNA, 25 bp, Homo sapien
cctgccacgagggtttgtcatacat

SEQ ID NO: 5123193 - DNA, 25 bp, Homo sapien
tggcttccaggtaggtgcacacttc

SEQ ID NO: 5123194 - DNA, 25 bp, Homo sapien
tacatcacccaggacccaattaagc

SEQ ID NO: 5123195 - DNA, 25 bp, Homo sapien
cagttgttgccgtgctgcctgggca

SEQ ID NO: 5123196 - DNA, 25 bp, Homo sapien
aaactgggaattctgtagagtctgc

SEQ ID NO: 5123197 - DNA, 25 bp, Homo sapien
cactgcttgtgttagtacgccgggt

SEQ ID NO: 5123198 - DNA, 25 bp, Homo sapien
ttgtaactgagaagcggaagggcca

SEQ ID NO: 5123199 - DNA, 25 bp, Homo sapien
taaaagcccaattagtccaggttca

SEQ ID NO: 5123200 - DNA, 25 bp, Homo sapien
gaggctaagtctccactcatcattg

SEQ ID NO: 5123201 - DNA, 25 bp, Homo sapien
catgcagttgctaacagtttcagaa

SEQ ID NO: 5123202 - DNA, 25 bp, Homo sapien
gaaattcacaggagaaaactgccac

SEQ ID NO: 5123203 - DNA, 25 bp, Homo sapien
ggcacagttactgaccttgcagaga

SEQ ID NO: 5123204 - DNA, 25 bp, Homo sapien
gaatccacagacagcactcagaggt

SEQ ID NO: 5123205 - DNA, 25 bp, Homo sapien
ggaagatgtcttttccaaagggcac

SEQ ID NO: 5123206 - DNA, 25 bp, Homo sapien
tgaactctcagtagaaatgcacgct

SEQ ID NO: 5123207 - DNA, 25 bp, Homo sapien
gatgagctctcttcacgcactaaag

SEQ ID NO: 5123208 - DNA, 25 bp, Homo sapien
actaaagtggacagaaggagctctt

SEQ ID NO: 5123209 - DNA, 25 bp, Homo sapien
catggactggcgctccgtttcagac

SEQ ID NO: 5123210 - DNA, 25 bp, Homo sapien
tctgcacgctcgctttccatggact

SEQ ID NO: 5123211 - DNA, 25 bp, Homo sapien
ttttgcatgtcaaggtacaggaagc

SEQ ID NO: 5123212 - DNA, 25 bp, Homo sapien
tgaatgtggagtattaggagagcct

SEQ ID NO: 5123213 - DNA, 25 bp, Homo sapien
gaggacattgtctgcgaattgggat

SEQ ID NO: 5123214 - DNA, 25 bp, Homo sapien
tggcaaatacagcacagaggacatt

SEQ ID NO: 5123215 - DNA, 25 bp, Homo sapien
tgagctccacacaggcaagatgact

SEQ ID NO: 5123216 - DNA, 25 bp, Homo sapien
aaatttatcagaagctgtgcgcacc

SEQ ID NO: 5123217 - DNA, 25 bp, Homo sapien
caagatgactaacagggcgacagga

SEQ ID NO: 5123218 - DNA, 25 bp, Homo sapien
ggtcactaaaactcatgcacgctgc

SEQ ID NO: 5123219 - DNA, 25 bp, Homo sapien
caaacctaggttctacttctgtgga

SEQ ID NO: 5123220 - DNA, 25 bp, Homo sapien
gatttcacggtagccaaccacagaa

SEQ ID NO: 5123221 - DNA, 25 bp, Homo sapien
taatgcattcacacaaaaccaggat

SEQ ID NO: 5123222 - DNA, 25 bp, Homo sapien
gattgcagccatacaaggaagcaca

SEQ ID NO: 5123223 - DNA, 25 bp, Homo sapien
tacctgggacagtcagacttaaggg

SEQ ID NO: 5123224 - DNA, 25 bp, Homo sapien
ggccccacatgggttttcaaatcag

SEQ ID NO: 5123225 - DNA, 25 bp, Homo sapien
gcaaccgactaaaatgtgacgtgga

SEQ ID NO: 5123226 - DNA, 25 bp, Homo sapien
cgtggaggttcaggatcaacttctc

SEQ ID NO: 5123227 - DNA, 25 bp, Homo sapien
agtacaaattagtctcggagcctga

SEQ ID NO: 5123228 - DNA, 25 bp, Homo sapien
caaggctggccagaatagctttcat

SEQ ID NO: 5123229 - DNA, 25 bp, Homo sapien
cagtccctagcgacagtggctgagg

SEQ ID NO: 5123230 - DNA, 25 bp, Homo sapien
cacacatggtggctgctatccgata

SEQ ID NO: 5123231 - DNA, 25 bp, Homo sapien
gggcaggctcagagttaagcagctg

SEQ ID NO: 5123232 - DNA, 25 bp, Homo sapien
tccaacgtcacacggctagcctggg

SEQ ID NO: 5123233 - DNA, 25 bp, Homo sapien
tgggtcactagagcagagcctcctt

SEQ ID NO: 5123234 - DNA, 25 bp, Homo sapien
ctggagcttcccaggtttggacctg

SEQ ID NO: 5123235 - DNA, 25 bp, Homo sapien
ggcctgtagctccacaagctgtgct

SEQ ID NO: 5123236 - DNA, 25 bp, Homo sapien
aggcctgtagctccacaagctgtgc

SEQ ID NO: 5123237 - DNA, 25 bp, Homo sapien
tcccagtgtactgaatccttccctg

SEQ ID NO: 5123238 - DNA, 25 bp, Homo sapien
gacttcccagtgtactgaatccttc

SEQ ID NO: 5123239 - DNA, 25 bp, Homo sapien
tctgacttcccagtgtactgaatcc

SEQ ID NO: 5123240 - DNA, 25 bp, Homo sapien
ccagtgtactgaatccttccctggg

SEQ ID NO: 5123241 - DNA, 25 bp, Homo sapien
tgcaggttcccggagaagggcggat

SEQ ID NO: 5123242 - DNA, 25 bp, Homo sapien
aactgatctgtgcttcgcctgcaag

SEQ ID NO: 5123243 - DNA, 25 bp, Homo sapien
ttccaggctctacgctcatcctgtg

SEQ ID NO: 5123244 - DNA, 25 bp, Homo sapien
gcagagcagactgtgacatctccag

SEQ ID NO: 5123245 - DNA, 25 bp, Homo sapien
tgtgatagccccaacccatccggta

SEQ ID NO: 5123246 - DNA, 25 bp, Homo sapien
gaactgctgtgatagccccaaccca

SEQ ID NO: 5123247 - DNA, 25 bp, Homo sapien
tccggtactaccatctgtgcctctg

SEQ ID NO: 5123248 - DNA, 25 bp, Homo sapien
caacccatccggtactaccatctgt

SEQ ID NO: 5123249 - DNA, 25 bp, Homo sapien
gaaggctgcaaggatcagtgtgtcg

SEQ ID NO: 5123250 - DNA, 25 bp, Homo sapien
tgctcttgccacagcgaattggggg

SEQ ID NO: 5123251 - DNA, 25 bp, Homo sapien
tcttgccacagcgaattgggggccc

SEQ ID NO: 5123252 - DNA, 25 bp, Homo sapien
aggctgcaaggatcagtgtgtcggg

SEQ ID NO: 5123253 - DNA, 25 bp, Homo sapien
cttgcaaatgcttcagcactaagct

SEQ ID NO: 5123254 - DNA, 25 bp, Homo sapien
tccccactccccaaggcttgcaaat

SEQ ID NO: 5123255 - DNA, 25 bp, Homo sapien
caacaaagtttgacagggcgtggcc

SEQ ID NO: 5123256 - DNA, 25 bp, Homo sapien
tccggcagcgccgagcctagggctc

SEQ ID NO: 5123257 - DNA, 25 bp, Homo sapien
cgctagccgccgcaacaaagtttga

SEQ ID NO: 5123258 - DNA, 25 bp, Homo sapien
cttgcgggcccgctgcgctagccgc

SEQ ID NO: 5123259 - DNA, 25 bp, Homo sapien
cgctctcggagcccctagccgcccg

SEQ ID NO: 5123260 - DNA, 25 bp, Homo sapien
ctctcggagcccctagccgcccgcg

SEQ ID NO: 5123261 - DNA, 25 bp, Homo sapien
tctcggagcccctagccgcccgcgc

SEQ ID NO: 5123262 - DNA, 25 bp, Homo sapien
gagcccctagccgcccgcgccctgc

SEQ ID NO: 5123263 - DNA, 25 bp, Homo sapien
gaaggggatcagctcgtcgttcgcc

SEQ ID NO: 5123264 - DNA, 25 bp, Homo sapien
ggatcagctcgtcgttcgccccgag

SEQ ID NO: 5123265 - DNA, 25 bp, Homo sapien
ggaaggggatcagctcgtcgttcgc

SEQ ID NO: 5123266 - DNA, 25 bp, Homo sapien
agctcgtcgttcgccccgaggtcgt

SEQ ID NO: 5123267 - DNA, 25 bp, Homo sapien
gactcgttgaccagggacgacttga

SEQ ID NO: 5123268 - DNA, 25 bp, Homo sapien
ctctggttctccgactcgttgacca

SEQ ID NO: 5123269 - DNA, 25 bp, Homo sapien
gggacgacttgacctcgtctaggtc

SEQ ID NO: 5123270 - DNA, 25 bp, Homo sapien
gcgctatcgctgctcggctcctgct

SEQ ID NO: 5123271 - DNA, 25 bp, Homo sapien
cggaggagacacaaaggcaagagcg

SEQ ID NO: 5123272 - DNA, 25 bp, Homo sapien
caagagcgggtgagcggacgcaggg

SEQ ID NO: 5123273 - DNA, 25 bp, Homo sapien
gacacaaaggcaagagcgggtgagc

SEQ ID NO: 5123274 - DNA, 25 bp, Homo sapien
acaaaggcaagagcgggtgagcgga

SEQ ID NO: 5123275 - DNA, 25 bp, Homo sapien
atagtcccgcggcttctggaaagtg

SEQ ID NO: 5123276 - DNA, 25 bp, Homo sapien
tctggaaagtgtcccggacgggctg

SEQ ID NO: 5123277 - DNA, 25 bp, Homo sapien
aagtgtcccggacgggctgcgggcg

SEQ ID NO: 5123278 - DNA, 25 bp, Homo sapien
cttcggcgaaatagtcccgcggctt

SEQ ID NO: 5123279 - DNA, 25 bp, Homo sapien
tgcgaacaagaccaaggcgaggtga

SEQ ID NO: 5123280 - DNA, 25 bp, Homo sapien
tgccgccaataaaggcggagggcaa

SEQ ID NO: 5123281 - DNA, 25 bp, Homo sapien
caagggtgcgtccacccaagcaagg

SEQ ID NO: 5123282 - DNA, 25 bp, Homo sapien
ggagcgcagcgggaatcgagagtgg

SEQ ID NO: 5123283 - DNA, 25 bp, Homo sapien
tccgttggagaggtacgggctgctc

SEQ ID NO: 5123284 - DNA, 25 bp, Homo sapien
gaacgcgctgtcctgaggccttctc

SEQ ID NO: 5123285 - DNA, 25 bp, Homo sapien
gtcctttaaagaacgcgctgtcctg

SEQ ID NO: 5123286 - DNA, 25 bp, Homo sapien
aggtacgggctgctcaggtccggga

SEQ ID NO: 5123287 - DNA, 25 bp, Homo sapien
aagtttccttcggtgcaggcgaaga

SEQ ID NO: 5123288 - DNA, 25 bp, Homo sapien
ccaagtttccttcggtgcaggcgaa

SEQ ID NO: 5123289 - DNA, 25 bp, Homo sapien
atccaagtttccttcggtgcaggcg

SEQ ID NO: 5123290 - DNA, 25 bp, Homo sapien
tttccttcggtgcaggcgaagaatt

SEQ ID NO: 5123291 - DNA, 25 bp, Homo sapien
gctctaaatgccagcgggcagcaca

SEQ ID NO: 5123292 - DNA, 25 bp, Homo sapien
gggcagcacacaatacgcgcccatt

SEQ ID NO: 5123293 - DNA, 25 bp, Homo sapien
tcaccgctctaaatgccagcgggca

SEQ ID NO: 5123294 - DNA, 25 bp, Homo sapien
caggtttaaagtgtcgcagcgctcg

SEQ ID NO: 5123295 - DNA, 25 bp, Homo sapien
gaatctgggcgggaagcaaagaact

SEQ ID NO: 5123296 - DNA, 25 bp, Homo sapien
aagaactactacgattcacatcgcg

SEQ ID NO: 5123297 - DNA, 25 bp, Homo sapien
cgtcgacagcgaagtggcaggcaat

SEQ ID NO: 5123298 - DNA, 25 bp, Homo sapien
caggcaatgggaatctgggcgggaa

SEQ ID NO: 5123299 - DNA, 25 bp, Homo sapien
tctccaatgaaaccgagggttcctc

SEQ ID NO: 5123300 - DNA, 25 bp, Homo sapien
tgtcatcgccaaaatattcagtaag

SEQ ID NO: 5123301 - DNA, 25 bp, Homo sapien
aatgagagcctctcatagactgtgt

SEQ ID NO: 5123302 - DNA, 25 bp, Homo sapien
ctgtgtgggctctgtcatcgccaaa

SEQ ID NO: 5123303 - DNA, 25 bp, Homo sapien
tgggatacaggtgccgcctcctggg

SEQ ID NO: 5123304 - DNA, 25 bp, Homo sapien
gggagtccctaagtgcttctcctac

SEQ ID NO: 5123305 - DNA, 25 bp, Homo sapien
tacttctatacctctcttacatcag

SEQ ID NO: 5123306 - DNA, 25 bp, Homo sapien
gcatctaacaccaaggacactctct

SEQ ID NO: 5123307 - DNA, 25 bp, Homo sapien
aggaggaggctgcttgaaactgcag

SEQ ID NO: 5123308 - DNA, 25 bp, Homo sapien
tatggaaggtacaccgggatagaag

SEQ ID NO: 5123309 - DNA, 25 bp, Homo sapien
ggaggctgcttgaaactgcaggagt

SEQ ID NO: 5123310 - DNA, 25 bp, Homo sapien
ctgagatatggaaggtacaccggga

SEQ ID NO: 5123311 - DNA, 25 bp, Homo sapien
ccatagccaggcttttgaaatgggt

SEQ ID NO: 5123312 - DNA, 25 bp, Homo sapien
aagcctgccctatggctcctacaaa

SEQ ID NO: 5123313 - DNA, 25 bp, Homo sapien
tgggttgtcgagtctttgaggttcc

SEQ ID NO: 5123314 - DNA, 25 bp, Homo sapien
tacactttctcccaaacttgcggct

SEQ ID NO: 5123315 - DNA, 25 bp, Homo sapien
caaaatcataatgtggtgggccaaa

SEQ ID NO: 5123316 - DNA, 25 bp, Homo sapien
tcacatgggtagaatgggagaccta

SEQ ID NO: 5123317 - DNA, 25 bp, Homo sapien
tgaggaccccagataattagagcta

SEQ ID NO: 5123318 - DNA, 25 bp, Homo sapien
gtggagctatttgcgccccttaaga

SEQ ID NO: 5123319 - DNA, 25 bp, Homo sapien
cgtttgcgtattcttccaaccctca

SEQ ID NO: 5123320 - DNA, 25 bp, Homo sapien
taagcaccttttcctcggatgaagt

SEQ ID NO: 5123321 - DNA, 25 bp, Homo sapien
gtcaaatgttagcaggtaagcacct

SEQ ID NO: 5123322 - DNA, 25 bp, Homo sapien
caatccccaatttccaaacaggtca

SEQ ID NO: 5123323 - DNA, 25 bp, Homo sapien
ttactcctccagcgttcttccacac

SEQ ID NO: 5123324 - DNA, 25 bp, Homo sapien
tacttgtacatttggttcaccagag

SEQ ID NO: 5123325 - DNA, 25 bp, Homo sapien
tgcagcctagtatgtatttccttaa

SEQ ID NO: 5123326 - DNA, 25 bp, Homo sapien
ggtcaattaacgctgaaatagtctt

SEQ ID NO: 5123327 - DNA, 25 bp, Homo sapien
caccagagctgggttaaccaaacta

SEQ ID NO: 5123328 - DNA, 25 bp, Homo sapien
ttggacggcaaatacttgtttgacg

SEQ ID NO: 5123329 - DNA, 25 bp, Homo sapien
atacttgtttgacggccttccttat

SEQ ID NO: 5123330 - DNA, 25 bp, Homo sapien
gacggcaaatacttgtttgacggcc

SEQ ID NO: 5123331 - DNA, 25 bp, Homo sapien
ggcaaatacttgtttgacggccttc

SEQ ID NO: 5123332 - DNA, 25 bp, Homo sapien
gtgtgctcccttcctgaacactcgc

SEQ ID NO: 5123333 - DNA, 25 bp, Homo sapien
ggagacgaacacagggggattctgt

SEQ ID NO: 5123334 - DNA, 25 bp, Homo sapien
tgctcccttcctgaacactcgcctt

SEQ ID NO: 5123335 - DNA, 25 bp, Homo sapien
ctgggggagacgaacacagggggat

SEQ ID NO: 5123336 - DNA, 25 bp, Homo sapien
tctggtctgccctggtcaagaatgt

SEQ ID NO: 5123337 - DNA, 25 bp, Homo sapien
acatctggtctgccctggtcaagaa

SEQ ID NO: 5123338 - DNA, 25 bp, Homo sapien
ttagtgcataaacgcactggcccca

SEQ ID NO: 5123339 - DNA, 25 bp, Homo sapien
ggtctgccctggtcaagaatgtact

SEQ ID NO: 5123340 - DNA, 25 bp, Homo sapien
tccggctctgtttgatcaccacaag

SEQ ID NO: 5123341 - DNA, 25 bp, Homo sapien
ctctgcctcgaaagacccagccacg

SEQ ID NO: 5123342 - DNA, 25 bp, Homo sapien
tgtttgatcaccacaagcctctgag

SEQ ID NO: 5123343 - DNA, 25 bp, Homo sapien
cctctatcttgagggcagaccacca

SEQ ID NO: 5123344 - DNA, 25 bp, Homo sapien
ggtcttgtaccatgtgctagcccct

SEQ ID NO: 5123345 - DNA, 25 bp, Homo sapien
cttgcaggtgtagagtaggcgttat

SEQ ID NO: 5123346 - DNA, 25 bp, Homo sapien
cacattgctggaatcagccaggaga

SEQ ID NO: 5123347 - DNA, 25 bp, Homo sapien
ggttgcactcaacacttgctcttgg

SEQ ID NO: 5123348 - DNA, 25 bp, Homo sapien
tctcttttatatagtgtggtggatg

SEQ ID NO: 5123349 - DNA, 25 bp, Homo sapien
tataaggtgtttgtgccccacaccc

SEQ ID NO: 5123350 - DNA, 25 bp, Homo sapien
cttttatatagtgtggtggatgttg

SEQ ID NO: 5123351 - DNA, 25 bp, Homo sapien
gcaaatattataaggtgtttgtgcc

SEQ ID NO: 5123352 - DNA, 25 bp, Homo sapien
aaaagggtaggttgatgagatcatc

SEQ ID NO: 5123353 - DNA, 25 bp, Homo sapien
tcttctgcggagctctccaggtgag

SEQ ID NO: 5123354 - DNA, 25 bp, Homo sapien
gagacttcataatcaccagcatcat

SEQ ID NO: 5123355 - DNA, 25 bp, Homo sapien
gggctgcaaagagacttcataatca

SEQ ID NO: 5123356 - DNA, 25 bp, Homo sapien
tagaacctgaggaatgctcatcatg

SEQ ID NO: 5123357 - DNA, 25 bp, Homo sapien
cacaatgggagccatatggtaatgg

SEQ ID NO: 5123358 - DNA, 25 bp, Homo sapien
gctcatcatggaaacaacaggagtg

SEQ ID NO: 5123359 - DNA, 25 bp, Homo sapien
gatgtgttcagaggaagcgctgact

SEQ ID NO: 5123360 - DNA, 25 bp, Homo sapien
caattcaatggtgagaggtagtcct

SEQ ID NO: 5123361 - DNA, 25 bp, Homo sapien
tgtgaacataagagaaaggccctag

SEQ ID NO: 5123362 - DNA, 25 bp, Homo sapien
caaagtgtgctacagcaagtggaca

SEQ ID NO: 5123363 - DNA, 25 bp, Homo sapien
catggtcttggtagagggctagaca

SEQ ID NO: 5123364 - DNA, 25 bp, Homo sapien
tccttgacctaagaggtgagcccag

SEQ ID NO: 5123365 - DNA, 25 bp, Homo sapien
tcagtcatcaggtgccagaggttcc

SEQ ID NO: 5123366 - DNA, 25 bp, Homo sapien
gaaaatgtccttcgtccctccaaga

SEQ ID NO: 5123367 - DNA, 25 bp, Homo sapien
acaaggtctctacccttaagcaggg

SEQ ID NO: 5123368 - DNA, 25 bp, Homo sapien
taaacttgccagctttgagacctgc

SEQ ID NO: 5123369 - DNA, 25 bp, Homo sapien
cagttagataagacagagcgggcac

SEQ ID NO: 5123370 - DNA, 25 bp, Homo sapien
taaatatcaagcacagcaaaggtgg

SEQ ID NO: 5123371 - DNA, 25 bp, Homo sapien
caaaggtggtcagtcagcggagtta

SEQ ID NO: 5123372 - DNA, 25 bp, Homo sapien
acaaatgtgtgcatcattcttgcac

SEQ ID NO: 5123373 - DNA, 25 bp, Homo sapien
tttatgtgctgtcaaagagagcccc

SEQ ID NO: 5123374 - DNA, 25 bp, Homo sapien
acgcttcacaaatgtgtgcatcatt

SEQ ID NO: 5123375 - DNA, 25 bp, Homo sapien
agtttatgtgctgtcaaagagagcc

SEQ ID NO: 5123376 - DNA, 25 bp, Homo sapien
gaaaactgccctagagatgaaagct

SEQ ID NO: 5123377 - DNA, 25 bp, Homo sapien
gcaagtactccggaaatgaccatgt

SEQ ID NO: 5123378 - DNA, 25 bp, Homo sapien
gagatgatgctgaccgaaatcgcca

SEQ ID NO: 5123379 - DNA, 25 bp, Homo sapien
ccatcttgctgtgtgacgggaggca

SEQ ID NO: 5123380 - DNA, 25 bp, Homo sapien
gcgttgtgtgggaactgtttgttga

SEQ ID NO: 5123381 - DNA, 25 bp, Homo sapien
ccaactgtaggaaaagttgcgttgt

SEQ ID NO: 5123382 - DNA, 25 bp, Homo sapien
gtttgttgaagccattgtagaggta

SEQ ID NO: 5123383 - DNA, 25 bp, Homo sapien
tgttgaagccattgtagaggtacat

SEQ ID NO: 5123384 - DNA, 25 bp, Homo sapien
ttcccagccagataatcagagccag

SEQ ID NO: 5123385 - DNA, 25 bp, Homo sapien
tcagagccagatgttcggcacagct

SEQ ID NO: 5123386 - DNA, 25 bp, Homo sapien
gctctgagaaccagcaaaggctcca

SEQ ID NO: 5123387 - DNA, 25 bp, Homo sapien
acagctgcttcaacgtgggtacact

SEQ ID NO: 5123388 - DNA, 25 bp, Homo sapien
ggattccttcggctgaacttggctg

SEQ ID NO: 5123389 - DNA, 25 bp, Homo sapien
gattccttcggctgaacttggctgt

SEQ ID NO: 5123390 - DNA, 25 bp, Homo sapien
gtatacagggccttaaaaacactgc

SEQ ID NO: 5123391 - DNA, 25 bp, Homo sapien
acagagaaatgtatacagggcctta

SEQ ID NO: 5123392 - DNA, 25 bp, Homo sapien
gcaggaggtgtcttaaacaatgcct

SEQ ID NO: 5123393 - DNA, 25 bp, Homo sapien
tgaagacttctggtaaatcaccacg

SEQ ID NO: 5123394 - DNA, 25 bp, Homo sapien
caagttgacgctgtcagtttgccaa

SEQ ID NO: 5123395 - DNA, 25 bp, Homo sapien
tgaagatggcttgcctctgaagact

SEQ ID NO: 5123396 - DNA, 25 bp, Homo sapien
taagggatacttggcctatacaggg

SEQ ID NO: 5123397 - DNA, 25 bp, Homo sapien
ggcaaggaacatgctactcagtggt

SEQ ID NO: 5123398 - DNA, 25 bp, Homo sapien
cagaagggaatcatgggcaaggaac

SEQ ID NO: 5123399 - DNA, 25 bp, Homo sapien
tccaattacagatgctcagctggtc

SEQ ID NO: 5123400 - DNA, 25 bp, Homo sapien
acacctctcgggcattcttctaggc

SEQ ID NO: 5123401 - DNA, 25 bp, Homo sapien
aatttcaccctataaatacatagtg

SEQ ID NO: 5123402 - DNA, 25 bp, Homo sapien
taaatacatagtgaacacctctcgg

SEQ ID NO: 5123403 - DNA, 25 bp, Homo sapien
ttctaggcacgggagaagaggacat

SEQ ID NO: 5123404 - DNA, 25 bp, Homo sapien
actttttctaatgagtgttacactt

SEQ ID NO: 5123405 - DNA, 25 bp, Homo sapien
ttttctaatgagtgttacactttta

SEQ ID NO: 5123406 - DNA, 25 bp, Homo sapien
atacatgtagatctgagttaattca

SEQ ID NO: 5123407 - DNA, 25 bp, Homo sapien
atgttaatacatgtagatctgagtt

SEQ ID NO: 5123408 - DNA, 25 bp, Homo sapien
gtaaattaataattagatctagagg

SEQ ID NO: 5123409 - DNA, 25 bp, Homo sapien
catggtgtcaatctaacatgttctt

SEQ ID NO: 5123410 - DNA, 25 bp, Homo sapien
atatcctcatggtgtcaatctaaca

SEQ ID NO: 5123411 - DNA, 25 bp, Homo sapien
tcctcatggtgtcaatctaacatgt

SEQ ID NO: 5123412 - DNA, 25 bp, Homo sapien
caatttttgctgtgagtggttgctt

SEQ ID NO: 5123413 - DNA, 25 bp, Homo sapien
aacagcaagcacatacctcatggga

SEQ ID NO: 5123414 - DNA, 25 bp, Homo sapien
ccttgcggggttaaatcactcattc

SEQ ID NO: 5123415 - DNA, 25 bp, Homo sapien
tcctagaaagtgtatgccttgcggg

SEQ ID NO: 5123416 - DNA, 25 bp, Homo sapien
taagggacttgccactgacttaggc

SEQ ID NO: 5123417 - DNA, 25 bp, Homo sapien
cactactgcagtgatccaggctgga

SEQ ID NO: 5123418 - DNA, 25 bp, Homo sapien
tggctttgccagtgacttaagggac

SEQ ID NO: 5123419 - DNA, 25 bp, Homo sapien
ggaagttgcactgacatagagaagc

SEQ ID NO: 5123420 - DNA, 25 bp, Homo sapien
cccatgtgtccatgagacgacaaag

SEQ ID NO: 5123421 - DNA, 25 bp, Homo sapien
tggacctcaccacctttagcgtctt

SEQ ID NO: 5123422 - DNA, 25 bp, Homo sapien
tccatgagacgacaaagccctattc

SEQ ID NO: 5123423 - DNA, 25 bp, Homo sapien
aaagccctattctgagtttcctgga

SEQ ID NO: 5123424 - DNA, 25 bp, Homo sapien
atcaccttccccctgcgtcactttc

SEQ ID NO: 5123425 - DNA, 25 bp, Homo sapien
ctttgtccgctcacactttgcttgc

SEQ ID NO: 5123426 - DNA, 25 bp, Homo sapien
ttcctctttgtccgctcacactttg

SEQ ID NO: 5123427 - DNA, 25 bp, Homo sapien
tgttgggtcctgcccgcatcacctt

SEQ ID NO: 5123428 - DNA, 25 bp, Homo sapien
tgcccagcatgagggggagggatgc

SEQ ID NO: 5123429 - DNA, 25 bp, Homo sapien
gcatgatgggttgggaagagtttgc

SEQ ID NO: 5123430 - DNA, 25 bp, Homo sapien
gggcatggcatcttccagggcatga

SEQ ID NO: 5123431 - DNA, 25 bp, Homo sapien
ccacactgtgatgagtttgcacata

SEQ ID NO: 5123432 - DNA, 25 bp, Homo sapien
ttaaaacatccttcatctccacagc

SEQ ID NO: 5123433 - DNA, 25 bp, Homo sapien
ctgaggtttaaaacatccttcatct

SEQ ID NO: 5123434 - DNA, 25 bp, Homo sapien
aggtttaaaacatccttcatctcca

SEQ ID NO: 5123435 - DNA, 25 bp, Homo sapien
taaaacatccttcatctccacagca

SEQ ID NO: 5123436 - DNA, 25 bp, Homo sapien
gaagttcccatatcagccctttgac

SEQ ID NO: 5123437 - DNA, 25 bp, Homo sapien
ctttgactcctctccggtttgccat

SEQ ID NO: 5123438 - DNA, 25 bp, Homo sapien
tttgactcctctccggtttgccatc

SEQ ID NO: 5123439 - DNA, 25 bp, Homo sapien
agggaagttcccatatcagcccttt

SEQ ID NO: 5123440 - DNA, 25 bp, Homo sapien
tttttctcagcttcagtctcaggga

SEQ ID NO: 5123441 - DNA, 25 bp, Homo sapien
acggctcagcccttgacctcttttt

SEQ ID NO: 5123442 - DNA, 25 bp, Homo sapien
tcagtctcctttgccagttcttgct

SEQ ID NO: 5123443 - DNA, 25 bp, Homo sapien
tctctccagtgtgcaaaagctgtag

SEQ ID NO: 5123444 - DNA, 25 bp, Homo sapien
ccgggtgaccaaaaccggcactgca

SEQ ID NO: 5123445 - DNA, 25 bp, Homo sapien
tggtcagtcaccgggtgaccaaaac

SEQ ID NO: 5123446 - DNA, 25 bp, Homo sapien
caccgggtgaccaaaaccggcactg

SEQ ID NO: 5123447 - DNA, 25 bp, Homo sapien
gagctggtcagtcaccgggtgacca

SEQ ID NO: 5123448 - DNA, 25 bp, Homo sapien
gctcactagcatggtgtacttgctc

SEQ ID NO: 5123449 - DNA, 25 bp, Homo sapien
ggattctgttgaactgctcactagc

SEQ ID NO: 5123450 - DNA, 25 bp, Homo sapien
tgaactgctcactagcatggtgtac

SEQ ID NO: 5123451 - DNA, 25 bp, Homo sapien
tctgttgaactgctcactagcatgg

SEQ ID NO: 5123452 - DNA, 25 bp, Homo sapien
ggcctggtacactttatcaaggcag

SEQ ID NO: 5123453 - DNA, 25 bp, Homo sapien
tttggagtacaacaggccccttggc

SEQ ID NO: 5123454 - DNA, 25 bp, Homo sapien
ctggtacactttatcaaggcagaaa

SEQ ID NO: 5123455 - DNA, 25 bp, Homo sapien
tggagtacaacaggccccttggcct

SEQ ID NO: 5123456 - DNA, 25 bp, Homo sapien
ctgtgaggaaggttccgcagacccc

SEQ ID NO: 5123457 - DNA, 25 bp, Homo sapien
caggaagggttcttaagggagacag

SEQ ID NO: 5123458 - DNA, 25 bp, Homo sapien
ggctgtgaggaaggttccgcagacc

SEQ ID NO: 5123459 - DNA, 25 bp, Homo sapien
gggttcttaagggagacagttgtgc

SEQ ID NO: 5123460 - DNA, 25 bp, Homo sapien
caagagcaaatgagttttatggagg

SEQ ID NO: 5123461 - DNA, 25 bp, Homo sapien
tcaagagcaaatgagttttatggag

SEQ ID NO: 5123462 - DNA, 25 bp, Homo sapien
gcaaatgagttttatggaggctttg

SEQ ID NO: 5123463 - DNA, 25 bp, Homo sapien
aatgagttttatggaggctttgtac

SEQ ID NO: 5123464 - DNA, 25 bp, Homo sapien
ggtctaattttaggccgtctgagaa

SEQ ID NO: 5123465 - DNA, 25 bp, Homo sapien
aatgggtcattaggccagggaccac

SEQ ID NO: 5123466 - DNA, 25 bp, Homo sapien
tcatgacatgctttggttgggagtg

SEQ ID NO: 5123467 - DNA, 25 bp, Homo sapien
caccttcttccatgtcatgacatgc

SEQ ID NO: 5123468 - DNA, 25 bp, Homo sapien
tgtttccaaacagcggtgtgggagc

SEQ ID NO: 5123469 - DNA, 25 bp, Homo sapien
actccagtgggcagtccgaggatgc

SEQ ID NO: 5123470 - DNA, 25 bp, Homo sapien
tcttcaaatcccatgagcaaagtgg

SEQ ID NO: 5123471 - DNA, 25 bp, Homo sapien
tgctgtgcaacttcattctgtttcc

SEQ ID NO: 5123472 - DNA, 25 bp, Homo sapien
gaagcatctggttcgctgtaagcac

SEQ ID NO: 5123473 - DNA, 25 bp, Homo sapien
tttgcttaaattccagtcccctgcc

SEQ ID NO: 5123474 - DNA, 25 bp, Homo sapien
tccggccacgtacaaggtctcttta

SEQ ID NO: 5123475 - DNA, 25 bp, Homo sapien
atagagaagggcacccagaagcatc

SEQ ID NO: 5123476 - DNA, 25 bp, Homo sapien
ctacaaagtgtctccagctagaaat

SEQ ID NO: 5123477 - DNA, 25 bp, Homo sapien
tattgttttgattacccttatgtta

SEQ ID NO: 5123478 - DNA, 25 bp, Homo sapien
cccttatgttattacaagatggcaa

SEQ ID NO: 5123479 - DNA, 25 bp, Homo sapien
aattgttgagaaggatacagtttgt

SEQ ID NO: 5123480 - DNA, 25 bp, Homo sapien
cctgactgacctagtagaacaccaa

SEQ ID NO: 5123481 - DNA, 25 bp, Homo sapien
gaacaccaattctaggcatagcctg

SEQ ID NO: 5123482 - DNA, 25 bp, Homo sapien
caagcatccaggctaggctagttgg

SEQ ID NO: 5123483 - DNA, 25 bp, Homo sapien
gagggtacatttcagagcacaaagg

SEQ ID NO: 5123484 - DNA, 25 bp, Homo sapien
tgttggatttcctcgacactggcac

SEQ ID NO: 5123485 - DNA, 25 bp, Homo sapien
gccttctagaaacttgtggttggga

SEQ ID NO: 5123486 - DNA, 25 bp, Homo sapien
tctaagggtacaaggacatgatttc

SEQ ID NO: 5123487 - DNA, 25 bp, Homo sapien
ggttgggaatgggactcacacttgt

SEQ ID NO: 5123488 - DNA, 25 bp, Homo sapien
tgtgctggacaaactgttcagtgag

SEQ ID NO: 5123489 - DNA, 25 bp, Homo sapien
tagtcacccaaatgttatcgctgga

SEQ ID NO: 5123490 - DNA, 25 bp, Homo sapien
cacgcccggtcatccacatttattg

SEQ ID NO: 5123491 - DNA, 25 bp, Homo sapien
tgtgccttcagtgtacctaaccaga

SEQ ID NO: 5123492 - DNA, 25 bp, Homo sapien
aggtcttgatggagagccggacact

SEQ ID NO: 5123493 - DNA, 25 bp, Homo sapien
acgtgggcctgcttgaggtcttgat

SEQ ID NO: 5123494 - DNA, 25 bp, Homo sapien
gtatgtcccccgacagctgcatgct

SEQ ID NO: 5123495 - DNA, 25 bp, Homo sapien
cggacacttggctaggtatgtcccc

SEQ ID NO: 5123496 - DNA, 25 bp, Homo sapien
actcaagtgtgagtgtcctctcaca

SEQ ID NO: 5123497 - DNA, 25 bp, Homo sapien
cactcaagtgtgagtgtcctctcac

SEQ ID NO: 5123498 - DNA, 25 bp, Homo sapien
gtgtggctgtcacactcaagtgtga

SEQ ID NO: 5123499 - DNA, 25 bp, Homo sapien
tcaagtgtgagtgtcctctcacact

SEQ ID NO: 5123500 - DNA, 25 bp, Homo sapien
taacgaggggttgaacagcctctgc

SEQ ID NO: 5123501 - DNA, 25 bp, Homo sapien
ccagaacccggcaatcatgatgtgt

SEQ ID NO: 5123502 - DNA, 25 bp, Homo sapien
tgtgttgaaaccctgtcccatgctg

SEQ ID NO: 5123503 - DNA, 25 bp, Homo sapien
tattaatgccgtgagcttaggccca

SEQ ID NO: 5123504 - DNA, 25 bp, Homo sapien
ctcctccccatttgcacactctgtc

SEQ ID NO: 5123505 - DNA, 25 bp, Homo sapien
ccttgggacggtaagctcctcaagg

SEQ ID NO: 5123506 - DNA, 25 bp, Homo sapien
actcctccccatttgcacactctgt

SEQ ID NO: 5123507 - DNA, 25 bp, Homo sapien
cccttgggacggtaagctcctcaag

SEQ ID NO: 5123508 - DNA, 25 bp, Homo sapien
tctcacagaaaagcctttaagcagg

SEQ ID NO: 5123509 - DNA, 25 bp, Homo sapien
tccctgttcgcacgttctcacagaa

SEQ ID NO: 5123510 - DNA, 25 bp, Homo sapien
ggaatgcccacattctccctgttcg

SEQ ID NO: 5123511 - DNA, 25 bp, Homo sapien
tgtggacaggactctacagggctcg

SEQ ID NO: 5123512 - DNA, 25 bp, Homo sapien
cacaaatcttcgtgatgtaaaacag

SEQ ID NO: 5123513 - DNA, 25 bp, Homo sapien
gctttgattggagccatggagcaga

SEQ ID NO: 5123514 - DNA, 25 bp, Homo sapien
gagcagattaattgcagctgtgccc

SEQ ID NO: 5123515 - DNA, 25 bp, Homo sapien
gaaggcggagaatccatcctacaga

SEQ ID NO: 5123516 - DNA, 25 bp, Homo sapien
ggatctcgggaagggtccctctgaa

SEQ ID NO: 5123517 - DNA, 25 bp, Homo sapien
caatgttttgggcccctccttagag

SEQ ID NO: 5123518 - DNA, 25 bp, Homo sapien
agcacttggccaggcgggctgtttc

SEQ ID NO: 5123519 - DNA, 25 bp, Homo sapien
tgtttctgctcaacgtggatctcgg

SEQ ID NO: 5123520 - DNA, 25 bp, Homo sapien
ctggagatggtgacctcgtgtcctt

SEQ ID NO: 5123521 - DNA, 25 bp, Homo sapien
ggtgacctcgtgtccttgactgtgg

SEQ ID NO: 5123522 - DNA, 25 bp, Homo sapien
tcgtgtccttgactgtggcgctgga

SEQ ID NO: 5123523 - DNA, 25 bp, Homo sapien
tcgaggaggggccatttcatctgca

SEQ ID NO: 5123524 - DNA, 25 bp, Homo sapien
tgcctttcccggatggctggtcccg

SEQ ID NO: 5123525 - DNA, 25 bp, Homo sapien
cctggcttatgcctgaggtgtggag

SEQ ID NO: 5123526 - DNA, 25 bp, Homo sapien
agcagcttgtgccttggcgactggc

SEQ ID NO: 5123527 - DNA, 25 bp, Homo sapien
gctggtcccgcactcacggttcctt

SEQ ID NO: 5123528 - DNA, 25 bp, Homo sapien
ccaagtgggactctgggccaaagcc

SEQ ID NO: 5123529 - DNA, 25 bp, Homo sapien
ctatcccaagtgggactctgggcca

SEQ ID NO: 5123530 - DNA, 25 bp, Homo sapien
cgatggtgactgaagcgctaagccg

SEQ ID NO: 5123531 - DNA, 25 bp, Homo sapien
ttattcgatggtgactgaagcgcta

SEQ ID NO: 5123532 - DNA, 25 bp, Homo sapien
ttcgatggtgactgaagcgctaagc

SEQ ID NO: 5123533 - DNA, 25 bp, Homo sapien
tattcgatggtgactgaagcgctaa

SEQ ID NO: 5123534 - DNA, 25 bp, Homo sapien
tattagcaaatcctgattgctcatg

SEQ ID NO: 5123535 - DNA, 25 bp, Homo sapien
gatagtattagcaaatcctgattgc

SEQ ID NO: 5123536 - DNA, 25 bp, Homo sapien
aactggtgatagtattagcaaatcc

SEQ ID NO: 5123537 - DNA, 25 bp, Homo sapien
aaaaactggtgatagtattagcaaa

SEQ ID NO: 5123538 - DNA, 25 bp, Homo sapien
ggccctgctggtggctggtgggctc

SEQ ID NO: 5123539 - DNA, 25 bp, Homo sapien
gaccaccaggtggcgccagcacaca

SEQ ID NO: 5123540 - DNA, 25 bp, Homo sapien
ccaccaggtggcgccagcacacagc

SEQ ID NO: 5123541 - DNA, 25 bp, Homo sapien
ccaggtggcgccagcacacagctgg

SEQ ID NO: 5123542 - DNA, 25 bp, Homo sapien
tttcagtgtgccaagcagagaggag

SEQ ID NO: 5123543 - DNA, 25 bp, Homo sapien
cttgttccttttcagtgtgccaagc

SEQ ID NO: 5123544 - DNA, 25 bp, Homo sapien
cacagccttgttccttttcagtgtg

SEQ ID NO: 5123545 - DNA, 25 bp, Homo sapien
agaggagaggcggagaattaaaccg

SEQ ID NO: 5123546 - DNA, 25 bp, Homo sapien
tccctgagagatgacagcagtggac

SEQ ID NO: 5123547 - DNA, 25 bp, Homo sapien
caggtattttccaggcaacatccca

SEQ ID NO: 5123548 - DNA, 25 bp, Homo sapien
caggacttgagaagggatcacaccc

SEQ ID NO: 5123549 - DNA, 25 bp, Homo sapien
caaggagatggagagtatgaccagc

SEQ ID NO: 5123550 - DNA, 25 bp, Homo sapien
gcgggtgctgaacgacaggaacttt

SEQ ID NO: 5123551 - DNA, 25 bp, Homo sapien
tgcgggtgctgaacgacaggaactt

SEQ ID NO: 5123552 - DNA, 25 bp, Homo sapien
ggtgctgaacgacaggaactttatt

SEQ ID NO: 5123553 - DNA, 25 bp, Homo sapien
cgggtgctgaacgacaggaacttta

SEQ ID NO: 5123554 - DNA, 25 bp, Homo sapien
aagtggtcattgctgtaggtgatga

SEQ ID NO: 5123555 - DNA, 25 bp, Homo sapien
tctttggatcgatctctggggagag

SEQ ID NO: 5123556 - DNA, 25 bp, Homo sapien
tgatgaggggagtcagcggatgcat

SEQ ID NO: 5123557 - DNA, 25 bp, Homo sapien
gagaagtggtcattgctgtaggtga

SEQ ID NO: 5123558 - DNA, 25 bp, Homo sapien
tagctgcacggattctatctctgtg

SEQ ID NO: 5123559 - DNA, 25 bp, Homo sapien
ccctctctagctgcacggattctat

SEQ ID NO: 5123560 - DNA, 25 bp, Homo sapien
tggctgtgatacagaagccagcgtc

SEQ ID NO: 5123561 - DNA, 25 bp, Homo sapien
tatctctgtgaagagtatcttccag

SEQ ID NO: 5123562 - DNA, 25 bp, Homo sapien
agagatatgtcagactgttccctcg

SEQ ID NO: 5123563 - DNA, 25 bp, Homo sapien
agatatgtcagactgttccctcgcc

SEQ ID NO: 5123564 - DNA, 25 bp, Homo sapien
ttccaaagagagatatgtcagactg

SEQ ID NO: 5123565 - DNA, 25 bp, Homo sapien
caaagagagatatgtcagactgttc

SEQ ID NO: 5123566 - DNA, 25 bp, Homo sapien
taatacggtgacagctcggatgggt

SEQ ID NO: 5123567 - DNA, 25 bp, Homo sapien
ttgtccgacagctccgggagagagt

SEQ ID NO: 5123568 - DNA, 25 bp, Homo sapien
agagtgggtaatacggtgacagctc

SEQ ID NO: 5123569 - DNA, 25 bp, Homo sapien
ggatttgtccgacagctccgggaga

SEQ ID NO: 5123570 - DNA, 25 bp, Homo sapien
ctggacatcgaggcgttcatggcga

SEQ ID NO: 5123571 - DNA, 25 bp, Homo sapien
gaagggagtacatgggctggccttg

SEQ ID NO: 5123572 - DNA, 25 bp, Homo sapien
atcgaggcgttcatggcgagggcgg

SEQ ID NO: 5123573 - DNA, 25 bp, Homo sapien
ggaagggagtacatgggctggcctt

SEQ ID NO: 5123574 - DNA, 25 bp, Homo sapien
ccatgtgaggagagaaccgactgga

SEQ ID NO: 5123575 - DNA, 25 bp, Homo sapien
ccaccatgtgaggagagaaccgact

SEQ ID NO: 5123576 - DNA, 25 bp, Homo sapien
agccaccatgtgaggagagaaccga

SEQ ID NO: 5123577 - DNA, 25 bp, Homo sapien
caggagccaccatgtgaggagagaa

SEQ ID NO: 5123578 - DNA, 25 bp, Homo sapien
ccggttcctgcttgacgatggggga

SEQ ID NO: 5123579 - DNA, 25 bp, Homo sapien
ggtgccggttcctgcttgacgatgg

SEQ ID NO: 5123580 - DNA, 25 bp, Homo sapien
gtgccggttcctgcttgacgatggg

SEQ ID NO: 5123581 - DNA, 25 bp, Homo sapien
ggggtgccggttcctgcttgacgat

SEQ ID NO: 5123582 - DNA, 25 bp, Homo sapien
ctgacagaggaacagagcatggtgg

SEQ ID NO: 5123583 - DNA, 25 bp, Homo sapien
tggggttgctgagatgagctctcac

SEQ ID NO: 5123584 - DNA, 25 bp, Homo sapien
ggtggggttgctgagatgagctctc

SEQ ID NO: 5123585 - DNA, 25 bp, Homo sapien
gtgctggcggcggtgacaggacaca

SEQ ID NO: 5123586 - DNA, 25 bp, Homo sapien
cctttgaacgatctccacgccagat

SEQ ID NO: 5123587 - DNA, 25 bp, Homo sapien
ggctgcctggatgctaattcaagtg

SEQ ID NO: 5123588 - DNA, 25 bp, Homo sapien
tgaaacaccgctgattgtctctggg

SEQ ID NO: 5123589 - DNA, 25 bp, Homo sapien
ggctgcactcaacacctgagtacct

SEQ ID NO: 5123590 - DNA, 25 bp, Homo sapien
aggatctggttaatggctgcacttt

SEQ ID NO: 5123591 - DNA, 25 bp, Homo sapien
tcttccaaggatctggttaatggct

SEQ ID NO: 5123592 - DNA, 25 bp, Homo sapien
tttcttccaaggatctggttaatgg

SEQ ID NO: 5123593 - DNA, 25 bp, Homo sapien
caaggatctggttaatggctgcact

SEQ ID NO: 5123594 - DNA, 25 bp, Homo sapien
gttcttctcgagacaggttgtgcca

SEQ ID NO: 5123595 - DNA, 25 bp, Homo sapien
gaccaggttgggtagagctgcgagt

SEQ ID NO: 5123596 - DNA, 25 bp, Homo sapien
tagagctgcgagtgaagctgccgct

SEQ ID NO: 5123597 - DNA, 25 bp, Homo sapien
tagttgtcccgggctgaccaggttg

SEQ ID NO: 5123598 - DNA, 25 bp, Homo sapien
ctgctgtgactgtgtctgggacagc

SEQ ID NO: 5123599 - DNA, 25 bp, Homo sapien
ctgtgactgtgtctgggacagctgc

SEQ ID NO: 5123600 - DNA, 25 bp, Homo sapien
ctgcctcctggacttgctgctgtga

SEQ ID NO: 5123601 - DNA, 25 bp, Homo sapien
ttgctgctgtgactgtgtctgggac

SEQ ID NO: 5123602 - DNA, 25 bp, Homo sapien
ctgggcctgtagcaccgggagggcc

SEQ ID NO: 5123603 - DNA, 25 bp, Homo sapien
gggcaggtactgaacacatggcttc

SEQ ID NO: 5123604 - DNA, 25 bp, Homo sapien
gctgcagccttagccgacaggaagg

SEQ ID NO: 5123605 - DNA, 25 bp, Homo sapien
ggcttgctccgaatgggtggcagca

SEQ ID NO: 5123606 - DNA, 25 bp, Homo sapien
agagagagaagtgccctctgcccag

SEQ ID NO: 5123607 - DNA, 25 bp, Homo sapien
gccttaagatcagctactggttaca

SEQ ID NO: 5123608 - DNA, 25 bp, Homo sapien
gcacctacaggacgaatagcacgct

SEQ ID NO: 5123609 - DNA, 25 bp, Homo sapien
cagaacagtccagagtggtcaaata

SEQ ID NO: 5123610 - DNA, 25 bp, Homo sapien
ttgagcagacgatgaaaacttgggc

SEQ ID NO: 5123611 - DNA, 25 bp, Homo sapien
cagaggacagaggacgaagaagaac

SEQ ID NO: 5123612 - DNA, 25 bp, Homo sapien
tgaaaacttgggctgggtaacagga

SEQ ID NO: 5123613 - DNA, 25 bp, Homo sapien
cgaagaagaacccacggtattgagc

SEQ ID NO: 5123614 - DNA, 25 bp, Homo sapien
cagcaaatcaggccaagatgtcttc

SEQ ID NO: 5123615 - DNA, 25 bp, Homo sapien
aaatcaggccaagatgtcttctcac

SEQ ID NO: 5123616 - DNA, 25 bp, Homo sapien
gcaaatcaggccaagatgtcttctc

SEQ ID NO: 5123617 - DNA, 25 bp, Homo sapien
ggcagcaaatcaggccaagatgtct

SEQ ID NO: 5123618 - DNA, 25 bp, Homo sapien
aaccatttcagaggaccgctttctc

SEQ ID NO: 5123619 - DNA, 25 bp, Homo sapien
aaaccatttcagaggaccgctttct

SEQ ID NO: 5123620 - DNA, 25 bp, Homo sapien
gaaaccatttcagaggaccgctttc

SEQ ID NO: 5123621 - DNA, 25 bp, Homo sapien
ggaacagggtctctagaactttggc

SEQ ID NO: 5123622 - DNA, 25 bp, Homo sapien
gattgtgaagggatgatcgccactg

SEQ ID NO: 5123623 - DNA, 25 bp, Homo sapien
ggcagattgtgctggcacggaccca

SEQ ID NO: 5123624 - DNA, 25 bp, Homo sapien
aacacagacttcttcgctgaggaag

SEQ ID NO: 5123625 - DNA, 25 bp, Homo sapien
ctgagaccggtgttccggaaactgc

SEQ ID NO: 5123626 - DNA, 25 bp, Homo sapien
tgagaccggtgttccggaaactgcc

SEQ ID NO: 5123627 - DNA, 25 bp, Homo sapien
gaacttttatgcagtcacggagtga

SEQ ID NO: 5123628 - DNA, 25 bp, Homo sapien
cagtcacggagtgagtgaacatgca

SEQ ID NO: 5123629 - DNA, 25 bp, Homo sapien
gatttcaggatgaacttttatgcag

SEQ ID NO: 5123630 - DNA, 25 bp, Homo sapien
tatgcagtcacggagtgagtgaaca

SEQ ID NO: 5123631 - DNA, 25 bp, Homo sapien
ctgggaaggacactgccccaggttc

SEQ ID NO: 5123632 - DNA, 25 bp, Homo sapien
tgccccaggttcctattcttccacc

SEQ ID NO: 5123633 - DNA, 25 bp, Homo sapien
gttcctattcttccacctcccctgc

SEQ ID NO: 5123634 - DNA, 25 bp, Homo sapien
ggacactgccccaggttcctattct

SEQ ID NO: 5123635 - DNA, 25 bp, Homo sapien
agggtgaccgctcgctgtgtcctga

SEQ ID NO: 5123636 - DNA, 25 bp, Homo sapien
tcagggtgaccgctcgctgtgtcct

SEQ ID NO: 5123637 - DNA, 25 bp, Homo sapien
cctcagggtgaccgctcgctgtgtc

SEQ ID NO: 5123638 - DNA, 25 bp, Homo sapien
gtgaccgctcgctgtgtcctgagcc

SEQ ID NO: 5123639 - DNA, 25 bp, Homo sapien
tggaccatggccggagacagccact

SEQ ID NO: 5123640 - DNA, 25 bp, Homo sapien
ggaccatggccggagacagccactc

SEQ ID NO: 5123641 - DNA, 25 bp, Homo sapien
tttgtggaccatggccggagacagc

SEQ ID NO: 5123642 - DNA, 25 bp, Homo sapien
gcctttgtggaccatggccggagac

SEQ ID NO: 5123643 - DNA, 25 bp, Homo sapien
ccgtgtcatagtaaacatagtagtt

SEQ ID NO: 5123644 - DNA, 25 bp, Homo sapien
aacagaggtcatgcctaagccgggc

SEQ ID NO: 5123645 - DNA, 25 bp, Homo sapien
tccttggtgcctcgcaggcagatga

SEQ ID NO: 5123646 - DNA, 25 bp, Homo sapien
acatagtagttggtggacggcagat

SEQ ID NO: 5123647 - DNA, 25 bp, Homo sapien
ggtgtgacaaacttccaggtgcaaa

SEQ ID NO: 5123648 - DNA, 25 bp, Homo sapien
tgcaaattggaaattgcctacttcc

SEQ ID NO: 5123649 - DNA, 25 bp, Homo sapien
caaggactgctcgtccctagggact

SEQ ID NO: 5123650 - DNA, 25 bp, Homo sapien
tcaaaaccccagaaccactgcaagg

SEQ ID NO: 5123651 - DNA, 25 bp, Homo sapien
gaagagggatgtgttccgcagcctc

SEQ ID NO: 5123652 - DNA, 25 bp, Homo sapien
tgatgggaaagcgaagaagagaaga

SEQ ID NO: 5123653 - DNA, 25 bp, Homo sapien
ttccctgggcatggagatgtagcgc

SEQ ID NO: 5123654 - DNA, 25 bp, Homo sapien
ccaggtcggatccttggctgatggg

SEQ ID NO: 5123655 - DNA, 25 bp, Homo sapien
ccaggacgtgcagccccccgtggga

SEQ ID NO: 5123656 - DNA, 25 bp, Homo sapien
gtatgagcatgatcatggtggaccg

SEQ ID NO: 5123657 - DNA, 25 bp, Homo sapien
gggtatgagcatgatcatggtggac

SEQ ID NO: 5123658 - DNA, 25 bp, Homo sapien
atgagcatgatcatggtggaccggc

SEQ ID NO: 5123659 - DNA, 25 bp, Homo sapien
ctgggtatgagcatgatcatggtgg

SEQ ID NO: 5123660 - DNA, 25 bp, Homo sapien
ccactcctcaaaccactcgtaggtg

SEQ ID NO: 5123661 - DNA, 25 bp, Homo sapien
ccctccagctgtgggaacagtttca

SEQ ID NO: 5123662 - DNA, 25 bp, Homo sapien
cagctgtgggaacagtttcaggacc

SEQ ID NO: 5123663 - DNA, 25 bp, Homo sapien
acagtttcaggaccactgacataga

SEQ ID NO: 5123664 - DNA, 25 bp, Homo sapien
gggaacagtttcaggaccactgaca

SEQ ID NO: 5123665 - DNA, 25 bp, Homo sapien
aactggttggtgagtggggatcctg

SEQ ID NO: 5123666 - DNA, 25 bp, Homo sapien
ggcccaggtcatggtcagccctgta

SEQ ID NO: 5123667 - DNA, 25 bp, Homo sapien
caggcggcccaggtcatggtcagcc

SEQ ID NO: 5123668 - DNA, 25 bp, Homo sapien
tcatggtcagccctgtagcagacac

SEQ ID NO: 5123669 - DNA, 25 bp, Homo sapien
aggtcatggtcagccctgtagcaga

SEQ ID NO: 5123670 - DNA, 25 bp, Homo sapien
tcagaggttggtgatggggctctgg

SEQ ID NO: 5123671 - DNA, 25 bp, Homo sapien
tgatggggctctgggccttcaaggc

SEQ ID NO: 5123672 - DNA, 25 bp, Homo sapien
ggtgatggggctctgggccttcaag

SEQ ID NO: 5123673 - DNA, 25 bp, Homo sapien
atggggctctgggccttcaaggcca

SEQ ID NO: 5123674 - DNA, 25 bp, Homo sapien
aagttccacttcaggatggcgctgc

SEQ ID NO: 5123675 - DNA, 25 bp, Homo sapien
tccacttcaggatggcgctgctgca

SEQ ID NO: 5123676 - DNA, 25 bp, Homo sapien
gcagggcccctaccagtccacaggt

SEQ ID NO: 5123677 - DNA, 25 bp, Homo sapien
agcagggcaccttgcagggccccta

SEQ ID NO: 5123678 - DNA, 25 bp, Homo sapien
tagagacaagatccttaaggtctga

SEQ ID NO: 5123679 - DNA, 25 bp, Homo sapien
atcctagagacaagatccttaaggt

SEQ ID NO: 5123680 - DNA, 25 bp, Homo sapien
tctgtgcccagatcctagagacaag

SEQ ID NO: 5123681 - DNA, 25 bp, Homo sapien
cctagagacaagatccttaaggtct

SEQ ID NO: 5123682 - DNA, 25 bp, Homo sapien
tattcgctttgatcactgagttagg

SEQ ID NO: 5123683 - DNA, 25 bp, Homo sapien
gagctgacaacactgccaggggttc

SEQ ID NO: 5123684 - DNA, 25 bp, Homo sapien
tggaatattcgctttgatcactgag

SEQ ID NO: 5123685 - DNA, 25 bp, Homo sapien
tccacagatggaatattcgctttga

SEQ ID NO: 5123686 - DNA, 25 bp, Homo sapien
cttgattgaggctcgggtaccgagc

SEQ ID NO: 5123687 - DNA, 25 bp, Homo sapien
gaggctcgggtaccgagctccctga

SEQ ID NO: 5123688 - DNA, 25 bp, Homo sapien
tccctgcatatttggaggataaggc

SEQ ID NO: 5123689 - DNA, 25 bp, Homo sapien
catatttggaggataaggcttgatt

SEQ ID NO: 5123690 - DNA, 25 bp, Homo sapien
tgtcaaactgccagtaagccagccc

SEQ ID NO: 5123691 - DNA, 25 bp, Homo sapien
tatatccagagctaacagtgactca

SEQ ID NO: 5123692 - DNA, 25 bp, Homo sapien
caactcgtctagttctgcaagtcag

SEQ ID NO: 5123693 - DNA, 25 bp, Homo sapien
tctgtaaatgccatcccaatgtggt

SEQ ID NO: 5123694 - DNA, 25 bp, Homo sapien
ttaggaaggttggatttggcgtgac

SEQ ID NO: 5123695 - DNA, 25 bp, Homo sapien
aaggttggatttggcgtgacttgct

SEQ ID NO: 5123696 - DNA, 25 bp, Homo sapien
ggcgtgacttgcttgagcaagagtc

SEQ ID NO: 5123697 - DNA, 25 bp, Homo sapien
atttggcgtgacttgcttgagcaag

SEQ ID NO: 5123698 - DNA, 25 bp, Homo sapien
ttctatggccgttgactgtacaggg

SEQ ID NO: 5123699 - DNA, 25 bp, Homo sapien
tctgacatagtactcccatgatggc

SEQ ID NO: 5123700 - DNA, 25 bp, Homo sapien
tatgggcgtgatgagaactagagca

SEQ ID NO: 5123701 - DNA, 25 bp, Homo sapien
gaaactgtgaggcaccagatcctgt

SEQ ID NO: 5123702 - DNA, 25 bp, Homo sapien
cacaagaggcacctcctatagtcag

SEQ ID NO: 5123703 - DNA, 25 bp, Homo sapien
gaagcatgttttctagcgattgtgt

SEQ ID NO: 5123704 - DNA, 25 bp, Homo sapien
tgagctggctgaggcatcgctcaag

SEQ ID NO: 5123705 - DNA, 25 bp, Homo sapien
tggtgtgtaagaagcacgtggagcc

SEQ ID NO: 5123706 - DNA, 25 bp, Homo sapien
tgagcttttgagcagactctgagaa

SEQ ID NO: 5123707 - DNA, 25 bp, Homo sapien
cattttgtcacggagtccacagagc

SEQ ID NO: 5123708 - DNA, 25 bp, Homo sapien
gaagtatcattgcttgtgttgaaag

SEQ ID NO: 5123709 - DNA, 25 bp, Homo sapien
ggtcggcagtggacgcgtacatttt

SEQ ID NO: 5123710 - DNA, 25 bp, Homo sapien
gcttagagaatccagttacagacct

SEQ ID NO: 5123711 - DNA, 25 bp, Homo sapien
gatgctatagattgacaccctcctg

SEQ ID NO: 5123712 - DNA, 25 bp, Homo sapien
tcagaacttgagcaaaacagggcag

SEQ ID NO: 5123713 - DNA, 25 bp, Homo sapien
taataaaagatcctcagctacagtc

SEQ ID NO: 5123714 - DNA, 25 bp, Homo sapien
aacttccacttagttgtaccgagca

SEQ ID NO: 5123715 - DNA, 25 bp, Homo sapien
gaagtgcttttctactaaggcctct

SEQ ID NO: 5123716 - DNA, 25 bp, Homo sapien
tcttcaaagacttcagcagcaaacc

SEQ ID NO: 5123717 - DNA, 25 bp, Homo sapien
cctgtctagcatgagatcttcttga

SEQ ID NO: 5123718 - DNA, 25 bp, Homo sapien
tatttatgctggtggcttccatccg

SEQ ID NO: 5123719 - DNA, 25 bp, Homo sapien
ggaaaaagatgaacgtcaccaatgg

SEQ ID NO: 5123720 - DNA, 25 bp, Homo sapien
tcaccaatggattgtgctgctctcg

SEQ ID NO: 5123721 - DNA, 25 bp, Homo sapien
gaaaaaagtactgtgacctgagaga

SEQ ID NO: 5123722 - DNA, 25 bp, Homo sapien
gatagaaacgcaagcacacgatggt

SEQ ID NO: 5123723 - DNA, 25 bp, Homo sapien
gaaaagatgtttggcgacctggaag

SEQ ID NO: 5123724 - DNA, 25 bp, Homo sapien
cagctctgcctgtaaggtctcggaa

SEQ ID NO: 5123725 - DNA, 25 bp, Homo sapien
cagcacgtttgtgtacggccaggag

SEQ ID NO: 5123726 - DNA, 25 bp, Homo sapien
agactaatgaggcttaactcaaaac

SEQ ID NO: 5123727 - DNA, 25 bp, Homo sapien
ggtgagatctttacgccttttataa

SEQ ID NO: 5123728 - DNA, 25 bp, Homo sapien
gcaggtgagatctttacgcctttta

SEQ ID NO: 5123729 - DNA, 25 bp, Homo sapien
caagggaaaagggagactaatgagg

SEQ ID NO: 5123730 - DNA, 25 bp, Homo sapien
tatcttcacctgtggactggtcggg

SEQ ID NO: 5123731 - DNA, 25 bp, Homo sapien
tcttgattctaggatccgggcacag

SEQ ID NO: 5123732 - DNA, 25 bp, Homo sapien
ctcatgtggagggaagagcaccaag

SEQ ID NO: 5123733 - DNA, 25 bp, Homo sapien
tgaagcggaacttgtactcagacct

SEQ ID NO: 5123734 - DNA, 25 bp, Homo sapien
tcatctgctcatgcgcacagccgct

SEQ ID NO: 5123735 - DNA, 25 bp, Homo sapien
ccgccgcctcggctaggcctcatct

SEQ ID NO: 5123736 - DNA, 25 bp, Homo sapien
cgccgcctcggctaggcctcatctg

SEQ ID NO: 5123737 - DNA, 25 bp, Homo sapien
gcctcatctgctcatgcgcacagcc

SEQ ID NO: 5123738 - DNA, 25 bp, Homo sapien
ccttggcaagtgttaacgcgttctc

SEQ ID NO: 5123739 - DNA, 25 bp, Homo sapien
tttaacacctcaaggcagcgagtcc

SEQ ID NO: 5123740 - DNA, 25 bp, Homo sapien
tcccagtcgggattctctttcagtc

SEQ ID NO: 5123741 - DNA, 25 bp, Homo sapien
tcggccttgtctcgccccatagtga

SEQ ID NO: 5123742 - DNA, 25 bp, Homo sapien
ttgtgatgcgcaggtaacagagagc

SEQ ID NO: 5123743 - DNA, 25 bp, Homo sapien
ggctgtgagcagcctttggacagaa

SEQ ID NO: 5123744 - DNA, 25 bp, Homo sapien
catcatgacaaccagtcagacaggg

SEQ ID NO: 5123745 - DNA, 25 bp, Homo sapien
cagagagctcaattcatcatgacaa

SEQ ID NO: 5123746 - DNA, 25 bp, Homo sapien
tgatagttggacctaaggaaacggc

SEQ ID NO: 5123747 - DNA, 25 bp, Homo sapien
tatgcaccctctttaggcaaggagg

SEQ ID NO: 5123748 - DNA, 25 bp, Homo sapien
tagatgggcccttagctgatccttt

SEQ ID NO: 5123749 - DNA, 25 bp, Homo sapien
tgtcattagggacccgccatagagg

SEQ ID NO: 5123750 - DNA, 25 bp, Homo sapien
gggccttcagtagggacagttacta

SEQ ID NO: 5123751 - DNA, 25 bp, Homo sapien
tggggccttcagtagggacagttac

SEQ ID NO: 5123752 - DNA, 25 bp, Homo sapien
ctcctggggccttcagtagggacag

SEQ ID NO: 5123753 - DNA, 25 bp, Homo sapien
cctggggccttcagtagggacagtt

SEQ ID NO: 5123754 - DNA, 25 bp, Homo sapien
tgaaccaagtagcatagaatcgtga

SEQ ID NO: 5123755 - DNA, 25 bp, Homo sapien
ttggccagccttggcaaggtgacag

SEQ ID NO: 5123756 - DNA, 25 bp, Homo sapien
atagcaatctcaggagggctcttct

SEQ ID NO: 5123757 - DNA, 25 bp, Homo sapien
tgacaggcgggtatggtaatagcaa

SEQ ID NO: 5123758 - DNA, 25 bp, Homo sapien
ccaggaactaaactgctctcactgt

SEQ ID NO: 5123759 - DNA, 25 bp, Homo sapien
gggcaatgcccccttagtcctggca

SEQ ID NO: 5123760 - DNA, 25 bp, Homo sapien
ctcttgggcttgacatgtggctcac

SEQ ID NO: 5123761 - DNA, 25 bp, Homo sapien
tggcctccatgacagcctatgacaa

SEQ ID NO: 5123762 - DNA, 25 bp, Homo sapien
tcttactacccaagccacaggatgg

SEQ ID NO: 5123763 - DNA, 25 bp, Homo sapien
tgactaaggaaggagggtagcctct

SEQ ID NO: 5123764 - DNA, 25 bp, Homo sapien
gacctgggccagcttatcaaaggcg

SEQ ID NO: 5123765 - DNA, 25 bp, Homo sapien
tgtttaggcctcacacacaggctgg

SEQ ID NO: 5123766 - DNA, 25 bp, Homo sapien
gaatgaacaacttgcctcagccaaa

SEQ ID NO: 5123767 - DNA, 25 bp, Homo sapien
gaacaacttgcctcagccaaatgct

SEQ ID NO: 5123768 - DNA, 25 bp, Homo sapien
tctgaatgaacaacttgcctcagcc

SEQ ID NO: 5123769 - DNA, 25 bp, Homo sapien
attctgaatgaacaacttgcctcag

SEQ ID NO: 5123770 - DNA, 25 bp, Homo sapien
agttatgcctctgttgacaattttt

SEQ ID NO: 5123771 - DNA, 25 bp, Homo sapien
ttatgcctctgttgacaattttttt

SEQ ID NO: 5123772 - DNA, 25 bp, Homo sapien
ggtttcaccattcagttatgcctct

SEQ ID NO: 5123773 - DNA, 25 bp, Homo sapien
tttcaccattcagttatgcctctgt

SEQ ID NO: 5123774 - DNA, 25 bp, Homo sapien
tagtaaggtctgagatcagaagcta

SEQ ID NO: 5123775 - DNA, 25 bp, Homo sapien
cctttgtgccatccgagggtgtagg

SEQ ID NO: 5123776 - DNA, 25 bp, Homo sapien
tggagagccagagatccagttgctc

SEQ ID NO: 5123777 - DNA, 25 bp, Homo sapien
ccttggcagtcactcagactaagag

SEQ ID NO: 5123778 - DNA, 25 bp, Homo sapien
tactatggaaagagcaagatttttc

SEQ ID NO: 5123779 - DNA, 25 bp, Homo sapien
tgtccatctcttaattcttctttac

SEQ ID NO: 5123780 - DNA, 25 bp, Homo sapien
tctttactatggaaagagcaagatt

SEQ ID NO: 5123781 - DNA, 25 bp, Homo sapien
atggaaagagcaagatttttcattc

SEQ ID NO: 5123782 - DNA, 25 bp, Homo sapien
tgtgtacctgagattcatttcatcc

SEQ ID NO: 5123783 - DNA, 25 bp, Homo sapien
caggcatctgtgtacctgagattca

SEQ ID NO: 5123784 - DNA, 25 bp, Homo sapien
tgattcattgtgctgaacaacttcc

SEQ ID NO: 5123785 - DNA, 25 bp, Homo sapien
cacaaccattggcacagtactaagc

SEQ ID NO: 5123786 - DNA, 25 bp, Homo sapien
tcttgtccttgtcatatgatggaga

SEQ ID NO: 5123787 - DNA, 25 bp, Homo sapien
tctgaaagccagaacactcttgtcc

SEQ ID NO: 5123788 - DNA, 25 bp, Homo sapien
tgtcatatgatggagaatatccagc

SEQ ID NO: 5123789 - DNA, 25 bp, Homo sapien
gaatatccagcagacaatctttcac

SEQ ID NO: 5123790 - DNA, 25 bp, Homo sapien
tagcttgaggatagaatccacatac

SEQ ID NO: 5123791 - DNA, 25 bp, Homo sapien
cctttagcttgaggatagaatccac

SEQ ID NO: 5123792 - DNA, 25 bp, Homo sapien
gctgacctttagcttgaggatagaa

SEQ ID NO: 5123793 - DNA, 25 bp, Homo sapien
gaggcagctgacctttagcttgagg

SEQ ID NO: 5123794 - DNA, 25 bp, Homo sapien
cacgtggctcccattcataagcttc

SEQ ID NO: 5123795 - DNA, 25 bp, Homo sapien
tggagaatgccatggttcttcaact

SEQ ID NO: 5123796 - DNA, 25 bp, Homo sapien
tgccatggttcttcaactctgagat

SEQ ID NO: 5123797 - DNA, 25 bp, Homo sapien
ccattcataagcttctgtggtcaga

SEQ ID NO: 5123798 - DNA, 25 bp, Homo sapien
tttcagcataggagctaaaaaggag

SEQ ID NO: 5123799 - DNA, 25 bp, Homo sapien
cataggagctaaaaaggagggacaa

SEQ ID NO: 5123800 - DNA, 25 bp, Homo sapien
tcagcataggagctaaaaaggaggg

SEQ ID NO: 5123801 - DNA, 25 bp, Homo sapien
agcataggagctaaaaaggagggac

SEQ ID NO: 5123802 - DNA, 25 bp, Homo sapien
aaaatcattctactcggaccagcct

SEQ ID NO: 5123803 - DNA, 25 bp, Homo sapien
aaaaatcattctactcggaccagcc

SEQ ID NO: 5123804 - DNA, 25 bp, Homo sapien
cttagtggggccacatgatcagcat

SEQ ID NO: 5123805 - DNA, 25 bp, Homo sapien
actcccgggtggtccccatattgat

SEQ ID NO: 5123806 - DNA, 25 bp, Homo sapien
atgctgaacttagtggggccacatg

SEQ ID NO: 5123807 - DNA, 25 bp, Homo sapien
tgaacttagtggggccacatgatca

SEQ ID NO: 5123808 - DNA, 25 bp, Homo sapien
gtctctggctggatggtgtccacag

SEQ ID NO: 5123809 - DNA, 25 bp, Homo sapien
gctctgaccacctctgtactcacaa

SEQ ID NO: 5123810 - DNA, 25 bp, Homo sapien
ctgtctctggctggatggtgtccac

SEQ ID NO: 5123811 - DNA, 25 bp, Homo sapien
cagcttcccattcttcttgggctct

SEQ ID NO: 5123812 - DNA, 25 bp, Homo sapien
caggctgctctgagctagcttggct

SEQ ID NO: 5123813 - DNA, 25 bp, Homo sapien
ggaaaggtccacagtctggaagtgc

SEQ ID NO: 5123814 - DNA, 25 bp, Homo sapien
ctggaagtgctgcagggcctcactg

SEQ ID NO: 5123815 - DNA, 25 bp, Homo sapien
ggcctcactgaaggagattagctgc

SEQ ID NO: 5123816 - DNA, 25 bp, Homo sapien
ttcccgaaggcgctggtggagcttt

SEQ ID NO: 5123817 - DNA, 25 bp, Homo sapien
tttggaggcccgaagaggtagtgtc

SEQ ID NO: 5123818 - DNA, 25 bp, Homo sapien
ccttcgaatagttggctggattctt

SEQ ID NO: 5123819 - DNA, 25 bp, Homo sapien
gggcggcgagcccagtccttcgaat

SEQ ID NO: 5123820 - DNA, 25 bp, Homo sapien
catggtacatgcaatattcctggct

SEQ ID NO: 5123821 - DNA, 25 bp, Homo sapien
cagatgcagcaactgccctgtgggc

SEQ ID NO: 5123822 - DNA, 25 bp, Homo sapien
ccctcatgggagaaccgggtgcttc

SEQ ID NO: 5123823 - DNA, 25 bp, Homo sapien
tctctgccagattgcccctcatggg

SEQ ID NO: 5123824 - DNA, 25 bp, Homo sapien
ggtttccatgaagggcacagtcaaa

SEQ ID NO: 5123825 - DNA, 25 bp, Homo sapien
tatagatggtctggaggactcggcc

SEQ ID NO: 5123826 - DNA, 25 bp, Homo sapien
ttggagccggtcagcttcttataga

SEQ ID NO: 5123827 - DNA, 25 bp, Homo sapien
catgcactgggtcttggctatccag

SEQ ID NO: 5123828 - DNA, 25 bp, Homo sapien
tgaaaaagaagatgagctactcctc

SEQ ID NO: 5123829 - DNA, 25 bp, Homo sapien
cagcctaaaagaccaccaagtgatc

SEQ ID NO: 5123830 - DNA, 25 bp, Homo sapien
aatagtacaatccaaaaactggtga

SEQ ID NO: 5123831 - DNA, 25 bp, Homo sapien
gaacgacctggcctctcactctagt

SEQ ID NO: 5123832 - DNA, 25 bp, Homo sapien
tctgcctccacaccaagcagctgtg

SEQ ID NO: 5123833 - DNA, 25 bp, Homo sapien
agaggcccaaataaatccacacaat

SEQ ID NO: 5123834 - DNA, 25 bp, Homo sapien
acacaatgacacatcacagtcaaat

SEQ ID NO: 5123835 - DNA, 25 bp, Homo sapien
acatcacagtcaaattcctgaaaac

SEQ ID NO: 5123836 - DNA, 25 bp, Homo sapien
cataggaagagtaacgaggcacccc

SEQ ID NO: 5123837 - DNA, 25 bp, Homo sapien
tactgcaagccaagtgggatacccg

SEQ ID NO: 5123838 - DNA, 25 bp, Homo sapien
tggcagtaacatggtgacgtccctc

SEQ ID NO: 5123839 - DNA, 25 bp, Homo sapien
ggaatttaaagcagccgtggtaggc

SEQ ID NO: 5123840 - DNA, 25 bp, Homo sapien
gcaaggtctttgagtccatcaccag

SEQ ID NO: 5123841 - DNA, 25 bp, Homo sapien
tctcctgcgccatcggcaaggtctt

SEQ ID NO: 5123842 - DNA, 25 bp, Homo sapien
gcggaaaatctcctgcgccatcggc

SEQ ID NO: 5123843 - DNA, 25 bp, Homo sapien
ctggatgtggtgacgagacaggcgg

SEQ ID NO: 5123844 - DNA, 25 bp, Homo sapien
tatatgggtcaagttataaatgatc

SEQ ID NO: 5123845 - DNA, 25 bp, Homo sapien
aagacaaatacgaatgtgaagtccc

SEQ ID NO: 5123846 - DNA, 25 bp, Homo sapien
taaagtatatgggtcaagttataaa

SEQ ID NO: 5123847 - DNA, 25 bp, Homo sapien
aatacgaatgtgaagtcccattcca

SEQ ID NO: 5123848 - DNA, 25 bp, Homo sapien
tcactgaaaattaagccgtactttc

SEQ ID NO: 5123849 - DNA, 25 bp, Homo sapien
ataactcggggacctatccgtctag

SEQ ID NO: 5123850 - DNA, 25 bp, Homo sapien
agatgaaacctaagaccagagattc

SEQ ID NO: 5123851 - DNA, 25 bp, Homo sapien
gaatgtggcctatattgatatccag

SEQ ID NO: 5123852 - DNA, 25 bp, Homo sapien
ctaacaggggctcttgaatgcaggt

SEQ ID NO: 5123853 - DNA, 25 bp, Homo sapien
catggattgaactaatttttttgac

SEQ ID NO: 5123854 - DNA, 25 bp, Homo sapien
aaaattgcaccacttgcacttcacc

SEQ ID NO: 5123855 - DNA, 25 bp, Homo sapien
tgaccttttgcttaaaacgttgctg

SEQ ID NO: 5123856 - DNA, 25 bp, Homo sapien
ggatggtagagtctacagcccgaga

SEQ ID NO: 5123857 - DNA, 25 bp, Homo sapien
ctagataagtaactgaattgtcttg

SEQ ID NO: 5123858 - DNA, 25 bp, Homo sapien
gtagagtctacagcccgagacccat

SEQ ID NO: 5123859 - DNA, 25 bp, Homo sapien
cttttaaagtgctggccagacgcgg

SEQ ID NO: 5123860 - DNA, 25 bp, Homo sapien
tgcctcacgtttgggcttagaaacc

SEQ ID NO: 5123861 - DNA, 25 bp, Homo sapien
tagaaacctttgtctgctgaagcag

SEQ ID NO: 5123862 - DNA, 25 bp, Homo sapien
atcaatgctgtacagagcccaccgc

SEQ ID NO: 5123863 - DNA, 25 bp, Homo sapien
gttccctcagacctaaaaagcattg

SEQ ID NO: 5123864 - DNA, 25 bp, Homo sapien
tacctctgtaccttcaggtattgcc

SEQ ID NO: 5123865 - DNA, 25 bp, Homo sapien
tgagaacaccattgatgctgacctt

SEQ ID NO: 5123866 - DNA, 25 bp, Homo sapien
gctgaccttcatgtatacctctgta

SEQ ID NO: 5123867 - DNA, 25 bp, Homo sapien
tatttaatgatcatatatacttgca

SEQ ID NO: 5123868 - DNA, 25 bp, Homo sapien
ttgagaaggtcacccaacctctgtg

SEQ ID NO: 5123869 - DNA, 25 bp, Homo sapien
gagactccttagagcctgagcctta

SEQ ID NO: 5123870 - DNA, 25 bp, Homo sapien
ggagaggcctcttggacatcaccac

SEQ ID NO: 5123871 - DNA, 25 bp, Homo sapien
tcttggaaatccagcgctagtgcca

SEQ ID NO: 5123872 - DNA, 25 bp, Homo sapien
catctcacgataacacagaggcctg

SEQ ID NO: 5123873 - DNA, 25 bp, Homo sapien
tgagaggaacacatagaccagtgca

SEQ ID NO: 5123874 - DNA, 25 bp, Homo sapien
caaaatccctgaatggaaagggcct

SEQ ID NO: 5123875 - DNA, 25 bp, Homo sapien
tgttgcacatacacaaggacaccca

SEQ ID NO: 5123876 - DNA, 25 bp, Homo sapien
gagagacactcctctctcaaggcct

SEQ ID NO: 5123877 - DNA, 25 bp, Homo sapien
ctggagagacactcctctctcaagg

SEQ ID NO: 5123878 - DNA, 25 bp, Homo sapien
gcaatgtgggtgatgttcacggaca

SEQ ID NO: 5123879 - DNA, 25 bp, Homo sapien
gggtgatgttcacggacatcaaaca

SEQ ID NO: 5123880 - DNA, 25 bp, Homo sapien
aattaagccagagtggggacgaaca

SEQ ID NO: 5123881 - DNA, 25 bp, Homo sapien
ggtgacctgctcagcggtggatgaa

SEQ ID NO: 5123882 - DNA, 25 bp, Homo sapien
gtcactctaaccagctggtgtttgg

SEQ ID NO: 5123883 - DNA, 25 bp, Homo sapien
agcctgacatctaaggccaggggtg

SEQ ID NO: 5123884 - DNA, 25 bp, Homo sapien
catagaagctgttcaccacggggat

SEQ ID NO: 5123885 - DNA, 25 bp, Homo sapien
tttgaggacaaagcccgagtctgag

SEQ ID NO: 5123886 - DNA, 25 bp, Homo sapien
tgaccttctgctgccgattacactc

SEQ ID NO: 5123887 - DNA, 25 bp, Homo sapien
tgtcctccagacatgtgcgaggtgg

SEQ ID NO: 5123888 - DNA, 25 bp, Homo sapien
gtctagcaaccaccttgggctctct

SEQ ID NO: 5123889 - DNA, 25 bp, Homo sapien
accagaaaagggcgacagtcagggc

SEQ ID NO: 5123890 - DNA, 25 bp, Homo sapien
tcataagtataagaccagaaaaggg

SEQ ID NO: 5123891 - DNA, 25 bp, Homo sapien
caaaaccagtctagcaaccaccttg

SEQ ID NO: 5123892 - DNA, 25 bp, Homo sapien
ggctctgggtgacacaacagtcaag

SEQ ID NO: 5123893 - DNA, 25 bp, Homo sapien
cagatggagagatcaccagagaggt

SEQ ID NO: 5123894 - DNA, 25 bp, Homo sapien
caacccctatcccatggagagaaag

SEQ ID NO: 5123895 - DNA, 25 bp, Homo sapien
gtaggctagggagccagctacagcc

SEQ ID NO: 5123896 - DNA, 25 bp, Homo sapien
agcagccgccgtgggctcttcttgg

SEQ ID NO: 5123897 - DNA, 25 bp, Homo sapien
acttctgtgctcccaacaaggaggc

SEQ ID NO: 5123898 - DNA, 25 bp, Homo sapien
ggaggcctgtccctttgacaccctg

SEQ ID NO: 5123899 - DNA, 25 bp, Homo sapien
ctggccaagtacagctccagggtct

SEQ ID NO: 5123900 - DNA, 25 bp, Homo sapien
tcagccatacgccttcggatgagtg

SEQ ID NO: 5123901 - DNA, 25 bp, Homo sapien
tcagatcagccatacgccttcggat

SEQ ID NO: 5123902 - DNA, 25 bp, Homo sapien
ttcggatgagtgagactgcaggtca

SEQ ID NO: 5123903 - DNA, 25 bp, Homo sapien
tacgccttcggatgagtgagactgc

SEQ ID NO: 5123904 - DNA, 25 bp, Homo sapien
ctcatgtcccatgccggtgagggta

SEQ ID NO: 5123905 - DNA, 25 bp, Homo sapien
gcagctcagcctttaagcctccatt

SEQ ID NO: 5123906 - DNA, 25 bp, Homo sapien
ggtgaagtctagctgcccctcatgt

SEQ ID NO: 5123907 - DNA, 25 bp, Homo sapien
tgccggtgagggtacttggcttccc

SEQ ID NO: 5123908 - DNA, 25 bp, Homo sapien
gcccaacagattaaggcagaattct

SEQ ID NO: 5123909 - DNA, 25 bp, Homo sapien
tcccagtgggatacactggaattca

SEQ ID NO: 5123910 - DNA, 25 bp, Homo sapien
tcatgatccattcactcccagtggg

SEQ ID NO: 5123911 - DNA, 25 bp, Homo sapien
actggaattcaacccggagactgga

SEQ ID NO: 5123912 - DNA, 25 bp, Homo sapien
tcaattaggccagaaactcatcatg

SEQ ID NO: 5123913 - DNA, 25 bp, Homo sapien
tggctgcctctacttgggaatctcc

SEQ ID NO: 5123914 - DNA, 25 bp, Homo sapien
tttccatcataaacaatggagcggg

SEQ ID NO: 5123915 - DNA, 25 bp, Homo sapien
agacactggtgcctgaaagccctgc

SEQ ID NO: 5123916 - DNA, 25 bp, Homo sapien
gggcactaaacaggtggatggtggg

SEQ ID NO: 5123917 - DNA, 25 bp, Homo sapien
actctgtcatctggggggcactaaa

SEQ ID NO: 5123918 - DNA, 25 bp, Homo sapien
gcactaaacaggtggatggtgggca

SEQ ID NO: 5123919 - DNA, 25 bp, Homo sapien
gctgtgagtactctgtcatctgggg

SEQ ID NO: 5123920 - DNA, 25 bp, Homo sapien
cctatttttaagcctggcagtttgg

SEQ ID NO: 5123921 - DNA, 25 bp, Homo sapien
tttttaagcctggcagtttggccat

SEQ ID NO: 5123922 - DNA, 25 bp, Homo sapien
tatttttaagcctggcagtttggcc

SEQ ID NO: 5123923 - DNA, 25 bp, Homo sapien
atttttaagcctggcagtttggcca

SEQ ID NO: 5123924 - DNA, 25 bp, Homo sapien
tcttaggggcgcgccgtctcctggc

SEQ ID NO: 5123925 - DNA, 25 bp, Homo sapien
cagccggggtcctctcttaggggcg

SEQ ID NO: 5123926 - DNA, 25 bp, Homo sapien
ggtcctctcttaggggcgcgccgtc

SEQ ID NO: 5123927 - DNA, 25 bp, Homo sapien
taggggcgcgccgtctcctggcttc

SEQ ID NO: 5123928 - DNA, 25 bp, Homo sapien
caaggcgttggcaggcaagtagtgc

SEQ ID NO: 5123929 - DNA, 25 bp, Homo sapien
cgttggcaggcaagtagtgcgcttc

SEQ ID NO: 5123930 - DNA, 25 bp, Homo sapien
ggcctcggagcaaggcgttggcagg

SEQ ID NO: 5123931 - DNA, 25 bp, Homo sapien
ggctgagacagcgcccagggcctcg

SEQ ID NO: 5123932 - DNA, 25 bp, Homo sapien
cacagggaccctaacagacctagtc

SEQ ID NO: 5123933 - DNA, 25 bp, Homo sapien
tgggacctacatccctgacctggag

SEQ ID NO: 5123934 - DNA, 25 bp, Homo sapien
agggcgccgacgatggtcagatacc

SEQ ID NO: 5123935 - DNA, 25 bp, Homo sapien
catgtaaaattgatgcctgggcgca

SEQ ID NO: 5123936 - DNA, 25 bp, Homo sapien
ctggcttgcactgaagggtctgggt

SEQ ID NO: 5123937 - DNA, 25 bp, Homo sapien
cttgcactgaagggtctgggtaagt

SEQ ID NO: 5123938 - DNA, 25 bp, Homo sapien
tcctggcttgcactgaagggtctgg

SEQ ID NO: 5123939 - DNA, 25 bp, Homo sapien
ggcttgcactgaagggtctgggtaa

SEQ ID NO: 5123940 - DNA, 25 bp, Homo sapien
ccttgatgatccagtatgtagcagt

SEQ ID NO: 5123941 - DNA, 25 bp, Homo sapien
tgtagcagtatatgcccagatcagg

SEQ ID NO: 5123942 - DNA, 25 bp, Homo sapien
cattgactaggtattttcctccttc

SEQ ID NO: 5123943 - DNA, 25 bp, Homo sapien
aaggtcatggctaaaccttcattga

SEQ ID NO: 5123944 - DNA, 25 bp, Homo sapien
attcaacagcttttggcacactgca

SEQ ID NO: 5123945 - DNA, 25 bp, Homo sapien
tgcatgtcccaagggtcattactga

SEQ ID NO: 5123946 - DNA, 25 bp, Homo sapien
cccaagggtcattactgacttgagg

SEQ ID NO: 5123947 - DNA, 25 bp, Homo sapien
tttggcacactgcatgtcccaaggg

SEQ ID NO: 5123948 - DNA, 25 bp, Homo sapien
aacactgctctgtgactttaactgc

SEQ ID NO: 5123949 - DNA, 25 bp, Homo sapien
cactgctctgtgactttaactgcac

SEQ ID NO: 5123950 - DNA, 25 bp, Homo sapien
ctaacaacactgctctgtgacttta

SEQ ID NO: 5123951 - DNA, 25 bp, Homo sapien
acaacactgctctgtgactttaact

SEQ ID NO: 5123952 - DNA, 25 bp, Homo sapien
ccactgcactcgaccaagagggcat

SEQ ID NO: 5123953 - DNA, 25 bp, Homo sapien
cactgcactcgaccaagagggcatt

SEQ ID NO: 5123954 - DNA, 25 bp, Homo sapien
tgaggcccaggcagaccattctgtg

SEQ ID NO: 5123955 - DNA, 25 bp, Homo sapien
aacccttgagtgactcctcatggct

SEQ ID NO: 5123956 - DNA, 25 bp, Homo sapien
tgccctgttccggaacctttgctcg

SEQ ID NO: 5123957 - DNA, 25 bp, Homo sapien
gtagtatctctggttgtgtcacggc

SEQ ID NO: 5123958 - DNA, 25 bp, Homo sapien
gtgtcacggctctgcctaaaaccct

SEQ ID NO: 5123959 - DNA, 25 bp, Homo sapien
tcccagccctcaggaggttgttgag

SEQ ID NO: 5123960 - DNA, 25 bp, Homo sapien
cccagccctcaggaggttgttgagg

SEQ ID NO: 5123961 - DNA, 25 bp, Homo sapien
agccgaaatcgcgccattgctctca

SEQ ID NO: 5123962 - DNA, 25 bp, Homo sapien
cgaaatcgcgccattgctctcaaac

SEQ ID NO: 5123963 - DNA, 25 bp, Homo sapien
tattatttcggtggcatcctggctg

SEQ ID NO: 5123964 - DNA, 25 bp, Homo sapien
atcctggctgttggcacaaaggaga

SEQ ID NO: 5123965 - DNA, 25 bp, Homo sapien
gacatgagaacttctaaggccctgg

SEQ ID NO: 5123966 - DNA, 25 bp, Homo sapien
cacaaaggagaaacaaagcccacgt

SEQ ID NO: 5123967 - DNA, 25 bp, Homo sapien
ccataaaggttggtttgtgatgcgg

SEQ ID NO: 5123968 - DNA, 25 bp, Homo sapien
ttggtttgtgatgcggcctctcttc

SEQ ID NO: 5123969 - DNA, 25 bp, Homo sapien
tcttggcttgtaaacggctgctttc

SEQ ID NO: 5123970 - DNA, 25 bp, Homo sapien
ttgtaaacggctgctttctctgtgt

SEQ ID NO: 5123971 - DNA, 25 bp, Homo sapien
atctgccacaaatggcctggggaca

SEQ ID NO: 5123972 - DNA, 25 bp, Homo sapien
tctgccacaaatggcctggggacaa

SEQ ID NO: 5123973 - DNA, 25 bp, Homo sapien
caggatctgccacaaatggcctggg

SEQ ID NO: 5123974 - DNA, 25 bp, Homo sapien
gcccaggatctgccacaaatggcct

SEQ ID NO: 5123975 - DNA, 25 bp, Homo sapien
ggggcctgctcccactgagcttgtc

SEQ ID NO: 5123976 - DNA, 25 bp, Homo sapien
cggggcctgctcccactgagcttgt

SEQ ID NO: 5123977 - DNA, 25 bp, Homo sapien
ccacacatctggggggtgggagcgg

SEQ ID NO: 5123978 - DNA, 25 bp, Homo sapien
cacatctggggggtgggagcggtgg

SEQ ID NO: 5123979 - DNA, 25 bp, Homo sapien
catctggggggtgggagcggtggcc

SEQ ID NO: 5123980 - DNA, 25 bp, Homo sapien
cacacatctggggggtgggagcggt

SEQ ID NO: 5123981 - DNA, 25 bp, Homo sapien
ggaagggctgggagcatcttctctc

SEQ ID NO: 5123982 - DNA, 25 bp, Homo sapien
ggaaggaagggctgggagcatcttc

SEQ ID NO: 5123983 - DNA, 25 bp, Homo sapien
aaggaagggctgggagcatcttctc

SEQ ID NO: 5123984 - DNA, 25 bp, Homo sapien
gaagggctgggagcatcttctctcc

SEQ ID NO: 5123985 - DNA, 25 bp, Homo sapien
ccaggtacaaggagtcctcctcagt

SEQ ID NO: 5123986 - DNA, 25 bp, Homo sapien
caggggtggcgatggctttgatgga

SEQ ID NO: 5123987 - DNA, 25 bp, Homo sapien
ggcaggggtggcgatggctttgatg

SEQ ID NO: 5123988 - DNA, 25 bp, Homo sapien
ggggtggcgatggctttgatggacc

SEQ ID NO: 5123989 - DNA, 25 bp, Homo sapien
aggcaggggtggcgatggctttgat

SEQ ID NO: 5123990 - DNA, 25 bp, Homo sapien
gtggggaaggagggacttctggaga

SEQ ID NO: 5123991 - DNA, 25 bp, Homo sapien
gaaggagggacttctggagaggcct

SEQ ID NO: 5123992 - DNA, 25 bp, Homo sapien
tgggaaatggcagcctgggatgggg

SEQ ID NO: 5123993 - DNA, 25 bp, Homo sapien
gggaaggagggacttctggagaggc

SEQ ID NO: 5123994 - DNA, 25 bp, Homo sapien
gaggtcctcatcaggtttctttgga

SEQ ID NO: 5123995 - DNA, 25 bp, Homo sapien
gatccggctcacattccaagtagag

SEQ ID NO: 5123996 - DNA, 25 bp, Homo sapien
agaggtcctcatcaggtttctttgg

SEQ ID NO: 5123997 - DNA, 25 bp, Homo sapien
aggtcctcatcaggtttctttggag

SEQ ID NO: 5123998 - DNA, 25 bp, Homo sapien
ctgagagtctgagtcaaagccagga

SEQ ID NO: 5123999 - DNA, 25 bp, Homo sapien
caggacttggaagctgagagtctga

SEQ ID NO: 5124000 - DNA, 25 bp, Homo sapien
aagctgagagtctgagtcaaagcca

SEQ ID NO: 5124001 - DNA, 25 bp, Homo sapien
aggacttggaagctgagagtctgag

SEQ ID NO: 5124002 - DNA, 25 bp, Homo sapien
caccactgatgtcctgggcagaggg

SEQ ID NO: 5124003 - DNA, 25 bp, Homo sapien
gcaccactgatgtcctgggcagagg

SEQ ID NO: 5124004 - DNA, 25 bp, Homo sapien
ctgggcaccactgatgtcctgggca

SEQ ID NO: 5124005 - DNA, 25 bp, Homo sapien
gggcaccactgatgtcctgggcaga

SEQ ID NO: 5124006 - DNA, 25 bp, Homo sapien
cgagtttcctggggggctgtggtag

SEQ ID NO: 5124007 - DNA, 25 bp, Homo sapien
attccgagtttcctggggggctgtg

SEQ ID NO: 5124008 - DNA, 25 bp, Homo sapien
ctttagaggcagcatctgctgttcc

SEQ ID NO: 5124009 - DNA, 25 bp, Homo sapien
taactcactacctttggaccagcct

SEQ ID NO: 5124010 - DNA, 25 bp, Homo sapien
tagtgagaagtggggaaagggtaga

SEQ ID NO: 5124011 - DNA, 25 bp, Homo sapien
ctgtgaacaatcagttgggataact

SEQ ID NO: 5124012 - DNA, 25 bp, Homo sapien
acaaggagtttgatctgtaactgac

SEQ ID NO: 5124013 - DNA, 25 bp, Homo sapien
tttggtgcaggcaccggaaaatgcc

SEQ ID NO: 5124014 - DNA, 25 bp, Homo sapien
actctccagatccagtgccctggca

SEQ ID NO: 5124015 - DNA, 25 bp, Homo sapien
ctcgtgtgacctccaaatgaggcgt

SEQ ID NO: 5124016 - DNA, 25 bp, Homo sapien
ttcctgatttggtgcaggcaccgga

SEQ ID NO: 5124017 - DNA, 25 bp, Homo sapien
ctagaagaagcagattattgagctg

SEQ ID NO: 5124018 - DNA, 25 bp, Homo sapien
agaagcagattattgagctggggtg

SEQ ID NO: 5124019 - DNA, 25 bp, Homo sapien
agaagaagcagattattgagctggg

SEQ ID NO: 5124020 - DNA, 25 bp, Homo sapien
aagaagcagattattgagctggggt

SEQ ID NO: 5124021 - DNA, 25 bp, Homo sapien
gctacagagggaagagacgatttcc

SEQ ID NO: 5124022 - DNA, 25 bp, Homo sapien
ctgaggcactcccagtgggggctac

SEQ ID NO: 5124023 - DNA, 25 bp, Homo sapien
gggctacagagggaagagacgattt

SEQ ID NO: 5124024 - DNA, 25 bp, Homo sapien
aggcactcccagtgggggctacaga

SEQ ID NO: 5124025 - DNA, 25 bp, Homo sapien
tgtaagtggagcagggcactctcaa

SEQ ID NO: 5124026 - DNA, 25 bp, Homo sapien
ctctcaacagcatagcggtcacagt

SEQ ID NO: 5124027 - DNA, 25 bp, Homo sapien
cacagttccccgagtaccaaggctg

SEQ ID NO: 5124028 - DNA, 25 bp, Homo sapien
cttttgtaagtggagcagggcactc

SEQ ID NO: 5124029 - DNA, 25 bp, Homo sapien
gggcatagtggcgtccgccatccag

SEQ ID NO: 5124030 - DNA, 25 bp, Homo sapien
tgggaatgttgaagacccggcctcg

SEQ ID NO: 5124031 - DNA, 25 bp, Homo sapien
ctcggagaagcactgccagggtgaa

SEQ ID NO: 5124032 - DNA, 25 bp, Homo sapien
gccatccagccgccggatgggaatg

SEQ ID NO: 5124033 - DNA, 25 bp, Homo sapien
tgagttcccggctgccgctgtgtct

SEQ ID NO: 5124034 - DNA, 25 bp, Homo sapien
accatggccgccacggaggagaaga

SEQ ID NO: 5124035 - DNA, 25 bp, Homo sapien
gctgccgctgtgtctgtccacaagg

SEQ ID NO: 5124036 - DNA, 25 bp, Homo sapien
gcagagggtgccacatgaagtgctg

SEQ ID NO: 5124037 - DNA, 25 bp, Homo sapien
tggaggccaggaagagggtgtcagc

SEQ ID NO: 5124038 - DNA, 25 bp, Homo sapien
ctggaggccaggaagagggtgtcag

SEQ ID NO: 5124039 - DNA, 25 bp, Homo sapien
cctaggcccacaagtagatgtgaga

SEQ ID NO: 5124040 - DNA, 25 bp, Homo sapien
ctgactggtctaggccaccacggtt

SEQ ID NO: 5124041 - DNA, 25 bp, Homo sapien
tcagggtgccctaggcccacaagta

SEQ ID NO: 5124042 - DNA, 25 bp, Homo sapien
ctttgctgttccagcagtgcctgtg

SEQ ID NO: 5124043 - DNA, 25 bp, Homo sapien
gctgtagcgccaatggctattcaca

SEQ ID NO: 5124044 - DNA, 25 bp, Homo sapien
tattgatgccactaagttcagactc

SEQ ID NO: 5124045 - DNA, 25 bp, Homo sapien
gactccagaacagcatagcacacta

SEQ ID NO: 5124046 - DNA, 25 bp, Homo sapien
aatctggtgatcacccactcttggg

SEQ ID NO: 5124047 - DNA, 25 bp, Homo sapien
tatctgggatgtcctgagagcagag

SEQ ID NO: 5124048 - DNA, 25 bp, Homo sapien
ttctttatctccggatcctcttggg

SEQ ID NO: 5124049 - DNA, 25 bp, Homo sapien
gtgcaaaagtggatgtaccctggga

SEQ ID NO: 5124050 - DNA, 25 bp, Homo sapien
tggatgtaccctgggaagaaaagtg

SEQ ID NO: 5124051 - DNA, 25 bp, Homo sapien
gaaacccaaggtccataatgccagt

SEQ ID NO: 5124052 - DNA, 25 bp, Homo sapien
ttgccgttgtatcaaccctgcctcg

SEQ ID NO: 5124053 - DNA, 25 bp, Homo sapien
tcttcagtgttatttggaaacccaa

SEQ ID NO: 5124054 - DNA, 25 bp, Homo sapien
tgccagtgccttcacaggctgtgta

SEQ ID NO: 5124055 - DNA, 25 bp, Homo sapien
gattggcagcttggctagactcctg

SEQ ID NO: 5124056 - DNA, 25 bp, Homo sapien
ggcccgattggcagcttggctagac

SEQ ID NO: 5124057 - DNA, 25 bp, Homo sapien
tcacacatcagttgctcttgtcttg

SEQ ID NO: 5124058 - DNA, 25 bp, Homo sapien
ctcttgtcttgtctggcgggggccc

SEQ ID NO: 5124059 - DNA, 25 bp, Homo sapien
tatggtggcatacatgtgtagttta

SEQ ID NO: 5124060 - DNA, 25 bp, Homo sapien
gtagtttagctattcggaaggctga

SEQ ID NO: 5124061 - DNA, 25 bp, Homo sapien
ggcatacatgtgtagtttagctatt

SEQ ID NO: 5124062 - DNA, 25 bp, Homo sapien
caagtatggtggcatacatgtgtag

SEQ ID NO: 5124063 - DNA, 25 bp, Homo sapien
tctgtcctggcccagaaaatacagg

SEQ ID NO: 5124064 - DNA, 25 bp, Homo sapien
tgatggcgatcaggtggtgcaggcc

SEQ ID NO: 5124065 - DNA, 25 bp, Homo sapien
tgcaggctgcccaactggattgcca

SEQ ID NO: 5124066 - DNA, 25 bp, Homo sapien
gggcagggatgatggcgatcaggtg

SEQ ID NO: 5124067 - DNA, 25 bp, Homo sapien
tctcatctaaaccttctctgactac

SEQ ID NO: 5124068 - DNA, 25 bp, Homo sapien
tcttctcatctaaaccttctctgac

SEQ ID NO: 5124069 - DNA, 25 bp, Homo sapien
ctcttctcatctaaaccttctctga

SEQ ID NO: 5124070 - DNA, 25 bp, Homo sapien
ttctcatctaaaccttctctgacta

SEQ ID NO: 5124071 - DNA, 25 bp, Homo sapien
gccaccaacactggcactgccaggc

SEQ ID NO: 5124072 - DNA, 25 bp, Homo sapien
ctactgctgccaccaacactggcac

SEQ ID NO: 5124073 - DNA, 25 bp, Homo sapien
caggcctactgctgccaccaacact

SEQ ID NO: 5124074 - DNA, 25 bp, Homo sapien
ccaacactggcactgccaggctctg

SEQ ID NO: 5124075 - DNA, 25 bp, Homo sapien
tgtgtacagactctgcgctctccct

SEQ ID NO: 5124076 - DNA, 25 bp, Homo sapien
tggtgtgtacagactctgcgctctc

SEQ ID NO: 5124077 - DNA, 25 bp, Homo sapien
gatgggtagcccttgtgggcgtggc

SEQ ID NO: 5124078 - DNA, 25 bp, Homo sapien
acagactctgcgctctccctggaat

SEQ ID NO: 5124079 - DNA, 25 bp, Homo sapien
ggacttaaaagtggaggcagcgctc

SEQ ID NO: 5124080 - DNA, 25 bp, Homo sapien
cagattaatgaaggtgctgccatcg

SEQ ID NO: 5124081 - DNA, 25 bp, Homo sapien
tcacccttcgtggttcgtggactta

SEQ ID NO: 5124082 - DNA, 25 bp, Homo sapien
cgctaaagtttctgagggatcctca

SEQ ID NO: 5124083 - DNA, 25 bp, Homo sapien
cggctcgttgccggccccgggatat

SEQ ID NO: 5124084 - DNA, 25 bp, Homo sapien
cttctagtcgtttcctggtgaatgg

SEQ ID NO: 5124085 - DNA, 25 bp, Homo sapien
cgttgccggccccgggatatctgag

SEQ ID NO: 5124086 - DNA, 25 bp, Homo sapien
ttcggcgtccctgcccggctcgttg

SEQ ID NO: 5124087 - DNA, 25 bp, Homo sapien
cttccgaccgttggccgggatagct

SEQ ID NO: 5124088 - DNA, 25 bp, Homo sapien
cgttcagctatcttgagccgctaga

SEQ ID NO: 5124089 - DNA, 25 bp, Homo sapien
tgtgcggtgacatggcacctccctt

SEQ ID NO: 5124090 - DNA, 25 bp, Homo sapien
gaaaaatgcagacgcgaggagacgt

SEQ ID NO: 5124091 - DNA, 25 bp, Homo sapien
tactcgtagcaggcgggcggcgcgg

SEQ ID NO: 5124092 - DNA, 25 bp, Homo sapien
ctactcgtagcaggcgggcggcgcg

SEQ ID NO: 5124093 - DNA, 25 bp, Homo sapien
aaatgcgcaagctgcggacagcgtt

SEQ ID NO: 5124094 - DNA, 25 bp, Homo sapien
cgaaatgcgcaagctgcggacagcg

SEQ ID NO: 5124095 - DNA, 25 bp, Homo sapien
tgcgaaatgcgcaagctgcggacag

SEQ ID NO: 5124096 - DNA, 25 bp, Homo sapien
gaaatgcgcaagctgcggacagcgt

SEQ ID NO: 5124097 - DNA, 25 bp, Homo sapien
gttggtgtcggtgtgcggaagtggc

SEQ ID NO: 5124098 - DNA, 25 bp, Homo sapien
cgaccgactctgaggtgaaaaggaa

SEQ ID NO: 5124099 - DNA, 25 bp, Homo sapien
tcgatgaacgcctcgtggaagccgt

SEQ ID NO: 5124100 - DNA, 25 bp, Homo sapien
aggaatgtgccctcctcgatgaacg

SEQ ID NO: 5124101 - DNA, 25 bp, Homo sapien
tggaagccgttgagctgtccgttca

SEQ ID NO: 5124102 - DNA, 25 bp, Homo sapien
agccagccggaccttggcgctgcct

SEQ ID NO: 5124103 - DNA, 25 bp, Homo sapien
agccggaccttggcgctgccttctg

SEQ ID NO: 5124104 - DNA, 25 bp, Homo sapien
acgcttcgcttcaggccgtcccctc

SEQ ID NO: 5124105 - DNA, 25 bp, Homo sapien
tgccccgccccacgcttcgcttcag

SEQ ID NO: 5124106 - DNA, 25 bp, Homo sapien
gccgctcttccatcacccggcggac

SEQ ID NO: 5124107 - DNA, 25 bp, Homo sapien
ggaaagcgcgcggtcgccgctcttc

SEQ ID NO: 5124108 - DNA, 25 bp, Homo sapien
ccctggcggcgccacgaggaaagcg

SEQ ID NO: 5124109 - DNA, 25 bp, Homo sapien
ttccatcacccggcggacgaggacg

SEQ ID NO: 5124110 - DNA, 25 bp, Homo sapien
tgtagtcaagacctaaccactgagg

SEQ ID NO: 5124111 - DNA, 25 bp, Homo sapien
catatccgccgaagggcatgtgcgt

SEQ ID NO: 5124112 - DNA, 25 bp, Homo sapien
cagataccacatgcggcaaacacgt

SEQ ID NO: 5124113 - DNA, 25 bp, Homo sapien
tccaggtttgtcagacggcagggcc

SEQ ID NO: 5124114 - DNA, 25 bp, Homo sapien
ccataatggcggttgagcggacaaa

SEQ ID NO: 5124115 - DNA, 25 bp, Homo sapien
ggactgccttcttggacatgagcta

SEQ ID NO: 5124116 - DNA, 25 bp, Homo sapien
taactactgcggtcatcctaagggc

SEQ ID NO: 5124117 - DNA, 25 bp, Homo sapien
tcaagtaaaaccctgcaccgaagac

SEQ ID NO: 5124118 - DNA, 25 bp, Homo sapien
tgaaggtgggcatcaaggacagcat

SEQ ID NO: 5124119 - DNA, 25 bp, Homo sapien
cagcatcactgatttggtcacaaat

SEQ ID NO: 5124120 - DNA, 25 bp, Homo sapien
cacaagctactttggcatcaggatc

SEQ ID NO: 5124121 - DNA, 25 bp, Homo sapien
tggcatcaggatcctgctgaaggtg

SEQ ID NO: 5124122 - DNA, 25 bp, Homo sapien
tgtgtttaacagcttcacgaaccac

SEQ ID NO: 5124123 - DNA, 25 bp, Homo sapien
tttaacagcttcacgaaccactttc

SEQ ID NO: 5124124 - DNA, 25 bp, Homo sapien
aacagcttcacgaaccactttctgg

SEQ ID NO: 5124125 - DNA, 25 bp, Homo sapien
cagcttcacgaaccactttctggta

SEQ ID NO: 5124126 - DNA, 25 bp, Homo sapien
cctcacagctgttacctagaaaaaa

SEQ ID NO: 5124127 - DNA, 25 bp, Homo sapien
ggattagcaggaacattctaggagt

SEQ ID NO: 5124128 - DNA, 25 bp, Homo sapien
gtttacgtcctagaaatacctgctg

SEQ ID NO: 5124129 - DNA, 25 bp, Homo sapien
tacaactggagtttaggattagcag

SEQ ID NO: 5124130 - DNA, 25 bp, Homo sapien
tatctggtgactgttgctccaaggc

SEQ ID NO: 5124131 - DNA, 25 bp, Homo sapien
aagaaaagtcaccaatgtgatcaag

SEQ ID NO: 5124132 - DNA, 25 bp, Homo sapien
ttagaatcagggcgtaaccaaggca

SEQ ID NO: 5124133 - DNA, 25 bp, Homo sapien
gagttttagaatcagggcgtaacca

SEQ ID NO: 5124134 - DNA, 25 bp, Homo sapien
tttagaatcagggcgtaaccaaggc

SEQ ID NO: 5124135 - DNA, 25 bp, Homo sapien
tatttgtttctctacctgaagttac

SEQ ID NO: 5124136 - DNA, 25 bp, Homo sapien
ttgtatttgtttctctacctgaagt

SEQ ID NO: 5124137 - DNA, 25 bp, Homo sapien
tttgtatttgtttctctacctgaag

SEQ ID NO: 5124138 - DNA, 25 bp, Homo sapien
gtatttgtttctctacctgaagtta

SEQ ID NO: 5124139 - DNA, 25 bp, Homo sapien
gactctgatgggaagcacagcacct

SEQ ID NO: 5124140 - DNA, 25 bp, Homo sapien
tatttcgcaggcacaactgctttga

SEQ ID NO: 5124141 - DNA, 25 bp, Homo sapien
gggcatccctcatttcatcaagaca

SEQ ID NO: 5124142 - DNA, 25 bp, Homo sapien
caataacaaatctgccacttggctg

SEQ ID NO: 5124143 - DNA, 25 bp, Homo sapien
ctttccaagtggattaggttgccta

SEQ ID NO: 5124144 - DNA, 25 bp, Homo sapien
ttcacatgtaggtttcagaaagcct

SEQ ID NO: 5124145 - DNA, 25 bp, Homo sapien
gttactttacgcctagtgctttcca

SEQ ID NO: 5124146 - DNA, 25 bp, Homo sapien
ttcagcaaatatcctccgatgattc

SEQ ID NO: 5124147 - DNA, 25 bp, Homo sapien
ccaaccgccataagtgtccacaatg

SEQ ID NO: 5124148 - DNA, 25 bp, Homo sapien
aagggattttgccacccaacgagca

SEQ ID NO: 5124149 - DNA, 25 bp, Homo sapien
gattttgcgtccagtcaaaccagca

SEQ ID NO: 5124150 - DNA, 25 bp, Homo sapien
agcataagcagctgaacggtcgacc

SEQ ID NO: 5124151 - DNA, 25 bp, Homo sapien
gattcaaatgtcgtaagaatcagtg

SEQ ID NO: 5124152 - DNA, 25 bp, Homo sapien
gaatcagtgattgcaaagacccata

SEQ ID NO: 5124153 - DNA, 25 bp, Homo sapien
tgtataatacgttggtataaaacaa

SEQ ID NO: 5124154 - DNA, 25 bp, Homo sapien
cgttcgttatataaagagtgtatac

SEQ ID NO: 5124155 - DNA, 25 bp, Homo sapien
tgagaggtaccataatggaaaatgg

SEQ ID NO: 5124156 - DNA, 25 bp, Homo sapien
gcggagatcgaaattcttcttcaca

SEQ ID NO: 5124157 - DNA, 25 bp, Homo sapien
cccagggcggagatcgaaattcttc

SEQ ID NO: 5124158 - DNA, 25 bp, Homo sapien
cacaatctctaatagctctctctca

SEQ ID NO: 5124159 - DNA, 25 bp, Homo sapien
caattgtcaaaaagctcacctgaga

SEQ ID NO: 5124160 - DNA, 25 bp, Homo sapien
taagccatggagcaccgtaatttta

SEQ ID NO: 5124161 - DNA, 25 bp, Homo sapien
caagagctctggcaaatgagttctc

SEQ ID NO: 5124162 - DNA, 25 bp, Homo sapien
ttctctagagtggttagcctaagcc

SEQ ID NO: 5124163 - DNA, 25 bp, Homo sapien
ataaattggcttcttcagatccaga

SEQ ID NO: 5124164 - DNA, 25 bp, Homo sapien
gataaattggcttcttcagatccag

SEQ ID NO: 5124165 - DNA, 25 bp, Homo sapien
gctgcagtcctctgataaattggct

SEQ ID NO: 5124166 - DNA, 25 bp, Homo sapien
caaagtggccataggctgcagtcct

SEQ ID NO: 5124167 - DNA, 25 bp, Homo sapien
ttaagctttttgggcacttcccatg

SEQ ID NO: 5124168 - DNA, 25 bp, Homo sapien
taagctttttgggcacttcccatgg

SEQ ID NO: 5124169 - DNA, 25 bp, Homo sapien
aagctttttgggcacttcccatggg

SEQ ID NO: 5124170 - DNA, 25 bp, Homo sapien
ttctctgtagcctacgccaacaagt

SEQ ID NO: 5124171 - DNA, 25 bp, Homo sapien
ttccctcagagcttgaaggcttctc

SEQ ID NO: 5124172 - DNA, 25 bp, Homo sapien
aaggcttctctgtagcctacgccaa

SEQ ID NO: 5124173 - DNA, 25 bp, Homo sapien
gaaggagggccctttccctcagagc

SEQ ID NO: 5124174 - DNA, 25 bp, Homo sapien
actttacgtgcacatcacaaggaca

SEQ ID NO: 5124175 - DNA, 25 bp, Homo sapien
gtactttacgtgcacatcacaagga

SEQ ID NO: 5124176 - DNA, 25 bp, Homo sapien
aagtactttacgtgcacatcacaag

SEQ ID NO: 5124177 - DNA, 25 bp, Homo sapien
ctttacgtgcacatcacaaggacat

SEQ ID NO: 5124178 - DNA, 25 bp, Homo sapien
ttagaggtggcaattaagagcataa

SEQ ID NO: 5124179 - DNA, 25 bp, Homo sapien
tagaggtggcaattaagagcataag

SEQ ID NO: 5124180 - DNA, 25 bp, Homo sapien
agaggtggcaattaagagcataagc

SEQ ID NO: 5124181 - DNA, 25 bp, Homo sapien
gttagaggtggcaattaagagcata

SEQ ID NO: 5124182 - DNA, 25 bp, Homo sapien
aaagacagctgaaagtggagagatt

SEQ ID NO: 5124183 - DNA, 25 bp, Homo sapien
aagacagctgaaagtggagagattt

SEQ ID NO: 5124184 - DNA, 25 bp, Homo sapien
tgcaacctacagaccctcaggtact

SEQ ID NO: 5124185 - DNA, 25 bp, Homo sapien
aaccatgcataggattggtttacta

SEQ ID NO: 5124186 - DNA, 25 bp, Homo sapien
ttggctagtgctgaaaccatgcata

SEQ ID NO: 5124187 - DNA, 25 bp, Homo sapien
cagtgtggagtactcaggctttctt

SEQ ID NO: 5124188 - DNA, 25 bp, Homo sapien
cagctgttcagaaagctcattggac

SEQ ID NO: 5124189 - DNA, 25 bp, Homo sapien
tacaccagctgttcagaaagctcat

SEQ ID NO: 5124190 - DNA, 25 bp, Homo sapien
ctacaccagctgttcagaaagctca

SEQ ID NO: 5124191 - DNA, 25 bp, Homo sapien
caccagctgttcagaaagctcattg

SEQ ID NO: 5124192 - DNA, 25 bp, Homo sapien
ggcttctctgtacttacgccatacc

SEQ ID NO: 5124193 - DNA, 25 bp, Homo sapien
tacgccataccccagaatacaataa

SEQ ID NO: 5124194 - DNA, 25 bp, Homo sapien
aaggaatcatggtgttgagagaaaa

SEQ ID NO: 5124195 - DNA, 25 bp, Homo sapien
taaaggaatcatggtgttgagagaa

SEQ ID NO: 5124196 - DNA, 25 bp, Homo sapien
aaaaatagatcctgaaaggcacttt

SEQ ID NO: 5124197 - DNA, 25 bp, Homo sapien
cagtcatggaataagcatgtaaaca

SEQ ID NO: 5124198 - DNA, 25 bp, Homo sapien
caagcagtcatggaataagcatgta

SEQ ID NO: 5124199 - DNA, 25 bp, Homo sapien
ggcactttctgcttagggcaagcag

SEQ ID NO: 5124200 - DNA, 25 bp, Homo sapien
tatttagatcttcattaaactgttg

SEQ ID NO: 5124201 - DNA, 25 bp, Homo sapien
tcttcattaaactgttggaattgag

SEQ ID NO: 5124202 - DNA, 25 bp, Homo sapien
tcattaaactgttggaattgagaac

SEQ ID NO: 5124203 - DNA, 25 bp, Homo sapien
tagatcttcattaaactgttggaat

SEQ ID NO: 5124204 - DNA, 25 bp, Homo sapien
tatgtgcaacacaccgcgtgagcag

SEQ ID NO: 5124205 - DNA, 25 bp, Homo sapien
tttgacttaaggtcctgcaccctgc

SEQ ID NO: 5124206 - DNA, 25 bp, Homo sapien
tgtaccacgatgaatagctaactgt

SEQ ID NO: 5124207 - DNA, 25 bp, Homo sapien
aatttgcccgaagacatacagctag

SEQ ID NO: 5124208 - DNA, 25 bp, Homo sapien
taactccgagattacaacttagagg

SEQ ID NO: 5124209 - DNA, 25 bp, Homo sapien
gcaatgtgaaactgtcctcctagga

SEQ ID NO: 5124210 - DNA, 25 bp, Homo sapien
gccaggaagaggttagacgcaatgt

SEQ ID NO: 5124211 - DNA, 25 bp, Homo sapien
caacccaagattaagaggccaggaa

SEQ ID NO: 5124212 - DNA, 25 bp, Homo sapien
ggctccttgttccgccccctgccgc

SEQ ID NO: 5124213 - DNA, 25 bp, Homo sapien
gctccttgttccgccccctgccgcc

SEQ ID NO: 5124214 - DNA, 25 bp, Homo sapien
tcccagggtggccctcagttcactt

SEQ ID NO: 5124215 - DNA, 25 bp, Homo sapien
cagcccaggccggtcagtaagtgaa

SEQ ID NO: 5124216 - DNA, 25 bp, Homo sapien
gccggtcagtaagtgaattcgccta

SEQ ID NO: 5124217 - DNA, 25 bp, Homo sapien
tgaattcgcctagtcggcttcctcc

SEQ ID NO: 5124218 - DNA, 25 bp, Homo sapien
acaggcaaccaagtatcccagaagg

SEQ ID NO: 5124219 - DNA, 25 bp, Homo sapien
tctcggaggcttcatgacaaggttt

SEQ ID NO: 5124220 - DNA, 25 bp, Homo sapien
gaggactagtcctccctggctgatg

SEQ ID NO: 5124221 - DNA, 25 bp, Homo sapien
tagtatttagctcctccccgcttga

SEQ ID NO: 5124222 - DNA, 25 bp, Homo sapien
tccctctaagccagctgccggagca

SEQ ID NO: 5124223 - DNA, 25 bp, Homo sapien
cctctaagccagctgccggagcacg

SEQ ID NO: 5124224 - DNA, 25 bp, Homo sapien
agccagctgccggagcacggccctg

SEQ ID NO: 5124225 - DNA, 25 bp, Homo sapien
tctaagccagctgccggagcacggc

SEQ ID NO: 5124226 - DNA, 25 bp, Homo sapien
gtgctggccagcagaacaccctcac

SEQ ID NO: 5124227 - DNA, 25 bp, Homo sapien
ctcactttgcaggttccgcacacga

SEQ ID NO: 5124228 - DNA, 25 bp, Homo sapien
gcaggttccgcacacgatcatttcc

SEQ ID NO: 5124229 - DNA, 25 bp, Homo sapien
cctctgtcttgttgcggagatgttc

SEQ ID NO: 5124230 - DNA, 25 bp, Homo sapien
tcttgttgcggagatgttccaagtt

SEQ ID NO: 5124231 - DNA, 25 bp, Homo sapien
tccccgctgaacacagaacttgagg

SEQ ID NO: 5124232 - DNA, 25 bp, Homo sapien
gagccaagagttcacacaggactca

SEQ ID NO: 5124233 - DNA, 25 bp, Homo sapien
gctgaacacagaacttgaggctcca

SEQ ID NO: 5124234 - DNA, 25 bp, Homo sapien
caagagccaagagttcacacaggac

SEQ ID NO: 5124235 - DNA, 25 bp, Homo sapien
gataaggacaatcatcttcacgttc

SEQ ID NO: 5124236 - DNA, 25 bp, Homo sapien
tcttccaccagaattttcgagccac

SEQ ID NO: 5124237 - DNA, 25 bp, Homo sapien
gcgatgtcgtcttgaagtgctcaga

SEQ ID NO: 5124238 - DNA, 25 bp, Homo sapien
taaaaacaatcacgcagataaggac

SEQ ID NO: 5124239 - DNA, 25 bp, Homo sapien
cacatttatggagggttgtccctga

SEQ ID NO: 5124240 - DNA, 25 bp, Homo sapien
gaccctcttggcacacatttatgga

SEQ ID NO: 5124241 - DNA, 25 bp, Homo sapien
ggaaaggagaccctcttggcacaca

SEQ ID NO: 5124242 - DNA, 25 bp, Homo sapien
catttatggagggttgtccctgaag

SEQ ID NO: 5124243 - DNA, 25 bp, Homo sapien
gaggggtaggaggaccgagcagcat

SEQ ID NO: 5124244 - DNA, 25 bp, Homo sapien
tctggggcatacaacatggcagcag

SEQ ID NO: 5124245 - DNA, 25 bp, Homo sapien
gggtaggaggaccgagcagcattct

SEQ ID NO: 5124246 - DNA, 25 bp, Homo sapien
cttctggggcatacaacatggcagc

SEQ ID NO: 5124247 - DNA, 25 bp, Homo sapien
ctaaggacccaagaaatgcagccac

SEQ ID NO: 5124248 - DNA, 25 bp, Homo sapien
tgaaaggtctttattacccactggc

SEQ ID NO: 5124249 - DNA, 25 bp, Homo sapien
gccaccaacagtttcccagccacat

SEQ ID NO: 5124250 - DNA, 25 bp, Homo sapien
ccagccacatgctgggccctctagg

SEQ ID NO: 5124251 - DNA, 25 bp, Homo sapien
tccaacaacttggacctcagatgag

SEQ ID NO: 5124252 - DNA, 25 bp, Homo sapien
tctttgcccttccaacaacttggac

SEQ ID NO: 5124253 - DNA, 25 bp, Homo sapien
tgagagaattttagccagaaggtat

SEQ ID NO: 5124254 - DNA, 25 bp, Homo sapien
gccagaaggtatcctcaggaagaaa

SEQ ID NO: 5124255 - DNA, 25 bp, Homo sapien
ccaaaatgctatgaaggttttgaac

SEQ ID NO: 5124256 - DNA, 25 bp, Homo sapien
catatgccaagactcccagaaaatt

SEQ ID NO: 5124257 - DNA, 25 bp, Homo sapien
cttgagacctgtgacaatgaatgga

SEQ ID NO: 5124258 - DNA, 25 bp, Homo sapien
tttccatatgccaagactcccagaa

SEQ ID NO: 5124259 - DNA, 25 bp, Homo sapien
gcggagcggccgcagtgccagcggc

SEQ ID NO: 5124260 - DNA, 25 bp, Homo sapien
cggagcggccgcagtgccagcggcc

SEQ ID NO: 5124261 - DNA, 25 bp, Homo sapien
gagcggccgcagtgccagcggcccc

SEQ ID NO: 5124262 - DNA, 25 bp, Homo sapien
ggagcggccgcagtgccagcggccc

SEQ ID NO: 5124263 - DNA, 25 bp, Homo sapien
gcctcgcccgctcccggcttctctg

SEQ ID NO: 5124264 - DNA, 25 bp, Homo sapien
gccgcctcgcccgctcccggcttct

SEQ ID NO: 5124265 - DNA, 25 bp, Homo sapien
cgcctcgcccgctcccggcttctct

SEQ ID NO: 5124266 - DNA, 25 bp, Homo sapien
ccgccgcctcgcccgctcccggctt

SEQ ID NO: 5124267 - DNA, 25 bp, Homo sapien
ccctctgcccgtcgcagggctggcc

SEQ ID NO: 5124268 - DNA, 25 bp, Homo sapien
ctctgcccgtcgcagggctggccgg

SEQ ID NO: 5124269 - DNA, 25 bp, Homo sapien
cctctgcccgtcgcagggctggccg

SEQ ID NO: 5124270 - DNA, 25 bp, Homo sapien
ggcgtctacccaatcaatgcacagc

SEQ ID NO: 5124271 - DNA, 25 bp, Homo sapien
caatcaatgcacagctgccctaagg

SEQ ID NO: 5124272 - DNA, 25 bp, Homo sapien
ctgctccagaatggcgtctacccaa

SEQ ID NO: 5124273 - DNA, 25 bp, Homo sapien
agctgccctaaggtttcccactggc

SEQ ID NO: 5124274 - DNA, 25 bp, Homo sapien
gcccctgagatctagaagcctcctt

SEQ ID NO: 5124275 - DNA, 25 bp, Homo sapien
cttctccccctgtaggtgggtacag

SEQ ID NO: 5124276 - DNA, 25 bp, Homo sapien
tcatctgcccctgagatctagaagc

SEQ ID NO: 5124277 - DNA, 25 bp, Homo sapien
ccccctgtaggtgggtacagcatga

SEQ ID NO: 5124278 - DNA, 25 bp, Homo sapien
ctggacaccaagcccgaggtcaggg

SEQ ID NO: 5124279 - DNA, 25 bp, Homo sapien
tgctggcaccgctccaactctattc

SEQ ID NO: 5124280 - DNA, 25 bp, Homo sapien
tgctgcagttcggccagcttcacac

SEQ ID NO: 5124281 - DNA, 25 bp, Homo sapien
caggaccttgccgaagttgttacgc

SEQ ID NO: 5124282 - DNA, 25 bp, Homo sapien
taatttccgtcacctcgttcgcctg

SEQ ID NO: 5124283 - DNA, 25 bp, Homo sapien
ctgagggagaaagacgaccagcagc

SEQ ID NO: 5124284 - DNA, 25 bp, Homo sapien
tccgtggggcactactgctgtcact

SEQ ID NO: 5124285 - DNA, 25 bp, Homo sapien
atccggtaacggatgttctcccagc

SEQ ID NO: 5124286 - DNA, 25 bp, Homo sapien
ccaggttctgtgtagtcttgttgaa

SEQ ID NO: 5124287 - DNA, 25 bp, Homo sapien
aaacagcagtttttactgagctcca

SEQ ID NO: 5124288 - DNA, 25 bp, Homo sapien
caaacagcagtttttactgagctcc

SEQ ID NO: 5124289 - DNA, 25 bp, Homo sapien
tggagaccagaatcggccagtgcag

SEQ ID NO: 5124290 - DNA, 25 bp, Homo sapien
caaggtcctctggagaccagaatcg

SEQ ID NO: 5124291 - DNA, 25 bp, Homo sapien
gctcgttaaacagcacggaaagcgg

SEQ ID NO: 5124292 - DNA, 25 bp, Homo sapien
tcggagccaagactgaattcccggg

SEQ ID NO: 5124293 - DNA, 25 bp, Homo sapien
gctcagagggcttcgacagtacaga

SEQ ID NO: 5124294 - DNA, 25 bp, Homo sapien
caggtgaccagagactaacgccaat

SEQ ID NO: 5124295 - DNA, 25 bp, Homo sapien
ggctgcccagccttctgacacagcc

SEQ ID NO: 5124296 - DNA, 25 bp, Homo sapien
agccctcggaccctgctcgatagcg

SEQ ID NO: 5124297 - DNA, 25 bp, Homo sapien
acacagccctcggaccctgctcgat

SEQ ID NO: 5124298 - DNA, 25 bp, Homo sapien
ctgcccagccttctgacacagccct

SEQ ID NO: 5124299 - DNA, 25 bp, Homo sapien
ctcagggtccgacggctcgcagtcg

SEQ ID NO: 5124300 - DNA, 25 bp, Homo sapien
cagggtccgacggctcgcagtcgtg

SEQ ID NO: 5124301 - DNA, 25 bp, Homo sapien
ctgctcagggtccgacggctcgcag

SEQ ID NO: 5124302 - DNA, 25 bp, Homo sapien
tgctcagggtccgacggctcgcagt

SEQ ID NO: 5124303 - DNA, 25 bp, Homo sapien
ggtggtggtcccaatctactaccaa

SEQ ID NO: 5124304 - DNA, 25 bp, Homo sapien
atctactaccaaccccaagtcttca

SEQ ID NO: 5124305 - DNA, 25 bp, Homo sapien
gcaggtggtggtcccaatctactac

SEQ ID NO: 5124306 - DNA, 25 bp, Homo sapien
gaggcaggtggtggtcccaatctac

SEQ ID NO: 5124307 - DNA, 25 bp, Homo sapien
ggtctggcccaaatagcagaaagaa

SEQ ID NO: 5124308 - DNA, 25 bp, Homo sapien
gtgggtctggcccaaatagcagaaa

SEQ ID NO: 5124309 - DNA, 25 bp, Homo sapien
ctggcccaaatagcagaaagaatca

SEQ ID NO: 5124310 - DNA, 25 bp, Homo sapien
tgggtctggcccaaatagcagaaag

SEQ ID NO: 5124311 - DNA, 25 bp, Homo sapien
ctgatcaggagagctgctacaggct

SEQ ID NO: 5124312 - DNA, 25 bp, Homo sapien
caggagagctgctacaggctctgcc

SEQ ID NO: 5124313 - DNA, 25 bp, Homo sapien
tcaggagagctgctacaggctctgc

SEQ ID NO: 5124314 - DNA, 25 bp, Homo sapien
gatcaggagagctgctacaggctct

SEQ ID NO: 5124315 - DNA, 25 bp, Homo sapien
aattccaaaagacacacggggcact

SEQ ID NO: 5124316 - DNA, 25 bp, Homo sapien
caaattccaaaagacacacggggca

SEQ ID NO: 5124317 - DNA, 25 bp, Homo sapien
ttccaaaagacacacggggcacttg

SEQ ID NO: 5124318 - DNA, 25 bp, Homo sapien
ctcaaattccaaaagacacacgggg

SEQ ID NO: 5124319 - DNA, 25 bp, Homo sapien
ggtgatggcaaggcatctcaatggc

SEQ ID NO: 5124320 - DNA, 25 bp, Homo sapien
tgatggcaaggcatctcaatggcag

SEQ ID NO: 5124321 - DNA, 25 bp, Homo sapien
cagctggaatggaaaaggtgatggc

SEQ ID NO: 5124322 - DNA, 25 bp, Homo sapien
aatgcagctggaatggaaaaggtga

SEQ ID NO: 5124323 - DNA, 25 bp, Homo sapien
aagcttgagtactgggcccagggca

SEQ ID NO: 5124324 - DNA, 25 bp, Homo sapien
tagtgttctagccttggtctgatct

SEQ ID NO: 5124325 - DNA, 25 bp, Homo sapien
gatcttcataagctgataaccaccc

SEQ ID NO: 5124326 - DNA, 25 bp, Homo sapien
aacagaaagaagcttgagtactggg

SEQ ID NO: 5124327 - DNA, 25 bp, Homo sapien
agcggcacaagggacaggaatttgt

SEQ ID NO: 5124328 - DNA, 25 bp, Homo sapien
agtgggcagctcatagcggcacaag

SEQ ID NO: 5124329 - DNA, 25 bp, Homo sapien
catcagtgggcagctcatagcggca

SEQ ID NO: 5124330 - DNA, 25 bp, Homo sapien
agctcatagcggcacaagggacagg

SEQ ID NO: 5124331 - DNA, 25 bp, Homo sapien
cagggattctgaggcctacccagtc

SEQ ID NO: 5124332 - DNA, 25 bp, Homo sapien
gctgaggctctcaccacaaatcaaa

SEQ ID NO: 5124333 - DNA, 25 bp, Homo sapien
aggcctctggcgtctgcattgctga

SEQ ID NO: 5124334 - DNA, 25 bp, Homo sapien
gccaaaactgaaggcctatgggtga

SEQ ID NO: 5124335 - DNA, 25 bp, Homo sapien
ggctccatggaggttctccagtcgg

SEQ ID NO: 5124336 - DNA, 25 bp, Homo sapien
tggaggttctccagtcggtgttgct

SEQ ID NO: 5124337 - DNA, 25 bp, Homo sapien
catggaggttctccagtcggtgttg

SEQ ID NO: 5124338 - DNA, 25 bp, Homo sapien
acatggctccatggaggttctccag

SEQ ID NO: 5124339 - DNA, 25 bp, Homo sapien
aatgaggattcaaggttaataagga

SEQ ID NO: 5124340 - DNA, 25 bp, Homo sapien
ggttaataaggaagacgcagagggc

SEQ ID NO: 5124341 - DNA, 25 bp, Homo sapien
taaagaaacctttaatgaggattca

SEQ ID NO: 5124342 - DNA, 25 bp, Homo sapien
ggaagacgcagagggccagcactca

SEQ ID NO: 5124343 - DNA, 25 bp, Homo sapien
taattaactgggtaccagaccctga

SEQ ID NO: 5124344 - DNA, 25 bp, Homo sapien
taccactgccatgagtccagatggg

SEQ ID NO: 5124345 - DNA, 25 bp, Homo sapien
ttccccaacagaagtagagacctga

SEQ ID NO: 5124346 - DNA, 25 bp, Homo sapien
gcctggtgccttctgcgatttagga

SEQ ID NO: 5124347 - DNA, 25 bp, Homo sapien
ggcttgaaacccttctgggcctcta

SEQ ID NO: 5124348 - DNA, 25 bp, Homo sapien
gaactaacttggtctgataatctca

SEQ ID NO: 5124349 - DNA, 25 bp, Homo sapien
ggctttccataagccaaggatggga

SEQ ID NO: 5124350 - DNA, 25 bp, Homo sapien
tgagtgcactctgttgccagaaaca

SEQ ID NO: 5124351 - DNA, 25 bp, Homo sapien
cgttggccggtgcaggctgcaaaat

SEQ ID NO: 5124352 - DNA, 25 bp, Homo sapien
atgtgcacggcgacaatcccaggta

SEQ ID NO: 5124353 - DNA, 25 bp, Homo sapien
tcatctcggttttagagcggtcttc

SEQ ID NO: 5124354 - DNA, 25 bp, Homo sapien
ctgctgacgcttccccggcaggaat

SEQ ID NO: 5124355 - DNA, 25 bp, Homo sapien
tgagccacaggaaccataagccaaa

SEQ ID NO: 5124356 - DNA, 25 bp, Homo sapien
ctcctccggagtttgctgagccaca

SEQ ID NO: 5124357 - DNA, 25 bp, Homo sapien
cagtcgggaaacacgtcttggacac

SEQ ID NO: 5124358 - DNA, 25 bp, Homo sapien
ggcgccacgttgagagagcttccta

SEQ ID NO: 5124359 - DNA, 25 bp, Homo sapien
gaggaatcagatggtcatacagcca

SEQ ID NO: 5124360 - DNA, 25 bp, Homo sapien
gcccttctgtcatacggagctccat

SEQ ID NO: 5124361 - DNA, 25 bp, Homo sapien
ctaaagtcattccaccaccgagtca

SEQ ID NO: 5124362 - DNA, 25 bp, Homo sapien
tggaacataacaactagacagactc

SEQ ID NO: 5124363 - DNA, 25 bp, Homo sapien
caagtctggctttttagtctggaaa

SEQ ID NO: 5124364 - DNA, 25 bp, Homo sapien
tgaggtctgttttcgcacagctgga

SEQ ID NO: 5124365 - DNA, 25 bp, Homo sapien
cataggatttcactgcaagtctggc

SEQ ID NO: 5124366 - DNA, 25 bp, Homo sapien
ggaccagaatgctccagacctacag

SEQ ID NO: 5124367 - DNA, 25 bp, Homo sapien
tctgataccaataaagtgggagacc

SEQ ID NO: 5124368 - DNA, 25 bp, Homo sapien
tatgaagcctcgtgcaacatggtgc

SEQ ID NO: 5124369 - DNA, 25 bp, Homo sapien
ttttgcctcaggtagaatccatcag

SEQ ID NO: 5124370 - DNA, 25 bp, Homo sapien
tttctcaccgaggtcatatgcctgg

SEQ ID NO: 5124371 - DNA, 25 bp, Homo sapien
ctccactaccggccgagtcgtccag

SEQ ID NO: 5124372 - DNA, 25 bp, Homo sapien
actcccgcttagaccggccggacat

SEQ ID NO: 5124373 - DNA, 25 bp, Homo sapien
ttcccgcgagtggaaccgcgagact

SEQ ID NO: 5124374 - DNA, 25 bp, Homo sapien
gctcccgcttgacgcgaccggagct

SEQ ID NO: 5124375 - DNA, 25 bp, Homo sapien
tcagactctcgcttcccgcgagtgg

SEQ ID NO: 5124376 - DNA, 25 bp, Homo sapien
ccgcacaaacgggacaacagaagcc

SEQ ID NO: 5124377 - DNA, 25 bp, Homo sapien
ttcacccgcacaaacgggacaacag

SEQ ID NO: 5124378 - DNA, 25 bp, Homo sapien
cgcttcacccgcacaaacgggacaa

SEQ ID NO: 5124379 - DNA, 25 bp, Homo sapien
gcacaaacgggacaacagaagccgg

SEQ ID NO: 5124380 - DNA, 25 bp, Homo sapien
ctcccgctcaggctccgagtcctca

SEQ ID NO: 5124381 - DNA, 25 bp, Homo sapien
cccgctcaggctccgagtcctcatc

SEQ ID NO: 5124382 - DNA, 25 bp, Homo sapien
cgctcaggctccgagtcctcatcga

SEQ ID NO: 5124383 - DNA, 25 bp, Homo sapien
gctcaggctccgagtcctcatcgac

SEQ ID NO: 5124384 - DNA, 25 bp, Homo sapien
aatgggaaacctatactcagggcca

SEQ ID NO: 5124385 - DNA, 25 bp, Homo sapien
atgggaaacctatactcagggccaa

SEQ ID NO: 5124386 - DNA, 25 bp, Homo sapien
tgaaaatgggaaacctatactcagg

SEQ ID NO: 5124387 - DNA, 25 bp, Homo sapien
tttgaaaatgggaaacctatactca

SEQ ID NO: 5124388 - DNA, 25 bp, Homo sapien
tcctcagaatccactcggccattct

SEQ ID NO: 5124389 - DNA, 25 bp, Homo sapien
aatggtgtccaggtacgggcagtgg

SEQ ID NO: 5124390 - DNA, 25 bp, Homo sapien
ttaatggtgtccaggtacgggcagt

SEQ ID NO: 5124391 - DNA, 25 bp, Homo sapien
gtccaggtacgggcagtggcggctc

SEQ ID NO: 5124392 - DNA, 25 bp, Homo sapien
ccagacaggcataagcattgatgtg

SEQ ID NO: 5124393 - DNA, 25 bp, Homo sapien
tgccacacaccagacaggcataagc

SEQ ID NO: 5124394 - DNA, 25 bp, Homo sapien
cataagcattgatgtgtgagaggga

SEQ ID NO: 5124395 - DNA, 25 bp, Homo sapien
tgtgagagggagatagaacacagtt

SEQ ID NO: 5124396 - DNA, 25 bp, Homo sapien
gaatgtaggcgtgagacttcaaacc

SEQ ID NO: 5124397 - DNA, 25 bp, Homo sapien
aactggacactgtgaatgtaggcgt

SEQ ID NO: 5124398 - DNA, 25 bp, Homo sapien
cactgtgaatgtaggcgtgagactt

SEQ ID NO: 5124399 - DNA, 25 bp, Homo sapien
tgtaggcgtgagacttcaaaccccg

SEQ ID NO: 5124400 - DNA, 25 bp, Homo sapien
ctggaaggcagtaaaacttgagggt

SEQ ID NO: 5124401 - DNA, 25 bp, Homo sapien
caatgaggaatcgatgatctcatag

SEQ ID NO: 5124402 - DNA, 25 bp, Homo sapien
gaggaatcgatgatctcatagttgt

SEQ ID NO: 5124403 - DNA, 25 bp, Homo sapien
tccaatgaggaatcgatgatctcat

SEQ ID NO: 5124404 - DNA, 25 bp, Homo sapien
tcctccaatgaggaatcgatgatct

SEQ ID NO: 5124405 - DNA, 25 bp, Homo sapien
tatgcccgggacaatttggcttgct

SEQ ID NO: 5124406 - DNA, 25 bp, Homo sapien
agtcccacaatacccggcaggtaag

SEQ ID NO: 5124407 - DNA, 25 bp, Homo sapien
taagtggtaccatcatatgcccggg

SEQ ID NO: 5124408 - DNA, 25 bp, Homo sapien
gaaggacagcgttggcataatcatt

SEQ ID NO: 5124409 - DNA, 25 bp, Homo sapien
tccagaaagtagttccggagaggag

SEQ ID NO: 5124410 - DNA, 25 bp, Homo sapien
caagaacatgatatcccctggagga

SEQ ID NO: 5124411 - DNA, 25 bp, Homo sapien
tctccaaaacgctggaccaacaaga

SEQ ID NO: 5124412 - DNA, 25 bp, Homo sapien
gacacatgtgccttgaaatttcgag

SEQ ID NO: 5124413 - DNA, 25 bp, Homo sapien
gcattcagaaaccaagacagaaagt

SEQ ID NO: 5124414 - DNA, 25 bp, Homo sapien
ctttgtgccccccagagctgagtgc

SEQ ID NO: 5124415 - DNA, 25 bp, Homo sapien
cagagctgagtgcagagcattcaga

SEQ ID NO: 5124416 - DNA, 25 bp, Homo sapien
gagctgagtgcagagcattcagaaa

SEQ ID NO: 5124417 - DNA, 25 bp, Homo sapien
tggggaagctttttagtgaagatcc

SEQ ID NO: 5124418 - DNA, 25 bp, Homo sapien
gggaagctttttagtgaagatcctc

SEQ ID NO: 5124419 - DNA, 25 bp, Homo sapien
tttagtgaagatcctcatggacccc

SEQ ID NO: 5124420 - DNA, 25 bp, Homo sapien
tttttagtgaagatcctcatggacc

SEQ ID NO: 5124421 - DNA, 25 bp, Homo sapien
tcaggtacataaaagtggactccac

SEQ ID NO: 5124422 - DNA, 25 bp, Homo sapien
cagtaggaaggtccagcgtcaggta

SEQ ID NO: 5124423 - DNA, 25 bp, Homo sapien
gtgatgccattgaacttagccagga

SEQ ID NO: 5124424 - DNA, 25 bp, Homo sapien
tcctggtactcgtcattatggagca

SEQ ID NO: 5124425 - DNA, 25 bp, Homo sapien
gaagcgcttcagaaagttctccttg

SEQ ID NO: 5124426 - DNA, 25 bp, Homo sapien
aagctggaagcgcttcagaaagttc

SEQ ID NO: 5124427 - DNA, 25 bp, Homo sapien
tcagaaagttctccttgtaagtctt

SEQ ID NO: 5124428 - DNA, 25 bp, Homo sapien
caaaagattagatatggaggcaact

SEQ ID NO: 5124429 - DNA, 25 bp, Homo sapien
taagatgttacacctggacaaaccc

SEQ ID NO: 5124430 - DNA, 25 bp, Homo sapien
tggcaattcacaagaggctagtgct

SEQ ID NO: 5124431 - DNA, 25 bp, Homo sapien
cacgcaaactatgggtctgaggtcc

SEQ ID NO: 5124432 - DNA, 25 bp, Homo sapien
tgtcatcctactcaaggaggcagag

SEQ ID NO: 5124433 - DNA, 25 bp, Homo sapien
gagaatggctaattacctgaaagtg

SEQ ID NO: 5124434 - DNA, 25 bp, Homo sapien
aactctccgacaaaaacaggatgtg

SEQ ID NO: 5124435 - DNA, 25 bp, Homo sapien
tatctccaaataagcagagggtgcc

SEQ ID NO: 5124436 - DNA, 25 bp, Homo sapien
caccataagtctgataactctccga

SEQ ID NO: 5124437 - DNA, 25 bp, Homo sapien
ataaagccggaataatcagacaaag

SEQ ID NO: 5124438 - DNA, 25 bp, Homo sapien
ttaaaataaagccggaataatcaga

SEQ ID NO: 5124439 - DNA, 25 bp, Homo sapien
taaagccggaataatcagacaaagg

SEQ ID NO: 5124440 - DNA, 25 bp, Homo sapien
aaataaagccggaataatcagacaa

SEQ ID NO: 5124441 - DNA, 25 bp, Homo sapien
cagacaagtattctctcagatccac

SEQ ID NO: 5124442 - DNA, 25 bp, Homo sapien
caagtattctctcagatccacattt

SEQ ID NO: 5124443 - DNA, 25 bp, Homo sapien
gacaagtattctctcagatccacat

SEQ ID NO: 5124444 - DNA, 25 bp, Homo sapien
tcagacaagtattctctcagatcca

SEQ ID NO: 5124445 - DNA, 25 bp, Homo sapien
gcacgatgttggcaatgaggtcata

SEQ ID NO: 5124446 - DNA, 25 bp, Homo sapien
tggtattcttgtgtactgcttgtac

SEQ ID NO: 5124447 - DNA, 25 bp, Homo sapien
cctcggagggcttgccgtcatgcac

SEQ ID NO: 5124448 - DNA, 25 bp, Homo sapien
aagcacgtggatccggtaggagccc

SEQ ID NO: 5124449 - DNA, 25 bp, Homo sapien
gcactattacttgcagagtcccaaa

SEQ ID NO: 5124450 - DNA, 25 bp, Homo sapien
tttgccactctgtgccatgagacgg

SEQ ID NO: 5124451 - DNA, 25 bp, Homo sapien
tgccatgagacggtcagcagccact

SEQ ID NO: 5124452 - DNA, 25 bp, Homo sapien
ctattacttgcagagtcccaaagcc

SEQ ID NO: 5124453 - DNA, 25 bp, Homo sapien
ccagcatgagcatcatagcacaacc

SEQ ID NO: 5124454 - DNA, 25 bp, Homo sapien
cagcatgagcatcatagcacaaccc

SEQ ID NO: 5124455 - DNA, 25 bp, Homo sapien
accagcatgagcatcatagcacaac

SEQ ID NO: 5124456 - DNA, 25 bp, Homo sapien
gcatgagcatcatagcacaacccca

SEQ ID NO: 5124457 - DNA, 25 bp, Homo sapien
gatggtaaggctctagtctagggca

SEQ ID NO: 5124458 - DNA, 25 bp, Homo sapien
caagactgatgctgatgttattggt

SEQ ID NO: 5124459 - DNA, 25 bp, Homo sapien
ccttggctgcatatcagggtctctc

SEQ ID NO: 5124460 - DNA, 25 bp, Homo sapien
cagagggtcacgttaaaatccaggt

SEQ ID NO: 5124461 - DNA, 25 bp, Homo sapien
gagggtacatgacttcttctggcca

SEQ ID NO: 5124462 - DNA, 25 bp, Homo sapien
tgcgcctggccccttgaagtacaat

SEQ ID NO: 5124463 - DNA, 25 bp, Homo sapien
tcatggcaaactcaattcctgttgg

SEQ ID NO: 5124464 - DNA, 25 bp, Homo sapien
gaagaacagccactagacatcatcc

SEQ ID NO: 5124465 - DNA, 25 bp, Homo sapien
gtaattcataccatttgcctgtccc

SEQ ID NO: 5124466 - DNA, 25 bp, Homo sapien
acctggaggtcttgtaattcatacc

SEQ ID NO: 5124467 - DNA, 25 bp, Homo sapien
gaggtcttgtaattcataccatttg

SEQ ID NO: 5124468 - DNA, 25 bp, Homo sapien
cctctgacagtgtgatcatctgggg

SEQ ID NO: 5124469 - DNA, 25 bp, Homo sapien
gtttcatcattatctcgcctcttcc

SEQ ID NO: 5124470 - DNA, 25 bp, Homo sapien
ttcatcattatctcgcctcttccaa

SEQ ID NO: 5124471 - DNA, 25 bp, Homo sapien
tcatcattatctcgcctcttccaaa

SEQ ID NO: 5124472 - DNA, 25 bp, Homo sapien
tggtttcatcattatctcgcctctt

SEQ ID NO: 5124473 - DNA, 25 bp, Homo sapien
ccttgggagcaaagccctagacgcc

SEQ ID NO: 5124474 - DNA, 25 bp, Homo sapien
gggagcaaagccctagacgcctcct

SEQ ID NO: 5124475 - DNA, 25 bp, Homo sapien
ttgggagcaaagccctagacgcctc

SEQ ID NO: 5124476 - DNA, 25 bp, Homo sapien
cttgggagcaaagccctagacgcct

SEQ ID NO: 5124477 - DNA, 25 bp, Homo sapien
aaaaaatgatcaaagaacagctgag

SEQ ID NO: 5124478 - DNA, 25 bp, Homo sapien
ctcttggtgctctggtgtagccaga

SEQ ID NO: 5124479 - DNA, 25 bp, Homo sapien
tagccagaacccatacaagctgggc

SEQ ID NO: 5124480 - DNA, 25 bp, Homo sapien
aatgatcaaagaacagctgagtgac

SEQ ID NO: 5124481 - DNA, 25 bp, Homo sapien
tcaagacataagttacacacatctg

SEQ ID NO: 5124482 - DNA, 25 bp, Homo sapien
ctagatgggagctcaatgcatggga

SEQ ID NO: 5124483 - DNA, 25 bp, Homo sapien
tgctccaagaatcccaaggcttgat

SEQ ID NO: 5124484 - DNA, 25 bp, Homo sapien
taacagagcgaagttactggctttc

SEQ ID NO: 5124485 - DNA, 25 bp, Homo sapien
tttcctcagccaaccaccaaaggaa

SEQ ID NO: 5124486 - DNA, 25 bp, Homo sapien
agggtagagagtttgtgaagattaa

SEQ ID NO: 5124487 - DNA, 25 bp, Homo sapien
ggtagagagtttgtgaagattaaaa

SEQ ID NO: 5124488 - DNA, 25 bp, Homo sapien
ggaaaatattttcctcagccaacca

SEQ ID NO: 5124489 - DNA, 25 bp, Homo sapien
tatcccaaacctacaagaactaatg

SEQ ID NO: 5124490 - DNA, 25 bp, Homo sapien
gactctttttggactcagcccacct

SEQ ID NO: 5124491 - DNA, 25 bp, Homo sapien
aaaattgctcctaactccaccgcct

SEQ ID NO: 5124492 - DNA, 25 bp, Homo sapien
cgcctatcccaaacctacaagaact

SEQ ID NO: 5124493 - DNA, 25 bp, Homo sapien
tcactgggatgaggttaggtcatga

SEQ ID NO: 5124494 - DNA, 25 bp, Homo sapien
gaagcagacgtccatagctcctctc

SEQ ID NO: 5124495 - DNA, 25 bp, Homo sapien
ctcccagtctctactcactgggatg

SEQ ID NO: 5124496 - DNA, 25 bp, Homo sapien
tgaagtcagcgggcccaggcctacc

SEQ ID NO: 5124497 - DNA, 25 bp, Homo sapien
tcagcaattccccagcgtagtcaag

SEQ ID NO: 5124498 - DNA, 25 bp, Homo sapien
gttgtgcaagctagggacccattcc

SEQ ID NO: 5124499 - DNA, 25 bp, Homo sapien
gctcaaccacagtctgacaccagag

SEQ ID NO: 5124500 - DNA, 25 bp, Homo sapien
tggcgaccgggcaagctttcttcct

SEQ ID NO: 5124501 - DNA, 25 bp, Homo sapien
ttttgtatgtcatctcccccgtgtc

SEQ ID NO: 5124502 - DNA, 25 bp, Homo sapien
gagatgcctttcacaccctgtttta

SEQ ID NO: 5124503 - DNA, 25 bp, Homo sapien
ccccgtgtcactgggtttaccacag

SEQ ID NO: 5124504 - DNA, 25 bp, Homo sapien
ctgagatgcctttcacaccctgttt

SEQ ID NO: 5124505 - DNA, 25 bp, Homo sapien
ttgcccaggagcatggctgcaagga

SEQ ID NO: 5124506 - DNA, 25 bp, Homo sapien
ccaggagcatggctgcaaggagcag

SEQ ID NO: 5124507 - DNA, 25 bp, Homo sapien
ggttgcccaggagcatggctgcaag

SEQ ID NO: 5124508 - DNA, 25 bp, Homo sapien
ctgggttgcccaggagcatggctgc

SEQ ID NO: 5124509 - DNA, 25 bp, Homo sapien
tgggtgggccatcaggatcgatccc

SEQ ID NO: 5124510 - DNA, 25 bp, Homo sapien
tgggccatcaggatcgatcccgagg

SEQ ID NO: 5124511 - DNA, 25 bp, Homo sapien
gccaggcctccatgacgggggagaa

SEQ ID NO: 5124512 - DNA, 25 bp, Homo sapien
aggccaggcctccatgacgggggag

SEQ ID NO: 5124513 - DNA, 25 bp, Homo sapien
tggccagtagagttaggaccagaat

SEQ ID NO: 5124514 - DNA, 25 bp, Homo sapien
tgtggccagtagagttaggaccaga

SEQ ID NO: 5124515 - DNA, 25 bp, Homo sapien
gtggccagtagagttaggaccagaa

SEQ ID NO: 5124516 - DNA, 25 bp, Homo sapien
gtgtggccagtagagttaggaccag

SEQ ID NO: 5124517 - DNA, 25 bp, Homo sapien
ctagacagtgtaggcccgaggaaac

SEQ ID NO: 5124518 - DNA, 25 bp, Homo sapien
gccaatggccttcaccacgcagatg

SEQ ID NO: 5124519 - DNA, 25 bp, Homo sapien
cagatccaccgatgagggccaatgg

SEQ ID NO: 5124520 - DNA, 25 bp, Homo sapien
gccccgcacaatcctagacagtgta

SEQ ID NO: 5124521 - DNA, 25 bp, Homo sapien
ttgaacacagaagagatcttgttct

SEQ ID NO: 5124522 - DNA, 25 bp, Homo sapien
gggggcaggaagtctgccttgaaca

SEQ ID NO: 5124523 - DNA, 25 bp, Homo sapien
ggcaggaagtctgccttgaacacag

SEQ ID NO: 5124524 - DNA, 25 bp, Homo sapien
tgaacacagaagagatcttgttctc

SEQ ID NO: 5124525 - DNA, 25 bp, Homo sapien
cttccagaagtgttcttgcccttgg

SEQ ID NO: 5124526 - DNA, 25 bp, Homo sapien
tcccttccagaagtgttcttgccct

SEQ ID NO: 5124527 - DNA, 25 bp, Homo sapien
tctcccttccagaagtgttcttgcc

SEQ ID NO: 5124528 - DNA, 25 bp, Homo sapien
cactctcccttccagaagtgttctt

SEQ ID NO: 5124529 - DNA, 25 bp, Homo sapien
tgttctcacgttccttctagaaagc

SEQ ID NO: 5124530 - DNA, 25 bp, Homo sapien
tcaatctcctttcaagggattttct

SEQ ID NO: 5124531 - DNA, 25 bp, Homo sapien
gctttgccctggagccgctctgacc

SEQ ID NO: 5124532 - DNA, 25 bp, Homo sapien
tgtctagaaacttccctcaatctcc

SEQ ID NO: 5124533 - DNA, 25 bp, Homo sapien
gagagggaaagcccgttctcctggc

SEQ ID NO: 5124534 - DNA, 25 bp, Homo sapien
ggctcttgccaggtcgtagtactca

SEQ ID NO: 5124535 - DNA, 25 bp, Homo sapien
ctcctcatcacgcaggtgggctctt

SEQ ID NO: 5124536 - DNA, 25 bp, Homo sapien
tttctcctcatcacgcaggtgggct

SEQ ID NO: 5124537 - DNA, 25 bp, Homo sapien
gccaggtcgtagtactcagggctca

SEQ ID NO: 5124538 - DNA, 25 bp, Homo sapien
ccagctcctgtgttttggtcaacag

SEQ ID NO: 5124539 - DNA, 25 bp, Homo sapien
aggtcctgtagtcacggcccagctc

SEQ ID NO: 5124540 - DNA, 25 bp, Homo sapien
agtttttggactatcgtcagacagg

SEQ ID NO: 5124541 - DNA, 25 bp, Homo sapien
cctgtgttttggtcaacaggtcacc

SEQ ID NO: 5124542 - DNA, 25 bp, Homo sapien
acaggctggcccctccattgagcag

SEQ ID NO: 5124543 - DNA, 25 bp, Homo sapien
acaggaggctctgtagccccttggc

SEQ ID NO: 5124544 - DNA, 25 bp, Homo sapien
cagacaggaggctctgtagcccctt

SEQ ID NO: 5124545 - DNA, 25 bp, Homo sapien
gcccctccattgagcagcagacagg

SEQ ID NO: 5124546 - DNA, 25 bp, Homo sapien
ccaggatcactgtgcaaggtgcccc

SEQ ID NO: 5124547 - DNA, 25 bp, Homo sapien
ccctctttgaggatacatgatgaaa

SEQ ID NO: 5124548 - DNA, 25 bp, Homo sapien
tacacagttccagagagtcacaatt

SEQ ID NO: 5124549 - DNA, 25 bp, Homo sapien
gatgaaaaccatgtatactctgccg

SEQ ID NO: 5124550 - DNA, 25 bp, Homo sapien
atttactcagtgctggacgtggagc

SEQ ID NO: 5124551 - DNA, 25 bp, Homo sapien
taattcttggtagtaacacagtcat

SEQ ID NO: 5124552 - DNA, 25 bp, Homo sapien
tggacgtggagctaagtacatccca

SEQ ID NO: 5124553 - DNA, 25 bp, Homo sapien
acacagtcattcgttaagcatttac

SEQ ID NO: 5124554 - DNA, 25 bp, Homo sapien
gacaaggacagttagccctgctggg

SEQ ID NO: 5124555 - DNA, 25 bp, Homo sapien
tatccagggctaagtgcgagcctgc

SEQ ID NO: 5124556 - DNA, 25 bp, Homo sapien
ccttctgtgtggagaatggtgccca

SEQ ID NO: 5124557 - DNA, 25 bp, Homo sapien
gccatgtagctacctgggtccagga

SEQ ID NO: 5124558 - DNA, 25 bp, Homo sapien
tgtagaaggtatacacaacctgagg

SEQ ID NO: 5124559 - DNA, 25 bp, Homo sapien
cccgggtcgcagcattggaaacact

SEQ ID NO: 5124560 - DNA, 25 bp, Homo sapien
ggccctgggtaactctagactgata

SEQ ID NO: 5124561 - DNA, 25 bp, Homo sapien
tgaaatttctgcagacgtcgcgcca

SEQ ID NO: 5124562 - DNA, 25 bp, Homo sapien
tgaagggttccctagcccagatctc

SEQ ID NO: 5124563 - DNA, 25 bp, Homo sapien
tggccccatttcctacagccgagat

SEQ ID NO: 5124564 - DNA, 25 bp, Homo sapien
gagggtctgatgaccttgaatagcc

SEQ ID NO: 5124565 - DNA, 25 bp, Homo sapien
gattttactccacgaccacctgtgt

SEQ ID NO: 5124566 - DNA, 25 bp, Homo sapien
ccagtcggcagcctgagcaggttgt

SEQ ID NO: 5124567 - DNA, 25 bp, Homo sapien
ccagaggcacatcctggaagccagt

SEQ ID NO: 5124568 - DNA, 25 bp, Homo sapien
agccagtcggcagcctgagcaggtt

SEQ ID NO: 5124569 - DNA, 25 bp, Homo sapien
gaggcacatcctggaagccagtcgg

SEQ ID NO: 5124570 - DNA, 25 bp, Homo sapien
tcagaatgttacttgcttaaggtcc

SEQ ID NO: 5124571 - DNA, 25 bp, Homo sapien
gaatgttacttgcttaaggtcccag

SEQ ID NO: 5124572 - DNA, 25 bp, Homo sapien
tgttacttgcttaaggtcccagagc

SEQ ID NO: 5124573 - DNA, 25 bp, Homo sapien
tacttgcttaaggtcccagagccac

SEQ ID NO: 5124574 - DNA, 25 bp, Homo sapien
ttgacactttattctcgtgagaggg

SEQ ID NO: 5124575 - DNA, 25 bp, Homo sapien
tggagagtggattctggatcgagga

SEQ ID NO: 5124576 - DNA, 25 bp, Homo sapien
attctggatcgaggaagcgaggagc

SEQ ID NO: 5124577 - DNA, 25 bp, Homo sapien
ggttgctgaggttcccgggatctga

SEQ ID NO: 5124578 - DNA, 25 bp, Homo sapien
caaatccaccaaagaagaagcagct

SEQ ID NO: 5124579 - DNA, 25 bp, Homo sapien
attgaaggactacacagctcacccc

SEQ ID NO: 5124580 - DNA, 25 bp, Homo sapien
ctcaccccagcatgccactgacacc

SEQ ID NO: 5124581 - DNA, 25 bp, Homo sapien
cccctcaaatccaccaaagaagaag

SEQ ID NO: 5124582 - DNA, 25 bp, Homo sapien
aagcgagagagcctaagcgatgcac

SEQ ID NO: 5124583 - DNA, 25 bp, Homo sapien
ctaagcgatgcactcactctgtaaa

SEQ ID NO: 5124584 - DNA, 25 bp, Homo sapien
gccatgtagagaagcgagagagcct

SEQ ID NO: 5124585 - DNA, 25 bp, Homo sapien
gagcctaagcgatgcactcactctg

SEQ ID NO: 5124586 - DNA, 25 bp, Homo sapien
gtttgaggtcgcctgttaggatctc

SEQ ID NO: 5124587 - DNA, 25 bp, Homo sapien
tacagcagtttgaggtcgcctgtta

SEQ ID NO: 5124588 - DNA, 25 bp, Homo sapien
ttgtacagcagtttgaggtcgcctg

SEQ ID NO: 5124589 - DNA, 25 bp, Homo sapien
gggagcggtcagggttgctgggctt

SEQ ID NO: 5124590 - DNA, 25 bp, Homo sapien
ttcagaaagggctagcaccctcagc

SEQ ID NO: 5124591 - DNA, 25 bp, Homo sapien
caatttcggatcctaagtctgggcc

SEQ ID NO: 5124592 - DNA, 25 bp, Homo sapien
gacagcccaactttgtccccaagga

SEQ ID NO: 5124593 - DNA, 25 bp, Homo sapien
aaacatctcgggacacacttcagtg

SEQ ID NO: 5124594 - DNA, 25 bp, Homo sapien
caaaccagtcgtcgttatctaggaa

SEQ ID NO: 5124595 - DNA, 25 bp, Homo sapien
tactaagggtgctgggtggcttcac

SEQ ID NO: 5124596 - DNA, 25 bp, Homo sapien
catatgggaatcacctggccagtcc

SEQ ID NO: 5124597 - DNA, 25 bp, Homo sapien
tctttgggacgcaagaactgccctt

SEQ ID NO: 5124598 - DNA, 25 bp, Homo sapien
tcgttggctctcagccccaggtata

SEQ ID NO: 5124599 - DNA, 25 bp, Homo sapien
ccagcagatctcgttggctctcagc

SEQ ID NO: 5124600 - DNA, 25 bp, Homo sapien
agatctcgttggctctcagccccag

SEQ ID NO: 5124601 - DNA, 25 bp, Homo sapien
agcagatctcgttggctctcagccc

SEQ ID NO: 5124602 - DNA, 25 bp, Homo sapien
tacgtacacactgtggaatgagtaa

SEQ ID NO: 5124603 - DNA, 25 bp, Homo sapien
ttattaactgcagtctccatgctct

SEQ ID NO: 5124604 - DNA, 25 bp, Homo sapien
tccatgctctacaagaaaactccag

SEQ ID NO: 5124605 - DNA, 25 bp, Homo sapien
tcttcgactagcttattgaagtggg

SEQ ID NO: 5124606 - DNA, 25 bp, Homo sapien
agcttcataggccacttgttctgag

SEQ ID NO: 5124607 - DNA, 25 bp, Homo sapien
aggccacttgttctgagcagggctc

SEQ ID NO: 5124608 - DNA, 25 bp, Homo sapien
gacaccccctccatgaacaaggaag

SEQ ID NO: 5124609 - DNA, 25 bp, Homo sapien
cataggccacttgttctgagcaggg

SEQ ID NO: 5124610 - DNA, 25 bp, Homo sapien
tgctggcccgaccacctgagcccac

SEQ ID NO: 5124611 - DNA, 25 bp, Homo sapien
gctggcccgaccacctgagcccact

SEQ ID NO: 5124612 - DNA, 25 bp, Homo sapien
ttggctctgacagctcaactggtga

SEQ ID NO: 5124613 - DNA, 25 bp, Homo sapien
caactggtgagacctcaacctggag

SEQ ID NO: 5124614 - DNA, 25 bp, Homo sapien
gacctcaacctggagcaggtccagc

SEQ ID NO: 5124615 - DNA, 25 bp, Homo sapien
gacagctcaactggtgagacctcaa

SEQ ID NO: 5124616 - DNA, 25 bp, Homo sapien
tatgaaatgacagggatgacgtgag

SEQ ID NO: 5124617 - DNA, 25 bp, Homo sapien
ttatgaaatgacagggatgacgtga

SEQ ID NO: 5124618 - DNA, 25 bp, Homo sapien
aggattatgaaatgacagggatgac

SEQ ID NO: 5124619 - DNA, 25 bp, Homo sapien
gattatgaaatgacagggatgacgt

SEQ ID NO: 5124620 - DNA, 25 bp, Homo sapien
aaacttttgcgggaaggacatggct

SEQ ID NO: 5124621 - DNA, 25 bp, Homo sapien
gagctggaatcccactggaataatc

SEQ ID NO: 5124622 - DNA, 25 bp, Homo sapien
gctggtataagcctgagaccctccg

SEQ ID NO: 5124623 - DNA, 25 bp, Homo sapien
aaggaagcatctgggctggtgcaag

SEQ ID NO: 5124624 - DNA, 25 bp, Homo sapien
gggtgagcacaagtgaagaccgcca

SEQ ID NO: 5124625 - DNA, 25 bp, Homo sapien
gtgagcacaagtgaagaccgccagg

SEQ ID NO: 5124626 - DNA, 25 bp, Homo sapien
ctgtggggtgagcacaagtgaagac

SEQ ID NO: 5124627 - DNA, 25 bp, Homo sapien
cctgtggggtgagcacaagtgaaga

SEQ ID NO: 5124628 - DNA, 25 bp, Homo sapien
ctgcttgaatgaggatccctgaatg

SEQ ID NO: 5124629 - DNA, 25 bp, Homo sapien
aactggtgtcagttacaaaggcctt

SEQ ID NO: 5124630 - DNA, 25 bp, Homo sapien
tttccagttctagaaaactggtgtc

SEQ ID NO: 5124631 - DNA, 25 bp, Homo sapien
gtgtcagttacaaaggccttgagga

SEQ ID NO: 5124632 - DNA, 25 bp, Homo sapien
ggcatcctgcagaatatgactcaat

SEQ ID NO: 5124633 - DNA, 25 bp, Homo sapien
ttcaggatcacaaggctgtctggag

SEQ ID NO: 5124634 - DNA, 25 bp, Homo sapien
tttttccagagaccttcacaaagga

SEQ ID NO: 5124635 - DNA, 25 bp, Homo sapien
agagccacttcaggtctggcaccca

SEQ ID NO: 5124636 - DNA, 25 bp, Homo sapien
gtctgccaggggaacctacaaggtc

SEQ ID NO: 5124637 - DNA, 25 bp, Homo sapien
ctctgatattccccagtaaaagggt

SEQ ID NO: 5124638 - DNA, 25 bp, Homo sapien
ctgccaggggaacctacaaggtctt

SEQ ID NO: 5124639 - DNA, 25 bp, Homo sapien
caggggaacctacaaggtctttatg

SEQ ID NO: 5124640 - DNA, 25 bp, Homo sapien
gcagctcggccttgtttttctgagg

SEQ ID NO: 5124641 - DNA, 25 bp, Homo sapien
atcttgccccgcctgacgccagcct

SEQ ID NO: 5124642 - DNA, 25 bp, Homo sapien
ccagagcaaacatttccagttggca

SEQ ID NO: 5124643 - DNA, 25 bp, Homo sapien
attccactggcacggatcttgcccc

SEQ ID NO: 5124644 - DNA, 25 bp, Homo sapien
tgtgacagctcaaaaaccattcagg

SEQ ID NO: 5124645 - DNA, 25 bp, Homo sapien
gtttcgtgcgtgactcagaacaaca

SEQ ID NO: 5124646 - DNA, 25 bp, Homo sapien
gactgttgactttaaccaattgccc

SEQ ID NO: 5124647 - DNA, 25 bp, Homo sapien
cttgatatcacacaggaggtagact

SEQ ID NO: 5124648 - DNA, 25 bp, Homo sapien
tgataaggacaagcaaccctcgtgc

SEQ ID NO: 5124649 - DNA, 25 bp, Homo sapien
caaggactcaaagacgcagcatgtg

SEQ ID NO: 5124650 - DNA, 25 bp, Homo sapien
cccagacttgggtgtagctgaagac

SEQ ID NO: 5124651 - DNA, 25 bp, Homo sapien
ggagtaatgataccgtgcctcacac

SEQ ID NO: 5124652 - DNA, 25 bp, Homo sapien
cctcagtttacacagaagcccagtt

SEQ ID NO: 5124653 - DNA, 25 bp, Homo sapien
cagttcgcgagatcagtcagcgccg

SEQ ID NO: 5124654 - DNA, 25 bp, Homo sapien
tcccggagcgctcagagtgtcatct

SEQ ID NO: 5124655 - DNA, 25 bp, Homo sapien
atttctggagaacgcccgctgcgct

SEQ ID NO: 5124656 - DNA, 25 bp, Homo sapien
gggcgcttccaagtccagtcggaaa

SEQ ID NO: 5124657 - DNA, 25 bp, Homo sapien
ttaaggccgttcagctccttcacgc

SEQ ID NO: 5124658 - DNA, 25 bp, Homo sapien
gaaagttttatagccgttcgcgcgc

SEQ ID NO: 5124659 - DNA, 25 bp, Homo sapien
cgtcctcgaggaccgggatgtgctt

SEQ ID NO: 5124660 - DNA, 25 bp, Homo sapien
ggctgtgtccgtgccccctcttggg

SEQ ID NO: 5124661 - DNA, 25 bp, Homo sapien
cgtttccgcgcgtcggagacctcgg

SEQ ID NO: 5124662 - DNA, 25 bp, Homo sapien
agcaagatgcgaggacgcagacccg

SEQ ID NO: 5124663 - DNA, 25 bp, Homo sapien
ccactgcgcctagggcgaagcagcg

SEQ ID NO: 5124664 - DNA, 25 bp, Homo sapien
gggcgcagggcgcacagtggactcc

SEQ ID NO: 5124665 - DNA, 25 bp, Homo sapien
cctggtggttattgtaaattacgtg

SEQ ID NO: 5124666 - DNA, 25 bp, Homo sapien
tgaaattgacgagtaggaactttcc

SEQ ID NO: 5124667 - DNA, 25 bp, Homo sapien
acgcggaggaatcctggtggttatt

SEQ ID NO: 5124668 - DNA, 25 bp, Homo sapien
aggcggcagtcgcttcgcccggtcg

SEQ ID NO: 5124669 - DNA, 25 bp, Homo sapien
cggcagtcgcttcgcccggtcgttt

SEQ ID NO: 5124670 - DNA, 25 bp, Homo sapien
gcggcagtcgcttcgcccggtcgtt

SEQ ID NO: 5124671 - DNA, 25 bp, Homo sapien
aggaggcggcagtcgcttcgcccgg

SEQ ID NO: 5124672 - DNA, 25 bp, Homo sapien
cttcctgagcgcctcgaaggctgcg

SEQ ID NO: 5124673 - DNA, 25 bp, Homo sapien
cgtccgctccctggcgttcgccagg

SEQ ID NO: 5124674 - DNA, 25 bp, Homo sapien
tggcgttcgccaggagcctccgggt

SEQ ID NO: 5124675 - DNA, 25 bp, Homo sapien
ctgatggtgtgcacccgcgtccgct

SEQ ID NO: 5124676 - DNA, 25 bp, Homo sapien
catgtcctccgtagagaggaccacg

SEQ ID NO: 5124677 - DNA, 25 bp, Homo sapien
tgcttggcatgtcctccgtagagag

SEQ ID NO: 5124678 - DNA, 25 bp, Homo sapien
ccaggtgcttggcatgtcctccgta

SEQ ID NO: 5124679 - DNA, 25 bp, Homo sapien
cgtagagaggaccacggcagaagcc

SEQ ID NO: 5124680 - DNA, 25 bp, Homo sapien
gctgagggcaccattcccacgccct

SEQ ID NO: 5124681 - DNA, 25 bp, Homo sapien
ctgagggcaccattcccacgccctc

SEQ ID NO: 5124682 - DNA, 25 bp, Homo sapien
tcgttgcccgagaggatggtgtaca

SEQ ID NO: 5124683 - DNA, 25 bp, Homo sapien
ctgtccctcgttgcccgagaggatg

SEQ ID NO: 5124684 - DNA, 25 bp, Homo sapien
ccccagtgcaagcaggcctgtccct

SEQ ID NO: 5124685 - DNA, 25 bp, Homo sapien
tacaggctgctttgcactccctatg

SEQ ID NO: 5124686 - DNA, 25 bp, Homo sapien
caactcctggctctagctttgtcta

SEQ ID NO: 5124687 - DNA, 25 bp, Homo sapien
tctagctgtaatgctctgggcaaga

SEQ ID NO: 5124688 - DNA, 25 bp, Homo sapien
tttgtcacgtggattcaactcctgg

SEQ ID NO: 5124689 - DNA, 25 bp, Homo sapien
ggaacaggactgatctcacaaggag

SEQ ID NO: 5124690 - DNA, 25 bp, Homo sapien
gcttctgcccatatgagtagcacgg

SEQ ID NO: 5124691 - DNA, 25 bp, Homo sapien
tgtggtcggcactgtagtcaaggtc

SEQ ID NO: 5124692 - DNA, 25 bp, Homo sapien
ccgcgccagggacaggatgtagtta

SEQ ID NO: 5124693 - DNA, 25 bp, Homo sapien
tagttacaggcgatcctcaggatgg

SEQ ID NO: 5124694 - DNA, 25 bp, Homo sapien
ctccctggcatgagtctggagtccg

SEQ ID NO: 5124695 - DNA, 25 bp, Homo sapien
ccctccctggcatgagtctggagtc

SEQ ID NO: 5124696 - DNA, 25 bp, Homo sapien
gaccctccctggcatgagtctggag

SEQ ID NO: 5124697 - DNA, 25 bp, Homo sapien
gagaaggtgtcgtgaccctccctgg

SEQ ID NO: 5124698 - DNA, 25 bp, Homo sapien
cccaagaccctgctccattcaaaga

SEQ ID NO: 5124699 - DNA, 25 bp, Homo sapien
ccaagaccctgctccattcaaagaa

SEQ ID NO: 5124700 - DNA, 25 bp, Homo sapien
ccagcccaagaccctgctccattca

SEQ ID NO: 5124701 - DNA, 25 bp, Homo sapien
agcccaagaccctgctccattcaaa

SEQ ID NO: 5124702 - DNA, 25 bp, Homo sapien
gagctcgaaggctccagcgactcca

SEQ ID NO: 5124703 - DNA, 25 bp, Homo sapien
acttgcaaaggctgccgtgtcaaat

SEQ ID NO: 5124704 - DNA, 25 bp, Homo sapien
tggctgcttgagatgcccacacttg

SEQ ID NO: 5124705 - DNA, 25 bp, Homo sapien
agcataggtgcccagaagcgggaca

SEQ ID NO: 5124706 - DNA, 25 bp, Homo sapien
gaaaagttccgcagtgtcaggagca

SEQ ID NO: 5124707 - DNA, 25 bp, Homo sapien
gaatgactctgccatggcgctgcct

SEQ ID NO: 5124708 - DNA, 25 bp, Homo sapien
tatcccagaaggctttggcggcagc

SEQ ID NO: 5124709 - DNA, 25 bp, Homo sapien
cactaatgaggtggccttcgggctc

SEQ ID NO: 5124710 - DNA, 25 bp, Homo sapien
tgtgctacgacaccctgaggaagga

SEQ ID NO: 5124711 - DNA, 25 bp, Homo sapien
taatccatgaacagacccaggagct

SEQ ID NO: 5124712 - DNA, 25 bp, Homo sapien
tgaggttaaaacacttgagcacccg

SEQ ID NO: 5124713 - DNA, 25 bp, Homo sapien
caaaaatagcccctttgagcaagga

SEQ ID NO: 5124714 - DNA, 25 bp, Homo sapien
tgagtgctgtgcctccagttgacaa

SEQ ID NO: 5124715 - DNA, 25 bp, Homo sapien
gtggcccagccacacgagaaaggct

SEQ ID NO: 5124716 - DNA, 25 bp, Homo sapien
cagaccaatgggcagactggtggcc

SEQ ID NO: 5124717 - DNA, 25 bp, Homo sapien
ccctgtgggcctgacttatgatcct

SEQ ID NO: 5124718 - DNA, 25 bp, Homo sapien
agtccttaccgcaaagtgacagcag

SEQ ID NO: 5124719 - DNA, 25 bp, Homo sapien
agcagctcaaaaggcccatggccgc

SEQ ID NO: 5124720 - DNA, 25 bp, Homo sapien
tcgagctggcccaggcgaagctgca

SEQ ID NO: 5124721 - DNA, 25 bp, Homo sapien
ggtcatcgcacttggcttcactgct

SEQ ID NO: 5124722 - DNA, 25 bp, Homo sapien
tgcttccatcctgcgatgctgtccg

SEQ ID NO: 5124723 - DNA, 25 bp, Homo sapien
ctccaccacgagcaccccatcctcc

SEQ ID NO: 5124724 - DNA, 25 bp, Homo sapien
ccaccacgagcaccccatcctccca

SEQ ID NO: 5124725 - DNA, 25 bp, Homo sapien
ccacgagcaccccatcctcccaggg

SEQ ID NO: 5124726 - DNA, 25 bp, Homo sapien
accacgagcaccccatcctcccagg

SEQ ID NO: 5124727 - DNA, 25 bp, Homo sapien
tgtactccacagtgttgcaggccct

SEQ ID NO: 5124728 - DNA, 25 bp, Homo sapien
tgttgaggatgagagcaggtaacct

SEQ ID NO: 5124729 - DNA, 25 bp, Homo sapien
gggtcccaggtatcctaggctagca

SEQ ID NO: 5124730 - DNA, 25 bp, Homo sapien
tagtccaggacaatgagggcctgct

SEQ ID NO: 5124731 - DNA, 25 bp, Homo sapien
caaacctcggagtcagtcaaggccg

SEQ ID NO: 5124732 - DNA, 25 bp, Homo sapien
gtcaaggccgtgcagaagaactttc

SEQ ID NO: 5124733 - DNA, 25 bp, Homo sapien
gtggtcaaacccctccttcactgaa

SEQ ID NO: 5124734 - DNA, 25 bp, Homo sapien
gtggatgtttgcaaacctcggagtc

SEQ ID NO: 5124735 - DNA, 25 bp, Homo sapien
tctcaaggctgctcaccagagagga

SEQ ID NO: 5124736 - DNA, 25 bp, Homo sapien
gctgcatcataagctgcactggtgt

SEQ ID NO: 5124737 - DNA, 25 bp, Homo sapien
tacgaaaagtggaattacgctgtac

SEQ ID NO: 5124738 - DNA, 25 bp, Homo sapien
catccttgcgtttgacagatctgct

SEQ ID NO: 5124739 - DNA, 25 bp, Homo sapien
gaattacgctgtacaagctgcatca

SEQ ID NO: 5124740 - DNA, 25 bp, Homo sapien
tgatccaccctccttggcctcccag

SEQ ID NO: 5124741 - DNA, 25 bp, Homo sapien
tccaccctccttggcctcccagagt

SEQ ID NO: 5124742 - DNA, 25 bp, Homo sapien
tgaacttccaacctcagatgatcca

SEQ ID NO: 5124743 - DNA, 25 bp, Homo sapien
gatgatccaccctccttggcctccc

SEQ ID NO: 5124744 - DNA, 25 bp, Homo sapien
ctgaacttggcgctctgagcagacg

SEQ ID NO: 5124745 - DNA, 25 bp, Homo sapien
tggcgctctgagcagacggtgtaac

SEQ ID NO: 5124746 - DNA, 25 bp, Homo sapien
aacttggcgctctgagcagacggtg

SEQ ID NO: 5124747 - DNA, 25 bp, Homo sapien
cgctctgagcagacggtgtaactgg

SEQ ID NO: 5124748 - DNA, 25 bp, Homo sapien
agaccacctttaagttccctgcagc

SEQ ID NO: 5124749 - DNA, 25 bp, Homo sapien
attgctgggttagaccacctttaag

SEQ ID NO: 5124750 - DNA, 25 bp, Homo sapien
ttagaccacctttaagttccctgca

SEQ ID NO: 5124751 - DNA, 25 bp, Homo sapien
agcacagttcgaaaattgctgggtt

SEQ ID NO: 5124752 - DNA, 25 bp, Homo sapien
tggcggcatcttggagaagaccacg

SEQ ID NO: 5124753 - DNA, 25 bp, Homo sapien
ccttctggtgatgcttagggcccaa

SEQ ID NO: 5124754 - DNA, 25 bp, Homo sapien
aaagacccataggtagctgccctgg

SEQ ID NO: 5124755 - DNA, 25 bp, Homo sapien
tcaggcaacaggaggagcaaaagtc

SEQ ID NO: 5124756 - DNA, 25 bp, Homo sapien
cactgtggtccttggtaaagggcca

SEQ ID NO: 5124757 - DNA, 25 bp, Homo sapien
cagcctagggatccaagacagcatg

SEQ ID NO: 5124758 - DNA, 25 bp, Homo sapien
ccttaggcccgctgaggtgaagcaa

SEQ ID NO: 5124759 - DNA, 25 bp, Homo sapien
cacagggtggctgaaccttcctaac

SEQ ID NO: 5124760 - DNA, 25 bp, Homo sapien
caaggagagtgtgctacaaacatcc

SEQ ID NO: 5124761 - DNA, 25 bp, Homo sapien
aacccaaggctggactgcaaagtgc

SEQ ID NO: 5124762 - DNA, 25 bp, Homo sapien
gaagactgccgttggaatctgaatc

SEQ ID NO: 5124763 - DNA, 25 bp, Homo sapien
tatgcatgtgcccatgagagagagt

SEQ ID NO: 5124764 - DNA, 25 bp, Homo sapien
tgctggcaatgaccacttcgtggct

SEQ ID NO: 5124765 - DNA, 25 bp, Homo sapien
tgagattagacacgtacccacagtt

SEQ ID NO: 5124766 - DNA, 25 bp, Homo sapien
tccgggtcaccagaagggagacatg

SEQ ID NO: 5124767 - DNA, 25 bp, Homo sapien
aacggtacagatccactcaaagggt

SEQ ID NO: 5124768 - DNA, 25 bp, Homo sapien
tcccttattcactggagcagtccag

SEQ ID NO: 5124769 - DNA, 25 bp, Homo sapien
tacccagcagctgatggtggccagt

SEQ ID NO: 5124770 - DNA, 25 bp, Homo sapien
gtggctcacgtgtggtcccaaacca

SEQ ID NO: 5124771 - DNA, 25 bp, Homo sapien
tgtcacgccatgcagactgttcctg

SEQ ID NO: 5124772 - DNA, 25 bp, Homo sapien
cctgtctgggccgtgtcttgttggc

SEQ ID NO: 5124773 - DNA, 25 bp, Homo sapien
caaggacacagcactttcccacggg

SEQ ID NO: 5124774 - DNA, 25 bp, Homo sapien
tttcccacgggcacgtgtggctgcc

SEQ ID NO: 5124775 - DNA, 25 bp, Homo sapien
ggcacgtgtggctgcccagcacaga

SEQ ID NO: 5124776 - DNA, 25 bp, Homo sapien
cactatcttcatgtttaaactcaag

SEQ ID NO: 5124777 - DNA, 25 bp, Homo sapien
tagaaaagggctctcgaagcagcag

SEQ ID NO: 5124778 - DNA, 25 bp, Homo sapien
taaactcaagctttcccaggttaga

SEQ ID NO: 5124779 - DNA, 25 bp, Homo sapien
cagcaggacgagggtgtcacccttg

SEQ ID NO: 5124780 - DNA, 25 bp, Homo sapien
cactgctaccgttgctgcttgggag

SEQ ID NO: 5124781 - DNA, 25 bp, Homo sapien
actctgaagttggagggacactccc

SEQ ID NO: 5124782 - DNA, 25 bp, Homo sapien
caataagcacataaagaggtcctga

SEQ ID NO: 5124783 - DNA, 25 bp, Homo sapien
tcacgtggatgtaccttgacagcat

SEQ ID NO: 5124784 - DNA, 25 bp, Homo sapien
ttggaacctcaaagattacacgcag

SEQ ID NO: 5124785 - DNA, 25 bp, Homo sapien
tcttgtcctcgaacaaaaggttgag

SEQ ID NO: 5124786 - DNA, 25 bp, Homo sapien
tgagtggaatagcatgtcaatggcc

SEQ ID NO: 5124787 - DNA, 25 bp, Homo sapien
gctgcgtgagcttccattgtgataa

SEQ ID NO: 5124788 - DNA, 25 bp, Homo sapien
cacttttgtcggcaaacttggccta

SEQ ID NO: 5124789 - DNA, 25 bp, Homo sapien
ttggccccagcccattcgaacgtct

SEQ ID NO: 5124790 - DNA, 25 bp, Homo sapien
ccattcgaacgtcttcccatctccc

SEQ ID NO: 5124791 - DNA, 25 bp, Homo sapien
tagcattcaaagcagagtcccttct

SEQ ID NO: 5124792 - DNA, 25 bp, Homo sapien
cagggccaggagtcaggtcatagca

SEQ ID NO: 5124793 - DNA, 25 bp, Homo sapien
tcccaggatgacgtgctccgtagct

SEQ ID NO: 5124794 - DNA, 25 bp, Homo sapien
tgctgaaagactcgagaaccaacca

SEQ ID NO: 5124795 - DNA, 25 bp, Homo sapien
tgctgcgctgcttggtgtgacccac

SEQ ID NO: 5124796 - DNA, 25 bp, Homo sapien
tctgctgctgatactgggtctgcga

SEQ ID NO: 5124797 - DNA, 25 bp, Homo sapien
aaaagcttggaaatagacaccagcc

SEQ ID NO: 5124798 - DNA, 25 bp, Homo sapien
tcagaggggaagtctatagaagact

SEQ ID NO: 5124799 - DNA, 25 bp, Homo sapien
cttggaaatagacaccagcctgtga

SEQ ID NO: 5124800 - DNA, 25 bp, Homo sapien
tgtgtttagtataaaagcttggaaa

SEQ ID NO: 5124801 - DNA, 25 bp, Homo sapien
ttagccttgtgtggtgtctcacaac

SEQ ID NO: 5124802 - DNA, 25 bp, Homo sapien
agccttgtgtggtgtctcacaactg

SEQ ID NO: 5124803 - DNA, 25 bp, Homo sapien
tagccttgtgtggtgtctcacaact

SEQ ID NO: 5124804 - DNA, 25 bp, Homo sapien
aacacaccacatagttcacccattt

SEQ ID NO: 5124805 - DNA, 25 bp, Homo sapien
caagagcctctgacctaagggaagt

SEQ ID NO: 5124806 - DNA, 25 bp, Homo sapien
ttatccgtgacctagaggaaaagcc

SEQ ID NO: 5124807 - DNA, 25 bp, Homo sapien
tgtggtcacctataggccccagtct

SEQ ID NO: 5124808 - DNA, 25 bp, Homo sapien
tttctacctggctgtgtatggtgcc

SEQ ID NO: 5124809 - DNA, 25 bp, Homo sapien
actggtagttcctcactgttcgctg

SEQ ID NO: 5124810 - DNA, 25 bp, Homo sapien
tttgaaatgatcacactggtagttc

SEQ ID NO: 5124811 - DNA, 25 bp, Homo sapien
ggtagttcctcactgttcgctgatg

SEQ ID NO: 5124812 - DNA, 25 bp, Homo sapien
tggtagttcctcactgttcgctgat

SEQ ID NO: 5124813 - DNA, 25 bp, Homo sapien
ccttggcagacactgatccccctgt

SEQ ID NO: 5124814 - DNA, 25 bp, Homo sapien
tggcagacactgatccccctgtggg

SEQ ID NO: 5124815 - DNA, 25 bp, Homo sapien
gtgaccttggcagacactgatcccc

SEQ ID NO: 5124816 - DNA, 25 bp, Homo sapien
ggtgaccttggcagacactgatccc

SEQ ID NO: 5124817 - DNA, 25 bp, Homo sapien
tgggcgcggcgtttccgcctcgaac

SEQ ID NO: 5124818 - DNA, 25 bp, Homo sapien
cagggcacgacaccctcaggcgagc

SEQ ID NO: 5124819 - DNA, 25 bp, Homo sapien
ctgccggccgaggtacgtggcgcag

SEQ ID NO: 5124820 - DNA, 25 bp, Homo sapien
gctgcggcggcgacttgtctcttcc

SEQ ID NO: 5124821 - DNA, 25 bp, Homo sapien
aaaccaccggaaagttgcaggcgca

SEQ ID NO: 5124822 - DNA, 25 bp, Homo sapien
tgcaggcgcacagtatacgttcagc

SEQ ID NO: 5124823 - DNA, 25 bp, Homo sapien
ggcttcactgaagtccggtccgaaa

SEQ ID NO: 5124824 - DNA, 25 bp, Homo sapien
caaaatagagccacaagtctcccgg

SEQ ID NO: 5124825 - DNA, 25 bp, Homo sapien
ataacgctatcagcgcctggctttg

SEQ ID NO: 5124826 - DNA, 25 bp, Homo sapien
cttacacccatccttggaagctggg

SEQ ID NO: 5124827 - DNA, 25 bp, Homo sapien
tgctgactctcatggcagccataac

SEQ ID NO: 5124828 - DNA, 25 bp, Homo sapien
tggaagctgggatactgctgactct

SEQ ID NO: 5124829 - DNA, 25 bp, Homo sapien
ctgtcctggatttgtaagtagcctg

SEQ ID NO: 5124830 - DNA, 25 bp, Homo sapien
agccactgacttggagagataacag

SEQ ID NO: 5124831 - DNA, 25 bp, Homo sapien
tgcccaagtgggtcaacctaatgtg

SEQ ID NO: 5124832 - DNA, 25 bp, Homo sapien
ccagaataatagctgaggatgtctc

SEQ ID NO: 5124833 - DNA, 25 bp, Homo sapien
gcttggatgacagagtgaatctgtc

SEQ ID NO: 5124834 - DNA, 25 bp, Homo sapien
agcttggatgacagagtgaatctgt

SEQ ID NO: 5124835 - DNA, 25 bp, Homo sapien
cagcttggatgacagagtgaatctg

SEQ ID NO: 5124836 - DNA, 25 bp, Homo sapien
ccagcttggatgacagagtgaatct

SEQ ID NO: 5124837 - DNA, 25 bp, Homo sapien
atggtgttgggtacctgtagttcca

SEQ ID NO: 5124838 - DNA, 25 bp, Homo sapien
aacagagggagactgctgtctctac

SEQ ID NO: 5124839 - DNA, 25 bp, Homo sapien
tagcctggcatggtgttgggtacct

SEQ ID NO: 5124840 - DNA, 25 bp, Homo sapien
acagagggagactgctgtctctaca

SEQ ID NO: 5124841 - DNA, 25 bp, Homo sapien
taaatccattgcatgttaatatata

SEQ ID NO: 5124842 - DNA, 25 bp, Homo sapien
ataaatccattgcatgttaatatat

SEQ ID NO: 5124843 - DNA, 25 bp, Homo sapien
aaatccattgcatgttaatatatat

SEQ ID NO: 5124844 - DNA, 25 bp, Homo sapien
tctcttgatatttgccaaattaaaa

SEQ ID NO: 5124845 - DNA, 25 bp, Homo sapien
tgatatttgccaaattaaaaattaa

SEQ ID NO: 5124846 - DNA, 25 bp, Homo sapien
cttgatatttgccaaattaaaaatt

SEQ ID NO: 5124847 - DNA, 25 bp, Homo sapien
ctcttgatatttgccaaattaaaaa

SEQ ID NO: 5124848 - DNA, 25 bp, Homo sapien
caaggttatgtcacagggcaaggga

SEQ ID NO: 5124849 - DNA, 25 bp, Homo sapien
gaaactccaacacgacaaggttatg

SEQ ID NO: 5124850 - DNA, 25 bp, Homo sapien
cagacttcctcggtcttggctgcca

SEQ ID NO: 5124851 - DNA, 25 bp, Homo sapien
caatgcttcagtaagtaacctgggc

SEQ ID NO: 5124852 - DNA, 25 bp, Homo sapien
gcctgtgttctgttggctacagctg

SEQ ID NO: 5124853 - DNA, 25 bp, Homo sapien
tcaagagaccaacttcctttgtgct

SEQ ID NO: 5124854 - DNA, 25 bp, Homo sapien
tctgttggctacagctgtgctccag

SEQ ID NO: 5124855 - DNA, 25 bp, Homo sapien
ttcctagaaaaacctcaagagacca

SEQ ID NO: 5124856 - DNA, 25 bp, Homo sapien
catcgggccttccaggtagtatcaa

SEQ ID NO: 5124857 - DNA, 25 bp, Homo sapien
caaaggtggtatgaattcctgtccc

SEQ ID NO: 5124858 - DNA, 25 bp, Homo sapien
ggctctcgggatatgcacactttca

SEQ ID NO: 5124859 - DNA, 25 bp, Homo sapien
gatttgtcaggaccctctactggta

SEQ ID NO: 5124860 - DNA, 25 bp, Homo sapien
acagtctggaccataagacttccaa

SEQ ID NO: 5124861 - DNA, 25 bp, Homo sapien
tctggaccataagacttccaacttc

SEQ ID NO: 5124862 - DNA, 25 bp, Homo sapien
tttagtggtcagtacctgggtattc

SEQ ID NO: 5124863 - DNA, 25 bp, Homo sapien
cacagctgtggcgtttagtggtcag

SEQ ID NO: 5124864 - DNA, 25 bp, Homo sapien
tagtctggcacttgacataagctgc

SEQ ID NO: 5124865 - DNA, 25 bp, Homo sapien
tggcacttgacataagctgccctgg

SEQ ID NO: 5124866 - DNA, 25 bp, Homo sapien
tctggcacttgacataagctgccct

SEQ ID NO: 5124867 - DNA, 25 bp, Homo sapien
cattagtctggcacttgacataagc

SEQ ID NO: 5124868 - DNA, 25 bp, Homo sapien
aggcaagactctcatagggctgatg

SEQ ID NO: 5124869 - DNA, 25 bp, Homo sapien
caaaggacagcggtgaaacacaggt

SEQ ID NO: 5124870 - DNA, 25 bp, Homo sapien
gacagcggtgaaacacaggtgtgtt

SEQ ID NO: 5124871 - DNA, 25 bp, Homo sapien
ctctcatagggctgatgcatgacat

SEQ ID NO: 5124872 - DNA, 25 bp, Homo sapien
gaatacactggtagctgtcggcaga

SEQ ID NO: 5124873 - DNA, 25 bp, Homo sapien
tgggacttgaatcctaggcccctga

SEQ ID NO: 5124874 - DNA, 25 bp, Homo sapien
tacaggtaagggaatcaggacccac

SEQ ID NO: 5124875 - DNA, 25 bp, Homo sapien
tgcagagggccttatgattatcact

SEQ ID NO: 5124876 - DNA, 25 bp, Homo sapien
taaagaactcctgtgcgggatcctg

SEQ ID NO: 5124877 - DNA, 25 bp, Homo sapien
caccatgtatctgactgaaaaaggg

SEQ ID NO: 5124878 - DNA, 25 bp, Homo sapien
gacgccccttatctcatgcagctgt

SEQ ID NO: 5124879 - DNA, 25 bp, Homo sapien
tcagtaaggctgtctgtgcgacgcc

SEQ ID NO: 5124880 - DNA, 25 bp, Homo sapien
tcgcctgatcgggagagtgtcttcc

SEQ ID NO: 5124881 - DNA, 25 bp, Homo sapien
aggcaagtgttctggatgagactga

SEQ ID NO: 5124882 - DNA, 25 bp, Homo sapien
tgcaacttctgcaccgtttctgttt

SEQ ID NO: 5124883 - DNA, 25 bp, Homo sapien
gaagttcgttgtatgtggtcatcca

SEQ ID NO: 5124884 - DNA, 25 bp, Homo sapien
ggtgtgccattatgcatggttagca

SEQ ID NO: 5124885 - DNA, 25 bp, Homo sapien
gatgtagctcctgcaccaaacaata

SEQ ID NO: 5124886 - DNA, 25 bp, Homo sapien
tttgtatgtggtctgtaagtgtatg

SEQ ID NO: 5124887 - DNA, 25 bp, Homo sapien
gcatgtatgtgatgggtatttgtat

SEQ ID NO: 5124888 - DNA, 25 bp, Homo sapien
taagtgaagaatcgctgcctcagcc

SEQ ID NO: 5124889 - DNA, 25 bp, Homo sapien
ggagccctccaagtctgagttagtg

SEQ ID NO: 5124890 - DNA, 25 bp, Homo sapien
ttaaatgtcagcttgaccacttgcc

SEQ ID NO: 5124891 - DNA, 25 bp, Homo sapien
caactgaatcctgagtggtcagcag

SEQ ID NO: 5124892 - DNA, 25 bp, Homo sapien
gccagtgggctaggtttcattgcac

SEQ ID NO: 5124893 - DNA, 25 bp, Homo sapien
gacaagccccgtgcatagacagggt

SEQ ID NO: 5124894 - DNA, 25 bp, Homo sapien
agccttccagctcatgtgggaccga

SEQ ID NO: 5124895 - DNA, 25 bp, Homo sapien
tcagtggaaacgaggatactctgct

SEQ ID NO: 5124896 - DNA, 25 bp, Homo sapien
tgtgagcctgtccatcctcacactt

SEQ ID NO: 5124897 - DNA, 25 bp, Homo sapien
aggtgtgagcctgtccatcctcaca

SEQ ID NO: 5124898 - DNA, 25 bp, Homo sapien
tgagcctgtccatcctcacacttgc

SEQ ID NO: 5124899 - DNA, 25 bp, Homo sapien
ggtgtgagcctgtccatcctcacac

SEQ ID NO: 5124900 - DNA, 25 bp, Homo sapien
ctcactctcggtgcctctttggcat

SEQ ID NO: 5124901 - DNA, 25 bp, Homo sapien
agggctgtgcgcacacacgggttct

SEQ ID NO: 5124902 - DNA, 25 bp, Homo sapien
ctctttggcattggcgtccactctg

SEQ ID NO: 5124903 - DNA, 25 bp, Homo sapien
cacacacgggttctaggtgagcgtg

SEQ ID NO: 5124904 - DNA, 25 bp, Homo sapien
cagcccccaggaagatggtgctgcc

SEQ ID NO: 5124905 - DNA, 25 bp, Homo sapien
gaagatggtgctgcctgaatggaca

SEQ ID NO: 5124906 - DNA, 25 bp, Homo sapien
caggaagatggtgctgcctgaatgg

SEQ ID NO: 5124907 - DNA, 25 bp, Homo sapien
ccccaggaagatggtgctgcctgaa

SEQ ID NO: 5124908 - DNA, 25 bp, Homo sapien
aattcttgttctgattgttgtttgg

SEQ ID NO: 5124909 - DNA, 25 bp, Homo sapien
agaaaagaagcattcttcactttgg

SEQ ID NO: 5124910 - DNA, 25 bp, Homo sapien
cagttcagccccatgaaaatcgttt

SEQ ID NO: 5124911 - DNA, 25 bp, Homo sapien
gaagtcataaaaatcactgtaacct

SEQ ID NO: 5124912 - DNA, 25 bp, Homo sapien
aggtccggcctggtacaccagaaca

SEQ ID NO: 5124913 - DNA, 25 bp, Homo sapien
gccccttcccgcgtgctctgagtga

SEQ ID NO: 5124914 - DNA, 25 bp, Homo sapien
aaggcattgcgcaaggtccggcctg

SEQ ID NO: 5124915 - DNA, 25 bp, Homo sapien
accagaacacggcagcagctggcgc

SEQ ID NO: 5124916 - DNA, 25 bp, Homo sapien
cacaactgggtttgcggtactgcca

SEQ ID NO: 5124917 - DNA, 25 bp, Homo sapien
taccgggagaatgggcgcagttctc

SEQ ID NO: 5124918 - DNA, 25 bp, Homo sapien
gcacatgcgcactgagcagtacacg

SEQ ID NO: 5124919 - DNA, 25 bp, Homo sapien
cagtacacgcctgtgttgaggcccc

SEQ ID NO: 5124920 - DNA, 25 bp, Homo sapien
gtgccccgctaccagccccgaccag

SEQ ID NO: 5124921 - DNA, 25 bp, Homo sapien
gccccgctaccagccccgaccagac

SEQ ID NO: 5124922 - DNA, 25 bp, Homo sapien
cgtgccccgctaccagccccgacca

SEQ ID NO: 5124923 - DNA, 25 bp, Homo sapien
tgccccgctaccagccccgaccaga

SEQ ID NO: 5124924 - DNA, 25 bp, Homo sapien
tgacaccttgccgtgggccagggct

SEQ ID NO: 5124925 - DNA, 25 bp, Homo sapien
gacaccttgccgtgggccagggctg

SEQ ID NO: 5124926 - DNA, 25 bp, Homo sapien
ctgacaccttgccgtgggccagggc

SEQ ID NO: 5124927 - DNA, 25 bp, Homo sapien
acaccttgccgtgggccagggctgg

SEQ ID NO: 5124928 - DNA, 25 bp, Homo sapien
accctgacattgagcccctggtgct

SEQ ID NO: 5124929 - DNA, 25 bp, Homo sapien
gatatcaccctgacattgagcccct

SEQ ID NO: 5124930 - DNA, 25 bp, Homo sapien
actcttggcgcatgcgcctcagctc

SEQ ID NO: 5124931 - DNA, 25 bp, Homo sapien
ttggatatcaccctgacattgagcc

SEQ ID NO: 5124932 - DNA, 25 bp, Homo sapien
tcttctagagctggagcaaatgtca

SEQ ID NO: 5124933 - DNA, 25 bp, Homo sapien
cttctagagctggagcaaatgtcac

SEQ ID NO: 5124934 - DNA, 25 bp, Homo sapien
ctgggggcccaaccagctccggtat

SEQ ID NO: 5124935 - DNA, 25 bp, Homo sapien
gcatagccaccctcaaatggcttca

SEQ ID NO: 5124936 - DNA, 25 bp, Homo sapien
tccggtatcagagcatagccaccct

SEQ ID NO: 5124937 - DNA, 25 bp, Homo sapien
ggcccaaccagctccggtatcagag

SEQ ID NO: 5124938 - DNA, 25 bp, Homo sapien
gaatccaaagtgttactgctactgc

SEQ ID NO: 5124939 - DNA, 25 bp, Homo sapien
tgtcagccaggaaatctcagaggtg

SEQ ID NO: 5124940 - DNA, 25 bp, Homo sapien
ctgaggtaagaagtaaatgggtcag

SEQ ID NO: 5124941 - DNA, 25 bp, Homo sapien
cagaggctcgtcttggagttttcca

SEQ ID NO: 5124942 - DNA, 25 bp, Homo sapien
caggattttacggagtgtcacagcc

SEQ ID NO: 5124943 - DNA, 25 bp, Homo sapien
gattttacggagtgtcacagccgtg

SEQ ID NO: 5124944 - DNA, 25 bp, Homo sapien
ccacaggattttacggagtgtcaca

SEQ ID NO: 5124945 - DNA, 25 bp, Homo sapien
atcccacaggattttacggagtgtc

SEQ ID NO: 5124946 - DNA, 25 bp, Homo sapien
accttgccccaccggtgtgtcattt

SEQ ID NO: 5124947 - DNA, 25 bp, Homo sapien
ccaccttgccccaccggtgtgtcat

SEQ ID NO: 5124948 - DNA, 25 bp, Homo sapien
caccttgccccaccggtgtgtcatt

SEQ ID NO: 5124949 - DNA, 25 bp, Homo sapien
ttgagagaggatagccatggtggct

SEQ ID NO: 5124950 - DNA, 25 bp, Homo sapien
gccctgcctcttaacagttgagaga

SEQ ID NO: 5124951 - DNA, 25 bp, Homo sapien
cggccctgcctcttaacagttgaga

SEQ ID NO: 5124952 - DNA, 25 bp, Homo sapien
tgagagaggatagccatggtggctc

SEQ ID NO: 5124953 - DNA, 25 bp, Homo sapien
gcagatattagtgtatcacaaatgc

SEQ ID NO: 5124954 - DNA, 25 bp, Homo sapien
gatattagtgtatcacaaatgctac

SEQ ID NO: 5124955 - DNA, 25 bp, Homo sapien
cagatattagtgtatcacaaatgct

SEQ ID NO: 5124956 - DNA, 25 bp, Homo sapien
cagcagatattagtgtatcacaaat

SEQ ID NO: 5124957 - DNA, 25 bp, Homo sapien
cttcggtgaccatacatcccagtct

SEQ ID NO: 5124958 - DNA, 25 bp, Homo sapien
ttcggtgaccatacatcccagtcta

SEQ ID NO: 5124959 - DNA, 25 bp, Homo sapien
gtgaccatacatcccagtctatcca

SEQ ID NO: 5124960 - DNA, 25 bp, Homo sapien
cggtgaccatacatcccagtctatc

SEQ ID NO: 5124961 - DNA, 25 bp, Homo sapien
tgcacaagggtgtctcccacagcca

SEQ ID NO: 5124962 - DNA, 25 bp, Homo sapien
ggagtgcacaagggtgtctcccaca

SEQ ID NO: 5124963 - DNA, 25 bp, Homo sapien
agtgcacaagggtgtctcccacagc

SEQ ID NO: 5124964 - DNA, 25 bp, Homo sapien
gagtgcacaagggtgtctcccacag

SEQ ID NO: 5124965 - DNA, 25 bp, Homo sapien
ggatccagagaagctttgtggtaga

SEQ ID NO: 5124966 - DNA, 25 bp, Homo sapien
ccagaggcgattaagacctgcaggg

SEQ ID NO: 5124967 - DNA, 25 bp, Homo sapien
tagatgcggcgtctgtgttgggctt

SEQ ID NO: 5124968 - DNA, 25 bp, Homo sapien
tgtctcctggtggtttcaggatcca

SEQ ID NO: 5124969 - DNA, 25 bp, Homo sapien
tgatttgcagccagggatgctcctc

SEQ ID NO: 5124970 - DNA, 25 bp, Homo sapien
caccggttccacttggactaggcat

SEQ ID NO: 5124971 - DNA, 25 bp, Homo sapien
ggcctccaagactcagagggaaatt

SEQ ID NO: 5124972 - DNA, 25 bp, Homo sapien
aaattgcctctcgtggagacaccgg

SEQ ID NO: 5124973 - DNA, 25 bp, Homo sapien
gagacaccggttccacttggactag

SEQ ID NO: 5124974 - DNA, 25 bp, Homo sapien
ccaacaggttgtgtccctcctctac

SEQ ID NO: 5124975 - DNA, 25 bp, Homo sapien
agccaacaggttgtgtccctcctct

SEQ ID NO: 5124976 - DNA, 25 bp, Homo sapien
gaagccaacaggttgtgtccctcct

SEQ ID NO: 5124977 - DNA, 25 bp, Homo sapien
ctgaagccaacaggttgtgtccctc

SEQ ID NO: 5124978 - DNA, 25 bp, Homo sapien
gcagacactatatgagatcccgaat

SEQ ID NO: 5124979 - DNA, 25 bp, Homo sapien
catgcgttcctcaggagctgctcac

SEQ ID NO: 5124980 - DNA, 25 bp, Homo sapien
tatgagatcccgaatccaggcatgc

SEQ ID NO: 5124981 - DNA, 25 bp, Homo sapien
gaatccaggcatgcgttcctcagga

SEQ ID NO: 5124982 - DNA, 25 bp, Homo sapien
ggccttccaatctctataggtttta

SEQ ID NO: 5124983 - DNA, 25 bp, Homo sapien
tactgcttccaaagacctggcatac

SEQ ID NO: 5124984 - DNA, 25 bp, Homo sapien
tagttgctgacacccctactttggg

SEQ ID NO: 5124985 - DNA, 25 bp, Homo sapien
catactcctggtttgtgatgatcaa

SEQ ID NO: 5124986 - DNA, 25 bp, Homo sapien
tgatttgtcaggtgtgggaagttcc

SEQ ID NO: 5124987 - DNA, 25 bp, Homo sapien
tgggtcttgacatgtatagacctgg

SEQ ID NO: 5124988 - DNA, 25 bp, Homo sapien
cctgggtcaaaccaagacaaacttg

SEQ ID NO: 5124989 - DNA, 25 bp, Homo sapien
ttcagacacttcagcaggaagccat

SEQ ID NO: 5124990 - DNA, 25 bp, Homo sapien
tgagatgtgctcatcgaggccattg

SEQ ID NO: 5124991 - DNA, 25 bp, Homo sapien
gatgtgctcatcgaggccattgtgg

SEQ ID NO: 5124992 - DNA, 25 bp, Homo sapien
ctgtgagatgtgctcatcgaggcca

SEQ ID NO: 5124993 - DNA, 25 bp, Homo sapien
tgtgagatgtgctcatcgaggccat

SEQ ID NO: 5124994 - DNA, 25 bp, Homo sapien
ctatggttgatccatggaacagctg

SEQ ID NO: 5124995 - DNA, 25 bp, Homo sapien
cctatggttgatccatggaacagct

SEQ ID NO: 5124996 - DNA, 25 bp, Homo sapien
agggtgacatctcctaggtcgtgct

SEQ ID NO: 5124997 - DNA, 25 bp, Homo sapien
ctaggtcgtgctgatcaaagtggct

SEQ ID NO: 5124998 - DNA, 25 bp, Homo sapien
tgctgatcaaagtggctagttctct

SEQ ID NO: 5124999 - DNA, 25 bp, Homo sapien
cgtcctcgggttctgactggtgtag

SEQ ID NO: 5125000 - DNA, 25 bp, Homo sapien
ggctggttcgttgagtctttcatcg

SEQ ID NO: 5125001 - DNA, 25 bp, Homo sapien
cgttgagtgataccacctctgcaga

SEQ ID NO: 5125002 - DNA, 25 bp, Homo sapien
ctggtcgttaaaggctggttcgttg

SEQ ID NO: 5125003 - DNA, 25 bp, Homo sapien
tctttcatcgttgagtgataccacc

SEQ ID NO: 5125004 - DNA, 25 bp, Homo sapien
tgtggcgaggtgtccttctagacca

SEQ ID NO: 5125005 - DNA, 25 bp, Homo sapien
cccgatgagcaggaacgtggagcct

SEQ ID NO: 5125006 - DNA, 25 bp, Homo sapien
tgcttatgggaaggaacacaggcct

SEQ ID NO: 5125007 - DNA, 25 bp, Homo sapien
caagtacagcgtagcatagtcctcc

SEQ ID NO: 5125008 - DNA, 25 bp, Homo sapien
cattgcgcagtcacctaggacctga

SEQ ID NO: 5125009 - DNA, 25 bp, Homo sapien
ggtgttgcagaaaattgacgtccag

SEQ ID NO: 5125010 - DNA, 25 bp, Homo sapien
acaaattccaggtgtaccagctgcg

SEQ ID NO: 5125011 - DNA, 25 bp, Homo sapien
agtcaagttctctctgtccgtctgg

SEQ ID NO: 5125012 - DNA, 25 bp, Homo sapien
gctctgctgaggccactcctaggag

SEQ ID NO: 5125013 - DNA, 25 bp, Homo sapien
tctgctgaggccactcctaggaggt

SEQ ID NO: 5125014 - DNA, 25 bp, Homo sapien
ccgctctgctgaggccactcctagg

SEQ ID NO: 5125015 - DNA, 25 bp, Homo sapien
ctgctgaggccactcctaggaggtt

SEQ ID NO: 5125016 - DNA, 25 bp, Homo sapien
ggttcaactgtgaacacgatgcagg

SEQ ID NO: 5125017 - DNA, 25 bp, Homo sapien
tgccttttggcctacacagacagtt

SEQ ID NO: 5125018 - DNA, 25 bp, Homo sapien
agagaacagcctgcagatgatggtg

SEQ ID NO: 5125019 - DNA, 25 bp, Homo sapien
tggtgcagtcgggagccaaaggttc

SEQ ID NO: 5125020 - DNA, 25 bp, Homo sapien
gaccatagtcttctacagctccagg

SEQ ID NO: 5125021 - DNA, 25 bp, Homo sapien
caaatgtccggcaggtaagtagcct

SEQ ID NO: 5125022 - DNA, 25 bp, Homo sapien
ccaaggaccatgtttgtgatgagca

SEQ ID NO: 5125023 - DNA, 25 bp, Homo sapien
tgatggtgcaaccaaaagtctgtgc

SEQ ID NO: 5125024 - DNA, 25 bp, Homo sapien
ctttgatttctctgcagagcatgtt

SEQ ID NO: 5125025 - DNA, 25 bp, Homo sapien
tgatttctctgcagagcatgttggg

SEQ ID NO: 5125026 - DNA, 25 bp, Homo sapien
tctctgcagagcatgttgggaaagc

SEQ ID NO: 5125027 - DNA, 25 bp, Homo sapien
atttctctgcagagcatgttgggaa

SEQ ID NO: 5125028 - DNA, 25 bp, Homo sapien
gccgacccgtcagcggctggccaag

SEQ ID NO: 5125029 - DNA, 25 bp, Homo sapien
tgttcacacaaacccgcccgccgac

SEQ ID NO: 5125030 - DNA, 25 bp, Homo sapien
gcccgccgacccgtcagcggctggc

SEQ ID NO: 5125031 - DNA, 25 bp, Homo sapien
tgcgtgcctgttcacacaaacccgc

SEQ ID NO: 5125032 - DNA, 25 bp, Homo sapien
caacctttgagagggttgcactacc

SEQ ID NO: 5125033 - DNA, 25 bp, Homo sapien
tgagagggttgcactaccagaataa

SEQ ID NO: 5125034 - DNA, 25 bp, Homo sapien
ccttcaacctttgagagggttgcac

SEQ ID NO: 5125035 - DNA, 25 bp, Homo sapien
cctttgagagggttgcactaccaga

SEQ ID NO: 5125036 - DNA, 25 bp, Homo sapien
ttttggaattactacttcttcaatc

SEQ ID NO: 5125037 - DNA, 25 bp, Homo sapien
tttggaattactacttcttcaatcc

SEQ ID NO: 5125038 - DNA, 25 bp, Homo sapien
cctgtttactgtggatgcaagtgcc

SEQ ID NO: 5125039 - DNA, 25 bp, Homo sapien
gtgcctgaagaacggctactttatc

SEQ ID NO: 5125040 - DNA, 25 bp, Homo sapien
ctgtttactgtggatgcaagtgcct

SEQ ID NO: 5125041 - DNA, 25 bp, Homo sapien
ggatgcaagtgcctgaagaacggct

SEQ ID NO: 5125042 - DNA, 25 bp, Homo sapien
tcgacttaaggaggatcaatatcca

SEQ ID NO: 5125043 - DNA, 25 bp, Homo sapien
ccaaagtttcagtgtatctaccaga

SEQ ID NO: 5125044 - DNA, 25 bp, Homo sapien
tctactcttgagttgccaacagaga

SEQ ID NO: 5125045 - DNA, 25 bp, Homo sapien
tctcaaagtcccgagctcacaggat

SEQ ID NO: 5125046 - DNA, 25 bp, Homo sapien
taaggatcatcttgaaacacataag

SEQ ID NO: 5125047 - DNA, 25 bp, Homo sapien
aggatcatcttgaaacacataaggc

SEQ ID NO: 5125048 - DNA, 25 bp, Homo sapien
ctggcataaggtaaggatcatcttg

SEQ ID NO: 5125049 - DNA, 25 bp, Homo sapien
tgatgctggcataaggtaaggatca

SEQ ID NO: 5125050 - DNA, 25 bp, Homo sapien
cggtatatgaggttcagctatgtcc

SEQ ID NO: 5125051 - DNA, 25 bp, Homo sapien
tatatgaggttcagctatgtccttc

SEQ ID NO: 5125052 - DNA, 25 bp, Homo sapien
aataataaacttggccacattctcc

SEQ ID NO: 5125053 - DNA, 25 bp, Homo sapien
cattctccccggatttctttgccag

SEQ ID NO: 5125054 - DNA, 25 bp, Homo sapien
aacatgtccacagaggctttgactt

SEQ ID NO: 5125055 - DNA, 25 bp, Homo sapien
aattcgttccttcagggcggcttca

SEQ ID NO: 5125056 - DNA, 25 bp, Homo sapien
catgtccacagaggctttgactttt

SEQ ID NO: 5125057 - DNA, 25 bp, Homo sapien
cttttctgagctcaattcgttcctt

SEQ ID NO: 5125058 - DNA, 25 bp, Homo sapien
tatgaatcatataacttgggcccac

SEQ ID NO: 5125059 - DNA, 25 bp, Homo sapien
tcaaagcccatgttattagaggggc

SEQ ID NO: 5125060 - DNA, 25 bp, Homo sapien
caggacctgtaactcttactcaaaa

SEQ ID NO: 5125061 - DNA, 25 bp, Homo sapien
aagcagagtaagtacagcaggacct

SEQ ID NO: 5125062 - DNA, 25 bp, Homo sapien
aatttgacgtagaagattggaacac

SEQ ID NO: 5125063 - DNA, 25 bp, Homo sapien
tgtccactactttatgcactcaacg

SEQ ID NO: 5125064 - DNA, 25 bp, Homo sapien
ggtcttcagggctacacacttaatg

SEQ ID NO: 5125065 - DNA, 25 bp, Homo sapien
taaacacctgaagtgacgtagacag

SEQ ID NO: 5125066 - DNA, 25 bp, Homo sapien
gttgagggctcctggtcaccatagt

SEQ ID NO: 5125067 - DNA, 25 bp, Homo sapien
cctggtcaccatagtaacacaataa

SEQ ID NO: 5125068 - DNA, 25 bp, Homo sapien
cacaataaatccaagagactatttg

SEQ ID NO: 5125069 - DNA, 25 bp, Homo sapien
gttgtttcaagagacacagtggttc

SEQ ID NO: 5125070 - DNA, 25 bp, Homo sapien
ggctatcgtaccacacatctcagta

SEQ ID NO: 5125071 - DNA, 25 bp, Homo sapien
cctcctataccactttttatcaagg

SEQ ID NO: 5125072 - DNA, 25 bp, Homo sapien
agtacaaatctctactaccctgaca

SEQ ID NO: 5125073 - DNA, 25 bp, Homo sapien
tgacacatggcaaaacaacccatct

SEQ ID NO: 5125074 - DNA, 25 bp, Homo sapien
cgccatgtaactccaaactgatgac

SEQ ID NO: 5125075 - DNA, 25 bp, Homo sapien
catgtaactccaaactgatgaccag

SEQ ID NO: 5125076 - DNA, 25 bp, Homo sapien
actccaaactgatgaccagctttcc

SEQ ID NO: 5125077 - DNA, 25 bp, Homo sapien
tgtaactccaaactgatgaccagct

SEQ ID NO: 5125078 - DNA, 25 bp, Homo sapien
ccaatgagagctaccaccatttact

SEQ ID NO: 5125079 - DNA, 25 bp, Homo sapien
tgttctaggcaatgtgccaagtact

SEQ ID NO: 5125080 - DNA, 25 bp, Homo sapien
gcttcgcaggttaagtggcagaatt

SEQ ID NO: 5125081 - DNA, 25 bp, Homo sapien
taatgtgttgtcagggcttcgcagg

SEQ ID NO: 5125082 - DNA, 25 bp, Homo sapien
ttctctggcattagagaaaagattc

SEQ ID NO: 5125083 - DNA, 25 bp, Homo sapien
gaaaagattctctcagcgttgtttt

SEQ ID NO: 5125084 - DNA, 25 bp, Homo sapien
ctggcattagagaaaagattctctc

SEQ ID NO: 5125085 - DNA, 25 bp, Homo sapien
aagattctctcagcgttgttttttg

SEQ ID NO: 5125086 - DNA, 25 bp, Homo sapien
tggagtctgttgtttagtaactcag

SEQ ID NO: 5125087 - DNA, 25 bp, Homo sapien
gttgtttagtaactcagtgtacaag

SEQ ID NO: 5125088 - DNA, 25 bp, Homo sapien
ttaatgcctgctcataagctcggtg

SEQ ID NO: 5125089 - DNA, 25 bp, Homo sapien
agtgtacaagtttaatgcctgctca

SEQ ID NO: 5125090 - DNA, 25 bp, Homo sapien
tctcatttatcgcacatactgttgc

SEQ ID NO: 5125091 - DNA, 25 bp, Homo sapien
ctcatttatcgcacatactgttgct

SEQ ID NO: 5125092 - DNA, 25 bp, Homo sapien
atttctcatttatcgcacatactgt

SEQ ID NO: 5125093 - DNA, 25 bp, Homo sapien
tttatcgcacatactgttgcttcaa

SEQ ID NO: 5125094 - DNA, 25 bp, Homo sapien
caacctctgcctcgtgggctgaggt

SEQ ID NO: 5125095 - DNA, 25 bp, Homo sapien
cctctgcctcgtgggctgaggtgat

SEQ ID NO: 5125096 - DNA, 25 bp, Homo sapien
tgcgactacaggcgagcaccactat

SEQ ID NO: 5125097 - DNA, 25 bp, Homo sapien
tctgcctcgtgggctgaggtgattc

SEQ ID NO: 5125098 - DNA, 25 bp, Homo sapien
gctggcgatcttgcaaacacatgaa

SEQ ID NO: 5125099 - DNA, 25 bp, Homo sapien
tcacgtaaaacctgtaaggctggcg

SEQ ID NO: 5125100 - DNA, 25 bp, Homo sapien
tcatttcacgtaaaacctgtaaggc

SEQ ID NO: 5125101 - DNA, 25 bp, Homo sapien
aaacctgtaaggctggcgatcttgc

SEQ ID NO: 5125102 - DNA, 25 bp, Homo sapien
taaaggcactcccactataataagt

SEQ ID NO: 5125103 - DNA, 25 bp, Homo sapien
tagctaactcaaagcaatcacttct

SEQ ID NO: 5125104 - DNA, 25 bp, Homo sapien
gcttatgtagccctgaaacctctgg

SEQ ID NO: 5125105 - DNA, 25 bp, Homo sapien
tctcctcagattcaacagatccata

SEQ ID NO: 5125106 - DNA, 25 bp, Homo sapien
tccaactcattaatgtaaaggtaaa

SEQ ID NO: 5125107 - DNA, 25 bp, Homo sapien
ttccaactcattaatgtaaaggtaa

SEQ ID NO: 5125108 - DNA, 25 bp, Homo sapien
gatcaaacaggcgaataatatggtg

SEQ ID NO: 5125109 - DNA, 25 bp, Homo sapien
tcaaacaggcgaataatatggtgat

SEQ ID NO: 5125110 - DNA, 25 bp, Homo sapien
caggttgatcaaacaggcgaataat

SEQ ID NO: 5125111 - DNA, 25 bp, Homo sapien
gttgatcaaacaggcgaataatatg

SEQ ID NO: 5125112 - DNA, 25 bp, Homo sapien
taaaagtggacaacgcatggagcct

SEQ ID NO: 5125113 - DNA, 25 bp, Homo sapien
tagctccatcacaatctcaccaagg

SEQ ID NO: 5125114 - DNA, 25 bp, Homo sapien
taaatggtagagtggacatctcagc

SEQ ID NO: 5125115 - DNA, 25 bp, Homo sapien
gagtgcctcatatgtgccctccaag

SEQ ID NO: 5125116 - DNA, 25 bp, Homo sapien
catcatccgggtcctttggagaaaa

SEQ ID NO: 5125117 - DNA, 25 bp, Homo sapien
tggagaaaatctctttcccattaat

SEQ ID NO: 5125118 - DNA, 25 bp, Homo sapien
tcataaatgatgaaggatgatctct

SEQ ID NO: 5125119 - DNA, 25 bp, Homo sapien
atgaaggatgatctctttaaagggt

SEQ ID NO: 5125120 - DNA, 25 bp, Homo sapien
taagctatagggatcacaaggcctc

SEQ ID NO: 5125121 - DNA, 25 bp, Homo sapien
ctctaactggtactcaggtaaaccg

SEQ ID NO: 5125122 - DNA, 25 bp, Homo sapien
agagaggcaggaatgtaccacaatt

SEQ ID NO: 5125123 - DNA, 25 bp, Homo sapien
aatcctgccaacaaaactggtaaca

SEQ ID NO: 5125124 - DNA, 25 bp, Homo sapien
atgctcatggctgactgaaaaaact

SEQ ID NO: 5125125 - DNA, 25 bp, Homo sapien
tatgctcatggctgactgaaaaaac

SEQ ID NO: 5125126 - DNA, 25 bp, Homo sapien
gaaaagtacagattttaggccaggc

SEQ ID NO: 5125127 - DNA, 25 bp, Homo sapien
gataaatttaggaaatggatagcaa

SEQ ID NO: 5125128 - DNA, 25 bp, Homo sapien
gcatgggggacacagtgaacctcca

SEQ ID NO: 5125129 - DNA, 25 bp, Homo sapien
gggagaaccctccagttacagataa

SEQ ID NO: 5125130 - DNA, 25 bp, Homo sapien
tatacatacgcttgagtacccagag

SEQ ID NO: 5125131 - DNA, 25 bp, Homo sapien
ttactatgaaatactggttgctgcc

SEQ ID NO: 5125132 - DNA, 25 bp, Homo sapien
tggtcaagtgcacaaaagacacctg

SEQ ID NO: 5125133 - DNA, 25 bp, Homo sapien
taaaacaccctgaaagtatgcctgg

SEQ ID NO: 5125134 - DNA, 25 bp, Homo sapien
gcaagtagtaagtatcactctgata

SEQ ID NO: 5125135 - DNA, 25 bp, Homo sapien
gtagtaagtatcactctgataccct

SEQ ID NO: 5125136 - DNA, 25 bp, Homo sapien
tatgcaagtagtaagtatcactctg

SEQ ID NO: 5125137 - DNA, 25 bp, Homo sapien
aatatgcaagtagtaagtatcactc

SEQ ID NO: 5125138 - DNA, 25 bp, Homo sapien
ggtccaatgaatttccagttgtctc

SEQ ID NO: 5125139 - DNA, 25 bp, Homo sapien
tacgatgttgatcaggtccaatgaa

SEQ ID NO: 5125140 - DNA, 25 bp, Homo sapien
taatagaaattacgatgttgatcag

SEQ ID NO: 5125141 - DNA, 25 bp, Homo sapien
gaaattacgatgttgatcaggtcca

SEQ ID NO: 5125142 - DNA, 25 bp, Homo sapien
gtgctcaattaacatgtcctattag

SEQ ID NO: 5125143 - DNA, 25 bp, Homo sapien
gaatctggtaactcatgcaaaagga

SEQ ID NO: 5125144 - DNA, 25 bp, Homo sapien
gatcattggcatgttgcctgaaacc

SEQ ID NO: 5125145 - DNA, 25 bp, Homo sapien
aacagcctcccacttgcagaatctg

SEQ ID NO: 5125146 - DNA, 25 bp, Homo sapien
tgaaggtatcaggtcctcataccac

SEQ ID NO: 5125147 - DNA, 25 bp, Homo sapien
cattaatctgcagaaacccaattca

SEQ ID NO: 5125148 - DNA, 25 bp, Homo sapien
ttctagccgattggccacatccaat

SEQ ID NO: 5125149 - DNA, 25 bp, Homo sapien
gaatcacttctagccgattggccac

SEQ ID NO: 5125150 - DNA, 25 bp, Homo sapien
tgcttggagaagatgtatcattgtt

SEQ ID NO: 5125151 - DNA, 25 bp, Homo sapien
attttaggaatcacttctagccgat

SEQ ID NO: 5125152 - DNA, 25 bp, Homo sapien
caggtcactgcggaaagtatgacca

SEQ ID NO: 5125153 - DNA, 25 bp, Homo sapien
ccttgccatgagcatcaggatctct

SEQ ID NO: 5125154 - DNA, 25 bp, Homo sapien
gcggaaagtatgaccatattcttta

SEQ ID NO: 5125155 - DNA, 25 bp, Homo sapien
gtcccttgccatgagcatcaggatc

SEQ ID NO: 5125156 - DNA, 25 bp, Homo sapien
aatcctgagcagtctgtctgatggg

SEQ ID NO: 5125157 - DNA, 25 bp, Homo sapien
gcccttaaaaagaggatagctatac

SEQ ID NO: 5125158 - DNA, 25 bp, Homo sapien
gatgggttggctttcatacgcagat

SEQ ID NO: 5125159 - DNA, 25 bp, Homo sapien
ggatagctatacagttgagagaggt

SEQ ID NO: 5125160 - DNA, 25 bp, Homo sapien
tgccacatgcaggacaaaggagaaa

SEQ ID NO: 5125161 - DNA, 25 bp, Homo sapien
ccacatgcaggacaaaggagaaaca

SEQ ID NO: 5125162 - DNA, 25 bp, Homo sapien
actcagctgaggtccgtacccctgc

SEQ ID NO: 5125163 - DNA, 25 bp, Homo sapien
ccctgcgccaatcatcacagcctgg

SEQ ID NO: 5125164 - DNA, 25 bp, Homo sapien
tacatgagaatcaccgcaggtgctt

SEQ ID NO: 5125165 - DNA, 25 bp, Homo sapien
caatgtcaagatttgctggtacagg

SEQ ID NO: 5125166 - DNA, 25 bp, Homo sapien
tatactgtaagctcccaaagacaca

SEQ ID NO: 5125167 - DNA, 25 bp, Homo sapien
gcaggtgcttaaactccccaaacga

SEQ ID NO: 5125168 - DNA, 25 bp, Homo sapien
atgcttcctgaaaagccccaacatt

SEQ ID NO: 5125169 - DNA, 25 bp, Homo sapien
tgcttcctgaaaagccccaacattt

SEQ ID NO: 5125170 - DNA, 25 bp, Homo sapien
ctaggaatcttattatgcttcctga

SEQ ID NO: 5125171 - DNA, 25 bp, Homo sapien
ggaatcttattatgcttcctgaaaa

SEQ ID NO: 5125172 - DNA, 25 bp, Homo sapien
gctgtacccaaagagagctggctga

SEQ ID NO: 5125173 - DNA, 25 bp, Homo sapien
cccaaagagagctggctgatttcaa

SEQ ID NO: 5125174 - DNA, 25 bp, Homo sapien
tgtacccaaagagagctggctgatt

SEQ ID NO: 5125175 - DNA, 25 bp, Homo sapien
tacccaaagagagctggctgatttc

SEQ ID NO: 5125176 - DNA, 25 bp, Homo sapien
aaaactgcttgcctcaggatgccct

SEQ ID NO: 5125177 - DNA, 25 bp, Homo sapien
gagttgacggtatgcttgcctaaca

SEQ ID NO: 5125178 - DNA, 25 bp, Homo sapien
tgtagccccaatgtatgatgatccg

SEQ ID NO: 5125179 - DNA, 25 bp, Homo sapien
tgatgatccgtcaacacagataaaa

SEQ ID NO: 5125180 - DNA, 25 bp, Homo sapien
agatccagtgtaagttcagtaacag

SEQ ID NO: 5125181 - DNA, 25 bp, Homo sapien
caagatccagtgtaagttcagtaac

SEQ ID NO: 5125182 - DNA, 25 bp, Homo sapien
aaaacatttataggcaagatccagt

SEQ ID NO: 5125183 - DNA, 25 bp, Homo sapien
agtaaaacatttataggcaagatcc

SEQ ID NO: 5125184 - DNA, 25 bp, Homo sapien
tgtaaaagaaaggcaaagtgtgaac

SEQ ID NO: 5125185 - DNA, 25 bp, Homo sapien
aagaaaggcaaagtgtgaactttct

SEQ ID NO: 5125186 - DNA, 25 bp, Homo sapien
aaggcaaagtgtgaactttctccag

SEQ ID NO: 5125187 - DNA, 25 bp, Homo sapien
gaaaggcaaagtgtgaactttctcc

SEQ ID NO: 5125188 - DNA, 25 bp, Homo sapien
gctctactacttcaatggcctggga

SEQ ID NO: 5125189 - DNA, 25 bp, Homo sapien
taacagtcaaatctataggctttcc

SEQ ID NO: 5125190 - DNA, 25 bp, Homo sapien
ggattacactgcaattcaactgggt

SEQ ID NO: 5125191 - DNA, 25 bp, Homo sapien
gacactcacctatagcctgtcagtt

SEQ ID NO: 5125192 - DNA, 25 bp, Homo sapien
ggaccctgcagttgcattaaactat

SEQ ID NO: 5125193 - DNA, 25 bp, Homo sapien
tgcagttagattacttagggcttcc

SEQ ID NO: 5125194 - DNA, 25 bp, Homo sapien
tcaatgcagttagattacttagggc

SEQ ID NO: 5125195 - DNA, 25 bp, Homo sapien
cactggtcaatgcagttagattact

SEQ ID NO: 5125196 - DNA, 25 bp, Homo sapien
cactgtcactggtcaatgcagttag

SEQ ID NO: 5125197 - DNA, 25 bp, Homo sapien
taaatgctaagcctttaatggtgca

SEQ ID NO: 5125198 - DNA, 25 bp, Homo sapien
gatggttaagtagcatattagcagc

SEQ ID NO: 5125199 - DNA, 25 bp, Homo sapien
cagttctcaggtgtgattccagcag

SEQ ID NO: 5125200 - DNA, 25 bp, Homo sapien
tggtgagacccattgctgctcctga

SEQ ID NO: 5125201 - DNA, 25 bp, Homo sapien
tacctaagtaaatctgggagccagg

SEQ ID NO: 5125202 - DNA, 25 bp, Homo sapien
gctgcttatgtggacaactcgtggg

SEQ ID NO: 5125203 - DNA, 25 bp, Homo sapien
aaggatgtatgactgggtcccggcc

SEQ ID NO: 5125204 - DNA, 25 bp, Homo sapien
cgagttaacatttcaggtggccaag

SEQ ID NO: 5125205 - DNA, 25 bp, Homo sapien
gacaccacgggtacttgtggcagaa

SEQ ID NO: 5125206 - DNA, 25 bp, Homo sapien
tttaataggctatttcctgggccag

SEQ ID NO: 5125207 - DNA, 25 bp, Homo sapien
tccaagtcccaaatgagtggtgcca

SEQ ID NO: 5125208 - DNA, 25 bp, Homo sapien
taacttgcttggctcagtgcagaac

SEQ ID NO: 5125209 - DNA, 25 bp, Homo sapien
ttagtagttcctttaccagccaaca

SEQ ID NO: 5125210 - DNA, 25 bp, Homo sapien
tggattctcagtgctacttcaagga

SEQ ID NO: 5125211 - DNA, 25 bp, Homo sapien
gccattagggcaggtaggcttctct

SEQ ID NO: 5125212 - DNA, 25 bp, Homo sapien
tatccgggaggtggatatagccctg

SEQ ID NO: 5125213 - DNA, 25 bp, Homo sapien
gttctaaatgttaacacctgttgca

SEQ ID NO: 5125214 - DNA, 25 bp, Homo sapien
tgctatcatgtcagtgaacgccagg

SEQ ID NO: 5125215 - DNA, 25 bp, Homo sapien
gcttgtgaggccaatcaaaataatg

SEQ ID NO: 5125216 - DNA, 25 bp, Homo sapien
gaacgccaggagtgctttctttgca

SEQ ID NO: 5125217 - DNA, 25 bp, Homo sapien
tgccagcgccgtaggaataggaacc

SEQ ID NO: 5125218 - DNA, 25 bp, Homo sapien
gaaacacctactatcccgctgggta

SEQ ID NO: 5125219 - DNA, 25 bp, Homo sapien
gaaatcctgacagcatatgccagcg

SEQ ID NO: 5125220 - DNA, 25 bp, Homo sapien
gaattcacccaagctttaaccgcag

SEQ ID NO: 5125221 - DNA, 25 bp, Homo sapien
cagactcagaggaatcgaacaggct

SEQ ID NO: 5125222 - DNA, 25 bp, Homo sapien
ctatgtcgcatgtgcctgggtggta

SEQ ID NO: 5125223 - DNA, 25 bp, Homo sapien
caatttcgtcgtctcagtcaagagc

SEQ ID NO: 5125224 - DNA, 25 bp, Homo sapien
caggctgttcagagtaagcataagc

SEQ ID NO: 5125225 - DNA, 25 bp, Homo sapien
tgaatctaaacttgcttcatctcca

SEQ ID NO: 5125226 - DNA, 25 bp, Homo sapien
gtttaattccataatccgtgattgg

SEQ ID NO: 5125227 - DNA, 25 bp, Homo sapien
cacagctgcaacactactcttgtag

SEQ ID NO: 5125228 - DNA, 25 bp, Homo sapien
ggtgaacatgagttccagctagtgt

SEQ ID NO: 5125229 - DNA, 25 bp, Homo sapien
agctcagaatgctgcggtccaggct

SEQ ID NO: 5125230 - DNA, 25 bp, Homo sapien
gaagatgctctgaggcaaactgcaa

SEQ ID NO: 5125231 - DNA, 25 bp, Homo sapien
tctagccaagagcttagaagatgct

SEQ ID NO: 5125232 - DNA, 25 bp, Homo sapien
tgtcactctgcaggctattgcagct

SEQ ID NO: 5125233 - DNA, 25 bp, Homo sapien
gcacccaccaccatgtctggataat

SEQ ID NO: 5125234 - DNA, 25 bp, Homo sapien
acccaccaccatgtctggataattt

SEQ ID NO: 5125235 - DNA, 25 bp, Homo sapien
ggcacccaccaccatgtctggataa

SEQ ID NO: 5125236 - DNA, 25 bp, Homo sapien
aaaaactgatcaccctgaaattggt

SEQ ID NO: 5125237 - DNA, 25 bp, Homo sapien
tgaaggaaaacccacacctgcactt

SEQ ID NO: 5125238 - DNA, 25 bp, Homo sapien
gtgataccctgtcggtcccagcccc

SEQ ID NO: 5125239 - DNA, 25 bp, Homo sapien
cagcccctgcagttcagcctgagga

SEQ ID NO: 5125240 - DNA, 25 bp, Homo sapien
tcagtcgggtccactaaaaatctct

SEQ ID NO: 5125241 - DNA, 25 bp, Homo sapien
tgaaagaatctaaacagcctgcctc

SEQ ID NO: 5125242 - DNA, 25 bp, Homo sapien
attcagtcgggtccactaaaaatct

SEQ ID NO: 5125243 - DNA, 25 bp, Homo sapien
aagaatctaaacagcctgcctcaca

SEQ ID NO: 5125244 - DNA, 25 bp, Homo sapien
gcactatcctatatgccaaatggga

SEQ ID NO: 5125245 - DNA, 25 bp, Homo sapien
tcccatttccgggaaagtgtagaga

SEQ ID NO: 5125246 - DNA, 25 bp, Homo sapien
tcagacaaactcttcgagatggttc

SEQ ID NO: 5125247 - DNA, 25 bp, Homo sapien
tgactactggcaaaattgctggagc

SEQ ID NO: 5125248 - DNA, 25 bp, Homo sapien
gtctctgtgggaagtttgtcctccg

SEQ ID NO: 5125249 - DNA, 25 bp, Homo sapien
gcagatactctacttcaggcagctc

SEQ ID NO: 5125250 - DNA, 25 bp, Homo sapien
gaagtttgtcctccgtccattgcga

SEQ ID NO: 5125251 - DNA, 25 bp, Homo sapien
gtccattgcgaccatgccgcagata

SEQ ID NO: 5125252 - DNA, 25 bp, Homo sapien
accagttagcgcttgtgatgaacac

SEQ ID NO: 5125253 - DNA, 25 bp, Homo sapien
agtacgtcagttcattaggtgtagc

SEQ ID NO: 5125254 - DNA, 25 bp, Homo sapien
tgatgaacactatacttggaactct

SEQ ID NO: 5125255 - DNA, 25 bp, Homo sapien
cctggcctacttggaactctttagc

SEQ ID NO: 5125256 - DNA, 25 bp, Homo sapien
tattgcagttgcagtctgctggcca

SEQ ID NO: 5125257 - DNA, 25 bp, Homo sapien
gaagcccacccatgttatagggcaa

SEQ ID NO: 5125258 - DNA, 25 bp, Homo sapien
tttggcagactggagacctaggaca

SEQ ID NO: 5125259 - DNA, 25 bp, Homo sapien
taaggactctactcacacagttatg

SEQ ID NO: 5125260 - DNA, 25 bp, Homo sapien
cagcgccgtccgcttgaccgagatg

SEQ ID NO: 5125261 - DNA, 25 bp, Homo sapien
agttatcgggtgtgaccgccgccgc

SEQ ID NO: 5125262 - DNA, 25 bp, Homo sapien
gatgctgcgggcctgtcagttatcg

SEQ ID NO: 5125263 - DNA, 25 bp, Homo sapien
ttgaccgagatgctgcgggcctgtc

SEQ ID NO: 5125264 - DNA, 25 bp, Homo sapien
caagggtccccacagtgttagttca

SEQ ID NO: 5125265 - DNA, 25 bp, Homo sapien
ttgacacgtttagcacaagggtccc

SEQ ID NO: 5125266 - DNA, 25 bp, Homo sapien
aagaatggatttcagagcgctctcc

SEQ ID NO: 5125267 - DNA, 25 bp, Homo sapien
gcaatcactatgactccctggaggg

SEQ ID NO: 5125268 - DNA, 25 bp, Homo sapien
ggtgcttctgcattgacttcccatc

SEQ ID NO: 5125269 - DNA, 25 bp, Homo sapien
gaatactttcaacggtgcttctgca

SEQ ID NO: 5125270 - DNA, 25 bp, Homo sapien
cctgcccagtggaatactttcaacg

SEQ ID NO: 5125271 - DNA, 25 bp, Homo sapien
cacaaactgcagccaaaatgatgtt

SEQ ID NO: 5125272 - DNA, 25 bp, Homo sapien
gaagctgctctcactgcaccagcaa

SEQ ID NO: 5125273 - DNA, 25 bp, Homo sapien
gctgctctcactgcaccagcaaagg

SEQ ID NO: 5125274 - DNA, 25 bp, Homo sapien
tgctctcactgcaccagcaaaggca

SEQ ID NO: 5125275 - DNA, 25 bp, Homo sapien
ctgaagctgctctcactgcaccagc

SEQ ID NO: 5125276 - DNA, 25 bp, Homo sapien
tgcggtaggttgaagatgccaaaat

SEQ ID NO: 5125277 - DNA, 25 bp, Homo sapien
gacacagttgcggtaggttgaagat

SEQ ID NO: 5125278 - DNA, 25 bp, Homo sapien
cagttgcggtaggttgaagatgcca

SEQ ID NO: 5125279 - DNA, 25 bp, Homo sapien
attcttgacacagttgcggtaggtt

SEQ ID NO: 5125280 - DNA, 25 bp, Homo sapien
tgcaggtaggcaaagaataccacct

SEQ ID NO: 5125281 - DNA, 25 bp, Homo sapien
acagtctcccactcaatcaagcaga

SEQ ID NO: 5125282 - DNA, 25 bp, Homo sapien
tgctgcaggcgcctagatacatgga

SEQ ID NO: 5125283 - DNA, 25 bp, Homo sapien
atacatggatgtcagtcacagtctc

SEQ ID NO: 5125284 - DNA, 25 bp, Homo sapien
agatctgactggcagcttcaggaca

SEQ ID NO: 5125285 - DNA, 25 bp, Homo sapien
agtatgttagagatctgactggcag

SEQ ID NO: 5125286 - DNA, 25 bp, Homo sapien
ctgaagtatgttagagatctgactg

SEQ ID NO: 5125287 - DNA, 25 bp, Homo sapien
gaagtatgttagagatctgactggc

SEQ ID NO: 5125288 - DNA, 25 bp, Homo sapien
tatcgatgacagctttcacggtctt

SEQ ID NO: 5125289 - DNA, 25 bp, Homo sapien
agctttcacggtctttctcttgcct

SEQ ID NO: 5125290 - DNA, 25 bp, Homo sapien
caatgaagtcgaagaaacctatcga

SEQ ID NO: 5125291 - DNA, 25 bp, Homo sapien
aacctatcgatgacagctttcacgg

SEQ ID NO: 5125292 - DNA, 25 bp, Homo sapien
tccagaaggacgtcgtcattttatc

SEQ ID NO: 5125293 - DNA, 25 bp, Homo sapien
ctcttccagaaggacgtcgtcattt

SEQ ID NO: 5125294 - DNA, 25 bp, Homo sapien
cttctgataaggatcatcaacgtac

SEQ ID NO: 5125295 - DNA, 25 bp, Homo sapien
cgatcatgatacttctgataaggat

SEQ ID NO: 5125296 - DNA, 25 bp, Homo sapien
ctttcaggtttgttcgatcatgata

SEQ ID NO: 5125297 - DNA, 25 bp, Homo sapien
gtttgttcgatcatgatacttctga

SEQ ID NO: 5125298 - DNA, 25 bp, Homo sapien
tgctgaggagcaccacccaatttct

SEQ ID NO: 5125299 - DNA, 25 bp, Homo sapien
tattggtcccataagtagacacgca

SEQ ID NO: 5125300 - DNA, 25 bp, Homo sapien
tagatgttaagtgtgctgccacccc

SEQ ID NO: 5125301 - DNA, 25 bp, Homo sapien
aagtcacatgcatgcagagcccaag

SEQ ID NO: 5125302 - DNA, 25 bp, Homo sapien
ttcagtccatctttggatgctgagg

SEQ ID NO: 5125303 - DNA, 25 bp, Homo sapien
aataaagacatcatggaggctgtgc

SEQ ID NO: 5125304 - DNA, 25 bp, Homo sapien
tgaggcccctgtaacagagaccctt

SEQ ID NO: 5125305 - DNA, 25 bp, Homo sapien
tacccagaggtacatcagagagcag

SEQ ID NO: 5125306 - DNA, 25 bp, Homo sapien
aaatcgtatgtatgaaattcccttt

SEQ ID NO: 5125307 - DNA, 25 bp, Homo sapien
aatcgtatgtatgaaattccctttc

SEQ ID NO: 5125308 - DNA, 25 bp, Homo sapien
cagattataaaatcagtgttgatga

SEQ ID NO: 5125309 - DNA, 25 bp, Homo sapien
tataaaatcagtgttgatgataagc

SEQ ID NO: 5125310 - DNA, 25 bp, Homo sapien
taaaatcagtgttgatgataagccc

SEQ ID NO: 5125311 - DNA, 25 bp, Homo sapien
aatcagtgttgatgataagccctcc

SEQ ID NO: 5125312 - DNA, 25 bp, Homo sapien
tgggtcttattagctgtactttggg

SEQ ID NO: 5125313 - DNA, 25 bp, Homo sapien
cagttagacagtatgtatgtaccca

SEQ ID NO: 5125314 - DNA, 25 bp, Homo sapien
tatagtaccagattacagtcacttg

SEQ ID NO: 5125315 - DNA, 25 bp, Homo sapien
tagggcttaactaatcattatgtcc

SEQ ID NO: 5125316 - DNA, 25 bp, Homo sapien
tggtccaatgtcaacagaactagga

SEQ ID NO: 5125317 - DNA, 25 bp, Homo sapien
ggccacaaagacttggaagctcaaa

SEQ ID NO: 5125318 - DNA, 25 bp, Homo sapien
ctcaaacttcattgggtggccacaa

SEQ ID NO: 5125319 - DNA, 25 bp, Homo sapien
cgtttatttactgagcctggtccaa

SEQ ID NO: 5125320 - DNA, 25 bp, Homo sapien
tgtgaaaatagaatagtccactggt

SEQ ID NO: 5125321 - DNA, 25 bp, Homo sapien
gcaaacagacgtttggtccatcatt

SEQ ID NO: 5125322 - DNA, 25 bp, Homo sapien
aaaaatcatcggcagaaactaggta

SEQ ID NO: 5125323 - DNA, 25 bp, Homo sapien
gcagaaactaggtagctgtgaaaat

SEQ ID NO: 5125324 - DNA, 25 bp, Homo sapien
gataagagtgcttgtcaaccatgac

SEQ ID NO: 5125325 - DNA, 25 bp, Homo sapien
tacaaaatgctagctggaaagtctg

SEQ ID NO: 5125326 - DNA, 25 bp, Homo sapien
cacctggcacagtatttgaaatggc

SEQ ID NO: 5125327 - DNA, 25 bp, Homo sapien
gaagcgctctattctcagacatgct

SEQ ID NO: 5125328 - DNA, 25 bp, Homo sapien
gacacattagctggatcttagccac

SEQ ID NO: 5125329 - DNA, 25 bp, Homo sapien
gcactacaggccttatcagacgttt

SEQ ID NO: 5125330 - DNA, 25 bp, Homo sapien
tattagaggcctttgctgatgacac

SEQ ID NO: 5125331 - DNA, 25 bp, Homo sapien
gtcagtcaactataaacaggcccaa

SEQ ID NO: 5125332 - DNA, 25 bp, Homo sapien
caattggattgtcattatagacagc

SEQ ID NO: 5125333 - DNA, 25 bp, Homo sapien
taaagcttccaaatacaactccagt

SEQ ID NO: 5125334 - DNA, 25 bp, Homo sapien
ttttgattctagagaacgtctcaga

SEQ ID NO: 5125335 - DNA, 25 bp, Homo sapien
gaaagataagagaatcacccctatg

SEQ ID NO: 5125336 - DNA, 25 bp, Homo sapien
tctttgagtgtggacaagacgcaca

SEQ ID NO: 5125337 - DNA, 25 bp, Homo sapien
gctcataggagcattttgaatctca

SEQ ID NO: 5125338 - DNA, 25 bp, Homo sapien
atctgaaattctttgagtgtggaca

SEQ ID NO: 5125339 - DNA, 25 bp, Homo sapien
gacgcacaaaggtcatgctcatagg

SEQ ID NO: 5125340 - DNA, 25 bp, Homo sapien
catgaacaaggtataagtggacccc

SEQ ID NO: 5125341 - DNA, 25 bp, Homo sapien
tgaagtggccgctctcagtggtgac

SEQ ID NO: 5125342 - DNA, 25 bp, Homo sapien
caggcatttccgctattcagataca

SEQ ID NO: 5125343 - DNA, 25 bp, Homo sapien
tctactggcatggttgtttacgaag

SEQ ID NO: 5125344 - DNA, 25 bp, Homo sapien
gccagaagcgcactttagcagctgc

SEQ ID NO: 5125345 - DNA, 25 bp, Homo sapien
cagaagcgcactttagcagctgcga

SEQ ID NO: 5125346 - DNA, 25 bp, Homo sapien
gaagcgcactttagcagctgcgagc

SEQ ID NO: 5125347 - DNA, 25 bp, Homo sapien
tccagccagaagcgcactttagcag

SEQ ID NO: 5125348 - DNA, 25 bp, Homo sapien
cagtagggaacaatggtatcttttg

SEQ ID NO: 5125349 - DNA, 25 bp, Homo sapien
gtggcagaggcccttgatatcaaca

SEQ ID NO: 5125350 - DNA, 25 bp, Homo sapien
gaggcccttgatatcaacataagca

SEQ ID NO: 5125351 - DNA, 25 bp, Homo sapien
gcccttgatatcaacataagcagct

SEQ ID NO: 5125352 - DNA, 25 bp, Homo sapien
tgctcagctggtgcagaccagagtg

SEQ ID NO: 5125353 - DNA, 25 bp, Homo sapien
tcagctggtgcagaccagagtgcag

SEQ ID NO: 5125354 - DNA, 25 bp, Homo sapien
gctgatgtggatgctgagcttgctc

SEQ ID NO: 5125355 - DNA, 25 bp, Homo sapien
ctgttagagacaggagagcagctgg

SEQ ID NO: 5125356 - DNA, 25 bp, Homo sapien
cctggaatagggaaattggcttaag

SEQ ID NO: 5125357 - DNA, 25 bp, Homo sapien
tacagaggaaaagtccaaagcctgg

SEQ ID NO: 5125358 - DNA, 25 bp, Homo sapien
taaggcaaggatatgtgatccaaga

SEQ ID NO: 5125359 - DNA, 25 bp, Homo sapien
cacttggtagaagggcagatgttca

SEQ ID NO: 5125360 - DNA, 25 bp, Homo sapien
ctgtggggcttggtgaagtcactca

SEQ ID NO: 5125361 - DNA, 25 bp, Homo sapien
ggaggtaaggcactgtggggcttgg

SEQ ID NO: 5125362 - DNA, 25 bp, Homo sapien
tgagatcagctgtggttgtggcctt

SEQ ID NO: 5125363 - DNA, 25 bp, Homo sapien
aggatgagatcagctgtggttgtgg

SEQ ID NO: 5125364 - DNA, 25 bp, Homo sapien
agagacattgtctcactgtgttctc

SEQ ID NO: 5125365 - DNA, 25 bp, Homo sapien
tctcactgtgttctcactattttgc

SEQ ID NO: 5125366 - DNA, 25 bp, Homo sapien
tgggtgcaagaggttctcctgccct

SEQ ID NO: 5125367 - DNA, 25 bp, Homo sapien
ctgggtgcaagaggttctcctgccc

SEQ ID NO: 5125368 - DNA, 25 bp, Homo sapien
tacctccaggaatgcacgggaaatt

SEQ ID NO: 5125369 - DNA, 25 bp, Homo sapien
aatcttggagtaaacgcctggagcc

SEQ ID NO: 5125370 - DNA, 25 bp, Homo sapien
taggtgtctgcatcgacagcggcaa

SEQ ID NO: 5125371 - DNA, 25 bp, Homo sapien
tcgatttgcagaggccccgaatggg

SEQ ID NO: 5125372 - DNA, 25 bp, Homo sapien
acagatgggccattcccgtgggcat

SEQ ID NO: 5125373 - DNA, 25 bp, Homo sapien
cagaggacacagatgggccattccc

SEQ ID NO: 5125374 - DNA, 25 bp, Homo sapien
gaggacacagatgggccattcccgt

SEQ ID NO: 5125375 - DNA, 25 bp, Homo sapien
acacagatgggccattcccgtgggc

SEQ ID NO: 5125376 - DNA, 25 bp, Homo sapien
gtgttttgtccacgaagatgaagaa

SEQ ID NO: 5125377 - DNA, 25 bp, Homo sapien
cctccagtgttttgtccacgaagat

SEQ ID NO: 5125378 - DNA, 25 bp, Homo sapien
ctccagtgttttgtccacgaagatg

SEQ ID NO: 5125379 - DNA, 25 bp, Homo sapien
ggtgtgagcctgtaacactgtaaca

SEQ ID NO: 5125380 - DNA, 25 bp, Homo sapien
tgaagtggaacatccattgcccttg

SEQ ID NO: 5125381 - DNA, 25 bp, Homo sapien
gtaaagaagatccaacctcactcaa

SEQ ID NO: 5125382 - DNA, 25 bp, Homo sapien
atagctggtaaaacagagagctggt

SEQ ID NO: 5125383 - DNA, 25 bp, Homo sapien
ttgggcagggatggtaacatgtcta

SEQ ID NO: 5125384 - DNA, 25 bp, Homo sapien
gtaacatgtctagggcacattgccc

SEQ ID NO: 5125385 - DNA, 25 bp, Homo sapien
ttgccaccggactcagtgctgggct

SEQ ID NO: 5125386 - DNA, 25 bp, Homo sapien
aggaagattctgtttgccaccggac

SEQ ID NO: 5125387 - DNA, 25 bp, Homo sapien
ggatccatttcggcacattgaacat

SEQ ID NO: 5125388 - DNA, 25 bp, Homo sapien
caggatccatttcggcacattgaac

SEQ ID NO: 5125389 - DNA, 25 bp, Homo sapien
aggatccatttcggcacattgaaca

SEQ ID NO: 5125390 - DNA, 25 bp, Homo sapien
atcttttttgcatagttcttcgatt

SEQ ID NO: 5125391 - DNA, 25 bp, Homo sapien
tcttttttgcatagttcttcgatta

SEQ ID NO: 5125392 - DNA, 25 bp, Homo sapien
cttttttgcatagttcttcgattac

SEQ ID NO: 5125393 - DNA, 25 bp, Homo sapien
cttgatgactttatagatcaagatt

SEQ ID NO: 5125394 - DNA, 25 bp, Homo sapien
ctttatagatcaagattctggagtc

SEQ ID NO: 5125395 - DNA, 25 bp, Homo sapien
atcaagattctggagtctggcagca

SEQ ID NO: 5125396 - DNA, 25 bp, Homo sapien
atgactttatagatcaagattctgg

SEQ ID NO: 5125397 - DNA, 25 bp, Homo sapien
cgctgacttggttcaagagctctca

SEQ ID NO: 5125398 - DNA, 25 bp, Homo sapien
agagctctcacaagacacgcacagc

SEQ ID NO: 5125399 - DNA, 25 bp, Homo sapien
cgcctccctgagtcaccggcggcag

SEQ ID NO: 5125400 - DNA, 25 bp, Homo sapien
tagccgactccagcgctgacttggt

SEQ ID NO: 5125401 - DNA, 25 bp, Homo sapien
agtggatttgaaagtgctcagcccc

SEQ ID NO: 5125402 - DNA, 25 bp, Homo sapien
agctcaaacgcaaccgcagagggag

SEQ ID NO: 5125403 - DNA, 25 bp, Homo sapien
caaacgcaaccgcagagggagtgag

SEQ ID NO: 5125404 - DNA, 25 bp, Homo sapien
gggaaaaattatctgcggctcgagt

SEQ ID NO: 5125405 - DNA, 25 bp, Homo sapien
ggtttccacgcctgcaggaagagct

SEQ ID NO: 5125406 - DNA, 25 bp, Homo sapien
ccacgcctgcaggaagagctcctcc

SEQ ID NO: 5125407 - DNA, 25 bp, Homo sapien
tttccacgcctgcaggaagagctcc

SEQ ID NO: 5125408 - DNA, 25 bp, Homo sapien
ttccacgcctgcaggaagagctcct

SEQ ID NO: 5125409 - DNA, 25 bp, Homo sapien
ctgcggacagactgagaaacctcct

SEQ ID NO: 5125410 - DNA, 25 bp, Homo sapien
tcagatccttcttggtaacgtcggt

SEQ ID NO: 5125411 - DNA, 25 bp, Homo sapien
caactttctccgagcgtgagcacca

SEQ ID NO: 5125412 - DNA, 25 bp, Homo sapien
gaaacagctcgaatggtcccggaga

SEQ ID NO: 5125413 - DNA, 25 bp, Homo sapien
aactgcgaaacgtccggtggcagag

SEQ ID NO: 5125414 - DNA, 25 bp, Homo sapien
cacggtaactgcgaaacgtccggtg

SEQ ID NO: 5125415 - DNA, 25 bp, Homo sapien
ggtaactgcgaaacgtccggtggca

SEQ ID NO: 5125416 - DNA, 25 bp, Homo sapien
aacgtccggtggcagaggcccggag

SEQ ID NO: 5125417 - DNA, 25 bp, Homo sapien
gccaactttctggtctccgttttca

SEQ ID NO: 5125418 - DNA, 25 bp, Homo sapien
ccaactttctggtctccgttttcag

SEQ ID NO: 5125419 - DNA, 25 bp, Homo sapien
tgccaactttctggtctccgttttc

SEQ ID NO: 5125420 - DNA, 25 bp, Homo sapien
cggaaggagggaaccgatggtcgcg

SEQ ID NO: 5125421 - DNA, 25 bp, Homo sapien
cacagcaccggcattaatgaagcgt

SEQ ID NO: 5125422 - DNA, 25 bp, Homo sapien
gaagcgtgtctgaacaaccctaagc

SEQ ID NO: 5125423 - DNA, 25 bp, Homo sapien
aagatctagcttcctgcaccttcag

SEQ ID NO: 5125424 - DNA, 25 bp, Homo sapien
tacaggccctacctaacgctaacaa

SEQ ID NO: 5125425 - DNA, 25 bp, Homo sapien
cagaaaaaggttctgagtgtcataa

SEQ ID NO: 5125426 - DNA, 25 bp, Homo sapien
agaaaaaggttctgagtgtcataat

SEQ ID NO: 5125427 - DNA, 25 bp, Homo sapien
gaaaaaggttctgagtgtcataatg

SEQ ID NO: 5125428 - DNA, 25 bp, Homo sapien
cagttattttcgcacaaaggagtct

SEQ ID NO: 5125429 - DNA, 25 bp, Homo sapien
tctgttctgacaagcttccttcaag

SEQ ID NO: 5125430 - DNA, 25 bp, Homo sapien
caatacttctattagggagcacaat

SEQ ID NO: 5125431 - DNA, 25 bp, Homo sapien
tactaggcagggtggaaatatcttc

SEQ ID NO: 5125432 - DNA, 25 bp, Homo sapien
gtaaccaactactagacatattctc

SEQ ID NO: 5125433 - DNA, 25 bp, Homo sapien
ctttttgtcatctaagtaagtggtt

SEQ ID NO: 5125434 - DNA, 25 bp, Homo sapien
ttgtcatctaagtaagtggttttgt

SEQ ID NO: 5125435 - DNA, 25 bp, Homo sapien
accaactactagacatattctcttt

SEQ ID NO: 5125436 - DNA, 25 bp, Homo sapien
aatcctttatctggatgtgctttcc

SEQ ID NO: 5125437 - DNA, 25 bp, Homo sapien
atttgaatcctttatctggatgtgc

SEQ ID NO: 5125438 - DNA, 25 bp, Homo sapien
ttgaatcctttatctggatgtgctt

SEQ ID NO: 5125439 - DNA, 25 bp, Homo sapien
tcctttatctggatgtgctttcccc

SEQ ID NO: 5125440 - DNA, 25 bp, Homo sapien
ggccactgtacaattcgttcagaaa

SEQ ID NO: 5125441 - DNA, 25 bp, Homo sapien
caggtgactttcgttcagctaaaac

SEQ ID NO: 5125442 - DNA, 25 bp, Homo sapien
tttcctccaagattccccatcaaat

SEQ ID NO: 5125443 - DNA, 25 bp, Homo sapien
gaaggctgtagacttctatccatct

SEQ ID NO: 5125444 - DNA, 25 bp, Homo sapien
gttgatctcccagaaagcgaacaga

SEQ ID NO: 5125445 - DNA, 25 bp, Homo sapien
ccagctttgtccaacagaggtttgt

SEQ ID NO: 5125446 - DNA, 25 bp, Homo sapien
gaagttatggatcccaaaccagctt

SEQ ID NO: 5125447 - DNA, 25 bp, Homo sapien
gtataggcttcaaaaggtctttaga

SEQ ID NO: 5125448 - DNA, 25 bp, Homo sapien
gcactataactcagacgaatgaagc

SEQ ID NO: 5125449 - DNA, 25 bp, Homo sapien
aatacaggtgtaggttccttcaagc

SEQ ID NO: 5125450 - DNA, 25 bp, Homo sapien
tatactgcttatgcactaaccttga

SEQ ID NO: 5125451 - DNA, 25 bp, Homo sapien
gacacatcatggcacttcagcactg

SEQ ID NO: 5125452 - DNA, 25 bp, Homo sapien
aatgcttcacaatcaaagcttgaaa

SEQ ID NO: 5125453 - DNA, 25 bp, Homo sapien
gagaaagtcgaagactgtttacatc

SEQ ID NO: 5125454 - DNA, 25 bp, Homo sapien
gattatccgtaagagaaagtcgaag

SEQ ID NO: 5125455 - DNA, 25 bp, Homo sapien
tactgacaatctgattatccgtaag

SEQ ID NO: 5125456 - DNA, 25 bp, Homo sapien
gatgggtccaagctataaattttta

SEQ ID NO: 5125457 - DNA, 25 bp, Homo sapien
ctgaaaaccactgagtagatgggtc

SEQ ID NO: 5125458 - DNA, 25 bp, Homo sapien
taacggttgctgaaaaccactgagt

SEQ ID NO: 5125459 - DNA, 25 bp, Homo sapien
catttataacggttgctgaaaacca

SEQ ID NO: 5125460 - DNA, 25 bp, Homo sapien
tcataaatgctttgtatagttatca

SEQ ID NO: 5125461 - DNA, 25 bp, Homo sapien
tgtcgagttatcttacaaagagtta

SEQ ID NO: 5125462 - DNA, 25 bp, Homo sapien
ggttcattaacataacaataggagc

SEQ ID NO: 5125463 - DNA, 25 bp, Homo sapien
taataaaggtatttagtgcctagaa

SEQ ID NO: 5125464 - DNA, 25 bp, Homo sapien
cagtgacggatcaacaattttcagt

SEQ ID NO: 5125465 - DNA, 25 bp, Homo sapien
caacttcaacatgaatcagtgacgg

SEQ ID NO: 5125466 - DNA, 25 bp, Homo sapien
cacatgtcacaaggttatcgtgtac

SEQ ID NO: 5125467 - DNA, 25 bp, Homo sapien
ggttatcgtgtacaacttcaacatg

SEQ ID NO: 5125468 - DNA, 25 bp, Homo sapien
tgcttgtttggaaaccagggttcca

SEQ ID NO: 5125469 - DNA, 25 bp, Homo sapien
tattctcagaagacttgcgttttac

SEQ ID NO: 5125470 - DNA, 25 bp, Homo sapien
gaagacttgcgttttacagctccaa

SEQ ID NO: 5125471 - DNA, 25 bp, Homo sapien
ttccattattctcagaagacttgcg

SEQ ID NO: 5125472 - DNA, 25 bp, Homo sapien
caggcaacgtcgtaactctgaggaa

SEQ ID NO: 5125473 - DNA, 25 bp, Homo sapien
caacgtcgtaactctgaggaatagt

SEQ ID NO: 5125474 - DNA, 25 bp, Homo sapien
ccagcagacggagataatataattg

SEQ ID NO: 5125475 - DNA, 25 bp, Homo sapien
taattgagtgtatgatagaattcta

SEQ ID NO: 5125476 - DNA, 25 bp, Homo sapien
ctataccagtcatggcaatagttcc

SEQ ID NO: 5125477 - DNA, 25 bp, Homo sapien
caaggagtgaatgctgttagcatgt

SEQ ID NO: 5125478 - DNA, 25 bp, Homo sapien
gctgttagcatgtaacatttctaaa

SEQ ID NO: 5125479 - DNA, 25 bp, Homo sapien
aaggagtgaatgctgttagcatgta

SEQ ID NO: 5125480 - DNA, 25 bp, Homo sapien
gagttgccgcagtacagccaagcag

SEQ ID NO: 5125481 - DNA, 25 bp, Homo sapien
gttgccgcagtacagccaagcagta

SEQ ID NO: 5125482 - DNA, 25 bp, Homo sapien
ttgccgcagtacagccaagcagtat

SEQ ID NO: 5125483 - DNA, 25 bp, Homo sapien
gtggagttgccgcagtacagccaag

SEQ ID NO: 5125484 - DNA, 25 bp, Homo sapien
tttttgctccaaggttaggtggaga

SEQ ID NO: 5125485 - DNA, 25 bp, Homo sapien
cctggggagtactttgctgtcttgg

SEQ ID NO: 5125486 - DNA, 25 bp, Homo sapien
tttgctccaaggttaggtggagagt

SEQ ID NO: 5125487 - DNA, 25 bp, Homo sapien
gagttggcagcctggggagtacttt

SEQ ID NO: 5125488 - DNA, 25 bp, Homo sapien
tattagggctatcactattgacacc

SEQ ID NO: 5125489 - DNA, 25 bp, Homo sapien
gaagcctttgtaggtaagcactcct

SEQ ID NO: 5125490 - DNA, 25 bp, Homo sapien
aaattctgtgatcggcaagctaaag

SEQ ID NO: 5125491 - DNA, 25 bp, Homo sapien
ccttaggaaggccagtcaatgcttg

SEQ ID NO: 5125492 - DNA, 25 bp, Homo sapien
ccaataaagatattgagaaacactc

SEQ ID NO: 5125493 - DNA, 25 bp, Homo sapien
taccaataaagatattgagaaacac

SEQ ID NO: 5125494 - DNA, 25 bp, Homo sapien
aataaagatattgagaaacactcac

SEQ ID NO: 5125495 - DNA, 25 bp, Homo sapien
cttctaccaataaagatattgagaa

SEQ ID NO: 5125496 - DNA, 25 bp, Homo sapien
cagaggcctgacttagtagatgtcc

SEQ ID NO: 5125497 - DNA, 25 bp, Homo sapien
cagccagactcacaattcaaagtta

SEQ ID NO: 5125498 - DNA, 25 bp, Homo sapien
tctaaaaatggctcaacagaagaca

SEQ ID NO: 5125499 - DNA, 25 bp, Homo sapien
catttaattcaaactcgatctcgag

SEQ ID NO: 5125500 - DNA, 25 bp, Homo sapien
gaatcatcctgtacgaaggcctcgc

SEQ ID NO: 5125501 - DNA, 25 bp, Homo sapien
tatccttgcggagactgtccaagcg

SEQ ID NO: 5125502 - DNA, 25 bp, Homo sapien
gacactctcggcatttaggcaactg

SEQ ID NO: 5125503 - DNA, 25 bp, Homo sapien
tttagctgggtctgtcaaaaccgac

SEQ ID NO: 5125504 - DNA, 25 bp, Homo sapien
caaaagtatgccagatgatctagca

SEQ ID NO: 5125505 - DNA, 25 bp, Homo sapien
gcccagattatctgaacttttccca

SEQ ID NO: 5125506 - DNA, 25 bp, Homo sapien
tgcaataagatctagattctccaac

SEQ ID NO: 5125507 - DNA, 25 bp, Homo sapien
gatctagcataacaagtatgcccag

SEQ ID NO: 5125508 - DNA, 25 bp, Homo sapien
ttaagaagccttctacccgcaacac

SEQ ID NO: 5125509 - DNA, 25 bp, Homo sapien
gaagtggtctccaatgttggccaag

SEQ ID NO: 5125510 - DNA, 25 bp, Homo sapien
tttgctgtgtccaaatcaatcccca

SEQ ID NO: 5125511 - DNA, 25 bp, Homo sapien
ttaaaggtaaccacaagccaattgc

SEQ ID NO: 5125512 - DNA, 25 bp, Homo sapien
atcagtaaatcacttagtctttgga

SEQ ID NO: 5125513 - DNA, 25 bp, Homo sapien
cagtaaatcacttagtctttggaag

SEQ ID NO: 5125514 - DNA, 25 bp, Homo sapien
tcagtaaatcacttagtctttggaa

SEQ ID NO: 5125515 - DNA, 25 bp, Homo sapien
tttctcgaacacctttgacagctcg

SEQ ID NO: 5125516 - DNA, 25 bp, Homo sapien
tctcttcatccggtagcagtccaca

SEQ ID NO: 5125517 - DNA, 25 bp, Homo sapien
gaagatggtggtgtcgcacacatca

SEQ ID NO: 5125518 - DNA, 25 bp, Homo sapien
cacacccagtgcaggttgaagatgg

SEQ ID NO: 5125519 - DNA, 25 bp, Homo sapien
tgcttcaagaaacccgccaaacaca

SEQ ID NO: 5125520 - DNA, 25 bp, Homo sapien
taactgatttgtagtaactgttctt

SEQ ID NO: 5125521 - DNA, 25 bp, Homo sapien
gctggaggagaatcaaatcggttct

SEQ ID NO: 5125522 - DNA, 25 bp, Homo sapien
acttgatttaactgtgtagaggggc

SEQ ID NO: 5125523 - DNA, 25 bp, Homo sapien
ttccaggaatgatctgtgtgggcat

SEQ ID NO: 5125524 - DNA, 25 bp, Homo sapien
gttcatgtatctgactcttcacaca

SEQ ID NO: 5125525 - DNA, 25 bp, Homo sapien
tctgtgtgggcattaagttctctgg

SEQ ID NO: 5125526 - DNA, 25 bp, Homo sapien
caagagaaagtcttgtaagcagcac

SEQ ID NO: 5125527 - DNA, 25 bp, Homo sapien
gaggccttccccaaaatgcattttc

SEQ ID NO: 5125528 - DNA, 25 bp, Homo sapien
cagaggcaaacatctgaacaaggat

SEQ ID NO: 5125529 - DNA, 25 bp, Homo sapien
taccagctcccatgagttaaccaag

SEQ ID NO: 5125530 - DNA, 25 bp, Homo sapien
ctggcattccccacaggattacttt

SEQ ID NO: 5125531 - DNA, 25 bp, Homo sapien
gaacaatgtctccaacatcatagag

SEQ ID NO: 5125532 - DNA, 25 bp, Homo sapien
acaatgtctccaacatcatagagtg

SEQ ID NO: 5125533 - DNA, 25 bp, Homo sapien
agaatgaacaatgtctccaacatca

SEQ ID NO: 5125534 - DNA, 25 bp, Homo sapien
atgaacaatgtctccaacatcatag

SEQ ID NO: 5125535 - DNA, 25 bp, Homo sapien
tttgaacaagggcagtttgccttta

SEQ ID NO: 5125536 - DNA, 25 bp, Homo sapien
aattgcctgtttgaacaagggcagt

SEQ ID NO: 5125537 - DNA, 25 bp, Homo sapien
gcctgtttgaacaagggcagtttgc

SEQ ID NO: 5125538 - DNA, 25 bp, Homo sapien
gaacaagggcagtttgcctttattc

SEQ ID NO: 5125539 - DNA, 25 bp, Homo sapien
tgccaccaaggagagacatatgagg

SEQ ID NO: 5125540 - DNA, 25 bp, Homo sapien
taatagttagccctgggtatcccca

SEQ ID NO: 5125541 - DNA, 25 bp, Homo sapien
taacacaactagcacgtggaaggaa

SEQ ID NO: 5125542 - DNA, 25 bp, Homo sapien
tcctaatagccgaccaacaagtaag

SEQ ID NO: 5125543 - DNA, 25 bp, Homo sapien
ttaggtcggccagccagtttagagg

SEQ ID NO: 5125544 - DNA, 25 bp, Homo sapien
tgacattcccgctggttaggtcggc

SEQ ID NO: 5125545 - DNA, 25 bp, Homo sapien
gctgctggctccaacactgagggat

SEQ ID NO: 5125546 - DNA, 25 bp, Homo sapien
gagcactgcaccaagagtcggtttt

SEQ ID NO: 5125547 - DNA, 25 bp, Homo sapien
aattgtgctgttaaacgtatggagg

SEQ ID NO: 5125548 - DNA, 25 bp, Homo sapien
ttgtgctgttaaacgtatggaggac

SEQ ID NO: 5125549 - DNA, 25 bp, Homo sapien
gcttacgggtgtcaaaattgtgctg

SEQ ID NO: 5125550 - DNA, 25 bp, Homo sapien
ccggaggaaaccagaattgttgttg

SEQ ID NO: 5125551 - DNA, 25 bp, Homo sapien
aaagaggcaaagatgtcatcaagga

SEQ ID NO: 5125552 - DNA, 25 bp, Homo sapien
gatgtcatcaaggatttttggtgta

SEQ ID NO: 5125553 - DNA, 25 bp, Homo sapien
atttttggtgtattcttgagtccat

SEQ ID NO: 5125554 - DNA, 25 bp, Homo sapien
ttggtgtattcttgagtccattttc

SEQ ID NO: 5125555 - DNA, 25 bp, Homo sapien
aatcagaagtcgtcttattttgcac

SEQ ID NO: 5125556 - DNA, 25 bp, Homo sapien
gctgggcttgatggttagtccttga

SEQ ID NO: 5125557 - DNA, 25 bp, Homo sapien
gcaagcacagcaagcgattatcaca

SEQ ID NO: 5125558 - DNA, 25 bp, Homo sapien
ccaatagtgaggagtgtcaaagccc

SEQ ID NO: 5125559 - DNA, 25 bp, Homo sapien
gggttgtcagaagtctgctaaagga

SEQ ID NO: 5125560 - DNA, 25 bp, Homo sapien
tgtcagaagtctgctaaaggaactg

SEQ ID NO: 5125561 - DNA, 25 bp, Homo sapien
cagaagtctgctaaaggaactgaga

SEQ ID NO: 5125562 - DNA, 25 bp, Homo sapien
gggttctgaatagggcaggaggatg

SEQ ID NO: 5125563 - DNA, 25 bp, Homo sapien
gatccaacaacactgccctttgaag

SEQ ID NO: 5125564 - DNA, 25 bp, Homo sapien
tctcctaaagatattaaccggcact

SEQ ID NO: 5125565 - DNA, 25 bp, Homo sapien
gtagcacattttgtctgatctccca

SEQ ID NO: 5125566 - DNA, 25 bp, Homo sapien
tctgctgaagtttaccataggaatc

SEQ ID NO: 5125567 - DNA, 25 bp, Homo sapien
tcttgtccaagagcagagtgttcct

SEQ ID NO: 5125568 - DNA, 25 bp, Homo sapien
agtgttcctttagcaaagaccctat

SEQ ID NO: 5125569 - DNA, 25 bp, Homo sapien
gagtgttcctttagcaaagacccta

SEQ ID NO: 5125570 - DNA, 25 bp, Homo sapien
cttgtccaagagcagagtgttcctt

SEQ ID NO: 5125571 - DNA, 25 bp, Homo sapien
ttttggccgtctaagacaacccaga

SEQ ID NO: 5125572 - DNA, 25 bp, Homo sapien
gaaagaaagcctgccgataaactgt

SEQ ID NO: 5125573 - DNA, 25 bp, Homo sapien
caggaatatggcctgtgacacccct

SEQ ID NO: 5125574 - DNA, 25 bp, Homo sapien
tgagcaaatcctattagtacactgg

SEQ ID NO: 5125575 - DNA, 25 bp, Homo sapien
agtgacaccagtcaccagtgaaaca

SEQ ID NO: 5125576 - DNA, 25 bp, Homo sapien
ggtgactgaccccaccgtacttgag

SEQ ID NO: 5125577 - DNA, 25 bp, Homo sapien
cagtcaccagtgaaacagggtgact

SEQ ID NO: 5125578 - DNA, 25 bp, Homo sapien
gtgactgaccccaccgtacttgagc

SEQ ID NO: 5125579 - DNA, 25 bp, Homo sapien
gcaagacggactgtgaagaagacaa

SEQ ID NO: 5125580 - DNA, 25 bp, Homo sapien
caagacggactgtgaagaagacaag

SEQ ID NO: 5125581 - DNA, 25 bp, Homo sapien
agacggactgtgaagaagacaagcg

SEQ ID NO: 5125582 - DNA, 25 bp, Homo sapien
agcaagacggactgtgaagaagaca

SEQ ID NO: 5125583 - DNA, 25 bp, Homo sapien
tccgtctcagatggtgatgtgacag

SEQ ID NO: 5125584 - DNA, 25 bp, Homo sapien
gaaaggatcacctctcctagtaaga

SEQ ID NO: 5125585 - DNA, 25 bp, Homo sapien
caaactacatgggtaagcatctagg

SEQ ID NO: 5125586 - DNA, 25 bp, Homo sapien
aaaactttagtctgaactctgccag

SEQ ID NO: 5125587 - DNA, 25 bp, Homo sapien
gttcagagttcaatttatgatgcac

SEQ ID NO: 5125588 - DNA, 25 bp, Homo sapien
agagttcaatttatgatgcactcca

SEQ ID NO: 5125589 - DNA, 25 bp, Homo sapien
agttcagagttcaatttatgatgca

SEQ ID NO: 5125590 - DNA, 25 bp, Homo sapien
tcagagttcaatttatgatgcactc

SEQ ID NO: 5125591 - DNA, 25 bp, Homo sapien
cctgtgatgatttcattggtcctac

SEQ ID NO: 5125592 - DNA, 25 bp, Homo sapien
taactaggtctacttcctgctcacc

SEQ ID NO: 5125593 - DNA, 25 bp, Homo sapien
ttcattggtcctacaattaactagg

SEQ ID NO: 5125594 - DNA, 25 bp, Homo sapien
tacaattaactaggtctacttcctg

SEQ ID NO: 5125595 - DNA, 25 bp, Homo sapien
tcaacagctgtcatcgatccaatct

SEQ ID NO: 5125596 - DNA, 25 bp, Homo sapien
ggcagcaaggtgcagcaaaataaag

SEQ ID NO: 5125597 - DNA, 25 bp, Homo sapien
tcattcttgggagattcagccgctc

SEQ ID NO: 5125598 - DNA, 25 bp, Homo sapien
cactgcatgtaggtggtatttcaac

SEQ ID NO: 5125599 - DNA, 25 bp, Homo sapien
aattttcataacctgataaatttag

SEQ ID NO: 5125600 - DNA, 25 bp, Homo sapien
ccctcctaccaactatccaccattt

SEQ ID NO: 5125601 - DNA, 25 bp, Homo sapien
gcattttatgcctcaacaatacaaa

SEQ ID NO: 5125602 - DNA, 25 bp, Homo sapien
tcataacctgataaatttagtatac

SEQ ID NO: 5125603 - DNA, 25 bp, Homo sapien
ctggaaggcatcatatctctaaaat

SEQ ID NO: 5125604 - DNA, 25 bp, Homo sapien
tggaaggcatcatatctctaaaatc

SEQ ID NO: 5125605 - DNA, 25 bp, Homo sapien
ggaaggcatcatatctctaaaatct

SEQ ID NO: 5125606 - DNA, 25 bp, Homo sapien
catgcctccaatgactacagactag

SEQ ID NO: 5125607 - DNA, 25 bp, Homo sapien
tgttttctcactacctcaaaaaaga

SEQ ID NO: 5125608 - DNA, 25 bp, Homo sapien
gaatttatcctaccaagtgaaggac

SEQ ID NO: 5125609 - DNA, 25 bp, Homo sapien
cagaatcatctctccccaccttcat

SEQ ID NO: 5125610 - DNA, 25 bp, Homo sapien
ccagatctggccgaacaaagtagtt

SEQ ID NO: 5125611 - DNA, 25 bp, Homo sapien
caaattcagtttgccatctcgcctt

SEQ ID NO: 5125612 - DNA, 25 bp, Homo sapien
tggcagcctagaggccaaattcagt

SEQ ID NO: 5125613 - DNA, 25 bp, Homo sapien
tactcgggcagtggaatgttggcca

SEQ ID NO: 5125614 - DNA, 25 bp, Homo sapien
taaccaatcgatgtgctagcaagaa

SEQ ID NO: 5125615 - DNA, 25 bp, Homo sapien
cataaacctggaacgtcaaatggct

SEQ ID NO: 5125616 - DNA, 25 bp, Homo sapien
tataagaaggaatactgcccaacgc

SEQ ID NO: 5125617 - DNA, 25 bp, Homo sapien
gaaagacccgctgccaagctagtta

SEQ ID NO: 5125618 - DNA, 25 bp, Homo sapien
gacattagctgcatcagatacatct

SEQ ID NO: 5125619 - DNA, 25 bp, Homo sapien
ccatatttccgatcttcaggagtga

SEQ ID NO: 5125620 - DNA, 25 bp, Homo sapien
ttccatatttccgatcttcaggagt

SEQ ID NO: 5125621 - DNA, 25 bp, Homo sapien
tcccacatagaccatgacattagct

SEQ ID NO: 5125622 - DNA, 25 bp, Homo sapien
aaagagtaagccctccttttatgct

SEQ ID NO: 5125623 - DNA, 25 bp, Homo sapien
gccctggctcaaagagtaagccctc

SEQ ID NO: 5125624 - DNA, 25 bp, Homo sapien
agagaaagcagatatcagaccacaa

SEQ ID NO: 5125625 - DNA, 25 bp, Homo sapien
gcagatatcagaccacaagccctgg

SEQ ID NO: 5125626 - DNA, 25 bp, Homo sapien
tattgtgagttcgtcagaatctcca

SEQ ID NO: 5125627 - DNA, 25 bp, Homo sapien
gtcctttgcagcatatatgtgccac

SEQ ID NO: 5125628 - DNA, 25 bp, Homo sapien
gaatctccatcttggatggtcttaa

SEQ ID NO: 5125629 - DNA, 25 bp, Homo sapien
tcccttatcttctccgtgtcctttg

SEQ ID NO: 5125630 - DNA, 25 bp, Homo sapien
ggttgtgacaattcccctagccaag

SEQ ID NO: 5125631 - DNA, 25 bp, Homo sapien
caaagacacctgagttgcaaccggc

SEQ ID NO: 5125632 - DNA, 25 bp, Homo sapien
cccattggcagaagacgactagtag

SEQ ID NO: 5125633 - DNA, 25 bp, Homo sapien
tcactcagaacatggtcactcaggg

SEQ ID NO: 5125634 - DNA, 25 bp, Homo sapien
gaagacgttttcttaatgatcggtc

SEQ ID NO: 5125635 - DNA, 25 bp, Homo sapien
aataccagctttgatcatgaatagg

SEQ ID NO: 5125636 - DNA, 25 bp, Homo sapien
aataggatcgtggtctgctgggttt

SEQ ID NO: 5125637 - DNA, 25 bp, Homo sapien
ttaatgatcggtctaaataccagct

SEQ ID NO: 5125638 - DNA, 25 bp, Homo sapien
aagaaactgtacaatagcccagcct

SEQ ID NO: 5125639 - DNA, 25 bp, Homo sapien
gaaactgtacaatagcccagccttg

SEQ ID NO: 5125640 - DNA, 25 bp, Homo sapien
catccccaagaaactgtacaatagc

SEQ ID NO: 5125641 - DNA, 25 bp, Homo sapien
ccccaagaaactgtacaatagccca

SEQ ID NO: 5125642 - DNA, 25 bp, Homo sapien
tgtggagctcctgccgggataaaca

SEQ ID NO: 5125643 - DNA, 25 bp, Homo sapien
gtggagctcctgccgggataaacac

SEQ ID NO: 5125644 - DNA, 25 bp, Homo sapien
ctgatgtggagctcctgccgggata

SEQ ID NO: 5125645 - DNA, 25 bp, Homo sapien
gatgtggagctcctgccgggataaa

SEQ ID NO: 5125646 - DNA, 25 bp, Homo sapien
taagccagaagcagtgtttaacatg

SEQ ID NO: 5125647 - DNA, 25 bp, Homo sapien
gccagaagcagtgtttaacatgctc

SEQ ID NO: 5125648 - DNA, 25 bp, Homo sapien
gcagtgtttaacatgctctggagaa

SEQ ID NO: 5125649 - DNA, 25 bp, Homo sapien
ctgagtaagccagaagcagtgttta

SEQ ID NO: 5125650 - DNA, 25 bp, Homo sapien
gagtctgtgacagatatcggaattc

SEQ ID NO: 5125651 - DNA, 25 bp, Homo sapien
ctgtaatttatcttcgtgattggta

SEQ ID NO: 5125652 - DNA, 25 bp, Homo sapien
gattggtatgagtctgtgacagata

SEQ ID NO: 5125653 - DNA, 25 bp, Homo sapien
tttatcttcgtgattggtatgagtc

SEQ ID NO: 5125654 - DNA, 25 bp, Homo sapien
tactaagtacgatatggccaagttc

SEQ ID NO: 5125655 - DNA, 25 bp, Homo sapien
taaagcaagttcctcgactcactgt

SEQ ID NO: 5125656 - DNA, 25 bp, Homo sapien
gattcagttctgctctacctaagag

SEQ ID NO: 5125657 - DNA, 25 bp, Homo sapien
cactgcagcactgaaggttaagcac

SEQ ID NO: 5125658 - DNA, 25 bp, Homo sapien
tttcactgcatggtagataacattc

SEQ ID NO: 5125659 - DNA, 25 bp, Homo sapien
agacagagtaccctcacaagttggg

SEQ ID NO: 5125660 - DNA, 25 bp, Homo sapien
ttccagagctgatacgaggttttgc

SEQ ID NO: 5125661 - DNA, 25 bp, Homo sapien
taactgcaggtattgttccagagct

SEQ ID NO: 5125662 - DNA, 25 bp, Homo sapien
tctgcactaggtgagaagtcacagt

SEQ ID NO: 5125663 - DNA, 25 bp, Homo sapien
tgacacccaaaggaacatacaggtt

SEQ ID NO: 5125664 - DNA, 25 bp, Homo sapien
cacagaccagtggaatatgagagcc

SEQ ID NO: 5125665 - DNA, 25 bp, Homo sapien
tgaaatttaatacggatcctctggc

SEQ ID NO: 5125666 - DNA, 25 bp, Homo sapien
aatcagtgggctaaagaaaggcgct

SEQ ID NO: 5125667 - DNA, 25 bp, Homo sapien
cctgttcacggatggcatgatttta

SEQ ID NO: 5125668 - DNA, 25 bp, Homo sapien
gattatatacaggagtaagtaaaat

SEQ ID NO: 5125669 - DNA, 25 bp, Homo sapien
gaacatggaactgaaaattctaacc

SEQ ID NO: 5125670 - DNA, 25 bp, Homo sapien
aattatccctgttcacggatggcat

SEQ ID NO: 5125671 - DNA, 25 bp, Homo sapien
gcataaaccatatgggcacaaaaca

SEQ ID NO: 5125672 - DNA, 25 bp, Homo sapien
agaaaatacctgagatatggctcac

SEQ ID NO: 5125673 - DNA, 25 bp, Homo sapien
cataaaccatatgggcacaaaacaa

SEQ ID NO: 5125674 - DNA, 25 bp, Homo sapien
atacctgagatatggctcacgcctg

SEQ ID NO: 5125675 - DNA, 25 bp, Homo sapien
tcagcaagatgttggagtagacagg

SEQ ID NO: 5125676 - DNA, 25 bp, Homo sapien
aaatgcagatctaagccatagtggg

SEQ ID NO: 5125677 - DNA, 25 bp, Homo sapien
ttgaggcatcagaattaacatcccc

SEQ ID NO: 5125678 - DNA, 25 bp, Homo sapien
gtagacaggttcaaacacccatcct

SEQ ID NO: 5125679 - DNA, 25 bp, Homo sapien
gacttgacttggacatttgagttaa

SEQ ID NO: 5125680 - DNA, 25 bp, Homo sapien
atgagacttgacttggacatttgag

SEQ ID NO: 5125681 - DNA, 25 bp, Homo sapien
agatgagacttgacttggacatttg

SEQ ID NO: 5125682 - DNA, 25 bp, Homo sapien
tggaaataactgacttgtttttgat

SEQ ID NO: 5125683 - DNA, 25 bp, Homo sapien
aagaaatgcttttgtgggccagccc

SEQ ID NO: 5125684 - DNA, 25 bp, Homo sapien
tctgaactcgagagggtatctggca

SEQ ID NO: 5125685 - DNA, 25 bp, Homo sapien
aagaagagcctcatgttaacagcca

SEQ ID NO: 5125686 - DNA, 25 bp, Homo sapien
gatgtggcctgattgcttctaaaag

SEQ ID NO: 5125687 - DNA, 25 bp, Homo sapien
gaatccacaggtcaagttggcaaaa

SEQ ID NO: 5125688 - DNA, 25 bp, Homo sapien
tgttttgtgatagccttaatccagc

SEQ ID NO: 5125689 - DNA, 25 bp, Homo sapien
ccagctagtttcttcacaggatgat

SEQ ID NO: 5125690 - DNA, 25 bp, Homo sapien
gaaccagtttgtcaggatccacaaa

SEQ ID NO: 5125691 - DNA, 25 bp, Homo sapien
taaaagtggcataaataaatgcatc

SEQ ID NO: 5125692 - DNA, 25 bp, Homo sapien
ttttaggagtatagacagatatatc

SEQ ID NO: 5125693 - DNA, 25 bp, Homo sapien
acttctgaaaatataggtgattgcc

SEQ ID NO: 5125694 - DNA, 25 bp, Homo sapien
ggtgattgcctgaatgtcgaagact

SEQ ID NO: 5125695 - DNA, 25 bp, Homo sapien
cctcgttggtgcagtattgtctttt

SEQ ID NO: 5125696 - DNA, 25 bp, Homo sapien
ttcttcctcgttggtgcagtattgt

SEQ ID NO: 5125697 - DNA, 25 bp, Homo sapien
cagtattgtcttttgttaatgacag

SEQ ID NO: 5125698 - DNA, 25 bp, Homo sapien
cattctgtgtattgtttctcagaac

SEQ ID NO: 5125699 - DNA, 25 bp, Homo sapien
ttgtgacatcagtaactgaactggg

SEQ ID NO: 5125700 - DNA, 25 bp, Homo sapien
ctgtaatagcaactactgtggaggc

SEQ ID NO: 5125701 - DNA, 25 bp, Homo sapien
taaatgtaacattgtgacatcagta

SEQ ID NO: 5125702 - DNA, 25 bp, Homo sapien
tatgagagcatagttttcttactgc

SEQ ID NO: 5125703 - DNA, 25 bp, Homo sapien
tcctggcacataatgtgcgttaatg

SEQ ID NO: 5125704 - DNA, 25 bp, Homo sapien
taaaaactaatcttatgcatcttgc

SEQ ID NO: 5125705 - DNA, 25 bp, Homo sapien
tattttcgtcaggaaacttactcag

SEQ ID NO: 5125706 - DNA, 25 bp, Homo sapien
gttaaaggccctagaacagtagaca

SEQ ID NO: 5125707 - DNA, 25 bp, Homo sapien
gggcagggactcgacccagaagaat

SEQ ID NO: 5125708 - DNA, 25 bp, Homo sapien
tggacccggcttcgaactctcgtta

SEQ ID NO: 5125709 - DNA, 25 bp, Homo sapien
gggactcgacccagaagaatgttac

SEQ ID NO: 5125710 - DNA, 25 bp, Homo sapien
atgttacagaagatagctctggacc

SEQ ID NO: 5125711 - DNA, 25 bp, Homo sapien
cgcgtaggcagcgacaccgtcctgg

SEQ ID NO: 5125712 - DNA, 25 bp, Homo sapien
tctgccggaggagccgtctgttctc

SEQ ID NO: 5125713 - DNA, 25 bp, Homo sapien
cctgcccgaagcgttgtttggagcg

SEQ ID NO: 5125714 - DNA, 25 bp, Homo sapien
tcctggtgccatggctctcgaacag

SEQ ID NO: 5125715 - DNA, 25 bp, Homo sapien
ctttaggctccacttcgtgttcttt

SEQ ID NO: 5125716 - DNA, 25 bp, Homo sapien
ttaggctccacttcgtgttcttttg

SEQ ID NO: 5125717 - DNA, 25 bp, Homo sapien
catctataacagtgaatcctttcca

SEQ ID NO: 5125718 - DNA, 25 bp, Homo sapien
gatgtcccatcttaaccatgtgcaa

SEQ ID NO: 5125719 - DNA, 25 bp, Homo sapien
ttagtgcagtgacgggaaatacaca

SEQ ID NO: 5125720 - DNA, 25 bp, Homo sapien
gaattgagccggtttcttatcctaa

SEQ ID NO: 5125721 - DNA, 25 bp, Homo sapien
ccagcccttgtcaaatgatgtccca

SEQ ID NO: 5125722 - DNA, 25 bp, Homo sapien
aagcgtacttcacaattctccagga

SEQ ID NO: 5125723 - DNA, 25 bp, Homo sapien
aatattgtcagaccagcccatgtga

SEQ ID NO: 5125724 - DNA, 25 bp, Homo sapien
ggcctgctgatatgctgcactgtac

SEQ ID NO: 5125725 - DNA, 25 bp, Homo sapien
gcgatttaaatgtcttggagtccag

SEQ ID NO: 5125726 - DNA, 25 bp, Homo sapien
tgtctcaaagatacctgtgcagtga

SEQ ID NO: 5125727 - DNA, 25 bp, Homo sapien
taaatatttacactggcgaggcaac

SEQ ID NO: 5125728 - DNA, 25 bp, Homo sapien
gaaagatgcctccagacttaggaac

SEQ ID NO: 5125729 - DNA, 25 bp, Homo sapien
gcgaggcaacctctaaactccttgg

SEQ ID NO: 5125730 - DNA, 25 bp, Homo sapien
caatactctcattgttccagggagt

SEQ ID NO: 5125731 - DNA, 25 bp, Homo sapien
tgccacatggtttgatcagtaataa

SEQ ID NO: 5125732 - DNA, 25 bp, Homo sapien
taaacctcacctctaaataatgggc

SEQ ID NO: 5125733 - DNA, 25 bp, Homo sapien
tatgattttgaaagtagagactccc

SEQ ID NO: 5125734 - DNA, 25 bp, Homo sapien
tgtatgtagtattttcggactgcag

SEQ ID NO: 5125735 - DNA, 25 bp, Homo sapien
tggcagccagttcaatcctcttcat

SEQ ID NO: 5125736 - DNA, 25 bp, Homo sapien
ggtgtctctctctccgaatatctaa

SEQ ID NO: 5125737 - DNA, 25 bp, Homo sapien
tccaggtccatgttacgtatagtct

SEQ ID NO: 5125738 - DNA, 25 bp, Homo sapien
gctactcagggttgcccgagaagaa

SEQ ID NO: 5125739 - DNA, 25 bp, Homo sapien
gatccggtggcgctgagcttcaaga

SEQ ID NO: 5125740 - DNA, 25 bp, Homo sapien
aagctgaagaccattttggagtgcc

SEQ ID NO: 5125741 - DNA, 25 bp, Homo sapien
tttgtcggctcttgactgggaggcc

SEQ ID NO: 5125742 - DNA, 25 bp, Homo sapien
cgctcctccccgcgcagaacacgct

SEQ ID NO: 5125743 - DNA, 25 bp, Homo sapien
ctcctccccgcgcagaacacgctgg

SEQ ID NO: 5125744 - DNA, 25 bp, Homo sapien
cctccccgcgcagaacacgctgggc

SEQ ID NO: 5125745 - DNA, 25 bp, Homo sapien
ggcttcgggcgcggcgttgcggcgg

SEQ ID NO: 5125746 - DNA, 25 bp, Homo sapien
cagttgttatgtctcggctccggcc

SEQ ID NO: 5125747 - DNA, 25 bp, Homo sapien
ccgccgctgatacacggttgtggag

SEQ ID NO: 5125748 - DNA, 25 bp, Homo sapien
gttgttatgtctcggctccggccgc

SEQ ID NO: 5125749 - DNA, 25 bp, Homo sapien
cgcggccgccgctgatacacggttg

SEQ ID NO: 5125750 - DNA, 25 bp, Homo sapien
tatacaatcctactcaaagtcccag

SEQ ID NO: 5125751 - DNA, 25 bp, Homo sapien
tatgccctgctcatagatcagaaga

SEQ ID NO: 5125752 - DNA, 25 bp, Homo sapien
ggatagccttctcaacaaatcatgc

SEQ ID NO: 5125753 - DNA, 25 bp, Homo sapien
gagcaattgcataagcacgtgggaa

SEQ ID NO: 5125754 - DNA, 25 bp, Homo sapien
gaaccgaccgatgacctggttctcc

SEQ ID NO: 5125755 - DNA, 25 bp, Homo sapien
tgttttcacgggaaccgaccgatga

SEQ ID NO: 5125756 - DNA, 25 bp, Homo sapien
acgttcgggtgcctgcgacggcgcg

SEQ ID NO: 5125757 - DNA, 25 bp, Homo sapien
cgacggcgcggccgattgtttttgt

SEQ ID NO: 5125758 - DNA, 25 bp, Homo sapien
ctgctcctcgttccccaagcgggcg

SEQ ID NO: 5125759 - DNA, 25 bp, Homo sapien
tcggcgcccaggtgtccgcagccgt

SEQ ID NO: 5125760 - DNA, 25 bp, Homo sapien
caggtgtccgcagccgttcggcccg

SEQ ID NO: 5125761 - DNA, 25 bp, Homo sapien
cgcccaggtgtccgcagccgttcgg

SEQ ID NO: 5125762 - DNA, 25 bp, Homo sapien
cggctcctcggcgcccaggtgtccg

SEQ ID NO: 5125763 - DNA, 25 bp, Homo sapien
gctccaccgtcacgcactgatccat

SEQ ID NO: 5125764 - DNA, 25 bp, Homo sapien
ggctctgcaggatctcgtgcttgag

SEQ ID NO: 5125765 - DNA, 25 bp, Homo sapien
tcgcgctccaccgtcacgcactgat

SEQ ID NO: 5125766 - DNA, 25 bp, Homo sapien
ccgccggtgtagtcgatgagctcct

SEQ ID NO: 5125767 - DNA, 25 bp, Homo sapien
ctggagtttggtgctatttgttacc

SEQ ID NO: 5125768 - DNA, 25 bp, Homo sapien
tctggagtttggtgctatttgttac

SEQ ID NO: 5125769 - DNA, 25 bp, Homo sapien
atatctggagtttggtgctatttgt

SEQ ID NO: 5125770 - DNA, 25 bp, Homo sapien
ggagtttggtgctatttgttacctc

SEQ ID NO: 5125771 - DNA, 25 bp, Homo sapien
ccttctgggaatctagaatgttgat

SEQ ID NO: 5125772 - DNA, 25 bp, Homo sapien
ttggagaaagcttccaatagtcctc

SEQ ID NO: 5125773 - DNA, 25 bp, Homo sapien
acatgctaggcagtgagtacctggc

SEQ ID NO: 5125774 - DNA, 25 bp, Homo sapien
ccagtgaagtcacatggaatatgct

SEQ ID NO: 5125775 - DNA, 25 bp, Homo sapien
ccagtttcgtggaagacatttcttc

SEQ ID NO: 5125776 - DNA, 25 bp, Homo sapien
ggaccagtttcgtggaagacatttc

SEQ ID NO: 5125777 - DNA, 25 bp, Homo sapien
tagggaccagtttcgtggaagacat

SEQ ID NO: 5125778 - DNA, 25 bp, Homo sapien
gaccagtttcgtggaagacatttct

SEQ ID NO: 5125779 - DNA, 25 bp, Homo sapien
ggctggcatatagaaacctgggagt

SEQ ID NO: 5125780 - DNA, 25 bp, Homo sapien
cacgatgtgcagaaaggagttaaca

SEQ ID NO: 5125781 - DNA, 25 bp, Homo sapien
aacttccctgggtaccacgatgtgc

SEQ ID NO: 5125782 - DNA, 25 bp, Homo sapien
tacaaagtcacctcttggctggcat

SEQ ID NO: 5125783 - DNA, 25 bp, Homo sapien
cggaggccaatttttgaacagtatc

SEQ ID NO: 5125784 - DNA, 25 bp, Homo sapien
tattcttttacagcactgtgtcaaa

SEQ ID NO: 5125785 - DNA, 25 bp, Homo sapien
ctttattcttttacagcactgtgtc

SEQ ID NO: 5125786 - DNA, 25 bp, Homo sapien
gatgtctttgtggtcggaggccaat

SEQ ID NO: 5125787 - DNA, 25 bp, Homo sapien
aaagtaatttgtgaaagctagtatt

SEQ ID NO: 5125788 - DNA, 25 bp, Homo sapien
taatttgtgaaagctagtattatca

SEQ ID NO: 5125789 - DNA, 25 bp, Homo sapien
tgtgaaagctagtattatcaaagca

SEQ ID NO: 5125790 - DNA, 25 bp, Homo sapien
tttgtgaaagctagtattatcaaag

SEQ ID NO: 5125791 - DNA, 25 bp, Homo sapien
aagctcatttgcatggctgtccaga

SEQ ID NO: 5125792 - DNA, 25 bp, Homo sapien
gctagcattagttccagcttctgtt

SEQ ID NO: 5125793 - DNA, 25 bp, Homo sapien
tgttgcatcagagctagcattagtt

SEQ ID NO: 5125794 - DNA, 25 bp, Homo sapien
tctgttgctaggtaaccaagctcat

SEQ ID NO: 5125795 - DNA, 25 bp, Homo sapien
caatgcattcgattgttttctggac

SEQ ID NO: 5125796 - DNA, 25 bp, Homo sapien
gaaatgcaatacactgtcaaactcc

SEQ ID NO: 5125797 - DNA, 25 bp, Homo sapien
taaggcttactatggtcactactac

SEQ ID NO: 5125798 - DNA, 25 bp, Homo sapien
tctgagctcccttctaccattctga

SEQ ID NO: 5125799 - DNA, 25 bp, Homo sapien
tcccacactgctaatgtcagaatca

SEQ ID NO: 5125800 - DNA, 25 bp, Homo sapien
tgagaagcctttggctgtctgcctg

SEQ ID NO: 5125801 - DNA, 25 bp, Homo sapien
ttccttgtcgaaagaagtgctccac

SEQ ID NO: 5125802 - DNA, 25 bp, Homo sapien
caccatcacctcattgagaagcctt

SEQ ID NO: 5125803 - DNA, 25 bp, Homo sapien
ttaactccacaaatggttccttctg

SEQ ID NO: 5125804 - DNA, 25 bp, Homo sapien
ggttccttctgacttgggtctacag

SEQ ID NO: 5125805 - DNA, 25 bp, Homo sapien
tgcctctaatattctatttaactcc

SEQ ID NO: 5125806 - DNA, 25 bp, Homo sapien
cttctgacttgggtctacagaaaga

SEQ ID NO: 5125807 - DNA, 25 bp, Homo sapien
tccagagcaggtctcagaactctga

SEQ ID NO: 5125808 - DNA, 25 bp, Homo sapien
ccagagcaggtctcagaactctgac

SEQ ID NO: 5125809 - DNA, 25 bp, Homo sapien
tggcagatatctcccgccttgtacc

SEQ ID NO: 5125810 - DNA, 25 bp, Homo sapien
tgcataactggcagatatctcccgc

SEQ ID NO: 5125811 - DNA, 25 bp, Homo sapien
gtgagctccatgatatccttcccag

SEQ ID NO: 5125812 - DNA, 25 bp, Homo sapien
ttcccttgtgagctccatgatatcc

SEQ ID NO: 5125813 - DNA, 25 bp, Homo sapien
accaactcttagatcagcaccaggg

SEQ ID NO: 5125814 - DNA, 25 bp, Homo sapien
caaggcaccaactcttagatcagca

SEQ ID NO: 5125815 - DNA, 25 bp, Homo sapien
catgggccatgactaatcggaacaa

SEQ ID NO: 5125816 - DNA, 25 bp, Homo sapien
taatcggaacaaggcaccaactctt

SEQ ID NO: 5125817 - DNA, 25 bp, Homo sapien
cctggccaaccagcaaaatacttct

SEQ ID NO: 5125818 - DNA, 25 bp, Homo sapien
tgtgctttttgcagtctctagtctg

SEQ ID NO: 5125819 - DNA, 25 bp, Homo sapien
gaatgccccacatcaatcaacagta

SEQ ID NO: 5125820 - DNA, 25 bp, Homo sapien
gcagtggtctttcgtgaatgcccca

SEQ ID NO: 5125821 - DNA, 25 bp, Homo sapien
tgtgcaaaatgatttgtacaaacat

SEQ ID NO: 5125822 - DNA, 25 bp, Homo sapien
tgcaaaatgatttgtacaaacatag

SEQ ID NO: 5125823 - DNA, 25 bp, Homo sapien
caaaatgatttgtacaaacatagtt

SEQ ID NO: 5125824 - DNA, 25 bp, Homo sapien
gcaaaatgatttgtacaaacatagt

SEQ ID NO: 5125825 - DNA, 25 bp, Homo sapien
cttaaattccaaggagctgttttga

SEQ ID NO: 5125826 - DNA, 25 bp, Homo sapien
agtctgtgtagcttaaattccaagg

SEQ ID NO: 5125827 - DNA, 25 bp, Homo sapien
caaggagctgttttgagctataagc

SEQ ID NO: 5125828 - DNA, 25 bp, Homo sapien
ctaataaaatacagtctgtgtagct

SEQ ID NO: 5125829 - DNA, 25 bp, Homo sapien
atgcctctcgctgatttgtggttcc

SEQ ID NO: 5125830 - DNA, 25 bp, Homo sapien
tattgtaatgcctctcgctgatttg

SEQ ID NO: 5125831 - DNA, 25 bp, Homo sapien
gatttagggcaaatggctgaaaatt

SEQ ID NO: 5125832 - DNA, 25 bp, Homo sapien
tttagcatattgtaatgcctctcgc

SEQ ID NO: 5125833 - DNA, 25 bp, Homo sapien
gaacatatggtgagttctcaatccc

SEQ ID NO: 5125834 - DNA, 25 bp, Homo sapien
gtctcaggtacacaaggcttcccat

SEQ ID NO: 5125835 - DNA, 25 bp, Homo sapien
gatgtcacagatatcagcccactgg

SEQ ID NO: 5125836 - DNA, 25 bp, Homo sapien
ggagggcacaagcatcccgtgtaaa

SEQ ID NO: 5125837 - DNA, 25 bp, Homo sapien
gtacactgcctctgttcaatcacgg

SEQ ID NO: 5125838 - DNA, 25 bp, Homo sapien
tggttccaaactccagtacactgcc

SEQ ID NO: 5125839 - DNA, 25 bp, Homo sapien
caatcacggctttgatgttaattaa

SEQ ID NO: 5125840 - DNA, 25 bp, Homo sapien
gttaattaaagctggcagcgccaca

SEQ ID NO: 5125841 - DNA, 25 bp, Homo sapien
gcactttttaccaaggtccacttca

SEQ ID NO: 5125842 - DNA, 25 bp, Homo sapien
tgatataatatgaccacagaccaat

SEQ ID NO: 5125843 - DNA, 25 bp, Homo sapien
caggcaaatatagagtgataccagc

SEQ ID NO: 5125844 - DNA, 25 bp, Homo sapien
ctgttgtttgctgacgaagaatggg

SEQ ID NO: 5125845 - DNA, 25 bp, Homo sapien
tttgttccattggacagtagggaca

SEQ ID NO: 5125846 - DNA, 25 bp, Homo sapien
gactttgttccattggacagtaggg

SEQ ID NO: 5125847 - DNA, 25 bp, Homo sapien
ctggactttgttccattggacagta

SEQ ID NO: 5125848 - DNA, 25 bp, Homo sapien
ttccattggacagtagggacatttt

SEQ ID NO: 5125849 - DNA, 25 bp, Homo sapien
ttagcttatagaaacacaggagtcc

SEQ ID NO: 5125850 - DNA, 25 bp, Homo sapien
tgataatattcaccgggagcactcc

SEQ ID NO: 5125851 - DNA, 25 bp, Homo sapien
gaaatgcacccacgattcagtttca

SEQ ID NO: 5125852 - DNA, 25 bp, Homo sapien
tagctgcattatatggaacgttctc

SEQ ID NO: 5125853 - DNA, 25 bp, Homo sapien
caaccaaacaatagtactccttcca

SEQ ID NO: 5125854 - DNA, 25 bp, Homo sapien
tctatgctaacggaagacttctcac

SEQ ID NO: 5125855 - DNA, 25 bp, Homo sapien
acaagcacctcttggcaataaaagc

SEQ ID NO: 5125856 - DNA, 25 bp, Homo sapien
tgaaattcttaaacacgcagcctgc

SEQ ID NO: 5125857 - DNA, 25 bp, Homo sapien
aatgagatgatacgctttgcagaag

SEQ ID NO: 5125858 - DNA, 25 bp, Homo sapien
tacacaatgtttgatgctggtgcac

SEQ ID NO: 5125859 - DNA, 25 bp, Homo sapien
taatagggctaccaagaccaagaga

SEQ ID NO: 5125860 - DNA, 25 bp, Homo sapien
ttaaagtgatgggtctggtaactgc

SEQ ID NO: 5125861 - DNA, 25 bp, Homo sapien
ggagtagccatccacataggcctgg

SEQ ID NO: 5125862 - DNA, 25 bp, Homo sapien
ggtgtactactgtaaaacgctgcca

SEQ ID NO: 5125863 - DNA, 25 bp, Homo sapien
gccagactgaggttggaccacacaa

SEQ ID NO: 5125864 - DNA, 25 bp, Homo sapien
cacatggtactcaagcagaggtttt

SEQ ID NO: 5125865 - DNA, 25 bp, Homo sapien
aatgtagtctaccagcagcttgtgc

SEQ ID NO: 5125866 - DNA, 25 bp, Homo sapien
tggcccaagccgactgtatgaagag

SEQ ID NO: 5125867 - DNA, 25 bp, Homo sapien
aatactatagaacccaagagcacgg

SEQ ID NO: 5125868 - DNA, 25 bp, Homo sapien
cctgaaaataacctgagtcggctga

SEQ ID NO: 5125869 - DNA, 25 bp, Homo sapien
acacacattaacaaagcatttctta

SEQ ID NO: 5125870 - DNA, 25 bp, Homo sapien
cacattaacaaagcatttcttatag

SEQ ID NO: 5125871 - DNA, 25 bp, Homo sapien
tccctgaaactactggatatgctac

SEQ ID NO: 5125872 - DNA, 25 bp, Homo sapien
attccctgaaactactggatatgct

SEQ ID NO: 5125873 - DNA, 25 bp, Homo sapien
gctgtttccgggctccactttacca

SEQ ID NO: 5125874 - DNA, 25 bp, Homo sapien
actttaccaatcatacactcactgc

SEQ ID NO: 5125875 - DNA, 25 bp, Homo sapien
tccagcagcctggacatcgagctgt

SEQ ID NO: 5125876 - DNA, 25 bp, Homo sapien
cactctggtcagtacacagggcagg

SEQ ID NO: 5125877 - DNA, 25 bp, Homo sapien
catcagtgaggttaaactaaggccc

SEQ ID NO: 5125878 - DNA, 25 bp, Homo sapien
tctgtgaaacccctatgtggaggcg

SEQ ID NO: 5125879 - DNA, 25 bp, Homo sapien
caactagcagatacagggatgaggc

SEQ ID NO: 5125880 - DNA, 25 bp, Homo sapien
taaagacaattgttggagagcccct

SEQ ID NO: 5125881 - DNA, 25 bp, Homo sapien
gattttctctagaagggaccagagc

SEQ ID NO: 5125882 - DNA, 25 bp, Homo sapien
ctagagtttctagccctggacaagc

SEQ ID NO: 5125883 - DNA, 25 bp, Homo sapien
tcacaggcaacattagggatccccg

SEQ ID NO: 5125884 - DNA, 25 bp, Homo sapien
aggacagcagctagatgaacttggg

SEQ ID NO: 5125885 - DNA, 25 bp, Homo sapien
ttcctctataggcaaagcactgtga

SEQ ID NO: 5125886 - DNA, 25 bp, Homo sapien
cagtcagaactaggccttacatggg

SEQ ID NO: 5125887 - DNA, 25 bp, Homo sapien
gaatggtttgctaagaacagatccc

SEQ ID NO: 5125888 - DNA, 25 bp, Homo sapien
ctgttagctgaaggagtcaaactct

SEQ ID NO: 5125889 - DNA, 25 bp, Homo sapien
tttctgcctcagtacggcgcgctga

SEQ ID NO: 5125890 - DNA, 25 bp, Homo sapien
cagattttgctggacgcgggtgaca

SEQ ID NO: 5125891 - DNA, 25 bp, Homo sapien
cgaccaggccaaaactaaagcagca

SEQ ID NO: 5125892 - DNA, 25 bp, Homo sapien
tctgtaaaataaatgcgctgggccg

SEQ ID NO: 5125893 - DNA, 25 bp, Homo sapien
catcttgccttgatgtcaatggctg

SEQ ID NO: 5125894 - DNA, 25 bp, Homo sapien
aaatacatgctaaaatcacctgagc

SEQ ID NO: 5125895 - DNA, 25 bp, Homo sapien
gcgtggctgtgccaatttcgtaaaa

SEQ ID NO: 5125896 - DNA, 25 bp, Homo sapien
tactgacgcctctttctcaactaag

SEQ ID NO: 5125897 - DNA, 25 bp, Homo sapien
cacccatcacccctgctcttttccc

SEQ ID NO: 5125898 - DNA, 25 bp, Homo sapien
gatgcacccatcacccctgctcttt

SEQ ID NO: 5125899 - DNA, 25 bp, Homo sapien
catcacccctgctcttttcccagcc

SEQ ID NO: 5125900 - DNA, 25 bp, Homo sapien
caaggcagatgcacccatcacccct

SEQ ID NO: 5125901 - DNA, 25 bp, Homo sapien
gggagtcagacagagctgccgccat

SEQ ID NO: 5125902 - DNA, 25 bp, Homo sapien
gggggagtcagacagagctgccgcc

SEQ ID NO: 5125903 - DNA, 25 bp, Homo sapien
ggggagtcagacagagctgccgcca

SEQ ID NO: 5125904 - DNA, 25 bp, Homo sapien
ccagggcagccgttgtctgattcca

SEQ ID NO: 5125905 - DNA, 25 bp, Homo sapien
cttcttcggagaggtgtctagtgca

SEQ ID NO: 5125906 - DNA, 25 bp, Homo sapien
gattccatcgtgatcacagcaaccg

SEQ ID NO: 5125907 - DNA, 25 bp, Homo sapien
tatcacccataggagcctgagctgg

SEQ ID NO: 5125908 - DNA, 25 bp, Homo sapien
cagtcaggtaggacaataaagagtg

SEQ ID NO: 5125909 - DNA, 25 bp, Homo sapien
tacagtcaggtaggacaataaagag

SEQ ID NO: 5125910 - DNA, 25 bp, Homo sapien
caggtaggacaataaagagtggagt

SEQ ID NO: 5125911 - DNA, 25 bp, Homo sapien
gttacagtcaggtaggacaataaag

SEQ ID NO: 5125912 - DNA, 25 bp, Homo sapien
tggcggaggtctgcacattcaggta

SEQ ID NO: 5125913 - DNA, 25 bp, Homo sapien
cattcaggtaggagctcctgttcat

SEQ ID NO: 5125914 - DNA, 25 bp, Homo sapien
gctccagtggcggaggtctgcacat

SEQ ID NO: 5125915 - DNA, 25 bp, Homo sapien
gttcatgtccgaatggcacccctgt

SEQ ID NO: 5125916 - DNA, 25 bp, Homo sapien
cagactctcatgttgcctgcacaga

SEQ ID NO: 5125917 - DNA, 25 bp, Homo sapien
cagcagcggcacagtaaggtatcta

SEQ ID NO: 5125918 - DNA, 25 bp, Homo sapien
tgtacttgggcgagagcgacactgt

SEQ ID NO: 5125919 - DNA, 25 bp, Homo sapien
tgatccattagtccagagctgtaga

SEQ ID NO: 5125920 - DNA, 25 bp, Homo sapien
tctgggattccgcaaaagggactat

SEQ ID NO: 5125921 - DNA, 25 bp, Homo sapien
taaaatctccctcagtaacatgcgc

SEQ ID NO: 5125922 - DNA, 25 bp, Homo sapien
tctacttctgcatgatcgtcgggag

SEQ ID NO: 5125923 - DNA, 25 bp, Homo sapien
taacatgcgcatctactggctgaga

SEQ ID NO: 5125924 - DNA, 25 bp, Homo sapien
tccctggctgcaatcttcgttgtcc

SEQ ID NO: 5125925 - DNA, 25 bp, Homo sapien
ctgcaaatccctggctgcaatcttc

SEQ ID NO: 5125926 - DNA, 25 bp, Homo sapien
ggctgcaatcttcgttgtcctttct

SEQ ID NO: 5125927 - DNA, 25 bp, Homo sapien
aaatccctggctgcaatcttcgttg

SEQ ID NO: 5125928 - DNA, 25 bp, Homo sapien
cagctggcgaagttgaaggttcaaa

SEQ ID NO: 5125929 - DNA, 25 bp, Homo sapien
ttcaaagcattagggtggtgcttgc

SEQ ID NO: 5125930 - DNA, 25 bp, Homo sapien
cttctgtttctcgtggattgtaacc

SEQ ID NO: 5125931 - DNA, 25 bp, Homo sapien
tttctcgtggattgtaacctcctga

SEQ ID NO: 5125932 - DNA, 25 bp, Homo sapien
aacacaatgggaaactcaatggaac

SEQ ID NO: 5125933 - DNA, 25 bp, Homo sapien
tcaaaaacacaatgggaaactcaat

SEQ ID NO: 5125934 - DNA, 25 bp, Homo sapien
caaaaacacaatgggaaactcaatg

SEQ ID NO: 5125935 - DNA, 25 bp, Homo sapien
aaaacacaatgggaaactcaatgga

SEQ ID NO: 5125936 - DNA, 25 bp, Homo sapien
tttacttcctttgctccatatcacc

SEQ ID NO: 5125937 - DNA, 25 bp, Homo sapien
caggactgtcaactgtaaatgcttt

SEQ ID NO: 5125938 - DNA, 25 bp, Homo sapien
taaatgctttataaactgccaatgc

SEQ ID NO: 5125939 - DNA, 25 bp, Homo sapien
ttataaactgccaatgcctggcttt

SEQ ID NO: 5125940 - DNA, 25 bp, Homo sapien
ctgtgatataatgaagtcacaccac

SEQ ID NO: 5125941 - DNA, 25 bp, Homo sapien
tgtgatataatgaagtcacaccaca

SEQ ID NO: 5125942 - DNA, 25 bp, Homo sapien
tgagctttgcaatatacatatgcat

SEQ ID NO: 5125943 - DNA, 25 bp, Homo sapien
gaagctatgtaatcctttccttcta

SEQ ID NO: 5125944 - DNA, 25 bp, Homo sapien
ccttctatgctatgcatgttaatac

SEQ ID NO: 5125945 - DNA, 25 bp, Homo sapien
ctttccttctatgctatgcatgtta

SEQ ID NO: 5125946 - DNA, 25 bp, Homo sapien
caatccatatttagtgggccaaaca

SEQ ID NO: 5125947 - DNA, 25 bp, Homo sapien
tacttcatgtgaagaagcgcttcgt

SEQ ID NO: 5125948 - DNA, 25 bp, Homo sapien
ggaggtacttcatgtgaagaagcgc

SEQ ID NO: 5125949 - DNA, 25 bp, Homo sapien
tgtgaagaagcgcttcgttcaaaca

SEQ ID NO: 5125950 - DNA, 25 bp, Homo sapien
gttatttcatctagtgggtgcagca

SEQ ID NO: 5125951 - DNA, 25 bp, Homo sapien
ttatttcatctagtgggtgcagcat

SEQ ID NO: 5125952 - DNA, 25 bp, Homo sapien
caacaatcgtgccaaaaaggggcgc

SEQ ID NO: 5125953 - DNA, 25 bp, Homo sapien
gaaaagaaggaacaacaatcgtgcc

SEQ ID NO: 5125954 - DNA, 25 bp, Homo sapien
aatcgtgccaaaaaggggcgcagcc

SEQ ID NO: 5125955 - DNA, 25 bp, Homo sapien
agaaggaacaacaatcgtgccaaaa

SEQ ID NO: 5125956 - DNA, 25 bp, Homo sapien
cagaatgcacattttgaacagcatc

SEQ ID NO: 5125957 - DNA, 25 bp, Homo sapien
tagaggggtcagtattgaggaaaac

SEQ ID NO: 5125958 - DNA, 25 bp, Homo sapien
ttttcattgcatgatctacaacata

SEQ ID NO: 5125959 - DNA, 25 bp, Homo sapien
ttgactctccggagagtccacacag

SEQ ID NO: 5125960 - DNA, 25 bp, Homo sapien
gagggagctgctagtggccacattc

SEQ ID NO: 5125961 - DNA, 25 bp, Homo sapien
agaatgtagactgggtgatgaggtt

SEQ ID NO: 5125962 - DNA, 25 bp, Homo sapien
gaaatagaaggtgagcgagaatgta

SEQ ID NO: 5125963 - DNA, 25 bp, Homo sapien
cgagaatgtagactgggtgatgagg

SEQ ID NO: 5125964 - DNA, 25 bp, Homo sapien
tagaaggtgagcgagaatgtagact

SEQ ID NO: 5125965 - DNA, 25 bp, Homo sapien
tggagactgattatggcttgaaatg

SEQ ID NO: 5125966 - DNA, 25 bp, Homo sapien
tggctccgtttctggtgcaagaaag

SEQ ID NO: 5125967 - DNA, 25 bp, Homo sapien
cacaaatggtcaatacacagttcag

SEQ ID NO: 5125968 - DNA, 25 bp, Homo sapien
cacagttcaggaacaattggctccg

SEQ ID NO: 5125969 - DNA, 25 bp, Homo sapien
caaagatgagctgggttttatcatt

SEQ ID NO: 5125970 - DNA, 25 bp, Homo sapien
gctgggttttatcattactctcttg

SEQ ID NO: 5125971 - DNA, 25 bp, Homo sapien
tcattactctcttgaaactttacac

SEQ ID NO: 5125972 - DNA, 25 bp, Homo sapien
attactctcttgaaactttacacag

SEQ ID NO: 5125973 - DNA, 25 bp, Homo sapien
cgaaccactcctgtgtatagcacca

SEQ ID NO: 5125974 - DNA, 25 bp, Homo sapien
tgtgtatagcaccaggtttccactg

SEQ ID NO: 5125975 - DNA, 25 bp, Homo sapien
cactcctgtgtatagcaccaggttt

SEQ ID NO: 5125976 - DNA, 25 bp, Homo sapien
tatagcaccaggtttccactgcctt

SEQ ID NO: 5125977 - DNA, 25 bp, Homo sapien
gaggcattgtgttggacatcgtcag

SEQ ID NO: 5125978 - DNA, 25 bp, Homo sapien
cattgtgttggacatcgtcagagag

SEQ ID NO: 5125979 - DNA, 25 bp, Homo sapien
ccaaggagtttactaagaggctttg

SEQ ID NO: 5125980 - DNA, 25 bp, Homo sapien
ctcgtccaatgatccaaggagttta

SEQ ID NO: 5125981 - DNA, 25 bp, Homo sapien
tccaagctgttggaaagtacaatcc

SEQ ID NO: 5125982 - DNA, 25 bp, Homo sapien
aatgtaagttccaagctgttggaaa

SEQ ID NO: 5125983 - DNA, 25 bp, Homo sapien
gctgttggaaagtacaatcctcatt

SEQ ID NO: 5125984 - DNA, 25 bp, Homo sapien
ttggaaagtacaatcctcattatag

SEQ ID NO: 5125985 - DNA, 25 bp, Homo sapien
taactcagaggtggcaatttcagga

SEQ ID NO: 5125986 - DNA, 25 bp, Homo sapien
agtgatcctaaccatggagccatta

SEQ ID NO: 5125987 - DNA, 25 bp, Homo sapien
gatcctaaccatggagccattactc

SEQ ID NO: 5125988 - DNA, 25 bp, Homo sapien
ctaactcagaggtggcaatttcagg

SEQ ID NO: 5125989 - DNA, 25 bp, Homo sapien
ttataaatgaaacttctcaatcgta

SEQ ID NO: 5125990 - DNA, 25 bp, Homo sapien
tataaatgaaacttctcaatcgtac

SEQ ID NO: 5125991 - DNA, 25 bp, Homo sapien
gcccagcaggcatgtccatatatta

SEQ ID NO: 5125992 - DNA, 25 bp, Homo sapien
cccagcaggcatgtccatatattat

SEQ ID NO: 5125993 - DNA, 25 bp, Homo sapien
atgcccagcaggcatgtccatatat

SEQ ID NO: 5125994 - DNA, 25 bp, Homo sapien
ccatgcccagcaggcatgtccatat

SEQ ID NO: 5125995 - DNA, 25 bp, Homo sapien
ttctagtccatgctaagcggtctgt

SEQ ID NO: 5125996 - DNA, 25 bp, Homo sapien
ctggagcactgtggacattgtacca

SEQ ID NO: 5125997 - DNA, 25 bp, Homo sapien
tgtaccacttgacaagcatctgaac

SEQ ID NO: 5125998 - DNA, 25 bp, Homo sapien
ccactctgagtgataactgggtcct

SEQ ID NO: 5125999 - DNA, 25 bp, Homo sapien
aaggccttgcttttttgggtgcaat

SEQ ID NO: 5126000 - DNA, 25 bp, Homo sapien
tcatcagatccagtctcagaaggcc

SEQ ID NO: 5126001 - DNA, 25 bp, Homo sapien
gacaggggaaagtgatccttcaaag

SEQ ID NO: 5126002 - DNA, 25 bp, Homo sapien
tgcttttttgggtgcaatgacaggg

SEQ ID NO: 5126003 - DNA, 25 bp, Homo sapien
tccaacaggaaagcgcctgaaagcc

SEQ ID NO: 5126004 - DNA, 25 bp, Homo sapien
tcccgagacgcgtgaaaccagcgct

SEQ ID NO: 5126005 - DNA, 25 bp, Homo sapien
attccaacaggaaagcgcctgaaag

SEQ ID NO: 5126006 - DNA, 25 bp, Homo sapien
agacgcgtgaaaccagcgctcagcc

SEQ ID NO: 5126007 - DNA, 25 bp, Homo sapien
ttccaggcgacggggcggagccctg

SEQ ID NO: 5126008 - DNA, 25 bp, Homo sapien
ccgctccccgtaggccttgctgcgc

SEQ ID NO: 5126009 - DNA, 25 bp, Homo sapien
cgaggcgaggtaccgctccccgtag

SEQ ID NO: 5126010 - DNA, 25 bp, Homo sapien
gggcggagccctgcaccgaggcgag

SEQ ID NO: 5126011 - DNA, 25 bp, Homo sapien
tgtaccacttgacaagcatctgaac

SEQ ID NO: 5126012 - DNA, 25 bp, Homo sapien
ctggagcactgtggacattgtacca

SEQ ID NO: 5126013 - DNA, 25 bp, Homo sapien
ccactctgagtgataactgggtcct

SEQ ID NO: 5126014 - DNA, 25 bp, Homo sapien
ttctagtccatgctaagcggtctgt

SEQ ID NO: 5126015 - DNA, 25 bp, Homo sapien
tcatcagatccagtctcagaaggcc

SEQ ID NO: 5126016 - DNA, 25 bp, Homo sapien
aaggccttgcttttttgggtgcaat

SEQ ID NO: 5126017 - DNA, 25 bp, Homo sapien
tgcttttttgggtgcaatgacaggg

SEQ ID NO: 5126018 - DNA, 25 bp, Homo sapien
gacaggggaaagtgatccttcaaag

SEQ ID NO: 5126019 - DNA, 25 bp, Homo sapien
gcaattctgactagttggagttttg

SEQ ID NO: 5126020 - DNA, 25 bp, Homo sapien
ataaaccacttgcaattctgactag

SEQ ID NO: 5126021 - DNA, 25 bp, Homo sapien
cacttgcaattctgactagttggag

SEQ ID NO: 5126022 - DNA, 25 bp, Homo sapien
caatctatatggggggccataaacc

SEQ ID NO: 5126023 - DNA, 25 bp, Homo sapien
ctgctgttgggccttccgccaccga

SEQ ID NO: 5126024 - DNA, 25 bp, Homo sapien
tccgccaccgacgagctaaactcag

SEQ ID NO: 5126025 - DNA, 25 bp, Homo sapien
ctgctgcacctactactatgagctc

SEQ ID NO: 5126026 - DNA, 25 bp, Homo sapien
tggctgctgcacctactactatgag

SEQ ID NO: 5126027 - DNA, 25 bp, Homo sapien
tgtagaaaacaactcacagcctccc

SEQ ID NO: 5126028 - DNA, 25 bp, Homo sapien
caagggaaagatggctgaaactgaa

SEQ ID NO: 5126029 - DNA, 25 bp, Homo sapien
acagataggctgtggttctcactca

SEQ ID NO: 5126030 - DNA, 25 bp, Homo sapien
ccttatgggtctaacagaagatatc

SEQ ID NO: 5126031 - DNA, 25 bp, Homo sapien
gtaccgctccccgtaggccttgctg

SEQ ID NO: 5126032 - DNA, 25 bp, Homo sapien
ttccaggcgacggggcggagccctg

SEQ ID NO: 5126033 - DNA, 25 bp, Homo sapien
ccgctccccgtaggccttgctgcgc

SEQ ID NO: 5126034 - DNA, 25 bp, Homo sapien
gcggagccctgcaccgaggcgacgt

SEQ ID NO: 5126035 - DNA, 25 bp, Homo sapien
tcactctttagatccaattactaaa

SEQ ID NO: 5126036 - DNA, 25 bp, Homo sapien
tagatccaattactaaagtcttatt

SEQ ID NO: 5126037 - DNA, 25 bp, Homo sapien
ttactaaagtcttattgaatccaaa

SEQ ID NO: 5126038 - DNA, 25 bp, Homo sapien
atccaaaatagatcacattatttac

SEQ ID NO: 5126039 - DNA, 25 bp, Homo sapien
tggattacagacgaagaatattttt

SEQ ID NO: 5126040 - DNA, 25 bp, Homo sapien
cttggattacagacgaagaatattt

SEQ ID NO: 5126041 - DNA, 25 bp, Homo sapien
tgcttggattacagacgaagaatat

SEQ ID NO: 5126042 - DNA, 25 bp, Homo sapien
ggattacagacgaagaatattttta

SEQ ID NO: 5126043 - DNA, 25 bp, Homo sapien
tacagctttgcaaaatagaatcctc

SEQ ID NO: 5126044 - DNA, 25 bp, Homo sapien
agctttgcaaaatagaatcctctca

SEQ ID NO: 5126045 - DNA, 25 bp, Homo sapien
ttgcaaaatagaatcctctcaactt

SEQ ID NO: 5126046 - DNA, 25 bp, Homo sapien
ctttgcaaaatagaatcctctcaac

SEQ ID NO: 5126047 - DNA, 25 bp, Homo sapien
cacactaaggtaagtacatacgtat

SEQ ID NO: 5126048 - DNA, 25 bp, Homo sapien
cttgcacactaaggtaagtacatac

SEQ ID NO: 5126049 - DNA, 25 bp, Homo sapien
tgcacactaaggtaagtacatacgt

SEQ ID NO: 5126050 - DNA, 25 bp, Homo sapien
gcacactaaggtaagtacatacgta

SEQ ID NO: 5126051 - DNA, 25 bp, Homo sapien
aagtttcgctgccctttcaacccag

SEQ ID NO: 5126052 - DNA, 25 bp, Homo sapien
agtttcgctgccctttcaacccagt

SEQ ID NO: 5126053 - DNA, 25 bp, Homo sapien
ttcgctgccctttcaacccagtatt

SEQ ID NO: 5126054 - DNA, 25 bp, Homo sapien
gtttcgctgccctttcaacccagta

SEQ ID NO: 5126055 - DNA, 25 bp, Homo sapien
aaacttgaacgcaaagctatgttcc

SEQ ID NO: 5126056 - DNA, 25 bp, Homo sapien
gggtctgtacaacacacgaattcca

SEQ ID NO: 5126057 - DNA, 25 bp, Homo sapien
gtcttacataaagttctgactgaat

SEQ ID NO: 5126058 - DNA, 25 bp, Homo sapien
tctaaacttgaacgcaaagctatgt

SEQ ID NO: 5126059 - DNA, 25 bp, Homo sapien
aatgtaaagacccaatagcttttat

SEQ ID NO: 5126060 - DNA, 25 bp, Homo sapien
tgtaaagacccaatagcttttatct

SEQ ID NO: 5126061 - DNA, 25 bp, Homo sapien
atgtaaagacccaatagcttttatc

SEQ ID NO: 5126062 - DNA, 25 bp, Homo sapien
tcctgcacatctctagtggaaagcg

SEQ ID NO: 5126063 - DNA, 25 bp, Homo sapien
tccaaacactgtaaagactccagat

SEQ ID NO: 5126064 - DNA, 25 bp, Homo sapien
gaagcataagattagcataggccag

SEQ ID NO: 5126065 - DNA, 25 bp, Homo sapien
ccagcagtaagtctgtattggttgc

SEQ ID NO: 5126066 - DNA, 25 bp, Homo sapien
taagaaagtagctgacagttcatca

SEQ ID NO: 5126067 - DNA, 25 bp, Homo sapien
atttctaagaaagtagctgacagtt

SEQ ID NO: 5126068 - DNA, 25 bp, Homo sapien
gacagttcatcatttccacccaaag

SEQ ID NO: 5126069 - DNA, 25 bp, Homo sapien
tgacagttcatcatttccacccaaa

SEQ ID NO: 5126070 - DNA, 25 bp, Homo sapien
gcagatgcacttactagaaccacag

SEQ ID NO: 5126071 - DNA, 25 bp, Homo sapien
gaaaatcttgccataaaagttagcc

SEQ ID NO: 5126072 - DNA, 25 bp, Homo sapien
gaaccacagtattcctctgattaag

SEQ ID NO: 5126073 - DNA, 25 bp, Homo sapien
gttaactacctagctgcaatgcaga

SEQ ID NO: 5126074 - DNA, 25 bp, Homo sapien
tttgtccagcttcaccttttattaa

SEQ ID NO: 5126075 - DNA, 25 bp, Homo sapien
tgtccagcttcaccttttattaatt

SEQ ID NO: 5126076 - DNA, 25 bp, Homo sapien
ttttgtccagcttcaccttttatta

SEQ ID NO: 5126077 - DNA, 25 bp, Homo sapien
gattttgtccagcttcaccttttat

SEQ ID NO: 5126078 - DNA, 25 bp, Homo sapien
gtatctacataagacagcagaaggg

SEQ ID NO: 5126079 - DNA, 25 bp, Homo sapien
acagattgtatttgctcacgttgtc

SEQ ID NO: 5126080 - DNA, 25 bp, Homo sapien
gctggacaacaaaacgggtgcttat

SEQ ID NO: 5126081 - DNA, 25 bp, Homo sapien
aacatgattattgcagacctaaccc

SEQ ID NO: 5126082 - DNA, 25 bp, Homo sapien
cattatataacacagactgcccgct

SEQ ID NO: 5126083 - DNA, 25 bp, Homo sapien
tagaaaacagagcattatataacac

SEQ ID NO: 5126084 - DNA, 25 bp, Homo sapien
ttatataacacagactgcccgcttt

SEQ ID NO: 5126085 - DNA, 25 bp, Homo sapien
agcattatataacacagactgcccg

SEQ ID NO: 5126086 - DNA, 25 bp, Homo sapien
taccaagaaaagatgtatccttaga

SEQ ID NO: 5126087 - DNA, 25 bp, Homo sapien
cgctaccaagaaaagatgtatcctt

SEQ ID NO: 5126088 - DNA, 25 bp, Homo sapien
aagaaaagatgtatccttagatgac

SEQ ID NO: 5126089 - DNA, 25 bp, Homo sapien
aaaagatgtatccttagatgactga

SEQ ID NO: 5126090 - DNA, 25 bp, Homo sapien
tggttcttgtacatcaatgtttcca

SEQ ID NO: 5126091 - DNA, 25 bp, Homo sapien
gctctggttcttgtacatcaatgtt

SEQ ID NO: 5126092 - DNA, 25 bp, Homo sapien
caacatcgtatctagccaaatcttc

SEQ ID NO: 5126093 - DNA, 25 bp, Homo sapien
aagctctggttcttgtacatcaatg

SEQ ID NO: 5126094 - DNA, 25 bp, Homo sapien
tgtaagccaagccaagtaaggtgct

SEQ ID NO: 5126095 - DNA, 25 bp, Homo sapien
ccaagtaaggtgctgaagactacca

SEQ ID NO: 5126096 - DNA, 25 bp, Homo sapien
aagactaccattatgtgcttgaata

SEQ ID NO: 5126097 - DNA, 25 bp, Homo sapien
actaccattatgtgcttgaatagca

SEQ ID NO: 5126098 - DNA, 25 bp, Homo sapien
tttagccattttcggattccaggta

SEQ ID NO: 5126099 - DNA, 25 bp, Homo sapien
tttcggattccaggtaaagcaggca

SEQ ID NO: 5126100 - DNA, 25 bp, Homo sapien
tagccattttcggattccaggtaaa

SEQ ID NO: 5126101 - DNA, 25 bp, Homo sapien
cattttcggattccaggtaaagcag

SEQ ID NO: 5126102 - DNA, 25 bp, Homo sapien
aaatacatattgattcaggtgcatt

SEQ ID NO: 5126103 - DNA, 25 bp, Homo sapien
atacatattgattcaggtgcatttg

SEQ ID NO: 5126104 - DNA, 25 bp, Homo sapien
tacatattgattcaggtgcatttgt

SEQ ID NO: 5126105 - DNA, 25 bp, Homo sapien
taaaatacatattgattcaggtgca

SEQ ID NO: 5126106 - DNA, 25 bp, Homo sapien
gcaggcataacggctgataggagct

SEQ ID NO: 5126107 - DNA, 25 bp, Homo sapien
actgcttttctgtgaatcagagtac

SEQ ID NO: 5126108 - DNA, 25 bp, Homo sapien
ctcctttaattgtaagtggctggta

SEQ ID NO: 5126109 - DNA, 25 bp, Homo sapien
aaccgcatcccaccaagatttttgt

SEQ ID NO: 5126110 - DNA, 25 bp, Homo sapien
tctaaatacacagttcagcgcttac

SEQ ID NO: 5126111 - DNA, 25 bp, Homo sapien
aatacacagttcagcgcttacatac

SEQ ID NO: 5126112 - DNA, 25 bp, Homo sapien
agttcagcgcttacatacatatatg

SEQ ID NO: 5126113 - DNA, 25 bp, Homo sapien
catatatgttaatgggtcacatgac

SEQ ID NO: 5126114 - DNA, 25 bp, Homo sapien
ctcttagagtgtttatttcatgctg

SEQ ID NO: 5126115 - DNA, 25 bp, Homo sapien
tagagtgtttatttcatgctgaact

SEQ ID NO: 5126116 - DNA, 25 bp, Homo sapien
cttagagtgtttatttcatgctgaa

SEQ ID NO: 5126117 - DNA, 25 bp, Homo sapien
agagtgtttatttcatgctgaacta

SEQ ID NO: 5126118 - DNA, 25 bp, Homo sapien
tgcccaatgtacaagcagagcaggt

SEQ ID NO: 5126119 - DNA, 25 bp, Homo sapien
tggtcttacctacaaagccttgtgc

SEQ ID NO: 5126120 - DNA, 25 bp, Homo sapien
ataatggtcttacctacaaagcctt

SEQ ID NO: 5126121 - DNA, 25 bp, Homo sapien
atggtcttacctacaaagccttgtg

SEQ ID NO: 5126122 - DNA, 25 bp, Homo sapien
taatggtcttacctacaaagccttg

SEQ ID NO: 5126123 - DNA, 25 bp, Homo sapien
aatgaacacttctccctatgtattc

SEQ ID NO: 5126124 - DNA, 25 bp, Homo sapien
ataatgaacacttctccctatgtat

SEQ ID NO: 5126125 - DNA, 25 bp, Homo sapien
gaggatcaataggttcaggaatact

SEQ ID NO: 5126126 - DNA, 25 bp, Homo sapien
gtttaaacagaggatcaataggttc

SEQ ID NO: 5126127 - DNA, 25 bp, Homo sapien
agaaacaacactttttatagattca

SEQ ID NO: 5126128 - DNA, 25 bp, Homo sapien
ttcttgaccactgaaagatttgaat

SEQ ID NO: 5126129 - DNA, 25 bp, Homo sapien
tcttgaccactgaaagatttgaatc

SEQ ID NO: 5126130 - DNA, 25 bp, Homo sapien
tttcttgaccactgaaagatttgaa

SEQ ID NO: 5126131 - DNA, 25 bp, Homo sapien
aaaacactgaccagtgggttatcag

SEQ ID NO: 5126132 - DNA, 25 bp, Homo sapien
cagtgggttatcagtaagaacgtac

SEQ ID NO: 5126133 - DNA, 25 bp, Homo sapien
aatataagaccaacgcaaaaacact

SEQ ID NO: 5126134 - DNA, 25 bp, Homo sapien
cttctgtgcattaataacaacatat

SEQ ID NO: 5126135 - DNA, 25 bp, Homo sapien
gaatctgcatttcgcaaagaaccat

SEQ ID NO: 5126136 - DNA, 25 bp, Homo sapien
aatatttggtaggagatggtgtaga

SEQ ID NO: 5126137 - DNA, 25 bp, Homo sapien
tcttcgagttcctgcatgactgact

SEQ ID NO: 5126138 - DNA, 25 bp, Homo sapien
gagaggacctccttcactatagtct

SEQ ID NO: 5126139 - DNA, 25 bp, Homo sapien
cattttccgtaaagaattctgatct

SEQ ID NO: 5126140 - DNA, 25 bp, Homo sapien
tcttggcaaatcattttccgtaaag

SEQ ID NO: 5126141 - DNA, 25 bp, Homo sapien
cgtaatggcctttacttcttggcaa

SEQ ID NO: 5126142 - DNA, 25 bp, Homo sapien
gtaatggcctttacttcttggcaaa

SEQ ID NO: 5126143 - DNA, 25 bp, Homo sapien
aagaccaaggtatgtaggctgggca

SEQ ID NO: 5126144 - DNA, 25 bp, Homo sapien
caagaccaaggtatgtaggctgggc

SEQ ID NO: 5126145 - DNA, 25 bp, Homo sapien
gtctgtgacccctgatatccatcag

SEQ ID NO: 5126146 - DNA, 25 bp, Homo sapien
ctgttagtggagccccatgaaatgt

SEQ ID NO: 5126147 - DNA, 25 bp, Homo sapien
cataattctctgtgggccaacgatg

SEQ ID NO: 5126148 - DNA, 25 bp, Homo sapien
ggtccataattctctgtgggccaac

SEQ ID NO: 5126149 - DNA, 25 bp, Homo sapien
tggtaccggccattctaagttactg

SEQ ID NO: 5126150 - DNA, 25 bp, Homo sapien
cactggagtgtgaatctcggctcta

SEQ ID NO: 5126151 - DNA, 25 bp, Homo sapien
ggcaagtgctttggagttacaccac

SEQ ID NO: 5126152 - DNA, 25 bp, Homo sapien
tcagaagtctgtcgtacgtaaaagg

SEQ ID NO: 5126153 - DNA, 25 bp, Homo sapien
agtaacattagctgctggtctgaga

SEQ ID NO: 5126154 - DNA, 25 bp, Homo sapien
gaagatactgggaattatatgctgg

SEQ ID NO: 5126155 - DNA, 25 bp, Homo sapien
ctttgtgggagtaacattagctgct

SEQ ID NO: 5126156 - DNA, 25 bp, Homo sapien
ggaattatatgctggtgactgacta

SEQ ID NO: 5126157 - DNA, 25 bp, Homo sapien
cacatggtgactctctgggagtgct

SEQ ID NO: 5126158 - DNA, 25 bp, Homo sapien
tccactctgggctactgaactagtt

SEQ ID NO: 5126159 - DNA, 25 bp, Homo sapien
tgggagtgcttgaccgagaaacatg

SEQ ID NO: 5126160 - DNA, 25 bp, Homo sapien
gattcaacttggcaggagacttaga

SEQ ID NO: 5126161 - DNA, 25 bp, Homo sapien
tgaggaaggggtgctagtccaaaag

SEQ ID NO: 5126162 - DNA, 25 bp, Homo sapien
agctgctaatgctccagtgacaata

SEQ ID NO: 5126163 - DNA, 25 bp, Homo sapien
tgctaatgctccagtgacaatattt

SEQ ID NO: 5126164 - DNA, 25 bp, Homo sapien
taagtgaccgatagctgctaatgct

SEQ ID NO: 5126165 - DNA, 25 bp, Homo sapien
cctaataagtgaccgatagctgcta

SEQ ID NO: 5126166 - DNA, 25 bp, Homo sapien
tctagaagcgggaggtctgtgtttc

SEQ ID NO: 5126167 - DNA, 25 bp, Homo sapien
agtgtgcatgtctagaagcgggagg

SEQ ID NO: 5126168 - DNA, 25 bp, Homo sapien
tgcatgtctagaagcgggaggtctg

SEQ ID NO: 5126169 - DNA, 25 bp, Homo sapien
gaagcgggaggtctgtgtttctcct

SEQ ID NO: 5126170 - DNA, 25 bp, Homo sapien
ctccgtaatcagttgtctccatgcc

SEQ ID NO: 5126171 - DNA, 25 bp, Homo sapien
ctccatgccttctccctcttcccgg

SEQ ID NO: 5126172 - DNA, 25 bp, Homo sapien
catgccttctccctcttcccgggtt

SEQ ID NO: 5126173 - DNA, 25 bp, Homo sapien
tccgtaatcagttgtctccatgcct

SEQ ID NO: 5126174 - DNA, 25 bp, Homo sapien
gctgctctaaagactgtgtgtatgt

SEQ ID NO: 5126175 - DNA, 25 bp, Homo sapien
gcagctgctctaaagactgtgtgta

SEQ ID NO: 5126176 - DNA, 25 bp, Homo sapien
ctgtgtgtatgtgctggcggaagac

SEQ ID NO: 5126177 - DNA, 25 bp, Homo sapien
tgtgtatgtgctggcggaagacaca

SEQ ID NO: 5126178 - DNA, 25 bp, Homo sapien
ttttattggagcagcccaaaaaagc

SEQ ID NO: 5126179 - DNA, 25 bp, Homo sapien
gaagaacatatttagacagagtaac

SEQ ID NO: 5126180 - DNA, 25 bp, Homo sapien
attaaataagacagtgaaattaaag

SEQ ID NO: 5126181 - DNA, 25 bp, Homo sapien
attggagcagcccaaaaaagcatat

SEQ ID NO: 5126182 - DNA, 25 bp, Homo sapien
tgatctgcactttttgtggtggaac

SEQ ID NO: 5126183 - DNA, 25 bp, Homo sapien
gtgttagagaaatgagttaaaaatg

SEQ ID NO: 5126184 - DNA, 25 bp, Homo sapien
tgttagagaaatgagttaaaaatgg

SEQ ID NO: 5126185 - DNA, 25 bp, Homo sapien
ctggtgttagagaaatgagttaaaa

SEQ ID NO: 5126186 - DNA, 25 bp, Homo sapien
tggtgttagagaaatgagttaaaaa

SEQ ID NO: 5126187 - DNA, 25 bp, Homo sapien
gcaacatcgtatttataacaggaag

SEQ ID NO: 5126188 - DNA, 25 bp, Homo sapien
gaactgcagcaagacgttcttcaag

SEQ ID NO: 5126189 - DNA, 25 bp, Homo sapien
tgagcaaccgcagcaagttttccct

SEQ ID NO: 5126190 - DNA, 25 bp, Homo sapien
ggctgagctgcaacatcgtatttat

SEQ ID NO: 5126191 - DNA, 25 bp, Homo sapien
gccaggatagtctcagtatcttgat

SEQ ID NO: 5126192 - DNA, 25 bp, Homo sapien
tagaccaagtgttgggctatatgac

SEQ ID NO: 5126193 - DNA, 25 bp, Homo sapien
gggctatatgactccattgtcttag

SEQ ID NO: 5126194 - DNA, 25 bp, Homo sapien
catttgcctagaaagtggactgctg

SEQ ID NO: 5126195 - DNA, 25 bp, Homo sapien
aacatttgcttccaaggagagaggt

SEQ ID NO: 5126196 - DNA, 25 bp, Homo sapien
acatttgcttccaaggagagaggta

SEQ ID NO: 5126197 - DNA, 25 bp, Homo sapien
catttgcttccaaggagagaggtaa

SEQ ID NO: 5126198 - DNA, 25 bp, Homo sapien
tttgcttccaaggagagaggtaaaa

SEQ ID NO: 5126199 - DNA, 25 bp, Homo sapien
ggatggtagcttgcttcaacaaagt

SEQ ID NO: 5126200 - DNA, 25 bp, Homo sapien
gatggtagcttgcttcaacaaagtg

SEQ ID NO: 5126201 - DNA, 25 bp, Homo sapien
gggatggtagcttgcttcaacaaag

SEQ ID NO: 5126202 - DNA, 25 bp, Homo sapien
tgggatggtagcttgcttcaacaaa

SEQ ID NO: 5126203 - DNA, 25 bp, Homo sapien
gggtcaggagatcagaaatggttct

SEQ ID NO: 5126204 - DNA, 25 bp, Homo sapien
tgggtcaggagatcagaaatggttc

SEQ ID NO: 5126205 - DNA, 25 bp, Homo sapien
tctgtgggtcaggagatcagaaatg

SEQ ID NO: 5126206 - DNA, 25 bp, Homo sapien
tgtgggtcaggagatcagaaatggt

SEQ ID NO: 5126207 - DNA, 25 bp, Homo sapien
gagatcttcctcgtttttagcaatt

SEQ ID NO: 5126208 - DNA, 25 bp, Homo sapien
gtctgacctctgtcaactggcataa

SEQ ID NO: 5126209 - DNA, 25 bp, Homo sapien
tattcatttgccagttgaaggataa

SEQ ID NO: 5126210 - DNA, 25 bp, Homo sapien
tgaaggataactgagatcttcctcg

SEQ ID NO: 5126211 - DNA, 25 bp, Homo sapien
agttcaaagaaaaagccctctcaag

SEQ ID NO: 5126212 - DNA, 25 bp, Homo sapien
tccttagaaaagttgatgaaactaa

SEQ ID NO: 5126213 - DNA, 25 bp, Homo sapien
cacccagcctctagtagtactttta

SEQ ID NO: 5126214 - DNA, 25 bp, Homo sapien
ttgatgaaactaaagactgaagttc

SEQ ID NO: 5126215 - DNA, 25 bp, Homo sapien
taggagcttagttagcccccaaata

SEQ ID NO: 5126216 - DNA, 25 bp, Homo sapien
tggcactaagatgggaatgactctg

SEQ ID NO: 5126217 - DNA, 25 bp, Homo sapien
aattatctgattatatgattggcac

SEQ ID NO: 5126218 - DNA, 25 bp, Homo sapien
aatgactctggcctgatttcttcag

SEQ ID NO: 5126219 - DNA, 25 bp, Homo sapien
catacagcgggacatctgacaaagt

SEQ ID NO: 5126220 - DNA, 25 bp, Homo sapien
tgtactgggtgaaacgaactgagtt

SEQ ID NO: 5126221 - DNA, 25 bp, Homo sapien
caaagtaccaagtgtcaaggatcat

SEQ ID NO: 5126222 - DNA, 25 bp, Homo sapien
tgagtcttgcagtgtctatccctaa

SEQ ID NO: 5126223 - DNA, 25 bp, Homo sapien
tataaaactacatctaaactctaag

SEQ ID NO: 5126224 - DNA, 25 bp, Homo sapien
taaccccaagacagatttgcaatta

SEQ ID NO: 5126225 - DNA, 25 bp, Homo sapien
actcttacacagtgttaaccccaag

SEQ ID NO: 5126226 - DNA, 25 bp, Homo sapien
tgttacatcaacatgtacaaatata

SEQ ID NO: 5126227 - DNA, 25 bp, Homo sapien
tcaatgaaactacgagttttaggcc

SEQ ID NO: 5126228 - DNA, 25 bp, Homo sapien
ctagaacatagaagaatgcctagtt

SEQ ID NO: 5126229 - DNA, 25 bp, Homo sapien
taggccaaatctgagaaaagaccaa

SEQ ID NO: 5126230 - DNA, 25 bp, Homo sapien
catatcaagttagaactctcatcac

SEQ ID NO: 5126231 - DNA, 25 bp, Homo sapien
cttgggtatggaggtttcttgaaga

SEQ ID NO: 5126232 - DNA, 25 bp, Homo sapien
tcttgggtatggaggtttcttgaag

SEQ ID NO: 5126233 - DNA, 25 bp, Homo sapien
ttgggtatggaggtttcttgaagac

SEQ ID NO: 5126234 - DNA, 25 bp, Homo sapien
gacagaaagaatctttttgatgtcg

SEQ ID NO: 5126235 - DNA, 25 bp, Homo sapien
accagaatatgtgaataagcagaca

SEQ ID NO: 5126236 - DNA, 25 bp, Homo sapien
gatgtcgatgttcaactatttttgg

SEQ ID NO: 5126237 - DNA, 25 bp, Homo sapien
aactatttttggcaccatagtagaa

SEQ ID NO: 5126238 - DNA, 25 bp, Homo sapien
tattgtcatattgttattttctctc

SEQ ID NO: 5126239 - DNA, 25 bp, Homo sapien
cacagttggttgaatttgtggatgt

SEQ ID NO: 5126240 - DNA, 25 bp, Homo sapien
ctttttcaagtcttttccatccaca

SEQ ID NO: 5126241 - DNA, 25 bp, Homo sapien
tgaatttgtggatgtggaacccatg

SEQ ID NO: 5126242 - DNA, 25 bp, Homo sapien
tgctgtgcagaccttcacgtggtgt

SEQ ID NO: 5126243 - DNA, 25 bp, Homo sapien
ggttggatctctttcagcctcggaa

SEQ ID NO: 5126244 - DNA, 25 bp, Homo sapien
tgggcaccggactgttttaaacaca

SEQ ID NO: 5126245 - DNA, 25 bp, Homo sapien
tgtgagctctatgatggccaagcct

SEQ ID NO: 5126246 - DNA, 25 bp, Homo sapien
tttaaacacaggagagggcccattg

SEQ ID NO: 5126247 - DNA, 25 bp, Homo sapien
catttctcagtttagatcatcttta

SEQ ID NO: 5126248 - DNA, 25 bp, Homo sapien
gacatgggtgggcacactagcaaac

SEQ ID NO: 5126249 - DNA, 25 bp, Homo sapien
aaaatgcaaagaaacgactcgttgt

SEQ ID NO: 5126250 - DNA, 25 bp, Homo sapien
gttgtaagcacataactcacgtggg

SEQ ID NO: 5126251 - DNA, 25 bp, Homo sapien
caaagacttcccaaatgtgccaggg

SEQ ID NO: 5126252 - DNA, 25 bp, Homo sapien
aagacttcccaaatgtgccagggcc

SEQ ID NO: 5126253 - DNA, 25 bp, Homo sapien
ccaaagacttcccaaatgtgccagg

SEQ ID NO: 5126254 - DNA, 25 bp, Homo sapien
aaagacttcccaaatgtgccagggc

SEQ ID NO: 5126255 - DNA, 25 bp, Homo sapien
tatccatggtgagtctggacctcag

SEQ ID NO: 5126256 - DNA, 25 bp, Homo sapien
tcagaaactagtctgcagaccttgc

SEQ ID NO: 5126257 - DNA, 25 bp, Homo sapien
tgcaggctgctaagttatccgggtc

SEQ ID NO: 5126258 - DNA, 25 bp, Homo sapien
tatagtactgagagatccttgtgcc

SEQ ID NO: 5126259 - DNA, 25 bp, Homo sapien
gccttcagtaacagtagtccctgcc

SEQ ID NO: 5126260 - DNA, 25 bp, Homo sapien
taaacttcttgaaacagagtgagaa

SEQ ID NO: 5126261 - DNA, 25 bp, Homo sapien
tgaatgatccactgtccaccagatg

SEQ ID NO: 5126262 - DNA, 25 bp, Homo sapien
tcagagggatcaagccacccttgga

SEQ ID NO: 5126263 - DNA, 25 bp, Homo sapien
tatagtaagacatacgtgtacctct

SEQ ID NO: 5126264 - DNA, 25 bp, Homo sapien
ccagcaacagctgggatcacccatg

SEQ ID NO: 5126265 - DNA, 25 bp, Homo sapien
gagaagttctgagtgttttggccga

SEQ ID NO: 5126266 - DNA, 25 bp, Homo sapien
ttttggccgatagtcccagatgagg

SEQ ID NO: 5126267 - DNA, 25 bp, Homo sapien
gcagctctatcagtacatggttgga

SEQ ID NO: 5126268 - DNA, 25 bp, Homo sapien
ggacataggcgctttcaaacaggaa

SEQ ID NO: 5126269 - DNA, 25 bp, Homo sapien
ccataaatgtggatgtgacttgtcc

SEQ ID NO: 5126270 - DNA, 25 bp, Homo sapien
gacttgtccaggtgctactctagct

SEQ ID NO: 5126271 - DNA, 25 bp, Homo sapien
aagtcatactccttagctgctggct

SEQ ID NO: 5126272 - DNA, 25 bp, Homo sapien
gacagaaagtcatactccttagctg

SEQ ID NO: 5126273 - DNA, 25 bp, Homo sapien
cagaaagtcatactccttagctgct

SEQ ID NO: 5126274 - DNA, 25 bp, Homo sapien
catactccttagctgctggcttggc

SEQ ID NO: 5126275 - DNA, 25 bp, Homo sapien
gagtactgtctggtgcaatagctaa

SEQ ID NO: 5126276 - DNA, 25 bp, Homo sapien
gagcagtgtctgagtcccattgagg

SEQ ID NO: 5126277 - DNA, 25 bp, Homo sapien
gggctgcttgggttataaacttgtc

SEQ ID NO: 5126278 - DNA, 25 bp, Homo sapien
ttgaggattattggtggatgctgcc

SEQ ID NO: 5126279 - DNA, 25 bp, Homo sapien
ggaaatatgtctctccctaagagtg

SEQ ID NO: 5126280 - DNA, 25 bp, Homo sapien
aatcatgtttgggtagttcactcac

SEQ ID NO: 5126281 - DNA, 25 bp, Homo sapien
tttttgaatgcctagagagagtcgg

SEQ ID NO: 5126282 - DNA, 25 bp, Homo sapien
tgtgtcagcgaactatggctcttcc

SEQ ID NO: 5126283 - DNA, 25 bp, Homo sapien
ccttttgcaccctaagtgagaatca

SEQ ID NO: 5126284 - DNA, 25 bp, Homo sapien
tttgcaccctaagtgagaatcatag

SEQ ID NO: 5126285 - DNA, 25 bp, Homo sapien
aggaccttttgcaccctaagtgaga

SEQ ID NO: 5126286 - DNA, 25 bp, Homo sapien
tgaacccaggaccttttgcacccta

SEQ ID NO: 5126287 - DNA, 25 bp, Homo sapien
ggcaaaaaaccaattggcatgacta

SEQ ID NO: 5126288 - DNA, 25 bp, Homo sapien
tatcgtttagaggtagcattaggca

SEQ ID NO: 5126289 - DNA, 25 bp, Homo sapien
tcacagtgaatatacgacccacagc

SEQ ID NO: 5126290 - DNA, 25 bp, Homo sapien
tgtggattgaacactaaccatgaaa

SEQ ID NO: 5126291 - DNA, 25 bp, Homo sapien
gaaaatccaccttgtggttgaccat

SEQ ID NO: 5126292 - DNA, 25 bp, Homo sapien
cattggcacgtgagctaaagaggct

SEQ ID NO: 5126293 - DNA, 25 bp, Homo sapien
gctggtggtataatggaaaataatc

SEQ ID NO: 5126294 - DNA, 25 bp, Homo sapien
gaccatctgttagggccttgaattc

SEQ ID NO: 5126295 - DNA, 25 bp, Homo sapien
gcaatgacaggggaaagtgatcctt

SEQ ID NO: 5126296 - DNA, 25 bp, Homo sapien
tcatcagatccagtctcagaaggcc

SEQ ID NO: 5126297 - DNA, 25 bp, Homo sapien
aaggccttgcttttttgggcgcaat

SEQ ID NO: 5126298 - DNA, 25 bp, Homo sapien
gacaggggaaagtgatccttcaaag

SEQ ID NO: 5126299 - DNA, 25 bp, Homo sapien
tctggtggtagtctgaatttagtaa

SEQ ID NO: 5126300 - DNA, 25 bp, Homo sapien
caacttaagctcctcatacacaagg

SEQ ID NO: 5126301 - DNA, 25 bp, Homo sapien
cttctgaaggactcagacataaaga

SEQ ID NO: 5126302 - DNA, 25 bp, Homo sapien
aaattgcaggtatgtgagtaaagag

SEQ ID NO: 5126303 - DNA, 25 bp, Homo sapien
gtaatgatctacataaggccccaat

SEQ ID NO: 5126304 - DNA, 25 bp, Homo sapien
taatgatctacataaggccccaatt

SEQ ID NO: 5126305 - DNA, 25 bp, Homo sapien
agtaatgatctacataaggccccaa

SEQ ID NO: 5126306 - DNA, 25 bp, Homo sapien
atacttggtggctcagacgtaaaaa

SEQ ID NO: 5126307 - DNA, 25 bp, Homo sapien
ggtggctcagacgtaaaaaatgatg

SEQ ID NO: 5126308 - DNA, 25 bp, Homo sapien
cttggtggctcagacgtaaaaaatg

SEQ ID NO: 5126309 - DNA, 25 bp, Homo sapien
tacttggtggctcagacgtaaaaaa

SEQ ID NO: 5126310 - DNA, 25 bp, Homo sapien
aggcggcattccttcgcccttcaga

SEQ ID NO: 5126311 - DNA, 25 bp, Homo sapien
gattccagggaggtaaggataaggc

SEQ ID NO: 5126312 - DNA, 25 bp, Homo sapien
gactacaagtctgcttctttcacag

SEQ ID NO: 5126313 - DNA, 25 bp, Homo sapien
gaggtaaggataaggcggcattcct

SEQ ID NO: 5126314 - DNA, 25 bp, Homo sapien
ctctcatcaccaagtatgtacagtg

SEQ ID NO: 5126315 - DNA, 25 bp, Homo sapien
agctctcatcaccaagtatgtacag

SEQ ID NO: 5126316 - DNA, 25 bp, Homo sapien
aatactgtgaggattcatcagaaac

SEQ ID NO: 5126317 - DNA, 25 bp, Homo sapien
agttattctggttaaatactgtgag

SEQ ID NO: 5126318 - DNA, 25 bp, Homo sapien
ttttccacttgttctgcttgcaact

SEQ ID NO: 5126319 - DNA, 25 bp, Homo sapien
ttccacttgttctgcttgcaacttc

SEQ ID NO: 5126320 - DNA, 25 bp, Homo sapien
ctgttttccacttgttctgcttgca

SEQ ID NO: 5126321 - DNA, 25 bp, Homo sapien
ccacttgttctgcttgcaacttctg

SEQ ID NO: 5126322 - DNA, 25 bp, Homo sapien
caaccaatctttcagctagactaga

SEQ ID NO: 5126323 - DNA, 25 bp, Homo sapien
atctttcagctagactagaaacaga

SEQ ID NO: 5126324 - DNA, 25 bp, Homo sapien
aaccaatctttcagctagactagaa

SEQ ID NO: 5126325 - DNA, 25 bp, Homo sapien
ccaatctttcagctagactagaaac

SEQ ID NO: 5126326 - DNA, 25 bp, Homo sapien
tcacgacagtgataaattgcatctc

SEQ ID NO: 5126327 - DNA, 25 bp, Homo sapien
tctctgatgggaagagcaattccaa

SEQ ID NO: 5126328 - DNA, 25 bp, Homo sapien
tgggtaagtttccttcgcaggcctg

SEQ ID NO: 5126329 - DNA, 25 bp, Homo sapien
aagtttccttcgcaggcctgcttgg

SEQ ID NO: 5126330 - DNA, 25 bp, Homo sapien
tctgaagaagccttcgcacatcctg

SEQ ID NO: 5126331 - DNA, 25 bp, Homo sapien
tcgatgaactcgtggtcactgagct

SEQ ID NO: 5126332 - DNA, 25 bp, Homo sapien
ccatattaatgacatgacctcgtga

SEQ ID NO: 5126333 - DNA, 25 bp, Homo sapien
ttgacacggacaggatgcgcactct

SEQ ID NO: 5126334 - DNA, 25 bp, Homo sapien
taggaataggcaatggctctgttgg

SEQ ID NO: 5126335 - DNA, 25 bp, Homo sapien
cagtcagattcaatttaggaatagg

SEQ ID NO: 5126336 - DNA, 25 bp, Homo sapien
tcctcgtcctacaggaagagccata

SEQ ID NO: 5126337 - DNA, 25 bp, Homo sapien
aaggtaaacattcctcgtcctacag

SEQ ID NO: 5126338 - DNA, 25 bp, Homo sapien
ctacattcaaaaccattaaccccat

SEQ ID NO: 5126339 - DNA, 25 bp, Homo sapien
tctacattcaaaaccattaacccca

SEQ ID NO: 5126340 - DNA, 25 bp, Homo sapien
tactgttgtgttccgaggaggggca

SEQ ID NO: 5126341 - DNA, 25 bp, Homo sapien
cacatcgatgtttccactattaagg

SEQ ID NO: 5126342 - DNA, 25 bp, Homo sapien
ggaggcacatcgatgtttccactat

SEQ ID NO: 5126343 - DNA, 25 bp, Homo sapien
gttgggaggcacatcgatgtttcca

SEQ ID NO: 5126344 - DNA, 25 bp, Homo sapien
caatccaagctgagtcgatctggga

SEQ ID NO: 5126345 - DNA, 25 bp, Homo sapien
ccattatgaaagctggcccagcttg

SEQ ID NO: 5126346 - DNA, 25 bp, Homo sapien
caggagctatcttcaggccagcagc

SEQ ID NO: 5126347 - DNA, 25 bp, Homo sapien
gcatgcttgggcttattgtaaacaa

SEQ ID NO: 5126348 - DNA, 25 bp, Homo sapien
taagaagccgagtaatagacatatc

SEQ ID NO: 5126349 - DNA, 25 bp, Homo sapien
tgtgagctgtcccttgatatacaag

SEQ ID NO: 5126350 - DNA, 25 bp, Homo sapien
cactgcagccacttggacattgtga

SEQ ID NO: 5126351 - DNA, 25 bp, Homo sapien
gaaacaccaagtagcagtccaatgc

SEQ ID NO: 5126352 - DNA, 25 bp, Homo sapien
gagtccattacttgacttctattgg

SEQ ID NO: 5126353 - DNA, 25 bp, Homo sapien
tacccaccagcatgtaaaggaggaa

SEQ ID NO: 5126354 - DNA, 25 bp, Homo sapien
ggttcatcaccaacatacccaccag

SEQ ID NO: 5126355 - DNA, 25 bp, Homo sapien
ggaagtgctgttatccaacacagta

SEQ ID NO: 5126356 - DNA, 25 bp, Homo sapien
agccagcagctaaggagtatgactc

SEQ ID NO: 5126357 - DNA, 25 bp, Homo sapien
cagcagctaaggagtatgactctct

SEQ ID NO: 5126358 - DNA, 25 bp, Homo sapien
gcagctaaggagtatgactctctgt

SEQ ID NO: 5126359 - DNA, 25 bp, Homo sapien
agctaaggagtatgactctctgtca

SEQ ID NO: 5126360 - DNA, 25 bp, Homo sapien
tgctcaggcacattgagatcagaca

SEQ ID NO: 5126361 - DNA, 25 bp, Homo sapien
ctccaaccatgtactgatagagctg

SEQ ID NO: 5126362 - DNA, 25 bp, Homo sapien
tatgtttctccctatgcattcctgt

SEQ ID NO: 5126363 - DNA, 25 bp, Homo sapien
gtcctccaaccatgtactgatagag

SEQ ID NO: 5126364 - DNA, 25 bp, Homo sapien
attggtttttaagtagatcatagcc

SEQ ID NO: 5126365 - DNA, 25 bp, Homo sapien
tagccaaagctagagtagcacctgg

SEQ ID NO: 5126366 - DNA, 25 bp, Homo sapien
catccacatttatggtatctccttc

SEQ ID NO: 5126367 - DNA, 25 bp, Homo sapien
gtagcacctggacaagtcacatcca

SEQ ID NO: 5126368 - DNA, 25 bp, Homo sapien
caggggctcggagccaatctgcaat

SEQ ID NO: 5126369 - DNA, 25 bp, Homo sapien
gtcaggggctcggagccaatctgca

SEQ ID NO: 5126370 - DNA, 25 bp, Homo sapien
aaatacatggtgtcaggggctcgga

SEQ ID NO: 5126371 - DNA, 25 bp, Homo sapien
gtccaacaaatacatggtgtcaggg

SEQ ID NO: 5126372 - DNA, 25 bp, Homo sapien
gaggaacattgctgtcaacccactt

SEQ ID NO: 5126373 - DNA, 25 bp, Homo sapien
aacattgctgtcaacccacttggaa

SEQ ID NO: 5126374 - DNA, 25 bp, Homo sapien
acaaaatcaggcatcgagcaagtgt

SEQ ID NO: 5126375 - DNA, 25 bp, Homo sapien
gaacattgctgtcaacccacttgga

SEQ ID NO: 5126376 - DNA, 25 bp, Homo sapien
tctgagcacggcaattcgatttcac

SEQ ID NO: 5126377 - DNA, 25 bp, Homo sapien
aatcctctgagcacggcaattcgat

SEQ ID NO: 5126378 - DNA, 25 bp, Homo sapien
aaattcaaatcctctgagcacggca

SEQ ID NO: 5126379 - DNA, 25 bp, Homo sapien
tgagcacggcaattcgatttcactg

SEQ ID NO: 5126380 - DNA, 25 bp, Homo sapien
aagtcataaaatctttggcaaattt

SEQ ID NO: 5126381 - DNA, 25 bp, Homo sapien
ttaggtttcctgagccagccatgac

SEQ ID NO: 5126382 - DNA, 25 bp, Homo sapien
catgtggtgggctaagtgaaaacca

SEQ ID NO: 5126383 - DNA, 25 bp, Homo sapien
catgtgtaagaagcgacaaagctgc

SEQ ID NO: 5126384 - DNA, 25 bp, Homo sapien
ccaaaaatagaagtccaagggccat

SEQ ID NO: 5126385 - DNA, 25 bp, Homo sapien
gagcggcaatggaagaatttgatgt

SEQ ID NO: 5126386 - DNA, 25 bp, Homo sapien
ggcacagagaagagcggcaatggaa

SEQ ID NO: 5126387 - DNA, 25 bp, Homo sapien
ggcaatggaagaatttgatgtgctc

SEQ ID NO: 5126388 - DNA, 25 bp, Homo sapien
agagaagagcggcaatggaagaatt

SEQ ID NO: 5126389 - DNA, 25 bp, Homo sapien
ttctaagagggcatagcagggcgtg

SEQ ID NO: 5126390 - DNA, 25 bp, Homo sapien
taagagggcatagcagggcgtgttt

SEQ ID NO: 5126391 - DNA, 25 bp, Homo sapien
ccagcacatagaggtgccggagagc

SEQ ID NO: 5126392 - DNA, 25 bp, Homo sapien
ggctccgcggccagcacatagaggt

SEQ ID NO: 5126393 - DNA, 25 bp, Homo sapien
aagggtaggagccatcaattcttct

SEQ ID NO: 5126394 - DNA, 25 bp, Homo sapien
agggtaggagccatcaattcttctt

SEQ ID NO: 5126395 - DNA, 25 bp, Homo sapien
agaagggtaggagccatcaattctt

SEQ ID NO: 5126396 - DNA, 25 bp, Homo sapien
gaagaagggtaggagccatcaattc

SEQ ID NO: 5126397 - DNA, 25 bp, Homo sapien
gagcagttcccagtatcttgggcct

SEQ ID NO: 5126398 - DNA, 25 bp, Homo sapien
cagttcccagtatcttgggcctttt

SEQ ID NO: 5126399 - DNA, 25 bp, Homo sapien
cctttgcttaaatctatgagcagtt

SEQ ID NO: 5126400 - DNA, 25 bp, Homo sapien
tgagcagttcccagtatcttgggcc

SEQ ID NO: 5126401 - DNA, 25 bp, Homo sapien
tgacccgcccggagtttaacatata

SEQ ID NO: 5126402 - DNA, 25 bp, Homo sapien
gagttcctgttagcaacagtctgag

SEQ ID NO: 5126403 - DNA, 25 bp, Homo sapien
cagtctgagccaacaaactttgcca

SEQ ID NO: 5126404 - DNA, 25 bp, Homo sapien
aaagcccgggcttcagagttcctgt

SEQ ID NO: 5126405 - DNA, 25 bp, Homo sapien
acagttggcttgcagaaatattcag

SEQ ID NO: 5126406 - DNA, 25 bp, Homo sapien
gtgctggatcagaagtgaatgctga

SEQ ID NO: 5126407 - DNA, 25 bp, Homo sapien
gcaaatgacagaagtgctggatcag

SEQ ID NO: 5126408 - DNA, 25 bp, Homo sapien
cagttggcttgcagaaatattcagc

SEQ ID NO: 5126409 - DNA, 25 bp, Homo sapien
ctgggtaacacattcatagagtact

SEQ ID NO: 5126410 - DNA, 25 bp, Homo sapien
cctgggtaacacattcatagagtac

SEQ ID NO: 5126411 - DNA, 25 bp, Homo sapien
tcctgggtaacacattcatagagta

SEQ ID NO: 5126412 - DNA, 25 bp, Homo sapien
ctcttctcccaagtcttcttatagc

SEQ ID NO: 5126413 - DNA, 25 bp, Homo sapien
tctcttctcccaagtcttcttatag

SEQ ID NO: 5126414 - DNA, 25 bp, Homo sapien
ttctcttctcccaagtcttcttata

SEQ ID NO: 5126415 - DNA, 25 bp, Homo sapien
ggcttcgggagctgaaaaactctaa

SEQ ID NO: 5126416 - DNA, 25 bp, Homo sapien
gccactggtccagggtattatcaat

SEQ ID NO: 5126417 - DNA, 25 bp, Homo sapien
cacttcacaacagggaggaattccg

SEQ ID NO: 5126418 - DNA, 25 bp, Homo sapien
gaattccgagttcataaagagcccc

SEQ ID NO: 5126419 - DNA, 25 bp, Homo sapien
tcatcaagaacttattgaacgctca

SEQ ID NO: 5126420 - DNA, 25 bp, Homo sapien
tattactttttcatcaagaacttat

SEQ ID NO: 5126421 - DNA, 25 bp, Homo sapien
ctgagaggcacaagaaatatcttct

SEQ ID NO: 5126422 - DNA, 25 bp, Homo sapien
ttttcatcaagaacttattgaacgc

SEQ ID NO: 5126423 - DNA, 25 bp, Homo sapien
aatggaacggaaccaactgatgaca

SEQ ID NO: 5126424 - DNA, 25 bp, Homo sapien
tctagtcctataggtggcaggtgct

SEQ ID NO: 5126425 - DNA, 25 bp, Homo sapien
cagagtggtagacgaggaagcaggc

SEQ ID NO: 5126426 - DNA, 25 bp, Homo sapien
ccagcatgctcagctgtgattcctc

SEQ ID NO: 5126427 - DNA, 25 bp, Homo sapien
ctgcccgctgaggtaggcgtgcaca

SEQ ID NO: 5126428 - DNA, 25 bp, Homo sapien
gagccaatctcagcaaagctcgcac

SEQ ID NO: 5126429 - DNA, 25 bp, Homo sapien
gccaatctcagcaaagctcgcactg

SEQ ID NO: 5126430 - DNA, 25 bp, Homo sapien
ggagccaatctcagcaaagctcgca

SEQ ID NO: 5126431 - DNA, 25 bp, Homo sapien
aggagccaatctcagcaaagctcgc

SEQ ID NO: 5126432 - DNA, 25 bp, Homo sapien
tcacgtttcagggtaggttcaccgc

SEQ ID NO: 5126433 - DNA, 25 bp, Homo sapien
ttcagggtaggttcaccgccagaca

SEQ ID NO: 5126434 - DNA, 25 bp, Homo sapien
agggtaggttcaccgccagacacgg

SEQ ID NO: 5126435 - DNA, 25 bp, Homo sapien
cgtttcagggtaggttcaccgccag

SEQ ID NO: 5126436 - DNA, 25 bp, Homo sapien
taaaatacattgaggtttgtgcagc

SEQ ID NO: 5126437 - DNA, 25 bp, Homo sapien
tcatttccccctagttataccataa

SEQ ID NO: 5126438 - DNA, 25 bp, Homo sapien
gtcatataccgttaatgatgacagc

SEQ ID NO: 5126439 - DNA, 25 bp, Homo sapien
gctttagctttgatgtttggtcacg

SEQ ID NO: 5126440 - DNA, 25 bp, Homo sapien
taccagcttatgatcccactggcca

SEQ ID NO: 5126441 - DNA, 25 bp, Homo sapien
aagcacaggacacatatcagcatct

SEQ ID NO: 5126442 - DNA, 25 bp, Homo sapien
caagtctactctgcagacgcaaatg

SEQ ID NO: 5126443 - DNA, 25 bp, Homo sapien
agaaatatgaagtcagtggatgaag

SEQ ID NO: 5126444 - DNA, 25 bp, Homo sapien
cgtgcctctgcttcacatccaggaa

SEQ ID NO: 5126445 - DNA, 25 bp, Homo sapien
aaatgcaaggacagagagtccagag

SEQ ID NO: 5126446 - DNA, 25 bp, Homo sapien
ggaaaagcacacaatcgtaaacaac

SEQ ID NO: 5126447 - DNA, 25 bp, Homo sapien
caatcgtaaacaacggagagtgaag

SEQ ID NO: 5126448 - DNA, 25 bp, Homo sapien
caacggagagtgaagacagtaacaa

SEQ ID NO: 5126449 - DNA, 25 bp, Homo sapien
acaactggtttgatattgaattttt

SEQ ID NO: 5126450 - DNA, 25 bp, Homo sapien
gcacacggcgaggttctgtagggtt

SEQ ID NO: 5126451 - DNA, 25 bp, Homo sapien
tctcctgctaggtccttcagaagac

SEQ ID NO: 5126452 - DNA, 25 bp, Homo sapien
ctgtagggtttcaacctgagtctcc

SEQ ID NO: 5126453 - DNA, 25 bp, Homo sapien
gaaaatggccttattcaaggaagac

SEQ ID NO: 5126454 - DNA, 25 bp, Homo sapien
caggaccggtgccatctaagggatc

SEQ ID NO: 5126455 - DNA, 25 bp, Homo sapien
gaccggtgccatctaagggatctgt

SEQ ID NO: 5126456 - DNA, 25 bp, Homo sapien
tgtctgatcagtgggtctccttgcc

SEQ ID NO: 5126457 - DNA, 25 bp, Homo sapien
tctgtcagcaccaatatttgatgca

SEQ ID NO: 5126458 - DNA, 25 bp, Homo sapien
cccactggaagactctcatctgaca

SEQ ID NO: 5126459 - DNA, 25 bp, Homo sapien
gcagtcaggagtatgccatctgccc

SEQ ID NO: 5126460 - DNA, 25 bp, Homo sapien
ctgccacagctggtattagcttcct

SEQ ID NO: 5126461 - DNA, 25 bp, Homo sapien
gctggtattagcttcctgcagtcag

SEQ ID NO: 5126462 - DNA, 25 bp, Homo sapien
ttcctgcagtcaggagtatgccatc

SEQ ID NO: 5126463 - DNA, 25 bp, Homo sapien
gcatgtgatgtcagcctccgtgaaa

SEQ ID NO: 5126464 - DNA, 25 bp, Homo sapien
tgtacagagccagtctcagtggatg

SEQ ID NO: 5126465 - DNA, 25 bp, Homo sapien
caagtgacaaagacttgaggccaaa

SEQ ID NO: 5126466 - DNA, 25 bp, Homo sapien
gagtgtctggcgtttagcatctttg

SEQ ID NO: 5126467 - DNA, 25 bp, Homo sapien
aagagagttgttgggctgagagatg

SEQ ID NO: 5126468 - DNA, 25 bp, Homo sapien
ggctgagagatggatatttgcattt

SEQ ID NO: 5126469 - DNA, 25 bp, Homo sapien
gggctgagagatggatatttgcatt

SEQ ID NO: 5126470 - DNA, 25 bp, Homo sapien
tccaggtaaggaagagagttgttgg

SEQ ID NO: 5126471 - DNA, 25 bp, Homo sapien
gggagtggctactgtttcagacagt

SEQ ID NO: 5126472 - DNA, 25 bp, Homo sapien
tactgtttcagacagtttggattca

SEQ ID NO: 5126473 - DNA, 25 bp, Homo sapien
cagtttggattcacctttaggttca

SEQ ID NO: 5126474 - DNA, 25 bp, Homo sapien
tgctaccaaccccttctccaatgcc

SEQ ID NO: 5126475 - DNA, 25 bp, Homo sapien
gcggttttcagacccatcatgcatc

SEQ ID NO: 5126476 - DNA, 25 bp, Homo sapien
accaaccccaggagttgctcccaca

SEQ ID NO: 5126477 - DNA, 25 bp, Homo sapien
ccaggagttgctcccacaccgtgca

SEQ ID NO: 5126478 - DNA, 25 bp, Homo sapien
aaagcctgagcggttttcagaccca

SEQ ID NO: 5126479 - DNA, 25 bp, Homo sapien
tggcaaggatgctcacattttgctc

SEQ ID NO: 5126480 - DNA, 25 bp, Homo sapien
tagagggcgcgctaagccaacctag

SEQ ID NO: 5126481 - DNA, 25 bp, Homo sapien
atcgccgccatcagtgcctgacaca

SEQ ID NO: 5126482 - DNA, 25 bp, Homo sapien
tttagaccttctcccactagagggc

SEQ ID NO: 5126483 - DNA, 25 bp, Homo sapien
tctgcaccagcctgtctcatctgaa

SEQ ID NO: 5126484 - DNA, 25 bp, Homo sapien
ctgctgtggttgaccccagatgtct

SEQ ID NO: 5126485 - DNA, 25 bp, Homo sapien
gcattttagtgtctgctgtggttga

SEQ ID NO: 5126486 - DNA, 25 bp, Homo sapien
tgcaccagcctgtctcatctgaaca

SEQ ID NO: 5126487 - DNA, 25 bp, Homo sapien
gctgtgtgagaagcatgcaaatccc

SEQ ID NO: 5126488 - DNA, 25 bp, Homo sapien
ccctatgacgcagccctttgagaca

SEQ ID NO: 5126489 - DNA, 25 bp, Homo sapien
cacaagaaagtttgggatgcttttc

SEQ ID NO: 5126490 - DNA, 25 bp, Homo sapien
tttcagatgagtaaaggaccaggtg

SEQ ID NO: 5126491 - DNA, 25 bp, Homo sapien
tcctcggtttgcaagttgtaaaaga

SEQ ID NO: 5126492 - DNA, 25 bp, Homo sapien
gtaaaagacccatggaatgccaact

SEQ ID NO: 5126493 - DNA, 25 bp, Homo sapien
gaatgccaactatccttgtccatgg

SEQ ID NO: 5126494 - DNA, 25 bp, Homo sapien
tttgcaagttgtaaaagacccatgg

SEQ ID NO: 5126495 - DNA, 25 bp, Homo sapien
aagtgcgtgtccaggtttccccgtg

SEQ ID NO: 5126496 - DNA, 25 bp, Homo sapien
tcttcgtcacaggtacaccagggca

SEQ ID NO: 5126497 - DNA, 25 bp, Homo sapien
agggcatccagcacattgatttgtc

SEQ ID NO: 5126498 - DNA, 25 bp, Homo sapien
ttgatttgtccccactcgccttagc

SEQ ID NO: 5126499 - DNA, 25 bp, Homo sapien
tttgaatatctaacactgagaaacc

SEQ ID NO: 5126500 - DNA, 25 bp, Homo sapien
agaagatttagccatggcctgtagg

SEQ ID NO: 5126501 - DNA, 25 bp, Homo sapien
agatttagccatggcctgtaggctg

SEQ ID NO: 5126502 - DNA, 25 bp, Homo sapien
tagccatggcctgtaggctgctgtg

SEQ ID NO: 5126503 - DNA, 25 bp, Homo sapien
tggagagtgcctcccctcaagactg

SEQ ID NO: 5126504 - DNA, 25 bp, Homo sapien
cctgagtgagctaaatgaaggtgca

SEQ ID NO: 5126505 - DNA, 25 bp, Homo sapien
tttacggaggagagtttcagatcca

SEQ ID NO: 5126506 - DNA, 25 bp, Homo sapien
gggagccagaaataaggtgcatctt

SEQ ID NO: 5126507 - DNA, 25 bp, Homo sapien
gtgattcttccccattaacgagcat

SEQ ID NO: 5126508 - DNA, 25 bp, Homo sapien
cacatctgaattcggattttcagtg

SEQ ID NO: 5126509 - DNA, 25 bp, Homo sapien
tcagtgattcttccccattaacgag

SEQ ID NO: 5126510 - DNA, 25 bp, Homo sapien
aaacacatctgaattcggattttca

SEQ ID NO: 5126511 - DNA, 25 bp, Homo sapien
tgactcttaacggttctaagggcca

SEQ ID NO: 5126512 - DNA, 25 bp, Homo sapien
gggaacaagaactctctgtttcaca

SEQ ID NO: 5126513 - DNA, 25 bp, Homo sapien
aattctgctcttcccaggactagga

SEQ ID NO: 5126514 - DNA, 25 bp, Homo sapien
tattgacagaagttggaagctcctc

SEQ ID NO: 5126515 - DNA, 25 bp, Homo sapien
agggcaactcccatcggcatcaaca

SEQ ID NO: 5126516 - DNA, 25 bp, Homo sapien
tcaacacactcattaagatctgtaa

SEQ ID NO: 5126517 - DNA, 25 bp, Homo sapien
taacacacgtctgcttaagttcagg

SEQ ID NO: 5126518 - DNA, 25 bp, Homo sapien
taagatctgtaacacacgtctgctt

SEQ ID NO: 5126519 - DNA, 25 bp, Homo sapien
tccttaaatgaacaacaggcactgg

SEQ ID NO: 5126520 - DNA, 25 bp, Homo sapien
tgaacaacaggcactggcaactgct

SEQ ID NO: 5126521 - DNA, 25 bp, Homo sapien
ttaatctccttaaatgaacaacagg

SEQ ID NO: 5126522 - DNA, 25 bp, Homo sapien
acaacaggcactggcaactgctttt

SEQ ID NO: 5126523 - DNA, 25 bp, Homo sapien
taatggtacgatccacggagagact

SEQ ID NO: 5126524 - DNA, 25 bp, Homo sapien
gagtacacagcatgggcacatcagc

SEQ ID NO: 5126525 - DNA, 25 bp, Homo sapien
cagaggactcttgtggtaatggtac

SEQ ID NO: 5126526 - DNA, 25 bp, Homo sapien
gctctccagtgggaatacgtggcag

SEQ ID NO: 5126527 - DNA, 25 bp, Homo sapien
gccatctcttactaaatgccgaaga

SEQ ID NO: 5126528 - DNA, 25 bp, Homo sapien
aatgccgaagacgagttccactgcc

SEQ ID NO: 5126529 - DNA, 25 bp, Homo sapien
aaagatccagaagactgcaccgtgg

SEQ ID NO: 5126530 - DNA, 25 bp, Homo sapien
tagcaactagcaggacaaagggttg

SEQ ID NO: 5126531 - DNA, 25 bp, Homo sapien
tatctcctggggtgtaacggtcacc

SEQ ID NO: 5126532 - DNA, 25 bp, Homo sapien
gtatctcctggggtgtaacggtcac

SEQ ID NO: 5126533 - DNA, 25 bp, Homo sapien
agtccgtatctcctggggtgtaacg

SEQ ID NO: 5126534 - DNA, 25 bp, Homo sapien
tcattgagtccgtatctcctggggt

SEQ ID NO: 5126535 - DNA, 25 bp, Homo sapien
cactgcacataaactcgggactggt

SEQ ID NO: 5126536 - DNA, 25 bp, Homo sapien
tgtcgacgaattccccacacaagac

SEQ ID NO: 5126537 - DNA, 25 bp, Homo sapien
tctcctactgctgaccacactgctc

SEQ ID NO: 5126538 - DNA, 25 bp, Homo sapien
ggactggtggtgtcgacgaattccc

SEQ ID NO: 5126539 - DNA, 25 bp, Homo sapien
ctccaaacacctgcaatgagagtgt

SEQ ID NO: 5126540 - DNA, 25 bp, Homo sapien
gggtcaaggagagcgcacaagcctg

SEQ ID NO: 5126541 - DNA, 25 bp, Homo sapien
cacatctgtatagggagctccaggc

SEQ ID NO: 5126542 - DNA, 25 bp, Homo sapien
gcacacgcacaaaaggtggggtcaa

SEQ ID NO: 5126543 - DNA, 25 bp, Homo sapien
tggcacaaccagcagcagagtccat

SEQ ID NO: 5126544 - DNA, 25 bp, Homo sapien
tgaggagatggcacaaccagcagca

SEQ ID NO: 5126545 - DNA, 25 bp, Homo sapien
cttgaggagatggcacaaccagcag

SEQ ID NO: 5126546 - DNA, 25 bp, Homo sapien
gatggcacaaccagcagcagagtcc

SEQ ID NO: 5126547 - DNA, 25 bp, Homo sapien
ccagctatacgtcagcttccaaggg

SEQ ID NO: 5126548 - DNA, 25 bp, Homo sapien
ggtaccagctatacgtcagcttcca

SEQ ID NO: 5126549 - DNA, 25 bp, Homo sapien
ctggaaggtaccagctatacgtcag

SEQ ID NO: 5126550 - DNA, 25 bp, Homo sapien
gaaggtaccagctatacgtcagctt

SEQ ID NO: 5126551 - DNA, 25 bp, Homo sapien
tgggaacaaggacaggaaaatgcac

SEQ ID NO: 5126552 - DNA, 25 bp, Homo sapien
tgggggactcggagcctggagcaga

SEQ ID NO: 5126553 - DNA, 25 bp, Homo sapien
gagcaggtcacctgagttcaagcta

SEQ ID NO: 5126554 - DNA, 25 bp, Homo sapien
tgagttcaagctatgcaggggtgtt

SEQ ID NO: 5126555 - DNA, 25 bp, Homo sapien
ttgccttcatccaatgtttcatgca

SEQ ID NO: 5126556 - DNA, 25 bp, Homo sapien
tcaaggcactcactgtctgagccca

SEQ ID NO: 5126557 - DNA, 25 bp, Homo sapien
aacaagtagtggaggacatcctgca

SEQ ID NO: 5126558 - DNA, 25 bp, Homo sapien
ttcatgcatttgactaacaagtagt

SEQ ID NO: 5126559 - DNA, 25 bp, Homo sapien
gggcaggaaacttgaccattctctt

SEQ ID NO: 5126560 - DNA, 25 bp, Homo sapien
ggcaggaaacttgaccattctcttc

SEQ ID NO: 5126561 - DNA, 25 bp, Homo sapien
ataacaatgcccaacacactgtgta

SEQ ID NO: 5126562 - DNA, 25 bp, Homo sapien
caatgcccaacacactgtgtaaaca

SEQ ID NO: 5126563 - DNA, 25 bp, Homo sapien
ggacccaagaagaggtggctctcca

SEQ ID NO: 5126564 - DNA, 25 bp, Homo sapien
gctgacaactccgagattcatggca

SEQ ID NO: 5126565 - DNA, 25 bp, Homo sapien
gaatgctgacaactccgagattcat

SEQ ID NO: 5126566 - DNA, 25 bp, Homo sapien
caactccgagattcatggcagctgt

SEQ ID NO: 5126567 - DNA, 25 bp, Homo sapien
tgctgtgaatgctgacaactccgag

SEQ ID NO: 5126568 - DNA, 25 bp, Homo sapien
ctaaacctgttacttcagaactcat

SEQ ID NO: 5126569 - DNA, 25 bp, Homo sapien
tctaaacctgttacttcagaactca

SEQ ID NO: 5126570 - DNA, 25 bp, Homo sapien
ttctaaacctgttacttcagaactc

SEQ ID NO: 5126571 - DNA, 25 bp, Homo sapien
ctgggagccagagtagcaggaggaa

SEQ ID NO: 5126572 - DNA, 25 bp, Homo sapien
aagagaagctgtgctggggcttcca

SEQ ID NO: 5126573 - DNA, 25 bp, Homo sapien
gaagagaagctgtgctggggcttcc

SEQ ID NO: 5126574 - DNA, 25 bp, Homo sapien
gagccagagtagcaggaggaagaga

SEQ ID NO: 5126575 - DNA, 25 bp, Homo sapien
ctgagattggaaataaaacagaaat

SEQ ID NO: 5126576 - DNA, 25 bp, Homo sapien
taaaacagaaatgcactcatgtaat

SEQ ID NO: 5126577 - DNA, 25 bp, Homo sapien
aataaaacagaaatgcactcatgta

SEQ ID NO: 5126578 - DNA, 25 bp, Homo sapien
gaaataaaacagaaatgcactcatg

SEQ ID NO: 5126579 - DNA, 25 bp, Homo sapien
tgtgtcattacaatttctccggtgg

SEQ ID NO: 5126580 - DNA, 25 bp, Homo sapien
ctgtgtcattacaatttctccggtg

SEQ ID NO: 5126581 - DNA, 25 bp, Homo sapien
gtcattacaatttctccggtggtat

SEQ ID NO: 5126582 - DNA, 25 bp, Homo sapien
gtgtcattacaatttctccggtggt

SEQ ID NO: 5126583 - DNA, 25 bp, Homo sapien
ggagacaaagacagggtggctggag

SEQ ID NO: 5126584 - DNA, 25 bp, Homo sapien
ctggagacaaagacagggtggctgg

SEQ ID NO: 5126585 - DNA, 25 bp, Homo sapien
tggagacaaagacagggtggctgga

SEQ ID NO: 5126586 - DNA, 25 bp, Homo sapien
gagacaaagacagggtggctggaga

SEQ ID NO: 5126587 - DNA, 25 bp, Homo sapien
tggtggatgcaccatagatgaggag

SEQ ID NO: 5126588 - DNA, 25 bp, Homo sapien
ggtggatgcaccatagatgaggagc

SEQ ID NO: 5126589 - DNA, 25 bp, Homo sapien
gctgctgctaacactctgactggcc

SEQ ID NO: 5126590 - DNA, 25 bp, Homo sapien
gtaagttataatcctgctgacagta

SEQ ID NO: 5126591 - DNA, 25 bp, Homo sapien
taaacactgatggtcttgttgaggt

SEQ ID NO: 5126592 - DNA, 25 bp, Homo sapien
aagcagctggtaaaatctagtaaac

SEQ ID NO: 5126593 - DNA, 25 bp, Homo sapien
tcatgttgaatcactgtgggaggta

SEQ ID NO: 5126594 - DNA, 25 bp, Homo sapien
gcgtgtgaacgcgtcacactcttgt

SEQ ID NO: 5126595 - DNA, 25 bp, Homo sapien
gaacgcgtcacactcttgtgtgaat

SEQ ID NO: 5126596 - DNA, 25 bp, Homo sapien
tgtgcgtgcgtgtgaacgcgtcaca

SEQ ID NO: 5126597 - DNA, 25 bp, Homo sapien
gtcacactcttgtgtgaatgcgtca

SEQ ID NO: 5126598 - DNA, 25 bp, Homo sapien
ggtgccaattcctgttccggacgcc

SEQ ID NO: 5126599 - DNA, 25 bp, Homo sapien
caggcccaggaaccaggaaccacgg

SEQ ID NO: 5126600 - DNA, 25 bp, Homo sapien
agacccacagtacacaggcccagga

SEQ ID NO: 5126601 - DNA, 25 bp, Homo sapien
cagcctctgaggcacagacccacag

SEQ ID NO: 5126602 - DNA, 25 bp, Homo sapien
tcaacttgtcatgccggccactggg

SEQ ID NO: 5126603 - DNA, 25 bp, Homo sapien
cacaggaaccattgggcccactggg

SEQ ID NO: 5126604 - DNA, 25 bp, Homo sapien
gtgctggagacaccacagcacccag

SEQ ID NO: 5126605 - DNA, 25 bp, Homo sapien
ccaagctgggcaggaactggggtct

SEQ ID NO: 5126606 - DNA, 25 bp, Homo sapien
catttcaactcatctcatttcaatt

SEQ ID NO: 5126607 - DNA, 25 bp, Homo sapien
tctcatgatttcatttcatcattac

SEQ ID NO: 5126608 - DNA, 25 bp, Homo sapien
ttcatctcatctcatgatttcattt

SEQ ID NO: 5126609 - DNA, 25 bp, Homo sapien
tttcaactcatctcatttcaatttc

SEQ ID NO: 5126610 - DNA, 25 bp, Homo sapien
catcatttcttctcatctcatcatt

SEQ ID NO: 5126611 - DNA, 25 bp, Homo sapien
ctcatcatttcttctcatctcatca

SEQ ID NO: 5126612 - DNA, 25 bp, Homo sapien
tcatttcttctcatctcatcatttc

SEQ ID NO: 5126613 - DNA, 25 bp, Homo sapien
tcatcatttcttctcatctcatcat

SEQ ID NO: 5126614 - DNA, 25 bp, Homo sapien
catttcatctcgtatcttctcagct

SEQ ID NO: 5126615 - DNA, 25 bp, Homo sapien
ttcatctcgtatcttctcagctcat

SEQ ID NO: 5126616 - DNA, 25 bp, Homo sapien
atgtcatttcacctcatcatatttc

SEQ ID NO: 5126617 - DNA, 25 bp, Homo sapien
gtcatttcacctcatcatatttcat

SEQ ID NO: 5126618 - DNA, 25 bp, Homo sapien
ctcatcatttccatttcattatttc

SEQ ID NO: 5126619 - DNA, 25 bp, Homo sapien
atttccatttcattatttcatttca

SEQ ID NO: 5126620 - DNA, 25 bp, Homo sapien
ttccatttcattatttcatttcatc

SEQ ID NO: 5126621 - DNA, 25 bp, Homo sapien
ccatttcattatttcatttcatcat

SEQ ID NO: 5126622 - DNA, 25 bp, Homo sapien
cgtctaatttcatttcatctcattt

SEQ ID NO: 5126623 - DNA, 25 bp, Homo sapien
tcatttcatctcatttcatctcatc

SEQ ID NO: 5126624 - DNA, 25 bp, Homo sapien
gtctaatttcatttcatctcatttc

SEQ ID NO: 5126625 - DNA, 25 bp, Homo sapien
atttcatttcatctcatttcatctc

SEQ ID NO: 5126626 - DNA, 25 bp, Homo sapien
acatttcatctcattttatgtcatc

SEQ ID NO: 5126627 - DNA, 25 bp, Homo sapien
tcattttatgtcatcatttcatgtc

SEQ ID NO: 5126628 - DNA, 25 bp, Homo sapien
catctcatttcaactcattgcatct

SEQ ID NO: 5126629 - DNA, 25 bp, Homo sapien
tttcatctcatttcaactcattgca

SEQ ID NO: 5126630 - DNA, 25 bp, Homo sapien
ctcatcacatctcatcattttatca

SEQ ID NO: 5126631 - DNA, 25 bp, Homo sapien
tcattatttcatgtcatctcatctc

SEQ ID NO: 5126632 - DNA, 25 bp, Homo sapien
tcttctcagctcatttcaatttcat

SEQ ID NO: 5126633 - DNA, 25 bp, Homo sapien
atcattttatttcatcatctcatca

SEQ ID NO: 5126634 - DNA, 25 bp, Homo sapien
gtgagaacacgtagttatgtggtgt

SEQ ID NO: 5126635 - DNA, 25 bp, Homo sapien
taaccaaaactctactatctacttc

SEQ ID NO: 5126636 - DNA, 25 bp, Homo sapien
caggatatggtaaccaaaactctac

SEQ ID NO: 5126637 - DNA, 25 bp, Homo sapien
gatatggtaaccaaaactctactat

SEQ ID NO: 5126638 - DNA, 25 bp, Homo sapien
ggatgctaagtccaaaagacataaa

SEQ ID NO: 5126639 - DNA, 25 bp, Homo sapien
ctggatgctaagtccaaaagacata

SEQ ID NO: 5126640 - DNA, 25 bp, Homo sapien
tactggatgctaagtccaaaagaca

SEQ ID NO: 5126641 - DNA, 25 bp, Homo sapien
tggatgctaagtccaaaagacataa

SEQ ID NO: 5126642 - DNA, 25 bp, Homo sapien
ggctaataatgtatacttcgctggc

SEQ ID NO: 5126643 - DNA, 25 bp, Homo sapien
taatgtatacttcgctggcttttga

SEQ ID NO: 5126644 - DNA, 25 bp, Homo sapien
acaggctaataatgtatacttcgct

SEQ ID NO: 5126645 - DNA, 25 bp, Homo sapien
gtatacttcgctggcttttgaatgc

SEQ ID NO: 5126646 - DNA, 25 bp, Homo sapien
caccgtgcacttctccctttcctta

SEQ ID NO: 5126647 - DNA, 25 bp, Homo sapien
cgtgcacttctccctttccttaaag

SEQ ID NO: 5126648 - DNA, 25 bp, Homo sapien
tcacaccgtgcacttctccctttcc

SEQ ID NO: 5126649 - DNA, 25 bp, Homo sapien
acaccgtgcacttctccctttcctt

SEQ ID NO: 5126650 - DNA, 25 bp, Homo sapien
gggttgcttggatggcttaagtggc

SEQ ID NO: 5126651 - DNA, 25 bp, Homo sapien
ggttgcttggatggcttaagtggct

SEQ ID NO: 5126652 - DNA, 25 bp, Homo sapien
gttgcttggatggcttaagtggctg

SEQ ID NO: 5126653 - DNA, 25 bp, Homo sapien
ctgggttgcttggatggcttaagtg

SEQ ID NO: 5126654 - DNA, 25 bp, Homo sapien
tctgggctggctggcttggctctct

SEQ ID NO: 5126655 - DNA, 25 bp, Homo sapien
tgtctgggctggctggcttggctct

SEQ ID NO: 5126656 - DNA, 25 bp, Homo sapien
tgggctggctggcttggctctctgg

SEQ ID NO: 5126657 - DNA, 25 bp, Homo sapien
ctgtctgggctggctggcttggctc

SEQ ID NO: 5126658 - DNA, 25 bp, Homo sapien
gagtggcttggccagcttggctggc

SEQ ID NO: 5126659 - DNA, 25 bp, Homo sapien
tggctggttggcttgactggcttgg

SEQ ID NO: 5126660 - DNA, 25 bp, Homo sapien
tggcttgactggcttggctggctgg

SEQ ID NO: 5126661 - DNA, 25 bp, Homo sapien
ggttggcttgactggcttggctggc

SEQ ID NO: 5126662 - DNA, 25 bp, Homo sapien
tggctggctggttggctggcttggc

SEQ ID NO: 5126663 - DNA, 25 bp, Homo sapien
ggctggctggttggctggcttggct

SEQ ID NO: 5126664 - DNA, 25 bp, Homo sapien
tggctggttggctggcttggctagc

SEQ ID NO: 5126665 - DNA, 25 bp, Homo sapien
ctggctggttggctggcttggctag

SEQ ID NO: 5126666 - DNA, 25 bp, Homo sapien
gctggcttggctggcttggctggct

SEQ ID NO: 5126667 - DNA, 25 bp, Homo sapien
tggcttggctggcttggctggctgg

SEQ ID NO: 5126668 - DNA, 25 bp, Homo sapien
tggctggcttggctggcttggctgg

SEQ ID NO: 5126669 - DNA, 25 bp, Homo sapien
gctggctggcttggctggcttggct

SEQ ID NO: 5126670 - DNA, 25 bp, Homo sapien
ggtttgagtaactgaggagtgccac

SEQ ID NO: 5126671 - DNA, 25 bp, Homo sapien
catcttaatttggacgtgcctatca

SEQ ID NO: 5126672 - DNA, 25 bp, Homo sapien
gacctgtttgagtaatgttttggag

SEQ ID NO: 5126673 - DNA, 25 bp, Homo sapien
gagatgaatcaagcataatccttcg

SEQ ID NO: 5126674 - DNA, 25 bp, Homo sapien
gggagtcacattgatttcactcatg

SEQ ID NO: 5126675 - DNA, 25 bp, Homo sapien
aatggtgcagcatccgtgggttcaa

SEQ ID NO: 5126676 - DNA, 25 bp, Homo sapien
aatattcttgttaatgggagtcaca

SEQ ID NO: 5126677 - DNA, 25 bp, Homo sapien
acagattgcattttgggcttaattc

SEQ ID NO: 5126678 - DNA, 25 bp, Homo sapien
ctggaggacacaagactgttagagg

SEQ ID NO: 5126679 - DNA, 25 bp, Homo sapien
cattctgaggctttagacacagcca

SEQ ID NO: 5126680 - DNA, 25 bp, Homo sapien
agccagggtcccgaaagagcaattt

SEQ ID NO: 5126681 - DNA, 25 bp, Homo sapien
tggcactgttataggagccttctgg

SEQ ID NO: 5126682 - DNA, 25 bp, Homo sapien
tagaagtggtttcttccacagtggc

SEQ ID NO: 5126683 - DNA, 25 bp, Homo sapien
tctcccgacattctcttcatacttg

SEQ ID NO: 5126684 - DNA, 25 bp, Homo sapien
agccttcattctcattggaacgaga

SEQ ID NO: 5126685 - DNA, 25 bp, Homo sapien
tcattggaacgagatgactcatgct

SEQ ID NO: 5126686 - DNA, 25 bp, Homo sapien
tgagctggactggtccggttcccag

SEQ ID NO: 5126687 - DNA, 25 bp, Homo sapien
caccgcttgtctggaatgtcaattt

SEQ ID NO: 5126688 - DNA, 25 bp, Homo sapien
cacgggctcaggcaccgcttgtctg

SEQ ID NO: 5126689 - DNA, 25 bp, Homo sapien
caggcaccgcttgtctggaatgtca

SEQ ID NO: 5126690 - DNA, 25 bp, Homo sapien
cgggctcaggcaccgcttgtctgga

SEQ ID NO: 5126691 - DNA, 25 bp, Homo sapien
agactccaaggcaaactgcagaagc

SEQ ID NO: 5126692 - DNA, 25 bp, Homo sapien
cagactccaaggcaaactgcagaag

SEQ ID NO: 5126693 - DNA, 25 bp, Homo sapien
gcccagactccaaggcaaactgcag

SEQ ID NO: 5126694 - DNA, 25 bp, Homo sapien
acagcccagactccaaggcaaactg

SEQ ID NO: 5126695 - DNA, 25 bp, Homo sapien
ggtgcaaccggcatctacattctta

SEQ ID NO: 5126696 - DNA, 25 bp, Homo sapien
tccaagacaacagaaggtgcaaccg

SEQ ID NO: 5126697 - DNA, 25 bp, Homo sapien
gagcagcttattttccagccaagca

SEQ ID NO: 5126698 - DNA, 25 bp, Homo sapien
tctcagaggagtcccgagcagctta

SEQ ID NO: 5126699 - DNA, 25 bp, Homo sapien
taacttgccaacatagggacgagct

SEQ ID NO: 5126700 - DNA, 25 bp, Homo sapien
cacaggcttgttcctcatgggtagg

SEQ ID NO: 5126701 - DNA, 25 bp, Homo sapien
tctatattcagggatgcctgcggcc

SEQ ID NO: 5126702 - DNA, 25 bp, Homo sapien
ttttacagtgaggaaggcgggacac

SEQ ID NO: 5126703 - DNA, 25 bp, Homo sapien
gattctcctgtcctgagtgagtgca

SEQ ID NO: 5126704 - DNA, 25 bp, Homo sapien
tctcctgtcctgagtgagtgcaagg

SEQ ID NO: 5126705 - DNA, 25 bp, Homo sapien
ccctgtcgccgatgtgttctttgaa

SEQ ID NO: 5126706 - DNA, 25 bp, Homo sapien
gtgcaaggggctcccctgtcgccga

SEQ ID NO: 5126707 - DNA, 25 bp, Homo sapien
tctgatctattgtcggcttttcctt

SEQ ID NO: 5126708 - DNA, 25 bp, Homo sapien
taatccgaaggaatcctctgacacc

SEQ ID NO: 5126709 - DNA, 25 bp, Homo sapien
cagaaccaaacggaacctatagaga

SEQ ID NO: 5126710 - DNA, 25 bp, Homo sapien
gagcgctcaacttccttctgatcta

SEQ ID NO: 5126711 - DNA, 25 bp, Homo sapien
tcccactaagaacagaccatttgct

SEQ ID NO: 5126712 - DNA, 25 bp, Homo sapien
gtgtctatgctaaggagaaggttgt

SEQ ID NO: 5126713 - DNA, 25 bp, Homo sapien
tcgttcccctgaaagcaagttgcct

SEQ ID NO: 5126714 - DNA, 25 bp, Homo sapien
tcaaaatccaccagactcctcagga

SEQ ID NO: 5126715 - DNA, 25 bp, Homo sapien
ctctctcggcttctggtggtgtagc

SEQ ID NO: 5126716 - DNA, 25 bp, Homo sapien
tctggtggtgtagctgtttaagtcc

SEQ ID NO: 5126717 - DNA, 25 bp, Homo sapien
cggcttctggtggtgtagctgttta

SEQ ID NO: 5126718 - DNA, 25 bp, Homo sapien
tagctgtttaagtccagtcttcaca

SEQ ID NO: 5126719 - DNA, 25 bp, Homo sapien
tcacagtgcccaccgggccaggcta

SEQ ID NO: 5126720 - DNA, 25 bp, Homo sapien
agatcacagtgcccaccgggccagg

SEQ ID NO: 5126721 - DNA, 25 bp, Homo sapien
tgagatcacagtgcccaccgggcca

SEQ ID NO: 5126722 - DNA, 25 bp, Homo sapien
atcacagtgcccaccgggccaggct

SEQ ID NO: 5126723 - DNA, 25 bp, Homo sapien
caggacgcacgctggattagcatct

SEQ ID NO: 5126724 - DNA, 25 bp, Homo sapien
cacaccaagctggacctgggacttg

SEQ ID NO: 5126725 - DNA, 25 bp, Homo sapien
ctgctcatccattagcagcagatgt

SEQ ID NO: 5126726 - DNA, 25 bp, Homo sapien
cctgcgtccaggttgactgctcatc

SEQ ID NO: 5126727 - DNA, 25 bp, Homo sapien
tggctggagcctgatctgtacaatc

SEQ ID NO: 5126728 - DNA, 25 bp, Homo sapien
tcccaggtagggtgcttctttacat

SEQ ID NO: 5126729 - DNA, 25 bp, Homo sapien
gagcctaaggtcctcacagtgatag

SEQ ID NO: 5126730 - DNA, 25 bp, Homo sapien
tccagaacttgtttgggagctgtgg

SEQ ID NO: 5126731 - DNA, 25 bp, Homo sapien
attacgaacaactgacccacaggtc

SEQ ID NO: 5126732 - DNA, 25 bp, Homo sapien
cagtgctccctttacaggcatcacc

SEQ ID NO: 5126733 - DNA, 25 bp, Homo sapien
agtgctccctttacaggcatcacca

SEQ ID NO: 5126734 - DNA, 25 bp, Homo sapien
tgctccctttacaggcatcaccaca

SEQ ID NO: 5126735 - DNA, 25 bp, Homo sapien
aaaacgatcttgccgacaccttcct

SEQ ID NO: 5126736 - DNA, 25 bp, Homo sapien
cgatcttgccgacaccttccttttg

SEQ ID NO: 5126737 - DNA, 25 bp, Homo sapien
cagaaaaaaacgatcttgccgacac

SEQ ID NO: 5126738 - DNA, 25 bp, Homo sapien
gctctcagaaaaaaacgatcttgcc

SEQ ID NO: 5126739 - DNA, 25 bp, Homo sapien
cgagggatgcagacggaggttggaa

SEQ ID NO: 5126740 - DNA, 25 bp, Homo sapien
gatggttgctgggtcctccgtaact

SEQ ID NO: 5126741 - DNA, 25 bp, Homo sapien
ggtcctccgtaactttgggcatgag

SEQ ID NO: 5126742 - DNA, 25 bp, Homo sapien
caatgaagaccaaatgttcaagcca

SEQ ID NO: 5126743 - DNA, 25 bp, Homo sapien
aaaggaggtagacagattgaaccat

SEQ ID NO: 5126744 - DNA, 25 bp, Homo sapien
tgtgaggtggtcaaaggaaccctgg

SEQ ID NO: 5126745 - DNA, 25 bp, Homo sapien
tgggccttggaatatcttggtggaa

SEQ ID NO: 5126746 - DNA, 25 bp, Homo sapien
tcaggtctacagttttagcaggaca

SEQ ID NO: 5126747 - DNA, 25 bp, Homo sapien
ccaacagctcagtcaataaaaacag

SEQ ID NO: 5126748 - DNA, 25 bp, Homo sapien
agttcttggttcaggactcttctaa

SEQ ID NO: 5126749 - DNA, 25 bp, Homo sapien
cagtgtggatatatctgctgggttc

SEQ ID NO: 5126750 - DNA, 25 bp, Homo sapien
gactgcagaaaagcccttgccctta

SEQ ID NO: 5126751 - DNA, 25 bp, Homo sapien
caattcagcccttaacaagtcccaa

SEQ ID NO: 5126752 - DNA, 25 bp, Homo sapien
aacaagtcccaatatgatgccaggg

SEQ ID NO: 5126753 - DNA, 25 bp, Homo sapien
gaattagaggccacccatatgacct

SEQ ID NO: 5126754 - DNA, 25 bp, Homo sapien
gtcatattgaattagaggccaccca

SEQ ID NO: 5126755 - DNA, 25 bp, Homo sapien
tggttatcactagccacagtcaagc

SEQ ID NO: 5126756 - DNA, 25 bp, Homo sapien
cctgaaacactgcttaagccatggg

SEQ ID NO: 5126757 - DNA, 25 bp, Homo sapien
catgggattttcctgctcgaggacc

SEQ ID NO: 5126758 - DNA, 25 bp, Homo sapien
tactggctccaacacagagttgaca

SEQ ID NO: 5126759 - DNA, 25 bp, Homo sapien
caagcagatcagggcctccatgggc

SEQ ID NO: 5126760 - DNA, 25 bp, Homo sapien
ttcctggtccatcagaggtcctcac

SEQ ID NO: 5126761 - DNA, 25 bp, Homo sapien
caccagctcgttcactctcatttta

SEQ ID NO: 5126762 - DNA, 25 bp, Homo sapien
aagggagctactctctgtccaagca

SEQ ID NO: 5126763 - DNA, 25 bp, Homo sapien
tgatattaccccaggctgtcaaggc

SEQ ID NO: 5126764 - DNA, 25 bp, Homo sapien
tgtagacgactcctccttcatatag

SEQ ID NO: 5126765 - DNA, 25 bp, Homo sapien
gactaagtaatgacaagagatggca

SEQ ID NO: 5126766 - DNA, 25 bp, Homo sapien
tgagagatcctactcccagtgatat

SEQ ID NO: 5126767 - DNA, 25 bp, Homo sapien
cagtcctttatccactgtgattggc

SEQ ID NO: 5126768 - DNA, 25 bp, Homo sapien
acctcggctggtccaatcagggcga

SEQ ID NO: 5126769 - DNA, 25 bp, Homo sapien
cataccttttacaggaatgctgtga

SEQ ID NO: 5126770 - DNA, 25 bp, Homo sapien
tcatgtgtaggcatgtgacctcggc

SEQ ID NO: 5126771 - DNA, 25 bp, Homo sapien
cttccagcgaagtcatgaggtcatt

SEQ ID NO: 5126772 - DNA, 25 bp, Homo sapien
tgtggtgtagcccataaagccttgc

SEQ ID NO: 5126773 - DNA, 25 bp, Homo sapien
cagtcccgggttgtagctaattaag

SEQ ID NO: 5126774 - DNA, 25 bp, Homo sapien
acttgtgaatcaaagggctgggcct

SEQ ID NO: 5126775 - DNA, 25 bp, Homo sapien
tggcctaaatgctggtaaaatgacc

SEQ ID NO: 5126776 - DNA, 25 bp, Homo sapien
aatatgctgatgaggttcagcgcgc

SEQ ID NO: 5126777 - DNA, 25 bp, Homo sapien
tccaaacccgcttgcatcgtagaat

SEQ ID NO: 5126778 - DNA, 25 bp, Homo sapien
gaaagcaagatcaacactggcctaa

SEQ ID NO: 5126779 - DNA, 25 bp, Homo sapien
taagttatgggcaagccaatataaa

SEQ ID NO: 5126780 - DNA, 25 bp, Homo sapien
tggagataaaaatcgctgacccaga

SEQ ID NO: 5126781 - DNA, 25 bp, Homo sapien
tacagtatgagcaaatatggagata

SEQ ID NO: 5126782 - DNA, 25 bp, Homo sapien
taccagtttgtaagtatatcagcaa

SEQ ID NO: 5126783 - DNA, 25 bp, Homo sapien
taaatggcactaaaacagagtggcc

SEQ ID NO: 5126784 - DNA, 25 bp, Homo sapien
ttgcatccagcgagaagcatcaggg

SEQ ID NO: 5126785 - DNA, 25 bp, Homo sapien
tcctgtcctgatacatgtaaatggc

SEQ ID NO: 5126786 - DNA, 25 bp, Homo sapien
cctcagcatgacaaggattgaacaa

SEQ ID NO: 5126787 - DNA, 25 bp, Homo sapien
ggtattaagtacactcactgtggtg

SEQ ID NO: 5126788 - DNA, 25 bp, Homo sapien
tctgtaaaacgagagctctggactc

SEQ ID NO: 5126789 - DNA, 25 bp, Homo sapien
gaaagcatatattctttgagcctcc

SEQ ID NO: 5126790 - DNA, 25 bp, Homo sapien
gccgtctgggttccagtcattaaga

SEQ ID NO: 5126791 - DNA, 25 bp, Homo sapien
tatttcaggcttcacgttgggatcg

SEQ ID NO: 5126792 - DNA, 25 bp, Homo sapien
aaaagtagccacagcagtagcctgg

SEQ ID NO: 5126793 - DNA, 25 bp, Homo sapien
taggtgtccccagctgaacgtgtgt

SEQ ID NO: 5126794 - DNA, 25 bp, Homo sapien
tttagaaagcgaaaggcgaactggc

SEQ ID NO: 5126795 - DNA, 25 bp, Homo sapien
tgcgggactgtaagcacaaaactga

SEQ ID NO: 5126796 - DNA, 25 bp, Homo sapien
cccaaaccggagtgcagtggagcga

SEQ ID NO: 5126797 - DNA, 25 bp, Homo sapien
gcccaaaccggagtgcagtggagcg

SEQ ID NO: 5126798 - DNA, 25 bp, Homo sapien
atgatccgcccaccttggcctccca

SEQ ID NO: 5126799 - DNA, 25 bp, Homo sapien
cttgaacccctgagctcatgatccg

SEQ ID NO: 5126800 - DNA, 25 bp, Homo sapien
ccccaggtcgtggtagctttccatt

SEQ ID NO: 5126801 - DNA, 25 bp, Homo sapien
tcctttacacgccaccaacaggacg

SEQ ID NO: 5126802 - DNA, 25 bp, Homo sapien
caggtcgtggtagctttccattcct

SEQ ID NO: 5126803 - DNA, 25 bp, Homo sapien
ccaccaacaggacgcctatcgccca

SEQ ID NO: 5126804 - DNA, 25 bp, Homo sapien
ctaggatggggccatagtgtcccca

SEQ ID NO: 5126805 - DNA, 25 bp, Homo sapien
taggatggggccatagtgtccccag

SEQ ID NO: 5126806 - DNA, 25 bp, Homo sapien
ggctaggatggggccatagtgtccc

SEQ ID NO: 5126807 - DNA, 25 bp, Homo sapien
caccaggctaggatggggccatagt

SEQ ID NO: 5126808 - DNA, 25 bp, Homo sapien
gcctttcacactgatgtagacacga

SEQ ID NO: 5126809 - DNA, 25 bp, Homo sapien
cacactgatgtagacacgaataaaa

SEQ ID NO: 5126810 - DNA, 25 bp, Homo sapien
ccaggatgaagcctttcacactgat

SEQ ID NO: 5126811 - DNA, 25 bp, Homo sapien
tgtagacacgaataaaaatcttttc

SEQ ID NO: 5126812 - DNA, 25 bp, Homo sapien
tccccaacccttttatgtgctttca

SEQ ID NO: 5126813 - DNA, 25 bp, Homo sapien
accaccccagctaaagagaagtcca

SEQ ID NO: 5126814 - DNA, 25 bp, Homo sapien
ctggccactgctggttgcagggact

SEQ ID NO: 5126815 - DNA, 25 bp, Homo sapien
agagatgagcaagcagggccctctc

SEQ ID NO: 5126816 - DNA, 25 bp, Homo sapien
agcccaatcggcaaattgtggccaa

SEQ ID NO: 5126817 - DNA, 25 bp, Homo sapien
ttttgtcatggtttgagcagacatt

SEQ ID NO: 5126818 - DNA, 25 bp, Homo sapien
tggtttgagcagacattttgttccc

SEQ ID NO: 5126819 - DNA, 25 bp, Homo sapien
cttttgttatcagcccaatcggcaa

SEQ ID NO: 5126820 - DNA, 25 bp, Homo sapien
caggtgctgatcacgagcaacaaca

SEQ ID NO: 5126821 - DNA, 25 bp, Homo sapien
tgctgatcacgagcaacaacagagc

SEQ ID NO: 5126822 - DNA, 25 bp, Homo sapien
gccaggtgctgatcacgagcaacaa

SEQ ID NO: 5126823 - DNA, 25 bp, Homo sapien
tgatcacgagcaacaacagagcaag

SEQ ID NO: 5126824 - DNA, 25 bp, Homo sapien
ttaaaacctagaccgcacactcagg

SEQ ID NO: 5126825 - DNA, 25 bp, Homo sapien
gttaccaagcatgtaccacaggcca

SEQ ID NO: 5126826 - DNA, 25 bp, Homo sapien
aatcagactcgtgtgctgctagagc

SEQ ID NO: 5126827 - DNA, 25 bp, Homo sapien
caataccctcgtcagcagagtgtga

SEQ ID NO: 5126828 - DNA, 25 bp, Homo sapien
gacagtcgctctagtacatggaaac

SEQ ID NO: 5126829 - DNA, 25 bp, Homo sapien
gaaagcagtttttccaggagcgagc

SEQ ID NO: 5126830 - DNA, 25 bp, Homo sapien
cacttccatgggagggaggtcaaat

SEQ ID NO: 5126831 - DNA, 25 bp, Homo sapien
tggctctacccatgaccgtgcaaag

SEQ ID NO: 5126832 - DNA, 25 bp, Homo sapien
gtgtgtcatagagcttcctgtttca

SEQ ID NO: 5126833 - DNA, 25 bp, Homo sapien
ttcgatcaagtgtgtcatagagctt

SEQ ID NO: 5126834 - DNA, 25 bp, Homo sapien
aagtgtgtcatagagcttcctgttt

SEQ ID NO: 5126835 - DNA, 25 bp, Homo sapien
attcgatcaagtgtgtcatagagct

SEQ ID NO: 5126836 - DNA, 25 bp, Homo sapien
aaccaggccccagggaatctttcag

SEQ ID NO: 5126837 - DNA, 25 bp, Homo sapien
gatcggcgggcaacaggtagaggtg

SEQ ID NO: 5126838 - DNA, 25 bp, Homo sapien
aggccccagggaatctttcagctgc

SEQ ID NO: 5126839 - DNA, 25 bp, Homo sapien
tttcagctgcattccggctgtgatc

SEQ ID NO: 5126840 - DNA, 25 bp, Homo sapien
ttaatgaaggacaagggattaagac

SEQ ID NO: 5126841 - DNA, 25 bp, Homo sapien
aatgaaggacaagggattaagacac

SEQ ID NO: 5126842 - DNA, 25 bp, Homo sapien
caaatgggaaaccgaccagaccagc

SEQ ID NO: 5126843 - DNA, 25 bp, Homo sapien
accagaccagcccatgaccaaaata

SEQ ID NO: 5126844 - DNA, 25 bp, Homo sapien
gctcactgctcgaagctaaccatgt

SEQ ID NO: 5126845 - DNA, 25 bp, Homo sapien
tgggcgcaagtcaacctctgctttg

SEQ ID NO: 5126846 - DNA, 25 bp, Homo sapien
ggacttctggaatgcaacctgggcg

SEQ ID NO: 5126847 - DNA, 25 bp, Homo sapien
gaactcgcagaaaggctgctcccaa

SEQ ID NO: 5126848 - DNA, 25 bp, Homo sapien
tgtgtccactctctgccgtgcctgt

SEQ ID NO: 5126849 - DNA, 25 bp, Homo sapien
ggacgatagcagagttcccactgga

SEQ ID NO: 5126850 - DNA, 25 bp, Homo sapien
tccatggtgacgtatgtacaagtgt

SEQ ID NO: 5126851 - DNA, 25 bp, Homo sapien
gaggaccaaacatgcatccagccct

SEQ ID NO: 5126852 - DNA, 25 bp, Homo sapien
tgtgggagttggagcgtctgcttcc

SEQ ID NO: 5126853 - DNA, 25 bp, Homo sapien
aaataggtatgggagcaggtcacaa

SEQ ID NO: 5126854 - DNA, 25 bp, Homo sapien
acaagctaggacagtgcctcgacct

SEQ ID NO: 5126855 - DNA, 25 bp, Homo sapien
ttccaccctgagaaaataggtatgg

SEQ ID NO: 5126856 - DNA, 25 bp, Homo sapien
gctatacttcctacaggctttgggt

SEQ ID NO: 5126857 - DNA, 25 bp, Homo sapien
aactgcagggtattgggtgaggcct

SEQ ID NO: 5126858 - DNA, 25 bp, Homo sapien
tatacttcctacaggctttgggtct

SEQ ID NO: 5126859 - DNA, 25 bp, Homo sapien
ctgcagggtattgggtgaggcctgc

SEQ ID NO: 5126860 - DNA, 25 bp, Homo sapien
caaaggactccatgttctcttgagg

SEQ ID NO: 5126861 - DNA, 25 bp, Homo sapien
actggagcaggtgggttactcggag

SEQ ID NO: 5126862 - DNA, 25 bp, Homo sapien
aggtgggttactcggaggccactga

SEQ ID NO: 5126863 - DNA, 25 bp, Homo sapien
gtcagtgagatggaaatctgcagac

SEQ ID NO: 5126864 - DNA, 25 bp, Homo sapien
gagcaggtgggttactcggaggcca

SEQ ID NO: 5126865 - DNA, 25 bp, Homo sapien
tctcagccagcaagagaagcctttg

SEQ ID NO: 5126866 - DNA, 25 bp, Homo sapien
cctccgtgggcagggagctccccaa

SEQ ID NO: 5126867 - DNA, 25 bp, Homo sapien
gccctccgtgggcagggagctcccc

SEQ ID NO: 5126868 - DNA, 25 bp, Homo sapien
cagggagctccccaacaattctcag

SEQ ID NO: 5126869 - DNA, 25 bp, Homo sapien
gatgagctccaagattccgacagga

SEQ ID NO: 5126870 - DNA, 25 bp, Homo sapien
aatctcaagtttgggggatgagctc

SEQ ID NO: 5126871 - DNA, 25 bp, Homo sapien
gggatgagctccaagattccgacag

SEQ ID NO: 5126872 - DNA, 25 bp, Homo sapien
agctccaagattccgacaggaaccc

SEQ ID NO: 5126873 - DNA, 25 bp, Homo sapien
caggctgatttgctggtggaatagg

SEQ ID NO: 5126874 - DNA, 25 bp, Homo sapien
gctgatttgctggtggaataggaat

SEQ ID NO: 5126875 - DNA, 25 bp, Homo sapien
tgctggtggaataggaattttctag

SEQ ID NO: 5126876 - DNA, 25 bp, Homo sapien
atttgctggtggaataggaattttc

SEQ ID NO: 5126877 - DNA, 25 bp, Homo sapien
tctgatagtgttcttttgaggatac

SEQ ID NO: 5126878 - DNA, 25 bp, Homo sapien
aaagatgctggtgactgcagccttt

SEQ ID NO: 5126879 - DNA, 25 bp, Homo sapien
cagtctgatagtgttcttttgagga

SEQ ID NO: 5126880 - DNA, 25 bp, Homo sapien
tggaaaagatgctggtgactgcagc

SEQ ID NO: 5126881 - DNA, 25 bp, Homo sapien
tggtggcaaattagtggcagcatat

SEQ ID NO: 5126882 - DNA, 25 bp, Homo sapien
ctgtgaactgtctccctaagcattt

SEQ ID NO: 5126883 - DNA, 25 bp, Homo sapien
taaacatcatccaatcatgctcaca

SEQ ID NO: 5126884 - DNA, 25 bp, Homo sapien
gccctgtgaagtacatatatatctg

SEQ ID NO: 5126885 - DNA, 25 bp, Homo sapien
tgtgttgtgacagaaaaggctgcct

SEQ ID NO: 5126886 - DNA, 25 bp, Homo sapien
gagccccagatcctgacagagccag

SEQ ID NO: 5126887 - DNA, 25 bp, Homo sapien
ttggccgccggcgaggctgggcttc

SEQ ID NO: 5126888 - DNA, 25 bp, Homo sapien
ggcctcgcggtgaacttggccgccg

SEQ ID NO: 5126889 - DNA, 25 bp, Homo sapien
atgttttaactgtcgagttccatgc

SEQ ID NO: 5126890 - DNA, 25 bp, Homo sapien
cgagttccatgctccgcctcctcgg

SEQ ID NO: 5126891 - DNA, 25 bp, Homo sapien
taactgtcgagttccatgctccgcc

SEQ ID NO: 5126892 - DNA, 25 bp, Homo sapien
tctcttaaatgttttaactgtcgag

SEQ ID NO: 5126893 - DNA, 25 bp, Homo sapien
tgcaaatgcatgagagaacccaagt

SEQ ID NO: 5126894 - DNA, 25 bp, Homo sapien
gaacaacatggtggagagtgccctg

SEQ ID NO: 5126895 - DNA, 25 bp, Homo sapien
tgaaggtgctatccagtgcaacagc

SEQ ID NO: 5126896 - DNA, 25 bp, Homo sapien
cctgagaatgccgtactgtgaagaa

SEQ ID NO: 5126897 - DNA, 25 bp, Homo sapien
ataatttggtgtgagatttgagtgg

SEQ ID NO: 5126898 - DNA, 25 bp, Homo sapien
gacagagggacatgctacacacttt

SEQ ID NO: 5126899 - DNA, 25 bp, Homo sapien
caagggggatgttgttaaagcataa

SEQ ID NO: 5126900 - DNA, 25 bp, Homo sapien
aaatcatataagtccctcccctgac

SEQ ID NO: 5126901 - DNA, 25 bp, Homo sapien
agcagagcagtcttggacccaggca

SEQ ID NO: 5126902 - DNA, 25 bp, Homo sapien
cgacactgtgtagatggagctgcca

SEQ ID NO: 5126903 - DNA, 25 bp, Homo sapien
taacacattgctcgagggactagct

SEQ ID NO: 5126904 - DNA, 25 bp, Homo sapien
gcaacttgtacctctgaaggcgtag

SEQ ID NO: 5126905 - DNA, 25 bp, Homo sapien
gcaagggtccaagtatatgagcaac

SEQ ID NO: 5126906 - DNA, 25 bp, Homo sapien
tctcaatggcaagaccctctaggga

SEQ ID NO: 5126907 - DNA, 25 bp, Homo sapien
gagtcctacggaacttggagccaca

SEQ ID NO: 5126908 - DNA, 25 bp, Homo sapien
tctgacacagttggaggaaatagct

SEQ ID NO: 5126909 - DNA, 25 bp, Homo sapien
agtcctgaggtttcttgcaagtaca

SEQ ID NO: 5126910 - DNA, 25 bp, Homo sapien
ttccagaactggaagtcggcagagc

SEQ ID NO: 5126911 - DNA, 25 bp, Homo sapien
gctttcagagccctttatcattgtc

SEQ ID NO: 5126912 - DNA, 25 bp, Homo sapien
tgagtttaaccatcttgttccagaa

SEQ ID NO: 5126913 - DNA, 25 bp, Homo sapien
catgtgctgtgtctaagttgtggac

SEQ ID NO: 5126914 - DNA, 25 bp, Homo sapien
tagatggacagccttccatgatggg

SEQ ID NO: 5126915 - DNA, 25 bp, Homo sapien
atctctctgcaaggaccctgggttg

SEQ ID NO: 5126916 - DNA, 25 bp, Homo sapien
gacacagggcttcacagtggctgct

SEQ ID NO: 5126917 - DNA, 25 bp, Homo sapien
gaaatataggaaataccagctgaga

SEQ ID NO: 5126918 - DNA, 25 bp, Homo sapien
agcaagtccacagagctttttaaca

SEQ ID NO: 5126919 - DNA, 25 bp, Homo sapien
ctctcacctcactcctattttaagt

SEQ ID NO: 5126920 - DNA, 25 bp, Homo sapien
aactgtccacttgacgtccatgagc

SEQ ID NO: 5126921 - DNA, 25 bp, Homo sapien
cctctagatgggcaaaaggagtctc

SEQ ID NO: 5126922 - DNA, 25 bp, Homo sapien
caggcctacggagaccaagagtgct

SEQ ID NO: 5126923 - DNA, 25 bp, Homo sapien
gaggagaataccaggctcaccagga

SEQ ID NO: 5126924 - DNA, 25 bp, Homo sapien
tgccaagttgggatcaggtaatacc

SEQ ID NO: 5126925 - DNA, 25 bp, Homo sapien
gatttgaacctacgggctgtgtgcg

SEQ ID NO: 5126926 - DNA, 25 bp, Homo sapien
taaagcgggtgatcatctgccctca

SEQ ID NO: 5126927 - DNA, 25 bp, Homo sapien
tggaagaatggctcctaaagcgggt

SEQ ID NO: 5126928 - DNA, 25 bp, Homo sapien
ctagagccaacaagtcaaggaggtg

SEQ ID NO: 5126929 - DNA, 25 bp, Homo sapien
gtgaatatagcccttttgcttccag

SEQ ID NO: 5126930 - DNA, 25 bp, Homo sapien
tctgtaatgataacatgtggttcca

SEQ ID NO: 5126931 - DNA, 25 bp, Homo sapien
tagcatagagttaggtcacttttaa

SEQ ID NO: 5126932 - DNA, 25 bp, Homo sapien
taagcatttattgtagggtcagtct

SEQ ID NO: 5126933 - DNA, 25 bp, Homo sapien
tgttaccgccacctgatgcatattg

SEQ ID NO: 5126934 - DNA, 25 bp, Homo sapien
cacctgatgcatattgaatgagctc

SEQ ID NO: 5126935 - DNA, 25 bp, Homo sapien
ctccagatgttaccgccacctgatg

SEQ ID NO: 5126936 - DNA, 25 bp, Homo sapien
ttgaatgagctcaaaacaagcttct

SEQ ID NO: 5126937 - DNA, 25 bp, Homo sapien
tgatgctggctgtaagtaatgagcg

SEQ ID NO: 5126938 - DNA, 25 bp, Homo sapien
aaagttggctcagaaccagcaccct

SEQ ID NO: 5126939 - DNA, 25 bp, Homo sapien
tctgtgccggagttccccgatgatg

SEQ ID NO: 5126940 - DNA, 25 bp, Homo sapien
ctgggccttccatgcaaagttggct

SEQ ID NO: 5126941 - DNA, 25 bp, Homo sapien
catcatgagagtggactagggccgc

SEQ ID NO: 5126942 - DNA, 25 bp, Homo sapien
gggtggaagactgagatgcactgaa

SEQ ID NO: 5126943 - DNA, 25 bp, Homo sapien
tgcactgaaggcatcgactgctgtg

SEQ ID NO: 5126944 - DNA, 25 bp, Homo sapien
accgggggattaatggaggcatcat

SEQ ID NO: 5126945 - DNA, 25 bp, Homo sapien
tgtgaaaagttcaccaaggttacat

SEQ ID NO: 5126946 - DNA, 25 bp, Homo sapien
gacctccatggagcggatgacctga

SEQ ID NO: 5126947 - DNA, 25 bp, Homo sapien
agactgcgcagactcttgtgaaaag

SEQ ID NO: 5126948 - DNA, 25 bp, Homo sapien
aagttcaccaaggttacatgcaggg

SEQ ID NO: 5126949 - DNA, 25 bp, Homo sapien
aaggcttttcctcggcattaatctg

SEQ ID NO: 5126950 - DNA, 25 bp, Homo sapien
cttttcctcggcattaatctgctta

SEQ ID NO: 5126951 - DNA, 25 bp, Homo sapien
tcaccaaggcttttcctcggcatta

SEQ ID NO: 5126952 - DNA, 25 bp, Homo sapien
ccaaggcttttcctcggcattaatc

SEQ ID NO: 5126953 - DNA, 25 bp, Homo sapien
cccatctgtgctccaagctcagaag

SEQ ID NO: 5126954 - DNA, 25 bp, Homo sapien
atctgtgctccaagctcagaagtct

SEQ ID NO: 5126955 - DNA, 25 bp, Homo sapien
gtccccgtgcttcctcaccagcggg

SEQ ID NO: 5126956 - DNA, 25 bp, Homo sapien
tcaccagcggggctctctccacggg

SEQ ID NO: 5126957 - DNA, 25 bp, Homo sapien
aaggccatagtagtgcaggagccag

SEQ ID NO: 5126958 - DNA, 25 bp, Homo sapien
caaaaggccatagtagtgcaggagc

SEQ ID NO: 5126959 - DNA, 25 bp, Homo sapien
gagccaaaaggccatagtagtgcag

SEQ ID NO: 5126960 - DNA, 25 bp, Homo sapien
gccaaaaggccatagtagtgcagga

SEQ ID NO: 5126961 - DNA, 25 bp, Homo sapien
cacagaggtcttcacatggcaatga

SEQ ID NO: 5126962 - DNA, 25 bp, Homo sapien
tataataccccaagaacccatgcat

SEQ ID NO: 5126963 - DNA, 25 bp, Homo sapien
ggcaaactcttgtgagaccttggaa

SEQ ID NO: 5126964 - DNA, 25 bp, Homo sapien
tcgagggttgtatatcaggcaggcc

SEQ ID NO: 5126965 - DNA, 25 bp, Homo sapien
tcaggacaggggggcctagcttcat

SEQ ID NO: 5126966 - DNA, 25 bp, Homo sapien
aaagctgtcaggacaggggggccta

SEQ ID NO: 5126967 - DNA, 25 bp, Homo sapien
ggtggaaagctgtcaggacaggggg

SEQ ID NO: 5126968 - DNA, 25 bp, Homo sapien
agaagtggggaggtgcattgcccct

SEQ ID NO: 5126969 - DNA, 25 bp, Homo sapien
cccaggtccagggatctcagtccta

SEQ ID NO: 5126970 - DNA, 25 bp, Homo sapien
gcctggagtttgatgtaggccagtg

SEQ ID NO: 5126971 - DNA, 25 bp, Homo sapien
tttgatgtaggccagtggtgtctgg

SEQ ID NO: 5126972 - DNA, 25 bp, Homo sapien
tgtggcctggagtttgatgtaggcc

SEQ ID NO: 5126973 - DNA, 25 bp, Homo sapien
aaacattttgaggagtcctgttcac

SEQ ID NO: 5126974 - DNA, 25 bp, Homo sapien
gtgacatcctcaatccacctgatct

SEQ ID NO: 5126975 - DNA, 25 bp, Homo sapien
agtcctgttcacagatggtgaccat

SEQ ID NO: 5126976 - DNA, 25 bp, Homo sapien
gggatggcagtgacatcctcaatcc

SEQ ID NO: 5126977 - DNA, 25 bp, Homo sapien
taggtagccaatgtccagcacgttt

SEQ ID NO: 5126978 - DNA, 25 bp, Homo sapien
tcggtgaagcgcaaggccaccttga

SEQ ID NO: 5126979 - DNA, 25 bp, Homo sapien
gtttggtaatgacacctcctcggtg

SEQ ID NO: 5126980 - DNA, 25 bp, Homo sapien
ttaatctttcttccgtaggtagcca

SEQ ID NO: 5126981 - DNA, 25 bp, Homo sapien
agtcatttggcacacagtacacgtt

SEQ ID NO: 5126982 - DNA, 25 bp, Homo sapien
cagtacacgttgtgtttctgtggaa

SEQ ID NO: 5126983 - DNA, 25 bp, Homo sapien
tcagtgctactaccaggtaggaagg

SEQ ID NO: 5126984 - DNA, 25 bp, Homo sapien
gaggatgtcagtgctactaccaggt

SEQ ID NO: 5126985 - DNA, 25 bp, Homo sapien
caccttcctagccttgccctagccc

SEQ ID NO: 5126986 - DNA, 25 bp, Homo sapien
cttaaaacatgcatcctgggcacct

SEQ ID NO: 5126987 - DNA, 25 bp, Homo sapien
tccccaacagtgaggccatgtataa

SEQ ID NO: 5126988 - DNA, 25 bp, Homo sapien
cttgccctagccctagtcctgaccc

SEQ ID NO: 5126989 - DNA, 25 bp, Homo sapien
ttcagacctggagcccccatggaaa

SEQ ID NO: 5126990 - DNA, 25 bp, Homo sapien
tgctaccaccacgatccttttctta

SEQ ID NO: 5126991 - DNA, 25 bp, Homo sapien
tcctgctaccaccacgatccttttc

SEQ ID NO: 5126992 - DNA, 25 bp, Homo sapien
agacctggagcccccatggaaaatt

SEQ ID NO: 5126993 - DNA, 25 bp, Homo sapien
gggactgaggtgacaaaacaggatc

SEQ ID NO: 5126994 - DNA, 25 bp, Homo sapien
tgcagcgtgggattgagcagcctcc

SEQ ID NO: 5126995 - DNA, 25 bp, Homo sapien
gactgaggtgacaaaacaggatccc

SEQ ID NO: 5126996 - DNA, 25 bp, Homo sapien
cagcgtgggattgagcagcctcctg

SEQ ID NO: 5126997 - DNA, 25 bp, Homo sapien
tatcgtgcttgttaccccgtgtgac

SEQ ID NO: 5126998 - DNA, 25 bp, Homo sapien
gaatgtggcctgacacttagcagag

SEQ ID NO: 5126999 - DNA, 25 bp, Homo sapien
tcctgtctccgctgtgctcagaatg

SEQ ID NO: 5127000 - DNA, 25 bp, Homo sapien
ggtggctttgctcaatcctgtctcc

SEQ ID NO: 5127001 - DNA, 25 bp, Homo sapien
gaggagggaatctccaccgaggtgg

SEQ ID NO: 5127002 - DNA, 25 bp, Homo sapien
tccaaggaatcccacctcctgcttc

SEQ ID NO: 5127003 - DNA, 25 bp, Homo sapien
cccaggaggagggaatctccaccga

SEQ ID NO: 5127004 - DNA, 25 bp, Homo sapien
tcctggttggagtttcctgggtgaa

SEQ ID NO: 5127005 - DNA, 25 bp, Homo sapien
tgcaagttcctgttcaagaaaagac

SEQ ID NO: 5127006 - DNA, 25 bp, Homo sapien
tgtttttgagtatgcaagttcctgt

SEQ ID NO: 5127007 - DNA, 25 bp, Homo sapien
ttgagtatgcaagttcctgttcaag

SEQ ID NO: 5127008 - DNA, 25 bp, Homo sapien
tgttgtttttgagtatgcaagttcc

SEQ ID NO: 5127009 - DNA, 25 bp, Homo sapien
taaattcaggaagcaccactcctct

SEQ ID NO: 5127010 - DNA, 25 bp, Homo sapien
tccggtgctgtgtttccacgggatc

SEQ ID NO: 5127011 - DNA, 25 bp, Homo sapien
tcttatcccatatcctccggtgctg

SEQ ID NO: 5127012 - DNA, 25 bp, Homo sapien
ttctttcaagtatctagagggccca

SEQ ID NO: 5127013 - DNA, 25 bp, Homo sapien
ttctcttgtcgaccagccctgcaaa

SEQ ID NO: 5127014 - DNA, 25 bp, Homo sapien
cactgaatgtccatgaacaacctgg

SEQ ID NO: 5127015 - DNA, 25 bp, Homo sapien
tgtccatgaacaacctggcttccct

SEQ ID NO: 5127016 - DNA, 25 bp, Homo sapien
tcgaccagccctgcaaaacttaaca

SEQ ID NO: 5127017 - DNA, 25 bp, Homo sapien
cattgtgaccaatggagaatacaca

SEQ ID NO: 5127018 - DNA, 25 bp, Homo sapien
attgtgaccaatggagaatacacac

SEQ ID NO: 5127019 - DNA, 25 bp, Homo sapien
gcattgtgaccaatggagaatacac

SEQ ID NO: 5127020 - DNA, 25 bp, Homo sapien
gtgcattgtgaccaatggagaatac

SEQ ID NO: 5127021 - DNA, 25 bp, Homo sapien
ctggatactgtctggttgagaaaaa

SEQ ID NO: 5127022 - DNA, 25 bp, Homo sapien
ccccaacaaaggtgctctgagctga

SEQ ID NO: 5127023 - DNA, 25 bp, Homo sapien
tattcacaggctgtacccgaaccat

SEQ ID NO: 5127024 - DNA, 25 bp, Homo sapien
gactccttatcatggtagccggttg

SEQ ID NO: 5127025 - DNA, 25 bp, Homo sapien
gtcccagtggggagttattcttgtc

SEQ ID NO: 5127026 - DNA, 25 bp, Homo sapien
caagggcccccatgtgccttcctct

SEQ ID NO: 5127027 - DNA, 25 bp, Homo sapien
ccaccctgccaagggcccccatgtg

SEQ ID NO: 5127028 - DNA, 25 bp, Homo sapien
cctccagtcccagtggggagttatt

SEQ ID NO: 5127029 - DNA, 25 bp, Homo sapien
gattccttgggaaagatccaggttc

SEQ ID NO: 5127030 - DNA, 25 bp, Homo sapien
gttcctcatgaaagacggccgtaat

SEQ ID NO: 5127031 - DNA, 25 bp, Homo sapien
tgatatctgctatggcaacccaggg

SEQ ID NO: 5127032 - DNA, 25 bp, Homo sapien
tttagcaattatacagtgggagttc

SEQ ID NO: 5127033 - DNA, 25 bp, Homo sapien
gcctctcaggcaagccttttgaatg

SEQ ID NO: 5127034 - DNA, 25 bp, Homo sapien
ggttctccaggtggtaagatgtgca

SEQ ID NO: 5127035 - DNA, 25 bp, Homo sapien
ctcaggcaagccttttgaatgtggg

SEQ ID NO: 5127036 - DNA, 25 bp, Homo sapien
ggcaggcctctcaggcaagcctttt

SEQ ID NO: 5127037 - DNA, 25 bp, Homo sapien
tggctgacaggtgggtcatcaaagc

SEQ ID NO: 5127038 - DNA, 25 bp, Homo sapien
tacaggatcctcagtgacggaggcc

SEQ ID NO: 5127039 - DNA, 25 bp, Homo sapien
cagtcaggtcactgagtttatggca

SEQ ID NO: 5127040 - DNA, 25 bp, Homo sapien
aaagctctggcgcagacgtgactga

SEQ ID NO: 5127041 - DNA, 25 bp, Homo sapien
tcagatccagtctcggaaggctttt

SEQ ID NO: 5127042 - DNA, 25 bp, Homo sapien
gaaggcttttttgggcgcaatgaca

SEQ ID NO: 5127043 - DNA, 25 bp, Homo sapien
cagtctcggaaggcttttttgggcg

SEQ ID NO: 5127044 - DNA, 25 bp, Homo sapien
tcggaaggcttttttgggcgcaatg

SEQ ID NO: 5127045 - DNA, 25 bp, Homo sapien
tctggtggtagtctgaatttagtaa

SEQ ID NO: 5127046 - DNA, 25 bp, Homo sapien
aaattgcaggtatgtgagtaaagag

SEQ ID NO: 5127047 - DNA, 25 bp, Homo sapien
cttctgaaggactcagacataaaga

SEQ ID NO: 5127048 - DNA, 25 bp, Homo sapien
caacttaagctcctcatacacaagg

SEQ ID NO: 5127049 - DNA, 25 bp, Homo sapien
ctggatcaattgtgcacacttgtcc

SEQ ID NO: 5127050 - DNA, 25 bp, Homo sapien
ggtggctcagacgtaaaaaatgatg

SEQ ID NO: 5127051 - DNA, 25 bp, Homo sapien
tacttggtggctcagacgtaaaaaa

SEQ ID NO: 5127052 - DNA, 25 bp, Homo sapien
aagaactcacccactgataaatact

SEQ ID NO: 5127053 - DNA, 25 bp, Homo sapien
cccactgataaatacttggtggctc

SEQ ID NO: 5127054 - DNA, 25 bp, Homo sapien
agattccagggaggtaaggataagg

SEQ ID NO: 5127055 - DNA, 25 bp, Homo sapien
ctctcatcaccaagtatgtacagtg

SEQ ID NO: 5127056 - DNA, 25 bp, Homo sapien
agttattctggttaaatactgtgag

SEQ ID NO: 5127057 - DNA, 25 bp, Homo sapien
aatactgtgaggattcatcagaaac

SEQ ID NO: 5127058 - DNA, 25 bp, Homo sapien
agctctcatcaccaagtatgtacag

SEQ ID NO: 5127059 - DNA, 25 bp, Homo sapien
tgttttcctcttgttctgcttgcaa

SEQ ID NO: 5127060 - DNA, 25 bp, Homo sapien
tttcctcttgttctgcttgcaactt

SEQ ID NO: 5127061 - DNA, 25 bp, Homo sapien
tcctcttgttctgcttgcaacttct

SEQ ID NO: 5127062 - DNA, 25 bp, Homo sapien
ctcttgttctgcttgcaacttctgg

SEQ ID NO: 5127063 - DNA, 25 bp, Homo sapien
atctttcagctagactagaaacaga

SEQ ID NO: 5127064 - DNA, 25 bp, Homo sapien
ccaatctttcagctagactagaaac

SEQ ID NO: 5127065 - DNA, 25 bp, Homo sapien
caaccaatctttcagctagactaga

SEQ ID NO: 5127066 - DNA, 25 bp, Homo sapien
aaccaatctttcagctagactagaa

SEQ ID NO: 5127067 - DNA, 25 bp, Homo sapien
tcacgacagtgataaattgcatctc

SEQ ID NO: 5127068 - DNA, 25 bp, Homo sapien
tgggtaagtttccttcgcaggcctg

SEQ ID NO: 5127069 - DNA, 25 bp, Homo sapien
aagtttccttcgcaggcctgcttgg

SEQ ID NO: 5127070 - DNA, 25 bp, Homo sapien
tctctgatgggaagagcaattccaa

SEQ ID NO: 5127071 - DNA, 25 bp, Homo sapien
tcgatgaactcgtggtcactgagct

SEQ ID NO: 5127072 - DNA, 25 bp, Homo sapien
ccatattaatgacatgacctcgtga

SEQ ID NO: 5127073 - DNA, 25 bp, Homo sapien
ttgacacggacaggatgcgcactct

SEQ ID NO: 5127074 - DNA, 25 bp, Homo sapien
tctgaagaagccttcgcacatcctg

SEQ ID NO: 5127075 - DNA, 25 bp, Homo sapien
agttcgctgacacaattggagcaat

SEQ ID NO: 5127076 - DNA, 25 bp, Homo sapien
cagtcagattcaatttaggaatagg

SEQ ID NO: 5127077 - DNA, 25 bp, Homo sapien
taggaataggcaatggctctgttgg

SEQ ID NO: 5127078 - DNA, 25 bp, Homo sapien
ttcctcgtcctacaggaagagccat

SEQ ID NO: 5127079 - DNA, 25 bp, Homo sapien
aaggtaaacattcctcgtcctacag

SEQ ID NO: 5127080 - DNA, 25 bp, Homo sapien
tactgttgtgttccgaggaggggca

SEQ ID NO: 5127081 - DNA, 25 bp, Homo sapien
cacatcgatgtttccactattaagg

SEQ ID NO: 5127082 - DNA, 25 bp, Homo sapien
ggaggcacatcgatgtttccactat

SEQ ID NO: 5127083 - DNA, 25 bp, Homo sapien
gttgggaggcacatcgatgtttcca

SEQ ID NO: 5127084 - DNA, 25 bp, Homo sapien
ccagcatactcattggccaactcag

SEQ ID NO: 5127085 - DNA, 25 bp, Homo sapien
gaaagccagcatactcattggccaa

SEQ ID NO: 5127086 - DNA, 25 bp, Homo sapien
tggtcaagtagtcatggatattgag

SEQ ID NO: 5127087 - DNA, 25 bp, Homo sapien
ccattcaaacccagagccatgagaa

SEQ ID NO: 5127088 - DNA, 25 bp, Homo sapien
ggcaaacccacagacacggaaagta

SEQ ID NO: 5127089 - DNA, 25 bp, Homo sapien
gaaagagtttagtttgccagagagc

SEQ ID NO: 5127090 - DNA, 25 bp, Homo sapien
taaaattaacagtggtgatggatgc

SEQ ID NO: 5127091 - DNA, 25 bp, Homo sapien
caccactagtgggtacaaggttcct

SEQ ID NO: 5127092 - DNA, 25 bp, Homo sapien
tgtgagctgtcccttgatatacaag

SEQ ID NO: 5127093 - DNA, 25 bp, Homo sapien
taagaagccgagtaatagacatatc

SEQ ID NO: 5127094 - DNA, 25 bp, Homo sapien
cactgcagccacttggacattgtga

SEQ ID NO: 5127095 - DNA, 25 bp, Homo sapien
gaaacaccaagtagcagtccaatgc

SEQ ID NO: 5127096 - DNA, 25 bp, Homo sapien
gagtccattacttgacttctattgg

SEQ ID NO: 5127097 - DNA, 25 bp, Homo sapien
tacccaccagcatgtaaaggaggaa

SEQ ID NO: 5127098 - DNA, 25 bp, Homo sapien
ggaagtgctgttatccaacacagta

SEQ ID NO: 5127099 - DNA, 25 bp, Homo sapien
ggttcatcaccaacatacccaccag

SEQ ID NO: 5127100 - DNA, 25 bp, Homo sapien
tctgtcagtgcagtattccatttca

SEQ ID NO: 5127101 - DNA, 25 bp, Homo sapien
tgctcaggcacattgagatcagaca

SEQ ID NO: 5127102 - DNA, 25 bp, Homo sapien
gtcctccaaccatgtactgatagag

SEQ ID NO: 5127103 - DNA, 25 bp, Homo sapien
ctccaaccatgtactgatagagctg

SEQ ID NO: 5127104 - DNA, 25 bp, Homo sapien
tatgtttctccctatgcattcctgt

SEQ ID NO: 5127105 - DNA, 25 bp, Homo sapien
caggatgaacactagtattttccaa

SEQ ID NO: 5127106 - DNA, 25 bp, Homo sapien
gataagtatgcttaaaattaacata

SEQ ID NO: 5127107 - DNA, 25 bp, Homo sapien
gatctattactttgctgtgtactta

SEQ ID NO: 5127108 - DNA, 25 bp, Homo sapien
taaaattcctctgataagtatgctt

SEQ ID NO: 5127109 - DNA, 25 bp, Homo sapien
attggtttttaagtagatcatagcc

SEQ ID NO: 5127110 - DNA, 25 bp, Homo sapien
catccacatttatggtatctccttc

SEQ ID NO: 5127111 - DNA, 25 bp, Homo sapien
tagccaaagctagagtagcacctgg

SEQ ID NO: 5127112 - DNA, 25 bp, Homo sapien
gtagcacctggacaagtcacatcca

SEQ ID NO: 5127113 - DNA, 25 bp, Homo sapien
tcacactatcaccgtgggaggaagg

SEQ ID NO: 5127114 - DNA, 25 bp, Homo sapien
cacactatcaccgtgggaggaaggg

SEQ ID NO: 5127115 - DNA, 25 bp, Homo sapien
tgctcaatgaaatatccccagtgcc

SEQ ID NO: 5127116 - DNA, 25 bp, Homo sapien
catgcaacgtgtaagcataaatgcc

SEQ ID NO: 5127117 - DNA, 25 bp, Homo sapien
taaccagtcctcacagcaatatgct

SEQ ID NO: 5127118 - DNA, 25 bp, Homo sapien
tgttcaagtagagggcaagacaatc

SEQ ID NO: 5127119 - DNA, 25 bp, Homo sapien
ggcttggccaggtgattctcattct

SEQ ID NO: 5127120 - DNA, 25 bp, Homo sapien
catgtgtctgggcttcctagaagac

SEQ ID NO: 5127121 - DNA, 25 bp, Homo sapien
tctcttatgaggtcagtggtggcta

SEQ ID NO: 5127122 - DNA, 25 bp, Homo sapien
gggactatcggccaaaacactcaga

SEQ ID NO: 5127123 - DNA, 25 bp, Homo sapien
gccaattcctggtgtagagcctagg

SEQ ID NO: 5127124 - DNA, 25 bp, Homo sapien
gacagtacaatgaccagcaagccga

SEQ ID NO: 5127125 - DNA, 25 bp, Homo sapien
taagccctaggataaagccctcaac

SEQ ID NO: 5127126 - DNA, 25 bp, Homo sapien
gatgtatcctgtgtatgccagaagg

SEQ ID NO: 5127127 - DNA, 25 bp, Homo sapien
tgcttgaaaaaatctagatatctat

SEQ ID NO: 5127128 - DNA, 25 bp, Homo sapien
ctcagtgagacctaactcatttggg

SEQ ID NO: 5127129 - DNA, 25 bp, Homo sapien
tcttaattgagttgtgcttgaaaaa

SEQ ID NO: 5127130 - DNA, 25 bp, Homo sapien
catggctgtgttacatgcttaagac

SEQ ID NO: 5127131 - DNA, 25 bp, Homo sapien
cccgggaactgccattctaggacag

SEQ ID NO: 5127132 - DNA, 25 bp, Homo sapien
tctgctgcccgggaactgccattct

SEQ ID NO: 5127133 - DNA, 25 bp, Homo sapien
gctgcccgggaactgccattctagg

SEQ ID NO: 5127134 - DNA, 25 bp, Homo sapien
ggaactgccattctaggacagctca

SEQ ID NO: 5127135 - DNA, 25 bp, Homo sapien
catcagcatcgtgaaagcacagagg

SEQ ID NO: 5127136 - DNA, 25 bp, Homo sapien
tccatcagcatcgtgaaagcacaga

SEQ ID NO: 5127137 - DNA, 25 bp, Homo sapien
cttcataatccatcagcatcgtgaa

SEQ ID NO: 5127138 - DNA, 25 bp, Homo sapien
taatccatcagcatcgtgaaagcac

SEQ ID NO: 5127139 - DNA, 25 bp, Homo sapien
gttggatgcattaaattctacaaat

SEQ ID NO: 5127140 - DNA, 25 bp, Homo sapien
tggcctcctggctgtacattcttcc

SEQ ID NO: 5127141 - DNA, 25 bp, Homo sapien
ctacaaatgcgattttataaattag

SEQ ID NO: 5127142 - DNA, 25 bp, Homo sapien
tagttgccctcctaatggcctcctg

SEQ ID NO: 5127143 - DNA, 25 bp, Homo sapien
caggatgttgttgacttacatgaga

SEQ ID NO: 5127144 - DNA, 25 bp, Homo sapien
aatcccaggatgttgttgacttaca

SEQ ID NO: 5127145 - DNA, 25 bp, Homo sapien
gtcccaatcccaggatgttgttgac

SEQ ID NO: 5127146 - DNA, 25 bp, Homo sapien
ccaatcccaggatgttgttgactta

SEQ ID NO: 5127147 - DNA, 25 bp, Homo sapien
tagaagaaccacttccttatgttcc

SEQ ID NO: 5127148 - DNA, 25 bp, Homo sapien
agaagtagaagaaccacttccttat

SEQ ID NO: 5127149 - DNA, 25 bp, Homo sapien
gaagtagaagaaccacttccttatg

SEQ ID NO: 5127150 - DNA, 25 bp, Homo sapien
gtagaagaaccacttccttatgttc

SEQ ID NO: 5127151 - DNA, 25 bp, Homo sapien
taaaacattggtaatcctgtggcgg

SEQ ID NO: 5127152 - DNA, 25 bp, Homo sapien
gatagctccttgaatggcttccact

SEQ ID NO: 5127153 - DNA, 25 bp, Homo sapien
tgttctagcctttgggtgtagccca

SEQ ID NO: 5127154 - DNA, 25 bp, Homo sapien
tacaggaagaactactagcaaatcg

SEQ ID NO: 5127155 - DNA, 25 bp, Homo sapien
tgcgctttggttctgacactgtcac

SEQ ID NO: 5127156 - DNA, 25 bp, Homo sapien
gacaggtatctggatttcggaggaa

SEQ ID NO: 5127157 - DNA, 25 bp, Homo sapien
tgatttcctacaatatgcgctttgg

SEQ ID NO: 5127158 - DNA, 25 bp, Homo sapien
caaaacactggagggtaagaagctc

SEQ ID NO: 5127159 - DNA, 25 bp, Homo sapien
caagattgatgttgatttgttcatc

SEQ ID NO: 5127160 - DNA, 25 bp, Homo sapien
aagattgatgttgatttgttcatcc

SEQ ID NO: 5127161 - DNA, 25 bp, Homo sapien
tatcaattgtgccatgtcatgagag

SEQ ID NO: 5127162 - DNA, 25 bp, Homo sapien
gataaacaggttagaactatggaac

SEQ ID NO: 5127163 - DNA, 25 bp, Homo sapien
actatggaaccactactatgttacc

SEQ ID NO: 5127164 - DNA, 25 bp, Homo sapien
caaagctcagtgtcacgcaatttag

SEQ ID NO: 5127165 - DNA, 25 bp, Homo sapien
cagtaaatcaatgccaatgtctaat

SEQ ID NO: 5127166 - DNA, 25 bp, Homo sapien
tgctgtttactggaagtagaatggg

SEQ ID NO: 5127167 - DNA, 25 bp, Homo sapien
gaatgggtagctatgaatcaaaatg

SEQ ID NO: 5127168 - DNA, 25 bp, Homo sapien
gaacacacagttgggcatgtggaca

SEQ ID NO: 5127169 - DNA, 25 bp, Homo sapien
gacactgaacagtgaaggcccctgg

SEQ ID NO: 5127170 - DNA, 25 bp, Homo sapien
tctttgtcctcttcacattttgctg

SEQ ID NO: 5127171 - DNA, 25 bp, Homo sapien
ctgggtattcacatagtcatccagg

SEQ ID NO: 5127172 - DNA, 25 bp, Homo sapien
gtgaaggcccctgggtattcacata

SEQ ID NO: 5127173 - DNA, 25 bp, Homo sapien
atttctgggtaggtgcaacgacgat

SEQ ID NO: 5127174 - DNA, 25 bp, Homo sapien
gatttctgggtaggtgcaacgacga

SEQ ID NO: 5127175 - DNA, 25 bp, Homo sapien
agatttctgggtaggtgcaacgacg

SEQ ID NO: 5127176 - DNA, 25 bp, Homo sapien
tgtttttgggtcagaaagaagcaac

SEQ ID NO: 5127177 - DNA, 25 bp, Homo sapien
tttgtttttgggtcagaaagaagca

SEQ ID NO: 5127178 - DNA, 25 bp, Homo sapien
gaaagaagcaactctggttgctttg

SEQ ID NO: 5127179 - DNA, 25 bp, Homo sapien
gcaactctggttgctttgaacccat

SEQ ID NO: 5127180 - DNA, 25 bp, Homo sapien
tctctttctttctgtttcaactgtt

SEQ ID NO: 5127181 - DNA, 25 bp, Homo sapien
tccctccctcataattttctctttc

SEQ ID NO: 5127182 - DNA, 25 bp, Homo sapien
cttccctccctcataattttctctt

SEQ ID NO: 5127183 - DNA, 25 bp, Homo sapien
ctgtttcaactgttttacttcttct

SEQ ID NO: 5127184 - DNA, 25 bp, Homo sapien
catcctaatgattatggaggacttc

SEQ ID NO: 5127185 - DNA, 25 bp, Homo sapien
tatcacacattgttgctctttactg

SEQ ID NO: 5127186 - DNA, 25 bp, Homo sapien
ctctttactgtgatattggaatgcc

SEQ ID NO: 5127187 - DNA, 25 bp, Homo sapien
catctctcatcctaatgattatgga

SEQ ID NO: 5127188 - DNA, 25 bp, Homo sapien
tgcctcttattctaagcagtgggac

SEQ ID NO: 5127189 - DNA, 25 bp, Homo sapien
aatatagaccatgtcccccaaaatg

SEQ ID NO: 5127190 - DNA, 25 bp, Homo sapien
aaaggcatgcaatttctattgaaat

SEQ ID NO: 5127191 - DNA, 25 bp, Homo sapien
attctaagcagtgggactattgacc

SEQ ID NO: 5127192 - DNA, 25 bp, Homo sapien
tgcgtacagctaatgaaacccagga

SEQ ID NO: 5127193 - DNA, 25 bp, Homo sapien
ggcaaatcatcctcaagaatacaag

SEQ ID NO: 5127194 - DNA, 25 bp, Homo sapien
aaacccaggaagatgagtcaatgca

SEQ ID NO: 5127195 - DNA, 25 bp, Homo sapien
ggagttttgccgtgatactagacac

SEQ ID NO: 5127196 - DNA, 25 bp, Homo sapien
gagggcaatccactcatatagttga

SEQ ID NO: 5127197 - DNA, 25 bp, Homo sapien
aattgctatcagatccacagagggc

SEQ ID NO: 5127198 - DNA, 25 bp, Homo sapien
gaaatgcaccagagaccttctactg

SEQ ID NO: 5127199 - DNA, 25 bp, Homo sapien
taaatgtcgagatatggtccacttc

SEQ ID NO: 5127200 - DNA, 25 bp, Homo sapien
acaacgagtcgtttctttgcatttt

SEQ ID NO: 5127201 - DNA, 25 bp, Homo sapien
gtctgttccccccacgtgagttatg

SEQ ID NO: 5127202 - DNA, 25 bp, Homo sapien
ttatgtgcttacaacgagtcgtttc

SEQ ID NO: 5127203 - DNA, 25 bp, Homo sapien
ccccacgtgagttatgtgcttacaa

SEQ ID NO: 5127204 - DNA, 25 bp, Homo sapien
caaacaggactataaaattgtggtc

SEQ ID NO: 5127205 - DNA, 25 bp, Homo sapien
tcaccagttagacaatgggccctct

SEQ ID NO: 5127206 - DNA, 25 bp, Homo sapien
gctgaaagagatccaacccacttct

SEQ ID NO: 5127207 - DNA, 25 bp, Homo sapien
caggcttttccgaggctgaaagaga

SEQ ID NO: 5127208 - DNA, 25 bp, Homo sapien
ggctgcagtaaactgggccattcca

SEQ ID NO: 5127209 - DNA, 25 bp, Homo sapien
gctctctgtgtattgagccccacca

SEQ ID NO: 5127210 - DNA, 25 bp, Homo sapien
tctaaaagatcatcttttgcacctg

SEQ ID NO: 5127211 - DNA, 25 bp, Homo sapien
aaatgctacttatgagctctctgtg

SEQ ID NO: 5127212 - DNA, 25 bp, Homo sapien
ttttgttttggacatcgtccctctg

SEQ ID NO: 5127213 - DNA, 25 bp, Homo sapien
gacatcgtccctctgtagttctttc

SEQ ID NO: 5127214 - DNA, 25 bp, Homo sapien
tgttttggacatcgtccctctgtag

SEQ ID NO: 5127215 - DNA, 25 bp, Homo sapien
tttggacatcgtccctctgtagttc

SEQ ID NO: 5127216 - DNA, 25 bp, Homo sapien
acagacggacactttacagtagatg

SEQ ID NO: 5127217 - DNA, 25 bp, Homo sapien
agacacagacggacactttacagta

SEQ ID NO: 5127218 - DNA, 25 bp, Homo sapien
cagacacagacggacactttacagt

SEQ ID NO: 5127219 - DNA, 25 bp, Homo sapien
acacagacggacactttacagtaga

SEQ ID NO: 5127220 - DNA, 25 bp, Homo sapien
tattaccattgctactgtgacagcc

SEQ ID NO: 5127221 - DNA, 25 bp, Homo sapien
agaagactgagtggcaacgtaaaac

SEQ ID NO: 5127222 - DNA, 25 bp, Homo sapien
cacagtcaggagaaatataaaggcc

SEQ ID NO: 5127223 - DNA, 25 bp, Homo sapien
aaagcctgccatggtcttaattcat

SEQ ID NO: 5127224 - DNA, 25 bp, Homo sapien
agaaggagatgctctcgattcccat

SEQ ID NO: 5127225 - DNA, 25 bp, Homo sapien
ggagatgctctcgattcccatctga

SEQ ID NO: 5127226 - DNA, 25 bp, Homo sapien
aatcagcttgctattagcaaggcag

SEQ ID NO: 5127227 - DNA, 25 bp, Homo sapien
cttagactatattctaaaaatcagc

SEQ ID NO: 5127228 - DNA, 25 bp, Homo sapien
tctgaggggtgtgtagcaggtgaga

SEQ ID NO: 5127229 - DNA, 25 bp, Homo sapien
ctgaggggtgtgtagcaggtgagaa

SEQ ID NO: 5127230 - DNA, 25 bp, Homo sapien
ctctgaggggtgtgtagcaggtgag

SEQ ID NO: 5127231 - DNA, 25 bp, Homo sapien
tgaggggtgtgtagcaggtgagaat

SEQ ID NO: 5127232 - DNA, 25 bp, Homo sapien
tagtcatatctctgttctggatcag

SEQ ID NO: 5127233 - DNA, 25 bp, Homo sapien
tagtatagcaccagggcccctgcgc

SEQ ID NO: 5127234 - DNA, 25 bp, Homo sapien
gcccctgcgcatcgttgtctggatt

SEQ ID NO: 5127235 - DNA, 25 bp, Homo sapien
ttcacactcaggaatgtcgcagtag

SEQ ID NO: 5127236 - DNA, 25 bp, Homo sapien
aaaactggttccttgcttagcttca

SEQ ID NO: 5127237 - DNA, 25 bp, Homo sapien
taataattcaggtctgctgggcatg

SEQ ID NO: 5127238 - DNA, 25 bp, Homo sapien
tctgggatctgagcaaagttttgct

SEQ ID NO: 5127239 - DNA, 25 bp, Homo sapien
gcaaaacagcaaagtctaccacatt

SEQ ID NO: 5127240 - DNA, 25 bp, Homo sapien
tcagatgtcccgctgtatgggtttg

SEQ ID NO: 5127241 - DNA, 25 bp, Homo sapien
gaaattcgtcttggtatagtatcac

SEQ ID NO: 5127242 - DNA, 25 bp, Homo sapien
agaatgaatcctgtggtgccaaata

SEQ ID NO: 5127243 - DNA, 25 bp, Homo sapien
catgggccaaggttaaagatataac

SEQ ID NO: 5127244 - DNA, 25 bp, Homo sapien
cctctaaaagtaagcaagaattgag

SEQ ID NO: 5127245 - DNA, 25 bp, Homo sapien
tatttgggggctaactaagctccta

SEQ ID NO: 5127246 - DNA, 25 bp, Homo sapien
tattcactccccaacgctaatacat

SEQ ID NO: 5127247 - DNA, 25 bp, Homo sapien
gaaatcaggccagagtcattcccat

SEQ ID NO: 5127248 - DNA, 25 bp, Homo sapien
taactatggttggttgctttagatg

SEQ ID NO: 5127249 - DNA, 25 bp, Homo sapien
taccttttggtaagagcactgcttg

SEQ ID NO: 5127250 - DNA, 25 bp, Homo sapien
taaccaaagtagaaacctactctga

SEQ ID NO: 5127251 - DNA, 25 bp, Homo sapien
gctttagatgtctagtgtgtacaca

SEQ ID NO: 5127252 - DNA, 25 bp, Homo sapien
tgcactgccagtacagcaacatgga

SEQ ID NO: 5127253 - DNA, 25 bp, Homo sapien
gccatgcaattgaatactgctcagc

SEQ ID NO: 5127254 - DNA, 25 bp, Homo sapien
gatctcagttatccttcaactggca

SEQ ID NO: 5127255 - DNA, 25 bp, Homo sapien
gcattatgccagttgacagaggtca

SEQ ID NO: 5127256 - DNA, 25 bp, Homo sapien
tatgtgttaaggtactaagtttgta

SEQ ID NO: 5127257 - DNA, 25 bp, Homo sapien
aataaatatgtgttaaggtactaag

SEQ ID NO: 5127258 - DNA, 25 bp, Homo sapien
aataacacgtagataaaaccagaca

SEQ ID NO: 5127259 - DNA, 25 bp, Homo sapien
agattgtaaataacacgtagataaa

SEQ ID NO: 5127260 - DNA, 25 bp, Homo sapien
tctatcttgctagcggactctctct

SEQ ID NO: 5127261 - DNA, 25 bp, Homo sapien
cagccatgccaacatcttgattgca

SEQ ID NO: 5127262 - DNA, 25 bp, Homo sapien
catcagtttagcagccttgaggaac

SEQ ID NO: 5127263 - DNA, 25 bp, Homo sapien
cacactttgttgaagcaagctacca

SEQ ID NO: 5127264 - DNA, 25 bp, Homo sapien
caaagtggcatgggaagtttttcct

SEQ ID NO: 5127265 - DNA, 25 bp, Homo sapien
aaagtggcatgggaagtttttcctg

SEQ ID NO: 5127266 - DNA, 25 bp, Homo sapien
tatgctaagtatagttaggcaacac

SEQ ID NO: 5127267 - DNA, 25 bp, Homo sapien
gcaattgttaactttccttacagga

SEQ ID NO: 5127268 - DNA, 25 bp, Homo sapien
cttacaggaactaatcacagttggc

SEQ ID NO: 5127269 - DNA, 25 bp, Homo sapien
aagattctccctcagatagtctcgg

SEQ ID NO: 5127270 - DNA, 25 bp, Homo sapien
gaagagtttttgtatatcaacatga

SEQ ID NO: 5127271 - DNA, 25 bp, Homo sapien
aaagtaaacatatatcaagatggtc

SEQ ID NO: 5127272 - DNA, 25 bp, Homo sapien
ttgtggcactgaaagggcgagagcc

SEQ ID NO: 5127273 - DNA, 25 bp, Homo sapien
tgaaagggcgagagccaagatctcc

SEQ ID NO: 5127274 - DNA, 25 bp, Homo sapien
gcagagatcaggtagccacatagct

SEQ ID NO: 5127275 - DNA, 25 bp, Homo sapien
taagagaacatttttggagtcagat

SEQ ID NO: 5127276 - DNA, 25 bp, Homo sapien
actagacggcattgtatctatctgc

SEQ ID NO: 5127277 - DNA, 25 bp, Homo sapien
ggtatggtgctgtcatttagttttc

SEQ ID NO: 5127278 - DNA, 25 bp, Homo sapien
taagtcagtcatgcaggaactcgaa

SEQ ID NO: 5127279 - DNA, 25 bp, Homo sapien
ggttctttgcgaaatgcagattcag

SEQ ID NO: 5127280 - DNA, 25 bp, Homo sapien
tgtaaaagagatgcttaagtcagtc

SEQ ID NO: 5127281 - DNA, 25 bp, Homo sapien
gactatagtgaaggaggtcctctct

SEQ ID NO: 5127282 - DNA, 25 bp, Homo sapien
ccagcagaattaactcaaaggaggg

SEQ ID NO: 5127283 - DNA, 25 bp, Homo sapien
cacaactgtgtagtggtaaccaaac

SEQ ID NO: 5127284 - DNA, 25 bp, Homo sapien
tagagtattaccactgtcaccacag

SEQ ID NO: 5127285 - DNA, 25 bp, Homo sapien
cataagtgcctttgcatggtgtcac

SEQ ID NO: 5127286 - DNA, 25 bp, Homo sapien
cactgtgcctggcgtgcctggcctt

SEQ ID NO: 5127287 - DNA, 25 bp, Homo sapien
ccgaggcactgtgcctggcgtgcct

SEQ ID NO: 5127288 - DNA, 25 bp, Homo sapien
ctgtgcctggcgtgcctggcctttt

SEQ ID NO: 5127289 - DNA, 25 bp, Homo sapien
ggcactgtgcctggcgtgcctggcc

SEQ ID NO: 5127290 - DNA, 25 bp, Homo sapien
aaagaggtgttggttctcttaatct

SEQ ID NO: 5127291 - DNA, 25 bp, Homo sapien
tgtaaagaggtgttggttctcttaa

SEQ ID NO: 5127292 - DNA, 25 bp, Homo sapien
taaagaggtgttggttctcttaatc

SEQ ID NO: 5127293 - DNA, 25 bp, Homo sapien
gggaaatagaatgatcagtactgcg

SEQ ID NO: 5127294 - DNA, 25 bp, Homo sapien
atagaatgatcagtactgcggcggg

SEQ ID NO: 5127295 - DNA, 25 bp, Homo sapien
gaaatagaatgatcagtactgcggc

SEQ ID NO: 5127296 - DNA, 25 bp, Homo sapien
caatagagggggaaatagaatgatc

SEQ ID NO: 5127297 - DNA, 25 bp, Homo sapien
gagtatattggtgtcgaagtttccc

SEQ ID NO: 5127298 - DNA, 25 bp, Homo sapien
tatgtactactttctaaggctgcca

SEQ ID NO: 5127299 - DNA, 25 bp, Homo sapien
ctagcctctgggagttaccatcaat

SEQ ID NO: 5127300 - DNA, 25 bp, Homo sapien
caaaatcaatgagtatggcaagtcc

SEQ ID NO: 5127301 - DNA, 25 bp, Homo sapien
ccaatacaaataccacctctggata

SEQ ID NO: 5127302 - DNA, 25 bp, Homo sapien
gagctcgaagttgaccaaaggccat

SEQ ID NO: 5127303 - DNA, 25 bp, Homo sapien
tagtccagtcattgtcaggtaaccc

SEQ ID NO: 5127304 - DNA, 25 bp, Homo sapien
tcggaggaggaagttagtccagtca

SEQ ID NO: 5127305 - DNA, 25 bp, Homo sapien
ctgtgtagctgtatgggtttggata

SEQ ID NO: 5127306 - DNA, 25 bp, Homo sapien
aattcatttttcacgtctgtgtagc

SEQ ID NO: 5127307 - DNA, 25 bp, Homo sapien
gaatcccgtctatttctacttagaa

SEQ ID NO: 5127308 - DNA, 25 bp, Homo sapien
tggatatgcaggcttgagaatcaag

SEQ ID NO: 5127309 - DNA, 25 bp, Homo sapien
agaccaaaagcttcaactaagaata

SEQ ID NO: 5127310 - DNA, 25 bp, Homo sapien
gagaccaaaagcttcaactaagaat

SEQ ID NO: 5127311 - DNA, 25 bp, Homo sapien
gaccaaaagcttcaactaagaatat

SEQ ID NO: 5127312 - DNA, 25 bp, Homo sapien
tgagatcataatatttaccgctcat

SEQ ID NO: 5127313 - DNA, 25 bp, Homo sapien
cggctttttctgactctaccagatc

SEQ ID NO: 5127314 - DNA, 25 bp, Homo sapien
aatgagatcataatatttaccgctc

SEQ ID NO: 5127315 - DNA, 25 bp, Homo sapien
tgcctaatgagatcataatatttac

SEQ ID NO: 5127316 - DNA, 25 bp, Homo sapien
gctacagtagttctaaaggacttct

SEQ ID NO: 5127317 - DNA, 25 bp, Homo sapien
cagagatatgtatgggtaattcaca

SEQ ID NO: 5127318 - DNA, 25 bp, Homo sapien
cactttcaggtagaacacagcatgt

SEQ ID NO: 5127319 - DNA, 25 bp, Homo sapien
gaaagctaacactttcaggtagaac

SEQ ID NO: 5127320 - DNA, 25 bp, Homo sapien
tttctttgaaatgcgaaaatgttca

SEQ ID NO: 5127321 - DNA, 25 bp, Homo sapien
tctttgaaatgcgaaaatgttcatg

SEQ ID NO: 5127322 - DNA, 25 bp, Homo sapien
ttattctgttgtaatggtttcaagt

SEQ ID NO: 5127323 - DNA, 25 bp, Homo sapien
tattctgttgtaatggtttcaagta

SEQ ID NO: 5127324 - DNA, 25 bp, Homo sapien
tgtaacaaacttaaacatgtatccc

SEQ ID NO: 5127325 - DNA, 25 bp, Homo sapien
tgacttcctgaagttagagtttgaa

SEQ ID NO: 5127326 - DNA, 25 bp, Homo sapien
tgaacctaaaagctaaaaagcacca

SEQ ID NO: 5127327 - DNA, 25 bp, Homo sapien
taataggagatagaaatgtttaacc

SEQ ID NO: 5127328 - DNA, 25 bp, Homo sapien
atatgacaggttaaatgttggaccc

SEQ ID NO: 5127329 - DNA, 25 bp, Homo sapien
tatgacaggttaaatgttggaccca

SEQ ID NO: 5127330 - DNA, 25 bp, Homo sapien
aatatgacaggttaaatgttggacc

SEQ ID NO: 5127331 - DNA, 25 bp, Homo sapien
tgacaggttaaatgttggacccaat

SEQ ID NO: 5127332 - DNA, 25 bp, Homo sapien
tgtaagtttttagctatggaaagca

SEQ ID NO: 5127333 - DNA, 25 bp, Homo sapien
gaactaacacctttcttgcatggat

SEQ ID NO: 5127334 - DNA, 25 bp, Homo sapien
gactatgaagtcaagtctagctaac

SEQ ID NO: 5127335 - DNA, 25 bp, Homo sapien
gaaaatgtatagagatcagaagaac

SEQ ID NO: 5127336 - DNA, 25 bp, Homo sapien
acctacagccccctgaggaccacag

SEQ ID NO: 5127337 - DNA, 25 bp, Homo sapien
cctgcccggcccatcttcgctgagg

SEQ ID NO: 5127338 - DNA, 25 bp, Homo sapien
aggaccacagcctcctctaccgcca

SEQ ID NO: 5127339 - DNA, 25 bp, Homo sapien
ctcctctaccgccagccgccccgcc

SEQ ID NO: 5127340 - DNA, 25 bp, Homo sapien
tagtagtaggtgcagcagccagtct

SEQ ID NO: 5127341 - DNA, 25 bp, Homo sapien
ctctcacagaggtagggctggttgt

SEQ ID NO: 5127342 - DNA, 25 bp, Homo sapien
agcctgagtttagctcgtcggtggc

SEQ ID NO: 5127343 - DNA, 25 bp, Homo sapien
gggctggttgttcactcctgggcac

SEQ ID NO: 5127344 - DNA, 25 bp, Homo sapien
gaaggtcaagcagtgaaccggtagg

SEQ ID NO: 5127345 - DNA, 25 bp, Homo sapien
gtgcctgggcggtgaaccacatcct

SEQ ID NO: 5127346 - DNA, 25 bp, Homo sapien
gtgaaccacatcctcgtaggctggg

SEQ ID NO: 5127347 - DNA, 25 bp, Homo sapien
tcaagcagtgaaccggtagggaaag

SEQ ID NO: 5127348 - DNA, 25 bp, Homo sapien
ccggagtcgccagttaaacggcgat

SEQ ID NO: 5127349 - DNA, 25 bp, Homo sapien
gaggaaacaccttccacatttgttc

SEQ ID NO: 5127350 - DNA, 25 bp, Homo sapien
cagttaaacggcgatagcggcagga

SEQ ID NO: 5127351 - DNA, 25 bp, Homo sapien
tgggaggaaacaccttccacatttg

SEQ ID NO: 5127352 - DNA, 25 bp, Homo sapien
acacggggagtagtcctccagatct

SEQ ID NO: 5127353 - DNA, 25 bp, Homo sapien
gcacacggggagtagtcctccagat

SEQ ID NO: 5127354 - DNA, 25 bp, Homo sapien
ctggcagggtggcactaaccctcac

SEQ ID NO: 5127355 - DNA, 25 bp, Homo sapien
agtgcacacggggagtagtcctcca

SEQ ID NO: 5127356 - DNA, 25 bp, Homo sapien
aagctagcacagtcccccaatactg

SEQ ID NO: 5127357 - DNA, 25 bp, Homo sapien
gggcaagtaacccatccaccctctc

SEQ ID NO: 5127358 - DNA, 25 bp, Homo sapien
tgcgggggtaaagctagcacagtcc

SEQ ID NO: 5127359 - DNA, 25 bp, Homo sapien
caagtaacccatccaccctctcaaa

SEQ ID NO: 5127360 - DNA, 25 bp, Homo sapien
aaatagagcagttggcaggatctgc

SEQ ID NO: 5127361 - DNA, 25 bp, Homo sapien
ggtgtcgagtagtgggtgtctccca

SEQ ID NO: 5127362 - DNA, 25 bp, Homo sapien
gcatcccgccggccgagttttgaaa

SEQ ID NO: 5127363 - DNA, 25 bp, Homo sapien
ccggccgagttttgaaaatagagca

SEQ ID NO: 5127364 - DNA, 25 bp, Homo sapien
gatattacataataagcacagatac

SEQ ID NO: 5127365 - DNA, 25 bp, Homo sapien
ttttgttctcaggaagtggatgtgt

SEQ ID NO: 5127366 - DNA, 25 bp, Homo sapien
tgttctcaggaagtggatgtgtcag

SEQ ID NO: 5127367 - DNA, 25 bp, Homo sapien
actacccttgatcttgggtagaagc

SEQ ID NO: 5127368 - DNA, 25 bp, Homo sapien
tcttcttgctagactatcaggaggc

SEQ ID NO: 5127369 - DNA, 25 bp, Homo sapien
tcaggaggcacacgattgcaatttg

SEQ ID NO: 5127370 - DNA, 25 bp, Homo sapien
tattcaagttttgccaagtcaggat

SEQ ID NO: 5127371 - DNA, 25 bp, Homo sapien
aactatgggcacacaaaacgttgat

SEQ ID NO: 5127372 - DNA, 25 bp, Homo sapien
cttcattacctctgaatggagtgac

SEQ ID NO: 5127373 - DNA, 25 bp, Homo sapien
cctctgaatggagtgacattaaaaa

SEQ ID NO: 5127374 - DNA, 25 bp, Homo sapien
tgaatggagtgacattaaaaaatgt

SEQ ID NO: 5127375 - DNA, 25 bp, Homo sapien
cattacctctgaatggagtgacatt

SEQ ID NO: 5127376 - DNA, 25 bp, Homo sapien
agagtaggctcggacactccagcgc

SEQ ID NO: 5127377 - DNA, 25 bp, Homo sapien
gaaggtttgcggacagaaaatggaa

SEQ ID NO: 5127378 - DNA, 25 bp, Homo sapien
cacctccacttgtcacgatatacag

SEQ ID NO: 5127379 - DNA, 25 bp, Homo sapien
cactccagcgcagtcacacggtgga

SEQ ID NO: 5127380 - DNA, 25 bp, Homo sapien
aaagtgtttagcatgcttgctctcc

SEQ ID NO: 5127381 - DNA, 25 bp, Homo sapien
ggattaatgacctttgcacaatctg

SEQ ID NO: 5127382 - DNA, 25 bp, Homo sapien
aaaaagccgagatgtagtctctaag

SEQ ID NO: 5127383 - DNA, 25 bp, Homo sapien
tgctctccaacacagaaattgcttt

SEQ ID NO: 5127384 - DNA, 25 bp, Homo sapien
caagaaggtgactatagttcatgta

SEQ ID NO: 5127385 - DNA, 25 bp, Homo sapien
accagaggctgggtggtagggttgg

SEQ ID NO: 5127386 - DNA, 25 bp, Homo sapien
tgcacaagaaggtgactatagttca

SEQ ID NO: 5127387 - DNA, 25 bp, Homo sapien
gactatagttcatgtatattcaaaa

SEQ ID NO: 5127388 - DNA, 25 bp, Homo sapien
gaggcaggagaatcacgctctggcc

SEQ ID NO: 5127389 - DNA, 25 bp, Homo sapien
acgctctggcctgggtgacagagcc

SEQ ID NO: 5127390 - DNA, 25 bp, Homo sapien
gctctggcctgggtgacagagccag

SEQ ID NO: 5127391 - DNA, 25 bp, Homo sapien
ggcaggagaatcacgctctggcctg

SEQ ID NO: 5127392 - DNA, 25 bp, Homo sapien
catgtctgtctttcgctcagcgtga

SEQ ID NO: 5127393 - DNA, 25 bp, Homo sapien
tgttcagctgtggatggacattaga

SEQ ID NO: 5127394 - DNA, 25 bp, Homo sapien
ctcagcgtgatggttttgagattca

SEQ ID NO: 5127395 - DNA, 25 bp, Homo sapien
tgtgaacattcatagacaaatctgc

SEQ ID NO: 5127396 - DNA, 25 bp, Homo sapien
ctaagatttataggcccgtcttgat

SEQ ID NO: 5127397 - DNA, 25 bp, Homo sapien
taggcccgtcttgatagtgatctgg

SEQ ID NO: 5127398 - DNA, 25 bp, Homo sapien
tcctctaatttagagacggaggtct

SEQ ID NO: 5127399 - DNA, 25 bp, Homo sapien
ccctataagacaagcttctaagatt

SEQ ID NO: 5127400 - DNA, 25 bp, Homo sapien
ccttgattatccatgatatcctgca

SEQ ID NO: 5127401 - DNA, 25 bp, Homo sapien
gggtgacaggaacaggtgtcctcct

SEQ ID NO: 5127402 - DNA, 25 bp, Homo sapien
cctccttgattatccatgatatcct

SEQ ID NO: 5127403 - DNA, 25 bp, Homo sapien
aggtgtcctccttgattatccatga

SEQ ID NO: 5127404 - DNA, 25 bp, Homo sapien
ggttttagtaagcatccaggcacct

SEQ ID NO: 5127405 - DNA, 25 bp, Homo sapien
aggccagcgcggcagttatttaaca

SEQ ID NO: 5127406 - DNA, 25 bp, Homo sapien
ggccagcgcggcagttatttaacac

SEQ ID NO: 5127407 - DNA, 25 bp, Homo sapien
tcaggccagcgcggcagttatttaa

SEQ ID NO: 5127408 - DNA, 25 bp, Homo sapien
ctgtcaggccagcgcggcagttatt

SEQ ID NO: 5127409 - DNA, 25 bp, Homo sapien
tcctttgccctcagcggtgaagacc

SEQ ID NO: 5127410 - DNA, 25 bp, Homo sapien
ttgccctcagcggtgaagacctcca

SEQ ID NO: 5127411 - DNA, 25 bp, Homo sapien
tgtcaaaaaccactgcggaataagc

SEQ ID NO: 5127412 - DNA, 25 bp, Homo sapien
gcccgctcagcaaagatgatatctg

SEQ ID NO: 5127413 - DNA, 25 bp, Homo sapien
gagtacctgcttttccgaccatcaa

SEQ ID NO: 5127414 - DNA, 25 bp, Homo sapien
cttttccgaccatcaaaggtgaaga

SEQ ID NO: 5127415 - DNA, 25 bp, Homo sapien
ttccgaccatcaaaggtgaagagat

SEQ ID NO: 5127416 - DNA, 25 bp, Homo sapien
acctgcttttccgaccatcaaaggt

SEQ ID NO: 5127417 - DNA, 25 bp, Homo sapien
gctcacggacagataaatgcaaaga

SEQ ID NO: 5127418 - DNA, 25 bp, Homo sapien
ttgctcacggacagataaatgcaaa

SEQ ID NO: 5127419 - DNA, 25 bp, Homo sapien
tgctcacggacagataaatgcaaag

SEQ ID NO: 5127420 - DNA, 25 bp, Homo sapien
ttggcctgcagccttgaatgtgccc

SEQ ID NO: 5127421 - DNA, 25 bp, Homo sapien
cagccttgaatgtgccctgctccag

SEQ ID NO: 5127422 - DNA, 25 bp, Homo sapien
cctgcagccttgaatgtgccctgct

SEQ ID NO: 5127423 - DNA, 25 bp, Homo sapien
tggcctgcagccttgaatgtgccct

SEQ ID NO: 5127424 - DNA, 25 bp, Homo sapien
caccagctcattccaggcagctgcc

SEQ ID NO: 5127425 - DNA, 25 bp, Homo sapien
ggcagctgccagagaggaagacagc

SEQ ID NO: 5127426 - DNA, 25 bp, Homo sapien
ccccagcaccagctcattccaggca

SEQ ID NO: 5127427 - DNA, 25 bp, Homo sapien
gctgccagagaggaagacagcccag

SEQ ID NO: 5127428 - DNA, 25 bp, Homo sapien
atctgcctcaagtcaggattgcatt

SEQ ID NO: 5127429 - DNA, 25 bp, Homo sapien
tccaagacggctccaaatcttgtct

SEQ ID NO: 5127430 - DNA, 25 bp, Homo sapien
gtaaattggattccaagacggctcc

SEQ ID NO: 5127431 - DNA, 25 bp, Homo sapien
ttgcagtccattagcaggaactgga

SEQ ID NO: 5127432 - DNA, 25 bp, Homo sapien
tgaaaaccatttccgtgatgtgcag

SEQ ID NO: 5127433 - DNA, 25 bp, Homo sapien
aaaaccatttccgtgatgtgcaggg

SEQ ID NO: 5127434 - DNA, 25 bp, Homo sapien
ttccgtgatgtgcaggggagcgctg

SEQ ID NO: 5127435 - DNA, 25 bp, Homo sapien
ccgtgatgtgcaggggagcgctgag

SEQ ID NO: 5127436 - DNA, 25 bp, Homo sapien
tgaagcaggtgtggcacacaaaatt

SEQ ID NO: 5127437 - DNA, 25 bp, Homo sapien
tcccatatctcttgatggccgaaca

SEQ ID NO: 5127438 - DNA, 25 bp, Homo sapien
ggtcgcagtaatgggcaaacttgca

SEQ ID NO: 5127439 - DNA, 25 bp, Homo sapien
cacagcgatggagcttctcctgcct

SEQ ID NO: 5127440 - DNA, 25 bp, Homo sapien
ctgcggcggccagtactgcaagaat

SEQ ID NO: 5127441 - DNA, 25 bp, Homo sapien
tccacgtggttctgcaagtcgtcca

SEQ ID NO: 5127442 - DNA, 25 bp, Homo sapien
tgtactgcatgctgaactgctggct

SEQ ID NO: 5127443 - DNA, 25 bp, Homo sapien
ccgaagatgtgcgagatgtactgca

SEQ ID NO: 5127444 - DNA, 25 bp, Homo sapien
tctgatcactgagagtaaaaccgtt

SEQ ID NO: 5127445 - DNA, 25 bp, Homo sapien
aacagtcatggttcaccaggcccag

SEQ ID NO: 5127446 - DNA, 25 bp, Homo sapien
tatgacagtacagttgggccaacag

SEQ ID NO: 5127447 - DNA, 25 bp, Homo sapien
gggaagatgcctacgcccacggcct

SEQ ID NO: 5127448 - DNA, 25 bp, Homo sapien
ctgggtatgaaacatggatttcact

SEQ ID NO: 5127449 - DNA, 25 bp, Homo sapien
gggtatgaaacatggatttcactgc

SEQ ID NO: 5127450 - DNA, 25 bp, Homo sapien
gtatgaaacatggatttcactgcct

SEQ ID NO: 5127451 - DNA, 25 bp, Homo sapien
tctgggtatgaaacatggatttcac

SEQ ID NO: 5127452 - DNA, 25 bp, Homo sapien
tcttcactaacgttgaggaagtcaa

SEQ ID NO: 5127453 - DNA, 25 bp, Homo sapien
gaagtcaatataggacacagtcagc

SEQ ID NO: 5127454 - DNA, 25 bp, Homo sapien
cccaggaagaggtcatccttcagtt

SEQ ID NO: 5127455 - DNA, 25 bp, Homo sapien
tgttcacatgtgcagtcaaagtagt

SEQ ID NO: 5127456 - DNA, 25 bp, Homo sapien
tgatacaaaccctcggaacgagcct

SEQ ID NO: 5127457 - DNA, 25 bp, Homo sapien
gagccttgtctatcttttccaatgt

SEQ ID NO: 5127458 - DNA, 25 bp, Homo sapien
ctcatgatacaaaccctcggaacga

SEQ ID NO: 5127459 - DNA, 25 bp, Homo sapien
ccctcggaacgagccttgtctatct

SEQ ID NO: 5127460 - DNA, 25 bp, Homo sapien
tcagcatccgcagcatgtagatgtt

SEQ ID NO: 5127461 - DNA, 25 bp, Homo sapien
tgtagatgttggtgtcagcaaacac

SEQ ID NO: 5127462 - DNA, 25 bp, Homo sapien
taggaaaggacctccgaaacaatgc

SEQ ID NO: 5127463 - DNA, 25 bp, Homo sapien
ggcactcccggcataatttcacaac

SEQ ID NO: 5127464 - DNA, 25 bp, Homo sapien
ccatgcccagttgggcattgttggg

SEQ ID NO: 5127465 - DNA, 25 bp, Homo sapien
cacggccatgcccagttgggcattg

SEQ ID NO: 5127466 - DNA, 25 bp, Homo sapien
ggcattgttggggtggtagagcttc

SEQ ID NO: 5127467 - DNA, 25 bp, Homo sapien
cggccatgcccagttgggcattgtt

SEQ ID NO: 5127468 - DNA, 25 bp, Homo sapien
tcaatgttaccagcatgccagttgg

SEQ ID NO: 5127469 - DNA, 25 bp, Homo sapien
gccagttggtcagccctgcccgcat

SEQ ID NO: 5127470 - DNA, 25 bp, Homo sapien
ctcaatgttaccagcatgccagttg

SEQ ID NO: 5127471 - DNA, 25 bp, Homo sapien
ctttgcagatcatcccgtgccccac

SEQ ID NO: 5127472 - DNA, 25 bp, Homo sapien
taggctttgcagatcatcccgtgcc

SEQ ID NO: 5127473 - DNA, 25 bp, Homo sapien
gaatggcataggctttgcagatcat

SEQ ID NO: 5127474 - DNA, 25 bp, Homo sapien
caggagaatggcataggctttgcag

SEQ ID NO: 5127475 - DNA, 25 bp, Homo sapien
ctaagtccttagtgatggggtggga

SEQ ID NO: 5127476 - DNA, 25 bp, Homo sapien
ctctaagtccttagtgatggggtgg

SEQ ID NO: 5127477 - DNA, 25 bp, Homo sapien
atggggtgggagggtccgtgtgtca

SEQ ID NO: 5127478 - DNA, 25 bp, Homo sapien
tggggtgggagggtccgtgtgtcac

SEQ ID NO: 5127479 - DNA, 25 bp, Homo sapien
ccatcctcagaaagctcaggccagg

SEQ ID NO: 5127480 - DNA, 25 bp, Homo sapien
ctcaggccaggaagggaacaccagc

SEQ ID NO: 5127481 - DNA, 25 bp, Homo sapien
aggaagggaacaccagcctcaagac

SEQ ID NO: 5127482 - DNA, 25 bp, Homo sapien
actcccatcctcagaaagctcaggc

SEQ ID NO: 5127483 - DNA, 25 bp, Homo sapien
tagtacatgaattcgttctggcgga

SEQ ID NO: 5127484 - DNA, 25 bp, Homo sapien
gcagcctcgcgcatcttgtagtaca

SEQ ID NO: 5127485 - DNA, 25 bp, Homo sapien
gatggctcattgctgggctcggcca

SEQ ID NO: 5127486 - DNA, 25 bp, Homo sapien
ttctggcggaacatgcgtagctcca

SEQ ID NO: 5127487 - DNA, 25 bp, Homo sapien
caggagatcgggataaattggccac

SEQ ID NO: 5127488 - DNA, 25 bp, Homo sapien
tgcagggcccatgatcaacaggtat

SEQ ID NO: 5127489 - DNA, 25 bp, Homo sapien
taaaatcacagggaaccacaaggct

SEQ ID NO: 5127490 - DNA, 25 bp, Homo sapien
gagataacaaacgtgggacctggtg

SEQ ID NO: 5127491 - DNA, 25 bp, Homo sapien
tttactgattgcacctgagaaggcc

SEQ ID NO: 5127492 - DNA, 25 bp, Homo sapien
gatcatcacagggaagtgggtcacc

SEQ ID NO: 5127493 - DNA, 25 bp, Homo sapien
tccctgggagaaagttagtgccgtc

SEQ ID NO: 5127494 - DNA, 25 bp, Homo sapien
tgagaatcatcagccctaaggtggt

SEQ ID NO: 5127495 - DNA, 25 bp, Homo sapien
tcaagtctgtgaccgaactcaacgg

SEQ ID NO: 5127496 - DNA, 25 bp, Homo sapien
ctagaggcttgggatcataggaacc

SEQ ID NO: 5127497 - DNA, 25 bp, Homo sapien
tttggagccagagaactagaggctt

SEQ ID NO: 5127498 - DNA, 25 bp, Homo sapien
gggccacttaggtgttccatgctca

SEQ ID NO: 5127499 - DNA, 25 bp, Homo sapien
ggcatacagcaggattctaagtctc

SEQ ID NO: 5127500 - DNA, 25 bp, Homo sapien
tgatccaaaacgaattcacggtggg

SEQ ID NO: 5127501 - DNA, 25 bp, Homo sapien
aggtctgccggaagagctcatccag

SEQ ID NO: 5127502 - DNA, 25 bp, Homo sapien
caaaggcagctcttagggaagaatc

SEQ ID NO: 5127503 - DNA, 25 bp, Homo sapien
tctcgctgacacacgggtctgaggt

SEQ ID NO: 5127504 - DNA, 25 bp, Homo sapien
cagcttggctctcgctgacacacgg

SEQ ID NO: 5127505 - DNA, 25 bp, Homo sapien
tctcccaggcagctaatccagtcat

SEQ ID NO: 5127506 - DNA, 25 bp, Homo sapien
tgtctcccaggcagctaatccagtc

SEQ ID NO: 5127507 - DNA, 25 bp, Homo sapien
ctggggaaccctgtagggaatgcat

SEQ ID NO: 5127508 - DNA, 25 bp, Homo sapien
tagggaatgcatccccacagacact

SEQ ID NO: 5127509 - DNA, 25 bp, Homo sapien
gtagggaatgcatccccacagacac

SEQ ID NO: 5127510 - DNA, 25 bp, Homo sapien
tcctccaaagcccttcctaggatgt

SEQ ID NO: 5127511 - DNA, 25 bp, Homo sapien
tccaaagcccttcctaggatgtcta

SEQ ID NO: 5127512 - DNA, 25 bp, Homo sapien
ttgaattcctccaaagcccttccta

SEQ ID NO: 5127513 - DNA, 25 bp, Homo sapien
agcccttcctaggatgtctagggac

SEQ ID NO: 5127514 - DNA, 25 bp, Homo sapien
gatacttgacatttgcgatcaaggg

SEQ ID NO: 5127515 - DNA, 25 bp, Homo sapien
cagacatccctttatctgagcggga

SEQ ID NO: 5127516 - DNA, 25 bp, Homo sapien
tggagaagctttcatgacgctcctt

SEQ ID NO: 5127517 - DNA, 25 bp, Homo sapien
tgtggaatgtataagccagacatcc

SEQ ID NO: 5127518 - DNA, 25 bp, Homo sapien
caaggcttcactggttgtgccaggc

SEQ ID NO: 5127519 - DNA, 25 bp, Homo sapien
ggcccttgaccaacctctgggtcag

SEQ ID NO: 5127520 - DNA, 25 bp, Homo sapien
aactgtcaaggcttcactggttgtg

SEQ ID NO: 5127521 - DNA, 25 bp, Homo sapien
tgccaggcccttgaccaacctctgg

SEQ ID NO: 5127522 - DNA, 25 bp, Homo sapien
gttgcggtttgcacatcctgaaatt

SEQ ID NO: 5127523 - DNA, 25 bp, Homo sapien
ttttgttgcggtttgcacatcctga

SEQ ID NO: 5127524 - DNA, 25 bp, Homo sapien
ttttttgttgcggtttgcacatcct

SEQ ID NO: 5127525 - DNA, 25 bp, Homo sapien
atagttttttgttgcggtttgcaca

SEQ ID NO: 5127526 - DNA, 25 bp, Homo sapien
tgggttctgtcttgattacatcagc

SEQ ID NO: 5127527 - DNA, 25 bp, Homo sapien
ttacagccaaaataggaacctaatg

SEQ ID NO: 5127528 - DNA, 25 bp, Homo sapien
accaggcttgcaggtaagttttggg

SEQ ID NO: 5127529 - DNA, 25 bp, Homo sapien
gctgacacatgattgccactgcctg

SEQ ID NO: 5127530 - DNA, 25 bp, Homo sapien
tatatgcccactctgggaaagcatg

SEQ ID NO: 5127531 - DNA, 25 bp, Homo sapien
acctccctctcactagctagtgtgg

SEQ ID NO: 5127532 - DNA, 25 bp, Homo sapien
catctcaattgctgatatatgccca

SEQ ID NO: 5127533 - DNA, 25 bp, Homo sapien
agctagtgtggtcccctctccagcg

SEQ ID NO: 5127534 - DNA, 25 bp, Homo sapien
gtgagctagttcttgggaccctggc

SEQ ID NO: 5127535 - DNA, 25 bp, Homo sapien
ggaccctggctaggacacatgagtg

SEQ ID NO: 5127536 - DNA, 25 bp, Homo sapien
catgagtgtccaaagtggtgatggc

SEQ ID NO: 5127537 - DNA, 25 bp, Homo sapien
cagtgagatgagtaggacagtcctt

SEQ ID NO: 5127538 - DNA, 25 bp, Homo sapien
tacaatgctacaaaatactataact

SEQ ID NO: 5127539 - DNA, 25 bp, Homo sapien
tattaattatattcactctacaatg

SEQ ID NO: 5127540 - DNA, 25 bp, Homo sapien
tactctctaccttttataagctcaa

SEQ ID NO: 5127541 - DNA, 25 bp, Homo sapien
tctactcagcacttaataaccacag

SEQ ID NO: 5127542 - DNA, 25 bp, Homo sapien
gaactggtcccagcacaccagtgat

SEQ ID NO: 5127543 - DNA, 25 bp, Homo sapien
aaagcctccacaattcgcatcgcca

SEQ ID NO: 5127544 - DNA, 25 bp, Homo sapien
ttcgcatcgccattccaccattcat

SEQ ID NO: 5127545 - DNA, 25 bp, Homo sapien
ctggtcccagcacaccagtgattaa

SEQ ID NO: 5127546 - DNA, 25 bp, Homo sapien
cttccacggacctctcccacaagcc

SEQ ID NO: 5127547 - DNA, 25 bp, Homo sapien
gggccggagctagggttctcagctt

SEQ ID NO: 5127548 - DNA, 25 bp, Homo sapien
ggggccggagctagggttctcagct

SEQ ID NO: 5127549 - DNA, 25 bp, Homo sapien
cgtccctgacggtgcggtggggctt

SEQ ID NO: 5127550 - DNA, 25 bp, Homo sapien
ctgcccgggctgcgaatgtgcgcac

SEQ ID NO: 5127551 - DNA, 25 bp, Homo sapien
gcgcgaggcccggtgcgcagcaggg

SEQ ID NO: 5127552 - DNA, 25 bp, Homo sapien
ggcgcgaggcccggtgcgcagcagg

SEQ ID NO: 5127553 - DNA, 25 bp, Homo sapien
gcgaggcccggtgcgcagcagggct

SEQ ID NO: 5127554 - DNA, 25 bp, Homo sapien
tctatgagggctccaagcatgggat

SEQ ID NO: 5127555 - DNA, 25 bp, Homo sapien
gaaaataggagtagcccgaaggctg

SEQ ID NO: 5127556 - DNA, 25 bp, Homo sapien
gcctaaatcctcaagggactcgcag

SEQ ID NO: 5127557 - DNA, 25 bp, Homo sapien
tcccgcagaaaacgcaaagcatcag

SEQ ID NO: 5127558 - DNA, 25 bp, Homo sapien
cccctcacgcaacaggactgtccct

SEQ ID NO: 5127559 - DNA, 25 bp, Homo sapien
ggggcagcattcccaggccaattca

SEQ ID NO: 5127560 - DNA, 25 bp, Homo sapien
cttccaggggcagcattcccaggcc

SEQ ID NO: 5127561 - DNA, 25 bp, Homo sapien
caggggcagcattcccaggccaatt

SEQ ID NO: 5127562 - DNA, 25 bp, Homo sapien
gaggatatggaacaactgtccagga

SEQ ID NO: 5127563 - DNA, 25 bp, Homo sapien
aaggaggatatggaacaactgtcca

SEQ ID NO: 5127564 - DNA, 25 bp, Homo sapien
ggatatggaacaactgtccaggaac

SEQ ID NO: 5127565 - DNA, 25 bp, Homo sapien
aggagctggcctgatgagcacatac

SEQ ID NO: 5127566 - DNA, 25 bp, Homo sapien
gatacaaggtcactccgtatgggag

SEQ ID NO: 5127567 - DNA, 25 bp, Homo sapien
tgccaaagaaaccatcgcaggagtg

SEQ ID NO: 5127568 - DNA, 25 bp, Homo sapien
tatgctgggacaatggtataagcca

SEQ ID NO: 5127569 - DNA, 25 bp, Homo sapien
gagttagagccaacgcaaactgccc

SEQ ID NO: 5127570 - DNA, 25 bp, Homo sapien
ggccctggctttgacgccccacagt

SEQ ID NO: 5127571 - DNA, 25 bp, Homo sapien
ccctggctttgacgccccacagtaa

SEQ ID NO: 5127572 - DNA, 25 bp, Homo sapien
tgacagtgaatttaggggccctggc

SEQ ID NO: 5127573 - DNA, 25 bp, Homo sapien
gctgggcttgaactctgaacacctt

SEQ ID NO: 5127574 - DNA, 25 bp, Homo sapien
ggcgaaagaccaacgcacagagtca

SEQ ID NO: 5127575 - DNA, 25 bp, Homo sapien
acagagtcatacacccctttcaggg

SEQ ID NO: 5127576 - DNA, 25 bp, Homo sapien
tgttggaatcaacctcagagcgtta

SEQ ID NO: 5127577 - DNA, 25 bp, Homo sapien
tcaagagagtctaacgtgcagccag

SEQ ID NO: 5127578 - DNA, 25 bp, Homo sapien
aactgccagcttgatatccctcttg

SEQ ID NO: 5127579 - DNA, 25 bp, Homo sapien
gagcatgccgggaaaagagaaagct

SEQ ID NO: 5127580 - DNA, 25 bp, Homo sapien
gcttggtcctcaccaatgagaaaga

SEQ ID NO: 5127581 - DNA, 25 bp, Homo sapien
ctcctgtcttcagggagagggtatc

SEQ ID NO: 5127582 - DNA, 25 bp, Homo sapien
aagtctcatgccagcttcatctaca

SEQ ID NO: 5127583 - DNA, 25 bp, Homo sapien
caatcaaaatgaggcaattccactg

SEQ ID NO: 5127584 - DNA, 25 bp, Homo sapien
caactgtgtaaatcatgattccacc

SEQ ID NO: 5127585 - DNA, 25 bp, Homo sapien
tggcagtcctgtatcaagtctcatg

SEQ ID NO: 5127586 - DNA, 25 bp, Homo sapien
ccccaccgggcaaagccaaagcaca

SEQ ID NO: 5127587 - DNA, 25 bp, Homo sapien
cagtctccggggcacatgtcccaga

SEQ ID NO: 5127588 - DNA, 25 bp, Homo sapien
cacagtctcacagttagcctctaga

SEQ ID NO: 5127589 - DNA, 25 bp, Homo sapien
cagttagcctctagaccaccagtct

SEQ ID NO: 5127590 - DNA, 25 bp, Homo sapien
tgcagagaggacagtcccagaagca

SEQ ID NO: 5127591 - DNA, 25 bp, Homo sapien
gcagagaggacagtcccagaagcac

SEQ ID NO: 5127592 - DNA, 25 bp, Homo sapien
ctgcagagaggacagtcccagaagc

SEQ ID NO: 5127593 - DNA, 25 bp, Homo sapien
tcaaagttgacccgtggggctacgc

SEQ ID NO: 5127594 - DNA, 25 bp, Homo sapien
aggcccccgtcaggtgcatagccag

SEQ ID NO: 5127595 - DNA, 25 bp, Homo sapien
gctacgcccctggtgctgacatacc

SEQ ID NO: 5127596 - DNA, 25 bp, Homo sapien
cttcaggcataaagaggcccccgtc

SEQ ID NO: 5127597 - DNA, 25 bp, Homo sapien
actggcacagggtccctctgtccaa

SEQ ID NO: 5127598 - DNA, 25 bp, Homo sapien
cacagggtccctctgtccaactgtg

SEQ ID NO: 5127599 - DNA, 25 bp, Homo sapien
gtccctctgtccaactgtgggagct

SEQ ID NO: 5127600 - DNA, 25 bp, Homo sapien
gccaggataggagagtgtgctccac

SEQ ID NO: 5127601 - DNA, 25 bp, Homo sapien
taattcatcttttggaaggagctca

SEQ ID NO: 5127602 - DNA, 25 bp, Homo sapien
aaggagctcagagccaatgaagagg

SEQ ID NO: 5127603 - DNA, 25 bp, Homo sapien
gctcagagccaatgaagagggcaca

SEQ ID NO: 5127604 - DNA, 25 bp, Homo sapien
tttaattcatcttttggaaggagct

SEQ ID NO: 5127605 - DNA, 25 bp, Homo sapien
gatgattctaaaatccctagtgttg

SEQ ID NO: 5127606 - DNA, 25 bp, Homo sapien
ataaaatagcaatttgggggtctgg

SEQ ID NO: 5127607 - DNA, 25 bp, Homo sapien
ggtctgggtgctttatgtgaaggaa

SEQ ID NO: 5127608 - DNA, 25 bp, Homo sapien
ccaacattcaagtcactcaagatga

SEQ ID NO: 5127609 - DNA, 25 bp, Homo sapien
catatgtgacgccatgccacagctc

SEQ ID NO: 5127610 - DNA, 25 bp, Homo sapien
gacagggacaggtccttaaatgcat

SEQ ID NO: 5127611 - DNA, 25 bp, Homo sapien
tggacagatggaccacttctctgtg

SEQ ID NO: 5127612 - DNA, 25 bp, Homo sapien
aactgtgttgtgcaggacagggaca

SEQ ID NO: 5127613 - DNA, 25 bp, Homo sapien
gttctttgccccttgaacactctca

SEQ ID NO: 5127614 - DNA, 25 bp, Homo sapien
ttgaacactctcaatggcagcactt

SEQ ID NO: 5127615 - DNA, 25 bp, Homo sapien
actctcaatggcagcacttcctgtg

SEQ ID NO: 5127616 - DNA, 25 bp, Homo sapien
gaacactctcaatggcagcacttcc

SEQ ID NO: 5127617 - DNA, 25 bp, Homo sapien
gagctcctgaatctttgtgcagtga

SEQ ID NO: 5127618 - DNA, 25 bp, Homo sapien
gcttcagcaccgttgtcatctggag

SEQ ID NO: 5127619 - DNA, 25 bp, Homo sapien
tcctgaatctttgtgcagtgacctt

SEQ ID NO: 5127620 - DNA, 25 bp, Homo sapien
ctccaaacacatgtacgttctgctt

SEQ ID NO: 5127621 - DNA, 25 bp, Homo sapien
caggagcctgaatcttgtgcactaa

SEQ ID NO: 5127622 - DNA, 25 bp, Homo sapien
tacaggattatcacaggaagccagg

SEQ ID NO: 5127623 - DNA, 25 bp, Homo sapien
cactggcaagtgtatgcacctgcta

SEQ ID NO: 5127624 - DNA, 25 bp, Homo sapien
gaagccaggccagttgtagaaggaa

SEQ ID NO: 5127625 - DNA, 25 bp, Homo sapien
aagccacatcggcaaacacagtctt

SEQ ID NO: 5127626 - DNA, 25 bp, Homo sapien
cttgatcggctcatcgagctcatcg

SEQ ID NO: 5127627 - DNA, 25 bp, Homo sapien
cacagtcttgatcggctcatcgagc

SEQ ID NO: 5127628 - DNA, 25 bp, Homo sapien
tcggcaaacacagtcttgatcggct

SEQ ID NO: 5127629 - DNA, 25 bp, Homo sapien
cgggaccagttgatcgaattcaggc

SEQ ID NO: 5127630 - DNA, 25 bp, Homo sapien
taagcaaagaagtgatgggccatct

SEQ ID NO: 5127631 - DNA, 25 bp, Homo sapien
aggttaccggcagcccctgttggca

SEQ ID NO: 5127632 - DNA, 25 bp, Homo sapien
ggcgtacactggaagtaagcaaaga

SEQ ID NO: 5127633 - DNA, 25 bp, Homo sapien
aaagtccacatttctgattgagggc

SEQ ID NO: 5127634 - DNA, 25 bp, Homo sapien
gtccaggaatgggaacaaatgtgcc

SEQ ID NO: 5127635 - DNA, 25 bp, Homo sapien
ccctcacattgggtagctggccagg

SEQ ID NO: 5127636 - DNA, 25 bp, Homo sapien
caaatgtgccagtcaagccgcttgc

SEQ ID NO: 5127637 - DNA, 25 bp, Homo sapien
aaggttgatttaacagcctcagaga

SEQ ID NO: 5127638 - DNA, 25 bp, Homo sapien
actgccacgaccagacggatgggca

SEQ ID NO: 5127639 - DNA, 25 bp, Homo sapien
ggttgatttaacagcctcagagaga

SEQ ID NO: 5127640 - DNA, 25 bp, Homo sapien
gatgtcattgcggttcactgccacg

SEQ ID NO: 5127641 - DNA, 25 bp, Homo sapien
ggcagattcacactttgggtccttt

SEQ ID NO: 5127642 - DNA, 25 bp, Homo sapien
ttgggcagattcacactttgggtcc

SEQ ID NO: 5127643 - DNA, 25 bp, Homo sapien
tgggcagattcacactttgggtcct

SEQ ID NO: 5127644 - DNA, 25 bp, Homo sapien
gggcagattcacactttgggtcctt

SEQ ID NO: 5127645 - DNA, 25 bp, Homo sapien
tttaggaaactagcccaatgtctca

SEQ ID NO: 5127646 - DNA, 25 bp, Homo sapien
gcaggtactcaagaaacaggtgtcc

SEQ ID NO: 5127647 - DNA, 25 bp, Homo sapien
ccgtaaaagtggtgggctcatagca

SEQ ID NO: 5127648 - DNA, 25 bp, Homo sapien
tataaacgaaggaaccaaggcacag

SEQ ID NO: 5127649 - DNA, 25 bp, Homo sapien
agggaagaaggagagcgagggagga

SEQ ID NO: 5127650 - DNA, 25 bp, Homo sapien
ggaagaaggagagcgagggaggaaa

SEQ ID NO: 5127651 - DNA, 25 bp, Homo sapien
ctatcattccaagggaataaaattt

SEQ ID NO: 5127652 - DNA, 25 bp, Homo sapien
gagagggaagaaggagagcgaggga

SEQ ID NO: 5127653 - DNA, 25 bp, Homo sapien
gaatgccattccagcaagtgaagtg

SEQ ID NO: 5127654 - DNA, 25 bp, Homo sapien
tatgtcatgcaagggaccactaaag

SEQ ID NO: 5127655 - DNA, 25 bp, Homo sapien
gaggtatgcacagtctggatggcca

SEQ ID NO: 5127656 - DNA, 25 bp, Homo sapien
cagaaggccggaattccactccagt

SEQ ID NO: 5127657 - DNA, 25 bp, Homo sapien
cctgtctatctgctggtaatggtag

SEQ ID NO: 5127658 - DNA, 25 bp, Homo sapien
tagttcacggccaccgctgagtggg

SEQ ID NO: 5127659 - DNA, 25 bp, Homo sapien
tgggtgatggcttcatccgacactg

SEQ ID NO: 5127660 - DNA, 25 bp, Homo sapien
cactgacacggatgtcactgcctct

SEQ ID NO: 5127661 - DNA, 25 bp, Homo sapien
agccattttttcgtagtcctgtctc

SEQ ID NO: 5127662 - DNA, 25 bp, Homo sapien
tatctgtcacgctccctcttctggg

SEQ ID NO: 5127663 - DNA, 25 bp, Homo sapien
acctctgaccatggctgtccctggg

SEQ ID NO: 5127664 - DNA, 25 bp, Homo sapien
ctgggatatctgtcacgctccctct

SEQ ID NO: 5127665 - DNA, 25 bp, Homo sapien
ctgctcctcctggttggaggccagc

SEQ ID NO: 5127666 - DNA, 25 bp, Homo sapien
aactgctcctcctggttggaggcca

SEQ ID NO: 5127667 - DNA, 25 bp, Homo sapien
ctggcaaactgctcctcctggttgg

SEQ ID NO: 5127668 - DNA, 25 bp, Homo sapien
gcaaactgctcctcctggttggagg

SEQ ID NO: 5127669 - DNA, 25 bp, Homo sapien
aggggcgaggcagcaccggggagtg

SEQ ID NO: 5127670 - DNA, 25 bp, Homo sapien
caggggcgaggcagcaccggggagt

SEQ ID NO: 5127671 - DNA, 25 bp, Homo sapien
cagcagccaggacagcttccgggaa

SEQ ID NO: 5127672 - DNA, 25 bp, Homo sapien
gcagccaggacagcttccgggaact

SEQ ID NO: 5127673 - DNA, 25 bp, Homo sapien
cagccaggacagcttccgggaactt

SEQ ID NO: 5127674 - DNA, 25 bp, Homo sapien
gccaggacagcttccgggaacttgg

SEQ ID NO: 5127675 - DNA, 25 bp, Homo sapien
tgtgctccagggctacgatctccgc

SEQ ID NO: 5127676 - DNA, 25 bp, Homo sapien
cagggctacgatctccgcgggagtc

SEQ ID NO: 5127677 - DNA, 25 bp, Homo sapien
gtgctccagggctacgatctccgcg

SEQ ID NO: 5127678 - DNA, 25 bp, Homo sapien
ctccagggctacgatctccgcggga

SEQ ID NO: 5127679 - DNA, 25 bp, Homo sapien
taaggtcctcaatggtgtcccgaag

SEQ ID NO: 5127680 - DNA, 25 bp, Homo sapien
tggtgtcccgaagcatcagcatcca

SEQ ID NO: 5127681 - DNA, 25 bp, Homo sapien
tcctcaatggtgtcccgaagcatca

SEQ ID NO: 5127682 - DNA, 25 bp, Homo sapien
ccactgtcggctaaggtcctcaatg

SEQ ID NO: 5127683 - DNA, 25 bp, Homo sapien
gggaggtgttgagggcatgactcct

SEQ ID NO: 5127684 - DNA, 25 bp, Homo sapien
tgggaggtgttgagggcatgactcc

SEQ ID NO: 5127685 - DNA, 25 bp, Homo sapien
cctggagccatggtcagtcctgtgc

SEQ ID NO: 5127686 - DNA, 25 bp, Homo sapien
agactagccagggaacggagcaaag

SEQ ID NO: 5127687 - DNA, 25 bp, Homo sapien
gggtgcttccggcaactgttcacag

SEQ ID NO: 5127688 - DNA, 25 bp, Homo sapien
gagaacatacaaagcctgcgtgaag

SEQ ID NO: 5127689 - DNA, 25 bp, Homo sapien
tccagggattcccaacatgtgagca

SEQ ID NO: 5127690 - DNA, 25 bp, Homo sapien
ccagggattcccaacatgtgagcag

SEQ ID NO: 5127691 - DNA, 25 bp, Homo sapien
acaagcattttattccagggattcc

SEQ ID NO: 5127692 - DNA, 25 bp, Homo sapien
tattccagggattcccaacatgtga

SEQ ID NO: 5127693 - DNA, 25 bp, Homo sapien
agcgccttcagacctcaggcaggca

SEQ ID NO: 5127694 - DNA, 25 bp, Homo sapien
tgagcagcgccttcagacctcaggc

SEQ ID NO: 5127695 - DNA, 25 bp, Homo sapien
gctgagcagcgccttcagacctcag

SEQ ID NO: 5127696 - DNA, 25 bp, Homo sapien
agcagcgccttcagacctcaggcag

SEQ ID NO: 5127697 - DNA, 25 bp, Homo sapien
gcccagtgccagttaaagaggcccg

SEQ ID NO: 5127698 - DNA, 25 bp, Homo sapien
cagtgccagttaaagaggcccggaa

SEQ ID NO: 5127699 - DNA, 25 bp, Homo sapien
cacagcagcgcccagtgccagttaa

SEQ ID NO: 5127700 - DNA, 25 bp, Homo sapien
gcagcgcccagtgccagttaaagag

SEQ ID NO: 5127701 - DNA, 25 bp, Homo sapien
tcagaatatggcagcaaaagagaag

SEQ ID NO: 5127702 - DNA, 25 bp, Homo sapien
cagaatatggcagcaaaagagaagg

SEQ ID NO: 5127703 - DNA, 25 bp, Homo sapien
tgcatacgaactcaggtctaccgga

SEQ ID NO: 5127704 - DNA, 25 bp, Homo sapien
tatggcatttgagagtttacccagc

SEQ ID NO: 5127705 - DNA, 25 bp, Homo sapien
gaaacatcatcatttggcctagcct

SEQ ID NO: 5127706 - DNA, 25 bp, Homo sapien
gctgccctgcgttacaagagactat

SEQ ID NO: 5127707 - DNA, 25 bp, Homo sapien
tttgggcaaaggcagtaagctccca

SEQ ID NO: 5127708 - DNA, 25 bp, Homo sapien
gatggccctgccctcgctgtgttgc

SEQ ID NO: 5127709 - DNA, 25 bp, Homo sapien
gcttggtatccaacactgcccagca

SEQ ID NO: 5127710 - DNA, 25 bp, Homo sapien
actgatgggtgggatctgaaagggc

SEQ ID NO: 5127711 - DNA, 25 bp, Homo sapien
ctgggtttatggcagtggcctttga

SEQ ID NO: 5127712 - DNA, 25 bp, Homo sapien
gcctttgaggaatgggtagtgggga

SEQ ID NO: 5127713 - DNA, 25 bp, Homo sapien
gtggcctttgaggaatgggtagtgg

SEQ ID NO: 5127714 - DNA, 25 bp, Homo sapien
gggtttatggcagtggcctttgagg

SEQ ID NO: 5127715 - DNA, 25 bp, Homo sapien
cattcgcagtgaaggctagatgtgg

SEQ ID NO: 5127716 - DNA, 25 bp, Homo sapien
ccggttgagcattcgcagtgaaggc

SEQ ID NO: 5127717 - DNA, 25 bp, Homo sapien
ctcctactggttcttctccggttga

SEQ ID NO: 5127718 - DNA, 25 bp, Homo sapien
ttctccggttgagcattcgcagtga

SEQ ID NO: 5127719 - DNA, 25 bp, Homo sapien
tcaagacccagaccgttcttctcca

SEQ ID NO: 5127720 - DNA, 25 bp, Homo sapien
aagacccagaccgttcttctccaca

SEQ ID NO: 5127721 - DNA, 25 bp, Homo sapien
acccagaccgttcttctccacacac

SEQ ID NO: 5127722 - DNA, 25 bp, Homo sapien
agacccagaccgttcttctccacac

SEQ ID NO: 5127723 - DNA, 25 bp, Homo sapien
cacaggccagtaaggagaagcagac

SEQ ID NO: 5127724 - DNA, 25 bp, Homo sapien
cagacagaagggacacatatacgac

SEQ ID NO: 5127725 - DNA, 25 bp, Homo sapien
gggacacatatacgacaagctggca

SEQ ID NO: 5127726 - DNA, 25 bp, Homo sapien
gaagaccatatgacatgggatgtgc

SEQ ID NO: 5127727 - DNA, 25 bp, Homo sapien
atctgagagcagaataaggtgcatt

SEQ ID NO: 5127728 - DNA, 25 bp, Homo sapien
ctgagagcagaataaggtgcattgc

SEQ ID NO: 5127729 - DNA, 25 bp, Homo sapien
gagcagaataaggtgcattgccaat

SEQ ID NO: 5127730 - DNA, 25 bp, Homo sapien
gagagcagaataaggtgcattgcca

SEQ ID NO: 5127731 - DNA, 25 bp, Homo sapien
taaggaatgtcacctgacccaaggc

SEQ ID NO: 5127732 - DNA, 25 bp, Homo sapien
ttctttgtggacagccagcactctg

SEQ ID NO: 5127733 - DNA, 25 bp, Homo sapien
tctggtccctacgtggaaatggcct

SEQ ID NO: 5127734 - DNA, 25 bp, Homo sapien
aagggcacactaccagctcttggga

SEQ ID NO: 5127735 - DNA, 25 bp, Homo sapien
aaccaaagcttgctggccaatctga

SEQ ID NO: 5127736 - DNA, 25 bp, Homo sapien
ccaaagcttgctggccaatctgaga

SEQ ID NO: 5127737 - DNA, 25 bp, Homo sapien
catcaaagcagggaagcccaccgtg

SEQ ID NO: 5127738 - DNA, 25 bp, Homo sapien
gaagcccaccgtggacttggccaga

SEQ ID NO: 5127739 - DNA, 25 bp, Homo sapien
tctgttggttgttgctcatttgcgg

SEQ ID NO: 5127740 - DNA, 25 bp, Homo sapien
aagcggctctgttggttgttgctca

SEQ ID NO: 5127741 - DNA, 25 bp, Homo sapien
tgttgctcatttgcggatgttttcc

SEQ ID NO: 5127742 - DNA, 25 bp, Homo sapien
agagaaaagcggctctgttggttgt

SEQ ID NO: 5127743 - DNA, 25 bp, Homo sapien
ctaattagcactgcttttcaaaaac

SEQ ID NO: 5127744 - DNA, 25 bp, Homo sapien
cagagactctttatctggacccaag

SEQ ID NO: 5127745 - DNA, 25 bp, Homo sapien
cttggtcatgttaacgtcgcagaga

SEQ ID NO: 5127746 - DNA, 25 bp, Homo sapien
gaaggctgagagctacatttcccca

SEQ ID NO: 5127747 - DNA, 25 bp, Homo sapien
ttatggtggccagcgatatttcccg

SEQ ID NO: 5127748 - DNA, 25 bp, Homo sapien
ccagctaaagactgttgatgtttcc

SEQ ID NO: 5127749 - DNA, 25 bp, Homo sapien
cagttctccccaccatgtgaatgca

SEQ ID NO: 5127750 - DNA, 25 bp, Homo sapien
gttctccccaccatgtgaatgcagc

SEQ ID NO: 5127751 - DNA, 25 bp, Homo sapien
gccacttttcaacagccagctaaag

SEQ ID NO: 5127752 - DNA, 25 bp, Homo sapien
cactaccagaccagccgtgcttggt

SEQ ID NO: 5127753 - DNA, 25 bp, Homo sapien
tgtgtgttggcgtttcagctgacaa

SEQ ID NO: 5127754 - DNA, 25 bp, Homo sapien
cccacgtgaaaccgcaggctcaggg

SEQ ID NO: 5127755 - DNA, 25 bp, Homo sapien
tgacaaaacaacactaccagaccag

SEQ ID NO: 5127756 - DNA, 25 bp, Homo sapien
ctgtacctggatgaccatcccctgc

SEQ ID NO: 5127757 - DNA, 25 bp, Homo sapien
tgtacctggatgaccatcccctgcc

SEQ ID NO: 5127758 - DNA, 25 bp, Homo sapien
accccatcggatagtctcgcaggaa

SEQ ID NO: 5127759 - DNA, 25 bp, Homo sapien
gatagtctcgcaggaagaagtgccc

SEQ ID NO: 5127760 - DNA, 25 bp, Homo sapien
catcggatagtctcgcaggaagaag

SEQ ID NO: 5127761 - DNA, 25 bp, Homo sapien
tcctgaccaccccatcggatagtct

SEQ ID NO: 5127762 - DNA, 25 bp, Homo sapien
atggctgctcttggctcttaaatcc

SEQ ID NO: 5127763 - DNA, 25 bp, Homo sapien
catggctgctcttggctcttaaatc

SEQ ID NO: 5127764 - DNA, 25 bp, Homo sapien
tcatggctgctcttggctcttaaat

SEQ ID NO: 5127765 - DNA, 25 bp, Homo sapien
aatcctatctggcaatattgaatga

SEQ ID NO: 5127766 - DNA, 25 bp, Homo sapien
tctatcaaagtaagtgcttgagaca

SEQ ID NO: 5127767 - DNA, 25 bp, Homo sapien
gtgtctagctgagcctaaaatccta

SEQ ID NO: 5127768 - DNA, 25 bp, Homo sapien
atgtggcccttattaacacagtgtc

SEQ ID NO: 5127769 - DNA, 25 bp, Homo sapien
ctgactgcagaagagtcccgagagg

SEQ ID NO: 5127770 - DNA, 25 bp, Homo sapien
caaccagaaggctgcactgactgca

SEQ ID NO: 5127771 - DNA, 25 bp, Homo sapien
cagcgagtgccatcgatgtggagaa

SEQ ID NO: 5127772 - DNA, 25 bp, Homo sapien
gggttttctcccaacgcagatctaa

SEQ ID NO: 5127773 - DNA, 25 bp, Homo sapien
cactgcggcttgatcgttgccttcc

SEQ ID NO: 5127774 - DNA, 25 bp, Homo sapien
tgcggcttgatcgttgccttccctt

SEQ ID NO: 5127775 - DNA, 25 bp, Homo sapien
ggcttgatcgttgccttcccttcct

SEQ ID NO: 5127776 - DNA, 25 bp, Homo sapien
cccactgcggcttgatcgttgcctt

SEQ ID NO: 5127777 - DNA, 25 bp, Homo sapien
ccagagagacaggtctggacttcaa

SEQ ID NO: 5127778 - DNA, 25 bp, Homo sapien
gacttcaagtcagaaagtttgggct

SEQ ID NO: 5127779 - DNA, 25 bp, Homo sapien
caggttgcagatggccaagttctca

SEQ ID NO: 5127780 - DNA, 25 bp, Homo sapien
cgtagctaacagaaaggtcaggact

SEQ ID NO: 5127781 - DNA, 25 bp, Homo sapien
gaagactgaagtgtctggggagctt

SEQ ID NO: 5127782 - DNA, 25 bp, Homo sapien
ctgttcaggaagactgaagtgtctg

SEQ ID NO: 5127783 - DNA, 25 bp, Homo sapien
agactgaagtgtctggggagcttca

SEQ ID NO: 5127784 - DNA, 25 bp, Homo sapien
actgaagtgtctggggagcttcagc

SEQ ID NO: 5127785 - DNA, 25 bp, Homo sapien
tgaatagcttccagttgccttgaaa

SEQ ID NO: 5127786 - DNA, 25 bp, Homo sapien
ttgccgtcagtcacattcttggaag

SEQ ID NO: 5127787 - DNA, 25 bp, Homo sapien
tcttggaaggcgatgagctccagcc

SEQ ID NO: 5127788 - DNA, 25 bp, Homo sapien
tttcaggtcccaacaagccctgggc

SEQ ID NO: 5127789 - DNA, 25 bp, Homo sapien
ttcatctgtgagataagattaaggc

SEQ ID NO: 5127790 - DNA, 25 bp, Homo sapien
ccttcaagtcctagtccatgtctag

SEQ ID NO: 5127791 - DNA, 25 bp, Homo sapien
agctgttacctacatctccttcaag

SEQ ID NO: 5127792 - DNA, 25 bp, Homo sapien
cacttttccattgattgcttgtgca

SEQ ID NO: 5127793 - DNA, 25 bp, Homo sapien
ttgaatgacggcgacgtgaccgctg

SEQ ID NO: 5127794 - DNA, 25 bp, Homo sapien
gattacgaagatgccaacatccgcg

SEQ ID NO: 5127795 - DNA, 25 bp, Homo sapien
gaggaggattgaggctctcagtccc

SEQ ID NO: 5127796 - DNA, 25 bp, Homo sapien
ccagccctgtcgttctgggctggac

SEQ ID NO: 5127797 - DNA, 25 bp, Homo sapien
gcaggcggcagctgcggattggcag

SEQ ID NO: 5127798 - DNA, 25 bp, Homo sapien
caaaaccagtaatcgggcctgcctg

SEQ ID NO: 5127799 - DNA, 25 bp, Homo sapien
gggccacatcaaatgccgtgagtcc

SEQ ID NO: 5127800 - DNA, 25 bp, Homo sapien
ttgggcggcccgacccgcgaacagc

SEQ ID NO: 5127801 - DNA, 25 bp, Homo sapien
ccaggactcttggaaatcaggatgg

SEQ ID NO: 5127802 - DNA, 25 bp, Homo sapien
gccccagaaaccaatttgtccaaga

SEQ ID NO: 5127803 - DNA, 25 bp, Homo sapien
tttcatgattaatgagcacaccagg

SEQ ID NO: 5127804 - DNA, 25 bp, Homo sapien
ttaatgagcacaccaggactcttgg

SEQ ID NO: 5127805 - DNA, 25 bp, Homo sapien
tcagataggtactgtgctgatatca

SEQ ID NO: 5127806 - DNA, 25 bp, Homo sapien
tgctgcctgttaggatcctggtaac

SEQ ID NO: 5127807 - DNA, 25 bp, Homo sapien
tgtttactgcaagcagaggtgcctg

SEQ ID NO: 5127808 - DNA, 25 bp, Homo sapien
tgtttacagatcagcagcgacatgc

SEQ ID NO: 5127809 - DNA, 25 bp, Homo sapien
tctgcagtcgcctgacgtgggtagc

SEQ ID NO: 5127810 - DNA, 25 bp, Homo sapien
caataaaaaggactgcatttagcat

SEQ ID NO: 5127811 - DNA, 25 bp, Homo sapien
gattcttgggttgaagattccggtc

SEQ ID NO: 5127812 - DNA, 25 bp, Homo sapien
catgacatggtcaaatattaggtta

SEQ ID NO: 5127813 - DNA, 25 bp, Homo sapien
tagcatttaggctgagattcttggg

SEQ ID NO: 5127814 - DNA, 25 bp, Homo sapien
ttgggtaacagagagctgtctggct

SEQ ID NO: 5127815 - DNA, 25 bp, Homo sapien
taaactgggtggctggccgctccca

SEQ ID NO: 5127816 - DNA, 25 bp, Homo sapien
caggctgggtgttgggtaacagaga

SEQ ID NO: 5127817 - DNA, 25 bp, Homo sapien
agctgtctggctatgggactgagct

SEQ ID NO: 5127818 - DNA, 25 bp, Homo sapien
caggtttaagtgattattctgcctc

SEQ ID NO: 5127819 - DNA, 25 bp, Homo sapien
ctcccaggtttaagtgattattctg

SEQ ID NO: 5127820 - DNA, 25 bp, Homo sapien
aattacaggtgcccaccaccatgct

SEQ ID NO: 5127821 - DNA, 25 bp, Homo sapien
gaattacaggtgcccaccaccatgc

SEQ ID NO: 5127822 - DNA, 25 bp, Homo sapien
cgtcctgctcgggtcttttcagcag

SEQ ID NO: 5127823 - DNA, 25 bp, Homo sapien
tttcagcagtctcaccgtcaacaac

SEQ ID NO: 5127824 - DNA, 25 bp, Homo sapien
gtcttttcagcagtctcaccgtcaa

SEQ ID NO: 5127825 - DNA, 25 bp, Homo sapien
tgttctctcccgtcctgctcgggtc

SEQ ID NO: 5127826 - DNA, 25 bp, Homo sapien
attcctccagaacgtctggatcatc

SEQ ID NO: 5127827 - DNA, 25 bp, Homo sapien
catcccatacatctgtcctgtacag

SEQ ID NO: 5127828 - DNA, 25 bp, Homo sapien
gaacgtctggatcatcccatacatc

SEQ ID NO: 5127829 - DNA, 25 bp, Homo sapien
atgcctatgttcctcctgagggtga

SEQ ID NO: 5127830 - DNA, 25 bp, Homo sapien
tctgcagcgccccaaataacaggct

SEQ ID NO: 5127831 - DNA, 25 bp, Homo sapien
taacaggctcgcaaagcccagtgct

SEQ ID NO: 5127832 - DNA, 25 bp, Homo sapien
caaggaggcctgacaactgcaggag

SEQ ID NO: 5127833 - DNA, 25 bp, Homo sapien
tccttggcgggataggtccttgcct

SEQ ID NO: 5127834 - DNA, 25 bp, Homo sapien
tgctagggcataaccaattcaaggg

SEQ ID NO: 5127835 - DNA, 25 bp, Homo sapien
gagacttcctcagactggcctttac

SEQ ID NO: 5127836 - DNA, 25 bp, Homo sapien
ggatacaatccagccaagctctttg

SEQ ID NO: 5127837 - DNA, 25 bp, Homo sapien
tccaatctctgccattacacagttc

SEQ ID NO: 5127838 - DNA, 25 bp, Homo sapien
tttgaatttaggaagattgtttcaa

SEQ ID NO: 5127839 - DNA, 25 bp, Homo sapien
ttttgaatttaggaagattgtttca

SEQ ID NO: 5127840 - DNA, 25 bp, Homo sapien
ttgaatttaggaagattgtttcaaa

SEQ ID NO: 5127841 - DNA, 25 bp, Homo sapien
tgaatttaggaagattgtttcaaaa

SEQ ID NO: 5127842 - DNA, 25 bp, Homo sapien
gaaatccaactgataaggtgctcct

SEQ ID NO: 5127843 - DNA, 25 bp, Homo sapien
taggcaagatcaaacctctgggtgg

SEQ ID NO: 5127844 - DNA, 25 bp, Homo sapien
tgggtgggaaacctgtacctctgca

SEQ ID NO: 5127845 - DNA, 25 bp, Homo sapien
tacttccatagtgttccctgcccag

SEQ ID NO: 5127846 - DNA, 25 bp, Homo sapien
agctcccaaatggataaggagaagg

SEQ ID NO: 5127847 - DNA, 25 bp, Homo sapien
aggcattccagatgggtcaaacatg

SEQ ID NO: 5127848 - DNA, 25 bp, Homo sapien
tgaagctcccaaatggataaggaga

SEQ ID NO: 5127849 - DNA, 25 bp, Homo sapien
cattccagatgggtcaaacatgggc

SEQ ID NO: 5127850 - DNA, 25 bp, Homo sapien
tatgccaggattgcaagctcaagtg

SEQ ID NO: 5127851 - DNA, 25 bp, Homo sapien
aacacaagccaacgaagttactggg

SEQ ID NO: 5127852 - DNA, 25 bp, Homo sapien
ctcaagtgtgtacagatggctaaaa

SEQ ID NO: 5127853 - DNA, 25 bp, Homo sapien
gaaaactaacatcagttggcaactg

SEQ ID NO: 5127854 - DNA, 25 bp, Homo sapien
gactcagtgagaaaggagcttgacc

SEQ ID NO: 5127855 - DNA, 25 bp, Homo sapien
gagcggatggaggaataaccaccca

SEQ ID NO: 5127856 - DNA, 25 bp, Homo sapien
acctgatgaagatggtgcggccgcc

SEQ ID NO: 5127857 - DNA, 25 bp, Homo sapien
cagaggcgggccaattagagaaacg

SEQ ID NO: 5127858 - DNA, 25 bp, Homo sapien
tagtgacgccatgacataaaagagt

SEQ ID NO: 5127859 - DNA, 25 bp, Homo sapien
tgcgcttagtgacgccatgacataa

SEQ ID NO: 5127860 - DNA, 25 bp, Homo sapien
tccagaatgcgcttagtgacgccat

SEQ ID NO: 5127861 - DNA, 25 bp, Homo sapien
tgcttccagaatgcgcttagtgacg

SEQ ID NO: 5127862 - DNA, 25 bp, Homo sapien
caacatctatgtatcagcaacggca

SEQ ID NO: 5127863 - DNA, 25 bp, Homo sapien
tccgtaggctagaagaccaacatct

SEQ ID NO: 5127864 - DNA, 25 bp, Homo sapien
actaacatcaagaaccaagccgcgg

SEQ ID NO: 5127865 - DNA, 25 bp, Homo sapien
tccaagtgttggtgggtccggaatc

SEQ ID NO: 5127866 - DNA, 25 bp, Homo sapien
gaactcagctttaccacttacaaac

SEQ ID NO: 5127867 - DNA, 25 bp, Homo sapien
acttacatgggggaggctaaatgca

SEQ ID NO: 5127868 - DNA, 25 bp, Homo sapien
gctagaccctccataatgctctttg

SEQ ID NO: 5127869 - DNA, 25 bp, Homo sapien
tatttgtcacttactttatgccatg

SEQ ID NO: 5127870 - DNA, 25 bp, Homo sapien
tgataccaaaagaacctgtgaaatt

SEQ ID NO: 5127871 - DNA, 25 bp, Homo sapien
ttagatgaggagcatccttctcttg

SEQ ID NO: 5127872 - DNA, 25 bp, Homo sapien
tggatgtgcacagtacctgagaaat

SEQ ID NO: 5127873 - DNA, 25 bp, Homo sapien
tgttcaacacacaagtattgactgt

SEQ ID NO: 5127874 - DNA, 25 bp, Homo sapien
cattccattaaagggccctgaggaa

SEQ ID NO: 5127875 - DNA, 25 bp, Homo sapien
ccattaaagggccctgaggaatcag

SEQ ID NO: 5127876 - DNA, 25 bp, Homo sapien
tccattccattaaagggccctgagg

SEQ ID NO: 5127877 - DNA, 25 bp, Homo sapien
attaaagggccctgaggaatcagca

SEQ ID NO: 5127878 - DNA, 25 bp, Homo sapien
aacgttagtgcaacaagctgcagga

SEQ ID NO: 5127879 - DNA, 25 bp, Homo sapien
gcagaatctcttagctttggtgcca

SEQ ID NO: 5127880 - DNA, 25 bp, Homo sapien
tgcgcccagcatgtttctgcagaat

SEQ ID NO: 5127881 - DNA, 25 bp, Homo sapien
cacccgctggttatggcagtgtgga

SEQ ID NO: 5127882 - DNA, 25 bp, Homo sapien
cctggcagcacatgaaccaatgctt

SEQ ID NO: 5127883 - DNA, 25 bp, Homo sapien
gaaccaatgctttccgatactctac

SEQ ID NO: 5127884 - DNA, 25 bp, Homo sapien
aatgctttccgatactctacagaat

SEQ ID NO: 5127885 - DNA, 25 bp, Homo sapien
gaatcctggcagcacatgaaccaat

SEQ ID NO: 5127886 - DNA, 25 bp, Homo sapien
tccctgtcattgtgaggtgagtagg

SEQ ID NO: 5127887 - DNA, 25 bp, Homo sapien
gagttgagccctgacctgtatgatg

SEQ ID NO: 5127888 - DNA, 25 bp, Homo sapien
gccacgcctgtctttgagttgagcc

SEQ ID NO: 5127889 - DNA, 25 bp, Homo sapien
ctgccagggcaagacgacgctcctg

SEQ ID NO: 5127890 - DNA, 25 bp, Homo sapien
ggggaccagctgccacgcagacaga

SEQ ID NO: 5127891 - DNA, 25 bp, Homo sapien
ggaccagctgccacgcagacagagc

SEQ ID NO: 5127892 - DNA, 25 bp, Homo sapien
cttctctcctagggctggggaccag

SEQ ID NO: 5127893 - DNA, 25 bp, Homo sapien
ttctctcctagggctggggaccagc

SEQ ID NO: 5127894 - DNA, 25 bp, Homo sapien
caacagtagtttgtaggcctaacac

SEQ ID NO: 5127895 - DNA, 25 bp, Homo sapien
tcagcacttcccctggatagaggaa

SEQ ID NO: 5127896 - DNA, 25 bp, Homo sapien
tccagccctgaagtcctagcgaggg

SEQ ID NO: 5127897 - DNA, 25 bp, Homo sapien
tgtgcgtggcccctagatccttaag

SEQ ID NO: 5127898 - DNA, 25 bp, Homo sapien
ctctgccacagacaaggaaagtagc

SEQ ID NO: 5127899 - DNA, 25 bp, Homo sapien
gaaagtagccactatcttcaagctg

SEQ ID NO: 5127900 - DNA, 25 bp, Homo sapien
cagacaagttgtttagccctgctct

SEQ ID NO: 5127901 - DNA, 25 bp, Homo sapien
acaagttgtttagccctgctctgcc

SEQ ID NO: 5127902 - DNA, 25 bp, Homo sapien
gtcccgggtatttcacacctgccat

SEQ ID NO: 5127903 - DNA, 25 bp, Homo sapien
ctgtcccgggtatttcacacctgcc

SEQ ID NO: 5127904 - DNA, 25 bp, Homo sapien
tgtcccgggtatttcacacctgcca

SEQ ID NO: 5127905 - DNA, 25 bp, Homo sapien
gggagctttggtatatgtctaaatc

SEQ ID NO: 5127906 - DNA, 25 bp, Homo sapien
gctgatagtcgaccatgtgggagct

SEQ ID NO: 5127907 - DNA, 25 bp, Homo sapien
ttcctgtagggctgatagtcgacca

SEQ ID NO: 5127908 - DNA, 25 bp, Homo sapien
tgcggcgtgaccctggagtatttgt

SEQ ID NO: 5127909 - DNA, 25 bp, Homo sapien
gtcttttgaaagcagggtacccatc

SEQ ID NO: 5127910 - DNA, 25 bp, Homo sapien
atggcatcaagggtccccaccggtt

SEQ ID NO: 5127911 - DNA, 25 bp, Homo sapien
tgctggtgaacttgcgctcgtcctc

SEQ ID NO: 5127912 - DNA, 25 bp, Homo sapien
gaaagtcagcactctggaggacctg

SEQ ID NO: 5127913 - DNA, 25 bp, Homo sapien
tgcagttggaacatctttccagttt

SEQ ID NO: 5127914 - DNA, 25 bp, Homo sapien
gagcctttggaaggtattttcatcc

SEQ ID NO: 5127915 - DNA, 25 bp, Homo sapien
aaggtcataggatttccacatgccc

SEQ ID NO: 5127916 - DNA, 25 bp, Homo sapien
ctgcactccaaggtcataggatttc

SEQ ID NO: 5127917 - DNA, 25 bp, Homo sapien
cattcctcagtgcatgcacatggat

SEQ ID NO: 5127918 - DNA, 25 bp, Homo sapien
catttgtgggatacataattcagcc

SEQ ID NO: 5127919 - DNA, 25 bp, Homo sapien
caccttggacccagagatagaagcc

SEQ ID NO: 5127920 - DNA, 25 bp, Homo sapien
tcagagtgtcctcccatgaccattc

SEQ ID NO: 5127921 - DNA, 25 bp, Homo sapien
cgggcccttggaaaaccgctgctct

SEQ ID NO: 5127922 - DNA, 25 bp, Homo sapien
gtaaggcaactacttctacagaagg

SEQ ID NO: 5127923 - DNA, 25 bp, Homo sapien
tagaaacaagtgctcggtgccgaaa

SEQ ID NO: 5127924 - DNA, 25 bp, Homo sapien
tattgccaggtactgatagcttcct

SEQ ID NO: 5127925 - DNA, 25 bp, Homo sapien
aaaagcatccatagagttgacatca

SEQ ID NO: 5127926 - DNA, 25 bp, Homo sapien
tgcagcctctgccacggggtccctc

SEQ ID NO: 5127927 - DNA, 25 bp, Homo sapien
tggaagatgataccctctgtggcca

SEQ ID NO: 5127928 - DNA, 25 bp, Homo sapien
ggaagatgataccctctgtggccat

SEQ ID NO: 5127929 - DNA, 25 bp, Homo sapien
tggcactaacaagataaaatgcacc

SEQ ID NO: 5127930 - DNA, 25 bp, Homo sapien
gggataggctggcactaacaagata

SEQ ID NO: 5127931 - DNA, 25 bp, Homo sapien
ttctgggataggctggcactaacaa

SEQ ID NO: 5127932 - DNA, 25 bp, Homo sapien
ggctggcactaacaagataaaatgc

SEQ ID NO: 5127933 - DNA, 25 bp, Homo sapien
tgagtgtcaccgagtcagtccagtg

SEQ ID NO: 5127934 - DNA, 25 bp, Homo sapien
cctagctgccggtctacaggaatca

SEQ ID NO: 5127935 - DNA, 25 bp, Homo sapien
gctgggcatgagaactaccggcgat

SEQ ID NO: 5127936 - DNA, 25 bp, Homo sapien
tcaagtagtcaagaaacgcctttgt

SEQ ID NO: 5127937 - DNA, 25 bp, Homo sapien
ggagccagcaactctgacgaagatc

SEQ ID NO: 5127938 - DNA, 25 bp, Homo sapien
tagtccagcaacatccagcgtaaag

SEQ ID NO: 5127939 - DNA, 25 bp, Homo sapien
cagcgtaaagcctggtacttgatta

SEQ ID NO: 5127940 - DNA, 25 bp, Homo sapien
ccttgttcgtttctaaaatctcaga

SEQ ID NO: 5127941 - DNA, 25 bp, Homo sapien
cactattttggaggacaagtagcac

SEQ ID NO: 5127942 - DNA, 25 bp, Homo sapien
tatagccctcaccatttgcctaagg

SEQ ID NO: 5127943 - DNA, 25 bp, Homo sapien
ccctggcgggtaaattaggaatctg

SEQ ID NO: 5127944 - DNA, 25 bp, Homo sapien
tgcctaaggaggtagcagcaatccc

SEQ ID NO: 5127945 - DNA, 25 bp, Homo sapien
tagtaaacgcttatcactaggtggg

SEQ ID NO: 5127946 - DNA, 25 bp, Homo sapien
tcttagccatcaccagtagatgtgg

SEQ ID NO: 5127947 - DNA, 25 bp, Homo sapien
gacagtttacaggagaccacacacc

SEQ ID NO: 5127948 - DNA, 25 bp, Homo sapien
cttcagtgattttgacgtgggccca

SEQ ID NO: 5127949 - DNA, 25 bp, Homo sapien
taaggtcaagggagagaacctcctc

SEQ ID NO: 5127950 - DNA, 25 bp, Homo sapien
gaatggaccatgaggacatcagtga

SEQ ID NO: 5127951 - DNA, 25 bp, Homo sapien
aaatacgcagaatggatcctttcgc

SEQ ID NO: 5127952 - DNA, 25 bp, Homo sapien
aaacagagggtgcagttcaggtact

SEQ ID NO: 5127953 - DNA, 25 bp, Homo sapien
aaggcaccggcagttttagtcagca

SEQ ID NO: 5127954 - DNA, 25 bp, Homo sapien
catgctttagcatgtggagaaaggc

SEQ ID NO: 5127955 - DNA, 25 bp, Homo sapien
ataccttcagggcaaatagcaacct

SEQ ID NO: 5127956 - DNA, 25 bp, Homo sapien
aaaagatgtgttactcagggtcaag

SEQ ID NO: 5127957 - DNA, 25 bp, Homo sapien
taactacgtcagtgcactgggccgg

SEQ ID NO: 5127958 - DNA, 25 bp, Homo sapien
cagttagcgcagacctttgagggac

SEQ ID NO: 5127959 - DNA, 25 bp, Homo sapien
tcagaatccgccacgtagtaagtgc

SEQ ID NO: 5127960 - DNA, 25 bp, Homo sapien
tacaaagcgtgccaggtcagagtca

SEQ ID NO: 5127961 - DNA, 25 bp, Homo sapien
taagagggctgtcatcggcaagcca

SEQ ID NO: 5127962 - DNA, 25 bp, Homo sapien
gagggttacgaccagcactatggag

SEQ ID NO: 5127963 - DNA, 25 bp, Homo sapien
gagttgccatcccaaaacagtgaga

SEQ ID NO: 5127964 - DNA, 25 bp, Homo sapien
cccagtggagtgagcaaagacagta

SEQ ID NO: 5127965 - DNA, 25 bp, Homo sapien
gggcaaattcaggtggttacatgcc

SEQ ID NO: 5127966 - DNA, 25 bp, Homo sapien
tatatttccaataggttcagtttat

SEQ ID NO: 5127967 - DNA, 25 bp, Homo sapien
catcctcactagcagaatcctcatt

SEQ ID NO: 5127968 - DNA, 25 bp, Homo sapien
aattccttggtggtgcttcctggag

SEQ ID NO: 5127969 - DNA, 25 bp, Homo sapien
agatgctagaatatgcagactaatc

SEQ ID NO: 5127970 - DNA, 25 bp, Homo sapien
gagggattgaccacaaagggacaca

SEQ ID NO: 5127971 - DNA, 25 bp, Homo sapien
gaaaacagatcagcggttacctagg

SEQ ID NO: 5127972 - DNA, 25 bp, Homo sapien
aaagaatctcttggagtgatgggaa

SEQ ID NO: 5127973 - DNA, 25 bp, Homo sapien
gggtgaggagcagacattcacaaaa

SEQ ID NO: 5127974 - DNA, 25 bp, Homo sapien
aagatcattcctttccacgctggca

SEQ ID NO: 5127975 - DNA, 25 bp, Homo sapien
gaggaatcagctctagccctgatgc

SEQ ID NO: 5127976 - DNA, 25 bp, Homo sapien
gaaacttcagatccatatgggcaga

SEQ ID NO: 5127977 - DNA, 25 bp, Homo sapien
gaaagagctttaatggacttatagt

SEQ ID NO: 5127978 - DNA, 25 bp, Homo sapien
aaagaaagagctttaatggacttat

SEQ ID NO: 5127979 - DNA, 25 bp, Homo sapien
cagaagacaaggagaagcaagtcac

SEQ ID NO: 5127980 - DNA, 25 bp, Homo sapien
agaagacaaggagaagcaagtcaca

SEQ ID NO: 5127981 - DNA, 25 bp, Homo sapien
gcgctgcatcccgacgcctcgctcc

SEQ ID NO: 5127982 - DNA, 25 bp, Homo sapien
gcatcccgacgcctcgctccggcct

SEQ ID NO: 5127983 - DNA, 25 bp, Homo sapien
gctgcatcccgacgcctcgctccgg

SEQ ID NO: 5127984 - DNA, 25 bp, Homo sapien
gggcgctgcatcccgacgcctcgct

SEQ ID NO: 5127985 - DNA, 25 bp, Homo sapien
tgctgttggagtccccgcagctggt

SEQ ID NO: 5127986 - DNA, 25 bp, Homo sapien
gcagatgctgttggagtccccgcag

SEQ ID NO: 5127987 - DNA, 25 bp, Homo sapien
accgccacgggtcccagactgtgca

SEQ ID NO: 5127988 - DNA, 25 bp, Homo sapien
tgtgttgccagcaccgccacgggtc

SEQ ID NO: 5127989 - DNA, 25 bp, Homo sapien
tggttctccacagccgcgcggcccg

SEQ ID NO: 5127990 - DNA, 25 bp, Homo sapien
cgcgcggcccgccagcttcttggcc

SEQ ID NO: 5127991 - DNA, 25 bp, Homo sapien
gtggttctccacagccgcgcggccc

SEQ ID NO: 5127992 - DNA, 25 bp, Homo sapien
agccgcgcggcccgccagcttcttg

SEQ ID NO: 5127993 - DNA, 25 bp, Homo sapien
caagggcctagaaatgtgactgaac

SEQ ID NO: 5127994 - DNA, 25 bp, Homo sapien
tatgagtgttatgaaccaagagcca

SEQ ID NO: 5127995 - DNA, 25 bp, Homo sapien
aaagaccaggaattgcaagggccta

SEQ ID NO: 5127996 - DNA, 25 bp, Homo sapien
ggtatggaacaggaacccttctgaa

SEQ ID NO: 5127997 - DNA, 25 bp, Homo sapien
cacagcatggacaattgtagaacca

SEQ ID NO: 5127998 - DNA, 25 bp, Homo sapien
tgtagaaccacttccaattcccagc

SEQ ID NO: 5127999 - DNA, 25 bp, Homo sapien
tgcacagcatggacaattgtagaac

SEQ ID NO: 5128000 - DNA, 25 bp, Homo sapien
ttccaattcccagcacttggttatt

SEQ ID NO: 5128001 - DNA, 25 bp, Homo sapien
gaggttcagattctcttgcttcacc

SEQ ID NO: 5128002 - DNA, 25 bp, Homo sapien
aatacagacgaggttcagattctct

SEQ ID NO: 5128003 - DNA, 25 bp, Homo sapien
cagacgaggttcagattctcttgct

SEQ ID NO: 5128004 - DNA, 25 bp, Homo sapien
gtgggaatacagacgaggttcagat

SEQ ID NO: 5128005 - DNA, 25 bp, Homo sapien
tacttgatgatcaagccagttggaa

SEQ ID NO: 5128006 - DNA, 25 bp, Homo sapien
taaaagtatgtccatgtaaagagca

SEQ ID NO: 5128007 - DNA, 25 bp, Homo sapien
tccaatcacctaaaagagctaaaag

SEQ ID NO: 5128008 - DNA, 25 bp, Homo sapien
gtggctgttagaatatccaatcacc

SEQ ID NO: 5128009 - DNA, 25 bp, Homo sapien
tgccatccacgtaaaacgagacttg

SEQ ID NO: 5128010 - DNA, 25 bp, Homo sapien
tagatcttacttgcaaccagacaac

SEQ ID NO: 5128011 - DNA, 25 bp, Homo sapien
attgtactcccagcagaaaatggac

SEQ ID NO: 5128012 - DNA, 25 bp, Homo sapien
catttggtacaatactgggttaaca

SEQ ID NO: 5128013 - DNA, 25 bp, Homo sapien
gtcggtgagcactgtctgtttctgc

SEQ ID NO: 5128014 - DNA, 25 bp, Homo sapien
agaagggcctggtcggtgagcactg

SEQ ID NO: 5128015 - DNA, 25 bp, Homo sapien
tggtcggtgagcactgtctgtttct

SEQ ID NO: 5128016 - DNA, 25 bp, Homo sapien
gcctggtcggtgagcactgtctgtt

SEQ ID NO: 5128017 - DNA, 25 bp, Homo sapien
gggaggaagtcagcaaatttagcac

SEQ ID NO: 5128018 - DNA, 25 bp, Homo sapien
gaagatcattatgaatggacacgga

SEQ ID NO: 5128019 - DNA, 25 bp, Homo sapien
acactgttaagtaaatatgaggaaa

SEQ ID NO: 5128020 - DNA, 25 bp, Homo sapien
tggacacggagtggtttccagccca

SEQ ID NO: 5128021 - DNA, 25 bp, Homo sapien
tctgggtgtcgatccagatcactga

SEQ ID NO: 5128022 - DNA, 25 bp, Homo sapien
gatcactgagggtcaagccatactg

SEQ ID NO: 5128023 - DNA, 25 bp, Homo sapien
ggtcaagccatactgcaggatgagc

SEQ ID NO: 5128024 - DNA, 25 bp, Homo sapien
tccagatcactgagggtcaagccat

SEQ ID NO: 5128025 - DNA, 25 bp, Homo sapien
gaaatacgcagtggtctgcctctga

SEQ ID NO: 5128026 - DNA, 25 bp, Homo sapien
aggaagccctggatatagccctggg

SEQ ID NO: 5128027 - DNA, 25 bp, Homo sapien
tggaaaggaaccacctcggcacttg

SEQ ID NO: 5128028 - DNA, 25 bp, Homo sapien
cattcacactgagcccttgcggtta

SEQ ID NO: 5128029 - DNA, 25 bp, Homo sapien
taaccgggatgcagttcttacccac

SEQ ID NO: 5128030 - DNA, 25 bp, Homo sapien
caggacttgggactctaaccgggat

SEQ ID NO: 5128031 - DNA, 25 bp, Homo sapien
cttctctgtggacaagctggcgtta

SEQ ID NO: 5128032 - DNA, 25 bp, Homo sapien
tgttctcagtgtgggtgctatcacc

SEQ ID NO: 5128033 - DNA, 25 bp, Homo sapien
cagcaccatcgatggcaaggtcgat

SEQ ID NO: 5128034 - DNA, 25 bp, Homo sapien
atcagcaccatcgatggcaaggtcg

SEQ ID NO: 5128035 - DNA, 25 bp, Homo sapien
tcagcaccatcgatggcaaggtcga

SEQ ID NO: 5128036 - DNA, 25 bp, Homo sapien
tcagcgatcacgatgaagcgactag

SEQ ID NO: 5128037 - DNA, 25 bp, Homo sapien
gatgaagcgactagcatagccagcc

SEQ ID NO: 5128038 - DNA, 25 bp, Homo sapien
gactagcatagccagccacaatctt

SEQ ID NO: 5128039 - DNA, 25 bp, Homo sapien
tgaaatcagcgatcacgatgaagcg

SEQ ID NO: 5128040 - DNA, 25 bp, Homo sapien
gttggcagctcagacaccagaaact

SEQ ID NO: 5128041 - DNA, 25 bp, Homo sapien
ctcctcagttggcagctcagacacc

SEQ ID NO: 5128042 - DNA, 25 bp, Homo sapien
tcagttggcagctcagacaccagaa

SEQ ID NO: 5128043 - DNA, 25 bp, Homo sapien
gcagctcagacaccagaaactgtac

SEQ ID NO: 5128044 - DNA, 25 bp, Homo sapien
gatgacctcgatggggattcccttg

SEQ ID NO: 5128045 - DNA, 25 bp, Homo sapien
gacagccattcgaagttcaaccacg

SEQ ID NO: 5128046 - DNA, 25 bp, Homo sapien
ccactgatccccgagattcttcgaa

SEQ ID NO: 5128047 - DNA, 25 bp, Homo sapien
gggacataggccattgggatgacct

SEQ ID NO: 5128048 - DNA, 25 bp, Homo sapien
tacaaccactaggaacagaactacg

SEQ ID NO: 5128049 - DNA, 25 bp, Homo sapien
cagggtcaaggttgaacgacttctc

SEQ ID NO: 5128050 - DNA, 25 bp, Homo sapien
catgtgccgacaatctgaacgtcag

SEQ ID NO: 5128051 - DNA, 25 bp, Homo sapien
cagggtagggtgacagatcttttcg

SEQ ID NO: 5128052 - DNA, 25 bp, Homo sapien
cattttgatagctgtattcacttca

SEQ ID NO: 5128053 - DNA, 25 bp, Homo sapien
gatagctgtattcacttcactccat

SEQ ID NO: 5128054 - DNA, 25 bp, Homo sapien
cactccatttgtgtacccggtcaaa

SEQ ID NO: 5128055 - DNA, 25 bp, Homo sapien
tcactccatttgtgtacccggtcaa

SEQ ID NO: 5128056 - DNA, 25 bp, Homo sapien
tggaaagagcagaggatgctaaatg

SEQ ID NO: 5128057 - DNA, 25 bp, Homo sapien
gaaagagcagaggatgctaaatgtg

SEQ ID NO: 5128058 - DNA, 25 bp, Homo sapien
caactccccgataaaatatagtgga

SEQ ID NO: 5128059 - DNA, 25 bp, Homo sapien
cccaactccccgataaaatatagtg

SEQ ID NO: 5128060 - DNA, 25 bp, Homo sapien
gacatatcagatggcaagtcatcct

SEQ ID NO: 5128061 - DNA, 25 bp, Homo sapien
cagtcattgtcaagcacttcaaggg

SEQ ID NO: 5128062 - DNA, 25 bp, Homo sapien
gactgcagggtcactagaagcaact

SEQ ID NO: 5128063 - DNA, 25 bp, Homo sapien
tgctaagctttgtcctgccctgagg

SEQ ID NO: 5128064 - DNA, 25 bp, Homo sapien
gcatcccaaagtagactctctcagc

SEQ ID NO: 5128065 - DNA, 25 bp, Homo sapien
catcctgcatcccaaagtagactct

SEQ ID NO: 5128066 - DNA, 25 bp, Homo sapien
tcctgcatcccaaagtagactctct

SEQ ID NO: 5128067 - DNA, 25 bp, Homo sapien
actctctcagccatgttgatgaata

SEQ ID NO: 5128068 - DNA, 25 bp, Homo sapien
acagaaaggcttctccctcatgttc

SEQ ID NO: 5128069 - DNA, 25 bp, Homo sapien
agaaaggcttctccctcatgttcac

SEQ ID NO: 5128070 - DNA, 25 bp, Homo sapien
caacagaaaggcttctccctcatgt

SEQ ID NO: 5128071 - DNA, 25 bp, Homo sapien
tcaacagaaaggcttctccctcatg

SEQ ID NO: 5128072 - DNA, 25 bp, Homo sapien
agttgtccaggcagagatacattaa

SEQ ID NO: 5128073 - DNA, 25 bp, Homo sapien
tcctggagaggtacgtccaccttgg

SEQ ID NO: 5128074 - DNA, 25 bp, Homo sapien
cccaccacaagttgtccaggcagag

SEQ ID NO: 5128075 - DNA, 25 bp, Homo sapien
caatacttcataagactggatttaa

SEQ ID NO: 5128076 - DNA, 25 bp, Homo sapien
catcaggagatcactgctggtgggc

SEQ ID NO: 5128077 - DNA, 25 bp, Homo sapien
taaagaggtaaggacttctgacgcc

SEQ ID NO: 5128078 - DNA, 25 bp, Homo sapien
cagcagtgctttggcagtactggca

SEQ ID NO: 5128079 - DNA, 25 bp, Homo sapien
caaatcagagggtagcagacaagta

SEQ ID NO: 5128080 - DNA, 25 bp, Homo sapien
gacttgacggctgccctgaaggagc

SEQ ID NO: 5128081 - DNA, 25 bp, Homo sapien
gctgctgacatggagcctaacagag

SEQ ID NO: 5128082 - DNA, 25 bp, Homo sapien
gggcgagccccagataaggagcctt

SEQ ID NO: 5128083 - DNA, 25 bp, Homo sapien
aaggagccttgccagtagaagtgct

SEQ ID NO: 5128084 - DNA, 25 bp, Homo sapien
accctcatttccagctgctgctgct

SEQ ID NO: 5128085 - DNA, 25 bp, Homo sapien
tcatttccagctgctgctgctgatt

SEQ ID NO: 5128086 - DNA, 25 bp, Homo sapien
agaaagggcactgggaccctcattt

SEQ ID NO: 5128087 - DNA, 25 bp, Homo sapien
taaagaaagggcactgggaccctca

SEQ ID NO: 5128088 - DNA, 25 bp, Homo sapien
tcattctacccctggtacctcccaa

SEQ ID NO: 5128089 - DNA, 25 bp, Homo sapien
agatctcgtgaaatgcattcactat

SEQ ID NO: 5128090 - DNA, 25 bp, Homo sapien
atactcgagacagggcaatttacaa

SEQ ID NO: 5128091 - DNA, 25 bp, Homo sapien
catgacatgtgagaattgtggtagt

SEQ ID NO: 5128092 - DNA, 25 bp, Homo sapien
caagcaatgcagtctgtccacctac

SEQ ID NO: 5128093 - DNA, 25 bp, Homo sapien
ggctacaaactgtagcctgggaacg

SEQ ID NO: 5128094 - DNA, 25 bp, Homo sapien
tcattggtgtcatgatacgtgagca

SEQ ID NO: 5128095 - DNA, 25 bp, Homo sapien
ggctcctagtcttccacaatcgtcg

SEQ ID NO: 5128096 - DNA, 25 bp, Homo sapien
ctgccaggaaagaaagtccagcccc

SEQ ID NO: 5128097 - DNA, 25 bp, Homo sapien
tgccaggaaagaaagtccagcccct

SEQ ID NO: 5128098 - DNA, 25 bp, Homo sapien
tggtgagtgattggaaaccagctga

SEQ ID NO: 5128099 - DNA, 25 bp, Homo sapien
agcatggtgagtgattggaaaccag

SEQ ID NO: 5128100 - DNA, 25 bp, Homo sapien
catggtgagtgattggaaaccagct

SEQ ID NO: 5128101 - DNA, 25 bp, Homo sapien
gcatggtgagtgattggaaaccagc

SEQ ID NO: 5128102 - DNA, 25 bp, Homo sapien
caaagaatttttagtcagggagttg

SEQ ID NO: 5128103 - DNA, 25 bp, Homo sapien
tctaaggtccctcagtgaaaaccac

SEQ ID NO: 5128104 - DNA, 25 bp, Homo sapien
ccacattgacataggtgtccattga

SEQ ID NO: 5128105 - DNA, 25 bp, Homo sapien
gggagttgatatattatggaaatga

SEQ ID NO: 5128106 - DNA, 25 bp, Homo sapien
cagctgttagtaaataccttgtgga

SEQ ID NO: 5128107 - DNA, 25 bp, Homo sapien
atttgttgtttcagctgttagtaaa

SEQ ID NO: 5128108 - DNA, 25 bp, Homo sapien
taacctgttccgttcactgatttgt

SEQ ID NO: 5128109 - DNA, 25 bp, Homo sapien
ttaacagcacattttcatatctaga

SEQ ID NO: 5128110 - DNA, 25 bp, Homo sapien
ttcctactaatatgaaatgtcacca

SEQ ID NO: 5128111 - DNA, 25 bp, Homo sapien
aatctagccagatttatccaagtag

SEQ ID NO: 5128112 - DNA, 25 bp, Homo sapien
gaatataaacatgtataagtaggca

SEQ ID NO: 5128113 - DNA, 25 bp, Homo sapien
gttagcaggcacttcatttatgagt

SEQ ID NO: 5128114 - DNA, 25 bp, Homo sapien
ttcacgtaatgaggatccagccata

SEQ ID NO: 5128115 - DNA, 25 bp, Homo sapien
ggtaaaacttggacacagacagaga

SEQ ID NO: 5128116 - DNA, 25 bp, Homo sapien
tacttgggaagcttctgagacaccg

SEQ ID NO: 5128117 - DNA, 25 bp, Homo sapien
cattatttgattgctctcatggagc

SEQ ID NO: 5128118 - DNA, 25 bp, Homo sapien
tgaaatcttcgtgcttgcccttgaa

SEQ ID NO: 5128119 - DNA, 25 bp, Homo sapien
cagcctaccatcaatcatgcagtgt

SEQ ID NO: 5128120 - DNA, 25 bp, Homo sapien
ggaacacataattgactacaggtaa

SEQ ID NO: 5128121 - DNA, 25 bp, Homo sapien
caggtaaatatgacacagcctacca

SEQ ID NO: 5128122 - DNA, 25 bp, Homo sapien
gttagtgaatccatacttcctaaga

SEQ ID NO: 5128123 - DNA, 25 bp, Homo sapien
gaagttagtgaatccatacttccta

SEQ ID NO: 5128124 - DNA, 25 bp, Homo sapien
agtgaatccatacttcctaagaatc

SEQ ID NO: 5128125 - DNA, 25 bp, Homo sapien
aatccatacttcctaagaatctagt

SEQ ID NO: 5128126 - DNA, 25 bp, Homo sapien
gagcttaaggtgtaaaatgtctgtc

SEQ ID NO: 5128127 - DNA, 25 bp, Homo sapien
aagtgggaatcaaaaaacatgagca

SEQ ID NO: 5128128 - DNA, 25 bp, Homo sapien
tctagaatgaaatttgtagtggcaa

SEQ ID NO: 5128129 - DNA, 25 bp, Homo sapien
aaagcatttgggctagagcttaagg

SEQ ID NO: 5128130 - DNA, 25 bp, Homo sapien
tgtgattaagtaaagattctcaatg

SEQ ID NO: 5128131 - DNA, 25 bp, Homo sapien
caattgtaacgtcagcaggtatagc

SEQ ID NO: 5128132 - DNA, 25 bp, Homo sapien
tgtaacaacactgacataaaggagt

SEQ ID NO: 5128133 - DNA, 25 bp, Homo sapien
catgcagaaactcaatctggtaatc

SEQ ID NO: 5128134 - DNA, 25 bp, Homo sapien
taatctcactatccggtcttcattc

SEQ ID NO: 5128135 - DNA, 25 bp, Homo sapien
atctcactatccggtcttcattctt

SEQ ID NO: 5128136 - DNA, 25 bp, Homo sapien
aaatctaatctcactatccggtctt

SEQ ID NO: 5128137 - DNA, 25 bp, Homo sapien
tctaatctcactatccggtcttcat

SEQ ID NO: 5128138 - DNA, 25 bp, Homo sapien
gaacgctatggtgtaccctgaagaa

SEQ ID NO: 5128139 - DNA, 25 bp, Homo sapien
tgttgtccagtcatgcaggcttctg

SEQ ID NO: 5128140 - DNA, 25 bp, Homo sapien
tatgtcaaagcccatggtagaacgc

SEQ ID NO: 5128141 - DNA, 25 bp, Homo sapien
aaatgtgatgtcagacgaaaggacc

SEQ ID NO: 5128142 - DNA, 25 bp, Homo sapien
tacttttgaactgggatctgcttct

SEQ ID NO: 5128143 - DNA, 25 bp, Homo sapien
tatggctacttttgaactgggatct

SEQ ID NO: 5128144 - DNA, 25 bp, Homo sapien
ttcttatggctacttttgaactggg

SEQ ID NO: 5128145 - DNA, 25 bp, Homo sapien
aactgggatctgcttctttcagggt

SEQ ID NO: 5128146 - DNA, 25 bp, Homo sapien
acaaattccacattgggatctttat

SEQ ID NO: 5128147 - DNA, 25 bp, Homo sapien
attccacattgggatctttatcaca

SEQ ID NO: 5128148 - DNA, 25 bp, Homo sapien
tccacattgggatctttatcacaac

SEQ ID NO: 5128149 - DNA, 25 bp, Homo sapien
tccttgaacccctaacatgcataca

SEQ ID NO: 5128150 - DNA, 25 bp, Homo sapien
atatgaaatttccagtagttctttc

SEQ ID NO: 5128151 - DNA, 25 bp, Homo sapien
ggtagtctatagcactgaacctata

SEQ ID NO: 5128152 - DNA, 25 bp, Homo sapien
aagtcaatggtagtctatagcactg

SEQ ID NO: 5128153 - DNA, 25 bp, Homo sapien
gggctgagacgatttggtttcctaa

SEQ ID NO: 5128154 - DNA, 25 bp, Homo sapien
tcagaatcaccgtcttaaaaggctg

SEQ ID NO: 5128155 - DNA, 25 bp, Homo sapien
taaaactcagaggtacctcatgcac

SEQ ID NO: 5128156 - DNA, 25 bp, Homo sapien
tgtctaccaaagagtcaggaaagca

SEQ ID NO: 5128157 - DNA, 25 bp, Homo sapien
tacatgtcggcagtaagctttagta

SEQ ID NO: 5128158 - DNA, 25 bp, Homo sapien
ctcagctggttgtttctgagaagac

SEQ ID NO: 5128159 - DNA, 25 bp, Homo sapien
cttctcagctggttgtttctgagaa

SEQ ID NO: 5128160 - DNA, 25 bp, Homo sapien
tcagctggttgtttctgagaagaca

SEQ ID NO: 5128161 - DNA, 25 bp, Homo sapien
tctcagctggttgtttctgagaaga

SEQ ID NO: 5128162 - DNA, 25 bp, Homo sapien
ttatttctgtggctatattcgaaac

SEQ ID NO: 5128163 - DNA, 25 bp, Homo sapien
atttctgtggctatattcgaaacag

SEQ ID NO: 5128164 - DNA, 25 bp, Homo sapien
tatttctgtggctatattcgaaaca

SEQ ID NO: 5128165 - DNA, 25 bp, Homo sapien
ctcagctggttgtttctgagaagac

SEQ ID NO: 5128166 - DNA, 25 bp, Homo sapien
tcagctggttgtttctgagaagaca

SEQ ID NO: 5128167 - DNA, 25 bp, Homo sapien
cttctcagctggttgtttctgagaa

SEQ ID NO: 5128168 - DNA, 25 bp, Homo sapien
tctcagctggttgtttctgagaaga

SEQ ID NO: 5128169 - DNA, 25 bp, Homo sapien
ttgcaaaattatgtctcccagattg

SEQ ID NO: 5128170 - DNA, 25 bp, Homo sapien
acaaatgtagaatctcaggcctgct

SEQ ID NO: 5128171 - DNA, 25 bp, Homo sapien
gaatgtgcagcttcaaagagtcccc

SEQ ID NO: 5128172 - DNA, 25 bp, Homo sapien
gaagttcttgtctatcttggctgaa

SEQ ID NO: 5128173 - DNA, 25 bp, Homo sapien
aacccatgtggtgtaataatgtgcc

SEQ ID NO: 5128174 - DNA, 25 bp, Homo sapien
tactgcaaagttcatgtcgaagacc

SEQ ID NO: 5128175 - DNA, 25 bp, Homo sapien
tgtgccctctagtttaggctacaga

SEQ ID NO: 5128176 - DNA, 25 bp, Homo sapien
gcaaaattatgctgtcccctgactc

SEQ ID NO: 5128177 - DNA, 25 bp, Homo sapien
ccaggccgattgtttctgagaagac

SEQ ID NO: 5128178 - DNA, 25 bp, Homo sapien
tccaggccgattgtttctgagaaga

SEQ ID NO: 5128179 - DNA, 25 bp, Homo sapien
cttccaggccgattgtttctgagaa

SEQ ID NO: 5128180 - DNA, 25 bp, Homo sapien
caggccgattgtttctgagaagaca

SEQ ID NO: 5128181 - DNA, 25 bp, Homo sapien
ttattcttgtggcaatattcaaaag

SEQ ID NO: 5128182 - DNA, 25 bp, Homo sapien
tcttgtggcaatattcaaaagagaa

SEQ ID NO: 5128183 - DNA, 25 bp, Homo sapien
tattcttgtggcaatattcaaaaga

SEQ ID NO: 5128184 - DNA, 25 bp, Homo sapien
ttcttgtggcaatattcaaaagaga

SEQ ID NO: 5128185 - DNA, 25 bp, Homo sapien
atggtgggcagattctcaggatact

SEQ ID NO: 5128186 - DNA, 25 bp, Homo sapien
tcatggtgggcagattctcaggata

SEQ ID NO: 5128187 - DNA, 25 bp, Homo sapien
cttcatggtgggcagattctcagga

SEQ ID NO: 5128188 - DNA, 25 bp, Homo sapien
catggtgggcagattctcaggatac

SEQ ID NO: 5128189 - DNA, 25 bp, Homo sapien
tttggtggctgtattcagaacagaa

SEQ ID NO: 5128190 - DNA, 25 bp, Homo sapien
ttggtggctgtattcagaacagaat

SEQ ID NO: 5128191 - DNA, 25 bp, Homo sapien
tcagcttagatagacagttgtagaa

SEQ ID NO: 5128192 - DNA, 25 bp, Homo sapien
ggaggatgctatggcctatctttaa

SEQ ID NO: 5128193 - DNA, 25 bp, Homo sapien
taggctactgctatgtctacattgc

SEQ ID NO: 5128194 - DNA, 25 bp, Homo sapien
aaagttgtgaggacacttccaataa

SEQ ID NO: 5128195 - DNA, 25 bp, Homo sapien
ctgtggctggttattttcatattct

SEQ ID NO: 5128196 - DNA, 25 bp, Homo sapien
ttcatattcttcaagcctcttttgc

SEQ ID NO: 5128197 - DNA, 25 bp, Homo sapien
gatgccatttctaagtcttgttctt

SEQ ID NO: 5128198 - DNA, 25 bp, Homo sapien
tttgctctccctctgatgccatttc

SEQ ID NO: 5128199 - DNA, 25 bp, Homo sapien
tactctatggtacagtgctaagcaa

SEQ ID NO: 5128200 - DNA, 25 bp, Homo sapien
tatagcaataaatggcagctgggtt

SEQ ID NO: 5128201 - DNA, 25 bp, Homo sapien
taaacaaacacattgggcgtgccat

SEQ ID NO: 5128202 - DNA, 25 bp, Homo sapien
agcaagcaggtaacatgatcaggtg

SEQ ID NO: 5128203 - DNA, 25 bp, Homo sapien
gcaggaaaagatacataggcagagc

SEQ ID NO: 5128204 - DNA, 25 bp, Homo sapien
taatttatataacatggatacacat

SEQ ID NO: 5128205 - DNA, 25 bp, Homo sapien
gaaaagatacataggcagagcacag

SEQ ID NO: 5128206 - DNA, 25 bp, Homo sapien
taacatggatacacatcattgtaca

SEQ ID NO: 5128207 - DNA, 25 bp, Homo sapien
actgtcttctagtaaaagacggcgc

SEQ ID NO: 5128208 - DNA, 25 bp, Homo sapien
ctggcttgaatattaagtattgcct

SEQ ID NO: 5128209 - DNA, 25 bp, Homo sapien
taaaagacggcgctttctgcactca

SEQ ID NO: 5128210 - DNA, 25 bp, Homo sapien
gaaggttttgtactctagcatcaca

SEQ ID NO: 5128211 - DNA, 25 bp, Homo sapien
tttcaaatgattcaattcatttacc

SEQ ID NO: 5128212 - DNA, 25 bp, Homo sapien
caaatgattcaattcatttaccaac

SEQ ID NO: 5128213 - DNA, 25 bp, Homo sapien
tcatattggcgttctttttctttca

SEQ ID NO: 5128214 - DNA, 25 bp, Homo sapien
tgctttttttcatattggcgttctt

SEQ ID NO: 5128215 - DNA, 25 bp, Homo sapien
gaaggtgttatcttcctgccaaact

SEQ ID NO: 5128216 - DNA, 25 bp, Homo sapien
tagatgctctaagtaacctgccctc

SEQ ID NO: 5128217 - DNA, 25 bp, Homo sapien
tccagttaaggatacagaaggtgtt

SEQ ID NO: 5128218 - DNA, 25 bp, Homo sapien
taaaactccagtggccttagatgct

SEQ ID NO: 5128219 - DNA, 25 bp, Homo sapien
ttgttgctgattgtttgtttaagac

SEQ ID NO: 5128220 - DNA, 25 bp, Homo sapien
gatgaagcatccagcaaagcttttg

SEQ ID NO: 5128221 - DNA, 25 bp, Homo sapien
catttttgttaaagctgtctcacag

SEQ ID NO: 5128222 - DNA, 25 bp, Homo sapien
catctcattttctaaatagatgcag

SEQ ID NO: 5128223 - DNA, 25 bp, Homo sapien
tgctgacctataacccccattttag

SEQ ID NO: 5128224 - DNA, 25 bp, Homo sapien
caccccttcaatctgcatatcgtta

SEQ ID NO: 5128225 - DNA, 25 bp, Homo sapien
caatctgcatatcgttaatggctac

SEQ ID NO: 5128226 - DNA, 25 bp, Homo sapien
ccttcaatctgcatatcgttaatgg

SEQ ID NO: 5128227 - DNA, 25 bp, Homo sapien
gtcgccttccatccccttagtacat

SEQ ID NO: 5128228 - DNA, 25 bp, Homo sapien
ccccttagtacatcttatagtagct

SEQ ID NO: 5128229 - DNA, 25 bp, Homo sapien
tccatccccttagtacatcttatag

SEQ ID NO: 5128230 - DNA, 25 bp, Homo sapien
tagtagctgtaagttgatcctgtgt

SEQ ID NO: 5128231 - DNA, 25 bp, Homo sapien
tttcatactacagtgctcttttgct

SEQ ID NO: 5128232 - DNA, 25 bp, Homo sapien
ttttcatactacagtgctcttttgc

SEQ ID NO: 5128233 - DNA, 25 bp, Homo sapien
ttctcaagtcgctcaatttggtcat

SEQ ID NO: 5128234 - DNA, 25 bp, Homo sapien
gattttctcaagtcgctcaatttgg

SEQ ID NO: 5128235 - DNA, 25 bp, Homo sapien
ctcaagtcgctcaatttggtcatcc

SEQ ID NO: 5128236 - DNA, 25 bp, Homo sapien
caaacttgaacgctgcaggattttc

SEQ ID NO: 5128237 - DNA, 25 bp, Homo sapien
atgacaccacagctgcaacgttcca

SEQ ID NO: 5128238 - DNA, 25 bp, Homo sapien
ttatcatgtaaacccactgtaagtc

SEQ ID NO: 5128239 - DNA, 25 bp, Homo sapien
tctgtattgtagattgatcatccct

SEQ ID NO: 5128240 - DNA, 25 bp, Homo sapien
tgacaggctctggtgaaaatagtaa

SEQ ID NO: 5128241 - DNA, 25 bp, Homo sapien
cttcatctagctcttgaacacctgt

SEQ ID NO: 5128242 - DNA, 25 bp, Homo sapien
tcatctagctcttgaacacctgtgg

SEQ ID NO: 5128243 - DNA, 25 bp, Homo sapien
tctagctcttgaacacctgtggcat

SEQ ID NO: 5128244 - DNA, 25 bp, Homo sapien
atctagctcttgaacacctgtggca

SEQ ID NO: 5128245 - DNA, 25 bp, Homo sapien
gctatggaacatgaagaattaacaa

SEQ ID NO: 5128246 - DNA, 25 bp, Homo sapien
catctttcactagatgtgtgtaaga

SEQ ID NO: 5128247 - DNA, 25 bp, Homo sapien
gagaggaataccgttcactacttag

SEQ ID NO: 5128248 - DNA, 25 bp, Homo sapien
gactgcttgtgacctgtaattgctt

SEQ ID NO: 5128249 - DNA, 25 bp, Homo sapien
tagaagggatactagcccaggtttg

SEQ ID NO: 5128250 - DNA, 25 bp, Homo sapien
gaagacatagaagggatactagccc

SEQ ID NO: 5128251 - DNA, 25 bp, Homo sapien
ggcaattcccatacagagtcataca

SEQ ID NO: 5128252 - DNA, 25 bp, Homo sapien
acaaacaggcaattcccatacagag

SEQ ID NO: 5128253 - DNA, 25 bp, Homo sapien
cagcaaccatgtgctaaggtactag

SEQ ID NO: 5128254 - DNA, 25 bp, Homo sapien
catttaataaacgtctttgcatgtc

SEQ ID NO: 5128255 - DNA, 25 bp, Homo sapien
atttaataaacgtctttgcatgtca

SEQ ID NO: 5128256 - DNA, 25 bp, Homo sapien
actgaccagagtccaccctcattcc

SEQ ID NO: 5128257 - DNA, 25 bp, Homo sapien
cactgaccagagtccaccctcattc

SEQ ID NO: 5128258 - DNA, 25 bp, Homo sapien
cccactgaccagagtccaccctcat

SEQ ID NO: 5128259 - DNA, 25 bp, Homo sapien
ccactgaccagagtccaccctcatt

SEQ ID NO: 5128260 - DNA, 25 bp, Homo sapien
caccagcaggtgataagctcccttg

SEQ ID NO: 5128261 - DNA, 25 bp, Homo sapien
gagctcagatcccaatttgtgctgc

SEQ ID NO: 5128262 - DNA, 25 bp, Homo sapien
ttcactcagttggatctggtcctcc

SEQ ID NO: 5128263 - DNA, 25 bp, Homo sapien
gtgctgctagattcactcagttgga

SEQ ID NO: 5128264 - DNA, 25 bp, Homo sapien
tctgctttggccaataactgggctc

SEQ ID NO: 5128265 - DNA, 25 bp, Homo sapien
cagctttgtccaggacagccagagg

SEQ ID NO: 5128266 - DNA, 25 bp, Homo sapien
gcagctctgactggcagctttgtcc

SEQ ID NO: 5128267 - DNA, 25 bp, Homo sapien
ccacactgagcaagcagctctgact

SEQ ID NO: 5128268 - DNA, 25 bp, Homo sapien
cctggtacttgttcagcctgtgctg

SEQ ID NO: 5128269 - DNA, 25 bp, Homo sapien
ctcctggtacttgttcagcctgtgc

SEQ ID NO: 5128270 - DNA, 25 bp, Homo sapien
tggtacttgttcagcctgtgctggg

SEQ ID NO: 5128271 - DNA, 25 bp, Homo sapien
tgctcctggtacttgttcagcctgt

SEQ ID NO: 5128272 - DNA, 25 bp, Homo sapien
gtaggttcaggggaatactcagcct

SEQ ID NO: 5128273 - DNA, 25 bp, Homo sapien
tcaggggaatactcagcctgattat

SEQ ID NO: 5128274 - DNA, 25 bp, Homo sapien
ggttcaggggaatactcagcctgat

SEQ ID NO: 5128275 - DNA, 25 bp, Homo sapien
ctagagtaggttcaggggaatactc

SEQ ID NO: 5128276 - DNA, 25 bp, Homo sapien
aagccctcactgttgagaatcccag

SEQ ID NO: 5128277 - DNA, 25 bp, Homo sapien
agctccactgtcaagcctgtttggg

SEQ ID NO: 5128278 - DNA, 25 bp, Homo sapien
tagcaaactcacatgaaagccctca

SEQ ID NO: 5128279 - DNA, 25 bp, Homo sapien
ctgtttggggattttgcctcagctg

SEQ ID NO: 5128280 - DNA, 25 bp, Homo sapien
tattaccactgatgcacaggcacca

SEQ ID NO: 5128281 - DNA, 25 bp, Homo sapien
cctccttctagttcttcgccttcgt

SEQ ID NO: 5128282 - DNA, 25 bp, Homo sapien
tcgtcaccatgctgctctacattct

SEQ ID NO: 5128283 - DNA, 25 bp, Homo sapien
ctttgaaagccctgattatttctcc

SEQ ID NO: 5128284 - DNA, 25 bp, Homo sapien
gaaaacttccaacgccaaggctaca

SEQ ID NO: 5128285 - DNA, 25 bp, Homo sapien
ttccaacgccaaggctacatctctt

SEQ ID NO: 5128286 - DNA, 25 bp, Homo sapien
aacttccaacgccaaggctacatct

SEQ ID NO: 5128287 - DNA, 25 bp, Homo sapien
cttgaaaacttccaacgccaaggct

SEQ ID NO: 5128288 - DNA, 25 bp, Homo sapien
cagccagctctcctctccttccctt

SEQ ID NO: 5128289 - DNA, 25 bp, Homo sapien
ccacgggaccactggcattctgtac

SEQ ID NO: 5128290 - DNA, 25 bp, Homo sapien
tggcattctgtacatgagtgctgct

SEQ ID NO: 5128291 - DNA, 25 bp, Homo sapien
catgacagcctgtaccacgggacca

SEQ ID NO: 5128292 - DNA, 25 bp, Homo sapien
tgtaccacgggaccactggcattct

SEQ ID NO: 5128293 - DNA, 25 bp, Homo sapien
atggccatatgtggctctgctctgc

SEQ ID NO: 5128294 - DNA, 25 bp, Homo sapien
gacatggccatatgtggctctgctc

SEQ ID NO: 5128295 - DNA, 25 bp, Homo sapien
gtgacatggccatatgtggctctgc

SEQ ID NO: 5128296 - DNA, 25 bp, Homo sapien
gagtgacatggccatatgtggctct

SEQ ID NO: 5128297 - DNA, 25 bp, Homo sapien
caaagtttaacttattctagcatta

SEQ ID NO: 5128298 - DNA, 25 bp, Homo sapien
aagggaagtctcttctgccgtgagc

SEQ ID NO: 5128299 - DNA, 25 bp, Homo sapien
tgggaggtgaaagtgctatattttt

SEQ ID NO: 5128300 - DNA, 25 bp, Homo sapien
tcccaaagtttaacttattctagca

SEQ ID NO: 5128301 - DNA, 25 bp, Homo sapien
tcatctccctggtgttcctgttgtc

SEQ ID NO: 5128302 - DNA, 25 bp, Homo sapien
gagttctggtaagaaccagcagcat

SEQ ID NO: 5128303 - DNA, 25 bp, Homo sapien
ttgaatcctggagagttctggtaag

SEQ ID NO: 5128304 - DNA, 25 bp, Homo sapien
ctccctggtgttcctgttgtcttcc

SEQ ID NO: 5128305 - DNA, 25 bp, Homo sapien
ccaggtagcaaacccattgctgcaa

SEQ ID NO: 5128306 - DNA, 25 bp, Homo sapien
cattgctgcaaggatgggtgatgta

SEQ ID NO: 5128307 - DNA, 25 bp, Homo sapien
tatgcttttatcttccagatatttg

SEQ ID NO: 5128308 - DNA, 25 bp, Homo sapien
gatgggtgatgtatgtctcactcac

SEQ ID NO: 5128309 - DNA, 25 bp, Homo sapien
ctaacaatcggatgtgactttacca

SEQ ID NO: 5128310 - DNA, 25 bp, Homo sapien
cggatgtgactttaccatgactcag

SEQ ID NO: 5128311 - DNA, 25 bp, Homo sapien
caatcggatgtgactttaccatgac

SEQ ID NO: 5128312 - DNA, 25 bp, Homo sapien
tcggatgtgactttaccatgactca

SEQ ID NO: 5128313 - DNA, 25 bp, Homo sapien
tacaattgatttaactggtcccctg

SEQ ID NO: 5128314 - DNA, 25 bp, Homo sapien
tcaactcataagaagggtctgtgcc

SEQ ID NO: 5128315 - DNA, 25 bp, Homo sapien
ggtaaccaaagccatcatcaactca

SEQ ID NO: 5128316 - DNA, 25 bp, Homo sapien
ggtcccctgtggatgaagagatcat

SEQ ID NO: 5128317 - DNA, 25 bp, Homo sapien
tgatgacaacagccgcacccatctt

SEQ ID NO: 5128318 - DNA, 25 bp, Homo sapien
ctcagtctgaagttttttaggcttt

SEQ ID NO: 5128319 - DNA, 25 bp, Homo sapien
aacagccgcacccatcttgactggg

SEQ ID NO: 5128320 - DNA, 25 bp, Homo sapien
tttaggctttatgaagcctgtggtc

SEQ ID NO: 5128321 - DNA, 25 bp, Homo sapien
taatggccagagcaagaaagggacc

SEQ ID NO: 5128322 - DNA, 25 bp, Homo sapien
gtaatggccagagcaagaaagggac

SEQ ID NO: 5128323 - DNA, 25 bp, Homo sapien
ctgcacagtaatggccagagcaaga

SEQ ID NO: 5128324 - DNA, 25 bp, Homo sapien
acagtaatggccagagcaagaaagg

SEQ ID NO: 5128325 - DNA, 25 bp, Homo sapien
cgtgtcctgcgatctgggtcagcag

SEQ ID NO: 5128326 - DNA, 25 bp, Homo sapien
gctcggtcgtgtcatctgggatgca

SEQ ID NO: 5128327 - DNA, 25 bp, Homo sapien
gggtcagcagctcggtcgtgtcatc

SEQ ID NO: 5128328 - DNA, 25 bp, Homo sapien
cagaagggaaatgcactatctcgtg

SEQ ID NO: 5128329 - DNA, 25 bp, Homo sapien
ggctgtggcctacccatgggacagt

SEQ ID NO: 5128330 - DNA, 25 bp, Homo sapien
ccttcctcagcggttcccactccca

SEQ ID NO: 5128331 - DNA, 25 bp, Homo sapien
tgctgcagccgccaggctggggcct

SEQ ID NO: 5128332 - DNA, 25 bp, Homo sapien
ttcaccttcctcagcggttcccact

SEQ ID NO: 5128333 - DNA, 25 bp, Homo sapien
gtagtagcatgcgtgtggaagaccc

SEQ ID NO: 5128334 - DNA, 25 bp, Homo sapien
cccacagaggtagggcactccaggg

SEQ ID NO: 5128335 - DNA, 25 bp, Homo sapien
atacagggagttccagccccacaga

SEQ ID NO: 5128336 - DNA, 25 bp, Homo sapien
tggaagaccctagctcggatacagg

SEQ ID NO: 5128337 - DNA, 25 bp, Homo sapien
cacagggagacttgcagtcaggtga

SEQ ID NO: 5128338 - DNA, 25 bp, Homo sapien
ggagctgccttatgggctgtaagca

SEQ ID NO: 5128339 - DNA, 25 bp, Homo sapien
gggccagtgacacgcgggtgggagc

SEQ ID NO: 5128340 - DNA, 25 bp, Homo sapien
ccttatgggctgtaagcagcaccca

SEQ ID NO: 5128341 - DNA, 25 bp, Homo sapien
gagctagctgacaggatgacacctg

SEQ ID NO: 5128342 - DNA, 25 bp, Homo sapien
ttgggggcaggagctagctgacagg

SEQ ID NO: 5128343 - DNA, 25 bp, Homo sapien
aggagctagctgacaggatgacacc

SEQ ID NO: 5128344 - DNA, 25 bp, Homo sapien
gctagctgacaggatgacacctgcc

SEQ ID NO: 5128345 - DNA, 25 bp, Homo sapien
accctcgagtgccagtggtgcttgg

SEQ ID NO: 5128346 - DNA, 25 bp, Homo sapien
agtggacaaccgtgccaatcaccca

SEQ ID NO: 5128347 - DNA, 25 bp, Homo sapien
aaggaccctcgagtgccagtggtgc

SEQ ID NO: 5128348 - DNA, 25 bp, Homo sapien
gcttggctttctcatgagtcctggt

SEQ ID NO: 5128349 - DNA, 25 bp, Homo sapien
taatgagcacagtgaggctctgggc

SEQ ID NO: 5128350 - DNA, 25 bp, Homo sapien
ctaatgagcacagtgaggctctggg

SEQ ID NO: 5128351 - DNA, 25 bp, Homo sapien
tgtctgtaaacgtccagagaaaagc

SEQ ID NO: 5128352 - DNA, 25 bp, Homo sapien
aaagcatgtgcctgaagggtctatg

SEQ ID NO: 5128353 - DNA, 25 bp, Homo sapien
ggcttgaggcaagtagggagcccag

SEQ ID NO: 5128354 - DNA, 25 bp, Homo sapien
aggacctgtctgtaaacgtccagag

SEQ ID NO: 5128355 - DNA, 25 bp, Homo sapien
tgcagtcagttgagaggagacccct

SEQ ID NO: 5128356 - DNA, 25 bp, Homo sapien
tatacctcttacaatcagctctatg

SEQ ID NO: 5128357 - DNA, 25 bp, Homo sapien
gaaaagggatttagtgacacataac

SEQ ID NO: 5128358 - DNA, 25 bp, Homo sapien
caaaaatgctaagactatggttgca

SEQ ID NO: 5128359 - DNA, 25 bp, Homo sapien
caaggatccacaactgggtttccaa

SEQ ID NO: 5128360 - DNA, 25 bp, Homo sapien
tactgtattctcaaggatccacaac

SEQ ID NO: 5128361 - DNA, 25 bp, Homo sapien
ctcaaggatccacaactgggtttcc

SEQ ID NO: 5128362 - DNA, 25 bp, Homo sapien
ggatccacaactgggtttccaatat

SEQ ID NO: 5128363 - DNA, 25 bp, Homo sapien
gcagcttggcatactgcgtggctca

SEQ ID NO: 5128364 - DNA, 25 bp, Homo sapien
gcgtggctcaccaagcatgaaacag

SEQ ID NO: 5128365 - DNA, 25 bp, Homo sapien
ctgtggtaggatgggtatcctttct

SEQ ID NO: 5128366 - DNA, 25 bp, Homo sapien
gcttggcatactgcgtggctcacca

SEQ ID NO: 5128367 - DNA, 25 bp, Homo sapien
ggaggagaatgaataaataaagtga

SEQ ID NO: 5128368 - DNA, 25 bp, Homo sapien
tgttggaggagaatgaataaataaa

SEQ ID NO: 5128369 - DNA, 25 bp, Homo sapien
tggaggagaatgaataaataaagtg

SEQ ID NO: 5128370 - DNA, 25 bp, Homo sapien
ctaatgttggaggagaatgaataaa

SEQ ID NO: 5128371 - DNA, 25 bp, Homo sapien
ctattgcggtcctccagctcatctt

SEQ ID NO: 5128372 - DNA, 25 bp, Homo sapien
ccctattgcggtcctccagctcatc

SEQ ID NO: 5128373 - DNA, 25 bp, Homo sapien
ctcctcctccttggctttaattatg

SEQ ID NO: 5128374 - DNA, 25 bp, Homo sapien
agctcatctttcacctcacccccct

SEQ ID NO: 5128375 - DNA, 25 bp, Homo sapien
cttcaacaggggagagtgttagagg

SEQ ID NO: 5128376 - DNA, 25 bp, Homo sapien
tcaacaggggagagtgttagaggga

SEQ ID NO: 5128377 - DNA, 25 bp, Homo sapien
ttcaacaggggagagtgttagaggg

SEQ ID NO: 5128378 - DNA, 25 bp, Homo sapien
acaggggagagtgttagagggagaa

SEQ ID NO: 5128379 - DNA, 25 bp, Homo sapien
tgcgaagtcacccatcagggcctga

SEQ ID NO: 5128380 - DNA, 25 bp, Homo sapien
tacagtggaaggtggataacgccct

SEQ ID NO: 5128381 - DNA, 25 bp, Homo sapien
gacgctgagcaaagcagactacgag

SEQ ID NO: 5128382 - DNA, 25 bp, Homo sapien
aacacaaagtctacgcctgcgaagt

SEQ ID NO: 5128383 - DNA, 25 bp, Homo sapien
tgacctctcctggtatggctgaaaa

SEQ ID NO: 5128384 - DNA, 25 bp, Homo sapien
cacttcctcttaggcaggtggccaa

SEQ ID NO: 5128385 - DNA, 25 bp, Homo sapien
gatgacgtggccattctttgcctaa

SEQ ID NO: 5128386 - DNA, 25 bp, Homo sapien
gcatatggttacaggccttgaggcc

SEQ ID NO: 5128387 - DNA, 25 bp, Homo sapien
attgagtggctttggtggccatgcc

SEQ ID NO: 5128388 - DNA, 25 bp, Homo sapien
tggcaccgcgagctgtagacagagc

SEQ ID NO: 5128389 - DNA, 25 bp, Homo sapien
tgtgtctgcccgattgatgctgccg

SEQ ID NO: 5128390 - DNA, 25 bp, Homo sapien
cagagccgcggtctttctcgattga

SEQ ID NO: 5128391 - DNA, 25 bp, Homo sapien
gcggagggaccaaggtggagatcaa

SEQ ID NO: 5128392 - DNA, 25 bp, Homo sapien
ttcggcggagggaccaaggtggaga

SEQ ID NO: 5128393 - DNA, 25 bp, Homo sapien
tcggcggagggaccaaggtggagat

SEQ ID NO: 5128394 - DNA, 25 bp, Homo sapien
cggcggagggaccaaggtggagatc

SEQ ID NO: 5128395 - DNA, 25 bp, Homo sapien
gatgccagggatctaacaaacttca

SEQ ID NO: 5128396 - DNA, 25 bp, Homo sapien
tcattcccaggttaggtacagagga

SEQ ID NO: 5128397 - DNA, 25 bp, Homo sapien
gattttcattagtcggatgccaggg

SEQ ID NO: 5128398 - DNA, 25 bp, Homo sapien
gaccaagctggagatcaaacgtaag

SEQ ID NO: 5128399 - DNA, 25 bp, Homo sapien
gccaagggaccaaggtggaaatcaa

SEQ ID NO: 5128400 - DNA, 25 bp, Homo sapien
ggccaagggaccaaggtggaaatca

SEQ ID NO: 5128401 - DNA, 25 bp, Homo sapien
agttcacaatgcaaacggcccgttt

SEQ ID NO: 5128402 - DNA, 25 bp, Homo sapien
ttcacaatgcaaacggcccgtttat

SEQ ID NO: 5128403 - DNA, 25 bp, Homo sapien
cacaatgcaaacggcccgtttataa

SEQ ID NO: 5128404 - DNA, 25 bp, Homo sapien
cagttcacaatgcaaacggcccgtt

SEQ ID NO: 5128405 - DNA, 25 bp, Homo sapien
ctgaaaagactgtggcactttttaa

SEQ ID NO: 5128406 - DNA, 25 bp, Homo sapien
tctagtagtattataagtcagcaga

SEQ ID NO: 5128407 - DNA, 25 bp, Homo sapien
gctttctagtagtattataagtcag

SEQ ID NO: 5128408 - DNA, 25 bp, Homo sapien
tataagtcagcagataattggatcc

SEQ ID NO: 5128409 - DNA, 25 bp, Homo sapien
taaatttgctttctagtagtattat

SEQ ID NO: 5128410 - DNA, 25 bp, Homo sapien
tagtcagtaatggacaatgattata

SEQ ID NO: 5128411 - DNA, 25 bp, Homo sapien
gtcagtaatggacaatgattataca

SEQ ID NO: 5128412 - DNA, 25 bp, Homo sapien
cagtaatggacaatgattatacata

SEQ ID NO: 5128413 - DNA, 25 bp, Homo sapien
ctgtagtcagtaatggacaatgatt

SEQ ID NO: 5128414 - DNA, 25 bp, Homo sapien
ggacttgcagttgatggtggccctc

SEQ ID NO: 5128415 - DNA, 25 bp, Homo sapien
ggtcatcacgatgtccccgtaggca

SEQ ID NO: 5128416 - DNA, 25 bp, Homo sapien
gctgtataaaacactctggctggac

SEQ ID NO: 5128417 - DNA, 25 bp, Homo sapien
gattcccgggtagatgcccagtaaa

SEQ ID NO: 5128418 - DNA, 25 bp, Homo sapien
ggaggaggtttgtgttcgaggctga

SEQ ID NO: 5128419 - DNA, 25 bp, Homo sapien
tgtgggaggagtactataatattgc

SEQ ID NO: 5128420 - DNA, 25 bp, Homo sapien
ttgtgttcgaggctgaagcactgtg

SEQ ID NO: 5128421 - DNA, 25 bp, Homo sapien
ggaggagtactataatattgctgac

SEQ ID NO: 5128422 - DNA, 25 bp, Homo sapien
acacagaggaagcatgcatgttggg

SEQ ID NO: 5128423 - DNA, 25 bp, Homo sapien
ccaacacacagaggaagcatgcatg

SEQ ID NO: 5128424 - DNA, 25 bp, Homo sapien
aacacacagaggaagcatgcatgtt

SEQ ID NO: 5128425 - DNA, 25 bp, Homo sapien
cacacagaggaagcatgcatgttgg

SEQ ID NO: 5128426 - DNA, 25 bp, Homo sapien
tccaacgaataaatcaagagagtga

SEQ ID NO: 5128427 - DNA, 25 bp, Homo sapien
cctccaacgaataaatcaagagagt

SEQ ID NO: 5128428 - DNA, 25 bp, Homo sapien
ctccaacgaataaatcaagagagtg

SEQ ID NO: 5128429 - DNA, 25 bp, Homo sapien
ccaacgaataaatcaagagagtgac

SEQ ID NO: 5128430 - DNA, 25 bp, Homo sapien
ttaatttaatcctgggccctgcaaa

SEQ ID NO: 5128431 - DNA, 25 bp, Homo sapien
taatttaatcctgggccctgcaaac

SEQ ID NO: 5128432 - DNA, 25 bp, Homo sapien
agagatccagcaaaagtcaagtctc

SEQ ID NO: 5128433 - DNA, 25 bp, Homo sapien
caaaaagagatccagcaaaagtcaa

SEQ ID NO: 5128434 - DNA, 25 bp, Homo sapien
aaaagagatccagcaaaagtcaagt

SEQ ID NO: 5128435 - DNA, 25 bp, Homo sapien
aaagagatccagcaaaagtcaagtc

SEQ ID NO: 5128436 - DNA, 25 bp, Homo sapien
gacaatgtctctaagggatctttac

SEQ ID NO: 5128437 - DNA, 25 bp, Homo sapien
aactcctgacaatgtctctaaggga

SEQ ID NO: 5128438 - DNA, 25 bp, Homo sapien
gctcggtcatgtgatgtgtccatgt

SEQ ID NO: 5128439 - DNA, 25 bp, Homo sapien
aaatctatttggctcggtcatgtga

SEQ ID NO: 5128440 - DNA, 25 bp, Homo sapien
ggaaaaagtctaataatccaatcaa

SEQ ID NO: 5128441 - DNA, 25 bp, Homo sapien
gagattaagaaccataatatgtatg

SEQ ID NO: 5128442 - DNA, 25 bp, Homo sapien
tatgtatgaggagctaaaacaactc

SEQ ID NO: 5128443 - DNA, 25 bp, Homo sapien
gatttcgtgagtaataccccactag

SEQ ID NO: 5128444 - DNA, 25 bp, Homo sapien
tgaggaggtgaacctgggaccccat

SEQ ID NO: 5128445 - DNA, 25 bp, Homo sapien
cagagatccaaaggaggaggaagct

SEQ ID NO: 5128446 - DNA, 25 bp, Homo sapien
aagctgaggaggtgaacctgggacc

SEQ ID NO: 5128447 - DNA, 25 bp, Homo sapien
ctgaggaggtgaacctgggacccca

SEQ ID NO: 5128448 - DNA, 25 bp, Homo sapien
gccactgaatcgaggtgggattcca

SEQ ID NO: 5128449 - DNA, 25 bp, Homo sapien
cgtgagtgtcgtttctgccctggta

SEQ ID NO: 5128450 - DNA, 25 bp, Homo sapien
gattccaggaacgagagtagtagct

SEQ ID NO: 5128451 - DNA, 25 bp, Homo sapien
tcctggagtcgctgacatgaatgct

SEQ ID NO: 5128452 - DNA, 25 bp, Homo sapien
gattctatgttattaattgtgaggg

SEQ ID NO: 5128453 - DNA, 25 bp, Homo sapien
taacagggtgtatcactgtgagagg

SEQ ID NO: 5128454 - DNA, 25 bp, Homo sapien
caatcccactgagagaacttggagg

SEQ ID NO: 5128455 - DNA, 25 bp, Homo sapien
gagggaaattatcatgttgtagaca

SEQ ID NO: 5128456 - DNA, 25 bp, Homo sapien
gccatatcaagtgtgtcaggcacag

SEQ ID NO: 5128457 - DNA, 25 bp, Homo sapien
tggtttttgccatatcaagtgtgtc

SEQ ID NO: 5128458 - DNA, 25 bp, Homo sapien
tgaaattgttggcacagctggacaa

SEQ ID NO: 5128459 - DNA, 25 bp, Homo sapien
gctggacaacgtgagaaaggctgtc

SEQ ID NO: 5128460 - DNA, 25 bp, Homo sapien
tatagggtagtcactaatattgaca

SEQ ID NO: 5128461 - DNA, 25 bp, Homo sapien
tagggtagtcactaatattgacatc

SEQ ID NO: 5128462 - DNA, 25 bp, Homo sapien
ttatagggtagtcactaatattgac

SEQ ID NO: 5128463 - DNA, 25 bp, Homo sapien
atagggtagtcactaatattgacat

SEQ ID NO: 5128464 - DNA, 25 bp, Homo sapien
taatactgatcttttggccagctcc

SEQ ID NO: 5128465 - DNA, 25 bp, Homo sapien
tcagtgactaggtgcattgtaaatc

SEQ ID NO: 5128466 - DNA, 25 bp, Homo sapien
tacagcagttctagccttatgaaat

SEQ ID NO: 5128467 - DNA, 25 bp, Homo sapien
atttggtaaaccatgctctaaacgg

SEQ ID NO: 5128468 - DNA, 25 bp, Homo sapien
gatgttcttgtcaagcaatcaagca

SEQ ID NO: 5128469 - DNA, 25 bp, Homo sapien
caatgcaagatagattaacatctga

SEQ ID NO: 5128470 - DNA, 25 bp, Homo sapien
actcttgctactcaattcaacactg

SEQ ID NO: 5128471 - DNA, 25 bp, Homo sapien
tcaataaagtaatatgccacataga

SEQ ID NO: 5128472 - DNA, 25 bp, Homo sapien
taccaagcatccaataaagacactg

SEQ ID NO: 5128473 - DNA, 25 bp, Homo sapien
cagtgggtctgggaccgatttcacc

SEQ ID NO: 5128474 - DNA, 25 bp, Homo sapien
gcaaattattactgtctgcagagta

SEQ ID NO: 5128475 - DNA, 25 bp, Homo sapien
gagccagtgagagtgtcagtttctt

SEQ ID NO: 5128476 - DNA, 25 bp, Homo sapien
tctgtagtaacacagctgatgtgca

SEQ ID NO: 5128477 - DNA, 25 bp, Homo sapien
gcattctgtagtaacacagctgatg

SEQ ID NO: 5128478 - DNA, 25 bp, Homo sapien
aaaagcattctgtagtaacacagct

SEQ ID NO: 5128479 - DNA, 25 bp, Homo sapien
ttctgtagtaacacagctgatgtgc

SEQ ID NO: 5128480 - DNA, 25 bp, Homo sapien
cacagtcaagaaggacactctcatt

SEQ ID NO: 5128481 - DNA, 25 bp, Homo sapien
cctggcgagtgaagatattgtgccc

SEQ ID NO: 5128482 - DNA, 25 bp, Homo sapien
tttgagtgagatcaagcacgtcccc

SEQ ID NO: 5128483 - DNA, 25 bp, Homo sapien
tattgtgcccataggactgggctgc

SEQ ID NO: 5128484 - DNA, 25 bp, Homo sapien
tagctggttggcctggtatcagcag

SEQ ID NO: 5128485 - DNA, 25 bp, Homo sapien
aagctcctgatctataaggcgtcta

SEQ ID NO: 5128486 - DNA, 25 bp, Homo sapien
ataaggcgtctagtttagaaagtgg

SEQ ID NO: 5128487 - DNA, 25 bp, Homo sapien
tgccgggccagtcagagtattagta

SEQ ID NO: 5128488 - DNA, 25 bp, Homo sapien
cagcaatgcatgtaggcagacctct

SEQ ID NO: 5128489 - DNA, 25 bp, Homo sapien
gaaggccatgtcttatcaggacaga

SEQ ID NO: 5128490 - DNA, 25 bp, Homo sapien
tctctgctttcaagacgatgcctgg

SEQ ID NO: 5128491 - DNA, 25 bp, Homo sapien
catgggcaggttaaggtcagctttc

SEQ ID NO: 5128492 - DNA, 25 bp, Homo sapien
ttttgcagtttattactgtcagcag

SEQ ID NO: 5128493 - DNA, 25 bp, Homo sapien
attttgcagtttattactgtcagca

SEQ ID NO: 5128494 - DNA, 25 bp, Homo sapien
ccatggaagccccagctcagcttct

SEQ ID NO: 5128495 - DNA, 25 bp, Homo sapien
tctcttcctcctgctactctggctc

SEQ ID NO: 5128496 - DNA, 25 bp, Homo sapien
tggaagccccagctcagcttctctt

SEQ ID NO: 5128497 - DNA, 25 bp, Homo sapien
tcttcctcctgctactctggctccc

SEQ ID NO: 5128498 - DNA, 25 bp, Homo sapien
tctcttacaacatgattaattgtat

SEQ ID NO: 5128499 - DNA, 25 bp, Homo sapien
tacaacatgattaattgtatggaca

SEQ ID NO: 5128500 - DNA, 25 bp, Homo sapien
gccagatgtgccatccggatgaccc

SEQ ID NO: 5128501 - DNA, 25 bp, Homo sapien
tcttacaacatgattaattgtatgg

SEQ ID NO: 5128502 - DNA, 25 bp, Homo sapien
taagctcctgatctatgctgcatcc

SEQ ID NO: 5128503 - DNA, 25 bp, Homo sapien
cctaagctcctgatctatgctgcat

SEQ ID NO: 5128504 - DNA, 25 bp, Homo sapien
aagctcctgatctatgctgcatcca

SEQ ID NO: 5128505 - DNA, 25 bp, Homo sapien
ctaagctcctgatctatgctgcatc

SEQ ID NO: 5128506 - DNA, 25 bp, Homo sapien
attactgtcagcagcgtagcaactg

SEQ ID NO: 5128507 - DNA, 25 bp, Homo sapien
ttactgtcagcagcgtagcaactgg

SEQ ID NO: 5128508 - DNA, 25 bp, Homo sapien
tattactgtcagcagcgtagcaact

SEQ ID NO: 5128509 - DNA, 25 bp, Homo sapien
ttgtctccaggggaaagagccaccc

SEQ ID NO: 5128510 - DNA, 25 bp, Homo sapien
tttgtctccaggggaaagagccacc

SEQ ID NO: 5128511 - DNA, 25 bp, Homo sapien
ctttgtctccaggggaaagagccac

SEQ ID NO: 5128512 - DNA, 25 bp, Homo sapien
tgtctccaggggaaagagccaccct

SEQ ID NO: 5128513 - DNA, 25 bp, Homo sapien
accagggaaagctcctaagctcctg

SEQ ID NO: 5128514 - DNA, 25 bp, Homo sapien
taagctcctgatctatgatgcctcc

SEQ ID NO: 5128515 - DNA, 25 bp, Homo sapien
catcaaggttcagcggcagtggatc

SEQ ID NO: 5128516 - DNA, 25 bp, Homo sapien
tgatgcctccagtttggaaagtggg

SEQ ID NO: 5128517 - DNA, 25 bp, Homo sapien
tgtaaaagacgcatcaacaacccac

SEQ ID NO: 5128518 - DNA, 25 bp, Homo sapien
gaagggaacagaagatgaattgtaa

SEQ ID NO: 5128519 - DNA, 25 bp, Homo sapien
cctgcaataaggattcctgtttagg

SEQ ID NO: 5128520 - DNA, 25 bp, Homo sapien
caaatttacgctgggagaaaaggag

SEQ ID NO: 5128521 - DNA, 25 bp, Homo sapien
gagctgagctgtactgttgggccac

SEQ ID NO: 5128522 - DNA, 25 bp, Homo sapien
tgcatttcagaggataacaataact

SEQ ID NO: 5128523 - DNA, 25 bp, Homo sapien
ccctggggagatcttggttatataa

SEQ ID NO: 5128524 - DNA, 25 bp, Homo sapien
ggttatataagatgcatttcagagg

SEQ ID NO: 5128525 - DNA, 25 bp, Homo sapien
tgtgtgaacgctgtgtctgcaggtt

SEQ ID NO: 5128526 - DNA, 25 bp, Homo sapien
gactgagcatattgcctttctcaca

SEQ ID NO: 5128527 - DNA, 25 bp, Homo sapien
cctgtgactgagcatattgcctttc

SEQ ID NO: 5128528 - DNA, 25 bp, Homo sapien
gtgtgaacgctgtgtctgcaggttt

SEQ ID NO: 5128529 - DNA, 25 bp, Homo sapien
ttttgcagtttattactgtcagcag

SEQ ID NO: 5128530 - DNA, 25 bp, Homo sapien
attttgcagtttattactgtcagca

SEQ ID NO: 5128531 - DNA, 25 bp, Homo sapien
tggagaaatagtgatgacgcagtct

SEQ ID NO: 5128532 - DNA, 25 bp, Homo sapien
cactggagaaatagtgatgacgcag

SEQ ID NO: 5128533 - DNA, 25 bp, Homo sapien
accactggagaaatagtgatgacgc

SEQ ID NO: 5128534 - DNA, 25 bp, Homo sapien
ctggagaaatagtgatgacgcagtc

SEQ ID NO: 5128535 - DNA, 25 bp, Homo sapien
tctcttcctcctgctactctggctc

SEQ ID NO: 5128536 - DNA, 25 bp, Homo sapien
ggacccagacggaaccatggaagcc

SEQ ID NO: 5128537 - DNA, 25 bp, Homo sapien
catggaagccccagcgcagcttctc

SEQ ID NO: 5128538 - DNA, 25 bp, Homo sapien
tcttcctcctgctactctggctccc

SEQ ID NO: 5128539 - DNA, 25 bp, Homo sapien
tatttctgggagataatctcagcct

SEQ ID NO: 5128540 - DNA, 25 bp, Homo sapien
tcctggaagctatatgagccaaaag

SEQ ID NO: 5128541 - DNA, 25 bp, Homo sapien
cataggttaaatcaaaatggtaggc

SEQ ID NO: 5128542 - DNA, 25 bp, Homo sapien
tggcaagagctcacttttctaggta

SEQ ID NO: 5128543 - DNA, 25 bp, Homo sapien
ttactgccaacagtataatagttac

SEQ ID NO: 5128544 - DNA, 25 bp, Homo sapien
taacagggatcttggtgtctgggtc

SEQ ID NO: 5128545 - DNA, 25 bp, Homo sapien
tgatgtagttggatccacttcccct

SEQ ID NO: 5128546 - DNA, 25 bp, Homo sapien
ccaggccgggacatttttgggcaca

SEQ ID NO: 5128547 - DNA, 25 bp, Homo sapien
taacgagtgcaaatccctgtccagt

SEQ ID NO: 5128548 - DNA, 25 bp, Homo sapien
tgtctacagcataatagttaccctc

SEQ ID NO: 5128549 - DNA, 25 bp, Homo sapien
ctgtctacagcataatagttaccct

SEQ ID NO: 5128550 - DNA, 25 bp, Homo sapien
actgtctacagcataatagttaccc

SEQ ID NO: 5128551 - DNA, 25 bp, Homo sapien
ttttgcagtgtattactgtcagcag

SEQ ID NO: 5128552 - DNA, 25 bp, Homo sapien
gaagattttgcagtgtattactgtc

SEQ ID NO: 5128553 - DNA, 25 bp, Homo sapien
tgcagtgtattactgtcagcagtat

SEQ ID NO: 5128554 - DNA, 25 bp, Homo sapien
cagtgtattactgtcagcagtatgg

SEQ ID NO: 5128555 - DNA, 25 bp, Homo sapien
catctatggtgcatccagcagggcc

SEQ ID NO: 5128556 - DNA, 25 bp, Homo sapien
tcccagacaggttcagtggcagtgg

SEQ ID NO: 5128557 - DNA, 25 bp, Homo sapien
ggccactggcatcccagacaggttc

SEQ ID NO: 5128558 - DNA, 25 bp, Homo sapien
gctcctcatctatggtgcatccagc

SEQ ID NO: 5128559 - DNA, 25 bp, Homo sapien
agcagctacttagcctggtaccagc

SEQ ID NO: 5128560 - DNA, 25 bp, Homo sapien
cggagaaattgtgttgacgcagtct

SEQ ID NO: 5128561 - DNA, 25 bp, Homo sapien
tgttagcagcagctacttagcctgg

SEQ ID NO: 5128562 - DNA, 25 bp, Homo sapien
caccggagaaattgtgttgacgcag

SEQ ID NO: 5128563 - DNA, 25 bp, Homo sapien
gagggaaccatggaaaccccagcgc

SEQ ID NO: 5128564 - DNA, 25 bp, Homo sapien
atggaaaccccagcgcagcttctct

SEQ ID NO: 5128565 - DNA, 25 bp, Homo sapien
gaaccatggaaaccccagcgcagct

SEQ ID NO: 5128566 - DNA, 25 bp, Homo sapien
gggaaccatggaaaccccagcgcag

SEQ ID NO: 5128567 - DNA, 25 bp, Homo sapien
tggtccctggagtggtttctccctg

SEQ ID NO: 5128568 - DNA, 25 bp, Homo sapien
gctgccaatggtccctggagtggtt

SEQ ID NO: 5128569 - DNA, 25 bp, Homo sapien
caatggtccctggagtggtttctcc

SEQ ID NO: 5128570 - DNA, 25 bp, Homo sapien
tccctggagtggtttctccctgtta

SEQ ID NO: 5128571 - DNA, 25 bp, Homo sapien
tccagtggcaacattgtgggcccca

SEQ ID NO: 5128572 - DNA, 25 bp, Homo sapien
tggcaacattgtgggccccagattc

SEQ ID NO: 5128573 - DNA, 25 bp, Homo sapien
cagagagagagtttccatcaccagc

SEQ ID NO: 5128574 - DNA, 25 bp, Homo sapien
tcagattccagtggcaacattgtgg

SEQ ID NO: 5128575 - DNA, 25 bp, Homo sapien
caggagaatggaaagctgcctgcaa

SEQ ID NO: 5128576 - DNA, 25 bp, Homo sapien
ggagaatggaaagctgcctgcaatg

SEQ ID NO: 5128577 - DNA, 25 bp, Homo sapien
gaatggaaagctgcctgcaatgcat

SEQ ID NO: 5128578 - DNA, 25 bp, Homo sapien
gagaatggaaagctgcctgcaatgc

SEQ ID NO: 5128579 - DNA, 25 bp, Homo sapien
tgatgactttcagggcacctctttc

SEQ ID NO: 5128580 - DNA, 25 bp, Homo sapien
ccactgatgactttcagggcacctc

SEQ ID NO: 5128581 - DNA, 25 bp, Homo sapien
actgatgactttcagggcacctctt

SEQ ID NO: 5128582 - DNA, 25 bp, Homo sapien
cactgatgactttcagggcacctct

SEQ ID NO: 5128583 - DNA, 25 bp, Homo sapien
gcttttaaccacaatgttattgtac

SEQ ID NO: 5128584 - DNA, 25 bp, Homo sapien
ggcagcagttgctttagggctttta

SEQ ID NO: 5128585 - DNA, 25 bp, Homo sapien
tgctttagggcttttaaccacaatg

SEQ ID NO: 5128586 - DNA, 25 bp, Homo sapien
ctttggcagcagttgctttagggct

SEQ ID NO: 5128587 - DNA, 25 bp, Homo sapien
tgccaaagcagaacttgggtccaaa

SEQ ID NO: 5128588 - DNA, 25 bp, Homo sapien
gttccatggagaacactatctgtga

SEQ ID NO: 5128589 - DNA, 25 bp, Homo sapien
tgcattgtgcaaccaaagaggcaca

SEQ ID NO: 5128590 - DNA, 25 bp, Homo sapien
tctcctttcacagatgagtttctct

SEQ ID NO: 5128591 - DNA, 25 bp, Homo sapien
gccctgaagaaatactctcctgttg

SEQ ID NO: 5128592 - DNA, 25 bp, Homo sapien
cctgaagaaatactctcctgttgtc

SEQ ID NO: 5128593 - DNA, 25 bp, Homo sapien
tggccctgaagaaatactctcctgt

SEQ ID NO: 5128594 - DNA, 25 bp, Homo sapien
ctgaagaaatactctcctgttgtcc

SEQ ID NO: 5128595 - DNA, 25 bp, Homo sapien
tccttgccaggattagtgacagtgg

SEQ ID NO: 5128596 - DNA, 25 bp, Homo sapien
tagctgcctgaattggagccaacaa

SEQ ID NO: 5128597 - DNA, 25 bp, Homo sapien
gtcaacaacataggagcttgcctgt

SEQ ID NO: 5128598 - DNA, 25 bp, Homo sapien
gacagtgggtggactgatttcatcc

SEQ ID NO: 5128599 - DNA, 25 bp, Homo sapien
ccgctgatattgagtggcaaacata

SEQ ID NO: 5128600 - DNA, 25 bp, Homo sapien
tggagtactataccgctgatattga

SEQ ID NO: 5128601 - DNA, 25 bp, Homo sapien
cataaccactaatcgtatcttatga

SEQ ID NO: 5128602 - DNA, 25 bp, Homo sapien
tactataccgctgatattgagtggc

SEQ ID NO: 5128603 - DNA, 25 bp, Homo sapien
agcccgaacataaaccatggaggga

SEQ ID NO: 5128604 - DNA, 25 bp, Homo sapien
actgtgatacaagcccgaacataaa

SEQ ID NO: 5128605 - DNA, 25 bp, Homo sapien
tgatacaagcccgaacataaaccat

SEQ ID NO: 5128606 - DNA, 25 bp, Homo sapien
tacaagcccgaacataaaccatgga

SEQ ID NO: 5128607 - DNA, 25 bp, Homo sapien
gttgcaacttattactgtcaaaagt

SEQ ID NO: 5128608 - DNA, 25 bp, Homo sapien
aagctcctgatctatgctgcatcca

SEQ ID NO: 5128609 - DNA, 25 bp, Homo sapien
cctaagctcctgatctatgctgcat

SEQ ID NO: 5128610 - DNA, 25 bp, Homo sapien
cgggcgagtcagggcattagcaatt

SEQ ID NO: 5128611 - DNA, 25 bp, Homo sapien
cgagtcagggcattagcaattattt

SEQ ID NO: 5128612 - DNA, 25 bp, Homo sapien
cattactaatcatgtggatatgtgt

SEQ ID NO: 5128613 - DNA, 25 bp, Homo sapien
tcctaatatcagataccagatgtga

SEQ ID NO: 5128614 - DNA, 25 bp, Homo sapien
tcttcttagaacattactaatcatg

SEQ ID NO: 5128615 - DNA, 25 bp, Homo sapien
cttagaacattactaatcatgtgga

SEQ ID NO: 5128616 - DNA, 25 bp, Homo sapien
gcatggacatgagggtccctgctca

SEQ ID NO: 5128617 - DNA, 25 bp, Homo sapien
acacagcatggacatgagggtccct

SEQ ID NO: 5128618 - DNA, 25 bp, Homo sapien
tggacatgagggtccctgctcagct

SEQ ID NO: 5128619 - DNA, 25 bp, Homo sapien
cagcatggacatgagggtccctgct

SEQ ID NO: 5128620 - DNA, 25 bp, Homo sapien
cttcattagtcttgatactccgtgc

SEQ ID NO: 5128621 - DNA, 25 bp, Homo sapien
agtcttgatactccgtgccagtcca

SEQ ID NO: 5128622 - DNA, 25 bp, Homo sapien
ttagtcttgatactccgtgccagtc

SEQ ID NO: 5128623 - DNA, 25 bp, Homo sapien
cattagtcttgatactccgtgccag

SEQ ID NO: 5128624 - DNA, 25 bp, Homo sapien
ctgggcagagagatcccacatcact

SEQ ID NO: 5128625 - DNA, 25 bp, Homo sapien
tgaagaggatgtcagcagccacatg

SEQ ID NO: 5128626 - DNA, 25 bp, Homo sapien
ggacagagttcactcgggccatcag

SEQ ID NO: 5128627 - DNA, 25 bp, Homo sapien
gaagaggatgtcagcagccacatga

SEQ ID NO: 5128628 - DNA, 25 bp, Homo sapien
gtgatgggcttggacagagttcact

SEQ ID NO: 5128629 - DNA, 25 bp, Homo sapien
catagtaatggatacaactatttgg

SEQ ID NO: 5128630 - DNA, 25 bp, Homo sapien
gatacaactatttggattggtacct

SEQ ID NO: 5128631 - DNA, 25 bp, Homo sapien
tctatttgggttctaatcgggcctc

SEQ ID NO: 5128632 - DNA, 25 bp, Homo sapien
cacagctcctgatctatttgggttc

SEQ ID NO: 5128633 - DNA, 25 bp, Homo sapien
tggggctgctaatgctctgggtctc

SEQ ID NO: 5128634 - DNA, 25 bp, Homo sapien
gggctgctaatgctctgggtctctg

SEQ ID NO: 5128635 - DNA, 25 bp, Homo sapien
cctggggctgctaatgctctgggtc

SEQ ID NO: 5128636 - DNA, 25 bp, Homo sapien
ctcctggggctgctaatgctctggg

SEQ ID NO: 5128637 - DNA, 25 bp, Homo sapien
tgtgtccactgtggagccaccagct

SEQ ID NO: 5128638 - DNA, 25 bp, Homo sapien
tgtccactgtggagccaccagcttc

SEQ ID NO: 5128639 - DNA, 25 bp, Homo sapien
ctgtggagccaccagcttcatccat

SEQ ID NO: 5128640 - DNA, 25 bp, Homo sapien
ccactgtggagccaccagcttcatc

SEQ ID NO: 5128641 - DNA, 25 bp, Homo sapien
tgctccagttggtcacaattttcag

SEQ ID NO: 5128642 - DNA, 25 bp, Homo sapien
gatgagataatgcagacaacttcaa

SEQ ID NO: 5128643 - DNA, 25 bp, Homo sapien
tctctgtgtacctggatatttatcc

SEQ ID NO: 5128644 - DNA, 25 bp, Homo sapien
tgcagacaacttcaatctcacgtgc

SEQ ID NO: 5128645 - DNA, 25 bp, Homo sapien
gagcctcctgcatagtgatggaaag

SEQ ID NO: 5128646 - DNA, 25 bp, Homo sapien
cacagctcctgatctatgaagtttc

SEQ ID NO: 5128647 - DNA, 25 bp, Homo sapien
gacctatttgtattggtacctgcag

SEQ ID NO: 5128648 - DNA, 25 bp, Homo sapien
gatggaaagacctatttgtattggt

SEQ ID NO: 5128649 - DNA, 25 bp, Homo sapien
cagattcagcggcagtgggtcaggc

SEQ ID NO: 5128650 - DNA, 25 bp, Homo sapien
ggccaatctccaaggcgcctaattt

SEQ ID NO: 5128651 - DNA, 25 bp, Homo sapien
aatctccaaggcgcctaatttataa

SEQ ID NO: 5128652 - DNA, 25 bp, Homo sapien
tctccaaggcgcctaatttataagg

SEQ ID NO: 5128653 - DNA, 25 bp, Homo sapien
tacgcactccgcagtgaggagccat

SEQ ID NO: 5128654 - DNA, 25 bp, Homo sapien
ctgctatacgcactccgcagtgagg

SEQ ID NO: 5128655 - DNA, 25 bp, Homo sapien
tagtcgcacactccccagagaggga

SEQ ID NO: 5128656 - DNA, 25 bp, Homo sapien
tgcagccatagtcgcacactcccca

SEQ ID NO: 5128657 - DNA, 25 bp, Homo sapien
gaaaacttcagtctcattatcagca

SEQ ID NO: 5128658 - DNA, 25 bp, Homo sapien
aaaacttcagtctcattatcagcag

SEQ ID NO: 5128659 - DNA, 25 bp, Homo sapien
gggaaaacttcagtctcattatcag

SEQ ID NO: 5128660 - DNA, 25 bp, Homo sapien
ggaaaacttcagtctcattatcagc

SEQ ID NO: 5128661 - DNA, 25 bp, Homo sapien
ttcttgttactctggctcccaggtg

SEQ ID NO: 5128662 - DNA, 25 bp, Homo sapien
tcttgttactctggctcccaggtgc

SEQ ID NO: 5128663 - DNA, 25 bp, Homo sapien
ctttctcaaccttgttgagtcctgt

SEQ ID NO: 5128664 - DNA, 25 bp, Homo sapien
tactgtcaacagtatgataatctcc

SEQ ID NO: 5128665 - DNA, 25 bp, Homo sapien
ccaggcgagtcaggacattagcaac

SEQ ID NO: 5128666 - DNA, 25 bp, Homo sapien
gcaacatattactgtcaacagtatg

SEQ ID NO: 5128667 - DNA, 25 bp, Homo sapien
tctacgatgcatccaatttggaaac

SEQ ID NO: 5128668 - DNA, 25 bp, Homo sapien
ctcgtggacatggggcccgcctttg

SEQ ID NO: 5128669 - DNA, 25 bp, Homo sapien
cctctctgagtaggatcagtatcag

SEQ ID NO: 5128670 - DNA, 25 bp, Homo sapien
gggccgtcagcttctcaccccagtc

SEQ ID NO: 5128671 - DNA, 25 bp, Homo sapien
aaaccaggggccgtcagcttctcac

SEQ ID NO: 5128672 - DNA, 25 bp, Homo sapien
ctgggttgacagatccaaaccaggg

SEQ ID NO: 5128673 - DNA, 25 bp, Homo sapien
agtccctgccattatgccctacagg

SEQ ID NO: 5128674 - DNA, 25 bp, Homo sapien
cggaaagctactgtggttctcagag

SEQ ID NO: 5128675 - DNA, 25 bp, Homo sapien
ggtgtccccggatgcttcctcagct

SEQ ID NO: 5128676 - DNA, 25 bp, Homo sapien
ttcctcagctcggaaagctactgtg

SEQ ID NO: 5128677 - DNA, 25 bp, Homo sapien
aggtgtccccggatgcttcctcagc

SEQ ID NO: 5128678 - DNA, 25 bp, Homo sapien
cattgagagccagtgagaacagagc

SEQ ID NO: 5128679 - DNA, 25 bp, Homo sapien
ctgagactttcctcctggtggcagg

SEQ ID NO: 5128680 - DNA, 25 bp, Homo sapien
gtcctggtcattgagagccagtgag

SEQ ID NO: 5128681 - DNA, 25 bp, Homo sapien
gctctgggcttgaagcagtgcccat

SEQ ID NO: 5128682 - DNA, 25 bp, Homo sapien
agtcaggactctgcggacatttgct

SEQ ID NO: 5128683 - DNA, 25 bp, Homo sapien
caggactctgcggacatttgctgac

SEQ ID NO: 5128684 - DNA, 25 bp, Homo sapien
tcatgagagcctcagctgtgcctca

SEQ ID NO: 5128685 - DNA, 25 bp, Homo sapien
tatgttaaggtcccatcagctgcca

SEQ ID NO: 5128686 - DNA, 25 bp, Homo sapien
atgttaaggtcccatcagctgccat

SEQ ID NO: 5128687 - DNA, 25 bp, Homo sapien
ttgcaacttactactgtcaacagag

SEQ ID NO: 5128688 - DNA, 25 bp, Homo sapien
ccgggcaagtcagagcattagcagc

SEQ ID NO: 5128689 - DNA, 25 bp, Homo sapien
cagagcattagcagctatttaaatt

SEQ ID NO: 5128690 - DNA, 25 bp, Homo sapien
tgcaacttactactgtcaacagagt

SEQ ID NO: 5128691 - DNA, 25 bp, Homo sapien
cagggcctctccctcccattgcttt

SEQ ID NO: 5128692 - DNA, 25 bp, Homo sapien
agggcctctccctcccattgctttc

SEQ ID NO: 5128693 - DNA, 25 bp, Homo sapien
ctcccattgctttccagaaagccat

SEQ ID NO: 5128694 - DNA, 25 bp, Homo sapien
tccctcccattgctttccagaaagc

SEQ ID NO: 5128695 - DNA, 25 bp, Homo sapien
gtcgatgtagttgattccacttccc

SEQ ID NO: 5128696 - DNA, 25 bp, Homo sapien
gagtaatgctccctggactccccag

SEQ ID NO: 5128697 - DNA, 25 bp, Homo sapien
ctgtgactgtcctctgtaaagacag

SEQ ID NO: 5128698 - DNA, 25 bp, Homo sapien
cctgtgactgtcctctgtaaagaca

SEQ ID NO: 5128699 - DNA, 25 bp, Homo sapien
gcctgtgactgtcctctgtaaagac

SEQ ID NO: 5128700 - DNA, 25 bp, Homo sapien
ctactcgaatcagttgccacacaga

SEQ ID NO: 5128701 - DNA, 25 bp, Homo sapien
tctgataagggtcctgttggatcct

SEQ ID NO: 5128702 - DNA, 25 bp, Homo sapien
gttggatcctactcgaatcagttgc

SEQ ID NO: 5128703 - DNA, 25 bp, Homo sapien
ctgtgaaccagatgttctgataagg

SEQ ID NO: 5128704 - DNA, 25 bp, Homo sapien
tctgtgagcagatcagcttcaggag

SEQ ID NO: 5128705 - DNA, 25 bp, Homo sapien
gcttcaggaggccctcgtggacatg

SEQ ID NO: 5128706 - DNA, 25 bp, Homo sapien
caccctctgtgagcagatcagcttc

SEQ ID NO: 5128707 - DNA, 25 bp, Homo sapien
acatggggtcccagctttgctcttc

SEQ ID NO: 5128708 - DNA, 25 bp, Homo sapien
aggaggcacgaacaccctgagaaca

SEQ ID NO: 5128709 - DNA, 25 bp, Homo sapien
gcaggaggcacgaacaccctgagaa

SEQ ID NO: 5128710 - DNA, 25 bp, Homo sapien
gtgggcaggaggcacgaacaccctg

SEQ ID NO: 5128711 - DNA, 25 bp, Homo sapien
tgggcaggaggcacgaacaccctga

SEQ ID NO: 5128712 - DNA, 25 bp, Homo sapien
acaggtctgagttctaaggtctttc

SEQ ID NO: 5128713 - DNA, 25 bp, Homo sapien
tgttccttgataagtggtccccact

SEQ ID NO: 5128714 - DNA, 25 bp, Homo sapien
tgcaacctctaacaggaacctggct

SEQ ID NO: 5128715 - DNA, 25 bp, Homo sapien
tgtaaaccctccaaatgcaacctct

SEQ ID NO: 5128716 - DNA, 25 bp, Homo sapien
gtcttcatggagggtgtaggtggcc

SEQ ID NO: 5128717 - DNA, 25 bp, Homo sapien
taggtggcccctggctacaggattc

SEQ ID NO: 5128718 - DNA, 25 bp, Homo sapien
ggctacaggattcaccaggactttc

SEQ ID NO: 5128719 - DNA, 25 bp, Homo sapien
ggcccctggctacaggattcaccag

SEQ ID NO: 5128720 - DNA, 25 bp, Homo sapien
agactccatggtcatgctgctgctc

SEQ ID NO: 5128721 - DNA, 25 bp, Homo sapien
cagactccatggtcatgctgctgct

SEQ ID NO: 5128722 - DNA, 25 bp, Homo sapien
gactccatggtcatgctgctgctct

SEQ ID NO: 5128723 - DNA, 25 bp, Homo sapien
ggtgactggatgtcacttctggtcc

SEQ ID NO: 5128724 - DNA, 25 bp, Homo sapien
ctgggtgactggatgtcacttctgg

SEQ ID NO: 5128725 - DNA, 25 bp, Homo sapien
gggtgactggatgtcacttctggtc

SEQ ID NO: 5128726 - DNA, 25 bp, Homo sapien
agactgggtgactggatgtcacttc

SEQ ID NO: 5128727 - DNA, 25 bp, Homo sapien
aaattactaccaatgctctgactcg

SEQ ID NO: 5128728 - DNA, 25 bp, Homo sapien
gcaacatctttaggctgcaggattc

SEQ ID NO: 5128729 - DNA, 25 bp, Homo sapien
gctgagtctgagaagtgttgtcacc

SEQ ID NO: 5128730 - DNA, 25 bp, Homo sapien
ggagccccagattgcaaactggatg

SEQ ID NO: 5128731 - DNA, 25 bp, Homo sapien
ccatgagaggaaagagacttagggt

SEQ ID NO: 5128732 - DNA, 25 bp, Homo sapien
aaagagacttagggtggagagacac

SEQ ID NO: 5128733 - DNA, 25 bp, Homo sapien
cgaagagacattgccatgagaggaa

SEQ ID NO: 5128734 - DNA, 25 bp, Homo sapien
tttactaaattcgaagagacattgc

SEQ ID NO: 5128735 - DNA, 25 bp, Homo sapien
gatagtgaaggcatagctggttcca

SEQ ID NO: 5128736 - DNA, 25 bp, Homo sapien
ctacccatagtcaagcatgcagtta

SEQ ID NO: 5128737 - DNA, 25 bp, Homo sapien
cattgatagtgaaggcatagctggt

SEQ ID NO: 5128738 - DNA, 25 bp, Homo sapien
catgcagttatactccccgtagtcc

SEQ ID NO: 5128739 - DNA, 25 bp, Homo sapien
aggagaggagctgagctggaacttc

SEQ ID NO: 5128740 - DNA, 25 bp, Homo sapien
tctgggtcctaaccgagcagctctt

SEQ ID NO: 5128741 - DNA, 25 bp, Homo sapien
tccctctgggtcctaaccgagcagc

SEQ ID NO: 5128742 - DNA, 25 bp, Homo sapien
gagaggagctgagctggaacttcca

SEQ ID NO: 5128743 - DNA, 25 bp, Homo sapien
tgggacacccactgctgtactgatg

SEQ ID NO: 5128744 - DNA, 25 bp, Homo sapien
tgctggtagccttggtagatgccct

SEQ ID NO: 5128745 - DNA, 25 bp, Homo sapien
gttggggtaaagtctgcctcaggcc

SEQ ID NO: 5128746 - DNA, 25 bp, Homo sapien
accaccactgaaccgggctgggatg

SEQ ID NO: 5128747 - DNA, 25 bp, Homo sapien
gggtccacacgatgttgccactggc

SEQ ID NO: 5128748 - DNA, 25 bp, Homo sapien
taggatgctgttcatactctggtca

SEQ ID NO: 5128749 - DNA, 25 bp, Homo sapien
aaagtgaccctctcacttgggacgc

SEQ ID NO: 5128750 - DNA, 25 bp, Homo sapien
tcagccctgctggtgaaagtgaccc

SEQ ID NO: 5128751 - DNA, 25 bp, Homo sapien
tcatcagatgctcaggaggtgccca

SEQ ID NO: 5128752 - DNA, 25 bp, Homo sapien
gagagaaacaaggatcacatccctg

SEQ ID NO: 5128753 - DNA, 25 bp, Homo sapien
cagctcatgtgtgaggcgaggataa

SEQ ID NO: 5128754 - DNA, 25 bp, Homo sapien
ttaagatttcagagctgcctcccat

SEQ ID NO: 5128755 - DNA, 25 bp, Homo sapien
gaccagcctattaataagtcttcag

SEQ ID NO: 5128756 - DNA, 25 bp, Homo sapien
gcctattaataagtcttcagggcag

SEQ ID NO: 5128757 - DNA, 25 bp, Homo sapien
gcacagggtgcgaccagcctattaa

SEQ ID NO: 5128758 - DNA, 25 bp, Homo sapien
ggtgcgaccagcctattaataagtc

SEQ ID NO: 5128759 - DNA, 25 bp, Homo sapien
gccccaggagctgagcagggaccct

SEQ ID NO: 5128760 - DNA, 25 bp, Homo sapien
ccaggagctgagcagggaccctcat

SEQ ID NO: 5128761 - DNA, 25 bp, Homo sapien
ggagccccaggagctgagcagggac

SEQ ID NO: 5128762 - DNA, 25 bp, Homo sapien
ctgagagccagagcagcaggagccc

SEQ ID NO: 5128763 - DNA, 25 bp, Homo sapien
gagactgggtcatctggatgtcaca

SEQ ID NO: 5128764 - DNA, 25 bp, Homo sapien
ggtcatctggatgtcacatctggca

SEQ ID NO: 5128765 - DNA, 25 bp, Homo sapien
tcgcctggcaagtgatggtgactct

SEQ ID NO: 5128766 - DNA, 25 bp, Homo sapien
gtgactctgtctcctacagatgcag

SEQ ID NO: 5128767 - DNA, 25 bp, Homo sapien
gtttccaaattggatgcatcgtaga

SEQ ID NO: 5128768 - DNA, 25 bp, Homo sapien
tccaaattggatgcatcgtagatca

SEQ ID NO: 5128769 - DNA, 25 bp, Homo sapien
tttaaatagttgctaatgtcctgac

SEQ ID NO: 5128770 - DNA, 25 bp, Homo sapien
caatttaaatagttgctaatgtcct

SEQ ID NO: 5128771 - DNA, 25 bp, Homo sapien
gagggagattatcatactgttgaca

SEQ ID NO: 5128772 - DNA, 25 bp, Homo sapien
ttacactgtgggagggagattatca

SEQ ID NO: 5128773 - DNA, 25 bp, Homo sapien
catactgttgacagtaatatgttgc

SEQ ID NO: 5128774 - DNA, 25 bp, Homo sapien
ggagattatcatactgttgacagta

SEQ ID NO: 5128775 - DNA, 25 bp, Homo sapien
gaccagtgctgtaacccagagtcct

SEQ ID NO: 5128776 - DNA, 25 bp, Homo sapien
tcttctatgaaattaggagaggcat

SEQ ID NO: 5128777 - DNA, 25 bp, Homo sapien
tgttgtatgaacctggaccagtgct

SEQ ID NO: 5128778 - DNA, 25 bp, Homo sapien
ttctcttttgttgtatgaacctgga

SEQ ID NO: 5128779 - DNA, 25 bp, Homo sapien
gataacagtgttaaagtgcaaaatc

SEQ ID NO: 5128780 - DNA, 25 bp, Homo sapien
gagcctcattgtgagaaggtgaact

SEQ ID NO: 5128781 - DNA, 25 bp, Homo sapien
agggagcctcattgtgagaaggtga

SEQ ID NO: 5128782 - DNA, 25 bp, Homo sapien
gcctcattgtgagaaggtgaactga

SEQ ID NO: 5128783 - DNA, 25 bp, Homo sapien
gcagggagcctcattgtgagaaggt

SEQ ID NO: 5128784 - DNA, 25 bp, Homo sapien
cttataaattaggcgccttggagat

SEQ ID NO: 5128785 - DNA, 25 bp, Homo sapien
tataaattaggcgccttggagattg

SEQ ID NO: 5128786 - DNA, 25 bp, Homo sapien
attaggcgccttggagattggcctg

SEQ ID NO: 5128787 - DNA, 25 bp, Homo sapien
aaattaggcgccttggagattggcc

SEQ ID NO: 5128788 - DNA, 25 bp, Homo sapien
tcagggctgtaccactgtgggaggc

SEQ ID NO: 5128789 - DNA, 25 bp, Homo sapien
gtaccactgtgggaggccagtgtgt

SEQ ID NO: 5128790 - DNA, 25 bp, Homo sapien
ctgtaccactgtgggaggccagtgt

SEQ ID NO: 5128791 - DNA, 25 bp, Homo sapien
accactgtgggaggccagtgtgtac

SEQ ID NO: 5128792 - DNA, 25 bp, Homo sapien
gcctgaacaccctaagttgggagga

SEQ ID NO: 5128793 - DNA, 25 bp, Homo sapien
aggcagcaggtgaggtcacgaccca

SEQ ID NO: 5128794 - DNA, 25 bp, Homo sapien
gtgacgtgaacgagcatccctgaag

SEQ ID NO: 5128795 - DNA, 25 bp, Homo sapien
gaagtagagcccatgcctgtaagtg

SEQ ID NO: 5128796 - DNA, 25 bp, Homo sapien
tgagcagggagcctcatggtgagaa

SEQ ID NO: 5128797 - DNA, 25 bp, Homo sapien
gcagggagcctcatggtgagaagat

SEQ ID NO: 5128798 - DNA, 25 bp, Homo sapien
caggtatccagagcattagcagccc

SEQ ID NO: 5128799 - DNA, 25 bp, Homo sapien
gctgagcagggagcctcatggtgag

SEQ ID NO: 5128800 - DNA, 25 bp, Homo sapien
tgcaaggttatgtgaaagcataatg

SEQ ID NO: 5128801 - DNA, 25 bp, Homo sapien
ggttatgtgaaagcataatgaacaa

SEQ ID NO: 5128802 - DNA, 25 bp, Homo sapien
gtgaaagcataatgaacaacttttg

SEQ ID NO: 5128803 - DNA, 25 bp, Homo sapien
gaagtgcaaggttatgtgaaagcat

SEQ ID NO: 5128804 - DNA, 25 bp, Homo sapien
ggcactccagagaaccggttggaaa

SEQ ID NO: 5128805 - DNA, 25 bp, Homo sapien
gctgccactgaacctatctggcact

SEQ ID NO: 5128806 - DNA, 25 bp, Homo sapien
ctatctggcactccagagaaccggt

SEQ ID NO: 5128807 - DNA, 25 bp, Homo sapien
gagaaccggttggaaacttcataga

SEQ ID NO: 5128808 - DNA, 25 bp, Homo sapien
cacccggctgattttcagtgtgaaa

SEQ ID NO: 5128809 - DNA, 25 bp, Homo sapien
ccacccggctgattttcagtgtgaa

SEQ ID NO: 5128810 - DNA, 25 bp, Homo sapien
cccggctgattttcagtgtgaaatc

SEQ ID NO: 5128811 - DNA, 25 bp, Homo sapien
tccacccggctgattttcagtgtga

SEQ ID NO: 5128812 - DNA, 25 bp, Homo sapien
gtttctgtattggtctgtaccactg

SEQ ID NO: 5128813 - DNA, 25 bp, Homo sapien
ctgtattggtctgtaccactgtggg

SEQ ID NO: 5128814 - DNA, 25 bp, Homo sapien
ttctgtattggtctgtaccactgtg

SEQ ID NO: 5128815 - DNA, 25 bp, Homo sapien
tctgtattggtctgtaccactgtgg

SEQ ID NO: 5128816 - DNA, 25 bp, Homo sapien
ctttgagtgaccagagtgggtctga

SEQ ID NO: 5128817 - DNA, 25 bp, Homo sapien
gaggaacatttggtgcccagagctt

SEQ ID NO: 5128818 - DNA, 25 bp, Homo sapien
ctgagaactttgagtgaccagagtg

SEQ ID NO: 5128819 - DNA, 25 bp, Homo sapien
acaggcggtggagctaggccacagt

SEQ ID NO: 5128820 - DNA, 25 bp, Homo sapien
ctccatgtccctgcagggctgagca

SEQ ID NO: 5128821 - DNA, 25 bp, Homo sapien
catgtccctgcagggctgagcactg

SEQ ID NO: 5128822 - DNA, 25 bp, Homo sapien
tgtccctgcagggctgagcactgac

SEQ ID NO: 5128823 - DNA, 25 bp, Homo sapien
ccatgtccctgcagggctgagcact

SEQ ID NO: 5128824 - DNA, 25 bp, Homo sapien
tgtgataaattgagcaggaacattt

SEQ ID NO: 5128825 - DNA, 25 bp, Homo sapien
ttgtgataaattgagcaggaacatt

SEQ ID NO: 5128826 - DNA, 25 bp, Homo sapien
gcaatgggtgcaccactccatggct

SEQ ID NO: 5128827 - DNA, 25 bp, Homo sapien
aatgggtgcaccactccatggctcc

SEQ ID NO: 5128828 - DNA, 25 bp, Homo sapien
cctgctcacaggagtctgtgcactg

SEQ ID NO: 5128829 - DNA, 25 bp, Homo sapien
tgctcacaggagtctgtgcactgtc

SEQ ID NO: 5128830 - DNA, 25 bp, Homo sapien
gctcacaggagtctgtgcactgtct

SEQ ID NO: 5128831 - DNA, 25 bp, Homo sapien
gtcctgctcacaggagtctgtgcac

SEQ ID NO: 5128832 - DNA, 25 bp, Homo sapien
cctccacctgagtttggtgtggatg

SEQ ID NO: 5128833 - DNA, 25 bp, Homo sapien
ccaggagctgagcagggagcctcat

SEQ ID NO: 5128834 - DNA, 25 bp, Homo sapien
cagagacccagagcattagcagccc

SEQ ID NO: 5128835 - DNA, 25 bp, Homo sapien
ccccaggagctgagcagggagcctc

SEQ ID NO: 5128836 - DNA, 25 bp, Homo sapien
ttagcagccccaggagctgagcagg

SEQ ID NO: 5128837 - DNA, 25 bp, Homo sapien
aaataatgaattgcaaagttatgta

SEQ ID NO: 5128838 - DNA, 25 bp, Homo sapien
ataatgaattgcaaagttatgtaca

SEQ ID NO: 5128839 - DNA, 25 bp, Homo sapien
aataatgaattgcaaagttatgtac

SEQ ID NO: 5128840 - DNA, 25 bp, Homo sapien
gagtggaggctgagtcatcacaata

SEQ ID NO: 5128841 - DNA, 25 bp, Homo sapien
gctgagtcatcacaatatccccact

SEQ ID NO: 5128842 - DNA, 25 bp, Homo sapien
ggaggctgagtcatcacaatatccc

SEQ ID NO: 5128843 - DNA, 25 bp, Homo sapien
gaggctgagtcatcacaatatcccc

SEQ ID NO: 5128844 - DNA, 25 bp, Homo sapien
aggtaccaatccaaatagttgtatc

SEQ ID NO: 5128845 - DNA, 25 bp, Homo sapien
cgattagaacccaaatagatcagga

SEQ ID NO: 5128846 - DNA, 25 bp, Homo sapien
ggtaccaatccaaatagttgtatcc

SEQ ID NO: 5128847 - DNA, 25 bp, Homo sapien
ggcccgattagaacccaaatagatc

SEQ ID NO: 5128848 - DNA, 25 bp, Homo sapien
tcagtgtaaaatctgtgcctgatcc

SEQ ID NO: 5128849 - DNA, 25 bp, Homo sapien
cagtgtaaaatctgtgcctgatcca

SEQ ID NO: 5128850 - DNA, 25 bp, Homo sapien
cactgtgggaggagtttgtagagct

SEQ ID NO: 5128851 - DNA, 25 bp, Homo sapien
gaggagtttgtagagcttgcatgca

SEQ ID NO: 5128852 - DNA, 25 bp, Homo sapien
tgtgggaggagtttgtagagcttgc

SEQ ID NO: 5128853 - DNA, 25 bp, Homo sapien
gagtttgtagagcttgcatgcagta

SEQ ID NO: 5128854 - DNA, 25 bp, Homo sapien
tcagcagcaacctctgccctgaggt

SEQ ID NO: 5128855 - DNA, 25 bp, Homo sapien
acatgtgagcaactgggcaacccca

SEQ ID NO: 5128856 - DNA, 25 bp, Homo sapien
gcacatgtgagcaactgggcaaccc

SEQ ID NO: 5128857 - DNA, 25 bp, Homo sapien
cagcacatgtgagcaactgggcaac

SEQ ID NO: 5128858 - DNA, 25 bp, Homo sapien
gctgagcgggggccctcatgtccat

SEQ ID NO: 5128859 - DNA, 25 bp, Homo sapien
ctgggagccagagcagcaggagtcc

SEQ ID NO: 5128860 - DNA, 25 bp, Homo sapien
tgagcgggggccctcatgtccatgc

SEQ ID NO: 5128861 - DNA, 25 bp, Homo sapien
agcgggggccctcatgtccatgctg

SEQ ID NO: 5128862 - DNA, 25 bp, Homo sapien
ggagactgggtcatctggatgtcac

SEQ ID NO: 5128863 - DNA, 25 bp, Homo sapien
gggtcatctggatgtcacatctggt

SEQ ID NO: 5128864 - DNA, 25 bp, Homo sapien
gactgggtcatctggatgtcacatc

SEQ ID NO: 5128865 - DNA, 25 bp, Homo sapien
gtcatctggatgtcacatctggtat

SEQ ID NO: 5128866 - DNA, 25 bp, Homo sapien
tcgcccggcaagtgatggtgactct

SEQ ID NO: 5128867 - DNA, 25 bp, Homo sapien
cggcaagtgatggtgactctgtctc

SEQ ID NO: 5128868 - DNA, 25 bp, Homo sapien
cccggcaagtgatggtgactctgtc

SEQ ID NO: 5128869 - DNA, 25 bp, Homo sapien
cgcccggcaagtgatggtgactctg

SEQ ID NO: 5128870 - DNA, 25 bp, Homo sapien
ggaccccctgattgcaaagcggatg

SEQ ID NO: 5128871 - DNA, 25 bp, Homo sapien
gaccccctgattgcaaagcggatgc

SEQ ID NO: 5128872 - DNA, 25 bp, Homo sapien
accccctgattgcaaagcggatgca

SEQ ID NO: 5128873 - DNA, 25 bp, Homo sapien
gggcactgttatacttttgacagta

SEQ ID NO: 5128874 - DNA, 25 bp, Homo sapien
gcactgttatacttttgacagtaat

SEQ ID NO: 5128875 - DNA, 25 bp, Homo sapien
ggaggggcactgttatacttttgac

SEQ ID NO: 5128876 - DNA, 25 bp, Homo sapien
agtgggaggggcactgttatacttt

SEQ ID NO: 5128877 - DNA, 25 bp, Homo sapien
tattaataataatcaggagagatac

SEQ ID NO: 5128878 - DNA, 25 bp, Homo sapien
ttttctgtataagtctgacttttgc

SEQ ID NO: 5128879 - DNA, 25 bp, Homo sapien
ccttttctgtataagtctgactttt

SEQ ID NO: 5128880 - DNA, 25 bp, Homo sapien
attaataataatcaggagagatact

SEQ ID NO: 5128881 - DNA, 25 bp, Homo sapien
caagagaaacgagtggattggtgtc

SEQ ID NO: 5128882 - DNA, 25 bp, Homo sapien
tatcagtcattttgacaagagaaac

SEQ ID NO: 5128883 - DNA, 25 bp, Homo sapien
ttttgacaagagaaacgagtggatt

SEQ ID NO: 5128884 - DNA, 25 bp, Homo sapien
tcattttgacaagagaaacgagtgg

SEQ ID NO: 5128885 - DNA, 25 bp, Homo sapien
cactggataagagtggccaccactg

SEQ ID NO: 5128886 - DNA, 25 bp, Homo sapien
taagagtggccaccactgttctcat

SEQ ID NO: 5128887 - DNA, 25 bp, Homo sapien
ccactggataagagtggccaccact

SEQ ID NO: 5128888 - DNA, 25 bp, Homo sapien
ggataagagtggccaccactgttct

SEQ ID NO: 5128889 - DNA, 25 bp, Homo sapien
ttcctatggatgagattgcgactgg

SEQ ID NO: 5128890 - DNA, 25 bp, Homo sapien
ccgttcaagtagatgtctccattcc

SEQ ID NO: 5128891 - DNA, 25 bp, Homo sapien
gtttgtcaccatatagatcagtggt

SEQ ID NO: 5128892 - DNA, 25 bp, Homo sapien
cagtggttgaggagattggtgtggc

SEQ ID NO: 5128893 - DNA, 25 bp, Homo sapien
ccacattggtgattgtgagtatgaa

SEQ ID NO: 5128894 - DNA, 25 bp, Homo sapien
ggctccacattggtgattgtgagta

SEQ ID NO: 5128895 - DNA, 25 bp, Homo sapien
ctcctggctccacattggtgattgt

SEQ ID NO: 5128896 - DNA, 25 bp, Homo sapien
cctggctccacattggtgattgtga

SEQ ID NO: 5128897 - DNA, 25 bp, Homo sapien
ccccaatttccttcttctctaagag

SEQ ID NO: 5128898 - DNA, 25 bp, Homo sapien
tttccttcttctctaagaggagcag

SEQ ID NO: 5128899 - DNA, 25 bp, Homo sapien
ttcttctctaagaggagcagctgct

SEQ ID NO: 5128900 - DNA, 25 bp, Homo sapien
ccaatttccttcttctctaagagga

SEQ ID NO: 5128901 - DNA, 25 bp, Homo sapien
tcttggagccatggacaacaggaga

SEQ ID NO: 5128902 - DNA, 25 bp, Homo sapien
gcagcaaagtcagggcaaggcaaac

SEQ ID NO: 5128903 - DNA, 25 bp, Homo sapien
ccttatggatctgacactgtgtatg

SEQ ID NO: 5128904 - DNA, 25 bp, Homo sapien
ctgtgtatggtccagtggaatctgc

SEQ ID NO: 5128905 - DNA, 25 bp, Homo sapien
gaacagctgatttagaacagaccag

SEQ ID NO: 5128906 - DNA, 25 bp, Homo sapien
tcagaacagctgatttagaacagac

SEQ ID NO: 5128907 - DNA, 25 bp, Homo sapien
cagctgatttagaacagaccagtac

SEQ ID NO: 5128908 - DNA, 25 bp, Homo sapien
gaatcagaacagctgatttagaaca

SEQ ID NO: 5128909 - DNA, 25 bp, Homo sapien
tcagtgggattatgactgagtgttg

SEQ ID NO: 5128910 - DNA, 25 bp, Homo sapien
tctgatgaatcagtgggattatgac

SEQ ID NO: 5128911 - DNA, 25 bp, Homo sapien
gaatcagtgggattatgactgagtg

SEQ ID NO: 5128912 - DNA, 25 bp, Homo sapien
gtcatctgatgaatcagtgggatta

SEQ ID NO: 5128913 - DNA, 25 bp, Homo sapien
cagggacccagagcattagcagccc

SEQ ID NO: 5128914 - DNA, 25 bp, Homo sapien
cccagagcattagcagccccaagag

SEQ ID NO: 5128915 - DNA, 25 bp, Homo sapien
ccagagcattagcagccccaagagc

SEQ ID NO: 5128916 - DNA, 25 bp, Homo sapien
ggacccagagcattagcagccccaa

SEQ ID NO: 5128917 - DNA, 25 bp, Homo sapien
cactgtgggaggatcttgtgcatct

SEQ ID NO: 5128918 - DNA, 25 bp, Homo sapien
gcactgtgggaggatcttgtgcatc

SEQ ID NO: 5128919 - DNA, 25 bp, Homo sapien
tcttgtgcatcttgcatgcagtaat

SEQ ID NO: 5128920 - DNA, 25 bp, Homo sapien
actgtgggaggatcttgtgcatctt

SEQ ID NO: 5128921 - DNA, 25 bp, Homo sapien
atctctgctataggggcagaatgag

SEQ ID NO: 5128922 - DNA, 25 bp, Homo sapien
gctataggggcagaatgagttctag

SEQ ID NO: 5128923 - DNA, 25 bp, Homo sapien
ctctgctataggggcagaatgagtt

SEQ ID NO: 5128924 - DNA, 25 bp, Homo sapien
ctgctataggggcagaatgagttct

SEQ ID NO: 5128925 - DNA, 25 bp, Homo sapien
tcctgagtccattcccaactctaaa

SEQ ID NO: 5128926 - DNA, 25 bp, Homo sapien
catccaccaggtagtaaaaacatgt

SEQ ID NO: 5128927 - DNA, 25 bp, Homo sapien
tctaaacaccattgcgagtgagtgc

SEQ ID NO: 5128928 - DNA, 25 bp, Homo sapien
acaccattgcgagtgagtgccatcc

SEQ ID NO: 5128929 - DNA, 25 bp, Homo sapien
gagcaaggagcctcattgtgagaag

SEQ ID NO: 5128930 - DNA, 25 bp, Homo sapien
gcctcattgtgagaaggtgacctga

SEQ ID NO: 5128931 - DNA, 25 bp, Homo sapien
aggagcctcattgtgagaaggtgac

SEQ ID NO: 5128932 - DNA, 25 bp, Homo sapien
gcaaggagcctcattgtgagaaggt

SEQ ID NO: 5128933 - DNA, 25 bp, Homo sapien
agagaagtgcaaggttatgtagaaa

SEQ ID NO: 5128934 - DNA, 25 bp, Homo sapien
ctgaaataatgagagagaagtgcaa

SEQ ID NO: 5128935 - DNA, 25 bp, Homo sapien
agagagaagtgcaaggttatgtaga

SEQ ID NO: 5128936 - DNA, 25 bp, Homo sapien
tgagagagaagtgcaaggttatgta

SEQ ID NO: 5128937 - DNA, 25 bp, Homo sapien
taaattaggagtcttggaggctggc

SEQ ID NO: 5128938 - DNA, 25 bp, Homo sapien
cttataaattaggagtcttggaggc

SEQ ID NO: 5128939 - DNA, 25 bp, Homo sapien
aaattaggagtcttggaggctggcc

SEQ ID NO: 5128940 - DNA, 25 bp, Homo sapien
tataaattaggagtcttggaggctg

SEQ ID NO: 5128941 - DNA, 25 bp, Homo sapien
tattgggacttcaggttagcatgcc

SEQ ID NO: 5128942 - DNA, 25 bp, Homo sapien
tctgcgcagaccattcataatacat

SEQ ID NO: 5128943 - DNA, 25 bp, Homo sapien
cacagatagtgttctccatggaaca

SEQ ID NO: 5128944 - DNA, 25 bp, Homo sapien
gccactgctccccaattgatgtaga

SEQ ID NO: 5128945 - DNA, 25 bp, Homo sapien
cggctctccattggtgacgggcaga

SEQ ID NO: 5128946 - DNA, 25 bp, Homo sapien
catgtaaaaggttctgactagacct

SEQ ID NO: 5128947 - DNA, 25 bp, Homo sapien
tgtaaaaggttctgactagacctgc

SEQ ID NO: 5128948 - DNA, 25 bp, Homo sapien
tctccattggtgacgggcagagaga

SEQ ID NO: 5128949 - DNA, 25 bp, Homo sapien
gagactgactcctgcacagggtgtg

SEQ ID NO: 5128950 - DNA, 25 bp, Homo sapien
ctgagactgactcctgcacagggtg

SEQ ID NO: 5128951 - DNA, 25 bp, Homo sapien
tgtgtcctgactgagactgactcct

SEQ ID NO: 5128952 - DNA, 25 bp, Homo sapien
tgactcctgcacagggtgtgaccag

SEQ ID NO: 5128953 - DNA, 25 bp, Homo sapien
gagcccctggagctgagtggggacc

SEQ ID NO: 5128954 - DNA, 25 bp, Homo sapien
ctgggagccggagcagcaggagccc

SEQ ID NO: 5128955 - DNA, 25 bp, Homo sapien
gcccctggagctgagtggggaccct

SEQ ID NO: 5128956 - DNA, 25 bp, Homo sapien
cctggagctgagtggggaccctcat

SEQ ID NO: 5128957 - DNA, 25 bp, Homo sapien
catcagcatcttcgcatacggactt

SEQ ID NO: 5128958 - DNA, 25 bp, Homo sapien
aaggactggagaatcacctggtgag

SEQ ID NO: 5128959 - DNA, 25 bp, Homo sapien
tgctgcaacaactgatagcatcagc

SEQ ID NO: 5128960 - DNA, 25 bp, Homo sapien
tagcatcagcatcttcgcatacgga

SEQ ID NO: 5128961 - DNA, 25 bp, Homo sapien
tcagggaaatggcattggtaacctg

SEQ ID NO: 5128962 - DNA, 25 bp, Homo sapien
gggaaatggcattggtaacctgaag

SEQ ID NO: 5128963 - DNA, 25 bp, Homo sapien
aatggcattggtaacctgaagggtc

SEQ ID NO: 5128964 - DNA, 25 bp, Homo sapien
ggcattggtaacctgaagggtcaga

SEQ ID NO: 5128965 - DNA, 25 bp, Homo sapien
ctctgtttgtctattattgatatat

SEQ ID NO: 5128966 - DNA, 25 bp, Homo sapien
gtttgtctattattgatatatagga

SEQ ID NO: 5128967 - DNA, 25 bp, Homo sapien
ctctctgtttgtctattattgatat

SEQ ID NO: 5128968 - DNA, 25 bp, Homo sapien
tgtttgtctattattgatatatagg

SEQ ID NO: 5128969 - DNA, 25 bp, Homo sapien
cagaaacccaatgagttgtgatggc

SEQ ID NO: 5128970 - DNA, 25 bp, Homo sapien
agcagaaacccaatgagttgtgatg

SEQ ID NO: 5128971 - DNA, 25 bp, Homo sapien
gcagaaacccaatgagttgtgatgg

SEQ ID NO: 5128972 - DNA, 25 bp, Homo sapien
gtgtatgaaaatcacctttaatctt

SEQ ID NO: 5128973 - DNA, 25 bp, Homo sapien
tcagtacaacataaatatctgtgta

SEQ ID NO: 5128974 - DNA, 25 bp, Homo sapien
tgtatgaaaatcacctttaatcttg

SEQ ID NO: 5128975 - DNA, 25 bp, Homo sapien
cagcaaacatcagtacaacataaat

SEQ ID NO: 5128976 - DNA, 25 bp, Homo sapien
ctttggagactgatctggtttctgc

SEQ ID NO: 5128977 - DNA, 25 bp, Homo sapien
gtaccagtgtaagctactaccaatg

SEQ ID NO: 5128978 - DNA, 25 bp, Homo sapien
actaccaatgctctgactggcccgg

SEQ ID NO: 5128979 - DNA, 25 bp, Homo sapien
tctcctttggagtcacagactgaaa

SEQ ID NO: 5128980 - DNA, 25 bp, Homo sapien
cttcagcttccaggctattgatggt

SEQ ID NO: 5128981 - DNA, 25 bp, Homo sapien
ccaggctattgatggtgagggtgaa

SEQ ID NO: 5128982 - DNA, 25 bp, Homo sapien
gtaacacagtgtgaggtaaactact

SEQ ID NO: 5128983 - DNA, 25 bp, Homo sapien
tgaggtaaactactactctgatgac

SEQ ID NO: 5128984 - DNA, 25 bp, Homo sapien
tctgggttgtaacacagtgtgaggt

SEQ ID NO: 5128985 - DNA, 25 bp, Homo sapien
actactactctgatgacagtaatac

SEQ ID NO: 5128986 - DNA, 25 bp, Homo sapien
agacttcattgtattggttaactca

SEQ ID NO: 5128987 - DNA, 25 bp, Homo sapien
caatcagaagtattctagggtatca

SEQ ID NO: 5128988 - DNA, 25 bp, Homo sapien
aatcagaagtattctagggtatcac

SEQ ID NO: 5128989 - DNA, 25 bp, Homo sapien
ggttaactcattgcccccaaagcac

SEQ ID NO: 5128990 - DNA, 25 bp, Homo sapien
catttaaaaccagcaatggttgcac

SEQ ID NO: 5128991 - DNA, 25 bp, Homo sapien
aaacctacatccattctgggctgag

SEQ ID NO: 5128992 - DNA, 25 bp, Homo sapien
tacatttggatatactgtgcatcta

SEQ ID NO: 5128993 - DNA, 25 bp, Homo sapien
tccctgcccattgctaaggacactg

SEQ ID NO: 5128994 - DNA, 25 bp, Homo sapien
tctgctccaacttgtgcccagtcag

SEQ ID NO: 5128995 - DNA, 25 bp, Homo sapien
tgctccaacttgtgcccagtcagtt

SEQ ID NO: 5128996 - DNA, 25 bp, Homo sapien
ctgctccaacttgtgcccagtcagt

SEQ ID NO: 5128997 - DNA, 25 bp, Homo sapien
cacttagattcagccacagaatgtt

SEQ ID NO: 5128998 - DNA, 25 bp, Homo sapien
tagattcagccacagaatgtttggt

SEQ ID NO: 5128999 - DNA, 25 bp, Homo sapien
ttagattcagccacagaatgtttgg

SEQ ID NO: 5129000 - DNA, 25 bp, Homo sapien
cttagattcagccacagaatgtttg

SEQ ID NO: 5129001 - DNA, 25 bp, Homo sapien
gaggaagagaagctgcgctggggtt

SEQ ID NO: 5129002 - DNA, 25 bp, Homo sapien
tgcgctggggtttccatggttccct

SEQ ID NO: 5129003 - DNA, 25 bp, Homo sapien
agagaagctgcgctggggtttccat

SEQ ID NO: 5129004 - DNA, 25 bp, Homo sapien
gagccagagtagcaggaggaagaga

SEQ ID NO: 5129005 - DNA, 25 bp, Homo sapien
tgagattggaaataaaatagaaaag

SEQ ID NO: 5129006 - DNA, 25 bp, Homo sapien
ctgagattggaaataaaatagaaaa

SEQ ID NO: 5129007 - DNA, 25 bp, Homo sapien
gattggaaataaaatagaaaagtca

SEQ ID NO: 5129008 - DNA, 25 bp, Homo sapien
gactgcgtcaacacaatttctccgg

SEQ ID NO: 5129009 - DNA, 25 bp, Homo sapien
tggagactgcgtcaacacaatttct

SEQ ID NO: 5129010 - DNA, 25 bp, Homo sapien
ggtggctggagactgcgtcaacaca

SEQ ID NO: 5129011 - DNA, 25 bp, Homo sapien
tggctggagactgcgtcaacacaat

SEQ ID NO: 5129012 - DNA, 25 bp, Homo sapien
gctgctgctaacactctgactggcc

SEQ ID NO: 5129013 - DNA, 25 bp, Homo sapien
cagtggccctgctggatgcatcata

SEQ ID NO: 5129014 - DNA, 25 bp, Homo sapien
catcatagatgaggagcctgggcgc

SEQ ID NO: 5129015 - DNA, 25 bp, Homo sapien
ctggatgcatcatagatgaggagcc

SEQ ID NO: 5129016 - DNA, 25 bp, Homo sapien
gccactgaacctgtctgggatgcca

SEQ ID NO: 5129017 - DNA, 25 bp, Homo sapien
catactgctgacagtaatacactgc

SEQ ID NO: 5129018 - DNA, 25 bp, Homo sapien
tactgctgacagtaatacactgcaa

SEQ ID NO: 5129019 - DNA, 25 bp, Homo sapien
tgctgacagtaatacactgcaaaat

SEQ ID NO: 5129020 - DNA, 25 bp, Homo sapien
ctgacagtaatacactgcaaaatct

SEQ ID NO: 5129021 - DNA, 25 bp, Homo sapien
tgcagcagctatctgtaaaggaagc

SEQ ID NO: 5129022 - DNA, 25 bp, Homo sapien
ctaaaattgagttgtcattgcagca

SEQ ID NO: 5129023 - DNA, 25 bp, Homo sapien
attgcagcagctatctgtaaaggaa

SEQ ID NO: 5129024 - DNA, 25 bp, Homo sapien
gcagcagctatctgtaaaggaagca

SEQ ID NO: 5129025 - DNA, 25 bp, Homo sapien
cggctctccagggttgacgggcagg

SEQ ID NO: 5129026 - DNA, 25 bp, Homo sapien
gagtctgggtcatcacaatatctcc

SEQ ID NO: 5129027 - DNA, 25 bp, Homo sapien
aggccggctctccagggttgacggg

SEQ ID NO: 5129028 - DNA, 25 bp, Homo sapien
ctccagggttgacgggcagggaggg

SEQ ID NO: 5129029 - DNA, 25 bp, Homo sapien
tgcaaataggtatatccattactat

SEQ ID NO: 5129030 - DNA, 25 bp, Homo sapien
accaatgcaaataggtatatccatt

SEQ ID NO: 5129031 - DNA, 25 bp, Homo sapien
caatgcaaataggtatatccattac

SEQ ID NO: 5129032 - DNA, 25 bp, Homo sapien
aatgcaaataggtatatccattact

SEQ ID NO: 5129033 - DNA, 25 bp, Homo sapien
ccagctgattttcagtgtgaaatca

SEQ ID NO: 5129034 - DNA, 25 bp, Homo sapien
tgtgaaatcactgcctgacccactg

SEQ ID NO: 5129035 - DNA, 25 bp, Homo sapien
actgccactaaacctgtctgggacc

SEQ ID NO: 5129036 - DNA, 25 bp, Homo sapien
tgccactaaacctgtctgggacccc

SEQ ID NO: 5129037 - DNA, 25 bp, Homo sapien
tgttaggaaactgtgtagcttgcat

SEQ ID NO: 5129038 - DNA, 25 bp, Homo sapien
gtgttaggaaactgtgtagcttgca

SEQ ID NO: 5129039 - DNA, 25 bp, Homo sapien
gttaggaaactgtgtagcttgcatg

SEQ ID NO: 5129040 - DNA, 25 bp, Homo sapien
ccgcaggaattgcaacggggacacc

SEQ ID NO: 5129041 - DNA, 25 bp, Homo sapien
agccgcaggaattgcaacggggaca

SEQ ID NO: 5129042 - DNA, 25 bp, Homo sapien
gcaggaattgcaacggggacaccat

SEQ ID NO: 5129043 - DNA, 25 bp, Homo sapien
cagaagccgcaggaattgcaacggg

SEQ ID NO: 5129044 - DNA, 25 bp, Homo sapien
aaaccatacagcaaacattagcaca

SEQ ID NO: 5129045 - DNA, 25 bp, Homo sapien
tagcacaagatgaaagaatacgcat

SEQ ID NO: 5129046 - DNA, 25 bp, Homo sapien
catacagcaaacattagcacaatat

SEQ ID NO: 5129047 - DNA, 25 bp, Homo sapien
tgcttaatgaaatcaccactaatct

SEQ ID NO: 5129048 - DNA, 25 bp, Homo sapien
tgtcatcacaacatcacccctggag

SEQ ID NO: 5129049 - DNA, 25 bp, Homo sapien
gtgtcatcacaacatcacccctgga

SEQ ID NO: 5129050 - DNA, 25 bp, Homo sapien
tgtgtcatcacaacatcacccctgg

SEQ ID NO: 5129051 - DNA, 25 bp, Homo sapien
gtataagtagttgccaatgccttca

SEQ ID NO: 5129052 - DNA, 25 bp, Homo sapien
gctggtaccagtataagtagttgcc

SEQ ID NO: 5129053 - DNA, 25 bp, Homo sapien
ggtaccagtataagtagttgccaat

SEQ ID NO: 5129054 - DNA, 25 bp, Homo sapien
ccagtataagtagttgccaatgcct

SEQ ID NO: 5129055 - DNA, 25 bp, Homo sapien
ttgtagcacagtgtgagggtgctta

SEQ ID NO: 5129056 - DNA, 25 bp, Homo sapien
ctgcaaggatcataaaaacggggta

SEQ ID NO: 5129057 - DNA, 25 bp, Homo sapien
agggtgcttattgccctgctgacag

SEQ ID NO: 5129058 - DNA, 25 bp, Homo sapien
tctctgttccgccaggctgagctaa

SEQ ID NO: 5129059 - DNA, 25 bp, Homo sapien
aacaggagaagtaatcttcaacaac

SEQ ID NO: 5129060 - DNA, 25 bp, Homo sapien
caggagaagtaatcttcaacaactc

SEQ ID NO: 5129061 - DNA, 25 bp, Homo sapien
aaagaaacaggagaagtaatcttca

SEQ ID NO: 5129062 - DNA, 25 bp, Homo sapien
gaaacaggagaagtaatcttcaaca

SEQ ID NO: 5129063 - DNA, 25 bp, Homo sapien
cttgtaaaggacagtttctgtacac

SEQ ID NO: 5129064 - DNA, 25 bp, Homo sapien
acttgtaaaggacagtttctgtaca

SEQ ID NO: 5129065 - DNA, 25 bp, Homo sapien
tgtagccctgaagaataatccacag

SEQ ID NO: 5129066 - DNA, 25 bp, Homo sapien
tagccctgaagaataatccacagtt

SEQ ID NO: 5129067 - DNA, 25 bp, Homo sapien
actgtagccctgaagaataatccac

SEQ ID NO: 5129068 - DNA, 25 bp, Homo sapien
ttactgtagccctgaagaataatcc

SEQ ID NO: 5129069 - DNA, 25 bp, Homo sapien
tatgtggttattgttctgtgcatgg

SEQ ID NO: 5129070 - DNA, 25 bp, Homo sapien
tggttattgttctgtgcatggctca

SEQ ID NO: 5129071 - DNA, 25 bp, Homo sapien
ggttattgttctgtgcatggctcat

SEQ ID NO: 5129072 - DNA, 25 bp, Homo sapien
tgtggttattgttctgtgcatggct

SEQ ID NO: 5129073 - DNA, 25 bp, Homo sapien
gacttttatgtagtttgtcaactac

SEQ ID NO: 5129074 - DNA, 25 bp, Homo sapien
tactgaaagtattctattcagtttc

SEQ ID NO: 5129075 - DNA, 25 bp, Homo sapien
ttttatgtagtttgtcaactactga

SEQ ID NO: 5129076 - DNA, 25 bp, Homo sapien
ctgaaagtattctattcagtttcat

SEQ ID NO: 5129077 - DNA, 25 bp, Homo sapien
ctgagcaatggactcaatctcagtc

SEQ ID NO: 5129078 - DNA, 25 bp, Homo sapien
tgagcaatggactcaatctcagtcc

SEQ ID NO: 5129079 - DNA, 25 bp, Homo sapien
gtgagtcttttcacgggtattaatg

SEQ ID NO: 5129080 - DNA, 25 bp, Homo sapien
tgagtcttttcacgggtattaatga

SEQ ID NO: 5129081 - DNA, 25 bp, Homo sapien
agtcttttcacgggtattaatgaag

SEQ ID NO: 5129082 - DNA, 25 bp, Homo sapien
cgtgagtcttttcacgggtattaat

SEQ ID NO: 5129083 - DNA, 25 bp, Homo sapien
gccagatctggtttccgctggtgcc

SEQ ID NO: 5129084 - DNA, 25 bp, Homo sapien
cagactaggatgtttttcatactcc

SEQ ID NO: 5129085 - DNA, 25 bp, Homo sapien
ggtttccgctggtgccagactagga

SEQ ID NO: 5129086 - DNA, 25 bp, Homo sapien
gactaggatgtttttcatactccag

SEQ ID NO: 5129087 - DNA, 25 bp, Homo sapien
tgatggccagagtgaaatatgttca

SEQ ID NO: 5129088 - DNA, 25 bp, Homo sapien
gatggccagagtgaaatatgttcag

SEQ ID NO: 5129089 - DNA, 25 bp, Homo sapien
ctgaccctaagctgtggaggaagca

SEQ ID NO: 5129090 - DNA, 25 bp, Homo sapien
ttaacccagggctacagtcaggctg

SEQ ID NO: 5129091 - DNA, 25 bp, Homo sapien
acccagggctacagtcaggctggca

SEQ ID NO: 5129092 - DNA, 25 bp, Homo sapien
gagagctgcccgatgctgaccctaa

SEQ ID NO: 5129093 - DNA, 25 bp, Homo sapien
gccccaggagctgagcagggaccct

SEQ ID NO: 5129094 - DNA, 25 bp, Homo sapien
ggagccccaggagctgagcagggac

SEQ ID NO: 5129095 - DNA, 25 bp, Homo sapien
ccaggagctgagcagggaccctcat

SEQ ID NO: 5129096 - DNA, 25 bp, Homo sapien
ctgggaaccagagcagcaggagccc

SEQ ID NO: 5129097 - DNA, 25 bp, Homo sapien
gggtaactattatgctgtagacagt

SEQ ID NO: 5129098 - DNA, 25 bp, Homo sapien
ggagggtaactattatgctgtagac

SEQ ID NO: 5129099 - DNA, 25 bp, Homo sapien
gagggtaactattatgctgtagaca

SEQ ID NO: 5129100 - DNA, 25 bp, Homo sapien
gggagggtaactattatgctgtaga

SEQ ID NO: 5129101 - DNA, 25 bp, Homo sapien
gagccccaggagctgagcgaggacc

SEQ ID NO: 5129102 - DNA, 25 bp, Homo sapien
gccccaggagctgagcgaggaccct

SEQ ID NO: 5129103 - DNA, 25 bp, Homo sapien
cccaggagctgagcgaggaccctca

SEQ ID NO: 5129104 - DNA, 25 bp, Homo sapien
ctgggaaacagagcagcaggagccc

SEQ ID NO: 5129105 - DNA, 25 bp, Homo sapien
gagactgggtcatctggatgtcaca

SEQ ID NO: 5129106 - DNA, 25 bp, Homo sapien
tcgcccgacaagtgatggtgactct

SEQ ID NO: 5129107 - DNA, 25 bp, Homo sapien
gtctcctacagatgcagacagtgag

SEQ ID NO: 5129108 - DNA, 25 bp, Homo sapien
tgcagacagtgaggatggagactgg

SEQ ID NO: 5129109 - DNA, 25 bp, Homo sapien
taactattatactgttggcagtaat

SEQ ID NO: 5129110 - DNA, 25 bp, Homo sapien
atggttccgtctgggtcctaactga

SEQ ID NO: 5129111 - DNA, 25 bp, Homo sapien
gcttccatggttccgtctgggtcct

SEQ ID NO: 5129112 - DNA, 25 bp, Homo sapien
tccatggttccgtctgggtcctaac

SEQ ID NO: 5129113 - DNA, 25 bp, Homo sapien
ggcttccatggttccgtctgggtcc

SEQ ID NO: 5129114 - DNA, 25 bp, Homo sapien
tgcgtcatcactatttctccagtgg

SEQ ID NO: 5129115 - DNA, 25 bp, Homo sapien
ctgcgtcatcactatttctccagtg

SEQ ID NO: 5129116 - DNA, 25 bp, Homo sapien
gcgtcatcactatttctccagtggt

SEQ ID NO: 5129117 - DNA, 25 bp, Homo sapien
gagacacagacagggtggctggaga

SEQ ID NO: 5129118 - DNA, 25 bp, Homo sapien
tggagacacagacagggtggctgga

SEQ ID NO: 5129119 - DNA, 25 bp, Homo sapien
ctggagacacagacagggtggctgg

SEQ ID NO: 5129120 - DNA, 25 bp, Homo sapien
ggagacacagacagggtggctggag

SEQ ID NO: 5129121 - DNA, 25 bp, Homo sapien
ttgctgctaacactctgactggccc

SEQ ID NO: 5129122 - DNA, 25 bp, Homo sapien
taccaggctaagttgctgctaacac

SEQ ID NO: 5129123 - DNA, 25 bp, Homo sapien
tctgctggtaccaggctaagttgct

SEQ ID NO: 5129124 - DNA, 25 bp, Homo sapien
ctggtaccaggctaagttgctgcta

SEQ ID NO: 5129125 - DNA, 25 bp, Homo sapien
tggtggatgcaccatagatgaggag

SEQ ID NO: 5129126 - DNA, 25 bp, Homo sapien
ggtggatgcaccatagatgaggagc

SEQ ID NO: 5129127 - DNA, 25 bp, Homo sapien
ctagtaaacactgatggtcttcttg

SEQ ID NO: 5129128 - DNA, 25 bp, Homo sapien
tttcatgttgaatcactgtgggagg

SEQ ID NO: 5129129 - DNA, 25 bp, Homo sapien
tagctgtctgtaaaggaagcagctg

SEQ ID NO: 5129130 - DNA, 25 bp, Homo sapien
aaggaagcagctggtataatctagt

SEQ ID NO: 5129131 - DNA, 25 bp, Homo sapien
tttcactaaagtacatgtccttgct

SEQ ID NO: 5129132 - DNA, 25 bp, Homo sapien
tcacagatctagacatcacatgccc

SEQ ID NO: 5129133 - DNA, 25 bp, Homo sapien
cagctttcactaaagtacatgtcct

SEQ ID NO: 5129134 - DNA, 25 bp, Homo sapien
gaagccccaggagctgagcggggac

SEQ ID NO: 5129135 - DNA, 25 bp, Homo sapien
tgggagccagagcagcagaagcccc

SEQ ID NO: 5129136 - DNA, 25 bp, Homo sapien
ctgggagccagagcagcagaagccc

SEQ ID NO: 5129137 - DNA, 25 bp, Homo sapien
ccaggagctgagcggggaccctcat

SEQ ID NO: 5129138 - DNA, 25 bp, Homo sapien
gatggagactgggtcaactggatgg

SEQ ID NO: 5129139 - DNA, 25 bp, Homo sapien
tggagactgggtcaactggatggca

SEQ ID NO: 5129140 - DNA, 25 bp, Homo sapien
aggatggagactgggtcaactggat

SEQ ID NO: 5129141 - DNA, 25 bp, Homo sapien
gagactgggtcaactggatggcaca

SEQ ID NO: 5129142 - DNA, 25 bp, Homo sapien
tttgtaacactatgtgagggtaatt

SEQ ID NO: 5129143 - DNA, 25 bp, Homo sapien
gagggtaattattaaactgttgaca

SEQ ID NO: 5129144 - DNA, 25 bp, Homo sapien
cactatgtgagggtaattattaaac

SEQ ID NO: 5129145 - DNA, 25 bp, Homo sapien
tgagggtaattattaaactgttgac

SEQ ID NO: 5129146 - DNA, 25 bp, Homo sapien
gccccaggagctgagcggggaccct

SEQ ID NO: 5129147 - DNA, 25 bp, Homo sapien
gagccccaggagctgagcggggacc

SEQ ID NO: 5129148 - DNA, 25 bp, Homo sapien
ctgggaaccagagcagcaggagccc

SEQ ID NO: 5129149 - DNA, 25 bp, Homo sapien
ccaggagctgagcggggaccctcat

SEQ ID NO: 5129150 - DNA, 25 bp, Homo sapien
cagacacagaagatggagactgggt

SEQ ID NO: 5129151 - DNA, 25 bp, Homo sapien
ggtcatctggatgtcgcatctggaa

SEQ ID NO: 5129152 - DNA, 25 bp, Homo sapien
tcgcccgacaagtgatggtgactct

SEQ ID NO: 5129153 - DNA, 25 bp, Homo sapien
ctacagatgcagacacagaagatgg

SEQ ID NO: 5129154 - DNA, 25 bp, Homo sapien
ttagcctgttgacaatagtaagttg

SEQ ID NO: 5129155 - DNA, 25 bp, Homo sapien
gttagcctgttgacaatagtaagtt

SEQ ID NO: 5129156 - DNA, 25 bp, Homo sapien
tagcctgttgacaatagtaagttgc

SEQ ID NO: 5129157 - DNA, 25 bp, Homo sapien
cccaataagaagtcctcccatgaga

SEQ ID NO: 5129158 - DNA, 25 bp, Homo sapien
gagatttggaagtccgaaaaggatg

SEQ ID NO: 5129159 - DNA, 25 bp, Homo sapien
tttcttatagagttgcccaataaga

SEQ ID NO: 5129160 - DNA, 25 bp, Homo sapien
gaaaaggatgactcaatattctcca

SEQ ID NO: 5129161 - DNA, 25 bp, Homo sapien
tcacagtaatctggctgatcaagga

SEQ ID NO: 5129162 - DNA, 25 bp, Homo sapien
gatgctcacgttcacagtaatctgg

SEQ ID NO: 5129163 - DNA, 25 bp, Homo sapien
aatctggctgatcaaggaagggttc

SEQ ID NO: 5129164 - DNA, 25 bp, Homo sapien
tcatagatgctcacgttcacagtaa

SEQ ID NO: 5129165 - DNA, 25 bp, Homo sapien
gctattttcctgaccagacagctgg

SEQ ID NO: 5129166 - DNA, 25 bp, Homo sapien
ccattgggcagaatgaccatgttca

SEQ ID NO: 5129167 - DNA, 25 bp, Homo sapien
ggtagccccagcatctaatagagtg

SEQ ID NO: 5129168 - DNA, 25 bp, Homo sapien
tgttttgtacaatcatcagggcccc

SEQ ID NO: 5129169 - DNA, 25 bp, Homo sapien
agagaagctgcgctggggcttccat

SEQ ID NO: 5129170 - DNA, 25 bp, Homo sapien
ctgggagccagagtagcaggaggaa

SEQ ID NO: 5129171 - DNA, 25 bp, Homo sapien
ggaagagaagctgcgctggggcttc

SEQ ID NO: 5129172 - DNA, 25 bp, Homo sapien
gagccagagtagcaggaggaagaga

SEQ ID NO: 5129173 - DNA, 25 bp, Homo sapien
tggctggagactgtgtcaacacaat

SEQ ID NO: 5129174 - DNA, 25 bp, Homo sapien
ggtggctggagactgtgtcaacaca

SEQ ID NO: 5129175 - DNA, 25 bp, Homo sapien
ggagacaaagacagggtggctggag

SEQ ID NO: 5129176 - DNA, 25 bp, Homo sapien
tgtcaacacaatttctccggtggta

SEQ ID NO: 5129177 - DNA, 25 bp, Homo sapien
aggctaagtagctgctaacaccctg

SEQ ID NO: 5129178 - DNA, 25 bp, Homo sapien
ccagttgctacgctgctgacagtaa

SEQ ID NO: 5129179 - DNA, 25 bp, Homo sapien
accaggctaagtagctgctaacacc

SEQ ID NO: 5129180 - DNA, 25 bp, Homo sapien
gccctgttggatgcatcatagatga

SEQ ID NO: 5129181 - DNA, 25 bp, Homo sapien
tagctgtctgtaaaggaagcagctg

SEQ ID NO: 5129182 - DNA, 25 bp, Homo sapien
tttttgtttcatgtggaatcactgt

SEQ ID NO: 5129183 - DNA, 25 bp, Homo sapien
aaggaagcagctggtataataatct

SEQ ID NO: 5129184 - DNA, 25 bp, Homo sapien
tttcatgtggaatcactgtgggatg

SEQ ID NO: 5129185 - DNA, 25 bp, Homo sapien
cctatggagttctgcatgtttagct

SEQ ID NO: 5129186 - DNA, 25 bp, Homo sapien
gacttgtaaagctgtgagatttttc

SEQ ID NO: 5129187 - DNA, 25 bp, Homo sapien
ctcaaacaggtcattgtcttggact

SEQ ID NO: 5129188 - DNA, 25 bp, Homo sapien
catttcctatggagttctgcatgtt

SEQ ID NO: 5129189 - DNA, 25 bp, Homo sapien
tttactttgcaccggagactccttg

SEQ ID NO: 5129190 - DNA, 25 bp, Homo sapien
ttactttgcaccggagactccttgt

SEQ ID NO: 5129191 - DNA, 25 bp, Homo sapien
ctcactgtgagaaggtgaactgagg

SEQ ID NO: 5129192 - DNA, 25 bp, Homo sapien
gcctcactgtgagaaggtgaactga

SEQ ID NO: 5129193 - DNA, 25 bp, Homo sapien
gagcctcactgtgagaaggtgaact

SEQ ID NO: 5129194 - DNA, 25 bp, Homo sapien
cactgtgagaaggtgaactgaggag

SEQ ID NO: 5129195 - DNA, 25 bp, Homo sapien
aatagatgtatccattactgtgaag

SEQ ID NO: 5129196 - DNA, 25 bp, Homo sapien
tagatgtatccattactgtgaaggg

SEQ ID NO: 5129197 - DNA, 25 bp, Homo sapien
ggactccagggtcgtgattggaaac

SEQ ID NO: 5129198 - DNA, 25 bp, Homo sapien
catgaaatctgtccccgacccactg

SEQ ID NO: 5129199 - DNA, 25 bp, Homo sapien
tactgcagactctgtcatgcaaagg

SEQ ID NO: 5129200 - DNA, 25 bp, Homo sapien
tccatactgcagactctgtcatgca

SEQ ID NO: 5129201 - DNA, 25 bp, Homo sapien
cagactctgtcatgcaaaggctgct

SEQ ID NO: 5129202 - DNA, 25 bp, Homo sapien
tcctccatactgcagactctgtcat

SEQ ID NO: 5129203 - DNA, 25 bp, Homo sapien
gagccccaggagctgagcggggacc

SEQ ID NO: 5129204 - DNA, 25 bp, Homo sapien
gccccaggagctgagcggggaccct

SEQ ID NO: 5129205 - DNA, 25 bp, Homo sapien
ccaggagctgagcggggaccctcat

SEQ ID NO: 5129206 - DNA, 25 bp, Homo sapien
ctgggagccagagcagcaggagccc

SEQ ID NO: 5129207 - DNA, 25 bp, Homo sapien
ggatcatctggatgtcaaatctgac

SEQ ID NO: 5129208 - DNA, 25 bp, Homo sapien
gatcatctggatgtcaaatctgaca

SEQ ID NO: 5129209 - DNA, 25 bp, Homo sapien
acaggaaagatggagactggatcat

SEQ ID NO: 5129210 - DNA, 25 bp, Homo sapien
ggaaagatggagactggatcatctg

SEQ ID NO: 5129211 - DNA, 25 bp, Homo sapien
agaccccagggtgcaaatcttttgc

SEQ ID NO: 5129212 - DNA, 25 bp, Homo sapien
tgcccagcaaatgatactgactctg

SEQ ID NO: 5129213 - DNA, 25 bp, Homo sapien
attactgctaatgccctcacttgcc

SEQ ID NO: 5129214 - DNA, 25 bp, Homo sapien
ctgcagataccaggctaaattactg

SEQ ID NO: 5129215 - DNA, 25 bp, Homo sapien
agccccaggcgctgagcgggcaccc

SEQ ID NO: 5129216 - DNA, 25 bp, Homo sapien
cccaggcgctgagcgggcaccctca

SEQ ID NO: 5129217 - DNA, 25 bp, Homo sapien
ggagccccaggcgctgagcgggcac

SEQ ID NO: 5129218 - DNA, 25 bp, Homo sapien
gccccaggcgctgagcgggcaccct

SEQ ID NO: 5129219 - DNA, 25 bp, Homo sapien
ggagaatggagactgggtcatccgg

SEQ ID NO: 5129220 - DNA, 25 bp, Homo sapien
gtcatccggatggcacatctggcac

SEQ ID NO: 5129221 - DNA, 25 bp, Homo sapien
aatggagactgggtcatccggatgg

SEQ ID NO: 5129222 - DNA, 25 bp, Homo sapien
ctacagatgcagacagggagaatgg

SEQ ID NO: 5129223 - DNA, 25 bp, Homo sapien
aggctaaataactgctaatgccctg

SEQ ID NO: 5129224 - DNA, 25 bp, Homo sapien
ggctaaataactgctaatgccctga

SEQ ID NO: 5129225 - DNA, 25 bp, Homo sapien
gctaaataactgctaatgccctgac

SEQ ID NO: 5129226 - DNA, 25 bp, Homo sapien
cttgatgggaccccactttgcaaac

SEQ ID NO: 5129227 - DNA, 25 bp, Homo sapien
gtctgcaatcatcctgttgtgtttc

SEQ ID NO: 5129228 - DNA, 25 bp, Homo sapien
ttggattgtggctcatttttgaaac

SEQ ID NO: 5129229 - DNA, 25 bp, Homo sapien
ggctttgtctgcaatcatcctgttg

SEQ ID NO: 5129230 - DNA, 25 bp, Homo sapien
tttttggattgtggctcatttttga

SEQ ID NO: 5129231 - DNA, 25 bp, Homo sapien
cacctccatatcccactatgcgttt

SEQ ID NO: 5129232 - DNA, 25 bp, Homo sapien
tctcagatccaactgattcagtgat

SEQ ID NO: 5129233 - DNA, 25 bp, Homo sapien
ctccatatcccactatgcgtttcat

SEQ ID NO: 5129234 - DNA, 25 bp, Homo sapien
cctccatatcccactatgcgtttca

SEQ ID NO: 5129235 - DNA, 25 bp, Homo sapien
cagtatcttcacttgccatgtttct

SEQ ID NO: 5129236 - DNA, 25 bp, Homo sapien
ccttaaggaacatgctcctggcaaa

SEQ ID NO: 5129237 - DNA, 25 bp, Homo sapien
gccccaggagctgagcggggaccct

SEQ ID NO: 5129238 - DNA, 25 bp, Homo sapien
ccaggagctgagcggggaccctcat

SEQ ID NO: 5129239 - DNA, 25 bp, Homo sapien
gagccccaggagctgagcggggacc

SEQ ID NO: 5129240 - DNA, 25 bp, Homo sapien
ctgggagccagagcagcaggagccc

SEQ ID NO: 5129241 - DNA, 25 bp, Homo sapien
gtagatgcagagagtaaggatggag

SEQ ID NO: 5129242 - DNA, 25 bp, Homo sapien
tagatgcagagagtaaggatggaga

SEQ ID NO: 5129243 - DNA, 25 bp, Homo sapien
ggagactgggtcatccagatgacac

SEQ ID NO: 5129244 - DNA, 25 bp, Homo sapien
ggtcatccagatgacacatctggca

SEQ ID NO: 5129245 - DNA, 25 bp, Homo sapien
tgactcatccgacaactgatggtga

SEQ ID NO: 5129246 - DNA, 25 bp, Homo sapien
taatgccctgactcatccgacaact

SEQ ID NO: 5129247 - DNA, 25 bp, Homo sapien
tgccctgactcatccgacaactgat

SEQ ID NO: 5129248 - DNA, 25 bp, Homo sapien
atccgacaactgatggtgactctgt

SEQ ID NO: 5129249 - DNA, 25 bp, Homo sapien
tcttcagactgcaggcaactgatgg

SEQ ID NO: 5129250 - DNA, 25 bp, Homo sapien
tttgttcgggtgtgtaacactgtgg

SEQ ID NO: 5129251 - DNA, 25 bp, Homo sapien
aaaatcttcagactgcaggcaactg

SEQ ID NO: 5129252 - DNA, 25 bp, Homo sapien
tgtgggagggaaactataatactgt

SEQ ID NO: 5129253 - DNA, 25 bp, Homo sapien
ctccatatcccactatgcgtttcat

SEQ ID NO: 5129254 - DNA, 25 bp, Homo sapien
cctccatatcccactatgcgtttca

SEQ ID NO: 5129255 - DNA, 25 bp, Homo sapien
acctccatatcccactatgcgtttc

SEQ ID NO: 5129256 - DNA, 25 bp, Homo sapien
cacctccatatcccactatgcgttt

SEQ ID NO: 5129257 - DNA, 25 bp, Homo sapien
atccaactgattcagtgataaacct

SEQ ID NO: 5129258 - DNA, 25 bp, Homo sapien
gatccaactgattcagtgataaacc

SEQ ID NO: 5129259 - DNA, 25 bp, Homo sapien
gaacaattccaagaatggcactgct

SEQ ID NO: 5129260 - DNA, 25 bp, Homo sapien
gctgcctgagactccacattcaagc

SEQ ID NO: 5129261 - DNA, 25 bp, Homo sapien
acaattccaagaatggcactgctgg

SEQ ID NO: 5129262 - DNA, 25 bp, Homo sapien
ctgcctgagactccacattcaagct

SEQ ID NO: 5129263 - DNA, 25 bp, Homo sapien
ctgagcttatttgtcttgcgttttt

SEQ ID NO: 5129264 - DNA, 25 bp, Homo sapien
agctaggtgagaacccagtggcttt

SEQ ID NO: 5129265 - DNA, 25 bp, Homo sapien
gagcttatttgtcttgcgtttttgg

SEQ ID NO: 5129266 - DNA, 25 bp, Homo sapien
agtgaagctaggtgagaacccagtg

SEQ ID NO: 5129267 - DNA, 25 bp, Homo sapien
ctctctctgatggtggagctaagag

SEQ ID NO: 5129268 - DNA, 25 bp, Homo sapien
gagctaagagtgttacactctccca

SEQ ID NO: 5129269 - DNA, 25 bp, Homo sapien
aagagtgttacactctcccattttg

SEQ ID NO: 5129270 - DNA, 25 bp, Homo sapien
ctgatggtggagctaagagtgttac

SEQ ID NO: 5129271 - DNA, 25 bp, Homo sapien
gggtcctaactgagcagttcctccc

SEQ ID NO: 5129272 - DNA, 25 bp, Homo sapien
ctgggtcctaactgagcagttcctc

SEQ ID NO: 5129273 - DNA, 25 bp, Homo sapien
tgggtcctaactgagcagttcctcc

SEQ ID NO: 5129274 - DNA, 25 bp, Homo sapien
ctgggagccagagtagcaggaggaa

SEQ ID NO: 5129275 - DNA, 25 bp, Homo sapien
ggagccagagtagcaggaggaagaa

SEQ ID NO: 5129276 - DNA, 25 bp, Homo sapien
agaagaagctgtgctggggcttcca

SEQ ID NO: 5129277 - DNA, 25 bp, Homo sapien
ggaggaagaagaagctgtgctgggg

SEQ ID NO: 5129278 - DNA, 25 bp, Homo sapien
ctgagattggaaataaaacagaaat

SEQ ID NO: 5129279 - DNA, 25 bp, Homo sapien
aataaaacagaaatgcactcatgta

SEQ ID NO: 5129280 - DNA, 25 bp, Homo sapien
taaaacagaaatgcactcatgtaat

SEQ ID NO: 5129281 - DNA, 25 bp, Homo sapien
gaaataaaacagaaatgcactcatg

SEQ ID NO: 5129282 - DNA, 25 bp, Homo sapien
gagacaaagacagggtggctggaga

SEQ ID NO: 5129283 - DNA, 25 bp, Homo sapien
ctggagacaaagacagggtggctgg

SEQ ID NO: 5129284 - DNA, 25 bp, Homo sapien
ggagacaaagacagggtggctggag

SEQ ID NO: 5129285 - DNA, 25 bp, Homo sapien
tggagacaaagacagggtggctgga

SEQ ID NO: 5129286 - DNA, 25 bp, Homo sapien
ctgcaggagagggtggctctttccc

SEQ ID NO: 5129287 - DNA, 25 bp, Homo sapien
tggtggatgcaccatagatgaggag

SEQ ID NO: 5129288 - DNA, 25 bp, Homo sapien
gctgctgctaacactctgactggcc

SEQ ID NO: 5129289 - DNA, 25 bp, Homo sapien
ggtggatgcaccatagatgaggagc

SEQ ID NO: 5129290 - DNA, 25 bp, Homo sapien
taaacactgatggtcttgttgaggt

SEQ ID NO: 5129291 - DNA, 25 bp, Homo sapien
gaatcactgtgggaggtaagttata

SEQ ID NO: 5129292 - DNA, 25 bp, Homo sapien
taagttataatcctgctgacagtaa

SEQ ID NO: 5129293 - DNA, 25 bp, Homo sapien
tgtgggaggtaagttataatcctgc

SEQ ID NO: 5129294 - DNA, 25 bp, Homo sapien
tcgtgtgaacgcgtcatacgcttgt

SEQ ID NO: 5129295 - DNA, 25 bp, Homo sapien
cgtcatacgcttgtgaaagactgtg

SEQ ID NO: 5129296 - DNA, 25 bp, Homo sapien
catgcatgtgaacgcgtcagggtgc

SEQ ID NO: 5129297 - DNA, 25 bp, Homo sapien
tgtacatgcatgtgaacgcgtcagg

SEQ ID NO: 5129298 - DNA, 25 bp, Homo sapien
catgaaatgaaatggataggatgcc

SEQ ID NO: 5129299 - DNA, 25 bp, Homo sapien
aaatgaaatggataggatgccctca

SEQ ID NO: 5129300 - DNA, 25 bp, Homo sapien
gaaatgaaatggataggatgccctc

SEQ ID NO: 5129301 - DNA, 25 bp, Homo sapien
tgaaatgaaatggataggatgccct

SEQ ID NO: 5129302 - DNA, 25 bp, Homo sapien
tcatctcatatcttctcatctcatt

SEQ ID NO: 5129303 - DNA, 25 bp, Homo sapien
catctcatatcttctcatctcattt

SEQ ID NO: 5129304 - DNA, 25 bp, Homo sapien
tttcatctcatatcttctcatctca

SEQ ID NO: 5129305 - DNA, 25 bp, Homo sapien
tctcatatcttctcatctcatttca

SEQ ID NO: 5129306 - DNA, 25 bp, Homo sapien
tcattacatttcgtctaatttcatt

SEQ ID NO: 5129307 - DNA, 25 bp, Homo sapien
ctcatttaatttcaccttatttcat

SEQ ID NO: 5129308 - DNA, 25 bp, Homo sapien
tcatttcgtcttatcatctcatcaa

SEQ ID NO: 5129309 - DNA, 25 bp, Homo sapien
catctcatttcgttacatctcatca

SEQ ID NO: 5129310 - DNA, 25 bp, Homo sapien
gatatggtaaccaaaactctactat

SEQ ID NO: 5129311 - DNA, 25 bp, Homo sapien
taaccaaaactctactatctacttc

SEQ ID NO: 5129312 - DNA, 25 bp, Homo sapien
gtgagaacacgtagttatgtggtgt

SEQ ID NO: 5129313 - DNA, 25 bp, Homo sapien
caggatatggtaaccaaaactctac

SEQ ID NO: 5129314 - DNA, 25 bp, Homo sapien
atatcggtatacacagataatatac

SEQ ID NO: 5129315 - DNA, 25 bp, Homo sapien
tatcggtatacacagataatatact

SEQ ID NO: 5129316 - DNA, 25 bp, Homo sapien
tcggtatacacagataatatactga

SEQ ID NO: 5129317 - DNA, 25 bp, Homo sapien
atcggtatacacagataatatactg

SEQ ID NO: 5129318 - DNA, 25 bp, Homo sapien
gcctctcgagtggttaggactacaa

SEQ ID NO: 5129319 - DNA, 25 bp, Homo sapien
tattatgaacttatgcacttgttaa

SEQ ID NO: 5129320 - DNA, 25 bp, Homo sapien
cattcaaaagcagtttttggtgggt

SEQ ID NO: 5129321 - DNA, 25 bp, Homo sapien
tcgagtggttaggactacaagcacg

SEQ ID NO: 5129322 - DNA, 25 bp, Homo sapien
tggatgctaagtccaaaagacataa

SEQ ID NO: 5129323 - DNA, 25 bp, Homo sapien
ctggatgctaagtccaaaagacata

SEQ ID NO: 5129324 - DNA, 25 bp, Homo sapien
tactggatgctaagtccaaaagaca

SEQ ID NO: 5129325 - DNA, 25 bp, Homo sapien
ggatgctaagtccaaaagacataaa

SEQ ID NO: 5129326 - DNA, 25 bp, Homo sapien
tagggctgaccccacattggacacc

SEQ ID NO: 5129327 - DNA, 25 bp, Homo sapien
tctagggctgaccccacattggaca

SEQ ID NO: 5129328 - DNA, 25 bp, Homo sapien
taaacagcatttgcaggcagatccc

SEQ ID NO: 5129329 - DNA, 25 bp, Homo sapien
ctagggctgaccccacattggacac

SEQ ID NO: 5129330 - DNA, 25 bp, Homo sapien
taattttgtgggaagggaagccagc

SEQ ID NO: 5129331 - DNA, 25 bp, Homo sapien
agccagccctttaaaccaatcttca

SEQ ID NO: 5129332 - DNA, 25 bp, Homo sapien
cttcagcatgatggcagaaccaagg

SEQ ID NO: 5129333 - DNA, 25 bp, Homo sapien
actttgttcccgcagccacttgtgc

SEQ ID NO: 5129334 - DNA, 25 bp, Homo sapien
agtgcatgacaccatactagctaat

SEQ ID NO: 5129335 - DNA, 25 bp, Homo sapien
gggtgcattcatgtgatcagagctc

SEQ ID NO: 5129336 - DNA, 25 bp, Homo sapien
gatggggtgcattcatgtgatcaga

SEQ ID NO: 5129337 - DNA, 25 bp, Homo sapien
caagatggggtgcattcatgtgatc

SEQ ID NO: 5129338 - DNA, 25 bp, Homo sapien
ctcccattgcagccgagcgcagcgc

SEQ ID NO: 5129339 - DNA, 25 bp, Homo sapien
tctctcccattgcagccgagcgcag

SEQ ID NO: 5129340 - DNA, 25 bp, Homo sapien
ttctctcccattgcagccgagcgca

SEQ ID NO: 5129341 - DNA, 25 bp, Homo sapien
tcccattgcagccgagcgcagcgcc

SEQ ID NO: 5129342 - DNA, 25 bp, Homo sapien
gcccggctggccgcggcccctgtgc

SEQ ID NO: 5129343 - DNA, 25 bp, Homo sapien
ccggctggccgcggcccctgtgcct

SEQ ID NO: 5129344 - DNA, 25 bp, Homo sapien
ggctggccgcggcccctgtgcctcc

SEQ ID NO: 5129345 - DNA, 25 bp, Homo sapien
gcgcccggctggccgcggcccctgt

SEQ ID NO: 5129346 - DNA, 25 bp, Homo sapien
tgccaacggagatgccgatgagctt

SEQ ID NO: 5129347 - DNA, 25 bp, Homo sapien
cccgcgcaggctgccaacggagatg

SEQ ID NO: 5129348 - DNA, 25 bp, Homo sapien
aggctgccaacggagatgccgatga

SEQ ID NO: 5129349 - DNA, 25 bp, Homo sapien
agcccgcgcaggctgccaacggaga

SEQ ID NO: 5129350 - DNA, 25 bp, Homo sapien
ggtgaggtccttggacacagcgcac

SEQ ID NO: 5129351 - DNA, 25 bp, Homo sapien
ctccaggtccgtatctcctgctggg

SEQ ID NO: 5129352 - DNA, 25 bp, Homo sapien
ctgggtgaggtccttggacacagcg

SEQ ID NO: 5129353 - DNA, 25 bp, Homo sapien
cctgctgggtgaggtccttggacac

SEQ ID NO: 5129354 - DNA, 25 bp, Homo sapien
cataagggttcatgtgccatgttgg

SEQ ID NO: 5129355 - DNA, 25 bp, Homo sapien
tttaacataagggttcatgtgccat

SEQ ID NO: 5129356 - DNA, 25 bp, Homo sapien
taacataagggttcatgtgccatgt

SEQ ID NO: 5129357 - DNA, 25 bp, Homo sapien
acataagggttcatgtgccatgttg

SEQ ID NO: 5129358 - DNA, 25 bp, Homo sapien
tgtgatgtaattgctcatcatgtgc

SEQ ID NO: 5129359 - DNA, 25 bp, Homo sapien
gagttccagctgttaacggatacta

SEQ ID NO: 5129360 - DNA, 25 bp, Homo sapien
cggatactattttactgctgaaact

SEQ ID NO: 5129361 - DNA, 25 bp, Homo sapien
gaaactatcatgtgtgatgtaattg

SEQ ID NO: 5129362 - DNA, 25 bp, Homo sapien
gcatctcagcgtatattgggatcac

SEQ ID NO: 5129363 - DNA, 25 bp, Homo sapien
tgtaagtttaccatataggtgtatg

SEQ ID NO: 5129364 - DNA, 25 bp, Homo sapien
caatccgttagtatccttgcatctc

SEQ ID NO: 5129365 - DNA, 25 bp, Homo sapien
tatgtctgccattttaccgtttgtt

SEQ ID NO: 5129366 - DNA, 25 bp, Homo sapien
gtggttactctgcaaatcgaacacc

SEQ ID NO: 5129367 - DNA, 25 bp, Homo sapien
ctgcaaatcgaacaccccctacaaa

SEQ ID NO: 5129368 - DNA, 25 bp, Homo sapien
ggttactctgcaaatcgaacacccc

SEQ ID NO: 5129369 - DNA, 25 bp, Homo sapien
gcaaatcgaacaccccctacaaaca

SEQ ID NO: 5129370 - DNA, 25 bp, Homo sapien
ggcacccgtgctagacagagcttca

SEQ ID NO: 5129371 - DNA, 25 bp, Homo sapien
acttagtagtgaatgccctgggcca

SEQ ID NO: 5129372 - DNA, 25 bp, Homo sapien
cattcaacttctggagcacacggat

SEQ ID NO: 5129373 - DNA, 25 bp, Homo sapien
tcatgttggtgtcgggaagatgcac

SEQ ID NO: 5129374 - DNA, 25 bp, Homo sapien
aatggctaccgaacaggctgccagg

SEQ ID NO: 5129375 - DNA, 25 bp, Homo sapien
gatacatctctggattcaaatgcac

SEQ ID NO: 5129376 - DNA, 25 bp, Homo sapien
tttccagaggactggatttctggga

SEQ ID NO: 5129377 - DNA, 25 bp, Homo sapien
gatttctgggaaatggctaccgaac

SEQ ID NO: 5129378 - DNA, 25 bp, Homo sapien
tcaaagtaggatgacaaaggccaca

SEQ ID NO: 5129379 - DNA, 25 bp, Homo sapien
gagtaatgctctgagctgcgctccc

SEQ ID NO: 5129380 - DNA, 25 bp, Homo sapien
cacatcccctgagtaatgctctgag

SEQ ID NO: 5129381 - DNA, 25 bp, Homo sapien
atgacaaaggccacatcccctgagt

SEQ ID NO: 5129382 - DNA, 25 bp, Homo sapien
ccccaggagctgagtgggggccctc

SEQ ID NO: 5129383 - DNA, 25 bp, Homo sapien
ctggcagccagagcaccaggagccc

SEQ ID NO: 5129384 - DNA, 25 bp, Homo sapien
ccaggagctgagtgggggccctcat

SEQ ID NO: 5129385 - DNA, 25 bp, Homo sapien
gagccccaggagctgagtgggggcc

SEQ ID NO: 5129386 - DNA, 25 bp, Homo sapien
cccggcaagtgatggtgactctgtc

SEQ ID NO: 5129387 - DNA, 25 bp, Homo sapien
cgcccggcaagtgatggtgactctg

SEQ ID NO: 5129388 - DNA, 25 bp, Homo sapien
tcgcccggcaagtgatggtgactct

SEQ ID NO: 5129389 - DNA, 25 bp, Homo sapien
cggcaagtgatggtgactctgtctc

SEQ ID NO: 5129390 - DNA, 25 bp, Homo sapien
ccaaacctgactgagtttgagaact

SEQ ID NO: 5129391 - DNA, 25 bp, Homo sapien
cagaaggagcattggggcagcccag

SEQ ID NO: 5129392 - DNA, 25 bp, Homo sapien
acttccctcagcagatagaggcacc

SEQ ID NO: 5129393 - DNA, 25 bp, Homo sapien
aacctgactgagtttgagaacttcc

SEQ ID NO: 5129394 - DNA, 25 bp, Homo sapien
aaagagggtcttccctccgtgcagc

SEQ ID NO: 5129395 - DNA, 25 bp, Homo sapien
agagggtcttccctccgtgcagcag

SEQ ID NO: 5129396 - DNA, 25 bp, Homo sapien
ggtcttccctccgtgcagcaggaac

SEQ ID NO: 5129397 - DNA, 25 bp, Homo sapien
agggtcttccctccgtgcagcagga

SEQ ID NO: 5129398 - DNA, 25 bp, Homo sapien
ctgctttgcggcagacacaggtgga

SEQ ID NO: 5129399 - DNA, 25 bp, Homo sapien
aagacgccccactgctttgcggcag

SEQ ID NO: 5129400 - DNA, 25 bp, Homo sapien
tctgtagcttcagcatggacagtgt

SEQ ID NO: 5129401 - DNA, 25 bp, Homo sapien
taggaagacaggcagtctccgcagg

SEQ ID NO: 5129402 - DNA, 25 bp, Homo sapien
atcttagcttctgggctaagacacc

SEQ ID NO: 5129403 - DNA, 25 bp, Homo sapien
catcttagcttctgggctaagacac

SEQ ID NO: 5129404 - DNA, 25 bp, Homo sapien
gaaggatttgcacagggtcccggct

SEQ ID NO: 5129405 - DNA, 25 bp, Homo sapien
gatttgcacagggtcccggcttctg

SEQ ID NO: 5129406 - DNA, 25 bp, Homo sapien
gcttctgctatttatgagctccatg

SEQ ID NO: 5129407 - DNA, 25 bp, Homo sapien
gtcccggcttctgctatttatgagc

SEQ ID NO: 5129408 - DNA, 25 bp, Homo sapien
tggggggtgctgacctcagtggggt

SEQ ID NO: 5129409 - DNA, 25 bp, Homo sapien
ggggtggggggtgctgacctcagtg

SEQ ID NO: 5129410 - DNA, 25 bp, Homo sapien
ggtggggggtgctgacctcagtggg

SEQ ID NO: 5129411 - DNA, 25 bp, Homo sapien
gggggtgctgacctcagtggggtgt

SEQ ID NO: 5129412 - DNA, 25 bp, Homo sapien
tcttgccggccacaaaaggttatag

SEQ ID NO: 5129413 - DNA, 25 bp, Homo sapien
caaaaggttatagccagaattccac

SEQ ID NO: 5129414 - DNA, 25 bp, Homo sapien
gggccaagcgtgaaaccagtgatcg

SEQ ID NO: 5129415 - DNA, 25 bp, Homo sapien
tccccagatagtgaagctgcacaaa

SEQ ID NO: 5129416 - DNA, 25 bp, Homo sapien
agattcagtgctgggagtccagtgt

SEQ ID NO: 5129417 - DNA, 25 bp, Homo sapien
cagattcagtgctgggagtccagtg

SEQ ID NO: 5129418 - DNA, 25 bp, Homo sapien
ccagattcagtgctgggagtccagt

SEQ ID NO: 5129419 - DNA, 25 bp, Homo sapien
gctcctccaggaatgtgttcttggt

SEQ ID NO: 5129420 - DNA, 25 bp, Homo sapien
tgttcttggtttcaacctggtactc

SEQ ID NO: 5129421 - DNA, 25 bp, Homo sapien
gtctttgctcataggggaccccctc

SEQ ID NO: 5129422 - DNA, 25 bp, Homo sapien
gggtggtggccagtctttgctcata

SEQ ID NO: 5129423 - DNA, 25 bp, Homo sapien
gctcaaggttggaattatttgcagt

SEQ ID NO: 5129424 - DNA, 25 bp, Homo sapien
gagccgcttcgtggtcccaaaccag

SEQ ID NO: 5129425 - DNA, 25 bp, Homo sapien
caaggttggaattatttgcagtcaa

SEQ ID NO: 5129426 - DNA, 25 bp, Homo sapien
agccgcttcgtggtcccaaaccagg

SEQ ID NO: 5129427 - DNA, 25 bp, Homo sapien
tcaaagtgtccgtgatgtccctgct

SEQ ID NO: 5129428 - DNA, 25 bp, Homo sapien
tctgagctggtctcggggtgtgagc

SEQ ID NO: 5129429 - DNA, 25 bp, Homo sapien
tgctgctggtagtaggctctgccct

SEQ ID NO: 5129430 - DNA, 25 bp, Homo sapien
gctggtctcggggtgtgagctgctg

SEQ ID NO: 5129431 - DNA, 25 bp, Homo sapien
cctgatggccgtgcaagatttctta

SEQ ID NO: 5129432 - DNA, 25 bp, Homo sapien
caagacataacctgatggccgtgca

SEQ ID NO: 5129433 - DNA, 25 bp, Homo sapien
aggctgatggtactgaaactctgct

SEQ ID NO: 5129434 - DNA, 25 bp, Homo sapien
tccttgccaggctgatggtactgaa

SEQ ID NO: 5129435 - DNA, 25 bp, Homo sapien
tcctccaccttcttgagcgccaaag

SEQ ID NO: 5129436 - DNA, 25 bp, Homo sapien
ctccaccttcttgagcgccaaagcc

SEQ ID NO: 5129437 - DNA, 25 bp, Homo sapien
ttcctccaccttcttgagcgccaaa

SEQ ID NO: 5129438 - DNA, 25 bp, Homo sapien
ccaccttcttgagcgccaaagccca

SEQ ID NO: 5129439 - DNA, 25 bp, Homo sapien
gagatgaaatggtgaaatgttgaaa

SEQ ID NO: 5129440 - DNA, 25 bp, Homo sapien
atgatatcaaaaatatgagatgaga

SEQ ID NO: 5129441 - DNA, 25 bp, Homo sapien
tatcaaaaatatgagatgagatgaa

SEQ ID NO: 5129442 - DNA, 25 bp, Homo sapien
agatgaaatggtgaaatgttgaaat

SEQ ID NO: 5129443 - DNA, 25 bp, Homo sapien
tgacaatccccaggtctgacactgg

SEQ ID NO: 5129444 - DNA, 25 bp, Homo sapien
ctgacaatccccaggtctgacactg

SEQ ID NO: 5129445 - DNA, 25 bp, Homo sapien
gacaatccccaggtctgacactggc

SEQ ID NO: 5129446 - DNA, 25 bp, Homo sapien
gaccctggccttgctctggatcctc

SEQ ID NO: 5129447 - DNA, 25 bp, Homo sapien
cgccgccgctgtccgcctctccgcc

SEQ ID NO: 5129448 - DNA, 25 bp, Homo sapien
ctcgccgccgctgtctgcctctccg

SEQ ID NO: 5129449 - DNA, 25 bp, Homo sapien
ctctccgccgctgtccgtctctccg

SEQ ID NO: 5129450 - DNA, 25 bp, Homo sapien
gctgtccgcctctccgccgctggcc

SEQ ID NO: 5129451 - DNA, 25 bp, Homo sapien
gccgctgcgcgcctcgccgccgctg

SEQ ID NO: 5129452 - DNA, 25 bp, Homo sapien
tgcgccgccgctgcgcgcctcgccg

SEQ ID NO: 5129453 - DNA, 25 bp, Homo sapien
ctgcgccgccgctgcgcgcctcgcc

SEQ ID NO: 5129454 - DNA, 25 bp, Homo sapien
gccgccgctgcgcgcctcgccgccg

SEQ ID NO: 5129455 - DNA, 25 bp, Homo sapien
ggcctgcgcctctccgcgccagagc

SEQ ID NO: 5129456 - DNA, 25 bp, Homo sapien
tctccgcgccagagccggcgccagc

SEQ ID NO: 5129457 - DNA, 25 bp, Homo sapien
cagagccggcgccagcgcctctccg

SEQ ID NO: 5129458 - DNA, 25 bp, Homo sapien
gagccggcgccagcgcctctccgcg

SEQ ID NO: 5129459 - DNA, 25 bp, Homo sapien
gtggcagaaaatagtgatctatgtt

SEQ ID NO: 5129460 - DNA, 25 bp, Homo sapien
cacaggacacttatgagaggtaaaa

SEQ ID NO: 5129461 - DNA, 25 bp, Homo sapien
gaagaaaccttgaaggcgcacgcca

SEQ ID NO: 5129462 - DNA, 25 bp, Homo sapien
aaatagaaagtttctgcacaaaaca

SEQ ID NO: 5129463 - DNA, 25 bp, Homo sapien
tgtataaattggcttagcaggaggc

SEQ ID NO: 5129464 - DNA, 25 bp, Homo sapien
aatgtataaattggcttagcaggag

SEQ ID NO: 5129465 - DNA, 25 bp, Homo sapien
taaattggcttagcaggaggcagaa

SEQ ID NO: 5129466 - DNA, 25 bp, Homo sapien
tataaattggcttagcaggaggcag

SEQ ID NO: 5129467 - DNA, 25 bp, Homo sapien
tcatagagacagtgatggcaggaca

SEQ ID NO: 5129468 - DNA, 25 bp, Homo sapien
agatgatttcacactccgccctgag

SEQ ID NO: 5129469 - DNA, 25 bp, Homo sapien
gaacgcttgatgactgaggacagca

SEQ ID NO: 5129470 - DNA, 25 bp, Homo sapien
ccctgaggacgtgagaactggaaca

SEQ ID NO: 5129471 - DNA, 25 bp, Homo sapien
cacagccgtggtgtgcacactgctg

SEQ ID NO: 5129472 - DNA, 25 bp, Homo sapien
cagcccctaggacacacaagggaag

SEQ ID NO: 5129473 - DNA, 25 bp, Homo sapien
tcttgtcctcattctgaggccatag

SEQ ID NO: 5129474 - DNA, 25 bp, Homo sapien
aggccatagaaaactggcctgcagc

SEQ ID NO: 5129475 - DNA, 25 bp, Homo sapien
tatatcactatctgatcaggaggtg

SEQ ID NO: 5129476 - DNA, 25 bp, Homo sapien
cacatgcagcacagttgttttagga

SEQ ID NO: 5129477 - DNA, 25 bp, Homo sapien
cgcggtggagcacatgcagcacagt

SEQ ID NO: 5129478 - DNA, 25 bp, Homo sapien
gcttctggggatgatcctgtcctct

SEQ ID NO: 5129479 - DNA, 25 bp, Homo sapien
tggagtgaaaaacgaccacacatgc

SEQ ID NO: 5129480 - DNA, 25 bp, Homo sapien
gaaaaacgaccacacatgccataaa

SEQ ID NO: 5129481 - DNA, 25 bp, Homo sapien
acaatggagtgaaaaacgaccacac

SEQ ID NO: 5129482 - DNA, 25 bp, Homo sapien
gagtgaaaaacgaccacacatgcca

SEQ ID NO: 5129483 - DNA, 25 bp, Homo sapien
aggcagaaattctataaataacacc

SEQ ID NO: 5129484 - DNA, 25 bp, Homo sapien
ggcagaaattctataaataacacca

SEQ ID NO: 5129485 - DNA, 25 bp, Homo sapien
gtggcaccacatgcatacaggaacg

SEQ ID NO: 5129486 - DNA, 25 bp, Homo sapien
tgtacagttaccattgaccttcctt

SEQ ID NO: 5129487 - DNA, 25 bp, Homo sapien
attcaaatttacgtgtccagccatg

SEQ ID NO: 5129488 - DNA, 25 bp, Homo sapien
catgcatacaggaacgaagggcctc

SEQ ID NO: 5129489 - DNA, 25 bp, Homo sapien
cgtgtccgagcgtccgatggtctgt

SEQ ID NO: 5129490 - DNA, 25 bp, Homo sapien
ggtcactctgtgtctggccgtctgt

SEQ ID NO: 5129491 - DNA, 25 bp, Homo sapien
tccatctggtgtgcctgtgtgtcgg

SEQ ID NO: 5129492 - DNA, 25 bp, Homo sapien
tgtcttctctgtgccggtcactctg

SEQ ID NO: 5129493 - DNA, 25 bp, Homo sapien
ccaccccgctgacccaggattctac

SEQ ID NO: 5129494 - DNA, 25 bp, Homo sapien
ggcaacgcccggggcagccatctgt

SEQ ID NO: 5129495 - DNA, 25 bp, Homo sapien
aggattctacgagctcccttgccca

SEQ ID NO: 5129496 - DNA, 25 bp, Homo sapien
cgctgacccaggattctacgagctc

SEQ ID NO: 5129497 - DNA, 25 bp, Homo sapien
tcaagcatcttcaagacacccgcgc

SEQ ID NO: 5129498 - DNA, 25 bp, Homo sapien
ttcaagacacccgcgccaagtctgg

SEQ ID NO: 5129499 - DNA, 25 bp, Homo sapien
cccaggccctcaagcatcttcaaga

SEQ ID NO: 5129500 - DNA, 25 bp, Homo sapien
aggccctcaagcatcttcaagacac

SEQ ID NO: 5129501 - DNA, 25 bp, Homo sapien
cccgatgaccccgcgactgaggcgc

SEQ ID NO: 5129502 - DNA, 25 bp, Homo sapien
gggccccgatgaccccgcgactgag

SEQ ID NO: 5129503 - DNA, 25 bp, Homo sapien
ctcggggccgacggcgagggaggtg

SEQ ID NO: 5129504 - DNA, 25 bp, Homo sapien
gatgaccccgcgactgaggcgctcg

SEQ ID NO: 5129505 - DNA, 25 bp, Homo sapien
ctggcgcgcacaccgcccctccggg

SEQ ID NO: 5129506 - DNA, 25 bp, Homo sapien
tggcgcgcacaccgcccctccgggg

SEQ ID NO: 5129507 - DNA, 25 bp, Homo sapien
ggaagcacagcaggtcgctcttgct

SEQ ID NO: 5129508 - DNA, 25 bp, Homo sapien
acacgatcagcccatactggctgct

SEQ ID NO: 5129509 - DNA, 25 bp, Homo sapien
agcatgagcgccgtcaggaagcaca

SEQ ID NO: 5129510 - DNA, 25 bp, Homo sapien
gcgtgcgtgtccttgaggcggaaga

SEQ ID NO: 5129511 - DNA, 25 bp, Homo sapien
caggagaggtttctgtaactgtggc

SEQ ID NO: 5129512 - DNA, 25 bp, Homo sapien
tggaggcggagaggaggctcccgcg

SEQ ID NO: 5129513 - DNA, 25 bp, Homo sapien
tccatcatggggtcagtagggccac

SEQ ID NO: 5129514 - DNA, 25 bp, Homo sapien
cagtagggccactgtatggctttaa

SEQ ID NO: 5129515 - DNA, 25 bp, Homo sapien
gagctccccagtggagtggagggta

SEQ ID NO: 5129516 - DNA, 25 bp, Homo sapien
ctaggaccgagagacagggatcaca

SEQ ID NO: 5129517 - DNA, 25 bp, Homo sapien
agacagggatcacagagctccccag

SEQ ID NO: 5129518 - DNA, 25 bp, Homo sapien
cagtggagtggagggtacagacatg

SEQ ID NO: 5129519 - DNA, 25 bp, Homo sapien
ttttccattggaccagaaatatcat

SEQ ID NO: 5129520 - DNA, 25 bp, Homo sapien
caagcctgcatctgattttttggca

SEQ ID NO: 5129521 - DNA, 25 bp, Homo sapien
tttggcagccacattcgcttgtttg

SEQ ID NO: 5129522 - DNA, 25 bp, Homo sapien
tcctttccaatgaaagccaagcctg

SEQ ID NO: 5129523 - DNA, 25 bp, Homo sapien
aattttaaggcatcccaggatgatg

SEQ ID NO: 5129524 - DNA, 25 bp, Homo sapien
tgatggtaatgactgcaaacaatgt

SEQ ID NO: 5129525 - DNA, 25 bp, Homo sapien
caaagtatgcactgaatgggtgaca

SEQ ID NO: 5129526 - DNA, 25 bp, Homo sapien
tgggtgacagggaaaactccttcag

SEQ ID NO: 5129527 - DNA, 25 bp, Homo sapien
tccacaggaatgagacaacatgaat

SEQ ID NO: 5129528 - DNA, 25 bp, Homo sapien
ccacaggaatgagacaacatgaata

SEQ ID NO: 5129529 - DNA, 25 bp, Homo sapien
cacaggaatgagacaacatgaataa

SEQ ID NO: 5129530 - DNA, 25 bp, Homo sapien
cagttcacagctgtgcacactgtct

SEQ ID NO: 5129531 - DNA, 25 bp, Homo sapien
agttcacagctgtgcacactgtctc

SEQ ID NO: 5129532 - DNA, 25 bp, Homo sapien
caatgttcatccagtatttaaagat

SEQ ID NO: 5129533 - DNA, 25 bp, Homo sapien
cagccttgtattccccatgctgaga

SEQ ID NO: 5129534 - DNA, 25 bp, Homo sapien
gctgagaacaatgttcatccagtat

SEQ ID NO: 5129535 - DNA, 25 bp, Homo sapien
gcagccttgtattccccatgctgag

SEQ ID NO: 5129536 - DNA, 25 bp, Homo sapien
ccaagctgccgaaatgccctccttt

SEQ ID NO: 5129537 - DNA, 25 bp, Homo sapien
cccaagctgccgaaatgccctcctt

SEQ ID NO: 5129538 - DNA, 25 bp, Homo sapien
tcaccttgcaagtaagacccatgag

SEQ ID NO: 5129539 - DNA, 25 bp, Homo sapien
tacaagccctacaccaaacagggat

SEQ ID NO: 5129540 - DNA, 25 bp, Homo sapien
tgaccagagtgcaagcttacaagcc

SEQ ID NO: 5129541 - DNA, 25 bp, Homo sapien
taatctctacaacgagcccatgaag

SEQ ID NO: 5129542 - DNA, 25 bp, Homo sapien
tccttctcagccatgattctggcta

SEQ ID NO: 5129543 - DNA, 25 bp, Homo sapien
gagcctcaggcaccatagggtgaga

SEQ ID NO: 5129544 - DNA, 25 bp, Homo sapien
caccatagggtgagacagacatgtg

SEQ ID NO: 5129545 - DNA, 25 bp, Homo sapien
tgcacacaaatacacggctccttct

SEQ ID NO: 5129546 - DNA, 25 bp, Homo sapien
ggtgctttgactcattgaggacgcc

SEQ ID NO: 5129547 - DNA, 25 bp, Homo sapien
gctcattgagttggtgctttgactc

SEQ ID NO: 5129548 - DNA, 25 bp, Homo sapien
ttccttgtgctcattgagttggtgc

SEQ ID NO: 5129549 - DNA, 25 bp, Homo sapien
gagttggtgctttgactcattgagg

SEQ ID NO: 5129550 - DNA, 25 bp, Homo sapien
ggtagaggtagtagttatagtagat

SEQ ID NO: 5129551 - DNA, 25 bp, Homo sapien
gtagtagttatagtagatcccgtgg

SEQ ID NO: 5129552 - DNA, 25 bp, Homo sapien
tgcccaccgtgaccccatcaggctt

SEQ ID NO: 5129553 - DNA, 25 bp, Homo sapien
tgggagatggtggtgcagagagttg

SEQ ID NO: 5129554 - DNA, 25 bp, Homo sapien
aatatgaatcaggtacaccacccac

SEQ ID NO: 5129555 - DNA, 25 bp, Homo sapien
tccatgatcaccacgatggagtagg

SEQ ID NO: 5129556 - DNA, 25 bp, Homo sapien
tgatcaccacgatggagtagggcag

SEQ ID NO: 5129557 - DNA, 25 bp, Homo sapien
gtggtcctcggcacaaaggatggcc

SEQ ID NO: 5129558 - DNA, 25 bp, Homo sapien
tcctcggcacaaaggatggccaaga

SEQ ID NO: 5129559 - DNA, 25 bp, Homo sapien
acaactttctctcaggcacacattt

SEQ ID NO: 5129560 - DNA, 25 bp, Homo sapien
agggagccacgtctccggccacaac

SEQ ID NO: 5129561 - DNA, 25 bp, Homo sapien
cgtctccggccacaactccactctt

SEQ ID NO: 5129562 - DNA, 25 bp, Homo sapien
caactttctctcaggcacacatttc

SEQ ID NO: 5129563 - DNA, 25 bp, Homo sapien
agaaggctgcaatattcctcaggac

SEQ ID NO: 5129564 - DNA, 25 bp, Homo sapien
aagaaggctgcaatattcctcagga

SEQ ID NO: 5129565 - DNA, 25 bp, Homo sapien
aagaataagaataacttggtgcaga

SEQ ID NO: 5129566 - DNA, 25 bp, Homo sapien
aaagaataagaataacttggtgcag

SEQ ID NO: 5129567 - DNA, 25 bp, Homo sapien
ataagaataacttggtgcagattac

SEQ ID NO: 5129568 - DNA, 25 bp, Homo sapien
gaataagaataacttggtgcagatt

SEQ ID NO: 5129569 - DNA, 25 bp, Homo sapien
actggctcccgatgctggagaagac

SEQ ID NO: 5129570 - DNA, 25 bp, Homo sapien
ctggactggctcccgatgctggaga

SEQ ID NO: 5129571 - DNA, 25 bp, Homo sapien
tggactggctcccgatgctggagaa

SEQ ID NO: 5129572 - DNA, 25 bp, Homo sapien
gactggctcccgatgctggagaaga

SEQ ID NO: 5129573 - DNA, 25 bp, Homo sapien
ttttgccagatgagaataacctgga

SEQ ID NO: 5129574 - DNA, 25 bp, Homo sapien
tgtgaacgtactttactccactata

SEQ ID NO: 5129575 - DNA, 25 bp, Homo sapien
tcctagagactgaaagaacggtggt

SEQ ID NO: 5129576 - DNA, 25 bp, Homo sapien
cctttgcgagttgcaacctggagac

SEQ ID NO: 5129577 - DNA, 25 bp, Homo sapien
tgacaccatgcagtttccaagccca

SEQ ID NO: 5129578 - DNA, 25 bp, Homo sapien
caaggcatcagaccacgaagcttct

SEQ ID NO: 5129579 - DNA, 25 bp, Homo sapien
cagttcagtcttttggagggtcagc

SEQ ID NO: 5129580 - DNA, 25 bp, Homo sapien
ctgtggatgccccagtcaagagtcc

SEQ ID NO: 5129581 - DNA, 25 bp, Homo sapien
caggttgaccacaattatccagggt

SEQ ID NO: 5129582 - DNA, 25 bp, Homo sapien
gaaaatagaaaaaggcatggccagg

SEQ ID NO: 5129583 - DNA, 25 bp, Homo sapien
cacaattatccagggttcaaagcca

SEQ ID NO: 5129584 - DNA, 25 bp, Homo sapien
tgtcatactcaggtcgacagccaaa

SEQ ID NO: 5129585 - DNA, 25 bp, Homo sapien
aatggggaaacctgtattcttgctc

SEQ ID NO: 5129586 - DNA, 25 bp, Homo sapien
cttggaagagcccaaaacccacagc

SEQ ID NO: 5129587 - DNA, 25 bp, Homo sapien
tagaacaggggtaaaggtaatgcca

SEQ ID NO: 5129588 - DNA, 25 bp, Homo sapien
cacagctgaggcctcagggcttttc

SEQ ID NO: 5129589 - DNA, 25 bp, Homo sapien
tcattcccagcattatgatagctcc

SEQ ID NO: 5129590 - DNA, 25 bp, Homo sapien
ccacagcctggatccatcattccca

SEQ ID NO: 5129591 - DNA, 25 bp, Homo sapien
tgcaggcttttccaagctctgatgc

SEQ ID NO: 5129592 - DNA, 25 bp, Homo sapien
ctttcttggaaacgctgagcctggc

SEQ ID NO: 5129593 - DNA, 25 bp, Homo sapien
tgaaatagccatccctgaggctgcc

SEQ ID NO: 5129594 - DNA, 25 bp, Homo sapien
taaattttccttgccacctacgctg

SEQ ID NO: 5129595 - DNA, 25 bp, Homo sapien
cctacgctggttgagtcaggatgct

SEQ ID NO: 5129596 - DNA, 25 bp, Homo sapien
aatccctgagaccttaacacttgtg

SEQ ID NO: 5129597 - DNA, 25 bp, Homo sapien
tatctgcactcctaattgacaggca

SEQ ID NO: 5129598 - DNA, 25 bp, Homo sapien
ccatcatggaaattgtccctagtgt

SEQ ID NO: 5129599 - DNA, 25 bp, Homo sapien
ccccagcaatatcagggattgtttt

SEQ ID NO: 5129600 - DNA, 25 bp, Homo sapien
tgcttgttcctagacatcatataaa

SEQ ID NO: 5129601 - DNA, 25 bp, Homo sapien
cactctgcctcgacaagaatcatgg

SEQ ID NO: 5129602 - DNA, 25 bp, Homo sapien
gagcctgttgtcaccctggatatct

SEQ ID NO: 5129603 - DNA, 25 bp, Homo sapien
ttcacaagggtcctaccgtcatgac

SEQ ID NO: 5129604 - DNA, 25 bp, Homo sapien
gaacccaagctaccaaatgcacagg

SEQ ID NO: 5129605 - DNA, 25 bp, Homo sapien
cgtgaaactggaaggtagtagcaag

SEQ ID NO: 5129606 - DNA, 25 bp, Homo sapien
agacaggcatagagagacatggatg

SEQ ID NO: 5129607 - DNA, 25 bp, Homo sapien
agtagcaagcattttccagttggat

SEQ ID NO: 5129608 - DNA, 25 bp, Homo sapien
tagcaagcattttccagttggatct

SEQ ID NO: 5129609 - DNA, 25 bp, Homo sapien
taggcttgtcaggtcacatatgatc

SEQ ID NO: 5129610 - DNA, 25 bp, Homo sapien
ttttaggcttgtcaggtcacatatg

SEQ ID NO: 5129611 - DNA, 25 bp, Homo sapien
ggcttgtcaggtcacatatgatctc

SEQ ID NO: 5129612 - DNA, 25 bp, Homo sapien
tgtcaggtcacatatgatctctgca

SEQ ID NO: 5129613 - DNA, 25 bp, Homo sapien
tctcagaagcacattcaggccagga

SEQ ID NO: 5129614 - DNA, 25 bp, Homo sapien
gtggctccagggtcacacgaaggct

SEQ ID NO: 5129615 - DNA, 25 bp, Homo sapien
gaaggctcagcaaagtcctcgaggc

SEQ ID NO: 5129616 - DNA, 25 bp, Homo sapien
tagaccagaggtcagtaagcatttc

SEQ ID NO: 5129617 - DNA, 25 bp, Homo sapien
tgccaggacccttggtagaagccct

SEQ ID NO: 5129618 - DNA, 25 bp, Homo sapien
tgatgacattgcgtatccacacaga

SEQ ID NO: 5129619 - DNA, 25 bp, Homo sapien
gaatgggtgccatacctagagctgt

SEQ ID NO: 5129620 - DNA, 25 bp, Homo sapien
tagagctgtacaggcatccacctca

SEQ ID NO: 5129621 - DNA, 25 bp, Homo sapien
agcagcagacaatcatgatgcaaac

SEQ ID NO: 5129622 - DNA, 25 bp, Homo sapien
aaagcagcagacaatcatgatgcaa

SEQ ID NO: 5129623 - DNA, 25 bp, Homo sapien
aaaagcagcagacaatcatgatgca

SEQ ID NO: 5129624 - DNA, 25 bp, Homo sapien
tgtcactttgcttttgtcggtaaat

SEQ ID NO: 5129625 - DNA, 25 bp, Homo sapien
tatattgacctggacaattctgcca

SEQ ID NO: 5129626 - DNA, 25 bp, Homo sapien
aagtgttaacttgctgactcgtaag

SEQ ID NO: 5129627 - DNA, 25 bp, Homo sapien
gaagaaagcctgtaatctgtttcag

SEQ ID NO: 5129628 - DNA, 25 bp, Homo sapien
tcttccccagcttgagtctgggtcc

SEQ ID NO: 5129629 - DNA, 25 bp, Homo sapien
aacgtggtgaaactcggtctatact

SEQ ID NO: 5129630 - DNA, 25 bp, Homo sapien
tcacttgaaccagcaagttggaagt

SEQ ID NO: 5129631 - DNA, 25 bp, Homo sapien
acttgaaccagcaagttggaagttg

SEQ ID NO: 5129632 - DNA, 25 bp, Homo sapien
aatcacttgaaccagcaagttggaa

SEQ ID NO: 5129633 - DNA, 25 bp, Homo sapien
caagtactaatcaggtctgaccctt

SEQ ID NO: 5129634 - DNA, 25 bp, Homo sapien
tgttcagggtatatggctgtagcct

SEQ ID NO: 5129635 - DNA, 25 bp, Homo sapien
agtactaatcaggtctgaccctttt

SEQ ID NO: 5129636 - DNA, 25 bp, Homo sapien
actaatcaggtctgaccctttttag

SEQ ID NO: 5129637 - DNA, 25 bp, Homo sapien
gagcgtgtggcacccgcgtactcgc

SEQ ID NO: 5129638 - DNA, 25 bp, Homo sapien
taggcggccctggaagtcaaagatc

SEQ ID NO: 5129639 - DNA, 25 bp, Homo sapien
aaggcgaggagcgtgtggcacccgc

SEQ ID NO: 5129640 - DNA, 25 bp, Homo sapien
gcgctgccaccagttgcaggcagca

SEQ ID NO: 5129641 - DNA, 25 bp, Homo sapien
ctggtcctgaccaagatcgcggctg

SEQ ID NO: 5129642 - DNA, 25 bp, Homo sapien
tgccgaggtcagtccagcgccaagg

SEQ ID NO: 5129643 - DNA, 25 bp, Homo sapien
aagtcccaaagtctgctgctccgcc

SEQ ID NO: 5129644 - DNA, 25 bp, Homo sapien
gcagggctacccgaagcgcatagag

SEQ ID NO: 5129645 - DNA, 25 bp, Homo sapien
tctccaaggtcacttctgcctgcct

SEQ ID NO: 5129646 - DNA, 25 bp, Homo sapien
tggctcagatactgttctccaaggt

SEQ ID NO: 5129647 - DNA, 25 bp, Homo sapien
tgttctccaaggtcacttctgcctg

SEQ ID NO: 5129648 - DNA, 25 bp, Homo sapien
ccttctggctcagatactgttctcc

SEQ ID NO: 5129649 - DNA, 25 bp, Homo sapien
tacgagggagagaaacacacgcaac

SEQ ID NO: 5129650 - DNA, 25 bp, Homo sapien
acgagggagagaaacacacgcaaca

SEQ ID NO: 5129651 - DNA, 25 bp, Homo sapien
ctacgagggagagaaacacacgcaa

SEQ ID NO: 5129652 - DNA, 25 bp, Homo sapien
cgagggagagaaacacacgcaacat

SEQ ID NO: 5129653 - DNA, 25 bp, Homo sapien
tacaagggtccttcctgaacggtga

SEQ ID NO: 5129654 - DNA, 25 bp, Homo sapien
tcccgggcctgaagatctgtgatgt

SEQ ID NO: 5129655 - DNA, 25 bp, Homo sapien
tgaacggtgacctgccgctgtgctg

SEQ ID NO: 5129656 - DNA, 25 bp, Homo sapien
accagatagtgatgtgggagccctc

SEQ ID NO: 5129657 - DNA, 25 bp, Homo sapien
gacgctggcgacgtgaagacagctt

SEQ ID NO: 5129658 - DNA, 25 bp, Homo sapien
ccagacgctggcgacgtgaagacag

SEQ ID NO: 5129659 - DNA, 25 bp, Homo sapien
tcaggccagacgctggcgacgtgaa

SEQ ID NO: 5129660 - DNA, 25 bp, Homo sapien
cgctggcgacgtgaagacagcttct

SEQ ID NO: 5129661 - DNA, 25 bp, Homo sapien
cagcattaaggagcaacaagggaga

SEQ ID NO: 5129662 - DNA, 25 bp, Homo sapien
cttcagcattaaggagcaacaaggg

SEQ ID NO: 5129663 - DNA, 25 bp, Homo sapien
gtttccttcagcattaaggagcaac

SEQ ID NO: 5129664 - DNA, 25 bp, Homo sapien
tccttcagcattaaggagcaacaag

SEQ ID NO: 5129665 - DNA, 25 bp, Homo sapien
gtggtctgcagggagtctgggatca

SEQ ID NO: 5129666 - DNA, 25 bp, Homo sapien
agtggtctgcagggagtctgggatc

SEQ ID NO: 5129667 - DNA, 25 bp, Homo sapien
cagtggtctgcagggagtctgggat

SEQ ID NO: 5129668 - DNA, 25 bp, Homo sapien
aaatctcggctcagggagatgacct

SEQ ID NO: 5129669 - DNA, 25 bp, Homo sapien
agcatgaaatctcggctcagggaga

SEQ ID NO: 5129670 - DNA, 25 bp, Homo sapien
agtgaagcatgaaatctcggctcag

SEQ ID NO: 5129671 - DNA, 25 bp, Homo sapien
gaagcatgaaatctcggctcaggga

SEQ ID NO: 5129672 - DNA, 25 bp, Homo sapien
gaggcagaaggtggtcctccccagc

SEQ ID NO: 5129673 - DNA, 25 bp, Homo sapien
aagatggtgaggcagaaggtggtcc

SEQ ID NO: 5129674 - DNA, 25 bp, Homo sapien
tggtgaggcagaaggtggtcctccc

SEQ ID NO: 5129675 - DNA, 25 bp, Homo sapien
gtgaggcagaaggtggtcctcccca

SEQ ID NO: 5129676 - DNA, 25 bp, Homo sapien
gctccctcggaacgctttcgggtca

SEQ ID NO: 5129677 - DNA, 25 bp, Homo sapien
gaacgctttcgggtcatagcatacc

SEQ ID NO: 5129678 - DNA, 25 bp, Homo sapien
gctttcgggtcatagcataccacga

SEQ ID NO: 5129679 - DNA, 25 bp, Homo sapien
atagcataccacgacccatccggat

SEQ ID NO: 5129680 - DNA, 25 bp, Homo sapien
tatttcccacaaagccacactcact

SEQ ID NO: 5129681 - DNA, 25 bp, Homo sapien
ttatttcccacaaagccacactcac

SEQ ID NO: 5129682 - DNA, 25 bp, Homo sapien
gcttatttcccacaaagccacactc

SEQ ID NO: 5129683 - DNA, 25 bp, Homo sapien
cagcttatttcccacaaagccacac

SEQ ID NO: 5129684 - DNA, 25 bp, Homo sapien
gactggctacatgtttactgaaata

SEQ ID NO: 5129685 - DNA, 25 bp, Homo sapien
gtggagactggctacatgtttactg

SEQ ID NO: 5129686 - DNA, 25 bp, Homo sapien
ggagactggctacatgtttactgaa

SEQ ID NO: 5129687 - DNA, 25 bp, Homo sapien
gggtagagttggagatgcaactgct

SEQ ID NO: 5129688 - DNA, 25 bp, Homo sapien
gaacaattaagaaaagagacacatc

SEQ ID NO: 5129689 - DNA, 25 bp, Homo sapien
ctgagagaacaattaagaaaagaga

SEQ ID NO: 5129690 - DNA, 25 bp, Homo sapien
tgagagaacaattaagaaaagagac

SEQ ID NO: 5129691 - DNA, 25 bp, Homo sapien
gagaacaattaagaaaagagacaca

SEQ ID NO: 5129692 - DNA, 25 bp, Homo sapien
cagtcacccggcagttgtatttccc

SEQ ID NO: 5129693 - DNA, 25 bp, Homo sapien
ccaggagacagcaaagtaacggtcg

SEQ ID NO: 5129694 - DNA, 25 bp, Homo sapien
ggcttcccggtgagcaaattcgctg

SEQ ID NO: 5129695 - DNA, 25 bp, Homo sapien
cgatgagcgagctgttgaaggccca

SEQ ID NO: 5129696 - DNA, 25 bp, Homo sapien
tgtttgtcagatacccagtgtcctc

SEQ ID NO: 5129697 - DNA, 25 bp, Homo sapien
tgctgtcgaggccttgtgtttgtca

SEQ ID NO: 5129698 - DNA, 25 bp, Homo sapien
tccagacctgctgtcgaggccttgt

SEQ ID NO: 5129699 - DNA, 25 bp, Homo sapien
cttgtgtttgtcagatacccagtgt

SEQ ID NO: 5129700 - DNA, 25 bp, Homo sapien
cctgctggggcagggtttcctgaaa

SEQ ID NO: 5129701 - DNA, 25 bp, Homo sapien
gccctgctggggcagggtttcctga

SEQ ID NO: 5129702 - DNA, 25 bp, Homo sapien
tgctggggcagggtttcctgaaact

SEQ ID NO: 5129703 - DNA, 25 bp, Homo sapien
ctgccctgctggggcagggtttcct

SEQ ID NO: 5129704 - DNA, 25 bp, Homo sapien
aagcacgggccgggcatagatttcc

SEQ ID NO: 5129705 - DNA, 25 bp, Homo sapien
cacgggccgggcatagatttcctct

SEQ ID NO: 5129706 - DNA, 25 bp, Homo sapien
gggccccaagcacgggccgggcata

SEQ ID NO: 5129707 - DNA, 25 bp, Homo sapien
cccaagcacgggccgggcatagatt

SEQ ID NO: 5129708 - DNA, 25 bp, Homo sapien
gaatcacaaacttacggatttctac

SEQ ID NO: 5129709 - DNA, 25 bp, Homo sapien
tcggtctcttaggaggaaaagcgcc

SEQ ID NO: 5129710 - DNA, 25 bp, Homo sapien
ttcggtctcttaggaggaaaagcgc

SEQ ID NO: 5129711 - DNA, 25 bp, Homo sapien
ccagtcagccctggggctcctttgt

SEQ ID NO: 5129712 - DNA, 25 bp, Homo sapien
agccctggggctcctttgttctctt

SEQ ID NO: 5129713 - DNA, 25 bp, Homo sapien
gtccagtcagccctggggctccttt

SEQ ID NO: 5129714 - DNA, 25 bp, Homo sapien
tcagccctggggctcctttgttctc

SEQ ID NO: 5129715 - DNA, 25 bp, Homo sapien
ccagcagctcgtcatccaccactct

SEQ ID NO: 5129716 - DNA, 25 bp, Homo sapien
aacaaagccagcagctcgtcatcca

SEQ ID NO: 5129717 - DNA, 25 bp, Homo sapien
aaagccagcagctcgtcatccacca

SEQ ID NO: 5129718 - DNA, 25 bp, Homo sapien
ataaaacaaagccagcagctcgtca

SEQ ID NO: 5129719 - DNA, 25 bp, Homo sapien
cattcagtcacatggcattcatact

SEQ ID NO: 5129720 - DNA, 25 bp, Homo sapien
aagctgctgcgctcccagtaggacg

SEQ ID NO: 5129721 - DNA, 25 bp, Homo sapien
ccatcccggtctagccacatgatat

SEQ ID NO: 5129722 - DNA, 25 bp, Homo sapien
gacgagcctggctgcacggtgccat

SEQ ID NO: 5129723 - DNA, 25 bp, Homo sapien
agactggccatagtttcctgctaga

SEQ ID NO: 5129724 - DNA, 25 bp, Homo sapien
gaactctgacagacaaaagtcagga

SEQ ID NO: 5129725 - DNA, 25 bp, Homo sapien
gacactgaagctgtctccatgccag

SEQ ID NO: 5129726 - DNA, 25 bp, Homo sapien
taaaagactggccatagtttcctgc

SEQ ID NO: 5129727 - DNA, 25 bp, Homo sapien
ggtgttgcatgagggtggtgtagga

SEQ ID NO: 5129728 - DNA, 25 bp, Homo sapien
tgttgcatgagggtggtgtaggaca

SEQ ID NO: 5129729 - DNA, 25 bp, Homo sapien
taggtgttgcatgagggtggtgtag

SEQ ID NO: 5129730 - DNA, 25 bp, Homo sapien
aggtgttgcatgagggtggtgtagg

SEQ ID NO: 5129731 - DNA, 25 bp, Homo sapien
ccccggtgtccgggagatggctgtg

SEQ ID NO: 5129732 - DNA, 25 bp, Homo sapien
cccggtgtccgggagatggctgtga

SEQ ID NO: 5129733 - DNA, 25 bp, Homo sapien
ccggtgtccgggagatggctgtgac

SEQ ID NO: 5129734 - DNA, 25 bp, Homo sapien
cggtgtccgggagatggctgtgact

SEQ ID NO: 5129735 - DNA, 25 bp, Homo sapien
gggtttgatgatacactgcaagtca

SEQ ID NO: 5129736 - DNA, 25 bp, Homo sapien
gtagtggggtttgatgatacactgc

SEQ ID NO: 5129737 - DNA, 25 bp, Homo sapien
tggggtttgatgatacactgcaagt

SEQ ID NO: 5129738 - DNA, 25 bp, Homo sapien
cagggtagtggggtttgatgataca

SEQ ID NO: 5129739 - DNA, 25 bp, Homo sapien
caggttggaggtcctctccgccagt

SEQ ID NO: 5129740 - DNA, 25 bp, Homo sapien
gacgttgttgctggactcagccttc

SEQ ID NO: 5129741 - DNA, 25 bp, Homo sapien
tggcagttcgggttcggaagctgga

SEQ ID NO: 5129742 - DNA, 25 bp, Homo sapien
gaaggtcaccaagtcatggaactcc

SEQ ID NO: 5129743 - DNA, 25 bp, Homo sapien
aaatccctttggcaaggcgttccag

SEQ ID NO: 5129744 - DNA, 25 bp, Homo sapien
ttggcaaggcgttccagccatcttt

SEQ ID NO: 5129745 - DNA, 25 bp, Homo sapien
aggtgtctgttctagccgaggcatg

SEQ ID NO: 5129746 - DNA, 25 bp, Homo sapien
tgcaaagtcaaacccttgcccttgc

SEQ ID NO: 5129747 - DNA, 25 bp, Homo sapien
taggctctcgttggccaagggaaca

SEQ ID NO: 5129748 - DNA, 25 bp, Homo sapien
ctcatcatttatacaactcacttgt

SEQ ID NO: 5129749 - DNA, 25 bp, Homo sapien
caaagtttaggctctcgttggccaa

SEQ ID NO: 5129750 - DNA, 25 bp, Homo sapien
tcagtcaaagtttaggctctcgttg

SEQ ID NO: 5129751 - DNA, 25 bp, Homo sapien
gctctcctcttagggctcttgcact

SEQ ID NO: 5129752 - DNA, 25 bp, Homo sapien
ttgatgccaataacaagtgccccgg

SEQ ID NO: 5129753 - DNA, 25 bp, Homo sapien
aagtgccccggtgttaccatgacaa

SEQ ID NO: 5129754 - DNA, 25 bp, Homo sapien
acaagtgccccggtgttaccatgac

SEQ ID NO: 5129755 - DNA, 25 bp, Homo sapien
tgccaataacaagtgccccggtgtt

SEQ ID NO: 5129756 - DNA, 25 bp, Homo sapien
gagaaatcctgtgtgccacggcccc

SEQ ID NO: 5129757 - DNA, 25 bp, Homo sapien
gagagaaatcctgtgtgccacggcc

SEQ ID NO: 5129758 - DNA, 25 bp, Homo sapien
agagaaatcctgtgtgccacggccc

SEQ ID NO: 5129759 - DNA, 25 bp, Homo sapien
aaagccacagactgccacttggtct

SEQ ID NO: 5129760 - DNA, 25 bp, Homo sapien
gaaagccacagactgccacttggtc

SEQ ID NO: 5129761 - DNA, 25 bp, Homo sapien
caagggttgattgagtcccatgcat

SEQ ID NO: 5129762 - DNA, 25 bp, Homo sapien
gccagctggcttaagcttggtttgg

SEQ ID NO: 5129763 - DNA, 25 bp, Homo sapien
gcttaagcttggtttggcagcatca

SEQ ID NO: 5129764 - DNA, 25 bp, Homo sapien
cagcatcaagggttgattgagtccc

SEQ ID NO: 5129765 - DNA, 25 bp, Homo sapien
cttcacacttagtttttccgccaca

SEQ ID NO: 5129766 - DNA, 25 bp, Homo sapien
tcacacttagtttttccgccacagg

SEQ ID NO: 5129767 - DNA, 25 bp, Homo sapien
cacacttagtttttccgccacaggg

SEQ ID NO: 5129768 - DNA, 25 bp, Homo sapien
ttcacacttagtttttccgccacag

SEQ ID NO: 5129769 - DNA, 25 bp, Homo sapien
agaaacgtggcccatccacctcgag

SEQ ID NO: 5129770 - DNA, 25 bp, Homo sapien
gaaacgtggcccatccacctcgagg

SEQ ID NO: 5129771 - DNA, 25 bp, Homo sapien
ctgagttagttttcctccagcacag

SEQ ID NO: 5129772 - DNA, 25 bp, Homo sapien
ccagaaacgtggcccatccacctcg

SEQ ID NO: 5129773 - DNA, 25 bp, Homo sapien
ttgccgttggcatctgagggcttgt

SEQ ID NO: 5129774 - DNA, 25 bp, Homo sapien
gataagcttgccgttggcatctgag

SEQ ID NO: 5129775 - DNA, 25 bp, Homo sapien
taagcttgccgttggcatctgaggg

SEQ ID NO: 5129776 - DNA, 25 bp, Homo sapien
caggataagcttgccgttggcatct

SEQ ID NO: 5129777 - DNA, 25 bp, Homo sapien
cacgtggcagtagtagctgccgctg

SEQ ID NO: 5129778 - DNA, 25 bp, Homo sapien
tccacgtggcagtagtagctgccgc

SEQ ID NO: 5129779 - DNA, 25 bp, Homo sapien
tggcagtagtagctgccgctgtcgc

SEQ ID NO: 5129780 - DNA, 25 bp, Homo sapien
tactccacgtggcagtagtagctgc

SEQ ID NO: 5129781 - DNA, 25 bp, Homo sapien
tgtaccaggcatagttggggctcag

SEQ ID NO: 5129782 - DNA, 25 bp, Homo sapien
cttgtaccaggcatagttggggctc

SEQ ID NO: 5129783 - DNA, 25 bp, Homo sapien
taccaggcatagttggggctcagca

SEQ ID NO: 5129784 - DNA, 25 bp, Homo sapien
ccaggcatagttggggctcagcagc

SEQ ID NO: 5129785 - DNA, 25 bp, Homo sapien
cacagtgacttctgtgcgcccagaa

SEQ ID NO: 5129786 - DNA, 25 bp, Homo sapien
acagtgacttctgtgcgcccagaaa

SEQ ID NO: 5129787 - DNA, 25 bp, Homo sapien
agtgacttctgtgcgcccagaaacc

SEQ ID NO: 5129788 - DNA, 25 bp, Homo sapien
cagtgacttctgtgcgcccagaaac

SEQ ID NO: 5129789 - DNA, 25 bp, Homo sapien
gcagcacaccaaaaccaagctaaga

SEQ ID NO: 5129790 - DNA, 25 bp, Homo sapien
atgctgagtgtgtcacattctgtcc

SEQ ID NO: 5129791 - DNA, 25 bp, Homo sapien
attctgtcccagtcagccctctacc

SEQ ID NO: 5129792 - DNA, 25 bp, Homo sapien
tctaccccctgaatgcagagagggc

SEQ ID NO: 5129793 - DNA, 25 bp, Homo sapien
gtgtcacattctgtcccagtcagcc

SEQ ID NO: 5129794 - DNA, 25 bp, Homo sapien
ccagcccaggggactttggacagtg

SEQ ID NO: 5129795 - DNA, 25 bp, Homo sapien
gcccaggggactttggacagtgctg

SEQ ID NO: 5129796 - DNA, 25 bp, Homo sapien
aggaacagctgcggacccagcccag

SEQ ID NO: 5129797 - DNA, 25 bp, Homo sapien
ggaacagctgcggacccagcccagg

SEQ ID NO: 5129798 - DNA, 25 bp, Homo sapien
gccacctggtaactgccccaagtta

SEQ ID NO: 5129799 - DNA, 25 bp, Homo sapien
tggtaactgccccaagttactgcat

SEQ ID NO: 5129800 - DNA, 25 bp, Homo sapien
taactgccccaagttactgcatgtt

SEQ ID NO: 5129801 - DNA, 25 bp, Homo sapien
ttggccacctggtaactgccccaag

SEQ ID NO: 5129802 - DNA, 25 bp, Homo sapien
tggatggcagatgctatgagctggg

SEQ ID NO: 5129803 - DNA, 25 bp, Homo sapien
gttcagaacatctgaacgcacagcc

SEQ ID NO: 5129804 - DNA, 25 bp, Homo sapien
gactcagttccctctaaagggcact

SEQ ID NO: 5129805 - DNA, 25 bp, Homo sapien
catgactaaagttcacgcagccctg

SEQ ID NO: 5129806 - DNA, 25 bp, Homo sapien
gtggacagtgggaggcatccgcaca

SEQ ID NO: 5129807 - DNA, 25 bp, Homo sapien
ctagtccaagagaccagccaggggg

SEQ ID NO: 5129808 - DNA, 25 bp, Homo sapien
tccaagagaccagccagggggtgcc

SEQ ID NO: 5129809 - DNA, 25 bp, Homo sapien
aggcatccgcacagggtgcaggaca

SEQ ID NO: 5129810 - DNA, 25 bp, Homo sapien
agcacctcttcctcagaagacagtt

SEQ ID NO: 5129811 - DNA, 25 bp, Homo sapien
gagcacctcttcctcagaagacagt

SEQ ID NO: 5129812 - DNA, 25 bp, Homo sapien
aggcaaagaggctgtcagtaacaca

SEQ ID NO: 5129813 - DNA, 25 bp, Homo sapien
ctctggaggcaaagaggctgtcagt

SEQ ID NO: 5129814 - DNA, 25 bp, Homo sapien
attctctcagcatgtctcccaggca

SEQ ID NO: 5129815 - DNA, 25 bp, Homo sapien
gaattctctcagcatgtctcccagg

SEQ ID NO: 5129816 - DNA, 25 bp, Homo sapien
cagcagacgggggccccaagccttg

SEQ ID NO: 5129817 - DNA, 25 bp, Homo sapien
gcagcagacgggggccccaagcctt

SEQ ID NO: 5129818 - DNA, 25 bp, Homo sapien
agcagacgggggccccaagccttgc

SEQ ID NO: 5129819 - DNA, 25 bp, Homo sapien
ccacagattcactgccacggggcca

SEQ ID NO: 5129820 - DNA, 25 bp, Homo sapien
cagattcactgccacggggccagga

SEQ ID NO: 5129821 - DNA, 25 bp, Homo sapien
aatcagagcaccccacagattcact

SEQ ID NO: 5129822 - DNA, 25 bp, Homo sapien
ggggtttagcttccatagtgcccac

SEQ ID NO: 5129823 - DNA, 25 bp, Homo sapien
tgcttatcttcagagcccatcctgg

SEQ ID NO: 5129824 - DNA, 25 bp, Homo sapien
gcactgtccaggagtcctctgaagg

SEQ ID NO: 5129825 - DNA, 25 bp, Homo sapien
ctctgccagaagctctgggcctcat

SEQ ID NO: 5129826 - DNA, 25 bp, Homo sapien
cagcagggcacagtctaaagttggg

SEQ ID NO: 5129827 - DNA, 25 bp, Homo sapien
cagtcagagacagaggccgacaatg

SEQ ID NO: 5129828 - DNA, 25 bp, Homo sapien
ggcagtcagagacagaggccgacaa

SEQ ID NO: 5129829 - DNA, 25 bp, Homo sapien
gtcagagacagaggccgacaatgac

SEQ ID NO: 5129830 - DNA, 25 bp, Homo sapien
ctgagggcagtcagagacagaggcc

SEQ ID NO: 5129831 - DNA, 25 bp, Homo sapien
tgtacacatggttgtcaggttcctt

SEQ ID NO: 5129832 - DNA, 25 bp, Homo sapien
ctggtgtacacatggttgtcaggtt

SEQ ID NO: 5129833 - DNA, 25 bp, Homo sapien
tacacatggttgtcaggttccttgg

SEQ ID NO: 5129834 - DNA, 25 bp, Homo sapien
acatggttgtcaggttccttggagg

SEQ ID NO: 5129835 - DNA, 25 bp, Homo sapien
aaaggtacaactatggcctctgccc

SEQ ID NO: 5129836 - DNA, 25 bp, Homo sapien
tctcctgctcttgcgagagatgatg

SEQ ID NO: 5129837 - DNA, 25 bp, Homo sapien
aaggtacaactatggcctctgcccc

SEQ ID NO: 5129838 - DNA, 25 bp, Homo sapien
ccagctcatagcctcggatctcccc

SEQ ID NO: 5129839 - DNA, 25 bp, Homo sapien
ctcatagcctcggatctccccaggc

SEQ ID NO: 5129840 - DNA, 25 bp, Homo sapien
catagcctcggatctccccaggcac

SEQ ID NO: 5129841 - DNA, 25 bp, Homo sapien
agctcatagcctcggatctccccag

SEQ ID NO: 5129842 - DNA, 25 bp, Homo sapien
tgctgctacggcctgcaaggtcctt

SEQ ID NO: 5129843 - DNA, 25 bp, Homo sapien
cattatcagcgcagggtcctgaagg

SEQ ID NO: 5129844 - DNA, 25 bp, Homo sapien
ccatgctcagaatgtgtccccacat

SEQ ID NO: 5129845 - DNA, 25 bp, Homo sapien
gtcccttgccactcaggacacatgg

SEQ ID NO: 5129846 - DNA, 25 bp, Homo sapien
gtctcataggtgtcagccagccgca

SEQ ID NO: 5129847 - DNA, 25 bp, Homo sapien
gccagccgcagcaggatcagtctct

SEQ ID NO: 5129848 - DNA, 25 bp, Homo sapien
gccgcagcaggatcagtctctcccc

SEQ ID NO: 5129849 - DNA, 25 bp, Homo sapien
accctcaatggccagcgtctcatag

SEQ ID NO: 5129850 - DNA, 25 bp, Homo sapien
agctgtggacccacatggccagtca

SEQ ID NO: 5129851 - DNA, 25 bp, Homo sapien
gtttccactgcagagttcctcaccc

SEQ ID NO: 5129852 - DNA, 25 bp, Homo sapien
ggagctgtggacccacatggccagt

SEQ ID NO: 5129853 - DNA, 25 bp, Homo sapien
tccactgcagagttcctcacccagg

SEQ ID NO: 5129854 - DNA, 25 bp, Homo sapien
taaaggttgacacgctaatcaccct

SEQ ID NO: 5129855 - DNA, 25 bp, Homo sapien
cctaacgaagttatctgcagcccag

SEQ ID NO: 5129856 - DNA, 25 bp, Homo sapien
tattctagcgcttccctagccctgg

SEQ ID NO: 5129857 - DNA, 25 bp, Homo sapien
tacctgaagaaagccacagccaagc

SEQ ID NO: 5129858 - DNA, 25 bp, Homo sapien
cttccaacactctattgagtatgag

SEQ ID NO: 5129859 - DNA, 25 bp, Homo sapien
ccttggagatgtccgtcatgtccct

SEQ ID NO: 5129860 - DNA, 25 bp, Homo sapien
gagatgtccgtcatgtcccttgtaa

SEQ ID NO: 5129861 - DNA, 25 bp, Homo sapien
gaacttccaacactctattgagtat

SEQ ID NO: 5129862 - DNA, 25 bp, Homo sapien
tataagcacactcaatggtaggctg

SEQ ID NO: 5129863 - DNA, 25 bp, Homo sapien
gcccttttggtgagctataagcaca

SEQ ID NO: 5129864 - DNA, 25 bp, Homo sapien
ccctcaggaatgagtgtaccattct

SEQ ID NO: 5129865 - DNA, 25 bp, Homo sapien
ttcccgagacagagtgcccttttgg

SEQ ID NO: 5129866 - DNA, 25 bp, Homo sapien
aattttttgcaccatcagacaaaag

SEQ ID NO: 5129867 - DNA, 25 bp, Homo sapien
gaagacatttgtaaccctataaaca

SEQ ID NO: 5129868 - DNA, 25 bp, Homo sapien
acaaaagacaagggtagaagacatt

SEQ ID NO: 5129869 - DNA, 25 bp, Homo sapien
aaattttttgcaccatcagacaaaa

SEQ ID NO: 5129870 - DNA, 25 bp, Homo sapien
ttgactcccgctgcaaccgagcagg

SEQ ID NO: 5129871 - DNA, 25 bp, Homo sapien
tgactcccgctgcaaccgagcaggt

SEQ ID NO: 5129872 - DNA, 25 bp, Homo sapien
ggtgagtcaggtaggttgtatccaa

SEQ ID NO: 5129873 - DNA, 25 bp, Homo sapien
agtcaggtaggttgtatccaacggt

SEQ ID NO: 5129874 - DNA, 25 bp, Homo sapien
aaaatatgtggtgtacaggcataga

SEQ ID NO: 5129875 - DNA, 25 bp, Homo sapien
ctctgacaataatgaacagggggat

SEQ ID NO: 5129876 - DNA, 25 bp, Homo sapien
gaaaatatgtggtgtacaggcatag

SEQ ID NO: 5129877 - DNA, 25 bp, Homo sapien
cactctgacaataatgaacaggggg

SEQ ID NO: 5129878 - DNA, 25 bp, Homo sapien
tttttatagcaacgaggttgccaag

SEQ ID NO: 5129879 - DNA, 25 bp, Homo sapien
tagcaacgaggttgccaagaactga

SEQ ID NO: 5129880 - DNA, 25 bp, Homo sapien
gagtcaaaatgtgagggaaaacaag

SEQ ID NO: 5129881 - DNA, 25 bp, Homo sapien
aactgagtcaaaatgtgagggaaaa

SEQ ID NO: 5129882 - DNA, 25 bp, Homo sapien
ccctcctgtggtgtgatatttcgtt

SEQ ID NO: 5129883 - DNA, 25 bp, Homo sapien
tccctcctaggttgagtgaacttag

SEQ ID NO: 5129884 - DNA, 25 bp, Homo sapien
ttgaattgaagtagccatatacagc

SEQ ID NO: 5129885 - DNA, 25 bp, Homo sapien
ctaaaggagttgatcagaagcagca

SEQ ID NO: 5129886 - DNA, 25 bp, Homo sapien
tctcctgttgtcatgcacaaggaag

SEQ ID NO: 5129887 - DNA, 25 bp, Homo sapien
agcatccaccaggattccaatcaga

SEQ ID NO: 5129888 - DNA, 25 bp, Homo sapien
gcagggctgcttacagaccttctat

SEQ ID NO: 5129889 - DNA, 25 bp, Homo sapien
tgctcagaacctggcttgcagggct

SEQ ID NO: 5129890 - DNA, 25 bp, Homo sapien
gctgccaggatccatatatccagat

SEQ ID NO: 5129891 - DNA, 25 bp, Homo sapien
tttccagaggactggatctctggga

SEQ ID NO: 5129892 - DNA, 25 bp, Homo sapien
gatacatctctggattcaaatgcac

SEQ ID NO: 5129893 - DNA, 25 bp, Homo sapien
tctttgtgcataattttagcagtca

SEQ ID NO: 5129894 - DNA, 25 bp, Homo sapien
tcaggagcatctgccctagagtctg

SEQ ID NO: 5129895 - DNA, 25 bp, Homo sapien
ggagcatctgccctagagtctggct

SEQ ID NO: 5129896 - DNA, 25 bp, Homo sapien
ctcaggagcatctgccctagagtct

SEQ ID NO: 5129897 - DNA, 25 bp, Homo sapien
agcatctgccctagagtctggcttt

SEQ ID NO: 5129898 - DNA, 25 bp, Homo sapien
gagtaatgctctgagctgcgctccc

SEQ ID NO: 5129899 - DNA, 25 bp, Homo sapien
tcaaagtaggatgacaaaggccaca

SEQ ID NO: 5129900 - DNA, 25 bp, Homo sapien
atgacaaaggccacatcccctgagt

SEQ ID NO: 5129901 - DNA, 25 bp, Homo sapien
cacatcccctgagtaatgctctgag

SEQ ID NO: 5129902 - DNA, 25 bp, Homo sapien
ggggccctcacgtccgtgctgtgtc

SEQ ID NO: 5129903 - DNA, 25 bp, Homo sapien
gggggccctcacgtccgtgctgtgt

SEQ ID NO: 5129904 - DNA, 25 bp, Homo sapien
gggccctcacgtccgtgctgtgtcc

SEQ ID NO: 5129905 - DNA, 25 bp, Homo sapien
gagactgggtcatctggatgtcaca

SEQ ID NO: 5129906 - DNA, 25 bp, Homo sapien
ggagactgggtcatctggatgtcac

SEQ ID NO: 5129907 - DNA, 25 bp, Homo sapien
actgggtcatctggatgtcacatct

SEQ ID NO: 5129908 - DNA, 25 bp, Homo sapien
ggtcatctggatgtcacatctggca

SEQ ID NO: 5129909 - DNA, 25 bp, Homo sapien
ctctgttgacagtaataagctgcaa

SEQ ID NO: 5129910 - DNA, 25 bp, Homo sapien
ccactgtcactgaaccgagagggaa

SEQ ID NO: 5129911 - DNA, 25 bp, Homo sapien
gaggggtactgtcactctgttgaca

SEQ ID NO: 5129912 - DNA, 25 bp, Homo sapien
tgtaatctgccccagatccactgtc

SEQ ID NO: 5129913 - DNA, 25 bp, Homo sapien
tctctggggccagattctgagctct

SEQ ID NO: 5129914 - DNA, 25 bp, Homo sapien
cttctctggggccagattctgagct

SEQ ID NO: 5129915 - DNA, 25 bp, Homo sapien
tggggccagattctgagctctccat

SEQ ID NO: 5129916 - DNA, 25 bp, Homo sapien
cgagagtctgaactgggtccccttt

SEQ ID NO: 5129917 - DNA, 25 bp, Homo sapien
gacaagcctttcagctgtgtctcct

SEQ ID NO: 5129918 - DNA, 25 bp, Homo sapien
atggaattgtttgatgtggacgcac

SEQ ID NO: 5129919 - DNA, 25 bp, Homo sapien
ttgtgatgtcagacaagcctttcag

SEQ ID NO: 5129920 - DNA, 25 bp, Homo sapien
tttctgtctgttgtgatgtcagaca

SEQ ID NO: 5129921 - DNA, 25 bp, Homo sapien
cagtgacggactcaggttctcacca

SEQ ID NO: 5129922 - DNA, 25 bp, Homo sapien
ggtcacacaaggaacccacagacat

SEQ ID NO: 5129923 - DNA, 25 bp, Homo sapien
tggtcacacaaggaacccacagaca

SEQ ID NO: 5129924 - DNA, 25 bp, Homo sapien
ctggtcacacaaggaacccacagac

SEQ ID NO: 5129925 - DNA, 25 bp, Homo sapien
tccgggtagcccttccttcgcatgc

SEQ ID NO: 5129926 - DNA, 25 bp, Homo sapien
atgtggtgcaggtgcacgatgtcca

SEQ ID NO: 5129927 - DNA, 25 bp, Homo sapien
gggtagcccttccttcgcatgccct

SEQ ID NO: 5129928 - DNA, 25 bp, Homo sapien
catgccctccactgagtccgggtag

SEQ ID NO: 5129929 - DNA, 25 bp, Homo sapien
gcccatgcccttgaaacatgaaggg

SEQ ID NO: 5129930 - DNA, 25 bp, Homo sapien
ggagcaagaggcagggtcgggccag

SEQ ID NO: 5129931 - DNA, 25 bp, Homo sapien
aggccctgggcattcaggctgccac

SEQ ID NO: 5129932 - DNA, 25 bp, Homo sapien
ctaatggctcatgctggctggccac

SEQ ID NO: 5129933 - DNA, 25 bp, Homo sapien
gccatgtgctcccaggccgagggca

SEQ ID NO: 5129934 - DNA, 25 bp, Homo sapien
cgccacccggcaggacatctttcca

SEQ ID NO: 5129935 - DNA, 25 bp, Homo sapien
ctcgccacccggcaggacatctttc

SEQ ID NO: 5129936 - DNA, 25 bp, Homo sapien
ggcaggacatctttccagtcacaca

SEQ ID NO: 5129937 - DNA, 25 bp, Homo sapien
ttctcgccacccggcaggacatctt

SEQ ID NO: 5129938 - DNA, 25 bp, Homo sapien
cacgtcgatgctcacagcactggtg

SEQ ID NO: 5129939 - DNA, 25 bp, Homo sapien
cgtcgatgctcacagcactggtgca

SEQ ID NO: 5129940 - DNA, 25 bp, Homo sapien
gatgctcacagcactggtgcattca

SEQ ID NO: 5129941 - DNA, 25 bp, Homo sapien
ttccacgtcgatgctcacagcactg

SEQ ID NO: 5129942 - DNA, 25 bp, Homo sapien
ctgtagcaagtgtgtgtggtactcc

SEQ ID NO: 5129943 - DNA, 25 bp, Homo sapien
gcgggcagccgagcctagcttctcg

SEQ ID NO: 5129944 - DNA, 25 bp, Homo sapien
gcagccgagcctagcttctcgaact

SEQ ID NO: 5129945 - DNA, 25 bp, Homo sapien
ctcaggcgggcagccgagcctagct

SEQ ID NO: 5129946 - DNA, 25 bp, Homo sapien
aggcgggcagccgagcctagcttct

SEQ ID NO: 5129947 - DNA, 25 bp, Homo sapien
agggccttgcgggctaggtgccggc

SEQ ID NO: 5129948 - DNA, 25 bp, Homo sapien
gggccttgcgggctaggtgccggca

SEQ ID NO: 5129949 - DNA, 25 bp, Homo sapien
ggccttgcgggctaggtgccggcac

SEQ ID NO: 5129950 - DNA, 25 bp, Homo sapien
cagggccttgcgggctaggtgccgg

SEQ ID NO: 5129951 - DNA, 25 bp, Homo sapien
tccacggagcaaagtagaggactca

SEQ ID NO: 5129952 - DNA, 25 bp, Homo sapien
ctccacggagcaaagtagaggactc

SEQ ID NO: 5129953 - DNA, 25 bp, Homo sapien
gtggccagcactgggccccttgtac

SEQ ID NO: 5129954 - DNA, 25 bp, Homo sapien
ctcggctgcgctgctgtgtggccag

SEQ ID NO: 5129955 - DNA, 25 bp, Homo sapien
cctggggctcggctgcgctgctgtg

SEQ ID NO: 5129956 - DNA, 25 bp, Homo sapien
agcactgggccccttgtaccccagc

SEQ ID NO: 5129957 - DNA, 25 bp, Homo sapien
gtctttgagagactgacgaggaggg

SEQ ID NO: 5129958 - DNA, 25 bp, Homo sapien
tggggtctttgagagactgacgagg

SEQ ID NO: 5129959 - DNA, 25 bp, Homo sapien
tctttgagagactgacgaggaggga

SEQ ID NO: 5129960 - DNA, 25 bp, Homo sapien
gggtctttgagagactgacgaggag

SEQ ID NO: 5129961 - DNA, 25 bp, Homo sapien
gcttttatagcatcgcatgggatgg

SEQ ID NO: 5129962 - DNA, 25 bp, Homo sapien
gcggcttttatagcatcgcatggga

SEQ ID NO: 5129963 - DNA, 25 bp, Homo sapien
ctgggcggcttttatagcatcgcat

SEQ ID NO: 5129964 - DNA, 25 bp, Homo sapien
tatagcatcgcatgggatgggagcc

SEQ ID NO: 5129965 - DNA, 25 bp, Homo sapien
aggatgcaggtgaggcgctctgtgt

SEQ ID NO: 5129966 - DNA, 25 bp, Homo sapien
gctccgcaggcaatgctgtgcgtcc

SEQ ID NO: 5129967 - DNA, 25 bp, Homo sapien
tcgctccgcaggcaatgctgtgcgt

SEQ ID NO: 5129968 - DNA, 25 bp, Homo sapien
attctcgctccgcaggcaatgctgt

SEQ ID NO: 5129969 - DNA, 25 bp, Homo sapien
tctcgctccgcaggcaatgctgtgc

SEQ ID NO: 5129970 - DNA, 25 bp, Homo sapien
cgaatagggaatccaataaattagg

SEQ ID NO: 5129971 - DNA, 25 bp, Homo sapien
tggcggctggcaatgtaggctggcg

SEQ ID NO: 5129972 - DNA, 25 bp, Homo sapien
tggcagggtagtcacattggccacg

SEQ ID NO: 5129973 - DNA, 25 bp, Homo sapien
tagcaagcagaagcccgtgtggcca

SEQ ID NO: 5129974 - DNA, 25 bp, Homo sapien
ctgggtttggcaccggtgggagccg

SEQ ID NO: 5129975 - DNA, 25 bp, Homo sapien
accagaacccggtggtaccttgctg

SEQ ID NO: 5129976 - DNA, 25 bp, Homo sapien
ctccactccctgaagaagctgcccc

SEQ ID NO: 5129977 - DNA, 25 bp, Homo sapien
cactccctgaagaagctgcccccat

SEQ ID NO: 5129978 - DNA, 25 bp, Homo sapien
ccctccactccctgaagaagctgcc

SEQ ID NO: 5129979 - DNA, 25 bp, Homo sapien
agttttgtgtttggtctgcaggaca

SEQ ID NO: 5129980 - DNA, 25 bp, Homo sapien
tgctctatgggcctgggttttgatg

SEQ ID NO: 5129981 - DNA, 25 bp, Homo sapien
cacaggtaaaggcaattgctctatg

SEQ ID NO: 5129982 - DNA, 25 bp, Homo sapien
acaggtaggaggtgtgtgtcacagg

SEQ ID NO: 5129983 - DNA, 25 bp, Homo sapien
taccagacactgaggatccggtggg

SEQ ID NO: 5129984 - DNA, 25 bp, Homo sapien
ccagagggactttaaggactgagtc

SEQ ID NO: 5129985 - DNA, 25 bp, Homo sapien
gactgagtcagtaggacacgggctc

SEQ ID NO: 5129986 - DNA, 25 bp, Homo sapien
gatgatccccatgattctgcctggg

SEQ ID NO: 5129987 - DNA, 25 bp, Homo sapien
tgtacattttagggattcttgaaac

SEQ ID NO: 5129988 - DNA, 25 bp, Homo sapien
gctctgcttggaccttctgggtgtc

SEQ ID NO: 5129989 - DNA, 25 bp, Homo sapien
aggttcctcacctgtctcagaggac

SEQ ID NO: 5129990 - DNA, 25 bp, Homo sapien
tgggtgtcctcctgtgacctcaggt

SEQ ID NO: 5129991 - DNA, 25 bp, Homo sapien
ggtgtcctcctgtgacctcaggttc

SEQ ID NO: 5129992 - DNA, 25 bp, Homo sapien
ttatgtgaaccatcccaggcaggaa

SEQ ID NO: 5129993 - DNA, 25 bp, Homo sapien
ttattatgtgaaccatcccaggcag

SEQ ID NO: 5129994 - DNA, 25 bp, Homo sapien
tgtttattatgtgaaccatcccagg

SEQ ID NO: 5129995 - DNA, 25 bp, Homo sapien
ctttttcagtattagtggacccaca

SEQ ID NO: 5129996 - DNA, 25 bp, Homo sapien
taggagaggggggtgtagtagccat

SEQ ID NO: 5129997 - DNA, 25 bp, Homo sapien
tgataggagaggggggtgtagtagc

SEQ ID NO: 5129998 - DNA, 25 bp, Homo sapien
ggtgataggagaggggggtgtagta

SEQ ID NO: 5129999 - DNA, 25 bp, Homo sapien
ataggagaggggggtgtagtagcca

SEQ ID NO: 5130000 - DNA, 25 bp, Homo sapien
tatacaagaagaaaaggaaaatatc

SEQ ID NO: 5130001 - DNA, 25 bp, Homo sapien
atacaagaagaaaaggaaaatatct

SEQ ID NO: 5130002 - DNA, 25 bp, Homo sapien
gaatccgaagaactgcggcccgcag

SEQ ID NO: 5130003 - DNA, 25 bp, Homo sapien
tccgaagaactgcggcccgcagcgg

SEQ ID NO: 5130004 - DNA, 25 bp, Homo sapien
aatccgaagaactgcggcccgcagc

SEQ ID NO: 5130005 - DNA, 25 bp, Homo sapien
atccgaagaactgcggcccgcagcg

SEQ ID NO: 5130006 - DNA, 25 bp, Homo sapien
cttggccagcgcagagagataaaat

SEQ ID NO: 5130007 - DNA, 25 bp, Homo sapien
ccttggccagcgcagagagataaaa

SEQ ID NO: 5130008 - DNA, 25 bp, Homo sapien
ttggccagcgcagagagataaaatc

SEQ ID NO: 5130009 - DNA, 25 bp, Homo sapien
ctgtctgccggtagggccacaggct

SEQ ID NO: 5130010 - DNA, 25 bp, Homo sapien
tgccggtagggccacaggctgcgac

SEQ ID NO: 5130011 - DNA, 25 bp, Homo sapien
tctgccggtagggccacaggctgcg

SEQ ID NO: 5130012 - DNA, 25 bp, Homo sapien
ccggtagggccacaggctgcgacct

SEQ ID NO: 5130013 - DNA, 25 bp, Homo sapien
tactactaaatgtagtgagctagga

SEQ ID NO: 5130014 - DNA, 25 bp, Homo sapien
taaatgtagtgagctaggagtggct

SEQ ID NO: 5130015 - DNA, 25 bp, Homo sapien
tctcttactactaaatgtagtgagc

SEQ ID NO: 5130016 - DNA, 25 bp, Homo sapien
tactaaatgtagtgagctaggagtg

SEQ ID NO: 5130017 - DNA, 25 bp, Homo sapien
tgtctctgtcgatgtgttacaacag

SEQ ID NO: 5130018 - DNA, 25 bp, Homo sapien
aaaatgccattgaggattgtgaact

SEQ ID NO: 5130019 - DNA, 25 bp, Homo sapien
tgcagaatgtgctcctattgtctct

SEQ ID NO: 5130020 - DNA, 25 bp, Homo sapien
cagtagcggcaactgcagaatgtgc

SEQ ID NO: 5130021 - DNA, 25 bp, Homo sapien
gaaacagccattcactcgtttcctt

SEQ ID NO: 5130022 - DNA, 25 bp, Homo sapien
ctagggcatggcttcaagaagagga

SEQ ID NO: 5130023 - DNA, 25 bp, Homo sapien
ggcatggcttcaagaagaggaaaca

SEQ ID NO: 5130024 - DNA, 25 bp, Homo sapien
agaggaaacagccattcactcgttt

SEQ ID NO: 5130025 - DNA, 25 bp, Homo sapien
aattggaacaccagtggcaccatta

SEQ ID NO: 5130026 - DNA, 25 bp, Homo sapien
caccagtggcaccattaactgcttt

SEQ ID NO: 5130027 - DNA, 25 bp, Homo sapien
gtacagctatacctttgtcaacctt

SEQ ID NO: 5130028 - DNA, 25 bp, Homo sapien
tggaacaccagtggcaccattaact

SEQ ID NO: 5130029 - DNA, 25 bp, Homo sapien
ccaaatggagctctacttatgggca

SEQ ID NO: 5130030 - DNA, 25 bp, Homo sapien
cagctccaaatggagctctacttat

SEQ ID NO: 5130031 - DNA, 25 bp, Homo sapien
gctccaaatggagctctacttatgg

SEQ ID NO: 5130032 - DNA, 25 bp, Homo sapien
tccaaatggagctctacttatgggc

SEQ ID NO: 5130033 - DNA, 25 bp, Homo sapien
tgcaaaaatgttctgtattttctag

SEQ ID NO: 5130034 - DNA, 25 bp, Homo sapien
aaatgttctgtattttctagtgtat

SEQ ID NO: 5130035 - DNA, 25 bp, Homo sapien
ttctgcaaaaatgttctgtattttc

SEQ ID NO: 5130036 - DNA, 25 bp, Homo sapien
gttctgtattttctagtgtattcag

SEQ ID NO: 5130037 - DNA, 25 bp, Homo sapien
ataaccttctacaactgggagaaca

SEQ ID NO: 5130038 - DNA, 25 bp, Homo sapien
atgtagaatcctggtacattaaata

SEQ ID NO: 5130039 - DNA, 25 bp, Homo sapien
tacacagtatcacctacaatcagga

SEQ ID NO: 5130040 - DNA, 25 bp, Homo sapien
aatcaggatgtgattgatgcagctc

SEQ ID NO: 5130041 - DNA, 25 bp, Homo sapien
atacacagtatcacctacaatcagg

SEQ ID NO: 5130042 - DNA, 25 bp, Homo sapien
aatacacagtatcacctacaatcag

SEQ ID NO: 5130043 - DNA, 25 bp, Homo sapien
attatgaacttctcctggttgatca

SEQ ID NO: 5130044 - DNA, 25 bp, Homo sapien
ttatgaacttctcctggttgatcac

SEQ ID NO: 5130045 - DNA, 25 bp, Homo sapien
tcctggttgatcacattgatacctg

SEQ ID NO: 5130046 - DNA, 25 bp, Homo sapien
cctggttgatcacattgatacctgt

SEQ ID NO: 5130047 - DNA, 25 bp, Homo sapien
tgggacagttttgtattcatcaaca

SEQ ID NO: 5130048 - DNA, 25 bp, Homo sapien
aagaacaacattcttatacagtgga

SEQ ID NO: 5130049 - DNA, 25 bp, Homo sapien
gggacagttttgtattcatcaacaa

SEQ ID NO: 5130050 - DNA, 25 bp, Homo sapien
agaacaacattcttatacagtggac

SEQ ID NO: 5130051 - DNA, 25 bp, Homo sapien
ctggcatgtaccactcttcaaatct

SEQ ID NO: 5130052 - DNA, 25 bp, Homo sapien
cactgagctccttactgagttttaa

SEQ ID NO: 5130053 - DNA, 25 bp, Homo sapien
gattaccacccgaacctctgtaagc

SEQ ID NO: 5130054 - DNA, 25 bp, Homo sapien
cgaacctctgtaagcttaggtttga

SEQ ID NO: 5130055 - DNA, 25 bp, Homo sapien
gcatgtgatggattaccacccgaac

SEQ ID NO: 5130056 - DNA, 25 bp, Homo sapien
cttgttccccaacatgacactatta

SEQ ID NO: 5130057 - DNA, 25 bp, Homo sapien
gttccccaacatgacactattaaat

SEQ ID NO: 5130058 - DNA, 25 bp, Homo sapien
ttcagaatggtatttgtcaacaaaa

SEQ ID NO: 5130059 - DNA, 25 bp, Homo sapien
gggaaaaggatttataccactgcat

SEQ ID NO: 5130060 - DNA, 25 bp, Homo sapien
agagagaagacctcttaagtggttt

SEQ ID NO: 5130061 - DNA, 25 bp, Homo sapien
aagatccttgatttctacatgtgca

SEQ ID NO: 5130062 - DNA, 25 bp, Homo sapien
tgtggcagtagcactgcacagggtt

SEQ ID NO: 5130063 - DNA, 25 bp, Homo sapien
gaaagggaaatctcaattcaagtcc

SEQ ID NO: 5130064 - DNA, 25 bp, Homo sapien
ctcgagctaacggtcccgccaggta

SEQ ID NO: 5130065 - DNA, 25 bp, Homo sapien
taacggtcccgccaggtaggcgcgc

SEQ ID NO: 5130066 - DNA, 25 bp, Homo sapien
ggtaggcgcgcgcgccagttccgcg

SEQ ID NO: 5130067 - DNA, 25 bp, Homo sapien
gggtcctggccgcgtcggcctcgag

SEQ ID NO: 5130068 - DNA, 25 bp, Homo sapien
gcgctgacgccggctgcgactcggg

SEQ ID NO: 5130069 - DNA, 25 bp, Homo sapien
cggcgctgacgccggctgcgactcg

SEQ ID NO: 5130070 - DNA, 25 bp, Homo sapien
ggcgctgacgccggctgcgactcgg

SEQ ID NO: 5130071 - DNA, 25 bp, Homo sapien
cgctgacgccggctgcgactcgggc

SEQ ID NO: 5130072 - DNA, 25 bp, Homo sapien
aaaaagacatatctgtataagctac

SEQ ID NO: 5130073 - DNA, 25 bp, Homo sapien
taaaaagacatatctgtataagcta

SEQ ID NO: 5130074 - DNA, 25 bp, Homo sapien
cgaggtgaagtctgggaccatgtag

SEQ ID NO: 5130075 - DNA, 25 bp, Homo sapien
tctgggaccatgtagttctgacgtc

SEQ ID NO: 5130076 - DNA, 25 bp, Homo sapien
tgggccctagtttggcgacaggcat

SEQ ID NO: 5130077 - DNA, 25 bp, Homo sapien
gcaagctgggccctagtttggcgac

SEQ ID NO: 5130078 - DNA, 25 bp, Homo sapien
gtgggtcttcctgatgccatccttt

SEQ ID NO: 5130079 - DNA, 25 bp, Homo sapien
tcaagtgggtcttcctgatgccatc

SEQ ID NO: 5130080 - DNA, 25 bp, Homo sapien
cattcaagtgggtcttcctgatgcc

SEQ ID NO: 5130081 - DNA, 25 bp, Homo sapien
cagcattcaagtgggtcttcctgat

SEQ ID NO: 5130082 - DNA, 25 bp, Homo sapien
ctgggaagaagcacacactcctgcc

SEQ ID NO: 5130083 - DNA, 25 bp, Homo sapien
ctcatagaccccatcactataggct

SEQ ID NO: 5130084 - DNA, 25 bp, Homo sapien
tcatagaccccatcactataggctg

SEQ ID NO: 5130085 - DNA, 25 bp, Homo sapien
ctcatctgcctgaattacctcatag

SEQ ID NO: 5130086 - DNA, 25 bp, Homo sapien
gcctgaattacctcatagaccccat

SEQ ID NO: 5130087 - DNA, 25 bp, Homo sapien
gacagacaaattacggaaaggtgag

SEQ ID NO: 5130088 - DNA, 25 bp, Homo sapien
gaagattacccgaaatgaactgacc

SEQ ID NO: 5130089 - DNA, 25 bp, Homo sapien
ttcccaagtttaagcaatacacctg

SEQ ID NO: 5130090 - DNA, 25 bp, Homo sapien
gatatatagacccaggatgcagaaa

SEQ ID NO: 5130091 - DNA, 25 bp, Homo sapien
gagaacctgagtccgtcactgtcca

SEQ ID NO: 5130092 - DNA, 25 bp, Homo sapien
gtgagaacctgagtccgtcactgtc

SEQ ID NO: 5130093 - DNA, 25 bp, Homo sapien
gaacctgagtccgtcactgtccacg

SEQ ID NO: 5130094 - DNA, 25 bp, Homo sapien
aacctgagtccgtcactgtccacgg

SEQ ID NO: 5130095 - DNA, 25 bp, Homo sapien
tgagttgggaagcacactgaggctc

SEQ ID NO: 5130096 - DNA, 25 bp, Homo sapien
cagagattcttactaggcaaaaaga

SEQ ID NO: 5130097 - DNA, 25 bp, Homo sapien
gaaatacaagcgctaacatctatgt

SEQ ID NO: 5130098 - DNA, 25 bp, Homo sapien
cctcaactcatagctgagagtgagg

SEQ ID NO: 5130099 - DNA, 25 bp, Homo sapien
tcttgagaccttgggctaggcaaat

SEQ ID NO: 5130100 - DNA, 25 bp, Homo sapien
taatttgcataccatgtatctgaca

SEQ ID NO: 5130101 - DNA, 25 bp, Homo sapien
gcttgatgtcgaaaacaaaatctac

SEQ ID NO: 5130102 - DNA, 25 bp, Homo sapien
atttttaggcttgatgtcgaaaaca

SEQ ID NO: 5130103 - DNA, 25 bp, Homo sapien
tgcagatgtctctgcaatataatgc

SEQ ID NO: 5130104 - DNA, 25 bp, Homo sapien
cagatgtctctgcaatataatgctt

SEQ ID NO: 5130105 - DNA, 25 bp, Homo sapien
agatgtctctgcaatataatgcttt

SEQ ID NO: 5130106 - DNA, 25 bp, Homo sapien
gcagatgtctctgcaatataatgct

SEQ ID NO: 5130107 - DNA, 25 bp, Homo sapien
tactaatttgaagtctgaagtattc

SEQ ID NO: 5130108 - DNA, 25 bp, Homo sapien
taatttgaagtctgaagtattccat

SEQ ID NO: 5130109 - DNA, 25 bp, Homo sapien
ctaatttgaagtctgaagtattcca

SEQ ID NO: 5130110 - DNA, 25 bp, Homo sapien
cgtactaatttgaagtctgaagtat

SEQ ID NO: 5130111 - DNA, 25 bp, Homo sapien
gctcagatcttgtcattggctccca

SEQ ID NO: 5130112 - DNA, 25 bp, Homo sapien
cgttgcttagcctaggtgtaatcca

SEQ ID NO: 5130113 - DNA, 25 bp, Homo sapien
attagccaccgacaccagacagtct

SEQ ID NO: 5130114 - DNA, 25 bp, Homo sapien
taagctccttaggacagcatacacg

SEQ ID NO: 5130115 - DNA, 25 bp, Homo sapien
ggtggttcgaggtatgacattttga

SEQ ID NO: 5130116 - DNA, 25 bp, Homo sapien
tggttcgaggtatgacattttgaaa

SEQ ID NO: 5130117 - DNA, 25 bp, Homo sapien
gctgagaaagcattatatggtggca

SEQ ID NO: 5130118 - DNA, 25 bp, Homo sapien
ggtggtggttcgaggtatgacattt

SEQ ID NO: 5130119 - DNA, 25 bp, Homo sapien
ccgtggctttttgccccatggccat

SEQ ID NO: 5130120 - DNA, 25 bp, Homo sapien
gccgccgtggctttttgccccatgg

SEQ ID NO: 5130121 - DNA, 25 bp, Homo sapien
ggcggcggctctttgcacccccgcc

SEQ ID NO: 5130122 - DNA, 25 bp, Homo sapien
cggcggcggctctttgcacccccgc

SEQ ID NO: 5130123 - DNA, 25 bp, Homo sapien
gcggctttttgcgcgccttggcttt

SEQ ID NO: 5130124 - DNA, 25 bp, Homo sapien
ggctttttgaccctcatcgccgcag

SEQ ID NO: 5130125 - DNA, 25 bp, Homo sapien
cacggcttttagttccctgccgccg

SEQ ID NO: 5130126 - DNA, 25 bp, Homo sapien
cgcctcgggtttatgcctaccacgg

SEQ ID NO: 5130127 - DNA, 25 bp, Homo sapien
ccactattttgccccgcgtcgccgc

SEQ ID NO: 5130128 - DNA, 25 bp, Homo sapien
aagccaacctgtgccggccttctac

SEQ ID NO: 5130129 - DNA, 25 bp, Homo sapien
taatccgattcataagggctcggcc

SEQ ID NO: 5130130 - DNA, 25 bp, Homo sapien
ccaaggcgggcgtattacgaggcca

SEQ ID NO: 5130131 - DNA, 25 bp, Homo sapien
taacatgtgtataatggccgggcac

SEQ ID NO: 5130132 - DNA, 25 bp, Homo sapien
tcatcaggagtattctaagtgtggc

SEQ ID NO: 5130133 - DNA, 25 bp, Homo sapien
gtctagattttatgtgaagatattc

SEQ ID NO: 5130134 - DNA, 25 bp, Homo sapien
gattttatgtgaagatattcccgtt

SEQ ID NO: 5130135 - DNA, 25 bp, Homo sapien
tagattttatgtgaagatattcccg

SEQ ID NO: 5130136 - DNA, 25 bp, Homo sapien
attttatgtgaagatattcccgttt

SEQ ID NO: 5130137 - DNA, 25 bp, Homo sapien
tgtccacatccagatactacaaaaa

SEQ ID NO: 5130138 - DNA, 25 bp, Homo sapien
caaatgtccacatccagatactaca

SEQ ID NO: 5130139 - DNA, 25 bp, Homo sapien
cttctgtctagttttcaggggaaga

SEQ ID NO: 5130140 - DNA, 25 bp, Homo sapien
caaacctgctctatgaaagggaatg

SEQ ID NO: 5130141 - DNA, 25 bp, Homo sapien
ctttttcaatatagccctgaaagcg

SEQ ID NO: 5130142 - DNA, 25 bp, Homo sapien
tttttcaatatagccctgaaagcgc

SEQ ID NO: 5130143 - DNA, 25 bp, Homo sapien
cctttttcaatatagccctgaaagc

SEQ ID NO: 5130144 - DNA, 25 bp, Homo sapien
tgctccttcaaaacgattgttgaat

SEQ ID NO: 5130145 - DNA, 25 bp, Homo sapien
gctccttcaaaacgattgttgaatt

SEQ ID NO: 5130146 - DNA, 25 bp, Homo sapien
ttcaacactgttagttgactacaca

SEQ ID NO: 5130147 - DNA, 25 bp, Homo sapien
gaaaggttcaacactgttagttgac

SEQ ID NO: 5130148 - DNA, 25 bp, Homo sapien
tgttagttgactacacacatcacaa

SEQ ID NO: 5130149 - DNA, 25 bp, Homo sapien
gttagttgactacacacatcacaaa

SEQ ID NO: 5130150 - DNA, 25 bp, Homo sapien
tatatgcattcccgtttccaaggaa

SEQ ID NO: 5130151 - DNA, 25 bp, Homo sapien
tatgcattcccgtttccaaggaaat

SEQ ID NO: 5130152 - DNA, 25 bp, Homo sapien
tttatatgcattcccgtttccaagg

SEQ ID NO: 5130153 - DNA, 25 bp, Homo sapien
tgcattcccgtttccaaggaaatcc

SEQ ID NO: 5130154 - DNA, 25 bp, Homo sapien
cactgtgacttcaattgaaacatcc

SEQ ID NO: 5130155 - DNA, 25 bp, Homo sapien
gaaacatcccaatgaagcttctgag

SEQ ID NO: 5130156 - DNA, 25 bp, Homo sapien
accgtagtcctgagagcgctccaaa

SEQ ID NO: 5130157 - DNA, 25 bp, Homo sapien
tagagtttatatgaagacaatcccg

SEQ ID NO: 5130158 - DNA, 25 bp, Homo sapien
gaaattctgactaatccagaatata

SEQ ID NO: 5130159 - DNA, 25 bp, Homo sapien
tttagagtccagtcattctttgcca

SEQ ID NO: 5130160 - DNA, 25 bp, Homo sapien
tatggaagcattcctcaaattattc

SEQ ID NO: 5130161 - DNA, 25 bp, Homo sapien
gccagttccagatttattgcttaca

SEQ ID NO: 5130162 - DNA, 25 bp, Homo sapien
tgcaggttcccacagaaaggatagc

SEQ ID NO: 5130163 - DNA, 25 bp, Homo sapien
taaatcagtcaatgccaactgctgg

SEQ ID NO: 5130164 - DNA, 25 bp, Homo sapien
gggctattcccacttcgattcttca

SEQ ID NO: 5130165 - DNA, 25 bp, Homo sapien
gggaaacgtccatagtctgcaggtt

SEQ ID NO: 5130166 - DNA, 25 bp, Homo sapien
cggaggaaggcgcgcgcggtggtgg

SEQ ID NO: 5130167 - DNA, 25 bp, Homo sapien
atgcagtgcggtgagaggcgcgggc

SEQ ID NO: 5130168 - DNA, 25 bp, Homo sapien
cgcgggcagcgctggtcccgctgcg

SEQ ID NO: 5130169 - DNA, 25 bp, Homo sapien
tggcgggaagcctcaggccgcagtg

SEQ ID NO: 5130170 - DNA, 25 bp, Homo sapien
cgcgcgtggtggcgctgtgtctggc

SEQ ID NO: 5130171 - DNA, 25 bp, Homo sapien
ctgaggcttctgctcgctcctttac

SEQ ID NO: 5130172 - DNA, 25 bp, Homo sapien
gctgtgtctggcctgaggcttctgc

SEQ ID NO: 5130173 - DNA, 25 bp, Homo sapien
cgcgtggtggcgctgtgtctggcct

SEQ ID NO: 5130174 - DNA, 25 bp, Homo sapien
ggcggatcccacaggaccggaagct

SEQ ID NO: 5130175 - DNA, 25 bp, Homo sapien
gatcccacaggaccggaagctaagt

SEQ ID NO: 5130176 - DNA, 25 bp, Homo sapien
cacaggaccggaagctaagtctttt

SEQ ID NO: 5130177 - DNA, 25 bp, Homo sapien
caccgcggggcggatcccacaggac

SEQ ID NO: 5130178 - DNA, 25 bp, Homo sapien
agacctgtctgctgtgattggcgac

SEQ ID NO: 5130179 - DNA, 25 bp, Homo sapien
actgggccacccggctggtacttgg

SEQ ID NO: 5130180 - DNA, 25 bp, Homo sapien
tgtctgctgtgattggcgacctgcg

SEQ ID NO: 5130181 - DNA, 25 bp, Homo sapien
agttgccggcggagggagccccgtg

SEQ ID NO: 5130182 - DNA, 25 bp, Homo sapien
agtgtgtagtgcactgatggataat

SEQ ID NO: 5130183 - DNA, 25 bp, Homo sapien
aactcctggttcattggaaagcata

SEQ ID NO: 5130184 - DNA, 25 bp, Homo sapien
gtagtgcactgatggataatgtctt

SEQ ID NO: 5130185 - DNA, 25 bp, Homo sapien
taactcctggttcattggaaagcat

SEQ ID NO: 5130186 - DNA, 25 bp, Homo sapien
attcttcatctctacagtacaggac

SEQ ID NO: 5130187 - DNA, 25 bp, Homo sapien
gacagcacggactgagttatttctg

SEQ ID NO: 5130188 - DNA, 25 bp, Homo sapien
tacagtacaggactgcatctggaca

SEQ ID NO: 5130189 - DNA, 25 bp, Homo sapien
tggacagcacggactgagttatttc

SEQ ID NO: 5130190 - DNA, 25 bp, Homo sapien
gaattttcataatgtcgcataagaa

SEQ ID NO: 5130191 - DNA, 25 bp, Homo sapien
ttaaatcaggtaagtttatctgtaa

SEQ ID NO: 5130192 - DNA, 25 bp, Homo sapien
tttaaatcaggtaagtttatctgta

SEQ ID NO: 5130193 - DNA, 25 bp, Homo sapien
caatcaagttcttcaacaggagttt

SEQ ID NO: 5130194 - DNA, 25 bp, Homo sapien
agacaatcaagttcttcaacaggag

SEQ ID NO: 5130195 - DNA, 25 bp, Homo sapien
caagttcttcaacaggagtttttat

SEQ ID NO: 5130196 - DNA, 25 bp, Homo sapien
taaagacaatcaagttcttcaacag

SEQ ID NO: 5130197 - DNA, 25 bp, Homo sapien
tagacaaggtgctgtttagctttgg

SEQ ID NO: 5130198 - DNA, 25 bp, Homo sapien
gctgtttagctttgggtctaataat

SEQ ID NO: 5130199 - DNA, 25 bp, Homo sapien
tatgtgtttagacaaggtgctgttt

SEQ ID NO: 5130200 - DNA, 25 bp, Homo sapien
tgttttatgtgtttagacaaggtgc

SEQ ID NO: 5130201 - DNA, 25 bp, Homo sapien
cagctgcagtctagacgtggtgcac

SEQ ID NO: 5130202 - DNA, 25 bp, Homo sapien
caagtggctggacactccagaccat

SEQ ID NO: 5130203 - DNA, 25 bp, Homo sapien
cagtctagacgtggtgcaccggcag

SEQ ID NO: 5130204 - DNA, 25 bp, Homo sapien
tgcagtctagacgtggtgcaccggc

SEQ ID NO: 5130205 - DNA, 25 bp, Homo sapien
aagtcaggcagtccgcacagcagcg

SEQ ID NO: 5130206 - DNA, 25 bp, Homo sapien
ctgctgctcagtaccatcccggtta

SEQ ID NO: 5130207 - DNA, 25 bp, Homo sapien
atcccggttaccacgaagagccagc

SEQ ID NO: 5130208 - DNA, 25 bp, Homo sapien
ctgggcgcccaagtcaggcagtccg

SEQ ID NO: 5130209 - DNA, 25 bp, Homo sapien
tccaccttcccgtgccagcgcctca

SEQ ID NO: 5130210 - DNA, 25 bp, Homo sapien
ccaccttcccgtgccagcgcctcag

SEQ ID NO: 5130211 - DNA, 25 bp, Homo sapien
acaatgctgtgagcgacctgagggc

SEQ ID NO: 5130212 - DNA, 25 bp, Homo sapien
ctgtgagcgacctgagggccgtcca

SEQ ID NO: 5130213 - DNA, 25 bp, Homo sapien
gctgcccgccgccatctgaatatgt

SEQ ID NO: 5130214 - DNA, 25 bp, Homo sapien
tgggacaatgctgtgagcgacctga

SEQ ID NO: 5130215 - DNA, 25 bp, Homo sapien
gtcactcgcctgtgccgtgtcctcc

SEQ ID NO: 5130216 - DNA, 25 bp, Homo sapien
tggcggtgttctccccgtcgtcctc

SEQ ID NO: 5130217 - DNA, 25 bp, Homo sapien
gaagtggattttgttgagcctgtgt

SEQ ID NO: 5130218 - DNA, 25 bp, Homo sapien
aagtccattagtcctgcccgaggct

SEQ ID NO: 5130219 - DNA, 25 bp, Homo sapien
ttttaagtccattagtcctgcccga

SEQ ID NO: 5130220 - DNA, 25 bp, Homo sapien
ttaagtccattagtcctgcccgagg

SEQ ID NO: 5130221 - DNA, 25 bp, Homo sapien
taaggcaggcgtgttgatgtggact

SEQ ID NO: 5130222 - DNA, 25 bp, Homo sapien
ggcaggcgtgttgatgtggacttac

SEQ ID NO: 5130223 - DNA, 25 bp, Homo sapien
ataatagctaaggcaggcgtgttga

SEQ ID NO: 5130224 - DNA, 25 bp, Homo sapien
atagctaaggcaggcgtgttgatgt

SEQ ID NO: 5130225 - DNA, 25 bp, Homo sapien
agcctagtgcggtcagcggggcagc

SEQ ID NO: 5130226 - DNA, 25 bp, Homo sapien
cagccggttgcggtcagcctagtgc

SEQ ID NO: 5130227 - DNA, 25 bp, Homo sapien
ggtcagccggttgcggtcagcctag

SEQ ID NO: 5130228 - DNA, 25 bp, Homo sapien
actgtgtgtggtcagccggttgcgg

SEQ ID NO: 5130229 - DNA, 25 bp, Homo sapien
tttccacatggtcgcgcacgaggtt

SEQ ID NO: 5130230 - DNA, 25 bp, Homo sapien
gagtcttgctgcgtgcgctgcgcca

SEQ ID NO: 5130231 - DNA, 25 bp, Homo sapien
cggcgctcacggcactgcaggttgt

SEQ ID NO: 5130232 - DNA, 25 bp, Homo sapien
tacgggccacgtcgtactctttgca

SEQ ID NO: 5130233 - DNA, 25 bp, Homo sapien
ctgggctcccgcgtgcttgcagcag

SEQ ID NO: 5130234 - DNA, 25 bp, Homo sapien
aaatcccggccacccaagggtgctg

SEQ ID NO: 5130235 - DNA, 25 bp, Homo sapien
ctcctctctgcgcccacaaatcccg

SEQ ID NO: 5130236 - DNA, 25 bp, Homo sapien
ccacgtggcttgtccacatgaactg

SEQ ID NO: 5130237 - DNA, 25 bp, Homo sapien
acacctgcagtgctggcccagacct

SEQ ID NO: 5130238 - DNA, 25 bp, Homo sapien
acctgcagtgctggcccagacctgg

SEQ ID NO: 5130239 - DNA, 25 bp, Homo sapien
tgtccacacctgcagtgctggccca

SEQ ID NO: 5130240 - DNA, 25 bp, Homo sapien
cagacctgggtttccaccttgggag

SEQ ID NO: 5130241 - DNA, 25 bp, Homo sapien
ctggggtggattgggaagttatagg

SEQ ID NO: 5130242 - DNA, 25 bp, Homo sapien
acctgtgggtgcagatctttgtgtc

SEQ ID NO: 5130243 - DNA, 25 bp, Homo sapien
ggtgcagatctttgtgtccccggct

SEQ ID NO: 5130244 - DNA, 25 bp, Homo sapien
tgggaagttataggggacatggagg

SEQ ID NO: 5130245 - DNA, 25 bp, Homo sapien
cctgtggggctgccccacagacaag

SEQ ID NO: 5130246 - DNA, 25 bp, Homo sapien
gtgtctccatcagttggcaggtgcc

SEQ ID NO: 5130247 - DNA, 25 bp, Homo sapien
ggtgcccttgttgcgggcagagagt

SEQ ID NO: 5130248 - DNA, 25 bp, Homo sapien
tctccatcagttggcaggtgccctt

SEQ ID NO: 5130249 - DNA, 25 bp, Homo sapien
tcagttggcaggtgcccttgttgcg

SEQ ID NO: 5130250 - DNA, 25 bp, Homo sapien
gcacctgggaacgttggcctgccct

SEQ ID NO: 5130251 - DNA, 25 bp, Homo sapien
cctgggaacgttggcctgcccttgg

SEQ ID NO: 5130252 - DNA, 25 bp, Homo sapien
gtgcacctgggaacgttggcctgcc

SEQ ID NO: 5130253 - DNA, 25 bp, Homo sapien
tgagcaaccacaaggagttgaatgc

SEQ ID NO: 5130254 - DNA, 25 bp, Homo sapien
cggatctggctcactgcttgcatga

SEQ ID NO: 5130255 - DNA, 25 bp, Homo sapien
ctcctgaatgttccggatgagctcg

SEQ ID NO: 5130256 - DNA, 25 bp, Homo sapien
gcagctcctgaatgttccggatgag

SEQ ID NO: 5130257 - DNA, 25 bp, Homo sapien
ctcactgcttgcatgatggttctct

SEQ ID NO: 5130258 - DNA, 25 bp, Homo sapien
agtcctgcgctccactgtgacctgg

SEQ ID NO: 5130259 - DNA, 25 bp, Homo sapien
cagtcctgcgctccactgtgacctg

SEQ ID NO: 5130260 - DNA, 25 bp, Homo sapien
tggcgcccgcaggtctcgtcgatgt

SEQ ID NO: 5130261 - DNA, 25 bp, Homo sapien
tgttgtaggcctccatcttgtctga

SEQ ID NO: 5130262 - DNA, 25 bp, Homo sapien
ccgcaggtctcgtcgatgttgtagg

SEQ ID NO: 5130263 - DNA, 25 bp, Homo sapien
tggagtacggatgagcctgcacctc

SEQ ID NO: 5130264 - DNA, 25 bp, Homo sapien
ttcacggcgtcgcactggagccgca

SEQ ID NO: 5130265 - DNA, 25 bp, Homo sapien
tcacggcgtcgcactggagccgcag

SEQ ID NO: 5130266 - DNA, 25 bp, Homo sapien
ctgcgtgaacttggcccgggtctcc

SEQ ID NO: 5130267 - DNA, 25 bp, Homo sapien
cggcgtcgcactggagccgcaggtc

SEQ ID NO: 5130268 - DNA, 25 bp, Homo sapien
caggctggtcctacccaggtcttgg

SEQ ID NO: 5130269 - DNA, 25 bp, Homo sapien
ccccatgcccgggtatatagaacgc

SEQ ID NO: 5130270 - DNA, 25 bp, Homo sapien
gggtatatagaacgccgagaccagg

SEQ ID NO: 5130271 - DNA, 25 bp, Homo sapien
tatagaacgccgagaccaggctggt

SEQ ID NO: 5130272 - DNA, 25 bp, Homo sapien
actgggctgcgtcacggcacagctc

SEQ ID NO: 5130273 - DNA, 25 bp, Homo sapien
ggctacgtgcagaggtgcctctttg

SEQ ID NO: 5130274 - DNA, 25 bp, Homo sapien
tacgtgcagaggtgcctctttgtcc

SEQ ID NO: 5130275 - DNA, 25 bp, Homo sapien
tccatgttgggccggtgcgagcgca

SEQ ID NO: 5130276 - DNA, 25 bp, Homo sapien
tagggagggcagaagtatgcaccta

SEQ ID NO: 5130277 - DNA, 25 bp, Homo sapien
agggcagaagtatgcacctaccggg

SEQ ID NO: 5130278 - DNA, 25 bp, Homo sapien
aggaggtcctgggaagactccatga

SEQ ID NO: 5130279 - DNA, 25 bp, Homo sapien
caaaactcccaatgggagctggcag

SEQ ID NO: 5130280 - DNA, 25 bp, Homo sapien
agcttctctcgcagtgctgtgaggg

SEQ ID NO: 5130281 - DNA, 25 bp, Homo sapien
gcttctctcgcagtgctgtgaggga

SEQ ID NO: 5130282 - DNA, 25 bp, Homo sapien
aagcttctctcgcagtgctgtgagg

SEQ ID NO: 5130283 - DNA, 25 bp, Homo sapien
cttctctcgcagtgctgtgagggac

SEQ ID NO: 5130284 - DNA, 25 bp, Homo sapien
gactggggggaagcaccgtgccgct

SEQ ID NO: 5130285 - DNA, 25 bp, Homo sapien
gaaagctaacgcgctgtttatttgg

SEQ ID NO: 5130286 - DNA, 25 bp, Homo sapien
ctggggggaagcaccgtgccgctgc

SEQ ID NO: 5130287 - DNA, 25 bp, Homo sapien
aacgcgctgtttatttgggggactg

SEQ ID NO: 5130288 - DNA, 25 bp, Homo sapien
agaatcctccctgcctgatagtcgg

SEQ ID NO: 5130289 - DNA, 25 bp, Homo sapien
gccaggtgggtagaagaatcctccc

SEQ ID NO: 5130290 - DNA, 25 bp, Homo sapien
ccctgcctgatagtcgggtttggag

SEQ ID NO: 5130291 - DNA, 25 bp, Homo sapien
gggtctgcatctccgagagtggcca

SEQ ID NO: 5130292 - DNA, 25 bp, Homo sapien
ccaggatggtgttggaccacctgca

SEQ ID NO: 5130293 - DNA, 25 bp, Homo sapien
aggcccaggatggtgttggaccacc

SEQ ID NO: 5130294 - DNA, 25 bp, Homo sapien
actcctcgctactgtgctgaggctg

SEQ ID NO: 5130295 - DNA, 25 bp, Homo sapien
ggactcctcgctactgtgctgaggc

SEQ ID NO: 5130296 - DNA, 25 bp, Homo sapien
cagctcaaggccaggccgataggga

SEQ ID NO: 5130297 - DNA, 25 bp, Homo sapien
caaggccaggccgatagggactcca

SEQ ID NO: 5130298 - DNA, 25 bp, Homo sapien
aggccaggccgatagggactccaca

SEQ ID NO: 5130299 - DNA, 25 bp, Homo sapien
caggccgatagggactccacagagg

SEQ ID NO: 5130300 - DNA, 25 bp, Homo sapien
gtgatgaggacacagcttcgcaggt

SEQ ID NO: 5130301 - DNA, 25 bp, Homo sapien
aggacacagcttcgcaggtgggcag

SEQ ID NO: 5130302 - DNA, 25 bp, Homo sapien
acacagcttcgcaggtgggcagcca

SEQ ID NO: 5130303 - DNA, 25 bp, Homo sapien
agcttcgcaggtgggcagccacatc

SEQ ID NO: 5130304 - DNA, 25 bp, Homo sapien
ttcaacatgaaaatcatctcgggac

SEQ ID NO: 5130305 - DNA, 25 bp, Homo sapien
aattcaacatgaaaatcatctcggg

SEQ ID NO: 5130306 - DNA, 25 bp, Homo sapien
caattcaacatgaaaatcatctcgg

SEQ ID NO: 5130307 - DNA, 25 bp, Homo sapien
caacatgaaaatcatctcgggactg

SEQ ID NO: 5130308 - DNA, 25 bp, Homo sapien
ctaaattgatgagacttaaacccac

SEQ ID NO: 5130309 - DNA, 25 bp, Homo sapien
acttaacagctaaactccctagtca

SEQ ID NO: 5130310 - DNA, 25 bp, Homo sapien
tccctagtcaactggttttaatcta

SEQ ID NO: 5130311 - DNA, 25 bp, Homo sapien
taaattgatgagacttaaacccacg

SEQ ID NO: 5130312 - DNA, 25 bp, Homo sapien
caggcagcaccttcaaaggcaaagt

SEQ ID NO: 5130313 - DNA, 25 bp, Homo sapien
tcaggcagcaccttcaaaggcaaag

SEQ ID NO: 5130314 - DNA, 25 bp, Homo sapien
tactgtttttcggatgctatcgaaa

SEQ ID NO: 5130315 - DNA, 25 bp, Homo sapien
ttttcggatgctatcgaaactttgg

SEQ ID NO: 5130316 - DNA, 25 bp, Homo sapien
gctatcgaaactttggaaatcatgg

SEQ ID NO: 5130317 - DNA, 25 bp, Homo sapien
cggatgctatcgaaactttggaaat

SEQ ID NO: 5130318 - DNA, 25 bp, Homo sapien
tataattgggctacaaagctacaaa

SEQ ID NO: 5130319 - DNA, 25 bp, Homo sapien
tcctgacagcctcatacttgtttcc

SEQ ID NO: 5130320 - DNA, 25 bp, Homo sapien
ccccaagttttgtgtgcaatacatt

SEQ ID NO: 5130321 - DNA, 25 bp, Homo sapien
gcctcatacttgtttccatgtggtg

SEQ ID NO: 5130322 - DNA, 25 bp, Homo sapien
tacagttttgcgattaaataggaca

SEQ ID NO: 5130323 - DNA, 25 bp, Homo sapien
tccagaggacactcgtgaagccagt

SEQ ID NO: 5130324 - DNA, 25 bp, Homo sapien
gcaaacaagctgctaaataagtcac

SEQ ID NO: 5130325 - DNA, 25 bp, Homo sapien
aagtcacaagcgtgttctcatacag

SEQ ID NO: 5130326 - DNA, 25 bp, Homo sapien
gtgagcatttgtttcctcggaagta

SEQ ID NO: 5130327 - DNA, 25 bp, Homo sapien
agtgagcatttgtttcctcggaagt

SEQ ID NO: 5130328 - DNA, 25 bp, Homo sapien
cagtgagcatttgtttcctcggaag

SEQ ID NO: 5130329 - DNA, 25 bp, Homo sapien
aatccagagaattgtaaatcatgcc

SEQ ID NO: 5130330 - DNA, 25 bp, Homo sapien
tccagagaattgtaaatcatgccaa

SEQ ID NO: 5130331 - DNA, 25 bp, Homo sapien
gcccccagacctgttaggtagtaga

SEQ ID NO: 5130332 - DNA, 25 bp, Homo sapien
ccccagacctgttaggtagtagatt

SEQ ID NO: 5130333 - DNA, 25 bp, Homo sapien
gacctgttaggtagtagatttgtgg

SEQ ID NO: 5130334 - DNA, 25 bp, Homo sapien
cagacctgttaggtagtagatttgt

SEQ ID NO: 5130335 - DNA, 25 bp, Homo sapien
cacatagtatcatggggttttgaag

SEQ ID NO: 5130336 - DNA, 25 bp, Homo sapien
ttgggggcaaacacatagtatcatg

SEQ ID NO: 5130337 - DNA, 25 bp, Homo sapien
gggggcaaacacatagtatcatggg

SEQ ID NO: 5130338 - DNA, 25 bp, Homo sapien
ggcaaacacatagtatcatggggtt

SEQ ID NO: 5130339 - DNA, 25 bp, Homo sapien
cttccactacatgcactgggtgcca

SEQ ID NO: 5130340 - DNA, 25 bp, Homo sapien
ttacagtgcaagacacacagtgtga

SEQ ID NO: 5130341 - DNA, 25 bp, Homo sapien
ggacacggccatatattacagtgca

SEQ ID NO: 5130342 - DNA, 25 bp, Homo sapien
gaccgcaggcatgtctacagacaca

SEQ ID NO: 5130343 - DNA, 25 bp, Homo sapien
tttgcaacataaagctcctggatgc

SEQ ID NO: 5130344 - DNA, 25 bp, Homo sapien
aggaaatgggtcacgctcctgacac

SEQ ID NO: 5130345 - DNA, 25 bp, Homo sapien
aaatgggtcacgctcctgacactcc

SEQ ID NO: 5130346 - DNA, 25 bp, Homo sapien
gatgcagttgtctgtgaagccagca

SEQ ID NO: 5130347 - DNA, 25 bp, Homo sapien
tgtatttggcaagaatggcatttac

SEQ ID NO: 5130348 - DNA, 25 bp, Homo sapien
aaagcctgtggagaagccaagtgca

SEQ ID NO: 5130349 - DNA, 25 bp, Homo sapien
ccgatttctgctaagatactgtggg

SEQ ID NO: 5130350 - DNA, 25 bp, Homo sapien
tacctgtaagtactgggcatatgtg

SEQ ID NO: 5130351 - DNA, 25 bp, Homo sapien
cctaagtaccacagagtgggctctg

SEQ ID NO: 5130352 - DNA, 25 bp, Homo sapien
catcccgtctcttccctaagtacca

SEQ ID NO: 5130353 - DNA, 25 bp, Homo sapien
tccctaagtaccacagagtgggctc

SEQ ID NO: 5130354 - DNA, 25 bp, Homo sapien
cccgtctcttccctaagtaccacag

SEQ ID NO: 5130355 - DNA, 25 bp, Homo sapien
gattctagaccaccaagaaacacgc

SEQ ID NO: 5130356 - DNA, 25 bp, Homo sapien
gaccaccaagaggttctcaggaacc

SEQ ID NO: 5130357 - DNA, 25 bp, Homo sapien
gaaccaccaggggtaacatgaccac

SEQ ID NO: 5130358 - DNA, 25 bp, Homo sapien
gggacacagaatcacgatggtggat

SEQ ID NO: 5130359 - DNA, 25 bp, Homo sapien
acaccagggggtactgaagacacca

SEQ ID NO: 5130360 - DNA, 25 bp, Homo sapien
caggacaccagggggtactgaagac

SEQ ID NO: 5130361 - DNA, 25 bp, Homo sapien
ggacaccagggggtactgaagacac

SEQ ID NO: 5130362 - DNA, 25 bp, Homo sapien
tcaggacaccagggggtactgaaga

SEQ ID NO: 5130363 - DNA, 25 bp, Homo sapien
ccagaaggaggtgcttagagcccac

SEQ ID NO: 5130364 - DNA, 25 bp, Homo sapien
cagtcagggagcctttgaccaccat

SEQ ID NO: 5130365 - DNA, 25 bp, Homo sapien
cacccaaggcagaggtccagtgagg

SEQ ID NO: 5130366 - DNA, 25 bp, Homo sapien
cacaggtagcagatgaccagaagga

SEQ ID NO: 5130367 - DNA, 25 bp, Homo sapien
ggccagatgtacaagtaaacgtttc

SEQ ID NO: 5130368 - DNA, 25 bp, Homo sapien
ggaagcacagcgcacaaggtgagat

SEQ ID NO: 5130369 - DNA, 25 bp, Homo sapien
gggagatccaaggcgcagctcccag

SEQ ID NO: 5130370 - DNA, 25 bp, Homo sapien
taaacgtttcagaagcagattcccc

SEQ ID NO: 5130371 - DNA, 25 bp, Homo sapien
gcaggtaagaactcagtcttgattt

SEQ ID NO: 5130372 - DNA, 25 bp, Homo sapien
tgcaggtaagaactcagtcttgatt

SEQ ID NO: 5130373 - DNA, 25 bp, Homo sapien
caggtaagaactcagtcttgatttt

SEQ ID NO: 5130374 - DNA, 25 bp, Homo sapien
ctgcaggtaagaactcagtcttgat

SEQ ID NO: 5130375 - DNA, 25 bp, Homo sapien
gggaaaatgcacaagggtgaaatga

SEQ ID NO: 5130376 - DNA, 25 bp, Homo sapien
aaatgcacaagggtgaaatgaagct

SEQ ID NO: 5130377 - DNA, 25 bp, Homo sapien
ttgagggaaaatgcacaagggtgaa

SEQ ID NO: 5130378 - DNA, 25 bp, Homo sapien
gagggaaaatgcacaagggtgaaat

SEQ ID NO: 5130379 - DNA, 25 bp, Homo sapien
aggcttctccaaggcacacacactt

SEQ ID NO: 5130380 - DNA, 25 bp, Homo sapien
cagggcaggtctgtgagctgcacct

SEQ ID NO: 5130381 - DNA, 25 bp, Homo sapien
tgagctgcaccttccctaggcttct

SEQ ID NO: 5130382 - DNA, 25 bp, Homo sapien
accttccctaggcttctccaaggca

SEQ ID NO: 5130383 - DNA, 25 bp, Homo sapien
ccttcagcttgtaaaatagccgatg

SEQ ID NO: 5130384 - DNA, 25 bp, Homo sapien
cagtcactgggtgagctgtcagctt

SEQ ID NO: 5130385 - DNA, 25 bp, Homo sapien
tgagttgacttgcaccacacaggta

SEQ ID NO: 5130386 - DNA, 25 bp, Homo sapien
gtaacggcgtggtcgtcccttagca

SEQ ID NO: 5130387 - DNA, 25 bp, Homo sapien
tagctcgggatgaacttctaagacc

SEQ ID NO: 5130388 - DNA, 25 bp, Homo sapien
agagtaaaagcagccgccggttgga

SEQ ID NO: 5130389 - DNA, 25 bp, Homo sapien
gacatgataaatgtgtcgagctgga

SEQ ID NO: 5130390 - DNA, 25 bp, Homo sapien
tactggccatttgggtaagacatga

SEQ ID NO: 5130391 - DNA, 25 bp, Homo sapien
tcaggaatcagtccaaccagaccca

SEQ ID NO: 5130392 - DNA, 25 bp, Homo sapien
caggaatcagtccaaccagacccag

SEQ ID NO: 5130393 - DNA, 25 bp, Homo sapien
cctcaggaatcagtccaaccagacc

SEQ ID NO: 5130394 - DNA, 25 bp, Homo sapien
aggaatcagtccaaccagacccagg

SEQ ID NO: 5130395 - DNA, 25 bp, Homo sapien
tagcatgcctggttgtctgtcttgg

SEQ ID NO: 5130396 - DNA, 25 bp, Homo sapien
ttgccttctggtagcatgcctggtt

SEQ ID NO: 5130397 - DNA, 25 bp, Homo sapien
tcagggcacccgtcatttctgtggg

SEQ ID NO: 5130398 - DNA, 25 bp, Homo sapien
cgggtccagcaggtccgactgcctg

SEQ ID NO: 5130399 - DNA, 25 bp, Homo sapien
tcgctgacgctgtggaatagtactc

SEQ ID NO: 5130400 - DNA, 25 bp, Homo sapien
tttggagcctccagatcatagcatc

SEQ ID NO: 5130401 - DNA, 25 bp, Homo sapien
tctggtcaccaactggacaatatag

SEQ ID NO: 5130402 - DNA, 25 bp, Homo sapien
tggcacattccctgtttctcgctga

SEQ ID NO: 5130403 - DNA, 25 bp, Homo sapien
ttcttttgcaaaatccaaacaagga

SEQ ID NO: 5130404 - DNA, 25 bp, Homo sapien
aatccaaacaaggaagacaacagga

SEQ ID NO: 5130405 - DNA, 25 bp, Homo sapien
gcaaaatccaaacaaggaagacaac

SEQ ID NO: 5130406 - DNA, 25 bp, Homo sapien
tggaactctccaggaatcatttctt

SEQ ID NO: 5130407 - DNA, 25 bp, Homo sapien
ctggagaatgtagagcagcgtggtg

SEQ ID NO: 5130408 - DNA, 25 bp, Homo sapien
tgatggtgttgaaggtggtgaagag

SEQ ID NO: 5130409 - DNA, 25 bp, Homo sapien
tcagcctggcgcctgtgcatcagtg

SEQ ID NO: 5130410 - DNA, 25 bp, Homo sapien
tcagtggtaatagatgctgaaggct

SEQ ID NO: 5130411 - DNA, 25 bp, Homo sapien
gggggactcgccttgtctgtccaag

SEQ ID NO: 5130412 - DNA, 25 bp, Homo sapien
tggtgggggactcgccttgtctgtc

SEQ ID NO: 5130413 - DNA, 25 bp, Homo sapien
cctggtgggggactcgccttgtctg

SEQ ID NO: 5130414 - DNA, 25 bp, Homo sapien
gtgggggactcgccttgtctgtcca

SEQ ID NO: 5130415 - DNA, 25 bp, Homo sapien
attcccgtgcggctgctgccgatgt

SEQ ID NO: 5130416 - DNA, 25 bp, Homo sapien
ggaaattcccgtgcggctgctgccg

SEQ ID NO: 5130417 - DNA, 25 bp, Homo sapien
ctggagtgaagtaaaggggcggtgg

SEQ ID NO: 5130418 - DNA, 25 bp, Homo sapien
gtgggaaattcccgtgcggctgctg

SEQ ID NO: 5130419 - DNA, 25 bp, Homo sapien
aacactggatccagtttttatcacc

SEQ ID NO: 5130420 - DNA, 25 bp, Homo sapien
tgccctggaagtaagtaaccagaac

SEQ ID NO: 5130421 - DNA, 25 bp, Homo sapien
actggatccagtttttatcacccaa

SEQ ID NO: 5130422 - DNA, 25 bp, Homo sapien
gccctggaagtaagtaaccagaaca

SEQ ID NO: 5130423 - DNA, 25 bp, Homo sapien
gcttctggttggtggatagagtcat

SEQ ID NO: 5130424 - DNA, 25 bp, Homo sapien
gcttgggggctcttccttgcaacca

SEQ ID NO: 5130425 - DNA, 25 bp, Homo sapien
tgggggctcttccttgcaaccaatg

SEQ ID NO: 5130426 - DNA, 25 bp, Homo sapien
ctcttccttgcaaccaatgacttac

SEQ ID NO: 5130427 - DNA, 25 bp, Homo sapien
tgtgagcttgttggggcttgggggc

SEQ ID NO: 5130428 - DNA, 25 bp, Homo sapien
caggggaggtcagagtctgaccccc

SEQ ID NO: 5130429 - DNA, 25 bp, Homo sapien
aggtgagtcctgggccactctggca

SEQ ID NO: 5130430 - DNA, 25 bp, Homo sapien
tggtctgcaggactggagaccagca

SEQ ID NO: 5130431 - DNA, 25 bp, Homo sapien
gaccagcagggctgaggtgagtcct

SEQ ID NO: 5130432 - DNA, 25 bp, Homo sapien
aaggggtcactgtggccttgcgatg

SEQ ID NO: 5130433 - DNA, 25 bp, Homo sapien
atgggccatgggctccgtgtgccca

SEQ ID NO: 5130434 - DNA, 25 bp, Homo sapien
tgcctccagggacaatgatccgcat

SEQ ID NO: 5130435 - DNA, 25 bp, Homo sapien
gggccatgggctccgtgtgcccact

SEQ ID NO: 5130436 - DNA, 25 bp, Homo sapien
cctttgatgggccatgggctccgtg

SEQ ID NO: 5130437 - DNA, 25 bp, Homo sapien
caattgccagtcaaatgccagctcc

SEQ ID NO: 5130438 - DNA, 25 bp, Homo sapien
tcaagatgggcaattgccagtcaaa

SEQ ID NO: 5130439 - DNA, 25 bp, Homo sapien
tgcagacatcggcagcctcccaaat

SEQ ID NO: 5130440 - DNA, 25 bp, Homo sapien
gctccatgcagacatcggcagcctc

SEQ ID NO: 5130441 - DNA, 25 bp, Homo sapien
gctcgttagttggacctgctggcct

SEQ ID NO: 5130442 - DNA, 25 bp, Homo sapien
caagccttaaagcaaggtggccaca

SEQ ID NO: 5130443 - DNA, 25 bp, Homo sapien
tggcctctgagaggacatcttcttc

SEQ ID NO: 5130444 - DNA, 25 bp, Homo sapien
caggagaccgtcctgggaacaagcc

SEQ ID NO: 5130445 - DNA, 25 bp, Homo sapien
tctttgcctgcctgttgactgccgg

SEQ ID NO: 5130446 - DNA, 25 bp, Homo sapien
gacgttaccagaagagattcatcgc

SEQ ID NO: 5130447 - DNA, 25 bp, Homo sapien
gcaggtcggccttgaatccatgcga

SEQ ID NO: 5130448 - DNA, 25 bp, Homo sapien
ccatgcgacaggaagggacgttacc

SEQ ID NO: 5130449 - DNA, 25 bp, Homo sapien
gagcgccgctcagactccgcgcaga

SEQ ID NO: 5130450 - DNA, 25 bp, Homo sapien
ctggcgtcggccttgggacgggacg

SEQ ID NO: 5130451 - DNA, 25 bp, Homo sapien
gcagacctctcgctggctccgcgga

SEQ ID NO: 5130452 - DNA, 25 bp, Homo sapien
tggctccgcggagcccagtggcctg

SEQ ID NO: 5130453 - DNA, 25 bp, Homo sapien
tgaagagcaagtcgggcaaggtggt

SEQ ID NO: 5130454 - DNA, 25 bp, Homo sapien
gtgaagaccgagaagccactgggca

SEQ ID NO: 5130455 - DNA, 25 bp, Homo sapien
agcaagtcgggcaaggtggtgaaga

SEQ ID NO: 5130456 - DNA, 25 bp, Homo sapien
aagatgaagagcaagtcgggcaagg

SEQ ID NO: 5130457 - DNA, 25 bp, Homo sapien
tcccttccccggccaggagccactc

SEQ ID NO: 5130458 - DNA, 25 bp, Homo sapien
cccttccccggccaggagccactca

SEQ ID NO: 5130459 - DNA, 25 bp, Homo sapien
ccttccccggccaggagccactcac

SEQ ID NO: 5130460 - DNA, 25 bp, Homo sapien
tgcaccagttctggcattgccccat

SEQ ID NO: 5130461 - DNA, 25 bp, Homo sapien
caccagttctggcattgccccatcc

SEQ ID NO: 5130462 - DNA, 25 bp, Homo sapien
gacagaaagggtgcctttgcaccag

SEQ ID NO: 5130463 - DNA, 25 bp, Homo sapien
tttgcaccagttctggcattgcccc

SEQ ID NO: 5130464 - DNA, 25 bp, Homo sapien
tgagtgtgagcgctgctggcagcag

SEQ ID NO: 5130465 - DNA, 25 bp, Homo sapien
gagtgtgagcgctgctggcagcagc

SEQ ID NO: 5130466 - DNA, 25 bp, Homo sapien
gtgtgagcgctgctggcagcagcat

SEQ ID NO: 5130467 - DNA, 25 bp, Homo sapien
ctgagtgtgagcgctgctggcagca

SEQ ID NO: 5130468 - DNA, 25 bp, Homo sapien
tcaacaccaggagggtacaccctct

SEQ ID NO: 5130469 - DNA, 25 bp, Homo sapien
ggcctgctggtccaaagcaccatgt

SEQ ID NO: 5130470 - DNA, 25 bp, Homo sapien
caaagcaccatgtccggcactgaca

SEQ ID NO: 5130471 - DNA, 25 bp, Homo sapien
cttcaaggacaaggggcacagtccc

SEQ ID NO: 5130472 - DNA, 25 bp, Homo sapien
tgtaggcacgagacagacaataagc

SEQ ID NO: 5130473 - DNA, 25 bp, Homo sapien
cagacttagggtgtaggcacgagac

SEQ ID NO: 5130474 - DNA, 25 bp, Homo sapien
cagagttcttgatctgtgccaggga

SEQ ID NO: 5130475 - DNA, 25 bp, Homo sapien
gagttcttgatctgtgccagggatg

SEQ ID NO: 5130476 - DNA, 25 bp, Homo sapien
caggcctggtgaaagtgtcagtgtc

SEQ ID NO: 5130477 - DNA, 25 bp, Homo sapien
tacagagcccggtagttggcacaag

SEQ ID NO: 5130478 - DNA, 25 bp, Homo sapien
caaacgtcacacaggacaggtacag

SEQ ID NO: 5130479 - DNA, 25 bp, Homo sapien
tcagtgtctgagcaatggtgaccag

SEQ ID NO: 5130480 - DNA, 25 bp, Homo sapien
tcagcactgcccaggagatgcccag

SEQ ID NO: 5130481 - DNA, 25 bp, Homo sapien
gatgaagactattttccagctccct

SEQ ID NO: 5130482 - DNA, 25 bp, Homo sapien
tattttccagctccctgggaaattc

SEQ ID NO: 5130483 - DNA, 25 bp, Homo sapien
ctgatgaagactattttccagctcc

SEQ ID NO: 5130484 - DNA, 25 bp, Homo sapien
tttccagctccctgggaaattccat

SEQ ID NO: 5130485 - DNA, 25 bp, Homo sapien
tgggtgagagataccgctgtcttca

SEQ ID NO: 5130486 - DNA, 25 bp, Homo sapien
ctgctgggtgagagataccgctgtc

SEQ ID NO: 5130487 - DNA, 25 bp, Homo sapien
gataccgctgtcttcacaggtgttc

SEQ ID NO: 5130488 - DNA, 25 bp, Homo sapien
tgagagataccgctgtcttcacagg

SEQ ID NO: 5130489 - DNA, 25 bp, Homo sapien
caattatgtacaggatgatcaaggt

SEQ ID NO: 5130490 - DNA, 25 bp, Homo sapien
ctccaccgtgggctccaattatgta

SEQ ID NO: 5130491 - DNA, 25 bp, Homo sapien
agcagaacacagacacgaacatcac

SEQ ID NO: 5130492 - DNA, 25 bp, Homo sapien
agaacacagacacgaacatcaccca

SEQ ID NO: 5130493 - DNA, 25 bp, Homo sapien
tggagcccaacaccttggtcggcct

SEQ ID NO: 5130494 - DNA, 25 bp, Homo sapien
cctgctgccttgaggtgaaaacagc

SEQ ID NO: 5130495 - DNA, 25 bp, Homo sapien
tctggcagccctgcttggaaggcag

SEQ ID NO: 5130496 - DNA, 25 bp, Homo sapien
tggacagtaagcatggcctgaccct

SEQ ID NO: 5130497 - DNA, 25 bp, Homo sapien
gctgaggtaaaagagggcagcggtg

SEQ ID NO: 5130498 - DNA, 25 bp, Homo sapien
aggactgaggcgctgaggtaaaaga

SEQ ID NO: 5130499 - DNA, 25 bp, Homo sapien
taggtgaagccgtcttgcatcgtga

SEQ ID NO: 5130500 - DNA, 25 bp, Homo sapien
gttttcatggtagtgcctgtaggtg

SEQ ID NO: 5130501 - DNA, 25 bp, Homo sapien
gccgcccgctgtggacacagcccca

SEQ ID NO: 5130502 - DNA, 25 bp, Homo sapien
acggagccgcccgctgtggacacag

SEQ ID NO: 5130503 - DNA, 25 bp, Homo sapien
cacagccccaggtgcccggactcac

SEQ ID NO: 5130504 - DNA, 25 bp, Homo sapien
ccacggagccgcccgctgtggacac

SEQ ID NO: 5130505 - DNA, 25 bp, Homo sapien
tgtgactttacatcgaacgccgtgc

SEQ ID NO: 5130506 - DNA, 25 bp, Homo sapien
gatgttggtctattcctacaaggga

SEQ ID NO: 5130507 - DNA, 25 bp, Homo sapien
tcctgtctgcgtgaacatattcgtg

SEQ ID NO: 5130508 - DNA, 25 bp, Homo sapien
ccagccacttgggtgagtctcacaa

SEQ ID NO: 5130509 - DNA, 25 bp, Homo sapien
ccgcatggaccacgtagagcagagt

SEQ ID NO: 5130510 - DNA, 25 bp, Homo sapien
gcagagtggctatgtaggagaacac

SEQ ID NO: 5130511 - DNA, 25 bp, Homo sapien
ccacgtagagcagagtggctatgta

SEQ ID NO: 5130512 - DNA, 25 bp, Homo sapien
tgattaaagagaacaccgcatggac

SEQ ID NO: 5130513 - DNA, 25 bp, Homo sapien
ccaacaggtagttctcgagagctgc

SEQ ID NO: 5130514 - DNA, 25 bp, Homo sapien
ggcacacgggagagtaaacacagca

SEQ ID NO: 5130515 - DNA, 25 bp, Homo sapien
caaacaggaggtgaccctagcagac

SEQ ID NO: 5130516 - DNA, 25 bp, Homo sapien
cagcagttggaggttagacacagca

SEQ ID NO: 5130517 - DNA, 25 bp, Homo sapien
gaggttgcagatgctctaccacaca

SEQ ID NO: 5130518 - DNA, 25 bp, Homo sapien
gaagctcacgggtcttcaagcacct

SEQ ID NO: 5130519 - DNA, 25 bp, Homo sapien
tacatgacaccgttacagcctgaag

SEQ ID NO: 5130520 - DNA, 25 bp, Homo sapien
gcactaacttctcggagccatggga

SEQ ID NO: 5130521 - DNA, 25 bp, Homo sapien
ggagcagcacccatggctggcaggg

SEQ ID NO: 5130522 - DNA, 25 bp, Homo sapien
ccaggcatcgtgggctcccagggga

SEQ ID NO: 5130523 - DNA, 25 bp, Homo sapien
gggctgccgccagcactcatgtgta

SEQ ID NO: 5130524 - DNA, 25 bp, Homo sapien
tcccaggggagcagcacccatggct

SEQ ID NO: 5130525 - DNA, 25 bp, Homo sapien
agtgagggccacaagcaggcagtct

SEQ ID NO: 5130526 - DNA, 25 bp, Homo sapien
ctaagtgagggccacaagcaggcag

SEQ ID NO: 5130527 - DNA, 25 bp, Homo sapien
cagtctgtgagtgccttgggtggca

SEQ ID NO: 5130528 - DNA, 25 bp, Homo sapien
ccaggctctgccttagaggaggtcc

SEQ ID NO: 5130529 - DNA, 25 bp, Homo sapien
cggccccagttgatacccagaacaa

SEQ ID NO: 5130530 - DNA, 25 bp, Homo sapien
aggcagccttcaatcctccatttgg

SEQ ID NO: 5130531 - DNA, 25 bp, Homo sapien
acaggcccttgtgtgggccccgaag

SEQ ID NO: 5130532 - DNA, 25 bp, Homo sapien
tctttaaggtcagcgtaaggcagcc

SEQ ID NO: 5130533 - DNA, 25 bp, Homo sapien
cccaaggaaggggcgctttcatcca

SEQ ID NO: 5130534 - DNA, 25 bp, Homo sapien
acagctgtcagtgtgctggtgccca

SEQ ID NO: 5130535 - DNA, 25 bp, Homo sapien
gctgtcagtgtgctggtgcccaagg

SEQ ID NO: 5130536 - DNA, 25 bp, Homo sapien
ccaaggaaggggcgctttcatccat

SEQ ID NO: 5130537 - DNA, 25 bp, Homo sapien
gggcgaccccgaagggagcagaaca

SEQ ID NO: 5130538 - DNA, 25 bp, Homo sapien
ctgagattggactggatgccgtggg

SEQ ID NO: 5130539 - DNA, 25 bp, Homo sapien
tgctgagattggactggatgccgtg

SEQ ID NO: 5130540 - DNA, 25 bp, Homo sapien
gcgaccccgaagggagcagaacagc

SEQ ID NO: 5130541 - DNA, 25 bp, Homo sapien
ttcttggcatctaccccgagaaacg

SEQ ID NO: 5130542 - DNA, 25 bp, Homo sapien
gattcatgatagtcctggtactgtt

SEQ ID NO: 5130543 - DNA, 25 bp, Homo sapien
tgcatctatccagacgtgcagagtt

SEQ ID NO: 5130544 - DNA, 25 bp, Homo sapien
cccgagaaacgctcccagaagggat

SEQ ID NO: 5130545 - DNA, 25 bp, Homo sapien
gagcattcggacactgctggccttc

SEQ ID NO: 5130546 - DNA, 25 bp, Homo sapien
agaatttcccagctgggcgcctggg

SEQ ID NO: 5130547 - DNA, 25 bp, Homo sapien
catctgagagcattcggacactgct

SEQ ID NO: 5130548 - DNA, 25 bp, Homo sapien
tcaggtgtccggtgtgctctcctct

SEQ ID NO: 5130549 - DNA, 25 bp, Homo sapien
gctcccagggttgggcagggtgtcc

SEQ ID NO: 5130550 - DNA, 25 bp, Homo sapien
ctgctcccagggttgggcagggtgt

SEQ ID NO: 5130551 - DNA, 25 bp, Homo sapien
gttgggcagggtgtccctcccagca

SEQ ID NO: 5130552 - DNA, 25 bp, Homo sapien
agggtgtccctcccagcagagccat

SEQ ID NO: 5130553 - DNA, 25 bp, Homo sapien
ggagggggaattgccaccagcacat

SEQ ID NO: 5130554 - DNA, 25 bp, Homo sapien
ccctggagaagtcgcttggggcaga

SEQ ID NO: 5130555 - DNA, 25 bp, Homo sapien
agcacatccaagatcattcctagaa

SEQ ID NO: 5130556 - DNA, 25 bp, Homo sapien
tccaagatcattcctagaaggcaag

SEQ ID NO: 5130557 - DNA, 25 bp, Homo sapien
gacaaacagcagctcagctcctaga

SEQ ID NO: 5130558 - DNA, 25 bp, Homo sapien
ctgcaggggacaaacagcagctcag

SEQ ID NO: 5130559 - DNA, 25 bp, Homo sapien
caggggacaaacagcagctcagctc

SEQ ID NO: 5130560 - DNA, 25 bp, Homo sapien
acaaacagcagctcagctcctagac

SEQ ID NO: 5130561 - DNA, 25 bp, Homo sapien
cagccagtgtagcatgggtggagag

SEQ ID NO: 5130562 - DNA, 25 bp, Homo sapien
ctgctgtgtgtcattggtggctgat

SEQ ID NO: 5130563 - DNA, 25 bp, Homo sapien
gtcagccagtgtagcatgggtggag

SEQ ID NO: 5130564 - DNA, 25 bp, Homo sapien
tcctgctgtgtgtcattggtggctg

SEQ ID NO: 5130565 - DNA, 25 bp, Homo sapien
cactgaagcatttttatggtggctg

SEQ ID NO: 5130566 - DNA, 25 bp, Homo sapien
gagtgtttataattgctcactgaag

SEQ ID NO: 5130567 - DNA, 25 bp, Homo sapien
ggatcatttgattgcaggaggttga

SEQ ID NO: 5130568 - DNA, 25 bp, Homo sapien
aatctttgtcatcaggtaggtgtgg

SEQ ID NO: 5130569 - DNA, 25 bp, Homo sapien
tctaatttgaagagagccgccacgt

SEQ ID NO: 5130570 - DNA, 25 bp, Homo sapien
tgtgctgccctgcacctaggagaga

SEQ ID NO: 5130571 - DNA, 25 bp, Homo sapien
gactgggaagatgtgaagactgcac

SEQ ID NO: 5130572 - DNA, 25 bp, Homo sapien
ccagaagatgaggttccagacgtca

SEQ ID NO: 5130573 - DNA, 25 bp, Homo sapien
taaattatgagagcttgaacaccat

SEQ ID NO: 5130574 - DNA, 25 bp, Homo sapien
cagaagttttaagctctgtggcaaa

SEQ ID NO: 5130575 - DNA, 25 bp, Homo sapien
tatcagtcttatatcactacagggt

SEQ ID NO: 5130576 - DNA, 25 bp, Homo sapien
gatctgttcgttatatgctttgccc

SEQ ID NO: 5130577 - DNA, 25 bp, Homo sapien
ccttgattcgttgtactggttgcaa

SEQ ID NO: 5130578 - DNA, 25 bp, Homo sapien
tacttctgcaagtatatcaataggg

SEQ ID NO: 5130579 - DNA, 25 bp, Homo sapien
cagtaaaattgctgccccaaggtta

SEQ ID NO: 5130580 - DNA, 25 bp, Homo sapien
gataaatattcctagattgcctccc

SEQ ID NO: 5130581 - DNA, 25 bp, Homo sapien
ctgaattgctttggcctcttagtaa

SEQ ID NO: 5130582 - DNA, 25 bp, Homo sapien
tataaggttcaggttgtggcttgct

SEQ ID NO: 5130583 - DNA, 25 bp, Homo sapien
cacccgacactggaaagaagagctc

SEQ ID NO: 5130584 - DNA, 25 bp, Homo sapien
tggtgaggcgaagattccagctctg

SEQ ID NO: 5130585 - DNA, 25 bp, Homo sapien
taaatatgagtgacctgtaggcaca

SEQ ID NO: 5130586 - DNA, 25 bp, Homo sapien
gaggacattaccaaacacgggagtg

SEQ ID NO: 5130587 - DNA, 25 bp, Homo sapien
taacatggcaaaggtacgtgagagg

SEQ ID NO: 5130588 - DNA, 25 bp, Homo sapien
tgtttcctgaaccagatgacaatgg

SEQ ID NO: 5130589 - DNA, 25 bp, Homo sapien
gaaatggcagatcttcagaaacaaa

SEQ ID NO: 5130590 - DNA, 25 bp, Homo sapien
gatctcaaaaacgtgattctaagtg

SEQ ID NO: 5130591 - DNA, 25 bp, Homo sapien
taactgcaaatgttacaaggaatct

SEQ ID NO: 5130592 - DNA, 25 bp, Homo sapien
gtattatgcacaatccagatctcaa

SEQ ID NO: 5130593 - DNA, 25 bp, Homo sapien
tttttggttcggagcaccgaagatg

SEQ ID NO: 5130594 - DNA, 25 bp, Homo sapien
tttggttcggagcaccgaagatgga

SEQ ID NO: 5130595 - DNA, 25 bp, Homo sapien
ttttggttcggagcaccgaagatgg

SEQ ID NO: 5130596 - DNA, 25 bp, Homo sapien
ctttttggttcggagcaccgaagat

SEQ ID NO: 5130597 - DNA, 25 bp, Homo sapien
ctccagtatccgatgggagcgccgt

SEQ ID NO: 5130598 - DNA, 25 bp, Homo sapien
tatggtcaccctgaagtactgcctg

SEQ ID NO: 5130599 - DNA, 25 bp, Homo sapien
tgatcatggtgcctcgtgtccagct

SEQ ID NO: 5130600 - DNA, 25 bp, Homo sapien
gaccgagacgaaatcgagtcagctg

SEQ ID NO: 5130601 - DNA, 25 bp, Homo sapien
cgactgcgctcccaatcaatgcggg

SEQ ID NO: 5130602 - DNA, 25 bp, Homo sapien
aaaatgtgtgcaaacgccggcttcc

SEQ ID NO: 5130603 - DNA, 25 bp, Homo sapien
ttcatctcccagaagtctcggcgtc

SEQ ID NO: 5130604 - DNA, 25 bp, Homo sapien
tccggtgcgctttaatatgacgtcc

SEQ ID NO: 5130605 - DNA, 25 bp, Homo sapien
gtcgggaaaccaacgcgcctgcgca

SEQ ID NO: 5130606 - DNA, 25 bp, Homo sapien
tcaggtcgggaaaccaacgcgcctg

SEQ ID NO: 5130607 - DNA, 25 bp, Homo sapien
tcgggaaaccaacgcgcctgcgcac

SEQ ID NO: 5130608 - DNA, 25 bp, Homo sapien
aggtcgggaaaccaacgcgcctgcg

SEQ ID NO: 5130609 - DNA, 25 bp, Homo sapien
ctccggcacagagtgctcgggaccc

SEQ ID NO: 5130610 - DNA, 25 bp, Homo sapien
tccggcacagagtgctcgggacccg

SEQ ID NO: 5130611 - DNA, 25 bp, Homo sapien
agagtgctcgggacccgggaagacg

SEQ ID NO: 5130612 - DNA, 25 bp, Homo sapien
gcacagagtgctcgggacccgggaa

SEQ ID NO: 5130613 - DNA, 25 bp, Homo sapien
ccaaacagggaggactaatcagtac

SEQ ID NO: 5130614 - DNA, 25 bp, Homo sapien
gaaatgggctctactaacaatgaac

SEQ ID NO: 5130615 - DNA, 25 bp, Homo sapien
gggccacacgtaagtatcaagtaga

SEQ ID NO: 5130616 - DNA, 25 bp, Homo sapien
tacagaactacataccccaaacagg

SEQ ID NO: 5130617 - DNA, 25 bp, Homo sapien
ctctcctgtgtgctctccttgtgga

SEQ ID NO: 5130618 - DNA, 25 bp, Homo sapien
tcctgtgtgctctccttgtggacaa

SEQ ID NO: 5130619 - DNA, 25 bp, Homo sapien
ctcctgtgtgctctccttgtggaca

SEQ ID NO: 5130620 - DNA, 25 bp, Homo sapien
ctgtgtgctctccttgtggacaagg

SEQ ID NO: 5130621 - DNA, 25 bp, Homo sapien
tggtggtcggagacacagcagccat

SEQ ID NO: 5130622 - DNA, 25 bp, Homo sapien
atctggtggtcggagacacagcagc

SEQ ID NO: 5130623 - DNA, 25 bp, Homo sapien
gcatctggtggtcggagacacagca

SEQ ID NO: 5130624 - DNA, 25 bp, Homo sapien
ctggcatctggtggtcggagacaca

SEQ ID NO: 5130625 - DNA, 25 bp, Homo sapien
agtgtgtctgcaaaagttctaggcc

SEQ ID NO: 5130626 - DNA, 25 bp, Homo sapien
cacacatgaatgtaccaaagggact

SEQ ID NO: 5130627 - DNA, 25 bp, Homo sapien
cagaggtgctctacagtgtgtatca

SEQ ID NO: 5130628 - DNA, 25 bp, Homo sapien
gaatttaagactctgccctcgggca

SEQ ID NO: 5130629 - DNA, 25 bp, Homo sapien
ctgtgaaaaccacggcaacgtcttc

SEQ ID NO: 5130630 - DNA, 25 bp, Homo sapien
ccacggcaacgtcttcgaatgtcac

SEQ ID NO: 5130631 - DNA, 25 bp, Homo sapien
ggcaacgtcttcgaatgtcactgat

SEQ ID NO: 5130632 - DNA, 25 bp, Homo sapien
aaaaccacggcaacgtcttcgaatg

SEQ ID NO: 5130633 - DNA, 25 bp, Homo sapien
gggaccagacgactccactcttcat

SEQ ID NO: 5130634 - DNA, 25 bp, Homo sapien
gtatggggaccagacgactccactc

SEQ ID NO: 5130635 - DNA, 25 bp, Homo sapien
ccaatgacacaatgctgttatagtt

SEQ ID NO: 5130636 - DNA, 25 bp, Homo sapien
gacacaatgctgttatagttctcca

SEQ ID NO: 5130637 - DNA, 25 bp, Homo sapien
gatgaacatctgcatacaccatgga

SEQ ID NO: 5130638 - DNA, 25 bp, Homo sapien
caaacctggataatgaaatgacgct

SEQ ID NO: 5130639 - DNA, 25 bp, Homo sapien
gattctctgttgacaaaacggccac

SEQ ID NO: 5130640 - DNA, 25 bp, Homo sapien
tattgggcccaaggattgtctaccg

SEQ ID NO: 5130641 - DNA, 25 bp, Homo sapien
tgaagatctaccatccacggcttgt

SEQ ID NO: 5130642 - DNA, 25 bp, Homo sapien
aagatctaccatccacggcttgtcc

SEQ ID NO: 5130643 - DNA, 25 bp, Homo sapien
catgaagatctaccatccacggctt

SEQ ID NO: 5130644 - DNA, 25 bp, Homo sapien
ccatgaagatctaccatccacggct

SEQ ID NO: 5130645 - DNA, 25 bp, Homo sapien
tagagagacactctctggccattct

SEQ ID NO: 5130646 - DNA, 25 bp, Homo sapien
ctagagagacactctctggccattc

SEQ ID NO: 5130647 - DNA, 25 bp, Homo sapien
agagagacactctctggccattctc

SEQ ID NO: 5130648 - DNA, 25 bp, Homo sapien
gccattgggtgtatgaacttcaaat

SEQ ID NO: 5130649 - DNA, 25 bp, Homo sapien
caaggcattccctcaatgatccttc

SEQ ID NO: 5130650 - DNA, 25 bp, Homo sapien
catcgtgaatctcaggcttagtttc

SEQ ID NO: 5130651 - DNA, 25 bp, Homo sapien
gattttttgtctgaagcatcgtgaa

SEQ ID NO: 5130652 - DNA, 25 bp, Homo sapien
cgccgcaagcctttgtcccgggaga

SEQ ID NO: 5130653 - DNA, 25 bp, Homo sapien
tcttacgagtctcccctgaagggct

SEQ ID NO: 5130654 - DNA, 25 bp, Homo sapien
cgggagagggatttcttacgagtct

SEQ ID NO: 5130655 - DNA, 25 bp, Homo sapien
ccgcaagcctttgtcccgggagagg

SEQ ID NO: 5130656 - DNA, 25 bp, Homo sapien
ttagtgagaatttccctggacaggg

SEQ ID NO: 5130657 - DNA, 25 bp, Homo sapien
ggtgtctctctttagtgagaatttc

SEQ ID NO: 5130658 - DNA, 25 bp, Homo sapien
ctttagtgagaatttccctggacag

SEQ ID NO: 5130659 - DNA, 25 bp, Homo sapien
ctggtgtctctctttagtgagaatt

SEQ ID NO: 5130660 - DNA, 25 bp, Homo sapien
ctgatggcgggtgagggatgagtgg

SEQ ID NO: 5130661 - DNA, 25 bp, Homo sapien
gagggatgagtggtcaaaaaaggtc

SEQ ID NO: 5130662 - DNA, 25 bp, Homo sapien
gatgagtggtcaaaaaaggtcttcc

SEQ ID NO: 5130663 - DNA, 25 bp, Homo sapien
tgatggcgggtgagggatgagtggt

SEQ ID NO: 5130664 - DNA, 25 bp, Homo sapien
tttcccacactcgcggcagtcgtag

SEQ ID NO: 5130665 - DNA, 25 bp, Homo sapien
cgttacactgatagcgagggtcccc

SEQ ID NO: 5130666 - DNA, 25 bp, Homo sapien
gccggcaccgctggctaaaggcttt

SEQ ID NO: 5130667 - DNA, 25 bp, Homo sapien
tcagagacgagacaccatagaaagc

SEQ ID NO: 5130668 - DNA, 25 bp, Homo sapien
cgctgatggacagttagggacgaac

SEQ ID NO: 5130669 - DNA, 25 bp, Homo sapien
tgttgaataacagaagattttgaac

SEQ ID NO: 5130670 - DNA, 25 bp, Homo sapien
gccgttgatgttgaataacagaaga

SEQ ID NO: 5130671 - DNA, 25 bp, Homo sapien
tgatgttgaataacagaagattttg

SEQ ID NO: 5130672 - DNA, 25 bp, Homo sapien
cgttgatgttgaataacagaagatt

SEQ ID NO: 5130673 - DNA, 25 bp, Homo sapien
gcttattaaacactctggcgcagaa

SEQ ID NO: 5130674 - DNA, 25 bp, Homo sapien
gcagctttaagacaggcgagatcta

SEQ ID NO: 5130675 - DNA, 25 bp, Homo sapien
taggttctcagacaagaggtgtgtc

SEQ ID NO: 5130676 - DNA, 25 bp, Homo sapien
caagagaacaagattagtgccccaa

SEQ ID NO: 5130677 - DNA, 25 bp, Homo sapien
cactgtgtgagatacaaagacctgt

SEQ ID NO: 5130678 - DNA, 25 bp, Homo sapien
aagacctgtaagtcacacctccaag

SEQ ID NO: 5130679 - DNA, 25 bp, Homo sapien
gaaggtggacctgtcttcaagacct

SEQ ID NO: 5130680 - DNA, 25 bp, Homo sapien
aagtgcttacaatctagttgagagg

SEQ ID NO: 5130681 - DNA, 25 bp, Homo sapien
gaattagaaagctactgctgccagg

SEQ ID NO: 5130682 - DNA, 25 bp, Homo sapien
taagacagaatggttcccgtcaggt

SEQ ID NO: 5130683 - DNA, 25 bp, Homo sapien
tctgcgggcttgttactgtaccaca

SEQ ID NO: 5130684 - DNA, 25 bp, Homo sapien
cactgggaatcacgtaggacaatct

SEQ ID NO: 5130685 - DNA, 25 bp, Homo sapien
tgggtgacgactacgtggttatatg

SEQ ID NO: 5130686 - DNA, 25 bp, Homo sapien
tcttaagactcctacagctaaaggc

SEQ ID NO: 5130687 - DNA, 25 bp, Homo sapien
tgcgctcaggcttttcagggataag

SEQ ID NO: 5130688 - DNA, 25 bp, Homo sapien
tctccttgggcgcagatttcttcag

SEQ ID NO: 5130689 - DNA, 25 bp, Homo sapien
tccatctcacctgcaagaggctttc

SEQ ID NO: 5130690 - DNA, 25 bp, Homo sapien
ctcccgtcacagggcagcttttctc

SEQ ID NO: 5130691 - DNA, 25 bp, Homo sapien
cccgtcacagggcagcttttctcct

SEQ ID NO: 5130692 - DNA, 25 bp, Homo sapien
cgtcacagggcagcttttctcctat

SEQ ID NO: 5130693 - DNA, 25 bp, Homo sapien
catggtaccccgaagcctgtttggc

SEQ ID NO: 5130694 - DNA, 25 bp, Homo sapien
cacacatgctgcactcgtggagctt

SEQ ID NO: 5130695 - DNA, 25 bp, Homo sapien
gatagaggacttgcgactgagaact

SEQ ID NO: 5130696 - DNA, 25 bp, Homo sapien
tctgttgctgattaagggacgagcc

SEQ ID NO: 5130697 - DNA, 25 bp, Homo sapien
aaacatgctaagtctctctggggac

SEQ ID NO: 5130698 - DNA, 25 bp, Homo sapien
gggactgcttgtctggctgaagcac

SEQ ID NO: 5130699 - DNA, 25 bp, Homo sapien
cttgaacaaaaacatgctaagtctc

SEQ ID NO: 5130700 - DNA, 25 bp, Homo sapien
tctctggggactgcttgtctggctg

SEQ ID NO: 5130701 - DNA, 25 bp, Homo sapien
agcgactctggaagggccgctcctc

SEQ ID NO: 5130702 - DNA, 25 bp, Homo sapien
ccgcccggcgtgggacttttcgcat

SEQ ID NO: 5130703 - DNA, 25 bp, Homo sapien
ctcggtgccgactctgggcggtggc

SEQ ID NO: 5130704 - DNA, 25 bp, Homo sapien
tggctgaaccctgccagcgactctg

SEQ ID NO: 5130705 - DNA, 25 bp, Homo sapien
ctgcgtttcttgccgcggcacgctc

SEQ ID NO: 5130706 - DNA, 25 bp, Homo sapien
gtttcttgccgcggcacgctcctga

SEQ ID NO: 5130707 - DNA, 25 bp, Homo sapien
gcgtttcttgccgcggcacgctcct

SEQ ID NO: 5130708 - DNA, 25 bp, Homo sapien
gctgcgtttcttgccgcggcacgct

SEQ ID NO: 5130709 - DNA, 25 bp, Homo sapien
acaaaggcatctaacagccggcggg

SEQ ID NO: 5130710 - DNA, 25 bp, Homo sapien
ttaaaaggggatgcgttcagccctc

SEQ ID NO: 5130711 - DNA, 25 bp, Homo sapien
tcctcccggacactcagattaaaag

SEQ ID NO: 5130712 - DNA, 25 bp, Homo sapien
agccacacactgaggaagccgagcc

SEQ ID NO: 5130713 - DNA, 25 bp, Homo sapien
tccatggagactccttcctccggcc

SEQ ID NO: 5130714 - DNA, 25 bp, Homo sapien
catggagactccttcctccggcccg

SEQ ID NO: 5130715 - DNA, 25 bp, Homo sapien
ccatggagactccttcctccggccc

SEQ ID NO: 5130716 - DNA, 25 bp, Homo sapien
ttgatattttcccttgagcaaggga

SEQ ID NO: 5130717 - DNA, 25 bp, Homo sapien
ccttgagcaagggaggcatccagcg

SEQ ID NO: 5130718 - DNA, 25 bp, Homo sapien
ttatcaaaagccaaattgtcagatg

SEQ ID NO: 5130719 - DNA, 25 bp, Homo sapien
tcaaaagccaaattgtcagatgtgt

SEQ ID NO: 5130720 - DNA, 25 bp, Homo sapien
cggatagttccttcctactgcctta

SEQ ID NO: 5130721 - DNA, 25 bp, Homo sapien
gatagttccttcctactgccttatg

SEQ ID NO: 5130722 - DNA, 25 bp, Homo sapien
tagttccttcctactgccttatggg

SEQ ID NO: 5130723 - DNA, 25 bp, Homo sapien
gtcggatagttccttcctactgcct

SEQ ID NO: 5130724 - DNA, 25 bp, Homo sapien
agcacagcagtcacgtcattttctt

SEQ ID NO: 5130725 - DNA, 25 bp, Homo sapien
gcaagaccagattcctaggcttctc

SEQ ID NO: 5130726 - DNA, 25 bp, Homo sapien
cagattcctaggcttctcaggcaca

SEQ ID NO: 5130727 - DNA, 25 bp, Homo sapien
ccagcaagaccagattcctaggctt

SEQ ID NO: 5130728 - DNA, 25 bp, Homo sapien
gaccagattcctaggcttctcaggc

SEQ ID NO: 5130729 - DNA, 25 bp, Homo sapien
acaggcattgggggagccatcctta

SEQ ID NO: 5130730 - DNA, 25 bp, Homo sapien
caggcattgggggagccatccttac

SEQ ID NO: 5130731 - DNA, 25 bp, Homo sapien
actgggtaaattcacaggcattggg

SEQ ID NO: 5130732 - DNA, 25 bp, Homo sapien
tgggtaaattcacaggcattggggg

SEQ ID NO: 5130733 - DNA, 25 bp, Homo sapien
tgactggctgcctttgagacttctc

SEQ ID NO: 5130734 - DNA, 25 bp, Homo sapien
gctcttcctcatgctccaactgaga

SEQ ID NO: 5130735 - DNA, 25 bp, Homo sapien
acatcaggtgtggaaattggaagcc

SEQ ID NO: 5130736 - DNA, 25 bp, Homo sapien
attacatcaggtgtggaaattggaa

SEQ ID NO: 5130737 - DNA, 25 bp, Homo sapien
cagaaatatccttctctggagttag

SEQ ID NO: 5130738 - DNA, 25 bp, Homo sapien
cagattggtagcttctctccctaga

SEQ ID NO: 5130739 - DNA, 25 bp, Homo sapien
catggttttcctgctgactctctaa

SEQ ID NO: 5130740 - DNA, 25 bp, Homo sapien
aattaacaccccaggagccgattct

SEQ ID NO: 5130741 - DNA, 25 bp, Homo sapien
acaaattctctcatgcctaattata

SEQ ID NO: 5130742 - DNA, 25 bp, Homo sapien
cacaaattctctcatgcctaattat

SEQ ID NO: 5130743 - DNA, 25 bp, Homo sapien
agagtaaggtgtatgctctggctaa

SEQ ID NO: 5130744 - DNA, 25 bp, Homo sapien
cagagtaaggtgtatgctctggcta

SEQ ID NO: 5130745 - DNA, 25 bp, Homo sapien
gagtaaggtgtatgctctggctaaa

SEQ ID NO: 5130746 - DNA, 25 bp, Homo sapien
tgcagagtaaggtgtatgctctggc

SEQ ID NO: 5130747 - DNA, 25 bp, Homo sapien
ttcgttacactcatatggccgctcc

SEQ ID NO: 5130748 - DNA, 25 bp, Homo sapien
taagacctgaccgatcactaaaggc

SEQ ID NO: 5130749 - DNA, 25 bp, Homo sapien
cgaataagggctgagcggtcactga

SEQ ID NO: 5130750 - DNA, 25 bp, Homo sapien
tctggtgctggataagacctgaccg

SEQ ID NO: 5130751 - DNA, 25 bp, Homo sapien
ggttaaatgctcactaagagcttgg

SEQ ID NO: 5130752 - DNA, 25 bp, Homo sapien
aaggttaaatgctcactaagagctt

SEQ ID NO: 5130753 - DNA, 25 bp, Homo sapien
gccaaaggttaaatgctcactaaga

SEQ ID NO: 5130754 - DNA, 25 bp, Homo sapien
caaaggttaaatgctcactaagagc

SEQ ID NO: 5130755 - DNA, 25 bp, Homo sapien
tttagacttacagcttccaggactg

SEQ ID NO: 5130756 - DNA, 25 bp, Homo sapien
gagctgcccagtctacggatttttg

SEQ ID NO: 5130757 - DNA, 25 bp, Homo sapien
ggaactgaacgctgttggaccctga

SEQ ID NO: 5130758 - DNA, 25 bp, Homo sapien
cactctggcaaggtctcagatggca

SEQ ID NO: 5130759 - DNA, 25 bp, Homo sapien
tggccagggacctcagaacctgagg

SEQ ID NO: 5130760 - DNA, 25 bp, Homo sapien
tgtcacgggaaaggtggagcactac

SEQ ID NO: 5130761 - DNA, 25 bp, Homo sapien
tgtcaagcaccaggatgtcacggga

SEQ ID NO: 5130762 - DNA, 25 bp, Homo sapien
atcccagatcgggttctagagaagc

SEQ ID NO: 5130763 - DNA, 25 bp, Homo sapien
tacctaatagttacgtagcacctga

SEQ ID NO: 5130764 - DNA, 25 bp, Homo sapien
tccttcaaagctagatgaagcaggc

SEQ ID NO: 5130765 - DNA, 25 bp, Homo sapien
tattgggctacaccactgtgaagca

SEQ ID NO: 5130766 - DNA, 25 bp, Homo sapien
gaaggtgacttgtcccaaatctcag

SEQ ID NO: 5130767 - DNA, 25 bp, Homo sapien
taccaagagaggatacaaataagca

SEQ ID NO: 5130768 - DNA, 25 bp, Homo sapien
tcccagtttaacagatgaatgcaac

SEQ ID NO: 5130769 - DNA, 25 bp, Homo sapien
cccagaagtgcgaggattctttaac

SEQ ID NO: 5130770 - DNA, 25 bp, Homo sapien
caactcgatgaccaaaaaggataca

SEQ ID NO: 5130771 - DNA, 25 bp, Homo sapien
tattgtggtacctaacatggaaaac

SEQ ID NO: 5130772 - DNA, 25 bp, Homo sapien
tcaaagcctttatactcaatgcggg

SEQ ID NO: 5130773 - DNA, 25 bp, Homo sapien
cctggtgttggcaaattatggagca

SEQ ID NO: 5130774 - DNA, 25 bp, Homo sapien
cacaggtggaatttgttggtgcagt

SEQ ID NO: 5130775 - DNA, 25 bp, Homo sapien
gatggtcatacaactctgtgcactg

SEQ ID NO: 5130776 - DNA, 25 bp, Homo sapien
gctgaaacatctggataaccacatg

SEQ ID NO: 5130777 - DNA, 25 bp, Homo sapien
gaaacagacccgcttaactatgatc

SEQ ID NO: 5130778 - DNA, 25 bp, Homo sapien
tatctcaataagtctgtggtggagc

SEQ ID NO: 5130779 - DNA, 25 bp, Homo sapien
atatggcttgctggctattccagca

SEQ ID NO: 5130780 - DNA, 25 bp, Homo sapien
ttctgcatatggcttgctggctatt

SEQ ID NO: 5130781 - DNA, 25 bp, Homo sapien
tggcttgctggctattccagcactg

SEQ ID NO: 5130782 - DNA, 25 bp, Homo sapien
tgcatatggcttgctggctattcca

SEQ ID NO: 5130783 - DNA, 25 bp, Homo sapien
aaataatttgttgtgcttcgtgttc

SEQ ID NO: 5130784 - DNA, 25 bp, Homo sapien
aataatttgttgtgcttcgtgttct

SEQ ID NO: 5130785 - DNA, 25 bp, Homo sapien
agaaaggaacattcttcaatgggga

SEQ ID NO: 5130786 - DNA, 25 bp, Homo sapien
caatggggagttgtcgccaagagaa

SEQ ID NO: 5130787 - DNA, 25 bp, Homo sapien
acattcttcaatggggagttgtcgc

SEQ ID NO: 5130788 - DNA, 25 bp, Homo sapien
agatgcaacgagggcactctgatct

SEQ ID NO: 5130789 - DNA, 25 bp, Homo sapien
caaagtaggtgtgaggtcacctggc

SEQ ID NO: 5130790 - DNA, 25 bp, Homo sapien
cagcaaagtaggtgtgaggtcacct

SEQ ID NO: 5130791 - DNA, 25 bp, Homo sapien
aagtgggttacttcttggctgaagc

SEQ ID NO: 5130792 - DNA, 25 bp, Homo sapien
agtgggttacttcttggctgaagca

SEQ ID NO: 5130793 - DNA, 25 bp, Homo sapien
gattgcatattccaggctccattgt

SEQ ID NO: 5130794 - DNA, 25 bp, Homo sapien
ctggtgcccctacaatcaagttctg

SEQ ID NO: 5130795 - DNA, 25 bp, Homo sapien
agttggctcagggacatgtggctaa

SEQ ID NO: 5130796 - DNA, 25 bp, Homo sapien
tgaagccatcggatcataacactcg

SEQ ID NO: 5130797 - DNA, 25 bp, Homo sapien
tacatctgcaaagtcgtgtcacagc

SEQ ID NO: 5130798 - DNA, 25 bp, Homo sapien
gaaagaaatccccacaagcttagtg

SEQ ID NO: 5130799 - DNA, 25 bp, Homo sapien
gctgttagccatgggtgcatccaat

SEQ ID NO: 5130800 - DNA, 25 bp, Homo sapien
ggatgatcccctaccttaaagtctg

SEQ ID NO: 5130801 - DNA, 25 bp, Homo sapien
tgcacagacccctcagaagtagagc

SEQ ID NO: 5130802 - DNA, 25 bp, Homo sapien
gacctggaccattgctttctgaggc

SEQ ID NO: 5130803 - DNA, 25 bp, Homo sapien
caaattcgaatctctagaagtggag

SEQ ID NO: 5130804 - DNA, 25 bp, Homo sapien
gtagagccatgtggcatctcccagg

SEQ ID NO: 5130805 - DNA, 25 bp, Homo sapien
acaagcccagggcaggccatacatc

SEQ ID NO: 5130806 - DNA, 25 bp, Homo sapien
gcccgacaggtttgggttcctgagc

SEQ ID NO: 5130807 - DNA, 25 bp, Homo sapien
tctccacagctctcaaaacctgccc

SEQ ID NO: 5130808 - DNA, 25 bp, Homo sapien
aagcccagggcaggccatacatcct

SEQ ID NO: 5130809 - DNA, 25 bp, Homo sapien
tgcaccaccgagaggaagcggcgca

SEQ ID NO: 5130810 - DNA, 25 bp, Homo sapien
gggaaaggattgagctgcaccaccg

SEQ ID NO: 5130811 - DNA, 25 bp, Homo sapien
tctgccgggccaaggaacttgcagt

SEQ ID NO: 5130812 - DNA, 25 bp, Homo sapien
gtccaggagtcctggcgcacgaact

SEQ ID NO: 5130813 - DNA, 25 bp, Homo sapien
gctcattcagtagggcctttaccaa

SEQ ID NO: 5130814 - DNA, 25 bp, Homo sapien
cagctcattcagtagggcctttacc

SEQ ID NO: 5130815 - DNA, 25 bp, Homo sapien
tcattcagtagggcctttaccaact

SEQ ID NO: 5130816 - DNA, 25 bp, Homo sapien
agctcattcagtagggcctttacca

SEQ ID NO: 5130817 - DNA, 25 bp, Homo sapien
ccccagcacctttccccagcttgct

SEQ ID NO: 5130818 - DNA, 25 bp, Homo sapien
tcccccagcacctttccccagcttg

SEQ ID NO: 5130819 - DNA, 25 bp, Homo sapien
cccagcacctttccccagcttgctc

SEQ ID NO: 5130820 - DNA, 25 bp, Homo sapien
cctcccccagcacctttccccagct

SEQ ID NO: 5130821 - DNA, 25 bp, Homo sapien
cagggcatgaggggtgacccgaccc

SEQ ID NO: 5130822 - DNA, 25 bp, Homo sapien
atgaggggtgacccgacccccactg

SEQ ID NO: 5130823 - DNA, 25 bp, Homo sapien
ggcatgaggggtgacccgaccccca

SEQ ID NO: 5130824 - DNA, 25 bp, Homo sapien
cagcagggcatgaggggtgacccga

SEQ ID NO: 5130825 - DNA, 25 bp, Homo sapien
acgtagcccgcctcgtaccgcacca

SEQ ID NO: 5130826 - DNA, 25 bp, Homo sapien
atgagggccgcgcgctcacaggcca

SEQ ID NO: 5130827 - DNA, 25 bp, Homo sapien
gcgatcacagcgcataccacgtagc

SEQ ID NO: 5130828 - DNA, 25 bp, Homo sapien
agcagaagcaaagcccggcagtggg

SEQ ID NO: 5130829 - DNA, 25 bp, Homo sapien
tcaggcatggcctcgatgctggggc

SEQ ID NO: 5130830 - DNA, 25 bp, Homo sapien
tgcgctggttggtgacaaaggcaca

SEQ ID NO: 5130831 - DNA, 25 bp, Homo sapien
tcatgcgtgcgctggttggtgacaa

SEQ ID NO: 5130832 - DNA, 25 bp, Homo sapien
cccatctgttcatgcgtgcgctggt

SEQ ID NO: 5130833 - DNA, 25 bp, Homo sapien
ggagaattgctgtgccacggcctgc

SEQ ID NO: 5130834 - DNA, 25 bp, Homo sapien
cagctcctctgagacttgctcctgg

SEQ ID NO: 5130835 - DNA, 25 bp, Homo sapien
ctcctctgagacttgctcctggggc

SEQ ID NO: 5130836 - DNA, 25 bp, Homo sapien
agaattgctgtgccacggcctgcag

SEQ ID NO: 5130837 - DNA, 25 bp, Homo sapien
gaggcacccgagcaggggccctgga

SEQ ID NO: 5130838 - DNA, 25 bp, Homo sapien
ggcacccgagcaggggccctggaag

SEQ ID NO: 5130839 - DNA, 25 bp, Homo sapien
ccacctgccagtccccgagaccctc

SEQ ID NO: 5130840 - DNA, 25 bp, Homo sapien
acctgccagtccccgagaccctcac

SEQ ID NO: 5130841 - DNA, 25 bp, Homo sapien
aaggggtacacggagctcctgagct

SEQ ID NO: 5130842 - DNA, 25 bp, Homo sapien
ctgagctgagtgtggatcgcgctcc

SEQ ID NO: 5130843 - DNA, 25 bp, Homo sapien
ctgagtgtggatcgcgctcccaatg

SEQ ID NO: 5130844 - DNA, 25 bp, Homo sapien
gtggatcgcgctcccaatgctcaca

SEQ ID NO: 5130845 - DNA, 25 bp, Homo sapien
gcagctcaaggaggcggtcccggtg

SEQ ID NO: 5130846 - DNA, 25 bp, Homo sapien
tctaccactgtagcattcaaggttt

SEQ ID NO: 5130847 - DNA, 25 bp, Homo sapien
aggtttgcaggtggtgcacggagac

SEQ ID NO: 5130848 - DNA, 25 bp, Homo sapien
cggtgttcccggatggctggctcca

SEQ ID NO: 5130849 - DNA, 25 bp, Homo sapien
agctccagggtgcgggcccagctca

SEQ ID NO: 5130850 - DNA, 25 bp, Homo sapien
gctcagggcccctgcacaatctccc

SEQ ID NO: 5130851 - DNA, 25 bp, Homo sapien
tggctgaagtcagcacccagctcca

SEQ ID NO: 5130852 - DNA, 25 bp, Homo sapien
ccagctcagggcccctgcacaatct

SEQ ID NO: 5130853 - DNA, 25 bp, Homo sapien
caaagttcatggagaggcctgaagg

SEQ ID NO: 5130854 - DNA, 25 bp, Homo sapien
cctgaaggggatccctgagggtgga

SEQ ID NO: 5130855 - DNA, 25 bp, Homo sapien
ggaaggtgggttatgacaaagttca

SEQ ID NO: 5130856 - DNA, 25 bp, Homo sapien
gttatgacaaagttcatggagaggc

SEQ ID NO: 5130857 - DNA, 25 bp, Homo sapien
tcggggacaccttttagctggtgca

SEQ ID NO: 5130858 - DNA, 25 bp, Homo sapien
gacaccttttagctggtgcaggaca

SEQ ID NO: 5130859 - DNA, 25 bp, Homo sapien
ctcggggacaccttttagctggtgc

SEQ ID NO: 5130860 - DNA, 25 bp, Homo sapien
caccttttagctggtgcaggacatg

SEQ ID NO: 5130861 - DNA, 25 bp, Homo sapien
gccagggctggaagggcgttgaagg

SEQ ID NO: 5130862 - DNA, 25 bp, Homo sapien
cttgcaccacgctggatgtctgcat

SEQ ID NO: 5130863 - DNA, 25 bp, Homo sapien
gaacccttcagccagtgtcctcacc

SEQ ID NO: 5130864 - DNA, 25 bp, Homo sapien
ccaagcccgggaacccttcagccag

SEQ ID NO: 5130865 - DNA, 25 bp, Homo sapien
ccgggaacccttcagccagtgtcct

SEQ ID NO: 5130866 - DNA, 25 bp, Homo sapien
tccaagcccgggaacccttcagcca

SEQ ID NO: 5130867 - DNA, 25 bp, Homo sapien
ataggaccacggagcacagcacgca

SEQ ID NO: 5130868 - DNA, 25 bp, Homo sapien
tgcagagcaccacgaataggaccac

SEQ ID NO: 5130869 - DNA, 25 bp, Homo sapien
gagcaccacgaataggaccacggag

SEQ ID NO: 5130870 - DNA, 25 bp, Homo sapien
gccatgaggaagcgggctccagcct

SEQ ID NO: 5130871 - DNA, 25 bp, Homo sapien
tctcccagctctggcacaccagcgt

SEQ ID NO: 5130872 - DNA, 25 bp, Homo sapien
caaagagctcgccgttctcccagct

SEQ ID NO: 5130873 - DNA, 25 bp, Homo sapien
tcccagctctggcacaccagcgtct

SEQ ID NO: 5130874 - DNA, 25 bp, Homo sapien
gcgtctgcacgttgccacccaccag

SEQ ID NO: 5130875 - DNA, 25 bp, Homo sapien
ccccaggagggcctgtgagcagaga

SEQ ID NO: 5130876 - DNA, 25 bp, Homo sapien
ccaggagggcctgtgagcagagaca

SEQ ID NO: 5130877 - DNA, 25 bp, Homo sapien
ggcctgtgagcagagacaggcctac

SEQ ID NO: 5130878 - DNA, 25 bp, Homo sapien
gagggcctgtgagcagagacaggcc

SEQ ID NO: 5130879 - DNA, 25 bp, Homo sapien
gcttggtggatgctgatgttcttcc

SEQ ID NO: 5130880 - DNA, 25 bp, Homo sapien
cttcctcaggccaagaagttgcgac

SEQ ID NO: 5130881 - DNA, 25 bp, Homo sapien
ataggcttggtggatgctgatgttc

SEQ ID NO: 5130882 - DNA, 25 bp, Homo sapien
agaagttgcgacaggttcatggacg

SEQ ID NO: 5130883 - DNA, 25 bp, Homo sapien
tgcaggactgtccagagcgctgccc

SEQ ID NO: 5130884 - DNA, 25 bp, Homo sapien
cgtaggagtcgttgagctgcaggac

SEQ ID NO: 5130885 - DNA, 25 bp, Homo sapien
gtgctcctccaggtcgtaggagtcg

SEQ ID NO: 5130886 - DNA, 25 bp, Homo sapien
gctgcaggactgtccagagcgctgc

SEQ ID NO: 5130887 - DNA, 25 bp, Homo sapien
gcagagacacagaccttccctggcc

SEQ ID NO: 5130888 - DNA, 25 bp, Homo sapien
tcactgaagcctagatcccccgggc

SEQ ID NO: 5130889 - DNA, 25 bp, Homo sapien
tccctggccacctgaaataaaatag

SEQ ID NO: 5130890 - DNA, 25 bp, Homo sapien
tgaagcctagatcccccgggctcca

SEQ ID NO: 5130891 - DNA, 25 bp, Homo sapien
ggcgcagggtgggagtcatgcccag

SEQ ID NO: 5130892 - DNA, 25 bp, Homo sapien
gcaggcgcagggtgggagtcatgcc

SEQ ID NO: 5130893 - DNA, 25 bp, Homo sapien
cagggtgggagtcatgcccagttgc

SEQ ID NO: 5130894 - DNA, 25 bp, Homo sapien
ggtgggagtcatgcccagttgctga

SEQ ID NO: 5130895 - DNA, 25 bp, Homo sapien
tctgcaactcctgccgtagcttgtt

SEQ ID NO: 5130896 - DNA, 25 bp, Homo sapien
tggatgcgctgaagcccactgctct

SEQ ID NO: 5130897 - DNA, 25 bp, Homo sapien
actcctgccgtagcttgttggtata

SEQ ID NO: 5130898 - DNA, 25 bp, Homo sapien
tgtgtgtctactttcaggctctgca

SEQ ID NO: 5130899 - DNA, 25 bp, Homo sapien
aggtggacagaagaggccaggaggg

SEQ ID NO: 5130900 - DNA, 25 bp, Homo sapien
caggtggacagaagaggccaggagg

SEQ ID NO: 5130901 - DNA, 25 bp, Homo sapien
tgcaggtggacagaagaggccagga

SEQ ID NO: 5130902 - DNA, 25 bp, Homo sapien
ctgcaggtggacagaagaggccagg

SEQ ID NO: 5130903 - DNA, 25 bp, Homo sapien
atgctggtcttcaccacgggcctct

SEQ ID NO: 5130904 - DNA, 25 bp, Homo sapien
ttgggcctgggccagtccttgcagc

SEQ ID NO: 5130905 - DNA, 25 bp, Homo sapien
tgggcctgggccagtccttgcagct

SEQ ID NO: 5130906 - DNA, 25 bp, Homo sapien
gctccatgctggtcttcaccacggg

SEQ ID NO: 5130907 - DNA, 25 bp, Homo sapien
ctctgctgggggacgaccttctcct

SEQ ID NO: 5130908 - DNA, 25 bp, Homo sapien
ctgctgggggacgaccttctcctgg

SEQ ID NO: 5130909 - DNA, 25 bp, Homo sapien
gctctgctgggggacgaccttctcc

SEQ ID NO: 5130910 - DNA, 25 bp, Homo sapien
gactccagggccctgacgctgaggt

SEQ ID NO: 5130911 - DNA, 25 bp, Homo sapien
ccctgacgctgaggttgagctttgc

SEQ ID NO: 5130912 - DNA, 25 bp, Homo sapien
tccagggccctgacgctgaggttga

SEQ ID NO: 5130913 - DNA, 25 bp, Homo sapien
gagattcggggcagaggactccagg

SEQ ID NO: 5130914 - DNA, 25 bp, Homo sapien
caggtaggtgacattggctaggaca

SEQ ID NO: 5130915 - DNA, 25 bp, Homo sapien
tttcaggtaggtgacattggctagg

SEQ ID NO: 5130916 - DNA, 25 bp, Homo sapien
tcaggtaggtgacattggctaggac

SEQ ID NO: 5130917 - DNA, 25 bp, Homo sapien
aggtaggtgacattggctaggacat

SEQ ID NO: 5130918 - DNA, 25 bp, Homo sapien
ggagaagtagcccatctcccgggcc

SEQ ID NO: 5130919 - DNA, 25 bp, Homo sapien
aggccacgtactgggagaagtagcc

SEQ ID NO: 5130920 - DNA, 25 bp, Homo sapien
tctcccgggccaggaaacactcact

SEQ ID NO: 5130921 - DNA, 25 bp, Homo sapien
ccaggccacgtactgggagaagtag

SEQ ID NO: 5130922 - DNA, 25 bp, Homo sapien
aggatcacacggctgttgtccaggg

SEQ ID NO: 5130923 - DNA, 25 bp, Homo sapien
tggcaggtggcaatgcgctgagtca

SEQ ID NO: 5130924 - DNA, 25 bp, Homo sapien
tcatgtcacacaggatcacacggct

SEQ ID NO: 5130925 - DNA, 25 bp, Homo sapien
tgtcacacaggatcacacggctgtt

SEQ ID NO: 5130926 - DNA, 25 bp, Homo sapien
atcaggaagaaggtgcaccatgcca

SEQ ID NO: 5130927 - DNA, 25 bp, Homo sapien
accatgccaggcagaaccagaaggc

SEQ ID NO: 5130928 - DNA, 25 bp, Homo sapien
aggtcttgacggcaaagatgatgct

SEQ ID NO: 5130929 - DNA, 25 bp, Homo sapien
ccggataggacggaagtatttggag

SEQ ID NO: 5130930 - DNA, 25 bp, Homo sapien
ggatgtggaagagctgagtctcctc

SEQ ID NO: 5130931 - DNA, 25 bp, Homo sapien
tggaagagctgagtctcctcagagc

SEQ ID NO: 5130932 - DNA, 25 bp, Homo sapien
ctacagcttcagggaggtaacccgg

SEQ ID NO: 5130933 - DNA, 25 bp, Homo sapien
acccgggggatgtggaagagctgag

SEQ ID NO: 5130934 - DNA, 25 bp, Homo sapien
acacccaatacccagactccaccat

SEQ ID NO: 5130935 - DNA, 25 bp, Homo sapien
gcagggagcaattaagcgagttggg

SEQ ID NO: 5130936 - DNA, 25 bp, Homo sapien
gagcaattaagcgagttggggaaaa

SEQ ID NO: 5130937 - DNA, 25 bp, Homo sapien
tggatgggccacacccaatacccag

SEQ ID NO: 5130938 - DNA, 25 bp, Homo sapien
tctggggcaagagctaccgaagtcc

SEQ ID NO: 5130939 - DNA, 25 bp, Homo sapien
ctgtggcccaggctaaatcaaaggg

SEQ ID NO: 5130940 - DNA, 25 bp, Homo sapien
tgatgggggtcgtgagcagaaaggg

SEQ ID NO: 5130941 - DNA, 25 bp, Homo sapien
aagagctaccgaagtcctgtggccc

SEQ ID NO: 5130942 - DNA, 25 bp, Homo sapien
ggagtggggttggacgaggcctctg

SEQ ID NO: 5130943 - DNA, 25 bp, Homo sapien
gcttggcagggggaagacacacggg

SEQ ID NO: 5130944 - DNA, 25 bp, Homo sapien
gaacaggctcttcctgtgaggatgc

SEQ ID NO: 5130945 - DNA, 25 bp, Homo sapien
gtggagaacaggctcttcctgtgag

SEQ ID NO: 5130946 - DNA, 25 bp, Homo sapien
tctctggggccagcaaggtagcagt

SEQ ID NO: 5130947 - DNA, 25 bp, Homo sapien
tagcagtggagatatggtgaagagg

SEQ ID NO: 5130948 - DNA, 25 bp, Homo sapien
gtagcagtggagatatggtgaagag

SEQ ID NO: 5130949 - DNA, 25 bp, Homo sapien
ggggccagcaaggtagcagtggaga

SEQ ID NO: 5130950 - DNA, 25 bp, Homo sapien
ttctgaagaggtaagggcaagcccc

SEQ ID NO: 5130951 - DNA, 25 bp, Homo sapien
cagagagaagctaagtgctggtacc

SEQ ID NO: 5130952 - DNA, 25 bp, Homo sapien
taaatcctggatgagatctgcagag

SEQ ID NO: 5130953 - DNA, 25 bp, Homo sapien
ggcccctgcctgattagtggcgtta

SEQ ID NO: 5130954 - DNA, 25 bp, Homo sapien
ataaaaggggccgtgcaaaatcctg

SEQ ID NO: 5130955 - DNA, 25 bp, Homo sapien
gccacatgcgcaggataaaaggggc

SEQ ID NO: 5130956 - DNA, 25 bp, Homo sapien
cgcaggataaaaggggccgtgcaaa

SEQ ID NO: 5130957 - DNA, 25 bp, Homo sapien
acatgcgcaggataaaaggggccgt

SEQ ID NO: 5130958 - DNA, 25 bp, Homo sapien
gaagtgagaacactttaatggatct

SEQ ID NO: 5130959 - DNA, 25 bp, Homo sapien
tcctcatttctggaacgcagtgtcc

SEQ ID NO: 5130960 - DNA, 25 bp, Homo sapien
ctcatttctggaacgcagtgtccag

SEQ ID NO: 5130961 - DNA, 25 bp, Homo sapien
aatggatctgaggtctgtccatctc

SEQ ID NO: 5130962 - DNA, 25 bp, Homo sapien
cgtacatgcccggatgctagctcta

SEQ ID NO: 5130963 - DNA, 25 bp, Homo sapien
aggccactgctaagggctttccaca

SEQ ID NO: 5130964 - DNA, 25 bp, Homo sapien
gaagctgagcgaacaagcatcacag

SEQ ID NO: 5130965 - DNA, 25 bp, Homo sapien
gaggaggctgtgactattctcccca

SEQ ID NO: 5130966 - DNA, 25 bp, Homo sapien
cccaggtaggtcaacagatgagtaa

SEQ ID NO: 5130967 - DNA, 25 bp, Homo sapien
gaggcagtcatgctacattcaagca

SEQ ID NO: 5130968 - DNA, 25 bp, Homo sapien
aacttgttgctggtttataagatgc

SEQ ID NO: 5130969 - DNA, 25 bp, Homo sapien
taaacatagacacttccagcctggg

SEQ ID NO: 5130970 - DNA, 25 bp, Homo sapien
gaaacagaagtaggtcagcccttaa

SEQ ID NO: 5130971 - DNA, 25 bp, Homo sapien
cagtgggcttcaccctatgaatatg

SEQ ID NO: 5130972 - DNA, 25 bp, Homo sapien
tggaggctccatataagggactaac

SEQ ID NO: 5130973 - DNA, 25 bp, Homo sapien
gaagataactccatcctagacctga

SEQ ID NO: 5130974 - DNA, 25 bp, Homo sapien
tctaattgagagtattgggcaggaa

SEQ ID NO: 5130975 - DNA, 25 bp, Homo sapien
ttaagtctaattgagagtattgggc

SEQ ID NO: 5130976 - DNA, 25 bp, Homo sapien
tatttaagtctaattgagagtattg

SEQ ID NO: 5130977 - DNA, 25 bp, Homo sapien
aagtctaattgagagtattgggcag

SEQ ID NO: 5130978 - DNA, 25 bp, Homo sapien
taaaaagctgctcaaaatttgcgtg

SEQ ID NO: 5130979 - DNA, 25 bp, Homo sapien
gacaatgttcaattagctgggccac

SEQ ID NO: 5130980 - DNA, 25 bp, Homo sapien
taccgtgctgctctctaaacaaaac

SEQ ID NO: 5130981 - DNA, 25 bp, Homo sapien
ggaccaaattcccagttcaggacaa

SEQ ID NO: 5130982 - DNA, 25 bp, Homo sapien
ccagagacggccttggcaattccca

SEQ ID NO: 5130983 - DNA, 25 bp, Homo sapien
acttcccagagacggccttggcaat

SEQ ID NO: 5130984 - DNA, 25 bp, Homo sapien
cagacttcccagagacggccttggc

SEQ ID NO: 5130985 - DNA, 25 bp, Homo sapien
cccagagacggccttggcaattccc

SEQ ID NO: 5130986 - DNA, 25 bp, Homo sapien
agctcccaagtcaggatgcatccag

SEQ ID NO: 5130987 - DNA, 25 bp, Homo sapien
caaagcatgacctgctcatgctctc

SEQ ID NO: 5130988 - DNA, 25 bp, Homo sapien
attcacccatccgagggcctcgaag

SEQ ID NO: 5130989 - DNA, 25 bp, Homo sapien
gaagcacgggtgtctccccaaagca

SEQ ID NO: 5130990 - DNA, 25 bp, Homo sapien
cctgtcaccagcggctctctgtgcc

SEQ ID NO: 5130991 - DNA, 25 bp, Homo sapien
ctgctccttgccctttttggtcacc

SEQ ID NO: 5130992 - DNA, 25 bp, Homo sapien
ctccttgccctttttggtcaccaag

SEQ ID NO: 5130993 - DNA, 25 bp, Homo sapien
cttgccctttttggtcaccaaggag

SEQ ID NO: 5130994 - DNA, 25 bp, Homo sapien
tcatgtttgcttggacccagacgta

SEQ ID NO: 5130995 - DNA, 25 bp, Homo sapien
tgtttgcttggacccagacgtaatt

SEQ ID NO: 5130996 - DNA, 25 bp, Homo sapien
ttgcttggacccagacgtaattgtc

SEQ ID NO: 5130997 - DNA, 25 bp, Homo sapien
catgtttgcttggacccagacgtaa

SEQ ID NO: 5130998 - DNA, 25 bp, Homo sapien
cctgggcgctgaagaaaactgttgc

SEQ ID NO: 5130999 - DNA, 25 bp, Homo sapien
tgaagaaaactgttgccagcctccc

SEQ ID NO: 5131000 - DNA, 25 bp, Homo sapien
cacttcacagccgaggcagacaaga

SEQ ID NO: 5131001 - DNA, 25 bp, Homo sapien
caagactgcccaggccggctggcag

SEQ ID NO: 5131002 - DNA, 25 bp, Homo sapien
tgtagtgttgccatgctcaaagggc

SEQ ID NO: 5131003 - DNA, 25 bp, Homo sapien
ggatgataccaacagctgccttgtg

SEQ ID NO: 5131004 - DNA, 25 bp, Homo sapien
ccctgacgccgtagtgtgtgagcct

SEQ ID NO: 5131005 - DNA, 25 bp, Homo sapien
aaattagggcccatctcgcacagtg

SEQ ID NO: 5131006 - DNA, 25 bp, Homo sapien
catcagtcagctgaggccgggagcc

SEQ ID NO: 5131007 - DNA, 25 bp, Homo sapien
acatcagtcagctgaggccgggagc

SEQ ID NO: 5131008 - DNA, 25 bp, Homo sapien
cccgggtggcgttctaggagtacat

SEQ ID NO: 5131009 - DNA, 25 bp, Homo sapien
ggatgtgatttccagcagccgagga

SEQ ID NO: 5131010 - DNA, 25 bp, Homo sapien
catgggcaagatgcatcgctgactc

SEQ ID NO: 5131011 - DNA, 25 bp, Homo sapien
tgcgttaaagtatccaggctcccgg

SEQ ID NO: 5131012 - DNA, 25 bp, Homo sapien
tctccatggttctcatcaactgtgc

SEQ ID NO: 5131013 - DNA, 25 bp, Homo sapien
aaggtgaaaccctcgagccgctagt

SEQ ID NO: 5131014 - DNA, 25 bp, Homo sapien
gccgctagttcagtctccatggttc

SEQ ID NO: 5131015 - DNA, 25 bp, Homo sapien
ggttctcatcaactgtgctccagag

SEQ ID NO: 5131016 - DNA, 25 bp, Homo sapien
acattttgcctcgtggctccctaca

SEQ ID NO: 5131017 - DNA, 25 bp, Homo sapien
acagcttcgtcttgaggaggcccat

SEQ ID NO: 5131018 - DNA, 25 bp, Homo sapien
cctggaccggacattttgcctcgtg

SEQ ID NO: 5131019 - DNA, 25 bp, Homo sapien
ctacactctaggtcccctgagaggc

SEQ ID NO: 5131020 - DNA, 25 bp, Homo sapien
aaaactgtcactgcgggaatgtagg

SEQ ID NO: 5131021 - DNA, 25 bp, Homo sapien
atcccgagagtttccacaccacaga

SEQ ID NO: 5131022 - DNA, 25 bp, Homo sapien
ctggggatattatggagacaggtac

SEQ ID NO: 5131023 - DNA, 25 bp, Homo sapien
agtccagtctctgccgcaaacacca

SEQ ID NO: 5131024 - DNA, 25 bp, Homo sapien
cccaggagagcgggggaaggctgag

SEQ ID NO: 5131025 - DNA, 25 bp, Homo sapien
gatgcccaggcccaggagagcgggg

SEQ ID NO: 5131026 - DNA, 25 bp, Homo sapien
tgggggaggcgagggatgcccaggc

SEQ ID NO: 5131027 - DNA, 25 bp, Homo sapien
ctgggggaggcgagggatgcccagg

SEQ ID NO: 5131028 - DNA, 25 bp, Homo sapien
tggactcgcagctgcctcagaaggg

SEQ ID NO: 5131029 - DNA, 25 bp, Homo sapien
ttgggggttcgatgaggcaggcggc

SEQ ID NO: 5131030 - DNA, 25 bp, Homo sapien
cgcagctgcctcagaagggtggcct

SEQ ID NO: 5131031 - DNA, 25 bp, Homo sapien
actcgcagctgcctcagaagggtgg

SEQ ID NO: 5131032 - DNA, 25 bp, Homo sapien
tcatgtctctattggacaggactga

SEQ ID NO: 5131033 - DNA, 25 bp, Homo sapien
tctctattggacaggactgatccgg

SEQ ID NO: 5131034 - DNA, 25 bp, Homo sapien
ggactgatccggatggttctcagac

SEQ ID NO: 5131035 - DNA, 25 bp, Homo sapien
tttctttactgtgcctactggcaca

SEQ ID NO: 5131036 - DNA, 25 bp, Homo sapien
aaaaagatggcgtgggtgatgcccc

SEQ ID NO: 5131037 - DNA, 25 bp, Homo sapien
tgttgagtgcctgaacctacacgtg

SEQ ID NO: 5131038 - DNA, 25 bp, Homo sapien
tctctttacaaagggagggcacggc

SEQ ID NO: 5131039 - DNA, 25 bp, Homo sapien
ttagggctgtgtcccagaaacggcc

SEQ ID NO: 5131040 - DNA, 25 bp, Homo sapien
cccatgatgggcacccctctttgtg

SEQ ID NO: 5131041 - DNA, 25 bp, Homo sapien
gcccatgatgggcacccctctttgt

SEQ ID NO: 5131042 - DNA, 25 bp, Homo sapien
ccatgatgggcacccctctttgtga

SEQ ID NO: 5131043 - DNA, 25 bp, Homo sapien
tgaggctgtttctcggcctgggtcc

SEQ ID NO: 5131044 - DNA, 25 bp, Homo sapien
tcacatgggcttgaccacaggcttt

SEQ ID NO: 5131045 - DNA, 25 bp, Homo sapien
aaatatccgttgaggagtgctgtga

SEQ ID NO: 5131046 - DNA, 25 bp, Homo sapien
gagctgggtgtgttccgaagcccct

SEQ ID NO: 5131047 - DNA, 25 bp, Homo sapien
tgcaatcggtaagacgatccccatt

SEQ ID NO: 5131048 - DNA, 25 bp, Homo sapien
tcccaagtggatgtctatgttgagc

SEQ ID NO: 5131049 - DNA, 25 bp, Homo sapien
gcccagggttagtcacagggattct

SEQ ID NO: 5131050 - DNA, 25 bp, Homo sapien
gagctgaaagtaatctcgtcacgac

SEQ ID NO: 5131051 - DNA, 25 bp, Homo sapien
gcagcaagaagaggcactgaccatg

SEQ ID NO: 5131052 - DNA, 25 bp, Homo sapien
ctggaagaattggcagcagggagcc

SEQ ID NO: 5131053 - DNA, 25 bp, Homo sapien
tggaagaattggcagcagggagccc

SEQ ID NO: 5131054 - DNA, 25 bp, Homo sapien
tgctgggtctagtttgctgcctttg

SEQ ID NO: 5131055 - DNA, 25 bp, Homo sapien
ctgctgggtctagtttgctgccttt

SEQ ID NO: 5131056 - DNA, 25 bp, Homo sapien
ctgggtctagtttgctgcctttgtg

SEQ ID NO: 5131057 - DNA, 25 bp, Homo sapien
gctgggtctagtttgctgcctttgt

SEQ ID NO: 5131058 - DNA, 25 bp, Homo sapien
ctggctatggtgtaagatgggaccc

SEQ ID NO: 5131059 - DNA, 25 bp, Homo sapien
cctggctatggtgtaagatgggacc

SEQ ID NO: 5131060 - DNA, 25 bp, Homo sapien
tggacaggatccacttgaccaggca

SEQ ID NO: 5131061 - DNA, 25 bp, Homo sapien
caggaggctgccgtccgacgccttt

SEQ ID NO: 5131062 - DNA, 25 bp, Homo sapien
ctaagtggtgtgtgcccgaggtccc

SEQ ID NO: 5131063 - DNA, 25 bp, Homo sapien
ataccctccttcttgctaagtggtg

SEQ ID NO: 5131064 - DNA, 25 bp, Homo sapien
aagagccagcaccaatccttggggt

SEQ ID NO: 5131065 - DNA, 25 bp, Homo sapien
agagccagcaccaatccttggggtg

SEQ ID NO: 5131066 - DNA, 25 bp, Homo sapien
agccagcaccaatccttggggtgca

SEQ ID NO: 5131067 - DNA, 25 bp, Homo sapien
gagccagcaccaatccttggggtgc

SEQ ID NO: 5131068 - DNA, 25 bp, Homo sapien
ctgctgctgtcacgggtgtgcagaa

SEQ ID NO: 5131069 - DNA, 25 bp, Homo sapien
ctgctgtcacgggtgtgcagaaagc

SEQ ID NO: 5131070 - DNA, 25 bp, Homo sapien
gtgtgcagaaagcttcggcaaagga

SEQ ID NO: 5131071 - DNA, 25 bp, Homo sapien
gcttcggcaaaggatgcacaccagc

SEQ ID NO: 5131072 - DNA, 25 bp, Homo sapien
cttgagaaacaggtctgtccagttg

SEQ ID NO: 5131073 - DNA, 25 bp, Homo sapien
cagttgtggcactggccatgcctct

SEQ ID NO: 5131074 - DNA, 25 bp, Homo sapien
gaccccaggttatttgtgggtgaca

SEQ ID NO: 5131075 - DNA, 25 bp, Homo sapien
agaaacccaagtcccacagcccttg

SEQ ID NO: 5131076 - DNA, 25 bp, Homo sapien
ttgttccgatgcctttctgctaccc

SEQ ID NO: 5131077 - DNA, 25 bp, Homo sapien
gtggtggtgtctttatgattttacg

SEQ ID NO: 5131078 - DNA, 25 bp, Homo sapien
ttttacgtggggttgccatggcacc

SEQ ID NO: 5131079 - DNA, 25 bp, Homo sapien
catctccctgggatgcatcggcgac

SEQ ID NO: 5131080 - DNA, 25 bp, Homo sapien
cactcagaccaactggcatcaaggg

SEQ ID NO: 5131081 - DNA, 25 bp, Homo sapien
ggccagtgaatgaccctattatcga

SEQ ID NO: 5131082 - DNA, 25 bp, Homo sapien
tgctaaactggaagctgggacggcc

SEQ ID NO: 5131083 - DNA, 25 bp, Homo sapien
gcatcaagggccatcggccagtgaa

SEQ ID NO: 5131084 - DNA, 25 bp, Homo sapien
gacccgctgaagactggttctggca

SEQ ID NO: 5131085 - DNA, 25 bp, Homo sapien
cagaacagtgatgagacccgctgaa

SEQ ID NO: 5131086 - DNA, 25 bp, Homo sapien
gttctggcagccgttgcgggttcca

SEQ ID NO: 5131087 - DNA, 25 bp, Homo sapien
gaagactggttctggcagccgttgc

SEQ ID NO: 5131088 - DNA, 25 bp, Homo sapien
gcctcgggccagggccgcaccctgc

SEQ ID NO: 5131089 - DNA, 25 bp, Homo sapien
ctgcagcctcgggccagggccgcac

SEQ ID NO: 5131090 - DNA, 25 bp, Homo sapien
tgcagcctcgggccagggccgcacc

SEQ ID NO: 5131091 - DNA, 25 bp, Homo sapien
tcgggccagggccgcaccctgccat

SEQ ID NO: 5131092 - DNA, 25 bp, Homo sapien
aagaagacgctgatgatgcctccca

SEQ ID NO: 5131093 - DNA, 25 bp, Homo sapien
tgaagcggaagaagacgctgatgat

SEQ ID NO: 5131094 - DNA, 25 bp, Homo sapien
atgaagcggaagaagacgctgatga

SEQ ID NO: 5131095 - DNA, 25 bp, Homo sapien
cggaagaagacgctgatgatgcctc

SEQ ID NO: 5131096 - DNA, 25 bp, Homo sapien
taatccaatacgaggcttatgtctc

SEQ ID NO: 5131097 - DNA, 25 bp, Homo sapien
cctcctaatccaatacgaggcttat

SEQ ID NO: 5131098 - DNA, 25 bp, Homo sapien
aatccaatacgaggcttatgtctca

SEQ ID NO: 5131099 - DNA, 25 bp, Homo sapien
cctaatccaatacgaggcttatgtc

SEQ ID NO: 5131100 - DNA, 25 bp, Homo sapien
gccttcagtcctccggcaagagagt

SEQ ID NO: 5131101 - DNA, 25 bp, Homo sapien
cacgtgccgagcactgtggtgataa

SEQ ID NO: 5131102 - DNA, 25 bp, Homo sapien
taaaccgaggcctgctgaggagagc

SEQ ID NO: 5131103 - DNA, 25 bp, Homo sapien
gtcttctgaggaggcgacccgtaaa

SEQ ID NO: 5131104 - DNA, 25 bp, Homo sapien
cggaggtgagggacgtcctgagtcc

SEQ ID NO: 5131105 - DNA, 25 bp, Homo sapien
aggtgagggacgtcctgagtccctc

SEQ ID NO: 5131106 - DNA, 25 bp, Homo sapien
ccggaggtgagggacgtcctgagtc

SEQ ID NO: 5131107 - DNA, 25 bp, Homo sapien
gaggtgagggacgtcctgagtccct

SEQ ID NO: 5131108 - DNA, 25 bp, Homo sapien
agctcacttctgctgcggcagctgg

SEQ ID NO: 5131109 - DNA, 25 bp, Homo sapien
gctcacttctgctgcggcagctggc

SEQ ID NO: 5131110 - DNA, 25 bp, Homo sapien
aactcaattactcccagctcacttc

SEQ ID NO: 5131111 - DNA, 25 bp, Homo sapien
tgcaactcaattactcccagctcac

SEQ ID NO: 5131112 - DNA, 25 bp, Homo sapien
ggagccgcggccagaccttcctgct

SEQ ID NO: 5131113 - DNA, 25 bp, Homo sapien
tggggagccgcggccagaccttcct

SEQ ID NO: 5131114 - DNA, 25 bp, Homo sapien
gccgcggccagaccttcctgctcct

SEQ ID NO: 5131115 - DNA, 25 bp, Homo sapien
ctggggagccgcggccagaccttcc

SEQ ID NO: 5131116 - DNA, 25 bp, Homo sapien
ctgttgccatttgctgaacgagtac

SEQ ID NO: 5131117 - DNA, 25 bp, Homo sapien
cctcacatcaacctcacagataaag

SEQ ID NO: 5131118 - DNA, 25 bp, Homo sapien
tttgctgaacgagtacctgttaggt

SEQ ID NO: 5131119 - DNA, 25 bp, Homo sapien
ggtgctttacaccaatatgtcttga

SEQ ID NO: 5131120 - DNA, 25 bp, Homo sapien
gcctgggactctgtcagtttgaccg

SEQ ID NO: 5131121 - DNA, 25 bp, Homo sapien
taccacagctgtactggtggttccc

SEQ ID NO: 5131122 - DNA, 25 bp, Homo sapien
agctgtactggtggttcccaaggcc

SEQ ID NO: 5131123 - DNA, 25 bp, Homo sapien
agtttgaccgacattccctggatgt

SEQ ID NO: 5131124 - DNA, 25 bp, Homo sapien
ttggctctctgccccggcatcttcc

SEQ ID NO: 5131125 - DNA, 25 bp, Homo sapien
ggctctctgccccggcatcttccat

SEQ ID NO: 5131126 - DNA, 25 bp, Homo sapien
tggctctctgccccggcatcttcca

SEQ ID NO: 5131127 - DNA, 25 bp, Homo sapien
taagcggatgcggagtgccacgcac

SEQ ID NO: 5131128 - DNA, 25 bp, Homo sapien
cagggcaagggcatgcttattcgtt

SEQ ID NO: 5131129 - DNA, 25 bp, Homo sapien
gctgcgtgaccttggtcgagtcacg

SEQ ID NO: 5131130 - DNA, 25 bp, Homo sapien
ggtcgagtcacggactcgcagccgc

SEQ ID NO: 5131131 - DNA, 25 bp, Homo sapien
gcaactttccgagtcagccggcaaa

SEQ ID NO: 5131132 - DNA, 25 bp, Homo sapien
gagcgcaactttccgagtcagccgg

SEQ ID NO: 5131133 - DNA, 25 bp, Homo sapien
cgagcccgagcgcaactttccgagt

SEQ ID NO: 5131134 - DNA, 25 bp, Homo sapien
ctttccgagtcagccggcaaacttc

SEQ ID NO: 5131135 - DNA, 25 bp, Homo sapien
ctcgcccacgcgctgcctcggaggc

SEQ ID NO: 5131136 - DNA, 25 bp, Homo sapien
cgcccacgcgctgcctcggaggcac

SEQ ID NO: 5131137 - DNA, 25 bp, Homo sapien
acccctcgcccacgcgctgcctcgg

SEQ ID NO: 5131138 - DNA, 25 bp, Homo sapien
ggcgcacccctcgcccacgcgctgc

SEQ ID NO: 5131139 - DNA, 25 bp, Homo sapien
tgccgaactgcttgaggacggcgat

SEQ ID NO: 5131140 - DNA, 25 bp, Homo sapien
aactgcttgaggacggcgatgaaca

SEQ ID NO: 5131141 - DNA, 25 bp, Homo sapien
ttgaggacggcgatgaacagcagca

SEQ ID NO: 5131142 - DNA, 25 bp, Homo sapien
caggatgccgaactgcttgaggacg

SEQ ID NO: 5131143 - DNA, 25 bp, Homo sapien
caggccgctcctcgccagaccagtg

SEQ ID NO: 5131144 - DNA, 25 bp, Homo sapien
aagcgctgcggcttcgtcccctctg

SEQ ID NO: 5131145 - DNA, 25 bp, Homo sapien
ggcttcctgggactacgtctcctta

SEQ ID NO: 5131146 - DNA, 25 bp, Homo sapien
tcgccagaccagtgcaccccggcgt

SEQ ID NO: 5131147 - DNA, 25 bp, Homo sapien
ggaataaaccatctgtcatcttgtg

SEQ ID NO: 5131148 - DNA, 25 bp, Homo sapien
ttttggcaggtggaataaaccatct

SEQ ID NO: 5131149 - DNA, 25 bp, Homo sapien
tgtgcatactgtccaccttgcaaag

SEQ ID NO: 5131150 - DNA, 25 bp, Homo sapien
caccttgcaaagaaacctcctcaga

SEQ ID NO: 5131151 - DNA, 25 bp, Homo sapien
agttccttagacactgcctggccaa

SEQ ID NO: 5131152 - DNA, 25 bp, Homo sapien
tgacagttccttagacactgcctgg

SEQ ID NO: 5131153 - DNA, 25 bp, Homo sapien
acatctggaactcacgacgccctcc

SEQ ID NO: 5131154 - DNA, 25 bp, Homo sapien
gctcatctgacagttccttagacac

SEQ ID NO: 5131155 - DNA, 25 bp, Homo sapien
tctgatatcccgtaggtcaccaggg

SEQ ID NO: 5131156 - DNA, 25 bp, Homo sapien
gctcgtggatggcaggcagcttctt

SEQ ID NO: 5131157 - DNA, 25 bp, Homo sapien
cacttgccgaagcaaggctcgtgga

SEQ ID NO: 5131158 - DNA, 25 bp, Homo sapien
ccaggtcccaaagccaacatgagat

SEQ ID NO: 5131159 - DNA, 25 bp, Homo sapien
tgaacactttgggaacgcagatccc

SEQ ID NO: 5131160 - DNA, 25 bp, Homo sapien
ttatggaccttctggactgggaccc

SEQ ID NO: 5131161 - DNA, 25 bp, Homo sapien
ccttgagaaccgtatttcagcactc

SEQ ID NO: 5131162 - DNA, 25 bp, Homo sapien
aatcttgcccataatttcaggagct

SEQ ID NO: 5131163 - DNA, 25 bp, Homo sapien
gggacagtcagaactctgatgacga

SEQ ID NO: 5131164 - DNA, 25 bp, Homo sapien
tcagaactctgatgacgacatgaag

SEQ ID NO: 5131165 - DNA, 25 bp, Homo sapien
gacagtcagaactctgatgacgaca

SEQ ID NO: 5131166 - DNA, 25 bp, Homo sapien
ctctgatgacgacatgaagggtcat

SEQ ID NO: 5131167 - DNA, 25 bp, Homo sapien
gctggtggcgcaccgtggacagctc

SEQ ID NO: 5131168 - DNA, 25 bp, Homo sapien
cccctctggctggtggcgcaccgtg

SEQ ID NO: 5131169 - DNA, 25 bp, Homo sapien
cctctggctggtggcgcaccgtgga

SEQ ID NO: 5131170 - DNA, 25 bp, Homo sapien
tggctggtggcgcaccgtggacagc

SEQ ID NO: 5131171 - DNA, 25 bp, Homo sapien
gaagaactgcgcgtaaatgagtttg

SEQ ID NO: 5131172 - DNA, 25 bp, Homo sapien
gagtttgaaggtgtcttcgtccacc

SEQ ID NO: 5131173 - DNA, 25 bp, Homo sapien
aactgcgcgtaaatgagtttgaagg

SEQ ID NO: 5131174 - DNA, 25 bp, Homo sapien
cctgagggaagaactgcgcgtaaat

SEQ ID NO: 5131175 - DNA, 25 bp, Homo sapien
catcaaaggcgttgaagaggaagtg

SEQ ID NO: 5131176 - DNA, 25 bp, Homo sapien
cgttcccgtccgcatcaaaggcgtt

SEQ ID NO: 5131177 - DNA, 25 bp, Homo sapien
gaggaagtgtgcataggtggtggca

SEQ ID NO: 5131178 - DNA, 25 bp, Homo sapien
cgtccgcatcaaaggcgttgaagag

SEQ ID NO: 5131179 - DNA, 25 bp, Homo sapien
aggacagcgagggtgatggccacag

SEQ ID NO: 5131180 - DNA, 25 bp, Homo sapien
tgaggggcgactgtgaccttcctga

SEQ ID NO: 5131181 - DNA, 25 bp, Homo sapien
ctcaggacagcgagggtgatggcca

SEQ ID NO: 5131182 - DNA, 25 bp, Homo sapien
cagcgagggtgatggccacaggagg

SEQ ID NO: 5131183 - DNA, 25 bp, Homo sapien
ttcgtttcacgtgcagagaagctgc

SEQ ID NO: 5131184 - DNA, 25 bp, Homo sapien
gatgccagggatgagtgatcttctg

SEQ ID NO: 5131185 - DNA, 25 bp, Homo sapien
gaagatgccagggatgagtgatctt

SEQ ID NO: 5131186 - DNA, 25 bp, Homo sapien
gaagccagaggacttcgtttcacgt

SEQ ID NO: 5131187 - DNA, 25 bp, Homo sapien
cattacagacgcacgtaggaggctc

SEQ ID NO: 5131188 - DNA, 25 bp, Homo sapien
cagacagtgtcatgcagggttgcct

SEQ ID NO: 5131189 - DNA, 25 bp, Homo sapien
gatggcccggtgttctccagactag

SEQ ID NO: 5131190 - DNA, 25 bp, Homo sapien
cagactagatttggtgcctccgtcc

SEQ ID NO: 5131191 - DNA, 25 bp, Homo sapien
tgcacgtcctggcaagccagatgag

SEQ ID NO: 5131192 - DNA, 25 bp, Homo sapien
tggccagagcgttcagcaaatctgt

SEQ ID NO: 5131193 - DNA, 25 bp, Homo sapien
gttttggaagctctgcacgtcctgg

SEQ ID NO: 5131194 - DNA, 25 bp, Homo sapien
ctgaagaggccccaacagtctacgg

SEQ ID NO: 5131195 - DNA, 25 bp, Homo sapien
gacacagcatacttccaggtgaagg

SEQ ID NO: 5131196 - DNA, 25 bp, Homo sapien
aaactgggcctgacttgatcctggg

SEQ ID NO: 5131197 - DNA, 25 bp, Homo sapien
gccaaagtgtaggaaccctgtcaca

SEQ ID NO: 5131198 - DNA, 25 bp, Homo sapien
gaatgtcctgttaggccactggcta

SEQ ID NO: 5131199 - DNA, 25 bp, Homo sapien
gtgagaccttgcatctacaacaatt

SEQ ID NO: 5131200 - DNA, 25 bp, Homo sapien
tgagaccttgcatctacaacaatta

SEQ ID NO: 5131201 - DNA, 25 bp, Homo sapien
agaccttgcatctacaacaattaaa

SEQ ID NO: 5131202 - DNA, 25 bp, Homo sapien
gagaccttgcatctacaacaattaa

SEQ ID NO: 5131203 - DNA, 25 bp, Homo sapien
gacggcatccattcaggtcagcaca

SEQ ID NO: 5131204 - DNA, 25 bp, Homo sapien
taatgcagtgctgccgctggagacg

SEQ ID NO: 5131205 - DNA, 25 bp, Homo sapien
tagctgggaccactcggaataatcc

SEQ ID NO: 5131206 - DNA, 25 bp, Homo sapien
tggtgtcctagacccatttaatgca

SEQ ID NO: 5131207 - DNA, 25 bp, Homo sapien
cgtagagattaaaggcccacttgag

SEQ ID NO: 5131208 - DNA, 25 bp, Homo sapien
ctcgtggactgtgccccgcagcagg

SEQ ID NO: 5131209 - DNA, 25 bp, Homo sapien
ccacttgagcttctcgtggactgtg

SEQ ID NO: 5131210 - DNA, 25 bp, Homo sapien
agccatccttgttaatgtcgtagag

SEQ ID NO: 5131211 - DNA, 25 bp, Homo sapien
ggagggggaggctggcatgagcctg

SEQ ID NO: 5131212 - DNA, 25 bp, Homo sapien
ctggagggggaggctggcatgagcc

SEQ ID NO: 5131213 - DNA, 25 bp, Homo sapien
tggagggggaggctggcatgagcct

SEQ ID NO: 5131214 - DNA, 25 bp, Homo sapien
catgtcatagatggacttcatgatg

SEQ ID NO: 5131215 - DNA, 25 bp, Homo sapien
tcatgtcatagatggacttcatgat

SEQ ID NO: 5131216 - DNA, 25 bp, Homo sapien
caatggtcactaccccatcctggtt

SEQ ID NO: 5131217 - DNA, 25 bp, Homo sapien
gaactcttcaatggtcactacccca

SEQ ID NO: 5131218 - DNA, 25 bp, Homo sapien
ttcaatggtcactaccccatcctgg

SEQ ID NO: 5131219 - DNA, 25 bp, Homo sapien
ccaggaactcttcaatggtcactac

SEQ ID NO: 5131220 - DNA, 25 bp, Homo sapien
tagagcctgcagagaactgtggccc

SEQ ID NO: 5131221 - DNA, 25 bp, Homo sapien
ctccgtgtagagcctgcagagaact

SEQ ID NO: 5131222 - DNA, 25 bp, Homo sapien
gtggcccagcctcccgtgccaccta

SEQ ID NO: 5131223 - DNA, 25 bp, Homo sapien
cctgcagagaactgtggcccagcct

SEQ ID NO: 5131224 - DNA, 25 bp, Homo sapien
gacattctcaaacagctgcatggag

SEQ ID NO: 5131225 - DNA, 25 bp, Homo sapien
agccaagcagagtccccagggtttg

SEQ ID NO: 5131226 - DNA, 25 bp, Homo sapien
ctttctagaagcataggtagtgggc

SEQ ID NO: 5131227 - DNA, 25 bp, Homo sapien
cttttgaatgttggtcagccgggct

SEQ ID NO: 5131228 - DNA, 25 bp, Homo sapien
ggctgcgcctgagctgctaaggaat

SEQ ID NO: 5131229 - DNA, 25 bp, Homo sapien
tggcctccgccatactgcctttcct

SEQ ID NO: 5131230 - DNA, 25 bp, Homo sapien
ctggctgtgatggaatgtattatgt

SEQ ID NO: 5131231 - DNA, 25 bp, Homo sapien
ccccaatcaggcgggagcagcatct

SEQ ID NO: 5131232 - DNA, 25 bp, Homo sapien
gcctggagccaggcgtccatgcagc

SEQ ID NO: 5131233 - DNA, 25 bp, Homo sapien
ctcctgaggccttggccttagaggc

SEQ ID NO: 5131234 - DNA, 25 bp, Homo sapien
tgccatgcagacatgcggccggtct

SEQ ID NO: 5131235 - DNA, 25 bp, Homo sapien
ctgaatattagtggatgctgagaac

SEQ ID NO: 5131236 - DNA, 25 bp, Homo sapien
tcccagcgtgggaggcagacccctc

SEQ ID NO: 5131237 - DNA, 25 bp, Homo sapien
atgcggccggtctgtgtcccagcgt

SEQ ID NO: 5131238 - DNA, 25 bp, Homo sapien
gcttagaacgtgtttggatttcttc

SEQ ID NO: 5131239 - DNA, 25 bp, Homo sapien
tgaactggtgagttggggaaccctc

SEQ ID NO: 5131240 - DNA, 25 bp, Homo sapien
tttcttcaatctgaactggtgagtt

SEQ ID NO: 5131241 - DNA, 25 bp, Homo sapien
ttgcttagaacgtgtttggatttct

SEQ ID NO: 5131242 - DNA, 25 bp, Homo sapien
tacgctgtcgagagggcccttgttg

SEQ ID NO: 5131243 - DNA, 25 bp, Homo sapien
gggaccagcacggatttgtttccaa

SEQ ID NO: 5131244 - DNA, 25 bp, Homo sapien
tatttccgcgcagtgagagtggcct

SEQ ID NO: 5131245 - DNA, 25 bp, Homo sapien
cctgaaatgtctgtccgctctctga

SEQ ID NO: 5131246 - DNA, 25 bp, Homo sapien
cggtgcgctcgttacttgatacatt

SEQ ID NO: 5131247 - DNA, 25 bp, Homo sapien
gttcgcaagctgtcttcggtccggt

SEQ ID NO: 5131248 - DNA, 25 bp, Homo sapien
tccggaaagcctagcgggtcacgtg

SEQ ID NO: 5131249 - DNA, 25 bp, Homo sapien
ccaaagtccaggtctgtgagcctca

SEQ ID NO: 5131250 - DNA, 25 bp, Homo sapien
aagcactgtgcagcctcgggagcct

SEQ ID NO: 5131251 - DNA, 25 bp, Homo sapien
ggaacacagcgcttggaaggcgtgg

SEQ ID NO: 5131252 - DNA, 25 bp, Homo sapien
cgcccgaagcaaagacgcaatgatt

SEQ ID NO: 5131253 - DNA, 25 bp, Homo sapien
gggagtgaaggtcaaagcctcgccc

SEQ ID NO: 5131254 - DNA, 25 bp, Homo sapien
ggtgtcaaagccttactcactctag

SEQ ID NO: 5131255 - DNA, 25 bp, Homo sapien
agaggtcctccacagtaggtgtcaa

SEQ ID NO: 5131256 - DNA, 25 bp, Homo sapien
tcactctagacaactccgcctggaa

SEQ ID NO: 5131257 - DNA, 25 bp, Homo sapien
cgcctggaatgcgtctgccagaaag

SEQ ID NO: 5131258 - DNA, 25 bp, Homo sapien
ctgggacacagaaggttgatgaggg

SEQ ID NO: 5131259 - DNA, 25 bp, Homo sapien
cagcagtgcctctggacttgggggc

SEQ ID NO: 5131260 - DNA, 25 bp, Homo sapien
cagaaggttgatgagggcaatgaac

SEQ ID NO: 5131261 - DNA, 25 bp, Homo sapien
ggttgatgagggcaatgaacagatc

SEQ ID NO: 5131262 - DNA, 25 bp, Homo sapien
tctgtgcacgggtcaaagagcagga

SEQ ID NO: 5131263 - DNA, 25 bp, Homo sapien
gagctccagagaagccgggtttcct

SEQ ID NO: 5131264 - DNA, 25 bp, Homo sapien
tcaagagctgaacagagggagctct

SEQ ID NO: 5131265 - DNA, 25 bp, Homo sapien
gctgaacagagggagctctgtgcac

SEQ ID NO: 5131266 - DNA, 25 bp, Homo sapien
ctccctggtggagcacccaggtcat

SEQ ID NO: 5131267 - DNA, 25 bp, Homo sapien
tcatcctgcaagctgggctcaaagg

SEQ ID NO: 5131268 - DNA, 25 bp, Homo sapien
gctgctccctggtggagcacccagg

SEQ ID NO: 5131269 - DNA, 25 bp, Homo sapien
tcctcatcctgcaagctgggctcaa

SEQ ID NO: 5131270 - DNA, 25 bp, Homo sapien
tcctgcgctgtagggttagagctcg

SEQ ID NO: 5131271 - DNA, 25 bp, Homo sapien
tcacccgagagaaaagcgggcgcga

SEQ ID NO: 5131272 - DNA, 25 bp, Homo sapien
gccgaaggtcaagggcggcgggcgc

SEQ ID NO: 5131273 - DNA, 25 bp, Homo sapien
ggcggccgatcttcctgcgctgtag

SEQ ID NO: 5131274 - DNA, 25 bp, Homo sapien
caggtccgccccgtctgtgtggtca

SEQ ID NO: 5131275 - DNA, 25 bp, Homo sapien
ctggggatccggtactagttctgcg

SEQ ID NO: 5131276 - DNA, 25 bp, Homo sapien
ggtccgccccgtctgtgtggtcaga

SEQ ID NO: 5131277 - DNA, 25 bp, Homo sapien
cggtactagttctgcgctccgcggg

SEQ ID NO: 5131278 - DNA, 25 bp, Homo sapien
aagcaggggcttgacatttcactac

SEQ ID NO: 5131279 - DNA, 25 bp, Homo sapien
aagcttagtgcttgttaacttcagg

SEQ ID NO: 5131280 - DNA, 25 bp, Homo sapien
actacttgggaaagcttagtgcttg

SEQ ID NO: 5131281 - DNA, 25 bp, Homo sapien
tggtgcacagaaggctctcagtgac

SEQ ID NO: 5131282 - DNA, 25 bp, Homo sapien
ataataattatttcgtttctcctga

SEQ ID NO: 5131283 - DNA, 25 bp, Homo sapien
atagagaacaagttgcctgagggaa

SEQ ID NO: 5131284 - DNA, 25 bp, Homo sapien
gatagagaacaagttgcctgaggga

SEQ ID NO: 5131285 - DNA, 25 bp, Homo sapien
aattatttcgtttctcctgatagag

SEQ ID NO: 5131286 - DNA, 25 bp, Homo sapien
ggctgtcccagtcttctaggagcag

SEQ ID NO: 5131287 - DNA, 25 bp, Homo sapien
caggctgtcccagtcttctaggagc

SEQ ID NO: 5131288 - DNA, 25 bp, Homo sapien
gtcccagtcttctaggagcagcgcc

SEQ ID NO: 5131289 - DNA, 25 bp, Homo sapien
ctgtcccagtcttctaggagcagcg

SEQ ID NO: 5131290 - DNA, 25 bp, Homo sapien
gcttcacagtggccataaacaattt

SEQ ID NO: 5131291 - DNA, 25 bp, Homo sapien
ttccactgctcacatgatcaagcta

SEQ ID NO: 5131292 - DNA, 25 bp, Homo sapien
ttaaatgctattttggtcctgttaa

SEQ ID NO: 5131293 - DNA, 25 bp, Homo sapien
ctcacatgatcaagctagaacctct

SEQ ID NO: 5131294 - DNA, 25 bp, Homo sapien
tttctgaaagttcccactgtgcttg

SEQ ID NO: 5131295 - DNA, 25 bp, Homo sapien
gctacgcagtaagtcccagggattc

SEQ ID NO: 5131296 - DNA, 25 bp, Homo sapien
gcaactactacatgctacgcagtaa

SEQ ID NO: 5131297 - DNA, 25 bp, Homo sapien
gtgctttctgaaagttcccactgtg

SEQ ID NO: 5131298 - DNA, 25 bp, Homo sapien
gaaaaatgcaggatccaggagacag

SEQ ID NO: 5131299 - DNA, 25 bp, Homo sapien
aaaatgcaggatccaggagacagag

SEQ ID NO: 5131300 - DNA, 25 bp, Homo sapien
gagaaaaatgcaggatccaggagac

SEQ ID NO: 5131301 - DNA, 25 bp, Homo sapien
agagaaaaatgcaggatccaggaga

SEQ ID NO: 5131302 - DNA, 25 bp, Homo sapien
gaactgtgagtaaccttcttctacc

SEQ ID NO: 5131303 - DNA, 25 bp, Homo sapien
gttgaaagggccacttctgagcctg

SEQ ID NO: 5131304 - DNA, 25 bp, Homo sapien
gtgagtaaccttcttctaccagaca

SEQ ID NO: 5131305 - DNA, 25 bp, Homo sapien
cctgcagcagaactgtgagtaacct

SEQ ID NO: 5131306 - DNA, 25 bp, Homo sapien
tgcccggaactgcactagtctcatg

SEQ ID NO: 5131307 - DNA, 25 bp, Homo sapien
ctgcgtcatcgtcttcgggagtgtg

SEQ ID NO: 5131308 - DNA, 25 bp, Homo sapien
tgctctaggaactgcgtcatcgtct

SEQ ID NO: 5131309 - DNA, 25 bp, Homo sapien
tgaggttgataacccctccaccatt

SEQ ID NO: 5131310 - DNA, 25 bp, Homo sapien
ctggagccaggaaggttacctccga

SEQ ID NO: 5131311 - DNA, 25 bp, Homo sapien
tggagccaggaaggttacctccgac

SEQ ID NO: 5131312 - DNA, 25 bp, Homo sapien
gaccacctcatcatagggccccacg

SEQ ID NO: 5131313 - DNA, 25 bp, Homo sapien
tcatcatagggccccacgatggagc

SEQ ID NO: 5131314 - DNA, 25 bp, Homo sapien
cacataaggatgtttactgcaacat

SEQ ID NO: 5131315 - DNA, 25 bp, Homo sapien
aactagaaacagtatccagcagtaa

SEQ ID NO: 5131316 - DNA, 25 bp, Homo sapien
ttaatggacatgcaaagccttttcc

SEQ ID NO: 5131317 - DNA, 25 bp, Homo sapien
tctacataacaaactccgtggtgtc

SEQ ID NO: 5131318 - DNA, 25 bp, Homo sapien
ctaaagagatataactgaatacagt

SEQ ID NO: 5131319 - DNA, 25 bp, Homo sapien
tcatggagcaacaaacgaagtaacc

SEQ ID NO: 5131320 - DNA, 25 bp, Homo sapien
gaaccctgtcctagattgaaaccac

SEQ ID NO: 5131321 - DNA, 25 bp, Homo sapien
tcagcagtacttccgattgggaatt

SEQ ID NO: 5131322 - DNA, 25 bp, Homo sapien
ggcttcgctgccatcccatgtttgc

SEQ ID NO: 5131323 - DNA, 25 bp, Homo sapien
gacttgtagacccatacattttggg

SEQ ID NO: 5131324 - DNA, 25 bp, Homo sapien
gaaccagagcccagtgaatgacaag

SEQ ID NO: 5131325 - DNA, 25 bp, Homo sapien
gaagggcctcaacctttgtcagtat

SEQ ID NO: 5131326 - DNA, 25 bp, Homo sapien
gccagctccacttcccaatctacct

SEQ ID NO: 5131327 - DNA, 25 bp, Homo sapien
ttgcctttctttccaatgaccacgg

SEQ ID NO: 5131328 - DNA, 25 bp, Homo sapien
ctttccaatgaccacggccagctcc

SEQ ID NO: 5131329 - DNA, 25 bp, Homo sapien
ggccagctccacttcccaatctacc

SEQ ID NO: 5131330 - DNA, 25 bp, Homo sapien
attgtttcccattacgtctcatttg

SEQ ID NO: 5131331 - DNA, 25 bp, Homo sapien
ccttggccttgggataactatgctc

SEQ ID NO: 5131332 - DNA, 25 bp, Homo sapien
gaactcgtggctgaggataagagac

SEQ ID NO: 5131333 - DNA, 25 bp, Homo sapien
caacttagattgtttcagaggtggc

SEQ ID NO: 5131334 - DNA, 25 bp, Homo sapien
gccctgtatggagtcagcagtgaaa

SEQ ID NO: 5131335 - DNA, 25 bp, Homo sapien
gttctagccgggacagagaagcctc

SEQ ID NO: 5131336 - DNA, 25 bp, Homo sapien
aagcctcgtgtactggatgctggca

SEQ ID NO: 5131337 - DNA, 25 bp, Homo sapien
tgtctacagcataggatgacacctg

SEQ ID NO: 5131338 - DNA, 25 bp, Homo sapien
tgacacctgtagattgactcagcag

SEQ ID NO: 5131339 - DNA, 25 bp, Homo sapien
gggagacccaggctatcaggtcctc

SEQ ID NO: 5131340 - DNA, 25 bp, Homo sapien
atcaggtcctctgtcttgaatacca

SEQ ID NO: 5131341 - DNA, 25 bp, Homo sapien
ttcactcggcagcagatctttaagt

SEQ ID NO: 5131342 - DNA, 25 bp, Homo sapien
tctggttggtgttgccgctctggac

SEQ ID NO: 5131343 - DNA, 25 bp, Homo sapien
ccacagccaaagatggagggctcag

SEQ ID NO: 5131344 - DNA, 25 bp, Homo sapien
tcaaagcagaaggacccggtgagac

SEQ ID NO: 5131345 - DNA, 25 bp, Homo sapien
ctggatcaaagcagaaggacccggt

SEQ ID NO: 5131346 - DNA, 25 bp, Homo sapien
ctccacatgtgtggcaggtgaagcg

SEQ ID NO: 5131347 - DNA, 25 bp, Homo sapien
gggggtcccagttaggatgacatcc

SEQ ID NO: 5131348 - DNA, 25 bp, Homo sapien
ggggtcccagttaggatgacatccc

SEQ ID NO: 5131349 - DNA, 25 bp, Homo sapien
tttcctgaatacaccgacacctggg

SEQ ID NO: 5131350 - DNA, 25 bp, Homo sapien
ggaggtttcctgaatacaccgacac

SEQ ID NO: 5131351 - DNA, 25 bp, Homo sapien
gggcccttgctctttgcttttcgct

SEQ ID NO: 5131352 - DNA, 25 bp, Homo sapien
cagagcaggccatgacagtgtcagc

SEQ ID NO: 5131353 - DNA, 25 bp, Homo sapien
gacacacatacacaagcctgtactt

SEQ ID NO: 5131354 - DNA, 25 bp, Homo sapien
tcaagtctgaggcaagcctgccagg

SEQ ID NO: 5131355 - DNA, 25 bp, Homo sapien
ttgttgatgatgacacctagttctt

SEQ ID NO: 5131356 - DNA, 25 bp, Homo sapien
tagttcttcaatctcacactggact

SEQ ID NO: 5131357 - DNA, 25 bp, Homo sapien
gttgatgatgacacctagttcttca

SEQ ID NO: 5131358 - DNA, 25 bp, Homo sapien
ttcttcaatctcacactggacttca

SEQ ID NO: 5131359 - DNA, 25 bp, Homo sapien
gacctgacgaatttattgaagagag

SEQ ID NO: 5131360 - DNA, 25 bp, Homo sapien
gcagatgccctcatcctatgtgcag

SEQ ID NO: 5131361 - DNA, 25 bp, Homo sapien
ttctcccttctaccgagaagaggcg

SEQ ID NO: 5131362 - DNA, 25 bp, Homo sapien
tgggcctttccctgggctaggctga

SEQ ID NO: 5131363 - DNA, 25 bp, Homo sapien
ccacctgtcccctacttttgccagc

SEQ ID NO: 5131364 - DNA, 25 bp, Homo sapien
tccacctgtcccctacttttgccag

SEQ ID NO: 5131365 - DNA, 25 bp, Homo sapien
ggtgagaggagccagtgtcaccatc

SEQ ID NO: 5131366 - DNA, 25 bp, Homo sapien
ggggtgagaggagccagtgtcacca

SEQ ID NO: 5131367 - DNA, 25 bp, Homo sapien
tgagaggagccagtgtcaccatctt

SEQ ID NO: 5131368 - DNA, 25 bp, Homo sapien
ctaggggtgagaggagccagtgtca

SEQ ID NO: 5131369 - DNA, 25 bp, Homo sapien
tcagtgctatctggaccttcagaga

SEQ ID NO: 5131370 - DNA, 25 bp, Homo sapien
tcttctttccagagtgtgcagaccc

SEQ ID NO: 5131371 - DNA, 25 bp, Homo sapien
gccatcagtgctatctggaccttca

SEQ ID NO: 5131372 - DNA, 25 bp, Homo sapien
gcagacccaaagcttgccatcagtg

SEQ ID NO: 5131373 - DNA, 25 bp, Homo sapien
tgcaggcagtggtgtttgctggtgg

SEQ ID NO: 5131374 - DNA, 25 bp, Homo sapien
ggcttctttaaacaagaggagagaa

SEQ ID NO: 5131375 - DNA, 25 bp, Homo sapien
gggcttctttaaacaagaggagaga

SEQ ID NO: 5131376 - DNA, 25 bp, Homo sapien
gcaggcagtggtgtttgctggtggc

SEQ ID NO: 5131377 - DNA, 25 bp, Homo sapien
cttggctttggacagacaggaggat

SEQ ID NO: 5131378 - DNA, 25 bp, Homo sapien
taatctgttgctaaacactgggaag

SEQ ID NO: 5131379 - DNA, 25 bp, Homo sapien
tgtttaccgaatcaagagaatgcct

SEQ ID NO: 5131380 - DNA, 25 bp, Homo sapien
agttggcatacccaaaggatgggcc

SEQ ID NO: 5131381 - DNA, 25 bp, Homo sapien
cagaagataaacagctccccgttaa

SEQ ID NO: 5131382 - DNA, 25 bp, Homo sapien
aaacagctccccgttaaatctcgct

SEQ ID NO: 5131383 - DNA, 25 bp, Homo sapien
agataaacagctccccgttaaatct

SEQ ID NO: 5131384 - DNA, 25 bp, Homo sapien
cagctccccgttaaatctcgcttaa

SEQ ID NO: 5131385 - DNA, 25 bp, Homo sapien
ttggtgccagcccttccacaaccag

SEQ ID NO: 5131386 - DNA, 25 bp, Homo sapien
cctcgcagccggcatggtgaggtga

SEQ ID NO: 5131387 - DNA, 25 bp, Homo sapien
aggtaagctcgcagctccttggtgc

SEQ ID NO: 5131388 - DNA, 25 bp, Homo sapien
agagtgaggactgcacggctggcga

SEQ ID NO: 5131389 - DNA, 25 bp, Homo sapien
gcatttgatgctctcgacggcctta

SEQ ID NO: 5131390 - DNA, 25 bp, Homo sapien
gaaaatcatttgcttgtggacctac

SEQ ID NO: 5131391 - DNA, 25 bp, Homo sapien
gacggccttaacaggtcggcactga

SEQ ID NO: 5131392 - DNA, 25 bp, Homo sapien
tataacagtaggaaagggaggcttg

SEQ ID NO: 5131393 - DNA, 25 bp, Homo sapien
gggagtagtagttcaggccggtgat

SEQ ID NO: 5131394 - DNA, 25 bp, Homo sapien
tttctagagacaagtcagaaagaat

SEQ ID NO: 5131395 - DNA, 25 bp, Homo sapien
ttctagagacaagtcagaaagaatg

SEQ ID NO: 5131396 - DNA, 25 bp, Homo sapien
gttcaggccggtgatacttcccttc

SEQ ID NO: 5131397 - DNA, 25 bp, Homo sapien
gaatagaagataccattcccatggc

SEQ ID NO: 5131398 - DNA, 25 bp, Homo sapien
cagcagctcaatgggctgccaagtt

SEQ ID NO: 5131399 - DNA, 25 bp, Homo sapien
gttctactgtctgagaactctctga

SEQ ID NO: 5131400 - DNA, 25 bp, Homo sapien
tgagagagtgttccatgctaccagg

SEQ ID NO: 5131401 - DNA, 25 bp, Homo sapien
cagttcagggtaatcagacgcattc

SEQ ID NO: 5131402 - DNA, 25 bp, Homo sapien
tagcagtgtccatatagatccaaga

SEQ ID NO: 5131403 - DNA, 25 bp, Homo sapien
tactaagactttgatcagggacagg

SEQ ID NO: 5131404 - DNA, 25 bp, Homo sapien
gattcacatgcagagcgccagatta

SEQ ID NO: 5131405 - DNA, 25 bp, Homo sapien
tactggcagtgtgacaccatgagca

SEQ ID NO: 5131406 - DNA, 25 bp, Homo sapien
gaactctgctgaccgatgctttagg

SEQ ID NO: 5131407 - DNA, 25 bp, Homo sapien
catgagcacgctcctaggctaatgg

SEQ ID NO: 5131408 - DNA, 25 bp, Homo sapien
tcacacagaggtagcagtcatcagg

SEQ ID NO: 5131409 - DNA, 25 bp, Homo sapien
gaaccctatcatatggagggccaac

SEQ ID NO: 5131410 - DNA, 25 bp, Homo sapien
aagcctttccttaagtatcgactgg

SEQ ID NO: 5131411 - DNA, 25 bp, Homo sapien
tgttaacttggtatgaagcctttcc

SEQ ID NO: 5131412 - DNA, 25 bp, Homo sapien
gatgctaataatcctcagatgtcct

SEQ ID NO: 5131413 - DNA, 25 bp, Homo sapien
tgtagatttgagaacgccccaagtc

SEQ ID NO: 5131414 - DNA, 25 bp, Homo sapien
tcgaagagaagaaggccgtgatgcc

SEQ ID NO: 5131415 - DNA, 25 bp, Homo sapien
ggaaacagcataccgaaacactcga

SEQ ID NO: 5131416 - DNA, 25 bp, Homo sapien
cacattgagatccagtttagaggca

SEQ ID NO: 5131417 - DNA, 25 bp, Homo sapien
cagatacggtgtcttgtcgcccagg

SEQ ID NO: 5131418 - DNA, 25 bp, Homo sapien
ttatgctgcgtacaaagaatcgacc

SEQ ID NO: 5131419 - DNA, 25 bp, Homo sapien
gaaaatggcgatactcagggcactg

SEQ ID NO: 5131420 - DNA, 25 bp, Homo sapien
cagggtcaggcagagtttctccgca

SEQ ID NO: 5131421 - DNA, 25 bp, Homo sapien
taaaaatactatcagacgtgggagc

SEQ ID NO: 5131422 - DNA, 25 bp, Homo sapien
gaagggatttacctgtcgatgagcc

SEQ ID NO: 5131423 - DNA, 25 bp, Homo sapien
tgttatccagaaagcccagaggaca

SEQ ID NO: 5131424 - DNA, 25 bp, Homo sapien
catgtgttagaattatccccagggc

SEQ ID NO: 5131425 - DNA, 25 bp, Homo sapien
ctctattgacactaaaatttccata

SEQ ID NO: 5131426 - DNA, 25 bp, Homo sapien
gttcctgagcattctctattgacac

SEQ ID NO: 5131427 - DNA, 25 bp, Homo sapien
ctgagcattctctattgacactaaa

SEQ ID NO: 5131428 - DNA, 25 bp, Homo sapien
tcctgagcattctctattgacacta

SEQ ID NO: 5131429 - DNA, 25 bp, Homo sapien
gagagacactggctttaacctcaga

SEQ ID NO: 5131430 - DNA, 25 bp, Homo sapien
tgtctgagaccagcaatgcagatgc

SEQ ID NO: 5131431 - DNA, 25 bp, Homo sapien
gagataggccctgtcttgtcgcagt

SEQ ID NO: 5131432 - DNA, 25 bp, Homo sapien
tctggcccgtactgaaccatgatgc

SEQ ID NO: 5131433 - DNA, 25 bp, Homo sapien
acacagactgtgaattctcattgac

SEQ ID NO: 5131434 - DNA, 25 bp, Homo sapien
cagactgtgaattctcattgacaac

SEQ ID NO: 5131435 - DNA, 25 bp, Homo sapien
cacagactgtgaattctcattgaca

SEQ ID NO: 5131436 - DNA, 25 bp, Homo sapien
tcacacagactgtgaattctcattg

SEQ ID NO: 5131437 - DNA, 25 bp, Homo sapien
atattgaatattgattatcacctta

SEQ ID NO: 5131438 - DNA, 25 bp, Homo sapien
atgacacatagttctgcggagacat

SEQ ID NO: 5131439 - DNA, 25 bp, Homo sapien
ttgaatattgattatcaccttactt

SEQ ID NO: 5131440 - DNA, 25 bp, Homo sapien
aatgacacatagttctgcggagaca

SEQ ID NO: 5131441 - DNA, 25 bp, Homo sapien
ctcacttgactgtcttgtagttgtt

SEQ ID NO: 5131442 - DNA, 25 bp, Homo sapien
cacttgactgtcttgtagttgttgg

SEQ ID NO: 5131443 - DNA, 25 bp, Homo sapien
acttgactgtcttgtagttgttgga

SEQ ID NO: 5131444 - DNA, 25 bp, Homo sapien
cttgactgtcttgtagttgttggaa

SEQ ID NO: 5131445 - DNA, 25 bp, Homo sapien
cccaaacctgacgctttgataatcc

SEQ ID NO: 5131446 - DNA, 25 bp, Homo sapien
tcccaaacctgacgctttgataatc

SEQ ID NO: 5131447 - DNA, 25 bp, Homo sapien
cttgcaagggtccaccttgctttta

SEQ ID NO: 5131448 - DNA, 25 bp, Homo sapien
ctgtggctgctcgaagcatagatga

SEQ ID NO: 5131449 - DNA, 25 bp, Homo sapien
cctagccttgcaagggtccaccttg

SEQ ID NO: 5131450 - DNA, 25 bp, Homo sapien
tttcaaacagagcattagaaattcc

SEQ ID NO: 5131451 - DNA, 25 bp, Homo sapien
gttctctaaagaatcctcataggct

SEQ ID NO: 5131452 - DNA, 25 bp, Homo sapien
tcaatataggttctctaaagaatcc

SEQ ID NO: 5131453 - DNA, 25 bp, Homo sapien
tctctaaagaatcctcataggctac

SEQ ID NO: 5131454 - DNA, 25 bp, Homo sapien
aggttctctaaagaatcctcatagg

SEQ ID NO: 5131455 - DNA, 25 bp, Homo sapien
tcatgcaaatagagcacatgagctc

SEQ ID NO: 5131456 - DNA, 25 bp, Homo sapien
ttcatgcaaatagagcacatgagct

SEQ ID NO: 5131457 - DNA, 25 bp, Homo sapien
ctgtgagccatgtgctctggtgact

SEQ ID NO: 5131458 - DNA, 25 bp, Homo sapien
gagcacacagatattgtctgagctg

SEQ ID NO: 5131459 - DNA, 25 bp, Homo sapien
gcctcacagaagagctccttagtct

SEQ ID NO: 5131460 - DNA, 25 bp, Homo sapien
ctgtggctgtgagccatgtgctctg

SEQ ID NO: 5131461 - DNA, 25 bp, Homo sapien
tgtgtctcttgattgattttccata

SEQ ID NO: 5131462 - DNA, 25 bp, Homo sapien
cactaatgaatgaaatttgctagtt

SEQ ID NO: 5131463 - DNA, 25 bp, Homo sapien
gattgttttgtgtctcttgattgat

SEQ ID NO: 5131464 - DNA, 25 bp, Homo sapien
tagtttcctgatttagattgttttg

SEQ ID NO: 5131465 - DNA, 25 bp, Homo sapien
cacttgactgtcttgtagttgttgg

SEQ ID NO: 5131466 - DNA, 25 bp, Homo sapien
cttgactgtcttgtagttgttggaa

SEQ ID NO: 5131467 - DNA, 25 bp, Homo sapien
ctcacttgactgtcttgtagttgtt

SEQ ID NO: 5131468 - DNA, 25 bp, Homo sapien
acttgactgtcttgtagttgttgga

SEQ ID NO: 5131469 - DNA, 25 bp, Homo sapien
ggcatgtggcacgtctcccacagct

SEQ ID NO: 5131470 - DNA, 25 bp, Homo sapien
cacgtcaggcatgtggcacgtctcc

SEQ ID NO: 5131471 - DNA, 25 bp, Homo sapien
tcaggcatgtggcacgtctcccaca

SEQ ID NO: 5131472 - DNA, 25 bp, Homo sapien
cagctccacgtcaggcatgtggcac

SEQ ID NO: 5131473 - DNA, 25 bp, Homo sapien
tgttgagcatgtctaggactccagt

SEQ ID NO: 5131474 - DNA, 25 bp, Homo sapien
ctaggactccagttatgcaccatga

SEQ ID NO: 5131475 - DNA, 25 bp, Homo sapien
taggactccagttatgcaccatgaa

SEQ ID NO: 5131476 - DNA, 25 bp, Homo sapien
gttgagcatgtctaggactccagtt

SEQ ID NO: 5131477 - DNA, 25 bp, Homo sapien
gcactgcgacggtcatctacaaata

SEQ ID NO: 5131478 - DNA, 25 bp, Homo sapien
gcgacggtcatctacaaatatcaca

SEQ ID NO: 5131479 - DNA, 25 bp, Homo sapien
gatccatgggtgcactgcgacggtc

SEQ ID NO: 5131480 - DNA, 25 bp, Homo sapien
gaagtcatttccgtgctcagagcgt

SEQ ID NO: 5131481 - DNA, 25 bp, Homo sapien
tcccagccaccctgcggccgggtcc

SEQ ID NO: 5131482 - DNA, 25 bp, Homo sapien
gcgctcccagccaccctgcggccgg

SEQ ID NO: 5131483 - DNA, 25 bp, Homo sapien
ctcccagccaccctgcggccgggtc

SEQ ID NO: 5131484 - DNA, 25 bp, Homo sapien
gtggcggggtcatgcagcgctccca

SEQ ID NO: 5131485 - DNA, 25 bp, Homo sapien
gacattaaggctggtccagccattg

SEQ ID NO: 5131486 - DNA, 25 bp, Homo sapien
gcaggcgacattaaggctggtccag

SEQ ID NO: 5131487 - DNA, 25 bp, Homo sapien
aggcgacattaaggctggtccagcc

SEQ ID NO: 5131488 - DNA, 25 bp, Homo sapien
attaaggctggtccagccattgtgg

SEQ ID NO: 5131489 - DNA, 25 bp, Homo sapien
gaacgcgtccctccttcaagatcaa

SEQ ID NO: 5131490 - DNA, 25 bp, Homo sapien
gggctccgatgcgatccgttcgacc

SEQ ID NO: 5131491 - DNA, 25 bp, Homo sapien
atccgttcgaccctgcatggcggct

SEQ ID NO: 5131492 - DNA, 25 bp, Homo sapien
tcagggctccgatgcgatccgttcg

SEQ ID NO: 5131493 - DNA, 25 bp, Homo sapien
ggtcctctgggccccgcatggagcg

SEQ ID NO: 5131494 - DNA, 25 bp, Homo sapien
tcttggagccctcgggcttttgcgg

SEQ ID NO: 5131495 - DNA, 25 bp, Homo sapien
cctcgggcttttgcggcctctcggg

SEQ ID NO: 5131496 - DNA, 25 bp, Homo sapien
tgggccccgcatggagcgcggcgtc

SEQ ID NO: 5131497 - DNA, 25 bp, Homo sapien
tgttagaggctcgtggtcatcctga

SEQ ID NO: 5131498 - DNA, 25 bp, Homo sapien
gttagaggctcgtggtcatcctgac

SEQ ID NO: 5131499 - DNA, 25 bp, Homo sapien
ctgttagaggctcgtggtcatcctg

SEQ ID NO: 5131500 - DNA, 25 bp, Homo sapien
ctggcacgcgagggccccggcgggg

SEQ ID NO: 5131501 - DNA, 25 bp, Homo sapien
cccagcacaaggtgctctcggggca

SEQ ID NO: 5131502 - DNA, 25 bp, Homo sapien
tcttcccccagcacaaggtgctctc

SEQ ID NO: 5131503 - DNA, 25 bp, Homo sapien
cagcacaaggtgctctcggggcaca

SEQ ID NO: 5131504 - DNA, 25 bp, Homo sapien
cacaaggtgctctcggggcacatag

SEQ ID NO: 5131505 - DNA, 25 bp, Homo sapien
cgcgccgccggaatttcctgcgccg

SEQ ID NO: 5131506 - DNA, 25 bp, Homo sapien
tcgccgcgccgccggaatttcctgc

SEQ ID NO: 5131507 - DNA, 25 bp, Homo sapien
ccggaatttcctgcgccgccaggat

SEQ ID NO: 5131508 - DNA, 25 bp, Homo sapien
gccgccggaatttcctgcgccgcca

SEQ ID NO: 5131509 - DNA, 25 bp, Homo sapien
tcctcttcgcccgcctcctgcgcct

SEQ ID NO: 5131510 - DNA, 25 bp, Homo sapien
ttatgctactctgcgccctcctctt

SEQ ID NO: 5131511 - DNA, 25 bp, Homo sapien
ccctcctcttcgcccgcctcctgcg

SEQ ID NO: 5131512 - DNA, 25 bp, Homo sapien
ctcttcgcccgcctcctgcgcctgc

SEQ ID NO: 5131513 - DNA, 25 bp, Homo sapien
cacgctgggccccaagctgctctgc

SEQ ID NO: 5131514 - DNA, 25 bp, Homo sapien
caccacgctgggccccaagctgctc

SEQ ID NO: 5131515 - DNA, 25 bp, Homo sapien
tgggcaccaccacgctgggccccaa

SEQ ID NO: 5131516 - DNA, 25 bp, Homo sapien
acgctgggccccaagctgctctgct

SEQ ID NO: 5131517 - DNA, 25 bp, Homo sapien
ttgggttggaaggtgggcgcgggca

SEQ ID NO: 5131518 - DNA, 25 bp, Homo sapien
ttggaaggtgggcgcgggcaccttg

SEQ ID NO: 5131519 - DNA, 25 bp, Homo sapien
tgggttggaaggtgggcgcgggcac

SEQ ID NO: 5131520 - DNA, 25 bp, Homo sapien
gcctttatgctgcccttccgcgccg

SEQ ID NO: 5131521 - DNA, 25 bp, Homo sapien
tgcctttatgctgcccttccgcgcc

SEQ ID NO: 5131522 - DNA, 25 bp, Homo sapien
ctttatgctgcccttccgcgccggc

SEQ ID NO: 5131523 - DNA, 25 bp, Homo sapien
ctgcctttatgctgcccttccgcgc

SEQ ID NO: 5131524 - DNA, 25 bp, Homo sapien
tccttggccaccttgtaaggccact

SEQ ID NO: 5131525 - DNA, 25 bp, Homo sapien
aaggccacttgggtatccgcaggtg

SEQ ID NO: 5131526 - DNA, 25 bp, Homo sapien
ccttgtaaggccacttgggtatccg

SEQ ID NO: 5131527 - DNA, 25 bp, Homo sapien
gtaaggccacttgggtatccgcagg

SEQ ID NO: 5131528 - DNA, 25 bp, Homo sapien
agggcggcgggcgcttctcctgcac

SEQ ID NO: 5131529 - DNA, 25 bp, Homo sapien
cagggcggcgggcgcttctcctgca

SEQ ID NO: 5131530 - DNA, 25 bp, Homo sapien
cttcttccagggcggcgggcgcttc

SEQ ID NO: 5131531 - DNA, 25 bp, Homo sapien
gtcctcttcttccagggcggcgggc

SEQ ID NO: 5131532 - DNA, 25 bp, Homo sapien
tccttggatacaagggaccctatca

SEQ ID NO: 5131533 - DNA, 25 bp, Homo sapien
cttccttggatacaagggaccctat

SEQ ID NO: 5131534 - DNA, 25 bp, Homo sapien
aaacttggcaaattggacaacaatt

SEQ ID NO: 5131535 - DNA, 25 bp, Homo sapien
aaaacttggcaaattggacaacaat

SEQ ID NO: 5131536 - DNA, 25 bp, Homo sapien
tgcagtgcagtcacctatggagctt

SEQ ID NO: 5131537 - DNA, 25 bp, Homo sapien
agctctccatgtgggctgcagtgca

SEQ ID NO: 5131538 - DNA, 25 bp, Homo sapien
aatccctgtgttagagctgcagctc

SEQ ID NO: 5131539 - DNA, 25 bp, Homo sapien
ctggaagtgccacttaaatggcact

SEQ ID NO: 5131540 - DNA, 25 bp, Homo sapien
tcttgggaaggtggcgccctttgtg

SEQ ID NO: 5131541 - DNA, 25 bp, Homo sapien
gtggcgccctttgtgggagctcagg

SEQ ID NO: 5131542 - DNA, 25 bp, Homo sapien
caatgacaattagacgttcttggga

SEQ ID NO: 5131543 - DNA, 25 bp, Homo sapien
agggtcagacgccacatcagcctga

SEQ ID NO: 5131544 - DNA, 25 bp, Homo sapien
cagaaacaggaaggaatgtctggca

SEQ ID NO: 5131545 - DNA, 25 bp, Homo sapien
gaaacaggaaggaatgtctggcaac

SEQ ID NO: 5131546 - DNA, 25 bp, Homo sapien
aacaggaaggaatgtctggcaaccc

SEQ ID NO: 5131547 - DNA, 25 bp, Homo sapien
caggaaggaatgtctggcaacccac

SEQ ID NO: 5131548 - DNA, 25 bp, Homo sapien
accattcccagtgccaacttcccat

SEQ ID NO: 5131549 - DNA, 25 bp, Homo sapien
ataccattcccagtgccaacttccc

SEQ ID NO: 5131550 - DNA, 25 bp, Homo sapien
cacccaaggctcagggtagaagtgg

SEQ ID NO: 5131551 - DNA, 25 bp, Homo sapien
agacacccaaggctcagggtagaag

SEQ ID NO: 5131552 - DNA, 25 bp, Homo sapien
agtatcagaaatgtccatttttcac

SEQ ID NO: 5131553 - DNA, 25 bp, Homo sapien
gcagtatcagaaatgtccatttttc

SEQ ID NO: 5131554 - DNA, 25 bp, Homo sapien
gggcagtatcagaaatgtccatttt

SEQ ID NO: 5131555 - DNA, 25 bp, Homo sapien
ctgggcagtatcagaaatgtccatt

SEQ ID NO: 5131556 - DNA, 25 bp, Homo sapien
agcatgggttgtggtgccgtagtgg

SEQ ID NO: 5131557 - DNA, 25 bp, Homo sapien
tgtcctgccattgccgttctacaca

SEQ ID NO: 5131558 - DNA, 25 bp, Homo sapien
tctacacatccctggagactatgag

SEQ ID NO: 5131559 - DNA, 25 bp, Homo sapien
ccctggagactatgagcatgggttg

SEQ ID NO: 5131560 - DNA, 25 bp, Homo sapien
ggggacagggacccaacatactcac

SEQ ID NO: 5131561 - DNA, 25 bp, Homo sapien
tggggacagggacccaacatactca

SEQ ID NO: 5131562 - DNA, 25 bp, Homo sapien
ctgccctacacttgctggctcggca

SEQ ID NO: 5131563 - DNA, 25 bp, Homo sapien
gtcctgccctacacttgctggctcg

SEQ ID NO: 5131564 - DNA, 25 bp, Homo sapien
gccctacacttgctggctcggcagg

SEQ ID NO: 5131565 - DNA, 25 bp, Homo sapien
cctacacttgctggctcggcaggct

SEQ ID NO: 5131566 - DNA, 25 bp, Homo sapien
ccaccagagcgccccatgcagctgt

SEQ ID NO: 5131567 - DNA, 25 bp, Homo sapien
acagctccccggaagatcagacttc

SEQ ID NO: 5131568 - DNA, 25 bp, Homo sapien
tctacagctccccggaagatcagac

SEQ ID NO: 5131569 - DNA, 25 bp, Homo sapien
ctatctacagctccccggaagatca

SEQ ID NO: 5131570 - DNA, 25 bp, Homo sapien
cagccatctaacttgtaatcagtag

SEQ ID NO: 5131571 - DNA, 25 bp, Homo sapien
gatttcactggtgtcaatacacgca

SEQ ID NO: 5131572 - DNA, 25 bp, Homo sapien
caggactggctcacttgtgttctca

SEQ ID NO: 5131573 - DNA, 25 bp, Homo sapien
aatacacgcattcacatccatgaga

SEQ ID NO: 5131574 - DNA, 25 bp, Homo sapien
tatgaggcttctgggtcaacactcc

SEQ ID NO: 5131575 - DNA, 25 bp, Homo sapien
tatgagtacacacacttaggctcgc

SEQ ID NO: 5131576 - DNA, 25 bp, Homo sapien
aagaggcccacgatgtttcacaatg

SEQ ID NO: 5131577 - DNA, 25 bp, Homo sapien
tgcagaggcacagaaacgagcagct

SEQ ID NO: 5131578 - DNA, 25 bp, Homo sapien
tgaagttcataccttacaacaagct

SEQ ID NO: 5131579 - DNA, 25 bp, Homo sapien
caacatatagagaaacttacagagg

SEQ ID NO: 5131580 - DNA, 25 bp, Homo sapien
ggatggctttgaacatggcccgaca

SEQ ID NO: 5131581 - DNA, 25 bp, Homo sapien
tgtgccatgatctagatgtggagct

SEQ ID NO: 5131582 - DNA, 25 bp, Homo sapien
caattttacctacagatctgagagc

SEQ ID NO: 5131583 - DNA, 25 bp, Homo sapien
gctcaggctgaagagaattggctca

SEQ ID NO: 5131584 - DNA, 25 bp, Homo sapien
ctcagctaacggcaacatcagggtt

SEQ ID NO: 5131585 - DNA, 25 bp, Homo sapien
gccctgtgagttatgcatgaaccca

SEQ ID NO: 5131586 - DNA, 25 bp, Homo sapien
taaagccagattcaaatgtggcaga

SEQ ID NO: 5131587 - DNA, 25 bp, Homo sapien
tattagtctactctacacagttcac

SEQ ID NO: 5131588 - DNA, 25 bp, Homo sapien
caagtagatctcataggtactgttt

SEQ ID NO: 5131589 - DNA, 25 bp, Homo sapien
cacattcagcctagtaaaagggaac

SEQ ID NO: 5131590 - DNA, 25 bp, Homo sapien
gaagcattgcattcaaggagagaaa

SEQ ID NO: 5131591 - DNA, 25 bp, Homo sapien
ggtaagttaacatcatcatgaagac

SEQ ID NO: 5131592 - DNA, 25 bp, Homo sapien
tggaaggtgatcgttaggaaactta

SEQ ID NO: 5131593 - DNA, 25 bp, Homo sapien
aaataaggagtttgacatagatgaa

SEQ ID NO: 5131594 - DNA, 25 bp, Homo sapien
tcaggcctatcttttgctgtagtca

SEQ ID NO: 5131595 - DNA, 25 bp, Homo sapien
caggcctatcttttgctgtagtcac

SEQ ID NO: 5131596 - DNA, 25 bp, Homo sapien
ctcaggcctatcttttgctgtagtc

SEQ ID NO: 5131597 - DNA, 25 bp, Homo sapien
tctcaggcctatcttttgctgtagt

SEQ ID NO: 5131598 - DNA, 25 bp, Homo sapien
gattccatggctctgtgtgtcttgg

SEQ ID NO: 5131599 - DNA, 25 bp, Homo sapien
tgtgagattccatggctctgtgtgt

SEQ ID NO: 5131600 - DNA, 25 bp, Homo sapien
gagattccatggctctgtgtgtctt

SEQ ID NO: 5131601 - DNA, 25 bp, Homo sapien
ttccatggctctgtgtgtcttggac

SEQ ID NO: 5131602 - DNA, 25 bp, Homo sapien
cagggacagcccagggaggacgggc

SEQ ID NO: 5131603 - DNA, 25 bp, Homo sapien
agggggtgacagatggccacaaatc

SEQ ID NO: 5131604 - DNA, 25 bp, Homo sapien
ggacagggacagcccagggaggacg

SEQ ID NO: 5131605 - DNA, 25 bp, Homo sapien
ggggtgacagatggccacaaatcgg

SEQ ID NO: 5131606 - DNA, 25 bp, Homo sapien
gggacattgttagcgtaagacaaaa

SEQ ID NO: 5131607 - DNA, 25 bp, Homo sapien
aatggaggggacattgttagcgtaa

SEQ ID NO: 5131608 - DNA, 25 bp, Homo sapien
gaggggacattgttagcgtaagaca

SEQ ID NO: 5131609 - DNA, 25 bp, Homo sapien
cattgttagcgtaagacaaaaggat

SEQ ID NO: 5131610 - DNA, 25 bp, Homo sapien
gcgcagcctccacagggcactttga

SEQ ID NO: 5131611 - DNA, 25 bp, Homo sapien
gttctgctgcgcagcctccacaggg

SEQ ID NO: 5131612 - DNA, 25 bp, Homo sapien
ggtacacgccaatgcctgttccata

SEQ ID NO: 5131613 - DNA, 25 bp, Homo sapien
acagggcactttgaatgtccctatt

SEQ ID NO: 5131614 - DNA, 25 bp, Homo sapien
tggagcagatcttgagataacagat

SEQ ID NO: 5131615 - DNA, 25 bp, Homo sapien
gatggagcagatcttgagataacag

SEQ ID NO: 5131616 - DNA, 25 bp, Homo sapien
aaggatggagcagatcttgagataa

SEQ ID NO: 5131617 - DNA, 25 bp, Homo sapien
gatcttgagataacagatcatgaga

SEQ ID NO: 5131618 - DNA, 25 bp, Homo sapien
agaagcttaatataacagaaaggtc

SEQ ID NO: 5131619 - DNA, 25 bp, Homo sapien
tcactcaagaagcttaatataacag

SEQ ID NO: 5131620 - DNA, 25 bp, Homo sapien
actcaagaagcttaatataacagaa

SEQ ID NO: 5131621 - DNA, 25 bp, Homo sapien
caagaagcttaatataacagaaagg

SEQ ID NO: 5131622 - DNA, 25 bp, Homo sapien
gtagcccctggctttgacacaaacc

SEQ ID NO: 5131623 - DNA, 25 bp, Homo sapien
ggcaaatttgtagcccctggctttg

SEQ ID NO: 5131624 - DNA, 25 bp, Homo sapien
taggcaaatttgtagcccctggctt

SEQ ID NO: 5131625 - DNA, 25 bp, Homo sapien
aggcaaatttgtagcccctggcttt

SEQ ID NO: 5131626 - DNA, 25 bp, Homo sapien
tgagtaacaactgggatgtcttgcc

SEQ ID NO: 5131627 - DNA, 25 bp, Homo sapien
agtaacaactgggatgtcttgccag

SEQ ID NO: 5131628 - DNA, 25 bp, Homo sapien
taacaactgggatgtcttgccagtt

SEQ ID NO: 5131629 - DNA, 25 bp, Homo sapien
tggaagacttgcgagattccagaat

SEQ ID NO: 5131630 - DNA, 25 bp, Homo sapien
tttctctgctgtgttgtctttatgc

SEQ ID NO: 5131631 - DNA, 25 bp, Homo sapien
gctgtgttgtctttatgcattcaaa

SEQ ID NO: 5131632 - DNA, 25 bp, Homo sapien
tctctgctgtgttgtctttatgcat

SEQ ID NO: 5131633 - DNA, 25 bp, Homo sapien
tctgctgtgttgtctttatgcattc

SEQ ID NO: 5131634 - DNA, 25 bp, Homo sapien
gagcagagcaaacagagcagactct

SEQ ID NO: 5131635 - DNA, 25 bp, Homo sapien
cctgtgagtgccacacatttgctct

SEQ ID NO: 5131636 - DNA, 25 bp, Homo sapien
tttgtctccctgtgagtgccacaca

SEQ ID NO: 5131637 - DNA, 25 bp, Homo sapien
tcttcagagctcaggaatagccaga

SEQ ID NO: 5131638 - DNA, 25 bp, Homo sapien
cagcagcccactcaatgggacagtg

SEQ ID NO: 5131639 - DNA, 25 bp, Homo sapien
ctcaatgggacagtgtctgtgatcc

SEQ ID NO: 5131640 - DNA, 25 bp, Homo sapien
tctgtgatcccggtgctcctgagag

SEQ ID NO: 5131641 - DNA, 25 bp, Homo sapien
agtgtctgtgatcccggtgctcctg

SEQ ID NO: 5131642 - DNA, 25 bp, Homo sapien
gtgttgaaacttgatccaggcaggg

SEQ ID NO: 5131643 - DNA, 25 bp, Homo sapien
aggcttccctgaaatcactgtctgg

SEQ ID NO: 5131644 - DNA, 25 bp, Homo sapien
aaggctgctgtattcgttgcttcct

SEQ ID NO: 5131645 - DNA, 25 bp, Homo sapien
aggccagggtgttgaaacttgatcc

SEQ ID NO: 5131646 - DNA, 25 bp, Homo sapien
cactgagctcacaggcttgggcact

SEQ ID NO: 5131647 - DNA, 25 bp, Homo sapien
ctgcactgagctcacaggcttgggc

SEQ ID NO: 5131648 - DNA, 25 bp, Homo sapien
ccctgcactgagctcacaggcttgg

SEQ ID NO: 5131649 - DNA, 25 bp, Homo sapien
gagctcacaggcttgggcacttgca

SEQ ID NO: 5131650 - DNA, 25 bp, Homo sapien
atttcttggagtttgggatagccgt

SEQ ID NO: 5131651 - DNA, 25 bp, Homo sapien
tgaaaaggttgtacatttcttggag

SEQ ID NO: 5131652 - DNA, 25 bp, Homo sapien
ttgtacatttcttggagtttgggat

SEQ ID NO: 5131653 - DNA, 25 bp, Homo sapien
ttcttggagtttgggatagccgtta

SEQ ID NO: 5131654 - DNA, 25 bp, Homo sapien
tagcggtagtagctttcagacatct

SEQ ID NO: 5131655 - DNA, 25 bp, Homo sapien
tgagcttggctccttgtacctcttt

SEQ ID NO: 5131656 - DNA, 25 bp, Homo sapien
gctccttgtacctctttatattgaa

SEQ ID NO: 5131657 - DNA, 25 bp, Homo sapien
tagtagctttcagacatcttcacag

SEQ ID NO: 5131658 - DNA, 25 bp, Homo sapien
ccagttgcaaagctactctgtgggc

SEQ ID NO: 5131659 - DNA, 25 bp, Homo sapien
gctggtagctttcggaagtccccaa

SEQ ID NO: 5131660 - DNA, 25 bp, Homo sapien
ggaagtccccaaagccagttgcaaa

SEQ ID NO: 5131661 - DNA, 25 bp, Homo sapien
gagtctcacagtgcagtgctggtag

SEQ ID NO: 5131662 - DNA, 25 bp, Homo sapien
aacagtcaaatcaaggtaaggcacc

SEQ ID NO: 5131663 - DNA, 25 bp, Homo sapien
aaagctagcctttactctccaagga

SEQ ID NO: 5131664 - DNA, 25 bp, Homo sapien
caataacaggcactagaggccgggc

SEQ ID NO: 5131665 - DNA, 25 bp, Homo sapien
tgttagtatccaccaaattgcttgg

SEQ ID NO: 5131666 - DNA, 25 bp, Homo sapien
cgtgatcgaataatatcctttcttt

SEQ ID NO: 5131667 - DNA, 25 bp, Homo sapien
gatcgtgatcgaataatatcctttc

SEQ ID NO: 5131668 - DNA, 25 bp, Homo sapien
tcagatcgtgatcgaataatatcct

SEQ ID NO: 5131669 - DNA, 25 bp, Homo sapien
aatcagatcgtgatcgaataatatc

SEQ ID NO: 5131670 - DNA, 25 bp, Homo sapien
aggcatgtgagaagtctgagtccat

SEQ ID NO: 5131671 - DNA, 25 bp, Homo sapien
ggtgacagggtctaccaggtagttc

SEQ ID NO: 5131672 - DNA, 25 bp, Homo sapien
gacagggtctaccaggtagttcaaa

SEQ ID NO: 5131673 - DNA, 25 bp, Homo sapien
atggtgacagggtctaccaggtagt

SEQ ID NO: 5131674 - DNA, 25 bp, Homo sapien
aggagactcttgtccatgtcacaga

SEQ ID NO: 5131675 - DNA, 25 bp, Homo sapien
agcagaggagactcttgtccatgtc

SEQ ID NO: 5131676 - DNA, 25 bp, Homo sapien
gcctatgggtcccacatatttgttt

SEQ ID NO: 5131677 - DNA, 25 bp, Homo sapien
tcttctttgtttgcctatgggtccc

SEQ ID NO: 5131678 - DNA, 25 bp, Homo sapien
cataaaatcctcatttgctttaaga

SEQ ID NO: 5131679 - DNA, 25 bp, Homo sapien
ccataaaatcctcatttgctttaag

SEQ ID NO: 5131680 - DNA, 25 bp, Homo sapien
ctgatcatctgtgcccgtaaaacca

SEQ ID NO: 5131681 - DNA, 25 bp, Homo sapien
ttcttccttatggagaaccggatgc

SEQ ID NO: 5131682 - DNA, 25 bp, Homo sapien
gcagcttcctatactcattcctgat

SEQ ID NO: 5131683 - DNA, 25 bp, Homo sapien
tatggagaaccggatgcagcttcct

SEQ ID NO: 5131684 - DNA, 25 bp, Homo sapien
gttgagcctgtacaccagtccagtg

SEQ ID NO: 5131685 - DNA, 25 bp, Homo sapien
tgtacaccagtccagtgatgggtcc

SEQ ID NO: 5131686 - DNA, 25 bp, Homo sapien
cggaagcggttgagcctgtacacca

SEQ ID NO: 5131687 - DNA, 25 bp, Homo sapien
ccagtccagtgatgggtcctgcagt

SEQ ID NO: 5131688 - DNA, 25 bp, Homo sapien
tgttccagtgaaaatcagtttgtaa

SEQ ID NO: 5131689 - DNA, 25 bp, Homo sapien
atgttccagtgaaaatcagtttgta

SEQ ID NO: 5131690 - DNA, 25 bp, Homo sapien
tcaaaggtccacgtctaaacatcca

SEQ ID NO: 5131691 - DNA, 25 bp, Homo sapien
tattgtgattggttacttcaaaatg

SEQ ID NO: 5131692 - DNA, 25 bp, Homo sapien
tgtcctcagagttaaccattgtgct

SEQ ID NO: 5131693 - DNA, 25 bp, Homo sapien
cccggcccagaggtttctctatgta

SEQ ID NO: 5131694 - DNA, 25 bp, Homo sapien
gaaaagttaaggagccagctgggta

SEQ ID NO: 5131695 - DNA, 25 bp, Homo sapien
ccagtgtaaaagaaaggcctgacag

SEQ ID NO: 5131696 - DNA, 25 bp, Homo sapien
gagccagctgggtaactccatatga

SEQ ID NO: 5131697 - DNA, 25 bp, Homo sapien
ccatatgagggaactcttggtgaca

SEQ ID NO: 5131698 - DNA, 25 bp, Homo sapien
gggctcccttgtatatggagttccc

SEQ ID NO: 5131699 - DNA, 25 bp, Homo sapien
aagtacaaaaaagcctgaacagtat

SEQ ID NO: 5131700 - DNA, 25 bp, Homo sapien
aaaaagcctgaacagtatgatttct

SEQ ID NO: 5131701 - DNA, 25 bp, Homo sapien
aacagtgaagggctcccttgtatat

SEQ ID NO: 5131702 - DNA, 25 bp, Homo sapien
ctcgttggatctcatgttttacagg

SEQ ID NO: 5131703 - DNA, 25 bp, Homo sapien
tctctggatatagatcctcagtgtc

SEQ ID NO: 5131704 - DNA, 25 bp, Homo sapien
tataaggggctcgttggatctcatg

SEQ ID NO: 5131705 - DNA, 25 bp, Homo sapien
ttacaggacccccagtctctggata

SEQ ID NO: 5131706 - DNA, 25 bp, Homo sapien
gtgttcataatgattgtccagttga

SEQ ID NO: 5131707 - DNA, 25 bp, Homo sapien
caggaatctggaacttgaatggtgt

SEQ ID NO: 5131708 - DNA, 25 bp, Homo sapien
ccaaaagaatatttacctggtcaat

SEQ ID NO: 5131709 - DNA, 25 bp, Homo sapien
tactccagtgtcatgtgcatcttcc

SEQ ID NO: 5131710 - DNA, 25 bp, Homo sapien
ttaaaatctccctctcatgggccat

SEQ ID NO: 5131711 - DNA, 25 bp, Homo sapien
ccttttaaaatctccctctcatggg

SEQ ID NO: 5131712 - DNA, 25 bp, Homo sapien
catctggtttatgggacttttcctt

SEQ ID NO: 5131713 - DNA, 25 bp, Homo sapien
tggtttatgggacttttccttcagc

SEQ ID NO: 5131714 - DNA, 25 bp, Homo sapien
ctgtgcacatgaatgttccacatcc

SEQ ID NO: 5131715 - DNA, 25 bp, Homo sapien
gtgcacatgaatgttccacatcctg

SEQ ID NO: 5131716 - DNA, 25 bp, Homo sapien
tgtgcacatgaatgttccacatcct

SEQ ID NO: 5131717 - DNA, 25 bp, Homo sapien
tatgccttcgctttagtagatcctg

SEQ ID NO: 5131718 - DNA, 25 bp, Homo sapien
tcatgtatgccttcgctttagtaga

SEQ ID NO: 5131719 - DNA, 25 bp, Homo sapien
caggtacacgtgcacctgtgtaata

SEQ ID NO: 5131720 - DNA, 25 bp, Homo sapien
tgctaaaatccaggtacacgtgcac

SEQ ID NO: 5131721 - DNA, 25 bp, Homo sapien
cactgatagtttggtaagctggagc

SEQ ID NO: 5131722 - DNA, 25 bp, Homo sapien
gaaatgctcttggacagtatctgtc

SEQ ID NO: 5131723 - DNA, 25 bp, Homo sapien
tccaggtgcatggaaggatacacta

SEQ ID NO: 5131724 - DNA, 25 bp, Homo sapien
tggagcttgtaccatcactgcaaca

SEQ ID NO: 5131725 - DNA, 25 bp, Homo sapien
tcccagggtacatttgggagtactg

SEQ ID NO: 5131726 - DNA, 25 bp, Homo sapien
agcgtctgccaatctctaccatgcg

SEQ ID NO: 5131727 - DNA, 25 bp, Homo sapien
aaagtcttgagccagagatccaatt

SEQ ID NO: 5131728 - DNA, 25 bp, Homo sapien
ccttagcataggtcgattctttgta

SEQ ID NO: 5131729 - DNA, 25 bp, Homo sapien
tctgtttgtttcaagctgggggccg

SEQ ID NO: 5131730 - DNA, 25 bp, Homo sapien
ccgggcctcccatcatcgccatatt

SEQ ID NO: 5131731 - DNA, 25 bp, Homo sapien
cgggcctcccatcatcgccatattc

SEQ ID NO: 5131732 - DNA, 25 bp, Homo sapien
ggccgggcctcccatcatcgccata

SEQ ID NO: 5131733 - DNA, 25 bp, Homo sapien
attgctgttgcacctgatttgtctg

SEQ ID NO: 5131734 - DNA, 25 bp, Homo sapien
tctgattcctcatggatattgctgt

SEQ ID NO: 5131735 - DNA, 25 bp, Homo sapien
gacttggggcgttctcaaatctaca

SEQ ID NO: 5131736 - DNA, 25 bp, Homo sapien
tttctaatgaatcctcgttgctgac

SEQ ID NO: 5131737 - DNA, 25 bp, Homo sapien
catattttggtagcggttcaattgt

SEQ ID NO: 5131738 - DNA, 25 bp, Homo sapien
tgcgccccggcctgcaagacaccac

SEQ ID NO: 5131739 - DNA, 25 bp, Homo sapien
ggccccttcggatcgatcgcagccg

SEQ ID NO: 5131740 - DNA, 25 bp, Homo sapien
ttcggatcgatcgcagccgctgcca

SEQ ID NO: 5131741 - DNA, 25 bp, Homo sapien
tggaggggccccttcggatcgatcg

SEQ ID NO: 5131742 - DNA, 25 bp, Homo sapien
ctcccttacgcttccctacctgctt

SEQ ID NO: 5131743 - DNA, 25 bp, Homo sapien
gactggggaatctctccaggtactc

SEQ ID NO: 5131744 - DNA, 25 bp, Homo sapien
cttggtcactgcctggaaaatggca

SEQ ID NO: 5131745 - DNA, 25 bp, Homo sapien
gggaatctctccaggtactccctta

SEQ ID NO: 5131746 - DNA, 25 bp, Homo sapien
tcaggacgtgcatcctaagcttctg

SEQ ID NO: 5131747 - DNA, 25 bp, Homo sapien
caggacgtgcatcctaagcttctgt

SEQ ID NO: 5131748 - DNA, 25 bp, Homo sapien
acgtgcatcctaagcttctgtacac

SEQ ID NO: 5131749 - DNA, 25 bp, Homo sapien
ggacgtgcatcctaagcttctgtac

SEQ ID NO: 5131750 - DNA, 25 bp, Homo sapien
tgaactagagaaagtccgctgtgct

SEQ ID NO: 5131751 - DNA, 25 bp, Homo sapien
cagaccccgatctgaaggtgcggaa

SEQ ID NO: 5131752 - DNA, 25 bp, Homo sapien
aggcacctggagacccagccgctgg

SEQ ID NO: 5131753 - DNA, 25 bp, Homo sapien
aaggagaaagtgattgtccccaggc

SEQ ID NO: 5131754 - DNA, 25 bp, Homo sapien
catatgaaatcttgactgaggctga

SEQ ID NO: 5131755 - DNA, 25 bp, Homo sapien
cacaagggcctaaatagtgggaggc

SEQ ID NO: 5131756 - DNA, 25 bp, Homo sapien
tgtcaaccagtcctacagtcatatg

SEQ ID NO: 5131757 - DNA, 25 bp, Homo sapien
tcagacatctattcctgagggtcag

SEQ ID NO: 5131758 - DNA, 25 bp, Homo sapien
agctgcctttgagggacgtccaagg

SEQ ID NO: 5131759 - DNA, 25 bp, Homo sapien
tgctcggccattgtccccgggacaa

SEQ ID NO: 5131760 - DNA, 25 bp, Homo sapien
gaagttattaaccacgggagctgcc

SEQ ID NO: 5131761 - DNA, 25 bp, Homo sapien
gggacaatgatttccggccctggct

SEQ ID NO: 5131762 - DNA, 25 bp, Homo sapien
gggcacaatttccatcgcaatgtct

SEQ ID NO: 5131763 - DNA, 25 bp, Homo sapien
gttacagcagttgtgtgggccgccc

SEQ ID NO: 5131764 - DNA, 25 bp, Homo sapien
taggagtgggtcattgctcttaaac

SEQ ID NO: 5131765 - DNA, 25 bp, Homo sapien
tcttctatgggtctatgctatgtgc

SEQ ID NO: 5131766 - DNA, 25 bp, Homo sapien
aaccagcagttgttcctgctttgtg

SEQ ID NO: 5131767 - DNA, 25 bp, Homo sapien
gtggaacatggaccaggcaacccct

SEQ ID NO: 5131768 - DNA, 25 bp, Homo sapien
cagtctgactggcaggcaattggca

SEQ ID NO: 5131769 - DNA, 25 bp, Homo sapien
tggaccaggcaacccctgtgaggtc

SEQ ID NO: 5131770 - DNA, 25 bp, Homo sapien
cagcagagcgccagtgtcaggcatg

SEQ ID NO: 5131771 - DNA, 25 bp, Homo sapien
tagagcacgatacccaagtgctggg

SEQ ID NO: 5131772 - DNA, 25 bp, Homo sapien
gagatgagtcgcatggctagagcac

SEQ ID NO: 5131773 - DNA, 25 bp, Homo sapien
gcattcatgatgaggtctgggctct

SEQ ID NO: 5131774 - DNA, 25 bp, Homo sapien
tgtattatacatgccactcctgcca

SEQ ID NO: 5131775 - DNA, 25 bp, Homo sapien
tactgaccaggagcattgtccagct

SEQ ID NO: 5131776 - DNA, 25 bp, Homo sapien
ttttgtgacagtagggccaccagac

SEQ ID NO: 5131777 - DNA, 25 bp, Homo sapien
gcaagagggatacttggcatcctgg

SEQ ID NO: 5131778 - DNA, 25 bp, Homo sapien
gtaaggatttgtcccacgtgcaggg

SEQ ID NO: 5131779 - DNA, 25 bp, Homo sapien
aaaaaatcttagactgcagctctcg

SEQ ID NO: 5131780 - DNA, 25 bp, Homo sapien
gcttcgagctgatggcatggctttg

SEQ ID NO: 5131781 - DNA, 25 bp, Homo sapien
tcaaggcggtaccatgtcgcagttt

SEQ ID NO: 5131782 - DNA, 25 bp, Homo sapien
gcatagccagtagccaccgtgatat

SEQ ID NO: 5131783 - DNA, 25 bp, Homo sapien
ctaagatagactcttctctgcccag

SEQ ID NO: 5131784 - DNA, 25 bp, Homo sapien
accgtgatatgttctctctttcccc

SEQ ID NO: 5131785 - DNA, 25 bp, Homo sapien
tatttcttaacaattccccatgaat

SEQ ID NO: 5131786 - DNA, 25 bp, Homo sapien
cacttcctgcactgtcctgggccat

SEQ ID NO: 5131787 - DNA, 25 bp, Homo sapien
cttacacttcctgcactgtcctggg

SEQ ID NO: 5131788 - DNA, 25 bp, Homo sapien
ttacacttcctgcactgtcctgggc

SEQ ID NO: 5131789 - DNA, 25 bp, Homo sapien
tacacttcctgcactgtcctgggcc

SEQ ID NO: 5131790 - DNA, 25 bp, Homo sapien
aaagaagactgctcagtgctgaggg

SEQ ID NO: 5131791 - DNA, 25 bp, Homo sapien
gaaagaagactgctcagtgctgagg

SEQ ID NO: 5131792 - DNA, 25 bp, Homo sapien
aagaagactgctcagtgctgaggga

SEQ ID NO: 5131793 - DNA, 25 bp, Homo sapien
agagagagggaccagggtggaactc

SEQ ID NO: 5131794 - DNA, 25 bp, Homo sapien
ccagggtggaactcataaatgccta

SEQ ID NO: 5131795 - DNA, 25 bp, Homo sapien
aatccttctttgcatctgagtgaga

SEQ ID NO: 5131796 - DNA, 25 bp, Homo sapien
ggtggaactcataaatgcctagata

SEQ ID NO: 5131797 - DNA, 25 bp, Homo sapien
caaagttgctttactttgtcgtaca

SEQ ID NO: 5131798 - DNA, 25 bp, Homo sapien
gctttactttgtcgtacatcaaatg

SEQ ID NO: 5131799 - DNA, 25 bp, Homo sapien
tgtctgcactgaacctgtactaatt

SEQ ID NO: 5131800 - DNA, 25 bp, Homo sapien
gaaattcttctaacagatacttctg

SEQ ID NO: 5131801 - DNA, 25 bp, Homo sapien
gagtactcccaaccattattccaca

SEQ ID NO: 5131802 - DNA, 25 bp, Homo sapien
tgacaagtgtcatagaactcacatc

SEQ ID NO: 5131803 - DNA, 25 bp, Homo sapien
cctggaggcacagttcaatagagag

SEQ ID NO: 5131804 - DNA, 25 bp, Homo sapien
ccgagtgcctcctgtatgacaagtg

SEQ ID NO: 5131805 - DNA, 25 bp, Homo sapien
ttaggttgttctggatgtcactctc

SEQ ID NO: 5131806 - DNA, 25 bp, Homo sapien
tgttctggatgtcactctcactagc

SEQ ID NO: 5131807 - DNA, 25 bp, Homo sapien
ctggatgtcactctcactagcttct

SEQ ID NO: 5131808 - DNA, 25 bp, Homo sapien
ggttgttctggatgtcactctcact

SEQ ID NO: 5131809 - DNA, 25 bp, Homo sapien
gcaatgattctgtggggcgagcaca

SEQ ID NO: 5131810 - DNA, 25 bp, Homo sapien
tgcaatgattctgtggggcgagcac

SEQ ID NO: 5131811 - DNA, 25 bp, Homo sapien
caatgattctgtggggcgagcacat

SEQ ID NO: 5131812 - DNA, 25 bp, Homo sapien
agaaatgcttccctctcggccagat

SEQ ID NO: 5131813 - DNA, 25 bp, Homo sapien
agaacacgggttctcatctgggaac

SEQ ID NO: 5131814 - DNA, 25 bp, Homo sapien
tctgggaacaagtccatgctccaaa

SEQ ID NO: 5131815 - DNA, 25 bp, Homo sapien
gggaacaagtccatgctccaaaggc

SEQ ID NO: 5131816 - DNA, 25 bp, Homo sapien
tcatacagcccaacaataggagagc

SEQ ID NO: 5131817 - DNA, 25 bp, Homo sapien
atcatacagcccaacaataggagag

SEQ ID NO: 5131818 - DNA, 25 bp, Homo sapien
ctaatcatacagcccaacaatagga

SEQ ID NO: 5131819 - DNA, 25 bp, Homo sapien
aatcatacagcccaacaataggaga

SEQ ID NO: 5131820 - DNA, 25 bp, Homo sapien
gagagaagaggcctctaggagacag

SEQ ID NO: 5131821 - DNA, 25 bp, Homo sapien
ctgaggagagaagaggcctctagga

SEQ ID NO: 5131822 - DNA, 25 bp, Homo sapien
aggagagaagaggcctctaggagac

SEQ ID NO: 5131823 - DNA, 25 bp, Homo sapien
agagaagaggcctctaggagacagg

SEQ ID NO: 5131824 - DNA, 25 bp, Homo sapien
catccagccttgagtttgtatgcaa

SEQ ID NO: 5131825 - DNA, 25 bp, Homo sapien
ctgtgagagtgtgcccgtataaggc

SEQ ID NO: 5131826 - DNA, 25 bp, Homo sapien
tataaggccagctgccaagaagacg

SEQ ID NO: 5131827 - DNA, 25 bp, Homo sapien
aagaagacgcgagcctagcatccag

SEQ ID NO: 5131828 - DNA, 25 bp, Homo sapien
gtgtccccaggctactgcagacaca

SEQ ID NO: 5131829 - DNA, 25 bp, Homo sapien
gctcctctgagagcggacagcaggt

SEQ ID NO: 5131830 - DNA, 25 bp, Homo sapien
tgagtaagcgctgtgccctctgagc

SEQ ID NO: 5131831 - DNA, 25 bp, Homo sapien
caggtttgagtaagcgctgtgccct

SEQ ID NO: 5131832 - DNA, 25 bp, Homo sapien
cggacagcaggtttgagtaagcgct

SEQ ID NO: 5131833 - DNA, 25 bp, Homo sapien
cctgggcaaaggtgtggactgctgg

SEQ ID NO: 5131834 - DNA, 25 bp, Homo sapien
tgggcaaaggtgtggactgctggct

SEQ ID NO: 5131835 - DNA, 25 bp, Homo sapien
gctggctcagggtccactagggctc

SEQ ID NO: 5131836 - DNA, 25 bp, Homo sapien
actgctggctcagggtccactaggg

SEQ ID NO: 5131837 - DNA, 25 bp, Homo sapien
atcgctgatccatcctcagcctgaa

SEQ ID NO: 5131838 - DNA, 25 bp, Homo sapien
ccagaatccatgaggctgttgctct

SEQ ID NO: 5131839 - DNA, 25 bp, Homo sapien
cagaatccatgaggctgttgctctg

SEQ ID NO: 5131840 - DNA, 25 bp, Homo sapien
ctgcctgcatcgctgatccatcctc

SEQ ID NO: 5131841 - DNA, 25 bp, Homo sapien
gctattagcagcgatggagaagtga

SEQ ID NO: 5131842 - DNA, 25 bp, Homo sapien
cttgctattagcagcgatggagaag

SEQ ID NO: 5131843 - DNA, 25 bp, Homo sapien
tagcagcgatggagaagtgatgatt

SEQ ID NO: 5131844 - DNA, 25 bp, Homo sapien
tattagcagcgatggagaagtgatg

SEQ ID NO: 5131845 - DNA, 25 bp, Homo sapien
taaaggtgtaatctgaaggtggact

SEQ ID NO: 5131846 - DNA, 25 bp, Homo sapien
aggtaaaggtgtaatctgaaggtgg

SEQ ID NO: 5131847 - DNA, 25 bp, Homo sapien
ggtaaaggtgtaatctgaaggtgga

SEQ ID NO: 5131848 - DNA, 25 bp, Homo sapien
gtaaaggtgtaatctgaaggtggac

SEQ ID NO: 5131849 - DNA, 25 bp, Homo sapien
tttgcctccagcatggccagatctg

SEQ ID NO: 5131850 - DNA, 25 bp, Homo sapien
caagcaggagacgtcgtatggtggc

SEQ ID NO: 5131851 - DNA, 25 bp, Homo sapien
ttaacaagctaggaagggtcacaac

SEQ ID NO: 5131852 - DNA, 25 bp, Homo sapien
gatctgcaagcaggagacgtcgtat

SEQ ID NO: 5131853 - DNA, 25 bp, Homo sapien
gccaggttccggaagatcccatgag

SEQ ID NO: 5131854 - DNA, 25 bp, Homo sapien
agccaggttccggaagatcccatga

SEQ ID NO: 5131855 - DNA, 25 bp, Homo sapien
acatcaccagattcaccaggcacag

SEQ ID NO: 5131856 - DNA, 25 bp, Homo sapien
gttagaatttggcaatattgacaat

SEQ ID NO: 5131857 - DNA, 25 bp, Homo sapien
cagttagaatttggcaatattgaca

SEQ ID NO: 5131858 - DNA, 25 bp, Homo sapien
cacagttagaatttggcaatattga

SEQ ID NO: 5131859 - DNA, 25 bp, Homo sapien
tcaggctttggactcggagcatcag

SEQ ID NO: 5131860 - DNA, 25 bp, Homo sapien
gccaaccaccgagccagggtgagag

SEQ ID NO: 5131861 - DNA, 25 bp, Homo sapien
tggagagtgaaaagaatacggttgt

SEQ ID NO: 5131862 - DNA, 25 bp, Homo sapien
ggactcggagcatcagaaactccag

SEQ ID NO: 5131863 - DNA, 25 bp, Homo sapien
ggtggctgtgctcagaacacctggg

SEQ ID NO: 5131864 - DNA, 25 bp, Homo sapien
tgaaggtggctgtgctcagaacacc

SEQ ID NO: 5131865 - DNA, 25 bp, Homo sapien
aaggtggctgtgctcagaacacctg

SEQ ID NO: 5131866 - DNA, 25 bp, Homo sapien
ctctgaaggtggctgtgctcagaac

SEQ ID NO: 5131867 - DNA, 25 bp, Homo sapien
tgggatttgcaacgtcctcccggta

SEQ ID NO: 5131868 - DNA, 25 bp, Homo sapien
ctgcagaatccattttgtaccccat

SEQ ID NO: 5131869 - DNA, 25 bp, Homo sapien
atttgcaacgtcctcccggtacctg

SEQ ID NO: 5131870 - DNA, 25 bp, Homo sapien
cttcattgggatttgcaacgtcctc

SEQ ID NO: 5131871 - DNA, 25 bp, Homo sapien
gtgcttgagcttcgagcagggactc

SEQ ID NO: 5131872 - DNA, 25 bp, Homo sapien
gcttgagcttcgagcagggactcag

SEQ ID NO: 5131873 - DNA, 25 bp, Homo sapien
ccccgggtgcttgagcttcgagcag

SEQ ID NO: 5131874 - DNA, 25 bp, Homo sapien
gaggccccgggtgcttgagcttcga

SEQ ID NO: 5131875 - DNA, 25 bp, Homo sapien
agccaattgggatgcgcgctggtcc

SEQ ID NO: 5131876 - DNA, 25 bp, Homo sapien
cgtactctgcgacactcaacgtggc

SEQ ID NO: 5131877 - DNA, 25 bp, Homo sapien
gggatggcctgctccgttttccagt

SEQ ID NO: 5131878 - DNA, 25 bp, Homo sapien
gtccggctaaaaggcagccccgaga

SEQ ID NO: 5131879 - DNA, 25 bp, Homo sapien
cagcttccaactcccgccaaagcag

SEQ ID NO: 5131880 - DNA, 25 bp, Homo sapien
ccgcaaagccgccacaaggcgtgga

SEQ ID NO: 5131881 - DNA, 25 bp, Homo sapien
aagccgccacaaggcgtggactgct

SEQ ID NO: 5131882 - DNA, 25 bp, Homo sapien
agcagctccgcaaagccgccacaag

SEQ ID NO: 5131883 - DNA, 25 bp, Homo sapien
gccggggagcgaccaccgcgcctct

SEQ ID NO: 5131884 - DNA, 25 bp, Homo sapien
cctcgccggggagcgaccaccgcgc

SEQ ID NO: 5131885 - DNA, 25 bp, Homo sapien
ggggagcgaccaccgcgcctctcac

SEQ ID NO: 5131886 - DNA, 25 bp, Homo sapien
tcgccggggagcgaccaccgcgcct

SEQ ID NO: 5131887 - DNA, 25 bp, Homo sapien
tagcacagatgggggctgtaccgga

SEQ ID NO: 5131888 - DNA, 25 bp, Homo sapien
gatgggggctgtaccggagatgctg

SEQ ID NO: 5131889 - DNA, 25 bp, Homo sapien
cacagatgggggctgtaccggagat

SEQ ID NO: 5131890 - DNA, 25 bp, Homo sapien
gggctgtaccggagatgctgatcct

SEQ ID NO: 5131891 - DNA, 25 bp, Homo sapien
ggtggccatgagagcctagaagaac

SEQ ID NO: 5131892 - DNA, 25 bp, Homo sapien
agaaccacgaaccagtcacctctgg

SEQ ID NO: 5131893 - DNA, 25 bp, Homo sapien
tgagagcctagaagaaccacgaacc

SEQ ID NO: 5131894 - DNA, 25 bp, Homo sapien
gcctagaagaaccacgaaccagtca

SEQ ID NO: 5131895 - DNA, 25 bp, Homo sapien
ttggctgagtttggcatctgccttc

SEQ ID NO: 5131896 - DNA, 25 bp, Homo sapien
ggctgagtttggcatctgccttcca

SEQ ID NO: 5131897 - DNA, 25 bp, Homo sapien
tccttggctgagtttggcatctgcc

SEQ ID NO: 5131898 - DNA, 25 bp, Homo sapien
gagtttggcatctgccttccaacat

SEQ ID NO: 5131899 - DNA, 25 bp, Homo sapien
cagcgacccacaaaggggcgatact

SEQ ID NO: 5131900 - DNA, 25 bp, Homo sapien
gtgcaggtctggcaacagcgaccca

SEQ ID NO: 5131901 - DNA, 25 bp, Homo sapien
gggggtgcaggtctggcaacagcga

SEQ ID NO: 5131902 - DNA, 25 bp, Homo sapien
tcccaaagcctgacgaccacaggct

SEQ ID NO: 5131903 - DNA, 25 bp, Homo sapien
ccaggatcacattgcagaagcctag

SEQ ID NO: 5131904 - DNA, 25 bp, Homo sapien
aggtccgttatgcttctgtggaaga

SEQ ID NO: 5131905 - DNA, 25 bp, Homo sapien
cacattgcagaagcctaggtccgtt

SEQ ID NO: 5131906 - DNA, 25 bp, Homo sapien
tgcagaagcctaggtccgttatgct

SEQ ID NO: 5131907 - DNA, 25 bp, Homo sapien
tagcagagcctccgaaccagccagc

SEQ ID NO: 5131908 - DNA, 25 bp, Homo sapien
gcctccgaaccagccagccccgaaa

SEQ ID NO: 5131909 - DNA, 25 bp, Homo sapien
agagcctccgaaccagccagccccg

SEQ ID NO: 5131910 - DNA, 25 bp, Homo sapien
catcctggcagggggggatgtgctg

SEQ ID NO: 5131911 - DNA, 25 bp, Homo sapien
gcgctgtacctccttcttcacaagg

SEQ ID NO: 5131912 - DNA, 25 bp, Homo sapien
ccaggatgcgctgtacctccttctt

SEQ ID NO: 5131913 - DNA, 25 bp, Homo sapien
gatgcgctgtacctccttcttcaca

SEQ ID NO: 5131914 - DNA, 25 bp, Homo sapien
cctggatgtgacccaggatgcgctg

SEQ ID NO: 5131915 - DNA, 25 bp, Homo sapien
ggaacctcagcagcgcccagctgaa

SEQ ID NO: 5131916 - DNA, 25 bp, Homo sapien
tctgacccttgtggagctgcacatt

SEQ ID NO: 5131917 - DNA, 25 bp, Homo sapien
ctgacccttgtggagctgcacattc

SEQ ID NO: 5131918 - DNA, 25 bp, Homo sapien
aggcagttcaggaacctcagcagcg

SEQ ID NO: 5131919 - DNA, 25 bp, Homo sapien
cagctgatggggactggactgctgt

SEQ ID NO: 5131920 - DNA, 25 bp, Homo sapien
agctgatggggactggactgctgta

SEQ ID NO: 5131921 - DNA, 25 bp, Homo sapien
agagccagagggaagtgccaacctg

SEQ ID NO: 5131922 - DNA, 25 bp, Homo sapien
tagagaggaggacaagcggcaagcc

SEQ ID NO: 5131923 - DNA, 25 bp, Homo sapien
ggatcccatccaggagggttttgtg

SEQ ID NO: 5131924 - DNA, 25 bp, Homo sapien
tgggagagcagcataaagggcagca

SEQ ID NO: 5131925 - DNA, 25 bp, Homo sapien
gagcagcataaagggcagcaggatc

SEQ ID NO: 5131926 - DNA, 25 bp, Homo sapien
agcaggcgcgggagtcccaggccac

SEQ ID NO: 5131927 - DNA, 25 bp, Homo sapien
aggccacacgaagcacacccaggcc

SEQ ID NO: 5131928 - DNA, 25 bp, Homo sapien
ccaggccacacgaagcacacccagg

SEQ ID NO: 5131929 - DNA, 25 bp, Homo sapien
gcaggcgcgggagtcccaggccaca

SEQ ID NO: 5131930 - DNA, 25 bp, Homo sapien
acagccctggcaaggagcccctcag

SEQ ID NO: 5131931 - DNA, 25 bp, Homo sapien
cagccctggcaaggagcccctcaga

SEQ ID NO: 5131932 - DNA, 25 bp, Homo sapien
agcagagcatctgggacgatgccca

SEQ ID NO: 5131933 - DNA, 25 bp, Homo sapien
tggtctatgtcacacggtgcatccg

SEQ ID NO: 5131934 - DNA, 25 bp, Homo sapien
ggggctgcccactaaccagcagctg

SEQ ID NO: 5131935 - DNA, 25 bp, Homo sapien
accaggtcataggtgacggccactg

SEQ ID NO: 5131936 - DNA, 25 bp, Homo sapien
caagctacgtaggacagccagagct

SEQ ID NO: 5131937 - DNA, 25 bp, Homo sapien
ggctccacaagctacgtaggacagc

SEQ ID NO: 5131938 - DNA, 25 bp, Homo sapien
cagcggctccacaagctacgtagga

SEQ ID NO: 5131939 - DNA, 25 bp, Homo sapien
tccacaagctacgtaggacagccag

SEQ ID NO: 5131940 - DNA, 25 bp, Homo sapien
ctgcagggaaaagggctgagctagg

SEQ ID NO: 5131941 - DNA, 25 bp, Homo sapien
cagggaaaagggctgagctaggcgc

SEQ ID NO: 5131942 - DNA, 25 bp, Homo sapien
tgcagggaaaagggctgagctaggc

SEQ ID NO: 5131943 - DNA, 25 bp, Homo sapien
gggaaaagggctgagctaggcgcac

SEQ ID NO: 5131944 - DNA, 25 bp, Homo sapien
gcagcttctggcactgacgatgtat

SEQ ID NO: 5131945 - DNA, 25 bp, Homo sapien
agcagcttctggcactgacgatgta

SEQ ID NO: 5131946 - DNA, 25 bp, Homo sapien
agcttctggcactgacgatgtattc

SEQ ID NO: 5131947 - DNA, 25 bp, Homo sapien
cagcagcttctggcactgacgatgt

SEQ ID NO: 5131948 - DNA, 25 bp, Homo sapien
cccagttatgggggtccactcctgc

SEQ ID NO: 5131949 - DNA, 25 bp, Homo sapien
gaggcccagttatgggggtccactc

SEQ ID NO: 5131950 - DNA, 25 bp, Homo sapien
cagttatgggggtccactcctgctc

SEQ ID NO: 5131951 - DNA, 25 bp, Homo sapien
ggagaggcccagttatgggggtcca

SEQ ID NO: 5131952 - DNA, 25 bp, Homo sapien
cactcaggacatgacagctcagtct

SEQ ID NO: 5131953 - DNA, 25 bp, Homo sapien
ggcggagggtggagatgctggtcag

SEQ ID NO: 5131954 - DNA, 25 bp, Homo sapien
ccagcagcctggtccctccatgatc

SEQ ID NO: 5131955 - DNA, 25 bp, Homo sapien
ctggtcaggttgaggcccagcagcc

SEQ ID NO: 5131956 - DNA, 25 bp, Homo sapien
gcagcctggtccctccatgatctgg

SEQ ID NO: 5131957 - DNA, 25 bp, Homo sapien
ttctgatgcttgaagagcagcagcg

SEQ ID NO: 5131958 - DNA, 25 bp, Homo sapien
gcgtcgccatgatggccgtgctcat

SEQ ID NO: 5131959 - DNA, 25 bp, Homo sapien
gagcagcagcgtcgccatgatggcc

SEQ ID NO: 5131960 - DNA, 25 bp, Homo sapien
tgatggccgtgctcatcaccgcaga

SEQ ID NO: 5131961 - DNA, 25 bp, Homo sapien
gcaacagtatctcctccgtcagcca

SEQ ID NO: 5131962 - DNA, 25 bp, Homo sapien
cacgcaacagtatctcctccgtcag

SEQ ID NO: 5131963 - DNA, 25 bp, Homo sapien
aacagtatctcctccgtcagccagg

SEQ ID NO: 5131964 - DNA, 25 bp, Homo sapien
acagtatctcctccgtcagccagga

SEQ ID NO: 5131965 - DNA, 25 bp, Homo sapien
agccatgccaggtgaggtgtgtgag

SEQ ID NO: 5131966 - DNA, 25 bp, Homo sapien
tcagccatgccaggtgaggtgtgtg

SEQ ID NO: 5131967 - DNA, 25 bp, Homo sapien
tgtgtgaggcctgggccaggccgtg

SEQ ID NO: 5131968 - DNA, 25 bp, Homo sapien
ggtgtgtgaggcctgggccaggccg

SEQ ID NO: 5131969 - DNA, 25 bp, Homo sapien
gaccactggtactaatctgcaaact

SEQ ID NO: 5131970 - DNA, 25 bp, Homo sapien
ccaaagattttaactgggatccaga

SEQ ID NO: 5131971 - DNA, 25 bp, Homo sapien
tgagtccagagagttaagcagtaac

SEQ ID NO: 5131972 - DNA, 25 bp, Homo sapien
ataggtaagcctagtcctccccaga

SEQ ID NO: 5131973 - DNA, 25 bp, Homo sapien
acagacactacccaaagcagtcctt

SEQ ID NO: 5131974 - DNA, 25 bp, Homo sapien
tccattgatactgaagattattcat

SEQ ID NO: 5131975 - DNA, 25 bp, Homo sapien
ttctagaaggcttgctttgttccat

SEQ ID NO: 5131976 - DNA, 25 bp, Homo sapien
tgcagagtcaggtaatttctagaag

SEQ ID NO: 5131977 - DNA, 25 bp, Homo sapien
gctttactgctaggaatttttgcac

SEQ ID NO: 5131978 - DNA, 25 bp, Homo sapien
ctctgctttactgctaggaattttt

SEQ ID NO: 5131979 - DNA, 25 bp, Homo sapien
acttccgactagaagtgcgagaggg

SEQ ID NO: 5131980 - DNA, 25 bp, Homo sapien
tttggcacttccgactagaagtgcg

SEQ ID NO: 5131981 - DNA, 25 bp, Homo sapien
aaataactgaaaatccgagctgaat

SEQ ID NO: 5131982 - DNA, 25 bp, Homo sapien
gatagacctttacagaactctgcac

SEQ ID NO: 5131983 - DNA, 25 bp, Homo sapien
gttgcaacatactagagcctctgga

SEQ ID NO: 5131984 - DNA, 25 bp, Homo sapien
aattggacataaagcaatcctcagc

SEQ ID NO: 5131985 - DNA, 25 bp, Homo sapien
ccattactaggtttatatccaaaga

SEQ ID NO: 5131986 - DNA, 25 bp, Homo sapien
cattactaggtttatatccaaagaa

SEQ ID NO: 5131987 - DNA, 25 bp, Homo sapien
ctgagtgacttctgggtaaataata

SEQ ID NO: 5131988 - DNA, 25 bp, Homo sapien
tagaaatatctcaaatcaataccct

SEQ ID NO: 5131989 - DNA, 25 bp, Homo sapien
cccgcatcataaagctagaaatatc

SEQ ID NO: 5131990 - DNA, 25 bp, Homo sapien
atgcccgcatcataaagctagaaat

SEQ ID NO: 5131991 - DNA, 25 bp, Homo sapien
tacctaatggtagatgacgagttag

SEQ ID NO: 5131992 - DNA, 25 bp, Homo sapien
gtaggggggaggtatagcattggga

SEQ ID NO: 5131993 - DNA, 25 bp, Homo sapien
atggcacatgtatacatatgtaact

SEQ ID NO: 5131994 - DNA, 25 bp, Homo sapien
tgggtgcagcacaccagcatggcac

SEQ ID NO: 5131995 - DNA, 25 bp, Homo sapien
caaacctatgactgcttggactacc

SEQ ID NO: 5131996 - DNA, 25 bp, Homo sapien
tggactacctgaaagagacaaggag

SEQ ID NO: 5131997 - DNA, 25 bp, Homo sapien
ggaacataaatgaccggagccaact

SEQ ID NO: 5131998 - DNA, 25 bp, Homo sapien
gaaaatcaaccctcaagacacatag

SEQ ID NO: 5131999 - DNA, 25 bp, Homo sapien
ggtttgcccatattttatcgaggat

SEQ ID NO: 5132000 - DNA, 25 bp, Homo sapien
tggtttgcccatattttatcgagga

SEQ ID NO: 5132001 - DNA, 25 bp, Homo sapien
ttggtttgcccatattttatcgagg

SEQ ID NO: 5132002 - DNA, 25 bp, Homo sapien
catgacgcataatacctctttgtaa

SEQ ID NO: 5132003 - DNA, 25 bp, Homo sapien
gtatattttctggaagcgtgtattc

SEQ ID NO: 5132004 - DNA, 25 bp, Homo sapien
tttcagtaatacacacatgacgcat

SEQ ID NO: 5132005 - DNA, 25 bp, Homo sapien
tttgacattgattcctgggtgtatg

SEQ ID NO: 5132006 - DNA, 25 bp, Homo sapien
tcaattaccaggcaagttaaagagc

SEQ ID NO: 5132007 - DNA, 25 bp, Homo sapien
gaaaaacatgcagtagcatttagta

SEQ ID NO: 5132008 - DNA, 25 bp, Homo sapien
attaccaggcaagttaaagagcatg

SEQ ID NO: 5132009 - DNA, 25 bp, Homo sapien
taccaggcaagttaaagagcatgat

SEQ ID NO: 5132010 - DNA, 25 bp, Homo sapien
ggtggtaggagatagagatgaagta

SEQ ID NO: 5132011 - DNA, 25 bp, Homo sapien
ccaagggtggtaggagatagagatg

SEQ ID NO: 5132012 - DNA, 25 bp, Homo sapien
ttttcaccaagggtggtaggagata

SEQ ID NO: 5132013 - DNA, 25 bp, Homo sapien
ttcaccaagggtggtaggagataga

SEQ ID NO: 5132014 - DNA, 25 bp, Homo sapien
gagagaatagaaactagtgcccgtt

SEQ ID NO: 5132015 - DNA, 25 bp, Homo sapien
gctggtctgaattgcctgggcttct

SEQ ID NO: 5132016 - DNA, 25 bp, Homo sapien
gagattataggaacaagtcactgtg

SEQ ID NO: 5132017 - DNA, 25 bp, Homo sapien
cctctgtgctagacaccgtattaca

SEQ ID NO: 5132018 - DNA, 25 bp, Homo sapien
tgtaagctttttaaggtgaatcacg

SEQ ID NO: 5132019 - DNA, 25 bp, Homo sapien
agaatttctcgtgcttgaatccggg

SEQ ID NO: 5132020 - DNA, 25 bp, Homo sapien
cacggtatagttgcataggttatgc

SEQ ID NO: 5132021 - DNA, 25 bp, Homo sapien
atgcaagtaattggccgagcgcagt

SEQ ID NO: 5132022 - DNA, 25 bp, Homo sapien
ttgtaacaatcgcacgtccccatct

SEQ ID NO: 5132023 - DNA, 25 bp, Homo sapien
tcaacttcctcacggagtggcatgc

SEQ ID NO: 5132024 - DNA, 25 bp, Homo sapien
cgggaaaccttcagcattgtaacaa

SEQ ID NO: 5132025 - DNA, 25 bp, Homo sapien
cccatctagtggctaacgtgtgtaa

SEQ ID NO: 5132026 - DNA, 25 bp, Homo sapien
taacatccgataatccaacaagata

SEQ ID NO: 5132027 - DNA, 25 bp, Homo sapien
aaagaaatgggaggcactgagtttc

SEQ ID NO: 5132028 - DNA, 25 bp, Homo sapien
aatacagagatgactgatcagtaaa

SEQ ID NO: 5132029 - DNA, 25 bp, Homo sapien
taaaatccactagaaagtgtgtgac

SEQ ID NO: 5132030 - DNA, 25 bp, Homo sapien
aagtcactgccgctcggtgcgcact

SEQ ID NO: 5132031 - DNA, 25 bp, Homo sapien
ctcctgcgctgagttagggctcgcg

SEQ ID NO: 5132032 - DNA, 25 bp, Homo sapien
gggaactacagcagcggcgaagtca

SEQ ID NO: 5132033 - DNA, 25 bp, Homo sapien
ggcagccggtcctcctgcgctgagt

SEQ ID NO: 5132034 - DNA, 25 bp, Homo sapien
tggttctagttctgccctccgcggg

SEQ ID NO: 5132035 - DNA, 25 bp, Homo sapien
gccgggaacctggttctagttctgc

SEQ ID NO: 5132036 - DNA, 25 bp, Homo sapien
ccatccgtgtggtcggaaacggccg

SEQ ID NO: 5132037 - DNA, 25 bp, Homo sapien
cgccccatccgtgtggtcggaaacg

SEQ ID NO: 5132038 - DNA, 25 bp, Homo sapien
cagtagcctgaaacgtgggtgtgca

SEQ ID NO: 5132039 - DNA, 25 bp, Homo sapien
ggtgcccaaggtactagtcagaaag

SEQ ID NO: 5132040 - DNA, 25 bp, Homo sapien
actcaaagggatgacgtcaggtgcc

SEQ ID NO: 5132041 - DNA, 25 bp, Homo sapien
gatgtgaatccaagtccaggtgaca

SEQ ID NO: 5132042 - DNA, 25 bp, Homo sapien
gtgctttctgaaagttcccactgtg

SEQ ID NO: 5132043 - DNA, 25 bp, Homo sapien
gctacgcagtaagtcccagggattc

SEQ ID NO: 5132044 - DNA, 25 bp, Homo sapien
gcaactactacatgctacgcagtaa

SEQ ID NO: 5132045 - DNA, 25 bp, Homo sapien
tttctgaaagttcccactgtgcttg

SEQ ID NO: 5132046 - DNA, 25 bp, Homo sapien
tctctgaaattcctagggctatata

SEQ ID NO: 5132047 - DNA, 25 bp, Homo sapien
gctatatagcccaaggccctttgcc

SEQ ID NO: 5132048 - DNA, 25 bp, Homo sapien
ctgaaattcctagggctatatagcc

SEQ ID NO: 5132049 - DNA, 25 bp, Homo sapien
aaattcctagggctatatagcccaa

SEQ ID NO: 5132050 - DNA, 25 bp, Homo sapien
agagctgtgagtaaccttctaccag

SEQ ID NO: 5132051 - DNA, 25 bp, Homo sapien
tgcagcagagctgtgagtaaccttc

SEQ ID NO: 5132052 - DNA, 25 bp, Homo sapien
gctgtgagtaaccttctaccagaca

SEQ ID NO: 5132053 - DNA, 25 bp, Homo sapien
tgagtaaccttctaccagacaccac

SEQ ID NO: 5132054 - DNA, 25 bp, Homo sapien
ctgcgtcattgtctttgggagtgtg

SEQ ID NO: 5132055 - DNA, 25 bp, Homo sapien
gcccagaactgcactagtctcatgt

SEQ ID NO: 5132056 - DNA, 25 bp, Homo sapien
tgctctaggaactgcgtcattgtct

SEQ ID NO: 5132057 - DNA, 25 bp, Homo sapien
gaggttgataatccctctaccattc

SEQ ID NO: 5132058 - DNA, 25 bp, Homo sapien
tcatcatagggccccacgatggagc

SEQ ID NO: 5132059 - DNA, 25 bp, Homo sapien
ctggagccaggaaggttacctccga

SEQ ID NO: 5132060 - DNA, 25 bp, Homo sapien
tggagccaggaaggttacctccgac

SEQ ID NO: 5132061 - DNA, 25 bp, Homo sapien
gaccacctcatcatagggccccacg

SEQ ID NO: 5132062 - DNA, 25 bp, Homo sapien
gggcccagtgactagggagggcagt

SEQ ID NO: 5132063 - DNA, 25 bp, Homo sapien
tccagtaggctcaatactgagctca

SEQ ID NO: 5132064 - DNA, 25 bp, Homo sapien
ccagtaggctcaatactgagctcag

SEQ ID NO: 5132065 - DNA, 25 bp, Homo sapien
caggaatataaactaccctgtacat

SEQ ID NO: 5132066 - DNA, 25 bp, Homo sapien
tatctctgttttatctacagtgaag

SEQ ID NO: 5132067 - DNA, 25 bp, Homo sapien
aggtaacctaaatatgtcagggaga

SEQ ID NO: 5132068 - DNA, 25 bp, Homo sapien
taaactaccctgtacatcacaaaac

SEQ ID NO: 5132069 - DNA, 25 bp, Homo sapien
tccttggtccaagacagacagtaca

SEQ ID NO: 5132070 - DNA, 25 bp, Homo sapien
gagaaagatcccacaaaggacttga

SEQ ID NO: 5132071 - DNA, 25 bp, Homo sapien
tcacaaaaaggtaacggacatggcc

SEQ ID NO: 5132072 - DNA, 25 bp, Homo sapien
acatgatgagcctggaacgtcttgg

SEQ ID NO: 5132073 - DNA, 25 bp, Homo sapien
tttggggcccattaactatgctcag

SEQ ID NO: 5132074 - DNA, 25 bp, Homo sapien
gcccattaactatgctcagaggctg

SEQ ID NO: 5132075 - DNA, 25 bp, Homo sapien
ggctttggggcccattaactatgct

SEQ ID NO: 5132076 - DNA, 25 bp, Homo sapien
gggcccattaactatgctcagaggc

SEQ ID NO: 5132077 - DNA, 25 bp, Homo sapien
gccagctccacttcccaatctacct

SEQ ID NO: 5132078 - DNA, 25 bp, Homo sapien
ttgcctttctttccaatgaccacgg

SEQ ID NO: 5132079 - DNA, 25 bp, Homo sapien
ggccagctccacttcccaatctacc

SEQ ID NO: 5132080 - DNA, 25 bp, Homo sapien
ctttccaatgaccacggccagctcc

SEQ ID NO: 5132081 - DNA, 25 bp, Homo sapien
tagtgtcagggacagctggcaccat

SEQ ID NO: 5132082 - DNA, 25 bp, Homo sapien
tgttatcccatgttagtagccagag

SEQ ID NO: 5132083 - DNA, 25 bp, Homo sapien
agcaaggaggctgactgcttcctag

SEQ ID NO: 5132084 - DNA, 25 bp, Homo sapien
caccatgtgttggtgagcgaggtca

SEQ ID NO: 5132085 - DNA, 25 bp, Homo sapien
tggccatacaggaggatagatcatg

SEQ ID NO: 5132086 - DNA, 25 bp, Homo sapien
catacaggaggatagatcatgggtg

SEQ ID NO: 5132087 - DNA, 25 bp, Homo sapien
ggaggatagatcatgggtgacacca

SEQ ID NO: 5132088 - DNA, 25 bp, Homo sapien
gggatttggccatacaggaggatag

SEQ ID NO: 5132089 - DNA, 25 bp, Homo sapien
agccacagtgaagccggccacgtgg

SEQ ID NO: 5132090 - DNA, 25 bp, Homo sapien
cgagcactcacgtcatgagccacag

SEQ ID NO: 5132091 - DNA, 25 bp, Homo sapien
tcacgagcactcacgtcatgagcca

SEQ ID NO: 5132092 - DNA, 25 bp, Homo sapien
acagtgaagccggccacgtgggcca

SEQ ID NO: 5132093 - DNA, 25 bp, Homo sapien
tccttggtcaccaaggcagggccca

SEQ ID NO: 5132094 - DNA, 25 bp, Homo sapien
gggcccagagggcagaaggtgtcga

SEQ ID NO: 5132095 - DNA, 25 bp, Homo sapien
gtgtcgaaggtttttcccagcagcc

SEQ ID NO: 5132096 - DNA, 25 bp, Homo sapien
ctgctacactgtccttggtcaccaa

SEQ ID NO: 5132097 - DNA, 25 bp, Homo sapien
ccgtgctcctccctggagggctgtt

SEQ ID NO: 5132098 - DNA, 25 bp, Homo sapien
tgctcctccctggagggctgttcat

SEQ ID NO: 5132099 - DNA, 25 bp, Homo sapien
tgaacccgtgctcctccctggaggg

SEQ ID NO: 5132100 - DNA, 25 bp, Homo sapien
ctgaacccgtgctcctccctggagg

SEQ ID NO: 5132101 - DNA, 25 bp, Homo sapien
ctcgacagcagatctttaagttgtg

SEQ ID NO: 5132102 - DNA, 25 bp, Homo sapien
gggacacccaggctatcaggtcctc

SEQ ID NO: 5132103 - DNA, 25 bp, Homo sapien
tatcaggtcctctgtcttgaatacc

SEQ ID NO: 5132104 - DNA, 25 bp, Homo sapien
ttccccattcactcgacagcagatc

SEQ ID NO: 5132105 - DNA, 25 bp, Homo sapien
ggctggcaggatagcccctgtcact

SEQ ID NO: 5132106 - DNA, 25 bp, Homo sapien
gcctccacatgtgtggcaggtggag

SEQ ID NO: 5132107 - DNA, 25 bp, Homo sapien
gggctcaggtcagcctccacatgtg

SEQ ID NO: 5132108 - DNA, 25 bp, Homo sapien
ccacagccaaaggtggagggctcag

SEQ ID NO: 5132109 - DNA, 25 bp, Homo sapien
ctggagcaaagcaaaaggacccggt

SEQ ID NO: 5132110 - DNA, 25 bp, Homo sapien
agcaaaaggacccggtgagaccagg

SEQ ID NO: 5132111 - DNA, 25 bp, Homo sapien
gcaaagcaaaaggacccggtgagac

SEQ ID NO: 5132112 - DNA, 25 bp, Homo sapien
ggagcaaagcaaaaggacccggtga

SEQ ID NO: 5132113 - DNA, 25 bp, Homo sapien
gggtcccagtcaggatgacatcccc

SEQ ID NO: 5132114 - DNA, 25 bp, Homo sapien
cccagtcaggatgacatcccctggg

SEQ ID NO: 5132115 - DNA, 25 bp, Homo sapien
cagtcaggatgacatcccctgggta

SEQ ID NO: 5132116 - DNA, 25 bp, Homo sapien
gtcaggatgacatcccctgggtaaa

SEQ ID NO: 5132117 - DNA, 25 bp, Homo sapien
gttgatgatgacacctagttcttca

SEQ ID NO: 5132118 - DNA, 25 bp, Homo sapien
tagttcttcaatctcacactggact

SEQ ID NO: 5132119 - DNA, 25 bp, Homo sapien
accttgttgatgatgacacctagtt

SEQ ID NO: 5132120 - DNA, 25 bp, Homo sapien
ttcttcaatctcacactggacttca

SEQ ID NO: 5132121 - DNA, 25 bp, Homo sapien
tgggcctttccctgggctaggctga

SEQ ID NO: 5132122 - DNA, 25 bp, Homo sapien
gcagatgccctcatcctatgtgcag

SEQ ID NO: 5132123 - DNA, 25 bp, Homo sapien
ccgacgaatttattgaagagagctc

SEQ ID NO: 5132124 - DNA, 25 bp, Homo sapien
ttctcccttctaccgagaagaggcg

SEQ ID NO: 5132125 - DNA, 25 bp, Homo sapien
aaaactagaacagttcatccggcag

SEQ ID NO: 5132126 - DNA, 25 bp, Homo sapien
cattgaggcttgattgtcccttgcc

SEQ ID NO: 5132127 - DNA, 25 bp, Homo sapien
catccggcagttcatttgtagctag

SEQ ID NO: 5132128 - DNA, 25 bp, Homo sapien
tgtcctagagccagaagatggagag

SEQ ID NO: 5132129 - DNA, 25 bp, Homo sapien
ggtgtcttccagcaacagatttggt

SEQ ID NO: 5132130 - DNA, 25 bp, Homo sapien
tgatggtgcctcattaagaccctgg

SEQ ID NO: 5132131 - DNA, 25 bp, Homo sapien
caatagagtagctcagggaaaccca

SEQ ID NO: 5132132 - DNA, 25 bp, Homo sapien
gtattgggactgctttgcggcagca

SEQ ID NO: 5132133 - DNA, 25 bp, Homo sapien
tcttctttccagagtgtgcggaccc

SEQ ID NO: 5132134 - DNA, 25 bp, Homo sapien
tcgccatcagtgctgtctggacctt

SEQ ID NO: 5132135 - DNA, 25 bp, Homo sapien
ccagagtgtgcggacccaaagctcg

SEQ ID NO: 5132136 - DNA, 25 bp, Homo sapien
ggacccaaagctcgccatcagtgct

SEQ ID NO: 5132137 - DNA, 25 bp, Homo sapien
ggcttctttaaacaagaggagagaa

SEQ ID NO: 5132138 - DNA, 25 bp, Homo sapien
gggcttctttaaacaagaggagaga

SEQ ID NO: 5132139 - DNA, 25 bp, Homo sapien
tgcaggcagtggtgtttgctggtgg

SEQ ID NO: 5132140 - DNA, 25 bp, Homo sapien
gcaggcagtggtgtttgctggtggc

SEQ ID NO: 5132141 - DNA, 25 bp, Homo sapien
cccaggaagaagggatcttcggtga

SEQ ID NO: 5132142 - DNA, 25 bp, Homo sapien
agaagggatcttcggtgagtcccaa

SEQ ID NO: 5132143 - DNA, 25 bp, Homo sapien
ggatcttcggtgagtcccaaccagt

SEQ ID NO: 5132144 - DNA, 25 bp, Homo sapien
gaagaagggatcttcggtgagtccc

SEQ ID NO: 5132145 - DNA, 25 bp, Homo sapien
tgttcccttgcagtcctcgaggcag

SEQ ID NO: 5132146 - DNA, 25 bp, Homo sapien
gccggtacttcagggtgtgtttcaa

SEQ ID NO: 5132147 - DNA, 25 bp, Homo sapien
cagtgatgacttcggagaggctgac

SEQ ID NO: 5132148 - DNA, 25 bp, Homo sapien
cagctgcccgatactggtgaggccc

SEQ ID NO: 5132149 - DNA, 25 bp, Homo sapien
gacctggtggcctcatggcgatagt

SEQ ID NO: 5132150 - DNA, 25 bp, Homo sapien
ccaactagatgctcattcctggtga

SEQ ID NO: 5132151 - DNA, 25 bp, Homo sapien
ccacattcccgtaatgtttgggtgg

SEQ ID NO: 5132152 - DNA, 25 bp, Homo sapien
tctgtgttctgaccctgagttgtcc

SEQ ID NO: 5132153 - DNA, 25 bp, Homo sapien
ttctgtcacacaccgttgcactggg

SEQ ID NO: 5132154 - DNA, 25 bp, Homo sapien
tgggctacagcaaaggcgtcatcgg

SEQ ID NO: 5132155 - DNA, 25 bp, Homo sapien
tgcggagtcctgctcttggaatgcc

SEQ ID NO: 5132156 - DNA, 25 bp, Homo sapien
tagtgaccgtaatcccatttgggcc

SEQ ID NO: 5132157 - DNA, 25 bp, Homo sapien
aggagcaccggaagcaagcaggcct

SEQ ID NO: 5132158 - DNA, 25 bp, Homo sapien
gaacgaatcagggagccatagtcag

SEQ ID NO: 5132159 - DNA, 25 bp, Homo sapien
cagtgtgtagcgttctggggacacc

SEQ ID NO: 5132160 - DNA, 25 bp, Homo sapien
gacaccgggtgttgctgagaacgaa

SEQ ID NO: 5132161 - DNA, 25 bp, Homo sapien
gagccagatgccatggggtggttca

SEQ ID NO: 5132162 - DNA, 25 bp, Homo sapien
cagatgccatggggtggttcagcca

SEQ ID NO: 5132163 - DNA, 25 bp, Homo sapien
agatgccatggggtggttcagccat

SEQ ID NO: 5132164 - DNA, 25 bp, Homo sapien
gccagatgccatggggtggttcagc

SEQ ID NO: 5132165 - DNA, 25 bp, Homo sapien
tcattgagcaggtaagaggaccgag

SEQ ID NO: 5132166 - DNA, 25 bp, Homo sapien
tatggccaagtgctgttaccacacc

SEQ ID NO: 5132167 - DNA, 25 bp, Homo sapien
catcctcattgagcaggtaagagga

SEQ ID NO: 5132168 - DNA, 25 bp, Homo sapien
tttggagtcctgtaaggtatggcca

SEQ ID NO: 5132169 - DNA, 25 bp, Homo sapien
tgtgtctgagctgcagcccttgagg

SEQ ID NO: 5132170 - DNA, 25 bp, Homo sapien
agcagcagagctgtgtctgagctgc

SEQ ID NO: 5132171 - DNA, 25 bp, Homo sapien
tgagctgcagcccttgaggttcagg

SEQ ID NO: 5132172 - DNA, 25 bp, Homo sapien
ctgttcctaggaagcagcagcagag

SEQ ID NO: 5132173 - DNA, 25 bp, Homo sapien
ggcactgatgtccttggttgctccc

SEQ ID NO: 5132174 - DNA, 25 bp, Homo sapien
ccagcacctccctttgagtcctcac

SEQ ID NO: 5132175 - DNA, 25 bp, Homo sapien
ctgatgtccttggttgctcccagca

SEQ ID NO: 5132176 - DNA, 25 bp, Homo sapien
cagggtgtctggttgagaaggaggc

SEQ ID NO: 5132177 - DNA, 25 bp, Homo sapien
tctgctccaagcagcctggtgacct

SEQ ID NO: 5132178 - DNA, 25 bp, Homo sapien
atgtcctttttcctgtctgggccag

SEQ ID NO: 5132179 - DNA, 25 bp, Homo sapien
tgaccttggatgtcctttttcctgt

SEQ ID NO: 5132180 - DNA, 25 bp, Homo sapien
ctccaagcagcctggtgaccttgga

SEQ ID NO: 5132181 - DNA, 25 bp, Homo sapien
tggatactacctgtggccacactct

SEQ ID NO: 5132182 - DNA, 25 bp, Homo sapien
gcccgggaagcaggataggtcagga

SEQ ID NO: 5132183 - DNA, 25 bp, Homo sapien
aggaaaggctttggatactacctgt

SEQ ID NO: 5132184 - DNA, 25 bp, Homo sapien
gctttggatactacctgtggccaca

SEQ ID NO: 5132185 - DNA, 25 bp, Homo sapien
gaagtccatgtaagcccatgccact

SEQ ID NO: 5132186 - DNA, 25 bp, Homo sapien
tcaggaaggccagagcgccatacgc

SEQ ID NO: 5132187 - DNA, 25 bp, Homo sapien
gattcatccgttttagtcccatgga

SEQ ID NO: 5132188 - DNA, 25 bp, Homo sapien
gatctgtgcctcgaaagcataagga

SEQ ID NO: 5132189 - DNA, 25 bp, Homo sapien
aggagaataatagccccagcactgc

SEQ ID NO: 5132190 - DNA, 25 bp, Homo sapien
tgaacgcccagctggtcacataaga

SEQ ID NO: 5132191 - DNA, 25 bp, Homo sapien
gtagaaatatctccgctgaacgccc

SEQ ID NO: 5132192 - DNA, 25 bp, Homo sapien
tcaccttaacatgggagctcagctc

SEQ ID NO: 5132193 - DNA, 25 bp, Homo sapien
cttctgccccttgcatgacgggttc

SEQ ID NO: 5132194 - DNA, 25 bp, Homo sapien
cacttgattcttcccatgggcagtc

SEQ ID NO: 5132195 - DNA, 25 bp, Homo sapien
ccacttgattcttcccatgggcagt

SEQ ID NO: 5132196 - DNA, 25 bp, Homo sapien
cttgcatgacgggttcccagggtct

SEQ ID NO: 5132197 - DNA, 25 bp, Homo sapien
tccctcgaacatgctctggatcaca

SEQ ID NO: 5132198 - DNA, 25 bp, Homo sapien
gatcacaggtagtgccggtgtagag

SEQ ID NO: 5132199 - DNA, 25 bp, Homo sapien
ggatcacaggtagtgccggtgtaga

SEQ ID NO: 5132200 - DNA, 25 bp, Homo sapien
ttcctcactccctcgaacatgctct

SEQ ID NO: 5132201 - DNA, 25 bp, Homo sapien
gcaccagggcccctcgcagttctcc

SEQ ID NO: 5132202 - DNA, 25 bp, Homo sapien
agttctccacctgccacgctgcagc

SEQ ID NO: 5132203 - DNA, 25 bp, Homo sapien
gcccctgctagctgctgaccagatg

SEQ ID NO: 5132204 - DNA, 25 bp, Homo sapien
tgaggcctggaatccgcaccagggc

SEQ ID NO: 5132205 - DNA, 25 bp, Homo sapien
gaatgccggcatgctggtctttccg

SEQ ID NO: 5132206 - DNA, 25 bp, Homo sapien
caccatgttgaagcccttggcagcc

SEQ ID NO: 5132207 - DNA, 25 bp, Homo sapien
tcagctagacgctataccgtggact

SEQ ID NO: 5132208 - DNA, 25 bp, Homo sapien
gaggcctttgacttcgttaagcagc

SEQ ID NO: 5132209 - DNA, 25 bp, Homo sapien
cttttctcctctgcatcggctctga

SEQ ID NO: 5132210 - DNA, 25 bp, Homo sapien
gagacactgagagggtgacgtggcc

SEQ ID NO: 5132211 - DNA, 25 bp, Homo sapien
tgacgtggccccagggacctttgga

SEQ ID NO: 5132212 - DNA, 25 bp, Homo sapien
tgcatcggctctgaccccagcacac

SEQ ID NO: 5132213 - DNA, 25 bp, Homo sapien
aggcaaagggaaggccctccttcat

SEQ ID NO: 5132214 - DNA, 25 bp, Homo sapien
tccttcatggctaagctgggcctcc

SEQ ID NO: 5132215 - DNA, 25 bp, Homo sapien
ggcctccgtaagtccacgttccaga

SEQ ID NO: 5132216 - DNA, 25 bp, Homo sapien
gctaagctgggcctccgtaagtcca

SEQ ID NO: 5132217 - DNA, 25 bp, Homo sapien
ctcccgccccctgtgaggcatctgc

SEQ ID NO: 5132218 - DNA, 25 bp, Homo sapien
cctgtgaggcatctgcttggaggtg

SEQ ID NO: 5132219 - DNA, 25 bp, Homo sapien
aggcatctgcttggaggtgggggct

SEQ ID NO: 5132220 - DNA, 25 bp, Homo sapien
aaggaggaaggaaggctctgcagca

SEQ ID NO: 5132221 - DNA, 25 bp, Homo sapien
atggcctggtcttcgatggtagtta

SEQ ID NO: 5132222 - DNA, 25 bp, Homo sapien
acagcccccacagctaactgatgcc

SEQ ID NO: 5132223 - DNA, 25 bp, Homo sapien
cttcgatggtagttaaggtgtcagc

SEQ ID NO: 5132224 - DNA, 25 bp, Homo sapien
cctggtcttcgatggtagttaaggt

SEQ ID NO: 5132225 - DNA, 25 bp, Homo sapien
gtgctgtctgagaaatggactcggg

SEQ ID NO: 5132226 - DNA, 25 bp, Homo sapien
gggcttgtatcaggcagggctgtgt

SEQ ID NO: 5132227 - DNA, 25 bp, Homo sapien
ccacgtgaaatgtgggcagggcact

SEQ ID NO: 5132228 - DNA, 25 bp, Homo sapien
tggtggtcaggagtacaggttcatg

SEQ ID NO: 5132229 - DNA, 25 bp, Homo sapien
caggggccacccctgtgttcaggca

SEQ ID NO: 5132230 - DNA, 25 bp, Homo sapien
aggggccacccctgtgttcaggcat

SEQ ID NO: 5132231 - DNA, 25 bp, Homo sapien
aagatgcttgtaagccccttgtcct

SEQ ID NO: 5132232 - DNA, 25 bp, Homo sapien
taggagatggctgaggataagccca

SEQ ID NO: 5132233 - DNA, 25 bp, Homo sapien
gaggataagcccagtggttttctgt

SEQ ID NO: 5132234 - DNA, 25 bp, Homo sapien
ctctgctactgacctgtccccaggc

SEQ ID NO: 5132235 - DNA, 25 bp, Homo sapien
aagccttgcccgagcccgtgctggg

SEQ ID NO: 5132236 - DNA, 25 bp, Homo sapien
tcagcaagccttgcccgagcccgtg

SEQ ID NO: 5132237 - DNA, 25 bp, Homo sapien
agcaagccttgcccgagcccgtgct

SEQ ID NO: 5132238 - DNA, 25 bp, Homo sapien
caagccttgcccgagcccgtgctgg

SEQ ID NO: 5132239 - DNA, 25 bp, Homo sapien
gggctggggccaaaaacagtcagca

SEQ ID NO: 5132240 - DNA, 25 bp, Homo sapien
gatgtgactgggctgtcccagtgca

SEQ ID NO: 5132241 - DNA, 25 bp, Homo sapien
tctcgcgactcttcttgccgctgat

SEQ ID NO: 5132242 - DNA, 25 bp, Homo sapien
agcaacaccctctcgtgacccagct

SEQ ID NO: 5132243 - DNA, 25 bp, Homo sapien
tgaccataagcaaaaccagctcggt

SEQ ID NO: 5132244 - DNA, 25 bp, Homo sapien
cagacagaccccaagtgcagaatca

SEQ ID NO: 5132245 - DNA, 25 bp, Homo sapien
cggactagggtagaatcctgctcaa

SEQ ID NO: 5132246 - DNA, 25 bp, Homo sapien
tgctaagtttggacataacccaggg

SEQ ID NO: 5132247 - DNA, 25 bp, Homo sapien
gaagaactggccgattcacaggaaa

SEQ ID NO: 5132248 - DNA, 25 bp, Homo sapien
ttccaacaatgacgcggagaaggca

SEQ ID NO: 5132249 - DNA, 25 bp, Homo sapien
cagtgtatgtcttgccttctccgcg

SEQ ID NO: 5132250 - DNA, 25 bp, Homo sapien
gcaagtttcctgtgaatcggccagt

SEQ ID NO: 5132251 - DNA, 25 bp, Homo sapien
ggttatgtccaaacttagcacctgc

SEQ ID NO: 5132252 - DNA, 25 bp, Homo sapien
ggagagatgcatcgagcagtcccag

SEQ ID NO: 5132253 - DNA, 25 bp, Homo sapien
tggagctctcagatctacagacaag

SEQ ID NO: 5132254 - DNA, 25 bp, Homo sapien
ggaattgagcaggattctaccctag

SEQ ID NO: 5132255 - DNA, 25 bp, Homo sapien
ccataagttgataactggagctggg

SEQ ID NO: 5132256 - DNA, 25 bp, Homo sapien
cctacagtaaagctagaatttgctt

SEQ ID NO: 5132257 - DNA, 25 bp, Homo sapien
tgcttcaaaataatcaggggagtga

SEQ ID NO: 5132258 - DNA, 25 bp, Homo sapien
tgggttctcctacagtaaagctaga

SEQ ID NO: 5132259 - DNA, 25 bp, Homo sapien
gaagaactgggttctcctacagtaa

SEQ ID NO: 5132260 - DNA, 25 bp, Homo sapien
taaaacaattttggccataagttga

SEQ ID NO: 5132261 - DNA, 25 bp, Homo sapien
cagctccagttatcaacttatggcc

SEQ ID NO: 5132262 - DNA, 25 bp, Homo sapien
aagcaaattctagctttactgtagg

SEQ ID NO: 5132263 - DNA, 25 bp, Homo sapien
tcactcccctgattattttgaagca

SEQ ID NO: 5132264 - DNA, 25 bp, Homo sapien
ttactgtaggagaacccagttcttc

SEQ ID NO: 5132265 - DNA, 25 bp, Homo sapien
caacttatggccaaaattgttttat

SEQ ID NO: 5132266 - DNA, 25 bp, Homo sapien
tctagctttactgtaggagaaccca

SEQ ID NO: 5132267 - DNA, 25 bp, Homo sapien
tgataaatacaaacagaggactaca

SEQ ID NO: 5132268 - DNA, 25 bp, Homo sapien
aacagaggactacatgaaagtgttc

SEQ ID NO: 5132269 - DNA, 25 bp, Homo sapien
gctataaaggacattgagtcaactg

SEQ ID NO: 5132270 - DNA, 25 bp, Homo sapien
aatacggcatatggctagttttagg

SEQ ID NO: 5132271 - DNA, 25 bp, Homo sapien
atttgaggttaaacagatgtgacaa

SEQ ID NO: 5132272 - DNA, 25 bp, Homo sapien
ttagttaagaaatacggcatatggc

SEQ ID NO: 5132273 - DNA, 25 bp, Homo sapien
gccatatgccgtatttcttaactaa

SEQ ID NO: 5132274 - DNA, 25 bp, Homo sapien
tacatcatagtcctttactcctaaa

SEQ ID NO: 5132275 - DNA, 25 bp, Homo sapien
cagttgactcaatgtcctttatagc

SEQ ID NO: 5132276 - DNA, 25 bp, Homo sapien
cctaaaactagccatatgccgtatt

SEQ ID NO: 5132277 - DNA, 25 bp, Homo sapien
gaacactttcatgtagtcctctgtt

SEQ ID NO: 5132278 - DNA, 25 bp, Homo sapien
ttgtcacatctgtttaacctcaaat

SEQ ID NO: 5132279 - DNA, 25 bp, Homo sapien
ctctcctcgtcccaaacgaagacgc

SEQ ID NO: 5132280 - DNA, 25 bp, Homo sapien
tgcagccggcgccagaggcggccga

SEQ ID NO: 5132281 - DNA, 25 bp, Homo sapien
ggctaacgccgccatcaaggcagag

SEQ ID NO: 5132282 - DNA, 25 bp, Homo sapien
aggacggccgtgcagccggcgccag

SEQ ID NO: 5132283 - DNA, 25 bp, Homo sapien
gctaacgccgccatcaaggcagagg

SEQ ID NO: 5132284 - DNA, 25 bp, Homo sapien
caaacgaagacgccggctaacgccg

SEQ ID NO: 5132285 - DNA, 25 bp, Homo sapien
tcggccgcctctggcgccggctgca

SEQ ID NO: 5132286 - DNA, 25 bp, Homo sapien
cctctgccttgatggcggcgttagc

SEQ ID NO: 5132287 - DNA, 25 bp, Homo sapien
cggcgttagccggcgtcttcgtttg

SEQ ID NO: 5132288 - DNA, 25 bp, Homo sapien
ctctgccttgatggcggcgttagcc

SEQ ID NO: 5132289 - DNA, 25 bp, Homo sapien
ctggcgccggctgcacggccgtcct

SEQ ID NO: 5132290 - DNA, 25 bp, Homo sapien
gcgtcttcgtttgggacgaggagag

SEQ ID NO: 5132291 - DNA, 25 bp, Homo sapien
cgcaggcccgtgacgaagcggcact

SEQ ID NO: 5132292 - DNA, 25 bp, Homo sapien
gtgacgaagcggcactgattggcca

SEQ ID NO: 5132293 - DNA, 25 bp, Homo sapien
caggcccgtgacgaagcggcactga

SEQ ID NO: 5132294 - DNA, 25 bp, Homo sapien
ggcccgtgacgaagcggcactgatt

SEQ ID NO: 5132295 - DNA, 25 bp, Homo sapien
aggcccgtgacgaagcggcactgat

SEQ ID NO: 5132296 - DNA, 25 bp, Homo sapien
gcccgtgacgaagcggcactgattg

SEQ ID NO: 5132297 - DNA, 25 bp, Homo sapien
tggccaatcagtgccgcttcgtcac

SEQ ID NO: 5132298 - DNA, 25 bp, Homo sapien
caatcagtgccgcttcgtcacgggc

SEQ ID NO: 5132299 - DNA, 25 bp, Homo sapien
agtgccgcttcgtcacgggcctgcg

SEQ ID NO: 5132300 - DNA, 25 bp, Homo sapien
tcagtgccgcttcgtcacgggcctg

SEQ ID NO: 5132301 - DNA, 25 bp, Homo sapien
atcagtgccgcttcgtcacgggcct

SEQ ID NO: 5132302 - DNA, 25 bp, Homo sapien
aatcagtgccgcttcgtcacgggcc

SEQ ID NO: 5132303 - DNA, 25 bp, Homo sapien
aggagccgccgctcatctgtctctg

SEQ ID NO: 5132304 - DNA, 25 bp, Homo sapien
gctcctgggtgctcattggcgccgt

SEQ ID NO: 5132305 - DNA, 25 bp, Homo sapien
agagtcggtcatggcagcagacgcc

SEQ ID NO: 5132306 - DNA, 25 bp, Homo sapien
ctgccccttcatgcatgcgcggagg

SEQ ID NO: 5132307 - DNA, 25 bp, Homo sapien
tttctccgccacctgggccgtgatt

SEQ ID NO: 5132308 - DNA, 25 bp, Homo sapien
ttggcgccgtgaagtgctcgtcacc

SEQ ID NO: 5132309 - DNA, 25 bp, Homo sapien
ggcgtctgctgccatgaccgactct

SEQ ID NO: 5132310 - DNA, 25 bp, Homo sapien
atcacggcccaggtggcggagaaaa

SEQ ID NO: 5132311 - DNA, 25 bp, Homo sapien
ctggtgtagcagtcgcggagccatc

SEQ ID NO: 5132312 - DNA, 25 bp, Homo sapien
tgactggtctgctgcccgggcccag

SEQ ID NO: 5132313 - DNA, 25 bp, Homo sapien
gtgacgagcacttcacggcgccaat

SEQ ID NO: 5132314 - DNA, 25 bp, Homo sapien
cagagacagatgagcggcggctcct

SEQ ID NO: 5132315 - DNA, 25 bp, Homo sapien
agagtgcaatagcgctattgtggct

SEQ ID NO: 5132316 - DNA, 25 bp, Homo sapien
caatagcgctattgtggctcactgc

SEQ ID NO: 5132317 - DNA, 25 bp, Homo sapien
agtgcaatagcgctattgtggctca

SEQ ID NO: 5132318 - DNA, 25 bp, Homo sapien
tgcaatagcgctattgtggctcact

SEQ ID NO: 5132319 - DNA, 25 bp, Homo sapien
cacaagggactcagaacaggcaaaa

SEQ ID NO: 5132320 - DNA, 25 bp, Homo sapien
taaaataccacttgcaacgggacca

SEQ ID NO: 5132321 - DNA, 25 bp, Homo sapien
gaagactccatattgctaagacatc

SEQ ID NO: 5132322 - DNA, 25 bp, Homo sapien
tagctacactaatcaagatagggtg

SEQ ID NO: 5132323 - DNA, 25 bp, Homo sapien
aatgaacgggcccttgggtctgatg

SEQ ID NO: 5132324 - DNA, 25 bp, Homo sapien
cagtgatcccatggtcacgtgccat

SEQ ID NO: 5132325 - DNA, 25 bp, Homo sapien
ttggtatcatcgtctctgagctggc

SEQ ID NO: 5132326 - DNA, 25 bp, Homo sapien
cctccttcgccttgcaatgaacggg

SEQ ID NO: 5132327 - DNA, 25 bp, Homo sapien
ctggctcccactgtgcaactgcagc

SEQ ID NO: 5132328 - DNA, 25 bp, Homo sapien
ccaaggcatagacatgagagctaac

SEQ ID NO: 5132329 - DNA, 25 bp, Homo sapien
cagaatctgtttcagggcgggctcc

SEQ ID NO: 5132330 - DNA, 25 bp, Homo sapien
gcctgccctccgctgtaatgagaaa

SEQ ID NO: 5132331 - DNA, 25 bp, Homo sapien
gagtgcttccgaactctctgccaga

SEQ ID NO: 5132332 - DNA, 25 bp, Homo sapien
tgctacgaggaacagtctcacatac

SEQ ID NO: 5132333 - DNA, 25 bp, Homo sapien
gttgcatcagactcaaacagcttgc

SEQ ID NO: 5132334 - DNA, 25 bp, Homo sapien
ttggcatgatagtcaaagcccaggg

SEQ ID NO: 5132335 - DNA, 25 bp, Homo sapien
tcacatactgaggagtaagaggacg

SEQ ID NO: 5132336 - DNA, 25 bp, Homo sapien
acagatgcttccatgaggagttttt

SEQ ID NO: 5132337 - DNA, 25 bp, Homo sapien
cttccatgaggagtttttgaattcg

SEQ ID NO: 5132338 - DNA, 25 bp, Homo sapien
gatgcttccatgaggagtttttgaa

SEQ ID NO: 5132339 - DNA, 25 bp, Homo sapien
tgaggagtttttgaattcggaagaa

SEQ ID NO: 5132340 - DNA, 25 bp, Homo sapien
ggatctggtcctgagaagagttgac

SEQ ID NO: 5132341 - DNA, 25 bp, Homo sapien
tcctgagaagagttgacccgagatg

SEQ ID NO: 5132342 - DNA, 25 bp, Homo sapien
tggcgacttggatctggtcctgaga

SEQ ID NO: 5132343 - DNA, 25 bp, Homo sapien
aagagttgacccgagatgtctttgg

SEQ ID NO: 5132344 - DNA, 25 bp, Homo sapien
actgcccgctgggaaaacaagggca

SEQ ID NO: 5132345 - DNA, 25 bp, Homo sapien
caactgcccgctgggaaaacaaggg

SEQ ID NO: 5132346 - DNA, 25 bp, Homo sapien
gcccacatgaagcagggagcctcgc

SEQ ID NO: 5132347 - DNA, 25 bp, Homo sapien
gagcctcgctcctgaggcagggcgc

SEQ ID NO: 5132348 - DNA, 25 bp, Homo sapien
gatattaacctaaactgagccagat

SEQ ID NO: 5132349 - DNA, 25 bp, Homo sapien
taacctaaactgagccagatactca

SEQ ID NO: 5132350 - DNA, 25 bp, Homo sapien
tgatattaacctaaactgagccaga

SEQ ID NO: 5132351 - DNA, 25 bp, Homo sapien
tattaacctaaactgagccagatac

SEQ ID NO: 5132352 - DNA, 25 bp, Homo sapien
tcccatagtggtaaactgggccagg

SEQ ID NO: 5132353 - DNA, 25 bp, Homo sapien
ttcccatagtggtaaactgggccag

SEQ ID NO: 5132354 - DNA, 25 bp, Homo sapien
tgagcagatctatttccaggtctgg

SEQ ID NO: 5132355 - DNA, 25 bp, Homo sapien
ctgccacactgcaatgagcagatct

SEQ ID NO: 5132356 - DNA, 25 bp, Homo sapien
atccaagcagtcatcttttattttc

SEQ ID NO: 5132357 - DNA, 25 bp, Homo sapien
ctatccaagcagtcatcttttattt

SEQ ID NO: 5132358 - DNA, 25 bp, Homo sapien
tccaagcagtcatcttttattttcc

SEQ ID NO: 5132359 - DNA, 25 bp, Homo sapien
tatccaagcagtcatcttttatttt

SEQ ID NO: 5132360 - DNA, 25 bp, Homo sapien
ctattctggggtgtctttgagggcc

SEQ ID NO: 5132361 - DNA, 25 bp, Homo sapien
caaagggagcagacactgggcttgt

SEQ ID NO: 5132362 - DNA, 25 bp, Homo sapien
tgtctacccctgatactgggaatag

SEQ ID NO: 5132363 - DNA, 25 bp, Homo sapien
gctgagcagcggagaagttaaatcc

SEQ ID NO: 5132364 - DNA, 25 bp, Homo sapien
gagtcagaaccctaattggccaagc

SEQ ID NO: 5132365 - DNA, 25 bp, Homo sapien
ttgcaaaaactaaaaactcaactca

SEQ ID NO: 5132366 - DNA, 25 bp, Homo sapien
tgcaaaaactaaaaactcaactcaa

SEQ ID NO: 5132367 - DNA, 25 bp, Homo sapien
ccatcctgtgccactctgttgcaca

SEQ ID NO: 5132368 - DNA, 25 bp, Homo sapien
catcctgtgccactctgttgcacag

SEQ ID NO: 5132369 - DNA, 25 bp, Homo sapien
cagtctaggtgacggagcaagcctc

SEQ ID NO: 5132370 - DNA, 25 bp, Homo sapien
aaggcacgccttctctataggactg

SEQ ID NO: 5132371 - DNA, 25 bp, Homo sapien
cacgctctgtatccactgtgggaga

SEQ ID NO: 5132372 - DNA, 25 bp, Homo sapien
ccaggcaagcattctgagtggatga

SEQ ID NO: 5132373 - DNA, 25 bp, Homo sapien
gggaggcagcctgctttacttgctc

SEQ ID NO: 5132374 - DNA, 25 bp, Homo sapien
ccagagtaatgttcaagctgatatc

SEQ ID NO: 5132375 - DNA, 25 bp, Homo sapien
gccctcacagatggacccagagtaa

SEQ ID NO: 5132376 - DNA, 25 bp, Homo sapien
ttacttgctccaccaacataaatgc

SEQ ID NO: 5132377 - DNA, 25 bp, Homo sapien
gccgaggttgtagttctagtctgaa

SEQ ID NO: 5132378 - DNA, 25 bp, Homo sapien
cagttcaagtccaaaaacaggaaga

SEQ ID NO: 5132379 - DNA, 25 bp, Homo sapien
cacttgaaagttggtcatgcaggag

SEQ ID NO: 5132380 - DNA, 25 bp, Homo sapien
ggaattggctcatacaaatgtagag

SEQ ID NO: 5132381 - DNA, 25 bp, Homo sapien
catgtgagcacaagggtgaggccta

SEQ ID NO: 5132382 - DNA, 25 bp, Homo sapien
tctccccaaaggtggtgaagatggc

SEQ ID NO: 5132383 - DNA, 25 bp, Homo sapien
cctgaaccctggcaaagaacgtgga

SEQ ID NO: 5132384 - DNA, 25 bp, Homo sapien
cagccctcgcctttccatgatggta

SEQ ID NO: 5132385 - DNA, 25 bp, Homo sapien
tctttcttttctttgacaggatctt

SEQ ID NO: 5132386 - DNA, 25 bp, Homo sapien
ttcttttctttgacaggatcttgct

SEQ ID NO: 5132387 - DNA, 25 bp, Homo sapien
gtgtgagccactacctctggctaat

SEQ ID NO: 5132388 - DNA, 25 bp, Homo sapien
tttgcagagacagagccttgccatg

SEQ ID NO: 5132389 - DNA, 25 bp, Homo sapien
gcatcaactgcacaggcgaagaggg

SEQ ID NO: 5132390 - DNA, 25 bp, Homo sapien
cacacgagaagccatgggatgtgaa

SEQ ID NO: 5132391 - DNA, 25 bp, Homo sapien
ggaaggtggcatcaactgcacaggc

SEQ ID NO: 5132392 - DNA, 25 bp, Homo sapien
gcccgcacacgagaagccatgggat

SEQ ID NO: 5132393 - DNA, 25 bp, Homo sapien
ccttaagtgagggtgttgaaagtgg

SEQ ID NO: 5132394 - DNA, 25 bp, Homo sapien
ttattttaatgactggtgacagtag

SEQ ID NO: 5132395 - DNA, 25 bp, Homo sapien
ggtgacagtaggaagggttctgcct

SEQ ID NO: 5132396 - DNA, 25 bp, Homo sapien
ttttaatgactggtgacagtaggaa

SEQ ID NO: 5132397 - DNA, 25 bp, Homo sapien
attttctgtatttcacgtgttcctt

SEQ ID NO: 5132398 - DNA, 25 bp, Homo sapien
tgggagtgtgacctgtaagcctcct

SEQ ID NO: 5132399 - DNA, 25 bp, Homo sapien
tgaatcttactaggagaggcatggg

SEQ ID NO: 5132400 - DNA, 25 bp, Homo sapien
gttccttcactccctagaaactgca

SEQ ID NO: 5132401 - DNA, 25 bp, Homo sapien
atagaggagaacgtggctcctaaac

SEQ ID NO: 5132402 - DNA, 25 bp, Homo sapien
caggctgcatcctctggtgagctat

SEQ ID NO: 5132403 - DNA, 25 bp, Homo sapien
gctgcatcctctggtgagctataga

SEQ ID NO: 5132404 - DNA, 25 bp, Homo sapien
tgagctatagaggagaacgtggctc

SEQ ID NO: 5132405 - DNA, 25 bp, Homo sapien
cacacaggaagtttctaggtctttc

SEQ ID NO: 5132406 - DNA, 25 bp, Homo sapien
agctccgtgcatggcattttcaccc

SEQ ID NO: 5132407 - DNA, 25 bp, Homo sapien
taaaatagttagaagggacttggca

SEQ ID NO: 5132408 - DNA, 25 bp, Homo sapien
tagaaatagtagctgactcccgccc

SEQ ID NO: 5132409 - DNA, 25 bp, Homo sapien
cacatcatgtgaggcatcagaccca

SEQ ID NO: 5132410 - DNA, 25 bp, Homo sapien
tcaccttgtttgctctgggtctggc

SEQ ID NO: 5132411 - DNA, 25 bp, Homo sapien
tgtagctccttccaagcccatggta

SEQ ID NO: 5132412 - DNA, 25 bp, Homo sapien
gcagcactgagatggaacctggcct

SEQ ID NO: 5132413 - DNA, 25 bp, Homo sapien
tcacagggatcagtgtttgctccac

SEQ ID NO: 5132414 - DNA, 25 bp, Homo sapien
tggacttctcctcacgtgtgccctg

SEQ ID NO: 5132415 - DNA, 25 bp, Homo sapien
tccggggagttctgtgcactttact

SEQ ID NO: 5132416 - DNA, 25 bp, Homo sapien
ggaaggcagagcagttgcaaccctc

SEQ ID NO: 5132417 - DNA, 25 bp, Homo sapien
tccagcatgggcgatatctttggga

SEQ ID NO: 5132418 - DNA, 25 bp, Homo sapien
cgatatctttgggaccgagactttc

SEQ ID NO: 5132419 - DNA, 25 bp, Homo sapien
ggaccgagactttccttggagagct

SEQ ID NO: 5132420 - DNA, 25 bp, Homo sapien
tgggcgatatctttgggaccgagac

SEQ ID NO: 5132421 - DNA, 25 bp, Homo sapien
catttatgcccttgacgtgtgcacg

SEQ ID NO: 5132422 - DNA, 25 bp, Homo sapien
tcagggagggagctaaactaaatgt

SEQ ID NO: 5132423 - DNA, 25 bp, Homo sapien
gccgagtctgctgagtcccttttag

SEQ ID NO: 5132424 - DNA, 25 bp, Homo sapien
tgtgcacgttggcactgtccaaggc

SEQ ID NO: 5132425 - DNA, 25 bp, Homo sapien
tgccaggtctctgccggtgatggga

SEQ ID NO: 5132426 - DNA, 25 bp, Homo sapien
cctgagtgccacattttgacattat

SEQ ID NO: 5132427 - DNA, 25 bp, Homo sapien
catgtagatacttccagagggagaa

SEQ ID NO: 5132428 - DNA, 25 bp, Homo sapien
tatttggtaggtactgtttcagccc

SEQ ID NO: 5132429 - DNA, 25 bp, Homo sapien
tgggtcgccccggaaactcaactgc

SEQ ID NO: 5132430 - DNA, 25 bp, Homo sapien
agaggctcccgcttccgccggagga

SEQ ID NO: 5132431 - DNA, 25 bp, Homo sapien
ggccgccataccctctgggagttgt

SEQ ID NO: 5132432 - DNA, 25 bp, Homo sapien
tccgctgagcagacagcgggtctca

SEQ ID NO: 5132433 - DNA, 25 bp, Homo sapien
gcgggagtccgggtgcgccgggaca

SEQ ID NO: 5132434 - DNA, 25 bp, Homo sapien
gatgcggattctccggtcgccgccg

SEQ ID NO: 5132435 - DNA, 25 bp, Homo sapien
cctccgtgccccagatgcggattct

SEQ ID NO: 5132436 - DNA, 25 bp, Homo sapien
caggaaccagcagcgggagtccggg

SEQ ID NO: 5132437 - DNA, 25 bp, Homo sapien
ggtgcagcaccatgaagccattcaa

SEQ ID NO: 5132438 - DNA, 25 bp, Homo sapien
taaaatgtgaccatccagtcgcaag

SEQ ID NO: 5132439 - DNA, 25 bp, Homo sapien
cagtcgcaagttactctgaaggcca

SEQ ID NO: 5132440 - DNA, 25 bp, Homo sapien
tattggttccccaatgccctcggga

SEQ ID NO: 5132441 - DNA, 25 bp, Homo sapien
gcgctggtggccttcagaaaggaca

SEQ ID NO: 5132442 - DNA, 25 bp, Homo sapien
tgcgctggtggccttcagaaaggac

SEQ ID NO: 5132443 - DNA, 25 bp, Homo sapien
ctggcagaggccaggtaattaccgc

SEQ ID NO: 5132444 - DNA, 25 bp, Homo sapien
cagaggccaggtaattaccgcaggg

SEQ ID NO: 5132445 - DNA, 25 bp, Homo sapien
ggcagaggccaggtaattaccgcag

SEQ ID NO: 5132446 - DNA, 25 bp, Homo sapien
agaggccaggtaattaccgcagggg

SEQ ID NO: 5132447 - DNA, 25 bp, Homo sapien
caataattctggtcccaaccagcct

SEQ ID NO: 5132448 - DNA, 25 bp, Homo sapien
gcaataattctggtcccaaccagcc

SEQ ID NO: 5132449 - DNA, 25 bp, Homo sapien
ggcaataattctggtcccaaccagc

SEQ ID NO: 5132450 - DNA, 25 bp, Homo sapien
gacccaaacgctcttatctcggctg

SEQ ID NO: 5132451 - DNA, 25 bp, Homo sapien
gcccaagccactgacttgacctcat

SEQ ID NO: 5132452 - DNA, 25 bp, Homo sapien
acgctcttatctcggctgcaagtgg

SEQ ID NO: 5132453 - DNA, 25 bp, Homo sapien
ttttcatggccctcgagagtggtta

SEQ ID NO: 5132454 - DNA, 25 bp, Homo sapien
tggttcccaatccacctggagggac

SEQ ID NO: 5132455 - DNA, 25 bp, Homo sapien
cactgacacattcatactcatcctc

SEQ ID NO: 5132456 - DNA, 25 bp, Homo sapien
gtgggagttgagaacactgacacat

SEQ ID NO: 5132457 - DNA, 25 bp, Homo sapien
tgtgggagttgagaacactgacaca

SEQ ID NO: 5132458 - DNA, 25 bp, Homo sapien
tgacgccagatacgcacagtacggt

SEQ ID NO: 5132459 - DNA, 25 bp, Homo sapien
cacagtggattcatggccctcaagg

SEQ ID NO: 5132460 - DNA, 25 bp, Homo sapien
ggtcatcactacaagacgccaggcg

SEQ ID NO: 5132461 - DNA, 25 bp, Homo sapien
cattgcctggtagatactgacgcca

SEQ ID NO: 5132462 - DNA, 25 bp, Homo sapien
gatgggtcttctttagctctactaa

SEQ ID NO: 5132463 - DNA, 25 bp, Homo sapien
agcagactgtgaaccccttgagaga

SEQ ID NO: 5132464 - DNA, 25 bp, Homo sapien
gattcttccagcactctatccagag

SEQ ID NO: 5132465 - DNA, 25 bp, Homo sapien
tcagtctaagcattcccgccattgt

SEQ ID NO: 5132466 - DNA, 25 bp, Homo sapien
tctgttgcagactgtatgtaactac

SEQ ID NO: 5132467 - DNA, 25 bp, Homo sapien
cactatagccagactggcgtttctc

SEQ ID NO: 5132468 - DNA, 25 bp, Homo sapien
agaattccgaggaaacatccctgtt

SEQ ID NO: 5132469 - DNA, 25 bp, Homo sapien
gactgtatgtaactactttgcgtgc

SEQ ID NO: 5132470 - DNA, 25 bp, Homo sapien
tctcttgcccttaaacgttcctatg

SEQ ID NO: 5132471 - DNA, 25 bp, Homo sapien
cttaaacgttcctatgtcctgggca

SEQ ID NO: 5132472 - DNA, 25 bp, Homo sapien
catcttcaactgattatgagtctgt

SEQ ID NO: 5132473 - DNA, 25 bp, Homo sapien
tctgtgtctccgttcgtgtccccat

SEQ ID NO: 5132474 - DNA, 25 bp, Homo sapien
ggaagccggacaaagtacagataca

SEQ ID NO: 5132475 - DNA, 25 bp, Homo sapien
acagatacatttccaactggggtca

SEQ ID NO: 5132476 - DNA, 25 bp, Homo sapien
aagcaatgtcataaatggtccttga

SEQ ID NO: 5132477 - DNA, 25 bp, Homo sapien
gggtcagagccgctgcatgccaccc

SEQ ID NO: 5132478 - DNA, 25 bp, Homo sapien
tagagtcaggcctgataaggaatgg

SEQ ID NO: 5132479 - DNA, 25 bp, Homo sapien
tcaataataacttctggacagcacg

SEQ ID NO: 5132480 - DNA, 25 bp, Homo sapien
tcagccacgaatgcagattcaataa

SEQ ID NO: 5132481 - DNA, 25 bp, Homo sapien
tgtgcgaacctctagcgctggtgct

SEQ ID NO: 5132482 - DNA, 25 bp, Homo sapien
taaggagtcacaaatatcacccact

SEQ ID NO: 5132483 - DNA, 25 bp, Homo sapien
gagagacctgttccatagttcctgg

SEQ ID NO: 5132484 - DNA, 25 bp, Homo sapien
tgggcccagccatcataaagttttt

SEQ ID NO: 5132485 - DNA, 25 bp, Homo sapien
gaaagtgacatcagtgggtatacct

SEQ ID NO: 5132486 - DNA, 25 bp, Homo sapien
tgaaacacgcggatcgcgtcatccc

SEQ ID NO: 5132487 - DNA, 25 bp, Homo sapien
aggaggccagtagccctggctcctt

SEQ ID NO: 5132488 - DNA, 25 bp, Homo sapien
cgctgatacttccagaaggccacct

SEQ ID NO: 5132489 - DNA, 25 bp, Homo sapien
gagttgggatcctcctgaaacacgc

SEQ ID NO: 5132490 - DNA, 25 bp, Homo sapien
gacttcacacagatacgcagttgga

SEQ ID NO: 5132491 - DNA, 25 bp, Homo sapien
ttaggagggccacaaacaactgctt

SEQ ID NO: 5132492 - DNA, 25 bp, Homo sapien
gttgccatcacagcgtaacggtgca

SEQ ID NO: 5132493 - DNA, 25 bp, Homo sapien
tgatcactccctgccatgaaaatgg

SEQ ID NO: 5132494 - DNA, 25 bp, Homo sapien
aagtggaggtaggcggggacagcac

SEQ ID NO: 5132495 - DNA, 25 bp, Homo sapien
agacctggtccccacaaccaggatt

SEQ ID NO: 5132496 - DNA, 25 bp, Homo sapien
agtggaggtaggcggggacagcacc

SEQ ID NO: 5132497 - DNA, 25 bp, Homo sapien
ggaagtggaggtaggcggggacagc

SEQ ID NO: 5132498 - DNA, 25 bp, Homo sapien
gaagtggaggtaggcggggacagca

SEQ ID NO: 5132499 - DNA, 25 bp, Homo sapien
gacctggtccccacaaccaggattc

SEQ ID NO: 5132500 - DNA, 25 bp, Homo sapien
tgtactcctggtcacatcccatgta

SEQ ID NO: 5132501 - DNA, 25 bp, Homo sapien
cctaattcaggctcaactctccttt

SEQ ID NO: 5132502 - DNA, 25 bp, Homo sapien
gctgaatttgtactcctggtcacat

SEQ ID NO: 5132503 - DNA, 25 bp, Homo sapien
gcctcaggactcaatctgaatcact

SEQ ID NO: 5132504 - DNA, 25 bp, Homo sapien
tacacattcctaattcaggctcaac

SEQ ID NO: 5132505 - DNA, 25 bp, Homo sapien
gctatatatgatttatgcttgaccc

SEQ ID NO: 5132506 - DNA, 25 bp, Homo sapien
gacagtgattcagattgagtcctga

SEQ ID NO: 5132507 - DNA, 25 bp, Homo sapien
gggtcaagcataaatcatatatagc

SEQ ID NO: 5132508 - DNA, 25 bp, Homo sapien
atgtgaccaggagtacaaattcagc

SEQ ID NO: 5132509 - DNA, 25 bp, Homo sapien
tgattcagattgagtcctgaggcat

SEQ ID NO: 5132510 - DNA, 25 bp, Homo sapien
tacatgggatgtgaccaggagtaca

SEQ ID NO: 5132511 - DNA, 25 bp, Homo sapien
aaaggagagttgagcctgaattagg

SEQ ID NO: 5132512 - DNA, 25 bp, Homo sapien
aatcctggttgtggggaccaggtct

SEQ ID NO: 5132513 - DNA, 25 bp, Homo sapien
gtgctgtccccgcctacctccactt

SEQ ID NO: 5132514 - DNA, 25 bp, Homo sapien
gaatcctggttgtggggaccaggtc

SEQ ID NO: 5132515 - DNA, 25 bp, Homo sapien
ggtgctgtccccgcctacctccact

SEQ ID NO: 5132516 - DNA, 25 bp, Homo sapien
tgctgtccccgcctacctccacttc

SEQ ID NO: 5132517 - DNA, 25 bp, Homo sapien
gctgtccccgcctacctccacttcc

SEQ ID NO: 5132518 - DNA, 25 bp, Homo sapien
tctgttggaacatagttacacccat

SEQ ID NO: 5132519 - DNA, 25 bp, Homo sapien
ggccaagaagctatgtctgaaatat

SEQ ID NO: 5132520 - DNA, 25 bp, Homo sapien
ggagacttcacgtgttggttttcag

SEQ ID NO: 5132521 - DNA, 25 bp, Homo sapien
cagaaacttccagagattagtgact

SEQ ID NO: 5132522 - DNA, 25 bp, Homo sapien
ttctggggcgcgacccggaagcgga

SEQ ID NO: 5132523 - DNA, 25 bp, Homo sapien
ctggggcgcgacccggaagcggaag

SEQ ID NO: 5132524 - DNA, 25 bp, Homo sapien
tctggggcgcgacccggaagcggaa

SEQ ID NO: 5132525 - DNA, 25 bp, Homo sapien
gaccatgcttgtccgagcgtctgaa

SEQ ID NO: 5132526 - DNA, 25 bp, Homo sapien
cgagcgtctgaacgtctggctgagc

SEQ ID NO: 5132527 - DNA, 25 bp, Homo sapien
cccctttcctgggttatagaccatg

SEQ ID NO: 5132528 - DNA, 25 bp, Homo sapien
cctgggttatagaccatgcttgtcc

SEQ ID NO: 5132529 - DNA, 25 bp, Homo sapien
cagtgttagtaggaacacgatctta

SEQ ID NO: 5132530 - DNA, 25 bp, Homo sapien
gtaggaacacgatcttaaagagaca

SEQ ID NO: 5132531 - DNA, 25 bp, Homo sapien
gttagtaggaacacgatcttaaaga

SEQ ID NO: 5132532 - DNA, 25 bp, Homo sapien
cgtcagtgttagtaggaacacgatc

SEQ ID NO: 5132533 - DNA, 25 bp, Homo sapien
cctttggaacttggccttgcttcgt

SEQ ID NO: 5132534 - DNA, 25 bp, Homo sapien
ctccctttggaacttggccttgctt

SEQ ID NO: 5132535 - DNA, 25 bp, Homo sapien
atgccgtgtggacgctgaagccagc

SEQ ID NO: 5132536 - DNA, 25 bp, Homo sapien
aacattcatgaaggactatgccgtg

SEQ ID NO: 5132537 - DNA, 25 bp, Homo sapien
cctaattcacaagctaccgcgctta

SEQ ID NO: 5132538 - DNA, 25 bp, Homo sapien
ctaattcacaagctaccgcgcttac

SEQ ID NO: 5132539 - DNA, 25 bp, Homo sapien
aaccatgggcaccagatatgacctg

SEQ ID NO: 5132540 - DNA, 25 bp, Homo sapien
accatgggcaccagatatgacctgc

SEQ ID NO: 5132541 - DNA, 25 bp, Homo sapien
ccatgggcaccagatatgacctgct

SEQ ID NO: 5132542 - DNA, 25 bp, Homo sapien
agagccctggtaccccaaattctga

SEQ ID NO: 5132543 - DNA, 25 bp, Homo sapien
tccagaaagtgtacatgggactgtt

SEQ ID NO: 5132544 - DNA, 25 bp, Homo sapien
gcccacagagcttggcttggacaca

SEQ ID NO: 5132545 - DNA, 25 bp, Homo sapien
gacccttgtggtagggtggcctcac

SEQ ID NO: 5132546 - DNA, 25 bp, Homo sapien
aagtaggagagtaggagtcagtggt

SEQ ID NO: 5132547 - DNA, 25 bp, Homo sapien
gtaggagagtaggagtcagtggtca

SEQ ID NO: 5132548 - DNA, 25 bp, Homo sapien
agaagtaggagagtaggagtcagtg

SEQ ID NO: 5132549 - DNA, 25 bp, Homo sapien
ggagaagtaggagagtaggagtcag

SEQ ID NO: 5132550 - DNA, 25 bp, Homo sapien
taggagtttctcacgcttgcacaca

SEQ ID NO: 5132551 - DNA, 25 bp, Homo sapien
ttcaggaacaggtgctcacaggcca

SEQ ID NO: 5132552 - DNA, 25 bp, Homo sapien
tctgtcgcaggagctcaaagacgag

SEQ ID NO: 5132553 - DNA, 25 bp, Homo sapien
tcactgctggaatcaaaggccggtt

SEQ ID NO: 5132554 - DNA, 25 bp, Homo sapien
gccagtggggcatgaggcagagttt

SEQ ID NO: 5132555 - DNA, 25 bp, Homo sapien
ccagtggggcatgaggcagagtttt

SEQ ID NO: 5132556 - DNA, 25 bp, Homo sapien
cagccagtggggcatgaggcagagt

SEQ ID NO: 5132557 - DNA, 25 bp, Homo sapien
tgcagccagtggggcatgaggcaga

SEQ ID NO: 5132558 - DNA, 25 bp, Homo sapien
tgtagcccaaggaattagaaatacc

SEQ ID NO: 5132559 - DNA, 25 bp, Homo sapien
cacttttgtagcccaaggaattaga

SEQ ID NO: 5132560 - DNA, 25 bp, Homo sapien
cactggcaaggtgaaggtcacatat

SEQ ID NO: 5132561 - DNA, 25 bp, Homo sapien
gaaggtcacatataccactgatata

SEQ ID NO: 5132562 - DNA, 25 bp, Homo sapien
gataaaatggagtgccaccagctcg

SEQ ID NO: 5132563 - DNA, 25 bp, Homo sapien
tggatctcacctccttagcagcaag

SEQ ID NO: 5132564 - DNA, 25 bp, Homo sapien
catccttgactaggccctgcagggt

SEQ ID NO: 5132565 - DNA, 25 bp, Homo sapien
gagaagttgcccatcacagtatttg

SEQ ID NO: 5132566 - DNA, 25 bp, Homo sapien
ttcctatacaaacctggcagtgagc

SEQ ID NO: 5132567 - DNA, 25 bp, Homo sapien
caaaaagattgtccttgtgaaggcc

SEQ ID NO: 5132568 - DNA, 25 bp, Homo sapien
aagtaattattcatctcagagcccc

SEQ ID NO: 5132569 - DNA, 25 bp, Homo sapien
gagcctggattgtgatgacctctct

SEQ ID NO: 5132570 - DNA, 25 bp, Homo sapien
tgggagccccaatgattgactggca

SEQ ID NO: 5132571 - DNA, 25 bp, Homo sapien
tctatgactgaagcctataagggcc

SEQ ID NO: 5132572 - DNA, 25 bp, Homo sapien
tataagggccagcatctgatccctg

SEQ ID NO: 5132573 - DNA, 25 bp, Homo sapien
ttgaaagcggtacctgacagatgca

SEQ ID NO: 5132574 - DNA, 25 bp, Homo sapien
tgcctcctgggttcaagtgattctc

SEQ ID NO: 5132575 - DNA, 25 bp, Homo sapien
ggttggagtgtaatggcgccatctc

SEQ ID NO: 5132576 - DNA, 25 bp, Homo sapien
gctcaccacagcctctgcctcctgg

SEQ ID NO: 5132577 - DNA, 25 bp, Homo sapien
caaagcgttgagattacaggcgtga

SEQ ID NO: 5132578 - DNA, 25 bp, Homo sapien
gctggttttaaatcgcgcgcgtcga

SEQ ID NO: 5132579 - DNA, 25 bp, Homo sapien
gaccccgtctgattgggcttcttgg

SEQ ID NO: 5132580 - DNA, 25 bp, Homo sapien
gcgtcgagacgcctgagcgccgtaa

SEQ ID NO: 5132581 - DNA, 25 bp, Homo sapien
tggcgtctcctgagctggttttaaa

SEQ ID NO: 5132582 - DNA, 25 bp, Homo sapien
gacccgagctgagcatatcctctct

SEQ ID NO: 5132583 - DNA, 25 bp, Homo sapien
cgcccgaagtactgcttcgctaggg

SEQ ID NO: 5132584 - DNA, 25 bp, Homo sapien
agccgcagggccaagacccgagctg

SEQ ID NO: 5132585 - DNA, 25 bp, Homo sapien
ggccaagacccgagctgagcatatc

SEQ ID NO: 5132586 - DNA, 25 bp, Homo sapien
ttgctcaagaaaccttcaagagaac

SEQ ID NO: 5132587 - DNA, 25 bp, Homo sapien
gctcaagaaaccttcaagagaacat

SEQ ID NO: 5132588 - DNA, 25 bp, Homo sapien
caagaaaccttcaagagaacatttc

SEQ ID NO: 5132589 - DNA, 25 bp, Homo sapien
tcaagaaaccttcaagagaacattt

SEQ ID NO: 5132590 - DNA, 25 bp, Homo sapien
tgaagaagagttattcattgtggct

SEQ ID NO: 5132591 - DNA, 25 bp, Homo sapien
ctgaagaagagttattcattgtggc

SEQ ID NO: 5132592 - DNA, 25 bp, Homo sapien
agagttattcattgtggctggcagt

SEQ ID NO: 5132593 - DNA, 25 bp, Homo sapien
agaagagttattcattgtggctggc

SEQ ID NO: 5132594 - DNA, 25 bp, Homo sapien
gagaggaggcactgtgggggtgtcc

SEQ ID NO: 5132595 - DNA, 25 bp, Homo sapien
gcactgtgggggtgtcctcgcgtct

SEQ ID NO: 5132596 - DNA, 25 bp, Homo sapien
gaaggagaggaggcactgtgggggt

SEQ ID NO: 5132597 - DNA, 25 bp, Homo sapien
aggaggcactgtgggggtgtcctcg

SEQ ID NO: 5132598 - DNA, 25 bp, Homo sapien
gggcaggggcatcgggaacacacgc

SEQ ID NO: 5132599 - DNA, 25 bp, Homo sapien
tgggcaggggcatcgggaacacacg

SEQ ID NO: 5132600 - DNA, 25 bp, Homo sapien
ggcaggggcatcgggaacacacgct

SEQ ID NO: 5132601 - DNA, 25 bp, Homo sapien
ctgggcaggggcatcgggaacacac

SEQ ID NO: 5132602 - DNA, 25 bp, Homo sapien
gtgccaggaatattgagaggcgcct

SEQ ID NO: 5132603 - DNA, 25 bp, Homo sapien
gggtgccaggaatattgagaggcgc

SEQ ID NO: 5132604 - DNA, 25 bp, Homo sapien
gccaggaatattgagaggcgccttc

SEQ ID NO: 5132605 - DNA, 25 bp, Homo sapien
ctggggtgccaggaatattgagagg

SEQ ID NO: 5132606 - DNA, 25 bp, Homo sapien
gtgctgaactgcagatcaaagaccc

SEQ ID NO: 5132607 - DNA, 25 bp, Homo sapien
aggccaataagcgaggtgagtcagt

SEQ ID NO: 5132608 - DNA, 25 bp, Homo sapien
ccttctcatcgtcattctgaggaaa

SEQ ID NO: 5132609 - DNA, 25 bp, Homo sapien
taagcgaggtgagtcagtgctgaac

SEQ ID NO: 5132610 - DNA, 25 bp, Homo sapien
atacaggtggagtaatgttccgtaa

SEQ ID NO: 5132611 - DNA, 25 bp, Homo sapien
taatgttccgtaatctgcgtgtttg

SEQ ID NO: 5132612 - DNA, 25 bp, Homo sapien
tcagtggacagtttgatacaggtgg

SEQ ID NO: 5132613 - DNA, 25 bp, Homo sapien
gggatagtagctgaaatgtcaatac

SEQ ID NO: 5132614 - DNA, 25 bp, Homo sapien
aatcaatcaagtgcaaaccaaaagc

SEQ ID NO: 5132615 - DNA, 25 bp, Homo sapien
taaaatcaatcaagtgcaaaccaaa

SEQ ID NO: 5132616 - DNA, 25 bp, Homo sapien
cataaaatcaatcaagtgcaaacca

SEQ ID NO: 5132617 - DNA, 25 bp, Homo sapien
caatcaagtgcaaaccaaaagcatt

SEQ ID NO: 5132618 - DNA, 25 bp, Homo sapien
tacttcttccaaagacggtgcatct

SEQ ID NO: 5132619 - DNA, 25 bp, Homo sapien
caaggactctgtatacatcggcatg

SEQ ID NO: 5132620 - DNA, 25 bp, Homo sapien
gcatccacgcgcacagcatagatct

SEQ ID NO: 5132621 - DNA, 25 bp, Homo sapien
gtatacatcggcatggacggcatcc

SEQ ID NO: 5132622 - DNA, 25 bp, Homo sapien
gcttcggagacattgaggttgttta

SEQ ID NO: 5132623 - DNA, 25 bp, Homo sapien
tatgttctgctcaatagttctgtgt

SEQ ID NO: 5132624 - DNA, 25 bp, Homo sapien
cttccgatctgcttcggagacattg

SEQ ID NO: 5132625 - DNA, 25 bp, Homo sapien
tttatgttctgctcaatagttctgt

SEQ ID NO: 5132626 - DNA, 25 bp, Homo sapien
accacactgcgcatacagttcctca

SEQ ID NO: 5132627 - DNA, 25 bp, Homo sapien
ccacactgcgcatacagttcctcac

SEQ ID NO: 5132628 - DNA, 25 bp, Homo sapien
aaccacactgcgcatacagttcctc

SEQ ID NO: 5132629 - DNA, 25 bp, Homo sapien
cagagcagcacattcgtcatctcca

SEQ ID NO: 5132630 - DNA, 25 bp, Homo sapien
ccagagcagcacattcgtcatctcc

SEQ ID NO: 5132631 - DNA, 25 bp, Homo sapien
cccagagcagcacattcgtcatctc

SEQ ID NO: 5132632 - DNA, 25 bp, Homo sapien
agcacattcgtcatctccacattct

SEQ ID NO: 5132633 - DNA, 25 bp, Homo sapien
caacctaactctggcaactcgagag

SEQ ID NO: 5132634 - DNA, 25 bp, Homo sapien
agaggttctcccgtggagagagtct

SEQ ID NO: 5132635 - DNA, 25 bp, Homo sapien
aacagcagttcacttctgtagtcct

SEQ ID NO: 5132636 - DNA, 25 bp, Homo sapien
gtctggacatcagagggaaacagca

SEQ ID NO: 5132637 - DNA, 25 bp, Homo sapien
attatgtgtttcactgtcccactgt

SEQ ID NO: 5132638 - DNA, 25 bp, Homo sapien
ggaagggcagatctggcgatcttct

SEQ ID NO: 5132639 - DNA, 25 bp, Homo sapien
ccagggaagggcagatctggcgatc

SEQ ID NO: 5132640 - DNA, 25 bp, Homo sapien
gcagatctggcgatcttctgcacac

SEQ ID NO: 5132641 - DNA, 25 bp, Homo sapien
caggttcatcgttggcatcaaagtc

SEQ ID NO: 5132642 - DNA, 25 bp, Homo sapien
caactgcggtgtggtcaggttcatc

SEQ ID NO: 5132643 - DNA, 25 bp, Homo sapien
gggaagtctccacagtcactctcgt

SEQ ID NO: 5132644 - DNA, 25 bp, Homo sapien
aacttgtctaccagggccgacacag

SEQ ID NO: 5132645 - DNA, 25 bp, Homo sapien
gcaatgtgtacaaagggagcatgct

SEQ ID NO: 5132646 - DNA, 25 bp, Homo sapien
aatgtgtacaaagggagcatgctct

SEQ ID NO: 5132647 - DNA, 25 bp, Homo sapien
ataagcaatgtgtacaaagggagca

SEQ ID NO: 5132648 - DNA, 25 bp, Homo sapien
ctataagcaatgtgtacaaagggag

SEQ ID NO: 5132649 - DNA, 25 bp, Homo sapien
ttggtggcttagagtcaccaacagc

SEQ ID NO: 5132650 - DNA, 25 bp, Homo sapien
aaattggtggcttagagtcaccaac

SEQ ID NO: 5132651 - DNA, 25 bp, Homo sapien
tttcaggtggtaaattggtggctta

SEQ ID NO: 5132652 - DNA, 25 bp, Homo sapien
ctttcaggtggtaaattggtggctt

SEQ ID NO: 5132653 - DNA, 25 bp, Homo sapien
ttgcgtcgaggcctaaagcgccagt

SEQ ID NO: 5132654 - DNA, 25 bp, Homo sapien
tcatagacagaagggggcacatggt

SEQ ID NO: 5132655 - DNA, 25 bp, Homo sapien
agtgatccgggccagcccacatcga

SEQ ID NO: 5132656 - DNA, 25 bp, Homo sapien
gacatggtccgaggactgaaataag

SEQ ID NO: 5132657 - DNA, 25 bp, Homo sapien
ccacaaggcagcattgtgtctgagc

SEQ ID NO: 5132658 - DNA, 25 bp, Homo sapien
gcagagtgaacacagacgtcagcac

SEQ ID NO: 5132659 - DNA, 25 bp, Homo sapien
tcacaacagtaggagtgctcaatca

SEQ ID NO: 5132660 - DNA, 25 bp, Homo sapien
gatctgctgacagccttatcaaggc

SEQ ID NO: 5132661 - DNA, 25 bp, Homo sapien
caaagtcaatatcatcttcaaagtc

SEQ ID NO: 5132662 - DNA, 25 bp, Homo sapien
aaatatacatcaaagtcaatatcat

SEQ ID NO: 5132663 - DNA, 25 bp, Homo sapien
tatacatcaaagtcaatatcatctt

SEQ ID NO: 5132664 - DNA, 25 bp, Homo sapien
tcttcaaagtcaatttcaaaatctt

SEQ ID NO: 5132665 - DNA, 25 bp, Homo sapien
gctggaccagagtgtcaacattgta

SEQ ID NO: 5132666 - DNA, 25 bp, Homo sapien
aaatctgtaggaagggtggtagctc

SEQ ID NO: 5132667 - DNA, 25 bp, Homo sapien
ttctggttctccaaagtggacttgg

SEQ ID NO: 5132668 - DNA, 25 bp, Homo sapien
gtggacttggtcagaatagtagcag

SEQ ID NO: 5132669 - DNA, 25 bp, Homo sapien
aaggaaagaataaatgcagaaagct

SEQ ID NO: 5132670 - DNA, 25 bp, Homo sapien
aaaggaaagaataaatgcagaaagc

SEQ ID NO: 5132671 - DNA, 25 bp, Homo sapien
ctaaaggaaagaataaatgcagaaa

SEQ ID NO: 5132672 - DNA, 25 bp, Homo sapien
taaaggaaagaataaatgcagaaag

SEQ ID NO: 5132673 - DNA, 25 bp, Homo sapien
taatgctcagtctctaccctatggc

SEQ ID NO: 5132674 - DNA, 25 bp, Homo sapien
tagggttgttgtaatcatagtcttc

SEQ ID NO: 5132675 - DNA, 25 bp, Homo sapien
ggtgtcgttagggttgttgtaatca

SEQ ID NO: 5132676 - DNA, 25 bp, Homo sapien
ccagggcaaaagttggaggtgtcgt

SEQ ID NO: 5132677 - DNA, 25 bp, Homo sapien
gaagacttattttttgccacaccag

SEQ ID NO: 5132678 - DNA, 25 bp, Homo sapien
cactgggtggaaggcagacccttta

SEQ ID NO: 5132679 - DNA, 25 bp, Homo sapien
ggtcatctgagatacaccccgaaga

SEQ ID NO: 5132680 - DNA, 25 bp, Homo sapien
gagaaaaacgactccctggcttaga

SEQ ID NO: 5132681 - DNA, 25 bp, Homo sapien
aggtcagagttcccaacaggtccca

SEQ ID NO: 5132682 - DNA, 25 bp, Homo sapien
ggtcagagttcccaacaggtcccac

SEQ ID NO: 5132683 - DNA, 25 bp, Homo sapien
gaggtcagagttcccaacaggtccc

SEQ ID NO: 5132684 - DNA, 25 bp, Homo sapien
gactccccatatgttgtgatgtcta

SEQ ID NO: 5132685 - DNA, 25 bp, Homo sapien
gaggctcagctaccaagtttgactc

SEQ ID NO: 5132686 - DNA, 25 bp, Homo sapien
gctaccaagtttgactccccatatg

SEQ ID NO: 5132687 - DNA, 25 bp, Homo sapien
gatgtctaatccttgggcttctgga

SEQ ID NO: 5132688 - DNA, 25 bp, Homo sapien
gactccacatgctctgcttcagttt

SEQ ID NO: 5132689 - DNA, 25 bp, Homo sapien
gacacactgcaaagagtgtcctagg

SEQ ID NO: 5132690 - DNA, 25 bp, Homo sapien
actgcaaagagtgtcctagggtgcc

SEQ ID NO: 5132691 - DNA, 25 bp, Homo sapien
ccctggtaaaggacacactgcaaag

SEQ ID NO: 5132692 - DNA, 25 bp, Homo sapien
ccagcatcaccctggtaaaggacac

SEQ ID NO: 5132693 - DNA, 25 bp, Homo sapien
cttttccagcttccctgtggtttgc

SEQ ID NO: 5132694 - DNA, 25 bp, Homo sapien
cttcttttccagcttccctgtggtt

SEQ ID NO: 5132695 - DNA, 25 bp, Homo sapien
tcttttccagcttccctgtggtttg

SEQ ID NO: 5132696 - DNA, 25 bp, Homo sapien
ggtccttcgtgagcccgctaagcat

SEQ ID NO: 5132697 - DNA, 25 bp, Homo sapien
agcccgctaagcatcttctcgtcag

SEQ ID NO: 5132698 - DNA, 25 bp, Homo sapien
tctgcaggtccttcgtgagcccgct

SEQ ID NO: 5132699 - DNA, 25 bp, Homo sapien
ttcgtgagcccgctaagcatcttct

SEQ ID NO: 5132700 - DNA, 25 bp, Homo sapien
aggttctgagccatgacagggggca

SEQ ID NO: 5132701 - DNA, 25 bp, Homo sapien
aatgtaggagacaggcaaaagccag

SEQ ID NO: 5132702 - DNA, 25 bp, Homo sapien
caaaagccagaggtatggagaggtt

SEQ ID NO: 5132703 - DNA, 25 bp, Homo sapien
cttttcattggctaaatgtaggaga

SEQ ID NO: 5132704 - DNA, 25 bp, Homo sapien
acagcagccatgcaagttcagcatt

SEQ ID NO: 5132705 - DNA, 25 bp, Homo sapien
ggctctgatgcacaatcattccttc

SEQ ID NO: 5132706 - DNA, 25 bp, Homo sapien
tatcagatgctttaggatgtgtcag

SEQ ID NO: 5132707 - DNA, 25 bp, Homo sapien
acagggcatgtcctctctccgcagt

SEQ ID NO: 5132708 - DNA, 25 bp, Homo sapien
taccaagtgactaatgggagagcca

SEQ ID NO: 5132709 - DNA, 25 bp, Homo sapien
tgacctgggaactgagatggctacc

SEQ ID NO: 5132710 - DNA, 25 bp, Homo sapien
taagagggaatggaacacaagcact

SEQ ID NO: 5132711 - DNA, 25 bp, Homo sapien
tggacacagggacggttcagatccg

SEQ ID NO: 5132712 - DNA, 25 bp, Homo sapien
acatcagagaggtcctctgttcctt

SEQ ID NO: 5132713 - DNA, 25 bp, Homo sapien
caagaacatcagagaggtcctctgt

SEQ ID NO: 5132714 - DNA, 25 bp, Homo sapien
atcagagaggtcctctgttccttcc

SEQ ID NO: 5132715 - DNA, 25 bp, Homo sapien
gaacatcagagaggtcctctgttcc

SEQ ID NO: 5132716 - DNA, 25 bp, Homo sapien
acaaacaggcacgttggtagttggc

SEQ ID NO: 5132717 - DNA, 25 bp, Homo sapien
tggctacagcctgggtataagccca

SEQ ID NO: 5132718 - DNA, 25 bp, Homo sapien
actgagtaagggatgggcctcctgc

SEQ ID NO: 5132719 - DNA, 25 bp, Homo sapien
gatgtcccggcaactgagtaaggga

SEQ ID NO: 5132720 - DNA, 25 bp, Homo sapien
agtttaatcagttgagcacggagct

SEQ ID NO: 5132721 - DNA, 25 bp, Homo sapien
atagggcagtaaagtttaatcagtt

SEQ ID NO: 5132722 - DNA, 25 bp, Homo sapien
gtttaatcagttgagcacggagctt

SEQ ID NO: 5132723 - DNA, 25 bp, Homo sapien
accatagggcagtaaagtttaatca

SEQ ID NO: 5132724 - DNA, 25 bp, Homo sapien
caagagaatagtttggaaaataaca

SEQ ID NO: 5132725 - DNA, 25 bp, Homo sapien
gttcttcaagggcaccattaagtgc

SEQ ID NO: 5132726 - DNA, 25 bp, Homo sapien
tctcaatccagaatagtaccctcac

SEQ ID NO: 5132727 - DNA, 25 bp, Homo sapien
cagatcaatttaggagactaaaact

SEQ ID NO: 5132728 - DNA, 25 bp, Homo sapien
gcacaatggccgagagcagactctg

SEQ ID NO: 5132729 - DNA, 25 bp, Homo sapien
tatccaggtagcacatagcacaatg

SEQ ID NO: 5132730 - DNA, 25 bp, Homo sapien
tccaggaccagccagtaacagaact

SEQ ID NO: 5132731 - DNA, 25 bp, Homo sapien
gatttaagcaggacccagtcttgca

SEQ ID NO: 5132732 - DNA, 25 bp, Homo sapien
ccccagaacccactatagagaagtg

SEQ ID NO: 5132733 - DNA, 25 bp, Homo sapien
ggaacgaacaagcttcctcaggcct

SEQ ID NO: 5132734 - DNA, 25 bp, Homo sapien
cataatttcatggaactgtcacacc

SEQ ID NO: 5132735 - DNA, 25 bp, Homo sapien
cagcaaccatgtaatgagggaaact

SEQ ID NO: 5132736 - DNA, 25 bp, Homo sapien
gctcttatctcaggaggcttctcag

SEQ ID NO: 5132737 - DNA, 25 bp, Homo sapien
tgaaaagtcccaggttgagtccata

SEQ ID NO: 5132738 - DNA, 25 bp, Homo sapien
cagggaagtgcacctagctgtacca

SEQ ID NO: 5132739 - DNA, 25 bp, Homo sapien
tcatacactgtagggtggtctggcc

SEQ ID NO: 5132740 - DNA, 25 bp, Homo sapien
gcaaatccttgtggtgttgaaatga

SEQ ID NO: 5132741 - DNA, 25 bp, Homo sapien
gcttcagccaccatgaacggttcct

SEQ ID NO: 5132742 - DNA, 25 bp, Homo sapien
aggacaccaaactcgttgccgcaga

SEQ ID NO: 5132743 - DNA, 25 bp, Homo sapien
caccatgaacggttcctttccttgc

SEQ ID NO: 5132744 - DNA, 25 bp, Homo sapien
aaaactgagaattctactcgaagac

SEQ ID NO: 5132745 - DNA, 25 bp, Homo sapien
tggtacccataaatgatccccaatt

SEQ ID NO: 5132746 - DNA, 25 bp, Homo sapien
ggtacccataaatgatccccaattc

SEQ ID NO: 5132747 - DNA, 25 bp, Homo sapien
gaaccaaaactgagaattctactcg

SEQ ID NO: 5132748 - DNA, 25 bp, Homo sapien
gcgtgcttcattcgcaggacagaag

SEQ ID NO: 5132749 - DNA, 25 bp, Homo sapien
cagtgtggctgcttcgtgcttgctg

SEQ ID NO: 5132750 - DNA, 25 bp, Homo sapien
agaagctaaatctgcgccctctgcc

SEQ ID NO: 5132751 - DNA, 25 bp, Homo sapien
tgttgacttgcagtttggaaccttg

SEQ ID NO: 5132752 - DNA, 25 bp, Homo sapien
cagctagttggaagaggcccattca

SEQ ID NO: 5132753 - DNA, 25 bp, Homo sapien
ttggctggcacactgggaccgttgt

SEQ ID NO: 5132754 - DNA, 25 bp, Homo sapien
gatttgacatcattgtccccgggcc

SEQ ID NO: 5132755 - DNA, 25 bp, Homo sapien
cacccatttcgttacagtttgagag

SEQ ID NO: 5132756 - DNA, 25 bp, Homo sapien
cagaattccttcctgggatgcgaca

SEQ ID NO: 5132757 - DNA, 25 bp, Homo sapien
ctgagccgggcagacctcataaggg

SEQ ID NO: 5132758 - DNA, 25 bp, Homo sapien
tggtctggctggtagcaacaaagct

SEQ ID NO: 5132759 - DNA, 25 bp, Homo sapien
gatgcgacactgtgcaaccttggtt

SEQ ID NO: 5132760 - DNA, 25 bp, Homo sapien
tgggtaattgacattaacaatctcg

SEQ ID NO: 5132761 - DNA, 25 bp, Homo sapien
caatctcggatctgttaacgggtaa

SEQ ID NO: 5132762 - DNA, 25 bp, Homo sapien
cagctgctggtgaagtcaagacaga

SEQ ID NO: 5132763 - DNA, 25 bp, Homo sapien
tctgttaacgggtaatggacaggtc

SEQ ID NO: 5132764 - DNA, 25 bp, Homo sapien
cctggggcacatagaggcccaccat

SEQ ID NO: 5132765 - DNA, 25 bp, Homo sapien
agctccatgaaactgctcctgctgg

SEQ ID NO: 5132766 - DNA, 25 bp, Homo sapien
tccagattgaagagttgaggagctg

SEQ ID NO: 5132767 - DNA, 25 bp, Homo sapien
ccccagatagatccagattgaagag

SEQ ID NO: 5132768 - DNA, 25 bp, Homo sapien
ggagcccacgggactcccagctcca

SEQ ID NO: 5132769 - DNA, 25 bp, Homo sapien
gacctttggtctggagcccatacgt

SEQ ID NO: 5132770 - DNA, 25 bp, Homo sapien
tttctcataaaagccgctgcagccg

SEQ ID NO: 5132771 - DNA, 25 bp, Homo sapien
tcaaaggatcgggagagtcgactga

SEQ ID NO: 5132772 - DNA, 25 bp, Homo sapien
gactcgggtttggatgccgttgcac

SEQ ID NO: 5132773 - DNA, 25 bp, Homo sapien
cagaggacctagtgtcaccccccac

SEQ ID NO: 5132774 - DNA, 25 bp, Homo sapien
cccccactcagttgtcacattgctg

SEQ ID NO: 5132775 - DNA, 25 bp, Homo sapien
caccccccactcagttgtcacattg

SEQ ID NO: 5132776 - DNA, 25 bp, Homo sapien
cactcagttgtcacattgctgggga

SEQ ID NO: 5132777 - DNA, 25 bp, Homo sapien
gaataattcggttagccaaagcgcc

SEQ ID NO: 5132778 - DNA, 25 bp, Homo sapien
tctcgggttctcaggacgttgggca

SEQ ID NO: 5132779 - DNA, 25 bp, Homo sapien
taggcctcttttctagcagcacgca

SEQ ID NO: 5132780 - DNA, 25 bp, Homo sapien
ggagctggctcaaaccgaaagaata

SEQ ID NO: 5132781 - DNA, 25 bp, Homo sapien
ttatctgtgttgctgctgaatcctg

SEQ ID NO: 5132782 - DNA, 25 bp, Homo sapien
caggtcttggactccaggacagcgc

SEQ ID NO: 5132783 - DNA, 25 bp, Homo sapien
cttgtctcagctggagggaggttct

SEQ ID NO: 5132784 - DNA, 25 bp, Homo sapien
tccccaaggagctcagaggtcccaa

SEQ ID NO: 5132785 - DNA, 25 bp, Homo sapien
caagaagcccctgaagctttttctt

SEQ ID NO: 5132786 - DNA, 25 bp, Homo sapien
cagagagcctacaagaagcccctga

SEQ ID NO: 5132787 - DNA, 25 bp, Homo sapien
acatctggggcaccctggcctgccc

SEQ ID NO: 5132788 - DNA, 25 bp, Homo sapien
tttttcttccccacatctggggcac

SEQ ID NO: 5132789 - DNA, 25 bp, Homo sapien
gggctttccaggtctttgggtagca

SEQ ID NO: 5132790 - DNA, 25 bp, Homo sapien
gctttccaggtctttgggtagcagc

SEQ ID NO: 5132791 - DNA, 25 bp, Homo sapien
ccctgagaccccactcccgatcggg

SEQ ID NO: 5132792 - DNA, 25 bp, Homo sapien
cgatcgggctttccaggtctttggg

SEQ ID NO: 5132793 - DNA, 25 bp, Homo sapien
tcccctccctcctaagatgttgagt

SEQ ID NO: 5132794 - DNA, 25 bp, Homo sapien
gcttcaggtctaccgttggagtaaa

SEQ ID NO: 5132795 - DNA, 25 bp, Homo sapien
gatgttgagttgatatctcgacagc

SEQ ID NO: 5132796 - DNA, 25 bp, Homo sapien
tgggagaatcgttgtccctcctggg

SEQ ID NO: 5132797 - DNA, 25 bp, Homo sapien
tctctgagatactggctcgcggcgc

SEQ ID NO: 5132798 - DNA, 25 bp, Homo sapien
cgcggctgtccggaccccgcgctct

SEQ ID NO: 5132799 - DNA, 25 bp, Homo sapien
ccgagaccctcagcgcgcggctgtc

SEQ ID NO: 5132800 - DNA, 25 bp, Homo sapien
ccggaccccgcgctctctgagatac

SEQ ID NO: 5132801 - DNA, 25 bp, Homo sapien
catatttcaggcaagagacggcgaa

SEQ ID NO: 5132802 - DNA, 25 bp, Homo sapien
gttctgaaacctgcgggatgtcacg

SEQ ID NO: 5132803 - DNA, 25 bp, Homo sapien
gctgagcccagctcgaggtggaaac

SEQ ID NO: 5132804 - DNA, 25 bp, Homo sapien
ttccttttctcgaagctcgcgcgga

SEQ ID NO: 5132805 - DNA, 25 bp, Homo sapien
gcaagttcttcacacccgcgcagcc

SEQ ID NO: 5132806 - DNA, 25 bp, Homo sapien
aagttcttcacacccgcgcagcccc

SEQ ID NO: 5132807 - DNA, 25 bp, Homo sapien
gagcaagttcttcacacccgcgcag

SEQ ID NO: 5132808 - DNA, 25 bp, Homo sapien
tgagcaagttcttcacacccgcgca

SEQ ID NO: 5132809 - DNA, 25 bp, Homo sapien
gagcaaccagggaagcgacccctct

SEQ ID NO: 5132810 - DNA, 25 bp, Homo sapien
gaacagtggatcctacaaagcgcat

SEQ ID NO: 5132811 - DNA, 25 bp, Homo sapien
gggctccccggaccatcggcgcagc

SEQ ID NO: 5132812 - DNA, 25 bp, Homo sapien
gaagcgacccctctcctgtggggct

SEQ ID NO: 5132813 - DNA, 25 bp, Homo sapien
acaccgcggagggacggagcgcggg

SEQ ID NO: 5132814 - DNA, 25 bp, Homo sapien
tgcaagctcgtagcccacgctcttg

SEQ ID NO: 5132815 - DNA, 25 bp, Homo sapien
ctagacaccgcggagggacggagcg

SEQ ID NO: 5132816 - DNA, 25 bp, Homo sapien
gccgggcatcgcctgcaagctcgta

SEQ ID NO: 5132817 - DNA, 25 bp, Homo sapien
ctgggcggagggtgacgcgacccca

SEQ ID NO: 5132818 - DNA, 25 bp, Homo sapien
caagactctgcaaacaaagggacac

SEQ ID NO: 5132819 - DNA, 25 bp, Homo sapien
ctagcgttgcctgtaggcgcagtga

SEQ ID NO: 5132820 - DNA, 25 bp, Homo sapien
gagcactccttactggcccaagact

SEQ ID NO: 5132821 - DNA, 25 bp, Homo sapien
actgtagaagcagattatcggaggc

SEQ ID NO: 5132822 - DNA, 25 bp, Homo sapien
ccctaaggcctggattgggctctga

SEQ ID NO: 5132823 - DNA, 25 bp, Homo sapien
ttatcggaggccctttctacctctg

SEQ ID NO: 5132824 - DNA, 25 bp, Homo sapien
gaggtgccagttgacgtctctcaac

SEQ ID NO: 5132825 - DNA, 25 bp, Homo sapien
gccacatttggtggtgacggacagt

SEQ ID NO: 5132826 - DNA, 25 bp, Homo sapien
gtgacggacagtgagagctcctcag

SEQ ID NO: 5132827 - DNA, 25 bp, Homo sapien
gatggtttcgtgtgttcccatttca

SEQ ID NO: 5132828 - DNA, 25 bp, Homo sapien
gctcctcagatggtttcgtgtgttc

SEQ ID NO: 5132829 - DNA, 25 bp, Homo sapien
aagttggtcactggttctgtatctc

SEQ ID NO: 5132830 - DNA, 25 bp, Homo sapien
tggtcactggttctgtatctccctt

SEQ ID NO: 5132831 - DNA, 25 bp, Homo sapien
gttggtcactggttctgtatctccc

SEQ ID NO: 5132832 - DNA, 25 bp, Homo sapien
caagttggtcactggttctgtatct

SEQ ID NO: 5132833 - DNA, 25 bp, Homo sapien
agagagtagggggccagctctggcc

SEQ ID NO: 5132834 - DNA, 25 bp, Homo sapien
gagagagtagggggccagctctggc

SEQ ID NO: 5132835 - DNA, 25 bp, Homo sapien
ctgagagagtagggggccagctctg

SEQ ID NO: 5132836 - DNA, 25 bp, Homo sapien
tgagagagtagggggccagctctgg

SEQ ID NO: 5132837 - DNA, 25 bp, Homo sapien
aggtctgtgttgactgctaaggcat

SEQ ID NO: 5132838 - DNA, 25 bp, Homo sapien
caagagcaggtctgtgttgactgct

SEQ ID NO: 5132839 - DNA, 25 bp, Homo sapien
gtgttgactgctaaggcatccaggc

SEQ ID NO: 5132840 - DNA, 25 bp, Homo sapien
ctgctaacaagagcaggtctgtgtt

SEQ ID NO: 5132841 - DNA, 25 bp, Homo sapien
tgatggtgattattgtctcattact

SEQ ID NO: 5132842 - DNA, 25 bp, Homo sapien
tgtctcattactcacttgtaacaca

SEQ ID NO: 5132843 - DNA, 25 bp, Homo sapien
tactcacttgtaacacatctggaat

SEQ ID NO: 5132844 - DNA, 25 bp, Homo sapien
gattattgtctcattactcacttgt

SEQ ID NO: 5132845 - DNA, 25 bp, Homo sapien
tgttgggccatgcaggtccagcgtt

SEQ ID NO: 5132846 - DNA, 25 bp, Homo sapien
tagatgttgggccatgcaggtccag

SEQ ID NO: 5132847 - DNA, 25 bp, Homo sapien
catagatgttgggccatgcaggtcc

SEQ ID NO: 5132848 - DNA, 25 bp, Homo sapien
agatgttgggccatgcaggtccagc

SEQ ID NO: 5132849 - DNA, 25 bp, Homo sapien
ccagccctggttgattcgccttgca

SEQ ID NO: 5132850 - DNA, 25 bp, Homo sapien
cattggagatttagagccttggtct

SEQ ID NO: 5132851 - DNA, 25 bp, Homo sapien
gctgttttgctttaccatgcgtgtt

SEQ ID NO: 5132852 - DNA, 25 bp, Homo sapien
catggaaaatctgtggtagtgtggc

SEQ ID NO: 5132853 - DNA, 25 bp, Homo sapien
tcctctgctccaactatctccccac

SEQ ID NO: 5132854 - DNA, 25 bp, Homo sapien
ctttcctctgctccaactatctccc

SEQ ID NO: 5132855 - DNA, 25 bp, Homo sapien
tttcctctgctccaactatctcccc

SEQ ID NO: 5132856 - DNA, 25 bp, Homo sapien
ctctgctccaactatctccccacat

SEQ ID NO: 5132857 - DNA, 25 bp, Homo sapien
tccccgacaacccgctgcatccgct

SEQ ID NO: 5132858 - DNA, 25 bp, Homo sapien
ctccccgacaacccgctgcatccgc

SEQ ID NO: 5132859 - DNA, 25 bp, Homo sapien
ccccgacaacccgctgcatccgctc

SEQ ID NO: 5132860 - DNA, 25 bp, Homo sapien
cctccgtggactgcttcctgttccc

SEQ ID NO: 5132861 - DNA, 25 bp, Homo sapien
tgggtctagggcgtcaccctccgtg

SEQ ID NO: 5132862 - DNA, 25 bp, Homo sapien
cgttctgcttgccagcaggtttggg

SEQ ID NO: 5132863 - DNA, 25 bp, Homo sapien
gggttctggattccgttctgcttgc

SEQ ID NO: 5132864 - DNA, 25 bp, Homo sapien
cgtgtgtcgctccttcatgaacttg

SEQ ID NO: 5132865 - DNA, 25 bp, Homo sapien
tgcttgaagccgagatggggcaccc

SEQ ID NO: 5132866 - DNA, 25 bp, Homo sapien
ctctcgatgggcgtgtgtcgctcct

SEQ ID NO: 5132867 - DNA, 25 bp, Homo sapien
ccttcatgaacttgtagaggctgac

SEQ ID NO: 5132868 - DNA, 25 bp, Homo sapien
gggagagaagagcaggctggccgtc

SEQ ID NO: 5132869 - DNA, 25 bp, Homo sapien
agaagagcaggctggccgtcagtct

SEQ ID NO: 5132870 - DNA, 25 bp, Homo sapien
gagagaagagcaggctggccgtcag

SEQ ID NO: 5132871 - DNA, 25 bp, Homo sapien
gagaagagcaggctggccgtcagtc

SEQ ID NO: 5132872 - DNA, 25 bp, Homo sapien
tccactgctttgtagatcttccaca

SEQ ID NO: 5132873 - DNA, 25 bp, Homo sapien
gctttgtagatcttccacaggttaa

SEQ ID NO: 5132874 - DNA, 25 bp, Homo sapien
cttctccactgctttgtagatcttc

SEQ ID NO: 5132875 - DNA, 25 bp, Homo sapien
agctcataggcccccagcttctcca

SEQ ID NO: 5132876 - DNA, 25 bp, Homo sapien
tctgtccagaggcaaggacagcgct

SEQ ID NO: 5132877 - DNA, 25 bp, Homo sapien
gtccagaggcaaggacagcgctgca

SEQ ID NO: 5132878 - DNA, 25 bp, Homo sapien
gcaggctcaccccagggatatgcag

SEQ ID NO: 5132879 - DNA, 25 bp, Homo sapien
cagggatatgcagtttggcaaggac

SEQ ID NO: 5132880 - DNA, 25 bp, Homo sapien
agcagagtaccagcggggaaggcag

SEQ ID NO: 5132881 - DNA, 25 bp, Homo sapien
tgctttgagcagcagagtaccagcg

SEQ ID NO: 5132882 - DNA, 25 bp, Homo sapien
ggaaggctgaaaagctgctttgagc

SEQ ID NO: 5132883 - DNA, 25 bp, Homo sapien
acacggggcgggcagaacagatggg

SEQ ID NO: 5132884 - DNA, 25 bp, Homo sapien
agggcacctcgtgagggcgcggccg

SEQ ID NO: 5132885 - DNA, 25 bp, Homo sapien
cagcagcggccagccgattctctct

SEQ ID NO: 5132886 - DNA, 25 bp, Homo sapien
cctcgcagggactcgaaggactgca

SEQ ID NO: 5132887 - DNA, 25 bp, Homo sapien
cgattctctctcctagggccatgga

SEQ ID NO: 5132888 - DNA, 25 bp, Homo sapien
gctcgtcgtacacgttcttccagag

SEQ ID NO: 5132889 - DNA, 25 bp, Homo sapien
tctcgtagtggcggcgcgtgcacgt

SEQ ID NO: 5132890 - DNA, 25 bp, Homo sapien
ccccagctcgtcgtacacgttcttc

SEQ ID NO: 5132891 - DNA, 25 bp, Homo sapien
cgtcgtacacgttcttccagaggcg

SEQ ID NO: 5132892 - DNA, 25 bp, Homo sapien
gtgccgcacgtatggcaggaccagc

SEQ ID NO: 5132893 - DNA, 25 bp, Homo sapien
aggtgccgcacgtatggcaggacca

SEQ ID NO: 5132894 - DNA, 25 bp, Homo sapien
tcaggtgccgcacgtatggcaggac

SEQ ID NO: 5132895 - DNA, 25 bp, Homo sapien
cttcaggtgccgcacgtatggcagg

SEQ ID NO: 5132896 - DNA, 25 bp, Homo sapien
cttgtactgtttcctgggcttggag

SEQ ID NO: 5132897 - DNA, 25 bp, Homo sapien
gaggtgggcagcggcttgtcatcct

SEQ ID NO: 5132898 - DNA, 25 bp, Homo sapien
gtgggcagcggcttgtcatcctccc

SEQ ID NO: 5132899 - DNA, 25 bp, Homo sapien
ttggaggtgggcagcggcttgtcat

SEQ ID NO: 5132900 - DNA, 25 bp, Homo sapien
ctcggtggccccatcatcccccctg

SEQ ID NO: 5132901 - DNA, 25 bp, Homo sapien
cggtggccccatcatcccccctgtt

SEQ ID NO: 5132902 - DNA, 25 bp, Homo sapien
gtggccccatcatcccccctgttct

SEQ ID NO: 5132903 - DNA, 25 bp, Homo sapien
gccttcttcggcctctcggtggccc

SEQ ID NO: 5132904 - DNA, 25 bp, Homo sapien
attctgagcagacagctccgcggcc

SEQ ID NO: 5132905 - DNA, 25 bp, Homo sapien
aagtcccgccctgggtgcaggttct

SEQ ID NO: 5132906 - DNA, 25 bp, Homo sapien
tggaaccttgcaagtcccgccctgg

SEQ ID NO: 5132907 - DNA, 25 bp, Homo sapien
ccgccctgggtgcaggttctgtgta

SEQ ID NO: 5132908 - DNA, 25 bp, Homo sapien
ctgaggagcaagaggtggcactttc

SEQ ID NO: 5132909 - DNA, 25 bp, Homo sapien
tgcagtcctctgtacagaattttcc

SEQ ID NO: 5132910 - DNA, 25 bp, Homo sapien
agcaagaggtggcactttcaggcct

SEQ ID NO: 5132911 - DNA, 25 bp, Homo sapien
cagaattttccaaaggtgccctgtc

SEQ ID NO: 5132912 - DNA, 25 bp, Homo sapien
aaagtcttgcctcaggactgcctca

SEQ ID NO: 5132913 - DNA, 25 bp, Homo sapien
ggacagccgctggcacccacaaagg

SEQ ID NO: 5132914 - DNA, 25 bp, Homo sapien
cagccgctggcacccacaaaggaca

SEQ ID NO: 5132915 - DNA, 25 bp, Homo sapien
gacagccgctggcacccacaaagga

SEQ ID NO: 5132916 - DNA, 25 bp, Homo sapien
aggacagccgctggcacccacaaag

SEQ ID NO: 5132917 - DNA, 25 bp, Homo sapien
ccagtggtgacatgatgccgtgtgt

SEQ ID NO: 5132918 - DNA, 25 bp, Homo sapien
cagtagaagctggataggagccgct

SEQ ID NO: 5132919 - DNA, 25 bp, Homo sapien
cgtgtgtccccttgcagtagaagct

SEQ ID NO: 5132920 - DNA, 25 bp, Homo sapien
acatgatgccgtgtgtccccttgca

SEQ ID NO: 5132921 - DNA, 25 bp, Homo sapien
agctggggacgcctggggctctgcc

SEQ ID NO: 5132922 - DNA, 25 bp, Homo sapien
gggctctgccccatggcggcagccc

SEQ ID NO: 5132923 - DNA, 25 bp, Homo sapien
ctggggactctctgggaggtgaaca

SEQ ID NO: 5132924 - DNA, 25 bp, Homo sapien
aggtgaacagctggggacgcctggg

SEQ ID NO: 5132925 - DNA, 25 bp, Homo sapien
cacctttatggaacgcagaagggcg

SEQ ID NO: 5132926 - DNA, 25 bp, Homo sapien
cagaagggcggttagcgtctccgcc

SEQ ID NO: 5132927 - DNA, 25 bp, Homo sapien
tgacaggcttcagcacctcggtggg

SEQ ID NO: 5132928 - DNA, 25 bp, Homo sapien
tggcatccgcctccttaagaaaggg

SEQ ID NO: 5132929 - DNA, 25 bp, Homo sapien
gcccggggtgccagtgaagttcagc

SEQ ID NO: 5132930 - DNA, 25 bp, Homo sapien
ggcaaagtctgtggcggagggcact

SEQ ID NO: 5132931 - DNA, 25 bp, Homo sapien
ggaagtgcatcaggccagcggccat

SEQ ID NO: 5132932 - DNA, 25 bp, Homo sapien
gagggcactgtcgaaggacgttggg

SEQ ID NO: 5132933 - DNA, 25 bp, Homo sapien
gaagtggggcgctgcataggttgtg

SEQ ID NO: 5132934 - DNA, 25 bp, Homo sapien
tggggcgctgcataggttgtgactg

SEQ ID NO: 5132935 - DNA, 25 bp, Homo sapien
ggcgctgcataggttgtgactggtg

SEQ ID NO: 5132936 - DNA, 25 bp, Homo sapien
tggaagaagtggggcgctgcatagg

SEQ ID NO: 5132937 - DNA, 25 bp, Homo sapien
ttcttcttcacttgtgccaggctgc

SEQ ID NO: 5132938 - DNA, 25 bp, Homo sapien
ctggcagcagtacctgcctgttgta

SEQ ID NO: 5132939 - DNA, 25 bp, Homo sapien
gcgccttataacaactgggtcctct

SEQ ID NO: 5132940 - DNA, 25 bp, Homo sapien
aggcccctgtcgactccacagtgta

SEQ ID NO: 5132941 - DNA, 25 bp, Homo sapien
cacactggtgtctttttattggatt

SEQ ID NO: 5132942 - DNA, 25 bp, Homo sapien
tccgtgggcaacctgggtgcttcga

SEQ ID NO: 5132943 - DNA, 25 bp, Homo sapien
tattggattttccgtgggcaacctg

SEQ ID NO: 5132944 - DNA, 25 bp, Homo sapien
attttccgtgggcaacctgggtgct

SEQ ID NO: 5132945 - DNA, 25 bp, Homo sapien
caggacagacgtcccacgggaagtg

SEQ ID NO: 5132946 - DNA, 25 bp, Homo sapien
gcttcgtagatgaagggcaccctgc

SEQ ID NO: 5132947 - DNA, 25 bp, Homo sapien
cattcttcagatcggcctccagagg

SEQ ID NO: 5132948 - DNA, 25 bp, Homo sapien
agggcgccgtgatcgcagcgctgag

SEQ ID NO: 5132949 - DNA, 25 bp, Homo sapien
agctccctccagtgcaggtcgcttc

SEQ ID NO: 5132950 - DNA, 25 bp, Homo sapien
cacgctgtcccgaggtgggggttgc

SEQ ID NO: 5132951 - DNA, 25 bp, Homo sapien
ctccagtgcaggtcgcttctccacg

SEQ ID NO: 5132952 - DNA, 25 bp, Homo sapien
gtgcaggtcgcttctccacgctgtc

SEQ ID NO: 5132953 - DNA, 25 bp, Homo sapien
tcgaccaacagctaggaggtcgatc

SEQ ID NO: 5132954 - DNA, 25 bp, Homo sapien
caggcactgtcgaccaacagctagg

SEQ ID NO: 5132955 - DNA, 25 bp, Homo sapien
tggtcaggcactgtcgaccaacagc

SEQ ID NO: 5132956 - DNA, 25 bp, Homo sapien
cactgtcgaccaacagctaggaggt

SEQ ID NO: 5132957 - DNA, 25 bp, Homo sapien
tgtctactcttggtttcaccactag

SEQ ID NO: 5132958 - DNA, 25 bp, Homo sapien
cttggtttcaccactagaacagtct

SEQ ID NO: 5132959 - DNA, 25 bp, Homo sapien
gctggatgggttatagagctgagcg

SEQ ID NO: 5132960 - DNA, 25 bp, Homo sapien
actagaacagtcttgggctggatgg

SEQ ID NO: 5132961 - DNA, 25 bp, Homo sapien
acaacttgcacagggtaacagagga

SEQ ID NO: 5132962 - DNA, 25 bp, Homo sapien
gaatcatttaggacagacagagccc

SEQ ID NO: 5132963 - DNA, 25 bp, Homo sapien
gatgccctatggagatgtccttgtg

SEQ ID NO: 5132964 - DNA, 25 bp, Homo sapien
tcttggaacgcgaaaggaagcttta

SEQ ID NO: 5132965 - DNA, 25 bp, Homo sapien
ctgtgttcaatctgggagccttcct

SEQ ID NO: 5132966 - DNA, 25 bp, Homo sapien
ggccagtctgagtggcagccagaag

SEQ ID NO: 5132967 - DNA, 25 bp, Homo sapien
caatctgggagccttcctggccagt

SEQ ID NO: 5132968 - DNA, 25 bp, Homo sapien
ctggccagtctgagtggcagccaga

SEQ ID NO: 5132969 - DNA, 25 bp, Homo sapien
tggttgccaggtgaaacctgggccc

SEQ ID NO: 5132970 - DNA, 25 bp, Homo sapien
tatccagagagtccgcaggttcaga

SEQ ID NO: 5132971 - DNA, 25 bp, Homo sapien
cagagagtccgcaggttcagataag

SEQ ID NO: 5132972 - DNA, 25 bp, Homo sapien
ttctgtatccagagagtccgcaggt

SEQ ID NO: 5132973 - DNA, 25 bp, Homo sapien
ccggacgggcttgttttggacatca

SEQ ID NO: 5132974 - DNA, 25 bp, Homo sapien
cccgcttaagctgtggtttgaccca

SEQ ID NO: 5132975 - DNA, 25 bp, Homo sapien
gcgcctagttgggaggagacatcca

SEQ ID NO: 5132976 - DNA, 25 bp, Homo sapien
tgccaactggtggttcagagccgga

SEQ ID NO: 5132977 - DNA, 25 bp, Homo sapien
cattaggttaggtgatacggtgcca

SEQ ID NO: 5132978 - DNA, 25 bp, Homo sapien
tgagctgtccacgtgtcggaagacc

SEQ ID NO: 5132979 - DNA, 25 bp, Homo sapien
tcggaagacctgtttaagacagtca

SEQ ID NO: 5132980 - DNA, 25 bp, Homo sapien
cgccaactgtcttcagagaaaccat

SEQ ID NO: 5132981 - DNA, 25 bp, Homo sapien
tgggaatggactattgtgtactcat

SEQ ID NO: 5132982 - DNA, 25 bp, Homo sapien
catgggaatggactattgtgtactc

SEQ ID NO: 5132983 - DNA, 25 bp, Homo sapien
gaatggactattgtgtactcatcac

SEQ ID NO: 5132984 - DNA, 25 bp, Homo sapien
atggactattgtgtactcatcacag

SEQ ID NO: 5132985 - DNA, 25 bp, Homo sapien
tcttagggttcagctgaagcgacac

SEQ ID NO: 5132986 - DNA, 25 bp, Homo sapien
gggttcagctgaagcgacaccatcc

SEQ ID NO: 5132987 - DNA, 25 bp, Homo sapien
ggatcttagggttcagctgaagcga

SEQ ID NO: 5132988 - DNA, 25 bp, Homo sapien
gctgaagcgacaccatccctcgagt

SEQ ID NO: 5132989 - DNA, 25 bp, Homo sapien
tctcaggtgggtggattctcccaga

SEQ ID NO: 5132990 - DNA, 25 bp, Homo sapien
cttccgggagaagattcgagctgag

SEQ ID NO: 5132991 - DNA, 25 bp, Homo sapien
gcaatgtaactacagaccagtctgg

SEQ ID NO: 5132992 - DNA, 25 bp, Homo sapien
taggatgtagatgatcccctcttgg

SEQ ID NO: 5132993 - DNA, 25 bp, Homo sapien
caggctctgcgctagatactttacc

SEQ ID NO: 5132994 - DNA, 25 bp, Homo sapien
cattatcttgattggctggaacaca

SEQ ID NO: 5132995 - DNA, 25 bp, Homo sapien
ggttgttctgcacctatctttggcc

SEQ ID NO: 5132996 - DNA, 25 bp, Homo sapien
tcctgggatggaataccactaatca

SEQ ID NO: 5132997 - DNA, 25 bp, Homo sapien
ccatgtggttgcgtgtatcagcact

SEQ ID NO: 5132998 - DNA, 25 bp, Homo sapien
gagtatactggctagttttgttccc

SEQ ID NO: 5132999 - DNA, 25 bp, Homo sapien
gcacactgaagcctattttcacgag

SEQ ID NO: 5133000 - DNA, 25 bp, Homo sapien
tccctaggaagcactaattgacttt

SEQ ID NO: 5133001 - DNA, 25 bp, Homo sapien
tgtggctaacgtcactacggaactg

SEQ ID NO: 5133002 - DNA, 25 bp, Homo sapien
gatgtccagtgtggtaactgccgcc

SEQ ID NO: 5133003 - DNA, 25 bp, Homo sapien
gaatgttctatacctgggatgtcca

SEQ ID NO: 5133004 - DNA, 25 bp, Homo sapien
taaggtatgtgcattccaggtcatc

SEQ ID NO: 5133005 - DNA, 25 bp, Homo sapien
acaagccgcagcatctcggagacct

SEQ ID NO: 5133006 - DNA, 25 bp, Homo sapien
tagtggtgggtcaatcttggccgac

SEQ ID NO: 5133007 - DNA, 25 bp, Homo sapien
tggagctcctcagtccaagactttt

SEQ ID NO: 5133008 - DNA, 25 bp, Homo sapien
caagacttttcccagcgatcctggg

SEQ ID NO: 5133009 - DNA, 25 bp, Homo sapien
ttccaccacacgagttcttttcttg

SEQ ID NO: 5133010 - DNA, 25 bp, Homo sapien
cattccacacgggatcattcccttc

SEQ ID NO: 5133011 - DNA, 25 bp, Homo sapien
tccacacgggatcattcccttccac

SEQ ID NO: 5133012 - DNA, 25 bp, Homo sapien
ccaccacacgagttcttttcttgat

SEQ ID NO: 5133013 - DNA, 25 bp, Homo sapien
ggttccagaggtgccagattagggt

SEQ ID NO: 5133014 - DNA, 25 bp, Homo sapien
cggttccagaggtgccagattaggg

SEQ ID NO: 5133015 - DNA, 25 bp, Homo sapien
tctgtgggcttcatggaatggttga

SEQ ID NO: 5133016 - DNA, 25 bp, Homo sapien
gagcagggtcaagtccttcacaaaa

SEQ ID NO: 5133017 - DNA, 25 bp, Homo sapien
aggacctcacttggttgtttcaaca

SEQ ID NO: 5133018 - DNA, 25 bp, Homo sapien
aatggcttgagcagtactgtggcca

SEQ ID NO: 5133019 - DNA, 25 bp, Homo sapien
tgtcttctcaatatcctggttgctc

SEQ ID NO: 5133020 - DNA, 25 bp, Homo sapien
ggttgctcatgtgggccacctgtag

SEQ ID NO: 5133021 - DNA, 25 bp, Homo sapien
atcctggttgctcatgtgggccacc

SEQ ID NO: 5133022 - DNA, 25 bp, Homo sapien
cctggttgctcatgtgggccacctg

SEQ ID NO: 5133023 - DNA, 25 bp, Homo sapien
agtggagccagggaccatcagtttc

SEQ ID NO: 5133024 - DNA, 25 bp, Homo sapien
acagagccctgtgcgcagtggagcc

SEQ ID NO: 5133025 - DNA, 25 bp, Homo sapien
tcttgccgttatgcccaggtggtct

SEQ ID NO: 5133026 - DNA, 25 bp, Homo sapien
cctctcttgccgttatgcccaggtg

SEQ ID NO: 5133027 - DNA, 25 bp, Homo sapien
caccttcaccactggtttgatgttg

SEQ ID NO: 5133028 - DNA, 25 bp, Homo sapien
ttgcccatgagctgtcgggcttcaa

SEQ ID NO: 5133029 - DNA, 25 bp, Homo sapien
agctgtcgggcttcaaacaccttca

SEQ ID NO: 5133030 - DNA, 25 bp, Homo sapien
gcctgcgatggacaccttcaccact

SEQ ID NO: 5133031 - DNA, 25 bp, Homo sapien
tttacggattcatgagttgtgcccc

SEQ ID NO: 5133032 - DNA, 25 bp, Homo sapien
gcttggccctcagtagacactcagt

SEQ ID NO: 5133033 - DNA, 25 bp, Homo sapien
tatagttctgctgtcaagtctgcgg

SEQ ID NO: 5133034 - DNA, 25 bp, Homo sapien
cccaggatggagatttgagcccaca

SEQ ID NO: 5133035 - DNA, 25 bp, Homo sapien
atttcaatgggtttacaagtacagg

SEQ ID NO: 5133036 - DNA, 25 bp, Homo sapien
tagagtggatgatttcttccgccac

SEQ ID NO: 5133037 - DNA, 25 bp, Homo sapien
gagtggatgatttcttccgccactt

SEQ ID NO: 5133038 - DNA, 25 bp, Homo sapien
gggtttacaagtacaggctgagtat

SEQ ID NO: 5133039 - DNA, 25 bp, Homo sapien
ctggattaagatggtctcatcaaag

SEQ ID NO: 5133040 - DNA, 25 bp, Homo sapien
gtctcatcaaagaactttgcaggaa

SEQ ID NO: 5133041 - DNA, 25 bp, Homo sapien
tggtctcatcaaagaactttgcagg

SEQ ID NO: 5133042 - DNA, 25 bp, Homo sapien
ggtctcatcaaagaactttgcagga

SEQ ID NO: 5133043 - DNA, 25 bp, Homo sapien
tgctggggaccagtttggctcctca

SEQ ID NO: 5133044 - DNA, 25 bp, Homo sapien
cttgctggggaccagtttggctcct

SEQ ID NO: 5133045 - DNA, 25 bp, Homo sapien
ttgctggggaccagtttggctcctc

SEQ ID NO: 5133046 - DNA, 25 bp, Homo sapien
ctggcagttggcaatccacaacatt

SEQ ID NO: 5133047 - DNA, 25 bp, Homo sapien
tattgaagtgggacaagaaacccac

SEQ ID NO: 5133048 - DNA, 25 bp, Homo sapien
gctggagctgtagtgcttcccagta

SEQ ID NO: 5133049 - DNA, 25 bp, Homo sapien
tgaagtgcccctggctctaagggtg

SEQ ID NO: 5133050 - DNA, 25 bp, Homo sapien
ctttggtggcttgaaaatcctggca

SEQ ID NO: 5133051 - DNA, 25 bp, Homo sapien
caaagcaaggtgttgcactcaacgt

SEQ ID NO: 5133052 - DNA, 25 bp, Homo sapien
tagtaggcacctgataaccacatgt

SEQ ID NO: 5133053 - DNA, 25 bp, Homo sapien
tatagcaaaggcacaaccaggatcc

SEQ ID NO: 5133054 - DNA, 25 bp, Homo sapien
tgaaatctcccgatctctgctttgt

SEQ ID NO: 5133055 - DNA, 25 bp, Homo sapien
tgctttgtatctcattgctgaggag

SEQ ID NO: 5133056 - DNA, 25 bp, Homo sapien
tctgctttgtatctcattgctgagg

SEQ ID NO: 5133057 - DNA, 25 bp, Homo sapien
tgtatctcattgctgaggagttcac

SEQ ID NO: 5133058 - DNA, 25 bp, Homo sapien
cccggccaagtctggatctttctgt

SEQ ID NO: 5133059 - DNA, 25 bp, Homo sapien
cttttccctagacttgggcatggag

SEQ ID NO: 5133060 - DNA, 25 bp, Homo sapien
acccggccaagtctggatctttctg

SEQ ID NO: 5133061 - DNA, 25 bp, Homo sapien
ttccctagacttgggcatggagccc

SEQ ID NO: 5133062 - DNA, 25 bp, Homo sapien
ctggagaatggtagataaacccaat

SEQ ID NO: 5133063 - DNA, 25 bp, Homo sapien
aatggtagataaacccaatatctgt

SEQ ID NO: 5133064 - DNA, 25 bp, Homo sapien
gaatggtagataaacccaatatctg

SEQ ID NO: 5133065 - DNA, 25 bp, Homo sapien
ggagaatggtagataaacccaatat

SEQ ID NO: 5133066 - DNA, 25 bp, Homo sapien
tctcccacaccgagggcatagatgg

SEQ ID NO: 5133067 - DNA, 25 bp, Homo sapien
ggcagaggcctagccatttccttag

SEQ ID NO: 5133068 - DNA, 25 bp, Homo sapien
ttcaggtagcctgtcacaccactgc

SEQ ID NO: 5133069 - DNA, 25 bp, Homo sapien
cactgccagggttatttggctggca

SEQ ID NO: 5133070 - DNA, 25 bp, Homo sapien
taagccatgttgatcgggactaccg

SEQ ID NO: 5133071 - DNA, 25 bp, Homo sapien
tctgaatatcggtgtcatcggtgcc

SEQ ID NO: 5133072 - DNA, 25 bp, Homo sapien
tgaaggtcctctgcgcagtagatga

SEQ ID NO: 5133073 - DNA, 25 bp, Homo sapien
ggactaccgctgacttgaagatctg

SEQ ID NO: 5133074 - DNA, 25 bp, Homo sapien
tgaggattcactgactggtgtttct

SEQ ID NO: 5133075 - DNA, 25 bp, Homo sapien
ctgaggattcactgactggtgtttc

SEQ ID NO: 5133076 - DNA, 25 bp, Homo sapien
tagttccacctccaactgaggattc

SEQ ID NO: 5133077 - DNA, 25 bp, Homo sapien
ccaattagttccacctccaactgag

SEQ ID NO: 5133078 - DNA, 25 bp, Homo sapien
tctggttccatatcgggttgtcggt

SEQ ID NO: 5133079 - DNA, 25 bp, Homo sapien
gatctggttccatatcgggttgtcg

SEQ ID NO: 5133080 - DNA, 25 bp, Homo sapien
aggatctggttccatatcgggttgt

SEQ ID NO: 5133081 - DNA, 25 bp, Homo sapien
ctggttccatatcgggttgtcggtt

SEQ ID NO: 5133082 - DNA, 25 bp, Homo sapien
gacataggtacgtcaatgataactc

SEQ ID NO: 5133083 - DNA, 25 bp, Homo sapien
ttgacataggtacgtcaatgataac

SEQ ID NO: 5133084 - DNA, 25 bp, Homo sapien
cattgacataggtacgtcaatgata

SEQ ID NO: 5133085 - DNA, 25 bp, Homo sapien
acataggtacgtcaatgataactca

SEQ ID NO: 5133086 - DNA, 25 bp, Homo sapien
aacttgatgtagctggagaggcagg

SEQ ID NO: 5133087 - DNA, 25 bp, Homo sapien
gaacttgatgtagctggagaggcag

SEQ ID NO: 5133088 - DNA, 25 bp, Homo sapien
gagatctggttgagggacaggctgg

SEQ ID NO: 5133089 - DNA, 25 bp, Homo sapien
ttctatctcttctccggtggacgag

SEQ ID NO: 5133090 - DNA, 25 bp, Homo sapien
tctcatccgggcagtccttcttgcg

SEQ ID NO: 5133091 - DNA, 25 bp, Homo sapien
gaagtgggctcgaggctttgcttgc

SEQ ID NO: 5133092 - DNA, 25 bp, Homo sapien
cagggcaggaagccggagtacactc

SEQ ID NO: 5133093 - DNA, 25 bp, Homo sapien
tttacccccatgcagagtcaggaag

SEQ ID NO: 5133094 - DNA, 25 bp, Homo sapien
cctttttacccccatgcagagtcag

SEQ ID NO: 5133095 - DNA, 25 bp, Homo sapien
ccccatgcagagtcaggaagctggg

SEQ ID NO: 5133096 - DNA, 25 bp, Homo sapien
gacttgatttgggtgattaactcca

SEQ ID NO: 5133097 - DNA, 25 bp, Homo sapien
ctttatcgtggagtcttgataggac

SEQ ID NO: 5133098 - DNA, 25 bp, Homo sapien
tatcctggtcacttcatgggagaga

SEQ ID NO: 5133099 - DNA, 25 bp, Homo sapien
aactccaggaagactcggcctcgat

SEQ ID NO: 5133100 - DNA, 25 bp, Homo sapien
caagggttatattgacaggcaggga

SEQ ID NO: 5133101 - DNA, 25 bp, Homo sapien
tacccagtacataagccaagggtta

SEQ ID NO: 5133102 - DNA, 25 bp, Homo sapien
gcaaggatgaggtatctttctttca

SEQ ID NO: 5133103 - DNA, 25 bp, Homo sapien
ggaggcaaggatgaggtatctttct

SEQ ID NO: 5133104 - DNA, 25 bp, Homo sapien
agatgacgcacagcccatacttttg

SEQ ID NO: 5133105 - DNA, 25 bp, Homo sapien
tacggtgtgcttgagactagaggct

SEQ ID NO: 5133106 - DNA, 25 bp, Homo sapien
gacctcgaaatggatcagctcttta

SEQ ID NO: 5133107 - DNA, 25 bp, Homo sapien
tcttgttcccatagtgaccgatgct

SEQ ID NO: 5133108 - DNA, 25 bp, Homo sapien
aggtcacggccacgacaggcttggt

SEQ ID NO: 5133109 - DNA, 25 bp, Homo sapien
tgaggcagttcatgcggaagctgac

SEQ ID NO: 5133110 - DNA, 25 bp, Homo sapien
aggcttggtgttgtaccagggcaca

SEQ ID NO: 5133111 - DNA, 25 bp, Homo sapien
ggaagctgacgtcctcccagttgga

SEQ ID NO: 5133112 - DNA, 25 bp, Homo sapien
ccagcatcggctcccgcaccactca

SEQ ID NO: 5133113 - DNA, 25 bp, Homo sapien
ggtgtcttcccagcatcggctcccg

SEQ ID NO: 5133114 - DNA, 25 bp, Homo sapien
gtcttcccagcatcggctcccgcac

SEQ ID NO: 5133115 - DNA, 25 bp, Homo sapien
tcccagcatcggctcccgcaccact

SEQ ID NO: 5133116 - DNA, 25 bp, Homo sapien
attccgcgtggatttcagggtgtcc

SEQ ID NO: 5133117 - DNA, 25 bp, Homo sapien
ctggatccttcggattccgcgtgga

SEQ ID NO: 5133118 - DNA, 25 bp, Homo sapien
ggagagctggatccttcggattccg

SEQ ID NO: 5133119 - DNA, 25 bp, Homo sapien
tttctcccactggtagaggagagct

SEQ ID NO: 5133120 - DNA, 25 bp, Homo sapien
ctgtggccaggacagggtagcaggg

SEQ ID NO: 5133121 - DNA, 25 bp, Homo sapien
gtggccaggacagggtagcaggggc

SEQ ID NO: 5133122 - DNA, 25 bp, Homo sapien
cagggtagcaggggctggacctctc

SEQ ID NO: 5133123 - DNA, 25 bp, Homo sapien
gggtagcaggggctggacctctcta

SEQ ID NO: 5133124 - DNA, 25 bp, Homo sapien
ccagtcctccgctgtggccaccatg

SEQ ID NO: 5133125 - DNA, 25 bp, Homo sapien
ggcttgcttggccttttgggccagt

SEQ ID NO: 5133126 - DNA, 25 bp, Homo sapien
tggctttgggctgataggtcatgca

SEQ ID NO: 5133127 - DNA, 25 bp, Homo sapien
gcacggtgttgaggcggtacagcca

SEQ ID NO: 5133128 - DNA, 25 bp, Homo sapien
ctgccgaggtgggagaatgtcaggc

SEQ ID NO: 5133129 - DNA, 25 bp, Homo sapien
tgccgaggtgggagaatgtcaggcc

SEQ ID NO: 5133130 - DNA, 25 bp, Homo sapien
ggccaccagccaaatcatcacgtca

SEQ ID NO: 5133131 - DNA, 25 bp, Homo sapien
gcataggccactcgctgctccttgg

SEQ ID NO: 5133132 - DNA, 25 bp, Homo sapien
accagccaaatcatcacgtcaggga

SEQ ID NO: 5133133 - DNA, 25 bp, Homo sapien
tgtgcataggccactcgctgctcct

SEQ ID NO: 5133134 - DNA, 25 bp, Homo sapien
aggaagagtgtctgtatcttcccac

SEQ ID NO: 5133135 - DNA, 25 bp, Homo sapien
agagtgtctgtatcttcccacagag

SEQ ID NO: 5133136 - DNA, 25 bp, Homo sapien
ttcccacagagcctgccggagtgca

SEQ ID NO: 5133137 - DNA, 25 bp, Homo sapien
cccacagagcctgccggagtgcaga

SEQ ID NO: 5133138 - DNA, 25 bp, Homo sapien
gtccttgctgtctgtgacattgcca

SEQ ID NO: 5133139 - DNA, 25 bp, Homo sapien
agccacatgcagacccggaggtgag

SEQ ID NO: 5133140 - DNA, 25 bp, Homo sapien
gctgtctgtgacattgccaagccac

SEQ ID NO: 5133141 - DNA, 25 bp, Homo sapien
catctcggcgtacaccgctgtgtca

SEQ ID NO: 5133142 - DNA, 25 bp, Homo sapien
gttgatgaactaggagaaagctcgg

SEQ ID NO: 5133143 - DNA, 25 bp, Homo sapien
cttcacgtgctgttgatgaactagg

SEQ ID NO: 5133144 - DNA, 25 bp, Homo sapien
ctcacttcacgtgctgttgatgaac

SEQ ID NO: 5133145 - DNA, 25 bp, Homo sapien
gaactaggagaaagctcggaataaa

SEQ ID NO: 5133146 - DNA, 25 bp, Homo sapien
tgttccccatgacatccgagaagtt

SEQ ID NO: 5133147 - DNA, 25 bp, Homo sapien
gggcagtgatacagcccctgctgcc

SEQ ID NO: 5133148 - DNA, 25 bp, Homo sapien
ccaggggtggttggaaatccgtcat

SEQ ID NO: 5133149 - DNA, 25 bp, Homo sapien
agttggggcagtgatacagcccctg

SEQ ID NO: 5133150 - DNA, 25 bp, Homo sapien
tcacggccctggttctcatatacct

SEQ ID NO: 5133151 - DNA, 25 bp, Homo sapien
gtgtcacggccctggttctcatata

SEQ ID NO: 5133152 - DNA, 25 bp, Homo sapien
cacgtctgtgtttgggatggcggca

SEQ ID NO: 5133153 - DNA, 25 bp, Homo sapien
ctgtgtttgggatggcggcaggccc

SEQ ID NO: 5133154 - DNA, 25 bp, Homo sapien
tccttcttaaagtgccagccttggg

SEQ ID NO: 5133155 - DNA, 25 bp, Homo sapien
tgtccactgcgtggttcagctccac

SEQ ID NO: 5133156 - DNA, 25 bp, Homo sapien
ggcacttcacgttctcccgggcctc

SEQ ID NO: 5133157 - DNA, 25 bp, Homo sapien
gccttgggggcacttcacgttctcc

SEQ ID NO: 5133158 - DNA, 25 bp, Homo sapien
tcccaaccctgaccaaacgactgac

SEQ ID NO: 5133159 - DNA, 25 bp, Homo sapien
tctcccgatcccaaccctgaccaaa

SEQ ID NO: 5133160 - DNA, 25 bp, Homo sapien
ctggctgccgttattttgaggccct

SEQ ID NO: 5133161 - DNA, 25 bp, Homo sapien
cgatcccaaccctgaccaaacgact

SEQ ID NO: 5133162 - DNA, 25 bp, Homo sapien
gacggtgggatccccactccatact

SEQ ID NO: 5133163 - DNA, 25 bp, Homo sapien
gccggcggcggcacgagtggtaggt

SEQ ID NO: 5133164 - DNA, 25 bp, Homo sapien
gttcctgaagcgcacacgcgcccag

SEQ ID NO: 5133165 - DNA, 25 bp, Homo sapien
ggcacgagtggtaggtcttctccac

SEQ ID NO: 5133166 - DNA, 25 bp, Homo sapien
aatatgggcgcgatgcccttgtcct

SEQ ID NO: 5133167 - DNA, 25 bp, Homo sapien
gagggttgaggtggaacttggagcc

SEQ ID NO: 5133168 - DNA, 25 bp, Homo sapien
caaggacccctccaggaggaatatg

SEQ ID NO: 5133169 - DNA, 25 bp, Homo sapien
gagccgaaggtgtcatactcccagc

SEQ ID NO: 5133170 - DNA, 25 bp, Homo sapien
gctcctgtttcctctagcccaggcc

SEQ ID NO: 5133171 - DNA, 25 bp, Homo sapien
tgggtgctgctcctgtttcctctag

SEQ ID NO: 5133172 - DNA, 25 bp, Homo sapien
tgtacccaggacagtctcccctgag

SEQ ID NO: 5133173 - DNA, 25 bp, Homo sapien
tctcccctgaggctcttgggtgctg

SEQ ID NO: 5133174 - DNA, 25 bp, Homo sapien
ctgaactgtctgtccagaccccatg

SEQ ID NO: 5133175 - DNA, 25 bp, Homo sapien
actgtctgtccagaccccatggcca

SEQ ID NO: 5133176 - DNA, 25 bp, Homo sapien
gaactgtctgtccagaccccatggc

SEQ ID NO: 5133177 - DNA, 25 bp, Homo sapien
tgaactgtctgtccagaccccatgg

SEQ ID NO: 5133178 - DNA, 25 bp, Homo sapien
tggggggccgggtgtcctgcctctg

SEQ ID NO: 5133179 - DNA, 25 bp, Homo sapien
tattgaaggtgcagtagatgaaggg

SEQ ID NO: 5133180 - DNA, 25 bp, Homo sapien
agatgaagggcaagttggggggccg

SEQ ID NO: 5133181 - DNA, 25 bp, Homo sapien
gccgggtgtcctgcctctgggggtc

SEQ ID NO: 5133182 - DNA, 25 bp, Homo sapien
tggggaaagagaagccatgcctgtc

SEQ ID NO: 5133183 - DNA, 25 bp, Homo sapien
gaaagagaagccatgcctgtcacct

SEQ ID NO: 5133184 - DNA, 25 bp, Homo sapien
cccagcggctccctctgactgcccc

SEQ ID NO: 5133185 - DNA, 25 bp, Homo sapien
gggaaagagaagccatgcctgtcac

SEQ ID NO: 5133186 - DNA, 25 bp, Homo sapien
tgattggacaccaggttccgggcct

SEQ ID NO: 5133187 - DNA, 25 bp, Homo sapien
gatctgattggacaccaggttccgg

SEQ ID NO: 5133188 - DNA, 25 bp, Homo sapien
tggaatgtcaggatctgattggaca

SEQ ID NO: 5133189 - DNA, 25 bp, Homo sapien
cttggaatgtcaggatctgattgga

SEQ ID NO: 5133190 - DNA, 25 bp, Homo sapien
agctccagcaccacaagcggtgggc

SEQ ID NO: 5133191 - DNA, 25 bp, Homo sapien
tcaggaagaccacccgaatgaaggg

SEQ ID NO: 5133192 - DNA, 25 bp, Homo sapien
ctggaagatgagtgtctgggcccat

SEQ ID NO: 5133193 - DNA, 25 bp, Homo sapien
cctgtgggttctcgtacagaaggag

SEQ ID NO: 5133194 - DNA, 25 bp, Homo sapien
gatccagccagaccattgggggcca

SEQ ID NO: 5133195 - DNA, 25 bp, Homo sapien
caactcctttacaaggggatgccac

SEQ ID NO: 5133196 - DNA, 25 bp, Homo sapien
ggcaggatccggtcctggagatcca

SEQ ID NO: 5133197 - DNA, 25 bp, Homo sapien
acaggatgccaagatctcgccctct

SEQ ID NO: 5133198 - DNA, 25 bp, Homo sapien
tcccagccaggccctctctcccaat

SEQ ID NO: 5133199 - DNA, 25 bp, Homo sapien
cccagccaggccctctctcccaata

SEQ ID NO: 5133200 - DNA, 25 bp, Homo sapien
ttcccagccaggccctctctcccaa

SEQ ID NO: 5133201 - DNA, 25 bp, Homo sapien
ccagccaggccctctctcccaatac

SEQ ID NO: 5133202 - DNA, 25 bp, Homo sapien
gggagggcagggagcatgaggccct

SEQ ID NO: 5133203 - DNA, 25 bp, Homo sapien
ggggagggcagggagcatgaggccc

SEQ ID NO: 5133204 - DNA, 25 bp, Homo sapien
tgggggagggcagggagcatgaggc

SEQ ID NO: 5133205 - DNA, 25 bp, Homo sapien
ctgggggagggcagggagcatgagg

SEQ ID NO: 5133206 - DNA, 25 bp, Homo sapien
ggccatcctctttatcgtgggctgg

SEQ ID NO: 5133207 - DNA, 25 bp, Homo sapien
ttcttccagggaacgcttaagatag

SEQ ID NO: 5133208 - DNA, 25 bp, Homo sapien
ccagggaacgcttaagataggcagc

SEQ ID NO: 5133209 - DNA, 25 bp, Homo sapien
tttatcgtgggctggatgctcttgg

SEQ ID NO: 5133210 - DNA, 25 bp, Homo sapien
cgtccccatcccacatcgccagcac

SEQ ID NO: 5133211 - DNA, 25 bp, Homo sapien
tcatcagttctcaggtaggagttcc

SEQ ID NO: 5133212 - DNA, 25 bp, Homo sapien
tctgaaggcgcacaaggacaggctt

SEQ ID NO: 5133213 - DNA, 25 bp, Homo sapien
aaagcgggaaccagccaagttgcct

SEQ ID NO: 5133214 - DNA, 25 bp, Homo sapien
taggagttcctgaagccgactgcct

SEQ ID NO: 5133215 - DNA, 25 bp, Homo sapien
agcgcctctgtaatggggtcctggc

SEQ ID NO: 5133216 - DNA, 25 bp, Homo sapien
gcagcgcctctgtaatggggtcctg

SEQ ID NO: 5133217 - DNA, 25 bp, Homo sapien
ctgaggggcaatagcggtgcagcag

SEQ ID NO: 5133218 - DNA, 25 bp, Homo sapien
caggcagcgcctctgtaatggggtc

SEQ ID NO: 5133219 - DNA, 25 bp, Homo sapien
gagctcgccttcttcatgttccgaa

SEQ ID NO: 5133220 - DNA, 25 bp, Homo sapien
actgtgaggactaggacagactcag

SEQ ID NO: 5133221 - DNA, 25 bp, Homo sapien
acagactcagactcggggaagttgg

SEQ ID NO: 5133222 - DNA, 25 bp, Homo sapien
tcttccccgaattccaccaggagct

SEQ ID NO: 5133223 - DNA, 25 bp, Homo sapien
tctgctggccgaaggcccagttgtc

SEQ ID NO: 5133224 - DNA, 25 bp, Homo sapien
gctttgggtgcatatagtcttgagc

SEQ ID NO: 5133225 - DNA, 25 bp, Homo sapien
cgaaggcccagttgtctaccacctt

SEQ ID NO: 5133226 - DNA, 25 bp, Homo sapien
ttggcctggcccgtcacggtctgct

SEQ ID NO: 5133227 - DNA, 25 bp, Homo sapien
gtcttggtgcttcttctcagacagc

SEQ ID NO: 5133228 - DNA, 25 bp, Homo sapien
tcttggtgcttcttctcagacagcg

SEQ ID NO: 5133229 - DNA, 25 bp, Homo sapien
ctttactggacttgaaccagaactt

SEQ ID NO: 5133230 - DNA, 25 bp, Homo sapien
ttactggacttgaaccagaactttc

SEQ ID NO: 5133231 - DNA, 25 bp, Homo sapien
ctgctttactggacttgaaccagaa

SEQ ID NO: 5133232 - DNA, 25 bp, Homo sapien
tgctttactggacttgaaccagaac

SEQ ID NO: 5133233 - DNA, 25 bp, Homo sapien
gaagaggatcattctggcctcgggc

SEQ ID NO: 5133234 - DNA, 25 bp, Homo sapien
gagaagaggatcattctggcctcgg

SEQ ID NO: 5133235 - DNA, 25 bp, Homo sapien
agaggatcattctggcctcgggcag

SEQ ID NO: 5133236 - DNA, 25 bp, Homo sapien
cagagaagaggatcattctggcctc

SEQ ID NO: 5133237 - DNA, 25 bp, Homo sapien
gtctttgtacttgtacttcagggac

SEQ ID NO: 5133238 - DNA, 25 bp, Homo sapien
agaacagcttgctccaccagtccac

SEQ ID NO: 5133239 - DNA, 25 bp, Homo sapien
cttgagggtgtggtagtctttgtac

SEQ ID NO: 5133240 - DNA, 25 bp, Homo sapien
tcagggacttgtgctcatctgtggc

SEQ ID NO: 5133241 - DNA, 25 bp, Homo sapien
cacggggctgtccaacttgggctgc

SEQ ID NO: 5133242 - DNA, 25 bp, Homo sapien
ctcctggtagagtttgaaggtctgg

SEQ ID NO: 5133243 - DNA, 25 bp, Homo sapien
agtttgaaggtctggcagaagtcct

SEQ ID NO: 5133244 - DNA, 25 bp, Homo sapien
ggctgtccaacttgggctgctcctg

SEQ ID NO: 5133245 - DNA, 25 bp, Homo sapien
ggctttggggcttctggattctcag

SEQ ID NO: 5133246 - DNA, 25 bp, Homo sapien
tgatggctcgtaccatgtacacccg

SEQ ID NO: 5133247 - DNA, 25 bp, Homo sapien
tgtacacccgcaccaagcacggctg

SEQ ID NO: 5133248 - DNA, 25 bp, Homo sapien
tctctctctggccaaaccaagaact

SEQ ID NO: 5133249 - DNA, 25 bp, Homo sapien
gtgtggggcaggtactgttctttac

SEQ ID NO: 5133250 - DNA, 25 bp, Homo sapien
tgtgtggggcaggtactgttcttta

SEQ ID NO: 5133251 - DNA, 25 bp, Homo sapien
ctgtgtggggcaggtactgttcttt

SEQ ID NO: 5133252 - DNA, 25 bp, Homo sapien
tctgtcttgcccagtttcaggatca

SEQ ID NO: 5133253 - DNA, 25 bp, Homo sapien
gtttcaggatcacataagggtcaca

SEQ ID NO: 5133254 - DNA, 25 bp, Homo sapien
gagtgttgggctggtacatgtcccg

SEQ ID NO: 5133255 - DNA, 25 bp, Homo sapien
acatgtcccggttgccaagctctgt

SEQ ID NO: 5133256 - DNA, 25 bp, Homo sapien
gaaaataggtcgaagtcatagagct

SEQ ID NO: 5133257 - DNA, 25 bp, Homo sapien
taggatttggagagcccacaatgag

SEQ ID NO: 5133258 - DNA, 25 bp, Homo sapien
tcatagagctggatctctaggtcct

SEQ ID NO: 5133259 - DNA, 25 bp, Homo sapien
caaagccagataggagtcggttttc

SEQ ID NO: 5133260 - DNA, 25 bp, Homo sapien
gcttggcatagcgttctaggaggta

SEQ ID NO: 5133261 - DNA, 25 bp, Homo sapien
tgaacagaggcggaggtagcccttt

SEQ ID NO: 5133262 - DNA, 25 bp, Homo sapien
gatcccgccatctaaagggccctga

SEQ ID NO: 5133263 - DNA, 25 bp, Homo sapien
gaggtagccctttccgcttggcata

SEQ ID NO: 5133264 - DNA, 25 bp, Homo sapien
tgggtcccaaaccatgaacagtagg

SEQ ID NO: 5133265 - DNA, 25 bp, Homo sapien
cttgggtcccaaaccatgaacagta

SEQ ID NO: 5133266 - DNA, 25 bp, Homo sapien
caaaccatgaacagtaggggttttg

SEQ ID NO: 5133267 - DNA, 25 bp, Homo sapien
ttgggtcccaaaccatgaacagtag

SEQ ID NO: 5133268 - DNA, 25 bp, Homo sapien
gggtctccacgtgctcaggtaccag

SEQ ID NO: 5133269 - DNA, 25 bp, Homo sapien
tggctgtacagtgtgcgggtctcca

SEQ ID NO: 5133270 - DNA, 25 bp, Homo sapien
tacagtgtgcgggtctccacgtgct

SEQ ID NO: 5133271 - DNA, 25 bp, Homo sapien
ggaggtacagtgcaaggcgttcctt

SEQ ID NO: 5133272 - DNA, 25 bp, Homo sapien
agacattgactggtagggctccctg

SEQ ID NO: 5133273 - DNA, 25 bp, Homo sapien
tcatgtctgcgctgtctgacctgag

SEQ ID NO: 5133274 - DNA, 25 bp, Homo sapien
ttaacagccagaacccgcgttgtca

SEQ ID NO: 5133275 - DNA, 25 bp, Homo sapien
cccctcgggagagacttaaggcaat

SEQ ID NO: 5133276 - DNA, 25 bp, Homo sapien
tgtccacccacatttgcacctttcc

SEQ ID NO: 5133277 - DNA, 25 bp, Homo sapien
tggggaagatgtccacccacatttg

SEQ ID NO: 5133278 - DNA, 25 bp, Homo sapien
ctggggttgatgttgacttgggggc

SEQ ID NO: 5133279 - DNA, 25 bp, Homo sapien
tctggggttgatgttgacttggggg

SEQ ID NO: 5133280 - DNA, 25 bp, Homo sapien
caatagagaaacgaattactgcagc

SEQ ID NO: 5133281 - DNA, 25 bp, Homo sapien
cttcccaatagagaaacgaattact

SEQ ID NO: 5133282 - DNA, 25 bp, Homo sapien
gaaacgaattactgcagctcagtac

SEQ ID NO: 5133283 - DNA, 25 bp, Homo sapien
aaagctcccagtagagcttcctctc

SEQ ID NO: 5133284 - DNA, 25 bp, Homo sapien
gtggccactgtgctctgaggctttg

SEQ ID NO: 5133285 - DNA, 25 bp, Homo sapien
tgtggccactgtgctctgaggcttt

SEQ ID NO: 5133286 - DNA, 25 bp, Homo sapien
ctgtggccactgtgctctgaggctt

SEQ ID NO: 5133287 - DNA, 25 bp, Homo sapien
cttctctctacttaaattgtcatcc

SEQ ID NO: 5133288 - DNA, 25 bp, Homo sapien
tgtagatgtcgctcgtcttctctct

SEQ ID NO: 5133289 - DNA, 25 bp, Homo sapien
gtcttccagatgatgcatcgcagct

SEQ ID NO: 5133290 - DNA, 25 bp, Homo sapien
caggtccacattggcagtcttccag

SEQ ID NO: 5133291 - DNA, 25 bp, Homo sapien
gatgaaccgccagttgaagtcggcc

SEQ ID NO: 5133292 - DNA, 25 bp, Homo sapien
agtcggcctccccagtcagcgagtg

SEQ ID NO: 5133293 - DNA, 25 bp, Homo sapien
caggtagtccatggtaaagatgaac

SEQ ID NO: 5133294 - DNA, 25 bp, Homo sapien
cagcgagtggtagtggatgtctgtc

SEQ ID NO: 5133295 - DNA, 25 bp, Homo sapien
tgataagtcgggctgggaacttcat

SEQ ID NO: 5133296 - DNA, 25 bp, Homo sapien
aagatgtcattgtcccagacctgga

SEQ ID NO: 5133297 - DNA, 25 bp, Homo sapien
gaacttcatggacgtggcatccagg

SEQ ID NO: 5133298 - DNA, 25 bp, Homo sapien
tggcatccaggctccatatgtaatc

SEQ ID NO: 5133299 - DNA, 25 bp, Homo sapien
tcatcctgatggagcactgcttggc

SEQ ID NO: 5133300 - DNA, 25 bp, Homo sapien
ccgggaggggcatgtcagacaaatc

SEQ ID NO: 5133301 - DNA, 25 bp, Homo sapien
ggagaagtgcttgtattggatgaaa

SEQ ID NO: 5133302 - DNA, 25 bp, Homo sapien
agcgccatttgccaccatcgaggac

SEQ ID NO: 5133303 - DNA, 25 bp, Homo sapien
gaatctccaggctcatcttcacctt

SEQ ID NO: 5133304 - DNA, 25 bp, Homo sapien
ggcctcgcccggctggcttgattaa

SEQ ID NO: 5133305 - DNA, 25 bp, Homo sapien
tactggttgggttccgactggcctc

SEQ ID NO: 5133306 - DNA, 25 bp, Homo sapien
gctggcttgattaaggcttccttct

SEQ ID NO: 5133307 - DNA, 25 bp, Homo sapien
cataaaggctatgagtttgaagcga

SEQ ID NO: 5133308 - DNA, 25 bp, Homo sapien
gaagcgatagcgtttccagaaaata

SEQ ID NO: 5133309 - DNA, 25 bp, Homo sapien
cggagctgaatagatgaagttaaac

SEQ ID NO: 5133310 - DNA, 25 bp, Homo sapien
tgaccgcagccacgtgaaagaggtg

SEQ ID NO: 5133311 - DNA, 25 bp, Homo sapien
ctggcgttgctggtgtttagtgaat

SEQ ID NO: 5133312 - DNA, 25 bp, Homo sapien
cagctgaagttgaggtttgatccag

SEQ ID NO: 5133313 - DNA, 25 bp, Homo sapien
attttaatgggaggatacagctgaa

SEQ ID NO: 5133314 - DNA, 25 bp, Homo sapien
cgttgctggtgtttagtgaattgat

SEQ ID NO: 5133315 - DNA, 25 bp, Homo sapien
tgggtcctgggtggagtttccactc

SEQ ID NO: 5133316 - DNA, 25 bp, Homo sapien
ctattgtaggctttaggtttggatc

SEQ ID NO: 5133317 - DNA, 25 bp, Homo sapien
gtttccactcatggtctattgtagg

SEQ ID NO: 5133318 - DNA, 25 bp, Homo sapien
ctgggaaaatatcactcaggtgatt

SEQ ID NO: 5133319 - DNA, 25 bp, Homo sapien
cgtcttgttgaaagtgatttctgaa

SEQ ID NO: 5133320 - DNA, 25 bp, Homo sapien
agtggaaaattacagctctgctcgt

SEQ ID NO: 5133321 - DNA, 25 bp, Homo sapien
cacaatagccagaatattcctagca

SEQ ID NO: 5133322 - DNA, 25 bp, Homo sapien
ctagcatcttgcatatattctagaa

SEQ ID NO: 5133323 - DNA, 25 bp, Homo sapien
tccacaatagtagaatggctccagg

SEQ ID NO: 5133324 - DNA, 25 bp, Homo sapien
gaggacaaactgacctagagcttgg

SEQ ID NO: 5133325 - DNA, 25 bp, Homo sapien
gcttgctgcttacccataagggcca

SEQ ID NO: 5133326 - DNA, 25 bp, Homo sapien
gattccgagcctcttagcatgaaga

SEQ ID NO: 5133327 - DNA, 25 bp, Homo sapien
taaatcagttacaggccagagtctc

SEQ ID NO: 5133328 - DNA, 25 bp, Homo sapien
tggaactctgagtcctcctatgaac

SEQ ID NO: 5133329 - DNA, 25 bp, Homo sapien
gctgctcaccttactgccctgggat

SEQ ID NO: 5133330 - DNA, 25 bp, Homo sapien
tattgcccagagaagaaatttggct

SEQ ID NO: 5133331 - DNA, 25 bp, Homo sapien
cgtcttgacatacaatggcgttatg

SEQ ID NO: 5133332 - DNA, 25 bp, Homo sapien
taaactcattgtaggttgtagatat

SEQ ID NO: 5133333 - DNA, 25 bp, Homo sapien
cattgtaggttgtagatattgtaag

SEQ ID NO: 5133334 - DNA, 25 bp, Homo sapien
tttttaattatacagatgcgtcttg

SEQ ID NO: 5133335 - DNA, 25 bp, Homo sapien
gggagcactcgctgtcgaagcccta

SEQ ID NO: 5133336 - DNA, 25 bp, Homo sapien
aacgggagcactcgctgtcgaagcc

SEQ ID NO: 5133337 - DNA, 25 bp, Homo sapien
ttgaaacgggagcactcgctgtcga

SEQ ID NO: 5133338 - DNA, 25 bp, Homo sapien
actcgctgtcgaagccctaccaggg

SEQ ID NO: 5133339 - DNA, 25 bp, Homo sapien
gaaaggatggtagcgcaagacctga

SEQ ID NO: 5133340 - DNA, 25 bp, Homo sapien
ggaccactaggcagctgaaaggatg

SEQ ID NO: 5133341 - DNA, 25 bp, Homo sapien
ggccctgaagttgtgcagccctaga

SEQ ID NO: 5133342 - DNA, 25 bp, Homo sapien
attgcatatgaataccccggccctg

SEQ ID NO: 5133343 - DNA, 25 bp, Homo sapien
gcccaccggcgccatgttgctctgg

SEQ ID NO: 5133344 - DNA, 25 bp, Homo sapien
agcagcaccggcgccgccaggagga

SEQ ID NO: 5133345 - DNA, 25 bp, Homo sapien
cagcaccggcgccgccaggaggagg

SEQ ID NO: 5133346 - DNA, 25 bp, Homo sapien
ccgcgcggccccggtccgcaccgca

SEQ ID NO: 5133347 - DNA, 25 bp, Homo sapien
cgatcgtgccctgctgggggctgcc

SEQ ID NO: 5133348 - DNA, 25 bp, Homo sapien
cacgatcgtgccctgctgggggctg

SEQ ID NO: 5133349 - DNA, 25 bp, Homo sapien
ccacgatcgtgccctgctgggggct

SEQ ID NO: 5133350 - DNA, 25 bp, Homo sapien
cccacgatcgtgccctgctgggggc

SEQ ID NO: 5133351 - DNA, 25 bp, Homo sapien
cagctgctggacgaccaggtccttg

SEQ ID NO: 5133352 - DNA, 25 bp, Homo sapien
tgccctcggacacgaagatgatgcc

SEQ ID NO: 5133353 - DNA, 25 bp, Homo sapien
agatgatgccatccgggttcgtccc

SEQ ID NO: 5133354 - DNA, 25 bp, Homo sapien
ggttcgtcccacacgacttgttgca

SEQ ID NO: 5133355 - DNA, 25 bp, Homo sapien
gtgagtccttgtccgtccacttcag

SEQ ID NO: 5133356 - DNA, 25 bp, Homo sapien
agagcagtgagtccttgtccgtcca

SEQ ID NO: 5133357 - DNA, 25 bp, Homo sapien
gcagtgagtccttgtccgtccactt

SEQ ID NO: 5133358 - DNA, 25 bp, Homo sapien
gaagagcagtgagtccttgtccgtc

SEQ ID NO: 5133359 - DNA, 25 bp, Homo sapien
gaggtcattatagggctccgtcacc

SEQ ID NO: 5133360 - DNA, 25 bp, Homo sapien
cgaacaccgggatgcgagtatagcc

SEQ ID NO: 5133361 - DNA, 25 bp, Homo sapien
cagggcaccctggatcatattgagc

SEQ ID NO: 5133362 - DNA, 25 bp, Homo sapien
taaacagtgcgaatctcctggccca

SEQ ID NO: 5133363 - DNA, 25 bp, Homo sapien
ccaggggaactacatctggccttac

SEQ ID NO: 5133364 - DNA, 25 bp, Homo sapien
tgaaccaggggaactacatctggcc

SEQ ID NO: 5133365 - DNA, 25 bp, Homo sapien
gaaccaggggaactacatctggcct

SEQ ID NO: 5133366 - DNA, 25 bp, Homo sapien
accaggggaactacatctggcctta

SEQ ID NO: 5133367 - DNA, 25 bp, Homo sapien
ccatactggttggatccagattcca

SEQ ID NO: 5133368 - DNA, 25 bp, Homo sapien
tggagggtcctaatcaggttcccaa

SEQ ID NO: 5133369 - DNA, 25 bp, Homo sapien
ggtgctactgggtgtgtcacaaacc

SEQ ID NO: 5133370 - DNA, 25 bp, Homo sapien
atgaactgatgggaaggtgctactg

SEQ ID NO: 5133371 - DNA, 25 bp, Homo sapien
ggagttacacccaggtctatacagg

SEQ ID NO: 5133372 - DNA, 25 bp, Homo sapien
ggaggagtaacaggtccaaggccac

SEQ ID NO: 5133373 - DNA, 25 bp, Homo sapien
tcacaggtcagtgaccaggctggct

SEQ ID NO: 5133374 - DNA, 25 bp, Homo sapien
ttatactgcactaccttgctgagag

SEQ ID NO: 5133375 - DNA, 25 bp, Homo sapien
ctcccagggcaacacgtaccagagt

SEQ ID NO: 5133376 - DNA, 25 bp, Homo sapien
tcgggtcttgtccaagctctcccag

SEQ ID NO: 5133377 - DNA, 25 bp, Homo sapien
ctcagccttcgggtcttgtccaagc

SEQ ID NO: 5133378 - DNA, 25 bp, Homo sapien
cacgtaccagagtggaaaacgccat

SEQ ID NO: 5133379 - DNA, 25 bp, Homo sapien
ctagcctacgacataagccaggggc

SEQ ID NO: 5133380 - DNA, 25 bp, Homo sapien
cttctgaccctctccacgacagtac

SEQ ID NO: 5133381 - DNA, 25 bp, Homo sapien
tctgaccctctccacgacagtacat

SEQ ID NO: 5133382 - DNA, 25 bp, Homo sapien
tacgacataagccaggggcccttta

SEQ ID NO: 5133383 - DNA, 25 bp, Homo sapien
tgtatttgtctaaaaagtagagaca

SEQ ID NO: 5133384 - DNA, 25 bp, Homo sapien
gatgtatctcttttatggctacgga

SEQ ID NO: 5133385 - DNA, 25 bp, Homo sapien
gacaagttccagcaatgagatgtat

SEQ ID NO: 5133386 - DNA, 25 bp, Homo sapien
aagttccagcaatgagatgtatctc

SEQ ID NO: 5133387 - DNA, 25 bp, Homo sapien
agagctggaagcatggctcacagcc

SEQ ID NO: 5133388 - DNA, 25 bp, Homo sapien
ctggcattttctcctggaactgcag

SEQ ID NO: 5133389 - DNA, 25 bp, Homo sapien
gcattttctcctggaactgcagagc

SEQ ID NO: 5133390 - DNA, 25 bp, Homo sapien
tgcagagctggaagcatggctcaca

SEQ ID NO: 5133391 - DNA, 25 bp, Homo sapien
gatagctgagcaccctgatttcttg

SEQ ID NO: 5133392 - DNA, 25 bp, Homo sapien
cagatagctgagcaccctgatttct

SEQ ID NO: 5133393 - DNA, 25 bp, Homo sapien
ctgcagatagctgagcaccctgatt

SEQ ID NO: 5133394 - DNA, 25 bp, Homo sapien
tgcagatagctgagcaccctgattt

SEQ ID NO: 5133395 - DNA, 25 bp, Homo sapien
cagagcagaccagggactcccacca

SEQ ID NO: 5133396 - DNA, 25 bp, Homo sapien
atgagtctcccaggaaggtccagcc

SEQ ID NO: 5133397 - DNA, 25 bp, Homo sapien
gagaggtgcgggctggactgactgg

SEQ ID NO: 5133398 - DNA, 25 bp, Homo sapien
caggggcccaggatgttcccgcgct

SEQ ID NO: 5133399 - DNA, 25 bp, Homo sapien
gagtagtgccctcgctcctcgccat

SEQ ID NO: 5133400 - DNA, 25 bp, Homo sapien
ctggcgaggcctgagtagtgccctc

SEQ ID NO: 5133401 - DNA, 25 bp, Homo sapien
aggcctgagtagtgccctcgctcct

SEQ ID NO: 5133402 - DNA, 25 bp, Homo sapien
gcgaggcctgagtagtgccctcgct

SEQ ID NO: 5133403 - DNA, 25 bp, Homo sapien
tgggctgttaagaacttctaagggc

SEQ ID NO: 5133404 - DNA, 25 bp, Homo sapien
agatgggctgttaagaacttctaag

SEQ ID NO: 5133405 - DNA, 25 bp, Homo sapien
gatgggctgttaagaacttctaagg

SEQ ID NO: 5133406 - DNA, 25 bp, Homo sapien
aagatgggctgttaagaacttctaa

SEQ ID NO: 5133407 - DNA, 25 bp, Homo sapien
gtacatgtcggactcgtccaggatc

SEQ ID NO: 5133408 - DNA, 25 bp, Homo sapien
gtcggactcgtccaggatctccgac

SEQ ID NO: 5133409 - DNA, 25 bp, Homo sapien
tgtacatgtcggactcgtccaggat

SEQ ID NO: 5133410 - DNA, 25 bp, Homo sapien
catgtcggactcgtccaggatctcc

SEQ ID NO: 5133411 - DNA, 25 bp, Homo sapien
tgagctcattgtccgcatccttgaa

SEQ ID NO: 5133412 - DNA, 25 bp, Homo sapien
aagtcacgcttgttcttctcagaca

SEQ ID NO: 5133413 - DNA, 25 bp, Homo sapien
tgtggctaggaagcgatgagcggcc

SEQ ID NO: 5133414 - DNA, 25 bp, Homo sapien
agctgcggggagattttcactttga

SEQ ID NO: 5133415 - DNA, 25 bp, Homo sapien
agcagccggaaacccaggacttctc

SEQ ID NO: 5133416 - DNA, 25 bp, Homo sapien
cgtgaccgtatttccaccaagaccg

SEQ ID NO: 5133417 - DNA, 25 bp, Homo sapien
gcagccctcgtcctatggggggaaa

SEQ ID NO: 5133418 - DNA, 25 bp, Homo sapien
caagaccggaaggtcctcctcatgc

SEQ ID NO: 5133419 - DNA, 25 bp, Homo sapien
gcaggatcttctctgatatcaggga

SEQ ID NO: 5133420 - DNA, 25 bp, Homo sapien
ggatgaagtagtcggccggcttatt

SEQ ID NO: 5133421 - DNA, 25 bp, Homo sapien
tatttcgggtgtacaggtaatggcg

SEQ ID NO: 5133422 - DNA, 25 bp, Homo sapien
aatgacatctgggtacttgagtagc

SEQ ID NO: 5133423 - DNA, 25 bp, Homo sapien
tagtcccatagtaggagaaggcgcc

SEQ ID NO: 5133424 - DNA, 25 bp, Homo sapien
ggtcagggccatagtcccatagtag

SEQ ID NO: 5133425 - DNA, 25 bp, Homo sapien
gagaaggcgcccgtctcaaacttca

SEQ ID NO: 5133426 - DNA, 25 bp, Homo sapien
ggcgcccgtctcaaacttcatgttc

SEQ ID NO: 5133427 - DNA, 25 bp, Homo sapien
gccagcagagcagggagttccgctt

SEQ ID NO: 5133428 - DNA, 25 bp, Homo sapien
cagagcagggagttccgcttgccag

SEQ ID NO: 5133429 - DNA, 25 bp, Homo sapien
ttgccaggcggacacccgacctgga

SEQ ID NO: 5133430 - DNA, 25 bp, Homo sapien
ggacacccgacctggactgaaggca

SEQ ID NO: 5133431 - DNA, 25 bp, Homo sapien
cggctggtttgaaactcctgggctc

SEQ ID NO: 5133432 - DNA, 25 bp, Homo sapien
ctcggctggtttgaaactcctgggc

SEQ ID NO: 5133433 - DNA, 25 bp, Homo sapien
tcggctggtttgaaactcctgggct

SEQ ID NO: 5133434 - DNA, 25 bp, Homo sapien
gctggtttgaaactcctgggctcaa

SEQ ID NO: 5133435 - DNA, 25 bp, Homo sapien
tctcgatcttatgactgctggtgat

SEQ ID NO: 5133436 - DNA, 25 bp, Homo sapien
ttaaatgctcttatcaggggctggg

SEQ ID NO: 5133437 - DNA, 25 bp, Homo sapien
ctcgatcttatgactgctggtgatc

SEQ ID NO: 5133438 - DNA, 25 bp, Homo sapien
gccctgtcacctcttaaatgctctt

SEQ ID NO: 5133439 - DNA, 25 bp, Homo sapien
gacaggcaaactgccattcttaggc

SEQ ID NO: 5133440 - DNA, 25 bp, Homo sapien
aacacaatgatcatcctagcaggac

SEQ ID NO: 5133441 - DNA, 25 bp, Homo sapien
tatggctacaaaatctctcgtttcc

SEQ ID NO: 5133442 - DNA, 25 bp, Homo sapien
aaccaatcagtcaagggcaacacaa

SEQ ID NO: 5133443 - DNA, 25 bp, Homo sapien
tgtcatgccaaaggccactccgatg

SEQ ID NO: 5133444 - DNA, 25 bp, Homo sapien
gagagcagaggttgtcatgccaaag

SEQ ID NO: 5133445 - DNA, 25 bp, Homo sapien
aggttgtcatgccaaaggccactcc

SEQ ID NO: 5133446 - DNA, 25 bp, Homo sapien
aaggccactccgatgcccactctca

SEQ ID NO: 5133447 - DNA, 25 bp, Homo sapien
acgtctgtgcggtctgggtaactga

SEQ ID NO: 5133448 - DNA, 25 bp, Homo sapien
gatgtactgcaagtccacgagtgcc

SEQ ID NO: 5133449 - DNA, 25 bp, Homo sapien
cacgagtgcccggacgctgaagtca

SEQ ID NO: 5133450 - DNA, 25 bp, Homo sapien
tcagagatgtactggcccaggacag

SEQ ID NO: 5133451 - DNA, 25 bp, Homo sapien
ggcagctcagacttctcggccaagt

SEQ ID NO: 5133452 - DNA, 25 bp, Homo sapien
gagaagagttgtggtctcgtccacc

SEQ ID NO: 5133453 - DNA, 25 bp, Homo sapien
tttgtgcagcaaggagttacgctcg

SEQ ID NO: 5133454 - DNA, 25 bp, Homo sapien
ggtgcacccgtctatgggaaactga

SEQ ID NO: 5133455 - DNA, 25 bp, Homo sapien
gggtggtactgactgctaacaacgc

SEQ ID NO: 5133456 - DNA, 25 bp, Homo sapien
gatgtgctcctctgcatagctcaga

SEQ ID NO: 5133457 - DNA, 25 bp, Homo sapien
tcagataagctacagcgcaggtgct

SEQ ID NO: 5133458 - DNA, 25 bp, Homo sapien
cacaaagggccagttgtccaaaggg

SEQ ID NO: 5133459 - DNA, 25 bp, Homo sapien
tatggctaggagacctcagactggc

SEQ ID NO: 5133460 - DNA, 25 bp, Homo sapien
gaaataatgatgaccctctgtgaga

SEQ ID NO: 5133461 - DNA, 25 bp, Homo sapien
taaataataatcaggcggaaggcct

SEQ ID NO: 5133462 - DNA, 25 bp, Homo sapien
ccagttggtggtaaccgtgtgcaca

SEQ ID NO: 5133463 - DNA, 25 bp, Homo sapien
gacaaaagacacaagagtcataaca

SEQ ID NO: 5133464 - DNA, 25 bp, Homo sapien
aaaactccccgagagtcaaactcat

SEQ ID NO: 5133465 - DNA, 25 bp, Homo sapien
gagtcaaactcataacgccaaaata

SEQ ID NO: 5133466 - DNA, 25 bp, Homo sapien
tccatatatcgtttagcaaatatca

SEQ ID NO: 5133467 - DNA, 25 bp, Homo sapien
cgccagcagaagcaataaagacatt

SEQ ID NO: 5133468 - DNA, 25 bp, Homo sapien
ccagcagaagcaataaagacattac

SEQ ID NO: 5133469 - DNA, 25 bp, Homo sapien
acagagtaagccgccagcagaagca

SEQ ID NO: 5133470 - DNA, 25 bp, Homo sapien
attacagagtaagccgccagcagaa

SEQ ID NO: 5133471 - DNA, 25 bp, Homo sapien
ccgccgcagctaccgccgccgccat

SEQ ID NO: 5133472 - DNA, 25 bp, Homo sapien
ggcagagcgcggcgaacaaccagcc

SEQ ID NO: 5133473 - DNA, 25 bp, Homo sapien
gagcgcggcgaacaaccagcctaac

SEQ ID NO: 5133474 - DNA, 25 bp, Homo sapien
cagagcgcggcgaacaaccagccta

SEQ ID NO: 5133475 - DNA, 25 bp, Homo sapien
ccccgcggcgttgcccaggcagagc

SEQ ID NO: 5133476 - DNA, 25 bp, Homo sapien
ctgttggcgaagcccgggccgaaga

SEQ ID NO: 5133477 - DNA, 25 bp, Homo sapien
agcccgggccgaagaggcgcaggag

SEQ ID NO: 5133478 - DNA, 25 bp, Homo sapien
aaggtggcgtccggcgtgtcccgcg

SEQ ID NO: 5133479 - DNA, 25 bp, Homo sapien
ttggcgaagcccgggccgaagaggc

SEQ ID NO: 5133480 - DNA, 25 bp, Homo sapien
acgcccttgctgagatcgctgtagg

SEQ ID NO: 5133481 - DNA, 25 bp, Homo sapien
ttcgaggggcgtgagcacgtcctcc

SEQ ID NO: 5133482 - DNA, 25 bp, Homo sapien
acgtcctccacggtccggcagcgca

SEQ ID NO: 5133483 - DNA, 25 bp, Homo sapien
aacacggcgggcaccgcacgctggc

SEQ ID NO: 5133484 - DNA, 25 bp, Homo sapien
ccagcttggtgtcgttgaagacgaa

SEQ ID NO: 5133485 - DNA, 25 bp, Homo sapien
ttgtagaaacgagtgatggtgctga

SEQ ID NO: 5133486 - DNA, 25 bp, Homo sapien
agcggcgtgcagtcttcgggatcca

SEQ ID NO: 5133487 - DNA, 25 bp, Homo sapien
gcgtgtggccgctctgcatgatgct

SEQ ID NO: 5133488 - DNA, 25 bp, Homo sapien
agggcactcgcacgggcgtcccctg

SEQ ID NO: 5133489 - DNA, 25 bp, Homo sapien
ggagagggcactcgcacgggcgtcc

SEQ ID NO: 5133490 - DNA, 25 bp, Homo sapien
agagggcactcgcacgggcgtcccc

SEQ ID NO: 5133491 - DNA, 25 bp, Homo sapien
agggagagggcactcgcacgggcgt

SEQ ID NO: 5133492 - DNA, 25 bp, Homo sapien
aactgatgctgctgcttgatgctca

SEQ ID NO: 5133493 - DNA, 25 bp, Homo sapien
tggatccctcacaccgctggtctcc

SEQ ID NO: 5133494 - DNA, 25 bp, Homo sapien
cgctggtgtccacaattgttactga

SEQ ID NO: 5133495 - DNA, 25 bp, Homo sapien
attgttactgatctgtaaaaataac

SEQ ID NO: 5133496 - DNA, 25 bp, Homo sapien
taatcagcacgtcatctcaagttgg

SEQ ID NO: 5133497 - DNA, 25 bp, Homo sapien
tacaaagttccctagcagacacagc

SEQ ID NO: 5133498 - DNA, 25 bp, Homo sapien
tccacgaaattcagaggctcattag

SEQ ID NO: 5133499 - DNA, 25 bp, Homo sapien
acaagacccggaatgaaagctgcca

SEQ ID NO: 5133500 - DNA, 25 bp, Homo sapien
cttcagactcgtccaggatctcgga

SEQ ID NO: 5133501 - DNA, 25 bp, Homo sapien
agactcgtccaggatctcggacctg

SEQ ID NO: 5133502 - DNA, 25 bp, Homo sapien
ggtagtcttcagactcgtccaggat

SEQ ID NO: 5133503 - DNA, 25 bp, Homo sapien
gccttcaccctcgttgttcaccttc

SEQ ID NO: 5133504 - DNA, 25 bp, Homo sapien
gattaaagcgatacttctggaagca

SEQ ID NO: 5133505 - DNA, 25 bp, Homo sapien
aggcggcccggccatgacgcacaga

SEQ ID NO: 5133506 - DNA, 25 bp, Homo sapien
tgacgcacagactctgtacagccct

SEQ ID NO: 5133507 - DNA, 25 bp, Homo sapien
tgtttgaaaatcgacgcatgattaa

SEQ ID NO: 5133508 - DNA, 25 bp, Homo sapien
accttgaacaaggagaactcctcct

SEQ ID NO: 5133509 - DNA, 25 bp, Homo sapien
ccttgaacaaggagaactcctcctt

SEQ ID NO: 5133510 - DNA, 25 bp, Homo sapien
cagctgaggcgagattgttacttta

SEQ ID NO: 5133511 - DNA, 25 bp, Homo sapien
caagagcagctgaggcgagattgtt

SEQ ID NO: 5133512 - DNA, 25 bp, Homo sapien
tggaaaaaagggacagtgtccactg

SEQ ID NO: 5133513 - DNA, 25 bp, Homo sapien
gcctagtggccagtggaaccacacc

SEQ ID NO: 5133514 - DNA, 25 bp, Homo sapien
cctcaacacaagagaactaggcagg

SEQ ID NO: 5133515 - DNA, 25 bp, Homo sapien
taaagttattgtgcccaccagggat

SEQ ID NO: 5133516 - DNA, 25 bp, Homo sapien
cgcagcgggctgaatacatccactt

SEQ ID NO: 5133517 - DNA, 25 bp, Homo sapien
agaatgaagtaatccaccggctggc

SEQ ID NO: 5133518 - DNA, 25 bp, Homo sapien
agccggttgctctcgtcaaacctca

SEQ ID NO: 5133519 - DNA, 25 bp, Homo sapien
cactgggatgcttcaacaggtgcag

SEQ ID NO: 5133520 - DNA, 25 bp, Homo sapien
ctccaggcctgggacccacagctac

SEQ ID NO: 5133521 - DNA, 25 bp, Homo sapien
ctagacccttccctggcctgaggaa

SEQ ID NO: 5133522 - DNA, 25 bp, Homo sapien
agggactccaggcctgggacccaca

SEQ ID NO: 5133523 - DNA, 25 bp, Homo sapien
agacccttccctggcctgaggaagc

SEQ ID NO: 5133524 - DNA, 25 bp, Homo sapien
gatggcacagttagggccgacactc

SEQ ID NO: 5133525 - DNA, 25 bp, Homo sapien
tccatagtacgtgaaggccccattc

SEQ ID NO: 5133526 - DNA, 25 bp, Homo sapien
gccgacactccatagtacgtgaagg

SEQ ID NO: 5133527 - DNA, 25 bp, Homo sapien
cagttagggccgacactccatagta

SEQ ID NO: 5133528 - DNA, 25 bp, Homo sapien
caactgtacagtttcgaagacccac

SEQ ID NO: 5133529 - DNA, 25 bp, Homo sapien
cactctggagaggcaatgtgcatgg

SEQ ID NO: 5133530 - DNA, 25 bp, Homo sapien
tgtacagtttcgaagacccacccca

SEQ ID NO: 5133531 - DNA, 25 bp, Homo sapien
gacaactgtacagtttcgaagaccc

SEQ ID NO: 5133532 - DNA, 25 bp, Homo sapien
gctgcaggtcatggcggatgggctg

SEQ ID NO: 5133533 - DNA, 25 bp, Homo sapien
tagtcgggacaatacgcagatgaat

SEQ ID NO: 5133534 - DNA, 25 bp, Homo sapien
gcagatgaatgcgtgccgtcacctg

SEQ ID NO: 5133535 - DNA, 25 bp, Homo sapien
agcgccctcacggtgtagtcgggac

SEQ ID NO: 5133536 - DNA, 25 bp, Homo sapien
gtccctcaggatgagtggaaggcct

SEQ ID NO: 5133537 - DNA, 25 bp, Homo sapien
actgggtgcaaaggtctgtgtccct

SEQ ID NO: 5133538 - DNA, 25 bp, Homo sapien
tgtccctcaggatgagtggaaggcc

SEQ ID NO: 5133539 - DNA, 25 bp, Homo sapien
gtgcaaaggtctgtgtccctcagga

SEQ ID NO: 5133540 - DNA, 25 bp, Homo sapien
gaggatgacagcgttactgggaccc

SEQ ID NO: 5133541 - DNA, 25 bp, Homo sapien
cccaattggtgaagcgagatgcaga

SEQ ID NO: 5133542 - DNA, 25 bp, Homo sapien
caccgtgcccgaagaggacagaggc

SEQ ID NO: 5133543 - DNA, 25 bp, Homo sapien
gcaggaaaggtgacaccgtgcccga

SEQ ID NO: 5133544 - DNA, 25 bp, Homo sapien
gcaggttctgggctcgggtagccag

SEQ ID NO: 5133545 - DNA, 25 bp, Homo sapien
cattgaggtactgcagtcgcgtaac

SEQ ID NO: 5133546 - DNA, 25 bp, Homo sapien
tgcctggaataacctgcaggtcggt

SEQ ID NO: 5133547 - DNA, 25 bp, Homo sapien
aggagtgcattgaggtactgcagtc

SEQ ID NO: 5133548 - DNA, 25 bp, Homo sapien
tcaggtccagacaccatgcacgatg

SEQ ID NO: 5133549 - DNA, 25 bp, Homo sapien
tccagacaccatgcacgatgtacca

SEQ ID NO: 5133550 - DNA, 25 bp, Homo sapien
ggtccagacaccatgcacgatgtac

SEQ ID NO: 5133551 - DNA, 25 bp, Homo sapien
gacaccatgcacgatgtaccacttg

SEQ ID NO: 5133552 - DNA, 25 bp, Homo sapien
caactgcagtttccaactgtgccaa

SEQ ID NO: 5133553 - DNA, 25 bp, Homo sapien
tccaactgtgccaaagagggaaagg

SEQ ID NO: 5133554 - DNA, 25 bp, Homo sapien
ctgaaaacaaaaaacgcgcactagt

SEQ ID NO: 5133555 - DNA, 25 bp, Homo sapien
acaaaaaacgcgcactagtccacag

SEQ ID NO: 5133556 - DNA, 25 bp, Homo sapien
acgcgcactagtccacagtcattta

SEQ ID NO: 5133557 - DNA, 25 bp, Homo sapien
aaaacgcgcactagtccacagtcat

SEQ ID NO: 5133558 - DNA, 25 bp, Homo sapien
ctaagacaggtgcttcgggatgcct

SEQ ID NO: 5133559 - DNA, 25 bp, Homo sapien
cagcaccctgtgctggaaggaagca

SEQ ID NO: 5133560 - DNA, 25 bp, Homo sapien
ctgtggatttctggccccgagggtc

SEQ ID NO: 5133561 - DNA, 25 bp, Homo sapien
caggtcattatgctgaacaagaggc

SEQ ID NO: 5133562 - DNA, 25 bp, Homo sapien
tcaaagctggtaaagtatcctgtca

SEQ ID NO: 5133563 - DNA, 25 bp, Homo sapien
aagctggtaaagtatcctgtcaaaa

SEQ ID NO: 5133564 - DNA, 25 bp, Homo sapien
taaagtatcctgtcaaaaccaagtg

SEQ ID NO: 5133565 - DNA, 25 bp, Homo sapien
tggtaaagtatcctgtcaaaaccaa

SEQ ID NO: 5133566 - DNA, 25 bp, Homo sapien
ggagacaagggaaggagaattaaca

SEQ ID NO: 5133567 - DNA, 25 bp, Homo sapien
caggagacaagggaaggagaattaa

SEQ ID NO: 5133568 - DNA, 25 bp, Homo sapien
ctacaggagacaagggaaggagaat

SEQ ID NO: 5133569 - DNA, 25 bp, Homo sapien
tacaggagacaagggaaggagaatt

SEQ ID NO: 5133570 - DNA, 25 bp, Homo sapien
aacgcctgggttccgcccagggctg

SEQ ID NO: 5133571 - DNA, 25 bp, Homo sapien
tcctgtctcctaaaggagggcaggg

SEQ ID NO: 5133572 - DNA, 25 bp, Homo sapien
ggcaggcgggcacaaaacttctgct

SEQ ID NO: 5133573 - DNA, 25 bp, Homo sapien
gaaggatccaggcattgatgtctag

SEQ ID NO: 5133574 - DNA, 25 bp, Homo sapien
ctacaagggccatctaaaacgtggc

SEQ ID NO: 5133575 - DNA, 25 bp, Homo sapien
gtctgaatctgaatatgccgcactg

SEQ ID NO: 5133576 - DNA, 25 bp, Homo sapien
tctgaatctgaatatgccgcactgt

SEQ ID NO: 5133577 - DNA, 25 bp, Homo sapien
tgaatctgaatatgccgcactgtcc

SEQ ID NO: 5133578 - DNA, 25 bp, Homo sapien
ggtctgaatctgaatatgccgcact

SEQ ID NO: 5133579 - DNA, 25 bp, Homo sapien
gcagtaactgcactcacaaggtggc

SEQ ID NO: 5133580 - DNA, 25 bp, Homo sapien
ggcagtaactgcactcacaaggtgg

SEQ ID NO: 5133581 - DNA, 25 bp, Homo sapien
caaaggcagtaactgcactcacaag

SEQ ID NO: 5133582 - DNA, 25 bp, Homo sapien
aaggcagtaactgcactcacaaggt

SEQ ID NO: 5133583 - DNA, 25 bp, Homo sapien
ccacacggcggagagaggattcgat

SEQ ID NO: 5133584 - DNA, 25 bp, Homo sapien
aacacgggaactgacaacactgcga

SEQ ID NO: 5133585 - DNA, 25 bp, Homo sapien
tggacaaggccatcgatctgaaccc

SEQ ID NO: 5133586 - DNA, 25 bp, Homo sapien
aaaatgggtgctctcggcttgctca

SEQ ID NO: 5133587 - DNA, 25 bp, Homo sapien
aactgttgacacatgcaatgcctgg

SEQ ID NO: 5133588 - DNA, 25 bp, Homo sapien
ttgaaaactctgatgccgactctga

SEQ ID NO: 5133589 - DNA, 25 bp, Homo sapien
gggccaatgcatacaccacggaata

SEQ ID NO: 5133590 - DNA, 25 bp, Homo sapien
tgatctcccgagaatgacgccgagt

SEQ ID NO: 5133591 - DNA, 25 bp, Homo sapien
ctaaaagcaacagtccataaaggaa

SEQ ID NO: 5133592 - DNA, 25 bp, Homo sapien
ttgctctgtataaaaccctgttaag

SEQ ID NO: 5133593 - DNA, 25 bp, Homo sapien
cctttgggatctaagactaggtaga

SEQ ID NO: 5133594 - DNA, 25 bp, Homo sapien
catggctcacatgcatacttaaatt

SEQ ID NO: 5133595 - DNA, 25 bp, Homo sapien
gagccgagatcatcacgggaacagg

SEQ ID NO: 5133596 - DNA, 25 bp, Homo sapien
gacacacagatcgacagagccgaga

SEQ ID NO: 5133597 - DNA, 25 bp, Homo sapien
tatgtgaaccaagagtgcaatgctg

SEQ ID NO: 5133598 - DNA, 25 bp, Homo sapien
ggaacaggaccacacaaatatgccc

SEQ ID NO: 5133599 - DNA, 25 bp, Homo sapien
ctcctgccctgtggcgacagccagc

SEQ ID NO: 5133600 - DNA, 25 bp, Homo sapien
agccagcgtgcacccagacgctggt

SEQ ID NO: 5133601 - DNA, 25 bp, Homo sapien
tgccctgtggcgacagccagcgtgc

SEQ ID NO: 5133602 - DNA, 25 bp, Homo sapien
gcgtgcacccagacgctggtgccat

SEQ ID NO: 5133603 - DNA, 25 bp, Homo sapien
ctggtactggagcttgagctcttgc

SEQ ID NO: 5133604 - DNA, 25 bp, Homo sapien
tgtccccttatgttcctggtactgg

SEQ ID NO: 5133605 - DNA, 25 bp, Homo sapien
ttatgtccccttatgttcctggtac

SEQ ID NO: 5133606 - DNA, 25 bp, Homo sapien
tatgtccccttatgttcctggtact

SEQ ID NO: 5133607 - DNA, 25 bp, Homo sapien
cccacacccaaagataaattgcaag

SEQ ID NO: 5133608 - DNA, 25 bp, Homo sapien
tgagagtggttatcatagggcccgc

SEQ ID NO: 5133609 - DNA, 25 bp, Homo sapien
gctgaatgcccttggtaaaagtcac

SEQ ID NO: 5133610 - DNA, 25 bp, Homo sapien
aaagtcactttagctgtctgcccct

SEQ ID NO: 5133611 - DNA, 25 bp, Homo sapien
gcgtgtgccacgacgcccggctagt

SEQ ID NO: 5133612 - DNA, 25 bp, Homo sapien
tctccctcttttgtccaggctggcg

SEQ ID NO: 5133613 - DNA, 25 bp, Homo sapien
tggcgtgcagtagcgcaatctcggc

SEQ ID NO: 5133614 - DNA, 25 bp, Homo sapien
tcatgatctgcccgctttgacctcc

SEQ ID NO: 5133615 - DNA, 25 bp, Homo sapien
tacttgccttcttcctgtacagggc

SEQ ID NO: 5133616 - DNA, 25 bp, Homo sapien
ctagggctgtgaatgttttcagggt

SEQ ID NO: 5133617 - DNA, 25 bp, Homo sapien
cgcgtgcgcgcttgtggcatagcct

SEQ ID NO: 5133618 - DNA, 25 bp, Homo sapien
ccgagtgtcgggcagcgatgtacat

SEQ ID NO: 5133619 - DNA, 25 bp, Homo sapien
atagtacctgggcatgcccggtgcc

SEQ ID NO: 5133620 - DNA, 25 bp, Homo sapien
cggccctgtcctgaaccagatgaga

SEQ ID NO: 5133621 - DNA, 25 bp, Homo sapien
gatggctcccttaagatagtacctg

SEQ ID NO: 5133622 - DNA, 25 bp, Homo sapien
tgtcggttactactattcagatggc

SEQ ID NO: 5133623 - DNA, 25 bp, Homo sapien
actgcgcctggccagccggctaatt

SEQ ID NO: 5133624 - DNA, 25 bp, Homo sapien
ctgcgcctggccagccggctaattt

SEQ ID NO: 5133625 - DNA, 25 bp, Homo sapien
ctcaagtgatttgcccacctcagcc

SEQ ID NO: 5133626 - DNA, 25 bp, Homo sapien
aagtgatttgcccacctcagcctcc

SEQ ID NO: 5133627 - DNA, 25 bp, Homo sapien
tgcgcgcaataggtgagcgaggccg

SEQ ID NO: 5133628 - DNA, 25 bp, Homo sapien
ggagccgccgctttgtccctttgct

SEQ ID NO: 5133629 - DNA, 25 bp, Homo sapien
tccacaggtcgctgcgggtcgcagc

SEQ ID NO: 5133630 - DNA, 25 bp, Homo sapien
tgcttcgcagggtctcgggagtggg

SEQ ID NO: 5133631 - DNA, 25 bp, Homo sapien
gcggtcgttcctgcaactgcacggt

SEQ ID NO: 5133632 - DNA, 25 bp, Homo sapien
tggatactcgcctcgacgtggctcg

SEQ ID NO: 5133633 - DNA, 25 bp, Homo sapien
tccctccaggcgctgtggcgcagcc

SEQ ID NO: 5133634 - DNA, 25 bp, Homo sapien
aaagatcgggtgagtgtgattcccc

SEQ ID NO: 5133635 - DNA, 25 bp, Homo sapien
cattttctggggataggcgctttgc

SEQ ID NO: 5133636 - DNA, 25 bp, Homo sapien
ccagtggcacgaggagtcattttct

SEQ ID NO: 5133637 - DNA, 25 bp, Homo sapien
tctgttgattgaagggtcttcctgg

SEQ ID NO: 5133638 - DNA, 25 bp, Homo sapien
ggataggcgctttgcccaaagcgtg

SEQ ID NO: 5133639 - DNA, 25 bp, Homo sapien
taaactaaacacgagggtgacacac

SEQ ID NO: 5133640 - DNA, 25 bp, Homo sapien
tataatccagatctgctgacgcagc

SEQ ID NO: 5133641 - DNA, 25 bp, Homo sapien
taccctccgcttgaatagatacggg

SEQ ID NO: 5133642 - DNA, 25 bp, Homo sapien
tacaagttgcttctaggagtggctg

SEQ ID NO: 5133643 - DNA, 25 bp, Homo sapien
agggtggtcataagggtgaagtaag

SEQ ID NO: 5133644 - DNA, 25 bp, Homo sapien
ctgggcgtagtggctaatcccagca

SEQ ID NO: 5133645 - DNA, 25 bp, Homo sapien
tgaccaaaacggcgaagtcccatct

SEQ ID NO: 5133646 - DNA, 25 bp, Homo sapien
gaccaaaacggcgaagtcccatctc

SEQ ID NO: 5133647 - DNA, 25 bp, Homo sapien
gcctgaccaaaacggcgaagtccca

SEQ ID NO: 5133648 - DNA, 25 bp, Homo sapien
ccagtgctggaatggacagaataca

SEQ ID NO: 5133649 - DNA, 25 bp, Homo sapien
tggtaaccttcacacctagaggtgg

SEQ ID NO: 5133650 - DNA, 25 bp, Homo sapien
tgccagtgaaaccaaaccggttgcc

SEQ ID NO: 5133651 - DNA, 25 bp, Homo sapien
ccctgtcccgtgtatgatggtgtgc

SEQ ID NO: 5133652 - DNA, 25 bp, Homo sapien
ggcaggttggattcttcggagctca

SEQ ID NO: 5133653 - DNA, 25 bp, Homo sapien
ggattcttcggagctcagagtgtca

SEQ ID NO: 5133654 - DNA, 25 bp, Homo sapien
ttaaaacagccgttctgtctccacc

SEQ ID NO: 5133655 - DNA, 25 bp, Homo sapien
tttcactcatggctgaatcctgccc

SEQ ID NO: 5133656 - DNA, 25 bp, Homo sapien
aatgacgtagagttccttgcctggc

SEQ ID NO: 5133657 - DNA, 25 bp, Homo sapien
tcatgagatgcggtcagtagtccct

SEQ ID NO: 5133658 - DNA, 25 bp, Homo sapien
gaatcaatccgaaaggacagtgctg

SEQ ID NO: 5133659 - DNA, 25 bp, Homo sapien
gaaaccagccctgacaatgacgtag

SEQ ID NO: 5133660 - DNA, 25 bp, Homo sapien
gatcacgtctctgccttaccatgct

SEQ ID NO: 5133661 - DNA, 25 bp, Homo sapien
tgtgtgtgccactgtagtctcctaa

SEQ ID NO: 5133662 - DNA, 25 bp, Homo sapien
caaagtctgcctgctctgtagatgc

SEQ ID NO: 5133663 - DNA, 25 bp, Homo sapien
ggtgcaaattcttaggctggtccct

SEQ ID NO: 5133664 - DNA, 25 bp, Homo sapien
gaggcagcctgtgcacagttgggag

SEQ ID NO: 5133665 - DNA, 25 bp, Homo sapien
agaggcagcctgtgcacagttggga

SEQ ID NO: 5133666 - DNA, 25 bp, Homo sapien
accacgcctggcctgtaaattcttt

SEQ ID NO: 5133667 - DNA, 25 bp, Homo sapien
tggaaaactaaagctcgaggcctca

SEQ ID NO: 5133668 - DNA, 25 bp, Homo sapien
gctaccacgtggtgcactttgcagt

SEQ ID NO: 5133669 - DNA, 25 bp, Homo sapien
gtcgaacggacccagggagaactca

SEQ ID NO: 5133670 - DNA, 25 bp, Homo sapien
cctgaacggtagcatgtgggagcca

SEQ ID NO: 5133671 - DNA, 25 bp, Homo sapien
ttcctgggccatcgagggcacgtga

SEQ ID NO: 5133672 - DNA, 25 bp, Homo sapien
ttcccacattatagcagatagccag

SEQ ID NO: 5133673 - DNA, 25 bp, Homo sapien
ctcagggttcagtgcagcggcgtct

SEQ ID NO: 5133674 - DNA, 25 bp, Homo sapien
ggcacatgctctaacaatacaacag

SEQ ID NO: 5133675 - DNA, 25 bp, Homo sapien
tggagtttatgatgctggagaccgt

SEQ ID NO: 5133676 - DNA, 25 bp, Homo sapien
ccctgcccggtttgatggatgtgga

SEQ ID NO: 5133677 - DNA, 25 bp, Homo sapien
aacatgatgttaggaataaggcgtc

SEQ ID NO: 5133678 - DNA, 25 bp, Homo sapien
tctttgtgggtagaacgcatctcct

SEQ ID NO: 5133679 - DNA, 25 bp, Homo sapien
aatgacacatagttctgcggagaca

SEQ ID NO: 5133680 - DNA, 25 bp, Homo sapien
atgacacatagttctgcggagacat

SEQ ID NO: 5133681 - DNA, 25 bp, Homo sapien
atattgaatattgattatcacctta

SEQ ID NO: 5133682 - DNA, 25 bp, Homo sapien
ttgaatattgattatcaccttactt

SEQ ID NO: 5133683 - DNA, 25 bp, Homo sapien
cagggacccagagcattagcagccc

SEQ ID NO: 5133684 - DNA, 25 bp, Homo sapien
gggacccagagcattagcagcccca

SEQ ID NO: 5133685 - DNA, 25 bp, Homo sapien
gacccagagcattagcagccccagg

SEQ ID NO: 5133686 - DNA, 25 bp, Homo sapien
cccagagcattagcagccccaggag

SEQ ID NO: 5133687 - DNA, 25 bp, Homo sapien
gtcaacagaatgtccccactagatc

SEQ ID NO: 5133688 - DNA, 25 bp, Homo sapien
tgggtcaacagaatgtccccactag

SEQ ID NO: 5133689 - DNA, 25 bp, Homo sapien
gggtcaacagaatgtccccactaga

SEQ ID NO: 5133690 - DNA, 25 bp, Homo sapien
ggtcaacagaatgtccccactagat

SEQ ID NO: 5133691 - DNA, 25 bp, Homo sapien
gtttccattactatgcaggaggctc

SEQ ID NO: 5133692 - DNA, 25 bp, Homo sapien
ttactatgcaggaggctccgactag

SEQ ID NO: 5133693 - DNA, 25 bp, Homo sapien
atgtaaataggtgtttccattacta

SEQ ID NO: 5133694 - DNA, 25 bp, Homo sapien
caatgtaaataggtgtttccattac

SEQ ID NO: 5133695 - DNA, 25 bp, Homo sapien
ttggaaaccgtgtagattagacact

SEQ ID NO: 5133696 - DNA, 25 bp, Homo sapien
gaaaccgtgtagattagacactgtg

SEQ ID NO: 5133697 - DNA, 25 bp, Homo sapien
ggttggaaaccgtgtagattagaca

SEQ ID NO: 5133698 - DNA, 25 bp, Homo sapien
tggaaaccgtgtagattagacactg

SEQ ID NO: 5133699 - DNA, 25 bp, Homo sapien
ctacaggatatgtgggtagctctcc

SEQ ID NO: 5133700 - DNA, 25 bp, Homo sapien
ggcgatcacaatatcaccactggat

SEQ ID NO: 5133701 - DNA, 25 bp, Homo sapien
tctgggcgatcacaatatcaccact

SEQ ID NO: 5133702 - DNA, 25 bp, Homo sapien
atatgtgggtagctctccagaggtg

SEQ ID NO: 5133703 - DNA, 25 bp, Homo sapien
ggaggtttctctatggggctgtacc

SEQ ID NO: 5133704 - DNA, 25 bp, Homo sapien
gggaggtttctctatggggctgtac

SEQ ID NO: 5133705 - DNA, 25 bp, Homo sapien
ggtttctctatggggctgtaccact

SEQ ID NO: 5133706 - DNA, 25 bp, Homo sapien
gtttctctatggggctgtaccactg

SEQ ID NO: 5133707 - DNA, 25 bp, Homo sapien
gaaggccaggagctgagcggggatc

SEQ ID NO: 5133708 - DNA, 25 bp, Homo sapien
gccaggagctgagcggggatcctca

SEQ ID NO: 5133709 - DNA, 25 bp, Homo sapien
aaggccaggagctgagcggggatcc

SEQ ID NO: 5133710 - DNA, 25 bp, Homo sapien
aggaaggccaggagctgagcgggga

SEQ ID NO: 5133711 - DNA, 25 bp, Homo sapien
gaggctgggtcatctggatgtcaca

SEQ ID NO: 5133712 - DNA, 25 bp, Homo sapien
gctgggtcatctggatgtcacatct

SEQ ID NO: 5133713 - DNA, 25 bp, Homo sapien
tggaggctgggtcatctggatgtca

SEQ ID NO: 5133714 - DNA, 25 bp, Homo sapien
ggctgggtcatctggatgtcacatc

SEQ ID NO: 5133715 - DNA, 25 bp, Homo sapien
tctgcaaactggatgccctataggt

SEQ ID NO: 5133716 - DNA, 25 bp, Homo sapien
gtcaggaacttaggtgctttccctg

SEQ ID NO: 5133717 - DNA, 25 bp, Homo sapien
tatccgctgccactgaactgagatg

SEQ ID NO: 5133718 - DNA, 25 bp, Homo sapien
aatagttgtaaatgctttgactagc

SEQ ID NO: 5133719 - DNA, 25 bp, Homo sapien
cagacttctccaaaatagatactgg

SEQ ID NO: 5133720 - DNA, 25 bp, Homo sapien
tactggggcctccttcctcaaccat

SEQ ID NO: 5133721 - DNA, 25 bp, Homo sapien
agacttctccaaaatagatactggg

SEQ ID NO: 5133722 - DNA, 25 bp, Homo sapien
agatactggggcctccttcctcaac

SEQ ID NO: 5133723 - DNA, 25 bp, Homo sapien
ggtgtagagcaggggacttagggag

SEQ ID NO: 5133724 - DNA, 25 bp, Homo sapien
gtgtagagcaggggacttagggagt

SEQ ID NO: 5133725 - DNA, 25 bp, Homo sapien
tcagcagcaatatgccctgcagctc

SEQ ID NO: 5133726 - DNA, 25 bp, Homo sapien
accaggagcccgcattggatgagcc

SEQ ID NO: 5133727 - DNA, 25 bp, Homo sapien
caaccaggagcccgcattggatgag

SEQ ID NO: 5133728 - DNA, 25 bp, Homo sapien
tcagcaaccaggagcccgcattgga

SEQ ID NO: 5133729 - DNA, 25 bp, Homo sapien
cagcaaccaggagcccgcattggat

SEQ ID NO: 5133730 - DNA, 25 bp, Homo sapien
ctggccggacccggagccattgttc

SEQ ID NO: 5133731 - DNA, 25 bp, Homo sapien
ggccggacccggagccattgttctc

SEQ ID NO: 5133732 - DNA, 25 bp, Homo sapien
tggccggacccggagccattgttct

SEQ ID NO: 5133733 - DNA, 25 bp, Homo sapien
actggccctcggtctctttgaagtc

SEQ ID NO: 5133734 - DNA, 25 bp, Homo sapien
agtactggccctcggtctctttgaa

SEQ ID NO: 5133735 - DNA, 25 bp, Homo sapien
gctttctgctcagtcgccgttgccc

SEQ ID NO: 5133736 - DNA, 25 bp, Homo sapien
ctttctgctcagtcgccgttgccct

SEQ ID NO: 5133737 - DNA, 25 bp, Homo sapien
gccttgagcagcgggctgagcaggc

SEQ ID NO: 5133738 - DNA, 25 bp, Homo sapien
ggccttgagcagcgggctgagcagg

SEQ ID NO: 5133739 - DNA, 25 bp, Homo sapien
ccttgagcagcgggctgagcaggcg

SEQ ID NO: 5133740 - DNA, 25 bp, Homo sapien
cttgagcagcgggctgagcaggcgg

SEQ ID NO: 5133741 - DNA, 25 bp, Homo sapien
ggaactggaacagctggtctgtgta

SEQ ID NO: 5133742 - DNA, 25 bp, Homo sapien
aacagctggtctgtgtagcccgact

SEQ ID NO: 5133743 - DNA, 25 bp, Homo sapien
actggaacagctggtctgtgtagcc

SEQ ID NO: 5133744 - DNA, 25 bp, Homo sapien
tggaacagctggtctgtgtagcccg

SEQ ID NO: 5133745 - DNA, 25 bp, Homo sapien
agcactgatggcaagctttgggtcc

SEQ ID NO: 5133746 - DNA, 25 bp, Homo sapien
ccctaggtctctgaaggtccagata

SEQ ID NO: 5133747 - DNA, 25 bp, Homo sapien
atggcaagctttgggtccgcacact

SEQ ID NO: 5133748 - DNA, 25 bp, Homo sapien
gtctctgaaggtccagatagcactg

SEQ ID NO: 5133749 - DNA, 25 bp, Homo sapien
ttccctgagccactctattggggtg

SEQ ID NO: 5133750 - DNA, 25 bp, Homo sapien
tcaggccagccctgtggagtgatgg

SEQ ID NO: 5133751 - DNA, 25 bp, Homo sapien
caggccagccctgtggagtgatggg

SEQ ID NO: 5133752 - DNA, 25 bp, Homo sapien
agtgatggggacatagctgggtttc

SEQ ID NO: 5133753 - DNA, 25 bp, Homo sapien
cagggctcggcgtctgctgcagaac

SEQ ID NO: 5133754 - DNA, 25 bp, Homo sapien
gcagggctcggcgtctgctgcagaa

SEQ ID NO: 5133755 - DNA, 25 bp, Homo sapien
gccggatgaactgttctagtttttc

SEQ ID NO: 5133756 - DNA, 25 bp, Homo sapien
tgaactgccggatgaactgttctag

SEQ ID NO: 5133757 - DNA, 25 bp, Homo sapien
gaagaactaggtgtcatcatcaaca

SEQ ID NO: 5133758 - DNA, 25 bp, Homo sapien
tgtgatggctcctgcacaggcccga

SEQ ID NO: 5133759 - DNA, 25 bp, Homo sapien
gcccgacataggatgagggcatctg

SEQ ID NO: 5133760 - DNA, 25 bp, Homo sapien
gaagtccagtgtgagattgaagaac

SEQ ID NO: 5133761 - DNA, 25 bp, Homo sapien
gggatgtcatcctaactgggacccc

SEQ ID NO: 5133762 - DNA, 25 bp, Homo sapien
caaccagatggtattcaagacagag

SEQ ID NO: 5133763 - DNA, 25 bp, Homo sapien
tttgctttgctccaggtttgttacc

SEQ ID NO: 5133764 - DNA, 25 bp, Homo sapien
ggtctcccagtgagtgacaagggct

SEQ ID NO: 5133765 - DNA, 25 bp, Homo sapien
aacatagtgcactgagtcaatgtgg

SEQ ID NO: 5133766 - DNA, 25 bp, Homo sapien
tctatacagaaagttctaacatagt

SEQ ID NO: 5133767 - DNA, 25 bp, Homo sapien
tatctacaggtatcttcctatgctg

SEQ ID NO: 5133768 - DNA, 25 bp, Homo sapien
caagtgactactgcctggtgctctt

SEQ ID NO: 5133769 - DNA, 25 bp, Homo sapien
ggctctggctactaacatgggataa

SEQ ID NO: 5133770 - DNA, 25 bp, Homo sapien
gacgtgagtgctcgtgactggctaa

SEQ ID NO: 5133771 - DNA, 25 bp, Homo sapien
cgtgatctaacctcctgtatggcca

SEQ ID NO: 5133772 - DNA, 25 bp, Homo sapien
gactggctaacaagacgcaatggga

SEQ ID NO: 5133773 - DNA, 25 bp, Homo sapien
tgtgcacttaaacgaggtccagact

SEQ ID NO: 5133774 - DNA, 25 bp, Homo sapien
tctcaaatagaagtcgggccatggc

SEQ ID NO: 5133775 - DNA, 25 bp, Homo sapien
cctttccttagacgggtggccagag

SEQ ID NO: 5133776 - DNA, 25 bp, Homo sapien
taagcagtgtacaagaatcccaggt

SEQ ID NO: 5133777 - DNA, 25 bp, Homo sapien
cagtgatgacacttgaagacagtgt

SEQ ID NO: 5133778 - DNA, 25 bp, Homo sapien
ggacagtgatgacacttgaagacag

SEQ ID NO: 5133779 - DNA, 25 bp, Homo sapien
tgacacttgaagacagtgttgcctt

SEQ ID NO: 5133780 - DNA, 25 bp, Homo sapien
tgatgacacttgaagacagtgttgc

SEQ ID NO: 5133781 - DNA, 25 bp, Homo sapien
cctggttatccgcctttccccagag

SEQ ID NO: 5133782 - DNA, 25 bp, Homo sapien
gttatccgcctttccccagaggtca

SEQ ID NO: 5133783 - DNA, 25 bp, Homo sapien
taggcaacctggttatccgcctttc

SEQ ID NO: 5133784 - DNA, 25 bp, Homo sapien
tatccgcctttccccagaggtcacc

SEQ ID NO: 5133785 - DNA, 25 bp, Homo sapien
cccagtggagaagtgtgttgttatc

SEQ ID NO: 5133786 - DNA, 25 bp, Homo sapien
gtgttgttatcgatcatctgaagcc

SEQ ID NO: 5133787 - DNA, 25 bp, Homo sapien
gagaagtgtgttgttatcgatcatc

SEQ ID NO: 5133788 - DNA, 25 bp, Homo sapien
accacgcccagtggagaagtgtgtt

SEQ ID NO: 5133789 - DNA, 25 bp, Homo sapien
cagcgcaccacttgtaggcggcact

SEQ ID NO: 5133790 - DNA, 25 bp, Homo sapien
tcaccaccctgtcgcccgagtcctg

SEQ ID NO: 5133791 - DNA, 25 bp, Homo sapien
tgtcgcccgagtcctgtgatgggca

SEQ ID NO: 5133792 - DNA, 25 bp, Homo sapien
gcaccacttgtaggcggcactgcag

SEQ ID NO: 5133793 - DNA, 25 bp, Homo sapien
gaaccagcgagcacgcgcaccttag

SEQ ID NO: 5133794 - DNA, 25 bp, Homo sapien
tagaaccagcgagcacgcgcacctt

SEQ ID NO: 5133795 - DNA, 25 bp, Homo sapien
agcgagcacgcgcaccttagccggc

SEQ ID NO: 5133796 - DNA, 25 bp, Homo sapien
gttagaaccagcgagcacgcgcacc

SEQ ID NO: 5133797 - DNA, 25 bp, Homo sapien
gccacctctcccgcttgccgtcttc

SEQ ID NO: 5133798 - DNA, 25 bp, Homo sapien
ggtgggccacctctcccgcttgccg

SEQ ID NO: 5133799 - DNA, 25 bp, Homo sapien
gggtgggccacctctcccgcttgcc

SEQ ID NO: 5133800 - DNA, 25 bp, Homo sapien
acctctcccgcttgccgtcttccat

SEQ ID NO: 5133801 - DNA, 25 bp, Homo sapien
tattggcgtcataatacgtgagcag

SEQ ID NO: 5133802 - DNA, 25 bp, Homo sapien
ttattggcgtcataatacgtgagca

SEQ ID NO: 5133803 - DNA, 25 bp, Homo sapien
tctcttattggcgtcataatacgtg

SEQ ID NO: 5133804 - DNA, 25 bp, Homo sapien
tcttattggcgtcataatacgtgag

SEQ ID NO: 5133805 - DNA, 25 bp, Homo sapien
taaaacgctgtacatgctgaatttt

SEQ ID NO: 5133806 - DNA, 25 bp, Homo sapien
agcatggtgagtgattggaaaccag

SEQ ID NO: 5133807 - DNA, 25 bp, Homo sapien
aataaaacgctgtacatgctgaatt

SEQ ID NO: 5133808 - DNA, 25 bp, Homo sapien
tggtgagtgattggaaaccagctga

SEQ ID NO: 5133809 - DNA, 25 bp, Homo sapien
gtgtgatacttaccaaaaaattgtc

SEQ ID NO: 5133810 - DNA, 25 bp, Homo sapien
cagtgtgatacttaccaaaaaattg

SEQ ID NO: 5133811 - DNA, 25 bp, Homo sapien
actttcaacagcagtatatgtactg

SEQ ID NO: 5133812 - DNA, 25 bp, Homo sapien
aatgtaaactttcaacagcagtata

SEQ ID NO: 5133813 - DNA, 25 bp, Homo sapien
gatgtaccatttccggttggccagt

SEQ ID NO: 5133814 - DNA, 25 bp, Homo sapien
gagatgtaccatttccggttggcca

SEQ ID NO: 5133815 - DNA, 25 bp, Homo sapien
aggagatgtaccatttccggttggc

SEQ ID NO: 5133816 - DNA, 25 bp, Homo sapien
gtaccatttccggttggccagtggc

SEQ ID NO: 5133817 - DNA, 25 bp, Homo sapien
aatccgtaatatttggattggcgcc

SEQ ID NO: 5133818 - DNA, 25 bp, Homo sapien
tacacagcgtagtgcagagcagtcc

SEQ ID NO: 5133819 - DNA, 25 bp, Homo sapien
gagcagtccttccaaagaaatccgt

SEQ ID NO: 5133820 - DNA, 25 bp, Homo sapien
attggcgccattttgcagcagaaga

SEQ ID NO: 5133821 - DNA, 25 bp, Homo sapien
gtcacttcacactgattagaaaaaa

SEQ ID NO: 5133822 - DNA, 25 bp, Homo sapien
ataaagcctatttataagggacaat

SEQ ID NO: 5133823 - DNA, 25 bp, Homo sapien
cctttcccaaattcagttgtcatga

SEQ ID NO: 5133824 - DNA, 25 bp, Homo sapien
ctattacctttcccaaattcagttg

SEQ ID NO: 5133825 - DNA, 25 bp, Homo sapien
tcacttttcttcgactcacagcaaa

SEQ ID NO: 5133826 - DNA, 25 bp, Homo sapien
tttcttcgactcacagcaaataaca

SEQ ID NO: 5133827 - DNA, 25 bp, Homo sapien
cacttttcttcgactcacagcaaat

SEQ ID NO: 5133828 - DNA, 25 bp, Homo sapien
cttcgactcacagcaaataacagtg

SEQ ID NO: 5133829 - DNA, 25 bp, Homo sapien
tctttcgaaacgcatctcgagaaag

SEQ ID NO: 5133830 - DNA, 25 bp, Homo sapien
gaaacgcatctcgagaaagcacatc

SEQ ID NO: 5133831 - DNA, 25 bp, Homo sapien
atctcctgcaatctttcgaaacgca

SEQ ID NO: 5133832 - DNA, 25 bp, Homo sapien
gcaatctttcgaaacgcatctcgag

SEQ ID NO: 5133833 - DNA, 25 bp, Homo sapien
tataggaagatcttcatatctcttt

SEQ ID NO: 5133834 - DNA, 25 bp, Homo sapien
ttctttcgtattcataaattagatc

SEQ ID NO: 5133835 - DNA, 25 bp, Homo sapien
ctggattgctatttataggaagatc

SEQ ID NO: 5133836 - DNA, 25 bp, Homo sapien
ttcatatctctttctttcgtattca

SEQ ID NO: 5133837 - DNA, 25 bp, Homo sapien
caaggctggttgtttctgagaagac

SEQ ID NO: 5133838 - DNA, 25 bp, Homo sapien
tcaaggctggttgtttctgagaaga

SEQ ID NO: 5133839 - DNA, 25 bp, Homo sapien
aaggctggttgtttctgagaagaca

SEQ ID NO: 5133840 - DNA, 25 bp, Homo sapien
cttcaaggctggttgtttctgagaa

SEQ ID NO: 5133841 - DNA, 25 bp, Homo sapien
atagaatcttccttgccacttgtag

SEQ ID NO: 5133842 - DNA, 25 bp, Homo sapien
tatttgaaatagaatcttccttgcc

SEQ ID NO: 5133843 - DNA, 25 bp, Homo sapien
aatagaatcttccttgccacttgta

SEQ ID NO: 5133844 - DNA, 25 bp, Homo sapien
ctatatttgaaatagaatcttcctt

SEQ ID NO: 5133845 - DNA, 25 bp, Homo sapien
tcaaggccggttgtttctgagaaga

SEQ ID NO: 5133846 - DNA, 25 bp, Homo sapien
cttcaaggccggttgtttctgagaa

SEQ ID NO: 5133847 - DNA, 25 bp, Homo sapien
aaggccggttgtttctgagaagaca

SEQ ID NO: 5133848 - DNA, 25 bp, Homo sapien
caaggccggttgtttctgagaagac

SEQ ID NO: 5133849 - DNA, 25 bp, Homo sapien
gctgtgttcgaaacagaatcatcct

SEQ ID NO: 5133850 - DNA, 25 bp, Homo sapien
gttcgaaacagaatcatccttgtca

SEQ ID NO: 5133851 - DNA, 25 bp, Homo sapien
tggctgtgttcgaaacagaatcatc

SEQ ID NO: 5133852 - DNA, 25 bp, Homo sapien
tgtgttcgaaacagaatcatccttg

SEQ ID NO: 5133853 - DNA, 25 bp, Homo sapien
ctgtttaaacactgttcaacagcag

SEQ ID NO: 5133854 - DNA, 25 bp, Homo sapien
tgacaggcattataatggcacagcc

SEQ ID NO: 5133855 - DNA, 25 bp, Homo sapien
caaaaaccgtcagtctatacacgta

SEQ ID NO: 5133856 - DNA, 25 bp, Homo sapien
tggcacagccagacaataatttgtc

SEQ ID NO: 5133857 - DNA, 25 bp, Homo sapien
gaaatatccaatgcagactcaccct

SEQ ID NO: 5133858 - DNA, 25 bp, Homo sapien
tgtcacaggctgtgcaacagcatca

SEQ ID NO: 5133859 - DNA, 25 bp, Homo sapien
ggctgtgcaacagcatcaggtctgt

SEQ ID NO: 5133860 - DNA, 25 bp, Homo sapien
acaggctgtgcaacagcatcaggtc

SEQ ID NO: 5133861 - DNA, 25 bp, Homo sapien
tgtgcaacagcatcaggtctgtaga

SEQ ID NO: 5133862 - DNA, 25 bp, Homo sapien
ctctttgggatgtatagttttgaaa

SEQ ID NO: 5133863 - DNA, 25 bp, Homo sapien
tctctttgggatgtatagttttgaa

SEQ ID NO: 5133864 - DNA, 25 bp, Homo sapien
ctttgggatgtatagttttgaaata

SEQ ID NO: 5133865 - DNA, 25 bp, Homo sapien
ttctctttgggatgtatagttttga

SEQ ID NO: 5133866 - DNA, 25 bp, Homo sapien
tcaacagcctcttcaacaggaggaa

SEQ ID NO: 5133867 - DNA, 25 bp, Homo sapien
tgtcaacagcctcttcaacaggagg

SEQ ID NO: 5133868 - DNA, 25 bp, Homo sapien
ctgtcaacagcctcttcaacaggag

SEQ ID NO: 5133869 - DNA, 25 bp, Homo sapien
aacagcctcttcaacaggaggaagc

SEQ ID NO: 5133870 - DNA, 25 bp, Homo sapien
gcaaaacggtccagtaggtagagac

SEQ ID NO: 5133871 - DNA, 25 bp, Homo sapien
tgcaaaacggtccagtaggtagaga

SEQ ID NO: 5133872 - DNA, 25 bp, Homo sapien
caaaacggtccagtaggtagagaca

SEQ ID NO: 5133873 - DNA, 25 bp, Homo sapien
tgtgcaaaacggtccagtaggtaga

SEQ ID NO: 5133874 - DNA, 25 bp, Homo sapien
caattgctacctattatttgctaga

SEQ ID NO: 5133875 - DNA, 25 bp, Homo sapien
tagacaattgctacctattatttgc

SEQ ID NO: 5133876 - DNA, 25 bp, Homo sapien
ggtagacaattgctacctattattt

SEQ ID NO: 5133877 - DNA, 25 bp, Homo sapien
gacaattgctacctattatttgcta

SEQ ID NO: 5133878 - DNA, 25 bp, Homo sapien
ctgcagattgttgagaaatagtcct

SEQ ID NO: 5133879 - DNA, 25 bp, Homo sapien
gttttgtcaatgccacatgcagcat

SEQ ID NO: 5133880 - DNA, 25 bp, Homo sapien
ttctgttttgtcaatgccacatgca

SEQ ID NO: 5133881 - DNA, 25 bp, Homo sapien
tttggtcttcaaacatgtttccatt

SEQ ID NO: 5133882 - DNA, 25 bp, Homo sapien
tgttttgtcaatgccacatgcagca

SEQ ID NO: 5133883 - DNA, 25 bp, Homo sapien
tccagttgctggtagtgcttttcct

SEQ ID NO: 5133884 - DNA, 25 bp, Homo sapien
tgtccagttgctggtagtgcttttc

SEQ ID NO: 5133885 - DNA, 25 bp, Homo sapien
gtccagttgctggtagtgcttttcc

SEQ ID NO: 5133886 - DNA, 25 bp, Homo sapien
ttgtccagttgctggtagtgctttt

SEQ ID NO: 5133887 - DNA, 25 bp, Homo sapien
gatgtgtaacccctatagagagaag

SEQ ID NO: 5133888 - DNA, 25 bp, Homo sapien
tatagcatagcagcctctgaggtac

SEQ ID NO: 5133889 - DNA, 25 bp, Homo sapien
gatatccaagtgcatcccagttcac

SEQ ID NO: 5133890 - DNA, 25 bp, Homo sapien
gtctacataaagtgagttccctcaa

SEQ ID NO: 5133891 - DNA, 25 bp, Homo sapien
gcaggaaatgctctcaatcattact

SEQ ID NO: 5133892 - DNA, 25 bp, Homo sapien
attctcaactttagttctcttgcca

SEQ ID NO: 5133893 - DNA, 25 bp, Homo sapien
cagtcatgaaggcttctgatatttt

SEQ ID NO: 5133894 - DNA, 25 bp, Homo sapien
tcattactttagatatctacttgga

SEQ ID NO: 5133895 - DNA, 25 bp, Homo sapien
tgtgaatcagctggatgaagccaaa

SEQ ID NO: 5133896 - DNA, 25 bp, Homo sapien
taggtttcacatgactacaagtaac

SEQ ID NO: 5133897 - DNA, 25 bp, Homo sapien
caaagcggaccccagaagaataaat

SEQ ID NO: 5133898 - DNA, 25 bp, Homo sapien
ttgcaagggtgagattaggtttcac

SEQ ID NO: 5133899 - DNA, 25 bp, Homo sapien
gtgaataaaggcggttgctcaggag

SEQ ID NO: 5133900 - DNA, 25 bp, Homo sapien
aataaaggcggttgctcaggagaca

SEQ ID NO: 5133901 - DNA, 25 bp, Homo sapien
gaataaaggcggttgctcaggagac

SEQ ID NO: 5133902 - DNA, 25 bp, Homo sapien
tgaataaaggcggttgctcaggaga

SEQ ID NO: 5133903 - DNA, 25 bp, Homo sapien
aatgtaacaacgctgaaataaaggc

SEQ ID NO: 5133904 - DNA, 25 bp, Homo sapien
taacaacgctgaaataaaggcgttg

SEQ ID NO: 5133905 - DNA, 25 bp, Homo sapien
cgctgaaataaaggcgttgaagttc

SEQ ID NO: 5133906 - DNA, 25 bp, Homo sapien
caacgctgaaataaaggcgttgaag

SEQ ID NO: 5133907 - DNA, 25 bp, Homo sapien
cactgtgtgaaatcgtatagaagac

SEQ ID NO: 5133908 - DNA, 25 bp, Homo sapien
tgtgcattgcagtgacttaaaagta

SEQ ID NO: 5133909 - DNA, 25 bp, Homo sapien
cgttaattcaggctgttggttacct

SEQ ID NO: 5133910 - DNA, 25 bp, Homo sapien
acctgtaggcaataaatagtagtag

SEQ ID NO: 5133911 - DNA, 25 bp, Homo sapien
tctacacaagagattactgagcagt

SEQ ID NO: 5133912 - DNA, 25 bp, Homo sapien
gactcagcaaactatgttacatatt

SEQ ID NO: 5133913 - DNA, 25 bp, Homo sapien
ttacatgagggttattatcaaagac

SEQ ID NO: 5133914 - DNA, 25 bp, Homo sapien
cattacaccattatgtgttatgtgt

SEQ ID NO: 5133915 - DNA, 25 bp, Homo sapien
ctgtgatcaaaccagtaaaatctca

SEQ ID NO: 5133916 - DNA, 25 bp, Homo sapien
catagtttctattcactcacatcag

SEQ ID NO: 5133917 - DNA, 25 bp, Homo sapien
tcacatcagtttcatcgagtatcaa

SEQ ID NO: 5133918 - DNA, 25 bp, Homo sapien
tggactaacttgtacaaattccttc

SEQ ID NO: 5133919 - DNA, 25 bp, Homo sapien
ggataaaggaggtcgctcagaagat

SEQ ID NO: 5133920 - DNA, 25 bp, Homo sapien
tggataaaggaggtcgctcagaaga

SEQ ID NO: 5133921 - DNA, 25 bp, Homo sapien
cgtggataaaggaggtcgctcagaa

SEQ ID NO: 5133922 - DNA, 25 bp, Homo sapien
gataaaggaggtcgctcagaagatt

SEQ ID NO: 5133923 - DNA, 25 bp, Homo sapien
ttttgaactgggatctgcctctttc

SEQ ID NO: 5133924 - DNA, 25 bp, Homo sapien
ggctgcttttgaactgggatctgcc

SEQ ID NO: 5133925 - DNA, 25 bp, Homo sapien
tgcttttgaactgggatctgcctct

SEQ ID NO: 5133926 - DNA, 25 bp, Homo sapien
ttgaactgggatctgcctctttcag

SEQ ID NO: 5133927 - DNA, 25 bp, Homo sapien
tttcctggaggtggtgaatccttcc

SEQ ID NO: 5133928 - DNA, 25 bp, Homo sapien
cttttcctggaggtggtgaatcctt

SEQ ID NO: 5133929 - DNA, 25 bp, Homo sapien
tggaggtggtgaatccttccttctc

SEQ ID NO: 5133930 - DNA, 25 bp, Homo sapien
gaggtggtgaatccttccttctcat

SEQ ID NO: 5133931 - DNA, 25 bp, Homo sapien
gatatacaattttcatatccagcca

SEQ ID NO: 5133932 - DNA, 25 bp, Homo sapien
atcaggtagctgtagatatgcagca

SEQ ID NO: 5133933 - DNA, 25 bp, Homo sapien
tagatatacaattttcatatccagc

SEQ ID NO: 5133934 - DNA, 25 bp, Homo sapien
ttctagatatacaattttcatatcc

SEQ ID NO: 5133935 - DNA, 25 bp, Homo sapien
cttctcagctggttgtttctgagaa

SEQ ID NO: 5133936 - DNA, 25 bp, Homo sapien
tcagctggttgtttctgagaagaca

SEQ ID NO: 5133937 - DNA, 25 bp, Homo sapien
ctcagctggttgtttctgagaagac

SEQ ID NO: 5133938 - DNA, 25 bp, Homo sapien
tctcagctggttgtttctgagaaga

SEQ ID NO: 5133939 - DNA, 25 bp, Homo sapien
gtcccagatattggtccctccttta

SEQ ID NO: 5133940 - DNA, 25 bp, Homo sapien
cccagatattggtccctcctttatt

SEQ ID NO: 5133941 - DNA, 25 bp, Homo sapien
ccagatattggtccctcctttattt

SEQ ID NO: 5133942 - DNA, 25 bp, Homo sapien
ctgtcccagatattggtccctcctt

SEQ ID NO: 5133943 - DNA, 25 bp, Homo sapien
gcaggtggtatatgatccctcatgt

SEQ ID NO: 5133944 - DNA, 25 bp, Homo sapien
ggtggtatatgatccctcatgtctt

SEQ ID NO: 5133945 - DNA, 25 bp, Homo sapien
agcaggtggtatatgatccctcatg

SEQ ID NO: 5133946 - DNA, 25 bp, Homo sapien
caggtggtatatgatccctcatgtc

SEQ ID NO: 5133947 - DNA, 25 bp, Homo sapien
ctcagctggttgtttctgagaagac

SEQ ID NO: 5133948 - DNA, 25 bp, Homo sapien
tcagctggttgtttctgagaagaca

SEQ ID NO: 5133949 - DNA, 25 bp, Homo sapien
tctcagctggttgtttctgagaaga

SEQ ID NO: 5133950 - DNA, 25 bp, Homo sapien
cttctcagctggttgtttctgagaa

SEQ ID NO: 5133951 - DNA, 25 bp, Homo sapien
tctttatttctgtggctatatttga

SEQ ID NO: 5133952 - DNA, 25 bp, Homo sapien
tctgtggctatatttgaaacagaat

SEQ ID NO: 5133953 - DNA, 25 bp, Homo sapien
cagaatctttctcgtcacttgtagc

SEQ ID NO: 5133954 - DNA, 25 bp, Homo sapien
ctgtcccagattgttgtcccttctt

SEQ ID NO: 5133955 - DNA, 25 bp, Homo sapien
caggccgattgtttctgaggagaca

SEQ ID NO: 5133956 - DNA, 25 bp, Homo sapien
ccaggccgattgtttctgaggagac

SEQ ID NO: 5133957 - DNA, 25 bp, Homo sapien
cttccaggccgattgtttctgagga

SEQ ID NO: 5133958 - DNA, 25 bp, Homo sapien
tccaggccgattgtttctgaggaga

SEQ ID NO: 5133959 - DNA, 25 bp, Homo sapien
tcttgtggcaatattcaaaagagaa

SEQ ID NO: 5133960 - DNA, 25 bp, Homo sapien
ttattcttgtggcaatattcaaaag

SEQ ID NO: 5133961 - DNA, 25 bp, Homo sapien
ttcttgtggcaatattcaaaagaga

SEQ ID NO: 5133962 - DNA, 25 bp, Homo sapien
tattcttgtggcaatattcaaaaga

SEQ ID NO: 5133963 - DNA, 25 bp, Homo sapien
gcaaacattctaaatgcatctgaag

SEQ ID NO: 5133964 - DNA, 25 bp, Homo sapien
tgtggtttatcccaactctagcact

SEQ ID NO: 5133965 - DNA, 25 bp, Homo sapien
agtagtcatcggagcagtcagaaat

SEQ ID NO: 5133966 - DNA, 25 bp, Homo sapien
gaagtgagttcactcaggtttcctc

SEQ ID NO: 5133967 - DNA, 25 bp, Homo sapien
ctatcaatgtgaatatgctgaatga

SEQ ID NO: 5133968 - DNA, 25 bp, Homo sapien
taaacccttacaatgtcaatcatgg

SEQ ID NO: 5133969 - DNA, 25 bp, Homo sapien
gtcaatcatggtatgatttttcata

SEQ ID NO: 5133970 - DNA, 25 bp, Homo sapien
gtataggctttgatttttgtgtctg

SEQ ID NO: 5133971 - DNA, 25 bp, Homo sapien
tgaggctggttgtttctgagaagac

SEQ ID NO: 5133972 - DNA, 25 bp, Homo sapien
gaggctggttgtttctgagaagaca

SEQ ID NO: 5133973 - DNA, 25 bp, Homo sapien
ttgaggctggttgtttctgagaaga

SEQ ID NO: 5133974 - DNA, 25 bp, Homo sapien
ctttgaggctggttgtttctgagaa

SEQ ID NO: 5133975 - DNA, 25 bp, Homo sapien
ccacactgtagtccatcctttattt

SEQ ID NO: 5133976 - DNA, 25 bp, Homo sapien
tgtcccacactgtagtccatccttt

SEQ ID NO: 5133977 - DNA, 25 bp, Homo sapien
tattcaaagcagaatctgtcttgtc

SEQ ID NO: 5133978 - DNA, 25 bp, Homo sapien
tatttctgtagctatattcaaagca

SEQ ID NO: 5133979 - DNA, 25 bp, Homo sapien
caaggctggttgtttctgagaagac

SEQ ID NO: 5133980 - DNA, 25 bp, Homo sapien
cttcaaggctggttgtttctgagaa

SEQ ID NO: 5133981 - DNA, 25 bp, Homo sapien
aaggctggttgtttctgagaagaca

SEQ ID NO: 5133982 - DNA, 25 bp, Homo sapien
tcaaggctggttgtttctgagaaga

SEQ ID NO: 5133983 - DNA, 25 bp, Homo sapien
tttctgtggctatattcgaaacaga

SEQ ID NO: 5133984 - DNA, 25 bp, Homo sapien
ttatttctgtggctatattcgaaac

SEQ ID NO: 5133985 - DNA, 25 bp, Homo sapien
tatttctgtggctatattcgaaaca

SEQ ID NO: 5133986 - DNA, 25 bp, Homo sapien
atttctgtggctatattcgaaacag

SEQ ID NO: 5133987 - DNA, 25 bp, Homo sapien
aaggctggttgcttctgagaagaca

SEQ ID NO: 5133988 - DNA, 25 bp, Homo sapien
cttcaaggctggttgcttctgagaa

SEQ ID NO: 5133989 - DNA, 25 bp, Homo sapien
caaggctggttgcttctgagaagac

SEQ ID NO: 5133990 - DNA, 25 bp, Homo sapien
tcaaggctggttgcttctgagaaga

SEQ ID NO: 5133991 - DNA, 25 bp, Homo sapien
tctgtggctatattcgaaacagaat

SEQ ID NO: 5133992 - DNA, 25 bp, Homo sapien
gtggctatattcgaaacagaatctt

SEQ ID NO: 5133993 - DNA, 25 bp, Homo sapien
atttctgtggctatattcgaaacag

SEQ ID NO: 5133994 - DNA, 25 bp, Homo sapien
ttatttctgtggctatattcgaaac

SEQ ID NO: 5133995 - DNA, 25 bp, Homo sapien
caaggctggttgtttctgagaagac

SEQ ID NO: 5133996 - DNA, 25 bp, Homo sapien
aaggctggttgtttctgagaagaca

SEQ ID NO: 5133997 - DNA, 25 bp, Homo sapien
tcaaggctggttgtttctgagaaga

SEQ ID NO: 5133998 - DNA, 25 bp, Homo sapien
cttcaaggctggttgtttctgagaa

SEQ ID NO: 5133999 - DNA, 25 bp, Homo sapien
tgtggctatgttcgaaacagaatct

SEQ ID NO: 5134000 - DNA, 25 bp, Homo sapien
tatgttcgaaacagaatctttctca

SEQ ID NO: 5134001 - DNA, 25 bp, Homo sapien
ttatttctgtggctatgttcgaaac

SEQ ID NO: 5134002 - DNA, 25 bp, Homo sapien
cagaatctttctcatcagttgtagc

SEQ ID NO: 5134003 - DNA, 25 bp, Homo sapien
agagccccttatgtcttcaactgct

SEQ ID NO: 5134004 - DNA, 25 bp, Homo sapien
gaaaacgctgtagagttaaagcaaa

SEQ ID NO: 5134005 - DNA, 25 bp, Homo sapien
tgaaaacgctgtagagttaaagcaa

SEQ ID NO: 5134006 - DNA, 25 bp, Homo sapien
caaatttgaatgtggggaagtgtat

SEQ ID NO: 5134007 - DNA, 25 bp, Homo sapien
aaggctggtggtttctgagaagaca

SEQ ID NO: 5134008 - DNA, 25 bp, Homo sapien
caaggctggtggtttctgagaagac

SEQ ID NO: 5134009 - DNA, 25 bp, Homo sapien
tcaaggctggtggtttctgagaaga

SEQ ID NO: 5134010 - DNA, 25 bp, Homo sapien
cgtcaaggctggtggtttctgagaa

SEQ ID NO: 5134011 - DNA, 25 bp, Homo sapien
cattcacaatataaatgagtgtttc

SEQ ID NO: 5134012 - DNA, 25 bp, Homo sapien
actcattcacaatataaatgagtgt

SEQ ID NO: 5134013 - DNA, 25 bp, Homo sapien
acaatataaatgagtgtttcattac

SEQ ID NO: 5134014 - DNA, 25 bp, Homo sapien
cttaactcattcacaatataaatga

SEQ ID NO: 5134015 - DNA, 25 bp, Homo sapien
tactcaaaacagaaccttcctcgtc

SEQ ID NO: 5134016 - DNA, 25 bp, Homo sapien
aaaacagaaccttcctcgtcacttg

SEQ ID NO: 5134017 - DNA, 25 bp, Homo sapien
catccttgttttctctggctatact

SEQ ID NO: 5134018 - DNA, 25 bp, Homo sapien
tgttttctctggctatactcaaaac

SEQ ID NO: 5134019 - DNA, 25 bp, Homo sapien
tcaaggctggttttttccgagaaga

SEQ ID NO: 5134020 - DNA, 25 bp, Homo sapien
ctctggttatattcgaaaaagaatc

SEQ ID NO: 5134021 - DNA, 25 bp, Homo sapien
cttcaaggttggtggtttctgagaa

SEQ ID NO: 5134022 - DNA, 25 bp, Homo sapien
tcaaggttggtggtttctgagaaga

SEQ ID NO: 5134023 - DNA, 25 bp, Homo sapien
aaggttggtggtttctgagaagaca

SEQ ID NO: 5134024 - DNA, 25 bp, Homo sapien
caaggttggtggtttctgagaagac

SEQ ID NO: 5134025 - DNA, 25 bp, Homo sapien
gttttctctggctatacccaaaaca

SEQ ID NO: 5134026 - DNA, 25 bp, Homo sapien
ccttgttttctctggctatacccaa

SEQ ID NO: 5134027 - DNA, 25 bp, Homo sapien
cttgttttctctggctatacccaaa

SEQ ID NO: 5134028 - DNA, 25 bp, Homo sapien
tgttttctctggctatacccaaaac

SEQ ID NO: 5134029 - DNA, 25 bp, Homo sapien
aagcctggtggtttctcagaagaca

SEQ ID NO: 5134030 - DNA, 25 bp, Homo sapien
cttcaagcctggtggtttctcagaa

SEQ ID NO: 5134031 - DNA, 25 bp, Homo sapien
tcaagcctggtggtttctcagaaga

SEQ ID NO: 5134032 - DNA, 25 bp, Homo sapien
caagcctggtggtttctcagaagac

SEQ ID NO: 5134033 - DNA, 25 bp, Homo sapien
ccttttttcctctggctatattcaa

SEQ ID NO: 5134034 - DNA, 25 bp, Homo sapien
caaaacagaatctttctcggcactt

SEQ ID NO: 5134035 - DNA, 25 bp, Homo sapien
cagaatctttctcggcacttgaagc

SEQ ID NO: 5134036 - DNA, 25 bp, Homo sapien
ttttcctctggctatattcaaaaca

SEQ ID NO: 5134037 - DNA, 25 bp, Homo sapien
tgtgaaatacacccttacgatttca

SEQ ID NO: 5134038 - DNA, 25 bp, Homo sapien
gtgaaatacacccttacgatttcaa

SEQ ID NO: 5134039 - DNA, 25 bp, Homo sapien
ctctggttatattcgaaaaagaatc

SEQ ID NO: 5134040 - DNA, 25 bp, Homo sapien
tcaaggctggtggtttctgagaaga

SEQ ID NO: 5134041 - DNA, 25 bp, Homo sapien
aaggctggtggtttctgagaagaca

SEQ ID NO: 5134042 - DNA, 25 bp, Homo sapien
cttcaaggctggtggtttctgagaa

SEQ ID NO: 5134043 - DNA, 25 bp, Homo sapien
caaggctggtggtttctgagaagac

SEQ ID NO: 5134044 - DNA, 25 bp, Homo sapien
ccttgttttctctggctatacccaa

SEQ ID NO: 5134045 - DNA, 25 bp, Homo sapien
tgttttctctggctatacccaaaac

SEQ ID NO: 5134046 - DNA, 25 bp, Homo sapien
gttttctctggctatacccaaaaca

SEQ ID NO: 5134047 - DNA, 25 bp, Homo sapien
cttgttttctctggctatacccaaa

SEQ ID NO: 5134048 - DNA, 25 bp, Homo sapien
ctggactgaacatgacattaaatct

SEQ ID NO: 5134049 - DNA, 25 bp, Homo sapien
ggactgaacatgacattaaatctgt

SEQ ID NO: 5134050 - DNA, 25 bp, Homo sapien
actgaacatgacattaaatctgttt

SEQ ID NO: 5134051 - DNA, 25 bp, Homo sapien
tgaacatgacattaaatctgttttc

SEQ ID NO: 5134052 - DNA, 25 bp, Homo sapien
acattcatgcagtgttagcatcagc

SEQ ID NO: 5134053 - DNA, 25 bp, Homo sapien
tgacaaaattatccatacattcatg

SEQ ID NO: 5134054 - DNA, 25 bp, Homo sapien
atgcagtgttagcatcagcctctgt

SEQ ID NO: 5134055 - DNA, 25 bp, Homo sapien
aaattatccatacattcatgcagtg

SEQ ID NO: 5134056 - DNA, 25 bp, Homo sapien
caagcctggtggtttctcagaagac

SEQ ID NO: 5134057 - DNA, 25 bp, Homo sapien
tcaagcctggtggtttctcagaaga

SEQ ID NO: 5134058 - DNA, 25 bp, Homo sapien
cttcaagcctggtggtttctcagaa

SEQ ID NO: 5134059 - DNA, 25 bp, Homo sapien
aagcctggtggtttctcagaagaca

SEQ ID NO: 5134060 - DNA, 25 bp, Homo sapien
aacagaatctttctcatcacttgta

SEQ ID NO: 5134061 - DNA, 25 bp, Homo sapien
cagaatctttctcatcacttgtagc

SEQ ID NO: 5134062 - DNA, 25 bp, Homo sapien
caaaacagaatctttctcatcactt

SEQ ID NO: 5134063 - DNA, 25 bp, Homo sapien
tctggctatattcaaaacagaatct

SEQ ID NO: 5134064 - DNA, 25 bp, Homo sapien
ctgtcctagttttttctccatcctt

SEQ ID NO: 5134065 - DNA, 25 bp, Homo sapien
cttcaaggttggtggtttctgagaa

SEQ ID NO: 5134066 - DNA, 25 bp, Homo sapien
aaggttggtggtttctgagaagaca

SEQ ID NO: 5134067 - DNA, 25 bp, Homo sapien
tcaaggttggtggtttctgagaaga

SEQ ID NO: 5134068 - DNA, 25 bp, Homo sapien
caaggttggtggtttctgagaagac

SEQ ID NO: 5134069 - DNA, 25 bp, Homo sapien
tccttgttttctctggctatactca

SEQ ID NO: 5134070 - DNA, 25 bp, Homo sapien
tatactcaaaacagaatcttcctca

SEQ ID NO: 5134071 - DNA, 25 bp, Homo sapien
tgttttctctggctatactcaaaac

SEQ ID NO: 5134072 - DNA, 25 bp, Homo sapien
catccttgttttctctggctatact

SEQ ID NO: 5134073 - DNA, 25 bp, Homo sapien
tcaagcctgatggtttctcagaaga

SEQ ID NO: 5134074 - DNA, 25 bp, Homo sapien
cttcaagcctgatggtttctcagaa

SEQ ID NO: 5134075 - DNA, 25 bp, Homo sapien
caagcctgatggtttctcagaagac

SEQ ID NO: 5134076 - DNA, 25 bp, Homo sapien
aagcctgatggtttctcagaagaca

SEQ ID NO: 5134077 - DNA, 25 bp, Homo sapien
cagaatctttctcggcacttgtagc

SEQ ID NO: 5134078 - DNA, 25 bp, Homo sapien
acttttttcctctggctatattcaa

SEQ ID NO: 5134079 - DNA, 25 bp, Homo sapien
ctctcttagttttttctccatactt

SEQ ID NO: 5134080 - DNA, 25 bp, Homo sapien
ttttcctctggctatattcaaaaca

SEQ ID NO: 5134081 - DNA, 25 bp, Homo sapien
tatatgatttgtcacgtgtcaaaaa

SEQ ID NO: 5134082 - DNA, 25 bp, Homo sapien
tgatttgtcacgtgtcaaaaactaa

SEQ ID NO: 5134083 - DNA, 25 bp, Homo sapien
atatgatttgtcacgtgtcaaaaac

SEQ ID NO: 5134084 - DNA, 25 bp, Homo sapien
tatgatttgtcacgtgtcaaaaact

SEQ ID NO: 5134085 - DNA, 25 bp, Homo sapien
tcaaggctggttttttccgagaaga

SEQ ID NO: 5134086 - DNA, 25 bp, Homo sapien
ttttttctctggctatatacaaaac

SEQ ID NO: 5134087 - DNA, 25 bp, Homo sapien
ttttctctggctatatacaaaacag

SEQ ID NO: 5134088 - DNA, 25 bp, Homo sapien
tatacaaaacagaatctttctcgtc

SEQ ID NO: 5134089 - DNA, 25 bp, Homo sapien
aaaacagaatctttctcgtcacttg

SEQ ID NO: 5134090 - DNA, 25 bp, Homo sapien
tgaacatgacattaaatctgttttc

SEQ ID NO: 5134091 - DNA, 25 bp, Homo sapien
tatctggactgaacatgacattaaa

SEQ ID NO: 5134092 - DNA, 25 bp, Homo sapien
ctatctggactgaacatgacattaa

SEQ ID NO: 5134093 - DNA, 25 bp, Homo sapien
ctggactgaacatgacattaaatct

SEQ ID NO: 5134094 - DNA, 25 bp, Homo sapien
caatgctggttgtttcggagaagac

SEQ ID NO: 5134095 - DNA, 25 bp, Homo sapien
aatgctggttgtttcggagaagaca

SEQ ID NO: 5134096 - DNA, 25 bp, Homo sapien
cttcaatgctggttgtttcggagaa

SEQ ID NO: 5134097 - DNA, 25 bp, Homo sapien
tcaatgctggttgtttcggagaaga

SEQ ID NO: 5134098 - DNA, 25 bp, Homo sapien
tcatcctttttttccgtggccatat

SEQ ID NO: 5134099 - DNA, 25 bp, Homo sapien
cggaacagaatcttccttgtcacag

SEQ ID NO: 5134100 - DNA, 25 bp, Homo sapien
ccgtggccatattcggaacagaatc

SEQ ID NO: 5134101 - DNA, 25 bp, Homo sapien
ggaacagaatcttccttgtcacaga

SEQ ID NO: 5134102 - DNA, 25 bp, Homo sapien
tcttctaccctgaccgaacatcata

SEQ ID NO: 5134103 - DNA, 25 bp, Homo sapien
tctaccctgaccgaacatcatatta

SEQ ID NO: 5134104 - DNA, 25 bp, Homo sapien
accctgaccgaacatcatattaaat

SEQ ID NO: 5134105 - DNA, 25 bp, Homo sapien
taccctgaccgaacatcatattaaa

SEQ ID NO: 5134106 - DNA, 25 bp, Homo sapien
atgtttgctgaaacctagtagagaa

SEQ ID NO: 5134107 - DNA, 25 bp, Homo sapien
tcaaggctggttgtttctgacaaga

SEQ ID NO: 5134108 - DNA, 25 bp, Homo sapien
caaggctggttgtttctgacaagac

SEQ ID NO: 5134109 - DNA, 25 bp, Homo sapien
aaggctggttgtttctgacaagaca

SEQ ID NO: 5134110 - DNA, 25 bp, Homo sapien
cttcaaggctggttgtttctgacaa

SEQ ID NO: 5134111 - DNA, 25 bp, Homo sapien
ttatttctgtgggtatattcgaaac

SEQ ID NO: 5134112 - DNA, 25 bp, Homo sapien
ggtatattcgaaacagaatctttct

SEQ ID NO: 5134113 - DNA, 25 bp, Homo sapien
ctgttccagattgttgtccatcctt

SEQ ID NO: 5134114 - DNA, 25 bp, Homo sapien
tgtgggtatattcgaaacagaatct

SEQ ID NO: 5134115 - DNA, 25 bp, Homo sapien
gcaagatatccgaatgattaaacca

SEQ ID NO: 5134116 - DNA, 25 bp, Homo sapien
gactttcatgcaagatatccgaatg

SEQ ID NO: 5134117 - DNA, 25 bp, Homo sapien
gcaggtggtacatgcacccgcatga

SEQ ID NO: 5134118 - DNA, 25 bp, Homo sapien
tgcacccgcatgactttcatgcaag

SEQ ID NO: 5134119 - DNA, 25 bp, Homo sapien
caggccggttgtttctgagaagaca

SEQ ID NO: 5134120 - DNA, 25 bp, Homo sapien
tccaggccggttgtttctgagaaga

SEQ ID NO: 5134121 - DNA, 25 bp, Homo sapien
cttccaggccggttgtttctgagaa

SEQ ID NO: 5134122 - DNA, 25 bp, Homo sapien
ccaggccggttgtttctgagaagac

SEQ ID NO: 5134123 - DNA, 25 bp, Homo sapien
tgtcccacgtatttgtccatccttt

SEQ ID NO: 5134124 - DNA, 25 bp, Homo sapien
gtcccacgtatttgtccatccttta

SEQ ID NO: 5134125 - DNA, 25 bp, Homo sapien
cctgcttccagtagttcttggagaa

SEQ ID NO: 5134126 - DNA, 25 bp, Homo sapien
aatagtcttgttgggagtatcatgc

SEQ ID NO: 5134127 - DNA, 25 bp, Homo sapien
tacccaagagttagctccttgaaca

SEQ ID NO: 5134128 - DNA, 25 bp, Homo sapien
aacgagtcagtgtgctttatcccaa

SEQ ID NO: 5134129 - DNA, 25 bp, Homo sapien
tctgggccgattgtttctgaggaga

SEQ ID NO: 5134130 - DNA, 25 bp, Homo sapien
tgggccgattgtttctgaggagaca

SEQ ID NO: 5134131 - DNA, 25 bp, Homo sapien
ctgggccgattgtttctgaggagac

SEQ ID NO: 5134132 - DNA, 25 bp, Homo sapien
cttctgggccgattgtttctgagga

SEQ ID NO: 5134133 - DNA, 25 bp, Homo sapien
ttattcttgtggcaatattcaaaag

SEQ ID NO: 5134134 - DNA, 25 bp, Homo sapien
tcttgtggcaatattcaaaagagaa

SEQ ID NO: 5134135 - DNA, 25 bp, Homo sapien
ttcttgtggcaatattcaaaagaga

SEQ ID NO: 5134136 - DNA, 25 bp, Homo sapien
tattcttgtggcaatattcaaaaga

SEQ ID NO: 5134137 - DNA, 25 bp, Homo sapien
cttcaaggtgggcagattctcagga

SEQ ID NO: 5134138 - DNA, 25 bp, Homo sapien
tcaaggtgggcagattctcaggata

SEQ ID NO: 5134139 - DNA, 25 bp, Homo sapien
caaggtgggcagattctcaggatac

SEQ ID NO: 5134140 - DNA, 25 bp, Homo sapien
aaggtgggcagattctcaggatact

SEQ ID NO: 5134141 - DNA, 25 bp, Homo sapien
tttggtggctgtattcagaacagaa

SEQ ID NO: 5134142 - DNA, 25 bp, Homo sapien
ttggtggctgtattcagaacagaat

SEQ ID NO: 5134143 - DNA, 25 bp, Homo sapien
ttcatattcttcaagcctcttttgc

SEQ ID NO: 5134144 - DNA, 25 bp, Homo sapien
tcttttgctctccctctgatgccat

SEQ ID NO: 5134145 - DNA, 25 bp, Homo sapien
ctgtggctggttattttcatattct

SEQ ID NO: 5134146 - DNA, 25 bp, Homo sapien
cctcttttgctctccctctgatgcc

SEQ ID NO: 5134147 - DNA, 25 bp, Homo sapien
actcagctctgcaccaagtggacct

SEQ ID NO: 5134148 - DNA, 25 bp, Homo sapien
gacagaaagttaataaggagaccca

SEQ ID NO: 5134149 - DNA, 25 bp, Homo sapien
cagaaagttaataaggagacccagg

SEQ ID NO: 5134150 - DNA, 25 bp, Homo sapien
gttaataaggagacccaggaattga

SEQ ID NO: 5134151 - DNA, 25 bp, Homo sapien
tgggttactcccaccctactactgc

SEQ ID NO: 5134152 - DNA, 25 bp, Homo sapien
tgcgcccatggagtctaactgattg

SEQ ID NO: 5134153 - DNA, 25 bp, Homo sapien
cctgcgcccatggagtctaactgat

SEQ ID NO: 5134154 - DNA, 25 bp, Homo sapien
tcctgcgcccatggagtctaactga

SEQ ID NO: 5134155 - DNA, 25 bp, Homo sapien
aatatgacattcttacaattacagc

SEQ ID NO: 5134156 - DNA, 25 bp, Homo sapien
caaagcgagtcaccgtcctctgaga

SEQ ID NO: 5134157 - DNA, 25 bp, Homo sapien
ggtcatccctagaatgtatttggtt

SEQ ID NO: 5134158 - DNA, 25 bp, Homo sapien
catgttgatcaatgagtaatatgac

SEQ ID NO: 5134159 - DNA, 25 bp, Homo sapien
acaaacacactgtgtgtatcattca

SEQ ID NO: 5134160 - DNA, 25 bp, Homo sapien
caaacacactgtgtgtatcattcac

SEQ ID NO: 5134161 - DNA, 25 bp, Homo sapien
aaacacactgtgtgtatcattcaca

SEQ ID NO: 5134162 - DNA, 25 bp, Homo sapien
aacacactgtgtgtatcattcacac

SEQ ID NO: 5134163 - DNA, 25 bp, Homo sapien
tcagacaatccccaacttaaggtgg

SEQ ID NO: 5134164 - DNA, 25 bp, Homo sapien
ggctgtccatatccaaaaagtgaac

SEQ ID NO: 5134165 - DNA, 25 bp, Homo sapien
cagcttatgactgacaaaggcagga

SEQ ID NO: 5134166 - DNA, 25 bp, Homo sapien
tagataacacataagcaaccagctt

SEQ ID NO: 5134167 - DNA, 25 bp, Homo sapien
taaactcagataggtcctgtaaaaa

SEQ ID NO: 5134168 - DNA, 25 bp, Homo sapien
gcctacaaggtggaagatattatag

SEQ ID NO: 5134169 - DNA, 25 bp, Homo sapien
tttttggatataaaggactgtgcat

SEQ ID NO: 5134170 - DNA, 25 bp, Homo sapien
gataagacaacacctctgctattgt

SEQ ID NO: 5134171 - DNA, 25 bp, Homo sapien
ttcgaatttttactctaagttgctc

SEQ ID NO: 5134172 - DNA, 25 bp, Homo sapien
cgaatttttactctaagttgctcac

SEQ ID NO: 5134173 - DNA, 25 bp, Homo sapien
catgctttaactgcgattttatttc

SEQ ID NO: 5134174 - DNA, 25 bp, Homo sapien
tttttactctaagttgctcacagtg

SEQ ID NO: 5134175 - DNA, 25 bp, Homo sapien
cagaagaatttatccaatgtaaata

SEQ ID NO: 5134176 - DNA, 25 bp, Homo sapien
ttaaaacctgaaattcaattcatca

SEQ ID NO: 5134177 - DNA, 25 bp, Homo sapien
gaagtattcacaattaagaacttgt

SEQ ID NO: 5134178 - DNA, 25 bp, Homo sapien
catcagcttctatcctatattgctc

SEQ ID NO: 5134179 - DNA, 25 bp, Homo sapien
tccacctctgctgatttgagagccg

SEQ ID NO: 5134180 - DNA, 25 bp, Homo sapien
gctgatttgagagccggtttaattg

SEQ ID NO: 5134181 - DNA, 25 bp, Homo sapien
tcacatcagcttctatcctatattg

SEQ ID NO: 5134182 - DNA, 25 bp, Homo sapien
ttccattgtattgtatccacttttg

SEQ ID NO: 5134183 - DNA, 25 bp, Homo sapien
ttttgctttagctcactttgcacgt

SEQ ID NO: 5134184 - DNA, 25 bp, Homo sapien
ccattgtattgtatccacttttgta

SEQ ID NO: 5134185 - DNA, 25 bp, Homo sapien
tttgctttagctcactttgcacgtg

SEQ ID NO: 5134186 - DNA, 25 bp, Homo sapien
gacatcatctcgtttttgttgaagc

SEQ ID NO: 5134187 - DNA, 25 bp, Homo sapien
tgacgcgatgaagcatccagcagag

SEQ ID NO: 5134188 - DNA, 25 bp, Homo sapien
ttctaaataggtgcagtgacgcgat

SEQ ID NO: 5134189 - DNA, 25 bp, Homo sapien
ccagcagagcttttgttgctgatcc

SEQ ID NO: 5134190 - DNA, 25 bp, Homo sapien
gcttgcctcaccatgccaatagaga

SEQ ID NO: 5134191 - DNA, 25 bp, Homo sapien
tcaccatgccaatagagaaatcatt

SEQ ID NO: 5134192 - DNA, 25 bp, Homo sapien
gaaagccatccactataaaatttta

SEQ ID NO: 5134193 - DNA, 25 bp, Homo sapien
ctggcttgcctcaccatgccaatag

SEQ ID NO: 5134194 - DNA, 25 bp, Homo sapien
caaaattaaaatcgacaaagtcagt

SEQ ID NO: 5134195 - DNA, 25 bp, Homo sapien
tttattatagcaaagcaacttgcac

SEQ ID NO: 5134196 - DNA, 25 bp, Homo sapien
tacaggatcttattgactctcccat

SEQ ID NO: 5134197 - DNA, 25 bp, Homo sapien
gaattccaaacactaccacatcaac

SEQ ID NO: 5134198 - DNA, 25 bp, Homo sapien
atgtccatcagtagatgaatgaatc

SEQ ID NO: 5134199 - DNA, 25 bp, Homo sapien
attacatttggaaatgacctaaatg

SEQ ID NO: 5134200 - DNA, 25 bp, Homo sapien
tccatcagtagatgaatgaatcaac

SEQ ID NO: 5134201 - DNA, 25 bp, Homo sapien
aattacatttggaaatgacctaaat

SEQ ID NO: 5134202 - DNA, 25 bp, Homo sapien
ttttgtgtgtcgccttccatctcct

SEQ ID NO: 5134203 - DNA, 25 bp, Homo sapien
tcttatagtagctgtaagttgatcc

SEQ ID NO: 5134204 - DNA, 25 bp, Homo sapien
gtgtgtcgccttccatctccttagt

SEQ ID NO: 5134205 - DNA, 25 bp, Homo sapien
tgtcgccttccatctccttagtaca

SEQ ID NO: 5134206 - DNA, 25 bp, Homo sapien
tttcatactacagtgctcttttgct

SEQ ID NO: 5134207 - DNA, 25 bp, Homo sapien
ttttcatactacagtgctcttttgc

SEQ ID NO: 5134208 - DNA, 25 bp, Homo sapien
caggattttctcaagccgctcaatt

SEQ ID NO: 5134209 - DNA, 25 bp, Homo sapien
acttgaatgctgcaggattttctca

SEQ ID NO: 5134210 - DNA, 25 bp, Homo sapien
ttttctcaagccgctcaatttggtc

SEQ ID NO: 5134211 - DNA, 25 bp, Homo sapien
ctcaagccgctcaatttggtcatcc

SEQ ID NO: 5134212 - DNA, 25 bp, Homo sapien
gacaagggatatttaacccatccta

SEQ ID NO: 5134213 - DNA, 25 bp, Homo sapien
gatatttaacccatcctactggaaa

SEQ ID NO: 5134214 - DNA, 25 bp, Homo sapien
gacagaaattaagagatcagcttac

SEQ ID NO: 5134215 - DNA, 25 bp, Homo sapien
ttggacaagggatatttaacccatc

SEQ ID NO: 5134216 - DNA, 25 bp, Homo sapien
cttcatctagctctcaaacacctgc

SEQ ID NO: 5134217 - DNA, 25 bp, Homo sapien
tctagctctcaaacacctgcagcat

SEQ ID NO: 5134218 - DNA, 25 bp, Homo sapien
atctagctctcaaacacctgcagca

SEQ ID NO: 5134219 - DNA, 25 bp, Homo sapien
tcatctagctctcaaacacctgcag

SEQ ID NO: 5134220 - DNA, 25 bp, Homo sapien
agagtttatttcagaaatcaatgat

SEQ ID NO: 5134221 - DNA, 25 bp, Homo sapien
taattcataaattttggcaacatac

SEQ ID NO: 5134222 - DNA, 25 bp, Homo sapien
tttatttcagaaatcaatgatttga

SEQ ID NO: 5134223 - DNA, 25 bp, Homo sapien
tcagaaatcaatgatttgaatttaa

SEQ ID NO: 5134224 - DNA, 25 bp, Homo sapien
gtgaagacgatcactgtggagctcc

SEQ ID NO: 5134225 - DNA, 25 bp, Homo sapien
gctggaggtgaagacgatcactgtg

SEQ ID NO: 5134226 - DNA, 25 bp, Homo sapien
aaacacatgtaggatagagggaaga

SEQ ID NO: 5134227 - DNA, 25 bp, Homo sapien
ctgtggagctccatgtagtctagtt

SEQ ID NO: 5134228 - DNA, 25 bp, Homo sapien
atattgtaggctttttggtagaggc

SEQ ID NO: 5134229 - DNA, 25 bp, Homo sapien
gtagaggcaattcataggttgatat

SEQ ID NO: 5134230 - DNA, 25 bp, Homo sapien
tgtgacctagatcccttgaacgagc

SEQ ID NO: 5134231 - DNA, 25 bp, Homo sapien
cgtgaagagataggagacaatgaca

SEQ ID NO: 5134232 - DNA, 25 bp, Homo sapien
gatggtcccatcgtgaagagatagg

SEQ ID NO: 5134233 - DNA, 25 bp, Homo sapien
cgagcagttcacagtaggattttca

SEQ ID NO: 5134234 - DNA, 25 bp, Homo sapien
gtttcaggatggtgattcaagcgta

SEQ ID NO: 5134235 - DNA, 25 bp, Homo sapien
tctagtgcagaagctatagagcagc

SEQ ID NO: 5134236 - DNA, 25 bp, Homo sapien
gcatgtcacacatttaacgggaaac

SEQ ID NO: 5134237 - DNA, 25 bp, Homo sapien
tactcattagtagattctagtgcag

SEQ ID NO: 5134238 - DNA, 25 bp, Homo sapien
gatgattcccctcacaattgcttga

SEQ ID NO: 5134239 - DNA, 25 bp, Homo sapien
aaggtagccgctagaagaattgact

SEQ ID NO: 5134240 - DNA, 25 bp, Homo sapien
tatttgtgagaagaccgaaggtgtt

SEQ ID NO: 5134241 - DNA, 25 bp, Homo sapien
tctgttcaggttatcggagtctccc

SEQ ID NO: 5134242 - DNA, 25 bp, Homo sapien
tatgcagactctacttaccgacagc

SEQ ID NO: 5134243 - DNA, 25 bp, Homo sapien
gaaatgtaatgctctggaaccctag

SEQ ID NO: 5134244 - DNA, 25 bp, Homo sapien
ggaaccctaggcatatatgaaccag

SEQ ID NO: 5134245 - DNA, 25 bp, Homo sapien
ggtgtggactgataacaaacctctc

SEQ ID NO: 5134246 - DNA, 25 bp, Homo sapien
tagagttaaagctccacaacactgg

SEQ ID NO: 5134247 - DNA, 25 bp, Homo sapien
gatgcaaccctgatagcagtcaaca

SEQ ID NO: 5134248 - DNA, 25 bp, Homo sapien
catggtagtggcatataaatggaca

SEQ ID NO: 5134249 - DNA, 25 bp, Homo sapien
cacttcatggttacaagtaccagcc

SEQ ID NO: 5134250 - DNA, 25 bp, Homo sapien
gccatttcatcccaagaattcaaat

SEQ ID NO: 5134251 - DNA, 25 bp, Homo sapien
gaccgccatgccagggataattgaa

SEQ ID NO: 5134252 - DNA, 25 bp, Homo sapien
gctggagtggctaagttgcacaaac

SEQ ID NO: 5134253 - DNA, 25 bp, Homo sapien
ctggaggtcccagtgcggtgatccc

SEQ ID NO: 5134254 - DNA, 25 bp, Homo sapien
gctacgtgtctcaaacctaagatgt

SEQ ID NO: 5134255 - DNA, 25 bp, Homo sapien
tgacaatgtacataactgctacgtg

SEQ ID NO: 5134256 - DNA, 25 bp, Homo sapien
ggtgtgtggccaagatgactgacta

SEQ ID NO: 5134257 - DNA, 25 bp, Homo sapien
tagaagaagctagggtgcacggctc

SEQ ID NO: 5134258 - DNA, 25 bp, Homo sapien
tgagactctccaaatcccgaaggct

SEQ ID NO: 5134259 - DNA, 25 bp, Homo sapien
ccttcttaaagcagtagtccggcca

SEQ ID NO: 5134260 - DNA, 25 bp, Homo sapien
tgtgctgtgctaatggatccctctg

SEQ ID NO: 5134261 - DNA, 25 bp, Homo sapien
tctgtccctggtccgctgagactct

SEQ ID NO: 5134262 - DNA, 25 bp, Homo sapien
tactggctcaacagttctggtaggg

SEQ ID NO: 5134263 - DNA, 25 bp, Homo sapien
tgtttgtctcctcagagttccacca

SEQ ID NO: 5134264 - DNA, 25 bp, Homo sapien
gagtgtgtagaacccatgagagatg

SEQ ID NO: 5134265 - DNA, 25 bp, Homo sapien
ctttcctaactttgaggcagaagag

SEQ ID NO: 5134266 - DNA, 25 bp, Homo sapien
gcttctagtcggctatcttgcccct

SEQ ID NO: 5134267 - DNA, 25 bp, Homo sapien
tagggtgtcaatttgagatatgtct

SEQ ID NO: 5134268 - DNA, 25 bp, Homo sapien
agggtgtcaatttgagatatgtcta

SEQ ID NO: 5134269 - DNA, 25 bp, Homo sapien
gggtgtcaatttgagatatgtctag

SEQ ID NO: 5134270 - DNA, 25 bp, Homo sapien
ggtgtcaatttgagatatgtctagc

SEQ ID NO: 5134271 - DNA, 25 bp, Homo sapien
ttgaagaggttcttcacacccatcg

SEQ ID NO: 5134272 - DNA, 25 bp, Homo sapien
ttggtgtataggaattgaagaatat

SEQ ID NO: 5134273 - DNA, 25 bp, Homo sapien
aagaggttcttcacacccatcgtta

SEQ ID NO: 5134274 - DNA, 25 bp, Homo sapien
aggttcttcacacccatcgttagct

SEQ ID NO: 5134275 - DNA, 25 bp, Homo sapien
aataggtattccttcccccattgct

SEQ ID NO: 5134276 - DNA, 25 bp, Homo sapien
gattagtgtggccttgtagtatagt

SEQ ID NO: 5134277 - DNA, 25 bp, Homo sapien
atgctgttttgattagtgtggcctt

SEQ ID NO: 5134278 - DNA, 25 bp, Homo sapien
taaatagggaatcctggccaagtgc

SEQ ID NO: 5134279 - DNA, 25 bp, Homo sapien
tgtgttaattagctgaagtttatgg

SEQ ID NO: 5134280 - DNA, 25 bp, Homo sapien
tagctgaagtttatggcttccagct

SEQ ID NO: 5134281 - DNA, 25 bp, Homo sapien
tgttaattagctgaagtttatggct

SEQ ID NO: 5134282 - DNA, 25 bp, Homo sapien
taattagctgaagtttatggcttcc

SEQ ID NO: 5134283 - DNA, 25 bp, Homo sapien
atttttactgcactgtgatctcagt

SEQ ID NO: 5134284 - DNA, 25 bp, Homo sapien
catatgatgatgtgaggaatgcata

SEQ ID NO: 5134285 - DNA, 25 bp, Homo sapien
agagtatgtggcatatgatgatgtg

SEQ ID NO: 5134286 - DNA, 25 bp, Homo sapien
gatgatgtgaggaatgcatattctg

SEQ ID NO: 5134287 - DNA, 25 bp, Homo sapien
tgtattagtctgctagcagactttc

SEQ ID NO: 5134288 - DNA, 25 bp, Homo sapien
gctagcagactttcttattaatatt

SEQ ID NO: 5134289 - DNA, 25 bp, Homo sapien
tattagtctgctagcagactttctt

SEQ ID NO: 5134290 - DNA, 25 bp, Homo sapien
agtctgctagcagactttcttatta

SEQ ID NO: 5134291 - DNA, 25 bp, Homo sapien
acatcaagtcaagcagagagtcaaa

SEQ ID NO: 5134292 - DNA, 25 bp, Homo sapien
cagtcctatacatcaagtcaagcag

SEQ ID NO: 5134293 - DNA, 25 bp, Homo sapien
tgcccttctagtcagaagtgccaaa

SEQ ID NO: 5134294 - DNA, 25 bp, Homo sapien
aaattactagcagtcctatacatca

SEQ ID NO: 5134295 - DNA, 25 bp, Homo sapien
gtgggcttcttattgtctgctcact

SEQ ID NO: 5134296 - DNA, 25 bp, Homo sapien
tgggcttcttattgtctgctcactc

SEQ ID NO: 5134297 - DNA, 25 bp, Homo sapien
gcatgtgtccagctagtctatcctt

SEQ ID NO: 5134298 - DNA, 25 bp, Homo sapien
tcttctcctgattatctgtcactca

SEQ ID NO: 5134299 - DNA, 25 bp, Homo sapien
gtgacttcctatggacacagccaaa

SEQ ID NO: 5134300 - DNA, 25 bp, Homo sapien
tagtctatccttcagccaaacttcc

SEQ ID NO: 5134301 - DNA, 25 bp, Homo sapien
tctctgtgaccgtgaaagacggctg

SEQ ID NO: 5134302 - DNA, 25 bp, Homo sapien
tctgtgaccgtgaaagacggctgtg

SEQ ID NO: 5134303 - DNA, 25 bp, Homo sapien
tgtgaccgtgaaagacggctgtgct

SEQ ID NO: 5134304 - DNA, 25 bp, Homo sapien
gaccgtgaaagacggctgtgctctt

SEQ ID NO: 5134305 - DNA, 25 bp, Homo sapien
aatattgtgctacaaaccaattctt

SEQ ID NO: 5134306 - DNA, 25 bp, Homo sapien
atattgtgctacaaaccaattcttg

SEQ ID NO: 5134307 - DNA, 25 bp, Homo sapien
aaatattgtgctacaaaccaattct

SEQ ID NO: 5134308 - DNA, 25 bp, Homo sapien
tctgtctgccactgtagtgaagcac

SEQ ID NO: 5134309 - DNA, 25 bp, Homo sapien
gcctctgcagttcactctgctgctt

SEQ ID NO: 5134310 - DNA, 25 bp, Homo sapien
tgcttcagatgaaaattttcaggtc

SEQ ID NO: 5134311 - DNA, 25 bp, Homo sapien
agtgaagcactgctttgggtagtgt

SEQ ID NO: 5134312 - DNA, 25 bp, Homo sapien
gaatactacagatgtccaacacttc

SEQ ID NO: 5134313 - DNA, 25 bp, Homo sapien
aagaggcccgcttttagcctccaca

SEQ ID NO: 5134314 - DNA, 25 bp, Homo sapien
cctagtccaatgtgaataacaaaat

SEQ ID NO: 5134315 - DNA, 25 bp, Homo sapien
ccaggaatactacagatgtccaaca

SEQ ID NO: 5134316 - DNA, 25 bp, Homo sapien
gagcatctcatgtttattaaggaga

SEQ ID NO: 5134317 - DNA, 25 bp, Homo sapien
gatgtgtttcaccatactgaaggca

SEQ ID NO: 5134318 - DNA, 25 bp, Homo sapien
gagactgggtgtccttgtagaaagt

SEQ ID NO: 5134319 - DNA, 25 bp, Homo sapien
tgtagaaagtcctgccatgcacaac

SEQ ID NO: 5134320 - DNA, 25 bp, Homo sapien
ttcctatgctgtgtcaggcaagaga

SEQ ID NO: 5134321 - DNA, 25 bp, Homo sapien
tcctatgctgtgtcaggcaagagaa

SEQ ID NO: 5134322 - DNA, 25 bp, Homo sapien
tcactgtgtggccgttcagcatctt

SEQ ID NO: 5134323 - DNA, 25 bp, Homo sapien
tcacctgctaagcttgcaagtgcaa

SEQ ID NO: 5134324 - DNA, 25 bp, Homo sapien
gatctaggtcctattccaaatttga

SEQ ID NO: 5134325 - DNA, 25 bp, Homo sapien
gattgtagatctaggggatcactga

SEQ ID NO: 5134326 - DNA, 25 bp, Homo sapien
gcagagagaacagggtactggttaa

SEQ ID NO: 5134327 - DNA, 25 bp, Homo sapien
caagtagatccccaccagttgctgg

SEQ ID NO: 5134328 - DNA, 25 bp, Homo sapien
cagggaagttcacatctcagtggtc

SEQ ID NO: 5134329 - DNA, 25 bp, Homo sapien
tcacgtgtggtcaaaagggaattag

SEQ ID NO: 5134330 - DNA, 25 bp, Homo sapien
aatgcctgtgaactactggctagca

SEQ ID NO: 5134331 - DNA, 25 bp, Homo sapien
ctcataacctgccacaatttactgg

SEQ ID NO: 5134332 - DNA, 25 bp, Homo sapien
tgagagctcacctgctatcatgagg

SEQ ID NO: 5134333 - DNA, 25 bp, Homo sapien
tttactggcagattgtgaagcggga

SEQ ID NO: 5134334 - DNA, 25 bp, Homo sapien
tcctatcagcactcataaattacac

SEQ ID NO: 5134335 - DNA, 25 bp, Homo sapien
caaaaggatcgcttgggtgccaaga

SEQ ID NO: 5134336 - DNA, 25 bp, Homo sapien
aacagagctcttgacctataaagta

SEQ ID NO: 5134337 - DNA, 25 bp, Homo sapien
catttaatgctgaaatcagacaatg

SEQ ID NO: 5134338 - DNA, 25 bp, Homo sapien
aatctgacactttgggattccaggc

SEQ ID NO: 5134339 - DNA, 25 bp, Homo sapien
ccactcaaaatacagttctgtaatc

SEQ ID NO: 5134340 - DNA, 25 bp, Homo sapien
ctcaaaatacagttctgtaatcaga

SEQ ID NO: 5134341 - DNA, 25 bp, Homo sapien
ccaccaacaacaacatcagcccaac

SEQ ID NO: 5134342 - DNA, 25 bp, Homo sapien
ctctatgttcagcccactcaaaata

SEQ ID NO: 5134343 - DNA, 25 bp, Homo sapien
tttccacataggtttttactgtcat

SEQ ID NO: 5134344 - DNA, 25 bp, Homo sapien
ttttccacataggtttttactgtca

SEQ ID NO: 5134345 - DNA, 25 bp, Homo sapien
caggtgttcccttcaaaagtgcttc

SEQ ID NO: 5134346 - DNA, 25 bp, Homo sapien
ccagctgtctccatcagaaagtctg

SEQ ID NO: 5134347 - DNA, 25 bp, Homo sapien
gcgagaatcttctgtgaggcaagcc

SEQ ID NO: 5134348 - DNA, 25 bp, Homo sapien
tgctgcttctgcacctcacttgagt

SEQ ID NO: 5134349 - DNA, 25 bp, Homo sapien
caggacggtgtctttaatcagagct

SEQ ID NO: 5134350 - DNA, 25 bp, Homo sapien
tccaaaatggtcacaagagtcttct

SEQ ID NO: 5134351 - DNA, 25 bp, Homo sapien
cggcaaacaccaggacggtgtcttt

SEQ ID NO: 5134352 - DNA, 25 bp, Homo sapien
caggccctatcctgacggcaaacac

SEQ ID NO: 5134353 - DNA, 25 bp, Homo sapien
gaagagcttactggacaatagtcca

SEQ ID NO: 5134354 - DNA, 25 bp, Homo sapien
agcccagaagagcttactggacaat

SEQ ID NO: 5134355 - DNA, 25 bp, Homo sapien
ccagaagagcttactggacaatagt

SEQ ID NO: 5134356 - DNA, 25 bp, Homo sapien
aaccacaggagtccggggatacaca

SEQ ID NO: 5134357 - DNA, 25 bp, Homo sapien
gccttcttggcaggctgccagctct

SEQ ID NO: 5134358 - DNA, 25 bp, Homo sapien
tgccagctctctggaggctcttggg

SEQ ID NO: 5134359 - DNA, 25 bp, Homo sapien
catctggaagccactcttgctggct

SEQ ID NO: 5134360 - DNA, 25 bp, Homo sapien
ttgctggcttctgtggaggccaagg

SEQ ID NO: 5134361 - DNA, 25 bp, Homo sapien
ctgtctctgagttagcagcatcagg

SEQ ID NO: 5134362 - DNA, 25 bp, Homo sapien
gctggctcataggaaagctgctcat

SEQ ID NO: 5134363 - DNA, 25 bp, Homo sapien
tcccgaagctcagctgaatatctga

SEQ ID NO: 5134364 - DNA, 25 bp, Homo sapien
gtgactccccagtcccgaagctcag

SEQ ID NO: 5134365 - DNA, 25 bp, Homo sapien
agctggctcataggaaagctgctca

SEQ ID NO: 5134366 - DNA, 25 bp, Homo sapien
tatgtctctcaaaggtgagtcccac

SEQ ID NO: 5134367 - DNA, 25 bp, Homo sapien
tggaagacttgcactgaacagctat

SEQ ID NO: 5134368 - DNA, 25 bp, Homo sapien
tagagcaagggatgcaccctcctct

SEQ ID NO: 5134369 - DNA, 25 bp, Homo sapien
tctgagcagcctgtaggaaggacag

SEQ ID NO: 5134370 - DNA, 25 bp, Homo sapien
cctgtggagacaattgatcatatgg

SEQ ID NO: 5134371 - DNA, 25 bp, Homo sapien
gagacaattgatcatatgggtcagc

SEQ ID NO: 5134372 - DNA, 25 bp, Homo sapien
aattgatcatatgggtcagcaagac

SEQ ID NO: 5134373 - DNA, 25 bp, Homo sapien
tgtggagacaattgatcatatgggt

SEQ ID NO: 5134374 - DNA, 25 bp, Homo sapien
tgccctcactgaagagaaagtgttc

SEQ ID NO: 5134375 - DNA, 25 bp, Homo sapien
gctgccctcactgaagagaaagtgt

SEQ ID NO: 5134376 - DNA, 25 bp, Homo sapien
ctgccctcactgaagagaaagtgtt

SEQ ID NO: 5134377 - DNA, 25 bp, Homo sapien
agtggcatcgatggtgcagggcaga

SEQ ID NO: 5134378 - DNA, 25 bp, Homo sapien
taaggatgatgtccccacatactgc

SEQ ID NO: 5134379 - DNA, 25 bp, Homo sapien
gaggctggcgtctgggtaaggatga

SEQ ID NO: 5134380 - DNA, 25 bp, Homo sapien
agaggaaagtggcatcgatggtgca

SEQ ID NO: 5134381 - DNA, 25 bp, Homo sapien
ccaggttctagtcttctcatgtcga

SEQ ID NO: 5134382 - DNA, 25 bp, Homo sapien
gtcgatgtagttgattccacttccc

SEQ ID NO: 5134383 - DNA, 25 bp, Homo sapien
gagtaatgctccctggactccccag

SEQ ID NO: 5134384 - DNA, 25 bp, Homo sapien
cttctcatgtcgatgtagttgattc

SEQ ID NO: 5134385 - DNA, 25 bp, Homo sapien
tgatcaggctgtattccatggaaac

SEQ ID NO: 5134386 - DNA, 25 bp, Homo sapien
tgtctgatgacagcctgctcctggc

SEQ ID NO: 5134387 - DNA, 25 bp, Homo sapien
tgtgctgctctaacctagacatagg

SEQ ID NO: 5134388 - DNA, 25 bp, Homo sapien
tgtatagtaccaacactgaagagtc

SEQ ID NO: 5134389 - DNA, 25 bp, Homo sapien
cacacagaccctcactgagggctga

SEQ ID NO: 5134390 - DNA, 25 bp, Homo sapien
cacagaccctcactgagggctgagg

SEQ ID NO: 5134391 - DNA, 25 bp, Homo sapien
gccacacagaccctcactgagggct

SEQ ID NO: 5134392 - DNA, 25 bp, Homo sapien
acacagaccctcactgagggctgag

SEQ ID NO: 5134393 - DNA, 25 bp, Homo sapien
ctctggtgaagagggagaactcggg

SEQ ID NO: 5134394 - DNA, 25 bp, Homo sapien
caggagaccctcgtggacgtgggga

SEQ ID NO: 5134395 - DNA, 25 bp, Homo sapien
acgtggggacctggtgttgctcctc

SEQ ID NO: 5134396 - DNA, 25 bp, Homo sapien
agagggagaactcgggcttcacctt

SEQ ID NO: 5134397 - DNA, 25 bp, Homo sapien
ggctttccccttcactgtacttctg

SEQ ID NO: 5134398 - DNA, 25 bp, Homo sapien
gcaggctttccccttcactgtactt

SEQ ID NO: 5134399 - DNA, 25 bp, Homo sapien
tgcagtctgtcttcactcgcaggct

SEQ ID NO: 5134400 - DNA, 25 bp, Homo sapien
gtctgtcttcactcgcaggctttcc

SEQ ID NO: 5134401 - DNA, 25 bp, Homo sapien
cagagagcatttttcaaattgcagc

SEQ ID NO: 5134402 - DNA, 25 bp, Homo sapien
gagagcatttttcaaattgcagcca

SEQ ID NO: 5134403 - DNA, 25 bp, Homo sapien
ctgcagagagcatttttcaaattgc

SEQ ID NO: 5134404 - DNA, 25 bp, Homo sapien
gcagagagcatttttcaaattgcag

SEQ ID NO: 5134405 - DNA, 25 bp, Homo sapien
gctgccacggatgcttctcctggtg

SEQ ID NO: 5134406 - DNA, 25 bp, Homo sapien
catcaagggaagcagatgtatgagg

SEQ ID NO: 5134407 - DNA, 25 bp, Homo sapien
acataaaccatcaagggaagcagat

SEQ ID NO: 5134408 - DNA, 25 bp, Homo sapien
aaaccatcaagggaagcagatgtat

SEQ ID NO: 5134409 - DNA, 25 bp, Homo sapien
tactgtcaacagtaactcccacagt

SEQ ID NO: 5134410 - DNA, 25 bp, Homo sapien
actgtcaacagtaactcccacagtg

SEQ ID NO: 5134411 - DNA, 25 bp, Homo sapien
ggacatgagggtccccgctcagctc

SEQ ID NO: 5134412 - DNA, 25 bp, Homo sapien
cagcatggacatgagggtccccgct

SEQ ID NO: 5134413 - DNA, 25 bp, Homo sapien
acacagcatggacatgagggtcccc

SEQ ID NO: 5134414 - DNA, 25 bp, Homo sapien
atggacatgagggtccccgctcagc

SEQ ID NO: 5134415 - DNA, 25 bp, Homo sapien
aagcatggtgcattcaccagggcca

SEQ ID NO: 5134416 - DNA, 25 bp, Homo sapien
ggctcagtagctgtgaatctgggat

SEQ ID NO: 5134417 - DNA, 25 bp, Homo sapien
gctctgactgaccagcagaaacctg

SEQ ID NO: 5134418 - DNA, 25 bp, Homo sapien
gatccccagctgctcaagcatggtg

SEQ ID NO: 5134419 - DNA, 25 bp, Homo sapien
ccagcaccaggaggcagacgagcag

SEQ ID NO: 5134420 - DNA, 25 bp, Homo sapien
gaaagcccagcaccaggaggcagac

SEQ ID NO: 5134421 - DNA, 25 bp, Homo sapien
agacgagcagggccaggaagcgcat

SEQ ID NO: 5134422 - DNA, 25 bp, Homo sapien
agcccagcaccaggaggcagacgag

SEQ ID NO: 5134423 - DNA, 25 bp, Homo sapien
tgtgtccagggttaaggcccctgca

SEQ ID NO: 5134424 - DNA, 25 bp, Homo sapien
tgtccagggttaaggcccctgcatg

SEQ ID NO: 5134425 - DNA, 25 bp, Homo sapien
gtgtccagggttaaggcccctgcat

SEQ ID NO: 5134426 - DNA, 25 bp, Homo sapien
gtccagggttaaggcccctgcatgg

SEQ ID NO: 5134427 - DNA, 25 bp, Homo sapien
tcttgtccagaagtttaggagccca

SEQ ID NO: 5134428 - DNA, 25 bp, Homo sapien
gtccagaagtttaggagcccagaaa

SEQ ID NO: 5134429 - DNA, 25 bp, Homo sapien
ctagtaaaaggagtagacattagtg

SEQ ID NO: 5134430 - DNA, 25 bp, Homo sapien
cattagtgtcccagtaacttcaaat

SEQ ID NO: 5134431 - DNA, 25 bp, Homo sapien
gggtttagggcaatgaagccccatc

SEQ ID NO: 5134432 - DNA, 25 bp, Homo sapien
tccacatggaggtggctcggtgtct

SEQ ID NO: 5134433 - DNA, 25 bp, Homo sapien
gtctgagttgccagccacggatgag

SEQ ID NO: 5134434 - DNA, 25 bp, Homo sapien
agcctgggtttagggcaatgaagcc

SEQ ID NO: 5134435 - DNA, 25 bp, Homo sapien
gacccggagcattagcagccccagg

SEQ ID NO: 5134436 - DNA, 25 bp, Homo sapien
ccaggagctgagcagggagcctcat

SEQ ID NO: 5134437 - DNA, 25 bp, Homo sapien
cggggacccggagcattagcagccc

SEQ ID NO: 5134438 - DNA, 25 bp, Homo sapien
ccccaggagctgagcagggagcctc

SEQ ID NO: 5134439 - DNA, 25 bp, Homo sapien
ccccattctcctccctcatctccct

SEQ ID NO: 5134440 - DNA, 25 bp, Homo sapien
ccattctcctccctcatctccctgc

SEQ ID NO: 5134441 - DNA, 25 bp, Homo sapien
cattctcctccctcatctccctgct

SEQ ID NO: 5134442 - DNA, 25 bp, Homo sapien
caccccattctcctccctcatctcc

SEQ ID NO: 5134443 - DNA, 25 bp, Homo sapien
gaatgtccccactagatcctggaat

SEQ ID NO: 5134444 - DNA, 25 bp, Homo sapien
gtccccactagatcctggaatgatg

SEQ ID NO: 5134445 - DNA, 25 bp, Homo sapien
ccactagatcctggaatgatgacag

SEQ ID NO: 5134446 - DNA, 25 bp, Homo sapien
acagaatgtccccactagatcctgg

SEQ ID NO: 5134447 - DNA, 25 bp, Homo sapien
tctgttccaggatgtagcactgtgg

SEQ ID NO: 5134448 - DNA, 25 bp, Homo sapien
gagtcctcaacagcaaacctgcccc

SEQ ID NO: 5134449 - DNA, 25 bp, Homo sapien
gggcaatcccagcagagaggtttct

SEQ ID NO: 5134450 - DNA, 25 bp, Homo sapien
tgcccctgagttctccaacagcctc

SEQ ID NO: 5134451 - DNA, 25 bp, Homo sapien
gagtccctgcttgtgaataccttct

SEQ ID NO: 5134452 - DNA, 25 bp, Homo sapien
tccaggctccaaagtagtgtttgtg

SEQ ID NO: 5134453 - DNA, 25 bp, Homo sapien
gcttgtgaataccttctacagacat

SEQ ID NO: 5134454 - DNA, 25 bp, Homo sapien
aattttggttagatgtgagtccctg

SEQ ID NO: 5134455 - DNA, 25 bp, Homo sapien
tgagaggcggagcttccttgagagc

SEQ ID NO: 5134456 - DNA, 25 bp, Homo sapien
tgagcccacctgactcgactctctg

SEQ ID NO: 5134457 - DNA, 25 bp, Homo sapien
gagctttatgtttggggccatcaca

SEQ ID NO: 5134458 - DNA, 25 bp, Homo sapien
gactcgactctctgtggacacatcc

SEQ ID NO: 5134459 - DNA, 25 bp, Homo sapien
ctagaggcgacaggccaggagagtg

SEQ ID NO: 5134460 - DNA, 25 bp, Homo sapien
gagtctgggccatcacagtatcacc

SEQ ID NO: 5134461 - DNA, 25 bp, Homo sapien
tggagtctgggccatcacagtatca

SEQ ID NO: 5134462 - DNA, 25 bp, Homo sapien
agtggagtctgggccatcacagtat

SEQ ID NO: 5134463 - DNA, 25 bp, Homo sapien
ggtttctctatggggctgtaccact

SEQ ID NO: 5134464 - DNA, 25 bp, Homo sapien
gggaggtttctctatggggctgtac

SEQ ID NO: 5134465 - DNA, 25 bp, Homo sapien
gtttctctatggggctgtaccactg

SEQ ID NO: 5134466 - DNA, 25 bp, Homo sapien
ggaggtttctctatggggctgtacc

SEQ ID NO: 5134467 - DNA, 25 bp, Homo sapien
tcagggtggtcgtgcctcctgtcca

SEQ ID NO: 5134468 - DNA, 25 bp, Homo sapien
cacctcatgctgttgaggatgacca

SEQ ID NO: 5134469 - DNA, 25 bp, Homo sapien
gtttaccagcagacccgctcaatgg

SEQ ID NO: 5134470 - DNA, 25 bp, Homo sapien
ctttgggatatcagcatcaggtagg

SEQ ID NO: 5134471 - DNA, 25 bp, Homo sapien
aggaaggccaggagctgagcgggga

SEQ ID NO: 5134472 - DNA, 25 bp, Homo sapien
aaggccaggagctgagcggggatcc

SEQ ID NO: 5134473 - DNA, 25 bp, Homo sapien
gccaggagctgagcggggatcctca

SEQ ID NO: 5134474 - DNA, 25 bp, Homo sapien
gaaggccaggagctgagcggggatc

SEQ ID NO: 5134475 - DNA, 25 bp, Homo sapien
tggaggctgagtcatctggatgtca

SEQ ID NO: 5134476 - DNA, 25 bp, Homo sapien
gctgagtcatctggatgtcacatct

SEQ ID NO: 5134477 - DNA, 25 bp, Homo sapien
gaggctgagtcatctggatgtcaca

SEQ ID NO: 5134478 - DNA, 25 bp, Homo sapien
agtcatctggatgtcacatctggca

SEQ ID NO: 5134479 - DNA, 25 bp, Homo sapien
gtcaggaacttaggtgctttccctg

SEQ ID NO: 5134480 - DNA, 25 bp, Homo sapien
aatagttgtaaatgctttgactagc

SEQ ID NO: 5134481 - DNA, 25 bp, Homo sapien
tatccgctgccactgaactgagatg

SEQ ID NO: 5134482 - DNA, 25 bp, Homo sapien
tctgcaaactggatgccctataggt

SEQ ID NO: 5134483 - DNA, 25 bp, Homo sapien
tcagggtgccaatgtgaggaaaagc

SEQ ID NO: 5134484 - DNA, 25 bp, Homo sapien
cagaataccagtttctcagggtgcc

SEQ ID NO: 5134485 - DNA, 25 bp, Homo sapien
tacaaaaggatgtaccctgacatgc

SEQ ID NO: 5134486 - DNA, 25 bp, Homo sapien
taccaagaagacaagacatagacac

SEQ ID NO: 5134487 - DNA, 25 bp, Homo sapien
cagcctgtttggaaccttctgtgcc

SEQ ID NO: 5134488 - DNA, 25 bp, Homo sapien
ggtgcagcctgtttggaaccttctg

SEQ ID NO: 5134489 - DNA, 25 bp, Homo sapien
ttctgtgcctgcactggaccaccct

SEQ ID NO: 5134490 - DNA, 25 bp, Homo sapien
tgcaggtgcagcctgtttggaacct

SEQ ID NO: 5134491 - DNA, 25 bp, Homo sapien
tgatgtcaatgtttgctcttctcgg

SEQ ID NO: 5134492 - DNA, 25 bp, Homo sapien
tgtcaatgtttgctcttctcgggct

SEQ ID NO: 5134493 - DNA, 25 bp, Homo sapien
aaagtgtgcccgtggtgtcactgct

SEQ ID NO: 5134494 - DNA, 25 bp, Homo sapien
tgtgggcagcggtggtgatgtcaat

SEQ ID NO: 5134495 - DNA, 25 bp, Homo sapien
acaatagcttcaaggaccacaaatt

SEQ ID NO: 5134496 - DNA, 25 bp, Homo sapien
ccacaaatttaagggctctccagag

SEQ ID NO: 5134497 - DNA, 25 bp, Homo sapien
tcaaggaccacaaatttaagggctc

SEQ ID NO: 5134498 - DNA, 25 bp, Homo sapien
tagcttcaaggaccacaaatttaag

SEQ ID NO: 5134499 - DNA, 25 bp, Homo sapien
atgttttcaaagtacttagctgtgc

SEQ ID NO: 5134500 - DNA, 25 bp, Homo sapien
caaagtacttagctgtgccgtgtga

SEQ ID NO: 5134501 - DNA, 25 bp, Homo sapien
ttcaaagtacttagctgtgccgtgt

SEQ ID NO: 5134502 - DNA, 25 bp, Homo sapien
ttttcaaagtacttagctgtgccgt

SEQ ID NO: 5134503 - DNA, 25 bp, Homo sapien
tctctggggagagcctcttctctac

SEQ ID NO: 5134504 - DNA, 25 bp, Homo sapien
ggtcttcagaaggagagcacctatc

SEQ ID NO: 5134505 - DNA, 25 bp, Homo sapien
tcttctctacccacttgaaccggaa

SEQ ID NO: 5134506 - DNA, 25 bp, Homo sapien
tgaaccggaactccacgcatgtgct

SEQ ID NO: 5134507 - DNA, 25 bp, Homo sapien
tcaagtgaggtgcagaagcagcagc

SEQ ID NO: 5134508 - DNA, 25 bp, Homo sapien
cgaggaagcacttttgaagggaaca

SEQ ID NO: 5134509 - DNA, 25 bp, Homo sapien
taaaagcagcggaagctggcttggc

SEQ ID NO: 5134510 - DNA, 25 bp, Homo sapien
gaagattctcgccactcaagtgagg

SEQ ID NO: 5134511 - DNA, 25 bp, Homo sapien
tctctgcttgacttgatgtatagga

SEQ ID NO: 5134512 - DNA, 25 bp, Homo sapien
tgcttgacttgatgtataggactgc

SEQ ID NO: 5134513 - DNA, 25 bp, Homo sapien
gacttgatgtataggactgctagta

SEQ ID NO: 5134514 - DNA, 25 bp, Homo sapien
ttgacttgatgtataggactgctag

SEQ ID NO: 5134515 - DNA, 25 bp, Homo sapien
ctggacctcatccttacatcttatg

SEQ ID NO: 5134516 - DNA, 25 bp, Homo sapien
tgggtcaccagacaccttatacagg

SEQ ID NO: 5134517 - DNA, 25 bp, Homo sapien
ttcccaaagggacaatcaaagtgct

SEQ ID NO: 5134518 - DNA, 25 bp, Homo sapien
ggctgttgtctccacaaaccggaag

SEQ ID NO: 5134519 - DNA, 25 bp, Homo sapien
tggtcccaagaggtattccccacag

SEQ ID NO: 5134520 - DNA, 25 bp, Homo sapien
gccggatgtggataaccctttcaaa

SEQ ID NO: 5134521 - DNA, 25 bp, Homo sapien
tgataacgacatctcaggaaaattg

SEQ ID NO: 5134522 - DNA, 25 bp, Homo sapien
gtcaaagaatgataacgacatctca

SEQ ID NO: 5134523 - DNA, 25 bp, Homo sapien
aatcagcagccggatgtggataacc

SEQ ID NO: 5134524 - DNA, 25 bp, Homo sapien
cattgagcacaagacagtgacgaat

SEQ ID NO: 5134525 - DNA, 25 bp, Homo sapien
ctacattgagcacaagacagtgacg

SEQ ID NO: 5134526 - DNA, 25 bp, Homo sapien
tgagcacaagacagtgacgaatcca

SEQ ID NO: 5134527 - DNA, 25 bp, Homo sapien
tacattgagcacaagacagtgacga

SEQ ID NO: 5134528 - DNA, 25 bp, Homo sapien
cacaaatattgagtagaaacactgc

SEQ ID NO: 5134529 - DNA, 25 bp, Homo sapien
caactcttcacctttatctggctca

SEQ ID NO: 5134530 - DNA, 25 bp, Homo sapien
agagccaggagaagatgtgacttat

SEQ ID NO: 5134531 - DNA, 25 bp, Homo sapien
tatctacccattgacaacaccttcg

SEQ ID NO: 5134532 - DNA, 25 bp, Homo sapien
gagcagactcacgtgccttggaaga

SEQ ID NO: 5134533 - DNA, 25 bp, Homo sapien
tgcaccgagcctgaaaatcttacta

SEQ ID NO: 5134534 - DNA, 25 bp, Homo sapien
ttctctcctgagacaagagcttggg

SEQ ID NO: 5134535 - DNA, 25 bp, Homo sapien
tagatggcctaagatactaacaggg

SEQ ID NO: 5134536 - DNA, 25 bp, Homo sapien
cttatgcaggatgttcttttatcaa

SEQ ID NO: 5134537 - DNA, 25 bp, Homo sapien
atacatttcaacttatacatgccct

SEQ ID NO: 5134538 - DNA, 25 bp, Homo sapien
tttgctagagttactagtaatagaa

SEQ ID NO: 5134539 - DNA, 25 bp, Homo sapien
caacttatacatgccctttggatga

SEQ ID NO: 5134540 - DNA, 25 bp, Homo sapien
gctgtgtgattgctattagtcccaa

SEQ ID NO: 5134541 - DNA, 25 bp, Homo sapien
ttggtattaatacagccacacctgc

SEQ ID NO: 5134542 - DNA, 25 bp, Homo sapien
tgcatttcttataggcagcctgtag

SEQ ID NO: 5134543 - DNA, 25 bp, Homo sapien
tagttgaggttcttagacaagtgtc

SEQ ID NO: 5134544 - DNA, 25 bp, Homo sapien
tctttgacattggttcctgggtgta

SEQ ID NO: 5134545 - DNA, 25 bp, Homo sapien
catgacgcaaaatacctctttgtaa

SEQ ID NO: 5134546 - DNA, 25 bp, Homo sapien
tcagcatatccacattgatattgac

SEQ ID NO: 5134547 - DNA, 25 bp, Homo sapien
tttcagtaatacacacatgacgcaa

SEQ ID NO: 5134548 - DNA, 25 bp, Homo sapien
attaccaggcaagttaaagagcatg

SEQ ID NO: 5134549 - DNA, 25 bp, Homo sapien
gaaaaacatgcagtagcatttagta

SEQ ID NO: 5134550 - DNA, 25 bp, Homo sapien
tcaattaccaggcaagttaaagagc

SEQ ID NO: 5134551 - DNA, 25 bp, Homo sapien
taccaggcaagttaaagagcatgat

SEQ ID NO: 5134552 - DNA, 25 bp, Homo sapien
ccaagggtggtaggagatagagatg

SEQ ID NO: 5134553 - DNA, 25 bp, Homo sapien
ttttcaccaagggtggtaggagata

SEQ ID NO: 5134554 - DNA, 25 bp, Homo sapien
ggtggtaggagatagagatgaagta

SEQ ID NO: 5134555 - DNA, 25 bp, Homo sapien
ttcaccaagggtggtaggagataga

SEQ ID NO: 5134556 - DNA, 25 bp, Homo sapien
tcagcaaacagtcctactctgggct

SEQ ID NO: 5134557 - DNA, 25 bp, Homo sapien
gactagagacttacacagtatccaa

SEQ ID NO: 5134558 - DNA, 25 bp, Homo sapien
ttcaaattttgacagcacatgggca

SEQ ID NO: 5134559 - DNA, 25 bp, Homo sapien
aacagccttctgatcgtagtcacag

SEQ ID NO: 5134560 - DNA, 25 bp, Homo sapien
tttaagtgcagtgcaggcgtgccct

SEQ ID NO: 5134561 - DNA, 25 bp, Homo sapien
gtagcttgcccctggaattctctga

SEQ ID NO: 5134562 - DNA, 25 bp, Homo sapien
gcgtgccctctagcggccaaataaa

SEQ ID NO: 5134563 - DNA, 25 bp, Homo sapien
gatgaattggaaagggtagcttgcc

SEQ ID NO: 5134564 - DNA, 25 bp, Homo sapien
tggtggttaagtgctggagaacccc

SEQ ID NO: 5134565 - DNA, 25 bp, Homo sapien
cttggccggaaaggatttctgtaga

SEQ ID NO: 5134566 - DNA, 25 bp, Homo sapien
ggcttggccggaaaggatttctgta

SEQ ID NO: 5134567 - DNA, 25 bp, Homo sapien
gaaagctggtggttaagtgctggag

SEQ ID NO: 5134568 - DNA, 25 bp, Homo sapien
gactggccaagagacagacatcagg

SEQ ID NO: 5134569 - DNA, 25 bp, Homo sapien
aactctatggctggattgactggcc

SEQ ID NO: 5134570 - DNA, 25 bp, Homo sapien
tctgggaactgctctaactctatgg

SEQ ID NO: 5134571 - DNA, 25 bp, Homo sapien
catcagggtgagctggatcatcaga

SEQ ID NO: 5134572 - DNA, 25 bp, Homo sapien
tattgccaaattctaactgtgcctg

SEQ ID NO: 5134573 - DNA, 25 bp, Homo sapien
ttgccaaattctaactgtgcctgga

SEQ ID NO: 5134574 - DNA, 25 bp, Homo sapien
ccaaattctaactgtgcctggagaa

SEQ ID NO: 5134575 - DNA, 25 bp, Homo sapien
gccaaattctaactgtgcctggaga

SEQ ID NO: 5134576 - DNA, 25 bp, Homo sapien
tcctcagccggacatttgcctgtgg

SEQ ID NO: 5134577 - DNA, 25 bp, Homo sapien
gagaccctcagggttgggggtgtca

SEQ ID NO: 5134578 - DNA, 25 bp, Homo sapien
ctcagccggacatttgcctgtggcc

SEQ ID NO: 5134579 - DNA, 25 bp, Homo sapien
tcagtcctcagccggacatttgcct

SEQ ID NO: 5134580 - DNA, 25 bp, Homo sapien
cagtgtgtagcgttctggggacacc

SEQ ID NO: 5134581 - DNA, 25 bp, Homo sapien
aaaggagcaccggaagcaagcaggc

SEQ ID NO: 5134582 - DNA, 25 bp, Homo sapien
aatgaatcagggagccataatcagg

SEQ ID NO: 5134583 - DNA, 25 bp, Homo sapien
caccgggtgttgctgagaatgaatc

SEQ ID NO: 5134584 - DNA, 25 bp, Homo sapien
cagatgccatggggtggttcagcca

SEQ ID NO: 5134585 - DNA, 25 bp, Homo sapien
gagccagatgccatggggtggttca

SEQ ID NO: 5134586 - DNA, 25 bp, Homo sapien
agatgccatggggtggttcagccat

SEQ ID NO: 5134587 - DNA, 25 bp, Homo sapien
gccagatgccatggggtggttcagc

SEQ ID NO: 5134588 - DNA, 25 bp, Homo sapien
tcattgagcaggtaagaggaccgag

SEQ ID NO: 5134589 - DNA, 25 bp, Homo sapien
tatggccaagtgctgttaccacacc

SEQ ID NO: 5134590 - DNA, 25 bp, Homo sapien
tttggagtcctgtaaggtatggcca

SEQ ID NO: 5134591 - DNA, 25 bp, Homo sapien
catcctcattgagcaggtaagagga

SEQ ID NO: 5134592 - DNA, 25 bp, Homo sapien
catactgtgcactcgctgagagctt

SEQ ID NO: 5134593 - DNA, 25 bp, Homo sapien
tcccatactgtgcactcgctgagag

SEQ ID NO: 5134594 - DNA, 25 bp, Homo sapien
ctgtgcactcgctgagagcttgttt

SEQ ID NO: 5134595 - DNA, 25 bp, Homo sapien
ttcccatactgtgcactcgctgaga

SEQ ID NO: 5134596 - DNA, 25 bp, Homo sapien
gtgtcctttttcctgtctgggccag

SEQ ID NO: 5134597 - DNA, 25 bp, Homo sapien
ctttttcctgtctgggccagggatc

SEQ ID NO: 5134598 - DNA, 25 bp, Homo sapien
tcctttttcctgtctgggccaggga

SEQ ID NO: 5134599 - DNA, 25 bp, Homo sapien
tgggtgtcctttttcctgtctgggc

SEQ ID NO: 5134600 - DNA, 25 bp, Homo sapien
ccactctgctccaagcaggctggtg

SEQ ID NO: 5134601 - DNA, 25 bp, Homo sapien
ccaattctggaggccccactctgct

SEQ ID NO: 5134602 - DNA, 25 bp, Homo sapien
aattctggaggccccactctgctcc

SEQ ID NO: 5134603 - DNA, 25 bp, Homo sapien
actctgctccaagcaggctggtgac

SEQ ID NO: 5134604 - DNA, 25 bp, Homo sapien
tccaggggtgtttggcccagagcaa

SEQ ID NO: 5134605 - DNA, 25 bp, Homo sapien
ctgagcccccttcgctgggcttgct

SEQ ID NO: 5134606 - DNA, 25 bp, Homo sapien
tgctcccacattccgggtccgggtc

SEQ ID NO: 5134607 - DNA, 25 bp, Homo sapien
tttggcccagagcaaacccctggtg

SEQ ID NO: 5134608 - DNA, 25 bp, Homo sapien
taggagtatggcacaggtcacctgt

SEQ ID NO: 5134609 - DNA, 25 bp, Homo sapien
ctgagtttgaacacccctaggagta

SEQ ID NO: 5134610 - DNA, 25 bp, Homo sapien
tcgtagagtcatggcgctgttccct

SEQ ID NO: 5134611 - DNA, 25 bp, Homo sapien
cccatcttagggttgtaggcctgga

SEQ ID NO: 5134612 - DNA, 25 bp, Homo sapien
gaagctattaggtccccgtctgtga

SEQ ID NO: 5134613 - DNA, 25 bp, Homo sapien
gggtctggccccgtagtcgtgttca

SEQ ID NO: 5134614 - DNA, 25 bp, Homo sapien
tctgcaccgcgtagtggctgaggct

SEQ ID NO: 5134615 - DNA, 25 bp, Homo sapien
ttgagcggctgaaccacattggagt

SEQ ID NO: 5134616 - DNA, 25 bp, Homo sapien
tctttctcctctcggtcagctttcg

SEQ ID NO: 5134617 - DNA, 25 bp, Homo sapien
acttccgggaacaagctgcagagac

SEQ ID NO: 5134618 - DNA, 25 bp, Homo sapien
tctcctctcggtcagctttcggctt

SEQ ID NO: 5134619 - DNA, 25 bp, Homo sapien
tgcgtccgcgactagcagcaaaact

SEQ ID NO: 5134620 - DNA, 25 bp, Homo sapien
agatgccatggagcgcatcgcggcc

SEQ ID NO: 5134621 - DNA, 25 bp, Homo sapien
cagatgccatggagcgcatcgcggc

SEQ ID NO: 5134622 - DNA, 25 bp, Homo sapien
agcgttccagctccgcgaagtaacc

SEQ ID NO: 5134623 - DNA, 25 bp, Homo sapien
tgcgcggccagcgttccagctccgc

SEQ ID NO: 5134624 - DNA, 25 bp, Homo sapien
ctggcacgcccggagacccgagtac

SEQ ID NO: 5134625 - DNA, 25 bp, Homo sapien
gtccctggcacgcccggagacccga

SEQ ID NO: 5134626 - DNA, 25 bp, Homo sapien
tctggtccctggcacgcccggagac

SEQ ID NO: 5134627 - DNA, 25 bp, Homo sapien
ctgggagggcaacactctggtccct

SEQ ID NO: 5134628 - DNA, 25 bp, Homo sapien
gcaggagcagcggtccagaattaca

SEQ ID NO: 5134629 - DNA, 25 bp, Homo sapien
gccgcgccgctttgccgccctggga

SEQ ID NO: 5134630 - DNA, 25 bp, Homo sapien
gccactgggacctcgagaagctgca

SEQ ID NO: 5134631 - DNA, 25 bp, Homo sapien
cactggggaccgtaaagcggccact

SEQ ID NO: 5134632 - DNA, 25 bp, Homo sapien
ctaaaagcatgtagaacccactctg

SEQ ID NO: 5134633 - DNA, 25 bp, Homo sapien
gcgcaggtttgaagggaggccggac

SEQ ID NO: 5134634 - DNA, 25 bp, Homo sapien
tgtagaacccactctgcttgaggtg

SEQ ID NO: 5134635 - DNA, 25 bp, Homo sapien
gaggtgggcgcaggtttgaagggag

SEQ ID NO: 5134636 - DNA, 25 bp, Homo sapien
tttctttctccaaccaccgaggcaa

SEQ ID NO: 5134637 - DNA, 25 bp, Homo sapien
tctccaaccaccgaggcaaatttgt

SEQ ID NO: 5134638 - DNA, 25 bp, Homo sapien
caccgaggcaaatttgtcgacattt

SEQ ID NO: 5134639 - DNA, 25 bp, Homo sapien
caaccaccgaggcaaatttgtcgac

SEQ ID NO: 5134640 - DNA, 25 bp, Homo sapien
aagaaccaccaagtacccatccaca

SEQ ID NO: 5134641 - DNA, 25 bp, Homo sapien
ccatggtcccctaagaaccaccaag

SEQ ID NO: 5134642 - DNA, 25 bp, Homo sapien
cggcagcactcgggggagctttttt

SEQ ID NO: 5134643 - DNA, 25 bp, Homo sapien
ccatccacacaagcggcagcactcg

SEQ ID NO: 5134644 - DNA, 25 bp, Homo sapien
agataacgtgaattatgacgctgac

SEQ ID NO: 5134645 - DNA, 25 bp, Homo sapien
cgtgaattatgacgctgactgaaat

SEQ ID NO: 5134646 - DNA, 25 bp, Homo sapien
gaagataacgtgaattatgacgctg

SEQ ID NO: 5134647 - DNA, 25 bp, Homo sapien
aaggaagataacgtgaattatgacg

SEQ ID NO: 5134648 - DNA, 25 bp, Homo sapien
tctccaacccagtcgcctgctcttc

SEQ ID NO: 5134649 - DNA, 25 bp, Homo sapien
tttgcagccagcatgatctccctct

SEQ ID NO: 5134650 - DNA, 25 bp, Homo sapien
ccagtcgcctgctcttcatcagtgg

SEQ ID NO: 5134651 - DNA, 25 bp, Homo sapien
ctttgcagccagcatgatctccctc

SEQ ID NO: 5134652 - DNA, 25 bp, Homo sapien
tgcagcctactattctcttgttgga

SEQ ID NO: 5134653 - DNA, 25 bp, Homo sapien
cctactattctcttgttggagatgg

SEQ ID NO: 5134654 - DNA, 25 bp, Homo sapien
tgaagctccctttggggccagtaca

SEQ ID NO: 5134655 - DNA, 25 bp, Homo sapien
cctttggggccagtacattgtatgg

SEQ ID NO: 5134656 - DNA, 25 bp, Homo sapien
cacactattgtaggatatattaagc

SEQ ID NO: 5134657 - DNA, 25 bp, Homo sapien
caagtggataaaaaatagaggtgag

SEQ ID NO: 5134658 - DNA, 25 bp, Homo sapien
gcttgagagtgtcaagacccttaga

SEQ ID NO: 5134659 - DNA, 25 bp, Homo sapien
gacaaacttaccaacatgcactcac

SEQ ID NO: 5134660 - DNA, 25 bp, Homo sapien
ggttgatatcttaagagatcagttc

SEQ ID NO: 5134661 - DNA, 25 bp, Homo sapien
tccaacctagaaagggagactttca

SEQ ID NO: 5134662 - DNA, 25 bp, Homo sapien
tctgatacacaagtaagactatggt

SEQ ID NO: 5134663 - DNA, 25 bp, Homo sapien
ggtggtttatggtcatccaacctag

SEQ ID NO: 5134664 - DNA, 25 bp, Homo sapien
cagacgacgctggtattgtcctctt

SEQ ID NO: 5134665 - DNA, 25 bp, Homo sapien
caaaaccagacgacgctggtattgt

SEQ ID NO: 5134666 - DNA, 25 bp, Homo sapien
acgacgctggtattgtcctcttcac

SEQ ID NO: 5134667 - DNA, 25 bp, Homo sapien
cagccaaaaccagacgacgctggta

SEQ ID NO: 5134668 - DNA, 25 bp, Homo sapien
tctctatgaggatactgtgaggacc

SEQ ID NO: 5134669 - DNA, 25 bp, Homo sapien
ttccatgcctaccaaagaatacggg

SEQ ID NO: 5134670 - DNA, 25 bp, Homo sapien
gaaataagaccagccatctatggga

SEQ ID NO: 5134671 - DNA, 25 bp, Homo sapien
cattcattgcattacgggttgtcga

SEQ ID NO: 5134672 - DNA, 25 bp, Homo sapien
gttagtccatagtactgcatcagtg

SEQ ID NO: 5134673 - DNA, 25 bp, Homo sapien
ctgagtgaaggttaagtaggaactc

SEQ ID NO: 5134674 - DNA, 25 bp, Homo sapien
tgctatggtactgccaggtgttaac

SEQ ID NO: 5134675 - DNA, 25 bp, Homo sapien
aaattgcgctgcgtgtggtgtcaca

SEQ ID NO: 5134676 - DNA, 25 bp, Homo sapien
tatgtacaataatttaacacggttg

SEQ ID NO: 5134677 - DNA, 25 bp, Homo sapien
caataatttaacacggttgcctgaa

SEQ ID NO: 5134678 - DNA, 25 bp, Homo sapien
tacaataatttaacacggttgcctg

SEQ ID NO: 5134679 - DNA, 25 bp, Homo sapien
ctctctcagatatgtacaataattt

SEQ ID NO: 5134680 - DNA, 25 bp, Homo sapien
ccaagaaagaggtcgtcacttttgc

SEQ ID NO: 5134681 - DNA, 25 bp, Homo sapien
ctcacccaagaaagaggtcgtcact

SEQ ID NO: 5134682 - DNA, 25 bp, Homo sapien
gaaagaggtcgtcacttttgctgtg

SEQ ID NO: 5134683 - DNA, 25 bp, Homo sapien
cacccaagaaagaggtcgtcacttt

SEQ ID NO: 5134684 - DNA, 25 bp, Homo sapien
gttgatgctcatcatttattgaggg

SEQ ID NO: 5134685 - DNA, 25 bp, Homo sapien
tggctagagccgctgcactatcctt

SEQ ID NO: 5134686 - DNA, 25 bp, Homo sapien
gggaagccacttaataaggagtcag

SEQ ID NO: 5134687 - DNA, 25 bp, Homo sapien
gtgggaaagggttgatgctcatcat

SEQ ID NO: 5134688 - DNA, 25 bp, Homo sapien
cagggccagctaggcctgtggttcc

SEQ ID NO: 5134689 - DNA, 25 bp, Homo sapien
tgttcgtgacctgacagggtgacac

SEQ ID NO: 5134690 - DNA, 25 bp, Homo sapien
cagcagctcccactggtgtgtcact

SEQ ID NO: 5134691 - DNA, 25 bp, Homo sapien
cctggatgcctgggtagccagtttg

SEQ ID NO: 5134692 - DNA, 25 bp, Homo sapien
tgcccaaggagggcggggcatgttg

SEQ ID NO: 5134693 - DNA, 25 bp, Homo sapien
agtgcccaaggagggcggggcatgt

SEQ ID NO: 5134694 - DNA, 25 bp, Homo sapien
tagtgcccaaggagggcggggcatg

SEQ ID NO: 5134695 - DNA, 25 bp, Homo sapien
gtgcccaaggagggcggggcatgtt

SEQ ID NO: 5134696 - DNA, 25 bp, Homo sapien
gctaccgtgcccatctcaaccccat

SEQ ID NO: 5134697 - DNA, 25 bp, Homo sapien
agctaccgtgcccatctcaacccca

SEQ ID NO: 5134698 - DNA, 25 bp, Homo sapien
cctcggctccctggtgccttcctcc

SEQ ID NO: 5134699 - DNA, 25 bp, Homo sapien
tcggctccctggtgccttcctccat

SEQ ID NO: 5134700 - DNA, 25 bp, Homo sapien
tccctcggctccctggtgccttcct

SEQ ID NO: 5134701 - DNA, 25 bp, Homo sapien
ttccctcggctccctggtgccttcc

SEQ ID NO: 5134702 - DNA, 25 bp, Homo sapien
catctttgccttagtccataaacca

SEQ ID NO: 5134703 - DNA, 25 bp, Homo sapien
tgatggcccttcagattcagcagct

SEQ ID NO: 5134704 - DNA, 25 bp, Homo sapien
ccttagtccataaaccatcatggag

SEQ ID NO: 5134705 - DNA, 25 bp, Homo sapien
ctgtggactccagggtaccacggaa

SEQ ID NO: 5134706 - DNA, 25 bp, Homo sapien
gaggcaggaggatccattgaggtca

SEQ ID NO: 5134707 - DNA, 25 bp, Homo sapien
ggccaacatgatgaaatcccatctc

SEQ ID NO: 5134708 - DNA, 25 bp, Homo sapien
ggcaggaggatccattgaggtcagg

SEQ ID NO: 5134709 - DNA, 25 bp, Homo sapien
agttcatgaccagcctggccaacat

SEQ ID NO: 5134710 - DNA, 25 bp, Homo sapien
caaagattttagccaaaccttcatc

SEQ ID NO: 5134711 - DNA, 25 bp, Homo sapien
aaccttcatcaggattttttgaatt

SEQ ID NO: 5134712 - DNA, 25 bp, Homo sapien
tgagtctcagcctagtgtcccctgg

SEQ ID NO: 5134713 - DNA, 25 bp, Homo sapien
aacccctggaggaggttcagctcgg

SEQ ID NO: 5134714 - DNA, 25 bp, Homo sapien
aaactggcgaggcaggtgtgtcaca

SEQ ID NO: 5134715 - DNA, 25 bp, Homo sapien
tacaaatgtgaaggtctatccccac

SEQ ID NO: 5134716 - DNA, 25 bp, Homo sapien
agttgtctatgcagactgcccgagg

SEQ ID NO: 5134717 - DNA, 25 bp, Homo sapien
acacggacagctgccggaacggaat

SEQ ID NO: 5134718 - DNA, 25 bp, Homo sapien
tgccggaacggaatagaggcccatc

SEQ ID NO: 5134719 - DNA, 25 bp, Homo sapien
catcgggtgtcgagagatctgctcc

SEQ ID NO: 5134720 - DNA, 25 bp, Homo sapien
cctcctacacatatggggccgaatt

SEQ ID NO: 5134721 - DNA, 25 bp, Homo sapien
caaggcttctgcctcctagacagca

SEQ ID NO: 5134722 - DNA, 25 bp, Homo sapien
tatggggccgaattcagagacactg

SEQ ID NO: 5134723 - DNA, 25 bp, Homo sapien
cacagctagggggactgcgagtgct

SEQ ID NO: 5134724 - DNA, 25 bp, Homo sapien
tccttgatgaccatgctgacctacg

SEQ ID NO: 5134725 - DNA, 25 bp, Homo sapien
tgtaacaggagctcaccacagagac

SEQ ID NO: 5134726 - DNA, 25 bp, Homo sapien
gctgacctacgagtccctggaaatg

SEQ ID NO: 5134727 - DNA, 25 bp, Homo sapien
tttccagggctgttggtcctcggtg

SEQ ID NO: 5134728 - DNA, 25 bp, Homo sapien
ttttcaggaaattgcagccaggtgc

SEQ ID NO: 5134729 - DNA, 25 bp, Homo sapien
tacagcaactatggcaacacacgga

SEQ ID NO: 5134730 - DNA, 25 bp, Homo sapien
tttgtttaagccactatacgtcagg

SEQ ID NO: 5134731 - DNA, 25 bp, Homo sapien
caggtgcattcttaaccggtacagc

SEQ ID NO: 5134732 - DNA, 25 bp, Homo sapien
gatgggtcatacggaaccttggaaa

SEQ ID NO: 5134733 - DNA, 25 bp, Homo sapien
tgatgggtcatacggaaccttggaa

SEQ ID NO: 5134734 - DNA, 25 bp, Homo sapien
catacggaaccttggaaaacacttg

SEQ ID NO: 5134735 - DNA, 25 bp, Homo sapien
atgatgggtcatacggaaccttgga

SEQ ID NO: 5134736 - DNA, 25 bp, Homo sapien
tctgaagttccaacacaacaccagg

SEQ ID NO: 5134737 - DNA, 25 bp, Homo sapien
gcaagcatctgaagttccaacacaa

SEQ ID NO: 5134738 - DNA, 25 bp, Homo sapien
caccaggggctaagctcattttcac

SEQ ID NO: 5134739 - DNA, 25 bp, Homo sapien
agtgtctgcaagcatctgaagttcc

SEQ ID NO: 5134740 - DNA, 25 bp, Homo sapien
accatggctgtgattaagtctttca

SEQ ID NO: 5134741 - DNA, 25 bp, Homo sapien
tctcgctcatttgaacctgatgcaa

SEQ ID NO: 5134742 - DNA, 25 bp, Homo sapien
tattttagccaaatgttcctctcgc

SEQ ID NO: 5134743 - DNA, 25 bp, Homo sapien
gaacctgatgcaaatgcagcattgt

SEQ ID NO: 5134744 - DNA, 25 bp, Homo sapien
aaatgcagcattgttcaagctcttc

SEQ ID NO: 5134745 - DNA, 25 bp, Homo sapien
cacttttcagctctagaacttttct

SEQ ID NO: 5134746 - DNA, 25 bp, Homo sapien
tacacttttcagctctagaactttt

SEQ ID NO: 5134747 - DNA, 25 bp, Homo sapien
acacttttcagctctagaacttttc

SEQ ID NO: 5134748 - DNA, 25 bp, Homo sapien
tttttattatgttcaaccatccttc

SEQ ID NO: 5134749 - DNA, 25 bp, Homo sapien
ttcttggtctggtgtatagtccttt

SEQ ID NO: 5134750 - DNA, 25 bp, Homo sapien
tgagcacgatatcatccatgggttt

SEQ ID NO: 5134751 - DNA, 25 bp, Homo sapien
tgctatatctgcatcaattgaaatg

SEQ ID NO: 5134752 - DNA, 25 bp, Homo sapien
taattgttctcatatcttgtttgga

SEQ ID NO: 5134753 - DNA, 25 bp, Homo sapien
gtagttttcagtactggtataagtc

SEQ ID NO: 5134754 - DNA, 25 bp, Homo sapien
ggtataagtctttcactttctcggc

SEQ ID NO: 5134755 - DNA, 25 bp, Homo sapien
ccatcatgccaggtcaattttgaca

SEQ ID NO: 5134756 - DNA, 25 bp, Homo sapien
gactgtcatttccactctgttggct

SEQ ID NO: 5134757 - DNA, 25 bp, Homo sapien
ggtataaggtaatgagctagcttca

SEQ ID NO: 5134758 - DNA, 25 bp, Homo sapien
aaaatcaattgactggccgggcacg

SEQ ID NO: 5134759 - DNA, 25 bp, Homo sapien
tctaagagactaatagtttaagctc

SEQ ID NO: 5134760 - DNA, 25 bp, Homo sapien
agttgtctatgcagactgcccgagg

SEQ ID NO: 5134761 - DNA, 25 bp, Homo sapien
tgccggaacggaatagaggcccatc

SEQ ID NO: 5134762 - DNA, 25 bp, Homo sapien
acacggacagctgccggaacggaat

SEQ ID NO: 5134763 - DNA, 25 bp, Homo sapien
catcgggtgtcgagagatctgctcc

SEQ ID NO: 5134764 - DNA, 25 bp, Homo sapien
tgtaacaggagctcaccacagagac

SEQ ID NO: 5134765 - DNA, 25 bp, Homo sapien
tccttgatgaccatgctgacctacg

SEQ ID NO: 5134766 - DNA, 25 bp, Homo sapien
gctgacctacgagtccctggaaatg

SEQ ID NO: 5134767 - DNA, 25 bp, Homo sapien
tttccagggctgttggtcctcggtg

SEQ ID NO: 5134768 - DNA, 25 bp, Homo sapien
gttaaatgatgggtcatacggaaac

SEQ ID NO: 5134769 - DNA, 25 bp, Homo sapien
tgactgctgttgcttcgttaaatga

SEQ ID NO: 5134770 - DNA, 25 bp, Homo sapien
tgttgcttcgttaaatgatgggtca

SEQ ID NO: 5134771 - DNA, 25 bp, Homo sapien
tgatgggtcatacggaaactttgga

SEQ ID NO: 5134772 - DNA, 25 bp, Homo sapien
acactgccaaggaaatattctggtt

SEQ ID NO: 5134773 - DNA, 25 bp, Homo sapien
cactgccaaggaaatattctggttt

SEQ ID NO: 5134774 - DNA, 25 bp, Homo sapien
cacactgccaaggaaatattctggt

SEQ ID NO: 5134775 - DNA, 25 bp, Homo sapien
gaacagacaggattctttaaaattc

SEQ ID NO: 5134776 - DNA, 25 bp, Homo sapien
tgtcgaacagacaggattctttaaa

SEQ ID NO: 5134777 - DNA, 25 bp, Homo sapien
gctctcttaaatccctgtcgaacag

SEQ ID NO: 5134778 - DNA, 25 bp, Homo sapien
ttatctatagtagttaactgctctc

SEQ ID NO: 5134779 - DNA, 25 bp, Homo sapien
tgtttcttcctgatgtatgaggcca

SEQ ID NO: 5134780 - DNA, 25 bp, Homo sapien
gcaacagcacgatggccatgaggat

SEQ ID NO: 5134781 - DNA, 25 bp, Homo sapien
tgaggatggccacccctgagacggc

SEQ ID NO: 5134782 - DNA, 25 bp, Homo sapien
tgcccgcagggcatagtcctaaagt

SEQ ID NO: 5134783 - DNA, 25 bp, Homo sapien
gctctaggggcaagctgagcattca

SEQ ID NO: 5134784 - DNA, 25 bp, Homo sapien
tccaccccattgctctaggggcaag

SEQ ID NO: 5134785 - DNA, 25 bp, Homo sapien
cccattgctctaggggcaagctgag

SEQ ID NO: 5134786 - DNA, 25 bp, Homo sapien
ctctaggggcaagctgagcattcag

SEQ ID NO: 5134787 - DNA, 25 bp, Homo sapien
gctcagcgcacaggagtcctgctgt

SEQ ID NO: 5134788 - DNA, 25 bp, Homo sapien
ttcccagcgtgaggattctgcttcc

SEQ ID NO: 5134789 - DNA, 25 bp, Homo sapien
agtcctgctgtctactcgctgggca

SEQ ID NO: 5134790 - DNA, 25 bp, Homo sapien
tgcttcccatcagtaaggtttgtca

SEQ ID NO: 5134791 - DNA, 25 bp, Homo sapien
ttgtagaatacacctcccgggcaga

SEQ ID NO: 5134792 - DNA, 25 bp, Homo sapien
aatccatagtctgtcgggttcaccg

SEQ ID NO: 5134793 - DNA, 25 bp, Homo sapien
cacaagtgtcctatggtaaagcagt

SEQ ID NO: 5134794 - DNA, 25 bp, Homo sapien
aatggaattgcctccctgtggtgcg

SEQ ID NO: 5134795 - DNA, 25 bp, Homo sapien
taagttacacccgttgttgatgctg

SEQ ID NO: 5134796 - DNA, 25 bp, Homo sapien
tgcccagtaagtgctgacttgagca

SEQ ID NO: 5134797 - DNA, 25 bp, Homo sapien
gcagaaaccagttggtaagttacac

SEQ ID NO: 5134798 - DNA, 25 bp, Homo sapien
tgacttgagcagaaaccagttggta

SEQ ID NO: 5134799 - DNA, 25 bp, Homo sapien
tgggagggccacatggtggggtgta

SEQ ID NO: 5134800 - DNA, 25 bp, Homo sapien
ctgggagggccacatggtggggtgt

SEQ ID NO: 5134801 - DNA, 25 bp, Homo sapien
gggagggccacatggtggggtgtac

SEQ ID NO: 5134802 - DNA, 25 bp, Homo sapien
gctccaaggtcaacccccagtggag

SEQ ID NO: 5134803 - DNA, 25 bp, Homo sapien
ggctggagcacagataccagggcag

SEQ ID NO: 5134804 - DNA, 25 bp, Homo sapien
aatggaaaaggtggtgctcatctca

SEQ ID NO: 5134805 - DNA, 25 bp, Homo sapien
gctcatctcatagcgaaggggctgg

SEQ ID NO: 5134806 - DNA, 25 bp, Homo sapien
agctggcaggtcctccggggtgacc

SEQ ID NO: 5134807 - DNA, 25 bp, Homo sapien
ggacagctggcaggtcctccggggt

SEQ ID NO: 5134808 - DNA, 25 bp, Homo sapien
ctttggacagctggcaggtcctccg

SEQ ID NO: 5134809 - DNA, 25 bp, Homo sapien
gctggcaggtcctccggggtgacca

SEQ ID NO: 5134810 - DNA, 25 bp, Homo sapien
ttccacagggctccaccctgaaatc

SEQ ID NO: 5134811 - DNA, 25 bp, Homo sapien
tcctggctcaaagggagcttggagc

SEQ ID NO: 5134812 - DNA, 25 bp, Homo sapien
tgaaatcccctgtgctatcagggtg

SEQ ID NO: 5134813 - DNA, 25 bp, Homo sapien
tatcagggtgactgccgtcatccag

SEQ ID NO: 5134814 - DNA, 25 bp, Homo sapien
aaggctgaaagtgaccaccgccctg

SEQ ID NO: 5134815 - DNA, 25 bp, Homo sapien
cgcgtccgagtgcagcaacgggatt

SEQ ID NO: 5134816 - DNA, 25 bp, Homo sapien
aggctgccaagcacaactcaggcgt

SEQ ID NO: 5134817 - DNA, 25 bp, Homo sapien
catgtctagtgactgcgcgtccgag

SEQ ID NO: 5134818 - DNA, 25 bp, Homo sapien
tgagctccggcaagcaggcttgtct

SEQ ID NO: 5134819 - DNA, 25 bp, Homo sapien
ctctgaggcccacggtgggccaggc

SEQ ID NO: 5134820 - DNA, 25 bp, Homo sapien
gcaggcttgtctgaaactaacctat

SEQ ID NO: 5134821 - DNA, 25 bp, Homo sapien
ggcttgtctgaaactaacctatttc

SEQ ID NO: 5134822 - DNA, 25 bp, Homo sapien
ggtgaggaatcggggcttacaaagc

SEQ ID NO: 5134823 - DNA, 25 bp, Homo sapien
tgaggaatcggggcttacaaagccg

SEQ ID NO: 5134824 - DNA, 25 bp, Homo sapien
tgggtgaggaatcggggcttacaaa

SEQ ID NO: 5134825 - DNA, 25 bp, Homo sapien
ctgggtgaggaatcggggcttacaa

SEQ ID NO: 5134826 - DNA, 25 bp, Homo sapien
tgcggggtctctggtcccaatgcca

SEQ ID NO: 5134827 - DNA, 25 bp, Homo sapien
tctggtcccaatgccaatggagagc

SEQ ID NO: 5134828 - DNA, 25 bp, Homo sapien
ctggggacgtacaggtggatgtcca

SEQ ID NO: 5134829 - DNA, 25 bp, Homo sapien
caaacaggccacttgcggggtctct

SEQ ID NO: 5134830 - DNA, 25 bp, Homo sapien
tgccgggcagtgtggatacagtcac

SEQ ID NO: 5134831 - DNA, 25 bp, Homo sapien
gttttagtgagacctttctgcagca

SEQ ID NO: 5134832 - DNA, 25 bp, Homo sapien
cccggagagcatacaggaactgtgg

SEQ ID NO: 5134833 - DNA, 25 bp, Homo sapien
ggccacccagagctagtgaggataa

SEQ ID NO: 5134834 - DNA, 25 bp, Homo sapien
ggatgcctctgagcaccggtggaac

SEQ ID NO: 5134835 - DNA, 25 bp, Homo sapien
aaaggtctgcagtccactgggatgg

SEQ ID NO: 5134836 - DNA, 25 bp, Homo sapien
ctctgagcaccggtggaacctgaca

SEQ ID NO: 5134837 - DNA, 25 bp, Homo sapien
ctacaaaggtctgcagtccactggg

SEQ ID NO: 5134838 - DNA, 25 bp, Homo sapien
ttggtgacgccatgagccacacagc

SEQ ID NO: 5134839 - DNA, 25 bp, Homo sapien
gcataggcactggtcgtcagcacac

SEQ ID NO: 5134840 - DNA, 25 bp, Homo sapien
gcaggctcctccttcatatgtcttt

SEQ ID NO: 5134841 - DNA, 25 bp, Homo sapien
cacagccgcagttagccatggctgc

SEQ ID NO: 5134842 - DNA, 25 bp, Homo sapien
tccctgctccttaatcccccagctg

SEQ ID NO: 5134843 - DNA, 25 bp, Homo sapien
tccttaatcccccagctgtgctcgg

SEQ ID NO: 5134844 - DNA, 25 bp, Homo sapien
taatcccccagctgtgctcgggccg

SEQ ID NO: 5134845 - DNA, 25 bp, Homo sapien
cctgctccttaatcccccagctgtg

SEQ ID NO: 5134846 - DNA, 25 bp, Homo sapien
gcctgctgggcacagatcgagaagt

SEQ ID NO: 5134847 - DNA, 25 bp, Homo sapien
ggcacagatcgagaagtcccaaacc

SEQ ID NO: 5134848 - DNA, 25 bp, Homo sapien
gctgggcacagatcgagaagtccca

SEQ ID NO: 5134849 - DNA, 25 bp, Homo sapien
ctggagagaagccgcagcctgctgg

SEQ ID NO: 5134850 - DNA, 25 bp, Homo sapien
ttcacagagggtcggaggcacgtca

SEQ ID NO: 5134851 - DNA, 25 bp, Homo sapien
gacgccaagtggagggcatcagtgc

SEQ ID NO: 5134852 - DNA, 25 bp, Homo sapien
gggccttcctgaacctggtgcgttg

SEQ ID NO: 5134853 - DNA, 25 bp, Homo sapien
aaagacggcgcgagagacgccaagt

SEQ ID NO: 5134854 - DNA, 25 bp, Homo sapien
cacgtagtcacgcaccatggcgtct

SEQ ID NO: 5134855 - DNA, 25 bp, Homo sapien
tggcgtctcgcaggcagtcgaagac

SEQ ID NO: 5134856 - DNA, 25 bp, Homo sapien
cacgcgagatgctgccgtagaagaa

SEQ ID NO: 5134857 - DNA, 25 bp, Homo sapien
tcgtgcacgagcgacagcacatagc

SEQ ID NO: 5134858 - DNA, 25 bp, Homo sapien
gagcaccatagcatcgctcagcctg

SEQ ID NO: 5134859 - DNA, 25 bp, Homo sapien
atagcatcgctcagcctgcggaagg

SEQ ID NO: 5134860 - DNA, 25 bp, Homo sapien
ggcatagtagagcaccatagcatcg

SEQ ID NO: 5134861 - DNA, 25 bp, Homo sapien
ccagcttccaaaggggactgaatgg

SEQ ID NO: 5134862 - DNA, 25 bp, Homo sapien
ctgctgtggtaccagggcatccgct

SEQ ID NO: 5134863 - DNA, 25 bp, Homo sapien
ctcctcacgcgtcaggctgctgtgg

SEQ ID NO: 5134864 - DNA, 25 bp, Homo sapien
agagtaaagtttgcgctcggcctcc

SEQ ID NO: 5134865 - DNA, 25 bp, Homo sapien
tgggccgtcgtagcaatgagcttct

SEQ ID NO: 5134866 - DNA, 25 bp, Homo sapien
ttcctgaggtcatgggaaagaggca

SEQ ID NO: 5134867 - DNA, 25 bp, Homo sapien
aaaagatcccgtgtccaaaccagag

SEQ ID NO: 5134868 - DNA, 25 bp, Homo sapien
ttatctgtgtcttgaggcctgagtg

SEQ ID NO: 5134869 - DNA, 25 bp, Homo sapien
gaaagaggcagcaccaatttatctg

SEQ ID NO: 5134870 - DNA, 25 bp, Homo sapien
ctgtgatcaatggtaggcgtggtcc

SEQ ID NO: 5134871 - DNA, 25 bp, Homo sapien
taacacagaaacaagccagcattgg

SEQ ID NO: 5134872 - DNA, 25 bp, Homo sapien
tttaaagtcgaatcagccggttcca

SEQ ID NO: 5134873 - DNA, 25 bp, Homo sapien
tctaggcctgagtagcacgtgtctt

SEQ ID NO: 5134874 - DNA, 25 bp, Homo sapien
gtgtcagacaccggcaccctcgcat

SEQ ID NO: 5134875 - DNA, 25 bp, Homo sapien
ttagtgtcagacaccggcaccctcg

SEQ ID NO: 5134876 - DNA, 25 bp, Homo sapien
gtcagacaccggcaccctcgcatga

SEQ ID NO: 5134877 - DNA, 25 bp, Homo sapien
cagacaccggcaccctcgcatgaag

SEQ ID NO: 5134878 - DNA, 25 bp, Homo sapien
tccacaggcactcattgggggtaca

SEQ ID NO: 5134879 - DNA, 25 bp, Homo sapien
gtacactcggccatacagtcagcca

SEQ ID NO: 5134880 - DNA, 25 bp, Homo sapien
ggctgaacagttggccatccacggc

SEQ ID NO: 5134881 - DNA, 25 bp, Homo sapien
cacagagagatagtcatccacaggc

SEQ ID NO: 5134882 - DNA, 25 bp, Homo sapien
ccaacagatggccattcacggggaa

SEQ ID NO: 5134883 - DNA, 25 bp, Homo sapien
ttctccaagagccaacagatggcca

SEQ ID NO: 5134884 - DNA, 25 bp, Homo sapien
tgaccccccacggtggacacccagc

SEQ ID NO: 5134885 - DNA, 25 bp, Homo sapien
gatggccattcacggggaatacctg

SEQ ID NO: 5134886 - DNA, 25 bp, Homo sapien
gtacaccgtcttcccatagatgagg

SEQ ID NO: 5134887 - DNA, 25 bp, Homo sapien
ggacagggcgtatgtgccctgctcc

SEQ ID NO: 5134888 - DNA, 25 bp, Homo sapien
cgtgtcaaacttggtgccctcggga

SEQ ID NO: 5134889 - DNA, 25 bp, Homo sapien
ggaatgcagtacttgcccgccttgt

SEQ ID NO: 5134890 - DNA, 25 bp, Homo sapien
ccggcaccccatctgagcacggcat

SEQ ID NO: 5134891 - DNA, 25 bp, Homo sapien
gcccggcaccccatctgagcacggc

SEQ ID NO: 5134892 - DNA, 25 bp, Homo sapien
gcaccccatctgagcacggcatctc

SEQ ID NO: 5134893 - DNA, 25 bp, Homo sapien
ccccatctgagcacggcatctccca

SEQ ID NO: 5134894 - DNA, 25 bp, Homo sapien
cgccttcagcttcagatactccacc

SEQ ID NO: 5134895 - DNA, 25 bp, Homo sapien
tgagtcaacgtggatgggtgggctg

SEQ ID NO: 5134896 - DNA, 25 bp, Homo sapien
atgagtcaacgtggatgggtgggct

SEQ ID NO: 5134897 - DNA, 25 bp, Homo sapien
gagtcaacgtggatgggtgggctgg

SEQ ID NO: 5134898 - DNA, 25 bp, Homo sapien
agagagagcttcttccgctccacag

SEQ ID NO: 5134899 - DNA, 25 bp, Homo sapien
gggacgtccagcccctctcatgaga

SEQ ID NO: 5134900 - DNA, 25 bp, Homo sapien
agagagcttcttccgctccacaggc

SEQ ID NO: 5134901 - DNA, 25 bp, Homo sapien
tcatgagacctatatccactgagga

SEQ ID NO: 5134902 - DNA, 25 bp, Homo sapien
ttgagggtgtcgattcgtctctgag

SEQ ID NO: 5134903 - DNA, 25 bp, Homo sapien
ctggctcaggggtgtatccatctga

SEQ ID NO: 5134904 - DNA, 25 bp, Homo sapien
caggggtgtatccatctgagttgag

SEQ ID NO: 5134905 - DNA, 25 bp, Homo sapien
catctgagttgagggtgtcgattcg

SEQ ID NO: 5134906 - DNA, 25 bp, Homo sapien
ggttcggtggctcatacacacagtg

SEQ ID NO: 5134907 - DNA, 25 bp, Homo sapien
tcataaggcatgtcaggagggttcg

SEQ ID NO: 5134908 - DNA, 25 bp, Homo sapien
tacacatgttcaggtctgggcccac

SEQ ID NO: 5134909 - DNA, 25 bp, Homo sapien
cacccgcagcagaccattttaggaa

SEQ ID NO: 5134910 - DNA, 25 bp, Homo sapien
ggcgcactgagccaaagttgccgca

SEQ ID NO: 5134911 - DNA, 25 bp, Homo sapien
ggttatcgcgcttcaggaagagctt

SEQ ID NO: 5134912 - DNA, 25 bp, Homo sapien
tgccgcagccaagttcaatgtcagc

SEQ ID NO: 5134913 - DNA, 25 bp, Homo sapien
tgtcagctatgaggaggttatcgcg

SEQ ID NO: 5134914 - DNA, 25 bp, Homo sapien
aggcggcggtgctcccaccacggca

SEQ ID NO: 5134915 - DNA, 25 bp, Homo sapien
ccaggcggcggtgctcccaccacgg

SEQ ID NO: 5134916 - DNA, 25 bp, Homo sapien
ggcggcggtgctcccaccacggcag

SEQ ID NO: 5134917 - DNA, 25 bp, Homo sapien
cccaccacggcaggggcggccatac

SEQ ID NO: 5134918 - DNA, 25 bp, Homo sapien
tggactcagggatcggggaccccac

SEQ ID NO: 5134919 - DNA, 25 bp, Homo sapien
agggaatcctccagcgtgcaacgtc

SEQ ID NO: 5134920 - DNA, 25 bp, Homo sapien
agcgtgcaacgtcctgccccagagt

SEQ ID NO: 5134921 - DNA, 25 bp, Homo sapien
tgctgtgagacagacatcccggctc

SEQ ID NO: 5134922 - DNA, 25 bp, Homo sapien
gacaactgtagtcgccacccaggct

SEQ ID NO: 5134923 - DNA, 25 bp, Homo sapien
ggaacagcccatcgccaaaaagaat

SEQ ID NO: 5134924 - DNA, 25 bp, Homo sapien
tgctgaggacggctcacagccggat

SEQ ID NO: 5134925 - DNA, 25 bp, Homo sapien
accaaggcgctcaatgtccctgcag

SEQ ID NO: 5134926 - DNA, 25 bp, Homo sapien
gccacgggaggcacgtgggcgaggg

SEQ ID NO: 5134927 - DNA, 25 bp, Homo sapien
aggcacgtgggcgaggggcaccggc

SEQ ID NO: 5134928 - DNA, 25 bp, Homo sapien
gcacgtgggcgaggggcaccggccc

SEQ ID NO: 5134929 - DNA, 25 bp, Homo sapien
cggccacgggaggcacgtgggcgag

SEQ ID NO: 5134930 - DNA, 25 bp, Homo sapien
tcgcgcatcatctcttccgtgtctg

SEQ ID NO: 5134931 - DNA, 25 bp, Homo sapien
ccgaccaggaacttgtgcagcggcc

SEQ ID NO: 5134932 - DNA, 25 bp, Homo sapien
ggtgcatgatctgcgcctcgcgcat

SEQ ID NO: 5134933 - DNA, 25 bp, Homo sapien
agacgccaatgagccgcacgatgta

SEQ ID NO: 5134934 - DNA, 25 bp, Homo sapien
agtgtagtagctgtcgtcggcaccc

SEQ ID NO: 5134935 - DNA, 25 bp, Homo sapien
gctcggccacattgctcacagggat

SEQ ID NO: 5134936 - DNA, 25 bp, Homo sapien
tcttggcgtagtgccggttaaccag

SEQ ID NO: 5134937 - DNA, 25 bp, Homo sapien
gttaaccagcaggacgttgcgggcc

SEQ ID NO: 5134938 - DNA, 25 bp, Homo sapien
ggagaacttgcggaagttgatgcat

SEQ ID NO: 5134939 - DNA, 25 bp, Homo sapien
ggtgcgtaccacttgagcggccact

SEQ ID NO: 5134940 - DNA, 25 bp, Homo sapien
catggtgaccccatagctccagaca

SEQ ID NO: 5134941 - DNA, 25 bp, Homo sapien
aagttgatgcattcgggtgcgtacc

SEQ ID NO: 5134942 - DNA, 25 bp, Homo sapien
tagggcttctggccgtaggacaagg

SEQ ID NO: 5134943 - DNA, 25 bp, Homo sapien
gcttctggccgtaggacaaggcctc

SEQ ID NO: 5134944 - DNA, 25 bp, Homo sapien
gtagggcttctggccgtaggacaag

SEQ ID NO: 5134945 - DNA, 25 bp, Homo sapien
gggcttctggccgtaggacaaggcc

SEQ ID NO: 5134946 - DNA, 25 bp, Homo sapien
ctgtgagtgaccagtgtcctcctcc

SEQ ID NO: 5134947 - DNA, 25 bp, Homo sapien
tgtgagtgaccagtgtcctcctcct

SEQ ID NO: 5134948 - DNA, 25 bp, Homo sapien
tcgatgaaggccatgacctccggcc

SEQ ID NO: 5134949 - DNA, 25 bp, Homo sapien
cgtacagttcgggtggacactctgg

SEQ ID NO: 5134950 - DNA, 25 bp, Homo sapien
gtgggcactccatccgcttgccctg

SEQ ID NO: 5134951 - DNA, 25 bp, Homo sapien
gatccagcagtcactcatgagtgcg

SEQ ID NO: 5134952 - DNA, 25 bp, Homo sapien
tccaggggtcagcccagccgggtcc

SEQ ID NO: 5134953 - DNA, 25 bp, Homo sapien
tcatcgggcaccaggactttccagg

SEQ ID NO: 5134954 - DNA, 25 bp, Homo sapien
tcaggaagtcggggcgatcctccca

SEQ ID NO: 5134955 - DNA, 25 bp, Homo sapien
caggctgtagtaacaggctcgcatg

SEQ ID NO: 5134956 - DNA, 25 bp, Homo sapien
tagtaacaggctcgcatgcgctgct

SEQ ID NO: 5134957 - DNA, 25 bp, Homo sapien
taacaggctcgcatgcgctgctcca

SEQ ID NO: 5134958 - DNA, 25 bp, Homo sapien
tcaggcacaggcagcctcagccttc

SEQ ID NO: 5134959 - DNA, 25 bp, Homo sapien
agcctcagccttctgtgtgctgcct

SEQ ID NO: 5134960 - DNA, 25 bp, Homo sapien
ctcagccttctgtgtgctgcctggg

SEQ ID NO: 5134961 - DNA, 25 bp, Homo sapien
gtgtgctgcctgggggcccttccac

SEQ ID NO: 5134962 - DNA, 25 bp, Homo sapien
catccgtgtaagcaatgccctcagc

SEQ ID NO: 5134963 - DNA, 25 bp, Homo sapien
caaggccggtgtggcctgagacacc

SEQ ID NO: 5134964 - DNA, 25 bp, Homo sapien
caggcaggcaatgcaaggccggtgt

SEQ ID NO: 5134965 - DNA, 25 bp, Homo sapien
tattctggtgatctacgcctgacca

SEQ ID NO: 5134966 - DNA, 25 bp, Homo sapien
cgtttgttaaaatagctccaggtga

SEQ ID NO: 5134967 - DNA, 25 bp, Homo sapien
gggagctaatacgtgcatctaccaa

SEQ ID NO: 5134968 - DNA, 25 bp, Homo sapien
cagtaatacggttcatacgggagct

SEQ ID NO: 5134969 - DNA, 25 bp, Homo sapien
gatcctaacgtgcacctggcatggg

SEQ ID NO: 5134970 - DNA, 25 bp, Homo sapien
ctaggggacatcaccggtggggacg

SEQ ID NO: 5134971 - DNA, 25 bp, Homo sapien
gggagtccgcgtgggcgctggaaac

SEQ ID NO: 5134972 - DNA, 25 bp, Homo sapien
ggggacggggagagctttccaggca

SEQ ID NO: 5134973 - DNA, 25 bp, Homo sapien
ctttcctaggggacatcaccggtgg

SEQ ID NO: 5134974 - DNA, 25 bp, Homo sapien
gatatttacaacacccacgtctcca

SEQ ID NO: 5134975 - DNA, 25 bp, Homo sapien
tccaaaaccttccagtagcgatcct

SEQ ID NO: 5134976 - DNA, 25 bp, Homo sapien
gaaagaatacccagcaatccagcgt

SEQ ID NO: 5134977 - DNA, 25 bp, Homo sapien
cacgtctccagtaatccattctttg

SEQ ID NO: 5134978 - DNA, 25 bp, Homo sapien
tctggagattcaccagtgcgttcct

SEQ ID NO: 5134979 - DNA, 25 bp, Homo sapien
gagatctcttataccttttacccag

SEQ ID NO: 5134980 - DNA, 25 bp, Homo sapien
taatagttgccagactaaggagaac

SEQ ID NO: 5134981 - DNA, 25 bp, Homo sapien
cacaggaatcctcatgggccctttt

SEQ ID NO: 5134982 - DNA, 25 bp, Homo sapien
tattgtgaatttctttaagagggat

SEQ ID NO: 5134983 - DNA, 25 bp, Homo sapien
gtttattcttcaccgtcatatggtt

SEQ ID NO: 5134984 - DNA, 25 bp, Homo sapien
tcttcaccgtcatatggttcagata

SEQ ID NO: 5134985 - DNA, 25 bp, Homo sapien
gaatttctttaagagggatccataa

SEQ ID NO: 5134986 - DNA, 25 bp, Homo sapien
agccagcagtatagccctctctctg

SEQ ID NO: 5134987 - DNA, 25 bp, Homo sapien
atcccatagccagcagtatagccct

SEQ ID NO: 5134988 - DNA, 25 bp, Homo sapien
caatcccatagccagcagtatagcc

SEQ ID NO: 5134989 - DNA, 25 bp, Homo sapien
catagccagcagtatagccctctct

SEQ ID NO: 5134990 - DNA, 25 bp, Homo sapien
tctttgtctcttcccctctctcact

SEQ ID NO: 5134991 - DNA, 25 bp, Homo sapien
tcttcccctctctcactgtttctct

SEQ ID NO: 5134992 - DNA, 25 bp, Homo sapien
tgtctcttcccctctctcactgttt

SEQ ID NO: 5134993 - DNA, 25 bp, Homo sapien
ctcttcccctctctcactgtttctc

SEQ ID NO: 5134994 - DNA, 25 bp, Homo sapien
tcccttaattgcttgggaggaacca

SEQ ID NO: 5134995 - DNA, 25 bp, Homo sapien
cggcgcgccaagagccttcacgaaa

SEQ ID NO: 5134996 - DNA, 25 bp, Homo sapien
gccaagagccttcacgaaactgggc

SEQ ID NO: 5134997 - DNA, 25 bp, Homo sapien
caagagccttcacgaaactgggctg

SEQ ID NO: 5134998 - DNA, 25 bp, Homo sapien
cgcgccaagagccttcacgaaactg

SEQ ID NO: 5134999 - DNA, 25 bp, Homo sapien
ccttggcagcggcttcagcggagct

SEQ ID NO: 5135000 - DNA, 25 bp, Homo sapien
gcagcggcttcagcggagctgacct

SEQ ID NO: 5135001 - DNA, 25 bp, Homo sapien
ttggcagcggcttcagcggagctga

SEQ ID NO: 5135002 - DNA, 25 bp, Homo sapien
tggcagcggcttcagcggagctgac

SEQ ID NO: 5135003 - DNA, 25 bp, Homo sapien
gcacacaattctggcagagagagcc

SEQ ID NO: 5135004 - DNA, 25 bp, Homo sapien
ctatcaagtaccagtatcttcacat

SEQ ID NO: 5135005 - DNA, 25 bp, Homo sapien
agagagagccatgatcaaagagtgg

SEQ ID NO: 5135006 - DNA, 25 bp, Homo sapien
agttcacaactcaatagcacgtaca

SEQ ID NO: 5135007 - DNA, 25 bp, Homo sapien
tttcattggttgaggatcgtacaga

SEQ ID NO: 5135008 - DNA, 25 bp, Homo sapien
gtctacttacataatcctagttctg

SEQ ID NO: 5135009 - DNA, 25 bp, Homo sapien
cctagttctgaagaaacgattactt

SEQ ID NO: 5135010 - DNA, 25 bp, Homo sapien
taatcctagttctgaagaaacgatt

SEQ ID NO: 5135011 - DNA, 25 bp, Homo sapien
gaaaaagtctacttacataatccta

SEQ ID NO: 5135012 - DNA, 25 bp, Homo sapien
tgaggccccttgtggtttgtaccca

SEQ ID NO: 5135013 - DNA, 25 bp, Homo sapien
taaatgtctatatgaagcttgagga

SEQ ID NO: 5135014 - DNA, 25 bp, Homo sapien
tattgtatcgattgagcttcctgca

SEQ ID NO: 5135015 - DNA, 25 bp, Homo sapien
gcttcctgcagtatcgtggctgtag

SEQ ID NO: 5135016 - DNA, 25 bp, Homo sapien
gaagtctatttgaattgtaaaagca

SEQ ID NO: 5135017 - DNA, 25 bp, Homo sapien
tgaatggttgccagttagcctgaag

SEQ ID NO: 5135018 - DNA, 25 bp, Homo sapien
cctgaagtctatttgaattgtaaaa

SEQ ID NO: 5135019 - DNA, 25 bp, Homo sapien
ggatgtgcatgaatggttgccagtt

SEQ ID NO: 5135020 - DNA, 25 bp, Homo sapien
ttgcttgtggtctgttcaagggtga

SEQ ID NO: 5135021 - DNA, 25 bp, Homo sapien
gagtgtgacccagttttactctgta

SEQ ID NO: 5135022 - DNA, 25 bp, Homo sapien
gggtaaatcttgataagtcagttgt

SEQ ID NO: 5135023 - DNA, 25 bp, Homo sapien
tgtccctagctcaggggtaaatctt

SEQ ID NO: 5135024 - DNA, 25 bp, Homo sapien
aatactcgcttgttgtagtctctgg

SEQ ID NO: 5135025 - DNA, 25 bp, Homo sapien
gcctgtgttacatctatgtgggaaa

SEQ ID NO: 5135026 - DNA, 25 bp, Homo sapien
aagttacatgttctagtcatcagga

SEQ ID NO: 5135027 - DNA, 25 bp, Homo sapien
gaattgcaggcccatacgatttgag

SEQ ID NO: 5135028 - DNA, 25 bp, Homo sapien
tcagaacttggccagcatacggagc

SEQ ID NO: 5135029 - DNA, 25 bp, Homo sapien
taagggcattacaggaacgaactca

SEQ ID NO: 5135030 - DNA, 25 bp, Homo sapien
gaccacacagttcatagagacaggg

SEQ ID NO: 5135031 - DNA, 25 bp, Homo sapien
caactgatggcatggtacccaaggg

SEQ ID NO: 5135032 - DNA, 25 bp, Homo sapien
aatttcaaaactctccacggcacga

SEQ ID NO: 5135033 - DNA, 25 bp, Homo sapien
caaaactctccacggcacgatgcat

SEQ ID NO: 5135034 - DNA, 25 bp, Homo sapien
tttcaaaactctccacggcacgatg

SEQ ID NO: 5135035 - DNA, 25 bp, Homo sapien
ctaatttcaaaactctccacggcac

SEQ ID NO: 5135036 - DNA, 25 bp, Homo sapien
cagggagagtgtcaaagcaacaacc

SEQ ID NO: 5135037 - DNA, 25 bp, Homo sapien
cgttttgatgatggagggctactac

SEQ ID NO: 5135038 - DNA, 25 bp, Homo sapien
gatctgctcagatgcttggacagga

SEQ ID NO: 5135039 - DNA, 25 bp, Homo sapien
tctggatggcagacaaatcaggact

SEQ ID NO: 5135040 - DNA, 25 bp, Homo sapien
agtttgagttatggcccatgtgaaa

SEQ ID NO: 5135041 - DNA, 25 bp, Homo sapien
tacagtttgagttatggcccatgtg

SEQ ID NO: 5135042 - DNA, 25 bp, Homo sapien
ctggccttgacttttaataaacaga

SEQ ID NO: 5135043 - DNA, 25 bp, Homo sapien
tggccttgacttttaataaacagat

SEQ ID NO: 5135044 - DNA, 25 bp, Homo sapien
ttgctgcctgaaggggaatatccgg

SEQ ID NO: 5135045 - DNA, 25 bp, Homo sapien
gaagcaagtgtagggacattaggat

SEQ ID NO: 5135046 - DNA, 25 bp, Homo sapien
gaatatccggtaaagagaccctgtc

SEQ ID NO: 5135047 - DNA, 25 bp, Homo sapien
gctctttgccacagagtgtagagct

SEQ ID NO: 5135048 - DNA, 25 bp, Homo sapien
tgactcttccttcagacgtaaccac

SEQ ID NO: 5135049 - DNA, 25 bp, Homo sapien
tacttgatttattcgtctgtgtctc

SEQ ID NO: 5135050 - DNA, 25 bp, Homo sapien
tgcacctggagcacccagtacttga

SEQ ID NO: 5135051 - DNA, 25 bp, Homo sapien
cccttgtggctgaatttggtggttt

SEQ ID NO: 5135052 - DNA, 25 bp, Homo sapien
cagtttcgtccctctgttggtgtcc

SEQ ID NO: 5135053 - DNA, 25 bp, Homo sapien
tcgtccctctgttggtgtccctttc

SEQ ID NO: 5135054 - DNA, 25 bp, Homo sapien
gagagcttcagtttcgtccctctgt

SEQ ID NO: 5135055 - DNA, 25 bp, Homo sapien
agttcaagtactgtcttggaactgc

SEQ ID NO: 5135056 - DNA, 25 bp, Homo sapien
gccaactctggtggcttattttcaa

SEQ ID NO: 5135057 - DNA, 25 bp, Homo sapien
cagtggcttccaattggccaactct

SEQ ID NO: 5135058 - DNA, 25 bp, Homo sapien
ttattttcaagtctctgcccctctg

SEQ ID NO: 5135059 - DNA, 25 bp, Homo sapien
gatagtctttgacactgttgagccc

SEQ ID NO: 5135060 - DNA, 25 bp, Homo sapien
aaattcttaaagctgactggttcct

SEQ ID NO: 5135061 - DNA, 25 bp, Homo sapien
aattcttaaagctgactggttcctg

SEQ ID NO: 5135062 - DNA, 25 bp, Homo sapien
tcaaaaattcttaaagctgactggt

SEQ ID NO: 5135063 - DNA, 25 bp, Homo sapien
cttaaagctgactggttcctgagac

SEQ ID NO: 5135064 - DNA, 25 bp, Homo sapien
tgagattagatgaattggtgcccag

SEQ ID NO: 5135065 - DNA, 25 bp, Homo sapien
taatctgtgctgtttgtgagattag

SEQ ID NO: 5135066 - DNA, 25 bp, Homo sapien
agatgaattggtgcccagccatggg

SEQ ID NO: 5135067 - DNA, 25 bp, Homo sapien
tggggcttgtcacagccatccagat

SEQ ID NO: 5135068 - DNA, 25 bp, Homo sapien
cagcaggtatttgtaataccttctc

SEQ ID NO: 5135069 - DNA, 25 bp, Homo sapien
tgcatacaactctgccgttttaggg

SEQ ID NO: 5135070 - DNA, 25 bp, Homo sapien
cagacttccattagaggtccaaggg

SEQ ID NO: 5135071 - DNA, 25 bp, Homo sapien
ggcagaaatctctcgcagacttcca

SEQ ID NO: 5135072 - DNA, 25 bp, Homo sapien
acagatggagggtttctagaaagcc

SEQ ID NO: 5135073 - DNA, 25 bp, Homo sapien
tgttaacagtttaagtaatcacagg

SEQ ID NO: 5135074 - DNA, 25 bp, Homo sapien
gaatatttggtattcgaagctactg

SEQ ID NO: 5135075 - DNA, 25 bp, Homo sapien
taatcacaggccattctggatcatg

SEQ ID NO: 5135076 - DNA, 25 bp, Homo sapien
tggtattcgaagctactgtctcttt

SEQ ID NO: 5135077 - DNA, 25 bp, Homo sapien
tctcgtacgttcttgccacttggcc

SEQ ID NO: 5135078 - DNA, 25 bp, Homo sapien
gagtggccttcgctctccgtgattc

SEQ ID NO: 5135079 - DNA, 25 bp, Homo sapien
tcttggttgcggttggttgcatgca

SEQ ID NO: 5135080 - DNA, 25 bp, Homo sapien
caaaacttcctgacttctcgtacgt

SEQ ID NO: 5135081 - DNA, 25 bp, Homo sapien
ggcgcgctgcacctggtgatgaccc

SEQ ID NO: 5135082 - DNA, 25 bp, Homo sapien
atgaccctcgtagtggctgcggcgc

SEQ ID NO: 5135083 - DNA, 25 bp, Homo sapien
ctggtgatgaccctcgtagtggctg

SEQ ID NO: 5135084 - DNA, 25 bp, Homo sapien
gcgcgctgcacctggtgatgaccct

SEQ ID NO: 5135085 - DNA, 25 bp, Homo sapien
gatgcccaggcaaagaccgtgactg

SEQ ID NO: 5135086 - DNA, 25 bp, Homo sapien
ccgactgcttgtaggcgatgcccag

SEQ ID NO: 5135087 - DNA, 25 bp, Homo sapien
gaaggctctaccactgtaggacaga

SEQ ID NO: 5135088 - DNA, 25 bp, Homo sapien
aagagtcactggaacggaccttccg

SEQ ID NO: 5135089 - DNA, 25 bp, Homo sapien
tatgggatccacactgatacagagc

SEQ ID NO: 5135090 - DNA, 25 bp, Homo sapien
taaaccttaggcttcgtgagctgac

SEQ ID NO: 5135091 - DNA, 25 bp, Homo sapien
aaaaatcagagtggcgctggagcct

SEQ ID NO: 5135092 - DNA, 25 bp, Homo sapien
tgaggtctatttgccctaccctagg

SEQ ID NO: 5135093 - DNA, 25 bp, Homo sapien
ctcatcagtactagagaggacaatg

SEQ ID NO: 5135094 - DNA, 25 bp, Homo sapien
cagtactagagaggacaatggtaag

SEQ ID NO: 5135095 - DNA, 25 bp, Homo sapien
atcagtactagagaggacaatggta

SEQ ID NO: 5135096 - DNA, 25 bp, Homo sapien
gtactcatcagtactagagaggaca

SEQ ID NO: 5135097 - DNA, 25 bp, Homo sapien
ttagggaactcacaccagacttggc

SEQ ID NO: 5135098 - DNA, 25 bp, Homo sapien
gcaaaatggccaattctcgattctt

SEQ ID NO: 5135099 - DNA, 25 bp, Homo sapien
acgtgtgtgcgctagctgtgatgcc

SEQ ID NO: 5135100 - DNA, 25 bp, Homo sapien
cttatatttgtctctgcaattgtca

SEQ ID NO: 5135101 - DNA, 25 bp, Homo sapien
tgcaagcaatcatggcctcaggagg

SEQ ID NO: 5135102 - DNA, 25 bp, Homo sapien
caagcgtacctaaagtagagggact

SEQ ID NO: 5135103 - DNA, 25 bp, Homo sapien
caggctaagattggttgattcagac

SEQ ID NO: 5135104 - DNA, 25 bp, Homo sapien
gaacttccacgcgttgattacccag

SEQ ID NO: 5135105 - DNA, 25 bp, Homo sapien
aagaatgtagagataatcggcgctg

SEQ ID NO: 5135106 - DNA, 25 bp, Homo sapien
gaaacgttattagctttggcccaca

SEQ ID NO: 5135107 - DNA, 25 bp, Homo sapien
gcgctgtcttagaggtttcccacca

SEQ ID NO: 5135108 - DNA, 25 bp, Homo sapien
tagtcacttggcaaagaaagcaacc

SEQ ID NO: 5135109 - DNA, 25 bp, Homo sapien
actccttctcctgagattcccgagc

SEQ ID NO: 5135110 - DNA, 25 bp, Homo sapien
ctccttctcctgagattcccgagca

SEQ ID NO: 5135111 - DNA, 25 bp, Homo sapien
cctgtggggctttgaaggataagca

SEQ ID NO: 5135112 - DNA, 25 bp, Homo sapien
aggataagcagggttttgagcagca

SEQ ID NO: 5135113 - DNA, 25 bp, Homo sapien
gacagaaagttcatatccggttggg

SEQ ID NO: 5135114 - DNA, 25 bp, Homo sapien
tgtgaaaaatttcccagaggtagac

SEQ ID NO: 5135115 - DNA, 25 bp, Homo sapien
cacgtacaagttgagcaaaagcagg

SEQ ID NO: 5135116 - DNA, 25 bp, Homo sapien
ttttttctggtgtgactggtggtca

SEQ ID NO: 5135117 - DNA, 25 bp, Homo sapien
tctggtgtgactggtggtcacgtac

SEQ ID NO: 5135118 - DNA, 25 bp, Homo sapien
ctggtggtcacgtacaagttgagca

SEQ ID NO: 5135119 - DNA, 25 bp, Homo sapien
gagattcagcccagcgcttgtcact

SEQ ID NO: 5135120 - DNA, 25 bp, Homo sapien
cccagcgcttgtcactgctccaggc

SEQ ID NO: 5135121 - DNA, 25 bp, Homo sapien
ctgtgcacttgagccctgtccagta

SEQ ID NO: 5135122 - DNA, 25 bp, Homo sapien
agcccagcgcttgtcactgctccag

SEQ ID NO: 5135123 - DNA, 25 bp, Homo sapien
tattcaggaatggactcagtcttgc

SEQ ID NO: 5135124 - DNA, 25 bp, Homo sapien
aggaatgatattcaggaatggactc

SEQ ID NO: 5135125 - DNA, 25 bp, Homo sapien
tgatattcaggaatggactcagtct

SEQ ID NO: 5135126 - DNA, 25 bp, Homo sapien
caggaatggactcagtcttgccttg

SEQ ID NO: 5135127 - DNA, 25 bp, Homo sapien
ggtatggacttcagtttagctagtt

SEQ ID NO: 5135128 - DNA, 25 bp, Homo sapien
tggtatggacttcagtttagctagt

SEQ ID NO: 5135129 - DNA, 25 bp, Homo sapien
tggacttcagtttagctagttacag

SEQ ID NO: 5135130 - DNA, 25 bp, Homo sapien
tatggacttcagtttagctagttac

SEQ ID NO: 5135131 - DNA, 25 bp, Homo sapien
cactgtcaggcgatgctctcttcct

SEQ ID NO: 5135132 - DNA, 25 bp, Homo sapien
agagaaagacgctttaaaagaggtg

SEQ ID NO: 5135133 - DNA, 25 bp, Homo sapien
cttgcacagttcagagaaagacgct

SEQ ID NO: 5135134 - DNA, 25 bp, Homo sapien
cgttgtagctcagccactggacgtg

SEQ ID NO: 5135135 - DNA, 25 bp, Homo sapien
cgaggtaagcatcccgctggtggat

SEQ ID NO: 5135136 - DNA, 25 bp, Homo sapien
gttctaggtctctgtgacccgcgcc

SEQ ID NO: 5135137 - DNA, 25 bp, Homo sapien
aagacgtggcggctcccgctcagca

SEQ ID NO: 5135138 - DNA, 25 bp, Homo sapien
ttccgagcgcggtctgttgacgacg

SEQ ID NO: 5135139 - DNA, 25 bp, Homo sapien
aactgataccctgaattgtaaaact

SEQ ID NO: 5135140 - DNA, 25 bp, Homo sapien
ctgaatcaagatctaagtcacagca

SEQ ID NO: 5135141 - DNA, 25 bp, Homo sapien
tctgaatcaagatctaagtcacagc

SEQ ID NO: 5135142 - DNA, 25 bp, Homo sapien
gctcagccaagtctgttttggtgtt

SEQ ID NO: 5135143 - DNA, 25 bp, Homo sapien
tgctgctcagagatggtagaagatg

SEQ ID NO: 5135144 - DNA, 25 bp, Homo sapien
ctcagagatggtagaagatgggcct

SEQ ID NO: 5135145 - DNA, 25 bp, Homo sapien
tgctcagccaagtctgttttggtgt

SEQ ID NO: 5135146 - DNA, 25 bp, Homo sapien
tgtgggaatccgatctgtgacaaaa

SEQ ID NO: 5135147 - DNA, 25 bp, Homo sapien
ttcacaatgtgggaatccgatctgt

SEQ ID NO: 5135148 - DNA, 25 bp, Homo sapien
atctgtttcaaggtcaatttgttgc

SEQ ID NO: 5135149 - DNA, 25 bp, Homo sapien
tgttgctcttaagcccatgcagttg

SEQ ID NO: 5135150 - DNA, 25 bp, Homo sapien
aagccgagggagttcatcactacca

SEQ ID NO: 5135151 - DNA, 25 bp, Homo sapien
gccgagggagttcatcactaccaga

SEQ ID NO: 5135152 - DNA, 25 bp, Homo sapien
cgagggagttcatcactaccagacc

SEQ ID NO: 5135153 - DNA, 25 bp, Homo sapien
agccgagggagttcatcactaccag

SEQ ID NO: 5135154 - DNA, 25 bp, Homo sapien
caatcgtgtacaaatgccatcaaag

SEQ ID NO: 5135155 - DNA, 25 bp, Homo sapien
gaaaagaaagttacggagcaatatc

SEQ ID NO: 5135156 - DNA, 25 bp, Homo sapien
cacaaacaaaactaggcccagataa

SEQ ID NO: 5135157 - DNA, 25 bp, Homo sapien
gagcaatatctcttacgaacttaga

SEQ ID NO: 5135158 - DNA, 25 bp, Homo sapien
gaccatcagcataccgagaagccac

SEQ ID NO: 5135159 - DNA, 25 bp, Homo sapien
gcataccgagaagccacaggtctcc

SEQ ID NO: 5135160 - DNA, 25 bp, Homo sapien
tcagcataccgagaagccacaggtc

SEQ ID NO: 5135161 - DNA, 25 bp, Homo sapien
ggtctccccagagacgccacataat

SEQ ID NO: 5135162 - DNA, 25 bp, Homo sapien
tccttcacatagatcagacacactg

SEQ ID NO: 5135163 - DNA, 25 bp, Homo sapien
agagacttgcaggaagtttcttgta

SEQ ID NO: 5135164 - DNA, 25 bp, Homo sapien
tgatcactcactgctgctaccagca

SEQ ID NO: 5135165 - DNA, 25 bp, Homo sapien
ttcttgtatgtacaaataaaccatc

SEQ ID NO: 5135166 - DNA, 25 bp, Homo sapien
tgccgccaaaatccagcactatggt

SEQ ID NO: 5135167 - DNA, 25 bp, Homo sapien
tgttagagcctctcggcacagatca

SEQ ID NO: 5135168 - DNA, 25 bp, Homo sapien
tatggtgacgcactgttccaagatg

SEQ ID NO: 5135169 - DNA, 25 bp, Homo sapien
gagccagtccattcgctgcttgtag

SEQ ID NO: 5135170 - DNA, 25 bp, Homo sapien
agacttaagcacttgattccttcag

SEQ ID NO: 5135171 - DNA, 25 bp, Homo sapien
caagaaagcaaaagctttgcagact

SEQ ID NO: 5135172 - DNA, 25 bp, Homo sapien
tgcttcctgggtagagaatctggct

SEQ ID NO: 5135173 - DNA, 25 bp, Homo sapien
gaatctggctgagtggcatctgtgt

SEQ ID NO: 5135174 - DNA, 25 bp, Homo sapien
acagtcagctcaaccgtcagtttct

SEQ ID NO: 5135175 - DNA, 25 bp, Homo sapien
caactgatggcagtagctatggact

SEQ ID NO: 5135176 - DNA, 25 bp, Homo sapien
caggagtagcattttcctgccactt

SEQ ID NO: 5135177 - DNA, 25 bp, Homo sapien
ggactgttcggtcacaggagtagca

SEQ ID NO: 5135178 - DNA, 25 bp, Homo sapien
accatcagtgcccaatgggatctct

SEQ ID NO: 5135179 - DNA, 25 bp, Homo sapien
ccaggttcaggagacgggtattcag

SEQ ID NO: 5135180 - DNA, 25 bp, Homo sapien
gtattcaggggcctcatttgggttg

SEQ ID NO: 5135181 - DNA, 25 bp, Homo sapien
atttgggttgttccagctatgccat

SEQ ID NO: 5135182 - DNA, 25 bp, Homo sapien
cgacactggctaaacaagggtctac

SEQ ID NO: 5135183 - DNA, 25 bp, Homo sapien
ggctctcccgacactggctaaacaa

SEQ ID NO: 5135184 - DNA, 25 bp, Homo sapien
gtgtgagtcgcactcggctctcccg

SEQ ID NO: 5135185 - DNA, 25 bp, Homo sapien
tcccttctcggtgctcggtgggtgt

SEQ ID NO: 5135186 - DNA, 25 bp, Homo sapien
tcacttcttccaggtaaagctttat

SEQ ID NO: 5135187 - DNA, 25 bp, Homo sapien
catgtcaatacattgacatccaaaa

SEQ ID NO: 5135188 - DNA, 25 bp, Homo sapien
aaatgtccctatcaaaattcatgtc

SEQ ID NO: 5135189 - DNA, 25 bp, Homo sapien
gatggagtcatcagcttgcgcgtac

SEQ ID NO: 5135190 - DNA, 25 bp, Homo sapien
ctggaataggaatgaaccccggaga

SEQ ID NO: 5135191 - DNA, 25 bp, Homo sapien
gaggcacgaaccagaaggagtgaaa

SEQ ID NO: 5135192 - DNA, 25 bp, Homo sapien
tggaataggaatgaaccccggagaa

SEQ ID NO: 5135193 - DNA, 25 bp, Homo sapien
gggtcactggcggatcctgcagtca

SEQ ID NO: 5135194 - DNA, 25 bp, Homo sapien
tccctggaactcactgaattgttcc

SEQ ID NO: 5135195 - DNA, 25 bp, Homo sapien
ccctggaactcactgaattgttcct

SEQ ID NO: 5135196 - DNA, 25 bp, Homo sapien
gcagggcttgcatgtgctgctccac

SEQ ID NO: 5135197 - DNA, 25 bp, Homo sapien
gggcttgcatgtgctgctccacggt

SEQ ID NO: 5135198 - DNA, 25 bp, Homo sapien
ttgcatgtgctgctccacggtctct

SEQ ID NO: 5135199 - DNA, 25 bp, Homo sapien
accacccccagatcaaggctgtggg

SEQ ID NO: 5135200 - DNA, 25 bp, Homo sapien
tgattccctccatggtagtgactgt

SEQ ID NO: 5135201 - DNA, 25 bp, Homo sapien
ctccctgtacctgtgggaaccctct

SEQ ID NO: 5135202 - DNA, 25 bp, Homo sapien
tgtccccatggtattgatctagttc

SEQ ID NO: 5135203 - DNA, 25 bp, Homo sapien
aggatccttgaccaccaccgacttt

SEQ ID NO: 5135204 - DNA, 25 bp, Homo sapien
gtatctatccgaggccttaaatgca

SEQ ID NO: 5135205 - DNA, 25 bp, Homo sapien
ggccttaaatgcacctggccgggag

SEQ ID NO: 5135206 - DNA, 25 bp, Homo sapien
ctcagtatctatccgaggccttaaa

SEQ ID NO: 5135207 - DNA, 25 bp, Homo sapien
tatccgaggccttaaatgcacctgg

SEQ ID NO: 5135208 - DNA, 25 bp, Homo sapien
tgtagactggacacgggatctccaa

SEQ ID NO: 5135209 - DNA, 25 bp, Homo sapien
gatcctttagaaaagctatagtgcc

SEQ ID NO: 5135210 - DNA, 25 bp, Homo sapien
cctctggcgttgaaggacactgtgt

SEQ ID NO: 5135211 - DNA, 25 bp, Homo sapien
gaggagaagctccttggattcttca

SEQ ID NO: 5135212 - DNA, 25 bp, Homo sapien
taaagccaatgaactcttagcctgg

SEQ ID NO: 5135213 - DNA, 25 bp, Homo sapien
ttctggtgcccttcctaaagccaat

SEQ ID NO: 5135214 - DNA, 25 bp, Homo sapien
aagccaatgaactcttagcctggtc

SEQ ID NO: 5135215 - DNA, 25 bp, Homo sapien
cattctggtgcccttcctaaagcca

SEQ ID NO: 5135216 - DNA, 25 bp, Homo sapien
tgaaacgtgaagagatgctcattag

SEQ ID NO: 5135217 - DNA, 25 bp, Homo sapien
ctgaaacgtgaagagatgctcatta

SEQ ID NO: 5135218 - DNA, 25 bp, Homo sapien
aggcagtacgcaggtgtccgtgcat

SEQ ID NO: 5135219 - DNA, 25 bp, Homo sapien
ttaggaaggcagtacgcaggtgtcc

SEQ ID NO: 5135220 - DNA, 25 bp, Homo sapien
acactctgttctctcggcaaatgcg

SEQ ID NO: 5135221 - DNA, 25 bp, Homo sapien
gaattccaagtcatcacattgtcac

SEQ ID NO: 5135222 - DNA, 25 bp, Homo sapien
acattgtcaccatcctttgtggaga

SEQ ID NO: 5135223 - DNA, 25 bp, Homo sapien
tgcaggaaattctacacactctgtt

SEQ ID NO: 5135224 - DNA, 25 bp, Homo sapien
aggctattcgggacataagctacac

SEQ ID NO: 5135225 - DNA, 25 bp, Homo sapien
tcgtctgaggctattcgggacataa

SEQ ID NO: 5135226 - DNA, 25 bp, Homo sapien
ctaatgatccacgtcgtctgaggct

SEQ ID NO: 5135227 - DNA, 25 bp, Homo sapien
gatccacgtcgtctgaggctattcg

SEQ ID NO: 5135228 - DNA, 25 bp, Homo sapien
gtgatgtggaaaatgcgtgaaacgg

SEQ ID NO: 5135229 - DNA, 25 bp, Homo sapien
aagtgatgtggaaaatgcgtgaaac

SEQ ID NO: 5135230 - DNA, 25 bp, Homo sapien
gaaagtgatgtggaaaatgcgtgaa

SEQ ID NO: 5135231 - DNA, 25 bp, Homo sapien
ggaaagtgatgtggaaaatgcgtga

SEQ ID NO: 5135232 - DNA, 25 bp, Homo sapien
gatacagcagcaaggcaccgtcttg

SEQ ID NO: 5135233 - DNA, 25 bp, Homo sapien
cttaacactagtgaactgtcagctt

SEQ ID NO: 5135234 - DNA, 25 bp, Homo sapien
cagcttaagagtggttaagatagta

SEQ ID NO: 5135235 - DNA, 25 bp, Homo sapien
agtgccttgatcttcgattccccag

SEQ ID NO: 5135236 - DNA, 25 bp, Homo sapien
gagcaatgcgatgtgtacccctgca

SEQ ID NO: 5135237 - DNA, 25 bp, Homo sapien
cagacagaggttgaaaacgaggtgc

SEQ ID NO: 5135238 - DNA, 25 bp, Homo sapien
gcaagttcacatggcccaagagatg

SEQ ID NO: 5135239 - DNA, 25 bp, Homo sapien
tacccctgcacacatgatggcatgg

SEQ ID NO: 5135240 - DNA, 25 bp, Homo sapien
agcatctgccagactaaatctcctg

SEQ ID NO: 5135241 - DNA, 25 bp, Homo sapien
ggcttagaagatgagtggcagcttc

SEQ ID NO: 5135242 - DNA, 25 bp, Homo sapien
ccagccaatgctgggctgaaagcca

SEQ ID NO: 5135243 - DNA, 25 bp, Homo sapien
gacagctacgaggaggagaggctta

SEQ ID NO: 5135244 - DNA, 25 bp, Homo sapien
ggctcacctcttaactggccattgg

SEQ ID NO: 5135245 - DNA, 25 bp, Homo sapien
caacagattccctgagagccaggtg

SEQ ID NO: 5135246 - DNA, 25 bp, Homo sapien
ggaagttgggtaggaggactgtcca

SEQ ID NO: 5135247 - DNA, 25 bp, Homo sapien
ggtgccaaggcaatgtgaccctgct

SEQ ID NO: 5135248 - DNA, 25 bp, Homo sapien
ccccagggaggcctatggcagtgta

SEQ ID NO: 5135249 - DNA, 25 bp, Homo sapien
tccacacttgagcagataccaggct

SEQ ID NO: 5135250 - DNA, 25 bp, Homo sapien
aggtcacatttatgcacatggatgg

SEQ ID NO: 5135251 - DNA, 25 bp, Homo sapien
catattctgcgaggatcatctgttt

SEQ ID NO: 5135252 - DNA, 25 bp, Homo sapien
tctccagccacgtatggccagtggc

SEQ ID NO: 5135253 - DNA, 25 bp, Homo sapien
tatacttgatataacttggccaggc

SEQ ID NO: 5135254 - DNA, 25 bp, Homo sapien
gtggcttcccaatcgtactctagag

SEQ ID NO: 5135255 - DNA, 25 bp, Homo sapien
catgcctcactcaagagactgccag

SEQ ID NO: 5135256 - DNA, 25 bp, Homo sapien
actacctaatgcaccacctaagcgg

SEQ ID NO: 5135257 - DNA, 25 bp, Homo sapien
gaagaatgaccacgaactcctgaag

SEQ ID NO: 5135258 - DNA, 25 bp, Homo sapien
gaaaaacgtaaaatgtaatgcacta

SEQ ID NO: 5135259 - DNA, 25 bp, Homo sapien
ggctcacgttgtcagagtcaaaaca

SEQ ID NO: 5135260 - DNA, 25 bp, Homo sapien
ttccagaaccaatatctacaacaaa

SEQ ID NO: 5135261 - DNA, 25 bp, Homo sapien
tcctaggatccaccttgacagatgg

SEQ ID NO: 5135262 - DNA, 25 bp, Homo sapien
caacagagaagtaggtgaaattcac

SEQ ID NO: 5135263 - DNA, 25 bp, Homo sapien
tactgagctcagtctgacaacagag

SEQ ID NO: 5135264 - DNA, 25 bp, Homo sapien
gacagatggactcatttcccataag

SEQ ID NO: 5135265 - DNA, 25 bp, Homo sapien
tttccttactgagaaggagtcccca

SEQ ID NO: 5135266 - DNA, 25 bp, Homo sapien
tcctcctgtgccgacaggaccttca

SEQ ID NO: 5135267 - DNA, 25 bp, Homo sapien
ctgagaaggagtccccaaaccacta

SEQ ID NO: 5135268 - DNA, 25 bp, Homo sapien
ggaccttcacaacctaaaaagcagc

SEQ ID NO: 5135269 - DNA, 25 bp, Homo sapien
tctcagtcccgtggaatgaaccagg

SEQ ID NO: 5135270 - DNA, 25 bp, Homo sapien
gaagacatagtcttgactccaccac

SEQ ID NO: 5135271 - DNA, 25 bp, Homo sapien
gctcgggccgcaccattagtgaacc

SEQ ID NO: 5135272 - DNA, 25 bp, Homo sapien
caggaaacggtgagctgcctcctac

SEQ ID NO: 5135273 - DNA, 25 bp, Homo sapien
tttccctgtccaatcttccacatct

SEQ ID NO: 5135274 - DNA, 25 bp, Homo sapien
ttccctgtccaatcttccacatctc

SEQ ID NO: 5135275 - DNA, 25 bp, Homo sapien
cacctagtattgacttctcagactg

SEQ ID NO: 5135276 - DNA, 25 bp, Homo sapien
tgtttttcattagcacctagtattg

SEQ ID NO: 5135277 - DNA, 25 bp, Homo sapien
ttttcattagcacctagtattgact

SEQ ID NO: 5135278 - DNA, 25 bp, Homo sapien
cattagcacctagtattgacttctc

SEQ ID NO: 5135279 - DNA, 25 bp, Homo sapien
cttgccaaacgagaaacacgtcctc

SEQ ID NO: 5135280 - DNA, 25 bp, Homo sapien
gagaaacacgtcctctctgactcca

SEQ ID NO: 5135281 - DNA, 25 bp, Homo sapien
ccacgtcgggcttgggaggctcggc

SEQ ID NO: 5135282 - DNA, 25 bp, Homo sapien
ggcttgggaggctcggccaccagcc

SEQ ID NO: 5135283 - DNA, 25 bp, Homo sapien
agccatcagggatttctcaccacca

SEQ ID NO: 5135284 - DNA, 25 bp, Homo sapien
catcagggatttctcaccaccataa

SEQ ID NO: 5135285 - DNA, 25 bp, Homo sapien
tcagggatttctcaccaccataact

SEQ ID NO: 5135286 - DNA, 25 bp, Homo sapien
gggatttctcaccaccataactctc

SEQ ID NO: 5135287 - DNA, 25 bp, Homo sapien
gatgaccaagcaatcaaaaccaaag

SEQ ID NO: 5135288 - DNA, 25 bp, Homo sapien
gggttcaggcaagccgccagagcca

SEQ ID NO: 5135289 - DNA, 25 bp, Homo sapien
accaaagaacccaggcactctaaag

SEQ ID NO: 5135290 - DNA, 25 bp, Homo sapien
ggaaagaaaggatgaccaagcaatc

SEQ ID NO: 5135291 - DNA, 25 bp, Homo sapien
gatgccgccatttctgtcagggaga

SEQ ID NO: 5135292 - DNA, 25 bp, Homo sapien
cattttttcacgcttctccgggagc

SEQ ID NO: 5135293 - DNA, 25 bp, Homo sapien
ggcttttccatgaatcacaaaacat

SEQ ID NO: 5135294 - DNA, 25 bp, Homo sapien
catccccgacacctggagctggctt

SEQ ID NO: 5135295 - DNA, 25 bp, Homo sapien
tccagatgactcgaaacttggaaca

SEQ ID NO: 5135296 - DNA, 25 bp, Homo sapien
ttttccagatgactcgaaacttgga

SEQ ID NO: 5135297 - DNA, 25 bp, Homo sapien
gatgactcgaaacttggaacagcac

SEQ ID NO: 5135298 - DNA, 25 bp, Homo sapien
cagatgactcgaaacttggaacagc

SEQ ID NO: 5135299 - DNA, 25 bp, Homo sapien
tgtagaatcacagcttgtcagccat

SEQ ID NO: 5135300 - DNA, 25 bp, Homo sapien
gaatcacagcttgtcagccattcat

SEQ ID NO: 5135301 - DNA, 25 bp, Homo sapien
ctgtagaatcacagcttgtcagcca

SEQ ID NO: 5135302 - DNA, 25 bp, Homo sapien
tagaatcacagcttgtcagccattc

SEQ ID NO: 5135303 - DNA, 25 bp, Homo sapien
ctggattcgatgcaatctcaacaga

SEQ ID NO: 5135304 - DNA, 25 bp, Homo sapien
tgcaatctcaacagaggttgtttct

SEQ ID NO: 5135305 - DNA, 25 bp, Homo sapien
tcgatgcaatctcaacagaggttgt

SEQ ID NO: 5135306 - DNA, 25 bp, Homo sapien
aatctcaacagaggttgtttctgac

SEQ ID NO: 5135307 - DNA, 25 bp, Homo sapien
aaccccatcagcgtggcggaaagag

SEQ ID NO: 5135308 - DNA, 25 bp, Homo sapien
tcatacaaggatagcttctgggcct

SEQ ID NO: 5135309 - DNA, 25 bp, Homo sapien
cggaaagagcagtcggcaagcacat

SEQ ID NO: 5135310 - DNA, 25 bp, Homo sapien
tggtctgcacggactcattctccgg

SEQ ID NO: 5135311 - DNA, 25 bp, Homo sapien
caaacctgctgcaatattttgcatg

SEQ ID NO: 5135312 - DNA, 25 bp, Homo sapien
tgttgacgtggaccaagctcccatc

SEQ ID NO: 5135313 - DNA, 25 bp, Homo sapien
catggactgtcttcttgttcgtctc

SEQ ID NO: 5135314 - DNA, 25 bp, Homo sapien
ggattctctcactgtaccacttgca

SEQ ID NO: 5135315 - DNA, 25 bp, Homo sapien
gctcttcattgagtgagacgtgtca

SEQ ID NO: 5135316 - DNA, 25 bp, Homo sapien
tgaactgaatgatcttgtccttcac

SEQ ID NO: 5135317 - DNA, 25 bp, Homo sapien
cattatgcaatcttccaaagaggct

SEQ ID NO: 5135318 - DNA, 25 bp, Homo sapien
gagaatgtagatgcaatcattatgc

SEQ ID NO: 5135319 - DNA, 25 bp, Homo sapien
tgcttgaccatcaaacttcacaaag

SEQ ID NO: 5135320 - DNA, 25 bp, Homo sapien
gactgagcctgttccaaattatctt

SEQ ID NO: 5135321 - DNA, 25 bp, Homo sapien
tatgtctctaatccaggactgagcc

SEQ ID NO: 5135322 - DNA, 25 bp, Homo sapien
ttcagcaagttgttcccgccaagca

SEQ ID NO: 5135323 - DNA, 25 bp, Homo sapien
gcttggagtagcaacactgacgggc

SEQ ID NO: 5135324 - DNA, 25 bp, Homo sapien
aggtgatgtttgtgcccatatttcc

SEQ ID NO: 5135325 - DNA, 25 bp, Homo sapien
ctgacgggctgagttcctgcaaggc

SEQ ID NO: 5135326 - DNA, 25 bp, Homo sapien
tagattggattgctgccagagtggc

SEQ ID NO: 5135327 - DNA, 25 bp, Homo sapien
gaccaccacaatacacccagtggtg

SEQ ID NO: 5135328 - DNA, 25 bp, Homo sapien
tcaatgaccaccacaatacacccag

SEQ ID NO: 5135329 - DNA, 25 bp, Homo sapien
gatatccactactgcatcaatgacc

SEQ ID NO: 5135330 - DNA, 25 bp, Homo sapien
tatccactactgcatcaatgaccac

SEQ ID NO: 5135331 - DNA, 25 bp, Homo sapien
ctgtaccattcatagcataatcctt

SEQ ID NO: 5135332 - DNA, 25 bp, Homo sapien
gtaccattcatagcataatccttac

SEQ ID NO: 5135333 - DNA, 25 bp, Homo sapien
cattcatagcataatccttactgtg

SEQ ID NO: 5135334 - DNA, 25 bp, Homo sapien
accattcatagcataatccttactg

SEQ ID NO: 5135335 - DNA, 25 bp, Homo sapien
cttgctcaacgctaatttccatgaa

SEQ ID NO: 5135336 - DNA, 25 bp, Homo sapien
cataaatgggagcaaactgtttcat

SEQ ID NO: 5135337 - DNA, 25 bp, Homo sapien
catgaactcaggagcctcaacataa

SEQ ID NO: 5135338 - DNA, 25 bp, Homo sapien
atcaataggctctccaatgatgttc

SEQ ID NO: 5135339 - DNA, 25 bp, Homo sapien
tcttgtcaactccaacaccactaaa

SEQ ID NO: 5135340 - DNA, 25 bp, Homo sapien
gatgggtacaatcttgtcaactcca

SEQ ID NO: 5135341 - DNA, 25 bp, Homo sapien
tgtcaactccaacaccactaaaaag

SEQ ID NO: 5135342 - DNA, 25 bp, Homo sapien
ctccatgatgggtacaatcttgtca

SEQ ID NO: 5135343 - DNA, 25 bp, Homo sapien
ctgggcatgagtagcatgtggttca

SEQ ID NO: 5135344 - DNA, 25 bp, Homo sapien
tgggcatgagtagcatgtggttcat

SEQ ID NO: 5135345 - DNA, 25 bp, Homo sapien
aacaggagtacatcttgaacttctt

SEQ ID NO: 5135346 - DNA, 25 bp, Homo sapien
atattatcaataaacaggagtacat

SEQ ID NO: 5135347 - DNA, 25 bp, Homo sapien
tattatcaataaacaggagtacatc

SEQ ID NO: 5135348 - DNA, 25 bp, Homo sapien
gatattatcaataaacaggagtaca

SEQ ID NO: 5135349 - DNA, 25 bp, Homo sapien
aagtagcagaggcagtcgagtcatc

SEQ ID NO: 5135350 - DNA, 25 bp, Homo sapien
ccacgggcaacatcattatgctcat

SEQ ID NO: 5135351 - DNA, 25 bp, Homo sapien
cagcaggtacatagcctgtacagag

SEQ ID NO: 5135352 - DNA, 25 bp, Homo sapien
ggagtccagaggatccacatgtaga

SEQ ID NO: 5135353 - DNA, 25 bp, Homo sapien
tggagggatttgtagccatgcagaa

SEQ ID NO: 5135354 - DNA, 25 bp, Homo sapien
tttgtagccatgcagaatcttttgc

SEQ ID NO: 5135355 - DNA, 25 bp, Homo sapien
cgtatggagggatttgtagccatgc

SEQ ID NO: 5135356 - DNA, 25 bp, Homo sapien
tatgacaataacgtatggagggatt

SEQ ID NO: 5135357 - DNA, 25 bp, Homo sapien
tgttcacctatcaaaatctgctgaa

SEQ ID NO: 5135358 - DNA, 25 bp, Homo sapien
tgaaggcccgttctgagagatggtc

SEQ ID NO: 5135359 - DNA, 25 bp, Homo sapien
tgagagatggtcatgttcacctatc

SEQ ID NO: 5135360 - DNA, 25 bp, Homo sapien
cactgaaggcccgttctgagagatg

SEQ ID NO: 5135361 - DNA, 25 bp, Homo sapien
atataccatgggcactctcccatta

SEQ ID NO: 5135362 - DNA, 25 bp, Homo sapien
taccatgggcactctcccattaaga

SEQ ID NO: 5135363 - DNA, 25 bp, Homo sapien
catgggcactctcccattaagactt

SEQ ID NO: 5135364 - DNA, 25 bp, Homo sapien
gggcactctcccattaagactttct

SEQ ID NO: 5135365 - DNA, 25 bp, Homo sapien
ctcagggtgtttgtggagcttccaa

SEQ ID NO: 5135366 - DNA, 25 bp, Homo sapien
cactcagggtgtttgtggagcttcc

SEQ ID NO: 5135367 - DNA, 25 bp, Homo sapien
ggtcagaaggtagattgcctgtgtt

SEQ ID NO: 5135368 - DNA, 25 bp, Homo sapien
ctgatcaggtctcccatcggtcaga

SEQ ID NO: 5135369 - DNA, 25 bp, Homo sapien
ggaagtatatgtccacagatttttg

SEQ ID NO: 5135370 - DNA, 25 bp, Homo sapien
agtatatgtccacagatttttggtg

SEQ ID NO: 5135371 - DNA, 25 bp, Homo sapien
caaggaagtatatgtccacagattt

SEQ ID NO: 5135372 - DNA, 25 bp, Homo sapien
ccaaggaagtatatgtccacagatt

SEQ ID NO: 5135373 - DNA, 25 bp, Homo sapien
tgcttcctgcggctcacgtctggag

SEQ ID NO: 5135374 - DNA, 25 bp, Homo sapien
acaactgaggcatgtttctgagatg

SEQ ID NO: 5135375 - DNA, 25 bp, Homo sapien
gctttcatcaaggacccagcagcag

SEQ ID NO: 5135376 - DNA, 25 bp, Homo sapien
cagatgggtagggtgggcggctcct

SEQ ID NO: 5135377 - DNA, 25 bp, Homo sapien
agtggcaagaaaggccgagattcca

SEQ ID NO: 5135378 - DNA, 25 bp, Homo sapien
gcaagaaaggccgagattccatctc

SEQ ID NO: 5135379 - DNA, 25 bp, Homo sapien
ctggagtggcaagaaaggccgagat

SEQ ID NO: 5135380 - DNA, 25 bp, Homo sapien
caagaaaggccgagattccatctcc

SEQ ID NO: 5135381 - DNA, 25 bp, Homo sapien
ttccctctgctctgagtctaaacag

SEQ ID NO: 5135382 - DNA, 25 bp, Homo sapien
ctgagtctaaacagctgtgcagcca

SEQ ID NO: 5135383 - DNA, 25 bp, Homo sapien
acacacatcagctgtgcagccttcc

SEQ ID NO: 5135384 - DNA, 25 bp, Homo sapien
cacacatcagctgtgcagccttcct

SEQ ID NO: 5135385 - DNA, 25 bp, Homo sapien
tctgtggctcagaactgatactccc

SEQ ID NO: 5135386 - DNA, 25 bp, Homo sapien
gatactccctccttaaacggctgct

SEQ ID NO: 5135387 - DNA, 25 bp, Homo sapien
catctgaatggcctagggcatgtcc

SEQ ID NO: 5135388 - DNA, 25 bp, Homo sapien
ggcttgaagctcatccagcactgcc

SEQ ID NO: 5135389 - DNA, 25 bp, Homo sapien
cctgaaaacgtttgacctggtctat

SEQ ID NO: 5135390 - DNA, 25 bp, Homo sapien
cctggtctataactgtttcaggtgg

SEQ ID NO: 5135391 - DNA, 25 bp, Homo sapien
gagtgggatccttgcaaccaaaatt

SEQ ID NO: 5135392 - DNA, 25 bp, Homo sapien
ctccagtcaaagcagcaacctcttt

SEQ ID NO: 5135393 - DNA, 25 bp, Homo sapien
aacaccacggatgggggaaagcaga

SEQ ID NO: 5135394 - DNA, 25 bp, Homo sapien
ctaacaccacggatgggggaaagca

SEQ ID NO: 5135395 - DNA, 25 bp, Homo sapien
ttcccattactaacaccacggatgg

SEQ ID NO: 5135396 - DNA, 25 bp, Homo sapien
tttcattgataatgggtctttgtag

SEQ ID NO: 5135397 - DNA, 25 bp, Homo sapien
atccttttctgcattgtaccaccag

SEQ ID NO: 5135398 - DNA, 25 bp, Homo sapien
ttctgcattgtaccaccagtccatg

SEQ ID NO: 5135399 - DNA, 25 bp, Homo sapien
aaggactcagaataaaggtcttgca

SEQ ID NO: 5135400 - DNA, 25 bp, Homo sapien
ccttaactaaaagagtcagatcttc

SEQ ID NO: 5135401 - DNA, 25 bp, Homo sapien
cttttgatctgaaaggccccatggt

SEQ ID NO: 5135402 - DNA, 25 bp, Homo sapien
gtcccttcaacatattcagagatga

SEQ ID NO: 5135403 - DNA, 25 bp, Homo sapien
cagagatgaagtttgtgttgaatcg

SEQ ID NO: 5135404 - DNA, 25 bp, Homo sapien
gacatcagattgaggctttgcacac

SEQ ID NO: 5135405 - DNA, 25 bp, Homo sapien
ttagagcagtcctccggctgctggc

SEQ ID NO: 5135406 - DNA, 25 bp, Homo sapien
caagctgagctcctgagggaggaca

SEQ ID NO: 5135407 - DNA, 25 bp, Homo sapien
tcctccggctgctggcattggagag

SEQ ID NO: 5135408 - DNA, 25 bp, Homo sapien
catccttcctttcactgcaagctga

SEQ ID NO: 5135409 - DNA, 25 bp, Homo sapien
ttccttctcgcgtcaccttttctga

SEQ ID NO: 5135410 - DNA, 25 bp, Homo sapien
cttttctgacgatttgtcatccagc

SEQ ID NO: 5135411 - DNA, 25 bp, Homo sapien
tctgacgatttgtcatccagccact

SEQ ID NO: 5135412 - DNA, 25 bp, Homo sapien
tggcttccttctcgcgtcacctttt

SEQ ID NO: 5135413 - DNA, 25 bp, Homo sapien
cataggtggagctgtgcgggactgc

SEQ ID NO: 5135414 - DNA, 25 bp, Homo sapien
gagtttcttggcgaccaagccatag

SEQ ID NO: 5135415 - DNA, 25 bp, Homo sapien
tcaaagaccttagacacgacatgct

SEQ ID NO: 5135416 - DNA, 25 bp, Homo sapien
tgtccaggacgggaacataggtgga

SEQ ID NO: 5135417 - DNA, 25 bp, Homo sapien
aaatggcctcaagtagggacgtata

SEQ ID NO: 5135418 - DNA, 25 bp, Homo sapien
caagtagggacgtatagacaatcag

SEQ ID NO: 5135419 - DNA, 25 bp, Homo sapien
tggcctcaagtagggacgtatagac

SEQ ID NO: 5135420 - DNA, 25 bp, Homo sapien
agggacgtatagacaatcagtttac

SEQ ID NO: 5135421 - DNA, 25 bp, Homo sapien
cagtgactgcaaagactgaaatgtt

SEQ ID NO: 5135422 - DNA, 25 bp, Homo sapien
ttaaggatattgtttccattcagtg

SEQ ID NO: 5135423 - DNA, 25 bp, Homo sapien
catgtttttggtgttcttcatccca

SEQ ID NO: 5135424 - DNA, 25 bp, Homo sapien
gaggttccgtcttcatgttctcatg

SEQ ID NO: 5135425 - DNA, 25 bp, Homo sapien
cctcggcctcctgaagtgctggaat

SEQ ID NO: 5135426 - DNA, 25 bp, Homo sapien
ctgacctaatgatccgctgcctcgg

SEQ ID NO: 5135427 - DNA, 25 bp, Homo sapien
tcctgacctaatgatccgctgcctc

SEQ ID NO: 5135428 - DNA, 25 bp, Homo sapien
cctgacctaatgatccgctgcctcg

SEQ ID NO: 5135429 - DNA, 25 bp, Homo sapien
ccattttgcatcttgtaatgaagag

SEQ ID NO: 5135430 - DNA, 25 bp, Homo sapien
gataaaattatcgagtccattttgc

SEQ ID NO: 5135431 - DNA, 25 bp, Homo sapien
cgatttgaggctggtccgggaaaca

SEQ ID NO: 5135432 - DNA, 25 bp, Homo sapien
gagttgctagggcaacctctttgct

SEQ ID NO: 5135433 - DNA, 25 bp, Homo sapien
tgcagaacccggagaaggacggaca

SEQ ID NO: 5135434 - DNA, 25 bp, Homo sapien
ggacaacacaggaagccttgatggg

SEQ ID NO: 5135435 - DNA, 25 bp, Homo sapien
acggacaacacaggaagccttgatg

SEQ ID NO: 5135436 - DNA, 25 bp, Homo sapien
gccacaaagctatgtgcagaacccg

SEQ ID NO: 5135437 - DNA, 25 bp, Homo sapien
cacacttcgagtctgacatcttagt

SEQ ID NO: 5135438 - DNA, 25 bp, Homo sapien
gataaagtcataccccacacttcga

SEQ ID NO: 5135439 - DNA, 25 bp, Homo sapien
cagatttggcttgtgtgcacccact

SEQ ID NO: 5135440 - DNA, 25 bp, Homo sapien
tgcttcagtgtgatagtagctcaga

SEQ ID NO: 5135441 - DNA, 25 bp, Homo sapien
tggatttcaacctcatgcctttcgt

SEQ ID NO: 5135442 - DNA, 25 bp, Homo sapien
tcaacctcatgcctttcgtggccat

SEQ ID NO: 5135443 - DNA, 25 bp, Homo sapien
gatttcaacctcatgcctttcgtgg

SEQ ID NO: 5135444 - DNA, 25 bp, Homo sapien
tttcaacctcatgcctttcgtggcc

SEQ ID NO: 5135445 - DNA, 25 bp, Homo sapien
aagtgtcacttgataggttaatgcg

SEQ ID NO: 5135446 - DNA, 25 bp, Homo sapien
gcgtgccttcgaaaatacatctaca

SEQ ID NO: 5135447 - DNA, 25 bp, Homo sapien
gaaaggaaagtgtcacttgataggt

SEQ ID NO: 5135448 - DNA, 25 bp, Homo sapien
tgataggttaatgcgtgccttcgaa

SEQ ID NO: 5135449 - DNA, 25 bp, Homo sapien
aattaatgtcatcttatttgtgtcg

SEQ ID NO: 5135450 - DNA, 25 bp, Homo sapien
gcttgtagatattgagtttggctcc

SEQ ID NO: 5135451 - DNA, 25 bp, Homo sapien
cataggattgaattgcctgttccac

SEQ ID NO: 5135452 - DNA, 25 bp, Homo sapien
catcttatttgtgtcgttgcacaca

SEQ ID NO: 5135453 - DNA, 25 bp, Homo sapien
aacgatggaggctcacgttaaaggg

SEQ ID NO: 5135454 - DNA, 25 bp, Homo sapien
tgagggcaacgatggaggctcacgt

SEQ ID NO: 5135455 - DNA, 25 bp, Homo sapien
ggcaacgatggaggctcacgttaaa

SEQ ID NO: 5135456 - DNA, 25 bp, Homo sapien
agggcaacgatggaggctcacgtta

SEQ ID NO: 5135457 - DNA, 25 bp, Homo sapien
cagaaatactgaggagcccacagag

SEQ ID NO: 5135458 - DNA, 25 bp, Homo sapien
agaaatactgaggagcccacagagg

SEQ ID NO: 5135459 - DNA, 25 bp, Homo sapien
gaggagcctcgtaaggcggcctcca

SEQ ID NO: 5135460 - DNA, 25 bp, Homo sapien
ctgctgaggagcctcgtaaggcggc

SEQ ID NO: 5135461 - DNA, 25 bp, Homo sapien
aatgctcgccaaacaattttattca

SEQ ID NO: 5135462 - DNA, 25 bp, Homo sapien
tcttgagataatgctcgccaaacaa

SEQ ID NO: 5135463 - DNA, 25 bp, Homo sapien
ttcctcttgagataatgctcgccaa

SEQ ID NO: 5135464 - DNA, 25 bp, Homo sapien
tgagataatgctcgccaaacaattt

SEQ ID NO: 5135465 - DNA, 25 bp, Homo sapien
caggaagcaaactggtggtaaccca

SEQ ID NO: 5135466 - DNA, 25 bp, Homo sapien
tgtagtactgatacctgggtgaacc

SEQ ID NO: 5135467 - DNA, 25 bp, Homo sapien
catagttcatgatagcgaaaaagcg

SEQ ID NO: 5135468 - DNA, 25 bp, Homo sapien
ccgtcagtggaagaatggacagaca

SEQ ID NO: 5135469 - DNA, 25 bp, Homo sapien
tgttacagcattggagatactgcag

SEQ ID NO: 5135470 - DNA, 25 bp, Homo sapien
tgggacctctgagaacagaaatgag

SEQ ID NO: 5135471 - DNA, 25 bp, Homo sapien
aatgagtgtcacagcttgttacagc

SEQ ID NO: 5135472 - DNA, 25 bp, Homo sapien
caccagggggaacaagatattacag

SEQ ID NO: 5135473 - DNA, 25 bp, Homo sapien
cactttccagcatcgacagctcttt

SEQ ID NO: 5135474 - DNA, 25 bp, Homo sapien
tctttcagtgaaatgggccaattca

SEQ ID NO: 5135475 - DNA, 25 bp, Homo sapien
tggatgtacattttcccagctagga

SEQ ID NO: 5135476 - DNA, 25 bp, Homo sapien
ttgcataattcttcttggcagcctc

SEQ ID NO: 5135477 - DNA, 25 bp, Homo sapien
attccaaacgcaatggccacagccc

SEQ ID NO: 5135478 - DNA, 25 bp, Homo sapien
ctgcttgttatcagtcagctcatgg

SEQ ID NO: 5135479 - DNA, 25 bp, Homo sapien
gggcagcccactctgaatggtctca

SEQ ID NO: 5135480 - DNA, 25 bp, Homo sapien
ttccaaatgcaatggccacagccct

SEQ ID NO: 5135481 - DNA, 25 bp, Homo sapien
tcccaccgctggttcttactgacag

SEQ ID NO: 5135482 - DNA, 25 bp, Homo sapien
ccgtggaagctggagcataaaaagc

SEQ ID NO: 5135483 - DNA, 25 bp, Homo sapien
cccaaacttaggaatcggcaaggca

SEQ ID NO: 5135484 - DNA, 25 bp, Homo sapien
gaaaaatcatgaagctgccccaaac

SEQ ID NO: 5135485 - DNA, 25 bp, Homo sapien
tgtctgaggacggcatggtctgaat

SEQ ID NO: 5135486 - DNA, 25 bp, Homo sapien
tctgaggacggcatggtctgaatgt

SEQ ID NO: 5135487 - DNA, 25 bp, Homo sapien
agtgctgtctgaggacggcatggtc

SEQ ID NO: 5135488 - DNA, 25 bp, Homo sapien
tgctgtctgaggacggcatggtctg

SEQ ID NO: 5135489 - DNA, 25 bp, Homo sapien
tagagggatttcatccacccagaaa

SEQ ID NO: 5135490 - DNA, 25 bp, Homo sapien
tctctccccgctcatttagatttag

SEQ ID NO: 5135491 - DNA, 25 bp, Homo sapien
ccccgctcatttagatttagaggga

SEQ ID NO: 5135492 - DNA, 25 bp, Homo sapien
cagaaagtatccagactctgcatcc

SEQ ID NO: 5135493 - DNA, 25 bp, Homo sapien
cccaaatggtgtgaccctcttttca

SEQ ID NO: 5135494 - DNA, 25 bp, Homo sapien
catttcgtgacttaatttcaaggtc

SEQ ID NO: 5135495 - DNA, 25 bp, Homo sapien
ccttgtcagattcaatctcggtgat

SEQ ID NO: 5135496 - DNA, 25 bp, Homo sapien
tctcggtgatatggacgagggcccc

SEQ ID NO: 5135497 - DNA, 25 bp, Homo sapien
aggagaacctttatgatcgctgtct

SEQ ID NO: 5135498 - DNA, 25 bp, Homo sapien
tgtctcacaaagaggaaagaagtcc

SEQ ID NO: 5135499 - DNA, 25 bp, Homo sapien
tttatgatcgctgtctcacaaagag

SEQ ID NO: 5135500 - DNA, 25 bp, Homo sapien
gatcgctgtctcacaaagaggaaag

SEQ ID NO: 5135501 - DNA, 25 bp, Homo sapien
tttcatcacatcttgcaataacctt

SEQ ID NO: 5135502 - DNA, 25 bp, Homo sapien
gaggggatctggtctttttgatttg

SEQ ID NO: 5135503 - DNA, 25 bp, Homo sapien
tcacatcttgcaataaccttctgtc

SEQ ID NO: 5135504 - DNA, 25 bp, Homo sapien
catcacatcttgcaataaccttctg

SEQ ID NO: 5135505 - DNA, 25 bp, Homo sapien
tgtaatctttttgcctgacagagct

SEQ ID NO: 5135506 - DNA, 25 bp, Homo sapien
tacatgcaacgcagtaaatgggtaa

SEQ ID NO: 5135507 - DNA, 25 bp, Homo sapien
cagagacatcctaaccccttggtat

SEQ ID NO: 5135508 - DNA, 25 bp, Homo sapien
cagacccttcccatgatttcagtga

SEQ ID NO: 5135509 - DNA, 25 bp, Homo sapien
ctccttgcctttcggcatccagata

SEQ ID NO: 5135510 - DNA, 25 bp, Homo sapien
aataatgatttcaaataagggttga

SEQ ID NO: 5135511 - DNA, 25 bp, Homo sapien
taagccaggctatcgctctgtacaa

SEQ ID NO: 5135512 - DNA, 25 bp, Homo sapien
ttcctcaactggatcacccacactg

SEQ ID NO: 5135513 - DNA, 25 bp, Homo sapien
ctttggctctaagaaccttccgata

SEQ ID NO: 5135514 - DNA, 25 bp, Homo sapien
tccgatatacaaagcccggcttaaa

SEQ ID NO: 5135515 - DNA, 25 bp, Homo sapien
gctgacttttgctgctttgacttgc

SEQ ID NO: 5135516 - DNA, 25 bp, Homo sapien
ttcacagtcctcgtgtccgcttctc

SEQ ID NO: 5135517 - DNA, 25 bp, Homo sapien
tggtgtctccgtaactgaagcccac

SEQ ID NO: 5135518 - DNA, 25 bp, Homo sapien
cacaggcgtgatgaaggaggtggac

SEQ ID NO: 5135519 - DNA, 25 bp, Homo sapien
gaggtggacacgaccttggtgtctc

SEQ ID NO: 5135520 - DNA, 25 bp, Homo sapien
caccagtgcttgggtgcggctcaca

SEQ ID NO: 5135521 - DNA, 25 bp, Homo sapien
ttgggaagtgctatgacaatggcag

SEQ ID NO: 5135522 - DNA, 25 bp, Homo sapien
tgcttattgggaagtgctatgacaa

SEQ ID NO: 5135523 - DNA, 25 bp, Homo sapien
gaatttttctgtggccacatgctta

SEQ ID NO: 5135524 - DNA, 25 bp, Homo sapien
tattgggaagtgctatgacaatggc

SEQ ID NO: 5135525 - DNA, 25 bp, Homo sapien
gttttggctgatcttaataagtgca

SEQ ID NO: 5135526 - DNA, 25 bp, Homo sapien
gatcttaataagtgcactccgaggg

SEQ ID NO: 5135527 - DNA, 25 bp, Homo sapien
ggctgatcttaataagtgcactccg

SEQ ID NO: 5135528 - DNA, 25 bp, Homo sapien
taagtgcactccgagggcaaaattc

SEQ ID NO: 5135529 - DNA, 25 bp, Homo sapien
cttctggatcctcaggaattggggg

SEQ ID NO: 5135530 - DNA, 25 bp, Homo sapien
gggtgactttatatgagagcaagag

SEQ ID NO: 5135531 - DNA, 25 bp, Homo sapien
gaattgggggtgactttatatgaga

SEQ ID NO: 5135532 - DNA, 25 bp, Homo sapien
tatatgagagcaagagagcgcatac

SEQ ID NO: 5135533 - DNA, 25 bp, Homo sapien
attctttgacatcgggggcaaaggc

SEQ ID NO: 5135534 - DNA, 25 bp, Homo sapien
aagtgggagatcagaagtggaggga

SEQ ID NO: 5135535 - DNA, 25 bp, Homo sapien
agaagtgggagatcagaagtggagg

SEQ ID NO: 5135536 - DNA, 25 bp, Homo sapien
aggacactgattctttgacatcggg

SEQ ID NO: 5135537 - DNA, 25 bp, Homo sapien
tcactgatggatccaggacccgagg

SEQ ID NO: 5135538 - DNA, 25 bp, Homo sapien
cagggatcactgatggatccaggac

SEQ ID NO: 5135539 - DNA, 25 bp, Homo sapien
gaatccagggatcactgatggatcc

SEQ ID NO: 5135540 - DNA, 25 bp, Homo sapien
tctggagcccaatggacagatcagc

SEQ ID NO: 5135541 - DNA, 25 bp, Homo sapien
gggacgttgagtctatccgatgacg

SEQ ID NO: 5135542 - DNA, 25 bp, Homo sapien
atgacgcatggagaccggcagtgaa

SEQ ID NO: 5135543 - DNA, 25 bp, Homo sapien
tcaggctcgtgagaggtcccgtgtg

SEQ ID NO: 5135544 - DNA, 25 bp, Homo sapien
aagggtggatgcctatatccaaggc

SEQ ID NO: 5135545 - DNA, 25 bp, Homo sapien
gaaacaatgcccttcccacaatgtg

SEQ ID NO: 5135546 - DNA, 25 bp, Homo sapien
tcagggtcgatgagcaaccacaaaa

SEQ ID NO: 5135547 - DNA, 25 bp, Homo sapien
tgaacacctgccagacaatgaccgt

SEQ ID NO: 5135548 - DNA, 25 bp, Homo sapien
cacaaaactaatgagggcagggctg

SEQ ID NO: 5135549 - DNA, 25 bp, Homo sapien
agcagaataagttgatacattctgt

SEQ ID NO: 5135550 - DNA, 25 bp, Homo sapien
gcagaataagttgatacattctgtt

SEQ ID NO: 5135551 - DNA, 25 bp, Homo sapien
cagaataagttgatacattctgttt

SEQ ID NO: 5135552 - DNA, 25 bp, Homo sapien
agaataagttgatacattctgtttc

SEQ ID NO: 5135553 - DNA, 25 bp, Homo sapien
gctgggcttaggtccactcagttca

SEQ ID NO: 5135554 - DNA, 25 bp, Homo sapien
ggagcgctgtgaacccaatgcttta

SEQ ID NO: 5135555 - DNA, 25 bp, Homo sapien
tcagttcatttccacgagcctttgg

SEQ ID NO: 5135556 - DNA, 25 bp, Homo sapien
gagaacttgagtatacggacccgtc

SEQ ID NO: 5135557 - DNA, 25 bp, Homo sapien
gcgtgtccgcttctttcagtggcca

SEQ ID NO: 5135558 - DNA, 25 bp, Homo sapien
ctctctggaatcctgcgtgtccgct

SEQ ID NO: 5135559 - DNA, 25 bp, Homo sapien
gtgggaggagccgtccgagtccgag

SEQ ID NO: 5135560 - DNA, 25 bp, Homo sapien
gagtggctgcttggcgggcctcttt

SEQ ID NO: 5135561 - DNA, 25 bp, Homo sapien
ctcggggtgtgtcccctggcaggac

SEQ ID NO: 5135562 - DNA, 25 bp, Homo sapien
ggctcggggtgtgtcccctggcagg

SEQ ID NO: 5135563 - DNA, 25 bp, Homo sapien
gctcggggtgtgtcccctggcagga

SEQ ID NO: 5135564 - DNA, 25 bp, Homo sapien
tgggctcggggtgtgtcccctggca

SEQ ID NO: 5135565 - DNA, 25 bp, Homo sapien
aaagggatttcagggtgttcctgag

SEQ ID NO: 5135566 - DNA, 25 bp, Homo sapien
tgcactggagcctaaacaggcccag

SEQ ID NO: 5135567 - DNA, 25 bp, Homo sapien
ggcccagaatctgaaggacgatgtt

SEQ ID NO: 5135568 - DNA, 25 bp, Homo sapien
tgagataagcgatgttgtgttcccc

SEQ ID NO: 5135569 - DNA, 25 bp, Homo sapien
ctgagtcctagacgcccggccgcgg

SEQ ID NO: 5135570 - DNA, 25 bp, Homo sapien
cttggagagtacagggcagggctgc

SEQ ID NO: 5135571 - DNA, 25 bp, Homo sapien
ttaaagtgtctcagggacgctcctc

SEQ ID NO: 5135572 - DNA, 25 bp, Homo sapien
atgatggcgtggctgctgagtccta

SEQ ID NO: 5135573 - DNA, 25 bp, Homo sapien
ttaaacatagctgccaccagacggc

SEQ ID NO: 5135574 - DNA, 25 bp, Homo sapien
caacgctgaggtctgaacagcctgg

SEQ ID NO: 5135575 - DNA, 25 bp, Homo sapien
gggccagtttcagtgtcaacgctga

SEQ ID NO: 5135576 - DNA, 25 bp, Homo sapien
gtctcttaaacatagctgccaccag

SEQ ID NO: 5135577 - DNA, 25 bp, Homo sapien
caatttgaaagtcctgtgacagtca

SEQ ID NO: 5135578 - DNA, 25 bp, Homo sapien
taaaacaagattgcgggcttggatc

SEQ ID NO: 5135579 - DNA, 25 bp, Homo sapien
agccagaaccaagtcgtcaaacggg

SEQ ID NO: 5135580 - DNA, 25 bp, Homo sapien
gcttggatcctgactatgctgactg

SEQ ID NO: 5135581 - DNA, 25 bp, Homo sapien
ctggtttcgggctcaattagagtta

SEQ ID NO: 5135582 - DNA, 25 bp, Homo sapien
ggctcaattagagttacctacaaca

SEQ ID NO: 5135583 - DNA, 25 bp, Homo sapien
tctggtttcgggctcaattagagtt

SEQ ID NO: 5135584 - DNA, 25 bp, Homo sapien
ctcaattagagttacctacaacaga

SEQ ID NO: 5135585 - DNA, 25 bp, Homo sapien
tagaaaaacgaaatttgatggagcg

SEQ ID NO: 5135586 - DNA, 25 bp, Homo sapien
tttttagagtatcagaactcagccc

SEQ ID NO: 5135587 - DNA, 25 bp, Homo sapien
gcctcagggatcttaccgactagaa

SEQ ID NO: 5135588 - DNA, 25 bp, Homo sapien
attttccctagtgatgacctgtgct

SEQ ID NO: 5135589 - DNA, 25 bp, Homo sapien
aaagcaaagcttttgtagtaccaca

SEQ ID NO: 5135590 - DNA, 25 bp, Homo sapien
agtaccacattcttgcaaggctcag

SEQ ID NO: 5135591 - DNA, 25 bp, Homo sapien
cagtgaagattcctgatgaaatacc

SEQ ID NO: 5135592 - DNA, 25 bp, Homo sapien
tgaaataccgccttgccacggcttc

SEQ ID NO: 5135593 - DNA, 25 bp, Homo sapien
taggagtgttagtgatggcaccagc

SEQ ID NO: 5135594 - DNA, 25 bp, Homo sapien
tgttagtgatggcaccagcaatgac

SEQ ID NO: 5135595 - DNA, 25 bp, Homo sapien
tcttggtaggagtgttagtgatggc

SEQ ID NO: 5135596 - DNA, 25 bp, Homo sapien
tagtgatggcaccagcaatgaccat

SEQ ID NO: 5135597 - DNA, 25 bp, Homo sapien
ccgaggccaagtcagaacggacagg

SEQ ID NO: 5135598 - DNA, 25 bp, Homo sapien
tgctgcctccaggccgctcttcctc

SEQ ID NO: 5135599 - DNA, 25 bp, Homo sapien
aggccaagtcagaacggacagggta

SEQ ID NO: 5135600 - DNA, 25 bp, Homo sapien
ctccattccccgttcctcagaggcg

SEQ ID NO: 5135601 - DNA, 25 bp, Homo sapien
cccagtaggtttggattatgcctcc

SEQ ID NO: 5135602 - DNA, 25 bp, Homo sapien
tattgtgacaggagatggtaagccc

SEQ ID NO: 5135603 - DNA, 25 bp, Homo sapien
ttaaaaagcaggtacagaatttcgc

SEQ ID NO: 5135604 - DNA, 25 bp, Homo sapien
cctgggttccctcgatattgtgaca

SEQ ID NO: 5135605 - DNA, 25 bp, Homo sapien
aaatggtaagtttgactggctgtcc

SEQ ID NO: 5135606 - DNA, 25 bp, Homo sapien
gacctgcactctgtacagcatggct

SEQ ID NO: 5135607 - DNA, 25 bp, Homo sapien
gatcaggtcccgactctctgtctag

SEQ ID NO: 5135608 - DNA, 25 bp, Homo sapien
ctaatgaccaccttttgcgatcagg

SEQ ID NO: 5135609 - DNA, 25 bp, Homo sapien
gatgaggtggcctcaagtactggca

SEQ ID NO: 5135610 - DNA, 25 bp, Homo sapien
gatgctgaatgttaacattccctgg

SEQ ID NO: 5135611 - DNA, 25 bp, Homo sapien
tcatgcctctttcaggacgatgctg

SEQ ID NO: 5135612 - DNA, 25 bp, Homo sapien
tgaggtggcctcaagtactggcagt

SEQ ID NO: 5135613 - DNA, 25 bp, Homo sapien
gcctcctccctcggcctcctaggcg

SEQ ID NO: 5135614 - DNA, 25 bp, Homo sapien
ctcctccctcggcctcctaggcgca

SEQ ID NO: 5135615 - DNA, 25 bp, Homo sapien
cctccctcggcctcctaggcgcagt

SEQ ID NO: 5135616 - DNA, 25 bp, Homo sapien
ctgcggagcgcctcctccctcggcc

SEQ ID NO: 5135617 - DNA, 25 bp, Homo sapien
caaagtttgagcttctccgcggcgc

SEQ ID NO: 5135618 - DNA, 25 bp, Homo sapien
tgaattatttagcaccactgccttg

SEQ ID NO: 5135619 - DNA, 25 bp, Homo sapien
cacaatgacttactacagttggccc

SEQ ID NO: 5135620 - DNA, 25 bp, Homo sapien
cacaggaggttgtacgtaggtgata

SEQ ID NO: 5135621 - DNA, 25 bp, Homo sapien
tacagaatggctaagaagcacatgc

SEQ ID NO: 5135622 - DNA, 25 bp, Homo sapien
cttctcggtttgtcacatttagccc

SEQ ID NO: 5135623 - DNA, 25 bp, Homo sapien
acatttagccccccagatgattgct

SEQ ID NO: 5135624 - DNA, 25 bp, Homo sapien
ttctcggtttgtcacatttagcccc

SEQ ID NO: 5135625 - DNA, 25 bp, Homo sapien
gtcacatttagccccccagatgatt

SEQ ID NO: 5135626 - DNA, 25 bp, Homo sapien
tgaggccattttcagcgcgattgag

SEQ ID NO: 5135627 - DNA, 25 bp, Homo sapien
tttcagcgcgattgagatctcggtc

SEQ ID NO: 5135628 - DNA, 25 bp, Homo sapien
ctcggtctgaggtctttaccttgag

SEQ ID NO: 5135629 - DNA, 25 bp, Homo sapien
cgattgagatctcggtctgaggtct

SEQ ID NO: 5135630 - DNA, 25 bp, Homo sapien
tttgccaaactctaggctctctctc

SEQ ID NO: 5135631 - DNA, 25 bp, Homo sapien
ttttgccaaactctaggctctctct

SEQ ID NO: 5135632 - DNA, 25 bp, Homo sapien
gccaaagcagctgcttccataaaat

SEQ ID NO: 5135633 - DNA, 25 bp, Homo sapien
ttgccatttcaagccaaagcagctg

SEQ ID NO: 5135634 - DNA, 25 bp, Homo sapien
cttgccatttcaagccaaagcagct

SEQ ID NO: 5135635 - DNA, 25 bp, Homo sapien
caagccaaagcagctgcttccataa

SEQ ID NO: 5135636 - DNA, 25 bp, Homo sapien
gatccccggctgcagcactgacgat

SEQ ID NO: 5135637 - DNA, 25 bp, Homo sapien
tgtctcctcacttgacgagtgggct

SEQ ID NO: 5135638 - DNA, 25 bp, Homo sapien
tgcagcactgacgatgtctcctcac

SEQ ID NO: 5135639 - DNA, 25 bp, Homo sapien
atcccctggccggtgaaggagccct

SEQ ID NO: 5135640 - DNA, 25 bp, Homo sapien
ctttttcctgagaggtcactacctt

SEQ ID NO: 5135641 - DNA, 25 bp, Homo sapien
tttttcctgagaggtcactaccttc

SEQ ID NO: 5135642 - DNA, 25 bp, Homo sapien
ttttcctgagaggtcactaccttct

SEQ ID NO: 5135643 - DNA, 25 bp, Homo sapien
ggtccagacgagcacccgggagacc

SEQ ID NO: 5135644 - DNA, 25 bp, Homo sapien
tcaaaggtctcccacggctggctgc

SEQ ID NO: 5135645 - DNA, 25 bp, Homo sapien
gagcacccgggagaccctgccagag

SEQ ID NO: 5135646 - DNA, 25 bp, Homo sapien
actgtgtccacccaatcaaaggtct

SEQ ID NO: 5135647 - DNA, 25 bp, Homo sapien
gcagacaattcctgtaaccacacac

SEQ ID NO: 5135648 - DNA, 25 bp, Homo sapien
gtctctctgccgcagacaattcctg

SEQ ID NO: 5135649 - DNA, 25 bp, Homo sapien
gctgctgccgcagacatatttggag

SEQ ID NO: 5135650 - DNA, 25 bp, Homo sapien
atatttggaggtatctgccaagccc

SEQ ID NO: 5135651 - DNA, 25 bp, Homo sapien
cctgatttggcatctgcagtgccct

SEQ ID NO: 5135652 - DNA, 25 bp, Homo sapien
tggcttctggtttccctgatttggc

SEQ ID NO: 5135653 - DNA, 25 bp, Homo sapien
ctggtttccctgatttggcatctgc

SEQ ID NO: 5135654 - DNA, 25 bp, Homo sapien
caggcccagagactccattctgttt

SEQ ID NO: 5135655 - DNA, 25 bp, Homo sapien
cagcaagaagatgaggcgcgacagc

SEQ ID NO: 5135656 - DNA, 25 bp, Homo sapien
ctgcgcagcaagaagatgaggcgcg

SEQ ID NO: 5135657 - DNA, 25 bp, Homo sapien
tgcgcagcaagaagatgaggcgcga

SEQ ID NO: 5135658 - DNA, 25 bp, Homo sapien
cgcagcaagaagatgaggcgcgaca

SEQ ID NO: 5135659 - DNA, 25 bp, Homo sapien
ctccttaagctcggctccacggaaa

SEQ ID NO: 5135660 - DNA, 25 bp, Homo sapien
aagagtccggtccctggtcctggtg

SEQ ID NO: 5135661 - DNA, 25 bp, Homo sapien
ccacggaaacgatcaggaaaagagt

SEQ ID NO: 5135662 - DNA, 25 bp, Homo sapien
ctcggctccacggaaacgatcagga

SEQ ID NO: 5135663 - DNA, 25 bp, Homo sapien
gagagataggtaaggccagcatccc

SEQ ID NO: 5135664 - DNA, 25 bp, Homo sapien
ccagaaaaatgcacgcgtgcctaca

SEQ ID NO: 5135665 - DNA, 25 bp, Homo sapien
gcaagatgggtcatagtggagtcta

SEQ ID NO: 5135666 - DNA, 25 bp, Homo sapien
ggctcctgctataaaagaccctgct

SEQ ID NO: 5135667 - DNA, 25 bp, Homo sapien
ccatttgtctggtcccatcgggaaa

SEQ ID NO: 5135668 - DNA, 25 bp, Homo sapien
gatatggtcctagctcaaccctcca

SEQ ID NO: 5135669 - DNA, 25 bp, Homo sapien
tcgggaaatggacagagagtctaac

SEQ ID NO: 5135670 - DNA, 25 bp, Homo sapien
gggcctgccctggatatggtcctag

SEQ ID NO: 5135671 - DNA, 25 bp, Homo sapien
tgcccgcgagtgatccatcagatgt

SEQ ID NO: 5135672 - DNA, 25 bp, Homo sapien
gaccctgcccgcgagtgatccatca

SEQ ID NO: 5135673 - DNA, 25 bp, Homo sapien
atgctgaccctgcccgcgagtgatc

SEQ ID NO: 5135674 - DNA, 25 bp, Homo sapien
cctgcccgcgagtgatccatcagat

SEQ ID NO: 5135675 - DNA, 25 bp, Homo sapien
gaagacttgctgattgaccaacact

SEQ ID NO: 5135676 - DNA, 25 bp, Homo sapien
aggaagacttgctgattgaccaaca

SEQ ID NO: 5135677 - DNA, 25 bp, Homo sapien
gctgattgaccaacactatccgcac

SEQ ID NO: 5135678 - DNA, 25 bp, Homo sapien
gacttgctgattgaccaacactatc

SEQ ID NO: 5135679 - DNA, 25 bp, Homo sapien
tcctcctccgtgttgttgctggtgt

SEQ ID NO: 5135680 - DNA, 25 bp, Homo sapien
ttgctggtgttagtgttgcatttgg

SEQ ID NO: 5135681 - DNA, 25 bp, Homo sapien
gttgttgctggtgttagtgttgcat

SEQ ID NO: 5135682 - DNA, 25 bp, Homo sapien
tcctccgtgttgttgctggtgttag

SEQ ID NO: 5135683 - DNA, 25 bp, Homo sapien
gaatcacacgaccatgcaggctcat

SEQ ID NO: 5135684 - DNA, 25 bp, Homo sapien
taatcaaggctgtgtgcgatacgtg

SEQ ID NO: 5135685 - DNA, 25 bp, Homo sapien
ggccacttaaaacgctgtttcagaa

SEQ ID NO: 5135686 - DNA, 25 bp, Homo sapien
caacggtgaattctacatggccact

SEQ ID NO: 5135687 - DNA, 25 bp, Homo sapien
acggttcaggcagcgtccgcaggat

SEQ ID NO: 5135688 - DNA, 25 bp, Homo sapien
ctgcgagacggttcaggcagcgtcc

SEQ ID NO: 5135689 - DNA, 25 bp, Homo sapien
cgagacggttcaggcagcgtccgca

SEQ ID NO: 5135690 - DNA, 25 bp, Homo sapien
ttcaggcagcgtccgcaggatggtc

SEQ ID NO: 5135691 - DNA, 25 bp, Homo sapien
cagacacgccttcggactttgctgg

SEQ ID NO: 5135692 - DNA, 25 bp, Homo sapien
aatgtggccgagttcagacacgcct

SEQ ID NO: 5135693 - DNA, 25 bp, Homo sapien
tggtcgcaggttcgcaaatgtggcc

SEQ ID NO: 5135694 - DNA, 25 bp, Homo sapien
caggttcgcaaatgtggccgagttc

SEQ ID NO: 5135695 - DNA, 25 bp, Homo sapien
tgtttgtgcggacgatgtaaaggct

SEQ ID NO: 5135696 - DNA, 25 bp, Homo sapien
tgcggacgatgtaaaggctcatttc

SEQ ID NO: 5135697 - DNA, 25 bp, Homo sapien
tttgtgcggacgatgtaaaggctca

SEQ ID NO: 5135698 - DNA, 25 bp, Homo sapien
ggacgatgtaaaggctcatttccaa

SEQ ID NO: 5135699 - DNA, 25 bp, Homo sapien
cctagggcaatttcaggctgaagcc

SEQ ID NO: 5135700 - DNA, 25 bp, Homo sapien
caacagggtcctcttagtctcaagg

SEQ ID NO: 5135701 - DNA, 25 bp, Homo sapien
cactgtgctccaagactgtagcttt

SEQ ID NO: 5135702 - DNA, 25 bp, Homo sapien
catacacaaacagcgcactgtgctc

SEQ ID NO: 5135703 - DNA, 25 bp, Homo sapien
tgctggacgggtccaccacgatcgc

SEQ ID NO: 5135704 - DNA, 25 bp, Homo sapien
cagataccagttatagaagacaggc

SEQ ID NO: 5135705 - DNA, 25 bp, Homo sapien
tcagccagcggtagtacaggttgct

SEQ ID NO: 5135706 - DNA, 25 bp, Homo sapien
gacaggcagggcgatggcggtcagc

SEQ ID NO: 5135707 - DNA, 25 bp, Homo sapien
cttgctcagcgccccaaagcctcct

SEQ ID NO: 5135708 - DNA, 25 bp, Homo sapien
tgctgcttgctcagcgccccaaagc

SEQ ID NO: 5135709 - DNA, 25 bp, Homo sapien
gctgcttgctcagcgccccaaagcc

SEQ ID NO: 5135710 - DNA, 25 bp, Homo sapien
tgcttgctcagcgccccaaagcctc

SEQ ID NO: 5135711 - DNA, 25 bp, Homo sapien
atgtaatatgggaatggccctgcct

SEQ ID NO: 5135712 - DNA, 25 bp, Homo sapien
tcacccccgcttctgatgagatgtc

SEQ ID NO: 5135713 - DNA, 25 bp, Homo sapien
tgcctgcggtgtcactacctcagtg

SEQ ID NO: 5135714 - DNA, 25 bp, Homo sapien
ctgtgtggaagacgctggatcatgt

SEQ ID NO: 5135715 - DNA, 25 bp, Homo sapien
gagatggatggctgtgcgtgtgttt

SEQ ID NO: 5135716 - DNA, 25 bp, Homo sapien
aagccatgtgggagatggatggctg

SEQ ID NO: 5135717 - DNA, 25 bp, Homo sapien
gaagccatgtgggagatggatggct

SEQ ID NO: 5135718 - DNA, 25 bp, Homo sapien
tgtgggagatggatggctgtgcgtg

SEQ ID NO: 5135719 - DNA, 25 bp, Homo sapien
cacagcatcaggtactcggactgca

SEQ ID NO: 5135720 - DNA, 25 bp, Homo sapien
gacatctgccgagtagtccaggacc

SEQ ID NO: 5135721 - DNA, 25 bp, Homo sapien
tcggactgcagctcatcgaaacagg

SEQ ID NO: 5135722 - DNA, 25 bp, Homo sapien
tgtccgagctcgtacaagcacatcc

SEQ ID NO: 5135723 - DNA, 25 bp, Homo sapien
tccatgagatcgtcctttgagaggc

SEQ ID NO: 5135724 - DNA, 25 bp, Homo sapien
caggtgcacgttgatggcgatctca

SEQ ID NO: 5135725 - DNA, 25 bp, Homo sapien
tgtactcagccaggaggcgtgcaaa

SEQ ID NO: 5135726 - DNA, 25 bp, Homo sapien
taaatgtacttcctggagaggcgcc

SEQ ID NO: 5135727 - DNA, 25 bp, Homo sapien
caaacctggcacttcactgggactg

SEQ ID NO: 5135728 - DNA, 25 bp, Homo sapien
gcagtgtttcatgcggacttcacaa

SEQ ID NO: 5135729 - DNA, 25 bp, Homo sapien
gaataggtcacctagggccctgact

SEQ ID NO: 5135730 - DNA, 25 bp, Homo sapien
gaagccattgccctagaaacatact

SEQ ID NO: 5135731 - DNA, 25 bp, Homo sapien
tatccccgtgtgaaacaaatttaca

SEQ ID NO: 5135732 - DNA, 25 bp, Homo sapien
cattgttttaccctatgtccttcag

SEQ ID NO: 5135733 - DNA, 25 bp, Homo sapien
catccttatattgcccacattcggg

SEQ ID NO: 5135734 - DNA, 25 bp, Homo sapien
tctgaattagtaacgcatatccccg

SEQ ID NO: 5135735 - DNA, 25 bp, Homo sapien
tctggacttgactgagcgatggcat

SEQ ID NO: 5135736 - DNA, 25 bp, Homo sapien
ctgcttcacctgcaaggagttcttg

SEQ ID NO: 5135737 - DNA, 25 bp, Homo sapien
tactgctaggttcccacaagatccc

SEQ ID NO: 5135738 - DNA, 25 bp, Homo sapien
gctcgcgccaattcctactgctagg

SEQ ID NO: 5135739 - DNA, 25 bp, Homo sapien
acgcgcgccgcagccctagccagcc

SEQ ID NO: 5135740 - DNA, 25 bp, Homo sapien
gacccggcggcaaaccagcagcgaa

SEQ ID NO: 5135741 - DNA, 25 bp, Homo sapien
agcagcgaaccctccacgcgcgccg

SEQ ID NO: 5135742 - DNA, 25 bp, Homo sapien
ctggctgtgaagtcgcgggctgcgg

SEQ ID NO: 5135743 - DNA, 25 bp, Homo sapien
ggccgcgtcgcctcctgcccggccc

SEQ ID NO: 5135744 - DNA, 25 bp, Homo sapien
cggcggccgcgtcgcctcctgcccg

SEQ ID NO: 5135745 - DNA, 25 bp, Homo sapien
ccgcggcggccgcgtcgcctcctgc

SEQ ID NO: 5135746 - DNA, 25 bp, Homo sapien
ccgcgtcgcctcctgcccggcccgg

SEQ ID NO: 5135747 - DNA, 25 bp, Homo sapien
gtggaccactggcaccgttaggcag

SEQ ID NO: 5135748 - DNA, 25 bp, Homo sapien
atcgggcaggcaccgcgtctgcgtc

SEQ ID NO: 5135749 - DNA, 25 bp, Homo sapien
ggccgggctcggattgttctcaaaa

SEQ ID NO: 5135750 - DNA, 25 bp, Homo sapien
tcaaaagacgccaccgcaggtggac

SEQ ID NO: 5135751 - DNA, 25 bp, Homo sapien
gaagagtttcgaggatggagaccag

SEQ ID NO: 5135752 - DNA, 25 bp, Homo sapien
cagaaaatggaagagtttcgaggat

SEQ ID NO: 5135753 - DNA, 25 bp, Homo sapien
gaccagatttcccacacggagatgc

SEQ ID NO: 5135754 - DNA, 25 bp, Homo sapien
ttcccacacggagatgcatgtttac

SEQ ID NO: 5135755 - DNA, 25 bp, Homo sapien
cattatgtaatgtcagagggcaggc

SEQ ID NO: 5135756 - DNA, 25 bp, Homo sapien
gagaacgctccctcttaggcaggca

SEQ ID NO: 5135757 - DNA, 25 bp, Homo sapien
caagcaattctacgtgcactggcca

SEQ ID NO: 5135758 - DNA, 25 bp, Homo sapien
gaactcttgagatgttaagccctgg

SEQ ID NO: 5135759 - DNA, 25 bp, Homo sapien
agcaagcctgcatgggcgttaatat

SEQ ID NO: 5135760 - DNA, 25 bp, Homo sapien
ctcacagaacttctgttttaggaca

SEQ ID NO: 5135761 - DNA, 25 bp, Homo sapien
ggcgttaatattggtctcctcaaaa

SEQ ID NO: 5135762 - DNA, 25 bp, Homo sapien
tgcatgggcgttaatattggtctcc

SEQ ID NO: 5135763 - DNA, 25 bp, Homo sapien
gatttggctcagatggcttactacc

SEQ ID NO: 5135764 - DNA, 25 bp, Homo sapien
taccacgaacaatacgccagagcag

SEQ ID NO: 5135765 - DNA, 25 bp, Homo sapien
tgacaaaagtcacaggtcgcacgcc

SEQ ID NO: 5135766 - DNA, 25 bp, Homo sapien
tgatctatggcgagtcacagaccac

SEQ ID NO: 5135767 - DNA, 25 bp, Homo sapien
agggagttttgccctgtcacccagg

SEQ ID NO: 5135768 - DNA, 25 bp, Homo sapien
gagggagttttgccctgtcacccag

SEQ ID NO: 5135769 - DNA, 25 bp, Homo sapien
cagtgactgccacggccttggcaat

SEQ ID NO: 5135770 - DNA, 25 bp, Homo sapien
gagcatcccttgctctccgcccttc

SEQ ID NO: 5135771 - DNA, 25 bp, Homo sapien
tgactgccacggccttggcaatgag

SEQ ID NO: 5135772 - DNA, 25 bp, Homo sapien
agcatcccttgctctccgcccttca

SEQ ID NO: 5135773 - DNA, 25 bp, Homo sapien
gaacacaaaactccttgtgggccag

SEQ ID NO: 5135774 - DNA, 25 bp, Homo sapien
tgtgggccagtgaaaccgtcagaag

SEQ ID NO: 5135775 - DNA, 25 bp, Homo sapien
gggatgtggaaaactgtctcatgtc

SEQ ID NO: 5135776 - DNA, 25 bp, Homo sapien
aaaacccaacaagcacatggcattg

SEQ ID NO: 5135777 - DNA, 25 bp, Homo sapien
tgtaagcagtctcgcaggcacatgc

SEQ ID NO: 5135778 - DNA, 25 bp, Homo sapien
ggcaggtgtgctcccagttggtaac

SEQ ID NO: 5135779 - DNA, 25 bp, Homo sapien
ggtctgccctaaatcccgcacaggg

SEQ ID NO: 5135780 - DNA, 25 bp, Homo sapien
ttgtgcctgaaaactacctgctgcg

SEQ ID NO: 5135781 - DNA, 25 bp, Homo sapien
gttctgacatgggaactgagaactc

SEQ ID NO: 5135782 - DNA, 25 bp, Homo sapien
agcacaagtacttctctcagccaca

SEQ ID NO: 5135783 - DNA, 25 bp, Homo sapien
ggccttgcaactgtcaacagagaag

SEQ ID NO: 5135784 - DNA, 25 bp, Homo sapien
aacagagaagctggtgccgagttct

SEQ ID NO: 5135785 - DNA, 25 bp, Homo sapien
tcaggcatcatgagctgtgatcagg

SEQ ID NO: 5135786 - DNA, 25 bp, Homo sapien
catgagctgtgatcagggccatctt

SEQ ID NO: 5135787 - DNA, 25 bp, Homo sapien
tgagctgtgatcagggccatcttac

SEQ ID NO: 5135788 - DNA, 25 bp, Homo sapien
atcatgagctgtgatcagggccatc

SEQ ID NO: 5135789 - DNA, 25 bp, Homo sapien
tccccacatgtggacggtgtcgcta

SEQ ID NO: 5135790 - DNA, 25 bp, Homo sapien
tggacggtgtcgctaacattgctga

SEQ ID NO: 5135791 - DNA, 25 bp, Homo sapien
cacatgtggacggtgtcgctaacat

SEQ ID NO: 5135792 - DNA, 25 bp, Homo sapien
ggtgtcgctaacattgctgacagct

SEQ ID NO: 5135793 - DNA, 25 bp, Homo sapien
gccgaagcccagcgggccatgcctc

SEQ ID NO: 5135794 - DNA, 25 bp, Homo sapien
ggctgagaaggcgaaaggccccacc

SEQ ID NO: 5135795 - DNA, 25 bp, Homo sapien
tgcctggctgagaaggcgaaaggcc

SEQ ID NO: 5135796 - DNA, 25 bp, Homo sapien
tgagaaggcgaaaggccccaccagg

SEQ ID NO: 5135797 - DNA, 25 bp, Homo sapien
tgctcagaggctcatccctggatgt

SEQ ID NO: 5135798 - DNA, 25 bp, Homo sapien
gaggggccattgcacagaggcccac

SEQ ID NO: 5135799 - DNA, 25 bp, Homo sapien
ggatgtcaaccacacttgcctactg

SEQ ID NO: 5135800 - DNA, 25 bp, Homo sapien
acttgcctactgtcagcactgactg

SEQ ID NO: 5135801 - DNA, 25 bp, Homo sapien
ggtagtcaccggtcaaagcgaaaga

SEQ ID NO: 5135802 - DNA, 25 bp, Homo sapien
cagcctcgggaatgaccatgggaga

SEQ ID NO: 5135803 - DNA, 25 bp, Homo sapien
ggctagcggctcagtaacaacagac

SEQ ID NO: 5135804 - DNA, 25 bp, Homo sapien
caaagatacagtgagcctgacaggg

SEQ ID NO: 5135805 - DNA, 25 bp, Homo sapien
ggtgtggaaaagtgaagcctcatct

SEQ ID NO: 5135806 - DNA, 25 bp, Homo sapien
gactcctgatgtaacctgtatgcaa

SEQ ID NO: 5135807 - DNA, 25 bp, Homo sapien
agtacttagctatccctggcctctg

SEQ ID NO: 5135808 - DNA, 25 bp, Homo sapien
tctgtaggcgccaatcactgcacat

SEQ ID NO: 5135809 - DNA, 25 bp, Homo sapien
ttttcaaactattcactgtgatggg

SEQ ID NO: 5135810 - DNA, 25 bp, Homo sapien
tcacttgccaccaggtaatcagctt

SEQ ID NO: 5135811 - DNA, 25 bp, Homo sapien
accaggtaatcagctttcaattttc

SEQ ID NO: 5135812 - DNA, 25 bp, Homo sapien
ttgctgcaccttttcagttttcaaa

SEQ ID NO: 5135813 - DNA, 25 bp, Homo sapien
caaactagctggactgacaaagggc

SEQ ID NO: 5135814 - DNA, 25 bp, Homo sapien
gactgtgtcccacttctctcggagt

SEQ ID NO: 5135815 - DNA, 25 bp, Homo sapien
tcactgttctagagctgggcgcaca

SEQ ID NO: 5135816 - DNA, 25 bp, Homo sapien
ggtagaacctctgccctatgagtag

SEQ ID NO: 5135817 - DNA, 25 bp, Homo sapien
gatcttattcaaaaagccttgcccg

SEQ ID NO: 5135818 - DNA, 25 bp, Homo sapien
tcctgaagcgcctcacctatgtttt

SEQ ID NO: 5135819 - DNA, 25 bp, Homo sapien
gccttgcccgtaccaatgtcctgaa

SEQ ID NO: 5135820 - DNA, 25 bp, Homo sapien
cccgaatatctagttaaggctatga

SEQ ID NO: 5135821 - DNA, 25 bp, Homo sapien
cattcatgcttgtgcttttataatt

SEQ ID NO: 5135822 - DNA, 25 bp, Homo sapien
gagcattgagattccacattagaca

SEQ ID NO: 5135823 - DNA, 25 bp, Homo sapien
aattttgagtgggactgctttccta

SEQ ID NO: 5135824 - DNA, 25 bp, Homo sapien
tgtggattagtctgctcaggttgcc

SEQ ID NO: 5135825 - DNA, 25 bp, Homo sapien
tgtttccaatccacagaagagggtc

SEQ ID NO: 5135826 - DNA, 25 bp, Homo sapien
tccaggaggcaaagtccaaatgtgc

SEQ ID NO: 5135827 - DNA, 25 bp, Homo sapien
caagcaagggacgtagtttctcaca

SEQ ID NO: 5135828 - DNA, 25 bp, Homo sapien
tgtgaacgaggatcaaagcacccca

SEQ ID NO: 5135829 - DNA, 25 bp, Homo sapien
catgtttgctctcggaccatgtggc

SEQ ID NO: 5135830 - DNA, 25 bp, Homo sapien
tggacatgtttgctctcggaccatg

SEQ ID NO: 5135831 - DNA, 25 bp, Homo sapien
tgtttgctctcggaccatgtggcat

SEQ ID NO: 5135832 - DNA, 25 bp, Homo sapien
gctctcggaccatgtggcatttctt

SEQ ID NO: 5135833 - DNA, 25 bp, Homo sapien
agagtctgctgtccacgggctacat

SEQ ID NO: 5135834 - DNA, 25 bp, Homo sapien
ggctgagtcacacgcttcacatggc

SEQ ID NO: 5135835 - DNA, 25 bp, Homo sapien
ccgcaaagcatgtaatctgggccta

SEQ ID NO: 5135836 - DNA, 25 bp, Homo sapien
cgggctacatacaggtggcaaaaca

SEQ ID NO: 5135837 - DNA, 25 bp, Homo sapien
ctgattacccgggaagtgctggcac

SEQ ID NO: 5135838 - DNA, 25 bp, Homo sapien
cgagccctagtccactaaagtggca

SEQ ID NO: 5135839 - DNA, 25 bp, Homo sapien
gtcagaccacgcctgattacccggg

SEQ ID NO: 5135840 - DNA, 25 bp, Homo sapien
ccctagtccactaaagtggcagtag

SEQ ID NO: 5135841 - DNA, 25 bp, Homo sapien
tggaagcccgctgcattgcacgggc

SEQ ID NO: 5135842 - DNA, 25 bp, Homo sapien
catggcgagggctgtgctctcttgc

SEQ ID NO: 5135843 - DNA, 25 bp, Homo sapien
agagagaggcccagcatgtcggccg

SEQ ID NO: 5135844 - DNA, 25 bp, Homo sapien
cacgtcgatggtggaagcccgctgc

SEQ ID NO: 5135845 - DNA, 25 bp, Homo sapien
agcccggtgcaggccctgtgaggct

SEQ ID NO: 5135846 - DNA, 25 bp, Homo sapien
ccggtgcaggccctgtgaggctcac

SEQ ID NO: 5135847 - DNA, 25 bp, Homo sapien
ggagcccggtgcaggccctgtgagg

SEQ ID NO: 5135848 - DNA, 25 bp, Homo sapien
ctggagcccggtgcaggccctgtga

SEQ ID NO: 5135849 - DNA, 25 bp, Homo sapien
aaggatgccaaaccagggtaccctg

SEQ ID NO: 5135850 - DNA, 25 bp, Homo sapien
tggttcaaccagaaggatgccaaac

SEQ ID NO: 5135851 - DNA, 25 bp, Homo sapien
ctggttcaaccagaaggatgccaaa

SEQ ID NO: 5135852 - DNA, 25 bp, Homo sapien
gatgccaaaccagggtaccctgtag

SEQ ID NO: 5135853 - DNA, 25 bp, Homo sapien
ctacacatccacaacagggagggct

SEQ ID NO: 5135854 - DNA, 25 bp, Homo sapien
gctccagcagaagcggttcacagga

SEQ ID NO: 5135855 - DNA, 25 bp, Homo sapien
cagcagaagcggttcacaggaagag

SEQ ID NO: 5135856 - DNA, 25 bp, Homo sapien
agggagggcttttaccatggcctgg

SEQ ID NO: 5135857 - DNA, 25 bp, Homo sapien
tctaaaatgggctcatctgggtctt

SEQ ID NO: 5135858 - DNA, 25 bp, Homo sapien
ttctaaaatgggctcatctgggtct

SEQ ID NO: 5135859 - DNA, 25 bp, Homo sapien
attctaaaatgggctcatctgggtc

SEQ ID NO: 5135860 - DNA, 25 bp, Homo sapien
caacaaagctgaactctatgcccgg

SEQ ID NO: 5135861 - DNA, 25 bp, Homo sapien
caagcagtagcatcctcacgtagca

SEQ ID NO: 5135862 - DNA, 25 bp, Homo sapien
tcctgggtaagcacagtgatgccac

SEQ ID NO: 5135863 - DNA, 25 bp, Homo sapien
gaaactcagccaacacaaggccttg

SEQ ID NO: 5135864 - DNA, 25 bp, Homo sapien
ctttcaggcagtaatgatggcagac

SEQ ID NO: 5135865 - DNA, 25 bp, Homo sapien
cagacgtaaggtacagcaggtggcc

SEQ ID NO: 5135866 - DNA, 25 bp, Homo sapien
taagggttgatggtcccatggccac

SEQ ID NO: 5135867 - DNA, 25 bp, Homo sapien
tgtgagactctaagcaaagacccag

SEQ ID NO: 5135868 - DNA, 25 bp, Homo sapien
cacgtctcctgagtatgcacacagc

SEQ ID NO: 5135869 - DNA, 25 bp, Homo sapien
cagaatcacagacctttgctgtagc

SEQ ID NO: 5135870 - DNA, 25 bp, Homo sapien
taagagtccctgtgtgtatactggg

SEQ ID NO: 5135871 - DNA, 25 bp, Homo sapien
gaacctcagggtcaatctcaggtaa

SEQ ID NO: 5135872 - DNA, 25 bp, Homo sapien
ggtctcctatcaatcaaatactaga

SEQ ID NO: 5135873 - DNA, 25 bp, Homo sapien
cttccctctggaaagaattcttctg

SEQ ID NO: 5135874 - DNA, 25 bp, Homo sapien
ggcttgctgctactcctctttccag

SEQ ID NO: 5135875 - DNA, 25 bp, Homo sapien
tagtctcataaggagatgcctggca

SEQ ID NO: 5135876 - DNA, 25 bp, Homo sapien
gctcgatctgctcttttgggttcta

SEQ ID NO: 5135877 - DNA, 25 bp, Homo sapien
tgttcattcagagtaagttactggc

SEQ ID NO: 5135878 - DNA, 25 bp, Homo sapien
tattcatgcagctataacccagatg

SEQ ID NO: 5135879 - DNA, 25 bp, Homo sapien
gaaaggacctgtggtgatctaacta

SEQ ID NO: 5135880 - DNA, 25 bp, Homo sapien
aaactatttggctttcgatctagcg

SEQ ID NO: 5135881 - DNA, 25 bp, Homo sapien
gggtggtgacactcaccgcaacaaa

SEQ ID NO: 5135882 - DNA, 25 bp, Homo sapien
tgcatgcttcgtccagaatgcctga

SEQ ID NO: 5135883 - DNA, 25 bp, Homo sapien
tcaatgatctccgtctgtgcatgct

SEQ ID NO: 5135884 - DNA, 25 bp, Homo sapien
cagatccaggtggtcaagctgactg

SEQ ID NO: 5135885 - DNA, 25 bp, Homo sapien
gctgactggacagctccacctgggt

SEQ ID NO: 5135886 - DNA, 25 bp, Homo sapien
tgatcatgaactccccttgcaaggt

SEQ ID NO: 5135887 - DNA, 25 bp, Homo sapien
gactccctttccaagcaggctaaaa

SEQ ID NO: 5135888 - DNA, 25 bp, Homo sapien
tcatacacggagagtttgacttgtg

SEQ ID NO: 5135889 - DNA, 25 bp, Homo sapien
cttgaaagaaggcaatactgcttag

SEQ ID NO: 5135890 - DNA, 25 bp, Homo sapien
tgttccctgagatctatctttgaca

SEQ ID NO: 5135891 - DNA, 25 bp, Homo sapien
catctgattgataagagagtcttga

SEQ ID NO: 5135892 - DNA, 25 bp, Homo sapien
tagtgttaaatgcaacctatgatgc

SEQ ID NO: 5135893 - DNA, 25 bp, Homo sapien
tttgacaatgaacgttccagagccc

SEQ ID NO: 5135894 - DNA, 25 bp, Homo sapien
ggagcagatctttgacaatgaacgt

SEQ ID NO: 5135895 - DNA, 25 bp, Homo sapien
gcaacctatgatgcctgtcctggag

SEQ ID NO: 5135896 - DNA, 25 bp, Homo sapien
tgtgatgcacaacatgctttaatga

SEQ ID NO: 5135897 - DNA, 25 bp, Homo sapien
ttaatgagtggtgctgcaactgtgc

SEQ ID NO: 5135898 - DNA, 25 bp, Homo sapien
acatgctttaatgagtggtgctgca

SEQ ID NO: 5135899 - DNA, 25 bp, Homo sapien
ctgtgatgcacaacatgctttaatg

SEQ ID NO: 5135900 - DNA, 25 bp, Homo sapien
cctcccattgacagtgtccacagac

SEQ ID NO: 5135901 - DNA, 25 bp, Homo sapien
ttacctacacggtcactctctgcag

SEQ ID NO: 5135902 - DNA, 25 bp, Homo sapien
caatcacggtgatgttacctacacg

SEQ ID NO: 5135903 - DNA, 25 bp, Homo sapien
cacagggggccgttggtctgacttc

SEQ ID NO: 5135904 - DNA, 25 bp, Homo sapien
cagcgctagggctctgaaattagaa

SEQ ID NO: 5135905 - DNA, 25 bp, Homo sapien
tgtgagagactatgcatgacagtgg

SEQ ID NO: 5135906 - DNA, 25 bp, Homo sapien
ctgtgtgagagactatgcatgacag

SEQ ID NO: 5135907 - DNA, 25 bp, Homo sapien
gctagggctctgaaattagaatttt

SEQ ID NO: 5135908 - DNA, 25 bp, Homo sapien
tcggattcctaacgcctccgtcaag

SEQ ID NO: 5135909 - DNA, 25 bp, Homo sapien
aaagtgtcctttcgcaatgaagcgt

SEQ ID NO: 5135910 - DNA, 25 bp, Homo sapien
gaagcgtatttggatcggattccta

SEQ ID NO: 5135911 - DNA, 25 bp, Homo sapien
caagctctcatcgacaggaagaacc

SEQ ID NO: 5135912 - DNA, 25 bp, Homo sapien
agaataccaaaggaggaagctgttt

SEQ ID NO: 5135913 - DNA, 25 bp, Homo sapien
tagagaggcaagaataccaaaggag

SEQ ID NO: 5135914 - DNA, 25 bp, Homo sapien
gaggcaagaataccaaaggaggaag

SEQ ID NO: 5135915 - DNA, 25 bp, Homo sapien
caagaataccaaaggaggaagctgt

SEQ ID NO: 5135916 - DNA, 25 bp, Homo sapien
gtaactaactctaaagtgcaagcag

SEQ ID NO: 5135917 - DNA, 25 bp, Homo sapien
tcctgtcccagaacatgtaactaac

SEQ ID NO: 5135918 - DNA, 25 bp, Homo sapien
catgggaattaaaacgcttacaccg

SEQ ID NO: 5135919 - DNA, 25 bp, Homo sapien
caccgaaaacccaccaagtggctag

SEQ ID NO: 5135920 - DNA, 25 bp, Homo sapien
tagtaggagcttcacgaactgccgg

SEQ ID NO: 5135921 - DNA, 25 bp, Homo sapien
tggctgcatcttcctctagtaggag

SEQ ID NO: 5135922 - DNA, 25 bp, Homo sapien
agggagagcacgctctctgccatct

SEQ ID NO: 5135923 - DNA, 25 bp, Homo sapien
tccaggatccgcaaatggttaccat

SEQ ID NO: 5135924 - DNA, 25 bp, Homo sapien
acgttgagctcaccaagaagcctcc

SEQ ID NO: 5135925 - DNA, 25 bp, Homo sapien
cctgcgtgaggttcccagttctgtt

SEQ ID NO: 5135926 - DNA, 25 bp, Homo sapien
catctggagttcctgcgtgaggttc

SEQ ID NO: 5135927 - DNA, 25 bp, Homo sapien
gtttccaaccaacatccacgttgag

SEQ ID NO: 5135928 - DNA, 25 bp, Homo sapien
agaccactgaccacgtggcagtgtg

SEQ ID NO: 5135929 - DNA, 25 bp, Homo sapien
cctgtctaaagggcaactgggttgg

SEQ ID NO: 5135930 - DNA, 25 bp, Homo sapien
ggacaatggttacactgcctgtcta

SEQ ID NO: 5135931 - DNA, 25 bp, Homo sapien
ggccaggacaatggttacactgcct

SEQ ID NO: 5135932 - DNA, 25 bp, Homo sapien
caatggttacactgcctgtctaaag

SEQ ID NO: 5135933 - DNA, 25 bp, Homo sapien
ctgaaagcaagacacagatgcatca

SEQ ID NO: 5135934 - DNA, 25 bp, Homo sapien
agatgcatcaggctgtgggctaact

SEQ ID NO: 5135935 - DNA, 25 bp, Homo sapien
aaagcaagacacagatgcatcaggc

SEQ ID NO: 5135936 - DNA, 25 bp, Homo sapien
caggctgtgggctaactggtttccc

SEQ ID NO: 5135937 - DNA, 25 bp, Homo sapien
atgatggtctggtactgggtgacaa

SEQ ID NO: 5135938 - DNA, 25 bp, Homo sapien
tcaggttctcctggtatgtgaggat

SEQ ID NO: 5135939 - DNA, 25 bp, Homo sapien
tactgggtgacaatttggcgccgga

SEQ ID NO: 5135940 - DNA, 25 bp, Homo sapien
ctctgtactgatggaggtcggtcag

SEQ ID NO: 5135941 - DNA, 25 bp, Homo sapien
gcaagtttgtgggaacaaattctaa

SEQ ID NO: 5135942 - DNA, 25 bp, Homo sapien
caaactgcttgctttaaacgagggc

SEQ ID NO: 5135943 - DNA, 25 bp, Homo sapien
catcgtcttgaactctcatcctttg

SEQ ID NO: 5135944 - DNA, 25 bp, Homo sapien
cctttgtatgtgcaagtttgtggga

SEQ ID NO: 5135945 - DNA, 25 bp, Homo sapien
tgctggcgccccaatggtgacgatg

SEQ ID NO: 5135946 - DNA, 25 bp, Homo sapien
cttggtctcttcaaatttgtgcagc

SEQ ID NO: 5135947 - DNA, 25 bp, Homo sapien
aatggtgacgatgtcgtagttctga

SEQ ID NO: 5135948 - DNA, 25 bp, Homo sapien
tgcggagacctcctgacttaaaacc

SEQ ID NO: 5135949 - DNA, 25 bp, Homo sapien
ccatgagagcgtaagggtggagtct

SEQ ID NO: 5135950 - DNA, 25 bp, Homo sapien
ccaggaactgctggtaactgctgag

SEQ ID NO: 5135951 - DNA, 25 bp, Homo sapien
ctgctggtaactgctgagcaacagt

SEQ ID NO: 5135952 - DNA, 25 bp, Homo sapien
tcatgggctaaactgaagatgccat

SEQ ID NO: 5135953 - DNA, 25 bp, Homo sapien
ctggaaaggataagaatggattcta

SEQ ID NO: 5135954 - DNA, 25 bp, Homo sapien
taagaatggattctaagggattctc

SEQ ID NO: 5135955 - DNA, 25 bp, Homo sapien
tggattctaagggattctccagaat

SEQ ID NO: 5135956 - DNA, 25 bp, Homo sapien
aaggataagaatggattctaaggga

SEQ ID NO: 5135957 - DNA, 25 bp, Homo sapien
aagatggcgagtgtcctctcaaggc

SEQ ID NO: 5135958 - DNA, 25 bp, Homo sapien
cgctctgcgtagtaactcacttggg

SEQ ID NO: 5135959 - DNA, 25 bp, Homo sapien
cacttgggttttcagggtgttgatc

SEQ ID NO: 5135960 - DNA, 25 bp, Homo sapien
tatgtagattatggactggcagcca

SEQ ID NO: 5135961 - DNA, 25 bp, Homo sapien
cctgcagggaagatcggctgtttct

SEQ ID NO: 5135962 - DNA, 25 bp, Homo sapien
tcctcctcagtcgaagtgggagagg

SEQ ID NO: 5135963 - DNA, 25 bp, Homo sapien
tgtcctggtcatttctaagcatcac

SEQ ID NO: 5135964 - DNA, 25 bp, Homo sapien
gcaatgtagtcaggccgtgcagcgt

SEQ ID NO: 5135965 - DNA, 25 bp, Homo sapien
cttgtccacacgctgaatgatgcac

SEQ ID NO: 5135966 - DNA, 25 bp, Homo sapien
acgctgaatgatgcactctaggctc

SEQ ID NO: 5135967 - DNA, 25 bp, Homo sapien
gcctgcacaggggaagacatcctca

SEQ ID NO: 5135968 - DNA, 25 bp, Homo sapien
ttgtccacgttcagccacactttct

SEQ ID NO: 5135969 - DNA, 25 bp, Homo sapien
ctggtctgatccagtaggcgtggct

SEQ ID NO: 5135970 - DNA, 25 bp, Homo sapien
atccagtaggcgtggctgtccgggt

SEQ ID NO: 5135971 - DNA, 25 bp, Homo sapien
tctgatccagtaggcgtggctgtcc

SEQ ID NO: 5135972 - DNA, 25 bp, Homo sapien
cagtaggcgtggctgtccgggttac

SEQ ID NO: 5135973 - DNA, 25 bp, Homo sapien
catggtggtgtatctcaagaggacc

SEQ ID NO: 5135974 - DNA, 25 bp, Homo sapien
gagcccaacccttatagccatggtg

SEQ ID NO: 5135975 - DNA, 25 bp, Homo sapien
acacatgggctccagttacatggaa

SEQ ID NO: 5135976 - DNA, 25 bp, Homo sapien
tacatggaaaggcaaccggagactc

SEQ ID NO: 5135977 - DNA, 25 bp, Homo sapien
tgggctggactcttcaggaggggga

SEQ ID NO: 5135978 - DNA, 25 bp, Homo sapien
gggctggactcttcaggagggggac

SEQ ID NO: 5135979 - DNA, 25 bp, Homo sapien
ggctggactcttcaggagggggact

SEQ ID NO: 5135980 - DNA, 25 bp, Homo sapien
cctgcatgagcaggaataccatggc

SEQ ID NO: 5135981 - DNA, 25 bp, Homo sapien
ttcttggccttgtcactcatcatgg

SEQ ID NO: 5135982 - DNA, 25 bp, Homo sapien
agaagaccacgtcacggcggtactg

SEQ ID NO: 5135983 - DNA, 25 bp, Homo sapien
tcatcatggccacgcagtcggtgag

SEQ ID NO: 5135984 - DNA, 25 bp, Homo sapien
agcccgatggtgtagagctggcgca

SEQ ID NO: 5135985 - DNA, 25 bp, Homo sapien
aggctctcgaactgggccagcagcc

SEQ ID NO: 5135986 - DNA, 25 bp, Homo sapien
cttaatgatgaagccgcagatgagg

SEQ ID NO: 5135987 - DNA, 25 bp, Homo sapien
caggaagccgtcgtcatgcaggcag

SEQ ID NO: 5135988 - DNA, 25 bp, Homo sapien
gggcagcatgtctgcggaggcgctg

SEQ ID NO: 5135989 - DNA, 25 bp, Homo sapien
tctgcggaggcgctggaagtggcct

SEQ ID NO: 5135990 - DNA, 25 bp, Homo sapien
tcaagtccatgatcccaaggctcat

SEQ ID NO: 5135991 - DNA, 25 bp, Homo sapien
aaggtcacgttcctcaagtccatga

SEQ ID NO: 5135992 - DNA, 25 bp, Homo sapien
ctcccggggcaaggcgtcaaacagc

SEQ ID NO: 5135993 - DNA, 25 bp, Homo sapien
ctgctgctcattgatgcccacgttg

SEQ ID NO: 5135994 - DNA, 25 bp, Homo sapien
ttgatgcccacgttgaagaggacgg

SEQ ID NO: 5135995 - DNA, 25 bp, Homo sapien
aaggcgtcaaacagcgggcccggca

SEQ ID NO: 5135996 - DNA, 25 bp, Homo sapien
atctccagggccaccacacccccgc

SEQ ID NO: 5135997 - DNA, 25 bp, Homo sapien
gttttctgcatcatctccagggcca

SEQ ID NO: 5135998 - DNA, 25 bp, Homo sapien
gcagccccgaggagccggcacgcac

SEQ ID NO: 5135999 - DNA, 25 bp, Homo sapien
cccgcagccccgaggagccggcacg

SEQ ID NO: 5136000 - DNA, 25 bp, Homo sapien
ggttcaccctgatcacactcagtgt

SEQ ID NO: 5136001 - DNA, 25 bp, Homo sapien
cctccgggactgacatgaagccctt

SEQ ID NO: 5136002 - DNA, 25 bp, Homo sapien
tttcgtcatcgtgcaggttcaccct

SEQ ID NO: 5136003 - DNA, 25 bp, Homo sapien
tgtgccaaatgcctaagaaacaaag

SEQ ID NO: 5136004 - DNA, 25 bp, Homo sapien
gtccctggtctcctcccatctgagg

SEQ ID NO: 5136005 - DNA, 25 bp, Homo sapien
tcagagtccctggtctcctcccatc

SEQ ID NO: 5136006 - DNA, 25 bp, Homo sapien
gagtccctggtctcctcccatctga

SEQ ID NO: 5136007 - DNA, 25 bp, Homo sapien
ccctggtctcctcccatctgaggca

SEQ ID NO: 5136008 - DNA, 25 bp, Homo sapien
acttccttaaactgctcaaagtagg

SEQ ID NO: 5136009 - DNA, 25 bp, Homo sapien
cctcaggcaaaacttccttaaactg

SEQ ID NO: 5136010 - DNA, 25 bp, Homo sapien
ccttaaactgctcaaagtaggaatt

SEQ ID NO: 5136011 - DNA, 25 bp, Homo sapien
tcaaagtaggaatttaaccgcacca

SEQ ID NO: 5136012 - DNA, 25 bp, Homo sapien
aacacatcttgtgtcagtgactacg

SEQ ID NO: 5136013 - DNA, 25 bp, Homo sapien
caagtcctaccaggaggtgcacaat

SEQ ID NO: 5136014 - DNA, 25 bp, Homo sapien
tgtcagtgactacgacagcatggga

SEQ ID NO: 5136015 - DNA, 25 bp, Homo sapien
cagcatgggaaggagccatgtcaca

SEQ ID NO: 5136016 - DNA, 25 bp, Homo sapien
cagagagattactgtcaccatctcc

SEQ ID NO: 5136017 - DNA, 25 bp, Homo sapien
ctgcctccaggagatgccgagatgg

SEQ ID NO: 5136018 - DNA, 25 bp, Homo sapien
gagatggggccaccttgctcccaaa

SEQ ID NO: 5136019 - DNA, 25 bp, Homo sapien
agcaatgttggccccgcatcttcct

SEQ ID NO: 5136020 - DNA, 25 bp, Homo sapien
gagggaattctcgtagacagtgctg

SEQ ID NO: 5136021 - DNA, 25 bp, Homo sapien
cagctctcggttcctcccttagttc

SEQ ID NO: 5136022 - DNA, 25 bp, Homo sapien
tcaagagggaattctcgtagacagt

SEQ ID NO: 5136023 - DNA, 25 bp, Homo sapien
gaattctcgtagacagtgctgtgca

SEQ ID NO: 5136024 - DNA, 25 bp, Homo sapien
catcggatcctctagcactttacac

SEQ ID NO: 5136025 - DNA, 25 bp, Homo sapien
gtccacccctcattcgccatcggat

SEQ ID NO: 5136026 - DNA, 25 bp, Homo sapien
tggcgccccctagtggctgtggcag

SEQ ID NO: 5136027 - DNA, 25 bp, Homo sapien
agaggccggcactctgggaccagct

SEQ ID NO: 5136028 - DNA, 25 bp, Homo sapien
catggatcctatcaccgacccatag

SEQ ID NO: 5136029 - DNA, 25 bp, Homo sapien
tcctatcaccgacccatagggctgt

SEQ ID NO: 5136030 - DNA, 25 bp, Homo sapien
tggaaacgtatgtagagcccagccc

SEQ ID NO: 5136031 - DNA, 25 bp, Homo sapien
gctgttgtggattcagcgtggaaac

SEQ ID NO: 5136032 - DNA, 25 bp, Homo sapien
tagccaggtcaggatatttgccctc

SEQ ID NO: 5136033 - DNA, 25 bp, Homo sapien
tcgccctggcgtacacaggtcctgt

SEQ ID NO: 5136034 - DNA, 25 bp, Homo sapien
gctaattacttcacgttgctgctga

SEQ ID NO: 5136035 - DNA, 25 bp, Homo sapien
gcactttggcttctcgctggttgcc

SEQ ID NO: 5136036 - DNA, 25 bp, Homo sapien
acgtctgactgcgagaccgaggcag

SEQ ID NO: 5136037 - DNA, 25 bp, Homo sapien
gacgttcttattcttccgggcatgc

SEQ ID NO: 5136038 - DNA, 25 bp, Homo sapien
cgttctgacccagaaaccgcagcag

SEQ ID NO: 5136039 - DNA, 25 bp, Homo sapien
ttgccagagaatgtcgacgttctta

SEQ ID NO: 5136040 - DNA, 25 bp, Homo sapien
ataaccaacccgaagtggcggccat

SEQ ID NO: 5136041 - DNA, 25 bp, Homo sapien
cgaagtggcggccatgcaccatgag

SEQ ID NO: 5136042 - DNA, 25 bp, Homo sapien
ccatgagcagctgagacggtctgct

SEQ ID NO: 5136043 - DNA, 25 bp, Homo sapien
tctgctgctgtagaagagactcggg

SEQ ID NO: 5136044 - DNA, 25 bp, Homo sapien
agcaatgccagatgaggccccaaaa

SEQ ID NO: 5136045 - DNA, 25 bp, Homo sapien
caaaaatgaggcctgagaaacctgc

SEQ ID NO: 5136046 - DNA, 25 bp, Homo sapien
ggtacttaggtaagaggctgtcaca

SEQ ID NO: 5136047 - DNA, 25 bp, Homo sapien
cacaaaatctcttaaggtacttagg

SEQ ID NO: 5136048 - DNA, 25 bp, Homo sapien
tgctccagtgtcaccgacatggctg

SEQ ID NO: 5136049 - DNA, 25 bp, Homo sapien
gacatggctgtacggtccttagcgc

SEQ ID NO: 5136050 - DNA, 25 bp, Homo sapien
ccttagcgctcttgcagctggtgaa

SEQ ID NO: 5136051 - DNA, 25 bp, Homo sapien
catgccatgctcgtgttgcaggatc

SEQ ID NO: 5136052 - DNA, 25 bp, Homo sapien
gacgcgttgcttcactcaagtttgg

SEQ ID NO: 5136053 - DNA, 25 bp, Homo sapien
cattggtgactacatcgaaggagac

SEQ ID NO: 5136054 - DNA, 25 bp, Homo sapien
aaatggtgtcgactgctagagaagc

SEQ ID NO: 5136055 - DNA, 25 bp, Homo sapien
tgagaaagcactggccctaagtcac

SEQ ID NO: 5136056 - DNA, 25 bp, Homo sapien
caagttagggttctgaaagcatccc

SEQ ID NO: 5136057 - DNA, 25 bp, Homo sapien
ccttttggtgctacagaagaactgc

SEQ ID NO: 5136058 - DNA, 25 bp, Homo sapien
gatttgaccttctcacagatgcctg

SEQ ID NO: 5136059 - DNA, 25 bp, Homo sapien
atgttcactctctcggctggccaag

SEQ ID NO: 5136060 - DNA, 25 bp, Homo sapien
gggtctagccttaagtctcggatgg

SEQ ID NO: 5136061 - DNA, 25 bp, Homo sapien
cacaatcagtaaattggggctcaga

SEQ ID NO: 5136062 - DNA, 25 bp, Homo sapien
gcaccaggccgctcaagttcttctg

SEQ ID NO: 5136063 - DNA, 25 bp, Homo sapien
ggtgactacctcccgtgttccaatg

SEQ ID NO: 5136064 - DNA, 25 bp, Homo sapien
catcagaaggtagagacgtggtaca

SEQ ID NO: 5136065 - DNA, 25 bp, Homo sapien
cacggtggctggacatgttctggca

SEQ ID NO: 5136066 - DNA, 25 bp, Homo sapien
tccaggccagctaaacgatgcagtg

SEQ ID NO: 5136067 - DNA, 25 bp, Homo sapien
tgacagggcaccgtaagaacatgtt

SEQ ID NO: 5136068 - DNA, 25 bp, Homo sapien
gagtaaatctaaagtcacatgcagt

SEQ ID NO: 5136069 - DNA, 25 bp, Homo sapien
gaaaagatgttggaactttaatctg

SEQ ID NO: 5136070 - DNA, 25 bp, Homo sapien
catatttgattagtaagagagaaaa

SEQ ID NO: 5136071 - DNA, 25 bp, Homo sapien
ttaatctgcaattaaagataccatt

SEQ ID NO: 5136072 - DNA, 25 bp, Homo sapien
cagcctttggtgactatatgcatta

SEQ ID NO: 5136073 - DNA, 25 bp, Homo sapien
aggggtgacacacaggtgatgcctg

SEQ ID NO: 5136074 - DNA, 25 bp, Homo sapien
ggtgacacacaggtgatgcctgccc

SEQ ID NO: 5136075 - DNA, 25 bp, Homo sapien
ggggtgacacacaggtgatgcctgc

SEQ ID NO: 5136076 - DNA, 25 bp, Homo sapien
gggtgacacacaggtgatgcctgcc

SEQ ID NO: 5136077 - DNA, 25 bp, Homo sapien
tgagctggcgtttggtgacttcaga

SEQ ID NO: 5136078 - DNA, 25 bp, Homo sapien
cactgcccagggactattgtcatgc

SEQ ID NO: 5136079 - DNA, 25 bp, Homo sapien
tggtgacttcagactccctactgaa

SEQ ID NO: 5136080 - DNA, 25 bp, Homo sapien
acagcttacaccacccatgagctgg

SEQ ID NO: 5136081 - DNA, 25 bp, Homo sapien
ccgacactgttatcccaccacctgc

SEQ ID NO: 5136082 - DNA, 25 bp, Homo sapien
gccgacactgttatcccaccacctg

SEQ ID NO: 5136083 - DNA, 25 bp, Homo sapien
tgcaatatccggctgatgtggctga

SEQ ID NO: 5136084 - DNA, 25 bp, Homo sapien
gtttgaatttgcaatatccggctga

SEQ ID NO: 5136085 - DNA, 25 bp, Homo sapien
aatttgcaatatccggctgatgtgg

SEQ ID NO: 5136086 - DNA, 25 bp, Homo sapien
ttgaatttgcaatatccggctgatg

SEQ ID NO: 5136087 - DNA, 25 bp, Homo sapien
ggcaatccagggggcaaaagcaaac

SEQ ID NO: 5136088 - DNA, 25 bp, Homo sapien
gcaatccagggggcaaaagcaaaca

SEQ ID NO: 5136089 - DNA, 25 bp, Homo sapien
cacaggtgccactgagccagtgaga

SEQ ID NO: 5136090 - DNA, 25 bp, Homo sapien
catgtgttccctcttgcacaggtgc

SEQ ID NO: 5136091 - DNA, 25 bp, Homo sapien
ccacccttccacaggtgggctgccc

SEQ ID NO: 5136092 - DNA, 25 bp, Homo sapien
caagttctggtagcagccagccacc

SEQ ID NO: 5136093 - DNA, 25 bp, Homo sapien
taaatgcatatttgcgacttccaac

SEQ ID NO: 5136094 - DNA, 25 bp, Homo sapien
tatttgcgacttccaacattcttca

SEQ ID NO: 5136095 - DNA, 25 bp, Homo sapien
taatgcttggggaaagccttcagct

SEQ ID NO: 5136096 - DNA, 25 bp, Homo sapien
ccttcgggaggcctgtaatgcttgg

SEQ ID NO: 5136097 - DNA, 25 bp, Homo sapien
gatctgtgtagttacagccaaaggc

SEQ ID NO: 5136098 - DNA, 25 bp, Homo sapien
tatatgacactagagggtacccaca

SEQ ID NO: 5136099 - DNA, 25 bp, Homo sapien
cagctaattagaggaaaccgtgtgt

SEQ ID NO: 5136100 - DNA, 25 bp, Homo sapien
catttattggtatgcctaggatcca

SEQ ID NO: 5136101 - DNA, 25 bp, Homo sapien
gcagagagcttcgtccttcattaaa

SEQ ID NO: 5136102 - DNA, 25 bp, Homo sapien
gaacccgttattctcactgcatgag

SEQ ID NO: 5136103 - DNA, 25 bp, Homo sapien
tgaactcagctttgagggagcagca

SEQ ID NO: 5136104 - DNA, 25 bp, Homo sapien
tccccatgggagtgttgacatgcca

SEQ ID NO: 5136105 - DNA, 25 bp, Homo sapien
gtgcagatatttaatgctctccaga

SEQ ID NO: 5136106 - DNA, 25 bp, Homo sapien
tttgatgagtgcagatatttaatgc

SEQ ID NO: 5136107 - DNA, 25 bp, Homo sapien
tttaatgctctccagacaaaaaaga

SEQ ID NO: 5136108 - DNA, 25 bp, Homo sapien
gatatttaatgctctccagacaaaa

SEQ ID NO: 5136109 - DNA, 25 bp, Homo sapien
catataaaggtgtcacatgcaaaac

SEQ ID NO: 5136110 - DNA, 25 bp, Homo sapien
gccttcagagagaatactgaaacct

SEQ ID NO: 5136111 - DNA, 25 bp, Homo sapien
tggaagcgtgtgatgctgccggaag

SEQ ID NO: 5136112 - DNA, 25 bp, Homo sapien
ccttcagagagaatactgaaacctg

SEQ ID NO: 5136113 - DNA, 25 bp, Homo sapien
ttcagagagaatactgaaacctgaa

SEQ ID NO: 5136114 - DNA, 25 bp, Homo sapien
cagcatacatggctttgaatgacct

SEQ ID NO: 5136115 - DNA, 25 bp, Homo sapien
tatgtgtcattctaaagactagcac

SEQ ID NO: 5136116 - DNA, 25 bp, Homo sapien
tctgtaggagctctgacagaatcca

SEQ ID NO: 5136117 - DNA, 25 bp, Homo sapien
taaggaacactggacggaacctctg

SEQ ID NO: 5136118 - DNA, 25 bp, Homo sapien
gcgcgtcgcacgttccttatgagga

SEQ ID NO: 5136119 - DNA, 25 bp, Homo sapien
tatgaacacgtacttctgaggcgcg

SEQ ID NO: 5136120 - DNA, 25 bp, Homo sapien
catacaacgaggactgggttaccca

SEQ ID NO: 5136121 - DNA, 25 bp, Homo sapien
cacagacgggaaggtaacaacaatg

SEQ ID NO: 5136122 - DNA, 25 bp, Homo sapien
tcaggacactgaaacgaggtgcact

SEQ ID NO: 5136123 - DNA, 25 bp, Homo sapien
cacagtaatcaaggaatcaggacac

SEQ ID NO: 5136124 - DNA, 25 bp, Homo sapien
ggtgcactgctaccatcaatgagaa

SEQ ID NO: 5136125 - DNA, 25 bp, Homo sapien
gtgagcactttagtccagcccctcg

SEQ ID NO: 5136126 - DNA, 25 bp, Homo sapien
tagctgatgtctgggcgtcctgaca

SEQ ID NO: 5136127 - DNA, 25 bp, Homo sapien
tgaagcgcagcaccagaatggcatg

SEQ ID NO: 5136128 - DNA, 25 bp, Homo sapien
gggacaactcccctagatctgggca

SEQ ID NO: 5136129 - DNA, 25 bp, Homo sapien
gcaggaagaagctcacggtagctga

SEQ ID NO: 5136130 - DNA, 25 bp, Homo sapien
taacttacagaaaatcggctcttaa

SEQ ID NO: 5136131 - DNA, 25 bp, Homo sapien
agtgccctcactataacttacagaa

SEQ ID NO: 5136132 - DNA, 25 bp, Homo sapien
cttacagaaaatcggctcttaagag

SEQ ID NO: 5136133 - DNA, 25 bp, Homo sapien
agcagtgccctcactataacttaca

SEQ ID NO: 5136134 - DNA, 25 bp, Homo sapien
cactcctctccaatcttccttgacc

SEQ ID NO: 5136135 - DNA, 25 bp, Homo sapien
atggatcccgataagccagctctgc

SEQ ID NO: 5136136 - DNA, 25 bp, Homo sapien
tcatggatcccgataagccagctct

SEQ ID NO: 5136137 - DNA, 25 bp, Homo sapien
ggatcccgataagccagctctgccc

SEQ ID NO: 5136138 - DNA, 25 bp, Homo sapien
gctcgtgatgcatttagcgtaaccg

SEQ ID NO: 5136139 - DNA, 25 bp, Homo sapien
tgtagtgagaaaaacagcgtggtcc

SEQ ID NO: 5136140 - DNA, 25 bp, Homo sapien
ggactgacagtggacaggacatgca

SEQ ID NO: 5136141 - DNA, 25 bp, Homo sapien
aactttagctccttcacagcgggca

SEQ ID NO: 5136142 - DNA, 25 bp, Homo sapien
ccttgttatgtagtagcagggacgt

SEQ ID NO: 5136143 - DNA, 25 bp, Homo sapien
tattagtcattcaaaatctggccac

SEQ ID NO: 5136144 - DNA, 25 bp, Homo sapien
tctatcgtgcaaactacagctctaa

SEQ ID NO: 5136145 - DNA, 25 bp, Homo sapien
gaagtaaggttcatcactcagaagt

SEQ ID NO: 5136146 - DNA, 25 bp, Homo sapien
ggtgtcatacccaagtcaccgctga

SEQ ID NO: 5136147 - DNA, 25 bp, Homo sapien
tgactccaatgaagtttctcctgtg

SEQ ID NO: 5136148 - DNA, 25 bp, Homo sapien
gcttttttgcctaaggatagctggt

SEQ ID NO: 5136149 - DNA, 25 bp, Homo sapien
gtgtccagcttttttgcctaaggat

SEQ ID NO: 5136150 - DNA, 25 bp, Homo sapien
gttataattcatgtttgattacagc

SEQ ID NO: 5136151 - DNA, 25 bp, Homo sapien
ccagcagttataattcatgtttgat

SEQ ID NO: 5136152 - DNA, 25 bp, Homo sapien
gcagttataattcatgtttgattac

SEQ ID NO: 5136153 - DNA, 25 bp, Homo sapien
tataattcatgtttgattacagcca

SEQ ID NO: 5136154 - DNA, 25 bp, Homo sapien
tccacatgtagaatctatctgtact

SEQ ID NO: 5136155 - DNA, 25 bp, Homo sapien
ccacatgtagaatctatctgtactt

SEQ ID NO: 5136156 - DNA, 25 bp, Homo sapien
cacatgtagaatctatctgtacttc

SEQ ID NO: 5136157 - DNA, 25 bp, Homo sapien
ttcaaggctcatccacatgtagaat

SEQ ID NO: 5136158 - DNA, 25 bp, Homo sapien
ggcatagctgatgctaggccccaga

SEQ ID NO: 5136159 - DNA, 25 bp, Homo sapien
cagtctggcccgctctacataatgg

SEQ ID NO: 5136160 - DNA, 25 bp, Homo sapien
tcagcactttaatagcgtccacagg

SEQ ID NO: 5136161 - DNA, 25 bp, Homo sapien
tcaaatctataaaaggactctggtc

SEQ ID NO: 5136162 - DNA, 25 bp, Homo sapien
gctcccgacccggttgcaagtgttg

SEQ ID NO: 5136163 - DNA, 25 bp, Homo sapien
gccggaagttgttgccgctggcttc

SEQ ID NO: 5136164 - DNA, 25 bp, Homo sapien
caagtgttgcggtgggagaaagtcg

SEQ ID NO: 5136165 - DNA, 25 bp, Homo sapien
cggtgggagaaagtcgcgtccgcat

SEQ ID NO: 5136166 - DNA, 25 bp, Homo sapien
cgcgccgcgtcacgggaaccgactt

SEQ ID NO: 5136167 - DNA, 25 bp, Homo sapien
cttccctcaacggagccggcccttg

SEQ ID NO: 5136168 - DNA, 25 bp, Homo sapien
cacgtccgaaccagcccaccacctc

SEQ ID NO: 5136169 - DNA, 25 bp, Homo sapien
ctacagcctcgacccacgtccgaac

SEQ ID NO: 5136170 - DNA, 25 bp, Homo sapien
attttagccgcaactctatcgccgg

SEQ ID NO: 5136171 - DNA, 25 bp, Homo sapien
caagctgtcgggattaaatggcccc

SEQ ID NO: 5136172 - DNA, 25 bp, Homo sapien
gttttagtatgcctacatcccacgc

SEQ ID NO: 5136173 - DNA, 25 bp, Homo sapien
tcccacgcaacatttcggacatgct

SEQ ID NO: 5136174 - DNA, 25 bp, Homo sapien
caaatgcagttagttctgaggcggg

SEQ ID NO: 5136175 - DNA, 25 bp, Homo sapien
gaaagcagtttcagccggttagaac

SEQ ID NO: 5136176 - DNA, 25 bp, Homo sapien
gcagctaccattacagagacaggga

SEQ ID NO: 5136177 - DNA, 25 bp, Homo sapien
tacatccggaatagttcagcagagg

SEQ ID NO: 5136178 - DNA, 25 bp, Homo sapien
gaaacatttggctaccgacactcct

SEQ ID NO: 5136179 - DNA, 25 bp, Homo sapien
cttttacacgtattctgaagaaaca

SEQ ID NO: 5136180 - DNA, 25 bp, Homo sapien
tgaagaaacatttggctaccgacac

SEQ ID NO: 5136181 - DNA, 25 bp, Homo sapien
catttcttttacacgtattctgaag

SEQ ID NO: 5136182 - DNA, 25 bp, Homo sapien
tgccgaaagcggaaaagccttctca

SEQ ID NO: 5136183 - DNA, 25 bp, Homo sapien
gatatttgtagcgtttcgctccggc

SEQ ID NO: 5136184 - DNA, 25 bp, Homo sapien
gactccgttcccctgcactaaggaa

SEQ ID NO: 5136185 - DNA, 25 bp, Homo sapien
tgaacaggtagagcatctgccaggc

SEQ ID NO: 5136186 - DNA, 25 bp, Homo sapien
ggtaacagtttactctggcatctgc

SEQ ID NO: 5136187 - DNA, 25 bp, Homo sapien
cagtcagctgacatttgggtaccga

SEQ ID NO: 5136188 - DNA, 25 bp, Homo sapien
ttgggacctgtagaaccaagactac

SEQ ID NO: 5136189 - DNA, 25 bp, Homo sapien
gatatggagtgaatcttgtcccctg

SEQ ID NO: 5136190 - DNA, 25 bp, Homo sapien
gctttattgtctcaaagaatcccat

SEQ ID NO: 5136191 - DNA, 25 bp, Homo sapien
tcaaagaatcccatgtccagcacaa

SEQ ID NO: 5136192 - DNA, 25 bp, Homo sapien
gaccaacgcctacacaatctatgag

SEQ ID NO: 5136193 - DNA, 25 bp, Homo sapien
ctatgagtacaacccaaaggagaag

SEQ ID NO: 5136194 - DNA, 25 bp, Homo sapien
agcaaacaaatggagatgctacagc

SEQ ID NO: 5136195 - DNA, 25 bp, Homo sapien
aacaaatggagatgctacagcagta

SEQ ID NO: 5136196 - DNA, 25 bp, Homo sapien
acaaatggagatgctacagcagtat

SEQ ID NO: 5136197 - DNA, 25 bp, Homo sapien
tgaagcaaacaaatggagatgctac

SEQ ID NO: 5136198 - DNA, 25 bp, Homo sapien
aatttccatctgctgctattgtacc

SEQ ID NO: 5136199 - DNA, 25 bp, Homo sapien
tcaatttccatctgctgctattgta

SEQ ID NO: 5136200 - DNA, 25 bp, Homo sapien
caatttccatctgctgctattgtac

SEQ ID NO: 5136201 - DNA, 25 bp, Homo sapien
atttccatctgctgctattgtacct

SEQ ID NO: 5136202 - DNA, 25 bp, Homo sapien
tatcaagaagtggtctctattgaca

SEQ ID NO: 5136203 - DNA, 25 bp, Homo sapien
gcagaactggctaaatctgtaatat

SEQ ID NO: 5136204 - DNA, 25 bp, Homo sapien
tcatccagacaacttaagcagaact

SEQ ID NO: 5136205 - DNA, 25 bp, Homo sapien
gcagaaaaccatgctatcatccaga

SEQ ID NO: 5136206 - DNA, 25 bp, Homo sapien
tggtggtgtgtgcctgtaatcccag

SEQ ID NO: 5136207 - DNA, 25 bp, Homo sapien
taaaagtatgaaaattagccaagtg

SEQ ID NO: 5136208 - DNA, 25 bp, Homo sapien
ctactcagaaggctgaggcaggaga

SEQ ID NO: 5136209 - DNA, 25 bp, Homo sapien
attcgcttgaacccgggaggcggag

SEQ ID NO: 5136210 - DNA, 25 bp, Homo sapien
taactagcacatacaaaagctctgc

SEQ ID NO: 5136211 - DNA, 25 bp, Homo sapien
aaagctctgctgtactagtcagaag

SEQ ID NO: 5136212 - DNA, 25 bp, Homo sapien
ccagaattactgcattcagggcaga

SEQ ID NO: 5136213 - DNA, 25 bp, Homo sapien
taacagtggacagcatttattggct

SEQ ID NO: 5136214 - DNA, 25 bp, Homo sapien
catgcagtctatgagataaagtcca

SEQ ID NO: 5136215 - DNA, 25 bp, Homo sapien
taaactccaggctgatttggtcccc

SEQ ID NO: 5136216 - DNA, 25 bp, Homo sapien
tatgctcccagacctagtgtgctgt

SEQ ID NO: 5136217 - DNA, 25 bp, Homo sapien
tcatcttgaacagcaatccccagaa

SEQ ID NO: 5136218 - DNA, 25 bp, Homo sapien
ggcctcctctactcctacgcagacc

SEQ ID NO: 5136219 - DNA, 25 bp, Homo sapien
tactcctacgcagacctctgcaagt

SEQ ID NO: 5136220 - DNA, 25 bp, Homo sapien
tatcaccaccatactatctgggcct

SEQ ID NO: 5136221 - DNA, 25 bp, Homo sapien
ctcaggaagctctcgaatccatctc

SEQ ID NO: 5136222 - DNA, 25 bp, Homo sapien
gctccctgaactcaacaggccagca

SEQ ID NO: 5136223 - DNA, 25 bp, Homo sapien
agctccctgaactcaacaggccagc

SEQ ID NO: 5136224 - DNA, 25 bp, Homo sapien
ctccctgaactcaacaggccagcaa

SEQ ID NO: 5136225 - DNA, 25 bp, Homo sapien
tattctcccgcttatcccaaatggg

SEQ ID NO: 5136226 - DNA, 25 bp, Homo sapien
aaggcactgtggttttcacctccca

SEQ ID NO: 5136227 - DNA, 25 bp, Homo sapien
catattaacgccagtcagaggctca

SEQ ID NO: 5136228 - DNA, 25 bp, Homo sapien
caagagcgccctttctgtagacgtt

SEQ ID NO: 5136229 - DNA, 25 bp, Homo sapien
tgtggcacacacgatactctgaagg

SEQ ID NO: 5136230 - DNA, 25 bp, Homo sapien
catgtcttacgaagcctgtggccgt

SEQ ID NO: 5136231 - DNA, 25 bp, Homo sapien
aaagccacgggcctgaatgatgtca

SEQ ID NO: 5136232 - DNA, 25 bp, Homo sapien
tgacttaaatgccttgacagagcct

SEQ ID NO: 5136233 - DNA, 25 bp, Homo sapien
ctatgcggcagacattctaaattct

SEQ ID NO: 5136234 - DNA, 25 bp, Homo sapien
ctgtaaatgtttactgacgactttc

SEQ ID NO: 5136235 - DNA, 25 bp, Homo sapien
ggagatataccagtaaacaaaacag

SEQ ID NO: 5136236 - DNA, 25 bp, Homo sapien
tctaaattctggagatataccagta

SEQ ID NO: 5136237 - DNA, 25 bp, Homo sapien
atcaaaagcatagccccattccaca

SEQ ID NO: 5136238 - DNA, 25 bp, Homo sapien
gagtggataaaaagcattgagatgc

SEQ ID NO: 5136239 - DNA, 25 bp, Homo sapien
aagcattgagatgcacatcaaaagc

SEQ ID NO: 5136240 - DNA, 25 bp, Homo sapien
tgaccaggagtggataaaaagcatt

SEQ ID NO: 5136241 - DNA, 25 bp, Homo sapien
gagtccctttaccaatgcatgcaat

SEQ ID NO: 5136242 - DNA, 25 bp, Homo sapien
aatgaagacttggataatactctaa

SEQ ID NO: 5136243 - DNA, 25 bp, Homo sapien
tgccagaagagacgcagaccatgag

SEQ ID NO: 5136244 - DNA, 25 bp, Homo sapien
cttggataatactctaattaactgc

SEQ ID NO: 5136245 - DNA, 25 bp, Homo sapien
gaaagttacatagatataatagcca

SEQ ID NO: 5136246 - DNA, 25 bp, Homo sapien
cactgtatcccaggaaagttacata

SEQ ID NO: 5136247 - DNA, 25 bp, Homo sapien
gatataatagccaactgcaaccaac

SEQ ID NO: 5136248 - DNA, 25 bp, Homo sapien
gcaaccaaccataaggtatttccaa

SEQ ID NO: 5136249 - DNA, 25 bp, Homo sapien
tgttatataccagctaggccatttt

SEQ ID NO: 5136250 - DNA, 25 bp, Homo sapien
gatagtgcctgtaagtgttccataa

SEQ ID NO: 5136251 - DNA, 25 bp, Homo sapien
tctagctgcatgaccatgggtaagt

SEQ ID NO: 5136252 - DNA, 25 bp, Homo sapien
gctgtttgtactactgttacaactt

SEQ ID NO: 5136253 - DNA, 25 bp, Homo sapien
taccctcctgctggtaacccacaac

SEQ ID NO: 5136254 - DNA, 25 bp, Homo sapien
ctaccctcctgctggtaacccacaa

SEQ ID NO: 5136255 - DNA, 25 bp, Homo sapien
tatgtaacaagatgctgggccccac

SEQ ID NO: 5136256 - DNA, 25 bp, Homo sapien
ctatgtaacaagatgctgggcccca

SEQ ID NO: 5136257 - DNA, 25 bp, Homo sapien
agttatgattcaaaaggctttagag

SEQ ID NO: 5136258 - DNA, 25 bp, Homo sapien
ggacaataaatgttgggcccgatct

SEQ ID NO: 5136259 - DNA, 25 bp, Homo sapien
tgtgattgtctacagaaccatacgg

SEQ ID NO: 5136260 - DNA, 25 bp, Homo sapien
tgaactgacaacaggatttaacagt

SEQ ID NO: 5136261 - DNA, 25 bp, Homo sapien
tagagaaaccacagtgctgcagtgt

SEQ ID NO: 5136262 - DNA, 25 bp, Homo sapien
taggtcgttaccaggagtgttcaaa

SEQ ID NO: 5136263 - DNA, 25 bp, Homo sapien
taactccggagccaggcatagtcag

SEQ ID NO: 5136264 - DNA, 25 bp, Homo sapien
tgtgagctcaactagtagcccaggc

SEQ ID NO: 5136265 - DNA, 25 bp, Homo sapien
taagatgatgctatttatgcccaga

SEQ ID NO: 5136266 - DNA, 25 bp, Homo sapien
gaaagacagcttacttcaacatgtg

SEQ ID NO: 5136267 - DNA, 25 bp, Homo sapien
cttaaagtacagagatggatggcgt

SEQ ID NO: 5136268 - DNA, 25 bp, Homo sapien
gtgactgcctcagaaacctctagga

SEQ ID NO: 5136269 - DNA, 25 bp, Homo sapien
aacagagagtatgggtgaagttcca

SEQ ID NO: 5136270 - DNA, 25 bp, Homo sapien
tgccagggaaagcccgtagagcaga

SEQ ID NO: 5136271 - DNA, 25 bp, Homo sapien
gagtatgggtgaagttccatcccag

SEQ ID NO: 5136272 - DNA, 25 bp, Homo sapien
cagaggtgcaaatggatacagaaga

SEQ ID NO: 5136273 - DNA, 25 bp, Homo sapien
cacttcacaatactgttgacacagt

SEQ ID NO: 5136274 - DNA, 25 bp, Homo sapien
acttcacaatactgttgacacagtt

SEQ ID NO: 5136275 - DNA, 25 bp, Homo sapien
aggaatgtacctgaccacagtgtta

SEQ ID NO: 5136276 - DNA, 25 bp, Homo sapien
aaggaatgtacctgaccacagtgtt

SEQ ID NO: 5136277 - DNA, 25 bp, Homo sapien
taaggaatgtacctgaccacagtgt

SEQ ID NO: 5136278 - DNA, 25 bp, Homo sapien
ggctgaatgattcctatccgtagta

SEQ ID NO: 5136279 - DNA, 25 bp, Homo sapien
ggtcctgttgattgtgccttcatca

SEQ ID NO: 5136280 - DNA, 25 bp, Homo sapien
tctgtgccacgaccgttcatgtgta

SEQ ID NO: 5136281 - DNA, 25 bp, Homo sapien
gaggaatctccttgccaggttgtac

SEQ ID NO: 5136282 - DNA, 25 bp, Homo sapien
gcactgccagtagatttgatacttt

SEQ ID NO: 5136283 - DNA, 25 bp, Homo sapien
ttaaaaatggctgctatcgacagta

SEQ ID NO: 5136284 - DNA, 25 bp, Homo sapien
tggctgctatcgacagtactgtaag

SEQ ID NO: 5136285 - DNA, 25 bp, Homo sapien
cagtactgtaagatgcactgccagt

SEQ ID NO: 5136286 - DNA, 25 bp, Homo sapien
ggaaagcactttgcgcgaagtaaca

SEQ ID NO: 5136287 - DNA, 25 bp, Homo sapien
ggaggctattttatgtgtcacttgc

SEQ ID NO: 5136288 - DNA, 25 bp, Homo sapien
aattagcaaactgtcctggaaccaa

SEQ ID NO: 5136289 - DNA, 25 bp, Homo sapien
caagggtttggtacttttgcctgat

SEQ ID NO: 5136290 - DNA, 25 bp, Homo sapien
cagatcaaatcctgtatgggccagc

SEQ ID NO: 5136291 - DNA, 25 bp, Homo sapien
tgtgagtcataaccataccttagtg

SEQ ID NO: 5136292 - DNA, 25 bp, Homo sapien
tattgccatgtccttgatacgagac

SEQ ID NO: 5136293 - DNA, 25 bp, Homo sapien
taagggaactttatccagtccaatc

SEQ ID NO: 5136294 - DNA, 25 bp, Homo sapien
tagtagcaagtcatgtacctggacc

SEQ ID NO: 5136295 - DNA, 25 bp, Homo sapien
agcaaaggagctgggaactgcagtc

SEQ ID NO: 5136296 - DNA, 25 bp, Homo sapien
gagaactcacttaagcctgcttgga

SEQ ID NO: 5136297 - DNA, 25 bp, Homo sapien
tacagccacgggaactgaattcagc

SEQ ID NO: 5136298 - DNA, 25 bp, Homo sapien
gaacactacctcttgtgaagtctac

SEQ ID NO: 5136299 - DNA, 25 bp, Homo sapien
tgtttgaaactaagctgtcctcaga

SEQ ID NO: 5136300 - DNA, 25 bp, Homo sapien
catttcagcctttcgactttcagtt

SEQ ID NO: 5136301 - DNA, 25 bp, Homo sapien
gaaggaatggtggatccaagtctca

SEQ ID NO: 5136302 - DNA, 25 bp, Homo sapien
tgcgagacggcagaagaaccttctg

SEQ ID NO: 5136303 - DNA, 25 bp, Homo sapien
ctatttcagtgggttaaagctgcga

SEQ ID NO: 5136304 - DNA, 25 bp, Homo sapien
actggtcaggcatggcgggcggagg

SEQ ID NO: 5136305 - DNA, 25 bp, Homo sapien
taaagctgcgagacggcagaagaac

SEQ ID NO: 5136306 - DNA, 25 bp, Homo sapien
caagcctcagtgtatgtcgtgggca

SEQ ID NO: 5136307 - DNA, 25 bp, Homo sapien
taaaatgtttcaagcgccggatctt

SEQ ID NO: 5136308 - DNA, 25 bp, Homo sapien
ttatagttgaaagcgcaagcctcag

SEQ ID NO: 5136309 - DNA, 25 bp, Homo sapien
gagaaacccattgattggctcctgg

SEQ ID NO: 5136310 - DNA, 25 bp, Homo sapien
ttgatgaccttgacacgtcttaaag

SEQ ID NO: 5136311 - DNA, 25 bp, Homo sapien
gaccttgacacgtcttaaagtggaa

SEQ ID NO: 5136312 - DNA, 25 bp, Homo sapien
tctcttactcctggtcgtttcctca

SEQ ID NO: 5136313 - DNA, 25 bp, Homo sapien
cattggcacaatcatacccattctg

SEQ ID NO: 5136314 - DNA, 25 bp, Homo sapien
cttcgtgtaggtggccatgttgtca

SEQ ID NO: 5136315 - DNA, 25 bp, Homo sapien
tgaccccatacttgtaggccactga

SEQ ID NO: 5136316 - DNA, 25 bp, Homo sapien
cagattgcgctccttgctggacagc

SEQ ID NO: 5136317 - DNA, 25 bp, Homo sapien
gcagcttcatgtcggaggtgtcagt

SEQ ID NO: 5136318 - DNA, 25 bp, Homo sapien
aagaccatgggacaggtggatctca

SEQ ID NO: 5136319 - DNA, 25 bp, Homo sapien
gaccatgggacaggtggatctcagc

SEQ ID NO: 5136320 - DNA, 25 bp, Homo sapien
ttccaagaccatggtgtatccaaaa

SEQ ID NO: 5136321 - DNA, 25 bp, Homo sapien
ccaaaattccaagaccatggtgtat

SEQ ID NO: 5136322 - DNA, 25 bp, Homo sapien
ttcagatagaagacggttctctctg

SEQ ID NO: 5136323 - DNA, 25 bp, Homo sapien
actttcagatagaagacggttctct

SEQ ID NO: 5136324 - DNA, 25 bp, Homo sapien
gatagaagacggttctctctggatt

SEQ ID NO: 5136325 - DNA, 25 bp, Homo sapien
ttactttcagatagaagacggttct

SEQ ID NO: 5136326 - DNA, 25 bp, Homo sapien
cagcaagatactggaagtaatcccc

SEQ ID NO: 5136327 - DNA, 25 bp, Homo sapien
tcagcaagatactggaagtaatccc

SEQ ID NO: 5136328 - DNA, 25 bp, Homo sapien
taccacatgcaacttcagcaagata

SEQ ID NO: 5136329 - DNA, 25 bp, Homo sapien
acatgcaacttcagcaagatactgg

SEQ ID NO: 5136330 - DNA, 25 bp, Homo sapien
tattaagagatgacatgcgctttaa

SEQ ID NO: 5136331 - DNA, 25 bp, Homo sapien
tattacatagtaaagtgaataccag

SEQ ID NO: 5136332 - DNA, 25 bp, Homo sapien
gtgtattaagagatgacatgcgctt

SEQ ID NO: 5136333 - DNA, 25 bp, Homo sapien
aagagatgacatgcgctttaatttg

SEQ ID NO: 5136334 - DNA, 25 bp, Homo sapien
tgtttgttcccaatgtcagttgcgc

SEQ ID NO: 5136335 - DNA, 25 bp, Homo sapien
ccttaagggatgtttgttcccaatg

SEQ ID NO: 5136336 - DNA, 25 bp, Homo sapien
agttgcgcctctggtgtactctcca

SEQ ID NO: 5136337 - DNA, 25 bp, Homo sapien
tactctccagaagcatgtttgctca

SEQ ID NO: 5136338 - DNA, 25 bp, Homo sapien
agcactccagatgtcctcctgtcac

SEQ ID NO: 5136339 - DNA, 25 bp, Homo sapien
ttatcggaaagctagggttaatgat

SEQ ID NO: 5136340 - DNA, 25 bp, Homo sapien
gaaagctagggttaatgataaggta

SEQ ID NO: 5136341 - DNA, 25 bp, Homo sapien
aggtagaaatgcagcactccagatg

SEQ ID NO: 5136342 - DNA, 25 bp, Homo sapien
cgaccacttgtcattatatcgactt

SEQ ID NO: 5136343 - DNA, 25 bp, Homo sapien
ttgtcattatatcgacttagtagag

SEQ ID NO: 5136344 - DNA, 25 bp, Homo sapien
tatcgacttagtagagagattgcaa

SEQ ID NO: 5136345 - DNA, 25 bp, Homo sapien
tcattatatcgacttagtagagaga

SEQ ID NO: 5136346 - DNA, 25 bp, Homo sapien
ttgaaccaaggagtgggcacgtgta

SEQ ID NO: 5136347 - DNA, 25 bp, Homo sapien
agatgcacgaaggatggagaagagt

SEQ ID NO: 5136348 - DNA, 25 bp, Homo sapien
ttggattgaaccaaggagtgggcac

SEQ ID NO: 5136349 - DNA, 25 bp, Homo sapien
gatgttggattgaaccaaggagtgg

SEQ ID NO: 5136350 - DNA, 25 bp, Homo sapien
ctatgatagcactggggtaaaaaca

SEQ ID NO: 5136351 - DNA, 25 bp, Homo sapien
ttctcacaagaagcggtgttggagt

SEQ ID NO: 5136352 - DNA, 25 bp, Homo sapien
aacagcacattcagatgagggattc

SEQ ID NO: 5136353 - DNA, 25 bp, Homo sapien
acagcacattcagatgagggattct

SEQ ID NO: 5136354 - DNA, 25 bp, Homo sapien
taacttaaagcaaattatagtcagt

SEQ ID NO: 5136355 - DNA, 25 bp, Homo sapien
agtaacttaaagcaaattatagtca

SEQ ID NO: 5136356 - DNA, 25 bp, Homo sapien
ttccactaggaagctagaaagtaac

SEQ ID NO: 5136357 - DNA, 25 bp, Homo sapien
gtatttccactaggaagctagaaag

SEQ ID NO: 5136358 - DNA, 25 bp, Homo sapien
tggggctgtcgcgaccgtccgcggg

SEQ ID NO: 5136359 - DNA, 25 bp, Homo sapien
aagttggggctgtcgcgaccgtccg

SEQ ID NO: 5136360 - DNA, 25 bp, Homo sapien
gggctgtcgcgaccgtccgcggggc

SEQ ID NO: 5136361 - DNA, 25 bp, Homo sapien
ctgtcgcgaccgtccgcggggcctc

SEQ ID NO: 5136362 - DNA, 25 bp, Homo sapien
actgatgcatgcacaccaggctaat

SEQ ID NO: 5136363 - DNA, 25 bp, Homo sapien
aagatgtgagcagagagatagtctg

SEQ ID NO: 5136364 - DNA, 25 bp, Homo sapien
tactaattgcctaaattactgtttg

SEQ ID NO: 5136365 - DNA, 25 bp, Homo sapien
gtaaaaatattcatccactcaacaa

SEQ ID NO: 5136366 - DNA, 25 bp, Homo sapien
gctcttgttgccaggctggggtgca

SEQ ID NO: 5136367 - DNA, 25 bp, Homo sapien
gcgcgtgccaccatgcccagttaat

SEQ ID NO: 5136368 - DNA, 25 bp, Homo sapien
caatggtgcaatcttggctcactgc

SEQ ID NO: 5136369 - DNA, 25 bp, Homo sapien
cgtgccaccatgcccagttaattat

SEQ ID NO: 5136370 - DNA, 25 bp, Homo sapien
ccttctcttatcatgtgtatttcct

SEQ ID NO: 5136371 - DNA, 25 bp, Homo sapien
ttcttcaaggttcagatcaagtctg

SEQ ID NO: 5136372 - DNA, 25 bp, Homo sapien
gtgtgctccttctcttatcatgtgt

SEQ ID NO: 5136373 - DNA, 25 bp, Homo sapien
tgcacaggtccaaatccgacatctg

SEQ ID NO: 5136374 - DNA, 25 bp, Homo sapien
cccaggtgccaggaacactgagtgt

SEQ ID NO: 5136375 - DNA, 25 bp, Homo sapien
tgccaggaacactgagtgtgtacca

SEQ ID NO: 5136376 - DNA, 25 bp, Homo sapien
caggtgccaggaacactgagtgtgt

SEQ ID NO: 5136377 - DNA, 25 bp, Homo sapien
ggtgccaggaacactgagtgtgtac

SEQ ID NO: 5136378 - DNA, 25 bp, Homo sapien
gctggaagatggcccaaggctatga

SEQ ID NO: 5136379 - DNA, 25 bp, Homo sapien
tggaagatggcccaaggctatgagc

SEQ ID NO: 5136380 - DNA, 25 bp, Homo sapien
aaagcctacgggctggctggaagat

SEQ ID NO: 5136381 - DNA, 25 bp, Homo sapien
aagatggcccaaggctatgagccat

SEQ ID NO: 5136382 - DNA, 25 bp, Homo sapien
caggcaaaatgagagtcccaacttc

SEQ ID NO: 5136383 - DNA, 25 bp, Homo sapien
tggccaagacaaagggatgctcagt

SEQ ID NO: 5136384 - DNA, 25 bp, Homo sapien
tctcagggctgtagggaagattaaa

SEQ ID NO: 5136385 - DNA, 25 bp, Homo sapien
ttaggaatactaagctggccaagac

SEQ ID NO: 5136386 - DNA, 25 bp, Homo sapien
aatgagacaagatgcatgtactcaa

SEQ ID NO: 5136387 - DNA, 25 bp, Homo sapien
aaatgagacaagatgcatgtactca

SEQ ID NO: 5136388 - DNA, 25 bp, Homo sapien
ttgcaagggcttccacaacacttac

SEQ ID NO: 5136389 - DNA, 25 bp, Homo sapien
agattgcaagggcttccacaacact

SEQ ID NO: 5136390 - DNA, 25 bp, Homo sapien
gattgcaagggcttccacaacactt

SEQ ID NO: 5136391 - DNA, 25 bp, Homo sapien
ctagattgcaagggcttccacaaca

SEQ ID NO: 5136392 - DNA, 25 bp, Homo sapien
tcacggtgcccagatgtactccctt

SEQ ID NO: 5136393 - DNA, 25 bp, Homo sapien
gcccagatgtactccctttttatgt

SEQ ID NO: 5136394 - DNA, 25 bp, Homo sapien
ggtttctgtccctcacggtgcccag

SEQ ID NO: 5136395 - DNA, 25 bp, Homo sapien
caatccttccctccaataaagtctc

SEQ ID NO: 5136396 - DNA, 25 bp, Homo sapien
tgaggagaaacgttcaagaggtgct

SEQ ID NO: 5136397 - DNA, 25 bp, Homo sapien
tgctgttggtaaggtaggaaaccac

SEQ ID NO: 5136398 - DNA, 25 bp, Homo sapien
acaccagaatttggtggtacatcca

SEQ ID NO: 5136399 - DNA, 25 bp, Homo sapien
catcttactgaaaatgaggccttca

SEQ ID NO: 5136400 - DNA, 25 bp, Homo sapien
cagatacccattggagagctccttt

SEQ ID NO: 5136401 - DNA, 25 bp, Homo sapien
gctcctttctctgttaatccactcg

SEQ ID NO: 5136402 - DNA, 25 bp, Homo sapien
aacaggtcaaaacaccatctttggg

SEQ ID NO: 5136403 - DNA, 25 bp, Homo sapien
tcttaggtggataaaggaactccag

SEQ ID NO: 5136404 - DNA, 25 bp, Homo sapien
gaatgactccagtaacagagattaa

SEQ ID NO: 5136405 - DNA, 25 bp, Homo sapien
caggatacttggaaaaggatctgct

SEQ ID NO: 5136406 - DNA, 25 bp, Homo sapien
ctgtggagcagattactacggagaa

SEQ ID NO: 5136407 - DNA, 25 bp, Homo sapien
gaacagcccttggagacatcaggat

SEQ ID NO: 5136408 - DNA, 25 bp, Homo sapien
agcagttcacggtccaagaccctcg

SEQ ID NO: 5136409 - DNA, 25 bp, Homo sapien
ggcagatcggcaccttgttgcatgc

SEQ ID NO: 5136410 - DNA, 25 bp, Homo sapien
caagaccctcgatgcttccatgaag

SEQ ID NO: 5136411 - DNA, 25 bp, Homo sapien
tgaagaggcagatcggcaccttgtt

SEQ ID NO: 5136412 - DNA, 25 bp, Homo sapien
caaagtctctaaaacacaggtggtc

SEQ ID NO: 5136413 - DNA, 25 bp, Homo sapien
tccattaccagtgagcagcctacag

SEQ ID NO: 5136414 - DNA, 25 bp, Homo sapien
ttctccgagagccagcctgatggga

SEQ ID NO: 5136415 - DNA, 25 bp, Homo sapien
gagacctttctcatgcctagcgtac

SEQ ID NO: 5136416 - DNA, 25 bp, Homo sapien
agaatgccaaagagtgtaggcttca

SEQ ID NO: 5136417 - DNA, 25 bp, Homo sapien
cagaatgccaaagagtgtaggcttc

SEQ ID NO: 5136418 - DNA, 25 bp, Homo sapien
gaatgccaaagagtgtaggcttcat

SEQ ID NO: 5136419 - DNA, 25 bp, Homo sapien
tcagaatgccaaagagtgtaggctt

SEQ ID NO: 5136420 - DNA, 25 bp, Homo sapien
atcatggtggagtattgggaaaagt

SEQ ID NO: 5136421 - DNA, 25 bp, Homo sapien
cagtgtctgtacagactgtcaaaaa

SEQ ID NO: 5136422 - DNA, 25 bp, Homo sapien
agtcatcatggtggagtattgggaa

SEQ ID NO: 5136423 - DNA, 25 bp, Homo sapien
tcatcatggtggagtattgggaaaa

SEQ ID NO: 5136424 - DNA, 25 bp, Homo sapien
tgctgggtgtagggcagcccaccag

SEQ ID NO: 5136425 - DNA, 25 bp, Homo sapien
ctgggtgtagggcagcccaccagag

SEQ ID NO: 5136426 - DNA, 25 bp, Homo sapien
atgctgggtgtagggcagcccacca

SEQ ID NO: 5136427 - DNA, 25 bp, Homo sapien
aatgctgggtgtagggcagcccacc

SEQ ID NO: 5136428 - DNA, 25 bp, Homo sapien
ctgtaaggatcaggtgcttccgcca

SEQ ID NO: 5136429 - DNA, 25 bp, Homo sapien
gcttccgccagtgcgggctgcccag

SEQ ID NO: 5136430 - DNA, 25 bp, Homo sapien
taaggatcaggtgcttccgccagtg

SEQ ID NO: 5136431 - DNA, 25 bp, Homo sapien
aaggatcaggtgcttccgccagtgc

SEQ ID NO: 5136432 - DNA, 25 bp, Homo sapien
catggtatggagttgttctggaagc

SEQ ID NO: 5136433 - DNA, 25 bp, Homo sapien
tggtcccctcgcatggtatggagtt

SEQ ID NO: 5136434 - DNA, 25 bp, Homo sapien
cctcgcatggtatggagttgttctg

SEQ ID NO: 5136435 - DNA, 25 bp, Homo sapien
acctgtggtcccctcgcatggtatg

SEQ ID NO: 5136436 - DNA, 25 bp, Homo sapien
cacgttttgatccagctgataaggg

SEQ ID NO: 5136437 - DNA, 25 bp, Homo sapien
acaaggatgaagcacccacacctgc

SEQ ID NO: 5136438 - DNA, 25 bp, Homo sapien
tgttcctggaaataggagccccacg

SEQ ID NO: 5136439 - DNA, 25 bp, Homo sapien
aataggagccccacgttttgatcca

SEQ ID NO: 5136440 - DNA, 25 bp, Homo sapien
ctgcaaggaattaccagccctggtt

SEQ ID NO: 5136441 - DNA, 25 bp, Homo sapien
tgcaaggaattaccagccctggttt

SEQ ID NO: 5136442 - DNA, 25 bp, Homo sapien
tttttaggacactgggagaattcac

SEQ ID NO: 5136443 - DNA, 25 bp, Homo sapien
taaccagctgagacgttggccgaaa

SEQ ID NO: 5136444 - DNA, 25 bp, Homo sapien
ttaattctctctgacgcctggtgag

SEQ ID NO: 5136445 - DNA, 25 bp, Homo sapien
atgtcggaagtccagagtggcagca

SEQ ID NO: 5136446 - DNA, 25 bp, Homo sapien
cataaataggacacccagcaaaggc

SEQ ID NO: 5136447 - DNA, 25 bp, Homo sapien
gacattcatggcaaaacagggatgc

SEQ ID NO: 5136448 - DNA, 25 bp, Homo sapien
cagggatgccgtttccaagagcagc

SEQ ID NO: 5136449 - DNA, 25 bp, Homo sapien
cacggcagggttcatcaattcatag

SEQ ID NO: 5136450 - DNA, 25 bp, Homo sapien
ggttggtgacagagtaacacactcc

SEQ ID NO: 5136451 - DNA, 25 bp, Homo sapien
gctaatctgagcttgattcctccag

SEQ ID NO: 5136452 - DNA, 25 bp, Homo sapien
ggacctcatttgataaccagcattg

SEQ ID NO: 5136453 - DNA, 25 bp, Homo sapien
gtttctagactccagtactcactca

SEQ ID NO: 5136454 - DNA, 25 bp, Homo sapien
aaggaatggagggacgcttcagcag

SEQ ID NO: 5136455 - DNA, 25 bp, Homo sapien
gtggttggttgtaataaacaggagc

SEQ ID NO: 5136456 - DNA, 25 bp, Homo sapien
tggagggacgcttcagcagaaggag

SEQ ID NO: 5136457 - DNA, 25 bp, Homo sapien
gatgcaatggtggttggttgtaata

SEQ ID NO: 5136458 - DNA, 25 bp, Homo sapien
aaatacagggatggcgcctctcagg

SEQ ID NO: 5136459 - DNA, 25 bp, Homo sapien
tacagtgccgaggtccggttagaaa

SEQ ID NO: 5136460 - DNA, 25 bp, Homo sapien
tagaaaggtcgctgaccgtgctccc

SEQ ID NO: 5136461 - DNA, 25 bp, Homo sapien
tggacactcgccaaatgctcctggt

SEQ ID NO: 5136462 - DNA, 25 bp, Homo sapien
ccggaggggcccgtgccagacgcgc

SEQ ID NO: 5136463 - DNA, 25 bp, Homo sapien
cggaggggcccgtgccagacgcgcc

SEQ ID NO: 5136464 - DNA, 25 bp, Homo sapien
ggaggggcccgtgccagacgcgccc

SEQ ID NO: 5136465 - DNA, 25 bp, Homo sapien
aggggcccgtgccagacgcgcccgc

SEQ ID NO: 5136466 - DNA, 25 bp, Homo sapien
tcactcttccccttacaccgtatgt

SEQ ID NO: 5136467 - DNA, 25 bp, Homo sapien
cactcttccccttacaccgtatgtt

SEQ ID NO: 5136468 - DNA, 25 bp, Homo sapien
ttcactcttccccttacaccgtatg

SEQ ID NO: 5136469 - DNA, 25 bp, Homo sapien
gcctctgagttctggcctgaccctg

SEQ ID NO: 5136470 - DNA, 25 bp, Homo sapien
cctctgagttctggcctgaccctgg

SEQ ID NO: 5136471 - DNA, 25 bp, Homo sapien
tttgagcccattgggcggtggggat

SEQ ID NO: 5136472 - DNA, 25 bp, Homo sapien
tgagcccattgggcggtggggatca

SEQ ID NO: 5136473 - DNA, 25 bp, Homo sapien
gagcccattgggcggtggggatcag

SEQ ID NO: 5136474 - DNA, 25 bp, Homo sapien
gcccattgggcggtggggatcagga

SEQ ID NO: 5136475 - DNA, 25 bp, Homo sapien
tcagaaaggcgagttacttggccca

SEQ ID NO: 5136476 - DNA, 25 bp, Homo sapien
tgtgaccctgaacgtgttttcatca

SEQ ID NO: 5136477 - DNA, 25 bp, Homo sapien
tggaatgtccacatgaaggaaacag

SEQ ID NO: 5136478 - DNA, 25 bp, Homo sapien
ctgcggactccggacagacattcct

SEQ ID NO: 5136479 - DNA, 25 bp, Homo sapien
ggcagcagggcttggagggtgctct

SEQ ID NO: 5136480 - DNA, 25 bp, Homo sapien
ctgggagttggggcagacagtccat

SEQ ID NO: 5136481 - DNA, 25 bp, Homo sapien
cagcagggcttggagggtgctctgg

SEQ ID NO: 5136482 - DNA, 25 bp, Homo sapien
gcttggagggtgctctgggagttgg

SEQ ID NO: 5136483 - DNA, 25 bp, Homo sapien
gccattgccctttgcctgcttccat

SEQ ID NO: 5136484 - DNA, 25 bp, Homo sapien
tgccattgccctttgcctgcttcca

SEQ ID NO: 5136485 - DNA, 25 bp, Homo sapien
ctgccattgccctttgcctgcttcc

SEQ ID NO: 5136486 - DNA, 25 bp, Homo sapien
cagacttgggaggaacttgagtcag

SEQ ID NO: 5136487 - DNA, 25 bp, Homo sapien
gatgccagttgcaggagtctattat

SEQ ID NO: 5136488 - DNA, 25 bp, Homo sapien
gactgtaccggttgcagttggcaag

SEQ ID NO: 5136489 - DNA, 25 bp, Homo sapien
caggtggcattgtgatgccagttgc

SEQ ID NO: 5136490 - DNA, 25 bp, Homo sapien
ggtccctgggcattcacacgatgtg

SEQ ID NO: 5136491 - DNA, 25 bp, Homo sapien
tcagggaacgtatggcttgggcaca

SEQ ID NO: 5136492 - DNA, 25 bp, Homo sapien
gcatgacctgtatgctgggcttcca

SEQ ID NO: 5136493 - DNA, 25 bp, Homo sapien
cagagaggtaacatgtgtgcaccgt

SEQ ID NO: 5136494 - DNA, 25 bp, Homo sapien
taatagatgcacatgggtgtcactg

SEQ ID NO: 5136495 - DNA, 25 bp, Homo sapien
ctaatagatgcacatgggtgtcact

SEQ ID NO: 5136496 - DNA, 25 bp, Homo sapien
aatagatgcacatgggtgtcactga

SEQ ID NO: 5136497 - DNA, 25 bp, Homo sapien
atagatgcacatgggtgtcactgac

SEQ ID NO: 5136498 - DNA, 25 bp, Homo sapien
tggtgttcccacagagccatgtcca

SEQ ID NO: 5136499 - DNA, 25 bp, Homo sapien
ggtgttcccacagagccatgtccac

SEQ ID NO: 5136500 - DNA, 25 bp, Homo sapien
tcaggtttcactctggtgttcccac

SEQ ID NO: 5136501 - DNA, 25 bp, Homo sapien
gtttcactctggtgttcccacagag

SEQ ID NO: 5136502 - DNA, 25 bp, Homo sapien
gggcaaatcgttggcatctgtggcc

SEQ ID NO: 5136503 - DNA, 25 bp, Homo sapien
gatcactggagcacactggcttttg

SEQ ID NO: 5136504 - DNA, 25 bp, Homo sapien
caagcaggccggcaggccatgtgat

SEQ ID NO: 5136505 - DNA, 25 bp, Homo sapien
tgtgcctacagacaatgttctgcag

SEQ ID NO: 5136506 - DNA, 25 bp, Homo sapien
agactgtcgtatgggacgtggaacc

SEQ ID NO: 5136507 - DNA, 25 bp, Homo sapien
ttctggagactgtcgtatgggacgt

SEQ ID NO: 5136508 - DNA, 25 bp, Homo sapien
cttttgttctggagactgtcgtatg

SEQ ID NO: 5136509 - DNA, 25 bp, Homo sapien
tatgggacgtggaaccaggtgcccc

SEQ ID NO: 5136510 - DNA, 25 bp, Homo sapien
actggcccgtatctccaggtgggtg

SEQ ID NO: 5136511 - DNA, 25 bp, Homo sapien
tactggcccgtatctccaggtgggt

SEQ ID NO: 5136512 - DNA, 25 bp, Homo sapien
ctctactggcccgtatctccaggtg

SEQ ID NO: 5136513 - DNA, 25 bp, Homo sapien
tcatgccctctactggcccgtatct

SEQ ID NO: 5136514 - DNA, 25 bp, Homo sapien
ttggccagtgtaggagattgctgct

SEQ ID NO: 5136515 - DNA, 25 bp, Homo sapien
agagagtgtgataggtacttggcaa

SEQ ID NO: 5136516 - DNA, 25 bp, Homo sapien
cccctgagttatttggccagtgtag

SEQ ID NO: 5136517 - DNA, 25 bp, Homo sapien
gcaatatctggctattgccctccct

SEQ ID NO: 5136518 - DNA, 25 bp, Homo sapien
actgcactctctggaaggcccaagt

SEQ ID NO: 5136519 - DNA, 25 bp, Homo sapien
tgactgcactctctggaaggcccaa

SEQ ID NO: 5136520 - DNA, 25 bp, Homo sapien
ctgactgcactctctggaaggccca

SEQ ID NO: 5136521 - DNA, 25 bp, Homo sapien
gactgcactctctggaaggcccaag

SEQ ID NO: 5136522 - DNA, 25 bp, Homo sapien
gatggtcccatggtacagatgccta

SEQ ID NO: 5136523 - DNA, 25 bp, Homo sapien
tgagcttcgacttcttctgatggtc

SEQ ID NO: 5136524 - DNA, 25 bp, Homo sapien
tagactggatcatctctatgaacca

SEQ ID NO: 5136525 - DNA, 25 bp, Homo sapien
cagatgcctaattgccatagataca

SEQ ID NO: 5136526 - DNA, 25 bp, Homo sapien
ggctgtccaagaaaggtatatgatt

SEQ ID NO: 5136527 - DNA, 25 bp, Homo sapien
tatgtccataaatagatctacctca

SEQ ID NO: 5136528 - DNA, 25 bp, Homo sapien
ttgcctggtcaaaggatgagtactt

SEQ ID NO: 5136529 - DNA, 25 bp, Homo sapien
tgtagaatagattcccagaggtgga

SEQ ID NO: 5136530 - DNA, 25 bp, Homo sapien
gggattttccatcgtacattgggaa

SEQ ID NO: 5136531 - DNA, 25 bp, Homo sapien
cattgacgctcttcctcatgtggcc

SEQ ID NO: 5136532 - DNA, 25 bp, Homo sapien
ccctctgtgcgtgactttaggtaac

SEQ ID NO: 5136533 - DNA, 25 bp, Homo sapien
gggaaatcacatctccggctatttt

SEQ ID NO: 5136534 - DNA, 25 bp, Homo sapien
catgttgtgagtgtcaatcattctg

SEQ ID NO: 5136535 - DNA, 25 bp, Homo sapien
tgtcaatcattctgccgacagcagc

SEQ ID NO: 5136536 - DNA, 25 bp, Homo sapien
cctctgctgcataaaagattgtgga

SEQ ID NO: 5136537 - DNA, 25 bp, Homo sapien
taaaagattgtggagtttgcagctc

SEQ ID NO: 5136538 - DNA, 25 bp, Homo sapien
tgtgatgcgaagagctggctggtca

SEQ ID NO: 5136539 - DNA, 25 bp, Homo sapien
actgtgatgcgaagagctggctggt

SEQ ID NO: 5136540 - DNA, 25 bp, Homo sapien
gtgatgcgaagagctggctggtcac

SEQ ID NO: 5136541 - DNA, 25 bp, Homo sapien
ctgtgatgcgaagagctggctggtc

SEQ ID NO: 5136542 - DNA, 25 bp, Homo sapien
tctgggctgtccacttggcacctgc

SEQ ID NO: 5136543 - DNA, 25 bp, Homo sapien
tgcactgccgtaagaacattcttct

SEQ ID NO: 5136544 - DNA, 25 bp, Homo sapien
acacacatgggatcacagcgtctgg

SEQ ID NO: 5136545 - DNA, 25 bp, Homo sapien
agtcccaggtgttccacacacatgg

SEQ ID NO: 5136546 - DNA, 25 bp, Homo sapien
aaaggtcttgatcccgtctcagcag

SEQ ID NO: 5136547 - DNA, 25 bp, Homo sapien
catttgctggcgtggctggagtcct

SEQ ID NO: 5136548 - DNA, 25 bp, Homo sapien
gggctgccctgacctataaatctca

SEQ ID NO: 5136549 - DNA, 25 bp, Homo sapien
gagaggcgagcccacttgtgtccat

SEQ ID NO: 5136550 - DNA, 25 bp, Homo sapien
tttgatcaaggtgctgaatctgcca

SEQ ID NO: 5136551 - DNA, 25 bp, Homo sapien
aatgggcaggagcactcgggtcata

SEQ ID NO: 5136552 - DNA, 25 bp, Homo sapien
tctcctaaggagcagaggctgatcc

SEQ ID NO: 5136553 - DNA, 25 bp, Homo sapien
ggtgtgagccttgccgtgagtctat

SEQ ID NO: 5136554 - DNA, 25 bp, Homo sapien
taagttacagcagtgacatcgcagt

SEQ ID NO: 5136555 - DNA, 25 bp, Homo sapien
ttctcctgcctgtaagggaaccagg

SEQ ID NO: 5136556 - DNA, 25 bp, Homo sapien
tcaggtttcagtgggccttagagca

SEQ ID NO: 5136557 - DNA, 25 bp, Homo sapien
tgacgacggttgcttgggtccagat

SEQ ID NO: 5136558 - DNA, 25 bp, Homo sapien
ggtctctgaaatcggcttcctgcag

SEQ ID NO: 5136559 - DNA, 25 bp, Homo sapien
taagaggtctctgaaatcggcttcc

SEQ ID NO: 5136560 - DNA, 25 bp, Homo sapien
tggtaagaggtctctgaaatcggct

SEQ ID NO: 5136561 - DNA, 25 bp, Homo sapien
agcccccttggtaagaggtctctga

SEQ ID NO: 5136562 - DNA, 25 bp, Homo sapien
tccttggtcaccagcattcgggttc

SEQ ID NO: 5136563 - DNA, 25 bp, Homo sapien
caacgcgtgttggatgacaactggg

SEQ ID NO: 5136564 - DNA, 25 bp, Homo sapien
cagagcattgataaggggccaccca

SEQ ID NO: 5136565 - DNA, 25 bp, Homo sapien
ctctttgatctttggacaacgcgtg

SEQ ID NO: 5136566 - DNA, 25 bp, Homo sapien
gctaagccagatggtttctgccctg

SEQ ID NO: 5136567 - DNA, 25 bp, Homo sapien
agcttggaggctaagccagatggtt

SEQ ID NO: 5136568 - DNA, 25 bp, Homo sapien
tggaggctaagccagatggtttctg

SEQ ID NO: 5136569 - DNA, 25 bp, Homo sapien
tcaggttctcggggtggcccagctt

SEQ ID NO: 5136570 - DNA, 25 bp, Homo sapien
ctttgtgggtttcccgtagccatat

SEQ ID NO: 5136571 - DNA, 25 bp, Homo sapien
ttcccgtagccatatgcgaaacaca

SEQ ID NO: 5136572 - DNA, 25 bp, Homo sapien
catatgcgaaacacacacggagcag

SEQ ID NO: 5136573 - DNA, 25 bp, Homo sapien
cacacggagcagagattggtacgtt

SEQ ID NO: 5136574 - DNA, 25 bp, Homo sapien
ggggccagcgtgaagctccatgagg

SEQ ID NO: 5136575 - DNA, 25 bp, Homo sapien
gccccagttgtggggccagcgtgaa

SEQ ID NO: 5136576 - DNA, 25 bp, Homo sapien
agctccatgaggtcgccagccggct

SEQ ID NO: 5136577 - DNA, 25 bp, Homo sapien
gacactgatggaggggtctgttggc

SEQ ID NO: 5136578 - DNA, 25 bp, Homo sapien
catgcgaagtatgcacagtgtagtc

SEQ ID NO: 5136579 - DNA, 25 bp, Homo sapien
tgtgtcccgcaggaaagtgctggca

SEQ ID NO: 5136580 - DNA, 25 bp, Homo sapien
agtgagacccgtttccacaggcagg

SEQ ID NO: 5136581 - DNA, 25 bp, Homo sapien
gagacagtgcctacacatgcgaagt

SEQ ID NO: 5136582 - DNA, 25 bp, Homo sapien
gctgtgtggttgtcggtttcagtac

SEQ ID NO: 5136583 - DNA, 25 bp, Homo sapien
ttgcccctctgcctgtgcgtgctgt

SEQ ID NO: 5136584 - DNA, 25 bp, Homo sapien
tgtatgcagcgtttgttcctctggg

SEQ ID NO: 5136585 - DNA, 25 bp, Homo sapien
ggcgcactccccgtgtatgcagcgt

SEQ ID NO: 5136586 - DNA, 25 bp, Homo sapien
cctcttgacgtgagccctgaagcct

SEQ ID NO: 5136587 - DNA, 25 bp, Homo sapien
cacagaattgttgcaagcttgggcc

SEQ ID NO: 5136588 - DNA, 25 bp, Homo sapien
tagtgcagggaattcaggacccaca

SEQ ID NO: 5136589 - DNA, 25 bp, Homo sapien
ggaaaccagatacgtccatagtggg

SEQ ID NO: 5136590 - DNA, 25 bp, Homo sapien
aatgaattttgtgggcctgcgtcag

SEQ ID NO: 5136591 - DNA, 25 bp, Homo sapien
cagcctttgtgagccaaaacaggtc

SEQ ID NO: 5136592 - DNA, 25 bp, Homo sapien
aacaggtctttgagttgaggtgtgc

SEQ ID NO: 5136593 - DNA, 25 bp, Homo sapien
tctcgagtagctggaccctcggtag

SEQ ID NO: 5136594 - DNA, 25 bp, Homo sapien
tcttctgttgtctagatacctgcaa

SEQ ID NO: 5136595 - DNA, 25 bp, Homo sapien
gctggctggtgtcccgccgatctct

SEQ ID NO: 5136596 - DNA, 25 bp, Homo sapien
ggtgtcccgccgatctcttctgttg

SEQ ID NO: 5136597 - DNA, 25 bp, Homo sapien
caaacaccggtactgctggtgtcac

SEQ ID NO: 5136598 - DNA, 25 bp, Homo sapien
ggggctgctggagacttcagtcagg

SEQ ID NO: 5136599 - DNA, 25 bp, Homo sapien
tccatcattgtccagctggtgtccc

SEQ ID NO: 5136600 - DNA, 25 bp, Homo sapien
catcattgtccagctggtgtcccca

SEQ ID NO: 5136601 - DNA, 25 bp, Homo sapien
ccatcattgtccagctggtgtcccc

SEQ ID NO: 5136602 - DNA, 25 bp, Homo sapien
gagtggccctgactggtcatctggt

SEQ ID NO: 5136603 - DNA, 25 bp, Homo sapien
atctggtcctcttgcggtgccccag

SEQ ID NO: 5136604 - DNA, 25 bp, Homo sapien
gagagggttgtagtcccatcagagc

SEQ ID NO: 5136605 - DNA, 25 bp, Homo sapien
tcctcttgcggtgccccagtgagtc

SEQ ID NO: 5136606 - DNA, 25 bp, Homo sapien
cacataaatactgcttgtgttgcag

SEQ ID NO: 5136607 - DNA, 25 bp, Homo sapien
tgtgttgcaggtggactctctgggt

SEQ ID NO: 5136608 - DNA, 25 bp, Homo sapien
cttgtcatgcagttgcttgttgtgc

SEQ ID NO: 5136609 - DNA, 25 bp, Homo sapien
ctggctccgtgccttgtcatgcagt

SEQ ID NO: 5136610 - DNA, 25 bp, Homo sapien
ggtgccctgggccagtcccggactg

SEQ ID NO: 5136611 - DNA, 25 bp, Homo sapien
ccggactgacttgccaccacctccg

SEQ ID NO: 5136612 - DNA, 25 bp, Homo sapien
gggccagtcccggactgacttgcca

SEQ ID NO: 5136613 - DNA, 25 bp, Homo sapien
cctgggccagtcccggactgacttg

SEQ ID NO: 5136614 - DNA, 25 bp, Homo sapien
gaggagattcgctgggcgaccaccc

SEQ ID NO: 5136615 - DNA, 25 bp, Homo sapien
ggttgaaggcgtcccctgaggactc

SEQ ID NO: 5136616 - DNA, 25 bp, Homo sapien
ctgaggactcgtcgcagcctgggct

SEQ ID NO: 5136617 - DNA, 25 bp, Homo sapien
tgcgcggtctccctaaatggaccag

SEQ ID NO: 5136618 - DNA, 25 bp, Homo sapien
gccgctcattctggcgtccggtgac

SEQ ID NO: 5136619 - DNA, 25 bp, Homo sapien
aaacaatgcggacctcgccgctcat

SEQ ID NO: 5136620 - DNA, 25 bp, Homo sapien
gactccccgtctgacgttagtatca

SEQ ID NO: 5136621 - DNA, 25 bp, Homo sapien
tcccgcggagtagcgcggattccgc

SEQ ID NO: 5136622 - DNA, 25 bp, Homo sapien
cctaattggttcctggctggccctt

SEQ ID NO: 5136623 - DNA, 25 bp, Homo sapien
ccccaggtagggatgtctgtgccta

SEQ ID NO: 5136624 - DNA, 25 bp, Homo sapien
tggcccttgactccaatcctctccc

SEQ ID NO: 5136625 - DNA, 25 bp, Homo sapien
tgggcaatgggcctgttgagatatt

SEQ ID NO: 5136626 - DNA, 25 bp, Homo sapien
tccgaagaagaacgcaaaaccatct

SEQ ID NO: 5136627 - DNA, 25 bp, Homo sapien
cacagtatgtgagagcagttagggc

SEQ ID NO: 5136628 - DNA, 25 bp, Homo sapien
tgcagaccgggaacacacagtatgt

SEQ ID NO: 5136629 - DNA, 25 bp, Homo sapien
tgagagttcatacccatcattaacg

SEQ ID NO: 5136630 - DNA, 25 bp, Homo sapien
caaatctgaattccagtcacgtagc

SEQ ID NO: 5136631 - DNA, 25 bp, Homo sapien
cagtcacgtagcacatcgtgctggg

SEQ ID NO: 5136632 - DNA, 25 bp, Homo sapien
catctaagtgaaaatcgtgaacgcc

SEQ ID NO: 5136633 - DNA, 25 bp, Homo sapien
ttgggtacgcagaaacacagcagtg

SEQ ID NO: 5136634 - DNA, 25 bp, Homo sapien
cacagaagggagataaaccacgggt

SEQ ID NO: 5136635 - DNA, 25 bp, Homo sapien
cagaagggagataaaccacgggtgg

SEQ ID NO: 5136636 - DNA, 25 bp, Homo sapien
gccacagaagggagataaaccacgg

SEQ ID NO: 5136637 - DNA, 25 bp, Homo sapien
gaagggagataaaccacgggtggca

SEQ ID NO: 5136638 - DNA, 25 bp, Homo sapien
acagctgttacgtacagtgcaactg

SEQ ID NO: 5136639 - DNA, 25 bp, Homo sapien
cttttgacacagctgttacgtacag

SEQ ID NO: 5136640 - DNA, 25 bp, Homo sapien
cagctgttacgtacagtgcaactgt

SEQ ID NO: 5136641 - DNA, 25 bp, Homo sapien
ttgacacagctgttacgtacagtgc

SEQ ID NO: 5136642 - DNA, 25 bp, Homo sapien
ttcttctttgccctgttgattattc

SEQ ID NO: 5136643 - DNA, 25 bp, Homo sapien
tacttaaatacctgtagctataaat

SEQ ID NO: 5136644 - DNA, 25 bp, Homo sapien
ttgccctgttgattattcaggagta

SEQ ID NO: 5136645 - DNA, 25 bp, Homo sapien
ttttacttaaatacctgtagctata

SEQ ID NO: 5136646 - DNA, 25 bp, Homo sapien
ggctgagttcagttcctggatatcc

SEQ ID NO: 5136647 - DNA, 25 bp, Homo sapien
tgcagggctgagttcagttcctgga

SEQ ID NO: 5136648 - DNA, 25 bp, Homo sapien
gggctgagttcagttcctggatatc

SEQ ID NO: 5136649 - DNA, 25 bp, Homo sapien
cagggctgagttcagttcctggata

SEQ ID NO: 5136650 - DNA, 25 bp, Homo sapien
acatctctcagcatctgtttgtctg

SEQ ID NO: 5136651 - DNA, 25 bp, Homo sapien
aacatctctcagcatctgtttgtct

SEQ ID NO: 5136652 - DNA, 25 bp, Homo sapien
gacaacatctctcagcatctgtttg

SEQ ID NO: 5136653 - DNA, 25 bp, Homo sapien
gtgacaacatctctcagcatctgtt

SEQ ID NO: 5136654 - DNA, 25 bp, Homo sapien
atgttctttcacatttgctaaggag

SEQ ID NO: 5136655 - DNA, 25 bp, Homo sapien
cacatttgctaaggagtgctttact

SEQ ID NO: 5136656 - DNA, 25 bp, Homo sapien
atgtatattctttttatttgggttg

SEQ ID NO: 5136657 - DNA, 25 bp, Homo sapien
tattgattgggtgcatagatattta

SEQ ID NO: 5136658 - DNA, 25 bp, Homo sapien
caaaactatgactgagacaagtact

SEQ ID NO: 5136659 - DNA, 25 bp, Homo sapien
tccttttgttgatagtcttagattc

SEQ ID NO: 5136660 - DNA, 25 bp, Homo sapien
ttgatagtcttagattcttctgctg

SEQ ID NO: 5136661 - DNA, 25 bp, Homo sapien
tataaagcctactaccagatgcaac

SEQ ID NO: 5136662 - DNA, 25 bp, Homo sapien
tgtgttttcgtacgtgagatggatc

SEQ ID NO: 5136663 - DNA, 25 bp, Homo sapien
gtgttttcgtacgtgagatggatct

SEQ ID NO: 5136664 - DNA, 25 bp, Homo sapien
tgtgtgttttcgtacgtgagatgga

SEQ ID NO: 5136665 - DNA, 25 bp, Homo sapien
gtgtgttttcgtacgtgagatggat

SEQ ID NO: 5136666 - DNA, 25 bp, Homo sapien
caggcagaggcttgtgtaacagaca

SEQ ID NO: 5136667 - DNA, 25 bp, Homo sapien
caagtgggtgagtgttgttgaaacc

SEQ ID NO: 5136668 - DNA, 25 bp, Homo sapien
gagtattggttatatcctttgggca

SEQ ID NO: 5136669 - DNA, 25 bp, Homo sapien
tagaaagatacctaagcagaagagg

SEQ ID NO: 5136670 - DNA, 25 bp, Homo sapien
agtgtggtaaagcagatctctagag

SEQ ID NO: 5136671 - DNA, 25 bp, Homo sapien
gacatcttgtaagtggagtattgag

SEQ ID NO: 5136672 - DNA, 25 bp, Homo sapien
cgtgttgcacaactgaacctctgta

SEQ ID NO: 5136673 - DNA, 25 bp, Homo sapien
tgtatcctttgaacagcactcccta

SEQ ID NO: 5136674 - DNA, 25 bp, Homo sapien
tatattcatcagctccatgatcgat

SEQ ID NO: 5136675 - DNA, 25 bp, Homo sapien
aagtatattcatcagctccatgatc

SEQ ID NO: 5136676 - DNA, 25 bp, Homo sapien
gtatattcatcagctccatgatcga

SEQ ID NO: 5136677 - DNA, 25 bp, Homo sapien
tattcatcagctccatgatcgattt

SEQ ID NO: 5136678 - DNA, 25 bp, Homo sapien
gctttgccaccaggtactaacttct

SEQ ID NO: 5136679 - DNA, 25 bp, Homo sapien
tttgccaccaggtactaacttctgg

SEQ ID NO: 5136680 - DNA, 25 bp, Homo sapien
agctttgccaccaggtactaacttc

SEQ ID NO: 5136681 - DNA, 25 bp, Homo sapien
tgccaccaggtactaacttctggaa

SEQ ID NO: 5136682 - DNA, 25 bp, Homo sapien
ctgtaaatgacaccctaattccaac

SEQ ID NO: 5136683 - DNA, 25 bp, Homo sapien
tcaagcagttcaggcctaaaagtag

SEQ ID NO: 5136684 - DNA, 25 bp, Homo sapien
acaagtaaaatggagccgggtcaca

SEQ ID NO: 5136685 - DNA, 25 bp, Homo sapien
caaggatttctgtccacctgaaagc

SEQ ID NO: 5136686 - DNA, 25 bp, Homo sapien
gcaaaaatcagagcaagggctacca

SEQ ID NO: 5136687 - DNA, 25 bp, Homo sapien
tgctttaagtctgaaaactattggc

SEQ ID NO: 5136688 - DNA, 25 bp, Homo sapien
taagtctgaaaactattggccaaat

SEQ ID NO: 5136689 - DNA, 25 bp, Homo sapien
ctgggtatgagaatcatattactat

SEQ ID NO: 5136690 - DNA, 25 bp, Homo sapien
tataaaaggactatgatgctttaag

SEQ ID NO: 5136691 - DNA, 25 bp, Homo sapien
gcagtaatcatgctgtggtgtaatt

SEQ ID NO: 5136692 - DNA, 25 bp, Homo sapien
tgtgtgcattactctgatgtagcag

SEQ ID NO: 5136693 - DNA, 25 bp, Homo sapien
gtagcagtaatcatgctgtggtgta

SEQ ID NO: 5136694 - DNA, 25 bp, Homo sapien
ctgtgtgcattactctgatgtagca

SEQ ID NO: 5136695 - DNA, 25 bp, Homo sapien
gtctttcttgtgtcggggcaataca

SEQ ID NO: 5136696 - DNA, 25 bp, Homo sapien
tctttcttgtgtcggggcaatacat

SEQ ID NO: 5136697 - DNA, 25 bp, Homo sapien
tgtctttcttgtgtcggggcaatac

SEQ ID NO: 5136698 - DNA, 25 bp, Homo sapien
gaaccagatttcagaattccattga

SEQ ID NO: 5136699 - DNA, 25 bp, Homo sapien
tccattgaagtactccagtattttc

SEQ ID NO: 5136700 - DNA, 25 bp, Homo sapien
aagcttttgtggaaccagatttcag

SEQ ID NO: 5136701 - DNA, 25 bp, Homo sapien
tcagaattccattgaagtactccag

SEQ ID NO: 5136702 - DNA, 25 bp, Homo sapien
gagagtgggcggttcttgtatcccc

SEQ ID NO: 5136703 - DNA, 25 bp, Homo sapien
gctactggactggaaggtctctgag

SEQ ID NO: 5136704 - DNA, 25 bp, Homo sapien
cccactccggtacagagcgtgaggg

SEQ ID NO: 5136705 - DNA, 25 bp, Homo sapien
ggaggtggaagacgagccccactcc

SEQ ID NO: 5136706 - DNA, 25 bp, Homo sapien
cgctccgtgcgtaggagcgcgcgca

SEQ ID NO: 5136707 - DNA, 25 bp, Homo sapien
gcgcacggcttgtagaccccgcgag

SEQ ID NO: 5136708 - DNA, 25 bp, Homo sapien
aggtcgagccaggtacgcgtgcgca

SEQ ID NO: 5136709 - DNA, 25 bp, Homo sapien
ccccgcgagaaggaaggtcgagcca

SEQ ID NO: 5136710 - DNA, 25 bp, Homo sapien
gtccctcctaggtgccctgtaaggc

SEQ ID NO: 5136711 - DNA, 25 bp, Homo sapien
cctaggtgccctgtaaggcaggcag

SEQ ID NO: 5136712 - DNA, 25 bp, Homo sapien
tcctaggtgccctgtaaggcaggca

SEQ ID NO: 5136713 - DNA, 25 bp, Homo sapien
cctcctaggtgccctgtaaggcagg

SEQ ID NO: 5136714 - DNA, 25 bp, Homo sapien
ggctcgggcgtctaggcgctgcgtg

SEQ ID NO: 5136715 - DNA, 25 bp, Homo sapien
ggagacgggacgctcggctcgggcg

SEQ ID NO: 5136716 - DNA, 25 bp, Homo sapien
tcggctcgggcgtctaggcgctgcg

SEQ ID NO: 5136717 - DNA, 25 bp, Homo sapien
ctcgggcgtctaggcgctgcgtggg

SEQ ID NO: 5136718 - DNA, 25 bp, Homo sapien
ccaccgccgcgaagcagcaggtgtt

SEQ ID NO: 5136719 - DNA, 25 bp, Homo sapien
gcgttccatccaggtgcggcagcct

SEQ ID NO: 5136720 - DNA, 25 bp, Homo sapien
ggctgcgagagacagccttgcgcat

SEQ ID NO: 5136721 - DNA, 25 bp, Homo sapien
gattaagaaatgagtcgtggaaaag

SEQ ID NO: 5136722 - DNA, 25 bp, Homo sapien
gctggacctggaagcctctcttaaa

SEQ ID NO: 5136723 - DNA, 25 bp, Homo sapien
catgggtccagaatgatgcccaagc

SEQ ID NO: 5136724 - DNA, 25 bp, Homo sapien
gagagtaaccggttcaccgaacatg

SEQ ID NO: 5136725 - DNA, 25 bp, Homo sapien
cctctcttaaaacgggccctggctg

SEQ ID NO: 5136726 - DNA, 25 bp, Homo sapien
ggccgtggtccccaggctcccctga

SEQ ID NO: 5136727 - DNA, 25 bp, Homo sapien
aggccgtggtccccaggctcccctg

SEQ ID NO: 5136728 - DNA, 25 bp, Homo sapien
ctgactccaggctgcccacgctcac

SEQ ID NO: 5136729 - DNA, 25 bp, Homo sapien
ctcccctgactccaggctgcccacg

SEQ ID NO: 5136730 - DNA, 25 bp, Homo sapien
tcaggaatctggactttgttgctag

SEQ ID NO: 5136731 - DNA, 25 bp, Homo sapien
tttcactaaaaagctcatttgtcac

SEQ ID NO: 5136732 - DNA, 25 bp, Homo sapien
gactttgttgctagatctgccactt

SEQ ID NO: 5136733 - DNA, 25 bp, Homo sapien
gaatatcggtcaggaatctggactt

SEQ ID NO: 5136734 - DNA, 25 bp, Homo sapien
ccatatcaaggtcatcagagaattg

SEQ ID NO: 5136735 - DNA, 25 bp, Homo sapien
gctgtaaaaacctagtgtctatgtc

SEQ ID NO: 5136736 - DNA, 25 bp, Homo sapien
tcatcagagaattgctgtaaaaacc

SEQ ID NO: 5136737 - DNA, 25 bp, Homo sapien
cttgaaatacacagcgttctaccat

SEQ ID NO: 5136738 - DNA, 25 bp, Homo sapien
ctggcgaaaacaggaattgttagtc

SEQ ID NO: 5136739 - DNA, 25 bp, Homo sapien
aattgttagtctcctcaaacgagag

SEQ ID NO: 5136740 - DNA, 25 bp, Homo sapien
ttagtctcctcaaacgagagcttac

SEQ ID NO: 5136741 - DNA, 25 bp, Homo sapien
ggcgaaaacaggaattgttagtctc

SEQ ID NO: 5136742 - DNA, 25 bp, Homo sapien
tgacagagctgtaacttggacttag

SEQ ID NO: 5136743 - DNA, 25 bp, Homo sapien
cttgtacaggtacaggaacaaataa

SEQ ID NO: 5136744 - DNA, 25 bp, Homo sapien
caggaacaaataatcagtagaatat

SEQ ID NO: 5136745 - DNA, 25 bp, Homo sapien
ttcaggaacttcacatatatcacag

SEQ ID NO: 5136746 - DNA, 25 bp, Homo sapien
tggactggcatttaggttgccattc

SEQ ID NO: 5136747 - DNA, 25 bp, Homo sapien
aacaagtctattgggggcctctttg

SEQ ID NO: 5136748 - DNA, 25 bp, Homo sapien
tggcatttaggttgccattcaagaa

SEQ ID NO: 5136749 - DNA, 25 bp, Homo sapien
gcctctttggactggcatttaggtt

SEQ ID NO: 5136750 - DNA, 25 bp, Homo sapien
cttaacttccccagagttgaggaca

SEQ ID NO: 5136751 - DNA, 25 bp, Homo sapien
ttaacttccccagagttgaggacat

SEQ ID NO: 5136752 - DNA, 25 bp, Homo sapien
tggaagtgtttcttcaacttgatta

SEQ ID NO: 5136753 - DNA, 25 bp, Homo sapien
gtggaagtgtttcttcaacttgatt

SEQ ID NO: 5136754 - DNA, 25 bp, Homo sapien
aagtagtggaagtgtttcttcaact

SEQ ID NO: 5136755 - DNA, 25 bp, Homo sapien
tttaagtagtggaagtgtttcttca

SEQ ID NO: 5136756 - DNA, 25 bp, Homo sapien
taactgagtcgctggttccaacctg

SEQ ID NO: 5136757 - DNA, 25 bp, Homo sapien
tgacatataccactgaacccaaggc

SEQ ID NO: 5136758 - DNA, 25 bp, Homo sapien
tccatatgtatagcagatacctgag

SEQ ID NO: 5136759 - DNA, 25 bp, Homo sapien
gtccctcgtattaagtgatcatcca

SEQ ID NO: 5136760 - DNA, 25 bp, Homo sapien
tccacatctgtcatttctagtccat

SEQ ID NO: 5136761 - DNA, 25 bp, Homo sapien
cacatctgtcatttctagtccatca

SEQ ID NO: 5136762 - DNA, 25 bp, Homo sapien
cattccacatctgtcatttctagtc

SEQ ID NO: 5136763 - DNA, 25 bp, Homo sapien
acatctgtcatttctagtccatcac

SEQ ID NO: 5136764 - DNA, 25 bp, Homo sapien
tgaatcttggaaggctttttcaccc

SEQ ID NO: 5136765 - DNA, 25 bp, Homo sapien
cttttgcagtttattggcagtgatc

SEQ ID NO: 5136766 - DNA, 25 bp, Homo sapien
aagcagaatcccaaaatggaaatgt

SEQ ID NO: 5136767 - DNA, 25 bp, Homo sapien
ctgcgcccggctgcttggacacttt

SEQ ID NO: 5136768 - DNA, 25 bp, Homo sapien
ggcttatgtcccattcaacaattgt

SEQ ID NO: 5136769 - DNA, 25 bp, Homo sapien
aaatggtaccatctgcaagacaaac

SEQ ID NO: 5136770 - DNA, 25 bp, Homo sapien
cataactgatatacaaaacaaggtt

SEQ ID NO: 5136771 - DNA, 25 bp, Homo sapien
gacaaactattaacacttggaaaga

SEQ ID NO: 5136772 - DNA, 25 bp, Homo sapien
agggatcctgcatgcataaaggcta

SEQ ID NO: 5136773 - DNA, 25 bp, Homo sapien
gctaaagccttttttgccagaagcc

SEQ ID NO: 5136774 - DNA, 25 bp, Homo sapien
aggctaaagccttttttgccagaag

SEQ ID NO: 5136775 - DNA, 25 bp, Homo sapien
cccagggatcctgcatgcataaagg

SEQ ID NO: 5136776 - DNA, 25 bp, Homo sapien
ttatatctctaacgtgggcaaggtg

SEQ ID NO: 5136777 - DNA, 25 bp, Homo sapien
tgggaaattacaccagcagtcaagg

SEQ ID NO: 5136778 - DNA, 25 bp, Homo sapien
caaataagtgagtccaaatggcagg

SEQ ID NO: 5136779 - DNA, 25 bp, Homo sapien
tcagcacaggttggctacgctgggc

SEQ ID NO: 5136780 - DNA, 25 bp, Homo sapien
cataaggccccagttcagatgggac

SEQ ID NO: 5136781 - DNA, 25 bp, Homo sapien
ggcagcccgcaggagtgctaagtaa

SEQ ID NO: 5136782 - DNA, 25 bp, Homo sapien
gacgcaggctacgttcgaataaaag

SEQ ID NO: 5136783 - DNA, 25 bp, Homo sapien
tgacagcacagagataacggccagc

SEQ ID NO: 5136784 - DNA, 25 bp, Homo sapien
cctcgtgagggctcgagctggaaaa

SEQ ID NO: 5136785 - DNA, 25 bp, Homo sapien
cggtcgtacccacggcctcgtgagg

SEQ ID NO: 5136786 - DNA, 25 bp, Homo sapien
ggaaaagtgcgtcatacgaccccga

SEQ ID NO: 5136787 - DNA, 25 bp, Homo sapien
accggcaggccttgcgcgcgatgct

SEQ ID NO: 5136788 - DNA, 25 bp, Homo sapien
gaaattaggtcgtcccaagtgctga

SEQ ID NO: 5136789 - DNA, 25 bp, Homo sapien
tcctgtgttcgggatcaaccgttcc

SEQ ID NO: 5136790 - DNA, 25 bp, Homo sapien
tgcacacagctagcgtccaacatgt

SEQ ID NO: 5136791 - DNA, 25 bp, Homo sapien
tcagaatctcattacggtcgtgtgc

SEQ ID NO: 5136792 - DNA, 25 bp, Homo sapien
gggacacttcgctacctctgcactg

SEQ ID NO: 5136793 - DNA, 25 bp, Homo sapien
catgttcttgggacacttcgctacc

SEQ ID NO: 5136794 - DNA, 25 bp, Homo sapien
tgccaaacacggctccccatcactg

SEQ ID NO: 5136795 - DNA, 25 bp, Homo sapien
tacctctgcactgccaaacacggct

SEQ ID NO: 5136796 - DNA, 25 bp, Homo sapien
tgataaagggaggattgtaactgtg

SEQ ID NO: 5136797 - DNA, 25 bp, Homo sapien
aactgtgtatgtgagaaaacttaca

SEQ ID NO: 5136798 - DNA, 25 bp, Homo sapien
aatagggttgttaggctaagcctca

SEQ ID NO: 5136799 - DNA, 25 bp, Homo sapien
aaggcatcatgtgagaaaagatgca

SEQ ID NO: 5136800 - DNA, 25 bp, Homo sapien
aggtttcagtgggccgagatgggct

SEQ ID NO: 5136801 - DNA, 25 bp, Homo sapien
tgggccgagatgggctgggcaacag

SEQ ID NO: 5136802 - DNA, 25 bp, Homo sapien
tttcagtgggccgagatgggctggg

SEQ ID NO: 5136803 - DNA, 25 bp, Homo sapien
tcagtgggccgagatgggctgggca

SEQ ID NO: 5136804 - DNA, 25 bp, Homo sapien
ccaattcatgtattgagccaatgca

SEQ ID NO: 5136805 - DNA, 25 bp, Homo sapien
aaatgtgatcttgttagggttccag

SEQ ID NO: 5136806 - DNA, 25 bp, Homo sapien
ccaagatattgactttggtcaaaaa

SEQ ID NO: 5136807 - DNA, 25 bp, Homo sapien
tgataaattaactatagtccaagat

SEQ ID NO: 5136808 - DNA, 25 bp, Homo sapien
tggatttatacttcagggacaccgc

SEQ ID NO: 5136809 - DNA, 25 bp, Homo sapien
ctggcagttacaaagtaactggaag

SEQ ID NO: 5136810 - DNA, 25 bp, Homo sapien
ctgtaaaatgagcccattttttact

SEQ ID NO: 5136811 - DNA, 25 bp, Homo sapien
tgtaaaatgagcccattttttactg

SEQ ID NO: 5136812 - DNA, 25 bp, Homo sapien
tttttttaaagccagctgctgggac

SEQ ID NO: 5136813 - DNA, 25 bp, Homo sapien
actgtttttttaaagccagctgctg

SEQ ID NO: 5136814 - DNA, 25 bp, Homo sapien
tcatatggtcatggatccagtcttc

SEQ ID NO: 5136815 - DNA, 25 bp, Homo sapien
tggtttgccttctagattcatatgg

SEQ ID NO: 5136816 - DNA, 25 bp, Homo sapien
ccagtcttccacagccagattttga

SEQ ID NO: 5136817 - DNA, 25 bp, Homo sapien
gccaaaagaatagaattggtttgcc

SEQ ID NO: 5136818 - DNA, 25 bp, Homo sapien
ttttggtagcctgcacatccagctg

SEQ ID NO: 5136819 - DNA, 25 bp, Homo sapien
gatgcctaccaattacaacagaggg

SEQ ID NO: 5136820 - DNA, 25 bp, Homo sapien
gaaacagtgtctcatccgttgggtt

SEQ ID NO: 5136821 - DNA, 25 bp, Homo sapien
tagtccggccgatcttagaagctgt

SEQ ID NO: 5136822 - DNA, 25 bp, Homo sapien
tgtcacgtatttccaatggcaacca

SEQ ID NO: 5136823 - DNA, 25 bp, Homo sapien
tttccaatggcaaccaatgatcagg

SEQ ID NO: 5136824 - DNA, 25 bp, Homo sapien
gaatttaatttgtcacgtatttcca

SEQ ID NO: 5136825 - DNA, 25 bp, Homo sapien
aagacttgaatttaatttgtcacgt

SEQ ID NO: 5136826 - DNA, 25 bp, Homo sapien
atatatttgttagcatggtagtttc

SEQ ID NO: 5136827 - DNA, 25 bp, Homo sapien
atttactgtttagtttgtggtcttg

SEQ ID NO: 5136828 - DNA, 25 bp, Homo sapien
tactgtttagtttgtggtcttgtgg

SEQ ID NO: 5136829 - DNA, 25 bp, Homo sapien
ctgtttagtttgtggtcttgtggac

SEQ ID NO: 5136830 - DNA, 25 bp, Homo sapien
tagtttgtggtcttgtggacatgtt

SEQ ID NO: 5136831 - DNA, 25 bp, Homo sapien
catacaatgtgcaagtatgagacat

SEQ ID NO: 5136832 - DNA, 25 bp, Homo sapien
caatgtgcaagtatgagacatttta

SEQ ID NO: 5136833 - DNA, 25 bp, Homo sapien
actgtattaagacatttacttggaa

SEQ ID NO: 5136834 - DNA, 25 bp, Homo sapien
ttttttgacatacaatgtgcaagta

SEQ ID NO: 5136835 - DNA, 25 bp, Homo sapien
atgattatatgatctttccccccag

SEQ ID NO: 5136836 - DNA, 25 bp, Homo sapien
tgattatatgatctttccccccagc

SEQ ID NO: 5136837 - DNA, 25 bp, Homo sapien
tccaatctcataagaaatctaggag

SEQ ID NO: 5136838 - DNA, 25 bp, Homo sapien
aagaaatctaggagtaaaggccagg

SEQ ID NO: 5136839 - DNA, 25 bp, Homo sapien
tcaaatataatacaccccaacctaa

SEQ ID NO: 5136840 - DNA, 25 bp, Homo sapien
cccatgtatactcccatccatccaa

SEQ ID NO: 5136841 - DNA, 25 bp, Homo sapien
ggcccctgtcgctacttccagagaa

SEQ ID NO: 5136842 - DNA, 25 bp, Homo sapien
actggcttggaaactatcacgctag

SEQ ID NO: 5136843 - DNA, 25 bp, Homo sapien
tgtgcccacgtctgagcttcaagga

SEQ ID NO: 5136844 - DNA, 25 bp, Homo sapien
gaagttctcccaagctaggtactag

SEQ ID NO: 5136845 - DNA, 25 bp, Homo sapien
tctcacctctctggatgaagtaggt

SEQ ID NO: 5136846 - DNA, 25 bp, Homo sapien
cttctcacctctctggatgaagtag

SEQ ID NO: 5136847 - DNA, 25 bp, Homo sapien
ttctcacctctctggatgaagtagg

SEQ ID NO: 5136848 - DNA, 25 bp, Homo sapien
tcacctctctggatgaagtaggtac

SEQ ID NO: 5136849 - DNA, 25 bp, Homo sapien
agtgagcgcgacctccaaactgagg

SEQ ID NO: 5136850 - DNA, 25 bp, Homo sapien
tcaaagcctgccgtcgcagtgagcg

SEQ ID NO: 5136851 - DNA, 25 bp, Homo sapien
gaggaagaactaccaagtgctacac

SEQ ID NO: 5136852 - DNA, 25 bp, Homo sapien
acccgctaaaccttcagcctgaaat

SEQ ID NO: 5136853 - DNA, 25 bp, Homo sapien
actctccgccactcattccccactc

SEQ ID NO: 5136854 - DNA, 25 bp, Homo sapien
tctccgccactcattccccactcac

SEQ ID NO: 5136855 - DNA, 25 bp, Homo sapien
ctctccgccactcattccccactca

SEQ ID NO: 5136856 - DNA, 25 bp, Homo sapien
taaccggccaattcagtacgcaata

SEQ ID NO: 5136857 - DNA, 25 bp, Homo sapien
ccttacgggagccaatgtgacggga

SEQ ID NO: 5136858 - DNA, 25 bp, Homo sapien
cgtggccctggatcctgcaaattgg

SEQ ID NO: 5136859 - DNA, 25 bp, Homo sapien
aaagcaaccttaatacccagtggca

SEQ ID NO: 5136860 - DNA, 25 bp, Homo sapien
gtgtagtgattgctctctttagagg

SEQ ID NO: 5136861 - DNA, 25 bp, Homo sapien
aagtgtagtgattgctctctttaga

SEQ ID NO: 5136862 - DNA, 25 bp, Homo sapien
agtgtagtgattgctctctttagag

SEQ ID NO: 5136863 - DNA, 25 bp, Homo sapien
gggccattgaactactaagcgcaaa

SEQ ID NO: 5136864 - DNA, 25 bp, Homo sapien
ctactaagcgcaaaatcccagccat

SEQ ID NO: 5136865 - DNA, 25 bp, Homo sapien
tgcctgggggccattgaactactaa

SEQ ID NO: 5136866 - DNA, 25 bp, Homo sapien
ttgaactactaagcgcaaaatccca

SEQ ID NO: 5136867 - DNA, 25 bp, Homo sapien
agcaccactgcactttctaaaagca

SEQ ID NO: 5136868 - DNA, 25 bp, Homo sapien
ggcccttatgagcagattaggcagc

SEQ ID NO: 5136869 - DNA, 25 bp, Homo sapien
ggtcaataggctcatctaggctctg

SEQ ID NO: 5136870 - DNA, 25 bp, Homo sapien
ccaggagcaggtcaataggctcatc

SEQ ID NO: 5136871 - DNA, 25 bp, Homo sapien
aaataagagactccacaccttttgt

SEQ ID NO: 5136872 - DNA, 25 bp, Homo sapien
atctggtgaatttgtgacgaatcca

SEQ ID NO: 5136873 - DNA, 25 bp, Homo sapien
tctggtgaatttgtgacgaatccaa

SEQ ID NO: 5136874 - DNA, 25 bp, Homo sapien
gatctggtgaatttgtgacgaatcc

SEQ ID NO: 5136875 - DNA, 25 bp, Homo sapien
cccaatatggacgtcttcttgtact

SEQ ID NO: 5136876 - DNA, 25 bp, Homo sapien
tcccaatatggacgtcttcttgtac

SEQ ID NO: 5136877 - DNA, 25 bp, Homo sapien
aatatggacgtcttcttgtactttt

SEQ ID NO: 5136878 - DNA, 25 bp, Homo sapien
aaagatgattaaaataattgcatac

SEQ ID NO: 5136879 - DNA, 25 bp, Homo sapien
ctaaagatgattaaaataattgcat

SEQ ID NO: 5136880 - DNA, 25 bp, Homo sapien
taaagatgattaaaataattgcata

SEQ ID NO: 5136881 - DNA, 25 bp, Homo sapien
gcattcactgaagggatattcttgt

SEQ ID NO: 5136882 - DNA, 25 bp, Homo sapien
tcttgtgaacttgaggggtatgtgc

SEQ ID NO: 5136883 - DNA, 25 bp, Homo sapien
agggatattcttgtgaacttgaggg

SEQ ID NO: 5136884 - DNA, 25 bp, Homo sapien
ttcaattttgcattcactgaaggga

SEQ ID NO: 5136885 - DNA, 25 bp, Homo sapien
ttttaaaaagagctgagaagaaaca

SEQ ID NO: 5136886 - DNA, 25 bp, Homo sapien
ttaccctgatcggatcactatactt

SEQ ID NO: 5136887 - DNA, 25 bp, Homo sapien
tccccgcaggataactacagttaac

SEQ ID NO: 5136888 - DNA, 25 bp, Homo sapien
tacgttctagcgttctatatccccg

SEQ ID NO: 5136889 - DNA, 25 bp, Homo sapien
gaaaatgcgtttagataggaggaat

SEQ ID NO: 5136890 - DNA, 25 bp, Homo sapien
tccacaggtttcagatgccactgca

SEQ ID NO: 5136891 - DNA, 25 bp, Homo sapien
tgcactactaactccccagtgcttt

SEQ ID NO: 5136892 - DNA, 25 bp, Homo sapien
tccccagtgcttttgaggcacgtgt

SEQ ID NO: 5136893 - DNA, 25 bp, Homo sapien
cacgtgttagacatgttctcctctg

SEQ ID NO: 5136894 - DNA, 25 bp, Homo sapien
atttgcattttccaatcggaagctg

SEQ ID NO: 5136895 - DNA, 25 bp, Homo sapien
catattttaatgaaaacactttctc

SEQ ID NO: 5136896 - DNA, 25 bp, Homo sapien
acatattttaatgaaaacactttct

SEQ ID NO: 5136897 - DNA, 25 bp, Homo sapien
tgaaaacatattttaatgaaaacac

SEQ ID NO: 5136898 - DNA, 25 bp, Homo sapien
tggttttgaaaacatattttaatga

SEQ ID NO: 5136899 - DNA, 25 bp, Homo sapien
tccaagtctgtagtaaaagagagct

SEQ ID NO: 5136900 - DNA, 25 bp, Homo sapien
gttaatgaggcttgctaaggtggca

SEQ ID NO: 5136901 - DNA, 25 bp, Homo sapien
taaggtggcagtagacccaaacgca

SEQ ID NO: 5136902 - DNA, 25 bp, Homo sapien
taggttttgttcaggcagtgtgcaa

SEQ ID NO: 5136903 - DNA, 25 bp, Homo sapien
ttcaacagcaacctcaactgttgac

SEQ ID NO: 5136904 - DNA, 25 bp, Homo sapien
aaataattctccctgagagatttcc

SEQ ID NO: 5136905 - DNA, 25 bp, Homo sapien
cctgagagatttccgcctccttctt

SEQ ID NO: 5136906 - DNA, 25 bp, Homo sapien
aacagcaacctcaactgttgacaga

SEQ ID NO: 5136907 - DNA, 25 bp, Homo sapien
aatcagctgtcacagaattccccac

SEQ ID NO: 5136908 - DNA, 25 bp, Homo sapien
actactgaacctcccttacaattct

SEQ ID NO: 5136909 - DNA, 25 bp, Homo sapien
tgtcacagaattccccactactgaa

SEQ ID NO: 5136910 - DNA, 25 bp, Homo sapien
tactgaacctcccttacaattctta

SEQ ID NO: 5136911 - DNA, 25 bp, Homo sapien
tgaagggaagcaaagggtaactaga

SEQ ID NO: 5136912 - DNA, 25 bp, Homo sapien
cattaagatctacgacaggatggat

SEQ ID NO: 5136913 - DNA, 25 bp, Homo sapien
gccaagccaaattttacaagaggtg

SEQ ID NO: 5136914 - DNA, 25 bp, Homo sapien
tattgggacaataagcatgacaatg

SEQ ID NO: 5136915 - DNA, 25 bp, Homo sapien
atttattaatgggatctggtttcac

SEQ ID NO: 5136916 - DNA, 25 bp, Homo sapien
tattaatgggatctggtttcactgt

SEQ ID NO: 5136917 - DNA, 25 bp, Homo sapien
cttatttattaatgggatctggttt

SEQ ID NO: 5136918 - DNA, 25 bp, Homo sapien
taatgggatctggtttcactgtggg

SEQ ID NO: 5136919 - DNA, 25 bp, Homo sapien
gcaaggacactgtatgttgtggcac

SEQ ID NO: 5136920 - DNA, 25 bp, Homo sapien
ctccaggccttacacacactggata

SEQ ID NO: 5136921 - DNA, 25 bp, Homo sapien
tagaagttagtgtcctttggctccc

SEQ ID NO: 5136922 - DNA, 25 bp, Homo sapien
tctctccaactagacggagctctta

SEQ ID NO: 5136923 - DNA, 25 bp, Homo sapien
tctgccaacaacctgagagtgcttg

SEQ ID NO: 5136924 - DNA, 25 bp, Homo sapien
ggagcagatcccttccctgtcaaag

SEQ ID NO: 5136925 - DNA, 25 bp, Homo sapien
gagatcctaaacagactacccagct

SEQ ID NO: 5136926 - DNA, 25 bp, Homo sapien
tgccatgaatcctacagccataagg

SEQ ID NO: 5136927 - DNA, 25 bp, Homo sapien
tgaggagaccctaagagaactgcag

SEQ ID NO: 5136928 - DNA, 25 bp, Homo sapien
gaactgcagtcgtccttaaaggtag

SEQ ID NO: 5136929 - DNA, 25 bp, Homo sapien
tacagccactatgataaggtccagg

SEQ ID NO: 5136930 - DNA, 25 bp, Homo sapien
ggcaggtgacactaaacaaagcaat

SEQ ID NO: 5136931 - DNA, 25 bp, Homo sapien
tgtgtgatcaaaaagctagtcctta

SEQ ID NO: 5136932 - DNA, 25 bp, Homo sapien
gaaaaacaagacaatctccgcatgg

SEQ ID NO: 5136933 - DNA, 25 bp, Homo sapien
tttagacagtaatttggacccttga

SEQ ID NO: 5136934 - DNA, 25 bp, Homo sapien
ccctcaggtcttgagagaaaagttt

SEQ ID NO: 5136935 - DNA, 25 bp, Homo sapien
tattatctttaaagtgaccaacaaa

SEQ ID NO: 5136936 - DNA, 25 bp, Homo sapien
tcggggtgtgcaccatgttcagctg

SEQ ID NO: 5136937 - DNA, 25 bp, Homo sapien
agtcggggtgtgcaccatgttcagc

SEQ ID NO: 5136938 - DNA, 25 bp, Homo sapien
tttatattatctttaaagtgaccaa

SEQ ID NO: 5136939 - DNA, 25 bp, Homo sapien
caccacgcctgactgtacttggcaa

SEQ ID NO: 5136940 - DNA, 25 bp, Homo sapien
tccaagggaatctctaagtctgtgc

SEQ ID NO: 5136941 - DNA, 25 bp, Homo sapien
tctgtgcagggtatggatcgttccc

SEQ ID NO: 5136942 - DNA, 25 bp, Homo sapien
gatgatagtctacatagcattcccc

SEQ ID NO: 5136943 - DNA, 25 bp, Homo sapien
tgtgctcagacatgactctagagtg

SEQ ID NO: 5136944 - DNA, 25 bp, Homo sapien
tccagcagggatgtgacaaacaggc

SEQ ID NO: 5136945 - DNA, 25 bp, Homo sapien
taacgggtcttaatgctgggatacc

SEQ ID NO: 5136946 - DNA, 25 bp, Homo sapien
tgtcaagaccaggaggatgtcccgg

SEQ ID NO: 5136947 - DNA, 25 bp, Homo sapien
ggaatgtttctaacagaaataataa

SEQ ID NO: 5136948 - DNA, 25 bp, Homo sapien
aatacaccaattacctggatacaat

SEQ ID NO: 5136949 - DNA, 25 bp, Homo sapien
caccaattacctggatacaattatt

SEQ ID NO: 5136950 - DNA, 25 bp, Homo sapien
caattacctggatacaattattaca

SEQ ID NO: 5136951 - DNA, 25 bp, Homo sapien
gggtaacagggatcacttcaagcta

SEQ ID NO: 5136952 - DNA, 25 bp, Homo sapien
tacgaatggctaacaggtaggtgag

SEQ ID NO: 5136953 - DNA, 25 bp, Homo sapien
aatgctccaagacattgatctgggc

SEQ ID NO: 5136954 - DNA, 25 bp, Homo sapien
gaaggacattaaggaaatgctccaa

SEQ ID NO: 5136955 - DNA, 25 bp, Homo sapien
agtttattgtagaactagagacccg

SEQ ID NO: 5136956 - DNA, 25 bp, Homo sapien
tgcagaataatgaactagaccccta

SEQ ID NO: 5136957 - DNA, 25 bp, Homo sapien
catagaccaatgtaacagtagagaa

SEQ ID NO: 5136958 - DNA, 25 bp, Homo sapien
aaagagaacattgggaattcaagac

SEQ ID NO: 5136959 - DNA, 25 bp, Homo sapien
gcagtaagctgaaaccgtggcatta

SEQ ID NO: 5136960 - DNA, 25 bp, Homo sapien
taagctgaaaccgtggcattacact

SEQ ID NO: 5136961 - DNA, 25 bp, Homo sapien
gaaaccgtggcattacactccatcc

SEQ ID NO: 5136962 - DNA, 25 bp, Homo sapien
ctgaaaccgtggcattacactccat

SEQ ID NO: 5136963 - DNA, 25 bp, Homo sapien
gccatgggcaagcacctttgttgtg

SEQ ID NO: 5136964 - DNA, 25 bp, Homo sapien
agggagtacatgtcacaccacaggg

SEQ ID NO: 5136965 - DNA, 25 bp, Homo sapien
gatccccggagagggagtacatgtc

SEQ ID NO: 5136966 - DNA, 25 bp, Homo sapien
tcagtcatgaggcagagggaagcga

SEQ ID NO: 5136967 - DNA, 25 bp, Homo sapien
tagtatctcacaggagttctccaaa

SEQ ID NO: 5136968 - DNA, 25 bp, Homo sapien
gtctctcgggaatgccaatgaagtg

SEQ ID NO: 5136969 - DNA, 25 bp, Homo sapien
gggttccctttgtaagagatctcac

SEQ ID NO: 5136970 - DNA, 25 bp, Homo sapien
aatcccttatctcttggaggtctgg

SEQ ID NO: 5136971 - DNA, 25 bp, Homo sapien
tgctctggctttagtgatttcttct

SEQ ID NO: 5136972 - DNA, 25 bp, Homo sapien
gttctaattgatgtgcatagatttg

SEQ ID NO: 5136973 - DNA, 25 bp, Homo sapien
gatgttctaattgatgtgcatagat

SEQ ID NO: 5136974 - DNA, 25 bp, Homo sapien
aattgatgtgcatagatttgttcat

SEQ ID NO: 5136975 - DNA, 25 bp, Homo sapien
catggcggatctgtcctgcaagacg

SEQ ID NO: 5136976 - DNA, 25 bp, Homo sapien
tgatcaaagaagtcgggcagagaca

SEQ ID NO: 5136977 - DNA, 25 bp, Homo sapien
gggcagagacattgcgtggaccctg

SEQ ID NO: 5136978 - DNA, 25 bp, Homo sapien
ggaccctgctgtcatcgcagccatc

SEQ ID NO: 5136979 - DNA, 25 bp, Homo sapien
gaaatgtttgctgagatggatttga

SEQ ID NO: 5136980 - DNA, 25 bp, Homo sapien
aacagtttcttttctattgacgtag

SEQ ID NO: 5136981 - DNA, 25 bp, Homo sapien
tagcaggaactgacttcaggcacac

SEQ ID NO: 5136982 - DNA, 25 bp, Homo sapien
tgacgtagggatccgtggttctgaa

SEQ ID NO: 5136983 - DNA, 25 bp, Homo sapien
taagcctatgttacaggacaaaggc

SEQ ID NO: 5136984 - DNA, 25 bp, Homo sapien
caaaggccgtcgctttgtaaaagct

SEQ ID NO: 5136985 - DNA, 25 bp, Homo sapien
gaagtgcagtttgctgctgagtaca

SEQ ID NO: 5136986 - DNA, 25 bp, Homo sapien
ggattctccaattgttaagcctatg

SEQ ID NO: 5136987 - DNA, 25 bp, Homo sapien
tctgagaaactggacacgcttgtgg

SEQ ID NO: 5136988 - DNA, 25 bp, Homo sapien
agactatgggtttctaaggcctgcc

SEQ ID NO: 5136989 - DNA, 25 bp, Homo sapien
gagacgtctgttctacaagcaggaa

SEQ ID NO: 5136990 - DNA, 25 bp, Homo sapien
tgtggaaggacccagaccagacttc

SEQ ID NO: 5136991 - DNA, 25 bp, Homo sapien
accccaaggtcaaggggacacatct

SEQ ID NO: 5136992 - DNA, 25 bp, Homo sapien
gaccccaaggtcaaggggacacatc

SEQ ID NO: 5136993 - DNA, 25 bp, Homo sapien
caaggggacacatctggtagagcct

SEQ ID NO: 5136994 - DNA, 25 bp, Homo sapien
ggtcaaggggacacatctggtagag

SEQ ID NO: 5136995 - DNA, 25 bp, Homo sapien
tgctgccttggtctgacatcttcat

SEQ ID NO: 5136996 - DNA, 25 bp, Homo sapien
ccactgtgctgccttggtctgacat

SEQ ID NO: 5136997 - DNA, 25 bp, Homo sapien
tgtgctgccttggtctgacatcttc

SEQ ID NO: 5136998 - DNA, 25 bp, Homo sapien
gaccactgtgctgccttggtctgac

SEQ ID NO: 5136999 - DNA, 25 bp, Homo sapien
gagaagagggatgctaccataaaca

SEQ ID NO: 5137000 - DNA, 25 bp, Homo sapien
ccataaacattgtgcttgacatcat

SEQ ID NO: 5137001 - DNA, 25 bp, Homo sapien
tgaggtagctcctgagggatgctct

SEQ ID NO: 5137002 - DNA, 25 bp, Homo sapien
ttgggaattccaaagtactcagtgg

SEQ ID NO: 5137003 - DNA, 25 bp, Homo sapien
tagagtccatagacggaacagaggg

SEQ ID NO: 5137004 - DNA, 25 bp, Homo sapien
gctcacagtgtctctatgcagggaa

SEQ ID NO: 5137005 - DNA, 25 bp, Homo sapien
cacagaggacgcactgagagaagga

SEQ ID NO: 5137006 - DNA, 25 bp, Homo sapien
aaacgcaaatgggaaaagcaggcac

SEQ ID NO: 5137007 - DNA, 25 bp, Homo sapien
gatcaccatacactggattttcatc

SEQ ID NO: 5137008 - DNA, 25 bp, Homo sapien
ttcttatgcagcagagacacaatca

SEQ ID NO: 5137009 - DNA, 25 bp, Homo sapien
gcaaggtccttaagtttcgcctgag

SEQ ID NO: 5137010 - DNA, 25 bp, Homo sapien
caataagcccgagtgtaagatccat

SEQ ID NO: 5137011 - DNA, 25 bp, Homo sapien
cccttagagatgactgccagggtct

SEQ ID NO: 5137012 - DNA, 25 bp, Homo sapien
ggcttcccttcccttagagatgact

SEQ ID NO: 5137013 - DNA, 25 bp, Homo sapien
tgctatttctttgctagggctggcc

SEQ ID NO: 5137014 - DNA, 25 bp, Homo sapien
tcatccaaacaaacaacttatggcc

SEQ ID NO: 5137015 - DNA, 25 bp, Homo sapien
atatcaccatattctaaatgtctag

SEQ ID NO: 5137016 - DNA, 25 bp, Homo sapien
taggccaggcatgattaccagtaat

SEQ ID NO: 5137017 - DNA, 25 bp, Homo sapien
tatcactatatatcaccatattcta

SEQ ID NO: 5137018 - DNA, 25 bp, Homo sapien
actatatatcaccatattctaaatg

SEQ ID NO: 5137019 - DNA, 25 bp, Homo sapien
ggacaccctctttaaactgtcaatg

SEQ ID NO: 5137020 - DNA, 25 bp, Homo sapien
tatactaaaaagtaactacactgga

SEQ ID NO: 5137021 - DNA, 25 bp, Homo sapien
aacccatgatgtattgttactattg

SEQ ID NO: 5137022 - DNA, 25 bp, Homo sapien
tattgtaattgggagagaagtcaga

SEQ ID NO: 5137023 - DNA, 25 bp, Homo sapien
tcttaaattatctgggaagggtctg

SEQ ID NO: 5137024 - DNA, 25 bp, Homo sapien
ccaggactaattcttaatcggcatt

SEQ ID NO: 5137025 - DNA, 25 bp, Homo sapien
taacatttactagcgcaatactgca

SEQ ID NO: 5137026 - DNA, 25 bp, Homo sapien
cattctggacactgcatgttgatgt

SEQ ID NO: 5137027 - DNA, 25 bp, Homo sapien
tatgttgtagaaattggtttcattt

SEQ ID NO: 5137028 - DNA, 25 bp, Homo sapien
ctatgttgtagaaattggtttcatt

SEQ ID NO: 5137029 - DNA, 25 bp, Homo sapien
atgttgtagaaattggtttcatttc

SEQ ID NO: 5137030 - DNA, 25 bp, Homo sapien
tctcctagacatgccgaaatcattc

SEQ ID NO: 5137031 - DNA, 25 bp, Homo sapien
gactctcctagacatgccgaaatca

SEQ ID NO: 5137032 - DNA, 25 bp, Homo sapien
tctgactctcctagacatgccgaaa

SEQ ID NO: 5137033 - DNA, 25 bp, Homo sapien
tctctgactctcctagacatgccga

SEQ ID NO: 5137034 - DNA, 25 bp, Homo sapien
gcaatccagtgttgactattcccca

SEQ ID NO: 5137035 - DNA, 25 bp, Homo sapien
tattccccaatttaagccagattgc

SEQ ID NO: 5137036 - DNA, 25 bp, Homo sapien
taatattagcgtgattttacggcaa

SEQ ID NO: 5137037 - DNA, 25 bp, Homo sapien
taataggtaaaactgagtctcaccg

SEQ ID NO: 5137038 - DNA, 25 bp, Homo sapien
ggaaatacagatgacttcaccacag

SEQ ID NO: 5137039 - DNA, 25 bp, Homo sapien
ggctcggttcttctgacattcttaa

SEQ ID NO: 5137040 - DNA, 25 bp, Homo sapien
aactttagaatggaggctcggttct

SEQ ID NO: 5137041 - DNA, 25 bp, Homo sapien
ctaggaaatacagatgacttcacca

SEQ ID NO: 5137042 - DNA, 25 bp, Homo sapien
gctgccatgttatgagagtcaacag

SEQ ID NO: 5137043 - DNA, 25 bp, Homo sapien
gttttcccatctcgtaatcaggcag

SEQ ID NO: 5137044 - DNA, 25 bp, Homo sapien
caggcagctaacctctgatctggaa

SEQ ID NO: 5137045 - DNA, 25 bp, Homo sapien
tattgtccaagaaacacctcgagac

SEQ ID NO: 5137046 - DNA, 25 bp, Homo sapien
tactgacagcgttgcatatttagga

SEQ ID NO: 5137047 - DNA, 25 bp, Homo sapien
tagtaacccttagccttaatgtgct

SEQ ID NO: 5137048 - DNA, 25 bp, Homo sapien
taagtctcttccgagttttgtcaag

SEQ ID NO: 5137049 - DNA, 25 bp, Homo sapien
tatggcaccatgtgtgcacttctga

SEQ ID NO: 5137050 - DNA, 25 bp, Homo sapien
gatgaggcaccaaggttacacataa

SEQ ID NO: 5137051 - DNA, 25 bp, Homo sapien
aagtgcacaaaaagcttactggtaa

SEQ ID NO: 5137052 - DNA, 25 bp, Homo sapien
gaaatctcgttactgaactacatga

SEQ ID NO: 5137053 - DNA, 25 bp, Homo sapien
tcaggaaaaactacatcaagtgcac

SEQ ID NO: 5137054 - DNA, 25 bp, Homo sapien
gccaaacctttcaccagagcagagt

SEQ ID NO: 5137055 - DNA, 25 bp, Homo sapien
catgatattgggaacgggcaacagc

SEQ ID NO: 5137056 - DNA, 25 bp, Homo sapien
gaagaggtcacatcgtaaaccaaag

SEQ ID NO: 5137057 - DNA, 25 bp, Homo sapien
ccagtcttggctagaaggagaagtg

SEQ ID NO: 5137058 - DNA, 25 bp, Homo sapien
accgggactgtgctttcctctgttt

SEQ ID NO: 5137059 - DNA, 25 bp, Homo sapien
ggcgcagggagtggccggcttgcca

SEQ ID NO: 5137060 - DNA, 25 bp, Homo sapien
tgtttccccgggcgcagggagtggc

SEQ ID NO: 5137061 - DNA, 25 bp, Homo sapien
ccaccgggactgtgctttcctctgt

SEQ ID NO: 5137062 - DNA, 25 bp, Homo sapien
ggcagaggctcttgcgcaagcgcac

SEQ ID NO: 5137063 - DNA, 25 bp, Homo sapien
tggcagaggctcttgcgcaagcgca

SEQ ID NO: 5137064 - DNA, 25 bp, Homo sapien
tgctccacatccggagcggaggagg

SEQ ID NO: 5137065 - DNA, 25 bp, Homo sapien
tgctgctccacatccggagcggagg

SEQ ID NO: 5137066 - DNA, 25 bp, Homo sapien
gctgctccacatccggagcggagga

SEQ ID NO: 5137067 - DNA, 25 bp, Homo sapien
ctgctccacatccggagcggaggag

SEQ ID NO: 5137068 - DNA, 25 bp, Homo sapien
cgagagctcaggtgaggcagagggt

SEQ ID NO: 5137069 - DNA, 25 bp, Homo sapien
aggcagagggtagtgagaagaatcc

SEQ ID NO: 5137070 - DNA, 25 bp, Homo sapien
cagagggtagtgagaagaatccgac

SEQ ID NO: 5137071 - DNA, 25 bp, Homo sapien
gagagctcaggtgaggcagagggta

SEQ ID NO: 5137072 - DNA, 25 bp, Homo sapien
atgtgacggcccgtttgcagccgcc

SEQ ID NO: 5137073 - DNA, 25 bp, Homo sapien
cgcgaggttcgcagccaataaggag

SEQ ID NO: 5137074 - DNA, 25 bp, Homo sapien
cttcctctggcgtccaaggtgatat

SEQ ID NO: 5137075 - DNA, 25 bp, Homo sapien
tccaaggtgatatcgcgcgaggttc

SEQ ID NO: 5137076 - DNA, 25 bp, Homo sapien
gaagcacgctcctgagaaagtccgg

SEQ ID NO: 5137077 - DNA, 25 bp, Homo sapien
tggaccgtgaatactgaagcacgct

SEQ ID NO: 5137078 - DNA, 25 bp, Homo sapien
gacagcctgcgcactaagaaactgc

SEQ ID NO: 5137079 - DNA, 25 bp, Homo sapien
tgctttgcggccttccagttcggcc

SEQ ID NO: 5137080 - DNA, 25 bp, Homo sapien
tgagcgagagcacagctgtctcatt

SEQ ID NO: 5137081 - DNA, 25 bp, Homo sapien
cagttcaagcgtcacggctgagcga

SEQ ID NO: 5137082 - DNA, 25 bp, Homo sapien
tcacggctgagcgagagcacagctg

SEQ ID NO: 5137083 - DNA, 25 bp, Homo sapien
gaatggaaacgcagttcaagcgtca

SEQ ID NO: 5137084 - DNA, 25 bp, Homo sapien
tcaagcgtccgccacgagccgacac

SEQ ID NO: 5137085 - DNA, 25 bp, Homo sapien
ccgccacgagccgacacccgcgggt

SEQ ID NO: 5137086 - DNA, 25 bp, Homo sapien
ctgccctcaagcgtccgccacgagc

SEQ ID NO: 5137087 - DNA, 25 bp, Homo sapien
cgccacgagccgacacccgcgggtt

SEQ ID NO: 5137088 - DNA, 25 bp, Homo sapien
tcatcgagagctgcgcttcgggtag

SEQ ID NO: 5137089 - DNA, 25 bp, Homo sapien
agagcgtctccggttgaccggccga

SEQ ID NO: 5137090 - DNA, 25 bp, Homo sapien
tcgggtagagcgtctccggttgacc

SEQ ID NO: 5137091 - DNA, 25 bp, Homo sapien
gctgcgcttcgggtagagcgtctcc

SEQ ID NO: 5137092 - DNA, 25 bp, Homo sapien
agtgcgcaagcgcatcgcccagccg

SEQ ID NO: 5137093 - DNA, 25 bp, Homo sapien
ccagccgcctcggcgtgaggacgca

SEQ ID NO: 5137094 - DNA, 25 bp, Homo sapien
tggtgtgagttctcagtgcgcaagc

SEQ ID NO: 5137095 - DNA, 25 bp, Homo sapien
ggacacatatggtgtgagttctcag

SEQ ID NO: 5137096 - DNA, 25 bp, Homo sapien
ctgactttggtctccgctcagctct

SEQ ID NO: 5137097 - DNA, 25 bp, Homo sapien
tattcggtctctcacagacccactg

SEQ ID NO: 5137098 - DNA, 25 bp, Homo sapien
actgtctcccggctgactttggtct

SEQ ID NO: 5137099 - DNA, 25 bp, Homo sapien
ttgtcaatggcgctcgtggccccag

SEQ ID NO: 5137100 - DNA, 25 bp, Homo sapien
tcttcgctcttgtttttctgtttct

SEQ ID NO: 5137101 - DNA, 25 bp, Homo sapien
ctgtcttcgctcttgtttttctgtt

SEQ ID NO: 5137102 - DNA, 25 bp, Homo sapien
tcgctcttgtttttctgtttcttcc

SEQ ID NO: 5137103 - DNA, 25 bp, Homo sapien
gtcttcgctcttgtttttctgtttc

SEQ ID NO: 5137104 - DNA, 25 bp, Homo sapien
gggcttgggcccgctccgcacactc

SEQ ID NO: 5137105 - DNA, 25 bp, Homo sapien
aggcctggtaccccgcgaagctcat

SEQ ID NO: 5137106 - DNA, 25 bp, Homo sapien
ggcttgggcccgctccgcacactct

SEQ ID NO: 5137107 - DNA, 25 bp, Homo sapien
ggaaacatataagccggatcgcgcc

SEQ ID NO: 5137108 - DNA, 25 bp, Homo sapien
aacccaagcagttccagtcaaaggg

SEQ ID NO: 5137109 - DNA, 25 bp, Homo sapien
gaataaacatcttgtctcccaatgg

SEQ ID NO: 5137110 - DNA, 25 bp, Homo sapien
catttaacaacagggtctagtgtgc

SEQ ID NO: 5137111 - DNA, 25 bp, Homo sapien
tggagtggcaatcacgactctcata

SEQ ID NO: 5137112 - DNA, 25 bp, Homo sapien
caccatgcccggtcgcatgttagac

SEQ ID NO: 5137113 - DNA, 25 bp, Homo sapien
tcaaataggcactaataaataagga

SEQ ID NO: 5137114 - DNA, 25 bp, Homo sapien
ccggtcgcatgttagacatttcaaa

SEQ ID NO: 5137115 - DNA, 25 bp, Homo sapien
gatggggtctccccacgttgcacgg

SEQ ID NO: 5137116 - DNA, 25 bp, Homo sapien
gtctccccacgttgcacgggctggt

SEQ ID NO: 5137117 - DNA, 25 bp, Homo sapien
gggtctccccacgttgcacgggctg

SEQ ID NO: 5137118 - DNA, 25 bp, Homo sapien
tggggtctccccacgttgcacgggc

SEQ ID NO: 5137119 - DNA, 25 bp, Homo sapien
gcttctgcccctctccgccaaaact

SEQ ID NO: 5137120 - DNA, 25 bp, Homo sapien
tggcttctgcccctctccgccaaaa

SEQ ID NO: 5137121 - DNA, 25 bp, Homo sapien
tttggcttctgcccctctccgccaa

SEQ ID NO: 5137122 - DNA, 25 bp, Homo sapien
ggcttctgcccctctccgccaaaac

SEQ ID NO: 5137123 - DNA, 25 bp, Homo sapien
aatcttcttgtgattagctatattt

SEQ ID NO: 5137124 - DNA, 25 bp, Homo sapien
atcttcttgtgattagctatatttc

SEQ ID NO: 5137125 - DNA, 25 bp, Homo sapien
atgaaaacaaaaacatcctaaatgc

SEQ ID NO: 5137126 - DNA, 25 bp, Homo sapien
tgaaaacaaaaacatcctaaatgct

SEQ ID NO: 5137127 - DNA, 25 bp, Homo sapien
aatgaaaacaaaaacatcctaaatg

SEQ ID NO: 5137128 - DNA, 25 bp, Homo sapien
ggcatcaagatcaatgtcatccttg

SEQ ID NO: 5137129 - DNA, 25 bp, Homo sapien
cagccaaggcatcaagatcaatgtc

SEQ ID NO: 5137130 - DNA, 25 bp, Homo sapien
aaggcatcaagatcaatgtcatcct

SEQ ID NO: 5137131 - DNA, 25 bp, Homo sapien
gccaaggcatcaagatcaatgtcat

SEQ ID NO: 5137132 - DNA, 25 bp, Homo sapien
tcccttttgacttttgaggctcctg

SEQ ID NO: 5137133 - DNA, 25 bp, Homo sapien
tcctgttctttggcagcaccagctc

SEQ ID NO: 5137134 - DNA, 25 bp, Homo sapien
ggctcctgttctttggcagcaccag

SEQ ID NO: 5137135 - DNA, 25 bp, Homo sapien
gaggctcctgttctttggcagcacc

SEQ ID NO: 5137136 - DNA, 25 bp, Homo sapien
tgatgccttgagcttccaaagacaa

SEQ ID NO: 5137137 - DNA, 25 bp, Homo sapien
tgccttgagcttccaaagacaattc

SEQ ID NO: 5137138 - DNA, 25 bp, Homo sapien
tttgatgccttgagcttccaaagac

SEQ ID NO: 5137139 - DNA, 25 bp, Homo sapien
ccttgagcttccaaagacaattctt

SEQ ID NO: 5137140 - DNA, 25 bp, Homo sapien
tgaaggaggcgtcatcatcttcatt

SEQ ID NO: 5137141 - DNA, 25 bp, Homo sapien
gaatttattcttgaacgctctttaa

SEQ ID NO: 5137142 - DNA, 25 bp, Homo sapien
ttttgggccactgtcttaattttga

SEQ ID NO: 5137143 - DNA, 25 bp, Homo sapien
cccactttctatgttaggacctggc

SEQ ID NO: 5137144 - DNA, 25 bp, Homo sapien
agaggcaggaattactccagtatca

SEQ ID NO: 5137145 - DNA, 25 bp, Homo sapien
gaggcaggaattactccagtatcaa

SEQ ID NO: 5137146 - DNA, 25 bp, Homo sapien
cagaggcaggaattactccagtatc

SEQ ID NO: 5137147 - DNA, 25 bp, Homo sapien
ggcaggaattactccagtatcaaca

SEQ ID NO: 5137148 - DNA, 25 bp, Homo sapien
aagcagaaaatattagcaacttcat

SEQ ID NO: 5137149 - DNA, 25 bp, Homo sapien
agtgaagcagaaaatattagcaact

SEQ ID NO: 5137150 - DNA, 25 bp, Homo sapien
ttagcaacttcatgaaaacatttct

SEQ ID NO: 5137151 - DNA, 25 bp, Homo sapien
cagaaaatattagcaacttcatgaa

SEQ ID NO: 5137152 - DNA, 25 bp, Homo sapien
ctcgaatatatccagataataaata

SEQ ID NO: 5137153 - DNA, 25 bp, Homo sapien
cagataataaatatgctagcattta

SEQ ID NO: 5137154 - DNA, 25 bp, Homo sapien
aaggtactttcatggtgttcctcct

SEQ ID NO: 5137155 - DNA, 25 bp, Homo sapien
attaaaagctatgaaggtactttca

SEQ ID NO: 5137156 - DNA, 25 bp, Homo sapien
tgacgagcaaaacccaaccacaatt

SEQ ID NO: 5137157 - DNA, 25 bp, Homo sapien
cagcagcaggctaagttctacaggc

SEQ ID NO: 5137158 - DNA, 25 bp, Homo sapien
caattccctgtggtgatgacgagca

SEQ ID NO: 5137159 - DNA, 25 bp, Homo sapien
cacaattcaaggaccataatgggcc

SEQ ID NO: 5137160 - DNA, 25 bp, Homo sapien
aacagtggctttgctaggtcctttt

SEQ ID NO: 5137161 - DNA, 25 bp, Homo sapien
ctttaacagtggctttgctaggtcc

SEQ ID NO: 5137162 - DNA, 25 bp, Homo sapien
ttaacagtggctttgctaggtcctt

SEQ ID NO: 5137163 - DNA, 25 bp, Homo sapien
tttaacagtggctttgctaggtcct

SEQ ID NO: 5137164 - DNA, 25 bp, Homo sapien
ctaattcttcaagccgttttatacg

SEQ ID NO: 5137165 - DNA, 25 bp, Homo sapien
tctttaagcttagccagagcttctt

SEQ ID NO: 5137166 - DNA, 25 bp, Homo sapien
ttctttacgcttggcttctaattct

SEQ ID NO: 5137167 - DNA, 25 bp, Homo sapien
cttcttcctctttaagcttagccag

SEQ ID NO: 5137168 - DNA, 25 bp, Homo sapien
ttaagagtagcttcggctctggctc

SEQ ID NO: 5137169 - DNA, 25 bp, Homo sapien
tgtagcagtttaagagtagcttcgg

SEQ ID NO: 5137170 - DNA, 25 bp, Homo sapien
tagcagtttaagagtagcttcggct

SEQ ID NO: 5137171 - DNA, 25 bp, Homo sapien
cagtttaagagtagcttcggctctg

SEQ ID NO: 5137172 - DNA, 25 bp, Homo sapien
tctttggcaaagagtcttttgatgg

SEQ ID NO: 5137173 - DNA, 25 bp, Homo sapien
tcttctttggcaaagagtcttttga

SEQ ID NO: 5137174 - DNA, 25 bp, Homo sapien
cctcttctttggcaaagagtctttt

SEQ ID NO: 5137175 - DNA, 25 bp, Homo sapien
tttggcaaagagtcttttgatggca

SEQ ID NO: 5137176 - DNA, 25 bp, Homo sapien
tactccttgttccataacttctaca

SEQ ID NO: 5137177 - DNA, 25 bp, Homo sapien
gcacataattccattgattcagaca

SEQ ID NO: 5137178 - DNA, 25 bp, Homo sapien
tctggtactccttgttccataactt

SEQ ID NO: 5137179 - DNA, 25 bp, Homo sapien
ccttttctggtactccttgttccat

SEQ ID NO: 5137180 - DNA, 25 bp, Homo sapien
atagcttcccaatcatccaatccag

SEQ ID NO: 5137181 - DNA, 25 bp, Homo sapien
ctcatcactggccatagcttcccaa

SEQ ID NO: 5137182 - DNA, 25 bp, Homo sapien
tcactggccatagcttcccaatcat

SEQ ID NO: 5137183 - DNA, 25 bp, Homo sapien
tggccatagcttcccaatcatccaa

SEQ ID NO: 5137184 - DNA, 25 bp, Homo sapien
cagtgtgtgcttatgaggtattcac

SEQ ID NO: 5137185 - DNA, 25 bp, Homo sapien
tcagtgtgtgcttatgaggtattca

SEQ ID NO: 5137186 - DNA, 25 bp, Homo sapien
cttttacttctatatgaactttgtt

SEQ ID NO: 5137187 - DNA, 25 bp, Homo sapien
catcatcagagtcatattcagaatc

SEQ ID NO: 5137188 - DNA, 25 bp, Homo sapien
taatgtcttccctgaatccttctca

SEQ ID NO: 5137189 - DNA, 25 bp, Homo sapien
caatcctccgttttgctttgtcata

SEQ ID NO: 5137190 - DNA, 25 bp, Homo sapien
cttctttagtccgatcatcatcaga

SEQ ID NO: 5137191 - DNA, 25 bp, Homo sapien
atttttactatgttcaagtcgccgt

SEQ ID NO: 5137192 - DNA, 25 bp, Homo sapien
ataataggggctcttagcttttcgg

SEQ ID NO: 5137193 - DNA, 25 bp, Homo sapien
catgcccaagtacgcagataatagg

SEQ ID NO: 5137194 - DNA, 25 bp, Homo sapien
ggctcttagcttttcggtgtttaca

SEQ ID NO: 5137195 - DNA, 25 bp, Homo sapien
tcaagaggaacattggtggccccaa

SEQ ID NO: 5137196 - DNA, 25 bp, Homo sapien
ggtggccccaatttgttgtgtgata

SEQ ID NO: 5137197 - DNA, 25 bp, Homo sapien
tctgttcattaatagcttcaagagg

SEQ ID NO: 5137198 - DNA, 25 bp, Homo sapien
ttgttgtgtgataccacctgcttca

SEQ ID NO: 5137199 - DNA, 25 bp, Homo sapien
tcaataattagcattcctggaatcc

SEQ ID NO: 5137200 - DNA, 25 bp, Homo sapien
aataattagcattcctggaatccgt

SEQ ID NO: 5137201 - DNA, 25 bp, Homo sapien
caataattagcattcctggaatccg

SEQ ID NO: 5137202 - DNA, 25 bp, Homo sapien
tatcaataattagcattcctggaat

SEQ ID NO: 5137203 - DNA, 25 bp, Homo sapien
aggttgatagactcaattgtctggg

SEQ ID NO: 5137204 - DNA, 25 bp, Homo sapien
cattttttagatttgagaaggttga

SEQ ID NO: 5137205 - DNA, 25 bp, Homo sapien
tattgagtgcaacaatgaagggaca

SEQ ID NO: 5137206 - DNA, 25 bp, Homo sapien
gggctccaaaccatgcataatatca

SEQ ID NO: 5137207 - DNA, 25 bp, Homo sapien
gccacatcagagtcaggactctttt

SEQ ID NO: 5137208 - DNA, 25 bp, Homo sapien
cagccacatcagagtcaggactctt

SEQ ID NO: 5137209 - DNA, 25 bp, Homo sapien
gactctttttccaatcatataacct

SEQ ID NO: 5137210 - DNA, 25 bp, Homo sapien
ttttccaatcatataacctatcaat

SEQ ID NO: 5137211 - DNA, 25 bp, Homo sapien
attctacaataatagcctttgctcg

SEQ ID NO: 5137212 - DNA, 25 bp, Homo sapien
tctacaataatagcctttgctcgct

SEQ ID NO: 5137213 - DNA, 25 bp, Homo sapien
tacaataatagcctttgctcgctcc

SEQ ID NO: 5137214 - DNA, 25 bp, Homo sapien
ttctacaataatagcctttgctcgc

SEQ ID NO: 5137215 - DNA, 25 bp, Homo sapien
taactctacaagaaggtagatcaga

SEQ ID NO: 5137216 - DNA, 25 bp, Homo sapien
ggtagatcagacttcccatgccatc

SEQ ID NO: 5137217 - DNA, 25 bp, Homo sapien
tcaacatggtctgagttaactctac

SEQ ID NO: 5137218 - DNA, 25 bp, Homo sapien
tcttcacagtgtgcaagtctcttgc

SEQ ID NO: 5137219 - DNA, 25 bp, Homo sapien
cactcgtaattccttcataggagga

SEQ ID NO: 5137220 - DNA, 25 bp, Homo sapien
gacatctatagtggtgcccatcccc

SEQ ID NO: 5137221 - DNA, 25 bp, Homo sapien
tcgaatctgagttacaatgggccct

SEQ ID NO: 5137222 - DNA, 25 bp, Homo sapien
gaggtaacaggaggcctcgaatctg

SEQ ID NO: 5137223 - DNA, 25 bp, Homo sapien
caagaatctttaccccctgagctgc

SEQ ID NO: 5137224 - DNA, 25 bp, Homo sapien
ttccaagaatctttaccccctgagc

SEQ ID NO: 5137225 - DNA, 25 bp, Homo sapien
tttaccccctgagctgcttctactt

SEQ ID NO: 5137226 - DNA, 25 bp, Homo sapien
cacaaggaggggtaaaccagccaat

SEQ ID NO: 5137227 - DNA, 25 bp, Homo sapien
tccaaagaacccagtgtagatgcct

SEQ ID NO: 5137228 - DNA, 25 bp, Homo sapien
aattccagtagagcttccaaagaac

SEQ ID NO: 5137229 - DNA, 25 bp, Homo sapien
gatgcctggacatagactccttttt

SEQ ID NO: 5137230 - DNA, 25 bp, Homo sapien
tttagtgtctgctttaactcatgga

SEQ ID NO: 5137231 - DNA, 25 bp, Homo sapien
ggtcatgttccaacatcactgaagc

SEQ ID NO: 5137232 - DNA, 25 bp, Homo sapien
tgagggtcatgttccaacatcactg

SEQ ID NO: 5137233 - DNA, 25 bp, Homo sapien
catgttccaacatcactgaagcctt

SEQ ID NO: 5137234 - DNA, 25 bp, Homo sapien
gagggtcatgttccaacatcactga

SEQ ID NO: 5137235 - DNA, 25 bp, Homo sapien
aattctaactcctaaactatcagcc

SEQ ID NO: 5137236 - DNA, 25 bp, Homo sapien
tgtctatattttgtaaaggcatcaa

SEQ ID NO: 5137237 - DNA, 25 bp, Homo sapien
gccatttcttgtgcatctcgttcaa

SEQ ID NO: 5137238 - DNA, 25 bp, Homo sapien
cacatcgaaggccaaaattactgca

SEQ ID NO: 5137239 - DNA, 25 bp, Homo sapien
ttatcttgcagggaaatactgctat

SEQ ID NO: 5137240 - DNA, 25 bp, Homo sapien
tatcggatctcgagaattaaaaatg

SEQ ID NO: 5137241 - DNA, 25 bp, Homo sapien
tttttatcttgcagggaaatactgc

SEQ ID NO: 5137242 - DNA, 25 bp, Homo sapien
ccccatcactatcggatctcgagaa

SEQ ID NO: 5137243 - DNA, 25 bp, Homo sapien
cacacatgggtgtcccctgtttcac

SEQ ID NO: 5137244 - DNA, 25 bp, Homo sapien
ggacacacatgggtgtcccctgttt

SEQ ID NO: 5137245 - DNA, 25 bp, Homo sapien
gacacacatgggtgtcccctgtttc

SEQ ID NO: 5137246 - DNA, 25 bp, Homo sapien
acacacatgggtgtcccctgtttca

SEQ ID NO: 5137247 - DNA, 25 bp, Homo sapien
gcaacgcttgccagtgggtactaaa

SEQ ID NO: 5137248 - DNA, 25 bp, Homo sapien
caagtgccctgttgacccaatgtca

SEQ ID NO: 5137249 - DNA, 25 bp, Homo sapien
tcacaggcgccatggctggatagct

SEQ ID NO: 5137250 - DNA, 25 bp, Homo sapien
gatggttggcgtctagcactttccc

SEQ ID NO: 5137251 - DNA, 25 bp, Homo sapien
tctatttttacacaaacttcttgtc

SEQ ID NO: 5137252 - DNA, 25 bp, Homo sapien
cagggataggttctatttttacaca

SEQ ID NO: 5137253 - DNA, 25 bp, Homo sapien
tttttttgcaacatccacttgttta

SEQ ID NO: 5137254 - DNA, 25 bp, Homo sapien
tacttgttactattccgatgtcaac

SEQ ID NO: 5137255 - DNA, 25 bp, Homo sapien
caagaatatctgtagcttcaaaatg

SEQ ID NO: 5137256 - DNA, 25 bp, Homo sapien
tactaacaagaatatctgtagcttc

SEQ ID NO: 5137257 - DNA, 25 bp, Homo sapien
actaacaagaatatctgtagcttca

SEQ ID NO: 5137258 - DNA, 25 bp, Homo sapien
cttactaacaagaatatctgtagct

SEQ ID NO: 5137259 - DNA, 25 bp, Homo sapien
gtgcatcaatggactgccggctgat

SEQ ID NO: 5137260 - DNA, 25 bp, Homo sapien
cagctccacaataagctgccagtca

SEQ ID NO: 5137261 - DNA, 25 bp, Homo sapien
gaaccagtctttgagtgcatcaatg

SEQ ID NO: 5137262 - DNA, 25 bp, Homo sapien
cttcagctccacaataagctgccag

SEQ ID NO: 5137263 - DNA, 25 bp, Homo sapien
taatcagtataaaatcgaaagagct

SEQ ID NO: 5137264 - DNA, 25 bp, Homo sapien
tgagtgaacaggcacattggaactg

SEQ ID NO: 5137265 - DNA, 25 bp, Homo sapien
tcagtgtccaaatacgtctgttcca

SEQ ID NO: 5137266 - DNA, 25 bp, Homo sapien
ccatacttaagtccatcagtgtcca

SEQ ID NO: 5137267 - DNA, 25 bp, Homo sapien
gactcgtgactacacaagcagtaaa

SEQ ID NO: 5137268 - DNA, 25 bp, Homo sapien
ttgtgatgattacaatggactcgtg

SEQ ID NO: 5137269 - DNA, 25 bp, Homo sapien
aaaaatcactgtgggaagaatatgc

SEQ ID NO: 5137270 - DNA, 25 bp, Homo sapien
tacaccatggtttcacacaaagcag

SEQ ID NO: 5137271 - DNA, 25 bp, Homo sapien
tacactaacatggaagcctaacaga

SEQ ID NO: 5137272 - DNA, 25 bp, Homo sapien
acaacttgtgggagagaagctacac

SEQ ID NO: 5137273 - DNA, 25 bp, Homo sapien
tagaagcactaagcccaaatatcag

SEQ ID NO: 5137274 - DNA, 25 bp, Homo sapien
tagctacagattactactacgaatg

SEQ ID NO: 5137275 - DNA, 25 bp, Homo sapien
tttcctgggaacattatgtcccgta

SEQ ID NO: 5137276 - DNA, 25 bp, Homo sapien
tgtcccgtagatcagaggtggtgtt

SEQ ID NO: 5137277 - DNA, 25 bp, Homo sapien
ggaacattatgtcccgtagatcaga

SEQ ID NO: 5137278 - DNA, 25 bp, Homo sapien
cattatgtcccgtagatcagaggtg

SEQ ID NO: 5137279 - DNA, 25 bp, Homo sapien
gactgctaagctctgaaattcctga

SEQ ID NO: 5137280 - DNA, 25 bp, Homo sapien
caaagtgcatgatagtaatgctcgg

SEQ ID NO: 5137281 - DNA, 25 bp, Homo sapien
cataaatattaccagagagcctgat

SEQ ID NO: 5137282 - DNA, 25 bp, Homo sapien
tctctgatagctgtgccataagtgc

SEQ ID NO: 5137283 - DNA, 25 bp, Homo sapien
ttctctccccacctttaggctgatg

SEQ ID NO: 5137284 - DNA, 25 bp, Homo sapien
tgatgcagcaatcggtggaatcggt

SEQ ID NO: 5137285 - DNA, 25 bp, Homo sapien
ctaattcctaatgacatttcttctc

SEQ ID NO: 5137286 - DNA, 25 bp, Homo sapien
cctttaggctgatgcagcaatcggt

SEQ ID NO: 5137287 - DNA, 25 bp, Homo sapien
aatatgttgccctcaaggtcttaca

SEQ ID NO: 5137288 - DNA, 25 bp, Homo sapien
gactaagtagcaaataaggttccaa

SEQ ID NO: 5137289 - DNA, 25 bp, Homo sapien
gttccaaatatgttgccctcaaggt

SEQ ID NO: 5137290 - DNA, 25 bp, Homo sapien
gccctcaaggtcttacatgtgatta

SEQ ID NO: 5137291 - DNA, 25 bp, Homo sapien
gaaactgtactcattagggttaatg

SEQ ID NO: 5137292 - DNA, 25 bp, Homo sapien
taaactttctgggaaactgtactca

SEQ ID NO: 5137293 - DNA, 25 bp, Homo sapien
gctgagggtgtactgagttgtttta

SEQ ID NO: 5137294 - DNA, 25 bp, Homo sapien
tctgggaaactgtactcattagggt

SEQ ID NO: 5137295 - DNA, 25 bp, Homo sapien
ttctaaaacatgaaggacctcctgc

SEQ ID NO: 5137296 - DNA, 25 bp, Homo sapien
cctcctgcagagaaacccctggtaa

SEQ ID NO: 5137297 - DNA, 25 bp, Homo sapien
caagctgcttaacagtcctgcaaaa

SEQ ID NO: 5137298 - DNA, 25 bp, Homo sapien
aagagaacccaatactgtcatccag

SEQ ID NO: 5137299 - DNA, 25 bp, Homo sapien
tgttggccccaattgcaggacattc

SEQ ID NO: 5137300 - DNA, 25 bp, Homo sapien
tacctggtcatgtgatagtggctgg

SEQ ID NO: 5137301 - DNA, 25 bp, Homo sapien
tgacaaaaggccaagacgttccaaa

SEQ ID NO: 5137302 - DNA, 25 bp, Homo sapien
cctgatctccgggaacaagtagagc

SEQ ID NO: 5137303 - DNA, 25 bp, Homo sapien
gcttgtatggcgacagatacccaca

SEQ ID NO: 5137304 - DNA, 25 bp, Homo sapien
taacctgagtatagaggtcccgtca

SEQ ID NO: 5137305 - DNA, 25 bp, Homo sapien
ggattgcatgtttccaaagggccag

SEQ ID NO: 5137306 - DNA, 25 bp, Homo sapien
ggcaagataagattggtccacccag

SEQ ID NO: 5137307 - DNA, 25 bp, Homo sapien
cagtcgcccatcagttcagtcaagc

SEQ ID NO: 5137308 - DNA, 25 bp, Homo sapien
tactctgtccgtgatgtcttccaag

SEQ ID NO: 5137309 - DNA, 25 bp, Homo sapien
gcttatgtccttggaaagacggcag

SEQ ID NO: 5137310 - DNA, 25 bp, Homo sapien
gctaagaaatccaccgaagaggagc

SEQ ID NO: 5137311 - DNA, 25 bp, Homo sapien
gaaatctctcctcagggttaatcag

SEQ ID NO: 5137312 - DNA, 25 bp, Homo sapien
gagcatgtggtacttctgggacttg

SEQ ID NO: 5137313 - DNA, 25 bp, Homo sapien
tgcacatgcccctaaaacgtttgta

SEQ ID NO: 5137314 - DNA, 25 bp, Homo sapien
tgggactggacaaaatgagcctctt

SEQ ID NO: 5137315 - DNA, 25 bp, Homo sapien
ttagagactggaaccttgcttgctt

SEQ ID NO: 5137316 - DNA, 25 bp, Homo sapien
ttccacatgtgactgtcttacagag

SEQ ID NO: 5137317 - DNA, 25 bp, Homo sapien
ttcgagggttgggagatttccacat

SEQ ID NO: 5137318 - DNA, 25 bp, Homo sapien
taaaattgaaggtgggcttagagac

SEQ ID NO: 5137319 - DNA, 25 bp, Homo sapien
gttcttagttcagatctacctctca

SEQ ID NO: 5137320 - DNA, 25 bp, Homo sapien
tagtgcctataatgcaggatcttgt

SEQ ID NO: 5137321 - DNA, 25 bp, Homo sapien
tacctctcagtgatgctttcttggg

SEQ ID NO: 5137322 - DNA, 25 bp, Homo sapien
cttgggtgtcttctcgaacatgaga

SEQ ID NO: 5137323 - DNA, 25 bp, Homo sapien
cagctaccgtataaggttggcacca

SEQ ID NO: 5137324 - DNA, 25 bp, Homo sapien
aggtcataaccggtctgctgtggga

SEQ ID NO: 5137325 - DNA, 25 bp, Homo sapien
tttcaggccagttcccgaggtcata

SEQ ID NO: 5137326 - DNA, 25 bp, Homo sapien
gaagcttgccgttaaatttatctca

SEQ ID NO: 5137327 - DNA, 25 bp, Homo sapien
caggcgctcgagtagcctgcactac

SEQ ID NO: 5137328 - DNA, 25 bp, Homo sapien
gaaattagcttgttcacttaggatt

SEQ ID NO: 5137329 - DNA, 25 bp, Homo sapien
tttggcatgagataaaggtgggtta

SEQ ID NO: 5137330 - DNA, 25 bp, Homo sapien
tctaggaactatttgaaattagctt

SEQ ID NO: 5137331 - DNA, 25 bp, Homo sapien
ttcagagatacttcagcctgccttg

SEQ ID NO: 5137332 - DNA, 25 bp, Homo sapien
gctgaatctgtaatcccctaactga

SEQ ID NO: 5137333 - DNA, 25 bp, Homo sapien
caatcgtatcagcaaagtctagtca

SEQ ID NO: 5137334 - DNA, 25 bp, Homo sapien
taaacgctaatgttgggctatcctg

SEQ ID NO: 5137335 - DNA, 25 bp, Homo sapien
tctttctgataggtacaggtgctac

SEQ ID NO: 5137336 - DNA, 25 bp, Homo sapien
cagagggccaactgcacttaacaaa

SEQ ID NO: 5137337 - DNA, 25 bp, Homo sapien
gggactctgggcaatattatagtgc

SEQ ID NO: 5137338 - DNA, 25 bp, Homo sapien
ggagagcactaggaaaagtaaccca

SEQ ID NO: 5137339 - DNA, 25 bp, Homo sapien
gcaacctgtctccacgatgtcacaa

SEQ ID NO: 5137340 - DNA, 25 bp, Homo sapien
taacctcttgaccattagatgccag

SEQ ID NO: 5137341 - DNA, 25 bp, Homo sapien
acctcttgaccattagatgccagca

SEQ ID NO: 5137342 - DNA, 25 bp, Homo sapien
cctgtctccacgatgtcacaatgca

SEQ ID NO: 5137343 - DNA, 25 bp, Homo sapien
tttcatgcaacacagatgctaaaca

SEQ ID NO: 5137344 - DNA, 25 bp, Homo sapien
ttttcatgcaacacagatgctaaac

SEQ ID NO: 5137345 - DNA, 25 bp, Homo sapien
gctaaacataagctcccaacttcac

SEQ ID NO: 5137346 - DNA, 25 bp, Homo sapien
gatgctaaacataagctcccaactt

SEQ ID NO: 5137347 - DNA, 25 bp, Homo sapien
gctggtggcatgagcgtctccctac

SEQ ID NO: 5137348 - DNA, 25 bp, Homo sapien
tatgggtcagaagttcaggcagact

SEQ ID NO: 5137349 - DNA, 25 bp, Homo sapien
gaattcagtttcatgcagccacagg

SEQ ID NO: 5137350 - DNA, 25 bp, Homo sapien
tctctggtccttgagtgtggtccct

SEQ ID NO: 5137351 - DNA, 25 bp, Homo sapien
tgtgggaaagaacacacttccaagt

SEQ ID NO: 5137352 - DNA, 25 bp, Homo sapien
gtgaaactggaaacatgcaacttct

SEQ ID NO: 5137353 - DNA, 25 bp, Homo sapien
ggtgaaactggaaacatgcaacttc

SEQ ID NO: 5137354 - DNA, 25 bp, Homo sapien
tactcctggtctgtcctccttatgc

SEQ ID NO: 5137355 - DNA, 25 bp, Homo sapien
atccctgggagggttcagcatgttt

SEQ ID NO: 5137356 - DNA, 25 bp, Homo sapien
cagcgctgggatcgaagtggagacc

SEQ ID NO: 5137357 - DNA, 25 bp, Homo sapien
cagtgggtgaacatcgcagcatccc

SEQ ID NO: 5137358 - DNA, 25 bp, Homo sapien
acagccagtatgtggttcatgaagt

SEQ ID NO: 5137359 - DNA, 25 bp, Homo sapien
gaggcgaaggcagcaacagccagta

SEQ ID NO: 5137360 - DNA, 25 bp, Homo sapien
attcccggttcacacacgagtccct

SEQ ID NO: 5137361 - DNA, 25 bp, Homo sapien
ccacattcccggttcacacacgagt

SEQ ID NO: 5137362 - DNA, 25 bp, Homo sapien
cagggcactgagtggacaggtggat

SEQ ID NO: 5137363 - DNA, 25 bp, Homo sapien
tggacaggtggatgcctgagcctgg

SEQ ID NO: 5137364 - DNA, 25 bp, Homo sapien
tcaaatgtggtacatggagacatcg

SEQ ID NO: 5137365 - DNA, 25 bp, Homo sapien
acatcgacattggtggctgatgtca

SEQ ID NO: 5137366 - DNA, 25 bp, Homo sapien
ctgtaattctaagcatgtgtcacat

SEQ ID NO: 5137367 - DNA, 25 bp, Homo sapien
catgtgtcacatggatctttactta

SEQ ID NO: 5137368 - DNA, 25 bp, Homo sapien
tacagacacttccatagcatcacca

SEQ ID NO: 5137369 - DNA, 25 bp, Homo sapien
tcacatggatctttacttacagaca

SEQ ID NO: 5137370 - DNA, 25 bp, Homo sapien
gctttgcttcaccaaccactgagct

SEQ ID NO: 5137371 - DNA, 25 bp, Homo sapien
accatggagaactcctcatcccaga

SEQ ID NO: 5137372 - DNA, 25 bp, Homo sapien
caccaaccactgagcttgatactct

SEQ ID NO: 5137373 - DNA, 25 bp, Homo sapien
cagttgagtcctcattaaccaggca

SEQ ID NO: 5137374 - DNA, 25 bp, Homo sapien
cacgtgtggagcacgttggtacagc

SEQ ID NO: 5137375 - DNA, 25 bp, Homo sapien
tcagagcgtgtagttcttatgactg

SEQ ID NO: 5137376 - DNA, 25 bp, Homo sapien
gtggagcacgtgtggagcacgttgg

SEQ ID NO: 5137377 - DNA, 25 bp, Homo sapien
tagttcttatgactgtcttgtttca

SEQ ID NO: 5137378 - DNA, 25 bp, Homo sapien
ttgataaagttgcaccaggacggtc

SEQ ID NO: 5137379 - DNA, 25 bp, Homo sapien
gaatccttcgcttaccaggctgaga

SEQ ID NO: 5137380 - DNA, 25 bp, Homo sapien
aaaagagggtctatcttgccacacg

SEQ ID NO: 5137381 - DNA, 25 bp, Homo sapien
tgagatttagcaaaaacgcggcgtc

SEQ ID NO: 5137382 - DNA, 25 bp, Homo sapien
cacagatggctcaacgtttttggac

SEQ ID NO: 5137383 - DNA, 25 bp, Homo sapien
gaacaatgatcttttgcagggcatg

SEQ ID NO: 5137384 - DNA, 25 bp, Homo sapien
tgtgtgggtatataagaagccgcct

SEQ ID NO: 5137385 - DNA, 25 bp, Homo sapien
taatcccaggctagacaaagtgatc

SEQ ID NO: 5137386 - DNA, 25 bp, Homo sapien
tgaacacagcctcaagcacaataag

SEQ ID NO: 5137387 - DNA, 25 bp, Homo sapien
gatgatcagaagacctcaatgcaaa

SEQ ID NO: 5137388 - DNA, 25 bp, Homo sapien
gagagtcaatgaacttgaggacaaa

SEQ ID NO: 5137389 - DNA, 25 bp, Homo sapien
tcaccactggcatgaaaaaagatga

SEQ ID NO: 5137390 - DNA, 25 bp, Homo sapien
aaaaagcgtctcacggctgggcgca

SEQ ID NO: 5137391 - DNA, 25 bp, Homo sapien
aaaagcgtctcacggctgggcgcag

SEQ ID NO: 5137392 - DNA, 25 bp, Homo sapien
gaaaaagcgtctcacggctgggcgc

SEQ ID NO: 5137393 - DNA, 25 bp, Homo sapien
tctgtccaaagcacagaccgtggct

SEQ ID NO: 5137394 - DNA, 25 bp, Homo sapien
caggatcgtccccaaatccaaggag

SEQ ID NO: 5137395 - DNA, 25 bp, Homo sapien
tccgagcaggaggagtaccctctgt

SEQ ID NO: 5137396 - DNA, 25 bp, Homo sapien
ggaggagcagttctacacactggtc

SEQ ID NO: 5137397 - DNA, 25 bp, Homo sapien
cccaaagggcagttggtcccatctg

SEQ ID NO: 5137398 - DNA, 25 bp, Homo sapien
gcaagatgtccatggtccctgtcat

SEQ ID NO: 5137399 - DNA, 25 bp, Homo sapien
tgatccccacgctctgtggccaatt

SEQ ID NO: 5137400 - DNA, 25 bp, Homo sapien
tcatagctctggttgcctgatcccc

SEQ ID NO: 5137401 - DNA, 25 bp, Homo sapien
cactgggcatgttccataggtttcc

SEQ ID NO: 5137402 - DNA, 25 bp, Homo sapien
ggccgagaagctgttccgtgtccca

SEQ ID NO: 5137403 - DNA, 25 bp, Homo sapien
tgagggatcccccttggccgagaag

SEQ ID NO: 5137404 - DNA, 25 bp, Homo sapien
ctctgaccatgggagggcatctgcc

SEQ ID NO: 5137405 - DNA, 25 bp, Homo sapien
agggcctgactctgcatccactgac

SEQ ID NO: 5137406 - DNA, 25 bp, Homo sapien
cagtacatgtctgagtcgtcctgcc

SEQ ID NO: 5137407 - DNA, 25 bp, Homo sapien
ctttgtttgaagcagagtcattctg

SEQ ID NO: 5137408 - DNA, 25 bp, Homo sapien
agcttccaccgggagctccctgtcg

SEQ ID NO: 5137409 - DNA, 25 bp, Homo sapien
tgtgggtgacactttctttcaagct

SEQ ID NO: 5137410 - DNA, 25 bp, Homo sapien
ctgcgtgtgggtgacactttctttc

SEQ ID NO: 5137411 - DNA, 25 bp, Homo sapien
gcgtgtgggtgacactttctttcaa

SEQ ID NO: 5137412 - DNA, 25 bp, Homo sapien
gtgtgggtgacactttctttcaagc

SEQ ID NO: 5137413 - DNA, 25 bp, Homo sapien
gcattggactgcgaggctcttatta

SEQ ID NO: 5137414 - DNA, 25 bp, Homo sapien
gtggcattggactgcgaggctctta

SEQ ID NO: 5137415 - DNA, 25 bp, Homo sapien
ggactgcgaggctcttattaatggg

SEQ ID NO: 5137416 - DNA, 25 bp, Homo sapien
cattggactgcgaggctcttattaa

SEQ ID NO: 5137417 - DNA, 25 bp, Homo sapien
gacctatgtgcacgtctgtgatgag

SEQ ID NO: 5137418 - DNA, 25 bp, Homo sapien
ctgacctatgtgcacgtctgtgatg

SEQ ID NO: 5137419 - DNA, 25 bp, Homo sapien
ctatgtgcacgtctgtgatgaggct

SEQ ID NO: 5137420 - DNA, 25 bp, Homo sapien
cctatgtgcacgtctgtgatgaggc

SEQ ID NO: 5137421 - DNA, 25 bp, Homo sapien
gcaggagctgtgcacaaccgttcct

SEQ ID NO: 5137422 - DNA, 25 bp, Homo sapien
cactgggcctgtttggaaatcggta

SEQ ID NO: 5137423 - DNA, 25 bp, Homo sapien
taagcatctcacttccagcaggagc

SEQ ID NO: 5137424 - DNA, 25 bp, Homo sapien
tacttgtgccaaggactgtctgctt

SEQ ID NO: 5137425 - DNA, 25 bp, Homo sapien
tcctcatcatgcttccagtgttatc

SEQ ID NO: 5137426 - DNA, 25 bp, Homo sapien
cagtgttatctttgcctctggccat

SEQ ID NO: 5137427 - DNA, 25 bp, Homo sapien
gcaagcttcatgcagcgcatcctca

SEQ ID NO: 5137428 - DNA, 25 bp, Homo sapien
gccatgagctttccgatgaagagca

SEQ ID NO: 5137429 - DNA, 25 bp, Homo sapien
taattctgagacaggtgttcagtag

SEQ ID NO: 5137430 - DNA, 25 bp, Homo sapien
ttcagtagctattgtagactgatgt

SEQ ID NO: 5137431 - DNA, 25 bp, Homo sapien
gagacaggtgttcagtagctattgt

SEQ ID NO: 5137432 - DNA, 25 bp, Homo sapien
tgttttctaacaccactgccatcac

SEQ ID NO: 5137433 - DNA, 25 bp, Homo sapien
ctggcccactgccacgtcgtgtcct

SEQ ID NO: 5137434 - DNA, 25 bp, Homo sapien
tctgccctcgccaggcagcatcaga

SEQ ID NO: 5137435 - DNA, 25 bp, Homo sapien
tctgactccgtccaactccctttcc

SEQ ID NO: 5137436 - DNA, 25 bp, Homo sapien
ctgccacgtcgtgtcctcttgctgg

SEQ ID NO: 5137437 - DNA, 25 bp, Homo sapien
acagaaaagcccgtactggctctgg

SEQ ID NO: 5137438 - DNA, 25 bp, Homo sapien
gcttcctgagttctataattctggg

SEQ ID NO: 5137439 - DNA, 25 bp, Homo sapien
caggacagaaaagcccgtactggct

SEQ ID NO: 5137440 - DNA, 25 bp, Homo sapien
catgcacactggttcctcatggagg

SEQ ID NO: 5137441 - DNA, 25 bp, Homo sapien
ccctaaagtatctctgaactgggat

SEQ ID NO: 5137442 - DNA, 25 bp, Homo sapien
aattcataatcggattttgtcccta

SEQ ID NO: 5137443 - DNA, 25 bp, Homo sapien
gctttatgaaacattgagccctatt

SEQ ID NO: 5137444 - DNA, 25 bp, Homo sapien
acattttgcatgcttggatttatca

SEQ ID NO: 5137445 - DNA, 25 bp, Homo sapien
caatggaataccaggacatggggtc

SEQ ID NO: 5137446 - DNA, 25 bp, Homo sapien
tgttgtggtaatcctatgacaatgg

SEQ ID NO: 5137447 - DNA, 25 bp, Homo sapien
gatcagtagatctgtattcttttat

SEQ ID NO: 5137448 - DNA, 25 bp, Homo sapien
tcagctctccttatcaagaagatca

SEQ ID NO: 5137449 - DNA, 25 bp, Homo sapien
gttgcctgctgggtgcgttttatca

SEQ ID NO: 5137450 - DNA, 25 bp, Homo sapien
tgggtgcgttttatcagcatgctct

SEQ ID NO: 5137451 - DNA, 25 bp, Homo sapien
cctgctgggtgcgttttatcagcat

SEQ ID NO: 5137452 - DNA, 25 bp, Homo sapien
ctctgcgctggctccatggaagagc

SEQ ID NO: 5137453 - DNA, 25 bp, Homo sapien
tgtgctttcgttattggcatgctcc

SEQ ID NO: 5137454 - DNA, 25 bp, Homo sapien
gctctgtgctttcgttattggcatg

SEQ ID NO: 5137455 - DNA, 25 bp, Homo sapien
gctttcgttattggcatgctcctca

SEQ ID NO: 5137456 - DNA, 25 bp, Homo sapien
cagctctgtgctttcgttattggca

SEQ ID NO: 5137457 - DNA, 25 bp, Homo sapien
ttgtgatggcaaaagcctccagagt

SEQ ID NO: 5137458 - DNA, 25 bp, Homo sapien
tgttgtcctcacacctttctcttct

SEQ ID NO: 5137459 - DNA, 25 bp, Homo sapien
ttctgactgatagcatctgccttcg

SEQ ID NO: 5137460 - DNA, 25 bp, Homo sapien
tctgccttcgttttcatttgtgatg

SEQ ID NO: 5137461 - DNA, 25 bp, Homo sapien
gctacgtcagtatcacctttatgca

SEQ ID NO: 5137462 - DNA, 25 bp, Homo sapien
taggctgtgataaggagctacgtca

SEQ ID NO: 5137463 - DNA, 25 bp, Homo sapien
tgcaaagcttcatcgtgtgcatacg

SEQ ID NO: 5137464 - DNA, 25 bp, Homo sapien
cagaacctaaatagtctaggctgtg

SEQ ID NO: 5137465 - DNA, 25 bp, Homo sapien
tcccaggagattcataaaagccaac

SEQ ID NO: 5137466 - DNA, 25 bp, Homo sapien
caacaccctggtatgtgctcttgaa

SEQ ID NO: 5137467 - DNA, 25 bp, Homo sapien
gccagggttcatccagtcagcgtga

SEQ ID NO: 5137468 - DNA, 25 bp, Homo sapien
tggttgatcctgacgctcttggcct

SEQ ID NO: 5137469 - DNA, 25 bp, Homo sapien
gcagagaaacctaaacttctcaata

SEQ ID NO: 5137470 - DNA, 25 bp, Homo sapien
tgttgtgagaggacactgccctgct

SEQ ID NO: 5137471 - DNA, 25 bp, Homo sapien
tgccctgctcctatccaaagttcat

SEQ ID NO: 5137472 - DNA, 25 bp, Homo sapien
ctgctcctatccaaagttcatccat

SEQ ID NO: 5137473 - DNA, 25 bp, Homo sapien
tgatggatggcctaagaagcttcgc

SEQ ID NO: 5137474 - DNA, 25 bp, Homo sapien
gaagcttcgctcacaactcaagttt

SEQ ID NO: 5137475 - DNA, 25 bp, Homo sapien
ctcctgcttggttttccccactagg

SEQ ID NO: 5137476 - DNA, 25 bp, Homo sapien
gctcacaactcaagtttatggcttt

SEQ ID NO: 5137477 - DNA, 25 bp, Homo sapien
gttgtggtgactttcagccatgcca

SEQ ID NO: 5137478 - DNA, 25 bp, Homo sapien
ttgaaagagagcctcacacagcagc

SEQ ID NO: 5137479 - DNA, 25 bp, Homo sapien
atgtggtgactgagttgcacggcta

SEQ ID NO: 5137480 - DNA, 25 bp, Homo sapien
ttgcacggctagtttgcagccaacc

SEQ ID NO: 5137481 - DNA, 25 bp, Homo sapien
gacagtacaccttctgtggataggt

SEQ ID NO: 5137482 - DNA, 25 bp, Homo sapien
gagcttcacaattcgaaggcattta

SEQ ID NO: 5137483 - DNA, 25 bp, Homo sapien
aaaaatacgtaaaatgacaatgctg

SEQ ID NO: 5137484 - DNA, 25 bp, Homo sapien
caaatgacacagttgggttctgcaa

SEQ ID NO: 5137485 - DNA, 25 bp, Homo sapien
gcatctcaccaggatttggcaggtt

SEQ ID NO: 5137486 - DNA, 25 bp, Homo sapien
gttcttctagggtaggagatgagat

SEQ ID NO: 5137487 - DNA, 25 bp, Homo sapien
agatgagatgccgtcccccagggaa

SEQ ID NO: 5137488 - DNA, 25 bp, Homo sapien
aatgagactggcttttgtgaggttc

SEQ ID NO: 5137489 - DNA, 25 bp, Homo sapien
tgtagagtggactgtgtcccacacg

SEQ ID NO: 5137490 - DNA, 25 bp, Homo sapien
acttgtaggagatacagaagagaac

SEQ ID NO: 5137491 - DNA, 25 bp, Homo sapien
catgccgatagagcctgtagagtgg

SEQ ID NO: 5137492 - DNA, 25 bp, Homo sapien
gactataaatttggaaggacactgg

SEQ ID NO: 5137493 - DNA, 25 bp, Homo sapien
aaggtcctgggagcacgttttccag

SEQ ID NO: 5137494 - DNA, 25 bp, Homo sapien
gtggccttgactggtcctggtgaca

SEQ ID NO: 5137495 - DNA, 25 bp, Homo sapien
ttccaacccagtaaatgcacccctc

SEQ ID NO: 5137496 - DNA, 25 bp, Homo sapien
taaaaccatgacgaaatgctgaacc

SEQ ID NO: 5137497 - DNA, 25 bp, Homo sapien
tttcttaaggagtggccttgactgg

SEQ ID NO: 5137498 - DNA, 25 bp, Homo sapien
gtcctggtagtgtttccctagcctg

SEQ ID NO: 5137499 - DNA, 25 bp, Homo sapien
ccataccgggacatttctcttcttg

SEQ ID NO: 5137500 - DNA, 25 bp, Homo sapien
ctgccataccgggacatttctcttc

SEQ ID NO: 5137501 - DNA, 25 bp, Homo sapien
tctggcccctgccataccgggacat

SEQ ID NO: 5137502 - DNA, 25 bp, Homo sapien
gcttatcaagagctaggtggacttt

SEQ ID NO: 5137503 - DNA, 25 bp, Homo sapien
ctgaatgggcggcaggactccatgt

SEQ ID NO: 5137504 - DNA, 25 bp, Homo sapien
ggcatttaggattctcaaagctgca

SEQ ID NO: 5137505 - DNA, 25 bp, Homo sapien
tgcaggaaactgaatggaactcttg

SEQ ID NO: 5137506 - DNA, 25 bp, Homo sapien
tcctcttattctgatcgcaagggcc

SEQ ID NO: 5137507 - DNA, 25 bp, Homo sapien
tttcctcttattctgatcgcaaggg

SEQ ID NO: 5137508 - DNA, 25 bp, Homo sapien
ctcttattctgatcgcaagggcctt

SEQ ID NO: 5137509 - DNA, 25 bp, Homo sapien
cctcttattctgatcgcaagggcct

SEQ ID NO: 5137510 - DNA, 25 bp, Homo sapien
ttccacgctaaatgaggagcaggaa

SEQ ID NO: 5137511 - DNA, 25 bp, Homo sapien
cccttggtggaaatccaattccaca

SEQ ID NO: 5137512 - DNA, 25 bp, Homo sapien
aatccactttcttccacgctaaatg

SEQ ID NO: 5137513 - DNA, 25 bp, Homo sapien
ggagcaggaacccttggtggaaatc

SEQ ID NO: 5137514 - DNA, 25 bp, Homo sapien
gcatgcctagtactctggtcctgga

SEQ ID NO: 5137515 - DNA, 25 bp, Homo sapien
tctagcaggaagtcatgaggtaccg

SEQ ID NO: 5137516 - DNA, 25 bp, Homo sapien
catctaacccagtgtgccagcttgc

SEQ ID NO: 5137517 - DNA, 25 bp, Homo sapien
tactaacagaatcctccagtgtgcc

SEQ ID NO: 5137518 - DNA, 25 bp, Homo sapien
ttaatctgtctaataaacagcatac

SEQ ID NO: 5137519 - DNA, 25 bp, Homo sapien
agtcttaatctgtctaataaacagc

SEQ ID NO: 5137520 - DNA, 25 bp, Homo sapien
tcttaatctgtctaataaacagcat

SEQ ID NO: 5137521 - DNA, 25 bp, Homo sapien
tcttttagtcttaatctgtctaata

SEQ ID NO: 5137522 - DNA, 25 bp, Homo sapien
aagagtgttcaggacttccctgtac

SEQ ID NO: 5137523 - DNA, 25 bp, Homo sapien
gtccagaaaggcaggccgcctctag

SEQ ID NO: 5137524 - DNA, 25 bp, Homo sapien
aaaaactgtgatagaataatgcccc

SEQ ID NO: 5137525 - DNA, 25 bp, Homo sapien
gattgtgttaccttacgtggcagaa

SEQ ID NO: 5137526 - DNA, 25 bp, Homo sapien
gaaacaatcggacattcataggcta

SEQ ID NO: 5137527 - DNA, 25 bp, Homo sapien
tgatattcctaccagggttcagcct

SEQ ID NO: 5137528 - DNA, 25 bp, Homo sapien
ggtacacccctggtcatgaatgagg

SEQ ID NO: 5137529 - DNA, 25 bp, Homo sapien
ttttgacatctgaggtctgagccct

SEQ ID NO: 5137530 - DNA, 25 bp, Homo sapien
catggtttagttgcccctgggccaa

SEQ ID NO: 5137531 - DNA, 25 bp, Homo sapien
tctggggaatatggcctttgaggct

SEQ ID NO: 5137532 - DNA, 25 bp, Homo sapien
caaaagtaggatgattacattctgg

SEQ ID NO: 5137533 - DNA, 25 bp, Homo sapien
tatatcttcggtatttcaaaagtag

SEQ ID NO: 5137534 - DNA, 25 bp, Homo sapien
aatatggcctttgaggcttgtgctg

SEQ ID NO: 5137535 - DNA, 25 bp, Homo sapien
atgtaaaacctcctaaatgccaagc

SEQ ID NO: 5137536 - DNA, 25 bp, Homo sapien
tcttccttggattctagttgagatg

SEQ ID NO: 5137537 - DNA, 25 bp, Homo sapien
tccttggattctagttgagatgtaa

SEQ ID NO: 5137538 - DNA, 25 bp, Homo sapien
tctagttgagatgtaaaacctccta

SEQ ID NO: 5137539 - DNA, 25 bp, Homo sapien
ttcaaaatgtcttggaagacgtgag

SEQ ID NO: 5137540 - DNA, 25 bp, Homo sapien
caaaatgtcttggaagacgtgagca

SEQ ID NO: 5137541 - DNA, 25 bp, Homo sapien
accacagattggtggagcaggtctg

SEQ ID NO: 5137542 - DNA, 25 bp, Homo sapien
cgtgagcaccacagattggtggagc

SEQ ID NO: 5137543 - DNA, 25 bp, Homo sapien
gacattatttgtacccgcagagtgg

SEQ ID NO: 5137544 - DNA, 25 bp, Homo sapien
caattactttggcactagcagttgt

SEQ ID NO: 5137545 - DNA, 25 bp, Homo sapien
cgcagagtggcacagtttagaacac

SEQ ID NO: 5137546 - DNA, 25 bp, Homo sapien
ggctggccaaatgccggtaagaatg

SEQ ID NO: 5137547 - DNA, 25 bp, Homo sapien
tatcagggtgtctgataagaggacc

SEQ ID NO: 5137548 - DNA, 25 bp, Homo sapien
agaggacctaaaatgtgggagtggc

SEQ ID NO: 5137549 - DNA, 25 bp, Homo sapien
tgtgggagtggcctggtaaggtagc

SEQ ID NO: 5137550 - DNA, 25 bp, Homo sapien
ggcccctggggttttgcagctggct

SEQ ID NO: 5137551 - DNA, 25 bp, Homo sapien
gagagatgatatggggtcagtaaat

SEQ ID NO: 5137552 - DNA, 25 bp, Homo sapien
ctactgtctgtgtcacgtgtcgtgg

SEQ ID NO: 5137553 - DNA, 25 bp, Homo sapien
ttcccacatggctttgaacacactc

SEQ ID NO: 5137554 - DNA, 25 bp, Homo sapien
cactcgccctcccacggcttcctgt

SEQ ID NO: 5137555 - DNA, 25 bp, Homo sapien
tatacaaggtttcccagatgctgac

SEQ ID NO: 5137556 - DNA, 25 bp, Homo sapien
aacttgcccgaggtcattctgctgg

SEQ ID NO: 5137557 - DNA, 25 bp, Homo sapien
tccagtctgtcccaaataatgccat

SEQ ID NO: 5137558 - DNA, 25 bp, Homo sapien
tcctcaccaggtcgaatccagaagc

SEQ ID NO: 5137559 - DNA, 25 bp, Homo sapien
cacacggcctggtcagaacaaagct

SEQ ID NO: 5137560 - DNA, 25 bp, Homo sapien
caagcacacggcctggtcagaacaa

SEQ ID NO: 5137561 - DNA, 25 bp, Homo sapien
gaccaagcacacggcctggtcagaa

SEQ ID NO: 5137562 - DNA, 25 bp, Homo sapien
acggcctggtcagaacaaagctccc

SEQ ID NO: 5137563 - DNA, 25 bp, Homo sapien
catcaccgcctgtccctcatttgga

SEQ ID NO: 5137564 - DNA, 25 bp, Homo sapien
tgagggactgttgtgctttagcata

SEQ ID NO: 5137565 - DNA, 25 bp, Homo sapien
tgtagattcctatctccccaactgc

SEQ ID NO: 5137566 - DNA, 25 bp, Homo sapien
aatttgccacacataactgagggac

SEQ ID NO: 5137567 - DNA, 25 bp, Homo sapien
ccaacccaactaaggacataaatat

SEQ ID NO: 5137568 - DNA, 25 bp, Homo sapien
tatccagtgcggtgtactcctttga

SEQ ID NO: 5137569 - DNA, 25 bp, Homo sapien
cagggcacgcagatgggaatgctta

SEQ ID NO: 5137570 - DNA, 25 bp, Homo sapien
tgtactcctttgagaaaagcccaaa

SEQ ID NO: 5137571 - DNA, 25 bp, Homo sapien
gcatttgtacgtgtgttgagatgga

SEQ ID NO: 5137572 - DNA, 25 bp, Homo sapien
gaacactgcatttgtacgtgtgttg

SEQ ID NO: 5137573 - DNA, 25 bp, Homo sapien
gatggaggtgtttgttcatccacaa

SEQ ID NO: 5137574 - DNA, 25 bp, Homo sapien
tggaggtgtttgttcatccacaaac

SEQ ID NO: 5137575 - DNA, 25 bp, Homo sapien
gtttgcattgtctacccagcgtccc

SEQ ID NO: 5137576 - DNA, 25 bp, Homo sapien
agacactgacagtgcgtcagcccct

SEQ ID NO: 5137577 - DNA, 25 bp, Homo sapien
cctctcgtttgcattgtctacccag

SEQ ID NO: 5137578 - DNA, 25 bp, Homo sapien
cgtcagccccttgggataggcaggc

SEQ ID NO: 5137579 - DNA, 25 bp, Homo sapien
tcctgagatggatgagttccctcac

SEQ ID NO: 5137580 - DNA, 25 bp, Homo sapien
tctctcgtgagagaggccagagttc

SEQ ID NO: 5137581 - DNA, 25 bp, Homo sapien
tctcgtgagagaggccagagttcct

SEQ ID NO: 5137582 - DNA, 25 bp, Homo sapien
ggcatctttcttctctcgtgagaga

SEQ ID NO: 5137583 - DNA, 25 bp, Homo sapien
gaatcctcctgtgccgtgtattcct

SEQ ID NO: 5137584 - DNA, 25 bp, Homo sapien
ttagtccttaggacagtgtgaggca

SEQ ID NO: 5137585 - DNA, 25 bp, Homo sapien
aatcctcctgtgccgtgtattcctc

SEQ ID NO: 5137586 - DNA, 25 bp, Homo sapien
tttccacatctgcattctctcctgg

SEQ ID NO: 5137587 - DNA, 25 bp, Homo sapien
tctcctgctctttccacatctgcat

SEQ ID NO: 5137588 - DNA, 25 bp, Homo sapien
actctcctgctctttccacatctgc

SEQ ID NO: 5137589 - DNA, 25 bp, Homo sapien
tcactctcctgctctttccacatct

SEQ ID NO: 5137590 - DNA, 25 bp, Homo sapien
tatgcagtcatgcatggtataacaa

SEQ ID NO: 5137591 - DNA, 25 bp, Homo sapien
accttgcccagctacatgcactgcc

SEQ ID NO: 5137592 - DNA, 25 bp, Homo sapien
taaaattatgaatgccaagctttgt

SEQ ID NO: 5137593 - DNA, 25 bp, Homo sapien
ataacaatatggatatgttctgaga

SEQ ID NO: 5137594 - DNA, 25 bp, Homo sapien
gagcttgcgcttatgccactgatgt

SEQ ID NO: 5137595 - DNA, 25 bp, Homo sapien
tttgcagagcttgcgcttatgccac

SEQ ID NO: 5137596 - DNA, 25 bp, Homo sapien
ttttaatttgcagagcttgcgctta

SEQ ID NO: 5137597 - DNA, 25 bp, Homo sapien
gcagagcttgcgcttatgccactga

SEQ ID NO: 5137598 - DNA, 25 bp, Homo sapien
gaacgaactcctgtgcttgcaaagg

SEQ ID NO: 5137599 - DNA, 25 bp, Homo sapien
tagtcattaagtaaattcagtgttt

SEQ ID NO: 5137600 - DNA, 25 bp, Homo sapien
tgtagccgctgcctcactgagtagt

SEQ ID NO: 5137601 - DNA, 25 bp, Homo sapien
cacatgattgtttaacagtgtatta

SEQ ID NO: 5137602 - DNA, 25 bp, Homo sapien
caaggccatcgtacagctgcattct

SEQ ID NO: 5137603 - DNA, 25 bp, Homo sapien
aaggccaaggccatcgtacagctgc

SEQ ID NO: 5137604 - DNA, 25 bp, Homo sapien
gacataaagcgtgtgacttatttta

SEQ ID NO: 5137605 - DNA, 25 bp, Homo sapien
aatatgcagacataaagcgtgtgac

SEQ ID NO: 5137606 - DNA, 25 bp, Homo sapien
atcagggcatctctttgcattgggc

SEQ ID NO: 5137607 - DNA, 25 bp, Homo sapien
caccccctcaaggtaagacatcagg

SEQ ID NO: 5137608 - DNA, 25 bp, Homo sapien
tttgcattgggcacaagaatcattg

SEQ ID NO: 5137609 - DNA, 25 bp, Homo sapien
ggccaccttacactaatcatcaggg

SEQ ID NO: 5137610 - DNA, 25 bp, Homo sapien
agcaggtgatcatgacttttcagcc

SEQ ID NO: 5137611 - DNA, 25 bp, Homo sapien
gcaggtgatcatgacttttcagcct

SEQ ID NO: 5137612 - DNA, 25 bp, Homo sapien
caggtactgctcagcacgtgtgtcc

SEQ ID NO: 5137613 - DNA, 25 bp, Homo sapien
ggctgctgcatcaggtactgctcag

SEQ ID NO: 5137614 - DNA, 25 bp, Homo sapien
cgatgccgtgtacgtgagaatttgg

SEQ ID NO: 5137615 - DNA, 25 bp, Homo sapien
caatatgactgtcagagtcatggac

SEQ ID NO: 5137616 - DNA, 25 bp, Homo sapien
catctagtgggaattgcgttagaca

SEQ ID NO: 5137617 - DNA, 25 bp, Homo sapien
aatgcctgcactgcgagaaataggg

SEQ ID NO: 5137618 - DNA, 25 bp, Homo sapien
catagtgccgttaataggaactgca

SEQ ID NO: 5137619 - DNA, 25 bp, Homo sapien
gaaagggagtcacactcgacttccc

SEQ ID NO: 5137620 - DNA, 25 bp, Homo sapien
aggtttcataacttcagtaggatca

SEQ ID NO: 5137621 - DNA, 25 bp, Homo sapien
tgaaataatgagccaacatgagcat

SEQ ID NO: 5137622 - DNA, 25 bp, Homo sapien
gagcatgaggatcgtagtacacagg

SEQ ID NO: 5137623 - DNA, 25 bp, Homo sapien
gtttcataacttcagtaggatcagc

SEQ ID NO: 5137624 - DNA, 25 bp, Homo sapien
tactcaacttggtagggtcagcagc

SEQ ID NO: 5137625 - DNA, 25 bp, Homo sapien
tggaaggtgcactttataaacaggt

SEQ ID NO: 5137626 - DNA, 25 bp, Homo sapien
gatctttgctactgtagtggctacc

SEQ ID NO: 5137627 - DNA, 25 bp, Homo sapien
cagagaaggctctaaccaggtagaa

SEQ ID NO: 5137628 - DNA, 25 bp, Homo sapien
ttgagtatttggcatctattgtttg

SEQ ID NO: 5137629 - DNA, 25 bp, Homo sapien
gagtatttggcatctattgtttgct

SEQ ID NO: 5137630 - DNA, 25 bp, Homo sapien
tgagtatttggcatctattgtttgc

SEQ ID NO: 5137631 - DNA, 25 bp, Homo sapien
ctttgagtatttggcatctattgtt

SEQ ID NO: 5137632 - DNA, 25 bp, Homo sapien
gctggataaatttgtgaatacgcac

SEQ ID NO: 5137633 - DNA, 25 bp, Homo sapien
gaatacgcacatcttagtgaatcaa

SEQ ID NO: 5137634 - DNA, 25 bp, Homo sapien
gtgatgctgacccaatatagatgtc

SEQ ID NO: 5137635 - DNA, 25 bp, Homo sapien
aacaacagctttggtgcttagtggc

SEQ ID NO: 5137636 - DNA, 25 bp, Homo sapien
ggtggaggcatccttcccacattac

SEQ ID NO: 5137637 - DNA, 25 bp, Homo sapien
acattacccccagtaagagcaacaa

SEQ ID NO: 5137638 - DNA, 25 bp, Homo sapien
tccatggagctctatgatgactggc

SEQ ID NO: 5137639 - DNA, 25 bp, Homo sapien
ggaaggtaaagatggagagtcagga

SEQ ID NO: 5137640 - DNA, 25 bp, Homo sapien
gtcatggcagcggagccatctagaa

SEQ ID NO: 5137641 - DNA, 25 bp, Homo sapien
atctagaaagattgtcagcagccct

SEQ ID NO: 5137642 - DNA, 25 bp, Homo sapien
gattaatcacttcagcacaaaagaa

SEQ ID NO: 5137643 - DNA, 25 bp, Homo sapien
ttggatagtggaaatgattaatcac

SEQ ID NO: 5137644 - DNA, 25 bp, Homo sapien
ctagttaccgtatggatgaggagcc

SEQ ID NO: 5137645 - DNA, 25 bp, Homo sapien
ctgtgatgggaataaagccccggga

SEQ ID NO: 5137646 - DNA, 25 bp, Homo sapien
cagcagattcctagcatgtttcaaa

SEQ ID NO: 5137647 - DNA, 25 bp, Homo sapien
ggcaagaaataaaagcggagctctt

SEQ ID NO: 5137648 - DNA, 25 bp, Homo sapien
ccagagagatggatgccatccaatg

SEQ ID NO: 5137649 - DNA, 25 bp, Homo sapien
tgtcctcgtcaccctccgcagacgc

SEQ ID NO: 5137650 - DNA, 25 bp, Homo sapien
cgtcaccctccgcagacgcttcacc

SEQ ID NO: 5137651 - DNA, 25 bp, Homo sapien
tcctcgtcaccctccgcagacgctt

SEQ ID NO: 5137652 - DNA, 25 bp, Homo sapien
tcaccctccgcagacgcttcacctt

SEQ ID NO: 5137653 - DNA, 25 bp, Homo sapien
ctggaggtctggatcgcggacccct

SEQ ID NO: 5137654 - DNA, 25 bp, Homo sapien
gcagccagccggttgcgacgtctgc

SEQ ID NO: 5137655 - DNA, 25 bp, Homo sapien
agccagtgctggaggtctggatcgc

SEQ ID NO: 5137656 - DNA, 25 bp, Homo sapien
ggttgcgacgtctgctttatgctgg

SEQ ID NO: 5137657 - DNA, 25 bp, Homo sapien
ggtcctcgagtgtaagccaccaaag

SEQ ID NO: 5137658 - DNA, 25 bp, Homo sapien
tccccaaaagccttgctggtttcag

SEQ ID NO: 5137659 - DNA, 25 bp, Homo sapien
taagggcactacagtgtttctcccc

SEQ ID NO: 5137660 - DNA, 25 bp, Homo sapien
gcctccatcaaattccctaagggca

SEQ ID NO: 5137661 - DNA, 25 bp, Homo sapien
ttcattttgatgcacgtcattagaa

SEQ ID NO: 5137662 - DNA, 25 bp, Homo sapien
tttgatgcacgtcattagaaatcac

SEQ ID NO: 5137663 - DNA, 25 bp, Homo sapien
cgtcattagaaatcacaaagttgtt

SEQ ID NO: 5137664 - DNA, 25 bp, Homo sapien
tgcacgtcattagaaatcacaaagt

SEQ ID NO: 5137665 - DNA, 25 bp, Homo sapien
ttaggaggcaactgagctccaaatt

SEQ ID NO: 5137666 - DNA, 25 bp, Homo sapien
ggatcacagatttgtgtccatatgc

SEQ ID NO: 5137667 - DNA, 25 bp, Homo sapien
tgtccatatgcaaggctgaagtctg

SEQ ID NO: 5137668 - DNA, 25 bp, Homo sapien
tggtggctggattaggaggcaactg

SEQ ID NO: 5137669 - DNA, 25 bp, Homo sapien
gaggcctgaaacaaagagagaacgt

SEQ ID NO: 5137670 - DNA, 25 bp, Homo sapien
gaaacaaagagagaacgtggaccca

SEQ ID NO: 5137671 - DNA, 25 bp, Homo sapien
gtgccacaacactctttggatgagg

SEQ ID NO: 5137672 - DNA, 25 bp, Homo sapien
ccacaacactctttggatgaggcct

SEQ ID NO: 5137673 - DNA, 25 bp, Homo sapien
ggtcacgttctgtacccctaggagc

SEQ ID NO: 5137674 - DNA, 25 bp, Homo sapien
gtcacgttctgtacccctaggagcc

SEQ ID NO: 5137675 - DNA, 25 bp, Homo sapien
cacgttctgtacccctaggagccca

SEQ ID NO: 5137676 - DNA, 25 bp, Homo sapien
aggtcacgttctgtacccctaggag

SEQ ID NO: 5137677 - DNA, 25 bp, Homo sapien
ggaggccacagtttccacacgttaa

SEQ ID NO: 5137678 - DNA, 25 bp, Homo sapien
cacgttaatggcacccaaggtggat

SEQ ID NO: 5137679 - DNA, 25 bp, Homo sapien
tgttgtagcggaggccacagtttcc

SEQ ID NO: 5137680 - DNA, 25 bp, Homo sapien
gcacccaaggtggatggagctcata

SEQ ID NO: 5137681 - DNA, 25 bp, Homo sapien
tatatttggtggataaattggatcc

SEQ ID NO: 5137682 - DNA, 25 bp, Homo sapien
taggcccacggcatatatttggtgg

SEQ ID NO: 5137683 - DNA, 25 bp, Homo sapien
cattgtggtacttggtaggcccacg

SEQ ID NO: 5137684 - DNA, 25 bp, Homo sapien
taagccgtagcaaccattgtggtac

SEQ ID NO: 5137685 - DNA, 25 bp, Homo sapien
tgaggacggtggaactaccagactt

SEQ ID NO: 5137686 - DNA, 25 bp, Homo sapien
caagtgacttgagcgtgacgcccca

SEQ ID NO: 5137687 - DNA, 25 bp, Homo sapien
gccccacatgccagtccaacatcca

SEQ ID NO: 5137688 - DNA, 25 bp, Homo sapien
ccaaggctttgaggacggtggaact

SEQ ID NO: 5137689 - DNA, 25 bp, Homo sapien
gacatccttgaattgcaggacgaag

SEQ ID NO: 5137690 - DNA, 25 bp, Homo sapien
agagaagtgatctccctgagaccac

SEQ ID NO: 5137691 - DNA, 25 bp, Homo sapien
cacaggtaggcactttcaccagcgt

SEQ ID NO: 5137692 - DNA, 25 bp, Homo sapien
ctgcactcttggctgtgtagccagc

SEQ ID NO: 5137693 - DNA, 25 bp, Homo sapien
cagctgggcttctagcttggggatt

SEQ ID NO: 5137694 - DNA, 25 bp, Homo sapien
tttgatgctctgttaaagccctggc

SEQ ID NO: 5137695 - DNA, 25 bp, Homo sapien
ctacatatatagatgatggtggaga

SEQ ID NO: 5137696 - DNA, 25 bp, Homo sapien
tggggattgggagcagagtgaagcc

SEQ ID NO: 5137697 - DNA, 25 bp, Homo sapien
atacacagtgttaggtggcattgaa

SEQ ID NO: 5137698 - DNA, 25 bp, Homo sapien
gtggcggatctcatacacagtgtta

SEQ ID NO: 5137699 - DNA, 25 bp, Homo sapien
catacacagtgttaggtggcattga

SEQ ID NO: 5137700 - DNA, 25 bp, Homo sapien
tctcacccgaccgttgcttaactgt

SEQ ID NO: 5137701 - DNA, 25 bp, Homo sapien
cccgaccgttgcttaactgtctggt

SEQ ID NO: 5137702 - DNA, 25 bp, Homo sapien
tcatttccattcagcatctcacccg

SEQ ID NO: 5137703 - DNA, 25 bp, Homo sapien
attcagcatctcacccgaccgttgc

SEQ ID NO: 5137704 - DNA, 25 bp, Homo sapien
tcaagtacacgagctgccgtcaaag

SEQ ID NO: 5137705 - DNA, 25 bp, Homo sapien
ttcaagtacacgagctgccgtcaaa

SEQ ID NO: 5137706 - DNA, 25 bp, Homo sapien
tttccatgctggctaccatgtccag

SEQ ID NO: 5137707 - DNA, 25 bp, Homo sapien
tttgacgagtcattcatccaaccca

SEQ ID NO: 5137708 - DNA, 25 bp, Homo sapien
cagtggcttcactgtttgacgagtc

SEQ ID NO: 5137709 - DNA, 25 bp, Homo sapien
cactgtttgacgagtcattcatcca

SEQ ID NO: 5137710 - DNA, 25 bp, Homo sapien
gagggattctccacgctatggcata

SEQ ID NO: 5137711 - DNA, 25 bp, Homo sapien
ggtcctagtgtgagggattctccac

SEQ ID NO: 5137712 - DNA, 25 bp, Homo sapien
tatggcatagcccatagcgccagcc

SEQ ID NO: 5137713 - DNA, 25 bp, Homo sapien
agttctggatgccagatgacatgca

SEQ ID NO: 5137714 - DNA, 25 bp, Homo sapien
tccgaaacagtaggcctgctttctt

SEQ ID NO: 5137715 - DNA, 25 bp, Homo sapien
cctttgaagacctccgaaacagtag

SEQ ID NO: 5137716 - DNA, 25 bp, Homo sapien
gaatgcgagtagaaggagctggaat

SEQ ID NO: 5137717 - DNA, 25 bp, Homo sapien
gcaggcagggccctttgaagacctc

SEQ ID NO: 5137718 - DNA, 25 bp, Homo sapien
tattcctgttgtggaaggttctgag

SEQ ID NO: 5137719 - DNA, 25 bp, Homo sapien
agaaggtgtgaccattgtcacatcc

SEQ ID NO: 5137720 - DNA, 25 bp, Homo sapien
tatattcctgttgtggaaggttctg

SEQ ID NO: 5137721 - DNA, 25 bp, Homo sapien
ttgtcacatcctgagcagaaggtgg

SEQ ID NO: 5137722 - DNA, 25 bp, Homo sapien
tgtggactctttctagcaacctgcc

SEQ ID NO: 5137723 - DNA, 25 bp, Homo sapien
cacttgcggctctttaggagaagga

SEQ ID NO: 5137724 - DNA, 25 bp, Homo sapien
tgagccagacctattttgcggagat

SEQ ID NO: 5137725 - DNA, 25 bp, Homo sapien
tagcagctgctagaaccacattgcc

SEQ ID NO: 5137726 - DNA, 25 bp, Homo sapien
ccagcacatggccaagaccggcctc

SEQ ID NO: 5137727 - DNA, 25 bp, Homo sapien
caagaccggcctccggaggctgcat

SEQ ID NO: 5137728 - DNA, 25 bp, Homo sapien
acatggccaagaccggcctccggag

SEQ ID NO: 5137729 - DNA, 25 bp, Homo sapien
agcacatggccaagaccggcctccg

SEQ ID NO: 5137730 - DNA, 25 bp, Homo sapien
tgtgagtcgcacactgctgtgtagt

SEQ ID NO: 5137731 - DNA, 25 bp, Homo sapien
gtggtctcaagacacagccatggtg

SEQ ID NO: 5137732 - DNA, 25 bp, Homo sapien
tgagctcaccctggactaatttgac

SEQ ID NO: 5137733 - DNA, 25 bp, Homo sapien
caggtcccttagagttgagattata

SEQ ID NO: 5137734 - DNA, 25 bp, Homo sapien
gctctgcctgtcttgtgaacaggtt

SEQ ID NO: 5137735 - DNA, 25 bp, Homo sapien
ggaaggggaccagctgttcagctct

SEQ ID NO: 5137736 - DNA, 25 bp, Homo sapien
agctgttcagctctgcctgtcttgt

SEQ ID NO: 5137737 - DNA, 25 bp, Homo sapien
gcctgtcttgtgaacaggttgcaat

SEQ ID NO: 5137738 - DNA, 25 bp, Homo sapien
gatgcttactactgacagggcagga

SEQ ID NO: 5137739 - DNA, 25 bp, Homo sapien
tctgaactctgtgattgaggagacc

SEQ ID NO: 5137740 - DNA, 25 bp, Homo sapien
tacacgtggctggtgtcagggttct

SEQ ID NO: 5137741 - DNA, 25 bp, Homo sapien
acatttggctgaccgcatggtacac

SEQ ID NO: 5137742 - DNA, 25 bp, Homo sapien
ctgtaatgcatggtggatattatgc

SEQ ID NO: 5137743 - DNA, 25 bp, Homo sapien
tgtaatgcatggtggatattatgca

SEQ ID NO: 5137744 - DNA, 25 bp, Homo sapien
gtaatgcatggtggatattatgcag

SEQ ID NO: 5137745 - DNA, 25 bp, Homo sapien
gaaatgactggctgccctagagatg

SEQ ID NO: 5137746 - DNA, 25 bp, Homo sapien
gtactgcaggttcctttcagttcct

SEQ ID NO: 5137747 - DNA, 25 bp, Homo sapien
gttcctggtgctgttgttctacacc

SEQ ID NO: 5137748 - DNA, 25 bp, Homo sapien
tctacaccattctagagaaatgact

SEQ ID NO: 5137749 - DNA, 25 bp, Homo sapien
tgtgcgtgcatggttcatagtgtgt

SEQ ID NO: 5137750 - DNA, 25 bp, Homo sapien
gcatggttcgtagcatgtgcgtgca

SEQ ID NO: 5137751 - DNA, 25 bp, Homo sapien
catgtgcgtgcatggttcatagtgt

SEQ ID NO: 5137752 - DNA, 25 bp, Homo sapien
cttccccaagcatggttcgtagcat

SEQ ID NO: 5137753 - DNA, 25 bp, Homo sapien
cacatacaatttctccagtgagggt

SEQ ID NO: 5137754 - DNA, 25 bp, Homo sapien
gctgagccatctataacaatactgg

SEQ ID NO: 5137755 - DNA, 25 bp, Homo sapien
gagttgtttacataacctggatcac

SEQ ID NO: 5137756 - DNA, 25 bp, Homo sapien
tggtagacgaggttataaagtccac

SEQ ID NO: 5137757 - DNA, 25 bp, Homo sapien
gcatttggtctttgcctgctcagca

SEQ ID NO: 5137758 - DNA, 25 bp, Homo sapien
tttcttccctaagagcatttggtct

SEQ ID NO: 5137759 - DNA, 25 bp, Homo sapien
ttttgacagaaaggaagctgattaa

SEQ ID NO: 5137760 - DNA, 25 bp, Homo sapien
gattcaaactacttagggcttagcc

SEQ ID NO: 5137761 - DNA, 25 bp, Homo sapien
gaatgagtgttaaacctcgtgtaga

SEQ ID NO: 5137762 - DNA, 25 bp, Homo sapien
cacagccactatcagtgttttacca

SEQ ID NO: 5137763 - DNA, 25 bp, Homo sapien
attgatatgtttgggctaagtcttt

SEQ ID NO: 5137764 - DNA, 25 bp, Homo sapien
tgaaatcagtttctaatagacagca

SEQ ID NO: 5137765 - DNA, 25 bp, Homo sapien
ggctgcccatgccttttatgacaaa

SEQ ID NO: 5137766 - DNA, 25 bp, Homo sapien
ctttgtgtttctcgtttctcgtcta

SEQ ID NO: 5137767 - DNA, 25 bp, Homo sapien
tatgttgatggcactcctgctcctt

SEQ ID NO: 5137768 - DNA, 25 bp, Homo sapien
ttatgacaaaccaaacttaaccatg

SEQ ID NO: 5137769 - DNA, 25 bp, Homo sapien
cgggaacgatgccatacaatttcat

SEQ ID NO: 5137770 - DNA, 25 bp, Homo sapien
gcgggaacgatgccatacaatttca

SEQ ID NO: 5137771 - DNA, 25 bp, Homo sapien
ctgcgggaacgatgccatacaattt

SEQ ID NO: 5137772 - DNA, 25 bp, Homo sapien
tgcgggaacgatgccatacaatttc

SEQ ID NO: 5137773 - DNA, 25 bp, Homo sapien
atgctacgaacctttttcctaggag

SEQ ID NO: 5137774 - DNA, 25 bp, Homo sapien
ttgccaaaacctcagctctatctgg

SEQ ID NO: 5137775 - DNA, 25 bp, Homo sapien
tcagctctatctggaacagaactta

SEQ ID NO: 5137776 - DNA, 25 bp, Homo sapien
tttttcctaggagcatatgtatgta

SEQ ID NO: 5137777 - DNA, 25 bp, Homo sapien
tgctgtccattcccgttttagtggg

SEQ ID NO: 5137778 - DNA, 25 bp, Homo sapien
ttgctgtccattcccgttttagtgg

SEQ ID NO: 5137779 - DNA, 25 bp, Homo sapien
catagattcacacgcctgaagggac

SEQ ID NO: 5137780 - DNA, 25 bp, Homo sapien
cattctagcttctgacatgccagtc

SEQ ID NO: 5137781 - DNA, 25 bp, Homo sapien
cagtgagagcgattgatagactgct

SEQ ID NO: 5137782 - DNA, 25 bp, Homo sapien
aaagccacatccaagccatctcagg

SEQ ID NO: 5137783 - DNA, 25 bp, Homo sapien
tgatgttcccgttatcccgatggtg

SEQ ID NO: 5137784 - DNA, 25 bp, Homo sapien
gggagaatgatgttcccgttatccc

SEQ ID NO: 5137785 - DNA, 25 bp, Homo sapien
cgatggtgtccagcttttgtatttg

SEQ ID NO: 5137786 - DNA, 25 bp, Homo sapien
cccgttatcccgatggtgtccagct

SEQ ID NO: 5137787 - DNA, 25 bp, Homo sapien
agtcccggtcctcatcttttgagga

SEQ ID NO: 5137788 - DNA, 25 bp, Homo sapien
tagtcccggtcctcatcttttgagg

SEQ ID NO: 5137789 - DNA, 25 bp, Homo sapien
ttagtcccggtcctcatcttttgag

SEQ ID NO: 5137790 - DNA, 25 bp, Homo sapien
aaatctgttcttaattacgagagca

SEQ ID NO: 5137791 - DNA, 25 bp, Homo sapien
tcttaattacgagagcagctgttag

SEQ ID NO: 5137792 - DNA, 25 bp, Homo sapien
cagctgttagagtggtagccatttt

SEQ ID NO: 5137793 - DNA, 25 bp, Homo sapien
cctgatgtgaagttgcctgatttac

SEQ ID NO: 5137794 - DNA, 25 bp, Homo sapien
ccatcagcgatgaagacctcctcca

SEQ ID NO: 5137795 - DNA, 25 bp, Homo sapien
ccccattcttggatatctccatcag

SEQ ID NO: 5137796 - DNA, 25 bp, Homo sapien
cccccattcttggatatctccatca

SEQ ID NO: 5137797 - DNA, 25 bp, Homo sapien
tctccatcagcgatgaagacctcct

SEQ ID NO: 5137798 - DNA, 25 bp, Homo sapien
tttgattttcatgagcagaagtcct

SEQ ID NO: 5137799 - DNA, 25 bp, Homo sapien
tgctctgagtgggacgctgtgttct

SEQ ID NO: 5137800 - DNA, 25 bp, Homo sapien
ttgtttgattttcatgagcagaagt

SEQ ID NO: 5137801 - DNA, 25 bp, Homo sapien
gctctgagtgggacgctgtgttctc

SEQ ID NO: 5137802 - DNA, 25 bp, Homo sapien
caactttgaatatggtgaactattc

SEQ ID NO: 5137803 - DNA, 25 bp, Homo sapien
tgatggttgtgaagagtacatgaag

SEQ ID NO: 5137804 - DNA, 25 bp, Homo sapien
ggttgtgaagagtacatgaagaaaa

SEQ ID NO: 5137805 - DNA, 25 bp, Homo sapien
tcctgtctcagaccatattccaaat

SEQ ID NO: 5137806 - DNA, 25 bp, Homo sapien
tacaagtgacaatttgaccctcgtg

SEQ ID NO: 5137807 - DNA, 25 bp, Homo sapien
gtaggatttgtagcagtcactgaaa

SEQ ID NO: 5137808 - DNA, 25 bp, Homo sapien
gaccctcgtgaattcagtttccatg

SEQ ID NO: 5137809 - DNA, 25 bp, Homo sapien
gagtctttatcagcaccgttcacat

SEQ ID NO: 5137810 - DNA, 25 bp, Homo sapien
tgtgaggccaatggacggccaagat

SEQ ID NO: 5137811 - DNA, 25 bp, Homo sapien
gctgaagtcgtcttcggaaaccagc

SEQ ID NO: 5137812 - DNA, 25 bp, Homo sapien
cgtatgtgaggccaatggacggcca

SEQ ID NO: 5137813 - DNA, 25 bp, Homo sapien
gcccctgatgagtctcctaagctga

SEQ ID NO: 5137814 - DNA, 25 bp, Homo sapien
ctccaggtccatgcccagggagcat

SEQ ID NO: 5137815 - DNA, 25 bp, Homo sapien
ggctccaggtccatgcccagggagc

SEQ ID NO: 5137816 - DNA, 25 bp, Homo sapien
gctccaggtccatgcccagggagca

SEQ ID NO: 5137817 - DNA, 25 bp, Homo sapien
ttctggggaacgttcttctctcctc

SEQ ID NO: 5137818 - DNA, 25 bp, Homo sapien
tcatttatctgtcatctctcgaaaa

SEQ ID NO: 5137819 - DNA, 25 bp, Homo sapien
tatatttacgagagagatttgaaac

SEQ ID NO: 5137820 - DNA, 25 bp, Homo sapien
aacccactggagtatatttacgaga

SEQ ID NO: 5137821 - DNA, 25 bp, Homo sapien
ttgaaacagtcatcgttccactgaa

SEQ ID NO: 5137822 - DNA, 25 bp, Homo sapien
tattggctctcccatgaaaagccct

SEQ ID NO: 5137823 - DNA, 25 bp, Homo sapien
gtcagcatccttctcatcgcagaca

SEQ ID NO: 5137824 - DNA, 25 bp, Homo sapien
ctgtgattgatgacggccctgtgct

SEQ ID NO: 5137825 - DNA, 25 bp, Homo sapien
tggctctcccatgaaaagccctgag

SEQ ID NO: 5137826 - DNA, 25 bp, Homo sapien
ggaacaaagcaggtgtgccagagcc

SEQ ID NO: 5137827 - DNA, 25 bp, Homo sapien
gacccacctggatgatatgccctgt

SEQ ID NO: 5137828 - DNA, 25 bp, Homo sapien
cagaggcagtaacctgatgatggct

SEQ ID NO: 5137829 - DNA, 25 bp, Homo sapien
tgaaagaaatagcaagcctgtcggt

SEQ ID NO: 5137830 - DNA, 25 bp, Homo sapien
cagctcctgcatggaaattggtgca

SEQ ID NO: 5137831 - DNA, 25 bp, Homo sapien
ggtgcatcagtcaagcccatctgca

SEQ ID NO: 5137832 - DNA, 25 bp, Homo sapien
ccccagaagaggttgtcagcatcag

SEQ ID NO: 5137833 - DNA, 25 bp, Homo sapien
ccagaagaggttgtcagcatcagct

SEQ ID NO: 5137834 - DNA, 25 bp, Homo sapien
tcagctcccgccttaactagttctt

SEQ ID NO: 5137835 - DNA, 25 bp, Homo sapien
tcagaacattgcaagagcagtatgt

SEQ ID NO: 5137836 - DNA, 25 bp, Homo sapien
gctgctgatttatctgcagatcagc

SEQ ID NO: 5137837 - DNA, 25 bp, Homo sapien
tttgaagactgagttgaaagctgct

SEQ ID NO: 5137838 - DNA, 25 bp, Homo sapien
tgcagcaagggcgtgtgtgccatct

SEQ ID NO: 5137839 - DNA, 25 bp, Homo sapien
cagtatgtgataaccaggaaaccca

SEQ ID NO: 5137840 - DNA, 25 bp, Homo sapien
tgtactgtgcaatccaatctctgga

SEQ ID NO: 5137841 - DNA, 25 bp, Homo sapien
tcaatatgagccaacgaacagtatg

SEQ ID NO: 5137842 - DNA, 25 bp, Homo sapien
agcatgtctacgtgcaggagaggac

SEQ ID NO: 5137843 - DNA, 25 bp, Homo sapien
accaggactctcttatttgtgttcc

SEQ ID NO: 5137844 - DNA, 25 bp, Homo sapien
gagaggacagctcagcgggtaacac

SEQ ID NO: 5137845 - DNA, 25 bp, Homo sapien
tcctttcattgaaggtagttccttc

SEQ ID NO: 5137846 - DNA, 25 bp, Homo sapien
gagggtacttaaacttcttcacata

SEQ ID NO: 5137847 - DNA, 25 bp, Homo sapien
aggcatagagggtacttaaacttct

SEQ ID NO: 5137848 - DNA, 25 bp, Homo sapien
catagagggtacttaaacttcttca

SEQ ID NO: 5137849 - DNA, 25 bp, Homo sapien
tagagggtacttaaacttcttcaca

SEQ ID NO: 5137850 - DNA, 25 bp, Homo sapien
ggcagcagtggggaaggggctgctc

SEQ ID NO: 5137851 - DNA, 25 bp, Homo sapien
gcagtggggaaggggctgctcatca

SEQ ID NO: 5137852 - DNA, 25 bp, Homo sapien
agtggggaaggggctgctcatcagc

SEQ ID NO: 5137853 - DNA, 25 bp, Homo sapien
cagcagtggggaaggggctgctcat

SEQ ID NO: 5137854 - DNA, 25 bp, Homo sapien
gcaggtacgaggaggcaaagccttc

SEQ ID NO: 5137855 - DNA, 25 bp, Homo sapien
gtacgaggaggcaaagccttctcag

SEQ ID NO: 5137856 - DNA, 25 bp, Homo sapien
tgactgcgtggctctcattggccct

SEQ ID NO: 5137857 - DNA, 25 bp, Homo sapien
tcacactggccgaaggtcaccgtgt

SEQ ID NO: 5137858 - DNA, 25 bp, Homo sapien
aaaacagagtacaaagaaagggcag

SEQ ID NO: 5137859 - DNA, 25 bp, Homo sapien
tcaaaacagagtacaaagaaagggc

SEQ ID NO: 5137860 - DNA, 25 bp, Homo sapien
caaagaaagggcagaaggagagtgc

SEQ ID NO: 5137861 - DNA, 25 bp, Homo sapien
aagaaagggcagaaggagagtgcac

SEQ ID NO: 5137862 - DNA, 25 bp, Homo sapien
tcgccgctggaagcagtttaattcc

SEQ ID NO: 5137863 - DNA, 25 bp, Homo sapien
ctgtaggtaaatcgccgctggaagc

SEQ ID NO: 5137864 - DNA, 25 bp, Homo sapien
ggagctgctgtaggtaaatcgccgc

SEQ ID NO: 5137865 - DNA, 25 bp, Homo sapien
gcagtttaattccagttgcgggtgt

SEQ ID NO: 5137866 - DNA, 25 bp, Homo sapien
gtgctgctgcgaagtgcccttagag

SEQ ID NO: 5137867 - DNA, 25 bp, Homo sapien
tgaagactgtgtcactaatgcctgg

SEQ ID NO: 5137868 - DNA, 25 bp, Homo sapien
cttccaccgagatggaaaagtgaac

SEQ ID NO: 5137869 - DNA, 25 bp, Homo sapien
agtgcccttagaggatgctccagcc

SEQ ID NO: 5137870 - DNA, 25 bp, Homo sapien
agccacgagagaggggcggcagggc

SEQ ID NO: 5137871 - DNA, 25 bp, Homo sapien
taaaagccacgagagaggggcggca

SEQ ID NO: 5137872 - DNA, 25 bp, Homo sapien
ggcgggccgtaaaagccacgagaga

SEQ ID NO: 5137873 - DNA, 25 bp, Homo sapien
ggagcggcgcggggagtacaggggc

SEQ ID NO: 5137874 - DNA, 25 bp, Homo sapien
ctcccgcttgcagggccgccccggg

SEQ ID NO: 5137875 - DNA, 25 bp, Homo sapien
tcccgcttgcagggccgccccgggc

SEQ ID NO: 5137876 - DNA, 25 bp, Homo sapien
tctcccgcttgcagggccgccccgg

SEQ ID NO: 5137877 - DNA, 25 bp, Homo sapien
ccgcttgcagggccgccccgggcac

SEQ ID NO: 5137878 - DNA, 25 bp, Homo sapien
gccgcgggagaagtgcgtgcagccc

SEQ ID NO: 5137879 - DNA, 25 bp, Homo sapien
gagggatgcgacagggccgggcacg

SEQ ID NO: 5137880 - DNA, 25 bp, Homo sapien
gcgggcggccgagggatgcgacagg

SEQ ID NO: 5137881 - DNA, 25 bp, Homo sapien
tcaagtggattctgggccgcgggag

SEQ ID NO: 5137882 - DNA, 25 bp, Homo sapien
ttcgctgaacttgcgggctccagag

SEQ ID NO: 5137883 - DNA, 25 bp, Homo sapien
cgcgccgccgctttatttcgctgaa

SEQ ID NO: 5137884 - DNA, 25 bp, Homo sapien
gctttatttcgctgaacttgcgggc

SEQ ID NO: 5137885 - DNA, 25 bp, Homo sapien
gtggaagaggtttcctccgcgccgc

SEQ ID NO: 5137886 - DNA, 25 bp, Homo sapien
gcggcaagtttgaagtcgacaccca

SEQ ID NO: 5137887 - DNA, 25 bp, Homo sapien
tcttatcacccttctagctgatcac

SEQ ID NO: 5137888 - DNA, 25 bp, Homo sapien
ctgcctttccagaccggagacgggc

SEQ ID NO: 5137889 - DNA, 25 bp, Homo sapien
tattactctttaggagccacgatga

SEQ ID NO: 5137890 - DNA, 25 bp, Homo sapien
gcttccggttctaggccaactgtgg

SEQ ID NO: 5137891 - DNA, 25 bp, Homo sapien
gaatccctggtgagaatccggagct

SEQ ID NO: 5137892 - DNA, 25 bp, Homo sapien
tggtgaggcacaactgcagggctct

SEQ ID NO: 5137893 - DNA, 25 bp, Homo sapien
cagtcagcggttcttgcccagaaaa

SEQ ID NO: 5137894 - DNA, 25 bp, Homo sapien
gaggatgactcttcggcttgacgct

SEQ ID NO: 5137895 - DNA, 25 bp, Homo sapien
ggagcacgggaacaggacacatttc

SEQ ID NO: 5137896 - DNA, 25 bp, Homo sapien
gcattgggatttgggcagccagccc

SEQ ID NO: 5137897 - DNA, 25 bp, Homo sapien
gcatgggactcgcagtaaacacggt

SEQ ID NO: 5137898 - DNA, 25 bp, Homo sapien
gctaagtgtcctcttcctgaacaca

SEQ ID NO: 5137899 - DNA, 25 bp, Homo sapien
gagcctgacacccacagttgtgttg

SEQ ID NO: 5137900 - DNA, 25 bp, Homo sapien
tcttgccgtctgctaatacttcaca

SEQ ID NO: 5137901 - DNA, 25 bp, Homo sapien
gggactaccaatccatgcttgaata

SEQ ID NO: 5137902 - DNA, 25 bp, Homo sapien
ttcaggctgtaagccataattgctg

SEQ ID NO: 5137903 - DNA, 25 bp, Homo sapien
ttttggaatgtcaccattttcaggc

SEQ ID NO: 5137904 - DNA, 25 bp, Homo sapien
caatgttaggggctgtattaagccc

SEQ ID NO: 5137905 - DNA, 25 bp, Homo sapien
attaagccctttaggagtgccttgg

SEQ ID NO: 5137906 - DNA, 25 bp, Homo sapien
ccaacccaatgttaggggctgtatt

SEQ ID NO: 5137907 - DNA, 25 bp, Homo sapien
tcattccgttagacccaacccaatg

SEQ ID NO: 5137908 - DNA, 25 bp, Homo sapien
tatccatcgtacagactgtttgctc

SEQ ID NO: 5137909 - DNA, 25 bp, Homo sapien
taatggtcgtgttggtagtaacaac

SEQ ID NO: 5137910 - DNA, 25 bp, Homo sapien
gataaagttctgagataaacctccc

SEQ ID NO: 5137911 - DNA, 25 bp, Homo sapien
taacaacagtggattctaggaaagg

SEQ ID NO: 5137912 - DNA, 25 bp, Homo sapien
gtcacgatctcgaggtttcaccagg

SEQ ID NO: 5137913 - DNA, 25 bp, Homo sapien
gaatgctggtctgagaacgccaggc

SEQ ID NO: 5137914 - DNA, 25 bp, Homo sapien
tgaagcctggacacaagaatgtcct

SEQ ID NO: 5137915 - DNA, 25 bp, Homo sapien
tcaccaggcgccctaagaggatgaa

SEQ ID NO: 5137916 - DNA, 25 bp, Homo sapien
ggtgtctgggcctttacagtgtgtc

SEQ ID NO: 5137917 - DNA, 25 bp, Homo sapien
gtgtgtcctcgccagatgagatcct

SEQ ID NO: 5137918 - DNA, 25 bp, Homo sapien
caaggtggtgcatgcgggtgtctgg

SEQ ID NO: 5137919 - DNA, 25 bp, Homo sapien
tgcgtttgtctgacggatgcaaggt

SEQ ID NO: 5137920 - DNA, 25 bp, Homo sapien
cagctgctgtaaattgtccatgaag

SEQ ID NO: 5137921 - DNA, 25 bp, Homo sapien
tgttctcctattggctctgtgatca

SEQ ID NO: 5137922 - DNA, 25 bp, Homo sapien
cagacagctgctgtaaattgtccat

SEQ ID NO: 5137923 - DNA, 25 bp, Homo sapien
catgaagcaaggctgttctcctatt

SEQ ID NO: 5137924 - DNA, 25 bp, Homo sapien
gcagaatcgcctcattcacagaggg

SEQ ID NO: 5137925 - DNA, 25 bp, Homo sapien
gaccacggaggtgcactgacaagct

SEQ ID NO: 5137926 - DNA, 25 bp, Homo sapien
catcaccaatgaggcgagcagaatc

SEQ ID NO: 5137927 - DNA, 25 bp, Homo sapien
cctgaggagttttgaggctaggatc

SEQ ID NO: 5137928 - DNA, 25 bp, Homo sapien
tccaaggcggaagaagggtgatctc

SEQ ID NO: 5137929 - DNA, 25 bp, Homo sapien
ccctgctccaaggcggaagaagggt

SEQ ID NO: 5137930 - DNA, 25 bp, Homo sapien
tggccctgctccaaggcggaagaag

SEQ ID NO: 5137931 - DNA, 25 bp, Homo sapien
tgctccaaggcggaagaagggtgat

SEQ ID NO: 5137932 - DNA, 25 bp, Homo sapien
tcggtctcagcacggacggccactt

SEQ ID NO: 5137933 - DNA, 25 bp, Homo sapien
tacatttagatgtaccccacacctc

SEQ ID NO: 5137934 - DNA, 25 bp, Homo sapien
gggaactgctgatccttacatttag

SEQ ID NO: 5137935 - DNA, 25 bp, Homo sapien
ttagatgtaccccacacctcggtct

SEQ ID NO: 5137936 - DNA, 25 bp, Homo sapien
tgactgatagttgtgggacaccttg

SEQ ID NO: 5137937 - DNA, 25 bp, Homo sapien
ggacaccttggctctctttaggaac

SEQ ID NO: 5137938 - DNA, 25 bp, Homo sapien
ccgctcgcacttgactgatagttgt

SEQ ID NO: 5137939 - DNA, 25 bp, Homo sapien
tgtgggacaccttggctctctttag

SEQ ID NO: 5137940 - DNA, 25 bp, Homo sapien
gacaccatcccgtgagcttgacagg

SEQ ID NO: 5137941 - DNA, 25 bp, Homo sapien
tctccaaacatagaggcagcccagt

SEQ ID NO: 5137942 - DNA, 25 bp, Homo sapien
gatgcctctaggtgcagtcaatgag

SEQ ID NO: 5137943 - DNA, 25 bp, Homo sapien
gatctcatacgaaaggtcacagcct

SEQ ID NO: 5137944 - DNA, 25 bp, Homo sapien
gaaggcagtcctgcacaagacagcc

SEQ ID NO: 5137945 - DNA, 25 bp, Homo sapien
caactctcttcttggtaacccctgg

SEQ ID NO: 5137946 - DNA, 25 bp, Homo sapien
agcctgcagggacatagctgagtgc

SEQ ID NO: 5137947 - DNA, 25 bp, Homo sapien
ccccagtccagtcgttattgtcaac

SEQ ID NO: 5137948 - DNA, 25 bp, Homo sapien
ttagcatacaaagcacccgcagcat

SEQ ID NO: 5137949 - DNA, 25 bp, Homo sapien
ttttcctggacagacgatggcatcg

SEQ ID NO: 5137950 - DNA, 25 bp, Homo sapien
gatggcatcgtagcacttccttagc

SEQ ID NO: 5137951 - DNA, 25 bp, Homo sapien
ctccaggtgatgcagacagagcccg

SEQ ID NO: 5137952 - DNA, 25 bp, Homo sapien
gagccttggtgcgttcatctgcgag

SEQ ID NO: 5137953 - DNA, 25 bp, Homo sapien
cgttcatctgcgagtaggcctcttt

SEQ ID NO: 5137954 - DNA, 25 bp, Homo sapien
ttggtgcgttcatctgcgagtaggc

SEQ ID NO: 5137955 - DNA, 25 bp, Homo sapien
gtgcgttcatctgcgagtaggcctc

SEQ ID NO: 5137956 - DNA, 25 bp, Homo sapien
tacaaattccatgtgcactcctgtg

SEQ ID NO: 5137957 - DNA, 25 bp, Homo sapien
agagcctgcatagcctgtgctgggc

SEQ ID NO: 5137958 - DNA, 25 bp, Homo sapien
gatctgatggctgtcagacacatcc

SEQ ID NO: 5137959 - DNA, 25 bp, Homo sapien
tgcatcactctcagctgtggaagat

SEQ ID NO: 5137960 - DNA, 25 bp, Homo sapien
tactccgacatctgaacagcacttg

SEQ ID NO: 5137961 - DNA, 25 bp, Homo sapien
ctccgacatctgaacagcacttggc

SEQ ID NO: 5137962 - DNA, 25 bp, Homo sapien
ttactccgacatctgaacagcactt

SEQ ID NO: 5137963 - DNA, 25 bp, Homo sapien
actccgacatctgaacagcacttgg

SEQ ID NO: 5137964 - DNA, 25 bp, Homo sapien
aaacactccagttagagaaaagcct

SEQ ID NO: 5137965 - DNA, 25 bp, Homo sapien
gaggtgtgtcatcgtatttgtattg

SEQ ID NO: 5137966 - DNA, 25 bp, Homo sapien
gatgctttgaaacatacaccttaaa

SEQ ID NO: 5137967 - DNA, 25 bp, Homo sapien
tcgtatttgtattgagacatctggg

SEQ ID NO: 5137968 - DNA, 25 bp, Homo sapien
gactctaaaattccactgaggagcc

SEQ ID NO: 5137969 - DNA, 25 bp, Homo sapien
cactgttcctatagcagtgaaccga

SEQ ID NO: 5137970 - DNA, 25 bp, Homo sapien
tgaaccgattagacagagggactgc

SEQ ID NO: 5137971 - DNA, 25 bp, Homo sapien
gaccctaaacagagaagcacatgat

SEQ ID NO: 5137972 - DNA, 25 bp, Homo sapien
tctcttagagcctctatgaaatatc

SEQ ID NO: 5137973 - DNA, 25 bp, Homo sapien
tagagcctctatgaaatatcacttt

SEQ ID NO: 5137974 - DNA, 25 bp, Homo sapien
gaaatatcactttgaatgcccacat

SEQ ID NO: 5137975 - DNA, 25 bp, Homo sapien
gaaatttgtctcttagagcctctat

SEQ ID NO: 5137976 - DNA, 25 bp, Homo sapien
agccagggctgcacagcttcctgag

SEQ ID NO: 5137977 - DNA, 25 bp, Homo sapien
cagggctgcacagcttcctgagcag

SEQ ID NO: 5137978 - DNA, 25 bp, Homo sapien
tacatgcacagccagggctgcacag

SEQ ID NO: 5137979 - DNA, 25 bp, Homo sapien
ctacatgcacagccagggctgcaca

SEQ ID NO: 5137980 - DNA, 25 bp, Homo sapien
ccggctggcggtaaaggcgtaagct

SEQ ID NO: 5137981 - DNA, 25 bp, Homo sapien
gaacttgcctttgacacaaaagctg

SEQ ID NO: 5137982 - DNA, 25 bp, Homo sapien
ggcgtaagctctgcaatgcctcgga

SEQ ID NO: 5137983 - DNA, 25 bp, Homo sapien
caaaagctgctcttacagtgagaac

SEQ ID NO: 5137984 - DNA, 25 bp, Homo sapien
cgttatggtggttctaatatcctcg

SEQ ID NO: 5137985 - DNA, 25 bp, Homo sapien
ccaggaaatacgttatggtggttct

SEQ ID NO: 5137986 - DNA, 25 bp, Homo sapien
ggttctaatatcctcgacgacttca

SEQ ID NO: 5137987 - DNA, 25 bp, Homo sapien
tatcctcgacgacttcatcattctc

SEQ ID NO: 5137988 - DNA, 25 bp, Homo sapien
cagtggcctgagcagagtattaata

SEQ ID NO: 5137989 - DNA, 25 bp, Homo sapien
acacagtgcggaatttatccccggg

SEQ ID NO: 5137990 - DNA, 25 bp, Homo sapien
gaggacctctctcttacctgtggga

SEQ ID NO: 5137991 - DNA, 25 bp, Homo sapien
cctgaagcttctctaaggagccaca

SEQ ID NO: 5137992 - DNA, 25 bp, Homo sapien
tctgtaggaaaagaaccgtgcttgc

SEQ ID NO: 5137993 - DNA, 25 bp, Homo sapien
ttcctcagataacctgggtggaggg

SEQ ID NO: 5137994 - DNA, 25 bp, Homo sapien
tcagctctgtcaacgtcttcctcag

SEQ ID NO: 5137995 - DNA, 25 bp, Homo sapien
gacatcgcattgtgggctctcagct

SEQ ID NO: 5137996 - DNA, 25 bp, Homo sapien
ccagacatcgcattgtgggctctca

SEQ ID NO: 5137997 - DNA, 25 bp, Homo sapien
aaagagagagtagtgatggcagcct

SEQ ID NO: 5137998 - DNA, 25 bp, Homo sapien
tctgattacattgcaggaaagagag

SEQ ID NO: 5137999 - DNA, 25 bp, Homo sapien
tttattaaatctgattacattgcag

SEQ ID NO: 5138000 - DNA, 25 bp, Homo sapien
agagagtagtgatggcagcctccag

SEQ ID NO: 5138001 - DNA, 25 bp, Homo sapien
agaggccatgagatccacggcgaga

SEQ ID NO: 5138002 - DNA, 25 bp, Homo sapien
agtcccttttcagctagcacccagt

SEQ ID NO: 5138003 - DNA, 25 bp, Homo sapien
gacagaggatgaacctcctctctag

SEQ ID NO: 5138004 - DNA, 25 bp, Homo sapien
tttgagtgcatgaagcaagaggaca

SEQ ID NO: 5138005 - DNA, 25 bp, Homo sapien
cacttcaggtctccgggacgcggag

SEQ ID NO: 5138006 - DNA, 25 bp, Homo sapien
tgggtgtccactggcggccacactt

SEQ ID NO: 5138007 - DNA, 25 bp, Homo sapien
agtgccctcggcatcccacggattt

SEQ ID NO: 5138008 - DNA, 25 bp, Homo sapien
tcccgagcggaagttatccaagtgc

SEQ ID NO: 5138009 - DNA, 25 bp, Homo sapien
tctgtggcagccgagacaaattaca

SEQ ID NO: 5138010 - DNA, 25 bp, Homo sapien
tgtggccccaaccaaatagaggtgg

SEQ ID NO: 5138011 - DNA, 25 bp, Homo sapien
catcaccaggttgcgctgagggaaa

SEQ ID NO: 5138012 - DNA, 25 bp, Homo sapien
gcagaatgaccccaacaaaggaggc

SEQ ID NO: 5138013 - DNA, 25 bp, Homo sapien
agtagccgatgctgagagaagagct

SEQ ID NO: 5138014 - DNA, 25 bp, Homo sapien
caaacgcaggccttgcaaagtggag

SEQ ID NO: 5138015 - DNA, 25 bp, Homo sapien
gagctgcttccaccgctttcatcag

SEQ ID NO: 5138016 - DNA, 25 bp, Homo sapien
ttgaaaagcacaacccaaacgcagg

SEQ ID NO: 5138017 - DNA, 25 bp, Homo sapien
tgtggccactcagaccatatcagtc

SEQ ID NO: 5138018 - DNA, 25 bp, Homo sapien
cagcgcctctaaaatgagcccagat

SEQ ID NO: 5138019 - DNA, 25 bp, Homo sapien
caataggaccttcactgagtcagca

SEQ ID NO: 5138020 - DNA, 25 bp, Homo sapien
gaacacattgatgtgattcccaggg

SEQ ID NO: 5138021 - DNA, 25 bp, Homo sapien
cataatagcagtcctaataatgatg

SEQ ID NO: 5138022 - DNA, 25 bp, Homo sapien
catcataatagcagtcctaataatg

SEQ ID NO: 5138023 - DNA, 25 bp, Homo sapien
tgatgatgacgaggacagccacagc

SEQ ID NO: 5138024 - DNA, 25 bp, Homo sapien
cattggtggggccatcataatagca

SEQ ID NO: 5138025 - DNA, 25 bp, Homo sapien
tagcgatgagttcatcaggtgtgcc

SEQ ID NO: 5138026 - DNA, 25 bp, Homo sapien
gggagtaataaggtcccatcccaga

SEQ ID NO: 5138027 - DNA, 25 bp, Homo sapien
ctagcagtgggtagcgatgagttca

SEQ ID NO: 5138028 - DNA, 25 bp, Homo sapien
gatgagttcatcaggtgtgccaatt

SEQ ID NO: 5138029 - DNA, 25 bp, Homo sapien
caggattttggaattcctacgtact

SEQ ID NO: 5138030 - DNA, 25 bp, Homo sapien
tacaggattttggaattcctacgta

SEQ ID NO: 5138031 - DNA, 25 bp, Homo sapien
gtgtcacacactctagctttaagtt

SEQ ID NO: 5138032 - DNA, 25 bp, Homo sapien
ctgtgtcacacactctagctttaag

SEQ ID NO: 5138033 - DNA, 25 bp, Homo sapien
tccgcttgatcttcaggtggcgctg

SEQ ID NO: 5138034 - DNA, 25 bp, Homo sapien
tctccgcttgatcttcaggtggcgc

SEQ ID NO: 5138035 - DNA, 25 bp, Homo sapien
gagctgcgagcaggatttccctgct

SEQ ID NO: 5138036 - DNA, 25 bp, Homo sapien
tttgggatacatcagcgacgttgac

SEQ ID NO: 5138037 - DNA, 25 bp, Homo sapien
tggagagcccgggtatgagctgcga

SEQ ID NO: 5138038 - DNA, 25 bp, Homo sapien
acaaggcttcgctgagaacccagga

SEQ ID NO: 5138039 - DNA, 25 bp, Homo sapien
gatgggtaaggcgagcccttgtctt

SEQ ID NO: 5138040 - DNA, 25 bp, Homo sapien
ggcgagcccttgtcttttgcgccac

SEQ ID NO: 5138041 - DNA, 25 bp, Homo sapien
gtaaggcgagcccttgtcttttgcg

SEQ ID NO: 5138042 - DNA, 25 bp, Homo sapien
acaagagatgggtaaggcgagccct

SEQ ID NO: 5138043 - DNA, 25 bp, Homo sapien
cctccgaagggtggagtcaggccag

SEQ ID NO: 5138044 - DNA, 25 bp, Homo sapien
tttcacagagcgcatggcctccgaa

SEQ ID NO: 5138045 - DNA, 25 bp, Homo sapien
cagtgtgggagcgtccagaagattc

SEQ ID NO: 5138046 - DNA, 25 bp, Homo sapien
agcacagcatgcgtgaagcgagcac

SEQ ID NO: 5138047 - DNA, 25 bp, Homo sapien
cagttcaaccagtgaccgacttctc

SEQ ID NO: 5138048 - DNA, 25 bp, Homo sapien
tttcatgctagtggagagtggtgtc

SEQ ID NO: 5138049 - DNA, 25 bp, Homo sapien
cctgtgatacaggtcactcatctgg

SEQ ID NO: 5138050 - DNA, 25 bp, Homo sapien
gcatttcttgttgcctaagtgagac

SEQ ID NO: 5138051 - DNA, 25 bp, Homo sapien
tgcttgctataatacttggaacctg

SEQ ID NO: 5138052 - DNA, 25 bp, Homo sapien
gacctttaccagaagtggttcatga

SEQ ID NO: 5138053 - DNA, 25 bp, Homo sapien
gaacaacaatgatgacgcagacgag

SEQ ID NO: 5138054 - DNA, 25 bp, Homo sapien
tgtcataaggtcacacagttcttgg

SEQ ID NO: 5138055 - DNA, 25 bp, Homo sapien
gtagtttcagtagataaagacttta

SEQ ID NO: 5138056 - DNA, 25 bp, Homo sapien
aagtagtttcagtagataaagactt

SEQ ID NO: 5138057 - DNA, 25 bp, Homo sapien
atgttgatggtatatcaatccatca

SEQ ID NO: 5138058 - DNA, 25 bp, Homo sapien
atcaatccatcaagcattttattag

SEQ ID NO: 5138059 - DNA, 25 bp, Homo sapien
caaaactacgcttaggctttgcgtg

SEQ ID NO: 5138060 - DNA, 25 bp, Homo sapien
tgtttaatgtcctgttgtagtccca

SEQ ID NO: 5138061 - DNA, 25 bp, Homo sapien
aaaggcgtgctttagtgtgtagaca

SEQ ID NO: 5138062 - DNA, 25 bp, Homo sapien
tccttacccaagaagtagtagcctc

SEQ ID NO: 5138063 - DNA, 25 bp, Homo sapien
tcggcatcttctgcgctgttgagga

SEQ ID NO: 5138064 - DNA, 25 bp, Homo sapien
tccaggatgctggtaagtttcccgc

SEQ ID NO: 5138065 - DNA, 25 bp, Homo sapien
ggtcactttgcttcctaaggatggg

SEQ ID NO: 5138066 - DNA, 25 bp, Homo sapien
cccggagcagctctgtaaggtcctg

SEQ ID NO: 5138067 - DNA, 25 bp, Homo sapien
gggctctggtctagctccccagaca

SEQ ID NO: 5138068 - DNA, 25 bp, Homo sapien
ggtctagctccccagacatctagtg

SEQ ID NO: 5138069 - DNA, 25 bp, Homo sapien
tggtctagctccccagacatctagt

SEQ ID NO: 5138070 - DNA, 25 bp, Homo sapien
cctgatcctgggtgtgcagctgctg

SEQ ID NO: 5138071 - DNA, 25 bp, Homo sapien
gcagagctggtgtgctgaccggcag

SEQ ID NO: 5138072 - DNA, 25 bp, Homo sapien
agagctggtgtgctgaccggcaggc

SEQ ID NO: 5138073 - DNA, 25 bp, Homo sapien
agctggtgtgctgaccggcaggcat

SEQ ID NO: 5138074 - DNA, 25 bp, Homo sapien
attcttcaggaacaaattaaccgtg

SEQ ID NO: 5138075 - DNA, 25 bp, Homo sapien
taaccgtgataggtatggcaggaac

SEQ ID NO: 5138076 - DNA, 25 bp, Homo sapien
ggataaccaaacgtctggctgaaac

SEQ ID NO: 5138077 - DNA, 25 bp, Homo sapien
aagacttcggtcctgattcttcagg

SEQ ID NO: 5138078 - DNA, 25 bp, Homo sapien
ctgattcatctgtgatgacaccttg

SEQ ID NO: 5138079 - DNA, 25 bp, Homo sapien
tttcttatctcaaactctattgctg

SEQ ID NO: 5138080 - DNA, 25 bp, Homo sapien
aactctattgctgattcatctgtga

SEQ ID NO: 5138081 - DNA, 25 bp, Homo sapien
taggtcctccaatttcttatctcaa

SEQ ID NO: 5138082 - DNA, 25 bp, Homo sapien
agccaggaccgctgagaactgggac

SEQ ID NO: 5138083 - DNA, 25 bp, Homo sapien
cagccaggaccgctgagaactggga

SEQ ID NO: 5138084 - DNA, 25 bp, Homo sapien
ggacagtttcctgggatgagtgcca

SEQ ID NO: 5138085 - DNA, 25 bp, Homo sapien
cctgggatgagtgccagcctgagcc

SEQ ID NO: 5138086 - DNA, 25 bp, Homo sapien
ctgcgacaattgtggaggcaaagca

SEQ ID NO: 5138087 - DNA, 25 bp, Homo sapien
gctgaaatcgcagagacttttgcag

SEQ ID NO: 5138088 - DNA, 25 bp, Homo sapien
tgttcctgtagacagtcagcgatgg

SEQ ID NO: 5138089 - DNA, 25 bp, Homo sapien
tgaggagtaaaacggcacctctggc

SEQ ID NO: 5138090 - DNA, 25 bp, Homo sapien
gagcctctgatcttcgctgtcagga

SEQ ID NO: 5138091 - DNA, 25 bp, Homo sapien
caggaggcctgtccgaagttggagg

SEQ ID NO: 5138092 - DNA, 25 bp, Homo sapien
ccgaagttggaggttgaggcatgca

SEQ ID NO: 5138093 - DNA, 25 bp, Homo sapien
ggaatgcacgttccctgcctgaggg

SEQ ID NO: 5138094 - DNA, 25 bp, Homo sapien
actgccatgctccaccctgtggtgt

SEQ ID NO: 5138095 - DNA, 25 bp, Homo sapien
ggaagcactttgtcatgctgatgcc

SEQ ID NO: 5138096 - DNA, 25 bp, Homo sapien
cagtgtggtacaatccaggaaattt

SEQ ID NO: 5138097 - DNA, 25 bp, Homo sapien
gggcaggaagcactttgtcatgctg

SEQ ID NO: 5138098 - DNA, 25 bp, Homo sapien
tcccatggtctttctcatcatcaga

SEQ ID NO: 5138099 - DNA, 25 bp, Homo sapien
ggctgcatagccttcggtcctcttt

SEQ ID NO: 5138100 - DNA, 25 bp, Homo sapien
cagagctatcttcctgaaaggctgc

SEQ ID NO: 5138101 - DNA, 25 bp, Homo sapien
cagacactatatcaggaggcttgtg

SEQ ID NO: 5138102 - DNA, 25 bp, Homo sapien
ttgggtctcctcattttagaaggac

SEQ ID NO: 5138103 - DNA, 25 bp, Homo sapien
ccttgggtctcctcattttagaagg

SEQ ID NO: 5138104 - DNA, 25 bp, Homo sapien
cttgggtctcctcattttagaagga

SEQ ID NO: 5138105 - DNA, 25 bp, Homo sapien
acggaaaacggccagcagccaaatg

SEQ ID NO: 5138106 - DNA, 25 bp, Homo sapien
cggaaaacggccagcagccaaatgc

SEQ ID NO: 5138107 - DNA, 25 bp, Homo sapien
ttcacggaaaacggccagcagccaa

SEQ ID NO: 5138108 - DNA, 25 bp, Homo sapien
cacggaaaacggccagcagccaaat

SEQ ID NO: 5138109 - DNA, 25 bp, Homo sapien
tggctacagtgttagggtcatattc

SEQ ID NO: 5138110 - DNA, 25 bp, Homo sapien
tttgtagacttctcctggtcatagg

SEQ ID NO: 5138111 - DNA, 25 bp, Homo sapien
tgtagatgccttcacacttcatgcc

SEQ ID NO: 5138112 - DNA, 25 bp, Homo sapien
tactgcttccgcaaactggctacag

SEQ ID NO: 5138113 - DNA, 25 bp, Homo sapien
ttggtaagcaaattctccggaagat

SEQ ID NO: 5138114 - DNA, 25 bp, Homo sapien
tttggtaagcaaattctccggaaga

SEQ ID NO: 5138115 - DNA, 25 bp, Homo sapien
ctttggtaagcaaattctccggaag

SEQ ID NO: 5138116 - DNA, 25 bp, Homo sapien
tccatgtgcacaacgaacaaagaaa

SEQ ID NO: 5138117 - DNA, 25 bp, Homo sapien
ggtccatgtgcacaacgaacaaaga

SEQ ID NO: 5138118 - DNA, 25 bp, Homo sapien
ccatgtgcacaacgaacaaagaaat

SEQ ID NO: 5138119 - DNA, 25 bp, Homo sapien
gtccatgtgcacaacgaacaaagaa

SEQ ID NO: 5138120 - DNA, 25 bp, Homo sapien
agattgctgatctgcacagttgggc

SEQ ID NO: 5138121 - DNA, 25 bp, Homo sapien
gaagaacacatacaggactagattg

SEQ ID NO: 5138122 - DNA, 25 bp, Homo sapien
gtgtgaagaacacatacaggactag

SEQ ID NO: 5138123 - DNA, 25 bp, Homo sapien
gaacacatacaggactagattgctg

SEQ ID NO: 5138124 - DNA, 25 bp, Homo sapien
acgttagaccatcgccgagttttcg

SEQ ID NO: 5138125 - DNA, 25 bp, Homo sapien
accatcgccgagttttcgtcacttg

SEQ ID NO: 5138126 - DNA, 25 bp, Homo sapien
tggccacgttagaccatcgccgagt

SEQ ID NO: 5138127 - DNA, 25 bp, Homo sapien
tagaccatcgccgagttttcgtcac

SEQ ID NO: 5138128 - DNA, 25 bp, Homo sapien
gaaagactggctatctcttgtgcaa

SEQ ID NO: 5138129 - DNA, 25 bp, Homo sapien
aagactggctatctcttgtgcaatc

SEQ ID NO: 5138130 - DNA, 25 bp, Homo sapien
cctcttttgaaagactggctatctc

SEQ ID NO: 5138131 - DNA, 25 bp, Homo sapien
ttttgaaagactggctatctcttgt

SEQ ID NO: 5138132 - DNA, 25 bp, Homo sapien
ctgaacaaggagaatatttataact

SEQ ID NO: 5138133 - DNA, 25 bp, Homo sapien
caaggagaatatttataacttcttc

SEQ ID NO: 5138134 - DNA, 25 bp, Homo sapien
gaacaaggagaatatttataacttc

SEQ ID NO: 5138135 - DNA, 25 bp, Homo sapien
tgaacaaggagaatatttataactt

SEQ ID NO: 5138136 - DNA, 25 bp, Homo sapien
ctgctactggctcgaggatgccatt

SEQ ID NO: 5138137 - DNA, 25 bp, Homo sapien
tgcatgcgcggctcgatgacggcct

SEQ ID NO: 5138138 - DNA, 25 bp, Homo sapien
ttcttgggcgtctggatggcacctc

SEQ ID NO: 5138139 - DNA, 25 bp, Homo sapien
gacggcctcactctcctcgtgaatt

SEQ ID NO: 5138140 - DNA, 25 bp, Homo sapien
tgctaggacaggagccgcgcatttc

SEQ ID NO: 5138141 - DNA, 25 bp, Homo sapien
tccacaggcagaggcaaccctctgt

SEQ ID NO: 5138142 - DNA, 25 bp, Homo sapien
gacaggagccgcgcatttccccaag

SEQ ID NO: 5138143 - DNA, 25 bp, Homo sapien
aggacaggagccgcgcatttcccca

SEQ ID NO: 5138144 - DNA, 25 bp, Homo sapien
ctgaggagggaatctgtagcatgca

SEQ ID NO: 5138145 - DNA, 25 bp, Homo sapien
ggaactggggacgaagatgtttcat

SEQ ID NO: 5138146 - DNA, 25 bp, Homo sapien
ggaatctgtagcatgcagaagcagt

SEQ ID NO: 5138147 - DNA, 25 bp, Homo sapien
gagggaatctgtagcatgcagaagc

SEQ ID NO: 5138148 - DNA, 25 bp, Homo sapien
cggtacactctggaaccctgcttct

SEQ ID NO: 5138149 - DNA, 25 bp, Homo sapien
ctcgtctcttcagaatccagggagc

SEQ ID NO: 5138150 - DNA, 25 bp, Homo sapien
aagtgggatcttcccctaactcaca

SEQ ID NO: 5138151 - DNA, 25 bp, Homo sapien
gttttaccaactctgtcctcgtctc

SEQ ID NO: 5138152 - DNA, 25 bp, Homo sapien
ggatcagctaaaggttgaggaaatc

SEQ ID NO: 5138153 - DNA, 25 bp, Homo sapien
caatatccaagccatctgaaggatc

SEQ ID NO: 5138154 - DNA, 25 bp, Homo sapien
tctgaaggatcagctaaaggttgag

SEQ ID NO: 5138155 - DNA, 25 bp, Homo sapien
gccatctgaaggatcagctaaaggt

SEQ ID NO: 5138156 - DNA, 25 bp, Homo sapien
tgaatgggatagacttggaaaaatg

SEQ ID NO: 5138157 - DNA, 25 bp, Homo sapien
gaaattcattcctagtgggcccttg

SEQ ID NO: 5138158 - DNA, 25 bp, Homo sapien
gttgagcatgggacagccacactac

SEQ ID NO: 5138159 - DNA, 25 bp, Homo sapien
tgcagttggaaacaatgaatgggat

SEQ ID NO: 5138160 - DNA, 25 bp, Homo sapien
gctcctcatccaagggaaaaggtgg

SEQ ID NO: 5138161 - DNA, 25 bp, Homo sapien
cccaagcacttctgatttcctaatc

SEQ ID NO: 5138162 - DNA, 25 bp, Homo sapien
ttgtctgtgactgccgtgcgtaccc

SEQ ID NO: 5138163 - DNA, 25 bp, Homo sapien
cctggagcggagcgccttgtcctag

SEQ ID NO: 5138164 - DNA, 25 bp, Homo sapien
cctgttggcgagcttggcagccagg

SEQ ID NO: 5138165 - DNA, 25 bp, Homo sapien
gcctgttggcgagcttggcagccag

SEQ ID NO: 5138166 - DNA, 25 bp, Homo sapien
tgttggcgagcttggcagccaggtg

SEQ ID NO: 5138167 - DNA, 25 bp, Homo sapien
ctgttggcgagcttggcagccaggt

SEQ ID NO: 5138168 - DNA, 25 bp, Homo sapien
aggggcataaactatggtggaagaa

SEQ ID NO: 5138169 - DNA, 25 bp, Homo sapien
aactgtgaggggcataaactatggt

SEQ ID NO: 5138170 - DNA, 25 bp, Homo sapien
tgaactgtgaggggcataaactatg

SEQ ID NO: 5138171 - DNA, 25 bp, Homo sapien
gcataaactatggtggaagaataaa

SEQ ID NO: 5138172 - DNA, 25 bp, Homo sapien
tcttggtgaagtccactgcagcagt

SEQ ID NO: 5138173 - DNA, 25 bp, Homo sapien
ttggtgaagtccactgcagcagtcc

SEQ ID NO: 5138174 - DNA, 25 bp, Homo sapien
tctccaaggctcttgtgtaccttct

SEQ ID NO: 5138175 - DNA, 25 bp, Homo sapien
ctttctttgggggtcgcagtctcca

SEQ ID NO: 5138176 - DNA, 25 bp, Homo sapien
tcagggtcctttggagaccagctct

SEQ ID NO: 5138177 - DNA, 25 bp, Homo sapien
gggtggctggctccaaggacttccc

SEQ ID NO: 5138178 - DNA, 25 bp, Homo sapien
cagctctgcccagaactggtctgga

SEQ ID NO: 5138179 - DNA, 25 bp, Homo sapien
gtggctggctccaaggacttcccca

SEQ ID NO: 5138180 - DNA, 25 bp, Homo sapien
aaagggtcgtccccaggtcgcagtg

SEQ ID NO: 5138181 - DNA, 25 bp, Homo sapien
tgatctcactgtagggagcctggta

SEQ ID NO: 5138182 - DNA, 25 bp, Homo sapien
gcctggccgtacttagaaatgatct

SEQ ID NO: 5138183 - DNA, 25 bp, Homo sapien
tggatctcagagcaccattggaagg

SEQ ID NO: 5138184 - DNA, 25 bp, Homo sapien
ggtgcaccatccaagcatgacaggg

SEQ ID NO: 5138185 - DNA, 25 bp, Homo sapien
gaaggcctcatcagatccagctttc

SEQ ID NO: 5138186 - DNA, 25 bp, Homo sapien
atattgttcgtggaaagaaatttga

SEQ ID NO: 5138187 - DNA, 25 bp, Homo sapien
gatatttgttcaacataatccctgg

SEQ ID NO: 5138188 - DNA, 25 bp, Homo sapien
aaatatctagtgaatatagagcaag

SEQ ID NO: 5138189 - DNA, 25 bp, Homo sapien
gacacagcccctcactttggcttcc

SEQ ID NO: 5138190 - DNA, 25 bp, Homo sapien
agacacagcccctcactttggcttc

SEQ ID NO: 5138191 - DNA, 25 bp, Homo sapien
gaatctcttgactgcttagtttgtc

SEQ ID NO: 5138192 - DNA, 25 bp, Homo sapien
aggaatggaatctcttgactgctta

SEQ ID NO: 5138193 - DNA, 25 bp, Homo sapien
ttgactgcttagtttgtcttccctc

SEQ ID NO: 5138194 - DNA, 25 bp, Homo sapien
gactgcttagtttgtcttccctcac

SEQ ID NO: 5138195 - DNA, 25 bp, Homo sapien
gttcagggaaatcgacctcgtgtgg

SEQ ID NO: 5138196 - DNA, 25 bp, Homo sapien
ttcagggaaatcgacctcgtgtggg

SEQ ID NO: 5138197 - DNA, 25 bp, Homo sapien
tcagggaaatcgacctcgtgtgggt

SEQ ID NO: 5138198 - DNA, 25 bp, Homo sapien
cagggaaatcgacctcgtgtgggtc

SEQ ID NO: 5138199 - DNA, 25 bp, Homo sapien
ctgcatgggtccatgggatgggtct

SEQ ID NO: 5138200 - DNA, 25 bp, Homo sapien
gcatgggtccatgggatgggtctgt

SEQ ID NO: 5138201 - DNA, 25 bp, Homo sapien
cgtagcagctggcagcatgtgcagt

SEQ ID NO: 5138202 - DNA, 25 bp, Homo sapien
caggccgtagcagctggcagcatgt

SEQ ID NO: 5138203 - DNA, 25 bp, Homo sapien
cagtgcaggccgtagcagctggcag

SEQ ID NO: 5138204 - DNA, 25 bp, Homo sapien
gcatgtgcagtgaccgtgttcgtgg

SEQ ID NO: 5138205 - DNA, 25 bp, Homo sapien
tactagacctcgcttctcccactcg

SEQ ID NO: 5138206 - DNA, 25 bp, Homo sapien
ccactcgctgtcgtgttcggtttcc

SEQ ID NO: 5138207 - DNA, 25 bp, Homo sapien
tctcccactcgctgtcgtgttcggt

SEQ ID NO: 5138208 - DNA, 25 bp, Homo sapien
tccctctactagacctcgcttctcc

SEQ ID NO: 5138209 - DNA, 25 bp, Homo sapien
ttccttaagaaatctgaacctccag

SEQ ID NO: 5138210 - DNA, 25 bp, Homo sapien
tttccttaagaaatctgaacctcca

SEQ ID NO: 5138211 - DNA, 25 bp, Homo sapien
cagtctcctttcctctgtggcccat

SEQ ID NO: 5138212 - DNA, 25 bp, Homo sapien
gaagtagctcagatgcagaagacct

SEQ ID NO: 5138213 - DNA, 25 bp, Homo sapien
gtctcaaatctctcatggaagtagc

SEQ ID NO: 5138214 - DNA, 25 bp, Homo sapien
gaagacctgcacacttatccaggag

SEQ ID NO: 5138215 - DNA, 25 bp, Homo sapien
gacctgcacacttatccaggagcat

SEQ ID NO: 5138216 - DNA, 25 bp, Homo sapien
gtgctgatgactacagatgtgggat

SEQ ID NO: 5138217 - DNA, 25 bp, Homo sapien
tcactttgtgtagtaccagtcctgg

SEQ ID NO: 5138218 - DNA, 25 bp, Homo sapien
gactacagatgtgggatagcctttg

SEQ ID NO: 5138219 - DNA, 25 bp, Homo sapien
ctggaacaagattaaacctgaattc

SEQ ID NO: 5138220 - DNA, 25 bp, Homo sapien
aagctggatctgctattttctacca

SEQ ID NO: 5138221 - DNA, 25 bp, Homo sapien
gcacttttgtgagaaggcacagatg

SEQ ID NO: 5138222 - DNA, 25 bp, Homo sapien
ctgctttctttaaggctgatgggaa

SEQ ID NO: 5138223 - DNA, 25 bp, Homo sapien
ttttctaccagcacttttgtgagaa

SEQ ID NO: 5138224 - DNA, 25 bp, Homo sapien
ctgggaactacgggcaggaaaagca

SEQ ID NO: 5138225 - DNA, 25 bp, Homo sapien
ttgaggacaccaactgctgtagccc

SEQ ID NO: 5138226 - DNA, 25 bp, Homo sapien
cctctgaggaagtcgcacgtgtgct

SEQ ID NO: 5138227 - DNA, 25 bp, Homo sapien
gctgtagcccaggtaagaagtgcct

SEQ ID NO: 5138228 - DNA, 25 bp, Homo sapien
caggagtgaagagtcgagtggagga

SEQ ID NO: 5138229 - DNA, 25 bp, Homo sapien
tgaagagtcgagtggaggaagaagg

SEQ ID NO: 5138230 - DNA, 25 bp, Homo sapien
ggagtgaagagtcgagtggaggaag

SEQ ID NO: 5138231 - DNA, 25 bp, Homo sapien
tgcaggagtgaagagtcgagtggag

SEQ ID NO: 5138232 - DNA, 25 bp, Homo sapien
accctgagcagggaactggagcggc

SEQ ID NO: 5138233 - DNA, 25 bp, Homo sapien
gcaagtttgcccttgtgccaccctg

SEQ ID NO: 5138234 - DNA, 25 bp, Homo sapien
agaacagttttccaggagcctggaa

SEQ ID NO: 5138235 - DNA, 25 bp, Homo sapien
accaggttcgaatctctctgtttgg

SEQ ID NO: 5138236 - DNA, 25 bp, Homo sapien
gcatcggtctcttgtcaaccaactt

SEQ ID NO: 5138237 - DNA, 25 bp, Homo sapien
cagggatagattctgactgcccttg

SEQ ID NO: 5138238 - DNA, 25 bp, Homo sapien
aacttctctagactcccaaggacca

SEQ ID NO: 5138239 - DNA, 25 bp, Homo sapien
tttatcacagcaagaatgagcaggg

SEQ ID NO: 5138240 - DNA, 25 bp, Homo sapien
ctggttgaacgtagaggatacggca

SEQ ID NO: 5138241 - DNA, 25 bp, Homo sapien
tgatgcctggtgtgttgcataagcc

SEQ ID NO: 5138242 - DNA, 25 bp, Homo sapien
cctggtgtgttgcataagcctcctg

SEQ ID NO: 5138243 - DNA, 25 bp, Homo sapien
gatacggcagggtgcaaaatgatgc

SEQ ID NO: 5138244 - DNA, 25 bp, Homo sapien
ctgaagaccaagatcccgggaccct

SEQ ID NO: 5138245 - DNA, 25 bp, Homo sapien
tggtccccctgaagaccaagatccc

SEQ ID NO: 5138246 - DNA, 25 bp, Homo sapien
tgaagaccaagatcccgggaccctg

SEQ ID NO: 5138247 - DNA, 25 bp, Homo sapien
ctggtccccctgaagaccaagatcc

SEQ ID NO: 5138248 - DNA, 25 bp, Homo sapien
tcaagtcctctccatggtctgtggg

SEQ ID NO: 5138249 - DNA, 25 bp, Homo sapien
ctgagtcaaggtcaatggcaccaac

SEQ ID NO: 5138250 - DNA, 25 bp, Homo sapien
actcgaagcacttgcgaactgaggg

SEQ ID NO: 5138251 - DNA, 25 bp, Homo sapien
cagatggcagcagtgctctatggag

SEQ ID NO: 5138252 - DNA, 25 bp, Homo sapien
aaagtctctgcagtgcccttatcca

SEQ ID NO: 5138253 - DNA, 25 bp, Homo sapien
agtctctgcagtgcccttatccaca

SEQ ID NO: 5138254 - DNA, 25 bp, Homo sapien
cacagatcgaggtctgcatctcaca

SEQ ID NO: 5138255 - DNA, 25 bp, Homo sapien
cacccacacagatcgaggtctgcat

SEQ ID NO: 5138256 - DNA, 25 bp, Homo sapien
tctctcgttccctattcacctccat

SEQ ID NO: 5138257 - DNA, 25 bp, Homo sapien
ccaccttcattctctcgttccctat

SEQ ID NO: 5138258 - DNA, 25 bp, Homo sapien
ccttcattctctcgttccctattca

SEQ ID NO: 5138259 - DNA, 25 bp, Homo sapien
ttcattctctcgttccctattcacc

SEQ ID NO: 5138260 - DNA, 25 bp, Homo sapien
tcttgatatgtttgcacacatttgc

SEQ ID NO: 5138261 - DNA, 25 bp, Homo sapien
cttttcttgatatgtttgcacacat

SEQ ID NO: 5138262 - DNA, 25 bp, Homo sapien
tgatatgtttgcacacatttgctcc

SEQ ID NO: 5138263 - DNA, 25 bp, Homo sapien
ttcttgatatgtttgcacacatttg

SEQ ID NO: 5138264 - DNA, 25 bp, Homo sapien
ggaactaactttgagtttgatcctg

SEQ ID NO: 5138265 - DNA, 25 bp, Homo sapien
aactttgagtttgatcctgtgcttc

SEQ ID NO: 5138266 - DNA, 25 bp, Homo sapien
aatcaggactggaactaactttgag

SEQ ID NO: 5138267 - DNA, 25 bp, Homo sapien
accaaaatcaggactggaactaact

SEQ ID NO: 5138268 - DNA, 25 bp, Homo sapien
tctcttttgtgcacgcgcacagcgc

SEQ ID NO: 5138269 - DNA, 25 bp, Homo sapien
gctctcttttgtgcacgcgcacagc

SEQ ID NO: 5138270 - DNA, 25 bp, Homo sapien
aaccagctgtgccgcagcgcccccg

SEQ ID NO: 5138271 - DNA, 25 bp, Homo sapien
ctcttttgtgcacgcgcacagcgcc

SEQ ID NO: 5138272 - DNA, 25 bp, Homo sapien
gagaagacatagtcccggaggacga

SEQ ID NO: 5138273 - DNA, 25 bp, Homo sapien
tttgttaggcgggatccggcaagac

SEQ ID NO: 5138274 - DNA, 25 bp, Homo sapien
ggtagagaccgcgagaagacatagt

SEQ ID NO: 5138275 - DNA, 25 bp, Homo sapien
ctgtggcgctgctttacgtgcggaa

SEQ ID NO: 5138276 - DNA, 25 bp, Homo sapien
tgtgaaaagggcaccgggataatcg

SEQ ID NO: 5138277 - DNA, 25 bp, Homo sapien
cccaaccctgtgtaacagttctgag

SEQ ID NO: 5138278 - DNA, 25 bp, Homo sapien
gagcagaatcctttctacagggtgg

SEQ ID NO: 5138279 - DNA, 25 bp, Homo sapien
caccatttaagagtgtctaggccag

SEQ ID NO: 5138280 - DNA, 25 bp, Homo sapien
tgacaggaagggaggaatgcacacc

SEQ ID NO: 5138281 - DNA, 25 bp, Homo sapien
acaccagtctgtgaactatttctga

SEQ ID NO: 5138282 - DNA, 25 bp, Homo sapien
gaaagtgtcaaaagatccatagccc

SEQ ID NO: 5138283 - DNA, 25 bp, Homo sapien
taagtctagtatgtagggtgccacg

SEQ ID NO: 5138284 - DNA, 25 bp, Homo sapien
cgtaagatgtcattccattcagtgt

SEQ ID NO: 5138285 - DNA, 25 bp, Homo sapien
taagataccctttttgcgtaagatg

SEQ ID NO: 5138286 - DNA, 25 bp, Homo sapien
gataccctttttgcgtaagatgtca

SEQ ID NO: 5138287 - DNA, 25 bp, Homo sapien
tgcgtaagatgtcattccattcagt

SEQ ID NO: 5138288 - DNA, 25 bp, Homo sapien
tccaaagtcatatcttcatatgttt

SEQ ID NO: 5138289 - DNA, 25 bp, Homo sapien
catttcaatagcacgttcatcctcc

SEQ ID NO: 5138290 - DNA, 25 bp, Homo sapien
gtcttcatgatcctccagctcttcc

SEQ ID NO: 5138291 - DNA, 25 bp, Homo sapien
cattaaactcgtcttcatgatcctc

SEQ ID NO: 5138292 - DNA, 25 bp, Homo sapien
tttccactcagccagtctccgccgt

SEQ ID NO: 5138293 - DNA, 25 bp, Homo sapien
agatgacccacaagccctcgccagc

SEQ ID NO: 5138294 - DNA, 25 bp, Homo sapien
acaagccctcgccagctttggtaac

SEQ ID NO: 5138295 - DNA, 25 bp, Homo sapien
gatctccaaaacttctccgaattta

SEQ ID NO: 5138296 - DNA, 25 bp, Homo sapien
ggaccaataaactgagccttgatat

SEQ ID NO: 5138297 - DNA, 25 bp, Homo sapien
tccactgaggtgctgatttatcagg

SEQ ID NO: 5138298 - DNA, 25 bp, Homo sapien
tccttccaggtaaacaaatatcgtg

SEQ ID NO: 5138299 - DNA, 25 bp, Homo sapien
ggtaaacaaatatcgtgggcagatt

SEQ ID NO: 5138300 - DNA, 25 bp, Homo sapien
gcttccgtcctcatacacaggcaga

SEQ ID NO: 5138301 - DNA, 25 bp, Homo sapien
gatgagagattaaacgtgcttccgt

SEQ ID NO: 5138302 - DNA, 25 bp, Homo sapien
gaacttgacccaccatcgtaacagg

SEQ ID NO: 5138303 - DNA, 25 bp, Homo sapien
cctgattacgcaactaagatgagag

SEQ ID NO: 5138304 - DNA, 25 bp, Homo sapien
cggaatcgctgtccctcttcatgag

SEQ ID NO: 5138305 - DNA, 25 bp, Homo sapien
catgaggacagagcgccgcactgag

SEQ ID NO: 5138306 - DNA, 25 bp, Homo sapien
aggacagcaacacgtcttcaatcgg

SEQ ID NO: 5138307 - DNA, 25 bp, Homo sapien
ccaggtctgtcataattgctccaga

SEQ ID NO: 5138308 - DNA, 25 bp, Homo sapien
caatttgtcacaagaaagttcggca

SEQ ID NO: 5138309 - DNA, 25 bp, Homo sapien
aagttcggcatgtgatagaagctgt

SEQ ID NO: 5138310 - DNA, 25 bp, Homo sapien
tatttaacagaatctccagcaatga

SEQ ID NO: 5138311 - DNA, 25 bp, Homo sapien
tcggcatgtgatagaagctgtagcc

SEQ ID NO: 5138312 - DNA, 25 bp, Homo sapien
aaaatagtgactaggttttatggct

SEQ ID NO: 5138313 - DNA, 25 bp, Homo sapien
ccagggagaagcggaaatcaagacg

SEQ ID NO: 5138314 - DNA, 25 bp, Homo sapien
gggagaagcggaaatcaagacggat

SEQ ID NO: 5138315 - DNA, 25 bp, Homo sapien
aagcggaaatcaagacggatgatta

SEQ ID NO: 5138316 - DNA, 25 bp, Homo sapien
gagaagcggaaatcaagacggatga

SEQ ID NO: 5138317 - DNA, 25 bp, Homo sapien
acggaaattaacagagtgagtactc

SEQ ID NO: 5138318 - DNA, 25 bp, Homo sapien
aaccagctgtcacggaaattaacag

SEQ ID NO: 5138319 - DNA, 25 bp, Homo sapien
actccctcactatcaattgtgagga

SEQ ID NO: 5138320 - DNA, 25 bp, Homo sapien
gtactcattccattgtgcatacccc

SEQ ID NO: 5138321 - DNA, 25 bp, Homo sapien
tttaataaagctgcatacagtttgg

SEQ ID NO: 5138322 - DNA, 25 bp, Homo sapien
tgtcctgcctgaaataccatgattg

SEQ ID NO: 5138323 - DNA, 25 bp, Homo sapien
catgtcctgcctgaaataccatgat

SEQ ID NO: 5138324 - DNA, 25 bp, Homo sapien
gaaagtatctttaataaagctgcat

SEQ ID NO: 5138325 - DNA, 25 bp, Homo sapien
gccaccgtcgctgccgataccacca

SEQ ID NO: 5138326 - DNA, 25 bp, Homo sapien
ccgtcgctgccgataccaccatgcc

SEQ ID NO: 5138327 - DNA, 25 bp, Homo sapien
agcccacgggccgctgcatcccacg

SEQ ID NO: 5138328 - DNA, 25 bp, Homo sapien
caagcccacgggccgctgcatccca

SEQ ID NO: 5138329 - DNA, 25 bp, Homo sapien
acgggccgctgcatcccacgcccag

SEQ ID NO: 5138330 - DNA, 25 bp, Homo sapien
ccacgggccgctgcatcccacgccc

SEQ ID NO: 5138331 - DNA, 25 bp, Homo sapien
tccacattgatttgagctctacctg

SEQ ID NO: 5138332 - DNA, 25 bp, Homo sapien
tacactcagcgagactgtaacgact

SEQ ID NO: 5138333 - DNA, 25 bp, Homo sapien
gatgctgcataagtcctccaacctt

SEQ ID NO: 5138334 - DNA, 25 bp, Homo sapien
gagtaagtacctgttggatgctgca

SEQ ID NO: 5138335 - DNA, 25 bp, Homo sapien
ccgactcctccagggtaagcaggcc

SEQ ID NO: 5138336 - DNA, 25 bp, Homo sapien
tcctccagggtaagcaggccctact

SEQ ID NO: 5138337 - DNA, 25 bp, Homo sapien
ctgtggaagctgctcccgactcctc

SEQ ID NO: 5138338 - DNA, 25 bp, Homo sapien
gactcctccagggtaagcaggccct

SEQ ID NO: 5138339 - DNA, 25 bp, Homo sapien
tgccaaagccactggacaaaatgta

SEQ ID NO: 5138340 - DNA, 25 bp, Homo sapien
aaagctctgtcctcaacaagaacaa

SEQ ID NO: 5138341 - DNA, 25 bp, Homo sapien
aggctgccattctgtgctgaacttc

SEQ ID NO: 5138342 - DNA, 25 bp, Homo sapien
caaaatctgggccagccttcaggct

SEQ ID NO: 5138343 - DNA, 25 bp, Homo sapien
tttgccctgatcagcagggccccaa

SEQ ID NO: 5138344 - DNA, 25 bp, Homo sapien
ccctgatcagcagggccccaaagga

SEQ ID NO: 5138345 - DNA, 25 bp, Homo sapien
agctttgccctgatcagcagggccc

SEQ ID NO: 5138346 - DNA, 25 bp, Homo sapien
tcccaaagctttgccctgatcagca

SEQ ID NO: 5138347 - DNA, 25 bp, Homo sapien
gggctacatgtaagatcccaggtac

SEQ ID NO: 5138348 - DNA, 25 bp, Homo sapien
gatgcaggggctacatgtaagatcc

SEQ ID NO: 5138349 - DNA, 25 bp, Homo sapien
gctacatgtaagatcccaggtactc

SEQ ID NO: 5138350 - DNA, 25 bp, Homo sapien
tacatgtaagatcccaggtactcat

SEQ ID NO: 5138351 - DNA, 25 bp, Homo sapien
tggagagcaaaagccgcctgttcag

SEQ ID NO: 5138352 - DNA, 25 bp, Homo sapien
tcaggttgggatgtaacttcaggtc

SEQ ID NO: 5138353 - DNA, 25 bp, Homo sapien
ttcaggtctgttgggcatcagagcc

SEQ ID NO: 5138354 - DNA, 25 bp, Homo sapien
ccgcctgttcaggttgggatgtaac

SEQ ID NO: 5138355 - DNA, 25 bp, Homo sapien
gggcttccaagcactttccgttcac

SEQ ID NO: 5138356 - DNA, 25 bp, Homo sapien
caacaggccggattctgttctatga

SEQ ID NO: 5138357 - DNA, 25 bp, Homo sapien
cacagaagacactaattaatggagg

SEQ ID NO: 5138358 - DNA, 25 bp, Homo sapien
ggtatacttgtaggcaggatttccc

SEQ ID NO: 5138359 - DNA, 25 bp, Homo sapien
gcgtggccgcttccttgcgtgacag

SEQ ID NO: 5138360 - DNA, 25 bp, Homo sapien
ccccggtgtattgcaagcttgtcat

SEQ ID NO: 5138361 - DNA, 25 bp, Homo sapien
ggcacggatccctggtagatcacgc

SEQ ID NO: 5138362 - DNA, 25 bp, Homo sapien
tgccgggttagtggaggatgagttc

SEQ ID NO: 5138363 - DNA, 25 bp, Homo sapien
aatccccggcattgagacaaatgct

SEQ ID NO: 5138364 - DNA, 25 bp, Homo sapien
gcgtctagagaacagcgggtgctcc

SEQ ID NO: 5138365 - DNA, 25 bp, Homo sapien
cggcattgagacaaatgctagcgct

SEQ ID NO: 5138366 - DNA, 25 bp, Homo sapien
gtctagagaacagcgggtgctccag

SEQ ID NO: 5138367 - DNA, 25 bp, Homo sapien
acacacgcgacggcccagagatgtt

SEQ ID NO: 5138368 - DNA, 25 bp, Homo sapien
cgcgacggcccagagatgttgccat

SEQ ID NO: 5138369 - DNA, 25 bp, Homo sapien
gtcctccacacacgcgacggcccag

SEQ ID NO: 5138370 - DNA, 25 bp, Homo sapien
acacgcgacggcccagagatgttgc

SEQ ID NO: 5138371 - DNA, 25 bp, Homo sapien
tgtgccttcctccacgcatggaggt

SEQ ID NO: 5138372 - DNA, 25 bp, Homo sapien
ctcccacctcggcagtgtgaacttt

SEQ ID NO: 5138373 - DNA, 25 bp, Homo sapien
tgccctccatacagcggggcctgtg

SEQ ID NO: 5138374 - DNA, 25 bp, Homo sapien
catggaggtaacaagactcagaatt

SEQ ID NO: 5138375 - DNA, 25 bp, Homo sapien
ggcacagaccccacatcaaatggcc

SEQ ID NO: 5138376 - DNA, 25 bp, Homo sapien
ctccactgagggcacattgagggga

SEQ ID NO: 5138377 - DNA, 25 bp, Homo sapien
acagaccccacatcaaatggccaga

SEQ ID NO: 5138378 - DNA, 25 bp, Homo sapien
ccccacatcaaatggccagagaagc

SEQ ID NO: 5138379 - DNA, 25 bp, Homo sapien
gagcatcagcagaagacgcagggca

SEQ ID NO: 5138380 - DNA, 25 bp, Homo sapien
tcatggcttgtcacacgctgctttt

SEQ ID NO: 5138381 - DNA, 25 bp, Homo sapien
cagcagaagacgcagggcagtgttt

SEQ ID NO: 5138382 - DNA, 25 bp, Homo sapien
atggcttgtcacacgctgcttttga

SEQ ID NO: 5138383 - DNA, 25 bp, Homo sapien
tgatgggtaggtgatggcaggctcc

SEQ ID NO: 5138384 - DNA, 25 bp, Homo sapien
tgcacgcatcatttgtgctcagaag

SEQ ID NO: 5138385 - DNA, 25 bp, Homo sapien
ccatgccctgcacgcatcatttgtg

SEQ ID NO: 5138386 - DNA, 25 bp, Homo sapien
cgcatcatttgtgctcagaagagat

SEQ ID NO: 5138387 - DNA, 25 bp, Homo sapien
caggattctgacttccaggctgtcc

SEQ ID NO: 5138388 - DNA, 25 bp, Homo sapien
tccaggctgtccagctccaccaggg

SEQ ID NO: 5138389 - DNA, 25 bp, Homo sapien
ggctgtccagctccaccagggacat

SEQ ID NO: 5138390 - DNA, 25 bp, Homo sapien
caggctgtccagctccaccagggac

SEQ ID NO: 5138391 - DNA, 25 bp, Homo sapien
tcggagagtcagtgtggtgtcaggg

SEQ ID NO: 5138392 - DNA, 25 bp, Homo sapien
caaggccccgatgcagaggtgtaga

SEQ ID NO: 5138393 - DNA, 25 bp, Homo sapien
gggcaaggccccgatgcagaggtgt

SEQ ID NO: 5138394 - DNA, 25 bp, Homo sapien
tctgagaggtgtcggagagtcagtg

SEQ ID NO: 5138395 - DNA, 25 bp, Homo sapien
tgtgagtcctgagtatgagcctttc

SEQ ID NO: 5138396 - DNA, 25 bp, Homo sapien
gaaagtgctctgactcagggcagca

SEQ ID NO: 5138397 - DNA, 25 bp, Homo sapien
ggacggccgtgctcattcttcctaa

SEQ ID NO: 5138398 - DNA, 25 bp, Homo sapien
gagtatgaagtgagacaaagtcccc

SEQ ID NO: 5138399 - DNA, 25 bp, Homo sapien
ctgtggtcagctgcattgatccttg

SEQ ID NO: 5138400 - DNA, 25 bp, Homo sapien
tcacagacatgtggcgcccacacag

SEQ ID NO: 5138401 - DNA, 25 bp, Homo sapien
gcctgaactatttctagctcccctg

SEQ ID NO: 5138402 - DNA, 25 bp, Homo sapien
gctttggacaagaataagaattgcc

SEQ ID NO: 5138403 - DNA, 25 bp, Homo sapien
ggtgttgagagcattcgatgagtga

SEQ ID NO: 5138404 - DNA, 25 bp, Homo sapien
aggaggtgttgagagcattcgatga

SEQ ID NO: 5138405 - DNA, 25 bp, Homo sapien
gagtgagtgaacacaaaggacatcg

SEQ ID NO: 5138406 - DNA, 25 bp, Homo sapien
actgtatatgtggtcgctaatagca

SEQ ID NO: 5138407 - DNA, 25 bp, Homo sapien
tttctgttcaggtccgcatggtgac

SEQ ID NO: 5138408 - DNA, 25 bp, Homo sapien
cctcatccagggtttccaccagcca

SEQ ID NO: 5138409 - DNA, 25 bp, Homo sapien
tcaggtccgcatggtgacccactga

SEQ ID NO: 5138410 - DNA, 25 bp, Homo sapien
catggtgacccactgacctactttc

SEQ ID NO: 5138411 - DNA, 25 bp, Homo sapien
ccactttaaagcctggctttcctca

SEQ ID NO: 5138412 - DNA, 25 bp, Homo sapien
actttaaagcctggctttcctcagg

SEQ ID NO: 5138413 - DNA, 25 bp, Homo sapien
cagccccactttaaagcctggcttt

SEQ ID NO: 5138414 - DNA, 25 bp, Homo sapien
gcagccccactttaaagcctggctt

SEQ ID NO: 5138415 - DNA, 25 bp, Homo sapien
ttgttccatgccaaaggtgtctgca

SEQ ID NO: 5138416 - DNA, 25 bp, Homo sapien
cttgttccatgccaaaggtgtctgc

SEQ ID NO: 5138417 - DNA, 25 bp, Homo sapien
ctcttgttccatgccaaaggtgtct

SEQ ID NO: 5138418 - DNA, 25 bp, Homo sapien
ttctcttgttccatgccaaaggtgt

SEQ ID NO: 5138419 - DNA, 25 bp, Homo sapien
gaccctatgtctttcctccaaatgt

SEQ ID NO: 5138420 - DNA, 25 bp, Homo sapien
cacacaatgtgcatagaccctatgt

SEQ ID NO: 5138421 - DNA, 25 bp, Homo sapien
tagaccctatgtctttcctccaaat

SEQ ID NO: 5138422 - DNA, 25 bp, Homo sapien
ctttagtaagctccacacaatgtgc

SEQ ID NO: 5138423 - DNA, 25 bp, Homo sapien
caaagtcgccaggtctagagactcc

SEQ ID NO: 5138424 - DNA, 25 bp, Homo sapien
tccctttagccaaagtcgccaggtc

SEQ ID NO: 5138425 - DNA, 25 bp, Homo sapien
caggtttgcaaggagacttctggtg

SEQ ID NO: 5138426 - DNA, 25 bp, Homo sapien
gaggcccggatcatcttccacaggt

SEQ ID NO: 5138427 - DNA, 25 bp, Homo sapien
cctgcaggcaaatttgggggtgtcc

SEQ ID NO: 5138428 - DNA, 25 bp, Homo sapien
aggaatcagaggctactgctgtggg

SEQ ID NO: 5138429 - DNA, 25 bp, Homo sapien
tcagtgcagggggtggagtcgagcg

SEQ ID NO: 5138430 - DNA, 25 bp, Homo sapien
tcagaggctactgctgtgggccaga

SEQ ID NO: 5138431 - DNA, 25 bp, Homo sapien
tccctgtgttcatctcgtcgctggt

SEQ ID NO: 5138432 - DNA, 25 bp, Homo sapien
cttgcttattgctcaccattgttgg

SEQ ID NO: 5138433 - DNA, 25 bp, Homo sapien
tgttgaggagccatcattatcacac

SEQ ID NO: 5138434 - DNA, 25 bp, Homo sapien
tcgtgcacaattgcatggaacttgc

SEQ ID NO: 5138435 - DNA, 25 bp, Homo sapien
ttccctgagaagaccattggcatat

SEQ ID NO: 5138436 - DNA, 25 bp, Homo sapien
tgtcctcgaaaaatcactgggtgtg

SEQ ID NO: 5138437 - DNA, 25 bp, Homo sapien
tcccgggtgatggttctcatggcaa

SEQ ID NO: 5138438 - DNA, 25 bp, Homo sapien
tgcattcttaaaacaggagtcccgg

SEQ ID NO: 5138439 - DNA, 25 bp, Homo sapien
ccgtgggaatatgctccatgggctg

SEQ ID NO: 5138440 - DNA, 25 bp, Homo sapien
agggggtcactacgctgggcttctc

SEQ ID NO: 5138441 - DNA, 25 bp, Homo sapien
ccaggctgccccgtgggaatatgct

SEQ ID NO: 5138442 - DNA, 25 bp, Homo sapien
ggtcactacgctgggcttctccatc

SEQ ID NO: 5138443 - DNA, 25 bp, Homo sapien
ggatcctcagtagaacaggaacaag

SEQ ID NO: 5138444 - DNA, 25 bp, Homo sapien
ctcgaggatcctcagtagaacagga

SEQ ID NO: 5138445 - DNA, 25 bp, Homo sapien
tcgaggatcctcagtagaacaggaa

SEQ ID NO: 5138446 - DNA, 25 bp, Homo sapien
gaggatcctcagtagaacaggaaca

SEQ ID NO: 5138447 - DNA, 25 bp, Homo sapien
agcaaacctacagttcagacgaacg

SEQ ID NO: 5138448 - DNA, 25 bp, Homo sapien
agttcagacgaacgccctcgtttct

SEQ ID NO: 5138449 - DNA, 25 bp, Homo sapien
ccggggcatcgtccagccataggaa

SEQ ID NO: 5138450 - DNA, 25 bp, Homo sapien
gtcatatcctgactatttcgccggg

SEQ ID NO: 5138451 - DNA, 25 bp, Homo sapien
gctgtttttgctgtgcacagactgg

SEQ ID NO: 5138452 - DNA, 25 bp, Homo sapien
tgtgcggatcccgtcattgacagag

SEQ ID NO: 5138453 - DNA, 25 bp, Homo sapien
tttgggtttatgactccagaggcgg

SEQ ID NO: 5138454 - DNA, 25 bp, Homo sapien
ccagaggcggagaagcgtgttccct

SEQ ID NO: 5138455 - DNA, 25 bp, Homo sapien
ttcccattcaaagggactgacgtac

SEQ ID NO: 5138456 - DNA, 25 bp, Homo sapien
tttctgatttcccattcaaagggac

SEQ ID NO: 5138457 - DNA, 25 bp, Homo sapien
tgatttcccattcaaagggactgac

SEQ ID NO: 5138458 - DNA, 25 bp, Homo sapien
tctgatttcccattcaaagggactg

SEQ ID NO: 5138459 - DNA, 25 bp, Homo sapien
tgaggagctcatccccatgcacggg

SEQ ID NO: 5138460 - DNA, 25 bp, Homo sapien
gaaataggggtgagaccacaggcct

SEQ ID NO: 5138461 - DNA, 25 bp, Homo sapien
atcccccagggtggcacaagaacca

SEQ ID NO: 5138462 - DNA, 25 bp, Homo sapien
caagaaccaggcagcttttgaagtg

SEQ ID NO: 5138463 - DNA, 25 bp, Homo sapien
gcatggaaagaggtcgttttccttg

SEQ ID NO: 5138464 - DNA, 25 bp, Homo sapien
ttccaggacgttgaagcatggaaag

SEQ ID NO: 5138465 - DNA, 25 bp, Homo sapien
tgggagcccaggtccgcatatgcct

SEQ ID NO: 5138466 - DNA, 25 bp, Homo sapien
gggagcccaggtccgcatatgcctc

SEQ ID NO: 5138467 - DNA, 25 bp, Homo sapien
tagtctcgctctgtttgaatgagac

SEQ ID NO: 5138468 - DNA, 25 bp, Homo sapien
gcccaggagggtcagggatgggcac

SEQ ID NO: 5138469 - DNA, 25 bp, Homo sapien
ggtcagggatgggcacagcagtggg

SEQ ID NO: 5138470 - DNA, 25 bp, Homo sapien
gatgggcacagcagtggggagagga

SEQ ID NO: 5138471 - DNA, 25 bp, Homo sapien
ggcacagcagtggggagaggacaaa

SEQ ID NO: 5138472 - DNA, 25 bp, Homo sapien
gctggctctgcagtggtaccaacac

SEQ ID NO: 5138473 - DNA, 25 bp, Homo sapien
tggctctgcagtggtaccaacaccg

SEQ ID NO: 5138474 - DNA, 25 bp, Homo sapien
cagtggtaccaacaccgaagcaggg

SEQ ID NO: 5138475 - DNA, 25 bp, Homo sapien
tctgcagtggtaccaacaccgaagc

SEQ ID NO: 5138476 - DNA, 25 bp, Homo sapien
ggtgacagaatctgagccctgcttg

SEQ ID NO: 5138477 - DNA, 25 bp, Homo sapien
agaaggtgacagaatctgagccctg

SEQ ID NO: 5138478 - DNA, 25 bp, Homo sapien
aaggtgacagaatctgagccctgct

SEQ ID NO: 5138479 - DNA, 25 bp, Homo sapien
ctttctccctcttccgtcaggcatc

SEQ ID NO: 5138480 - DNA, 25 bp, Homo sapien
tttcccatgaccaaccactcagttg

SEQ ID NO: 5138481 - DNA, 25 bp, Homo sapien
tcttttcccatgaccaaccactcag

SEQ ID NO: 5138482 - DNA, 25 bp, Homo sapien
aactcgtagtttctgagtattactt

SEQ ID NO: 5138483 - DNA, 25 bp, Homo sapien
agtttctgagtattacttctctctg

SEQ ID NO: 5138484 - DNA, 25 bp, Homo sapien
cccctctaagttgcacagcaatctg

SEQ ID NO: 5138485 - DNA, 25 bp, Homo sapien
acagcaatctgagcacggtaccagg

SEQ ID NO: 5138486 - DNA, 25 bp, Homo sapien
ccactttggcaggagccaacgggcc

SEQ ID NO: 5138487 - DNA, 25 bp, Homo sapien
gggctggaattcgaagctgctctaa

SEQ ID NO: 5138488 - DNA, 25 bp, Homo sapien
cagcagctctgaatagtagctcagc

SEQ ID NO: 5138489 - DNA, 25 bp, Homo sapien
ccacaggtaaatcggagggcatccc

SEQ ID NO: 5138490 - DNA, 25 bp, Homo sapien
tcctttgatgttggccacctgtcct

SEQ ID NO: 5138491 - DNA, 25 bp, Homo sapien
caaagagcctggatagacagcagct

SEQ ID NO: 5138492 - DNA, 25 bp, Homo sapien
aggacatctgaggtcaccgggtgat

SEQ ID NO: 5138493 - DNA, 25 bp, Homo sapien
tgaggcatcgcttctaggacatctg

SEQ ID NO: 5138494 - DNA, 25 bp, Homo sapien
gctattgtaggattcacagaggcag

SEQ ID NO: 5138495 - DNA, 25 bp, Homo sapien
aagatggacagggacggacttccac

SEQ ID NO: 5138496 - DNA, 25 bp, Homo sapien
ctctggaccatgctcaaggcgtctc

SEQ ID NO: 5138497 - DNA, 25 bp, Homo sapien
gcgtctcctcgggttgctactgtag

SEQ ID NO: 5138498 - DNA, 25 bp, Homo sapien
gctcaaggcgtctcctcgggttgct

SEQ ID NO: 5138499 - DNA, 25 bp, Homo sapien
tcctcgggttgctactgtaggttgt

SEQ ID NO: 5138500 - DNA, 25 bp, Homo sapien
cctgtgcgccttggtgggtgcacaa

SEQ ID NO: 5138501 - DNA, 25 bp, Homo sapien
gccgctcagcctgtgcgccttggtg

SEQ ID NO: 5138502 - DNA, 25 bp, Homo sapien
ggtgggtgcacaaggcggtgactct

SEQ ID NO: 5138503 - DNA, 25 bp, Homo sapien
tgcacaaggcggtgactctggcttc

SEQ ID NO: 5138504 - DNA, 25 bp, Homo sapien
ttggactctgtcgtaaaccgctggt

SEQ ID NO: 5138505 - DNA, 25 bp, Homo sapien
cagtttggaaaagtggaggcacgac

SEQ ID NO: 5138506 - DNA, 25 bp, Homo sapien
gagagtactcttggatgcacaggtc

SEQ ID NO: 5138507 - DNA, 25 bp, Homo sapien
tctggaccacagagcatgggcagag

SEQ ID NO: 5138508 - DNA, 25 bp, Homo sapien
tgagacaacagcctaaatccagctg

SEQ ID NO: 5138509 - DNA, 25 bp, Homo sapien
gaaaatagatcgtcccacaaccaca

SEQ ID NO: 5138510 - DNA, 25 bp, Homo sapien
gaaacgcaaaggaatgctctgtccc

SEQ ID NO: 5138511 - DNA, 25 bp, Homo sapien
gcttgtaagcgagcaaacggaaaat

SEQ ID NO: 5138512 - DNA, 25 bp, Homo sapien
agcttaaggctaaatatagggttga

SEQ ID NO: 5138513 - DNA, 25 bp, Homo sapien
taaggctaaatatagggttgactaa

SEQ ID NO: 5138514 - DNA, 25 bp, Homo sapien
cttaaggctaaatatagggttgact

SEQ ID NO: 5138515 - DNA, 25 bp, Homo sapien
attcttatcaaaatagccccctctt

SEQ ID NO: 5138516 - DNA, 25 bp, Homo sapien
tttgtggggtgtagatgctgctcac

SEQ ID NO: 5138517 - DNA, 25 bp, Homo sapien
tgccaggcgagcaacataaacgcag

SEQ ID NO: 5138518 - DNA, 25 bp, Homo sapien
gagaggcatgtggatgtgcacactt

SEQ ID NO: 5138519 - DNA, 25 bp, Homo sapien
gtgccaggcgagcaacataaacgca

SEQ ID NO: 5138520 - DNA, 25 bp, Homo sapien
gcccgaataggggtggcatcgtctc

SEQ ID NO: 5138521 - DNA, 25 bp, Homo sapien
tctgaagtcaagtccgagggggtgt

SEQ ID NO: 5138522 - DNA, 25 bp, Homo sapien
cctcagggcccgaataggggtggca

SEQ ID NO: 5138523 - DNA, 25 bp, Homo sapien
taggggtggcatcgtctctgaagtc

SEQ ID NO: 5138524 - DNA, 25 bp, Homo sapien
ttagtcttgtcacaagctagttttc

SEQ ID NO: 5138525 - DNA, 25 bp, Homo sapien
gctgaaggtcataatcagtctctgt

SEQ ID NO: 5138526 - DNA, 25 bp, Homo sapien
gaaggtcataatcagtctctgtccc

SEQ ID NO: 5138527 - DNA, 25 bp, Homo sapien
aaggctgaaggtcataatcagtctc

SEQ ID NO: 5138528 - DNA, 25 bp, Homo sapien
tcccttatcctctgttctgtaatta

SEQ ID NO: 5138529 - DNA, 25 bp, Homo sapien
taagtcagcaacgaaattatgaatc

SEQ ID NO: 5138530 - DNA, 25 bp, Homo sapien
atttaagtcagcaacgaaattatga

SEQ ID NO: 5138531 - DNA, 25 bp, Homo sapien
ttctgtaattaaggaagcgctaggt

SEQ ID NO: 5138532 - DNA, 25 bp, Homo sapien
tgcaaaccactccaataaattcttc

SEQ ID NO: 5138533 - DNA, 25 bp, Homo sapien
gtgcggactgtgtattttgttaaaa

SEQ ID NO: 5138534 - DNA, 25 bp, Homo sapien
ctctgtgcattagaggtgaataaat

SEQ ID NO: 5138535 - DNA, 25 bp, Homo sapien
tctctcctggatgtgcggactgtgt

SEQ ID NO: 5138536 - DNA, 25 bp, Homo sapien
ttagcatcagacttaactctcctac

SEQ ID NO: 5138537 - DNA, 25 bp, Homo sapien
tcttagcatcagacttaactctcct

SEQ ID NO: 5138538 - DNA, 25 bp, Homo sapien
gttcttagcatcagacttaactctc

SEQ ID NO: 5138539 - DNA, 25 bp, Homo sapien
catgcagttcttagcatcagactta

SEQ ID NO: 5138540 - DNA, 25 bp, Homo sapien
tggaaggatcccacagactgagcct

SEQ ID NO: 5138541 - DNA, 25 bp, Homo sapien
gacaacaccttgtagcctgtaacta

SEQ ID NO: 5138542 - DNA, 25 bp, Homo sapien
ccgaaaaggcctatccaggtggaag

SEQ ID NO: 5138543 - DNA, 25 bp, Homo sapien
caagtgcagcccgaaaaggcctatc

SEQ ID NO: 5138544 - DNA, 25 bp, Homo sapien
ttgccattaacactatcaagcttac

SEQ ID NO: 5138545 - DNA, 25 bp, Homo sapien
aaatccaggcatggttaaggctggg

SEQ ID NO: 5138546 - DNA, 25 bp, Homo sapien
gggaaatccaggcatggttaaggct

SEQ ID NO: 5138547 - DNA, 25 bp, Homo sapien
tgatggagggacatcgggtgtggac

SEQ ID NO: 5138548 - DNA, 25 bp, Homo sapien
gacgttagtgtgagaagaggaagcc

SEQ ID NO: 5138549 - DNA, 25 bp, Homo sapien
aggtgaggtgtctccgctgagaggg

SEQ ID NO: 5138550 - DNA, 25 bp, Homo sapien
gtctccgctgagaggggtgtgtcaa

SEQ ID NO: 5138551 - DNA, 25 bp, Homo sapien
cctccagatgaagaagaggtgaggt

SEQ ID NO: 5138552 - DNA, 25 bp, Homo sapien
cagacaagtggtgttctcacgctca

SEQ ID NO: 5138553 - DNA, 25 bp, Homo sapien
gcaggttctgtgaagcggctctcaa

SEQ ID NO: 5138554 - DNA, 25 bp, Homo sapien
tccaagggtagggaaggcaacacag

SEQ ID NO: 5138555 - DNA, 25 bp, Homo sapien
aatcctgctggaaatgggcatcaga

SEQ ID NO: 5138556 - DNA, 25 bp, Homo sapien
ctaagtctgggtttatgcccaaggc

SEQ ID NO: 5138557 - DNA, 25 bp, Homo sapien
tcttcccatggacctgcacctccct

SEQ ID NO: 5138558 - DNA, 25 bp, Homo sapien
cctttcttcccatggacctgcacct

SEQ ID NO: 5138559 - DNA, 25 bp, Homo sapien
tcccttgcatctttatcttcccttc

SEQ ID NO: 5138560 - DNA, 25 bp, Homo sapien
gtctcctttcttcccatggacctgc

SEQ ID NO: 5138561 - DNA, 25 bp, Homo sapien
gtggagcatagcaccaacagctggg

SEQ ID NO: 5138562 - DNA, 25 bp, Homo sapien
caggtccccgggttagctggctgtg

SEQ ID NO: 5138563 - DNA, 25 bp, Homo sapien
cccagaagagcattattgtgctggg

SEQ ID NO: 5138564 - DNA, 25 bp, Homo sapien
gtttatgaacactggcccctactcc

SEQ ID NO: 5138565 - DNA, 25 bp, Homo sapien
cagggtggctgaccgctaccccttt

SEQ ID NO: 5138566 - DNA, 25 bp, Homo sapien
tattcttttgacttaggggaggata

SEQ ID NO: 5138567 - DNA, 25 bp, Homo sapien
gtggctgaccgctacccctttctta

SEQ ID NO: 5138568 - DNA, 25 bp, Homo sapien
ctgaccgctacccctttcttattct

SEQ ID NO: 5138569 - DNA, 25 bp, Homo sapien
ctccccacagtaactgggatgcctt

SEQ ID NO: 5138570 - DNA, 25 bp, Homo sapien
aactgggatgccttgggtttcctgg

SEQ ID NO: 5138571 - DNA, 25 bp, Homo sapien
ttttggcctttctctgagtgtgtga

SEQ ID NO: 5138572 - DNA, 25 bp, Homo sapien
aggtgatgatattttggcctttctc

SEQ ID NO: 5138573 - DNA, 25 bp, Homo sapien
agtggacatatttgcagggaactga

SEQ ID NO: 5138574 - DNA, 25 bp, Homo sapien
tccttgcaaacttggtagtcttgtt

SEQ ID NO: 5138575 - DNA, 25 bp, Homo sapien
gaagtggacatatttgcagggaact

SEQ ID NO: 5138576 - DNA, 25 bp, Homo sapien
aggcacctccttgcaaacttggtag

SEQ ID NO: 5138577 - DNA, 25 bp, Homo sapien
agacaatggcatgtaagatctgcac

SEQ ID NO: 5138578 - DNA, 25 bp, Homo sapien
tatagacaatggcatgtaagatctg

SEQ ID NO: 5138579 - DNA, 25 bp, Homo sapien
tagacaatggcatgtaagatctgca

SEQ ID NO: 5138580 - DNA, 25 bp, Homo sapien
ctatagacaatggcatgtaagatct

SEQ ID NO: 5138581 - DNA, 25 bp, Homo sapien
aaagtggtggaggaagagtaccttg

SEQ ID NO: 5138582 - DNA, 25 bp, Homo sapien
ccccgaatcatcagacttggaaatg

SEQ ID NO: 5138583 - DNA, 25 bp, Homo sapien
ggagcagcgatgcagggcccagaga

SEQ ID NO: 5138584 - DNA, 25 bp, Homo sapien
gctgcacctggtcaaaagccttggg

SEQ ID NO: 5138585 - DNA, 25 bp, Homo sapien
gtcttcagcgtctcttttaggccca

SEQ ID NO: 5138586 - DNA, 25 bp, Homo sapien
cttgaggacctgtcttcagcgtctc

SEQ ID NO: 5138587 - DNA, 25 bp, Homo sapien
ggcagggctgccctaccctaatatc

SEQ ID NO: 5138588 - DNA, 25 bp, Homo sapien
gcgtctcttttaggcccactctggc

SEQ ID NO: 5138589 - DNA, 25 bp, Homo sapien
ttggaagaaaagaacagatttttgc

SEQ ID NO: 5138590 - DNA, 25 bp, Homo sapien
agtcttttggaagaaaagaacagat

SEQ ID NO: 5138591 - DNA, 25 bp, Homo sapien
ggaagaaaagaacagatttttgcat

SEQ ID NO: 5138592 - DNA, 25 bp, Homo sapien
aagaaaagaacagatttttgcattt

SEQ ID NO: 5138593 - DNA, 25 bp, Homo sapien
tcatgaggctgcaattaagggcaag

SEQ ID NO: 5138594 - DNA, 25 bp, Homo sapien
aggattcactcctaagctcttggga

SEQ ID NO: 5138595 - DNA, 25 bp, Homo sapien
caccgtaactgtagggcagttccaa

SEQ ID NO: 5138596 - DNA, 25 bp, Homo sapien
aaagaacatgcttgatgacccacag

SEQ ID NO: 5138597 - DNA, 25 bp, Homo sapien
gagttgtttctacttgtaggctatt

SEQ ID NO: 5138598 - DNA, 25 bp, Homo sapien
gtttctacttgtaggctattatgta

SEQ ID NO: 5138599 - DNA, 25 bp, Homo sapien
tgtttctacttgtaggctattatgt

SEQ ID NO: 5138600 - DNA, 25 bp, Homo sapien
tccttgcctgtgagttagtgaacct

SEQ ID NO: 5138601 - DNA, 25 bp, Homo sapien
cggaaaaaccgctctgttggtggca

SEQ ID NO: 5138602 - DNA, 25 bp, Homo sapien
gagattgctgattgcatgtccctga

SEQ ID NO: 5138603 - DNA, 25 bp, Homo sapien
tctttgccaggtaggagtgtatgga

SEQ ID NO: 5138604 - DNA, 25 bp, Homo sapien
ctttctactgggtgtgttgtttact

SEQ ID NO: 5138605 - DNA, 25 bp, Homo sapien
tgttccaactctgacaccaactact

SEQ ID NO: 5138606 - DNA, 25 bp, Homo sapien
cactcatcttgctgcgactgtaggt

SEQ ID NO: 5138607 - DNA, 25 bp, Homo sapien
tgtgttgtttactcctctctctata

SEQ ID NO: 5138608 - DNA, 25 bp, Homo sapien
tcgttatcgttaggactggctgaca

SEQ ID NO: 5138609 - DNA, 25 bp, Homo sapien
ggctgacatagaactcccacagagg

SEQ ID NO: 5138610 - DNA, 25 bp, Homo sapien
cacatagcagctagaatgggccttg

SEQ ID NO: 5138611 - DNA, 25 bp, Homo sapien
tctagggagccacgtactgggccat

SEQ ID NO: 5138612 - DNA, 25 bp, Homo sapien
gcagttcggaaggtcagccacccga

SEQ ID NO: 5138613 - DNA, 25 bp, Homo sapien
tggtgggtgacagaccacttgccca

SEQ ID NO: 5138614 - DNA, 25 bp, Homo sapien
cacaggctcccagtgtagctagaaa

SEQ ID NO: 5138615 - DNA, 25 bp, Homo sapien
caccaagaaaaggtggctccaaagt

SEQ ID NO: 5138616 - DNA, 25 bp, Homo sapien
ccaactctcgggaggctgttggctc

SEQ ID NO: 5138617 - DNA, 25 bp, Homo sapien
cccaactctcgggaggctgttggct

SEQ ID NO: 5138618 - DNA, 25 bp, Homo sapien
caactctcgggaggctgttggctct

SEQ ID NO: 5138619 - DNA, 25 bp, Homo sapien
gatggggaatcagagatggtgccaa

SEQ ID NO: 5138620 - DNA, 25 bp, Homo sapien
cagagatggtgccaagttcattcat

SEQ ID NO: 5138621 - DNA, 25 bp, Homo sapien
ggaatcagagatggtgccaagttca

SEQ ID NO: 5138622 - DNA, 25 bp, Homo sapien
gagatggggaatcagagatggtgcc

SEQ ID NO: 5138623 - DNA, 25 bp, Homo sapien
tgtgttactccctggagggaagggc

SEQ ID NO: 5138624 - DNA, 25 bp, Homo sapien
gccaggggcagaggttcctgagaat

SEQ ID NO: 5138625 - DNA, 25 bp, Homo sapien
tcctgagaatggctaatccccgagg

SEQ ID NO: 5138626 - DNA, 25 bp, Homo sapien
tgagaatggctaatccccgaggaaa

SEQ ID NO: 5138627 - DNA, 25 bp, Homo sapien
ccctggctcttggaaggtggcaggt

SEQ ID NO: 5138628 - DNA, 25 bp, Homo sapien
gaaggtggcaggtgcttctcctcca

SEQ ID NO: 5138629 - DNA, 25 bp, Homo sapien
caagctggggcccagtctgtgcctc

SEQ ID NO: 5138630 - DNA, 25 bp, Homo sapien
ccactcctcccctgtgtccaggttt

SEQ ID NO: 5138631 - DNA, 25 bp, Homo sapien
ccaggcagagatgactctcatgcaa

SEQ ID NO: 5138632 - DNA, 25 bp, Homo sapien
agagatgactctcatgcaagcaggc

SEQ ID NO: 5138633 - DNA, 25 bp, Homo sapien
gactctcatgcaagcaggccggctt

SEQ ID NO: 5138634 - DNA, 25 bp, Homo sapien
gatgactctcatgcaagcaggccgg

SEQ ID NO: 5138635 - DNA, 25 bp, Homo sapien
attctgtgcgtcagcgttgccaggg

SEQ ID NO: 5138636 - DNA, 25 bp, Homo sapien
attccaataacattctgtgcgtcag

SEQ ID NO: 5138637 - DNA, 25 bp, Homo sapien
ataacattctgtgcgtcagcgttgc

SEQ ID NO: 5138638 - DNA, 25 bp, Homo sapien
tccaataacattctgtgcgtcagcg

SEQ ID NO: 5138639 - DNA, 25 bp, Homo sapien
ggttcagagtctccggcattgcatt

SEQ ID NO: 5138640 - DNA, 25 bp, Homo sapien
tctcgtggttcagagtctccggcat

SEQ ID NO: 5138641 - DNA, 25 bp, Homo sapien
cgtggttcagagtctccggcattgc

SEQ ID NO: 5138642 - DNA, 25 bp, Homo sapien
tcgtggttcagagtctccggcattg

SEQ ID NO: 5138643 - DNA, 25 bp, Homo sapien
gaaagccctgggggatggactcaaa

SEQ ID NO: 5138644 - DNA, 25 bp, Homo sapien
aagccctgggggatggactcaaagg

SEQ ID NO: 5138645 - DNA, 25 bp, Homo sapien
ccctgggggatggactcaaaggcac

SEQ ID NO: 5138646 - DNA, 25 bp, Homo sapien
gccctgggggatggactcaaaggca

SEQ ID NO: 5138647 - DNA, 25 bp, Homo sapien
ttttccatatggtagttttctgcta

SEQ ID NO: 5138648 - DNA, 25 bp, Homo sapien
cattgcagtgattttcggtttccaa

SEQ ID NO: 5138649 - DNA, 25 bp, Homo sapien
tcctaatggtaagcagaattccatc

SEQ ID NO: 5138650 - DNA, 25 bp, Homo sapien
gctatgactgctagtggcttggcaa

SEQ ID NO: 5138651 - DNA, 25 bp, Homo sapien
ctgggcctttaaggcagtctttgtt

SEQ ID NO: 5138652 - DNA, 25 bp, Homo sapien
ccgggatgtccaggttcagatacac

SEQ ID NO: 5138653 - DNA, 25 bp, Homo sapien
tccagggaggcccatttcgctcatc

SEQ ID NO: 5138654 - DNA, 25 bp, Homo sapien
gctcatcggtctccaaggaactgtg

SEQ ID NO: 5138655 - DNA, 25 bp, Homo sapien
tgttcagttccacaccggtcagcac

SEQ ID NO: 5138656 - DNA, 25 bp, Homo sapien
ctgatcctgacagcttctctcagct

SEQ ID NO: 5138657 - DNA, 25 bp, Homo sapien
ctctgatcctgacagcttctctcag

SEQ ID NO: 5138658 - DNA, 25 bp, Homo sapien
cctgctgatatttccatttggacat

SEQ ID NO: 5138659 - DNA, 25 bp, Homo sapien
actcccaactgcctgctgatatttc

SEQ ID NO: 5138660 - DNA, 25 bp, Homo sapien
catcctgctggttaaggtagtggcc

SEQ ID NO: 5138661 - DNA, 25 bp, Homo sapien
tccggtcatcctgctggttaaggta

SEQ ID NO: 5138662 - DNA, 25 bp, Homo sapien
caatggtcagcgcaaattctgagtg

SEQ ID NO: 5138663 - DNA, 25 bp, Homo sapien
ccatcctagccaaacagccatcaag

SEQ ID NO: 5138664 - DNA, 25 bp, Homo sapien
tgcccttcggggctccaagacagag

SEQ ID NO: 5138665 - DNA, 25 bp, Homo sapien
cagaggtacaggaataatccccggg

SEQ ID NO: 5138666 - DNA, 25 bp, Homo sapien
aggttcccgcaaacgccaagcggag

SEQ ID NO: 5138667 - DNA, 25 bp, Homo sapien
gacagagccggtgaaaaccggagac

SEQ ID NO: 5138668 - DNA, 25 bp, Homo sapien
ggaggaataaccagtgcctgtccta

SEQ ID NO: 5138669 - DNA, 25 bp, Homo sapien
cagggttgcgcgcaggtctcgaccc

SEQ ID NO: 5138670 - DNA, 25 bp, Homo sapien
gggaccactgcgatttctcaatgag

SEQ ID NO: 5138671 - DNA, 25 bp, Homo sapien
tcgacccagggcacaaagcgcgtct

SEQ ID NO: 5138672 - DNA, 25 bp, Homo sapien
gccgctgggagacgaggcggcgagc

SEQ ID NO: 5138673 - DNA, 25 bp, Homo sapien
cgccgccgctgggagacgaggcggc

SEQ ID NO: 5138674 - DNA, 25 bp, Homo sapien
ctgctcgcgcggcaaactcttccgc

SEQ ID NO: 5138675 - DNA, 25 bp, Homo sapien
gcgagaggccggctgctcgcgcggc

SEQ ID NO: 5138676 - DNA, 25 bp, Homo sapien
cccggtgccgcgcagcctcgcgcct

SEQ ID NO: 5138677 - DNA, 25 bp, Homo sapien
ctccacgctggcgagcaggtgaccg

SEQ ID NO: 5138678 - DNA, 25 bp, Homo sapien
tccacgctggcgagcaggtgaccga

SEQ ID NO: 5138679 - DNA, 25 bp, Homo sapien
tgccgcgcagcctcgcgcctgagcg

SEQ ID NO: 5138680 - DNA, 25 bp, Homo sapien
ggcctgactgtggaggggaacccac

SEQ ID NO: 5138681 - DNA, 25 bp, Homo sapien
cggcctgactgtggaggggaaccca

SEQ ID NO: 5138682 - DNA, 25 bp, Homo sapien
gacgcgaagcccccagcggcctgac

SEQ ID NO: 5138683 - DNA, 25 bp, Homo sapien
caggacgcgaagcccccagcggcct

SEQ ID NO: 5138684 - DNA, 25 bp, Homo sapien
tgtcttctgcgtcgagacgcgcccg

SEQ ID NO: 5138685 - DNA, 25 bp, Homo sapien
ggtctcgaagacaaccacgggcaat

SEQ ID NO: 5138686 - DNA, 25 bp, Homo sapien
aaggtcaaaggtgcgtccctcctcg

SEQ ID NO: 5138687 - DNA, 25 bp, Homo sapien
caaattccgaggctcggatgcccag

SEQ ID NO: 5138688 - DNA, 25 bp, Homo sapien
gttctgaatttagccgggtggtgcc

SEQ ID NO: 5138689 - DNA, 25 bp, Homo sapien
aggagtggcaagcagaggagcggga

SEQ ID NO: 5138690 - DNA, 25 bp, Homo sapien
gactggttctgaatttagccgggtg

SEQ ID NO: 5138691 - DNA, 25 bp, Homo sapien
aggagcgggactggttctgaattta

SEQ ID NO: 5138692 - DNA, 25 bp, Homo sapien
ggacagtgtcgtgatcacactggga

SEQ ID NO: 5138693 - DNA, 25 bp, Homo sapien
gaaccgacgattcatgtaaagaaca

SEQ ID NO: 5138694 - DNA, 25 bp, Homo sapien
agttgcaccgtgcatggaatcagca

SEQ ID NO: 5138695 - DNA, 25 bp, Homo sapien
tcttgggaaagagttgcaccgtgca

SEQ ID NO: 5138696 - DNA, 25 bp, Homo sapien
gattcagtgcatcccaaaaccttgc

SEQ ID NO: 5138697 - DNA, 25 bp, Homo sapien
aaaaccttgccagcgtgcagcatct

SEQ ID NO: 5138698 - DNA, 25 bp, Homo sapien
catctggtagctgtgagaaatgcag

SEQ ID NO: 5138699 - DNA, 25 bp, Homo sapien
tcctcaagggcaggtacaacccatc

SEQ ID NO: 5138700 - DNA, 25 bp, Homo sapien
agtcagtgcacccggccttagtttt

SEQ ID NO: 5138701 - DNA, 25 bp, Homo sapien
tgagtcagtgcacccggccttagtt

SEQ ID NO: 5138702 - DNA, 25 bp, Homo sapien
gaagcgttctgagctaaaagcatct

SEQ ID NO: 5138703 - DNA, 25 bp, Homo sapien
gaatcttctagggtcaatgcaggct

SEQ ID NO: 5138704 - DNA, 25 bp, Homo sapien
tgatggctcaggtccaaactgtggc

SEQ ID NO: 5138705 - DNA, 25 bp, Homo sapien
taagcgccttgacaacatgcaatgg

SEQ ID NO: 5138706 - DNA, 25 bp, Homo sapien
tgagtttccttggatcccagaaagg

SEQ ID NO: 5138707 - DNA, 25 bp, Homo sapien
tcttgaggccacgaaatcagccact

SEQ ID NO: 5138708 - DNA, 25 bp, Homo sapien
catgagtccagtcgaatctcccagg

SEQ ID NO: 5138709 - DNA, 25 bp, Homo sapien
tgtagcttccccaaacacagtagaa

SEQ ID NO: 5138710 - DNA, 25 bp, Homo sapien
cacaattaggcagggaggtgaccgt

SEQ ID NO: 5138711 - DNA, 25 bp, Homo sapien
tctagccctgagaaacctgctggca

SEQ ID NO: 5138712 - DNA, 25 bp, Homo sapien
tagatttaagtgtgcagggaaaccc

SEQ ID NO: 5138713 - DNA, 25 bp, Homo sapien
gacaataggacctctgtgggaccag

SEQ ID NO: 5138714 - DNA, 25 bp, Homo sapien
tttttgctaacatgaacaacgctgg

SEQ ID NO: 5138715 - DNA, 25 bp, Homo sapien
caaggaccttgatgtatactgcaga

SEQ ID NO: 5138716 - DNA, 25 bp, Homo sapien
cataagcaatgctgcggaaagccca

SEQ ID NO: 5138717 - DNA, 25 bp, Homo sapien
gagtccccgaagcagaatgacggca

SEQ ID NO: 5138718 - DNA, 25 bp, Homo sapien
ttcttacgtggatgggcagagttcc

SEQ ID NO: 5138719 - DNA, 25 bp, Homo sapien
cactgtgagtgcatgaatcccttcc

SEQ ID NO: 5138720 - DNA, 25 bp, Homo sapien
ttgcaatgtagaggcggtgactcca

SEQ ID NO: 5138721 - DNA, 25 bp, Homo sapien
ggaactagtgctaacctaccgagtc

SEQ ID NO: 5138722 - DNA, 25 bp, Homo sapien
ttccaggcccgaggttacaaacata

SEQ ID NO: 5138723 - DNA, 25 bp, Homo sapien
cctggtgaaccatgtgaaaagcctg

SEQ ID NO: 5138724 - DNA, 25 bp, Homo sapien
gacactggtgagctactccttaggg

SEQ ID NO: 5138725 - DNA, 25 bp, Homo sapien
ccaacagatgtgtgccagaaggctg

SEQ ID NO: 5138726 - DNA, 25 bp, Homo sapien
gaataccctgttcaccctggagaaa

SEQ ID NO: 5138727 - DNA, 25 bp, Homo sapien
ccctagggcagctggaaattctgac

SEQ ID NO: 5138728 - DNA, 25 bp, Homo sapien
tgttttccagacaggcgagatgccc

SEQ ID NO: 5138729 - DNA, 25 bp, Homo sapien
tgtcactacaaataccagctacggg

SEQ ID NO: 5138730 - DNA, 25 bp, Homo sapien
ccacctccacatgtctttgttaaga

SEQ ID NO: 5138731 - DNA, 25 bp, Homo sapien
gtgcttaagggcagacgtccacctc

SEQ ID NO: 5138732 - DNA, 25 bp, Homo sapien
cagcatttcttgaaccctgagtgct

SEQ ID NO: 5138733 - DNA, 25 bp, Homo sapien
taagagtcggggagtgctctctgcc

SEQ ID NO: 5138734 - DNA, 25 bp, Homo sapien
cctttttctggtccatgggagtcac

SEQ ID NO: 5138735 - DNA, 25 bp, Homo sapien
cagttttctgtcatgtttctgtcct

SEQ ID NO: 5138736 - DNA, 25 bp, Homo sapien
tgtcctttttctggtccatgggagt

SEQ ID NO: 5138737 - DNA, 25 bp, Homo sapien
agttttctgtcatgtttctgtcctt

SEQ ID NO: 5138738 - DNA, 25 bp, Homo sapien
tggcttggtcatcaggaggaacttg

SEQ ID NO: 5138739 - DNA, 25 bp, Homo sapien
gactgcctcagcagagtcaactgaa

SEQ ID NO: 5138740 - DNA, 25 bp, Homo sapien
ccatgacgttgatggagagggcccc

SEQ ID NO: 5138741 - DNA, 25 bp, Homo sapien
aatgccaaacctctttggttcttct

SEQ ID NO: 5138742 - DNA, 25 bp, Homo sapien
cacacacggccatttcagttgacgg

SEQ ID NO: 5138743 - DNA, 25 bp, Homo sapien
ttccgttgtgggtgacagtctcctc

SEQ ID NO: 5138744 - DNA, 25 bp, Homo sapien
tgcttccaaagaaggacattccgtt

SEQ ID NO: 5138745 - DNA, 25 bp, Homo sapien
gtccaacgctggaaagaggaactgc

SEQ ID NO: 5138746 - DNA, 25 bp, Homo sapien
agctgaaagtgtatattcttactga

SEQ ID NO: 5138747 - DNA, 25 bp, Homo sapien
gctgaaagtgtatattcttactgaa

SEQ ID NO: 5138748 - DNA, 25 bp, Homo sapien
ctgaaagtgtatattcttactgaac

SEQ ID NO: 5138749 - DNA, 25 bp, Homo sapien
gaaagtgtatattcttactgaactt

SEQ ID NO: 5138750 - DNA, 25 bp, Homo sapien
ggttatattatttggactcagatga

SEQ ID NO: 5138751 - DNA, 25 bp, Homo sapien
acccaggttatattatttggactca

SEQ ID NO: 5138752 - DNA, 25 bp, Homo sapien
ctctcccttatagttgggtatcagt

SEQ ID NO: 5138753 - DNA, 25 bp, Homo sapien
tctctcccttatagttgggtatcag

SEQ ID NO: 5138754 - DNA, 25 bp, Homo sapien
catttaagggacaggacatgaagac

SEQ ID NO: 5138755 - DNA, 25 bp, Homo sapien
gaaacacttctctgtgtgggctggg

SEQ ID NO: 5138756 - DNA, 25 bp, Homo sapien
gggtcaagttctctcgagcacctgc

SEQ ID NO: 5138757 - DNA, 25 bp, Homo sapien
cataatccggaatcagggtcaagtt

SEQ ID NO: 5138758 - DNA, 25 bp, Homo sapien
tggaaaccgctgttcggctgccaca

SEQ ID NO: 5138759 - DNA, 25 bp, Homo sapien
ttcggctgccacagacaagccgaaa

SEQ ID NO: 5138760 - DNA, 25 bp, Homo sapien
cggctgccacagacaagccgaaatg

SEQ ID NO: 5138761 - DNA, 25 bp, Homo sapien
cacagacaagccgaaatgaatccac

SEQ ID NO: 5138762 - DNA, 25 bp, Homo sapien
gtcgttttggattaacgtctgtatc

SEQ ID NO: 5138763 - DNA, 25 bp, Homo sapien
taacgtctgtatctcacacatggga

SEQ ID NO: 5138764 - DNA, 25 bp, Homo sapien
cacatgggagcttggtaatgatttt

SEQ ID NO: 5138765 - DNA, 25 bp, Homo sapien
ccctggtgaggggacctcatgtcgt

SEQ ID NO: 5138766 - DNA, 25 bp, Homo sapien
aatgggctggctatagttatcctcc

SEQ ID NO: 5138767 - DNA, 25 bp, Homo sapien
tggtggctccaaggtaatagtgctt

SEQ ID NO: 5138768 - DNA, 25 bp, Homo sapien
gtatgtgtgcaataaaggacccagc

SEQ ID NO: 5138769 - DNA, 25 bp, Homo sapien
caaacctccccatgatcgtggtggc

SEQ ID NO: 5138770 - DNA, 25 bp, Homo sapien
aggagagggcctctaagctgagttc

SEQ ID NO: 5138771 - DNA, 25 bp, Homo sapien
cccgactaagccattcagctgagct

SEQ ID NO: 5138772 - DNA, 25 bp, Homo sapien
ttgacccgactaagccattcagctg

SEQ ID NO: 5138773 - DNA, 25 bp, Homo sapien
gagggcctctaagctgagttcccat

SEQ ID NO: 5138774 - DNA, 25 bp, Homo sapien
aggccactggcttgatgcttctcag

SEQ ID NO: 5138775 - DNA, 25 bp, Homo sapien
aatgttcttcctcaacaccggagcc

SEQ ID NO: 5138776 - DNA, 25 bp, Homo sapien
cccaggccactggcttgatgcttct

SEQ ID NO: 5138777 - DNA, 25 bp, Homo sapien
ttcctctcctaccacacgcaggcct

SEQ ID NO: 5138778 - DNA, 25 bp, Homo sapien
ctcttggctctgtctttctcatctt

SEQ ID NO: 5138779 - DNA, 25 bp, Homo sapien
ttggctctgtctttctcatcttcat

SEQ ID NO: 5138780 - DNA, 25 bp, Homo sapien
ggctctgtctttctcatcttcatcc

SEQ ID NO: 5138781 - DNA, 25 bp, Homo sapien
ctctgtctttctcatcttcatccat

SEQ ID NO: 5138782 - DNA, 25 bp, Homo sapien
gcatgtaaaatgctccaggcaggct

SEQ ID NO: 5138783 - DNA, 25 bp, Homo sapien
tatcaccccacttgacagaagaaga

SEQ ID NO: 5138784 - DNA, 25 bp, Homo sapien
catttgaatccctgcctgctgccaa

SEQ ID NO: 5138785 - DNA, 25 bp, Homo sapien
tgccaactggctgtgcaatccctga

SEQ ID NO: 5138786 - DNA, 25 bp, Homo sapien
tctgcttctgcaaaatggcatgcgt

SEQ ID NO: 5138787 - DNA, 25 bp, Homo sapien
acttagtcaacaaatacagatggga

SEQ ID NO: 5138788 - DNA, 25 bp, Homo sapien
ctctgagggcaggataatgctatgt

SEQ ID NO: 5138789 - DNA, 25 bp, Homo sapien
cattggtccatgtcattaaactacc

SEQ ID NO: 5138790 - DNA, 25 bp, Homo sapien
tttcagacctacagaatttatatcc

SEQ ID NO: 5138791 - DNA, 25 bp, Homo sapien
cagacctacagaatttatatccaaa

SEQ ID NO: 5138792 - DNA, 25 bp, Homo sapien
tcagacctacagaatttatatccaa

SEQ ID NO: 5138793 - DNA, 25 bp, Homo sapien
gacctacagaatttatatccaaaga

SEQ ID NO: 5138794 - DNA, 25 bp, Homo sapien
gcatgctgaggccatgcggtttggg

SEQ ID NO: 5138795 - DNA, 25 bp, Homo sapien
tccctgcatgctgaggccatgcggt

SEQ ID NO: 5138796 - DNA, 25 bp, Homo sapien
cctgcatgctgaggccatgcggttt

SEQ ID NO: 5138797 - DNA, 25 bp, Homo sapien
atccctgcatgctgaggccatgcgg

SEQ ID NO: 5138798 - DNA, 25 bp, Homo sapien
ggcatatcaggactaggccttattc

SEQ ID NO: 5138799 - DNA, 25 bp, Homo sapien
gatgctcagtgaagacagtgctgtc

SEQ ID NO: 5138800 - DNA, 25 bp, Homo sapien
taagaggcaactgcagcacacgatg

SEQ ID NO: 5138801 - DNA, 25 bp, Homo sapien
cacagtgcctacgactgaggttgta

SEQ ID NO: 5138802 - DNA, 25 bp, Homo sapien
agaggaggaaggaagatgctcattt

SEQ ID NO: 5138803 - DNA, 25 bp, Homo sapien
gaggaggaaggaagatgctcatttc

SEQ ID NO: 5138804 - DNA, 25 bp, Homo sapien
ggaggaaggaagatgctcatttccc

SEQ ID NO: 5138805 - DNA, 25 bp, Homo sapien
aggaaggaagatgctcatttcccat

SEQ ID NO: 5138806 - DNA, 25 bp, Homo sapien
agctgcccaagatgcatggctgtag

SEQ ID NO: 5138807 - DNA, 25 bp, Homo sapien
tgcccaagatgcatggctgtagctg

SEQ ID NO: 5138808 - DNA, 25 bp, Homo sapien
gatgcatggctgtagctgggatggg

SEQ ID NO: 5138809 - DNA, 25 bp, Homo sapien
gctgcccaagatgcatggctgtagc

SEQ ID NO: 5138810 - DNA, 25 bp, Homo sapien
ccagaggagggttgtacttgcagct

SEQ ID NO: 5138811 - DNA, 25 bp, Homo sapien
ctcaggcgtagctctctagaactct

SEQ ID NO: 5138812 - DNA, 25 bp, Homo sapien
gcagctcaggatccaagcgagtcct

SEQ ID NO: 5138813 - DNA, 25 bp, Homo sapien
gagtcctagcacagtagccccatac

SEQ ID NO: 5138814 - DNA, 25 bp, Homo sapien
taggccaagcaacctggtctgagct

SEQ ID NO: 5138815 - DNA, 25 bp, Homo sapien
accgacggcgcagtcgtgaatggta

SEQ ID NO: 5138816 - DNA, 25 bp, Homo sapien
gaagggtccgtgaggctcctccacc

SEQ ID NO: 5138817 - DNA, 25 bp, Homo sapien
gcccctagaggcaagaacatgaggt

SEQ ID NO: 5138818 - DNA, 25 bp, Homo sapien
tgtaatgacgaccaacatggcctgg

SEQ ID NO: 5138819 - DNA, 25 bp, Homo sapien
atggcctggtagcaactccgacgaa

SEQ ID NO: 5138820 - DNA, 25 bp, Homo sapien
ggtgtccactggaaactggtcgctg

SEQ ID NO: 5138821 - DNA, 25 bp, Homo sapien
gaaggctcctatcgttagtgacaga

SEQ ID NO: 5138822 - DNA, 25 bp, Homo sapien
cccagggcagaggtatgacaggtac

SEQ ID NO: 5138823 - DNA, 25 bp, Homo sapien
gggcagaggtatgacaggtactgca

SEQ ID NO: 5138824 - DNA, 25 bp, Homo sapien
cagggcagaggtatgacaggtactg

SEQ ID NO: 5138825 - DNA, 25 bp, Homo sapien
acccagggcagaggtatgacaggta

SEQ ID NO: 5138826 - DNA, 25 bp, Homo sapien
tggaacattccacgtcacaaaggct

SEQ ID NO: 5138827 - DNA, 25 bp, Homo sapien
caaaacgagcaggttactggaacat

SEQ ID NO: 5138828 - DNA, 25 bp, Homo sapien
gagcaggttactggaacattccacg

SEQ ID NO: 5138829 - DNA, 25 bp, Homo sapien
ctgtaaacacaaaacgagcaggtta

SEQ ID NO: 5138830 - DNA, 25 bp, Homo sapien
tttgatgagaacattgaactggtcc

SEQ ID NO: 5138831 - DNA, 25 bp, Homo sapien
aatccgatgaccttttccaacacgg

SEQ ID NO: 5138832 - DNA, 25 bp, Homo sapien
tccattttccgcgtgttgccaggga

SEQ ID NO: 5138833 - DNA, 25 bp, Homo sapien
gaactggtcccgacgcttcttctca

SEQ ID NO: 5138834 - DNA, 25 bp, Homo sapien
aaacgtccagtgtcgggcctcatat

SEQ ID NO: 5138835 - DNA, 25 bp, Homo sapien
ggtcaggcagccaacgacactgaga

SEQ ID NO: 5138836 - DNA, 25 bp, Homo sapien
catgcacatcgtgggccagaatcca

SEQ ID NO: 5138837 - DNA, 25 bp, Homo sapien
catatgcacatggtggaatgcagca

SEQ ID NO: 5138838 - DNA, 25 bp, Homo sapien
gaacataagactcatagctcagaga

SEQ ID NO: 5138839 - DNA, 25 bp, Homo sapien
acagaactgccttgtactgaagaca

SEQ ID NO: 5138840 - DNA, 25 bp, Homo sapien
tcaaatagtcattggcctacaaggg

SEQ ID NO: 5138841 - DNA, 25 bp, Homo sapien
cagtttatcctccatcttaagccaa

SEQ ID NO: 5138842 - DNA, 25 bp, Homo sapien
tgcaggtggtaccatggccctgaat

SEQ ID NO: 5138843 - DNA, 25 bp, Homo sapien
ggtgcctgcccttgcaggtggtacc

SEQ ID NO: 5138844 - DNA, 25 bp, Homo sapien
aatgtctacatgacgaactccatcg

SEQ ID NO: 5138845 - DNA, 25 bp, Homo sapien
cgaactccatcgtcaacagttggaa

SEQ ID NO: 5138846 - DNA, 25 bp, Homo sapien
tgtcacagatttccgtttgcgctga

SEQ ID NO: 5138847 - DNA, 25 bp, Homo sapien
cagatttccgtttgcgctgagactt

SEQ ID NO: 5138848 - DNA, 25 bp, Homo sapien
ccaacatcagctgggtgaattcttc

SEQ ID NO: 5138849 - DNA, 25 bp, Homo sapien
tccagtcttgctgaatgtcacagat

SEQ ID NO: 5138850 - DNA, 25 bp, Homo sapien
gaagccacagcacgttggcagttgt

SEQ ID NO: 5138851 - DNA, 25 bp, Homo sapien
aaacaccctgccaggaaccactggt

SEQ ID NO: 5138852 - DNA, 25 bp, Homo sapien
tttgcctcctcttggttgcgggcgt

SEQ ID NO: 5138853 - DNA, 25 bp, Homo sapien
ttgcgggcgtggatatgtcatgcct

SEQ ID NO: 5138854 - DNA, 25 bp, Homo sapien
catctggagggcattagcagttccc

SEQ ID NO: 5138855 - DNA, 25 bp, Homo sapien
tccttgggacaacctctgggctaag

SEQ ID NO: 5138856 - DNA, 25 bp, Homo sapien
tgctgtgcccctatccatggaatgg

SEQ ID NO: 5138857 - DNA, 25 bp, Homo sapien
caagtgattgcaaagtgctgtgccc

SEQ ID NO: 5138858 - DNA, 25 bp, Homo sapien
tttccatcaactctatgagaactgc

SEQ ID NO: 5138859 - DNA, 25 bp, Homo sapien
ggttctggaagtcccatcagtagca

SEQ ID NO: 5138860 - DNA, 25 bp, Homo sapien
cattgctttaagaaagctggctgtg

SEQ ID NO: 5138861 - DNA, 25 bp, Homo sapien
tagacgggagataactttcatcagc

SEQ ID NO: 5138862 - DNA, 25 bp, Homo sapien
tacagtaaacgaagaagtacatccc

SEQ ID NO: 5138863 - DNA, 25 bp, Homo sapien
tattttacaccgacagctggtagga

SEQ ID NO: 5138864 - DNA, 25 bp, Homo sapien
tgtaatatgcaggagagtccccaca

SEQ ID NO: 5138865 - DNA, 25 bp, Homo sapien
tcctgaatgtctaaagcaagcgggt

SEQ ID NO: 5138866 - DNA, 25 bp, Homo sapien
tctttcacattaggagggtgtggct

SEQ ID NO: 5138867 - DNA, 25 bp, Homo sapien
gaagggcacctttataccatgccga

SEQ ID NO: 5138868 - DNA, 25 bp, Homo sapien
gaagaggccacgagcagtgcatgaa

SEQ ID NO: 5138869 - DNA, 25 bp, Homo sapien
ctcaactagatggtcacgtgatgtc

SEQ ID NO: 5138870 - DNA, 25 bp, Homo sapien
gctgccgtctgttgtcactgcgata

SEQ ID NO: 5138871 - DNA, 25 bp, Homo sapien
tactgtcagagacatagatgatgct

SEQ ID NO: 5138872 - DNA, 25 bp, Homo sapien
ccaaggagaggcgtgatactgtcag

SEQ ID NO: 5138873 - DNA, 25 bp, Homo sapien
tcactgcgataatgaagccatctaa

SEQ ID NO: 5138874 - DNA, 25 bp, Homo sapien
ggatctctcccgcaaggttttcatt

SEQ ID NO: 5138875 - DNA, 25 bp, Homo sapien
tccttgcctgtgtcaattctagaca

SEQ ID NO: 5138876 - DNA, 25 bp, Homo sapien
gcccttggcctccattgtatgcacg

SEQ ID NO: 5138877 - DNA, 25 bp, Homo sapien
cattctgtccaaggcacgtgactca

SEQ ID NO: 5138878 - DNA, 25 bp, Homo sapien
gggaatccgtcacaagcatatggga

SEQ ID NO: 5138879 - DNA, 25 bp, Homo sapien
gaatccgtcacaagcatatgggaag

SEQ ID NO: 5138880 - DNA, 25 bp, Homo sapien
ccgtcacaagcatatgggaagaaag

SEQ ID NO: 5138881 - DNA, 25 bp, Homo sapien
gagggggaatccgtcacaagcatat

SEQ ID NO: 5138882 - DNA, 25 bp, Homo sapien
tgttgtaagagcgaaaatttcctac

SEQ ID NO: 5138883 - DNA, 25 bp, Homo sapien
gttgtaagagcgaaaatttcctaca

SEQ ID NO: 5138884 - DNA, 25 bp, Homo sapien
ttgtaagagcgaaaatttcctacaa

SEQ ID NO: 5138885 - DNA, 25 bp, Homo sapien
tgtaagagcgaaaatttcctacaaa

SEQ ID NO: 5138886 - DNA, 25 bp, Homo sapien
gactttgctacttggcttatcctgc

SEQ ID NO: 5138887 - DNA, 25 bp, Homo sapien
acccctttgctgtgcatgagggcca

SEQ ID NO: 5138888 - DNA, 25 bp, Homo sapien
cggaccaggtctactaaaatacgct

SEQ ID NO: 5138889 - DNA, 25 bp, Homo sapien
tgagcagaagacctacggaccaggt

SEQ ID NO: 5138890 - DNA, 25 bp, Homo sapien
ctggcccacattttctggtttctgt

SEQ ID NO: 5138891 - DNA, 25 bp, Homo sapien
cctggcccacattttctggtttctg

SEQ ID NO: 5138892 - DNA, 25 bp, Homo sapien
attttctggtttctgtttttgatgc

SEQ ID NO: 5138893 - DNA, 25 bp, Homo sapien
gtttctgtttttgatgctttgacat

SEQ ID NO: 5138894 - DNA, 25 bp, Homo sapien
ctggaaacagttgattagaggaaga

SEQ ID NO: 5138895 - DNA, 25 bp, Homo sapien
gaaactgtcctcaagtgaaactctt

SEQ ID NO: 5138896 - DNA, 25 bp, Homo sapien
gactactttcttgtcccatttcctg

SEQ ID NO: 5138897 - DNA, 25 bp, Homo sapien
ggacacggggttacatatcccagct

SEQ ID NO: 5138898 - DNA, 25 bp, Homo sapien
tactgctttctggatttgtcagaca

SEQ ID NO: 5138899 - DNA, 25 bp, Homo sapien
ttgaaatactgctttctggatttgt

SEQ ID NO: 5138900 - DNA, 25 bp, Homo sapien
tggatttgtcagacacacatctaca

SEQ ID NO: 5138901 - DNA, 25 bp, Homo sapien
tgctttctggatttgtcagacacac

SEQ ID NO: 5138902 - DNA, 25 bp, Homo sapien
gcacacagaccttgggaccccaagg

SEQ ID NO: 5138903 - DNA, 25 bp, Homo sapien
ctgctggtggcccgttcactctgcc

SEQ ID NO: 5138904 - DNA, 25 bp, Homo sapien
taaggtccagttcgggaagacacca

SEQ ID NO: 5138905 - DNA, 25 bp, Homo sapien
aggtccagttcgggaagacaccatc

SEQ ID NO: 5138906 - DNA, 25 bp, Homo sapien
caactgtggagaacggactgacctt

SEQ ID NO: 5138907 - DNA, 25 bp, Homo sapien
tgcagtagcctcggcagagtcttct

SEQ ID NO: 5138908 - DNA, 25 bp, Homo sapien
ctgcagtagcctcggcagagtcttc

SEQ ID NO: 5138909 - DNA, 25 bp, Homo sapien
cagtagcctcggcagagtcttctct

SEQ ID NO: 5138910 - DNA, 25 bp, Homo sapien
gtgttgccagacgaacggtggcaat

SEQ ID NO: 5138911 - DNA, 25 bp, Homo sapien
caatgaagcaaacctcctttcctag

SEQ ID NO: 5138912 - DNA, 25 bp, Homo sapien
agtggcacccggcaaggtcttgaaa

SEQ ID NO: 5138913 - DNA, 25 bp, Homo sapien
tcttgaaagggtgttgtcaaaacca

SEQ ID NO: 5138914 - DNA, 25 bp, Homo sapien
gtttgttcaagaggaacgcgtggtg

SEQ ID NO: 5138915 - DNA, 25 bp, Homo sapien
tgttcaagaggaacgcgtggtgggt

SEQ ID NO: 5138916 - DNA, 25 bp, Homo sapien
caagaggaacgcgtggtgggtaaca

SEQ ID NO: 5138917 - DNA, 25 bp, Homo sapien
aggaacgcgtggtgggtaacagaag

SEQ ID NO: 5138918 - DNA, 25 bp, Homo sapien
ttccattccaagctatgccttgaag

SEQ ID NO: 5138919 - DNA, 25 bp, Homo sapien
cattccaagctatgccttgaagtga

SEQ ID NO: 5138920 - DNA, 25 bp, Homo sapien
agtgaattcctctaaaggttcgtca

SEQ ID NO: 5138921 - DNA, 25 bp, Homo sapien
taaaggttcgtcaactatgcacatt

SEQ ID NO: 5138922 - DNA, 25 bp, Homo sapien
acaaggacaaggaggacttgtcatc

SEQ ID NO: 5138923 - DNA, 25 bp, Homo sapien
caaggacaaggaggacttgtcatca

SEQ ID NO: 5138924 - DNA, 25 bp, Homo sapien
aaggacaaggaggacttgtcatcag

SEQ ID NO: 5138925 - DNA, 25 bp, Homo sapien
gacttgtcatcagggaggagacacc

SEQ ID NO: 5138926 - DNA, 25 bp, Homo sapien
catcaatgtggtagtagtcatagcc

SEQ ID NO: 5138927 - DNA, 25 bp, Homo sapien
aaaggcaggtatcctatgattggag

SEQ ID NO: 5138928 - DNA, 25 bp, Homo sapien
caggtatcctatgattggaggtgct

SEQ ID NO: 5138929 - DNA, 25 bp, Homo sapien
gtagtcatagcctgaggttcccagc

SEQ ID NO: 5138930 - DNA, 25 bp, Homo sapien
gatgtagtagtgagtctgcagccag

SEQ ID NO: 5138931 - DNA, 25 bp, Homo sapien
gagtgtgtgcacacgatgaactcgg

SEQ ID NO: 5138932 - DNA, 25 bp, Homo sapien
ccggtagcaacacgacttccctttg

SEQ ID NO: 5138933 - DNA, 25 bp, Homo sapien
gatgaactcgggcttggagttccac

SEQ ID NO: 5138934 - DNA, 25 bp, Homo sapien
ctgagagtttcttccaaggatttga

SEQ ID NO: 5138935 - DNA, 25 bp, Homo sapien
cagacagcaaggtacatcgaggttc

SEQ ID NO: 5138936 - DNA, 25 bp, Homo sapien
gaaggaatgagcgtcgttctctgcc

SEQ ID NO: 5138937 - DNA, 25 bp, Homo sapien
tgccttaaattcgacctgagtgact

SEQ ID NO: 5138938 - DNA, 25 bp, Homo sapien
tcgtctatgggataagcttctgcct

SEQ ID NO: 5138939 - DNA, 25 bp, Homo sapien
ctgtacaggaaattaagagaccaca

SEQ ID NO: 5138940 - DNA, 25 bp, Homo sapien
ggagggcctcggatggcgggtcttc

SEQ ID NO: 5138941 - DNA, 25 bp, Homo sapien
gcctcggatggcgggtcttccagag

SEQ ID NO: 5138942 - DNA, 25 bp, Homo sapien
agggcctcggatggcgggtcttcca

SEQ ID NO: 5138943 - DNA, 25 bp, Homo sapien
ggcctcggatggcgggtcttccaga

SEQ ID NO: 5138944 - DNA, 25 bp, Homo sapien
tgccgtatccatctggcagggatgg

SEQ ID NO: 5138945 - DNA, 25 bp, Homo sapien
ctttgccgtatccatctggcaggga

SEQ ID NO: 5138946 - DNA, 25 bp, Homo sapien
tatccatctggcagggatgggcgta

SEQ ID NO: 5138947 - DNA, 25 bp, Homo sapien
atccatctggcagggatgggcgtac

SEQ ID NO: 5138948 - DNA, 25 bp, Homo sapien
ctccagcatgatgttcactaacacc

SEQ ID NO: 5138949 - DNA, 25 bp, Homo sapien
tccagcatgatgttcactaacaccc

SEQ ID NO: 5138950 - DNA, 25 bp, Homo sapien
aggcacccactgctctctgatcttg

SEQ ID NO: 5138951 - DNA, 25 bp, Homo sapien
gggaggctctgccaaggcacccact

SEQ ID NO: 5138952 - DNA, 25 bp, Homo sapien
gagatgcttctgttggaccacagac

SEQ ID NO: 5138953 - DNA, 25 bp, Homo sapien
tctggattcgcagtcactgggcacc

SEQ ID NO: 5138954 - DNA, 25 bp, Homo sapien
gaggcacccacgtcgagtgtgttaa

SEQ ID NO: 5138955 - DNA, 25 bp, Homo sapien
tctgacatggctgtgtgcgaggatt

SEQ ID NO: 5138956 - DNA, 25 bp, Homo sapien
gaacttcttgaggacgccgatggcg

SEQ ID NO: 5138957 - DNA, 25 bp, Homo sapien
gactggtattaaggcccgaggcacc

SEQ ID NO: 5138958 - DNA, 25 bp, Homo sapien
ttagcatgtactcatccgaagaggg

SEQ ID NO: 5138959 - DNA, 25 bp, Homo sapien
tgtaagaaagcaacgaatgaccttc

SEQ ID NO: 5138960 - DNA, 25 bp, Homo sapien
ggtgtgcacagtacaagagctcgct

SEQ ID NO: 5138961 - DNA, 25 bp, Homo sapien
gagctcgcttgggatctctgataaa

SEQ ID NO: 5138962 - DNA, 25 bp, Homo sapien
cggggacaggtaactcttggggcag

SEQ ID NO: 5138963 - DNA, 25 bp, Homo sapien
agggtggctgatcttggcaaagccg

SEQ ID NO: 5138964 - DNA, 25 bp, Homo sapien
ggggcagggtggctgatcttggcaa

SEQ ID NO: 5138965 - DNA, 25 bp, Homo sapien
ctgatcttggcaaagccggggtgct

SEQ ID NO: 5138966 - DNA, 25 bp, Homo sapien
cacagcttgcaagcgcatctggagg

SEQ ID NO: 5138967 - DNA, 25 bp, Homo sapien
tgaagttattccgacacggccccta

SEQ ID NO: 5138968 - DNA, 25 bp, Homo sapien
ccaggagaccttgtttcagtgagaa

SEQ ID NO: 5138969 - DNA, 25 bp, Homo sapien
gcaactatctggaggtggcccctaa

SEQ ID NO: 5138970 - DNA, 25 bp, Homo sapien
tggtctcttggtccggtgggttctc

SEQ ID NO: 5138971 - DNA, 25 bp, Homo sapien
ggtgaacagctccaagtcaagagtt

SEQ ID NO: 5138972 - DNA, 25 bp, Homo sapien
tctgcgttccgcactggggtgaaca

SEQ ID NO: 5138973 - DNA, 25 bp, Homo sapien
tataggtgtctgttccctggctgca

SEQ ID NO: 5138974 - DNA, 25 bp, Homo sapien
ctgtgggagagaaaggggctttgtt

SEQ ID NO: 5138975 - DNA, 25 bp, Homo sapien
tgtgggagagaaaggggctttgtta

SEQ ID NO: 5138976 - DNA, 25 bp, Homo sapien
ctctgcagaacggtctgaggcagga

SEQ ID NO: 5138977 - DNA, 25 bp, Homo sapien
agctgctgtgtgaggtcgcaggacg

SEQ ID NO: 5138978 - DNA, 25 bp, Homo sapien
tgctgtgtgaggtcgcaggacgatg

SEQ ID NO: 5138979 - DNA, 25 bp, Homo sapien
tgggagcgggcgtgctctgcagaac

SEQ ID NO: 5138980 - DNA, 25 bp, Homo sapien
tggtctgggcagagctaagtctcct

SEQ ID NO: 5138981 - DNA, 25 bp, Homo sapien
gctaagtctcctatgagggaactga

SEQ ID NO: 5138982 - DNA, 25 bp, Homo sapien
tgctgaactgccgtctgggacgcag

SEQ ID NO: 5138983 - DNA, 25 bp, Homo sapien
tgggcagggtttgtcactccccgtg

SEQ ID NO: 5138984 - DNA, 25 bp, Homo sapien
tcagattttggatttcatttttccc

SEQ ID NO: 5138985 - DNA, 25 bp, Homo sapien
cagattttggatttcatttttccct

SEQ ID NO: 5138986 - DNA, 25 bp, Homo sapien
acttgctactatgcacgtctcggaa

SEQ ID NO: 5138987 - DNA, 25 bp, Homo sapien
ttacttgctactatgcacgtctcgg

SEQ ID NO: 5138988 - DNA, 25 bp, Homo sapien
tacttgctactatgcacgtctcgga

SEQ ID NO: 5138989 - DNA, 25 bp, Homo sapien
ttgctactatgcacgtctcggaaat

SEQ ID NO: 5138990 - DNA, 25 bp, Homo sapien
gacttactgccctgcagtccgggag

SEQ ID NO: 5138991 - DNA, 25 bp, Homo sapien
tattccaaatttagagagatgaaca

SEQ ID NO: 5138992 - DNA, 25 bp, Homo sapien
tgaatctgcagacctgacttactgc

SEQ ID NO: 5138993 - DNA, 25 bp, Homo sapien
cacagaattgggacaggattttgta

SEQ ID NO: 5138994 - DNA, 25 bp, Homo sapien
tcagatgaaagagttatttcagcct

SEQ ID NO: 5138995 - DNA, 25 bp, Homo sapien
tttcagccttgcaggcagatcttgc

SEQ ID NO: 5138996 - DNA, 25 bp, Homo sapien
cttcaaggtggagccgaaaaacata

SEQ ID NO: 5138997 - DNA, 25 bp, Homo sapien
cttgctgctgctcggtctgtacact

SEQ ID NO: 5138998 - DNA, 25 bp, Homo sapien
gatccgcgtccgctgctctagctgg

SEQ ID NO: 5138999 - DNA, 25 bp, Homo sapien
tcctggatcttgtggagctcttcct

SEQ ID NO: 5139000 - DNA, 25 bp, Homo sapien
tgttgccaccggatattggcctgca

SEQ ID NO: 5139001 - DNA, 25 bp, Homo sapien
tgatggtctggaacatgctgaactg

SEQ ID NO: 5139002 - DNA, 25 bp, Homo sapien
ctgcccggaaatggcggcaggaccc

SEQ ID NO: 5139003 - DNA, 25 bp, Homo sapien
ggaagaggacatcaggggtgtggcc

SEQ ID NO: 5139004 - DNA, 25 bp, Homo sapien
ctgtcagagtgaggggcgagggaag

SEQ ID NO: 5139005 - DNA, 25 bp, Homo sapien
tcctggctgcccggaaatggcggca

SEQ ID NO: 5139006 - DNA, 25 bp, Homo sapien
gcagggcaatccaacgccaagtgca

SEQ ID NO: 5139007 - DNA, 25 bp, Homo sapien
aagcaaagttatagaggtgcaggga

SEQ ID NO: 5139008 - DNA, 25 bp, Homo sapien
ggtgcagggaggtactacccaggac

SEQ ID NO: 5139009 - DNA, 25 bp, Homo sapien
cacaagtgcaaacgtaggtggaggc

SEQ ID NO: 5139010 - DNA, 25 bp, Homo sapien
ctgcttccatctcctcctgatggca

SEQ ID NO: 5139011 - DNA, 25 bp, Homo sapien
agaaacaacagagctgcttccatct

SEQ ID NO: 5139012 - DNA, 25 bp, Homo sapien
tgcttccatctcctcctgatggcag

SEQ ID NO: 5139013 - DNA, 25 bp, Homo sapien
ctgcgttggatgagaaacaacagag

SEQ ID NO: 5139014 - DNA, 25 bp, Homo sapien
aattctaatatctgggggtcacagt

SEQ ID NO: 5139015 - DNA, 25 bp, Homo sapien
ctccagtaggctgtgatatggatat

SEQ ID NO: 5139016 - DNA, 25 bp, Homo sapien
ggcacaccacaaatggggagccacc

SEQ ID NO: 5139017 - DNA, 25 bp, Homo sapien
gatatggatatcatcatttcccaca

SEQ ID NO: 5139018 - DNA, 25 bp, Homo sapien
tgtattaatctcagcgtgcaccggc

SEQ ID NO: 5139019 - DNA, 25 bp, Homo sapien
tacaatcaaaggctgggtcagaatc

SEQ ID NO: 5139020 - DNA, 25 bp, Homo sapien
gaacccgcctgtcacctatggtagg

SEQ ID NO: 5139021 - DNA, 25 bp, Homo sapien
ggcagacgccaaggttagctagagt

SEQ ID NO: 5139022 - DNA, 25 bp, Homo sapien
caatttaagggtgcactgaggaggt

SEQ ID NO: 5139023 - DNA, 25 bp, Homo sapien
ccatttcttttcacgagaaggccga

SEQ ID NO: 5139024 - DNA, 25 bp, Homo sapien
gctcaaggcgcacacgccgtgtctt

SEQ ID NO: 5139025 - DNA, 25 bp, Homo sapien
gaaggccgagcctttttctggtcaa

SEQ ID NO: 5139026 - DNA, 25 bp, Homo sapien
taggcattcctttgagcagccagca

SEQ ID NO: 5139027 - DNA, 25 bp, Homo sapien
tactagcagtatggccttcggcaat

SEQ ID NO: 5139028 - DNA, 25 bp, Homo sapien
taaaacagttgtttacgctgggcgc

SEQ ID NO: 5139029 - DNA, 25 bp, Homo sapien
tccactgaggttgggataaaggcca

SEQ ID NO: 5139030 - DNA, 25 bp, Homo sapien
gaaatacctggtgagtggaatgcat

SEQ ID NO: 5139031 - DNA, 25 bp, Homo sapien
tgactgaggcctaacaatgtgaaag

SEQ ID NO: 5139032 - DNA, 25 bp, Homo sapien
tcatgaaggttacaggcaagtgact

SEQ ID NO: 5139033 - DNA, 25 bp, Homo sapien
tgatgtacttgtttagagtcgaggt

SEQ ID NO: 5139034 - DNA, 25 bp, Homo sapien
tagttcatttactccactggtggac

SEQ ID NO: 5139035 - DNA, 25 bp, Homo sapien
ctcaccagtgtgcacctcctttgca

SEQ ID NO: 5139036 - DNA, 25 bp, Homo sapien
gtgtgcacctcctttgcattccctg

SEQ ID NO: 5139037 - DNA, 25 bp, Homo sapien
agtgtgcacctcctttgcattccct

SEQ ID NO: 5139038 - DNA, 25 bp, Homo sapien
accagtgtgcacctcctttgcattc

SEQ ID NO: 5139039 - DNA, 25 bp, Homo sapien
gcctgtgaagttggggtcatgggta

SEQ ID NO: 5139040 - DNA, 25 bp, Homo sapien
aaatgcctgtgaagttggggtcatg

SEQ ID NO: 5139041 - DNA, 25 bp, Homo sapien
tgggagcagaatagaaatgcctgtg

SEQ ID NO: 5139042 - DNA, 25 bp, Homo sapien
ctgggagcagaatagaaatgcctgt

SEQ ID NO: 5139043 - DNA, 25 bp, Homo sapien
ctgctgaagctcagggatacagctg

SEQ ID NO: 5139044 - DNA, 25 bp, Homo sapien
ctgctgagcctcaggtcgctgggtg

SEQ ID NO: 5139045 - DNA, 25 bp, Homo sapien
cctcaggtcgctgggtgctgctgaa

SEQ ID NO: 5139046 - DNA, 25 bp, Homo sapien
tgctgctgaagctcagggatacagc

SEQ ID NO: 5139047 - DNA, 25 bp, Homo sapien
cacacttgattctctgagcaggtgc

SEQ ID NO: 5139048 - DNA, 25 bp, Homo sapien
acacttgattctctgagcaggtgct

SEQ ID NO: 5139049 - DNA, 25 bp, Homo sapien
tcacacttgattctctgagcaggtg

SEQ ID NO: 5139050 - DNA, 25 bp, Homo sapien
tatcacacttgattctctgagcagg

SEQ ID NO: 5139051 - DNA, 25 bp, Homo sapien
gagtgaagctggcaaggagcacatt

SEQ ID NO: 5139052 - DNA, 25 bp, Homo sapien
ctagaggcaaggagtgaagctggca

SEQ ID NO: 5139053 - DNA, 25 bp, Homo sapien
ggagtgaagctggcaaggagcacat

SEQ ID NO: 5139054 - DNA, 25 bp, Homo sapien
tgaagctggcaaggagcacatttac

SEQ ID NO: 5139055 - DNA, 25 bp, Homo sapien
gctgcaggaatcaagtatgtcccaa

SEQ ID NO: 5139056 - DNA, 25 bp, Homo sapien
cataacggaacagggcagtaggcct

SEQ ID NO: 5139057 - DNA, 25 bp, Homo sapien
taggcctcagttcacgtaggctgca

SEQ ID NO: 5139058 - DNA, 25 bp, Homo sapien
taccctcagtccataacggaacagg

SEQ ID NO: 5139059 - DNA, 25 bp, Homo sapien
caagggacagtgaacagcagtggct

SEQ ID NO: 5139060 - DNA, 25 bp, Homo sapien
tttaagcacgagagcaagggactga

SEQ ID NO: 5139061 - DNA, 25 bp, Homo sapien
cagccgagtgatatctttaagcacg

SEQ ID NO: 5139062 - DNA, 25 bp, Homo sapien
gagtgttgggacattcagctgccag

SEQ ID NO: 5139063 - DNA, 25 bp, Homo sapien
gagcagggggcgcctggaggagcag

SEQ ID NO: 5139064 - DNA, 25 bp, Homo sapien
gcctggaggagcagggggcgcctgg

SEQ ID NO: 5139065 - DNA, 25 bp, Homo sapien
gaggagcagggggcgcctggaggag

SEQ ID NO: 5139066 - DNA, 25 bp, Homo sapien
gcagggggcgcctggaggagcaggg

SEQ ID NO: 5139067 - DNA, 25 bp, Homo sapien
aatgggggcctggaggagcagggag

SEQ ID NO: 5139068 - DNA, 25 bp, Homo sapien
ggaggagcaatgggggcctggagga

SEQ ID NO: 5139069 - DNA, 25 bp, Homo sapien
ctggaggagcaatgggggcctggag

SEQ ID NO: 5139070 - DNA, 25 bp, Homo sapien
tgggggcctggaggagcagggagac

SEQ ID NO: 5139071 - DNA, 25 bp, Homo sapien
ggcagggggcgcctggaggagcaga

SEQ ID NO: 5139072 - DNA, 25 bp, Homo sapien
gcctggaggagcagggggcgcctgg

SEQ ID NO: 5139073 - DNA, 25 bp, Homo sapien
gacctggaggaacagtgggggcctg

SEQ ID NO: 5139074 - DNA, 25 bp, Homo sapien
agcagggggcgcctggaggaacagg

SEQ ID NO: 5139075 - DNA, 25 bp, Homo sapien
gcaaggtcactggtggcttggaata

SEQ ID NO: 5139076 - DNA, 25 bp, Homo sapien
catttatctgctggcgattttgtcc

SEQ ID NO: 5139077 - DNA, 25 bp, Homo sapien
gaaatggctacaagggtttggcaaa

SEQ ID NO: 5139078 - DNA, 25 bp, Homo sapien
gcttggaataggtggaaatggctac

SEQ ID NO: 5139079 - DNA, 25 bp, Homo sapien
gctgactttaccaaagccacgaggg

SEQ ID NO: 5139080 - DNA, 25 bp, Homo sapien
tgctcttcccctgacattgacatgg

SEQ ID NO: 5139081 - DNA, 25 bp, Homo sapien
tctactggactacaggctcctcgag

SEQ ID NO: 5139082 - DNA, 25 bp, Homo sapien
ccggactctaggcaggcaagtagca

SEQ ID NO: 5139083 - DNA, 25 bp, Homo sapien
tgctgaacggggacactaggctgct

SEQ ID NO: 5139084 - DNA, 25 bp, Homo sapien
attcagacttggcgggagcgcagct

SEQ ID NO: 5139085 - DNA, 25 bp, Homo sapien
ggccgctgctctgcattagctgtga

SEQ ID NO: 5139086 - DNA, 25 bp, Homo sapien
caggtgtggtcagattcagacttgg

SEQ ID NO: 5139087 - DNA, 25 bp, Homo sapien
gagctgccgatcatggctgaagtct

SEQ ID NO: 5139088 - DNA, 25 bp, Homo sapien
tgagctgccgatcatggctgaagtc

SEQ ID NO: 5139089 - DNA, 25 bp, Homo sapien
ctgagctgccgatcatggctgaagt

SEQ ID NO: 5139090 - DNA, 25 bp, Homo sapien
gtcccgtcctgctgacttccgaggg

SEQ ID NO: 5139091 - DNA, 25 bp, Homo sapien
ttgacttgccgtcccgtcctgctga

SEQ ID NO: 5139092 - DNA, 25 bp, Homo sapien
ttgcgtcacaggacccgggcatcat

SEQ ID NO: 5139093 - DNA, 25 bp, Homo sapien
acttccgagggctgccttgcgtcac

SEQ ID NO: 5139094 - DNA, 25 bp, Homo sapien
tgcctttagcgcaaggctcatgtga

SEQ ID NO: 5139095 - DNA, 25 bp, Homo sapien
ccaggcgggtgagtctggccagcct

SEQ ID NO: 5139096 - DNA, 25 bp, Homo sapien
ttccaccagcgcttgcctcctgcct

SEQ ID NO: 5139097 - DNA, 25 bp, Homo sapien
ctggaaccattccaccagcgcttgc

SEQ ID NO: 5139098 - DNA, 25 bp, Homo sapien
tgtaagcatggagcgctgagttttt

SEQ ID NO: 5139099 - DNA, 25 bp, Homo sapien
ttctgcttaattgggacacggtaga

SEQ ID NO: 5139100 - DNA, 25 bp, Homo sapien
aagctgaggggcagcgtccccttca

SEQ ID NO: 5139101 - DNA, 25 bp, Homo sapien
ctgctgtaagcatggagcgctgagt

SEQ ID NO: 5139102 - DNA, 25 bp, Homo sapien
gggtgtgcgtctggattttgaaaca

SEQ ID NO: 5139103 - DNA, 25 bp, Homo sapien
gaaacacggtctggctctgggcgta

SEQ ID NO: 5139104 - DNA, 25 bp, Homo sapien
gtgcgtctggattttgaaacacggt

SEQ ID NO: 5139105 - DNA, 25 bp, Homo sapien
gctgttggcggggtgtgcgtctgga

SEQ ID NO: 5139106 - DNA, 25 bp, Homo sapien
gggtggagcaccgcctgccccatca

SEQ ID NO: 5139107 - DNA, 25 bp, Homo sapien
ggggtggagcaccgcctgccccatc

SEQ ID NO: 5139108 - DNA, 25 bp, Homo sapien
tggagcaccgcctgccccatcagca

SEQ ID NO: 5139109 - DNA, 25 bp, Homo sapien
gtggagcaccgcctgccccatcagc

SEQ ID NO: 5139110 - DNA, 25 bp, Homo sapien
tgagttgactcccactatgtgtggg

SEQ ID NO: 5139111 - DNA, 25 bp, Homo sapien
tctcgagaactgacaagatctgcaa

SEQ ID NO: 5139112 - DNA, 25 bp, Homo sapien
ttcccatccaaaatcacttctgggt

SEQ ID NO: 5139113 - DNA, 25 bp, Homo sapien
gtctgagttgactcccactatgtgt

SEQ ID NO: 5139114 - DNA, 25 bp, Homo sapien
cccaagcccctaagggcagtgagtg

SEQ ID NO: 5139115 - DNA, 25 bp, Homo sapien
agtgggccgaagcgctctctgtatt

SEQ ID NO: 5139116 - DNA, 25 bp, Homo sapien
gggccgaagcgctctctgtattcat

SEQ ID NO: 5139117 - DNA, 25 bp, Homo sapien
tctgtattcatagcctgcatcttgt

SEQ ID NO: 5139118 - DNA, 25 bp, Homo sapien
gaagctaagttctccgccaatagtg

SEQ ID NO: 5139119 - DNA, 25 bp, Homo sapien
caggtagttgacagggcagaatcca

SEQ ID NO: 5139120 - DNA, 25 bp, Homo sapien
gaatggtttcgtaaacacgtgcaca

SEQ ID NO: 5139121 - DNA, 25 bp, Homo sapien
cacaatgtttttggatgatggaacc

SEQ ID NO: 5139122 - DNA, 25 bp, Homo sapien
gctgctcactgtgcaaagaggttgg

SEQ ID NO: 5139123 - DNA, 25 bp, Homo sapien
taggtggagagaagtagcgagtcct

SEQ ID NO: 5139124 - DNA, 25 bp, Homo sapien
gagagaagtagcgagtcctgctgct

SEQ ID NO: 5139125 - DNA, 25 bp, Homo sapien
gctcactgtgcaaagaggttggtgc

SEQ ID NO: 5139126 - DNA, 25 bp, Homo sapien
ctgacgactcagacagactgctgac

SEQ ID NO: 5139127 - DNA, 25 bp, Homo sapien
tggaggcctgacgactcagacagac

SEQ ID NO: 5139128 - DNA, 25 bp, Homo sapien
tgctggaggcctgacgactcagaca

SEQ ID NO: 5139129 - DNA, 25 bp, Homo sapien
ggcctgacgactcagacagactgct

SEQ ID NO: 5139130 - DNA, 25 bp, Homo sapien
ggttaccatccaggagttctgaaac

SEQ ID NO: 5139131 - DNA, 25 bp, Homo sapien
gattgtgtcccgacttcagtgccgg

SEQ ID NO: 5139132 - DNA, 25 bp, Homo sapien
gctgcactccagagatggttaccat

SEQ ID NO: 5139133 - DNA, 25 bp, Homo sapien
ttctgaaacgtatgcagtgtgcaca

SEQ ID NO: 5139134 - DNA, 25 bp, Homo sapien
caggtggctagagcaaccggtgtac

SEQ ID NO: 5139135 - DNA, 25 bp, Homo sapien
gagatgcgccatctctgacggcaaa

SEQ ID NO: 5139136 - DNA, 25 bp, Homo sapien
aaagacgatcaagagcgtgaaggcc

SEQ ID NO: 5139137 - DNA, 25 bp, Homo sapien
tccagtatggctatagagtgtgccc

SEQ ID NO: 5139138 - DNA, 25 bp, Homo sapien
gatgcagcattctcactcaaagggc

SEQ ID NO: 5139139 - DNA, 25 bp, Homo sapien
cacagacttggagttctcagcagaa

SEQ ID NO: 5139140 - DNA, 25 bp, Homo sapien
tatttcctctgtgtagctgtgcaaa

SEQ ID NO: 5139141 - DNA, 25 bp, Homo sapien
catcccattagggtttaggccagaa

SEQ ID NO: 5139142 - DNA, 25 bp, Homo sapien
caggaaggtccaatgggacttccca

SEQ ID NO: 5139143 - DNA, 25 bp, Homo sapien
tggcagtttcatcctggactgagct

SEQ ID NO: 5139144 - DNA, 25 bp, Homo sapien
gaagcgccaccgaaagatttttaca

SEQ ID NO: 5139145 - DNA, 25 bp, Homo sapien
tgaagaggtgctaaagaggtagtat

SEQ ID NO: 5139146 - DNA, 25 bp, Homo sapien
ttgggatcattgttctgatcctgac

SEQ ID NO: 5139147 - DNA, 25 bp, Homo sapien
tgatcttgccccttctatctggctc

SEQ ID NO: 5139148 - DNA, 25 bp, Homo sapien
gactccctgcaatcacactctgaag

SEQ ID NO: 5139149 - DNA, 25 bp, Homo sapien
gatgtgatcttgccccttctatctg

SEQ ID NO: 5139150 - DNA, 25 bp, Homo sapien
ctactaacagggttttcagcaatgg

SEQ ID NO: 5139151 - DNA, 25 bp, Homo sapien
cggtcccagggtcactaagacgcaa

SEQ ID NO: 5139152 - DNA, 25 bp, Homo sapien
ggaggtgcttgcgtcgagcagggcc

SEQ ID NO: 5139153 - DNA, 25 bp, Homo sapien
cacaggattgccagtcgtggctgtc

SEQ ID NO: 5139154 - DNA, 25 bp, Homo sapien
gagccacagggctgtcgcgtcgtcc

SEQ ID NO: 5139155 - DNA, 25 bp, Homo sapien
cttttgggccgcgagcttgaggtcc

SEQ ID NO: 5139156 - DNA, 25 bp, Homo sapien
agctatgatgtaagcggcgcgcgcc

SEQ ID NO: 5139157 - DNA, 25 bp, Homo sapien
tgcaagtacaacttccgggtcgcca

SEQ ID NO: 5139158 - DNA, 25 bp, Homo sapien
ttctggctccgcgaaggaacttgcg

SEQ ID NO: 5139159 - DNA, 25 bp, Homo sapien
cccgggctggctcgggagagatttt

SEQ ID NO: 5139160 - DNA, 25 bp, Homo sapien
ttagcacaatcccaaaggaggatgg

SEQ ID NO: 5139161 - DNA, 25 bp, Homo sapien
cgggagagattttgcggtcccagtt

SEQ ID NO: 5139162 - DNA, 25 bp, Homo sapien
ggtcccagttagcacaatcccaaag

SEQ ID NO: 5139163 - DNA, 25 bp, Homo sapien
caggctctgggagcctttaaaagca

SEQ ID NO: 5139164 - DNA, 25 bp, Homo sapien
ctaaatgcaggcgacaaggaggctc

SEQ ID NO: 5139165 - DNA, 25 bp, Homo sapien
aaaagcagggtgtattcccatctcc

SEQ ID NO: 5139166 - DNA, 25 bp, Homo sapien
aggctaagtcggtcacccagtggcc

SEQ ID NO: 5139167 - DNA, 25 bp, Homo sapien
ttaccacttcgttgatggcagaacg

SEQ ID NO: 5139168 - DNA, 25 bp, Homo sapien
ctcgggttaccacttcgttgatggc

SEQ ID NO: 5139169 - DNA, 25 bp, Homo sapien
cgggttaccacttcgttgatggcag

SEQ ID NO: 5139170 - DNA, 25 bp, Homo sapien
tattctcgggttaccacttcgttga

SEQ ID NO: 5139171 - DNA, 25 bp, Homo sapien
gacccagggcggctagagggatact

SEQ ID NO: 5139172 - DNA, 25 bp, Homo sapien
gttcgagacccagggcggctagagg

SEQ ID NO: 5139173 - DNA, 25 bp, Homo sapien
cagacgcgtgagttcgagacccagg

SEQ ID NO: 5139174 - DNA, 25 bp, Homo sapien
ccagggcggctagagggatactcac

SEQ ID NO: 5139175 - DNA, 25 bp, Homo sapien
tgttgagcctggtgtcaatgcgcac

SEQ ID NO: 5139176 - DNA, 25 bp, Homo sapien
tttgagtgcccgaggtgcacgcttc

SEQ ID NO: 5139177 - DNA, 25 bp, Homo sapien
tgagcctggtgtcaatgcgcacatc

SEQ ID NO: 5139178 - DNA, 25 bp, Homo sapien
tgcccgaggtgcacgcttcttgaag

SEQ ID NO: 5139179 - DNA, 25 bp, Homo sapien
cttcgaatacagataactttagcac

SEQ ID NO: 5139180 - DNA, 25 bp, Homo sapien
tgcagggttaagtgaagctggtgtc

SEQ ID NO: 5139181 - DNA, 25 bp, Homo sapien
gggctcttgcagggttaagtgaagc

SEQ ID NO: 5139182 - DNA, 25 bp, Homo sapien
tcttgcagggttaagtgaagctggt

SEQ ID NO: 5139183 - DNA, 25 bp, Homo sapien
gctcttgcagggttaagtgaagctg

SEQ ID NO: 5139184 - DNA, 25 bp, Homo sapien
tctggttccactttagagcagggtc

SEQ ID NO: 5139185 - DNA, 25 bp, Homo sapien
gccatgatgtctagagcgaccctca

SEQ ID NO: 5139186 - DNA, 25 bp, Homo sapien
gacaggtaaaactgccgcaggccaa

SEQ ID NO: 5139187 - DNA, 25 bp, Homo sapien
caattttttgttgagggagcagccc

SEQ ID NO: 5139188 - DNA, 25 bp, Homo sapien
cagatatctgggtccaaatggtcca

SEQ ID NO: 5139189 - DNA, 25 bp, Homo sapien
gtagccaccattgatacccaaccgg

SEQ ID NO: 5139190 - DNA, 25 bp, Homo sapien
tgaagacatgttaaggtagccacca

SEQ ID NO: 5139191 - DNA, 25 bp, Homo sapien
cattaaatgctgttaccacaggagg

SEQ ID NO: 5139192 - DNA, 25 bp, Homo sapien
acagccgcacacggattcggtatgg

SEQ ID NO: 5139193 - DNA, 25 bp, Homo sapien
cgcacacggattcggtatggcacat

SEQ ID NO: 5139194 - DNA, 25 bp, Homo sapien
cagccgcacacggattcggtatggc

SEQ ID NO: 5139195 - DNA, 25 bp, Homo sapien
gccgcacacggattcggtatggcac

SEQ ID NO: 5139196 - DNA, 25 bp, Homo sapien
gaaagtggtaacaggtacataggta

SEQ ID NO: 5139197 - DNA, 25 bp, Homo sapien
ttgaaagtggtaacaggtacatagg

SEQ ID NO: 5139198 - DNA, 25 bp, Homo sapien
ttttgaaagtggtaacaggtacata

SEQ ID NO: 5139199 - DNA, 25 bp, Homo sapien
tgaaagtggtaacaggtacataggt

SEQ ID NO: 5139200 - DNA, 25 bp, Homo sapien
tgaattcacattttaagaggtaagg

SEQ ID NO: 5139201 - DNA, 25 bp, Homo sapien
aagaggtaaggacatttttctaatg

SEQ ID NO: 5139202 - DNA, 25 bp, Homo sapien
cacattttaagaggtaaggacattt

SEQ ID NO: 5139203 - DNA, 25 bp, Homo sapien
acagatgaattcacattttaagagg

SEQ ID NO: 5139204 - DNA, 25 bp, Homo sapien
aacagtcaatttccatacccacatc

SEQ ID NO: 5139205 - DNA, 25 bp, Homo sapien
cccagatatggatcagttttgcatt

SEQ ID NO: 5139206 - DNA, 25 bp, Homo sapien
accttttgtagacgggtctgggcat

SEQ ID NO: 5139207 - DNA, 25 bp, Homo sapien
tgggcattctattttccacaacctt

SEQ ID NO: 5139208 - DNA, 25 bp, Homo sapien
tgggtggtgcaacactactaggtac

SEQ ID NO: 5139209 - DNA, 25 bp, Homo sapien
tgaaccttgactccaggtaccacgg

SEQ ID NO: 5139210 - DNA, 25 bp, Homo sapien
ctcaatatggatgtaggcagaagct

SEQ ID NO: 5139211 - DNA, 25 bp, Homo sapien
ggcagcacaggccatcaatttggga

SEQ ID NO: 5139212 - DNA, 25 bp, Homo sapien
tgaggactcggtttttgcagacact

SEQ ID NO: 5139213 - DNA, 25 bp, Homo sapien
ggagtccaccataccaaagcacgaa

SEQ ID NO: 5139214 - DNA, 25 bp, Homo sapien
gggtcagccctaaaccgagatttca

SEQ ID NO: 5139215 - DNA, 25 bp, Homo sapien
gggcatctggctaaacaacctgaca

SEQ ID NO: 5139216 - DNA, 25 bp, Homo sapien
taatctgagaatcaagcttgggccc

SEQ ID NO: 5139217 - DNA, 25 bp, Homo sapien
ccaggtagcggaacatcatagtgat

SEQ ID NO: 5139218 - DNA, 25 bp, Homo sapien
cgcgcccgaccgagaattaactgtt

SEQ ID NO: 5139219 - DNA, 25 bp, Homo sapien
ttcaaatcgcttcaaaacaggaggc

SEQ ID NO: 5139220 - DNA, 25 bp, Homo sapien
tgttgtcaacatcgagacccctggt

SEQ ID NO: 5139221 - DNA, 25 bp, Homo sapien
catttgggttcgtggaccctgcaaa

SEQ ID NO: 5139222 - DNA, 25 bp, Homo sapien
tgaaaatgaccgagacagccagtcg

SEQ ID NO: 5139223 - DNA, 25 bp, Homo sapien
cagccagtcgccgttgaggaatcct

SEQ ID NO: 5139224 - DNA, 25 bp, Homo sapien
gggtgtatatgtagaagtgagattt

SEQ ID NO: 5139225 - DNA, 25 bp, Homo sapien
tactactgtgaacaatctgtgtaca

SEQ ID NO: 5139226 - DNA, 25 bp, Homo sapien
ctcttgggtgtatatgtagaagtga

SEQ ID NO: 5139227 - DNA, 25 bp, Homo sapien
tctgtgtacaagtttgcatgtgaac

SEQ ID NO: 5139228 - DNA, 25 bp, Homo sapien
ccagccgtaggcagctttctgtttc

SEQ ID NO: 5139229 - DNA, 25 bp, Homo sapien
catgctgtagcatgcgtcagtgctt

SEQ ID NO: 5139230 - DNA, 25 bp, Homo sapien
tgttcgacttctctcacctagcatg

SEQ ID NO: 5139231 - DNA, 25 bp, Homo sapien
tccattgcatgggtatgccatgatt

SEQ ID NO: 5139232 - DNA, 25 bp, Homo sapien
catttagacgcttgaattacaggct

SEQ ID NO: 5139233 - DNA, 25 bp, Homo sapien
cagtgagttccatgtccaggtgacg

SEQ ID NO: 5139234 - DNA, 25 bp, Homo sapien
tcttcatatgctgtgacggcagagg

SEQ ID NO: 5139235 - DNA, 25 bp, Homo sapien
tctgctctgagagttgtttggcccc

SEQ ID NO: 5139236 - DNA, 25 bp, Homo sapien
gctgtttccaaccactatggaggga

SEQ ID NO: 5139237 - DNA, 25 bp, Homo sapien
tctgattaatccaagcgcagggcct

SEQ ID NO: 5139238 - DNA, 25 bp, Homo sapien
ggtatccaaatcgtcaagaagccac

SEQ ID NO: 5139239 - DNA, 25 bp, Homo sapien
ggaaggccctatactgcttttgcaa

SEQ ID NO: 5139240 - DNA, 25 bp, Homo sapien
gaacaacagactttataggcgaggt

SEQ ID NO: 5139241 - DNA, 25 bp, Homo sapien
catcagtaggaccaaagatagagag

SEQ ID NO: 5139242 - DNA, 25 bp, Homo sapien
gaacgtattcctctcattgacacat

SEQ ID NO: 5139243 - DNA, 25 bp, Homo sapien
gtaggctacagcatctaggttcgtg

SEQ ID NO: 5139244 - DNA, 25 bp, Homo sapien
catgtagttgtggatatgcggcgtt

SEQ ID NO: 5139245 - DNA, 25 bp, Homo sapien
tgtagttgtggatatgcggcgttgt

SEQ ID NO: 5139246 - DNA, 25 bp, Homo sapien
gtagttgtggatatgcggcgttgtt

SEQ ID NO: 5139247 - DNA, 25 bp, Homo sapien
tcatgtagttgtggatatgcggcgt

SEQ ID NO: 5139248 - DNA, 25 bp, Homo sapien
ctgttttgaagagatcatcgttttg

SEQ ID NO: 5139249 - DNA, 25 bp, Homo sapien
tttgaagagatcatcgttttgaaga

SEQ ID NO: 5139250 - DNA, 25 bp, Homo sapien
ttgaagagatcatcgttttgaagac

SEQ ID NO: 5139251 - DNA, 25 bp, Homo sapien
ttttgaagagatcatcgttttgaag

SEQ ID NO: 5139252 - DNA, 25 bp, Homo sapien
tactgagcaaacctatgaggacccc

SEQ ID NO: 5139253 - DNA, 25 bp, Homo sapien
tgctgtctaaaggatgagttctgtc

SEQ ID NO: 5139254 - DNA, 25 bp, Homo sapien
cacatgcttgaagtagaattgcgag

SEQ ID NO: 5139255 - DNA, 25 bp, Homo sapien
gaattgcgagcattggaaccgttcg

SEQ ID NO: 5139256 - DNA, 25 bp, Homo sapien
gttttcactgcagattgataaacct

SEQ ID NO: 5139257 - DNA, 25 bp, Homo sapien
aacctacggatattggccattttgc

SEQ ID NO: 5139258 - DNA, 25 bp, Homo sapien
gcttagttaattatactaattggac

SEQ ID NO: 5139259 - DNA, 25 bp, Homo sapien
tatactaattggactttcagaggag

SEQ ID NO: 5139260 - DNA, 25 bp, Homo sapien
atattacagatgatttggtaccatg

SEQ ID NO: 5139261 - DNA, 25 bp, Homo sapien
agaaatattacagatgatttggtac

SEQ ID NO: 5139262 - DNA, 25 bp, Homo sapien
aaatattacagatgatttggtacca

SEQ ID NO: 5139263 - DNA, 25 bp, Homo sapien
ctagcacagaaatattacagatgat

SEQ ID NO: 5139264 - DNA, 25 bp, Homo sapien
catcagtaccttgttgaaaccccgg

SEQ ID NO: 5139265 - DNA, 25 bp, Homo sapien
ggagacagacgtcctcggtgagctt

SEQ ID NO: 5139266 - DNA, 25 bp, Homo sapien
gcttggttgtaaaggcatctgctgc

SEQ ID NO: 5139267 - DNA, 25 bp, Homo sapien
aagcaatgaagagccgagacccaag

SEQ ID NO: 5139268 - DNA, 25 bp, Homo sapien
ttcatctaactttctaatgaattac

SEQ ID NO: 5139269 - DNA, 25 bp, Homo sapien
ccagcctcttcatctaactttctaa

SEQ ID NO: 5139270 - DNA, 25 bp, Homo sapien
gcctcttcatctaactttctaatga

SEQ ID NO: 5139271 - DNA, 25 bp, Homo sapien
gcgcccagcctcttcatctaacttt

SEQ ID NO: 5139272 - DNA, 25 bp, Homo sapien
catctttccatagttgtcattatct

SEQ ID NO: 5139273 - DNA, 25 bp, Homo sapien
gaaaagttgcatagattagtacaga

SEQ ID NO: 5139274 - DNA, 25 bp, Homo sapien
tgtcattatctatatctggcattct

SEQ ID NO: 5139275 - DNA, 25 bp, Homo sapien
actgaagttttctgccctttatgcc

SEQ ID NO: 5139276 - DNA, 25 bp, Homo sapien
tgttaatgtattcatgtggttcaga

SEQ ID NO: 5139277 - DNA, 25 bp, Homo sapien
aataaaaagtctcacttccacctct

SEQ ID NO: 5139278 - DNA, 25 bp, Homo sapien
aaatatgcaataaaaagtctcactt

SEQ ID NO: 5139279 - DNA, 25 bp, Homo sapien
aaaattgttaatgtattcatgtggt

SEQ ID NO: 5139280 - DNA, 25 bp, Homo sapien
ctttgaggatatgagcttgcagact

SEQ ID NO: 5139281 - DNA, 25 bp, Homo sapien
tgcagactacagcatctgcccttgt

SEQ ID NO: 5139282 - DNA, 25 bp, Homo sapien
tgcagttactgggaactacttcaga

SEQ ID NO: 5139283 - DNA, 25 bp, Homo sapien
attctgaagaggctcacctggtcct

SEQ ID NO: 5139284 - DNA, 25 bp, Homo sapien
tgtgcgaaggcaaactatgaagtca

SEQ ID NO: 5139285 - DNA, 25 bp, Homo sapien
caggttcccagcacgattgaagtga

SEQ ID NO: 5139286 - DNA, 25 bp, Homo sapien
cagaggcaggcacgttgtggactcc

SEQ ID NO: 5139287 - DNA, 25 bp, Homo sapien
tgaagtgatagtcagcagagtccag

SEQ ID NO: 5139288 - DNA, 25 bp, Homo sapien
ttgtggactgttcgctctggacgcc

SEQ ID NO: 5139289 - DNA, 25 bp, Homo sapien
cggatgttcgcctctgacagctaca

SEQ ID NO: 5139290 - DNA, 25 bp, Homo sapien
tctggacgccgttcagtcgctgtca

SEQ ID NO: 5139291 - DNA, 25 bp, Homo sapien
gggaagttcagacggcacagttttg

SEQ ID NO: 5139292 - DNA, 25 bp, Homo sapien
aatgcaccagacatagtcagcttgg

SEQ ID NO: 5139293 - DNA, 25 bp, Homo sapien
tggcgactagaaccacgtttgtgag

SEQ ID NO: 5139294 - DNA, 25 bp, Homo sapien
tgcagggagtaagggttgattttac

SEQ ID NO: 5139295 - DNA, 25 bp, Homo sapien
tcgttaaagctaacatagccagcac

SEQ ID NO: 5139296 - DNA, 25 bp, Homo sapien
atcatagcctcggagtccaagaggg

SEQ ID NO: 5139297 - DNA, 25 bp, Homo sapien
gcatcatagcctcggagtccaagag

SEQ ID NO: 5139298 - DNA, 25 bp, Homo sapien
catagcctcggagtccaagagggca

SEQ ID NO: 5139299 - DNA, 25 bp, Homo sapien
ctgcatcatagcctcggagtccaag

SEQ ID NO: 5139300 - DNA, 25 bp, Homo sapien
ggtgcattgtcaccctcggttgatt

SEQ ID NO: 5139301 - DNA, 25 bp, Homo sapien
gggtgcattgtcaccctcggttgat

SEQ ID NO: 5139302 - DNA, 25 bp, Homo sapien
tgattgggctggttggagttgccag

SEQ ID NO: 5139303 - DNA, 25 bp, Homo sapien
gagttgccaggcgtgggagtcacct

SEQ ID NO: 5139304 - DNA, 25 bp, Homo sapien
tatggccacagtgcggagccgctcg

SEQ ID NO: 5139305 - DNA, 25 bp, Homo sapien
ttatggccacagtgcggagccgctc

SEQ ID NO: 5139306 - DNA, 25 bp, Homo sapien
ccacagtgcggagccgctcgtagct

SEQ ID NO: 5139307 - DNA, 25 bp, Homo sapien
tggccacagtgcggagccgctcgta

SEQ ID NO: 5139308 - DNA, 25 bp, Homo sapien
catgattgccatgtgtggccactcc

SEQ ID NO: 5139309 - DNA, 25 bp, Homo sapien
tcatgattgccatgtgtggccactc

SEQ ID NO: 5139310 - DNA, 25 bp, Homo sapien
gtcatgattgccatgtgtggccact

SEQ ID NO: 5139311 - DNA, 25 bp, Homo sapien
agtcatgattgccatgtgtggccac

SEQ ID NO: 5139312 - DNA, 25 bp, Homo sapien
gtatttaacataacatggcacagaa

SEQ ID NO: 5139313 - DNA, 25 bp, Homo sapien
tagtatttaacataacatggcacag

SEQ ID NO: 5139314 - DNA, 25 bp, Homo sapien
aatagtatttaacataacatggcac

SEQ ID NO: 5139315 - DNA, 25 bp, Homo sapien
agtatttaacataacatggcacaga

SEQ ID NO: 5139316 - DNA, 25 bp, Homo sapien
taatgccctcactaaaccgataaag

SEQ ID NO: 5139317 - DNA, 25 bp, Homo sapien
gaaattcagggagtaaccacttctg

SEQ ID NO: 5139318 - DNA, 25 bp, Homo sapien
gccttgtatatctgaattgcctggg

SEQ ID NO: 5139319 - DNA, 25 bp, Homo sapien
cattgtgtacatgcgtgaggactga

SEQ ID NO: 5139320 - DNA, 25 bp, Homo sapien
tcaggcgatgcgagttgttacactt

SEQ ID NO: 5139321 - DNA, 25 bp, Homo sapien
tattcctaagactggacctggttgg

SEQ ID NO: 5139322 - DNA, 25 bp, Homo sapien
taccagggtagcgaaggaagtgcca

SEQ ID NO: 5139323 - DNA, 25 bp, Homo sapien
tgaaaagcagggacatactgagtct

SEQ ID NO: 5139324 - DNA, 25 bp, Homo sapien
ctcttcacggtgagaacctggcggg

SEQ ID NO: 5139325 - DNA, 25 bp, Homo sapien
tgttaaaacctatgcaagttgtggg

SEQ ID NO: 5139326 - DNA, 25 bp, Homo sapien
gatattgaacaatgattacttttcc

SEQ ID NO: 5139327 - DNA, 25 bp, Homo sapien
aaagggccaaagaggatcttccctg

SEQ ID NO: 5139328 - DNA, 25 bp, Homo sapien
tgggccctcagccaattggatagtg

SEQ ID NO: 5139329 - DNA, 25 bp, Homo sapien
gattggatcttccatacttagtcca

SEQ ID NO: 5139330 - DNA, 25 bp, Homo sapien
tacaattaaccattgcagtaaccct

SEQ ID NO: 5139331 - DNA, 25 bp, Homo sapien
gtatctatagtaagctgaacctgag

SEQ ID NO: 5139332 - DNA, 25 bp, Homo sapien
ttcgtgttgtggattcggcaggctc

SEQ ID NO: 5139333 - DNA, 25 bp, Homo sapien
cacactcaggcattcgtgttgtgga

SEQ ID NO: 5139334 - DNA, 25 bp, Homo sapien
gctcgttccaccagccatgatgggc

SEQ ID NO: 5139335 - DNA, 25 bp, Homo sapien
ggcaggctcgttccaccagccatga

SEQ ID NO: 5139336 - DNA, 25 bp, Homo sapien
tcttggtagctggagaaagcgacag

SEQ ID NO: 5139337 - DNA, 25 bp, Homo sapien
ttgtctctatcttggacactgttgg

SEQ ID NO: 5139338 - DNA, 25 bp, Homo sapien
cactgttgggatccgcacgtgactg

SEQ ID NO: 5139339 - DNA, 25 bp, Homo sapien
gcacgtgactgagccccgatccaaa

SEQ ID NO: 5139340 - DNA, 25 bp, Homo sapien
tggcgtgtgcgtaacagatccaggt

SEQ ID NO: 5139341 - DNA, 25 bp, Homo sapien
acagatccaggtcatgggatgtctg

SEQ ID NO: 5139342 - DNA, 25 bp, Homo sapien
aacagatccaggtcatgggatgtct

SEQ ID NO: 5139343 - DNA, 25 bp, Homo sapien
ctggccttgctggcgtgtgcgtaac

SEQ ID NO: 5139344 - DNA, 25 bp, Homo sapien
tagatgcaatggataaagaagaaag

SEQ ID NO: 5139345 - DNA, 25 bp, Homo sapien
ctagatgcaatggataaagaagaaa

SEQ ID NO: 5139346 - DNA, 25 bp, Homo sapien
tctgtaattttcaaggtgaaagtaa

SEQ ID NO: 5139347 - DNA, 25 bp, Homo sapien
ttctctgtaattttcaaggtgaaag

SEQ ID NO: 5139348 - DNA, 25 bp, Homo sapien
atatttgattggtgtcatttcaagg

SEQ ID NO: 5139349 - DNA, 25 bp, Homo sapien
caaggacctgctgtagaagaactgt

SEQ ID NO: 5139350 - DNA, 25 bp, Homo sapien
tattatcttcatgttgcagataaga

SEQ ID NO: 5139351 - DNA, 25 bp, Homo sapien
cagataagagagctaaggctggaat

SEQ ID NO: 5139352 - DNA, 25 bp, Homo sapien
tccagatgcttcgaaagaggattcc

SEQ ID NO: 5139353 - DNA, 25 bp, Homo sapien
gctgatagacctgggctgtgtacca

SEQ ID NO: 5139354 - DNA, 25 bp, Homo sapien
tgcaagtacttctggcagctgatag

SEQ ID NO: 5139355 - DNA, 25 bp, Homo sapien
ggaagccctatcacgtctccagatg

SEQ ID NO: 5139356 - DNA, 25 bp, Homo sapien
tcaacccccaagcccttgtgacctg

SEQ ID NO: 5139357 - DNA, 25 bp, Homo sapien
gttgcgactcctggtcattgtggct

SEQ ID NO: 5139358 - DNA, 25 bp, Homo sapien
gaccggccctcgactcattgttgcg

SEQ ID NO: 5139359 - DNA, 25 bp, Homo sapien
tcgactcattgttgcgactcctggt

SEQ ID NO: 5139360 - DNA, 25 bp, Homo sapien
gcaggaccggccctcgactcattgt

SEQ ID NO: 5139361 - DNA, 25 bp, Homo sapien
tagggcctttgagccctgtctttta

SEQ ID NO: 5139362 - DNA, 25 bp, Homo sapien
acaggatcaaaagcactggggcgag

SEQ ID NO: 5139363 - DNA, 25 bp, Homo sapien
gtgacaggatcaaaagcactggggc

SEQ ID NO: 5139364 - DNA, 25 bp, Homo sapien
cactggggcgaggaacttctgcccc

SEQ ID NO: 5139365 - DNA, 25 bp, Homo sapien
ggaggctgcaggacaacttctagga

SEQ ID NO: 5139366 - DNA, 25 bp, Homo sapien
tgtggttagattatccatagatgga

SEQ ID NO: 5139367 - DNA, 25 bp, Homo sapien
ttcagtctagattggagcctggcag

SEQ ID NO: 5139368 - DNA, 25 bp, Homo sapien
gatagactgtaaagtgtgtttgcac

SEQ ID NO: 5139369 - DNA, 25 bp, Homo sapien
ggcacttttctctcccaggcccctc

SEQ ID NO: 5139370 - DNA, 25 bp, Homo sapien
ttggcacttttctctcccaggcccc

SEQ ID NO: 5139371 - DNA, 25 bp, Homo sapien
cacttttctctcccaggcccctcat

SEQ ID NO: 5139372 - DNA, 25 bp, Homo sapien
gttggcacttttctctcccaggccc

SEQ ID NO: 5139373 - DNA, 25 bp, Homo sapien
caatggtattaaaaagcagccgtga

SEQ ID NO: 5139374 - DNA, 25 bp, Homo sapien
aagcagccgtgagcctattttaatc

SEQ ID NO: 5139375 - DNA, 25 bp, Homo sapien
ctgaaccacctcttgggttgcctct

SEQ ID NO: 5139376 - DNA, 25 bp, Homo sapien
tgcccctgaaccacctcttgggttg

SEQ ID NO: 5139377 - DNA, 25 bp, Homo sapien
ctctgtggtggtggcggtttttgga

SEQ ID NO: 5139378 - DNA, 25 bp, Homo sapien
tggtaaagtcaagacccatgggaca

SEQ ID NO: 5139379 - DNA, 25 bp, Homo sapien
ttgtggtaaagtcaagacccatggg

SEQ ID NO: 5139380 - DNA, 25 bp, Homo sapien
cttaggattgtggtaaagtcaagac

SEQ ID NO: 5139381 - DNA, 25 bp, Homo sapien
ggaagccaatgccgatgaagcagcg

SEQ ID NO: 5139382 - DNA, 25 bp, Homo sapien
gggaagccaatgccgatgaagcagc

SEQ ID NO: 5139383 - DNA, 25 bp, Homo sapien
tcgaccataaagagggaaaagtcta

SEQ ID NO: 5139384 - DNA, 25 bp, Homo sapien
acaaaaagaggacacttgatgtatt

SEQ ID NO: 5139385 - DNA, 25 bp, Homo sapien
tgaatgtgcagaattttcttatgct

SEQ ID NO: 5139386 - DNA, 25 bp, Homo sapien
gcttaaatgcaacaagatcgaccat

SEQ ID NO: 5139387 - DNA, 25 bp, Homo sapien
cccgtgacgcaccctggtgcttagt

SEQ ID NO: 5139388 - DNA, 25 bp, Homo sapien
gccttgttgggccccgtgacgcacc

SEQ ID NO: 5139389 - DNA, 25 bp, Homo sapien
ttgggccccgtgacgcaccctggtg

SEQ ID NO: 5139390 - DNA, 25 bp, Homo sapien
ccgtgacgcaccctggtgcttagtg

SEQ ID NO: 5139391 - DNA, 25 bp, Homo sapien
ttaggattctggacggaggcggtgc

SEQ ID NO: 5139392 - DNA, 25 bp, Homo sapien
ctgtaggcagctgagggttccccat

SEQ ID NO: 5139393 - DNA, 25 bp, Homo sapien
aggactcaacttgggcaacttgggc

SEQ ID NO: 5139394 - DNA, 25 bp, Homo sapien
taaccagtggtcctgttgagtggca

SEQ ID NO: 5139395 - DNA, 25 bp, Homo sapien
tcggtgcggaaaaatgccctcggtg

SEQ ID NO: 5139396 - DNA, 25 bp, Homo sapien
cacgtctcaggtcgaggtcagggac

SEQ ID NO: 5139397 - DNA, 25 bp, Homo sapien
cacttaggttttctggcgtgcattc

SEQ ID NO: 5139398 - DNA, 25 bp, Homo sapien
ctattttaaacccagcgcacttagg

SEQ ID NO: 5139399 - DNA, 25 bp, Homo sapien
tgacactaatatcggtacctccggg

SEQ ID NO: 5139400 - DNA, 25 bp, Homo sapien
tcagtcacgttttgtcagggattcc

SEQ ID NO: 5139401 - DNA, 25 bp, Homo sapien
gttaaatgtaactgcctccctgtgg

SEQ ID NO: 5139402 - DNA, 25 bp, Homo sapien
tttaggatcccaaacatcgctgccg

SEQ ID NO: 5139403 - DNA, 25 bp, Homo sapien
ttctgggagctagacatctgagatc

SEQ ID NO: 5139404 - DNA, 25 bp, Homo sapien
cagggaaggatctatttcaggcccc

SEQ ID NO: 5139405 - DNA, 25 bp, Homo sapien
tgagaacgtagagatgagcaacagc

SEQ ID NO: 5139406 - DNA, 25 bp, Homo sapien
ttgacttgggtaatggcacaggcag

SEQ ID NO: 5139407 - DNA, 25 bp, Homo sapien
caatggtgccattataggtctctgc

SEQ ID NO: 5139408 - DNA, 25 bp, Homo sapien
cgcacgaatctgtgggtaacccagc

SEQ ID NO: 5139409 - DNA, 25 bp, Homo sapien
ccttttgttcgctatgcacgcacga

SEQ ID NO: 5139410 - DNA, 25 bp, Homo sapien
cagtccatctccgaaaggttgaaga

SEQ ID NO: 5139411 - DNA, 25 bp, Homo sapien
aaatcctgggttctcagaatgaaca

SEQ ID NO: 5139412 - DNA, 25 bp, Homo sapien
gatgtcctgctcttactggttcagt

SEQ ID NO: 5139413 - DNA, 25 bp, Homo sapien
gaaaggacgcagtatagtctggtga

SEQ ID NO: 5139414 - DNA, 25 bp, Homo sapien
gaataacaatcggaaatcagacagg

SEQ ID NO: 5139415 - DNA, 25 bp, Homo sapien
tgtgagttgcagttgtggtcagagc

SEQ ID NO: 5139416 - DNA, 25 bp, Homo sapien
tgagttgcagttgtggtcagagcag

SEQ ID NO: 5139417 - DNA, 25 bp, Homo sapien
ttaggtacaggagcgagtttgctct

SEQ ID NO: 5139418 - DNA, 25 bp, Homo sapien
cagagcaggtgttttaggtacagga

SEQ ID NO: 5139419 - DNA, 25 bp, Homo sapien
gaacaggagccttcggttccactct

SEQ ID NO: 5139420 - DNA, 25 bp, Homo sapien
ggaacaggagccttcggttccactc

SEQ ID NO: 5139421 - DNA, 25 bp, Homo sapien
atgtggcagcatgccctcctctctt

SEQ ID NO: 5139422 - DNA, 25 bp, Homo sapien
gacaaggacaccttgggaacaggag

SEQ ID NO: 5139423 - DNA, 25 bp, Homo sapien
gcctgtaggctaaagattaacccca

SEQ ID NO: 5139424 - DNA, 25 bp, Homo sapien
cagacatcagacactgcaactggca

SEQ ID NO: 5139425 - DNA, 25 bp, Homo sapien
cccactaaatgtgaggagagaggcc

SEQ ID NO: 5139426 - DNA, 25 bp, Homo sapien
ggtgtcaggttcattttacccaggc

SEQ ID NO: 5139427 - DNA, 25 bp, Homo sapien
gcgctgttacacgacagcgtcgcaa

SEQ ID NO: 5139428 - DNA, 25 bp, Homo sapien
ccgtaaagcgcgctgttacacgaca

SEQ ID NO: 5139429 - DNA, 25 bp, Homo sapien
gaaaccagaccgccgcggagaggga

SEQ ID NO: 5139430 - DNA, 25 bp, Homo sapien
tacacgacagcgtcgcaaacaaaac

SEQ ID NO: 5139431 - DNA, 25 bp, Homo sapien
accctctttgctccgcggcggtgag

SEQ ID NO: 5139432 - DNA, 25 bp, Homo sapien
gctggagcagcatgacgagcaccga

SEQ ID NO: 5139433 - DNA, 25 bp, Homo sapien
gggtcaagctcatcctgcccgcggg

SEQ ID NO: 5139434 - DNA, 25 bp, Homo sapien
tgctcagcaggctcgagagctcctt

SEQ ID NO: 5139435 - DNA, 25 bp, Homo sapien
agctggcggcgaaggggttggcggc

SEQ ID NO: 5139436 - DNA, 25 bp, Homo sapien
ctgagagcggagggcggtcgggttc

SEQ ID NO: 5139437 - DNA, 25 bp, Homo sapien
ggcgaaggggttggcggccagcggc

SEQ ID NO: 5139438 - DNA, 25 bp, Homo sapien
ggttgagcaggtgcgcgaagctggc

SEQ ID NO: 5139439 - DNA, 25 bp, Homo sapien
ttccacgtactcctttgagactaaa

SEQ ID NO: 5139440 - DNA, 25 bp, Homo sapien
acacaccacagacgggttttcgaag

SEQ ID NO: 5139441 - DNA, 25 bp, Homo sapien
accggggacagatccagtcttatca

SEQ ID NO: 5139442 - DNA, 25 bp, Homo sapien
tcgaagaacgaaccgtatttgagac

SEQ ID NO: 5139443 - DNA, 25 bp, Homo sapien
ttaactctcacattagtaacttcat

SEQ ID NO: 5139444 - DNA, 25 bp, Homo sapien
ctttaactctcacattagtaacttc

SEQ ID NO: 5139445 - DNA, 25 bp, Homo sapien
taactctcacattagtaacttcatt

SEQ ID NO: 5139446 - DNA, 25 bp, Homo sapien
tttaactctcacattagtaacttca

SEQ ID NO: 5139447 - DNA, 25 bp, Homo sapien
aatgtataacgatttctccaatggt

SEQ ID NO: 5139448 - DNA, 25 bp, Homo sapien
tgtataacgatttctccaatggtta

SEQ ID NO: 5139449 - DNA, 25 bp, Homo sapien
caaaaatgtataacgatttctccaa

SEQ ID NO: 5139450 - DNA, 25 bp, Homo sapien
aaaatgtataacgatttctccaatg

SEQ ID NO: 5139451 - DNA, 25 bp, Homo sapien
aacttttctggtggagttataggag

SEQ ID NO: 5139452 - DNA, 25 bp, Homo sapien
tttctggtggagttataggaggtaa

SEQ ID NO: 5139453 - DNA, 25 bp, Homo sapien
cttttctggtggagttataggaggt

SEQ ID NO: 5139454 - DNA, 25 bp, Homo sapien
tctggtggagttataggaggtaaaa

SEQ ID NO: 5139455 - DNA, 25 bp, Homo sapien
atcagtgcaatctggcgaggcgtct

SEQ ID NO: 5139456 - DNA, 25 bp, Homo sapien
gaagcccactaatgtccacagactg

SEQ ID NO: 5139457 - DNA, 25 bp, Homo sapien
cggccaaggctaactgaagcccact

SEQ ID NO: 5139458 - DNA, 25 bp, Homo sapien
ctggcgaggcgtctttttgaagagt

SEQ ID NO: 5139459 - DNA, 25 bp, Homo sapien
aaaacactgttggaattttgacagg

SEQ ID NO: 5139460 - DNA, 25 bp, Homo sapien
gacaggaattgcaccaaatctgttg

SEQ ID NO: 5139461 - DNA, 25 bp, Homo sapien
actgtgactggccggatttttctat

SEQ ID NO: 5139462 - DNA, 25 bp, Homo sapien
ttggaattttgacaggaattgcacc

SEQ ID NO: 5139463 - DNA, 25 bp, Homo sapien
tctgcaatctgggtagaggacggca

SEQ ID NO: 5139464 - DNA, 25 bp, Homo sapien
tttcttacggctactcaaggcatcc

SEQ ID NO: 5139465 - DNA, 25 bp, Homo sapien
gaatggatccggacatctgcaatct

SEQ ID NO: 5139466 - DNA, 25 bp, Homo sapien
aatacacctttggtccacggatgcc

SEQ ID NO: 5139467 - DNA, 25 bp, Homo sapien
caggtcctcacttagcgttgttgaa

SEQ ID NO: 5139468 - DNA, 25 bp, Homo sapien
agtttccaacaacccgtcagtgatg

SEQ ID NO: 5139469 - DNA, 25 bp, Homo sapien
tgtctgtacgtatagcaggtcctca

SEQ ID NO: 5139470 - DNA, 25 bp, Homo sapien
gaatctgccactaagtgaagtgacg

SEQ ID NO: 5139471 - DNA, 25 bp, Homo sapien
aagacaagctaccaactgaggcaag

SEQ ID NO: 5139472 - DNA, 25 bp, Homo sapien
gacaagctaccaactgaggcaagct

SEQ ID NO: 5139473 - DNA, 25 bp, Homo sapien
caagctaccaactgaggcaagctat

SEQ ID NO: 5139474 - DNA, 25 bp, Homo sapien
aaagacaagctaccaactgaggcaa

SEQ ID NO: 5139475 - DNA, 25 bp, Homo sapien
caataggtggctttggtccgctgac

SEQ ID NO: 5139476 - DNA, 25 bp, Homo sapien
ccgggtctgggtcactgagaatact

SEQ ID NO: 5139477 - DNA, 25 bp, Homo sapien
aagctcgctttgctttgcgttggca

SEQ ID NO: 5139478 - DNA, 25 bp, Homo sapien
cagaattagaagaatccgggtctgg

SEQ ID NO: 5139479 - DNA, 25 bp, Homo sapien
gctcctatcaggaagctaacatctc

SEQ ID NO: 5139480 - DNA, 25 bp, Homo sapien
taatgagagccgtgatagttgctcc

SEQ ID NO: 5139481 - DNA, 25 bp, Homo sapien
tgatagttgctcctatcaggaagct

SEQ ID NO: 5139482 - DNA, 25 bp, Homo sapien
taacatctctacacatctcacacat

SEQ ID NO: 5139483 - DNA, 25 bp, Homo sapien
ggcggtggacgaataaactctggtc

SEQ ID NO: 5139484 - DNA, 25 bp, Homo sapien
cgtttgatctccacaccagtgctat

SEQ ID NO: 5139485 - DNA, 25 bp, Homo sapien
gggtttagccaagcaagttcatcct

SEQ ID NO: 5139486 - DNA, 25 bp, Homo sapien
tatcccactggatcgcgtggtcagg

SEQ ID NO: 5139487 - DNA, 25 bp, Homo sapien
gaaaatgcttacaatcaatacacac

SEQ ID NO: 5139488 - DNA, 25 bp, Homo sapien
aagataagaaaatgcttacaatcaa

SEQ ID NO: 5139489 - DNA, 25 bp, Homo sapien
taagaaaatgcttacaatcaataca

SEQ ID NO: 5139490 - DNA, 25 bp, Homo sapien
gataagaaaatgcttacaatcaata

SEQ ID NO: 5139491 - DNA, 25 bp, Homo sapien
caacatttctatagcgactaaaggg

SEQ ID NO: 5139492 - DNA, 25 bp, Homo sapien
caggacagagaaatactcagtgatc

SEQ ID NO: 5139493 - DNA, 25 bp, Homo sapien
taaagacatgtccatattgaccagg

SEQ ID NO: 5139494 - DNA, 25 bp, Homo sapien
ggcttgactgcattaatttcagcaa

SEQ ID NO: 5139495 - DNA, 25 bp, Homo sapien
gttctgttttcctgacagtcaagga

SEQ ID NO: 5139496 - DNA, 25 bp, Homo sapien
tatgataggtatcgggggaaaacaa

SEQ ID NO: 5139497 - DNA, 25 bp, Homo sapien
aacaaacaggaccttgtccttgaat

SEQ ID NO: 5139498 - DNA, 25 bp, Homo sapien
caagatactgagcagatagaatcac

SEQ ID NO: 5139499 - DNA, 25 bp, Homo sapien
tccttgaattccaagatactgagca

SEQ ID NO: 5139500 - DNA, 25 bp, Homo sapien
tgtgcgtcgccaaaaaacgtgtttc

SEQ ID NO: 5139501 - DNA, 25 bp, Homo sapien
gaggatgtagtgctccaaggacact

SEQ ID NO: 5139502 - DNA, 25 bp, Homo sapien
tcaataaggcatgaggatgtagtgc

SEQ ID NO: 5139503 - DNA, 25 bp, Homo sapien
acgtgtttcacgtttaaggatgatg

SEQ ID NO: 5139504 - DNA, 25 bp, Homo sapien
tgggcaaattaacctaagagccata

SEQ ID NO: 5139505 - DNA, 25 bp, Homo sapien
cctaagtcatggtctgttattggaa

SEQ ID NO: 5139506 - DNA, 25 bp, Homo sapien
ggtgggaacaggaattccgtactca

SEQ ID NO: 5139507 - DNA, 25 bp, Homo sapien
tccctgagtattcttggttaaatcc

SEQ ID NO: 5139508 - DNA, 25 bp, Homo sapien
tgaataaattcaggaggtagatcaa

SEQ ID NO: 5139509 - DNA, 25 bp, Homo sapien
ggaggtagatcaacagctgtagtta

SEQ ID NO: 5139510 - DNA, 25 bp, Homo sapien
taaattcaggaggtagatcaacagc

SEQ ID NO: 5139511 - DNA, 25 bp, Homo sapien
tcaggaggtagatcaacagctgtag

SEQ ID NO: 5139512 - DNA, 25 bp, Homo sapien
aatgttagtctgctcattttcctgg

SEQ ID NO: 5139513 - DNA, 25 bp, Homo sapien
tctgctcattttcctggcagccatt

SEQ ID NO: 5139514 - DNA, 25 bp, Homo sapien
cattttcctggcagccatttataaa

SEQ ID NO: 5139515 - DNA, 25 bp, Homo sapien
aaaaaaaaatgttagtctgctcatt

SEQ ID NO: 5139516 - DNA, 25 bp, Homo sapien
tgaattcaatacagaatgcctgcac

SEQ ID NO: 5139517 - DNA, 25 bp, Homo sapien
ggtgtttccccagtatccaatgtct

SEQ ID NO: 5139518 - DNA, 25 bp, Homo sapien
gaccagcagcttctcgtatcctact

SEQ ID NO: 5139519 - DNA, 25 bp, Homo sapien
tacggatcaaggattggagaaacac

SEQ ID NO: 5139520 - DNA, 25 bp, Homo sapien
cataaagggtaagagcccacacggt

SEQ ID NO: 5139521 - DNA, 25 bp, Homo sapien
tatggatagtcatcagcaagacacc

SEQ ID NO: 5139522 - DNA, 25 bp, Homo sapien
tcccaagtttataagaggcccaaga

SEQ ID NO: 5139523 - DNA, 25 bp, Homo sapien
attaaaccaagcaatccactcaggg

SEQ ID NO: 5139524 - DNA, 25 bp, Homo sapien
acctcagtaaaaggaatttctcatg

SEQ ID NO: 5139525 - DNA, 25 bp, Homo sapien
ttcaaggtgttagagagtaattcct

SEQ ID NO: 5139526 - DNA, 25 bp, Homo sapien
tataaatctttagtactgctctttc

SEQ ID NO: 5139527 - DNA, 25 bp, Homo sapien
gaacagattatctccctgtaaatat

SEQ ID NO: 5139528 - DNA, 25 bp, Homo sapien
aaatgctggacccagcgtgaacgtt

SEQ ID NO: 5139529 - DNA, 25 bp, Homo sapien
ttcacacgccatacagcattggtgg

SEQ ID NO: 5139530 - DNA, 25 bp, Homo sapien
gcctggaaagcaagaagtgactgct

SEQ ID NO: 5139531 - DNA, 25 bp, Homo sapien
tgctgactggacaactgcaataaat

SEQ ID NO: 5139532 - DNA, 25 bp, Homo sapien
tttccacattgctgtcgatggcgag

SEQ ID NO: 5139533 - DNA, 25 bp, Homo sapien
cacattgctgtcgatggcgagccct

SEQ ID NO: 5139534 - DNA, 25 bp, Homo sapien
tttttccacattgctgtcgatggcg

SEQ ID NO: 5139535 - DNA, 25 bp, Homo sapien
tccacattgctgtcgatggcgagcc

SEQ ID NO: 5139536 - DNA, 25 bp, Homo sapien
cccagtagctaatgaagctgacttt

SEQ ID NO: 5139537 - DNA, 25 bp, Homo sapien
ccagtagctaatgaagctgactttt

SEQ ID NO: 5139538 - DNA, 25 bp, Homo sapien
tcccagtagctaatgaagctgactt

SEQ ID NO: 5139539 - DNA, 25 bp, Homo sapien
cagtagctaatgaagctgactttta

SEQ ID NO: 5139540 - DNA, 25 bp, Homo sapien
tgtttagaattatgagaaaggcact

SEQ ID NO: 5139541 - DNA, 25 bp, Homo sapien
tcatttcttgtgacgccttgttggg

SEQ ID NO: 5139542 - DNA, 25 bp, Homo sapien
cttgtaaactgagatgtctgtagct

SEQ ID NO: 5139543 - DNA, 25 bp, Homo sapien
gaaaggcactagatgactttaggat

SEQ ID NO: 5139544 - DNA, 25 bp, Homo sapien
agcgagccgtgaccatgatcatgtc

SEQ ID NO: 5139545 - DNA, 25 bp, Homo sapien
ttgcatcgcatgaggccagtctggg

SEQ ID NO: 5139546 - DNA, 25 bp, Homo sapien
catttaatagaaacttcaggctgga

SEQ ID NO: 5139547 - DNA, 25 bp, Homo sapien
ggtaatgcacatgaattagtgtgat

SEQ ID NO: 5139548 - DNA, 25 bp, Homo sapien
ctttaactctaaagaccagtccagg

SEQ ID NO: 5139549 - DNA, 25 bp, Homo sapien
tgcctcatgcatttggaattctgct

SEQ ID NO: 5139550 - DNA, 25 bp, Homo sapien
ggtgtctccatatgctacagccaca

SEQ ID NO: 5139551 - DNA, 25 bp, Homo sapien
tgatacccagttgccccacgtgatt

SEQ ID NO: 5139552 - DNA, 25 bp, Homo sapien
cttcattgagctaggatcccaccac

SEQ ID NO: 5139553 - DNA, 25 bp, Homo sapien
gcttcattgagctaggatcccacca

SEQ ID NO: 5139554 - DNA, 25 bp, Homo sapien
ggcttcattgagctaggatcccacc

SEQ ID NO: 5139555 - DNA, 25 bp, Homo sapien
ggcacagtcccagctattagagagg

SEQ ID NO: 5139556 - DNA, 25 bp, Homo sapien
gctataatcgtgcagctgcactcca

SEQ ID NO: 5139557 - DNA, 25 bp, Homo sapien
gtgagctataatcgtgcagctgcac

SEQ ID NO: 5139558 - DNA, 25 bp, Homo sapien
ggtgaggtggcacagtcccagctat

SEQ ID NO: 5139559 - DNA, 25 bp, Homo sapien
tgttacaatttcgggtgaggtggca

SEQ ID NO: 5139560 - DNA, 25 bp, Homo sapien
gccccctgtacatgtgaggctccag

SEQ ID NO: 5139561 - DNA, 25 bp, Homo sapien
aggtggcactcaggatcccagccca

SEQ ID NO: 5139562 - DNA, 25 bp, Homo sapien
gtggcactcaggatcccagcccagc

SEQ ID NO: 5139563 - DNA, 25 bp, Homo sapien
caaaagcggttctaaggctcttcca

SEQ ID NO: 5139564 - DNA, 25 bp, Homo sapien
acagcaaaagcggttctaaggctct

SEQ ID NO: 5139565 - DNA, 25 bp, Homo sapien
catcccacagccagttcgagcaggt

SEQ ID NO: 5139566 - DNA, 25 bp, Homo sapien
gcaggtgccaggtttgatgttcctc

SEQ ID NO: 5139567 - DNA, 25 bp, Homo sapien
cctctcctatatgctcccggggaaa

SEQ ID NO: 5139568 - DNA, 25 bp, Homo sapien
tctcctatatgctcccggggaaatg

SEQ ID NO: 5139569 - DNA, 25 bp, Homo sapien
ccaatgagcactccctcaactccct

SEQ ID NO: 5139570 - DNA, 25 bp, Homo sapien
caatgagcactccctcaactccctg

SEQ ID NO: 5139571 - DNA, 25 bp, Homo sapien
cccctggctaggtttgcgtttatag

SEQ ID NO: 5139572 - DNA, 25 bp, Homo sapien
gtcataagccagtcctcaaaagagt

SEQ ID NO: 5139573 - DNA, 25 bp, Homo sapien
gtcaacctcacaccttaatactggg

SEQ ID NO: 5139574 - DNA, 25 bp, Homo sapien
tgtcttgcagataaggtcccctggc

SEQ ID NO: 5139575 - DNA, 25 bp, Homo sapien
gattgctttgtattgtgagagtatc

SEQ ID NO: 5139576 - DNA, 25 bp, Homo sapien
gaccacgaagcagctgactgtgcat

SEQ ID NO: 5139577 - DNA, 25 bp, Homo sapien
ggttctaagttcactgtgaccacga

SEQ ID NO: 5139578 - DNA, 25 bp, Homo sapien
tctgccaaatgcagtcttggttcta

SEQ ID NO: 5139579 - DNA, 25 bp, Homo sapien
ctggtgcagcaatggaaacaggcta

SEQ ID NO: 5139580 - DNA, 25 bp, Homo sapien
ctgcagtagagggagagtaacacga

SEQ ID NO: 5139581 - DNA, 25 bp, Homo sapien
tgtccatgcagggaccgccggaagt

SEQ ID NO: 5139582 - DNA, 25 bp, Homo sapien
aacaggctagaaggcattggtctgc

SEQ ID NO: 5139583 - DNA, 25 bp, Homo sapien
gctgcatttgctggccatttcaggg

SEQ ID NO: 5139584 - DNA, 25 bp, Homo sapien
taaccacagttgtgttgcactcctg

SEQ ID NO: 5139585 - DNA, 25 bp, Homo sapien
gggtgcagctgccagtaaccacagt

SEQ ID NO: 5139586 - DNA, 25 bp, Homo sapien
ttgcactcctgtgactaagggtggg

SEQ ID NO: 5139587 - DNA, 25 bp, Homo sapien
gtgtgaccctcgaagcagcaaagct

SEQ ID NO: 5139588 - DNA, 25 bp, Homo sapien
tgaccttggtttgtgcagccacttc

SEQ ID NO: 5139589 - DNA, 25 bp, Homo sapien
tgtccttgaggtctctgcagcacgg

SEQ ID NO: 5139590 - DNA, 25 bp, Homo sapien
ctggtcttctaggacagccttgctg

SEQ ID NO: 5139591 - DNA, 25 bp, Homo sapien
tgccgacaggcctgccttgacagcc

SEQ ID NO: 5139592 - DNA, 25 bp, Homo sapien
aactgccgacaggcctgccttgaca

SEQ ID NO: 5139593 - DNA, 25 bp, Homo sapien
tgaaactgccgacaggcctgccttg

SEQ ID NO: 5139594 - DNA, 25 bp, Homo sapien
ctgaaactgccgacaggcctgcctt

SEQ ID NO: 5139595 - DNA, 25 bp, Homo sapien
agatgcccatgtcgtgacagttgaa

SEQ ID NO: 5139596 - DNA, 25 bp, Homo sapien
tgacagttgaaacagcacagcccag

SEQ ID NO: 5139597 - DNA, 25 bp, Homo sapien
tgcccatgtcgtgacagttgaaaca

SEQ ID NO: 5139598 - DNA, 25 bp, Homo sapien
gacagttgaaacagcacagcccagc

SEQ ID NO: 5139599 - DNA, 25 bp, Homo sapien
tagacatgattccacctagaatgac

SEQ ID NO: 5139600 - DNA, 25 bp, Homo sapien
gacatggataagtaatgcagatgta

SEQ ID NO: 5139601 - DNA, 25 bp, Homo sapien
catgattccacctagaatgacatgg

SEQ ID NO: 5139602 - DNA, 25 bp, Homo sapien
ctgttagacatgattccacctagaa

SEQ ID NO: 5139603 - DNA, 25 bp, Homo sapien
atggtgcctccgtgagcctggcgaa

SEQ ID NO: 5139604 - DNA, 25 bp, Homo sapien
gatgggaccctcgacactgtacata

SEQ ID NO: 5139605 - DNA, 25 bp, Homo sapien
tgtccacccacaagaaggtgagcgc

SEQ ID NO: 5139606 - DNA, 25 bp, Homo sapien
tacataatggaaggcgatggtgcct

SEQ ID NO: 5139607 - DNA, 25 bp, Homo sapien
ccgtcaccaacgaggtggacgagga

SEQ ID NO: 5139608 - DNA, 25 bp, Homo sapien
tcttgggccgtcaccaacgaggtgg

SEQ ID NO: 5139609 - DNA, 25 bp, Homo sapien
gtgagctccgtgtcttgggccgtca

SEQ ID NO: 5139610 - DNA, 25 bp, Homo sapien
ccgcgggctacgtgatcgtgagctc

SEQ ID NO: 5139611 - DNA, 25 bp, Homo sapien
aagcccaaagatggtttcgttgtcg

SEQ ID NO: 5139612 - DNA, 25 bp, Homo sapien
tgtctggcttgatttcaaaagccca

SEQ ID NO: 5139613 - DNA, 25 bp, Homo sapien
tcgttgtcgatatgggcaggtttga

SEQ ID NO: 5139614 - DNA, 25 bp, Homo sapien
ttcgaccaatgtggctcttgggagt

SEQ ID NO: 5139615 - DNA, 25 bp, Homo sapien
aagacagacccagttggatcccctt

SEQ ID NO: 5139616 - DNA, 25 bp, Homo sapien
gacagacccagttggatcccctttg

SEQ ID NO: 5139617 - DNA, 25 bp, Homo sapien
agacccagttggatcccctttgtct

SEQ ID NO: 5139618 - DNA, 25 bp, Homo sapien
cagacccagttggatcccctttgtc

SEQ ID NO: 5139619 - DNA, 25 bp, Homo sapien
caggtagagctgaaaccatcaggca

SEQ ID NO: 5139620 - DNA, 25 bp, Homo sapien
tggacattccctggtgcaagtgaac

SEQ ID NO: 5139621 - DNA, 25 bp, Homo sapien
tggagtggacggacccatcaaagtc

SEQ ID NO: 5139622 - DNA, 25 bp, Homo sapien
caaagtcatgtctgcccttggctca

SEQ ID NO: 5139623 - DNA, 25 bp, Homo sapien
aacacgccgtgcctttgttcttcca

SEQ ID NO: 5139624 - DNA, 25 bp, Homo sapien
tcttccacgcctttgttcttttgcc

SEQ ID NO: 5139625 - DNA, 25 bp, Homo sapien
tgatgtcagacaccagtggttcttt

SEQ ID NO: 5139626 - DNA, 25 bp, Homo sapien
gcctcgggtccacagcggctgtgca

SEQ ID NO: 5139627 - DNA, 25 bp, Homo sapien
cagttgatgaggtggtatgtttaac

SEQ ID NO: 5139628 - DNA, 25 bp, Homo sapien
ttaacagatcgttgaggccgggtgc

SEQ ID NO: 5139629 - DNA, 25 bp, Homo sapien
tttaacgtcaacatcaagaacagcc

SEQ ID NO: 5139630 - DNA, 25 bp, Homo sapien
caaaacagatcgttggtactagtgg

SEQ ID NO: 5139631 - DNA, 25 bp, Homo sapien
aataattccatgcagaacagcaggg

SEQ ID NO: 5139632 - DNA, 25 bp, Homo sapien
tggggatagtaccaggaaataattc

SEQ ID NO: 5139633 - DNA, 25 bp, Homo sapien
taattccatgcagaacagcagggag

SEQ ID NO: 5139634 - DNA, 25 bp, Homo sapien
tgaaattcgtttcacggtggggata

SEQ ID NO: 5139635 - DNA, 25 bp, Homo sapien
gatcatgcctagtctcctcaggtaa

SEQ ID NO: 5139636 - DNA, 25 bp, Homo sapien
ctggtgggaggatgctgtaactcat

SEQ ID NO: 5139637 - DNA, 25 bp, Homo sapien
tgtcacggactcagtcaggcctctg

SEQ ID NO: 5139638 - DNA, 25 bp, Homo sapien
tcaggcctctgagatcatgcctagt

SEQ ID NO: 5139639 - DNA, 25 bp, Homo sapien
tctctcctcaaggtgtatggcaggt

SEQ ID NO: 5139640 - DNA, 25 bp, Homo sapien
ttttctctcctcaaggtgtatggca

SEQ ID NO: 5139641 - DNA, 25 bp, Homo sapien
tctcctcaaggtgtatggcaggtgt

SEQ ID NO: 5139642 - DNA, 25 bp, Homo sapien
ttctctcctcaaggtgtatggcagg

SEQ ID NO: 5139643 - DNA, 25 bp, Homo sapien
ctgtgggaagtaaaaggattcctca

SEQ ID NO: 5139644 - DNA, 25 bp, Homo sapien
gattcctcaggtgcgtggccatgtc

SEQ ID NO: 5139645 - DNA, 25 bp, Homo sapien
actgcttaacttctcgagggctcca

SEQ ID NO: 5139646 - DNA, 25 bp, Homo sapien
tggaggatccagagtgtgacagaaa

SEQ ID NO: 5139647 - DNA, 25 bp, Homo sapien
agttgcctttgtgggatttgaggaa

SEQ ID NO: 5139648 - DNA, 25 bp, Homo sapien
ctgtattgggaatgttgccctcatt

SEQ ID NO: 5139649 - DNA, 25 bp, Homo sapien
aagaagagttgcctttgtgggattt

SEQ ID NO: 5139650 - DNA, 25 bp, Homo sapien
tgccctcattactggcaaagctgct

SEQ ID NO: 5139651 - DNA, 25 bp, Homo sapien
tgctgagcttatggctcgggatcat

SEQ ID NO: 5139652 - DNA, 25 bp, Homo sapien
tgtgctgtctactgtccaagagtgg

SEQ ID NO: 5139653 - DNA, 25 bp, Homo sapien
ttgtgctgtctactgtccaagagtg

SEQ ID NO: 5139654 - DNA, 25 bp, Homo sapien
cagaagaaagggaggtgtttccagg

SEQ ID NO: 5139655 - DNA, 25 bp, Homo sapien
tcagggaagtgcctggagagaaact

SEQ ID NO: 5139656 - DNA, 25 bp, Homo sapien
tccaggcttcagggaagtgcctgga

SEQ ID NO: 5139657 - DNA, 25 bp, Homo sapien
tttccaggcttcagggaagtgcctg

SEQ ID NO: 5139658 - DNA, 25 bp, Homo sapien
agtttcgtcagtgaagggcccaagc

SEQ ID NO: 5139659 - DNA, 25 bp, Homo sapien
tctcagagtttcgtcagtgaagggc

SEQ ID NO: 5139660 - DNA, 25 bp, Homo sapien
aaagggagctctcagagtttcgtca

SEQ ID NO: 5139661 - DNA, 25 bp, Homo sapien
ggagctctcagagtttcgtcagtga

SEQ ID NO: 5139662 - DNA, 25 bp, Homo sapien
tatgcctaaaggtgcaccgggtagc

SEQ ID NO: 5139663 - DNA, 25 bp, Homo sapien
tacacatgaggcaagatggttcggt

SEQ ID NO: 5139664 - DNA, 25 bp, Homo sapien
tcggtactcagctatgcctaaaggt

SEQ ID NO: 5139665 - DNA, 25 bp, Homo sapien
gctggagataagagggatgtacaca

SEQ ID NO: 5139666 - DNA, 25 bp, Homo sapien
ctttcattttcaaagccccagcttc

SEQ ID NO: 5139667 - DNA, 25 bp, Homo sapien
ctaacagtacaaggtggcaggaaat

SEQ ID NO: 5139668 - DNA, 25 bp, Homo sapien
gggcactttcattttcaaagcccca

SEQ ID NO: 5139669 - DNA, 25 bp, Homo sapien
ggcaggaaatggggcactttcattt

SEQ ID NO: 5139670 - DNA, 25 bp, Homo sapien
tcttctgcttccatccaatatttct

SEQ ID NO: 5139671 - DNA, 25 bp, Homo sapien
tcttcagcagaaagtaactgaccac

SEQ ID NO: 5139672 - DNA, 25 bp, Homo sapien
atttcttcagcagaaagtaactgac

SEQ ID NO: 5139673 - DNA, 25 bp, Homo sapien
actcttctgcttccatccaatattt

SEQ ID NO: 5139674 - DNA, 25 bp, Homo sapien
agggaactgacacttggatgggcaa

SEQ ID NO: 5139675 - DNA, 25 bp, Homo sapien
aaaccagacggctgaaccgagtgcc

SEQ ID NO: 5139676 - DNA, 25 bp, Homo sapien
tgcctccctcataagggccaggtgg

SEQ ID NO: 5139677 - DNA, 25 bp, Homo sapien
aatggtgtctcaggtagccatcgga

SEQ ID NO: 5139678 - DNA, 25 bp, Homo sapien
caggcaggatcaaaacgcatcactt

SEQ ID NO: 5139679 - DNA, 25 bp, Homo sapien
gtcagcatgcgtgtctcagtccgag

SEQ ID NO: 5139680 - DNA, 25 bp, Homo sapien
tccatgaggcatgtctgagcatctg

SEQ ID NO: 5139681 - DNA, 25 bp, Homo sapien
agtgggtgcccaatgtacttcacgc

SEQ ID NO: 5139682 - DNA, 25 bp, Homo sapien
gtggaggacacccacatccaagatg

SEQ ID NO: 5139683 - DNA, 25 bp, Homo sapien
cctcatttggagcagtggaggacac

SEQ ID NO: 5139684 - DNA, 25 bp, Homo sapien
aaaggggcttgcctcatttggagca

SEQ ID NO: 5139685 - DNA, 25 bp, Homo sapien
ttcactgccaccatgaaaggggctt

SEQ ID NO: 5139686 - DNA, 25 bp, Homo sapien
tccacttaggagaagcatgcgtttg

SEQ ID NO: 5139687 - DNA, 25 bp, Homo sapien
gtttgcaagcataccctctaagcca

SEQ ID NO: 5139688 - DNA, 25 bp, Homo sapien
gaagcatgcgtttgcaagcataccc

SEQ ID NO: 5139689 - DNA, 25 bp, Homo sapien
aagccaagatcgtacttcacactgg

SEQ ID NO: 5139690 - DNA, 25 bp, Homo sapien
gggtggaaaccatgcgatgctagaa

SEQ ID NO: 5139691 - DNA, 25 bp, Homo sapien
tccagggtcgtgaacccacgttaca

SEQ ID NO: 5139692 - DNA, 25 bp, Homo sapien
aaaaggcaatgcttcgaaaaggctc

SEQ ID NO: 5139693 - DNA, 25 bp, Homo sapien
cctgtgttggagaatgattagagcc

SEQ ID NO: 5139694 - DNA, 25 bp, Homo sapien
cacacctgggggcctgaggtccttc

SEQ ID NO: 5139695 - DNA, 25 bp, Homo sapien
cacctgggggcctgaggtccttcca

SEQ ID NO: 5139696 - DNA, 25 bp, Homo sapien
gccacacctgggggcctgaggtcct

SEQ ID NO: 5139697 - DNA, 25 bp, Homo sapien
ccacacctgggggcctgaggtcctt

SEQ ID NO: 5139698 - DNA, 25 bp, Homo sapien
ggcccgttggcaatgttgtccatgt

SEQ ID NO: 5139699 - DNA, 25 bp, Homo sapien
gaggaaacagcaagtcgtgtccgtg

SEQ ID NO: 5139700 - DNA, 25 bp, Homo sapien
ggcggagtctgactgtgcatgtggg

SEQ ID NO: 5139701 - DNA, 25 bp, Homo sapien
aagtcgtgtccgtgaaagatgggcc

SEQ ID NO: 5139702 - DNA, 25 bp, Homo sapien
cgcattccacgaaaaggccgtcagc

SEQ ID NO: 5139703 - DNA, 25 bp, Homo sapien
ccagaatccgatacttgtagagtga

SEQ ID NO: 5139704 - DNA, 25 bp, Homo sapien
ccgtcagcttggtgtatgcggccat

SEQ ID NO: 5139705 - DNA, 25 bp, Homo sapien
ttgtagagtgaagccgcattccacg

SEQ ID NO: 5139706 - DNA, 25 bp, Homo sapien
gtcagcctcgcactgcaagggtcct

SEQ ID NO: 5139707 - DNA, 25 bp, Homo sapien
gtgtcagcctcgcactgcaagggtc

SEQ ID NO: 5139708 - DNA, 25 bp, Homo sapien
accggggctcacacattacacctgc

SEQ ID NO: 5139709 - DNA, 25 bp, Homo sapien
ccggtgtcagcctcgcactgcaagg

SEQ ID NO: 5139710 - DNA, 25 bp, Homo sapien
tcaaatcaggcttgcagttgacaat

SEQ ID NO: 5139711 - DNA, 25 bp, Homo sapien
gctatcaaatcaggcttgcagttga

SEQ ID NO: 5139712 - DNA, 25 bp, Homo sapien
tatcaaatcaggcttgcagttgaca

SEQ ID NO: 5139713 - DNA, 25 bp, Homo sapien
aaatcaggcttgcagttgacaatca

SEQ ID NO: 5139714 - DNA, 25 bp, Homo sapien
agaggcagcccgttttgaagccgga

SEQ ID NO: 5139715 - DNA, 25 bp, Homo sapien
gcccgttttgaagccggaagtgaga

SEQ ID NO: 5139716 - DNA, 25 bp, Homo sapien
ttttgaagccggaagtgagaccctc

SEQ ID NO: 5139717 - DNA, 25 bp, Homo sapien
ttgaagccggaagtgagaccctctt

SEQ ID NO: 5139718 - DNA, 25 bp, Homo sapien
tagcaagttggatttccagcatggg

SEQ ID NO: 5139719 - DNA, 25 bp, Homo sapien
tcccatagcaagttggatttccagc

SEQ ID NO: 5139720 - DNA, 25 bp, Homo sapien
atgtggtgttcttttcagcgagacc

SEQ ID NO: 5139721 - DNA, 25 bp, Homo sapien
tttcagcgagacctttcccatagca

SEQ ID NO: 5139722 - DNA, 25 bp, Homo sapien
aggaaggcagagcagtccgggccgg

SEQ ID NO: 5139723 - DNA, 25 bp, Homo sapien
cctgagcacggacccaggagaatgc

SEQ ID NO: 5139724 - DNA, 25 bp, Homo sapien
ctgttctgatgatgtgatcagggac

SEQ ID NO: 5139725 - DNA, 25 bp, Homo sapien
gcagtgggctgagaaggatgggcca

SEQ ID NO: 5139726 - DNA, 25 bp, Homo sapien
cttccaggaaagtaaataagccgtg

SEQ ID NO: 5139727 - DNA, 25 bp, Homo sapien
gcttctgcgtcgctcttgcgtttgt

SEQ ID NO: 5139728 - DNA, 25 bp, Homo sapien
taaataagccgtgcttctgcgtcgc

SEQ ID NO: 5139729 - DNA, 25 bp, Homo sapien
tgcgtcgctcttgcgtttgtcctct

SEQ ID NO: 5139730 - DNA, 25 bp, Homo sapien
tcctcagtactgctcaccgtagctt

SEQ ID NO: 5139731 - DNA, 25 bp, Homo sapien
aagtcctcagtactgctcaccgtag

SEQ ID NO: 5139732 - DNA, 25 bp, Homo sapien
tcagtactgctcaccgtagcttcct

SEQ ID NO: 5139733 - DNA, 25 bp, Homo sapien
gctcaccgtagcttcctcccttctt

SEQ ID NO: 5139734 - DNA, 25 bp, Homo sapien
ctgtagagcaccgactgggctcgag

SEQ ID NO: 5139735 - DNA, 25 bp, Homo sapien
caatctgtagagcaccgactgggct

SEQ ID NO: 5139736 - DNA, 25 bp, Homo sapien
ttcgcaatctgtagagcaccgactg

SEQ ID NO: 5139737 - DNA, 25 bp, Homo sapien
gggcattcgcaatctgtagagcacc

SEQ ID NO: 5139738 - DNA, 25 bp, Homo sapien
tcacagaggcggtcaatcttcagca

SEQ ID NO: 5139739 - DNA, 25 bp, Homo sapien
tgactgaaggatggatggccgccac

SEQ ID NO: 5139740 - DNA, 25 bp, Homo sapien
tcaccttggatgtgagtgactgaag

SEQ ID NO: 5139741 - DNA, 25 bp, Homo sapien
tgttggatgacaagaaaagtcacct

SEQ ID NO: 5139742 - DNA, 25 bp, Homo sapien
tccaagaaagaccctaggtctgtca

SEQ ID NO: 5139743 - DNA, 25 bp, Homo sapien
ccaagaaagaccctaggtctgtcag

SEQ ID NO: 5139744 - DNA, 25 bp, Homo sapien
ttaatgccagtgaatcaacagtcat

SEQ ID NO: 5139745 - DNA, 25 bp, Homo sapien
ctttaatgccagtgaatcaacagtc

SEQ ID NO: 5139746 - DNA, 25 bp, Homo sapien
tttaatgccagtgaatcaacagtca

SEQ ID NO: 5139747 - DNA, 25 bp, Homo sapien
tcctgtaattgtctggcgctgcgct

SEQ ID NO: 5139748 - DNA, 25 bp, Homo sapien
caacccgcattttgtaacctggaga

SEQ ID NO: 5139749 - DNA, 25 bp, Homo sapien
tcggaagccagtcggtagttaggca

SEQ ID NO: 5139750 - DNA, 25 bp, Homo sapien
gattcgctgagcatcgctgggctgc

SEQ ID NO: 5139751 - DNA, 25 bp, Homo sapien
ggcaagggtgtgtcccgccggccgc

SEQ ID NO: 5139752 - DNA, 25 bp, Homo sapien
ccgaacccggtgttgccgagcggag

SEQ ID NO: 5139753 - DNA, 25 bp, Homo sapien
cctccctcgatcctcgccccctcct

SEQ ID NO: 5139754 - DNA, 25 bp, Homo sapien
cccggtgttgccgagcggaggaggg

SEQ ID NO: 5139755 - DNA, 25 bp, Homo sapien
gccgccgaccgcgctcctcgcgcgg

SEQ ID NO: 5139756 - DNA, 25 bp, Homo sapien
aggccgccgaccgcgctcctcgcgc

SEQ ID NO: 5139757 - DNA, 25 bp, Homo sapien
ccaggccgccgaccgcgctcctcgc

SEQ ID NO: 5139758 - DNA, 25 bp, Homo sapien
ggccgccgaccgcgctcctcgcgcg

SEQ ID NO: 5139759 - DNA, 25 bp, Homo sapien
caataaatgtctctgtcgctctgtg

SEQ ID NO: 5139760 - DNA, 25 bp, Homo sapien
aataacaataaatgtctctgtcgct

SEQ ID NO: 5139761 - DNA, 25 bp, Homo sapien
taacaataaatgtctctgtcgctct

SEQ ID NO: 5139762 - DNA, 25 bp, Homo sapien
aacaataaatgtctctgtcgctctg

SEQ ID NO: 5139763 - DNA, 25 bp, Homo sapien
cagactttttgcaggggagtcgttc

SEQ ID NO: 5139764 - DNA, 25 bp, Homo sapien
ctttttgcaggggagtcgttcgcca

SEQ ID NO: 5139765 - DNA, 25 bp, Homo sapien
gactttttgcaggggagtcgttcgc

SEQ ID NO: 5139766 - DNA, 25 bp, Homo sapien
tttttgcaggggagtcgttcgccat

SEQ ID NO: 5139767 - DNA, 25 bp, Homo sapien
cgcagggaggagaggtcgatgtcca

SEQ ID NO: 5139768 - DNA, 25 bp, Homo sapien
ccgcagggaggagaggtcgatgtcc

SEQ ID NO: 5139769 - DNA, 25 bp, Homo sapien
agccaaaaaaatgaataaatcaagc

SEQ ID NO: 5139770 - DNA, 25 bp, Homo sapien
gaagccaaaaaaatgaataaatcaa

SEQ ID NO: 5139771 - DNA, 25 bp, Homo sapien
gccaaaaaaatgaataaatcaagca

SEQ ID NO: 5139772 - DNA, 25 bp, Homo sapien
agaagccaaaaaaatgaataaatca

SEQ ID NO: 5139773 - DNA, 25 bp, Homo sapien
ttatagacttgtccataggtgccat

SEQ ID NO: 5139774 - DNA, 25 bp, Homo sapien
ccataggtgccatttccaaccactt

SEQ ID NO: 5139775 - DNA, 25 bp, Homo sapien
cttatagacttgtccataggtgcca

SEQ ID NO: 5139776 - DNA, 25 bp, Homo sapien
taagaagtttccacatgccacggga

SEQ ID NO: 5139777 - DNA, 25 bp, Homo sapien
ccaaagcagtggtttaggatcgtca

SEQ ID NO: 5139778 - DNA, 25 bp, Homo sapien
catcaggtgtcagctactcagcgca

SEQ ID NO: 5139779 - DNA, 25 bp, Homo sapien
tatcgaagtaaagtgcatgcctaag

SEQ ID NO: 5139780 - DNA, 25 bp, Homo sapien
gggtcagtcttccacaaaatctatg

SEQ ID NO: 5139781 - DNA, 25 bp, Homo sapien
gcacagtgtcaaatgggcatcgaat

SEQ ID NO: 5139782 - DNA, 25 bp, Homo sapien
catcaaggtctttgggcctagggta

SEQ ID NO: 5139783 - DNA, 25 bp, Homo sapien
cctgcagagaacgagtgaattcaac

SEQ ID NO: 5139784 - DNA, 25 bp, Homo sapien
caatctgaagcctgacgaaggcccc

SEQ ID NO: 5139785 - DNA, 25 bp, Homo sapien
tgatgaatcatcagctcagtgggtt

SEQ ID NO: 5139786 - DNA, 25 bp, Homo sapien
tcaaatgcaaggagcaccaaacagt

SEQ ID NO: 5139787 - DNA, 25 bp, Homo sapien
gatgctaacttctaactgatacagg

SEQ ID NO: 5139788 - DNA, 25 bp, Homo sapien
caagattttggtttaaggccaggcg

SEQ ID NO: 5139789 - DNA, 25 bp, Homo sapien
ttttaagcacaatcaagattttggt

SEQ ID NO: 5139790 - DNA, 25 bp, Homo sapien
aatattttaagcacaatcaagattt

SEQ ID NO: 5139791 - DNA, 25 bp, Homo sapien
atcaagattttggtttaaggccagg

SEQ ID NO: 5139792 - DNA, 25 bp, Homo sapien
tgttatgggctgaaaccgtgatccc

SEQ ID NO: 5139793 - DNA, 25 bp, Homo sapien
gataagggatattctacctgtgtta

SEQ ID NO: 5139794 - DNA, 25 bp, Homo sapien
tcaaaattttcaggttgagtatccc

SEQ ID NO: 5139795 - DNA, 25 bp, Homo sapien
ccccaaaaattactgacatgttgaa

SEQ ID NO: 5139796 - DNA, 25 bp, Homo sapien
tcaggcatggtttgctacccagcaa

SEQ ID NO: 5139797 - DNA, 25 bp, Homo sapien
gagccacggccatctgtagtatttt

SEQ ID NO: 5139798 - DNA, 25 bp, Homo sapien
cacgaagccagcaagtttcaggcat

SEQ ID NO: 5139799 - DNA, 25 bp, Homo sapien
gctgacttcagcttccggagagatc

SEQ ID NO: 5139800 - DNA, 25 bp, Homo sapien
gataagcttcgtttgctctcctaaa

SEQ ID NO: 5139801 - DNA, 25 bp, Homo sapien
gacagctgggtatgcatgacttcct

SEQ ID NO: 5139802 - DNA, 25 bp, Homo sapien
aaacaaccaatgagaaggccgcacg

SEQ ID NO: 5139803 - DNA, 25 bp, Homo sapien
tagctatatctcttttcgccttcat

SEQ ID NO: 5139804 - DNA, 25 bp, Homo sapien
ccagaatcattgcttgtgagactgt

SEQ ID NO: 5139805 - DNA, 25 bp, Homo sapien
gaaacaaatggcttgcgcactgcag

SEQ ID NO: 5139806 - DNA, 25 bp, Homo sapien
tcaggccgtttcctctaatgacaga

SEQ ID NO: 5139807 - DNA, 25 bp, Homo sapien
tcacctggtaatggagttcaggccg

SEQ ID NO: 5139808 - DNA, 25 bp, Homo sapien
gatgaggacacgttctgtgaaaggc

SEQ ID NO: 5139809 - DNA, 25 bp, Homo sapien
tacaccaaggctacatggtctagct

SEQ ID NO: 5139810 - DNA, 25 bp, Homo sapien
caatggtatggcctactctacacca

SEQ ID NO: 5139811 - DNA, 25 bp, Homo sapien
gaatgaaccctgtgcacctatcgct

SEQ ID NO: 5139812 - DNA, 25 bp, Homo sapien
tgaatggttgcctgccattctccct

SEQ ID NO: 5139813 - DNA, 25 bp, Homo sapien
tactcacctcgagatggtaaaacca

SEQ ID NO: 5139814 - DNA, 25 bp, Homo sapien
gcccatcttgattacactcctgagg

SEQ ID NO: 5139815 - DNA, 25 bp, Homo sapien
ccatgctacaaaaccaagaaaggag

SEQ ID NO: 5139816 - DNA, 25 bp, Homo sapien
ctgaaaagcttcttgggacgtagta

SEQ ID NO: 5139817 - DNA, 25 bp, Homo sapien
cttgggacgtagtaacattggcaga

SEQ ID NO: 5139818 - DNA, 25 bp, Homo sapien
gcttcttgggacgtagtaacattgg

SEQ ID NO: 5139819 - DNA, 25 bp, Homo sapien
taacattggcagagatgccgagtga

SEQ ID NO: 5139820 - DNA, 25 bp, Homo sapien
ttggtgtgacaaggtgagagcctca

SEQ ID NO: 5139821 - DNA, 25 bp, Homo sapien
tcccatgcacgctccatacattttg

SEQ ID NO: 5139822 - DNA, 25 bp, Homo sapien
ccttcaatttcagagtgcctgtggc

SEQ ID NO: 5139823 - DNA, 25 bp, Homo sapien
tcagggagctgacaagccaaccagc

SEQ ID NO: 5139824 - DNA, 25 bp, Homo sapien
gtaaactacctgatatccatactaa

SEQ ID NO: 5139825 - DNA, 25 bp, Homo sapien
gctgaactggtatgtatctgctgat

SEQ ID NO: 5139826 - DNA, 25 bp, Homo sapien
tactaaattaccactcagcacaaca

SEQ ID NO: 5139827 - DNA, 25 bp, Homo sapien
taaaatctttgacttgcagtgtaat

SEQ ID NO: 5139828 - DNA, 25 bp, Homo sapien
cctggtgtcttcaagcgagggaaga

SEQ ID NO: 5139829 - DNA, 25 bp, Homo sapien
caggcctctcttgtgctggtcaaaa

SEQ ID NO: 5139830 - DNA, 25 bp, Homo sapien
ggtttggaactataggctagctaca

SEQ ID NO: 5139831 - DNA, 25 bp, Homo sapien
agagaaggtaaagcccaactcgcct

SEQ ID NO: 5139832 - DNA, 25 bp, Homo sapien
tcaccagagaccagacactatgctt

SEQ ID NO: 5139833 - DNA, 25 bp, Homo sapien
gctactcatccagtaagtgaagcag

SEQ ID NO: 5139834 - DNA, 25 bp, Homo sapien
caaaaaatcaagtcccaacgtcatc

SEQ ID NO: 5139835 - DNA, 25 bp, Homo sapien
gaaaattaatctagaaccacacacc

SEQ ID NO: 5139836 - DNA, 25 bp, Homo sapien
gccatgtcactcacgctagtctcga

SEQ ID NO: 5139837 - DNA, 25 bp, Homo sapien
tgccatgtcactcacgctagtctcg

SEQ ID NO: 5139838 - DNA, 25 bp, Homo sapien
gattacagatgacagacaacgcacc

SEQ ID NO: 5139839 - DNA, 25 bp, Homo sapien
tacagatgacagacaacgcacctgg

SEQ ID NO: 5139840 - DNA, 25 bp, Homo sapien
ggtttttgtggccatgactaacaat

SEQ ID NO: 5139841 - DNA, 25 bp, Homo sapien
catgactaacaatattctggactcc

SEQ ID NO: 5139842 - DNA, 25 bp, Homo sapien
tcctaacaactcataaagcaaaaaa

SEQ ID NO: 5139843 - DNA, 25 bp, Homo sapien
aaaaaagcctttctcgctccaacat

SEQ ID NO: 5139844 - DNA, 25 bp, Homo sapien
ggtctagctacctatcagttgatga

SEQ ID NO: 5139845 - DNA, 25 bp, Homo sapien
aaatggcggccactcaaattcacca

SEQ ID NO: 5139846 - DNA, 25 bp, Homo sapien
tgtgctaatgacagagtggacttac

SEQ ID NO: 5139847 - DNA, 25 bp, Homo sapien
gagcagtagagcagaggtctgaccc

SEQ ID NO: 5139848 - DNA, 25 bp, Homo sapien
taccaatgggaatttgagctcaagg

SEQ ID NO: 5139849 - DNA, 25 bp, Homo sapien
aaatacagttgtgtcactatagccc

SEQ ID NO: 5139850 - DNA, 25 bp, Homo sapien
tacgtatgacattacagtgcaatgc

SEQ ID NO: 5139851 - DNA, 25 bp, Homo sapien
taaaaggaagctagacccttacgca

SEQ ID NO: 5139852 - DNA, 25 bp, Homo sapien
tctatctgttatgaccacttccatc

SEQ ID NO: 5139853 - DNA, 25 bp, Homo sapien
tctgttatgaccacttccatccctc

SEQ ID NO: 5139854 - DNA, 25 bp, Homo sapien
tatctgttatgaccacttccatccc

SEQ ID NO: 5139855 - DNA, 25 bp, Homo sapien
ctatctgttatgaccacttccatcc

SEQ ID NO: 5139856 - DNA, 25 bp, Homo sapien
gctgtgtgccgctatgaaaacaggc

SEQ ID NO: 5139857 - DNA, 25 bp, Homo sapien
ctatgaaaacaggcactgcacagag

SEQ ID NO: 5139858 - DNA, 25 bp, Homo sapien
tgaaaacaggcactgcacagagcag

SEQ ID NO: 5139859 - DNA, 25 bp, Homo sapien
tgctgtgtgccgctatgaaaacagg

SEQ ID NO: 5139860 - DNA, 25 bp, Homo sapien
ctaaggtggtttcagcatatttaac

SEQ ID NO: 5139861 - DNA, 25 bp, Homo sapien
aggtccccttcatcaacctttgatg

SEQ ID NO: 5139862 - DNA, 25 bp, Homo sapien
ggaactgcctaaggtggtttcagca

SEQ ID NO: 5139863 - DNA, 25 bp, Homo sapien
ggagaaatgccagtacagcttcttc

SEQ ID NO: 5139864 - DNA, 25 bp, Homo sapien
gagagaagcttgtcatacactgcac

SEQ ID NO: 5139865 - DNA, 25 bp, Homo sapien
tacactgcacatctagaagacgcca

SEQ ID NO: 5139866 - DNA, 25 bp, Homo sapien
ggtgtgacgtgtacctgcaacagaa

SEQ ID NO: 5139867 - DNA, 25 bp, Homo sapien
caggtttgagttagcaactggccag

SEQ ID NO: 5139868 - DNA, 25 bp, Homo sapien
taatgcacatctcagtaacctgaag

SEQ ID NO: 5139869 - DNA, 25 bp, Homo sapien
cagagaaataccatgccctagagta

SEQ ID NO: 5139870 - DNA, 25 bp, Homo sapien
tacctttaaccagtgctcaggacat

SEQ ID NO: 5139871 - DNA, 25 bp, Homo sapien
agtgtgaaaccaattgctctgcttt

SEQ ID NO: 5139872 - DNA, 25 bp, Homo sapien
ctatgagggcaacaaagcaggtcac

SEQ ID NO: 5139873 - DNA, 25 bp, Homo sapien
ggattactggatcactctggaccca

SEQ ID NO: 5139874 - DNA, 25 bp, Homo sapien
tattatctacatttcttgggcacag

SEQ ID NO: 5139875 - DNA, 25 bp, Homo sapien
gggtcactcaaacacctaacttgtg

SEQ ID NO: 5139876 - DNA, 25 bp, Homo sapien
cttccaaacaagacactgtaccggg

SEQ ID NO: 5139877 - DNA, 25 bp, Homo sapien
taaaagctgagaactgtgaattcac

SEQ ID NO: 5139878 - DNA, 25 bp, Homo sapien
tggtctatgcttccctctatgcctg

SEQ ID NO: 5139879 - DNA, 25 bp, Homo sapien
gcctgaactcaagaccacaagtgtg

SEQ ID NO: 5139880 - DNA, 25 bp, Homo sapien
actttgatggctgccaactgacccg

SEQ ID NO: 5139881 - DNA, 25 bp, Homo sapien
ggctgccaactgacccgttttaaca

SEQ ID NO: 5139882 - DNA, 25 bp, Homo sapien
gatggctgccaactgacccgtttta

SEQ ID NO: 5139883 - DNA, 25 bp, Homo sapien
caactgacccgttttaacatgtcga

SEQ ID NO: 5139884 - DNA, 25 bp, Homo sapien
gaaggcaaaccacatttagattcca

SEQ ID NO: 5139885 - DNA, 25 bp, Homo sapien
cagagccaggcttcggtgaagaaga

SEQ ID NO: 5139886 - DNA, 25 bp, Homo sapien
ttgcacacttataatcagagccagg

SEQ ID NO: 5139887 - DNA, 25 bp, Homo sapien
aaagaggacgtatcctgaccggcca

SEQ ID NO: 5139888 - DNA, 25 bp, Homo sapien
caacacttactatgggcaatgactg

SEQ ID NO: 5139889 - DNA, 25 bp, Homo sapien
taagaggagctttgacatgcaggct

SEQ ID NO: 5139890 - DNA, 25 bp, Homo sapien
gactgtgccccatgctatagcaaag

SEQ ID NO: 5139891 - DNA, 25 bp, Homo sapien
tacaactgcacaagaggagctaaga

SEQ ID NO: 5139892 - DNA, 25 bp, Homo sapien
tagcagaagaatcggcagggctcag

SEQ ID NO: 5139893 - DNA, 25 bp, Homo sapien
gtgctgtcatgaacctagaagggct

SEQ ID NO: 5139894 - DNA, 25 bp, Homo sapien
cccacgtgaatgaagggtgctgtca

SEQ ID NO: 5139895 - DNA, 25 bp, Homo sapien
tatatgctaagcaccacccacgtga

SEQ ID NO: 5139896 - DNA, 25 bp, Homo sapien
gccgcccaaagctgaaaggaataaa

SEQ ID NO: 5139897 - DNA, 25 bp, Homo sapien
ccccagagctgagaatagtgttttt

SEQ ID NO: 5139898 - DNA, 25 bp, Homo sapien
gaattagtgcaactccatgaacagc

SEQ ID NO: 5139899 - DNA, 25 bp, Homo sapien
aaaactttgcatgtacagccgccca

SEQ ID NO: 5139900 - DNA, 25 bp, Homo sapien
tctgccagcaaggtaaggagccatg

SEQ ID NO: 5139901 - DNA, 25 bp, Homo sapien
ccagcaaggtaaggagccatgggca

SEQ ID NO: 5139902 - DNA, 25 bp, Homo sapien
cctgctctgccagcaaggtaaggag

SEQ ID NO: 5139903 - DNA, 25 bp, Homo sapien
gcaaggtaaggagccatgggcattc

SEQ ID NO: 5139904 - DNA, 25 bp, Homo sapien
aaaccagcaattcctctgtgtaggg

SEQ ID NO: 5139905 - DNA, 25 bp, Homo sapien
ttgcacaaaccagcaattcctctgt

SEQ ID NO: 5139906 - DNA, 25 bp, Homo sapien
gcaattcctctgtgtagggccctgg

SEQ ID NO: 5139907 - DNA, 25 bp, Homo sapien
ctgggcacaagctgcacacaggcag

SEQ ID NO: 5139908 - DNA, 25 bp, Homo sapien
gaattcttcggtgttaagagccagg

SEQ ID NO: 5139909 - DNA, 25 bp, Homo sapien
ttgaagcagcaagaatccatgaatt

SEQ ID NO: 5139910 - DNA, 25 bp, Homo sapien
attcttcggtgttaagagccaggag

SEQ ID NO: 5139911 - DNA, 25 bp, Homo sapien
gcagcaagaatccatgaattcttcg

SEQ ID NO: 5139912 - DNA, 25 bp, Homo sapien
actctgggtcagcatagaaaatcat

SEQ ID NO: 5139913 - DNA, 25 bp, Homo sapien
acactgaactctgggtcagcataga

SEQ ID NO: 5139914 - DNA, 25 bp, Homo sapien
gaactctgggtcagcatagaaaatc

SEQ ID NO: 5139915 - DNA, 25 bp, Homo sapien
actgaactctgggtcagcatagaaa

SEQ ID NO: 5139916 - DNA, 25 bp, Homo sapien
cattcagtaagcacgaactgtgggc

SEQ ID NO: 5139917 - DNA, 25 bp, Homo sapien
tggctcgtcaaagagacacatggac

SEQ ID NO: 5139918 - DNA, 25 bp, Homo sapien
ggagcagccaacaaacctgggtaga

SEQ ID NO: 5139919 - DNA, 25 bp, Homo sapien
ggtagagccgtagagccagcataaa

SEQ ID NO: 5139920 - DNA, 25 bp, Homo sapien
tctgcatggagtcccctgagtcagt

SEQ ID NO: 5139921 - DNA, 25 bp, Homo sapien
catgcaaagtctgcatggagtcccc

SEQ ID NO: 5139922 - DNA, 25 bp, Homo sapien
catcactccctaaagaacaacacag

SEQ ID NO: 5139923 - DNA, 25 bp, Homo sapien
cagtcctccctgtcttgtgatcatc

SEQ ID NO: 5139924 - DNA, 25 bp, Homo sapien
gaaaagaaggcctcgagacactgct

SEQ ID NO: 5139925 - DNA, 25 bp, Homo sapien
aaggcctcgagacactgctgatgtc

SEQ ID NO: 5139926 - DNA, 25 bp, Homo sapien
aaaagaaggcctcgagacactgctg

SEQ ID NO: 5139927 - DNA, 25 bp, Homo sapien
agaaggcctcgagacactgctgatg

SEQ ID NO: 5139928 - DNA, 25 bp, Homo sapien
agtacccagggacacgcacgcgtgc

SEQ ID NO: 5139929 - DNA, 25 bp, Homo sapien
ccagggacacgcacgcgtgctgtga

SEQ ID NO: 5139930 - DNA, 25 bp, Homo sapien
tacacatttcataaagctgtagtaa

SEQ ID NO: 5139931 - DNA, 25 bp, Homo sapien
cagttcattaacttgccattgtgtt

SEQ ID NO: 5139932 - DNA, 25 bp, Homo sapien
ccaatggtcagttgtgcagggaggc

SEQ ID NO: 5139933 - DNA, 25 bp, Homo sapien
aaccaatggtcagttgtgcagggag

SEQ ID NO: 5139934 - DNA, 25 bp, Homo sapien
gaaaccaatggtcagttgtgcaggg

SEQ ID NO: 5139935 - DNA, 25 bp, Homo sapien
ctgaaaccaatggtcagttgtgcag

SEQ ID NO: 5139936 - DNA, 25 bp, Homo sapien
tctcccctccttgctgctcgagggt

SEQ ID NO: 5139937 - DNA, 25 bp, Homo sapien
tcactgccagtttccctgcttgggc

SEQ ID NO: 5139938 - DNA, 25 bp, Homo sapien
cctctgtccttggactgagggtcct

SEQ ID NO: 5139939 - DNA, 25 bp, Homo sapien
tctgtccttggactgagggtcctct

SEQ ID NO: 5139940 - DNA, 25 bp, Homo sapien
tagttctgctactgaaccaatgagc

SEQ ID NO: 5139941 - DNA, 25 bp, Homo sapien
gatgcttgcctgaatgacccacaag

SEQ ID NO: 5139942 - DNA, 25 bp, Homo sapien
caatgagactgcactactcagctgg

SEQ ID NO: 5139943 - DNA, 25 bp, Homo sapien
gacccacaaggaggacaaaatacat

SEQ ID NO: 5139944 - DNA, 25 bp, Homo sapien
accaccaccactagcaccaccaaaa

SEQ ID NO: 5139945 - DNA, 25 bp, Homo sapien
ccaccactagcaccaccaaaaacaa

SEQ ID NO: 5139946 - DNA, 25 bp, Homo sapien
caccaccactagcaccaccaaaaac

SEQ ID NO: 5139947 - DNA, 25 bp, Homo sapien
gcaccaccaaaaacaaacacttcat

SEQ ID NO: 5139948 - DNA, 25 bp, Homo sapien
gatgaaagcaccataatatgttgca

SEQ ID NO: 5139949 - DNA, 25 bp, Homo sapien
agggctctttttgatgaaagcacca

SEQ ID NO: 5139950 - DNA, 25 bp, Homo sapien
ttgatgaaagcaccataatatgttg

SEQ ID NO: 5139951 - DNA, 25 bp, Homo sapien
ctctttttgatgaaagcaccataat

SEQ ID NO: 5139952 - DNA, 25 bp, Homo sapien
catagtccagtgtattcgctccata

SEQ ID NO: 5139953 - DNA, 25 bp, Homo sapien
gacagtgtctggtattctacggcac

SEQ ID NO: 5139954 - DNA, 25 bp, Homo sapien
tacggcacacccaagtgcagcaatt

SEQ ID NO: 5139955 - DNA, 25 bp, Homo sapien
taaagacctagaaacgtgatgctcc

SEQ ID NO: 5139956 - DNA, 25 bp, Homo sapien
gatgtaagcgatccagtcttctttg

SEQ ID NO: 5139957 - DNA, 25 bp, Homo sapien
cagccccacagaactccataacaag

SEQ ID NO: 5139958 - DNA, 25 bp, Homo sapien
aaggtctgtaatggacccagcccca

SEQ ID NO: 5139959 - DNA, 25 bp, Homo sapien
tgttcttcacaaggtctgtaatgga

SEQ ID NO: 5139960 - DNA, 25 bp, Homo sapien
caggatcatgagttggagcactgta

SEQ ID NO: 5139961 - DNA, 25 bp, Homo sapien
tcatgagttggagcactgtagccac

SEQ ID NO: 5139962 - DNA, 25 bp, Homo sapien
aagcacaggatcatgagttggagca

SEQ ID NO: 5139963 - DNA, 25 bp, Homo sapien
tgagttggagcactgtagccaccca

SEQ ID NO: 5139964 - DNA, 25 bp, Homo sapien
tatttgaactagacacatctcaggg

SEQ ID NO: 5139965 - DNA, 25 bp, Homo sapien
gctaaatgtctagagggtgaccccg

SEQ ID NO: 5139966 - DNA, 25 bp, Homo sapien
aacttcgtcttagtgcattcccagg

SEQ ID NO: 5139967 - DNA, 25 bp, Homo sapien
taggttccccgtgtgagcaacgtga

SEQ ID NO: 5139968 - DNA, 25 bp, Homo sapien
tatcccggtgaatcacatgatgaat

SEQ ID NO: 5139969 - DNA, 25 bp, Homo sapien
tcccggtgaatcacatgatgaatgt

SEQ ID NO: 5139970 - DNA, 25 bp, Homo sapien
tggcccttgatatcccggtgaatca

SEQ ID NO: 5139971 - DNA, 25 bp, Homo sapien
cttgatatcccggtgaatcacatga

SEQ ID NO: 5139972 - DNA, 25 bp, Homo sapien
acttttagctagatggaagcagaac

SEQ ID NO: 5139973 - DNA, 25 bp, Homo sapien
catgggtaagactgaacttttagct

SEQ ID NO: 5139974 - DNA, 25 bp, Homo sapien
aactgggagtgcagctggcttgtgc

SEQ ID NO: 5139975 - DNA, 25 bp, Homo sapien
gcttgtgccaggtgcaattatgaga

SEQ ID NO: 5139976 - DNA, 25 bp, Homo sapien
agtgacttctgcatcccacccaatt

SEQ ID NO: 5139977 - DNA, 25 bp, Homo sapien
aagcacttggaacttctgctgattt

SEQ ID NO: 5139978 - DNA, 25 bp, Homo sapien
ttctgcatcccacccaattggatgg

SEQ ID NO: 5139979 - DNA, 25 bp, Homo sapien
acttggaacttctgctgatttttca

SEQ ID NO: 5139980 - DNA, 25 bp, Homo sapien
agagggccttttgaatgaaccacaa

SEQ ID NO: 5139981 - DNA, 25 bp, Homo sapien
cacaaccttcagtgctttcagagaa

SEQ ID NO: 5139982 - DNA, 25 bp, Homo sapien
ccacaaccttcagtgctttcagaga

SEQ ID NO: 5139983 - DNA, 25 bp, Homo sapien
gcagagggccttttgaatgaaccac

SEQ ID NO: 5139984 - DNA, 25 bp, Homo sapien
atgaacgtatttctccgccccacag

SEQ ID NO: 5139985 - DNA, 25 bp, Homo sapien
cagctgagcactcacaccaaagtca

SEQ ID NO: 5139986 - DNA, 25 bp, Homo sapien
ccagtagggagtgcctatgaacgta

SEQ ID NO: 5139987 - DNA, 25 bp, Homo sapien
agctgagcactcacaccaaagtcaa

SEQ ID NO: 5139988 - DNA, 25 bp, Homo sapien
ttgaaaagtagatgaggatagttat

SEQ ID NO: 5139989 - DNA, 25 bp, Homo sapien
gatgaggatagttattatcattact

SEQ ID NO: 5139990 - DNA, 25 bp, Homo sapien
gtttatatgctatcttaaccaagga

SEQ ID NO: 5139991 - DNA, 25 bp, Homo sapien
tatgctatcttaaccaaggaattaa

SEQ ID NO: 5139992 - DNA, 25 bp, Homo sapien
tgtaatgccacaagaccaaagatca

SEQ ID NO: 5139993 - DNA, 25 bp, Homo sapien
tgccatctcaatggctgtaatgcca

SEQ ID NO: 5139994 - DNA, 25 bp, Homo sapien
ggctgtaatgccacaagaccaaaga

SEQ ID NO: 5139995 - DNA, 25 bp, Homo sapien
tcaatggctgtaatgccacaagacc

SEQ ID NO: 5139996 - DNA, 25 bp, Homo sapien
tctggcccatcgtctgactgacagg

SEQ ID NO: 5139997 - DNA, 25 bp, Homo sapien
tagacatctagttatgaactccagg

SEQ ID NO: 5139998 - DNA, 25 bp, Homo sapien
gactgacaggcttcataccaagcag

SEQ ID NO: 5139999 - DNA, 25 bp, Homo sapien
aatctaagtcttataggaactaaca

SEQ ID NO: 5140000 - DNA, 25 bp, Homo sapien
ctcattggatgcatgtcacagagag

SEQ ID NO: 5140001 - DNA, 25 bp, Homo sapien
ggaggagggtttctgggaatgagaa

SEQ ID NO: 5140002 - DNA, 25 bp, Homo sapien
gaatgagaaacagtgctctcattgg

SEQ ID NO: 5140003 - DNA, 25 bp, Homo sapien
gaaacagtgctctcattggatgcat

SEQ ID NO: 5140004 - DNA, 25 bp, Homo sapien
ttcttcaccaggcacccttctataa

SEQ ID NO: 5140005 - DNA, 25 bp, Homo sapien
tcaccaggcacccttctataaaact

SEQ ID NO: 5140006 - DNA, 25 bp, Homo sapien
caccaggcacccttctataaaacta

SEQ ID NO: 5140007 - DNA, 25 bp, Homo sapien
cttcaccaggcacccttctataaaa

SEQ ID NO: 5140008 - DNA, 25 bp, Homo sapien
tttcatttggctgatcccttataaa

SEQ ID NO: 5140009 - DNA, 25 bp, Homo sapien
gatcccttataaaaggatgtttcaa

SEQ ID NO: 5140010 - DNA, 25 bp, Homo sapien
tgatcccttataaaaggatgtttca

SEQ ID NO: 5140011 - DNA, 25 bp, Homo sapien
cgatctatatgatccttaagctgga

SEQ ID NO: 5140012 - DNA, 25 bp, Homo sapien
gatccttaagctggattctaacttg

SEQ ID NO: 5140013 - DNA, 25 bp, Homo sapien
ggtacgatctatatgatccttaagc

SEQ ID NO: 5140014 - DNA, 25 bp, Homo sapien
tcttcttcctggtacgatctatatg

SEQ ID NO: 5140015 - DNA, 25 bp, Homo sapien
cctggtttttaagtgcctgggcaat

SEQ ID NO: 5140016 - DNA, 25 bp, Homo sapien
taaaatttgctctacttaggccaga

SEQ ID NO: 5140017 - DNA, 25 bp, Homo sapien
gctcttctgtatgctagaccatcaa

SEQ ID NO: 5140018 - DNA, 25 bp, Homo sapien
attagggatccacggagagtgcagc

SEQ ID NO: 5140019 - DNA, 25 bp, Homo sapien
gatacatgagaaaagaacccgaggg

SEQ ID NO: 5140020 - DNA, 25 bp, Homo sapien
tgatacatgagaaaagaacccgagg

SEQ ID NO: 5140021 - DNA, 25 bp, Homo sapien
tacatgagaaaagaacccgagggca

SEQ ID NO: 5140022 - DNA, 25 bp, Homo sapien
ctgatacatgagaaaagaacccgag

SEQ ID NO: 5140023 - DNA, 25 bp, Homo sapien
ctgaggacgtgcaggaccacgagag

SEQ ID NO: 5140024 - DNA, 25 bp, Homo sapien
tgattccacggcattcgagccaacc

SEQ ID NO: 5140025 - DNA, 25 bp, Homo sapien
cacggcattcgagccaaccttgtat

SEQ ID NO: 5140026 - DNA, 25 bp, Homo sapien
tatggggatgtactgctgaggacgt

SEQ ID NO: 5140027 - DNA, 25 bp, Homo sapien
tcactcccactgtactcatactcag

SEQ ID NO: 5140028 - DNA, 25 bp, Homo sapien
ccttcctgttcaggcacttcctcct

SEQ ID NO: 5140029 - DNA, 25 bp, Homo sapien
tcccactgtactcatactcagtttc

SEQ ID NO: 5140030 - DNA, 25 bp, Homo sapien
actcccactgtactcatactcagtt

SEQ ID NO: 5140031 - DNA, 25 bp, Homo sapien
cgaagagcctcggaacgttccttgt

SEQ ID NO: 5140032 - DNA, 25 bp, Homo sapien
tagtaactgttgtctccgaagagcc

SEQ ID NO: 5140033 - DNA, 25 bp, Homo sapien
tcttctagccgtcgcctctgttctt

SEQ ID NO: 5140034 - DNA, 25 bp, Homo sapien
tcggcgaagagtagactcaccaggc

SEQ ID NO: 5140035 - DNA, 25 bp, Homo sapien
tatcaaggtgtgaaggctctaggga

SEQ ID NO: 5140036 - DNA, 25 bp, Homo sapien
ccgtgtttccgcctctatgtccaaa

SEQ ID NO: 5140037 - DNA, 25 bp, Homo sapien
tcctagcttaggtggttgcaggcaa

SEQ ID NO: 5140038 - DNA, 25 bp, Homo sapien
tatacccaaggttaaggcatttaga

SEQ ID NO: 5140039 - DNA, 25 bp, Homo sapien
ttccactggataatatcaatacagg

SEQ ID NO: 5140040 - DNA, 25 bp, Homo sapien
ataggttaaattccactggataata

SEQ ID NO: 5140041 - DNA, 25 bp, Homo sapien
caatacagggctttactgttgttgg

SEQ ID NO: 5140042 - DNA, 25 bp, Homo sapien
ggataatatcaatacagggctttac

SEQ ID NO: 5140043 - DNA, 25 bp, Homo sapien
gagactctcagtacgaactcggctg

SEQ ID NO: 5140044 - DNA, 25 bp, Homo sapien
cagcagcagttatcagagagcacca

SEQ ID NO: 5140045 - DNA, 25 bp, Homo sapien
ccaaaagagttgcaaggacttccaa

SEQ ID NO: 5140046 - DNA, 25 bp, Homo sapien
cagtcacacacatgaagagcagcgg

SEQ ID NO: 5140047 - DNA, 25 bp, Homo sapien
tctgagtctgcttttggttccgcct

SEQ ID NO: 5140048 - DNA, 25 bp, Homo sapien
gatttggtagtccagtctctctcac

SEQ ID NO: 5140049 - DNA, 25 bp, Homo sapien
aaactcatcagcttcccatgggtgg

SEQ ID NO: 5140050 - DNA, 25 bp, Homo sapien
taactggatagcaacgatgatttgg

SEQ ID NO: 5140051 - DNA, 25 bp, Homo sapien
tagtcacgtgttgctaatgagcacc

SEQ ID NO: 5140052 - DNA, 25 bp, Homo sapien
cacctgaaatatagctagcatgaat

SEQ ID NO: 5140053 - DNA, 25 bp, Homo sapien
tgtctctgcactgctccgtagtcac

SEQ ID NO: 5140054 - DNA, 25 bp, Homo sapien
ggctactgggtagcagcaactctag

SEQ ID NO: 5140055 - DNA, 25 bp, Homo sapien
atgttatagtgtgctgatcagtcag

SEQ ID NO: 5140056 - DNA, 25 bp, Homo sapien
ttatagtgtgctgatcagtcagtgc

SEQ ID NO: 5140057 - DNA, 25 bp, Homo sapien
gttatagtgtgctgatcagtcagtg

SEQ ID NO: 5140058 - DNA, 25 bp, Homo sapien
tgttatagtgtgctgatcagtcagt

SEQ ID NO: 5140059 - DNA, 25 bp, Homo sapien
tcttctttgcgccttctctccaact

SEQ ID NO: 5140060 - DNA, 25 bp, Homo sapien
gctgccttctagcttcccgctctct

SEQ ID NO: 5140061 - DNA, 25 bp, Homo sapien
tgttctctccttcgctgttcacgtt

SEQ ID NO: 5140062 - DNA, 25 bp, Homo sapien
aactcctctagacgcctcttttctt

SEQ ID NO: 5140063 - DNA, 25 bp, Homo sapien
tgtgtgtatactttctaaaaatccc

SEQ ID NO: 5140064 - DNA, 25 bp, Homo sapien
tttcaccacgttcatacatctgaag

SEQ ID NO: 5140065 - DNA, 25 bp, Homo sapien
cccagctctgcaaagtaacaaactt

SEQ ID NO: 5140066 - DNA, 25 bp, Homo sapien
aaacttcacaagtgtatgcctgcta

SEQ ID NO: 5140067 - DNA, 25 bp, Homo sapien
ggagcatgcagacccaagcttagaa

SEQ ID NO: 5140068 - DNA, 25 bp, Homo sapien
tggaatgttaaagcacacgcgctac

SEQ ID NO: 5140069 - DNA, 25 bp, Homo sapien
aaagcgtcactgaaattcctgggaa

SEQ ID NO: 5140070 - DNA, 25 bp, Homo sapien
catgataagcataaaggacggcagc

SEQ ID NO: 5140071 - DNA, 25 bp, Homo sapien
cctcttctagctgtcgcctgatata

SEQ ID NO: 5140072 - DNA, 25 bp, Homo sapien
tcctcttctagctgtcgcctgatat

SEQ ID NO: 5140073 - DNA, 25 bp, Homo sapien
cttctagctgtcgcctgatatactc

SEQ ID NO: 5140074 - DNA, 25 bp, Homo sapien
tcttctagctgtcgcctgatatact

SEQ ID NO: 5140075 - DNA, 25 bp, Homo sapien
cactggagagctcgcctcttctctg

SEQ ID NO: 5140076 - DNA, 25 bp, Homo sapien
gagctcgcctcttctctggatttgt

SEQ ID NO: 5140077 - DNA, 25 bp, Homo sapien
ctatgggacactggagagctcgcct

SEQ ID NO: 5140078 - DNA, 25 bp, Homo sapien
tgggacactggagagctcgcctctt

SEQ ID NO: 5140079 - DNA, 25 bp, Homo sapien
tggagagggagaggataacactaaa

SEQ ID NO: 5140080 - DNA, 25 bp, Homo sapien
ggagagggagaggataacactaaat

SEQ ID NO: 5140081 - DNA, 25 bp, Homo sapien
ggagatatgcttgttcttgttgcaa

SEQ ID NO: 5140082 - DNA, 25 bp, Homo sapien
tatgcttgttcttgttgcaactgcc

SEQ ID NO: 5140083 - DNA, 25 bp, Homo sapien
tcctccatctcccgccatcggcact

SEQ ID NO: 5140084 - DNA, 25 bp, Homo sapien
gatatgcttgttcttgttgcaactg

SEQ ID NO: 5140085 - DNA, 25 bp, Homo sapien
cgctcggtcagcaggctcgtagtgg

SEQ ID NO: 5140086 - DNA, 25 bp, Homo sapien
caggctcgtagtgggctttgggctc

SEQ ID NO: 5140087 - DNA, 25 bp, Homo sapien
ggctcgggagcatggaagcttggct

SEQ ID NO: 5140088 - DNA, 25 bp, Homo sapien
cgtagtgggctttgggctcgggagc

SEQ ID NO: 5140089 - DNA, 25 bp, Homo sapien
gcactgactgaatatgaaaccttgg

SEQ ID NO: 5140090 - DNA, 25 bp, Homo sapien
tctagaatctactgcctgtgagggc

SEQ ID NO: 5140091 - DNA, 25 bp, Homo sapien
ccgggattcaacacctctggaggca

SEQ ID NO: 5140092 - DNA, 25 bp, Homo sapien
cgttatacgactttccagggcaatg

SEQ ID NO: 5140093 - DNA, 25 bp, Homo sapien
ggcgggatgcacagactcggagttg

SEQ ID NO: 5140094 - DNA, 25 bp, Homo sapien
ggcactggtggctccaatactctgc

SEQ ID NO: 5140095 - DNA, 25 bp, Homo sapien
tgtctgcttagactgggcttcaggg

SEQ ID NO: 5140096 - DNA, 25 bp, Homo sapien
aaagactctgatcgggaaggcactg

SEQ ID NO: 5140097 - DNA, 25 bp, Homo sapien
cagggctcacacagtaaagcgctta

SEQ ID NO: 5140098 - DNA, 25 bp, Homo sapien
tcagcgagccgttgcatgagtctcc

SEQ ID NO: 5140099 - DNA, 25 bp, Homo sapien
tctaaggcccattcataggactggc

SEQ ID NO: 5140100 - DNA, 25 bp, Homo sapien
tgtgatattacagcaggcctgcggc

SEQ ID NO: 5140101 - DNA, 25 bp, Homo sapien
aacacaaaacattcaatgcgttctg

SEQ ID NO: 5140102 - DNA, 25 bp, Homo sapien
cacaaaacattcaatgcgttctgca

SEQ ID NO: 5140103 - DNA, 25 bp, Homo sapien
attcaatgcgttctgcataaaactg

SEQ ID NO: 5140104 - DNA, 25 bp, Homo sapien
aaaacattcaatgcgttctgcataa

SEQ ID NO: 5140105 - DNA, 25 bp, Homo sapien
atgggatcgcgagacaggggaaaca

SEQ ID NO: 5140106 - DNA, 25 bp, Homo sapien
ctgaaggaatgggatcgcgagacag

SEQ ID NO: 5140107 - DNA, 25 bp, Homo sapien
gaaggaatgggatcgcgagacaggg

SEQ ID NO: 5140108 - DNA, 25 bp, Homo sapien
gaatgggatcgcgagacaggggaaa

SEQ ID NO: 5140109 - DNA, 25 bp, Homo sapien
gaacgaagatggtggtgtgcaaatt

SEQ ID NO: 5140110 - DNA, 25 bp, Homo sapien
agaacgaagatggtggtgtgcaaat

SEQ ID NO: 5140111 - DNA, 25 bp, Homo sapien
tgagaacgaagatggtggtgtgcaa

SEQ ID NO: 5140112 - DNA, 25 bp, Homo sapien
acgaagatggtggtgtgcaaatttg

SEQ ID NO: 5140113 - DNA, 25 bp, Homo sapien
tctgatctagaccaagccttttggg

SEQ ID NO: 5140114 - DNA, 25 bp, Homo sapien
tgagcacctcactgcgggaaggtgg

SEQ ID NO: 5140115 - DNA, 25 bp, Homo sapien
ttggaggcacctcgtcactgtctga

SEQ ID NO: 5140116 - DNA, 25 bp, Homo sapien
cttttgggtagggtcaggcgcctct

SEQ ID NO: 5140117 - DNA, 25 bp, Homo sapien
ctgccctgcagtggggaatctcgac

SEQ ID NO: 5140118 - DNA, 25 bp, Homo sapien
tggggaatctcgacgggacagaaca

SEQ ID NO: 5140119 - DNA, 25 bp, Homo sapien
gagcgagatgttgttctcacaggaa

SEQ ID NO: 5140120 - DNA, 25 bp, Homo sapien
aacaggggagcgagatgttgttctc

SEQ ID NO: 5140121 - DNA, 25 bp, Homo sapien
ctcccacagaagcctgggctcaata

SEQ ID NO: 5140122 - DNA, 25 bp, Homo sapien
agcgttccccggagccactctgaga

SEQ ID NO: 5140123 - DNA, 25 bp, Homo sapien
gggctgggatcctgagttgctggac

SEQ ID NO: 5140124 - DNA, 25 bp, Homo sapien
atctcactctgaagcgttccccgga

SEQ ID NO: 5140125 - DNA, 25 bp, Homo sapien
ctctgagacccagggtgagacccgg

SEQ ID NO: 5140126 - DNA, 25 bp, Homo sapien
caggcgctgagatggagagccttca

SEQ ID NO: 5140127 - DNA, 25 bp, Homo sapien
ggagagccttcagacttggatgatg

SEQ ID NO: 5140128 - DNA, 25 bp, Homo sapien
atggagagccttcagacttggatga

SEQ ID NO: 5140129 - DNA, 25 bp, Homo sapien
ctgcattttccaggcgctgagatgg

SEQ ID NO: 5140130 - DNA, 25 bp, Homo sapien
ctgaaataagtaaaactgatcctgc

SEQ ID NO: 5140131 - DNA, 25 bp, Homo sapien
tatcaccccaggtaccaaaaagcag

SEQ ID NO: 5140132 - DNA, 25 bp, Homo sapien
caccaagtgtatggctggaacaaca

SEQ ID NO: 5140133 - DNA, 25 bp, Homo sapien
tatacagggaaagcagacgatacca

SEQ ID NO: 5140134 - DNA, 25 bp, Homo sapien
gaatgcacagtacaaggaagcgcgg

SEQ ID NO: 5140135 - DNA, 25 bp, Homo sapien
agtacagcgcagtttcgtggagtcc

SEQ ID NO: 5140136 - DNA, 25 bp, Homo sapien
cgcagtttcgtggagtccgagaagc

SEQ ID NO: 5140137 - DNA, 25 bp, Homo sapien
ttcagtacagcgcagtttcgtggag

SEQ ID NO: 5140138 - DNA, 25 bp, Homo sapien
cagcgcagtttcgtggagtccgaga

SEQ ID NO: 5140139 - DNA, 25 bp, Homo sapien
tgtagaaacataacttccctcccaa

SEQ ID NO: 5140140 - DNA, 25 bp, Homo sapien
gaagactttgtcatatagacatgtg

SEQ ID NO: 5140141 - DNA, 25 bp, Homo sapien
ttgctttctggactgacccctttaa

SEQ ID NO: 5140142 - DNA, 25 bp, Homo sapien
aaatcaggcttatttaactagaggc

SEQ ID NO: 5140143 - DNA, 25 bp, Homo sapien
ggccgtacatcttccactgctcgaa

SEQ ID NO: 5140144 - DNA, 25 bp, Homo sapien
tcctgaggtggactcgtcagcccct

SEQ ID NO: 5140145 - DNA, 25 bp, Homo sapien
tcgaagctctttggccagtgcggtc

SEQ ID NO: 5140146 - DNA, 25 bp, Homo sapien
tagtccgttactttgtgaggtggcc

SEQ ID NO: 5140147 - DNA, 25 bp, Homo sapien
gacgtgaaaggccttaatctctgga

SEQ ID NO: 5140148 - DNA, 25 bp, Homo sapien
tcaaaacatgagatgaggctaccga

SEQ ID NO: 5140149 - DNA, 25 bp, Homo sapien
tatgcacacaccaacgaagagaagg

SEQ ID NO: 5140150 - DNA, 25 bp, Homo sapien
taggaacaactaggtcccagtggaa

SEQ ID NO: 5140151 - DNA, 25 bp, Homo sapien
tacatcatcatggacaatcatggtt

SEQ ID NO: 5140152 - DNA, 25 bp, Homo sapien
ggtcatggccggctcactttctaca

SEQ ID NO: 5140153 - DNA, 25 bp, Homo sapien
ggacgattagagtgccctccttgga

SEQ ID NO: 5140154 - DNA, 25 bp, Homo sapien
ttcacagattccgtttcaccattgc

SEQ ID NO: 5140155 - DNA, 25 bp, Homo sapien
gagcctgtttaaggactccctgtgg

SEQ ID NO: 5140156 - DNA, 25 bp, Homo sapien
tagactgtgagactcagcgcggtgc

SEQ ID NO: 5140157 - DNA, 25 bp, Homo sapien
gaccctctgggacttgttaacatga

SEQ ID NO: 5140158 - DNA, 25 bp, Homo sapien
gagactactcgctaccttctgggca

SEQ ID NO: 5140159 - DNA, 25 bp, Homo sapien
gcaagaggtgaatgcgaccggcaaa

SEQ ID NO: 5140160 - DNA, 25 bp, Homo sapien
ggctggcacgcttttggtcaactgt

SEQ ID NO: 5140161 - DNA, 25 bp, Homo sapien
cattgctctcatgatggctggcacg

SEQ ID NO: 5140162 - DNA, 25 bp, Homo sapien
gaatggctttgctgtaagagatctg

SEQ ID NO: 5140163 - DNA, 25 bp, Homo sapien
ttgtcctggggtgtctgtggggaca

SEQ ID NO: 5140164 - DNA, 25 bp, Homo sapien
tcattagcagtgagcttgtcctggg

SEQ ID NO: 5140165 - DNA, 25 bp, Homo sapien
ctcattagcagtgagcttgtcctgg

SEQ ID NO: 5140166 - DNA, 25 bp, Homo sapien
tctgtggggacatggtgggtgtcgg

SEQ ID NO: 5140167 - DNA, 25 bp, Homo sapien
caaactaactcctaggcagtgctgg

SEQ ID NO: 5140168 - DNA, 25 bp, Homo sapien
cagccagctgtggtgcgagacatac

SEQ ID NO: 5140169 - DNA, 25 bp, Homo sapien
agtgctggtctaaccccaggaaagc

SEQ ID NO: 5140170 - DNA, 25 bp, Homo sapien
ttatctacagaacagtaaacagtga

SEQ ID NO: 5140171 - DNA, 25 bp, Homo sapien
ctggagtgtgctactagcggactga

SEQ ID NO: 5140172 - DNA, 25 bp, Homo sapien
taatctggggtctataaaaggtgta

SEQ ID NO: 5140173 - DNA, 25 bp, Homo sapien
gatggagaaatctgtagtaatctgg

SEQ ID NO: 5140174 - DNA, 25 bp, Homo sapien
tgtcactgttgttccgctagatgga

SEQ ID NO: 5140175 - DNA, 25 bp, Homo sapien
cactctgtggcctagtgttggtagg

SEQ ID NO: 5140176 - DNA, 25 bp, Homo sapien
tatttacgaatctccggggtgtcac

SEQ ID NO: 5140177 - DNA, 25 bp, Homo sapien
gagcctttccgggtaggatcttgcc

SEQ ID NO: 5140178 - DNA, 25 bp, Homo sapien
ggattcacattgaccactgagcctt

SEQ ID NO: 5140179 - DNA, 25 bp, Homo sapien
catcaccatgtagcaatgatgctga

SEQ ID NO: 5140180 - DNA, 25 bp, Homo sapien
tcagttcctcgagaatgttatatgc

SEQ ID NO: 5140181 - DNA, 25 bp, Homo sapien
tgtagcttccttaattcacccagaa

SEQ ID NO: 5140182 - DNA, 25 bp, Homo sapien
cccaggttgtatagaaaggataaca

SEQ ID NO: 5140183 - DNA, 25 bp, Homo sapien
gatattgtcaccaagacattcaagc

SEQ ID NO: 5140184 - DNA, 25 bp, Homo sapien
gccctcaagtacgtccatttgttga

SEQ ID NO: 5140185 - DNA, 25 bp, Homo sapien
actctctgtacccactagcaaattc

SEQ ID NO: 5140186 - DNA, 25 bp, Homo sapien
cgtcttcggttgataagaggataga

SEQ ID NO: 5140187 - DNA, 25 bp, Homo sapien
cacctggtctcagctgagtattgat

SEQ ID NO: 5140188 - DNA, 25 bp, Homo sapien
cactggatcactaaatgcagatttg

SEQ ID NO: 5140189 - DNA, 25 bp, Homo sapien
gaactgtcttgtttcactggatcac

SEQ ID NO: 5140190 - DNA, 25 bp, Homo sapien
agtattgatccccatgaactgtctt

SEQ ID NO: 5140191 - DNA, 25 bp, Homo sapien
ttttacatgcatatccagaagtagg

SEQ ID NO: 5140192 - DNA, 25 bp, Homo sapien
atcacttaaggccagcacttaaacc

SEQ ID NO: 5140193 - DNA, 25 bp, Homo sapien
cttaaggccagcacttaaacctagt

SEQ ID NO: 5140194 - DNA, 25 bp, Homo sapien
agaagtaggtctcatcattaataac

SEQ ID NO: 5140195 - DNA, 25 bp, Homo sapien
aatcccctacggttgtccatccctg

SEQ ID NO: 5140196 - DNA, 25 bp, Homo sapien
tctcaacttctggatcattgtgaag

SEQ ID NO: 5140197 - DNA, 25 bp, Homo sapien
aatagtagacacgtaacttatcctt

SEQ ID NO: 5140198 - DNA, 25 bp, Homo sapien
tttcttaaccaggacaaatagtaga

SEQ ID NO: 5140199 - DNA, 25 bp, Homo sapien
aaaatatgacgcttctagaacttac

SEQ ID NO: 5140200 - DNA, 25 bp, Homo sapien
caaactctaatcaaactctggaaaa

SEQ ID NO: 5140201 - DNA, 25 bp, Homo sapien
cacgcatagacttccacagaactct

SEQ ID NO: 5140202 - DNA, 25 bp, Homo sapien
aaaggccataaatttgtgatatggc

SEQ ID NO: 5140203 - DNA, 25 bp, Homo sapien
gatatggctttggtgcccacgcata

SEQ ID NO: 5140204 - DNA, 25 bp, Homo sapien
cttcaaagcaatcaccagaaatttg

SEQ ID NO: 5140205 - DNA, 25 bp, Homo sapien
tgaaaaggctgtatgtgctacaaca

SEQ ID NO: 5140206 - DNA, 25 bp, Homo sapien
tatcatactagtagcataaggtctc

SEQ ID NO: 5140207 - DNA, 25 bp, Homo sapien
tattcaaatgcacagtagagcgaga

SEQ ID NO: 5140208 - DNA, 25 bp, Homo sapien
gagccacactggcaacaaccgtaag

SEQ ID NO: 5140209 - DNA, 25 bp, Homo sapien
aatgtcatagactgatcctgaatcc

SEQ ID NO: 5140210 - DNA, 25 bp, Homo sapien
tgagatccaccagtaatggcttatg

SEQ ID NO: 5140211 - DNA, 25 bp, Homo sapien
caggatccatagatcactttcaacc

SEQ ID NO: 5140212 - DNA, 25 bp, Homo sapien
tggccttcctcaacagtgagatcca

SEQ ID NO: 5140213 - DNA, 25 bp, Homo sapien
tgtgtttacataaaccccctcatct

SEQ ID NO: 5140214 - DNA, 25 bp, Homo sapien
tactgatgtaggcatctctccccac

SEQ ID NO: 5140215 - DNA, 25 bp, Homo sapien
tccttggtgatccttccatatgtgt

SEQ ID NO: 5140216 - DNA, 25 bp, Homo sapien
tcatagcacaccagaagctccattc

SEQ ID NO: 5140217 - DNA, 25 bp, Homo sapien
aaggtctgaaggacatacaaaatca

SEQ ID NO: 5140218 - DNA, 25 bp, Homo sapien
tactctgttcaatggtagtcaaaag

SEQ ID NO: 5140219 - DNA, 25 bp, Homo sapien
gagtctcagacacggctccattttc

SEQ ID NO: 5140220 - DNA, 25 bp, Homo sapien
aataaatggagtctcagacacggct

SEQ ID NO: 5140221 - DNA, 25 bp, Homo sapien
gcatcagtggttgatctatttcatt

SEQ ID NO: 5140222 - DNA, 25 bp, Homo sapien
cttgcctatcctgtgaagtagttac

SEQ ID NO: 5140223 - DNA, 25 bp, Homo sapien
tagttacttgcatcagtggttgatc

SEQ ID NO: 5140224 - DNA, 25 bp, Homo sapien
cctgtgaagtagttacttgcatcag

SEQ ID NO: 5140225 - DNA, 25 bp, Homo sapien
cattgcgttcacacaagaattttag

SEQ ID NO: 5140226 - DNA, 25 bp, Homo sapien
accatccaagtgaccagtttccaca

SEQ ID NO: 5140227 - DNA, 25 bp, Homo sapien
cagatcggatctctatggccttctc

SEQ ID NO: 5140228 - DNA, 25 bp, Homo sapien
tgagcccttttgtgcatgaacacac

SEQ ID NO: 5140229 - DNA, 25 bp, Homo sapien
aaaagagagggaatggttaccatgg

SEQ ID NO: 5140230 - DNA, 25 bp, Homo sapien
gccagggaatctaagccaccatcat

SEQ ID NO: 5140231 - DNA, 25 bp, Homo sapien
tcatgaagcacttccagccagggaa

SEQ ID NO: 5140232 - DNA, 25 bp, Homo sapien
cactgtcaagtacgagaagcttaga

SEQ ID NO: 5140233 - DNA, 25 bp, Homo sapien
tgctgccaccagaccgaacagaggc

SEQ ID NO: 5140234 - DNA, 25 bp, Homo sapien
tgccaccagaccgaacagaggcaaa

SEQ ID NO: 5140235 - DNA, 25 bp, Homo sapien
gccaccagaccgaacagaggcaaag

SEQ ID NO: 5140236 - DNA, 25 bp, Homo sapien
gtcctgcctaaggtcatgaaataaa

SEQ ID NO: 5140237 - DNA, 25 bp, Homo sapien
aagtcctgcctaaggtcatgaaata

SEQ ID NO: 5140238 - DNA, 25 bp, Homo sapien
tcctgcctaaggtcatgaaataaac

SEQ ID NO: 5140239 - DNA, 25 bp, Homo sapien
agtcctgcctaaggtcatgaaataa

SEQ ID NO: 5140240 - DNA, 25 bp, Homo sapien
agctgtcctggttgccctcggtgca

SEQ ID NO: 5140241 - DNA, 25 bp, Homo sapien
gactctggaggccagtaatccctgg

SEQ ID NO: 5140242 - DNA, 25 bp, Homo sapien
gatggtagaatctgaacagcaccag

SEQ ID NO: 5140243 - DNA, 25 bp, Homo sapien
caaacacttatagcacctgatggta

SEQ ID NO: 5140244 - DNA, 25 bp, Homo sapien
cactgtcagacacccacaagacaga

SEQ ID NO: 5140245 - DNA, 25 bp, Homo sapien
cttgtgcccactgccaataaaacca

SEQ ID NO: 5140246 - DNA, 25 bp, Homo sapien
gacacccacaagacagagtcattca

SEQ ID NO: 5140247 - DNA, 25 bp, Homo sapien
catgttcatcgtcgccactgtcaga

SEQ ID NO: 5140248 - DNA, 25 bp, Homo sapien
tactgtcacacgacaaagttctggc

SEQ ID NO: 5140249 - DNA, 25 bp, Homo sapien
tgagaaaacgagaaaagccaggact

SEQ ID NO: 5140250 - DNA, 25 bp, Homo sapien
gagatcttgtgtcatgggctgcagt

SEQ ID NO: 5140251 - DNA, 25 bp, Homo sapien
tctgcacatgatttaggcaacctgg

SEQ ID NO: 5140252 - DNA, 25 bp, Homo sapien
ttctcaagacatttattacaaatgt

SEQ ID NO: 5140253 - DNA, 25 bp, Homo sapien
ttattacaaatgtcatgaatatatt

SEQ ID NO: 5140254 - DNA, 25 bp, Homo sapien
ttacaaatgtcatgaatatattcat

SEQ ID NO: 5140255 - DNA, 25 bp, Homo sapien
tctcaagacatttattacaaatgtc

SEQ ID NO: 5140256 - DNA, 25 bp, Homo sapien
tgtttgtagctcaaaggagggcctt

SEQ ID NO: 5140257 - DNA, 25 bp, Homo sapien
gagacggtaatatccttacgggagc

SEQ ID NO: 5140258 - DNA, 25 bp, Homo sapien
gaggttaaagcagccataatgcagt

SEQ ID NO: 5140259 - DNA, 25 bp, Homo sapien
tttccactcagaactcgacaagagg

SEQ ID NO: 5140260 - DNA, 25 bp, Homo sapien
tcctgtggcgatggaatccagccta

SEQ ID NO: 5140261 - DNA, 25 bp, Homo sapien
taattctaactaaagtcctgtggcg

SEQ ID NO: 5140262 - DNA, 25 bp, Homo sapien
aactacaaaccagtaggcggctttg

SEQ ID NO: 5140263 - DNA, 25 bp, Homo sapien
catggatataaattacaagcaggaa

SEQ ID NO: 5140264 - DNA, 25 bp, Homo sapien
tgtacacgagtgtgttcactgtggc

SEQ ID NO: 5140265 - DNA, 25 bp, Homo sapien
gagcatttcttcaaagacatctgcc

SEQ ID NO: 5140266 - DNA, 25 bp, Homo sapien
tcagacattgagcatttcttcaaag

SEQ ID NO: 5140267 - DNA, 25 bp, Homo sapien
catttcttcaaagacatctgcccac

SEQ ID NO: 5140268 - DNA, 25 bp, Homo sapien
tgagcatttcttcaaagacatctgc

SEQ ID NO: 5140269 - DNA, 25 bp, Homo sapien
cacaactcggtgtgagctcagaccc

SEQ ID NO: 5140270 - DNA, 25 bp, Homo sapien
aagccagcaagttctaagcacttgg

SEQ ID NO: 5140271 - DNA, 25 bp, Homo sapien
gccaagtaaagcacagaccaggaag

SEQ ID NO: 5140272 - DNA, 25 bp, Homo sapien
tgacttacagacatggagcttcaag

SEQ ID NO: 5140273 - DNA, 25 bp, Homo sapien
ctaaacatttcgacgactcccaatc

SEQ ID NO: 5140274 - DNA, 25 bp, Homo sapien
caatctttaacggagaaacttcact

SEQ ID NO: 5140275 - DNA, 25 bp, Homo sapien
gacgactcccaatctttaacggaga

SEQ ID NO: 5140276 - DNA, 25 bp, Homo sapien
catttcgacgactcccaatctttaa

SEQ ID NO: 5140277 - DNA, 25 bp, Homo sapien
ttttctccaacgtaacatgtgcatg

SEQ ID NO: 5140278 - DNA, 25 bp, Homo sapien
tgtgctacaactaagacgaaaacct

SEQ ID NO: 5140279 - DNA, 25 bp, Homo sapien
gccatattggcacttctgtggagaa

SEQ ID NO: 5140280 - DNA, 25 bp, Homo sapien
tggtgcgcattagtgtaacaaaacc

SEQ ID NO: 5140281 - DNA, 25 bp, Homo sapien
caagcccctgtcatctgaaatagca

SEQ ID NO: 5140282 - DNA, 25 bp, Homo sapien
gcctgctctggtacgggaagctcag

SEQ ID NO: 5140283 - DNA, 25 bp, Homo sapien
tgcataaaatatggatcctcacagg

SEQ ID NO: 5140284 - DNA, 25 bp, Homo sapien
ccatactgtcttcaggaacctggtg

SEQ ID NO: 5140285 - DNA, 25 bp, Homo sapien
gttgatggggaaccccagcgctgaa

SEQ ID NO: 5140286 - DNA, 25 bp, Homo sapien
gcgctgaagacacaatgaccttaca

SEQ ID NO: 5140287 - DNA, 25 bp, Homo sapien
gaccttacattgaaggggctccaat

SEQ ID NO: 5140288 - DNA, 25 bp, Homo sapien
tagtatttatgcaccaaactgagaa

SEQ ID NO: 5140289 - DNA, 25 bp, Homo sapien
agatttgcccgacggcgatcatgcc

SEQ ID NO: 5140290 - DNA, 25 bp, Homo sapien
caactgcaacacaccaagtaggaaa

SEQ ID NO: 5140291 - DNA, 25 bp, Homo sapien
ccctggagactaaggcgaggtgcca

SEQ ID NO: 5140292 - DNA, 25 bp, Homo sapien
tatgcctaattgatgatgatgcagc

SEQ ID NO: 5140293 - DNA, 25 bp, Homo sapien
tattgtttcaaactaagccatgagg

SEQ ID NO: 5140294 - DNA, 25 bp, Homo sapien
taaatgctataacgtctgggtattg

SEQ ID NO: 5140295 - DNA, 25 bp, Homo sapien
gatacacagaggtccattctttcta

SEQ ID NO: 5140296 - DNA, 25 bp, Homo sapien
tggatttagaaatggataccgaaac

SEQ ID NO: 5140297 - DNA, 25 bp, Homo sapien
catccaaaccaagccagaggtgact

SEQ ID NO: 5140298 - DNA, 25 bp, Homo sapien
ctacagctgttgctcaaaaattagg

SEQ ID NO: 5140299 - DNA, 25 bp, Homo sapien
agttccattgcccagagttgttcct

SEQ ID NO: 5140300 - DNA, 25 bp, Homo sapien
tccattgcccagagttgttcctgtg

SEQ ID NO: 5140301 - DNA, 25 bp, Homo sapien
tgttgctcaaaaattaggacatttt

SEQ ID NO: 5140302 - DNA, 25 bp, Homo sapien
agtggtgtggatgattcttctcctc

SEQ ID NO: 5140303 - DNA, 25 bp, Homo sapien
ctggaattgctcccagccgggtggc

SEQ ID NO: 5140304 - DNA, 25 bp, Homo sapien
ccgggtggcgaagagtggtgtggat

SEQ ID NO: 5140305 - DNA, 25 bp, Homo sapien
tgcccaagcagaccctgccttctgg

SEQ ID NO: 5140306 - DNA, 25 bp, Homo sapien
atggatcaccgagcgcctaagtgga

SEQ ID NO: 5140307 - DNA, 25 bp, Homo sapien
tcaccgagcgcctaagtggaacttc

SEQ ID NO: 5140308 - DNA, 25 bp, Homo sapien
ccagatggatcaccgagcgcctaag

SEQ ID NO: 5140309 - DNA, 25 bp, Homo sapien
ttcccagatggatcaccgagcgcct

SEQ ID NO: 5140310 - DNA, 25 bp, Homo sapien
cacaggccagaccttcagtccaagc

SEQ ID NO: 5140311 - DNA, 25 bp, Homo sapien
tgtccactgaccacaggccagacct

SEQ ID NO: 5140312 - DNA, 25 bp, Homo sapien
gaccacaggccagaccttcagtcca

SEQ ID NO: 5140313 - DNA, 25 bp, Homo sapien
ggccagaccttcagtccaagccctc

SEQ ID NO: 5140314 - DNA, 25 bp, Homo sapien
gggcatcgctcttgtggctacagga

SEQ ID NO: 5140315 - DNA, 25 bp, Homo sapien
agaacttgtccagtccagtagggag

SEQ ID NO: 5140316 - DNA, 25 bp, Homo sapien
tcgtcttcttagtcaaagtcagggc

SEQ ID NO: 5140317 - DNA, 25 bp, Homo sapien
gtagggagagggatcactggtggtc

SEQ ID NO: 5140318 - DNA, 25 bp, Homo sapien
gccctggttcttgcaagggtgaaca

SEQ ID NO: 5140319 - DNA, 25 bp, Homo sapien
tcttgcaagggtgaacattgggaac

SEQ ID NO: 5140320 - DNA, 25 bp, Homo sapien
tgaacattgggaactggttgctcag

SEQ ID NO: 5140321 - DNA, 25 bp, Homo sapien
ctgtgttccttggcgccctggttct

SEQ ID NO: 5140322 - DNA, 25 bp, Homo sapien
ccagactccctgctgcccgcagctg

SEQ ID NO: 5140323 - DNA, 25 bp, Homo sapien
ctccagactccctgctgcccgcagc

SEQ ID NO: 5140324 - DNA, 25 bp, Homo sapien
ccctgctgcccgcagctggcagagc

SEQ ID NO: 5140325 - DNA, 25 bp, Homo sapien
tgctgcccgcagctggcagagcctc

SEQ ID NO: 5140326 - DNA, 25 bp, Homo sapien
gaggacagacccctaaggaagcaga

SEQ ID NO: 5140327 - DNA, 25 bp, Homo sapien
gcagaccccgggttctgatgactga

SEQ ID NO: 5140328 - DNA, 25 bp, Homo sapien
tctgatgactgagctcttgatgtct

SEQ ID NO: 5140329 - DNA, 25 bp, Homo sapien
ttcatgatcagctccccgtgcaccc

SEQ ID NO: 5140330 - DNA, 25 bp, Homo sapien
gcaagtcagaggccaggaaactggt

SEQ ID NO: 5140331 - DNA, 25 bp, Homo sapien
gctctgcatagacatccagggccag

SEQ ID NO: 5140332 - DNA, 25 bp, Homo sapien
cttcctggctctgcatagacatcca

SEQ ID NO: 5140333 - DNA, 25 bp, Homo sapien
tccccagtcaggctgagacctgcag

SEQ ID NO: 5140334 - DNA, 25 bp, Homo sapien
ggccaggccatgctgtgtgacgctg

SEQ ID NO: 5140335 - DNA, 25 bp, Homo sapien
catgctgtgtgacgctggtctcagg

SEQ ID NO: 5140336 - DNA, 25 bp, Homo sapien
caggccatgctgtgtgacgctggtc

SEQ ID NO: 5140337 - DNA, 25 bp, Homo sapien
ggccatgctgtgtgacgctggtctc

SEQ ID NO: 5140338 - DNA, 25 bp, Homo sapien
tgtcttgggccaactactgctggaa

SEQ ID NO: 5140339 - DNA, 25 bp, Homo sapien
tagatggtcgtgtttcgttctcgtg

SEQ ID NO: 5140340 - DNA, 25 bp, Homo sapien
tgctccggctctttaggcagaagaa

SEQ ID NO: 5140341 - DNA, 25 bp, Homo sapien
cgttctcgtgcttgtaaatccacag

SEQ ID NO: 5140342 - DNA, 25 bp, Homo sapien
gttttaggcgtctctattcagaaca

SEQ ID NO: 5140343 - DNA, 25 bp, Homo sapien
catgctcattcaagcctatctgctt

SEQ ID NO: 5140344 - DNA, 25 bp, Homo sapien
tttaaatagatacattccatgctca

SEQ ID NO: 5140345 - DNA, 25 bp, Homo sapien
gaacactctgttagcctgaatccat

SEQ ID NO: 5140346 - DNA, 25 bp, Homo sapien
ggacagttccctccacaaggtagag

SEQ ID NO: 5140347 - DNA, 25 bp, Homo sapien
gcatcgcccgtgagtttgtaagcct

SEQ ID NO: 5140348 - DNA, 25 bp, Homo sapien
taaggatttccaagccagtggagga

SEQ ID NO: 5140349 - DNA, 25 bp, Homo sapien
caagctcacaaaagaccgaggtctg

SEQ ID NO: 5140350 - DNA, 25 bp, Homo sapien
gccttacaggacagtggtgcttcca

SEQ ID NO: 5140351 - DNA, 25 bp, Homo sapien
gaacctttcaaggtggactcacaga

SEQ ID NO: 5140352 - DNA, 25 bp, Homo sapien
tcagtgtctaatcagggaaaccggg

SEQ ID NO: 5140353 - DNA, 25 bp, Homo sapien
ggtgcttccaacgtctgatcctcag

SEQ ID NO: 5140354 - DNA, 25 bp, Homo sapien
gttctccattgctatgtctttggct

SEQ ID NO: 5140355 - DNA, 25 bp, Homo sapien
ttctccattgctatgtctttggctc

SEQ ID NO: 5140356 - DNA, 25 bp, Homo sapien
cagatcataatggagggacacccag

SEQ ID NO: 5140357 - DNA, 25 bp, Homo sapien
gattctaatgtgctgctcgccaggg

SEQ ID NO: 5140358 - DNA, 25 bp, Homo sapien
tgatcgagctccaacgtcagcagtt

SEQ ID NO: 5140359 - DNA, 25 bp, Homo sapien
taaatggatctgcagggaacaccgt

SEQ ID NO: 5140360 - DNA, 25 bp, Homo sapien
tgtcacccgctcacactgggtggca

SEQ ID NO: 5140361 - DNA, 25 bp, Homo sapien
ggtggcagcggacacaccttttcct

SEQ ID NO: 5140362 - DNA, 25 bp, Homo sapien
agtaaagcagggatttataccctct

SEQ ID NO: 5140363 - DNA, 25 bp, Homo sapien
cttgggagctgggatttcctaaccg

SEQ ID NO: 5140364 - DNA, 25 bp, Homo sapien
gtgtctcccctatggaaagccgtaa

SEQ ID NO: 5140365 - DNA, 25 bp, Homo sapien
tgttgctgctagaggccaactctgc

SEQ ID NO: 5140366 - DNA, 25 bp, Homo sapien
taccaaatgatcagctgggcgggaa

SEQ ID NO: 5140367 - DNA, 25 bp, Homo sapien
gaagaaaggcactctcccgtgtctg

SEQ ID NO: 5140368 - DNA, 25 bp, Homo sapien
gctcctcggagctcttcaggtgcag

SEQ ID NO: 5140369 - DNA, 25 bp, Homo sapien
atgccctgctggttgctaaacattt

SEQ ID NO: 5140370 - DNA, 25 bp, Homo sapien
tcctcggagctcttcaggtgcagca

SEQ ID NO: 5140371 - DNA, 25 bp, Homo sapien
aacattttgagtatcacctggacag

SEQ ID NO: 5140372 - DNA, 25 bp, Homo sapien
gttgatttgtatgagcgtcactagt

SEQ ID NO: 5140373 - DNA, 25 bp, Homo sapien
tgtatgagcgtcactagtttttaag

SEQ ID NO: 5140374 - DNA, 25 bp, Homo sapien
cagaggtgaccacaacagtatctcc

SEQ ID NO: 5140375 - DNA, 25 bp, Homo sapien
agaggtgaccacaacagtatctccc

SEQ ID NO: 5140376 - DNA, 25 bp, Homo sapien
cagaagtttttaggcaactgtctca

SEQ ID NO: 5140377 - DNA, 25 bp, Homo sapien
agaagtttttaggcaactgtctcat

SEQ ID NO: 5140378 - DNA, 25 bp, Homo sapien
tagaaagagctgatgcacagccctg

SEQ ID NO: 5140379 - DNA, 25 bp, Homo sapien
cacagccctgagttggacaggtggt

SEQ ID NO: 5140380 - DNA, 25 bp, Homo sapien
cctaaaaggatgtaagtgcttactc

SEQ ID NO: 5140381 - DNA, 25 bp, Homo sapien
gtagagcacgcactgaggcccaggt

SEQ ID NO: 5140382 - DNA, 25 bp, Homo sapien
tgaggaaccgaccctcgcactccag

SEQ ID NO: 5140383 - DNA, 25 bp, Homo sapien
gaggaaccgaccctcgcactccaga

SEQ ID NO: 5140384 - DNA, 25 bp, Homo sapien
gcacagatatctctgggaatgactt

SEQ ID NO: 5140385 - DNA, 25 bp, Homo sapien
gcagtaaatccagggcggcattgcg

SEQ ID NO: 5140386 - DNA, 25 bp, Homo sapien
ttgcagtaaatccagggcggcattg

SEQ ID NO: 5140387 - DNA, 25 bp, Homo sapien
taaatccagggcggcattgcggcat

SEQ ID NO: 5140388 - DNA, 25 bp, Homo sapien
agcaagtcaatgccccacccggcca

SEQ ID NO: 5140389 - DNA, 25 bp, Homo sapien
cagcaagtcaatgccccacccggcc

SEQ ID NO: 5140390 - DNA, 25 bp, Homo sapien
gcaagtcaatgccccacccggccat

SEQ ID NO: 5140391 - DNA, 25 bp, Homo sapien
acagcaagtcaatgccccacccggc

SEQ ID NO: 5140392 - DNA, 25 bp, Homo sapien
gaggtgtcaccaggaaccaagaacc

SEQ ID NO: 5140393 - DNA, 25 bp, Homo sapien
ggaaacagaggtgtcaccaggaacc

SEQ ID NO: 5140394 - DNA, 25 bp, Homo sapien
aacagaggtgtcaccaggaaccaag

SEQ ID NO: 5140395 - DNA, 25 bp, Homo sapien
cagaggtgtcaccaggaaccaagaa

SEQ ID NO: 5140396 - DNA, 25 bp, Homo sapien
cacgggaagtggaggactgagaccc

SEQ ID NO: 5140397 - DNA, 25 bp, Homo sapien
tgctcctgacaacttccagaggaca

SEQ ID NO: 5140398 - DNA, 25 bp, Homo sapien
acttccagaggacacgggaagtgga

SEQ ID NO: 5140399 - DNA, 25 bp, Homo sapien
tgacaacttccagaggacacgggaa

SEQ ID NO: 5140400 - DNA, 25 bp, Homo sapien
gaaactcccattaccaacacgtaca

SEQ ID NO: 5140401 - DNA, 25 bp, Homo sapien
gaaggcagaaactcccattaccaac

SEQ ID NO: 5140402 - DNA, 25 bp, Homo sapien
ccattaccaacacgtacaagcgcaa

SEQ ID NO: 5140403 - DNA, 25 bp, Homo sapien
ttaccaacacgtacaagcgcaacat

SEQ ID NO: 5140404 - DNA, 25 bp, Homo sapien
gggaccgtcctagcagagtcatttt

SEQ ID NO: 5140405 - DNA, 25 bp, Homo sapien
gacagaggcccacaaccagtagggc

SEQ ID NO: 5140406 - DNA, 25 bp, Homo sapien
ccagcctgaactcccgcttgtaatg

SEQ ID NO: 5140407 - DNA, 25 bp, Homo sapien
tgtaatgcctcccacgaaaccggca

SEQ ID NO: 5140408 - DNA, 25 bp, Homo sapien
tgcagacgtaggtgccagagtcctc

SEQ ID NO: 5140409 - DNA, 25 bp, Homo sapien
agacgtaggtgccagagtcctcctg

SEQ ID NO: 5140410 - DNA, 25 bp, Homo sapien
tagtgcagacgtaggtgccagagtc

SEQ ID NO: 5140411 - DNA, 25 bp, Homo sapien
ctagtagtgcagacgtaggtgccag

SEQ ID NO: 5140412 - DNA, 25 bp, Homo sapien
ggatcatgactgaagaccctcacaa

SEQ ID NO: 5140413 - DNA, 25 bp, Homo sapien
tggattctgagatccggatcatgac

SEQ ID NO: 5140414 - DNA, 25 bp, Homo sapien
tgagcaaagactaaatggagacaga

SEQ ID NO: 5140415 - DNA, 25 bp, Homo sapien
caaacgggatgcaatgtggattcac

SEQ ID NO: 5140416 - DNA, 25 bp, Homo sapien
cacaaatgtgtcagatgggaaaatc

SEQ ID NO: 5140417 - DNA, 25 bp, Homo sapien
cgcacacaaatgtgtcagatgggaa

SEQ ID NO: 5140418 - DNA, 25 bp, Homo sapien
cacacaaatgtgtcagatgggaaaa

SEQ ID NO: 5140419 - DNA, 25 bp, Homo sapien
agcgcacacaaatgtgtcagatggg

SEQ ID NO: 5140420 - DNA, 25 bp, Homo sapien
tgcctcatgactatcaacgctaaag

SEQ ID NO: 5140421 - DNA, 25 bp, Homo sapien
caaagagtattaaaggtcagccagg

SEQ ID NO: 5140422 - DNA, 25 bp, Homo sapien
taaagagtattatggcaactgctgg

SEQ ID NO: 5140423 - DNA, 25 bp, Homo sapien
gcagctactgctcaaatcttggcct

SEQ ID NO: 5140424 - DNA, 25 bp, Homo sapien
aatttgcgggtatgagatgaacggc

SEQ ID NO: 5140425 - DNA, 25 bp, Homo sapien
aggtcagggcatactaataccccag

SEQ ID NO: 5140426 - DNA, 25 bp, Homo sapien
tcacgggtgaattcactcaggtcag

SEQ ID NO: 5140427 - DNA, 25 bp, Homo sapien
gatgaacggcaggaaagcatctgta

SEQ ID NO: 5140428 - DNA, 25 bp, Homo sapien
gagaatgcattctaggctgggcttg

SEQ ID NO: 5140429 - DNA, 25 bp, Homo sapien
aaacaggttcgagaggtggagtcac

SEQ ID NO: 5140430 - DNA, 25 bp, Homo sapien
cacggctgcacaacagatcagagaa

SEQ ID NO: 5140431 - DNA, 25 bp, Homo sapien
agagaatgcattctagagctcagcc

SEQ ID NO: 5140432 - DNA, 25 bp, Homo sapien
tcctagtgatgttgtattgctggcc

SEQ ID NO: 5140433 - DNA, 25 bp, Homo sapien
tgggcaaatgtcaggacacagcggt

SEQ ID NO: 5140434 - DNA, 25 bp, Homo sapien
gatgcgtagctcaatactcctagtg

SEQ ID NO: 5140435 - DNA, 25 bp, Homo sapien
gtgtacgagtaagtgagtggtcccc

SEQ ID NO: 5140436 - DNA, 25 bp, Homo sapien
gcaaggctagctctctggttagaat

SEQ ID NO: 5140437 - DNA, 25 bp, Homo sapien
gctctctggttagaatacccaataa

SEQ ID NO: 5140438 - DNA, 25 bp, Homo sapien
tccactggatgtgcaaggctagctc

SEQ ID NO: 5140439 - DNA, 25 bp, Homo sapien
tttccactggatgtgcaaggctagc

SEQ ID NO: 5140440 - DNA, 25 bp, Homo sapien
tgtccagaagcaaggagctgatatg

SEQ ID NO: 5140441 - DNA, 25 bp, Homo sapien
ccacggaaagcctcaggagacctga

SEQ ID NO: 5140442 - DNA, 25 bp, Homo sapien
gctgatatgaacgaatcctcacagg

SEQ ID NO: 5140443 - DNA, 25 bp, Homo sapien
cgtgccggtccacggaaagcctcag

SEQ ID NO: 5140444 - DNA, 25 bp, Homo sapien
cacattagacagcatggcaggacag

SEQ ID NO: 5140445 - DNA, 25 bp, Homo sapien
gagggctgtgagttgtctccacgac

SEQ ID NO: 5140446 - DNA, 25 bp, Homo sapien
tcctcacttccacgaaacagcattt

SEQ ID NO: 5140447 - DNA, 25 bp, Homo sapien
tttgaaatcctgacatgagtacaca

SEQ ID NO: 5140448 - DNA, 25 bp, Homo sapien
ccagagaagctgatatggtcttgag

SEQ ID NO: 5140449 - DNA, 25 bp, Homo sapien
gggaaatgatcacaggaatggtctc

SEQ ID NO: 5140450 - DNA, 25 bp, Homo sapien
atgatcacaggaatggtctcttctt

SEQ ID NO: 5140451 - DNA, 25 bp, Homo sapien
cagagaagctgatatggtcttgagg

SEQ ID NO: 5140452 - DNA, 25 bp, Homo sapien
tcctcctctatggcctccaattcaa

SEQ ID NO: 5140453 - DNA, 25 bp, Homo sapien
tgtggcagtggcaacccaagtgcca

SEQ ID NO: 5140454 - DNA, 25 bp, Homo sapien
ctgtggcagtggcaacccaagtgcc

SEQ ID NO: 5140455 - DNA, 25 bp, Homo sapien
cctcctcctctatggcctccaattc

SEQ ID NO: 5140456 - DNA, 25 bp, Homo sapien
gggctccagtaggtatcacccatgt

SEQ ID NO: 5140457 - DNA, 25 bp, Homo sapien
ccatgtgcccattgccccagatttc

SEQ ID NO: 5140458 - DNA, 25 bp, Homo sapien
ctgattgggaactgggcctggaact

SEQ ID NO: 5140459 - DNA, 25 bp, Homo sapien
tccaaagcaactgattgggaactgg

SEQ ID NO: 5140460 - DNA, 25 bp, Homo sapien
taaagatcttcctcagccgtaacaa

SEQ ID NO: 5140461 - DNA, 25 bp, Homo sapien
gccgtaacaacctactaatcagtgt

SEQ ID NO: 5140462 - DNA, 25 bp, Homo sapien
tgtcttttaatgcacctggccccac

SEQ ID NO: 5140463 - DNA, 25 bp, Homo sapien
caccacgggttgagaatgccagccg

SEQ ID NO: 5140464 - DNA, 25 bp, Homo sapien
caaggcacagcacgtcaactgcaga

SEQ ID NO: 5140465 - DNA, 25 bp, Homo sapien
acagcacgtcaactgcagaaccagc

SEQ ID NO: 5140466 - DNA, 25 bp, Homo sapien
cacagcacgtcaactgcagaaccag

SEQ ID NO: 5140467 - DNA, 25 bp, Homo sapien
atggcaaggcacagcacgtcaactg

SEQ ID NO: 5140468 - DNA, 25 bp, Homo sapien
tgtgccggttcccagaaacacctta

SEQ ID NO: 5140469 - DNA, 25 bp, Homo sapien
ggcctcccgggtaggcgctctctat

SEQ ID NO: 5140470 - DNA, 25 bp, Homo sapien
cttacacgggattgtcagtcttgac

SEQ ID NO: 5140471 - DNA, 25 bp, Homo sapien
gtgggtgtcattggccgtccaccac

SEQ ID NO: 5140472 - DNA, 25 bp, Homo sapien
gggtcatagtgataactgtctccaa

SEQ ID NO: 5140473 - DNA, 25 bp, Homo sapien
tccaaaaggaagagcgaaacccaca

SEQ ID NO: 5140474 - DNA, 25 bp, Homo sapien
acagagttctcaacagaagaccctg

SEQ ID NO: 5140475 - DNA, 25 bp, Homo sapien
ggaagagcgaaacccacagagttct

SEQ ID NO: 5140476 - DNA, 25 bp, Homo sapien
tccttgactgtggtgcgtagtgtct

SEQ ID NO: 5140477 - DNA, 25 bp, Homo sapien
agggtattatggacaacacatttaa

SEQ ID NO: 5140478 - DNA, 25 bp, Homo sapien
gcgtagtgtctgaaaactcagggta

SEQ ID NO: 5140479 - DNA, 25 bp, Homo sapien
caatggcacttcaatgtagttctca

SEQ ID NO: 5140480 - DNA, 25 bp, Homo sapien
gaaacgagcgtgatagggcaaaatc

SEQ ID NO: 5140481 - DNA, 25 bp, Homo sapien
tagaaacatcgtagggtaagtgggc

SEQ ID NO: 5140482 - DNA, 25 bp, Homo sapien
tctctcactgtacaagaggacaggg

SEQ ID NO: 5140483 - DNA, 25 bp, Homo sapien
gaacagagtcacatcaggagctgaa

SEQ ID NO: 5140484 - DNA, 25 bp, Homo sapien
ccagcacaatgccccaggagaacgt

SEQ ID NO: 5140485 - DNA, 25 bp, Homo sapien
agcacaatgccccaggagaacgtgg

SEQ ID NO: 5140486 - DNA, 25 bp, Homo sapien
tgtgcatccatattccccccaaaac

SEQ ID NO: 5140487 - DNA, 25 bp, Homo sapien
cgtctgtgcatccatattcccccca

SEQ ID NO: 5140488 - DNA, 25 bp, Homo sapien
gccatagcacagtcagaccatctgc

SEQ ID NO: 5140489 - DNA, 25 bp, Homo sapien
agtcttgatgatgaggccatagcac

SEQ ID NO: 5140490 - DNA, 25 bp, Homo sapien
gcacagtcagaccatctgcttttcc

SEQ ID NO: 5140491 - DNA, 25 bp, Homo sapien
tgggataggattgaaagtcttgatg

SEQ ID NO: 5140492 - DNA, 25 bp, Homo sapien
gacacagccacttccataagagaag

SEQ ID NO: 5140493 - DNA, 25 bp, Homo sapien
cagccacttccataagagaagacgt

SEQ ID NO: 5140494 - DNA, 25 bp, Homo sapien
cttccataagagaagacgtacggag

SEQ ID NO: 5140495 - DNA, 25 bp, Homo sapien
cacttccataagagaagacgtacgg

SEQ ID NO: 5140496 - DNA, 25 bp, Homo sapien
gcgagggtcaaaagttaactgctca

SEQ ID NO: 5140497 - DNA, 25 bp, Homo sapien
cacaggctgtggtttgtcaacacgt

SEQ ID NO: 5140498 - DNA, 25 bp, Homo sapien
caaagagcaaaagtggccaaagaca

SEQ ID NO: 5140499 - DNA, 25 bp, Homo sapien
cagagggcaggctgcatttggccca

SEQ ID NO: 5140500 - DNA, 25 bp, Homo sapien
aggaagagagatgcaagcgcgtggc

SEQ ID NO: 5140501 - DNA, 25 bp, Homo sapien
gagatgcaagcgcgtggccccaagc

SEQ ID NO: 5140502 - DNA, 25 bp, Homo sapien
aagagagatgcaagcgcgtggcccc

SEQ ID NO: 5140503 - DNA, 25 bp, Homo sapien
agagagatgcaagcgcgtggcccca

SEQ ID NO: 5140504 - DNA, 25 bp, Homo sapien
ctaaagcgggggactccagagagca

SEQ ID NO: 5140505 - DNA, 25 bp, Homo sapien
gaaagccgatggtggttctcctccg

SEQ ID NO: 5140506 - DNA, 25 bp, Homo sapien
cagagtctgaaagccgatggtggtt

SEQ ID NO: 5140507 - DNA, 25 bp, Homo sapien
acacttctgaaatagtggaggggag

SEQ ID NO: 5140508 - DNA, 25 bp, Homo sapien
gaggaaatgcgtaacctgtgaggtc

SEQ ID NO: 5140509 - DNA, 25 bp, Homo sapien
gattcctgggagcaacatttgtcca

SEQ ID NO: 5140510 - DNA, 25 bp, Homo sapien
tgatatctccgaactgctgctgtgg

SEQ ID NO: 5140511 - DNA, 25 bp, Homo sapien
caccctgtggctctaatcagcagag

SEQ ID NO: 5140512 - DNA, 25 bp, Homo sapien
cttgcggaacgaggatactgggcca

SEQ ID NO: 5140513 - DNA, 25 bp, Homo sapien
gatgcacggtgaaatttcccctaga

SEQ ID NO: 5140514 - DNA, 25 bp, Homo sapien
caaatgctgagataagatgcacggt

SEQ ID NO: 5140515 - DNA, 25 bp, Homo sapien
caaagagagctaacattcccaagtc

SEQ ID NO: 5140516 - DNA, 25 bp, Homo sapien
ccctagatgtgacaaaggtggtact

SEQ ID NO: 5140517 - DNA, 25 bp, Homo sapien
cctgacattgttgatgtcctccagt

SEQ ID NO: 5140518 - DNA, 25 bp, Homo sapien
ctgacattgttgatgtcctccagtc

SEQ ID NO: 5140519 - DNA, 25 bp, Homo sapien
ttgctaggttcgtaggaagctggga

SEQ ID NO: 5140520 - DNA, 25 bp, Homo sapien
tttgctaggttcgtaggaagctggg

SEQ ID NO: 5140521 - DNA, 25 bp, Homo sapien
aagcattttgctaggttcgtaggaa

SEQ ID NO: 5140522 - DNA, 25 bp, Homo sapien
ttgaagcattttgctaggttcgtag

SEQ ID NO: 5140523 - DNA, 25 bp, Homo sapien
ctttccaaaatcagggagcactggc

SEQ ID NO: 5140524 - DNA, 25 bp, Homo sapien
cactggctgccccttatcctttaaa

SEQ ID NO: 5140525 - DNA, 25 bp, Homo sapien
tctgaaggctcatgtggcatggcca

SEQ ID NO: 5140526 - DNA, 25 bp, Homo sapien
agatcacggatccttgttgcagagc

SEQ ID NO: 5140527 - DNA, 25 bp, Homo sapien
tcatgagatttaagctcccacagga

SEQ ID NO: 5140528 - DNA, 25 bp, Homo sapien
tctccttccctacactttccacaag

SEQ ID NO: 5140529 - DNA, 25 bp, Homo sapien
cactttccacaagtttacattttat

SEQ ID NO: 5140530 - DNA, 25 bp, Homo sapien
ttttatctgggtcattatattatct

SEQ ID NO: 5140531 - DNA, 25 bp, Homo sapien
gagagtagacaggaatgatagttgt

SEQ ID NO: 5140532 - DNA, 25 bp, Homo sapien
ctattttgcgagataaagatctcca

SEQ ID NO: 5140533 - DNA, 25 bp, Homo sapien
aagatctccaatctatccatgacag

SEQ ID NO: 5140534 - DNA, 25 bp, Homo sapien
gtcttccacgcagtaaaattgcaag

SEQ ID NO: 5140535 - DNA, 25 bp, Homo sapien
agccatgagaccagtaggcatttag

SEQ ID NO: 5140536 - DNA, 25 bp, Homo sapien
gagaccaaaaccaaccatcaggaca

SEQ ID NO: 5140537 - DNA, 25 bp, Homo sapien
catttagcgggtctagacaggaaac

SEQ ID NO: 5140538 - DNA, 25 bp, Homo sapien
cggagaccaaaaccaaccatcagga

SEQ ID NO: 5140539 - DNA, 25 bp, Homo sapien
ctgagcacctctggtcaccttatcc

SEQ ID NO: 5140540 - DNA, 25 bp, Homo sapien
gagcacctctggtcaccttatcctg

SEQ ID NO: 5140541 - DNA, 25 bp, Homo sapien
gcacctctggtcaccttatcctgtg

SEQ ID NO: 5140542 - DNA, 25 bp, Homo sapien
cacctctggtcaccttatcctgtgc

SEQ ID NO: 5140543 - DNA, 25 bp, Homo sapien
gctttactgcagagcgtttttgttg

SEQ ID NO: 5140544 - DNA, 25 bp, Homo sapien
tgttgcgggaatggacactcaagcc

SEQ ID NO: 5140545 - DNA, 25 bp, Homo sapien
tttttgttgcgggaatggacactca

SEQ ID NO: 5140546 - DNA, 25 bp, Homo sapien
ctgcagagcgtttttgttgcgggaa

SEQ ID NO: 5140547 - DNA, 25 bp, Homo sapien
taaggcagcaggttgcattcgccgg

SEQ ID NO: 5140548 - DNA, 25 bp, Homo sapien
aagcacaggatggagtcgagaaacc

SEQ ID NO: 5140549 - DNA, 25 bp, Homo sapien
caggatggagtcgagaaaccagcat

SEQ ID NO: 5140550 - DNA, 25 bp, Homo sapien
cccacactaaggcagcaggttgcat

SEQ ID NO: 5140551 - DNA, 25 bp, Homo sapien
ctgtggtctgaagcaaatgacttgc

SEQ ID NO: 5140552 - DNA, 25 bp, Homo sapien
aatgacttgccttggttgggtccca

SEQ ID NO: 5140553 - DNA, 25 bp, Homo sapien
aggctgaggaaaaacgctttgtcca

SEQ ID NO: 5140554 - DNA, 25 bp, Homo sapien
ctgtgaatagaggtaatcacacctc

SEQ ID NO: 5140555 - DNA, 25 bp, Homo sapien
tcattgactcaagcagcttgagaag

SEQ ID NO: 5140556 - DNA, 25 bp, Homo sapien
cattgactcaagcagcttgagaagg

SEQ ID NO: 5140557 - DNA, 25 bp, Homo sapien
attgactcaagcagcttgagaagga

SEQ ID NO: 5140558 - DNA, 25 bp, Homo sapien
cctcattgactcaagcagcttgaga

SEQ ID NO: 5140559 - DNA, 25 bp, Homo sapien
tttctatctcttcaaacaccctaga

SEQ ID NO: 5140560 - DNA, 25 bp, Homo sapien
gctttctatctcttcaaacacccta

SEQ ID NO: 5140561 - DNA, 25 bp, Homo sapien
cctggctttctatctcttcaaacac

SEQ ID NO: 5140562 - DNA, 25 bp, Homo sapien
tggctttctatctcttcaaacaccc

SEQ ID NO: 5140563 - DNA, 25 bp, Homo sapien
ttatttttgcttggaggttcggtga

SEQ ID NO: 5140564 - DNA, 25 bp, Homo sapien
cccaaccctcaagcctgagattccc

SEQ ID NO: 5140565 - DNA, 25 bp, Homo sapien
caaccctcaagcctgagattcccac

SEQ ID NO: 5140566 - DNA, 25 bp, Homo sapien
caccccaaccctcaagcctgagatt

SEQ ID NO: 5140567 - DNA, 25 bp, Homo sapien
aagccaccccaaccctcaagcctga

SEQ ID NO: 5140568 - DNA, 25 bp, Homo sapien
cacccggccaagtacaatgatttta

SEQ ID NO: 5140569 - DNA, 25 bp, Homo sapien
tagtagtatggaacccactcagaag

SEQ ID NO: 5140570 - DNA, 25 bp, Homo sapien
tgcttcctcggaagatggcccttgg

SEQ ID NO: 5140571 - DNA, 25 bp, Homo sapien
cttcttggcacattaaggcatggca

SEQ ID NO: 5140572 - DNA, 25 bp, Homo sapien
ttcccaagacaggaaggacttagca

SEQ ID NO: 5140573 - DNA, 25 bp, Homo sapien
tgagttttgcgaatagttgatcccc

SEQ ID NO: 5140574 - DNA, 25 bp, Homo sapien
gaaagggagtttctatacccacagc

SEQ ID NO: 5140575 - DNA, 25 bp, Homo sapien
tggagccttgggaatccgcctttta

SEQ ID NO: 5140576 - DNA, 25 bp, Homo sapien
tggtcctcatgaccaggaatcctga

SEQ ID NO: 5140577 - DNA, 25 bp, Homo sapien
ctctggtcctcatgaccaggaatcc

SEQ ID NO: 5140578 - DNA, 25 bp, Homo sapien
ggtcctcatgaccaggaatcctgat

SEQ ID NO: 5140579 - DNA, 25 bp, Homo sapien
atcccattggagtggccccctctgg

SEQ ID NO: 5140580 - DNA, 25 bp, Homo sapien
agagattcagagtcgctatgaggcc

SEQ ID NO: 5140581 - DNA, 25 bp, Homo sapien
tcgcaagagattcagagtcgctatg

SEQ ID NO: 5140582 - DNA, 25 bp, Homo sapien
cagagtcgctatgaggccttggtca

SEQ ID NO: 5140583 - DNA, 25 bp, Homo sapien
tcagagtcgcaagagattcagagtc

SEQ ID NO: 5140584 - DNA, 25 bp, Homo sapien
ctggacgccagcagacctgggttaa

SEQ ID NO: 5140585 - DNA, 25 bp, Homo sapien
caacttcatctatgtatctttggga

SEQ ID NO: 5140586 - DNA, 25 bp, Homo sapien
cagcagacctgggttaaagagctaa

SEQ ID NO: 5140587 - DNA, 25 bp, Homo sapien
ggttaaagagctaagcttcaacttc

SEQ ID NO: 5140588 - DNA, 25 bp, Homo sapien
ttccagttttcaccgccatttgctc

SEQ ID NO: 5140589 - DNA, 25 bp, Homo sapien
cttctttccagttttcaccgccatt

SEQ ID NO: 5140590 - DNA, 25 bp, Homo sapien
ttcaccgccatttgctcaagcagac

SEQ ID NO: 5140591 - DNA, 25 bp, Homo sapien
tgctcaagcagaccccactcaagca

SEQ ID NO: 5140592 - DNA, 25 bp, Homo sapien
tcctgccatgtgccctgagaactct

SEQ ID NO: 5140593 - DNA, 25 bp, Homo sapien
ctgccatgtgccctgagaactctgg

SEQ ID NO: 5140594 - DNA, 25 bp, Homo sapien
catgtgccctgagaactctggaagt

SEQ ID NO: 5140595 - DNA, 25 bp, Homo sapien
gccatgtgccctgagaactctggaa

SEQ ID NO: 5140596 - DNA, 25 bp, Homo sapien
ccaatccttagagcaatctccctag

SEQ ID NO: 5140597 - DNA, 25 bp, Homo sapien
tattcaggtctgctcgtgtcccaga

SEQ ID NO: 5140598 - DNA, 25 bp, Homo sapien
cgtgtcccagatgctggcccacttc

SEQ ID NO: 5140599 - DNA, 25 bp, Homo sapien
ctccctagagtcagcccaggcaatg

SEQ ID NO: 5140600 - DNA, 25 bp, Homo sapien
tgaagtcagccctagctagagttgt

SEQ ID NO: 5140601 - DNA, 25 bp, Homo sapien
tgtgccgcagcagagtgacaactca

SEQ ID NO: 5140602 - DNA, 25 bp, Homo sapien
tttcccaaatgaagcctgctgagct

SEQ ID NO: 5140603 - DNA, 25 bp, Homo sapien
ggcatttgggaatggctggcctccc

SEQ ID NO: 5140604 - DNA, 25 bp, Homo sapien
tcttccatagataatcacagtcgtt

SEQ ID NO: 5140605 - DNA, 25 bp, Homo sapien
gtcgttctcctaatatgactcagaa

SEQ ID NO: 5140606 - DNA, 25 bp, Homo sapien
gtgaaacatgcctacagagccatat

SEQ ID NO: 5140607 - DNA, 25 bp, Homo sapien
cctcattaatgtgtaagtaaaccca

SEQ ID NO: 5140608 - DNA, 25 bp, Homo sapien
gtcttctctatagctataggtgcaa

SEQ ID NO: 5140609 - DNA, 25 bp, Homo sapien
ctataggtgcaacattggcaaagct

SEQ ID NO: 5140610 - DNA, 25 bp, Homo sapien
tctctatagctataggtgcaacatt

SEQ ID NO: 5140611 - DNA, 25 bp, Homo sapien
tatagctataggtgcaacattggca

SEQ ID NO: 5140612 - DNA, 25 bp, Homo sapien
gatggactgtaagctgctctgaatt

SEQ ID NO: 5140613 - DNA, 25 bp, Homo sapien
atttgattctatctcgcagatggac

SEQ ID NO: 5140614 - DNA, 25 bp, Homo sapien
gttctggtccagaacctagaggtgg

SEQ ID NO: 5140615 - DNA, 25 bp, Homo sapien
ccgtgttctggtccagaacctagag

SEQ ID NO: 5140616 - DNA, 25 bp, Homo sapien
gaaactcaagcactcggaacactgg

SEQ ID NO: 5140617 - DNA, 25 bp, Homo sapien
tacattaatatgcagggaacaggcc

SEQ ID NO: 5140618 - DNA, 25 bp, Homo sapien
gaacactgggcaatgtaaacgctct

SEQ ID NO: 5140619 - DNA, 25 bp, Homo sapien
ggatatgtccatgcctgcagaggcc

SEQ ID NO: 5140620 - DNA, 25 bp, Homo sapien
gatgcagattaacactagggcctga

SEQ ID NO: 5140621 - DNA, 25 bp, Homo sapien
cactagggcctgacaggagcaagag

SEQ ID NO: 5140622 - DNA, 25 bp, Homo sapien
cagattaacactagggcctgacagg

SEQ ID NO: 5140623 - DNA, 25 bp, Homo sapien
ctgcaggatgcagattaacactagg

SEQ ID NO: 5140624 - DNA, 25 bp, Homo sapien
atgatgacagcctaagagggaaacc

SEQ ID NO: 5140625 - DNA, 25 bp, Homo sapien
catgatgacagcctaagagggaaac

SEQ ID NO: 5140626 - DNA, 25 bp, Homo sapien
tccatgatgacagcctaagagggaa

SEQ ID NO: 5140627 - DNA, 25 bp, Homo sapien
ctccatgatgacagcctaagaggga

SEQ ID NO: 5140628 - DNA, 25 bp, Homo sapien
agacccctgggtcaatggcatacag

SEQ ID NO: 5140629 - DNA, 25 bp, Homo sapien
tgacaagaattcctaggcaccgagg

SEQ ID NO: 5140630 - DNA, 25 bp, Homo sapien
cgtggccattgaccaagcaggatga

SEQ ID NO: 5140631 - DNA, 25 bp, Homo sapien
cagcaaagtccatggtggtcagcac

SEQ ID NO: 5140632 - DNA, 25 bp, Homo sapien
tagaaactgagtcaccgggctggtg

SEQ ID NO: 5140633 - DNA, 25 bp, Homo sapien
taaaccctagagtaagccaggctgg

SEQ ID NO: 5140634 - DNA, 25 bp, Homo sapien
gacttggacagtggagaccttctga

SEQ ID NO: 5140635 - DNA, 25 bp, Homo sapien
tacatctataactgccaaagggccc

SEQ ID NO: 5140636 - DNA, 25 bp, Homo sapien
tctctcttttgacaaagccgggggc

SEQ ID NO: 5140637 - DNA, 25 bp, Homo sapien
tggaacttcaaaggattgagaccca

SEQ ID NO: 5140638 - DNA, 25 bp, Homo sapien
tcttttgacaaagccgggggcctga

SEQ ID NO: 5140639 - DNA, 25 bp, Homo sapien
tcaaaggattgagacccagggaaaa

SEQ ID NO: 5140640 - DNA, 25 bp, Homo sapien
tcttgttgccaaataggtatcccag

SEQ ID NO: 5140641 - DNA, 25 bp, Homo sapien
ggtttcctagcatgtgtcaccatct

SEQ ID NO: 5140642 - DNA, 25 bp, Homo sapien
tgtcttacctgaagtccctactggg

SEQ ID NO: 5140643 - DNA, 25 bp, Homo sapien
cctggatccttctgaagctaagtgg

SEQ ID NO: 5140644 - DNA, 25 bp, Homo sapien
aacattcataggcaactcgatcaat

SEQ ID NO: 5140645 - DNA, 25 bp, Homo sapien
tcccctgtcccaaaacattcatagg

SEQ ID NO: 5140646 - DNA, 25 bp, Homo sapien
taggggtgaggagtgtcttcatccc

SEQ ID NO: 5140647 - DNA, 25 bp, Homo sapien
tcgatcaatgctcagaatgtcagaa

SEQ ID NO: 5140648 - DNA, 25 bp, Homo sapien
catttagaatataagcttgtttgtc

SEQ ID NO: 5140649 - DNA, 25 bp, Homo sapien
tttagaatataagcttgtttgtcct

SEQ ID NO: 5140650 - DNA, 25 bp, Homo sapien
atttagaatataagcttgtttgtcc

SEQ ID NO: 5140651 - DNA, 25 bp, Homo sapien
ctactctgggatagttagacctgct

SEQ ID NO: 5140652 - DNA, 25 bp, Homo sapien
gaggtaagtctccactagtaaagat

SEQ ID NO: 5140653 - DNA, 25 bp, Homo sapien
acagagcccatgagaggtaagtctc

SEQ ID NO: 5140654 - DNA, 25 bp, Homo sapien
ccatgagaggtaagtctccactagt

SEQ ID NO: 5140655 - DNA, 25 bp, Homo sapien
agtctccactagtaaagatacttgg

SEQ ID NO: 5140656 - DNA, 25 bp, Homo sapien
tatttcataagacggtcataggcaa

SEQ ID NO: 5140657 - DNA, 25 bp, Homo sapien
taagacggtcataggcaataaacca

SEQ ID NO: 5140658 - DNA, 25 bp, Homo sapien
gctgatgagaaagtgtgacatattt

SEQ ID NO: 5140659 - DNA, 25 bp, Homo sapien
gacatatttcataagacggtcatag

SEQ ID NO: 5140660 - DNA, 25 bp, Homo sapien
ccctccacttcgctagtcttcagca

SEQ ID NO: 5140661 - DNA, 25 bp, Homo sapien
tccacttcgctagtcttcagcaagt

SEQ ID NO: 5140662 - DNA, 25 bp, Homo sapien
aggggagggcgcagtggtcgagtct

SEQ ID NO: 5140663 - DNA, 25 bp, Homo sapien
acttcgctagtcttcagcaagtgac

SEQ ID NO: 5140664 - DNA, 25 bp, Homo sapien
gcgcgggcgcgcgattgtcacattc

SEQ ID NO: 5140665 - DNA, 25 bp, Homo sapien
ggccgtggagggtgatgggatccca

SEQ ID NO: 5140666 - DNA, 25 bp, Homo sapien
cctaggagccgagcgaggagtgctt

SEQ ID NO: 5140667 - DNA, 25 bp, Homo sapien
actgccgggcgcggctctggctcta

SEQ ID NO: 5140668 - DNA, 25 bp, Homo sapien
aggttgactcaaaagatgtcacagg

SEQ ID NO: 5140669 - DNA, 25 bp, Homo sapien
caatggtgagaggttgactcaaaag

SEQ ID NO: 5140670 - DNA, 25 bp, Homo sapien
gagaggttgactcaaaagatgtcac

SEQ ID NO: 5140671 - DNA, 25 bp, Homo sapien
aaaaacttgatgtcacattatgaca

SEQ ID NO: 5140672 - DNA, 25 bp, Homo sapien
tttcatcttgaagacactgctggct

SEQ ID NO: 5140673 - DNA, 25 bp, Homo sapien
gcatgacgagtgacacaggctctcc

SEQ ID NO: 5140674 - DNA, 25 bp, Homo sapien
tccctggtgcaatgcaccgaggtgc

SEQ ID NO: 5140675 - DNA, 25 bp, Homo sapien
gctccctagttgttggccttcccta

SEQ ID NO: 5140676 - DNA, 25 bp, Homo sapien
ctctggtaacattgggtagctccct

SEQ ID NO: 5140677 - DNA, 25 bp, Homo sapien
ttttaccaaggggtccagcttctca

SEQ ID NO: 5140678 - DNA, 25 bp, Homo sapien
taaataagatagaaggctttgaagc

SEQ ID NO: 5140679 - DNA, 25 bp, Homo sapien
cccgcagtctggtctatgagctctt

SEQ ID NO: 5140680 - DNA, 25 bp, Homo sapien
gagctctttctgtgactgcgtgaag

SEQ ID NO: 5140681 - DNA, 25 bp, Homo sapien
ctgtgactgcgtgaagtgtgtttta

SEQ ID NO: 5140682 - DNA, 25 bp, Homo sapien
cttgtgtggggattggttccccact

SEQ ID NO: 5140683 - DNA, 25 bp, Homo sapien
ctgcttgtgtggggattggttcccc

SEQ ID NO: 5140684 - DNA, 25 bp, Homo sapien
tgtggggattggttccccacttatg

SEQ ID NO: 5140685 - DNA, 25 bp, Homo sapien
tgtgtggggattggttccccactta

SEQ ID NO: 5140686 - DNA, 25 bp, Homo sapien
ccacaagtcacactgatgaactggt

SEQ ID NO: 5140687 - DNA, 25 bp, Homo sapien
cacactgatgaactggtttttctac

SEQ ID NO: 5140688 - DNA, 25 bp, Homo sapien
gatgaactggtttttctacatcatg

SEQ ID NO: 5140689 - DNA, 25 bp, Homo sapien
aactggtttttctacatcatgaatg

SEQ ID NO: 5140690 - DNA, 25 bp, Homo sapien
tcagtagagctatgaaacaaataag

SEQ ID NO: 5140691 - DNA, 25 bp, Homo sapien
gaaacaaataagtctgagtaacact

SEQ ID NO: 5140692 - DNA, 25 bp, Homo sapien
gagctatgaaacaaataagtctgag

SEQ ID NO: 5140693 - DNA, 25 bp, Homo sapien
gaagaaatcagtagagctatgaaac

SEQ ID NO: 5140694 - DNA, 25 bp, Homo sapien
cttctacaagaatataaaccctatg

SEQ ID NO: 5140695 - DNA, 25 bp, Homo sapien
tctctcttctacaagaatataaacc

SEQ ID NO: 5140696 - DNA, 25 bp, Homo sapien
tatctctctcttctacaagaatata

SEQ ID NO: 5140697 - DNA, 25 bp, Homo sapien
gttatctctctcttctacaagaata

SEQ ID NO: 5140698 - DNA, 25 bp, Homo sapien
tgtggtgcctaacataaacacatac

SEQ ID NO: 5140699 - DNA, 25 bp, Homo sapien
tatttgccaggctaacactcatgaa

SEQ ID NO: 5140700 - DNA, 25 bp, Homo sapien
taaagaaaggcccaactatgtggtg

SEQ ID NO: 5140701 - DNA, 25 bp, Homo sapien
taaacactctcattgaaaggcggaa

SEQ ID NO: 5140702 - DNA, 25 bp, Homo sapien
ggacagggacgaacatcaatttcat

SEQ ID NO: 5140703 - DNA, 25 bp, Homo sapien
gaggacagggacgaacatcaatttc

SEQ ID NO: 5140704 - DNA, 25 bp, Homo sapien
ttgtgttcatttgggttaagaggac

SEQ ID NO: 5140705 - DNA, 25 bp, Homo sapien
tcatttgggttaagaggacagggac

SEQ ID NO: 5140706 - DNA, 25 bp, Homo sapien
gaatcctccaccttagcaggaacaa

SEQ ID NO: 5140707 - DNA, 25 bp, Homo sapien
gatgaatcctggaggcttgttctgt

SEQ ID NO: 5140708 - DNA, 25 bp, Homo sapien
cttgttctgtagatacaggtgtctt

SEQ ID NO: 5140709 - DNA, 25 bp, Homo sapien
cacgcaatagtaatgtcctgaatcc

SEQ ID NO: 5140710 - DNA, 25 bp, Homo sapien
gcttaaatatggcttgtgcattata

SEQ ID NO: 5140711 - DNA, 25 bp, Homo sapien
taccactgtaatttaggtaactcat

SEQ ID NO: 5140712 - DNA, 25 bp, Homo sapien
tcctccgtctcctgcaacgggtagt

SEQ ID NO: 5140713 - DNA, 25 bp, Homo sapien
taacataagttaggctcattctcca

SEQ ID NO: 5140714 - DNA, 25 bp, Homo sapien
ttttctggaaaagtgaaatgtcata

SEQ ID NO: 5140715 - DNA, 25 bp, Homo sapien
tattttctggaaaagtgaaatgtca

SEQ ID NO: 5140716 - DNA, 25 bp, Homo sapien
ttattttctggaaaagtgaaatgtc

SEQ ID NO: 5140717 - DNA, 25 bp, Homo sapien
attttctggaaaagtgaaatgtcat

SEQ ID NO: 5140718 - DNA, 25 bp, Homo sapien
ggtaataggatattgcttgcccaag

SEQ ID NO: 5140719 - DNA, 25 bp, Homo sapien
cccaagtatgtgtaggatgcatgac

SEQ ID NO: 5140720 - DNA, 25 bp, Homo sapien
tagttccctctatgcttttcagcca

SEQ ID NO: 5140721 - DNA, 25 bp, Homo sapien
tttcagccacattcatcacgatgag

SEQ ID NO: 5140722 - DNA, 25 bp, Homo sapien
aataaccttgggagattgcatcatc

SEQ ID NO: 5140723 - DNA, 25 bp, Homo sapien
tggttaacgcagaattgaaagacac

SEQ ID NO: 5140724 - DNA, 25 bp, Homo sapien
tctgagtttgcttgggatagtccca

SEQ ID NO: 5140725 - DNA, 25 bp, Homo sapien
tttgcaccaggtacacaagtttcgt

SEQ ID NO: 5140726 - DNA, 25 bp, Homo sapien
tgggctcacaatcacaggccttgtg

SEQ ID NO: 5140727 - DNA, 25 bp, Homo sapien
tcattagctgggctcacaatcacag

SEQ ID NO: 5140728 - DNA, 25 bp, Homo sapien
tagctgggctcacaatcacaggcct

SEQ ID NO: 5140729 - DNA, 25 bp, Homo sapien
ggctcacaatcacaggccttgtggg

SEQ ID NO: 5140730 - DNA, 25 bp, Homo sapien
tgtaatagtcttcccctagcactgg

SEQ ID NO: 5140731 - DNA, 25 bp, Homo sapien
taagcaatgtcactcaactggccgg

SEQ ID NO: 5140732 - DNA, 25 bp, Homo sapien
aactggccggtgacattacagatca

SEQ ID NO: 5140733 - DNA, 25 bp, Homo sapien
aattactgacccattccacttccag

SEQ ID NO: 5140734 - DNA, 25 bp, Homo sapien
caaaggttaggagcaactaacactt

SEQ ID NO: 5140735 - DNA, 25 bp, Homo sapien
tgtgaataactcttagcatacatac

SEQ ID NO: 5140736 - DNA, 25 bp, Homo sapien
aatatcacgtgggatttaacaccaa

SEQ ID NO: 5140737 - DNA, 25 bp, Homo sapien
taaactgaaccgacaaggttatata

SEQ ID NO: 5140738 - DNA, 25 bp, Homo sapien
tatgctgcatctataccatgtgtat

SEQ ID NO: 5140739 - DNA, 25 bp, Homo sapien
gatatattaactggatatatgctgc

SEQ ID NO: 5140740 - DNA, 25 bp, Homo sapien
tcaatttccgatatattaagcactg

SEQ ID NO: 5140741 - DNA, 25 bp, Homo sapien
gcaaaacaggtaaatggatgtttat

SEQ ID NO: 5140742 - DNA, 25 bp, Homo sapien
aacacacaattatgactgtcaacgt

SEQ ID NO: 5140743 - DNA, 25 bp, Homo sapien
catataccaatcatgtgcttctgga

SEQ ID NO: 5140744 - DNA, 25 bp, Homo sapien
tcaacgtgacacatataccaatcat

SEQ ID NO: 5140745 - DNA, 25 bp, Homo sapien
aatcatgtgcttctggaaattagtg

SEQ ID NO: 5140746 - DNA, 25 bp, Homo sapien
taccaatatgaatgttgaggcagga

SEQ ID NO: 5140747 - DNA, 25 bp, Homo sapien
tatacaatggcatgactgaagcagc

SEQ ID NO: 5140748 - DNA, 25 bp, Homo sapien
gagagagaacctccctgatgcatga

SEQ ID NO: 5140749 - DNA, 25 bp, Homo sapien
tggaggctgcctcgtatactcttag

SEQ ID NO: 5140750 - DNA, 25 bp, Homo sapien
tatatatgcgtcataggtctttcca

SEQ ID NO: 5140751 - DNA, 25 bp, Homo sapien
gatacagtatatatgcgtcataggt

SEQ ID NO: 5140752 - DNA, 25 bp, Homo sapien
ttccccaacgtagtcatcccttcca

SEQ ID NO: 5140753 - DNA, 25 bp, Homo sapien
cccaacgtagtcatcccttccataa

SEQ ID NO: 5140754 - DNA, 25 bp, Homo sapien
tctgaagaggttcttaaaattgtga

SEQ ID NO: 5140755 - DNA, 25 bp, Homo sapien
aattgtgaaacatatacccctatgc

SEQ ID NO: 5140756 - DNA, 25 bp, Homo sapien
cacgatcttctagaaagatggaatc

SEQ ID NO: 5140757 - DNA, 25 bp, Homo sapien
atacccctatgccacgatcttctag

SEQ ID NO: 5140758 - DNA, 25 bp, Homo sapien
tatagactaactcaaaaattggccc

SEQ ID NO: 5140759 - DNA, 25 bp, Homo sapien
caaccgtatggctcctaatgccttt

SEQ ID NO: 5140760 - DNA, 25 bp, Homo sapien
aatcatttgatctctaccactcctg

SEQ ID NO: 5140761 - DNA, 25 bp, Homo sapien
acacaaggcttttcacaaccgtatg

SEQ ID NO: 5140762 - DNA, 25 bp, Homo sapien
tttgctcttcagatgaaccacccag

SEQ ID NO: 5140763 - DNA, 25 bp, Homo sapien
gctggactggcatgtggtacctgac

SEQ ID NO: 5140764 - DNA, 25 bp, Homo sapien
tagatgaaggtgaccgtcgctggac

SEQ ID NO: 5140765 - DNA, 25 bp, Homo sapien
tgaccagcggatagccccatgtttc

SEQ ID NO: 5140766 - DNA, 25 bp, Homo sapien
gagaaaatgcgagaaggcctcctag

SEQ ID NO: 5140767 - DNA, 25 bp, Homo sapien
aattcacacagcaggacagcgaggg

SEQ ID NO: 5140768 - DNA, 25 bp, Homo sapien
taactaagccatctgtagacggtgg

SEQ ID NO: 5140769 - DNA, 25 bp, Homo sapien
tgtgtcaaatgaaagctaggccctg

SEQ ID NO: 5140770 - DNA, 25 bp, Homo sapien
gaaaataagtacagtctattgatcc

SEQ ID NO: 5140771 - DNA, 25 bp, Homo sapien
catgctgtacatgaatttggtgctt

SEQ ID NO: 5140772 - DNA, 25 bp, Homo sapien
tattgatccgtgatgcatgctgtac

SEQ ID NO: 5140773 - DNA, 25 bp, Homo sapien
aaaaactccttcatcaactagtaca

SEQ ID NO: 5140774 - DNA, 25 bp, Homo sapien
caccaggagtgtctgcttaagtcta

SEQ ID NO: 5140775 - DNA, 25 bp, Homo sapien
aaatcctatttgagcagttactgca

SEQ ID NO: 5140776 - DNA, 25 bp, Homo sapien
ttccccagtggagcgtaggaaggaa

SEQ ID NO: 5140777 - DNA, 25 bp, Homo sapien
tgtgacatcacactaggaagtggct

SEQ ID NO: 5140778 - DNA, 25 bp, Homo sapien
tgcaggattgaagcgcgcaggacct

SEQ ID NO: 5140779 - DNA, 25 bp, Homo sapien
acttccatgcctaggtatttccccg

SEQ ID NO: 5140780 - DNA, 25 bp, Homo sapien
tatgacagggacacgagccctgtca

SEQ ID NO: 5140781 - DNA, 25 bp, Homo sapien
cctcgtggagagtggaaaatatgac

SEQ ID NO: 5140782 - DNA, 25 bp, Homo sapien
gaaaatagccgcgagctccactcct

SEQ ID NO: 5140783 - DNA, 25 bp, Homo sapien
tccactcctcgacccagagacggag

SEQ ID NO: 5140784 - DNA, 25 bp, Homo sapien
ccagagacggagtcggctcccccat

SEQ ID NO: 5140785 - DNA, 25 bp, Homo sapien
gagctgaaaatagccgcgagctcca

SEQ ID NO: 5140786 - DNA, 25 bp, Homo sapien
acagacagtggaagggcgatggaca

SEQ ID NO: 5140787 - DNA, 25 bp, Homo sapien
aagggcgatggacaacccgcagagc

SEQ ID NO: 5140788 - DNA, 25 bp, Homo sapien
acagtggaagggcgatggacaaccc

SEQ ID NO: 5140789 - DNA, 25 bp, Homo sapien
gacaacccgcagagcagcaaggacc

SEQ ID NO: 5140790 - DNA, 25 bp, Homo sapien
ctgggaacggaggacacacggaacg

SEQ ID NO: 5140791 - DNA, 25 bp, Homo sapien
tctgtttcctcttccgcggaactcc

SEQ ID NO: 5140792 - DNA, 25 bp, Homo sapien
gctgagcatccgagcacgtggagct

SEQ ID NO: 5140793 - DNA, 25 bp, Homo sapien
gcggaactccgcctggcggtctggg

SEQ ID NO: 5140794 - DNA, 25 bp, Homo sapien
aaggagccgcgctcgggctgacgcg

SEQ ID NO: 5140795 - DNA, 25 bp, Homo sapien
tcttcacttggaatttgcctaactc

SEQ ID NO: 5140796 - DNA, 25 bp, Homo sapien
agtcttcacttggaatttgcctaac

SEQ ID NO: 5140797 - DNA, 25 bp, Homo sapien
aagtcttcacttggaatttgcctaa

SEQ ID NO: 5140798 - DNA, 25 bp, Homo sapien
cttcacttggaatttgcctaactcc

SEQ ID NO: 5140799 - DNA, 25 bp, Homo sapien
gttacactgacttccccagatgtta

SEQ ID NO: 5140800 - DNA, 25 bp, Homo sapien
ctagactgtatgattttggacactg

SEQ ID NO: 5140801 - DNA, 25 bp, Homo sapien
gactgtatgattttggacactggga

SEQ ID NO: 5140802 - DNA, 25 bp, Homo sapien
gggagggaatgtacaattaaaagca

SEQ ID NO: 5140803 - DNA, 25 bp, Homo sapien
aacaaaatccaagtctcgtcctggt

SEQ ID NO: 5140804 - DNA, 25 bp, Homo sapien
caaaatccaagtctcgtcctggtga

SEQ ID NO: 5140805 - DNA, 25 bp, Homo sapien
acaaaatccaagtctcgtcctggtg

SEQ ID NO: 5140806 - DNA, 25 bp, Homo sapien
aaaatccaagtctcgtcctggtgaa

SEQ ID NO: 5140807 - DNA, 25 bp, Homo sapien
gcaatgcatgatcccagattggtaa

SEQ ID NO: 5140808 - DNA, 25 bp, Homo sapien
gattaagggctaaggcagtattcag

SEQ ID NO: 5140809 - DNA, 25 bp, Homo sapien
aacgaggaatctagataaagggtag

SEQ ID NO: 5140810 - DNA, 25 bp, Homo sapien
gaagttcttgatactattcctgcaa

SEQ ID NO: 5140811 - DNA, 25 bp, Homo sapien
gaagtgcagatgacatgtgagacta

SEQ ID NO: 5140812 - DNA, 25 bp, Homo sapien
ggaagtgtcacaccaatgtttttca

SEQ ID NO: 5140813 - DNA, 25 bp, Homo sapien
catctgataaatttggtaaaccacc

SEQ ID NO: 5140814 - DNA, 25 bp, Homo sapien
caaaacacaactcttcgggaagtgc

SEQ ID NO: 5140815 - DNA, 25 bp, Homo sapien
caaagccagctggagacatggaatt

SEQ ID NO: 5140816 - DNA, 25 bp, Homo sapien
catccagagccttagcagtaggtga

SEQ ID NO: 5140817 - DNA, 25 bp, Homo sapien
ccagctggagacatggaattccatc

SEQ ID NO: 5140818 - DNA, 25 bp, Homo sapien
tgactcagcaaaatgtaaggtggta

SEQ ID NO: 5140819 - DNA, 25 bp, Homo sapien
gtaatgccacatcaggaagagccac

SEQ ID NO: 5140820 - DNA, 25 bp, Homo sapien
tgccgcttatgcaactccagtgtgt

SEQ ID NO: 5140821 - DNA, 25 bp, Homo sapien
aattcagagaccaggagttgccgct

SEQ ID NO: 5140822 - DNA, 25 bp, Homo sapien
aaataaagtggaatactcagctccc

SEQ ID NO: 5140823 - DNA, 25 bp, Homo sapien
tcagtatggcttgacacgcgtagtt

SEQ ID NO: 5140824 - DNA, 25 bp, Homo sapien
caaaagcctggtttccaaaacagtg

SEQ ID NO: 5140825 - DNA, 25 bp, Homo sapien
acagtgaaccgctcccctttaatct

SEQ ID NO: 5140826 - DNA, 25 bp, Homo sapien
taaaacctcgtactgcttccctgag

SEQ ID NO: 5140827 - DNA, 25 bp, Homo sapien
aggatatcccaggaccatatccaga

SEQ ID NO: 5140828 - DNA, 25 bp, Homo sapien
aactctgagctctgcggcacttgag

SEQ ID NO: 5140829 - DNA, 25 bp, Homo sapien
aaggcccgcaggaatattcacgaca

SEQ ID NO: 5140830 - DNA, 25 bp, Homo sapien
aggtccatgagcagcaggatatccc

SEQ ID NO: 5140831 - DNA, 25 bp, Homo sapien
ttgcattagaatcacgtatgataca

SEQ ID NO: 5140832 - DNA, 25 bp, Homo sapien
tacccacaggaaattgcattagaat

SEQ ID NO: 5140833 - DNA, 25 bp, Homo sapien
gaatcacgtatgatacattcccaag

SEQ ID NO: 5140834 - DNA, 25 bp, Homo sapien
catacccacaggaaattgcattaga

SEQ ID NO: 5140835 - DNA, 25 bp, Homo sapien
ttggataaatgattttagggacact

SEQ ID NO: 5140836 - DNA, 25 bp, Homo sapien
caagctgtacttcaattgaatgatt

SEQ ID NO: 5140837 - DNA, 25 bp, Homo sapien
gctgtacttcaattgaatgattttt

SEQ ID NO: 5140838 - DNA, 25 bp, Homo sapien
tagggacacttcctccatatccagc

SEQ ID NO: 5140839 - DNA, 25 bp, Homo sapien
tcatagtaatcatccaccaaagtgt

SEQ ID NO: 5140840 - DNA, 25 bp, Homo sapien
tattgactctccagcatcgtagatt

SEQ ID NO: 5140841 - DNA, 25 bp, Homo sapien
tacattgcagtccacaatcagagtg

SEQ ID NO: 5140842 - DNA, 25 bp, Homo sapien
tatccttggtgtctgttacattgca

SEQ ID NO: 5140843 - DNA, 25 bp, Homo sapien
aattatgttcccgaaaagagacatg

SEQ ID NO: 5140844 - DNA, 25 bp, Homo sapien
caaattatgttcccgaaaagagaca

SEQ ID NO: 5140845 - DNA, 25 bp, Homo sapien
ttatgttcccgaaaagagacatggg

SEQ ID NO: 5140846 - DNA, 25 bp, Homo sapien
tacaaattatgttcccgaaaagaga

SEQ ID NO: 5140847 - DNA, 25 bp, Homo sapien
tatgctgtggacactccagcgtggc

SEQ ID NO: 5140848 - DNA, 25 bp, Homo sapien
ttcacttccaagaaggtgatgttta

SEQ ID NO: 5140849 - DNA, 25 bp, Homo sapien
gtaatataatgtatgctgtggacac

SEQ ID NO: 5140850 - DNA, 25 bp, Homo sapien
ccagcgtggcacatgaaaggaaggc

SEQ ID NO: 5140851 - DNA, 25 bp, Homo sapien
ctttgtctctgatctggctctctgt

SEQ ID NO: 5140852 - DNA, 25 bp, Homo sapien
tttgtctctgatctggctctctgtt

SEQ ID NO: 5140853 - DNA, 25 bp, Homo sapien
gcagcccaaacccataccaccaaag

SEQ ID NO: 5140854 - DNA, 25 bp, Homo sapien
cgcagcccaaacccataccaccaaa

SEQ ID NO: 5140855 - DNA, 25 bp, Homo sapien
cagcccaaacccataccaccaaaga

SEQ ID NO: 5140856 - DNA, 25 bp, Homo sapien
tagtttccggtggtagacgcagcat

SEQ ID NO: 5140857 - DNA, 25 bp, Homo sapien
gagccaacagttgtcccctctggaa

SEQ ID NO: 5140858 - DNA, 25 bp, Homo sapien
tatacgagtaaaagtctgcagagcc

SEQ ID NO: 5140859 - DNA, 25 bp, Homo sapien
gacccaactggacgagaactgcttt

SEQ ID NO: 5140860 - DNA, 25 bp, Homo sapien
ggaaggcacttcgataccaaagaac

SEQ ID NO: 5140861 - DNA, 25 bp, Homo sapien
accaaggcgataagccctcctatca

SEQ ID NO: 5140862 - DNA, 25 bp, Homo sapien
tatcaagtaagctcgaaaatccgga

SEQ ID NO: 5140863 - DNA, 25 bp, Homo sapien
tggtctctgtagaatggaaggcact

SEQ ID NO: 5140864 - DNA, 25 bp, Homo sapien
gcttccaggaagaatacgtaaagtg

SEQ ID NO: 5140865 - DNA, 25 bp, Homo sapien
aatacgtaaagtgacgcaggcttct

SEQ ID NO: 5140866 - DNA, 25 bp, Homo sapien
gtagaaagcaactgaaccactcaac

SEQ ID NO: 5140867 - DNA, 25 bp, Homo sapien
aaaagtagaaagcaactgaaccact

SEQ ID NO: 5140868 - DNA, 25 bp, Homo sapien
tgacttctgagtgcccagttggctg

SEQ ID NO: 5140869 - DNA, 25 bp, Homo sapien
ctgaaaaggaattggacaagcttgt

SEQ ID NO: 5140870 - DNA, 25 bp, Homo sapien
tgagcggctaccatggtgtcctttg

SEQ ID NO: 5140871 - DNA, 25 bp, Homo sapien
taataaaccggaagcctgagcggct

SEQ ID NO: 5140872 - DNA, 25 bp, Homo sapien
acctcgggcaggatattcaacacca

SEQ ID NO: 5140873 - DNA, 25 bp, Homo sapien
gacataggcgtcatacagcttccca

SEQ ID NO: 5140874 - DNA, 25 bp, Homo sapien
tccagggaattcatctctgccgaat

SEQ ID NO: 5140875 - DNA, 25 bp, Homo sapien
attgtctctccaacacctcgggcag

SEQ ID NO: 5140876 - DNA, 25 bp, Homo sapien
ctgtttctgtgaatggcttaaccat

SEQ ID NO: 5140877 - DNA, 25 bp, Homo sapien
ctgctgcaagcaggaatctcaggca

SEQ ID NO: 5140878 - DNA, 25 bp, Homo sapien
ggcttaaccatatcctcactcaaag

SEQ ID NO: 5140879 - DNA, 25 bp, Homo sapien
tcactcaaagtgagacgcgtgctgc

SEQ ID NO: 5140880 - DNA, 25 bp, Homo sapien
tgacaggttcttcaacaggccaaag

SEQ ID NO: 5140881 - DNA, 25 bp, Homo sapien
ttctgggcggcatgtggtatctcac

SEQ ID NO: 5140882 - DNA, 25 bp, Homo sapien
cagggcactgtagaccgcgatttgt

SEQ ID NO: 5140883 - DNA, 25 bp, Homo sapien
ttttcatcgatgacattggccacgg

SEQ ID NO: 5140884 - DNA, 25 bp, Homo sapien
tgcagcagctggaccggaggaaacg

SEQ ID NO: 5140885 - DNA, 25 bp, Homo sapien
ctgcggtgcggtagcaaggtgtgtg

SEQ ID NO: 5140886 - DNA, 25 bp, Homo sapien
gcagcagctggaccggaggaaacgg

SEQ ID NO: 5140887 - DNA, 25 bp, Homo sapien
gtgcggtagcaaggtgtgtgctgca

SEQ ID NO: 5140888 - DNA, 25 bp, Homo sapien
agacggccccgatgaaacgtgtcct

SEQ ID NO: 5140889 - DNA, 25 bp, Homo sapien
tccatcagtgcgtgacaaacctcgt

SEQ ID NO: 5140890 - DNA, 25 bp, Homo sapien
tgagccaccacgcaatgatagaccc

SEQ ID NO: 5140891 - DNA, 25 bp, Homo sapien
gaagcagctctgatcgaagcaaaca

SEQ ID NO: 5140892 - DNA, 25 bp, Homo sapien
agacaggagtgggttccttagcacc

SEQ ID NO: 5140893 - DNA, 25 bp, Homo sapien
gaccaatgtcaagtcgaggcctcca

SEQ ID NO: 5140894 - DNA, 25 bp, Homo sapien
gaggcctccataggatgctaaacaa

SEQ ID NO: 5140895 - DNA, 25 bp, Homo sapien
ttatgtcctacctcagagcaatggg

SEQ ID NO: 5140896 - DNA, 25 bp, Homo sapien
ctggagttttataagtcaaaaagct

SEQ ID NO: 5140897 - DNA, 25 bp, Homo sapien
tcccggagaccagcactgttggtaa

SEQ ID NO: 5140898 - DNA, 25 bp, Homo sapien
aggacatcagtcgaggctgtcagca

SEQ ID NO: 5140899 - DNA, 25 bp, Homo sapien
gcaaaatagaaagctgacccgtcag

SEQ ID NO: 5140900 - DNA, 25 bp, Homo sapien
tggaaacctctgacttcccggagac

SEQ ID NO: 5140901 - DNA, 25 bp, Homo sapien
ccttctcaagtggagagctcctctc

SEQ ID NO: 5140902 - DNA, 25 bp, Homo sapien
tccttctcaagtggagagctcctct

SEQ ID NO: 5140903 - DNA, 25 bp, Homo sapien
tgaggtccttctcaagtggagagct

SEQ ID NO: 5140904 - DNA, 25 bp, Homo sapien
ggtccttctcaagtggagagctcct

SEQ ID NO: 5140905 - DNA, 25 bp, Homo sapien
gccagtcgtgagagtacacttcttt

SEQ ID NO: 5140906 - DNA, 25 bp, Homo sapien
tcgtgagagtacacttctttcttct

SEQ ID NO: 5140907 - DNA, 25 bp, Homo sapien
ttagccagtcgtgagagtacacttc

SEQ ID NO: 5140908 - DNA, 25 bp, Homo sapien
cagtcgtgagagtacacttctttct

SEQ ID NO: 5140909 - DNA, 25 bp, Homo sapien
gccataggtgtcagtccagcaagtc

SEQ ID NO: 5140910 - DNA, 25 bp, Homo sapien
tcaactgggtgtctagaatgctaac

SEQ ID NO: 5140911 - DNA, 25 bp, Homo sapien
tatgaccatgtggatgaccacccgc

SEQ ID NO: 5140912 - DNA, 25 bp, Homo sapien
gaaaagggcatacgctgtccaagca

SEQ ID NO: 5140913 - DNA, 25 bp, Homo sapien
agcttcgggctggacagcggttcct

SEQ ID NO: 5140914 - DNA, 25 bp, Homo sapien
cctaggtaggttgcggcagcctgaa

SEQ ID NO: 5140915 - DNA, 25 bp, Homo sapien
gcctgaacggggctctgtgagcttc

SEQ ID NO: 5140916 - DNA, 25 bp, Homo sapien
cattctggccgcctaggtaggttgc

SEQ ID NO: 5140917 - DNA, 25 bp, Homo sapien
agagccccgagaaggtaatgtgtgc

SEQ ID NO: 5140918 - DNA, 25 bp, Homo sapien
gaaggtaatgtgtgcaccccgggat

SEQ ID NO: 5140919 - DNA, 25 bp, Homo sapien
gtaatgtgtgcaccccgggatgccc

SEQ ID NO: 5140920 - DNA, 25 bp, Homo sapien
gccccgagaaggtaatgtgtgcacc

SEQ ID NO: 5140921 - DNA, 25 bp, Homo sapien
ttgggcacatgccaccagaggttct

SEQ ID NO: 5140922 - DNA, 25 bp, Homo sapien
aagttgggcacatgccaccagaggt

SEQ ID NO: 5140923 - DNA, 25 bp, Homo sapien
gggcacatgccaccagaggttctga

SEQ ID NO: 5140924 - DNA, 25 bp, Homo sapien
cacatgccaccagaggttctgattc

SEQ ID NO: 5140925 - DNA, 25 bp, Homo sapien
tgtagcctggagaccgtgtgggaca

SEQ ID NO: 5140926 - DNA, 25 bp, Homo sapien
ggtaagggctgggtcgccaggagct

SEQ ID NO: 5140927 - DNA, 25 bp, Homo sapien
ctttcctggaggtgtccacgggcgg

SEQ ID NO: 5140928 - DNA, 25 bp, Homo sapien
ctccgggtctgtcccgtgacaggaa

SEQ ID NO: 5140929 - DNA, 25 bp, Homo sapien
ccctggaacgccctgaggagataaa

SEQ ID NO: 5140930 - DNA, 25 bp, Homo sapien
tgaaaatgactcgaaagctgccccg

SEQ ID NO: 5140931 - DNA, 25 bp, Homo sapien
gagggagctttgcactcgctgaaaa

SEQ ID NO: 5140932 - DNA, 25 bp, Homo sapien
tcataagatctgcatctgccgccct

SEQ ID NO: 5140933 - DNA, 25 bp, Homo sapien
tatccgcctggtagatggcttccca

SEQ ID NO: 5140934 - DNA, 25 bp, Homo sapien
tggcttcccaatgcatttctcgagc

SEQ ID NO: 5140935 - DNA, 25 bp, Homo sapien
tcttgctgaagctaacaacttatca

SEQ ID NO: 5140936 - DNA, 25 bp, Homo sapien
tttctcgagcccatccaagtgcttt

SEQ ID NO: 5140937 - DNA, 25 bp, Homo sapien
aattccacagcttatgataacccag

SEQ ID NO: 5140938 - DNA, 25 bp, Homo sapien
gagtcccctcatgacatctgctgat

SEQ ID NO: 5140939 - DNA, 25 bp, Homo sapien
gaaacaagttcagatccgataccaa

SEQ ID NO: 5140940 - DNA, 25 bp, Homo sapien
ttctccaagatcctgtgtctcaagc

SEQ ID NO: 5140941 - DNA, 25 bp, Homo sapien
agagattagctggtcttccttgcac

SEQ ID NO: 5140942 - DNA, 25 bp, Homo sapien
tcgtaatgttgaaaattgccctaaa

SEQ ID NO: 5140943 - DNA, 25 bp, Homo sapien
tgtgcacatgtagggttgtgtccac

SEQ ID NO: 5140944 - DNA, 25 bp, Homo sapien
tgtgtccacatggagaggacatctg

SEQ ID NO: 5140945 - DNA, 25 bp, Homo sapien
ggtgctcctggaaaagcagaaaagt

SEQ ID NO: 5140946 - DNA, 25 bp, Homo sapien
agcagaaaagtggggtttgtgcaca

SEQ ID NO: 5140947 - DNA, 25 bp, Homo sapien
agaaaagtggggtttgtgcacacac

SEQ ID NO: 5140948 - DNA, 25 bp, Homo sapien
tgctcctggaaaagcagaaaagtgg

SEQ ID NO: 5140949 - DNA, 25 bp, Homo sapien
tgccatgacccctcttggaggtaac

SEQ ID NO: 5140950 - DNA, 25 bp, Homo sapien
ccaagtatggtttgctcgcctgcca

SEQ ID NO: 5140951 - DNA, 25 bp, Homo sapien
gaggtctttaatggtgcaccccaag

SEQ ID NO: 5140952 - DNA, 25 bp, Homo sapien
tcagggagagactaggcaaacttgt

SEQ ID NO: 5140953 - DNA, 25 bp, Homo sapien
tctcttgaatgatccgtctatgcca

SEQ ID NO: 5140954 - DNA, 25 bp, Homo sapien
atctgaatgcagacatgaggacctg

SEQ ID NO: 5140955 - DNA, 25 bp, Homo sapien
tctatgccagggctctgcaaaatgt

SEQ ID NO: 5140956 - DNA, 25 bp, Homo sapien
ccgtgggcagcttaaggaagtttct

SEQ ID NO: 5140957 - DNA, 25 bp, Homo sapien
cattgggttgtacttgagttctttc

SEQ ID NO: 5140958 - DNA, 25 bp, Homo sapien
tagctttactaaatacaacagccag

SEQ ID NO: 5140959 - DNA, 25 bp, Homo sapien
cctcattgggttgtacttgagttct

SEQ ID NO: 5140960 - DNA, 25 bp, Homo sapien
ctttactaaatacaacagccagcct

SEQ ID NO: 5140961 - DNA, 25 bp, Homo sapien
tgatttaattttcctcttaatctcc

SEQ ID NO: 5140962 - DNA, 25 bp, Homo sapien
atttaattttcctcttaatctccat

SEQ ID NO: 5140963 - DNA, 25 bp, Homo sapien
aatgatttaattttcctcttaatct

SEQ ID NO: 5140964 - DNA, 25 bp, Homo sapien
cttgaccacttaagaatgatttaat

SEQ ID NO: 5140965 - DNA, 25 bp, Homo sapien
gtggtctgcatttgtcgtcctttat

SEQ ID NO: 5140966 - DNA, 25 bp, Homo sapien
tcctgaggtcagtgtaacttattct

SEQ ID NO: 5140967 - DNA, 25 bp, Homo sapien
tcctttatttagttcatgtacatct

SEQ ID NO: 5140968 - DNA, 25 bp, Homo sapien
agtgtaacttattctcccagcagca

SEQ ID NO: 5140969 - DNA, 25 bp, Homo sapien
tgcaatgctgcctgcgattccccaa

SEQ ID NO: 5140970 - DNA, 25 bp, Homo sapien
caggagccagcgagtctgcaatgct

SEQ ID NO: 5140971 - DNA, 25 bp, Homo sapien
tgtggaagtccgttttatcaggata

SEQ ID NO: 5140972 - DNA, 25 bp, Homo sapien
gattccccaagtgctgaataggttt

SEQ ID NO: 5140973 - DNA, 25 bp, Homo sapien
taaaggggagacactcctcccatcc

SEQ ID NO: 5140974 - DNA, 25 bp, Homo sapien
gatttgtggccaaatctatgacttg

SEQ ID NO: 5140975 - DNA, 25 bp, Homo sapien
gtcagtgacggagctaagaatagtt

SEQ ID NO: 5140976 - DNA, 25 bp, Homo sapien
atgaacttggagtcagtgacggagc

SEQ ID NO: 5140977 - DNA, 25 bp, Homo sapien
gtaattgtcctattctcaaccccaa

SEQ ID NO: 5140978 - DNA, 25 bp, Homo sapien
tagcagcatgctcacaaaaataact

SEQ ID NO: 5140979 - DNA, 25 bp, Homo sapien
caccaaaggctttctaagagtagtt

SEQ ID NO: 5140980 - DNA, 25 bp, Homo sapien
taaagcattagccaagtaattgtcc

SEQ ID NO: 5140981 - DNA, 25 bp, Homo sapien
tggcatacgacagtgaaggtcacca

SEQ ID NO: 5140982 - DNA, 25 bp, Homo sapien
tcaagagcaagtattggtaactcgt

SEQ ID NO: 5140983 - DNA, 25 bp, Homo sapien
aggtcaccacacatgaggcagttgg

SEQ ID NO: 5140984 - DNA, 25 bp, Homo sapien
taactcgttgttgagattactccag

SEQ ID NO: 5140985 - DNA, 25 bp, Homo sapien
gaattgtgagaattgctaagatcca

SEQ ID NO: 5140986 - DNA, 25 bp, Homo sapien
aattgtgagaattgctaagatccaa

SEQ ID NO: 5140987 - DNA, 25 bp, Homo sapien
atgagaattgtgagaattgctaaga

SEQ ID NO: 5140988 - DNA, 25 bp, Homo sapien
gagaattgtgagaattgctaagatc

SEQ ID NO: 5140989 - DNA, 25 bp, Homo sapien
caactgcagctggtagaaacttcag

SEQ ID NO: 5140990 - DNA, 25 bp, Homo sapien
tgtttgtgagtaataccaatccacg

SEQ ID NO: 5140991 - DNA, 25 bp, Homo sapien
tacaggtataaataccagaatcagc

SEQ ID NO: 5140992 - DNA, 25 bp, Homo sapien
tggcctgaggcaaacacacgatttc

SEQ ID NO: 5140993 - DNA, 25 bp, Homo sapien
aagatgggagccttctgcataatac

SEQ ID NO: 5140994 - DNA, 25 bp, Homo sapien
gacctcaacctgatagtattcctag

SEQ ID NO: 5140995 - DNA, 25 bp, Homo sapien
cagttatcttggtcactaggaaagc

SEQ ID NO: 5140996 - DNA, 25 bp, Homo sapien
taaatccaaatagctcagaatgagc

SEQ ID NO: 5140997 - DNA, 25 bp, Homo sapien
taaaccactcaagaggtgctgtcca

SEQ ID NO: 5140998 - DNA, 25 bp, Homo sapien
aaataatctggaacattgcaatctg

SEQ ID NO: 5140999 - DNA, 25 bp, Homo sapien
tatggtgacattcgcatatccagtc

SEQ ID NO: 5141000 - DNA, 25 bp, Homo sapien
tctgatccagatactgttgaataca

SEQ ID NO: 5141001 - DNA, 25 bp, Homo sapien
ctggtcgccgtcacactataattgg

SEQ ID NO: 5141002 - DNA, 25 bp, Homo sapien
aaaaatgacttgtgcgccctgtacc

SEQ ID NO: 5141003 - DNA, 25 bp, Homo sapien
tgtaccttgatccttgaagagcctg

SEQ ID NO: 5141004 - DNA, 25 bp, Homo sapien
ttgaccgtgaaggacctggtcgccg

SEQ ID NO: 5141005 - DNA, 25 bp, Homo sapien
gcctctcattagactttgaatccaa

SEQ ID NO: 5141006 - DNA, 25 bp, Homo sapien
taatttgcagaaactctgacaccaa

SEQ ID NO: 5141007 - DNA, 25 bp, Homo sapien
tagtataccatcacaaagcctctca

SEQ ID NO: 5141008 - DNA, 25 bp, Homo sapien
taaaaaccactcgacaacatttatg

SEQ ID NO: 5141009 - DNA, 25 bp, Homo sapien
gggctccgattactggaaacagaga

SEQ ID NO: 5141010 - DNA, 25 bp, Homo sapien
gattactggaaacagagaaaagcct

SEQ ID NO: 5141011 - DNA, 25 bp, Homo sapien
tccgattactggaaacagagaaaag

SEQ ID NO: 5141012 - DNA, 25 bp, Homo sapien
tgtgcaggggctccgattactggaa

SEQ ID NO: 5141013 - DNA, 25 bp, Homo sapien
taaaattaacttctgcgactggcat

SEQ ID NO: 5141014 - DNA, 25 bp, Homo sapien
taaacatgttttaccggatctggct

SEQ ID NO: 5141015 - DNA, 25 bp, Homo sapien
tgctaattgcctgacccctgctaag

SEQ ID NO: 5141016 - DNA, 25 bp, Homo sapien
catctgcatgggaaactaacaaggc

SEQ ID NO: 5141017 - DNA, 25 bp, Homo sapien
caagcagagcaagttaggtttgcgt

SEQ ID NO: 5141018 - DNA, 25 bp, Homo sapien
tccaaaacaagcagagcaagttagg

SEQ ID NO: 5141019 - DNA, 25 bp, Homo sapien
cagagcaagttaggtttgcgttttt

SEQ ID NO: 5141020 - DNA, 25 bp, Homo sapien
caaaacaagcagagcaagttaggtt

SEQ ID NO: 5141021 - DNA, 25 bp, Homo sapien
gcccttcctcttgttgaattcttgg

SEQ ID NO: 5141022 - DNA, 25 bp, Homo sapien
aggacggcagccaagaactgagtgc

SEQ ID NO: 5141023 - DNA, 25 bp, Homo sapien
ttgaattcttggttcaccaaagtct

SEQ ID NO: 5141024 - DNA, 25 bp, Homo sapien
aatttttgttccattaagctgccac

SEQ ID NO: 5141025 - DNA, 25 bp, Homo sapien
aagaggatggttctcttcaatataa

SEQ ID NO: 5141026 - DNA, 25 bp, Homo sapien
caaaccatgtgcaaggggaagagga

SEQ ID NO: 5141027 - DNA, 25 bp, Homo sapien
tttgcaggtgcaaaccatgtgcaag

SEQ ID NO: 5141028 - DNA, 25 bp, Homo sapien
ggatggttctcttcaatataaaaat

SEQ ID NO: 5141029 - DNA, 25 bp, Homo sapien
cttaaaaccatgtctagacaagcca

SEQ ID NO: 5141030 - DNA, 25 bp, Homo sapien
ttaaaaccatgtctagacaagccag

SEQ ID NO: 5141031 - DNA, 25 bp, Homo sapien
ttcctacttagtcttacggtgtgcc

SEQ ID NO: 5141032 - DNA, 25 bp, Homo sapien
aattcagggccagacagtcgtactg

SEQ ID NO: 5141033 - DNA, 25 bp, Homo sapien
gtcgtactgcagcaataaatcctct

SEQ ID NO: 5141034 - DNA, 25 bp, Homo sapien
ggtgtgccttctcaagccatgcaaa

SEQ ID NO: 5141035 - DNA, 25 bp, Homo sapien
tgagtaaagctcctgaggtgtcccc

SEQ ID NO: 5141036 - DNA, 25 bp, Homo sapien
taatccccagtattcgaggtggagc

SEQ ID NO: 5141037 - DNA, 25 bp, Homo sapien
gaaaggctccctggaatacgtggta

SEQ ID NO: 5141038 - DNA, 25 bp, Homo sapien
tctagacaaaccaacgataggaggg

SEQ ID NO: 5141039 - DNA, 25 bp, Homo sapien
gattcagaaaaaactgtagggaagc

SEQ ID NO: 5141040 - DNA, 25 bp, Homo sapien
tataattaagacttatagctagaga

SEQ ID NO: 5141041 - DNA, 25 bp, Homo sapien
tgaggaaagttattgaatttaccaa

SEQ ID NO: 5141042 - DNA, 25 bp, Homo sapien
caatttgactttccaaatgatgagg

SEQ ID NO: 5141043 - DNA, 25 bp, Homo sapien
ttgcattcagagacacaccaaggga

SEQ ID NO: 5141044 - DNA, 25 bp, Homo sapien
gaaggatcagtccacctctgtggga

SEQ ID NO: 5141045 - DNA, 25 bp, Homo sapien
caaagcaggagtacacaagggcagt

SEQ ID NO: 5141046 - DNA, 25 bp, Homo sapien
tacatgattgtacagcccctgagga

SEQ ID NO: 5141047 - DNA, 25 bp, Homo sapien
tacatactgcaattatgcagtagat

SEQ ID NO: 5141048 - DNA, 25 bp, Homo sapien
atgcagtagatgctatgatgatcaa

SEQ ID NO: 5141049 - DNA, 25 bp, Homo sapien
tatgcagtagatgctatgatgatca

SEQ ID NO: 5141050 - DNA, 25 bp, Homo sapien
aaaatacactacatactgcaattat

SEQ ID NO: 5141051 - DNA, 25 bp, Homo sapien
cctagtcttgtaaggtttagctatg

SEQ ID NO: 5141052 - DNA, 25 bp, Homo sapien
tgtaaggtttagctatgtctctcca

SEQ ID NO: 5141053 - DNA, 25 bp, Homo sapien
cattcctagtcttgtaaggtttagc

SEQ ID NO: 5141054 - DNA, 25 bp, Homo sapien
tcttgtaaggtttagctatgtctct

SEQ ID NO: 5141055 - DNA, 25 bp, Homo sapien
tcccataaatgcataaggtatagcc

SEQ ID NO: 5141056 - DNA, 25 bp, Homo sapien
ttctccaggtagcatatctctccca

SEQ ID NO: 5141057 - DNA, 25 bp, Homo sapien
tgaacaaagtgctctacacgactgg

SEQ ID NO: 5141058 - DNA, 25 bp, Homo sapien
agttccgtgggtagacaacataagc

SEQ ID NO: 5141059 - DNA, 25 bp, Homo sapien
tttcataagatgctggagggagtcc

SEQ ID NO: 5141060 - DNA, 25 bp, Homo sapien
ggatgaaaatgtgccgcctgctctt

SEQ ID NO: 5141061 - DNA, 25 bp, Homo sapien
gggcaacctcctgctcgtaggcaaa

SEQ ID NO: 5141062 - DNA, 25 bp, Homo sapien
aagtatcaccttggcgtcgttctgg

SEQ ID NO: 5141063 - DNA, 25 bp, Homo sapien
tttgcttggcacaggcatttggtac

SEQ ID NO: 5141064 - DNA, 25 bp, Homo sapien
gaattttgcttggcacaggcatttg

SEQ ID NO: 5141065 - DNA, 25 bp, Homo sapien
ttttgcttggcacaggcatttggta

SEQ ID NO: 5141066 - DNA, 25 bp, Homo sapien
aattttgcttggcacaggcatttgg

SEQ ID NO: 5141067 - DNA, 25 bp, Homo sapien
cataagccagctaggagaagtcagg

SEQ ID NO: 5141068 - DNA, 25 bp, Homo sapien
taatattcctgctcctcacacttca

SEQ ID NO: 5141069 - DNA, 25 bp, Homo sapien
ggcctgaatccctttaatattcctg

SEQ ID NO: 5141070 - DNA, 25 bp, Homo sapien
gatgcctttgcacatcacagcaggc

SEQ ID NO: 5141071 - DNA, 25 bp, Homo sapien
tctataagaaacctacaggtgacct

SEQ ID NO: 5141072 - DNA, 25 bp, Homo sapien
taacgatcagaaaaccgagagtaga

SEQ ID NO: 5141073 - DNA, 25 bp, Homo sapien
gggaaacccatagccgacaggcaaa

SEQ ID NO: 5141074 - DNA, 25 bp, Homo sapien
tgagataaggattttggctcccacc

SEQ ID NO: 5141075 - DNA, 25 bp, Homo sapien
ccagccgcgcggcgcgggtcccggg

SEQ ID NO: 5141076 - DNA, 25 bp, Homo sapien
gcccagccgcgcggcgcgggtcccg

SEQ ID NO: 5141077 - DNA, 25 bp, Homo sapien
cagccgcgcggcgcgggtcccggga

SEQ ID NO: 5141078 - DNA, 25 bp, Homo sapien
ctgcccagccgcgcggcgcgggtcc

SEQ ID NO: 5141079 - DNA, 25 bp, Homo sapien
aggttgctgctggaaaacccagcgc

SEQ ID NO: 5141080 - DNA, 25 bp, Homo sapien
atcgcggggtccaaaggttgctgct

SEQ ID NO: 5141081 - DNA, 25 bp, Homo sapien
gggtccaaaggttgctgctggaaaa

SEQ ID NO: 5141082 - DNA, 25 bp, Homo sapien
caaaggttgctgctggaaaacccag

SEQ ID NO: 5141083 - DNA, 25 bp, Homo sapien
ctggcgtagaatcctccctgactcg

SEQ ID NO: 5141084 - DNA, 25 bp, Homo sapien
ccctgactcggaggtcccggtctgg

SEQ ID NO: 5141085 - DNA, 25 bp, Homo sapien
cagacgccccgcgtggagttaccgg

SEQ ID NO: 5141086 - DNA, 25 bp, Homo sapien
gggtgctcctcgcagccgtgctcca

SEQ ID NO: 5141087 - DNA, 25 bp, Homo sapien
cgggtccgggagtgtagcggtctgg

SEQ ID NO: 5141088 - DNA, 25 bp, Homo sapien
gggagtgtagcggtctggggcgctc

SEQ ID NO: 5141089 - DNA, 25 bp, Homo sapien
gcgaagctccgggtccgggagtgta

SEQ ID NO: 5141090 - DNA, 25 bp, Homo sapien
gaagctccgggtccgggagtgtagc

SEQ ID NO: 5141091 - DNA, 25 bp, Homo sapien
tgactaccgtggaaagtgaaagaga

SEQ ID NO: 5141092 - DNA, 25 bp, Homo sapien
ggcacccagagagggctacaaaaaa

SEQ ID NO: 5141093 - DNA, 25 bp, Homo sapien
gtgagaagcagcgatctccgcctcc

SEQ ID NO: 5141094 - DNA, 25 bp, Homo sapien
gaaagagaggtgtgattaaagagat

SEQ ID NO: 5141095 - DNA, 25 bp, Homo sapien
gctcctccttcacgccaggtcgcga

SEQ ID NO: 5141096 - DNA, 25 bp, Homo sapien
agctcctccttcacgccaggtcgcg

SEQ ID NO: 5141097 - DNA, 25 bp, Homo sapien
ttgagaatccctccccggatggtgg

SEQ ID NO: 5141098 - DNA, 25 bp, Homo sapien
tactcttgggtaaatgacggaattc

SEQ ID NO: 5141099 - DNA, 25 bp, Homo sapien
tctgataactgcgatgcaaggtgct

SEQ ID NO: 5141100 - DNA, 25 bp, Homo sapien
gagaggtgtgctcccaatagcagca

SEQ ID NO: 5141101 - DNA, 25 bp, Homo sapien
ttggattctgcttcaaatggcttct

SEQ ID NO: 5141102 - DNA, 25 bp, Homo sapien
ggtttggattctgcttcaaatggct

SEQ ID NO: 5141103 - DNA, 25 bp, Homo sapien
gtttggattctgcttcaaatggctt

SEQ ID NO: 5141104 - DNA, 25 bp, Homo sapien
tttggattctgcttcaaatggcttc

SEQ ID NO: 5141105 - DNA, 25 bp, Homo sapien
gatataagcacccaaagggtcaagg

SEQ ID NO: 5141106 - DNA, 25 bp, Homo sapien
acagatataagcacccaaagggtca

SEQ ID NO: 5141107 - DNA, 25 bp, Homo sapien
ttacagatataagcacccaaagggt

SEQ ID NO: 5141108 - DNA, 25 bp, Homo sapien
gcttacagatataagcacccaaagg

SEQ ID NO: 5141109 - DNA, 25 bp, Homo sapien
aatatgtttgagagtatgtataatc

SEQ ID NO: 5141110 - DNA, 25 bp, Homo sapien
gctctcactacatgaactcagactg

SEQ ID NO: 5141111 - DNA, 25 bp, Homo sapien
gacattcttcctcaattactcatga

SEQ ID NO: 5141112 - DNA, 25 bp, Homo sapien
agcatcttcagtagccaccacataa

SEQ ID NO: 5141113 - DNA, 25 bp, Homo sapien
aagtcctgagaaatctcggtgtcaa

SEQ ID NO: 5141114 - DNA, 25 bp, Homo sapien
agtcctgagaaatctcggtgtcaat

SEQ ID NO: 5141115 - DNA, 25 bp, Homo sapien
tgtgtcattcaactcaactggccaa

SEQ ID NO: 5141116 - DNA, 25 bp, Homo sapien
tgcaagtgaacacgagcaatgtttc

SEQ ID NO: 5141117 - DNA, 25 bp, Homo sapien
aaagcaattctcgaggaactccttg

SEQ ID NO: 5141118 - DNA, 25 bp, Homo sapien
caatgtttcagatagaaaggttccc

SEQ ID NO: 5141119 - DNA, 25 bp, Homo sapien
tgtcataggaagagtaggaaagaaa

SEQ ID NO: 5141120 - DNA, 25 bp, Homo sapien
ttgctgaacaaaggacaagagggct

SEQ ID NO: 5141121 - DNA, 25 bp, Homo sapien
aaaaggatgtggtgattatctgacc

SEQ ID NO: 5141122 - DNA, 25 bp, Homo sapien
gacctttcagattactgcatatttg

SEQ ID NO: 5141123 - DNA, 25 bp, Homo sapien
ggttaacactgaggccaactgaccc

SEQ ID NO: 5141124 - DNA, 25 bp, Homo sapien
ggagctccaaggctagggttaacac

SEQ ID NO: 5141125 - DNA, 25 bp, Homo sapien
cagcccatcctggttatgaaaacca

SEQ ID NO: 5141126 - DNA, 25 bp, Homo sapien
ccaaggctagggttaacactgaggc

SEQ ID NO: 5141127 - DNA, 25 bp, Homo sapien
cttccacaattttactagttacttg

SEQ ID NO: 5141128 - DNA, 25 bp, Homo sapien
gctgttgaccagtgtttgatagtaa

SEQ ID NO: 5141129 - DNA, 25 bp, Homo sapien
gatagtaactgttttcacaggttat

SEQ ID NO: 5141130 - DNA, 25 bp, Homo sapien
tagttacttgtctttcagtgaaaca

SEQ ID NO: 5141131 - DNA, 25 bp, Homo sapien
gttttcctgcaaataggtggtccta

SEQ ID NO: 5141132 - DNA, 25 bp, Homo sapien
ttttcctgcaaataggtggtcctat

SEQ ID NO: 5141133 - DNA, 25 bp, Homo sapien
tgttttcctgcaaataggtggtcct

SEQ ID NO: 5141134 - DNA, 25 bp, Homo sapien
cttgttttcctgcaaataggtggtc

SEQ ID NO: 5141135 - DNA, 25 bp, Homo sapien
tacatgtcacaggaattaatactaa

SEQ ID NO: 5141136 - DNA, 25 bp, Homo sapien
tgggggctgaatggccatccttgac

SEQ ID NO: 5141137 - DNA, 25 bp, Homo sapien
tactaattgtaataaagccactttc

SEQ ID NO: 5141138 - DNA, 25 bp, Homo sapien
tttcttcaatccagcacatctgaca

SEQ ID NO: 5141139 - DNA, 25 bp, Homo sapien
ttttattgttctccagtagtagctt

SEQ ID NO: 5141140 - DNA, 25 bp, Homo sapien
ttattgttctccagtagtagctttt

SEQ ID NO: 5141141 - DNA, 25 bp, Homo sapien
tttattgttctccagtagtagcttt

SEQ ID NO: 5141142 - DNA, 25 bp, Homo sapien
ggagtaatacccctgatcttcaaac

SEQ ID NO: 5141143 - DNA, 25 bp, Homo sapien
tattgaaggttttggtgatattaaa

SEQ ID NO: 5141144 - DNA, 25 bp, Homo sapien
tagttttccattatgatgaaggaaa

SEQ ID NO: 5141145 - DNA, 25 bp, Homo sapien
tccactattgttatattgaaggttt

SEQ ID NO: 5141146 - DNA, 25 bp, Homo sapien
agaaccggaactatattactgcgat

SEQ ID NO: 5141147 - DNA, 25 bp, Homo sapien
aacatggttaagctttggtccaaga

SEQ ID NO: 5141148 - DNA, 25 bp, Homo sapien
caagaagaaccggaactatattact

SEQ ID NO: 5141149 - DNA, 25 bp, Homo sapien
gaagaaccggaactatattactgcg

SEQ ID NO: 5141150 - DNA, 25 bp, Homo sapien
tcatgtatattaggatccgatccat

SEQ ID NO: 5141151 - DNA, 25 bp, Homo sapien
ttctcttcatgtatattaggatccg

SEQ ID NO: 5141152 - DNA, 25 bp, Homo sapien
aagcagagcagttgagccttacgtt

SEQ ID NO: 5141153 - DNA, 25 bp, Homo sapien
gagcagttgagccttacgttttttc

SEQ ID NO: 5141154 - DNA, 25 bp, Homo sapien
caaaactcaaatggaggccagtggc

SEQ ID NO: 5141155 - DNA, 25 bp, Homo sapien
tcaacatgtagtgggcatgaaccac

SEQ ID NO: 5141156 - DNA, 25 bp, Homo sapien
gctcccgggcaagaagccagacttt

SEQ ID NO: 5141157 - DNA, 25 bp, Homo sapien
ggtgtgtgcacccaactataaagaa

SEQ ID NO: 5141158 - DNA, 25 bp, Homo sapien
gtgctggccacagtgcaattatata

SEQ ID NO: 5141159 - DNA, 25 bp, Homo sapien
tggccacagtgcaattatataaaac

SEQ ID NO: 5141160 - DNA, 25 bp, Homo sapien
ggtgtctgtgcctcccgtgctggcc

SEQ ID NO: 5141161 - DNA, 25 bp, Homo sapien
gaagcatgccatttgccttctggag

SEQ ID NO: 5141162 - DNA, 25 bp, Homo sapien
ctcaggccccccgatttccacatgg

SEQ ID NO: 5141163 - DNA, 25 bp, Homo sapien
agcatctgtatctccaagcctcagg

SEQ ID NO: 5141164 - DNA, 25 bp, Homo sapien
caggccccccgatttccacatggga

SEQ ID NO: 5141165 - DNA, 25 bp, Homo sapien
cccacgcagatctgcaaactcccct

SEQ ID NO: 5141166 - DNA, 25 bp, Homo sapien
gaattgactggccagaagcgtctag

SEQ ID NO: 5141167 - DNA, 25 bp, Homo sapien
tgtgagccccaatttctaaacctac

SEQ ID NO: 5141168 - DNA, 25 bp, Homo sapien
cacgcacacattggcacggggtgat

SEQ ID NO: 5141169 - DNA, 25 bp, Homo sapien
tctagggcaggaataggacagtcct

SEQ ID NO: 5141170 - DNA, 25 bp, Homo sapien
gatactaactgcttcacttacaagg

SEQ ID NO: 5141171 - DNA, 25 bp, Homo sapien
agtagttgccaacccacgtgctgac

SEQ ID NO: 5141172 - DNA, 25 bp, Homo sapien
tcgtgaatgcccttaaaccttggta

SEQ ID NO: 5141173 - DNA, 25 bp, Homo sapien
taatgtattctatccgtacccgtgg

SEQ ID NO: 5141174 - DNA, 25 bp, Homo sapien
tgtccatcatcacgtgcttgtccat

SEQ ID NO: 5141175 - DNA, 25 bp, Homo sapien
tgttgtccatcatcacgtgcttgtc

SEQ ID NO: 5141176 - DNA, 25 bp, Homo sapien
cagtgttgtccatcatcacgtgctt

SEQ ID NO: 5141177 - DNA, 25 bp, Homo sapien
agtgttgtccatcatcacgtgcttg

SEQ ID NO: 5141178 - DNA, 25 bp, Homo sapien
agatcaaaacagctatgatcattcc

SEQ ID NO: 5141179 - DNA, 25 bp, Homo sapien
ccaagatcaaaacagctatgatcat

SEQ ID NO: 5141180 - DNA, 25 bp, Homo sapien
ccaccaagatcaaaacagctatgat

SEQ ID NO: 5141181 - DNA, 25 bp, Homo sapien
tcaaaacagctatgatcattcctct

SEQ ID NO: 5141182 - DNA, 25 bp, Homo sapien
atctcttctcgttaaatgtctataa

SEQ ID NO: 5141183 - DNA, 25 bp, Homo sapien
agaaccaagtcaactctataaatga

SEQ ID NO: 5141184 - DNA, 25 bp, Homo sapien
agtcaactctataaatgacacacac

SEQ ID NO: 5141185 - DNA, 25 bp, Homo sapien
ccaagtcaactctataaatgacaca

SEQ ID NO: 5141186 - DNA, 25 bp, Homo sapien
tcttaatgagaacataaggtaagaa

SEQ ID NO: 5141187 - DNA, 25 bp, Homo sapien
cttaatgagaacataaggtaagaaa

SEQ ID NO: 5141188 - DNA, 25 bp, Homo sapien
gtaagaaattccagcattatatgtg

SEQ ID NO: 5141189 - DNA, 25 bp, Homo sapien
taagacacaaaagcatcatatgttt

SEQ ID NO: 5141190 - DNA, 25 bp, Homo sapien
cttttaggtaagacacaaaagcatc

SEQ ID NO: 5141191 - DNA, 25 bp, Homo sapien
aggtaagacacaaaagcatcatatg

SEQ ID NO: 5141192 - DNA, 25 bp, Homo sapien
tttaggtaagacacaaaagcatcat

SEQ ID NO: 5141193 - DNA, 25 bp, Homo sapien
tcctccaggcactacatccctttca

SEQ ID NO: 5141194 - DNA, 25 bp, Homo sapien
tccaggcactacatccctttcaaat

SEQ ID NO: 5141195 - DNA, 25 bp, Homo sapien
tatgcataacttatacccaaaatgt

SEQ ID NO: 5141196 - DNA, 25 bp, Homo sapien
caaaatgtttctccaacaccctggg

SEQ ID NO: 5141197 - DNA, 25 bp, Homo sapien
cagtgagtggatttcatcaacaaca

SEQ ID NO: 5141198 - DNA, 25 bp, Homo sapien
tttctctatcagtgagtggatttca

SEQ ID NO: 5141199 - DNA, 25 bp, Homo sapien
caatgattagtcttcggcttttctc

SEQ ID NO: 5141200 - DNA, 25 bp, Homo sapien
catataacttttacttaggacaatg

SEQ ID NO: 5141201 - DNA, 25 bp, Homo sapien
tgcaggcattaagtaaagaaggttc

SEQ ID NO: 5141202 - DNA, 25 bp, Homo sapien
taagaaagagatttatcggccttcc

SEQ ID NO: 5141203 - DNA, 25 bp, Homo sapien
ttccaccaatgcttcatggagtcca

SEQ ID NO: 5141204 - DNA, 25 bp, Homo sapien
tgaagtcagtaacaggtgtaaattc

SEQ ID NO: 5141205 - DNA, 25 bp, Homo sapien
caggcaagacttccggttcgtctct

SEQ ID NO: 5141206 - DNA, 25 bp, Homo sapien
aacaggcaagacttccggttcgtct

SEQ ID NO: 5141207 - DNA, 25 bp, Homo sapien
ggcaagacttccggttcgtctctac

SEQ ID NO: 5141208 - DNA, 25 bp, Homo sapien
acaggcaagacttccggttcgtctc

SEQ ID NO: 5141209 - DNA, 25 bp, Homo sapien
cactggtccctagaaaatgcctctt

SEQ ID NO: 5141210 - DNA, 25 bp, Homo sapien
tcggttattttgcatcacgtccagc

SEQ ID NO: 5141211 - DNA, 25 bp, Homo sapien
tatgggattgagtatgagcagctgc

SEQ ID NO: 5141212 - DNA, 25 bp, Homo sapien
gaattccaggtcttctgggagcacg

SEQ ID NO: 5141213 - DNA, 25 bp, Homo sapien
agctttcaagaaccgttggctgcaa

SEQ ID NO: 5141214 - DNA, 25 bp, Homo sapien
gagctttcaagaaccgttggctgca

SEQ ID NO: 5141215 - DNA, 25 bp, Homo sapien
cgagctttcaagaaccgttggctgc

SEQ ID NO: 5141216 - DNA, 25 bp, Homo sapien
tattcaatggctaatacaacctggc

SEQ ID NO: 5141217 - DNA, 25 bp, Homo sapien
tgtgtcttccaacgtcaaaagaggc

SEQ ID NO: 5141218 - DNA, 25 bp, Homo sapien
ggagagatatctttcgccctctgga

SEQ ID NO: 5141219 - DNA, 25 bp, Homo sapien
gatcatcaagaaggctcccagtgct

SEQ ID NO: 5141220 - DNA, 25 bp, Homo sapien
atagaattacgtggactcccttttg

SEQ ID NO: 5141221 - DNA, 25 bp, Homo sapien
tgtcaaatagaattacgtggactcc

SEQ ID NO: 5141222 - DNA, 25 bp, Homo sapien
cttttggttcagagcatggcccagg

SEQ ID NO: 5141223 - DNA, 25 bp, Homo sapien
ccttttggttcagagcatggcccag

SEQ ID NO: 5141224 - DNA, 25 bp, Homo sapien
acacatgtgacatctgtgtcaaggc

SEQ ID NO: 5141225 - DNA, 25 bp, Homo sapien
tatggaacacacatgtgacatctgt

SEQ ID NO: 5141226 - DNA, 25 bp, Homo sapien
aaaccataagaggcaatatggaaca

SEQ ID NO: 5141227 - DNA, 25 bp, Homo sapien
ccataagaggcaatatggaacacac

SEQ ID NO: 5141228 - DNA, 25 bp, Homo sapien
tgatcaggttttgatttagttgctc

SEQ ID NO: 5141229 - DNA, 25 bp, Homo sapien
caggttttgatttagttgctccttc

SEQ ID NO: 5141230 - DNA, 25 bp, Homo sapien
tttgatcaggttttgatttagttgc

SEQ ID NO: 5141231 - DNA, 25 bp, Homo sapien
gatcaggttttgatttagttgctcc

SEQ ID NO: 5141232 - DNA, 25 bp, Homo sapien
tgaacgtgtctttctcaatatagct

SEQ ID NO: 5141233 - DNA, 25 bp, Homo sapien
tggacagactcaaccaggcttctag

SEQ ID NO: 5141234 - DNA, 25 bp, Homo sapien
ctccacagacaaacttgaacgtgtc

SEQ ID NO: 5141235 - DNA, 25 bp, Homo sapien
gatgttgtctgtactcccaatgctg

SEQ ID NO: 5141236 - DNA, 25 bp, Homo sapien
tgagacaaagtagggctgtccagag

SEQ ID NO: 5141237 - DNA, 25 bp, Homo sapien
agacaaagtagggctgtccagaggc

SEQ ID NO: 5141238 - DNA, 25 bp, Homo sapien
caaagtagggctgtccagaggcaat

SEQ ID NO: 5141239 - DNA, 25 bp, Homo sapien
acaaagtagggctgtccagaggcaa

SEQ ID NO: 5141240 - DNA, 25 bp, Homo sapien
tcaaactcttctctgaccaacctcc

SEQ ID NO: 5141241 - DNA, 25 bp, Homo sapien
ttcagtaggaagtgctctgaagaag

SEQ ID NO: 5141242 - DNA, 25 bp, Homo sapien
ctttcagtaggaagtgctctgaaga

SEQ ID NO: 5141243 - DNA, 25 bp, Homo sapien
tggttgggtttagttgaaagagtga

SEQ ID NO: 5141244 - DNA, 25 bp, Homo sapien
tccattttcaaagggttctactata

SEQ ID NO: 5141245 - DNA, 25 bp, Homo sapien
tttcctgctcttaagacataaaaaa

SEQ ID NO: 5141246 - DNA, 25 bp, Homo sapien
gaacttcaagtccttatttcagtaa

SEQ ID NO: 5141247 - DNA, 25 bp, Homo sapien
tgccagcttttgtatctgaacgaaa

SEQ ID NO: 5141248 - DNA, 25 bp, Homo sapien
tgagagcccaacagcgctgggagaa

SEQ ID NO: 5141249 - DNA, 25 bp, Homo sapien
tggtcaaggctacaccttcagctgt

SEQ ID NO: 5141250 - DNA, 25 bp, Homo sapien
gaagatttccctttcagttggtcaa

SEQ ID NO: 5141251 - DNA, 25 bp, Homo sapien
gctgggagaatctacagaatcgctt

SEQ ID NO: 5141252 - DNA, 25 bp, Homo sapien
tgggcatttcatttccatgcccaaa

SEQ ID NO: 5141253 - DNA, 25 bp, Homo sapien
atgcccaaaacgtcaccggctccca

SEQ ID NO: 5141254 - DNA, 25 bp, Homo sapien
catttcatttccatgcccaaaacgt

SEQ ID NO: 5141255 - DNA, 25 bp, Homo sapien
aagcctgggcatttcatttccatgc

SEQ ID NO: 5141256 - DNA, 25 bp, Homo sapien
gcctttaaagatgtggtctccccac

SEQ ID NO: 5141257 - DNA, 25 bp, Homo sapien
caaagtctccgaaagaacagtcctc

SEQ ID NO: 5141258 - DNA, 25 bp, Homo sapien
agcaatggcctttaaagatgtggtc

SEQ ID NO: 5141259 - DNA, 25 bp, Homo sapien
ccaaggaacaaggcaggatcagcaa

SEQ ID NO: 5141260 - DNA, 25 bp, Homo sapien
atatcttggggatccagctggagca

SEQ ID NO: 5141261 - DNA, 25 bp, Homo sapien
tgaaatatcttggggatccagctgg

SEQ ID NO: 5141262 - DNA, 25 bp, Homo sapien
aaatatcttggggatccagctggag

SEQ ID NO: 5141263 - DNA, 25 bp, Homo sapien
ttgaaatatcttggggatccagctg

SEQ ID NO: 5141264 - DNA, 25 bp, Homo sapien
tgttctcccgtgttcctgtcatcac

SEQ ID NO: 5141265 - DNA, 25 bp, Homo sapien
gagtagagtgttttgagattcagaa

SEQ ID NO: 5141266 - DNA, 25 bp, Homo sapien
cctttgccagagtagagtgttttga

SEQ ID NO: 5141267 - DNA, 25 bp, Homo sapien
tcactccaataacttcattcctttg

SEQ ID NO: 5141268 - DNA, 25 bp, Homo sapien
ttaattcgctctcctgcaacaagcc

SEQ ID NO: 5141269 - DNA, 25 bp, Homo sapien
ttaaatcctttaattcgctctcctg

SEQ ID NO: 5141270 - DNA, 25 bp, Homo sapien
ccaaagaaatatccagcccaaacag

SEQ ID NO: 5141271 - DNA, 25 bp, Homo sapien
caagccaaagaaatatccagcccaa

SEQ ID NO: 5141272 - DNA, 25 bp, Homo sapien
tactacccatgaagggcaggtgctc

SEQ ID NO: 5141273 - DNA, 25 bp, Homo sapien
cattggacatcagataggtcgttac

SEQ ID NO: 5141274 - DNA, 25 bp, Homo sapien
gtgagagtcgatttctgtggcagaa

SEQ ID NO: 5141275 - DNA, 25 bp, Homo sapien
ggctctggtaaatcacaaaataaga

SEQ ID NO: 5141276 - DNA, 25 bp, Homo sapien
tgtcctgaatgatgtgaggatagct

SEQ ID NO: 5141277 - DNA, 25 bp, Homo sapien
ggtacatttgtcctgaatgatgtga

SEQ ID NO: 5141278 - DNA, 25 bp, Homo sapien
catttgtcctgaatgatgtgaggat

SEQ ID NO: 5141279 - DNA, 25 bp, Homo sapien
cctgaatgatgtgaggatagctttt

SEQ ID NO: 5141280 - DNA, 25 bp, Homo sapien
catcttgggtctacaaatatatgac

SEQ ID NO: 5141281 - DNA, 25 bp, Homo sapien
taatcatcttgggtctacaaatata

SEQ ID NO: 5141282 - DNA, 25 bp, Homo sapien
acaaatatatgacccagaattattc

SEQ ID NO: 5141283 - DNA, 25 bp, Homo sapien
gggtctacaaatatatgacccagaa

SEQ ID NO: 5141284 - DNA, 25 bp, Homo sapien
tagataatagaggatttggaaatgt

SEQ ID NO: 5141285 - DNA, 25 bp, Homo sapien
ttggaaatgttttcagatagaaatg

SEQ ID NO: 5141286 - DNA, 25 bp, Homo sapien
ctagataatagaggatttggaaatg

SEQ ID NO: 5141287 - DNA, 25 bp, Homo sapien
tcagatagaaatgtatttggatcat

SEQ ID NO: 5141288 - DNA, 25 bp, Homo sapien
gatcctgtgaacatagatattttgt

SEQ ID NO: 5141289 - DNA, 25 bp, Homo sapien
taacaagatcctgtgaacatagata

SEQ ID NO: 5141290 - DNA, 25 bp, Homo sapien
ctaggaaattaacaagatcctgtga

SEQ ID NO: 5141291 - DNA, 25 bp, Homo sapien
taggaaattaacaagatcctgtgaa

SEQ ID NO: 5141292 - DNA, 25 bp, Homo sapien
tgatgcggaatactcacaggatgca

SEQ ID NO: 5141293 - DNA, 25 bp, Homo sapien
aatcatcttgacacaacaggctaca

SEQ ID NO: 5141294 - DNA, 25 bp, Homo sapien
ggttaccgctggactttgtgcatca

SEQ ID NO: 5141295 - DNA, 25 bp, Homo sapien
taggtcttgcttatgtgatgcggaa

SEQ ID NO: 5141296 - DNA, 25 bp, Homo sapien
tgccaacaggtgccagttacaagaa

SEQ ID NO: 5141297 - DNA, 25 bp, Homo sapien
aggcccacaggatgccaacaggtgc

SEQ ID NO: 5141298 - DNA, 25 bp, Homo sapien
aaccatataatgaggctgtcccaaa

SEQ ID NO: 5141299 - DNA, 25 bp, Homo sapien
cctctgtttcagtgctggttagaca

SEQ ID NO: 5141300 - DNA, 25 bp, Homo sapien
caaatgggccaatgtttcaacccta

SEQ ID NO: 5141301 - DNA, 25 bp, Homo sapien
tggttagacagcatacagatgattg

SEQ ID NO: 5141302 - DNA, 25 bp, Homo sapien
tacatgcctcacaaacctgcgtgtg

SEQ ID NO: 5141303 - DNA, 25 bp, Homo sapien
ggttcacaggagtatggcagacaca

SEQ ID NO: 5141304 - DNA, 25 bp, Homo sapien
taagtgtagttgcagtctcttgccc

SEQ ID NO: 5141305 - DNA, 25 bp, Homo sapien
tagcctcgcccgtagttttagcagg

SEQ ID NO: 5141306 - DNA, 25 bp, Homo sapien
tttccacagagaggagttttccatt

SEQ ID NO: 5141307 - DNA, 25 bp, Homo sapien
ctttccacagagaggagttttccat

SEQ ID NO: 5141308 - DNA, 25 bp, Homo sapien
aacttcatccactacgattcggttg

SEQ ID NO: 5141309 - DNA, 25 bp, Homo sapien
ccctggtgatagtcataaacttcat

SEQ ID NO: 5141310 - DNA, 25 bp, Homo sapien
ttcatccactacgattcggttgctc

SEQ ID NO: 5141311 - DNA, 25 bp, Homo sapien
ggtgatagtcataaacttcatccac

SEQ ID NO: 5141312 - DNA, 25 bp, Homo sapien
gttctcacttgaacaacagctctga

SEQ ID NO: 5141313 - DNA, 25 bp, Homo sapien
caacagctctgactgtccacgaact

SEQ ID NO: 5141314 - DNA, 25 bp, Homo sapien
tctcacttgaacaacagctctgact

SEQ ID NO: 5141315 - DNA, 25 bp, Homo sapien
ctgtccacgaactcacagtatccga

SEQ ID NO: 5141316 - DNA, 25 bp, Homo sapien
gcctgacacatattacatgttcagt

SEQ ID NO: 5141317 - DNA, 25 bp, Homo sapien
tgtagccttagctccaagcctgaca

SEQ ID NO: 5141318 - DNA, 25 bp, Homo sapien
tccaagcctgacacatattacatgt

SEQ ID NO: 5141319 - DNA, 25 bp, Homo sapien
cattcttgtagccttagctccaagc

SEQ ID NO: 5141320 - DNA, 25 bp, Homo sapien
cccttactgagctggtgtgtcctca

SEQ ID NO: 5141321 - DNA, 25 bp, Homo sapien
acttccgacccagcaaacaaggtga

SEQ ID NO: 5141322 - DNA, 25 bp, Homo sapien
gcctgcttgaccacagaacttccta

SEQ ID NO: 5141323 - DNA, 25 bp, Homo sapien
tgatgtcagtcctactcccagatgc

SEQ ID NO: 5141324 - DNA, 25 bp, Homo sapien
gcctcttccctatgaaaggtcttgg

SEQ ID NO: 5141325 - DNA, 25 bp, Homo sapien
tgctctgttgacctacaagtccagc

SEQ ID NO: 5141326 - DNA, 25 bp, Homo sapien
gcatttccgggtttggctctagccc

SEQ ID NO: 5141327 - DNA, 25 bp, Homo sapien
gcagcattggacactgttggccatg

SEQ ID NO: 5141328 - DNA, 25 bp, Homo sapien
tatttgcattggaaagtctgaaggc

SEQ ID NO: 5141329 - DNA, 25 bp, Homo sapien
aaagattactatttgcattggaaag

SEQ ID NO: 5141330 - DNA, 25 bp, Homo sapien
tactatttgcattggaaagtctgaa

SEQ ID NO: 5141331 - DNA, 25 bp, Homo sapien
aaacaaagattactatttgcattgg

SEQ ID NO: 5141332 - DNA, 25 bp, Homo sapien
tctggtttgagtttagtgtctccca

SEQ ID NO: 5141333 - DNA, 25 bp, Homo sapien
ccagaatatctggtttgagtttagt

SEQ ID NO: 5141334 - DNA, 25 bp, Homo sapien
ttccagtgtgtcctcgacaggatcc

SEQ ID NO: 5141335 - DNA, 25 bp, Homo sapien
gtgtgtcctcgacaggatccagaat

SEQ ID NO: 5141336 - DNA, 25 bp, Homo sapien
caggtactgagacttcccactctag

SEQ ID NO: 5141337 - DNA, 25 bp, Homo sapien
ttcccactctaggtcagaatctttg

SEQ ID NO: 5141338 - DNA, 25 bp, Homo sapien
tatgacagggttaaagaccctttca

SEQ ID NO: 5141339 - DNA, 25 bp, Homo sapien
ctaggtcagaatctttgatgtacca

SEQ ID NO: 5141340 - DNA, 25 bp, Homo sapien
tggagttctggacaaagcaaacaaa

SEQ ID NO: 5141341 - DNA, 25 bp, Homo sapien
cttttctttcagttggacggactgg

SEQ ID NO: 5141342 - DNA, 25 bp, Homo sapien
cctgcgaagatcacgctgagtgact

SEQ ID NO: 5141343 - DNA, 25 bp, Homo sapien
acggactgggttgtgtttccaatgg

SEQ ID NO: 5141344 - DNA, 25 bp, Homo sapien
tatttcaatccagtgcctgtagagg

SEQ ID NO: 5141345 - DNA, 25 bp, Homo sapien
caagcgtctgatccttgctctggta

SEQ ID NO: 5141346 - DNA, 25 bp, Homo sapien
ggtaggtccggtacagcagcactat

SEQ ID NO: 5141347 - DNA, 25 bp, Homo sapien
tagaggagggcactcgccgccagca

SEQ ID NO: 5141348 - DNA, 25 bp, Homo sapien
tggagccacatctctttcaagcaaa

SEQ ID NO: 5141349 - DNA, 25 bp, Homo sapien
ccattttgcataggatacgaaagca

SEQ ID NO: 5141350 - DNA, 25 bp, Homo sapien
gcctcacttggaaaagagctccatt

SEQ ID NO: 5141351 - DNA, 25 bp, Homo sapien
ttcaagcaaacacaggctatatcca

SEQ ID NO: 5141352 - DNA, 25 bp, Homo sapien
tactgggtccattgacatagttggg

SEQ ID NO: 5141353 - DNA, 25 bp, Homo sapien
aaaccctgagagcttttttcacgag

SEQ ID NO: 5141354 - DNA, 25 bp, Homo sapien
gatcatccaaggcaagattcactgc

SEQ ID NO: 5141355 - DNA, 25 bp, Homo sapien
ttttcacgagatgaggtagagactc

SEQ ID NO: 5141356 - DNA, 25 bp, Homo sapien
gtggtagcgcattttggcccagaac

SEQ ID NO: 5141357 - DNA, 25 bp, Homo sapien
tgtggtagcgcattttggcccagaa

SEQ ID NO: 5141358 - DNA, 25 bp, Homo sapien
cccagtggtttctgttctactgagt

SEQ ID NO: 5141359 - DNA, 25 bp, Homo sapien
tcctagaggtaattctgagctggtt

SEQ ID NO: 5141360 - DNA, 25 bp, Homo sapien
tgctcggaccactgggaaatcttag

SEQ ID NO: 5141361 - DNA, 25 bp, Homo sapien
gacagttccctagccataaggcaga

SEQ ID NO: 5141362 - DNA, 25 bp, Homo sapien
tagagaattcactcgccgtcagtcc

SEQ ID NO: 5141363 - DNA, 25 bp, Homo sapien
tgtccagcaacatctctatcccagg

SEQ ID NO: 5141364 - DNA, 25 bp, Homo sapien
cctgcaatgatccttcccacaagaa

SEQ ID NO: 5141365 - DNA, 25 bp, Homo sapien
aactcattgttaactttatcactga

SEQ ID NO: 5141366 - DNA, 25 bp, Homo sapien
cagtggtttttatgatgtgggtgcc

SEQ ID NO: 5141367 - DNA, 25 bp, Homo sapien
aacaaggatgttgcttggtgccaaa

SEQ ID NO: 5141368 - DNA, 25 bp, Homo sapien
tgctaaatgatgggactgcagtgta

SEQ ID NO: 5141369 - DNA, 25 bp, Homo sapien
gctaaatgatgggactgcagtgtat

SEQ ID NO: 5141370 - DNA, 25 bp, Homo sapien
tctgagcttccataactgataagac

SEQ ID NO: 5141371 - DNA, 25 bp, Homo sapien
gtaacatgggctagcaataccacgc

SEQ ID NO: 5141372 - DNA, 25 bp, Homo sapien
cagatacttccctgccagtctgagc

SEQ ID NO: 5141373 - DNA, 25 bp, Homo sapien
aatatctccacctcggtaacatggg

SEQ ID NO: 5141374 - DNA, 25 bp, Homo sapien
tctctgagggttctctggaggtcac

SEQ ID NO: 5141375 - DNA, 25 bp, Homo sapien
cacactgctgacacctagtgggcac

SEQ ID NO: 5141376 - DNA, 25 bp, Homo sapien
ggtcacactgctgacacctagtggg

SEQ ID NO: 5141377 - DNA, 25 bp, Homo sapien
tgacttttgtaatgaaatcctttct

SEQ ID NO: 5141378 - DNA, 25 bp, Homo sapien
ggcttctagagagtgactgcatcca

SEQ ID NO: 5141379 - DNA, 25 bp, Homo sapien
tgtgtgccacacatctgaagtcggg

SEQ ID NO: 5141380 - DNA, 25 bp, Homo sapien
taagtcacgaacatctgcagagcca

SEQ ID NO: 5141381 - DNA, 25 bp, Homo sapien
gatgcttcagaacactcaagagcca

SEQ ID NO: 5141382 - DNA, 25 bp, Homo sapien
ggtactcagattgacttgagccatt

SEQ ID NO: 5141383 - DNA, 25 bp, Homo sapien
cagtgacaggacgagtttcctggta

SEQ ID NO: 5141384 - DNA, 25 bp, Homo sapien
agtcagtgacaggacgagtttcctg

SEQ ID NO: 5141385 - DNA, 25 bp, Homo sapien
agtttcctggtactcagattgactt

SEQ ID NO: 5141386 - DNA, 25 bp, Homo sapien
ggtgcttgcaaacgaaacggtctgg

SEQ ID NO: 5141387 - DNA, 25 bp, Homo sapien
aacggtctgggtgtacctgaggtct

SEQ ID NO: 5141388 - DNA, 25 bp, Homo sapien
agtcaagcagacaggaccgtggaca

SEQ ID NO: 5141389 - DNA, 25 bp, Homo sapien
cagcgaagagcagttaggtgcttgc

SEQ ID NO: 5141390 - DNA, 25 bp, Homo sapien
gaggcctggcagcctgtggtagagg

SEQ ID NO: 5141391 - DNA, 25 bp, Homo sapien
ggcagcctgtggtagaggtggaagc

SEQ ID NO: 5141392 - DNA, 25 bp, Homo sapien
cctggcagcctgtggtagaggtgga

SEQ ID NO: 5141393 - DNA, 25 bp, Homo sapien
ggcctggcagcctgtggtagaggtg

SEQ ID NO: 5141394 - DNA, 25 bp, Homo sapien
aaagatcatcatgtagagctgctcg

SEQ ID NO: 5141395 - DNA, 25 bp, Homo sapien
caatactgcccaccacaggatggag

SEQ ID NO: 5141396 - DNA, 25 bp, Homo sapien
ccctccagaacgatgggtggcagga

SEQ ID NO: 5141397 - DNA, 25 bp, Homo sapien
ctggagtccatgaccggaggcgatt

SEQ ID NO: 5141398 - DNA, 25 bp, Homo sapien
ggctgaagctcatccctgtcctgct

SEQ ID NO: 5141399 - DNA, 25 bp, Homo sapien
gaagccgggcgggcacatgacatct

SEQ ID NO: 5141400 - DNA, 25 bp, Homo sapien
gccgggcgggcacatgacatctcac

SEQ ID NO: 5141401 - DNA, 25 bp, Homo sapien
cagccccaccccgaaccctcatctc

SEQ ID NO: 5141402 - DNA, 25 bp, Homo sapien
cgaaactagttggtttgtgaatgac

SEQ ID NO: 5141403 - DNA, 25 bp, Homo sapien
taactcaagaatgatacgttctctc

SEQ ID NO: 5141404 - DNA, 25 bp, Homo sapien
gacaagcagtgtgagtgaaccgtta

SEQ ID NO: 5141405 - DNA, 25 bp, Homo sapien
tgtaggcagtgcagatcccaaggaa

SEQ ID NO: 5141406 - DNA, 25 bp, Homo sapien
tccactagagcccttgactcagccc

SEQ ID NO: 5141407 - DNA, 25 bp, Homo sapien
tcctgctgcattcgttcttccacta

SEQ ID NO: 5141408 - DNA, 25 bp, Homo sapien
ctgcattcgttcttccactagagcc

SEQ ID NO: 5141409 - DNA, 25 bp, Homo sapien
ctccattctagatgctgagtcctgt

SEQ ID NO: 5141410 - DNA, 25 bp, Homo sapien
tcatcttccttatggagacacttag

SEQ ID NO: 5141411 - DNA, 25 bp, Homo sapien
gtgtggtctgacagcccttgggttc

SEQ ID NO: 5141412 - DNA, 25 bp, Homo sapien
gcttgactctgatctctccaagatg

SEQ ID NO: 5141413 - DNA, 25 bp, Homo sapien
cagtatcaccactgatcttgggtgt

SEQ ID NO: 5141414 - DNA, 25 bp, Homo sapien
cagtggccagtccacaccttctcca

SEQ ID NO: 5141415 - DNA, 25 bp, Homo sapien
tgaacccctcccaagcgtgtccttc

SEQ ID NO: 5141416 - DNA, 25 bp, Homo sapien
cctcccaagcgtgtccttccttggg

SEQ ID NO: 5141417 - DNA, 25 bp, Homo sapien
agtggccagtccacaccttctccag

SEQ ID NO: 5141418 - DNA, 25 bp, Homo sapien
tgctcctctgaagattctctgccat

SEQ ID NO: 5141419 - DNA, 25 bp, Homo sapien
cacatgtctgtggcccagggctcca

SEQ ID NO: 5141420 - DNA, 25 bp, Homo sapien
tgccatctcccaagtgcaggctccc

SEQ ID NO: 5141421 - DNA, 25 bp, Homo sapien
gagcagcccacgctctgagagcctt

SEQ ID NO: 5141422 - DNA, 25 bp, Homo sapien
tctgagtgaaacgtgtgataaatgc

SEQ ID NO: 5141423 - DNA, 25 bp, Homo sapien
gagtggctcaattgcagagatattc

SEQ ID NO: 5141424 - DNA, 25 bp, Homo sapien
gatgaatcgggcacatccagccaaa

SEQ ID NO: 5141425 - DNA, 25 bp, Homo sapien
tgaacatgaagacgatgagtggctc

SEQ ID NO: 5141426 - DNA, 25 bp, Homo sapien
tgtctgggacacgttttcttccacg

SEQ ID NO: 5141427 - DNA, 25 bp, Homo sapien
cttgatggtcgtgtatgatgtctgg

SEQ ID NO: 5141428 - DNA, 25 bp, Homo sapien
ttcattgttactgcgcaggctgtga

SEQ ID NO: 5141429 - DNA, 25 bp, Homo sapien
tactttttcattgttactgcgcagg

SEQ ID NO: 5141430 - DNA, 25 bp, Homo sapien
cagttccactcgtgattcttgccca

SEQ ID NO: 5141431 - DNA, 25 bp, Homo sapien
ccactcgtgattcttgcccacagtg

SEQ ID NO: 5141432 - DNA, 25 bp, Homo sapien
gctctccagatttggcagaaggcca

SEQ ID NO: 5141433 - DNA, 25 bp, Homo sapien
ctcgtgattcttgcccacagtggac

SEQ ID NO: 5141434 - DNA, 25 bp, Homo sapien
actgaaaatgcagcaggaccggaga

SEQ ID NO: 5141435 - DNA, 25 bp, Homo sapien
ctccagttttaacattgcggaaggg

SEQ ID NO: 5141436 - DNA, 25 bp, Homo sapien
aaatgcagcaggaccggagactctg

SEQ ID NO: 5141437 - DNA, 25 bp, Homo sapien
ttaacattgcggaagggaataagag

SEQ ID NO: 5141438 - DNA, 25 bp, Homo sapien
gaaaagattcctgctcacgaccagg

SEQ ID NO: 5141439 - DNA, 25 bp, Homo sapien
tgcagaaccttatcaaccactaatt

SEQ ID NO: 5141440 - DNA, 25 bp, Homo sapien
aataggtagatgtgaaacttctttc

SEQ ID NO: 5141441 - DNA, 25 bp, Homo sapien
taattactttgagctgactgaggga

SEQ ID NO: 5141442 - DNA, 25 bp, Homo sapien
taaatcatcagccactagttctcat

SEQ ID NO: 5141443 - DNA, 25 bp, Homo sapien
tgatgccagttacactctaaagttg

SEQ ID NO: 5141444 - DNA, 25 bp, Homo sapien
tctagctcctgaaacataaatgtac

SEQ ID NO: 5141445 - DNA, 25 bp, Homo sapien
gcttttaatcaaaaggcaacacata

SEQ ID NO: 5141446 - DNA, 25 bp, Homo sapien
acagaaggtttagggtggaagagct

SEQ ID NO: 5141447 - DNA, 25 bp, Homo sapien
tgaggttcaatgcaagcaaagaagg

SEQ ID NO: 5141448 - DNA, 25 bp, Homo sapien
ggcgcttcttactctcagtgagctt

SEQ ID NO: 5141449 - DNA, 25 bp, Homo sapien
ggtgagtgggcgcttcttactctca

SEQ ID NO: 5141450 - DNA, 25 bp, Homo sapien
gaaagtccgaaactggttactgata

SEQ ID NO: 5141451 - DNA, 25 bp, Homo sapien
ctgatatagaagagagcaaatacgc

SEQ ID NO: 5141452 - DNA, 25 bp, Homo sapien
aacaccactgtagaaaatgatgcac

SEQ ID NO: 5141453 - DNA, 25 bp, Homo sapien
ctagagtagcagtgacaaacatttt

SEQ ID NO: 5141454 - DNA, 25 bp, Homo sapien
aggtacctgaccagagggccaactg

SEQ ID NO: 5141455 - DNA, 25 bp, Homo sapien
caggtacctgaccagagggccaact

SEQ ID NO: 5141456 - DNA, 25 bp, Homo sapien
ggtacctgaccagagggccaactgt

SEQ ID NO: 5141457 - DNA, 25 bp, Homo sapien
gaaaatgattgctggagaaacgcga

SEQ ID NO: 5141458 - DNA, 25 bp, Homo sapien
agaaaatgattgctggagaaacgcg

SEQ ID NO: 5141459 - DNA, 25 bp, Homo sapien
aatgattgctggagaaacgcgaact

SEQ ID NO: 5141460 - DNA, 25 bp, Homo sapien
aaatgattgctggagaaacgcgaac

SEQ ID NO: 5141461 - DNA, 25 bp, Homo sapien
cacttggtagtgactccagtgccca

SEQ ID NO: 5141462 - DNA, 25 bp, Homo sapien
cagtgcccacacacatcttcgattc

SEQ ID NO: 5141463 - DNA, 25 bp, Homo sapien
cacatcttcgattccagcctttaag

SEQ ID NO: 5141464 - DNA, 25 bp, Homo sapien
ttgtctctcacttggtagtgactcc

SEQ ID NO: 5141465 - DNA, 25 bp, Homo sapien
ttccgtaagtatctatgatcaaact

SEQ ID NO: 5141466 - DNA, 25 bp, Homo sapien
aagaaacaatgcttgatttgggtag

SEQ ID NO: 5141467 - DNA, 25 bp, Homo sapien
aaagctgtagagctcagtatcccag

SEQ ID NO: 5141468 - DNA, 25 bp, Homo sapien
tgatttgggtaggttctttctgatg

SEQ ID NO: 5141469 - DNA, 25 bp, Homo sapien
acttggtacatgttggatgtcagaa

SEQ ID NO: 5141470 - DNA, 25 bp, Homo sapien
ggatgtcagaatgtcccttatggac

SEQ ID NO: 5141471 - DNA, 25 bp, Homo sapien
ccttatggactccacatcttcaggg

SEQ ID NO: 5141472 - DNA, 25 bp, Homo sapien
cctttgccgaacttggtacatgttg

SEQ ID NO: 5141473 - DNA, 25 bp, Homo sapien
gaggttgtatttgttgtaggacagg

SEQ ID NO: 5141474 - DNA, 25 bp, Homo sapien
cccttaaggtgttctggcggcggat

SEQ ID NO: 5141475 - DNA, 25 bp, Homo sapien
ccttaaggtgttctggcggcggatc

SEQ ID NO: 5141476 - DNA, 25 bp, Homo sapien
gcctgcttctcacttgtttggggtt

SEQ ID NO: 5141477 - DNA, 25 bp, Homo sapien
ctgcagactgaggattcccgtaggg

SEQ ID NO: 5141478 - DNA, 25 bp, Homo sapien
ggtagcggatattcttggtgccagc

SEQ ID NO: 5141479 - DNA, 25 bp, Homo sapien
ggtaggagaggtagcggatattctt

SEQ ID NO: 5141480 - DNA, 25 bp, Homo sapien
cctgcagactgaggattcccgtagg

SEQ ID NO: 5141481 - DNA, 25 bp, Homo sapien
gatgagatcaaattatgacccttgg

SEQ ID NO: 5141482 - DNA, 25 bp, Homo sapien
tgacccttggtctctatctggccta

SEQ ID NO: 5141483 - DNA, 25 bp, Homo sapien
tgttcttaatgttgcctcttggccc

SEQ ID NO: 5141484 - DNA, 25 bp, Homo sapien
tcctctttgtgtatggcatgtcaac

SEQ ID NO: 5141485 - DNA, 25 bp, Homo sapien
gccttaacttctggacatgggcacc

SEQ ID NO: 5141486 - DNA, 25 bp, Homo sapien
ctgaccaaaagccttaacttctgga

SEQ ID NO: 5141487 - DNA, 25 bp, Homo sapien
aaagccttaacttctggacatgggc

SEQ ID NO: 5141488 - DNA, 25 bp, Homo sapien
aagccttaacttctggacatgggca

SEQ ID NO: 5141489 - DNA, 25 bp, Homo sapien
aaagcattacatctgagttccaatc

SEQ ID NO: 5141490 - DNA, 25 bp, Homo sapien
agcattacatctgagttccaatctt

SEQ ID NO: 5141491 - DNA, 25 bp, Homo sapien
aagcattacatctgagttccaatct

SEQ ID NO: 5141492 - DNA, 25 bp, Homo sapien
ccacccaagtactcttcttggcttg

SEQ ID NO: 5141493 - DNA, 25 bp, Homo sapien
tctgaagtgaccctatccgagagca

SEQ ID NO: 5141494 - DNA, 25 bp, Homo sapien
tggtattatttcttgtgcctcttgc

SEQ ID NO: 5141495 - DNA, 25 bp, Homo sapien
agagcatgcgctgaacgtgatggat

SEQ ID NO: 5141496 - DNA, 25 bp, Homo sapien
caaagaggccttgccctcactctcc

SEQ ID NO: 5141497 - DNA, 25 bp, Homo sapien
aaccaaagaggccttgccctcactc

SEQ ID NO: 5141498 - DNA, 25 bp, Homo sapien
tcgaccgaacctcaaccaaagaggc

SEQ ID NO: 5141499 - DNA, 25 bp, Homo sapien
ctcgaccgaacctcaaccaaagagg

SEQ ID NO: 5141500 - DNA, 25 bp, Homo sapien
tggtccctgccgtgtccatggtcag

SEQ ID NO: 5141501 - DNA, 25 bp, Homo sapien
ctgtgatggtccctgccgtgtccat

SEQ ID NO: 5141502 - DNA, 25 bp, Homo sapien
gtgatggtccctgccgtgtccatgg

SEQ ID NO: 5141503 - DNA, 25 bp, Homo sapien
gatggtccctgccgtgtccatggtc

SEQ ID NO: 5141504 - DNA, 25 bp, Homo sapien
ttttttggagcaaaggactatggga

SEQ ID NO: 5141505 - DNA, 25 bp, Homo sapien
tttttggagcaaaggactatgggac

SEQ ID NO: 5141506 - DNA, 25 bp, Homo sapien
attttttttggagcaaaggactatg

SEQ ID NO: 5141507 - DNA, 25 bp, Homo sapien
tgtgaactcaccatgcaaccttgga

SEQ ID NO: 5141508 - DNA, 25 bp, Homo sapien
caagtttgctcccagtccttggaaa

SEQ ID NO: 5141509 - DNA, 25 bp, Homo sapien
tttggagggaggacaatccgactgt

SEQ ID NO: 5141510 - DNA, 25 bp, Homo sapien
ggaattcatctaaaggtaccccaca

SEQ ID NO: 5141511 - DNA, 25 bp, Homo sapien
ggagaaagacaaatgggcttctttg

SEQ ID NO: 5141512 - DNA, 25 bp, Homo sapien
gagaaagacaaatgggcttctttga

SEQ ID NO: 5141513 - DNA, 25 bp, Homo sapien
aggagaaagacaaatgggcttcttt

SEQ ID NO: 5141514 - DNA, 25 bp, Homo sapien
acaggatagtttagatagagtccac

SEQ ID NO: 5141515 - DNA, 25 bp, Homo sapien
gacgcttcaggtctgaagagttcat

SEQ ID NO: 5141516 - DNA, 25 bp, Homo sapien
actgattcttagaccttgctggctg

SEQ ID NO: 5141517 - DNA, 25 bp, Homo sapien
tctgttgttgtatggatagagtcca

SEQ ID NO: 5141518 - DNA, 25 bp, Homo sapien
gacaatagtggatgatgaaatacag

SEQ ID NO: 5141519 - DNA, 25 bp, Homo sapien
atgaaatacagaggccattttggcc

SEQ ID NO: 5141520 - DNA, 25 bp, Homo sapien
agaggccattttggccgtgcgctct

SEQ ID NO: 5141521 - DNA, 25 bp, Homo sapien
ctccaaagtgcactgtccttccaga

SEQ ID NO: 5141522 - DNA, 25 bp, Homo sapien
agattagaaccatacaccagggtat

SEQ ID NO: 5141523 - DNA, 25 bp, Homo sapien
tcaagattagaaccatacaccaggg

SEQ ID NO: 5141524 - DNA, 25 bp, Homo sapien
caagattagaaccatacaccagggt

SEQ ID NO: 5141525 - DNA, 25 bp, Homo sapien
aagattagaaccatacaccagggta

SEQ ID NO: 5141526 - DNA, 25 bp, Homo sapien
aacactctgctaatgcttggaaggg

SEQ ID NO: 5141527 - DNA, 25 bp, Homo sapien
tttacaaaacggcaaaacagcattc

SEQ ID NO: 5141528 - DNA, 25 bp, Homo sapien
gatggagtagatgtcgttatcccca

SEQ ID NO: 5141529 - DNA, 25 bp, Homo sapien
agaaagagggctccatactccagag

SEQ ID NO: 5141530 - DNA, 25 bp, Homo sapien
catattttgataagcggaggttggt

SEQ ID NO: 5141531 - DNA, 25 bp, Homo sapien
cctacgaacatattttgataagcgg

SEQ ID NO: 5141532 - DNA, 25 bp, Homo sapien
tgttctgaattttcctacgaacata

SEQ ID NO: 5141533 - DNA, 25 bp, Homo sapien
aaatggaacgtgcttgttctgaatt

SEQ ID NO: 5141534 - DNA, 25 bp, Homo sapien
ttaagtagttatcaaagtctgcctc

SEQ ID NO: 5141535 - DNA, 25 bp, Homo sapien
catattgtccaagggtaagccacat

SEQ ID NO: 5141536 - DNA, 25 bp, Homo sapien
aacttgtgccatcgcccttgggtca

SEQ ID NO: 5141537 - DNA, 25 bp, Homo sapien
gaatcagtgtccacaagagggtcat

SEQ ID NO: 5141538 - DNA, 25 bp, Homo sapien
tgggtcactctttaaagaatcagtg

SEQ ID NO: 5141539 - DNA, 25 bp, Homo sapien
tgtagcatagatgcaggcagggtca

SEQ ID NO: 5141540 - DNA, 25 bp, Homo sapien
taatcttctcaataggccactgtgg

SEQ ID NO: 5141541 - DNA, 25 bp, Homo sapien
gggtcaccacagtcttaatcttctc

SEQ ID NO: 5141542 - DNA, 25 bp, Homo sapien
gagccattggctcaacagagcacca

SEQ ID NO: 5141543 - DNA, 25 bp, Homo sapien
tctactatcagccttaaaacttgaa

SEQ ID NO: 5141544 - DNA, 25 bp, Homo sapien
tgaatctctgtactccctgcagtcc

SEQ ID NO: 5141545 - DNA, 25 bp, Homo sapien
gaaaatctggtgagtatacctctga

SEQ ID NO: 5141546 - DNA, 25 bp, Homo sapien
gtccctgagctcatattgttctact

SEQ ID NO: 5141547 - DNA, 25 bp, Homo sapien
gctgcttccaatctgaatgaggtcc

SEQ ID NO: 5141548 - DNA, 25 bp, Homo sapien
cagctgcttccaatctgaatgaggt

SEQ ID NO: 5141549 - DNA, 25 bp, Homo sapien
gaatgaggtccagattgttcacaga

SEQ ID NO: 5141550 - DNA, 25 bp, Homo sapien
tgttcacagacgactgtttctgtgg

SEQ ID NO: 5141551 - DNA, 25 bp, Homo sapien
ggtggccggagctgtctccgccccg

SEQ ID NO: 5141552 - DNA, 25 bp, Homo sapien
tggccggagctgtctccgccccgga

SEQ ID NO: 5141553 - DNA, 25 bp, Homo sapien
cccggaggcagcgtcggacgtccat

SEQ ID NO: 5141554 - DNA, 25 bp, Homo sapien
ctccgccccggaggcagcgtcggac

SEQ ID NO: 5141555 - DNA, 25 bp, Homo sapien
ccagcgaactgtgggtggaatcgcc

SEQ ID NO: 5141556 - DNA, 25 bp, Homo sapien
aactgtgggtggaatcgccgcaacg

SEQ ID NO: 5141557 - DNA, 25 bp, Homo sapien
cgaactgtgggtggaatcgccgcaa

SEQ ID NO: 5141558 - DNA, 25 bp, Homo sapien
ccagagccagcgaactgtgggtgga

SEQ ID NO: 5141559 - DNA, 25 bp, Homo sapien
ggcaccgcgcgccaagacccgccac

SEQ ID NO: 5141560 - DNA, 25 bp, Homo sapien
cgcgggggcgatggctgccctccct

SEQ ID NO: 5141561 - DNA, 25 bp, Homo sapien
ccttcgcgcaggcaccgcgcgccaa

SEQ ID NO: 5141562 - DNA, 25 bp, Homo sapien
cccagtgaccgcgggggcgatggct

SEQ ID NO: 5141563 - DNA, 25 bp, Homo sapien
acgtgcagggcgacgagaggccgct

SEQ ID NO: 5141564 - DNA, 25 bp, Homo sapien
atgccggtgcgctgctctccagccg

SEQ ID NO: 5141565 - DNA, 25 bp, Homo sapien
ggccgcctgcccatgccggtgcgct

SEQ ID NO: 5141566 - DNA, 25 bp, Homo sapien
gctgcgcgtaccctcagcagccctc

SEQ ID NO: 5141567 - DNA, 25 bp, Homo sapien
gtcctcgctgcgagcaggcgcactg

SEQ ID NO: 5141568 - DNA, 25 bp, Homo sapien
ctctgcaaccagagggctaggtcct

SEQ ID NO: 5141569 - DNA, 25 bp, Homo sapien
aaccagagggctaggtcctcgctgc

SEQ ID NO: 5141570 - DNA, 25 bp, Homo sapien
gcagcgacagccacccgccgctgct

SEQ ID NO: 5141571 - DNA, 25 bp, Homo sapien
gtgccgccggttgccgccaagggga

SEQ ID NO: 5141572 - DNA, 25 bp, Homo sapien
tgccgccggttgccgccaaggggac

SEQ ID NO: 5141573 - DNA, 25 bp, Homo sapien
ggctcctccagttgcccagtggttc

SEQ ID NO: 5141574 - DNA, 25 bp, Homo sapien
cggaggcagtggcgcccgcaggctc

SEQ ID NO: 5141575 - DNA, 25 bp, Homo sapien
gcaggctcctccagttgcccagtgg

SEQ ID NO: 5141576 - DNA, 25 bp, Homo sapien
tcctccagttgcccagtggttccat

SEQ ID NO: 5141577 - DNA, 25 bp, Homo sapien
gccagcaggatccaaagggtgatct

SEQ ID NO: 5141578 - DNA, 25 bp, Homo sapien
ggtaatccagcgtaaacacaggcag

SEQ ID NO: 5141579 - DNA, 25 bp, Homo sapien
gcgttcagcaaggtctccgccaggg

SEQ ID NO: 5141580 - DNA, 25 bp, Homo sapien
tcctcgaacagcgtcgttccgggag

SEQ ID NO: 5141581 - DNA, 25 bp, Homo sapien
ctcattagtcaggcgcacagcaggg

SEQ ID NO: 5141582 - DNA, 25 bp, Homo sapien
agctccggggttcgtcggcacctct

SEQ ID NO: 5141583 - DNA, 25 bp, Homo sapien
aaggcgcctctctcctgtagcatcc

SEQ ID NO: 5141584 - DNA, 25 bp, Homo sapien
ttatgcatagctccggggttcgtcg

SEQ ID NO: 5141585 - DNA, 25 bp, Homo sapien
gcaagcactcaggtgtccctggtcc

SEQ ID NO: 5141586 - DNA, 25 bp, Homo sapien
aagcactcaggtgtccctggtcccc

SEQ ID NO: 5141587 - DNA, 25 bp, Homo sapien
tgcaagcactcaggtgtccctggtc

SEQ ID NO: 5141588 - DNA, 25 bp, Homo sapien
gtgtccctggtccccttccatgcac

SEQ ID NO: 5141589 - DNA, 25 bp, Homo sapien
aatatacccttcactctacccatgg

SEQ ID NO: 5141590 - DNA, 25 bp, Homo sapien
tttggctgttcagaccactctctgc

SEQ ID NO: 5141591 - DNA, 25 bp, Homo sapien
taaagtagtagccagagacgttcca

SEQ ID NO: 5141592 - DNA, 25 bp, Homo sapien
ttccatagccaagcacaatgcaggg

SEQ ID NO: 5141593 - DNA, 25 bp, Homo sapien
ttgattgtccccactttaccactag

SEQ ID NO: 5141594 - DNA, 25 bp, Homo sapien
gactactgagccctgcgagtttaag

SEQ ID NO: 5141595 - DNA, 25 bp, Homo sapien
aatgtatctgagatgtgagcagcca

SEQ ID NO: 5141596 - DNA, 25 bp, Homo sapien
cacaacagcctatgacattgctaca

SEQ ID NO: 5141597 - DNA, 25 bp, Homo sapien
cattccagtgttccgtaagagaaaa

SEQ ID NO: 5141598 - DNA, 25 bp, Homo sapien
tagaatactggtgatgaaaagcgtg

SEQ ID NO: 5141599 - DNA, 25 bp, Homo sapien
gccgatgcacgcttctgccttagaa

SEQ ID NO: 5141600 - DNA, 25 bp, Homo sapien
tgatgaaaagcgtgggttgacattt

SEQ ID NO: 5141601 - DNA, 25 bp, Homo sapien
tgcccttggacatgcggagtattct

SEQ ID NO: 5141602 - DNA, 25 bp, Homo sapien
tcaacggatcttcggtgattccacc

SEQ ID NO: 5141603 - DNA, 25 bp, Homo sapien
taggactgcaggtataggtctcaca

SEQ ID NO: 5141604 - DNA, 25 bp, Homo sapien
gctattaaatactgagagctgccct

SEQ ID NO: 5141605 - DNA, 25 bp, Homo sapien
cttccacaactgtggaaaattccat

SEQ ID NO: 5141606 - DNA, 25 bp, Homo sapien
taacttccacaactgtggaaaattc

SEQ ID NO: 5141607 - DNA, 25 bp, Homo sapien
tctttttaacttccacaactgtgga

SEQ ID NO: 5141608 - DNA, 25 bp, Homo sapien
acttccacaactgtggaaaattcca

SEQ ID NO: 5141609 - DNA, 25 bp, Homo sapien
tggttccctttgatagaaccagtgg

SEQ ID NO: 5141610 - DNA, 25 bp, Homo sapien
taaaattggagtgctataggtacac

SEQ ID NO: 5141611 - DNA, 25 bp, Homo sapien
cacacaacttgggttatggaggaat

SEQ ID NO: 5141612 - DNA, 25 bp, Homo sapien
caatggcttcccagattacagtgca

SEQ ID NO: 5141613 - DNA, 25 bp, Homo sapien
tctcaggcactattgtgggcaactt

SEQ ID NO: 5141614 - DNA, 25 bp, Homo sapien
cactattgtgggcaacttgtgatac

SEQ ID NO: 5141615 - DNA, 25 bp, Homo sapien
ttgtgggcaacttgtgatacagatg

SEQ ID NO: 5141616 - DNA, 25 bp, Homo sapien
cagctctcaggcactattgtgggca

SEQ ID NO: 5141617 - DNA, 25 bp, Homo sapien
ttctcaaagaatgggcgagtgggca

SEQ ID NO: 5141618 - DNA, 25 bp, Homo sapien
gcaaagtgatgtcgctgaggccgaa

SEQ ID NO: 5141619 - DNA, 25 bp, Homo sapien
cgaatgcttcgatctggcagatacc

SEQ ID NO: 5141620 - DNA, 25 bp, Homo sapien
gccacaggatcgacagctgagatta

SEQ ID NO: 5141621 - DNA, 25 bp, Homo sapien
ggacacagagctctttggaggtatg

SEQ ID NO: 5141622 - DNA, 25 bp, Homo sapien
taactggtggacacagagctctttg

SEQ ID NO: 5141623 - DNA, 25 bp, Homo sapien
aggtatgtgggtaaaaggagaggct

SEQ ID NO: 5141624 - DNA, 25 bp, Homo sapien
aaggagaggctttctcatcccttct

SEQ ID NO: 5141625 - DNA, 25 bp, Homo sapien
ccagtgcactgaagagttctctgag

SEQ ID NO: 5141626 - DNA, 25 bp, Homo sapien
tcaaatctatcaaaggtacagccag

SEQ ID NO: 5141627 - DNA, 25 bp, Homo sapien
tactccttccacagattaacgggca

SEQ ID NO: 5141628 - DNA, 25 bp, Homo sapien
tctgcagctgggtcgcacattccta

SEQ ID NO: 5141629 - DNA, 25 bp, Homo sapien
cttataaggtcctattgtggagcca

SEQ ID NO: 5141630 - DNA, 25 bp, Homo sapien
tacgcatcaggacaggtacccaaga

SEQ ID NO: 5141631 - DNA, 25 bp, Homo sapien
tataaggtcctattgtggagccaca

SEQ ID NO: 5141632 - DNA, 25 bp, Homo sapien
cacatgacagaagggacctacgcat

SEQ ID NO: 5141633 - DNA, 25 bp, Homo sapien
ggtgaatcgagtagtaaatgccgct

SEQ ID NO: 5141634 - DNA, 25 bp, Homo sapien
aaatgccgctataaagcccaagaag

SEQ ID NO: 5141635 - DNA, 25 bp, Homo sapien
tcatctggcaaaacgacttgaacaa

SEQ ID NO: 5141636 - DNA, 25 bp, Homo sapien
caaacagtggctcgatcactcggat

SEQ ID NO: 5141637 - DNA, 25 bp, Homo sapien
tgacagcggcatttcctgatcctcc

SEQ ID NO: 5141638 - DNA, 25 bp, Homo sapien
cgtgacctacagctttcacccagag

SEQ ID NO: 5141639 - DNA, 25 bp, Homo sapien
cagtcagactggagccgtgacctac

SEQ ID NO: 5141640 - DNA, 25 bp, Homo sapien
tccttaatcaaggattcctcagccc

SEQ ID NO: 5141641 - DNA, 25 bp, Homo sapien
cagattttgataggtcttaggctcc

SEQ ID NO: 5141642 - DNA, 25 bp, Homo sapien
caaaattcgcagatgcagcctgcta

SEQ ID NO: 5141643 - DNA, 25 bp, Homo sapien
gagatgaggcatgcacaaaattcgc

SEQ ID NO: 5141644 - DNA, 25 bp, Homo sapien
gaatgtgtgctttgagactatggac

SEQ ID NO: 5141645 - DNA, 25 bp, Homo sapien
tcctcactcggagaagacttctgct

SEQ ID NO: 5141646 - DNA, 25 bp, Homo sapien
gctgaatactggtcatgatctgcaa

SEQ ID NO: 5141647 - DNA, 25 bp, Homo sapien
cagtggtaaccatgccataagctga

SEQ ID NO: 5141648 - DNA, 25 bp, Homo sapien
ccagtacagtgaccctagcttagct

SEQ ID NO: 5141649 - DNA, 25 bp, Homo sapien
tacgaaggtcctgtagaatgaaaca

SEQ ID NO: 5141650 - DNA, 25 bp, Homo sapien
taaggagacacggttactatgaagt

SEQ ID NO: 5141651 - DNA, 25 bp, Homo sapien
tgacagctcatggtaggtccggtct

SEQ ID NO: 5141652 - DNA, 25 bp, Homo sapien
ttaggatgagcttggtgacagctca

SEQ ID NO: 5141653 - DNA, 25 bp, Homo sapien
ccactcgtggttcttgcccacggta

SEQ ID NO: 5141654 - DNA, 25 bp, Homo sapien
cttgatggtcgtgtaggatttctga

SEQ ID NO: 5141655 - DNA, 25 bp, Homo sapien
tggttcttgcccacggtagacacac

SEQ ID NO: 5141656 - DNA, 25 bp, Homo sapien
gatacattttcttctacgtacttat

SEQ ID NO: 5141657 - DNA, 25 bp, Homo sapien
gatgaactggtccttaaaggtcagg

SEQ ID NO: 5141658 - DNA, 25 bp, Homo sapien
caaaacagatggcacctcgaagtcc

SEQ ID NO: 5141659 - DNA, 25 bp, Homo sapien
tccggaacctattaatgacctgagt

SEQ ID NO: 5141660 - DNA, 25 bp, Homo sapien
ggagaaacactaacgcaaaacagat

SEQ ID NO: 5141661 - DNA, 25 bp, Homo sapien
caagagttagcagtcatccttcgac

SEQ ID NO: 5141662 - DNA, 25 bp, Homo sapien
agaactcagtgtcctcagtgttgga

SEQ ID NO: 5141663 - DNA, 25 bp, Homo sapien
gaaggtggtcatcttaactcaggaa

SEQ ID NO: 5141664 - DNA, 25 bp, Homo sapien
tctggcccatattactgcgcgaaag

SEQ ID NO: 5141665 - DNA, 25 bp, Homo sapien
gacctcttgacatcaagaaactcca

SEQ ID NO: 5141666 - DNA, 25 bp, Homo sapien
tcttcactgacagcttgttgtttct

SEQ ID NO: 5141667 - DNA, 25 bp, Homo sapien
ccaccagtggtcgaatagttattcc

SEQ ID NO: 5141668 - DNA, 25 bp, Homo sapien
tgtttcttattggacctcttgacat

SEQ ID NO: 5141669 - DNA, 25 bp, Homo sapien
gttgtgaccccaatgtccacaaaca

SEQ ID NO: 5141670 - DNA, 25 bp, Homo sapien
caattccagtcttcacatgatcaaa

SEQ ID NO: 5141671 - DNA, 25 bp, Homo sapien
ttgtctctccaaaagttgtgacccc

SEQ ID NO: 5141672 - DNA, 25 bp, Homo sapien
ttccagtcttcacatgatcaaacaa

SEQ ID NO: 5141673 - DNA, 25 bp, Homo sapien
gatgtgtgcttagggcagattcatg

SEQ ID NO: 5141674 - DNA, 25 bp, Homo sapien
cagcctttggatgtgtgcttagggc

SEQ ID NO: 5141675 - DNA, 25 bp, Homo sapien
gagataatgtctctgcctgaaagac

SEQ ID NO: 5141676 - DNA, 25 bp, Homo sapien
aagacagacgtagccagactttctc

SEQ ID NO: 5141677 - DNA, 25 bp, Homo sapien
aatccacagcataaggattccagag

SEQ ID NO: 5141678 - DNA, 25 bp, Homo sapien
taagaagtcttgtgtcagcaccaca

SEQ ID NO: 5141679 - DNA, 25 bp, Homo sapien
gatctcagcagaacacagttttaag

SEQ ID NO: 5141680 - DNA, 25 bp, Homo sapien
gatcaaatgcctcaagaattctctg

SEQ ID NO: 5141681 - DNA, 25 bp, Homo sapien
tgttaaagtctaatccccagtagct

SEQ ID NO: 5141682 - DNA, 25 bp, Homo sapien
tcggccaaaccccagatatgagctt

SEQ ID NO: 5141683 - DNA, 25 bp, Homo sapien
tctgggcctcggttcttaatcctct

SEQ ID NO: 5141684 - DNA, 25 bp, Homo sapien
tcagcaaacgatgactccaccaggt

SEQ ID NO: 5141685 - DNA, 25 bp, Homo sapien
gatacaatacttgactttggttggt

SEQ ID NO: 5141686 - DNA, 25 bp, Homo sapien
tttcccgaatcaaaagcttccgcag

SEQ ID NO: 5141687 - DNA, 25 bp, Homo sapien
gatgcaaatgtagggacagtactta

SEQ ID NO: 5141688 - DNA, 25 bp, Homo sapien
gacagtacttatcatcccagtctct

SEQ ID NO: 5141689 - DNA, 25 bp, Homo sapien
tcttgataagagttctcgaatttca

SEQ ID NO: 5141690 - DNA, 25 bp, Homo sapien
atcagtttcactggacgtgaccttc

SEQ ID NO: 5141691 - DNA, 25 bp, Homo sapien
cactggacgtgaccttccttatttt

SEQ ID NO: 5141692 - DNA, 25 bp, Homo sapien
cgctgacggatttgatagagatttc

SEQ ID NO: 5141693 - DNA, 25 bp, Homo sapien
tgtgttctcgattcaagctgctgtc

SEQ ID NO: 5141694 - DNA, 25 bp, Homo sapien
gtcgccggcgaatcagaatctcctt

SEQ ID NO: 5141695 - DNA, 25 bp, Homo sapien
gctttctcgcaaactgtgtcgccgg

SEQ ID NO: 5141696 - DNA, 25 bp, Homo sapien
gtctctcacttgtgtcggctgtcag

SEQ ID NO: 5141697 - DNA, 25 bp, Homo sapien
gtaaggataaatatcgggaggttga

SEQ ID NO: 5141698 - DNA, 25 bp, Homo sapien
gataaatatcgggaggttgaagtgg

SEQ ID NO: 5141699 - DNA, 25 bp, Homo sapien
aaggataaatatcgggaggttgaag

SEQ ID NO: 5141700 - DNA, 25 bp, Homo sapien
aggataaatatcgggaggttgaagt

SEQ ID NO: 5141701 - DNA, 25 bp, Homo sapien
gggcgggatgccttcagtcaaactg

SEQ ID NO: 5141702 - DNA, 25 bp, Homo sapien
tagtaagcctgacgtctgggtgccc

SEQ ID NO: 5141703 - DNA, 25 bp, Homo sapien
tgcaaattgagcacggtggtcccgg

SEQ ID NO: 5141704 - DNA, 25 bp, Homo sapien
gttctggcaagaagcgcctggctct

SEQ ID NO: 5141705 - DNA, 25 bp, Homo sapien
ttccaggttccgatgccctccagac

SEQ ID NO: 5141706 - DNA, 25 bp, Homo sapien
ccaaatcgggctttccggcttccag

SEQ ID NO: 5141707 - DNA, 25 bp, Homo sapien
ttccggcttccaggttccgatgccc

SEQ ID NO: 5141708 - DNA, 25 bp, Homo sapien
gcttctcactcccaaatcgggcttt

SEQ ID NO: 5141709 - DNA, 25 bp, Homo sapien
tttatccgtggcatgaatctgtcgc

SEQ ID NO: 5141710 - DNA, 25 bp, Homo sapien
aatgcagaggcatgttccagtcaag

SEQ ID NO: 5141711 - DNA, 25 bp, Homo sapien
tccacgctgagcttaggagtcaccc

SEQ ID NO: 5141712 - DNA, 25 bp, Homo sapien
tactgaaagcggaatttggtctacc

SEQ ID NO: 5141713 - DNA, 25 bp, Homo sapien
tcaagtgttgtttggacgaacgaaa

SEQ ID NO: 5141714 - DNA, 25 bp, Homo sapien
taaatgcaaaacgtgctgagactcg

SEQ ID NO: 5141715 - DNA, 25 bp, Homo sapien
gggctacggctctctctactacaga

SEQ ID NO: 5141716 - DNA, 25 bp, Homo sapien
gtacaccccaccataaagctgagca

SEQ ID NO: 5141717 - DNA, 25 bp, Homo sapien
cctcagcggataatgccaacagctg

SEQ ID NO: 5141718 - DNA, 25 bp, Homo sapien
caagcctcagcggataatgccaaca

SEQ ID NO: 5141719 - DNA, 25 bp, Homo sapien
cagcggataatgccaacagctgctt

SEQ ID NO: 5141720 - DNA, 25 bp, Homo sapien
aagcctcagcggataatgccaacag

SEQ ID NO: 5141721 - DNA, 25 bp, Homo sapien
caaggagccatggttatgccacaca

SEQ ID NO: 5141722 - DNA, 25 bp, Homo sapien
tcagctagacgcagagtggatgatg

SEQ ID NO: 5141723 - DNA, 25 bp, Homo sapien
aatgatgtgccagcgtgacactgaa

SEQ ID NO: 5141724 - DNA, 25 bp, Homo sapien
tgcatatttgacctgcacgccccag

SEQ ID NO: 5141725 - DNA, 25 bp, Homo sapien
ccacagggcaatcgcaggagaggtt

SEQ ID NO: 5141726 - DNA, 25 bp, Homo sapien
ttagaaagagctctctagccgcagc

SEQ ID NO: 5141727 - DNA, 25 bp, Homo sapien
tagccgcagcaaggaggattaactg

SEQ ID NO: 5141728 - DNA, 25 bp, Homo sapien
tctatcaggagtgagaatcagtcca

SEQ ID NO: 5141729 - DNA, 25 bp, Homo sapien
ctttccagtgtgtcaggttgagcca

SEQ ID NO: 5141730 - DNA, 25 bp, Homo sapien
tccaggatttgggttccatagagca

SEQ ID NO: 5141731 - DNA, 25 bp, Homo sapien
tctgccagccataactgcttgggaa

SEQ ID NO: 5141732 - DNA, 25 bp, Homo sapien
cagggtgtgtctagtcacaggagtc

SEQ ID NO: 5141733 - DNA, 25 bp, Homo sapien
gcattccagtcaggttgcatccttc

SEQ ID NO: 5141734 - DNA, 25 bp, Homo sapien
ggagtcatgccagaccagaacttga

SEQ ID NO: 5141735 - DNA, 25 bp, Homo sapien
tggactaaaccacttagatgctggg

SEQ ID NO: 5141736 - DNA, 25 bp, Homo sapien
gatgctactgtgtcttgtgttaaga

SEQ ID NO: 5141737 - DNA, 25 bp, Homo sapien
gcacccgcggagctgccaggtagca

SEQ ID NO: 5141738 - DNA, 25 bp, Homo sapien
cagcaccggccacgcacccgcggag

SEQ ID NO: 5141739 - DNA, 25 bp, Homo sapien
actcccagccagcaccggccacgca

SEQ ID NO: 5141740 - DNA, 25 bp, Homo sapien
accggccacgcacccgcggagctgc

SEQ ID NO: 5141741 - DNA, 25 bp, Homo sapien
gaaaattggacatttgcctgtcact

SEQ ID NO: 5141742 - DNA, 25 bp, Homo sapien
cctgtcacttgaaactcttctagtt

SEQ ID NO: 5141743 - DNA, 25 bp, Homo sapien
catggaggaggtaaaaggtgtcttt

SEQ ID NO: 5141744 - DNA, 25 bp, Homo sapien
aaattggacatttgcctgtcacttg

SEQ ID NO: 5141745 - DNA, 25 bp, Homo sapien
aaggctgtcctagctcatgttttgg

SEQ ID NO: 5141746 - DNA, 25 bp, Homo sapien
tggtaagacacctagtttctcagaa

SEQ ID NO: 5141747 - DNA, 25 bp, Homo sapien
taatatttttgagttggcagaatct

SEQ ID NO: 5141748 - DNA, 25 bp, Homo sapien
gttttggtggcttctcgctcacgcc

SEQ ID NO: 5141749 - DNA, 25 bp, Homo sapien
acatctccccacttcagttgcaaga

SEQ ID NO: 5141750 - DNA, 25 bp, Homo sapien
ccaaagaagatagcgatatttagtc

SEQ ID NO: 5141751 - DNA, 25 bp, Homo sapien
ataatccgatccaaaagccaccaaa

SEQ ID NO: 5141752 - DNA, 25 bp, Homo sapien
caagaagccaataatccgatccaaa

SEQ ID NO: 5141753 - DNA, 25 bp, Homo sapien
gaacccttcatggtgaaaagtgacg

SEQ ID NO: 5141754 - DNA, 25 bp, Homo sapien
cctccagaagaacccttcatggtga

SEQ ID NO: 5141755 - DNA, 25 bp, Homo sapien
cattaaaccaacacctccagaagaa

SEQ ID NO: 5141756 - DNA, 25 bp, Homo sapien
catggtgaaaagtgacgttctctat

SEQ ID NO: 5141757 - DNA, 25 bp, Homo sapien
agttgtgctcgcctctcatgaaggg

SEQ ID NO: 5141758 - DNA, 25 bp, Homo sapien
tgcagttcttggacggtggctgatt

SEQ ID NO: 5141759 - DNA, 25 bp, Homo sapien
tacggagacaggtaagcatgtgtgc

SEQ ID NO: 5141760 - DNA, 25 bp, Homo sapien
ctgcagagtcataggaggtcgagtt

SEQ ID NO: 5141761 - DNA, 25 bp, Homo sapien
cctatgggatattacacacacagag

SEQ ID NO: 5141762 - DNA, 25 bp, Homo sapien
caatattctcaactgtaggactcgt

SEQ ID NO: 5141763 - DNA, 25 bp, Homo sapien
tctgtatcaacccttagcaagttat

SEQ ID NO: 5141764 - DNA, 25 bp, Homo sapien
tttataggcagctagtaaattacaa

SEQ ID NO: 5141765 - DNA, 25 bp, Homo sapien
catcattctgatacaacccctttgt

SEQ ID NO: 5141766 - DNA, 25 bp, Homo sapien
catccgtgtgcggtttcacattccc

SEQ ID NO: 5141767 - DNA, 25 bp, Homo sapien
atccgtgtgcggtttcacattccca

SEQ ID NO: 5141768 - DNA, 25 bp, Homo sapien
tgttggctgattgaaaaggtctcta

SEQ ID NO: 5141769 - DNA, 25 bp, Homo sapien
tattccaagccgcagtgttggctga

SEQ ID NO: 5141770 - DNA, 25 bp, Homo sapien
tggctgattgaaaaggtctctactt

SEQ ID NO: 5141771 - DNA, 25 bp, Homo sapien
ccgcagtgttggctgattgaaaagg

SEQ ID NO: 5141772 - DNA, 25 bp, Homo sapien
gccataatgcttcaagataagagag

SEQ ID NO: 5141773 - DNA, 25 bp, Homo sapien
gaagccataatgcttcaagataaga

SEQ ID NO: 5141774 - DNA, 25 bp, Homo sapien
taatgcttcaagataagagaggccc

SEQ ID NO: 5141775 - DNA, 25 bp, Homo sapien
ttcaagataagagaggcccagacag

SEQ ID NO: 5141776 - DNA, 25 bp, Homo sapien
gtttgccatgaggaatcaaagaaga

SEQ ID NO: 5141777 - DNA, 25 bp, Homo sapien
ggatttggtttgccatgaggaatca

SEQ ID NO: 5141778 - DNA, 25 bp, Homo sapien
tggtttgccatgaggaatcaaagaa

SEQ ID NO: 5141779 - DNA, 25 bp, Homo sapien
tttggtttgccatgaggaatcaaag

SEQ ID NO: 5141780 - DNA, 25 bp, Homo sapien
cgtaccaagataaagcaagatgtta

SEQ ID NO: 5141781 - DNA, 25 bp, Homo sapien
gataaataaacagtacaccgaggat

SEQ ID NO: 5141782 - DNA, 25 bp, Homo sapien
tggtgggatgggaaccctctgtact

SEQ ID NO: 5141783 - DNA, 25 bp, Homo sapien
gcttacaggcaaccaagatgtgctt

SEQ ID NO: 5141784 - DNA, 25 bp, Homo sapien
gtgagcttgataagtaaaaatccca

SEQ ID NO: 5141785 - DNA, 25 bp, Homo sapien
tgatggtgagcttgataagtaaaaa

SEQ ID NO: 5141786 - DNA, 25 bp, Homo sapien
aatgtgatggtgagcttgataagta

SEQ ID NO: 5141787 - DNA, 25 bp, Homo sapien
ataaaatgtgatggtgagcttgata

SEQ ID NO: 5141788 - DNA, 25 bp, Homo sapien
tgagtttcttcacacagggttgaga

SEQ ID NO: 5141789 - DNA, 25 bp, Homo sapien
cttcacacagggttgagaacatgcc

SEQ ID NO: 5141790 - DNA, 25 bp, Homo sapien
gtttcttcacacagggttgagaaca

SEQ ID NO: 5141791 - DNA, 25 bp, Homo sapien
tcttcacacagggttgagaacatgc

SEQ ID NO: 5141792 - DNA, 25 bp, Homo sapien
tgttgcctcgctttaggcaatgtgc

SEQ ID NO: 5141793 - DNA, 25 bp, Homo sapien
ggcaggtctaaaaatacagtagtgc

SEQ ID NO: 5141794 - DNA, 25 bp, Homo sapien
tcgcagcaaatgagggccgccagca

SEQ ID NO: 5141795 - DNA, 25 bp, Homo sapien
tcttggcagtgtcgggcaggtctaa

SEQ ID NO: 5141796 - DNA, 25 bp, Homo sapien
gggtactcaagaccattaatcagag

SEQ ID NO: 5141797 - DNA, 25 bp, Homo sapien
taatcagagacaccaatccaactgg

SEQ ID NO: 5141798 - DNA, 25 bp, Homo sapien
caatccaactggtatcagagtatcc

SEQ ID NO: 5141799 - DNA, 25 bp, Homo sapien
gtatccctgttgtaagtatacagag

SEQ ID NO: 5141800 - DNA, 25 bp, Homo sapien
agattgtcacagtcagttgctttca

SEQ ID NO: 5141801 - DNA, 25 bp, Homo sapien
aaatacacttagattgtgtacacag

SEQ ID NO: 5141802 - DNA, 25 bp, Homo sapien
tacacagcagattgtcacagtcagt

SEQ ID NO: 5141803 - DNA, 25 bp, Homo sapien
ttgtgtacacagcagattgtcacag

SEQ ID NO: 5141804 - DNA, 25 bp, Homo sapien
caggactgcccagaaaccacggtaa

SEQ ID NO: 5141805 - DNA, 25 bp, Homo sapien
aaaagcttgcgatgactacagcaac

SEQ ID NO: 5141806 - DNA, 25 bp, Homo sapien
gatcaaaaagcttgcgatgactaca

SEQ ID NO: 5141807 - DNA, 25 bp, Homo sapien
cacagatgatcaaaaagcttgcgat

SEQ ID NO: 5141808 - DNA, 25 bp, Homo sapien
gcagcaatatatgagcctcccccag

SEQ ID NO: 5141809 - DNA, 25 bp, Homo sapien
ctgagcactgatgaaatgacactgg

SEQ ID NO: 5141810 - DNA, 25 bp, Homo sapien
tccacaaaggtgaatcatagaaacc

SEQ ID NO: 5141811 - DNA, 25 bp, Homo sapien
gaggctggccttagaaaccacaaag

SEQ ID NO: 5141812 - DNA, 25 bp, Homo sapien
gccagccacgaaacctgaacatatt

SEQ ID NO: 5141813 - DNA, 25 bp, Homo sapien
ttctgtgtaaaaattggccacaaag

SEQ ID NO: 5141814 - DNA, 25 bp, Homo sapien
acagcctgatatcagcatccctctg

SEQ ID NO: 5141815 - DNA, 25 bp, Homo sapien
gaatgtctaaacacagtgctgctga

SEQ ID NO: 5141816 - DNA, 25 bp, Homo sapien
gcatccctctgccatgcacggaatg

SEQ ID NO: 5141817 - DNA, 25 bp, Homo sapien
tgctctgagcctgttgacccagcaa

SEQ ID NO: 5141818 - DNA, 25 bp, Homo sapien
aacccctgtgtatctaagagttctc

SEQ ID NO: 5141819 - DNA, 25 bp, Homo sapien
gcaggaggagatgcgtgacaacccc

SEQ ID NO: 5141820 - DNA, 25 bp, Homo sapien
ttcctatcacatccaatgccacggg

SEQ ID NO: 5141821 - DNA, 25 bp, Homo sapien
aagagttctctgtgagtccacgtta

SEQ ID NO: 5141822 - DNA, 25 bp, Homo sapien
ctgcagacggctgtgcttcaggcat

SEQ ID NO: 5141823 - DNA, 25 bp, Homo sapien
agctgcagacggctgtgcttcaggc

SEQ ID NO: 5141824 - DNA, 25 bp, Homo sapien
gctgcagacggctgtgcttcaggca

SEQ ID NO: 5141825 - DNA, 25 bp, Homo sapien
cctctgcgagcaacatgttcagcct

SEQ ID NO: 5141826 - DNA, 25 bp, Homo sapien
tgttgcttggtttctgcgagctgtt

SEQ ID NO: 5141827 - DNA, 25 bp, Homo sapien
aatgagcacctgaactatgttgctt

SEQ ID NO: 5141828 - DNA, 25 bp, Homo sapien
atgaggagcctctgcgagcaacatg

SEQ ID NO: 5141829 - DNA, 25 bp, Homo sapien
ctaagccgtcctgctcttgacttgc

SEQ ID NO: 5141830 - DNA, 25 bp, Homo sapien
aggctgtcggcagttcttcctaagc

SEQ ID NO: 5141831 - DNA, 25 bp, Homo sapien
tcacaggatagacatagagacagca

SEQ ID NO: 5141832 - DNA, 25 bp, Homo sapien
tagacggcagagctgcatgtgcctg

SEQ ID NO: 5141833 - DNA, 25 bp, Homo sapien
acagaaggggtgaaatccaggcagt

SEQ ID NO: 5141834 - DNA, 25 bp, Homo sapien
gaaatagtaatccagctagcaaaga

SEQ ID NO: 5141835 - DNA, 25 bp, Homo sapien
tttcggtagctttccatgtcagcca

SEQ ID NO: 5141836 - DNA, 25 bp, Homo sapien
gacatacagcatcaccaccaatgaa

SEQ ID NO: 5141837 - DNA, 25 bp, Homo sapien
tagtgatgtatctgaatatgccatc

SEQ ID NO: 5141838 - DNA, 25 bp, Homo sapien
gatgatagctttcaccaagtccaag

SEQ ID NO: 5141839 - DNA, 25 bp, Homo sapien
tattcaagcctttgccgaaagcagc

SEQ ID NO: 5141840 - DNA, 25 bp, Homo sapien
tccagaatgcaaatacgagctaggc

SEQ ID NO: 5141841 - DNA, 25 bp, Homo sapien
taaagaactaggtccttgacagcac

SEQ ID NO: 5141842 - DNA, 25 bp, Homo sapien
tgaaacagttaaagtggcactcagg

SEQ ID NO: 5141843 - DNA, 25 bp, Homo sapien
agtttccacttctggtggagtccca

SEQ ID NO: 5141844 - DNA, 25 bp, Homo sapien
gaccttcagacatatccagccaatt

SEQ ID NO: 5141845 - DNA, 25 bp, Homo sapien
caataatagattgctgttcccaaag

SEQ ID NO: 5141846 - DNA, 25 bp, Homo sapien
tattcagaatccgtgcaggatgcca

SEQ ID NO: 5141847 - DNA, 25 bp, Homo sapien
taacagtggcagtctctctttagaa

SEQ ID NO: 5141848 - DNA, 25 bp, Homo sapien
tataaagttcaaccgtccaattgcc

SEQ ID NO: 5141849 - DNA, 25 bp, Homo sapien
catagctgaatcctatgggcaggag

SEQ ID NO: 5141850 - DNA, 25 bp, Homo sapien
taaataggatgatcatgggatgttt

SEQ ID NO: 5141851 - DNA, 25 bp, Homo sapien
ttaaataggatgatcatgggatgtt

SEQ ID NO: 5141852 - DNA, 25 bp, Homo sapien
ggctttacatgttgtgactccccag

SEQ ID NO: 5141853 - DNA, 25 bp, Homo sapien
tatttctgacttctccgcaggctca

SEQ ID NO: 5141854 - DNA, 25 bp, Homo sapien
tgttttcccgggtcttcagaatgct

SEQ ID NO: 5141855 - DNA, 25 bp, Homo sapien
ccatggttctgctctgcttcaaaga

SEQ ID NO: 5141856 - DNA, 25 bp, Homo sapien
gatgcagaagttttctctctaccac

SEQ ID NO: 5141857 - DNA, 25 bp, Homo sapien
taccacatacctggatgccctcata

SEQ ID NO: 5141858 - DNA, 25 bp, Homo sapien
ctggatgccctcataaatgttgtga

SEQ ID NO: 5141859 - DNA, 25 bp, Homo sapien
gagggcatccgggtaggcttcagat

SEQ ID NO: 5141860 - DNA, 25 bp, Homo sapien
gaacaatggtgcattcaccaagtct

SEQ ID NO: 5141861 - DNA, 25 bp, Homo sapien
tctagattcctctgtagaagagtta

SEQ ID NO: 5141862 - DNA, 25 bp, Homo sapien
ggtgcattcaccaagtctagattcc

SEQ ID NO: 5141863 - DNA, 25 bp, Homo sapien
tgcgaagacggagtctacttttttc

SEQ ID NO: 5141864 - DNA, 25 bp, Homo sapien
taaagctgctgcgtgtcattgctgc

SEQ ID NO: 5141865 - DNA, 25 bp, Homo sapien
tcttctcccggttttaatgactcca

SEQ ID NO: 5141866 - DNA, 25 bp, Homo sapien
gattaatacccagaccctggtgccc

SEQ ID NO: 5141867 - DNA, 25 bp, Homo sapien
tggagctctgccacacgattaatac

SEQ ID NO: 5141868 - DNA, 25 bp, Homo sapien
cagaggctgggacaataaggacttt

SEQ ID NO: 5141869 - DNA, 25 bp, Homo sapien
taagcccactgtaatgcaggtccag

SEQ ID NO: 5141870 - DNA, 25 bp, Homo sapien
tgaagacgtttcacgcagaggctgg

SEQ ID NO: 5141871 - DNA, 25 bp, Homo sapien
gaggtaaaggtcaatataagcccac

SEQ ID NO: 5141872 - DNA, 25 bp, Homo sapien
tatctatggagcttggcttctccag

SEQ ID NO: 5141873 - DNA, 25 bp, Homo sapien
tagacctaggatcccatgcacatgc

SEQ ID NO: 5141874 - DNA, 25 bp, Homo sapien
ccctctggcaagattatatctatgg

SEQ ID NO: 5141875 - DNA, 25 bp, Homo sapien
tcttgctgccaagcctgtagaccta

SEQ ID NO: 5141876 - DNA, 25 bp, Homo sapien
ctactctgggtgggggctcttgttt

SEQ ID NO: 5141877 - DNA, 25 bp, Homo sapien
tctctccctatttcagactctcctt

SEQ ID NO: 5141878 - DNA, 25 bp, Homo sapien
ctgtcttctctttaatcccaaacca

SEQ ID NO: 5141879 - DNA, 25 bp, Homo sapien
aagccaatgccaacttttggacctg

SEQ ID NO: 5141880 - DNA, 25 bp, Homo sapien
ccaacttttggacctgtcttctctt

SEQ ID NO: 5141881 - DNA, 25 bp, Homo sapien
gcaaaaagcgagctgcaaagtgcgt

SEQ ID NO: 5141882 - DNA, 25 bp, Homo sapien
aagtgcgttctttagccccagctgg

SEQ ID NO: 5141883 - DNA, 25 bp, Homo sapien
gatcttctgagccaggcaaaaagcg

SEQ ID NO: 5141884 - DNA, 25 bp, Homo sapien
gaggcctgccagtgtaagtgagtct

SEQ ID NO: 5141885 - DNA, 25 bp, Homo sapien
ctagcttaattgcatcatggagata

SEQ ID NO: 5141886 - DNA, 25 bp, Homo sapien
atatgggtcatccagaacttctatt

SEQ ID NO: 5141887 - DNA, 25 bp, Homo sapien
cttcttctcaaatgtaggtacctaa

SEQ ID NO: 5141888 - DNA, 25 bp, Homo sapien
ctaagtgtgactttagttgtatttc

SEQ ID NO: 5141889 - DNA, 25 bp, Homo sapien
ccctaggacattagtgtacaccgct

SEQ ID NO: 5141890 - DNA, 25 bp, Homo sapien
gtgtacaccgctgtagacttcataa

SEQ ID NO: 5141891 - DNA, 25 bp, Homo sapien
cacatacaatgagcctaggtctaca

SEQ ID NO: 5141892 - DNA, 25 bp, Homo sapien
ggactgaatgcgaagccctaggaca

SEQ ID NO: 5141893 - DNA, 25 bp, Homo sapien
tgagtagagtgcataacaggagaag

SEQ ID NO: 5141894 - DNA, 25 bp, Homo sapien
tatggatcatcaagtcaccaatgtg

SEQ ID NO: 5141895 - DNA, 25 bp, Homo sapien
aatgtgacccgaactgcctatcagg

SEQ ID NO: 5141896 - DNA, 25 bp, Homo sapien
tccagcccatttattgagtgaccca

SEQ ID NO: 5141897 - DNA, 25 bp, Homo sapien
gcagccgaagcagtgttaatgacat

SEQ ID NO: 5141898 - DNA, 25 bp, Homo sapien
gccttcattattctgacagcccagg

SEQ ID NO: 5141899 - DNA, 25 bp, Homo sapien
acagcccaggtgaaagggtgcccag

SEQ ID NO: 5141900 - DNA, 25 bp, Homo sapien
ttaacccgcagagcagtgaacagag

SEQ ID NO: 5141901 - DNA, 25 bp, Homo sapien
caggatggctgtccatcctggggac

SEQ ID NO: 5141902 - DNA, 25 bp, Homo sapien
gggagaggccaattttcaaaagctg

SEQ ID NO: 5141903 - DNA, 25 bp, Homo sapien
cagttattagtgtggacgacccctc

SEQ ID NO: 5141904 - DNA, 25 bp, Homo sapien
cattagtatgcaaaggccgagcaga

SEQ ID NO: 5141905 - DNA, 25 bp, Homo sapien
caaagagagtgtcaggtgcagtgtt

SEQ ID NO: 5141906 - DNA, 25 bp, Homo sapien
tagtcgacttcttcgcactcgcgtg

SEQ ID NO: 5141907 - DNA, 25 bp, Homo sapien
tctgaatgtacatcgagcaccccaa

SEQ ID NO: 5141908 - DNA, 25 bp, Homo sapien
catagggcctctgctcaaatcaaca

SEQ ID NO: 5141909 - DNA, 25 bp, Homo sapien
gcaggaacagcgagattgctcaaga

SEQ ID NO: 5141910 - DNA, 25 bp, Homo sapien
ctaatgacattctcgtctgagctgc

SEQ ID NO: 5141911 - DNA, 25 bp, Homo sapien
caattatctggcttaatcatgtgga

SEQ ID NO: 5141912 - DNA, 25 bp, Homo sapien
tctgagctgctttagtgaaatggcc

SEQ ID NO: 5141913 - DNA, 25 bp, Homo sapien
aaccacattcgctatcaacacacaa

SEQ ID NO: 5141914 - DNA, 25 bp, Homo sapien
atttccaggacttcgttcctctctc

SEQ ID NO: 5141915 - DNA, 25 bp, Homo sapien
caggacttcgttcctctctctgtta

SEQ ID NO: 5141916 - DNA, 25 bp, Homo sapien
tccaggacttcgttcctctctctgt

SEQ ID NO: 5141917 - DNA, 25 bp, Homo sapien
gacttcgttcctctctctgttaaga

SEQ ID NO: 5141918 - DNA, 25 bp, Homo sapien
tgaagtaggagcatcgtgtttccac

SEQ ID NO: 5141919 - DNA, 25 bp, Homo sapien
tttgttctctgacaacgcagatttc

SEQ ID NO: 5141920 - DNA, 25 bp, Homo sapien
ccttgagagccgcacagggctgtca

SEQ ID NO: 5141921 - DNA, 25 bp, Homo sapien
atttcttaagaacccacatagcagg

SEQ ID NO: 5141922 - DNA, 25 bp, Homo sapien
accgttcaccaagtgtaccttagag

SEQ ID NO: 5141923 - DNA, 25 bp, Homo sapien
cagcatgctgttatatgtaaccata

SEQ ID NO: 5141924 - DNA, 25 bp, Homo sapien
gtaccttagaggtatgagctttcat

SEQ ID NO: 5141925 - DNA, 25 bp, Homo sapien
tgtcagcatgctgttatatgtaacc

SEQ ID NO: 5141926 - DNA, 25 bp, Homo sapien
ttttaattgaagctcagcaatgaac

SEQ ID NO: 5141927 - DNA, 25 bp, Homo sapien
tgggagataacttgtttcaactgtt

SEQ ID NO: 5141928 - DNA, 25 bp, Homo sapien
ggtttctgaagaccatagagttcaa

SEQ ID NO: 5141929 - DNA, 25 bp, Homo sapien
tgtgaattccaagttaagggcaggt

SEQ ID NO: 5141930 - DNA, 25 bp, Homo sapien
caggtctggaccgaaggactcatct

SEQ ID NO: 5141931 - DNA, 25 bp, Homo sapien
caaaccgcaggtctggaccgaagga

SEQ ID NO: 5141932 - DNA, 25 bp, Homo sapien
gaccgaaggactcatctgcagtcat

SEQ ID NO: 5141933 - DNA, 25 bp, Homo sapien
cagcaaaccgcaggtctggaccgaa

SEQ ID NO: 5141934 - DNA, 25 bp, Homo sapien
tcttcatcatccgtggcaaaagtag

SEQ ID NO: 5141935 - DNA, 25 bp, Homo sapien
gaaatggaggtgcagtgattccttc

SEQ ID NO: 5141936 - DNA, 25 bp, Homo sapien
aatggaggtgcagtgattccttctg

SEQ ID NO: 5141937 - DNA, 25 bp, Homo sapien
tccgtggcaaaagtagtgaaatgga

SEQ ID NO: 5141938 - DNA, 25 bp, Homo sapien
cttttgattgagagatcaacattaa

SEQ ID NO: 5141939 - DNA, 25 bp, Homo sapien
ggcagcttaagcaatcgtttttcag

SEQ ID NO: 5141940 - DNA, 25 bp, Homo sapien
cttttggaccccagaaatcagggca

SEQ ID NO: 5141941 - DNA, 25 bp, Homo sapien
tctttgcaatgacatagacttttgg

SEQ ID NO: 5141942 - DNA, 25 bp, Homo sapien
caatcgtttttcagaggcctgctgc

SEQ ID NO: 5141943 - DNA, 25 bp, Homo sapien
tatcgacgaccctgtctattcagaa

SEQ ID NO: 5141944 - DNA, 25 bp, Homo sapien
cacagagggttcgtaggtctccaac

SEQ ID NO: 5141945 - DNA, 25 bp, Homo sapien
aaatagaagccggaccacagagggt

SEQ ID NO: 5141946 - DNA, 25 bp, Homo sapien
caactcaacacaggcacgtttgact

SEQ ID NO: 5141947 - DNA, 25 bp, Homo sapien
cacttgacatctggtttgctggatt

SEQ ID NO: 5141948 - DNA, 25 bp, Homo sapien
taactgtgcatgaatccacacaaag

SEQ ID NO: 5141949 - DNA, 25 bp, Homo sapien
cccataaagtactcaggaaatatgc

SEQ ID NO: 5141950 - DNA, 25 bp, Homo sapien
gtcatgttcaggcaatacttgggca

SEQ ID NO: 5141951 - DNA, 25 bp, Homo sapien
cactaaactgaggcctgaagcatac

SEQ ID NO: 5141952 - DNA, 25 bp, Homo sapien
aagttgcactaaactgaggcctgaa

SEQ ID NO: 5141953 - DNA, 25 bp, Homo sapien
tgcactaaactgaggcctgaagcat

SEQ ID NO: 5141954 - DNA, 25 bp, Homo sapien
gttgcactaaactgaggcctgaagc

SEQ ID NO: 5141955 - DNA, 25 bp, Homo sapien
tccctgtaataacaatactttccaa

SEQ ID NO: 5141956 - DNA, 25 bp, Homo sapien
ccggcgacattatttcttataaaga

SEQ ID NO: 5141957 - DNA, 25 bp, Homo sapien
ctgtgtccggcgacattatttctta

SEQ ID NO: 5141958 - DNA, 25 bp, Homo sapien
gccactgtgtccggcgacattattt

SEQ ID NO: 5141959 - DNA, 25 bp, Homo sapien
taacagttttgaatcaacaatacac

SEQ ID NO: 5141960 - DNA, 25 bp, Homo sapien
ccatatgagtaaaacagccatgatc

SEQ ID NO: 5141961 - DNA, 25 bp, Homo sapien
atgtgaccatatgagtaaaacagcc

SEQ ID NO: 5141962 - DNA, 25 bp, Homo sapien
ctatgcaggatctgaatgtgaccat

SEQ ID NO: 5141963 - DNA, 25 bp, Homo sapien
tggcggctgccaatagagcagttca

SEQ ID NO: 5141964 - DNA, 25 bp, Homo sapien
cctgtggcggctgccaatagagcag

SEQ ID NO: 5141965 - DNA, 25 bp, Homo sapien
tgtggcggctgccaatagagcagtt

SEQ ID NO: 5141966 - DNA, 25 bp, Homo sapien
gtggcggctgccaatagagcagttc

SEQ ID NO: 5141967 - DNA, 25 bp, Homo sapien
tgcttgccagcctaatgcctcttct

SEQ ID NO: 5141968 - DNA, 25 bp, Homo sapien
tcaaggagctcactacgtcaaaggt

SEQ ID NO: 5141969 - DNA, 25 bp, Homo sapien
cactgtgacaggatgcatatggcat

SEQ ID NO: 5141970 - DNA, 25 bp, Homo sapien
tcaaaggtaaatcccaccagctctg

SEQ ID NO: 5141971 - DNA, 25 bp, Homo sapien
ggagatgatatgaggctcccagaag

SEQ ID NO: 5141972 - DNA, 25 bp, Homo sapien
aagacagctgcccacgggagatgat

SEQ ID NO: 5141973 - DNA, 25 bp, Homo sapien
gcctcctgtgatgcttgctgatgct

SEQ ID NO: 5141974 - DNA, 25 bp, Homo sapien
cagcaatgggatagtccaaaatcac

SEQ ID NO: 5141975 - DNA, 25 bp, Homo sapien
tcattcttagggaccacctccttcc

SEQ ID NO: 5141976 - DNA, 25 bp, Homo sapien
tccttgcccatcacttgggccactc

SEQ ID NO: 5141977 - DNA, 25 bp, Homo sapien
gccactccagcatatggggctctac

SEQ ID NO: 5141978 - DNA, 25 bp, Homo sapien
gcatatggggctctactgggaccca

SEQ ID NO: 5141979 - DNA, 25 bp, Homo sapien
gaaagtgagctttgagacataatga

SEQ ID NO: 5141980 - DNA, 25 bp, Homo sapien
cataatgagcaacgggcttgtcctc

SEQ ID NO: 5141981 - DNA, 25 bp, Homo sapien
agacagaatccatcagttcttcctc

SEQ ID NO: 5141982 - DNA, 25 bp, Homo sapien
tgagacataatgagcaacgggcttg

SEQ ID NO: 5141983 - DNA, 25 bp, Homo sapien
tgattcaggctcctcagtaaggatt

SEQ ID NO: 5141984 - DNA, 25 bp, Homo sapien
gttcttctaaaaacatcatttgcga

SEQ ID NO: 5141985 - DNA, 25 bp, Homo sapien
catttgcgaatgtgcttcagtactg

SEQ ID NO: 5141986 - DNA, 25 bp, Homo sapien
tatatagagtatttatgagccacgt

SEQ ID NO: 5141987 - DNA, 25 bp, Homo sapien
ccctgcatcctagcatgggtgctga

SEQ ID NO: 5141988 - DNA, 25 bp, Homo sapien
tgtcaaagctagaacggcgacggtc

SEQ ID NO: 5141989 - DNA, 25 bp, Homo sapien
ggcgacggtccatctgggcctgaaa

SEQ ID NO: 5141990 - DNA, 25 bp, Homo sapien
tatatctatcctggcctgtcaaagc

SEQ ID NO: 5141991 - DNA, 25 bp, Homo sapien
aagacaaacttgagtgacagatgga

SEQ ID NO: 5141992 - DNA, 25 bp, Homo sapien
aacaggagaagttcaaagatccagg

SEQ ID NO: 5141993 - DNA, 25 bp, Homo sapien
gacagatggaaacggtgtcttctga

SEQ ID NO: 5141994 - DNA, 25 bp, Homo sapien
tgaacttttgtacgatgaattgaac

SEQ ID NO: 5141995 - DNA, 25 bp, Homo sapien
actgttaggatcagtttttctttca

SEQ ID NO: 5141996 - DNA, 25 bp, Homo sapien
tctgacatatggcttgaattaacaa

SEQ ID NO: 5141997 - DNA, 25 bp, Homo sapien
ctttctgacatatggcttgaattaa

SEQ ID NO: 5141998 - DNA, 25 bp, Homo sapien
catatggcttgaattaacaagttta

SEQ ID NO: 5141999 - DNA, 25 bp, Homo sapien
gcttcagtcctgaatttagtggctg

SEQ ID NO: 5142000 - DNA, 25 bp, Homo sapien
aatttagtggctggcttgagttcct

SEQ ID NO: 5142001 - DNA, 25 bp, Homo sapien
cagcataacagacaaggcatccttc

SEQ ID NO: 5142002 - DNA, 25 bp, Homo sapien
ctggcatgaatacagcataacagac

SEQ ID NO: 5142003 - DNA, 25 bp, Homo sapien
gactgggaaattagaggtcttcaaa

SEQ ID NO: 5142004 - DNA, 25 bp, Homo sapien
ggagcctccatatgactcttcagct

SEQ ID NO: 5142005 - DNA, 25 bp, Homo sapien
tccaatcagctatggctgaggactg

SEQ ID NO: 5142006 - DNA, 25 bp, Homo sapien
tattcattcagacacctattcctgg

SEQ ID NO: 5142007 - DNA, 25 bp, Homo sapien
cacataacattatcaactttaaggg

SEQ ID NO: 5142008 - DNA, 25 bp, Homo sapien
taagggctgcaattgattgaatatt

SEQ ID NO: 5142009 - DNA, 25 bp, Homo sapien
tttcccccatattcaagagatggtg

SEQ ID NO: 5142010 - DNA, 25 bp, Homo sapien
tcaagagatggtgtatgctccaaac

SEQ ID NO: 5142011 - DNA, 25 bp, Homo sapien
gctctccgtttttctgttagtggtg

SEQ ID NO: 5142012 - DNA, 25 bp, Homo sapien
cgtttttctgttagtggtgtatagg

SEQ ID NO: 5142013 - DNA, 25 bp, Homo sapien
tagcgtgatgcctgcaggtttgttt

SEQ ID NO: 5142014 - DNA, 25 bp, Homo sapien
ttggctctccgtttttctgttagtg

SEQ ID NO: 5142015 - DNA, 25 bp, Homo sapien
cagtgatgtgttttcccctccagcc

SEQ ID NO: 5142016 - DNA, 25 bp, Homo sapien
tgccaggaagcccaacagtgatgtg

SEQ ID NO: 5142017 - DNA, 25 bp, Homo sapien
tgacagtgtgagcagcccttggatg

SEQ ID NO: 5142018 - DNA, 25 bp, Homo sapien
aaagacaaaggtcactgccaggaag

SEQ ID NO: 5142019 - DNA, 25 bp, Homo sapien
gcccagataaacagatgagttggca

SEQ ID NO: 5142020 - DNA, 25 bp, Homo sapien
tattggcacttcatgggaaagttct

SEQ ID NO: 5142021 - DNA, 25 bp, Homo sapien
tatttagagatggtattggcacttc

SEQ ID NO: 5142022 - DNA, 25 bp, Homo sapien
cagatgagttggcacaatggaaagt

SEQ ID NO: 5142023 - DNA, 25 bp, Homo sapien
agagtgtgtcccgtgtaccaggtcc

SEQ ID NO: 5142024 - DNA, 25 bp, Homo sapien
taacgagagtgagagggcttctcct

SEQ ID NO: 5142025 - DNA, 25 bp, Homo sapien
tggccctcatggcatcagcaggacc

SEQ ID NO: 5142026 - DNA, 25 bp, Homo sapien
actctgcacaacagctaggaggcaa

SEQ ID NO: 5142027 - DNA, 25 bp, Homo sapien
tgtctgtttataattagggtcccca

SEQ ID NO: 5142028 - DNA, 25 bp, Homo sapien
gtgtgcccccatcggcacatgctgt

SEQ ID NO: 5142029 - DNA, 25 bp, Homo sapien
gttctccagctcaggtgtgccccca

SEQ ID NO: 5142030 - DNA, 25 bp, Homo sapien
gtccccacgaaattcaggcagcttg

SEQ ID NO: 5142031 - DNA, 25 bp, Homo sapien
gagagttaagcccatcgaaaaggac

SEQ ID NO: 5142032 - DNA, 25 bp, Homo sapien
ggccaagagagttaagcccatcgaa

SEQ ID NO: 5142033 - DNA, 25 bp, Homo sapien
tcgaaaaggactggtgtatactggg

SEQ ID NO: 5142034 - DNA, 25 bp, Homo sapien
ttaagcccatcgaaaaggactggtg

SEQ ID NO: 5142035 - DNA, 25 bp, Homo sapien
tttgtatcctcaaacaaccagatga

SEQ ID NO: 5142036 - DNA, 25 bp, Homo sapien
ttgtatcctcaaacaaccagatgat

SEQ ID NO: 5142037 - DNA, 25 bp, Homo sapien
ctttgtatcctcaaacaaccagatg

SEQ ID NO: 5142038 - DNA, 25 bp, Homo sapien
cctttgtatcctcaaacaaccagat

SEQ ID NO: 5142039 - DNA, 25 bp, Homo sapien
tgggagatgccctattgttttgacc

SEQ ID NO: 5142040 - DNA, 25 bp, Homo sapien
actttgagtaaacaccttcctgaca

SEQ ID NO: 5142041 - DNA, 25 bp, Homo sapien
gaagaatgacttggtcccctgcagt

SEQ ID NO: 5142042 - DNA, 25 bp, Homo sapien
gaggcacagccattaatcagaacag

SEQ ID NO: 5142043 - DNA, 25 bp, Homo sapien
ttctaccttggacctgccctgctga

SEQ ID NO: 5142044 - DNA, 25 bp, Homo sapien
tgctgctgacttgtgcccacagttc

SEQ ID NO: 5142045 - DNA, 25 bp, Homo sapien
ggtggtcgtctgaaggctcaaagcc

SEQ ID NO: 5142046 - DNA, 25 bp, Homo sapien
tggtggtcgtctgaaggctcaaagc

SEQ ID NO: 5142047 - DNA, 25 bp, Homo sapien
cctgtggatagcagatgggagacaa

SEQ ID NO: 5142048 - DNA, 25 bp, Homo sapien
tagggtcaaaaatctcctctgcaac

SEQ ID NO: 5142049 - DNA, 25 bp, Homo sapien
tcagagcatctgatgtttaggaaat

SEQ ID NO: 5142050 - DNA, 25 bp, Homo sapien
tcttttcctcagatatagggtcaaa

SEQ ID NO: 5142051 - DNA, 25 bp, Homo sapien
cacagcagccctaaaatcgctggca

SEQ ID NO: 5142052 - DNA, 25 bp, Homo sapien
gagagaaattctgataggtcgagtg

SEQ ID NO: 5142053 - DNA, 25 bp, Homo sapien
gataggtcgagtgcctgtcatttgc

SEQ ID NO: 5142054 - DNA, 25 bp, Homo sapien
aatcgctggcaaatggtggtccctg

SEQ ID NO: 5142055 - DNA, 25 bp, Homo sapien
gagaataggttttggtgcataagga

SEQ ID NO: 5142056 - DNA, 25 bp, Homo sapien
gctatgcacttgtaatcattgaatg

SEQ ID NO: 5142057 - DNA, 25 bp, Homo sapien
aacatcgatacttctttaaggagac

SEQ ID NO: 5142058 - DNA, 25 bp, Homo sapien
gaatgtcattctacaacatcgatac

SEQ ID NO: 5142059 - DNA, 25 bp, Homo sapien
cagtccaggttaccaactttccttg

SEQ ID NO: 5142060 - DNA, 25 bp, Homo sapien
accattccagtccaggttaccaact

SEQ ID NO: 5142061 - DNA, 25 bp, Homo sapien
tcatctacagcaccaccattccagt

SEQ ID NO: 5142062 - DNA, 25 bp, Homo sapien
ttccttgtggacaacccacagcatt

SEQ ID NO: 5142063 - DNA, 25 bp, Homo sapien
gctgtcatttgacatgggtagccgc

SEQ ID NO: 5142064 - DNA, 25 bp, Homo sapien
ttgacatgggtagccgctgatgctt

SEQ ID NO: 5142065 - DNA, 25 bp, Homo sapien
gtatactctgtggagctgtcatttg

SEQ ID NO: 5142066 - DNA, 25 bp, Homo sapien
tctttttgtgcctacaccaaatggc

SEQ ID NO: 5142067 - DNA, 25 bp, Homo sapien
taggatgcctcagttgccacatact

SEQ ID NO: 5142068 - DNA, 25 bp, Homo sapien
aagaagacaatcagttctgtggtcc

SEQ ID NO: 5142069 - DNA, 25 bp, Homo sapien
gctggcgatgctggctaagaagaca

SEQ ID NO: 5142070 - DNA, 25 bp, Homo sapien
ggtcctggatgacttaggatgcctc

SEQ ID NO: 5142071 - DNA, 25 bp, Homo sapien
gcttggatgtgtggggttgcttttg

SEQ ID NO: 5142072 - DNA, 25 bp, Homo sapien
actccacgggtaatttatgagcttg

SEQ ID NO: 5142073 - DNA, 25 bp, Homo sapien
tatgagcttggatgtgtggggttgc

SEQ ID NO: 5142074 - DNA, 25 bp, Homo sapien
tcactccacgggtaatttatgagct

SEQ ID NO: 5142075 - DNA, 25 bp, Homo sapien
atccatctcacgcagataaaaacca

SEQ ID NO: 5142076 - DNA, 25 bp, Homo sapien
agataaaaaccaaggggacactgct

SEQ ID NO: 5142077 - DNA, 25 bp, Homo sapien
ttccttctttagtgcacaatttatc

SEQ ID NO: 5142078 - DNA, 25 bp, Homo sapien
tccatctcacgcagataaaaaccaa

SEQ ID NO: 5142079 - DNA, 25 bp, Homo sapien
tgcagggcccaattgataacccttg

SEQ ID NO: 5142080 - DNA, 25 bp, Homo sapien
tacttaaatctcagtgaaccaggac

SEQ ID NO: 5142081 - DNA, 25 bp, Homo sapien
ggcaagcttgggagactgcagataa

SEQ ID NO: 5142082 - DNA, 25 bp, Homo sapien
tgaaagacggatggctctggcaagc

SEQ ID NO: 5142083 - DNA, 25 bp, Homo sapien
caccgtgtcaagtgctggcagcaga

SEQ ID NO: 5142084 - DNA, 25 bp, Homo sapien
aaatgaacgtgacaatgctgccagg

SEQ ID NO: 5142085 - DNA, 25 bp, Homo sapien
tgtcatgctgcttagaagattcttt

SEQ ID NO: 5142086 - DNA, 25 bp, Homo sapien
caattacacatgtttgcgagcaccg

SEQ ID NO: 5142087 - DNA, 25 bp, Homo sapien
caatgtttcctacaagggatgctac

SEQ ID NO: 5142088 - DNA, 25 bp, Homo sapien
ctggatttcccgcaatgtttcctac

SEQ ID NO: 5142089 - DNA, 25 bp, Homo sapien
catttgcataggcactttctgagtt

SEQ ID NO: 5142090 - DNA, 25 bp, Homo sapien
catgaatccaaggtgaacttgcaaa

SEQ ID NO: 5142091 - DNA, 25 bp, Homo sapien
ggattctgttcaacatgagggcttg

SEQ ID NO: 5142092 - DNA, 25 bp, Homo sapien
tgttcaacatgagggcttgctgttt

SEQ ID NO: 5142093 - DNA, 25 bp, Homo sapien
ggcttggattctgttcaacatgagg

SEQ ID NO: 5142094 - DNA, 25 bp, Homo sapien
tctgttcaacatgagggcttgctgt

SEQ ID NO: 5142095 - DNA, 25 bp, Homo sapien
taatctctctggagtaatcaatata

SEQ ID NO: 5142096 - DNA, 25 bp, Homo sapien
tccttcttaagctcttgtaggctga

SEQ ID NO: 5142097 - DNA, 25 bp, Homo sapien
gcttccagggccaccgctgactctt

SEQ ID NO: 5142098 - DNA, 25 bp, Homo sapien
aatcaatatattcacgtaggactga

SEQ ID NO: 5142099 - DNA, 25 bp, Homo sapien
gatttagatagtttggtcccagcgg

SEQ ID NO: 5142100 - DNA, 25 bp, Homo sapien
cattgaaggctgacgcgttaggcac

SEQ ID NO: 5142101 - DNA, 25 bp, Homo sapien
gcttaggagcacgttcattgaaggc

SEQ ID NO: 5142102 - DNA, 25 bp, Homo sapien
tgtctgcgctcagcaaatggttcca

SEQ ID NO: 5142103 - DNA, 25 bp, Homo sapien
acgcacaacattgatgcccttcttg

SEQ ID NO: 5142104 - DNA, 25 bp, Homo sapien
tttctgccactgaatataaggatat

SEQ ID NO: 5142105 - DNA, 25 bp, Homo sapien
ttgattggtttagcctgttttctgc

SEQ ID NO: 5142106 - DNA, 25 bp, Homo sapien
tttcagacttgtccaaacgtttgat

SEQ ID NO: 5142107 - DNA, 25 bp, Homo sapien
aatagcatacaagccccctgctctg

SEQ ID NO: 5142108 - DNA, 25 bp, Homo sapien
ctctggaagtatccagggggttgct

SEQ ID NO: 5142109 - DNA, 25 bp, Homo sapien
agccccctgctctggaagtatccag

SEQ ID NO: 5142110 - DNA, 25 bp, Homo sapien
taatagcatacaagccccctgctct

SEQ ID NO: 5142111 - DNA, 25 bp, Homo sapien
cgatggtacaacagaataagaatca

SEQ ID NO: 5142112 - DNA, 25 bp, Homo sapien
tatccatgggataggagacctcctt

SEQ ID NO: 5142113 - DNA, 25 bp, Homo sapien
tacaatcacacctctcgatggtaca

SEQ ID NO: 5142114 - DNA, 25 bp, Homo sapien
tgagcagaagctgacactaaaatgc

SEQ ID NO: 5142115 - DNA, 25 bp, Homo sapien
tctcatctacattcactcgcacttg

SEQ ID NO: 5142116 - DNA, 25 bp, Homo sapien
ttcactcgcacttgtccactgccat

SEQ ID NO: 5142117 - DNA, 25 bp, Homo sapien
ttctgttccacctgaagtgctcttc

SEQ ID NO: 5142118 - DNA, 25 bp, Homo sapien
tctgttccacctgaagtgctcttcc

SEQ ID NO: 5142119 - DNA, 25 bp, Homo sapien
ctgacattgtacgtggcagataccc

SEQ ID NO: 5142120 - DNA, 25 bp, Homo sapien
tgacattgtacgtggcagataccca

SEQ ID NO: 5142121 - DNA, 25 bp, Homo sapien
gacattgtacgtggcagatacccat

SEQ ID NO: 5142122 - DNA, 25 bp, Homo sapien
gtccttcatttaggactctggagcc

SEQ ID NO: 5142123 - DNA, 25 bp, Homo sapien
ccttcatttaggactctggagccat

SEQ ID NO: 5142124 - DNA, 25 bp, Homo sapien
tccttcatttaggactctggagcca

SEQ ID NO: 5142125 - DNA, 25 bp, Homo sapien
agtccttcatttaggactctggagc

SEQ ID NO: 5142126 - DNA, 25 bp, Homo sapien
gagttacataggagcaccaggacac

SEQ ID NO: 5142127 - DNA, 25 bp, Homo sapien
ccttctcagtggtaatgagagttac

SEQ ID NO: 5142128 - DNA, 25 bp, Homo sapien
cttggtctcgacatctgtaaaccct

SEQ ID NO: 5142129 - DNA, 25 bp, Homo sapien
caggacacaagtgacttcaaaggga

SEQ ID NO: 5142130 - DNA, 25 bp, Homo sapien
attaaaaggcctgcaagcgaggact

SEQ ID NO: 5142131 - DNA, 25 bp, Homo sapien
gacttccggattccacatctgactt

SEQ ID NO: 5142132 - DNA, 25 bp, Homo sapien
aaaggcctgcaagcgaggactccaa

SEQ ID NO: 5142133 - DNA, 25 bp, Homo sapien
tccaagatgacttccggattccaca

SEQ ID NO: 5142134 - DNA, 25 bp, Homo sapien
gtttgtggtaatttgagacacattt

SEQ ID NO: 5142135 - DNA, 25 bp, Homo sapien
tgtggtaatttgagacacatttact

SEQ ID NO: 5142136 - DNA, 25 bp, Homo sapien
tttgagacacatttactccactcag

SEQ ID NO: 5142137 - DNA, 25 bp, Homo sapien
gtaatttgagacacatttactccac

SEQ ID NO: 5142138 - DNA, 25 bp, Homo sapien
ggctgttgtacacagtgcccaactg

SEQ ID NO: 5142139 - DNA, 25 bp, Homo sapien
catctctgaccactgggtgagggct

SEQ ID NO: 5142140 - DNA, 25 bp, Homo sapien
ggctgaatccttctctcggatatag

SEQ ID NO: 5142141 - DNA, 25 bp, Homo sapien
gtaatgtactggacaccagcagcag

SEQ ID NO: 5142142 - DNA, 25 bp, Homo sapien
tgatggaagcgatcccaaatggctg

SEQ ID NO: 5142143 - DNA, 25 bp, Homo sapien
gaagagctcgttacaacactgatgg

SEQ ID NO: 5142144 - DNA, 25 bp, Homo sapien
agtacaaactgcatagaagagctcg

SEQ ID NO: 5142145 - DNA, 25 bp, Homo sapien
ctcttggcttcggtacattttgcag

SEQ ID NO: 5142146 - DNA, 25 bp, Homo sapien
ggacgattacactgaagatgcctca

SEQ ID NO: 5142147 - DNA, 25 bp, Homo sapien
agatgcctcatcacaactgtgggtg

SEQ ID NO: 5142148 - DNA, 25 bp, Homo sapien
tatgagatatcgcatctgaagaagc

SEQ ID NO: 5142149 - DNA, 25 bp, Homo sapien
aaatatttgatttggacgattacac

SEQ ID NO: 5142150 - DNA, 25 bp, Homo sapien
tctttcacaattgtcacatgagaca

SEQ ID NO: 5142151 - DNA, 25 bp, Homo sapien
ggtttggctctctacgactgagtca

SEQ ID NO: 5142152 - DNA, 25 bp, Homo sapien
tattcttggaccatgaaccactggt

SEQ ID NO: 5142153 - DNA, 25 bp, Homo sapien
taccaattatattaggtgctggaga

SEQ ID NO: 5142154 - DNA, 25 bp, Homo sapien
tacacatgtgcgcttgtacgctcat

SEQ ID NO: 5142155 - DNA, 25 bp, Homo sapien
tctggcttcttagctgcatgctttg

SEQ ID NO: 5142156 - DNA, 25 bp, Homo sapien
tcagcacccatagctggtgacagct

SEQ ID NO: 5142157 - DNA, 25 bp, Homo sapien
ctgaaaggctgcaaagtgttcctta

SEQ ID NO: 5142158 - DNA, 25 bp, Homo sapien
agatgccttaatgagcccctcggac

SEQ ID NO: 5142159 - DNA, 25 bp, Homo sapien
gagatgccttaatgagcccctcgga

SEQ ID NO: 5142160 - DNA, 25 bp, Homo sapien
gatgccttaatgagcccctcggaca

SEQ ID NO: 5142161 - DNA, 25 bp, Homo sapien
atgccttaatgagcccctcggacat

SEQ ID NO: 5142162 - DNA, 25 bp, Homo sapien
tcggtgagctgaaactgcttgaaag

SEQ ID NO: 5142163 - DNA, 25 bp, Homo sapien
aattaatagcaggagcggatcggcc

SEQ ID NO: 5142164 - DNA, 25 bp, Homo sapien
atcggccgagcccaatcgccacgca

SEQ ID NO: 5142165 - DNA, 25 bp, Homo sapien
tcttcccctcggtgagctgaaactg

SEQ ID NO: 5142166 - DNA, 25 bp, Homo sapien
caaatactgtggggttctctcctct

SEQ ID NO: 5142167 - DNA, 25 bp, Homo sapien
tcaaatactgtggggttctctcctc

SEQ ID NO: 5142168 - DNA, 25 bp, Homo sapien
tcacagagcccttagcacaatttga

SEQ ID NO: 5142169 - DNA, 25 bp, Homo sapien
gaataaaaagctttaatctcttgtc

SEQ ID NO: 5142170 - DNA, 25 bp, Homo sapien
taatctcttgtctgttatgctgctt

SEQ ID NO: 5142171 - DNA, 25 bp, Homo sapien
caatttgaatacgaaagagatactg

SEQ ID NO: 5142172 - DNA, 25 bp, Homo sapien
gatagcaagtagaacgcttcaccca

SEQ ID NO: 5142173 - DNA, 25 bp, Homo sapien
ctaaagctgatagcaagtagaacgc

SEQ ID NO: 5142174 - DNA, 25 bp, Homo sapien
tgtggtttatcttcgtcagtacaag

SEQ ID NO: 5142175 - DNA, 25 bp, Homo sapien
tacaagtatgcgatactaaagctga

SEQ ID NO: 5142176 - DNA, 25 bp, Homo sapien
ctgtgaggtgcgcagggtttcttgg

SEQ ID NO: 5142177 - DNA, 25 bp, Homo sapien
cactgtgaggtgcgcagggtttctt

SEQ ID NO: 5142178 - DNA, 25 bp, Homo sapien
actgtgaggtgcgcagggtttcttg

SEQ ID NO: 5142179 - DNA, 25 bp, Homo sapien
tgaggtgcgcagggtttcttgggtc

SEQ ID NO: 5142180 - DNA, 25 bp, Homo sapien
ggagaggtggcaaaaggcctgaaaa

SEQ ID NO: 5142181 - DNA, 25 bp, Homo sapien
aaagtcatcaatgggcttcccgctc

SEQ ID NO: 5142182 - DNA, 25 bp, Homo sapien
ggcctgaaaaagtcatcaatgggct

SEQ ID NO: 5142183 - DNA, 25 bp, Homo sapien
gggagaggtggcaaaaggcctgaaa

SEQ ID NO: 5142184 - DNA, 25 bp, Homo sapien
aatttttcacatacctctatggtag

SEQ ID NO: 5142185 - DNA, 25 bp, Homo sapien
tgatgctcattagatagaagaaaga

SEQ ID NO: 5142186 - DNA, 25 bp, Homo sapien
cctctatggtagctgagcaacatct

SEQ ID NO: 5142187 - DNA, 25 bp, Homo sapien
ttcacatacctctatggtagctgag

SEQ ID NO: 5142188 - DNA, 25 bp, Homo sapien
atcaactcctccactgaagcaatgt

SEQ ID NO: 5142189 - DNA, 25 bp, Homo sapien
actcctccactgaagcaatgtatct

SEQ ID NO: 5142190 - DNA, 25 bp, Homo sapien
tcagttgtgaacatcaactcctcca

SEQ ID NO: 5142191 - DNA, 25 bp, Homo sapien
caactcctccactgaagcaatgtat

SEQ ID NO: 5142192 - DNA, 25 bp, Homo sapien
ttcttagtcttcttacaccctattc

SEQ ID NO: 5142193 - DNA, 25 bp, Homo sapien
ttacaccctattccgaacctcagag

SEQ ID NO: 5142194 - DNA, 25 bp, Homo sapien
cttagtcttcttacaccctattccg

SEQ ID NO: 5142195 - DNA, 25 bp, Homo sapien
tagtcttcttacaccctattccgaa

SEQ ID NO: 5142196 - DNA, 25 bp, Homo sapien
gttacagttatttcacgtataatgg

SEQ ID NO: 5142197 - DNA, 25 bp, Homo sapien
tcacgtataatggttataatgtagt

SEQ ID NO: 5142198 - DNA, 25 bp, Homo sapien
tccactcgtgtctgggttacagtta

SEQ ID NO: 5142199 - DNA, 25 bp, Homo sapien
aagcccagcaggatggaacattgtc

SEQ ID NO: 5142200 - DNA, 25 bp, Homo sapien
aaagttgcaaatcggatattgtcca

SEQ ID NO: 5142201 - DNA, 25 bp, Homo sapien
caaaagttgcaaatcggatattgtc

SEQ ID NO: 5142202 - DNA, 25 bp, Homo sapien
tacaaaagttgcaaatcggatattg

SEQ ID NO: 5142203 - DNA, 25 bp, Homo sapien
aagttgcaaatcggatattgtccat

SEQ ID NO: 5142204 - DNA, 25 bp, Homo sapien
aggtctgagaagtcattagcctgac

SEQ ID NO: 5142205 - DNA, 25 bp, Homo sapien
cctcagtgcacaggtctgagaagtc

SEQ ID NO: 5142206 - DNA, 25 bp, Homo sapien
ctgagaagtcattagcctgacccat

SEQ ID NO: 5142207 - DNA, 25 bp, Homo sapien
gtctgagaagtcattagcctgaccc

SEQ ID NO: 5142208 - DNA, 25 bp, Homo sapien
acccataacatcctggagattattg

SEQ ID NO: 5142209 - DNA, 25 bp, Homo sapien
aaaaaatagcgtaagcagcaaatga

SEQ ID NO: 5142210 - DNA, 25 bp, Homo sapien
aaaaatagcgtaagcagcaaatgaa

SEQ ID NO: 5142211 - DNA, 25 bp, Homo sapien
tgaaacccataacatcctggagatt

SEQ ID NO: 5142212 - DNA, 25 bp, Homo sapien
ctgtacagcaagagagtccaacggc

SEQ ID NO: 5142213 - DNA, 25 bp, Homo sapien
gccagtatggaatgtctgctgctat

SEQ ID NO: 5142214 - DNA, 25 bp, Homo sapien
gagtccaacggccagcactcagcag

SEQ ID NO: 5142215 - DNA, 25 bp, Homo sapien
ccagttttcatagagccagtatgga

SEQ ID NO: 5142216 - DNA, 25 bp, Homo sapien
cttgcggatacactttgcaggtgag

SEQ ID NO: 5142217 - DNA, 25 bp, Homo sapien
tcttcactatcactcaaagatgagt

SEQ ID NO: 5142218 - DNA, 25 bp, Homo sapien
gcaggtgagccttgtggaataacga

SEQ ID NO: 5142219 - DNA, 25 bp, Homo sapien
aggccaatgccgtactgagtcttca

SEQ ID NO: 5142220 - DNA, 25 bp, Homo sapien
atcatttatatctgttcttcgtggg

SEQ ID NO: 5142221 - DNA, 25 bp, Homo sapien
tatatctgttcttcgtgggggggct

SEQ ID NO: 5142222 - DNA, 25 bp, Homo sapien
tttcatcatttatatctgttcttcg

SEQ ID NO: 5142223 - DNA, 25 bp, Homo sapien
tacttgttacagagagaaacacatt

SEQ ID NO: 5142224 - DNA, 25 bp, Homo sapien
gtaatttgctcttttgccgtgcccg

SEQ ID NO: 5142225 - DNA, 25 bp, Homo sapien
tgctcttttgccgtgcccgtcatgg

SEQ ID NO: 5142226 - DNA, 25 bp, Homo sapien
atttgctcttttgccgtgcccgtca

SEQ ID NO: 5142227 - DNA, 25 bp, Homo sapien
gctcttttgccgtgcccgtcatggg

SEQ ID NO: 5142228 - DNA, 25 bp, Homo sapien
agaggtaccaggacagacttctcca

SEQ ID NO: 5142229 - DNA, 25 bp, Homo sapien
gacagacttctccattgatgagagt

SEQ ID NO: 5142230 - DNA, 25 bp, Homo sapien
ggagaggtaccaggacagacttctc

SEQ ID NO: 5142231 - DNA, 25 bp, Homo sapien
agacttctccattgatgagagttga

SEQ ID NO: 5142232 - DNA, 25 bp, Homo sapien
aaagcagtgagagcccccagttcaa

SEQ ID NO: 5142233 - DNA, 25 bp, Homo sapien
gccttgagtcacacacgccattgct

SEQ ID NO: 5142234 - DNA, 25 bp, Homo sapien
catcacactgtcttcgccacctgcc

SEQ ID NO: 5142235 - DNA, 25 bp, Homo sapien
tgccacatctcaccaaagcagtgag

SEQ ID NO: 5142236 - DNA, 25 bp, Homo sapien
tcagcatagacgcatggcactgcct

SEQ ID NO: 5142237 - DNA, 25 bp, Homo sapien
tagacgcatggcactgccttcacac

SEQ ID NO: 5142238 - DNA, 25 bp, Homo sapien
gcatagacgcatggcactgccttca

SEQ ID NO: 5142239 - DNA, 25 bp, Homo sapien
cagcatagacgcatggcactgcctt

SEQ ID NO: 5142240 - DNA, 25 bp, Homo sapien
gatctgtgaacatgacatgcctgag

SEQ ID NO: 5142241 - DNA, 25 bp, Homo sapien
tgtgtgtctgcaaccgtgctgctgc

SEQ ID NO: 5142242 - DNA, 25 bp, Homo sapien
ttcctgttgatggtcaaaggctgag

SEQ ID NO: 5142243 - DNA, 25 bp, Homo sapien
caactgcagagtgaattcctgttga

SEQ ID NO: 5142244 - DNA, 25 bp, Homo sapien
tcaataggcacagatttaaaactag

SEQ ID NO: 5142245 - DNA, 25 bp, Homo sapien
tgtttgtgaatgagcgaattcatga

SEQ ID NO: 5142246 - DNA, 25 bp, Homo sapien
tatatgtaacagacgatgtcatttc

SEQ ID NO: 5142247 - DNA, 25 bp, Homo sapien
tgaactcttgcaccttctttgacag

SEQ ID NO: 5142248 - DNA, 25 bp, Homo sapien
caaattctgcaacgtaatatcctct

SEQ ID NO: 5142249 - DNA, 25 bp, Homo sapien
tgcaacgtaatatcctctcactgct

SEQ ID NO: 5142250 - DNA, 25 bp, Homo sapien
gaccaaattctgcaacgtaatatcc

SEQ ID NO: 5142251 - DNA, 25 bp, Homo sapien
tctgcaacgtaatatcctctcactg

SEQ ID NO: 5142252 - DNA, 25 bp, Homo sapien
gaatatagggtcttccaaacttcat

SEQ ID NO: 5142253 - DNA, 25 bp, Homo sapien
ctgcaggaatatagggtcttccaaa

SEQ ID NO: 5142254 - DNA, 25 bp, Homo sapien
ggcttgctctcgaattaacctcaat

SEQ ID NO: 5142255 - DNA, 25 bp, Homo sapien
caggaatatagggtcttccaaactt

SEQ ID NO: 5142256 - DNA, 25 bp, Homo sapien
gggtcaagtgaagggcatatttgca

SEQ ID NO: 5142257 - DNA, 25 bp, Homo sapien
caaagttaatagaccgggtcaagtg

SEQ ID NO: 5142258 - DNA, 25 bp, Homo sapien
tattccaacagtttggaactacaac

SEQ ID NO: 5142259 - DNA, 25 bp, Homo sapien
gcatttttactgaagcaggtagctt

SEQ ID NO: 5142260 - DNA, 25 bp, Homo sapien
gtgacttggttttgatggcagattt

SEQ ID NO: 5142261 - DNA, 25 bp, Homo sapien
agttgtagcaaatgtggtagggcca

SEQ ID NO: 5142262 - DNA, 25 bp, Homo sapien
tggtagggccagtgacttggttttg

SEQ ID NO: 5142263 - DNA, 25 bp, Homo sapien
tgtggaatatcagagttgtagcaaa

SEQ ID NO: 5142264 - DNA, 25 bp, Homo sapien
ggtagataaagtcaaaggctatcgt

SEQ ID NO: 5142265 - DNA, 25 bp, Homo sapien
agtcaaaggctatcgtatttccttc

SEQ ID NO: 5142266 - DNA, 25 bp, Homo sapien
taaagtcaaaggctatcgtatttcc

SEQ ID NO: 5142267 - DNA, 25 bp, Homo sapien
caaaggctatcgtatttccttcttt

SEQ ID NO: 5142268 - DNA, 25 bp, Homo sapien
gagttctagcgttctgacatgaagc

SEQ ID NO: 5142269 - DNA, 25 bp, Homo sapien
tatgaggaattcatacagcctgtcc

SEQ ID NO: 5142270 - DNA, 25 bp, Homo sapien
tgctcccacaagtgagatttctgca

SEQ ID NO: 5142271 - DNA, 25 bp, Homo sapien
atttctgcaaggcatcgtacagagt

SEQ ID NO: 5142272 - DNA, 25 bp, Homo sapien
gccaggactttggggtgtatgggag

SEQ ID NO: 5142273 - DNA, 25 bp, Homo sapien
tgccaggactttggggtgtatggga

SEQ ID NO: 5142274 - DNA, 25 bp, Homo sapien
ttccttttcggattctccatgtctc

SEQ ID NO: 5142275 - DNA, 25 bp, Homo sapien
ttcaagaacatgctccctttttcct

SEQ ID NO: 5142276 - DNA, 25 bp, Homo sapien
ttcggattctccatgtctccttgtt

SEQ ID NO: 5142277 - DNA, 25 bp, Homo sapien
cttcaagaacatgctccctttttcc

SEQ ID NO: 5142278 - DNA, 25 bp, Homo sapien
tctgagcgtctttcatgtagcacgt

SEQ ID NO: 5142279 - DNA, 25 bp, Homo sapien
tgtagcacgtttgcctggctgagag

SEQ ID NO: 5142280 - DNA, 25 bp, Homo sapien
tctgtgtcctgtgtacagctctgag

SEQ ID NO: 5142281 - DNA, 25 bp, Homo sapien
acagctctgagcgtctttcatgtag

SEQ ID NO: 5142282 - DNA, 25 bp, Homo sapien
tcgttgggatatggcagtcatggac

SEQ ID NO: 5142283 - DNA, 25 bp, Homo sapien
agtcatggacagcagaataggcctt

SEQ ID NO: 5142284 - DNA, 25 bp, Homo sapien
gacagcagaataggccttatcacaa

SEQ ID NO: 5142285 - DNA, 25 bp, Homo sapien
agctgcttgataactagcagtttcg

SEQ ID NO: 5142286 - DNA, 25 bp, Homo sapien
ctgcagtatcacccaggctttgaaa

SEQ ID NO: 5142287 - DNA, 25 bp, Homo sapien
taggatctaaacctttcgctctcat

SEQ ID NO: 5142288 - DNA, 25 bp, Homo sapien
gcagtatcacccaggctttgaaaag

SEQ ID NO: 5142289 - DNA, 25 bp, Homo sapien
tttaggatctaaacctttcgctctc

SEQ ID NO: 5142290 - DNA, 25 bp, Homo sapien
aaccaccctttcaccagcgtatgtg

SEQ ID NO: 5142291 - DNA, 25 bp, Homo sapien
agtggcccatagaagtgccctcagg

SEQ ID NO: 5142292 - DNA, 25 bp, Homo sapien
gcagtggcccatagaagtgccctca

SEQ ID NO: 5142293 - DNA, 25 bp, Homo sapien
gctttgcctgaggataaaaccaccc

SEQ ID NO: 5142294 - DNA, 25 bp, Homo sapien
tctggtatgctgtccaactgaacat

SEQ ID NO: 5142295 - DNA, 25 bp, Homo sapien
tctgaaatgatcttcaacgttggag

SEQ ID NO: 5142296 - DNA, 25 bp, Homo sapien
catcttgtgccgtaaagtcatcatc

SEQ ID NO: 5142297 - DNA, 25 bp, Homo sapien
catctcttcgggtgcagattctgaa

SEQ ID NO: 5142298 - DNA, 25 bp, Homo sapien
tactgtagctttacgtttctgcctt

SEQ ID NO: 5142299 - DNA, 25 bp, Homo sapien
ttactgtagctttacgtttctgcct

SEQ ID NO: 5142300 - DNA, 25 bp, Homo sapien
ggactcagaagtaattgcatgtaac

SEQ ID NO: 5142301 - DNA, 25 bp, Homo sapien
gaagtaattgcatgtaactgatgag

SEQ ID NO: 5142302 - DNA, 25 bp, Homo sapien
gaccttgtccagtgcagactttgtg

SEQ ID NO: 5142303 - DNA, 25 bp, Homo sapien
tgtggtagtgaagaatgcgacggtg

SEQ ID NO: 5142304 - DNA, 25 bp, Homo sapien
tttgctacactcatcaagaccttgt

SEQ ID NO: 5142305 - DNA, 25 bp, Homo sapien
aagtccgtatttgtagccaaaggct

SEQ ID NO: 5142306 - DNA, 25 bp, Homo sapien
catgatcacttctccgtcttgttta

SEQ ID NO: 5142307 - DNA, 25 bp, Homo sapien
gatcacttctccgtcttgtttacct

SEQ ID NO: 5142308 - DNA, 25 bp, Homo sapien
cttctccgtcttgtttacctggaag

SEQ ID NO: 5142309 - DNA, 25 bp, Homo sapien
tcacttctccgtcttgtttacctgg

SEQ ID NO: 5142310 - DNA, 25 bp, Homo sapien
gatttctagtgagtgtgagaagtgc

SEQ ID NO: 5142311 - DNA, 25 bp, Homo sapien
agcaaagatttctagtgagtgtgag

SEQ ID NO: 5142312 - DNA, 25 bp, Homo sapien
caaagatttctagtgagtgtgagaa

SEQ ID NO: 5142313 - DNA, 25 bp, Homo sapien
aagtgcctggggaatcttggaagca

SEQ ID NO: 5142314 - DNA, 25 bp, Homo sapien
gaaagggatcaaatgcaaggggtaa

SEQ ID NO: 5142315 - DNA, 25 bp, Homo sapien
taaactttggaaagggatcaaatgc

SEQ ID NO: 5142316 - DNA, 25 bp, Homo sapien
actttggaaagggatcaaatgcaag

SEQ ID NO: 5142317 - DNA, 25 bp, Homo sapien
ctttggaaagggatcaaatgcaagg

SEQ ID NO: 5142318 - DNA, 25 bp, Homo sapien
caatttgctgtggaggtaggtgcct

SEQ ID NO: 5142319 - DNA, 25 bp, Homo sapien
taggtgcctcattaggtctaaggca

SEQ ID NO: 5142320 - DNA, 25 bp, Homo sapien
gcatagtccaactgctgatcactca

SEQ ID NO: 5142321 - DNA, 25 bp, Homo sapien
acatagatgagggatcaggtcaatc

SEQ ID NO: 5142322 - DNA, 25 bp, Homo sapien
gggcaagtgccggcagaatagagtc

SEQ ID NO: 5142323 - DNA, 25 bp, Homo sapien
ccacacgggcaagtgccggcagaat

SEQ ID NO: 5142324 - DNA, 25 bp, Homo sapien
cacgggcaagtgccggcagaataga

SEQ ID NO: 5142325 - DNA, 25 bp, Homo sapien
cacacgggcaagtgccggcagaata

SEQ ID NO: 5142326 - DNA, 25 bp, Homo sapien
tctgaagtagccagttccacttgtc

SEQ ID NO: 5142327 - DNA, 25 bp, Homo sapien
ggtaacagtgattgtcagcccttct

SEQ ID NO: 5142328 - DNA, 25 bp, Homo sapien
gaggatccattctgctagcatcaaa

SEQ ID NO: 5142329 - DNA, 25 bp, Homo sapien
acttgtctatggcttagaggatcca

SEQ ID NO: 5142330 - DNA, 25 bp, Homo sapien
ttttaaacatttacaaggcatcacc

SEQ ID NO: 5142331 - DNA, 25 bp, Homo sapien
taaacatttacaaggcatcacctcc

SEQ ID NO: 5142332 - DNA, 25 bp, Homo sapien
aacatttacaaggcatcacctccat

SEQ ID NO: 5142333 - DNA, 25 bp, Homo sapien
ttaaacatttacaaggcatcacctc

SEQ ID NO: 5142334 - DNA, 25 bp, Homo sapien
ggctgcacccgatggtcactaatgg

SEQ ID NO: 5142335 - DNA, 25 bp, Homo sapien
tccttgcacttgaagaagccgtgat

SEQ ID NO: 5142336 - DNA, 25 bp, Homo sapien
aggacagaaaggatcggctgcaccc

SEQ ID NO: 5142337 - DNA, 25 bp, Homo sapien
ggcacacttgggagatcattgagat

SEQ ID NO: 5142338 - DNA, 25 bp, Homo sapien
tatctaccagattctgatatctttt

SEQ ID NO: 5142339 - DNA, 25 bp, Homo sapien
tatcttttatgccaactgagtaagt

SEQ ID NO: 5142340 - DNA, 25 bp, Homo sapien
tacacatgtcgatgtggctcttgcc

SEQ ID NO: 5142341 - DNA, 25 bp, Homo sapien
taagtcagcagggtacacatgtcga

SEQ ID NO: 5142342 - DNA, 25 bp, Homo sapien
gttgaaatgtttctcacactggaag

SEQ ID NO: 5142343 - DNA, 25 bp, Homo sapien
atgtttctcacactggaagattttc

SEQ ID NO: 5142344 - DNA, 25 bp, Homo sapien
gtttctcacactggaagattttcat

SEQ ID NO: 5142345 - DNA, 25 bp, Homo sapien
ctcacactggaagattttcatattt

SEQ ID NO: 5142346 - DNA, 25 bp, Homo sapien
ctccagggtcattaagccggtggac

SEQ ID NO: 5142347 - DNA, 25 bp, Homo sapien
ggtggacagccctaatgtgtccttg

SEQ ID NO: 5142348 - DNA, 25 bp, Homo sapien
gtcattaagccggtggacagcccta

SEQ ID NO: 5142349 - DNA, 25 bp, Homo sapien
aagccggtggacagccctaatgtgt

SEQ ID NO: 5142350 - DNA, 25 bp, Homo sapien
agcaggttaggacagaccacctcca

SEQ ID NO: 5142351 - DNA, 25 bp, Homo sapien
cctacaagaagcaggttaggacaga

SEQ ID NO: 5142352 - DNA, 25 bp, Homo sapien
gacttgtaacctacaagaagcaggt

SEQ ID NO: 5142353 - DNA, 25 bp, Homo sapien
catattggttcttcgacttgtaacc

SEQ ID NO: 5142354 - DNA, 25 bp, Homo sapien
tcttcttcatggaaagtttgcaata

SEQ ID NO: 5142355 - DNA, 25 bp, Homo sapien
tgtaaatgtggcgttagaaaatgct

SEQ ID NO: 5142356 - DNA, 25 bp, Homo sapien
tgctggttaacagggtcctccgtta

SEQ ID NO: 5142357 - DNA, 25 bp, Homo sapien
tcctccgttacaggaggactgattg

SEQ ID NO: 5142358 - DNA, 25 bp, Homo sapien
caaaggcattgcttcaaggatcaag

SEQ ID NO: 5142359 - DNA, 25 bp, Homo sapien
tctggaggcccactgatattgccca

SEQ ID NO: 5142360 - DNA, 25 bp, Homo sapien
ggataagtgagtgaccccagtggtc

SEQ ID NO: 5142361 - DNA, 25 bp, Homo sapien
gcaagaatttgtggagaccctagag

SEQ ID NO: 5142362 - DNA, 25 bp, Homo sapien
aataattcagttgccaaagtctttg

SEQ ID NO: 5142363 - DNA, 25 bp, Homo sapien
ttcctaacatatgccccaaaggctt

SEQ ID NO: 5142364 - DNA, 25 bp, Homo sapien
tgtccttgcttcctaacatatgccc

SEQ ID NO: 5142365 - DNA, 25 bp, Homo sapien
catctctgaatgctaccctgttgta

SEQ ID NO: 5142366 - DNA, 25 bp, Homo sapien
tgatggactgttctctgtgtgcagc

SEQ ID NO: 5142367 - DNA, 25 bp, Homo sapien
tatgttacagatgaatggttgtatg

SEQ ID NO: 5142368 - DNA, 25 bp, Homo sapien
cttcatctatggagtaatttatttc

SEQ ID NO: 5142369 - DNA, 25 bp, Homo sapien
tctggttttaatatgttacagatga

SEQ ID NO: 5142370 - DNA, 25 bp, Homo sapien
ttaggactacctttgcacattttct

SEQ ID NO: 5142371 - DNA, 25 bp, Homo sapien
agagcagctgccatattgtaagctt

SEQ ID NO: 5142372 - DNA, 25 bp, Homo sapien
tatgtgagtgtactactgattgtta

SEQ ID NO: 5142373 - DNA, 25 bp, Homo sapien
tgttggcgaatgaatgtatgtgagt

SEQ ID NO: 5142374 - DNA, 25 bp, Homo sapien
cagcagttgattcttactttcattc

SEQ ID NO: 5142375 - DNA, 25 bp, Homo sapien
cataattgttattgcctataaaggc

SEQ ID NO: 5142376 - DNA, 25 bp, Homo sapien
taaatatgatcatgtgaggaaaccc

SEQ ID NO: 5142377 - DNA, 25 bp, Homo sapien
gcttaataatacacatgattcccca

SEQ ID NO: 5142378 - DNA, 25 bp, Homo sapien
gattccccaaacagtaagttgctta

SEQ ID NO: 5142379 - DNA, 25 bp, Homo sapien
ctcatttcttatcccagagagaaat

SEQ ID NO: 5142380 - DNA, 25 bp, Homo sapien
tcatttcttatcccagagagaaatt

SEQ ID NO: 5142381 - DNA, 25 bp, Homo sapien
tagaaacacttaggcccagggccag

SEQ ID NO: 5142382 - DNA, 25 bp, Homo sapien
tgccggctcagtattcatagaaaca

SEQ ID NO: 5142383 - DNA, 25 bp, Homo sapien
caaagcctttgtgggttgccggctc

SEQ ID NO: 5142384 - DNA, 25 bp, Homo sapien
gcatgttgacagattgtgtttttac

SEQ ID NO: 5142385 - DNA, 25 bp, Homo sapien
cagcatgcttccattgacgttggta

SEQ ID NO: 5142386 - DNA, 25 bp, Homo sapien
cgttggtaaccgctgggtgtctgct

SEQ ID NO: 5142387 - DNA, 25 bp, Homo sapien
attccagggagctcaggcgctgagg

SEQ ID NO: 5142388 - DNA, 25 bp, Homo sapien
tgtagggattccagggagctcaggc

SEQ ID NO: 5142389 - DNA, 25 bp, Homo sapien
ctccctctttccgaagcccaaaatg

SEQ ID NO: 5142390 - DNA, 25 bp, Homo sapien
catcagcttgcatgtatgtttgttt

SEQ ID NO: 5142391 - DNA, 25 bp, Homo sapien
gtttgtttcccgtgcccctcatcaa

SEQ ID NO: 5142392 - DNA, 25 bp, Homo sapien
atggcaagagagtgatgggccacat

SEQ ID NO: 5142393 - DNA, 25 bp, Homo sapien
tcagtgtgtaactagaggccccaag

SEQ ID NO: 5142394 - DNA, 25 bp, Homo sapien
caggtaaaacttctgatgcagatgt

SEQ ID NO: 5142395 - DNA, 25 bp, Homo sapien
ggaccatcatgctcagtcctggatg

SEQ ID NO: 5142396 - DNA, 25 bp, Homo sapien
tgtacatacagcaaggtcagtgtgt

SEQ ID NO: 5142397 - DNA, 25 bp, Homo sapien
ttcagtaggaattaagagcagagaa

SEQ ID NO: 5142398 - DNA, 25 bp, Homo sapien
tttccttccttgtaagttgcagaca

SEQ ID NO: 5142399 - DNA, 25 bp, Homo sapien
tgggatgggtatgaacaatgaaaac

SEQ ID NO: 5142400 - DNA, 25 bp, Homo sapien
cagagaagccccgttgaatggtgta

SEQ ID NO: 5142401 - DNA, 25 bp, Homo sapien
ttgcaatgagtttttgtgacaggcg

SEQ ID NO: 5142402 - DNA, 25 bp, Homo sapien
cccggtttagctcacggcacttggg

SEQ ID NO: 5142403 - DNA, 25 bp, Homo sapien
ggttgcaatgagtttttgtgacagg

SEQ ID NO: 5142404 - DNA, 25 bp, Homo sapien
tcctggaacaatcccggtttagctc

SEQ ID NO: 5142405 - DNA, 25 bp, Homo sapien
agttcttccaacagagaggcagaac

SEQ ID NO: 5142406 - DNA, 25 bp, Homo sapien
ccagtttcagaattactataattgc

SEQ ID NO: 5142407 - DNA, 25 bp, Homo sapien
cagaacctacttcattcagctgctt

SEQ ID NO: 5142408 - DNA, 25 bp, Homo sapien
gtttcagaattactataattgccca

SEQ ID NO: 5142409 - DNA, 25 bp, Homo sapien
ctaactcatcatgaatctcagcagc

SEQ ID NO: 5142410 - DNA, 25 bp, Homo sapien
caagtatccaattatgggttagaga

SEQ ID NO: 5142411 - DNA, 25 bp, Homo sapien
cgagattgtgcctaactcatcatga

SEQ ID NO: 5142412 - DNA, 25 bp, Homo sapien
gaagcgtttgcaagtatccaattat

SEQ ID NO: 5142413 - DNA, 25 bp, Homo sapien
cttgtccgtggaccagcacacaagc

SEQ ID NO: 5142414 - DNA, 25 bp, Homo sapien
tgtccgtggaccagcacacaagcca

SEQ ID NO: 5142415 - DNA, 25 bp, Homo sapien
ttgtccgtggaccagcacacaagcc

SEQ ID NO: 5142416 - DNA, 25 bp, Homo sapien
atgggaagcttaacatcatctccct

SEQ ID NO: 5142417 - DNA, 25 bp, Homo sapien
catgacggaaggtggttttgcttta

SEQ ID NO: 5142418 - DNA, 25 bp, Homo sapien
agccatgacggaaggtggttttgct

SEQ ID NO: 5142419 - DNA, 25 bp, Homo sapien
gggaagcttaacatcatctccctca

SEQ ID NO: 5142420 - DNA, 25 bp, Homo sapien
tgatttatactcaaatggcacagca

SEQ ID NO: 5142421 - DNA, 25 bp, Homo sapien
gatttatactcaaatggcacagcac

SEQ ID NO: 5142422 - DNA, 25 bp, Homo sapien
aaatccagaccttgtggcaccattt

SEQ ID NO: 5142423 - DNA, 25 bp, Homo sapien
tcaacattgcgatccttttccaaat

SEQ ID NO: 5142424 - DNA, 25 bp, Homo sapien
caccatttcacatgaccaaggagca

SEQ ID NO: 5142425 - DNA, 25 bp, Homo sapien
aatgtctctttatgagcgtctggaa

SEQ ID NO: 5142426 - DNA, 25 bp, Homo sapien
cagggatcgaatctgcgagcacttt

SEQ ID NO: 5142427 - DNA, 25 bp, Homo sapien
gaagagtggccttaccagggatcga

SEQ ID NO: 5142428 - DNA, 25 bp, Homo sapien
caaagcagactagtacagagccctg

SEQ ID NO: 5142429 - DNA, 25 bp, Homo sapien
cctcatgtgaacaggcttctgaacg

SEQ ID NO: 5142430 - DNA, 25 bp, Homo sapien
gcaaataggagctttaccaacgaaa

SEQ ID NO: 5142431 - DNA, 25 bp, Homo sapien
ccaacgaaaatgtggaaaatccaag

SEQ ID NO: 5142432 - DNA, 25 bp, Homo sapien
ttcaagtgctacagtggcagtgtcc

SEQ ID NO: 5142433 - DNA, 25 bp, Homo sapien
tttcgatttgaggagagtacagtct

SEQ ID NO: 5142434 - DNA, 25 bp, Homo sapien
aagcagcagcgaaccatattatcaa

SEQ ID NO: 5142435 - DNA, 25 bp, Homo sapien
ttaagcagcagcgaaccatattatc

SEQ ID NO: 5142436 - DNA, 25 bp, Homo sapien
taagcagcagcgaaccatattatca

SEQ ID NO: 5142437 - DNA, 25 bp, Homo sapien
cttaagcagcagcgaaccatattat

SEQ ID NO: 5142438 - DNA, 25 bp, Homo sapien
cttgtgagatgatggcaagaacact

SEQ ID NO: 5142439 - DNA, 25 bp, Homo sapien
gatgatggcaagaacactgatccag

SEQ ID NO: 5142440 - DNA, 25 bp, Homo sapien
gatggcaagaacactgatccaggga

SEQ ID NO: 5142441 - DNA, 25 bp, Homo sapien
gcaagaacactgatccagggataaa

SEQ ID NO: 5142442 - DNA, 25 bp, Homo sapien
ggaagacaattgatttggctagaaa

SEQ ID NO: 5142443 - DNA, 25 bp, Homo sapien
gatttggctagaaatggttttctcc

SEQ ID NO: 5142444 - DNA, 25 bp, Homo sapien
ggctctctcctctgtatggaagaca

SEQ ID NO: 5142445 - DNA, 25 bp, Homo sapien
ttccttgagttaggaagacaattga

SEQ ID NO: 5142446 - DNA, 25 bp, Homo sapien
tattgtggttctattcctctttctt

SEQ ID NO: 5142447 - DNA, 25 bp, Homo sapien
cacactgaaccccttgtccacgaat

SEQ ID NO: 5142448 - DNA, 25 bp, Homo sapien
aataatatagtgatcaggaagggca

SEQ ID NO: 5142449 - DNA, 25 bp, Homo sapien
ggatctcacagatggttgcttttcc

SEQ ID NO: 5142450 - DNA, 25 bp, Homo sapien
tttgggaagcaacacaacatcgtag

SEQ ID NO: 5142451 - DNA, 25 bp, Homo sapien
taactcagtgtagaatgatggagga

SEQ ID NO: 5142452 - DNA, 25 bp, Homo sapien
tttcctgtcatagtacacgttgagc

SEQ ID NO: 5142453 - DNA, 25 bp, Homo sapien
caacatcgtagtatttttcctgtca

SEQ ID NO: 5142454 - DNA, 25 bp, Homo sapien
ttctaaggctagcaacttttctcac

SEQ ID NO: 5142455 - DNA, 25 bp, Homo sapien
acacaaaaccgatggctgatgctgg

SEQ ID NO: 5142456 - DNA, 25 bp, Homo sapien
ccactctcagttttgaccagtgtgg

SEQ ID NO: 5142457 - DNA, 25 bp, Homo sapien
actaagccaatagcctcagtcagag

SEQ ID NO: 5142458 - DNA, 25 bp, Homo sapien
tttgtgttttggatggataagtgtg

SEQ ID NO: 5142459 - DNA, 25 bp, Homo sapien
gttttggatggataagtgtgacaac

SEQ ID NO: 5142460 - DNA, 25 bp, Homo sapien
gtcaaatttgtgttttggatggata

SEQ ID NO: 5142461 - DNA, 25 bp, Homo sapien
caaatttgtgttttggatggataag

SEQ ID NO: 5142462 - DNA, 25 bp, Homo sapien
taaaggcgaataggttgacacctgg

SEQ ID NO: 5142463 - DNA, 25 bp, Homo sapien
cagactcagtgaaggataatggaat

SEQ ID NO: 5142464 - DNA, 25 bp, Homo sapien
ctacgagatcttataaaggcgaata

SEQ ID NO: 5142465 - DNA, 25 bp, Homo sapien
cagtgaaggataatggaatgaagta

SEQ ID NO: 5142466 - DNA, 25 bp, Homo sapien
tactgcccctcaggatagaccgtca

SEQ ID NO: 5142467 - DNA, 25 bp, Homo sapien
atttcccgcaagtgtactgcccctc

SEQ ID NO: 5142468 - DNA, 25 bp, Homo sapien
agtgtactgcccctcaggatagacc

SEQ ID NO: 5142469 - DNA, 25 bp, Homo sapien
ccgcaagtgtactgcccctcaggat

SEQ ID NO: 5142470 - DNA, 25 bp, Homo sapien
ccttagttacagaaacaccccactg

SEQ ID NO: 5142471 - DNA, 25 bp, Homo sapien
ctgaatagttcctgctagatgaggc

SEQ ID NO: 5142472 - DNA, 25 bp, Homo sapien
gaatagttcctgctagatgaggctt

SEQ ID NO: 5142473 - DNA, 25 bp, Homo sapien
gttacagaaacaccccactgaagcc

SEQ ID NO: 5142474 - DNA, 25 bp, Homo sapien
tgatgtagtcttcatgcaagtgtga

SEQ ID NO: 5142475 - DNA, 25 bp, Homo sapien
cacaaaattgatattcgcctgtggg

SEQ ID NO: 5142476 - DNA, 25 bp, Homo sapien
gaatgtagaaggatagggctccccg

SEQ ID NO: 5142477 - DNA, 25 bp, Homo sapien
gggctccccgaactaagtcacacaa

SEQ ID NO: 5142478 - DNA, 25 bp, Homo sapien
gacttgaatagcgacagcagatcca

SEQ ID NO: 5142479 - DNA, 25 bp, Homo sapien
aggaagtgacttgaatagcgacagc

SEQ ID NO: 5142480 - DNA, 25 bp, Homo sapien
tcagtgtgctggtgggtcattgcca

SEQ ID NO: 5142481 - DNA, 25 bp, Homo sapien
gaagtgacttgaatagcgacagcag

SEQ ID NO: 5142482 - DNA, 25 bp, Homo sapien
cctcctgcatttctactccagtgat

SEQ ID NO: 5142483 - DNA, 25 bp, Homo sapien
taacaattgtcagagcccgtgctcc

SEQ ID NO: 5142484 - DNA, 25 bp, Homo sapien
tacacaataacaattgtcagagccc

SEQ ID NO: 5142485 - DNA, 25 bp, Homo sapien
ctccagtgattctgtagcaagatac

SEQ ID NO: 5142486 - DNA, 25 bp, Homo sapien
ccccctgctggttgtgcaacatgga

SEQ ID NO: 5142487 - DNA, 25 bp, Homo sapien
tccccctgctggttgtgcaacatgg

SEQ ID NO: 5142488 - DNA, 25 bp, Homo sapien
tagaattgcctcattcctcagcaga

SEQ ID NO: 5142489 - DNA, 25 bp, Homo sapien
gcaaatgattgcctcggtaaaggta

SEQ ID NO: 5142490 - DNA, 25 bp, Homo sapien
tgagctgtattacctgccccgatgc

SEQ ID NO: 5142491 - DNA, 25 bp, Homo sapien
tgtatccgctttccacacgtggcaa

SEQ ID NO: 5142492 - DNA, 25 bp, Homo sapien
gacattcaatctttccagttttccc

SEQ ID NO: 5142493 - DNA, 25 bp, Homo sapien
ggaaagtctgttcaacactcccact

SEQ ID NO: 5142494 - DNA, 25 bp, Homo sapien
actgccaaacctctgtgaactccaa

SEQ ID NO: 5142495 - DNA, 25 bp, Homo sapien
aacactcccactatgcttcgttttg

SEQ ID NO: 5142496 - DNA, 25 bp, Homo sapien
tgaaaagctgaatcggtcccactct

SEQ ID NO: 5142497 - DNA, 25 bp, Homo sapien
cactcttcccattaggcaatacatg

SEQ ID NO: 5142498 - DNA, 25 bp, Homo sapien
ccattaggcaatacatgaaacccac

SEQ ID NO: 5142499 - DNA, 25 bp, Homo sapien
gccagtgtgaaaagctgaatcggtc

SEQ ID NO: 5142500 - DNA, 25 bp, Homo sapien
tttgataccttagcttgcactcagc

SEQ ID NO: 5142501 - DNA, 25 bp, Homo sapien
tctgcaaatccgttgttgatctctg

SEQ ID NO: 5142502 - DNA, 25 bp, Homo sapien
tgtcaagtcactttagtatctgggc

SEQ ID NO: 5142503 - DNA, 25 bp, Homo sapien
ctttctcagggacagtttatgccaa

SEQ ID NO: 5142504 - DNA, 25 bp, Homo sapien
gaatacctactctcatactaacagg

SEQ ID NO: 5142505 - DNA, 25 bp, Homo sapien
ggagacacataatctgactctagag

SEQ ID NO: 5142506 - DNA, 25 bp, Homo sapien
tccctaggtggaccacataaatagc

SEQ ID NO: 5142507 - DNA, 25 bp, Homo sapien
ggttattggattgggaataagccca

SEQ ID NO: 5142508 - DNA, 25 bp, Homo sapien
tacacatggtctagctggaaggata

SEQ ID NO: 5142509 - DNA, 25 bp, Homo sapien
cacgacagaaagttgacatcagcat

SEQ ID NO: 5142510 - DNA, 25 bp, Homo sapien
gtttctgctgcctgttcaccatgga

SEQ ID NO: 5142511 - DNA, 25 bp, Homo sapien
tccctaggagggacaattttcagct

SEQ ID NO: 5142512 - DNA, 25 bp, Homo sapien
agatgtcttgtcgttttgttcctga

SEQ ID NO: 5142513 - DNA, 25 bp, Homo sapien
tgattactcgaatccctctccaact

SEQ ID NO: 5142514 - DNA, 25 bp, Homo sapien
gaattaacttgtaagtttgtagatg

SEQ ID NO: 5142515 - DNA, 25 bp, Homo sapien
cagaggtttgtggtcttttgttgcc

SEQ ID NO: 5142516 - DNA, 25 bp, Homo sapien
caaacagtttaatcctattaggcat

SEQ ID NO: 5142517 - DNA, 25 bp, Homo sapien
tcggcaaacagtttaatcctattag

SEQ ID NO: 5142518 - DNA, 25 bp, Homo sapien
tgctttttcggcaaacagtttaatc

SEQ ID NO: 5142519 - DNA, 25 bp, Homo sapien
tagtgctttttcggcaaacagttta

SEQ ID NO: 5142520 - DNA, 25 bp, Homo sapien
tatgctgtcgattgcgagtctctct

SEQ ID NO: 5142521 - DNA, 25 bp, Homo sapien
ctatgctgtcgattgcgagtctctc

SEQ ID NO: 5142522 - DNA, 25 bp, Homo sapien
cgcttcagtttcgtaatggttagca

SEQ ID NO: 5142523 - DNA, 25 bp, Homo sapien
gaagactgctgaagcaccgttttat

SEQ ID NO: 5142524 - DNA, 25 bp, Homo sapien
tggttagcaaatgagctgggctgct

SEQ ID NO: 5142525 - DNA, 25 bp, Homo sapien
ggcacaggcggcttcttcaaaaaat

SEQ ID NO: 5142526 - DNA, 25 bp, Homo sapien
ttaatctttggctgaggaccatgtg

SEQ ID NO: 5142527 - DNA, 25 bp, Homo sapien
taatctttggctgaggaccatgtgg

SEQ ID NO: 5142528 - DNA, 25 bp, Homo sapien
ctgtgggaagataaggctcactgta

SEQ ID NO: 5142529 - DNA, 25 bp, Homo sapien
gtgggaagataaggctcactgtaga

SEQ ID NO: 5142530 - DNA, 25 bp, Homo sapien
gggaagataaggctcactgtagaca

SEQ ID NO: 5142531 - DNA, 25 bp, Homo sapien
ggaagataaggctcactgtagacat

SEQ ID NO: 5142532 - DNA, 25 bp, Homo sapien
acgaggggagacaaacgcagagtta

SEQ ID NO: 5142533 - DNA, 25 bp, Homo sapien
tgagatgctatgggtttctgccaac

SEQ ID NO: 5142534 - DNA, 25 bp, Homo sapien
tgtgattccaaagagcgcctgctgt

SEQ ID NO: 5142535 - DNA, 25 bp, Homo sapien
gctattttcacaaataagttgccaa

SEQ ID NO: 5142536 - DNA, 25 bp, Homo sapien
gcactggtgccactactgccctgga

SEQ ID NO: 5142537 - DNA, 25 bp, Homo sapien
caggcactggtgccactactgccct

SEQ ID NO: 5142538 - DNA, 25 bp, Homo sapien
actccaggcactggtgccactactg

SEQ ID NO: 5142539 - DNA, 25 bp, Homo sapien
caatgcagcagttggggtgccagca

SEQ ID NO: 5142540 - DNA, 25 bp, Homo sapien
tgccactcggtaagcaacagccatc

SEQ ID NO: 5142541 - DNA, 25 bp, Homo sapien
actcggtaagcaacagccatcccag

SEQ ID NO: 5142542 - DNA, 25 bp, Homo sapien
taagcaacagccatcccagacatgg

SEQ ID NO: 5142543 - DNA, 25 bp, Homo sapien
ttttgccactcggtaagcaacagcc

SEQ ID NO: 5142544 - DNA, 25 bp, Homo sapien
gaaagcgggaacatcattatcagcc

SEQ ID NO: 5142545 - DNA, 25 bp, Homo sapien
taggaacaaagaaagcgggaacatc

SEQ ID NO: 5142546 - DNA, 25 bp, Homo sapien
caaagaaagcgggaacatcattatc

SEQ ID NO: 5142547 - DNA, 25 bp, Homo sapien
tatcagccacgtggggagtgccact

SEQ ID NO: 5142548 - DNA, 25 bp, Homo sapien
aaattcaagctgatagcggggaacc

SEQ ID NO: 5142549 - DNA, 25 bp, Homo sapien
gctgatagcggggaaccaaaagagc

SEQ ID NO: 5142550 - DNA, 25 bp, Homo sapien
ttcaagctgatagcggggaaccaaa

SEQ ID NO: 5142551 - DNA, 25 bp, Homo sapien
ctgatagcggggaaccaaaagagca

SEQ ID NO: 5142552 - DNA, 25 bp, Homo sapien
ggccgtgttccctaggaacagtatc

SEQ ID NO: 5142553 - DNA, 25 bp, Homo sapien
gtattctctgtacttccctctcgtc

SEQ ID NO: 5142554 - DNA, 25 bp, Homo sapien
ccttgtgatgccattgacatcgcct

SEQ ID NO: 5142555 - DNA, 25 bp, Homo sapien
tatgtaaagctctcaaaccttgtga

SEQ ID NO: 5142556 - DNA, 25 bp, Homo sapien
cactcttctgcacgggcacacacac

SEQ ID NO: 5142557 - DNA, 25 bp, Homo sapien
acactcttctgcacgggcacacaca

SEQ ID NO: 5142558 - DNA, 25 bp, Homo sapien
taaaagcacgctcttgtaccaactc

SEQ ID NO: 5142559 - DNA, 25 bp, Homo sapien
aagcgtatgtctgtgacttgaagca

SEQ ID NO: 5142560 - DNA, 25 bp, Homo sapien
ttctgcaatgcaacgaatcatggtc

SEQ ID NO: 5142561 - DNA, 25 bp, Homo sapien
caacgaatcatggtcattattgtga

SEQ ID NO: 5142562 - DNA, 25 bp, Homo sapien
catacgatcattatctcccactctg

SEQ ID NO: 5142563 - DNA, 25 bp, Homo sapien
atacgatcattatctcccactctgg

SEQ ID NO: 5142564 - DNA, 25 bp, Homo sapien
cacatacgatcattatctcccactc

SEQ ID NO: 5142565 - DNA, 25 bp, Homo sapien
acatacgatcattatctcccactct

SEQ ID NO: 5142566 - DNA, 25 bp, Homo sapien
gcatgaatctttgcctatttccaac

SEQ ID NO: 5142567 - DNA, 25 bp, Homo sapien
gaggctgtatccattcaggccccag

SEQ ID NO: 5142568 - DNA, 25 bp, Homo sapien
tccacaagaggttttatatgctaga

SEQ ID NO: 5142569 - DNA, 25 bp, Homo sapien
actcttcactgtccgactgaggctg

SEQ ID NO: 5142570 - DNA, 25 bp, Homo sapien
catgggggtggcttacagcatatac

SEQ ID NO: 5142571 - DNA, 25 bp, Homo sapien
ggcatgggggtggcttacagcatat

SEQ ID NO: 5142572 - DNA, 25 bp, Homo sapien
gcatgggggtggcttacagcatata

SEQ ID NO: 5142573 - DNA, 25 bp, Homo sapien
ttgtagacacgcgtagaagactctg

SEQ ID NO: 5142574 - DNA, 25 bp, Homo sapien
tccgtttgtagacacgcgtagaaga

SEQ ID NO: 5142575 - DNA, 25 bp, Homo sapien
tcttccgtttgtagacacgcgtaga

SEQ ID NO: 5142576 - DNA, 25 bp, Homo sapien
gacacgcgtagaagactctgtggtt

SEQ ID NO: 5142577 - DNA, 25 bp, Homo sapien
ccagctcctccctggtccaccagca

SEQ ID NO: 5142578 - DNA, 25 bp, Homo sapien
ctctcccagctgcagccacccagct

SEQ ID NO: 5142579 - DNA, 25 bp, Homo sapien
cagctgcagccacccagctcctccc

SEQ ID NO: 5142580 - DNA, 25 bp, Homo sapien
cagctcctccctggtccaccagcat

SEQ ID NO: 5142581 - DNA, 25 bp, Homo sapien
gctttccttgatggagaggctctgt

SEQ ID NO: 5142582 - DNA, 25 bp, Homo sapien
tctgtgtataattcgcttctttcca

SEQ ID NO: 5142583 - DNA, 25 bp, Homo sapien
gtgtataattcgcttctttccatga

SEQ ID NO: 5142584 - DNA, 25 bp, Homo sapien
ttcttctgtgtataattcgcttctt

SEQ ID NO: 5142585 - DNA, 25 bp, Homo sapien
tgtataattcgcttctttccatgat

SEQ ID NO: 5142586 - DNA, 25 bp, Homo sapien
tacctgagagatttgtgctcaaggg

SEQ ID NO: 5142587 - DNA, 25 bp, Homo sapien
ggcagatctttagattacctgagag

SEQ ID NO: 5142588 - DNA, 25 bp, Homo sapien
tgaacgggccagttcgccagagaaa

SEQ ID NO: 5142589 - DNA, 25 bp, Homo sapien
caaggtatcacaagaggtgagccct

SEQ ID NO: 5142590 - DNA, 25 bp, Homo sapien
tccgacagtattctgtggtgcccaa

SEQ ID NO: 5142591 - DNA, 25 bp, Homo sapien
gacagtaaatccgtagagctttgca

SEQ ID NO: 5142592 - DNA, 25 bp, Homo sapien
catcttggaggacagtaaatccgta

SEQ ID NO: 5142593 - DNA, 25 bp, Homo sapien
ctgtgatcccttcacataatgcagt

SEQ ID NO: 5142594 - DNA, 25 bp, Homo sapien
taaatggacctggtttggttctata

SEQ ID NO: 5142595 - DNA, 25 bp, Homo sapien
gagatttggtaatgacaggaaagga

SEQ ID NO: 5142596 - DNA, 25 bp, Homo sapien
tggttctataacaatcgtttggatg

SEQ ID NO: 5142597 - DNA, 25 bp, Homo sapien
ctttccattgctcacgggtaaatgg

SEQ ID NO: 5142598 - DNA, 25 bp, Homo sapien
catctttgtagaatggaggacaggg

SEQ ID NO: 5142599 - DNA, 25 bp, Homo sapien
cacaaggtaggattcaggcgagtca

SEQ ID NO: 5142600 - DNA, 25 bp, Homo sapien
gccctacgtgtgttgaacggctcat

SEQ ID NO: 5142601 - DNA, 25 bp, Homo sapien
gacagggcttctatccacaaggtag

SEQ ID NO: 5142602 - DNA, 25 bp, Homo sapien
cagcagggcagcagcctgagggggg

SEQ ID NO: 5142603 - DNA, 25 bp, Homo sapien
gggcagcagcctgaggggggcgcat

SEQ ID NO: 5142604 - DNA, 25 bp, Homo sapien
cagggcagcagcctgaggggggcgc

SEQ ID NO: 5142605 - DNA, 25 bp, Homo sapien
agcagggcagcagcctgaggggggc

SEQ ID NO: 5142606 - DNA, 25 bp, Homo sapien
gcaagacacgtgatcacaggcctct

SEQ ID NO: 5142607 - DNA, 25 bp, Homo sapien
aggctgctgcagcaagacacgtgat

SEQ ID NO: 5142608 - DNA, 25 bp, Homo sapien
gacacgtgatcacaggcctctcttc

SEQ ID NO: 5142609 - DNA, 25 bp, Homo sapien
caggctgctgcagcaagacacgtga

SEQ ID NO: 5142610 - DNA, 25 bp, Homo sapien
catacaactactccgcagtcctctg

SEQ ID NO: 5142611 - DNA, 25 bp, Homo sapien
cagtcctctgttctcaactctcaaa

SEQ ID NO: 5142612 - DNA, 25 bp, Homo sapien
gtggcaaaagcagaaaattggtcct

SEQ ID NO: 5142613 - DNA, 25 bp, Homo sapien
cctgagaatggtcataggcagccgt

SEQ ID NO: 5142614 - DNA, 25 bp, Homo sapien
ctagaaaacttgtccatccacgaag

SEQ ID NO: 5142615 - DNA, 25 bp, Homo sapien
gggccatgggctagaaaacttgtcc

SEQ ID NO: 5142616 - DNA, 25 bp, Homo sapien
ctgggggccatgggctagaaaactt

SEQ ID NO: 5142617 - DNA, 25 bp, Homo sapien
ggctagaaaacttgtccatccacga

SEQ ID NO: 5142618 - DNA, 25 bp, Homo sapien
gaagggcaatggcttacttagtaac

SEQ ID NO: 5142619 - DNA, 25 bp, Homo sapien
ggaagggcaatggcttacttagtaa

SEQ ID NO: 5142620 - DNA, 25 bp, Homo sapien
atcttgtggtactgaatccttcttg

SEQ ID NO: 5142621 - DNA, 25 bp, Homo sapien
aggtaatgctactgctaaccacagc

SEQ ID NO: 5142622 - DNA, 25 bp, Homo sapien
tgacgtcatattgcttgtgttccca

SEQ ID NO: 5142623 - DNA, 25 bp, Homo sapien
gccagaggaggtaatgctactgcta

SEQ ID NO: 5142624 - DNA, 25 bp, Homo sapien
ggttttgtgacgtcatattgcttgt

SEQ ID NO: 5142625 - DNA, 25 bp, Homo sapien
tagacacgactatctcctggctgaa

SEQ ID NO: 5142626 - DNA, 25 bp, Homo sapien
aacctgtagacacgactatctcctg

SEQ ID NO: 5142627 - DNA, 25 bp, Homo sapien
gacaccaacctgtagacacgactat

SEQ ID NO: 5142628 - DNA, 25 bp, Homo sapien
gcagacaccaacctgtagacacgac

SEQ ID NO: 5142629 - DNA, 25 bp, Homo sapien
ttcgatgaggggcacacagtgcatt

SEQ ID NO: 5142630 - DNA, 25 bp, Homo sapien
cttgatgggagagctaggattgccc

SEQ ID NO: 5142631 - DNA, 25 bp, Homo sapien
aaagcaggcttccagccctgtcttt

SEQ ID NO: 5142632 - DNA, 25 bp, Homo sapien
ttcctccgtaactctcaggctgcgc

SEQ ID NO: 5142633 - DNA, 25 bp, Homo sapien
gggaggacggaatgccgaggccttc

SEQ ID NO: 5142634 - DNA, 25 bp, Homo sapien
ggacggaatgccgaggccttctctt

SEQ ID NO: 5142635 - DNA, 25 bp, Homo sapien
gaggacggaatgccgaggccttctc

SEQ ID NO: 5142636 - DNA, 25 bp, Homo sapien
acggaatgccgaggccttctcttcc

SEQ ID NO: 5142637 - DNA, 25 bp, Homo sapien
tctcacagctatcgcagttgtgggc

SEQ ID NO: 5142638 - DNA, 25 bp, Homo sapien
tcatctcacagctatcgcagttgtg

SEQ ID NO: 5142639 - DNA, 25 bp, Homo sapien
cacagctatcgcagttgtgggcaag

SEQ ID NO: 5142640 - DNA, 25 bp, Homo sapien
ctatcgcagttgtgggcaagagctc

SEQ ID NO: 5142641 - DNA, 25 bp, Homo sapien
gccataatatggaggtcagcgggat

SEQ ID NO: 5142642 - DNA, 25 bp, Homo sapien
cataatatggaggtcagcgggatgc

SEQ ID NO: 5142643 - DNA, 25 bp, Homo sapien
ttcagccataatatggaggtcagcg

SEQ ID NO: 5142644 - DNA, 25 bp, Homo sapien
taatatggaggtcagcgggatgcat

SEQ ID NO: 5142645 - DNA, 25 bp, Homo sapien
ggcactgccacctccggatagcttt

SEQ ID NO: 5142646 - DNA, 25 bp, Homo sapien
catttattcccctagatgtcaggca

SEQ ID NO: 5142647 - DNA, 25 bp, Homo sapien
tcctgtgcagttccctcgaaatgac

SEQ ID NO: 5142648 - DNA, 25 bp, Homo sapien
gacacgttctgcatctggatcttgg

SEQ ID NO: 5142649 - DNA, 25 bp, Homo sapien
ttaggcgtatgcccatgggagcact

SEQ ID NO: 5142650 - DNA, 25 bp, Homo sapien
gcccatgggagcactgtgtccctac

SEQ ID NO: 5142651 - DNA, 25 bp, Homo sapien
tatgcccatgggagcactgtgtccc

SEQ ID NO: 5142652 - DNA, 25 bp, Homo sapien
aggcgtatgcccatgggagcactgt

SEQ ID NO: 5142653 - DNA, 25 bp, Homo sapien
tcttctcctacatgctaagtatatt

SEQ ID NO: 5142654 - DNA, 25 bp, Homo sapien
aaccaccatcatagcccatttctgg

SEQ ID NO: 5142655 - DNA, 25 bp, Homo sapien
catcatagcccatttctggagtctc

SEQ ID NO: 5142656 - DNA, 25 bp, Homo sapien
gtctctcttctcctacatgctaagt

SEQ ID NO: 5142657 - DNA, 25 bp, Homo sapien
tcgccctgcaatcccgagtgtcgct

SEQ ID NO: 5142658 - DNA, 25 bp, Homo sapien
gcaaagcctccttccggttcctcaa

SEQ ID NO: 5142659 - DNA, 25 bp, Homo sapien
taaggtcccttagatccagaacttc

SEQ ID NO: 5142660 - DNA, 25 bp, Homo sapien
ttcctcaactgtggacccagagggt

SEQ ID NO: 5142661 - DNA, 25 bp, Homo sapien
tgtgaccgtggagagagacatcctc

SEQ ID NO: 5142662 - DNA, 25 bp, Homo sapien
cacactttgtggaagcgttgccagc

SEQ ID NO: 5142663 - DNA, 25 bp, Homo sapien
tgaagggcacccatatctctggctg

SEQ ID NO: 5142664 - DNA, 25 bp, Homo sapien
cctggatgctgaggtacagtgttcc

SEQ ID NO: 5142665 - DNA, 25 bp, Homo sapien
agagggctgtcccctgctgctgagg

SEQ ID NO: 5142666 - DNA, 25 bp, Homo sapien
gctgtcccctgctgctgaggcccat

SEQ ID NO: 5142667 - DNA, 25 bp, Homo sapien
agggctgtcccctgctgctgaggcc

SEQ ID NO: 5142668 - DNA, 25 bp, Homo sapien
gggctgtcccctgctgctgaggccc

SEQ ID NO: 5142669 - DNA, 25 bp, Homo sapien
aaagcctctgagatcccctggtgtc

SEQ ID NO: 5142670 - DNA, 25 bp, Homo sapien
tgataaagcctctgagatcccctgg

SEQ ID NO: 5142671 - DNA, 25 bp, Homo sapien
gataaagcctctgagatcccctggt

SEQ ID NO: 5142672 - DNA, 25 bp, Homo sapien
tgtgataaagcctctgagatcccct

SEQ ID NO: 5142673 - DNA, 25 bp, Homo sapien
tgaagcctgcctcatgttctcgcca

SEQ ID NO: 5142674 - DNA, 25 bp, Homo sapien
gtctgtactctacgaggcgacgcaa

SEQ ID NO: 5142675 - DNA, 25 bp, Homo sapien
tgtaaattccgccatgagcacagtt

SEQ ID NO: 5142676 - DNA, 25 bp, Homo sapien
ggcgacgcaaaactggcacaatgta

SEQ ID NO: 5142677 - DNA, 25 bp, Homo sapien
caatgactttagcaaagctaaagcc

SEQ ID NO: 5142678 - DNA, 25 bp, Homo sapien
ctagctcttgggatatagtaggagc

SEQ ID NO: 5142679 - DNA, 25 bp, Homo sapien
tgggatatagtaggagctcaatgac

SEQ ID NO: 5142680 - DNA, 25 bp, Homo sapien
taggagctcaatgactttagcaaag

SEQ ID NO: 5142681 - DNA, 25 bp, Homo sapien
tttgcacacgggcaaggataagcgc

SEQ ID NO: 5142682 - DNA, 25 bp, Homo sapien
cacacgggcaaggataagcgctaac

SEQ ID NO: 5142683 - DNA, 25 bp, Homo sapien
acttcatcattaggacatccctatg

SEQ ID NO: 5142684 - DNA, 25 bp, Homo sapien
ttcccattttgcacacgggcaagga

SEQ ID NO: 5142685 - DNA, 25 bp, Homo sapien
gagtcatcggtgttggcttcatctt

SEQ ID NO: 5142686 - DNA, 25 bp, Homo sapien
tcctgaccagaaagtaagccgactc

SEQ ID NO: 5142687 - DNA, 25 bp, Homo sapien
gggtcatcttctaccacactggtga

SEQ ID NO: 5142688 - DNA, 25 bp, Homo sapien
ccaaactactgtggagaatggtggc

SEQ ID NO: 5142689 - DNA, 25 bp, Homo sapien
gacctaaatgaactggcagcgcttt

SEQ ID NO: 5142690 - DNA, 25 bp, Homo sapien
tgggctccatctccgactgccatct

SEQ ID NO: 5142691 - DNA, 25 bp, Homo sapien
ttttactttgtgtccggcactgtcc

SEQ ID NO: 5142692 - DNA, 25 bp, Homo sapien
cattcagacctaaatgaactggcag

SEQ ID NO: 5142693 - DNA, 25 bp, Homo sapien
gggcaactgtcacctctgtaggcaa

SEQ ID NO: 5142694 - DNA, 25 bp, Homo sapien
gctcacaaattgatgagtactgagg

SEQ ID NO: 5142695 - DNA, 25 bp, Homo sapien
tgcatgctgaacagtggacaccgat

SEQ ID NO: 5142696 - DNA, 25 bp, Homo sapien
gctagaatttcttgtggctcacaaa

SEQ ID NO: 5142697 - DNA, 25 bp, Homo sapien
tccatgttccatcagcgacccgtaa

SEQ ID NO: 5142698 - DNA, 25 bp, Homo sapien
aggcaaatttatgggcacaggcagc

SEQ ID NO: 5142699 - DNA, 25 bp, Homo sapien
tgcataggcaaatttatgggcacag

SEQ ID NO: 5142700 - DNA, 25 bp, Homo sapien
ccggcgcttacaaaatgcaccgtct

SEQ ID NO: 5142701 - DNA, 25 bp, Homo sapien
cagtgttcaaaggtgtatcagggct

SEQ ID NO: 5142702 - DNA, 25 bp, Homo sapien
caaaggtgtatcagggctaatgaag

SEQ ID NO: 5142703 - DNA, 25 bp, Homo sapien
aggtgacagtgttcaaaggtgtatc

SEQ ID NO: 5142704 - DNA, 25 bp, Homo sapien
tgttcaaaggtgtatcagggctaat

SEQ ID NO: 5142705 - DNA, 25 bp, Homo sapien
ctcctatccagtggcaatgtggaaa

SEQ ID NO: 5142706 - DNA, 25 bp, Homo sapien
ctatccagtggcaatgtggaaaacc

SEQ ID NO: 5142707 - DNA, 25 bp, Homo sapien
ggaaaacctctggtccctaagatgc

SEQ ID NO: 5142708 - DNA, 25 bp, Homo sapien
gctattctgggtaaaagtctggaaa

SEQ ID NO: 5142709 - DNA, 25 bp, Homo sapien
ggccaaggacaccactagtctagtc

SEQ ID NO: 5142710 - DNA, 25 bp, Homo sapien
tgcaaggctacagtatcacctgcat

SEQ ID NO: 5142711 - DNA, 25 bp, Homo sapien
gcacccagtgagaaactgattccct

SEQ ID NO: 5142712 - DNA, 25 bp, Homo sapien
gtcacacggataaagaggacacagg

SEQ ID NO: 5142713 - DNA, 25 bp, Homo sapien
tgctaaagctagctattttagaata

SEQ ID NO: 5142714 - DNA, 25 bp, Homo sapien
gttgctaaagctagctattttagaa

SEQ ID NO: 5142715 - DNA, 25 bp, Homo sapien
taaagctagctattttagaatataa

SEQ ID NO: 5142716 - DNA, 25 bp, Homo sapien
aagctagctattttagaatataaga

SEQ ID NO: 5142717 - DNA, 25 bp, Homo sapien
cttgcgaaggagtaatgtgccttgg

SEQ ID NO: 5142718 - DNA, 25 bp, Homo sapien
cgaaggagtaatgtgccttgggaaa

SEQ ID NO: 5142719 - DNA, 25 bp, Homo sapien
tgcgaaggagtaatgtgccttggga

SEQ ID NO: 5142720 - DNA, 25 bp, Homo sapien
acttgcgaaggagtaatgtgccttg

SEQ ID NO: 5142721 - DNA, 25 bp, Homo sapien
gcttgttacatctaccttctaaggg

SEQ ID NO: 5142722 - DNA, 25 bp, Homo sapien
gaaggtaaagctgacaaacttcagc

SEQ ID NO: 5142723 - DNA, 25 bp, Homo sapien
tctaagggaaggtaaagctgacaaa

SEQ ID NO: 5142724 - DNA, 25 bp, Homo sapien
tgttacatctaccttctaagggaag

SEQ ID NO: 5142725 - DNA, 25 bp, Homo sapien
tggttgacagcgatgggtccagctg

SEQ ID NO: 5142726 - DNA, 25 bp, Homo sapien
ggttgacagcgatgggtccagctgc

SEQ ID NO: 5142727 - DNA, 25 bp, Homo sapien
ctggttgacagcgatgggtccagct

SEQ ID NO: 5142728 - DNA, 25 bp, Homo sapien
tcaggccgctattgtctgggggttg

SEQ ID NO: 5142729 - DNA, 25 bp, Homo sapien
caggccgctattgtctgggggttgt

SEQ ID NO: 5142730 - DNA, 25 bp, Homo sapien
gccgctattgtctgggggttgttac

SEQ ID NO: 5142731 - DNA, 25 bp, Homo sapien
aggccgctattgtctgggggttgtt

SEQ ID NO: 5142732 - DNA, 25 bp, Homo sapien
tgtgtgtgtgacaaaaaccctggac

SEQ ID NO: 5142733 - DNA, 25 bp, Homo sapien
tatggaaattaacactaggagcctc

SEQ ID NO: 5142734 - DNA, 25 bp, Homo sapien
caaagcagtcccattcgcagcggga

SEQ ID NO: 5142735 - DNA, 25 bp, Homo sapien
gaaatctgcccatttaagctctgag

SEQ ID NO: 5142736 - DNA, 25 bp, Homo sapien
actgtcagtcccctggtgcttcgcc

SEQ ID NO: 5142737 - DNA, 25 bp, Homo sapien
ttctgagaacatcacagcaggttgt

SEQ ID NO: 5142738 - DNA, 25 bp, Homo sapien
ctggtgcttcgccatcttatctaaa

SEQ ID NO: 5142739 - DNA, 25 bp, Homo sapien
tgtccctgattgctagtacattctc

SEQ ID NO: 5142740 - DNA, 25 bp, Homo sapien
ggtcaagggcaatgacaatttcaag

SEQ ID NO: 5142741 - DNA, 25 bp, Homo sapien
ttggtcaagggcaatgacaatttca

SEQ ID NO: 5142742 - DNA, 25 bp, Homo sapien
cctatgaattggtcaagggcaatga

SEQ ID NO: 5142743 - DNA, 25 bp, Homo sapien
tgaattggtcaagggcaatgacaat

SEQ ID NO: 5142744 - DNA, 25 bp, Homo sapien
tttaccaaatgacatttcgtgctgt

SEQ ID NO: 5142745 - DNA, 25 bp, Homo sapien
gacatttcgtgctgttttcacacta

SEQ ID NO: 5142746 - DNA, 25 bp, Homo sapien
accaaatgacatttcgtgctgtttt

SEQ ID NO: 5142747 - DNA, 25 bp, Homo sapien
taccaaatgacatttcgtgctgttt

SEQ ID NO: 5142748 - DNA, 25 bp, Homo sapien
acagtctatggatccagacctgcca

SEQ ID NO: 5142749 - DNA, 25 bp, Homo sapien
aaatcacagtctatggatccagacc

SEQ ID NO: 5142750 - DNA, 25 bp, Homo sapien
tgttgggtgatcctggaaatcacag

SEQ ID NO: 5142751 - DNA, 25 bp, Homo sapien
gacctgccaatcatggcccacactg

SEQ ID NO: 5142752 - DNA, 25 bp, Homo sapien
gacttctcagattcatgtggagccc

SEQ ID NO: 5142753 - DNA, 25 bp, Homo sapien
tgtggagcccttgcattatcttctg

SEQ ID NO: 5142754 - DNA, 25 bp, Homo sapien
tatcttctgacactcccgttgctga

SEQ ID NO: 5142755 - DNA, 25 bp, Homo sapien
tatctgatctctagaagcctgcttg

SEQ ID NO: 5142756 - DNA, 25 bp, Homo sapien
caggtggaaagcgtatcttgggaac

SEQ ID NO: 5142757 - DNA, 25 bp, Homo sapien
tatcttgggaacgtgtttgttgcca

SEQ ID NO: 5142758 - DNA, 25 bp, Homo sapien
ttgccaacataactgcctcgttggg

SEQ ID NO: 5142759 - DNA, 25 bp, Homo sapien
gttcctatcgaagtgtttggaaggc

SEQ ID NO: 5142760 - DNA, 25 bp, Homo sapien
ctgattcccggtgcctgagtctggg

SEQ ID NO: 5142761 - DNA, 25 bp, Homo sapien
gcttcagggcccctgattcccggtg

SEQ ID NO: 5142762 - DNA, 25 bp, Homo sapien
ccctgattcccggtgcctgagtctg

SEQ ID NO: 5142763 - DNA, 25 bp, Homo sapien
agggcccctgattcccggtgcctga

SEQ ID NO: 5142764 - DNA, 25 bp, Homo sapien
aaatggagctgaaagcccatttcca

SEQ ID NO: 5142765 - DNA, 25 bp, Homo sapien
taactgtgtatgtaaatggagctga

SEQ ID NO: 5142766 - DNA, 25 bp, Homo sapien
ccgtgattgatttgttaactgtgta

SEQ ID NO: 5142767 - DNA, 25 bp, Homo sapien
atgccgtgattgatttgttaactgt

SEQ ID NO: 5142768 - DNA, 25 bp, Homo sapien
catttcaaccactgtgaagcctttt

SEQ ID NO: 5142769 - DNA, 25 bp, Homo sapien
cattggctcccgcaactgtggtgta

SEQ ID NO: 5142770 - DNA, 25 bp, Homo sapien
tccagtatgtctgttgacttgaaca

SEQ ID NO: 5142771 - DNA, 25 bp, Homo sapien
tggttctcatcccaagtatttgcaa

SEQ ID NO: 5142772 - DNA, 25 bp, Homo sapien
ggcatttagctcagttaccgtgatg

SEQ ID NO: 5142773 - DNA, 25 bp, Homo sapien
taccgtgatgccctgaacataaacg

SEQ ID NO: 5142774 - DNA, 25 bp, Homo sapien
gggttccggcatgattgacataaat

SEQ ID NO: 5142775 - DNA, 25 bp, Homo sapien
catgtggatgaccacacacagcggg

SEQ ID NO: 5142776 - DNA, 25 bp, Homo sapien
tgatttgaggagtatggacaccgcc

SEQ ID NO: 5142777 - DNA, 25 bp, Homo sapien
acgttgccgatgagttgacatgtgc

SEQ ID NO: 5142778 - DNA, 25 bp, Homo sapien
catgtgctttcagttcactcgtgca

SEQ ID NO: 5142779 - DNA, 25 bp, Homo sapien
cagcacacaggagtaaccgttccct

SEQ ID NO: 5142780 - DNA, 25 bp, Homo sapien
ctggcgaggggggtgcatatcaaaa

SEQ ID NO: 5142781 - DNA, 25 bp, Homo sapien
ttgcaattctgtcccctatgtctga

SEQ ID NO: 5142782 - DNA, 25 bp, Homo sapien
aatgaccaaactggcgaggggggtg

SEQ ID NO: 5142783 - DNA, 25 bp, Homo sapien
tttatttgcaattctgtcccctatg

SEQ ID NO: 5142784 - DNA, 25 bp, Homo sapien
gcagcgtggataccttgcactcaac

SEQ ID NO: 5142785 - DNA, 25 bp, Homo sapien
tgcatgcacaggcactggtgaagtg

SEQ ID NO: 5142786 - DNA, 25 bp, Homo sapien
tcacaatcactccaagacagctctg

SEQ ID NO: 5142787 - DNA, 25 bp, Homo sapien
acatcacacctttgctcagttgctg

SEQ ID NO: 5142788 - DNA, 25 bp, Homo sapien
tccctgagccaaggttgctttcctg

SEQ ID NO: 5142789 - DNA, 25 bp, Homo sapien
tttgcagaccgtgcttctggctgaa

SEQ ID NO: 5142790 - DNA, 25 bp, Homo sapien
acaccagtagccctgcactcagcac

SEQ ID NO: 5142791 - DNA, 25 bp, Homo sapien
actcagcaccaatcccccgtaagtg

SEQ ID NO: 5142792 - DNA, 25 bp, Homo sapien
aatactgtatccgaactctcttcat

SEQ ID NO: 5142793 - DNA, 25 bp, Homo sapien
ctgtatccgaactctcttcatgaaa

SEQ ID NO: 5142794 - DNA, 25 bp, Homo sapien
cacatctgctaaggagcctgaggaa

SEQ ID NO: 5142795 - DNA, 25 bp, Homo sapien
tatccgaactctcttcatgaaaagt

SEQ ID NO: 5142796 - DNA, 25 bp, Homo sapien
atatatttcctttagcatgacaacc

SEQ ID NO: 5142797 - DNA, 25 bp, Homo sapien
tcccagagcccaggtaaatatattt

SEQ ID NO: 5142798 - DNA, 25 bp, Homo sapien
ctacagtgtaaacaccattcatgca

SEQ ID NO: 5142799 - DNA, 25 bp, Homo sapien
tggccagaccaccacttcccagagc

SEQ ID NO: 5142800 - DNA, 25 bp, Homo sapien
cagaagaaccacagccgttgttgat

SEQ ID NO: 5142801 - DNA, 25 bp, Homo sapien
tgggtgtgggtagagcttgtccgct

SEQ ID NO: 5142802 - DNA, 25 bp, Homo sapien
cttgtccgctggaggtgacgcagac

SEQ ID NO: 5142803 - DNA, 25 bp, Homo sapien
cacagccgttgttgatgaatctggg

SEQ ID NO: 5142804 - DNA, 25 bp, Homo sapien
gactaattgcaggaccagaggcgaa

SEQ ID NO: 5142805 - DNA, 25 bp, Homo sapien
tctcaacatggagctagggaaaccc

SEQ ID NO: 5142806 - DNA, 25 bp, Homo sapien
aagaagggcttacgatgacctcggc

SEQ ID NO: 5142807 - DNA, 25 bp, Homo sapien
gaagtgacagtagtcgccacaggaa

SEQ ID NO: 5142808 - DNA, 25 bp, Homo sapien
tcacacccacaatgttaagcctgtg

SEQ ID NO: 5142809 - DNA, 25 bp, Homo sapien
gcctgtgaatcccattgcaatttaa

SEQ ID NO: 5142810 - DNA, 25 bp, Homo sapien
gcagctgccactatgacctttaact

SEQ ID NO: 5142811 - DNA, 25 bp, Homo sapien
cctttaactgcatccatggtaactg

SEQ ID NO: 5142812 - DNA, 25 bp, Homo sapien
gacattgtccaaaccctttcgatga

SEQ ID NO: 5142813 - DNA, 25 bp, Homo sapien
tgtccaaaccctttcgatgaagaag

SEQ ID NO: 5142814 - DNA, 25 bp, Homo sapien
tgaaaatccgacattgtccaaaccc

SEQ ID NO: 5142815 - DNA, 25 bp, Homo sapien
cctttcgatgaagaagcttgcttga

SEQ ID NO: 5142816 - DNA, 25 bp, Homo sapien
attgaaatgaagtgttgacatcagg

SEQ ID NO: 5142817 - DNA, 25 bp, Homo sapien
taggagttttaagatctattgaaat

SEQ ID NO: 5142818 - DNA, 25 bp, Homo sapien
gaaatgaagtgttgacatcagggaa

SEQ ID NO: 5142819 - DNA, 25 bp, Homo sapien
agtgttgacatcagggaatattttg

SEQ ID NO: 5142820 - DNA, 25 bp, Homo sapien
ccaaatgggtgagttatgcagctac

SEQ ID NO: 5142821 - DNA, 25 bp, Homo sapien
taccctatcgcaaaggactgccgtg

SEQ ID NO: 5142822 - DNA, 25 bp, Homo sapien
tcccatgctcaggaacagtaagtgt

SEQ ID NO: 5142823 - DNA, 25 bp, Homo sapien
tagatgcttagcacatcgtgggtac

SEQ ID NO: 5142824 - DNA, 25 bp, Homo sapien
gatatctgagaaccaagcattgtgc

SEQ ID NO: 5142825 - DNA, 25 bp, Homo sapien
tgagtcccgtgtaccagacatggtt

SEQ ID NO: 5142826 - DNA, 25 bp, Homo sapien
gcacttgggcattgacaggttggtc

SEQ ID NO: 5142827 - DNA, 25 bp, Homo sapien
tattttgaggcagcttgagtcccgt

SEQ ID NO: 5142828 - DNA, 25 bp, Homo sapien
gccagctgcatggcctcaatcaagt

SEQ ID NO: 5142829 - DNA, 25 bp, Homo sapien
ccagctgcatggcctcaatcaagtc

SEQ ID NO: 5142830 - DNA, 25 bp, Homo sapien
ctgaccattaagtttttccaagagg

SEQ ID NO: 5142831 - DNA, 25 bp, Homo sapien
caggtacctttcatatgcatcagct

SEQ ID NO: 5142832 - DNA, 25 bp, Homo sapien
tgtacggtataaaggtcactggaac

SEQ ID NO: 5142833 - DNA, 25 bp, Homo sapien
gcatcagcttattggcatcaacaag

SEQ ID NO: 5142834 - DNA, 25 bp, Homo sapien
tacagggcaacttttgtgaacatta

SEQ ID NO: 5142835 - DNA, 25 bp, Homo sapien
tgcaaagtcctgtagcagaacgagg

SEQ ID NO: 5142836 - DNA, 25 bp, Homo sapien
agccaggcttcccatcaagtgcaaa

SEQ ID NO: 5142837 - DNA, 25 bp, Homo sapien
tttgaatggaagcttacaaaggtct

SEQ ID NO: 5142838 - DNA, 25 bp, Homo sapien
ggctcgtaggccatagtgagtagta

SEQ ID NO: 5142839 - DNA, 25 bp, Homo sapien
gcgcatacacgcacattttttatta

SEQ ID NO: 5142840 - DNA, 25 bp, Homo sapien
caggtttgaagtttatgggtccact

SEQ ID NO: 5142841 - DNA, 25 bp, Homo sapien
tgcacccgttaacttgccatttgcg

SEQ ID NO: 5142842 - DNA, 25 bp, Homo sapien
gagtgagaacatgcgcatacacgca

SEQ ID NO: 5142843 - DNA, 25 bp, Homo sapien
tttccaaaacgtcaccggtggcagc

SEQ ID NO: 5142844 - DNA, 25 bp, Homo sapien
gaatacacaggacacgttgctgctg

SEQ ID NO: 5142845 - DNA, 25 bp, Homo sapien
tccctgtgaaaagattagcaagtgc

SEQ ID NO: 5142846 - DNA, 25 bp, Homo sapien
tcccaaagtcgtggtggcaagaatg

SEQ ID NO: 5142847 - DNA, 25 bp, Homo sapien
tgactaagttctgacttcttgtcct

SEQ ID NO: 5142848 - DNA, 25 bp, Homo sapien
gggcatccccagtcttgtcagccat

SEQ ID NO: 5142849 - DNA, 25 bp, Homo sapien
cttagtttgttgtctgattctccac

SEQ ID NO: 5142850 - DNA, 25 bp, Homo sapien
ctggtgcttgggcatccccagtctt

SEQ ID NO: 5142851 - DNA, 25 bp, Homo sapien
tgggggagaaggcttgctactatat

SEQ ID NO: 5142852 - DNA, 25 bp, Homo sapien
tgcctggtgtctagtttgtcttggt

SEQ ID NO: 5142853 - DNA, 25 bp, Homo sapien
gcttgctactatatgcctggtgtct

SEQ ID NO: 5142854 - DNA, 25 bp, Homo sapien
ttttgcctcaaacacatatataacc

SEQ ID NO: 5142855 - DNA, 25 bp, Homo sapien
aataggaaaaagattgttcgctaca

SEQ ID NO: 5142856 - DNA, 25 bp, Homo sapien
ctgtggcatatatgtgaaacgaaga

SEQ ID NO: 5142857 - DNA, 25 bp, Homo sapien
tgtgaaacgaagatagagaatagga

SEQ ID NO: 5142858 - DNA, 25 bp, Homo sapien
catagcactccatgatacggacgca

SEQ ID NO: 5142859 - DNA, 25 bp, Homo sapien
caaacaatcccgcattaggcagctt

SEQ ID NO: 5142860 - DNA, 25 bp, Homo sapien
ggcagcttttcagtgatccattaag

SEQ ID NO: 5142861 - DNA, 25 bp, Homo sapien
tgtatgcagtaaacagcaatgggct

SEQ ID NO: 5142862 - DNA, 25 bp, Homo sapien
aattaatcttaatggctgtatgcag

SEQ ID NO: 5142863 - DNA, 25 bp, Homo sapien
ttccttccaaagaacgcaggctcct

SEQ ID NO: 5142864 - DNA, 25 bp, Homo sapien
catccctttagagcaagatcatata

SEQ ID NO: 5142865 - DNA, 25 bp, Homo sapien
tacgttaaccttcacaccatagaag

SEQ ID NO: 5142866 - DNA, 25 bp, Homo sapien
gagaaaggatgtgtgcaattcagca

SEQ ID NO: 5142867 - DNA, 25 bp, Homo sapien
cagtaggtcacagtttcaaatccag

SEQ ID NO: 5142868 - DNA, 25 bp, Homo sapien
gagactttagacgacctctgcacag

SEQ ID NO: 5142869 - DNA, 25 bp, Homo sapien
ctggtcatacgggtggaaagctgca

SEQ ID NO: 5142870 - DNA, 25 bp, Homo sapien
tgatgccagcagttaacagaaggaa

SEQ ID NO: 5142871 - DNA, 25 bp, Homo sapien
tattccactcttcccaggcaagtta

SEQ ID NO: 5142872 - DNA, 25 bp, Homo sapien
tcatcatgtcttttggcaaatcaat

SEQ ID NO: 5142873 - DNA, 25 bp, Homo sapien
aatttcagagcatttgttcttggca

SEQ ID NO: 5142874 - DNA, 25 bp, Homo sapien
aggttaaatattccactcttcccag

SEQ ID NO: 5142875 - DNA, 25 bp, Homo sapien
tgagggatcgaacaagcaggtgcca

SEQ ID NO: 5142876 - DNA, 25 bp, Homo sapien
caatgactgacaataggcaaaggat

SEQ ID NO: 5142877 - DNA, 25 bp, Homo sapien
tattccggcagatacgtctgattca

SEQ ID NO: 5142878 - DNA, 25 bp, Homo sapien
gcaggtgccacgagtcctattccgg

SEQ ID NO: 5142879 - DNA, 25 bp, Homo sapien
tagactgactgcttcaatagaactg

SEQ ID NO: 5142880 - DNA, 25 bp, Homo sapien
gactgcttcaatagaactgattttg

SEQ ID NO: 5142881 - DNA, 25 bp, Homo sapien
ccgtagactgactgcttcaatagaa

SEQ ID NO: 5142882 - DNA, 25 bp, Homo sapien
agactgactgcttcaatagaactga

SEQ ID NO: 5142883 - DNA, 25 bp, Homo sapien
cacaaactgtccttgcagtgacgct

SEQ ID NO: 5142884 - DNA, 25 bp, Homo sapien
tgacgcttgaaattccgactcagaa

SEQ ID NO: 5142885 - DNA, 25 bp, Homo sapien
gataatacgtcctgaactgagaatg

SEQ ID NO: 5142886 - DNA, 25 bp, Homo sapien
caagctgagatggacgggtctgccc

SEQ ID NO: 5142887 - DNA, 25 bp, Homo sapien
aagggaaacgatccacacacttcgg

SEQ ID NO: 5142888 - DNA, 25 bp, Homo sapien
gatgaaagtgtgtactctgcgccaa

SEQ ID NO: 5142889 - DNA, 25 bp, Homo sapien
cacttcggcttcctctgatatggaa

SEQ ID NO: 5142890 - DNA, 25 bp, Homo sapien
gttggaatacgtaaataacccagca

SEQ ID NO: 5142891 - DNA, 25 bp, Homo sapien
tctcctgaaagaagagaacgatcat

SEQ ID NO: 5142892 - DNA, 25 bp, Homo sapien
catcctcgccttcttactctcctga

SEQ ID NO: 5142893 - DNA, 25 bp, Homo sapien
gctccacactgtcagagaaccatct

SEQ ID NO: 5142894 - DNA, 25 bp, Homo sapien
tcagagaaccatctctggtactgaa

SEQ ID NO: 5142895 - DNA, 25 bp, Homo sapien
agattctagtactgggagggttcct

SEQ ID NO: 5142896 - DNA, 25 bp, Homo sapien
tgttccagtgtggttgttacagtca

SEQ ID NO: 5142897 - DNA, 25 bp, Homo sapien
gtcacaccgtaagccctagggtctg

SEQ ID NO: 5142898 - DNA, 25 bp, Homo sapien
ggcatctgctctagctttgcatgag

SEQ ID NO: 5142899 - DNA, 25 bp, Homo sapien
caaggccgtggaggtgacctgaact

SEQ ID NO: 5142900 - DNA, 25 bp, Homo sapien
tgttcagcccagaggctgtccctat

SEQ ID NO: 5142901 - DNA, 25 bp, Homo sapien
ggtgacctgaacttgttgccctgtt

SEQ ID NO: 5142902 - DNA, 25 bp, Homo sapien
gtccctatactgacagcagatttct

SEQ ID NO: 5142903 - DNA, 25 bp, Homo sapien
cggcactgccgttgccttctctgat

SEQ ID NO: 5142904 - DNA, 25 bp, Homo sapien
ttcagcaaaccctacgatcaaagtg

SEQ ID NO: 5142905 - DNA, 25 bp, Homo sapien
aaccctacgatcaaagtgacccaga

SEQ ID NO: 5142906 - DNA, 25 bp, Homo sapien
ccgttgccttctctgattagagcca

SEQ ID NO: 5142907 - DNA, 25 bp, Homo sapien
tataataattgatagcctgaaaaaa

SEQ ID NO: 5142908 - DNA, 25 bp, Homo sapien
tctgataagtgtgcagaggtaacgc

SEQ ID NO: 5142909 - DNA, 25 bp, Homo sapien
tgtgcagaggtaacgcagagctctg

SEQ ID NO: 5142910 - DNA, 25 bp, Homo sapien
taagtgtgcagaggtaacgcagagc

SEQ ID NO: 5142911 - DNA, 25 bp, Homo sapien
cttttgattgtagcacaaatccagt

SEQ ID NO: 5142912 - DNA, 25 bp, Homo sapien
caaatccagtatggtttagtgttta

SEQ ID NO: 5142913 - DNA, 25 bp, Homo sapien
tgattgtagcacaaatccagtatgg

SEQ ID NO: 5142914 - DNA, 25 bp, Homo sapien
gtagcacaaatccagtatggtttag

SEQ ID NO: 5142915 - DNA, 25 bp, Homo sapien
aacacaggtgttagacaccagcgac

SEQ ID NO: 5142916 - DNA, 25 bp, Homo sapien
ttagacaccagcgacaaacatctgg

SEQ ID NO: 5142917 - DNA, 25 bp, Homo sapien
gcgacaaacatctggattttcatcc

SEQ ID NO: 5142918 - DNA, 25 bp, Homo sapien
tactacttcgatggccaaacacagg

SEQ ID NO: 5142919 - DNA, 25 bp, Homo sapien
caaattgggctgcttcgtccaaaca

SEQ ID NO: 5142920 - DNA, 25 bp, Homo sapien
tgcatagggattggcacaaggcacc

SEQ ID NO: 5142921 - DNA, 25 bp, Homo sapien
tctagttgtggagaaccggcaggaa

SEQ ID NO: 5142922 - DNA, 25 bp, Homo sapien
catgtcagcctatttagcaggtgca

SEQ ID NO: 5142923 - DNA, 25 bp, Homo sapien
gaaccacagaggccctagcagcttt

SEQ ID NO: 5142924 - DNA, 25 bp, Homo sapien
gctttctgtggtaccctttctgcat

SEQ ID NO: 5142925 - DNA, 25 bp, Homo sapien
gaagtgtaggttcatgaaccacaga

SEQ ID NO: 5142926 - DNA, 25 bp, Homo sapien
gtgtaggttcatgaaccacagaggc

SEQ ID NO: 5142927 - DNA, 25 bp, Homo sapien
ttcttattatgcaaaatttttggca

SEQ ID NO: 5142928 - DNA, 25 bp, Homo sapien
ctcagtgtgagcaccaaaaatgaat

SEQ ID NO: 5142929 - DNA, 25 bp, Homo sapien
cagtgtgagcaccaaaaatgaattc

SEQ ID NO: 5142930 - DNA, 25 bp, Homo sapien
ccctcagtgtgagcaccaaaaatga

SEQ ID NO: 5142931 - DNA, 25 bp, Homo sapien
agcattttaatcttgttaaatgtgc

SEQ ID NO: 5142932 - DNA, 25 bp, Homo sapien
ttaaatgtgcatccaggtcttgttc

SEQ ID NO: 5142933 - DNA, 25 bp, Homo sapien
tgtctgacatacagtagttattttc

SEQ ID NO: 5142934 - DNA, 25 bp, Homo sapien
tgcatcatgaaataccaagtgtctg

SEQ ID NO: 5142935 - DNA, 25 bp, Homo sapien
gagggaaatgggaccaaaagcagtc

SEQ ID NO: 5142936 - DNA, 25 bp, Homo sapien
atgggaccaaaagcagtccgtaaag

SEQ ID NO: 5142937 - DNA, 25 bp, Homo sapien
tggaatcacgtttaggcttgctgca

SEQ ID NO: 5142938 - DNA, 25 bp, Homo sapien
ctggcactcttaggtaaagaagcgg

SEQ ID NO: 5142939 - DNA, 25 bp, Homo sapien
tcttaggtaaagaagcggagctttg

SEQ ID NO: 5142940 - DNA, 25 bp, Homo sapien
gcattgtgggaaatggaatcacgtt

SEQ ID NO: 5142941 - DNA, 25 bp, Homo sapien
gtgatgtatttattaactggctggg

SEQ ID NO: 5142942 - DNA, 25 bp, Homo sapien
ataccacagcactttttagggtgat

SEQ ID NO: 5142943 - DNA, 25 bp, Homo sapien
taataccacagcactttttagggtg

SEQ ID NO: 5142944 - DNA, 25 bp, Homo sapien
gggtgatgtatttattaactggctg

SEQ ID NO: 5142945 - DNA, 25 bp, Homo sapien
tctagagctctgatcagcagatttg

SEQ ID NO: 5142946 - DNA, 25 bp, Homo sapien
gcccaaacttcctgcaagtgcttgc

SEQ ID NO: 5142947 - DNA, 25 bp, Homo sapien
tttttcttacggcaaatctatatgt

SEQ ID NO: 5142948 - DNA, 25 bp, Homo sapien
taaggattgtgaagcatttctctag

SEQ ID NO: 5142949 - DNA, 25 bp, Homo sapien
gatttttgaggaacacattccacat

SEQ ID NO: 5142950 - DNA, 25 bp, Homo sapien
gcgcaaggtgcacgtaaatccctgg

SEQ ID NO: 5142951 - DNA, 25 bp, Homo sapien
ggctcttgctgatcatcacagcgca

SEQ ID NO: 5142952 - DNA, 25 bp, Homo sapien
tcatcacagcgcaaggtgcacgtaa

SEQ ID NO: 5142953 - DNA, 25 bp, Homo sapien
aaggaagactcttaattgaagagac

SEQ ID NO: 5142954 - DNA, 25 bp, Homo sapien
agtgcagaacctcagtcaatattgc

SEQ ID NO: 5142955 - DNA, 25 bp, Homo sapien
tgtagatctattcaacttatatgaa

SEQ ID NO: 5142956 - DNA, 25 bp, Homo sapien
cagttagtcaagtttattccccgca

SEQ ID NO: 5142957 - DNA, 25 bp, Homo sapien
gctgtatggcatctaagaatgatga

SEQ ID NO: 5142958 - DNA, 25 bp, Homo sapien
tctaagaatgatgatctcacttttg

SEQ ID NO: 5142959 - DNA, 25 bp, Homo sapien
tcctttttctatgccgagcagctcc

SEQ ID NO: 5142960 - DNA, 25 bp, Homo sapien
gacattttcagctgtatggcatcta

SEQ ID NO: 5142961 - DNA, 25 bp, Homo sapien
cgatcgcgagctacttgaagacagg

SEQ ID NO: 5142962 - DNA, 25 bp, Homo sapien
taagtccgccttgatctatgcatat

SEQ ID NO: 5142963 - DNA, 25 bp, Homo sapien
gcatatcgagttaggacaacttcca

SEQ ID NO: 5142964 - DNA, 25 bp, Homo sapien
cagaactctgtgactttgccatgct

SEQ ID NO: 5142965 - DNA, 25 bp, Homo sapien
ggatcctacagtttgcagaatggca

SEQ ID NO: 5142966 - DNA, 25 bp, Homo sapien
ccaagcttctgtccgatctcatgat

SEQ ID NO: 5142967 - DNA, 25 bp, Homo sapien
tggcactggcaggatatccacagat

SEQ ID NO: 5142968 - DNA, 25 bp, Homo sapien
gatgttcatgatttcgtccctacca

SEQ ID NO: 5142969 - DNA, 25 bp, Homo sapien
ttctggttgtctgtgcgcaggcact

SEQ ID NO: 5142970 - DNA, 25 bp, Homo sapien
tagactccgcgctccataaagtgga

SEQ ID NO: 5142971 - DNA, 25 bp, Homo sapien
tataacacggttgatcggtttctgg

SEQ ID NO: 5142972 - DNA, 25 bp, Homo sapien
ggctgcgctccgattacttcgttaa

SEQ ID NO: 5142973 - DNA, 25 bp, Homo sapien
ccataggaaatacgctgggggaaga

SEQ ID NO: 5142974 - DNA, 25 bp, Homo sapien
gtcaagacccataggaaatacgctg

SEQ ID NO: 5142975 - DNA, 25 bp, Homo sapien
taggaaatacgctgggggaagactc

SEQ ID NO: 5142976 - DNA, 25 bp, Homo sapien
ggaagactccacagcgccttgcaaa

SEQ ID NO: 5142977 - DNA, 25 bp, Homo sapien
ggacatcgcattcccacgcgaggaa

SEQ ID NO: 5142978 - DNA, 25 bp, Homo sapien
tgtcacagtcgcaggcgaggagaaa

SEQ ID NO: 5142979 - DNA, 25 bp, Homo sapien
tgttccctcattagggcggccggga

SEQ ID NO: 5142980 - DNA, 25 bp, Homo sapien
cacaatcgctgacaatgtgcggccg

SEQ ID NO: 5142981 - DNA, 25 bp, Homo sapien
ccattgtgcgggacgccgcgcctga

SEQ ID NO: 5142982 - DNA, 25 bp, Homo sapien
tcgggcgccgcgcccattgtgcggg

SEQ ID NO: 5142983 - DNA, 25 bp, Homo sapien
cattgtgcgggacgccgcgcctgac

SEQ ID NO: 5142984 - DNA, 25 bp, Homo sapien
ccgcgcccattgtgcgggacgccgc

SEQ ID NO: 5142985 - DNA, 25 bp, Homo sapien
tgtggaattttgatcgtgaatggga

SEQ ID NO: 5142986 - DNA, 25 bp, Homo sapien
tttcagtagaagttggcagccacac

SEQ ID NO: 5142987 - DNA, 25 bp, Homo sapien
caaccttacatggttggaaagattc

SEQ ID NO: 5142988 - DNA, 25 bp, Homo sapien
aaagcatgctacagatttcagtaga

SEQ ID NO: 5142989 - DNA, 25 bp, Homo sapien
gggctgccttcggagttttggtatc

SEQ ID NO: 5142990 - DNA, 25 bp, Homo sapien
tcagcaccactttgttaaatgcacg

SEQ ID NO: 5142991 - DNA, 25 bp, Homo sapien
aaggtgagtgacatgtggatgtttt

SEQ ID NO: 5142992 - DNA, 25 bp, Homo sapien
tgcacgtctcttaagccctgctgtc

SEQ ID NO: 5142993 - DNA, 25 bp, Homo sapien
tgagctttaaaaacttggtctccat

SEQ ID NO: 5142994 - DNA, 25 bp, Homo sapien
ttgagctttaaaaacttggtctcca

SEQ ID NO: 5142995 - DNA, 25 bp, Homo sapien
tttcccatcgcaggtcgcttccttg

SEQ ID NO: 5142996 - DNA, 25 bp, Homo sapien
tgtataaagaactctgtaacgctga

SEQ ID NO: 5142997 - DNA, 25 bp, Homo sapien
cttccaaatggtccctatgtataaa

SEQ ID NO: 5142998 - DNA, 25 bp, Homo sapien
tcccatcgcaggtcgcttccttggg

SEQ ID NO: 5142999 - DNA, 25 bp, Homo sapien
tcaagcttgtaaaacagtgacatcc

SEQ ID NO: 5143000 - DNA, 25 bp, Homo sapien
cattctttgtatcaggaacaaaatc

SEQ ID NO: 5143001 - DNA, 25 bp, Homo sapien
tgcaatgtcttgtggggtcgcctcc

SEQ ID NO: 5143002 - DNA, 25 bp, Homo sapien
cattagccgattctagcaaggttgg

SEQ ID NO: 5143003 - DNA, 25 bp, Homo sapien
cataaacccttccacaaggattggt

SEQ ID NO: 5143004 - DNA, 25 bp, Homo sapien
ttgggtacgggcctgaatgtctaaa

SEQ ID NO: 5143005 - DNA, 25 bp, Homo sapien
tgtgtaggatatgagtttaagaaac

SEQ ID NO: 5143006 - DNA, 25 bp, Homo sapien
cttccagggccgagcccattgtgta

SEQ ID NO: 5143007 - DNA, 25 bp, Homo sapien
ttcccacattagtgactgttgatga

SEQ ID NO: 5143008 - DNA, 25 bp, Homo sapien
ccacattagtgactgttgatgaagg

SEQ ID NO: 5143009 - DNA, 25 bp, Homo sapien
tcttcccacattagtgactgttgat

SEQ ID NO: 5143010 - DNA, 25 bp, Homo sapien
cattagtgactgttgatgaaggtag

SEQ ID NO: 5143011 - DNA, 25 bp, Homo sapien
tcaagatgtcaggtgttgtctcaaa

SEQ ID NO: 5143012 - DNA, 25 bp, Homo sapien
taagatacttccgatcagattggct

SEQ ID NO: 5143013 - DNA, 25 bp, Homo sapien
gcagtagcttaactgagtcggagaa

SEQ ID NO: 5143014 - DNA, 25 bp, Homo sapien
cagattggcttgtgaagtgggatcc

SEQ ID NO: 5143015 - DNA, 25 bp, Homo sapien
aaatgtactactgcctgctttctca

SEQ ID NO: 5143016 - DNA, 25 bp, Homo sapien
gagctataaaaactcagcatgacgt

SEQ ID NO: 5143017 - DNA, 25 bp, Homo sapien
gagaaacctgtagttcaaatgtact

SEQ ID NO: 5143018 - DNA, 25 bp, Homo sapien
tgacgtggagcatatgagaaacctg

SEQ ID NO: 5143019 - DNA, 25 bp, Homo sapien
agctgcctggatctgtccggacatg

SEQ ID NO: 5143020 - DNA, 25 bp, Homo sapien
tgtccggacatgttccagtgctcat

SEQ ID NO: 5143021 - DNA, 25 bp, Homo sapien
gcctggatctgtccggacatgttcc

SEQ ID NO: 5143022 - DNA, 25 bp, Homo sapien
tggatctgtccggacatgttccagt

SEQ ID NO: 5143023 - DNA, 25 bp, Homo sapien
tcttctgtgatgcagcctccgtcgt

SEQ ID NO: 5143024 - DNA, 25 bp, Homo sapien
gtcagaaggagaggccgtacctgtg

SEQ ID NO: 5143025 - DNA, 25 bp, Homo sapien
ctcttctgtgatgcagcctccgtcg

SEQ ID NO: 5143026 - DNA, 25 bp, Homo sapien
gagaggccgtacctgtgacctccca

SEQ ID NO: 5143027 - DNA, 25 bp, Homo sapien
atgacagcagttcctggctgtccct

SEQ ID NO: 5143028 - DNA, 25 bp, Homo sapien
ctggaacgatgacagcagttcctgg

SEQ ID NO: 5143029 - DNA, 25 bp, Homo sapien
gaacgatgacagcagttcctggctg

SEQ ID NO: 5143030 - DNA, 25 bp, Homo sapien
tgacagcagttcctggctgtccctg

SEQ ID NO: 5143031 - DNA, 25 bp, Homo sapien
tgggcgcttcggagacagtctgtca

SEQ ID NO: 5143032 - DNA, 25 bp, Homo sapien
aacggtggccgtagttaggattctg

SEQ ID NO: 5143033 - DNA, 25 bp, Homo sapien
gcatctctagcctgtgccgggaaga

SEQ ID NO: 5143034 - DNA, 25 bp, Homo sapien
ctcgttgaggcaggaaacggtggcc

SEQ ID NO: 5143035 - DNA, 25 bp, Homo sapien
cttttaattctatccagagcgtgac

SEQ ID NO: 5143036 - DNA, 25 bp, Homo sapien
aaaggcctacaaaagcatttccgtg

SEQ ID NO: 5143037 - DNA, 25 bp, Homo sapien
actggaaccaaaatctatgctgtgc

SEQ ID NO: 5143038 - DNA, 25 bp, Homo sapien
cattttccaaaactagcgtcgctta

SEQ ID NO: 5143039 - DNA, 25 bp, Homo sapien
tctgctgcagtttgttgctctaaat

SEQ ID NO: 5143040 - DNA, 25 bp, Homo sapien
tgctctaaatagaggctatgtgcca

SEQ ID NO: 5143041 - DNA, 25 bp, Homo sapien
tgtgccatgattttgccctcagtgt

SEQ ID NO: 5143042 - DNA, 25 bp, Homo sapien
cagtgtttacattcaactggaccag

SEQ ID NO: 5143043 - DNA, 25 bp, Homo sapien
ggaaagaattaagtctggggacatg

SEQ ID NO: 5143044 - DNA, 25 bp, Homo sapien
aatctttatagcctgtcctattaca

SEQ ID NO: 5143045 - DNA, 25 bp, Homo sapien
gggacatgtgcgtggccttaatata

SEQ ID NO: 5143046 - DNA, 25 bp, Homo sapien
ctttatagcctgtcctattacaaaa

SEQ ID NO: 5143047 - DNA, 25 bp, Homo sapien
tggtctgagaagcacgctgtaggtg

SEQ ID NO: 5143048 - DNA, 25 bp, Homo sapien
aggaggacaggcattgtggtctgag

SEQ ID NO: 5143049 - DNA, 25 bp, Homo sapien
tgaggaggacaggcattgtggtctg

SEQ ID NO: 5143050 - DNA, 25 bp, Homo sapien
gaggaggacaggcattgtggtctga

SEQ ID NO: 5143051 - DNA, 25 bp, Homo sapien
acagtctctgctgaggcaaagcggg

SEQ ID NO: 5143052 - DNA, 25 bp, Homo sapien
ctgctgaggcaaagcgggtggggtg

SEQ ID NO: 5143053 - DNA, 25 bp, Homo sapien
cattcacatcaaggactttattttc

SEQ ID NO: 5143054 - DNA, 25 bp, Homo sapien
actttattttcccacacagtctctg

SEQ ID NO: 5143055 - DNA, 25 bp, Homo sapien
ctgccatcctttcagcgtgtgaggc

SEQ ID NO: 5143056 - DNA, 25 bp, Homo sapien
ctgctggtgcatgtccaccaagtcc

SEQ ID NO: 5143057 - DNA, 25 bp, Homo sapien
tcctttcagcgtgtgaggcgtgtga

SEQ ID NO: 5143058 - DNA, 25 bp, Homo sapien
gccatcctttcagcgtgtgaggcgt

SEQ ID NO: 5143059 - DNA, 25 bp, Homo sapien
tttggaggcatcctgggtatgtcct

SEQ ID NO: 5143060 - DNA, 25 bp, Homo sapien
gtgtctaaggcccttatgttttgcc

SEQ ID NO: 5143061 - DNA, 25 bp, Homo sapien
gcatcctgggtatgtccttgaccct

SEQ ID NO: 5143062 - DNA, 25 bp, Homo sapien
tgttttgccttggagagtcttagat

SEQ ID NO: 5143063 - DNA, 25 bp, Homo sapien
tcccatcggtcaggaggacgatggc

SEQ ID NO: 5143064 - DNA, 25 bp, Homo sapien
tggcagtgccgagcaccacctggct

SEQ ID NO: 5143065 - DNA, 25 bp, Homo sapien
cttctccggcctgggtcggtagcat

SEQ ID NO: 5143066 - DNA, 25 bp, Homo sapien
ctcccagtccgcagaggcagaggag

SEQ ID NO: 5143067 - DNA, 25 bp, Homo sapien
cagcgaaatcgcagcagaggagatg

SEQ ID NO: 5143068 - DNA, 25 bp, Homo sapien
tttgcgccaacgtgaaaagaactgc

SEQ ID NO: 5143069 - DNA, 25 bp, Homo sapien
gatggagcagcttcgtgcgcattgc

SEQ ID NO: 5143070 - DNA, 25 bp, Homo sapien
tgaatcagcccgagagctgtggatc

SEQ ID NO: 5143071 - DNA, 25 bp, Homo sapien
ccttccttagcgctgggctgttggg

SEQ ID NO: 5143072 - DNA, 25 bp, Homo sapien
gggcttggcgtgaacttgttgatca

SEQ ID NO: 5143073 - DNA, 25 bp, Homo sapien
ggacactgtggccttccttagcgct

SEQ ID NO: 5143074 - DNA, 25 bp, Homo sapien
ggcttggcgtgaacttgttgatcac

SEQ ID NO: 5143075 - DNA, 25 bp, Homo sapien
tcagggaagttcctcgaggtggaac

SEQ ID NO: 5143076 - DNA, 25 bp, Homo sapien
cctttctggcatgaagaccctgata

SEQ ID NO: 5143077 - DNA, 25 bp, Homo sapien
agttggccacgagagccagggcttc

SEQ ID NO: 5143078 - DNA, 25 bp, Homo sapien
cagcgggaatgttaccgaggagtcc

SEQ ID NO: 5143079 - DNA, 25 bp, Homo sapien
tctggtcagattttgaggggttgcc

SEQ ID NO: 5143080 - DNA, 25 bp, Homo sapien
ctggtcagattttgaggggttgcca

SEQ ID NO: 5143081 - DNA, 25 bp, Homo sapien
tctctggtcagattttgaggggttg

SEQ ID NO: 5143082 - DNA, 25 bp, Homo sapien
tggtcagattttgaggggttgccac

SEQ ID NO: 5143083 - DNA, 25 bp, Homo sapien
ccacacatatcctcaggaaaggatc

SEQ ID NO: 5143084 - DNA, 25 bp, Homo sapien
tgaggttgagagacagacatagtcc

SEQ ID NO: 5143085 - DNA, 25 bp, Homo sapien
tttccacacatatcctcaggaaagg

SEQ ID NO: 5143086 - DNA, 25 bp, Homo sapien
gattgaggttgagagacagacatag

SEQ ID NO: 5143087 - DNA, 25 bp, Homo sapien
tgaggccatgtgcatgcagttggtg

SEQ ID NO: 5143088 - DNA, 25 bp, Homo sapien
gaggccatgtgcatgcagttggtgt

SEQ ID NO: 5143089 - DNA, 25 bp, Homo sapien
aggccatgtgcatgcagttggtgtc

SEQ ID NO: 5143090 - DNA, 25 bp, Homo sapien
gtctgatccttttccccgactgtgg

SEQ ID NO: 5143091 - DNA, 25 bp, Homo sapien
tctgatccttttccccgactgtggc

SEQ ID NO: 5143092 - DNA, 25 bp, Homo sapien
cattcttcagtacttggtgagcacc

SEQ ID NO: 5143093 - DNA, 25 bp, Homo sapien
agggcattcaggcattcttcagtac

SEQ ID NO: 5143094 - DNA, 25 bp, Homo sapien
ggtgagcacctcctagtgccaagct

SEQ ID NO: 5143095 - DNA, 25 bp, Homo sapien
tcttcagtacttggtgagcacctcc

SEQ ID NO: 5143096 - DNA, 25 bp, Homo sapien
agtccagggagtgcgagaatttagc

SEQ ID NO: 5143097 - DNA, 25 bp, Homo sapien
gacgcgaacgggctgtaaaatctgt

SEQ ID NO: 5143098 - DNA, 25 bp, Homo sapien
gaagggagccaaaaacgctgctgca

SEQ ID NO: 5143099 - DNA, 25 bp, Homo sapien
tgtgcctgggcatttcagactgtgc

SEQ ID NO: 5143100 - DNA, 25 bp, Homo sapien
caactcctcgatacctttcccatca

SEQ ID NO: 5143101 - DNA, 25 bp, Homo sapien
tcatcaactcctcgatacctttccc

SEQ ID NO: 5143102 - DNA, 25 bp, Homo sapien
aaggtatctgccttttgagcttcca

SEQ ID NO: 5143103 - DNA, 25 bp, Homo sapien
cttccaccacagtctatgctgagaa

SEQ ID NO: 5143104 - DNA, 25 bp, Homo sapien
cagtgaaacttcctcagcattccca

SEQ ID NO: 5143105 - DNA, 25 bp, Homo sapien
catcctatgctccagtgaaacttcc

SEQ ID NO: 5143106 - DNA, 25 bp, Homo sapien
tgcccatctagccccagatcctgcc

SEQ ID NO: 5143107 - DNA, 25 bp, Homo sapien
tccatgattcttcacacctgctgtg

SEQ ID NO: 5143108 - DNA, 25 bp, Homo sapien
cagggaggcagtgattggatctgca

SEQ ID NO: 5143109 - DNA, 25 bp, Homo sapien
gaggcagtgattggatctgcatatg

SEQ ID NO: 5143110 - DNA, 25 bp, Homo sapien
tggatctgcatatgtgctccattta

SEQ ID NO: 5143111 - DNA, 25 bp, Homo sapien
gcatatgtgctccatttaattgttt

SEQ ID NO: 5143112 - DNA, 25 bp, Homo sapien
tcaggatacccgttgacttgggaag

SEQ ID NO: 5143113 - DNA, 25 bp, Homo sapien
ttggagcacaatatcaacctgaggg

SEQ ID NO: 5143114 - DNA, 25 bp, Homo sapien
aagaaagctgggtcgctcatgggtc

SEQ ID NO: 5143115 - DNA, 25 bp, Homo sapien
ggtccgtgaacccaactgagaactg

SEQ ID NO: 5143116 - DNA, 25 bp, Homo sapien
ttcttggaatatgttgcaaaattga

SEQ ID NO: 5143117 - DNA, 25 bp, Homo sapien
atcaaatttagatttctcttgcacg

SEQ ID NO: 5143118 - DNA, 25 bp, Homo sapien
caaatttagatttctcttgcacgga

SEQ ID NO: 5143119 - DNA, 25 bp, Homo sapien
atttagatttctcttgcacggacat

SEQ ID NO: 5143120 - DNA, 25 bp, Homo sapien
aaatttagatttctcttgcacggac

SEQ ID NO: 5143121 - DNA, 25 bp, Homo sapien
ctttggaaggcattaggattcttct

SEQ ID NO: 5143122 - DNA, 25 bp, Homo sapien
cctttggaaggcattaggattcttc

SEQ ID NO: 5143123 - DNA, 25 bp, Homo sapien
gcctttggaaggcattaggattctt

SEQ ID NO: 5143124 - DNA, 25 bp, Homo sapien
tgatgtagctaggctgcttttcact

SEQ ID NO: 5143125 - DNA, 25 bp, Homo sapien
ttgccgccttagtgatgtagctagg

SEQ ID NO: 5143126 - DNA, 25 bp, Homo sapien
cgccttagtgatgtagctaggctgc

SEQ ID NO: 5143127 - DNA, 25 bp, Homo sapien
ttagtgatgtagctaggctgctttt

SEQ ID NO: 5143128 - DNA, 25 bp, Homo sapien
tcaggatctgcagcggtgcaactcc

SEQ ID NO: 5143129 - DNA, 25 bp, Homo sapien
tgggagcattgaattcgggaataaa

SEQ ID NO: 5143130 - DNA, 25 bp, Homo sapien
catttttgagggatccctcaggatc

SEQ ID NO: 5143131 - DNA, 25 bp, Homo sapien
cccaagatttggatggtctgcagga

SEQ ID NO: 5143132 - DNA, 25 bp, Homo sapien
ctgccacgattggactaagtgtcat

SEQ ID NO: 5143133 - DNA, 25 bp, Homo sapien
tcagggatttgattacacttatcat

SEQ ID NO: 5143134 - DNA, 25 bp, Homo sapien
gtcagggatttgattacacttatca

SEQ ID NO: 5143135 - DNA, 25 bp, Homo sapien
gacttccattggtatctacagcttc

SEQ ID NO: 5143136 - DNA, 25 bp, Homo sapien
catctggtcaagctttgcaatagaa

SEQ ID NO: 5143137 - DNA, 25 bp, Homo sapien
tcaggccacggaatgctgcaattca

SEQ ID NO: 5143138 - DNA, 25 bp, Homo sapien
gaaagcttatcctccgattcccaaa

SEQ ID NO: 5143139 - DNA, 25 bp, Homo sapien
tgttccctgtgagacagcggccatc

SEQ ID NO: 5143140 - DNA, 25 bp, Homo sapien
tgtgagacagcggccatcagcctta

SEQ ID NO: 5143141 - DNA, 25 bp, Homo sapien
gtgagacagcggccatcagccttac

SEQ ID NO: 5143142 - DNA, 25 bp, Homo sapien
tccctgtgagacagcggccatcagc

SEQ ID NO: 5143143 - DNA, 25 bp, Homo sapien
ttgatcactgcatcagatattttta

SEQ ID NO: 5143144 - DNA, 25 bp, Homo sapien
gtgtctttgatcactgcatcagata

SEQ ID NO: 5143145 - DNA, 25 bp, Homo sapien
gtctttgatcactgcatcagatatt

SEQ ID NO: 5143146 - DNA, 25 bp, Homo sapien
ctttgatcactgcatcagatatttt

SEQ ID NO: 5143147 - DNA, 25 bp, Homo sapien
atagtacaccccatgaaccgcaggc

SEQ ID NO: 5143148 - DNA, 25 bp, Homo sapien
aggcaacggtcagggcacagttgac

SEQ ID NO: 5143149 - DNA, 25 bp, Homo sapien
aatagtacaccccatgaaccgcagg

SEQ ID NO: 5143150 - DNA, 25 bp, Homo sapien
tcccgaggcaggcaacggtcagggc

SEQ ID NO: 5143151 - DNA, 25 bp, Homo sapien
ggagaggctccactggatcttgtgc

SEQ ID NO: 5143152 - DNA, 25 bp, Homo sapien
ggcaaggtacccaaggagaggctcc

SEQ ID NO: 5143153 - DNA, 25 bp, Homo sapien
ctctacagtctattgcaaggcagct

SEQ ID NO: 5143154 - DNA, 25 bp, Homo sapien
tgctgggatatctcatgcttcaggg

SEQ ID NO: 5143155 - DNA, 25 bp, Homo sapien
caggggagcaacgtgaacacaggta

SEQ ID NO: 5143156 - DNA, 25 bp, Homo sapien
ggggagcaacgtgaacacaggtaag

SEQ ID NO: 5143157 - DNA, 25 bp, Homo sapien
aggggagcaacgtgaacacaggtaa

SEQ ID NO: 5143158 - DNA, 25 bp, Homo sapien
cctgaaaatcatatgcgtggttttt

SEQ ID NO: 5143159 - DNA, 25 bp, Homo sapien
aatcatatgcgtggtttttcctgtt

SEQ ID NO: 5143160 - DNA, 25 bp, Homo sapien
aaaatcatatgcgtggtttttcctg

SEQ ID NO: 5143161 - DNA, 25 bp, Homo sapien
ctgcctgaaaatcatatgcgtggtt

SEQ ID NO: 5143162 - DNA, 25 bp, Homo sapien
attgcagagggtcccagtttcattc

SEQ ID NO: 5143163 - DNA, 25 bp, Homo sapien
aattgcagagggtcccagtttcatt

SEQ ID NO: 5143164 - DNA, 25 bp, Homo sapien
ttgcagagggtcccagtttcattca

SEQ ID NO: 5143165 - DNA, 25 bp, Homo sapien
tctggagatgataaacctgctaatt

SEQ ID NO: 5143166 - DNA, 25 bp, Homo sapien
cagatatagacagtgtagggctgtg

SEQ ID NO: 5143167 - DNA, 25 bp, Homo sapien
gataaacctgctaattgctggagag

SEQ ID NO: 5143168 - DNA, 25 bp, Homo sapien
gctggagagttttaattaagcaaca

SEQ ID NO: 5143169 - DNA, 25 bp, Homo sapien
cctcagaggcctttgctggaggagt

SEQ ID NO: 5143170 - DNA, 25 bp, Homo sapien
tggcctcagaggcctttgctggagg

SEQ ID NO: 5143171 - DNA, 25 bp, Homo sapien
tgtggcctcagaggcctttgctgga

SEQ ID NO: 5143172 - DNA, 25 bp, Homo sapien
ctgtggcctcagaggcctttgctgg

SEQ ID NO: 5143173 - DNA, 25 bp, Homo sapien
atagcgggatgcgtgtcctgttcat

SEQ ID NO: 5143174 - DNA, 25 bp, Homo sapien
tttcaggcaagtcgaggatgaagca

SEQ ID NO: 5143175 - DNA, 25 bp, Homo sapien
ggtctttctgagcacaggacatttc

SEQ ID NO: 5143176 - DNA, 25 bp, Homo sapien
ctgacagtgaatagcgggatgcgtg

SEQ ID NO: 5143177 - DNA, 25 bp, Homo sapien
aggacgtccgcgctttccaatgagt

SEQ ID NO: 5143178 - DNA, 25 bp, Homo sapien
gcgtgttcaagaacaaacagggaaa

SEQ ID NO: 5143179 - DNA, 25 bp, Homo sapien
cgctttccaatgagtccctggagga

SEQ ID NO: 5143180 - DNA, 25 bp, Homo sapien
aaggcagcaggcgtgttcaagaaca

SEQ ID NO: 5143181 - DNA, 25 bp, Homo sapien
tacacaaatgtattgatcaaatgtg

SEQ ID NO: 5143182 - DNA, 25 bp, Homo sapien
tatttgaatgtgtttgaaatctaca

SEQ ID NO: 5143183 - DNA, 25 bp, Homo sapien
ctttctgtttcatagggctgttgta

SEQ ID NO: 5143184 - DNA, 25 bp, Homo sapien
tctacaaagcaatacacaaatgtat

SEQ ID NO: 5143185 - DNA, 25 bp, Homo sapien
agtgggttgggttcctgcatgcctt

SEQ ID NO: 5143186 - DNA, 25 bp, Homo sapien
tcctgcatgccttgagaaaggtctg

SEQ ID NO: 5143187 - DNA, 25 bp, Homo sapien
ggttgggttcctgcatgccttgaga

SEQ ID NO: 5143188 - DNA, 25 bp, Homo sapien
catgccttgagaaaggtctggaggt

SEQ ID NO: 5143189 - DNA, 25 bp, Homo sapien
tgaatgtagccttggagcggaaact

SEQ ID NO: 5143190 - DNA, 25 bp, Homo sapien
tgaaaagtcggtggaatattcatac

SEQ ID NO: 5143191 - DNA, 25 bp, Homo sapien
tacaaacgtaatatgagcacaagat

SEQ ID NO: 5143192 - DNA, 25 bp, Homo sapien
ttcagggccatatcagtttcaaaga

SEQ ID NO: 5143193 - DNA, 25 bp, Homo sapien
gcgtgtggactaacttcacatgcat

SEQ ID NO: 5143194 - DNA, 25 bp, Homo sapien
gtgtggtacttgtgcgtgtggacta

SEQ ID NO: 5143195 - DNA, 25 bp, Homo sapien
gtgcgtgtggactaacttcacatgc

SEQ ID NO: 5143196 - DNA, 25 bp, Homo sapien
atgtctgtgtggtacttgtgcgtgt

SEQ ID NO: 5143197 - DNA, 25 bp, Homo sapien
aatcacttggataatccaggcgttg

SEQ ID NO: 5143198 - DNA, 25 bp, Homo sapien
gcgttgttgctctcccttctagctg

SEQ ID NO: 5143199 - DNA, 25 bp, Homo sapien
gcagacgatgtctactgaaggcaaa

SEQ ID NO: 5143200 - DNA, 25 bp, Homo sapien
tagagaattgaattaatcacttgga

SEQ ID NO: 5143201 - DNA, 25 bp, Homo sapien
gaaaggcttggagagacaccctagg

SEQ ID NO: 5143202 - DNA, 25 bp, Homo sapien
cattatcaatgacacacatcgagtg

SEQ ID NO: 5143203 - DNA, 25 bp, Homo sapien
ggattgaaggtcctcagcctcagtg

SEQ ID NO: 5143204 - DNA, 25 bp, Homo sapien
gcctcagtggttagacattatcaat

SEQ ID NO: 5143205 - DNA, 25 bp, Homo sapien
gctgggtcgcctcacctccggtgag

SEQ ID NO: 5143206 - DNA, 25 bp, Homo sapien
tgggcagtccccgcatgtgccagcg

SEQ ID NO: 5143207 - DNA, 25 bp, Homo sapien
ccagaggagccgtttcccttgcagt

SEQ ID NO: 5143208 - DNA, 25 bp, Homo sapien
agcgaccagcgctgggtaccaggct

SEQ ID NO: 5143209 - DNA, 25 bp, Homo sapien
tgctccgtgccttttccaaacgcga

SEQ ID NO: 5143210 - DNA, 25 bp, Homo sapien
gaggtcctcgcgctggctgcgtccg

SEQ ID NO: 5143211 - DNA, 25 bp, Homo sapien
ttccaaacgcgagttccatacgcgg

SEQ ID NO: 5143212 - DNA, 25 bp, Homo sapien
tgcgtccgaggccaccggcgcgcac

SEQ ID NO: 5143213 - DNA, 25 bp, Homo sapien
ttctggtacattcggccatcccagc

SEQ ID NO: 5143214 - DNA, 25 bp, Homo sapien
caccttcgtccctcaagtggtagga

SEQ ID NO: 5143215 - DNA, 25 bp, Homo sapien
ggcgctgctcgccagcgagacttct

SEQ ID NO: 5143216 - DNA, 25 bp, Homo sapien
ggaaacaaggctctcgatccatcca

SEQ ID NO: 5143217 - DNA, 25 bp, Homo sapien
tgcggaacgggcaactcccatgggt

SEQ ID NO: 5143218 - DNA, 25 bp, Homo sapien
gccctgagaggtctggaactctgtt

SEQ ID NO: 5143219 - DNA, 25 bp, Homo sapien
tttccccttcgaactctgctgcgga

SEQ ID NO: 5143220 - DNA, 25 bp, Homo sapien
tgggtccgacggagtccccatcagt

SEQ ID NO: 5143221 - DNA, 25 bp, Homo sapien
tcaggaggcatcttcggccctggga

SEQ ID NO: 5143222 - DNA, 25 bp, Homo sapien
tgctcaggaggcatcttcggccctg

SEQ ID NO: 5143223 - DNA, 25 bp, Homo sapien
gctcaggaggcatcttcggccctgg

SEQ ID NO: 5143224 - DNA, 25 bp, Homo sapien
tctgctcaggaggcatcttcggccc

SEQ ID NO: 5143225 - DNA, 25 bp, Homo sapien
tgcatgtatggacgaggaaaaccga

SEQ ID NO: 5143226 - DNA, 25 bp, Homo sapien
tcccatgttctaggtttccggtcga

SEQ ID NO: 5143227 - DNA, 25 bp, Homo sapien
gcgtcccgggatttgtattgcatgc

SEQ ID NO: 5143228 - DNA, 25 bp, Homo sapien
gaaaaccgatgaattgggtcccatg

SEQ ID NO: 5143229 - DNA, 25 bp, Homo sapien
ttggctcctcttcgtaattgagctg

SEQ ID NO: 5143230 - DNA, 25 bp, Homo sapien
tgagcctgggatttcgttccttggc

SEQ ID NO: 5143231 - DNA, 25 bp, Homo sapien
tacagggaccgggaacagaggagca

SEQ ID NO: 5143232 - DNA, 25 bp, Homo sapien
aggagcaacggcgggcgcctctgag

SEQ ID NO: 5143233 - DNA, 25 bp, Homo sapien
ttgtcactgattcggtgcgcggccg

SEQ ID NO: 5143234 - DNA, 25 bp, Homo sapien
ctcctgcggcgggctttgttccggc

SEQ ID NO: 5143235 - DNA, 25 bp, Homo sapien
cgccaagccgtaggagcgccggctt

SEQ ID NO: 5143236 - DNA, 25 bp, Homo sapien
ggcgggctttgttccggcggagcag

SEQ ID NO: 5143237 - DNA, 25 bp, Homo sapien
cagactgttatttgaacatctagag

SEQ ID NO: 5143238 - DNA, 25 bp, Homo sapien
tatttgaacatctagagcggccttc

SEQ ID NO: 5143239 - DNA, 25 bp, Homo sapien
ccttcagaagtcgaattagcattgc

SEQ ID NO: 5143240 - DNA, 25 bp, Homo sapien
tctagagcggccttcagaagtcgaa

SEQ ID NO: 5143241 - DNA, 25 bp, Homo sapien
ctgagcagagcatattggttgccat

SEQ ID NO: 5143242 - DNA, 25 bp, Homo sapien
tctgagcagagcatattggttgcca

SEQ ID NO: 5143243 - DNA, 25 bp, Homo sapien
ttctgagcagagcatattggttgcc

SEQ ID NO: 5143244 - DNA, 25 bp, Homo sapien
taactctgtgtgctccattggacca

SEQ ID NO: 5143245 - DNA, 25 bp, Homo sapien
cattggaccagatgccatatagagc

SEQ ID NO: 5143246 - DNA, 25 bp, Homo sapien
gctgctccctgaagatcatttgttt

SEQ ID NO: 5143247 - DNA, 25 bp, Homo sapien
cttggcagcgttgcttttgactggg

SEQ ID NO: 5143248 - DNA, 25 bp, Homo sapien
gaatcgccagttttccactccttgt

SEQ ID NO: 5143249 - DNA, 25 bp, Homo sapien
tcgccagttttccactccttgttta

SEQ ID NO: 5143250 - DNA, 25 bp, Homo sapien
gctcagaatcgccagttttccactc

SEQ ID NO: 5143251 - DNA, 25 bp, Homo sapien
gagggggctcagaatcgccagtttt

SEQ ID NO: 5143252 - DNA, 25 bp, Homo sapien
ggtggggggacgcatgctgggagca

SEQ ID NO: 5143253 - DNA, 25 bp, Homo sapien
gtggggggacgcatgctgggagcag

SEQ ID NO: 5143254 - DNA, 25 bp, Homo sapien
ggtgatgtcctgaattgtgtgtgcc

SEQ ID NO: 5143255 - DNA, 25 bp, Homo sapien
aaaacgttgtgctcctcgataacag

SEQ ID NO: 5143256 - DNA, 25 bp, Homo sapien
cacacttctgttccgaggtctgtcc

SEQ ID NO: 5143257 - DNA, 25 bp, Homo sapien
ccctccctttgcgagtgtgattgtt

SEQ ID NO: 5143258 - DNA, 25 bp, Homo sapien
acttaattctcgaatcgctccccgg

SEQ ID NO: 5143259 - DNA, 25 bp, Homo sapien
ggcctgatgaaacgtgatagcgcct

SEQ ID NO: 5143260 - DNA, 25 bp, Homo sapien
tttgtctaaattactgctatgaatt

SEQ ID NO: 5143261 - DNA, 25 bp, Homo sapien
aaaagcagtctcaggtggcctgatg

SEQ ID NO: 5143262 - DNA, 25 bp, Homo sapien
tcacagtacacgctttcaaaagcag

SEQ ID NO: 5143263 - DNA, 25 bp, Homo sapien
tccggctcaaaaaccgagagagtct

SEQ ID NO: 5143264 - DNA, 25 bp, Homo sapien
gaatcaatctgagatctccaggtgc

SEQ ID NO: 5143265 - DNA, 25 bp, Homo sapien
tttgaatagtcggtgccagcacccc

SEQ ID NO: 5143266 - DNA, 25 bp, Homo sapien
ccgattttgcttggatccggctcaa

SEQ ID NO: 5143267 - DNA, 25 bp, Homo sapien
ctgcgggtgcgcccgcttgcgcccg

SEQ ID NO: 5143268 - DNA, 25 bp, Homo sapien
tgcgggtgcgcccgcttgcgcccgc

SEQ ID NO: 5143269 - DNA, 25 bp, Homo sapien
gcccgcttgcgcccgccgcccccag

SEQ ID NO: 5143270 - DNA, 25 bp, Homo sapien
tggctcttaatgagcgtgcgtgtgc

SEQ ID NO: 5143271 - DNA, 25 bp, Homo sapien
gcgtgtgcgtgcaccccgcacccct

SEQ ID NO: 5143272 - DNA, 25 bp, Homo sapien
ctcttaatgagcgtgcgtgtgcgtg

SEQ ID NO: 5143273 - DNA, 25 bp, Homo sapien
cgtgtgcgtgcaccccgcaccccta

SEQ ID NO: 5143274 - DNA, 25 bp, Homo sapien
tattcgaccccaatggctttaggaa

SEQ ID NO: 5143275 - DNA, 25 bp, Homo sapien
ccccatagattcatcgtaagtgtat

SEQ ID NO: 5143276 - DNA, 25 bp, Homo sapien
cgtaagtgtattcgaccccaatggc

SEQ ID NO: 5143277 - DNA, 25 bp, Homo sapien
gattcatcgtaagtgtattcgaccc

SEQ ID NO: 5143278 - DNA, 25 bp, Homo sapien
gtgcccgcgcgtgcgagacggaccg

SEQ ID NO: 5143279 - DNA, 25 bp, Homo sapien
gcgcggtgcccgcgcgtgcgagacg

SEQ ID NO: 5143280 - DNA, 25 bp, Homo sapien
gtgcgagacggaccgctcgctgccg

SEQ ID NO: 5143281 - DNA, 25 bp, Homo sapien
gcgcgtgcgagacggaccgctcgct

SEQ ID NO: 5143282 - DNA, 25 bp, Homo sapien
ggctcgcatcgccaagagctctggt

SEQ ID NO: 5143283 - DNA, 25 bp, Homo sapien
gtggccacgctccttggaaatccgc

SEQ ID NO: 5143284 - DNA, 25 bp, Homo sapien
gcaactttccgcagccgttgcgcgc

SEQ ID NO: 5143285 - DNA, 25 bp, Homo sapien
aagttctcggatgccatcatctggg

SEQ ID NO: 5143286 - DNA, 25 bp, Homo sapien
tatagacagatgtgtccccagtggt

SEQ ID NO: 5143287 - DNA, 25 bp, Homo sapien
ctatagacagatgtgtccccagtgg

SEQ ID NO: 5143288 - DNA, 25 bp, Homo sapien
atagacagatgtgtccccagtggtt

SEQ ID NO: 5143289 - DNA, 25 bp, Homo sapien
gctctcgctccgatctgacagttcg

SEQ ID NO: 5143290 - DNA, 25 bp, Homo sapien
cccgctctcgctccgatctgacagt

SEQ ID NO: 5143291 - DNA, 25 bp, Homo sapien
cgcccgctctcgctccgatctgaca

SEQ ID NO: 5143292 - DNA, 25 bp, Homo sapien
tcgctccgatctgacagttcgctct

SEQ ID NO: 5143293 - DNA, 25 bp, Homo sapien
tacacaacaactccagtgggcacgc

SEQ ID NO: 5143294 - DNA, 25 bp, Homo sapien
gggatcgatccttgatacacaacaa

SEQ ID NO: 5143295 - DNA, 25 bp, Homo sapien
ggagcagagttgcagcaggagctcg

SEQ ID NO: 5143296 - DNA, 25 bp, Homo sapien
cacgctgcacggctcgtagagtgca

SEQ ID NO: 5143297 - DNA, 25 bp, Homo sapien
cttgttgctgacggttggggttggt

SEQ ID NO: 5143298 - DNA, 25 bp, Homo sapien
tgttgctgacggttggggttggtgt

SEQ ID NO: 5143299 - DNA, 25 bp, Homo sapien
ttgttgctgacggttggggttggtg

SEQ ID NO: 5143300 - DNA, 25 bp, Homo sapien
ggaaaacttcttgcgatggtgcatt

SEQ ID NO: 5143301 - DNA, 25 bp, Homo sapien
tcattctcctcgcaacagtcacagt

SEQ ID NO: 5143302 - DNA, 25 bp, Homo sapien
tattgccggagctcttggttgcctc

SEQ ID NO: 5143303 - DNA, 25 bp, Homo sapien
ttcgtccttgaaggcgtggtgctgc

SEQ ID NO: 5143304 - DNA, 25 bp, Homo sapien
gcgtccgagtgcacaatagagccgg

SEQ ID NO: 5143305 - DNA, 25 bp, Homo sapien
agtgcacaatagagccggccgcgag

SEQ ID NO: 5143306 - DNA, 25 bp, Homo sapien
cctgccgcgtccgagtgcacaatag

SEQ ID NO: 5143307 - DNA, 25 bp, Homo sapien
gcgagcaggctgttccccggcaggt

SEQ ID NO: 5143308 - DNA, 25 bp, Homo sapien
cccgaggtcacggcggcgctgcccg

SEQ ID NO: 5143309 - DNA, 25 bp, Homo sapien
catatggccgccgttgctgtcggcc

SEQ ID NO: 5143310 - DNA, 25 bp, Homo sapien
tggctcagcatatggccgccgttgc

SEQ ID NO: 5143311 - DNA, 25 bp, Homo sapien
atggccccctgcatgaagtcgctct

SEQ ID NO: 5143312 - DNA, 25 bp, Homo sapien
tggtgcgcgtggctcagcatatggc

SEQ ID NO: 5143313 - DNA, 25 bp, Homo sapien
ccacggcgagctcgcctccacggcg

SEQ ID NO: 5143314 - DNA, 25 bp, Homo sapien
cggcgctgcccgaccacggcgagct

SEQ ID NO: 5143315 - DNA, 25 bp, Homo sapien
ggcccgcggtggtgcagcgctgtgc

SEQ ID NO: 5143316 - DNA, 25 bp, Homo sapien
tgtgcccgcgtgcaggtcgtcgcgc

SEQ ID NO: 5143317 - DNA, 25 bp, Homo sapien
ggtggcgcgctcagcatgccgttca

SEQ ID NO: 5143318 - DNA, 25 bp, Homo sapien
agccccgggtgcaccaagctctggg

SEQ ID NO: 5143319 - DNA, 25 bp, Homo sapien
tgcggcgggtgaggatgcgcgtggt

SEQ ID NO: 5143320 - DNA, 25 bp, Homo sapien
ctgcgagtagagcagactctgcggc

SEQ ID NO: 5143321 - DNA, 25 bp, Homo sapien
gccgcgatcttgtcgatgcttgtgg

SEQ ID NO: 5143322 - DNA, 25 bp, Homo sapien
gtgcccacctgcgagtagacgtcgt

SEQ ID NO: 5143323 - DNA, 25 bp, Homo sapien
tcgtcgggcgtctgctgttggatcc

SEQ ID NO: 5143324 - DNA, 25 bp, Homo sapien
acgctcgtctgcagcccgtggtgag

SEQ ID NO: 5143325 - DNA, 25 bp, Homo sapien
tgtcgtcccctgatggaacctggtg

SEQ ID NO: 5143326 - DNA, 25 bp, Homo sapien
gaatggcagccgtcaaagcctgggt

SEQ ID NO: 5143327 - DNA, 25 bp, Homo sapien
gaatctttaggcatcgtccaccctg

SEQ ID NO: 5143328 - DNA, 25 bp, Homo sapien
ccgtgtaggtcatctcagggtggaa

SEQ ID NO: 5143329 - DNA, 25 bp, Homo sapien
cgtgccagtagtatccaccacataa

SEQ ID NO: 5143330 - DNA, 25 bp, Homo sapien
taagccttagcacaaaacctctcag

SEQ ID NO: 5143331 - DNA, 25 bp, Homo sapien
cagggattcttccaaagtaatcagc

SEQ ID NO: 5143332 - DNA, 25 bp, Homo sapien
caagattccatctcacgtgccagta

SEQ ID NO: 5143333 - DNA, 25 bp, Homo sapien
cgaacagttctcttcggaacaaaga

SEQ ID NO: 5143334 - DNA, 25 bp, Homo sapien
acaaaacagattatgagcatggtca

SEQ ID NO: 5143335 - DNA, 25 bp, Homo sapien
cgctaagatcaataacgaacagttc

SEQ ID NO: 5143336 - DNA, 25 bp, Homo sapien
aaacactggaggctacagggcagca

SEQ ID NO: 5143337 - DNA, 25 bp, Homo sapien
gcacagtcaggtattaggttatcac

SEQ ID NO: 5143338 - DNA, 25 bp, Homo sapien
tatcactgaaacatagcatctgctc

SEQ ID NO: 5143339 - DNA, 25 bp, Homo sapien
taatttcaagtctgcatccagtgcc

SEQ ID NO: 5143340 - DNA, 25 bp, Homo sapien
cctttcccaacgtagatgtctgagc

SEQ ID NO: 5143341 - DNA, 25 bp, Homo sapien
tgattacacaagtacccctcctgct

SEQ ID NO: 5143342 - DNA, 25 bp, Homo sapien
tgaaatcaacgtcaagcctaccgtg

SEQ ID NO: 5143343 - DNA, 25 bp, Homo sapien
tgagccaggctaacaaaatcaaaga

SEQ ID NO: 5143344 - DNA, 25 bp, Homo sapien
tcaggatgcaaacgcagaggcttct

SEQ ID NO: 5143345 - DNA, 25 bp, Homo sapien
aaagaccagactcagtttcgccagg

SEQ ID NO: 5143346 - DNA, 25 bp, Homo sapien
taatcctggcataccggtgactagg

SEQ ID NO: 5143347 - DNA, 25 bp, Homo sapien
gactaggaagtcatcacctaacact

SEQ ID NO: 5143348 - DNA, 25 bp, Homo sapien
agatataaactctcaggaaggaggc

SEQ ID NO: 5143349 - DNA, 25 bp, Homo sapien
tacaggagacccacatcactcagtt

SEQ ID NO: 5143350 - DNA, 25 bp, Homo sapien
gctatttgtctcctagaacctggca

SEQ ID NO: 5143351 - DNA, 25 bp, Homo sapien
caaacaagttcagcttgggatctgc

SEQ ID NO: 5143352 - DNA, 25 bp, Homo sapien
catgaggaactgcacaagtaggact

SEQ ID NO: 5143353 - DNA, 25 bp, Homo sapien
tccggtgcctttgtcctgtgtccaa

SEQ ID NO: 5143354 - DNA, 25 bp, Homo sapien
catgaccactggctctcacggtggc

SEQ ID NO: 5143355 - DNA, 25 bp, Homo sapien
tggctctcacggtggctgggaaccc

SEQ ID NO: 5143356 - DNA, 25 bp, Homo sapien
tgggtgagtccctccggtgcctttg

SEQ ID NO: 5143357 - DNA, 25 bp, Homo sapien
tccagggtattaatctgatccagcc

SEQ ID NO: 5143358 - DNA, 25 bp, Homo sapien
tacctttgttggctcacagtctcaa

SEQ ID NO: 5143359 - DNA, 25 bp, Homo sapien
ccaaagcatagataggacgagagct

SEQ ID NO: 5143360 - DNA, 25 bp, Homo sapien
tggaaaacctcaaagtgcctctctc

SEQ ID NO: 5143361 - DNA, 25 bp, Homo sapien
ttgggagtgccctcacctcgagtct

SEQ ID NO: 5143362 - DNA, 25 bp, Homo sapien
tgttggccatgcatggcatcacggt

SEQ ID NO: 5143363 - DNA, 25 bp, Homo sapien
cttgcttggcatccgttgctgttgg

SEQ ID NO: 5143364 - DNA, 25 bp, Homo sapien
tcttatgccatgagccttgcttggc

SEQ ID NO: 5143365 - DNA, 25 bp, Homo sapien
ggctgccgtgtcatggggaccccaa

SEQ ID NO: 5143366 - DNA, 25 bp, Homo sapien
ccggctgccgtgtcatggggacccc

SEQ ID NO: 5143367 - DNA, 25 bp, Homo sapien
gctgccgtgtcatggggaccccaag

SEQ ID NO: 5143368 - DNA, 25 bp, Homo sapien
tgccgtgtcatggggaccccaagga

SEQ ID NO: 5143369 - DNA, 25 bp, Homo sapien
ctccggccgcctgttattttccgtg

SEQ ID NO: 5143370 - DNA, 25 bp, Homo sapien
tggccgtggctccggccgcctgtta

SEQ ID NO: 5143371 - DNA, 25 bp, Homo sapien
gtcagctccactgctaactccctct

SEQ ID NO: 5143372 - DNA, 25 bp, Homo sapien
ggccgcctgttattttccgtgctgt

SEQ ID NO: 5143373 - DNA, 25 bp, Homo sapien
acagcgacttggttaatggaacacc

SEQ ID NO: 5143374 - DNA, 25 bp, Homo sapien
gcgacttggttaatggaacaccaac

SEQ ID NO: 5143375 - DNA, 25 bp, Homo sapien
agcgacttggttaatggaacaccaa

SEQ ID NO: 5143376 - DNA, 25 bp, Homo sapien
cagcgacttggttaatggaacacca

SEQ ID NO: 5143377 - DNA, 25 bp, Homo sapien
gcaaggaaaggaacttgctggtcat

SEQ ID NO: 5143378 - DNA, 25 bp, Homo sapien
gctggtcattcagcagaccaacttg

SEQ ID NO: 5143379 - DNA, 25 bp, Homo sapien
ttcctgcaagaacccgtagagcttc

SEQ ID NO: 5143380 - DNA, 25 bp, Homo sapien
gaccaacttgagtaactatcaaagc

SEQ ID NO: 5143381 - DNA, 25 bp, Homo sapien
tctcttgcaccccaggtaccacagc

SEQ ID NO: 5143382 - DNA, 25 bp, Homo sapien
aggacaggaactgatatacatcgtc

SEQ ID NO: 5143383 - DNA, 25 bp, Homo sapien
cagccttaagagcttcagtcttaga

SEQ ID NO: 5143384 - DNA, 25 bp, Homo sapien
gtcttagagggcttggaatgtgtaa

SEQ ID NO: 5143385 - DNA, 25 bp, Homo sapien
tcctacatgtttcgtgagctcactg

SEQ ID NO: 5143386 - DNA, 25 bp, Homo sapien
tctgtgctggttaaatacccatggg

SEQ ID NO: 5143387 - DNA, 25 bp, Homo sapien
tcatcccagttggaccttgtcgctg

SEQ ID NO: 5143388 - DNA, 25 bp, Homo sapien
tagggctggctaggatctctggaat

SEQ ID NO: 5143389 - DNA, 25 bp, Homo sapien
taaaatctgacataccattcagcag

SEQ ID NO: 5143390 - DNA, 25 bp, Homo sapien
cacacattaatgtctaataggacac

SEQ ID NO: 5143391 - DNA, 25 bp, Homo sapien
cttaaaacctcagaggcatgaccct

SEQ ID NO: 5143392 - DNA, 25 bp, Homo sapien
ctaataggacactgaactttgttaa

SEQ ID NO: 5143393 - DNA, 25 bp, Homo sapien
ttgtagagtagagaagaagccgctt

SEQ ID NO: 5143394 - DNA, 25 bp, Homo sapien
gcttgagtctgtcataagggctacc

SEQ ID NO: 5143395 - DNA, 25 bp, Homo sapien
gagctgtaacgatcactgttgccca

SEQ ID NO: 5143396 - DNA, 25 bp, Homo sapien
ttgaccccagagaaagttgagcagc

SEQ ID NO: 5143397 - DNA, 25 bp, Homo sapien
ttccaaacctagaatcaattttatg

SEQ ID NO: 5143398 - DNA, 25 bp, Homo sapien
ttagtatttatcagagagttaaatc

SEQ ID NO: 5143399 - DNA, 25 bp, Homo sapien
gtatttatcagagagttaaatcccc

SEQ ID NO: 5143400 - DNA, 25 bp, Homo sapien
ccagctttcagacttacaggtgcat

SEQ ID NO: 5143401 - DNA, 25 bp, Homo sapien
cccagctttcagacttacaggtgca

SEQ ID NO: 5143402 - DNA, 25 bp, Homo sapien
ggtatcactgggacatcctgggcca

SEQ ID NO: 5143403 - DNA, 25 bp, Homo sapien
tgaccccagtatgccctaatgcagg

SEQ ID NO: 5143404 - DNA, 25 bp, Homo sapien
agtgatctgtgtgcccttagggaag

SEQ ID NO: 5143405 - DNA, 25 bp, Homo sapien
aactagcggagtacaggattctgaa

SEQ ID NO: 5143406 - DNA, 25 bp, Homo sapien
cactctttgtcttttgggagcgagg

SEQ ID NO: 5143407 - DNA, 25 bp, Homo sapien
tctttgtcttttgggagcgaggcag

SEQ ID NO: 5143408 - DNA, 25 bp, Homo sapien
cactgtccccattttgaggtccctg

SEQ ID NO: 5143409 - DNA, 25 bp, Homo sapien
cccaaaggtctgattactgactggc

SEQ ID NO: 5143410 - DNA, 25 bp, Homo sapien
aaatgtctctggcaatggcattgtt

SEQ ID NO: 5143411 - DNA, 25 bp, Homo sapien
cttgcaactccaagaaaatgtctct

SEQ ID NO: 5143412 - DNA, 25 bp, Homo sapien
tctggcaatggcattgttttctaac

SEQ ID NO: 5143413 - DNA, 25 bp, Homo sapien
tgtctctggcaatggcattgttttc

SEQ ID NO: 5143414 - DNA, 25 bp, Homo sapien
ctagcaacagccttgttttctgaca

SEQ ID NO: 5143415 - DNA, 25 bp, Homo sapien
caaaatagtatgtgacctatcttga

SEQ ID NO: 5143416 - DNA, 25 bp, Homo sapien
aatttctctagcaacagccttgttt

SEQ ID NO: 5143417 - DNA, 25 bp, Homo sapien
tgtgacctatcttgaaaccccaaga

SEQ ID NO: 5143418 - DNA, 25 bp, Homo sapien
tgtctgccaggccttacacatgttg

SEQ ID NO: 5143419 - DNA, 25 bp, Homo sapien
gattcactatcacactgtccctgga

SEQ ID NO: 5143420 - DNA, 25 bp, Homo sapien
gacagcatgccttttacagcaccac

SEQ ID NO: 5143421 - DNA, 25 bp, Homo sapien
tggtatgatcgttatttcagctgct

SEQ ID NO: 5143422 - DNA, 25 bp, Homo sapien
tttgccgcagtaggagcggctccag

SEQ ID NO: 5143423 - DNA, 25 bp, Homo sapien
agggctttgccgcagtaggagcggc

SEQ ID NO: 5143424 - DNA, 25 bp, Homo sapien
gctttgccgcagtaggagcggctcc

SEQ ID NO: 5143425 - DNA, 25 bp, Homo sapien
tgccgcagtaggagcggctccagtt

SEQ ID NO: 5143426 - DNA, 25 bp, Homo sapien
cccaaatggatgacttccggctcgc

SEQ ID NO: 5143427 - DNA, 25 bp, Homo sapien
ccagcacgatgctctgactaatgag

SEQ ID NO: 5143428 - DNA, 25 bp, Homo sapien
gagactgagcccattaccctctcgg

SEQ ID NO: 5143429 - DNA, 25 bp, Homo sapien
tctgactaatgagcagaggccactg

SEQ ID NO: 5143430 - DNA, 25 bp, Homo sapien
cacttatgactgagatcgtgcaata

SEQ ID NO: 5143431 - DNA, 25 bp, Homo sapien
ttaaagcttgtcatccgggtgggcc

SEQ ID NO: 5143432 - DNA, 25 bp, Homo sapien
tactgatgtggaggctgttataagc

SEQ ID NO: 5143433 - DNA, 25 bp, Homo sapien
gatacagtctttaacaagctaaggt

SEQ ID NO: 5143434 - DNA, 25 bp, Homo sapien
ttaaagaagaaaggtcagagcacat

SEQ ID NO: 5143435 - DNA, 25 bp, Homo sapien
tggtcacatctacaatttcaaacaa

SEQ ID NO: 5143436 - DNA, 25 bp, Homo sapien
ttcttaaagaagaaaggtcagagca

SEQ ID NO: 5143437 - DNA, 25 bp, Homo sapien
aaagaagaaaggtcagagcacatag

SEQ ID NO: 5143438 - DNA, 25 bp, Homo sapien
gatgctcctttaggacgctgctgct

SEQ ID NO: 5143439 - DNA, 25 bp, Homo sapien
cctttaggacgctgctgctctcaca

SEQ ID NO: 5143440 - DNA, 25 bp, Homo sapien
gctcctttaggacgctgctgctctc

SEQ ID NO: 5143441 - DNA, 25 bp, Homo sapien
tgagatgctcctttaggacgctgct

SEQ ID NO: 5143442 - DNA, 25 bp, Homo sapien
agcccagaggttgagcaaggccagc

SEQ ID NO: 5143443 - DNA, 25 bp, Homo sapien
ggccagcaggttgcaaaaggaaatc

SEQ ID NO: 5143444 - DNA, 25 bp, Homo sapien
agcaaggccagcaggttgcaaaagg

SEQ ID NO: 5143445 - DNA, 25 bp, Homo sapien
agcaggttgcaaaaggaaatcaata

SEQ ID NO: 5143446 - DNA, 25 bp, Homo sapien
gatgtgaagtgcacacgggggctct

SEQ ID NO: 5143447 - DNA, 25 bp, Homo sapien
agagatttccagcaaggatgtgaag

SEQ ID NO: 5143448 - DNA, 25 bp, Homo sapien
tccccagagatttccagcaaggatg

SEQ ID NO: 5143449 - DNA, 25 bp, Homo sapien
gtgcacacgggggctctgagtctcc

SEQ ID NO: 5143450 - DNA, 25 bp, Homo sapien
tgctccctggagctggctttcggga

SEQ ID NO: 5143451 - DNA, 25 bp, Homo sapien
agctgctccctggagctggctttcg

SEQ ID NO: 5143452 - DNA, 25 bp, Homo sapien
ctccctggagctggctttcgggact

SEQ ID NO: 5143453 - DNA, 25 bp, Homo sapien
ccctggagctggctttcgggacttc

SEQ ID NO: 5143454 - DNA, 25 bp, Homo sapien
acagctagcactccacagccagaag

SEQ ID NO: 5143455 - DNA, 25 bp, Homo sapien
tgaggacagctagcactccacagcc

SEQ ID NO: 5143456 - DNA, 25 bp, Homo sapien
gatatctgaggacagctagcactcc

SEQ ID NO: 5143457 - DNA, 25 bp, Homo sapien
gaagatatctgaggacagctagcac

SEQ ID NO: 5143458 - DNA, 25 bp, Homo sapien
tggtgtccaaaggtccctctttgcg

SEQ ID NO: 5143459 - DNA, 25 bp, Homo sapien
cctggtgtccaaaggtccctctttg

SEQ ID NO: 5143460 - DNA, 25 bp, Homo sapien
tgtccaaaggtccctctttgcgggc

SEQ ID NO: 5143461 - DNA, 25 bp, Homo sapien
gtccagtttgtgtctctcctgttcc

SEQ ID NO: 5143462 - DNA, 25 bp, Homo sapien
gcactcccatttctgcgtgctaact

SEQ ID NO: 5143463 - DNA, 25 bp, Homo sapien
ctgccattaaacattggtttgatat

SEQ ID NO: 5143464 - DNA, 25 bp, Homo sapien
cagcactcccatttctgcgtgctaa

SEQ ID NO: 5143465 - DNA, 25 bp, Homo sapien
actcccatttctgcgtgctaactgg

SEQ ID NO: 5143466 - DNA, 25 bp, Homo sapien
agtttgtgcctcagtcagtttgcgt

SEQ ID NO: 5143467 - DNA, 25 bp, Homo sapien
tggaacctggtgcaggattgaagtt

SEQ ID NO: 5143468 - DNA, 25 bp, Homo sapien
cagtcagtttgcgtggaacctggtg

SEQ ID NO: 5143469 - DNA, 25 bp, Homo sapien
aacctggtgcaggattgaagttaca

SEQ ID NO: 5143470 - DNA, 25 bp, Homo sapien
tgtgagccgacaaggtattctccca

SEQ ID NO: 5143471 - DNA, 25 bp, Homo sapien
attataattccaggcatatcgtcgc

SEQ ID NO: 5143472 - DNA, 25 bp, Homo sapien
cgtcgcatgccataccttttatgtg

SEQ ID NO: 5143473 - DNA, 25 bp, Homo sapien
taattccaggcatatcgtcgcatgc

SEQ ID NO: 5143474 - DNA, 25 bp, Homo sapien
gacagtttcgagcagcaagtccttg

SEQ ID NO: 5143475 - DNA, 25 bp, Homo sapien
tggattataatggtcataatgacag

SEQ ID NO: 5143476 - DNA, 25 bp, Homo sapien
cataatgacagtttcgagcagcaag

SEQ ID NO: 5143477 - DNA, 25 bp, Homo sapien
aatggtcataatgacagtttcgagc

SEQ ID NO: 5143478 - DNA, 25 bp, Homo sapien
ttcagcacccaagtcccactggtta

SEQ ID NO: 5143479 - DNA, 25 bp, Homo sapien
cactggttaactctgcccgctgttc

SEQ ID NO: 5143480 - DNA, 25 bp, Homo sapien
ttcatccatgccctctgctctatgt

SEQ ID NO: 5143481 - DNA, 25 bp, Homo sapien
tcacaggtatcacctccgtcttctc

SEQ ID NO: 5143482 - DNA, 25 bp, Homo sapien
ggatttggagtcagtgcgggactcc

SEQ ID NO: 5143483 - DNA, 25 bp, Homo sapien
gatttggagtcagtgcgggactccc

SEQ ID NO: 5143484 - DNA, 25 bp, Homo sapien
ctaatggcgcggggttccagaggct

SEQ ID NO: 5143485 - DNA, 25 bp, Homo sapien
agagacggcgcaggcgctaatggcg

SEQ ID NO: 5143486 - DNA, 25 bp, Homo sapien
cgctaatggcgcggggttccagagg

SEQ ID NO: 5143487 - DNA, 25 bp, Homo sapien
ctagagacggcgcaggcgctaatgg

SEQ ID NO: 5143488 - DNA, 25 bp, Homo sapien
ggagctccaggaccggaggggtgag

SEQ ID NO: 5143489 - DNA, 25 bp, Homo sapien
gagctccaggaccggaggggtgagg

SEQ ID NO: 5143490 - DNA, 25 bp, Homo sapien
agctccaggaccggaggggtgaggg

SEQ ID NO: 5143491 - DNA, 25 bp, Homo sapien
gctccgccgtaggacacacagggcg

SEQ ID NO: 5143492 - DNA, 25 bp, Homo sapien
ggtacgaaactgctccgccgtagga

SEQ ID NO: 5143493 - DNA, 25 bp, Homo sapien
taccccagagaagaagccggtacga

SEQ ID NO: 5143494 - DNA, 25 bp, Homo sapien
ttgcttccgggcgaggctaccccta

SEQ ID NO: 5143495 - DNA, 25 bp, Homo sapien
aacaacctctagagcggctactgca

SEQ ID NO: 5143496 - DNA, 25 bp, Homo sapien
ttcaggtaagttcccctcgctgcac

SEQ ID NO: 5143497 - DNA, 25 bp, Homo sapien
cagggtaggactggacccaacacag

SEQ ID NO: 5143498 - DNA, 25 bp, Homo sapien
taaatacctaagatcctagagtccc

SEQ ID NO: 5143499 - DNA, 25 bp, Homo sapien
gaaacgtacaagttctggcctgcat

SEQ ID NO: 5143500 - DNA, 25 bp, Homo sapien
tacaaggtaacagggcatttcgaaa

SEQ ID NO: 5143501 - DNA, 25 bp, Homo sapien
tccgtagacctactggaaatcccag

SEQ ID NO: 5143502 - DNA, 25 bp, Homo sapien
tgagatcgcatgtcagtaaactggc

SEQ ID NO: 5143503 - DNA, 25 bp, Homo sapien
gcaagcagaaaacacgacagcaaac

SEQ ID NO: 5143504 - DNA, 25 bp, Homo sapien
ccagcaagcagaaaacacgacagca

SEQ ID NO: 5143505 - DNA, 25 bp, Homo sapien
cagaaaacacgacagcaaacggcat

SEQ ID NO: 5143506 - DNA, 25 bp, Homo sapien
aagcagaaaacacgacagcaaacgg

SEQ ID NO: 5143507 - DNA, 25 bp, Homo sapien
aatgcagtatgtcttagccttaata

SEQ ID NO: 5143508 - DNA, 25 bp, Homo sapien
caaatgcagtatgtcttagccttaa

SEQ ID NO: 5143509 - DNA, 25 bp, Homo sapien
ttacaaatgcagtatgtcttagcct

SEQ ID NO: 5143510 - DNA, 25 bp, Homo sapien
tacaaatgcagtatgtcttagcctt

SEQ ID NO: 5143511 - DNA, 25 bp, Homo sapien
tcccatcatgttggctaaatgtctc

SEQ ID NO: 5143512 - DNA, 25 bp, Homo sapien
taataaaatcctctgtgtaagtttc

SEQ ID NO: 5143513 - DNA, 25 bp, Homo sapien
tcctctgtgtaagtttcacgttttg

SEQ ID NO: 5143514 - DNA, 25 bp, Homo sapien
aatgtctctttcctatgttgaactc

SEQ ID NO: 5143515 - DNA, 25 bp, Homo sapien
ctttttcaacagagtaactgtactt

SEQ ID NO: 5143516 - DNA, 25 bp, Homo sapien
ttttcaacagagtaactgtacttac

SEQ ID NO: 5143517 - DNA, 25 bp, Homo sapien
tactttttcaacagagtaactgtac

SEQ ID NO: 5143518 - DNA, 25 bp, Homo sapien
ttactttttcaacagagtaactgta

SEQ ID NO: 5143519 - DNA, 25 bp, Homo sapien
tcaagattgtagaccaaatgcagcc

SEQ ID NO: 5143520 - DNA, 25 bp, Homo sapien
gacctcattctatcagtggagacag

SEQ ID NO: 5143521 - DNA, 25 bp, Homo sapien
ggaagtcctccctattccactgggc

SEQ ID NO: 5143522 - DNA, 25 bp, Homo sapien
tagtgccaccttagtcaaacagaga

SEQ ID NO: 5143523 - DNA, 25 bp, Homo sapien
acagtgccgatgaagagtctatggc

SEQ ID NO: 5143524 - DNA, 25 bp, Homo sapien
cctgggatccagtagtgcatttaaa

SEQ ID NO: 5143525 - DNA, 25 bp, Homo sapien
taaatgtgctggatcagactctgcc

SEQ ID NO: 5143526 - DNA, 25 bp, Homo sapien
tctgcctacccgcatagtaaatgtg

SEQ ID NO: 5143527 - DNA, 25 bp, Homo sapien
tgacacccctgatgtttttagatgt

SEQ ID NO: 5143528 - DNA, 25 bp, Homo sapien
cacccctgatgtttttagatgttct

SEQ ID NO: 5143529 - DNA, 25 bp, Homo sapien
catgacacccctgatgtttttagat

SEQ ID NO: 5143530 - DNA, 25 bp, Homo sapien
atcatgacacccctgatgtttttag

SEQ ID NO: 5143531 - DNA, 25 bp, Homo sapien
tactggcctggctcgtttctcaaac

SEQ ID NO: 5143532 - DNA, 25 bp, Homo sapien
ttactggcctggctcgtttctcaaa

SEQ ID NO: 5143533 - DNA, 25 bp, Homo sapien
actggcctggctcgtttctcaaaca

SEQ ID NO: 5143534 - DNA, 25 bp, Homo sapien
attactggcctggctcgtttctcaa

SEQ ID NO: 5143535 - DNA, 25 bp, Homo sapien
gtcttggaaaaatctgttcaggatg

SEQ ID NO: 5143536 - DNA, 25 bp, Homo sapien
ctttgtcttggaaaaatctgttcag

SEQ ID NO: 5143537 - DNA, 25 bp, Homo sapien
ttgtcttggaaaaatctgttcagga

SEQ ID NO: 5143538 - DNA, 25 bp, Homo sapien
ctctttgtcttggaaaaatctgttc

SEQ ID NO: 5143539 - DNA, 25 bp, Homo sapien
tagaagagatagtgaaatggacggc

SEQ ID NO: 5143540 - DNA, 25 bp, Homo sapien
tgtttgccagtatagaagagatagt

SEQ ID NO: 5143541 - DNA, 25 bp, Homo sapien
tagtgaaatggacggccatcttctc

SEQ ID NO: 5143542 - DNA, 25 bp, Homo sapien
tgactgtttgccagtatagaagaga

SEQ ID NO: 5143543 - DNA, 25 bp, Homo sapien
cgtgcaacccatccgtgtaacaagt

SEQ ID NO: 5143544 - DNA, 25 bp, Homo sapien
taaaaggcacagattttccacagct

SEQ ID NO: 5143545 - DNA, 25 bp, Homo sapien
tgtaacaagttgacaggcctagcgc

SEQ ID NO: 5143546 - DNA, 25 bp, Homo sapien
gttgacaggcctagcgcgtcagctc

SEQ ID NO: 5143547 - DNA, 25 bp, Homo sapien
gatgacagctgtttgataaggctcc

SEQ ID NO: 5143548 - DNA, 25 bp, Homo sapien
tctacaagacctgcatgctttactt

SEQ ID NO: 5143549 - DNA, 25 bp, Homo sapien
tgataaggctcctctacaagacctg

SEQ ID NO: 5143550 - DNA, 25 bp, Homo sapien
cagctgtttgataaggctcctctac

SEQ ID NO: 5143551 - DNA, 25 bp, Homo sapien
tcttaattggtacacttggagcata

SEQ ID NO: 5143552 - DNA, 25 bp, Homo sapien
gacacctctataacagcaatttcga

SEQ ID NO: 5143553 - DNA, 25 bp, Homo sapien
ttatttcacgacacctcactgcgag

SEQ ID NO: 5143554 - DNA, 25 bp, Homo sapien
aaatattctctgcaaggtcacaaag

SEQ ID NO: 5143555 - DNA, 25 bp, Homo sapien
tatctaagtgtaggagaaatgtccc

SEQ ID NO: 5143556 - DNA, 25 bp, Homo sapien
tacctcctagtatcagcaaatctca

SEQ ID NO: 5143557 - DNA, 25 bp, Homo sapien
gattagactgccatattaccacata

SEQ ID NO: 5143558 - DNA, 25 bp, Homo sapien
tagcatggtcttcactctgcaacct

SEQ ID NO: 5143559 - DNA, 25 bp, Homo sapien
ttctaaattgagtaacattccatat

SEQ ID NO: 5143560 - DNA, 25 bp, Homo sapien
tctaaattgagtaacattccatata

SEQ ID NO: 5143561 - DNA, 25 bp, Homo sapien
ctaaattgagtaacattccatatac

SEQ ID NO: 5143562 - DNA, 25 bp, Homo sapien
ttcctccttaatcagccatctgctg

SEQ ID NO: 5143563 - DNA, 25 bp, Homo sapien
agttcctccttaatcagccatctgc

SEQ ID NO: 5143564 - DNA, 25 bp, Homo sapien
gttcctccttaatcagccatctgct

SEQ ID NO: 5143565 - DNA, 25 bp, Homo sapien
tcctccttaatcagccatctgctgc

SEQ ID NO: 5143566 - DNA, 25 bp, Homo sapien
tctccagtcactggcctgggcgttc

SEQ ID NO: 5143567 - DNA, 25 bp, Homo sapien
gattgcatctcacagactctcaatg

SEQ ID NO: 5143568 - DNA, 25 bp, Homo sapien
tactctcttgattgcatctcacaga

SEQ ID NO: 5143569 - DNA, 25 bp, Homo sapien
cgttctgtgctcagctactctcttg

SEQ ID NO: 5143570 - DNA, 25 bp, Homo sapien
gcatcacttttcctgcgtatcttta

SEQ ID NO: 5143571 - DNA, 25 bp, Homo sapien
cctgcgtatctttagtgccaaatct

SEQ ID NO: 5143572 - DNA, 25 bp, Homo sapien
cttttcctgcgtatctttagtgcca

SEQ ID NO: 5143573 - DNA, 25 bp, Homo sapien
gcgtatctttagtgccaaatctttt

SEQ ID NO: 5143574 - DNA, 25 bp, Homo sapien
gaattttgacaggatgacacttctg

SEQ ID NO: 5143575 - DNA, 25 bp, Homo sapien
tgaattttgacaggatgacacttct

SEQ ID NO: 5143576 - DNA, 25 bp, Homo sapien
attttgacaggatgacacttctgca

SEQ ID NO: 5143577 - DNA, 25 bp, Homo sapien
aattttgacaggatgacacttctgc

SEQ ID NO: 5143578 - DNA, 25 bp, Homo sapien
attcattagaaggtgcaagtgtaat

SEQ ID NO: 5143579 - DNA, 25 bp, Homo sapien
cattagaaggtgcaagtgtaattgc

SEQ ID NO: 5143580 - DNA, 25 bp, Homo sapien
ggtgcaagtgtaattgcatttgcta

SEQ ID NO: 5143581 - DNA, 25 bp, Homo sapien
tagaaggtgcaagtgtaattgcatt

SEQ ID NO: 5143582 - DNA, 25 bp, Homo sapien
tgattcaagagttacacttcttcga

SEQ ID NO: 5143583 - DNA, 25 bp, Homo sapien
tacacttcttcgaaacctctgcaca

SEQ ID NO: 5143584 - DNA, 25 bp, Homo sapien
gcaccacactgcgatgtcaataact

SEQ ID NO: 5143585 - DNA, 25 bp, Homo sapien
tctagcagccgaatgaactgcatat

SEQ ID NO: 5143586 - DNA, 25 bp, Homo sapien
taggaaatccaaagtaacggtagca

SEQ ID NO: 5143587 - DNA, 25 bp, Homo sapien
tataaatattttaccgattctagca

SEQ ID NO: 5143588 - DNA, 25 bp, Homo sapien
tgtgagttaaggacgtgaagttttc

SEQ ID NO: 5143589 - DNA, 25 bp, Homo sapien
gttaatatgactgtataggtatgca

SEQ ID NO: 5143590 - DNA, 25 bp, Homo sapien
aaaagttggactacgtctaatggct

SEQ ID NO: 5143591 - DNA, 25 bp, Homo sapien
cgtaaaagttggactacgtctaatg

SEQ ID NO: 5143592 - DNA, 25 bp, Homo sapien
aaatgacaatgacgtgaaatctttt

SEQ ID NO: 5143593 - DNA, 25 bp, Homo sapien
tgacaatgacgtgaaatcttttaag

SEQ ID NO: 5143594 - DNA, 25 bp, Homo sapien
tcttgaagacctgcgctttgagaca

SEQ ID NO: 5143595 - DNA, 25 bp, Homo sapien
ccttacgagaatccacaaccaattt

SEQ ID NO: 5143596 - DNA, 25 bp, Homo sapien
caggtaaactacagcacaacagatg

SEQ ID NO: 5143597 - DNA, 25 bp, Homo sapien
cacaacactgtacataagcaagtcc

SEQ ID NO: 5143598 - DNA, 25 bp, Homo sapien
tccatgtttataaacaattgcttct

SEQ ID NO: 5143599 - DNA, 25 bp, Homo sapien
tattcttccacttccatgtttataa

SEQ ID NO: 5143600 - DNA, 25 bp, Homo sapien
cacttccatgtttataaacaattgc

SEQ ID NO: 5143601 - DNA, 25 bp, Homo sapien
tctgcttttgcagtctttcttttac

SEQ ID NO: 5143602 - DNA, 25 bp, Homo sapien
tgatcgggaagtaaagctggtaatc

SEQ ID NO: 5143603 - DNA, 25 bp, Homo sapien
tgtgatcgggaagtaaagctggtaa

SEQ ID NO: 5143604 - DNA, 25 bp, Homo sapien
ctgtgtgatcgggaagtaaagctgg

SEQ ID NO: 5143605 - DNA, 25 bp, Homo sapien
gatcgggaagtaaagctggtaatca

SEQ ID NO: 5143606 - DNA, 25 bp, Homo sapien
taatcattcagataaacagaattag

SEQ ID NO: 5143607 - DNA, 25 bp, Homo sapien
gatatgttacattggtaaagagaaa

SEQ ID NO: 5143608 - DNA, 25 bp, Homo sapien
attagaagatcacaagccttcttaa

SEQ ID NO: 5143609 - DNA, 25 bp, Homo sapien
gccttcttaaatgatcatgatgtat

SEQ ID NO: 5143610 - DNA, 25 bp, Homo sapien
aaagccatagcaaatcggaatttat

SEQ ID NO: 5143611 - DNA, 25 bp, Homo sapien
gaatttataacaatacgatgtaggg

SEQ ID NO: 5143612 - DNA, 25 bp, Homo sapien
ggtatggacaggacattcaagtgct

SEQ ID NO: 5143613 - DNA, 25 bp, Homo sapien
gctattcttcataccacactagtaa

SEQ ID NO: 5143614 - DNA, 25 bp, Homo sapien
tctcgtaaagaagtcttacagttgg

SEQ ID NO: 5143615 - DNA, 25 bp, Homo sapien
taatctcgtaaagaagtcttacagt

SEQ ID NO: 5143616 - DNA, 25 bp, Homo sapien
aagcttgaaaataatctcgtaaaga

SEQ ID NO: 5143617 - DNA, 25 bp, Homo sapien
aaagcttgaaaataatctcgtaaag

SEQ ID NO: 5143618 - DNA, 25 bp, Homo sapien
tttcccagccggtcaacaaagtgga

SEQ ID NO: 5143619 - DNA, 25 bp, Homo sapien
gcttttgccattgccagtcgtattg

SEQ ID NO: 5143620 - DNA, 25 bp, Homo sapien
cagtcgtattgctccagcctgcgct

SEQ ID NO: 5143621 - DNA, 25 bp, Homo sapien
tgagactgtgcaggtcacgtcgtgc

SEQ ID NO: 5143622 - DNA, 25 bp, Homo sapien
cactcgacctcgtcctcggtgacaa

SEQ ID NO: 5143623 - DNA, 25 bp, Homo sapien
tcatccactcgacctcgtcctcggt

SEQ ID NO: 5143624 - DNA, 25 bp, Homo sapien
cttgtctcatccactcgacctcgtc

SEQ ID NO: 5143625 - DNA, 25 bp, Homo sapien
tgtctcatccactcgacctcgtcct

SEQ ID NO: 5143626 - DNA, 25 bp, Homo sapien
gcagggctcaaataatcagtgtggg

SEQ ID NO: 5143627 - DNA, 25 bp, Homo sapien
gaactgaacattttagcagggctca

SEQ ID NO: 5143628 - DNA, 25 bp, Homo sapien
cttacgaacttcaggcactaggaca

SEQ ID NO: 5143629 - DNA, 25 bp, Homo sapien
catgtatagccagtattgggccacc

SEQ ID NO: 5143630 - DNA, 25 bp, Homo sapien
tattctcagcacaggcagtttcttc

SEQ ID NO: 5143631 - DNA, 25 bp, Homo sapien
taaagaccatagattccaagaatac

SEQ ID NO: 5143632 - DNA, 25 bp, Homo sapien
taccactgatgggaaagctcttaca

SEQ ID NO: 5143633 - DNA, 25 bp, Homo sapien
tatggcccataaggaagagccccag

SEQ ID NO: 5143634 - DNA, 25 bp, Homo sapien
aagctcctcttgtgtgggcggtcac

SEQ ID NO: 5143635 - DNA, 25 bp, Homo sapien
gggaacttaacctgcacacttacta

SEQ ID NO: 5143636 - DNA, 25 bp, Homo sapien
ggcggtcactattcactgtaaggga

SEQ ID NO: 5143637 - DNA, 25 bp, Homo sapien
caacctaagtgagataaagctcctc

SEQ ID NO: 5143638 - DNA, 25 bp, Homo sapien
gaagcctttaggaaccattaatatg

SEQ ID NO: 5143639 - DNA, 25 bp, Homo sapien
agaagcctttaggaaccattaatat

SEQ ID NO: 5143640 - DNA, 25 bp, Homo sapien
cctttaggaaccattaatatgcatg

SEQ ID NO: 5143641 - DNA, 25 bp, Homo sapien
agcctttaggaaccattaatatgca

SEQ ID NO: 5143642 - DNA, 25 bp, Homo sapien
cacgtaaactttctgcgggctccct

SEQ ID NO: 5143643 - DNA, 25 bp, Homo sapien
ttccgttccctcacacgtggatcag

SEQ ID NO: 5143644 - DNA, 25 bp, Homo sapien
tccacgtaaactttctgcgggctcc

SEQ ID NO: 5143645 - DNA, 25 bp, Homo sapien
cacgtggatcagtagtaagtagtcc

SEQ ID NO: 5143646 - DNA, 25 bp, Homo sapien
tgtgtctgccacatgtcggcacata

SEQ ID NO: 5143647 - DNA, 25 bp, Homo sapien
taaaggtcacctttacaaagtagca

SEQ ID NO: 5143648 - DNA, 25 bp, Homo sapien
tgctggtcagccattatttactgtg

SEQ ID NO: 5143649 - DNA, 25 bp, Homo sapien
acagtactgccctcatgctggtcag

SEQ ID NO: 5143650 - DNA, 25 bp, Homo sapien
ccagatggcatatacttcaggcagc

SEQ ID NO: 5143651 - DNA, 25 bp, Homo sapien
tccaggtctcccgttagacttgagg

SEQ ID NO: 5143652 - DNA, 25 bp, Homo sapien
tccacgataccaacagtagctgatg

SEQ ID NO: 5143653 - DNA, 25 bp, Homo sapien
tctcctcctggcactgtacgagcag

SEQ ID NO: 5143654 - DNA, 25 bp, Homo sapien
tttctgttccctgcactgggtccca

SEQ ID NO: 5143655 - DNA, 25 bp, Homo sapien
ctggcaggtctcttccttctagcaa

SEQ ID NO: 5143656 - DNA, 25 bp, Homo sapien
ccatgtacaatagctgcctggcagg

SEQ ID NO: 5143657 - DNA, 25 bp, Homo sapien
gagatcctcaagacttttcccatga

SEQ ID NO: 5143658 - DNA, 25 bp, Homo sapien
aaattccccttccacgcagcagcct

SEQ ID NO: 5143659 - DNA, 25 bp, Homo sapien
ttcttggtcatcactgacgtccctg

SEQ ID NO: 5143660 - DNA, 25 bp, Homo sapien
ggcttgctgtcttcctatcaccgct

SEQ ID NO: 5143661 - DNA, 25 bp, Homo sapien
tgatccagcccacgtttcaaattcc

SEQ ID NO: 5143662 - DNA, 25 bp, Homo sapien
cggagcctcctaccaacacctgctg

SEQ ID NO: 5143663 - DNA, 25 bp, Homo sapien
gtacaggccttatctccggagcctc

SEQ ID NO: 5143664 - DNA, 25 bp, Homo sapien
ctggtacaggccttatctccggagc

SEQ ID NO: 5143665 - DNA, 25 bp, Homo sapien
ctcctaccaacacctgctgcacttc

SEQ ID NO: 5143666 - DNA, 25 bp, Homo sapien
ctcttccacactcttgggtctctgt

SEQ ID NO: 5143667 - DNA, 25 bp, Homo sapien
ttccacactcttgggtctctgtgca

SEQ ID NO: 5143668 - DNA, 25 bp, Homo sapien
ggtctctgtgcacccttgttgaacc

SEQ ID NO: 5143669 - DNA, 25 bp, Homo sapien
tcctcttccacactcttgggtctct

SEQ ID NO: 5143670 - DNA, 25 bp, Homo sapien
taagccagtgggtgatttcctgaca

SEQ ID NO: 5143671 - DNA, 25 bp, Homo sapien
tccctagagccagctcaagataagc

SEQ ID NO: 5143672 - DNA, 25 bp, Homo sapien
tgccatcattccaacatgatcccag

SEQ ID NO: 5143673 - DNA, 25 bp, Homo sapien
tctgctccaaccacaaacttcactg

SEQ ID NO: 5143674 - DNA, 25 bp, Homo sapien
gaggtcctccagctactaggcaaat

SEQ ID NO: 5143675 - DNA, 25 bp, Homo sapien
ccaaggatgggtggaacaggatccc

SEQ ID NO: 5143676 - DNA, 25 bp, Homo sapien
tgaacaccgttatgaggcattggtc

SEQ ID NO: 5143677 - DNA, 25 bp, Homo sapien
aggagaacacacgcacgactggccc

SEQ ID NO: 5143678 - DNA, 25 bp, Homo sapien
caaagacgttattagtaaatatgga

SEQ ID NO: 5143679 - DNA, 25 bp, Homo sapien
gactcgaagctctcaggacaaaaac

SEQ ID NO: 5143680 - DNA, 25 bp, Homo sapien
tgctggacccaaagacgttattagt

SEQ ID NO: 5143681 - DNA, 25 bp, Homo sapien
ttagactcgaagctctcaggacaaa

SEQ ID NO: 5143682 - DNA, 25 bp, Homo sapien
agtgtcgatggtaatgggtgtctcc

SEQ ID NO: 5143683 - DNA, 25 bp, Homo sapien
tagaaaagatgctcgctaaaccttc

SEQ ID NO: 5143684 - DNA, 25 bp, Homo sapien
tccttcccgcagtccaaagtgtgct

SEQ ID NO: 5143685 - DNA, 25 bp, Homo sapien
agggcagagacagccgtccttgcca

SEQ ID NO: 5143686 - DNA, 25 bp, Homo sapien
tcacataagggccactcacatccgc

SEQ ID NO: 5143687 - DNA, 25 bp, Homo sapien
ttctggtccttcgagctgcagagag

SEQ ID NO: 5143688 - DNA, 25 bp, Homo sapien
ctggtccttcgagctgcagagagct

SEQ ID NO: 5143689 - DNA, 25 bp, Homo sapien
cataagggccactcacatccgcaga

SEQ ID NO: 5143690 - DNA, 25 bp, Homo sapien
ggtgggctgggatagacacggagat

SEQ ID NO: 5143691 - DNA, 25 bp, Homo sapien
tgccactttctgtgaggcagcgctg

SEQ ID NO: 5143692 - DNA, 25 bp, Homo sapien
gatagacacggagatgtgccacttt

SEQ ID NO: 5143693 - DNA, 25 bp, Homo sapien
ggctgggatagacacggagatgtgc

SEQ ID NO: 5143694 - DNA, 25 bp, Homo sapien
actgggatccagaagatgcagttac

SEQ ID NO: 5143695 - DNA, 25 bp, Homo sapien
tactgggatccagaagatgcagtta

SEQ ID NO: 5143696 - DNA, 25 bp, Homo sapien
ctactgggatccagaagatgcagtt

SEQ ID NO: 5143697 - DNA, 25 bp, Homo sapien
catgatgcctatccttcttgaaagc

SEQ ID NO: 5143698 - DNA, 25 bp, Homo sapien
tccgacatgatgcctatccttcttg

SEQ ID NO: 5143699 - DNA, 25 bp, Homo sapien
cgacatgatgcctatccttcttgaa

SEQ ID NO: 5143700 - DNA, 25 bp, Homo sapien
acatgatgcctatccttcttgaaag

SEQ ID NO: 5143701 - DNA, 25 bp, Homo sapien
ttagagtgccccgatgatgagtctc

SEQ ID NO: 5143702 - DNA, 25 bp, Homo sapien
gagaggaagagacctgcctctgtga

SEQ ID NO: 5143703 - DNA, 25 bp, Homo sapien
cctctgtgagggacattagagtgcc

SEQ ID NO: 5143704 - DNA, 25 bp, Homo sapien
ttgccctggcgtggtcctggatttc

SEQ ID NO: 5143705 - DNA, 25 bp, Homo sapien
cctgcaaatctgttgctggcctgca

SEQ ID NO: 5143706 - DNA, 25 bp, Homo sapien
ctgctggtggacaagagtcctgcaa

SEQ ID NO: 5143707 - DNA, 25 bp, Homo sapien
gctcagctttggttggacccgaatt

SEQ ID NO: 5143708 - DNA, 25 bp, Homo sapien
cagctgatagttattcattgaacag

SEQ ID NO: 5143709 - DNA, 25 bp, Homo sapien
gaagaattcccaatgccctccgact

SEQ ID NO: 5143710 - DNA, 25 bp, Homo sapien
acaaaattaagaagaattcccaatg

SEQ ID NO: 5143711 - DNA, 25 bp, Homo sapien
attcccaatgccctccgactatcac

SEQ ID NO: 5143712 - DNA, 25 bp, Homo sapien
aattaagaagaattcccaatgccct

SEQ ID NO: 5143713 - DNA, 25 bp, Homo sapien
tgcagcagcccgaccccaagtcctc

SEQ ID NO: 5143714 - DNA, 25 bp, Homo sapien
gcggccggccaccctcctgggcgca

SEQ ID NO: 5143715 - DNA, 25 bp, Homo sapien
cgcggccggccaccctcctgggcgc

SEQ ID NO: 5143716 - DNA, 25 bp, Homo sapien
agcagcccgaccccaagtcctcctc

SEQ ID NO: 5143717 - DNA, 25 bp, Homo sapien
acaggatttgcacccaagccgcacg

SEQ ID NO: 5143718 - DNA, 25 bp, Homo sapien
gagaaacaggatttgcacccaagcc

SEQ ID NO: 5143719 - DNA, 25 bp, Homo sapien
agaaacaggatttgcacccaagccg

SEQ ID NO: 5143720 - DNA, 25 bp, Homo sapien
aaacaggatttgcacccaagccgca

SEQ ID NO: 5143721 - DNA, 25 bp, Homo sapien
ggatgggcgacagtcagtgatggtg

SEQ ID NO: 5143722 - DNA, 25 bp, Homo sapien
gatctgataaagttggcactgcaca

SEQ ID NO: 5143723 - DNA, 25 bp, Homo sapien
agagatgatctgataaagttggcac

SEQ ID NO: 5143724 - DNA, 25 bp, Homo sapien
ggtggtgacggtggcgcctggccgg

SEQ ID NO: 5143725 - DNA, 25 bp, Homo sapien
gataaatgtcccacagcggatgtac

SEQ ID NO: 5143726 - DNA, 25 bp, Homo sapien
cagccatctcagtgtgatttagagg

SEQ ID NO: 5143727 - DNA, 25 bp, Homo sapien
gatttagaggaatgaaatgccattg

SEQ ID NO: 5143728 - DNA, 25 bp, Homo sapien
tattcctgacttggcgcactctgtc

SEQ ID NO: 5143729 - DNA, 25 bp, Homo sapien
tcaccaagcatgtataaccgtccag

SEQ ID NO: 5143730 - DNA, 25 bp, Homo sapien
ctatttgctactggtatactgacac

SEQ ID NO: 5143731 - DNA, 25 bp, Homo sapien
taaccgtccagtgccaggactggaa

SEQ ID NO: 5143732 - DNA, 25 bp, Homo sapien
gaagtcaaagaagagtaagtctgaa

SEQ ID NO: 5143733 - DNA, 25 bp, Homo sapien
ggtattatgttagccaaagtttcac

SEQ ID NO: 5143734 - DNA, 25 bp, Homo sapien
tgatgtccctacaaaagtgcctgtt

SEQ ID NO: 5143735 - DNA, 25 bp, Homo sapien
aaccccacgggaaactgtgcatcca

SEQ ID NO: 5143736 - DNA, 25 bp, Homo sapien
tacactgcagatgaataccattgcc

SEQ ID NO: 5143737 - DNA, 25 bp, Homo sapien
tttacttctcctaagaaggttcatg

SEQ ID NO: 5143738 - DNA, 25 bp, Homo sapien
cctctggtgctgggcttcccaacag

SEQ ID NO: 5143739 - DNA, 25 bp, Homo sapien
tcctaagaaggttcatgccctctgg

SEQ ID NO: 5143740 - DNA, 25 bp, Homo sapien
ttctgaatggtcagccgtccctggg

SEQ ID NO: 5143741 - DNA, 25 bp, Homo sapien
aacatagattgctaggcccttccct

SEQ ID NO: 5143742 - DNA, 25 bp, Homo sapien
tgcaattgcaacaagctcctggtgc

SEQ ID NO: 5143743 - DNA, 25 bp, Homo sapien
catgcatcaggatcactgggaaacc

SEQ ID NO: 5143744 - DNA, 25 bp, Homo sapien
caccaggtctggagtagatctcaag

SEQ ID NO: 5143745 - DNA, 25 bp, Homo sapien
ttcacagtgtgttggacataaacac

SEQ ID NO: 5143746 - DNA, 25 bp, Homo sapien
taaacacagtcacagtcaaagtcat

SEQ ID NO: 5143747 - DNA, 25 bp, Homo sapien
aaagtcatctatacacgccctctct

SEQ ID NO: 5143748 - DNA, 25 bp, Homo sapien
tcaaagtcatctatacacgccctct

SEQ ID NO: 5143749 - DNA, 25 bp, Homo sapien
tgaaggggtctgagtgggggtcacc

SEQ ID NO: 5143750 - DNA, 25 bp, Homo sapien
tgagtgggggtcacccaggagtacg

SEQ ID NO: 5143751 - DNA, 25 bp, Homo sapien
gctctgctgggtgtgtgaaggggtc

SEQ ID NO: 5143752 - DNA, 25 bp, Homo sapien
gggtgtgtgaaggggtctgagtggg

SEQ ID NO: 5143753 - DNA, 25 bp, Homo sapien
gtactggtttctattatggacagaa

SEQ ID NO: 5143754 - DNA, 25 bp, Homo sapien
gacagaaacagtccttggtcactca

SEQ ID NO: 5143755 - DNA, 25 bp, Homo sapien
cagtccttggtcactcaataaatca

SEQ ID NO: 5143756 - DNA, 25 bp, Homo sapien
ttatggacagaaacagtccttggtc

SEQ ID NO: 5143757 - DNA, 25 bp, Homo sapien
tgaggcttaaatctactgctgtcat

SEQ ID NO: 5143758 - DNA, 25 bp, Homo sapien
ctgtggttgtgcaacgtatcacatt

SEQ ID NO: 5143759 - DNA, 25 bp, Homo sapien
tgtgcaacgtatcacatttaagatg

SEQ ID NO: 5143760 - DNA, 25 bp, Homo sapien
tcacatttaagatgttgaggcttaa

SEQ ID NO: 5143761 - DNA, 25 bp, Homo sapien
gagcccgtagggacaaggcagcctc

SEQ ID NO: 5143762 - DNA, 25 bp, Homo sapien
cagagcccgtagggacaaggcagcc

SEQ ID NO: 5143763 - DNA, 25 bp, Homo sapien
agagcccgtagggacaaggcagcct

SEQ ID NO: 5143764 - DNA, 25 bp, Homo sapien
gaagcacaatagtgtaggagggggc

SEQ ID NO: 5143765 - DNA, 25 bp, Homo sapien
tgaagcacaatagtgtaggaggggg

SEQ ID NO: 5143766 - DNA, 25 bp, Homo sapien
gtgctcttcggaaggatttttgctc

SEQ ID NO: 5143767 - DNA, 25 bp, Homo sapien
gggtgctcttcggaaggatttttgc

SEQ ID NO: 5143768 - DNA, 25 bp, Homo sapien
cagccggggtgctcttcggaaggat

SEQ ID NO: 5143769 - DNA, 25 bp, Homo sapien
gagccagccggggtgctcttcggaa

SEQ ID NO: 5143770 - DNA, 25 bp, Homo sapien
agctcagctttggtccggacacacc

SEQ ID NO: 5143771 - DNA, 25 bp, Homo sapien
acacccggacatccaggcaggtggg

SEQ ID NO: 5143772 - DNA, 25 bp, Homo sapien
acaggctgcctgctcaacaggagtc

SEQ ID NO: 5143773 - DNA, 25 bp, Homo sapien
ccgtggatatggctggcttggccaa

SEQ ID NO: 5143774 - DNA, 25 bp, Homo sapien
ctaccctgggctctgtcaaaacagg

SEQ ID NO: 5143775 - DNA, 25 bp, Homo sapien
gcagaggctcctcataaagggaggg

SEQ ID NO: 5143776 - DNA, 25 bp, Homo sapien
tgggctctgtcaaaacaggattcct

SEQ ID NO: 5143777 - DNA, 25 bp, Homo sapien
aggattcctaacaaggtgccccttg

SEQ ID NO: 5143778 - DNA, 25 bp, Homo sapien
ccctcctgcctttagtgggctctaa

SEQ ID NO: 5143779 - DNA, 25 bp, Homo sapien
ttagtgaacccatcgcccaaatagt

SEQ ID NO: 5143780 - DNA, 25 bp, Homo sapien
tctggggttttagtgaacccatcgc

SEQ ID NO: 5143781 - DNA, 25 bp, Homo sapien
ctattattacattctctgtgtgtgt

SEQ ID NO: 5143782 - DNA, 25 bp, Homo sapien
ccagattacagacaaaatcatgaac

SEQ ID NO: 5143783 - DNA, 25 bp, Homo sapien
ggcaatttggatactccagtagccg

SEQ ID NO: 5143784 - DNA, 25 bp, Homo sapien
caacttggtagtgcttcccaacata

SEQ ID NO: 5143785 - DNA, 25 bp, Homo sapien
tcccaacataggcagtcaccagatt

SEQ ID NO: 5143786 - DNA, 25 bp, Homo sapien
agacttatgcgcctgtgaagcccca

SEQ ID NO: 5143787 - DNA, 25 bp, Homo sapien
ggaatgcccggcacttagactcatt

SEQ ID NO: 5143788 - DNA, 25 bp, Homo sapien
ttgcttattgagttggtccagacca

SEQ ID NO: 5143789 - DNA, 25 bp, Homo sapien
cccttagggaagatatgcacagcag

SEQ ID NO: 5143790 - DNA, 25 bp, Homo sapien
tgttgtgcatcccctgatttgtgtc

SEQ ID NO: 5143791 - DNA, 25 bp, Homo sapien
actgttgtgcatcccctgatttgtg

SEQ ID NO: 5143792 - DNA, 25 bp, Homo sapien
gttgtgcatcccctgatttgtgtcc

SEQ ID NO: 5143793 - DNA, 25 bp, Homo sapien
tgtgcatcccctgatttgtgtccat

SEQ ID NO: 5143794 - DNA, 25 bp, Homo sapien
taaagcgtacccttgccttgaccca

SEQ ID NO: 5143795 - DNA, 25 bp, Homo sapien
aaaactgtggtaaaaggcatataag

SEQ ID NO: 5143796 - DNA, 25 bp, Homo sapien
ccagaaagcataaagcgtacccttg

SEQ ID NO: 5143797 - DNA, 25 bp, Homo sapien
taatgagaatattgtggtgtaagca

SEQ ID NO: 5143798 - DNA, 25 bp, Homo sapien
tgccacccggctgtggtttccatgg

SEQ ID NO: 5143799 - DNA, 25 bp, Homo sapien
tgcaatgccccatgacagagaaccc

SEQ ID NO: 5143800 - DNA, 25 bp, Homo sapien
caatgccccatgacagagaacccct

SEQ ID NO: 5143801 - DNA, 25 bp, Homo sapien
ctgcaatgccccatgacagagaacc

SEQ ID NO: 5143802 - DNA, 25 bp, Homo sapien
gcaatgccccatgacagagaacccc

SEQ ID NO: 5143803 - DNA, 25 bp, Homo sapien
gtttccaagagttccatcatgtgga

SEQ ID NO: 5143804 - DNA, 25 bp, Homo sapien
catcatgtggaggtaccctgctggc

SEQ ID NO: 5143805 - DNA, 25 bp, Homo sapien
tggctccttcaatttcccggtcagg

SEQ ID NO: 5143806 - DNA, 25 bp, Homo sapien
gagttccatcatgtggaggtaccct

SEQ ID NO: 5143807 - DNA, 25 bp, Homo sapien
tggataatcaccgcagtcccctgac

SEQ ID NO: 5143808 - DNA, 25 bp, Homo sapien
cctctgtatgtgtgaaggtggataa

SEQ ID NO: 5143809 - DNA, 25 bp, Homo sapien
tatgtgtgaaggtggataatcaccg

SEQ ID NO: 5143810 - DNA, 25 bp, Homo sapien
tgtgaaggtggataatcaccgcagt

SEQ ID NO: 5143811 - DNA, 25 bp, Homo sapien
actgatgtgactgtagttgaaagga

SEQ ID NO: 5143812 - DNA, 25 bp, Homo sapien
tgtgactgtagttgaaaggaataat

SEQ ID NO: 5143813 - DNA, 25 bp, Homo sapien
gatgtgactgtagttgaaaggaata

SEQ ID NO: 5143814 - DNA, 25 bp, Homo sapien
tgactgtagttgaaaggaataatga

SEQ ID NO: 5143815 - DNA, 25 bp, Homo sapien
ctgccaaaagtaatacatcaagtag

SEQ ID NO: 5143816 - DNA, 25 bp, Homo sapien
ctcaaacagatggtatatttcaatt

SEQ ID NO: 5143817 - DNA, 25 bp, Homo sapien
tacaaactctcaaacagatggtata

SEQ ID NO: 5143818 - DNA, 25 bp, Homo sapien
ctctcaaacagatggtatatttcaa

SEQ ID NO: 5143819 - DNA, 25 bp, Homo sapien
cccagctctgcgtcgaaaggtgttg

SEQ ID NO: 5143820 - DNA, 25 bp, Homo sapien
aaaggtgttgcgtgcatcccggtgc

SEQ ID NO: 5143821 - DNA, 25 bp, Homo sapien
ccacgtggcttcgtctgtcggagca

SEQ ID NO: 5143822 - DNA, 25 bp, Homo sapien
cacctggaccctgtgggatcgaggc

SEQ ID NO: 5143823 - DNA, 25 bp, Homo sapien
cactagctgggatttgcgattcatg

SEQ ID NO: 5143824 - DNA, 25 bp, Homo sapien
tctctgtggagagcgactctgtgca

SEQ ID NO: 5143825 - DNA, 25 bp, Homo sapien
cagcttcgtgcttggaccctctgta

SEQ ID NO: 5143826 - DNA, 25 bp, Homo sapien
aatgtccgtctttgtgagcactagc

SEQ ID NO: 5143827 - DNA, 25 bp, Homo sapien
gtgcgggcaactgggtggaccccga

SEQ ID NO: 5143828 - DNA, 25 bp, Homo sapien
taagcctcaagggacgtgctgttgc

SEQ ID NO: 5143829 - DNA, 25 bp, Homo sapien
gtatgtgtaagcctcaagggacgtg

SEQ ID NO: 5143830 - DNA, 25 bp, Homo sapien
tgtgtaagcctcaagggacgtgctg

SEQ ID NO: 5143831 - DNA, 25 bp, Homo sapien
cagcagcatcactatggccaaggag

SEQ ID NO: 5143832 - DNA, 25 bp, Homo sapien
cagcatcactatggccaaggagatc

SEQ ID NO: 5143833 - DNA, 25 bp, Homo sapien
gcagcatcactatggccaaggagat

SEQ ID NO: 5143834 - DNA, 25 bp, Homo sapien
atcagcagcatcactatggccaagg

SEQ ID NO: 5143835 - DNA, 25 bp, Homo sapien
gatgatgcagaccacagtgttgccc

SEQ ID NO: 5143836 - DNA, 25 bp, Homo sapien
ggtacacgatgatgcagaccacagt

SEQ ID NO: 5143837 - DNA, 25 bp, Homo sapien
ctggtacacgatgatgcagaccaca

SEQ ID NO: 5143838 - DNA, 25 bp, Homo sapien
cacgatgatgcagaccacagtgttg

SEQ ID NO: 5143839 - DNA, 25 bp, Homo sapien
aagacggacttgaggtaactgagcc

SEQ ID NO: 5143840 - DNA, 25 bp, Homo sapien
tccaggacaaaaaaccagtagagcg

SEQ ID NO: 5143841 - DNA, 25 bp, Homo sapien
ttgaggatgcacatgtaggcgcaca

SEQ ID NO: 5143842 - DNA, 25 bp, Homo sapien
cgatgatgaggaagcggtccacgct

SEQ ID NO: 5143843 - DNA, 25 bp, Homo sapien
taatgacgttgcagttcccatcagc

SEQ ID NO: 5143844 - DNA, 25 bp, Homo sapien
gaggcctcccatgcgtcattgcagg

SEQ ID NO: 5143845 - DNA, 25 bp, Homo sapien
gaagctcttgtgactgaccagtcct

SEQ ID NO: 5143846 - DNA, 25 bp, Homo sapien
caggagttcccggatgtgcttctca

SEQ ID NO: 5143847 - DNA, 25 bp, Homo sapien
cctttgggcaacttcacttctggga

SEQ ID NO: 5143848 - DNA, 25 bp, Homo sapien
tcactacagatgcttgctcagcggg

SEQ ID NO: 5143849 - DNA, 25 bp, Homo sapien
acccctggtggtggccgaatagagc

SEQ ID NO: 5143850 - DNA, 25 bp, Homo sapien
aattgggctcgttggtgtggcacct

SEQ ID NO: 5143851 - DNA, 25 bp, Homo sapien
tcctctgggctgaagaggagggtta

SEQ ID NO: 5143852 - DNA, 25 bp, Homo sapien
ttctctgcccatgttaccactactg

SEQ ID NO: 5143853 - DNA, 25 bp, Homo sapien
cactactgcgggaagaaagtatgag

SEQ ID NO: 5143854 - DNA, 25 bp, Homo sapien
gaggagctggctcttaatgcagttt

SEQ ID NO: 5143855 - DNA, 25 bp, Homo sapien
gagctgaaggcaaatccccaccttg

SEQ ID NO: 5143856 - DNA, 25 bp, Homo sapien
catgggcttggtccccttggtgact

SEQ ID NO: 5143857 - DNA, 25 bp, Homo sapien
aattatctgaaatgcccaccagagg

SEQ ID NO: 5143858 - DNA, 25 bp, Homo sapien
gacacagaattgatggaacccacct

SEQ ID NO: 5143859 - DNA, 25 bp, Homo sapien
cgtctgccatcccggcaccttggga

SEQ ID NO: 5143860 - DNA, 25 bp, Homo sapien
tccgtctgccatcccggcaccttgg

SEQ ID NO: 5143861 - DNA, 25 bp, Homo sapien
acgcgactccgtctgccatcccggc

SEQ ID NO: 5143862 - DNA, 25 bp, Homo sapien
gcgactccgtctgccatcccggcac

SEQ ID NO: 5143863 - DNA, 25 bp, Homo sapien
taacctggtcatagagggaggcagc

SEQ ID NO: 5143864 - DNA, 25 bp, Homo sapien
caagaactgtgtttcatgcaaaggg

SEQ ID NO: 5143865 - DNA, 25 bp, Homo sapien
tgatcatgttcatgcaactgcagaa

SEQ ID NO: 5143866 - DNA, 25 bp, Homo sapien
agaattagcaataacctggtcatag

SEQ ID NO: 5143867 - DNA, 25 bp, Homo sapien
aagcagcaaccgacagggaaggtca

SEQ ID NO: 5143868 - DNA, 25 bp, Homo sapien
ttaagcagcaaccgacagggaaggt

SEQ ID NO: 5143869 - DNA, 25 bp, Homo sapien
taagcagcaaccgacagggaaggtc

SEQ ID NO: 5143870 - DNA, 25 bp, Homo sapien
agcagcaaccgacagggaaggtcag

SEQ ID NO: 5143871 - DNA, 25 bp, Homo sapien
gagcctcctgtaaacccatcattat

SEQ ID NO: 5143872 - DNA, 25 bp, Homo sapien
atctgtgctcgatttgcgcctactg

SEQ ID NO: 5143873 - DNA, 25 bp, Homo sapien
ctcgatttgcgcctactggtgtaat

SEQ ID NO: 5143874 - DNA, 25 bp, Homo sapien
cctgtaaacccatcattatctctgc

SEQ ID NO: 5143875 - DNA, 25 bp, Homo sapien
cactgggctgagttcaactgcgacg

SEQ ID NO: 5143876 - DNA, 25 bp, Homo sapien
tatggttctttctcacaggcctgct

SEQ ID NO: 5143877 - DNA, 25 bp, Homo sapien
ttgtaactgtgccatcgaatagagc

SEQ ID NO: 5143878 - DNA, 25 bp, Homo sapien
ttctcacttccggagcacaggcagg

SEQ ID NO: 5143879 - DNA, 25 bp, Homo sapien
taacatcgatgacgagctgaagctg

SEQ ID NO: 5143880 - DNA, 25 bp, Homo sapien
tcccgaggacatccagacaggctgt

SEQ ID NO: 5143881 - DNA, 25 bp, Homo sapien
cacacactgagcgttcttttctgga

SEQ ID NO: 5143882 - DNA, 25 bp, Homo sapien
tagcctcgtacctttagcaggaccg

SEQ ID NO: 5143883 - DNA, 25 bp, Homo sapien
tagctctggagataaatggactttc

SEQ ID NO: 5143884 - DNA, 25 bp, Homo sapien
cactgccttataatgaaggatgagc

SEQ ID NO: 5143885 - DNA, 25 bp, Homo sapien
gaaacttggagcatccactgatgag

SEQ ID NO: 5143886 - DNA, 25 bp, Homo sapien
gttctctgtccttcgtatgtactca

SEQ ID NO: 5143887 - DNA, 25 bp, Homo sapien
tggctaaatgaaccaaccttcttaa

SEQ ID NO: 5143888 - DNA, 25 bp, Homo sapien
tctcagctacatgggcatctggcta

SEQ ID NO: 5143889 - DNA, 25 bp, Homo sapien
gattacttgtaacgcctatcacaca

SEQ ID NO: 5143890 - DNA, 25 bp, Homo sapien
tatcacacagtacctatatacagat

SEQ ID NO: 5143891 - DNA, 25 bp, Homo sapien
cagatgtttctggtgtacgaggacc

SEQ ID NO: 5143892 - DNA, 25 bp, Homo sapien
tgtcaaacgcagaaccatccagatg

SEQ ID NO: 5143893 - DNA, 25 bp, Homo sapien
aggccgccgatcgtcaagaggatag

SEQ ID NO: 5143894 - DNA, 25 bp, Homo sapien
gatcgtcaaggaggtgtcgactgcc

SEQ ID NO: 5143895 - DNA, 25 bp, Homo sapien
agtgctgcggcagggacctctacgt

SEQ ID NO: 5143896 - DNA, 25 bp, Homo sapien
caaggagcgcgtcaacatagagtgc

SEQ ID NO: 5143897 - DNA, 25 bp, Homo sapien
acgtgggcaccaacgactgcttcgt

SEQ ID NO: 5143898 - DNA, 25 bp, Homo sapien
gcttcgtctaccacttcctgttgga

SEQ ID NO: 5143899 - DNA, 25 bp, Homo sapien
gaacacaaaggaatccaaggcctgg

SEQ ID NO: 5143900 - DNA, 25 bp, Homo sapien
gaatacatttactccggagctgagg

SEQ ID NO: 5143901 - DNA, 25 bp, Homo sapien
ggtgttcctggcaggatcctgtgac

SEQ ID NO: 5143902 - DNA, 25 bp, Homo sapien
aaaggaatccaaggcctggcgtctg

SEQ ID NO: 5143903 - DNA, 25 bp, Homo sapien
tccctgtgactttgtggagtgtgaa

SEQ ID NO: 5143904 - DNA, 25 bp, Homo sapien
tgcctttgagtttgcttctggctgc

SEQ ID NO: 5143905 - DNA, 25 bp, Homo sapien
gagaagtcagaaaggccaccttgcc

SEQ ID NO: 5143906 - DNA, 25 bp, Homo sapien
cacttcaagctctctgaacatgcag

SEQ ID NO: 5143907 - DNA, 25 bp, Homo sapien
gattaaggcatggtaggctcagtgt

SEQ ID NO: 5143908 - DNA, 25 bp, Homo sapien
tccaagattaaggcatggtaggctc

SEQ ID NO: 5143909 - DNA, 25 bp, Homo sapien
taaggcatggtaggctcagtgtttg

SEQ ID NO: 5143910 - DNA, 25 bp, Homo sapien
caagattaaggcatggtaggctcag

SEQ ID NO: 5143911 - DNA, 25 bp, Homo sapien
ctaagagttgcaaaatagtgcagaa

SEQ ID NO: 5143912 - DNA, 25 bp, Homo sapien
aatagtgcagaattcatgaatacac

SEQ ID NO: 5143913 - DNA, 25 bp, Homo sapien
ttgcaaaatagtgcagaattcatga

SEQ ID NO: 5143914 - DNA, 25 bp, Homo sapien
gcagaattcatgaatacactttacc

SEQ ID NO: 5143915 - DNA, 25 bp, Homo sapien
ggagaatggtataggagaagcacac

SEQ ID NO: 5143916 - DNA, 25 bp, Homo sapien
cagaagtagctggagaatggtatag

SEQ ID NO: 5143917 - DNA, 25 bp, Homo sapien
agaatggtataggagaagcacacag

SEQ ID NO: 5143918 - DNA, 25 bp, Homo sapien
gtagctggagaatggtataggagaa

SEQ ID NO: 5143919 - DNA, 25 bp, Homo sapien
tttctgggtctgatatgcagctaac

SEQ ID NO: 5143920 - DNA, 25 bp, Homo sapien
tctgggtctgatatgcagctaacat

SEQ ID NO: 5143921 - DNA, 25 bp, Homo sapien
attttctgggtctgatatgcagcta

SEQ ID NO: 5143922 - DNA, 25 bp, Homo sapien
gctgtattttctgggtctgatatgc

SEQ ID NO: 5143923 - DNA, 25 bp, Homo sapien
cacaggtcactagcaggttctaaag

SEQ ID NO: 5143924 - DNA, 25 bp, Homo sapien
ttgcggcctgaaccaaaggaatagc

SEQ ID NO: 5143925 - DNA, 25 bp, Homo sapien
aaggagtaagatagtcccaggcctc

SEQ ID NO: 5143926 - DNA, 25 bp, Homo sapien
catttattcattcacgcagcaggta

SEQ ID NO: 5143927 - DNA, 25 bp, Homo sapien
gagagtggtgatgcctgcccactcc

SEQ ID NO: 5143928 - DNA, 25 bp, Homo sapien
tgcccactccttcctgggcagaaca

SEQ ID NO: 5143929 - DNA, 25 bp, Homo sapien
ctccttcctgggcagaacatttgta

SEQ ID NO: 5143930 - DNA, 25 bp, Homo sapien
ttcctgggcagaacatttgtagcat

SEQ ID NO: 5143931 - DNA, 25 bp, Homo sapien
ttttctgcttctctttcatcattca

SEQ ID NO: 5143932 - DNA, 25 bp, Homo sapien
taagaaatattttctgcttctcttt

SEQ ID NO: 5143933 - DNA, 25 bp, Homo sapien
aagaaatattttctgcttctctttc

SEQ ID NO: 5143934 - DNA, 25 bp, Homo sapien
atattttctgcttctctttcatcat

SEQ ID NO: 5143935 - DNA, 25 bp, Homo sapien
ctgtgacgtccaatggcagaggtca

SEQ ID NO: 5143936 - DNA, 25 bp, Homo sapien
ccaatggcagaggtcaaagggattc

SEQ ID NO: 5143937 - DNA, 25 bp, Homo sapien
tgtgacgtccaatggcagaggtcaa

SEQ ID NO: 5143938 - DNA, 25 bp, Homo sapien
cgtccaatggcagaggtcaaaggga

SEQ ID NO: 5143939 - DNA, 25 bp, Homo sapien
agccagccacgattagtcgcgcctt

SEQ ID NO: 5143940 - DNA, 25 bp, Homo sapien
cgggctccttctctcgctgctggtt

SEQ ID NO: 5143941 - DNA, 25 bp, Homo sapien
gctcccacggaccagagaaaagagg

SEQ ID NO: 5143942 - DNA, 25 bp, Homo sapien
caaatggcgtgtcaagtttcgcagg

SEQ ID NO: 5143943 - DNA, 25 bp, Homo sapien
gcggagactcgcgtgtgtcgtcact

SEQ ID NO: 5143944 - DNA, 25 bp, Homo sapien
gaagcgttgcggaagtgacgtactc

SEQ ID NO: 5143945 - DNA, 25 bp, Homo sapien
acaaagccccgcgaaggaagcgttg

SEQ ID NO: 5143946 - DNA, 25 bp, Homo sapien
tgtgtcgtcactctgagtcgccgca

SEQ ID NO: 5143947 - DNA, 25 bp, Homo sapien
cagcagttccgagtccgtgcagctg

SEQ ID NO: 5143948 - DNA, 25 bp, Homo sapien
agttccgagtccgtgcagctgcgac

SEQ ID NO: 5143949 - DNA, 25 bp, Homo sapien
agcagcagttccgagtccgtgcagc

SEQ ID NO: 5143950 - DNA, 25 bp, Homo sapien
tgcagcagcagttccgagtccgtgc

SEQ ID NO: 5143951 - DNA, 25 bp, Homo sapien
cgcccaccctccgatccggcgcgcc

SEQ ID NO: 5143952 - DNA, 25 bp, Homo sapien
cacccgcccaccctccgatccggcg

SEQ ID NO: 5143953 - DNA, 25 bp, Homo sapien
cccgcccaccctccgatccggcgcg

SEQ ID NO: 5143954 - DNA, 25 bp, Homo sapien
ccgcccaccctccgatccggcgcgc

SEQ ID NO: 5143955 - DNA, 25 bp, Homo sapien
gattctcttggacaacgttcccaga

SEQ ID NO: 5143956 - DNA, 25 bp, Homo sapien
tttctgggccagcaacaagctcgtt

SEQ ID NO: 5143957 - DNA, 25 bp, Homo sapien
gaaactgttattcccgtactgacga

SEQ ID NO: 5143958 - DNA, 25 bp, Homo sapien
taagcacaggagtagtcatgaagac

SEQ ID NO: 5143959 - DNA, 25 bp, Homo sapien
tcttcggcaaatccctctgaggcaa

SEQ ID NO: 5143960 - DNA, 25 bp, Homo sapien
gaggcaatggtattgcatgttggac

SEQ ID NO: 5143961 - DNA, 25 bp, Homo sapien
gacataaaggtcagtaagactgtct

SEQ ID NO: 5143962 - DNA, 25 bp, Homo sapien
tgtctttgtttactcttacatcagt

SEQ ID NO: 5143963 - DNA, 25 bp, Homo sapien
atcaaagagatgcactcttgaaaaa

SEQ ID NO: 5143964 - DNA, 25 bp, Homo sapien
gagatgcactcttgaaaaataccat

SEQ ID NO: 5143965 - DNA, 25 bp, Homo sapien
aagagatgcactcttgaaaaatacc

SEQ ID NO: 5143966 - DNA, 25 bp, Homo sapien
caaagagatgcactcttgaaaaata

SEQ ID NO: 5143967 - DNA, 25 bp, Homo sapien
gaacttccatcaaatacgatgaggg

SEQ ID NO: 5143968 - DNA, 25 bp, Homo sapien
cagtcgatcattatctccattctct

SEQ ID NO: 5143969 - DNA, 25 bp, Homo sapien
gggaggcttcagtcgatcattatct

SEQ ID NO: 5143970 - DNA, 25 bp, Homo sapien
ttttccttaacccatctacagtgct

SEQ ID NO: 5143971 - DNA, 25 bp, Homo sapien
tgtgttccgttttattgttcacagg

SEQ ID NO: 5143972 - DNA, 25 bp, Homo sapien
taaaggcattactggtaaagcttgc

SEQ ID NO: 5143973 - DNA, 25 bp, Homo sapien
cactcgaagaggaatttgataattt

SEQ ID NO: 5143974 - DNA, 25 bp, Homo sapien
tgaaacactcgaagaggaatttgat

SEQ ID NO: 5143975 - DNA, 25 bp, Homo sapien
actggagtagttccaacaggggaca

SEQ ID NO: 5143976 - DNA, 25 bp, Homo sapien
caggggacaatggtggcgacttcac

SEQ ID NO: 5143977 - DNA, 25 bp, Homo sapien
tctgcctcttctttaggagcagctc

SEQ ID NO: 5143978 - DNA, 25 bp, Homo sapien
cctgaaggacttttcctatgcgtta

SEQ ID NO: 5143979 - DNA, 25 bp, Homo sapien
ccaagtaacatgttgtatcttcctt

SEQ ID NO: 5143980 - DNA, 25 bp, Homo sapien
tcagggccaagtaacatgttgtatc

SEQ ID NO: 5143981 - DNA, 25 bp, Homo sapien
gggccaagtaacatgttgtatcttc

SEQ ID NO: 5143982 - DNA, 25 bp, Homo sapien
cagggccaagtaacatgttgtatct

SEQ ID NO: 5143983 - DNA, 25 bp, Homo sapien
aattccacaataatcaggatttctg

SEQ ID NO: 5143984 - DNA, 25 bp, Homo sapien
tgaaacctcttaagaaaattccaca

SEQ ID NO: 5143985 - DNA, 25 bp, Homo sapien
tgaacatatttgaaaaactacagtt

SEQ ID NO: 5143986 - DNA, 25 bp, Homo sapien
ctacagttacagtatatttacattt

SEQ ID NO: 5143987 - DNA, 25 bp, Homo sapien
gaatctagagcaacattacccgcct

SEQ ID NO: 5143988 - DNA, 25 bp, Homo sapien
tgaaaagattaagctcccacgagcg

SEQ ID NO: 5143989 - DNA, 25 bp, Homo sapien
tatgtataggatcacagttgcccac

SEQ ID NO: 5143990 - DNA, 25 bp, Homo sapien
gatgggccaggtacagaatcgacca

SEQ ID NO: 5143991 - DNA, 25 bp, Homo sapien
gatatggctggactactcgaatcac

SEQ ID NO: 5143992 - DNA, 25 bp, Homo sapien
caatccaggtatagaaagttgtact

SEQ ID NO: 5143993 - DNA, 25 bp, Homo sapien
tatttccatccctcaacatgtagtg

SEQ ID NO: 5143994 - DNA, 25 bp, Homo sapien
catgtcaggctctgtagcaccgtga

SEQ ID NO: 5143995 - DNA, 25 bp, Homo sapien
tagcagtatacagttgggaagcacg

SEQ ID NO: 5143996 - DNA, 25 bp, Homo sapien
tatcggctctgtcccagtgttatgg

SEQ ID NO: 5143997 - DNA, 25 bp, Homo sapien
aacttgaggccagagacgacatcct

SEQ ID NO: 5143998 - DNA, 25 bp, Homo sapien
caactgagggcacactgggagcctt

SEQ ID NO: 5143999 - DNA, 25 bp, Homo sapien
ccaatgttccaatggcctggggcat

SEQ ID NO: 5144000 - DNA, 25 bp, Homo sapien
gcatggtcccatggtcactgtatga

SEQ ID NO: 5144001 - DNA, 25 bp, Homo sapien
tatgaagtgcagttccaatgttcca

SEQ ID NO: 5144002 - DNA, 25 bp, Homo sapien
tggggcattgccaactggaacagca

SEQ ID NO: 5144003 - DNA, 25 bp, Homo sapien
tgtaagaagtgctccctctcactgg

SEQ ID NO: 5144004 - DNA, 25 bp, Homo sapien
tgtgatagttcagtcccagggaaag

SEQ ID NO: 5144005 - DNA, 25 bp, Homo sapien
catctcctttgaggaacggcagtgg

SEQ ID NO: 5144006 - DNA, 25 bp, Homo sapien
ttttgtaatcgagtaaggcacaccc

SEQ ID NO: 5144007 - DNA, 25 bp, Homo sapien
ttcacagctcgcgatgactttgcct

SEQ ID NO: 5144008 - DNA, 25 bp, Homo sapien
gaactgcttctgtgacttgtatgcc

SEQ ID NO: 5144009 - DNA, 25 bp, Homo sapien
gactttgcctactgcctgaactgct

SEQ ID NO: 5144010 - DNA, 25 bp, Homo sapien
agtgcttcgtgtgcaccgcctgcag

SEQ ID NO: 5144011 - DNA, 25 bp, Homo sapien
catgccatgcagtgcgttcagtgca

SEQ ID NO: 5144012 - DNA, 25 bp, Homo sapien
cgcaagatggagtacaagggcagca

SEQ ID NO: 5144013 - DNA, 25 bp, Homo sapien
tgccagcagccaattggaaccaaga

SEQ ID NO: 5144014 - DNA, 25 bp, Homo sapien
tctgtgtgccctgctatgagaaaca

SEQ ID NO: 5144015 - DNA, 25 bp, Homo sapien
caacgagtactcatccaagtgccag

SEQ ID NO: 5144016 - DNA, 25 bp, Homo sapien
tgaagcctgtttccactgctcgcag

SEQ ID NO: 5144017 - DNA, 25 bp, Homo sapien
caagtgccaggaatgcaagaagacc

SEQ ID NO: 5144018 - DNA, 25 bp, Homo sapien
tgtcttacaaggaccggcactggca

SEQ ID NO: 5144019 - DNA, 25 bp, Homo sapien
tgggcctcctgtgaacatcccgaca

SEQ ID NO: 5144020 - DNA, 25 bp, Homo sapien
tgccatgccggtgaccacagtgatc

SEQ ID NO: 5144021 - DNA, 25 bp, Homo sapien
accacagtgatctgagttgggcagg

SEQ ID NO: 5144022 - DNA, 25 bp, Homo sapien
cggtgaccacagtgatctgagttgg

SEQ ID NO: 5144023 - DNA, 25 bp, Homo sapien
tctgagcacttcactctcctgttga

SEQ ID NO: 5144024 - DNA, 25 bp, Homo sapien
cactgccttcaggatcaatggaatc

SEQ ID NO: 5144025 - DNA, 25 bp, Homo sapien
cagtctgagcacttcactctcctgt

SEQ ID NO: 5144026 - DNA, 25 bp, Homo sapien
cctgttgaaaagcagctgtccactg

SEQ ID NO: 5144027 - DNA, 25 bp, Homo sapien
tccaacagggatagcacaagaggtc

SEQ ID NO: 5144028 - DNA, 25 bp, Homo sapien
cattctttatcgtcttgcgtcagca

SEQ ID NO: 5144029 - DNA, 25 bp, Homo sapien
tgtcttcaaagtgtctcagcgttca

SEQ ID NO: 5144030 - DNA, 25 bp, Homo sapien
gcgtcagcaataatcctattcccag

SEQ ID NO: 5144031 - DNA, 25 bp, Homo sapien
ggaaataactttcgcatcaggagga

SEQ ID NO: 5144032 - DNA, 25 bp, Homo sapien
cctgttcccgaacgatgatgatgtc

SEQ ID NO: 5144033 - DNA, 25 bp, Homo sapien
gaagcttggcttagctccgtgccag

SEQ ID NO: 5144034 - DNA, 25 bp, Homo sapien
cctgggctggttcagtggaaataac

SEQ ID NO: 5144035 - DNA, 25 bp, Homo sapien
gggacttaatgaccggagcactggc

SEQ ID NO: 5144036 - DNA, 25 bp, Homo sapien
agaatgcggccttcaccttgcgagg

SEQ ID NO: 5144037 - DNA, 25 bp, Homo sapien
gccccagggaatgatgccgagataa

SEQ ID NO: 5144038 - DNA, 25 bp, Homo sapien
tgcgcctgcagaaggtctccaagtc

SEQ ID NO: 5144039 - DNA, 25 bp, Homo sapien
tttggcaagaagtacatcctgcggg

SEQ ID NO: 5144040 - DNA, 25 bp, Homo sapien
tgttcgccaacacctgcgaggagtg

SEQ ID NO: 5144041 - DNA, 25 bp, Homo sapien
cctactgcgtggtgtgctttgagac

SEQ ID NO: 5144042 - DNA, 25 bp, Homo sapien
aatgactgagcgctttgactgccac

SEQ ID NO: 5144043 - DNA, 25 bp, Homo sapien
aactgagatagctttttctgacaca

SEQ ID NO: 5144044 - DNA, 25 bp, Homo sapien
tttcaagaagtggaatgtgaccagg

SEQ ID NO: 5144045 - DNA, 25 bp, Homo sapien
ggtgtcagcccttacctgcatttaa

SEQ ID NO: 5144046 - DNA, 25 bp, Homo sapien
tcatgaatcataaagaggagctcac

SEQ ID NO: 5144047 - DNA, 25 bp, Homo sapien
gaatgtccagacaatgttttcttta

SEQ ID NO: 5144048 - DNA, 25 bp, Homo sapien
gagtgatttagaaggacggatcttg

SEQ ID NO: 5144049 - DNA, 25 bp, Homo sapien
gtgatgttatcacaagaatgtccag

SEQ ID NO: 5144050 - DNA, 25 bp, Homo sapien
ggatcttgccgcatgtgtccagctg

SEQ ID NO: 5144051 - DNA, 25 bp, Homo sapien
tcaggtatatgagcaccgtgatcac

SEQ ID NO: 5144052 - DNA, 25 bp, Homo sapien
cacacagacggcctttcaagttaga

SEQ ID NO: 5144053 - DNA, 25 bp, Homo sapien
gatcacgattattacctcagaggaa

SEQ ID NO: 5144054 - DNA, 25 bp, Homo sapien
tatttgagaaagctcagtggaccct

SEQ ID NO: 5144055 - DNA, 25 bp, Homo sapien
caagccaagggaggctgtctgtcat

SEQ ID NO: 5144056 - DNA, 25 bp, Homo sapien
aggcctgagccagcaagccaaggga

SEQ ID NO: 5144057 - DNA, 25 bp, Homo sapien
gaactccaaggcctgagccagcaag

SEQ ID NO: 5144058 - DNA, 25 bp, Homo sapien
ctgtagggatctgccaggctcctgg

SEQ ID NO: 5144059 - DNA, 25 bp, Homo sapien
aggaaatggctatgttagaggagcc

SEQ ID NO: 5144060 - DNA, 25 bp, Homo sapien
tagggagaagcacttggggtttcaa

SEQ ID NO: 5144061 - DNA, 25 bp, Homo sapien
gggtcagatcaaagtaggtagtcaa

SEQ ID NO: 5144062 - DNA, 25 bp, Homo sapien
gaaaaggatgcttaaatagacttct

SEQ ID NO: 5144063 - DNA, 25 bp, Homo sapien
tgcttttgcatgtgttgaagggctg

SEQ ID NO: 5144064 - DNA, 25 bp, Homo sapien
ggcttggggacgttcacagatttct

SEQ ID NO: 5144065 - DNA, 25 bp, Homo sapien
ttttgcatgtgttgaagggctgcat

SEQ ID NO: 5144066 - DNA, 25 bp, Homo sapien
gcttggggacgttcacagatttctc

SEQ ID NO: 5144067 - DNA, 25 bp, Homo sapien
atatcccttgcggatccccggtgac

SEQ ID NO: 5144068 - DNA, 25 bp, Homo sapien
taagtaattgaatatcccttgcgga

SEQ ID NO: 5144069 - DNA, 25 bp, Homo sapien
tgcggatccccggtgacatctaaag

SEQ ID NO: 5144070 - DNA, 25 bp, Homo sapien
cccggtgacatctaaagatacaggg

SEQ ID NO: 5144071 - DNA, 25 bp, Homo sapien
caatgcttacggttggtagaagacg

SEQ ID NO: 5144072 - DNA, 25 bp, Homo sapien
tgacatgtttgtattcatccacccg

SEQ ID NO: 5144073 - DNA, 25 bp, Homo sapien
gggcaattgcatgaaaacactgcac

SEQ ID NO: 5144074 - DNA, 25 bp, Homo sapien
gtctcagcgacaggtagtgggcacc

SEQ ID NO: 5144075 - DNA, 25 bp, Homo sapien
gacgagggcagcgatggaagctcat

SEQ ID NO: 5144076 - DNA, 25 bp, Homo sapien
ctggaaggagggacgagggcagcga

SEQ ID NO: 5144077 - DNA, 25 bp, Homo sapien
gaaggagggacgagggcagcgatgg

SEQ ID NO: 5144078 - DNA, 25 bp, Homo sapien
agggacgagggcagcgatggaagct

SEQ ID NO: 5144079 - DNA, 25 bp, Homo sapien
ctgtgtgttcacatgggattggagt

SEQ ID NO: 5144080 - DNA, 25 bp, Homo sapien
gtgcgttcttcccaaagtgggcacg

SEQ ID NO: 5144081 - DNA, 25 bp, Homo sapien
ggattggagtccaaacacaataaga

SEQ ID NO: 5144082 - DNA, 25 bp, Homo sapien
catcctggactgtgcagctgtgtgt

SEQ ID NO: 5144083 - DNA, 25 bp, Homo sapien
ttccaggtgtgagagtcccgtgcct

SEQ ID NO: 5144084 - DNA, 25 bp, Homo sapien
tcccgtgcctttgaatggaggatct

SEQ ID NO: 5144085 - DNA, 25 bp, Homo sapien
tgtctgtagaacatcagggccttct

SEQ ID NO: 5144086 - DNA, 25 bp, Homo sapien
tgtagatactcccatccgtaggaaa

SEQ ID NO: 5144087 - DNA, 25 bp, Homo sapien
tggccctctccgttttatcagaatt

SEQ ID NO: 5144088 - DNA, 25 bp, Homo sapien
atgatggccctctccgttttatcag

SEQ ID NO: 5144089 - DNA, 25 bp, Homo sapien
atggccctctccgttttatcagaat

SEQ ID NO: 5144090 - DNA, 25 bp, Homo sapien
tgatggccctctccgttttatcaga

SEQ ID NO: 5144091 - DNA, 25 bp, Homo sapien
tctttagggactccaaggcttgatc

SEQ ID NO: 5144092 - DNA, 25 bp, Homo sapien
tctctctttagggactccaaggctt

SEQ ID NO: 5144093 - DNA, 25 bp, Homo sapien
gggactccaaggcttgatccattat

SEQ ID NO: 5144094 - DNA, 25 bp, Homo sapien
tccaaggcttgatccattattctag

SEQ ID NO: 5144095 - DNA, 25 bp, Homo sapien
ggaggtgacgctgtccgcctgcttc

SEQ ID NO: 5144096 - DNA, 25 bp, Homo sapien
accgggcgagcctgggtaaaggctg

SEQ ID NO: 5144097 - DNA, 25 bp, Homo sapien
gggcaccgccatgcgggcagggacc

SEQ ID NO: 5144098 - DNA, 25 bp, Homo sapien
gtcctggcacggtggtctgcgcggg

SEQ ID NO: 5144099 - DNA, 25 bp, Homo sapien
gtagacccgggagaggagagccgaa

SEQ ID NO: 5144100 - DNA, 25 bp, Homo sapien
ggtagacccgggagaggagagccga

SEQ ID NO: 5144101 - DNA, 25 bp, Homo sapien
tggggtagacccgggagaggagagc

SEQ ID NO: 5144102 - DNA, 25 bp, Homo sapien
ctgtggggtagacccgggagaggag

SEQ ID NO: 5144103 - DNA, 25 bp, Homo sapien
gccgaatccggtgcgagacccaagg

SEQ ID NO: 5144104 - DNA, 25 bp, Homo sapien
gggccgaatccggtgcgagacccaa

SEQ ID NO: 5144105 - DNA, 25 bp, Homo sapien
aagtgggggccgaatccggtgcgag

SEQ ID NO: 5144106 - DNA, 25 bp, Homo sapien
cagagctgtgggtccgggaagacca

SEQ ID NO: 5144107 - DNA, 25 bp, Homo sapien
gggagggctgtattccgcacatcta

SEQ ID NO: 5144108 - DNA, 25 bp, Homo sapien
cttcaggaaagcgtcctgtttcagg

SEQ ID NO: 5144109 - DNA, 25 bp, Homo sapien
attccgcacatctagttctggctgg

SEQ ID NO: 5144110 - DNA, 25 bp, Homo sapien
ttcaggtagggtggccttaactcag

SEQ ID NO: 5144111 - DNA, 25 bp, Homo sapien
agaaaaagcgaatccagctttctgt

SEQ ID NO: 5144112 - DNA, 25 bp, Homo sapien
ctggatccgggcaaatagtgtttcc

SEQ ID NO: 5144113 - DNA, 25 bp, Homo sapien
caccctgggatctggtactgtgtca

SEQ ID NO: 5144114 - DNA, 25 bp, Homo sapien
cctgcccgtagagtcatctttcata

SEQ ID NO: 5144115 - DNA, 25 bp, Homo sapien
tccaggaagctctgtcatgactccc

SEQ ID NO: 5144116 - DNA, 25 bp, Homo sapien
gaaagatgcttggttgttccaggaa

SEQ ID NO: 5144117 - DNA, 25 bp, Homo sapien
taaagcataggttttcatcacacac

SEQ ID NO: 5144118 - DNA, 25 bp, Homo sapien
caactactattgcaaggatggagaa

SEQ ID NO: 5144119 - DNA, 25 bp, Homo sapien
tggttggaaagtgttctaagacagg

SEQ ID NO: 5144120 - DNA, 25 bp, Homo sapien
ttggttggaaagtgttctaagacag

SEQ ID NO: 5144121 - DNA, 25 bp, Homo sapien
cttggttggaaagtgttctaagaca

SEQ ID NO: 5144122 - DNA, 25 bp, Homo sapien
gaattctcgatacaaagccaactgg

SEQ ID NO: 5144123 - DNA, 25 bp, Homo sapien
tacttctcgtaagggaaggctgtga

SEQ ID NO: 5144124 - DNA, 25 bp, Homo sapien
gaaggctgtgattctgcaagtgcca

SEQ ID NO: 5144125 - DNA, 25 bp, Homo sapien
tctgcatccacgtgccagttgtaag

SEQ ID NO: 5144126 - DNA, 25 bp, Homo sapien
gagtccaggcatgagtcggcttgct

SEQ ID NO: 5144127 - DNA, 25 bp, Homo sapien
tattcctgatccttggcagtgtccc

SEQ ID NO: 5144128 - DNA, 25 bp, Homo sapien
ggtgtgatccctgaactctgtctgg

SEQ ID NO: 5144129 - DNA, 25 bp, Homo sapien
gtacttggcactggccctcgtgtgg

SEQ ID NO: 5144130 - DNA, 25 bp, Homo sapien
caagctgtagattcagggtggacat

SEQ ID NO: 5144131 - DNA, 25 bp, Homo sapien
ctgtgtccacagaggctcgctggta

SEQ ID NO: 5144132 - DNA, 25 bp, Homo sapien
tagagcgatggtggttatgcacaca

SEQ ID NO: 5144133 - DNA, 25 bp, Homo sapien
tacagtttaggacgcagtgggtgtc

SEQ ID NO: 5144134 - DNA, 25 bp, Homo sapien
tctttcctagggcaactcctctgag

SEQ ID NO: 5144135 - DNA, 25 bp, Homo sapien
ctctgagctacgctgccaatgcacg

SEQ ID NO: 5144136 - DNA, 25 bp, Homo sapien
tgtatgtggggaaggactgccctcc

SEQ ID NO: 5144137 - DNA, 25 bp, Homo sapien
ggactgccctccaccgtgattcttt

SEQ ID NO: 5144138 - DNA, 25 bp, Homo sapien
cacaacgcggccaagattgctgctg

SEQ ID NO: 5144139 - DNA, 25 bp, Homo sapien
ctttctggtccacaacgcggccaag

SEQ ID NO: 5144140 - DNA, 25 bp, Homo sapien
tctggtccacaacgcggccaagatt

SEQ ID NO: 5144141 - DNA, 25 bp, Homo sapien
ccacaacgcggccaagattgctgct

SEQ ID NO: 5144142 - DNA, 25 bp, Homo sapien
catatgggtatcactgacagcctcc

SEQ ID NO: 5144143 - DNA, 25 bp, Homo sapien
gggacctgacgcttgataccacttc

SEQ ID NO: 5144144 - DNA, 25 bp, Homo sapien
gacagcctccattctgtactaaaat

SEQ ID NO: 5144145 - DNA, 25 bp, Homo sapien
gagttgtaatgggttcccatgccgt

SEQ ID NO: 5144146 - DNA, 25 bp, Homo sapien
gactttgaccctctcacagctggct

SEQ ID NO: 5144147 - DNA, 25 bp, Homo sapien
gggtgactcgcaggcatttcagtga

SEQ ID NO: 5144148 - DNA, 25 bp, Homo sapien
caagtccgagccaaggaatttagac

SEQ ID NO: 5144149 - DNA, 25 bp, Homo sapien
cctgtttggcaggacaagaggagac

SEQ ID NO: 5144150 - DNA, 25 bp, Homo sapien
caccagtcccacatggggatagtcc

SEQ ID NO: 5144151 - DNA, 25 bp, Homo sapien
acatggggatagtcctcggatctgg

SEQ ID NO: 5144152 - DNA, 25 bp, Homo sapien
tcctactctattttccacaacaaca

SEQ ID NO: 5144153 - DNA, 25 bp, Homo sapien
gatagtcctcggatctggggaagcc

SEQ ID NO: 5144154 - DNA, 25 bp, Homo sapien
ataacaggcgataaaaagctgctgc

SEQ ID NO: 5144155 - DNA, 25 bp, Homo sapien
gtgaaagcaacaccctagataacag

SEQ ID NO: 5144156 - DNA, 25 bp, Homo sapien
tctgaagaaccgtcagcaaagcaac

SEQ ID NO: 5144157 - DNA, 25 bp, Homo sapien
gcaacaccctagataacaggcgata

SEQ ID NO: 5144158 - DNA, 25 bp, Homo sapien
tgcccacctggctcaaagttagacg

SEQ ID NO: 5144159 - DNA, 25 bp, Homo sapien
gacggttgacagacattgatcccaa

SEQ ID NO: 5144160 - DNA, 25 bp, Homo sapien
atccctgtagccacgatgggtgcag

SEQ ID NO: 5144161 - DNA, 25 bp, Homo sapien
ttggatcctgattcaccacccctga

SEQ ID NO: 5144162 - DNA, 25 bp, Homo sapien
tctcatgggtagtttccactcttgt

SEQ ID NO: 5144163 - DNA, 25 bp, Homo sapien
ttcatttggctttctcatgggtagt

SEQ ID NO: 5144164 - DNA, 25 bp, Homo sapien
gattggtgaatgtgggaagctagga

SEQ ID NO: 5144165 - DNA, 25 bp, Homo sapien
ttgtagtctctacgataaaatagtt

SEQ ID NO: 5144166 - DNA, 25 bp, Homo sapien
tcaatggacgaccaccatgggaggg

SEQ ID NO: 5144167 - DNA, 25 bp, Homo sapien
gggcattgtctagagctgccatcct

SEQ ID NO: 5144168 - DNA, 25 bp, Homo sapien
ttggtgccaccatggtaccagaggc

SEQ ID NO: 5144169 - DNA, 25 bp, Homo sapien
gctgatgctgaccagccttgttggt

SEQ ID NO: 5144170 - DNA, 25 bp, Homo sapien
atctggaggccacctgtttgcagtg

SEQ ID NO: 5144171 - DNA, 25 bp, Homo sapien
tctacttttacggtctgctgctgca

SEQ ID NO: 5144172 - DNA, 25 bp, Homo sapien
ctgctctacttttacggtctgctgc

SEQ ID NO: 5144173 - DNA, 25 bp, Homo sapien
gccacctgtttgcagtgaaacccat

SEQ ID NO: 5144174 - DNA, 25 bp, Homo sapien
tctgctgtgatactagtgatgaatg

SEQ ID NO: 5144175 - DNA, 25 bp, Homo sapien
gtttgggctctgctgtgatactagt

SEQ ID NO: 5144176 - DNA, 25 bp, Homo sapien
tgggctctgctgtgatactagtgat

SEQ ID NO: 5144177 - DNA, 25 bp, Homo sapien
gctctgctgtgatactagtgatgaa

SEQ ID NO: 5144178 - DNA, 25 bp, Homo sapien
cagctgtgcacaccttatcagcttc

SEQ ID NO: 5144179 - DNA, 25 bp, Homo sapien
ccagctgtgcacaccttatcagctt

SEQ ID NO: 5144180 - DNA, 25 bp, Homo sapien
gttcttctggatttagccaccccga

SEQ ID NO: 5144181 - DNA, 25 bp, Homo sapien
ctagaaagtgacctggaagttcttc

SEQ ID NO: 5144182 - DNA, 25 bp, Homo sapien
agcaatggctgcttgatcatctcct

SEQ ID NO: 5144183 - DNA, 25 bp, Homo sapien
ccgaggattttaatgatggagctgc

SEQ ID NO: 5144184 - DNA, 25 bp, Homo sapien
cctgacaacagtctcccctgatccc

SEQ ID NO: 5144185 - DNA, 25 bp, Homo sapien
tgacaacagtctcccctgatccctg

SEQ ID NO: 5144186 - DNA, 25 bp, Homo sapien
tcccctgatccctgatactgaaggc

SEQ ID NO: 5144187 - DNA, 25 bp, Homo sapien
acagtctcccctgatccctgatact

SEQ ID NO: 5144188 - DNA, 25 bp, Homo sapien
tgactgcaacctcgttctaggcggg

SEQ ID NO: 5144189 - DNA, 25 bp, Homo sapien
caacctcgttctaggcggggctgcc

SEQ ID NO: 5144190 - DNA, 25 bp, Homo sapien
ccctgactgcaacctcgttctaggc

SEQ ID NO: 5144191 - DNA, 25 bp, Homo sapien
aacctcgttctaggcggggctgcca

SEQ ID NO: 5144192 - DNA, 25 bp, Homo sapien
caagggcgcaaatggtgagtgggtt

SEQ ID NO: 5144193 - DNA, 25 bp, Homo sapien
cagtgattggcaagggcgcaaatgg

SEQ ID NO: 5144194 - DNA, 25 bp, Homo sapien
agtgattggcaagggcgcaaatggt

SEQ ID NO: 5144195 - DNA, 25 bp, Homo sapien
tggcaagggcgcaaatggtgagtgg

SEQ ID NO: 5144196 - DNA, 25 bp, Homo sapien
tgtttgaagagcaggacggaatttt

SEQ ID NO: 5144197 - DNA, 25 bp, Homo sapien
aatccccttggtgcttcacagggaa

SEQ ID NO: 5144198 - DNA, 25 bp, Homo sapien
aacctagcagcgactcagtgtcctg

SEQ ID NO: 5144199 - DNA, 25 bp, Homo sapien
aaacggttttgctcagtggtcacca

SEQ ID NO: 5144200 - DNA, 25 bp, Homo sapien
tcacttgcaaaacctgctccacctc

SEQ ID NO: 5144201 - DNA, 25 bp, Homo sapien
gcagcacagtgaggactttgaattt

SEQ ID NO: 5144202 - DNA, 25 bp, Homo sapien
agctgcccacacactcgccagtgtg

SEQ ID NO: 5144203 - DNA, 25 bp, Homo sapien
tgctgtgtaagagctcaaagtcctc

SEQ ID NO: 5144204 - DNA, 25 bp, Homo sapien
gcagcctgtcccgtctttccccgta

SEQ ID NO: 5144205 - DNA, 25 bp, Homo sapien
ctttccccgtaaagtacttgctgtg

SEQ ID NO: 5144206 - DNA, 25 bp, Homo sapien
ctccagctctcctcgtctggtagag

SEQ ID NO: 5144207 - DNA, 25 bp, Homo sapien
agctctcctcgtctggtagaggtgg

SEQ ID NO: 5144208 - DNA, 25 bp, Homo sapien
acacacgggtctgccatggaggctg

SEQ ID NO: 5144209 - DNA, 25 bp, Homo sapien
tgcagggcccgacacacacgggtct

SEQ ID NO: 5144210 - DNA, 25 bp, Homo sapien
tcgcggctccgctgataatgtgttg

SEQ ID NO: 5144211 - DNA, 25 bp, Homo sapien
ctcatggaagggacacactcagctt

SEQ ID NO: 5144212 - DNA, 25 bp, Homo sapien
caacttcttgtgttgggcctgtgga

SEQ ID NO: 5144213 - DNA, 25 bp, Homo sapien
gatgtggaccccatagaccaatgcc

SEQ ID NO: 5144214 - DNA, 25 bp, Homo sapien
gggttagcgatagactcagtggctt

SEQ ID NO: 5144215 - DNA, 25 bp, Homo sapien
gagaaacaccctcgagccatatcca

SEQ ID NO: 5144216 - DNA, 25 bp, Homo sapien
actgctttcagtgtgcctaagtgca

SEQ ID NO: 5144217 - DNA, 25 bp, Homo sapien
tcagatccggcactctcaacatggg

SEQ ID NO: 5144218 - DNA, 25 bp, Homo sapien
aaccatggctttgtcagttcttttc

SEQ ID NO: 5144219 - DNA, 25 bp, Homo sapien
caagaataaaccatggctttgtcag

SEQ ID NO: 5144220 - DNA, 25 bp, Homo sapien
ggctttgtcagttcttttctcagtg

SEQ ID NO: 5144221 - DNA, 25 bp, Homo sapien
aagaataaaccatggctttgtcagt

SEQ ID NO: 5144222 - DNA, 25 bp, Homo sapien
tgacccgatgatagcatttaactct

SEQ ID NO: 5144223 - DNA, 25 bp, Homo sapien
tagctgtgtgctctccggtgtccag

SEQ ID NO: 5144224 - DNA, 25 bp, Homo sapien
ggtgtccagcactgacccgatgata

SEQ ID NO: 5144225 - DNA, 25 bp, Homo sapien
tcaacgagagagcatagctgtgtgc

SEQ ID NO: 5144226 - DNA, 25 bp, Homo sapien
aattccgtgagagtatgaggtggca

SEQ ID NO: 5144227 - DNA, 25 bp, Homo sapien
ggcagcgaggcatttagagctcaaa

SEQ ID NO: 5144228 - DNA, 25 bp, Homo sapien
tattcatgggcttcccgtgtccgct

SEQ ID NO: 5144229 - DNA, 25 bp, Homo sapien
gcgatgctgcctccgtattcatggg

SEQ ID NO: 5144230 - DNA, 25 bp, Homo sapien
gatcgcactggatcgccctgtatcc

SEQ ID NO: 5144231 - DNA, 25 bp, Homo sapien
aaaactggggctcttggtgacactg

SEQ ID NO: 5144232 - DNA, 25 bp, Homo sapien
ttggtgacactggatcgcactggat

SEQ ID NO: 5144233 - DNA, 25 bp, Homo sapien
gacactggatcgcactggatcgccc

SEQ ID NO: 5144234 - DNA, 25 bp, Homo sapien
ttagcttggtggcttagcagtgtga

SEQ ID NO: 5144235 - DNA, 25 bp, Homo sapien
tcctgtagtcctcctgcgataagct

SEQ ID NO: 5144236 - DNA, 25 bp, Homo sapien
tagtcctcctgcgataagctggatc

SEQ ID NO: 5144237 - DNA, 25 bp, Homo sapien
ttagcagtgtgaggttcctgtagtc

SEQ ID NO: 5144238 - DNA, 25 bp, Homo sapien
ccgaagtgacaagttctcaaaagcg

SEQ ID NO: 5144239 - DNA, 25 bp, Homo sapien
gcagtagcataattggagagtggtt

SEQ ID NO: 5144240 - DNA, 25 bp, Homo sapien
tatctgcatatcactcggaggacaa

SEQ ID NO: 5144241 - DNA, 25 bp, Homo sapien
ttttcaaagccgtaaagcagtagca

SEQ ID NO: 5144242 - DNA, 25 bp, Homo sapien
agcagctctgagcagataatgagtc

SEQ ID NO: 5144243 - DNA, 25 bp, Homo sapien
ctgaacagcctcaagtactgaccca

SEQ ID NO: 5144244 - DNA, 25 bp, Homo sapien
ataatgagtccagtgttgggcctga

SEQ ID NO: 5144245 - DNA, 25 bp, Homo sapien
cagcctcaagtactgacccacaaag

SEQ ID NO: 5144246 - DNA, 25 bp, Homo sapien
gaaagtcccctcgtgtcattctaaa

SEQ ID NO: 5144247 - DNA, 25 bp, Homo sapien
caccaacaatggagaagccgtgcca

SEQ ID NO: 5144248 - DNA, 25 bp, Homo sapien
tctaaaggagcccaactcttgttgg

SEQ ID NO: 5144249 - DNA, 25 bp, Homo sapien
gacgggaaggtaaccagctgtgaaa

SEQ ID NO: 5144250 - DNA, 25 bp, Homo sapien
aatgagcgtagccaatgctgtggtg

SEQ ID NO: 5144251 - DNA, 25 bp, Homo sapien
cacctggaccctttgtcactgtgat

SEQ ID NO: 5144252 - DNA, 25 bp, Homo sapien
tcgggacatagcctggataagcaag

SEQ ID NO: 5144253 - DNA, 25 bp, Homo sapien
gggtagacctagaatgagcgtagcc

SEQ ID NO: 5144254 - DNA, 25 bp, Homo sapien
tgtcacggtcccgtctttgccgtac

SEQ ID NO: 5144255 - DNA, 25 bp, Homo sapien
gagcagtctgtcacggtcccgtctt

SEQ ID NO: 5144256 - DNA, 25 bp, Homo sapien
gtctgtcacggtcccgtctttgccg

SEQ ID NO: 5144257 - DNA, 25 bp, Homo sapien
aaggctggagcagtctgtcacggtc

SEQ ID NO: 5144258 - DNA, 25 bp, Homo sapien
gagcagcctcgttagtgtctgcgtc

SEQ ID NO: 5144259 - DNA, 25 bp, Homo sapien
cgtggattgtccttgtggaacggct

SEQ ID NO: 5144260 - DNA, 25 bp, Homo sapien
gccctcctgcaaatcgtggattgtc

SEQ ID NO: 5144261 - DNA, 25 bp, Homo sapien
cagcctcgttagtgtctgcgtcttc

SEQ ID NO: 5144262 - DNA, 25 bp, Homo sapien
cctgtgcagggacgatacaaggtga

SEQ ID NO: 5144263 - DNA, 25 bp, Homo sapien
cagaaactgtgcgtgtgttccccga

SEQ ID NO: 5144264 - DNA, 25 bp, Homo sapien
caactatgggcagctatcagggaga

SEQ ID NO: 5144265 - DNA, 25 bp, Homo sapien
cgagcaattccggacaaggccatct

SEQ ID NO: 5144266 - DNA, 25 bp, Homo sapien
aaacacaggctgcagtggacacata

SEQ ID NO: 5144267 - DNA, 25 bp, Homo sapien
caggctgcagtggacacatacacat

SEQ ID NO: 5144268 - DNA, 25 bp, Homo sapien
agcaaacacaggctgcagtggacac

SEQ ID NO: 5144269 - DNA, 25 bp, Homo sapien
gagtgtggcgtgaagagagggggca

SEQ ID NO: 5144270 - DNA, 25 bp, Homo sapien
ggcagtaaggtcagctgtacactcg

SEQ ID NO: 5144271 - DNA, 25 bp, Homo sapien
tgtacactcgccagagagtaagtgc

SEQ ID NO: 5144272 - DNA, 25 bp, Homo sapien
gtaagtgccaacaactggcacaagc

SEQ ID NO: 5144273 - DNA, 25 bp, Homo sapien
taataaagttggtggatggaagagc

SEQ ID NO: 5144274 - DNA, 25 bp, Homo sapien
ctttgaaaggctaggaactgagaca

SEQ ID NO: 5144275 - DNA, 25 bp, Homo sapien
ccaaaactatcctttgaaaggctag

SEQ ID NO: 5144276 - DNA, 25 bp, Homo sapien
aactgagacaggaatctgggtcgac

SEQ ID NO: 5144277 - DNA, 25 bp, Homo sapien
gaactgagacaggaatctgggtcga

SEQ ID NO: 5144278 - DNA, 25 bp, Homo sapien
tagcctgtttcgccaaacctttata

SEQ ID NO: 5144279 - DNA, 25 bp, Homo sapien
cctgtttcgccaaacctttatagtg

SEQ ID NO: 5144280 - DNA, 25 bp, Homo sapien
tgtttcgccaaacctttatagtgtc

SEQ ID NO: 5144281 - DNA, 25 bp, Homo sapien
agcctgtttcgccaaacctttatag

SEQ ID NO: 5144282 - DNA, 25 bp, Homo sapien
tgtgaaagcccagtataagacagag

SEQ ID NO: 5144283 - DNA, 25 bp, Homo sapien
tatcagcagaacctggacggtcacc

SEQ ID NO: 5144284 - DNA, 25 bp, Homo sapien
aggcagggaggcacgaactatcagc

SEQ ID NO: 5144285 - DNA, 25 bp, Homo sapien
cgctgggtgcatgaagcctgaatga

SEQ ID NO: 5144286 - DNA, 25 bp, Homo sapien
tccaggtcccggaatctctgcctgc

SEQ ID NO: 5144287 - DNA, 25 bp, Homo sapien
caggtcccggaatctctgcctgcat

SEQ ID NO: 5144288 - DNA, 25 bp, Homo sapien
ccaggtcccggaatctctgcctgca

SEQ ID NO: 5144289 - DNA, 25 bp, Homo sapien
ctccaggtcccggaatctctgcctg

SEQ ID NO: 5144290 - DNA, 25 bp, Homo sapien
agacaatgtggaaattatggggatc

SEQ ID NO: 5144291 - DNA, 25 bp, Homo sapien
gtgattggctactttaatgaaatgc

SEQ ID NO: 5144292 - DNA, 25 bp, Homo sapien
ggaatattcagagtgatggctttta

SEQ ID NO: 5144293 - DNA, 25 bp, Homo sapien
ttttaatgcgttcatgctccagctc

SEQ ID NO: 5144294 - DNA, 25 bp, Homo sapien
atttattacacaaagtctgtagcgt

SEQ ID NO: 5144295 - DNA, 25 bp, Homo sapien
aaagtctgtagcgtggaatattcag

SEQ ID NO: 5144296 - DNA, 25 bp, Homo sapien
gctgctgcccctgacgatggagcaa

SEQ ID NO: 5144297 - DNA, 25 bp, Homo sapien
cccctgacgatggagcaaagggctg

SEQ ID NO: 5144298 - DNA, 25 bp, Homo sapien
agctgctgcccctgacgatggagca

SEQ ID NO: 5144299 - DNA, 25 bp, Homo sapien
ctgctgcccctgacgatggagcaaa

SEQ ID NO: 5144300 - DNA, 25 bp, Homo sapien
cttctccatgtctccgtttcgactg

SEQ ID NO: 5144301 - DNA, 25 bp, Homo sapien
ggttctgtacgcctcttgatgtctg

SEQ ID NO: 5144302 - DNA, 25 bp, Homo sapien
tgtctgcagattaaggtatgcctca

SEQ ID NO: 5144303 - DNA, 25 bp, Homo sapien
tctccgtttcgactgtgtgatcttg

SEQ ID NO: 5144304 - DNA, 25 bp, Homo sapien
taaccgtggcctgtggtctcttagg

SEQ ID NO: 5144305 - DNA, 25 bp, Homo sapien
caccgcgtggagtgtgtgtaaccgt

SEQ ID NO: 5144306 - DNA, 25 bp, Homo sapien
taaacaaggttgcactggcacgtcc

SEQ ID NO: 5144307 - DNA, 25 bp, Homo sapien
gatcacctgcatgccctacagatgg

SEQ ID NO: 5144308 - DNA, 25 bp, Homo sapien
tcagagatgagggagttctgtgtga

SEQ ID NO: 5144309 - DNA, 25 bp, Homo sapien
gagttttccagagagggtgtaggaa

SEQ ID NO: 5144310 - DNA, 25 bp, Homo sapien
gcttgcatgaatggtccataggagt

SEQ ID NO: 5144311 - DNA, 25 bp, Homo sapien
aatggtccataggagttttccagag

SEQ ID NO: 5144312 - DNA, 25 bp, Homo sapien
gccagacctcaggttgctatcagag

SEQ ID NO: 5144313 - DNA, 25 bp, Homo sapien
aggcactaagggcattaggcagcag

SEQ ID NO: 5144314 - DNA, 25 bp, Homo sapien
cagttaaacctcaacagccacagag

SEQ ID NO: 5144315 - DNA, 25 bp, Homo sapien
catttgttgacagttaaacctcaac

SEQ ID NO: 5144316 - DNA, 25 bp, Homo sapien
aaaagaagtgaaatccttgccgcct

SEQ ID NO: 5144317 - DNA, 25 bp, Homo sapien
cctctgcagcaatctgagggctggc

SEQ ID NO: 5144318 - DNA, 25 bp, Homo sapien
cttcaacatcgtcccccagggttgt

SEQ ID NO: 5144319 - DNA, 25 bp, Homo sapien
tgtcatttggctctactcgcccagg

SEQ ID NO: 5144320 - DNA, 25 bp, Homo sapien
gtcacagccaccacttcttgaaccg

SEQ ID NO: 5144321 - DNA, 25 bp, Homo sapien
gccttcttgcatgaagtctctcgtc

SEQ ID NO: 5144322 - DNA, 25 bp, Homo sapien
tgcatgaagtctctcgtcacagcca

SEQ ID NO: 5144323 - DNA, 25 bp, Homo sapien
agccaccacttcttgaaccgctgcc

SEQ ID NO: 5144324 - DNA, 25 bp, Homo sapien
catatagggcaggtgcccataataa

SEQ ID NO: 5144325 - DNA, 25 bp, Homo sapien
tgcctcgcgctgactggtgggatca

SEQ ID NO: 5144326 - DNA, 25 bp, Homo sapien
ctggtgggatcagcttatatggata

SEQ ID NO: 5144327 - DNA, 25 bp, Homo sapien
tatggatattcccatatagggcagg

SEQ ID NO: 5144328 - DNA, 25 bp, Homo sapien
cagtgttcttgcaccaaagtgagct

SEQ ID NO: 5144329 - DNA, 25 bp, Homo sapien
tacgggttccgcataagcagtcagt

SEQ ID NO: 5144330 - DNA, 25 bp, Homo sapien
tcccaaagggaagaggtgatgcata

SEQ ID NO: 5144331 - DNA, 25 bp, Homo sapien
gtacgttgggctgcagagacttgct

SEQ ID NO: 5144332 - DNA, 25 bp, Homo sapien
gctggtcctgtttggatggattcca

SEQ ID NO: 5144333 - DNA, 25 bp, Homo sapien
aaagacaggtcatggcggagagcct

SEQ ID NO: 5144334 - DNA, 25 bp, Homo sapien
gagcctttgacctgagagggctcaa

SEQ ID NO: 5144335 - DNA, 25 bp, Homo sapien
gcagagcgaggcctcttcacaaatg

SEQ ID NO: 5144336 - DNA, 25 bp, Homo sapien
taaagtacaaacagtgcagttgctc

SEQ ID NO: 5144337 - DNA, 25 bp, Homo sapien
aagactggtgaaacttggagcgcaa

SEQ ID NO: 5144338 - DNA, 25 bp, Homo sapien
tgggcagccagtaacgagcagtaaa

SEQ ID NO: 5144339 - DNA, 25 bp, Homo sapien
cctttggaaagatggccttcgatgg

SEQ ID NO: 5144340 - DNA, 25 bp, Homo sapien
ctgggggcatttatcctcattttgt

SEQ ID NO: 5144341 - DNA, 25 bp, Homo sapien
tgggggcatttatcctcattttgtt

SEQ ID NO: 5144342 - DNA, 25 bp, Homo sapien
tgggaacttcagaatccctcccctg

SEQ ID NO: 5144343 - DNA, 25 bp, Homo sapien
gcgcttttcctttcgcatgtccggg

SEQ ID NO: 5144344 - DNA, 25 bp, Homo sapien
taactcattcatatctgggtgcaca

SEQ ID NO: 5144345 - DNA, 25 bp, Homo sapien
gcatgtccgggtctcgggctttcct

SEQ ID NO: 5144346 - DNA, 25 bp, Homo sapien
cagccacctggagcttgatgcatcc

SEQ ID NO: 5144347 - DNA, 25 bp, Homo sapien
cttgagggagggacacagtcagaaa

SEQ ID NO: 5144348 - DNA, 25 bp, Homo sapien
agctctcgtgtctgagctgcttcct

SEQ ID NO: 5144349 - DNA, 25 bp, Homo sapien
ctggcccacagctctcgtgtctgag

SEQ ID NO: 5144350 - DNA, 25 bp, Homo sapien
gaaatcgagagccaaactctgctct

SEQ ID NO: 5144351 - DNA, 25 bp, Homo sapien
ggaaatcgagagccaaactctgctc

SEQ ID NO: 5144352 - DNA, 25 bp, Homo sapien
atgccatccaggtgccatccaccat

SEQ ID NO: 5144353 - DNA, 25 bp, Homo sapien
tgatgccatccaggtgccatccacc

SEQ ID NO: 5144354 - DNA, 25 bp, Homo sapien
tctgatgccatccaggtgccatcca

SEQ ID NO: 5144355 - DNA, 25 bp, Homo sapien
cttctctgatgccatccaggtgcca

SEQ ID NO: 5144356 - DNA, 25 bp, Homo sapien
gcttcttgtaatcccgtttcattaa

SEQ ID NO: 5144357 - DNA, 25 bp, Homo sapien
tccatccacatgtgtcactatcaga

SEQ ID NO: 5144358 - DNA, 25 bp, Homo sapien
gcctgcttcttgtaatcccgtttca

SEQ ID NO: 5144359 - DNA, 25 bp, Homo sapien
tgtgtcactatcagatgtgaagacc

SEQ ID NO: 5144360 - DNA, 25 bp, Homo sapien
tcctgcctatatgcctcattccaat

SEQ ID NO: 5144361 - DNA, 25 bp, Homo sapien
tctcttctcctgcctatatgcctca

SEQ ID NO: 5144362 - DNA, 25 bp, Homo sapien
tctcctgcctatatgcctcattcca

SEQ ID NO: 5144363 - DNA, 25 bp, Homo sapien
cttctcctgcctatatgcctcattc

SEQ ID NO: 5144364 - DNA, 25 bp, Homo sapien
gtgagtcattcaggaagtcagcagc

SEQ ID NO: 5144365 - DNA, 25 bp, Homo sapien
aacagtgagtcattcaggaagtcag

SEQ ID NO: 5144366 - DNA, 25 bp, Homo sapien
ctaacagtgagtcattcaggaagtc

SEQ ID NO: 5144367 - DNA, 25 bp, Homo sapien
cagtgagtcattcaggaagtcagca

SEQ ID NO: 5144368 - DNA, 25 bp, Homo sapien
ccatgtctgagggtcgcgtgctgct

SEQ ID NO: 5144369 - DNA, 25 bp, Homo sapien
tctgaaactgctctgaattactgaa

SEQ ID NO: 5144370 - DNA, 25 bp, Homo sapien
agaaaggagtactgaatgggtgcaa

SEQ ID NO: 5144371 - DNA, 25 bp, Homo sapien
gggttgattgagatattcataccat

SEQ ID NO: 5144372 - DNA, 25 bp, Homo sapien
attgaggaaccctgcccatggcggt

SEQ ID NO: 5144373 - DNA, 25 bp, Homo sapien
gattgaggaaccctgcccatggcgg

SEQ ID NO: 5144374 - DNA, 25 bp, Homo sapien
ctggttgtgctcaagaacttctcat

SEQ ID NO: 5144375 - DNA, 25 bp, Homo sapien
cctggttgtgctcaagaacttctca

SEQ ID NO: 5144376 - DNA, 25 bp, Homo sapien
tggttgtgctcaagaacttctcatg

SEQ ID NO: 5144377 - DNA, 25 bp, Homo sapien
aactactgccttccaactggtctcc

SEQ ID NO: 5144378 - DNA, 25 bp, Homo sapien
gttcaattccccacaactactgcct

SEQ ID NO: 5144379 - DNA, 25 bp, Homo sapien
ttgttcaattccccacaactactgc

SEQ ID NO: 5144380 - DNA, 25 bp, Homo sapien
tcttgttcaattccccacaactact

SEQ ID NO: 5144381 - DNA, 25 bp, Homo sapien
ctaatgatgggaccgttcagctcac

SEQ ID NO: 5144382 - DNA, 25 bp, Homo sapien
cccctagaaggagtgtcgctaatga

SEQ ID NO: 5144383 - DNA, 25 bp, Homo sapien
ccgaatgtgcccctagaaggagtgt

SEQ ID NO: 5144384 - DNA, 25 bp, Homo sapien
cacccagcctcgagttgtggctagc

SEQ ID NO: 5144385 - DNA, 25 bp, Homo sapien
ctggggcgccccccgtcgtcgccag

SEQ ID NO: 5144386 - DNA, 25 bp, Homo sapien
ccggtacgggcgccgggatagcgcg

SEQ ID NO: 5144387 - DNA, 25 bp, Homo sapien
cgtcgccaggctccgcgcccgggtc

SEQ ID NO: 5144388 - DNA, 25 bp, Homo sapien
acgggcgccgggatagcgcggggct

SEQ ID NO: 5144389 - DNA, 25 bp, Homo sapien
gcccaggcgccgctctttgtctgcg

SEQ ID NO: 5144390 - DNA, 25 bp, Homo sapien
ggcggacgctgccggcccgggcgga

SEQ ID NO: 5144391 - DNA, 25 bp, Homo sapien
gctctttgtctgcgccgctccctcc

SEQ ID NO: 5144392 - DNA, 25 bp, Homo sapien
gcccgcccaggcgccgctctttgtc

SEQ ID NO: 5144393 - DNA, 25 bp, Homo sapien
gaggacctcctttatgcaatgtgac

SEQ ID NO: 5144394 - DNA, 25 bp, Homo sapien
gaaactttggttcattcaggtggct

SEQ ID NO: 5144395 - DNA, 25 bp, Homo sapien
aaaagctcccttcgccgaagcgagg

SEQ ID NO: 5144396 - DNA, 25 bp, Homo sapien
aaaaaaccgagagagccgagcgatt

SEQ ID NO: 5144397 - DNA, 25 bp, Homo sapien
ttttccaaaagcactcggtgattaa

SEQ ID NO: 5144398 - DNA, 25 bp, Homo sapien
aaaagcactcggtgattaaatcgcc

SEQ ID NO: 5144399 - DNA, 25 bp, Homo sapien
atttttccaaaagcactcggtgatt

SEQ ID NO: 5144400 - DNA, 25 bp, Homo sapien
ttccaaaagcactcggtgattaaat

SEQ ID NO: 5144401 - DNA, 25 bp, Homo sapien
caagcccgacggttaacagggtcag

SEQ ID NO: 5144402 - DNA, 25 bp, Homo sapien
acagagggggttatgcagcagccaa

SEQ ID NO: 5144403 - DNA, 25 bp, Homo sapien
ggttatgcagcagccaactcttcct

SEQ ID NO: 5144404 - DNA, 25 bp, Homo sapien
tcttcctgatggcaatttgtgaccc

SEQ ID NO: 5144405 - DNA, 25 bp, Homo sapien
aagcatgaaaactgagcacagccac

SEQ ID NO: 5144406 - DNA, 25 bp, Homo sapien
cacaaagcatgaaaactgagcacag

SEQ ID NO: 5144407 - DNA, 25 bp, Homo sapien
caaagcatgaaaactgagcacagcc

SEQ ID NO: 5144408 - DNA, 25 bp, Homo sapien
aaacacaaagcatgaaaactgagca

SEQ ID NO: 5144409 - DNA, 25 bp, Homo sapien
cctcacaccgctcaacctcagtcaa

SEQ ID NO: 5144410 - DNA, 25 bp, Homo sapien
acaccgctcaacctcagtcaactca

SEQ ID NO: 5144411 - DNA, 25 bp, Homo sapien
gggacaagagagactgacattgctc

SEQ ID NO: 5144412 - DNA, 25 bp, Homo sapien
ctaaacaggaataagctttctgaac

SEQ ID NO: 5144413 - DNA, 25 bp, Homo sapien
atggtgagggctagggactcctcct

SEQ ID NO: 5144414 - DNA, 25 bp, Homo sapien
tggtgagggctagggactcctcctc

SEQ ID NO: 5144415 - DNA, 25 bp, Homo sapien
gaatggtgagggctagggactcctc

SEQ ID NO: 5144416 - DNA, 25 bp, Homo sapien
aatggtgagggctagggactcctcc

SEQ ID NO: 5144417 - DNA, 25 bp, Homo sapien
tactgcatgactggaaagagttctg

SEQ ID NO: 5144418 - DNA, 25 bp, Homo sapien
tcggtcatcagaggacgcagtgaca

SEQ ID NO: 5144419 - DNA, 25 bp, Homo sapien
tctgttaggcagcaaaattgagcta

SEQ ID NO: 5144420 - DNA, 25 bp, Homo sapien
ggcatgttttgtcgttactgcatga

SEQ ID NO: 5144421 - DNA, 25 bp, Homo sapien
taaacccctaagttcccaatgcaca

SEQ ID NO: 5144422 - DNA, 25 bp, Homo sapien
caacacggctgagaatcagaaagtc

SEQ ID NO: 5144423 - DNA, 25 bp, Homo sapien
ccattttgccacaacacggctgaga

SEQ ID NO: 5144424 - DNA, 25 bp, Homo sapien
agtcaaactttttcacacaagagat

SEQ ID NO: 5144425 - DNA, 25 bp, Homo sapien
tgagcctcgaagcagagcaggctgc

SEQ ID NO: 5144426 - DNA, 25 bp, Homo sapien
tggccggcgataaacatgtggagct

SEQ ID NO: 5144427 - DNA, 25 bp, Homo sapien
atgtggagctcagacagccctgcag

SEQ ID NO: 5144428 - DNA, 25 bp, Homo sapien
ataattaagaatgtgggatgtctgc

SEQ ID NO: 5144429 - DNA, 25 bp, Homo sapien
tcaggaatctaggtctccataaagc

SEQ ID NO: 5144430 - DNA, 25 bp, Homo sapien
aggaatctaggtctccataaagcag

SEQ ID NO: 5144431 - DNA, 25 bp, Homo sapien
aatctaggtctccataaagcagctg

SEQ ID NO: 5144432 - DNA, 25 bp, Homo sapien
ttgagatctttttacctggtactgc

SEQ ID NO: 5144433 - DNA, 25 bp, Homo sapien
ccggcacgaaccctgaaaagctagt

SEQ ID NO: 5144434 - DNA, 25 bp, Homo sapien
tcaaaacttgtgaggccggcacgaa

SEQ ID NO: 5144435 - DNA, 25 bp, Homo sapien
tcatgaactcattgggatggtgcac

SEQ ID NO: 5144436 - DNA, 25 bp, Homo sapien
cttaggacatgcaactggtgacgga

SEQ ID NO: 5144437 - DNA, 25 bp, Homo sapien
gagtcatgattcgtcagacccaggg

SEQ ID NO: 5144438 - DNA, 25 bp, Homo sapien
agggctttaaatagggcgcagccag

SEQ ID NO: 5144439 - DNA, 25 bp, Homo sapien
gaatgtaaaataggcacgcatcagc

SEQ ID NO: 5144440 - DNA, 25 bp, Homo sapien
ttgcttcctgagaagcaagaacggg

SEQ ID NO: 5144441 - DNA, 25 bp, Homo sapien
gaggccaaagattactccgagggat

SEQ ID NO: 5144442 - DNA, 25 bp, Homo sapien
tggatgcctaacttctactgtggag

SEQ ID NO: 5144443 - DNA, 25 bp, Homo sapien
agcacaagtcagacctcatggcggg

SEQ ID NO: 5144444 - DNA, 25 bp, Homo sapien
caccaagggtaaagtagccagcaca

SEQ ID NO: 5144445 - DNA, 25 bp, Homo sapien
atgagcaaaggtgcatggactgatg

SEQ ID NO: 5144446 - DNA, 25 bp, Homo sapien
atggaggccggcacgtgtaccagac

SEQ ID NO: 5144447 - DNA, 25 bp, Homo sapien
ggaggcattccagggatgaaaaacc

SEQ ID NO: 5144448 - DNA, 25 bp, Homo sapien
tggtgatggccctgagctgagcatg

SEQ ID NO: 5144449 - DNA, 25 bp, Homo sapien
caaaatgtcatagaggtcccctgcc

SEQ ID NO: 5144450 - DNA, 25 bp, Homo sapien
tgctcaccagctaaccctaaaagaa

SEQ ID NO: 5144451 - DNA, 25 bp, Homo sapien
gggacaacccaaggctggcagcatg

SEQ ID NO: 5144452 - DNA, 25 bp, Homo sapien
taggctagcagatggcatggcacag

SEQ ID NO: 5144453 - DNA, 25 bp, Homo sapien
aattttttcctgtgtccacagacat

SEQ ID NO: 5144454 - DNA, 25 bp, Homo sapien
atgtctccctgtaggacaacacaac

SEQ ID NO: 5144455 - DNA, 25 bp, Homo sapien
ccctgtaggacaacacaacaatttt

SEQ ID NO: 5144456 - DNA, 25 bp, Homo sapien
aggacaacacaacaattttttcctg

SEQ ID NO: 5144457 - DNA, 25 bp, Homo sapien
tccctttactgttcacagcgggaaa

SEQ ID NO: 5144458 - DNA, 25 bp, Homo sapien
tctattggtgctattggagattggg

SEQ ID NO: 5144459 - DNA, 25 bp, Homo sapien
gctattggagattgggcctttccct

SEQ ID NO: 5144460 - DNA, 25 bp, Homo sapien
ctttccctttactgttcacagcggg

SEQ ID NO: 5144461 - DNA, 25 bp, Homo sapien
taggagtcctgcgcccaacctcctg

SEQ ID NO: 5144462 - DNA, 25 bp, Homo sapien
tgggtgtgatcaggttctcccaagc

SEQ ID NO: 5144463 - DNA, 25 bp, Homo sapien
cattttgggtgtgatcaggttctcc

SEQ ID NO: 5144464 - DNA, 25 bp, Homo sapien
gtgatcaggttctcccaagcttcgg

SEQ ID NO: 5144465 - DNA, 25 bp, Homo sapien
gcaggtcccctgcttcgagtctgga

SEQ ID NO: 5144466 - DNA, 25 bp, Homo sapien
ccattgagagccaccaaggccaggg

SEQ ID NO: 5144467 - DNA, 25 bp, Homo sapien
cagctgaagtttcgcaggtcccctg

SEQ ID NO: 5144468 - DNA, 25 bp, Homo sapien
cctgcttcgagtctggacggtgctg

SEQ ID NO: 5144469 - DNA, 25 bp, Homo sapien
cagtgggagtaacagcagctgccca

SEQ ID NO: 5144470 - DNA, 25 bp, Homo sapien
gagcttccttcagtgtgaggacaac

SEQ ID NO: 5144471 - DNA, 25 bp, Homo sapien
tcagcccaagcctacagatatgacc

SEQ ID NO: 5144472 - DNA, 25 bp, Homo sapien
tgaggacaaccaacccagaaaagag

SEQ ID NO: 5144473 - DNA, 25 bp, Homo sapien
ggagcactcccctagcagtgtgcat

SEQ ID NO: 5144474 - DNA, 25 bp, Homo sapien
caggttctaacacgaggagcactcc

SEQ ID NO: 5144475 - DNA, 25 bp, Homo sapien
tgggagcggacaacctctaagcagt

SEQ ID NO: 5144476 - DNA, 25 bp, Homo sapien
cagagccccaaagtttcctgagtgg

SEQ ID NO: 5144477 - DNA, 25 bp, Homo sapien
gagcagctgcgtcatttttacatgg

SEQ ID NO: 5144478 - DNA, 25 bp, Homo sapien
gctctacgaagaatgtataccactg

SEQ ID NO: 5144479 - DNA, 25 bp, Homo sapien
ttttacatggatcaaattatagaca

SEQ ID NO: 5144480 - DNA, 25 bp, Homo sapien
aattatagacaaaactcacaagctc

SEQ ID NO: 5144481 - DNA, 25 bp, Homo sapien
tctgttaacgttgtgcactggtttt

SEQ ID NO: 5144482 - DNA, 25 bp, Homo sapien
tgttaacgttgtgcactggttttgt

SEQ ID NO: 5144483 - DNA, 25 bp, Homo sapien
tcttatctgttaacgttgtgcactg

SEQ ID NO: 5144484 - DNA, 25 bp, Homo sapien
tatctgttaacgttgtgcactggtt

SEQ ID NO: 5144485 - DNA, 25 bp, Homo sapien
cccctgcaagcagtcgtggccgatt

SEQ ID NO: 5144486 - DNA, 25 bp, Homo sapien
tcagcatctgagagggaagtccagt

SEQ ID NO: 5144487 - DNA, 25 bp, Homo sapien
tgactaaggcaactccagaggagca

SEQ ID NO: 5144488 - DNA, 25 bp, Homo sapien
tccagtgatgaggtccctgactaag

SEQ ID NO: 5144489 - DNA, 25 bp, Homo sapien
gagcactctgtggacttcaagtgag

SEQ ID NO: 5144490 - DNA, 25 bp, Homo sapien
tcttggaggtctgttgcaccagcca

SEQ ID NO: 5144491 - DNA, 25 bp, Homo sapien
tcaagacttctgagacgaacactcc

SEQ ID NO: 5144492 - DNA, 25 bp, Homo sapien
cccattggaaaggtggccagtctga

SEQ ID NO: 5144493 - DNA, 25 bp, Homo sapien
ctttggcacacagttgagaggtgac

SEQ ID NO: 5144494 - DNA, 25 bp, Homo sapien
tgttttcagctaattacacctctga

SEQ ID NO: 5144495 - DNA, 25 bp, Homo sapien
tgactggcaaaacgcagaactcttc

SEQ ID NO: 5144496 - DNA, 25 bp, Homo sapien
tcttcaaaacgatgatgttttcagc

SEQ ID NO: 5144497 - DNA, 25 bp, Homo sapien
ggagctagctctggaaatcacaaca

SEQ ID NO: 5144498 - DNA, 25 bp, Homo sapien
tcaggtatgcagtgtgagtgccaac

SEQ ID NO: 5144499 - DNA, 25 bp, Homo sapien
taacacgacgagaacactaagacac

SEQ ID NO: 5144500 - DNA, 25 bp, Homo sapien
ttggaacaggaacaccccgatggtg

SEQ ID NO: 5144501 - DNA, 25 bp, Homo sapien
gaatgacctgcagtctccaggaacc

SEQ ID NO: 5144502 - DNA, 25 bp, Homo sapien
tatggctgaccgagctgttgctttc

SEQ ID NO: 5144503 - DNA, 25 bp, Homo sapien
acttcaaggaccaccgaccaaatgg

SEQ ID NO: 5144504 - DNA, 25 bp, Homo sapien
tgacatgccgaagtgtatggctgac

SEQ ID NO: 5144505 - DNA, 25 bp, Homo sapien
cactcagccaacaaatgtgggcagc

SEQ ID NO: 5144506 - DNA, 25 bp, Homo sapien
tacttaacgactgggaaaatgacca

SEQ ID NO: 5144507 - DNA, 25 bp, Homo sapien
gccgccgagacgtggtacttaacga

SEQ ID NO: 5144508 - DNA, 25 bp, Homo sapien
gagatgggctcctgatcttactgca

SEQ ID NO: 5144509 - DNA, 25 bp, Homo sapien
gaagaaattattagcgttcccatat

SEQ ID NO: 5144510 - DNA, 25 bp, Homo sapien
ttcctacttctccattatattttgt

SEQ ID NO: 5144511 - DNA, 25 bp, Homo sapien
tctgctatgttccaaagcgctgcag

SEQ ID NO: 5144512 - DNA, 25 bp, Homo sapien
tagcgttcccatatctgctatgttc

SEQ ID NO: 5144513 - DNA, 25 bp, Homo sapien
tctcagtggctataactcaagagtc

SEQ ID NO: 5144514 - DNA, 25 bp, Homo sapien
gagcacttagagagatctcagtggc

SEQ ID NO: 5144515 - DNA, 25 bp, Homo sapien
gtcaagagtcaagagcacttagaga

SEQ ID NO: 5144516 - DNA, 25 bp, Homo sapien
gatctcagtggctataactcaagag

SEQ ID NO: 5144517 - DNA, 25 bp, Homo sapien
ccacctgcagtctttgctgtgagta

SEQ ID NO: 5144518 - DNA, 25 bp, Homo sapien
gccctctcctgccacgggctgggtc

SEQ ID NO: 5144519 - DNA, 25 bp, Homo sapien
gggtcccgtccccacctctgcattc

SEQ ID NO: 5144520 - DNA, 25 bp, Homo sapien
gctgtgagtacttcacaccaattcc

SEQ ID NO: 5144521 - DNA, 25 bp, Homo sapien
atggcaagcagtaagaaccccccca

SEQ ID NO: 5144522 - DNA, 25 bp, Homo sapien
caatggcaagcagtaagaacccccc

SEQ ID NO: 5144523 - DNA, 25 bp, Homo sapien
agcaatggcaagcagtaagaacccc

SEQ ID NO: 5144524 - DNA, 25 bp, Homo sapien
ctaagcaatggcaagcagtaagaac

SEQ ID NO: 5144525 - DNA, 25 bp, Homo sapien
tggtctccaactcgacttcataatc

SEQ ID NO: 5144526 - DNA, 25 bp, Homo sapien
tacattagtatgataagcatgttac

SEQ ID NO: 5144527 - DNA, 25 bp, Homo sapien
caattaatgaaccactacccataca

SEQ ID NO: 5144528 - DNA, 25 bp, Homo sapien
gaaccactacccatacattaactaa

SEQ ID NO: 5144529 - DNA, 25 bp, Homo sapien
cattggctggctggctcttgttcca

SEQ ID NO: 5144530 - DNA, 25 bp, Homo sapien
ggaggccagttccgctgcacacctg

SEQ ID NO: 5144531 - DNA, 25 bp, Homo sapien
tccttccctgatgtaccctgcgtgt

SEQ ID NO: 5144532 - DNA, 25 bp, Homo sapien
taccctgcgtgtcccaccaggcccc

SEQ ID NO: 5144533 - DNA, 25 bp, Homo sapien
agtcaatcgacgtccggctcgctca

SEQ ID NO: 5144534 - DNA, 25 bp, Homo sapien
ttctgaagaccagtcaatcgacgtc

SEQ ID NO: 5144535 - DNA, 25 bp, Homo sapien
gaagaccagtcaatcgacgtccggc

SEQ ID NO: 5144536 - DNA, 25 bp, Homo sapien
ctgcttctgaagaccagtcaatcga

SEQ ID NO: 5144537 - DNA, 25 bp, Homo sapien
cttcaggttcttcacgagggagccc

SEQ ID NO: 5144538 - DNA, 25 bp, Homo sapien
gctgttcttccgctccacgtagttg

SEQ ID NO: 5144539 - DNA, 25 bp, Homo sapien
gccaccacgtcttggagtcgtccag

SEQ ID NO: 5144540 - DNA, 25 bp, Homo sapien
cacgtagttggacggtacatagccc

SEQ ID NO: 5144541 - DNA, 25 bp, Homo sapien
ggcttcctctctcgagggtgaaaca

SEQ ID NO: 5144542 - DNA, 25 bp, Homo sapien
gaacagtgtcccttgaaatgcacaa

SEQ ID NO: 5144543 - DNA, 25 bp, Homo sapien
ctagaaagacgaacagtgtcccttg

SEQ ID NO: 5144544 - DNA, 25 bp, Homo sapien
cctctctcgagggtgaaacactcac

SEQ ID NO: 5144545 - DNA, 25 bp, Homo sapien
ctaaccacgctaggcctaggtgtgg

SEQ ID NO: 5144546 - DNA, 25 bp, Homo sapien
tgggttggatcagaggcaggagttc

SEQ ID NO: 5144547 - DNA, 25 bp, Homo sapien
gggctgatcatgcaagtttctaacc

SEQ ID NO: 5144548 - DNA, 25 bp, Homo sapien
agtttctaaccacgctaggcctagg

SEQ ID NO: 5144549 - DNA, 25 bp, Homo sapien
tgagctttccacgtttcttcatccc

SEQ ID NO: 5144550 - DNA, 25 bp, Homo sapien
ggcatccacggctctctatggacca

SEQ ID NO: 5144551 - DNA, 25 bp, Homo sapien
gccgccggcatccacggctctctat

SEQ ID NO: 5144552 - DNA, 25 bp, Homo sapien
atctccattacagcgccgccggcat

SEQ ID NO: 5144553 - DNA, 25 bp, Homo sapien
agcatgtctctttcggtcccgcagg

SEQ ID NO: 5144554 - DNA, 25 bp, Homo sapien
ggaagtacccgtggcaaggaagaca

SEQ ID NO: 5144555 - DNA, 25 bp, Homo sapien
acacggaggcgctcaggtgaggaca

SEQ ID NO: 5144556 - DNA, 25 bp, Homo sapien
tacaccacggctgtgagcagaagga

SEQ ID NO: 5144557 - DNA, 25 bp, Homo sapien
tcacagcagcatgctttggataaat

SEQ ID NO: 5144558 - DNA, 25 bp, Homo sapien
cattttggttggaggtgtcacagca

SEQ ID NO: 5144559 - DNA, 25 bp, Homo sapien
gtcacagcagcatgctttggataaa

SEQ ID NO: 5144560 - DNA, 25 bp, Homo sapien
ttttgagcattttggttggaggtgt

SEQ ID NO: 5144561 - DNA, 25 bp, Homo sapien
agaacaagcagggattcatgcatgt

SEQ ID NO: 5144562 - DNA, 25 bp, Homo sapien
ctgcagaacaagcagggattcatgc

SEQ ID NO: 5144563 - DNA, 25 bp, Homo sapien
gcagaacaagcagggattcatgcat

SEQ ID NO: 5144564 - DNA, 25 bp, Homo sapien
tgcagaacaagcagggattcatgca

SEQ ID NO: 5144565 - DNA, 25 bp, Homo sapien
ctggagctgtgaccccgccaggtgg

SEQ ID NO: 5144566 - DNA, 25 bp, Homo sapien
ggacatctcaaagggacggtttctg

SEQ ID NO: 5144567 - DNA, 25 bp, Homo sapien
tgaccccgccaggtggcagccggga

SEQ ID NO: 5144568 - DNA, 25 bp, Homo sapien
gcagccgggacatctcaaagggacg

SEQ ID NO: 5144569 - DNA, 25 bp, Homo sapien
agaaaaatacggttgctggcagctg

SEQ ID NO: 5144570 - DNA, 25 bp, Homo sapien
gagaaaaatacggttgctggcagct

SEQ ID NO: 5144571 - DNA, 25 bp, Homo sapien
tgagaaaaatacggttgctggcagc

SEQ ID NO: 5144572 - DNA, 25 bp, Homo sapien
gaggactcgctgtccctaatgagga

SEQ ID NO: 5144573 - DNA, 25 bp, Homo sapien
gccacataggcgaacttgacgaagg

SEQ ID NO: 5144574 - DNA, 25 bp, Homo sapien
gacgagggcccggtgtagcttatct

SEQ ID NO: 5144575 - DNA, 25 bp, Homo sapien
tgcacttctccatgacggtgacgcg

SEQ ID NO: 5144576 - DNA, 25 bp, Homo sapien
gcgcaaggcgcatttactgcctgca

SEQ ID NO: 5144577 - DNA, 25 bp, Homo sapien
cgcgcaaggcgcatttactgcctgc

SEQ ID NO: 5144578 - DNA, 25 bp, Homo sapien
ggagctgtgtctaaatccatccaca

SEQ ID NO: 5144579 - DNA, 25 bp, Homo sapien
acagcagtggaaaattccggtcgca

SEQ ID NO: 5144580 - DNA, 25 bp, Homo sapien
tgcaggcagtagctagaaattttac

SEQ ID NO: 5144581 - DNA, 25 bp, Homo sapien
cctggaggtagtccacgattctgaa

SEQ ID NO: 5144582 - DNA, 25 bp, Homo sapien
tccccgtgctcgctggtgaagatgg

SEQ ID NO: 5144583 - DNA, 25 bp, Homo sapien
cattgtccacgagctgcaccttgaa

SEQ ID NO: 5144584 - DNA, 25 bp, Homo sapien
tcgtccatggtgtggaagcgccgct

SEQ ID NO: 5144585 - DNA, 25 bp, Homo sapien
tagtgttccaccagctcgtccatgg

SEQ ID NO: 5144586 - DNA, 25 bp, Homo sapien
agagagactcgcagagaagccgtcg

SEQ ID NO: 5144587 - DNA, 25 bp, Homo sapien
ccaagcgacctgaacataaagagag

SEQ ID NO: 5144588 - DNA, 25 bp, Homo sapien
cctggatggcaaatgggagacgaac

SEQ ID NO: 5144589 - DNA, 25 bp, Homo sapien
tggcaaatgggagacgaaccgacca

SEQ ID NO: 5144590 - DNA, 25 bp, Homo sapien
aggtgccctgcgtctttttaaagag

SEQ ID NO: 5144591 - DNA, 25 bp, Homo sapien
gagttgaatgcacgagcgccacttc

SEQ ID NO: 5144592 - DNA, 25 bp, Homo sapien
gtggccttaggctcgctcctgcgct

SEQ ID NO: 5144593 - DNA, 25 bp, Homo sapien
gcgccacttccgatggaaaaggaat

SEQ ID NO: 5144594 - DNA, 25 bp, Homo sapien
aagggcacaggacatgggcgagggc

SEQ ID NO: 5144595 - DNA, 25 bp, Homo sapien
gtaagggcacaggacatgggcgagg

SEQ ID NO: 5144596 - DNA, 25 bp, Homo sapien
taagggcacaggacatgggcgaggg

SEQ ID NO: 5144597 - DNA, 25 bp, Homo sapien
agggcacaggacatgggcgagggct

SEQ ID NO: 5144598 - DNA, 25 bp, Homo sapien
tgagattcaaacaagccgaagggca

SEQ ID NO: 5144599 - DNA, 25 bp, Homo sapien
gagtcaccggttccctcttttgcag

SEQ ID NO: 5144600 - DNA, 25 bp, Homo sapien
tatcagcaaacgtatcggctccctg

SEQ ID NO: 5144601 - DNA, 25 bp, Homo sapien
gtggttccagtattgctatcagcaa

SEQ ID NO: 5144602 - DNA, 25 bp, Homo sapien
tcatctgtattagtgtcaacaaacg

SEQ ID NO: 5144603 - DNA, 25 bp, Homo sapien
gtcaacaaacggctacagatacata

SEQ ID NO: 5144604 - DNA, 25 bp, Homo sapien
gctacagatacatatttctttgaga

SEQ ID NO: 5144605 - DNA, 25 bp, Homo sapien
agctgttttccttaatcatctgtat

SEQ ID NO: 5144606 - DNA, 25 bp, Homo sapien
gcaagtttaggggatctcaagaccc

SEQ ID NO: 5144607 - DNA, 25 bp, Homo sapien
tctgtgtgtctcttactaccaatca

SEQ ID NO: 5144608 - DNA, 25 bp, Homo sapien
tctcaagacgttatatttaaactat

SEQ ID NO: 5144609 - DNA, 25 bp, Homo sapien
gaccccttcttcaatcgtaggaatg

SEQ ID NO: 5144610 - DNA, 25 bp, Homo sapien
gccactataccctgccagaaaatta

SEQ ID NO: 5144611 - DNA, 25 bp, Homo sapien
cctaccaccagtataaccaatatga

SEQ ID NO: 5144612 - DNA, 25 bp, Homo sapien
ctaccaccagtataaccaatatgaa

SEQ ID NO: 5144613 - DNA, 25 bp, Homo sapien
agccactataccctgccagaaaatt

SEQ ID NO: 5144614 - DNA, 25 bp, Homo sapien
ctggccttggatccgaaagtcgctt

SEQ ID NO: 5144615 - DNA, 25 bp, Homo sapien
ccgaaagtcgctttcatgtgctccc

SEQ ID NO: 5144616 - DNA, 25 bp, Homo sapien
aagtcgctttcatgtgctccctcca

SEQ ID NO: 5144617 - DNA, 25 bp, Homo sapien
ctggctggccttggatccgaaagtc

SEQ ID NO: 5144618 - DNA, 25 bp, Homo sapien
ttgtgtcattgcacttagctttggc

SEQ ID NO: 5144619 - DNA, 25 bp, Homo sapien
tgtgtcattgcacttagctttggct

SEQ ID NO: 5144620 - DNA, 25 bp, Homo sapien
gtcacttttactgtctgaactaaag

SEQ ID NO: 5144621 - DNA, 25 bp, Homo sapien
ttactgtctgaactaaagtgaattc

SEQ ID NO: 5144622 - DNA, 25 bp, Homo sapien
cttttactgtctgaactaaagtgaa

SEQ ID NO: 5144623 - DNA, 25 bp, Homo sapien
gaggtcacttttactgtctgaacta

SEQ ID NO: 5144624 - DNA, 25 bp, Homo sapien
cctggagaggttctgcatcatggac

SEQ ID NO: 5144625 - DNA, 25 bp, Homo sapien
gaggttctgcatcatggaccccctc

SEQ ID NO: 5144626 - DNA, 25 bp, Homo sapien
ggagaggttctgcatcatggacccc

SEQ ID NO: 5144627 - DNA, 25 bp, Homo sapien
tggagaggttctgcatcatggaccc

SEQ ID NO: 5144628 - DNA, 25 bp, Homo sapien
tgccacatactcatgggacagaggg

SEQ ID NO: 5144629 - DNA, 25 bp, Homo sapien
aaggaggtgggcagaaccagatgct

SEQ ID NO: 5144630 - DNA, 25 bp, Homo sapien
acccggagcccaactcaagcccaat

SEQ ID NO: 5144631 - DNA, 25 bp, Homo sapien
ccaactcaagcccaatgggcaatgg

SEQ ID NO: 5144632 - DNA, 25 bp, Homo sapien
cagtaggttgcctaggtccatgagg

SEQ ID NO: 5144633 - DNA, 25 bp, Homo sapien
gttgcctaggtccatgaggacagca

SEQ ID NO: 5144634 - DNA, 25 bp, Homo sapien
taggttgcctaggtccatgaggaca

SEQ ID NO: 5144635 - DNA, 25 bp, Homo sapien
catcagtaggttgcctaggtccatg

SEQ ID NO: 5144636 - DNA, 25 bp, Homo sapien
tggagctgtcttgtactgactgccc

SEQ ID NO: 5144637 - DNA, 25 bp, Homo sapien
cttgtactgactgccctgcgtgtga

SEQ ID NO: 5144638 - DNA, 25 bp, Homo sapien
tgtcttgtactgactgccctgcgtg

SEQ ID NO: 5144639 - DNA, 25 bp, Homo sapien
actgccctgcgtgtgagcaggatca

SEQ ID NO: 5144640 - DNA, 25 bp, Homo sapien
cagaggcaaagacgctgcccctttt

SEQ ID NO: 5144641 - DNA, 25 bp, Homo sapien
ggagcacatccaactggtcatatcg

SEQ ID NO: 5144642 - DNA, 25 bp, Homo sapien
tgaagacacgaaagctgtggccacc

SEQ ID NO: 5144643 - DNA, 25 bp, Homo sapien
aaaccgaaagggatctaggagcaca

SEQ ID NO: 5144644 - DNA, 25 bp, Homo sapien
gatgactgtcatgcttgggaaagag

SEQ ID NO: 5144645 - DNA, 25 bp, Homo sapien
tcttgcgcttgtgcaaaacaccagc

SEQ ID NO: 5144646 - DNA, 25 bp, Homo sapien
tcccggtgcttatcccagcagagtg

SEQ ID NO: 5144647 - DNA, 25 bp, Homo sapien
gaggagggacccatcttaggctcaa

SEQ ID NO: 5144648 - DNA, 25 bp, Homo sapien
ggagacccagtggttgaatctggag

SEQ ID NO: 5144649 - DNA, 25 bp, Homo sapien
aggagacccagtggttgaatctgga

SEQ ID NO: 5144650 - DNA, 25 bp, Homo sapien
cccaaggtggtcctcatgaagggag

SEQ ID NO: 5144651 - DNA, 25 bp, Homo sapien
catcagcaggatttcaggggttccc

SEQ ID NO: 5144652 - DNA, 25 bp, Homo sapien
gttcccaaggtggtcctcatgaagg

SEQ ID NO: 5144653 - DNA, 25 bp, Homo sapien
tcactttccagctttcagcatcagc

SEQ ID NO: 5144654 - DNA, 25 bp, Homo sapien
catgcaaggagatctcatcctggat

SEQ ID NO: 5144655 - DNA, 25 bp, Homo sapien
tctccagaggggaacatgagggttc

SEQ ID NO: 5144656 - DNA, 25 bp, Homo sapien
ggcttgcccatgcaaggagatctca

SEQ ID NO: 5144657 - DNA, 25 bp, Homo sapien
tcaaacccttcaggcaaggagccag

SEQ ID NO: 5144658 - DNA, 25 bp, Homo sapien
tcctttgaagatgttccttttgttc

SEQ ID NO: 5144659 - DNA, 25 bp, Homo sapien
tagttccattgacaaattatttaca

SEQ ID NO: 5144660 - DNA, 25 bp, Homo sapien
agttccattgacaaattatttacaa

SEQ ID NO: 5144661 - DNA, 25 bp, Homo sapien
ggagatgagtttcagagtcagtggg

SEQ ID NO: 5144662 - DNA, 25 bp, Homo sapien
atggagatgagtttcagagtcagtg

SEQ ID NO: 5144663 - DNA, 25 bp, Homo sapien
tgattggcccaagaagaagaatgga

SEQ ID NO: 5144664 - DNA, 25 bp, Homo sapien
aatggagatgagtttcagagtcagt

SEQ ID NO: 5144665 - DNA, 25 bp, Homo sapien
caccagaaggtgccatttccaagct

SEQ ID NO: 5144666 - DNA, 25 bp, Homo sapien
caaatacacccggaggcacccaggg

SEQ ID NO: 5144667 - DNA, 25 bp, Homo sapien
agctgtctagtatggcagccaaggc

SEQ ID NO: 5144668 - DNA, 25 bp, Homo sapien
tatggatgagggacctaaccctagc

SEQ ID NO: 5144669 - DNA, 25 bp, Homo sapien
catgtatctctcataagcttcttag

SEQ ID NO: 5144670 - DNA, 25 bp, Homo sapien
caataaaaactcctgtacatgtatc

SEQ ID NO: 5144671 - DNA, 25 bp, Homo sapien
cataagcttcttagagaaaggtgtc

SEQ ID NO: 5144672 - DNA, 25 bp, Homo sapien
cttcaataaaaactcctgtacatgt

SEQ ID NO: 5144673 - DNA, 25 bp, Homo sapien
acctgggtgcatgtgggctgagcct

SEQ ID NO: 5144674 - DNA, 25 bp, Homo sapien
cctgggtgcatgtgggctgagcctg

SEQ ID NO: 5144675 - DNA, 25 bp, Homo sapien
gtgcatgtgggctgagcctgaaaag

SEQ ID NO: 5144676 - DNA, 25 bp, Homo sapien
catgtgggctgagcctgaaaagaga

SEQ ID NO: 5144677 - DNA, 25 bp, Homo sapien
cttctcaaacacagtccagacatgg

SEQ ID NO: 5144678 - DNA, 25 bp, Homo sapien
ctccacgtgactcaggggcctcagt

SEQ ID NO: 5144679 - DNA, 25 bp, Homo sapien
gtccagacatggtgttcccttcctc

SEQ ID NO: 5144680 - DNA, 25 bp, Homo sapien
ccttcctccacgtgactcaggggcc

SEQ ID NO: 5144681 - DNA, 25 bp, Homo sapien
tcccataagctgggtagcttataag

SEQ ID NO: 5144682 - DNA, 25 bp, Homo sapien
cccataagctgggtagcttataagc

SEQ ID NO: 5144683 - DNA, 25 bp, Homo sapien
aaattcaagactaaggccccagcag

SEQ ID NO: 5144684 - DNA, 25 bp, Homo sapien
tgtctctccatataattagctctcc

SEQ ID NO: 5144685 - DNA, 25 bp, Homo sapien
cgggttatccctgcgtcgctgccgg

SEQ ID NO: 5144686 - DNA, 25 bp, Homo sapien
cagcgcacgggcgagtaccaccgag

SEQ ID NO: 5144687 - DNA, 25 bp, Homo sapien
gggcgccgcgccagagggctgaggg

SEQ ID NO: 5144688 - DNA, 25 bp, Homo sapien
cacttcgaggtgctgcgagggagaa

SEQ ID NO: 5144689 - DNA, 25 bp, Homo sapien
ccaggacagcaggccgcgcggggga

SEQ ID NO: 5144690 - DNA, 25 bp, Homo sapien
caggacagcaggccgcgcgggggag

SEQ ID NO: 5144691 - DNA, 25 bp, Homo sapien
aggagcagcgccagcccggtcaggg

SEQ ID NO: 5144692 - DNA, 25 bp, Homo sapien
gccagcccggtcagggccaggacag

SEQ ID NO: 5144693 - DNA, 25 bp, Homo sapien
gagcctctgacccttaactgttgca

SEQ ID NO: 5144694 - DNA, 25 bp, Homo sapien
ggttcttagcctctccttccatgga

SEQ ID NO: 5144695 - DNA, 25 bp, Homo sapien
gcttgcagacctataggagcctctg

SEQ ID NO: 5144696 - DNA, 25 bp, Homo sapien
caacttcgggtgtaaggaactggag

SEQ ID NO: 5144697 - DNA, 25 bp, Homo sapien
ttgagtttatttccacttatgccac

SEQ ID NO: 5144698 - DNA, 25 bp, Homo sapien
cttctcgtttttgaagcatcagctt

SEQ ID NO: 5144699 - DNA, 25 bp, Homo sapien
ttgaagcatcagcttgagtttattt

SEQ ID NO: 5144700 - DNA, 25 bp, Homo sapien
gaagcatcagcttgagtttatttcc

SEQ ID NO: 5144701 - DNA, 25 bp, Homo sapien
caccaaggagttgtgactgcctcag

SEQ ID NO: 5144702 - DNA, 25 bp, Homo sapien
cacaggatcatggaaatgcaggcct

SEQ ID NO: 5144703 - DNA, 25 bp, Homo sapien
tctcgatgacgttaggaaaaatgca

SEQ ID NO: 5144704 - DNA, 25 bp, Homo sapien
tctgtccccgtatctataaaagtgg

SEQ ID NO: 5144705 - DNA, 25 bp, Homo sapien
cacttccgcaggatgtgctcgagga

SEQ ID NO: 5144706 - DNA, 25 bp, Homo sapien
gccattaggcgtttttctcctgctg

SEQ ID NO: 5144707 - DNA, 25 bp, Homo sapien
tgtgctcgaggaagccactgtgcca

SEQ ID NO: 5144708 - DNA, 25 bp, Homo sapien
ggaagccactgtgccattaggcgtt

SEQ ID NO: 5144709 - DNA, 25 bp, Homo sapien
acagtctcaattgttgaaatggaac

SEQ ID NO: 5144710 - DNA, 25 bp, Homo sapien
tcacagtctcaattgttgaaatgga

SEQ ID NO: 5144711 - DNA, 25 bp, Homo sapien
cacagtctcaattgttgaaatggaa

SEQ ID NO: 5144712 - DNA, 25 bp, Homo sapien
attccccatccccaaagcacaaaga

SEQ ID NO: 5144713 - DNA, 25 bp, Homo sapien
aattccccatccccaaagcacaaag

SEQ ID NO: 5144714 - DNA, 25 bp, Homo sapien
catccccaaagcacaaagaatgact

SEQ ID NO: 5144715 - DNA, 25 bp, Homo sapien
ccccatccccaaagcacaaagaatg

SEQ ID NO: 5144716 - DNA, 25 bp, Homo sapien
gctgccgcttctggcgcttcaggct

SEQ ID NO: 5144717 - DNA, 25 bp, Homo sapien
tattctcatcaacggccactttagt

SEQ ID NO: 5144718 - DNA, 25 bp, Homo sapien
acagctgccgcttctggcgcttcag

SEQ ID NO: 5144719 - DNA, 25 bp, Homo sapien
tgctgcacctcgggccgagtccggt

SEQ ID NO: 5144720 - DNA, 25 bp, Homo sapien
catagtgacgttggtagtaatcgcc

SEQ ID NO: 5144721 - DNA, 25 bp, Homo sapien
gggaccaattgcagagtcttcatca

SEQ ID NO: 5144722 - DNA, 25 bp, Homo sapien
tttcgatctctgttaagccaatagg

SEQ ID NO: 5144723 - DNA, 25 bp, Homo sapien
tggctccatgcctaaagccgtaggg

SEQ ID NO: 5144724 - DNA, 25 bp, Homo sapien
aatgagaggcattcccatgaaatat

SEQ ID NO: 5144725 - DNA, 25 bp, Homo sapien
gaaaccaagtagtgtaaggcattag

SEQ ID NO: 5144726 - DNA, 25 bp, Homo sapien
tacatgaagagaatcgctatttgct

SEQ ID NO: 5144727 - DNA, 25 bp, Homo sapien
ttgtacagcgtgtggcaagtcatgg

SEQ ID NO: 5144728 - DNA, 25 bp, Homo sapien
tctgatcacaactctggtgctgcat

SEQ ID NO: 5144729 - DNA, 25 bp, Homo sapien
cttagatactgagcgcagcccactg

SEQ ID NO: 5144730 - DNA, 25 bp, Homo sapien
ggtggactcttgtgactcttgtggc

SEQ ID NO: 5144731 - DNA, 25 bp, Homo sapien
tccctgacggcatctctgatcacaa

SEQ ID NO: 5144732 - DNA, 25 bp, Homo sapien
agggacaacactggtacagctgctc

SEQ ID NO: 5144733 - DNA, 25 bp, Homo sapien
ctgctcttattaacttcagtgacag

SEQ ID NO: 5144734 - DNA, 25 bp, Homo sapien
acagctgctcttattaacttcagtg

SEQ ID NO: 5144735 - DNA, 25 bp, Homo sapien
gctgctcttattaacttcagtgaca

SEQ ID NO: 5144736 - DNA, 25 bp, Homo sapien
tctttctgcttcggcatggcacttg

SEQ ID NO: 5144737 - DNA, 25 bp, Homo sapien
tttctgcttcggcatggcacttgtt

SEQ ID NO: 5144738 - DNA, 25 bp, Homo sapien
tgtctttctgcttcggcatggcact

SEQ ID NO: 5144739 - DNA, 25 bp, Homo sapien
ttgtctttctgcttcggcatggcac

SEQ ID NO: 5144740 - DNA, 25 bp, Homo sapien
gaataaagaaaggacggactcgcca

SEQ ID NO: 5144741 - DNA, 25 bp, Homo sapien
ctgaaaaggaacattaagcgggaca

SEQ ID NO: 5144742 - DNA, 25 bp, Homo sapien
aaatggatgtgcctaaaagctcccc

SEQ ID NO: 5144743 - DNA, 25 bp, Homo sapien
aaaatagcgtagatgcatctctgcg

SEQ ID NO: 5144744 - DNA, 25 bp, Homo sapien
gatgctggatgctgtcacaaccaaa

SEQ ID NO: 5144745 - DNA, 25 bp, Homo sapien
caaagcatggttctgtgagtgttcc

SEQ ID NO: 5144746 - DNA, 25 bp, Homo sapien
tgaaagcggccctgaaggacttctg

SEQ ID NO: 5144747 - DNA, 25 bp, Homo sapien
tgcgatgcccttctgtcaatgtgac

SEQ ID NO: 5144748 - DNA, 25 bp, Homo sapien
ggcacgtctgcacttgttacctggt

SEQ ID NO: 5144749 - DNA, 25 bp, Homo sapien
tagtgggcggtaactcaggcctgtt

SEQ ID NO: 5144750 - DNA, 25 bp, Homo sapien
gggtggctgcacatcttgggtctca

SEQ ID NO: 5144751 - DNA, 25 bp, Homo sapien
cctgttgagacagaataacctgccc

SEQ ID NO: 5144752 - DNA, 25 bp, Homo sapien
ctcgtggcagtagaagcagcggtct

SEQ ID NO: 5144753 - DNA, 25 bp, Homo sapien
tcatcggcattggtctaatcgaccc

SEQ ID NO: 5144754 - DNA, 25 bp, Homo sapien
taatcgacccggatggctggaatcc

SEQ ID NO: 5144755 - DNA, 25 bp, Homo sapien
tggaatcctcccgttgctcgtggca

SEQ ID NO: 5144756 - DNA, 25 bp, Homo sapien
ggtatagccctgtgtagtctcccga

SEQ ID NO: 5144757 - DNA, 25 bp, Homo sapien
ggatgactctccaagggcaactgca

SEQ ID NO: 5144758 - DNA, 25 bp, Homo sapien
taatcgagaacgtggtgggcttcag

SEQ ID NO: 5144759 - DNA, 25 bp, Homo sapien
gaacgatgggcgagtagtcagcaac

SEQ ID NO: 5144760 - DNA, 25 bp, Homo sapien
tgggcttatctggacaggcagcatc

SEQ ID NO: 5144761 - DNA, 25 bp, Homo sapien
gattaagcagtccacatcaaacaga

SEQ ID NO: 5144762 - DNA, 25 bp, Homo sapien
cggtaatcagagctgtggtcacaca

SEQ ID NO: 5144763 - DNA, 25 bp, Homo sapien
gggttaatgaactagtccaaggaca

SEQ ID NO: 5144764 - DNA, 25 bp, Homo sapien
ctgaagcaggtaaagaagcgtgagt

SEQ ID NO: 5144765 - DNA, 25 bp, Homo sapien
tgggacagtgcccagaatgagtggt

SEQ ID NO: 5144766 - DNA, 25 bp, Homo sapien
agctccaagtccaaaggcgccaagg

SEQ ID NO: 5144767 - DNA, 25 bp, Homo sapien
aaggctcctttgcagctcgcacagt

SEQ ID NO: 5144768 - DNA, 25 bp, Homo sapien
tttcagttcctgctatggcaggata

SEQ ID NO: 5144769 - DNA, 25 bp, Homo sapien
gaggaaaatggtgcctttcctctct

SEQ ID NO: 5144770 - DNA, 25 bp, Homo sapien
ggcaggatattttgccaggtataga

SEQ ID NO: 5144771 - DNA, 25 bp, Homo sapien
caaaggagcagacacctcacagctg

SEQ ID NO: 5144772 - DNA, 25 bp, Homo sapien
tccaaggccacaagcccctctgggc

SEQ ID NO: 5144773 - DNA, 25 bp, Homo sapien
ggtccaaggccacaagcccctctgg

SEQ ID NO: 5144774 - DNA, 25 bp, Homo sapien
ccaaggccacaagcccctctgggcc

SEQ ID NO: 5144775 - DNA, 25 bp, Homo sapien
gtccaaggccacaagcccctctggg

SEQ ID NO: 5144776 - DNA, 25 bp, Homo sapien
cttccgtcccgttattcatgttgta

SEQ ID NO: 5144777 - DNA, 25 bp, Homo sapien
tgttgtaaatattgtgctcccttgt

SEQ ID NO: 5144778 - DNA, 25 bp, Homo sapien
tattgtgctcccttgtaggaagagc

SEQ ID NO: 5144779 - DNA, 25 bp, Homo sapien
tccgtcccgttattcatgttgtaaa

SEQ ID NO: 5144780 - DNA, 25 bp, Homo sapien
gtcactgtggtattgcctgagctcc

SEQ ID NO: 5144781 - DNA, 25 bp, Homo sapien
tcttggccaacaggtcagtaaactg

SEQ ID NO: 5144782 - DNA, 25 bp, Homo sapien
tgacgtgactaagagcagtgagcct

SEQ ID NO: 5144783 - DNA, 25 bp, Homo sapien
cattatgtcagggaggaccgtgccc

SEQ ID NO: 5144784 - DNA, 25 bp, Homo sapien
gcagaatggctgcaagagtcacttc

SEQ ID NO: 5144785 - DNA, 25 bp, Homo sapien
cactgggaggcttgagaattggccc

SEQ ID NO: 5144786 - DNA, 25 bp, Homo sapien
ggagtccctaacagacagttgcaga

SEQ ID NO: 5144787 - DNA, 25 bp, Homo sapien
aattggcccatggaagacaggtgca

SEQ ID NO: 5144788 - DNA, 25 bp, Homo sapien
gaaggcaaacgtgttgcagagacca

SEQ ID NO: 5144789 - DNA, 25 bp, Homo sapien
tcccatcgtagatcctgaagtccac

SEQ ID NO: 5144790 - DNA, 25 bp, Homo sapien
aatccaataggacctcgggcctgct

SEQ ID NO: 5144791 - DNA, 25 bp, Homo sapien
gcagagaccatgtgctatgcctaca

SEQ ID NO: 5144792 - DNA, 25 bp, Homo sapien
tagtgtcagaacacccacgagcttg

SEQ ID NO: 5144793 - DNA, 25 bp, Homo sapien
gcttgttttaccaagctacagcctt

SEQ ID NO: 5144794 - DNA, 25 bp, Homo sapien
gagaagagacatgcgctgactgcct

SEQ ID NO: 5144795 - DNA, 25 bp, Homo sapien
gactgcctcccctgttgtataacga

SEQ ID NO: 5144796 - DNA, 25 bp, Homo sapien
ttcagagcagaattgaggaatgtga

SEQ ID NO: 5144797 - DNA, 25 bp, Homo sapien
gaggaatgtgacagttgctttggaa

SEQ ID NO: 5144798 - DNA, 25 bp, Homo sapien
tctggtcagttacatgtgagtggtc

SEQ ID NO: 5144799 - DNA, 25 bp, Homo sapien
ttgaccaccatagataatgatgttc

SEQ ID NO: 5144800 - DNA, 25 bp, Homo sapien
tcactgtgcccgtgggtcctgtcac

SEQ ID NO: 5144801 - DNA, 25 bp, Homo sapien
cactgtgcccgtgggtcctgtcact

SEQ ID NO: 5144802 - DNA, 25 bp, Homo sapien
gaacgggcacaagcgtcgatgatac

SEQ ID NO: 5144803 - DNA, 25 bp, Homo sapien
ctgctgaacgggcacaagcgtcgat

SEQ ID NO: 5144804 - DNA, 25 bp, Homo sapien
tcttccacctggaccctgatacagt

SEQ ID NO: 5144805 - DNA, 25 bp, Homo sapien
ctgtgacttcacgaagctgctttct

SEQ ID NO: 5144806 - DNA, 25 bp, Homo sapien
gatgccgtgattgtgaaaattcctg

SEQ ID NO: 5144807 - DNA, 25 bp, Homo sapien
tcctcatgcgttgggcctgtgactt

SEQ ID NO: 5144808 - DNA, 25 bp, Homo sapien
ctctcactggacgttttatattcag

SEQ ID NO: 5144809 - DNA, 25 bp, Homo sapien
ctcctgggacatcagtgtgggctgg

SEQ ID NO: 5144810 - DNA, 25 bp, Homo sapien
tatattcagatcacactgccctgct

SEQ ID NO: 5144811 - DNA, 25 bp, Homo sapien
cctgctcctgggacatcagtgtggg

SEQ ID NO: 5144812 - DNA, 25 bp, Homo sapien
gaattggttttctccctgcaccgcg

SEQ ID NO: 5144813 - DNA, 25 bp, Homo sapien
tcatatacacggtagagaaggagcc

SEQ ID NO: 5144814 - DNA, 25 bp, Homo sapien
tagggactattctaagctgacagct

SEQ ID NO: 5144815 - DNA, 25 bp, Homo sapien
atttgtttccatggccccggatgca

SEQ ID NO: 5144816 - DNA, 25 bp, Homo sapien
caggggcctctgctggcattgccat

SEQ ID NO: 5144817 - DNA, 25 bp, Homo sapien
cttgctgctgcatcttcccctcccc

SEQ ID NO: 5144818 - DNA, 25 bp, Homo sapien
ccaggggcctctgctggcattgcca

SEQ ID NO: 5144819 - DNA, 25 bp, Homo sapien
gctgctgcatcttcccctccccagg

SEQ ID NO: 5144820 - DNA, 25 bp, Homo sapien
gtaggcacggcttcccgttcagcag

SEQ ID NO: 5144821 - DNA, 25 bp, Homo sapien
catgctccaaggtttagggctaagg

SEQ ID NO: 5144822 - DNA, 25 bp, Homo sapien
tcaggttcaggagtaggcacggctt

SEQ ID NO: 5144823 - DNA, 25 bp, Homo sapien
ggctaaggctccttcaggttcagga

SEQ ID NO: 5144824 - DNA, 25 bp, Homo sapien
acaccagtgaccatgcagggctttg

SEQ ID NO: 5144825 - DNA, 25 bp, Homo sapien
agagccagacaccagtgaccatgca

SEQ ID NO: 5144826 - DNA, 25 bp, Homo sapien
cacagagggagactgggcaccctca

SEQ ID NO: 5144827 - DNA, 25 bp, Homo sapien
tgcctgatgcatgatggagccacag

SEQ ID NO: 5144828 - DNA, 25 bp, Homo sapien
caagcctgtcttgggatttgaaggt

SEQ ID NO: 5144829 - DNA, 25 bp, Homo sapien
tcaagcctgtcttgggatttgaagg

SEQ ID NO: 5144830 - DNA, 25 bp, Homo sapien
cttcaagcctgtcttgggatttgaa

SEQ ID NO: 5144831 - DNA, 25 bp, Homo sapien
gcctgtcttgggatttgaaggtcag

SEQ ID NO: 5144832 - DNA, 25 bp, Homo sapien
ttgtaaagtaacctgcaacatggag

SEQ ID NO: 5144833 - DNA, 25 bp, Homo sapien
tcatcgccctgcatttagaagggcc

SEQ ID NO: 5144834 - DNA, 25 bp, Homo sapien
caacagcagaaaacgtttgaacttc

SEQ ID NO: 5144835 - DNA, 25 bp, Homo sapien
caagagtgaatttggagttaatcca

SEQ ID NO: 5144836 - DNA, 25 bp, Homo sapien
cttcttcatgtcttagggttgacca

SEQ ID NO: 5144837 - DNA, 25 bp, Homo sapien
tccttgataccacataactcttctt

SEQ ID NO: 5144838 - DNA, 25 bp, Homo sapien
tcatgtcttagggttgaccacctgc

SEQ ID NO: 5144839 - DNA, 25 bp, Homo sapien
tcctccttgataccacataactctt

SEQ ID NO: 5144840 - DNA, 25 bp, Homo sapien
caagtccttactgttgtccctgaat

SEQ ID NO: 5144841 - DNA, 25 bp, Homo sapien
tgtccctgaatttggcactaggaga

SEQ ID NO: 5144842 - DNA, 25 bp, Homo sapien
gtccctgaatttggcactaggagac

SEQ ID NO: 5144843 - DNA, 25 bp, Homo sapien
tccctgaatttggcactaggagaca

SEQ ID NO: 5144844 - DNA, 25 bp, Homo sapien
gagctggaaaaccccagcaggactc

SEQ ID NO: 5144845 - DNA, 25 bp, Homo sapien
agctggaaaaccccagcaggactcc

SEQ ID NO: 5144846 - DNA, 25 bp, Homo sapien
agtagatccagcctgtgtgctacag

SEQ ID NO: 5144847 - DNA, 25 bp, Homo sapien
gtagatccagcctgtgtgctacagc

SEQ ID NO: 5144848 - DNA, 25 bp, Homo sapien
gagtagatccagcctgtgtgctaca

SEQ ID NO: 5144849 - DNA, 25 bp, Homo sapien
cagaggtgagtgggtacttcacttg

SEQ ID NO: 5144850 - DNA, 25 bp, Homo sapien
tgttggcgttaccaagatctgattc

SEQ ID NO: 5144851 - DNA, 25 bp, Homo sapien
ctgttggcgttaccaagatctgatt

SEQ ID NO: 5144852 - DNA, 25 bp, Homo sapien
tccaggtcacattcttcgaaaacca

SEQ ID NO: 5144853 - DNA, 25 bp, Homo sapien
cattcttcgaaaaccaaggcaagaa

SEQ ID NO: 5144854 - DNA, 25 bp, Homo sapien
aaggcaagaaaggcggcaactgcgc

SEQ ID NO: 5144855 - DNA, 25 bp, Homo sapien
ggtcacattcttcgaaaaccaaggc

SEQ ID NO: 5144856 - DNA, 25 bp, Homo sapien
ctctccagatccaatgacaagcttc

SEQ ID NO: 5144857 - DNA, 25 bp, Homo sapien
ccgattatctgtggatcttctgata

SEQ ID NO: 5144858 - DNA, 25 bp, Homo sapien
gatacatctccttgcttgtaatcat

SEQ ID NO: 5144859 - DNA, 25 bp, Homo sapien
tttttttcctccatgggaccagctc

SEQ ID NO: 5144860 - DNA, 25 bp, Homo sapien
ccatatacttaatcccacagggcag

SEQ ID NO: 5144861 - DNA, 25 bp, Homo sapien
cagaagttggcagtagtgtccagca

SEQ ID NO: 5144862 - DNA, 25 bp, Homo sapien
tgcggctgagcaagacaccagtgtc

SEQ ID NO: 5144863 - DNA, 25 bp, Homo sapien
actgcagctgctaacggtatttcca

SEQ ID NO: 5144864 - DNA, 25 bp, Homo sapien
tgttaacctatccactggaaatatg

SEQ ID NO: 5144865 - DNA, 25 bp, Homo sapien
tattgttgttaacctatccactgga

SEQ ID NO: 5144866 - DNA, 25 bp, Homo sapien
aacctatccactggaaatatgaggg

SEQ ID NO: 5144867 - DNA, 25 bp, Homo sapien
aaatattgttgttaacctatccact

SEQ ID NO: 5144868 - DNA, 25 bp, Homo sapien
cttcctgttgtgaaattccttagcc

SEQ ID NO: 5144869 - DNA, 25 bp, Homo sapien
ttcctgttgtgaaattccttagcca

SEQ ID NO: 5144870 - DNA, 25 bp, Homo sapien
tcctgttgtgaaattccttagccat

SEQ ID NO: 5144871 - DNA, 25 bp, Homo sapien
cactgttctcatctgcaagcagaag

SEQ ID NO: 5144872 - DNA, 25 bp, Homo sapien
tcctgctctgcaaagctttctctct

SEQ ID NO: 5144873 - DNA, 25 bp, Homo sapien
gttctcatctgcaagcagaagtatg

SEQ ID NO: 5144874 - DNA, 25 bp, Homo sapien
ctctcactgttctcatctgcaagca

SEQ ID NO: 5144875 - DNA, 25 bp, Homo sapien
tttttgactcaatttgggcaccttc

SEQ ID NO: 5144876 - DNA, 25 bp, Homo sapien
gctttttgactcaatttgggcacct

SEQ ID NO: 5144877 - DNA, 25 bp, Homo sapien
actcaatttgggcaccttccacctt

SEQ ID NO: 5144878 - DNA, 25 bp, Homo sapien
ctctgctttttgactcaatttgggc

SEQ ID NO: 5144879 - DNA, 25 bp, Homo sapien
gctttggctacagcaactcataagg

SEQ ID NO: 5144880 - DNA, 25 bp, Homo sapien
tacctgcagggtgatctaagacaaa

SEQ ID NO: 5144881 - DNA, 25 bp, Homo sapien
tgatggcaactcctaggaggacctg

SEQ ID NO: 5144882 - DNA, 25 bp, Homo sapien
tcccagatcacaaggaagaaggctt

SEQ ID NO: 5144883 - DNA, 25 bp, Homo sapien
aattctgtgtgagaactgtgcgtga

SEQ ID NO: 5144884 - DNA, 25 bp, Homo sapien
catgaatgacttgcagagctgatgc

SEQ ID NO: 5144885 - DNA, 25 bp, Homo sapien
agcactgctccttgtttcaactggg

SEQ ID NO: 5144886 - DNA, 25 bp, Homo sapien
ccaacaagacaaggcgagcatggaa

SEQ ID NO: 5144887 - DNA, 25 bp, Homo sapien
tcctgcactgagcctatctgtctgc

SEQ ID NO: 5144888 - DNA, 25 bp, Homo sapien
tgtattcaagggctcctctccagtg

SEQ ID NO: 5144889 - DNA, 25 bp, Homo sapien
caagggctcctctccagtgtgagtt

SEQ ID NO: 5144890 - DNA, 25 bp, Homo sapien
tattcaagggctcctctccagtgtg

SEQ ID NO: 5144891 - DNA, 25 bp, Homo sapien
agggctcctctccagtgtgagttct

SEQ ID NO: 5144892 - DNA, 25 bp, Homo sapien
aatgtaagatcaatgattaaagact

SEQ ID NO: 5144893 - DNA, 25 bp, Homo sapien
gtaagatcaatgattaaagactttc

SEQ ID NO: 5144894 - DNA, 25 bp, Homo sapien
ctgttgtctaatgtaagatcaatga

SEQ ID NO: 5144895 - DNA, 25 bp, Homo sapien
tgtctaatgtaagatcaatgattaa

SEQ ID NO: 5144896 - DNA, 25 bp, Homo sapien
aattccatttagatggtttatctcc

SEQ ID NO: 5144897 - DNA, 25 bp, Homo sapien
gatcttcttgtgttgtctaaggcca

SEQ ID NO: 5144898 - DNA, 25 bp, Homo sapien
gtactaaagacttttctacatagat

SEQ ID NO: 5144899 - DNA, 25 bp, Homo sapien
gagtatgtactaaagacttttctac

SEQ ID NO: 5144900 - DNA, 25 bp, Homo sapien
tctgtgtgagttccatggtgtgaat

SEQ ID NO: 5144901 - DNA, 25 bp, Homo sapien
ttctgtgtgagttccatggtgtgaa

SEQ ID NO: 5144902 - DNA, 25 bp, Homo sapien
ccacatttactatatttacagagtt

SEQ ID NO: 5144903 - DNA, 25 bp, Homo sapien
tgtgaattatgtggtgtgaataaag

SEQ ID NO: 5144904 - DNA, 25 bp, Homo sapien
gaattatgtggtgtgaataaagctg

SEQ ID NO: 5144905 - DNA, 25 bp, Homo sapien
agtgtgaattatgtggtgtgaataa

SEQ ID NO: 5144906 - DNA, 25 bp, Homo sapien
cagtgtgaatttgcttgtgttgact

SEQ ID NO: 5144907 - DNA, 25 bp, Homo sapien
ggctcttccaccgtcattacactta

SEQ ID NO: 5144908 - DNA, 25 bp, Homo sapien
gggataaaggataactgatggctct

SEQ ID NO: 5144909 - DNA, 25 bp, Homo sapien
tgtgttgactgagggataaaggata

SEQ ID NO: 5144910 - DNA, 25 bp, Homo sapien
gaagcctgaaagattgagctgcaag

SEQ ID NO: 5144911 - DNA, 25 bp, Homo sapien
gcatttcaccagagattggcaaccc

SEQ ID NO: 5144912 - DNA, 25 bp, Homo sapien
tgttaccatgtatacagtccgaaag

SEQ ID NO: 5144913 - DNA, 25 bp, Homo sapien
gggaggcctatagctacacccacag

SEQ ID NO: 5144914 - DNA, 25 bp, Homo sapien
gaattgactgaaggctttcccacat

SEQ ID NO: 5144915 - DNA, 25 bp, Homo sapien
agtcagagaattgactgaaggcttt

SEQ ID NO: 5144916 - DNA, 25 bp, Homo sapien
ttgactgaaggctttcccacatatc

SEQ ID NO: 5144917 - DNA, 25 bp, Homo sapien
tagtcagagaattgactgaaggctt

SEQ ID NO: 5144918 - DNA, 25 bp, Homo sapien
ataagttagatatgaaggcatttcc

SEQ ID NO: 5144919 - DNA, 25 bp, Homo sapien
gaaggataagttagatatgaaggca

SEQ ID NO: 5144920 - DNA, 25 bp, Homo sapien
ggataagttagatatgaaggcattt

SEQ ID NO: 5144921 - DNA, 25 bp, Homo sapien
aagttagatatgaaggcatttccac

SEQ ID NO: 5144922 - DNA, 25 bp, Homo sapien
cttcccttatccacaataaaacctg

SEQ ID NO: 5144923 - DNA, 25 bp, Homo sapien
tttgttagcttatctccagaattta

SEQ ID NO: 5144924 - DNA, 25 bp, Homo sapien
aataaaacctgtttcatagcatgtc

SEQ ID NO: 5144925 - DNA, 25 bp, Homo sapien
ttgttagcttatctccagaatttaa

SEQ ID NO: 5144926 - DNA, 25 bp, Homo sapien
ccacaagctttctcacgggcaccat

SEQ ID NO: 5144927 - DNA, 25 bp, Homo sapien
tgggtgcaatcaagagtgaacttca

SEQ ID NO: 5144928 - DNA, 25 bp, Homo sapien
tggggtgggtgcaatcaagagtgaa

SEQ ID NO: 5144929 - DNA, 25 bp, Homo sapien
tgcaatcaagagtgaacttcagaac

SEQ ID NO: 5144930 - DNA, 25 bp, Homo sapien
ctatggggtgggtgcaatcaagagt

SEQ ID NO: 5144931 - DNA, 25 bp, Homo sapien
aaaattggcagcatctacgattcca

SEQ ID NO: 5144932 - DNA, 25 bp, Homo sapien
ttgctcttctcgatggtcaccaccc

SEQ ID NO: 5144933 - DNA, 25 bp, Homo sapien
tcttgctcttctcgatggtcaccac

SEQ ID NO: 5144934 - DNA, 25 bp, Homo sapien
tgctcttgctcttctcgatggtcac

SEQ ID NO: 5144935 - DNA, 25 bp, Homo sapien
tctttactgttagcaactatgcaca

SEQ ID NO: 5144936 - DNA, 25 bp, Homo sapien
cataatttgtaactctctttactgt

SEQ ID NO: 5144937 - DNA, 25 bp, Homo sapien
gcaactatgcacaaccaatcatgaa

SEQ ID NO: 5144938 - DNA, 25 bp, Homo sapien
tatgcacaaccaatcatgaagatta

SEQ ID NO: 5144939 - DNA, 25 bp, Homo sapien
agaatgacttctgacattaaatcca

SEQ ID NO: 5144940 - DNA, 25 bp, Homo sapien
cactgtagaatgacttctgacatta

SEQ ID NO: 5144941 - DNA, 25 bp, Homo sapien
ctgtagaatgacttctgacattaaa

SEQ ID NO: 5144942 - DNA, 25 bp, Homo sapien
gtagaatgacttctgacattaaatc

SEQ ID NO: 5144943 - DNA, 25 bp, Homo sapien
acctcgtcgtagatctccaagaaga

SEQ ID NO: 5144944 - DNA, 25 bp, Homo sapien
caagaagaagcctctctcgcagccg

SEQ ID NO: 5144945 - DNA, 25 bp, Homo sapien
gatgattatcataggaggagtcttc

SEQ ID NO: 5144946 - DNA, 25 bp, Homo sapien
ggagtcttccacctcgtcgtagatc

SEQ ID NO: 5144947 - DNA, 25 bp, Homo sapien
gccgctgtgtaagagtggaactgtc

SEQ ID NO: 5144948 - DNA, 25 bp, Homo sapien
actatgtggccgctgtgtaagagtg

SEQ ID NO: 5144949 - DNA, 25 bp, Homo sapien
tgtaagagtggaactgtcgaatggt

SEQ ID NO: 5144950 - DNA, 25 bp, Homo sapien
gagtggaactgtcgaatggtgataa

SEQ ID NO: 5144951 - DNA, 25 bp, Homo sapien
ggtttatgtaggcaatcttggaaac

SEQ ID NO: 5144952 - DNA, 25 bp, Homo sapien
aggtttatgtaggcaatcttggaaa

SEQ ID NO: 5144953 - DNA, 25 bp, Homo sapien
tcgaaatgcatcgtgattcctgtcc

SEQ ID NO: 5144954 - DNA, 25 bp, Homo sapien
aaggtttatgtaggcaatcttggaa

SEQ ID NO: 5144955 - DNA, 25 bp, Homo sapien
agaagataaatttcaaatcgaaggc

SEQ ID NO: 5144956 - DNA, 25 bp, Homo sapien
tattgtcagtgatgtaaacttgttt

SEQ ID NO: 5144957 - DNA, 25 bp, Homo sapien
ttaaagtatattgtcagtgatgtaa

SEQ ID NO: 5144958 - DNA, 25 bp, Homo sapien
gataaatttcaaatcgaaggcagac

SEQ ID NO: 5144959 - DNA, 25 bp, Homo sapien
ctcaagttcaagcacgtcctgtcct

SEQ ID NO: 5144960 - DNA, 25 bp, Homo sapien
caagcacgtcctgtcctattcctgt

SEQ ID NO: 5144961 - DNA, 25 bp, Homo sapien
ctagtctttagacacacgaggaatt

SEQ ID NO: 5144962 - DNA, 25 bp, Homo sapien
tcacttcatgccaggggaagccttg

SEQ ID NO: 5144963 - DNA, 25 bp, Homo sapien
ttccaaatcttcctccgtctggatg

SEQ ID NO: 5144964 - DNA, 25 bp, Homo sapien
ccaaatcttcctccgtctggatggc

SEQ ID NO: 5144965 - DNA, 25 bp, Homo sapien
tccaaatcttcctccgtctggatgg

SEQ ID NO: 5144966 - DNA, 25 bp, Homo sapien
tacagtagggcagtcgttcgggcaa

SEQ ID NO: 5144967 - DNA, 25 bp, Homo sapien
gatcttgtggtgatgcatgatccca

SEQ ID NO: 5144968 - DNA, 25 bp, Homo sapien
tgtttgtcgatgcagcaagagactc

SEQ ID NO: 5144969 - DNA, 25 bp, Homo sapien
ttgtagaagcctggccacaccacat

SEQ ID NO: 5144970 - DNA, 25 bp, Homo sapien
acaggctgctttagcagttttccct

SEQ ID NO: 5144971 - DNA, 25 bp, Homo sapien
tgacaggctgctttagcagttttcc

SEQ ID NO: 5144972 - DNA, 25 bp, Homo sapien
atgacaggctgctttagcagttttc

SEQ ID NO: 5144973 - DNA, 25 bp, Homo sapien
gacaggctgctttagcagttttccc

SEQ ID NO: 5144974 - DNA, 25 bp, Homo sapien
acacctctgtcgtcgtctgaccatt

SEQ ID NO: 5144975 - DNA, 25 bp, Homo sapien
ctgaacgtggcacgcagagtgagtt

SEQ ID NO: 5144976 - DNA, 25 bp, Homo sapien
tgaccattttgctgaatcaggattg

SEQ ID NO: 5144977 - DNA, 25 bp, Homo sapien
gtttgggtcgcctggagaaggtcca

SEQ ID NO: 5144978 - DNA, 25 bp, Homo sapien
caccagggcgcttttgagactcttc

SEQ ID NO: 5144979 - DNA, 25 bp, Homo sapien
tcttcttcccaaatggagtcgctcc

SEQ ID NO: 5144980 - DNA, 25 bp, Homo sapien
ccttccccttcacggccattggctt

SEQ ID NO: 5144981 - DNA, 25 bp, Homo sapien
attggcttcaaaacgcgccccaggt

SEQ ID NO: 5144982 - DNA, 25 bp, Homo sapien
ggatggaggagattgccatgggcat

SEQ ID NO: 5144983 - DNA, 25 bp, Homo sapien
aggatggaggagattgccatgggca

SEQ ID NO: 5144984 - DNA, 25 bp, Homo sapien
ggctgacacggaacgactgaagtat

SEQ ID NO: 5144985 - DNA, 25 bp, Homo sapien
tgaagtatgctgttccagccgcccc

SEQ ID NO: 5144986 - DNA, 25 bp, Homo sapien
gaacaagcagagtcctcgagaggca

SEQ ID NO: 5144987 - DNA, 25 bp, Homo sapien
catatggccactaacagtgggtgcc

SEQ ID NO: 5144988 - DNA, 25 bp, Homo sapien
tggagatgagcacgtctttgttggt

SEQ ID NO: 5144989 - DNA, 25 bp, Homo sapien
gcataagaggcaccaattgctgctt

SEQ ID NO: 5144990 - DNA, 25 bp, Homo sapien
aggcataagaggcaccaattgctgc

SEQ ID NO: 5144991 - DNA, 25 bp, Homo sapien
agcacgtctttgttggtggtgctca

SEQ ID NO: 5144992 - DNA, 25 bp, Homo sapien
tctgtaatctcttgcggctctagca

SEQ ID NO: 5144993 - DNA, 25 bp, Homo sapien
gtgcacatccgtcaccatccctgat

SEQ ID NO: 5144994 - DNA, 25 bp, Homo sapien
tgcacatctggacaataacatctgt

SEQ ID NO: 5144995 - DNA, 25 bp, Homo sapien
tagcaatctcaccatcagcatgctc

SEQ ID NO: 5144996 - DNA, 25 bp, Homo sapien
tgacgaatgcgacagaagagaaggt

SEQ ID NO: 5144997 - DNA, 25 bp, Homo sapien
ggtaagttgaccctgtcacaaaggc

SEQ ID NO: 5144998 - DNA, 25 bp, Homo sapien
gatcacctgggaagcgttactgagc

SEQ ID NO: 5144999 - DNA, 25 bp, Homo sapien
gaacttccagcgatatcaggagaaa

SEQ ID NO: 5145000 - DNA, 25 bp, Homo sapien
acagagttctggagctgtcttctct

SEQ ID NO: 5145001 - DNA, 25 bp, Homo sapien
tttttcagtttgctgaacagagttc

SEQ ID NO: 5145002 - DNA, 25 bp, Homo sapien
gagttctggagctgtcttctcttca

SEQ ID NO: 5145003 - DNA, 25 bp, Homo sapien
tcagtttgctgaacagagttctgga

SEQ ID NO: 5145004 - DNA, 25 bp, Homo sapien
tgccatccttagagagaagtaaaat

SEQ ID NO: 5145005 - DNA, 25 bp, Homo sapien
cagggccatctgttggctgtgcgtg

SEQ ID NO: 5145006 - DNA, 25 bp, Homo sapien
tagaaatgccatccttagagagaag

SEQ ID NO: 5145007 - DNA, 25 bp, Homo sapien
atctgttggctgtgcgtgtcccagg

SEQ ID NO: 5145008 - DNA, 25 bp, Homo sapien
acatgcagcctattcgttgcacaaa

SEQ ID NO: 5145009 - DNA, 25 bp, Homo sapien
catgcagcctattcgttgcacaaac

SEQ ID NO: 5145010 - DNA, 25 bp, Homo sapien
cacatgcagcctattcgttgcacaa

SEQ ID NO: 5145011 - DNA, 25 bp, Homo sapien
atgcagcctattcgttgcacaaact

SEQ ID NO: 5145012 - DNA, 25 bp, Homo sapien
ttgactctccggagagtccacacag

SEQ ID NO: 5145013 - DNA, 25 bp, Homo sapien
tagaggggtcagtattgaggaaaac

SEQ ID NO: 5145014 - DNA, 25 bp, Homo sapien
ttttcattgcatgatctacaacata

SEQ ID NO: 5145015 - DNA, 25 bp, Homo sapien
cagaatgcacattttgaacagcatc

SEQ ID NO: 5145016 - DNA, 25 bp, Homo sapien
gagggagctgctagtggccacattc

SEQ ID NO: 5145017 - DNA, 25 bp, Homo sapien
agaatgtagactgggtgatgaggtt

SEQ ID NO: 5145018 - DNA, 25 bp, Homo sapien
tagaaggtgagcgagaatgtagact

SEQ ID NO: 5145019 - DNA, 25 bp, Homo sapien
cgagaatgtagactgggtgatgagg

SEQ ID NO: 5145020 - DNA, 25 bp, Homo sapien
gaaatagaaggtgagcgagaatgta

SEQ ID NO: 5145021 - DNA, 25 bp, Homo sapien
cacaaatggtcaatacacagttcag

SEQ ID NO: 5145022 - DNA, 25 bp, Homo sapien
tggctccgtttctggtgcaagaaag

SEQ ID NO: 5145023 - DNA, 25 bp, Homo sapien
cacagttcaggaacaattggctccg

SEQ ID NO: 5145024 - DNA, 25 bp, Homo sapien
tggagactgattatggcttgaaatg

SEQ ID NO: 5145025 - DNA, 25 bp, Homo sapien
cacttataaagtgccttcttaccgc

SEQ ID NO: 5145026 - DNA, 25 bp, Homo sapien
tataaagtgccttcttaccgctgtc

SEQ ID NO: 5145027 - DNA, 25 bp, Homo sapien
aacttccaacacacttataaagtgc

SEQ ID NO: 5145028 - DNA, 25 bp, Homo sapien
gccttcttaccgctgtcatcaaaca

SEQ ID NO: 5145029 - DNA, 25 bp, Homo sapien
attactctcttgaaactttacacag

SEQ ID NO: 5145030 - DNA, 25 bp, Homo sapien
caaagatgagctgggttttatcatt

SEQ ID NO: 5145031 - DNA, 25 bp, Homo sapien
gctgggttttatcattactctcttg

SEQ ID NO: 5145032 - DNA, 25 bp, Homo sapien
tcattactctcttgaaactttacac

SEQ ID NO: 5145033 - DNA, 25 bp, Homo sapien
cgaaccactcctgtgtatagcacca

SEQ ID NO: 5145034 - DNA, 25 bp, Homo sapien
tgtgtatagcaccaggtttccactg

SEQ ID NO: 5145035 - DNA, 25 bp, Homo sapien
cactcctgtgtatagcaccaggttt

SEQ ID NO: 5145036 - DNA, 25 bp, Homo sapien
tatagcaccaggtttccactgcctt

SEQ ID NO: 5145037 - DNA, 25 bp, Homo sapien
tccatcagcatcgtgaaagcacaga

SEQ ID NO: 5145038 - DNA, 25 bp, Homo sapien
taatccatcagcatcgtgaaagcac

SEQ ID NO: 5145039 - DNA, 25 bp, Homo sapien
cttcataatccatcagcatcgtgaa

SEQ ID NO: 5145040 - DNA, 25 bp, Homo sapien
catcagcatcgtgaaagcacagagg

SEQ ID NO: 5145041 - DNA, 25 bp, Homo sapien
tagttgccctcctaatggcctcctg

SEQ ID NO: 5145042 - DNA, 25 bp, Homo sapien
tggcctcctggctgtacattcttcc

SEQ ID NO: 5145043 - DNA, 25 bp, Homo sapien
ctttcccctggtagttgttggatgc

SEQ ID NO: 5145044 - DNA, 25 bp, Homo sapien
gttggatgcattaaattctacaaat

SEQ ID NO: 5145045 - DNA, 25 bp, Homo sapien
gtagaagaaccacttccttatgttc

SEQ ID NO: 5145046 - DNA, 25 bp, Homo sapien
gaagtagaagaaccacttccttatg

SEQ ID NO: 5145047 - DNA, 25 bp, Homo sapien
agaagtagaagaaccacttccttat

SEQ ID NO: 5145048 - DNA, 25 bp, Homo sapien
tagaagaaccacttccttatgttcc

SEQ ID NO: 5145049 - DNA, 25 bp, Homo sapien
gccccctgggcatttacatagtcat

SEQ ID NO: 5145050 - DNA, 25 bp, Homo sapien
gtgaagccccctgggcatttacata

SEQ ID NO: 5145051 - DNA, 25 bp, Homo sapien
gggcatttacatagtcatccagagg

SEQ ID NO: 5145052 - DNA, 25 bp, Homo sapien
ctgggcatttacatagtcatccaga

SEQ ID NO: 5145053 - DNA, 25 bp, Homo sapien
tgcaggtgaattctttgtcctcctc

SEQ ID NO: 5145054 - DNA, 25 bp, Homo sapien
ctgcaggtgaattctttgtcctcct

SEQ ID NO: 5145055 - DNA, 25 bp, Homo sapien
gcaggtgaattctttgtcctcctca

SEQ ID NO: 5145056 - DNA, 25 bp, Homo sapien
caggtgaattctttgtcctcctcac

SEQ ID NO: 5145057 - DNA, 25 bp, Homo sapien
atttctgggtaggtgcaacgacgat

SEQ ID NO: 5145058 - DNA, 25 bp, Homo sapien
gatttctgggtaggtgcaacgacga

SEQ ID NO: 5145059 - DNA, 25 bp, Homo sapien
agatttctgggtaggtgcaacgacg

SEQ ID NO: 5145060 - DNA, 25 bp, Homo sapien
gaaagaagcaactctggttgctttg

SEQ ID NO: 5145061 - DNA, 25 bp, Homo sapien
gcaactctggttgctttgaacccat

SEQ ID NO: 5145062 - DNA, 25 bp, Homo sapien
tgtttttgggtcagaaagaagcaac

SEQ ID NO: 5145063 - DNA, 25 bp, Homo sapien
tttgtttttgggtcagaaagaagca

SEQ ID NO: 5145064 - DNA, 25 bp, Homo sapien
ctttctgtttcaactgctttacttc

SEQ ID NO: 5145065 - DNA, 25 bp, Homo sapien
ttctttctgtttcaactgctttact

SEQ ID NO: 5145066 - DNA, 25 bp, Homo sapien
ttctgtttcaactgctttacttctt

SEQ ID NO: 5145067 - DNA, 25 bp, Homo sapien
gtttcaactgctttacttcttcttc

SEQ ID NO: 5145068 - DNA, 25 bp, Homo sapien
tctctcatcctaatgattatggagg

SEQ ID NO: 5145069 - DNA, 25 bp, Homo sapien
ctctttactgtgatattggaatgcc

SEQ ID NO: 5145070 - DNA, 25 bp, Homo sapien
attatcacacattgttgctctttac

SEQ ID NO: 5145071 - DNA, 25 bp, Homo sapien
catcctaatgattatggaggacttc

SEQ ID NO: 5145072 - DNA, 25 bp, Homo sapien
ccatggtcaccctgcagaataagaa

SEQ ID NO: 5145073 - DNA, 25 bp, Homo sapien
tcccatctccttgttaaatataaaa

SEQ ID NO: 5145074 - DNA, 25 bp, Homo sapien
agccaagaccaaaaggaatgcttag

SEQ ID NO: 5145075 - DNA, 25 bp, Homo sapien
gttagttagtaatcaaatcctgtcc

SEQ ID NO: 5145076 - DNA, 25 bp, Homo sapien
cgtttgtatgtacccaccagagttt

SEQ ID NO: 5145077 - DNA, 25 bp, Homo sapien
caggtcaatatcccacagcaaagaa

SEQ ID NO: 5145078 - DNA, 25 bp, Homo sapien
tgtacccaccagagtttatataaac

SEQ ID NO: 5145079 - DNA, 25 bp, Homo sapien
ttttcgtttgtatgtacccaccaga

SEQ ID NO: 5145080 - DNA, 25 bp, Homo sapien
tactggtgaccccatattcgaagaa

SEQ ID NO: 5145081 - DNA, 25 bp, Homo sapien
catcatttaaggttacccactttag

SEQ ID NO: 5145082 - DNA, 25 bp, Homo sapien
tcacatggggaaagtactcctaaca

SEQ ID NO: 5145083 - DNA, 25 bp, Homo sapien
gcctctgctctacatcaaaaggtgt

SEQ ID NO: 5145084 - DNA, 25 bp, Homo sapien
gacatcgtccctctgtagttctttc

SEQ ID NO: 5145085 - DNA, 25 bp, Homo sapien
tgttttggacatcgtccctctgtag

SEQ ID NO: 5145086 - DNA, 25 bp, Homo sapien
tttggacatcgtccctctgtagttc

SEQ ID NO: 5145087 - DNA, 25 bp, Homo sapien
ttttgttttggacatcgtccctctg

SEQ ID NO: 5145088 - DNA, 25 bp, Homo sapien
cacagagggacaactttacagtaga

SEQ ID NO: 5145089 - DNA, 25 bp, Homo sapien
cagagggacaactttacagtagatg

SEQ ID NO: 5145090 - DNA, 25 bp, Homo sapien
acagagggacaactttacagtagat

SEQ ID NO: 5145091 - DNA, 25 bp, Homo sapien
tcatgaagatgagcctagactacct

SEQ ID NO: 5145092 - DNA, 25 bp, Homo sapien
tagtctctgacttcgccatttggtt

SEQ ID NO: 5145093 - DNA, 25 bp, Homo sapien
gagttgctgtatagagacaaccatt

SEQ ID NO: 5145094 - DNA, 25 bp, Homo sapien
ccatttagatgacaatcacaagact

SEQ ID NO: 5145095 - DNA, 25 bp, Homo sapien
tctgaggggtgtgtagcaggtgaga

SEQ ID NO: 5145096 - DNA, 25 bp, Homo sapien
ctgaggggtgtgtagcaggtgagaa

SEQ ID NO: 5145097 - DNA, 25 bp, Homo sapien
ctctgaggggtgtgtagcaggtgag

SEQ ID NO: 5145098 - DNA, 25 bp, Homo sapien
tgaggggtgtgtagcaggtgagaat

SEQ ID NO: 5145099 - DNA, 25 bp, Homo sapien
tagtcatatctctgttctggatcag

SEQ ID NO: 5145100 - DNA, 25 bp, Homo sapien
ggcccctgcgcatcgttgtctggat

SEQ ID NO: 5145101 - DNA, 25 bp, Homo sapien
ttcacactcaggaatgtcgcagtag

SEQ ID NO: 5145102 - DNA, 25 bp, Homo sapien
gatcagtagtataacaccagggccc

SEQ ID NO: 5145103 - DNA, 25 bp, Homo sapien
aacacgttacgcaattattaataat

SEQ ID NO: 5145104 - DNA, 25 bp, Homo sapien
tgggatctgagcaaagttttgctcc

SEQ ID NO: 5145105 - DNA, 25 bp, Homo sapien
tctgggatctgagcaaagttttgct

SEQ ID NO: 5145106 - DNA, 25 bp, Homo sapien
ggatctgagcaaagttttgctcctt

SEQ ID NO: 5145107 - DNA, 25 bp, Homo sapien
ttcacctgaagtgacggtgcttctc

SEQ ID NO: 5145108 - DNA, 25 bp, Homo sapien
cctgaagtgacggtgcttctctttt

SEQ ID NO: 5145109 - DNA, 25 bp, Homo sapien
aagtgacggtgcttctctttttatg

SEQ ID NO: 5145110 - DNA, 25 bp, Homo sapien
ggagaacaatattcacctgaagtga

SEQ ID NO: 5145111 - DNA, 25 bp, Homo sapien
tgccaagacaaattagctcttagag

SEQ ID NO: 5145112 - DNA, 25 bp, Homo sapien
taaagtcttacctactcttgaagag

SEQ ID NO: 5145113 - DNA, 25 bp, Homo sapien
gctcttagagaaccacaggattcct

SEQ ID NO: 5145114 - DNA, 25 bp, Homo sapien
tgtaatgtattacaaactaaagtct

SEQ ID NO: 5145115 - DNA, 25 bp, Homo sapien
aaaagtactactagaggctgggtgt

SEQ ID NO: 5145116 - DNA, 25 bp, Homo sapien
taaaagtactactagaggctgggtg

SEQ ID NO: 5145117 - DNA, 25 bp, Homo sapien
gttctgacctcagtgcatgacccat

SEQ ID NO: 5145118 - DNA, 25 bp, Homo sapien
tctgttccttgttctgacctcagtg

SEQ ID NO: 5145119 - DNA, 25 bp, Homo sapien
ttcttctgttccttgttctgacctc

SEQ ID NO: 5145120 - DNA, 25 bp, Homo sapien
cttgttctgacctcagtgcatgacc

SEQ ID NO: 5145121 - DNA, 25 bp, Homo sapien
cactgacgaataacttggggcatgt

SEQ ID NO: 5145122 - DNA, 25 bp, Homo sapien
gcctcactgacgaataacttggggc

SEQ ID NO: 5145123 - DNA, 25 bp, Homo sapien
tgacgaataacttggggcatgttct

SEQ ID NO: 5145124 - DNA, 25 bp, Homo sapien
cctcactgacgaataacttggggca

SEQ ID NO: 5145125 - DNA, 25 bp, Homo sapien
cctggataggactggacacagcagc

SEQ ID NO: 5145126 - DNA, 25 bp, Homo sapien
ccagaccaagagaggcatctagtga

SEQ ID NO: 5145127 - DNA, 25 bp, Homo sapien
caagagaggcatctagtgagaagca

SEQ ID NO: 5145128 - DNA, 25 bp, Homo sapien
gaagcagctcttcagccctgggcct

SEQ ID NO: 5145129 - DNA, 25 bp, Homo sapien
gtagaccgtagtacctgccatgtct

SEQ ID NO: 5145130 - DNA, 25 bp, Homo sapien
gaccgtagtacctgccatgtctgac

SEQ ID NO: 5145131 - DNA, 25 bp, Homo sapien
tagtacctgccatgtctgacaccct

SEQ ID NO: 5145132 - DNA, 25 bp, Homo sapien
cgtagtacctgccatgtctgacacc

SEQ ID NO: 5145133 - DNA, 25 bp, Homo sapien
tttactactggccttccatggttgg

SEQ ID NO: 5145134 - DNA, 25 bp, Homo sapien
agctcttttatgttacacactgtct

SEQ ID NO: 5145135 - DNA, 25 bp, Homo sapien
tatggcagctcttttatgttacaca

SEQ ID NO: 5145136 - DNA, 25 bp, Homo sapien
tactggccttccatggttggtccct

SEQ ID NO: 5145137 - DNA, 25 bp, Homo sapien
catcagaagggattttagacacctt

SEQ ID NO: 5145138 - DNA, 25 bp, Homo sapien
gcaagccatgaatctgttttgagaa

SEQ ID NO: 5145139 - DNA, 25 bp, Homo sapien
aggctcttgatagggtgtcactgca

SEQ ID NO: 5145140 - DNA, 25 bp, Homo sapien
caacagtgactatatcactcagcat

SEQ ID NO: 5145141 - DNA, 25 bp, Homo sapien
gcatgctgccagaataaaaccacca

SEQ ID NO: 5145142 - DNA, 25 bp, Homo sapien
tctcggcagtactgtgaattttgaa

SEQ ID NO: 5145143 - DNA, 25 bp, Homo sapien
aggacccgcccatttctcggcagta

SEQ ID NO: 5145144 - DNA, 25 bp, Homo sapien
aaaccaccaggaatgaattcactcc

SEQ ID NO: 5145145 - DNA, 25 bp, Homo sapien
caaaggtgaggaataaaatgcttcc

SEQ ID NO: 5145146 - DNA, 25 bp, Homo sapien
ccaaaggtgaggaataaaatgcttc

SEQ ID NO: 5145147 - DNA, 25 bp, Homo sapien
gggcatcctatcttcgtagttggtt

SEQ ID NO: 5145148 - DNA, 25 bp, Homo sapien
tgcttcccgttcttctggatgggca

SEQ ID NO: 5145149 - DNA, 25 bp, Homo sapien
ttttcaggtagagtattaacgtcaa

SEQ ID NO: 5145150 - DNA, 25 bp, Homo sapien
ctaaatcaggatgctaattctaatt

SEQ ID NO: 5145151 - DNA, 25 bp, Homo sapien
tatgctgttttaacctatagatagg

SEQ ID NO: 5145152 - DNA, 25 bp, Homo sapien
aatagattctgtgttcacttagggt

SEQ ID NO: 5145153 - DNA, 25 bp, Homo sapien
gaagtgtggctactagagtggaaca

SEQ ID NO: 5145154 - DNA, 25 bp, Homo sapien
tgaccagtaacacatcttagccatg

SEQ ID NO: 5145155 - DNA, 25 bp, Homo sapien
gtattcacatgtagtggcaacggca

SEQ ID NO: 5145156 - DNA, 25 bp, Homo sapien
taacagccagcattctacagcttgc

SEQ ID NO: 5145157 - DNA, 25 bp, Homo sapien
ccttttatgtacgacagacttctga

SEQ ID NO: 5145158 - DNA, 25 bp, Homo sapien
tagagccgagattcacactccagtg

SEQ ID NO: 5145159 - DNA, 25 bp, Homo sapien
tacagctagttattgatagagccga

SEQ ID NO: 5145160 - DNA, 25 bp, Homo sapien
cactccagtggtgtaactccaaagc

SEQ ID NO: 5145161 - DNA, 25 bp, Homo sapien
caaagacatggagctatacactgct

SEQ ID NO: 5145162 - DNA, 25 bp, Homo sapien
taatcatgcgtgttccttaaagttg

SEQ ID NO: 5145163 - DNA, 25 bp, Homo sapien
gctctcacagataagatatgacaga

SEQ ID NO: 5145164 - DNA, 25 bp, Homo sapien
tattcctgaacctattgatcctctg

SEQ ID NO: 5145165 - DNA, 25 bp, Homo sapien
taagttctgataattattcagcctg

SEQ ID NO: 5145166 - DNA, 25 bp, Homo sapien
tgaatgttacatattagctgagctg

SEQ ID NO: 5145167 - DNA, 25 bp, Homo sapien
tcaccattaggtgtagatggtcagc

SEQ ID NO: 5145168 - DNA, 25 bp, Homo sapien
gaacaaactgacactacagaagagg

SEQ ID NO: 5145169 - DNA, 25 bp, Homo sapien
gctctggtatgtaatgacaatatgt

SEQ ID NO: 5145170 - DNA, 25 bp, Homo sapien
tctggtatgtaatgacaatatgtga

SEQ ID NO: 5145171 - DNA, 25 bp, Homo sapien
atgtaatgacaatatgtgaacaaac

SEQ ID NO: 5145172 - DNA, 25 bp, Homo sapien
ggtatgtaatgacaatatgtgaaca

SEQ ID NO: 5145173 - DNA, 25 bp, Homo sapien
aaagtgatgtggaacgaggctccca

SEQ ID NO: 5145174 - DNA, 25 bp, Homo sapien
ggagaccagttagcctccaagtgag

SEQ ID NO: 5145175 - DNA, 25 bp, Homo sapien
tcaaagggaaggttagtgctatcag

SEQ ID NO: 5145176 - DNA, 25 bp, Homo sapien
tctgaacgacctgggaaggtacctg

SEQ ID NO: 5145177 - DNA, 25 bp, Homo sapien
cctagtcataaggactcaataaatc

SEQ ID NO: 5145178 - DNA, 25 bp, Homo sapien
tacaagtagtctgtagggtgaggca

SEQ ID NO: 5145179 - DNA, 25 bp, Homo sapien
caggatagggtttggataacaataa

SEQ ID NO: 5145180 - DNA, 25 bp, Homo sapien
gtatcttcatctcctagtcataagg

SEQ ID NO: 5145181 - DNA, 25 bp, Homo sapien
gttatttcatctagtgggtgcagca

SEQ ID NO: 5145182 - DNA, 25 bp, Homo sapien
tatttcatctagtgggtgcagcatg

SEQ ID NO: 5145183 - DNA, 25 bp, Homo sapien
ttatttcatctagtgggtgcagcat

SEQ ID NO: 5145184 - DNA, 25 bp, Homo sapien
cctaagagcttagagtttatcggag

SEQ ID NO: 5145185 - DNA, 25 bp, Homo sapien
cctctgcccattgctggtgacagca

SEQ ID NO: 5145186 - DNA, 25 bp, Homo sapien
gaaatggcatgtcccctgagatcta

SEQ ID NO: 5145187 - DNA, 25 bp, Homo sapien
gccgggcaaggacactgtcacattt

SEQ ID NO: 5145188 - DNA, 25 bp, Homo sapien
ttaagaatttcgaaggactgtgacg

SEQ ID NO: 5145189 - DNA, 25 bp, Homo sapien
gggccggctctatttgttgcgcgat

SEQ ID NO: 5145190 - DNA, 25 bp, Homo sapien
atttgttgcgcgatccagccctggt

SEQ ID NO: 5145191 - DNA, 25 bp, Homo sapien
aggactgtgacgatcaccggctgcg

SEQ ID NO: 5145192 - DNA, 25 bp, Homo sapien
tggccccgggggctcggcggagaca

SEQ ID NO: 5145193 - DNA, 25 bp, Homo sapien
ccgggggctcggcggagacagtcgc

SEQ ID NO: 5145194 - DNA, 25 bp, Homo sapien
cccgggggctcggcggagacagtcg

SEQ ID NO: 5145195 - DNA, 25 bp, Homo sapien
ccaggaggagccacagccgcggccg

SEQ ID NO: 5145196 - DNA, 25 bp, Homo sapien
ctgtcagctgcgcggccaggaggag

SEQ ID NO: 5145197 - DNA, 25 bp, Homo sapien
ggaggagccacagccgcggccgcat

SEQ ID NO: 5145198 - DNA, 25 bp, Homo sapien
tgtcagctgcgcggccaggaggagc

SEQ ID NO: 5145199 - DNA, 25 bp, Homo sapien
tttccgggtgtgtggaggcttcttc

SEQ ID NO: 5145200 - DNA, 25 bp, Homo sapien
actcagaaggacaatccagatgccc

SEQ ID NO: 5145201 - DNA, 25 bp, Homo sapien
cagctttgggctttttgggcacgag

SEQ ID NO: 5145202 - DNA, 25 bp, Homo sapien
gcaaatcgacaagtttgggcagttt

SEQ ID NO: 5145203 - DNA, 25 bp, Homo sapien
tgctttttgtcccctaggaactgaa

SEQ ID NO: 5145204 - DNA, 25 bp, Homo sapien
cggctcttcccgggacccacttgct

SEQ ID NO: 5145205 - DNA, 25 bp, Homo sapien
gaactgaatactccgggctgtggcc

SEQ ID NO: 5145206 - DNA, 25 bp, Homo sapien
taggaactgaatactccgggctgtg

SEQ ID NO: 5145207 - DNA, 25 bp, Homo sapien
gagattttagcctcgcaggacagca

SEQ ID NO: 5145208 - DNA, 25 bp, Homo sapien
ggctcccgacgatcatgcagaagta

SEQ ID NO: 5145209 - DNA, 25 bp, Homo sapien
agaatgaaccggcttgcatcccgaa

SEQ ID NO: 5145210 - DNA, 25 bp, Homo sapien
gatagtcccttttgcggaatcccag

SEQ ID NO: 5145211 - DNA, 25 bp, Homo sapien
gagagaacacgatctgtttgtctgc

SEQ ID NO: 5145212 - DNA, 25 bp, Homo sapien
aagcggagagaacacgatctgtttg

SEQ ID NO: 5145213 - DNA, 25 bp, Homo sapien
ctgtttgtctgcttcaagacattga

SEQ ID NO: 5145214 - DNA, 25 bp, Homo sapien
tgtttgtctgcttcaagacattgat

SEQ ID NO: 5145215 - DNA, 25 bp, Homo sapien
tgggtaaccggcacactctcttctt

SEQ ID NO: 5145216 - DNA, 25 bp, Homo sapien
ctgtctcccacgagactgtgagttg

SEQ ID NO: 5145217 - DNA, 25 bp, Homo sapien
cccacgagactgtgagttgctatca

SEQ ID NO: 5145218 - DNA, 25 bp, Homo sapien
tgagttgctatcacactcagcatcc

SEQ ID NO: 5145219 - DNA, 25 bp, Homo sapien
tcctttctgaccctagcttgggctg

SEQ ID NO: 5145220 - DNA, 25 bp, Homo sapien
ttaagctttgtccagtaacaattta

SEQ ID NO: 5145221 - DNA, 25 bp, Homo sapien
ttaggaacagccctaagcctcaggg

SEQ ID NO: 5145222 - DNA, 25 bp, Homo sapien
cagcacctaagggtgttgtcttagg

SEQ ID NO: 5145223 - DNA, 25 bp, Homo sapien
cctgagtccatggtttagaaatggt

SEQ ID NO: 5145224 - DNA, 25 bp, Homo sapien
cagggacagtgccttctcagtgacc

SEQ ID NO: 5145225 - DNA, 25 bp, Homo sapien
agcagaaccaggacgccagccacca

SEQ ID NO: 5145226 - DNA, 25 bp, Homo sapien
cagcagaaccaggacgccagccacc

SEQ ID NO: 5145227 - DNA, 25 bp, Homo sapien
ccagcagaaccaggacgccagccac

SEQ ID NO: 5145228 - DNA, 25 bp, Homo sapien
gcagaaccaggacgccagccaccag

SEQ ID NO: 5145229 - DNA, 25 bp, Homo sapien
ccggaaataccgcaggttctctgag

SEQ ID NO: 5145230 - DNA, 25 bp, Homo sapien
aataccgcaggttctctgaggcaaa

SEQ ID NO: 5145231 - DNA, 25 bp, Homo sapien
gaaataccgcaggttctctgaggca

SEQ ID NO: 5145232 - DNA, 25 bp, Homo sapien
ctccggaaataccgcaggttctctg

SEQ ID NO: 5145233 - DNA, 25 bp, Homo sapien
catgaaacgaagccgggctctcctc

SEQ ID NO: 5145234 - DNA, 25 bp, Homo sapien
ttcatgaaacgaagccgggctctcc

SEQ ID NO: 5145235 - DNA, 25 bp, Homo sapien
tgtttcatgaaacgaagccgggctc

SEQ ID NO: 5145236 - DNA, 25 bp, Homo sapien
gtttcatgaaacgaagccgggctct

SEQ ID NO: 5145237 - DNA, 25 bp, Homo sapien
tttcaggcaaacgatattgaatttc

SEQ ID NO: 5145238 - DNA, 25 bp, Homo sapien
tttgtagcaggacaccaaaaccgta

SEQ ID NO: 5145239 - DNA, 25 bp, Homo sapien
tagcaggacaccaaaaccgtattct

SEQ ID NO: 5145240 - DNA, 25 bp, Homo sapien
caacagcaagttgtgaaaccactta

SEQ ID NO: 5145241 - DNA, 25 bp, Homo sapien
tcagcagccattgaactctccaggg

SEQ ID NO: 5145242 - DNA, 25 bp, Homo sapien
cagcagccattgaactctccagggt

SEQ ID NO: 5145243 - DNA, 25 bp, Homo sapien
agcagccattgaactctccagggtt

SEQ ID NO: 5145244 - DNA, 25 bp, Homo sapien
ttgcagcagtgaaaagcaggcagct

SEQ ID NO: 5145245 - DNA, 25 bp, Homo sapien
gtcacacacagaaaggccttgcagc

SEQ ID NO: 5145246 - DNA, 25 bp, Homo sapien
acgtcacacacagaaaggccttgca

SEQ ID NO: 5145247 - DNA, 25 bp, Homo sapien
acagaaaggccttgcagcagtgaaa

SEQ ID NO: 5145248 - DNA, 25 bp, Homo sapien
gaaagaagcattaagccatgggaga

SEQ ID NO: 5145249 - DNA, 25 bp, Homo sapien
agcacactctgtgaagtgccctggg

SEQ ID NO: 5145250 - DNA, 25 bp, Homo sapien
catgggcagcatttcttactcagtc

SEQ ID NO: 5145251 - DNA, 25 bp, Homo sapien
gacccaatgttactgccctaccagg

SEQ ID NO: 5145252 - DNA, 25 bp, Homo sapien
ctgcggttcaacccgcggtagaaat

SEQ ID NO: 5145253 - DNA, 25 bp, Homo sapien
cccgcggtagaaatgaacacgtgct

SEQ ID NO: 5145254 - DNA, 25 bp, Homo sapien
gaacacgtgctagttcagcttggga

SEQ ID NO: 5145255 - DNA, 25 bp, Homo sapien
cacgtgctagttcagcttgggagtg

SEQ ID NO: 5145256 - DNA, 25 bp, Homo sapien
cttctgtttggtgcctgacttgaag

SEQ ID NO: 5145257 - DNA, 25 bp, Homo sapien
tttggtgcctgacttgaagccaggg

SEQ ID NO: 5145258 - DNA, 25 bp, Homo sapien
tggtgcctgacttgaagccagggat

SEQ ID NO: 5145259 - DNA, 25 bp, Homo sapien
gtgcctgacttgaagccagggatcc

SEQ ID NO: 5145260 - DNA, 25 bp, Homo sapien
ctccaactgtcaaggctaagaatca

SEQ ID NO: 5145261 - DNA, 25 bp, Homo sapien
atgaagagacatgtgacagaacccc

SEQ ID NO: 5145262 - DNA, 25 bp, Homo sapien
gacatgtgacagaacccctcatgcc

SEQ ID NO: 5145263 - DNA, 25 bp, Homo sapien
ctgtcaaggctaagaatcaataaga

SEQ ID NO: 5145264 - DNA, 25 bp, Homo sapien
gaagtggaaattccccagagtcact

SEQ ID NO: 5145265 - DNA, 25 bp, Homo sapien
cacaaggaactgtacaaagcagaag

SEQ ID NO: 5145266 - DNA, 25 bp, Homo sapien
caaacaaatatacccggaggccttg

SEQ ID NO: 5145267 - DNA, 25 bp, Homo sapien
cagagtcactgcaattaacagctga

SEQ ID NO: 5145268 - DNA, 25 bp, Homo sapien
gtagattcggatcagctttgcagcc

SEQ ID NO: 5145269 - DNA, 25 bp, Homo sapien
ttccccgggagtgtcagtgacgcat

SEQ ID NO: 5145270 - DNA, 25 bp, Homo sapien
tcagtgacgcatcgaaggaggtttc

SEQ ID NO: 5145271 - DNA, 25 bp, Homo sapien
caagaagcgacagaggaaatatctt

SEQ ID NO: 5145272 - DNA, 25 bp, Homo sapien
ggatgatgaagtgctcttgagacca

SEQ ID NO: 5145273 - DNA, 25 bp, Homo sapien
taaaaataacaatgcgcagcagccg

SEQ ID NO: 5145274 - DNA, 25 bp, Homo sapien
gcagccggaaattccactcagagcc

SEQ ID NO: 5145275 - DNA, 25 bp, Homo sapien
caagggatgatgaagtgctcttgag

SEQ ID NO: 5145276 - DNA, 25 bp, Homo sapien
gcttcctcgggcattccacaaggag

SEQ ID NO: 5145277 - DNA, 25 bp, Homo sapien
tgaagggcacttatagaaccaagct

SEQ ID NO: 5145278 - DNA, 25 bp, Homo sapien
ccacaaggagctacaatctggtgtt

SEQ ID NO: 5145279 - DNA, 25 bp, Homo sapien
gaaatcgaccgccacttcagtaaga

SEQ ID NO: 5145280 - DNA, 25 bp, Homo sapien
tgggcacacccagatgcgtgcaaac

SEQ ID NO: 5145281 - DNA, 25 bp, Homo sapien
ttgagcactgaaggtccgcaggcct

SEQ ID NO: 5145282 - DNA, 25 bp, Homo sapien
cccagatgcgtgcaaacactttgag

SEQ ID NO: 5145283 - DNA, 25 bp, Homo sapien
actgagcatttgagactcctctggg

SEQ ID NO: 5145284 - DNA, 25 bp, Homo sapien
taacagagcctataacgagtggcaa

SEQ ID NO: 5145285 - DNA, 25 bp, Homo sapien
ggcggtcgggatacaaagagaaaca

SEQ ID NO: 5145286 - DNA, 25 bp, Homo sapien
cgagtggcaatcatgactaaatact

SEQ ID NO: 5145287 - DNA, 25 bp, Homo sapien
gcctcacttgcaggactttgtagct

SEQ ID NO: 5145288 - DNA, 25 bp, Homo sapien
gctagacacgcatgcagtctgagca

SEQ ID NO: 5145289 - DNA, 25 bp, Homo sapien
gtctgagcacctgttcaaccatact

SEQ ID NO: 5145290 - DNA, 25 bp, Homo sapien
ttgaccaaagcggatcaggcagtcc

SEQ ID NO: 5145291 - DNA, 25 bp, Homo sapien
caccaagtcctgcaattattgatga

SEQ ID NO: 5145292 - DNA, 25 bp, Homo sapien
tgggaggtgctccttgacgtctcac

SEQ ID NO: 5145293 - DNA, 25 bp, Homo sapien
gaggatggcatagcaaaccctgtga

SEQ ID NO: 5145294 - DNA, 25 bp, Homo sapien
catatcagtgaaaggagacggtggc

SEQ ID NO: 5145295 - DNA, 25 bp, Homo sapien
tacagaggtggttacgtcctgcaga

SEQ ID NO: 5145296 - DNA, 25 bp, Homo sapien
gggaacctgaggtacagcagtcaca

SEQ ID NO: 5145297 - DNA, 25 bp, Homo sapien
gagggaacctgaggtacagcagtca

SEQ ID NO: 5145298 - DNA, 25 bp, Homo sapien
aacctgaggtacagcagtcacagga

SEQ ID NO: 5145299 - DNA, 25 bp, Homo sapien
aaaggagggaacctgaggtacagca

SEQ ID NO: 5145300 - DNA, 25 bp, Homo sapien
ttcacaggcggcataggatttcccc

SEQ ID NO: 5145301 - DNA, 25 bp, Homo sapien
tttagacaagaaacgaacataatgg

SEQ ID NO: 5145302 - DNA, 25 bp, Homo sapien
aggatttccccactcgctgcgcata

SEQ ID NO: 5145303 - DNA, 25 bp, Homo sapien
aacataatgggaaggttcacaggcg

SEQ ID NO: 5145304 - DNA, 25 bp, Homo sapien
gttccacaagcatcagggcaaaagg

SEQ ID NO: 5145305 - DNA, 25 bp, Homo sapien
aggcagatacataagcaagatgctt

SEQ ID NO: 5145306 - DNA, 25 bp, Homo sapien
gtggttccacaagcatcagggcaaa

SEQ ID NO: 5145307 - DNA, 25 bp, Homo sapien
ggcagatacataagcaagatgcttt

SEQ ID NO: 5145308 - DNA, 25 bp, Homo sapien
tcacaagactcatggctaaggccga

SEQ ID NO: 5145309 - DNA, 25 bp, Homo sapien
tgtactcctaaagcatccacatgga

SEQ ID NO: 5145310 - DNA, 25 bp, Homo sapien
taaggccgatgccaatggaaaggaa

SEQ ID NO: 5145311 - DNA, 25 bp, Homo sapien
atggatgcattgtgggtcctgtctg

SEQ ID NO: 5145312 - DNA, 25 bp, Homo sapien
aaggcaaggttcatgtcttcaatga

SEQ ID NO: 5145313 - DNA, 25 bp, Homo sapien
taatgatgaagacaccagcacacat

SEQ ID NO: 5145314 - DNA, 25 bp, Homo sapien
caggtagcaacctctccatgcagca

SEQ ID NO: 5145315 - DNA, 25 bp, Homo sapien
tatatccaaaccagcctttgaagcc

SEQ ID NO: 5145316 - DNA, 25 bp, Homo sapien
ccagagatccttccataacaaggga

SEQ ID NO: 5145317 - DNA, 25 bp, Homo sapien
gagatccttccataacaagggatct

SEQ ID NO: 5145318 - DNA, 25 bp, Homo sapien
gatccttccataacaagggatctca

SEQ ID NO: 5145319 - DNA, 25 bp, Homo sapien
cttggttaccgtccccagagatcct

SEQ ID NO: 5145320 - DNA, 25 bp, Homo sapien
gggaagggtgccagctctgcttttt

SEQ ID NO: 5145321 - DNA, 25 bp, Homo sapien
gagaggctttctgggggaagggtgc

SEQ ID NO: 5145322 - DNA, 25 bp, Homo sapien
gagtcacaggcagtgagccagccat

SEQ ID NO: 5145323 - DNA, 25 bp, Homo sapien
ttccacaggaagagtcacaggcagt

SEQ ID NO: 5145324 - DNA, 25 bp, Homo sapien
agtgaaaagacaccagttcatctgg

SEQ ID NO: 5145325 - DNA, 25 bp, Homo sapien
agcttctgggaaggcgataattttc

SEQ ID NO: 5145326 - DNA, 25 bp, Homo sapien
tcatcgtgtgcttggaggtggtacc

SEQ ID NO: 5145327 - DNA, 25 bp, Homo sapien
tacagcttgcttaatgagatatcag

SEQ ID NO: 5145328 - DNA, 25 bp, Homo sapien
ttgttccacattgaaaacgtcctat

SEQ ID NO: 5145329 - DNA, 25 bp, Homo sapien
tccacattgaaaacgtcctattatt

SEQ ID NO: 5145330 - DNA, 25 bp, Homo sapien
cattgaaaacgtcctattatttcct

SEQ ID NO: 5145331 - DNA, 25 bp, Homo sapien
gttccacattgaaaacgtcctatta

SEQ ID NO: 5145332 - DNA, 25 bp, Homo sapien
atcttcccactgaacccggttctag

SEQ ID NO: 5145333 - DNA, 25 bp, Homo sapien
tgtgaagccccattttggtttggca

SEQ ID NO: 5145334 - DNA, 25 bp, Homo sapien
tgtccagccaccaagcattctgaac

SEQ ID NO: 5145335 - DNA, 25 bp, Homo sapien
gtttggcagttctaggctggagttt

SEQ ID NO: 5145336 - DNA, 25 bp, Homo sapien
ggctctggactgcatcctaccacca

SEQ ID NO: 5145337 - DNA, 25 bp, Homo sapien
tctggactgcatcctaccaccaact

SEQ ID NO: 5145338 - DNA, 25 bp, Homo sapien
ctggactgcatcctaccaccaactc

SEQ ID NO: 5145339 - DNA, 25 bp, Homo sapien
ctctggactgcatcctaccaccaac

SEQ ID NO: 5145340 - DNA, 25 bp, Homo sapien
gaagactgttcatccttgctggtca

SEQ ID NO: 5145341 - DNA, 25 bp, Homo sapien
cctgtgaagactgttcatccttgct

SEQ ID NO: 5145342 - DNA, 25 bp, Homo sapien
aaacctgtgaagactgttcatcctt

SEQ ID NO: 5145343 - DNA, 25 bp, Homo sapien
tgtgaagactgttcatccttgctgg

SEQ ID NO: 5145344 - DNA, 25 bp, Homo sapien
ggcaaaacgtgacatcccaaaccat

SEQ ID NO: 5145345 - DNA, 25 bp, Homo sapien
cgctctccgggaaaatgaaatagca

SEQ ID NO: 5145346 - DNA, 25 bp, Homo sapien
aacatccgagtcaaacgctctccgg

SEQ ID NO: 5145347 - DNA, 25 bp, Homo sapien
gaaatagcaacaggcaaaacgtgac

SEQ ID NO: 5145348 - DNA, 25 bp, Homo sapien
tccaggggctgaagccctggccccc

SEQ ID NO: 5145349 - DNA, 25 bp, Homo sapien
gtccaggggctgaagccctggcccc

SEQ ID NO: 5145350 - DNA, 25 bp, Homo sapien
gccctggcccccaagcctccttcat

SEQ ID NO: 5145351 - DNA, 25 bp, Homo sapien
ctgaagccctggcccccaagcctcc

SEQ ID NO: 5145352 - DNA, 25 bp, Homo sapien
ttcacattctaccatgtgcctgtct

SEQ ID NO: 5145353 - DNA, 25 bp, Homo sapien
tcacattctaccatgtgcctgtctc

SEQ ID NO: 5145354 - DNA, 25 bp, Homo sapien
ttcccacattcagtgtacttcccac

SEQ ID NO: 5145355 - DNA, 25 bp, Homo sapien
cccacattcagtgtacttcccacat

SEQ ID NO: 5145356 - DNA, 25 bp, Homo sapien
atatcaaggccattcctttttgttg

SEQ ID NO: 5145357 - DNA, 25 bp, Homo sapien
tgagcccagaaatccaaggctttag

SEQ ID NO: 5145358 - DNA, 25 bp, Homo sapien
cttgagcccagaaatccaaggcttt

SEQ ID NO: 5145359 - DNA, 25 bp, Homo sapien
agcccagaaatccaaggctttagtg

SEQ ID NO: 5145360 - DNA, 25 bp, Homo sapien
cccagaaatccaaggctttagtgag

SEQ ID NO: 5145361 - DNA, 25 bp, Homo sapien
ggactcaaatcctgctttttgggtg

SEQ ID NO: 5145362 - DNA, 25 bp, Homo sapien
gtgagcctctgagacagctgagatg

SEQ ID NO: 5145363 - DNA, 25 bp, Homo sapien
agatgtgagccctgatgaaatctgc

SEQ ID NO: 5145364 - DNA, 25 bp, Homo sapien
gctcagctcggtccggctgcctggt

SEQ ID NO: 5145365 - DNA, 25 bp, Homo sapien
ccaaggctggagtaatctgatgctc

SEQ ID NO: 5145366 - DNA, 25 bp, Homo sapien
aaggctggagtaatctgatgctctt

SEQ ID NO: 5145367 - DNA, 25 bp, Homo sapien
aggctggagtaatctgatgctctta

SEQ ID NO: 5145368 - DNA, 25 bp, Homo sapien
caaggctggagtaatctgatgctct

SEQ ID NO: 5145369 - DNA, 25 bp, Homo sapien
gagagcctcatcccaccaccttgtt

SEQ ID NO: 5145370 - DNA, 25 bp, Homo sapien
ttcttcaagcttcacttttatcttc

SEQ ID NO: 5145371 - DNA, 25 bp, Homo sapien
tcacttttatcttcagggtacattc

SEQ ID NO: 5145372 - DNA, 25 bp, Homo sapien
gcctcatcccaccaccttgttcctt

SEQ ID NO: 5145373 - DNA, 25 bp, Homo sapien
gggacatattcgaactccttcaatt

SEQ ID NO: 5145374 - DNA, 25 bp, Homo sapien
tcccagaacttctgtgactccttca

SEQ ID NO: 5145375 - DNA, 25 bp, Homo sapien
tgggaaccagatatctccaggtcct

SEQ ID NO: 5145376 - DNA, 25 bp, Homo sapien
caggtcctctgaagtacccttgtgg

SEQ ID NO: 5145377 - DNA, 25 bp, Homo sapien
tgacgagaacaactggccagctgct

SEQ ID NO: 5145378 - DNA, 25 bp, Homo sapien
cttcctattagtggaatactgcttc

SEQ ID NO: 5145379 - DNA, 25 bp, Homo sapien
ggagcaaggaagtgacgagaacaac

SEQ ID NO: 5145380 - DNA, 25 bp, Homo sapien
cagggagcaaggaagtgacgagaac

SEQ ID NO: 5145381 - DNA, 25 bp, Homo sapien
tgcccttcctgtcttgtggttctat

SEQ ID NO: 5145382 - DNA, 25 bp, Homo sapien
ttggccatttgtgaaccttgggcag

SEQ ID NO: 5145383 - DNA, 25 bp, Homo sapien
atttgtgaaccttgggcagttatcc

SEQ ID NO: 5145384 - DNA, 25 bp, Homo sapien
ggcagttatccctgtcatcttgaag

SEQ ID NO: 5145385 - DNA, 25 bp, Homo sapien
tagaggactaggagacaatatgaca

SEQ ID NO: 5145386 - DNA, 25 bp, Homo sapien
tagtgttatacacagccatttgatg

SEQ ID NO: 5145387 - DNA, 25 bp, Homo sapien
tgaaaacacatatgaaggagcactt

SEQ ID NO: 5145388 - DNA, 25 bp, Homo sapien
gagcacttgaggtccacaggtatgt

SEQ ID NO: 5145389 - DNA, 25 bp, Homo sapien
tacattgcagagttccatgctgcta

SEQ ID NO: 5145390 - DNA, 25 bp, Homo sapien
gaattggtacattgcagagttccat

SEQ ID NO: 5145391 - DNA, 25 bp, Homo sapien
tctaattatagtgggaatagaggag

SEQ ID NO: 5145392 - DNA, 25 bp, Homo sapien
tgaaaaatttctaattatagtggga

SEQ ID NO: 5145393 - DNA, 25 bp, Homo sapien
acacggatgatttcatataagaaac

SEQ ID NO: 5145394 - DNA, 25 bp, Homo sapien
acctctgaagaacacggatgatttc

SEQ ID NO: 5145395 - DNA, 25 bp, Homo sapien
gaacacggatgatttcatataagaa

SEQ ID NO: 5145396 - DNA, 25 bp, Homo sapien
ctgaagaacacggatgatttcatat

SEQ ID NO: 5145397 - DNA, 25 bp, Homo sapien
cttgaaagcctctgcgcagattttc

SEQ ID NO: 5145398 - DNA, 25 bp, Homo sapien
tccttgaaagcctctgcgcagattt

SEQ ID NO: 5145399 - DNA, 25 bp, Homo sapien
ttccttgaaagcctctgcgcagatt

SEQ ID NO: 5145400 - DNA, 25 bp, Homo sapien
tttccttgaaagcctctgcgcagat

SEQ ID NO: 5145401 - DNA, 25 bp, Homo sapien
acaccagagagagctgaactagact

SEQ ID NO: 5145402 - DNA, 25 bp, Homo sapien
agagagagctgaactagactcttac

SEQ ID NO: 5145403 - DNA, 25 bp, Homo sapien
ccagagagagctgaactagactctt

SEQ ID NO: 5145404 - DNA, 25 bp, Homo sapien
tcacaccagagagagctgaactaga

SEQ ID NO: 5145405 - DNA, 25 bp, Homo sapien
catgatcttcagtgtgtgtaaaaga

SEQ ID NO: 5145406 - DNA, 25 bp, Homo sapien
ttcttcacatgatcttcagtgtgtg

SEQ ID NO: 5145407 - DNA, 25 bp, Homo sapien
ggtcgtttaacttggtgtatagatg

SEQ ID NO: 5145408 - DNA, 25 bp, Homo sapien
cttctgagggtcgtttaacttggtg

SEQ ID NO: 5145409 - DNA, 25 bp, Homo sapien
tccctcctcagataccttacaggag

SEQ ID NO: 5145410 - DNA, 25 bp, Homo sapien
cttacaggagaccccaagtgtacaa

SEQ ID NO: 5145411 - DNA, 25 bp, Homo sapien
ggagaccccaagtgtacaatctgcc

SEQ ID NO: 5145412 - DNA, 25 bp, Homo sapien
ttccctcctcagataccttacagga

SEQ ID NO: 5145413 - DNA, 25 bp, Homo sapien
ggcttgtaaccactacccatgcctt

SEQ ID NO: 5145414 - DNA, 25 bp, Homo sapien
gcttgtaaccactacccatgccttg

SEQ ID NO: 5145415 - DNA, 25 bp, Homo sapien
aggcttgtaaccactacccatgcct

SEQ ID NO: 5145416 - DNA, 25 bp, Homo sapien
ttgtaaccactacccatgccttgcc

SEQ ID NO: 5145417 - DNA, 25 bp, Homo sapien
gggatgtttaccacccatgacatgt

SEQ ID NO: 5145418 - DNA, 25 bp, Homo sapien
tggagaccttattgccagtggaaaa

SEQ ID NO: 5145419 - DNA, 25 bp, Homo sapien
caaatatgaacgtagtggagacctt

SEQ ID NO: 5145420 - DNA, 25 bp, Homo sapien
gaaccaagtgcctatagaaggccaa

SEQ ID NO: 5145421 - DNA, 25 bp, Homo sapien
gagccctcagttcttccgttgcaag

SEQ ID NO: 5145422 - DNA, 25 bp, Homo sapien
ccatgactttatccaaattgggagc

SEQ ID NO: 5145423 - DNA, 25 bp, Homo sapien
gaaaagagacatgcgtcaggacgga

SEQ ID NO: 5145424 - DNA, 25 bp, Homo sapien
gagcagctcaccacacttgagtgtg

SEQ ID NO: 5145425 - DNA, 25 bp, Homo sapien
ttccagcagacctcgaggtagagcc

SEQ ID NO: 5145426 - DNA, 25 bp, Homo sapien
gagccagagtggctcccttccagca

SEQ ID NO: 5145427 - DNA, 25 bp, Homo sapien
tggcactggccatcgcctgggttcc

SEQ ID NO: 5145428 - DNA, 25 bp, Homo sapien
tcacatgtccaacaggtggcactgg

SEQ ID NO: 5145429 - DNA, 25 bp, Homo sapien
ttttatcctagtcagaagcctgatt

SEQ ID NO: 5145430 - DNA, 25 bp, Homo sapien
ggcactatgaaggtagaacactacc

SEQ ID NO: 5145431 - DNA, 25 bp, Homo sapien
tgttatatgtccttctgttaaaaga

SEQ ID NO: 5145432 - DNA, 25 bp, Homo sapien
gcttagctgtagctcatggctttca

SEQ ID NO: 5145433 - DNA, 25 bp, Homo sapien
gatcctgcaggtgtactttattctt

SEQ ID NO: 5145434 - DNA, 25 bp, Homo sapien
taagagaccctgatgcattccttgg

SEQ ID NO: 5145435 - DNA, 25 bp, Homo sapien
caaatagctcttaggtttgtccttt

SEQ ID NO: 5145436 - DNA, 25 bp, Homo sapien
ggaatttctgcctgattgtatttga

SEQ ID NO: 5145437 - DNA, 25 bp, Homo sapien
gattcaggctggataatgtgtttcc

SEQ ID NO: 5145438 - DNA, 25 bp, Homo sapien
gattggttggatgattctggctcac

SEQ ID NO: 5145439 - DNA, 25 bp, Homo sapien
tgcatagctgagcacaagagacctt

SEQ ID NO: 5145440 - DNA, 25 bp, Homo sapien
tccatgggtcagtaatctgggagaa

SEQ ID NO: 5145441 - DNA, 25 bp, Homo sapien
tggcttgaaatcactgattctcctc

SEQ ID NO: 5145442 - DNA, 25 bp, Homo sapien
gcttgaaatcactgattctcctcca

SEQ ID NO: 5145443 - DNA, 25 bp, Homo sapien
cactggcttgaaatcactgattctc

SEQ ID NO: 5145444 - DNA, 25 bp, Homo sapien
cttgaaatcactgattctcctccat

SEQ ID NO: 5145445 - DNA, 25 bp, Homo sapien
ccatcaggactgaagcgaatttaca

SEQ ID NO: 5145446 - DNA, 25 bp, Homo sapien
tcccaatggcaggtatacatcttcc

SEQ ID NO: 5145447 - DNA, 25 bp, Homo sapien
cacctaacctttcaagtcccaatgg

SEQ ID NO: 5145448 - DNA, 25 bp, Homo sapien
tcttccatcttcttagtattagcca

SEQ ID NO: 5145449 - DNA, 25 bp, Homo sapien
tcctctgaatgggtgcccctaagca

SEQ ID NO: 5145450 - DNA, 25 bp, Homo sapien
tgtgttaccagatcagcaagaattg

SEQ ID NO: 5145451 - DNA, 25 bp, Homo sapien
ccgtcctcagaggtagctactaggt

SEQ ID NO: 5145452 - DNA, 25 bp, Homo sapien
cacaggaagtttacccacagagatg

SEQ ID NO: 5145453 - DNA, 25 bp, Homo sapien
gatccgtgtctctcagtggactggg

SEQ ID NO: 5145454 - DNA, 25 bp, Homo sapien
catgatccgtgtctctcagtggact

SEQ ID NO: 5145455 - DNA, 25 bp, Homo sapien
accatgatccgtgtctctcagtgga

SEQ ID NO: 5145456 - DNA, 25 bp, Homo sapien
tctcagtggactggggactcctttt

SEQ ID NO: 5145457 - DNA, 25 bp, Homo sapien
tctgcatctgccaaggtgatttttg

SEQ ID NO: 5145458 - DNA, 25 bp, Homo sapien
gcacctctgcatctgccaaggtgat

SEQ ID NO: 5145459 - DNA, 25 bp, Homo sapien
acctctgcatctgccaaggtgattt

SEQ ID NO: 5145460 - DNA, 25 bp, Homo sapien
catctgccaaggtgatttttgtgta

SEQ ID NO: 5145461 - DNA, 25 bp, Homo sapien
gcattgttcttgagtgtcaccccac

SEQ ID NO: 5145462 - DNA, 25 bp, Homo sapien
tgtcagcagcgaggcattgttcttg

SEQ ID NO: 5145463 - DNA, 25 bp, Homo sapien
tattcttgtcagcagcgaggcattg

SEQ ID NO: 5145464 - DNA, 25 bp, Homo sapien
tgtgtaggttattcttgtcagcagc

SEQ ID NO: 5145465 - DNA, 25 bp, Homo sapien
ctaagtgtgttagactgtaaaactg

SEQ ID NO: 5145466 - DNA, 25 bp, Homo sapien
gcctcctaagtgtgttagactgtaa

SEQ ID NO: 5145467 - DNA, 25 bp, Homo sapien
catttggcgggggtgcctcctaagt

SEQ ID NO: 5145468 - DNA, 25 bp, Homo sapien
gggtgcctcctaagtgtgttagact

SEQ ID NO: 5145469 - DNA, 25 bp, Homo sapien
cctagcagaactgatgcacatgtac

SEQ ID NO: 5145470 - DNA, 25 bp, Homo sapien
gaactgatgcacatgtacagcacgt

SEQ ID NO: 5145471 - DNA, 25 bp, Homo sapien
gcacgtcagtatcacgtagacacat

SEQ ID NO: 5145472 - DNA, 25 bp, Homo sapien
tgctgaccgggtgttttcatgtgtt

SEQ ID NO: 5145473 - DNA, 25 bp, Homo sapien
ctggcacagagtgaatacttgttca

SEQ ID NO: 5145474 - DNA, 25 bp, Homo sapien
ttgttcaatgaatggagaaagcaca

SEQ ID NO: 5145475 - DNA, 25 bp, Homo sapien
cttgttcaatgaatggagaaagcac

SEQ ID NO: 5145476 - DNA, 25 bp, Homo sapien
gcacagagtgaatacttgttcaatg

SEQ ID NO: 5145477 - DNA, 25 bp, Homo sapien
tgaggttcttagaaatgacttcgcc

SEQ ID NO: 5145478 - DNA, 25 bp, Homo sapien
aatgacttcgcctttgttgtctcca

SEQ ID NO: 5145479 - DNA, 25 bp, Homo sapien
aatcataggctttgccgatgcacca

SEQ ID NO: 5145480 - DNA, 25 bp, Homo sapien
caccgggtaacagagttagatgtcc

SEQ ID NO: 5145481 - DNA, 25 bp, Homo sapien
catgtttgaagcactgctagaggct

SEQ ID NO: 5145482 - DNA, 25 bp, Homo sapien
gaggcttccggtgcagcgatctttg

SEQ ID NO: 5145483 - DNA, 25 bp, Homo sapien
catctctgtctctgataacggcagt

SEQ ID NO: 5145484 - DNA, 25 bp, Homo sapien
taacggcagttctaagtattagcag

SEQ ID NO: 5145485 - DNA, 25 bp, Homo sapien
cctgagtttaaagggcggtcgatat

SEQ ID NO: 5145486 - DNA, 25 bp, Homo sapien
ttgccccatttccaaattgcgggct

SEQ ID NO: 5145487 - DNA, 25 bp, Homo sapien
tcctaggatgggagcagttatccct

SEQ ID NO: 5145488 - DNA, 25 bp, Homo sapien
caaattgcgggcttcctaggatggg

SEQ ID NO: 5145489 - DNA, 25 bp, Homo sapien
tcatgttctcaaaggtctgactgac

SEQ ID NO: 5145490 - DNA, 25 bp, Homo sapien
tttgtaaacagtcagcccatgccct

SEQ ID NO: 5145491 - DNA, 25 bp, Homo sapien
gagggggcgtctgcactttgtaaac

SEQ ID NO: 5145492 - DNA, 25 bp, Homo sapien
gcactttgtaaacagtcagcccatg

SEQ ID NO: 5145493 - DNA, 25 bp, Homo sapien
ctgtgtgtatcagatgcatggccac

SEQ ID NO: 5145494 - DNA, 25 bp, Homo sapien
cctcattctgccatcgctccctgca

SEQ ID NO: 5145495 - DNA, 25 bp, Homo sapien
gatgcatggccacaacctcattctg

SEQ ID NO: 5145496 - DNA, 25 bp, Homo sapien
tggatgaccaaatgggtgggacccc

SEQ ID NO: 5145497 - DNA, 25 bp, Homo sapien
tacagagccagatgtaaatggtacc

SEQ ID NO: 5145498 - DNA, 25 bp, Homo sapien
gcttgtctataatgtgcccttgggc

SEQ ID NO: 5145499 - DNA, 25 bp, Homo sapien
gcagccaaagttgacacagcgttaa

SEQ ID NO: 5145500 - DNA, 25 bp, Homo sapien
ctgtgtatggaaatgacatcagagg

SEQ ID NO: 5145501 - DNA, 25 bp, Homo sapien
gtgtatggaaatgacatcagaggca

SEQ ID NO: 5145502 - DNA, 25 bp, Homo sapien
tgtgtatggaaatgacatcagaggc

SEQ ID NO: 5145503 - DNA, 25 bp, Homo sapien
tgtatggaaatgacatcagaggcat

SEQ ID NO: 5145504 - DNA, 25 bp, Homo sapien
cctgcaggttcctgattatcccaca

SEQ ID NO: 5145505 - DNA, 25 bp, Homo sapien
agctccagcattggtcctagccctg

SEQ ID NO: 5145506 - DNA, 25 bp, Homo sapien
tttgcaggagttggtgatctggtcc

SEQ ID NO: 5145507 - DNA, 25 bp, Homo sapien
cagtacccagggcctactggttggt

SEQ ID NO: 5145508 - DNA, 25 bp, Homo sapien
ctagtccacaggtgaaatacattta

SEQ ID NO: 5145509 - DNA, 25 bp, Homo sapien
tagtccacaggtgaaatacatttaa

SEQ ID NO: 5145510 - DNA, 25 bp, Homo sapien
aattcttatgtagttggcaggcggc

SEQ ID NO: 5145511 - DNA, 25 bp, Homo sapien
tgaagttaaactcaatggctcccgc

SEQ ID NO: 5145512 - DNA, 25 bp, Homo sapien
ctttccgcggtgttacggagtggat

SEQ ID NO: 5145513 - DNA, 25 bp, Homo sapien
gagtgtgacgtccatctcattcgga

SEQ ID NO: 5145514 - DNA, 25 bp, Homo sapien
tgccccggaggtgtccaggcgcggt

SEQ ID NO: 5145515 - DNA, 25 bp, Homo sapien
ggcaggcgccgggactccctcctgg

SEQ ID NO: 5145516 - DNA, 25 bp, Homo sapien
gcctgtgcgcattcctgcattcctg

SEQ ID NO: 5145517 - DNA, 25 bp, Homo sapien
ctcctggccgcccacagcctgtgcg

SEQ ID NO: 5145518 - DNA, 25 bp, Homo sapien
cgcgccaggctgaaggtaggtacta

SEQ ID NO: 5145519 - DNA, 25 bp, Homo sapien
cagctatgggtctctatcaggttgt

SEQ ID NO: 5145520 - DNA, 25 bp, Homo sapien
tctgcgcccctctactattaagaag

SEQ ID NO: 5145521 - DNA, 25 bp, Homo sapien
tattaagaaggtgagtctttctgca

SEQ ID NO: 5145522 - DNA, 25 bp, Homo sapien
gtgtccttctggtaactttctgatt

SEQ ID NO: 5145523 - DNA, 25 bp, Homo sapien
tctggtaactttctgatttgtctcc

SEQ ID NO: 5145524 - DNA, 25 bp, Homo sapien
taggtgtccttctggtaactttctg

SEQ ID NO: 5145525 - DNA, 25 bp, Homo sapien
ctggtaactttctgatttgtctccc

SEQ ID NO: 5145526 - DNA, 25 bp, Homo sapien
gcctcacgagagatagcgagtgaaa

SEQ ID NO: 5145527 - DNA, 25 bp, Homo sapien
aagaaaatccacgttgcctcacgag

SEQ ID NO: 5145528 - DNA, 25 bp, Homo sapien
ggaccatttctgcaggtaactaaaa

SEQ ID NO: 5145529 - DNA, 25 bp, Homo sapien
ttaagggaggaatactgcacatgct

SEQ ID NO: 5145530 - DNA, 25 bp, Homo sapien
gttgatgatgctaggacattgtgac

SEQ ID NO: 5145531 - DNA, 25 bp, Homo sapien
gaaaacgagcttgcaaaattccact

SEQ ID NO: 5145532 - DNA, 25 bp, Homo sapien
gcaaaattccacttgttagggttga

SEQ ID NO: 5145533 - DNA, 25 bp, Homo sapien
ctagcgataaggaaccagaaaacga

SEQ ID NO: 5145534 - DNA, 25 bp, Homo sapien
tgaacacatgtaccagagcaactaa

SEQ ID NO: 5145535 - DNA, 25 bp, Homo sapien
ttgacacagtggactacaacaatat

SEQ ID NO: 5145536 - DNA, 25 bp, Homo sapien
gagcagatgttcaacgtaagtaacc

SEQ ID NO: 5145537 - DNA, 25 bp, Homo sapien
gaatggcaaatactcacatgagcag

SEQ ID NO: 5145538 - DNA, 25 bp, Homo sapien
gaaggctagtctttctaacaatcgg

SEQ ID NO: 5145539 - DNA, 25 bp, Homo sapien
tctaacaatcggtgctagagcgatt

SEQ ID NO: 5145540 - DNA, 25 bp, Homo sapien
taaacgcatttatatgaaggaaggc

SEQ ID NO: 5145541 - DNA, 25 bp, Homo sapien
tagagcgattggctatctattggca

SEQ ID NO: 5145542 - DNA, 25 bp, Homo sapien
ttgagaccagtaaagtagtaactcc

SEQ ID NO: 5145543 - DNA, 25 bp, Homo sapien
aggttgttccagatcttttcagtgc

SEQ ID NO: 5145544 - DNA, 25 bp, Homo sapien
tagtaactccatagtgacatacaga

SEQ ID NO: 5145545 - DNA, 25 bp, Homo sapien
tatatgagggttgactctggtccca

SEQ ID NO: 5145546 - DNA, 25 bp, Homo sapien
ttgaacaacaggatatatagactga

SEQ ID NO: 5145547 - DNA, 25 bp, Homo sapien
gcattttctggcctactacctttaa

SEQ ID NO: 5145548 - DNA, 25 bp, Homo sapien
agttgtctacaacttgatttgtctg

SEQ ID NO: 5145549 - DNA, 25 bp, Homo sapien
aaggattataagagttactgttgca

SEQ ID NO: 5145550 - DNA, 25 bp, Homo sapien
gcgttgtcggaacagccctgcagaa

SEQ ID NO: 5145551 - DNA, 25 bp, Homo sapien
ctctatggtggcgttgtcggaacag

SEQ ID NO: 5145552 - DNA, 25 bp, Homo sapien
gcagaactgtccacgaggagctgag

SEQ ID NO: 5145553 - DNA, 25 bp, Homo sapien
agcccaagtgctgggcaatggcagc

SEQ ID NO: 5145554 - DNA, 25 bp, Homo sapien
cctcttgagaccagggtatggtgtc

SEQ ID NO: 5145555 - DNA, 25 bp, Homo sapien
ccagggtatggtgtcagaggcccta

SEQ ID NO: 5145556 - DNA, 25 bp, Homo sapien
gaggccctagctgagttccccacat

SEQ ID NO: 5145557 - DNA, 25 bp, Homo sapien
tatggtgtcagaggccctagctgag

SEQ ID NO: 5145558 - DNA, 25 bp, Homo sapien
ctggtggttgttcttcatgtctctc

SEQ ID NO: 5145559 - DNA, 25 bp, Homo sapien
cccagtccttgacagtgctgggatc

SEQ ID NO: 5145560 - DNA, 25 bp, Homo sapien
gctgtcatgactggtggttgttctt

SEQ ID NO: 5145561 - DNA, 25 bp, Homo sapien
tgctgggatcacagcagatgctgtc

SEQ ID NO: 5145562 - DNA, 25 bp, Homo sapien
aggtgcccttgtacatggagttccc

SEQ ID NO: 5145563 - DNA, 25 bp, Homo sapien
tcaactaagacaggtgcccttgtac

SEQ ID NO: 5145564 - DNA, 25 bp, Homo sapien
taagacaggtgcccttgtacatgga

SEQ ID NO: 5145565 - DNA, 25 bp, Homo sapien
actaagacaggtgcccttgtacatg

SEQ ID NO: 5145566 - DNA, 25 bp, Homo sapien
gtgtcttcatcttccacacattgct

SEQ ID NO: 5145567 - DNA, 25 bp, Homo sapien
tctccagaaaagactgtgtcttcat

SEQ ID NO: 5145568 - DNA, 25 bp, Homo sapien
cttcatcttccacacattgctccca

SEQ ID NO: 5145569 - DNA, 25 bp, Homo sapien
ccagaaaagactgtgtcttcatctt

SEQ ID NO: 5145570 - DNA, 25 bp, Homo sapien
ttcggacaccagagaattgtgcgga

SEQ ID NO: 5145571 - DNA, 25 bp, Homo sapien
cattgccttccacgaggagtttaca

SEQ ID NO: 5145572 - DNA, 25 bp, Homo sapien
gtttacaccaactcagcagctcaag

SEQ ID NO: 5145573 - DNA, 25 bp, Homo sapien
gttcatgtgtttgccagagacttcg

SEQ ID NO: 5145574 - DNA, 25 bp, Homo sapien
agaacattgctgtaactaaggatat

SEQ ID NO: 5145575 - DNA, 25 bp, Homo sapien
taaggatatggttaacttcttccca

SEQ ID NO: 5145576 - DNA, 25 bp, Homo sapien
tcaccatccatttggcagacatgag

SEQ ID NO: 5145577 - DNA, 25 bp, Homo sapien
cagaatgaatcagacgccagatggg

SEQ ID NO: 5145578 - DNA, 25 bp, Homo sapien
gatgggaaaccgtgcaatttaattc

SEQ ID NO: 5145579 - DNA, 25 bp, Homo sapien
tagtagcagtcatctgtagacctcc

SEQ ID NO: 5145580 - DNA, 25 bp, Homo sapien
atcaccccaggagactcgaatttcc

SEQ ID NO: 5145581 - DNA, 25 bp, Homo sapien
ccaatgcagagcgatttgtctttgt

SEQ ID NO: 5145582 - DNA, 25 bp, Homo sapien
caggagactcgaatttcctgtggat

SEQ ID NO: 5145583 - DNA, 25 bp, Homo sapien
ttctgacattgtctctttctggatc

SEQ ID NO: 5145584 - DNA, 25 bp, Homo sapien
cagtccccacagtggaaagctgtcc

SEQ ID NO: 5145585 - DNA, 25 bp, Homo sapien
ccccacagtggaaagctgtccttcc

SEQ ID NO: 5145586 - DNA, 25 bp, Homo sapien
tccccacagtggaaagctgtccttc

SEQ ID NO: 5145587 - DNA, 25 bp, Homo sapien
gtccccacagtggaaagctgtcctt

SEQ ID NO: 5145588 - DNA, 25 bp, Homo sapien
cagtgatttcaacagccttctccat

SEQ ID NO: 5145589 - DNA, 25 bp, Homo sapien
ctggcccgtggacagtgcttcaggt

SEQ ID NO: 5145590 - DNA, 25 bp, Homo sapien
tccatctcgagtcttaccatcttct

SEQ ID NO: 5145591 - DNA, 25 bp, Homo sapien
gcacagtcacccttgtaaaacattc

SEQ ID NO: 5145592 - DNA, 25 bp, Homo sapien
cacgtgtgggtgattcaaggtcatc

SEQ ID NO: 5145593 - DNA, 25 bp, Homo sapien
cctggtctgggggtcaaatgcacgt

SEQ ID NO: 5145594 - DNA, 25 bp, Homo sapien
gaataggtagaaaaaccagatgcct

SEQ ID NO: 5145595 - DNA, 25 bp, Homo sapien
gatgccttgtctttgctatctcttt

SEQ ID NO: 5145596 - DNA, 25 bp, Homo sapien
agtcagatcgaaggctatttagtgc

SEQ ID NO: 5145597 - DNA, 25 bp, Homo sapien
cgaaggctatttagtgctagagcac

SEQ ID NO: 5145598 - DNA, 25 bp, Homo sapien
ctggaagtcagatcgaaggctattt

SEQ ID NO: 5145599 - DNA, 25 bp, Homo sapien
ttagtgctagagcacagcctgagaa

SEQ ID NO: 5145600 - DNA, 25 bp, Homo sapien
ttgagagaaggaagtaaggggagcc

SEQ ID NO: 5145601 - DNA, 25 bp, Homo sapien
atccttgtgggaacgttgagagaag

SEQ ID NO: 5145602 - DNA, 25 bp, Homo sapien
gaatatccttgtgggaacgttgaga

SEQ ID NO: 5145603 - DNA, 25 bp, Homo sapien
tatgaatatccttgtgggaacgttg

SEQ ID NO: 5145604 - DNA, 25 bp, Homo sapien
ctgagtaaaggagagaaaaggcagt

SEQ ID NO: 5145605 - DNA, 25 bp, Homo sapien
gagtaaaggagagaaaaggcagttc

SEQ ID NO: 5145606 - DNA, 25 bp, Homo sapien
taaaggagagaaaaggcagttcatc

SEQ ID NO: 5145607 - DNA, 25 bp, Homo sapien
gtaaaggagagaaaaggcagttcat

SEQ ID NO: 5145608 - DNA, 25 bp, Homo sapien
aattttttgaaccctgcaccagact

SEQ ID NO: 5145609 - DNA, 25 bp, Homo sapien
taattttttgaaccctgcaccagac

SEQ ID NO: 5145610 - DNA, 25 bp, Homo sapien
tctaattttttgaaccctgcaccag

SEQ ID NO: 5145611 - DNA, 25 bp, Homo sapien
gggtgttgaagcagtcctggggagg

SEQ ID NO: 5145612 - DNA, 25 bp, Homo sapien
acacaaaggtggcaaaccgtcacat

SEQ ID NO: 5145613 - DNA, 25 bp, Homo sapien
ccctgctttgcctttaaaggatcag

SEQ ID NO: 5145614 - DNA, 25 bp, Homo sapien
ctgcatcttgttgccccctgctttg

SEQ ID NO: 5145615 - DNA, 25 bp, Homo sapien
ggtggcaaaccgtcacatccactgc

SEQ ID NO: 5145616 - DNA, 25 bp, Homo sapien
aggcaggtgtgccatatatctagat

SEQ ID NO: 5145617 - DNA, 25 bp, Homo sapien
ggcaggtgtgccatatatctagatt

SEQ ID NO: 5145618 - DNA, 25 bp, Homo sapien
gcaggtgtgccatatatctagattt

SEQ ID NO: 5145619 - DNA, 25 bp, Homo sapien
caggtgtgccatatatctagatttt

SEQ ID NO: 5145620 - DNA, 25 bp, Homo sapien
ccacagccctgatttaacttaggac

SEQ ID NO: 5145621 - DNA, 25 bp, Homo sapien
tacctctaaaagagtgattctgtct

SEQ ID NO: 5145622 - DNA, 25 bp, Homo sapien
ggctgagccttctgtacctctaaaa

SEQ ID NO: 5145623 - DNA, 25 bp, Homo sapien
ccatctctctcgaaggctccaggaa

SEQ ID NO: 5145624 - DNA, 25 bp, Homo sapien
gacttgattgatccctcctattata

SEQ ID NO: 5145625 - DNA, 25 bp, Homo sapien
tgccggcctctagcttcaccagctt

SEQ ID NO: 5145626 - DNA, 25 bp, Homo sapien
accagcttcatgacttgattgatcc

SEQ ID NO: 5145627 - DNA, 25 bp, Homo sapien
gattgatccctcctattatagcaga

SEQ ID NO: 5145628 - DNA, 25 bp, Homo sapien
tcttgtgccccatccgagacacagt

SEQ ID NO: 5145629 - DNA, 25 bp, Homo sapien
tgccccatccgagacacagttcatt

SEQ ID NO: 5145630 - DNA, 25 bp, Homo sapien
cgagacacagttcatttcccacatt

SEQ ID NO: 5145631 - DNA, 25 bp, Homo sapien
catccgagacacagttcatttccca

SEQ ID NO: 5145632 - DNA, 25 bp, Homo sapien
gggaaacaggctgtgccagagagtt

SEQ ID NO: 5145633 - DNA, 25 bp, Homo sapien
agggaaacaggctgtgccagagagt

SEQ ID NO: 5145634 - DNA, 25 bp, Homo sapien
gccgctgtctccgcgggtttaagtc

SEQ ID NO: 5145635 - DNA, 25 bp, Homo sapien
ggaaacaggctgtgccagagagttt

SEQ ID NO: 5145636 - DNA, 25 bp, Homo sapien
ggggaagacagcaggctcctcacta

SEQ ID NO: 5145637 - DNA, 25 bp, Homo sapien
caggctcctcactatgagtggctct

SEQ ID NO: 5145638 - DNA, 25 bp, Homo sapien
atcctgagaagtagccgatttcccc

SEQ ID NO: 5145639 - DNA, 25 bp, Homo sapien
catgagccatgcagattattgttgt

SEQ ID NO: 5145640 - DNA, 25 bp, Homo sapien
tgagcataggcctctgtgcacccat

SEQ ID NO: 5145641 - DNA, 25 bp, Homo sapien
gtaagccatcccacgttctcacatt

SEQ ID NO: 5145642 - DNA, 25 bp, Homo sapien
acccattgaatcagtaagccatccc

SEQ ID NO: 5145643 - DNA, 25 bp, Homo sapien
gccatccgtgccatggctggccgtt

SEQ ID NO: 5145644 - DNA, 25 bp, Homo sapien
ccacaggcctgagcaaaaagcaact

SEQ ID NO: 5145645 - DNA, 25 bp, Homo sapien
gataagacacgatcaagagcttctg

SEQ ID NO: 5145646 - DNA, 25 bp, Homo sapien
tgaatgtcttgtgccctcagcctga

SEQ ID NO: 5145647 - DNA, 25 bp, Homo sapien
tctgcttaggtttcggatggaggct

SEQ ID NO: 5145648 - DNA, 25 bp, Homo sapien
agaaccggaccaacaattccttgcg

SEQ ID NO: 5145649 - DNA, 25 bp, Homo sapien
caacaattccttgcggtagagacca

SEQ ID NO: 5145650 - DNA, 25 bp, Homo sapien
aacactccagaaccggaccaacaat

SEQ ID NO: 5145651 - DNA, 25 bp, Homo sapien
ttccttgcggtagagaccatcccca

SEQ ID NO: 5145652 - DNA, 25 bp, Homo sapien
ctgaacatatgtcccttcacctgtg

SEQ ID NO: 5145653 - DNA, 25 bp, Homo sapien
tcctgaacatatgtcccttcacctg

SEQ ID NO: 5145654 - DNA, 25 bp, Homo sapien
tctcctgaacatatgtcccttcacc

SEQ ID NO: 5145655 - DNA, 25 bp, Homo sapien
tgaacatatgtcccttcacctgtga

SEQ ID NO: 5145656 - DNA, 25 bp, Homo sapien
tggggtccttctgccaaggaaacac

SEQ ID NO: 5145657 - DNA, 25 bp, Homo sapien
actgtctatggggtccttctgccaa

SEQ ID NO: 5145658 - DNA, 25 bp, Homo sapien
gagtgggcatcagtgccacgtggct

SEQ ID NO: 5145659 - DNA, 25 bp, Homo sapien
ctgcatcttggcaggagtgggcatc

SEQ ID NO: 5145660 - DNA, 25 bp, Homo sapien
ttgagtccaaccaagccacatgttg

SEQ ID NO: 5145661 - DNA, 25 bp, Homo sapien
caagccacatgttgacagatcccac

SEQ ID NO: 5145662 - DNA, 25 bp, Homo sapien
aggaaacttgagtccaaccaagcca

SEQ ID NO: 5145663 - DNA, 25 bp, Homo sapien
aaattgcttccagtgttagaaaagg

SEQ ID NO: 5145664 - DNA, 25 bp, Homo sapien
tagtacagtctctgcgcttcctccg

SEQ ID NO: 5145665 - DNA, 25 bp, Homo sapien
cctcctccaagtttaagcctgccca

SEQ ID NO: 5145666 - DNA, 25 bp, Homo sapien
caggctagtacagtctctgcgcttc

SEQ ID NO: 5145667 - DNA, 25 bp, Homo sapien
ttcctccgctccttcctgggtaagc

SEQ ID NO: 5145668 - DNA, 25 bp, Homo sapien
tcttgttgcatctgctgtctcagtt

SEQ ID NO: 5145669 - DNA, 25 bp, Homo sapien
cttcttgttgcatctgctgtctcag

SEQ ID NO: 5145670 - DNA, 25 bp, Homo sapien
ttcttgttgcatctgctgtctcagt

SEQ ID NO: 5145671 - DNA, 25 bp, Homo sapien
agttcgtgtgataaagaagattccc

SEQ ID NO: 5145672 - DNA, 25 bp, Homo sapien
cagttgtggtatctttagtgagtag

SEQ ID NO: 5145673 - DNA, 25 bp, Homo sapien
ggctgacacagttgtggtatcttta

SEQ ID NO: 5145674 - DNA, 25 bp, Homo sapien
cagcatctcctccttatagagttcg

SEQ ID NO: 5145675 - DNA, 25 bp, Homo sapien
ttgaaccagacttacattagtatga

SEQ ID NO: 5145676 - DNA, 25 bp, Homo sapien
gattttgtttgccactattgtagga

SEQ ID NO: 5145677 - DNA, 25 bp, Homo sapien
gatgttatcttttgcgtattgctgg

SEQ ID NO: 5145678 - DNA, 25 bp, Homo sapien
tgagctgactgccaactgcaacctc

SEQ ID NO: 5145679 - DNA, 25 bp, Homo sapien
gctcttattgaatctctggtttctg

SEQ ID NO: 5145680 - DNA, 25 bp, Homo sapien
ctgctctcactagggatataaatcc

SEQ ID NO: 5145681 - DNA, 25 bp, Homo sapien
cttacatctgccctcgctcaggaca

SEQ ID NO: 5145682 - DNA, 25 bp, Homo sapien
agacatcaagtacctctggacctga

SEQ ID NO: 5145683 - DNA, 25 bp, Homo sapien
cattcctggatactcatggtctttc

SEQ ID NO: 5145684 - DNA, 25 bp, Homo sapien
ttcctggatactcatggtctttctc

SEQ ID NO: 5145685 - DNA, 25 bp, Homo sapien
attcctggatactcatggtctttct

SEQ ID NO: 5145686 - DNA, 25 bp, Homo sapien
tcctggatactcatggtctttctcc

SEQ ID NO: 5145687 - DNA, 25 bp, Homo sapien
gaacctcacagtttctccttccaga

SEQ ID NO: 5145688 - DNA, 25 bp, Homo sapien
tgaacctcacagtttctccttccag

SEQ ID NO: 5145689 - DNA, 25 bp, Homo sapien
acctcacagtttctccttccagatc

SEQ ID NO: 5145690 - DNA, 25 bp, Homo sapien
tcacagtttctccttccagatccat

SEQ ID NO: 5145691 - DNA, 25 bp, Homo sapien
cctctatagctttcctcagcatgga

SEQ ID NO: 5145692 - DNA, 25 bp, Homo sapien
gaaagttctaatctttctaactcac

SEQ ID NO: 5145693 - DNA, 25 bp, Homo sapien
agaaagttctaatctttctaactca

SEQ ID NO: 5145694 - DNA, 25 bp, Homo sapien
ctctatagctttcctcagcatggag

SEQ ID NO: 5145695 - DNA, 25 bp, Homo sapien
cttccatgtgaaagtctgggggaat

SEQ ID NO: 5145696 - DNA, 25 bp, Homo sapien
gggaatgtaatgactgtcattaatg

SEQ ID NO: 5145697 - DNA, 25 bp, Homo sapien
agtctgggggaatgtaatgactgtc

SEQ ID NO: 5145698 - DNA, 25 bp, Homo sapien
atgactgtcattaatgtttcttcct

SEQ ID NO: 5145699 - DNA, 25 bp, Homo sapien
cccgctgggcgcaaatgattttccc

SEQ ID NO: 5145700 - DNA, 25 bp, Homo sapien
aacccccacccgctgggcgcaaatg

SEQ ID NO: 5145701 - DNA, 25 bp, Homo sapien
cccacccgctgggcgcaaatgattt

SEQ ID NO: 5145702 - DNA, 25 bp, Homo sapien
cacccgctgggcgcaaatgattttc

SEQ ID NO: 5145703 - DNA, 25 bp, Homo sapien
gacaatctgttctggtcctgccatt

SEQ ID NO: 5145704 - DNA, 25 bp, Homo sapien
ccagacaatctgttctggtcctgcc

SEQ ID NO: 5145705 - DNA, 25 bp, Homo sapien
tggtcctgccattctctagctctgc

SEQ ID NO: 5145706 - DNA, 25 bp, Homo sapien
tgttctggtcctgccattctctagc

SEQ ID NO: 5145707 - DNA, 25 bp, Homo sapien
gcagagacctatttgatagccaaca

SEQ ID NO: 5145708 - DNA, 25 bp, Homo sapien
tagccaacacataaccattgagtag

SEQ ID NO: 5145709 - DNA, 25 bp, Homo sapien
gatgcatttgatcgtatctgtgagc

SEQ ID NO: 5145710 - DNA, 25 bp, Homo sapien
gagtagctacgattgtgcctgccca

SEQ ID NO: 5145711 - DNA, 25 bp, Homo sapien
tgaactgctctgagggctctgcact

SEQ ID NO: 5145712 - DNA, 25 bp, Homo sapien
ctgcacacctcctgcggtgcaccat

SEQ ID NO: 5145713 - DNA, 25 bp, Homo sapien
actgtcctgctcctggaacgctgtc

SEQ ID NO: 5145714 - DNA, 25 bp, Homo sapien
cattccactcttggcatcttctgct

SEQ ID NO: 5145715 - DNA, 25 bp, Homo sapien
ctaaaacacatctcgtatcctccct

SEQ ID NO: 5145716 - DNA, 25 bp, Homo sapien
cactttggcgccacacctgaccaac

SEQ ID NO: 5145717 - DNA, 25 bp, Homo sapien
ctcccttccactttggcgccacacc

SEQ ID NO: 5145718 - DNA, 25 bp, Homo sapien
taaaacacatctcgtatcctccctt

SEQ ID NO: 5145719 - DNA, 25 bp, Homo sapien
tatttagctctatgcagcttccaga

SEQ ID NO: 5145720 - DNA, 25 bp, Homo sapien
ccctgcatcactgttgtcttctgtc

SEQ ID NO: 5145721 - DNA, 25 bp, Homo sapien
tgtcttctgtctgcatatttagctc

SEQ ID NO: 5145722 - DNA, 25 bp, Homo sapien
tcaccctgcatcactgttgtcttct

SEQ ID NO: 5145723 - DNA, 25 bp, Homo sapien
tcatcattgttttcacctttctttt

SEQ ID NO: 5145724 - DNA, 25 bp, Homo sapien
cagttactctgtgattcatcattgt

SEQ ID NO: 5145725 - DNA, 25 bp, Homo sapien
tgacaaaacctttcctataaggcat

SEQ ID NO: 5145726 - DNA, 25 bp, Homo sapien
cattgttttcacctttcttttgaca

SEQ ID NO: 5145727 - DNA, 25 bp, Homo sapien
acctgttcccattgagggtctctgc

SEQ ID NO: 5145728 - DNA, 25 bp, Homo sapien
aggtttgcagttgccatgatcctgg

SEQ ID NO: 5145729 - DNA, 25 bp, Homo sapien
actcaggtttgcagttgccatgatc

SEQ ID NO: 5145730 - DNA, 25 bp, Homo sapien
accccactacttctaatgatgccag

SEQ ID NO: 5145731 - DNA, 25 bp, Homo sapien
acagagtgggatgagcagtatcagt

SEQ ID NO: 5145732 - DNA, 25 bp, Homo sapien
tgtgaagattccacgacaaggaggt

SEQ ID NO: 5145733 - DNA, 25 bp, Homo sapien
ggttgtcctatgcattgggcttgag

SEQ ID NO: 5145734 - DNA, 25 bp, Homo sapien
caaggaggtattgcagtaccccagg

SEQ ID NO: 5145735 - DNA, 25 bp, Homo sapien
cagatcaagtcgctcaggtactggg

SEQ ID NO: 5145736 - DNA, 25 bp, Homo sapien
caggcccataggagttcaggctcaa

SEQ ID NO: 5145737 - DNA, 25 bp, Homo sapien
acgggccgcgtatgagcactgtaag

SEQ ID NO: 5145738 - DNA, 25 bp, Homo sapien
tgtagtaggtttccagacgggccgc

SEQ ID NO: 5145739 - DNA, 25 bp, Homo sapien
aggctagcaaatctccacccatggg

SEQ ID NO: 5145740 - DNA, 25 bp, Homo sapien
tggccttagcaaaggagtcgactgg

SEQ ID NO: 5145741 - DNA, 25 bp, Homo sapien
tctttaatacccttaaggctagcaa

SEQ ID NO: 5145742 - DNA, 25 bp, Homo sapien
tgttgatcacgttgtagacttggcc

SEQ ID NO: 5145743 - DNA, 25 bp, Homo sapien
ataagaatggcagaaatgcaaattg

SEQ ID NO: 5145744 - DNA, 25 bp, Homo sapien
ttgcacaagtaaaggatcatcaggg

SEQ ID NO: 5145745 - DNA, 25 bp, Homo sapien
gctgatcaggctacaaatgaatgtg

SEQ ID NO: 5145746 - DNA, 25 bp, Homo sapien
catgaagctaattctaagcagttct

SEQ ID NO: 5145747 - DNA, 25 bp, Homo sapien
atggcaagaagcttgcaagctctag

SEQ ID NO: 5145748 - DNA, 25 bp, Homo sapien
aaaggccctggaaagagcatccccg

SEQ ID NO: 5145749 - DNA, 25 bp, Homo sapien
agcttgcaagctctagaaaggccct

SEQ ID NO: 5145750 - DNA, 25 bp, Homo sapien
tggaaagagcatccccgagttgtgc

SEQ ID NO: 5145751 - DNA, 25 bp, Homo sapien
acaacacagcagagtacgagccctg

SEQ ID NO: 5145752 - DNA, 25 bp, Homo sapien
ttgatactgcgcagccaaggcagag

SEQ ID NO: 5145753 - DNA, 25 bp, Homo sapien
atagggagggctttgatactgcgca

SEQ ID NO: 5145754 - DNA, 25 bp, Homo sapien
gattccaagattcgcgaggtaaagg

SEQ ID NO: 5145755 - DNA, 25 bp, Homo sapien
gagcaatacctgtgctgtccttgca

SEQ ID NO: 5145756 - DNA, 25 bp, Homo sapien
tgtccttgcacactggacgccagga

SEQ ID NO: 5145757 - DNA, 25 bp, Homo sapien
gatctgaggccaagcctaacacagg

SEQ ID NO: 5145758 - DNA, 25 bp, Homo sapien
gagtcactggctcccactacaagtt

SEQ ID NO: 5145759 - DNA, 25 bp, Homo sapien
acagccttagacctcttggcttgac

SEQ ID NO: 5145760 - DNA, 25 bp, Homo sapien
aagcacagccttagacctcttggct

SEQ ID NO: 5145761 - DNA, 25 bp, Homo sapien
caagcacagccttagacctcttggc

SEQ ID NO: 5145762 - DNA, 25 bp, Homo sapien
gcacagccttagacctcttggcttg

SEQ ID NO: 5145763 - DNA, 25 bp, Homo sapien
tgaaagcctttctgccattgccagt

SEQ ID NO: 5145764 - DNA, 25 bp, Homo sapien
cattgccagtgacaggggtaccctc

SEQ ID NO: 5145765 - DNA, 25 bp, Homo sapien
tcttgaaaaagttcaccttgaaagc

SEQ ID NO: 5145766 - DNA, 25 bp, Homo sapien
cttctagagccatcaaactctgtat

SEQ ID NO: 5145767 - DNA, 25 bp, Homo sapien
tctcagttccatcatacagagaaca

SEQ ID NO: 5145768 - DNA, 25 bp, Homo sapien
gctgagatgacaccaacttccagtt

SEQ ID NO: 5145769 - DNA, 25 bp, Homo sapien
ctgcactctgatatctctccctgtg

SEQ ID NO: 5145770 - DNA, 25 bp, Homo sapien
caggtgactatttactgccctgcac

SEQ ID NO: 5145771 - DNA, 25 bp, Homo sapien
attgttagaacatcttgatccaaaa

SEQ ID NO: 5145772 - DNA, 25 bp, Homo sapien
cattaatccaggtgttgacgcccat

SEQ ID NO: 5145773 - DNA, 25 bp, Homo sapien
aatttgaatccgtgtagccacaggg

SEQ ID NO: 5145774 - DNA, 25 bp, Homo sapien
gacgcccatcacgatattgttagaa

SEQ ID NO: 5145775 - DNA, 25 bp, Homo sapien
tgtgaactctggatagaaaaagcct

SEQ ID NO: 5145776 - DNA, 25 bp, Homo sapien
gcccatcaagctgtactaagaggac

SEQ ID NO: 5145777 - DNA, 25 bp, Homo sapien
tgtgggcaccatcaaagaagaggag

SEQ ID NO: 5145778 - DNA, 25 bp, Homo sapien
gtggtctgccctcttggctgataga

SEQ ID NO: 5145779 - DNA, 25 bp, Homo sapien
cagcctctccagacatcgtagggag

SEQ ID NO: 5145780 - DNA, 25 bp, Homo sapien
ctgggatgtaattgaaagttgtttc

SEQ ID NO: 5145781 - DNA, 25 bp, Homo sapien
catcgtagggagaatcatgggcctg

SEQ ID NO: 5145782 - DNA, 25 bp, Homo sapien
ggagaatcattggtctgggatgtaa

SEQ ID NO: 5145783 - DNA, 25 bp, Homo sapien
tctttccattaaggcaggttacata

SEQ ID NO: 5145784 - DNA, 25 bp, Homo sapien
aaggcaggttacatagtcagaggtc

SEQ ID NO: 5145785 - DNA, 25 bp, Homo sapien
tttgcttgactccttgatttgcgct

SEQ ID NO: 5145786 - DNA, 25 bp, Homo sapien
tgactccttgatttgcgctgttggg

SEQ ID NO: 5145787 - DNA, 25 bp, Homo sapien
taagagactccatacacattgcagc

SEQ ID NO: 5145788 - DNA, 25 bp, Homo sapien
gggcactctcctcttagagcagaag

SEQ ID NO: 5145789 - DNA, 25 bp, Homo sapien
tcccttcactgtggagtcaaaatca

SEQ ID NO: 5145790 - DNA, 25 bp, Homo sapien
gttgttcctgaaggtgggcactctc

SEQ ID NO: 5145791 - DNA, 25 bp, Homo sapien
tgcaaaaggccatgcttcatcagac

SEQ ID NO: 5145792 - DNA, 25 bp, Homo sapien
atcagacagactggcaggctaggca

SEQ ID NO: 5145793 - DNA, 25 bp, Homo sapien
ctgcaaaaggccatgcttcatcaga

SEQ ID NO: 5145794 - DNA, 25 bp, Homo sapien
ttcatcagacagactggcaggctag

SEQ ID NO: 5145795 - DNA, 25 bp, Homo sapien
gactaaaatgtaggccatgatggtg

SEQ ID NO: 5145796 - DNA, 25 bp, Homo sapien
tgtacgggagcactggatacgactg

SEQ ID NO: 5145797 - DNA, 25 bp, Homo sapien
tgagtcgatcggcaagcacggtgac

SEQ ID NO: 5145798 - DNA, 25 bp, Homo sapien
gatacgactgtaggaagactgttta

SEQ ID NO: 5145799 - DNA, 25 bp, Homo sapien
tatcagtccgaggagtgttttcttt

SEQ ID NO: 5145800 - DNA, 25 bp, Homo sapien
atgatttgcaaggcagatccaatcc

SEQ ID NO: 5145801 - DNA, 25 bp, Homo sapien
cctcactatcagtccgaggagtgtt

SEQ ID NO: 5145802 - DNA, 25 bp, Homo sapien
tctgatccgtccccttcatccatca

SEQ ID NO: 5145803 - DNA, 25 bp, Homo sapien
aaggtggaggagagtagaaataaat

SEQ ID NO: 5145804 - DNA, 25 bp, Homo sapien
agggctgcccttgagcccatgaagg

SEQ ID NO: 5145805 - DNA, 25 bp, Homo sapien
gctgcccttgagcccatgaaggtgg

SEQ ID NO: 5145806 - DNA, 25 bp, Homo sapien
ggctgcccttgagcccatgaaggtg

SEQ ID NO: 5145807 - DNA, 25 bp, Homo sapien
gaagactttactaaccatggttggc

SEQ ID NO: 5145808 - DNA, 25 bp, Homo sapien
ccaaagtacaagttagcatcacctg

SEQ ID NO: 5145809 - DNA, 25 bp, Homo sapien
gcaggcaacgtccaaggtcctcttg

SEQ ID NO: 5145810 - DNA, 25 bp, Homo sapien
ccctcaggtagaacaagtttagata

SEQ ID NO: 5145811 - DNA, 25 bp, Homo sapien
cactggtctacgatagtttcaacac

SEQ ID NO: 5145812 - DNA, 25 bp, Homo sapien
tcactggtctacgatagtttcaaca

SEQ ID NO: 5145813 - DNA, 25 bp, Homo sapien
ctggtctacgatagtttcaacactg

SEQ ID NO: 5145814 - DNA, 25 bp, Homo sapien
ggtctacgatagtttcaacactgct

SEQ ID NO: 5145815 - DNA, 25 bp, Homo sapien
ctgacatgttcctgcagaagtccaa

SEQ ID NO: 5145816 - DNA, 25 bp, Homo sapien
gaagcttgggtaggaatctttgcac

SEQ ID NO: 5145817 - DNA, 25 bp, Homo sapien
catgtacctatttaccgaggccttc

SEQ ID NO: 5145818 - DNA, 25 bp, Homo sapien
gaagtccaaacgagggagtcacatg

SEQ ID NO: 5145819 - DNA, 25 bp, Homo sapien
agtttgaggctatagcatgccagga

SEQ ID NO: 5145820 - DNA, 25 bp, Homo sapien
gctatagcatgccaggatggtgccg

SEQ ID NO: 5145821 - DNA, 25 bp, Homo sapien
tatagcatgccaggatggtgccggt

SEQ ID NO: 5145822 - DNA, 25 bp, Homo sapien
tgaggctatagcatgccaggatggt

SEQ ID NO: 5145823 - DNA, 25 bp, Homo sapien
gcaccatgcagatgtaaggtcttaa

SEQ ID NO: 5145824 - DNA, 25 bp, Homo sapien
cttgaataatcagagctgaagatta

SEQ ID NO: 5145825 - DNA, 25 bp, Homo sapien
tgactgtaacaggaaccgggatgaa

SEQ ID NO: 5145826 - DNA, 25 bp, Homo sapien
ttaaaaccgactcagagccttggac

SEQ ID NO: 5145827 - DNA, 25 bp, Homo sapien
tagagatgtaggtacaccatcctct

SEQ ID NO: 5145828 - DNA, 25 bp, Homo sapien
ggccacagtctgcaaagtagagatg

SEQ ID NO: 5145829 - DNA, 25 bp, Homo sapien
tgtaattccacagaggtgcacacta

SEQ ID NO: 5145830 - DNA, 25 bp, Homo sapien
tgcacactagttcagggcatctgct

SEQ ID NO: 5145831 - DNA, 25 bp, Homo sapien
gaggagctaagcttcttcctcatac

SEQ ID NO: 5145832 - DNA, 25 bp, Homo sapien
gggctccagtgaggagctaagcttc

SEQ ID NO: 5145833 - DNA, 25 bp, Homo sapien
tccagtgaggagctaagcttcttcc

SEQ ID NO: 5145834 - DNA, 25 bp, Homo sapien
tgtcccatctccctatccatgtcat

SEQ ID NO: 5145835 - DNA, 25 bp, Homo sapien
taaaagcaattgcataggcaacagc

SEQ ID NO: 5145836 - DNA, 25 bp, Homo sapien
caacagcagcactggagctagaata

SEQ ID NO: 5145837 - DNA, 25 bp, Homo sapien
gctagaataatttatgtgcggaaac

SEQ ID NO: 5145838 - DNA, 25 bp, Homo sapien
tagcataagaatgcattctatttta

SEQ ID NO: 5145839 - DNA, 25 bp, Homo sapien
gtcaccaaggtagcttaagatactg

SEQ ID NO: 5145840 - DNA, 25 bp, Homo sapien
cacagtccgggacttgttcttccct

SEQ ID NO: 5145841 - DNA, 25 bp, Homo sapien
gcttaagatactgctctgactccgg

SEQ ID NO: 5145842 - DNA, 25 bp, Homo sapien
cctgagcacagtccgggacttgttc

SEQ ID NO: 5145843 - DNA, 25 bp, Homo sapien
ctggatgtctttccaactgtgaggc

SEQ ID NO: 5145844 - DNA, 25 bp, Homo sapien
gatgtctttccaactgtgaggcccg

SEQ ID NO: 5145845 - DNA, 25 bp, Homo sapien
ttccaactgtgaggcccgtgagtct

SEQ ID NO: 5145846 - DNA, 25 bp, Homo sapien
cgtgagtctttcaggatcttcaagg

SEQ ID NO: 5145847 - DNA, 25 bp, Homo sapien
ccaccagtctaggaaggaattgttc

SEQ ID NO: 5145848 - DNA, 25 bp, Homo sapien
ggtgcctgagcttcatggtcccacc

SEQ ID NO: 5145849 - DNA, 25 bp, Homo sapien
gtgcctgagcttcatggtcccacca

SEQ ID NO: 5145850 - DNA, 25 bp, Homo sapien
aggtgcctgagcttcatggtcccac

SEQ ID NO: 5145851 - DNA, 25 bp, Homo sapien
tcatatggatacatgaggaaggatt

SEQ ID NO: 5145852 - DNA, 25 bp, Homo sapien
atatggatacatgaggaaggattcc

SEQ ID NO: 5145853 - DNA, 25 bp, Homo sapien
catatggatacatgaggaaggattc

SEQ ID NO: 5145854 - DNA, 25 bp, Homo sapien
tcatgaccagcttgagacaccttcc

SEQ ID NO: 5145855 - DNA, 25 bp, Homo sapien
ctgatctttgggttcatgaccagct

SEQ ID NO: 5145856 - DNA, 25 bp, Homo sapien
ttctccgcataactaagcacagatg

SEQ ID NO: 5145857 - DNA, 25 bp, Homo sapien
ctaggtgattctccgcataactaag

SEQ ID NO: 5145858 - DNA, 25 bp, Homo sapien
tgattctccgcataactaagcacag

SEQ ID NO: 5145859 - DNA, 25 bp, Homo sapien
ggtgattctccgcataactaagcac

SEQ ID NO: 5145860 - DNA, 25 bp, Homo sapien
cgagttttccgtagtaatcaggcat

SEQ ID NO: 5145861 - DNA, 25 bp, Homo sapien
ctcaagaatgcagaataaccgagtt

SEQ ID NO: 5145862 - DNA, 25 bp, Homo sapien
tgcagaataaccgagttttccgtag

SEQ ID NO: 5145863 - DNA, 25 bp, Homo sapien
ccgagttttccgtagtaatcaggca

SEQ ID NO: 5145864 - DNA, 25 bp, Homo sapien
gaagaatgagttacttctccatagg

SEQ ID NO: 5145865 - DNA, 25 bp, Homo sapien
attatacagtgtctgggtcaagccc

SEQ ID NO: 5145866 - DNA, 25 bp, Homo sapien
tatacagtgtctgggtcaagcccat

SEQ ID NO: 5145867 - DNA, 25 bp, Homo sapien
gccagtggcagcattatacagtgtc

SEQ ID NO: 5145868 - DNA, 25 bp, Homo sapien
tgccttgatgccagtccaaattgag

SEQ ID NO: 5145869 - DNA, 25 bp, Homo sapien
gatgccagtccaaattgaggcttgt

SEQ ID NO: 5145870 - DNA, 25 bp, Homo sapien
tgaggcttgtaatatatctaaactg

SEQ ID NO: 5145871 - DNA, 25 bp, Homo sapien
ccaaattgaggcttgtaatatatct

SEQ ID NO: 5145872 - DNA, 25 bp, Homo sapien
atgttcaaaatagcggctccacctt

SEQ ID NO: 5145873 - DNA, 25 bp, Homo sapien
gttcaaaatagcggctccaccttcc

SEQ ID NO: 5145874 - DNA, 25 bp, Homo sapien
agggtatggaagtcttcggtacagt

SEQ ID NO: 5145875 - DNA, 25 bp, Homo sapien
gagggtatggaagtcttcggtacag

SEQ ID NO: 5145876 - DNA, 25 bp, Homo sapien
aggtacgcagaggtcccaaacctag

SEQ ID NO: 5145877 - DNA, 25 bp, Homo sapien
acaggaggtacgcagaggtcccaaa

SEQ ID NO: 5145878 - DNA, 25 bp, Homo sapien
gaggtacgcagaggtcccaaaccta

SEQ ID NO: 5145879 - DNA, 25 bp, Homo sapien
aagccacaggaggtacgcagaggtc

SEQ ID NO: 5145880 - DNA, 25 bp, Homo sapien
gaggcggctctactacaatgacacg

SEQ ID NO: 5145881 - DNA, 25 bp, Homo sapien
caggcagaagaaagatctcagggac

SEQ ID NO: 5145882 - DNA, 25 bp, Homo sapien
tacagtcctgcaaaaaagtgaacct

SEQ ID NO: 5145883 - DNA, 25 bp, Homo sapien
taatatacaggctaccagatcagcc

SEQ ID NO: 5145884 - DNA, 25 bp, Homo sapien
ttatcacagtagacgttgaccttga

SEQ ID NO: 5145885 - DNA, 25 bp, Homo sapien
gagaattccttatacccaaaactga

SEQ ID NO: 5145886 - DNA, 25 bp, Homo sapien
tcaagggtacacaccaaaaccatga

SEQ ID NO: 5145887 - DNA, 25 bp, Homo sapien
catgattaggctgctgttacgggat

SEQ ID NO: 5145888 - DNA, 25 bp, Homo sapien
tatctcgtgtccttcgctatggcgc

SEQ ID NO: 5145889 - DNA, 25 bp, Homo sapien
ggtttgctcaagatgcctgcacagc

SEQ ID NO: 5145890 - DNA, 25 bp, Homo sapien
gctatggcgcccagatggctgcaat

SEQ ID NO: 5145891 - DNA, 25 bp, Homo sapien
agcatgtctcattacctccacggtg

SEQ ID NO: 5145892 - DNA, 25 bp, Homo sapien
tgatcaagaacttcaggaccagctc

SEQ ID NO: 5145893 - DNA, 25 bp, Homo sapien
gccctcagtaagctgacaatctggt

SEQ ID NO: 5145894 - DNA, 25 bp, Homo sapien
caatggtgaagagaaggctgtaacc

SEQ ID NO: 5145895 - DNA, 25 bp, Homo sapien
cacaccacgagtcttacaagagaag

SEQ ID NO: 5145896 - DNA, 25 bp, Homo sapien
ctcctaaccactttcacttccactg

SEQ ID NO: 5145897 - DNA, 25 bp, Homo sapien
tttctctcctaaccactttcacttc

SEQ ID NO: 5145898 - DNA, 25 bp, Homo sapien
tctctcctaaccactttcacttcca

SEQ ID NO: 5145899 - DNA, 25 bp, Homo sapien
actgtccctcctttctgctcttgct

SEQ ID NO: 5145900 - DNA, 25 bp, Homo sapien
tggacacacgcagcactggatttag

SEQ ID NO: 5145901 - DNA, 25 bp, Homo sapien
ctgtggacacacgcagcactggatt

SEQ ID NO: 5145902 - DNA, 25 bp, Homo sapien
tgtggacacacgcagcactggattt

SEQ ID NO: 5145903 - DNA, 25 bp, Homo sapien
gacacacgcagcactggatttagtt

SEQ ID NO: 5145904 - DNA, 25 bp, Homo sapien
ggtgtcttaccagttccaagggatg

SEQ ID NO: 5145905 - DNA, 25 bp, Homo sapien
cacagcctgtgtggtgtcttaccag

SEQ ID NO: 5145906 - DNA, 25 bp, Homo sapien
cagacaagtttgtctaccccatgcc

SEQ ID NO: 5145907 - DNA, 25 bp, Homo sapien
gctgagtgagattgtcctcttccag

SEQ ID NO: 5145908 - DNA, 25 bp, Homo sapien
agtctccctcggtaagaagctggca

SEQ ID NO: 5145909 - DNA, 25 bp, Homo sapien
cctggatttggagactgtccataac

SEQ ID NO: 5145910 - DNA, 25 bp, Homo sapien
ggtcctgcaaggattctacaagggc

SEQ ID NO: 5145911 - DNA, 25 bp, Homo sapien
accctgtgagggcagaaagtctccc

SEQ ID NO: 5145912 - DNA, 25 bp, Homo sapien
ggaaacagggcaaggtcaagtgcac

SEQ ID NO: 5145913 - DNA, 25 bp, Homo sapien
ggtcaagtgcacaaagaaggggcat

SEQ ID NO: 5145914 - DNA, 25 bp, Homo sapien
agggaaacagggcaaggtcaagtgc

SEQ ID NO: 5145915 - DNA, 25 bp, Homo sapien
cacaaagaaggggcatataggacac

SEQ ID NO: 5145916 - DNA, 25 bp, Homo sapien
agagaggcaagtctctgtatcggag

SEQ ID NO: 5145917 - DNA, 25 bp, Homo sapien
gagagaggcaagtctctgtatcgga

SEQ ID NO: 5145918 - DNA, 25 bp, Homo sapien
ctctgtatcggaggacagccaaagc

SEQ ID NO: 5145919 - DNA, 25 bp, Homo sapien
tgtatcggaggacagccaaagctgc

SEQ ID NO: 5145920 - DNA, 25 bp, Homo sapien
acgtcagagttgtgcggtccctgga

SEQ ID NO: 5145921 - DNA, 25 bp, Homo sapien
agtttaatgccagctagtttgatca

SEQ ID NO: 5145922 - DNA, 25 bp, Homo sapien
gaagtttaatgccagctagtttgat

SEQ ID NO: 5145923 - DNA, 25 bp, Homo sapien
cagctctgcggacgtcagagttgtg

SEQ ID NO: 5145924 - DNA, 25 bp, Homo sapien
gagttctgggctcatgcctttcaag

SEQ ID NO: 5145925 - DNA, 25 bp, Homo sapien
aagcgagtcaggctcaatctgtaac

SEQ ID NO: 5145926 - DNA, 25 bp, Homo sapien
aagacaggacttcctgagttctggg

SEQ ID NO: 5145927 - DNA, 25 bp, Homo sapien
cctttcaagcagagtcaagcgagtc

SEQ ID NO: 5145928 - DNA, 25 bp, Homo sapien
ccgaaatggagcaaaatgagtgaca

SEQ ID NO: 5145929 - DNA, 25 bp, Homo sapien
tttgctgccgacttttaaaacagta

SEQ ID NO: 5145930 - DNA, 25 bp, Homo sapien
ctgaacaattcttgtacaacatggg

SEQ ID NO: 5145931 - DNA, 25 bp, Homo sapien
taaaatgaagggcattctcccaagg

SEQ ID NO: 5145932 - DNA, 25 bp, Homo sapien
tgaatacatgtccaagtgtccaggg

SEQ ID NO: 5145933 - DNA, 25 bp, Homo sapien
ggcccacactgaatgaccaaggtga

SEQ ID NO: 5145934 - DNA, 25 bp, Homo sapien
agctctcatgccaatacacttcctt

SEQ ID NO: 5145935 - DNA, 25 bp, Homo sapien
tccagtagccttcaagctctcatgc

SEQ ID NO: 5145936 - DNA, 25 bp, Homo sapien
ctagaggaaagaagactgaaaggtc

SEQ ID NO: 5145937 - DNA, 25 bp, Homo sapien
atccgcttacagtggcaaatagttt

SEQ ID NO: 5145938 - DNA, 25 bp, Homo sapien
tatccgcttacagtggcaaatagtt

SEQ ID NO: 5145939 - DNA, 25 bp, Homo sapien
ggcaaatagtttggctagtggataa

SEQ ID NO: 5145940 - DNA, 25 bp, Homo sapien
tccgcttacagtggcaaatagtttg

SEQ ID NO: 5145941 - DNA, 25 bp, Homo sapien
agagatacggtctaaagcacggata

SEQ ID NO: 5145942 - DNA, 25 bp, Homo sapien
aaagagatacggtctaaagcacgga

SEQ ID NO: 5145943 - DNA, 25 bp, Homo sapien
tgaaaagagatacggtctaaagcac

SEQ ID NO: 5145944 - DNA, 25 bp, Homo sapien
aaaagagatacggtctaaagcacgg

SEQ ID NO: 5145945 - DNA, 25 bp, Homo sapien
agtgataatacccagcatcacagtc

SEQ ID NO: 5145946 - DNA, 25 bp, Homo sapien
tgctaaagataagtggcttagtgat

SEQ ID NO: 5145947 - DNA, 25 bp, Homo sapien
aagtgggagcccattgctaaagata

SEQ ID NO: 5145948 - DNA, 25 bp, Homo sapien
agtggcttagtgataatacccagca

SEQ ID NO: 5145949 - DNA, 25 bp, Homo sapien
ctgccctgactcatacagagaactg

SEQ ID NO: 5145950 - DNA, 25 bp, Homo sapien
gtttgaatgcctggcatagctgcag

SEQ ID NO: 5145951 - DNA, 25 bp, Homo sapien
tcactgtactatatgaggggctggc

SEQ ID NO: 5145952 - DNA, 25 bp, Homo sapien
tatatgaggggctggcttctgccct

SEQ ID NO: 5145953 - DNA, 25 bp, Homo sapien
tctcataagtggttagtgtccacag

SEQ ID NO: 5145954 - DNA, 25 bp, Homo sapien
ttagtgtccacagttccactgtggt

SEQ ID NO: 5145955 - DNA, 25 bp, Homo sapien
ttgaggtagggccctctatcctcag

SEQ ID NO: 5145956 - DNA, 25 bp, Homo sapien
cctcagtctcataagtggttagtgt

SEQ ID NO: 5145957 - DNA, 25 bp, Homo sapien
cattgttggagaagggcatttcagg

SEQ ID NO: 5145958 - DNA, 25 bp, Homo sapien
tcattgttggagaagggcatttcag

SEQ ID NO: 5145959 - DNA, 25 bp, Homo sapien
ttgttggagaagggcatttcaggac

SEQ ID NO: 5145960 - DNA, 25 bp, Homo sapien
ctcattgttggagaagggcatttca

SEQ ID NO: 5145961 - DNA, 25 bp, Homo sapien
actcaagaaattcaagtttcgccac

SEQ ID NO: 5145962 - DNA, 25 bp, Homo sapien
gaactcaagaaattcaagtttcgcc

SEQ ID NO: 5145963 - DNA, 25 bp, Homo sapien
ggatttgaactcaagaaattcaagt

SEQ ID NO: 5145964 - DNA, 25 bp, Homo sapien
ttgaactcaagaaattcaagtttcg

SEQ ID NO: 5145965 - DNA, 25 bp, Homo sapien
ataattaatgcctggtggctacatg

SEQ ID NO: 5145966 - DNA, 25 bp, Homo sapien
tgtgataattaatgcctggtggcta

SEQ ID NO: 5145967 - DNA, 25 bp, Homo sapien
ttaatgcctggtggctacatgaaag

SEQ ID NO: 5145968 - DNA, 25 bp, Homo sapien
ctgtgtgataattaatgcctggtgg

SEQ ID NO: 5145969 - DNA, 25 bp, Homo sapien
ttttgcctctatgcagccagtttcc

SEQ ID NO: 5145970 - DNA, 25 bp, Homo sapien
aggaaagtgtttcacagtgccatta

SEQ ID NO: 5145971 - DNA, 25 bp, Homo sapien
tgaaaatctttattcaactgagtga

SEQ ID NO: 5145972 - DNA, 25 bp, Homo sapien
ctctatgcagccagtttccaaatta

SEQ ID NO: 5145973 - DNA, 25 bp, Homo sapien
gttctatcctagtgtaccagcccat

SEQ ID NO: 5145974 - DNA, 25 bp, Homo sapien
ttggctcgaagggcagtagacactg

SEQ ID NO: 5145975 - DNA, 25 bp, Homo sapien
gatggtaaaatgtgggaatgcgatt

SEQ ID NO: 5145976 - DNA, 25 bp, Homo sapien
tgggaatgcgattatctccaagaat

SEQ ID NO: 5145977 - DNA, 25 bp, Homo sapien
tgcacctcattgcttttctgatggt

SEQ ID NO: 5145978 - DNA, 25 bp, Homo sapien
aatgcacctcattgcttttctgatg

SEQ ID NO: 5145979 - DNA, 25 bp, Homo sapien
ctctgcttacacccaccctccaccg

SEQ ID NO: 5145980 - DNA, 25 bp, Homo sapien
tgcttacacccaccctccaccgccc

SEQ ID NO: 5145981 - DNA, 25 bp, Homo sapien
gccccgagtagttttactgtcttca

SEQ ID NO: 5145982 - DNA, 25 bp, Homo sapien
ccccgagtagttttactgtcttcat

SEQ ID NO: 5145983 - DNA, 25 bp, Homo sapien
tacaataaagctgttcatgagtcac

SEQ ID NO: 5145984 - DNA, 25 bp, Homo sapien
catgagtcacttgtctagcagccac

SEQ ID NO: 5145985 - DNA, 25 bp, Homo sapien
gccactgatgctttgtgattgtagc

SEQ ID NO: 5145986 - DNA, 25 bp, Homo sapien
tacacagtgtgtgtacaataaagct

SEQ ID NO: 5145987 - DNA, 25 bp, Homo sapien
gaaatgtctcctgtaagcttgtttc

SEQ ID NO: 5145988 - DNA, 25 bp, Homo sapien
ctaggaaatgtctcctgtaagcttg

SEQ ID NO: 5145989 - DNA, 25 bp, Homo sapien
taggaaatgtctcctgtaagcttgt

SEQ ID NO: 5145990 - DNA, 25 bp, Homo sapien
ggaaatgtctcctgtaagcttgttt

SEQ ID NO: 5145991 - DNA, 25 bp, Homo sapien
tatatcgtgggaagattctctgtac

SEQ ID NO: 5145992 - DNA, 25 bp, Homo sapien
cattatctgtttcttcggaaagagg

SEQ ID NO: 5145993 - DNA, 25 bp, Homo sapien
cactctgcccctgtatattcttata

SEQ ID NO: 5145994 - DNA, 25 bp, Homo sapien
gactgaaccaggtgtaagtatctca

SEQ ID NO: 5145995 - DNA, 25 bp, Homo sapien
agcttgccttgaggtaaagcccaga

SEQ ID NO: 5145996 - DNA, 25 bp, Homo sapien
tcttgtagtaaggttgagcttgcct

SEQ ID NO: 5145997 - DNA, 25 bp, Homo sapien
cccagagattagtgaccagaagttc

SEQ ID NO: 5145998 - DNA, 25 bp, Homo sapien
ccctctccgatcttgtagtaaggtt

SEQ ID NO: 5145999 - DNA, 25 bp, Homo sapien
ttcctcttatttcatatgggaacca

SEQ ID NO: 5146000 - DNA, 25 bp, Homo sapien
cttatttcatatgggaaccactggc

SEQ ID NO: 5146001 - DNA, 25 bp, Homo sapien
cctcttatttcatatgggaaccact

SEQ ID NO: 5146002 - DNA, 25 bp, Homo sapien
tcttatttcatatgggaaccactgg

SEQ ID NO: 5146003 - DNA, 25 bp, Homo sapien
gataatggctgaagatggcaataaa

SEQ ID NO: 5146004 - DNA, 25 bp, Homo sapien
ggctgaagatggcaataaattttaa

SEQ ID NO: 5146005 - DNA, 25 bp, Homo sapien
tgatcccagtgttttgataatggct

SEQ ID NO: 5146006 - DNA, 25 bp, Homo sapien
tgttttgataatggctgaagatggc

SEQ ID NO: 5146007 - DNA, 25 bp, Homo sapien
gcccaacggacattaattgctggcc

SEQ ID NO: 5146008 - DNA, 25 bp, Homo sapien
agtgcttcagcccaacggacattaa

SEQ ID NO: 5146009 - DNA, 25 bp, Homo sapien
acattaattgctggcctccggttcc

SEQ ID NO: 5146010 - DNA, 25 bp, Homo sapien
caacggacattaattgctggcctcc

SEQ ID NO: 5146011 - DNA, 25 bp, Homo sapien
tccttcacaggagttcctagagtat

SEQ ID NO: 5146012 - DNA, 25 bp, Homo sapien
atgaagtgcattccgcattttcctt

SEQ ID NO: 5146013 - DNA, 25 bp, Homo sapien
ggtgggtatgaagtgcattccgcat

SEQ ID NO: 5146014 - DNA, 25 bp, Homo sapien
gttcctagagtatttttcttccagc

SEQ ID NO: 5146015 - DNA, 25 bp, Homo sapien
ggttttgtgcatttgctctcccaag

SEQ ID NO: 5146016 - DNA, 25 bp, Homo sapien
taagcacaaggctctttaattgctg

SEQ ID NO: 5146017 - DNA, 25 bp, Homo sapien
tccagacttgagattagctcaggtt

SEQ ID NO: 5146018 - DNA, 25 bp, Homo sapien
ttgctctcccaagtgaaataagcac

SEQ ID NO: 5146019 - DNA, 25 bp, Homo sapien
attggattacttggccttttgcaca

SEQ ID NO: 5146020 - DNA, 25 bp, Homo sapien
tccacctggctccttgaattggatt

SEQ ID NO: 5146021 - DNA, 25 bp, Homo sapien
cctggctccttgaattggattactt

SEQ ID NO: 5146022 - DNA, 25 bp, Homo sapien
aattggattacttggccttttgcac

SEQ ID NO: 5146023 - DNA, 25 bp, Homo sapien
aattcaaatccgttttccaggtgcg

SEQ ID NO: 5146024 - DNA, 25 bp, Homo sapien
gctttgatatgcctggaccccgatt

SEQ ID NO: 5146025 - DNA, 25 bp, Homo sapien
aaatgattcacacagggatagctcc

SEQ ID NO: 5146026 - DNA, 25 bp, Homo sapien
tactgttgaggcttagcaggcacac

SEQ ID NO: 5146027 - DNA, 25 bp, Homo sapien
ggcagaagctgccagtgcaggttgc

SEQ ID NO: 5146028 - DNA, 25 bp, Homo sapien
cagaagctgccagtgcaggttgctg

SEQ ID NO: 5146029 - DNA, 25 bp, Homo sapien
aagctgccagtgcaggttgctgaat

SEQ ID NO: 5146030 - DNA, 25 bp, Homo sapien
caggttgctgaatatgtgtgtgtct

SEQ ID NO: 5146031 - DNA, 25 bp, Homo sapien
caccactccagcaccattggagaac

SEQ ID NO: 5146032 - DNA, 25 bp, Homo sapien
accactccagcaccattggagaact

SEQ ID NO: 5146033 - DNA, 25 bp, Homo sapien
atgttaggcactggctttcatgctt

SEQ ID NO: 5146034 - DNA, 25 bp, Homo sapien
cctatttctttcaggcttccaagca

SEQ ID NO: 5146035 - DNA, 25 bp, Homo sapien
agctgtctgattcatccctttgatc

SEQ ID NO: 5146036 - DNA, 25 bp, Homo sapien
gatcaacaccagcttgcagtttgat

SEQ ID NO: 5146037 - DNA, 25 bp, Homo sapien
cagtttgatgggttactgggaatcc

SEQ ID NO: 5146038 - DNA, 25 bp, Homo sapien
cagcttgcagtttgatgggttactg

SEQ ID NO: 5146039 - DNA, 25 bp, Homo sapien
ttactactctgacaaggccaatgat

SEQ ID NO: 5146040 - DNA, 25 bp, Homo sapien
tctgacaaggccaatgataccactg

SEQ ID NO: 5146041 - DNA, 25 bp, Homo sapien
gccaatgataccactgtgtttggta

SEQ ID NO: 5146042 - DNA, 25 bp, Homo sapien
tcacattcttactactctgacaagg

SEQ ID NO: 5146043 - DNA, 25 bp, Homo sapien
tgaggaagaggcactaaacactggc

SEQ ID NO: 5146044 - DNA, 25 bp, Homo sapien
taatcactgtcgacgcactaacatg

SEQ ID NO: 5146045 - DNA, 25 bp, Homo sapien
gccacagatggaacatgcagacatg

SEQ ID NO: 5146046 - DNA, 25 bp, Homo sapien
aacatgctccaacaacttcccgtag

SEQ ID NO: 5146047 - DNA, 25 bp, Homo sapien
tatgagccgtaaacacatcagtgtt

SEQ ID NO: 5146048 - DNA, 25 bp, Homo sapien
acagtcagtccccttgtcaaatgtc

SEQ ID NO: 5146049 - DNA, 25 bp, Homo sapien
cagtcagtccccttgtcaaatgtca

SEQ ID NO: 5146050 - DNA, 25 bp, Homo sapien
tgtggctacgtacaacttctttatg

SEQ ID NO: 5146051 - DNA, 25 bp, Homo sapien
gctctttgacatcgggtggctcaag

SEQ ID NO: 5146052 - DNA, 25 bp, Homo sapien
ggtgatgataggtggtgacaacaac

SEQ ID NO: 5146053 - DNA, 25 bp, Homo sapien
caacagaagacggtgacatgggggc

SEQ ID NO: 5146054 - DNA, 25 bp, Homo sapien
tatgtatgagcatgaaatgcagctc

SEQ ID NO: 5146055 - DNA, 25 bp, Homo sapien
gaaatccagccttctatgcatgaag

SEQ ID NO: 5146056 - DNA, 25 bp, Homo sapien
tttgagttgacaccgtctgccacgg

SEQ ID NO: 5146057 - DNA, 25 bp, Homo sapien
cacgggtgctaattttgaggccttc

SEQ ID NO: 5146058 - DNA, 25 bp, Homo sapien
ggtgcacattttaagcctccgatag

SEQ ID NO: 5146059 - DNA, 25 bp, Homo sapien
cggagccctgcacggaggcgacgta

SEQ ID NO: 5146060 - DNA, 25 bp, Homo sapien
ccgctccccgtaggccttgctgcaa

SEQ ID NO: 5146061 - DNA, 25 bp, Homo sapien
ccccgtaggccttgctgcaactcat

SEQ ID NO: 5146062 - DNA, 25 bp, Homo sapien
gggcggagccctgcacggaggcgac

SEQ ID NO: 5146063 - DNA, 25 bp, Homo sapien
gagcagcgcccgtcgggagccatga

SEQ ID NO: 5146064 - DNA, 25 bp, Homo sapien
agcagcgcccgtcgggagccatgac

SEQ ID NO: 5146065 - DNA, 25 bp, Homo sapien
aggtcgaggccgctgcctcaacaga

SEQ ID NO: 5146066 - DNA, 25 bp, Homo sapien
tcgggaggcatgacgcctgagccat

SEQ ID NO: 5146067 - DNA, 25 bp, Homo sapien
gatgcctgagccatcgaggccgcct

SEQ ID NO: 5146068 - DNA, 25 bp, Homo sapien
gggagccatgatgcctgagccatcg

SEQ ID NO: 5146069 - DNA, 25 bp, Homo sapien
gatgcctgagccatcgaggccgccg

SEQ ID NO: 5146070 - DNA, 25 bp, Homo sapien
catgatgcctgagccatcgaggccg

SEQ ID NO: 5146071 - DNA, 25 bp, Homo sapien
aggtcgaggccgctgcctcaacaga

SEQ ID NO: 5146072 - DNA, 25 bp, Homo sapien
gggagccatgatgcctgagccatcg

SEQ ID NO: 5146073 - DNA, 25 bp, Homo sapien
agccgccgggccaggtcgaggccgc

SEQ ID NO: 5146074 - DNA, 25 bp, Homo sapien
gatgcctgagccatcgaggcagccg

SEQ ID NO: 5146075 - DNA, 25 bp, Homo sapien
gcccggccaggtcgaggccgctgcc

SEQ ID NO: 5146076 - DNA, 25 bp, Homo sapien
gccgcccggccaggtcgaggccgct

SEQ ID NO: 5146077 - DNA, 25 bp, Homo sapien
agcagcgcccgtcgggagccatgac

SEQ ID NO: 5146078 - DNA, 25 bp, Homo sapien
gagcagcgcccgtcgggagccatga

SEQ ID NO: 5146079 - DNA, 25 bp, Homo sapien
tcgggaacaagcgtcgggaacaagc

SEQ ID NO: 5146080 - DNA, 25 bp, Homo sapien
cccaggagcgagcaccgtcgggaac

SEQ ID NO: 5146081 - DNA, 25 bp, Homo sapien
agaaagaggaagcgccggcgccaaa

SEQ ID NO: 5146082 - DNA, 25 bp, Homo sapien
aggaagcgccggcgccaaaggtctc

SEQ ID NO: 5146083 - DNA, 25 bp, Homo sapien
tgcaaaatagaatcctctcgttgac

SEQ ID NO: 5146084 - DNA, 25 bp, Homo sapien
ctttgcaaaatagaatcctctcgtt

SEQ ID NO: 5146085 - DNA, 25 bp, Homo sapien
agctttgcaaaatagaatcctctcg

SEQ ID NO: 5146086 - DNA, 25 bp, Homo sapien
caaaatagaatcctctcgttgactt

SEQ ID NO: 5146087 - DNA, 25 bp, Homo sapien
ttccatcttcctttggatgccttta

SEQ ID NO: 5146088 - DNA, 25 bp, Homo sapien
ctctcgcacattaatgtaagtacat

SEQ ID NO: 5146089 - DNA, 25 bp, Homo sapien
ctcgcacattaatgtaagtacatat

SEQ ID NO: 5146090 - DNA, 25 bp, Homo sapien
cacattaatgtaagtacatatgtat

SEQ ID NO: 5146091 - DNA, 25 bp, Homo sapien
cgcacattaatgtaagtacatatgt

SEQ ID NO: 5146092 - DNA, 25 bp, Homo sapien
cctgtaacattcaacggctttctct

SEQ ID NO: 5146093 - DNA, 25 bp, Homo sapien
agaaatctgtgagctctgggatcca

SEQ ID NO: 5146094 - DNA, 25 bp, Homo sapien
tgtaacattcaacggctttctctgt

SEQ ID NO: 5146095 - DNA, 25 bp, Homo sapien
ttccaattcataaagaagacccaga

SEQ ID NO: 5146096 - DNA, 25 bp, Homo sapien
agtttataaattgcaggacttcctg

SEQ ID NO: 5146097 - DNA, 25 bp, Homo sapien
tagtttataaattgcaggacttcct

SEQ ID NO: 5146098 - DNA, 25 bp, Homo sapien
gtcttacataaagttctgactgaat

SEQ ID NO: 5146099 - DNA, 25 bp, Homo sapien
aaacttgaacgcaaagctatgttcc

SEQ ID NO: 5146100 - DNA, 25 bp, Homo sapien
gggtctgtacaacacacgaattcca

SEQ ID NO: 5146101 - DNA, 25 bp, Homo sapien
tctaaacttgaacgcaaagctatgt

SEQ ID NO: 5146102 - DNA, 25 bp, Homo sapien
tccaaacactgtaaagactccagat

SEQ ID NO: 5146103 - DNA, 25 bp, Homo sapien
tcctgcacatctctagtggaaagcg

SEQ ID NO: 5146104 - DNA, 25 bp, Homo sapien
gaagcataagattagcataggccag

SEQ ID NO: 5146105 - DNA, 25 bp, Homo sapien
ccagcagtaagtctgtattggttgc

SEQ ID NO: 5146106 - DNA, 25 bp, Homo sapien
taagaaagtagctgacagttcatca

SEQ ID NO: 5146107 - DNA, 25 bp, Homo sapien
gacagttcatcatttccacccaaag

SEQ ID NO: 5146108 - DNA, 25 bp, Homo sapien
atttctaagaaagtagctgacagtt

SEQ ID NO: 5146109 - DNA, 25 bp, Homo sapien
tgacagttcatcatttccacccaaa

SEQ ID NO: 5146110 - DNA, 25 bp, Homo sapien
gctcagaaagagctcgccattgaac

SEQ ID NO: 5146111 - DNA, 25 bp, Homo sapien
agagctcgccattgaacattattac

SEQ ID NO: 5146112 - DNA, 25 bp, Homo sapien
tatgagatagcacaatgcagccagc

SEQ ID NO: 5146113 - DNA, 25 bp, Homo sapien
gaaatgctatgagatagcacaatgc

SEQ ID NO: 5146114 - DNA, 25 bp, Homo sapien
aataagaactattggcagggcgcgg

SEQ ID NO: 5146115 - DNA, 25 bp, Homo sapien
taaaaataagaactattggcagggc

SEQ ID NO: 5146116 - DNA, 25 bp, Homo sapien
tctaatagacacacagacagataaa

SEQ ID NO: 5146117 - DNA, 25 bp, Homo sapien
gcaagactctaatagacacacagac

SEQ ID NO: 5146118 - DNA, 25 bp, Homo sapien
tttgtccagcttcaccttttattaa

SEQ ID NO: 5146119 - DNA, 25 bp, Homo sapien
gattttgtccagcttcaccttttat

SEQ ID NO: 5146120 - DNA, 25 bp, Homo sapien
tgtccagcttcaccttttattaatt

SEQ ID NO: 5146121 - DNA, 25 bp, Homo sapien
ttttgtccagcttcaccttttatta

SEQ ID NO: 5146122 - DNA, 25 bp, Homo sapien
atcatataatgcagactgcccgctt

SEQ ID NO: 5146123 - DNA, 25 bp, Homo sapien
tcatataatgcagactgcccgcttt

SEQ ID NO: 5146124 - DNA, 25 bp, Homo sapien
atgaattccactgtaagccaagcca

SEQ ID NO: 5146125 - DNA, 25 bp, Homo sapien
tttagccattttcggattccaggta

SEQ ID NO: 5146126 - DNA, 25 bp, Homo sapien
tttcggattccaggtaaagcaggca

SEQ ID NO: 5146127 - DNA, 25 bp, Homo sapien
tccactgtaagccaagccaagtaag

SEQ ID NO: 5146128 - DNA, 25 bp, Homo sapien
actgcttttctgtgaatcagagtac

SEQ ID NO: 5146129 - DNA, 25 bp, Homo sapien
ctcctttaattgtaagtggctggta

SEQ ID NO: 5146130 - DNA, 25 bp, Homo sapien
aaccgcatcccaccaagatttttgt

SEQ ID NO: 5146131 - DNA, 25 bp, Homo sapien
gcaggcataacggctgataggagct

SEQ ID NO: 5146132 - DNA, 25 bp, Homo sapien
aaacctacgcactaagtgaaagcaa

SEQ ID NO: 5146133 - DNA, 25 bp, Homo sapien
taaaacctacgcactaagtgaaagc

SEQ ID NO: 5146134 - DNA, 25 bp, Homo sapien
aaaacctacgcactaagtgaaagca

SEQ ID NO: 5146135 - DNA, 25 bp, Homo sapien
agagtgtttatttcatgctgaacta

SEQ ID NO: 5146136 - DNA, 25 bp, Homo sapien
tgcccaatgtacaagcagagcaggt

SEQ ID NO: 5146137 - DNA, 25 bp, Homo sapien
ctcttagagtgtttatttcatgctg

SEQ ID NO: 5146138 - DNA, 25 bp, Homo sapien
catgtttttcctgggctcttagagt

SEQ ID NO: 5146139 - DNA, 25 bp, Homo sapien
catttttagatagctgaaacctgcc

SEQ ID NO: 5146140 - DNA, 25 bp, Homo sapien
cagtttgttcaaaaggctgaccatc

SEQ ID NO: 5146141 - DNA, 25 bp, Homo sapien
cacaactttaaggaacacgcatgat

SEQ ID NO: 5146142 - DNA, 25 bp, Homo sapien
gaaacctgcctcttctgtagtgtca

SEQ ID NO: 5146143 - DNA, 25 bp, Homo sapien
gtttaaacagaggatcaataggttc

SEQ ID NO: 5146144 - DNA, 25 bp, Homo sapien
ataatgaacacttctccctatgtat

SEQ ID NO: 5146145 - DNA, 25 bp, Homo sapien
gaggatcaataggttcaggaatact

SEQ ID NO: 5146146 - DNA, 25 bp, Homo sapien
aatgaacacttctccctatgtattc

SEQ ID NO: 5146147 - DNA, 25 bp, Homo sapien
agaaacaacactttttatagattca

SEQ ID NO: 5146148 - DNA, 25 bp, Homo sapien
tttcttgaccactgaaagatttgaa

SEQ ID NO: 5146149 - DNA, 25 bp, Homo sapien
ttcttgaccactgaaagatttgaat

SEQ ID NO: 5146150 - DNA, 25 bp, Homo sapien
tcttgaccactgaaagatttgaatc

SEQ ID NO: 5146151 - DNA, 25 bp, Homo sapien
gaaccatttttatagagaggatctc

SEQ ID NO: 5146152 - DNA, 25 bp, Homo sapien
ccttcactatagttttcgagttcct

SEQ ID NO: 5146153 - DNA, 25 bp, Homo sapien
gttcctgcatgactgacttaagcat

SEQ ID NO: 5146154 - DNA, 25 bp, Homo sapien
tctgaatccgcatttcgcaaagaac

SEQ ID NO: 5146155 - DNA, 25 bp, Homo sapien
ataaaaatcacaaaagagcatttaa

SEQ ID NO: 5146156 - DNA, 25 bp, Homo sapien
gagcatttaaaacacttagaaacaa

SEQ ID NO: 5146157 - DNA, 25 bp, Homo sapien
cacaatgaaatgattccattctttc

SEQ ID NO: 5146158 - DNA, 25 bp, Homo sapien
tttcacaatgaaatgattccattct

SEQ ID NO: 5146159 - DNA, 25 bp, Homo sapien
ttacttcttggcgaatcattttcag

SEQ ID NO: 5146160 - DNA, 25 bp, Homo sapien
cttaatggcctttacttcttggcga

SEQ ID NO: 5146161 - DNA, 25 bp, Homo sapien
ggcctttacttcttggcgaatcatt

SEQ ID NO: 5146162 - DNA, 25 bp, Homo sapien
aatggcctttacttcttggcgaatc

SEQ ID NO: 5146163 - DNA, 25 bp, Homo sapien
gtctgtgacccctgatatccatcag

SEQ ID NO: 5146164 - DNA, 25 bp, Homo sapien
cataattctctgtgggccaacgatg

SEQ ID NO: 5146165 - DNA, 25 bp, Homo sapien
ctgttagtggagccccatgaaatgt

SEQ ID NO: 5146166 - DNA, 25 bp, Homo sapien
ggtccataattctctgtgggccaac

SEQ ID NO: 5146167 - DNA, 25 bp, Homo sapien
gaagatactgggaattatatgctgg

SEQ ID NO: 5146168 - DNA, 25 bp, Homo sapien
ctttgtgggagtaacattagctgct

SEQ ID NO: 5146169 - DNA, 25 bp, Homo sapien
agtaacattagctgctggtctgaga

SEQ ID NO: 5146170 - DNA, 25 bp, Homo sapien
ggaattatatgctggtgactgacta

SEQ ID NO: 5146171 - DNA, 25 bp, Homo sapien
tccactctgggctactgaactagtt

SEQ ID NO: 5146172 - DNA, 25 bp, Homo sapien
gattcaacttggcaggagacttaga

SEQ ID NO: 5146173 - DNA, 25 bp, Homo sapien
tgggagtgcttgaccgagaaacatg

SEQ ID NO: 5146174 - DNA, 25 bp, Homo sapien
cacatggtgactctctgggagtgct

SEQ ID NO: 5146175 - DNA, 25 bp, Homo sapien
tgaggaaggggtgctagtccaaaag

SEQ ID NO: 5146176 - DNA, 25 bp, Homo sapien
agctgctaatgctccagtgacaata

SEQ ID NO: 5146177 - DNA, 25 bp, Homo sapien
cctaataagtgaccgatagctgcta

SEQ ID NO: 5146178 - DNA, 25 bp, Homo sapien
tgctaatgctccagtgacaatattt

SEQ ID NO: 5146179 - DNA, 25 bp, Homo sapien
taagtgaccgatagctgctaatgct

SEQ ID NO: 5146180 - DNA, 25 bp, Homo sapien
caatcaacagattatatgttgtagg

SEQ ID NO: 5146181 - DNA, 25 bp, Homo sapien
aacagattatatgttgtaggtgaca

SEQ ID NO: 5146182 - DNA, 25 bp, Homo sapien
ttttataggtctgctttctttgcca

SEQ ID NO: 5146183 - DNA, 25 bp, Homo sapien
tgtgatattttataggtctgctttc

SEQ ID NO: 5146184 - DNA, 25 bp, Homo sapien
tgatctgcactttttgtggtggaac

SEQ ID NO: 5146185 - DNA, 25 bp, Homo sapien
tgagcaaccgcagcaagttttccct

SEQ ID NO: 5146186 - DNA, 25 bp, Homo sapien
gaactgcagcaagacgttcttcaag

SEQ ID NO: 5146187 - DNA, 25 bp, Homo sapien
gcaacatcgtatttataacaggaag

SEQ ID NO: 5146188 - DNA, 25 bp, Homo sapien
ggctgagctgcaacatcgtatttat

SEQ ID NO: 5146189 - DNA, 25 bp, Homo sapien
atatccttcaacagttctgaaagat

SEQ ID NO: 5146190 - DNA, 25 bp, Homo sapien
atccttcaacagttctgaaagattt

SEQ ID NO: 5146191 - DNA, 25 bp, Homo sapien
tatccttcaacagttctgaaagatt

SEQ ID NO: 5146192 - DNA, 25 bp, Homo sapien
gatatccttcaacagttctgaaaga

SEQ ID NO: 5146193 - DNA, 25 bp, Homo sapien
tcatggcttgcatgcagtgacaccc

SEQ ID NO: 5146194 - DNA, 25 bp, Homo sapien
gatgtagcacggacctctaaggtgt

SEQ ID NO: 5146195 - DNA, 25 bp, Homo sapien
agtgacaccctatcaagagcctgga

SEQ ID NO: 5146196 - DNA, 25 bp, Homo sapien
gctctagggctctgacaacataatg

SEQ ID NO: 5146197 - DNA, 25 bp, Homo sapien
tatcaaagagttggtcgacgttctc

SEQ ID NO: 5146198 - DNA, 25 bp, Homo sapien
caaagagttggtcgacgttctcaca

SEQ ID NO: 5146199 - DNA, 25 bp, Homo sapien
gagttggtcgacgttctcacaacaa

SEQ ID NO: 5146200 - DNA, 25 bp, Homo sapien
ggtatcaaagagttggtcgacgttc

SEQ ID NO: 5146201 - DNA, 25 bp, Homo sapien
tgtgtatagcaccaggtttccactg

SEQ ID NO: 5146202 - DNA, 25 bp, Homo sapien
cgaaccactcctgtgtatagcacca

SEQ ID NO: 5146203 - DNA, 25 bp, Homo sapien
cactcctgtgtatagcaccaggttt

SEQ ID NO: 5146204 - DNA, 25 bp, Homo sapien
tatagcaccaggtttccactgcctt

SEQ ID NO: 5146205 - DNA, 25 bp, Homo sapien
ctgctttgttttttgcccgccttct

SEQ ID NO: 5146206 - DNA, 25 bp, Homo sapien
ttttttgcccgccttctccacaagc

SEQ ID NO: 5146207 - DNA, 25 bp, Homo sapien
tgctttgttttttgcccgccttctc

SEQ ID NO: 5146208 - DNA, 25 bp, Homo sapien
tttgcccgccttctccacaagcttt

SEQ ID NO: 5146209 - DNA, 25 bp, Homo sapien
gtgggtgcaaccaagagtgaacctc

SEQ ID NO: 5146210 - DNA, 25 bp, Homo sapien
ggtgcaaccaagagtgaacctcaga

SEQ ID NO: 5146211 - DNA, 25 bp, Homo sapien
tgcaaccaagagtgaacctcagaac

SEQ ID NO: 5146212 - DNA, 25 bp, Homo sapien
ctatggggtgggtgcaaccaagagt

SEQ ID NO: 5146213 - DNA, 25 bp, Homo sapien
cttgctcttgctcttttcgatggtc

SEQ ID NO: 5146214 - DNA, 25 bp, Homo sapien
ttgctcttttcgatggtcaccaccc

SEQ ID NO: 5146215 - DNA, 25 bp, Homo sapien
tcttgctcttgctcttttcgatggt

SEQ ID NO: 5146216 - DNA, 25 bp, Homo sapien
ctcttgctcttttcgatggtcacca

SEQ ID NO: 5146217 - DNA, 25 bp, Homo sapien
tctttactgttagcaactatgcaca

SEQ ID NO: 5146218 - DNA, 25 bp, Homo sapien
cataatttgtaactctctttactgt

SEQ ID NO: 5146219 - DNA, 25 bp, Homo sapien
tatgcacaaccaatcatgaagatta

SEQ ID NO: 5146220 - DNA, 25 bp, Homo sapien
gcaactatgcacaaccaatcatgaa

SEQ ID NO: 5146221 - DNA, 25 bp, Homo sapien
gtagaatgacttctgacattaaatc

SEQ ID NO: 5146222 - DNA, 25 bp, Homo sapien
cactgtagaatgacttctgacatta

SEQ ID NO: 5146223 - DNA, 25 bp, Homo sapien
agaatgacttctgacattaaatcca

SEQ ID NO: 5146224 - DNA, 25 bp, Homo sapien
ctgtagaatgacttctgacattaaa

SEQ ID NO: 5146225 - DNA, 25 bp, Homo sapien
gaagaagcctctctcgcagctggag

SEQ ID NO: 5146226 - DNA, 25 bp, Homo sapien
tcgtcgcagatttccaagaagaagc

SEQ ID NO: 5146227 - DNA, 25 bp, Homo sapien
gatgattatcataggaggagtcttc

SEQ ID NO: 5146228 - DNA, 25 bp, Homo sapien
tgattatcataggaggagtcttcca

SEQ ID NO: 5146229 - DNA, 25 bp, Homo sapien
aggtttatgtaggcaatcttggaaa

SEQ ID NO: 5146230 - DNA, 25 bp, Homo sapien
tcgaaatgcatcgtgattcctgtcc

SEQ ID NO: 5146231 - DNA, 25 bp, Homo sapien
ggtttatgtaggcaatcttggaaac

SEQ ID NO: 5146232 - DNA, 25 bp, Homo sapien
aaggtttatgtaggcaatcttggaa

SEQ ID NO: 5146233 - DNA, 25 bp, Homo sapien
gctcagacatttgataggaacttgt

SEQ ID NO: 5146234 - DNA, 25 bp, Homo sapien
tctgcgttcccttgatcttttagag

SEQ ID NO: 5146235 - DNA, 25 bp, Homo sapien
gggcataggcatcacgtttcctgca

SEQ ID NO: 5146236 - DNA, 25 bp, Homo sapien
tgtgattggcatgtagttcagcttc

SEQ ID NO: 5146237 - DNA, 25 bp, Homo sapien
tggagcagcgtgttcccttcataag

SEQ ID NO: 5146238 - DNA, 25 bp, Homo sapien
gtgggtcccatagaattttgtgaat

SEQ ID NO: 5146239 - DNA, 25 bp, Homo sapien
ttcataagccaccaagaagaccgca

SEQ ID NO: 5146240 - DNA, 25 bp, Homo sapien
agaagaccgcaagctcagactcagg

SEQ ID NO: 5146241 - DNA, 25 bp, Homo sapien
ctgtaagtctacagatgacttggta

SEQ ID NO: 5146242 - DNA, 25 bp, Homo sapien
gatgggcagggtcttacaaatctct

SEQ ID NO: 5146243 - DNA, 25 bp, Homo sapien
ggtgaactgcactaaaacttgactg

SEQ ID NO: 5146244 - DNA, 25 bp, Homo sapien
ctgttggttgtgaattagggtgaac

SEQ ID NO: 5146245 - DNA, 25 bp, Homo sapien
gaacttgagtggaagggcaaactcc

SEQ ID NO: 5146246 - DNA, 25 bp, Homo sapien
cacatcagggcaagaatttccatac

SEQ ID NO: 5146247 - DNA, 25 bp, Homo sapien
agtggatgggcaggcatatcaaccc

SEQ ID NO: 5146248 - DNA, 25 bp, Homo sapien
gaggactgtctttcgggcaggtaca

SEQ ID NO: 5146249 - DNA, 25 bp, Homo sapien
gctgaccatccctatttgttggaca

SEQ ID NO: 5146250 - DNA, 25 bp, Homo sapien
actgctgttactaacaacattgttg

SEQ ID NO: 5146251 - DNA, 25 bp, Homo sapien
catccctatttgttggacatggagg

SEQ ID NO: 5146252 - DNA, 25 bp, Homo sapien
ttgttggacatggaggttactgctg

SEQ ID NO: 5146253 - DNA, 25 bp, Homo sapien
tgggtttctatttgttaatccatcc

SEQ ID NO: 5146254 - DNA, 25 bp, Homo sapien
tcacaaaatgatgggtttctatttg

SEQ ID NO: 5146255 - DNA, 25 bp, Homo sapien
caggcaggttttaccatcactgact

SEQ ID NO: 5146256 - DNA, 25 bp, Homo sapien
ttaccatcactgactttcaacagtt

SEQ ID NO: 5146257 - DNA, 25 bp, Homo sapien
ctccagaaaactgggcggagattcc

SEQ ID NO: 5146258 - DNA, 25 bp, Homo sapien
gggtgattcccagtcgaacttctca

SEQ ID NO: 5146259 - DNA, 25 bp, Homo sapien
tgagacaagtacctgctactcccat

SEQ ID NO: 5146260 - DNA, 25 bp, Homo sapien
tggtatccccatcctgagacaagta

SEQ ID NO: 5146261 - DNA, 25 bp, Homo sapien
gggacgctgccctcgcgaggagggt

SEQ ID NO: 5146262 - DNA, 25 bp, Homo sapien
cgctgccctcgcgaggagggtgggt

SEQ ID NO: 5146263 - DNA, 25 bp, Homo sapien
ctgccctcgcgaggagggtgggtgt

SEQ ID NO: 5146264 - DNA, 25 bp, Homo sapien
tgctagggacgctgccctcgcgagg

SEQ ID NO: 5146265 - DNA, 25 bp, Homo sapien
gggcgatcgtcagacatccggaggc

SEQ ID NO: 5146266 - DNA, 25 bp, Homo sapien
cgatcgtcagacatccggaggcgga

SEQ ID NO: 5146267 - DNA, 25 bp, Homo sapien
gaggcggacgtcagaggagagtggt

SEQ ID NO: 5146268 - DNA, 25 bp, Homo sapien
cagacatccggaggcggacgtcaga

SEQ ID NO: 5146269 - DNA, 25 bp, Homo sapien
ggaatcgatcgagtattgggaaaag

SEQ ID NO: 5146270 - DNA, 25 bp, Homo sapien
tcggcgtctccaagaacctgggagc

SEQ ID NO: 5146271 - DNA, 25 bp, Homo sapien
tgggagcgcgcagagttgacaggtg

SEQ ID NO: 5146272 - DNA, 25 bp, Homo sapien
gtggctgcacgcgaaagcgctccgc

SEQ ID NO: 5146273 - DNA, 25 bp, Homo sapien
tatctaatgatccagattcttctgc

SEQ ID NO: 5146274 - DNA, 25 bp, Homo sapien
ttttatctaatgatccagattcttc

SEQ ID NO: 5146275 - DNA, 25 bp, Homo sapien
tctaatgatccagattcttctgcag

SEQ ID NO: 5146276 - DNA, 25 bp, Homo sapien
ttatctaatgatccagattcttctg

SEQ ID NO: 5146277 - DNA, 25 bp, Homo sapien
caactatgatggcttcgctgcgctc

SEQ ID NO: 5146278 - DNA, 25 bp, Homo sapien
ttagaaggtagaacacgatgatagc

SEQ ID NO: 5146279 - DNA, 25 bp, Homo sapien
tgatagctatcagtccttccacatg

SEQ ID NO: 5146280 - DNA, 25 bp, Homo sapien
tattccaaccagcaaaattagaagg

SEQ ID NO: 5146281 - DNA, 25 bp, Homo sapien
cataacctggtacataaactgcttc

SEQ ID NO: 5146282 - DNA, 25 bp, Homo sapien
gaatatccaattggtgcctgagccc

SEQ ID NO: 5146283 - DNA, 25 bp, Homo sapien
ctaaaatcagactaagagaatatcc

SEQ ID NO: 5146284 - DNA, 25 bp, Homo sapien
gctgtgccattgatataccctcctc

SEQ ID NO: 5146285 - DNA, 25 bp, Homo sapien
cagtttctggtaatgactccttaaa

SEQ ID NO: 5146286 - DNA, 25 bp, Homo sapien
gtttctggtaatgactccttaaaga

SEQ ID NO: 5146287 - DNA, 25 bp, Homo sapien
tctggtaatgactccttaaagatct

SEQ ID NO: 5146288 - DNA, 25 bp, Homo sapien
ttctggtaatgactccttaaagatc

SEQ ID NO: 5146289 - DNA, 25 bp, Homo sapien
cccctttgaacgcataggttttgca

SEQ ID NO: 5146290 - DNA, 25 bp, Homo sapien
tctaacatggtcacatacccctttg

SEQ ID NO: 5146291 - DNA, 25 bp, Homo sapien
tccatagatttgctgaaacgggtct

SEQ ID NO: 5146292 - DNA, 25 bp, Homo sapien
ggaataaacaggagtccgcccatgc

SEQ ID NO: 5146293 - DNA, 25 bp, Homo sapien
ttacaggtgcaatgatgttacctgg

SEQ ID NO: 5146294 - DNA, 25 bp, Homo sapien
tctctctcccaaagagttcaagcaa

SEQ ID NO: 5146295 - DNA, 25 bp, Homo sapien
ggtgcaatgatgttacctgggtata

SEQ ID NO: 5146296 - DNA, 25 bp, Homo sapien
tgctttcattacccaaataatgtac

SEQ ID NO: 5146297 - DNA, 25 bp, Homo sapien
aaagagctgaacgacatcagtgtag

SEQ ID NO: 5146298 - DNA, 25 bp, Homo sapien
tagagccctcccaccagtgtgtaca

SEQ ID NO: 5146299 - DNA, 25 bp, Homo sapien
gaaatgtgcatatccacatcgatga

SEQ ID NO: 5146300 - DNA, 25 bp, Homo sapien
cagtgtaggccacagaatagagccc

SEQ ID NO: 5146301 - DNA, 25 bp, Homo sapien
caagccaagagtagacttcagatga

SEQ ID NO: 5146302 - DNA, 25 bp, Homo sapien
tttggtatttggcatgcacagcagt

SEQ ID NO: 5146303 - DNA, 25 bp, Homo sapien
tgcacagcagtgaacccgatgtctg

SEQ ID NO: 5146304 - DNA, 25 bp, Homo sapien
tctgcgactgcaggatgtgacaatg

SEQ ID NO: 5146305 - DNA, 25 bp, Homo sapien
gaagagagaaccctctgaaagtatg

SEQ ID NO: 5146306 - DNA, 25 bp, Homo sapien
tatgcttgccatgggattccaccca

SEQ ID NO: 5146307 - DNA, 25 bp, Homo sapien
tggccccaatgagtatggctgggat

SEQ ID NO: 5146308 - DNA, 25 bp, Homo sapien
tccaatggccccaatgagtatggct

SEQ ID NO: 5146309 - DNA, 25 bp, Homo sapien
ccttcgtcagtcatctttacatttt

SEQ ID NO: 5146310 - DNA, 25 bp, Homo sapien
accttcgtcagtcatctttacattt

SEQ ID NO: 5146311 - DNA, 25 bp, Homo sapien
ttccgtgcaaacatggaacttgctg

SEQ ID NO: 5146312 - DNA, 25 bp, Homo sapien
gaaactgcaccaagaccaaagaaag

SEQ ID NO: 5146313 - DNA, 25 bp, Homo sapien
tgaaggaaagctggtagatgttccg

SEQ ID NO: 5146314 - DNA, 25 bp, Homo sapien
tatacacagggcagagatactgcag

SEQ ID NO: 5146315 - DNA, 25 bp, Homo sapien
tggaatcaacatcaaggaaggcctc

SEQ ID NO: 5146316 - DNA, 25 bp, Homo sapien
catacacagttttcgtcagcaaggc

SEQ ID NO: 5146317 - DNA, 25 bp, Homo sapien
ccatggctgttgcagatgctccaaa

SEQ ID NO: 5146318 - DNA, 25 bp, Homo sapien
catctaatttaggtggcaaggttcc

SEQ ID NO: 5146319 - DNA, 25 bp, Homo sapien
cattcaggtagcatgctgggtagca

SEQ ID NO: 5146320 - DNA, 25 bp, Homo sapien
tagagagactatgcctccctgttgc

SEQ ID NO: 5146321 - DNA, 25 bp, Homo sapien
tatccacaggtgttgccttcccaga

SEQ ID NO: 5146322 - DNA, 25 bp, Homo sapien
taattcattgcaccattcaagggag

SEQ ID NO: 5146323 - DNA, 25 bp, Homo sapien
gttgaggcagacttgagattacaga

SEQ ID NO: 5146324 - DNA, 25 bp, Homo sapien
tactggatgaagatacagggttgag

SEQ ID NO: 5146325 - DNA, 25 bp, Homo sapien
cactttcatcctactgatccggggt

SEQ ID NO: 5146326 - DNA, 25 bp, Homo sapien
cttgagattacagaatcctttcaac

SEQ ID NO: 5146327 - DNA, 25 bp, Homo sapien
cctgggcctcttgcaaaggactgat

SEQ ID NO: 5146328 - DNA, 25 bp, Homo sapien
acagctgttgcatcctccagggaag

SEQ ID NO: 5146329 - DNA, 25 bp, Homo sapien
tcactgcatagtctgaggcctgggc

SEQ ID NO: 5146330 - DNA, 25 bp, Homo sapien
gctttgaaagcacctcctggatagt

SEQ ID NO: 5146331 - DNA, 25 bp, Homo sapien
ggattttctacaggcattggctata

SEQ ID NO: 5146332 - DNA, 25 bp, Homo sapien
gtactggttgagatgggttttagcc

SEQ ID NO: 5146333 - DNA, 25 bp, Homo sapien
tatcaggatggtgagattttgactc

SEQ ID NO: 5146334 - DNA, 25 bp, Homo sapien
caagttggaacgtatcaggatggtg

SEQ ID NO: 5146335 - DNA, 25 bp, Homo sapien
cattcacaatagtcccgataaaaca

SEQ ID NO: 5146336 - DNA, 25 bp, Homo sapien
ttatacattcacaatagtcccgata

SEQ ID NO: 5146337 - DNA, 25 bp, Homo sapien
cacaatagtcccgataaaacagcat

SEQ ID NO: 5146338 - DNA, 25 bp, Homo sapien
cattaccagcaatgagtagtttata

SEQ ID NO: 5146339 - DNA, 25 bp, Homo sapien
cagtgcttggagtggacgcaaggag

SEQ ID NO: 5146340 - DNA, 25 bp, Homo sapien
gcttggagtggacgcaaggagaggg

SEQ ID NO: 5146341 - DNA, 25 bp, Homo sapien
aggagaggggaggatcttttggcca

SEQ ID NO: 5146342 - DNA, 25 bp, Homo sapien
agtgcttggagtggacgcaaggaga

SEQ ID NO: 5146343 - DNA, 25 bp, Homo sapien
atgaggacaggagattctgccacag

SEQ ID NO: 5146344 - DNA, 25 bp, Homo sapien
ggacaggagattctgccacagtttc

SEQ ID NO: 5146345 - DNA, 25 bp, Homo sapien
gacaggagattctgccacagtttct

SEQ ID NO: 5146346 - DNA, 25 bp, Homo sapien
gaggacaggagattctgccacagtt

SEQ ID NO: 5146347 - DNA, 25 bp, Homo sapien
tgaagtgacacatctcccgtgttct

SEQ ID NO: 5146348 - DNA, 25 bp, Homo sapien
aatacctggtttacgatgaagccct

SEQ ID NO: 5146349 - DNA, 25 bp, Homo sapien
gtggagaatccacagtagactgggc

SEQ ID NO: 5146350 - DNA, 25 bp, Homo sapien
tagtttactgccacgttgaagtgac

SEQ ID NO: 5146351 - DNA, 25 bp, Homo sapien
agacaggttgaggaagacggaaagc

SEQ ID NO: 5146352 - DNA, 25 bp, Homo sapien
tgttctgaatgttccatgctcctgt

SEQ ID NO: 5146353 - DNA, 25 bp, Homo sapien
catgctcctgtaaccaggagagctc

SEQ ID NO: 5146354 - DNA, 25 bp, Homo sapien
gcgtagcatccctgtaagcctgtct

SEQ ID NO: 5146355 - DNA, 25 bp, Homo sapien
ctggacactctgacgaggatctggt

SEQ ID NO: 5146356 - DNA, 25 bp, Homo sapien
ggacactctgacgaggatctggtta

SEQ ID NO: 5146357 - DNA, 25 bp, Homo sapien
ttctggacactctgacgaggatctg

SEQ ID NO: 5146358 - DNA, 25 bp, Homo sapien
gacactctgacgaggatctggttac

SEQ ID NO: 5146359 - DNA, 25 bp, Homo sapien
gaaggaatcgtgagtctctacaagg

SEQ ID NO: 5146360 - DNA, 25 bp, Homo sapien
gaatgctgagattaagaaggaatcg

SEQ ID NO: 5146361 - DNA, 25 bp, Homo sapien
tctacaaggttggagactgtaatgt

SEQ ID NO: 5146362 - DNA, 25 bp, Homo sapien
agactgtaatgtgccctgcctggct

SEQ ID NO: 5146363 - DNA, 25 bp, Homo sapien
gtaaacaggtgaaagcttggatcat

SEQ ID NO: 5146364 - DNA, 25 bp, Homo sapien
ttcacagcagatctcaaaggtaaac

SEQ ID NO: 5146365 - DNA, 25 bp, Homo sapien
ctcaaaggtaaacaggtgaaagctt

SEQ ID NO: 5146366 - DNA, 25 bp, Homo sapien
tatgtttcacagcagatctcaaagg

SEQ ID NO: 5146367 - DNA, 25 bp, Homo sapien
caacggccaccttcggactggcttc

SEQ ID NO: 5146368 - DNA, 25 bp, Homo sapien
tatacatccaacggccaccttcgga

SEQ ID NO: 5146369 - DNA, 25 bp, Homo sapien
cctatacatccaacggccaccttcg

SEQ ID NO: 5146370 - DNA, 25 bp, Homo sapien
acatccaacggccaccttcggactg

SEQ ID NO: 5146371 - DNA, 25 bp, Homo sapien
gatgtagtggctgtagccagcttct

SEQ ID NO: 5146372 - DNA, 25 bp, Homo sapien
gtggctgtagccagcttctctgtgc

SEQ ID NO: 5146373 - DNA, 25 bp, Homo sapien
ctaatctgtaggggatgtagtggct

SEQ ID NO: 5146374 - DNA, 25 bp, Homo sapien
gccagcttctctgtgcagcagttta

SEQ ID NO: 5146375 - DNA, 25 bp, Homo sapien
gtctcaccagtgacactgtgttgca

SEQ ID NO: 5146376 - DNA, 25 bp, Homo sapien
tcaccagtgacactgtgttgcacat

SEQ ID NO: 5146377 - DNA, 25 bp, Homo sapien
cagtctcaccagtgacactgtgttg

SEQ ID NO: 5146378 - DNA, 25 bp, Homo sapien
cagcagtctcaccagtgacactgtg

SEQ ID NO: 5146379 - DNA, 25 bp, Homo sapien
tcaaggcgataattagagaagtcaa

SEQ ID NO: 5146380 - DNA, 25 bp, Homo sapien
cacaaagtctcaaggcgataattag

SEQ ID NO: 5146381 - DNA, 25 bp, Homo sapien
gcctttggaaggtctcattgtatct

SEQ ID NO: 5146382 - DNA, 25 bp, Homo sapien
agcttcctgttcctcatgcatgcct

SEQ ID NO: 5146383 - DNA, 25 bp, Homo sapien
gaaactaaaaccagacaaacatcaa

SEQ ID NO: 5146384 - DNA, 25 bp, Homo sapien
aagaaagccagaggccaatatcttt

SEQ ID NO: 5146385 - DNA, 25 bp, Homo sapien
taaaaagatcatccaacgtgaccaa

SEQ ID NO: 5146386 - DNA, 25 bp, Homo sapien
gatcatccaacgtgaccaagtggga

SEQ ID NO: 5146387 - DNA, 25 bp, Homo sapien
ccaggaaggaaggctggaacagcat

SEQ ID NO: 5146388 - DNA, 25 bp, Homo sapien
gcccaggaaggaaggctggaacagc

SEQ ID NO: 5146389 - DNA, 25 bp, Homo sapien
cccaggaaggaaggctggaacagca

SEQ ID NO: 5146390 - DNA, 25 bp, Homo sapien
cacgtctttgcgaatatgcacatca

SEQ ID NO: 5146391 - DNA, 25 bp, Homo sapien
ggccaacacgtctttgcgaatatgc

SEQ ID NO: 5146392 - DNA, 25 bp, Homo sapien
tatgcacatcatacttcatgctgga

SEQ ID NO: 5146393 - DNA, 25 bp, Homo sapien
cgtgttggccaacacgtctttgcga

SEQ ID NO: 5146394 - DNA, 25 bp, Homo sapien
tcttattggcaaattgtaagggcca

SEQ ID NO: 5146395 - DNA, 25 bp, Homo sapien
gctttcctaatgcagcatgtgtagt

SEQ ID NO: 5146396 - DNA, 25 bp, Homo sapien
gaagctaacttgcatcagacagtcc

SEQ ID NO: 5146397 - DNA, 25 bp, Homo sapien
tccacgtgttttctagagtgaaaag

SEQ ID NO: 5146398 - DNA, 25 bp, Homo sapien
tgttatccctcacaggggagaggca

SEQ ID NO: 5146399 - DNA, 25 bp, Homo sapien
gaggcagcctttgtgatctcttact

SEQ ID NO: 5146400 - DNA, 25 bp, Homo sapien
cttactggcttagaccatgcagatt

SEQ ID NO: 5146401 - DNA, 25 bp, Homo sapien
gaccatgcagatttaaagctaaagg

SEQ ID NO: 5146402 - DNA, 25 bp, Homo sapien
taagatgccccttgtttagtcagcg

SEQ ID NO: 5146403 - DNA, 25 bp, Homo sapien
ccccttgtttagtcagcgtcagcat

SEQ ID NO: 5146404 - DNA, 25 bp, Homo sapien
tataagatgccccttgtttagtcag

SEQ ID NO: 5146405 - DNA, 25 bp, Homo sapien
gatgccccttgtttagtcagcgtca

SEQ ID NO: 5146406 - DNA, 25 bp, Homo sapien
gacaacctgggaaaggacagcatct

SEQ ID NO: 5146407 - DNA, 25 bp, Homo sapien
caacctgggaaaggacagcatcttg

SEQ ID NO: 5146408 - DNA, 25 bp, Homo sapien
tagacaacctgggaaaggacagcat

SEQ ID NO: 5146409 - DNA, 25 bp, Homo sapien
ctagacaacctgggaaaggacagca

SEQ ID NO: 5146410 - DNA, 25 bp, Homo sapien
gggatatgagcaatcatcatttctc

SEQ ID NO: 5146411 - DNA, 25 bp, Homo sapien
catttctctatgtgcttcaccgggt

SEQ ID NO: 5146412 - DNA, 25 bp, Homo sapien
tctgtaagtggggaaacggctctgt

SEQ ID NO: 5146413 - DNA, 25 bp, Homo sapien
ctatgtgcttcaccgggtacttcta

SEQ ID NO: 5146414 - DNA, 25 bp, Homo sapien
gggagcactgacattactaagaagc

SEQ ID NO: 5146415 - DNA, 25 bp, Homo sapien
ttggtgctacataaggaagggagac

SEQ ID NO: 5146416 - DNA, 25 bp, Homo sapien
gccaaaatgtgaccaggagctgtgt

SEQ ID NO: 5146417 - DNA, 25 bp, Homo sapien
gttcgagagaagagttccggctttc

SEQ ID NO: 5146418 - DNA, 25 bp, Homo sapien
tgtagtttggggacatatgtttatt

SEQ ID NO: 5146419 - DNA, 25 bp, Homo sapien
ttggggacatatgtttattttggtc

SEQ ID NO: 5146420 - DNA, 25 bp, Homo sapien
ctgtagtttggggacatatgtttat

SEQ ID NO: 5146421 - DNA, 25 bp, Homo sapien
gggacatatgtttattttggtccat

SEQ ID NO: 5146422 - DNA, 25 bp, Homo sapien
tggttggtctaccttcttgctttgc

SEQ ID NO: 5146423 - DNA, 25 bp, Homo sapien
gacaagcagctgagaatgttgtcct

SEQ ID NO: 5146424 - DNA, 25 bp, Homo sapien
ctgcagaatggttggtctaccttct

SEQ ID NO: 5146425 - DNA, 25 bp, Homo sapien
tgactttttcccttgatgaatttag

SEQ ID NO: 5146426 - DNA, 25 bp, Homo sapien
aatcaggccagtcttggtactctgc

SEQ ID NO: 5146427 - DNA, 25 bp, Homo sapien
ggccagtcttggtactctgctgggt

SEQ ID NO: 5146428 - DNA, 25 bp, Homo sapien
caggccagtcttggtactctgctgg

SEQ ID NO: 5146429 - DNA, 25 bp, Homo sapien
atcaggccagtcttggtactctgct

SEQ ID NO: 5146430 - DNA, 25 bp, Homo sapien
cttctcctgcaggcttaagttctgt

SEQ ID NO: 5146431 - DNA, 25 bp, Homo sapien
tctcctgcaggcttaagttctgtcc

SEQ ID NO: 5146432 - DNA, 25 bp, Homo sapien
tcaaaagccttagccttctcctgca

SEQ ID NO: 5146433 - DNA, 25 bp, Homo sapien
ctcctgcaggcttaagttctgtcca

SEQ ID NO: 5146434 - DNA, 25 bp, Homo sapien
caggctttatgttcagtcaatggaa

SEQ ID NO: 5146435 - DNA, 25 bp, Homo sapien
gatctactggtgattgattacaggg

SEQ ID NO: 5146436 - DNA, 25 bp, Homo sapien
cggatgctgcgcctcacaggcttta

SEQ ID NO: 5146437 - DNA, 25 bp, Homo sapien
caatggaaatagcaactgcgactgt

SEQ ID NO: 5146438 - DNA, 25 bp, Homo sapien
tagctaggctcactgtttacaaaca

SEQ ID NO: 5146439 - DNA, 25 bp, Homo sapien
tctttactgcagcttgtgaggcctg

SEQ ID NO: 5146440 - DNA, 25 bp, Homo sapien
cccggtttagaactctgcagctgca

SEQ ID NO: 5146441 - DNA, 25 bp, Homo sapien
tcaaattgcaccagacccacttgct

SEQ ID NO: 5146442 - DNA, 25 bp, Homo sapien
taaaataattgagccttgtgtggcc

SEQ ID NO: 5146443 - DNA, 25 bp, Homo sapien
tgatggaatgtcaaattggcataca

SEQ ID NO: 5146444 - DNA, 25 bp, Homo sapien
cacttttaccagaagacatctcata

SEQ ID NO: 5146445 - DNA, 25 bp, Homo sapien
ggtgaattatttgctatccaaaaag

SEQ ID NO: 5146446 - DNA, 25 bp, Homo sapien
taagagtaagctccaacaagtagag

SEQ ID NO: 5146447 - DNA, 25 bp, Homo sapien
ggagcacactcttttagcccacact

SEQ ID NO: 5146448 - DNA, 25 bp, Homo sapien
gccccaatgggaagagtcactgctg

SEQ ID NO: 5146449 - DNA, 25 bp, Homo sapien
tctgggccccaatgggaagagtcac

SEQ ID NO: 5146450 - DNA, 25 bp, Homo sapien
ccacatggaaagtaggcaccccaag

SEQ ID NO: 5146451 - DNA, 25 bp, Homo sapien
tggaaagtaggcaccccaagcttca

SEQ ID NO: 5146452 - DNA, 25 bp, Homo sapien
tccctctgtgccctctactagtcat

SEQ ID NO: 5146453 - DNA, 25 bp, Homo sapien
acatggaaagtaggcaccccaagct

SEQ ID NO: 5146454 - DNA, 25 bp, Homo sapien
tgctgactgtccagagcttataaac

SEQ ID NO: 5146455 - DNA, 25 bp, Homo sapien
gtgctgactgtccagagcttataaa

SEQ ID NO: 5146456 - DNA, 25 bp, Homo sapien
agcttgctgcctttagtcaaactgc

SEQ ID NO: 5146457 - DNA, 25 bp, Homo sapien
cagcttgctgcctttagtcaaactg

SEQ ID NO: 5146458 - DNA, 25 bp, Homo sapien
gctgcaaagtctaaaggctccaaag

SEQ ID NO: 5146459 - DNA, 25 bp, Homo sapien
cttacctgagttttatttggagctg

SEQ ID NO: 5146460 - DNA, 25 bp, Homo sapien
tcaggacccaataccatctgaagat

SEQ ID NO: 5146461 - DNA, 25 bp, Homo sapien
gcattcagttcacgacttacctgag

SEQ ID NO: 5146462 - DNA, 25 bp, Homo sapien
tcgtgggagcgtttttctcaatctt

SEQ ID NO: 5146463 - DNA, 25 bp, Homo sapien
tttccatcgtgggagcgtttttctc

SEQ ID NO: 5146464 - DNA, 25 bp, Homo sapien
cttttgataatatcaacgtagggac

SEQ ID NO: 5146465 - DNA, 25 bp, Homo sapien
cgtagggactccatctacttccatg

SEQ ID NO: 5146466 - DNA, 25 bp, Homo sapien
tgccagaataagatcatcaggcttg

SEQ ID NO: 5146467 - DNA, 25 bp, Homo sapien
gtaagttgccagaataagatcatca

SEQ ID NO: 5146468 - DNA, 25 bp, Homo sapien
aagttgccagaataagatcatcagg

SEQ ID NO: 5146469 - DNA, 25 bp, Homo sapien
gactttgggtaagttgccagaataa

SEQ ID NO: 5146470 - DNA, 25 bp, Homo sapien
aaaatttcatgcatccatgttgtac

SEQ ID NO: 5146471 - DNA, 25 bp, Homo sapien
tgtctaaaatttcatgcatccatgt

SEQ ID NO: 5146472 - DNA, 25 bp, Homo sapien
tttcagttcaaggaaagcgtgtcta

SEQ ID NO: 5146473 - DNA, 25 bp, Homo sapien
tatctagagtctgggctcttttgca

SEQ ID NO: 5146474 - DNA, 25 bp, Homo sapien
ttttatcagttgtggtgaggacatt

SEQ ID NO: 5146475 - DNA, 25 bp, Homo sapien
tgtgaagggagatgtgtttttatca

SEQ ID NO: 5146476 - DNA, 25 bp, Homo sapien
gaggacatttcaagaacgaactcca

SEQ ID NO: 5146477 - DNA, 25 bp, Homo sapien
tccagatagatggtggaatcagatg

SEQ ID NO: 5146478 - DNA, 25 bp, Homo sapien
cttctgaggccaggagaatatcttc

SEQ ID NO: 5146479 - DNA, 25 bp, Homo sapien
tgaggccaggagaatatcttctagt

SEQ ID NO: 5146480 - DNA, 25 bp, Homo sapien
ctctgcttctgaggccaggagaata

SEQ ID NO: 5146481 - DNA, 25 bp, Homo sapien
tctgaggccaggagaatatcttcta

SEQ ID NO: 5146482 - DNA, 25 bp, Homo sapien
ccttgggatttctggccacatagac

SEQ ID NO: 5146483 - DNA, 25 bp, Homo sapien
cttgggatttctggccacatagaca

SEQ ID NO: 5146484 - DNA, 25 bp, Homo sapien
caccaggcaatccttgggatttctg

SEQ ID NO: 5146485 - DNA, 25 bp, Homo sapien
taggacaccaggcaatccttgggat

SEQ ID NO: 5146486 - DNA, 25 bp, Homo sapien
tacagaggtgcttattgttagagtc

SEQ ID NO: 5146487 - DNA, 25 bp, Homo sapien
cagaggtgcttattgttagagtcac

SEQ ID NO: 5146488 - DNA, 25 bp, Homo sapien
tcaatcaggatggccttttgtaact

SEQ ID NO: 5146489 - DNA, 25 bp, Homo sapien
caatcaggatggccttttgtaactt

SEQ ID NO: 5146490 - DNA, 25 bp, Homo sapien
acatggtcaaaccaggacccgccaa

SEQ ID NO: 5146491 - DNA, 25 bp, Homo sapien
ttcacatggtcaaaccaggacccgc

SEQ ID NO: 5146492 - DNA, 25 bp, Homo sapien
tttcacatggtcaaaccaggacccg

SEQ ID NO: 5146493 - DNA, 25 bp, Homo sapien
tggtcaaaccaggacccgccaacaa

SEQ ID NO: 5146494 - DNA, 25 bp, Homo sapien
tatcctcgtagaagaggtagaggat

SEQ ID NO: 5146495 - DNA, 25 bp, Homo sapien
cctcgtagaagaggtagaggatccg

SEQ ID NO: 5146496 - DNA, 25 bp, Homo sapien
tttaatatcctcgtagaagaggtag

SEQ ID NO: 5146497 - DNA, 25 bp, Homo sapien
taatatcctcgtagaagaggtagag

SEQ ID NO: 5146498 - DNA, 25 bp, Homo sapien
tcaaatgaggtatggtggacaatct

SEQ ID NO: 5146499 - DNA, 25 bp, Homo sapien
cacctgaccaagttttctccaagaa

SEQ ID NO: 5146500 - DNA, 25 bp, Homo sapien
ggacaatcttgtttataacatcacc

SEQ ID NO: 5146501 - DNA, 25 bp, Homo sapien
cgcagtatggttggccatgggatta

SEQ ID NO: 5146502 - DNA, 25 bp, Homo sapien
ttgagatggagtgattgaatatgtg

SEQ ID NO: 5146503 - DNA, 25 bp, Homo sapien
agatggagtgattgaatatgtgagc

SEQ ID NO: 5146504 - DNA, 25 bp, Homo sapien
atggagtgattgaatatgtgagcag

SEQ ID NO: 5146505 - DNA, 25 bp, Homo sapien
agtgattgaatatgtgagcaggtac

SEQ ID NO: 5146506 - DNA, 25 bp, Homo sapien
agtaaagtggttcttccagtctcca

SEQ ID NO: 5146507 - DNA, 25 bp, Homo sapien
agtggttcttccagtctccaggcat

SEQ ID NO: 5146508 - DNA, 25 bp, Homo sapien
tggttcttccagtctccaggcatcc

SEQ ID NO: 5146509 - DNA, 25 bp, Homo sapien
aaagtggttcttccagtctccaggc

SEQ ID NO: 5146510 - DNA, 25 bp, Homo sapien
tatcaaagttctcattcaaagccac

SEQ ID NO: 5146511 - DNA, 25 bp, Homo sapien
tcataatgcttatcaaagttctcat

SEQ ID NO: 5146512 - DNA, 25 bp, Homo sapien
taatgcttatcaaagttctcattca

SEQ ID NO: 5146513 - DNA, 25 bp, Homo sapien
tgcttatcaaagttctcattcaaag

SEQ ID NO: 5146514 - DNA, 25 bp, Homo sapien
aattcaggtggttgggttatctggc

SEQ ID NO: 5146515 - DNA, 25 bp, Homo sapien
tgaggatggtaattcaggtggttgg

SEQ ID NO: 5146516 - DNA, 25 bp, Homo sapien
gatgtaggcagtggggtaatgcctg

SEQ ID NO: 5146517 - DNA, 25 bp, Homo sapien
tggtaattcaggtggttgggttatc

SEQ ID NO: 5146518 - DNA, 25 bp, Homo sapien
tccataatgctggtgggcaaagtgg

SEQ ID NO: 5146519 - DNA, 25 bp, Homo sapien
tcattacatcaaaggaggtgtgata

SEQ ID NO: 5146520 - DNA, 25 bp, Homo sapien
ggcaaagtggtatagttggtcattg

SEQ ID NO: 5146521 - DNA, 25 bp, Homo sapien
ttccaggaacttcagtatcttctca

SEQ ID NO: 5146522 - DNA, 25 bp, Homo sapien
tcagatctctgtgcggaaggttagg

SEQ ID NO: 5146523 - DNA, 25 bp, Homo sapien
atcttcttctggtagtccttgtcaa

SEQ ID NO: 5146524 - DNA, 25 bp, Homo sapien
gaaggttagggtgcttcctgccatc

SEQ ID NO: 5146525 - DNA, 25 bp, Homo sapien
ttgggccacagtaaaatagttcttc

SEQ ID NO: 5146526 - DNA, 25 bp, Homo sapien
tgtccatcagccatgcataaccctt

SEQ ID NO: 5146527 - DNA, 25 bp, Homo sapien
ctaggtctgaactctgtgagtggac

SEQ ID NO: 5146528 - DNA, 25 bp, Homo sapien
agtggacatcactaatgactgctcc

SEQ ID NO: 5146529 - DNA, 25 bp, Homo sapien
ctggaggcccaatgacccaaaagcc

SEQ ID NO: 5146530 - DNA, 25 bp, Homo sapien
catgtgggattcaaaagtgggttca

SEQ ID NO: 5146531 - DNA, 25 bp, Homo sapien
agctgagttcctagtgctccgccca

SEQ ID NO: 5146532 - DNA, 25 bp, Homo sapien
taccctttcttctatgagcctggac

SEQ ID NO: 5146533 - DNA, 25 bp, Homo sapien
caggctcagagaacacaggtatggg

SEQ ID NO: 5146534 - DNA, 25 bp, Homo sapien
gatggatgaactgggacagcactaa

SEQ ID NO: 5146535 - DNA, 25 bp, Homo sapien
ctggaggtagccttggatgtcttgt

SEQ ID NO: 5146536 - DNA, 25 bp, Homo sapien
atgatggttgaataccaagtggagc

SEQ ID NO: 5146537 - DNA, 25 bp, Homo sapien
acttgggacagcagtaggtgaagtt

SEQ ID NO: 5146538 - DNA, 25 bp, Homo sapien
acttcggctcataagcagacgtaac

SEQ ID NO: 5146539 - DNA, 25 bp, Homo sapien
tgacacttcggctcataagcagacg

SEQ ID NO: 5146540 - DNA, 25 bp, Homo sapien
ctgggagatgacacttcggctcata

SEQ ID NO: 5146541 - DNA, 25 bp, Homo sapien
gagatgacacttcggctcataagca

SEQ ID NO: 5146542 - DNA, 25 bp, Homo sapien
tcttctacgttgtgtaaccgaacac

SEQ ID NO: 5146543 - DNA, 25 bp, Homo sapien
ctttacaccctgctcttctacgttg

SEQ ID NO: 5146544 - DNA, 25 bp, Homo sapien
agaagtacactcttggcaacccaga

SEQ ID NO: 5146545 - DNA, 25 bp, Homo sapien
cttccagaagtacactcttggcaac

SEQ ID NO: 5146546 - DNA, 25 bp, Homo sapien
cagcagtatggcaagacaggacggt

SEQ ID NO: 5146547 - DNA, 25 bp, Homo sapien
gattccacagcagtatggcaagaca

SEQ ID NO: 5146548 - DNA, 25 bp, Homo sapien
tatggcaagacaggacggtggcaac

SEQ ID NO: 5146549 - DNA, 25 bp, Homo sapien
ccacagcagtatggcaagacaggac

SEQ ID NO: 5146550 - DNA, 25 bp, Homo sapien
gaatttttaatatttatcaatgcat

SEQ ID NO: 5146551 - DNA, 25 bp, Homo sapien
aatttttaatatttatcaatgcata

SEQ ID NO: 5146552 - DNA, 25 bp, Homo sapien
taatatttatcaatgcatatttctc

SEQ ID NO: 5146553 - DNA, 25 bp, Homo sapien
tatttatcaatgcatatttctccaa

SEQ ID NO: 5146554 - DNA, 25 bp, Homo sapien
cagacggcaattgcagaggctcaaa

SEQ ID NO: 5146555 - DNA, 25 bp, Homo sapien
tcagtgggcacggaaaggactttca

SEQ ID NO: 5146556 - DNA, 25 bp, Homo sapien
catatgaactaagggcacactctac

SEQ ID NO: 5146557 - DNA, 25 bp, Homo sapien
tcaaaggcccactcaagggtcagtg

SEQ ID NO: 5146558 - DNA, 25 bp, Homo sapien
tctggacccttggagcacaggatct

SEQ ID NO: 5146559 - DNA, 25 bp, Homo sapien
gcaggcccagcatgtgtcttagtca

SEQ ID NO: 5146560 - DNA, 25 bp, Homo sapien
caatggctggcataagaggagggct

SEQ ID NO: 5146561 - DNA, 25 bp, Homo sapien
ttataagtctggacccttggagcac

SEQ ID NO: 5146562 - DNA, 25 bp, Homo sapien
cggggagtgatagaacctggctaaa

SEQ ID NO: 5146563 - DNA, 25 bp, Homo sapien
ggggagtgatagaacctggctaaag

SEQ ID NO: 5146564 - DNA, 25 bp, Homo sapien
tatggatcccactgtattgctcttg

SEQ ID NO: 5146565 - DNA, 25 bp, Homo sapien
gagaataatccacgcaacacattga

SEQ ID NO: 5146566 - DNA, 25 bp, Homo sapien
caactctgtggtaggcgttgtgctc

SEQ ID NO: 5146567 - DNA, 25 bp, Homo sapien
acatgtgtggaagggcacctgctgc

SEQ ID NO: 5146568 - DNA, 25 bp, Homo sapien
tatctgtttccccaggtctgaggtc

SEQ ID NO: 5146569 - DNA, 25 bp, Homo sapien
tggtttggcctcgaagctctggatc

SEQ ID NO: 5146570 - DNA, 25 bp, Homo sapien
ctgtttccccaggtctgaggtcagg

SEQ ID NO: 5146571 - DNA, 25 bp, Homo sapien
atctggtttggcctcgaagctctgg

SEQ ID NO: 5146572 - DNA, 25 bp, Homo sapien
ggtggccgagcccactcaatgaaag

SEQ ID NO: 5146573 - DNA, 25 bp, Homo sapien
tgatggctcgctggcacttctccac

SEQ ID NO: 5146574 - DNA, 25 bp, Homo sapien
acgtccccattctgttcaatcatat

SEQ ID NO: 5146575 - DNA, 25 bp, Homo sapien
cactcaatgaaaggatggcggtgtt

SEQ ID NO: 5146576 - DNA, 25 bp, Homo sapien
tttctcttcttcgaaagccagagga

SEQ ID NO: 5146577 - DNA, 25 bp, Homo sapien
ttctcttcttcgaaagccagaggag

SEQ ID NO: 5146578 - DNA, 25 bp, Homo sapien
caggaacggttcattggccatgttc

SEQ ID NO: 5146579 - DNA, 25 bp, Homo sapien
ctccaggaacggttcattggccatg

SEQ ID NO: 5146580 - DNA, 25 bp, Homo sapien
cagtagccctccatgcttgttgtta

SEQ ID NO: 5146581 - DNA, 25 bp, Homo sapien
gtagccctccatgcttgttgttata

SEQ ID NO: 5146582 - DNA, 25 bp, Homo sapien
agtgtgcatgacacagcccaggctg

SEQ ID NO: 5146583 - DNA, 25 bp, Homo sapien
cgccaggaataccacgatggttgct

SEQ ID NO: 5146584 - DNA, 25 bp, Homo sapien
aataccacgatggttgctcagactc

SEQ ID NO: 5146585 - DNA, 25 bp, Homo sapien
ggagagtgtgcatgacacagcccag

SEQ ID NO: 5146586 - DNA, 25 bp, Homo sapien
ggtaatttccttgcctcgcctctgg

SEQ ID NO: 5146587 - DNA, 25 bp, Homo sapien
gctggagacatggtggcctgaacat

SEQ ID NO: 5146588 - DNA, 25 bp, Homo sapien
gaccctccagggacgaaagtgaaga

SEQ ID NO: 5146589 - DNA, 25 bp, Homo sapien
gaacagagacccatgcattagccgg

SEQ ID NO: 5146590 - DNA, 25 bp, Homo sapien
ctttaaaatagctcaagaggaaaca

SEQ ID NO: 5146591 - DNA, 25 bp, Homo sapien
tttaaaatagctcaagaggaaacat

SEQ ID NO: 5146592 - DNA, 25 bp, Homo sapien
gtggaaaggtgagtctttagtatcc

SEQ ID NO: 5146593 - DNA, 25 bp, Homo sapien
gaaaggtgagtctttagtatccgtg

SEQ ID NO: 5146594 - DNA, 25 bp, Homo sapien
aaggtgagtctttagtatccgtgga

SEQ ID NO: 5146595 - DNA, 25 bp, Homo sapien
ctgagtggaaaggtgagtctttagt

SEQ ID NO: 5146596 - DNA, 25 bp, Homo sapien
cagttgttttcccagaaagacggtg

SEQ ID NO: 5146597 - DNA, 25 bp, Homo sapien
gttttcccagaaagacggtggcagc

SEQ ID NO: 5146598 - DNA, 25 bp, Homo sapien
cttgcagttgttttcccagaaagac

SEQ ID NO: 5146599 - DNA, 25 bp, Homo sapien
ttgttttcccagaaagacggtggca

SEQ ID NO: 5146600 - DNA, 25 bp, Homo sapien
tatttactcagcaaggacgtgtcta

SEQ ID NO: 5146601 - DNA, 25 bp, Homo sapien
cctaggtcaaggcagagtggttccc

SEQ ID NO: 5146602 - DNA, 25 bp, Homo sapien
caaaggtgatcacgaatgctctgcg

SEQ ID NO: 5146603 - DNA, 25 bp, Homo sapien
tctaatgccctctatgtgccaggaa

SEQ ID NO: 5146604 - DNA, 25 bp, Homo sapien
tgattatatcaagtcccaggccctt

SEQ ID NO: 5146605 - DNA, 25 bp, Homo sapien
taggtatctgcgaggacacacttct

SEQ ID NO: 5146606 - DNA, 25 bp, Homo sapien
gattgcccctttggtatcaggagca

SEQ ID NO: 5146607 - DNA, 25 bp, Homo sapien
gctgactctggaggaactgcctaca

SEQ ID NO: 5146608 - DNA, 25 bp, Homo sapien
tggtagtaggaaaccatacagtctt

SEQ ID NO: 5146609 - DNA, 25 bp, Homo sapien
tagtaggaaaccatacagtctttgg

SEQ ID NO: 5146610 - DNA, 25 bp, Homo sapien
aatggtagtaggaaaccatacagtc

SEQ ID NO: 5146611 - DNA, 25 bp, Homo sapien
gaaatggtagtaggaaaccatacag

SEQ ID NO: 5146612 - DNA, 25 bp, Homo sapien
ctcccaccatcctttcacgtggtca

SEQ ID NO: 5146613 - DNA, 25 bp, Homo sapien
tcacgtggtcaaaccaggaacccca

SEQ ID NO: 5146614 - DNA, 25 bp, Homo sapien
cctggacaattttatctagcactgt

SEQ ID NO: 5146615 - DNA, 25 bp, Homo sapien
cattttctcaaatgacgtctcctgg

SEQ ID NO: 5146616 - DNA, 25 bp, Homo sapien
aactgtagaacgatttgtcatggga

SEQ ID NO: 5146617 - DNA, 25 bp, Homo sapien
ccttccgaatttcatgctttgggtc

SEQ ID NO: 5146618 - DNA, 25 bp, Homo sapien
cagaagtttatggaggttccttcca

SEQ ID NO: 5146619 - DNA, 25 bp, Homo sapien
gcagaagtttatggaggttccttcc

SEQ ID NO: 5146620 - DNA, 25 bp, Homo sapien
agaagtttatggaggttccttccat

SEQ ID NO: 5146621 - DNA, 25 bp, Homo sapien
gaagtttatggaggttccttccatc

SEQ ID NO: 5146622 - DNA, 25 bp, Homo sapien
gaagtggtgacatactgttaatcat

SEQ ID NO: 5146623 - DNA, 25 bp, Homo sapien
taagctaccttatatcttactttgg

SEQ ID NO: 5146624 - DNA, 25 bp, Homo sapien
catcacagagattgtttgtactaca

SEQ ID NO: 5146625 - DNA, 25 bp, Homo sapien
gaaaatgggcattagacgtgatcct

SEQ ID NO: 5146626 - DNA, 25 bp, Homo sapien
tgctttcaccaggacgtaacttggg

SEQ ID NO: 5146627 - DNA, 25 bp, Homo sapien
caacagggctgcaactgggacaaat

SEQ ID NO: 5146628 - DNA, 25 bp, Homo sapien
taaatatggcatgagactgaaccca

SEQ ID NO: 5146629 - DNA, 25 bp, Homo sapien
tactaccctcagctatggaatgcca

SEQ ID NO: 5146630 - DNA, 25 bp, Homo sapien
aaggtgaataagacatgaaacaaaa

SEQ ID NO: 5146631 - DNA, 25 bp, Homo sapien
tggatacaactgaaaaccccaatga

SEQ ID NO: 5146632 - DNA, 25 bp, Homo sapien
cattgtgccaccatcatctatgcca

SEQ ID NO: 5146633 - DNA, 25 bp, Homo sapien
aatatccaaatactgcagggttgga

SEQ ID NO: 5146634 - DNA, 25 bp, Homo sapien
cagggttggagacacaggttatacc

SEQ ID NO: 5146635 - DNA, 25 bp, Homo sapien
aactggtcgagttgcaaaacactgt

SEQ ID NO: 5146636 - DNA, 25 bp, Homo sapien
tcttgttagattggtccctccttgc

SEQ ID NO: 5146637 - DNA, 25 bp, Homo sapien
tgcttgagttgtggacaactggtcg

SEQ ID NO: 5146638 - DNA, 25 bp, Homo sapien
tgcatcttagcttgaatactgaatt

SEQ ID NO: 5146639 - DNA, 25 bp, Homo sapien
tgccctgagacaggcccgcctcacc

SEQ ID NO: 5146640 - DNA, 25 bp, Homo sapien
cccagtctcttgcctagttaaagcc

SEQ ID NO: 5146641 - DNA, 25 bp, Homo sapien
gtctcttgcctagttaaagccagca

SEQ ID NO: 5146642 - DNA, 25 bp, Homo sapien
tgcctagttaaagccagcacatgct

SEQ ID NO: 5146643 - DNA, 25 bp, Homo sapien
gatcttcatctagtttattccccat

SEQ ID NO: 5146644 - DNA, 25 bp, Homo sapien
tatcattacatagttggtcatctgg

SEQ ID NO: 5146645 - DNA, 25 bp, Homo sapien
tgtcacaggttatcattacatagtt

SEQ ID NO: 5146646 - DNA, 25 bp, Homo sapien
tactttcaaaagatgtgtgctgaac

SEQ ID NO: 5146647 - DNA, 25 bp, Homo sapien
tcatcaaatctcttattctgtgctg

SEQ ID NO: 5146648 - DNA, 25 bp, Homo sapien
tgtgctgctgagaagtaatccttcc

SEQ ID NO: 5146649 - DNA, 25 bp, Homo sapien
tcaaatctcttattctgtgctgctg

SEQ ID NO: 5146650 - DNA, 25 bp, Homo sapien
aaatctcttattctgtgctgctgag

SEQ ID NO: 5146651 - DNA, 25 bp, Homo sapien
aagccccattctaactcacttgtct

SEQ ID NO: 5146652 - DNA, 25 bp, Homo sapien
ttatcctttagccattccttccacg

SEQ ID NO: 5146653 - DNA, 25 bp, Homo sapien
ggtaacaagccccattctaactcac

SEQ ID NO: 5146654 - DNA, 25 bp, Homo sapien
tccaccttatcctttagccattcct

SEQ ID NO: 5146655 - DNA, 25 bp, Homo sapien
aagaatgattccattcacttgggaa

SEQ ID NO: 5146656 - DNA, 25 bp, Homo sapien
tcttttgaagaatgattccattcac

SEQ ID NO: 5146657 - DNA, 25 bp, Homo sapien
tgaagaatgattccattcacttggg

SEQ ID NO: 5146658 - DNA, 25 bp, Homo sapien
tttgaagaatgattccattcacttg

SEQ ID NO: 5146659 - DNA, 25 bp, Homo sapien
cttggaagttccagatcttatccca

SEQ ID NO: 5146660 - DNA, 25 bp, Homo sapien
gcttggaagttccagatcttatccc

SEQ ID NO: 5146661 - DNA, 25 bp, Homo sapien
ttggaagttccagatcttatcccag

SEQ ID NO: 5146662 - DNA, 25 bp, Homo sapien
gcttttctcaatatcgccatcattt

SEQ ID NO: 5146663 - DNA, 25 bp, Homo sapien
ggaagcgcgcctgcttttctcaata

SEQ ID NO: 5146664 - DNA, 25 bp, Homo sapien
gaagttgaatggaagcgcgcctgct

SEQ ID NO: 5146665 - DNA, 25 bp, Homo sapien
caatatcgccatcattttgtatcag

SEQ ID NO: 5146666 - DNA, 25 bp, Homo sapien
agatgagttttcagggtccttgggg

SEQ ID NO: 5146667 - DNA, 25 bp, Homo sapien
aagatgagttttcagggtccttggg

SEQ ID NO: 5146668 - DNA, 25 bp, Homo sapien
ggaggcagtagttgtacaggaagat

SEQ ID NO: 5146669 - DNA, 25 bp, Homo sapien
gatgagttttcagggtccttgggga

SEQ ID NO: 5146670 - DNA, 25 bp, Homo sapien
catgaggaaaatttgtctctgaaca

SEQ ID NO: 5146671 - DNA, 25 bp, Homo sapien
tgaacattttctgttttaagcttac

SEQ ID NO: 5146672 - DNA, 25 bp, Homo sapien
tctctgaacattttctgttttaagc

SEQ ID NO: 5146673 - DNA, 25 bp, Homo sapien
tcatgaggaaaatttgtctctgaac

SEQ ID NO: 5146674 - DNA, 25 bp, Homo sapien
ggcccttctgcctagtgccaccacc

SEQ ID NO: 5146675 - DNA, 25 bp, Homo sapien
ttttggccatgcacatctttccaag

SEQ ID NO: 5146676 - DNA, 25 bp, Homo sapien
gcttgcttattggtttgactctttc

SEQ ID NO: 5146677 - DNA, 25 bp, Homo sapien
ttttgcttgcttattggtttgactc

SEQ ID NO: 5146678 - DNA, 25 bp, Homo sapien
tgcttattggtttgactctttcctg

SEQ ID NO: 5146679 - DNA, 25 bp, Homo sapien
tcttttgagttgtgactatttattt

SEQ ID NO: 5146680 - DNA, 25 bp, Homo sapien
tcctctagacttccttcttttgagt

SEQ ID NO: 5146681 - DNA, 25 bp, Homo sapien
ttctacgtggtctgaggattcttct

SEQ ID NO: 5146682 - DNA, 25 bp, Homo sapien
tccagcattggctttagagcagggg

SEQ ID NO: 5146683 - DNA, 25 bp, Homo sapien
ttggctgcagaatagtagctccctc

SEQ ID NO: 5146684 - DNA, 25 bp, Homo sapien
gggcaagcacgtggtccaaaatatg

SEQ ID NO: 5146685 - DNA, 25 bp, Homo sapien
cacgtggtccaaaatatgtaggaca

SEQ ID NO: 5146686 - DNA, 25 bp, Homo sapien
gctgcagaatagtagctccctccat

SEQ ID NO: 5146687 - DNA, 25 bp, Homo sapien
gcattgcggggaggttgttctctat

SEQ ID NO: 5146688 - DNA, 25 bp, Homo sapien
cattgcggggaggttgttctctatt

SEQ ID NO: 5146689 - DNA, 25 bp, Homo sapien
ttgtcccgatcttcagcaaaggtct

SEQ ID NO: 5146690 - DNA, 25 bp, Homo sapien
cttagatttgtcccgatcttcagca

SEQ ID NO: 5146691 - DNA, 25 bp, Homo sapien
tctaagaagaaagggagaagattgg

SEQ ID NO: 5146692 - DNA, 25 bp, Homo sapien
ctcaaagtagtctaagaagaaaggg

SEQ ID NO: 5146693 - DNA, 25 bp, Homo sapien
caaagtagtctaagaagaaagggag

SEQ ID NO: 5146694 - DNA, 25 bp, Homo sapien
gaaagggagaagattggggtcctga

SEQ ID NO: 5146695 - DNA, 25 bp, Homo sapien
gggattggatgacctcaggaaagtg

SEQ ID NO: 5146696 - DNA, 25 bp, Homo sapien
aggggattggatgacctcaggaaag

SEQ ID NO: 5146697 - DNA, 25 bp, Homo sapien
gggaggggattggatgacctcagga

SEQ ID NO: 5146698 - DNA, 25 bp, Homo sapien
attggatgacctcaggaaagtgggt

SEQ ID NO: 5146699 - DNA, 25 bp, Homo sapien
gtatgcctgctacaccctcctggtg

SEQ ID NO: 5146700 - DNA, 25 bp, Homo sapien
tattccttccattgttgacctcctg

SEQ ID NO: 5146701 - DNA, 25 bp, Homo sapien
tgtttgcacatccaacttcgcccaa

SEQ ID NO: 5146702 - DNA, 25 bp, Homo sapien
tcatctcggggtatgcctgctacac

SEQ ID NO: 5146703 - DNA, 25 bp, Homo sapien
tatttaaagcagtaccatgtgcctg

SEQ ID NO: 5146704 - DNA, 25 bp, Homo sapien
gccaaatgtggataagacagcccca

SEQ ID NO: 5146705 - DNA, 25 bp, Homo sapien
tactcgggacctgttggtgccaacc

SEQ ID NO: 5146706 - DNA, 25 bp, Homo sapien
gaatttgggcatccctcaaacagga

SEQ ID NO: 5146707 - DNA, 25 bp, Homo sapien
ggtatgccagtagctaccacaagct

SEQ ID NO: 5146708 - DNA, 25 bp, Homo sapien
gatgtggctacaagacaaggtatgc

SEQ ID NO: 5146709 - DNA, 25 bp, Homo sapien
ggtacaaattgtctcctagggcctc

SEQ ID NO: 5146710 - DNA, 25 bp, Homo sapien
caaccttgatctcggcccagtgaaa

SEQ ID NO: 5146711 - DNA, 25 bp, Homo sapien
tattctgtgccatatctataatctc

SEQ ID NO: 5146712 - DNA, 25 bp, Homo sapien
tgaatgggagcttgtctttttccag

SEQ ID NO: 5146713 - DNA, 25 bp, Homo sapien
actgaatgctgagattgaatgggag

SEQ ID NO: 5146714 - DNA, 25 bp, Homo sapien
ttttcattattctgtgccatatcta

SEQ ID NO: 5146715 - DNA, 25 bp, Homo sapien
tcaaaggatctgtgccggcctgttg

SEQ ID NO: 5146716 - DNA, 25 bp, Homo sapien
gatctgtgccggcctgttggaactg

SEQ ID NO: 5146717 - DNA, 25 bp, Homo sapien
caaaggatctgtgccggcctgttgg

SEQ ID NO: 5146718 - DNA, 25 bp, Homo sapien
aaggatctgtgccggcctgttggaa

SEQ ID NO: 5146719 - DNA, 25 bp, Homo sapien
gtcagcatatggctgcgttgtggat

SEQ ID NO: 5146720 - DNA, 25 bp, Homo sapien
agaggcagcactctatccaccacac

SEQ ID NO: 5146721 - DNA, 25 bp, Homo sapien
cagcatatggctgcgttgtggatag

SEQ ID NO: 5146722 - DNA, 25 bp, Homo sapien
caaacagggagaaagtgagttgcag

SEQ ID NO: 5146723 - DNA, 25 bp, Homo sapien
tccagatcttatcccagatgtcaca

SEQ ID NO: 5146724 - DNA, 25 bp, Homo sapien
tcacaggtgtctgtcggttgaagaa

SEQ ID NO: 5146725 - DNA, 25 bp, Homo sapien
aagaattcccttcacgtagttgaca

SEQ ID NO: 5146726 - DNA, 25 bp, Homo sapien
aaaatcctccatgtcgtgtaaggcc

SEQ ID NO: 5146727 - DNA, 25 bp, Homo sapien
gataggtagaaataagcaggtcatc

SEQ ID NO: 5146728 - DNA, 25 bp, Homo sapien
ataggtagaaataagcaggtcatca

SEQ ID NO: 5146729 - DNA, 25 bp, Homo sapien
taggtagaaataagcaggtcatcag

SEQ ID NO: 5146730 - DNA, 25 bp, Homo sapien
tccccttcccctgcaagcccttcca

SEQ ID NO: 5146731 - DNA, 25 bp, Homo sapien
ctcctcttccccttcccctgcaagc

SEQ ID NO: 5146732 - DNA, 25 bp, Homo sapien
ctcttccccttcccctgcaagccct

SEQ ID NO: 5146733 - DNA, 25 bp, Homo sapien
cttcccctgcaagcccttccaccta

SEQ ID NO: 5146734 - DNA, 25 bp, Homo sapien
ccactatctcctgagtccatgttgt

SEQ ID NO: 5146735 - DNA, 25 bp, Homo sapien
catttcgaggaaaggaaatcgttga

SEQ ID NO: 5146736 - DNA, 25 bp, Homo sapien
tgatgagtcggtgcccgtttacttt

SEQ ID NO: 5146737 - DNA, 25 bp, Homo sapien
cagatcctaaggatgggattttcat

SEQ ID NO: 5146738 - DNA, 25 bp, Homo sapien
tctggtgtgagagaatacgtctagc

SEQ ID NO: 5146739 - DNA, 25 bp, Homo sapien
gcctataatttcgaaaggtgcaaag

SEQ ID NO: 5146740 - DNA, 25 bp, Homo sapien
aactggttttcgatcaatttctacg

SEQ ID NO: 5146741 - DNA, 25 bp, Homo sapien
ggagtataacaatggccagacacag

SEQ ID NO: 5146742 - DNA, 25 bp, Homo sapien
ttttcaggatccgtggtgagggcat

SEQ ID NO: 5146743 - DNA, 25 bp, Homo sapien
agtttttctctagcaaggatggtgg

SEQ ID NO: 5146744 - DNA, 25 bp, Homo sapien
aagggaagatgtgttttcaggatcc

SEQ ID NO: 5146745 - DNA, 25 bp, Homo sapien
gtttttctctagcaaggatggtggc

SEQ ID NO: 5146746 - DNA, 25 bp, Homo sapien
gttgttttaaggagtacaactctga

SEQ ID NO: 5146747 - DNA, 25 bp, Homo sapien
tatatatatttaacaagtgaagtgt

SEQ ID NO: 5146748 - DNA, 25 bp, Homo sapien
tgtgtcaccacgtcctgtgaatttt

SEQ ID NO: 5146749 - DNA, 25 bp, Homo sapien
tgttttaaggagtacaactctgaat

SEQ ID NO: 5146750 - DNA, 25 bp, Homo sapien
tctttggaaatggtaataggacacc

SEQ ID NO: 5146751 - DNA, 25 bp, Homo sapien
attcattctttggaaatggtaatag

SEQ ID NO: 5146752 - DNA, 25 bp, Homo sapien
tattcattctttggaaatggtaata

SEQ ID NO: 5146753 - DNA, 25 bp, Homo sapien
gaagagatagagaatacggtgtttg

SEQ ID NO: 5146754 - DNA, 25 bp, Homo sapien
catcctttcacatgttcatgccagg

SEQ ID NO: 5146755 - DNA, 25 bp, Homo sapien
tttcacatgttcatgccaggagccc

SEQ ID NO: 5146756 - DNA, 25 bp, Homo sapien
gagatagagaatacggtgtttgtct

SEQ ID NO: 5146757 - DNA, 25 bp, Homo sapien
gagaaatggagtggtccatgatttc

SEQ ID NO: 5146758 - DNA, 25 bp, Homo sapien
catcaaacgaagtgtaatggacaat

SEQ ID NO: 5146759 - DNA, 25 bp, Homo sapien
ttcccaataaattctgccagcttct

SEQ ID NO: 5146760 - DNA, 25 bp, Homo sapien
gatttcagcaggaatcgatgaatag

SEQ ID NO: 5146761 - DNA, 25 bp, Homo sapien
tccccaaatcatttattacagatat

SEQ ID NO: 5146762 - DNA, 25 bp, Homo sapien
tatttttcctagacacaggaaagaa

SEQ ID NO: 5146763 - DNA, 25 bp, Homo sapien
caggaaagaaaactcctcaaatgct

SEQ ID NO: 5146764 - DNA, 25 bp, Homo sapien
aaatatttgacagttcttttaagat

SEQ ID NO: 5146765 - DNA, 25 bp, Homo sapien
ggcagtattggacaaaacgtttctc

SEQ ID NO: 5146766 - DNA, 25 bp, Homo sapien
tggacaaaacgtttctcttgctatc

SEQ ID NO: 5146767 - DNA, 25 bp, Homo sapien
ctaggaagggcagtattggacaaaa

SEQ ID NO: 5146768 - DNA, 25 bp, Homo sapien
taggaagggcagtattggacaaaac

SEQ ID NO: 5146769 - DNA, 25 bp, Homo sapien
acagttatgtgggagaggttcagta

SEQ ID NO: 5146770 - DNA, 25 bp, Homo sapien
ctgaaatacagttatgtgggagagg

SEQ ID NO: 5146771 - DNA, 25 bp, Homo sapien
ggttcagtagctgttggaagagtct

SEQ ID NO: 5146772 - DNA, 25 bp, Homo sapien
tctgtatgatgatttctatgccatg

SEQ ID NO: 5146773 - DNA, 25 bp, Homo sapien
aagtggaaagttagtctggtatcag

SEQ ID NO: 5146774 - DNA, 25 bp, Homo sapien
gtggaaagttagtctggtatcagtc

SEQ ID NO: 5146775 - DNA, 25 bp, Homo sapien
tcaaatctctcattctgagccacgg

SEQ ID NO: 5146776 - DNA, 25 bp, Homo sapien
tgagccacggtgaagtgtttcttcc

SEQ ID NO: 5146777 - DNA, 25 bp, Homo sapien
tagtgtattatcatgtgaggactga

SEQ ID NO: 5146778 - DNA, 25 bp, Homo sapien
gatgataattggcaatgataccagg

SEQ ID NO: 5146779 - DNA, 25 bp, Homo sapien
gataccaggattgtacctagtgatt

SEQ ID NO: 5146780 - DNA, 25 bp, Homo sapien
tttagtagagtgaataagagcaaac

SEQ ID NO: 5146781 - DNA, 25 bp, Homo sapien
agatgtattacactaggaccctgaa

SEQ ID NO: 5146782 - DNA, 25 bp, Homo sapien
tgactccaggattgtagcattagct

SEQ ID NO: 5146783 - DNA, 25 bp, Homo sapien
gaatcacttgatggttacttcacca

SEQ ID NO: 5146784 - DNA, 25 bp, Homo sapien
aatatatacgccagtgagagatggg

SEQ ID NO: 5146785 - DNA, 25 bp, Homo sapien
aaagaacaggaggcattttaatgtg

SEQ ID NO: 5146786 - DNA, 25 bp, Homo sapien
tattatctatgaaattcactactgc

SEQ ID NO: 5146787 - DNA, 25 bp, Homo sapien
ttgtgtatcttaggtttattatcta

SEQ ID NO: 5146788 - DNA, 25 bp, Homo sapien
tgtatcttaggtttattatctatga

SEQ ID NO: 5146789 - DNA, 25 bp, Homo sapien
cccatcttgttactggctgccactt

SEQ ID NO: 5146790 - DNA, 25 bp, Homo sapien
tccccatgggcgagagcccaaaagt

SEQ ID NO: 5146791 - DNA, 25 bp, Homo sapien
tcttcccacttagagaagacaccct

SEQ ID NO: 5146792 - DNA, 25 bp, Homo sapien
acttagagaagacaccctccccatg

SEQ ID NO: 5146793 - DNA, 25 bp, Homo sapien
gtattccacataccatatcatcctg

SEQ ID NO: 5146794 - DNA, 25 bp, Homo sapien
catcccaagcattaggaatagtgac

SEQ ID NO: 5146795 - DNA, 25 bp, Homo sapien
ccccatcccaagcattaggaatagt

SEQ ID NO: 5146796 - DNA, 25 bp, Homo sapien
cacgtattccacataccatatcatc

SEQ ID NO: 5146797 - DNA, 25 bp, Homo sapien
atagccccagtcatgaagtccacag

SEQ ID NO: 5146798 - DNA, 25 bp, Homo sapien
agcataggtatgcatcacagtccaa

SEQ ID NO: 5146799 - DNA, 25 bp, Homo sapien
tattccaggtggtatcccatagccc

SEQ ID NO: 5146800 - DNA, 25 bp, Homo sapien
tgtgacatagcgagcataggtatgc

SEQ ID NO: 5146801 - DNA, 25 bp, Homo sapien
gaaaattccagctggcccttaaggc

SEQ ID NO: 5146802 - DNA, 25 bp, Homo sapien
gctaagcagctcaccgagcttgtga

SEQ ID NO: 5146803 - DNA, 25 bp, Homo sapien
tgtgatcctcccgttgctctgagat

SEQ ID NO: 5146804 - DNA, 25 bp, Homo sapien
acctgggtgtgctccttgctaagca

SEQ ID NO: 5146805 - DNA, 25 bp, Homo sapien
tttcccgaagggcacgccagagaat

SEQ ID NO: 5146806 - DNA, 25 bp, Homo sapien
gagaatctgtggtcgaatcccagag

SEQ ID NO: 5146807 - DNA, 25 bp, Homo sapien
taactgctgaagtggtttgctgcgc

SEQ ID NO: 5146808 - DNA, 25 bp, Homo sapien
cctgattggcggtccagtgctctga

SEQ ID NO: 5146809 - DNA, 25 bp, Homo sapien
ctgtagagtagggggcccgaggcca

SEQ ID NO: 5146810 - DNA, 25 bp, Homo sapien
tgtagagtagggggcccgaggccac

SEQ ID NO: 5146811 - DNA, 25 bp, Homo sapien
tcagggatgcggtagagggcttccc

SEQ ID NO: 5146812 - DNA, 25 bp, Homo sapien
aggcaagatagtcggccagggaact

SEQ ID NO: 5146813 - DNA, 25 bp, Homo sapien
atgtggtggaggcaagatagtcggc

SEQ ID NO: 5146814 - DNA, 25 bp, Homo sapien
gtcagggatgcggtagagggcttcc

SEQ ID NO: 5146815 - DNA, 25 bp, Homo sapien
agcatggtgcccgggagctccgtga

SEQ ID NO: 5146816 - DNA, 25 bp, Homo sapien
ggtgcccgggagctccgtgactcac

SEQ ID NO: 5146817 - DNA, 25 bp, Homo sapien
cttaggcatttgtggccagcatggt

SEQ ID NO: 5146818 - DNA, 25 bp, Homo sapien
atggtgcccgggagctccgtgactc

SEQ ID NO: 5146819 - DNA, 25 bp, Homo sapien
tgcgggacccacagctggttccggg

SEQ ID NO: 5146820 - DNA, 25 bp, Homo sapien
ctgcgggacccacagctggttccgg

SEQ ID NO: 5146821 - DNA, 25 bp, Homo sapien
tctctcagtcctccaaaggtgtccg

SEQ ID NO: 5146822 - DNA, 25 bp, Homo sapien
tgggtcccgccactgccggttattg

SEQ ID NO: 5146823 - DNA, 25 bp, Homo sapien
aaggtgtccgctagcctgcgagtgc

SEQ ID NO: 5146824 - DNA, 25 bp, Homo sapien
cattggattgcaggacaggtctctc

SEQ ID NO: 5146825 - DNA, 25 bp, Homo sapien
gcttccgtgtctgcgtccgggagaa

SEQ ID NO: 5146826 - DNA, 25 bp, Homo sapien
cgtacggcgctaagggcggagtccg

SEQ ID NO: 5146827 - DNA, 25 bp, Homo sapien
acgtctccatagctacagctcggca

SEQ ID NO: 5146828 - DNA, 25 bp, Homo sapien
cagctcggcagcacttccgcttccg

SEQ ID NO: 5146829 - DNA, 25 bp, Homo sapien
accgctgcacttctgtttgcgccag

SEQ ID NO: 5146830 - DNA, 25 bp, Homo sapien
cgtaggctctactgcaggtcaaagg

SEQ ID NO: 5146831 - DNA, 25 bp, Homo sapien
gcctctgacgtaggctctactgcag

SEQ ID NO: 5146832 - DNA, 25 bp, Homo sapien
gtttgcgccagcctctgacgtaggc

SEQ ID NO: 5146833 - DNA, 25 bp, Homo sapien
gaggcgacagcagcgcgggcttcgg

SEQ ID NO: 5146834 - DNA, 25 bp, Homo sapien
cagggatagagtttacgaaagatgg

SEQ ID NO: 5146835 - DNA, 25 bp, Homo sapien
cacatcccaaatcgcggcgcggaag

SEQ ID NO: 5146836 - DNA, 25 bp, Homo sapien
cgggacaccaagagggagactaccg

SEQ ID NO: 5146837 - DNA, 25 bp, Homo sapien
gagggcggacggaggcggtcgctgt

SEQ ID NO: 5146838 - DNA, 25 bp, Homo sapien
ggcggacggaggcggtcgctgtggc

SEQ ID NO: 5146839 - DNA, 25 bp, Homo sapien
gggcggacggaggcggtcgctgtgg

SEQ ID NO: 5146840 - DNA, 25 bp, Homo sapien
agggcggacggaggcggtcgctgtg

SEQ ID NO: 5146841 - DNA, 25 bp, Homo sapien
taattccacacggaacgcgtagaac

SEQ ID NO: 5146842 - DNA, 25 bp, Homo sapien
caggtgtcagaagaactcttttcct

SEQ ID NO: 5146843 - DNA, 25 bp, Homo sapien
agaactcttttcctaattccacacg

SEQ ID NO: 5146844 - DNA, 25 bp, Homo sapien
caaaatcaaacccaggtgtcagaag

SEQ ID NO: 5146845 - DNA, 25 bp, Homo sapien
gctggtgaagccaccccatcttgaa

SEQ ID NO: 5146846 - DNA, 25 bp, Homo sapien
gaagccaccccatcttgaacaagat

SEQ ID NO: 5146847 - DNA, 25 bp, Homo sapien
ctggtgaagccaccccatcttgaac

SEQ ID NO: 5146848 - DNA, 25 bp, Homo sapien
aagccaccccatcttgaacaagatc

SEQ ID NO: 5146849 - DNA, 25 bp, Homo sapien
ttccactcttcaggaagcccgctat

SEQ ID NO: 5146850 - DNA, 25 bp, Homo sapien
tcaggaagcccgctattcaagtatt

SEQ ID NO: 5146851 - DNA, 25 bp, Homo sapien
gaagcccgctattcaagtattctct

SEQ ID NO: 5146852 - DNA, 25 bp, Homo sapien
catcacccttccactcttcaggaag

SEQ ID NO: 5146853 - DNA, 25 bp, Homo sapien
tgtattagcatcatctgtttcttgg

SEQ ID NO: 5146854 - DNA, 25 bp, Homo sapien
ttagctttctgtattagcatcatct

SEQ ID NO: 5146855 - DNA, 25 bp, Homo sapien
attagcatcatctgtttcttggcaa

SEQ ID NO: 5146856 - DNA, 25 bp, Homo sapien
tgtacaccttgatttagctttctgt

SEQ ID NO: 5146857 - DNA, 25 bp, Homo sapien
tactgggaaactgataagtacattc

SEQ ID NO: 5146858 - DNA, 25 bp, Homo sapien
aaagaacataattactgggaaactg

SEQ ID NO: 5146859 - DNA, 25 bp, Homo sapien
aagaacataattactgggaaactga

SEQ ID NO: 5146860 - DNA, 25 bp, Homo sapien
actgggaaactgataagtacattct

SEQ ID NO: 5146861 - DNA, 25 bp, Homo sapien
ttaataatatcaccagttccttcag

SEQ ID NO: 5146862 - DNA, 25 bp, Homo sapien
taatatcaccagttccttcagtaac

SEQ ID NO: 5146863 - DNA, 25 bp, Homo sapien
tcaccagttccttcagtaacaggtt

SEQ ID NO: 5146864 - DNA, 25 bp, Homo sapien
tatcaccagttccttcagtaacagg

SEQ ID NO: 5146865 - DNA, 25 bp, Homo sapien
aataggttaagtatttgatgtgttt

SEQ ID NO: 5146866 - DNA, 25 bp, Homo sapien
catttggcctgcaactcaggttttt

SEQ ID NO: 5146867 - DNA, 25 bp, Homo sapien
tgcatttggcctgcaactcaggttt

SEQ ID NO: 5146868 - DNA, 25 bp, Homo sapien
ggcagtattatataagactaaaaag

SEQ ID NO: 5146869 - DNA, 25 bp, Homo sapien
atccaatatgggactaatacccaga

SEQ ID NO: 5146870 - DNA, 25 bp, Homo sapien
gcaatctactcatccaatatgggac

SEQ ID NO: 5146871 - DNA, 25 bp, Homo sapien
ccaatatgggactaatacccagagt

SEQ ID NO: 5146872 - DNA, 25 bp, Homo sapien
tccaatatgggactaatacccagag

SEQ ID NO: 5146873 - DNA, 25 bp, Homo sapien
agagcatccagacgttcagttaatg

SEQ ID NO: 5146874 - DNA, 25 bp, Homo sapien
gagcatccagacgttcagttaatgc

SEQ ID NO: 5146875 - DNA, 25 bp, Homo sapien
gaagagcatccagacgttcagttaa

SEQ ID NO: 5146876 - DNA, 25 bp, Homo sapien
aagaagagcatccagacgttcagtt

SEQ ID NO: 5146877 - DNA, 25 bp, Homo sapien
aaagagataatggtatttagtcatg

SEQ ID NO: 5146878 - DNA, 25 bp, Homo sapien
taatggtatttagtcatgtgtgaaa

SEQ ID NO: 5146879 - DNA, 25 bp, Homo sapien
tagcccagacctaataggcaagaaa

SEQ ID NO: 5146880 - DNA, 25 bp, Homo sapien
tctgaataccgtagaactaaagaga

SEQ ID NO: 5146881 - DNA, 25 bp, Homo sapien
tgttccaactccttatgtgcatctc

SEQ ID NO: 5146882 - DNA, 25 bp, Homo sapien
atagtttatatgtgattgttccaac

SEQ ID NO: 5146883 - DNA, 25 bp, Homo sapien
cactgtatttggaacgtactgccat

SEQ ID NO: 5146884 - DNA, 25 bp, Homo sapien
taattgcgtattcattgcttcttcc

SEQ ID NO: 5146885 - DNA, 25 bp, Homo sapien
tttttggtaatgctgagaattagcc

SEQ ID NO: 5146886 - DNA, 25 bp, Homo sapien
taatgctgagaattagcctcaatga

SEQ ID NO: 5146887 - DNA, 25 bp, Homo sapien
tcttttcatcagtggtagcgtctaa

SEQ ID NO: 5146888 - DNA, 25 bp, Homo sapien
gtggtagcgtctaattgcttttgca

SEQ ID NO: 5146889 - DNA, 25 bp, Homo sapien
ccttagctgatgcttcaatctggca

SEQ ID NO: 5146890 - DNA, 25 bp, Homo sapien
gttctcttttagctcgttcaactta

SEQ ID NO: 5146891 - DNA, 25 bp, Homo sapien
tctctgcttcatgttccttagctga

SEQ ID NO: 5146892 - DNA, 25 bp, Homo sapien
gatgttcttttcacttgcctcacat

SEQ ID NO: 5146893 - DNA, 25 bp, Homo sapien
catatctgattgtcttggtttgcat

SEQ ID NO: 5146894 - DNA, 25 bp, Homo sapien
aacatatctgattgtcttggtttgc

SEQ ID NO: 5146895 - DNA, 25 bp, Homo sapien
tgcatttgaggtggctttccttaaa

SEQ ID NO: 5146896 - DNA, 25 bp, Homo sapien
tttcatttactacttgttctacaaa

SEQ ID NO: 5146897 - DNA, 25 bp, Homo sapien
gagattcaagttcttttaaggtatc

SEQ ID NO: 5146898 - DNA, 25 bp, Homo sapien
atactgtgttgagattcaagttctt

SEQ ID NO: 5146899 - DNA, 25 bp, Homo sapien
ctgtgttgagattcaagttctttta

SEQ ID NO: 5146900 - DNA, 25 bp, Homo sapien
tgttgagattcaagttcttttaagg

SEQ ID NO: 5146901 - DNA, 25 bp, Homo sapien
gattcacagtttcgagaagggcatc

SEQ ID NO: 5146902 - DNA, 25 bp, Homo sapien
cattttctccctggaggcgattcac

SEQ ID NO: 5146903 - DNA, 25 bp, Homo sapien
tgaacatcagatgcttgctgttgct

SEQ ID NO: 5146904 - DNA, 25 bp, Homo sapien
gactctgtacttctctgttatgctg

SEQ ID NO: 5146905 - DNA, 25 bp, Homo sapien
ttttgccaaggattcaccgactgcc

SEQ ID NO: 5146906 - DNA, 25 bp, Homo sapien
ttctagaagatcagactgcagggcc

SEQ ID NO: 5146907 - DNA, 25 bp, Homo sapien
cactgttgtactggattgtttgctc

SEQ ID NO: 5146908 - DNA, 25 bp, Homo sapien
aagtctcctctagtcctcctgttaa

SEQ ID NO: 5146909 - DNA, 25 bp, Homo sapien
cttttactgaagacagaggatcatt

SEQ ID NO: 5146910 - DNA, 25 bp, Homo sapien
cattttttacagaaggtgattttgc

SEQ ID NO: 5146911 - DNA, 25 bp, Homo sapien
ttccaactcttttactgaagacaga

SEQ ID NO: 5146912 - DNA, 25 bp, Homo sapien
gaagacagaggatcattttttacag

SEQ ID NO: 5146913 - DNA, 25 bp, Homo sapien
actaaattcagggatcattggcaca

SEQ ID NO: 5146914 - DNA, 25 bp, Homo sapien
gaacttcctagtacgtgccttgatg

SEQ ID NO: 5146915 - DNA, 25 bp, Homo sapien
tgagctcgaggaaaagacagctacg

SEQ ID NO: 5146916 - DNA, 25 bp, Homo sapien
tatatgtcaacctacaagcacctgc

SEQ ID NO: 5146917 - DNA, 25 bp, Homo sapien
tgctgggtctgattttcacaacgaa

SEQ ID NO: 5146918 - DNA, 25 bp, Homo sapien
tctagccgtttcatatgtttccagg

SEQ ID NO: 5146919 - DNA, 25 bp, Homo sapien
gaaatgcaggtatgctaggacttta

SEQ ID NO: 5146920 - DNA, 25 bp, Homo sapien
tgcaaattaggatcaagtatcagag

SEQ ID NO: 5146921 - DNA, 25 bp, Homo sapien
tctgctggaatctagttctttcttt

SEQ ID NO: 5146922 - DNA, 25 bp, Homo sapien
ctcttttctgctggaatctagttct

SEQ ID NO: 5146923 - DNA, 25 bp, Homo sapien
tgcctttacggcaactaattttatc

SEQ ID NO: 5146924 - DNA, 25 bp, Homo sapien
ttttctgctggaatctagttctttc

SEQ ID NO: 5146925 - DNA, 25 bp, Homo sapien
ctgctccttgaatgagatctctcat

SEQ ID NO: 5146926 - DNA, 25 bp, Homo sapien
ctggtccttttctgatcgaagagat

SEQ ID NO: 5146927 - DNA, 25 bp, Homo sapien
ccttgaatgagatctctcatggaag

SEQ ID NO: 5146928 - DNA, 25 bp, Homo sapien
gatcgaagagattcaagttcttcct

SEQ ID NO: 5146929 - DNA, 25 bp, Homo sapien
tcttaattgtcttgtaaggtcttca

SEQ ID NO: 5146930 - DNA, 25 bp, Homo sapien
tgcaaagtcgaatttcttaattgtc

SEQ ID NO: 5146931 - DNA, 25 bp, Homo sapien
tattagcacgttctttttccacatc

SEQ ID NO: 5146932 - DNA, 25 bp, Homo sapien
tacgatgctcaaaattattagcacg

SEQ ID NO: 5146933 - DNA, 25 bp, Homo sapien
tagtgtgacaaatgaagatttccaa

SEQ ID NO: 5146934 - DNA, 25 bp, Homo sapien
atgaacaggtacattaatgagaata

SEQ ID NO: 5146935 - DNA, 25 bp, Homo sapien
aatgaacaggtacattaatgagaat

SEQ ID NO: 5146936 - DNA, 25 bp, Homo sapien
gtctcaatacgagccaggagatctt

SEQ ID NO: 5146937 - DNA, 25 bp, Homo sapien
tgtaatgtctcaatacgagccagga

SEQ ID NO: 5146938 - DNA, 25 bp, Homo sapien
taatttggcattagactgtaatgtc

SEQ ID NO: 5146939 - DNA, 25 bp, Homo sapien
ctttgtctaccattgctttggctct

SEQ ID NO: 5146940 - DNA, 25 bp, Homo sapien
caagttcatttacagtagtggcatg

SEQ ID NO: 5146941 - DNA, 25 bp, Homo sapien
tttgaagttgtacctgaagttcttc

SEQ ID NO: 5146942 - DNA, 25 bp, Homo sapien
gaagttgtacctgaagttcttcaag

SEQ ID NO: 5146943 - DNA, 25 bp, Homo sapien
gttcatttacagtagtggcatgttc

SEQ ID NO: 5146944 - DNA, 25 bp, Homo sapien
acacaatagtagatcagttcatttg

SEQ ID NO: 5146945 - DNA, 25 bp, Homo sapien
agatttacacaatagtagatcagtt

SEQ ID NO: 5146946 - DNA, 25 bp, Homo sapien
tttacacaatagtagatcagttcat

SEQ ID NO: 5146947 - DNA, 25 bp, Homo sapien
acagcaataaatgggtgcttttctg

SEQ ID NO: 5146948 - DNA, 25 bp, Homo sapien
tcatcaatgtggtttgttgggcatc

SEQ ID NO: 5146949 - DNA, 25 bp, Homo sapien
aaacgttcataatcagctatttcca

SEQ ID NO: 5146950 - DNA, 25 bp, Homo sapien
caaatcttctatcttgttgttttta

SEQ ID NO: 5146951 - DNA, 25 bp, Homo sapien
atcaaacgttcataatcagctattt

SEQ ID NO: 5146952 - DNA, 25 bp, Homo sapien
gacataggcatggactacaaacaac

SEQ ID NO: 5146953 - DNA, 25 bp, Homo sapien
tgtgttaaacacctgactgacagtg

SEQ ID NO: 5146954 - DNA, 25 bp, Homo sapien
gggtccccagtaacatttatcactg

SEQ ID NO: 5146955 - DNA, 25 bp, Homo sapien
caaacaacttaatggcaaacagttt

SEQ ID NO: 5146956 - DNA, 25 bp, Homo sapien
cttcatattgttgtactgaagactg

SEQ ID NO: 5146957 - DNA, 25 bp, Homo sapien
tttgaatctgccagttcctttttgg

SEQ ID NO: 5146958 - DNA, 25 bp, Homo sapien
tgttgtactgaagactgtaatgaag

SEQ ID NO: 5146959 - DNA, 25 bp, Homo sapien
ttggttttcacaagcaattgcttga

SEQ ID NO: 5146960 - DNA, 25 bp, Homo sapien
ttaaagatgcttgaagtattaagtg

SEQ ID NO: 5146961 - DNA, 25 bp, Homo sapien
tatagacttctacttgctgctggct

SEQ ID NO: 5146962 - DNA, 25 bp, Homo sapien
ttttaaagatgcttgaagtattaag

SEQ ID NO: 5146963 - DNA, 25 bp, Homo sapien
tttatagacttctacttgctgctgg

SEQ ID NO: 5146964 - DNA, 25 bp, Homo sapien
tggtatgcacttagcgtacgctggt

SEQ ID NO: 5146965 - DNA, 25 bp, Homo sapien
tctctgatgttatttcagccagctg

SEQ ID NO: 5146966 - DNA, 25 bp, Homo sapien
tacgctggtgctgttccgcagaggt

SEQ ID NO: 5146967 - DNA, 25 bp, Homo sapien
caggtgctcgtggattttgtgcttc

SEQ ID NO: 5146968 - DNA, 25 bp, Homo sapien
tagaacattatgaactcggactttg

SEQ ID NO: 5146969 - DNA, 25 bp, Homo sapien
ggactttgtagctctcgaattcaga

SEQ ID NO: 5146970 - DNA, 25 bp, Homo sapien
tgtttagcgccctcagtttcagcct

SEQ ID NO: 5146971 - DNA, 25 bp, Homo sapien
tttcagcctgagacatagatttatt

SEQ ID NO: 5146972 - DNA, 25 bp, Homo sapien
tctagcagtgtatcatgttcagact

SEQ ID NO: 5146973 - DNA, 25 bp, Homo sapien
ccggagttccgcctctttggacaca

SEQ ID NO: 5146974 - DNA, 25 bp, Homo sapien
ttttagctggtcaatcagcatttcc

SEQ ID NO: 5146975 - DNA, 25 bp, Homo sapien
gcagcatcttgttgtgcctttctag

SEQ ID NO: 5146976 - DNA, 25 bp, Homo sapien
gttctctgactgtattgaacacaat

SEQ ID NO: 5146977 - DNA, 25 bp, Homo sapien
aaatgtcgcacttgatctcggaagc

SEQ ID NO: 5146978 - DNA, 25 bp, Homo sapien
tcggaagctatttcgaaggacctcg

SEQ ID NO: 5146979 - DNA, 25 bp, Homo sapien
aaggacctcgttctgggatgttagc

SEQ ID NO: 5146980 - DNA, 25 bp, Homo sapien
gaagagctgtgcttccatcttggag

SEQ ID NO: 5146981 - DNA, 25 bp, Homo sapien
tgatttggccttacagagatacaca

SEQ ID NO: 5146982 - DNA, 25 bp, Homo sapien
ctataagataagtgaaaggtgtatg

SEQ ID NO: 5146983 - DNA, 25 bp, Homo sapien
aaggtgtatgaagaattgctaaagc

SEQ ID NO: 5146984 - DNA, 25 bp, Homo sapien
gaattaagtaactataagataagtg

SEQ ID NO: 5146985 - DNA, 25 bp, Homo sapien
gttacagtgtgcatgtctagaagcg

SEQ ID NO: 5146986 - DNA, 25 bp, Homo sapien
gcagctgctctaaagactgtgtgta

SEQ ID NO: 5146987 - DNA, 25 bp, Homo sapien
tgtgtatgtgctggcggaagacaca

SEQ ID NO: 5146988 - DNA, 25 bp, Homo sapien
gaagcgggaggtctgtgtttctcct

SEQ ID NO: 5146989 - DNA, 25 bp, Homo sapien
tgatctgcactttttgtggtggaac

SEQ ID NO: 5146990 - DNA, 25 bp, Homo sapien
ctacgataatgtttttattagtcag

SEQ ID NO: 5146991 - DNA, 25 bp, Homo sapien
attttatagagatgcatactgaagt

SEQ ID NO: 5146992 - DNA, 25 bp, Homo sapien
tgtttttattagtcagaaaatgtta

SEQ ID NO: 5146993 - DNA, 25 bp, Homo sapien
tgttattttatagagatgcatactg

SEQ ID NO: 5146994 - DNA, 25 bp, Homo sapien
catttgacatgaaaaccggaactcc

SEQ ID NO: 5146995 - DNA, 25 bp, Homo sapien
aaaaatgggctttaggagcttctga

SEQ ID NO: 5146996 - DNA, 25 bp, Homo sapien
tctgattaaatatggcagactgaac

SEQ ID NO: 5146997 - DNA, 25 bp, Homo sapien
tcaaaggagtttatgacatcaccgt

SEQ ID NO: 5146998 - DNA, 25 bp, Homo sapien
agtattccaggttagctgcagactt

SEQ ID NO: 5146999 - DNA, 25 bp, Homo sapien
ggttagctgcagacttctctcgctc

SEQ ID NO: 5147000 - DNA, 25 bp, Homo sapien
tccaggttagctgcagacttctctc

SEQ ID NO: 5147001 - DNA, 25 bp, Homo sapien
tattccaggttagctgcagacttct

SEQ ID NO: 5147002 - DNA, 25 bp, Homo sapien
aaacaaaaccacgttcagctgaaca

SEQ ID NO: 5147003 - DNA, 25 bp, Homo sapien
gctagaagatcaagctaagcactta

SEQ ID NO: 5147004 - DNA, 25 bp, Homo sapien
caggataaaaatccaattttcaaag

SEQ ID NO: 5147005 - DNA, 25 bp, Homo sapien
tattttgctgaacgttaaaattata

SEQ ID NO: 5147006 - DNA, 25 bp, Homo sapien
ttgaagaactgagattactgtcagt

SEQ ID NO: 5147007 - DNA, 25 bp, Homo sapien
gtattcttatttgggcccttgtgac

SEQ ID NO: 5147008 - DNA, 25 bp, Homo sapien
gattactgtcagtattgagaacatt

SEQ ID NO: 5147009 - DNA, 25 bp, Homo sapien
atgtattcttatttgggcccttgtg

SEQ ID NO: 5147010 - DNA, 25 bp, Homo sapien
tctaatgtgtatctcctctatgaaa

SEQ ID NO: 5147011 - DNA, 25 bp, Homo sapien
tacaggacttagcaaatgcacatct

SEQ ID NO: 5147012 - DNA, 25 bp, Homo sapien
caatggacccttaacttataggagc

SEQ ID NO: 5147013 - DNA, 25 bp, Homo sapien
ctgttcttggtatcccttaggttag

SEQ ID NO: 5147014 - DNA, 25 bp, Homo sapien
tagaacttcaattagtaaaaacatg

SEQ ID NO: 5147015 - DNA, 25 bp, Homo sapien
aaacatgtttgatgtcttttcccac

SEQ ID NO: 5147016 - DNA, 25 bp, Homo sapien
agccattctcttcatatattatctg

SEQ ID NO: 5147017 - DNA, 25 bp, Homo sapien
cattctcttcatatattatctgtgc

SEQ ID NO: 5147018 - DNA, 25 bp, Homo sapien
tgcaaacaatgttcctggcagctat

SEQ ID NO: 5147019 - DNA, 25 bp, Homo sapien
ttacttgtagagagttttagacctc

SEQ ID NO: 5147020 - DNA, 25 bp, Homo sapien
ggcagctattcatctccttaggtaa

SEQ ID NO: 5147021 - DNA, 25 bp, Homo sapien
ctattttcctattgggttgctgggc

SEQ ID NO: 5147022 - DNA, 25 bp, Homo sapien
tgaaggataactgagatcttcctcg

SEQ ID NO: 5147023 - DNA, 25 bp, Homo sapien
cacaaggtttgtgcataggtttttg

SEQ ID NO: 5147024 - DNA, 25 bp, Homo sapien
gagtctgacctctgtcaactggcat

SEQ ID NO: 5147025 - DNA, 25 bp, Homo sapien
tattcatttgccagttgaaggataa

SEQ ID NO: 5147026 - DNA, 25 bp, Homo sapien
ctatcgaagtccagaccaactatga

SEQ ID NO: 5147027 - DNA, 25 bp, Homo sapien
tccagaagaacgggaagcattttct

SEQ ID NO: 5147028 - DNA, 25 bp, Homo sapien
actatgaagataggatgcccatcca

SEQ ID NO: 5147029 - DNA, 25 bp, Homo sapien
gatgcccatccagaagaacgggaag

SEQ ID NO: 5147030 - DNA, 25 bp, Homo sapien
cattcgtaagcagagactatatttc

SEQ ID NO: 5147031 - DNA, 25 bp, Homo sapien
tatgacattcgtaagcagagactat

SEQ ID NO: 5147032 - DNA, 25 bp, Homo sapien
tgtggtaatatacgtgaaccatttt

SEQ ID NO: 5147033 - DNA, 25 bp, Homo sapien
agaattgtggtaatatacgtgaacc

SEQ ID NO: 5147034 - DNA, 25 bp, Homo sapien
acatggcaggtactacggtctacct

SEQ ID NO: 5147035 - DNA, 25 bp, Homo sapien
atggcaggtactacggtctacctgg

SEQ ID NO: 5147036 - DNA, 25 bp, Homo sapien
gacatggcaggtactacggtctacc

SEQ ID NO: 5147037 - DNA, 25 bp, Homo sapien
catggcaggtactacggtctacctg

SEQ ID NO: 5147038 - DNA, 25 bp, Homo sapien
gcatcctgttcttccttgctagctc

SEQ ID NO: 5147039 - DNA, 25 bp, Homo sapien
cagtcttgcctctgcatcctgttct

SEQ ID NO: 5147040 - DNA, 25 bp, Homo sapien
tggagagtttccagtcttgcctctg

SEQ ID NO: 5147041 - DNA, 25 bp, Homo sapien
ctttcttggagagtttccagtcttg

SEQ ID NO: 5147042 - DNA, 25 bp, Homo sapien
gcagcctttgtttaacttgtgagtt

SEQ ID NO: 5147043 - DNA, 25 bp, Homo sapien
tgcagcctttgtttaacttgtgagt

SEQ ID NO: 5147044 - DNA, 25 bp, Homo sapien
cagcctttgtttaacttgtgagtta

SEQ ID NO: 5147045 - DNA, 25 bp, Homo sapien
ctgcagcctttgtttaacttgtgag

SEQ ID NO: 5147046 - DNA, 25 bp, Homo sapien
tggtctggatcggtcaccgctgggt

SEQ ID NO: 5147047 - DNA, 25 bp, Homo sapien
ctggatcggtcaccgctgggtgcct

SEQ ID NO: 5147048 - DNA, 25 bp, Homo sapien
ctgggtgcctgagctccgcatggag

SEQ ID NO: 5147049 - DNA, 25 bp, Homo sapien
tgggtgcctgagctccgcatggagc

SEQ ID NO: 5147050 - DNA, 25 bp, Homo sapien
cctacaacaaggatggcggtgacgg

SEQ ID NO: 5147051 - DNA, 25 bp, Homo sapien
ctctgtggtaaggctctgtcgggca

SEQ ID NO: 5147052 - DNA, 25 bp, Homo sapien
ggccgagttccctacaacaaggatg

SEQ ID NO: 5147053 - DNA, 25 bp, Homo sapien
tcctctgattccactcgcgtggctg

SEQ ID NO: 5147054 - DNA, 25 bp, Homo sapien
tccagccgcgtcctagtccctcgcc

SEQ ID NO: 5147055 - DNA, 25 bp, Homo sapien
tggcgggcccggagcaggaagggga

SEQ ID NO: 5147056 - DNA, 25 bp, Homo sapien
ctccagccgcgtcctagtccctcgc

SEQ ID NO: 5147057 - DNA, 25 bp, Homo sapien
cgccgcggccggctactggcgggcc

SEQ ID NO: 5147058 - DNA, 25 bp, Homo sapien
ctgtgggtcatcccggccgccacgc

SEQ ID NO: 5147059 - DNA, 25 bp, Homo sapien
agcatctctccgctttcggccgccg

SEQ ID NO: 5147060 - DNA, 25 bp, Homo sapien
cccagcatctctccgctttcggccg

SEQ ID NO: 5147061 - DNA, 25 bp, Homo sapien
acgcccagcatctctccgctttcgg

SEQ ID NO: 5147062 - DNA, 25 bp, Homo sapien
gggcccagctatgagagaactatcc

SEQ ID NO: 5147063 - DNA, 25 bp, Homo sapien
tggagccagcagttagcaaactgac

SEQ ID NO: 5147064 - DNA, 25 bp, Homo sapien
agagaactatcccacccaagagagt

SEQ ID NO: 5147065 - DNA, 25 bp, Homo sapien
ctatgctggagacactaagcatcat

SEQ ID NO: 5147066 - DNA, 25 bp, Homo sapien
cagattgaaaatgatctcaggcatg

SEQ ID NO: 5147067 - DNA, 25 bp, Homo sapien
caaatcctggatgttcagattgaaa

SEQ ID NO: 5147068 - DNA, 25 bp, Homo sapien
tccatatactctaatgtccaacaga

SEQ ID NO: 5147069 - DNA, 25 bp, Homo sapien
ccaacagagtcatcacagcagttct

SEQ ID NO: 5147070 - DNA, 25 bp, Homo sapien
ggaccagcactccagccagtgggct

SEQ ID NO: 5147071 - DNA, 25 bp, Homo sapien
tcaaagcatttccaatctacctcca

SEQ ID NO: 5147072 - DNA, 25 bp, Homo sapien
gaaaatcacccgtgtccatcaacag

SEQ ID NO: 5147073 - DNA, 25 bp, Homo sapien
tgaggagcaaagcatggaccagcac

SEQ ID NO: 5147074 - DNA, 25 bp, Homo sapien
tgtgtaatcgttgcctactgtcccc

SEQ ID NO: 5147075 - DNA, 25 bp, Homo sapien
gctttctgctgtatccctagagcca

SEQ ID NO: 5147076 - DNA, 25 bp, Homo sapien
cattccctagctgaatggcatgaga

SEQ ID NO: 5147077 - DNA, 25 bp, Homo sapien
taccatccccaacaaggacatgagc

SEQ ID NO: 5147078 - DNA, 25 bp, Homo sapien
gcatgcgccaccactcccgagtaat

SEQ ID NO: 5147079 - DNA, 25 bp, Homo sapien
tgcgccaccactcccgagtaatttt

SEQ ID NO: 5147080 - DNA, 25 bp, Homo sapien
tggggtttcaccacgttggtcaggc

SEQ ID NO: 5147081 - DNA, 25 bp, Homo sapien
atggggtttcaccacgttggtcagg

SEQ ID NO: 5147082 - DNA, 25 bp, Homo sapien
actcctcctcagggatcccgttata

SEQ ID NO: 5147083 - DNA, 25 bp, Homo sapien
cagggatcccgttatacattctcat

SEQ ID NO: 5147084 - DNA, 25 bp, Homo sapien
ctcagggatcccgttatacattctc

SEQ ID NO: 5147085 - DNA, 25 bp, Homo sapien
ctcctcagggatcccgttatacatt

SEQ ID NO: 5147086 - DNA, 25 bp, Homo sapien
gaaggtcttctcgtaatcgacctca

SEQ ID NO: 5147087 - DNA, 25 bp, Homo sapien
ttgaaggtcttctcgtaatcgacct

SEQ ID NO: 5147088 - DNA, 25 bp, Homo sapien
aaggtcttctcgtaatcgacctcat

SEQ ID NO: 5147089 - DNA, 25 bp, Homo sapien
tgaaggtcttctcgtaatcgacctc

SEQ ID NO: 5147090 - DNA, 25 bp, Homo sapien
cacatatccgactgagtcacctcct

SEQ ID NO: 5147091 - DNA, 25 bp, Homo sapien
ctgggactcctcagtgccaagtttc

SEQ ID NO: 5147092 - DNA, 25 bp, Homo sapien
gggactcctcagtgccaagtttcca

SEQ ID NO: 5147093 - DNA, 25 bp, Homo sapien
atatccgactgagtcacctcctggg

SEQ ID NO: 5147094 - DNA, 25 bp, Homo sapien
tctgaagcaataggacaacacccct

SEQ ID NO: 5147095 - DNA, 25 bp, Homo sapien
acgataaccccactgttctgaagca

SEQ ID NO: 5147096 - DNA, 25 bp, Homo sapien
gagccaatgaaaccaagttcagggt

SEQ ID NO: 5147097 - DNA, 25 bp, Homo sapien
gacatggtgtgttacacgataaccc

SEQ ID NO: 5147098 - DNA, 25 bp, Homo sapien
cctgtgtttggctgatttaggcaat

SEQ ID NO: 5147099 - DNA, 25 bp, Homo sapien
cactcctttgccttagtcactttac

SEQ ID NO: 5147100 - DNA, 25 bp, Homo sapien
tgcaaacctacgcactctacctgag

SEQ ID NO: 5147101 - DNA, 25 bp, Homo sapien
acacaggcccagttctgcaaaccta

SEQ ID NO: 5147102 - DNA, 25 bp, Homo sapien
taactgagaaaggtaggtcataagg

SEQ ID NO: 5147103 - DNA, 25 bp, Homo sapien
tctgcatagagagtttcaacaaata

SEQ ID NO: 5147104 - DNA, 25 bp, Homo sapien
gaaggttactacaactcacccaaga

SEQ ID NO: 5147105 - DNA, 25 bp, Homo sapien
cagcatggctgaaggttactacaac

SEQ ID NO: 5147106 - DNA, 25 bp, Homo sapien
caccaaagaccctaggcagcagaaa

SEQ ID NO: 5147107 - DNA, 25 bp, Homo sapien
tgaataagagtaactccttacttag

SEQ ID NO: 5147108 - DNA, 25 bp, Homo sapien
ggacaaaagttcactaaacatattg

SEQ ID NO: 5147109 - DNA, 25 bp, Homo sapien
ccccaccaaagaccctaggcagcag

SEQ ID NO: 5147110 - DNA, 25 bp, Homo sapien
catgtatcttgattcgatgtgtccc

SEQ ID NO: 5147111 - DNA, 25 bp, Homo sapien
cagctggctgtccaagctaagctct

SEQ ID NO: 5147112 - DNA, 25 bp, Homo sapien
catgctcatagatggcaccctctca

SEQ ID NO: 5147113 - DNA, 25 bp, Homo sapien
gtccctcatcagctggctgtccaag

SEQ ID NO: 5147114 - DNA, 25 bp, Homo sapien
ggaaatccatcaacacttcacaggc

SEQ ID NO: 5147115 - DNA, 25 bp, Homo sapien
tagtcgctaaagaagggtcctgctg

SEQ ID NO: 5147116 - DNA, 25 bp, Homo sapien
aaaagctccagtaaggtagtcgcta

SEQ ID NO: 5147117 - DNA, 25 bp, Homo sapien
aaagaaccgcctggttatagtgagc

SEQ ID NO: 5147118 - DNA, 25 bp, Homo sapien
tccacacatcaattgctgacacttt

SEQ ID NO: 5147119 - DNA, 25 bp, Homo sapien
cacatcaattgctgacactttaaag

SEQ ID NO: 5147120 - DNA, 25 bp, Homo sapien
tctctccacacatcaattgctgaca

SEQ ID NO: 5147121 - DNA, 25 bp, Homo sapien
catcaattgctgacactttaaagca

SEQ ID NO: 5147122 - DNA, 25 bp, Homo sapien
tctcgtcttctcctgtagagacctg

SEQ ID NO: 5147123 - DNA, 25 bp, Homo sapien
actatcggggcgatctcgtcttctc

SEQ ID NO: 5147124 - DNA, 25 bp, Homo sapien
tttactctcaaactatcggggcgat

SEQ ID NO: 5147125 - DNA, 25 bp, Homo sapien
gggcgatctcgtcttctcctgtaga

SEQ ID NO: 5147126 - DNA, 25 bp, Homo sapien
tacagtgctctttaagcacgtgcat

SEQ ID NO: 5147127 - DNA, 25 bp, Homo sapien
caatttcaagtttgacgccggaact

SEQ ID NO: 5147128 - DNA, 25 bp, Homo sapien
ctgcttcggttttgaacaatttcaa

SEQ ID NO: 5147129 - DNA, 25 bp, Homo sapien
tgtgtattacagtgctctttaagca

SEQ ID NO: 5147130 - DNA, 25 bp, Homo sapien
gccaccagcccctatattaagctgt

SEQ ID NO: 5147131 - DNA, 25 bp, Homo sapien
tatagatcccttctatctgaggcag

SEQ ID NO: 5147132 - DNA, 25 bp, Homo sapien
ccaaccaggagaaacttcaattttg

SEQ ID NO: 5147133 - DNA, 25 bp, Homo sapien
taatcagttatttatagatcccttc

SEQ ID NO: 5147134 - DNA, 25 bp, Homo sapien
caggagaagggtactacttcaaggt

SEQ ID NO: 5147135 - DNA, 25 bp, Homo sapien
tcaggagaagggtactacttcaagg

SEQ ID NO: 5147136 - DNA, 25 bp, Homo sapien
taacaatgaccacctttatagcctt

SEQ ID NO: 5147137 - DNA, 25 bp, Homo sapien
ctactccaacgttgactgaattcta

SEQ ID NO: 5147138 - DNA, 25 bp, Homo sapien
cagaaactggtttcataacaatgac

SEQ ID NO: 5147139 - DNA, 25 bp, Homo sapien
gaattctaagcactaacttatttga

SEQ ID NO: 5147140 - DNA, 25 bp, Homo sapien
gactcttggcctgatttgacagtga

SEQ ID NO: 5147141 - DNA, 25 bp, Homo sapien
cctagtttaaactggtgctagtcat

SEQ ID NO: 5147142 - DNA, 25 bp, Homo sapien
taagtgagagctagaaatgactctt

SEQ ID NO: 5147143 - DNA, 25 bp, Homo sapien
gcctaggcaacattgatttcactgc

SEQ ID NO: 5147144 - DNA, 25 bp, Homo sapien
gatggcaacatagatagacaaaggt

SEQ ID NO: 5147145 - DNA, 25 bp, Homo sapien
cacagctgcttatgatggacaccaa

SEQ ID NO: 5147146 - DNA, 25 bp, Homo sapien
catccgaacatggttgaaacattac

SEQ ID NO: 5147147 - DNA, 25 bp, Homo sapien
tgtgatccgtttctagttccacgca

SEQ ID NO: 5147148 - DNA, 25 bp, Homo sapien
aatcttgatctcctaaaccaagacg

SEQ ID NO: 5147149 - DNA, 25 bp, Homo sapien
tttcaaatcttgatctcctaaacca

SEQ ID NO: 5147150 - DNA, 25 bp, Homo sapien
ttgatctcctaaaccaagacgcctc

SEQ ID NO: 5147151 - DNA, 25 bp, Homo sapien
gatctcctaaaccaagacgcctctg

SEQ ID NO: 5147152 - DNA, 25 bp, Homo sapien
tgtttggatgggacacaaccactca

SEQ ID NO: 5147153 - DNA, 25 bp, Homo sapien
tatatcccaacagacacacaggtag

SEQ ID NO: 5147154 - DNA, 25 bp, Homo sapien
cgttaaaactgtgccattcgtcatg

SEQ ID NO: 5147155 - DNA, 25 bp, Homo sapien
taaacgagtgagtataacgaatccc

SEQ ID NO: 5147156 - DNA, 25 bp, Homo sapien
gaacgacagcctagattaaggtaaa

SEQ ID NO: 5147157 - DNA, 25 bp, Homo sapien
catagaacgacagcctagattaagg

SEQ ID NO: 5147158 - DNA, 25 bp, Homo sapien
ctcctcgtcccactcaacctccaaa

SEQ ID NO: 5147159 - DNA, 25 bp, Homo sapien
acgacagcctagattaaggtaaaga

SEQ ID NO: 5147160 - DNA, 25 bp, Homo sapien
cattcaaaggtctcaaaggaggcta

SEQ ID NO: 5147161 - DNA, 25 bp, Homo sapien
tccagaacatggatgccgtacgcat

SEQ ID NO: 5147162 - DNA, 25 bp, Homo sapien
gacagaagtgtggtcttggtcagcc

SEQ ID NO: 5147163 - DNA, 25 bp, Homo sapien
ggcatatatgcaaagcggttccaaa

SEQ ID NO: 5147164 - DNA, 25 bp, Homo sapien
tttggccccaaataccattttgtgc

SEQ ID NO: 5147165 - DNA, 25 bp, Homo sapien
tgttgattctatagcagtatctgca

SEQ ID NO: 5147166 - DNA, 25 bp, Homo sapien
tttgtgcaataagatctagcactgc

SEQ ID NO: 5147167 - DNA, 25 bp, Homo sapien
gcttctctttggctcgcttaccatt

SEQ ID NO: 5147168 - DNA, 25 bp, Homo sapien
agagcagagcaggggatacacggat

SEQ ID NO: 5147169 - DNA, 25 bp, Homo sapien
agagcaggggatacacggatgcttc

SEQ ID NO: 5147170 - DNA, 25 bp, Homo sapien
cagagcaggggatacacggatgctt

SEQ ID NO: 5147171 - DNA, 25 bp, Homo sapien
agcagagcaggggatacacggatgc

SEQ ID NO: 5147172 - DNA, 25 bp, Homo sapien
cacacccattggtcagtcctcaaga

SEQ ID NO: 5147173 - DNA, 25 bp, Homo sapien
agaataaaggaactgaggcgatcag

SEQ ID NO: 5147174 - DNA, 25 bp, Homo sapien
ctgaggcgatcagtgaacttttgtt

SEQ ID NO: 5147175 - DNA, 25 bp, Homo sapien
ttggtcagtcctcaagaacaagagg

SEQ ID NO: 5147176 - DNA, 25 bp, Homo sapien
tgttgatacttgtgtgtgcttcatg

SEQ ID NO: 5147177 - DNA, 25 bp, Homo sapien
tgcttgatcgacttggctgttgata

SEQ ID NO: 5147178 - DNA, 25 bp, Homo sapien
cttctgcttgatcgacttggctgtt

SEQ ID NO: 5147179 - DNA, 25 bp, Homo sapien
gcttcatgaagttcttgtactgtgt

SEQ ID NO: 5147180 - DNA, 25 bp, Homo sapien
tggagaccttgtaaaacatcccctg

SEQ ID NO: 5147181 - DNA, 25 bp, Homo sapien
catatttgccacaagacttcatcaa

SEQ ID NO: 5147182 - DNA, 25 bp, Homo sapien
gaggagcatttgaaccctgcctgga

SEQ ID NO: 5147183 - DNA, 25 bp, Homo sapien
cttttcactctggagggcataagag

SEQ ID NO: 5147184 - DNA, 25 bp, Homo sapien
ctccaagagaaagaaatatccacac

SEQ ID NO: 5147185 - DNA, 25 bp, Homo sapien
tgtaagcctccaagagaaagaaata

SEQ ID NO: 5147186 - DNA, 25 bp, Homo sapien
cttgtaagcctccaagagaaagaaa

SEQ ID NO: 5147187 - DNA, 25 bp, Homo sapien
gcctccaagagaaagaaatatccac

SEQ ID NO: 5147188 - DNA, 25 bp, Homo sapien
gtacacagttacatggcagtcagga

SEQ ID NO: 5147189 - DNA, 25 bp, Homo sapien
agcagcacagtacacagttacatgg

SEQ ID NO: 5147190 - DNA, 25 bp, Homo sapien
tcaggatttactgaggcattctgga

SEQ ID NO: 5147191 - DNA, 25 bp, Homo sapien
tcatgttaagagctcagcagcacag

SEQ ID NO: 5147192 - DNA, 25 bp, Homo sapien
tgggataatgcaggggcgcgctcgg

SEQ ID NO: 5147193 - DNA, 25 bp, Homo sapien
ctgggataatgcaggggcgcgctcg

SEQ ID NO: 5147194 - DNA, 25 bp, Homo sapien
taaaagtcacagaactccttgtaga

SEQ ID NO: 5147195 - DNA, 25 bp, Homo sapien
tgcagtttggaaacagccctctcgt

SEQ ID NO: 5147196 - DNA, 25 bp, Homo sapien
tcctcggtcccattggcctcgtgga

SEQ ID NO: 5147197 - DNA, 25 bp, Homo sapien
ctttcacgtcactgtgcctgcgctg

SEQ ID NO: 5147198 - DNA, 25 bp, Homo sapien
gaacagacagccaagaacgctggac

SEQ ID NO: 5147199 - DNA, 25 bp, Homo sapien
ctgaacagacagccaagaacgctgg

SEQ ID NO: 5147200 - DNA, 25 bp, Homo sapien
tgaacagacagccaagaacgctgga

SEQ ID NO: 5147201 - DNA, 25 bp, Homo sapien
cccaaagtccagtcaataaaattgt

SEQ ID NO: 5147202 - DNA, 25 bp, Homo sapien
acccaaagtccagtcaataaaattg

SEQ ID NO: 5147203 - DNA, 25 bp, Homo sapien
cctaaacatgctgcgctgcgagccc

SEQ ID NO: 5147204 - DNA, 25 bp, Homo sapien
tccctaaacatgctgcgctgcgagc

SEQ ID NO: 5147205 - DNA, 25 bp, Homo sapien
ttcacaaaacagtcatcctgttttg

SEQ ID NO: 5147206 - DNA, 25 bp, Homo sapien
cctgttttgtagccttgccataaat

SEQ ID NO: 5147207 - DNA, 25 bp, Homo sapien
tttcacaaaacagtcatcctgtttt

SEQ ID NO: 5147208 - DNA, 25 bp, Homo sapien
gtcatcctgttttgtagccttgcca

SEQ ID NO: 5147209 - DNA, 25 bp, Homo sapien
gaggctctgtaagggtgtcccactt

SEQ ID NO: 5147210 - DNA, 25 bp, Homo sapien
ctgtaagggtgtcccactttgattc

SEQ ID NO: 5147211 - DNA, 25 bp, Homo sapien
tctttaccgtagcatctgaggctct

SEQ ID NO: 5147212 - DNA, 25 bp, Homo sapien
atgctctgaactcggactcttcagc

SEQ ID NO: 5147213 - DNA, 25 bp, Homo sapien
ctaagaaccgagcagcaaattctat

SEQ ID NO: 5147214 - DNA, 25 bp, Homo sapien
aagaacagcaggttgcagaccgtca

SEQ ID NO: 5147215 - DNA, 25 bp, Homo sapien
ggttgcagaccgtcagccacttctt

SEQ ID NO: 5147216 - DNA, 25 bp, Homo sapien
ttcttagatcgaagatcaaacaaca

SEQ ID NO: 5147217 - DNA, 25 bp, Homo sapien
ctgtaacacgcaaagaacagcaggt

SEQ ID NO: 5147218 - DNA, 25 bp, Homo sapien
gctggaagcactgagcgcacacgaa

SEQ ID NO: 5147219 - DNA, 25 bp, Homo sapien
ctcatagaagagtccttctgggaac

SEQ ID NO: 5147220 - DNA, 25 bp, Homo sapien
cagcgctcgcaagtggcgctggcca

SEQ ID NO: 5147221 - DNA, 25 bp, Homo sapien
cagctccccattactgttcacgatc

SEQ ID NO: 5147222 - DNA, 25 bp, Homo sapien
gcctgagtgtggctgaagactcaga

SEQ ID NO: 5147223 - DNA, 25 bp, Homo sapien
gctctcctttagagcaggtccagtg

SEQ ID NO: 5147224 - DNA, 25 bp, Homo sapien
cccaggagagctaaatgtagacagt

SEQ ID NO: 5147225 - DNA, 25 bp, Homo sapien
catatgctaacacccgaggatcaag

SEQ ID NO: 5147226 - DNA, 25 bp, Homo sapien
taaatgcatggacgctcctggctcg

SEQ ID NO: 5147227 - DNA, 25 bp, Homo sapien
ttagaaaagaacatagacacccagg

SEQ ID NO: 5147228 - DNA, 25 bp, Homo sapien
tcttctgctgtggtacattggcctc

SEQ ID NO: 5147229 - DNA, 25 bp, Homo sapien
atttgcccatccctaaatccatcat

SEQ ID NO: 5147230 - DNA, 25 bp, Homo sapien
ctgtggtacattggcctctcctgct

SEQ ID NO: 5147231 - DNA, 25 bp, Homo sapien
tcctgccctcttctgctgtggtaca

SEQ ID NO: 5147232 - DNA, 25 bp, Homo sapien
gaattgagtcatggctcaccaccac

SEQ ID NO: 5147233 - DNA, 25 bp, Homo sapien
ctgccgcagcacctagggatttcct

SEQ ID NO: 5147234 - DNA, 25 bp, Homo sapien
ttcttgctgccgcagcacctaggga

SEQ ID NO: 5147235 - DNA, 25 bp, Homo sapien
ctttaactgaattgagtcatggctc

SEQ ID NO: 5147236 - DNA, 25 bp, Homo sapien
gaggtagaagtaggtcctcaggtcc

SEQ ID NO: 5147237 - DNA, 25 bp, Homo sapien
gtgccgaggtagaagtaggtcctca

SEQ ID NO: 5147238 - DNA, 25 bp, Homo sapien
ctccatggtgccgaggtagaagtag

SEQ ID NO: 5147239 - DNA, 25 bp, Homo sapien
caggcctccatggtgccgaggtaga

SEQ ID NO: 5147240 - DNA, 25 bp, Homo sapien
catctctttcatgtcgcaaacctgc

SEQ ID NO: 5147241 - DNA, 25 bp, Homo sapien
atctctttcatgtcgcaaacctgct

SEQ ID NO: 5147242 - DNA, 25 bp, Homo sapien
gttatcagacatttcaacctctctg

SEQ ID NO: 5147243 - DNA, 25 bp, Homo sapien
cctgctatgttatcagacatttcaa

SEQ ID NO: 5147244 - DNA, 25 bp, Homo sapien
ctcccctggaccgagctctcctaag

SEQ ID NO: 5147245 - DNA, 25 bp, Homo sapien
ccctggaccgagctctcctaaggcc

SEQ ID NO: 5147246 - DNA, 25 bp, Homo sapien
ctattgctcccctggaccgagctct

SEQ ID NO: 5147247 - DNA, 25 bp, Homo sapien
ttgctcccctggaccgagctctcct

SEQ ID NO: 5147248 - DNA, 25 bp, Homo sapien
ctaagtcacaggcaaaatgggagaa

SEQ ID NO: 5147249 - DNA, 25 bp, Homo sapien
tgggagaaagaaggtgacggagggc

SEQ ID NO: 5147250 - DNA, 25 bp, Homo sapien
aagccagggatataaggaaaatgtc

SEQ ID NO: 5147251 - DNA, 25 bp, Homo sapien
cggagggctggagctacagggtgct

SEQ ID NO: 5147252 - DNA, 25 bp, Homo sapien
ggagctcaggaagcggtcatgctgc

SEQ ID NO: 5147253 - DNA, 25 bp, Homo sapien
gcggtcatgctgcttaatgaaggta

SEQ ID NO: 5147254 - DNA, 25 bp, Homo sapien
ggaagcggtcatgctgcttaatgaa

SEQ ID NO: 5147255 - DNA, 25 bp, Homo sapien
gctgcttaatgaaggtagcttaacc

SEQ ID NO: 5147256 - DNA, 25 bp, Homo sapien
cactgctcaaggctgttctgagctt

SEQ ID NO: 5147257 - DNA, 25 bp, Homo sapien
tttccctctgactcagcaccagtgg

SEQ ID NO: 5147258 - DNA, 25 bp, Homo sapien
accagtggcctcacagctgacaggg

SEQ ID NO: 5147259 - DNA, 25 bp, Homo sapien
cttttccctctgactcagcaccagt

SEQ ID NO: 5147260 - DNA, 25 bp, Homo sapien
gggcaacagcccatgaatagcctag

SEQ ID NO: 5147261 - DNA, 25 bp, Homo sapien
cccagggagggtatttatagtccag

SEQ ID NO: 5147262 - DNA, 25 bp, Homo sapien
gatgcaggtttacacatccctgggc

SEQ ID NO: 5147263 - DNA, 25 bp, Homo sapien
caaaatagtaatcttcctcaggacc

SEQ ID NO: 5147264 - DNA, 25 bp, Homo sapien
tattatacaaagactgaagcacatc

SEQ ID NO: 5147265 - DNA, 25 bp, Homo sapien
gatgcatttattatacaaagactga

SEQ ID NO: 5147266 - DNA, 25 bp, Homo sapien
agactgaagcacatcagtcatgtcc

SEQ ID NO: 5147267 - DNA, 25 bp, Homo sapien
tagagtggcgaagatgcatttatta

SEQ ID NO: 5147268 - DNA, 25 bp, Homo sapien
ggaagactgcctgagtccacgagat

SEQ ID NO: 5147269 - DNA, 25 bp, Homo sapien
tgtttagaataaactggtagagcca

SEQ ID NO: 5147270 - DNA, 25 bp, Homo sapien
cctgagtccacgagatggagactgc

SEQ ID NO: 5147271 - DNA, 25 bp, Homo sapien
ccgtgcctggctggtaatattgttt

SEQ ID NO: 5147272 - DNA, 25 bp, Homo sapien
gccctgttttttcaggctggagtgc

SEQ ID NO: 5147273 - DNA, 25 bp, Homo sapien
ttgccctgttttttcaggctggagt

SEQ ID NO: 5147274 - DNA, 25 bp, Homo sapien
ccctgttttttcaggctggagtgca

SEQ ID NO: 5147275 - DNA, 25 bp, Homo sapien
cctgttttttcaggctggagtgcag

SEQ ID NO: 5147276 - DNA, 25 bp, Homo sapien
gaatgtatgccatctatatgtataa

SEQ ID NO: 5147277 - DNA, 25 bp, Homo sapien
aaatctgatgtttagcttttagcag

SEQ ID NO: 5147278 - DNA, 25 bp, Homo sapien
cattataatgtgcagccaaaagtac

SEQ ID NO: 5147279 - DNA, 25 bp, Homo sapien
tttagcagtaattaatggaactacc

SEQ ID NO: 5147280 - DNA, 25 bp, Homo sapien
tcgagctccttacaagttatatgcc

SEQ ID NO: 5147281 - DNA, 25 bp, Homo sapien
aatgtctccccttgagtcttcgagc

SEQ ID NO: 5147282 - DNA, 25 bp, Homo sapien
gaacatatctaccacagcttaactg

SEQ ID NO: 5147283 - DNA, 25 bp, Homo sapien
tatggctttccactagaagactcag

SEQ ID NO: 5147284 - DNA, 25 bp, Homo sapien
tctacatgttggtacaggaaagaca

SEQ ID NO: 5147285 - DNA, 25 bp, Homo sapien
ggcctctgactgtgctgaattgttt

SEQ ID NO: 5147286 - DNA, 25 bp, Homo sapien
cacctacagggactggtgacctggc

SEQ ID NO: 5147287 - DNA, 25 bp, Homo sapien
tagaggctagagtgaacagtacacc

SEQ ID NO: 5147288 - DNA, 25 bp, Homo sapien
gttcacagtactttcttccttcaaa

SEQ ID NO: 5147289 - DNA, 25 bp, Homo sapien
tgacagcaaggggcaaagagcatct

SEQ ID NO: 5147290 - DNA, 25 bp, Homo sapien
cacactgatgacagcaaggggcaaa

SEQ ID NO: 5147291 - DNA, 25 bp, Homo sapien
cactgatgacagcaaggggcaaaga

SEQ ID NO: 5147292 - DNA, 25 bp, Homo sapien
ggggcaaagagcatctgaaagtcat

SEQ ID NO: 5147293 - DNA, 25 bp, Homo sapien
tttacttgacatttagcagtaaaac

SEQ ID NO: 5147294 - DNA, 25 bp, Homo sapien
ttacttgacatttagcagtaaaact

SEQ ID NO: 5147295 - DNA, 25 bp, Homo sapien
acttgacatttagcagtaaaactta

SEQ ID NO: 5147296 - DNA, 25 bp, Homo sapien
tacttgacatttagcagtaaaactt

SEQ ID NO: 5147297 - DNA, 25 bp, Homo sapien
cacacgtggccagtagaagaacttt

SEQ ID NO: 5147298 - DNA, 25 bp, Homo sapien
tgaagtggccaacgtgcaagcaagt

SEQ ID NO: 5147299 - DNA, 25 bp, Homo sapien
gtccatcacttatgcgccgtgcaag

SEQ ID NO: 5147300 - DNA, 25 bp, Homo sapien
aacccggcagaggtattagcaacca

SEQ ID NO: 5147301 - DNA, 25 bp, Homo sapien
aggtcacagcggaagcactccggat

SEQ ID NO: 5147302 - DNA, 25 bp, Homo sapien
cactccggatgccagctgttattca

SEQ ID NO: 5147303 - DNA, 25 bp, Homo sapien
gataactcggccaatgatgaattca

SEQ ID NO: 5147304 - DNA, 25 bp, Homo sapien
ttgacaaacccgatatctgccagaa

SEQ ID NO: 5147305 - DNA, 25 bp, Homo sapien
tcagaggctgctcatcgatgatagc

SEQ ID NO: 5147306 - DNA, 25 bp, Homo sapien
tggctttctcacgattatgacaggg

SEQ ID NO: 5147307 - DNA, 25 bp, Homo sapien
cagttggcgcagttgaaatggtctg

SEQ ID NO: 5147308 - DNA, 25 bp, Homo sapien
ggtcgttcttgaatatcagaggctg

SEQ ID NO: 5147309 - DNA, 25 bp, Homo sapien
ggccaagaatctttatccactaaat

SEQ ID NO: 5147310 - DNA, 25 bp, Homo sapien
cggccaagaatctttatccactaaa

SEQ ID NO: 5147311 - DNA, 25 bp, Homo sapien
caagaatctttatccactaaatttt

SEQ ID NO: 5147312 - DNA, 25 bp, Homo sapien
gccaagaatctttatccactaaatt

SEQ ID NO: 5147313 - DNA, 25 bp, Homo sapien
ctgtccgtgagaaagacacacagct

SEQ ID NO: 5147314 - DNA, 25 bp, Homo sapien
tgtccgtgagaaagacacacagctt

SEQ ID NO: 5147315 - DNA, 25 bp, Homo sapien
tccgtgagaaagacacacagcttaa

SEQ ID NO: 5147316 - DNA, 25 bp, Homo sapien
cgtgagaaagacacacagcttaata

SEQ ID NO: 5147317 - DNA, 25 bp, Homo sapien
cgcccttcgatgggccgtcggcaag

SEQ ID NO: 5147318 - DNA, 25 bp, Homo sapien
ggacccccattttatcatggcatgg

SEQ ID NO: 5147319 - DNA, 25 bp, Homo sapien
gcccttcgatgggccgtcggcaagc

SEQ ID NO: 5147320 - DNA, 25 bp, Homo sapien
tttcctctcataatggcgatgtcca

SEQ ID NO: 5147321 - DNA, 25 bp, Homo sapien
tctcataatggcgatgtccaagaaa

SEQ ID NO: 5147322 - DNA, 25 bp, Homo sapien
cctttcctctcataatggcgatgtc

SEQ ID NO: 5147323 - DNA, 25 bp, Homo sapien
tcctctcataatggcgatgtccaag

SEQ ID NO: 5147324 - DNA, 25 bp, Homo sapien
tctataacacgattgcagtggaagc

SEQ ID NO: 5147325 - DNA, 25 bp, Homo sapien
ccttctataacacgattgcagtgga

SEQ ID NO: 5147326 - DNA, 25 bp, Homo sapien
ttctataacacgattgcagtggaag

SEQ ID NO: 5147327 - DNA, 25 bp, Homo sapien
tataacacgattgcagtggaagcaa

SEQ ID NO: 5147328 - DNA, 25 bp, Homo sapien
tatgtgcaggatactgtttctagga

SEQ ID NO: 5147329 - DNA, 25 bp, Homo sapien
cagttgttgctcagtatgtgcagga

SEQ ID NO: 5147330 - DNA, 25 bp, Homo sapien
cacccggccctcaacctttatgtat

SEQ ID NO: 5147331 - DNA, 25 bp, Homo sapien
tctaggatgctgtgaggataccaaa

SEQ ID NO: 5147332 - DNA, 25 bp, Homo sapien
gagtgttaatttagtgttgcaggta

SEQ ID NO: 5147333 - DNA, 25 bp, Homo sapien
caccaggccttattaagagcagaga

SEQ ID NO: 5147334 - DNA, 25 bp, Homo sapien
tgttgcaggtagaacaggcaaagca

SEQ ID NO: 5147335 - DNA, 25 bp, Homo sapien
aggcaaagcagttcacgcaccaggc

SEQ ID NO: 5147336 - DNA, 25 bp, Homo sapien
tcacactggacaaaaccgtacactt

SEQ ID NO: 5147337 - DNA, 25 bp, Homo sapien
cagtcttaggattcacactggacaa

SEQ ID NO: 5147338 - DNA, 25 bp, Homo sapien
cacactggacaaaaccgtacactta

SEQ ID NO: 5147339 - DNA, 25 bp, Homo sapien
aaagttttcagtcttaggattcaca

SEQ ID NO: 5147340 - DNA, 25 bp, Homo sapien
gaatagaagaaagaacagggaacag

SEQ ID NO: 5147341 - DNA, 25 bp, Homo sapien
tagaagaaagaacagggaacagtta

SEQ ID NO: 5147342 - DNA, 25 bp, Homo sapien
tgagtaggacaaagaaggaatagaa

SEQ ID NO: 5147343 - DNA, 25 bp, Homo sapien
ctttgagtaggacaaagaaggaata

SEQ ID NO: 5147344 - DNA, 25 bp, Homo sapien
tctcccgtttggcaagtcgcctctt

SEQ ID NO: 5147345 - DNA, 25 bp, Homo sapien
tggctttaggtcaatttcaacaaac

SEQ ID NO: 5147346 - DNA, 25 bp, Homo sapien
actggctttaggtcaatttcaacaa

SEQ ID NO: 5147347 - DNA, 25 bp, Homo sapien
aagtcgcctcttaaattcttctggc

SEQ ID NO: 5147348 - DNA, 25 bp, Homo sapien
gagtaagtgaaatacatgaccacaa

SEQ ID NO: 5147349 - DNA, 25 bp, Homo sapien
tgaggtgagtgagtctacagagtaa

SEQ ID NO: 5147350 - DNA, 25 bp, Homo sapien
caattaaatgatcgtggcaaggaaa

SEQ ID NO: 5147351 - DNA, 25 bp, Homo sapien
catgcctcgccatgctgaaataatt

SEQ ID NO: 5147352 - DNA, 25 bp, Homo sapien
gaggcaacatgatcttacttagtac

SEQ ID NO: 5147353 - DNA, 25 bp, Homo sapien
ttaaattaggtagccatgaggttta

SEQ ID NO: 5147354 - DNA, 25 bp, Homo sapien
gacagggtcctgtcgtattgcctag

SEQ ID NO: 5147355 - DNA, 25 bp, Homo sapien
gcctaggatggtaatcacattttag

SEQ ID NO: 5147356 - DNA, 25 bp, Homo sapien
gatgtgcagtaattgtactgaacta

SEQ ID NO: 5147357 - DNA, 25 bp, Homo sapien
gaagttagtggaaacatattcaaca

SEQ ID NO: 5147358 - DNA, 25 bp, Homo sapien
aattggttctatacatccatctgtg

SEQ ID NO: 5147359 - DNA, 25 bp, Homo sapien
taaacgaaggcaactaggtgatgat

SEQ ID NO: 5147360 - DNA, 25 bp, Homo sapien
agactggcttcatgtcaaactccac

SEQ ID NO: 5147361 - DNA, 25 bp, Homo sapien
taaggtctcagctagtttcttaagt

SEQ ID NO: 5147362 - DNA, 25 bp, Homo sapien
cagctccaatggaaatttctcatag

SEQ ID NO: 5147363 - DNA, 25 bp, Homo sapien
tcatagcacttcttacagactggct

SEQ ID NO: 5147364 - DNA, 25 bp, Homo sapien
tcaacaaatggataagggttaacaa

SEQ ID NO: 5147365 - DNA, 25 bp, Homo sapien
taaacagtctacatgtcaacaaatg

SEQ ID NO: 5147366 - DNA, 25 bp, Homo sapien
caactgctttgagatatagctttaa

SEQ ID NO: 5147367 - DNA, 25 bp, Homo sapien
taaatatgggtagatcaagacaagt

SEQ ID NO: 5147368 - DNA, 25 bp, Homo sapien
cagtcgagttcaggccatgcatctt

SEQ ID NO: 5147369 - DNA, 25 bp, Homo sapien
tgtaaacaaacacaagcagtcgagt

SEQ ID NO: 5147370 - DNA, 25 bp, Homo sapien
tcaagacgctatactgcaaaccctg

SEQ ID NO: 5147371 - DNA, 25 bp, Homo sapien
gatgcctgggtatgcctgatatgta

SEQ ID NO: 5147372 - DNA, 25 bp, Homo sapien
ttggccaggcaatctacctgattag

SEQ ID NO: 5147373 - DNA, 25 bp, Homo sapien
ttggggatggctgtaaaacattgca

SEQ ID NO: 5147374 - DNA, 25 bp, Homo sapien
tgaaattaaatcctatggagatgat

SEQ ID NO: 5147375 - DNA, 25 bp, Homo sapien
aaatctgggagtgcatgtgactgcc

SEQ ID NO: 5147376 - DNA, 25 bp, Homo sapien
tttttcacagaatgaacatattacc

SEQ ID NO: 5147377 - DNA, 25 bp, Homo sapien
tacagctggataggtatttttacct

SEQ ID NO: 5147378 - DNA, 25 bp, Homo sapien
tacatgcattgtaaactccactaat

SEQ ID NO: 5147379 - DNA, 25 bp, Homo sapien
aatgaacatattaccacttaagtgg

SEQ ID NO: 5147380 - DNA, 25 bp, Homo sapien
aggaaagcgcctgcaaaccagtgac

SEQ ID NO: 5147381 - DNA, 25 bp, Homo sapien
accagtgacgcagcgccgtagccgg

SEQ ID NO: 5147382 - DNA, 25 bp, Homo sapien
ctgcaaaccagtgacgcagcgccgt

SEQ ID NO: 5147383 - DNA, 25 bp, Homo sapien
gcgcctgcaaaccagtgacgcagcg

SEQ ID NO: 5147384 - DNA, 25 bp, Homo sapien
gcgatgtaccgctccacgtcagcct

SEQ ID NO: 5147385 - DNA, 25 bp, Homo sapien
aggcgatgtaccgctccacgtcagc

SEQ ID NO: 5147386 - DNA, 25 bp, Homo sapien
gaggcgatgtaccgctccacgtcag

SEQ ID NO: 5147387 - DNA, 25 bp, Homo sapien
gatgtaccgctccacgtcagccttg

SEQ ID NO: 5147388 - DNA, 25 bp, Homo sapien
caggtcgaggccgtcggtctcttcg

SEQ ID NO: 5147389 - DNA, 25 bp, Homo sapien
ccatgacgcctgagcagcgcgaggc

SEQ ID NO: 5147390 - DNA, 25 bp, Homo sapien
caggactcttcatgcgcttgcaagc

SEQ ID NO: 5147391 - DNA, 25 bp, Homo sapien
gtcggtctcttcgagacccactcac

SEQ ID NO: 5147392 - DNA, 25 bp, Homo sapien
gaacataagggtaaggaaatctctc

SEQ ID NO: 5147393 - DNA, 25 bp, Homo sapien
tgaaggccgcgattatacaggacaa

SEQ ID NO: 5147394 - DNA, 25 bp, Homo sapien
gagtcccaacaagggtgaaggccgc

SEQ ID NO: 5147395 - DNA, 25 bp, Homo sapien
catctgatcagctccaaatctgtgg

SEQ ID NO: 5147396 - DNA, 25 bp, Homo sapien
aggatctattaaggcactgaggatt

SEQ ID NO: 5147397 - DNA, 25 bp, Homo sapien
aagaataagtaagtacttaggatct

SEQ ID NO: 5147398 - DNA, 25 bp, Homo sapien
atctattaaggcactgaggattccc

SEQ ID NO: 5147399 - DNA, 25 bp, Homo sapien
agtaagtacttaggatctattaagg

SEQ ID NO: 5147400 - DNA, 25 bp, Homo sapien
tagcaagatcatattctttagcttc

SEQ ID NO: 5147401 - DNA, 25 bp, Homo sapien
gctttgcaaaatagaatcctttcat

SEQ ID NO: 5147402 - DNA, 25 bp, Homo sapien
caaaatagaatcctttcattgactt

SEQ ID NO: 5147403 - DNA, 25 bp, Homo sapien
tacagctttgcaaaatagaatcctt

SEQ ID NO: 5147404 - DNA, 25 bp, Homo sapien
gagctttgggatccctctcttgcac

SEQ ID NO: 5147405 - DNA, 25 bp, Homo sapien
tgtgagctttgggatccctctcttg

SEQ ID NO: 5147406 - DNA, 25 bp, Homo sapien
tgtaacattcaacggctttgtctgt

SEQ ID NO: 5147407 - DNA, 25 bp, Homo sapien
cttgcacattaatgtaagtacatat

SEQ ID NO: 5147408 - DNA, 25 bp, Homo sapien
tggctgctctttcaagccagtattt

SEQ ID NO: 5147409 - DNA, 25 bp, Homo sapien
ttggctgctctttcaagccagtatt

SEQ ID NO: 5147410 - DNA, 25 bp, Homo sapien
gtcttacataaagttctgactgaat

SEQ ID NO: 5147411 - DNA, 25 bp, Homo sapien
aaacttgaacgcaaagctatgttcc

SEQ ID NO: 5147412 - DNA, 25 bp, Homo sapien
gggtctgtacaacacacgaattcca

SEQ ID NO: 5147413 - DNA, 25 bp, Homo sapien
tctaaacttgaacgcaaagctatgt

SEQ ID NO: 5147414 - DNA, 25 bp, Homo sapien
tccaaacactgtaaagactccagat

SEQ ID NO: 5147415 - DNA, 25 bp, Homo sapien
ccagcagtaagtctgtattggttgc

SEQ ID NO: 5147416 - DNA, 25 bp, Homo sapien
tcctgcacatctctagtggaaagcg

SEQ ID NO: 5147417 - DNA, 25 bp, Homo sapien
gaagcataagattagcataggccag

SEQ ID NO: 5147418 - DNA, 25 bp, Homo sapien
taagaaagtagctgacagttcatca

SEQ ID NO: 5147419 - DNA, 25 bp, Homo sapien
atttctaagaaagtagctgacagtt

SEQ ID NO: 5147420 - DNA, 25 bp, Homo sapien
gacagttcatcatttccacccaaag

SEQ ID NO: 5147421 - DNA, 25 bp, Homo sapien
tgacagttcatcatttccacccaaa

SEQ ID NO: 5147422 - DNA, 25 bp, Homo sapien
tcagtgaaatgtcaattgctcctac

SEQ ID NO: 5147423 - DNA, 25 bp, Homo sapien
tttcaaacacatcaagactcagtga

SEQ ID NO: 5147424 - DNA, 25 bp, Homo sapien
tgtcaattgctcctacaagtggaag

SEQ ID NO: 5147425 - DNA, 25 bp, Homo sapien
cacatcaagactcagtgaaatgtca

SEQ ID NO: 5147426 - DNA, 25 bp, Homo sapien
ttttgtccagcttcaccttttatta

SEQ ID NO: 5147427 - DNA, 25 bp, Homo sapien
tttgtccagcttcaccttttattaa

SEQ ID NO: 5147428 - DNA, 25 bp, Homo sapien
gattttgtccagcttcaccttttat

SEQ ID NO: 5147429 - DNA, 25 bp, Homo sapien
tgtccagcttcaccttttattaatt

SEQ ID NO: 5147430 - DNA, 25 bp, Homo sapien
tgaacctggctgatcagaatcctcc

SEQ ID NO: 5147431 - DNA, 25 bp, Homo sapien
ggtctggatttaagtggccatagga

SEQ ID NO: 5147432 - DNA, 25 bp, Homo sapien
tctgatctgatacactgatttctga

SEQ ID NO: 5147433 - DNA, 25 bp, Homo sapien
aggagaacagggacaaactcttatt

SEQ ID NO: 5147434 - DNA, 25 bp, Homo sapien
tcatataatgcagactgcccgcttt

SEQ ID NO: 5147435 - DNA, 25 bp, Homo sapien
atcatataatgcagactgcccgctt

SEQ ID NO: 5147436 - DNA, 25 bp, Homo sapien
atgaattccactgtaagccaagcca

SEQ ID NO: 5147437 - DNA, 25 bp, Homo sapien
tccactgtaagccaagccaagtaag

SEQ ID NO: 5147438 - DNA, 25 bp, Homo sapien
tttcggattccaggtaaagcaggca

SEQ ID NO: 5147439 - DNA, 25 bp, Homo sapien
tttagccattttcggattccaggta

SEQ ID NO: 5147440 - DNA, 25 bp, Homo sapien
tcagaatatttaatttgttaaaatc

SEQ ID NO: 5147441 - DNA, 25 bp, Homo sapien
caaaattcagaatatttaatttgtt

SEQ ID NO: 5147442 - DNA, 25 bp, Homo sapien
gcaggcataacggctgataggagct

SEQ ID NO: 5147443 - DNA, 25 bp, Homo sapien
actgcttttctgtgaatcagagtac

SEQ ID NO: 5147444 - DNA, 25 bp, Homo sapien
ctcctttaattgtaagtggctggta

SEQ ID NO: 5147445 - DNA, 25 bp, Homo sapien
aaccgcatcccaccaagatttttgt

SEQ ID NO: 5147446 - DNA, 25 bp, Homo sapien
aaacctacgcactaagtgaaagcaa

SEQ ID NO: 5147447 - DNA, 25 bp, Homo sapien
taaaacctacgcactaagtgaaagc

SEQ ID NO: 5147448 - DNA, 25 bp, Homo sapien
aaaacctacgcactaagtgaaagca

SEQ ID NO: 5147449 - DNA, 25 bp, Homo sapien
tgcccaatgtacaagcagagcaggt

SEQ ID NO: 5147450 - DNA, 25 bp, Homo sapien
ctcttagagtgtttatttcatgctg

SEQ ID NO: 5147451 - DNA, 25 bp, Homo sapien
agagtgtttatttcatgctgaacta

SEQ ID NO: 5147452 - DNA, 25 bp, Homo sapien
catgtttttcctgggctcttagagt

SEQ ID NO: 5147453 - DNA, 25 bp, Homo sapien
acagctcagctaatatgtaacattc

SEQ ID NO: 5147454 - DNA, 25 bp, Homo sapien
attattaaggaataacagtaacagc

SEQ ID NO: 5147455 - DNA, 25 bp, Homo sapien
cagtaacagctcagctaatatgtaa

SEQ ID NO: 5147456 - DNA, 25 bp, Homo sapien
ttaaggaataacagtaacagctcag

SEQ ID NO: 5147457 - DNA, 25 bp, Homo sapien
ccgcacccggcctctacactcaact

SEQ ID NO: 5147458 - DNA, 25 bp, Homo sapien
accgcacccggcctctacactcaac

SEQ ID NO: 5147459 - DNA, 25 bp, Homo sapien
aatgaacacttctccctatgtattc

SEQ ID NO: 5147460 - DNA, 25 bp, Homo sapien
gtttaaacagaggatcaataggttc

SEQ ID NO: 5147461 - DNA, 25 bp, Homo sapien
ataatgaacacttctccctatgtat

SEQ ID NO: 5147462 - DNA, 25 bp, Homo sapien
gaggatcaataggttcaggaatact

SEQ ID NO: 5147463 - DNA, 25 bp, Homo sapien
agaaacaacactttttatagattca

SEQ ID NO: 5147464 - DNA, 25 bp, Homo sapien
tgtcatctataatctttattaggta

SEQ ID NO: 5147465 - DNA, 25 bp, Homo sapien
gtccctggtctttctcagataattt

SEQ ID NO: 5147466 - DNA, 25 bp, Homo sapien
taggtagtccctggtctttctcaga

SEQ ID NO: 5147467 - DNA, 25 bp, Homo sapien
atctttattaggtagtccctggtct

SEQ ID NO: 5147468 - DNA, 25 bp, Homo sapien
tttcttgaccactgaaagatttgaa

SEQ ID NO: 5147469 - DNA, 25 bp, Homo sapien
tcttgaccactgaaagatttgaatc

SEQ ID NO: 5147470 - DNA, 25 bp, Homo sapien
ttcttgaccactgaaagatttgaat

SEQ ID NO: 5147471 - DNA, 25 bp, Homo sapien
tgaattaagcatctcttttacagac

SEQ ID NO: 5147472 - DNA, 25 bp, Homo sapien
ttggtgatagtgaatatctggtagg

SEQ ID NO: 5147473 - DNA, 25 bp, Homo sapien
cctgcatgactgaattaagcatctc

SEQ ID NO: 5147474 - DNA, 25 bp, Homo sapien
tatctggtaggagacggtgtagaat

SEQ ID NO: 5147475 - DNA, 25 bp, Homo sapien
ttaatggcctctacttgttggcaaa

SEQ ID NO: 5147476 - DNA, 25 bp, Homo sapien
cttaatggcctctacttgttggcaa

SEQ ID NO: 5147477 - DNA, 25 bp, Homo sapien
ggtccataattctctgtgggccaac

SEQ ID NO: 5147478 - DNA, 25 bp, Homo sapien
gtctgtgacccctgatatccatcag

SEQ ID NO: 5147479 - DNA, 25 bp, Homo sapien
ctgttagtggagccccatgaaatgt

SEQ ID NO: 5147480 - DNA, 25 bp, Homo sapien
cataattctctgtgggccaacgatg

SEQ ID NO: 5147481 - DNA, 25 bp, Homo sapien
aaatcatgacccacaaggcaccaaa

SEQ ID NO: 5147482 - DNA, 25 bp, Homo sapien
acaaggacctatatgatgtgtaagg

SEQ ID NO: 5147483 - DNA, 25 bp, Homo sapien
catttcacagggtcattgcaagaat

SEQ ID NO: 5147484 - DNA, 25 bp, Homo sapien
catgcttgtataagaacagaagatc

SEQ ID NO: 5147485 - DNA, 25 bp, Homo sapien
gaagatactgggaattatatgctgg

SEQ ID NO: 5147486 - DNA, 25 bp, Homo sapien
ctttgtgggagtaacattagctgct

SEQ ID NO: 5147487 - DNA, 25 bp, Homo sapien
agtaacattagctgctggtctgaga

SEQ ID NO: 5147488 - DNA, 25 bp, Homo sapien
ggaattatatgctggtgactgacta

SEQ ID NO: 5147489 - DNA, 25 bp, Homo sapien
aacagtttcagctaatggtgggcca

SEQ ID NO: 5147490 - DNA, 25 bp, Homo sapien
tatttcgaggcccaatggtttgacc

SEQ ID NO: 5147491 - DNA, 25 bp, Homo sapien
tctgacagcctgatttgacgccatg

SEQ ID NO: 5147492 - DNA, 25 bp, Homo sapien
cccggcatgggctgaacaaaattag

SEQ ID NO: 5147493 - DNA, 25 bp, Homo sapien
tattctgacacgcaatgcacctaga

SEQ ID NO: 5147494 - DNA, 25 bp, Homo sapien
tgttaataggtttaggaagatctcc

SEQ ID NO: 5147495 - DNA, 25 bp, Homo sapien
agcacattttgtagagctcccctca

SEQ ID NO: 5147496 - DNA, 25 bp, Homo sapien
gatctccctggccaaatttaaatga

SEQ ID NO: 5147497 - DNA, 25 bp, Homo sapien
agactctgttttctcggattctgac

SEQ ID NO: 5147498 - DNA, 25 bp, Homo sapien
gaatagaagtagcaggtagactctg

SEQ ID NO: 5147499 - DNA, 25 bp, Homo sapien
tagactctgttttctcggattctga

SEQ ID NO: 5147500 - DNA, 25 bp, Homo sapien
aatagaagtagcaggtagactctgt

SEQ ID NO: 5147501 - DNA, 25 bp, Homo sapien
ccggattctgacaagcaacacatct

SEQ ID NO: 5147502 - DNA, 25 bp, Homo sapien
gagctggaacagaagtagatggact

SEQ ID NO: 5147503 - DNA, 25 bp, Homo sapien
tgcttcatttcgcactaagcatgaa

SEQ ID NO: 5147504 - DNA, 25 bp, Homo sapien
aacacatcttgtagcatttgcttca

SEQ ID NO: 5147505 - DNA, 25 bp, Homo sapien
gattttgtttacttggacactgaca

SEQ ID NO: 5147506 - DNA, 25 bp, Homo sapien
tgtttacttggacactgacaagcaa

SEQ ID NO: 5147507 - DNA, 25 bp, Homo sapien
agaggcaggtgttgaaattgcagtt

SEQ ID NO: 5147508 - DNA, 25 bp, Homo sapien
ggcaggtgttgaaattgcagttgtt

SEQ ID NO: 5147509 - DNA, 25 bp, Homo sapien
tatgagttggtttagaggcatcaca

SEQ ID NO: 5147510 - DNA, 25 bp, Homo sapien
ggagcttctgcaataggtttatgag

SEQ ID NO: 5147511 - DNA, 25 bp, Homo sapien
gtacacagcaaacactacaatccca

SEQ ID NO: 5147512 - DNA, 25 bp, Homo sapien
tcttgatccacatgcccaaatttga

SEQ ID NO: 5147513 - DNA, 25 bp, Homo sapien
tccactctgggctactgaactagtt

SEQ ID NO: 5147514 - DNA, 25 bp, Homo sapien
tgggagtgcttgaccgagaaacatg

SEQ ID NO: 5147515 - DNA, 25 bp, Homo sapien
gattcaacttggcaggagacttaga

SEQ ID NO: 5147516 - DNA, 25 bp, Homo sapien
cacatggtgactctctgggagtgct

SEQ ID NO: 5147517 - DNA, 25 bp, Homo sapien
tgagtccgtataccgtaccgagttc

SEQ ID NO: 5147518 - DNA, 25 bp, Homo sapien
aagcatgagtccgtataccgtaccg

SEQ ID NO: 5147519 - DNA, 25 bp, Homo sapien
taccgtaccgagttcttttgctctg

SEQ ID NO: 5147520 - DNA, 25 bp, Homo sapien
tataccgtaccgagttcttttgctc

SEQ ID NO: 5147521 - DNA, 25 bp, Homo sapien
aatttataccaccaatctgattgtc

SEQ ID NO: 5147522 - DNA, 25 bp, Homo sapien
agccagaatccctcaatttatacca

SEQ ID NO: 5147523 - DNA, 25 bp, Homo sapien
atgagaacatctcaatatcacgttg

SEQ ID NO: 5147524 - DNA, 25 bp, Homo sapien
catgagcaagactgacatacaacat

SEQ ID NO: 5147525 - DNA, 25 bp, Homo sapien
tgaggaaggggtgctagtccaaaag

SEQ ID NO: 5147526 - DNA, 25 bp, Homo sapien
tgcacaaaagaacagccctacaggg

SEQ ID NO: 5147527 - DNA, 25 bp, Homo sapien
tactggcagacgttagtggctaaac

SEQ ID NO: 5147528 - DNA, 25 bp, Homo sapien
taaaacataggtcttcattgagcag

SEQ ID NO: 5147529 - DNA, 25 bp, Homo sapien
tttgctaagggctacccagctgcta

SEQ ID NO: 5147530 - DNA, 25 bp, Homo sapien
accagtgcccttccttttacaatgt

SEQ ID NO: 5147531 - DNA, 25 bp, Homo sapien
tactggatgacactgctctgcagaa

SEQ ID NO: 5147532 - DNA, 25 bp, Homo sapien
tctgcagaaccagtgcccttccttt

SEQ ID NO: 5147533 - DNA, 25 bp, Homo sapien
ctactggatgacactgctctgcaga

SEQ ID NO: 5147534 - DNA, 25 bp, Homo sapien
caaatcaagacgtgctaacagtaag

SEQ ID NO: 5147535 - DNA, 25 bp, Homo sapien
gaagcatgccatgtataccaactag

SEQ ID NO: 5147536 - DNA, 25 bp, Homo sapien
cacaaggtggctagtccaaatcaag

SEQ ID NO: 5147537 - DNA, 25 bp, Homo sapien
aacattctgagagctatggtgtcca

SEQ ID NO: 5147538 - DNA, 25 bp, Homo sapien
aagtttggttgcaagggctttctgc

SEQ ID NO: 5147539 - DNA, 25 bp, Homo sapien
tctggtctattcttgtagcagaaga

SEQ ID NO: 5147540 - DNA, 25 bp, Homo sapien
gctttctgctcagcggttggagtta

SEQ ID NO: 5147541 - DNA, 25 bp, Homo sapien
tatacaatgagaacatcatcatctg

SEQ ID NO: 5147542 - DNA, 25 bp, Homo sapien
cttgacagctgtttcgaaatcttca

SEQ ID NO: 5147543 - DNA, 25 bp, Homo sapien
tcttgacagctgtttcgaaatcttc

SEQ ID NO: 5147544 - DNA, 25 bp, Homo sapien
tttcttgacagctgtttcgaaatct

SEQ ID NO: 5147545 - DNA, 25 bp, Homo sapien
taggtggaagttttaacgtatctgc

SEQ ID NO: 5147546 - DNA, 25 bp, Homo sapien
ttcatcagtatcactacagactcca

SEQ ID NO: 5147547 - DNA, 25 bp, Homo sapien
cttcatcagtatcactacagactcc

SEQ ID NO: 5147548 - DNA, 25 bp, Homo sapien
tcttcatcagtatcactacagactc

SEQ ID NO: 5147549 - DNA, 25 bp, Homo sapien
ggaaacagatggtgaactaatggat

SEQ ID NO: 5147550 - DNA, 25 bp, Homo sapien
tcagtcccacctgtatatacactgt

SEQ ID NO: 5147551 - DNA, 25 bp, Homo sapien
cactgtcagttgtgctagttatttc

SEQ ID NO: 5147552 - DNA, 25 bp, Homo sapien
cctttctagttgacaaatctacagg

SEQ ID NO: 5147553 - DNA, 25 bp, Homo sapien
tacaatactacaccaaatgcatgcc

SEQ ID NO: 5147554 - DNA, 25 bp, Homo sapien
gctaatgtgaagctgcatgatctct

SEQ ID NO: 5147555 - DNA, 25 bp, Homo sapien
aaactacagtttctgctctatggag

SEQ ID NO: 5147556 - DNA, 25 bp, Homo sapien
tacacttcgtcataaggacttttgc

SEQ ID NO: 5147557 - DNA, 25 bp, Homo sapien
gaattactggaagccaagtctgcaa

SEQ ID NO: 5147558 - DNA, 25 bp, Homo sapien
gagagccctgtgctacttccaaatc

SEQ ID NO: 5147559 - DNA, 25 bp, Homo sapien
cagaattactggaagccaagtctgc

SEQ ID NO: 5147560 - DNA, 25 bp, Homo sapien
agagccctgtgctacttccaaatcc

SEQ ID NO: 5147561 - DNA, 25 bp, Homo sapien
gaaactccactaaagaagatgggca

SEQ ID NO: 5147562 - DNA, 25 bp, Homo sapien
taaaccggatacaatcagggaaatg

SEQ ID NO: 5147563 - DNA, 25 bp, Homo sapien
gggaggactatcagcatggcttata

SEQ ID NO: 5147564 - DNA, 25 bp, Homo sapien
tcagttgtgcttgattctgtaacaa

SEQ ID NO: 5147565 - DNA, 25 bp, Homo sapien
aaggcagcagtgagctgtgttcatg

SEQ ID NO: 5147566 - DNA, 25 bp, Homo sapien
tggaaggattgctttagagcccagg

SEQ ID NO: 5147567 - DNA, 25 bp, Homo sapien
caaggcagcagtgagctgtgttcat

SEQ ID NO: 5147568 - DNA, 25 bp, Homo sapien
gaggtggaaggattgctttagagcc

SEQ ID NO: 5147569 - DNA, 25 bp, Homo sapien
aatcaggatatttaaacactagtat

SEQ ID NO: 5147570 - DNA, 25 bp, Homo sapien
ctctggtagtgacactattggttca

SEQ ID NO: 5147571 - DNA, 25 bp, Homo sapien
tattggttcaaaatggatatcttca

SEQ ID NO: 5147572 - DNA, 25 bp, Homo sapien
tcaccaactttaccggctgactggg

SEQ ID NO: 5147573 - DNA, 25 bp, Homo sapien
actgggttccgactgactgtgttcc

SEQ ID NO: 5147574 - DNA, 25 bp, Homo sapien
ctgaggcagtccaaactaaagcatt

SEQ ID NO: 5147575 - DNA, 25 bp, Homo sapien
tagtaataacgtggtttgcacacac

SEQ ID NO: 5147576 - DNA, 25 bp, Homo sapien
tgacatcccgatcccatctataaag

SEQ ID NO: 5147577 - DNA, 25 bp, Homo sapien
cattaggatccggtaataattcttc

SEQ ID NO: 5147578 - DNA, 25 bp, Homo sapien
cagtgatacatgtcctttctggagt

SEQ ID NO: 5147579 - DNA, 25 bp, Homo sapien
ttccatagttatccgccctagaggt

SEQ ID NO: 5147580 - DNA, 25 bp, Homo sapien
agaggttcaccgtccgcacaaacat

SEQ ID NO: 5147581 - DNA, 25 bp, Homo sapien
tcagcagtccgaggaacaatgtttg

SEQ ID NO: 5147582 - DNA, 25 bp, Homo sapien
tctccataaatggactgtccgcctg

SEQ ID NO: 5147583 - DNA, 25 bp, Homo sapien
tgtccgcctgttccatcatgtttgg

SEQ ID NO: 5147584 - DNA, 25 bp, Homo sapien
tattggtattctggccttgattggc

SEQ ID NO: 5147585 - DNA, 25 bp, Homo sapien
aaccaggaccagtatgtttcacatc

SEQ ID NO: 5147586 - DNA, 25 bp, Homo sapien
tgatagttattcttcgacaaacaga

SEQ ID NO: 5147587 - DNA, 25 bp, Homo sapien
gatagttattcttcgacaaacagac

SEQ ID NO: 5147588 - DNA, 25 bp, Homo sapien
gtgatagttattcttcgacaaacag

SEQ ID NO: 5147589 - DNA, 25 bp, Homo sapien
tgtgatagttattcttcgacaaaca

SEQ ID NO: 5147590 - DNA, 25 bp, Homo sapien
gctgaacataactatcaaattgtaa

SEQ ID NO: 5147591 - DNA, 25 bp, Homo sapien
taatagctaagcttcaatccaactg

SEQ ID NO: 5147592 - DNA, 25 bp, Homo sapien
caatccaactgcttatacagatgaa

SEQ ID NO: 5147593 - DNA, 25 bp, Homo sapien
tacatttgtaaatcggaaacgtcca

SEQ ID NO: 5147594 - DNA, 25 bp, Homo sapien
tttcacaccatgcaaggtcaattat

SEQ ID NO: 5147595 - DNA, 25 bp, Homo sapien
ttcacaccatgcaaggtcaattata

SEQ ID NO: 5147596 - DNA, 25 bp, Homo sapien
tcacaccatgcaaggtcaattataa

SEQ ID NO: 5147597 - DNA, 25 bp, Homo sapien
tctatacgttctgtggctctaccca

SEQ ID NO: 5147598 - DNA, 25 bp, Homo sapien
ttaacttgtaaccacacaggaggtg

SEQ ID NO: 5147599 - DNA, 25 bp, Homo sapien
tacgtcaggagtacataaacacaag

SEQ ID NO: 5147600 - DNA, 25 bp, Homo sapien
tcgaatatctatgaaagggcacagg

SEQ ID NO: 5147601 - DNA, 25 bp, Homo sapien
aacacagatgggtggaagacagtca

SEQ ID NO: 5147602 - DNA, 25 bp, Homo sapien
tactttagaatgaacccgaagcgta

SEQ ID NO: 5147603 - DNA, 25 bp, Homo sapien
tgagtaggccaataagaacatcctc

SEQ ID NO: 5147604 - DNA, 25 bp, Homo sapien
gaaggcatcaactgtctcagctgaa

SEQ ID NO: 5147605 - DNA, 25 bp, Homo sapien
tacatattatcgtgggtttagacca

SEQ ID NO: 5147606 - DNA, 25 bp, Homo sapien
gtaactttagtgctttaggaaagca

SEQ ID NO: 5147607 - DNA, 25 bp, Homo sapien
ttaatgagacaacataaaatccagt

SEQ ID NO: 5147608 - DNA, 25 bp, Homo sapien
tggaatactaatacgggaaaagtca

SEQ ID NO: 5147609 - DNA, 25 bp, Homo sapien
ttttgccataaagtaccacttaaga

SEQ ID NO: 5147610 - DNA, 25 bp, Homo sapien
ttaagtttggtgtgcgttgcgctca

SEQ ID NO: 5147611 - DNA, 25 bp, Homo sapien
tgagtagtattgcatctccccgcga

SEQ ID NO: 5147612 - DNA, 25 bp, Homo sapien
gctccagctccatttaacctgttaa

SEQ ID NO: 5147613 - DNA, 25 bp, Homo sapien
gttgcgctcaccacatagaccggtc

SEQ ID NO: 5147614 - DNA, 25 bp, Homo sapien
tctccccgggaaccgcgttcatcaa

SEQ ID NO: 5147615 - DNA, 25 bp, Homo sapien
gaaccgcgttcatcaaacccgcggc

SEQ ID NO: 5147616 - DNA, 25 bp, Homo sapien
aaccgcgttcatcaaacccgcggcg

SEQ ID NO: 5147617 - DNA, 25 bp, Homo sapien
cagtctccccgggaaccgcgttcat

SEQ ID NO: 5147618 - DNA, 25 bp, Homo sapien
gtggcttgacgaccctcggctccat

SEQ ID NO: 5147619 - DNA, 25 bp, Homo sapien
ccccgagtccgtagcggcttttgag

SEQ ID NO: 5147620 - DNA, 25 bp, Homo sapien
ggcttttgagactctccactactaa

SEQ ID NO: 5147621 - DNA, 25 bp, Homo sapien
ctgccccggtggcttgacgaccctc

SEQ ID NO: 5147622 - DNA, 25 bp, Homo sapien
ccgcggacctcaggcggcggcttca

SEQ ID NO: 5147623 - DNA, 25 bp, Homo sapien
cgcggacctcaggcggcggcttcac

SEQ ID NO: 5147624 - DNA, 25 bp, Homo sapien
tctcttatacttagactgataaaaa

SEQ ID NO: 5147625 - DNA, 25 bp, Homo sapien
atgaaccaactttatctccagagta

SEQ ID NO: 5147626 - DNA, 25 bp, Homo sapien
tgcccaatggtgttctacaatgctt

SEQ ID NO: 5147627 - DNA, 25 bp, Homo sapien
tctccagagtagatatccaaatcac

SEQ ID NO: 5147628 - DNA, 25 bp, Homo sapien
caatggtgttctacaatgcttgctt

SEQ ID NO: 5147629 - DNA, 25 bp, Homo sapien
aataattgtatcacagcaatctaga

SEQ ID NO: 5147630 - DNA, 25 bp, Homo sapien
ataattgtatcacagcaatctagaa

SEQ ID NO: 5147631 - DNA, 25 bp, Homo sapien
atcacagcaatctagaagtttacta

SEQ ID NO: 5147632 - DNA, 25 bp, Homo sapien
agcaatctagaagtttactatagca

SEQ ID NO: 5147633 - DNA, 25 bp, Homo sapien
tattttcgaggtactaactctataa

SEQ ID NO: 5147634 - DNA, 25 bp, Homo sapien
taaaagactgcttggttattttcga

SEQ ID NO: 5147635 - DNA, 25 bp, Homo sapien
ttcgaggtactaactctataatcat

SEQ ID NO: 5147636 - DNA, 25 bp, Homo sapien
gactgcttggttattttcgaggtac

SEQ ID NO: 5147637 - DNA, 25 bp, Homo sapien
gagagtcacctgcatcactacaaca

SEQ ID NO: 5147638 - DNA, 25 bp, Homo sapien
agattttggacagctgacaggtttc

SEQ ID NO: 5147639 - DNA, 25 bp, Homo sapien
tacaacactcagtccgaggtctcga

SEQ ID NO: 5147640 - DNA, 25 bp, Homo sapien
gatctgatgtggaagtaaactccgc

SEQ ID NO: 5147641 - DNA, 25 bp, Homo sapien
tctcgcttttgaagttcttcagcaa

SEQ ID NO: 5147642 - DNA, 25 bp, Homo sapien
tactcaaggcattttcatgtctgaa

SEQ ID NO: 5147643 - DNA, 25 bp, Homo sapien
actcaaggcattttcatgtctgaaa

SEQ ID NO: 5147644 - DNA, 25 bp, Homo sapien
ttgaagttcttcagcaaatttctgt

SEQ ID NO: 5147645 - DNA, 25 bp, Homo sapien
ttcggttaagtgttcaacttctgca

SEQ ID NO: 5147646 - DNA, 25 bp, Homo sapien
caatgcatcaaaagaggacctcagt

SEQ ID NO: 5147647 - DNA, 25 bp, Homo sapien
tagcctgaatgtctatcttcctgtt

SEQ ID NO: 5147648 - DNA, 25 bp, Homo sapien
ttatctaaacgagcttgaactcttt

SEQ ID NO: 5147649 - DNA, 25 bp, Homo sapien
aaattatctaaacgagcttgaactc

SEQ ID NO: 5147650 - DNA, 25 bp, Homo sapien
ctgtaaattatctaaacgagcttga

SEQ ID NO: 5147651 - DNA, 25 bp, Homo sapien
atctctgtattgtcataaactcgta

SEQ ID NO: 5147652 - DNA, 25 bp, Homo sapien
cagcatgggaacttcctttcaatct

SEQ ID NO: 5147653 - DNA, 25 bp, Homo sapien
gtattgtcataaactcgtacttcct

SEQ ID NO: 5147654 - DNA, 25 bp, Homo sapien
acagcatgggaacttcctttcaatc

SEQ ID NO: 5147655 - DNA, 25 bp, Homo sapien
catgtttcactttgctaagatgatg

SEQ ID NO: 5147656 - DNA, 25 bp, Homo sapien
gtggttttttaccatccattccaga

SEQ ID NO: 5147657 - DNA, 25 bp, Homo sapien
gatgatgatccgaaatccagtccat

SEQ ID NO: 5147658 - DNA, 25 bp, Homo sapien
cagtccatgaagacagttaaaagtt

SEQ ID NO: 5147659 - DNA, 25 bp, Homo sapien
gaatcctgagaaatacacgtgctaa

SEQ ID NO: 5147660 - DNA, 25 bp, Homo sapien
actgtaaatcctgaacatgtcaaca

SEQ ID NO: 5147661 - DNA, 25 bp, Homo sapien
gaatacctgcttgcgatggccacaa

SEQ ID NO: 5147662 - DNA, 25 bp, Homo sapien
taactgaaaggatctaggcttaata

SEQ ID NO: 5147663 - DNA, 25 bp, Homo sapien
tcccttgaacgtgaccagctgcttt

SEQ ID NO: 5147664 - DNA, 25 bp, Homo sapien
tctgctgaaattcttatagaactcc

SEQ ID NO: 5147665 - DNA, 25 bp, Homo sapien
aattgtcctctctggagttccttga

SEQ ID NO: 5147666 - DNA, 25 bp, Homo sapien
gtttcttgaacttgtatgcctattt

SEQ ID NO: 5147667 - DNA, 25 bp, Homo sapien
cacagagtaagtgtggaagtgttac

SEQ ID NO: 5147668 - DNA, 25 bp, Homo sapien
gttatgtaaatacactctacaatgt

SEQ ID NO: 5147669 - DNA, 25 bp, Homo sapien
tatcagggtaatgtaggccccacag

SEQ ID NO: 5147670 - DNA, 25 bp, Homo sapien
gctatatcacctagggttatgtaaa

SEQ ID NO: 5147671 - DNA, 25 bp, Homo sapien
gatgctgaaacaaatgggtatctac

SEQ ID NO: 5147672 - DNA, 25 bp, Homo sapien
tcgagtgtgacaccggcataaggat

SEQ ID NO: 5147673 - DNA, 25 bp, Homo sapien
tggtaccgaaacaattcaataggga

SEQ ID NO: 5147674 - DNA, 25 bp, Homo sapien
gagaatccagatatggaccctctta

SEQ ID NO: 5147675 - DNA, 25 bp, Homo sapien
tcagatggcatgaccttatatgtcg

SEQ ID NO: 5147676 - DNA, 25 bp, Homo sapien
gaaaccacctcgatataataaaggc

SEQ ID NO: 5147677 - DNA, 25 bp, Homo sapien
tgttcactatagtaccagccagtga

SEQ ID NO: 5147678 - DNA, 25 bp, Homo sapien
taaaaagcccacagattacactctg

SEQ ID NO: 5147679 - DNA, 25 bp, Homo sapien
tttacaaaaggctcgtgaagtttga

SEQ ID NO: 5147680 - DNA, 25 bp, Homo sapien
gtgctccagcatctagctgccttag

SEQ ID NO: 5147681 - DNA, 25 bp, Homo sapien
ggctcgtgaagtttgatattcacaa

SEQ ID NO: 5147682 - DNA, 25 bp, Homo sapien
gctgccttagggaccaatatataaa

SEQ ID NO: 5147683 - DNA, 25 bp, Homo sapien
ggtttattctccacagaatgctgtg

SEQ ID NO: 5147684 - DNA, 25 bp, Homo sapien
tctcaatggcaaattggagctctta

SEQ ID NO: 5147685 - DNA, 25 bp, Homo sapien
tcacccaatctcctcaatgttgatg

SEQ ID NO: 5147686 - DNA, 25 bp, Homo sapien
tcctgaattcctttagttaccactc

SEQ ID NO: 5147687 - DNA, 25 bp, Homo sapien
cagcattcaggcttctttcttgatg

SEQ ID NO: 5147688 - DNA, 25 bp, Homo sapien
tttcttgatggcagcagcatgtacc

SEQ ID NO: 5147689 - DNA, 25 bp, Homo sapien
ccccacaggtttgggctcataagaa

SEQ ID NO: 5147690 - DNA, 25 bp, Homo sapien
gtagatgaacactggaaccccacag

SEQ ID NO: 5147691 - DNA, 25 bp, Homo sapien
cagatgaagcctgaacgcaactctt

SEQ ID NO: 5147692 - DNA, 25 bp, Homo sapien
tgccacctactgtatttgacacaca

SEQ ID NO: 5147693 - DNA, 25 bp, Homo sapien
tcacaagtgaccttatcttttaggg

SEQ ID NO: 5147694 - DNA, 25 bp, Homo sapien
caatgtcctggcaatcaaatgtaac

SEQ ID NO: 5147695 - DNA, 25 bp, Homo sapien
tattactggaacagcctgatactcc

SEQ ID NO: 5147696 - DNA, 25 bp, Homo sapien
tagattccaccgtcatctggagcaa

SEQ ID NO: 5147697 - DNA, 25 bp, Homo sapien
cctttactggatattcttagatgac

SEQ ID NO: 5147698 - DNA, 25 bp, Homo sapien
cattagacaggagtcctttactgga

SEQ ID NO: 5147699 - DNA, 25 bp, Homo sapien
tgtgccacatatccctgaagtggct

SEQ ID NO: 5147700 - DNA, 25 bp, Homo sapien
gttcattaggtccctgtgccacata

SEQ ID NO: 5147701 - DNA, 25 bp, Homo sapien
taattgactattaagtagacttcag

SEQ ID NO: 5147702 - DNA, 25 bp, Homo sapien
tgaagtggctgaccaagaacaactt

SEQ ID NO: 5147703 - DNA, 25 bp, Homo sapien
cacaactggccttgaatgtgttacc

SEQ ID NO: 5147704 - DNA, 25 bp, Homo sapien
ggcatgttaatagctcagtacaacg

SEQ ID NO: 5147705 - DNA, 25 bp, Homo sapien
cagtacaacgttgaactccagggct

SEQ ID NO: 5147706 - DNA, 25 bp, Homo sapien
aaatagcgtgttcatcatctggata

SEQ ID NO: 5147707 - DNA, 25 bp, Homo sapien
ttctggagttctagcttccagcggg

SEQ ID NO: 5147708 - DNA, 25 bp, Homo sapien
gacttagttattcctcttatcactg

SEQ ID NO: 5147709 - DNA, 25 bp, Homo sapien
ctcagttctggagttctagcttcca

SEQ ID NO: 5147710 - DNA, 25 bp, Homo sapien
cccactctggaatctctcagttctg

SEQ ID NO: 5147711 - DNA, 25 bp, Homo sapien
catgctatttattacacgggacaaa

SEQ ID NO: 5147712 - DNA, 25 bp, Homo sapien
gaattctaaggcaagggtaatcaga

SEQ ID NO: 5147713 - DNA, 25 bp, Homo sapien
tattccagttctgatgactcaaagg

SEQ ID NO: 5147714 - DNA, 25 bp, Homo sapien
catcagcctgtcgataactgactag

SEQ ID NO: 5147715 - DNA, 25 bp, Homo sapien
aggccttagatcttgtatggtattc

SEQ ID NO: 5147716 - DNA, 25 bp, Homo sapien
tacacatccacaggtctgtagtctc

SEQ ID NO: 5147717 - DNA, 25 bp, Homo sapien
tattcctctgtgcataacctcttcc

SEQ ID NO: 5147718 - DNA, 25 bp, Homo sapien
tccacaggtctgtagtctccctgca

SEQ ID NO: 5147719 - DNA, 25 bp, Homo sapien
aatttttcaattcagctactgtatt

SEQ ID NO: 5147720 - DNA, 25 bp, Homo sapien
cagaaattttgttcatgtatcattt

SEQ ID NO: 5147721 - DNA, 25 bp, Homo sapien
tcattaactcattgagcatatttaa

SEQ ID NO: 5147722 - DNA, 25 bp, Homo sapien
ttttgcctgttcaagtctgctgttg

SEQ ID NO: 5147723 - DNA, 25 bp, Homo sapien
gcttaggggctcgaagcagcacaga

SEQ ID NO: 5147724 - DNA, 25 bp, Homo sapien
tagtatttgaagatcaagcttaggg

SEQ ID NO: 5147725 - DNA, 25 bp, Homo sapien
cagagcaagtacgaaaaaataaaga

SEQ ID NO: 5147726 - DNA, 25 bp, Homo sapien
aaataaagagttgctacaggcttcc

SEQ ID NO: 5147727 - DNA, 25 bp, Homo sapien
gaacctaagctacaaacacatcatg

SEQ ID NO: 5147728 - DNA, 25 bp, Homo sapien
tcttgagagagtttgtcctaataca

SEQ ID NO: 5147729 - DNA, 25 bp, Homo sapien
tacttgcactttgggactaccttta

SEQ ID NO: 5147730 - DNA, 25 bp, Homo sapien
gcttgagcatcaactattcccagtc

SEQ ID NO: 5147731 - DNA, 25 bp, Homo sapien
tcagatgaatcgtaaaaagttcaaa

SEQ ID NO: 5147732 - DNA, 25 bp, Homo sapien
agatgaatcgtaaaaagttcaaaga

SEQ ID NO: 5147733 - DNA, 25 bp, Homo sapien
cagatgaatcgtaaaaagttcaaag

SEQ ID NO: 5147734 - DNA, 25 bp, Homo sapien
ttgaacagagttgaatttagattaa

SEQ ID NO: 5147735 - DNA, 25 bp, Homo sapien
ccagattgaacagagttgaatttag

SEQ ID NO: 5147736 - DNA, 25 bp, Homo sapien
ttttgttaaacccagattgaacaga

SEQ ID NO: 5147737 - DNA, 25 bp, Homo sapien
gattgaacagagttgaatttagatt

SEQ ID NO: 5147738 - DNA, 25 bp, Homo sapien
ctaagggcttgcactggagaccagg

SEQ ID NO: 5147739 - DNA, 25 bp, Homo sapien
agggcttgcactggagaccagggag

SEQ ID NO: 5147740 - DNA, 25 bp, Homo sapien
ggcttgcactggagaccagggagtt

SEQ ID NO: 5147741 - DNA, 25 bp, Homo sapien
cttgcactggagaccagggagttac

SEQ ID NO: 5147742 - DNA, 25 bp, Homo sapien
taaataagcaccacatatactatat

SEQ ID NO: 5147743 - DNA, 25 bp, Homo sapien
caaaagttccaataccttctacaga

SEQ ID NO: 5147744 - DNA, 25 bp, Homo sapien
agttccaataccttctacagatttc

SEQ ID NO: 5147745 - DNA, 25 bp, Homo sapien
gaactgaaacattccaaaagttcca

SEQ ID NO: 5147746 - DNA, 25 bp, Homo sapien
ctgaactgaaacattccaaaagttc

SEQ ID NO: 5147747 - DNA, 25 bp, Homo sapien
tctagaaacgccatcttgtatatta

SEQ ID NO: 5147748 - DNA, 25 bp, Homo sapien
agaaacgccatcttgtatattagta

SEQ ID NO: 5147749 - DNA, 25 bp, Homo sapien
tcagtgtcatacattctagaaacgc

SEQ ID NO: 5147750 - DNA, 25 bp, Homo sapien
catacattctagaaacgccatcttg

SEQ ID NO: 5147751 - DNA, 25 bp, Homo sapien
caaaggctaagatagacttacccag

SEQ ID NO: 5147752 - DNA, 25 bp, Homo sapien
ctgatatggtaagatgacagtgacc

SEQ ID NO: 5147753 - DNA, 25 bp, Homo sapien
tagaagattgtagttaacagctcct

SEQ ID NO: 5147754 - DNA, 25 bp, Homo sapien
tgttactaaaccaccctactactgc

SEQ ID NO: 5147755 - DNA, 25 bp, Homo sapien
taaataaaagactgcaacggtttgc

SEQ ID NO: 5147756 - DNA, 25 bp, Homo sapien
gctagtgcagatttcttaagccaat

SEQ ID NO: 5147757 - DNA, 25 bp, Homo sapien
tgatttttctaccttctgggacagt

SEQ ID NO: 5147758 - DNA, 25 bp, Homo sapien
taaaagactgtaggctaggcacatt

SEQ ID NO: 5147759 - DNA, 25 bp, Homo sapien
gagaatagatatagtccaccaccct

SEQ ID NO: 5147760 - DNA, 25 bp, Homo sapien
tccacaagactgaggtaagaccact

SEQ ID NO: 5147761 - DNA, 25 bp, Homo sapien
tcacaacaatgatagcggcttagtc

SEQ ID NO: 5147762 - DNA, 25 bp, Homo sapien
tcatgtctggcctccaaggaactgt

SEQ ID NO: 5147763 - DNA, 25 bp, Homo sapien
ttaaaatgccctctaagtgtccaag

SEQ ID NO: 5147764 - DNA, 25 bp, Homo sapien
cacagcaagtgggtctacaatgggt

SEQ ID NO: 5147765 - DNA, 25 bp, Homo sapien
tgttcatcagaagggtgtgagctct

SEQ ID NO: 5147766 - DNA, 25 bp, Homo sapien
tttgccaagtaacgccctcctaaga

SEQ ID NO: 5147767 - DNA, 25 bp, Homo sapien
tgtgagctctgcgtttccatacagg

SEQ ID NO: 5147768 - DNA, 25 bp, Homo sapien
caataacttagatggtgagagaaag

SEQ ID NO: 5147769 - DNA, 25 bp, Homo sapien
gaatttcaataacttagatggtgag

SEQ ID NO: 5147770 - DNA, 25 bp, Homo sapien
ttcaagaatttcaataacttagatg

SEQ ID NO: 5147771 - DNA, 25 bp, Homo sapien
tttcaataacttagatggtgagaga

SEQ ID NO: 5147772 - DNA, 25 bp, Homo sapien
gaagactgacactctcaggtgctta

SEQ ID NO: 5147773 - DNA, 25 bp, Homo sapien
cagatctgcacacagttccatttat

SEQ ID NO: 5147774 - DNA, 25 bp, Homo sapien
taatctcgatgctcctatataaaga

SEQ ID NO: 5147775 - DNA, 25 bp, Homo sapien
tccatttatctagggaagactgaca

SEQ ID NO: 5147776 - DNA, 25 bp, Homo sapien
cctaggaacctgtgagagactctgc

SEQ ID NO: 5147777 - DNA, 25 bp, Homo sapien
ggtaaagcaagttgggcccagataa

SEQ ID NO: 5147778 - DNA, 25 bp, Homo sapien
aagttcacatcattgggcaggtgca

SEQ ID NO: 5147779 - DNA, 25 bp, Homo sapien
ccagtcaggctatgcagtgaatgcc

SEQ ID NO: 5147780 - DNA, 25 bp, Homo sapien
ggttcctacatgaaatacgctgtca

SEQ ID NO: 5147781 - DNA, 25 bp, Homo sapien
caggagtgacaagcctggactcaca

SEQ ID NO: 5147782 - DNA, 25 bp, Homo sapien
cgggaggacacaatctcgaaaaggg

SEQ ID NO: 5147783 - DNA, 25 bp, Homo sapien
cagctgcccggctttcgaaagagaa

SEQ ID NO: 5147784 - DNA, 25 bp, Homo sapien
agacactgattagtaattacatgag

SEQ ID NO: 5147785 - DNA, 25 bp, Homo sapien
gacactgattagtaattacatgagc

SEQ ID NO: 5147786 - DNA, 25 bp, Homo sapien
aaaaagacactgattagtaattaca

SEQ ID NO: 5147787 - DNA, 25 bp, Homo sapien
aaagacactgattagtaattacatg

SEQ ID NO: 5147788 - DNA, 25 bp, Homo sapien
tctcaaatttggatgcacatgctca

SEQ ID NO: 5147789 - DNA, 25 bp, Homo sapien
tggcaagaaaactgcactggcccct

SEQ ID NO: 5147790 - DNA, 25 bp, Homo sapien
tattcataagacaaacacagtatca

SEQ ID NO: 5147791 - DNA, 25 bp, Homo sapien
gcctaaatgccttattgacagggaa

SEQ ID NO: 5147792 - DNA, 25 bp, Homo sapien
tcactggaagacgtcaaacaagctg

SEQ ID NO: 5147793 - DNA, 25 bp, Homo sapien
tcaaatgaatcaaaccccgtgggaa

SEQ ID NO: 5147794 - DNA, 25 bp, Homo sapien
ctagagccgggatactttcagatgc

SEQ ID NO: 5147795 - DNA, 25 bp, Homo sapien
tgatatgtcaccgtatgccttagga

SEQ ID NO: 5147796 - DNA, 25 bp, Homo sapien
gcaacaggataggaccgtcagtgct

SEQ ID NO: 5147797 - DNA, 25 bp, Homo sapien
taaccccaaagataaatccctcatg

SEQ ID NO: 5147798 - DNA, 25 bp, Homo sapien
ggactccttgatctggccgggcagc

SEQ ID NO: 5147799 - DNA, 25 bp, Homo sapien
tcccagcggccttctgagctaagtc

SEQ ID NO: 5147800 - DNA, 25 bp, Homo sapien
tctgcacaccaacacggttggagga

SEQ ID NO: 5147801 - DNA, 25 bp, Homo sapien
cacagcgactctgcactggttctgc

SEQ ID NO: 5147802 - DNA, 25 bp, Homo sapien
aaatgaacatctgggaatctgcggc

SEQ ID NO: 5147803 - DNA, 25 bp, Homo sapien
accaccccgcgattctggatggcgg

SEQ ID NO: 5147804 - DNA, 25 bp, Homo sapien
ctgatacatttaccagaaagtgtgt

SEQ ID NO: 5147805 - DNA, 25 bp, Homo sapien
gatacatttaccagaaagtgtgtaa

SEQ ID NO: 5147806 - DNA, 25 bp, Homo sapien
atacatttaccagaaagtgtgtaat

SEQ ID NO: 5147807 - DNA, 25 bp, Homo sapien
tgatacatttaccagaaagtgtgta

SEQ ID NO: 5147808 - DNA, 25 bp, Homo sapien
ggctgactctatggcctgaagacca

SEQ ID NO: 5147809 - DNA, 25 bp, Homo sapien
agaaggtgtccatcagtacccgaag

SEQ ID NO: 5147810 - DNA, 25 bp, Homo sapien
gaacctcgccgacctatgctgctgg

SEQ ID NO: 5147811 - DNA, 25 bp, Homo sapien
cctggctacggttcagacctgagaa

SEQ ID NO: 5147812 - DNA, 25 bp, Homo sapien
atgtggaaatagtgccatttgtcag

SEQ ID NO: 5147813 - DNA, 25 bp, Homo sapien
ccatgtggaaatagtgccatttgtc

SEQ ID NO: 5147814 - DNA, 25 bp, Homo sapien
ggccatgtggaaatagtgccatttg

SEQ ID NO: 5147815 - DNA, 25 bp, Homo sapien
gactggccatgtggaaatagtgcca

SEQ ID NO: 5147816 - DNA, 25 bp, Homo sapien
tgagccttccgctcgaagctgatgc

SEQ ID NO: 5147817 - DNA, 25 bp, Homo sapien
tggaaaccaccgctgaagacttgag

SEQ ID NO: 5147818 - DNA, 25 bp, Homo sapien
tggccagagcaagagttgtacacct

SEQ ID NO: 5147819 - DNA, 25 bp, Homo sapien
gatgcaggtcaacacgcagactgct

SEQ ID NO: 5147820 - DNA, 25 bp, Homo sapien
cagggccatttggtttgccctcatc

SEQ ID NO: 5147821 - DNA, 25 bp, Homo sapien
ccctcatctgtgcctctccccgcag

SEQ ID NO: 5147822 - DNA, 25 bp, Homo sapien
gccctcatctgtgcctctccccgca

SEQ ID NO: 5147823 - DNA, 25 bp, Homo sapien
ggccatttggtttgccctcatctgt

SEQ ID NO: 5147824 - DNA, 25 bp, Homo sapien
aggccctcgggacacgtaataatgg

SEQ ID NO: 5147825 - DNA, 25 bp, Homo sapien
cctcgggacacgtaataatggcagt

SEQ ID NO: 5147826 - DNA, 25 bp, Homo sapien
gccctcgggacacgtaataatggca

SEQ ID NO: 5147827 - DNA, 25 bp, Homo sapien
tcgggacacgtaataatggcagtca

SEQ ID NO: 5147828 - DNA, 25 bp, Homo sapien
cggaagaagcccagcgaactttctc

SEQ ID NO: 5147829 - DNA, 25 bp, Homo sapien
gaagcccagcgaactttctctgagg

SEQ ID NO: 5147830 - DNA, 25 bp, Homo sapien
aagaagcccagcgaactttctctga

SEQ ID NO: 5147831 - DNA, 25 bp, Homo sapien
ctgcaggtccacttccaaacacagg

SEQ ID NO: 5147832 - DNA, 25 bp, Homo sapien
aacaggaacgcgctggaaccgcagg

SEQ ID NO: 5147833 - DNA, 25 bp, Homo sapien
cagggctcccgccgtcttgaaaggc

SEQ ID NO: 5147834 - DNA, 25 bp, Homo sapien
tgcctgggagcgaagctggcttcgt

SEQ ID NO: 5147835 - DNA, 25 bp, Homo sapien
gcgggaacaggaacgcgctggaacc

SEQ ID NO: 5147836 - DNA, 25 bp, Homo sapien
tgctgaacacactcagatatgtgtt

SEQ ID NO: 5147837 - DNA, 25 bp, Homo sapien
ccgtaggtactgacatgagtttggg

SEQ ID NO: 5147838 - DNA, 25 bp, Homo sapien
gtgttgtcccaggtgctactcccgt

SEQ ID NO: 5147839 - DNA, 25 bp, Homo sapien
tcactgtcacccgtaggtactgaca

SEQ ID NO: 5147840 - DNA, 25 bp, Homo sapien
ttccagattatacttattctttgcc

SEQ ID NO: 5147841 - DNA, 25 bp, Homo sapien
tatcctgtttttggggggagcacca

SEQ ID NO: 5147842 - DNA, 25 bp, Homo sapien
tccaaacattccagattatacttat

SEQ ID NO: 5147843 - DNA, 25 bp, Homo sapien
ttgcctgatctgagaaattctggta

SEQ ID NO: 5147844 - DNA, 25 bp, Homo sapien
caggattttatccaaactgttagat

SEQ ID NO: 5147845 - DNA, 25 bp, Homo sapien
aggattttatccaaactgttagatt

SEQ ID NO: 5147846 - DNA, 25 bp, Homo sapien
tttgttcagttcaattgatcgctgg

SEQ ID NO: 5147847 - DNA, 25 bp, Homo sapien
ttcagttcaattgatcgctggtgca

SEQ ID NO: 5147848 - DNA, 25 bp, Homo sapien
ttcagtgacgcagagccaccagatt

SEQ ID NO: 5147849 - DNA, 25 bp, Homo sapien
cagttcaattgatcgctggtgcaga

SEQ ID NO: 5147850 - DNA, 25 bp, Homo sapien
cagttttcaggaaatatttctttgc

SEQ ID NO: 5147851 - DNA, 25 bp, Homo sapien
ccagttttcaggaaatatttctttg

SEQ ID NO: 5147852 - DNA, 25 bp, Homo sapien
ggcactgatttgacgttgatagtac

SEQ ID NO: 5147853 - DNA, 25 bp, Homo sapien
attggcactgatttgacgttgatag

SEQ ID NO: 5147854 - DNA, 25 bp, Homo sapien
taattggcactgatttgacgttgat

SEQ ID NO: 5147855 - DNA, 25 bp, Homo sapien
ttaattggcactgatttgacgttga

SEQ ID NO: 5147856 - DNA, 25 bp, Homo sapien
tagatccaaggatatggtgatattg

SEQ ID NO: 5147857 - DNA, 25 bp, Homo sapien
taattgtggtattaacagccccagt

SEQ ID NO: 5147858 - DNA, 25 bp, Homo sapien
gaactccaaggctataaactgcttt

SEQ ID NO: 5147859 - DNA, 25 bp, Homo sapien
aaactgctttagatccaaggatatg

SEQ ID NO: 5147860 - DNA, 25 bp, Homo sapien
cttatttcctagtgttcgatggctt

SEQ ID NO: 5147861 - DNA, 25 bp, Homo sapien
gcaaattctgtgcacagcagtgcag

SEQ ID NO: 5147862 - DNA, 25 bp, Homo sapien
ctagtgttcgatggctttttgtatc

SEQ ID NO: 5147863 - DNA, 25 bp, Homo sapien
taaagggggcaaattctgtgcacag

SEQ ID NO: 5147864 - DNA, 25 bp, Homo sapien
tgagtccctggaaagctagtttcct

SEQ ID NO: 5147865 - DNA, 25 bp, Homo sapien
cctggaaagctagtttccttccaca

SEQ ID NO: 5147866 - DNA, 25 bp, Homo sapien
cctgagtccctggaaagctagtttc

SEQ ID NO: 5147867 - DNA, 25 bp, Homo sapien
gaaagctagtttccttccacatgac

SEQ ID NO: 5147868 - DNA, 25 bp, Homo sapien
tgcatagttgctcgccaaaggaagg

SEQ ID NO: 5147869 - DNA, 25 bp, Homo sapien
ttattgcaacgtcaccggagcacac

SEQ ID NO: 5147870 - DNA, 25 bp, Homo sapien
tggctgatatcaagcgccgaaggaa

SEQ ID NO: 5147871 - DNA, 25 bp, Homo sapien
tgtctgtaacccaagtgcactgatg

SEQ ID NO: 5147872 - DNA, 25 bp, Homo sapien
gagggctgaggcacccttcaataac

SEQ ID NO: 5147873 - DNA, 25 bp, Homo sapien
tttcccttggaaacggacagacaca

SEQ ID NO: 5147874 - DNA, 25 bp, Homo sapien
taacttcaggcatcagtgtcagcca

SEQ ID NO: 5147875 - DNA, 25 bp, Homo sapien
tcattgagaggaccaggttttccct

SEQ ID NO: 5147876 - DNA, 25 bp, Homo sapien
tgaaactgttctttgcataggcaga

SEQ ID NO: 5147877 - DNA, 25 bp, Homo sapien
cataatttggctagaggagaaggct

SEQ ID NO: 5147878 - DNA, 25 bp, Homo sapien
gctgaggatcagtttcatgagctct

SEQ ID NO: 5147879 - DNA, 25 bp, Homo sapien
gtaaagcacttgagcgcatggcctg

SEQ ID NO: 5147880 - DNA, 25 bp, Homo sapien
atcacaatacccttagactccagca

SEQ ID NO: 5147881 - DNA, 25 bp, Homo sapien
tcacaatacccttagactccagcat

SEQ ID NO: 5147882 - DNA, 25 bp, Homo sapien
tggccgacgctgaagcggcgctctc

SEQ ID NO: 5147883 - DNA, 25 bp, Homo sapien
ttagaggaaggagggttctcttcgc

SEQ ID NO: 5147884 - DNA, 25 bp, Homo sapien
gggcagctttatcccgcctgtggcc

SEQ ID NO: 5147885 - DNA, 25 bp, Homo sapien
cgcgtccaggttgccaccggcagag

SEQ ID NO: 5147886 - DNA, 25 bp, Homo sapien
tgaggttgggtcctggagttctaaa

SEQ ID NO: 5147887 - DNA, 25 bp, Homo sapien
acagcatctgtttgcagacggtgct

SEQ ID NO: 5147888 - DNA, 25 bp, Homo sapien
actgaggttgggtcctggagttcta

SEQ ID NO: 5147889 - DNA, 25 bp, Homo sapien
tgcagacggtgcttgaaaggactga

SEQ ID NO: 5147890 - DNA, 25 bp, Homo sapien
ttctctatgtttccgtgtaggagtt

SEQ ID NO: 5147891 - DNA, 25 bp, Homo sapien
cagattgccttagctattcaggatc

SEQ ID NO: 5147892 - DNA, 25 bp, Homo sapien
tgaaatcagggagtgcaatgactct

SEQ ID NO: 5147893 - DNA, 25 bp, Homo sapien
caacatgtaggtcactttgggcagt

SEQ ID NO: 5147894 - DNA, 25 bp, Homo sapien
gtgcagggcttctctgtaccaggaa

SEQ ID NO: 5147895 - DNA, 25 bp, Homo sapien
tgcagggcttctctgtaccaggaag

SEQ ID NO: 5147896 - DNA, 25 bp, Homo sapien
gtaccaggaagaagtacttgagtgt

SEQ ID NO: 5147897 - DNA, 25 bp, Homo sapien
agtcctgagcgcagcgcctgcggct

SEQ ID NO: 5147898 - DNA, 25 bp, Homo sapien
ttctgtgctgcaagcggcggctcgc

SEQ ID NO: 5147899 - DNA, 25 bp, Homo sapien
tcaacgggttctgtgctgcaagcgg

SEQ ID NO: 5147900 - DNA, 25 bp, Homo sapien
ggtgctgccgggcacgaagctcaac

SEQ ID NO: 5147901 - DNA, 25 bp, Homo sapien
atgttggcgggcagttcgtccacgc

SEQ ID NO: 5147902 - DNA, 25 bp, Homo sapien
ttggccgtggtgtccaggcgctcca

SEQ ID NO: 5147903 - DNA, 25 bp, Homo sapien
cagaaagtgtgttggcatggcagca

SEQ ID NO: 5147904 - DNA, 25 bp, Homo sapien
tcgtggcgcgagcacacgatgctct

SEQ ID NO: 5147905 - DNA, 25 bp, Homo sapien
tgcccgcggccgcggagaggaaaac

SEQ ID NO: 5147906 - DNA, 25 bp, Homo sapien
ctgctggtcgccagctcccgcagac

SEQ ID NO: 5147907 - DNA, 25 bp, Homo sapien
cagctcccgcagactgccggcggtg

SEQ ID NO: 5147908 - DNA, 25 bp, Homo sapien
ctttgccgccggcgcggtcctgctg

SEQ ID NO: 5147909 - DNA, 25 bp, Homo sapien
ttgccgccggcgcggtcctgctggt

SEQ ID NO: 5147910 - DNA, 25 bp, Homo sapien
ggcccagggtgtgcagagggagtgt

SEQ ID NO: 5147911 - DNA, 25 bp, Homo sapien
ggagtgtctggggacccagaggaag

SEQ ID NO: 5147912 - DNA, 25 bp, Homo sapien
ccagggtgtgcagagggagtgtctg

SEQ ID NO: 5147913 - DNA, 25 bp, Homo sapien
ctaacttttctctaggcaggcccag

SEQ ID NO: 5147914 - DNA, 25 bp, Homo sapien
aatcattgaagccatccagagaaga

SEQ ID NO: 5147915 - DNA, 25 bp, Homo sapien
ataagaagctgtaagaagcttttaa

SEQ ID NO: 5147916 - DNA, 25 bp, Homo sapien
tggcaagggtgtgtaataagaagct

SEQ ID NO: 5147917 - DNA, 25 bp, Homo sapien
taaaaccaaatcattgaagccatcc

SEQ ID NO: 5147918 - DNA, 25 bp, Homo sapien
tctctccagtatctctgggttcatc

SEQ ID NO: 5147919 - DNA, 25 bp, Homo sapien
tttctctccagtatctctgggttca

SEQ ID NO: 5147920 - DNA, 25 bp, Homo sapien
cctctttctctccagtatctctggg

SEQ ID NO: 5147921 - DNA, 25 bp, Homo sapien
tctttctctccagtatctctgggtt

SEQ ID NO: 5147922 - DNA, 25 bp, Homo sapien
gaggttaccttgtggccatcatggc

SEQ ID NO: 5147923 - DNA, 25 bp, Homo sapien
gagattgcacatctcgctttgaggt

SEQ ID NO: 5147924 - DNA, 25 bp, Homo sapien
tgctttcagatattggccctgtgaa

SEQ ID NO: 5147925 - DNA, 25 bp, Homo sapien
caaactatggtcctccaagcctcag

SEQ ID NO: 5147926 - DNA, 25 bp, Homo sapien
cttcactaaatctaactgttcagct

SEQ ID NO: 5147927 - DNA, 25 bp, Homo sapien
tcactaaatctaactgttcagctgg

SEQ ID NO: 5147928 - DNA, 25 bp, Homo sapien
ctaaatctaactgttcagctggtac

SEQ ID NO: 5147929 - DNA, 25 bp, Homo sapien
ctgcatggactccctcggcccgcat

SEQ ID NO: 5147930 - DNA, 25 bp, Homo sapien
gaggggcccacagatcttaagcaaa

SEQ ID NO: 5147931 - DNA, 25 bp, Homo sapien
taccatggattttgaggggcccaca

SEQ ID NO: 5147932 - DNA, 25 bp, Homo sapien
cttgtccatgataccatggattttg

SEQ ID NO: 5147933 - DNA, 25 bp, Homo sapien
tgaggggcccacagatcttaagcaa

SEQ ID NO: 5147934 - DNA, 25 bp, Homo sapien
gcccacacgtgcagaaatttgtaca

SEQ ID NO: 5147935 - DNA, 25 bp, Homo sapien
tgaagaaccacggatggcgctctgg

SEQ ID NO: 5147936 - DNA, 25 bp, Homo sapien
aagaagccctccctatgatggctgg

SEQ ID NO: 5147937 - DNA, 25 bp, Homo sapien
tctgccatagtgacatgaagaacca

SEQ ID NO: 5147938 - DNA, 25 bp, Homo sapien
caaagtccctgttgatgacatcaag

SEQ ID NO: 5147939 - DNA, 25 bp, Homo sapien
ccctgttgatgacatcaagaaattt

SEQ ID NO: 5147940 - DNA, 25 bp, Homo sapien
agggcaaagtccctgttgatgacat

SEQ ID NO: 5147941 - DNA, 25 bp, Homo sapien
atgatgagggcaaagtccctgttga

SEQ ID NO: 5147942 - DNA, 25 bp, Homo sapien
caatcctgataaaggtgtcctttta

SEQ ID NO: 5147943 - DNA, 25 bp, Homo sapien
tcaatcctgataaaggtgtcctttt

SEQ ID NO: 5147944 - DNA, 25 bp, Homo sapien
taaacagtggatttgtattagcggc

SEQ ID NO: 5147945 - DNA, 25 bp, Homo sapien
gtactccctcgtcactaaacagtgg

SEQ ID NO: 5147946 - DNA, 25 bp, Homo sapien
tagtaaggcaagtactccctcgtca

SEQ ID NO: 5147947 - DNA, 25 bp, Homo sapien
tagcggcctgcaaatcaaacacgag

SEQ ID NO: 5147948 - DNA, 25 bp, Homo sapien
tactcactacatggacaataagctg

SEQ ID NO: 5147949 - DNA, 25 bp, Homo sapien
cagggattgggtacccctgtcataa

SEQ ID NO: 5147950 - DNA, 25 bp, Homo sapien
gaaaccgcggtacagcagcggtcct

SEQ ID NO: 5147951 - DNA, 25 bp, Homo sapien
cacagtaatgcaggaggcctccgtt

SEQ ID NO: 5147952 - DNA, 25 bp, Homo sapien
cagaggttctgcaagccaggtgata

SEQ ID NO: 5147953 - DNA, 25 bp, Homo sapien
tgagaaaacgcaaacagtggccctg

SEQ ID NO: 5147954 - DNA, 25 bp, Homo sapien
cacttcctggctcaatagggtgcca

SEQ ID NO: 5147955 - DNA, 25 bp, Homo sapien
ttgccagggctgactattaaattgc

SEQ ID NO: 5147956 - DNA, 25 bp, Homo sapien
gaggctcaccaaggtatgtatctac

SEQ ID NO: 5147957 - DNA, 25 bp, Homo sapien
gctctccagtgaggctcaccaaggt

SEQ ID NO: 5147958 - DNA, 25 bp, Homo sapien
ccactctgaaaggtgccacagctct

SEQ ID NO: 5147959 - DNA, 25 bp, Homo sapien
tatgtatctacagaatgagcagcaa

SEQ ID NO: 5147960 - DNA, 25 bp, Homo sapien
agccgagagcgcagctgaagactgt

SEQ ID NO: 5147961 - DNA, 25 bp, Homo sapien
tccattctacagagcctcaacacag

SEQ ID NO: 5147962 - DNA, 25 bp, Homo sapien
ctgtggatggcaggggttgaggccc

SEQ ID NO: 5147963 - DNA, 25 bp, Homo sapien
cagccagccgagagcgcagctgaag

SEQ ID NO: 5147964 - DNA, 25 bp, Homo sapien
tatatggcatgtcaagcactgtaag

SEQ ID NO: 5147965 - DNA, 25 bp, Homo sapien
ttcaggattggaagcatccccggcc

SEQ ID NO: 5147966 - DNA, 25 bp, Homo sapien
caagctaagggttctctatatggca

SEQ ID NO: 5147967 - DNA, 25 bp, Homo sapien
cctgccctgatgaaacctaagctct

SEQ ID NO: 5147968 - DNA, 25 bp, Homo sapien
tggcaggaagggcaacaagactacc

SEQ ID NO: 5147969 - DNA, 25 bp, Homo sapien
taagagaaattaagccaccagcccg

SEQ ID NO: 5147970 - DNA, 25 bp, Homo sapien
gtggcacccactcacagggctatgg

SEQ ID NO: 5147971 - DNA, 25 bp, Homo sapien
ctgagtagccttcacaaatagggtc

SEQ ID NO: 5147972 - DNA, 25 bp, Homo sapien
agaactctctacacagcacacgtgg

SEQ ID NO: 5147973 - DNA, 25 bp, Homo sapien
cctcatgggcttgggttacttcagt

SEQ ID NO: 5147974 - DNA, 25 bp, Homo sapien
tcctccaaccagaactgcagggctg

SEQ ID NO: 5147975 - DNA, 25 bp, Homo sapien
cccaggagaataaggcaagcccttc

SEQ ID NO: 5147976 - DNA, 25 bp, Homo sapien
tcgagtccgcacacctgtgggaagg

SEQ ID NO: 5147977 - DNA, 25 bp, Homo sapien
ggctgagctgtcttgcaaggccacc

SEQ ID NO: 5147978 - DNA, 25 bp, Homo sapien
cagagccctcgagggaaaggtcctg

SEQ ID NO: 5147979 - DNA, 25 bp, Homo sapien
cacttgcttcacttgtggcacctgg

SEQ ID NO: 5147980 - DNA, 25 bp, Homo sapien
ttccttttcggattgttcaagtcta

SEQ ID NO: 5147981 - DNA, 25 bp, Homo sapien
ttttgatgagattgcaaattgaatt

SEQ ID NO: 5147982 - DNA, 25 bp, Homo sapien
ggattgttcaagtctatagaaatac

SEQ ID NO: 5147983 - DNA, 25 bp, Homo sapien
tcagtgtgccaatctttcacctctt

SEQ ID NO: 5147984 - DNA, 25 bp, Homo sapien
aagcaggggagctgccgtgtacccc

SEQ ID NO: 5147985 - DNA, 25 bp, Homo sapien
agcaggggagctgccgtgtacccca

SEQ ID NO: 5147986 - DNA, 25 bp, Homo sapien
gggagctgccgtgtaccccatgaag

SEQ ID NO: 5147987 - DNA, 25 bp, Homo sapien
agctgccgtgtaccccatgaagcca

SEQ ID NO: 5147988 - DNA, 25 bp, Homo sapien
tggacccgaaaggactgcacaagat

SEQ ID NO: 5147989 - DNA, 25 bp, Homo sapien
gaaaggactgcacaagattctggca

SEQ ID NO: 5147990 - DNA, 25 bp, Homo sapien
acttgcgttggacccgaaaggactg

SEQ ID NO: 5147991 - DNA, 25 bp, Homo sapien
cgttggacccgaaaggactgcacaa

SEQ ID NO: 5147992 - DNA, 25 bp, Homo sapien
cattttaatttggtggcataacact

SEQ ID NO: 5147993 - DNA, 25 bp, Homo sapien
catagcttatttagcaatctccaca

SEQ ID NO: 5147994 - DNA, 25 bp, Homo sapien
actccaaggctcaagaaatgctcct

SEQ ID NO: 5147995 - DNA, 25 bp, Homo sapien
gagccattgcgtggtcataaaaacc

SEQ ID NO: 5147996 - DNA, 25 bp, Homo sapien
tccaaggagacggtcggaaattctg

SEQ ID NO: 5147997 - DNA, 25 bp, Homo sapien
tctaagtctccaaggagacggtcgg

SEQ ID NO: 5147998 - DNA, 25 bp, Homo sapien
aggagacggtcggaaattctgtaag

SEQ ID NO: 5147999 - DNA, 25 bp, Homo sapien
tctccaaggagacggtcggaaattc

SEQ ID NO: 5148000 - DNA, 25 bp, Homo sapien
cactgctcaggccctcttcttttac

SEQ ID NO: 5148001 - DNA, 25 bp, Homo sapien
ctgctcaggccctcttcttttacca

SEQ ID NO: 5148002 - DNA, 25 bp, Homo sapien
tcactgctcaggccctcttctttta

SEQ ID NO: 5148003 - DNA, 25 bp, Homo sapien
actgctcaggccctcttcttttacc

SEQ ID NO: 5148004 - DNA, 25 bp, Homo sapien
cataaagggaccaaatgaccacaat

SEQ ID NO: 5148005 - DNA, 25 bp, Homo sapien
agattcataaagggaccaaatgacc

SEQ ID NO: 5148006 - DNA, 25 bp, Homo sapien
ttcataaagggaccaaatgaccaca

SEQ ID NO: 5148007 - DNA, 25 bp, Homo sapien
gattcataaagggaccaaatgacca

SEQ ID NO: 5148008 - DNA, 25 bp, Homo sapien
caaagactttccacctgtgtctcag

SEQ ID NO: 5148009 - DNA, 25 bp, Homo sapien
gcaaacttgataggctctgttggaa

SEQ ID NO: 5148010 - DNA, 25 bp, Homo sapien
gggctgatcaaagaagcaagcacaa

SEQ ID NO: 5148011 - DNA, 25 bp, Homo sapien
gggccctcattaggaagcaaacttg

SEQ ID NO: 5148012 - DNA, 25 bp, Homo sapien
aaaatagagtgattgtgtaggaact

SEQ ID NO: 5148013 - DNA, 25 bp, Homo sapien
aatagagtgattgtgtaggaactca

SEQ ID NO: 5148014 - DNA, 25 bp, Homo sapien
aactcaaagtaaagattctactgaa

SEQ ID NO: 5148015 - DNA, 25 bp, Homo sapien
agagtgattgtgtaggaactcaaag

SEQ ID NO: 5148016 - DNA, 25 bp, Homo sapien
gcctggcttggcaactatcttttaa

SEQ ID NO: 5148017 - DNA, 25 bp, Homo sapien
gtggcagtccctttatgtcatttca

SEQ ID NO: 5148018 - DNA, 25 bp, Homo sapien
ttctggaaattacacggtgtgtggg

SEQ ID NO: 5148019 - DNA, 25 bp, Homo sapien
cactacctggtgcttaaagtcagaa

SEQ ID NO: 5148020 - DNA, 25 bp, Homo sapien
ccccttcccacccattgcattgtct

SEQ ID NO: 5148021 - DNA, 25 bp, Homo sapien
gtggccagcagaaaagtgtcaggaa

SEQ ID NO: 5148022 - DNA, 25 bp, Homo sapien
tggccagcagaaaagtgtcaggaag

SEQ ID NO: 5148023 - DNA, 25 bp, Homo sapien
ggtactgagagcatgattctcggag

SEQ ID NO: 5148024 - DNA, 25 bp, Homo sapien
tggtactgagagcatgattctcgga

SEQ ID NO: 5148025 - DNA, 25 bp, Homo sapien
gctgggctcgagtctggtactgaga

SEQ ID NO: 5148026 - DNA, 25 bp, Homo sapien
gggctcgagtctggtactgagagca

SEQ ID NO: 5148027 - DNA, 25 bp, Homo sapien
agctcctcggcacggcagccgaggt

SEQ ID NO: 5148028 - DNA, 25 bp, Homo sapien
cagtgtctgcctgatgacctcaggg

SEQ ID NO: 5148029 - DNA, 25 bp, Homo sapien
agccgaggtcccctacgctggcctc

SEQ ID NO: 5148030 - DNA, 25 bp, Homo sapien
gtcccctacgctggcctcagcatac

SEQ ID NO: 5148031 - DNA, 25 bp, Homo sapien
atccccactcagctgctcggcaagg

SEQ ID NO: 5148032 - DNA, 25 bp, Homo sapien
aatccccactcagctgctcggcaag

SEQ ID NO: 5148033 - DNA, 25 bp, Homo sapien
tccccactcagctgctcggcaagga

SEQ ID NO: 5148034 - DNA, 25 bp, Homo sapien
aaatccccactcagctgctcggcaa

SEQ ID NO: 5148035 - DNA, 25 bp, Homo sapien
tcctcctaacagtgatgttcttgta

SEQ ID NO: 5148036 - DNA, 25 bp, Homo sapien
gggcataagactgtatcctcctaac

SEQ ID NO: 5148037 - DNA, 25 bp, Homo sapien
gaagtacaattgttcaagggcataa

SEQ ID NO: 5148038 - DNA, 25 bp, Homo sapien
tagcagtctgttccagaagtacaat

SEQ ID NO: 5148039 - DNA, 25 bp, Homo sapien
ccagcggtacacacacgaggatgat

SEQ ID NO: 5148040 - DNA, 25 bp, Homo sapien
tcagaggactcatggccagcggtac

SEQ ID NO: 5148041 - DNA, 25 bp, Homo sapien
tgctgagcgttccactcagaggact

SEQ ID NO: 5148042 - DNA, 25 bp, Homo sapien
gcgtgcatggcatccgtcgtgctga

SEQ ID NO: 5148043 - DNA, 25 bp, Homo sapien
gtcaccgggcatgccccttcccaat

SEQ ID NO: 5148044 - DNA, 25 bp, Homo sapien
ccccacagtggatctgccggggcag

SEQ ID NO: 5148045 - DNA, 25 bp, Homo sapien
tgccccacagtggatctgccggggc

SEQ ID NO: 5148046 - DNA, 25 bp, Homo sapien
aacagacagcatgtggtcaccgggc

SEQ ID NO: 5148047 - DNA, 25 bp, Homo sapien
ggttccttcccctcgtagctgtaga

SEQ ID NO: 5148048 - DNA, 25 bp, Homo sapien
ccttgcgccgcaggacgatgatgtc

SEQ ID NO: 5148049 - DNA, 25 bp, Homo sapien
ctgtagagggccttgccatagggaa

SEQ ID NO: 5148050 - DNA, 25 bp, Homo sapien
caagggctggatgcactggatatag

SEQ ID NO: 5148051 - DNA, 25 bp, Homo sapien
gcagcaggtctagtacccgacacag

SEQ ID NO: 5148052 - DNA, 25 bp, Homo sapien
gacacagagtcagggcccggtatgt

SEQ ID NO: 5148053 - DNA, 25 bp, Homo sapien
ggtctagtacccgacacagagtcag

SEQ ID NO: 5148054 - DNA, 25 bp, Homo sapien
tagtacccgacacagagtcagggcc

SEQ ID NO: 5148055 - DNA, 25 bp, Homo sapien
gcctggcaaggcgaccacaatgttt

SEQ ID NO: 5148056 - DNA, 25 bp, Homo sapien
agaaaaccccgtggcctctgaggat

SEQ ID NO: 5148057 - DNA, 25 bp, Homo sapien
gggccccgctgcagtcatgtgcaaa

SEQ ID NO: 5148058 - DNA, 25 bp, Homo sapien
gattccatgatcagcgggcactctc

SEQ ID NO: 5148059 - DNA, 25 bp, Homo sapien
tggctgcagccaccaagccctgtgg

SEQ ID NO: 5148060 - DNA, 25 bp, Homo sapien
caagccctgtggctccttcacatgg

SEQ ID NO: 5148061 - DNA, 25 bp, Homo sapien
accaagccctgtggctccttcacat

SEQ ID NO: 5148062 - DNA, 25 bp, Homo sapien
ttaggacagcacagtggctgcagcc

SEQ ID NO: 5148063 - DNA, 25 bp, Homo sapien
cctgcgagtattctgggctaacata

SEQ ID NO: 5148064 - DNA, 25 bp, Homo sapien
tttcctgcgagtattctgggctaac

SEQ ID NO: 5148065 - DNA, 25 bp, Homo sapien
tgcgagtattctgggctaacataaa

SEQ ID NO: 5148066 - DNA, 25 bp, Homo sapien
gagtattctgggctaacataaaaag

SEQ ID NO: 5148067 - DNA, 25 bp, Homo sapien
gcacgcagtctagggttgataaaca

SEQ ID NO: 5148068 - DNA, 25 bp, Homo sapien
gagactctctcgtcttgtctccacg

SEQ ID NO: 5148069 - DNA, 25 bp, Homo sapien
agcatccctggcattgggcacgcag

SEQ ID NO: 5148070 - DNA, 25 bp, Homo sapien
tttgggttctgagtgcctaagggca

SEQ ID NO: 5148071 - DNA, 25 bp, Homo sapien
cactgcacacggacacacgcatgca

SEQ ID NO: 5148072 - DNA, 25 bp, Homo sapien
tcccactgcacacggacacacgcat

SEQ ID NO: 5148073 - DNA, 25 bp, Homo sapien
cccactgcacacggacacacgcatg

SEQ ID NO: 5148074 - DNA, 25 bp, Homo sapien
ccactgcacacggacacacgcatgc

SEQ ID NO: 5148075 - DNA, 25 bp, Homo sapien
cacatatcaggcatttgggagctca

SEQ ID NO: 5148076 - DNA, 25 bp, Homo sapien
tagaagcaataacaagctggagccc

SEQ ID NO: 5148077 - DNA, 25 bp, Homo sapien
tgacacaggcagtatccgttggcgg

SEQ ID NO: 5148078 - DNA, 25 bp, Homo sapien
catgcagtcgagtggtttcctagaa

SEQ ID NO: 5148079 - DNA, 25 bp, Homo sapien
tttactagctcttccaaagtctgtg

SEQ ID NO: 5148080 - DNA, 25 bp, Homo sapien
tcatttactagctcttccaaagtct

SEQ ID NO: 5148081 - DNA, 25 bp, Homo sapien
tactagctcttccaaagtctgtgtt

SEQ ID NO: 5148082 - DNA, 25 bp, Homo sapien
actagctcttccaaagtctgtgttt

SEQ ID NO: 5148083 - DNA, 25 bp, Homo sapien
gatttgcaccaaggaccccatgtta

SEQ ID NO: 5148084 - DNA, 25 bp, Homo sapien
taaaacccaagcatgtcgagtgtcg

SEQ ID NO: 5148085 - DNA, 25 bp, Homo sapien
tgaagggagcatacagggacaacac

SEQ ID NO: 5148086 - DNA, 25 bp, Homo sapien
caaagatgggtgtacttcacaggcc

SEQ ID NO: 5148087 - DNA, 25 bp, Homo sapien
cacactggtatctaacattggtcta

SEQ ID NO: 5148088 - DNA, 25 bp, Homo sapien
ggattaaacttgaatgtccaagaag

SEQ ID NO: 5148089 - DNA, 25 bp, Homo sapien
agttctctaatccactgtatatgcc

SEQ ID NO: 5148090 - DNA, 25 bp, Homo sapien
gaatagatgtttaatcttgaactgg

SEQ ID NO: 5148091 - DNA, 25 bp, Homo sapien
tgcagttccgggtccaccgtggaca

SEQ ID NO: 5148092 - DNA, 25 bp, Homo sapien
gcagttccgggtccaccgtggacac

SEQ ID NO: 5148093 - DNA, 25 bp, Homo sapien
cagttccgggtccaccgtggacaca

SEQ ID NO: 5148094 - DNA, 25 bp, Homo sapien
ctgcagttccgggtccaccgtggac

SEQ ID NO: 5148095 - DNA, 25 bp, Homo sapien
tcctgagcaccgtcagaatctcgtc

SEQ ID NO: 5148096 - DNA, 25 bp, Homo sapien
tccacgtacaggagcgggaagatcc

SEQ ID NO: 5148097 - DNA, 25 bp, Homo sapien
gatcccgatcttgtctcccagcatg

SEQ ID NO: 5148098 - DNA, 25 bp, Homo sapien
actctcctgagcaccgtcagaatct

SEQ ID NO: 5148099 - DNA, 25 bp, Homo sapien
ggcacagatgcggctgactccccag

SEQ ID NO: 5148100 - DNA, 25 bp, Homo sapien
gaaggcacagatgcggctgactccc

SEQ ID NO: 5148101 - DNA, 25 bp, Homo sapien
caggaaggcacagatgcggctgact

SEQ ID NO: 5148102 - DNA, 25 bp, Homo sapien
gcaggaaggcacagatgcggctgac

SEQ ID NO: 5148103 - DNA, 25 bp, Homo sapien
gtgccaggggctgtggagagacgat

SEQ ID NO: 5148104 - DNA, 25 bp, Homo sapien
gccaggggctgtggagagacgatta

SEQ ID NO: 5148105 - DNA, 25 bp, Homo sapien
ccaggggctgtggagagacgattat

SEQ ID NO: 5148106 - DNA, 25 bp, Homo sapien
aggggctgtggagagacgattattt

SEQ ID NO: 5148107 - DNA, 25 bp, Homo sapien
gagtgaggtatctccggtgagcaca

SEQ ID NO: 5148108 - DNA, 25 bp, Homo sapien
cagcaagcccagctcatgggtgaat

SEQ ID NO: 5148109 - DNA, 25 bp, Homo sapien
ttgcaaaacgatgggcgaaaaggac

SEQ ID NO: 5148110 - DNA, 25 bp, Homo sapien
gcatgggacggtggctggagccatg

SEQ ID NO: 5148111 - DNA, 25 bp, Homo sapien
aggctcatcatcagcagctgggccc

SEQ ID NO: 5148112 - DNA, 25 bp, Homo sapien
cagccactgacgctatggccttttt

SEQ ID NO: 5148113 - DNA, 25 bp, Homo sapien
gcctttttctgggttagcagacact

SEQ ID NO: 5148114 - DNA, 25 bp, Homo sapien
gacactgggatgactaggaggctca

SEQ ID NO: 5148115 - DNA, 25 bp, Homo sapien
accacaggatcagacaggtctggag

SEQ ID NO: 5148116 - DNA, 25 bp, Homo sapien
gaccacaggatcagacaggtctgga

SEQ ID NO: 5148117 - DNA, 25 bp, Homo sapien
ggaccacaggatcagacaggtctgg

SEQ ID NO: 5148118 - DNA, 25 bp, Homo sapien
ggcgtttggttgtaacccatctcca

SEQ ID NO: 5148119 - DNA, 25 bp, Homo sapien
tcctgactcttagaagcagcggcca

SEQ ID NO: 5148120 - DNA, 25 bp, Homo sapien
catgactttaaaggcgttttccagt

SEQ ID NO: 5148121 - DNA, 25 bp, Homo sapien
cagaagtgtagggaacaccagcagt

SEQ ID NO: 5148122 - DNA, 25 bp, Homo sapien
ttacaaagtgttcctggaggcacag

SEQ ID NO: 5148123 - DNA, 25 bp, Homo sapien
ccacactaaggctgggggatccctt

SEQ ID NO: 5148124 - DNA, 25 bp, Homo sapien
gggatcccttccacaggctgtcgct

SEQ ID NO: 5148125 - DNA, 25 bp, Homo sapien
aatgcaagcaggattggcatccaca

SEQ ID NO: 5148126 - DNA, 25 bp, Homo sapien
tggaacactcaggaaagaagtgagc

SEQ ID NO: 5148127 - DNA, 25 bp, Homo sapien
ggtacttcctaaggccgatctccag

SEQ ID NO: 5148128 - DNA, 25 bp, Homo sapien
ggttcagacacactctcaagtcctg

SEQ ID NO: 5148129 - DNA, 25 bp, Homo sapien
caagtcctgagtgttgtgattggaa

SEQ ID NO: 5148130 - DNA, 25 bp, Homo sapien
ccgcagccggcgcttaaggactgga

SEQ ID NO: 5148131 - DNA, 25 bp, Homo sapien
cggcgcttaaggactggatgaacgt

SEQ ID NO: 5148132 - DNA, 25 bp, Homo sapien
cttaaggactggatgaacgtgggac

SEQ ID NO: 5148133 - DNA, 25 bp, Homo sapien
cagccggcgcttaaggactggatga

SEQ ID NO: 5148134 - DNA, 25 bp, Homo sapien
gctggatccaagaacagggtatgaa

SEQ ID NO: 5148135 - DNA, 25 bp, Homo sapien
catgctccatatgcgtctctaacgg

SEQ ID NO: 5148136 - DNA, 25 bp, Homo sapien
tctctaacggatagggagatccaca

SEQ ID NO: 5148137 - DNA, 25 bp, Homo sapien
ttttggcttcatgtacggcctgacc

SEQ ID NO: 5148138 - DNA, 25 bp, Homo sapien
tgtggccttgggcctatgatgctgc

SEQ ID NO: 5148139 - DNA, 25 bp, Homo sapien
ctatgatgctgcatgtgatgggctc

SEQ ID NO: 5148140 - DNA, 25 bp, Homo sapien
tggccttgggcctatgatgctgcat

SEQ ID NO: 5148141 - DNA, 25 bp, Homo sapien
tgggcctatgatgctgcatgtgatg

SEQ ID NO: 5148142 - DNA, 25 bp, Homo sapien
cacacatccttgtgggcccacggtc

SEQ ID NO: 5148143 - DNA, 25 bp, Homo sapien
acggtcacaggatgccctcgcctgc

SEQ ID NO: 5148144 - DNA, 25 bp, Homo sapien
gccagtgcctgtgcgggacggcggc

SEQ ID NO: 5148145 - DNA, 25 bp, Homo sapien
gtgcctgtgcgggacggcggctccc

SEQ ID NO: 5148146 - DNA, 25 bp, Homo sapien
acaggcatgcgagtagcgcacgcac

SEQ ID NO: 5148147 - DNA, 25 bp, Homo sapien
actggcctgcctgcggagtcccagg

SEQ ID NO: 5148148 - DNA, 25 bp, Homo sapien
tgacttgatcctggggcaaaactct

SEQ ID NO: 5148149 - DNA, 25 bp, Homo sapien
gagtagcgcacgcactggcctgcct

SEQ ID NO: 5148150 - DNA, 25 bp, Homo sapien
gggcacagtgagcgcagtcctccat

SEQ ID NO: 5148151 - DNA, 25 bp, Homo sapien
gggtatagaggaagacacagcagca

SEQ ID NO: 5148152 - DNA, 25 bp, Homo sapien
cacttgacagggtatagaggaagac

SEQ ID NO: 5148153 - DNA, 25 bp, Homo sapien
tctctgcccacttgacagggtatag

SEQ ID NO: 5148154 - DNA, 25 bp, Homo sapien
aaaaaaactgagtaaatgccagctg

SEQ ID NO: 5148155 - DNA, 25 bp, Homo sapien
agaaaaaaactgagtaaatgccagc

SEQ ID NO: 5148156 - DNA, 25 bp, Homo sapien
aaaactgagtaaatgccagctgccc

SEQ ID NO: 5148157 - DNA, 25 bp, Homo sapien
aactgagtaaatgccagctgccctc

SEQ ID NO: 5148158 - DNA, 25 bp, Homo sapien
gaccgcccctgagctgcttaaagtg

SEQ ID NO: 5148159 - DNA, 25 bp, Homo sapien
tcgctggagctgatcaacactggag

SEQ ID NO: 5148160 - DNA, 25 bp, Homo sapien
tctcaatgagctgcttggcggagtc

SEQ ID NO: 5148161 - DNA, 25 bp, Homo sapien
gaggatctgtgcgtcacactgagcg

SEQ ID NO: 5148162 - DNA, 25 bp, Homo sapien
gatgcctgccctggcccgcgggatg

SEQ ID NO: 5148163 - DNA, 25 bp, Homo sapien
gctgaggatagaaccccagagaacc

SEQ ID NO: 5148164 - DNA, 25 bp, Homo sapien
tgcctgccctggcccgcgggatgtt

SEQ ID NO: 5148165 - DNA, 25 bp, Homo sapien
cctgccctggcccgcgggatgttac

SEQ ID NO: 5148166 - DNA, 25 bp, Homo sapien
taacgaaagtactcaacaatgtagt

SEQ ID NO: 5148167 - DNA, 25 bp, Homo sapien
agacatctggaagccgactgacacg

SEQ ID NO: 5148168 - DNA, 25 bp, Homo sapien
gactgattggttgcttgtagagaca

SEQ ID NO: 5148169 - DNA, 25 bp, Homo sapien
tcttccaggacataatcagacatct

SEQ ID NO: 5148170 - DNA, 25 bp, Homo sapien
tgtgctgagcccacatctcaggggc

SEQ ID NO: 5148171 - DNA, 25 bp, Homo sapien
ctgtgtgtgctgagcccacatctca

SEQ ID NO: 5148172 - DNA, 25 bp, Homo sapien
tgtgtgtgctgagcccacatctcag

SEQ ID NO: 5148173 - DNA, 25 bp, Homo sapien
tgtgtgctgagcccacatctcaggg

SEQ ID NO: 5148174 - DNA, 25 bp, Homo sapien
caccagctttccaaaacctccagga

SEQ ID NO: 5148175 - DNA, 25 bp, Homo sapien
ccagcacagcaccaagccagagatg

SEQ ID NO: 5148176 - DNA, 25 bp, Homo sapien
accaccagctttccaaaacctccag

SEQ ID NO: 5148177 - DNA, 25 bp, Homo sapien
agcacagcaccaagccagagatggg

SEQ ID NO: 5148178 - DNA, 25 bp, Homo sapien
aacatgagcaggacgggccatctga

SEQ ID NO: 5148179 - DNA, 25 bp, Homo sapien
atctgaggctcagccggctgcacgc

SEQ ID NO: 5148180 - DNA, 25 bp, Homo sapien
cagtcgcagaggaagaatccctagg

SEQ ID NO: 5148181 - DNA, 25 bp, Homo sapien
tccccagccatcgatgtgcagccgg

SEQ ID NO: 5148182 - DNA, 25 bp, Homo sapien
gataataagacccagccaacacagg

SEQ ID NO: 5148183 - DNA, 25 bp, Homo sapien
gcttgtactctgcagttgagagctg

SEQ ID NO: 5148184 - DNA, 25 bp, Homo sapien
acagcttataagcagtaagtctggg

SEQ ID NO: 5148185 - DNA, 25 bp, Homo sapien
ggagccggagtttgcacagcttata

SEQ ID NO: 5148186 - DNA, 25 bp, Homo sapien
tgaagtcagacaacccacaggctat

SEQ ID NO: 5148187 - DNA, 25 bp, Homo sapien
aatcaagcagtggaggacagagtcc

SEQ ID NO: 5148188 - DNA, 25 bp, Homo sapien
gatcgttgtcctgaagccaacaggg

SEQ ID NO: 5148189 - DNA, 25 bp, Homo sapien
tctaagtacacagaataggccctca

SEQ ID NO: 5148190 - DNA, 25 bp, Homo sapien
gacctggcagtcggaactggccctg

SEQ ID NO: 5148191 - DNA, 25 bp, Homo sapien
atgacctggcagtcggaactggccc

SEQ ID NO: 5148192 - DNA, 25 bp, Homo sapien
acctggcagtcggaactggccctgg

SEQ ID NO: 5148193 - DNA, 25 bp, Homo sapien
tgacctggcagtcggaactggccct

SEQ ID NO: 5148194 - DNA, 25 bp, Homo sapien
gaccagttctggccttgcttagctg

SEQ ID NO: 5148195 - DNA, 25 bp, Homo sapien
tgaccagttctggccttgcttagct

SEQ ID NO: 5148196 - DNA, 25 bp, Homo sapien
accagttctggccttgcttagctga

SEQ ID NO: 5148197 - DNA, 25 bp, Homo sapien
aggcagcccgtgggacagccgtggg

SEQ ID NO: 5148198 - DNA, 25 bp, Homo sapien
gcagcccgtgggacagccgtggggg

SEQ ID NO: 5148199 - DNA, 25 bp, Homo sapien
tgggacagccgtgggggtagatccc

SEQ ID NO: 5148200 - DNA, 25 bp, Homo sapien
cgtgggggtagatcccgccgaggag

SEQ ID NO: 5148201 - DNA, 25 bp, Homo sapien
tgcaggcacaggaccccgacagaca

SEQ ID NO: 5148202 - DNA, 25 bp, Homo sapien
gctgcaggcacaggaccccgacaga

SEQ ID NO: 5148203 - DNA, 25 bp, Homo sapien
acaggaccccgacagacacaaaggg

SEQ ID NO: 5148204 - DNA, 25 bp, Homo sapien
gaccccgacagacacaaagggcagc

SEQ ID NO: 5148205 - DNA, 25 bp, Homo sapien
tgtgccaagagttccgttgctctca

SEQ ID NO: 5148206 - DNA, 25 bp, Homo sapien
gacccaggcgtgtcggtctgatgcc

SEQ ID NO: 5148207 - DNA, 25 bp, Homo sapien
tccttctctgatggcaagctgacat

SEQ ID NO: 5148208 - DNA, 25 bp, Homo sapien
ctctcagattgcaggtacgtggacc

SEQ ID NO: 5148209 - DNA, 25 bp, Homo sapien
tattcttggtcgcatctgtctgtaa

SEQ ID NO: 5148210 - DNA, 25 bp, Homo sapien
atatcctgaggacggtgccgccatg

SEQ ID NO: 5148211 - DNA, 25 bp, Homo sapien
gcatctgtctgtaatatcctgagga

SEQ ID NO: 5148212 - DNA, 25 bp, Homo sapien
tcaggctcactctcatattcttggt

SEQ ID NO: 5148213 - DNA, 25 bp, Homo sapien
gccctctctagaggtgcaggcggca

SEQ ID NO: 5148214 - DNA, 25 bp, Homo sapien
ctgtgccctctctagaggtgcaggc

SEQ ID NO: 5148215 - DNA, 25 bp, Homo sapien
tgtgccctctctagaggtgcaggcg

SEQ ID NO: 5148216 - DNA, 25 bp, Homo sapien
tgccctctctagaggtgcaggcggc

SEQ ID NO: 5148217 - DNA, 25 bp, Homo sapien
ttcaccaggaggagatttttatctc

SEQ ID NO: 5148218 - DNA, 25 bp, Homo sapien
tgatgtgaatagttgctgactactc

SEQ ID NO: 5148219 - DNA, 25 bp, Homo sapien
cttgtcttgatgtgaatagttgctg

SEQ ID NO: 5148220 - DNA, 25 bp, Homo sapien
gacagcaatgaggtttgctacattg

SEQ ID NO: 5148221 - DNA, 25 bp, Homo sapien
caggtatggcctcaggatggccagc

SEQ ID NO: 5148222 - DNA, 25 bp, Homo sapien
tgccttcgcctcttccctgagggct

SEQ ID NO: 5148223 - DNA, 25 bp, Homo sapien
gcagaaactgctcggttctccctgg

SEQ ID NO: 5148224 - DNA, 25 bp, Homo sapien
ggccagctccgggagcactgctgcc

SEQ ID NO: 5148225 - DNA, 25 bp, Homo sapien
tcttccatctaggtgcagcacccac

SEQ ID NO: 5148226 - DNA, 25 bp, Homo sapien
ctcttccatctaggtgcagcaccca

SEQ ID NO: 5148227 - DNA, 25 bp, Homo sapien
ctggcatggcagggagaaccgggca

SEQ ID NO: 5148228 - DNA, 25 bp, Homo sapien
agccacagtggcatcgcctgttacc

SEQ ID NO: 5148229 - DNA, 25 bp, Homo sapien
gtcttcgtagacacatgcacctggg

SEQ ID NO: 5148230 - DNA, 25 bp, Homo sapien
ggatggcgtcccctgcactcagtgg

SEQ ID NO: 5148231 - DNA, 25 bp, Homo sapien
caccaacgtctgtgagttgagtcct

SEQ ID NO: 5148232 - DNA, 25 bp, Homo sapien
ctggggataggggaccggccggcat

SEQ ID NO: 5148233 - DNA, 25 bp, Homo sapien
gcgggcaaagcatggggccagtgtc

SEQ ID NO: 5148234 - DNA, 25 bp, Homo sapien
gcatggggccagtgtcagtgggagc

SEQ ID NO: 5148235 - DNA, 25 bp, Homo sapien
atggggccagtgtcagtgggagccc

SEQ ID NO: 5148236 - DNA, 25 bp, Homo sapien
ctgcgggcaaagcatggggccagtg

SEQ ID NO: 5148237 - DNA, 25 bp, Homo sapien
cacttctcgaggacccggtacatct

SEQ ID NO: 5148238 - DNA, 25 bp, Homo sapien
ggacccggtacatctctcccttgtg

SEQ ID NO: 5148239 - DNA, 25 bp, Homo sapien
actcttctggggcttgtaggcgtag

SEQ ID NO: 5148240 - DNA, 25 bp, Homo sapien
agccatcctgacacttctcgaggac

SEQ ID NO: 5148241 - DNA, 25 bp, Homo sapien
tccaatcactgccagataagccttc

SEQ ID NO: 5148242 - DNA, 25 bp, Homo sapien
tcactgccagataagccttctgctg

SEQ ID NO: 5148243 - DNA, 25 bp, Homo sapien
aatcactgccagataagccttctgc

SEQ ID NO: 5148244 - DNA, 25 bp, Homo sapien
actgccagataagccttctgctgtg

SEQ ID NO: 5148245 - DNA, 25 bp, Homo sapien
gagaccctccgactacattattccg

SEQ ID NO: 5148246 - DNA, 25 bp, Homo sapien
ttgtggttatccctttggccagtgg

SEQ ID NO: 5148247 - DNA, 25 bp, Homo sapien
ggccagtggagaccctccgactaca

SEQ ID NO: 5148248 - DNA, 25 bp, Homo sapien
tggttatccctttggccagtggaga

SEQ ID NO: 5148249 - DNA, 25 bp, Homo sapien
gtggccaggctgctcagactcccac

SEQ ID NO: 5148250 - DNA, 25 bp, Homo sapien
cagggcgggcctggtggcagtggcc

SEQ ID NO: 5148251 - DNA, 25 bp, Homo sapien
tgggcgtgggcctggggagtggtga

SEQ ID NO: 5148252 - DNA, 25 bp, Homo sapien
gagtggtgatgggcagggcgggcct

SEQ ID NO: 5148253 - DNA, 25 bp, Homo sapien
ggctgggctgagtgccgtagacagc

SEQ ID NO: 5148254 - DNA, 25 bp, Homo sapien
gctgggctgagtgccgtagacagct

SEQ ID NO: 5148255 - DNA, 25 bp, Homo sapien
gttgaaatggtgctccgggcttggc

SEQ ID NO: 5148256 - DNA, 25 bp, Homo sapien
tgggctgagtgccgtagacagctgc

SEQ ID NO: 5148257 - DNA, 25 bp, Homo sapien
ccccttgttgatgccctgcagggtg

SEQ ID NO: 5148258 - DNA, 25 bp, Homo sapien
ccttgttgatgccctgcagggtgag

SEQ ID NO: 5148259 - DNA, 25 bp, Homo sapien
ggaagcccccttgttgatgccctgc

SEQ ID NO: 5148260 - DNA, 25 bp, Homo sapien
gttgatgccctgcagggtgaggccc

SEQ ID NO: 5148261 - DNA, 25 bp, Homo sapien
gagccttgggccaagatgtgtctca

SEQ ID NO: 5148262 - DNA, 25 bp, Homo sapien
agccttgggccaagatgtgtctcac

SEQ ID NO: 5148263 - DNA, 25 bp, Homo sapien
caatttttccgtctggctggtggga

SEQ ID NO: 5148264 - DNA, 25 bp, Homo sapien
aattggaacagtgctcagtctgacc

SEQ ID NO: 5148265 - DNA, 25 bp, Homo sapien
tctgaccactacagaggcaaggtcc

SEQ ID NO: 5148266 - DNA, 25 bp, Homo sapien
ggcaaggtcctgtgtagattactca

SEQ ID NO: 5148267 - DNA, 25 bp, Homo sapien
tcttttcctcttagatcttaaacat

SEQ ID NO: 5148268 - DNA, 25 bp, Homo sapien
tgagtttattggctaacttatgtgt

SEQ ID NO: 5148269 - DNA, 25 bp, Homo sapien
tcctcttagatcttaaacatactga

SEQ ID NO: 5148270 - DNA, 25 bp, Homo sapien
agtttattggctaacttatgtgtga

SEQ ID NO: 5148271 - DNA, 25 bp, Homo sapien
tcagggatgaaatggaactcccaca

SEQ ID NO: 5148272 - DNA, 25 bp, Homo sapien
tggtgtgtttcagtcccgctgcagc

SEQ ID NO: 5148273 - DNA, 25 bp, Homo sapien
tgcagcttccaaggactgtgagccc

SEQ ID NO: 5148274 - DNA, 25 bp, Homo sapien
aggactctgggtcccaccaggtcaa

SEQ ID NO: 5148275 - DNA, 25 bp, Homo sapien
tggaaaccctgactcagaggccgct

SEQ ID NO: 5148276 - DNA, 25 bp, Homo sapien
gataccaccttctagagacctgcct

SEQ ID NO: 5148277 - DNA, 25 bp, Homo sapien
tcagggcttcagctgggttggaaac

SEQ ID NO: 5148278 - DNA, 25 bp, Homo sapien
gtcaggcaatcacgcagatccaggg

SEQ ID NO: 5148279 - DNA, 25 bp, Homo sapien
agagacagcaggttgaaaggttagt

SEQ ID NO: 5148280 - DNA, 25 bp, Homo sapien
ggagacggggttggagagacagcag

SEQ ID NO: 5148281 - DNA, 25 bp, Homo sapien
cagcaggttgaaaggttagtttgca

SEQ ID NO: 5148282 - DNA, 25 bp, Homo sapien
gaaaggttagtttgcaacttgccat

SEQ ID NO: 5148283 - DNA, 25 bp, Homo sapien
gtgacacggtggcagttggccggtc

SEQ ID NO: 5148284 - DNA, 25 bp, Homo sapien
ggacaccaccgagtggggcctgagg

SEQ ID NO: 5148285 - DNA, 25 bp, Homo sapien
tgcgcaggggtgacacggtggcagt

SEQ ID NO: 5148286 - DNA, 25 bp, Homo sapien
gcaggcaggcgggatggagagttct

SEQ ID NO: 5148287 - DNA, 25 bp, Homo sapien
tgcggcactgacgttgggaggtgtg

SEQ ID NO: 5148288 - DNA, 25 bp, Homo sapien
tctagtttgcatcccgtgttggtgg

SEQ ID NO: 5148289 - DNA, 25 bp, Homo sapien
ttcttctcgtctagtttgcatcccg

SEQ ID NO: 5148290 - DNA, 25 bp, Homo sapien
tccagcctccccgttgaggtttgcg

SEQ ID NO: 5148291 - DNA, 25 bp, Homo sapien
ttggagcccacattctagcttcaat

SEQ ID NO: 5148292 - DNA, 25 bp, Homo sapien
ttcaattgcacaaatgccactgcca

SEQ ID NO: 5148293 - DNA, 25 bp, Homo sapien
ggcctcgagcccagggctcgtccag

SEQ ID NO: 5148294 - DNA, 25 bp, Homo sapien
gccactgccatctagtgccaaaaag

SEQ ID NO: 5148295 - DNA, 25 bp, Homo sapien
gcgctctgccaggtacatcctcatg

SEQ ID NO: 5148296 - DNA, 25 bp, Homo sapien
gggttgacctttccatcattatgaa

SEQ ID NO: 5148297 - DNA, 25 bp, Homo sapien
tgtacagtgacctgtactatactct

SEQ ID NO: 5148298 - DNA, 25 bp, Homo sapien
cattatgaaccgtgtgcctgcgctc

SEQ ID NO: 5148299 - DNA, 25 bp, Homo sapien
agtgaatggcactggtaaacctgga

SEQ ID NO: 5148300 - DNA, 25 bp, Homo sapien
cctggttggtgggagcatgcagcca

SEQ ID NO: 5148301 - DNA, 25 bp, Homo sapien
tcacttcggaagtgaatggcactgg

SEQ ID NO: 5148302 - DNA, 25 bp, Homo sapien
gagtgtagctgtcacttcggaagtg

SEQ ID NO: 5148303 - DNA, 25 bp, Homo sapien
atgctggctccccttatccctcgga

SEQ ID NO: 5148304 - DNA, 25 bp, Homo sapien
cctcggaaggcagcctgacaatagg

SEQ ID NO: 5148305 - DNA, 25 bp, Homo sapien
aggacctggagtcgccggtgctccc

SEQ ID NO: 5148306 - DNA, 25 bp, Homo sapien
ggggctgactctgcgaccccttctg

SEQ ID NO: 5148307 - DNA, 25 bp, Homo sapien
caatgcagaggccacggagtttcta

SEQ ID NO: 5148308 - DNA, 25 bp, Homo sapien
acgctgagatccagaagtctcatcc

SEQ ID NO: 5148309 - DNA, 25 bp, Homo sapien
gcagaggccacggagtttctacagg

SEQ ID NO: 5148310 - DNA, 25 bp, Homo sapien
gaggccacggagtttctacaggaga

SEQ ID NO: 5148311 - DNA, 25 bp, Homo sapien
ttctgatgtagtttatggggtgtgc

SEQ ID NO: 5148312 - DNA, 25 bp, Homo sapien
tctgggcatggacggctggaaaaaa

SEQ ID NO: 5148313 - DNA, 25 bp, Homo sapien
tcttctgaactaatgccatcactga

SEQ ID NO: 5148314 - DNA, 25 bp, Homo sapien
tagtttatggggtgtgcgcttgttt

SEQ ID NO: 5148315 - DNA, 25 bp, Homo sapien
ctctgcccatgaggccggtggaagc

SEQ ID NO: 5148316 - DNA, 25 bp, Homo sapien
catgaggccggtggaagctggacat

SEQ ID NO: 5148317 - DNA, 25 bp, Homo sapien
gcttcctctgcccatgaggccggtg

SEQ ID NO: 5148318 - DNA, 25 bp, Homo sapien
tcctctgcccatgaggccggtggaa

SEQ ID NO: 5148319 - DNA, 25 bp, Homo sapien
agtggtctgtggatggttttggggg

SEQ ID NO: 5148320 - DNA, 25 bp, Homo sapien
cagtggtctgtggatggttttgggg

SEQ ID NO: 5148321 - DNA, 25 bp, Homo sapien
aagagctccagggagatcctcgtgc

SEQ ID NO: 5148322 - DNA, 25 bp, Homo sapien
aggtgctgccgtatgaaggctctga

SEQ ID NO: 5148323 - DNA, 25 bp, Homo sapien
ccagggagatcctcgtgctgcaggt

SEQ ID NO: 5148324 - DNA, 25 bp, Homo sapien
tgcaggtgggttaggtgctgccgta

SEQ ID NO: 5148325 - DNA, 25 bp, Homo sapien
ggcacaacgccttcttttctgaaag

SEQ ID NO: 5148326 - DNA, 25 bp, Homo sapien
tgctctggtcatcaacaaggctaca

SEQ ID NO: 5148327 - DNA, 25 bp, Homo sapien
tgaaagcagatgtcttaatgtggtt

SEQ ID NO: 5148328 - DNA, 25 bp, Homo sapien
agatgccgccttgcctgctctggtc

SEQ ID NO: 5148329 - DNA, 25 bp, Homo sapien
gccagaagcatagccgcaataaact

SEQ ID NO: 5148330 - DNA, 25 bp, Homo sapien
agcatagccgcaataaacttgtttt

SEQ ID NO: 5148331 - DNA, 25 bp, Homo sapien
aactcagtttgctgagtggaaggca

SEQ ID NO: 5148332 - DNA, 25 bp, Homo sapien
tcagtttgctgagtggaaggcacag

SEQ ID NO: 5148333 - DNA, 25 bp, Homo sapien
gccttgaccagtcaccgagaacata

SEQ ID NO: 5148334 - DNA, 25 bp, Homo sapien
tggaaacttcccgagcaataacagg

SEQ ID NO: 5148335 - DNA, 25 bp, Homo sapien
tctccaagtcctgaaatagcccagc

SEQ ID NO: 5148336 - DNA, 25 bp, Homo sapien
cgagcaataacaggccgaggaggtt

SEQ ID NO: 5148337 - DNA, 25 bp, Homo sapien
tacagcactcaaaacgatggtgaag

SEQ ID NO: 5148338 - DNA, 25 bp, Homo sapien
ctgggcatcaggattattaccattt

SEQ ID NO: 5148339 - DNA, 25 bp, Homo sapien
ggattattaccatttacagcactca

SEQ ID NO: 5148340 - DNA, 25 bp, Homo sapien
cactcaaaacgatggtgaagagcaa

SEQ ID NO: 5148341 - DNA, 25 bp, Homo sapien
gcatcgtgttgctctcttgctgtta

SEQ ID NO: 5148342 - DNA, 25 bp, Homo sapien
tatcagtggtgaagcagttgttccc

SEQ ID NO: 5148343 - DNA, 25 bp, Homo sapien
tagcttgtttttggtggaagacgtg

SEQ ID NO: 5148344 - DNA, 25 bp, Homo sapien
acgtgaccgccgcatcgtgttgctc

SEQ ID NO: 5148345 - DNA, 25 bp, Homo sapien
cttcttccctcggtgtaaattattg

SEQ ID NO: 5148346 - DNA, 25 bp, Homo sapien
tctcttcttccctcggtgtaaatta

SEQ ID NO: 5148347 - DNA, 25 bp, Homo sapien
tctgctgggtcgtgctttctcttct

SEQ ID NO: 5148348 - DNA, 25 bp, Homo sapien
acacagacaatctccatctgctggg

SEQ ID NO: 5148349 - DNA, 25 bp, Homo sapien
gtgggtacgagaccaccacgcggta

SEQ ID NO: 5148350 - DNA, 25 bp, Homo sapien
tcagaagctctcgacgaagctgccc

SEQ ID NO: 5148351 - DNA, 25 bp, Homo sapien
caaagacgatgtcgccttccttcag

SEQ ID NO: 5148352 - DNA, 25 bp, Homo sapien
tcacgcttcttgtgcacaaagacga

SEQ ID NO: 5148353 - DNA, 25 bp, Homo sapien
taatcatcaccgtctagacagagcg

SEQ ID NO: 5148354 - DNA, 25 bp, Homo sapien
gaactctgaaaataagcggcccgtg

SEQ ID NO: 5148355 - DNA, 25 bp, Homo sapien
catgcctgggagagtaagaacgttc

SEQ ID NO: 5148356 - DNA, 25 bp, Homo sapien
taaagaaaccggctgcttccaagct

SEQ ID NO: 5148357 - DNA, 25 bp, Homo sapien
gcagctcccagcataggcctggcca

SEQ ID NO: 5148358 - DNA, 25 bp, Homo sapien
tccaggaaggcctgaatacatgagg

SEQ ID NO: 5148359 - DNA, 25 bp, Homo sapien
catgaggtgggtcctcttgcctgga

SEQ ID NO: 5148360 - DNA, 25 bp, Homo sapien
tcttgcctggattcatctccgtgac

SEQ ID NO: 5148361 - DNA, 25 bp, Homo sapien
atctccgtgaccctggtgctgggcc

SEQ ID NO: 5148362 - DNA, 25 bp, Homo sapien
tcaaaggaccctcggggctgtctgc

SEQ ID NO: 5148363 - DNA, 25 bp, Homo sapien
tcggcctccacatcggactgacttg

SEQ ID NO: 5148364 - DNA, 25 bp, Homo sapien
tggcagagacgccttgccctttgcc

SEQ ID NO: 5148365 - DNA, 25 bp, Homo sapien
ccttggcagagacgccttgcccttt

SEQ ID NO: 5148366 - DNA, 25 bp, Homo sapien
atcttcagcacccacgaggaggcca

SEQ ID NO: 5148367 - DNA, 25 bp, Homo sapien
ttgccatcttcagcacccacgagga

SEQ ID NO: 5148368 - DNA, 25 bp, Homo sapien
ttcagcacccacgaggaggccaggg

SEQ ID NO: 5148369 - DNA, 25 bp, Homo sapien
gccatcttcagcacccacgaggagg

SEQ ID NO: 5148370 - DNA, 25 bp, Homo sapien
agcacatcaggtggtttgctgggca

SEQ ID NO: 5148371 - DNA, 25 bp, Homo sapien
aggccacagtgagaggtgaaatcag

SEQ ID NO: 5148372 - DNA, 25 bp, Homo sapien
gaggtgaaatcagctgcagcacatc

SEQ ID NO: 5148373 - DNA, 25 bp, Homo sapien
ctgcagcacatcaggtggtttgctg

SEQ ID NO: 5148374 - DNA, 25 bp, Homo sapien
tggacctgaagaactggaggtgaat

SEQ ID NO: 5148375 - DNA, 25 bp, Homo sapien
cctgaagaactggaggtgaatagca

SEQ ID NO: 5148376 - DNA, 25 bp, Homo sapien
gaggtgaatagcaggcggctgctcc

SEQ ID NO: 5148377 - DNA, 25 bp, Homo sapien
agtcatggtggacctgaagaactgg

SEQ ID NO: 5148378 - DNA, 25 bp, Homo sapien
ttctaggatttgctcatcggccacc

SEQ ID NO: 5148379 - DNA, 25 bp, Homo sapien
tgctgaagttagaatgtggctgtgg

SEQ ID NO: 5148380 - DNA, 25 bp, Homo sapien
tcccctggggtagctgaagtgcttt

SEQ ID NO: 5148381 - DNA, 25 bp, Homo sapien
gggcttggtttgctggtgataccca

SEQ ID NO: 5148382 - DNA, 25 bp, Homo sapien
gaccagaaggcccccaggcccagga

SEQ ID NO: 5148383 - DNA, 25 bp, Homo sapien
aggcccaggaggctgcctgggctcc

SEQ ID NO: 5148384 - DNA, 25 bp, Homo sapien
gcccaggaggctgcctgggctccac

SEQ ID NO: 5148385 - DNA, 25 bp, Homo sapien
ccaggcccaggaggctgcctgggct

SEQ ID NO: 5148386 - DNA, 25 bp, Homo sapien
ctgctcgggcccatgtgttgtagag

SEQ ID NO: 5148387 - DNA, 25 bp, Homo sapien
gcccatgtgttgtagagtgccagga

SEQ ID NO: 5148388 - DNA, 25 bp, Homo sapien
tccaggactcataggctgctcccat

SEQ ID NO: 5148389 - DNA, 25 bp, Homo sapien
ggctccaggactcataggctgctcc

SEQ ID NO: 5148390 - DNA, 25 bp, Homo sapien
cacagccgccttgcctgtgccctgc

SEQ ID NO: 5148391 - DNA, 25 bp, Homo sapien
taatgaaagcctcccttgcgttggg

SEQ ID NO: 5148392 - DNA, 25 bp, Homo sapien
agtggcggccctcacagccgccttg

SEQ ID NO: 5148393 - DNA, 25 bp, Homo sapien
gctggagtgggaccagcacgccctc

SEQ ID NO: 5148394 - DNA, 25 bp, Homo sapien
gaatgaccaatgaacctgtcaggct

SEQ ID NO: 5148395 - DNA, 25 bp, Homo sapien
acatgaatgaccaatgaacctgtca

SEQ ID NO: 5148396 - DNA, 25 bp, Homo sapien
gccttccttgctgcggtggttcggc

SEQ ID NO: 5148397 - DNA, 25 bp, Homo sapien
gctttattgagcatggaccaagtcc

SEQ ID NO: 5148398 - DNA, 25 bp, Homo sapien
ctgcggtgtttggactctgttcact

SEQ ID NO: 5148399 - DNA, 25 bp, Homo sapien
cggtgtttggactctgttcactcac

SEQ ID NO: 5148400 - DNA, 25 bp, Homo sapien
gcggtgtttggactctgttcactca

SEQ ID NO: 5148401 - DNA, 25 bp, Homo sapien
tgcggtgtttggactctgttcactc

SEQ ID NO: 5148402 - DNA, 25 bp, Homo sapien
ttgttttcatccacgtctgctcctc

SEQ ID NO: 5148403 - DNA, 25 bp, Homo sapien
cacttgttttcatccacgtctgctc

SEQ ID NO: 5148404 - DNA, 25 bp, Homo sapien
aaatgggactcgagctcccatcggg

SEQ ID NO: 5148405 - DNA, 25 bp, Homo sapien
aagttctcaaatgggactcgagctc

SEQ ID NO: 5148406 - DNA, 25 bp, Homo sapien
ctgcacaccaggtaagcgagttgca

SEQ ID NO: 5148407 - DNA, 25 bp, Homo sapien
accaggtaagcgagttgcagctcgt

SEQ ID NO: 5148408 - DNA, 25 bp, Homo sapien
agttgcagctcgtatctgcagggcc

SEQ ID NO: 5148409 - DNA, 25 bp, Homo sapien
taagcgagttgcagctcgtatctgc

SEQ ID NO: 5148410 - DNA, 25 bp, Homo sapien
gccgttgtggagtgacagctgtccc

SEQ ID NO: 5148411 - DNA, 25 bp, Homo sapien
tgtcccatgtaagtcgtggctgtcc

SEQ ID NO: 5148412 - DNA, 25 bp, Homo sapien
ctcgggtgggtctgggagcccggct

SEQ ID NO: 5148413 - DNA, 25 bp, Homo sapien
taaacattgcgaagtaaaacgctgc

SEQ ID NO: 5148414 - DNA, 25 bp, Homo sapien
gcctctccgccacatgatatgcaaa

SEQ ID NO: 5148415 - DNA, 25 bp, Homo sapien
atgcaaaaactgtgacatagtggtc

SEQ ID NO: 5148416 - DNA, 25 bp, Homo sapien
cagcctctccgccacatgatatgca

SEQ ID NO: 5148417 - DNA, 25 bp, Homo sapien
ctgcagcctctccgccacatgatat

SEQ ID NO: 5148418 - DNA, 25 bp, Homo sapien
ggtgcctggatggagccgcagccat

SEQ ID NO: 5148419 - DNA, 25 bp, Homo sapien
caccgggtgcctggatggagccgca

SEQ ID NO: 5148420 - DNA, 25 bp, Homo sapien
cctgcagccaccgggtgcctggatg

SEQ ID NO: 5148421 - DNA, 25 bp, Homo sapien
tgcagccaccgggtgcctggatgga

SEQ ID NO: 5148422 - DNA, 25 bp, Homo sapien
cttgtcttgagggtcggctctccct

SEQ ID NO: 5148423 - DNA, 25 bp, Homo sapien
cccgagaagctccttgtcttgaggg

SEQ ID NO: 5148424 - DNA, 25 bp, Homo sapien
tgtcttgagggtcggctctcccttc

SEQ ID NO: 5148425 - DNA, 25 bp, Homo sapien
ccttgtcttgagggtcggctctccc

SEQ ID NO: 5148426 - DNA, 25 bp, Homo sapien
gattagggccacgatgcatatccaa

SEQ ID NO: 5148427 - DNA, 25 bp, Homo sapien
gaagtatttgacgtgacagagccct

SEQ ID NO: 5148428 - DNA, 25 bp, Homo sapien
cagagccctgtggtatgccactgga

SEQ ID NO: 5148429 - DNA, 25 bp, Homo sapien
gaagcaattctagcccctgagtccc

SEQ ID NO: 5148430 - DNA, 25 bp, Homo sapien
atagcctccatcttcctcatctggg

SEQ ID NO: 5148431 - DNA, 25 bp, Homo sapien
agcctccatcttcctcatctgggtt

SEQ ID NO: 5148432 - DNA, 25 bp, Homo sapien
taatagcctccatcttcctcatctg

SEQ ID NO: 5148433 - DNA, 25 bp, Homo sapien
ctaatagcctccatcttcctcatct

SEQ ID NO: 5148434 - DNA, 25 bp, Homo sapien
tcagaagtttcttcgcaagatcagt

SEQ ID NO: 5148435 - DNA, 25 bp, Homo sapien
caagatcagtgacacccaggttctg

SEQ ID NO: 5148436 - DNA, 25 bp, Homo sapien
tatacatgtcatagaacaagctcag

SEQ ID NO: 5148437 - DNA, 25 bp, Homo sapien
ccaggttctggtaggcagggagtcc

SEQ ID NO: 5148438 - DNA, 25 bp, Homo sapien
taccaaagagcgaagtcagtgccac

SEQ ID NO: 5148439 - DNA, 25 bp, Homo sapien
attatgtaattagagtcgggtcccg

SEQ ID NO: 5148440 - DNA, 25 bp, Homo sapien
tcgggtcccgttgtgtatatgcaga

SEQ ID NO: 5148441 - DNA, 25 bp, Homo sapien
gctaccaagctattgtcactgcagt

SEQ ID NO: 5148442 - DNA, 25 bp, Homo sapien
cacaaagatcaggttcggctgtaat

SEQ ID NO: 5148443 - DNA, 25 bp, Homo sapien
ggtacctgttacatatatgaggctg

SEQ ID NO: 5148444 - DNA, 25 bp, Homo sapien
tatgaggctgaacatgagatgtaca

SEQ ID NO: 5148445 - DNA, 25 bp, Homo sapien
cagtgactctagtactccatatcag

SEQ ID NO: 5148446 - DNA, 25 bp, Homo sapien
tgtgtgcaagtatattactgtatat

SEQ ID NO: 5148447 - DNA, 25 bp, Homo sapien
tgtgcaagtatattactgtatatgt

SEQ ID NO: 5148448 - DNA, 25 bp, Homo sapien
caagtatattactgtatatgttgaa

SEQ ID NO: 5148449 - DNA, 25 bp, Homo sapien
tttgtgtgcaagtatattactgtat

SEQ ID NO: 5148450 - DNA, 25 bp, Homo sapien
gtttggcagtcaaatcagacctgtg

SEQ ID NO: 5148451 - DNA, 25 bp, Homo sapien
ttgaggcagtagaaggaacaccagt

SEQ ID NO: 5148452 - DNA, 25 bp, Homo sapien
ccatttggtttacaacttgaggcag

SEQ ID NO: 5148453 - DNA, 25 bp, Homo sapien
cacgctgcagtggaacatacctgat

SEQ ID NO: 5148454 - DNA, 25 bp, Homo sapien
tgggtggtcaacaatagagcaggcc

SEQ ID NO: 5148455 - DNA, 25 bp, Homo sapien
ttactactgttgagactgcggagcc

SEQ ID NO: 5148456 - DNA, 25 bp, Homo sapien
tgtttgccattagagggattcagcc

SEQ ID NO: 5148457 - DNA, 25 bp, Homo sapien
cgttgaaacgagattgtggtcacct

SEQ ID NO: 5148458 - DNA, 25 bp, Homo sapien
ggcagttcttaatgatgcagcattt

SEQ ID NO: 5148459 - DNA, 25 bp, Homo sapien
gcagttcttaatgatgcagcatttt

SEQ ID NO: 5148460 - DNA, 25 bp, Homo sapien
tataacggagttgaaggcgcagtgc

SEQ ID NO: 5148461 - DNA, 25 bp, Homo sapien
cttttgcagccgtgagcacttccga

SEQ ID NO: 5148462 - DNA, 25 bp, Homo sapien
gctataacggagttgaaggcgcagt

SEQ ID NO: 5148463 - DNA, 25 bp, Homo sapien
gcggactgattgaatagcggtcatc

SEQ ID NO: 5148464 - DNA, 25 bp, Homo sapien
tgcccgcgaccatggcctcctccga

SEQ ID NO: 5148465 - DNA, 25 bp, Homo sapien
cccctgcccgcgaccatggcctcct

SEQ ID NO: 5148466 - DNA, 25 bp, Homo sapien
tcctccgaggtggcgcggcacctgg

SEQ ID NO: 5148467 - DNA, 25 bp, Homo sapien
tggcgcggcacctggtgagtcccgc

SEQ ID NO: 5148468 - DNA, 25 bp, Homo sapien
gggccgcaatcactgctccgcagtt

SEQ ID NO: 5148469 - DNA, 25 bp, Homo sapien
tcctcaggcgtcgagggtagctcct

SEQ ID NO: 5148470 - DNA, 25 bp, Homo sapien
attcctcgcgccgtcttcctggagt

SEQ ID NO: 5148471 - DNA, 25 bp, Homo sapien
gctcgcttggcgcaggcaaaacgct

SEQ ID NO: 5148472 - DNA, 25 bp, Homo sapien
ggctcagcgcggtcccatagcgacg

SEQ ID NO: 5148473 - DNA, 25 bp, Homo sapien
agcgggctgccagcctacgcgtctg

SEQ ID NO: 5148474 - DNA, 25 bp, Homo sapien
tgaggccagaggactcggccaccgc

SEQ ID NO: 5148475 - DNA, 25 bp, Homo sapien
agcgcggtcccatagcgacgggctc

SEQ ID NO: 5148476 - DNA, 25 bp, Homo sapien
ccagcgccgcctcggggccccactc

SEQ ID NO: 5148477 - DNA, 25 bp, Homo sapien
gggccccactctgccggcccctcca

SEQ ID NO: 5148478 - DNA, 25 bp, Homo sapien
gcctcggggccccactctgccggcc

SEQ ID NO: 5148479 - DNA, 25 bp, Homo sapien
ctcggggcccagcgccgcctcgggg

SEQ ID NO: 5148480 - DNA, 25 bp, Homo sapien
tccgactcaggtactgggaggcctt

SEQ ID NO: 5148481 - DNA, 25 bp, Homo sapien
tgatgagatgcgagggaagcacctt

SEQ ID NO: 5148482 - DNA, 25 bp, Homo sapien
caagtgaagccggtaatgaagtccc

SEQ ID NO: 5148483 - DNA, 25 bp, Homo sapien
tcttgaggtgcacgtacttggcgcc

SEQ ID NO: 5148484 - DNA, 25 bp, Homo sapien
tagagctgcccgaggctttgcgccc

SEQ ID NO: 5148485 - DNA, 25 bp, Homo sapien
tctcaatgtgaagggcgagtggcct

SEQ ID NO: 5148486 - DNA, 25 bp, Homo sapien
ctttgcgccctggatccttggcttt

SEQ ID NO: 5148487 - DNA, 25 bp, Homo sapien
ggttttatacgtccactagagctgc

SEQ ID NO: 5148488 - DNA, 25 bp, Homo sapien
tccgatccctcaagtaagaatgcat

SEQ ID NO: 5148489 - DNA, 25 bp, Homo sapien
tagtctccagaaacggactccaggg

SEQ ID NO: 5148490 - DNA, 25 bp, Homo sapien
cagagaagaggtacaggtcaaggta

SEQ ID NO: 5148491 - DNA, 25 bp, Homo sapien
gcattattccttactttgcaggcat

SEQ ID NO: 5148492 - DNA, 25 bp, Homo sapien
taaagccttcagtgggaaaaccatg

SEQ ID NO: 5148493 - DNA, 25 bp, Homo sapien
tacttaggtttcagcaactacgcga

SEQ ID NO: 5148494 - DNA, 25 bp, Homo sapien
tacttcacagaaacatgggctcatg

SEQ ID NO: 5148495 - DNA, 25 bp, Homo sapien
tagactccaagattgcaggcgtgaa

SEQ ID NO: 5148496 - DNA, 25 bp, Homo sapien
tggagttcttttaggagattgattt

SEQ ID NO: 5148497 - DNA, 25 bp, Homo sapien
tttaggagattgattttggcttcca

SEQ ID NO: 5148498 - DNA, 25 bp, Homo sapien
ttcttttaggagattgattttggct

SEQ ID NO: 5148499 - DNA, 25 bp, Homo sapien
ttttggagttcttttaggagattga

SEQ ID NO: 5148500 - DNA, 25 bp, Homo sapien
cagatatctagactattcattacct

SEQ ID NO: 5148501 - DNA, 25 bp, Homo sapien
tcagatatctagactattcattacc

SEQ ID NO: 5148502 - DNA, 25 bp, Homo sapien
gatatctagactattcattacctcc

SEQ ID NO: 5148503 - DNA, 25 bp, Homo sapien
agatatctagactattcattacctc

SEQ ID NO: 5148504 - DNA, 25 bp, Homo sapien
cctggagcatctctgcatgatggag

SEQ ID NO: 5148505 - DNA, 25 bp, Homo sapien
tccatgagatgggccacaggagcag

SEQ ID NO: 5148506 - DNA, 25 bp, Homo sapien
tcaggatcctcccagaagatgtcca

SEQ ID NO: 5148507 - DNA, 25 bp, Homo sapien
tagtagcctggagcatctctgcatg

SEQ ID NO: 5148508 - DNA, 25 bp, Homo sapien
gcacaatccagttttctgacttctg

SEQ ID NO: 5148509 - DNA, 25 bp, Homo sapien
acttcatctgcacaatccagttttc

SEQ ID NO: 5148510 - DNA, 25 bp, Homo sapien
caatccagttttctgacttctgctc

SEQ ID NO: 5148511 - DNA, 25 bp, Homo sapien
tcacttcatctgcacaatccagttt

SEQ ID NO: 5148512 - DNA, 25 bp, Homo sapien
caaagctgctcagttagcactgcag

SEQ ID NO: 5148513 - DNA, 25 bp, Homo sapien
tgggaactcgcaggagcaaaccaac

SEQ ID NO: 5148514 - DNA, 25 bp, Homo sapien
ttaggatcccgctggcttgtgaatc

SEQ ID NO: 5148515 - DNA, 25 bp, Homo sapien
cttgtgaatcctggcatagttgctg

SEQ ID NO: 5148516 - DNA, 25 bp, Homo sapien
caattcccaggactttgctagctca

SEQ ID NO: 5148517 - DNA, 25 bp, Homo sapien
tctagaacgcgaaacatctctgtgt

SEQ ID NO: 5148518 - DNA, 25 bp, Homo sapien
ggagccttaccaggttgactgtgca

SEQ ID NO: 5148519 - DNA, 25 bp, Homo sapien
cttattgaagacgagcccaggagcc

SEQ ID NO: 5148520 - DNA, 25 bp, Homo sapien
attgccttgcaaggaaattcctgtt

SEQ ID NO: 5148521 - DNA, 25 bp, Homo sapien
ttgccttgcaaggaaattcctgttt

SEQ ID NO: 5148522 - DNA, 25 bp, Homo sapien
tcaaggccagtcacctatcgactgt

SEQ ID NO: 5148523 - DNA, 25 bp, Homo sapien
gggaacggagacacatagttcatgg

SEQ ID NO: 5148524 - DNA, 25 bp, Homo sapien
ccagttccaaagaactgtggttgaa

SEQ ID NO: 5148525 - DNA, 25 bp, Homo sapien
cagtcacctatcgactgtgttctga

SEQ ID NO: 5148526 - DNA, 25 bp, Homo sapien
tctgcttcttcatcagctcatccat

SEQ ID NO: 5148527 - DNA, 25 bp, Homo sapien
ctctgcttcttcatcagctcatcca

SEQ ID NO: 5148528 - DNA, 25 bp, Homo sapien
ggtccacgaactcaccagcatcatt

SEQ ID NO: 5148529 - DNA, 25 bp, Homo sapien
aggtccacgaactcaccagcatcat

SEQ ID NO: 5148530 - DNA, 25 bp, Homo sapien
atcggaccatttccacggcacgtac

SEQ ID NO: 5148531 - DNA, 25 bp, Homo sapien
gctatcggaccatttccacggcacg

SEQ ID NO: 5148532 - DNA, 25 bp, Homo sapien
tatcggaccatttccacggcacgta

SEQ ID NO: 5148533 - DNA, 25 bp, Homo sapien
tgctatcggaccatttccacggcac

SEQ ID NO: 5148534 - DNA, 25 bp, Homo sapien
aaaatgtttcttatgcctcaggatt

SEQ ID NO: 5148535 - DNA, 25 bp, Homo sapien
taaatggcaaggctttctgcaaggc

SEQ ID NO: 5148536 - DNA, 25 bp, Homo sapien
cttgcctgcgtttgcttgggtcttg

SEQ ID NO: 5148537 - DNA, 25 bp, Homo sapien
gtcttgggcttgttcttaaatggca

SEQ ID NO: 5148538 - DNA, 25 bp, Homo sapien
tttcatgaggcttgcttatgatggt

SEQ ID NO: 5148539 - DNA, 25 bp, Homo sapien
ttatgatggttggtctctgcctgtc

SEQ ID NO: 5148540 - DNA, 25 bp, Homo sapien
ttgcttatgatggttggtctctgcc

SEQ ID NO: 5148541 - DNA, 25 bp, Homo sapien
cctttcatgaggcttgcttatgatg

SEQ ID NO: 5148542 - DNA, 25 bp, Homo sapien
aaatggcagtcaattggccacagga

SEQ ID NO: 5148543 - DNA, 25 bp, Homo sapien
atgcaaagtgtgctgccaagagtgt

SEQ ID NO: 5148544 - DNA, 25 bp, Homo sapien
gccaagagtgttattttcctctcta

SEQ ID NO: 5148545 - DNA, 25 bp, Homo sapien
aatggcagtcaattggccacaggac

SEQ ID NO: 5148546 - DNA, 25 bp, Homo sapien
gtcctttctggcaacaggcagcaac

SEQ ID NO: 5148547 - DNA, 25 bp, Homo sapien
ggtacctgttacatatatgaggctg

SEQ ID NO: 5148548 - DNA, 25 bp, Homo sapien
cacaaagatcaggttcggctgtaat

SEQ ID NO: 5148549 - DNA, 25 bp, Homo sapien
cagtgactctagtactccatatcag

SEQ ID NO: 5148550 - DNA, 25 bp, Homo sapien
tatgaggctgaacatgagatgtaca

SEQ ID NO: 5148551 - DNA, 25 bp, Homo sapien
tccaagaagaactgaagattaagcg

SEQ ID NO: 5148552 - DNA, 25 bp, Homo sapien
caatagttgactacatagatgctca

SEQ ID NO: 5148553 - DNA, 25 bp, Homo sapien
tctctacttcatttcaccgacaggc

SEQ ID NO: 5148554 - DNA, 25 bp, Homo sapien
gattctcgcatccatgtgtgtctct

SEQ ID NO: 5148555 - DNA, 25 bp, Homo sapien
aatacagtgggatttggtgaccaaa

SEQ ID NO: 5148556 - DNA, 25 bp, Homo sapien
atacagtgggatttggtgaccaaat

SEQ ID NO: 5148557 - DNA, 25 bp, Homo sapien
tacagtgggatttggtgaccaaata

SEQ ID NO: 5148558 - DNA, 25 bp, Homo sapien
tgtgtgcaagtatattactgtatat

SEQ ID NO: 5148559 - DNA, 25 bp, Homo sapien
tgtgcaagtatattactgtatatgt

SEQ ID NO: 5148560 - DNA, 25 bp, Homo sapien
caagtatattactgtatatgttgaa

SEQ ID NO: 5148561 - DNA, 25 bp, Homo sapien
tttgtgtgcaagtatattactgtat

SEQ ID NO: 5148562 - DNA, 25 bp, Homo sapien
ccatttggtttacaacttgaggcag

SEQ ID NO: 5148563 - DNA, 25 bp, Homo sapien
gtttggcagtcaaatcagacctgtg

SEQ ID NO: 5148564 - DNA, 25 bp, Homo sapien
ttgaggcagtagaaggaacaccagt

SEQ ID NO: 5148565 - DNA, 25 bp, Homo sapien
cacgctgcagtggaacatacctgat

SEQ ID NO: 5148566 - DNA, 25 bp, Homo sapien
tgtttgccattagagggattcagcc

SEQ ID NO: 5148567 - DNA, 25 bp, Homo sapien
tgggtggtcaacaatagagcaggcc

SEQ ID NO: 5148568 - DNA, 25 bp, Homo sapien
cgttgaaacgagattgtggtcacct

SEQ ID NO: 5148569 - DNA, 25 bp, Homo sapien
ttactactgttgagactgcggagcc

SEQ ID NO: 5148570 - DNA, 25 bp, Homo sapien
ggcagttcttaatgatgcagcattt

SEQ ID NO: 5148571 - DNA, 25 bp, Homo sapien
gcagttcttaatgatgcagcatttt

SEQ ID NO: 5148572 - DNA, 25 bp, Homo sapien
tataacggagttgaaggcgcagtgc

SEQ ID NO: 5148573 - DNA, 25 bp, Homo sapien
cttttgcagccgtgagcacttccga

SEQ ID NO: 5148574 - DNA, 25 bp, Homo sapien
gctataacggagttgaaggcgcagt

SEQ ID NO: 5148575 - DNA, 25 bp, Homo sapien
gcggactgattgaatagcggtcatc

SEQ ID NO: 5148576 - DNA, 25 bp, Homo sapien
tggcgcggcacctggtgagtcccgc

SEQ ID NO: 5148577 - DNA, 25 bp, Homo sapien
tgcccgcgaccatggcctcctccga

SEQ ID NO: 5148578 - DNA, 25 bp, Homo sapien
cccctgcccgcgaccatggcctcct

SEQ ID NO: 5148579 - DNA, 25 bp, Homo sapien
tcctccgaggtggcgcggcacctgg

SEQ ID NO: 5148580 - DNA, 25 bp, Homo sapien
attcctcgcgccgtcttcctggagt

SEQ ID NO: 5148581 - DNA, 25 bp, Homo sapien
gggccgcaatcactgctccgcagtt

SEQ ID NO: 5148582 - DNA, 25 bp, Homo sapien
tcctcaggcgtcgagggtagctcct

SEQ ID NO: 5148583 - DNA, 25 bp, Homo sapien
gctcgcttggcgcaggcaaaacgct

SEQ ID NO: 5148584 - DNA, 25 bp, Homo sapien
agcgcggtcccatagcgacgggctc

SEQ ID NO: 5148585 - DNA, 25 bp, Homo sapien
tgaggccagaggactcggccaccgc

SEQ ID NO: 5148586 - DNA, 25 bp, Homo sapien
ggctcagcgcggtcccatagcgacg

SEQ ID NO: 5148587 - DNA, 25 bp, Homo sapien
agcgggctgccagcctacgcgtctg

SEQ ID NO: 5148588 - DNA, 25 bp, Homo sapien
ctcggggcccagcgccgcctcgggg

SEQ ID NO: 5148589 - DNA, 25 bp, Homo sapien
ccagcgccgcctcggggccccactc

SEQ ID NO: 5148590 - DNA, 25 bp, Homo sapien
gcctcggggccccactctgccggcc

SEQ ID NO: 5148591 - DNA, 25 bp, Homo sapien
gggccccactctgccggcccctcca

SEQ ID NO: 5148592 - DNA, 25 bp, Homo sapien
tcttgaggtgcacgtacttggcgcc

SEQ ID NO: 5148593 - DNA, 25 bp, Homo sapien
tgatgagatgcgagggaagcacctt

SEQ ID NO: 5148594 - DNA, 25 bp, Homo sapien
caagtgaagccggtaatgaagtccc

SEQ ID NO: 5148595 - DNA, 25 bp, Homo sapien
tccgactcaggtactgggaggcctt

SEQ ID NO: 5148596 - DNA, 25 bp, Homo sapien
tagagctgcccgaggctttgcgccc

SEQ ID NO: 5148597 - DNA, 25 bp, Homo sapien
ggttttatacgtccactagagctgc

SEQ ID NO: 5148598 - DNA, 25 bp, Homo sapien
ctttgcgccctggatccttggcttt

SEQ ID NO: 5148599 - DNA, 25 bp, Homo sapien
tctcaatgtgaagggcgagtggcct

SEQ ID NO: 5148600 - DNA, 25 bp, Homo sapien
gcattattccttactttgcaggcat

SEQ ID NO: 5148601 - DNA, 25 bp, Homo sapien
cagagaagaggtacaggtcaaggta

SEQ ID NO: 5148602 - DNA, 25 bp, Homo sapien
tccgatccctcaagtaagaatgcat

SEQ ID NO: 5148603 - DNA, 25 bp, Homo sapien
tagtctccagaaacggactccaggg

SEQ ID NO: 5148604 - DNA, 25 bp, Homo sapien
tacttaggtttcagcaactacgcga

SEQ ID NO: 5148605 - DNA, 25 bp, Homo sapien
tacttcacagaaacatgggctcatg

SEQ ID NO: 5148606 - DNA, 25 bp, Homo sapien
tagactccaagattgcaggcgtgaa

SEQ ID NO: 5148607 - DNA, 25 bp, Homo sapien
taaagccttcagtgggaaaaccatg

SEQ ID NO: 5148608 - DNA, 25 bp, Homo sapien
ttttggagttcttttaggagattga

SEQ ID NO: 5148609 - DNA, 25 bp, Homo sapien
tggagttcttttaggagattgattt

SEQ ID NO: 5148610 - DNA, 25 bp, Homo sapien
tttaggagattgattttggcttcca

SEQ ID NO: 5148611 - DNA, 25 bp, Homo sapien
ttcttttaggagattgattttggct

SEQ ID NO: 5148612 - DNA, 25 bp, Homo sapien
cagatatctagactattcattacct

SEQ ID NO: 5148613 - DNA, 25 bp, Homo sapien
gatatctagactattcattacctcc

SEQ ID NO: 5148614 - DNA, 25 bp, Homo sapien
tcagatatctagactattcattacc

SEQ ID NO: 5148615 - DNA, 25 bp, Homo sapien
agatatctagactattcattacctc

SEQ ID NO: 5148616 - DNA, 25 bp, Homo sapien
cctggagcatctctgcatgatggag

SEQ ID NO: 5148617 - DNA, 25 bp, Homo sapien
tccatgagatgggccacaggagcag

SEQ ID NO: 5148618 - DNA, 25 bp, Homo sapien
tcaggatcctcccagaagatgtcca

SEQ ID NO: 5148619 - DNA, 25 bp, Homo sapien
tagtagcctggagcatctctgcatg

SEQ ID NO: 5148620 - DNA, 25 bp, Homo sapien
gcacaatccagttttctgacttctg

SEQ ID NO: 5148621 - DNA, 25 bp, Homo sapien
acttcatctgcacaatccagttttc

SEQ ID NO: 5148622 - DNA, 25 bp, Homo sapien
caatccagttttctgacttctgctc

SEQ ID NO: 5148623 - DNA, 25 bp, Homo sapien
tcacttcatctgcacaatccagttt

SEQ ID NO: 5148624 - DNA, 25 bp, Homo sapien
caaagctgctcagttagcactgcag

SEQ ID NO: 5148625 - DNA, 25 bp, Homo sapien
tgggaactcgcaggagcaaaccaac

SEQ ID NO: 5148626 - DNA, 25 bp, Homo sapien
ttaggatcccgctggcttgtgaatc

SEQ ID NO: 5148627 - DNA, 25 bp, Homo sapien
cttgtgaatcctggcatagttgctg

SEQ ID NO: 5148628 - DNA, 25 bp, Homo sapien
caattcccaggactttgctagctca

SEQ ID NO: 5148629 - DNA, 25 bp, Homo sapien
ggagccttaccaggttgactgtgca

SEQ ID NO: 5148630 - DNA, 25 bp, Homo sapien
cttattgaagacgagcccaggagcc

SEQ ID NO: 5148631 - DNA, 25 bp, Homo sapien
tctagaacgcgaaacatctctgtgt

SEQ ID NO: 5148632 - DNA, 25 bp, Homo sapien
ctctgcttcttcatcagctcatcca

SEQ ID NO: 5148633 - DNA, 25 bp, Homo sapien
tctgcttcttcatcagctcatccat

SEQ ID NO: 5148634 - DNA, 25 bp, Homo sapien
aggtccacgaactcaccagcatcat

SEQ ID NO: 5148635 - DNA, 25 bp, Homo sapien
ggtccacgaactcaccagcatcatt

SEQ ID NO: 5148636 - DNA, 25 bp, Homo sapien
gctatcggaccatttccacggcacg

SEQ ID NO: 5148637 - DNA, 25 bp, Homo sapien
tatcggaccatttccacggcacgta

SEQ ID NO: 5148638 - DNA, 25 bp, Homo sapien
tgctatcggaccatttccacggcac

SEQ ID NO: 5148639 - DNA, 25 bp, Homo sapien
atcggaccatttccacggcacgtac

SEQ ID NO: 5148640 - DNA, 25 bp, Homo sapien
taaatggcaaggctttctgcaaggc

SEQ ID NO: 5148641 - DNA, 25 bp, Homo sapien
aaaatgtttcttatgcctcaggatt

SEQ ID NO: 5148642 - DNA, 25 bp, Homo sapien
cttgcctgcgtttgcttgggtcttg

SEQ ID NO: 5148643 - DNA, 25 bp, Homo sapien
gtcttgggcttgttcttaaatggca

SEQ ID NO: 5148644 - DNA, 25 bp, Homo sapien
ttatgatggttggtctctgcctgtc

SEQ ID NO: 5148645 - DNA, 25 bp, Homo sapien
tttcatgaggcttgcttatgatggt

SEQ ID NO: 5148646 - DNA, 25 bp, Homo sapien
ttgcttatgatggttggtctctgcc

SEQ ID NO: 5148647 - DNA, 25 bp, Homo sapien
cctttcatgaggcttgcttatgatg

SEQ ID NO: 5148648 - DNA, 25 bp, Homo sapien
tgactgcacactgtactcagagcat

SEQ ID NO: 5148649 - DNA, 25 bp, Homo sapien
ctctgactgcacactgtactcagag

SEQ ID NO: 5148650 - DNA, 25 bp, Homo sapien
ctgactgcacactgtactcagagca

SEQ ID NO: 5148651 - DNA, 25 bp, Homo sapien
actgcacactgtactcagagcatcc

SEQ ID NO: 5148652 - DNA, 25 bp, Homo sapien
ttctggcttcttctttccctctgac

SEQ ID NO: 5148653 - DNA, 25 bp, Homo sapien
ggatttctggcttcttctttccctc

SEQ ID NO: 5148654 - DNA, 25 bp, Homo sapien
tcagactggatttctggcttcttct

SEQ ID NO: 5148655 - DNA, 25 bp, Homo sapien
gatttctggcttcttctttccctct

SEQ ID NO: 5148656 - DNA, 25 bp, Homo sapien
caggggccagtttcagcgaaggcac

SEQ ID NO: 5148657 - DNA, 25 bp, Homo sapien
cttttggcccaagctggccaggcac

SEQ ID NO: 5148658 - DNA, 25 bp, Homo sapien
gcccaagctggccaggcactggggc

SEQ ID NO: 5148659 - DNA, 25 bp, Homo sapien
tggcaggggccagtttcagcgaagg

SEQ ID NO: 5148660 - DNA, 25 bp, Homo sapien
aaagcaagggcttctcccagcgcat

SEQ ID NO: 5148661 - DNA, 25 bp, Homo sapien
gtggacgtggtagtcagcaaaaagc

SEQ ID NO: 5148662 - DNA, 25 bp, Homo sapien
tccagggtgtggacgtggtagtcag

SEQ ID NO: 5148663 - DNA, 25 bp, Homo sapien
aagggcttctcccagcgcatgggta

SEQ ID NO: 5148664 - DNA, 25 bp, Homo sapien
tctggcgacccatacagcttcagta

SEQ ID NO: 5148665 - DNA, 25 bp, Homo sapien
ggcgacccatacagcttcagtaaac

SEQ ID NO: 5148666 - DNA, 25 bp, Homo sapien
ctctggcgacccatacagcttcagt

SEQ ID NO: 5148667 - DNA, 25 bp, Homo sapien
tggcgacccatacagcttcagtaaa

SEQ ID NO: 5148668 - DNA, 25 bp, Homo sapien
acaccccaccgcctgcgaaccttct

SEQ ID NO: 5148669 - DNA, 25 bp, Homo sapien
cttccaagggctctacggccacata

SEQ ID NO: 5148670 - DNA, 25 bp, Homo sapien
gcctgcgaaccttctcccatgtgga

SEQ ID NO: 5148671 - DNA, 25 bp, Homo sapien
ttccaagggctctacggccacatag

SEQ ID NO: 5148672 - DNA, 25 bp, Homo sapien
tgccccctaggaccttgtgggccag

SEQ ID NO: 5148673 - DNA, 25 bp, Homo sapien
gctgccccctaggaccttgtgggcc

SEQ ID NO: 5148674 - DNA, 25 bp, Homo sapien
ctgccccctaggaccttgtgggcca

SEQ ID NO: 5148675 - DNA, 25 bp, Homo sapien
ggctgccccctaggaccttgtgggc

SEQ ID NO: 5148676 - DNA, 25 bp, Homo sapien
gatgcacctggaaggctctccaaag

SEQ ID NO: 5148677 - DNA, 25 bp, Homo sapien
gcacctggaaggctctccaaagcca

SEQ ID NO: 5148678 - DNA, 25 bp, Homo sapien
cacctggaaggctctccaaagccat

SEQ ID NO: 5148679 - DNA, 25 bp, Homo sapien
cagatgcacctggaaggctctccaa

SEQ ID NO: 5148680 - DNA, 25 bp, Homo sapien
ttctgctgatggtagttgaaggtag

SEQ ID NO: 5148681 - DNA, 25 bp, Homo sapien
ctgatggtagttgaaggtagaactc

SEQ ID NO: 5148682 - DNA, 25 bp, Homo sapien
gatggtagttgaaggtagaactcac

SEQ ID NO: 5148683 - DNA, 25 bp, Homo sapien
tgctgatggtagttgaaggtagaac

SEQ ID NO: 5148684 - DNA, 25 bp, Homo sapien
aaaatggagcgtggtgttgcaaaac

SEQ ID NO: 5148685 - DNA, 25 bp, Homo sapien
gttgcaaaacatcctcttcccgagc

SEQ ID NO: 5148686 - DNA, 25 bp, Homo sapien
cctcttcccgagctctggaccagct

SEQ ID NO: 5148687 - DNA, 25 bp, Homo sapien
gcgtggtgttgcaaaacatcctctt

SEQ ID NO: 5148688 - DNA, 25 bp, Homo sapien
tcacttgacacagccggccagggca

SEQ ID NO: 5148689 - DNA, 25 bp, Homo sapien
cacagccggccagggcagccctgag

SEQ ID NO: 5148690 - DNA, 25 bp, Homo sapien
cagccggccagggcagccctgagct

SEQ ID NO: 5148691 - DNA, 25 bp, Homo sapien
gccggccagggcagccctgagctca

SEQ ID NO: 5148692 - DNA, 25 bp, Homo sapien
acaggcacccgacatcatgccagac

SEQ ID NO: 5148693 - DNA, 25 bp, Homo sapien
tacaacttctttggataaatatcaa

SEQ ID NO: 5148694 - DNA, 25 bp, Homo sapien
tatagttcacatccttttattgctg

SEQ ID NO: 5148695 - DNA, 25 bp, Homo sapien
tacgcactcatgtgcatttttggtg

SEQ ID NO: 5148696 - DNA, 25 bp, Homo sapien
gcttccagtttgagacaattgtgaa

SEQ ID NO: 5148697 - DNA, 25 bp, Homo sapien
ggccattcatgcaagtttcaaggac

SEQ ID NO: 5148698 - DNA, 25 bp, Homo sapien
ttgtcatgcgtcttcaagatgtgcc

SEQ ID NO: 5148699 - DNA, 25 bp, Homo sapien
tatccccacaggttctttgtcatgc

SEQ ID NO: 5148700 - DNA, 25 bp, Homo sapien
ttgatgctggtaacaagaaccaatc

SEQ ID NO: 5148701 - DNA, 25 bp, Homo sapien
cacagtgactcgaggtcccattcct

SEQ ID NO: 5148702 - DNA, 25 bp, Homo sapien
gcagggctaagtcgaagctgtccat

SEQ ID NO: 5148703 - DNA, 25 bp, Homo sapien
tggagcagggctaagtcgaagctgt

SEQ ID NO: 5148704 - DNA, 25 bp, Homo sapien
gtgactcgaggtcccattcctggag

SEQ ID NO: 5148705 - DNA, 25 bp, Homo sapien
gctgtgagcgtggcacaaagggata

SEQ ID NO: 5148706 - DNA, 25 bp, Homo sapien
ctgtgagcgtggcacaaagggatac

SEQ ID NO: 5148707 - DNA, 25 bp, Homo sapien
tgtgagcgtggcacaaagggatacc

SEQ ID NO: 5148708 - DNA, 25 bp, Homo sapien
tggtgatccactacagtaaagcctc

SEQ ID NO: 5148709 - DNA, 25 bp, Homo sapien
cgctaacaatgagcctcctgggaag

SEQ ID NO: 5148710 - DNA, 25 bp, Homo sapien
tatttccagtatcaagttaagcaca

SEQ ID NO: 5148711 - DNA, 25 bp, Homo sapien
tcataacgcaggtaaacagtacaga

SEQ ID NO: 5148712 - DNA, 25 bp, Homo sapien
caggtgtgatcagcctgtaccacca

SEQ ID NO: 5148713 - DNA, 25 bp, Homo sapien
cctgctgaggaataaaagtaaggaa

SEQ ID NO: 5148714 - DNA, 25 bp, Homo sapien
gtaccaccatgccttgtctaaaata

SEQ ID NO: 5148715 - DNA, 25 bp, Homo sapien
ccacgatggccagctaatatttctg

SEQ ID NO: 5148716 - DNA, 25 bp, Homo sapien
cagttgttaccatagtcttcatcca

SEQ ID NO: 5148717 - DNA, 25 bp, Homo sapien
tttaggtgttatggtagatttgacc

SEQ ID NO: 5148718 - DNA, 25 bp, Homo sapien
cagatgtggcaaacagttgttacca

SEQ ID NO: 5148719 - DNA, 25 bp, Homo sapien
aatttcagatgactttcacgaagtg

SEQ ID NO: 5148720 - DNA, 25 bp, Homo sapien
gagaacctaatggtgagaagaacgt

SEQ ID NO: 5148721 - DNA, 25 bp, Homo sapien
taacaattcccatatctggcagggc

SEQ ID NO: 5148722 - DNA, 25 bp, Homo sapien
gcatactgccatagtgtcataacaa

SEQ ID NO: 5148723 - DNA, 25 bp, Homo sapien
ccaggtaacaattcaagtccaggaa

SEQ ID NO: 5148724 - DNA, 25 bp, Homo sapien
taggttcaagccacaagttcccacc

SEQ ID NO: 5148725 - DNA, 25 bp, Homo sapien
tgttgaacaggacgagatctatgca

SEQ ID NO: 5148726 - DNA, 25 bp, Homo sapien
ctcagttcagctgtcaatctttggt

SEQ ID NO: 5148727 - DNA, 25 bp, Homo sapien
gtcttcacaggactattcagttctg

SEQ ID NO: 5148728 - DNA, 25 bp, Homo sapien
taaaatgtggtattattgggcacag

SEQ ID NO: 5148729 - DNA, 25 bp, Homo sapien
aaacttgtatacaggccaggcatag

SEQ ID NO: 5148730 - DNA, 25 bp, Homo sapien
ttgcagctgcagtgatgctccttga

SEQ ID NO: 5148731 - DNA, 25 bp, Homo sapien
acagacacacgtgcctgtaggccca

SEQ ID NO: 5148732 - DNA, 25 bp, Homo sapien
acggaggcccactgtgacgaacctg

SEQ ID NO: 5148733 - DNA, 25 bp, Homo sapien
gacgaacctgcgttctgcctcagca

SEQ ID NO: 5148734 - DNA, 25 bp, Homo sapien
gagggtgtcttgacatgatcttatc

SEQ ID NO: 5148735 - DNA, 25 bp, Homo sapien
gaggcccactgtgacgagcgtgcgg

SEQ ID NO: 5148736 - DNA, 25 bp, Homo sapien
gcgacgtaccgctccacatcggcct

SEQ ID NO: 5148737 - DNA, 25 bp, Homo sapien
cgacgtaccgctccacatcggcctt

SEQ ID NO: 5148738 - DNA, 25 bp, Homo sapien
gacgtaccgctccacatcggccttg

SEQ ID NO: 5148739 - DNA, 25 bp, Homo sapien
ggtgagagacttgtatgcttaaatt

SEQ ID NO: 5148740 - DNA, 25 bp, Homo sapien
ctcaatgccaggctaacacctgcaa

SEQ ID NO: 5148741 - DNA, 25 bp, Homo sapien
tcctaagtcaaaaactcacctcttc

SEQ ID NO: 5148742 - DNA, 25 bp, Homo sapien
tcagcaaccccagtatatgatcttt

SEQ ID NO: 5148743 - DNA, 25 bp, Homo sapien
attcccgggtccatgtactgttctc

SEQ ID NO: 5148744 - DNA, 25 bp, Homo sapien
ggattcccgggtccatgtactgttc

SEQ ID NO: 5148745 - DNA, 25 bp, Homo sapien
gattcccgggtccatgtactgttct

SEQ ID NO: 5148746 - DNA, 25 bp, Homo sapien
ttcccgggtccatgtactgttctct

SEQ ID NO: 5148747 - DNA, 25 bp, Homo sapien
tgcagttggtcacacctttaattct

SEQ ID NO: 5148748 - DNA, 25 bp, Homo sapien
gcagttggtcacacctttaattcta

SEQ ID NO: 5148749 - DNA, 25 bp, Homo sapien
agttggtcacacctttaattctatt

SEQ ID NO: 5148750 - DNA, 25 bp, Homo sapien
tggtcacacctttaattctatttaa

SEQ ID NO: 5148751 - DNA, 25 bp, Homo sapien
tacagctttgcaaaatagaatcctt

SEQ ID NO: 5148752 - DNA, 25 bp, Homo sapien
tagcaagatcatattctttagcttc

SEQ ID NO: 5148753 - DNA, 25 bp, Homo sapien
gctttgcaaaatagaatcctttcat

SEQ ID NO: 5148754 - DNA, 25 bp, Homo sapien
caaaatagaatcctttcattgactt

SEQ ID NO: 5148755 - DNA, 25 bp, Homo sapien
ctgtgagctttgggatccctctctt

SEQ ID NO: 5148756 - DNA, 25 bp, Homo sapien
tgagctttgggatccctctcttgca

SEQ ID NO: 5148757 - DNA, 25 bp, Homo sapien
cttgcacattaatgtaagtacatat

SEQ ID NO: 5148758 - DNA, 25 bp, Homo sapien
gagctttgggatccctctcttgcac

SEQ ID NO: 5148759 - DNA, 25 bp, Homo sapien
agtttataaattgcaggacttcctg

SEQ ID NO: 5148760 - DNA, 25 bp, Homo sapien
tagtttataaattgcaggacttcct

SEQ ID NO: 5148761 - DNA, 25 bp, Homo sapien
tcagacaatagttatcagaaaactc

SEQ ID NO: 5148762 - DNA, 25 bp, Homo sapien
gcaaaaattgtatatcagacagaac

SEQ ID NO: 5148763 - DNA, 25 bp, Homo sapien
aaaatatccctaaattgtcatcctg

SEQ ID NO: 5148764 - DNA, 25 bp, Homo sapien
tccagaagggtaaatgagatgtcac

SEQ ID NO: 5148765 - DNA, 25 bp, Homo sapien
tcttcaccttcacaatctagaagct

SEQ ID NO: 5148766 - DNA, 25 bp, Homo sapien
tcaagtcaaaaagtttattccatcc

SEQ ID NO: 5148767 - DNA, 25 bp, Homo sapien
tcaccttcacaatctagaagctgtt

SEQ ID NO: 5148768 - DNA, 25 bp, Homo sapien
tccatcttcaccttcacaatctaga

SEQ ID NO: 5148769 - DNA, 25 bp, Homo sapien
agggtctgtacaacacacgaattcc

SEQ ID NO: 5148770 - DNA, 25 bp, Homo sapien
aaacttgaacgcaaagctatgttcc

SEQ ID NO: 5148771 - DNA, 25 bp, Homo sapien
gggtctgtacaacacacgaattcca

SEQ ID NO: 5148772 - DNA, 25 bp, Homo sapien
tctaaacttgaacgcaaagctatgt

SEQ ID NO: 5148773 - DNA, 25 bp, Homo sapien
tcctgcacatctctagtggaaagcg

SEQ ID NO: 5148774 - DNA, 25 bp, Homo sapien
ccagcagtaagtctgtattggttgc

SEQ ID NO: 5148775 - DNA, 25 bp, Homo sapien
gaagcataagattagcataggccag

SEQ ID NO: 5148776 - DNA, 25 bp, Homo sapien
tccaaacactgtaaagactccagat

SEQ ID NO: 5148777 - DNA, 25 bp, Homo sapien
taagaaagtagctgacagttcatca

SEQ ID NO: 5148778 - DNA, 25 bp, Homo sapien
gacagttcatcatttccacccaaag

SEQ ID NO: 5148779 - DNA, 25 bp, Homo sapien
atttctaagaaagtagctgacagtt

SEQ ID NO: 5148780 - DNA, 25 bp, Homo sapien
tgacagttcatcatttccacccaaa

SEQ ID NO: 5148781 - DNA, 25 bp, Homo sapien
acatattgtcattacataccagagc

SEQ ID NO: 5148782 - DNA, 25 bp, Homo sapien
ttcacatattgtcattacataccag

SEQ ID NO: 5148783 - DNA, 25 bp, Homo sapien
cacatattgtcattacataccagag

SEQ ID NO: 5148784 - DNA, 25 bp, Homo sapien
tctgcctcccaaaactacatatcaa

SEQ ID NO: 5148785 - DNA, 25 bp, Homo sapien
cactctgggaagctcgagcccagtt

SEQ ID NO: 5148786 - DNA, 25 bp, Homo sapien
aaaaattgtaggctgtgcgcagtag

SEQ ID NO: 5148787 - DNA, 25 bp, Homo sapien
ccagttcaatgttacggtgagctac

SEQ ID NO: 5148788 - DNA, 25 bp, Homo sapien
ttagaaatattcgtatcgcctatcc

SEQ ID NO: 5148789 - DNA, 25 bp, Homo sapien
tagcatattcttaagagccgccaga

SEQ ID NO: 5148790 - DNA, 25 bp, Homo sapien
aactgacctcaattcataaacccgg

SEQ ID NO: 5148791 - DNA, 25 bp, Homo sapien
gaccagttaattagttgtgaatcca

SEQ ID NO: 5148792 - DNA, 25 bp, Homo sapien
agggaagacgtgacagctgccttca

SEQ ID NO: 5148793 - DNA, 25 bp, Homo sapien
tggcgaagggaagacgtgacagctg

SEQ ID NO: 5148794 - DNA, 25 bp, Homo sapien
gcgaagggaagacgtgacagctgcc

SEQ ID NO: 5148795 - DNA, 25 bp, Homo sapien
gaagggaagacgtgacagctgcctt

SEQ ID NO: 5148796 - DNA, 25 bp, Homo sapien
ttgatgatacccatacttctaatag

SEQ ID NO: 5148797 - DNA, 25 bp, Homo sapien
catacttctaatagtaacatggtct

SEQ ID NO: 5148798 - DNA, 25 bp, Homo sapien
cttctaatagtaacatggtcttatc

SEQ ID NO: 5148799 - DNA, 25 bp, Homo sapien
catggtcttatctattacactgtac

SEQ ID NO: 5148800 - DNA, 25 bp, Homo sapien
ccagcagattttgtccagctttacc

SEQ ID NO: 5148801 - DNA, 25 bp, Homo sapien
gcagattttgtccagctttaccttc

SEQ ID NO: 5148802 - DNA, 25 bp, Homo sapien
ttgtccagctttaccttctcttaat

SEQ ID NO: 5148803 - DNA, 25 bp, Homo sapien
gattttgtccagctttaccttctct

SEQ ID NO: 5148804 - DNA, 25 bp, Homo sapien
gcatcatataacgcagactgcccaa

SEQ ID NO: 5148805 - DNA, 25 bp, Homo sapien
catataacgcagactgcccaatttt

SEQ ID NO: 5148806 - DNA, 25 bp, Homo sapien
tcatataacgcagactgcccaattt

SEQ ID NO: 5148807 - DNA, 25 bp, Homo sapien
catcatataacgcagactgcccaat

SEQ ID NO: 5148808 - DNA, 25 bp, Homo sapien
aagaaaagatgtatccttaggtgac

SEQ ID NO: 5148809 - DNA, 25 bp, Homo sapien
cgctaccaagaaaagatgtatcctt

SEQ ID NO: 5148810 - DNA, 25 bp, Homo sapien
aaaagatgtatccttaggtgactga

SEQ ID NO: 5148811 - DNA, 25 bp, Homo sapien
taccaagaaaagatgtatccttagg

SEQ ID NO: 5148812 - DNA, 25 bp, Homo sapien
caacatcgtatctagccaaatcttc

SEQ ID NO: 5148813 - DNA, 25 bp, Homo sapien
gctctggttcttgtacatcaatttt

SEQ ID NO: 5148814 - DNA, 25 bp, Homo sapien
tcaagctctggttcttgtacatcaa

SEQ ID NO: 5148815 - DNA, 25 bp, Homo sapien
aacatcgtatctagccaaatcttca

SEQ ID NO: 5148816 - DNA, 25 bp, Homo sapien
atgaattccactgtaagccaagcca

SEQ ID NO: 5148817 - DNA, 25 bp, Homo sapien
tttagccattttcggattccaggta

SEQ ID NO: 5148818 - DNA, 25 bp, Homo sapien
tccactgtaagccaagccaagtaag

SEQ ID NO: 5148819 - DNA, 25 bp, Homo sapien
tttcggattccaggtaaagcaggca

SEQ ID NO: 5148820 - DNA, 25 bp, Homo sapien
gcaggcataacggctgataggagct

SEQ ID NO: 5148821 - DNA, 25 bp, Homo sapien
cctttaattgtaagtggctggtata

SEQ ID NO: 5148822 - DNA, 25 bp, Homo sapien
ctcctttaattgtaagtggctggta

SEQ ID NO: 5148823 - DNA, 25 bp, Homo sapien
gggcaggcataacggctgataggag

SEQ ID NO: 5148824 - DNA, 25 bp, Homo sapien
tctgtgaatcagagtacaaaccgca

SEQ ID NO: 5148825 - DNA, 25 bp, Homo sapien
actgcttttctgtgaatcagagtac

SEQ ID NO: 5148826 - DNA, 25 bp, Homo sapien
gaatcagagtacaaaccgcatccca

SEQ ID NO: 5148827 - DNA, 25 bp, Homo sapien
aaccgcatcccaccaagatttttgt

SEQ ID NO: 5148828 - DNA, 25 bp, Homo sapien
aatagttcaatttactaaaattgct

SEQ ID NO: 5148829 - DNA, 25 bp, Homo sapien
ttcaatttactaaaattgctttcta

SEQ ID NO: 5148830 - DNA, 25 bp, Homo sapien
agagtgtttatttcatgctgaacta

SEQ ID NO: 5148831 - DNA, 25 bp, Homo sapien
ctcttagagtgtttatttcatgctg

SEQ ID NO: 5148832 - DNA, 25 bp, Homo sapien
catgtttttcctgggctcttagagt

SEQ ID NO: 5148833 - DNA, 25 bp, Homo sapien
tgcccaatgtacaagcagagcaggt

SEQ ID NO: 5148834 - DNA, 25 bp, Homo sapien
ttaaggaataacagtaacagctcag

SEQ ID NO: 5148835 - DNA, 25 bp, Homo sapien
cagtaacagctcagctaatatgtaa

SEQ ID NO: 5148836 - DNA, 25 bp, Homo sapien
attattaaggaataacagtaacagc

SEQ ID NO: 5148837 - DNA, 25 bp, Homo sapien
acagctcagctaatatgtaacattc

SEQ ID NO: 5148838 - DNA, 25 bp, Homo sapien
cataaaaagaattaagaccgctgcc

SEQ ID NO: 5148839 - DNA, 25 bp, Homo sapien
tgaccataaaaagaattaagaccgc

SEQ ID NO: 5148840 - DNA, 25 bp, Homo sapien
ctagttgaccataaaaagaattaag

SEQ ID NO: 5148841 - DNA, 25 bp, Homo sapien
tagttgaccataaaaagaattaaga

SEQ ID NO: 5148842 - DNA, 25 bp, Homo sapien
gtttaaacagaggatcaataggttc

SEQ ID NO: 5148843 - DNA, 25 bp, Homo sapien
taaacagaggatcaataggttcagg

SEQ ID NO: 5148844 - DNA, 25 bp, Homo sapien
taatgaacacttctccctatgtatt

SEQ ID NO: 5148845 - DNA, 25 bp, Homo sapien
gaggatcaataggttcaggaatact

SEQ ID NO: 5148846 - DNA, 25 bp, Homo sapien
agaaacaacactttttatagattca

SEQ ID NO: 5148847 - DNA, 25 bp, Homo sapien
ttcttgaccactgaaagatttgaat

SEQ ID NO: 5148848 - DNA, 25 bp, Homo sapien
tcttgaccactgaaagatttgaatc

SEQ ID NO: 5148849 - DNA, 25 bp, Homo sapien
tttcttgaccactgaaagatttgaa

SEQ ID NO: 5148850 - DNA, 25 bp, Homo sapien
aagagcatatacctagattcccaag

SEQ ID NO: 5148851 - DNA, 25 bp, Homo sapien
gaaatacagatgctacaatacacca

SEQ ID NO: 5148852 - DNA, 25 bp, Homo sapien
ctgttaaccatgataattgtagagg

SEQ ID NO: 5148853 - DNA, 25 bp, Homo sapien
cagaaaagtgttgtacagtctaaca

SEQ ID NO: 5148854 - DNA, 25 bp, Homo sapien
tatagtcttcgagttcctgcatgac

SEQ ID NO: 5148855 - DNA, 25 bp, Homo sapien
agcatctgttttacagactccaggg

SEQ ID NO: 5148856 - DNA, 25 bp, Homo sapien
gaatctgcatttcgcaaagaaccat

SEQ ID NO: 5148857 - DNA, 25 bp, Homo sapien
gagaggacctccttcactatagtct

SEQ ID NO: 5148858 - DNA, 25 bp, Homo sapien
cttaatggcctctacttgttggcaa

SEQ ID NO: 5148859 - DNA, 25 bp, Homo sapien
ttaatggcctctacttgttggcaaa

SEQ ID NO: 5148860 - DNA, 25 bp, Homo sapien
ttttgaagctcagaccacttttcga

SEQ ID NO: 5148861 - DNA, 25 bp, Homo sapien
catgtaatccacagctaatctggga

SEQ ID NO: 5148862 - DNA, 25 bp, Homo sapien
tgtagcacttcaatcactcgggaac

SEQ ID NO: 5148863 - DNA, 25 bp, Homo sapien
taatctgggaatgaactcatagacc

SEQ ID NO: 5148864 - DNA, 25 bp, Homo sapien
gtctgtgacccctgatatccatcag

SEQ ID NO: 5148865 - DNA, 25 bp, Homo sapien
ctgttagtggagccccatgaaatgt

SEQ ID NO: 5148866 - DNA, 25 bp, Homo sapien
cataattctctgtgggccaacgatg

SEQ ID NO: 5148867 - DNA, 25 bp, Homo sapien
ggtccataattctctgtgggccaac

SEQ ID NO: 5148868 - DNA, 25 bp, Homo sapien
ggctctcgccctttcagtgccacaa

SEQ ID NO: 5148869 - DNA, 25 bp, Homo sapien
tctcgccctttcagtgccacaaagc

SEQ ID NO: 5148870 - DNA, 25 bp, Homo sapien
ttggctctcgccctttcagtgccac

SEQ ID NO: 5148871 - DNA, 25 bp, Homo sapien
atcttggctctcgccctttcagtgc

SEQ ID NO: 5148872 - DNA, 25 bp, Homo sapien
aaggaaaaagaatctatgaacacag

SEQ ID NO: 5148873 - DNA, 25 bp, Homo sapien
taaggaaaaagaatctatgaacaca

SEQ ID NO: 5148874 - DNA, 25 bp, Homo sapien
ctttgtgggagtaacattagctgct

SEQ ID NO: 5148875 - DNA, 25 bp, Homo sapien
agtaacattagctgctggtctgaga

SEQ ID NO: 5148876 - DNA, 25 bp, Homo sapien
ggaattatatgctggtgactgacta

SEQ ID NO: 5148877 - DNA, 25 bp, Homo sapien
gaagatactgggaattatatgctgg

SEQ ID NO: 5148878 - DNA, 25 bp, Homo sapien
tgggtcagcaagggcattacagttc

SEQ ID NO: 5148879 - DNA, 25 bp, Homo sapien
tcagcaagggcattacagttctatt

SEQ ID NO: 5148880 - DNA, 25 bp, Homo sapien
ggtcagcaagggcattacagttcta

SEQ ID NO: 5148881 - DNA, 25 bp, Homo sapien
gtgggtcagcaagggcattacagtt

SEQ ID NO: 5148882 - DNA, 25 bp, Homo sapien
cacatggtgactctctgggagtgct

SEQ ID NO: 5148883 - DNA, 25 bp, Homo sapien
tccactctgggctactgaactagtt

SEQ ID NO: 5148884 - DNA, 25 bp, Homo sapien
gattcaacttggcaggagacttaga

SEQ ID NO: 5148885 - DNA, 25 bp, Homo sapien
tgggagtgcttgaccgagaaacatg

SEQ ID NO: 5148886 - DNA, 25 bp, Homo sapien
gttttaaatgtgtagttgattgaag

SEQ ID NO: 5148887 - DNA, 25 bp, Homo sapien
taaatgtgtagttgattgaagattc

SEQ ID NO: 5148888 - DNA, 25 bp, Homo sapien
tttaaatgtgtagttgattgaagat

SEQ ID NO: 5148889 - DNA, 25 bp, Homo sapien
gtgttttaaatgtgtagttgattga

SEQ ID NO: 5148890 - DNA, 25 bp, Homo sapien
tgagtccgtacactgtaccaagttc

SEQ ID NO: 5148891 - DNA, 25 bp, Homo sapien
ccgtacactgtaccaagttcttttg

SEQ ID NO: 5148892 - DNA, 25 bp, Homo sapien
acactgtaccaagttcttttgctct

SEQ ID NO: 5148893 - DNA, 25 bp, Homo sapien
aagcatgagtccgtacactgtacca

SEQ ID NO: 5148894 - DNA, 25 bp, Homo sapien
tgaggaaggggtgctagtccaaaag

SEQ ID NO: 5148895 - DNA, 25 bp, Homo sapien
taccaaaatatccacgcatttgcag

SEQ ID NO: 5148896 - DNA, 25 bp, Homo sapien
aaactgtgactctatgggtagctaa

SEQ ID NO: 5148897 - DNA, 25 bp, Homo sapien
taaaatctaagaccattcatatggc

SEQ ID NO: 5148898 - DNA, 25 bp, Homo sapien
tatactttgatgcagagatgtacga

SEQ ID NO: 5148899 - DNA, 25 bp, Homo sapien
agctgctaatgctccagtgacaata

SEQ ID NO: 5148900 - DNA, 25 bp, Homo sapien
tgctaatgctccagtgacaatattt

SEQ ID NO: 5148901 - DNA, 25 bp, Homo sapien
cctaataagtgaccgatagctgcta

SEQ ID NO: 5148902 - DNA, 25 bp, Homo sapien
taagtgaccgatagctgctaatgct

SEQ ID NO: 5148903 - DNA, 25 bp, Homo sapien
gcagctgctctaaagactgtgtgta

SEQ ID NO: 5148904 - DNA, 25 bp, Homo sapien
gttacagtgtgcatgtctagaagcg

SEQ ID NO: 5148905 - DNA, 25 bp, Homo sapien
tgtgtatgtgctggcggaagacaca

SEQ ID NO: 5148906 - DNA, 25 bp, Homo sapien
gaagcgggaggtctgtgtttctcct

SEQ ID NO: 5148907 - DNA, 25 bp, Homo sapien
agtttctaccccacgtggtcagtga

SEQ ID NO: 5148908 - DNA, 25 bp, Homo sapien
ggaaccatgacttgcagtttctacc

SEQ ID NO: 5148909 - DNA, 25 bp, Homo sapien
ttatttatggttcaagcctagggca

SEQ ID NO: 5148910 - DNA, 25 bp, Homo sapien
caaatgacccttactccaggtgatt

SEQ ID NO: 5148911 - DNA, 25 bp, Homo sapien
gaataaagccctatgaatcccagtt

SEQ ID NO: 5148912 - DNA, 25 bp, Homo sapien
tgtcatttcacgtataaggaaagca

SEQ ID NO: 5148913 - DNA, 25 bp, Homo sapien
aagcattaacatttactggtcacgt

SEQ ID NO: 5148914 - DNA, 25 bp, Homo sapien
tcttcccatctattaatattccaag

SEQ ID NO: 5148915 - DNA, 25 bp, Homo sapien
tgatctgcactttttgtggtggaac

SEQ ID NO: 5148916 - DNA, 25 bp, Homo sapien
aaaaatgggctttaggagcttctga

SEQ ID NO: 5148917 - DNA, 25 bp, Homo sapien
catttgacatgaaaaccggaactcc

SEQ ID NO: 5148918 - DNA, 25 bp, Homo sapien
tctgattaaatatggcagactgaac

SEQ ID NO: 5148919 - DNA, 25 bp, Homo sapien
tcaaaggagtttatgacatcaccgt

SEQ ID NO: 5148920 - DNA, 25 bp, Homo sapien
gctgcagacttctctcgctcttgat

SEQ ID NO: 5148921 - DNA, 25 bp, Homo sapien
ccaggttagctgcagacttctctcg

SEQ ID NO: 5148922 - DNA, 25 bp, Homo sapien
gcagacttctctcgctcttgattcc

SEQ ID NO: 5148923 - DNA, 25 bp, Homo sapien
agtattccaggttagctgcagactt

SEQ ID NO: 5148924 - DNA, 25 bp, Homo sapien
tatgacagacccaattcaaatgagc

SEQ ID NO: 5148925 - DNA, 25 bp, Homo sapien
gtcacggcctactcatatgacagac

SEQ ID NO: 5148926 - DNA, 25 bp, Homo sapien
tttcaaatctagtcacggcctactc

SEQ ID NO: 5148927 - DNA, 25 bp, Homo sapien
gacccaattcaaatgagcaaaattg

SEQ ID NO: 5148928 - DNA, 25 bp, Homo sapien
aaattagctggcgtgcgtctgtagt

SEQ ID NO: 5148929 - DNA, 25 bp, Homo sapien
caaccaaatgcaatatatgagccct

SEQ ID NO: 5148930 - DNA, 25 bp, Homo sapien
tagttacgccaaaagattgtccatg

SEQ ID NO: 5148931 - DNA, 25 bp, Homo sapien
caactcaagagagattatagcgtct

SEQ ID NO: 5148932 - DNA, 25 bp, Homo sapien
gggaccagcaattggaattttagta

SEQ ID NO: 5148933 - DNA, 25 bp, Homo sapien
tagataaggtcaatcagtcaaaagt

SEQ ID NO: 5148934 - DNA, 25 bp, Homo sapien
tgttaaagaacaccaactagataag

SEQ ID NO: 5148935 - DNA, 25 bp, Homo sapien
tgcctgctcaattttgaggatgact

SEQ ID NO: 5148936 - DNA, 25 bp, Homo sapien
cacattgataagagacaagtaggaa

SEQ ID NO: 5148937 - DNA, 25 bp, Homo sapien
caggccttacattctctctcttaaa

SEQ ID NO: 5148938 - DNA, 25 bp, Homo sapien
taaatctgctgctaaaccatcattg

SEQ ID NO: 5148939 - DNA, 25 bp, Homo sapien
gagagaatgtaaggtatctaaatct

SEQ ID NO: 5148940 - DNA, 25 bp, Homo sapien
gaagagcaatctatacttaccactg

SEQ ID NO: 5148941 - DNA, 25 bp, Homo sapien
aaaagctgtgcttagatagggtgca

SEQ ID NO: 5148942 - DNA, 25 bp, Homo sapien
tagcatcttagaccttttacctagg

SEQ ID NO: 5148943 - DNA, 25 bp, Homo sapien
taccctcctaagctaatgtttccca

SEQ ID NO: 5148944 - DNA, 25 bp, Homo sapien
gaacgggaagcattttcttcctcat

SEQ ID NO: 5148945 - DNA, 25 bp, Homo sapien
tcatccagaagaacgggaagcattt

SEQ ID NO: 5148946 - DNA, 25 bp, Homo sapien
ccagaagaacgggaagcattttctt

SEQ ID NO: 5148947 - DNA, 25 bp, Homo sapien
catccagaagaacgggaagcatttt

SEQ ID NO: 5148948 - DNA, 25 bp, Homo sapien
gctgtggcctggtatcaacacttca

SEQ ID NO: 5148949 - DNA, 25 bp, Homo sapien
aattcacagtactgccgagaaatgg

SEQ ID NO: 5148950 - DNA, 25 bp, Homo sapien
caaaagaataatggtaacacacacg

SEQ ID NO: 5148951 - DNA, 25 bp, Homo sapien
taatagaagtattccttccatcaac

SEQ ID NO: 5148952 - DNA, 25 bp, Homo sapien
gaagatgtagcacggacctctaagg

SEQ ID NO: 5148953 - DNA, 25 bp, Homo sapien
agtgacaccctatcaagagcctgga

SEQ ID NO: 5148954 - DNA, 25 bp, Homo sapien
tcatggcttgcatgcagtgacaccc

SEQ ID NO: 5148955 - DNA, 25 bp, Homo sapien
tcatgtcggctctgaaatagatgca

SEQ ID NO: 5148956 - DNA, 25 bp, Homo sapien
gagttggtcgacgttctcacaacaa

SEQ ID NO: 5148957 - DNA, 25 bp, Homo sapien
gacatggcaggtactacggtctacc

SEQ ID NO: 5148958 - DNA, 25 bp, Homo sapien
cgggtatcaaagagttggtcgacgt

SEQ ID NO: 5148959 - DNA, 25 bp, Homo sapien
tcagacatggcaggtactacggtct

SEQ ID NO: 5148960 - DNA, 25 bp, Homo sapien
gcaagagatgtgcatcagttcccac

SEQ ID NO: 5148961 - DNA, 25 bp, Homo sapien
tacggtatgccttctcagtgccttg

SEQ ID NO: 5148962 - DNA, 25 bp, Homo sapien
gaagcagaagtcttccaccaagttg

SEQ ID NO: 5148963 - DNA, 25 bp, Homo sapien
tacactgttcagagcacaagcatag

SEQ ID NO: 5148964 - DNA, 25 bp, Homo sapien
taggctcaggtcataactctgtgtc

SEQ ID NO: 5148965 - DNA, 25 bp, Homo sapien
tgagcacatccttgcagggaaactg

SEQ ID NO: 5148966 - DNA, 25 bp, Homo sapien
gactgttgtctcaaatgctaggcag

SEQ ID NO: 5148967 - DNA, 25 bp, Homo sapien
gcagacatctggagtggtaaccact

SEQ ID NO: 5148968 - DNA, 25 bp, Homo sapien
gtggtgcacacctgtagtcccagct

SEQ ID NO: 5148969 - DNA, 25 bp, Homo sapien
ggtgcacacctgtagtcccagctac

SEQ ID NO: 5148970 - DNA, 25 bp, Homo sapien
tgcacacctgtagtcccagctactt

SEQ ID NO: 5148971 - DNA, 25 bp, Homo sapien
ctaggtaacatggcaaaacctcgtc

SEQ ID NO: 5148972 - DNA, 25 bp, Homo sapien
tccagcctccgccccaccaggttca

SEQ ID NO: 5148973 - DNA, 25 bp, Homo sapien
tcactccagcctccgccccaccagg

SEQ ID NO: 5148974 - DNA, 25 bp, Homo sapien
actccagcctccgccccaccaggtt

SEQ ID NO: 5148975 - DNA, 25 bp, Homo sapien
ctcactccagcctccgccccaccag

SEQ ID NO: 5148976 - DNA, 25 bp, Homo sapien
agtctgaaagaatgatctcagtcag

SEQ ID NO: 5148977 - DNA, 25 bp, Homo sapien
gaatcatatgaattaaacattggac

SEQ ID NO: 5148978 - DNA, 25 bp, Homo sapien
tgaagtcatcgtctataaggcaata

SEQ ID NO: 5148979 - DNA, 25 bp, Homo sapien
tcagaaactcagaatgaatcatatg

SEQ ID NO: 5148980 - DNA, 25 bp, Homo sapien
caaaaggccttagcgagctgtgagt

SEQ ID NO: 5148981 - DNA, 25 bp, Homo sapien
ctctaagagctaatttgtcttggca

SEQ ID NO: 5148982 - DNA, 25 bp, Homo sapien
cagcactttgatctgagacggctgg

SEQ ID NO: 5148983 - DNA, 25 bp, Homo sapien
cactttgatctgagacggctggatc

SEQ ID NO: 5148984 - DNA, 25 bp, Homo sapien
tgctgcttgagccaggtcatcgcaa

SEQ ID NO: 5148985 - DNA, 25 bp, Homo sapien
cgcaagtttgacattcggtaatgca

SEQ ID NO: 5148986 - DNA, 25 bp, Homo sapien
gcccagtgcacgtgatccagaaata

SEQ ID NO: 5148987 - DNA, 25 bp, Homo sapien
agaaatatcttgagcaccctctgct

SEQ ID NO: 5148988 - DNA, 25 bp, Homo sapien
gttgtagccagccaagatagcgttg

SEQ ID NO: 5148989 - DNA, 25 bp, Homo sapien
tttcatggttgtagccagccaagat

SEQ ID NO: 5148990 - DNA, 25 bp, Homo sapien
ttcatggttgtagccagccaagata

SEQ ID NO: 5148991 - DNA, 25 bp, Homo sapien
tagccagccaagatagcgttgacac

SEQ ID NO: 5148992 - DNA, 25 bp, Homo sapien
gccatgagacaggaaggcctcaact

SEQ ID NO: 5148993 - DNA, 25 bp, Homo sapien
accagccatgagacaggaaggcctc

SEQ ID NO: 5148994 - DNA, 25 bp, Homo sapien
tttccaccagccatgagacaggaag

SEQ ID NO: 5148995 - DNA, 25 bp, Homo sapien
gacaggaaggcctcaactggtatcc

SEQ ID NO: 5148996 - DNA, 25 bp, Homo sapien
agagaaaaggtcatacacttttggt

SEQ ID NO: 5148997 - DNA, 25 bp, Homo sapien
ttggcaagagtacagagaaaaggtc

SEQ ID NO: 5148998 - DNA, 25 bp, Homo sapien
ctcggagaactgaaaatagaactac

SEQ ID NO: 5148999 - DNA, 25 bp, Homo sapien
caatctagcaataccacaactgggc

SEQ ID NO: 5149000 - DNA, 25 bp, Homo sapien
gattgataagccactagctagacta

SEQ ID NO: 5149001 - DNA, 25 bp, Homo sapien
gacttgatgttcatctaattttact

SEQ ID NO: 5149002 - DNA, 25 bp, Homo sapien
tgacttgatgttcatctaattttac

SEQ ID NO: 5149003 - DNA, 25 bp, Homo sapien
ctttgacttgatgttcatctaattt

SEQ ID NO: 5149004 - DNA, 25 bp, Homo sapien
ttgacttgatgttcatctaatttta

SEQ ID NO: 5149005 - DNA, 25 bp, Homo sapien
agctgatgtcatccaagaggaaaga

SEQ ID NO: 5149006 - DNA, 25 bp, Homo sapien
acagagctgatgtcatccaagagga

SEQ ID NO: 5149007 - DNA, 25 bp, Homo sapien
tgatgtcatccaagaggaaagactc

SEQ ID NO: 5149008 - DNA, 25 bp, Homo sapien
tgtcatccaagaggaaagactccat

SEQ ID NO: 5149009 - DNA, 25 bp, Homo sapien
tgcacgaagtcttcacaagctttcg

SEQ ID NO: 5149010 - DNA, 25 bp, Homo sapien
ttcacaagctttcgccaattcctca

SEQ ID NO: 5149011 - DNA, 25 bp, Homo sapien
gatggcaaagctgaacgatcattgg

SEQ ID NO: 5149012 - DNA, 25 bp, Homo sapien
tctccaacgaggcaaatacttcatt

SEQ ID NO: 5149013 - DNA, 25 bp, Homo sapien
aggtctttctatgtctgcggcagaa

SEQ ID NO: 5149014 - DNA, 25 bp, Homo sapien
gctgaatgcctacagggacacagga

SEQ ID NO: 5149015 - DNA, 25 bp, Homo sapien
caggaagtcaaaacagtatcaggtc

SEQ ID NO: 5149016 - DNA, 25 bp, Homo sapien
tatacaaatgttggccgctgaatgc

SEQ ID NO: 5149017 - DNA, 25 bp, Homo sapien
gaaagaccagggctgcatttacaat

SEQ ID NO: 5149018 - DNA, 25 bp, Homo sapien
aagaccagggctgcatttacaatga

SEQ ID NO: 5149019 - DNA, 25 bp, Homo sapien
ttgaaagaccagggctgcatttaca

SEQ ID NO: 5149020 - DNA, 25 bp, Homo sapien
accagggctgcatttacaatgacag

SEQ ID NO: 5149021 - DNA, 25 bp, Homo sapien
tcatgttaagagctcagcagcacag

SEQ ID NO: 5149022 - DNA, 25 bp, Homo sapien
agcagcacagtacacagttacatgg

SEQ ID NO: 5149023 - DNA, 25 bp, Homo sapien
tcaggatttactgaggcattctgga

SEQ ID NO: 5149024 - DNA, 25 bp, Homo sapien
gtacacagttacatggcagtcagga

SEQ ID NO: 5149025 - DNA, 25 bp, Homo sapien
taaaagtcacagaactccttgtaga

SEQ ID NO: 5149026 - DNA, 25 bp, Homo sapien
ctttcacgtcactgtgcctgcgctg

SEQ ID NO: 5149027 - DNA, 25 bp, Homo sapien
tcctcggtcccattggcctcgtgga

SEQ ID NO: 5149028 - DNA, 25 bp, Homo sapien
tgcagtttggaaacagccctctcgt

SEQ ID NO: 5149029 - DNA, 25 bp, Homo sapien
agccgcccttgcagcgctcgcaagt

SEQ ID NO: 5149030 - DNA, 25 bp, Homo sapien
cagcgctcgcaagtggcgctggcca

SEQ ID NO: 5149031 - DNA, 25 bp, Homo sapien
cagctccccattactgttcacgatc

SEQ ID NO: 5149032 - DNA, 25 bp, Homo sapien
tctcagcgggcgcaaagccgccctt

SEQ ID NO: 5149033 - DNA, 25 bp, Homo sapien
ctcatagaagagtccttctgggaac

SEQ ID NO: 5149034 - DNA, 25 bp, Homo sapien
gctctcctttagagcaggtccagtg

SEQ ID NO: 5149035 - DNA, 25 bp, Homo sapien
tcttctgctgtggtacattggcctc

SEQ ID NO: 5149036 - DNA, 25 bp, Homo sapien
atttgcccatccctaaatccatcat

SEQ ID NO: 5149037 - DNA, 25 bp, Homo sapien
ctgtggtacattggcctctcctgct

SEQ ID NO: 5149038 - DNA, 25 bp, Homo sapien
tcctgccctcttctgctgtggtaca

SEQ ID NO: 5149039 - DNA, 25 bp, Homo sapien
catctctttcatgtcgcaaacctgc

SEQ ID NO: 5149040 - DNA, 25 bp, Homo sapien
ttcatatagtgagaagaccatgctc

SEQ ID NO: 5149041 - DNA, 25 bp, Homo sapien
ttctctattgctcccctggaccgag

SEQ ID NO: 5149042 - DNA, 25 bp, Homo sapien
tcaatgtgccttgggagtctcacct

SEQ ID NO: 5149043 - DNA, 25 bp, Homo sapien
gggcaacagcccatgaatagcctag

SEQ ID NO: 5149044 - DNA, 25 bp, Homo sapien
gatgcaggtttacacatccctgggc

SEQ ID NO: 5149045 - DNA, 25 bp, Homo sapien
tgacagggcctaaatgcggcagcag

SEQ ID NO: 5149046 - DNA, 25 bp, Homo sapien
gctcaggaagcggtcatgctgctta

SEQ ID NO: 5149047 - DNA, 25 bp, Homo sapien
cctgagtccacgagatggagactgc

SEQ ID NO: 5149048 - DNA, 25 bp, Homo sapien
tgtttagaataaactggtagagcca

SEQ ID NO: 5149049 - DNA, 25 bp, Homo sapien
ccgtgcctggctggtaatattgttt

SEQ ID NO: 5149050 - DNA, 25 bp, Homo sapien
ggaagactgcctgagtccacgagat

SEQ ID NO: 5149051 - DNA, 25 bp, Homo sapien
gctattactcaatactatgccatac

SEQ ID NO: 5149052 - DNA, 25 bp, Homo sapien
ccttgtccagattaatgtatttggt

SEQ ID NO: 5149053 - DNA, 25 bp, Homo sapien
taagatgtagtatatttaatgtatc

SEQ ID NO: 5149054 - DNA, 25 bp, Homo sapien
acacactaccttgtccagattaatg

SEQ ID NO: 5149055 - DNA, 25 bp, Homo sapien
gttcacagtactttcttccttcaaa

SEQ ID NO: 5149056 - DNA, 25 bp, Homo sapien
tgacagcaaggggcaaagagcatct

SEQ ID NO: 5149057 - DNA, 25 bp, Homo sapien
cacactgatgacagcaaggggcaaa

SEQ ID NO: 5149058 - DNA, 25 bp, Homo sapien
cactgatgacagcaaggggcaaaga

SEQ ID NO: 5149059 - DNA, 25 bp, Homo sapien
ggggcaaagagcatctgaaagtcat

SEQ ID NO: 5149060 - DNA, 25 bp, Homo sapien
ttacttgacatttagcagtaaaact

SEQ ID NO: 5149061 - DNA, 25 bp, Homo sapien
tttacttgacatttagcagtaaaac

SEQ ID NO: 5149062 - DNA, 25 bp, Homo sapien
tacttgacatttagcagtaaaactt

SEQ ID NO: 5149063 - DNA, 25 bp, Homo sapien
acttgacatttagcagtaaaactta

SEQ ID NO: 5149064 - DNA, 25 bp, Homo sapien
aggtcacagcggaagcactccggat

SEQ ID NO: 5149065 - DNA, 25 bp, Homo sapien
gataactcggccaatgatgaattca

SEQ ID NO: 5149066 - DNA, 25 bp, Homo sapien
cactccggatgccagctgttattca

SEQ ID NO: 5149067 - DNA, 25 bp, Homo sapien
ttgacaaacccgatatctgccagaa

SEQ ID NO: 5149068 - DNA, 25 bp, Homo sapien
tggctttctcacgattatgacaggg

SEQ ID NO: 5149069 - DNA, 25 bp, Homo sapien
ggtcgttcttgaatatcagaggctg

SEQ ID NO: 5149070 - DNA, 25 bp, Homo sapien
cagttggcgcagttgaaatggtctg

SEQ ID NO: 5149071 - DNA, 25 bp, Homo sapien
tcagaggctgctcatcgatgatagc

SEQ ID NO: 5149072 - DNA, 25 bp, Homo sapien
tagactaacacacgacctttccaag

SEQ ID NO: 5149073 - DNA, 25 bp, Homo sapien
caggcaagaaaacgagataaggcac

SEQ ID NO: 5149074 - DNA, 25 bp, Homo sapien
gagatggtcccaattagtcaaatgg

SEQ ID NO: 5149075 - DNA, 25 bp, Homo sapien
tggacagaggtgaatccccaagagg

SEQ ID NO: 5149076 - DNA, 25 bp, Homo sapien
ctgtgagaaagacacccagcttaat

SEQ ID NO: 5149077 - DNA, 25 bp, Homo sapien
tgtgagaaagacacccagcttaata

SEQ ID NO: 5149078 - DNA, 25 bp, Homo sapien
gcccttcgatgggccgtcggcaagc

SEQ ID NO: 5149079 - DNA, 25 bp, Homo sapien
ggacccccattttatcatggcatgg

SEQ ID NO: 5149080 - DNA, 25 bp, Homo sapien
cgcccttcgatgggccgtcggcaag

SEQ ID NO: 5149081 - DNA, 25 bp, Homo sapien
caccagagttaacctattttcagag

SEQ ID NO: 5149082 - DNA, 25 bp, Homo sapien
ggtggccccataacataatacttct

SEQ ID NO: 5149083 - DNA, 25 bp, Homo sapien
tgctataggtcatttttgaattgcc

SEQ ID NO: 5149084 - DNA, 25 bp, Homo sapien
tagcacctataaaggaggagctgct

SEQ ID NO: 5149085 - DNA, 25 bp, Homo sapien
tttcctctcataatggcgatgtcca

SEQ ID NO: 5149086 - DNA, 25 bp, Homo sapien
cctttcctctcataatggcgatgtc

SEQ ID NO: 5149087 - DNA, 25 bp, Homo sapien
tctcataatggcgatgtccaagaaa

SEQ ID NO: 5149088 - DNA, 25 bp, Homo sapien
tcctctcataatggcgatgtccaag

SEQ ID NO: 5149089 - DNA, 25 bp, Homo sapien
aatgtacatcttccaagagatttcc

SEQ ID NO: 5149090 - DNA, 25 bp, Homo sapien
ccttgtagctaaactactgataagc

SEQ ID NO: 5149091 - DNA, 25 bp, Homo sapien
gataagcttaggttcataaaagtct

SEQ ID NO: 5149092 - DNA, 25 bp, Homo sapien
taaaagtctatctagcatccagtga

SEQ ID NO: 5149093 - DNA, 25 bp, Homo sapien
ttgcagtggaagcaaacatcaccaa

SEQ ID NO: 5149094 - DNA, 25 bp, Homo sapien
agtggaagcaaacatcaccaaatag

SEQ ID NO: 5149095 - DNA, 25 bp, Homo sapien
gattgcagtggaagcaaacatcacc

SEQ ID NO: 5149096 - DNA, 25 bp, Homo sapien
gcagtggaagcaaacatcaccaaat

SEQ ID NO: 5149097 - DNA, 25 bp, Homo sapien
caccaggccttattaagagcagaga

SEQ ID NO: 5149098 - DNA, 25 bp, Homo sapien
gagtgttaatttagtgttgcaggta

SEQ ID NO: 5149099 - DNA, 25 bp, Homo sapien
aggcaaagcagttcacgcaccaggc

SEQ ID NO: 5149100 - DNA, 25 bp, Homo sapien
tgttgcaggtagaacaggcaaagca

SEQ ID NO: 5149101 - DNA, 25 bp, Homo sapien
cagtcttaggattcacactggacaa

SEQ ID NO: 5149102 - DNA, 25 bp, Homo sapien
tcacactggacaaaaccgtacactt

SEQ ID NO: 5149103 - DNA, 25 bp, Homo sapien
cacactggacaaaaccgtacactta

SEQ ID NO: 5149104 - DNA, 25 bp, Homo sapien
aaagttttcagtcttaggattcaca

SEQ ID NO: 5149105 - DNA, 25 bp, Homo sapien
gaatagaagaaagaacagggaacag

SEQ ID NO: 5149106 - DNA, 25 bp, Homo sapien
tgagtaggacaaagaaggaatagaa

SEQ ID NO: 5149107 - DNA, 25 bp, Homo sapien
tagaagaaagaacagggaacagtta

SEQ ID NO: 5149108 - DNA, 25 bp, Homo sapien
ctttgagtaggacaaagaaggaata

SEQ ID NO: 5149109 - DNA, 25 bp, Homo sapien
actggctttaggtcaatttcaacaa

SEQ ID NO: 5149110 - DNA, 25 bp, Homo sapien
tggctttaggtcaatttcaacaaac

SEQ ID NO: 5149111 - DNA, 25 bp, Homo sapien
tctcccgtttggcaagtcgcctctt

SEQ ID NO: 5149112 - DNA, 25 bp, Homo sapien
aagtcgcctcttaaattcttctggc

SEQ ID NO: 5149113 - DNA, 25 bp, Homo sapien
ggcccaaatttctgatgactacaaa

SEQ ID NO: 5149114 - DNA, 25 bp, Homo sapien
tggcctaagttttccagcagccagg

SEQ ID NO: 5149115 - DNA, 25 bp, Homo sapien
caaatacacgcccaaaagttgcagg

SEQ ID NO: 5149116 - DNA, 25 bp, Homo sapien
ctactttggcaaatgagtgaggcaa

SEQ ID NO: 5149117 - DNA, 25 bp, Homo sapien
ctgtttggaggcatcacccagttgt

SEQ ID NO: 5149118 - DNA, 25 bp, Homo sapien
gtagtgatctcctcggttcactctg

SEQ ID NO: 5149119 - DNA, 25 bp, Homo sapien
cagttgtttggaggcaaacttgtgc

SEQ ID NO: 5149120 - DNA, 25 bp, Homo sapien
cctcggttcactctgagtcatcaat

SEQ ID NO: 5149121 - DNA, 25 bp, Homo sapien
tggccaatttcaatttggatcctag

SEQ ID NO: 5149122 - DNA, 25 bp, Homo sapien
gaaaattgaactaactggatatttg

SEQ ID NO: 5149123 - DNA, 25 bp, Homo sapien
aattatgtgacagagaaaattgaac

SEQ ID NO: 5149124 - DNA, 25 bp, Homo sapien
cttaaaagacatattggccaattgg

SEQ ID NO: 5149125 - DNA, 25 bp, Homo sapien
aagaagaagcagagatccttggaga

SEQ ID NO: 5149126 - DNA, 25 bp, Homo sapien
cagattgtagtccttaaatagccta

SEQ ID NO: 5149127 - DNA, 25 bp, Homo sapien
tagcctattttacaagaagaagcag

SEQ ID NO: 5149128 - DNA, 25 bp, Homo sapien
cttaatgctcagattgtagtcctta

SEQ ID NO: 5149129 - DNA, 25 bp, Homo sapien
tcctggttgcatatctgccagtggg

SEQ ID NO: 5149130 - DNA, 25 bp, Homo sapien
ttacagtaagggctctctgcttggc

SEQ ID NO: 5149131 - DNA, 25 bp, Homo sapien
taaagcgtgttaatgcctgttcctg

SEQ ID NO: 5149132 - DNA, 25 bp, Homo sapien
ataaccaagtactcccagccaagtg

SEQ ID NO: 5149133 - DNA, 25 bp, Homo sapien
catcgtgttatataggccctgtgag

SEQ ID NO: 5149134 - DNA, 25 bp, Homo sapien
atgtgagtccttatacatttaagtg

SEQ ID NO: 5149135 - DNA, 25 bp, Homo sapien
tcaaggtcttgtttcaaggtttgga

SEQ ID NO: 5149136 - DNA, 25 bp, Homo sapien
catttaagtgagtctctcaaagaca

SEQ ID NO: 5149137 - DNA, 25 bp, Homo sapien
tctctagttccgtgaagtatgatgt

SEQ ID NO: 5149138 - DNA, 25 bp, Homo sapien
gttaaattgcctacttgtgctcttt

SEQ ID NO: 5149139 - DNA, 25 bp, Homo sapien
gatccagagttagtttaagtccatt

SEQ ID NO: 5149140 - DNA, 25 bp, Homo sapien
tctatgtgctgaagaaaagagtgta

SEQ ID NO: 5149141 - DNA, 25 bp, Homo sapien
ctccttggttcagtatattccaaag

SEQ ID NO: 5149142 - DNA, 25 bp, Homo sapien
tatttcgcctccttggttcagtata

SEQ ID NO: 5149143 - DNA, 25 bp, Homo sapien
ttaggcttttctaggcatacaatta

SEQ ID NO: 5149144 - DNA, 25 bp, Homo sapien
tatcatcggtgaacagcaacagttt

SEQ ID NO: 5149145 - DNA, 25 bp, Homo sapien
aactcccaactctcaggttctcatg

SEQ ID NO: 5149146 - DNA, 25 bp, Homo sapien
tacagttgtgatcccccatgctcgg

SEQ ID NO: 5149147 - DNA, 25 bp, Homo sapien
agagatgaggattcagttttaccct

SEQ ID NO: 5149148 - DNA, 25 bp, Homo sapien
ccatgctcggcctagatttaagtct

SEQ ID NO: 5149149 - DNA, 25 bp, Homo sapien
acccttcgtgaaaacagctacttgg

SEQ ID NO: 5149150 - DNA, 25 bp, Homo sapien
tggtgcttcctttgatctatgtgca

SEQ ID NO: 5149151 - DNA, 25 bp, Homo sapien
cagacagcaggcatatggtggctga

SEQ ID NO: 5149152 - DNA, 25 bp, Homo sapien
cagtttctcggcaggcatgccaggc

SEQ ID NO: 5149153 - DNA, 25 bp, Homo sapien
ccagaattgtgtcctagctggaggc

SEQ ID NO: 5149154 - DNA, 25 bp, Homo sapien
caccagaattgtgtcctagctggag

SEQ ID NO: 5149155 - DNA, 25 bp, Homo sapien
aacaccagaattgtgtcctagctgg

SEQ ID NO: 5149156 - DNA, 25 bp, Homo sapien
tgcaacaccagaattgtgtcctagc

SEQ ID NO: 5149157 - DNA, 25 bp, Homo sapien
tattcccaccttgtgagacaccgag

SEQ ID NO: 5149158 - DNA, 25 bp, Homo sapien
accgagcagagaatccatgtggcaa

SEQ ID NO: 5149159 - DNA, 25 bp, Homo sapien
caccttgtgagacaccgagcagaga

SEQ ID NO: 5149160 - DNA, 25 bp, Homo sapien
tgagacaccgagcagagaatccatg

SEQ ID NO: 5149161 - DNA, 25 bp, Homo sapien
ccaactccagacacaagaggattgt

SEQ ID NO: 5149162 - DNA, 25 bp, Homo sapien
ttgtccagctttctgatcagtagaa

SEQ ID NO: 5149163 - DNA, 25 bp, Homo sapien
tccgcaaatggcaccaactgtgtag

SEQ ID NO: 5149164 - DNA, 25 bp, Homo sapien
tagaatagaaggatgccttcctcca

SEQ ID NO: 5149165 - DNA, 25 bp, Homo sapien
ctgatcagtagaatagaaggatgcc

SEQ ID NO: 5149166 - DNA, 25 bp, Homo sapien
gcaggggtaagagctcgggcgggtg

SEQ ID NO: 5149167 - DNA, 25 bp, Homo sapien
cttccctggcggcgcgctgggccca

SEQ ID NO: 5149168 - DNA, 25 bp, Homo sapien
agggaagcggatccggcagggacgg

SEQ ID NO: 5149169 - DNA, 25 bp, Homo sapien
gcagggacggggagtgggacgcgcg

SEQ ID NO: 5149170 - DNA, 25 bp, Homo sapien
gcgcggcgctcggtccttcacgtga

SEQ ID NO: 5149171 - DNA, 25 bp, Homo sapien
gggcggcagccgcaacggactctgc

SEQ ID NO: 5149172 - DNA, 25 bp, Homo sapien
tccttcacgtgaccgctgcgggtgg

SEQ ID NO: 5149173 - DNA, 25 bp, Homo sapien
tgccctcctcgtgcaggccggaggc

SEQ ID NO: 5149174 - DNA, 25 bp, Homo sapien
caggcagctcaccaccgcggctagg

SEQ ID NO: 5149175 - DNA, 25 bp, Homo sapien
tcaccaccgcggctaggccggcccc

SEQ ID NO: 5149176 - DNA, 25 bp, Homo sapien
agctcaccaccgcggctaggccggc

SEQ ID NO: 5149177 - DNA, 25 bp, Homo sapien
ggcagctcaccaccgcggctaggcc

SEQ ID NO: 5149178 - DNA, 25 bp, Homo sapien
gtgtcccgcaggcatcggaagaccc

SEQ ID NO: 5149179 - DNA, 25 bp, Homo sapien
tgcagccttctttccgggcgttttc

SEQ ID NO: 5149180 - DNA, 25 bp, Homo sapien
ggctgcgcagcccttctgctgtgtc

SEQ ID NO: 5149181 - DNA, 25 bp, Homo sapien
ggctgcatcagcactcccggggccc

SEQ ID NO: 5149182 - DNA, 25 bp, Homo sapien
tgttggatgtggtcaagcccctttg

SEQ ID NO: 5149183 - DNA, 25 bp, Homo sapien
gctctctcgagggataggacatatg

SEQ ID NO: 5149184 - DNA, 25 bp, Homo sapien
gataggacatatggtagaatgcatc

SEQ ID NO: 5149185 - DNA, 25 bp, Homo sapien
catatggtagaatgcatctgttgga

SEQ ID NO: 5149186 - DNA, 25 bp, Homo sapien
tctggataacatcctgacaagtgtt

SEQ ID NO: 5149187 - DNA, 25 bp, Homo sapien
aagttcttctggataacatcctgac

SEQ ID NO: 5149188 - DNA, 25 bp, Homo sapien
catcctgacaagtgttttccagctt

SEQ ID NO: 5149189 - DNA, 25 bp, Homo sapien
taacatcctgacaagtgttttccag

SEQ ID NO: 5149190 - DNA, 25 bp, Homo sapien
tcttcctagcatcgacggtctttac

SEQ ID NO: 5149191 - DNA, 25 bp, Homo sapien
gtttcttcctagcatcgacggtctt

SEQ ID NO: 5149192 - DNA, 25 bp, Homo sapien
cagtttcttcctagcatcgacggtc

SEQ ID NO: 5149193 - DNA, 25 bp, Homo sapien
ttcctagcatcgacggtctttacaa

SEQ ID NO: 5149194 - DNA, 25 bp, Homo sapien
ttttcactctgatggcattttcttt

SEQ ID NO: 5149195 - DNA, 25 bp, Homo sapien
agatcccatttgtctctttcggctt

SEQ ID NO: 5149196 - DNA, 25 bp, Homo sapien
cccatttgtctctttcggcttttgt

SEQ ID NO: 5149197 - DNA, 25 bp, Homo sapien
ccttttcactctgatggcattttct

SEQ ID NO: 5149198 - DNA, 25 bp, Homo sapien
gtgacgttctccgtcttgtgtccaa

SEQ ID NO: 5149199 - DNA, 25 bp, Homo sapien
cagtgtgtgacgttctccgtcttgt

SEQ ID NO: 5149200 - DNA, 25 bp, Homo sapien
tgtgtgacgttctccgtcttgtgtc

SEQ ID NO: 5149201 - DNA, 25 bp, Homo sapien
cgttctccgtcttgtgtccaagtgt

SEQ ID NO: 5149202 - DNA, 25 bp, Homo sapien
gcttaaatgtggctgcaaacctcaa

SEQ ID NO: 5149203 - DNA, 25 bp, Homo sapien
caaatagcagatgtttccccagatg

SEQ ID NO: 5149204 - DNA, 25 bp, Homo sapien
gaatgtggattatgttagacacccc

SEQ ID NO: 5149205 - DNA, 25 bp, Homo sapien
tcaagtttacatgcgaaccactgtc

SEQ ID NO: 5149206 - DNA, 25 bp, Homo sapien
aatatatatacggtcatgtgcccca

SEQ ID NO: 5149207 - DNA, 25 bp, Homo sapien
tgctggtgtcaacaaacctccacgg

SEQ ID NO: 5149208 - DNA, 25 bp, Homo sapien
tccacggccagtcgtataaaattct

SEQ ID NO: 5149209 - DNA, 25 bp, Homo sapien
cacctagtgaggtcatagcacaaca

SEQ ID NO: 5149210 - DNA, 25 bp, Homo sapien
ccaatgtctctttgagcaccgagaa

SEQ ID NO: 5149211 - DNA, 25 bp, Homo sapien
cactgagtataaaaggaagctcccc

SEQ ID NO: 5149212 - DNA, 25 bp, Homo sapien
tgagacagagtaagggagaccaagt

SEQ ID NO: 5149213 - DNA, 25 bp, Homo sapien
cagaggtagccaacatctaaacagt

SEQ ID NO: 5149214 - DNA, 25 bp, Homo sapien
tactgggcatccaaaacataggcag

SEQ ID NO: 5149215 - DNA, 25 bp, Homo sapien
tgtactgggcatccaaaacataggc

SEQ ID NO: 5149216 - DNA, 25 bp, Homo sapien
atttctgttgtactgggcatccaaa

SEQ ID NO: 5149217 - DNA, 25 bp, Homo sapien
gttgtactgggcatccaaaacatag

SEQ ID NO: 5149218 - DNA, 25 bp, Homo sapien
agaagtatgcggcaacctgcgttgt

SEQ ID NO: 5149219 - DNA, 25 bp, Homo sapien
tacacaaataaagaagtatgcggca

SEQ ID NO: 5149220 - DNA, 25 bp, Homo sapien
caaataaagaagtatgcggcaacct

SEQ ID NO: 5149221 - DNA, 25 bp, Homo sapien
ataaagaagtatgcggcaacctgcg

SEQ ID NO: 5149222 - DNA, 25 bp, Homo sapien
caggggaagcaactcaggctcttca

SEQ ID NO: 5149223 - DNA, 25 bp, Homo sapien
ggggaagcaactcaggctcttcaaa

SEQ ID NO: 5149224 - DNA, 25 bp, Homo sapien
aggggaagcaactcaggctcttcaa

SEQ ID NO: 5149225 - DNA, 25 bp, Homo sapien
gcaggggaagcaactcaggctcttc

SEQ ID NO: 5149226 - DNA, 25 bp, Homo sapien
gaagaggcacaaggcccaatcatct

SEQ ID NO: 5149227 - DNA, 25 bp, Homo sapien
cttggcagtaagtaaattggctttg

SEQ ID NO: 5149228 - DNA, 25 bp, Homo sapien
cttaaaatgcgttatgaaggaagca

SEQ ID NO: 5149229 - DNA, 25 bp, Homo sapien
tagccatctgctatggcttgcttac

SEQ ID NO: 5149230 - DNA, 25 bp, Homo sapien
acattccatttgtagcaccattctt

SEQ ID NO: 5149231 - DNA, 25 bp, Homo sapien
tgtggcgttctcacttgacagaagg

SEQ ID NO: 5149232 - DNA, 25 bp, Homo sapien
tgatcacctccaaatacctccacac

SEQ ID NO: 5149233 - DNA, 25 bp, Homo sapien
cactgggactaggttttgaaatacg

SEQ ID NO: 5149234 - DNA, 25 bp, Homo sapien
tgttgatgtagctccaaagcagcca

SEQ ID NO: 5149235 - DNA, 25 bp, Homo sapien
tgggattcctaccttggccagagtg

SEQ ID NO: 5149236 - DNA, 25 bp, Homo sapien
tgccagccacgtgagagagctacct

SEQ ID NO: 5149237 - DNA, 25 bp, Homo sapien
cagaggtttgatggtgcagcacact

SEQ ID NO: 5149238 - DNA, 25 bp, Homo sapien
agagtacttctgctattgaggtggc

SEQ ID NO: 5149239 - DNA, 25 bp, Homo sapien
cagagtacttctgctattgaggtgg

SEQ ID NO: 5149240 - DNA, 25 bp, Homo sapien
tgcagatgtcttttgtatccttcca

SEQ ID NO: 5149241 - DNA, 25 bp, Homo sapien
ccttccagaaaaccatttgaggagt

SEQ ID NO: 5149242 - DNA, 25 bp, Homo sapien
ttgtatccttccagaaaaccatttg

SEQ ID NO: 5149243 - DNA, 25 bp, Homo sapien
cagaaaaccatttgaggagtgactt

SEQ ID NO: 5149244 - DNA, 25 bp, Homo sapien
catctttcctatcggccattttaca

SEQ ID NO: 5149245 - DNA, 25 bp, Homo sapien
tgcttatggcgttcactgtatggaa

SEQ ID NO: 5149246 - DNA, 25 bp, Homo sapien
gaagtgctcttgatatgctgaaatg

SEQ ID NO: 5149247 - DNA, 25 bp, Homo sapien
gttcttcagtttgcggtttgcttgc

SEQ ID NO: 5149248 - DNA, 25 bp, Homo sapien
ctgctggattctaggctcactacct

SEQ ID NO: 5149249 - DNA, 25 bp, Homo sapien
ctggattctaggctcactacctgag

SEQ ID NO: 5149250 - DNA, 25 bp, Homo sapien
cctgctggattctaggctcactacc

SEQ ID NO: 5149251 - DNA, 25 bp, Homo sapien
tgctggattctaggctcactacctg

SEQ ID NO: 5149252 - DNA, 25 bp, Homo sapien
tctgatgctgtggatgttaatagct

SEQ ID NO: 5149253 - DNA, 25 bp, Homo sapien
cagataatcagatcgatcaaggtca

SEQ ID NO: 5149254 - DNA, 25 bp, Homo sapien
tgacgactttcagggaagttaatta

SEQ ID NO: 5149255 - DNA, 25 bp, Homo sapien
taaggcccttgaccatctgatgctg

SEQ ID NO: 5149256 - DNA, 25 bp, Homo sapien
tctgaggaaagacccaagagaacat

SEQ ID NO: 5149257 - DNA, 25 bp, Homo sapien
cactattggagcagatgtggactga

SEQ ID NO: 5149258 - DNA, 25 bp, Homo sapien
gcatgaaaggtacccggtgataact

SEQ ID NO: 5149259 - DNA, 25 bp, Homo sapien
cccaagagtgagcaacaaccaagaa

SEQ ID NO: 5149260 - DNA, 25 bp, Homo sapien
tccacaatgcatataaggctgacct

SEQ ID NO: 5149261 - DNA, 25 bp, Homo sapien
cacagtccatgtgcacgaggcacca

SEQ ID NO: 5149262 - DNA, 25 bp, Homo sapien
taattgctgtacaccatggccagaa

SEQ ID NO: 5149263 - DNA, 25 bp, Homo sapien
gaaagcctcctgtaacattcgctct

SEQ ID NO: 5149264 - DNA, 25 bp, Homo sapien
cttccataaactggcttgggttggt

SEQ ID NO: 5149265 - DNA, 25 bp, Homo sapien
actggcttgggttggttattactgg

SEQ ID NO: 5149266 - DNA, 25 bp, Homo sapien
cataaactggcttgggttggttatt

SEQ ID NO: 5149267 - DNA, 25 bp, Homo sapien
aactggcttgggttggttattactg

SEQ ID NO: 5149268 - DNA, 25 bp, Homo sapien
ataacacctaatatagtgtcaatgc

SEQ ID NO: 5149269 - DNA, 25 bp, Homo sapien
aatcccaggatggacgcacactcag

SEQ ID NO: 5149270 - DNA, 25 bp, Homo sapien
ttataacacctaatatagtgtcaat

SEQ ID NO: 5149271 - DNA, 25 bp, Homo sapien
ttgcatatgacctgaacatatcctc

SEQ ID NO: 5149272 - DNA, 25 bp, Homo sapien
ggctaaaaccctacacactatgctt

SEQ ID NO: 5149273 - DNA, 25 bp, Homo sapien
gaggagaacatcagtctagaggaac

SEQ ID NO: 5149274 - DNA, 25 bp, Homo sapien
agagtatcccgcagcccctgttcat

SEQ ID NO: 5149275 - DNA, 25 bp, Homo sapien
cccctagggtagaaagtcataggag

SEQ ID NO: 5149276 - DNA, 25 bp, Homo sapien
ttgccttgcaagttctgtgttgtgg

SEQ ID NO: 5149277 - DNA, 25 bp, Homo sapien
cttctttggatgcagtgcaagctct

SEQ ID NO: 5149278 - DNA, 25 bp, Homo sapien
ctgggatgtgggagcgtggatttgc

SEQ ID NO: 5149279 - DNA, 25 bp, Homo sapien
tgtgggagcgtggatttgccttgca

SEQ ID NO: 5149280 - DNA, 25 bp, Homo sapien
agcagagcatggaccacgcatccct

SEQ ID NO: 5149281 - DNA, 25 bp, Homo sapien
agggtggttgatgcactgagacttg

SEQ ID NO: 5149282 - DNA, 25 bp, Homo sapien
gatgcactgagacttggagcagcag

SEQ ID NO: 5149283 - DNA, 25 bp, Homo sapien
catggaccacgcatccctggacaag

SEQ ID NO: 5149284 - DNA, 25 bp, Homo sapien
ggaagagattgagcaggtcaaggtt

SEQ ID NO: 5149285 - DNA, 25 bp, Homo sapien
tggaagagattgagcaggtcaaggt

SEQ ID NO: 5149286 - DNA, 25 bp, Homo sapien
ctggaagagattgagcaggtcaagg

SEQ ID NO: 5149287 - DNA, 25 bp, Homo sapien
ttaccctgaagcgtgcacagcaggc

SEQ ID NO: 5149288 - DNA, 25 bp, Homo sapien
ctgcagcttaccctgaagcgtgcac

SEQ ID NO: 5149289 - DNA, 25 bp, Homo sapien
gcttaccctgaagcgtgcacagcag

SEQ ID NO: 5149290 - DNA, 25 bp, Homo sapien
gcagcttaccctgaagcgtgcacag

SEQ ID NO: 5149291 - DNA, 25 bp, Homo sapien
aggccacgggaagcctgccacaaaa

SEQ ID NO: 5149292 - DNA, 25 bp, Homo sapien
aggccctgcagcagttcgtccaaca

SEQ ID NO: 5149293 - DNA, 25 bp, Homo sapien
ttcgtccaacaatgtccagtcctgg

SEQ ID NO: 5149294 - DNA, 25 bp, Homo sapien
ggaagcctgccacaaaatcatgagc

SEQ ID NO: 5149295 - DNA, 25 bp, Homo sapien
cctccaaagccttgcccgctgccac

SEQ ID NO: 5149296 - DNA, 25 bp, Homo sapien
gccctccaaagccttgcccgctgcc

SEQ ID NO: 5149297 - DNA, 25 bp, Homo sapien
cttgcccgctgccaccaggtcatac

SEQ ID NO: 5149298 - DNA, 25 bp, Homo sapien
ccaaagccttgcccgctgccaccag

SEQ ID NO: 5149299 - DNA, 25 bp, Homo sapien
gaagctggtggcgggcatgtagagg

SEQ ID NO: 5149300 - DNA, 25 bp, Homo sapien
gaagaacagctggtgcgggtgttcc

SEQ ID NO: 5149301 - DNA, 25 bp, Homo sapien
aagaacagctggtgcgggtgttcca

SEQ ID NO: 5149302 - DNA, 25 bp, Homo sapien
gagacgaagcgggacagagtgggga

SEQ ID NO: 5149303 - DNA, 25 bp, Homo sapien
ctgtgtgcttaccatcctgtgctgg

SEQ ID NO: 5149304 - DNA, 25 bp, Homo sapien
ggcccaaaggctcggcgagcacagc

SEQ ID NO: 5149305 - DNA, 25 bp, Homo sapien
ggacctgtgtgcttaccatcctgtg

SEQ ID NO: 5149306 - DNA, 25 bp, Homo sapien
ggcagcaccatagtggcggccagca

SEQ ID NO: 5149307 - DNA, 25 bp, Homo sapien
cagctcccgccacaggaatgggctg

SEQ ID NO: 5149308 - DNA, 25 bp, Homo sapien
gggctgccaaggagcgtggctgccg

SEQ ID NO: 5149309 - DNA, 25 bp, Homo sapien
ttggccagtgacagtggtgcctcct

SEQ ID NO: 5149310 - DNA, 25 bp, Homo sapien
agctgccagcccttggccagtgaca

SEQ ID NO: 5149311 - DNA, 25 bp, Homo sapien
tggtgccccggacaggcagatctca

SEQ ID NO: 5149312 - DNA, 25 bp, Homo sapien
aagcagctgaaacaggcacttgttt

SEQ ID NO: 5149313 - DNA, 25 bp, Homo sapien
agtagtcagcaagggcagaggccca

SEQ ID NO: 5149314 - DNA, 25 bp, Homo sapien
cagggcgccttaggtgtggtgctcc

SEQ ID NO: 5149315 - DNA, 25 bp, Homo sapien
tgctaacacagtattttccagggca

SEQ ID NO: 5149316 - DNA, 25 bp, Homo sapien
tccatacgcccaagtccgccttact

SEQ ID NO: 5149317 - DNA, 25 bp, Homo sapien
ccctttctccatacgcccaagtccg

SEQ ID NO: 5149318 - DNA, 25 bp, Homo sapien
atacgcccaagtccgccttactcct

SEQ ID NO: 5149319 - DNA, 25 bp, Homo sapien
tctccatacgcccaagtccgcctta

SEQ ID NO: 5149320 - DNA, 25 bp, Homo sapien
tctcgctgcgctactgccgtttcaa

SEQ ID NO: 5149321 - DNA, 25 bp, Homo sapien
tgtgatggcgatccttctcgctgcg

SEQ ID NO: 5149322 - DNA, 25 bp, Homo sapien
tatgcgtgcggccactgttgcaaga

SEQ ID NO: 5149323 - DNA, 25 bp, Homo sapien
ctcaaggaaaaacgacaccaagcac

SEQ ID NO: 5149324 - DNA, 25 bp, Homo sapien
aggacgtatttccagacagctatgt

SEQ ID NO: 5149325 - DNA, 25 bp, Homo sapien
gctatgtaaccgcttggcacgacaa

SEQ ID NO: 5149326 - DNA, 25 bp, Homo sapien
gacagctatgtaaccgcttggcacg

SEQ ID NO: 5149327 - DNA, 25 bp, Homo sapien
tatttccagacagctatgtaaccgc

SEQ ID NO: 5149328 - DNA, 25 bp, Homo sapien
ggtgacaacgatgacgaggaaactg

SEQ ID NO: 5149329 - DNA, 25 bp, Homo sapien
ccggtgccgcgcacagcggtaagca

SEQ ID NO: 5149330 - DNA, 25 bp, Homo sapien
gacacctgccaaagccgaggggctt

SEQ ID NO: 5149331 - DNA, 25 bp, Homo sapien
gcggcccctgacgaccgaggtgaca

SEQ ID NO: 5149332 - DNA, 25 bp, Homo sapien
cacttctgcgacgtgactgtgtgca

SEQ ID NO: 5149333 - DNA, 25 bp, Homo sapien
cccttgcatggtacacttgaaatag

SEQ ID NO: 5149334 - DNA, 25 bp, Homo sapien
gctgtgcgccacatacatctgcaga

SEQ ID NO: 5149335 - DNA, 25 bp, Homo sapien
cttgagaccctcaatgggcagaagc

SEQ ID NO: 5149336 - DNA, 25 bp, Homo sapien
cataaatgaaccttgcaaactttga

SEQ ID NO: 5149337 - DNA, 25 bp, Homo sapien
aaccttgcaaactttgatagaagcc

SEQ ID NO: 5149338 - DNA, 25 bp, Homo sapien
agccagtcacataagacccagtgtt

SEQ ID NO: 5149339 - DNA, 25 bp, Homo sapien
aagccagtcacataagacccagtgt

SEQ ID NO: 5149340 - DNA, 25 bp, Homo sapien
gaaaacatgctcaatcttataactc

SEQ ID NO: 5149341 - DNA, 25 bp, Homo sapien
gtcctttgaaaagcagtctggcact

SEQ ID NO: 5149342 - DNA, 25 bp, Homo sapien
gtctggcactttgtcaaaaagtgaa

SEQ ID NO: 5149343 - DNA, 25 bp, Homo sapien
gtggaaactggacccctcgacattg

SEQ ID NO: 5149344 - DNA, 25 bp, Homo sapien
tgtataagaatatgtttgggccggg

SEQ ID NO: 5149345 - DNA, 25 bp, Homo sapien
ggagaacaacgtgggtggattacga

SEQ ID NO: 5149346 - DNA, 25 bp, Homo sapien
taagctgtactttataaaattcaca

SEQ ID NO: 5149347 - DNA, 25 bp, Homo sapien
ttgcaaaccctatatctaagaagag

SEQ ID NO: 5149348 - DNA, 25 bp, Homo sapien
gacactatgtatgagaatttcccct

SEQ ID NO: 5149349 - DNA, 25 bp, Homo sapien
catggacttccactcccaaggtaac

SEQ ID NO: 5149350 - DNA, 25 bp, Homo sapien
tactgtctggacttacagagtgcct

SEQ ID NO: 5149351 - DNA, 25 bp, Homo sapien
tggctgtgactctgaaccacctcca

SEQ ID NO: 5149352 - DNA, 25 bp, Homo sapien
gaggagcccagtatcctggaagagc

SEQ ID NO: 5149353 - DNA, 25 bp, Homo sapien
gaaagaatattgtgagaggagccca

SEQ ID NO: 5149354 - DNA, 25 bp, Homo sapien
tcactacagtggaaagcagtgtcaa

SEQ ID NO: 5149355 - DNA, 25 bp, Homo sapien
gaacatgggctgtccttaatcacca

SEQ ID NO: 5149356 - DNA, 25 bp, Homo sapien
gagatgtcacaacttccttggttta

SEQ ID NO: 5149357 - DNA, 25 bp, Homo sapien
gtttatgtgtataggaaggtatgca

SEQ ID NO: 5149358 - DNA, 25 bp, Homo sapien
tggcccactaaacagagattctgga

SEQ ID NO: 5149359 - DNA, 25 bp, Homo sapien
ggttggctgaaacagaatcagagtt

SEQ ID NO: 5149360 - DNA, 25 bp, Homo sapien
tcaccgtgaaagtattttgtgacat

SEQ ID NO: 5149361 - DNA, 25 bp, Homo sapien
taggtgtcaccgtgaaagtattttg

SEQ ID NO: 5149362 - DNA, 25 bp, Homo sapien
tgttgttacaaatgtgcatgatgca

SEQ ID NO: 5149363 - DNA, 25 bp, Homo sapien
cactaatctaggtgtcaccgtgaaa

SEQ ID NO: 5149364 - DNA, 25 bp, Homo sapien
cctctgatcagtgatgaccttggta

SEQ ID NO: 5149365 - DNA, 25 bp, Homo sapien
tctgatcagtgatgaccttggtatg

SEQ ID NO: 5149366 - DNA, 25 bp, Homo sapien
ggcctctgatcagtgatgaccttgg

SEQ ID NO: 5149367 - DNA, 25 bp, Homo sapien
aggcctctgatcagtgatgaccttg

SEQ ID NO: 5149368 - DNA, 25 bp, Homo sapien
acagcctacgttgagtctatactta

SEQ ID NO: 5149369 - DNA, 25 bp, Homo sapien
tttctaccttcagaagtggctatcc

SEQ ID NO: 5149370 - DNA, 25 bp, Homo sapien
cagcctacgttgagtctatacttac

SEQ ID NO: 5149371 - DNA, 25 bp, Homo sapien
tgcaggttgaccagaactcaccgac

SEQ ID NO: 5149372 - DNA, 25 bp, Homo sapien
ggtaaggagccagttccagacctgg

SEQ ID NO: 5149373 - DNA, 25 bp, Homo sapien
tggccacacaatggtcaagttggat

SEQ ID NO: 5149374 - DNA, 25 bp, Homo sapien
tcctctcccgtgtaagcaaggcaaa

SEQ ID NO: 5149375 - DNA, 25 bp, Homo sapien
tccttatagagaagctcggaacttt

SEQ ID NO: 5149376 - DNA, 25 bp, Homo sapien
gagaagctcggaactttcaatacag

SEQ ID NO: 5149377 - DNA, 25 bp, Homo sapien
tatagagaagctcggaactttcaat

SEQ ID NO: 5149378 - DNA, 25 bp, Homo sapien
gaagctcggaactttcaatacagct

SEQ ID NO: 5149379 - DNA, 25 bp, Homo sapien
tcatcaccagtgatttcttgggccc

SEQ ID NO: 5149380 - DNA, 25 bp, Homo sapien
aacaaacagctacagactcagtggc

SEQ ID NO: 5149381 - DNA, 25 bp, Homo sapien
ctattgctgctgcaacaaacagcta

SEQ ID NO: 5149382 - DNA, 25 bp, Homo sapien
tttcttgggccctgcattagttttc

SEQ ID NO: 5149383 - DNA, 25 bp, Homo sapien
cacttcccccatctcaccacagatc

SEQ ID NO: 5149384 - DNA, 25 bp, Homo sapien
ccacagatccagacctcttgagccc

SEQ ID NO: 5149385 - DNA, 25 bp, Homo sapien
caatcaatacaaaaggatagacaat

SEQ ID NO: 5149386 - DNA, 25 bp, Homo sapien
aaatgaattccccttccactccaga

SEQ ID NO: 5149387 - DNA, 25 bp, Homo sapien
ttcaatcaatacaaaaggatagaca

SEQ ID NO: 5149388 - DNA, 25 bp, Homo sapien
atgaacaaatgaattccccttccac

SEQ ID NO: 5149389 - DNA, 25 bp, Homo sapien
atcagtctcccctggaaggccaaca

SEQ ID NO: 5149390 - DNA, 25 bp, Homo sapien
agtctcccctggaaggccaacagct

SEQ ID NO: 5149391 - DNA, 25 bp, Homo sapien
gtgaggttgatcagtctcccctgga

SEQ ID NO: 5149392 - DNA, 25 bp, Homo sapien
gttgatcagtctcccctggaaggcc

SEQ ID NO: 5149393 - DNA, 25 bp, Homo sapien
tcctctttctctctgtatccccata

SEQ ID NO: 5149394 - DNA, 25 bp, Homo sapien
ctgcacgtcttcctggagtgtctcc

SEQ ID NO: 5149395 - DNA, 25 bp, Homo sapien
gtgtctcctctttctctctgtatcc

SEQ ID NO: 5149396 - DNA, 25 bp, Homo sapien
tctttctctctgtatccccataaat

SEQ ID NO: 5149397 - DNA, 25 bp, Homo sapien
aaaaagtgggtggtgacagggactg

SEQ ID NO: 5149398 - DNA, 25 bp, Homo sapien
cagagggaaaaagtgggtggtgaca

SEQ ID NO: 5149399 - DNA, 25 bp, Homo sapien
tccagagggaaaaagtgggtggtga

SEQ ID NO: 5149400 - DNA, 25 bp, Homo sapien
agtgggtggtgacagggactggaca

SEQ ID NO: 5149401 - DNA, 25 bp, Homo sapien
gcagcggacctccttgcttactttg

SEQ ID NO: 5149402 - DNA, 25 bp, Homo sapien
ctggagcagcggacctccttgctta

SEQ ID NO: 5149403 - DNA, 25 bp, Homo sapien
gcggacctccttgcttactttgaat

SEQ ID NO: 5149404 - DNA, 25 bp, Homo sapien
gagcagcggacctccttgcttactt

SEQ ID NO: 5149405 - DNA, 25 bp, Homo sapien
ccaaagtgctgcttgggctcaaggt

SEQ ID NO: 5149406 - DNA, 25 bp, Homo sapien
gagctgcttcatcgtcccaaaccag

SEQ ID NO: 5149407 - DNA, 25 bp, Homo sapien
cgagctgcttcatcgtcccaaacca

SEQ ID NO: 5149408 - DNA, 25 bp, Homo sapien
ctcaaggttgtaattatttgcagcc

SEQ ID NO: 5149409 - DNA, 25 bp, Homo sapien
gaagccattggcttaaatcagcaaa

SEQ ID NO: 5149410 - DNA, 25 bp, Homo sapien
gactaaattactgggaagtcttatg

SEQ ID NO: 5149411 - DNA, 25 bp, Homo sapien
ttatgataaagaagccattggctta

SEQ ID NO: 5149412 - DNA, 25 bp, Homo sapien
gcaaagcaagccgtcccttggttta

SEQ ID NO: 5149413 - DNA, 25 bp, Homo sapien
ctttggcctggactgtttccccact

SEQ ID NO: 5149414 - DNA, 25 bp, Homo sapien
tggcctggactgtttccccactaag

SEQ ID NO: 5149415 - DNA, 25 bp, Homo sapien
ccactaagggaagccctcaaaggca

SEQ ID NO: 5149416 - DNA, 25 bp, Homo sapien
gggtcatccctttggcctggactgt

SEQ ID NO: 5149417 - DNA, 25 bp, Homo sapien
ttttgaagctccaagaatttgtgtt

SEQ ID NO: 5149418 - DNA, 25 bp, Homo sapien
gtgcacacagatctctcacagcagc

SEQ ID NO: 5149419 - DNA, 25 bp, Homo sapien
gaagcatggagtggccaagcacagc

SEQ ID NO: 5149420 - DNA, 25 bp, Homo sapien
gcaatctgaagtagaacttccatca

SEQ ID NO: 5149421 - DNA, 25 bp, Homo sapien
gatgccacctttttagtgctgagag

SEQ ID NO: 5149422 - DNA, 25 bp, Homo sapien
tgatgccacctttttagtgctgaga

SEQ ID NO: 5149423 - DNA, 25 bp, Homo sapien
ctgatgccacctttttagtgctgag

SEQ ID NO: 5149424 - DNA, 25 bp, Homo sapien
aagggtggcagctgatgcgggagac

SEQ ID NO: 5149425 - DNA, 25 bp, Homo sapien
gtggcagctgatgcgggagacgaca

SEQ ID NO: 5149426 - DNA, 25 bp, Homo sapien
gagaagccggggttcctttgatgct

SEQ ID NO: 5149427 - DNA, 25 bp, Homo sapien
gaagccggggttcctttgatgctgt

SEQ ID NO: 5149428 - DNA, 25 bp, Homo sapien
cagaggcagcaggtacgaccgtggc

SEQ ID NO: 5149429 - DNA, 25 bp, Homo sapien
aggcagcaggtacgaccgtggcttt

SEQ ID NO: 5149430 - DNA, 25 bp, Homo sapien
cagcaggtacgaccgtggctttcac

SEQ ID NO: 5149431 - DNA, 25 bp, Homo sapien
gcagcaggtacgaccgtggctttca

SEQ ID NO: 5149432 - DNA, 25 bp, Homo sapien
gccaggctggatgctggcatcatga

SEQ ID NO: 5149433 - DNA, 25 bp, Homo sapien
ctggcatcatgacagtttgctgctg

SEQ ID NO: 5149434 - DNA, 25 bp, Homo sapien
gcattggcagctttaatgatggtgc

SEQ ID NO: 5149435 - DNA, 25 bp, Homo sapien
gctggatgctggcatcatgacagtt

SEQ ID NO: 5149436 - DNA, 25 bp, Homo sapien
taaggttggcaagatgcagtctttg

SEQ ID NO: 5149437 - DNA, 25 bp, Homo sapien
gttggcaagatgcagtctttggcac

SEQ ID NO: 5149438 - DNA, 25 bp, Homo sapien
aggttggcaagatgcagtctttggc

SEQ ID NO: 5149439 - DNA, 25 bp, Homo sapien
ttaaggttggcaagatgcagtcttt

SEQ ID NO: 5149440 - DNA, 25 bp, Homo sapien
tgattgacacttggcagagttcaga

SEQ ID NO: 5149441 - DNA, 25 bp, Homo sapien
tgcattaattattgccttctttatc

SEQ ID NO: 5149442 - DNA, 25 bp, Homo sapien
attgacacttggcagagttcagagg

SEQ ID NO: 5149443 - DNA, 25 bp, Homo sapien
tttgattgacacttggcagagttca

SEQ ID NO: 5149444 - DNA, 25 bp, Homo sapien
catcagtaatgtgatccctgcattg

SEQ ID NO: 5149445 - DNA, 25 bp, Homo sapien
cttatgcccacgggcatgggaaagg

SEQ ID NO: 5149446 - DNA, 25 bp, Homo sapien
tatgcccacgggcatgggaaaggag

SEQ ID NO: 5149447 - DNA, 25 bp, Homo sapien
atgcccacgggcatgggaaaggagg

SEQ ID NO: 5149448 - DNA, 25 bp, Homo sapien
ttatgcccacgggcatgggaaagga

SEQ ID NO: 5149449 - DNA, 25 bp, Homo sapien
agaagaagtattggttgatggagaa

SEQ ID NO: 5149450 - DNA, 25 bp, Homo sapien
gatgaagaagaagtattggttgatg

SEQ ID NO: 5149451 - DNA, 25 bp, Homo sapien
tgaagaagaagtattggttgatgga

SEQ ID NO: 5149452 - DNA, 25 bp, Homo sapien
ctgatgaagaagaagtattggttga

SEQ ID NO: 5149453 - DNA, 25 bp, Homo sapien
cagcatctggcagatagtacaagtc

SEQ ID NO: 5149454 - DNA, 25 bp, Homo sapien
catctggcagatagtacaagtcttt

SEQ ID NO: 5149455 - DNA, 25 bp, Homo sapien
gcatctggcagatagtacaagtctt

SEQ ID NO: 5149456 - DNA, 25 bp, Homo sapien
agcagcatctggcagatagtacaag

SEQ ID NO: 5149457 - DNA, 25 bp, Homo sapien
ctgcactcagggcaggtgtaaggag

SEQ ID NO: 5149458 - DNA, 25 bp, Homo sapien
actcagggcaggtgtaaggagattt

SEQ ID NO: 5149459 - DNA, 25 bp, Homo sapien
ggccctgcactcagggcaggtgtaa

SEQ ID NO: 5149460 - DNA, 25 bp, Homo sapien
cactcagggcaggtgtaaggagatt

SEQ ID NO: 5149461 - DNA, 25 bp, Homo sapien
caacattgcaacgtacacatcaaaa

SEQ ID NO: 5149462 - DNA, 25 bp, Homo sapien
cattgcaacgtacacatcaaaaacc

SEQ ID NO: 5149463 - DNA, 25 bp, Homo sapien
acacaacattgcaacgtacacatca

SEQ ID NO: 5149464 - DNA, 25 bp, Homo sapien
gcaacgtacacatcaaaaaccaact

SEQ ID NO: 5149465 - DNA, 25 bp, Homo sapien
ttgtagaagacttcacagtgagaac

SEQ ID NO: 5149466 - DNA, 25 bp, Homo sapien
cagcaaggtttgcagggtgaacaca

SEQ ID NO: 5149467 - DNA, 25 bp, Homo sapien
cattggacaaataggacacttgtag

SEQ ID NO: 5149468 - DNA, 25 bp, Homo sapien
ggtcaaagtggcgatacagcaaggt

SEQ ID NO: 5149469 - DNA, 25 bp, Homo sapien
gaacagtctggacacctgagaacag

SEQ ID NO: 5149470 - DNA, 25 bp, Homo sapien
aaagagaacagtctggacacctgag

SEQ ID NO: 5149471 - DNA, 25 bp, Homo sapien
gagaacagtctggacacctgagaac

SEQ ID NO: 5149472 - DNA, 25 bp, Homo sapien
gttgcttctgtgcatataaaagaga

SEQ ID NO: 5149473 - DNA, 25 bp, Homo sapien
tcccaacatgtccacccaggactgg

SEQ ID NO: 5149474 - DNA, 25 bp, Homo sapien
gaacaggcggtcacactcccaacat

SEQ ID NO: 5149475 - DNA, 25 bp, Homo sapien
ggcggtcacactcccaacatgtcca

SEQ ID NO: 5149476 - DNA, 25 bp, Homo sapien
atgtccacccaggactggccacttt

SEQ ID NO: 5149477 - DNA, 25 bp, Homo sapien
tccttcctgacgtgggatatgtaca

SEQ ID NO: 5149478 - DNA, 25 bp, Homo sapien
ccatgctccttcctgacgtgggata

SEQ ID NO: 5149479 - DNA, 25 bp, Homo sapien
tgctccttcctgacgtgggatatgt

SEQ ID NO: 5149480 - DNA, 25 bp, Homo sapien
ccttcctgacgtgggatatgtacac

SEQ ID NO: 5149481 - DNA, 25 bp, Homo sapien
tcacgctggcagcagggttgtttct

SEQ ID NO: 5149482 - DNA, 25 bp, Homo sapien
cacgctggcagcagggttgtttctt

SEQ ID NO: 5149483 - DNA, 25 bp, Homo sapien
acgctggcagcagggttgtttcttc

SEQ ID NO: 5149484 - DNA, 25 bp, Homo sapien
ctgagcagtgtgaacaggtgtacac

SEQ ID NO: 5149485 - DNA, 25 bp, Homo sapien
gtctgagcagtgtgaacaggtgtac

SEQ ID NO: 5149486 - DNA, 25 bp, Homo sapien
ggtaaaggtacctctagagtctgag

SEQ ID NO: 5149487 - DNA, 25 bp, Homo sapien
cttctccaacatcaactgtttggta

SEQ ID NO: 5149488 - DNA, 25 bp, Homo sapien
gaggcctgaactccagaaccggttc

SEQ ID NO: 5149489 - DNA, 25 bp, Homo sapien
ttttcagctttggttgagtgattgc

SEQ ID NO: 5149490 - DNA, 25 bp, Homo sapien
gattttcagctttggttgagtgatt

SEQ ID NO: 5149491 - DNA, 25 bp, Homo sapien
ttgattttcagctttggttgagtga

SEQ ID NO: 5149492 - DNA, 25 bp, Homo sapien
ggcactggtagaaagaaccatccga

SEQ ID NO: 5149493 - DNA, 25 bp, Homo sapien
ccggcactggtagaaagaaccatcc

SEQ ID NO: 5149494 - DNA, 25 bp, Homo sapien
gcactggtagaaagaaccatccgat

SEQ ID NO: 5149495 - DNA, 25 bp, Homo sapien
tcccggcactggtagaaagaaccat

SEQ ID NO: 5149496 - DNA, 25 bp, Homo sapien
cgttttgcttggacactggctgagg

SEQ ID NO: 5149497 - DNA, 25 bp, Homo sapien
cagccccgttttgcttggacactgg

SEQ ID NO: 5149498 - DNA, 25 bp, Homo sapien
ctttaacttgtgtacaacaaagagg

SEQ ID NO: 5149499 - DNA, 25 bp, Homo sapien
tccccagccccgttttgcttggaca

SEQ ID NO: 5149500 - DNA, 25 bp, Homo sapien
ccattgggagattcatcctcgtgac

SEQ ID NO: 5149501 - DNA, 25 bp, Homo sapien
tctgtctgacatggcgccattggga

SEQ ID NO: 5149502 - DNA, 25 bp, Homo sapien
gatgaaggccataccatgtgtctgc

SEQ ID NO: 5149503 - DNA, 25 bp, Homo sapien
gggagattcatcctcgtgactgggt

SEQ ID NO: 5149504 - DNA, 25 bp, Homo sapien
atatattgcaacagcctagacagta

SEQ ID NO: 5149505 - DNA, 25 bp, Homo sapien
aatatattgcaacagcctagacagt

SEQ ID NO: 5149506 - DNA, 25 bp, Homo sapien
gaatatattgcaacagcctagacag

SEQ ID NO: 5149507 - DNA, 25 bp, Homo sapien
atttgaattcaggaactgcccctgt

SEQ ID NO: 5149508 - DNA, 25 bp, Homo sapien
tagcctgtaattagttaacccattc

SEQ ID NO: 5149509 - DNA, 25 bp, Homo sapien
gaactgcccctgttactaagaactc

SEQ ID NO: 5149510 - DNA, 25 bp, Homo sapien
ctaaaaaaggcattattttagcctg

SEQ ID NO: 5149511 - DNA, 25 bp, Homo sapien
cctctaagcaccagaacgtttggca

SEQ ID NO: 5149512 - DNA, 25 bp, Homo sapien
ggtaacggccaattgtgacacacag

SEQ ID NO: 5149513 - DNA, 25 bp, Homo sapien
cagaactgccgacgttaaatgtacc

SEQ ID NO: 5149514 - DNA, 25 bp, Homo sapien
tcggtggttgacgtcgtgcatccca

SEQ ID NO: 5149515 - DNA, 25 bp, Homo sapien
gtcccacgtttatttacatatgaaa

SEQ ID NO: 5149516 - DNA, 25 bp, Homo sapien
aatgtcccacgtttatttacatatg

SEQ ID NO: 5149517 - DNA, 25 bp, Homo sapien
caaatgtcccacgtttatttacata

SEQ ID NO: 5149518 - DNA, 25 bp, Homo sapien
tgtcccacgtttatttacatatgaa

SEQ ID NO: 5149519 - DNA, 25 bp, Homo sapien
tgaggtcactcatcccaataaaggc

SEQ ID NO: 5149520 - DNA, 25 bp, Homo sapien
cacctttccacaggatgggcaagtc

SEQ ID NO: 5149521 - DNA, 25 bp, Homo sapien
taaaggcatccatgtgactgcggga

SEQ ID NO: 5149522 - DNA, 25 bp, Homo sapien
gcgagctctgctcccttattctggg

SEQ ID NO: 5149523 - DNA, 25 bp, Homo sapien
tcgccattgcagacccactgttgac

SEQ ID NO: 5149524 - DNA, 25 bp, Homo sapien
cactgcggatcgtccccattgcaga

SEQ ID NO: 5149525 - DNA, 25 bp, Homo sapien
gctcccgatgctgatcgtcgccatt

SEQ ID NO: 5149526 - DNA, 25 bp, Homo sapien
ctgtcgatctggcagggtgttcgct

SEQ ID NO: 5149527 - DNA, 25 bp, Homo sapien
ctggcttagatctgacatgccgaag

SEQ ID NO: 5149528 - DNA, 25 bp, Homo sapien
gaggttgcattctggcttagatctg

SEQ ID NO: 5149529 - DNA, 25 bp, Homo sapien
attctggcttagatctgacatgccg

SEQ ID NO: 5149530 - DNA, 25 bp, Homo sapien
tgactgaggaggttgcattctggct

SEQ ID NO: 5149531 - DNA, 25 bp, Homo sapien
tctgttgacccagacgaatagggca

SEQ ID NO: 5149532 - DNA, 25 bp, Homo sapien
tagggcacagccctgtaactgcacg

SEQ ID NO: 5149533 - DNA, 25 bp, Homo sapien
tgcacgtgccttctgtcattgggaa

SEQ ID NO: 5149534 - DNA, 25 bp, Homo sapien
gacctcaacgggcaaagttgtgcac

SEQ ID NO: 5149535 - DNA, 25 bp, Homo sapien
agccaagaggttctgcttccccgag

SEQ ID NO: 5149536 - DNA, 25 bp, Homo sapien
taaacgtgaacagggtcctacattc

SEQ ID NO: 5149537 - DNA, 25 bp, Homo sapien
gactggctgattgggtctcattctg

SEQ ID NO: 5149538 - DNA, 25 bp, Homo sapien
tagcacactgggtacactggtctgt

SEQ ID NO: 5149539 - DNA, 25 bp, Homo sapien
ttgcatgaagtacctttttccaccc

SEQ ID NO: 5149540 - DNA, 25 bp, Homo sapien
tgcatgaagtacctttttccaccct

SEQ ID NO: 5149541 - DNA, 25 bp, Homo sapien
tcttatccattctgtggttttgtgt

SEQ ID NO: 5149542 - DNA, 25 bp, Homo sapien
atccattctgtggttttgtgtcttt

SEQ ID NO: 5149543 - DNA, 25 bp, Homo sapien
tcattgatcctgctttcctatcatt

SEQ ID NO: 5149544 - DNA, 25 bp, Homo sapien
cacttgaggacttggaaacattctc

SEQ ID NO: 5149545 - DNA, 25 bp, Homo sapien
ttactattcgaaaaatcctgaaagc

SEQ ID NO: 5149546 - DNA, 25 bp, Homo sapien
tcctatcatttgagtggaaacagat

SEQ ID NO: 5149547 - DNA, 25 bp, Homo sapien
tatcgtaagactccacggcagagga

SEQ ID NO: 5149548 - DNA, 25 bp, Homo sapien
tggtgattgtatcgtaagactccac

SEQ ID NO: 5149549 - DNA, 25 bp, Homo sapien
taccagttgggtctgccgctagtgc

SEQ ID NO: 5149550 - DNA, 25 bp, Homo sapien
caggctggttggtgattgtatcgta

SEQ ID NO: 5149551 - DNA, 25 bp, Homo sapien
taatcacaccagattcattgtcgat

SEQ ID NO: 5149552 - DNA, 25 bp, Homo sapien
tcacaccagattcattgtcgatcat

SEQ ID NO: 5149553 - DNA, 25 bp, Homo sapien
tttaatcacaccagattcattgtcg

SEQ ID NO: 5149554 - DNA, 25 bp, Homo sapien
atcacaccagattcattgtcgatca

SEQ ID NO: 5149555 - DNA, 25 bp, Homo sapien
tatgcatgggtaggcccacatactt

SEQ ID NO: 5149556 - DNA, 25 bp, Homo sapien
tgatacgaatatgcatgggtaggcc

SEQ ID NO: 5149557 - DNA, 25 bp, Homo sapien
atgggtaggcccacatactttggaa

SEQ ID NO: 5149558 - DNA, 25 bp, Homo sapien
gctcctgccatgatacgaatatgca

SEQ ID NO: 5149559 - DNA, 25 bp, Homo sapien
tccgtgagatagcagattgagagca

SEQ ID NO: 5149560 - DNA, 25 bp, Homo sapien
tgccatgctccgtgagatagcagat

SEQ ID NO: 5149561 - DNA, 25 bp, Homo sapien
catgctccgtgagatagcagattga

SEQ ID NO: 5149562 - DNA, 25 bp, Homo sapien
gatagcagattgagagcagcccttg

SEQ ID NO: 5149563 - DNA, 25 bp, Homo sapien
ctttgtgggtttaaaggtgcctcag

SEQ ID NO: 5149564 - DNA, 25 bp, Homo sapien
ttaaaggtgcctcagtgaggagcac

SEQ ID NO: 5149565 - DNA, 25 bp, Homo sapien
gtttaaaggtgcctcagtgaggagc

SEQ ID NO: 5149566 - DNA, 25 bp, Homo sapien
gggtttaaaggtgcctcagtgagga

SEQ ID NO: 5149567 - DNA, 25 bp, Homo sapien
gctcttgaagaaaacgttggcagct

SEQ ID NO: 5149568 - DNA, 25 bp, Homo sapien
agctcttgaagaaaacgttggcagc

SEQ ID NO: 5149569 - DNA, 25 bp, Homo sapien
acatggagatgaaaatagcaggcac

SEQ ID NO: 5149570 - DNA, 25 bp, Homo sapien
ttacatggagatgaaaatagcaggc

SEQ ID NO: 5149571 - DNA, 25 bp, Homo sapien
tacatggagatgaaaatagcaggca

SEQ ID NO: 5149572 - DNA, 25 bp, Homo sapien
cttacatggagatgaaaatagcagg

SEQ ID NO: 5149573 - DNA, 25 bp, Homo sapien
tctcaaacgatgagtggaaatcata

SEQ ID NO: 5149574 - DNA, 25 bp, Homo sapien
tcaaaggatgagtggaaatctcaaa

SEQ ID NO: 5149575 - DNA, 25 bp, Homo sapien
ttgcgatgtcaattcgcatgatgga

SEQ ID NO: 5149576 - DNA, 25 bp, Homo sapien
gaagcgagagatgttccagcttgcg

SEQ ID NO: 5149577 - DNA, 25 bp, Homo sapien
cttttatggccttgacaatctcaaa

SEQ ID NO: 5149578 - DNA, 25 bp, Homo sapien
ctgggggtttatggataggtaggag

SEQ ID NO: 5149579 - DNA, 25 bp, Homo sapien
aagtgtgaactgcaggtccatgtct

SEQ ID NO: 5149580 - DNA, 25 bp, Homo sapien
agccttctctgtctctagtgtctct

SEQ ID NO: 5149581 - DNA, 25 bp, Homo sapien
gaacaaggtagagcctcccaagagg

SEQ ID NO: 5149582 - DNA, 25 bp, Homo sapien
ttgaacaaggtagagcctcccaaga

SEQ ID NO: 5149583 - DNA, 25 bp, Homo sapien
tctcctgaggtgcaaatatcctgat

SEQ ID NO: 5149584 - DNA, 25 bp, Homo sapien
atagagccctcaatccacgtggaat

SEQ ID NO: 5149585 - DNA, 25 bp, Homo sapien
caggcaattcctcacaaacactctg

SEQ ID NO: 5149586 - DNA, 25 bp, Homo sapien
tttcctgtggatagatcaggcaccg

SEQ ID NO: 5149587 - DNA, 25 bp, Homo sapien
ggcaattcctcacaaacactctgac

SEQ ID NO: 5149588 - DNA, 25 bp, Homo sapien
cctgtggatagatcaggcaccgtct

SEQ ID NO: 5149589 - DNA, 25 bp, Homo sapien
aggccctgcggcgccgcaatcagga

SEQ ID NO: 5149590 - DNA, 25 bp, Homo sapien
tggagcaatcagagcaccgcagcca

SEQ ID NO: 5149591 - DNA, 25 bp, Homo sapien
tgctggcgagacgacagcgagatcc

SEQ ID NO: 5149592 - DNA, 25 bp, Homo sapien
cggttggtttccctggcaactggag

SEQ ID NO: 5149593 - DNA, 25 bp, Homo sapien
agtgagcctctagcccaatcgggag

SEQ ID NO: 5149594 - DNA, 25 bp, Homo sapien
tcttttgttgcaccaaagcctcggg

SEQ ID NO: 5149595 - DNA, 25 bp, Homo sapien
gcttgattagaacgaatccgggcac

SEQ ID NO: 5149596 - DNA, 25 bp, Homo sapien
gagctggtcccctttatcgtggcaa

SEQ ID NO: 5149597 - DNA, 25 bp, Homo sapien
agcaaccaggagagggaccaggccc

SEQ ID NO: 5149598 - DNA, 25 bp, Homo sapien
gcagtggcagcaaccaggagaggga

SEQ ID NO: 5149599 - DNA, 25 bp, Homo sapien
gcagcaaccaggagagggaccaggc

SEQ ID NO: 5149600 - DNA, 25 bp, Homo sapien
ctgcagtggcagcaaccaggagagg

SEQ ID NO: 5149601 - DNA, 25 bp, Homo sapien
gtgacttcagcccaacactgcaatt

SEQ ID NO: 5149602 - DNA, 25 bp, Homo sapien
tgaagagcctgtatgagagccctgc

SEQ ID NO: 5149603 - DNA, 25 bp, Homo sapien
gcaattcgtgacagctgtaacagca

SEQ ID NO: 5149604 - DNA, 25 bp, Homo sapien
catctccattggtgtgacttcagcc

SEQ ID NO: 5149605 - DNA, 25 bp, Homo sapien
ggcacaggcagtggctgtcagctcc

SEQ ID NO: 5149606 - DNA, 25 bp, Homo sapien
acaggcagtggctgtcagctccacc

SEQ ID NO: 5149607 - DNA, 25 bp, Homo sapien
ctgccaggcagacaacaaggcacag

SEQ ID NO: 5149608 - DNA, 25 bp, Homo sapien
tgccaggcagacaacaaggcacagg

SEQ ID NO: 5149609 - DNA, 25 bp, Homo sapien
aggttgctcccagccatggagtgct

SEQ ID NO: 5149610 - DNA, 25 bp, Homo sapien
ttgctcccagccatggagtgctggc

SEQ ID NO: 5149611 - DNA, 25 bp, Homo sapien
gggcactgcaggttgctcccagcca

SEQ ID NO: 5149612 - DNA, 25 bp, Homo sapien
gggggcactgcaggttgctcccagc

SEQ ID NO: 5149613 - DNA, 25 bp, Homo sapien
gggtcatgggcagagggatgaactc

SEQ ID NO: 5149614 - DNA, 25 bp, Homo sapien
actccttcatctggtccaagggtgg

SEQ ID NO: 5149615 - DNA, 25 bp, Homo sapien
caggtggaggggtcggagcagtggg

SEQ ID NO: 5149616 - DNA, 25 bp, Homo sapien
ggatgaactccttcatctggtccaa

SEQ ID NO: 5149617 - DNA, 25 bp, Homo sapien
tgagttctgggagccgactgcaggt

SEQ ID NO: 5149618 - DNA, 25 bp, Homo sapien
ctgcctgtgaagtagtgcagagagc

SEQ ID NO: 5149619 - DNA, 25 bp, Homo sapien
gcctgtgaagtagtgcagagagcac

SEQ ID NO: 5149620 - DNA, 25 bp, Homo sapien
tctgcctgtgaagtagtgcagagag

SEQ ID NO: 5149621 - DNA, 25 bp, Homo sapien
tgcctgtgaagtagtgcagagagca

SEQ ID NO: 5149622 - DNA, 25 bp, Homo sapien
gctcttgtctccgaggtgaggtgtt

SEQ ID NO: 5149623 - DNA, 25 bp, Homo sapien
acaaagctcttgtctccgaggtgag

SEQ ID NO: 5149624 - DNA, 25 bp, Homo sapien
gagaaatgacaaagctcttgtctcc

SEQ ID NO: 5149625 - DNA, 25 bp, Homo sapien
tgtctccgaggtgaggtgttccatg

SEQ ID NO: 5149626 - DNA, 25 bp, Homo sapien
tgcacccacttctaagaacacaggc

SEQ ID NO: 5149627 - DNA, 25 bp, Homo sapien
caacggtggggccgtggaacactca

SEQ ID NO: 5149628 - DNA, 25 bp, Homo sapien
ggtggggccgtggaacactcaggag

SEQ ID NO: 5149629 - DNA, 25 bp, Homo sapien
taagaacacaggcaacggtggggcc

SEQ ID NO: 5149630 - DNA, 25 bp, Homo sapien
ttctggggggtctgcaccatgcagg

SEQ ID NO: 5149631 - DNA, 25 bp, Homo sapien
tgcagggtgaggctgggtcccaccc

SEQ ID NO: 5149632 - DNA, 25 bp, Homo sapien
aagcctggcacctggagtggcttct

SEQ ID NO: 5149633 - DNA, 25 bp, Homo sapien
gtcccaccccgggcccatgtgccat

SEQ ID NO: 5149634 - DNA, 25 bp, Homo sapien
tgtccttgaagtttccggcatggcg

SEQ ID NO: 5149635 - DNA, 25 bp, Homo sapien
ctgctgagcagaagctggtgtcctg

SEQ ID NO: 5149636 - DNA, 25 bp, Homo sapien
catggcgtggcacaaaggcagcacc

SEQ ID NO: 5149637 - DNA, 25 bp, Homo sapien
ccatatgggtggaagtagcctgtga

SEQ ID NO: 5149638 - DNA, 25 bp, Homo sapien
tcagcttctgttagcgtttgataag

SEQ ID NO: 5149639 - DNA, 25 bp, Homo sapien
cagagtcaaggccactcttcctgtc

SEQ ID NO: 5149640 - DNA, 25 bp, Homo sapien
gtcagtcccttaacatcagcttctg

SEQ ID NO: 5149641 - DNA, 25 bp, Homo sapien
taagcaccaatcagcaaggtcagag

SEQ ID NO: 5149642 - DNA, 25 bp, Homo sapien
gggcagacctcacactgcgatgggt

SEQ ID NO: 5149643 - DNA, 25 bp, Homo sapien
caggacaggctagtccctcggggca

SEQ ID NO: 5149644 - DNA, 25 bp, Homo sapien
gtcattgcggttgctaaaggtccca

SEQ ID NO: 5149645 - DNA, 25 bp, Homo sapien
ttgcggttgctaaaggtcccaggag

SEQ ID NO: 5149646 - DNA, 25 bp, Homo sapien
tagggcagacagtcctcgagctggc

SEQ ID NO: 5149647 - DNA, 25 bp, Homo sapien
ctcgagctggccgttgcctgcctgg

SEQ ID NO: 5149648 - DNA, 25 bp, Homo sapien
ggcaggggaactgtgtcctccactt

SEQ ID NO: 5149649 - DNA, 25 bp, Homo sapien
agacagtcctcgagctggccgttgc

SEQ ID NO: 5149650 - DNA, 25 bp, Homo sapien
ctgcatggtcgtggcgtggtggtgc

SEQ ID NO: 5149651 - DNA, 25 bp, Homo sapien
tcgtggcgtggtggtgcctctctca

SEQ ID NO: 5149652 - DNA, 25 bp, Homo sapien
tgccagtgctgcatggtcgtggcgt

SEQ ID NO: 5149653 - DNA, 25 bp, Homo sapien
tgctggaccttggcagtacgttcct

SEQ ID NO: 5149654 - DNA, 25 bp, Homo sapien
taaaatggaagtgtgctgccttcat

SEQ ID NO: 5149655 - DNA, 25 bp, Homo sapien
ggtaaaatggaagtgtgctgccttc

SEQ ID NO: 5149656 - DNA, 25 bp, Homo sapien
ggaggtaaaatggaagtgtgctgcc

SEQ ID NO: 5149657 - DNA, 25 bp, Homo sapien
tgctgccttcatcacccatagctcc

SEQ ID NO: 5149658 - DNA, 25 bp, Homo sapien
ctatgaggaaggcggatgccacaga

SEQ ID NO: 5149659 - DNA, 25 bp, Homo sapien
aggaaggcggatgccacagaaccag

SEQ ID NO: 5149660 - DNA, 25 bp, Homo sapien
tgaggaaggcggatgccacagaacc

SEQ ID NO: 5149661 - DNA, 25 bp, Homo sapien
aaggcggatgccacagaaccaggga

SEQ ID NO: 5149662 - DNA, 25 bp, Homo sapien
cctggtgcacgacaggtactgagga

SEQ ID NO: 5149663 - DNA, 25 bp, Homo sapien
ggcctggtgcacgacaggtactgag

SEQ ID NO: 5149664 - DNA, 25 bp, Homo sapien
gtgggcctggtgcacgacaggtact

SEQ ID NO: 5149665 - DNA, 25 bp, Homo sapien
tggtgcacgacaggtactgaggaaa

SEQ ID NO: 5149666 - DNA, 25 bp, Homo sapien
ctgggcagatagagggatgtcacca

SEQ ID NO: 5149667 - DNA, 25 bp, Homo sapien
gcagatagagggatgtcaccagggt

SEQ ID NO: 5149668 - DNA, 25 bp, Homo sapien
cagatagagggatgtcaccagggtc

SEQ ID NO: 5149669 - DNA, 25 bp, Homo sapien
atagagggatgtcaccagggtcaag

SEQ ID NO: 5149670 - DNA, 25 bp, Homo sapien
ggccagctttgccacagaatgcccc

SEQ ID NO: 5149671 - DNA, 25 bp, Homo sapien
tttgccacagaatgcccccaggtgg

SEQ ID NO: 5149672 - DNA, 25 bp, Homo sapien
ggcatggctggcagtattccacacg

SEQ ID NO: 5149673 - DNA, 25 bp, Homo sapien
atggctggcagtattccacacgggc

SEQ ID NO: 5149674 - DNA, 25 bp, Homo sapien
cagggcagaaatgacccgggggaca

SEQ ID NO: 5149675 - DNA, 25 bp, Homo sapien
tgcattccaggtgccagccgggcag

SEQ ID NO: 5149676 - DNA, 25 bp, Homo sapien
cgaggcaggcaccagcttatgtcct

SEQ ID NO: 5149677 - DNA, 25 bp, Homo sapien
gcaggcaccagcttatgtcctgtgc

SEQ ID NO: 5149678 - DNA, 25 bp, Homo sapien
tgcatacgggcccccaggggcagcc

SEQ ID NO: 5149679 - DNA, 25 bp, Homo sapien
tacgggcccccaggggcagcctggc

SEQ ID NO: 5149680 - DNA, 25 bp, Homo sapien
gtggtgcatacgggcccccaggggc

SEQ ID NO: 5149681 - DNA, 25 bp, Homo sapien
catacgggcccccaggggcagcctg

SEQ ID NO: 5149682 - DNA, 25 bp, Homo sapien
cggctgtacccgtgactgctgtggt

SEQ ID NO: 5149683 - DNA, 25 bp, Homo sapien
ttcccatgcacgaggctccggctgt

SEQ ID NO: 5149684 - DNA, 25 bp, Homo sapien
tggaggtgccccagtaagctcataa

SEQ ID NO: 5149685 - DNA, 25 bp, Homo sapien
agggaagcaccaggccggcctgctc

SEQ ID NO: 5149686 - DNA, 25 bp, Homo sapien
tgtgccgtagctgtgctccccgtct

SEQ ID NO: 5149687 - DNA, 25 bp, Homo sapien
agggagccctcgaagtgtccccaca

SEQ ID NO: 5149688 - DNA, 25 bp, Homo sapien
gctgtgctccccgtcttgccgaggt

SEQ ID NO: 5149689 - DNA, 25 bp, Homo sapien
ccgtcttgccgaggtgtggccgcca

SEQ ID NO: 5149690 - DNA, 25 bp, Homo sapien
ctggcttcggtcctcccagggactg

SEQ ID NO: 5149691 - DNA, 25 bp, Homo sapien
cagctgtgggcctggcttcggtcct

SEQ ID NO: 5149692 - DNA, 25 bp, Homo sapien
ggacatggcgggcagctgtgggcct

SEQ ID NO: 5149693 - DNA, 25 bp, Homo sapien
ctgcaggacatggcgggcagctgtg

SEQ ID NO: 5149694 - DNA, 25 bp, Homo sapien
ttctctgttatgccctccgtccctg

SEQ ID NO: 5149695 - DNA, 25 bp, Homo sapien
ctctgttatgccctccgtccctgcc

SEQ ID NO: 5149696 - DNA, 25 bp, Homo sapien
tctgttatgccctccgtccctgccg

SEQ ID NO: 5149697 - DNA, 25 bp, Homo sapien
tttctctgttatgccctccgtccct

SEQ ID NO: 5149698 - DNA, 25 bp, Homo sapien
gagaaggtgcccatagggcagggca

SEQ ID NO: 5149699 - DNA, 25 bp, Homo sapien
agaaggtgcccatagggcagggcag

SEQ ID NO: 5149700 - DNA, 25 bp, Homo sapien
ggccctcagagaccatggagagaaa

SEQ ID NO: 5149701 - DNA, 25 bp, Homo sapien
aggccctcagagaccatggagagaa

SEQ ID NO: 5149702 - DNA, 25 bp, Homo sapien
cctcagagaccatggagagaaacat

SEQ ID NO: 5149703 - DNA, 25 bp, Homo sapien
cagacagaagtagccgggggagcag

SEQ ID NO: 5149704 - DNA, 25 bp, Homo sapien
catggggcaccattcggtgtccact

SEQ ID NO: 5149705 - DNA, 25 bp, Homo sapien
cccatggggcaccattcggtgtcca

SEQ ID NO: 5149706 - DNA, 25 bp, Homo sapien
tggggcaccattcggtgtccactga

SEQ ID NO: 5149707 - DNA, 25 bp, Homo sapien
ggcccatggggcaccattcggtgtc

SEQ ID NO: 5149708 - DNA, 25 bp, Homo sapien
tccatctgagagctgaactcgctcc

SEQ ID NO: 5149709 - DNA, 25 bp, Homo sapien
ctgagttgtactaagccaggccagc

SEQ ID NO: 5149710 - DNA, 25 bp, Homo sapien
tcatccatgatgccccagaactcaa

SEQ ID NO: 5149711 - DNA, 25 bp, Homo sapien
gctgaactcgctcctccaatgttct

SEQ ID NO: 5149712 - DNA, 25 bp, Homo sapien
gaggctggttcccctggggcagaag

SEQ ID NO: 5149713 - DNA, 25 bp, Homo sapien
ctgtaggagccggcagggcagggct

SEQ ID NO: 5149714 - DNA, 25 bp, Homo sapien
tgtaggagccggcagggcagggctg

SEQ ID NO: 5149715 - DNA, 25 bp, Homo sapien
cagaagtggcctcggggacaggggc

SEQ ID NO: 5149716 - DNA, 25 bp, Homo sapien
acgttctcggggcagtagtagccag

SEQ ID NO: 5149717 - DNA, 25 bp, Homo sapien
agttggtgacgttctcggggcagta

SEQ ID NO: 5149718 - DNA, 25 bp, Homo sapien
gcagtagtagccagtggggcaaggg

SEQ ID NO: 5149719 - DNA, 25 bp, Homo sapien
tggtgacgttctcggggcagtagta

SEQ ID NO: 5149720 - DNA, 25 bp, Homo sapien
tcggggcagtagaagccagcgggac

SEQ ID NO: 5149721 - DNA, 25 bp, Homo sapien
ctcggggcagtagaagccagcggga

SEQ ID NO: 5149722 - DNA, 25 bp, Homo sapien
gcccagcttgctggttcctgaaggc

SEQ ID NO: 5149723 - DNA, 25 bp, Homo sapien
gggtcgtagtagctccgagggcagg

SEQ ID NO: 5149724 - DNA, 25 bp, Homo sapien
tctgggtcgtagtagctccgagggc

SEQ ID NO: 5149725 - DNA, 25 bp, Homo sapien
gagggcaggggaactgggtggcgta

SEQ ID NO: 5149726 - DNA, 25 bp, Homo sapien
cagtgggtctgggtcgtagtagctc

SEQ ID NO: 5149727 - DNA, 25 bp, Homo sapien
ctgccgcacaaggcccagaggcccg

SEQ ID NO: 5149728 - DNA, 25 bp, Homo sapien
gcacaaggcccagaggcccgggtca

SEQ ID NO: 5149729 - DNA, 25 bp, Homo sapien
tgccgcacaaggcccagaggcccgg

SEQ ID NO: 5149730 - DNA, 25 bp, Homo sapien
caaggcccagaggcccgggtcaggt

SEQ ID NO: 5149731 - DNA, 25 bp, Homo sapien
gagatagtctggatgaccccaggtc

SEQ ID NO: 5149732 - DNA, 25 bp, Homo sapien
gctgctccaggagatagtctggatg

SEQ ID NO: 5149733 - DNA, 25 bp, Homo sapien
cagaaatgggaagtgcagagatgga

SEQ ID NO: 5149734 - DNA, 25 bp, Homo sapien
caggagatagtctggatgaccccag

SEQ ID NO: 5149735 - DNA, 25 bp, Homo sapien
ttggtgctggtgtagttgtccaggt

SEQ ID NO: 5149736 - DNA, 25 bp, Homo sapien
tgggcacaggcaattggtgctggtg

SEQ ID NO: 5149737 - DNA, 25 bp, Homo sapien
attggtgctggtgtagttgtccagg

SEQ ID NO: 5149738 - DNA, 25 bp, Homo sapien
ggctgggcacaggcaattggtgctg

SEQ ID NO: 5149739 - DNA, 25 bp, Homo sapien
gcacaggtgcaagccggaggaatca

SEQ ID NO: 5149740 - DNA, 25 bp, Homo sapien
aggtgcaagccggaggaatcagatc

SEQ ID NO: 5149741 - DNA, 25 bp, Homo sapien
caagccggaggaatcagatctgtct

SEQ ID NO: 5149742 - DNA, 25 bp, Homo sapien
gggcacaggtgcaagccggaggaat

SEQ ID NO: 5149743 - DNA, 25 bp, Homo sapien
gggagctcccgagtgggtctcactt

SEQ ID NO: 5149744 - DNA, 25 bp, Homo sapien
ctccagggcagtagtggccagaggg

SEQ ID NO: 5149745 - DNA, 25 bp, Homo sapien
gagctcccgagtgggtctcacttcc

SEQ ID NO: 5149746 - DNA, 25 bp, Homo sapien
cttcctccagggcagtagtggccag

SEQ ID NO: 5149747 - DNA, 25 bp, Homo sapien
catctgttgccaggtaggtatgctc

SEQ ID NO: 5149748 - DNA, 25 bp, Homo sapien
gcaggggaggcactccgcctgacta

SEQ ID NO: 5149749 - DNA, 25 bp, Homo sapien
ccgcctgactatggcctccatctgt

SEQ ID NO: 5149750 - DNA, 25 bp, Homo sapien
tgccaggtaggtatgctcagggcag

SEQ ID NO: 5149751 - DNA, 25 bp, Homo sapien
gcaccctggtcacctagacaccagt

SEQ ID NO: 5149752 - DNA, 25 bp, Homo sapien
accctggtcacctagacaccagtgg

SEQ ID NO: 5149753 - DNA, 25 bp, Homo sapien
cagtggcccggaggacatgggtggt

SEQ ID NO: 5149754 - DNA, 25 bp, Homo sapien
agacaccagtggcccggaggacatg

SEQ ID NO: 5149755 - DNA, 25 bp, Homo sapien
aaacacatttgcatgaccctgaagc

SEQ ID NO: 5149756 - DNA, 25 bp, Homo sapien
caaacacatttgcatgaccctgaag

SEQ ID NO: 5149757 - DNA, 25 bp, Homo sapien
acacatttgcatgaccctgaagctc

SEQ ID NO: 5149758 - DNA, 25 bp, Homo sapien
ggcaaacacatttgcatgaccctga

SEQ ID NO: 5149759 - DNA, 25 bp, Homo sapien
ggagccgggcctacaagggacctca

SEQ ID NO: 5149760 - DNA, 25 bp, Homo sapien
ggcctacaagggacctcagccacag

SEQ ID NO: 5149761 - DNA, 25 bp, Homo sapien
ggcccacagtaggagccgggcctac

SEQ ID NO: 5149762 - DNA, 25 bp, Homo sapien
cccacagtaggagccgggcctacaa

SEQ ID NO: 5149763 - DNA, 25 bp, Homo sapien
agggctgtaagggtagagcatccag

SEQ ID NO: 5149764 - DNA, 25 bp, Homo sapien
ctgggggcagctgaatccaggcggg

SEQ ID NO: 5149765 - DNA, 25 bp, Homo sapien
gggggcagctgaatccaggcgggca

SEQ ID NO: 5149766 - DNA, 25 bp, Homo sapien
gggctgtaagggtagagcatccagg

SEQ ID NO: 5149767 - DNA, 25 bp, Homo sapien
gcagggcagtagtggcccaccgggc

SEQ ID NO: 5149768 - DNA, 25 bp, Homo sapien
cagggcagtagtggcccaccgggca

SEQ ID NO: 5149769 - DNA, 25 bp, Homo sapien
gggcagagccggcagtcttcagctg

SEQ ID NO: 5149770 - DNA, 25 bp, Homo sapien
agagccggcagtcttcagctgccct

SEQ ID NO: 5149771 - DNA, 25 bp, Homo sapien
gagccggcagtcttcagctgccctg

SEQ ID NO: 5149772 - DNA, 25 bp, Homo sapien
gcagagccggcagtcttcagctgcc

SEQ ID NO: 5149773 - DNA, 25 bp, Homo sapien
ctggtggagagaaagcggcgctctg

SEQ ID NO: 5149774 - DNA, 25 bp, Homo sapien
gcggcgctctggcaggtgaggcagc

SEQ ID NO: 5149775 - DNA, 25 bp, Homo sapien
gagaaagcggcgctctggcaggtga

SEQ ID NO: 5149776 - DNA, 25 bp, Homo sapien
ggtggagagaaagcggcgctctggc

SEQ ID NO: 5149777 - DNA, 25 bp, Homo sapien
tcctgaaaccttacatcttgggccc

SEQ ID NO: 5149778 - DNA, 25 bp, Homo sapien
catcttgggccctcaaagctgcagg

SEQ ID NO: 5149779 - DNA, 25 bp, Homo sapien
gtggctgtttcctgaaaccttacat

SEQ ID NO: 5149780 - DNA, 25 bp, Homo sapien
aaccttacatcttgggccctcaaag

SEQ ID NO: 5149781 - DNA, 25 bp, Homo sapien
ttggtcacctcagaggcagaatacc

SEQ ID NO: 5149782 - DNA, 25 bp, Homo sapien
tcacctcagaggcagaatacctcag

SEQ ID NO: 5149783 - DNA, 25 bp, Homo sapien
ggtcacctcagaggcagaatacctc

SEQ ID NO: 5149784 - DNA, 25 bp, Homo sapien
tcaggggttggtcacctcagaggca

SEQ ID NO: 5149785 - DNA, 25 bp, Homo sapien
ttcatgggtaggaagaaccaatatt

SEQ ID NO: 5149786 - DNA, 25 bp, Homo sapien
atgggtaggaagaaccaatattgtg

SEQ ID NO: 5149787 - DNA, 25 bp, Homo sapien
cagtgaaataaaagaggatacaaag

SEQ ID NO: 5149788 - DNA, 25 bp, Homo sapien
ttccatgttcatgggtaggaagaac

SEQ ID NO: 5149789 - DNA, 25 bp, Homo sapien
ctctgagagagttatattttttggt

SEQ ID NO: 5149790 - DNA, 25 bp, Homo sapien
taataaggaatgctgatttcctcaa

SEQ ID NO: 5149791 - DNA, 25 bp, Homo sapien
cctcaattccattttgaggaatggg

SEQ ID NO: 5149792 - DNA, 25 bp, Homo sapien
ataaggaatgctgatttcctcaatt

SEQ ID NO: 5149793 - DNA, 25 bp, Homo sapien
caattccattttgaggaatggggaa

SEQ ID NO: 5149794 - DNA, 25 bp, Homo sapien
tcgagggaatcctcctcgttatcaa

SEQ ID NO: 5149795 - DNA, 25 bp, Homo sapien
gaatcctcctcgttatcaaaagaag

SEQ ID NO: 5149796 - DNA, 25 bp, Homo sapien
actgccatcgcagctctcagcacta

SEQ ID NO: 5149797 - DNA, 25 bp, Homo sapien
cactaaaaaggtggcatcagactcc

SEQ ID NO: 5149798 - DNA, 25 bp, Homo sapien
ataaaccctgcttgattatggtgga

SEQ ID NO: 5149799 - DNA, 25 bp, Homo sapien
ggcataaaccctgcttgattatggt

SEQ ID NO: 5149800 - DNA, 25 bp, Homo sapien
gaatagtttcaagcagggatggtag

SEQ ID NO: 5149801 - DNA, 25 bp, Homo sapien
caagcagggatggtagcagctcttc

SEQ ID NO: 5149802 - DNA, 25 bp, Homo sapien
tgcacaatgggcctggtgggtcgct

SEQ ID NO: 5149803 - DNA, 25 bp, Homo sapien
tctggggtttgatggaagttctact

SEQ ID NO: 5149804 - DNA, 25 bp, Homo sapien
cctggtgggtcgctgtgcttggcca

SEQ ID NO: 5149805 - DNA, 25 bp, Homo sapien
ggaagttctacttcagattgcattt

SEQ ID NO: 5149806 - DNA, 25 bp, Homo sapien
acatcatctaaatccaacttgacca

SEQ ID NO: 5149807 - DNA, 25 bp, Homo sapien
catcatctaaatccaacttgaccat

SEQ ID NO: 5149808 - DNA, 25 bp, Homo sapien
gaatggatttatagagaacatcatc

SEQ ID NO: 5149809 - DNA, 25 bp, Homo sapien
tgcagttcatcgagtcttcagggac

SEQ ID NO: 5149810 - DNA, 25 bp, Homo sapien
cattggacaccgctgcatccatgtc

SEQ ID NO: 5149811 - DNA, 25 bp, Homo sapien
attggacaccgctgcatccatgtcc

SEQ ID NO: 5149812 - DNA, 25 bp, Homo sapien
cccacattggacaccgctgcatcca

SEQ ID NO: 5149813 - DNA, 25 bp, Homo sapien
cacattggacaccgctgcatccatg

SEQ ID NO: 5149814 - DNA, 25 bp, Homo sapien
tacttgtcctcagtccgtaggtgaa

SEQ ID NO: 5149815 - DNA, 25 bp, Homo sapien
taagtcacagtcatcctggtagaag

SEQ ID NO: 5149816 - DNA, 25 bp, Homo sapien
ctagtggctcataactgggttttcc

SEQ ID NO: 5149817 - DNA, 25 bp, Homo sapien
taggtgaaaccagtcctagtggctc

SEQ ID NO: 5149818 - DNA, 25 bp, Homo sapien
gccgccttctcaccgactccaaggc

SEQ ID NO: 5149819 - DNA, 25 bp, Homo sapien
cttctcaccgactccaaggcagcac

SEQ ID NO: 5149820 - DNA, 25 bp, Homo sapien
caaggcagcacttccgggcgcttct

SEQ ID NO: 5149821 - DNA, 25 bp, Homo sapien
tccaaggcagcacttccgggcgctt

SEQ ID NO: 5149822 - DNA, 25 bp, Homo sapien
ctgcagatgtatgtggcgcacagcc

SEQ ID NO: 5149823 - DNA, 25 bp, Homo sapien
tgcagatgtatgtggcgcacagcct

SEQ ID NO: 5149824 - DNA, 25 bp, Homo sapien
aaccgctgtacaggagctcgactag

SEQ ID NO: 5149825 - DNA, 25 bp, Homo sapien
agggcgagccgattgccagcccgca

SEQ ID NO: 5149826 - DNA, 25 bp, Homo sapien
ctagctgtcgcaccgtctgcacagg

SEQ ID NO: 5149827 - DNA, 25 bp, Homo sapien
tcatgaatgcacacagtcacgtcgc

SEQ ID NO: 5149828 - DNA, 25 bp, Homo sapien
ggtgctcgcgggtgcagaggagcgc

SEQ ID NO: 5149829 - DNA, 25 bp, Homo sapien
cgggtgcagaggagcgcgtgcgata

SEQ ID NO: 5149830 - DNA, 25 bp, Homo sapien
ccgggggtgcgcagccagcaggtgg

SEQ ID NO: 5149831 - DNA, 25 bp, Homo sapien
cagaggagcgcgtgcgataatctgc

SEQ ID NO: 5149832 - DNA, 25 bp, Homo sapien
gtgggtgcatggaactcctcgcacg

SEQ ID NO: 5149833 - DNA, 25 bp, Homo sapien
gccagtgggtgcatggaactcctcg

SEQ ID NO: 5149834 - DNA, 25 bp, Homo sapien
agtttcctcgtcatcgttgtcacct

SEQ ID NO: 5149835 - DNA, 25 bp, Homo sapien
gtgcatggaactcctcgcacgcgct

SEQ ID NO: 5149836 - DNA, 25 bp, Homo sapien
ttgtcgtgccaagcggttacatagc

SEQ ID NO: 5149837 - DNA, 25 bp, Homo sapien
cgggtggttcgggagcacccaagtg

SEQ ID NO: 5149838 - DNA, 25 bp, Homo sapien
tggtgcgggtggttcgggagcaccc

SEQ ID NO: 5149839 - DNA, 25 bp, Homo sapien
cgccatccttgtcgtgccaagcggt

SEQ ID NO: 5149840 - DNA, 25 bp, Homo sapien
ccgcagctgagtgccgggggctgcc

SEQ ID NO: 5149841 - DNA, 25 bp, Homo sapien
cccgcagctgagtgccgggggctgc

SEQ ID NO: 5149842 - DNA, 25 bp, Homo sapien
tcccgcagctgagtgccgggggctg

SEQ ID NO: 5149843 - DNA, 25 bp, Homo sapien
ggcaccaggagtgcgagcagtggtg

SEQ ID NO: 5149844 - DNA, 25 bp, Homo sapien
acagtggccgcacgcataggcaagt

SEQ ID NO: 5149845 - DNA, 25 bp, Homo sapien
ataggcaagtggctcggcaccagga

SEQ ID NO: 5149846 - DNA, 25 bp, Homo sapien
aacgtcttgcaacagtggccgcacg

SEQ ID NO: 5149847 - DNA, 25 bp, Homo sapien
gcccttgctgactacttttctggaa

SEQ ID NO: 5149848 - DNA, 25 bp, Homo sapien
ctgcccttgctgactacttttctgg

SEQ ID NO: 5149849 - DNA, 25 bp, Homo sapien
tgcccttgctgactacttttctgga

SEQ ID NO: 5149850 - DNA, 25 bp, Homo sapien
agtgttaaattccaggcccgcatca

SEQ ID NO: 5149851 - DNA, 25 bp, Homo sapien
ggcccagagaacactcaaaacgagt

SEQ ID NO: 5149852 - DNA, 25 bp, Homo sapien
acgagtgttaaattccaggcccgca

SEQ ID NO: 5149853 - DNA, 25 bp, Homo sapien
tgctgcctcagcaacgggcccagag

SEQ ID NO: 5149854 - DNA, 25 bp, Homo sapien
gattgatcagtgtctccccagagtc

SEQ ID NO: 5149855 - DNA, 25 bp, Homo sapien
agcatgtgactggtctgtgtcccca

SEQ ID NO: 5149856 - DNA, 25 bp, Homo sapien
gagtctccgagaggctcagtcttgc

SEQ ID NO: 5149857 - DNA, 25 bp, Homo sapien
gcagtagagttcttaagcccttgca

SEQ ID NO: 5149858 - DNA, 25 bp, Homo sapien
tggaagctcttagatctctggaggc

SEQ ID NO: 5149859 - DNA, 25 bp, Homo sapien
tggcttaggcttttcccagtgggtg

SEQ ID NO: 5149860 - DNA, 25 bp, Homo sapien
tgtcaatcacatgccaaaacctgag

SEQ ID NO: 5149861 - DNA, 25 bp, Homo sapien
aggtagctctctcacgtggctggca

SEQ ID NO: 5149862 - DNA, 25 bp, Homo sapien
ctaataattactgggccctccccag

SEQ ID NO: 5149863 - DNA, 25 bp, Homo sapien
ttggtgccatttgcggaggtgacct

SEQ ID NO: 5149864 - DNA, 25 bp, Homo sapien
gaaggcatccttctattctactgat

SEQ ID NO: 5149865 - DNA, 25 bp, Homo sapien
ggcagccgtggctcctacattagct

SEQ ID NO: 5149866 - DNA, 25 bp, Homo sapien
aggtggtcgtcccacctctgagaga

SEQ ID NO: 5149867 - DNA, 25 bp, Homo sapien
aggtggtcgtcccacctctgagaca

SEQ ID NO: 5149868 - DNA, 25 bp, Homo sapien
ggtcgtcccacctctgagagatcct

SEQ ID NO: 5149869 - DNA, 25 bp, Homo sapien
tccctcagccaggtggtggttcctt

SEQ ID NO: 5149870 - DNA, 25 bp, Homo sapien
aatgagactttcagctggtttcccg

SEQ ID NO: 5149871 - DNA, 25 bp, Homo sapien
cacttcaaggcagtttatgacaaac

SEQ ID NO: 5149872 - DNA, 25 bp, Homo sapien
ggtttcccgttctgagcttacttga

SEQ ID NO: 5149873 - DNA, 25 bp, Homo sapien
aaaacagttagagccattcttggag

SEQ ID NO: 5149874 - DNA, 25 bp, Homo sapien
tgtgctccagagtcagccactggtc

SEQ ID NO: 5149875 - DNA, 25 bp, Homo sapien
gcctgtgctccagagtcagccactg

SEQ ID NO: 5149876 - DNA, 25 bp, Homo sapien
tgctccagagtcagccactggtcca

SEQ ID NO: 5149877 - DNA, 25 bp, Homo sapien
gctccagagtcagccactggtccat

SEQ ID NO: 5149878 - DNA, 25 bp, Homo sapien
tatagctctccagtataattggaaa

SEQ ID NO: 5149879 - DNA, 25 bp, Homo sapien
ccatgctgttctgtgcgggagatgc

SEQ ID NO: 5149880 - DNA, 25 bp, Homo sapien
ggctattcgggtgttttgtgactcc

SEQ ID NO: 5149881 - DNA, 25 bp, Homo sapien
ttggaaatccggtaatgtgattccc

SEQ ID NO: 5149882 - DNA, 25 bp, Homo sapien
tgctgtacagaagctgtatttgttg

SEQ ID NO: 5149883 - DNA, 25 bp, Homo sapien
gctgtacagaagctgtatttgttgt

SEQ ID NO: 5149884 - DNA, 25 bp, Homo sapien
ctgtacagaagctgtatttgttgtt

SEQ ID NO: 5149885 - DNA, 25 bp, Homo sapien
ttaaatgtccaatctaattattatt

SEQ ID NO: 5149886 - DNA, 25 bp, Homo sapien
tttaaatgtccaatctaattattat

SEQ ID NO: 5149887 - DNA, 25 bp, Homo sapien
tctcaccactacacttcgcagcctc

SEQ ID NO: 5149888 - DNA, 25 bp, Homo sapien
gcagccggatggttagctttgcaga

SEQ ID NO: 5149889 - DNA, 25 bp, Homo sapien
gctttgcagataccaggccagtgag

SEQ ID NO: 5149890 - DNA, 25 bp, Homo sapien
cagttcaggcaacacggaagctgtg

SEQ ID NO: 5149891 - DNA, 25 bp, Homo sapien
tgagccctgatggttggatactagc

SEQ ID NO: 5149892 - DNA, 25 bp, Homo sapien
taggtagtaaatttgtttctcagta

SEQ ID NO: 5149893 - DNA, 25 bp, Homo sapien
catggagaagtagctgacctaagca

SEQ ID NO: 5149894 - DNA, 25 bp, Homo sapien
aaacgcatgatacagcctcactgaa

SEQ ID NO: 5149895 - DNA, 25 bp, Homo sapien
cagccttttgactggatactgtaaa

SEQ ID NO: 5149896 - DNA, 25 bp, Homo sapien
gctgtggagagagaatagcttgtca

SEQ ID NO: 5149897 - DNA, 25 bp, Homo sapien
gaacaactagaagaaccctggaata

SEQ ID NO: 5149898 - DNA, 25 bp, Homo sapien
gcaacaccatcaatttagtgcaatc

SEQ ID NO: 5149899 - DNA, 25 bp, Homo sapien
acttcatgtaggtgttggagcaaac

SEQ ID NO: 5149900 - DNA, 25 bp, Homo sapien
tcctcttccaaatccgtcatttacc

SEQ ID NO: 5149901 - DNA, 25 bp, Homo sapien
ctcttccaaatccgtcatttaccat

SEQ ID NO: 5149902 - DNA, 25 bp, Homo sapien
cctcttccaaatccgtcatttacca

SEQ ID NO: 5149903 - DNA, 25 bp, Homo sapien
tgtcaaacttgcgatgacctggctc

SEQ ID NO: 5149904 - DNA, 25 bp, Homo sapien
tcaaacttgcgatgacctggctcaa

SEQ ID NO: 5149905 - DNA, 25 bp, Homo sapien
ttgcgatgacctggctcaagcagca

SEQ ID NO: 5149906 - DNA, 25 bp, Homo sapien
aacttgcgatgacctggctcaagca

SEQ ID NO: 5149907 - DNA, 25 bp, Homo sapien
cactgacgaataacttggggcatgt

SEQ ID NO: 5149908 - DNA, 25 bp, Homo sapien
tgacgaataacttggggcatgttct

SEQ ID NO: 5149909 - DNA, 25 bp, Homo sapien
cctcactgacgaataacttggggca

SEQ ID NO: 5149910 - DNA, 25 bp, Homo sapien
gcctcactgacgaataacttggggc

SEQ ID NO: 5149911 - DNA, 25 bp, Homo sapien
tagagctggctagtgtaacactgac

SEQ ID NO: 5149912 - DNA, 25 bp, Homo sapien
actgactatgagtaggtgggcccac

SEQ ID NO: 5149913 - DNA, 25 bp, Homo sapien
cattatgttgtcagagccctagagc

SEQ ID NO: 5149914 - DNA, 25 bp, Homo sapien
gactagatccaaactgtgttgttct

SEQ ID NO: 5149915 - DNA, 25 bp, Homo sapien
gagcatcctatcttcgtagttggtt

SEQ ID NO: 5149916 - DNA, 25 bp, Homo sapien
gcttcccgttcttctggatgagcat

SEQ ID NO: 5149917 - DNA, 25 bp, Homo sapien
aagaaaatgcttcccgttcttctgg

SEQ ID NO: 5149918 - DNA, 25 bp, Homo sapien
tggatgagcatcctatcttcgtagt

SEQ ID NO: 5149919 - DNA, 25 bp, Homo sapien
acaccttgtggtcccagttgcttgg

SEQ ID NO: 5149920 - DNA, 25 bp, Homo sapien
tacagtggctcgtgactgcaatccc

SEQ ID NO: 5149921 - DNA, 25 bp, Homo sapien
tgcattgaagtctcatcacgccact

SEQ ID NO: 5149922 - DNA, 25 bp, Homo sapien
tgtgctggtaagattgtagataatc

SEQ ID NO: 5149923 - DNA, 25 bp, Homo sapien
gcccatcagagcaaacaagtacctt

SEQ ID NO: 5149924 - DNA, 25 bp, Homo sapien
gcattttgttaccaaggccttgaaa

SEQ ID NO: 5149925 - DNA, 25 bp, Homo sapien
tcaaaagaatacaagctgggctcaa

SEQ ID NO: 5149926 - DNA, 25 bp, Homo sapien
ggtcgaaatcctggtcacgccactg

SEQ ID NO: 5149927 - DNA, 25 bp, Homo sapien
ggagttccggttttcatgtcaaatg

SEQ ID NO: 5149928 - DNA, 25 bp, Homo sapien
aatccactttctaggcaaatgcagc

SEQ ID NO: 5149929 - DNA, 25 bp, Homo sapien
gagagaagtctgcagctaacctgga

SEQ ID NO: 5149930 - DNA, 25 bp, Homo sapien
caaatagcttaggacaatggagtcc

SEQ ID NO: 5149931 - DNA, 25 bp, Homo sapien
ggccactagctatccttgtcagatt

SEQ ID NO: 5149932 - DNA, 25 bp, Homo sapien
aggccctgggctttacatacgttat

SEQ ID NO: 5149933 - DNA, 25 bp, Homo sapien
tcatagctgtctgaaaagtacatgc

SEQ ID NO: 5149934 - DNA, 25 bp, Homo sapien
tgttgaggagttcttatgacccagg

SEQ ID NO: 5149935 - DNA, 25 bp, Homo sapien
gagatcctgtgcgtgaatttgtcag

SEQ ID NO: 5149936 - DNA, 25 bp, Homo sapien
tattagagccgcacagtttagagtc

SEQ ID NO: 5149937 - DNA, 25 bp, Homo sapien
caaaaacatgttccttgaggcctat

SEQ ID NO: 5149938 - DNA, 25 bp, Homo sapien
gagtcagtagtcaattaaagtccct

SEQ ID NO: 5149939 - DNA, 25 bp, Homo sapien
ttggctcagcctgccacgaagccag

SEQ ID NO: 5149940 - DNA, 25 bp, Homo sapien
agccaggactacagacagtcacatg

SEQ ID NO: 5149941 - DNA, 25 bp, Homo sapien
ttactgcggcttcaacctcctagct

SEQ ID NO: 5149942 - DNA, 25 bp, Homo sapien
tacatacctcggtcttgacccttta

SEQ ID NO: 5149943 - DNA, 25 bp, Homo sapien
tacagtatttggaagttgaacaaat

SEQ ID NO: 5149944 - DNA, 25 bp, Homo sapien
attacagtatttggaagttgaacaa

SEQ ID NO: 5149945 - DNA, 25 bp, Homo sapien
tggtttagttattacagtatttgga

SEQ ID NO: 5149946 - DNA, 25 bp, Homo sapien
agttattacagtatttggaagttga

SEQ ID NO: 5149947 - DNA, 25 bp, Homo sapien
gatcagagaataagagcttgtccct

SEQ ID NO: 5149948 - DNA, 25 bp, Homo sapien
gttcagaaatcagtgtatcagatca

SEQ ID NO: 5149949 - DNA, 25 bp, Homo sapien
ccagaccttttcatctaaagtgcaa

SEQ ID NO: 5149950 - DNA, 25 bp, Homo sapien
gcttgtccctgttctcctatggcca

SEQ ID NO: 5149951 - DNA, 25 bp, Homo sapien
tacttcatacttctgagtaacacac

SEQ ID NO: 5149952 - DNA, 25 bp, Homo sapien
tgccctttacatctatacttcatac

SEQ ID NO: 5149953 - DNA, 25 bp, Homo sapien
ttctgccctttacatctatacttca

SEQ ID NO: 5149954 - DNA, 25 bp, Homo sapien
atacttcatacttctgagtaacaca

SEQ ID NO: 5149955 - DNA, 25 bp, Homo sapien
gcttgttcccgacgcttgttcccga

SEQ ID NO: 5149956 - DNA, 25 bp, Homo sapien
ttgttcccgacggtgctcgctcctg

SEQ ID NO: 5149957 - DNA, 25 bp, Homo sapien
ggcgcttcctcttaatcccggcttg

SEQ ID NO: 5149958 - DNA, 25 bp, Homo sapien
catttactttatatgctgcggcgga

SEQ ID NO: 5149959 - DNA, 25 bp, Homo sapien
tcctcttggaagtggcgactgctgc

SEQ ID NO: 5149960 - DNA, 25 bp, Homo sapien
tacacagtgctgaggcagaacgcag

SEQ ID NO: 5149961 - DNA, 25 bp, Homo sapien
gaacgcaggttcgtcacagtgggcc

SEQ ID NO: 5149962 - DNA, 25 bp, Homo sapien
tacgccgctgcttcagtggcttgca

SEQ ID NO: 5149963 - DNA, 25 bp, Homo sapien
cttcctttcgtgccgaggaggcaag

SEQ ID NO: 5149964 - DNA, 25 bp, Homo sapien
tttcgtgccgaggaggcaagtgcat

SEQ ID NO: 5149965 - DNA, 25 bp, Homo sapien
ctttcgtgccgaggaggcaagtgca

SEQ ID NO: 5149966 - DNA, 25 bp, Homo sapien
tcctttcgtgccgaggaggcaagtg

SEQ ID NO: 5149967 - DNA, 25 bp, Homo sapien
tttgacggtgccatttgtgggattc

SEQ ID NO: 5149968 - DNA, 25 bp, Homo sapien
ttgacggtgccatttgtgggattcc

SEQ ID NO: 5149969 - DNA, 25 bp, Homo sapien
tgacggtgccatttgtgggattcct

SEQ ID NO: 5149970 - DNA, 25 bp, Homo sapien
cggagagaccttgcccgaagtcacc

SEQ ID NO: 5149971 - DNA, 25 bp, Homo sapien
gctgcctcgctaggcttcaggacct

SEQ ID NO: 5149972 - DNA, 25 bp, Homo sapien
gtgagcgcggctacttttccctagg

SEQ ID NO: 5149973 - DNA, 25 bp, Homo sapien
gaggatattttacccacactttgtg

SEQ ID NO: 5149974 - DNA, 25 bp, Homo sapien
cattctggggaggatattttaccca

SEQ ID NO: 5149975 - DNA, 25 bp, Homo sapien
gatcccatcgcaagtggatctcttt

SEQ ID NO: 5149976 - DNA, 25 bp, Homo sapien
gattttctcgcttgcccagctctgc

SEQ ID NO: 5149977 - DNA, 25 bp, Homo sapien
atggtggcgattttctcgcttgccc

SEQ ID NO: 5149978 - DNA, 25 bp, Homo sapien
ggtggcgattttctcgcttgcccag

SEQ ID NO: 5149979 - DNA, 25 bp, Homo sapien
tggcgattttctcgcttgcccagct

SEQ ID NO: 5149980 - DNA, 25 bp, Homo sapien
tggcctgcatgagggctttaagcag

SEQ ID NO: 5149981 - DNA, 25 bp, Homo sapien
catggctttctaaggagctcaaaca

SEQ ID NO: 5149982 - DNA, 25 bp, Homo sapien
taagcagggcagcaaaatggtcacg

SEQ ID NO: 5149983 - DNA, 25 bp, Homo sapien
cttgcatggctttctaaggagctca

SEQ ID NO: 5149984 - DNA, 25 bp, Homo sapien
gaacccatagtaggtttcagatact

SEQ ID NO: 5149985 - DNA, 25 bp, Homo sapien
tgcaactttcctagtgtcctacgag

SEQ ID NO: 5149986 - DNA, 25 bp, Homo sapien
ccgtggccatagctgcaaattgcaa

SEQ ID NO: 5149987 - DNA, 25 bp, Homo sapien
tgaagactctacgtggaacccatag

SEQ ID NO: 5149988 - DNA, 25 bp, Homo sapien
aggcatagagggtacttaaacttct

SEQ ID NO: 5149989 - DNA, 25 bp, Homo sapien
catagagggtacttaaacttcttca

SEQ ID NO: 5149990 - DNA, 25 bp, Homo sapien
gagggtacttaaacttcttcacata

SEQ ID NO: 5149991 - DNA, 25 bp, Homo sapien
tagagggtacttaaacttcttcaca

SEQ ID NO: 5149992 - DNA, 25 bp, Homo sapien
atttttcctctgcaatttccccact

SEQ ID NO: 5149993 - DNA, 25 bp, Homo sapien
ttgtgtatttttcctctgcaatttc

SEQ ID NO: 5149994 - DNA, 25 bp, Homo sapien
tttcctctgcaatttccccactcac

SEQ ID NO: 5149995 - DNA, 25 bp, Homo sapien
tgtatttttcctctgcaatttcccc

SEQ ID NO: 5149996 - DNA, 25 bp, Homo sapien
gcaggtacgaggaggcaaagccttc

SEQ ID NO: 5149997 - DNA, 25 bp, Homo sapien
tgactgcgtggctctcattggccct

SEQ ID NO: 5149998 - DNA, 25 bp, Homo sapien
actggccgaaggtcaccgtgtagtt

SEQ ID NO: 5149999 - DNA, 25 bp, Homo sapien
gtacgaggaggcaaagccttctcag

SEQ ID NO: 5150000 - DNA, 25 bp, Homo sapien
ggagctgattggtagacagcagctc

SEQ ID NO: 5150001 - DNA, 25 bp, Homo sapien
gtcctggagctgattggtagacagc

SEQ ID NO: 5150002 - DNA, 25 bp, Homo sapien
gctgattggtagacagcagctctgc

SEQ ID NO: 5150003 - DNA, 25 bp, Homo sapien
gctctgcagagctgcgtgtactcac

SEQ ID NO: 5150004 - DNA, 25 bp, Homo sapien
taatttccacctctaattccacttc

SEQ ID NO: 5150005 - DNA, 25 bp, Homo sapien
aaggatggccctaatttccacctct

SEQ ID NO: 5150006 - DNA, 25 bp, Homo sapien
ggatggccctaatttccacctctaa

SEQ ID NO: 5150007 - DNA, 25 bp, Homo sapien
tggccctaatttccacctctaattc

SEQ ID NO: 5150008 - DNA, 25 bp, Homo sapien
ggtgactgtggctttgaatctgagc

SEQ ID NO: 5150009 - DNA, 25 bp, Homo sapien
ttcttgcagtcacagagagtgtcct

SEQ ID NO: 5150010 - DNA, 25 bp, Homo sapien
cagtcacagagagtgtcctcaaatg

SEQ ID NO: 5150011 - DNA, 25 bp, Homo sapien
gaatctgagctagtttattcttgca

SEQ ID NO: 5150012 - DNA, 25 bp, Homo sapien
tgactttactgaggtcataaaacag

SEQ ID NO: 5150013 - DNA, 25 bp, Homo sapien
tgggaagatagggtaacctgcccag

SEQ ID NO: 5150014 - DNA, 25 bp, Homo sapien
gaacacgtattatttatcagacact

SEQ ID NO: 5150015 - DNA, 25 bp, Homo sapien
aaactaacatttgctgaacacgtat

SEQ ID NO: 5150016 - DNA, 25 bp, Homo sapien
gcagcccggggggcactccaggttc

SEQ ID NO: 5150017 - DNA, 25 bp, Homo sapien
tcgcagcccggggggcactccaggt

SEQ ID NO: 5150018 - DNA, 25 bp, Homo sapien
agctcgcagcccggggggcactcca

SEQ ID NO: 5150019 - DNA, 25 bp, Homo sapien
ctcgcagcccggggggcactccagg

SEQ ID NO: 5150020 - DNA, 25 bp, Homo sapien
tatgtaccaaagaccaacagttctc

SEQ ID NO: 5150021 - DNA, 25 bp, Homo sapien
gactgactacaatcaccaaggatct

SEQ ID NO: 5150022 - DNA, 25 bp, Homo sapien
taggcagcaaggcaagtgctttcat

SEQ ID NO: 5150023 - DNA, 25 bp, Homo sapien
cagcatttgggttggaactaaagca

SEQ ID NO: 5150024 - DNA, 25 bp, Homo sapien
tacctgcagggtgatctaagacaaa

SEQ ID NO: 5150025 - DNA, 25 bp, Homo sapien
tgatggcaactcctaggaggacctg

SEQ ID NO: 5150026 - DNA, 25 bp, Homo sapien
tcccagatcacaaggaagaaggctt

SEQ ID NO: 5150027 - DNA, 25 bp, Homo sapien
gctttggctacagcaactcataagg

SEQ ID NO: 5150028 - DNA, 25 bp, Homo sapien
aaaggacatcctcaacggagaatga

SEQ ID NO: 5150029 - DNA, 25 bp, Homo sapien
gacgggctgagcacctgatgaaaca

SEQ ID NO: 5150030 - DNA, 25 bp, Homo sapien
ccctaacacagcattggatggatga

SEQ ID NO: 5150031 - DNA, 25 bp, Homo sapien
caaagtggcgtatgtggaagctgcc

SEQ ID NO: 5150032 - DNA, 25 bp, Homo sapien
aacccccagtactattgcataactc

SEQ ID NO: 5150033 - DNA, 25 bp, Homo sapien
taacccccagtactattgcataact

SEQ ID NO: 5150034 - DNA, 25 bp, Homo sapien
ccccagtactattgcataactcttc

SEQ ID NO: 5150035 - DNA, 25 bp, Homo sapien
cccccagtactattgcataactctt

SEQ ID NO: 5150036 - DNA, 25 bp, Homo sapien
ttttttgcccgccttctccacaagc

SEQ ID NO: 5150037 - DNA, 25 bp, Homo sapien
tttgcccgccttctccacaagcttt

SEQ ID NO: 5150038 - DNA, 25 bp, Homo sapien
ttttgcccgccttctccacaagctt

SEQ ID NO: 5150039 - DNA, 25 bp, Homo sapien
tttttgcccgccttctccacaagct

SEQ ID NO: 5150040 - DNA, 25 bp, Homo sapien
tgcaaccaagagtgaacctcagaac

SEQ ID NO: 5150041 - DNA, 25 bp, Homo sapien
ggtgcaaccaagagtgaacctcaga

SEQ ID NO: 5150042 - DNA, 25 bp, Homo sapien
gtgggtgcaaccaagagtgaacctc

SEQ ID NO: 5150043 - DNA, 25 bp, Homo sapien
ctatggggtgggtgcaaccaagagt

SEQ ID NO: 5150044 - DNA, 25 bp, Homo sapien
tttgacggtcaccaccccttcgcca

SEQ ID NO: 5150045 - DNA, 25 bp, Homo sapien
ttgacggtcaccaccccttcgccaa

SEQ ID NO: 5150046 - DNA, 25 bp, Homo sapien
tgacggtcaccaccccttcgccaag

SEQ ID NO: 5150047 - DNA, 25 bp, Homo sapien
tggaggcccaaaggaagccctttga

SEQ ID NO: 5150048 - DNA, 25 bp, Homo sapien
aactatgcacaaccaatcacgaaga

SEQ ID NO: 5150049 - DNA, 25 bp, Homo sapien
caattttctcttcaatcaatactgc

SEQ ID NO: 5150050 - DNA, 25 bp, Homo sapien
tactgcagagatacaaggataaacc

SEQ ID NO: 5150051 - DNA, 25 bp, Homo sapien
gtcagttccgtcaagtcaccttctc

SEQ ID NO: 5150052 - DNA, 25 bp, Homo sapien
ctgtcagttccgtcaagtcaccttc

SEQ ID NO: 5150053 - DNA, 25 bp, Homo sapien
tgtcagttccgtcaagtcaccttct

SEQ ID NO: 5150054 - DNA, 25 bp, Homo sapien
gctgtcagttccgtcaagtcacctt

SEQ ID NO: 5150055 - DNA, 25 bp, Homo sapien
gcaactagcagagcacaatttcacg

SEQ ID NO: 5150056 - DNA, 25 bp, Homo sapien
gagccaaggtaggattaaacattga

SEQ ID NO: 5150057 - DNA, 25 bp, Homo sapien
tcttggccattatgcatagtgtggc

SEQ ID NO: 5150058 - DNA, 25 bp, Homo sapien
cacagtaagagacattgccaaagag

SEQ ID NO: 5150059 - DNA, 25 bp, Homo sapien
gacctccaagaaggagaaacttgtc

SEQ ID NO: 5150060 - DNA, 25 bp, Homo sapien
tgtaggaggggtcttccacctcgtc

SEQ ID NO: 5150061 - DNA, 25 bp, Homo sapien
acttgtcttgtagccggagcaggtc

SEQ ID NO: 5150062 - DNA, 25 bp, Homo sapien
ccttgagatgattattgtaggaggg

SEQ ID NO: 5150063 - DNA, 25 bp, Homo sapien
ttgttgaatttgaagatccccgaga

SEQ ID NO: 5150064 - DNA, 25 bp, Homo sapien
ttgaatttgaagatccccgagatgc

SEQ ID NO: 5150065 - DNA, 25 bp, Homo sapien
tgttgaatttgaagatccccgagat

SEQ ID NO: 5150066 - DNA, 25 bp, Homo sapien
gttgaatttgaagatccccgagatg

SEQ ID NO: 5150067 - DNA, 25 bp, Homo sapien
tcaggtccagcgagtcagtgatggc

SEQ ID NO: 5150068 - DNA, 25 bp, Homo sapien
tgatggccacccctctacagagagc

SEQ ID NO: 5150069 - DNA, 25 bp, Homo sapien
caaactcccaacacaaccggaggct

SEQ ID NO: 5150070 - DNA, 25 bp, Homo sapien
ggtgagatgactgatttgccctctc

SEQ ID NO: 5150071 - DNA, 25 bp, Homo sapien
gccctggtgcttcctaaaccacaag

SEQ ID NO: 5150072 - DNA, 25 bp, Homo sapien
caggagatcccagtggacagaggca

SEQ ID NO: 5150073 - DNA, 25 bp, Homo sapien
gactgaatgagaactggctagatgg

SEQ ID NO: 5150074 - DNA, 25 bp, Homo sapien
ggctagatggaagccctaacttcag

SEQ ID NO: 5150075 - DNA, 25 bp, Homo sapien
gaaggagctagtgcctggtcacgat

SEQ ID NO: 5150076 - DNA, 25 bp, Homo sapien
ccagatacctcttggggcccaagtg

SEQ ID NO: 5150077 - DNA, 25 bp, Homo sapien
gtgtactcctggatgcctgagagct

SEQ ID NO: 5150078 - DNA, 25 bp, Homo sapien
tgagcccagatacctcttggggccc

SEQ ID NO: 5150079 - DNA, 25 bp, Homo sapien
tggagcatagcccagagaacttgtt

SEQ ID NO: 5150080 - DNA, 25 bp, Homo sapien
gaagagcatcttgatgctgcttgca

SEQ ID NO: 5150081 - DNA, 25 bp, Homo sapien
gcatagcccagagaacttgttgaag

SEQ ID NO: 5150082 - DNA, 25 bp, Homo sapien
tgaagagcatcttgatgctgcttgc

SEQ ID NO: 5150083 - DNA, 25 bp, Homo sapien
ccctgcggacttgtttgtcggcatc

SEQ ID NO: 5150084 - DNA, 25 bp, Homo sapien
aaatcgattttagagttggctgagc

SEQ ID NO: 5150085 - DNA, 25 bp, Homo sapien
tgcaaccatcctgtcagcaccaggt

SEQ ID NO: 5150086 - DNA, 25 bp, Homo sapien
gaggccatccaggttaaaatcgatt

SEQ ID NO: 5150087 - DNA, 25 bp, Homo sapien
gtaggctgttaaaacaggcctccta

SEQ ID NO: 5150088 - DNA, 25 bp, Homo sapien
tccaggtaggctgttaaaacaggcc

SEQ ID NO: 5150089 - DNA, 25 bp, Homo sapien
ggctgttaaaacaggcctcctataa

SEQ ID NO: 5150090 - DNA, 25 bp, Homo sapien
caggtaggctgttaaaacaggcctc

SEQ ID NO: 5150091 - DNA, 25 bp, Homo sapien
ctctctggatcagatagagcatgga

SEQ ID NO: 5150092 - DNA, 25 bp, Homo sapien
tctctggatcagatagagcatggat

SEQ ID NO: 5150093 - DNA, 25 bp, Homo sapien
ctggatcagatagagcatggatgtg

SEQ ID NO: 5150094 - DNA, 25 bp, Homo sapien
tctggatcagatagagcatggatgt

SEQ ID NO: 5150095 - DNA, 25 bp, Homo sapien
gagatcctgtgcgtgaatttgtcag

SEQ ID NO: 5150096 - DNA, 25 bp, Homo sapien
caaaaacatgttccttgaggcctat

SEQ ID NO: 5150097 - DNA, 25 bp, Homo sapien
tattagagccgcacagtttagagtc

SEQ ID NO: 5150098 - DNA, 25 bp, Homo sapien
gagtcagtagtcaattaaagtccct

SEQ ID NO: 5150099 - DNA, 25 bp, Homo sapien
ttggctcagcctgccacgaagccag

SEQ ID NO: 5150100 - DNA, 25 bp, Homo sapien
agccaggactacagacagtcacatg

SEQ ID NO: 5150101 - DNA, 25 bp, Homo sapien
ttactgcggcttcaacctcctagct

SEQ ID NO: 5150102 - DNA, 25 bp, Homo sapien
tacatacctcggtcttgacccttta

SEQ ID NO: 5150103 - DNA, 25 bp, Homo sapien
gttcagaaatcagtgtatcagatca

SEQ ID NO: 5150104 - DNA, 25 bp, Homo sapien
gcttgtccctgttctcctatggcca

SEQ ID NO: 5150105 - DNA, 25 bp, Homo sapien
gatcagagaataagagcttgtccct

SEQ ID NO: 5150106 - DNA, 25 bp, Homo sapien
ccagaccttttcatctaaagtgcaa

SEQ ID NO: 5150107 - DNA, 25 bp, Homo sapien
tgatagtgctcttcagtctgcgaaa

SEQ ID NO: 5150108 - DNA, 25 bp, Homo sapien
tggaaatgatgaactgtcagctact

SEQ ID NO: 5150109 - DNA, 25 bp, Homo sapien
tctgcgaaatcttctttgggtggaa

SEQ ID NO: 5150110 - DNA, 25 bp, Homo sapien
tgttcaatggcgagctctttctgag

SEQ ID NO: 5150111 - DNA, 25 bp, Homo sapien
tactggctattatgctcctccaaaa

SEQ ID NO: 5150112 - DNA, 25 bp, Homo sapien
tctttcagtactgttactgcagttt

SEQ ID NO: 5150113 - DNA, 25 bp, Homo sapien
tcagacactttggtttgcccctcat

SEQ ID NO: 5150114 - DNA, 25 bp, Homo sapien
ccggccccattttagacattctgta

SEQ ID NO: 5150115 - DNA, 25 bp, Homo sapien
atacttcatacttctgagtaacaca

SEQ ID NO: 5150116 - DNA, 25 bp, Homo sapien
tgccctttacatctatacttcatac

SEQ ID NO: 5150117 - DNA, 25 bp, Homo sapien
tacttcatacttctgagtaacacac

SEQ ID NO: 5150118 - DNA, 25 bp, Homo sapien
ttctgccctttacatctatacttca

SEQ ID NO: 5150119 - DNA, 25 bp, Homo sapien
gcttgttcccgacgcttgttcccga

SEQ ID NO: 5150120 - DNA, 25 bp, Homo sapien
catttactttatatgctgcggcgga

SEQ ID NO: 5150121 - DNA, 25 bp, Homo sapien
ggcgcttcctcttaatcccggcttg

SEQ ID NO: 5150122 - DNA, 25 bp, Homo sapien
ttgttcccgacggtgctcgctcctg

SEQ ID NO: 5150123 - DNA, 25 bp, Homo sapien
tacacagtgctgaggcagaacgcag

SEQ ID NO: 5150124 - DNA, 25 bp, Homo sapien
gaacgcaggttcgtcacagtgggcc

SEQ ID NO: 5150125 - DNA, 25 bp, Homo sapien
tcctcttggaagtggcgactgctgc

SEQ ID NO: 5150126 - DNA, 25 bp, Homo sapien
tacgccgctgcttcagtggcttgca

SEQ ID NO: 5150127 - DNA, 25 bp, Homo sapien
ctttcgtgccgaggaggcaagtgca

SEQ ID NO: 5150128 - DNA, 25 bp, Homo sapien
cttcctttcgtgccgaggaggcaag

SEQ ID NO: 5150129 - DNA, 25 bp, Homo sapien
tttcgtgccgaggaggcaagtgcat

SEQ ID NO: 5150130 - DNA, 25 bp, Homo sapien
tcctttcgtgccgaggaggcaagtg

SEQ ID NO: 5150131 - DNA, 25 bp, Homo sapien
tgacggtgccatttgtgggattcct

SEQ ID NO: 5150132 - DNA, 25 bp, Homo sapien
tttgacggtgccatttgtgggattc

SEQ ID NO: 5150133 - DNA, 25 bp, Homo sapien
ttgacggtgccatttgtgggattcc

SEQ ID NO: 5150134 - DNA, 25 bp, Homo sapien
cggagagaccttgcccgaagtcacc

SEQ ID NO: 5150135 - DNA, 25 bp, Homo sapien
gctgcctcgctaggcttcaggacct

SEQ ID NO: 5150136 - DNA, 25 bp, Homo sapien
gatcccatcgcaagtggatctcttt

SEQ ID NO: 5150137 - DNA, 25 bp, Homo sapien
gtgagcgcggctacttttccctagg

SEQ ID NO: 5150138 - DNA, 25 bp, Homo sapien
cattctggggaggatattttaccca

SEQ ID NO: 5150139 - DNA, 25 bp, Homo sapien
gaggatattttacccacactttgtg

SEQ ID NO: 5150140 - DNA, 25 bp, Homo sapien
gattttctcgcttgcccagctctgc

SEQ ID NO: 5150141 - DNA, 25 bp, Homo sapien
tggcgattttctcgcttgcccagct

SEQ ID NO: 5150142 - DNA, 25 bp, Homo sapien
atggtggcgattttctcgcttgccc

SEQ ID NO: 5150143 - DNA, 25 bp, Homo sapien
ggtggcgattttctcgcttgcccag

SEQ ID NO: 5150144 - DNA, 25 bp, Homo sapien
tagcaaggcacaactgctaaatgaa

SEQ ID NO: 5150145 - DNA, 25 bp, Homo sapien
cctgaactgcaaaccggctgattga

SEQ ID NO: 5150146 - DNA, 25 bp, Homo sapien
gacatagactttctcgtagcaaggc

SEQ ID NO: 5150147 - DNA, 25 bp, Homo sapien
tggagtcaggtagcttagatttgcc

SEQ ID NO: 5150148 - DNA, 25 bp, Homo sapien
gacactgtggagtcccttcttgact

SEQ ID NO: 5150149 - DNA, 25 bp, Homo sapien
tgtgccaagcagaagtgcggtgatt

SEQ ID NO: 5150150 - DNA, 25 bp, Homo sapien
cacgaagagggtagcttggcaaagc

SEQ ID NO: 5150151 - DNA, 25 bp, Homo sapien
cagaggaaacggtgggcacgaagag

SEQ ID NO: 5150152 - DNA, 25 bp, Homo sapien
tggcctgcatgagggctttaagcag

SEQ ID NO: 5150153 - DNA, 25 bp, Homo sapien
cttgcatggctttctaaggagctca

SEQ ID NO: 5150154 - DNA, 25 bp, Homo sapien
taagcagggcagcaaaatggtcacg

SEQ ID NO: 5150155 - DNA, 25 bp, Homo sapien
catggctttctaaggagctcaaaca

SEQ ID NO: 5150156 - DNA, 25 bp, Homo sapien
tgatcatcacgtgcggcggcatact

SEQ ID NO: 5150157 - DNA, 25 bp, Homo sapien
cagtgatcatcacgtgcggcggcat

SEQ ID NO: 5150158 - DNA, 25 bp, Homo sapien
atcacgtgcggcggcatactgtaga

SEQ ID NO: 5150159 - DNA, 25 bp, Homo sapien
catcacgtgcggcggcatactgtag

SEQ ID NO: 5150160 - DNA, 25 bp, Homo sapien
ccgtggccatagctgcaaattgcaa

SEQ ID NO: 5150161 - DNA, 25 bp, Homo sapien
gaacccatagtaggtttcagatact

SEQ ID NO: 5150162 - DNA, 25 bp, Homo sapien
tgaagactctacgtggaacccatag

SEQ ID NO: 5150163 - DNA, 25 bp, Homo sapien
tgcaactttcctagtgtcctacgag

SEQ ID NO: 5150164 - DNA, 25 bp, Homo sapien
aggcatagagggtacttaaacttct

SEQ ID NO: 5150165 - DNA, 25 bp, Homo sapien
catagagggtacttaaacttcttca

SEQ ID NO: 5150166 - DNA, 25 bp, Homo sapien
tagagggtacttaaacttcttcaca

SEQ ID NO: 5150167 - DNA, 25 bp, Homo sapien
gagggtacttaaacttcttcacata

SEQ ID NO: 5150168 - DNA, 25 bp, Homo sapien
gcaggtacgaggaggcaaagccttc

SEQ ID NO: 5150169 - DNA, 25 bp, Homo sapien
gtacgaggaggcaaagccttctcag

SEQ ID NO: 5150170 - DNA, 25 bp, Homo sapien
tgactgcgtggctctcattggccct

SEQ ID NO: 5150171 - DNA, 25 bp, Homo sapien
actggccgaaggtcaccgtgtagtt

SEQ ID NO: 5150172 - DNA, 25 bp, Homo sapien
ggagctgattggtagacagcagctc

SEQ ID NO: 5150173 - DNA, 25 bp, Homo sapien
gctgattggtagacagcagctctgc

SEQ ID NO: 5150174 - DNA, 25 bp, Homo sapien
gctctgcagagctgcgtgtactcac

SEQ ID NO: 5150175 - DNA, 25 bp, Homo sapien
gtcctggagctgattggtagacagc

SEQ ID NO: 5150176 - DNA, 25 bp, Homo sapien
ggatggccctaatttccacctctaa

SEQ ID NO: 5150177 - DNA, 25 bp, Homo sapien
taatttccacctctaattccacttc

SEQ ID NO: 5150178 - DNA, 25 bp, Homo sapien
aaggatggccctaatttccacctct

SEQ ID NO: 5150179 - DNA, 25 bp, Homo sapien
tggccctaatttccacctctaattc

SEQ ID NO: 5150180 - DNA, 25 bp, Homo sapien
ggtgactgtggctttgaatctgagc

SEQ ID NO: 5150181 - DNA, 25 bp, Homo sapien
ttcttgcagtcacagagagtgtcct

SEQ ID NO: 5150182 - DNA, 25 bp, Homo sapien
cagtcacagagagtgtcctcaaatg

SEQ ID NO: 5150183 - DNA, 25 bp, Homo sapien
gaatctgagctagtttattcttgca

SEQ ID NO: 5150184 - DNA, 25 bp, Homo sapien
gcagcccggggggcactccaggttc

SEQ ID NO: 5150185 - DNA, 25 bp, Homo sapien
agctcgcagcccggggggcactcca

SEQ ID NO: 5150186 - DNA, 25 bp, Homo sapien
tcgcagcccggggggcactccaggt

SEQ ID NO: 5150187 - DNA, 25 bp, Homo sapien
ctcgcagcccggggggcactccagg

SEQ ID NO: 5150188 - DNA, 25 bp, Homo sapien
taggcagcaaggcaagtgctttcat

SEQ ID NO: 5150189 - DNA, 25 bp, Homo sapien
gactgactacaatcaccaaggatct

SEQ ID NO: 5150190 - DNA, 25 bp, Homo sapien
tatgtaccaaagaccaacagttctc

SEQ ID NO: 5150191 - DNA, 25 bp, Homo sapien
cagcatttgggttggaactaaagca

SEQ ID NO: 5150192 - DNA, 25 bp, Homo sapien
tgatggcaactcctaggaggacctg

SEQ ID NO: 5150193 - DNA, 25 bp, Homo sapien
tacctgcagggtgatctaagacaaa

SEQ ID NO: 5150194 - DNA, 25 bp, Homo sapien
tcccagatcacaaggaagaaggctt

SEQ ID NO: 5150195 - DNA, 25 bp, Homo sapien
gctttggctacagcaactcataagg

SEQ ID NO: 5150196 - DNA, 25 bp, Homo sapien
gacgggctgagcacctgatgaaaca

SEQ ID NO: 5150197 - DNA, 25 bp, Homo sapien
aaaggacatcctcaacggagaatga

SEQ ID NO: 5150198 - DNA, 25 bp, Homo sapien
caaagtggcgtatgtggaagctgcc

SEQ ID NO: 5150199 - DNA, 25 bp, Homo sapien
ccctaacacagcattggatggatga

SEQ ID NO: 5150200 - DNA, 25 bp, Homo sapien
ctcacgggcaccatggcagcagcgg

SEQ ID NO: 5150201 - DNA, 25 bp, Homo sapien
ttttgcccaccttctccacaagctt

SEQ ID NO: 5150202 - DNA, 25 bp, Homo sapien
ttttttgcccaccttctccacaagc

SEQ ID NO: 5150203 - DNA, 25 bp, Homo sapien
tttgcccaccttctccacaagcttt

SEQ ID NO: 5150204 - DNA, 25 bp, Homo sapien
tttttgcccaccttctccacaagct

SEQ ID NO: 5150205 - DNA, 25 bp, Homo sapien
gtgggtgcaaccaagagtgaacctc

SEQ ID NO: 5150206 - DNA, 25 bp, Homo sapien
ctatggggtgggtgcaaccaagagt

SEQ ID NO: 5150207 - DNA, 25 bp, Homo sapien
tgcaaccaagagtgaacctcagaac

SEQ ID NO: 5150208 - DNA, 25 bp, Homo sapien
ggtgcaaccaagagtgaacctcaga

SEQ ID NO: 5150209 - DNA, 25 bp, Homo sapien
ttgacggtcaccaccccttcgccaa

SEQ ID NO: 5150210 - DNA, 25 bp, Homo sapien
tttgacggtcaccaccccttcgcca

SEQ ID NO: 5150211 - DNA, 25 bp, Homo sapien
tgacggtcaccaccccttcgccaag

SEQ ID NO: 5150212 - DNA, 25 bp, Homo sapien
aactatgcacaaaccaatcatgaag

SEQ ID NO: 5150213 - DNA, 25 bp, Homo sapien
ctatgcacaaaccaatcatgaagat

SEQ ID NO: 5150214 - DNA, 25 bp, Homo sapien
tatgcacaaaccaatcatgaagatt

SEQ ID NO: 5150215 - DNA, 25 bp, Homo sapien
gcacaaaccaatcatgaagattatt

SEQ ID NO: 5150216 - DNA, 25 bp, Homo sapien
ctcctcttcttcgtcctggttaatt

SEQ ID NO: 5150217 - DNA, 25 bp, Homo sapien
cttcctcctcttcttcgtcctggtt

SEQ ID NO: 5150218 - DNA, 25 bp, Homo sapien
tcctcctcttcttcgtcctggttaa

SEQ ID NO: 5150219 - DNA, 25 bp, Homo sapien
ctcttcttcgtcctggttaatttgg

SEQ ID NO: 5150220 - DNA, 25 bp, Homo sapien
gaacgcatacaaaatattccagaca

SEQ ID NO: 5150221 - DNA, 25 bp, Homo sapien
gcatacaaaatattccagacaaacg

SEQ ID NO: 5150222 - DNA, 25 bp, Homo sapien
ttcaagaacgcatacaaaatattcc

SEQ ID NO: 5150223 - DNA, 25 bp, Homo sapien
agttttattcaagaacgcatacaaa

SEQ ID NO: 5150224 - DNA, 25 bp, Homo sapien
gctgtcagttccgtcaagtcacctt

SEQ ID NO: 5150225 - DNA, 25 bp, Homo sapien
gtcagttccgtcaagtcaccttctc

SEQ ID NO: 5150226 - DNA, 25 bp, Homo sapien
tgtcagttccgtcaagtcaccttct

SEQ ID NO: 5150227 - DNA, 25 bp, Homo sapien
ctgtcagttccgtcaagtcaccttc

SEQ ID NO: 5150228 - DNA, 25 bp, Homo sapien
tacagaaatctagcgatggcatttt

SEQ ID NO: 5150229 - DNA, 25 bp, Homo sapien
acagaaatctagcgatggcattttg

SEQ ID NO: 5150230 - DNA, 25 bp, Homo sapien
cttcctcatttggatatgtggaatg

SEQ ID NO: 5150231 - DNA, 25 bp, Homo sapien
tggatttgttaaggcaaaagctgaa

SEQ ID NO: 5150232 - DNA, 25 bp, Homo sapien
ggttatcctgcatattgaaggctac

SEQ ID NO: 5150233 - DNA, 25 bp, Homo sapien
gattagggccctacgtaataggcta

SEQ ID NO: 5150234 - DNA, 25 bp, Homo sapien
tatagtgtttccatacttgctgcat

SEQ ID NO: 5150235 - DNA, 25 bp, Homo sapien
tattgtgtttaggtgagagttgtta

SEQ ID NO: 5150236 - DNA, 25 bp, Homo sapien
tctctctcatgtataatagatatag

SEQ ID NO: 5150237 - DNA, 25 bp, Homo sapien
gctgcattgtattgtgtttaggtga

SEQ ID NO: 5150238 - DNA, 25 bp, Homo sapien
tagcaattagggacacaccgctcct

SEQ ID NO: 5150239 - DNA, 25 bp, Homo sapien
ttttggagtatatcaagccactgtc

SEQ ID NO: 5150240 - DNA, 25 bp, Homo sapien
cttccattctgaggtgtagctagca

SEQ ID NO: 5150241 - DNA, 25 bp, Homo sapien
tagcctccttcaacagctatgtgaa

SEQ ID NO: 5150242 - DNA, 25 bp, Homo sapien
gccccggtgattggccaaccttctg

SEQ ID NO: 5150243 - DNA, 25 bp, Homo sapien
tctagtttgcggttcaggtttggcc

SEQ ID NO: 5150244 - DNA, 25 bp, Homo sapien
aatcggcggcggcttctagtttgcg

SEQ ID NO: 5150245 - DNA, 25 bp, Homo sapien
gcaggcgccctgaaacgttcggcga

SEQ ID NO: 5150246 - DNA, 25 bp, Homo sapien
gtttttctgtctcaaagacctccag

SEQ ID NO: 5150247 - DNA, 25 bp, Homo sapien
agtctcgaccctgcacacggatttt

SEQ ID NO: 5150248 - DNA, 25 bp, Homo sapien
tgtaaaccagtcacaacctggatag

SEQ ID NO: 5150249 - DNA, 25 bp, Homo sapien
agaagaaacgcgactctcaggaccc

SEQ ID NO: 5150250 - DNA, 25 bp, Homo sapien
agcgggaggggtccccggcagcagg

SEQ ID NO: 5150251 - DNA, 25 bp, Homo sapien
aagcgggaggggtccccggcagcag

SEQ ID NO: 5150252 - DNA, 25 bp, Homo sapien
acaggccgtcgtcactccctctttg

SEQ ID NO: 5150253 - DNA, 25 bp, Homo sapien
ctttgccacggcgtttgagattctg

SEQ ID NO: 5150254 - DNA, 25 bp, Homo sapien
cgtttgagattctgggctaagacta

SEQ ID NO: 5150255 - DNA, 25 bp, Homo sapien
ctccctctttgccacggcgtttgag

SEQ ID NO: 5150256 - DNA, 25 bp, Homo sapien
tggaagagcccaagtgtgcagacga

SEQ ID NO: 5150257 - DNA, 25 bp, Homo sapien
gaagaagtttattcggccgagagcg

SEQ ID NO: 5150258 - DNA, 25 bp, Homo sapien
gacaaagactctgcaagtgccggag

SEQ ID NO: 5150259 - DNA, 25 bp, Homo sapien
catggccccgtttctcaagatgagg

SEQ ID NO: 5150260 - DNA, 25 bp, Homo sapien
gataaacgacatggatacaagtggg

SEQ ID NO: 5150261 - DNA, 25 bp, Homo sapien
gatcctttgtctcccgctgattaga

SEQ ID NO: 5150262 - DNA, 25 bp, Homo sapien
caagctgagcaagaatgatgattac

SEQ ID NO: 5150263 - DNA, 25 bp, Homo sapien
tctgatgactggagaaacaccatga

SEQ ID NO: 5150264 - DNA, 25 bp, Homo sapien
catatgcccatgtgattccgagaag

SEQ ID NO: 5150265 - DNA, 25 bp, Homo sapien
cacgagaaacaagatggcacccatg

SEQ ID NO: 5150266 - DNA, 25 bp, Homo sapien
tgttggttgcctccccaggacatac

SEQ ID NO: 5150267 - DNA, 25 bp, Homo sapien
tctgcagtctgctagagtcacccat

SEQ ID NO: 5150268 - DNA, 25 bp, Homo sapien
tattcattggctagggccaccataa

SEQ ID NO: 5150269 - DNA, 25 bp, Homo sapien
tccacattgtcttccctcatacgtg

SEQ ID NO: 5150270 - DNA, 25 bp, Homo sapien
ccatgaagtaagagtgtgttccagg

SEQ ID NO: 5150271 - DNA, 25 bp, Homo sapien
catacgtgcctgtgtccaggtttcc

SEQ ID NO: 5150272 - DNA, 25 bp, Homo sapien
ttggccaagttaggttagagcccca

SEQ ID NO: 5150273 - DNA, 25 bp, Homo sapien
gagtttactagaggcttggactgtt

SEQ ID NO: 5150274 - DNA, 25 bp, Homo sapien
tggccaagttaggttagagccccac

SEQ ID NO: 5150275 - DNA, 25 bp, Homo sapien
tagaggcttggactgtttttgtgtc

SEQ ID NO: 5150276 - DNA, 25 bp, Homo sapien
aatgctctaggccaagaactcccag

SEQ ID NO: 5150277 - DNA, 25 bp, Homo sapien
aaaaacagcccagattgacccctgg

SEQ ID NO: 5150278 - DNA, 25 bp, Homo sapien
gcatagttgttaaccaaggagctcc

SEQ ID NO: 5150279 - DNA, 25 bp, Homo sapien
aattagtgggctctgtttcctggct

SEQ ID NO: 5150280 - DNA, 25 bp, Homo sapien
cgcctggcaaatagtggtcatcgca

SEQ ID NO: 5150281 - DNA, 25 bp, Homo sapien
cacatcaagatggttcatgctccct

SEQ ID NO: 5150282 - DNA, 25 bp, Homo sapien
cactagcctgtgagagtctggaaaa

SEQ ID NO: 5150283 - DNA, 25 bp, Homo sapien
cataacagttttctaagggtgctac

SEQ ID NO: 5150284 - DNA, 25 bp, Homo sapien
tctcgggaaacaacacagagctctt

SEQ ID NO: 5150285 - DNA, 25 bp, Homo sapien
taggctatgagtagacacttcccat

SEQ ID NO: 5150286 - DNA, 25 bp, Homo sapien
gaatcacacatgcataggcaattag

SEQ ID NO: 5150287 - DNA, 25 bp, Homo sapien
caagataaaggtccagaaaacagct

SEQ ID NO: 5150288 - DNA, 25 bp, Homo sapien
caaacaatgtttactcaaagtggaa

SEQ ID NO: 5150289 - DNA, 25 bp, Homo sapien
aatggagggtcttgcgtgtcctgct

SEQ ID NO: 5150290 - DNA, 25 bp, Homo sapien
tcttcctattggtattaaagttgtc

SEQ ID NO: 5150291 - DNA, 25 bp, Homo sapien
ggaaacaaagcacggatgaggcaat

SEQ ID NO: 5150292 - DNA, 25 bp, Homo sapien
atagtactgggataattggataacc

SEQ ID NO: 5150293 - DNA, 25 bp, Homo sapien
ttggataaccacataccagagaatg

SEQ ID NO: 5150294 - DNA, 25 bp, Homo sapien
tcaatgggatgcaattgagagtcca

SEQ ID NO: 5150295 - DNA, 25 bp, Homo sapien
cagagaatggagttgaacccttaat

SEQ ID NO: 5150296 - DNA, 25 bp, Homo sapien
gcagaatgggtgaacatttcccaat

SEQ ID NO: 5150297 - DNA, 25 bp, Homo sapien
taaaaaccagatattggcagaatgg

SEQ ID NO: 5150298 - DNA, 25 bp, Homo sapien
gagtggctactaatgtcagacaaaa

SEQ ID NO: 5150299 - DNA, 25 bp, Homo sapien
tagaacaactaaccatggccaggtg

SEQ ID NO: 5150300 - DNA, 25 bp, Homo sapien
tggaatcaaaatggtactgtaaaaa

SEQ ID NO: 5150301 - DNA, 25 bp, Homo sapien
tggggatgcagactgggcatctgac

SEQ ID NO: 5150302 - DNA, 25 bp, Homo sapien
tgcagactgggcatctgactgggcc

SEQ ID NO: 5150303 - DNA, 25 bp, Homo sapien
gatgcagactgggcatctgactggg

SEQ ID NO: 5150304 - DNA, 25 bp, Homo sapien
gggatgcagactgggcatctgactg

SEQ ID NO: 5150305 - DNA, 25 bp, Homo sapien
aatggagaccagatagacccactga

SEQ ID NO: 5150306 - DNA, 25 bp, Homo sapien
aatccatggtggttagcaggagagc

SEQ ID NO: 5150307 - DNA, 25 bp, Homo sapien
gagctgcggccatttgttcataagc

SEQ ID NO: 5150308 - DNA, 25 bp, Homo sapien
ccagatagacccactgaaatccatg

SEQ ID NO: 5150309 - DNA, 25 bp, Homo sapien
tctaagagctataaactggcaaggg

SEQ ID NO: 5150310 - DNA, 25 bp, Homo sapien
gaataaactcgcttatactctcacc

SEQ ID NO: 5150311 - DNA, 25 bp, Homo sapien
aaaatatcacattcatatgggagaa

SEQ ID NO: 5150312 - DNA, 25 bp, Homo sapien
tcaccacctagagattttaatcgct

SEQ ID NO: 5150313 - DNA, 25 bp, Homo sapien
tgtctttactagctcctagaggctg

SEQ ID NO: 5150314 - DNA, 25 bp, Homo sapien
gatccatactttaatcacaccagca

SEQ ID NO: 5150315 - DNA, 25 bp, Homo sapien
gacttgtttacatgggacccatggg

SEQ ID NO: 5150316 - DNA, 25 bp, Homo sapien
tccatggtcaatgggaataatcttc

SEQ ID NO: 5150317 - DNA, 25 bp, Homo sapien
tcgccgtccaggtagcggtgcaggg

SEQ ID NO: 5150318 - DNA, 25 bp, Homo sapien
gccgtccaggtagcggtgcagggag

SEQ ID NO: 5150319 - DNA, 25 bp, Homo sapien
ccagaagtcgccgtccaggtagcgg

SEQ ID NO: 5150320 - DNA, 25 bp, Homo sapien
aagtcgccgtccaggtagcggtgca

SEQ ID NO: 5150321 - DNA, 25 bp, Homo sapien
ctttgccggaagagcgggcgccgcc

SEQ ID NO: 5150322 - DNA, 25 bp, Homo sapien
gtccgcgcagctcgttcttgaggct

SEQ ID NO: 5150323 - DNA, 25 bp, Homo sapien
aggagtccgcgcagctcgttcttga

SEQ ID NO: 5150324 - DNA, 25 bp, Homo sapien
gggcgccgccgaggagtccgcgcag

SEQ ID NO: 5150325 - DNA, 25 bp, Homo sapien
cctcgccagggcgttgtccgcagcg

SEQ ID NO: 5150326 - DNA, 25 bp, Homo sapien
aggggacacgctcggcggcttcggg

SEQ ID NO: 5150327 - DNA, 25 bp, Homo sapien
ccagggcgttgtccgcagcgacgct

SEQ ID NO: 5150328 - DNA, 25 bp, Homo sapien
gaccgaggggacacgctcggcggct

SEQ ID NO: 5150329 - DNA, 25 bp, Homo sapien
ctctcagggggccgaagaggtcggc

SEQ ID NO: 5150330 - DNA, 25 bp, Homo sapien
gcggcggccggctgcgcccacacac

SEQ ID NO: 5150331 - DNA, 25 bp, Homo sapien
cagggggccgaagaggtcggcggcg

SEQ ID NO: 5150332 - DNA, 25 bp, Homo sapien
tcagggggccgaagaggtcggcggc

SEQ ID NO: 5150333 - DNA, 25 bp, Homo sapien
ctgcacccgactcttcgtgggggag

SEQ ID NO: 5150334 - DNA, 25 bp, Homo sapien
tgcacccgactcttcgtgggggagg

SEQ ID NO: 5150335 - DNA, 25 bp, Homo sapien
ctgcactccgagggggtcctgtaag

SEQ ID NO: 5150336 - DNA, 25 bp, Homo sapien
gtcctggcatcggatgacatcgagg

SEQ ID NO: 5150337 - DNA, 25 bp, Homo sapien
gatgacatcgaggacctgagttctt

SEQ ID NO: 5150338 - DNA, 25 bp, Homo sapien
catcggatgacatcgaggacctgag

SEQ ID NO: 5150339 - DNA, 25 bp, Homo sapien
tcttataaccaaaccgccccgctga

SEQ ID NO: 5150340 - DNA, 25 bp, Homo sapien
cagcagcattgatattatctgcatt

SEQ ID NO: 5150341 - DNA, 25 bp, Homo sapien
aacacagcagcattgatattatctg

SEQ ID NO: 5150342 - DNA, 25 bp, Homo sapien
taacacagcagcattgatattatct

SEQ ID NO: 5150343 - DNA, 25 bp, Homo sapien
tcataacacagcagcattgatatta

SEQ ID NO: 5150344 - DNA, 25 bp, Homo sapien
caatgcacagggtgcagccaatcat

SEQ ID NO: 5150345 - DNA, 25 bp, Homo sapien
ttcctctcctcagagagctcagact

SEQ ID NO: 5150346 - DNA, 25 bp, Homo sapien
cttggcccattcctctcctcagaga

SEQ ID NO: 5150347 - DNA, 25 bp, Homo sapien
ttggcccattcctctcctcagagag

SEQ ID NO: 5150348 - DNA, 25 bp, Homo sapien
ccattcctctcctcagagagctcag

SEQ ID NO: 5150349 - DNA, 25 bp, Homo sapien
tgccagggtagcattagtggagtcc

SEQ ID NO: 5150350 - DNA, 25 bp, Homo sapien
tccagtagtggccatctatacccag

SEQ ID NO: 5150351 - DNA, 25 bp, Homo sapien
tgggccaagtagggagctgatcttc

SEQ ID NO: 5150352 - DNA, 25 bp, Homo sapien
ggtgcacaccttggtgggccaagta

SEQ ID NO: 5150353 - DNA, 25 bp, Homo sapien
tcatttcatccaagcttaaatcata

SEQ ID NO: 5150354 - DNA, 25 bp, Homo sapien
gaggcaggtccatggcaaacttcac

SEQ ID NO: 5150355 - DNA, 25 bp, Homo sapien
cactctctgaactgtcaaagctctc

SEQ ID NO: 5150356 - DNA, 25 bp, Homo sapien
tgcacgttttaacagaggcaggtcc

SEQ ID NO: 5150357 - DNA, 25 bp, Homo sapien
gattttttacgcttcgcaagcacgc

SEQ ID NO: 5150358 - DNA, 25 bp, Homo sapien
cctgagaagactccaggattggtcc

SEQ ID NO: 5150359 - DNA, 25 bp, Homo sapien
aggtgcctgcagtatcgcagcgcag

SEQ ID NO: 5150360 - DNA, 25 bp, Homo sapien
ggattggtccttgtctccttagaca

SEQ ID NO: 5150361 - DNA, 25 bp, Homo sapien
cgctttcaagtaatccctgtggcta

SEQ ID NO: 5150362 - DNA, 25 bp, Homo sapien
aaatcctccaagatatcccaggcgg

SEQ ID NO: 5150363 - DNA, 25 bp, Homo sapien
ggccaagtggccaatgtccaagtct

SEQ ID NO: 5150364 - DNA, 25 bp, Homo sapien
gggttccagtacaaacagaagccag

SEQ ID NO: 5150365 - DNA, 25 bp, Homo sapien
tttactgaagaatcaatccaaaatt

SEQ ID NO: 5150366 - DNA, 25 bp, Homo sapien
acaaggcttcggctgacaaaattct

SEQ ID NO: 5150367 - DNA, 25 bp, Homo sapien
tctcctatgacaaggcttcggctga

SEQ ID NO: 5150368 - DNA, 25 bp, Homo sapien
gagaggacttctcctatgacaaggc

SEQ ID NO: 5150369 - DNA, 25 bp, Homo sapien
gtccgccatggagaggacttctcct

SEQ ID NO: 5150370 - DNA, 25 bp, Homo sapien
ggcttcttgtctgatcattctgtct

SEQ ID NO: 5150371 - DNA, 25 bp, Homo sapien
gaaatcaccaccatattggactcac

SEQ ID NO: 5150372 - DNA, 25 bp, Homo sapien
tagacaatgtccacaccaaactgaa

SEQ ID NO: 5150373 - DNA, 25 bp, Homo sapien
gacatcacgactgggtgtttggata

SEQ ID NO: 5150374 - DNA, 25 bp, Homo sapien
caaactggggatcatgagagtctgg

SEQ ID NO: 5150375 - DNA, 25 bp, Homo sapien
tcctcatggtcacaatccacggagg

SEQ ID NO: 5150376 - DNA, 25 bp, Homo sapien
cacaatccacggaggcttgctgaag

SEQ ID NO: 5150377 - DNA, 25 bp, Homo sapien
tctggaccaggatcctccggtattt

SEQ ID NO: 5150378 - DNA, 25 bp, Homo sapien
tgatcataacatgcccaatgagggt

SEQ ID NO: 5150379 - DNA, 25 bp, Homo sapien
cgagcacacgaggtaatgatcataa

SEQ ID NO: 5150380 - DNA, 25 bp, Homo sapien
ttgcttgagaaagcctcctctctct

SEQ ID NO: 5150381 - DNA, 25 bp, Homo sapien
gaaaaaggacagctatgacatcgag

SEQ ID NO: 5150382 - DNA, 25 bp, Homo sapien
gcaccaccaaatagccaataaatta

SEQ ID NO: 5150383 - DNA, 25 bp, Homo sapien
ctggagtggctgaaaccacttagta

SEQ ID NO: 5150384 - DNA, 25 bp, Homo sapien
tggctgaaaccacttagtaacatgt

SEQ ID NO: 5150385 - DNA, 25 bp, Homo sapien
catgttcagggcttccgagattcct

SEQ ID NO: 5150386 - DNA, 25 bp, Homo sapien
cttcggtctggatccctctcgcgtt

SEQ ID NO: 5150387 - DNA, 25 bp, Homo sapien
tctcgcgttgctcccatggcccctc

SEQ ID NO: 5150388 - DNA, 25 bp, Homo sapien
ttcggtctggatccctctcgcgttg

SEQ ID NO: 5150389 - DNA, 25 bp, Homo sapien
tctcggtcattgcaaacatcccagt

SEQ ID NO: 5150390 - DNA, 25 bp, Homo sapien
tcattaactgcatagccagagtcag

SEQ ID NO: 5150391 - DNA, 25 bp, Homo sapien
gtcagctgcttaacctccgtgagcc

SEQ ID NO: 5150392 - DNA, 25 bp, Homo sapien
tcagctgcttaacctccgtgagcct

SEQ ID NO: 5150393 - DNA, 25 bp, Homo sapien
cagaggcccctcgtcattatgattg

SEQ ID NO: 5150394 - DNA, 25 bp, Homo sapien
gaggcacgccaggtagctaagtcat

SEQ ID NO: 5150395 - DNA, 25 bp, Homo sapien
ttgcaggtcccctatcagacagtgg

SEQ ID NO: 5150396 - DNA, 25 bp, Homo sapien
cctgctatgtcagttctcggtggta

SEQ ID NO: 5150397 - DNA, 25 bp, Homo sapien
cataattcccgtacatggcatttcc

SEQ ID NO: 5150398 - DNA, 25 bp, Homo sapien
cacacggcgtgtcaattacaaactc

SEQ ID NO: 5150399 - DNA, 25 bp, Homo sapien
cagctgcataattcccgtacatggc

SEQ ID NO: 5150400 - DNA, 25 bp, Homo sapien
tatacatcttctccgcattttcaca

SEQ ID NO: 5150401 - DNA, 25 bp, Homo sapien
gttttcatcccggacaggaacgatg

SEQ ID NO: 5150402 - DNA, 25 bp, Homo sapien
tcaatagctgtgactcctgggtaca

SEQ ID NO: 5150403 - DNA, 25 bp, Homo sapien
tcccggacaggaacgatgaaacagt

SEQ ID NO: 5150404 - DNA, 25 bp, Homo sapien
tcctgggtacaagcttccgttttca

SEQ ID NO: 5150405 - DNA, 25 bp, Homo sapien
ggtgcattttagagggcgctggtta

SEQ ID NO: 5150406 - DNA, 25 bp, Homo sapien
ccacagcaagtagcgcgggttgcca

SEQ ID NO: 5150407 - DNA, 25 bp, Homo sapien
tccacagcaagtagcgcgggttgcc

SEQ ID NO: 5150408 - DNA, 25 bp, Homo sapien
agtgcattttagagggcgctgattg

SEQ ID NO: 5150409 - DNA, 25 bp, Homo sapien
ggtatccgaaccttgtcaaatatta

SEQ ID NO: 5150410 - DNA, 25 bp, Homo sapien
tgtcaaatattaatatcccattgtc

SEQ ID NO: 5150411 - DNA, 25 bp, Homo sapien
tctccctgggtatccgaaccttgtc

SEQ ID NO: 5150412 - DNA, 25 bp, Homo sapien
gaaccttgtcaaatattaatatccc

SEQ ID NO: 5150413 - DNA, 25 bp, Homo sapien
tcctaataggcgaatggtactgtcc

SEQ ID NO: 5150414 - DNA, 25 bp, Homo sapien
catggcattgaatcttgcactcttg

SEQ ID NO: 5150415 - DNA, 25 bp, Homo sapien
gaaagccacagctaatctcgaaggg

SEQ ID NO: 5150416 - DNA, 25 bp, Homo sapien
tcatggcacccatagcttggaaagc

SEQ ID NO: 5150417 - DNA, 25 bp, Homo sapien
ggcagggcaggtgctaactccgggt

SEQ ID NO: 5150418 - DNA, 25 bp, Homo sapien
ggcaggtgctaactccgggttactg

SEQ ID NO: 5150419 - DNA, 25 bp, Homo sapien
caggtgctaactccgggttactgtg

SEQ ID NO: 5150420 - DNA, 25 bp, Homo sapien
cagggcaggtgctaactccgggtta

SEQ ID NO: 5150421 - DNA, 25 bp, Homo sapien
actgcctgacaatcccattgcctgg

SEQ ID NO: 5150422 - DNA, 25 bp, Homo sapien
tggctctgtgcggggtcttcccact

SEQ ID NO: 5150423 - DNA, 25 bp, Homo sapien
tcactgtccggcagggtgcctggac

SEQ ID NO: 5150424 - DNA, 25 bp, Homo sapien
tgagatcacagcggcccgggtcact

SEQ ID NO: 5150425 - DNA, 25 bp, Homo sapien
tacaacttggagatcatcgttcagg

SEQ ID NO: 5150426 - DNA, 25 bp, Homo sapien
tctccctgaagctcctggtgctggg

SEQ ID NO: 5150427 - DNA, 25 bp, Homo sapien
tatcgccggttctgagaatcccctg

SEQ ID NO: 5150428 - DNA, 25 bp, Homo sapien
cccatctcatatgtggcacgctgta

SEQ ID NO: 5150429 - DNA, 25 bp, Homo sapien
ctttgaggaaaagggcagtagatgt

SEQ ID NO: 5150430 - DNA, 25 bp, Homo sapien
tttgaggaaaagggcagtagatgta

SEQ ID NO: 5150431 - DNA, 25 bp, Homo sapien
ttgaggaaaagggcagtagatgtat

SEQ ID NO: 5150432 - DNA, 25 bp, Homo sapien
ctgcacttctctctagctcttcggt

SEQ ID NO: 5150433 - DNA, 25 bp, Homo sapien
tatctctggctgcacttctctctag

SEQ ID NO: 5150434 - DNA, 25 bp, Homo sapien
tctctggctgcacttctctctagct

SEQ ID NO: 5150435 - DNA, 25 bp, Homo sapien
tctggctgcacttctctctagctct

SEQ ID NO: 5150436 - DNA, 25 bp, Homo sapien
agcctgggcatcgttctcccggtag

SEQ ID NO: 5150437 - DNA, 25 bp, Homo sapien
ccagaggtggccaaaaggacttcca

SEQ ID NO: 5150438 - DNA, 25 bp, Homo sapien
aaggcaagcctctcccaagcagagg

SEQ ID NO: 5150439 - DNA, 25 bp, Homo sapien
cccggtagtagatgagctggcagct

SEQ ID NO: 5150440 - DNA, 25 bp, Homo sapien
tcaagcacaagatgtaggctgcccc

SEQ ID NO: 5150441 - DNA, 25 bp, Homo sapien
tggaatctcaagagcctagcccacg

SEQ ID NO: 5150442 - DNA, 25 bp, Homo sapien
gatgctgcactttgaggctccaaca

SEQ ID NO: 5150443 - DNA, 25 bp, Homo sapien
cctggaccgccttagaacaaagatg

SEQ ID NO: 5150444 - DNA, 25 bp, Homo sapien
ttatgaggtacaacagccgttcttg

SEQ ID NO: 5150445 - DNA, 25 bp, Homo sapien
gccgttcttgccatagagttttcca

SEQ ID NO: 5150446 - DNA, 25 bp, Homo sapien
tacaacagccgttcttgccatagag

SEQ ID NO: 5150447 - DNA, 25 bp, Homo sapien
gttttccatacagatgcctcatatt

SEQ ID NO: 5150448 - DNA, 25 bp, Homo sapien
caaaccaaacgacacagcagccagg

SEQ ID NO: 5150449 - DNA, 25 bp, Homo sapien
tcaaaccaaacgacacagcagccag

SEQ ID NO: 5150450 - DNA, 25 bp, Homo sapien
tacagtgaggctaattataagataa

SEQ ID NO: 5150451 - DNA, 25 bp, Homo sapien
tataagataattttactgactgaat

SEQ ID NO: 5150452 - DNA, 25 bp, Homo sapien
tgggattaaaacgttctggcttaca

SEQ ID NO: 5150453 - DNA, 25 bp, Homo sapien
tttcacatgccggataactttacat

SEQ ID NO: 5150454 - DNA, 25 bp, Homo sapien
tgtggctatagcgaatggctatcgt

SEQ ID NO: 5150455 - DNA, 25 bp, Homo sapien
ctgtggctatagcgaatggctatcg

SEQ ID NO: 5150456 - DNA, 25 bp, Homo sapien
gctatagcgaatggctatcgtcaac

SEQ ID NO: 5150457 - DNA, 25 bp, Homo sapien
tggctatagcgaatggctatcgtca

SEQ ID NO: 5150458 - DNA, 25 bp, Homo sapien
caacagaaaagagcatggagcatgg

SEQ ID NO: 5150459 - DNA, 25 bp, Homo sapien
acaacagaaaagagcatggagcatg

SEQ ID NO: 5150460 - DNA, 25 bp, Homo sapien
caacaacagaaaagagcatggagca

SEQ ID NO: 5150461 - DNA, 25 bp, Homo sapien
cccaacaacagaaaagagcatggag

SEQ ID NO: 5150462 - DNA, 25 bp, Homo sapien
tgccgtgtgctccactccaacccag

SEQ ID NO: 5150463 - DNA, 25 bp, Homo sapien
gctccactccaacccagggcagcca

SEQ ID NO: 5150464 - DNA, 25 bp, Homo sapien
ctgccgtgtgctccactccaaccca

SEQ ID NO: 5150465 - DNA, 25 bp, Homo sapien
ccagagcacccagatccagagaaaa

SEQ ID NO: 5150466 - DNA, 25 bp, Homo sapien
gactctggtgccacaaatgacaatc

SEQ ID NO: 5150467 - DNA, 25 bp, Homo sapien
tgttgatggcaggctccttttccca

SEQ ID NO: 5150468 - DNA, 25 bp, Homo sapien
agaaaaggtgcatcagccaatcctg

SEQ ID NO: 5150469 - DNA, 25 bp, Homo sapien
gtctgtgtgccttaacctcctcatc

SEQ ID NO: 5150470 - DNA, 25 bp, Homo sapien
gcaggtgagtctgtgtgccttaacc

SEQ ID NO: 5150471 - DNA, 25 bp, Homo sapien
ctgcaggtgagtctgtgtgccttaa

SEQ ID NO: 5150472 - DNA, 25 bp, Homo sapien
aggtgagtctgtgtgccttaacctc

SEQ ID NO: 5150473 - DNA, 25 bp, Homo sapien
caagttgaaatgctaggaatggcct

SEQ ID NO: 5150474 - DNA, 25 bp, Homo sapien
ccagatcgtccttgccaggcagaga

SEQ ID NO: 5150475 - DNA, 25 bp, Homo sapien
gcctatagggatctgccacgggaaa

SEQ ID NO: 5150476 - DNA, 25 bp, Homo sapien
ggcaacacacactttagggtaacag

SEQ ID NO: 5150477 - DNA, 25 bp, Homo sapien
tggactctgagacttcttagggtgc

SEQ ID NO: 5150478 - DNA, 25 bp, Homo sapien
cttcttagggtgcaaacttgtttgc

SEQ ID NO: 5150479 - DNA, 25 bp, Homo sapien
tctgagacttcttagggtgcaaact

SEQ ID NO: 5150480 - DNA, 25 bp, Homo sapien
tgagacttcttagggtgcaaacttg

SEQ ID NO: 5150481 - DNA, 25 bp, Homo sapien
tccaggcctggactctggttgccag

SEQ ID NO: 5150482 - DNA, 25 bp, Homo sapien
agtccaggcctggactctggttgcc

SEQ ID NO: 5150483 - DNA, 25 bp, Homo sapien
aggcctggactctggttgccagcat

SEQ ID NO: 5150484 - DNA, 25 bp, Homo sapien
caagggccatgacagtccaggcctg

SEQ ID NO: 5150485 - DNA, 25 bp, Homo sapien
agatgcagcaagaggtcagccctgt

SEQ ID NO: 5150486 - DNA, 25 bp, Homo sapien
atgcagcaagaggtcagccctgtga

SEQ ID NO: 5150487 - DNA, 25 bp, Homo sapien
agcaagaggtcagccctgtgactgc

SEQ ID NO: 5150488 - DNA, 25 bp, Homo sapien
gcagcaagaggtcagccctgtgact

SEQ ID NO: 5150489 - DNA, 25 bp, Homo sapien
ttgaccccacaattggggtgatggg

SEQ ID NO: 5150490 - DNA, 25 bp, Homo sapien
agttcctctttgaccccacaattgg

SEQ ID NO: 5150491 - DNA, 25 bp, Homo sapien
agaaagaggccaccaaggctccatg

SEQ ID NO: 5150492 - DNA, 25 bp, Homo sapien
caattggggtgatgggtgaagagca

SEQ ID NO: 5150493 - DNA, 25 bp, Homo sapien
ttaaatccctgtgccctgcagacag

SEQ ID NO: 5150494 - DNA, 25 bp, Homo sapien
taaatccctgtgccctgcagacagc

SEQ ID NO: 5150495 - DNA, 25 bp, Homo sapien
aatccctgtgccctgcagacagcat

SEQ ID NO: 5150496 - DNA, 25 bp, Homo sapien
cttaaatccctgtgccctgcagaca

SEQ ID NO: 5150497 - DNA, 25 bp, Homo sapien
gcatcagccgcagggtctgtgtttg

SEQ ID NO: 5150498 - DNA, 25 bp, Homo sapien
ggtggggcatcagccgcagggtctg

SEQ ID NO: 5150499 - DNA, 25 bp, Homo sapien
atcagccgcagggtctgtgtttggt

SEQ ID NO: 5150500 - DNA, 25 bp, Homo sapien
ggccaggtggggcatcagccgcagg

SEQ ID NO: 5150501 - DNA, 25 bp, Homo sapien
atgcctccagtgcactcgcggcagt

SEQ ID NO: 5150502 - DNA, 25 bp, Homo sapien
tgcactcgcggcagtcctgcaggca

SEQ ID NO: 5150503 - DNA, 25 bp, Homo sapien
tgcaggcagcggatgttctcccagg

SEQ ID NO: 5150504 - DNA, 25 bp, Homo sapien
cctgcagcgagcgactgttgaccag

SEQ ID NO: 5150505 - DNA, 25 bp, Homo sapien
cctttcccatactgtccactactac

SEQ ID NO: 5150506 - DNA, 25 bp, Homo sapien
gtggccctttcccatactgtccact

SEQ ID NO: 5150507 - DNA, 25 bp, Homo sapien
tcagtggccctttcccatactgtcc

SEQ ID NO: 5150508 - DNA, 25 bp, Homo sapien
gccctttcccatactgtccactact

SEQ ID NO: 5150509 - DNA, 25 bp, Homo sapien
cacatctggcttgcattcgaatgaa

SEQ ID NO: 5150510 - DNA, 25 bp, Homo sapien
tctggagttccagtagctgccacat

SEQ ID NO: 5150511 - DNA, 25 bp, Homo sapien
gttcagaggtgctgtttataagcaa

SEQ ID NO: 5150512 - DNA, 25 bp, Homo sapien
gaagtgcacagctgatcctgcagtc

SEQ ID NO: 5150513 - DNA, 25 bp, Homo sapien
taaatatgctgtgtctgctacggca

SEQ ID NO: 5150514 - DNA, 25 bp, Homo sapien
gatttcctaacactaagaggtgtgt

SEQ ID NO: 5150515 - DNA, 25 bp, Homo sapien
taagccctatggagtttagtacctc

SEQ ID NO: 5150516 - DNA, 25 bp, Homo sapien
cacagagaatccgtaggaaggtcag

SEQ ID NO: 5150517 - DNA, 25 bp, Homo sapien
tcactgcgctccaattttgtagata

SEQ ID NO: 5150518 - DNA, 25 bp, Homo sapien
caggtgcctgttatgaaccacttcc

SEQ ID NO: 5150519 - DNA, 25 bp, Homo sapien
gataggactatcttcataggaaacc

SEQ ID NO: 5150520 - DNA, 25 bp, Homo sapien
taaagccaaggataaaatacaggtg

SEQ ID NO: 5150521 - DNA, 25 bp, Homo sapien
taaccatggcattggaaactcttgc

SEQ ID NO: 5150522 - DNA, 25 bp, Homo sapien
gagaactgaggtaacagggctcaca

SEQ ID NO: 5150523 - DNA, 25 bp, Homo sapien
aactgaggtaacagggctcacagcc

SEQ ID NO: 5150524 - DNA, 25 bp, Homo sapien
cttgagaactgaggtaacagggctc

SEQ ID NO: 5150525 - DNA, 25 bp, Homo sapien
tgagaactgaggtaacagggctcac

SEQ ID NO: 5150526 - DNA, 25 bp, Homo sapien
aaaatggccacaggggtcttagaag

SEQ ID NO: 5150527 - DNA, 25 bp, Homo sapien
aatggccacaggggtcttagaagtc

SEQ ID NO: 5150528 - DNA, 25 bp, Homo sapien
gccctcagatgcctgaaaacttgtt

SEQ ID NO: 5150529 - DNA, 25 bp, Homo sapien
tgaaaatggccacaggggtcttaga

SEQ ID NO: 5150530 - DNA, 25 bp, Homo sapien
caaaccagagaatcagctacacagg

SEQ ID NO: 5150531 - DNA, 25 bp, Homo sapien
gggcagtcatactcttgaatctcca

SEQ ID NO: 5150532 - DNA, 25 bp, Homo sapien
tgtgcagtgagcactttagctctga

SEQ ID NO: 5150533 - DNA, 25 bp, Homo sapien
tacttctcccaggagtatgtgcagt

SEQ ID NO: 5150534 - DNA, 25 bp, Homo sapien
ttagttcacgaatattattttggtg

SEQ ID NO: 5150535 - DNA, 25 bp, Homo sapien
attagcttttagttcacgaatatta

SEQ ID NO: 5150536 - DNA, 25 bp, Homo sapien
tagcttttagttcacgaatattatt

SEQ ID NO: 5150537 - DNA, 25 bp, Homo sapien
gttcacgaatattattttggtggta

SEQ ID NO: 5150538 - DNA, 25 bp, Homo sapien
ctgaagcataacaacatcgtcacct

SEQ ID NO: 5150539 - DNA, 25 bp, Homo sapien
gcataacaacatcgtcaccttcaaa

SEQ ID NO: 5150540 - DNA, 25 bp, Homo sapien
acatcgtcaccttcaaaagtggcaa

SEQ ID NO: 5150541 - DNA, 25 bp, Homo sapien
aacaacatcgtcaccttcaaaagtg

SEQ ID NO: 5150542 - DNA, 25 bp, Homo sapien
gatccattgccgttcttttgtaaac

SEQ ID NO: 5150543 - DNA, 25 bp, Homo sapien
gggccttacatactctttcaaaata

SEQ ID NO: 5150544 - DNA, 25 bp, Homo sapien
tccttgatcattaggaggctgatcc

SEQ ID NO: 5150545 - DNA, 25 bp, Homo sapien
catgagccgattggattgagaaagg

SEQ ID NO: 5150546 - DNA, 25 bp, Homo sapien
tttctgttataaatagcactctctg

SEQ ID NO: 5150547 - DNA, 25 bp, Homo sapien
atgaggtgaaggctccactgcttac

SEQ ID NO: 5150548 - DNA, 25 bp, Homo sapien
tggatgaggtgaaggctccactgct

SEQ ID NO: 5150549 - DNA, 25 bp, Homo sapien
gaaggctccactgcttactgactcc

SEQ ID NO: 5150550 - DNA, 25 bp, Homo sapien
ggtgaaggctccactgcttactgac

SEQ ID NO: 5150551 - DNA, 25 bp, Homo sapien
aaacagagacccacatccgtggctc

SEQ ID NO: 5150552 - DNA, 25 bp, Homo sapien
ctgcaaaacagagacccacatccgt

SEQ ID NO: 5150553 - DNA, 25 bp, Homo sapien
gcaaaacagagacccacatccgtgg

SEQ ID NO: 5150554 - DNA, 25 bp, Homo sapien
aaaacagagacccacatccgtggct

SEQ ID NO: 5150555 - DNA, 25 bp, Homo sapien
ccttcatagatgttgtctgtgccaa

SEQ ID NO: 5150556 - DNA, 25 bp, Homo sapien
tctccaagtatttccgagcatagta

SEQ ID NO: 5150557 - DNA, 25 bp, Homo sapien
tgttggttagatgaactactatcct

SEQ ID NO: 5150558 - DNA, 25 bp, Homo sapien
gactaatgatatctctgttggttag

SEQ ID NO: 5150559 - DNA, 25 bp, Homo sapien
cagggaatcatctggtactatgaga

SEQ ID NO: 5150560 - DNA, 25 bp, Homo sapien
tgagagacagatgagcctccagcca

SEQ ID NO: 5150561 - DNA, 25 bp, Homo sapien
aatcatctggtactatgagagacag

SEQ ID NO: 5150562 - DNA, 25 bp, Homo sapien
gacagatgagcctccagccacagct

SEQ ID NO: 5150563 - DNA, 25 bp, Homo sapien
cttccattaagtagcacaggtaatc

SEQ ID NO: 5150564 - DNA, 25 bp, Homo sapien
cttcttccattaagtagcacaggta

SEQ ID NO: 5150565 - DNA, 25 bp, Homo sapien
ctggagttacgctgttctttgtgta

SEQ ID NO: 5150566 - DNA, 25 bp, Homo sapien
cattctggcccgtgatgtgcttctg

SEQ ID NO: 5150567 - DNA, 25 bp, Homo sapien
cttgatgtataagcagcatgagctt

SEQ ID NO: 5150568 - DNA, 25 bp, Homo sapien
catagacttgatgtataagcagcat

SEQ ID NO: 5150569 - DNA, 25 bp, Homo sapien
cttttcatagacttgatgtataagc

SEQ ID NO: 5150570 - DNA, 25 bp, Homo sapien
gacttgatgtataagcagcatgagc

SEQ ID NO: 5150571 - DNA, 25 bp, Homo sapien
aggaagcttgccttcttttgagcta

SEQ ID NO: 5150572 - DNA, 25 bp, Homo sapien
tgaggaagcttgccttcttttgagc

SEQ ID NO: 5150573 - DNA, 25 bp, Homo sapien
gaggaagcttgccttcttttgagct

SEQ ID NO: 5150574 - DNA, 25 bp, Homo sapien
tctcccctgtgtctcctgaaatttc

SEQ ID NO: 5150575 - DNA, 25 bp, Homo sapien
tggccagtttctcccctgtgtctcc

SEQ ID NO: 5150576 - DNA, 25 bp, Homo sapien
tcccctgtgtctcctgaaatttcca

SEQ ID NO: 5150577 - DNA, 25 bp, Homo sapien
tttctcccctgtgtctcctgaaatt

SEQ ID NO: 5150578 - DNA, 25 bp, Homo sapien
ttcccgtcagcaggcacatatcttg

SEQ ID NO: 5150579 - DNA, 25 bp, Homo sapien
gctcccttctgattggagaaacatt

SEQ ID NO: 5150580 - DNA, 25 bp, Homo sapien
gtattactaccaggcttcccgtcag

SEQ ID NO: 5150581 - DNA, 25 bp, Homo sapien
cataaggcttgatggtattactacc

SEQ ID NO: 5150582 - DNA, 25 bp, Homo sapien
gagcaggccaaagagtggtttttct

SEQ ID NO: 5150583 - DNA, 25 bp, Homo sapien
ggagcaggccaaagagtggtttttc

SEQ ID NO: 5150584 - DNA, 25 bp, Homo sapien
gtttggtgtattgggccagcagttc

SEQ ID NO: 5150585 - DNA, 25 bp, Homo sapien
atactgtttggtgtattgggccagc

SEQ ID NO: 5150586 - DNA, 25 bp, Homo sapien
ctgactccttccaggccgaaatgag

SEQ ID NO: 5150587 - DNA, 25 bp, Homo sapien
tactgtgcggacaaatgggtgccca

SEQ ID NO: 5150588 - DNA, 25 bp, Homo sapien
aggcttttcagtaccatgactgact

SEQ ID NO: 5150589 - DNA, 25 bp, Homo sapien
ccgaaatgaggggtagttactgtgc

SEQ ID NO: 5150590 - DNA, 25 bp, Homo sapien
aaaggcgagatcatcaactgtgtcc

SEQ ID NO: 5150591 - DNA, 25 bp, Homo sapien
gctttcaacagaaaggcgagatcat

SEQ ID NO: 5150592 - DNA, 25 bp, Homo sapien
cgctgaagaaccctttcacgaaatt

SEQ ID NO: 5150593 - DNA, 25 bp, Homo sapien
gaaccctttcacgaaatttcactgc

SEQ ID NO: 5150594 - DNA, 25 bp, Homo sapien
agttcaagatcaaagcattaatctt

SEQ ID NO: 5150595 - DNA, 25 bp, Homo sapien
tcagttcaagatcaaagcattaatc

SEQ ID NO: 5150596 - DNA, 25 bp, Homo sapien
cagttcaagatcaaagcattaatct

SEQ ID NO: 5150597 - DNA, 25 bp, Homo sapien
gaattgatatttctgtgccatgaga

SEQ ID NO: 5150598 - DNA, 25 bp, Homo sapien
cattcgggccactgtattggtttgt

SEQ ID NO: 5150599 - DNA, 25 bp, Homo sapien
aaaacatctgccattcgggccactg

SEQ ID NO: 5150600 - DNA, 25 bp, Homo sapien
caaaagtccctaccagaattgatat

SEQ ID NO: 5150601 - DNA, 25 bp, Homo sapien
tgggaaacggtacgtgtttgatctg

SEQ ID NO: 5150602 - DNA, 25 bp, Homo sapien
ttttccctgttgaggcttaactgaa

SEQ ID NO: 5150603 - DNA, 25 bp, Homo sapien
ttttgtcacacacacgagttccagg

SEQ ID NO: 5150604 - DNA, 25 bp, Homo sapien
ttgatctgacctgtttctgaaactt

SEQ ID NO: 5150605 - DNA, 25 bp, Homo sapien
cccaaagacaaagtctatgcctggt

SEQ ID NO: 5150606 - DNA, 25 bp, Homo sapien
gtctggagtccggcaatataaacag

SEQ ID NO: 5150607 - DNA, 25 bp, Homo sapien
ttctttcacgcacgctgtcttccaa

SEQ ID NO: 5150608 - DNA, 25 bp, Homo sapien
cagttgcggggcctgccaggatctc

SEQ ID NO: 5150609 - DNA, 25 bp, Homo sapien
cccagacaggactgtatcccggatt

SEQ ID NO: 5150610 - DNA, 25 bp, Homo sapien
gtgcccagacaggactgtatcccgg

SEQ ID NO: 5150611 - DNA, 25 bp, Homo sapien
cagacaggactgtatcccggattcg

SEQ ID NO: 5150612 - DNA, 25 bp, Homo sapien
gacaggactgtatcccggattcggg

SEQ ID NO: 5150613 - DNA, 25 bp, Homo sapien
ttctctcatgtatttgcactccaaa

SEQ ID NO: 5150614 - DNA, 25 bp, Homo sapien
tctctcatgtatttgcactccaaat

SEQ ID NO: 5150615 - DNA, 25 bp, Homo sapien
ttagagtgatttgaccgtgcttact

SEQ ID NO: 5150616 - DNA, 25 bp, Homo sapien
tgatttgaccgtgcttactcctaaa

SEQ ID NO: 5150617 - DNA, 25 bp, Homo sapien
tgaccgtgcttactcctaaatctcc

SEQ ID NO: 5150618 - DNA, 25 bp, Homo sapien
tcaggaaagagtccagtcctgatca

SEQ ID NO: 5150619 - DNA, 25 bp, Homo sapien
gaggacaagagctggccagacactt

SEQ ID NO: 5150620 - DNA, 25 bp, Homo sapien
cagatgcatgcaactctcagggaac

SEQ ID NO: 5150621 - DNA, 25 bp, Homo sapien
tgtgctccggtggaaaaacagcgct

SEQ ID NO: 5150622 - DNA, 25 bp, Homo sapien
acaatgtcatgggtgcctcgggatc

SEQ ID NO: 5150623 - DNA, 25 bp, Homo sapien
gttccaggcatggaaaaaatcctcc

SEQ ID NO: 5150624 - DNA, 25 bp, Homo sapien
agagaagccacgtggtgcagacacg

SEQ ID NO: 5150625 - DNA, 25 bp, Homo sapien
ccacgtggtgcagacacgagttcca

SEQ ID NO: 5150626 - DNA, 25 bp, Homo sapien
ggtgcagacacgagttccaggcatg

SEQ ID NO: 5150627 - DNA, 25 bp, Homo sapien
gacagctcttcactgctagggagaa

SEQ ID NO: 5150628 - DNA, 25 bp, Homo sapien
gctcttcactgctagggagaactgc

SEQ ID NO: 5150629 - DNA, 25 bp, Homo sapien
tcttcactgctagggagaactgctc

SEQ ID NO: 5150630 - DNA, 25 bp, Homo sapien
gtcaggacagctcttcactgctagg

SEQ ID NO: 5150631 - DNA, 25 bp, Homo sapien
ctccgcaggcagcagtggtgctcgt

SEQ ID NO: 5150632 - DNA, 25 bp, Homo sapien
aattcgcctatgacaagcttatccc

SEQ ID NO: 5150633 - DNA, 25 bp, Homo sapien
tggtgctcgttaaccagcaaccctc

SEQ ID NO: 5150634 - DNA, 25 bp, Homo sapien
aaccctccaattcgcctatgacaag

SEQ ID NO: 5150635 - DNA, 25 bp, Homo sapien
cagaaggaaggacatcatggtttgc

SEQ ID NO: 5150636 - DNA, 25 bp, Homo sapien
ctgcagaaggaaggacatcatggtt

SEQ ID NO: 5150637 - DNA, 25 bp, Homo sapien
tgcagaaggaaggacatcatggttt

SEQ ID NO: 5150638 - DNA, 25 bp, Homo sapien
agaaggaaggacatcatggtttgca

SEQ ID NO: 5150639 - DNA, 25 bp, Homo sapien
cattctttgggtcttgaggttccta

SEQ ID NO: 5150640 - DNA, 25 bp, Homo sapien
ctaactctggaatgtatgaggcaca

SEQ ID NO: 5150641 - DNA, 25 bp, Homo sapien
gcacaaacaaaattcagggagttcc

SEQ ID NO: 5150642 - DNA, 25 bp, Homo sapien
cagtgtttttagttggacttagcag

SEQ ID NO: 5150643 - DNA, 25 bp, Homo sapien
gaagatcagaattcaaagtgctcca

SEQ ID NO: 5150644 - DNA, 25 bp, Homo sapien
cagaaagtatcaggatggtcatgga

SEQ ID NO: 5150645 - DNA, 25 bp, Homo sapien
cgaaatgttgaatgcagcctgaggc

SEQ ID NO: 5150646 - DNA, 25 bp, Homo sapien
tccctggaagcatgtgcagcagagt

SEQ ID NO: 5150647 - DNA, 25 bp, Homo sapien
tgaaaaggtggacatttgctcattt

SEQ ID NO: 5150648 - DNA, 25 bp, Homo sapien
gttagctgtctttgaaaaggtggac

SEQ ID NO: 5150649 - DNA, 25 bp, Homo sapien
caatcataagtcctttccaattgag

SEQ ID NO: 5150650 - DNA, 25 bp, Homo sapien
caattgagaacaatgttgcttcaga

SEQ ID NO: 5150651 - DNA, 25 bp, Homo sapien
gagttctttatgactcttggttaag

SEQ ID NO: 5150652 - DNA, 25 bp, Homo sapien
tatgactcttggttaagtcacctga

SEQ ID NO: 5150653 - DNA, 25 bp, Homo sapien
ctttatgactcttggttaagtcacc

SEQ ID NO: 5150654 - DNA, 25 bp, Homo sapien
ccccaaggagttctttatgactctt

SEQ ID NO: 5150655 - DNA, 25 bp, Homo sapien
caaaatctaaggaggcgaaagagaa

SEQ ID NO: 5150656 - DNA, 25 bp, Homo sapien
aacacaaaatctaaggaggcgaaag

SEQ ID NO: 5150657 - DNA, 25 bp, Homo sapien
taaggaggcgaaagagaaataacat

SEQ ID NO: 5150658 - DNA, 25 bp, Homo sapien
ctaaggaggcgaaagagaaataaca

SEQ ID NO: 5150659 - DNA, 25 bp, Homo sapien
accaggcccgctcctgaaacaccag

SEQ ID NO: 5150660 - DNA, 25 bp, Homo sapien
gggagtcaagtatttatgttctaaa

SEQ ID NO: 5150661 - DNA, 25 bp, Homo sapien
aaataccaggcccgctcctgaaaca

SEQ ID NO: 5150662 - DNA, 25 bp, Homo sapien
ctaaataccaggcccgctcctgaaa

SEQ ID NO: 5150663 - DNA, 25 bp, Homo sapien
tgttagaaaactcatgtacagtgag

SEQ ID NO: 5150664 - DNA, 25 bp, Homo sapien
cccttgtcacctaaactcttaagtg

SEQ ID NO: 5150665 - DNA, 25 bp, Homo sapien
ccatgagtggaaactgatagaagat

SEQ ID NO: 5150666 - DNA, 25 bp, Homo sapien
atagaagattggcaggactgttttc

SEQ ID NO: 5150667 - DNA, 25 bp, Homo sapien
gagctcccttcatgtggagactgag

SEQ ID NO: 5150668 - DNA, 25 bp, Homo sapien
cttcaaggtctagcataagaatggc

SEQ ID NO: 5150669 - DNA, 25 bp, Homo sapien
tccactgtagtctggttcctgacga

SEQ ID NO: 5150670 - DNA, 25 bp, Homo sapien
tccatgccctgtgagagtatttgtg

SEQ ID NO: 5150671 - DNA, 25 bp, Homo sapien
ctgctggctgatgcaactgctcctg

SEQ ID NO: 5150672 - DNA, 25 bp, Homo sapien
cccagcaagggtgcaaaacaggatt

SEQ ID NO: 5150673 - DNA, 25 bp, Homo sapien
atttgtgcttgtgctggtgaatctg

SEQ ID NO: 5150674 - DNA, 25 bp, Homo sapien
gctgatgcaactgctcctgtgtcca

SEQ ID NO: 5150675 - DNA, 25 bp, Homo sapien
cttagattaaaatagtaaacgagtg

SEQ ID NO: 5150676 - DNA, 25 bp, Homo sapien
tagtaaacgagtgtaatccatcttc

SEQ ID NO: 5150677 - DNA, 25 bp, Homo sapien
tcttctacgttcaaaggagccaagc

SEQ ID NO: 5150678 - DNA, 25 bp, Homo sapien
gggcctggtgtctaccacacttctg

SEQ ID NO: 5150679 - DNA, 25 bp, Homo sapien
ttcaggttttcagtgaggtcccaag

SEQ ID NO: 5150680 - DNA, 25 bp, Homo sapien
atagtccaacaatacatcttccctg

SEQ ID NO: 5150681 - DNA, 25 bp, Homo sapien
gaaaatgtgctctattacaccagta

SEQ ID NO: 5150682 - DNA, 25 bp, Homo sapien
ggaagagcatgaattgtaatagtcc

SEQ ID NO: 5150683 - DNA, 25 bp, Homo sapien
cccttgcagcagtccaaaacgccat

SEQ ID NO: 5150684 - DNA, 25 bp, Homo sapien
tgtctgagccgcactgatgttgtta

SEQ ID NO: 5150685 - DNA, 25 bp, Homo sapien
gtggtcatgtctgagccgcactgat

SEQ ID NO: 5150686 - DNA, 25 bp, Homo sapien
cgcactgatgttgttaagatcacag

SEQ ID NO: 5150687 - DNA, 25 bp, Homo sapien
taaaactacacaagggcagagggac

SEQ ID NO: 5150688 - DNA, 25 bp, Homo sapien
aattcagtacagtgagacggcggac

SEQ ID NO: 5150689 - DNA, 25 bp, Homo sapien
ggataagacattcccggcggatagg

SEQ ID NO: 5150690 - DNA, 25 bp, Homo sapien
gacggcggaccaatgctaggcatct

SEQ ID NO: 5150691 - DNA, 25 bp, Homo sapien
tgttaaaggtcgagatcaccctccg

SEQ ID NO: 5150692 - DNA, 25 bp, Homo sapien
cccgcgggttggagattccggcgat

SEQ ID NO: 5150693 - DNA, 25 bp, Homo sapien
gagattccggcgattggtgcgtgga

SEQ ID NO: 5150694 - DNA, 25 bp, Homo sapien
ttcaccgagtcgcacaaatccagca

SEQ ID NO: 5150695 - DNA, 25 bp, Homo sapien
cgcgccttgtcttgccgtacggaaa

SEQ ID NO: 5150696 - DNA, 25 bp, Homo sapien
tgtgagtcaccgctaacagcaggag

SEQ ID NO: 5150697 - DNA, 25 bp, Homo sapien
gcctgggaggacaagccgagttctt

SEQ ID NO: 5150698 - DNA, 25 bp, Homo sapien
ccgagttcttgttttgccgagagca

SEQ ID NO: 5150699 - DNA, 25 bp, Homo sapien
caccctctgcaagcagcgggaacga

SEQ ID NO: 5150700 - DNA, 25 bp, Homo sapien
tccccaccctctgcaagcagcggga

SEQ ID NO: 5150701 - DNA, 25 bp, Homo sapien
accctctgcaagcagcgggaacgac

SEQ ID NO: 5150702 - DNA, 25 bp, Homo sapien
cccaccctctgcaagcagcgggaac

SEQ ID NO: 5150703 - DNA, 25 bp, Homo sapien
tgccctgagtttctaagccgctctg

SEQ ID NO: 5150704 - DNA, 25 bp, Homo sapien
gggaggcgccctgcgctctcactgt

SEQ ID NO: 5150705 - DNA, 25 bp, Homo sapien
tcgccctaagagacagaggccgtgg

SEQ ID NO: 5150706 - DNA, 25 bp, Homo sapien
cgcggatcagcaggctgcgcatctt

SEQ ID NO: 5150707 - DNA, 25 bp, Homo sapien
ctccaacaaactgcagaccaggcgg

SEQ ID NO: 5150708 - DNA, 25 bp, Homo sapien
tggctgcaagaatcaagtggtggta

SEQ ID NO: 5150709 - DNA, 25 bp, Homo sapien
gcagcgaaccgaataccgcgatgat

SEQ ID NO: 5150710 - DNA, 25 bp, Homo sapien
ttctcagtccgagagtcagagtcag

SEQ ID NO: 5150711 - DNA, 25 bp, Homo sapien
gagacaaagcaggacttgcgccgcg

SEQ ID NO: 5150712 - DNA, 25 bp, Homo sapien
tggagacaaagcaggacttgcgccg

SEQ ID NO: 5150713 - DNA, 25 bp, Homo sapien
ctggagacaaagcaggacttgcgcc

SEQ ID NO: 5150714 - DNA, 25 bp, Homo sapien
gacaaagcaggacttgcgccgcgcc

SEQ ID NO: 5150715 - DNA, 25 bp, Homo sapien
tgaccgtcaccacgaaagcagcgca

SEQ ID NO: 5150716 - DNA, 25 bp, Homo sapien
cgggttcagagtccccggcgcagcg

SEQ ID NO: 5150717 - DNA, 25 bp, Homo sapien
ttcccttcagagcgcagcgtccggg

SEQ ID NO: 5150718 - DNA, 25 bp, Homo sapien
cgcaggagacaaagcccgggactcg

SEQ ID NO: 5150719 - DNA, 25 bp, Homo sapien
gtcacactcagaacttacatcagaa

SEQ ID NO: 5150720 - DNA, 25 bp, Homo sapien
tctccgcaggctgcaattgtctacc

SEQ ID NO: 5150721 - DNA, 25 bp, Homo sapien
cttacatcagaaggttgctttgcca

SEQ ID NO: 5150722 - DNA, 25 bp, Homo sapien
cttgtggctctgtctgtagggaggt

SEQ ID NO: 5150723 - DNA, 25 bp, Homo sapien
tctggtagcaaaagggccagggctg

SEQ ID NO: 5150724 - DNA, 25 bp, Homo sapien
tgtgtcaaaagagaaatacccactg

SEQ ID NO: 5150725 - DNA, 25 bp, Homo sapien
tacccactggaggatcgagacagca

SEQ ID NO: 5150726 - DNA, 25 bp, Homo sapien
cagggaggatcttctcataaagatg

SEQ ID NO: 5150727 - DNA, 25 bp, Homo sapien
ttgatttgtcacaactcatgggtgc

SEQ ID NO: 5150728 - DNA, 25 bp, Homo sapien
tttgtcacaactcatgggtgctggg

SEQ ID NO: 5150729 - DNA, 25 bp, Homo sapien
tgtgttgatttgtcacaactcatgg

SEQ ID NO: 5150730 - DNA, 25 bp, Homo sapien
gatttgtcacaactcatgggtgctg

SEQ ID NO: 5150731 - DNA, 25 bp, Homo sapien
taggtgtggcccaaacatagaaggg

SEQ ID NO: 5150732 - DNA, 25 bp, Homo sapien
caatgttgaaacagggtatctggca

SEQ ID NO: 5150733 - DNA, 25 bp, Homo sapien
gcaagtcgatcaacacagactcagc

SEQ ID NO: 5150734 - DNA, 25 bp, Homo sapien
ggttcaagggccaaatcaagtctgc

SEQ ID NO: 5150735 - DNA, 25 bp, Homo sapien
gttcatgtatggcaagctaatctgg

SEQ ID NO: 5150736 - DNA, 25 bp, Homo sapien
cttgttcatgtatggcaagctaatc

SEQ ID NO: 5150737 - DNA, 25 bp, Homo sapien
catgtatggcaagctaatctggaca

SEQ ID NO: 5150738 - DNA, 25 bp, Homo sapien
tcatgtatggcaagctaatctggac

SEQ ID NO: 5150739 - DNA, 25 bp, Homo sapien
ccaattctataacatgggcaaaggc

SEQ ID NO: 5150740 - DNA, 25 bp, Homo sapien
aattctataacatgggcaaaggcct

SEQ ID NO: 5150741 - DNA, 25 bp, Homo sapien
caattctataacatgggcaaaggcc

SEQ ID NO: 5150742 - DNA, 25 bp, Homo sapien
aaaaattacctcctggcatttggca

SEQ ID NO: 5150743 - DNA, 25 bp, Homo sapien
cttctaaggctgaaatgagttcacg

SEQ ID NO: 5150744 - DNA, 25 bp, Homo sapien
tgagttcacgagcagtagtaacagc

SEQ ID NO: 5150745 - DNA, 25 bp, Homo sapien
actacaagccaagaacttctaaggc

SEQ ID NO: 5150746 - DNA, 25 bp, Homo sapien
gtgtttcacgatacacaccataaag

SEQ ID NO: 5150747 - DNA, 25 bp, Homo sapien
ataccttccagagggtctttaatgc

SEQ ID NO: 5150748 - DNA, 25 bp, Homo sapien
taatgcacgtgtgtttcacgataca

SEQ ID NO: 5150749 - DNA, 25 bp, Homo sapien
tacacaccataaagccctgttaact

SEQ ID NO: 5150750 - DNA, 25 bp, Homo sapien
gcttaataaccacaagtgtgaagct

SEQ ID NO: 5150751 - DNA, 25 bp, Homo sapien
cttaataaccacaagtgtgaagctt

SEQ ID NO: 5150752 - DNA, 25 bp, Homo sapien
tagattatgatctttgaagccctgt

SEQ ID NO: 5150753 - DNA, 25 bp, Homo sapien
tcttcaggcatgaactaagactgta

SEQ ID NO: 5150754 - DNA, 25 bp, Homo sapien
taagaaactcacatctggctaagtc

SEQ ID NO: 5150755 - DNA, 25 bp, Homo sapien
tccagggaaggagaaactatttcca

SEQ ID NO: 5150756 - DNA, 25 bp, Homo sapien
gtaaaatggcacagcctctatggag

SEQ ID NO: 5150757 - DNA, 25 bp, Homo sapien
cacagcctctatggagaacagcatg

SEQ ID NO: 5150758 - DNA, 25 bp, Homo sapien
tggagaacagcatgatggttcccca

SEQ ID NO: 5150759 - DNA, 25 bp, Homo sapien
gaacagcatgatggttccccaaaaa

SEQ ID NO: 5150760 - DNA, 25 bp, Homo sapien
gcacagtgaaagatcacctatatcc

SEQ ID NO: 5150761 - DNA, 25 bp, Homo sapien
aaatctaagccagtaaatataaatc

SEQ ID NO: 5150762 - DNA, 25 bp, Homo sapien
tggtggtggccatacaaatctaagc

SEQ ID NO: 5150763 - DNA, 25 bp, Homo sapien
aaatataaatccaaagcacagtgaa

SEQ ID NO: 5150764 - DNA, 25 bp, Homo sapien
gacaaaatgctcaaggaagagggag

SEQ ID NO: 5150765 - DNA, 25 bp, Homo sapien
acaaaatgctcaaggaagagggaga

SEQ ID NO: 5150766 - DNA, 25 bp, Homo sapien
tgacaaaatgctcaaggaagaggga

SEQ ID NO: 5150767 - DNA, 25 bp, Homo sapien
ctccagcctgggtgacagagtgaga

SEQ ID NO: 5150768 - DNA, 25 bp, Homo sapien
atcgcaccagtgcactccagcctgg

SEQ ID NO: 5150769 - DNA, 25 bp, Homo sapien
ggttgcagtgagccaagatcgcacc

SEQ ID NO: 5150770 - DNA, 25 bp, Homo sapien
gagaaccgcttgaacttgggagttg

SEQ ID NO: 5150771 - DNA, 25 bp, Homo sapien
tgcccagtgagtctgtatcctagat

SEQ ID NO: 5150772 - DNA, 25 bp, Homo sapien
aattgggattgttctggtcgggtgc

SEQ ID NO: 5150773 - DNA, 25 bp, Homo sapien
actgtgtgatacagatagaattggg

SEQ ID NO: 5150774 - DNA, 25 bp, Homo sapien
cagtgagtctgtatcctagatgaga

SEQ ID NO: 5150775 - DNA, 25 bp, Homo sapien
caattctgagggaggatccagcgga

SEQ ID NO: 5150776 - DNA, 25 bp, Homo sapien
tggccactgaacttccctatgaagg

SEQ ID NO: 5150777 - DNA, 25 bp, Homo sapien
tgaacttccctatgaagggcaattc

SEQ ID NO: 5150778 - DNA, 25 bp, Homo sapien
agggcaattctgagggaggatccag

SEQ ID NO: 5150779 - DNA, 25 bp, Homo sapien
caatcctgcaagtagcagactcagg

SEQ ID NO: 5150780 - DNA, 25 bp, Homo sapien
ggtgacttcctaggcagatccatgt

SEQ ID NO: 5150781 - DNA, 25 bp, Homo sapien
aagctcttactctgtagggagatca

SEQ ID NO: 5150782 - DNA, 25 bp, Homo sapien
tcaaagctgtaatctgcagcaaaag

SEQ ID NO: 5150783 - DNA, 25 bp, Homo sapien
gaaagttccaaagataagtctctag

SEQ ID NO: 5150784 - DNA, 25 bp, Homo sapien
ggaaagttccaaagataagtctcta

SEQ ID NO: 5150785 - DNA, 25 bp, Homo sapien
ccaaagataagtctctagaggcaag

SEQ ID NO: 5150786 - DNA, 25 bp, Homo sapien
agttccaaagataagtctctagagg

SEQ ID NO: 5150787 - DNA, 25 bp, Homo sapien
tctctgggcgcatatctgcaggttc

SEQ ID NO: 5150788 - DNA, 25 bp, Homo sapien
tccaatacgccgcaactcttgggcg

SEQ ID NO: 5150789 - DNA, 25 bp, Homo sapien
tcttgggcgatccatatctctgggc

SEQ ID NO: 5150790 - DNA, 25 bp, Homo sapien
ccttgcatagtaagcgttaaactcg

SEQ ID NO: 5150791 - DNA, 25 bp, Homo sapien
gggagggtgtgagcagaaaagcggg

SEQ ID NO: 5150792 - DNA, 25 bp, Homo sapien
gttacaagaagtcactgtcttttta

SEQ ID NO: 5150793 - DNA, 25 bp, Homo sapien
tccagaattagcatgtagttacaag

SEQ ID NO: 5150794 - DNA, 25 bp, Homo sapien
aattagcatgtagttacaagaagtc

SEQ ID NO: 5150795 - DNA, 25 bp, Homo sapien
ttacatgagtgctggcatcgctccc

SEQ ID NO: 5150796 - DNA, 25 bp, Homo sapien
tacaggctattgattagcggcctcc

SEQ ID NO: 5150797 - DNA, 25 bp, Homo sapien
gctcccatgcgctaagtgacaaaag

SEQ ID NO: 5150798 - DNA, 25 bp, Homo sapien
gggagtacagaaacacactacatgg

SEQ ID NO: 5150799 - DNA, 25 bp, Homo sapien
ggtggaggatgccaggagttttgcc

SEQ ID NO: 5150800 - DNA, 25 bp, Homo sapien
tcaggtggaggatgccaggagtttt

SEQ ID NO: 5150801 - DNA, 25 bp, Homo sapien
tggaggatgccaggagttttgccag

SEQ ID NO: 5150802 - DNA, 25 bp, Homo sapien
caggtggaggatgccaggagttttg

SEQ ID NO: 5150803 - DNA, 25 bp, Homo sapien
ttcagatctaggctggaatgttctg

SEQ ID NO: 5150804 - DNA, 25 bp, Homo sapien
atctaggctggaatgttctgtgaac

SEQ ID NO: 5150805 - DNA, 25 bp, Homo sapien
cagatctaggctggaatgttctgtg

SEQ ID NO: 5150806 - DNA, 25 bp, Homo sapien
gatctaggctggaatgttctgtgaa

SEQ ID NO: 5150807 - DNA, 25 bp, Homo sapien
cgcttgccaagagaggataattccc

SEQ ID NO: 5150808 - DNA, 25 bp, Homo sapien
gatcacggtgtcactatccacagca

SEQ ID NO: 5150809 - DNA, 25 bp, Homo sapien
tcaggctttgcaaggctcgtggcaa

SEQ ID NO: 5150810 - DNA, 25 bp, Homo sapien
tctaacaagtatcaagacgggtgtc

SEQ ID NO: 5150811 - DNA, 25 bp, Homo sapien
agcctccacagctccgtctcaaacg

SEQ ID NO: 5150812 - DNA, 25 bp, Homo sapien
ccccactgcccttaagtggactgaa

SEQ ID NO: 5150813 - DNA, 25 bp, Homo sapien
ctgcccttaagtggactgaatacat

SEQ ID NO: 5150814 - DNA, 25 bp, Homo sapien
gctccgtctcaaacgcttccccact

SEQ ID NO: 5150815 - DNA, 25 bp, Homo sapien
gttcagcccggcaggttcacctggg

SEQ ID NO: 5150816 - DNA, 25 bp, Homo sapien
cactgtggttacataagggattact

SEQ ID NO: 5150817 - DNA, 25 bp, Homo sapien
aatgacactgcatcgggagagaaga

SEQ ID NO: 5150818 - DNA, 25 bp, Homo sapien
gtacatgtgtgcaaagagggaaaac

SEQ ID NO: 5150819 - DNA, 25 bp, Homo sapien
ggcctcccgcctagtgtccaataag

SEQ ID NO: 5150820 - DNA, 25 bp, Homo sapien
agccatgccttgaccgtcttcctga

SEQ ID NO: 5150821 - DNA, 25 bp, Homo sapien
cataagcggatcatcagcagccatg

SEQ ID NO: 5150822 - DNA, 25 bp, Homo sapien
aagtctgcgtctgctacagtggttc

SEQ ID NO: 5150823 - DNA, 25 bp, Homo sapien
tcgtaagataaccattcgtgggtgg

SEQ ID NO: 5150824 - DNA, 25 bp, Homo sapien
caggcggacaatgtaacgtaacagt

SEQ ID NO: 5150825 - DNA, 25 bp, Homo sapien
cattcgtgggtggtcttcggctgct

SEQ ID NO: 5150826 - DNA, 25 bp, Homo sapien
tgtaacgtaacagtcgtaagataac

SEQ ID NO: 5150827 - DNA, 25 bp, Homo sapien
gaaccgctggctgcataataatggc

SEQ ID NO: 5150828 - DNA, 25 bp, Homo sapien
tgcatggtatctcggctccgcaaag

SEQ ID NO: 5150829 - DNA, 25 bp, Homo sapien
tgaacagaaaggtagtcccatccag

SEQ ID NO: 5150830 - DNA, 25 bp, Homo sapien
ataatggcaccaggagaccgcggtg

SEQ ID NO: 5150831 - DNA, 25 bp, Homo sapien
tgggctcgagacacatcagggaaca

SEQ ID NO: 5150832 - DNA, 25 bp, Homo sapien
tctgctgtaatggacacggtggccc

SEQ ID NO: 5150833 - DNA, 25 bp, Homo sapien
caaaacactagttggtggcactgct

SEQ ID NO: 5150834 - DNA, 25 bp, Homo sapien
taaataacgtgaacatgctggctct

SEQ ID NO: 5150835 - DNA, 25 bp, Homo sapien
gaccacgtggtctgcaatgagctct

SEQ ID NO: 5150836 - DNA, 25 bp, Homo sapien
gagtatcagaaggagggcatcgacc

SEQ ID NO: 5150837 - DNA, 25 bp, Homo sapien
tacatacgctgggtcctagaaaaca

SEQ ID NO: 5150838 - DNA, 25 bp, Homo sapien
cacttcatcataagggcggcaaagc

SEQ ID NO: 5150839 - DNA, 25 bp, Homo sapien
atttggctggaggcatggatgcctg

SEQ ID NO: 5150840 - DNA, 25 bp, Homo sapien
ttggctggaggcatggatgcctgtg

SEQ ID NO: 5150841 - DNA, 25 bp, Homo sapien
tggctggaggcatggatgcctgtgc

SEQ ID NO: 5150842 - DNA, 25 bp, Homo sapien
tttggctggaggcatggatgcctgt

SEQ ID NO: 5150843 - DNA, 25 bp, Homo sapien
gtgtgcaatttgatggtgtccagag

SEQ ID NO: 5150844 - DNA, 25 bp, Homo sapien
gaggccccaggtttttgtgtgcaat

SEQ ID NO: 5150845 - DNA, 25 bp, Homo sapien
tgcagacatacctcacagataacat

SEQ ID NO: 5150846 - DNA, 25 bp, Homo sapien
tggtcttgtctaagctcatgcagac

SEQ ID NO: 5150847 - DNA, 25 bp, Homo sapien
ctgaggggaagagattttcatctcc

SEQ ID NO: 5150848 - DNA, 25 bp, Homo sapien
tttcatctccattcaatgaaggatg

SEQ ID NO: 5150849 - DNA, 25 bp, Homo sapien
attttcatctccattcaatgaagga

SEQ ID NO: 5150850 - DNA, 25 bp, Homo sapien
tggaggtcctgaggggaagagattt

SEQ ID NO: 5150851 - DNA, 25 bp, Homo sapien
tgagtggtccactcaggctaggaga

SEQ ID NO: 5150852 - DNA, 25 bp, Homo sapien
gagatacagcataatgtccacaggg

SEQ ID NO: 5150853 - DNA, 25 bp, Homo sapien
gccctactgtgaattgaaaccgcag

SEQ ID NO: 5150854 - DNA, 25 bp, Homo sapien
gatgtgagagcattcggcagaactc

SEQ ID NO: 5150855 - DNA, 25 bp, Homo sapien
agcatcagtacgcaggcagtgtgat

SEQ ID NO: 5150856 - DNA, 25 bp, Homo sapien
tcctcacttttccagatccaacagg

SEQ ID NO: 5150857 - DNA, 25 bp, Homo sapien
ttttccagatccaacaggactcttg

SEQ ID NO: 5150858 - DNA, 25 bp, Homo sapien
catcagtacgcaggcagtgtgatgc

SEQ ID NO: 5150859 - DNA, 25 bp, Homo sapien
gagtgtccttgaccggcagagagaa

SEQ ID NO: 5150860 - DNA, 25 bp, Homo sapien
gatacctagggtcttgattgcatgc

SEQ ID NO: 5150861 - DNA, 25 bp, Homo sapien
tttcagcttcggaaagggccactct

SEQ ID NO: 5150862 - DNA, 25 bp, Homo sapien
ttgcatgccccgaaatcagttgatt

SEQ ID NO: 5150863 - DNA, 25 bp, Homo sapien
caaactggacctgataaagaactag

SEQ ID NO: 5150864 - DNA, 25 bp, Homo sapien
gacttgtagtagagccagttagaat

SEQ ID NO: 5150865 - DNA, 25 bp, Homo sapien
tgcagtagcccagtcaagagaggat

SEQ ID NO: 5150866 - DNA, 25 bp, Homo sapien
aatgaaagaaattgacacattcaga

SEQ ID NO: 5150867 - DNA, 25 bp, Homo sapien
tacgccatcggcaaaactgaactcg

SEQ ID NO: 5150868 - DNA, 25 bp, Homo sapien
gccatcggcaaaactgaactcgtcc

SEQ ID NO: 5150869 - DNA, 25 bp, Homo sapien
ccagaatgtatctcccggatgtcca

SEQ ID NO: 5150870 - DNA, 25 bp, Homo sapien
cagaatgtatctcccggatgtccag

SEQ ID NO: 5150871 - DNA, 25 bp, Homo sapien
actgatctgtgtgtctaatcctctg

SEQ ID NO: 5150872 - DNA, 25 bp, Homo sapien
tcttatctacagaaaacattgctgg

SEQ ID NO: 5150873 - DNA, 25 bp, Homo sapien
gatcactgttgctaagtagaaagcc

SEQ ID NO: 5150874 - DNA, 25 bp, Homo sapien
tagaaagccttagccttgagtagac

SEQ ID NO: 5150875 - DNA, 25 bp, Homo sapien
tcatcattaccaatagctactgcca

SEQ ID NO: 5150876 - DNA, 25 bp, Homo sapien
gagtcaaagatgctgtggggtttta

SEQ ID NO: 5150877 - DNA, 25 bp, Homo sapien
ttcgtgtaaagtgacagagtcaaag

SEQ ID NO: 5150878 - DNA, 25 bp, Homo sapien
agggttcgtgtaaagtgacagagtc

SEQ ID NO: 5150879 - DNA, 25 bp, Homo sapien
ttggatagggttcgtgtaaagtgac

SEQ ID NO: 5150880 - DNA, 25 bp, Homo sapien
aaggaggttccttaggtccatctct

SEQ ID NO: 5150881 - DNA, 25 bp, Homo sapien
gctgttgttcctgttggtgcttcta

SEQ ID NO: 5150882 - DNA, 25 bp, Homo sapien
tggtgcttctacatgaagggtcttc

SEQ ID NO: 5150883 - DNA, 25 bp, Homo sapien
tgcttctacatgaagggtcttcaac

SEQ ID NO: 5150884 - DNA, 25 bp, Homo sapien
tcatgctaactgctgagtaaaacca

SEQ ID NO: 5150885 - DNA, 25 bp, Homo sapien
ttcaaaagactttactacctgagag

SEQ ID NO: 5150886 - DNA, 25 bp, Homo sapien
ctgagagggtttcatgctaactgct

SEQ ID NO: 5150887 - DNA, 25 bp, Homo sapien
gagggtttcatgctaactgctgagt

SEQ ID NO: 5150888 - DNA, 25 bp, Homo sapien
tcgaccctttcaacaaaaactgtgc

SEQ ID NO: 5150889 - DNA, 25 bp, Homo sapien
caaggaagtgcttcctggtcgaccc

SEQ ID NO: 5150890 - DNA, 25 bp, Homo sapien
tccagaggctttaggacagagtcaa

SEQ ID NO: 5150891 - DNA, 25 bp, Homo sapien
tcaacaaaaactgtgcccctggtct

SEQ ID NO: 5150892 - DNA, 25 bp, Homo sapien
tcctctgttgaatatcttctgcccc

SEQ ID NO: 5150893 - DNA, 25 bp, Homo sapien
tcctcaatttatctccagccccagt

SEQ ID NO: 5150894 - DNA, 25 bp, Homo sapien
aaacttctcattgctcctcaattta

SEQ ID NO: 5150895 - DNA, 25 bp, Homo sapien
cagccccagttcctctgttgaatat

SEQ ID NO: 5150896 - DNA, 25 bp, Homo sapien
tactgtctcagtttgctccagctgc

SEQ ID NO: 5150897 - DNA, 25 bp, Homo sapien
gcaagggagaaccttcatgaaaatc

SEQ ID NO: 5150898 - DNA, 25 bp, Homo sapien
tagacagcctactcctcgctgtgtc

SEQ ID NO: 5150899 - DNA, 25 bp, Homo sapien
gaaaatcactgtcaagtactgtctc

SEQ ID NO: 5150900 - DNA, 25 bp, Homo sapien
gatgccggtgtactctgatgtcctg

SEQ ID NO: 5150901 - DNA, 25 bp, Homo sapien
tatggtggtgggagtcctctcagca

SEQ ID NO: 5150902 - DNA, 25 bp, Homo sapien
gtttaaagcctcaccactgaccagg

SEQ ID NO: 5150903 - DNA, 25 bp, Homo sapien
cctcacctttgcaggagactctcaa

SEQ ID NO: 5150904 - DNA, 25 bp, Homo sapien
gcagggcggaaggtaagcggagacc

SEQ ID NO: 5150905 - DNA, 25 bp, Homo sapien
ggtccagtggcaaggcagggcggaa

SEQ ID NO: 5150906 - DNA, 25 bp, Homo sapien
ggaaggtaagcggagaccttctcca

SEQ ID NO: 5150907 - DNA, 25 bp, Homo sapien
gcggagaccttctccaatcagaagt

SEQ ID NO: 5150908 - DNA, 25 bp, Homo sapien
aacccctgtcactgtaatttctgat

SEQ ID NO: 5150909 - DNA, 25 bp, Homo sapien
acccctgtcactgtaatttctgatg

SEQ ID NO: 5150910 - DNA, 25 bp, Homo sapien
ccctgtcactgtaatttctgatgat

SEQ ID NO: 5150911 - DNA, 25 bp, Homo sapien
cccctgtcactgtaatttctgatga

SEQ ID NO: 5150912 - DNA, 25 bp, Homo sapien
tccccatagggcttccacagaaaca

SEQ ID NO: 5150913 - DNA, 25 bp, Homo sapien
aacacaacgtgtactgtgtgccaaa

SEQ ID NO: 5150914 - DNA, 25 bp, Homo sapien
ctggaagcttccagatcctggcccc

SEQ ID NO: 5150915 - DNA, 25 bp, Homo sapien
agtagcactgacatcctcttcatcc

SEQ ID NO: 5150916 - DNA, 25 bp, Homo sapien
ggacaccccgggcagaccagtggtc

SEQ ID NO: 5150917 - DNA, 25 bp, Homo sapien
gaccagtggtccaaatttataccag

SEQ ID NO: 5150918 - DNA, 25 bp, Homo sapien
tgatgccttcccaatcacggttcct

SEQ ID NO: 5150919 - DNA, 25 bp, Homo sapien
tagcagtccacgaccactggcaggg

SEQ ID NO: 5150920 - DNA, 25 bp, Homo sapien
gagaatgtatttggcatctaccata

SEQ ID NO: 5150921 - DNA, 25 bp, Homo sapien
agagaatgtatttggcatctaccat

SEQ ID NO: 5150922 - DNA, 25 bp, Homo sapien
agaatgtatttggcatctaccatat

SEQ ID NO: 5150923 - DNA, 25 bp, Homo sapien
tccactcaagactgataatcgccat

SEQ ID NO: 5150924 - DNA, 25 bp, Homo sapien
taagtttaacttgtggacaatccac

SEQ ID NO: 5150925 - DNA, 25 bp, Homo sapien
tgtggacaatccactcaagactgat

SEQ ID NO: 5150926 - DNA, 25 bp, Homo sapien
tgacttgtcagatgtaagtttaact

SEQ ID NO: 5150927 - DNA, 25 bp, Homo sapien
attccctatgaccactgtgacggtg

SEQ ID NO: 5150928 - DNA, 25 bp, Homo sapien
cccactccgtacagagagcgttcca

SEQ ID NO: 5150929 - DNA, 25 bp, Homo sapien
cactgtgacggtgccgccttgggct

SEQ ID NO: 5150930 - DNA, 25 bp, Homo sapien
tgacggtgccgccttgggctgcctc

SEQ ID NO: 5150931 - DNA, 25 bp, Homo sapien
cgctcaacggagcaaactggaaggt

SEQ ID NO: 5150932 - DNA, 25 bp, Homo sapien
cagttaggattctatcatcatgaga

SEQ ID NO: 5150933 - DNA, 25 bp, Homo sapien
ggcttactgaaggctagacagtatc

SEQ ID NO: 5150934 - DNA, 25 bp, Homo sapien
acagtatccccttgcagtatcagtt

SEQ ID NO: 5150935 - DNA, 25 bp, Homo sapien
tcttctggccaaaagttgacttggt

SEQ ID NO: 5150936 - DNA, 25 bp, Homo sapien
tgacttggtccagaccaaatggaaa

SEQ ID NO: 5150937 - DNA, 25 bp, Homo sapien
tttaattttggatgttctcttctgg

SEQ ID NO: 5150938 - DNA, 25 bp, Homo sapien
taattttggatgttctcttctggcc

SEQ ID NO: 5150939 - DNA, 25 bp, Homo sapien
gttagtggatgtcggtcacttagtc

SEQ ID NO: 5150940 - DNA, 25 bp, Homo sapien
ttagtcctgataaaacagagtagat

SEQ ID NO: 5150941 - DNA, 25 bp, Homo sapien
tggttttcttagtaggagatcttga

SEQ ID NO: 5150942 - DNA, 25 bp, Homo sapien
tagatggttttcttagtaggagatc

SEQ ID NO: 5150943 - DNA, 25 bp, Homo sapien
atgtaggaagtgttggagggacaca

SEQ ID NO: 5150944 - DNA, 25 bp, Homo sapien
tgtaggaagtgttggagggacacac

SEQ ID NO: 5150945 - DNA, 25 bp, Homo sapien
caaaggctccttgtggctataggaa

SEQ ID NO: 5150946 - DNA, 25 bp, Homo sapien
tgaagacaaaggctccttgtggcta

SEQ ID NO: 5150947 - DNA, 25 bp, Homo sapien
gacaaaggctccttgtggctatagg

SEQ ID NO: 5150948 - DNA, 25 bp, Homo sapien
aaggctccttgtggctataggaagg

SEQ ID NO: 5150949 - DNA, 25 bp, Homo sapien
ggaagataggggcgaaatgtcctca

SEQ ID NO: 5150950 - DNA, 25 bp, Homo sapien
caggaagataggggcgaaatgtcct

SEQ ID NO: 5150951 - DNA, 25 bp, Homo sapien
gcaggaagataggggcgaaatgtcc

SEQ ID NO: 5150952 - DNA, 25 bp, Homo sapien
gaagataggggcgaaatgtcctcat

SEQ ID NO: 5150953 - DNA, 25 bp, Homo sapien
cctgttgacctcacaagctccttca

SEQ ID NO: 5150954 - DNA, 25 bp, Homo sapien
cagcacccctgttgacctcacaagc

SEQ ID NO: 5150955 - DNA, 25 bp, Homo sapien
ctgttgacctcacaagctccttcat

SEQ ID NO: 5150956 - DNA, 25 bp, Homo sapien
acccctgttgacctcacaagctcct

SEQ ID NO: 5150957 - DNA, 25 bp, Homo sapien
tcactgggcgccgtcttcatggtaa

SEQ ID NO: 5150958 - DNA, 25 bp, Homo sapien
aattcgatgtccttttgtggcacta

SEQ ID NO: 5150959 - DNA, 25 bp, Homo sapien
cacagtgccgggcattgctttttca

SEQ ID NO: 5150960 - DNA, 25 bp, Homo sapien
tgtggcactactctctcactgggcg

SEQ ID NO: 5150961 - DNA, 25 bp, Homo sapien
tctcagcaaactggtgctctgccaa

SEQ ID NO: 5150962 - DNA, 25 bp, Homo sapien
ggaccccagcgcttaggtttggctc

SEQ ID NO: 5150963 - DNA, 25 bp, Homo sapien
agacctggctttcggcacagctggg

SEQ ID NO: 5150964 - DNA, 25 bp, Homo sapien
ttcacagccctggtaatgtcctcag

SEQ ID NO: 5150965 - DNA, 25 bp, Homo sapien
caggtaccagatctgccacacctgg

SEQ ID NO: 5150966 - DNA, 25 bp, Homo sapien
tgagctcctatatccttatccaggt

SEQ ID NO: 5150967 - DNA, 25 bp, Homo sapien
gccacacctggtaccggcatgagcc

SEQ ID NO: 5150968 - DNA, 25 bp, Homo sapien
ctggatgagctcctatatccttatc

SEQ ID NO: 5150969 - DNA, 25 bp, Homo sapien
ctcgcaggcagacctgcatggtttg

SEQ ID NO: 5150970 - DNA, 25 bp, Homo sapien
tttgatgacgactggtcacactgct

SEQ ID NO: 5150971 - DNA, 25 bp, Homo sapien
gcaacttcccattcaaataacctct

SEQ ID NO: 5150972 - DNA, 25 bp, Homo sapien
gaatacctaagagttgccagcaact

SEQ ID NO: 5150973 - DNA, 25 bp, Homo sapien
ccatgaaaccagaatgagcctgttc

SEQ ID NO: 5150974 - DNA, 25 bp, Homo sapien
tctgcgggcagttggccaggcccct

SEQ ID NO: 5150975 - DNA, 25 bp, Homo sapien
cagcagggagcatgctccatgaaac

SEQ ID NO: 5150976 - DNA, 25 bp, Homo sapien
tggtaatgtctgcgggcagttggcc

SEQ ID NO: 5150977 - DNA, 25 bp, Homo sapien
tgcctttgtaccagaacgcattcag

SEQ ID NO: 5150978 - DNA, 25 bp, Homo sapien
tatgaggcagaacccattagtgagc

SEQ ID NO: 5150979 - DNA, 25 bp, Homo sapien
tgttcaaaaccgagatactggcagg

SEQ ID NO: 5150980 - DNA, 25 bp, Homo sapien
ctaatggacacactcctcatgaaaa

SEQ ID NO: 5150981 - DNA, 25 bp, Homo sapien
aagaggtccacctgacgtaaattct

SEQ ID NO: 5150982 - DNA, 25 bp, Homo sapien
cacctgacgtaaattcttcttttgc

SEQ ID NO: 5150983 - DNA, 25 bp, Homo sapien
gaggtccacctgacgtaaattcttc

SEQ ID NO: 5150984 - DNA, 25 bp, Homo sapien
gaccaagaggtccacctgacgtaaa

SEQ ID NO: 5150985 - DNA, 25 bp, Homo sapien
ttcaaaatctccagtctcataatcc

SEQ ID NO: 5150986 - DNA, 25 bp, Homo sapien
caaaatctccagtctcataatccca

SEQ ID NO: 5150987 - DNA, 25 bp, Homo sapien
aaatctccagtctcataatcccaca

SEQ ID NO: 5150988 - DNA, 25 bp, Homo sapien
aaaatctccagtctcataatcccac

SEQ ID NO: 5150989 - DNA, 25 bp, Homo sapien
tgcattgcattgttgctacaaccca

SEQ ID NO: 5150990 - DNA, 25 bp, Homo sapien
gccatcttgatttggttgtacaata

SEQ ID NO: 5150991 - DNA, 25 bp, Homo sapien
gcattgttgctacaacccatacacg

SEQ ID NO: 5150992 - DNA, 25 bp, Homo sapien
gtacaatatgtacccattctctctg

SEQ ID NO: 5150993 - DNA, 25 bp, Homo sapien
cagacagcaagaatggcccagattt

SEQ ID NO: 5150994 - DNA, 25 bp, Homo sapien
ctggatccagacagcaagaatggcc

SEQ ID NO: 5150995 - DNA, 25 bp, Homo sapien
atccagacagcaagaatggcccaga

SEQ ID NO: 5150996 - DNA, 25 bp, Homo sapien
gacagcaagaatggcccagatttac

SEQ ID NO: 5150997 - DNA, 25 bp, Homo sapien
actgacatcccacatcttaatagtc

SEQ ID NO: 5150998 - DNA, 25 bp, Homo sapien
ctgacatcccacatcttaatagtct

SEQ ID NO: 5150999 - DNA, 25 bp, Homo sapien
tacccagttaccatgacccacgagg

SEQ ID NO: 5151000 - DNA, 25 bp, Homo sapien
acccagttaccatgacccacgaggg

SEQ ID NO: 5151001 - DNA, 25 bp, Homo sapien
tggtatcatcagagtgcatccagag

SEQ ID NO: 5151002 - DNA, 25 bp, Homo sapien
atggtatcatcagagtgcatccaga

SEQ ID NO: 5151003 - DNA, 25 bp, Homo sapien
catggtatcatcagagtgcatccag

SEQ ID NO: 5151004 - DNA, 25 bp, Homo sapien
ccatggtatcatcagagtgcatcca

SEQ ID NO: 5151005 - DNA, 25 bp, Homo sapien
taataagctcaatctacatccagaa

SEQ ID NO: 5151006 - DNA, 25 bp, Homo sapien
catttaataagctcaatctacatcc

SEQ ID NO: 5151007 - DNA, 25 bp, Homo sapien
taagctcaatctacatccagaataa

SEQ ID NO: 5151008 - DNA, 25 bp, Homo sapien
tttaataagctcaatctacatccag

SEQ ID NO: 5151009 - DNA, 25 bp, Homo sapien
tggcccctgcacttgtgtgatacct

SEQ ID NO: 5151010 - DNA, 25 bp, Homo sapien
cacttgtgtgataccttgagaaggg

SEQ ID NO: 5151011 - DNA, 25 bp, Homo sapien
cctgcacttgtgtgataccttgaga

SEQ ID NO: 5151012 - DNA, 25 bp, Homo sapien
gcccctgcacttgtgtgataccttg

SEQ ID NO: 5151013 - DNA, 25 bp, Homo sapien
caggagcaaatatagggccagccag

SEQ ID NO: 5151014 - DNA, 25 bp, Homo sapien
gaacagtgatttgcctgagtgtaaa

SEQ ID NO: 5151015 - DNA, 25 bp, Homo sapien
gaaagtagtagcatcgtgccatcag

SEQ ID NO: 5151016 - DNA, 25 bp, Homo sapien
gggtcctagcgatcttatccatgaa

SEQ ID NO: 5151017 - DNA, 25 bp, Homo sapien
tggcctccagaagcaggagctccct

SEQ ID NO: 5151018 - DNA, 25 bp, Homo sapien
ctggcctccagaagcaggagctccc

SEQ ID NO: 5151019 - DNA, 25 bp, Homo sapien
tccagaagcaggagctccctgccca

SEQ ID NO: 5151020 - DNA, 25 bp, Homo sapien
agaagcaggagctccctgcccactg

SEQ ID NO: 5151021 - DNA, 25 bp, Homo sapien
cctggagacactctcagtgaggcca

SEQ ID NO: 5151022 - DNA, 25 bp, Homo sapien
caagatgctgatgggtggaggggtg

SEQ ID NO: 5151023 - DNA, 25 bp, Homo sapien
tccctggagacactctcagtgaggc

SEQ ID NO: 5151024 - DNA, 25 bp, Homo sapien
tctccctggagacactctcagtgag

SEQ ID NO: 5151025 - DNA, 25 bp, Homo sapien
gagagtcatttcaaaccacacttgc

SEQ ID NO: 5151026 - DNA, 25 bp, Homo sapien
agagagtcatttcaaaccacacttg

SEQ ID NO: 5151027 - DNA, 25 bp, Homo sapien
cagagagtcatttcaaaccacactt

SEQ ID NO: 5151028 - DNA, 25 bp, Homo sapien
ccaagatctccattaaccttgggct

SEQ ID NO: 5151029 - DNA, 25 bp, Homo sapien
ggctttccactagagacatctgcca

SEQ ID NO: 5151030 - DNA, 25 bp, Homo sapien
cttgggctttccactagagacatct

SEQ ID NO: 5151031 - DNA, 25 bp, Homo sapien
ccccaagatctccattaaccttggg

SEQ ID NO: 5151032 - DNA, 25 bp, Homo sapien
tctgaggcctctgcatttgcgggtg

SEQ ID NO: 5151033 - DNA, 25 bp, Homo sapien
cacacttgatcgaatatgacagaca

SEQ ID NO: 5151034 - DNA, 25 bp, Homo sapien
tcatgggctggtctggtcggtttcc

SEQ ID NO: 5151035 - DNA, 25 bp, Homo sapien
cgatcacagccggaatgcagctgaa

SEQ ID NO: 5151036 - DNA, 25 bp, Homo sapien
gattatttgatgcacctgggaggcc

SEQ ID NO: 5151037 - DNA, 25 bp, Homo sapien
gctgctaggcccaggtgtattgtga

SEQ ID NO: 5151038 - DNA, 25 bp, Homo sapien
taggcccaggtgtattgtgattatt

SEQ ID NO: 5151039 - DNA, 25 bp, Homo sapien
tgtgattatttgatgcacctgggag

SEQ ID NO: 5151040 - DNA, 25 bp, Homo sapien
cattagaaaatgctagctcatagga

SEQ ID NO: 5151041 - DNA, 25 bp, Homo sapien
ttcccagaatgtgtaggaatcatgg

SEQ ID NO: 5151042 - DNA, 25 bp, Homo sapien
tttcactgtcactagccaatgaggc

SEQ ID NO: 5151043 - DNA, 25 bp, Homo sapien
gactcaaaacgggaagctggctttc

SEQ ID NO: 5151044 - DNA, 25 bp, Homo sapien
ctggcggctcatcaatattagacac

SEQ ID NO: 5151045 - DNA, 25 bp, Homo sapien
tgggcacagaggtcggtgtgagcag

SEQ ID NO: 5151046 - DNA, 25 bp, Homo sapien
gcacagaggtcggtgtgagcagagc

SEQ ID NO: 5151047 - DNA, 25 bp, Homo sapien
ctgggcacagaggtcggtgtgagca

SEQ ID NO: 5151048 - DNA, 25 bp, Homo sapien
gggcacagaggtcggtgtgagcaga

SEQ ID NO: 5151049 - DNA, 25 bp, Homo sapien
ctgtgttgttgtgagccttttgctg

SEQ ID NO: 5151050 - DNA, 25 bp, Homo sapien
tgtgttgttgtgagccttttgctgg

SEQ ID NO: 5151051 - DNA, 25 bp, Homo sapien
gtgttgttgtgagccttttgctggt

SEQ ID NO: 5151052 - DNA, 25 bp, Homo sapien
gttgttgtgagccttttgctggtgc

SEQ ID NO: 5151053 - DNA, 25 bp, Homo sapien
cggtgtctccatagctgactgctgc

SEQ ID NO: 5151054 - DNA, 25 bp, Homo sapien
ctattggagggaggtgatcatgatt

SEQ ID NO: 5151055 - DNA, 25 bp, Homo sapien
gatcatgattttgtaactctggctt

SEQ ID NO: 5151056 - DNA, 25 bp, Homo sapien
cctgggtggcggtgtctccatagct

SEQ ID NO: 5151057 - DNA, 25 bp, Homo sapien
actacgtgggtgtcacttattttca

SEQ ID NO: 5151058 - DNA, 25 bp, Homo sapien
tccttgagcctcgtgatctgcatct

SEQ ID NO: 5151059 - DNA, 25 bp, Homo sapien
catggtgtcatggtggtcggaatca

SEQ ID NO: 5151060 - DNA, 25 bp, Homo sapien
taatatataacatgaactacgtggg

SEQ ID NO: 5151061 - DNA, 25 bp, Homo sapien
catagcttttctcagcggtgagaga

SEQ ID NO: 5151062 - DNA, 25 bp, Homo sapien
gtttcctgttgttacgcatagcttt

SEQ ID NO: 5151063 - DNA, 25 bp, Homo sapien
cttttctcagcggtgagagagacat

SEQ ID NO: 5151064 - DNA, 25 bp, Homo sapien
tcaccggggctgatgttgggatctg

SEQ ID NO: 5151065 - DNA, 25 bp, Homo sapien
tatagggttgtaagagcagaagccc

SEQ ID NO: 5151066 - DNA, 25 bp, Homo sapien
tgctggtagacacagggaatgttct

SEQ ID NO: 5151067 - DNA, 25 bp, Homo sapien
taaggatcagattttccagtgtaaa

SEQ ID NO: 5151068 - DNA, 25 bp, Homo sapien
tatatactccttatagggttgtaag

SEQ ID NO: 5151069 - DNA, 25 bp, Homo sapien
agtgaccagggccaatgtctctggc

SEQ ID NO: 5151070 - DNA, 25 bp, Homo sapien
cacgtggagatcgtgtaagtgacca

SEQ ID NO: 5151071 - DNA, 25 bp, Homo sapien
cctctgctgggctatacacgtggag

SEQ ID NO: 5151072 - DNA, 25 bp, Homo sapien
agccatggagaaacaggcggcccag

SEQ ID NO: 5151073 - DNA, 25 bp, Homo sapien
tagaagtcactttcagcatggatct

SEQ ID NO: 5151074 - DNA, 25 bp, Homo sapien
ctagaagtcactttcagcatggatc

SEQ ID NO: 5151075 - DNA, 25 bp, Homo sapien
agtcactttcagcatggatcttggt

SEQ ID NO: 5151076 - DNA, 25 bp, Homo sapien
actttcagcatggatcttggtgtgg

SEQ ID NO: 5151077 - DNA, 25 bp, Homo sapien
agagaacctcgcccgaacatggaac

SEQ ID NO: 5151078 - DNA, 25 bp, Homo sapien
ccgaacatggaactttcacccacat

SEQ ID NO: 5151079 - DNA, 25 bp, Homo sapien
acctcgcccgaacatggaactttca

SEQ ID NO: 5151080 - DNA, 25 bp, Homo sapien
gcccgaacatggaactttcacccac

SEQ ID NO: 5151081 - DNA, 25 bp, Homo sapien
agctactcgagagacatctgctgct

SEQ ID NO: 5151082 - DNA, 25 bp, Homo sapien
gatgctaatccagcgtgcgtcctgg

SEQ ID NO: 5151083 - DNA, 25 bp, Homo sapien
tacggcagccctagcagatgctaat

SEQ ID NO: 5151084 - DNA, 25 bp, Homo sapien
tccagcgtgcgtcctggcagaggtt

SEQ ID NO: 5151085 - DNA, 25 bp, Homo sapien
catctggaaaaaggcgctcatgaca

SEQ ID NO: 5151086 - DNA, 25 bp, Homo sapien
catctcttgggatgaggatacagaa

SEQ ID NO: 5151087 - DNA, 25 bp, Homo sapien
aaccttccacggatgcttttcagca

SEQ ID NO: 5151088 - DNA, 25 bp, Homo sapien
atgacaggtggtgccaaccttccac

SEQ ID NO: 5151089 - DNA, 25 bp, Homo sapien
aatccaaccagactgatgccacagg

SEQ ID NO: 5151090 - DNA, 25 bp, Homo sapien
tgcagggctttgtgtgtaatccaac

SEQ ID NO: 5151091 - DNA, 25 bp, Homo sapien
tcaaggcggtgggactctccagcag

SEQ ID NO: 5151092 - DNA, 25 bp, Homo sapien
gggagccccttgcactcactcagga

SEQ ID NO: 5151093 - DNA, 25 bp, Homo sapien
cactcagtctttgaggcctgacttg

SEQ ID NO: 5151094 - DNA, 25 bp, Homo sapien
caggctgttagtattccgatgaagc

SEQ ID NO: 5151095 - DNA, 25 bp, Homo sapien
gattgcaggagcgtattttacgtcc

SEQ ID NO: 5151096 - DNA, 25 bp, Homo sapien
aaatcaggaagaacgtaaaaatgct

SEQ ID NO: 5151097 - DNA, 25 bp, Homo sapien
tgagcccgtgcctgtcttcagatct

SEQ ID NO: 5151098 - DNA, 25 bp, Homo sapien
gatggtcgctgctttttaagtttca

SEQ ID NO: 5151099 - DNA, 25 bp, Homo sapien
ccttcgttgtaagaatgtagatgcc

SEQ ID NO: 5151100 - DNA, 25 bp, Homo sapien
cattccagacaagcggtgcctgagc

SEQ ID NO: 5151101 - DNA, 25 bp, Homo sapien
tatgtcagaggaatacatgcagaag

SEQ ID NO: 5151102 - DNA, 25 bp, Homo sapien
tcttgtgaattgttatgtcagagga

SEQ ID NO: 5151103 - DNA, 25 bp, Homo sapien
gtcagaggaatacatgcagaagaaa

SEQ ID NO: 5151104 - DNA, 25 bp, Homo sapien
gttatgtcagaggaatacatgcaga

SEQ ID NO: 5151105 - DNA, 25 bp, Homo sapien
ccagggggtgcatggcagtctctca

SEQ ID NO: 5151106 - DNA, 25 bp, Homo sapien
tcagcagtcactgccgtggccatga

SEQ ID NO: 5151107 - DNA, 25 bp, Homo sapien
catgtcgaatgttctgaggcctcca

SEQ ID NO: 5151108 - DNA, 25 bp, Homo sapien
tctcagtagtgtgcaacttggcctt

SEQ ID NO: 5151109 - DNA, 25 bp, Homo sapien
tcagtgtagaggagactctggaatt

SEQ ID NO: 5151110 - DNA, 25 bp, Homo sapien
cagtgtagaggagactctggaattc

SEQ ID NO: 5151111 - DNA, 25 bp, Homo sapien
ctcagtgtagaggagactctggaat

SEQ ID NO: 5151112 - DNA, 25 bp, Homo sapien
tacgtgggcacgattctttcctggg

SEQ ID NO: 5151113 - DNA, 25 bp, Homo sapien
tacagttggctagtaatcctggctt

SEQ ID NO: 5151114 - DNA, 25 bp, Homo sapien
tcctgtgcgcttgctacagttggct

SEQ ID NO: 5151115 - DNA, 25 bp, Homo sapien
gtagcccctacgtgggcacgattct

SEQ ID NO: 5151116 - DNA, 25 bp, Homo sapien
gatttttgcccgtctgaccctctta

SEQ ID NO: 5151117 - DNA, 25 bp, Homo sapien
tttttgcccgtctgaccctcttaca

SEQ ID NO: 5151118 - DNA, 25 bp, Homo sapien
tacctacaaggctgttctaactgag

SEQ ID NO: 5151119 - DNA, 25 bp, Homo sapien
tgagacaggcatcctagcagacttc

SEQ ID NO: 5151120 - DNA, 25 bp, Homo sapien
tgggagaatcccacagaaagaccct

SEQ ID NO: 5151121 - DNA, 25 bp, Homo sapien
tcctgctcctgttaggctgacccag

SEQ ID NO: 5151122 - DNA, 25 bp, Homo sapien
gacttctaggaggtacacatcgtgc

SEQ ID NO: 5151123 - DNA, 25 bp, Homo sapien
gccaagggctgcaagggttgtatcc

SEQ ID NO: 5151124 - DNA, 25 bp, Homo sapien
tgagaaggcacggtagctacagacg

SEQ ID NO: 5151125 - DNA, 25 bp, Homo sapien
tacttgagggaaagtgcctgcaccg

SEQ ID NO: 5151126 - DNA, 25 bp, Homo sapien
cagtgtgcagctgatgagccacagg

SEQ ID NO: 5151127 - DNA, 25 bp, Homo sapien
acagtgtgcagctgatgagccacag

SEQ ID NO: 5151128 - DNA, 25 bp, Homo sapien
tgctgctgccgcttgcagcctaatt

SEQ ID NO: 5151129 - DNA, 25 bp, Homo sapien
tgcagcctaattcctcgctggtttc

SEQ ID NO: 5151130 - DNA, 25 bp, Homo sapien
tcatccatggataacaacaggatgg

SEQ ID NO: 5151131 - DNA, 25 bp, Homo sapien
ccatggataacaacaggatggcatg

SEQ ID NO: 5151132 - DNA, 25 bp, Homo sapien
gaggggtggggatgagacactccat

SEQ ID NO: 5151133 - DNA, 25 bp, Homo sapien
ctgcagaagcccacaggaaaggggc

SEQ ID NO: 5151134 - DNA, 25 bp, Homo sapien
gagaggggtggggatgagacactcc

SEQ ID NO: 5151135 - DNA, 25 bp, Homo sapien
ggcagccaggggttgaaggagaaag

SEQ ID NO: 5151136 - DNA, 25 bp, Homo sapien
cttcctccagagagatgccgatggg

SEQ ID NO: 5151137 - DNA, 25 bp, Homo sapien
aagggagtgtgcaatatcagcttcc

SEQ ID NO: 5151138 - DNA, 25 bp, Homo sapien
ggagtgtgcaatatcagcttcctcc

SEQ ID NO: 5151139 - DNA, 25 bp, Homo sapien
agatgccgatgggtccattctgggc

SEQ ID NO: 5151140 - DNA, 25 bp, Homo sapien
gatgtgacctgtggtctaaaatgaa

SEQ ID NO: 5151141 - DNA, 25 bp, Homo sapien
tgtccgggttcccactcaagtccat

SEQ ID NO: 5151142 - DNA, 25 bp, Homo sapien
gatgaagctaagttctgattggttg

SEQ ID NO: 5151143 - DNA, 25 bp, Homo sapien
gaggtatgggttttctgttgacaca

SEQ ID NO: 5151144 - DNA, 25 bp, Homo sapien
gactttccagacactctcattgcag

SEQ ID NO: 5151145 - DNA, 25 bp, Homo sapien
cgtgtgctgtccttgtctgaaacca

SEQ ID NO: 5151146 - DNA, 25 bp, Homo sapien
ttgcaggtgcttggagctcagttct

SEQ ID NO: 5151147 - DNA, 25 bp, Homo sapien
gacccgaccttttgtgcgtgtgctg

SEQ ID NO: 5151148 - DNA, 25 bp, Homo sapien
gacacagtgtcttcgcttgacagga

SEQ ID NO: 5151149 - DNA, 25 bp, Homo sapien
tgcagagaggttataggactagtcc

SEQ ID NO: 5151150 - DNA, 25 bp, Homo sapien
ttacaggtatgacccgagatggtgg

SEQ ID NO: 5151151 - DNA, 25 bp, Homo sapien
gaaattcaggtctgtcatggtcaca

SEQ ID NO: 5151152 - DNA, 25 bp, Homo sapien
gatgtgcccatgctgcgtactcaac

SEQ ID NO: 5151153 - DNA, 25 bp, Homo sapien
gaaactgccatgtattcccaccgga

SEQ ID NO: 5151154 - DNA, 25 bp, Homo sapien
tgtggcctcggctgtctatcacgct

SEQ ID NO: 5151155 - DNA, 25 bp, Homo sapien
ttctgaacacctagcaagatgcagc

SEQ ID NO: 5151156 - DNA, 25 bp, Homo sapien
cagagcaagtgaccatggcatgcat

SEQ ID NO: 5151157 - DNA, 25 bp, Homo sapien
agccaactgtttacagcgtccaagc

SEQ ID NO: 5151158 - DNA, 25 bp, Homo sapien
agctgcagcgcaggaattccccagt

SEQ ID NO: 5151159 - DNA, 25 bp, Homo sapien
aattccccagtaggacaggaaagca

SEQ ID NO: 5151160 - DNA, 25 bp, Homo sapien
gtttacagcgtccaagctcttcctg

SEQ ID NO: 5151161 - DNA, 25 bp, Homo sapien
tgtgttgctttctgggcatgctgta

SEQ ID NO: 5151162 - DNA, 25 bp, Homo sapien
tgctttctgggcatgctgtaggatg

SEQ ID NO: 5151163 - DNA, 25 bp, Homo sapien
tgtaggatgccactttttggctgtg

SEQ ID NO: 5151164 - DNA, 25 bp, Homo sapien
atgctgtaggatgccactttttggc

SEQ ID NO: 5151165 - DNA, 25 bp, Homo sapien
tctgtccaggccagtgaccgcttga

SEQ ID NO: 5151166 - DNA, 25 bp, Homo sapien
ttctgtccaggccagtgaccgcttg

SEQ ID NO: 5151167 - DNA, 25 bp, Homo sapien
gaacctcacagatgtattgccgcag

SEQ ID NO: 5151168 - DNA, 25 bp, Homo sapien
tctggaacctcacagatgtattgcc

SEQ ID NO: 5151169 - DNA, 25 bp, Homo sapien
tcacagatgtattgccgcagacacc

SEQ ID NO: 5151170 - DNA, 25 bp, Homo sapien
cctcacagatgtattgccgcagaca

SEQ ID NO: 5151171 - DNA, 25 bp, Homo sapien
tggagcaggagaagcggctctgtct

SEQ ID NO: 5151172 - DNA, 25 bp, Homo sapien
gaagcggctctgtctcctgtgttcc

SEQ ID NO: 5151173 - DNA, 25 bp, Homo sapien
gagaagcggctctgtctcctgtgtt

SEQ ID NO: 5151174 - DNA, 25 bp, Homo sapien
aggagaagcggctctgtctcctgtg

SEQ ID NO: 5151175 - DNA, 25 bp, Homo sapien
agagatgctggggttgaggcctaga

SEQ ID NO: 5151176 - DNA, 25 bp, Homo sapien
gtggctgatgtaggtcaggtgggct

SEQ ID NO: 5151177 - DNA, 25 bp, Homo sapien
aaacagaatcaatcagaaggtggct

SEQ ID NO: 5151178 - DNA, 25 bp, Homo sapien
tgaggcctagatggctttttggcct

SEQ ID NO: 5151179 - DNA, 25 bp, Homo sapien
gatgatagccactggacagtctgtc

SEQ ID NO: 5151180 - DNA, 25 bp, Homo sapien
tccatggacaaggatagttggcatt

SEQ ID NO: 5151181 - DNA, 25 bp, Homo sapien
aatgccacgcatagctaggacaata

SEQ ID NO: 5151182 - DNA, 25 bp, Homo sapien
taagatgctacaaccagcccaaagg

SEQ ID NO: 5151183 - DNA, 25 bp, Homo sapien
aaagactacccctgagaagccaata

SEQ ID NO: 5151184 - DNA, 25 bp, Homo sapien
ctttctcaaagactacccctgagaa

SEQ ID NO: 5151185 - DNA, 25 bp, Homo sapien
gagaagccaatagccttacagcaga

SEQ ID NO: 5151186 - DNA, 25 bp, Homo sapien
tacccctgagaagccaatagcctta

SEQ ID NO: 5151187 - DNA, 25 bp, Homo sapien
cagagtgacaactggcagacagaca

SEQ ID NO: 5151188 - DNA, 25 bp, Homo sapien
tcagagtgacaactggcagacagac

SEQ ID NO: 5151189 - DNA, 25 bp, Homo sapien
ccttccagaagtaggtaccctgatg

SEQ ID NO: 5151190 - DNA, 25 bp, Homo sapien
gaagtaaggattgaaatgagagcct

SEQ ID NO: 5151191 - DNA, 25 bp, Homo sapien
tgtctacccagtgtctggtgtaaca

SEQ ID NO: 5151192 - DNA, 25 bp, Homo sapien
tcttcctgtctatgtgtctacccag

SEQ ID NO: 5151193 - DNA, 25 bp, Homo sapien
gtgtctggtgtaacatctgacccat

SEQ ID NO: 5151194 - DNA, 25 bp, Homo sapien
gtctatgtgtctacccagtgtctgg

SEQ ID NO: 5151195 - DNA, 25 bp, Homo sapien
caaagccaaactgactgagcgcagg

SEQ ID NO: 5151196 - DNA, 25 bp, Homo sapien
tcaggctatgattccgcagttgtct

SEQ ID NO: 5151197 - DNA, 25 bp, Homo sapien
gggtgagaatacaacttgccttcct

SEQ ID NO: 5151198 - DNA, 25 bp, Homo sapien
gaggttcagaaatgctgagccgcct

SEQ ID NO: 5151199 - DNA, 25 bp, Homo sapien
ccatgaagaaacctttgccctctgg

SEQ ID NO: 5151200 - DNA, 25 bp, Homo sapien
ggaataaccttgtcacccgggagca

SEQ ID NO: 5151201 - DNA, 25 bp, Homo sapien
gggtgatggcactccatgaagaaac

SEQ ID NO: 5151202 - DNA, 25 bp, Homo sapien
gaataaccttgtcacccgggagcag

SEQ ID NO: 5151203 - DNA, 25 bp, Homo sapien
gaggtcgagggaacattagggacat

SEQ ID NO: 5151204 - DNA, 25 bp, Homo sapien
tttcgttgaggaggtcgagggaaca

SEQ ID NO: 5151205 - DNA, 25 bp, Homo sapien
tgaggaggtcgagggaacattaggg

SEQ ID NO: 5151206 - DNA, 25 bp, Homo sapien
cgttgaggaggtcgagggaacatta

SEQ ID NO: 5151207 - DNA, 25 bp, Homo sapien
tcccttttccgctctgaggggcaac

SEQ ID NO: 5151208 - DNA, 25 bp, Homo sapien
gtggcttttccagcgttccagaagc

SEQ ID NO: 5151209 - DNA, 25 bp, Homo sapien
tttccagcgttccagaagctagctg

SEQ ID NO: 5151210 - DNA, 25 bp, Homo sapien
tctgaggggcaactcgatgggagta

SEQ ID NO: 5151211 - DNA, 25 bp, Homo sapien
gacaccgtaacaatctgatttctct

SEQ ID NO: 5151212 - DNA, 25 bp, Homo sapien
caccgtaacaatctgatttctcttt

SEQ ID NO: 5151213 - DNA, 25 bp, Homo sapien
cagacaccgtaacaatctgatttct

SEQ ID NO: 5151214 - DNA, 25 bp, Homo sapien
acaccgtaacaatctgatttctctt

SEQ ID NO: 5151215 - DNA, 25 bp, Homo sapien
cacatgcagatatgggtgtcttccc

SEQ ID NO: 5151216 - DNA, 25 bp, Homo sapien
taggaaagcctatgcccaatgcagg

SEQ ID NO: 5151217 - DNA, 25 bp, Homo sapien
aagaactttggtctcacagcgcaaa

SEQ ID NO: 5151218 - DNA, 25 bp, Homo sapien
atgggaccaccatcagccttgctga

SEQ ID NO: 5151219 - DNA, 25 bp, Homo sapien
tggcgagcagctccatgagccaagt

SEQ ID NO: 5151220 - DNA, 25 bp, Homo sapien
tccatttgtcaaacgtggccatata

SEQ ID NO: 5151221 - DNA, 25 bp, Homo sapien
cccgtggtgctccagcagtcagtgt

SEQ ID NO: 5151222 - DNA, 25 bp, Homo sapien
tgtgtgaccaaatgccgagtttctg

SEQ ID NO: 5151223 - DNA, 25 bp, Homo sapien
gcacatggcagctctcatttcaaca

SEQ ID NO: 5151224 - DNA, 25 bp, Homo sapien
gatacagaatacgtcccagtggttt

SEQ ID NO: 5151225 - DNA, 25 bp, Homo sapien
ctaggatagcattggtgtgaccaat

SEQ ID NO: 5151226 - DNA, 25 bp, Homo sapien
tggcattgaatcatcacggatgcac

SEQ ID NO: 5151227 - DNA, 25 bp, Homo sapien
tgatggatacagctggcttggcaag

SEQ ID NO: 5151228 - DNA, 25 bp, Homo sapien
gtatggagttgtgatggatacagct

SEQ ID NO: 5151229 - DNA, 25 bp, Homo sapien
gatacagctggcttggcaagggtca

SEQ ID NO: 5151230 - DNA, 25 bp, Homo sapien
tgctcctttcccgttgtatggagtt

SEQ ID NO: 5151231 - DNA, 25 bp, Homo sapien
ttctgttagggaagccccatcttct

SEQ ID NO: 5151232 - DNA, 25 bp, Homo sapien
tctgggttctgttagggaagcccca

SEQ ID NO: 5151233 - DNA, 25 bp, Homo sapien
ctgggttctgttagggaagccccat

SEQ ID NO: 5151234 - DNA, 25 bp, Homo sapien
tgccccttatgtacacatcacagtg

SEQ ID NO: 5151235 - DNA, 25 bp, Homo sapien
acatcacagtgataggaaccctgga

SEQ ID NO: 5151236 - DNA, 25 bp, Homo sapien
cagttccatccatgataggagcccc

SEQ ID NO: 5151237 - DNA, 25 bp, Homo sapien
ttaagaatccaaaccggcccatgtc

SEQ ID NO: 5151238 - DNA, 25 bp, Homo sapien
aactaggggtatactggttgctgcc

SEQ ID NO: 5151239 - DNA, 25 bp, Homo sapien
tgtttgaccttagccaggtagggaa

SEQ ID NO: 5151240 - DNA, 25 bp, Homo sapien
tcactgggctatgggtgtagtgttt

SEQ ID NO: 5151241 - DNA, 25 bp, Homo sapien
gctatgggtgtagtgtttgacctta

SEQ ID NO: 5151242 - DNA, 25 bp, Homo sapien
catagcgttttccatggacatcatc

SEQ ID NO: 5151243 - DNA, 25 bp, Homo sapien
catctatctgggagaattggcaact

SEQ ID NO: 5151244 - DNA, 25 bp, Homo sapien
tctgcaaagagcaacgctttacttt

SEQ ID NO: 5151245 - DNA, 25 bp, Homo sapien
tccatataagtcgtagaataacctt

SEQ ID NO: 5151246 - DNA, 25 bp, Homo sapien
gctccacgggctcttctgtactctt

SEQ ID NO: 5151247 - DNA, 25 bp, Homo sapien
tcgatcttcccatctatcagacttg

SEQ ID NO: 5151248 - DNA, 25 bp, Homo sapien
tcccatctatcagacttgggcacaa

SEQ ID NO: 5151249 - DNA, 25 bp, Homo sapien
cttgggcacaaagtgtggcgggttg

SEQ ID NO: 5151250 - DNA, 25 bp, Homo sapien
ccaggtcgatcttcccatctatcag

SEQ ID NO: 5151251 - DNA, 25 bp, Homo sapien
tttgctctgtatcttgctgtgtccc

SEQ ID NO: 5151252 - DNA, 25 bp, Homo sapien
ccagttgcaaaggtgggcgagtgca

SEQ ID NO: 5151253 - DNA, 25 bp, Homo sapien
ctgtgtccccagtactgtggacatg

SEQ ID NO: 5151254 - DNA, 25 bp, Homo sapien
tcccagcagacagttcatctgttgg

SEQ ID NO: 5151255 - DNA, 25 bp, Homo sapien
cagacactcggggtgattgttgctg

SEQ ID NO: 5151256 - DNA, 25 bp, Homo sapien
tcctgtatggccgagagctccaaag

SEQ ID NO: 5151257 - DNA, 25 bp, Homo sapien
tttctgagggaggtggtcagcacct

SEQ ID NO: 5151258 - DNA, 25 bp, Homo sapien
gcagccggtgagtcagacactcggg

SEQ ID NO: 5151259 - DNA, 25 bp, Homo sapien
gaacttccaccttggaataagcgtg

SEQ ID NO: 5151260 - DNA, 25 bp, Homo sapien
ggtgagccggcagctctcacctgag

SEQ ID NO: 5151261 - DNA, 25 bp, Homo sapien
taagcgtgtgtgcttggatcttggc

SEQ ID NO: 5151262 - DNA, 25 bp, Homo sapien
gctttgcttttgtatgtgtagccag

SEQ ID NO: 5151263 - DNA, 25 bp, Homo sapien
cccactggcggtcgtttagagggca

SEQ ID NO: 5151264 - DNA, 25 bp, Homo sapien
gtgttccctgggctcatagggagcc

SEQ ID NO: 5151265 - DNA, 25 bp, Homo sapien
gtccttcgcatcttctctgaattcc

SEQ ID NO: 5151266 - DNA, 25 bp, Homo sapien
catatttctgtccttcgcatcttct

SEQ ID NO: 5151267 - DNA, 25 bp, Homo sapien
taattgtaagtacacagactctggg

SEQ ID NO: 5151268 - DNA, 25 bp, Homo sapien
gaaggcagtccttagggtgtcctga

SEQ ID NO: 5151269 - DNA, 25 bp, Homo sapien
gtgtcagatctgatgggaaccataa

SEQ ID NO: 5151270 - DNA, 25 bp, Homo sapien
ggaaccataatgacccaatgcctat

SEQ ID NO: 5151271 - DNA, 25 bp, Homo sapien
ccaaattccttggcctgcattggag

SEQ ID NO: 5151272 - DNA, 25 bp, Homo sapien
cacgtgaagggcaagtggaagaagc

SEQ ID NO: 5151273 - DNA, 25 bp, Homo sapien
tgcactgctttgtcaggatatttgg

SEQ ID NO: 5151274 - DNA, 25 bp, Homo sapien
catgcgtaagtctaaggccaaattc

SEQ ID NO: 5151275 - DNA, 25 bp, Homo sapien
tgcaggggagtaggcgttggtctgg

SEQ ID NO: 5151276 - DNA, 25 bp, Homo sapien
gtaggcgttggtctggaactgcttc

SEQ ID NO: 5151277 - DNA, 25 bp, Homo sapien
aggcggcaggacacctgtgcacagg

SEQ ID NO: 5151278 - DNA, 25 bp, Homo sapien
ggcggcaggacacctgtgcacaggt

SEQ ID NO: 5151279 - DNA, 25 bp, Homo sapien
ttcttcctgtgtggcgctggtcctt

SEQ ID NO: 5151280 - DNA, 25 bp, Homo sapien
tgtcctgttgcgtccttcccaagcc

SEQ ID NO: 5151281 - DNA, 25 bp, Homo sapien
catcaccccaacttgccggtgaacc

SEQ ID NO: 5151282 - DNA, 25 bp, Homo sapien
tttcattagcttctggcacatcacc

SEQ ID NO: 5151283 - DNA, 25 bp, Homo sapien
agaatctcctctgccgtgttttggt

SEQ ID NO: 5151284 - DNA, 25 bp, Homo sapien
cagaaccttccaaggaaacattctg

SEQ ID NO: 5151285 - DNA, 25 bp, Homo sapien
ttgtggttttcgttcccagaatctc

SEQ ID NO: 5151286 - DNA, 25 bp, Homo sapien
ggttttgaggaagtcgtgtgtgtgc

SEQ ID NO: 5151287 - DNA, 25 bp, Homo sapien
ctgcctgcccagtgttagaccacag

SEQ ID NO: 5151288 - DNA, 25 bp, Homo sapien
tgttgttcggcatcaaacgccgctt

SEQ ID NO: 5151289 - DNA, 25 bp, Homo sapien
cagaggactagtagcttcagacgca

SEQ ID NO: 5151290 - DNA, 25 bp, Homo sapien
ttcagacgcagtcagagctgtagtc

SEQ ID NO: 5151291 - DNA, 25 bp, Homo sapien
tctgctaatcgcctgcggccttctg

SEQ ID NO: 5151292 - DNA, 25 bp, Homo sapien
ctagatttgtacaagactgtcctga

SEQ ID NO: 5151293 - DNA, 25 bp, Homo sapien
agactgtcctgacggcagagattct

SEQ ID NO: 5151294 - DNA, 25 bp, Homo sapien
tgtcctgacggcagagattctcttg

SEQ ID NO: 5151295 - DNA, 25 bp, Homo sapien
tcaagttactagatttgtacaagac

SEQ ID NO: 5151296 - DNA, 25 bp, Homo sapien
agctggctgcagactgaaggccacc

SEQ ID NO: 5151297 - DNA, 25 bp, Homo sapien
aggctttggtcaccaagggtggcat

SEQ ID NO: 5151298 - DNA, 25 bp, Homo sapien
gaggctttggtcaccaagggtggca

SEQ ID NO: 5151299 - DNA, 25 bp, Homo sapien
agactgaaggccacccagaggcttt

SEQ ID NO: 5151300 - DNA, 25 bp, Homo sapien
tcacccctgctggttgcagcgacaa

SEQ ID NO: 5151301 - DNA, 25 bp, Homo sapien
cccttaaaatccagctctcgaaatg

SEQ ID NO: 5151302 - DNA, 25 bp, Homo sapien
aggtccctgccaactgcggtgtgca

SEQ ID NO: 5151303 - DNA, 25 bp, Homo sapien
ggtgtgcacactggcgggccttcac

SEQ ID NO: 5151304 - DNA, 25 bp, Homo sapien
cattctatctggaacccggaaggtg

SEQ ID NO: 5151305 - DNA, 25 bp, Homo sapien
cagggtaggtgatggcgtactcccc

SEQ ID NO: 5151306 - DNA, 25 bp, Homo sapien
tagttgagaaatagccccgcagggt

SEQ ID NO: 5151307 - DNA, 25 bp, Homo sapien
gtgatggcgtactccccacttgcca

SEQ ID NO: 5151308 - DNA, 25 bp, Homo sapien
tggatgagtccatcataaatcttgt

SEQ ID NO: 5151309 - DNA, 25 bp, Homo sapien
gttttgtcgcaaagtcaggtttgca

SEQ ID NO: 5151310 - DNA, 25 bp, Homo sapien
tttcatcattgtcgtgttttgtcgc

SEQ ID NO: 5151311 - DNA, 25 bp, Homo sapien
gatgagtccatcataaatcttgtgg

SEQ ID NO: 5151312 - DNA, 25 bp, Homo sapien
ctgcagttgattttcagacaaaaaa

SEQ ID NO: 5151313 - DNA, 25 bp, Homo sapien
gttgattttcagacaaaaaatccca

SEQ ID NO: 5151314 - DNA, 25 bp, Homo sapien
ttgattttcagacaaaaaatcccag

SEQ ID NO: 5151315 - DNA, 25 bp, Homo sapien
cagttgattttcagacaaaaaatcc

SEQ ID NO: 5151316 - DNA, 25 bp, Homo sapien
caagtgctgaacgagagagtccttt

SEQ ID NO: 5151317 - DNA, 25 bp, Homo sapien
cctttactcgtctgaaaagcatccc

SEQ ID NO: 5151318 - DNA, 25 bp, Homo sapien
tgtctcaaagggctgcgtcataggg

SEQ ID NO: 5151319 - DNA, 25 bp, Homo sapien
catagggatatttgcatgcttctca

SEQ ID NO: 5151320 - DNA, 25 bp, Homo sapien
gttgtttcatatcaaaaaggtcagc

SEQ ID NO: 5151321 - DNA, 25 bp, Homo sapien
gaatttttaagttgtttcatatcaa

SEQ ID NO: 5151322 - DNA, 25 bp, Homo sapien
tgaatttttaagttgtttcatatca

SEQ ID NO: 5151323 - DNA, 25 bp, Homo sapien
taagttgtttcatatcaaaaaggtc

SEQ ID NO: 5151324 - DNA, 25 bp, Homo sapien
aaaggtggtaggtttgtatgtactg

SEQ ID NO: 5151325 - DNA, 25 bp, Homo sapien
ttcccctcaatgtctctaaagctgt

SEQ ID NO: 5151326 - DNA, 25 bp, Homo sapien
aggtggtaggtttgtatgtactgac

SEQ ID NO: 5151327 - DNA, 25 bp, Homo sapien
atccagactgcattcccctcaatgt

SEQ ID NO: 5151328 - DNA, 25 bp, Homo sapien
agaagcggtctattgcacctcagct

SEQ ID NO: 5151329 - DNA, 25 bp, Homo sapien
ttaaaagcaataggcttgggagtcc

SEQ ID NO: 5151330 - DNA, 25 bp, Homo sapien
tgctagcaattatcagtgcctgacc

SEQ ID NO: 5151331 - DNA, 25 bp, Homo sapien
tgtcgtcgagttgtgacagcttcaa

SEQ ID NO: 5151332 - DNA, 25 bp, Homo sapien
cctttcaagcttcaattgtgcaaat

SEQ ID NO: 5151333 - DNA, 25 bp, Homo sapien
gttgtggttgaggatcgtccccaac

SEQ ID NO: 5151334 - DNA, 25 bp, Homo sapien
gttgaggatcgtccccaacagcttt

SEQ ID NO: 5151335 - DNA, 25 bp, Homo sapien
tggttgaggatcgtccccaacagct

SEQ ID NO: 5151336 - DNA, 25 bp, Homo sapien
tatctgcaaggctggcgggggttaa

SEQ ID NO: 5151337 - DNA, 25 bp, Homo sapien
tggcgggggttaaggatttcattgc

SEQ ID NO: 5151338 - DNA, 25 bp, Homo sapien
attgcttccaaaagacgtgagcaag

SEQ ID NO: 5151339 - DNA, 25 bp, Homo sapien
gcttccaaaagacgtgagcaagaga

SEQ ID NO: 5151340 - DNA, 25 bp, Homo sapien
tatcctgcatctcaagtgctcgcaa

SEQ ID NO: 5151341 - DNA, 25 bp, Homo sapien
gtcaagtgtgcagccacgtctatat

SEQ ID NO: 5151342 - DNA, 25 bp, Homo sapien
gcagccacgtctatatcctgcatct

SEQ ID NO: 5151343 - DNA, 25 bp, Homo sapien
tgtgcagccacgtctatatcctgca

SEQ ID NO: 5151344 - DNA, 25 bp, Homo sapien
acatggctgtggtctttaccagccc

SEQ ID NO: 5151345 - DNA, 25 bp, Homo sapien
aacatggctgtggtctttaccagcc

SEQ ID NO: 5151346 - DNA, 25 bp, Homo sapien
tgaacaccccggagagaacatggct

SEQ ID NO: 5151347 - DNA, 25 bp, Homo sapien
tcatggctgtgaacaccccggagag

SEQ ID NO: 5151348 - DNA, 25 bp, Homo sapien
taaaggtgaatccaaactgtctgaa

SEQ ID NO: 5151349 - DNA, 25 bp, Homo sapien
tccaaactgtctgaaacagtagcca

SEQ ID NO: 5151350 - DNA, 25 bp, Homo sapien
tgaacctaaaggtgaatccaaactg

SEQ ID NO: 5151351 - DNA, 25 bp, Homo sapien
tgtctgaaacagtagccactcccca

SEQ ID NO: 5151352 - DNA, 25 bp, Homo sapien
tagcagggagaatacagacagcctt

SEQ ID NO: 5151353 - DNA, 25 bp, Homo sapien
ggagaatacagacagccttacacat

SEQ ID NO: 5151354 - DNA, 25 bp, Homo sapien
gttggtagcagggagaatacagaca

SEQ ID NO: 5151355 - DNA, 25 bp, Homo sapien
cagacagccttacacatctctgtga

SEQ ID NO: 5151356 - DNA, 25 bp, Homo sapien
gcttctcgttaggatgtagaaagac

SEQ ID NO: 5151357 - DNA, 25 bp, Homo sapien
cgttaggatgtagaaagacgtgaaa

SEQ ID NO: 5151358 - DNA, 25 bp, Homo sapien
ttaggtcacctgcttctcgttagga

SEQ ID NO: 5151359 - DNA, 25 bp, Homo sapien
cacctgcttctcgttaggatgtaga

SEQ ID NO: 5151360 - DNA, 25 bp, Homo sapien
tgccattgtacatgcctgccagcag

SEQ ID NO: 5151361 - DNA, 25 bp, Homo sapien
gcgtaattcccgatatccagccaag

SEQ ID NO: 5151362 - DNA, 25 bp, Homo sapien
tactttgttctagagtggtcctgcc

SEQ ID NO: 5151363 - DNA, 25 bp, Homo sapien
ttttattgcctagtggtgctcccag

SEQ ID NO: 5151364 - DNA, 25 bp, Homo sapien
aacatgaccttcacgtggggcctca

SEQ ID NO: 5151365 - DNA, 25 bp, Homo sapien
acatgaccttcacgtggggcctcat

SEQ ID NO: 5151366 - DNA, 25 bp, Homo sapien
caacatgaccttcacgtggggcctc

SEQ ID NO: 5151367 - DNA, 25 bp, Homo sapien
cccaacatgaccttcacgtggggcc

SEQ ID NO: 5151368 - DNA, 25 bp, Homo sapien
gaagcggagcttacacttacccaga

SEQ ID NO: 5151369 - DNA, 25 bp, Homo sapien
tcatctggagactcacaggtggtcc

SEQ ID NO: 5151370 - DNA, 25 bp, Homo sapien
gaatgagtgatagccaccctgagtg

SEQ ID NO: 5151371 - DNA, 25 bp, Homo sapien
cagagtgcagcccatgacagtgtga

SEQ ID NO: 5151372 - DNA, 25 bp, Homo sapien
agagtcttccagtgggagatgccca

SEQ ID NO: 5151373 - DNA, 25 bp, Homo sapien
cacagccaatggtgatgtgaccgtg

SEQ ID NO: 5151374 - DNA, 25 bp, Homo sapien
taaaaatgccagtgcgagctttgct

SEQ ID NO: 5151375 - DNA, 25 bp, Homo sapien
gcggtgaacctaccctgaaacgtga

SEQ ID NO: 5151376 - DNA, 25 bp, Homo sapien
tgacttctgcacaacaaacgtgacc

SEQ ID NO: 5151377 - DNA, 25 bp, Homo sapien
cacaactgtgttcagtggagtctac

SEQ ID NO: 5151378 - DNA, 25 bp, Homo sapien
tgcaatagctgacccattgctgatg

SEQ ID NO: 5151379 - DNA, 25 bp, Homo sapien
cagtgaaacaaaatgctggtagaca

SEQ ID NO: 5151380 - DNA, 25 bp, Homo sapien
catgagaaagtcattgaagagaggc

SEQ ID NO: 5151381 - DNA, 25 bp, Homo sapien
tgtgagtgaagcttgcttgtaatag

SEQ ID NO: 5151382 - DNA, 25 bp, Homo sapien
gaagcttgcttgtaataggtcattt

SEQ ID NO: 5151383 - DNA, 25 bp, Homo sapien
ttttttgtgagtgaagcttgcttgt

SEQ ID NO: 5151384 - DNA, 25 bp, Homo sapien
tgcttgtaataggtcatttaaaagg

SEQ ID NO: 5151385 - DNA, 25 bp, Homo sapien
gaatatacttacgtcttcctgttta

SEQ ID NO: 5151386 - DNA, 25 bp, Homo sapien
ctggtatgcaatattatgaccctgt

SEQ ID NO: 5151387 - DNA, 25 bp, Homo sapien
tactgatttagaatatacttacgtc

SEQ ID NO: 5151388 - DNA, 25 bp, Homo sapien
tattatgaccctgttactgatttag

SEQ ID NO: 5151389 - DNA, 25 bp, Homo sapien
ttagaagtgatggggttccaccgtg

SEQ ID NO: 5151390 - DNA, 25 bp, Homo sapien
ttctgtatctagtccaagaattttt

SEQ ID NO: 5151391 - DNA, 25 bp, Homo sapien
ctgtatctagtccaagaatttttaa

SEQ ID NO: 5151392 - DNA, 25 bp, Homo sapien
gaagtgatggggttccaccgtgtta

SEQ ID NO: 5151393 - DNA, 25 bp, Homo sapien
tagtgccaaaattcactggcaagtc

SEQ ID NO: 5151394 - DNA, 25 bp, Homo sapien
tatgaataaagcaagctagtgccaa

SEQ ID NO: 5151395 - DNA, 25 bp, Homo sapien
tcatattgttacagataccagtagt

SEQ ID NO: 5151396 - DNA, 25 bp, Homo sapien
cctgttctagaacttgatgtaaata

SEQ ID NO: 5151397 - DNA, 25 bp, Homo sapien
ttaaatgaccagatatgtatatctg

SEQ ID NO: 5151398 - DNA, 25 bp, Homo sapien
ctaccactatgtgggcaacagtttg

SEQ ID NO: 5151399 - DNA, 25 bp, Homo sapien
cagtttgatgaatattaattcccaa

SEQ ID NO: 5151400 - DNA, 25 bp, Homo sapien
tatacagggacatagtttagagctt

SEQ ID NO: 5151401 - DNA, 25 bp, Homo sapien
tgggctttacaaggtggattcctga

SEQ ID NO: 5151402 - DNA, 25 bp, Homo sapien
gtgggctttacaaggtggattcctg

SEQ ID NO: 5151403 - DNA, 25 bp, Homo sapien
tgtgggctttacaaggtggattcct

SEQ ID NO: 5151404 - DNA, 25 bp, Homo sapien
cgccccggcgcgaggcaagacggga

SEQ ID NO: 5151405 - DNA, 25 bp, Homo sapien
cgcgaggcaagacgggaaagtcaag

SEQ ID NO: 5151406 - DNA, 25 bp, Homo sapien
aggcaagacgggaaagtcaagatgg

SEQ ID NO: 5151407 - DNA, 25 bp, Homo sapien
ccggcgcgaggcaagacgggaaagt

SEQ ID NO: 5151408 - DNA, 25 bp, Homo sapien
gtagtgacaacttggcggctgctgc

SEQ ID NO: 5151409 - DNA, 25 bp, Homo sapien
agtgacaacttggcggctgctgcca

SEQ ID NO: 5151410 - DNA, 25 bp, Homo sapien
ctagtagtgacaacttggcggctgc

SEQ ID NO: 5151411 - DNA, 25 bp, Homo sapien
tagtagtgacaacttggcggctgct

SEQ ID NO: 5151412 - DNA, 25 bp, Homo sapien
tataaagcgatgaagtccatagtac

SEQ ID NO: 5151413 - DNA, 25 bp, Homo sapien
ggataatgctgaatgtgacaaaacc

SEQ ID NO: 5151414 - DNA, 25 bp, Homo sapien
caacactagacagatgttgcctgat

SEQ ID NO: 5151415 - DNA, 25 bp, Homo sapien
tgatgaagacaacactagacagatg

SEQ ID NO: 5151416 - DNA, 25 bp, Homo sapien
tgtcgccggccaagcgcgccagcga

SEQ ID NO: 5151417 - DNA, 25 bp, Homo sapien
gcgccagcgaagctccctgtccggg

SEQ ID NO: 5151418 - DNA, 25 bp, Homo sapien
gatggacgtcccgaacctgtcctgt

SEQ ID NO: 5151419 - DNA, 25 bp, Homo sapien
aatttctctccggacggatggacag

SEQ ID NO: 5151420 - DNA, 25 bp, Homo sapien
ctctacgccagagcgcggggaggaa

SEQ ID NO: 5151421 - DNA, 25 bp, Homo sapien
acgccagagcgcggggaggaagagg

SEQ ID NO: 5151422 - DNA, 25 bp, Homo sapien
ctacgccagagcgcggggaggaaga

SEQ ID NO: 5151423 - DNA, 25 bp, Homo sapien
gccagagcgcggggaggaagaggcc

SEQ ID NO: 5151424 - DNA, 25 bp, Homo sapien
gcccggccgagctcgatttcctcct

SEQ ID NO: 5151425 - DNA, 25 bp, Homo sapien
cgcccggccgagctcgatttcctcc

SEQ ID NO: 5151426 - DNA, 25 bp, Homo sapien
gcgcccggccgagctcgatttcctc

SEQ ID NO: 5151427 - DNA, 25 bp, Homo sapien
cagtggctcagacatttagggactt

SEQ ID NO: 5151428 - DNA, 25 bp, Homo sapien
tccaggcaaggacactgctgtggct

SEQ ID NO: 5151429 - DNA, 25 bp, Homo sapien
cccaagggacctgattagtgaatgt

SEQ ID NO: 5151430 - DNA, 25 bp, Homo sapien
tctgtaacttccttgaaggctggag

SEQ ID NO: 5151431 - DNA, 25 bp, Homo sapien
cataaacgagtgctgctaagctgcc

SEQ ID NO: 5151432 - DNA, 25 bp, Homo sapien
cagtcctggacttgtgtggtgcagc

SEQ ID NO: 5151433 - DNA, 25 bp, Homo sapien
tggtcctttctacacagcacatgga

SEQ ID NO: 5151434 - DNA, 25 bp, Homo sapien
taagctgccttggatcactagcctc

SEQ ID NO: 5151435 - DNA, 25 bp, Homo sapien
aaggcaggctggtacccactggcgt

SEQ ID NO: 5151436 - DNA, 25 bp, Homo sapien
gaatggctacgtttcctgtatgtgg

SEQ ID NO: 5151437 - DNA, 25 bp, Homo sapien
ccactggcgtgaggaagggataaca

SEQ ID NO: 5151438 - DNA, 25 bp, Homo sapien
gctgggttggtgaaaacatcaaggc

SEQ ID NO: 5151439 - DNA, 25 bp, Homo sapien
tatattaggtacactgattgagcaa

SEQ ID NO: 5151440 - DNA, 25 bp, Homo sapien
tgaaggaagcgattattgctgtaac

SEQ ID NO: 5151441 - DNA, 25 bp, Homo sapien
tattatgtgtccaactgtgtgtttg

SEQ ID NO: 5151442 - DNA, 25 bp, Homo sapien
aactgtgtaattgcatgatgtgccc

SEQ ID NO: 5151443 - DNA, 25 bp, Homo sapien
gggaatccccatattgatgcagata

SEQ ID NO: 5151444 - DNA, 25 bp, Homo sapien
tagtggggggaatccccatattgat

SEQ ID NO: 5151445 - DNA, 25 bp, Homo sapien
ggggggaatccccatattgatgcag

SEQ ID NO: 5151446 - DNA, 25 bp, Homo sapien
tccccatattgatgcagatacccaa

SEQ ID NO: 5151447 - DNA, 25 bp, Homo sapien
taggtctgtggtaattgtgaggtgg

SEQ ID NO: 5151448 - DNA, 25 bp, Homo sapien
gtagttaggtctgtggtaattgtga

SEQ ID NO: 5151449 - DNA, 25 bp, Homo sapien
tgagtagttaggtctgtggtaattg

SEQ ID NO: 5151450 - DNA, 25 bp, Homo sapien
tagttaggtctgtggtaattgtgag

SEQ ID NO: 5151451 - DNA, 25 bp, Homo sapien
tctcctaagcagtcttagccactgg

SEQ ID NO: 5151452 - DNA, 25 bp, Homo sapien
tcagccagagtaatgtggaagttgc

SEQ ID NO: 5151453 - DNA, 25 bp, Homo sapien
tctcttcagaagctatgtctatgta

SEQ ID NO: 5151454 - DNA, 25 bp, Homo sapien
gaacggctgccgagagactcagcca

SEQ ID NO: 5151455 - DNA, 25 bp, Homo sapien
tataaaagataatgctcctcaccaa

SEQ ID NO: 5151456 - DNA, 25 bp, Homo sapien
tatgctacctaattcaactaaatgc

SEQ ID NO: 5151457 - DNA, 25 bp, Homo sapien
ctgtacaactactgtgcccctgaac

SEQ ID NO: 5151458 - DNA, 25 bp, Homo sapien
accaaaattggccaggagcccctct

SEQ ID NO: 5151459 - DNA, 25 bp, Homo sapien
tggtgtctagacaggaaccacctgg

SEQ ID NO: 5151460 - DNA, 25 bp, Homo sapien
aggaaccacctgggtacagctgcat

SEQ ID NO: 5151461 - DNA, 25 bp, Homo sapien
tcagccatggtgtctagacaggaac

SEQ ID NO: 5151462 - DNA, 25 bp, Homo sapien
agcagctgcagaaacccatcacccc

SEQ ID NO: 5151463 - DNA, 25 bp, Homo sapien
gatgattgcctggtaatgcttaagg

SEQ ID NO: 5151464 - DNA, 25 bp, Homo sapien
acatattcttggttttgacacagga

SEQ ID NO: 5151465 - DNA, 25 bp, Homo sapien
taaatttggacgtaaataatcctga

SEQ ID NO: 5151466 - DNA, 25 bp, Homo sapien
aatggctttggctaacctgcttcag

SEQ ID NO: 5151467 - DNA, 25 bp, Homo sapien
gtctgaacgctgcacactggttatg

SEQ ID NO: 5151468 - DNA, 25 bp, Homo sapien
cttacagatatacgacccattgtct

SEQ ID NO: 5151469 - DNA, 25 bp, Homo sapien
tacgacccattgtctgaacgctgca

SEQ ID NO: 5151470 - DNA, 25 bp, Homo sapien
ccattgtctgaacgctgcacactgg

SEQ ID NO: 5151471 - DNA, 25 bp, Homo sapien
atgtagatgggatcagacacgatct

SEQ ID NO: 5151472 - DNA, 25 bp, Homo sapien
tgtagatgggatcagacacgatctc

SEQ ID NO: 5151473 - DNA, 25 bp, Homo sapien
cttgtacttcgatgtagatgggatc

SEQ ID NO: 5151474 - DNA, 25 bp, Homo sapien
acttcgatgtagatgggatcagaca

SEQ ID NO: 5151475 - DNA, 25 bp, Homo sapien
cagaaaatgttgacgggctcaggcg

SEQ ID NO: 5151476 - DNA, 25 bp, Homo sapien
aaggctgtgtttctggtgacattca

SEQ ID NO: 5151477 - DNA, 25 bp, Homo sapien
ttttcaggctgttcgttaacacggc

SEQ ID NO: 5151478 - DNA, 25 bp, Homo sapien
cacggctactgttttgaacccagaa

SEQ ID NO: 5151479 - DNA, 25 bp, Homo sapien
caataagcccacagctcggacttac

SEQ ID NO: 5151480 - DNA, 25 bp, Homo sapien
tcaataagcccacagctcggactta

SEQ ID NO: 5151481 - DNA, 25 bp, Homo sapien
cacgtcagtggttccataaacgcaa

SEQ ID NO: 5151482 - DNA, 25 bp, Homo sapien
cgtcagtggttccataaacgcaaga

SEQ ID NO: 5151483 - DNA, 25 bp, Homo sapien
tcacgtcagtggttccataaacgca

SEQ ID NO: 5151484 - DNA, 25 bp, Homo sapien
gtcagtggttccataaacgcaagac

SEQ ID NO: 5151485 - DNA, 25 bp, Homo sapien
ggcaccaagagcaaggtagccatgg

SEQ ID NO: 5151486 - DNA, 25 bp, Homo sapien
gattaaacccaaggcaccaagagca

SEQ ID NO: 5151487 - DNA, 25 bp, Homo sapien
gcaaggtagccatgggcccaaaagg

SEQ ID NO: 5151488 - DNA, 25 bp, Homo sapien
aagagcaaggtagccatgggcccaa

SEQ ID NO: 5151489 - DNA, 25 bp, Homo sapien
gggcctcacaactgaagaccgccat

SEQ ID NO: 5151490 - DNA, 25 bp, Homo sapien
acggtcagccctttgtcattgtggg

SEQ ID NO: 5151491 - DNA, 25 bp, Homo sapien
attgtgggcctcacaactgaagacc

SEQ ID NO: 5151492 - DNA, 25 bp, Homo sapien
gcactcccttggacacggtcagccc

SEQ ID NO: 5151493 - DNA, 25 bp, Homo sapien
agttctcctttttccttgcactgtt

SEQ ID NO: 5151494 - DNA, 25 bp, Homo sapien
acaagttctcctttttccttgcact

SEQ ID NO: 5151495 - DNA, 25 bp, Homo sapien
caagttctcctttttccttgcactg

SEQ ID NO: 5151496 - DNA, 25 bp, Homo sapien
tctcctttttccttgcactgtttcc

SEQ ID NO: 5151497 - DNA, 25 bp, Homo sapien
gaatgctgcaattcctgaacgggga

SEQ ID NO: 5151498 - DNA, 25 bp, Homo sapien
tgaacggggagtatccatcaaaacc

SEQ ID NO: 5151499 - DNA, 25 bp, Homo sapien
tgtgcagtgctgttacggatgctga

SEQ ID NO: 5151500 - DNA, 25 bp, Homo sapien
gctgttacggatgctgacttcagtt

SEQ ID NO: 5151501 - DNA, 25 bp, Homo sapien
aggctcttcaaacaactcagcactt

SEQ ID NO: 5151502 - DNA, 25 bp, Homo sapien
tataaatgtctacctcagcctgggt

SEQ ID NO: 5151503 - DNA, 25 bp, Homo sapien
tatgtccatgtatataaatgtctac

SEQ ID NO: 5151504 - DNA, 25 bp, Homo sapien
ttaaaaagggctggcccatgcttca

SEQ ID NO: 5151505 - DNA, 25 bp, Homo sapien
taataatgggcttgcagttctgggc

SEQ ID NO: 5151506 - DNA, 25 bp, Homo sapien
gagaaacgagaacccagacgcttgt

SEQ ID NO: 5151507 - DNA, 25 bp, Homo sapien
gggcgattcccagcacaagtctagt

SEQ ID NO: 5151508 - DNA, 25 bp, Homo sapien
catttggtcccgagtcagagtttaa

SEQ ID NO: 5151509 - DNA, 25 bp, Homo sapien
gctagaatccaagggctcactgcag

SEQ ID NO: 5151510 - DNA, 25 bp, Homo sapien
ttcatgcaggaaacaccaatgctgt

SEQ ID NO: 5151511 - DNA, 25 bp, Homo sapien
ccttcagtcgtgctggctagaatcc

SEQ ID NO: 5151512 - DNA, 25 bp, Homo sapien
gagccattactcagcggatcagctt

SEQ ID NO: 5151513 - DNA, 25 bp, Homo sapien
tccttctatatctcatcctccgcat

SEQ ID NO: 5151514 - DNA, 25 bp, Homo sapien
ttccttctatatctcatcctccgca

SEQ ID NO: 5151515 - DNA, 25 bp, Homo sapien
ccttctatatctcatcctccgcatc

SEQ ID NO: 5151516 - DNA, 25 bp, Homo sapien
tctgccacacgtgggatatccggta

SEQ ID NO: 5151517 - DNA, 25 bp, Homo sapien
gatgtccacattatcactagattca

SEQ ID NO: 5151518 - DNA, 25 bp, Homo sapien
gtgacatttaaaggtgctactgatg

SEQ ID NO: 5151519 - DNA, 25 bp, Homo sapien
tgcttagtcggaggcttcatccatc

SEQ ID NO: 5151520 - DNA, 25 bp, Homo sapien
agaccagagtggaatgtgctcagca

SEQ ID NO: 5151521 - DNA, 25 bp, Homo sapien
gaagaccagagtggaatgtgctcag

SEQ ID NO: 5151522 - DNA, 25 bp, Homo sapien
aagaccagagtggaatgtgctcagc

SEQ ID NO: 5151523 - DNA, 25 bp, Homo sapien
gaccagagtggaatgtgctcagcaa

SEQ ID NO: 5151524 - DNA, 25 bp, Homo sapien
tggccagcatcatagccgttgccat

SEQ ID NO: 5151525 - DNA, 25 bp, Homo sapien
tgatggccagcatcatagccgttgc

SEQ ID NO: 5151526 - DNA, 25 bp, Homo sapien
atggccagcatcatagccgttgcca

SEQ ID NO: 5151527 - DNA, 25 bp, Homo sapien
gatggccagcatcatagccgttgcc

SEQ ID NO: 5151528 - DNA, 25 bp, Homo sapien
cactttcctagcaatggtgaaggat

SEQ ID NO: 5151529 - DNA, 25 bp, Homo sapien
cagtcactttcctagcaatggtgaa

SEQ ID NO: 5151530 - DNA, 25 bp, Homo sapien
cctagcaatggtgaaggatagaacc

SEQ ID NO: 5151531 - DNA, 25 bp, Homo sapien
tctcaagccagtcactttcctagca

SEQ ID NO: 5151532 - DNA, 25 bp, Homo sapien
tctggtgacggctgcaatcctcact

SEQ ID NO: 5151533 - DNA, 25 bp, Homo sapien
cactggatcactgaagggcccaact

SEQ ID NO: 5151534 - DNA, 25 bp, Homo sapien
cagagatccgagctcggctgccatt

SEQ ID NO: 5151535 - DNA, 25 bp, Homo sapien
cactgtgcacgtagcattgtggact

SEQ ID NO: 5151536 - DNA, 25 bp, Homo sapien
gaagtgttgagataagcccagcctt

SEQ ID NO: 5151537 - DNA, 25 bp, Homo sapien
agcccttactgggtatagctctcac

SEQ ID NO: 5151538 - DNA, 25 bp, Homo sapien
tcacatcctatcagcccttactggg

SEQ ID NO: 5151539 - DNA, 25 bp, Homo sapien
aggttactttctggcaatctgtgca

SEQ ID NO: 5151540 - DNA, 25 bp, Homo sapien
caatagaccagtcatgggtttgaaa

SEQ ID NO: 5151541 - DNA, 25 bp, Homo sapien
cactggcttgtaacagggaagaaca

SEQ ID NO: 5151542 - DNA, 25 bp, Homo sapien
gagaaacactggcttgtaacaggga

SEQ ID NO: 5151543 - DNA, 25 bp, Homo sapien
tgagataccaatagaccagtcatgg

SEQ ID NO: 5151544 - DNA, 25 bp, Homo sapien
tgccaggcgccggagttgaagaggg

SEQ ID NO: 5151545 - DNA, 25 bp, Homo sapien
tgagcacaggatctgcgttgccagg

SEQ ID NO: 5151546 - DNA, 25 bp, Homo sapien
acaggatctgcgttgccaggcgccg

SEQ ID NO: 5151547 - DNA, 25 bp, Homo sapien
atctgcgttgccaggcgccggagtt

SEQ ID NO: 5151548 - DNA, 25 bp, Homo sapien
caatggctcgccgacagaaggattt

SEQ ID NO: 5151549 - DNA, 25 bp, Homo sapien
ggctcgccgacagaaggatttcttt

SEQ ID NO: 5151550 - DNA, 25 bp, Homo sapien
agttcaatggctcgccgacagaagg

SEQ ID NO: 5151551 - DNA, 25 bp, Homo sapien
ggtaagttcaatggctcgccgacag

SEQ ID NO: 5151552 - DNA, 25 bp, Homo sapien
tgtcaatcacaacatcttctagttt

SEQ ID NO: 5151553 - DNA, 25 bp, Homo sapien
tagaagattcctgtcaatcacaaca

SEQ ID NO: 5151554 - DNA, 25 bp, Homo sapien
aattagaagattcctgtcaatcaca

SEQ ID NO: 5151555 - DNA, 25 bp, Homo sapien
gattcctgtcaatcacaacatcttc

SEQ ID NO: 5151556 - DNA, 25 bp, Homo sapien
tatccatagtataactcagagtcct

SEQ ID NO: 5151557 - DNA, 25 bp, Homo sapien
tcatgtgccagatctgagtttcaaa

SEQ ID NO: 5151558 - DNA, 25 bp, Homo sapien
tgtgctaggcattgaagagaatctt

SEQ ID NO: 5151559 - DNA, 25 bp, Homo sapien
tttcaaggacctgtatgtgctaggc

SEQ ID NO: 5151560 - DNA, 25 bp, Homo sapien
tcctgcttaagatttccttccatta

SEQ ID NO: 5151561 - DNA, 25 bp, Homo sapien
ttcctgcttaagatttccttccatt

SEQ ID NO: 5151562 - DNA, 25 bp, Homo sapien
cctgcttaagatttccttccattac

SEQ ID NO: 5151563 - DNA, 25 bp, Homo sapien
gtcgaatgacatttgggtggctgaa

SEQ ID NO: 5151564 - DNA, 25 bp, Homo sapien
cgatctcccgctgtgaagagttgtc

SEQ ID NO: 5151565 - DNA, 25 bp, Homo sapien
gaagtctttcatgcacgctgcctca

SEQ ID NO: 5151566 - DNA, 25 bp, Homo sapien
gcctcactgagaaactcctcgatct

SEQ ID NO: 5151567 - DNA, 25 bp, Homo sapien
ggtcctgtctccaatcgggaataaa

SEQ ID NO: 5151568 - DNA, 25 bp, Homo sapien
aagtaagtaagtatgcaggtccccg

SEQ ID NO: 5151569 - DNA, 25 bp, Homo sapien
catgaagggtaaaattaccatgggc

SEQ ID NO: 5151570 - DNA, 25 bp, Homo sapien
accatgggctttgggatgccttgag

SEQ ID NO: 5151571 - DNA, 25 bp, Homo sapien
tgaactattgatatacacagcttgg

SEQ ID NO: 5151572 - DNA, 25 bp, Homo sapien
cacagcttggttggatctcaaagac

SEQ ID NO: 5151573 - DNA, 25 bp, Homo sapien
caacccatatgtccctaaacaggtg

SEQ ID NO: 5151574 - DNA, 25 bp, Homo sapien
gataaactgtggtagaagcatacaa

SEQ ID NO: 5151575 - DNA, 25 bp, Homo sapien
ctagatgatagaggaaacaagaaga

SEQ ID NO: 5151576 - DNA, 25 bp, Homo sapien
tagatgatagaggaaacaagaagaa

SEQ ID NO: 5151577 - DNA, 25 bp, Homo sapien
gaggaaacaagaagaaagactatct

SEQ ID NO: 5151578 - DNA, 25 bp, Homo sapien
atgatagaggaaacaagaagaaaga

SEQ ID NO: 5151579 - DNA, 25 bp, Homo sapien
ttcctgttgctcagatactccattc

SEQ ID NO: 5151580 - DNA, 25 bp, Homo sapien
ttgctcagatactccattcccaggg

SEQ ID NO: 5151581 - DNA, 25 bp, Homo sapien
tgcagtttcgagcagctaaatctcg

SEQ ID NO: 5151582 - DNA, 25 bp, Homo sapien
taaatctcgatgaagaaaattcctg

SEQ ID NO: 5151583 - DNA, 25 bp, Homo sapien
gaaatagggagaacctaagtccaca

SEQ ID NO: 5151584 - DNA, 25 bp, Homo sapien
gggcttcttgctaagatggccaggt

SEQ ID NO: 5151585 - DNA, 25 bp, Homo sapien
gcttcttgctaagatggccaggtgg

SEQ ID NO: 5151586 - DNA, 25 bp, Homo sapien
ggcttcttgctaagatggccaggtg

SEQ ID NO: 5151587 - DNA, 25 bp, Homo sapien
cttcttgctaagatggccaggtggg

SEQ ID NO: 5151588 - DNA, 25 bp, Homo sapien
gatgtggactagcaagggcacctgt

SEQ ID NO: 5151589 - DNA, 25 bp, Homo sapien
aacatggagacgcagcatagcagga

SEQ ID NO: 5151590 - DNA, 25 bp, Homo sapien
cactggccctgaggactaagtaagc

SEQ ID NO: 5151591 - DNA, 25 bp, Homo sapien
gagccctctggtggactgatccagg

SEQ ID NO: 5151592 - DNA, 25 bp, Homo sapien
gaagtccgcaacacagacagtcatg

SEQ ID NO: 5151593 - DNA, 25 bp, Homo sapien
tatggcgatccatttaacaggcatc

SEQ ID NO: 5151594 - DNA, 25 bp, Homo sapien
ttttacttgtgtagactcggtctgc

SEQ ID NO: 5151595 - DNA, 25 bp, Homo sapien
caatgcggccttggcggtaataatc

SEQ ID NO: 5151596 - DNA, 25 bp, Homo sapien
agttcatccaggcagtcttcgggct

SEQ ID NO: 5151597 - DNA, 25 bp, Homo sapien
tcttcgggctgcttcaacctgtggc

SEQ ID NO: 5151598 - DNA, 25 bp, Homo sapien
gatagggagtcattccccgcgtagc

SEQ ID NO: 5151599 - DNA, 25 bp, Homo sapien
tcatggttctggaccccaggatagg

SEQ ID NO: 5151600 - DNA, 25 bp, Homo sapien
ctattgactccgaggcctgggtctc

SEQ ID NO: 5151601 - DNA, 25 bp, Homo sapien
gccagttaggaagcagagcgtggcc

SEQ ID NO: 5151602 - DNA, 25 bp, Homo sapien
gggtctcttccccatactgcctggc

SEQ ID NO: 5151603 - DNA, 25 bp, Homo sapien
cccatactgcctggccttgaagacg

SEQ ID NO: 5151604 - DNA, 25 bp, Homo sapien
taatgttatacatctaccaccacaa

SEQ ID NO: 5151605 - DNA, 25 bp, Homo sapien
caaccactaccaacgggacgaagct

SEQ ID NO: 5151606 - DNA, 25 bp, Homo sapien
gtttgactgaaatgcttccttattt

SEQ ID NO: 5151607 - DNA, 25 bp, Homo sapien
ggacgaagctctgattaaaacagtg

SEQ ID NO: 5151608 - DNA, 25 bp, Homo sapien
caaactgagttgttaccaggacagc

SEQ ID NO: 5151609 - DNA, 25 bp, Homo sapien
gaatgtaggcctagacaacggcacg

SEQ ID NO: 5151610 - DNA, 25 bp, Homo sapien
ctttctttatatggcggcgggcaaa

SEQ ID NO: 5151611 - DNA, 25 bp, Homo sapien
tttctaggaagagcacatatgtggc

SEQ ID NO: 5151612 - DNA, 25 bp, Homo sapien
agtggattgtctcccagcatggcac

SEQ ID NO: 5151613 - DNA, 25 bp, Homo sapien
catctctttgtgcaatccatgcctt

SEQ ID NO: 5151614 - DNA, 25 bp, Homo sapien
aaaaagaagtggattgtctcccagc

SEQ ID NO: 5151615 - DNA, 25 bp, Homo sapien
ggcacccatctctttgtgcaatcca

SEQ ID NO: 5151616 - DNA, 25 bp, Homo sapien
ccagcaagagtacattatttcatac

SEQ ID NO: 5151617 - DNA, 25 bp, Homo sapien
ggcggtctaagggatcggttctcca

SEQ ID NO: 5151618 - DNA, 25 bp, Homo sapien
ggttctccagcaagagtacattatt

SEQ ID NO: 5151619 - DNA, 25 bp, Homo sapien
taagggatcggttctccagcaagag

SEQ ID NO: 5151620 - DNA, 25 bp, Homo sapien
ggagtcgtcagcaaacaaaagttca

SEQ ID NO: 5151621 - DNA, 25 bp, Homo sapien
cagcatgctcgaatgggaccaggag

SEQ ID NO: 5151622 - DNA, 25 bp, Homo sapien
aataacgtctgcttggttccgaacg

SEQ ID NO: 5151623 - DNA, 25 bp, Homo sapien
gagtcagggtcgatgttcaagtcca

SEQ ID NO: 5151624 - DNA, 25 bp, Homo sapien
aaatacatcaagaccagaagccaag

SEQ ID NO: 5151625 - DNA, 25 bp, Homo sapien
caaatgttaatatcaaggagcagct

SEQ ID NO: 5151626 - DNA, 25 bp, Homo sapien
catggagttcacttggtaaggaaga

SEQ ID NO: 5151627 - DNA, 25 bp, Homo sapien
tttttggaatgtctccccgcacctc

SEQ ID NO: 5151628 - DNA, 25 bp, Homo sapien
ttatacaactttaaacattgaatga

SEQ ID NO: 5151629 - DNA, 25 bp, Homo sapien
gttatacaactttaaacattgaatg

SEQ ID NO: 5151630 - DNA, 25 bp, Homo sapien
tatacaactttaaacattgaatgaa

SEQ ID NO: 5151631 - DNA, 25 bp, Homo sapien
agttatacaactttaaacattgaat

SEQ ID NO: 5151632 - DNA, 25 bp, Homo sapien
ttattaggaagccatatcagaaaat

SEQ ID NO: 5151633 - DNA, 25 bp, Homo sapien
attaggaagccatatcagaaaatta

SEQ ID NO: 5151634 - DNA, 25 bp, Homo sapien
tattaggaagccatatcagaaaatt

SEQ ID NO: 5151635 - DNA, 25 bp, Homo sapien
ttaggaagccatatcagaaaattaa

SEQ ID NO: 5151636 - DNA, 25 bp, Homo sapien
ttccttatctacagaccctggtgtg

SEQ ID NO: 5151637 - DNA, 25 bp, Homo sapien
tttgcaaaggccacaaggccgctgc

SEQ ID NO: 5151638 - DNA, 25 bp, Homo sapien
caaggaccaggcattaagggaattc

SEQ ID NO: 5151639 - DNA, 25 bp, Homo sapien
caagaatggtcagagcaattgcccc

SEQ ID NO: 5151640 - DNA, 25 bp, Homo sapien
gctacttaccatcgataagaaactg

SEQ ID NO: 5151641 - DNA, 25 bp, Homo sapien
tgtttgaactagtcaccatcaggtt

SEQ ID NO: 5151642 - DNA, 25 bp, Homo sapien
tcatagatatgagcatacctttcta

SEQ ID NO: 5151643 - DNA, 25 bp, Homo sapien
acagattcttttcaaaccctcagaa

SEQ ID NO: 5151644 - DNA, 25 bp, Homo sapien
aatagctaatatctatcacctgaga

SEQ ID NO: 5151645 - DNA, 25 bp, Homo sapien
atatctatcacctgagagtacaggg

SEQ ID NO: 5151646 - DNA, 25 bp, Homo sapien
taatatctatcacctgagagtacag

SEQ ID NO: 5151647 - DNA, 25 bp, Homo sapien
cattcgagccggcaacggcaacccc

SEQ ID NO: 5151648 - DNA, 25 bp, Homo sapien
atacttttgcctgcagctaaccaat

SEQ ID NO: 5151649 - DNA, 25 bp, Homo sapien
tacttttgcctgcagctaaccaatg

SEQ ID NO: 5151650 - DNA, 25 bp, Homo sapien
acttttgcctgcagctaaccaatgg

SEQ ID NO: 5151651 - DNA, 25 bp, Homo sapien
gaggacatagtttcctcccctcagg

SEQ ID NO: 5151652 - DNA, 25 bp, Homo sapien
tgaaatcgttttagttacgagagaa

SEQ ID NO: 5151653 - DNA, 25 bp, Homo sapien
tctgaaatcgttttagttacgagag

SEQ ID NO: 5151654 - DNA, 25 bp, Homo sapien
agtctgaaatcgttttagttacgag

SEQ ID NO: 5151655 - DNA, 25 bp, Homo sapien
agtgaggggtaagtctgaaatcgtt

SEQ ID NO: 5151656 - DNA, 25 bp, Homo sapien
cgggaggcagggcttagggctctga

SEQ ID NO: 5151657 - DNA, 25 bp, Homo sapien
tcagggcctagcgtgggcgtgaaga

SEQ ID NO: 5151658 - DNA, 25 bp, Homo sapien
gcgtgaagatagaagaggagccgga

SEQ ID NO: 5151659 - DNA, 25 bp, Homo sapien
agaggcgccgtgcagttctgggaaa

SEQ ID NO: 5151660 - DNA, 25 bp, Homo sapien
gttgactgtctctaaccagagcccg

SEQ ID NO: 5151661 - DNA, 25 bp, Homo sapien
gactgtctctaaccagagcccgagc

SEQ ID NO: 5151662 - DNA, 25 bp, Homo sapien
gtcgttgactgtctctaaccagagc

SEQ ID NO: 5151663 - DNA, 25 bp, Homo sapien
agcccggctaccgagcggcaggcgg

SEQ ID NO: 5151664 - DNA, 25 bp, Homo sapien
aatcctgacggctcttgcctgcagc

SEQ ID NO: 5151665 - DNA, 25 bp, Homo sapien
agggccgtcccatgcgcaatcctga

SEQ ID NO: 5151666 - DNA, 25 bp, Homo sapien
cctcagtaacagtccgagcgctcgg

SEQ ID NO: 5151667 - DNA, 25 bp, Homo sapien
acagtccgagcgctcggacccgagg

SEQ ID NO: 5151668 - DNA, 25 bp, Homo sapien
gagtcgaatcccaaagatgctgcta

SEQ ID NO: 5151669 - DNA, 25 bp, Homo sapien
tggctgcatccggacaggaagagtc

SEQ ID NO: 5151670 - DNA, 25 bp, Homo sapien
gagagattcctgatccagccaaaac

SEQ ID NO: 5151671 - DNA, 25 bp, Homo sapien
gctgctagatgtgccgagagattcc

SEQ ID NO: 5151672 - DNA, 25 bp, Homo sapien
gaaactgaagcgctggcaagtcctc

SEQ ID NO: 5151673 - DNA, 25 bp, Homo sapien
aaactgaagcgctggcaagtcctcc

SEQ ID NO: 5151674 - DNA, 25 bp, Homo sapien
cagcagccatagtgattagcattat

SEQ ID NO: 5151675 - DNA, 25 bp, Homo sapien
attcacatcctaaagtagctactgg

SEQ ID NO: 5151676 - DNA, 25 bp, Homo sapien
taaaaatgggatatactgggcccac

SEQ ID NO: 5151677 - DNA, 25 bp, Homo sapien
tatgtctaagatctttcaatggctc

SEQ ID NO: 5151678 - DNA, 25 bp, Homo sapien
ttcctaaatatcaaaggtcctgatt

SEQ ID NO: 5151679 - DNA, 25 bp, Homo sapien
tgtagagttaaacatagttttccta

SEQ ID NO: 5151680 - DNA, 25 bp, Homo sapien
tttcctaaatatcaaaggtcctgat

SEQ ID NO: 5151681 - DNA, 25 bp, Homo sapien
ttttcctaaatatcaaaggtcctga

SEQ ID NO: 5151682 - DNA, 25 bp, Homo sapien
acaggccctacctaatgaatatttt

SEQ ID NO: 5151683 - DNA, 25 bp, Homo sapien
tcagtattgacacagaaaagacagg

SEQ ID NO: 5151684 - DNA, 25 bp, Homo sapien
ggtagttctggtatctcagtattga

SEQ ID NO: 5151685 - DNA, 25 bp, Homo sapien
ggccataaagggtttatcacaatca

SEQ ID NO: 5151686 - DNA, 25 bp, Homo sapien
gacaggtatgatacttcaaatgcca

SEQ ID NO: 5151687 - DNA, 25 bp, Homo sapien
cacactatggtaaacttcacaggcc

SEQ ID NO: 5151688 - DNA, 25 bp, Homo sapien
tagaatgctcattgtgacaggtatg

SEQ ID NO: 5151689 - DNA, 25 bp, Homo sapien
acaggcccagaacaatggaatgact

SEQ ID NO: 5151690 - DNA, 25 bp, Homo sapien
acctgtgaatcactgttgcaatcta

SEQ ID NO: 5151691 - DNA, 25 bp, Homo sapien
tgtgaatcactgttgcaatctaagt

SEQ ID NO: 5151692 - DNA, 25 bp, Homo sapien
tcactgttgcaatctaagttttcat

SEQ ID NO: 5151693 - DNA, 25 bp, Homo sapien
gaatcactgttgcaatctaagtttt

SEQ ID NO: 5151694 - DNA, 25 bp, Homo sapien
aaattccgataaaacattacttcag

SEQ ID NO: 5151695 - DNA, 25 bp, Homo sapien
gcccagccacgtatcttacttatta

SEQ ID NO: 5151696 - DNA, 25 bp, Homo sapien
cagttgatacttgtattcagtggga

SEQ ID NO: 5151697 - DNA, 25 bp, Homo sapien
gataccacctttatcaaaattccga

SEQ ID NO: 5151698 - DNA, 25 bp, Homo sapien
tgaggagtacactgatgtgtacttt

SEQ ID NO: 5151699 - DNA, 25 bp, Homo sapien
tcacttcagaatttacaaaagaaca

SEQ ID NO: 5151700 - DNA, 25 bp, Homo sapien
tgcctcataatctcactaaccaagg

SEQ ID NO: 5151701 - DNA, 25 bp, Homo sapien
tgagattatgggtgcgagccattgt

SEQ ID NO: 5151702 - DNA, 25 bp, Homo sapien
gcccggcctacatgagtttacgata

SEQ ID NO: 5151703 - DNA, 25 bp, Homo sapien
tctccttaatgaggatagtgttgcc

SEQ ID NO: 5151704 - DNA, 25 bp, Homo sapien
ttgccattggcagggaaagtgttag

SEQ ID NO: 5151705 - DNA, 25 bp, Homo sapien
taaaatgttctataattcatcaggg

SEQ ID NO: 5151706 - DNA, 25 bp, Homo sapien
ggtttgaaacatttctgatatttat

SEQ ID NO: 5151707 - DNA, 25 bp, Homo sapien
gatctttcctggtttgaaacatttc

SEQ ID NO: 5151708 - DNA, 25 bp, Homo sapien
tgaaacatttctgatatttattagt

SEQ ID NO: 5151709 - DNA, 25 bp, Homo sapien
ttgaaacatttctgatatttattag

SEQ ID NO: 5151710 - DNA, 25 bp, Homo sapien
taaagatatgaaacccatctttttg

SEQ ID NO: 5151711 - DNA, 25 bp, Homo sapien
gatatgaaacccatctttttgtgtt

SEQ ID NO: 5151712 - DNA, 25 bp, Homo sapien
tgtattctccgttttaatagaaaca

SEQ ID NO: 5151713 - DNA, 25 bp, Homo sapien
tgcatctgtattctccgttttaata

SEQ ID NO: 5151714 - DNA, 25 bp, Homo sapien
gctaccaaacaagacctcagactgg

SEQ ID NO: 5151715 - DNA, 25 bp, Homo sapien
agagatccctctacttgtatacacg

SEQ ID NO: 5151716 - DNA, 25 bp, Homo sapien
tgctaatttactcatctcaccggga

SEQ ID NO: 5151717 - DNA, 25 bp, Homo sapien
gatagcaataataaaccatgtgccg

SEQ ID NO: 5151718 - DNA, 25 bp, Homo sapien
tctgatgcagagatatatccatgag

SEQ ID NO: 5151719 - DNA, 25 bp, Homo sapien
atcattaggggccaatctgatgcag

SEQ ID NO: 5151720 - DNA, 25 bp, Homo sapien
gggccaatctgatgcagagatatat

SEQ ID NO: 5151721 - DNA, 25 bp, Homo sapien
cagagatatatccatgaggcccaat

SEQ ID NO: 5151722 - DNA, 25 bp, Homo sapien
gcagaccacgtcagccagagtatgc

SEQ ID NO: 5151723 - DNA, 25 bp, Homo sapien
cgtcagccagagtatgccatataat

SEQ ID NO: 5151724 - DNA, 25 bp, Homo sapien
gccagagtatgccatataatatata

SEQ ID NO: 5151725 - DNA, 25 bp, Homo sapien
gaccacgtcagccagagtatgccat

SEQ ID NO: 5151726 - DNA, 25 bp, Homo sapien
aaataacagctgcaatccagaactg

SEQ ID NO: 5151727 - DNA, 25 bp, Homo sapien
aataacagctgcaatccagaactgg

SEQ ID NO: 5151728 - DNA, 25 bp, Homo sapien
taacagctgcaatccagaactggat

SEQ ID NO: 5151729 - DNA, 25 bp, Homo sapien
aaaaaataacagctgcaatccagaa

SEQ ID NO: 5151730 - DNA, 25 bp, Homo sapien
gttgctgatgttttggtattcacta

SEQ ID NO: 5151731 - DNA, 25 bp, Homo sapien
tggtattcactataaaaaactgctt

SEQ ID NO: 5151732 - DNA, 25 bp, Homo sapien
tataaaaaactgctttttcaagcat

SEQ ID NO: 5151733 - DNA, 25 bp, Homo sapien
ttgacagtccagtgttgctgatgtt

SEQ ID NO: 5151734 - DNA, 25 bp, Homo sapien
cacaatgatcacgagaaggcgagcc

SEQ ID NO: 5151735 - DNA, 25 bp, Homo sapien
aatcaactccgcaaatatcaataag

SEQ ID NO: 5151736 - DNA, 25 bp, Homo sapien
tagcccaggctcacaatgatcacga

SEQ ID NO: 5151737 - DNA, 25 bp, Homo sapien
gagccaacgtcctcttaatcgcaga

SEQ ID NO: 5151738 - DNA, 25 bp, Homo sapien
ttaagtatagaagccccagtccgat

SEQ ID NO: 5151739 - DNA, 25 bp, Homo sapien
tcacccggtgcatgactgttcctaa

SEQ ID NO: 5151740 - DNA, 25 bp, Homo sapien
tccgatcacccggtgcatgactgtt

SEQ ID NO: 5151741 - DNA, 25 bp, Homo sapien
gctgcaaagattaagtatagaagcc

SEQ ID NO: 5151742 - DNA, 25 bp, Homo sapien
cacagcaataacaaaaaggggtggt

SEQ ID NO: 5151743 - DNA, 25 bp, Homo sapien
tcacagcaataacaaaaaggggtgg

SEQ ID NO: 5151744 - DNA, 25 bp, Homo sapien
cagcaataacaaaaaggggtggtag

SEQ ID NO: 5151745 - DNA, 25 bp, Homo sapien
gactgcttaagtctaggagatggag

SEQ ID NO: 5151746 - DNA, 25 bp, Homo sapien
ttgaggccagccaggaactcaagac

SEQ ID NO: 5151747 - DNA, 25 bp, Homo sapien
ctgcttaagtctaggagatggaggc

SEQ ID NO: 5151748 - DNA, 25 bp, Homo sapien
aggactgcttaagtctaggagatgg

SEQ ID NO: 5151749 - DNA, 25 bp, Homo sapien
taaaggaatacaatatatatggtgt

SEQ ID NO: 5151750 - DNA, 25 bp, Homo sapien
tgtgccacaaagctatgtacaattt

SEQ ID NO: 5151751 - DNA, 25 bp, Homo sapien
aggcgtgtgccacaaagctatgtac

SEQ ID NO: 5151752 - DNA, 25 bp, Homo sapien
gcgtgtgccacaaagctatgtacaa

SEQ ID NO: 5151753 - DNA, 25 bp, Homo sapien
aaaaatggagtcaataactgctaaa

SEQ ID NO: 5151754 - DNA, 25 bp, Homo sapien
aaaatggagtcaataactgctaaaa

SEQ ID NO: 5151755 - DNA, 25 bp, Homo sapien
tcccacgtcatcttcttctgtcacc

SEQ ID NO: 5151756 - DNA, 25 bp, Homo sapien
cagagttctcactgacacaggtttc

SEQ ID NO: 5151757 - DNA, 25 bp, Homo sapien
ttcccacgtcatcttcttctgtcac

SEQ ID NO: 5151758 - DNA, 25 bp, Homo sapien
accagagttctcactgacacaggtt

SEQ ID NO: 5151759 - DNA, 25 bp, Homo sapien
tctgaggtcaacaggcaggttcatc

SEQ ID NO: 5151760 - DNA, 25 bp, Homo sapien
caggagagtccccttaacaagcagt

SEQ ID NO: 5151761 - DNA, 25 bp, Homo sapien
aacaagcagtcctgtgggacctaca

SEQ ID NO: 5151762 - DNA, 25 bp, Homo sapien
tgaaggaccatactccctaacttgt

SEQ ID NO: 5151763 - DNA, 25 bp, Homo sapien
taaaacccctctaagtgagacactc

SEQ ID NO: 5151764 - DNA, 25 bp, Homo sapien
caacacgggatagagcagtgcacgc

SEQ ID NO: 5151765 - DNA, 25 bp, Homo sapien
gagacactctttacagatcacattg

SEQ ID NO: 5151766 - DNA, 25 bp, Homo sapien
aaaaacacggaagacccatgatgcg

SEQ ID NO: 5151767 - DNA, 25 bp, Homo sapien
cttagccttagggtcttcatagttt

SEQ ID NO: 5151768 - DNA, 25 bp, Homo sapien
tagccttagggtcttcatagtttgt

SEQ ID NO: 5151769 - DNA, 25 bp, Homo sapien
ttcttagccttagggtcttcatagt

SEQ ID NO: 5151770 - DNA, 25 bp, Homo sapien
ttagccttagggtcttcatagtttg

SEQ ID NO: 5151771 - DNA, 25 bp, Homo sapien
taacaatactaagataatttactgt

SEQ ID NO: 5151772 - DNA, 25 bp, Homo sapien
cctttgaaggaatataacaatacta

SEQ ID NO: 5151773 - DNA, 25 bp, Homo sapien
agtcacctttgaaggaatataacaa

SEQ ID NO: 5151774 - DNA, 25 bp, Homo sapien
tgaaggaatataacaatactaagat

SEQ ID NO: 5151775 - DNA, 25 bp, Homo sapien
gtccaccccataaacactatagaag

SEQ ID NO: 5151776 - DNA, 25 bp, Homo sapien
cttagttgtccaccccataaacact

SEQ ID NO: 5151777 - DNA, 25 bp, Homo sapien
aatgtcttagttgtccaccccataa

SEQ ID NO: 5151778 - DNA, 25 bp, Homo sapien
aattctaaatgtcttagttgtccac

SEQ ID NO: 5151779 - DNA, 25 bp, Homo sapien
aaggaagctccaaaatgcatcgtca

SEQ ID NO: 5151780 - DNA, 25 bp, Homo sapien
gctccaaaatgcatcgtcaacccag

SEQ ID NO: 5151781 - DNA, 25 bp, Homo sapien
aaaaaggaagctccaaaatgcatcg

SEQ ID NO: 5151782 - DNA, 25 bp, Homo sapien
atgcatcgtcaacccagcgttccat

SEQ ID NO: 5151783 - DNA, 25 bp, Homo sapien
tgaattcctcaatttcatcatcaga

SEQ ID NO: 5151784 - DNA, 25 bp, Homo sapien
catcagaatcatctattaagggcat

SEQ ID NO: 5151785 - DNA, 25 bp, Homo sapien
catgaattcctcaatttcatcatca

SEQ ID NO: 5151786 - DNA, 25 bp, Homo sapien
catcatcagaatcatctattaaggg

SEQ ID NO: 5151787 - DNA, 25 bp, Homo sapien
ttgtatgcccactcattaatgatat

SEQ ID NO: 5151788 - DNA, 25 bp, Homo sapien
tgattttcggaatgttaaaacagcc

SEQ ID NO: 5151789 - DNA, 25 bp, Homo sapien
gcaaccctgggataaagtccacttg

SEQ ID NO: 5151790 - DNA, 25 bp, Homo sapien
cttgatcatgattgtctttctatat

SEQ ID NO: 5151791 - DNA, 25 bp, Homo sapien
tcagaagtggcaggcttagctgttc

SEQ ID NO: 5151792 - DNA, 25 bp, Homo sapien
tttcttctacccacttcaaatcttc

SEQ ID NO: 5151793 - DNA, 25 bp, Homo sapien
tcttctacccacttcaaatcttcat

SEQ ID NO: 5151794 - DNA, 25 bp, Homo sapien
tattttcttctacccacttcaaatc

SEQ ID NO: 5151795 - DNA, 25 bp, Homo sapien
ggaatattttcttctacccacttca

SEQ ID NO: 5151796 - DNA, 25 bp, Homo sapien
ctgaatccactaacactggaagagc

SEQ ID NO: 5151797 - DNA, 25 bp, Homo sapien
tgaatccactaacactggaagagct

SEQ ID NO: 5151798 - DNA, 25 bp, Homo sapien
tttctgaagagaacattttttcagc

SEQ ID NO: 5151799 - DNA, 25 bp, Homo sapien
tctgaagagaacattttttcagcca

SEQ ID NO: 5151800 - DNA, 25 bp, Homo sapien
cttttctgaagagaacattttttca

SEQ ID NO: 5151801 - DNA, 25 bp, Homo sapien
cacattatcttttctgaagagaaca

SEQ ID NO: 5151802 - DNA, 25 bp, Homo sapien
ccagcttgccagttaggaagtgctc

SEQ ID NO: 5151803 - DNA, 25 bp, Homo sapien
agttcaccagtaatgggtctcccag

SEQ ID NO: 5151804 - DNA, 25 bp, Homo sapien
tgtgcacttgtgttcccctgagctc

SEQ ID NO: 5151805 - DNA, 25 bp, Homo sapien
tcagcagcatcgcatgtacacatgg

SEQ ID NO: 5151806 - DNA, 25 bp, Homo sapien
gcctttcaagtttagaacattctac

SEQ ID NO: 5151807 - DNA, 25 bp, Homo sapien
tctcaatttacaaggttagaactcc

SEQ ID NO: 5151808 - DNA, 25 bp, Homo sapien
tgtatctttggtcatgaaagcagca

SEQ ID NO: 5151809 - DNA, 25 bp, Homo sapien
ggtataaaacatggttgaagcttaa

SEQ ID NO: 5151810 - DNA, 25 bp, Homo sapien
ggtgggaacccattactgcagcaga

SEQ ID NO: 5151811 - DNA, 25 bp, Homo sapien
tgtacagcctagtgcaacagactcg

SEQ ID NO: 5151812 - DNA, 25 bp, Homo sapien
gatgagctgctcagtagccctaggt

SEQ ID NO: 5151813 - DNA, 25 bp, Homo sapien
gagcacccctcttgcgtatgtaagg

SEQ ID NO: 5151814 - DNA, 25 bp, Homo sapien
taagtatcccctggaaagaggcatt

SEQ ID NO: 5151815 - DNA, 25 bp, Homo sapien
cctgacaataaggaccagaggtgag

SEQ ID NO: 5151816 - DNA, 25 bp, Homo sapien
gaggcagtcttcaaccctggtctga

SEQ ID NO: 5151817 - DNA, 25 bp, Homo sapien
tgcagagccctatgcatgcatgtga

SEQ ID NO: 5151818 - DNA, 25 bp, Homo sapien
agatttttatatacaagatcattaa

SEQ ID NO: 5151819 - DNA, 25 bp, Homo sapien
aaaccttacagaactcattgttgtt

SEQ ID NO: 5151820 - DNA, 25 bp, Homo sapien
ccttacagaactcattgttgttcta

SEQ ID NO: 5151821 - DNA, 25 bp, Homo sapien
ttttatatacaagatcattaaatct

SEQ ID NO: 5151822 - DNA, 25 bp, Homo sapien
caccacgttatagagtatgacagag

SEQ ID NO: 5151823 - DNA, 25 bp, Homo sapien
tcaatccgtcactaaacacatccag

SEQ ID NO: 5151824 - DNA, 25 bp, Homo sapien
ttaccatctggtatgctctgaggct

SEQ ID NO: 5151825 - DNA, 25 bp, Homo sapien
gctctttgggcatagttataactgc

SEQ ID NO: 5151826 - DNA, 25 bp, Homo sapien
gggtagtccctagttgtccagcacc

SEQ ID NO: 5151827 - DNA, 25 bp, Homo sapien
agtttggatgggctctaggctctag

SEQ ID NO: 5151828 - DNA, 25 bp, Homo sapien
cccagctttgcggtgtttagggcaa

SEQ ID NO: 5151829 - DNA, 25 bp, Homo sapien
tggtatgtcatgcaggatcacacag

SEQ ID NO: 5151830 - DNA, 25 bp, Homo sapien
gcctccgctgccgagtttgtcccag

SEQ ID NO: 5151831 - DNA, 25 bp, Homo sapien
ttgccagtcggaatcccgctgcctg

SEQ ID NO: 5151832 - DNA, 25 bp, Homo sapien
tttgtcccagcgatgcggcagccgt

SEQ ID NO: 5151833 - DNA, 25 bp, Homo sapien
cgggccttgcgagggtccaggtgcg

SEQ ID NO: 5151834 - DNA, 25 bp, Homo sapien
ctcggggcaggcgaggatcaggagc

SEQ ID NO: 5151835 - DNA, 25 bp, Homo sapien
gagcagaaggaagagcgcgcgcgga

SEQ ID NO: 5151836 - DNA, 25 bp, Homo sapien
agagcgcgcgcggagagctgggcac

SEQ ID NO: 5151837 - DNA, 25 bp, Homo sapien
caggcgaggatcaggagcagaagga

SEQ ID NO: 5151838 - DNA, 25 bp, Homo sapien
ggagagaggcgtgaaggacactggc

SEQ ID NO: 5151839 - DNA, 25 bp, Homo sapien
tggagagaggcgtgaaggacactgg

SEQ ID NO: 5151840 - DNA, 25 bp, Homo sapien
ctggagagaggcgtgaaggacactg

SEQ ID NO: 5151841 - DNA, 25 bp, Homo sapien
agaggcgggagggacactggcgtgg

SEQ ID NO: 5151842 - DNA, 25 bp, Homo sapien
agagaggcgggagggacactggcct

SEQ ID NO: 5151843 - DNA, 25 bp, Homo sapien
agagaggcgggagggacgctggcct

SEQ ID NO: 5151844 - DNA, 25 bp, Homo sapien
agaggcgcgcgggacaggggagaga

SEQ ID NO: 5151845 - DNA, 25 bp, Homo sapien
ctggagagaggcgggagggacactg

SEQ ID NO: 5151846 - DNA, 25 bp, Homo sapien
ggagagaggcgggagggacactgac

SEQ ID NO: 5151847 - DNA, 25 bp, Homo sapien
tggagagaggcgggagggacactga

SEQ ID NO: 5151848 - DNA, 25 bp, Homo sapien
gcaagccgcctgtatatgtgtttaa

SEQ ID NO: 5151849 - DNA, 25 bp, Homo sapien
tgagattcgaacaaatgccaacggc

SEQ ID NO: 5151850 - DNA, 25 bp, Homo sapien
tgggaaatgccacaaactgctgaga

SEQ ID NO: 5151851 - DNA, 25 bp, Homo sapien
catccgagtggaaagtggcaagccc

SEQ ID NO: 5151852 - DNA, 25 bp, Homo sapien
gtgcaggtagcggggtcggcagtcc

SEQ ID NO: 5151853 - DNA, 25 bp, Homo sapien
gtattgtgcaggtagcggggtcggc

SEQ ID NO: 5151854 - DNA, 25 bp, Homo sapien
attgtgcaggtagcggggtcggcag

SEQ ID NO: 5151855 - DNA, 25 bp, Homo sapien
gcaggtagcggggtcggcagtccat

SEQ ID NO: 5151856 - DNA, 25 bp, Homo sapien
gacacagtggatagccacagaggag

SEQ ID NO: 5151857 - DNA, 25 bp, Homo sapien
gaacctctcatggtggaatttggag

SEQ ID NO: 5151858 - DNA, 25 bp, Homo sapien
tgacttgggacagatgcgctgacaa

SEQ ID NO: 5151859 - DNA, 25 bp, Homo sapien
ttgttctgatctccccaatgaggtg

SEQ ID NO: 5151860 - DNA, 25 bp, Homo sapien
ctcattcttgaatgtgccagggaga

SEQ ID NO: 5151861 - DNA, 25 bp, Homo sapien
gggccagaaatgaccccaagggagc

SEQ ID NO: 5151862 - DNA, 25 bp, Homo sapien
ggagcaaggggacttccattctcct

SEQ ID NO: 5151863 - DNA, 25 bp, Homo sapien
gggctgcccttgacaggatgtagat

SEQ ID NO: 5151864 - DNA, 25 bp, Homo sapien
gcctcggtattatcttcagcaagtc

SEQ ID NO: 5151865 - DNA, 25 bp, Homo sapien
caatgcccaagccaagcaaggagct

SEQ ID NO: 5151866 - DNA, 25 bp, Homo sapien
cacctgtggattgggttgtgccttt

SEQ ID NO: 5151867 - DNA, 25 bp, Homo sapien
tgaggtccccaatgcccaagccaag

SEQ ID NO: 5151868 - DNA, 25 bp, Homo sapien
ccaaggctcggagtcttcagcgtct

SEQ ID NO: 5151869 - DNA, 25 bp, Homo sapien
aaggctcggagtcttcagcgtctga

SEQ ID NO: 5151870 - DNA, 25 bp, Homo sapien
tgctggccaaggctcggagtcttca

SEQ ID NO: 5151871 - DNA, 25 bp, Homo sapien
ggccaaggctcggagtcttcagcgt

SEQ ID NO: 5151872 - DNA, 25 bp, Homo sapien
ctgtttgggctcactccgaacctgc

SEQ ID NO: 5151873 - DNA, 25 bp, Homo sapien
tgtttgggctcactccgaacctgct

SEQ ID NO: 5151874 - DNA, 25 bp, Homo sapien
ctggaagacgcagaccagtgctgag

SEQ ID NO: 5151875 - DNA, 25 bp, Homo sapien
tggaagacgcagaccagtgctgaga

SEQ ID NO: 5151876 - DNA, 25 bp, Homo sapien
tggagtagaggtggcatggatggtt

SEQ ID NO: 5151877 - DNA, 25 bp, Homo sapien
tcatctaacttgacaccaatggcaa

SEQ ID NO: 5151878 - DNA, 25 bp, Homo sapien
gcaatgtttgcagagaaccagttag

SEQ ID NO: 5151879 - DNA, 25 bp, Homo sapien
taaaggggtgagtacttcatctaac

SEQ ID NO: 5151880 - DNA, 25 bp, Homo sapien
accagttagagaaggaacaacagat

SEQ ID NO: 5151881 - DNA, 25 bp, Homo sapien
cactagggattgataggactgagcc

SEQ ID NO: 5151882 - DNA, 25 bp, Homo sapien
caaagagcttcttcgctgtaacaaa

SEQ ID NO: 5151883 - DNA, 25 bp, Homo sapien
gaatagttcagctactggccggcag

SEQ ID NO: 5151884 - DNA, 25 bp, Homo sapien
tctcactcccgtgcaaagttcaggt

SEQ ID NO: 5151885 - DNA, 25 bp, Homo sapien
tgaagctcactcaacgcaacgtaaa

SEQ ID NO: 5151886 - DNA, 25 bp, Homo sapien
gactcagtcccacatgcttgtctga

SEQ ID NO: 5151887 - DNA, 25 bp, Homo sapien
ggtccaaaccgcgtttgaagctcac

SEQ ID NO: 5151888 - DNA, 25 bp, Homo sapien
tctgagcttccgaaatcgccgaagc

SEQ ID NO: 5151889 - DNA, 25 bp, Homo sapien
agaagacatcgccgccaccacccat

SEQ ID NO: 5151890 - DNA, 25 bp, Homo sapien
ggagagaagacatcgccgccaccac

SEQ ID NO: 5151891 - DNA, 25 bp, Homo sapien
gagaagacatcgccgccaccaccca

SEQ ID NO: 5151892 - DNA, 25 bp, Homo sapien
tgcggagagaagacatcgccgccac

SEQ ID NO: 5151893 - DNA, 25 bp, Homo sapien
cctcggcgaagcgtgtctcctggcc

SEQ ID NO: 5151894 - DNA, 25 bp, Homo sapien
cggatggccgagaggagctgctgtt

SEQ ID NO: 5151895 - DNA, 25 bp, Homo sapien
ccacagagttctgcagcgcggccag

SEQ ID NO: 5151896 - DNA, 25 bp, Homo sapien
ggctcttcatgtggcggatgccctc

SEQ ID NO: 5151897 - DNA, 25 bp, Homo sapien
agtgctcgagtgctgcgctgccgcc

SEQ ID NO: 5151898 - DNA, 25 bp, Homo sapien
ccagctgggagcgtctcggggagag

SEQ ID NO: 5151899 - DNA, 25 bp, Homo sapien
gggagagtgctcgagtgctgcgctg

SEQ ID NO: 5151900 - DNA, 25 bp, Homo sapien
tctcggggagagtgctcgagtgctg

SEQ ID NO: 5151901 - DNA, 25 bp, Homo sapien
gacgtgatagttgttaaggccagaa

SEQ ID NO: 5151902 - DNA, 25 bp, Homo sapien
aagtggcgccttgcaacagtttggt

SEQ ID NO: 5151903 - DNA, 25 bp, Homo sapien
ggaggaacgcagtgctttccactca

SEQ ID NO: 5151904 - DNA, 25 bp, Homo sapien
cagtgcgtgatctaaaagtggcgcc

SEQ ID NO: 5151905 - DNA, 25 bp, Homo sapien
tctgttggcgagaagcacatcctac

SEQ ID NO: 5151906 - DNA, 25 bp, Homo sapien
gacatgaatccgctgaggctgctct

SEQ ID NO: 5151907 - DNA, 25 bp, Homo sapien
catcccaaatgggagctgaaggccc

SEQ ID NO: 5151908 - DNA, 25 bp, Homo sapien
ttagcatgtaaggagtgagacccac

SEQ ID NO: 5151909 - DNA, 25 bp, Homo sapien
cccagggttgcaggtaaaatggact

SEQ ID NO: 5151910 - DNA, 25 bp, Homo sapien
gatccactaagtacttgcttccaaa

SEQ ID NO: 5151911 - DNA, 25 bp, Homo sapien
aatggacttcgtgatccactaagta

SEQ ID NO: 5151912 - DNA, 25 bp, Homo sapien
tccaaactttctgccgtctgcgggg

SEQ ID NO: 5151913 - DNA, 25 bp, Homo sapien
tgctcccctgtccaggtgccattgg

SEQ ID NO: 5151914 - DNA, 25 bp, Homo sapien
tccaggtgccattgggaagacacac

SEQ ID NO: 5151915 - DNA, 25 bp, Homo sapien
ggctgctcccctgtccaggtgccat

SEQ ID NO: 5151916 - DNA, 25 bp, Homo sapien
gtccaggtgccattgggaagacaca

SEQ ID NO: 5151917 - DNA, 25 bp, Homo sapien
atgcagctctttggtgtggaagtca

SEQ ID NO: 5151918 - DNA, 25 bp, Homo sapien
aaggtgggctgcatcatgcagctct

SEQ ID NO: 5151919 - DNA, 25 bp, Homo sapien
tttttgatagcacatgctgtctgag

SEQ ID NO: 5151920 - DNA, 25 bp, Homo sapien
tgtctgagtaggcatcccgaaggtg

SEQ ID NO: 5151921 - DNA, 25 bp, Homo sapien
ttttgctcttgtcacccaggctgga

SEQ ID NO: 5151922 - DNA, 25 bp, Homo sapien
tgatccactcaccttttctttttct

SEQ ID NO: 5151923 - DNA, 25 bp, Homo sapien
gttttgctcttgtcacccaggctgg

SEQ ID NO: 5151924 - DNA, 25 bp, Homo sapien
aaaagaaggcattgagcctgatctg

SEQ ID NO: 5151925 - DNA, 25 bp, Homo sapien
caaaagaaggcattgagcctgatct

SEQ ID NO: 5151926 - DNA, 25 bp, Homo sapien
aaagaaggcattgagcctgatctgt

SEQ ID NO: 5151927 - DNA, 25 bp, Homo sapien
gggcagatcactaggccgtgaagtt

SEQ ID NO: 5151928 - DNA, 25 bp, Homo sapien
acaccagtatcttgtagcttggccc

SEQ ID NO: 5151929 - DNA, 25 bp, Homo sapien
taggccgtgaagttgtgggcagaga

SEQ ID NO: 5151930 - DNA, 25 bp, Homo sapien
gcttggccccagtagggccagtgct

SEQ ID NO: 5151931 - DNA, 25 bp, Homo sapien
ctgtaacccacaacccttctgctcc

SEQ ID NO: 5151932 - DNA, 25 bp, Homo sapien
cctgtaacccacaacccttctgctc

SEQ ID NO: 5151933 - DNA, 25 bp, Homo sapien
ccctgtaacccacaacccttctgct

SEQ ID NO: 5151934 - DNA, 25 bp, Homo sapien
gccctgtaacccacaacccttctgc

SEQ ID NO: 5151935 - DNA, 25 bp, Homo sapien
ctgacagcggttcccagtccttcct

SEQ ID NO: 5151936 - DNA, 25 bp, Homo sapien
tgctgacagcggttcccagtccttc

SEQ ID NO: 5151937 - DNA, 25 bp, Homo sapien
atgctgacagcggttcccagtcctt

SEQ ID NO: 5151938 - DNA, 25 bp, Homo sapien
gatgctgacagcggttcccagtcct

SEQ ID NO: 5151939 - DNA, 25 bp, Homo sapien
ggtaggctatttatgaccaattcaa

SEQ ID NO: 5151940 - DNA, 25 bp, Homo sapien
tggtaggctatttatgaccaattca

SEQ ID NO: 5151941 - DNA, 25 bp, Homo sapien
acgctgtcgccggcggcgccgctca

SEQ ID NO: 5151942 - DNA, 25 bp, Homo sapien
ggagtcgccggccacgctgccctcg

SEQ ID NO: 5151943 - DNA, 25 bp, Homo sapien
cggcgcgcggctgaaggcggagtcg

SEQ ID NO: 5151944 - DNA, 25 bp, Homo sapien
cccgctccacctgcgcacagcgcgg

SEQ ID NO: 5151945 - DNA, 25 bp, Homo sapien
cgcaggaagccacccgtgccggcag

SEQ ID NO: 5151946 - DNA, 25 bp, Homo sapien
ccccagtgtcctggcggagcccgcg

SEQ ID NO: 5151947 - DNA, 25 bp, Homo sapien
ggccaggccttctgagaccgcgcgc

SEQ ID NO: 5151948 - DNA, 25 bp, Homo sapien
ggccttctgagaccgcgcgcaggaa

SEQ ID NO: 5151949 - DNA, 25 bp, Homo sapien
ttcacgcaggcgtgcatgcagagcc

SEQ ID NO: 5151950 - DNA, 25 bp, Homo sapien
cctgcccgtagagctcacactcgtt

SEQ ID NO: 5151951 - DNA, 25 bp, Homo sapien
acagctcttcccgtcagccagagtt

SEQ ID NO: 5151952 - DNA, 25 bp, Homo sapien
gcaggtgcaacggtaagagcccggg

SEQ ID NO: 5151953 - DNA, 25 bp, Homo sapien
aatggagacgtcttcacgtagctca

SEQ ID NO: 5151954 - DNA, 25 bp, Homo sapien
actggaagcttccaccggtgttgat

SEQ ID NO: 5151955 - DNA, 25 bp, Homo sapien
acactggaagcttccaccggtgttg

SEQ ID NO: 5151956 - DNA, 25 bp, Homo sapien
ttcacgtagctcacattgccgctgc

SEQ ID NO: 5151957 - DNA, 25 bp, Homo sapien
tgtggccatgcggaagagcgtgatg

SEQ ID NO: 5151958 - DNA, 25 bp, Homo sapien
tctgaacgctgcatcacaaagtggc

SEQ ID NO: 5151959 - DNA, 25 bp, Homo sapien
acaaagtggccgcggctgttcccac

SEQ ID NO: 5151960 - DNA, 25 bp, Homo sapien
gatcagatccccagtctgccggtct

SEQ ID NO: 5151961 - DNA, 25 bp, Homo sapien
tattccgacatgtcgacgtccacct

SEQ ID NO: 5151962 - DNA, 25 bp, Homo sapien
aggagcggtccaggtattccgacat

SEQ ID NO: 5151963 - DNA, 25 bp, Homo sapien
tgaccttggacacgtggttggcctg

SEQ ID NO: 5151964 - DNA, 25 bp, Homo sapien
ccttggacacgtggttggcctggaa

SEQ ID NO: 5151965 - DNA, 25 bp, Homo sapien
caacgctgccctagaagcctgggtg

SEQ ID NO: 5151966 - DNA, 25 bp, Homo sapien
tgcataatctaagggaagggcctca

SEQ ID NO: 5151967 - DNA, 25 bp, Homo sapien
taagaacaacgtgctgggtcatggg

SEQ ID NO: 5151968 - DNA, 25 bp, Homo sapien
gaagggctgatagtcacctgacaca

SEQ ID NO: 5151969 - DNA, 25 bp, Homo sapien
catttgtactttggtgctgtgggca

SEQ ID NO: 5151970 - DNA, 25 bp, Homo sapien
catcctaagcagtcagccatttgta

SEQ ID NO: 5151971 - DNA, 25 bp, Homo sapien
tactcttagtacagagtggagctct

SEQ ID NO: 5151972 - DNA, 25 bp, Homo sapien
gaagcaggtttgatgacggcagatc

SEQ ID NO: 5151973 - DNA, 25 bp, Homo sapien
tctgtccctaatcgcataaatgctg

SEQ ID NO: 5151974 - DNA, 25 bp, Homo sapien
ccattgcagtctactctgagtgaca

SEQ ID NO: 5151975 - DNA, 25 bp, Homo sapien
gagtgactggtcgaataaacaatgg

SEQ ID NO: 5151976 - DNA, 25 bp, Homo sapien
ccaggaaagtgtgaaatagcatgct

SEQ ID NO: 5151977 - DNA, 25 bp, Homo sapien
gcctgactcactggtagactatagt

SEQ ID NO: 5151978 - DNA, 25 bp, Homo sapien
ccttaggctgggtgactaataaaca

SEQ ID NO: 5151979 - DNA, 25 bp, Homo sapien
catgatgaaaggtagcagacacact

SEQ ID NO: 5151980 - DNA, 25 bp, Homo sapien
gaggacctgtttcatgacccataaa

SEQ ID NO: 5151981 - DNA, 25 bp, Homo sapien
gatatcgaattcttggtcaacagct

SEQ ID NO: 5151982 - DNA, 25 bp, Homo sapien
tgtatcagcctaaaggactcccttt

SEQ ID NO: 5151983 - DNA, 25 bp, Homo sapien
tctcgagtgttcttttgtatcagcc

SEQ ID NO: 5151984 - DNA, 25 bp, Homo sapien
tgtgtgaatacaagttactctcgag

SEQ ID NO: 5151985 - DNA, 25 bp, Homo sapien
cgcccatgcgtgttcaagactgttc

SEQ ID NO: 5151986 - DNA, 25 bp, Homo sapien
tccataatggatgggacagagagct

SEQ ID NO: 5151987 - DNA, 25 bp, Homo sapien
cagccattggaataggagaggagca

SEQ ID NO: 5151988 - DNA, 25 bp, Homo sapien
taaagagtactttaacgcccatgcg

SEQ ID NO: 5151989 - DNA, 25 bp, Homo sapien
cagtctcaagtcttatcagcagaat

SEQ ID NO: 5151990 - DNA, 25 bp, Homo sapien
aagaatttcacagtgcagtctcaag

SEQ ID NO: 5151991 - DNA, 25 bp, Homo sapien
cagcagaatcaaccaagctgaagaa

SEQ ID NO: 5151992 - DNA, 25 bp, Homo sapien
tagaagaatttcacagtgcagtctc

SEQ ID NO: 5151993 - DNA, 25 bp, Homo sapien
tcaaatagaagtatttttcttcttc

SEQ ID NO: 5151994 - DNA, 25 bp, Homo sapien
ttctcaaatagaagtatttttcttc

SEQ ID NO: 5151995 - DNA, 25 bp, Homo sapien
atagggttctcaaatagaagtattt

SEQ ID NO: 5151996 - DNA, 25 bp, Homo sapien
aatagggttctcaaatagaagtatt

SEQ ID NO: 5151997 - DNA, 25 bp, Homo sapien
gattctttctgctcaacctgggtgg

SEQ ID NO: 5151998 - DNA, 25 bp, Homo sapien
tggtatagagggtccatgagacctc

SEQ ID NO: 5151999 - DNA, 25 bp, Homo sapien
tagccttagctcttcagtgcaaatg

SEQ ID NO: 5152000 - DNA, 25 bp, Homo sapien
taagctacttcataaaaaggcaagg

SEQ ID NO: 5152001 - DNA, 25 bp, Homo sapien
tggattctttaagcagggagcaagt

SEQ ID NO: 5152002 - DNA, 25 bp, Homo sapien
caatcctctggtggaacaactccta

SEQ ID NO: 5152003 - DNA, 25 bp, Homo sapien
gaggccattgtcagatcaagaaact

SEQ ID NO: 5152004 - DNA, 25 bp, Homo sapien
aacataatctatcacaggagtcggc

SEQ ID NO: 5152005 - DNA, 25 bp, Homo sapien
tcagtatcttagtgtctcagggaat

SEQ ID NO: 5152006 - DNA, 25 bp, Homo sapien
tcagtagagacatatgattcttcct

SEQ ID NO: 5152007 - DNA, 25 bp, Homo sapien
atcacagatcgctataacagatgta

SEQ ID NO: 5152008 - DNA, 25 bp, Homo sapien
catggcaccccctcaaaaattacaa

SEQ ID NO: 5152009 - DNA, 25 bp, Homo sapien
atccacacaaaaattgtaacggaca

SEQ ID NO: 5152010 - DNA, 25 bp, Homo sapien
tccacacaaaaattgtaacggacat

SEQ ID NO: 5152011 - DNA, 25 bp, Homo sapien
cagcccacgggacctacgagggcca

SEQ ID NO: 5152012 - DNA, 25 bp, Homo sapien
acgggacctacgagggccaccagcg

SEQ ID NO: 5152013 - DNA, 25 bp, Homo sapien
gggaggcagcccacgggacctacga

SEQ ID NO: 5152014 - DNA, 25 bp, Homo sapien
accagcgcttctgctcccggcgcag

SEQ ID NO: 5152015 - DNA, 25 bp, Homo sapien
ggcaagagagattcctccgcgagcc

SEQ ID NO: 5152016 - DNA, 25 bp, Homo sapien
gaaacaggcggctcgagaaaatggc

SEQ ID NO: 5152017 - DNA, 25 bp, Homo sapien
tggccgtaacggtgatttctcctca

SEQ ID NO: 5152018 - DNA, 25 bp, Homo sapien
ttggaggagagtgcccgtcaatcac

SEQ ID NO: 5152019 - DNA, 25 bp, Homo sapien
tattaacaaccacgccagagagatg

SEQ ID NO: 5152020 - DNA, 25 bp, Homo sapien
taaaaactcacggttactagtgagc

SEQ ID NO: 5152021 - DNA, 25 bp, Homo sapien
ccgccgacaggtgacgaagtggtaa

SEQ ID NO: 5152022 - DNA, 25 bp, Homo sapien
cggttactagtgagcgacacagaca

SEQ ID NO: 5152023 - DNA, 25 bp, Homo sapien
tcctctcatccgacagaaagacaga

SEQ ID NO: 5152024 - DNA, 25 bp, Homo sapien
taagagtgcgcgtcatggaactgac

SEQ ID NO: 5152025 - DNA, 25 bp, Homo sapien
aactgacggagccacacagagacgt

SEQ ID NO: 5152026 - DNA, 25 bp, Homo sapien
cacagagacgtctaggtcatgcagg

SEQ ID NO: 5152027 - DNA, 25 bp, Homo sapien
cagtattttggaagcccgcagatta

SEQ ID NO: 5152028 - DNA, 25 bp, Homo sapien
tgggaaacactgatcgagtatagcg

SEQ ID NO: 5152029 - DNA, 25 bp, Homo sapien
aatccttgagacaaagcctagctcc

SEQ ID NO: 5152030 - DNA, 25 bp, Homo sapien
gtatagcggttctcaatttggcaca

SEQ ID NO: 5152031 - DNA, 25 bp, Homo sapien
aagcagggccactgtgtttcacaac

SEQ ID NO: 5152032 - DNA, 25 bp, Homo sapien
acattcctgtgtctgatcgctctga

SEQ ID NO: 5152033 - DNA, 25 bp, Homo sapien
tgaactgatggcatgacctggtgaa

SEQ ID NO: 5152034 - DNA, 25 bp, Homo sapien
gaacagagttctccggccgctctga

SEQ ID NO: 5152035 - DNA, 25 bp, Homo sapien
tataaatgcccaaaatcccagtcca

SEQ ID NO: 5152036 - DNA, 25 bp, Homo sapien
cagcaactgataccagagtaacgat

SEQ ID NO: 5152037 - DNA, 25 bp, Homo sapien
cacgtcagatgaatttttaactaag

SEQ ID NO: 5152038 - DNA, 25 bp, Homo sapien
aagatttagacaagtgtcacgtcag

SEQ ID NO: 5152039 - DNA, 25 bp, Homo sapien
tggccatttggcattcaaaaaaggg

SEQ ID NO: 5152040 - DNA, 25 bp, Homo sapien
tgcatgacagcaatcataggaacaa

SEQ ID NO: 5152041 - DNA, 25 bp, Homo sapien
taggaacaatctagcaacaggcagc

SEQ ID NO: 5152042 - DNA, 25 bp, Homo sapien
gatgatgataccgacttctgctcca

SEQ ID NO: 5152043 - DNA, 25 bp, Homo sapien
accaggtgttaggtgcgtggctgtg

SEQ ID NO: 5152044 - DNA, 25 bp, Homo sapien
cattgggccattgtatttcagcctg

SEQ ID NO: 5152045 - DNA, 25 bp, Homo sapien
taaatcatatgaagccagaaaatca

SEQ ID NO: 5152046 - DNA, 25 bp, Homo sapien
gctagagtaagctgtcattgggcca

SEQ ID NO: 5152047 - DNA, 25 bp, Homo sapien
tcaagagtgtccatacaatcaatgc

SEQ ID NO: 5152048 - DNA, 25 bp, Homo sapien
gagccaagggcacactaccaaagtt

SEQ ID NO: 5152049 - DNA, 25 bp, Homo sapien
tacttgatatggcagacactgtcct

SEQ ID NO: 5152050 - DNA, 25 bp, Homo sapien
agcatatgccaatttgagccaaggg

SEQ ID NO: 5152051 - DNA, 25 bp, Homo sapien
gctcaagccagtcttagaatttctc

SEQ ID NO: 5152052 - DNA, 25 bp, Homo sapien
acaaatgtttttcataatctgaaaa

SEQ ID NO: 5152053 - DNA, 25 bp, Homo sapien
ttggtcatatttaatacaaatgttt

SEQ ID NO: 5152054 - DNA, 25 bp, Homo sapien
ttaaaaagcaatatatctatctata

SEQ ID NO: 5152055 - DNA, 25 bp, Homo sapien
ttttaaaaagcaatatatctatcta

SEQ ID NO: 5152056 - DNA, 25 bp, Homo sapien
aaatcctgcatcgtctatttcacca

SEQ ID NO: 5152057 - DNA, 25 bp, Homo sapien
cttcaaatcctgcatcgtctatttc

SEQ ID NO: 5152058 - DNA, 25 bp, Homo sapien
tcctgcatcgtctatttcaccatct

SEQ ID NO: 5152059 - DNA, 25 bp, Homo sapien
caccatcttctaattcgccatcttc

SEQ ID NO: 5152060 - DNA, 25 bp, Homo sapien
ctcctcagtgtgggactctgtcata

SEQ ID NO: 5152061 - DNA, 25 bp, Homo sapien
ctctgtcataaaaaggaatttggtt

SEQ ID NO: 5152062 - DNA, 25 bp, Homo sapien
ggaatttggttgattcatatttggg

SEQ ID NO: 5152063 - DNA, 25 bp, Homo sapien
ctcagtgtgggactctgtcataaaa

SEQ ID NO: 5152064 - DNA, 25 bp, Homo sapien
tgaatcaaggctgtagtccgaacta

SEQ ID NO: 5152065 - DNA, 25 bp, Homo sapien
gctgtagtccgaactatcatcacta

SEQ ID NO: 5152066 - DNA, 25 bp, Homo sapien
ttctgtatgttcaacatctgaatca

SEQ ID NO: 5152067 - DNA, 25 bp, Homo sapien
caacatctgaatcaaggctgtagtc

SEQ ID NO: 5152068 - DNA, 25 bp, Homo sapien
aaatggaatgtcataatccctgtag

SEQ ID NO: 5152069 - DNA, 25 bp, Homo sapien
ggaatgtcataatccctgtagaaac

SEQ ID NO: 5152070 - DNA, 25 bp, Homo sapien
ctgagtaaatggaatgtcataatcc

SEQ ID NO: 5152071 - DNA, 25 bp, Homo sapien
gagtaaatggaatgtcataatccct

SEQ ID NO: 5152072 - DNA, 25 bp, Homo sapien
tgctacagcttgggtgaacttttaa

SEQ ID NO: 5152073 - DNA, 25 bp, Homo sapien
agatgttattgcttaataggtgctg

SEQ ID NO: 5152074 - DNA, 25 bp, Homo sapien
ttgcttaataggtgctgagtttctg

SEQ ID NO: 5152075 - DNA, 25 bp, Homo sapien
tgttattgcttaataggtgctgagt

SEQ ID NO: 5152076 - DNA, 25 bp, Homo sapien
taaatatataccccaataaactgaa

SEQ ID NO: 5152077 - DNA, 25 bp, Homo sapien
atataccccaataaactgaaagaag

SEQ ID NO: 5152078 - DNA, 25 bp, Homo sapien
agacagttggacatagaatcaccat

SEQ ID NO: 5152079 - DNA, 25 bp, Homo sapien
ttacagcctatgtctgataaaatac

SEQ ID NO: 5152080 - DNA, 25 bp, Homo sapien
aatttacagcctatgtctgataaaa

SEQ ID NO: 5152081 - DNA, 25 bp, Homo sapien
gcctatgtctgataaaataccagaa

SEQ ID NO: 5152082 - DNA, 25 bp, Homo sapien
cagcctatgtctgataaaataccag

SEQ ID NO: 5152083 - DNA, 25 bp, Homo sapien
gagcagccccgcttttctagagtgg

SEQ ID NO: 5152084 - DNA, 25 bp, Homo sapien
caccacgttgtatgagttttccagg

SEQ ID NO: 5152085 - DNA, 25 bp, Homo sapien
caaaacgcactcatgggcgagggtc

SEQ ID NO: 5152086 - DNA, 25 bp, Homo sapien
taatagtcccctaagaatgcacgtt

SEQ ID NO: 5152087 - DNA, 25 bp, Homo sapien
tgtagcttcctgatatatgtccacg

SEQ ID NO: 5152088 - DNA, 25 bp, Homo sapien
ggtgctgtactcatcatattcttta

SEQ ID NO: 5152089 - DNA, 25 bp, Homo sapien
ccttctttgatgttatgtagcttcc

SEQ ID NO: 5152090 - DNA, 25 bp, Homo sapien
tttgttatgttgacccttctttgat

SEQ ID NO: 5152091 - DNA, 25 bp, Homo sapien
catcactgtagttaccgaagttgtc

SEQ ID NO: 5152092 - DNA, 25 bp, Homo sapien
gtattgtttcagctgattggcaaaa

SEQ ID NO: 5152093 - DNA, 25 bp, Homo sapien
gattggcaaaatcttcctctgtttc

SEQ ID NO: 5152094 - DNA, 25 bp, Homo sapien
tctgtttcctgaccgtagttaccaa

SEQ ID NO: 5152095 - DNA, 25 bp, Homo sapien
ttttcttcggcaagccacgtccacg

SEQ ID NO: 5152096 - DNA, 25 bp, Homo sapien
tcgtttgattttcttcggcaagcca

SEQ ID NO: 5152097 - DNA, 25 bp, Homo sapien
gaaagtcatccgatactgaaaacac

SEQ ID NO: 5152098 - DNA, 25 bp, Homo sapien
tgaaaacacattaggccctttattg

SEQ ID NO: 5152099 - DNA, 25 bp, Homo sapien
tgaggttctttcaaacataacaatt

SEQ ID NO: 5152100 - DNA, 25 bp, Homo sapien
ctagagaagtatcattaaaatcaca

SEQ ID NO: 5152101 - DNA, 25 bp, Homo sapien
ttttggaggttattgatactcattt

SEQ ID NO: 5152102 - DNA, 25 bp, Homo sapien
gctttctttgccatcaaataaatta

SEQ ID NO: 5152103 - DNA, 25 bp, Homo sapien
taaattcctgagtcataaccttcca

SEQ ID NO: 5152104 - DNA, 25 bp, Homo sapien
aataaattcctgagtcataaccttc

SEQ ID NO: 5152105 - DNA, 25 bp, Homo sapien
gattaataaattcctgagtcataac

SEQ ID NO: 5152106 - DNA, 25 bp, Homo sapien
aattcctgagtcataaccttccatt

SEQ ID NO: 5152107 - DNA, 25 bp, Homo sapien
tctccaactctgcatcatgatcaaa

SEQ ID NO: 5152108 - DNA, 25 bp, Homo sapien
tatgcatataaatgcagttctctcc

SEQ ID NO: 5152109 - DNA, 25 bp, Homo sapien
agttctctcctttggtacaatatcc

SEQ ID NO: 5152110 - DNA, 25 bp, Homo sapien
ccttgtaaataaaatttgcagatct

SEQ ID NO: 5152111 - DNA, 25 bp, Homo sapien
tatcaaacatactcttacagaggtg

SEQ ID NO: 5152112 - DNA, 25 bp, Homo sapien
acagaggtgaataatcaaataccac

SEQ ID NO: 5152113 - DNA, 25 bp, Homo sapien
gaaggagtatttgccttaccaaata

SEQ ID NO: 5152114 - DNA, 25 bp, Homo sapien
caaatgagaatttagggtctggtga

SEQ ID NO: 5152115 - DNA, 25 bp, Homo sapien
tttagttagatcatcatgggaaaat

SEQ ID NO: 5152116 - DNA, 25 bp, Homo sapien
tctttagttagatcatcatgggaaa

SEQ ID NO: 5152117 - DNA, 25 bp, Homo sapien
ctttagttagatcatcatgggaaaa

SEQ ID NO: 5152118 - DNA, 25 bp, Homo sapien
tcttcatttatgagttcttcatcag

SEQ ID NO: 5152119 - DNA, 25 bp, Homo sapien
ggaagaggagttatgccacgctttc

SEQ ID NO: 5152120 - DNA, 25 bp, Homo sapien
tatgcgctaaatccacagtaggttt

SEQ ID NO: 5152121 - DNA, 25 bp, Homo sapien
aatctgtctgaaaatcgtcttcagg
